United States Patent Application Publication US 2025/0084491 A1 - sequence listing, part 2

SEQ ID NO: 18711 - DNA, 75 bp, synthetic construct
  source 1..75: mol_type = other DNA
atgccatgacggtccactattaccggctgcgggattacgccctgcaacatccggaatgcagtgccattatgcgca

SEQ ID NO: 18712 - DNA, 75 bp, synthetic construct
  source 1..75: mol_type = other DNA
actgcgcggggatatgaagtcccgttttgaagcctacgccaccgggatcaactggggaatttactctcccaatga

SEQ ID NO: 18713 - DNA, 75 bp, synthetic construct
  source 1..75: mol_type = other DNA
cactgccgggcaggaagttgaattaccggaaatcacacaggaaaaacagcgcgaaaccgttcagttgtgggattg

SEQ ID NO: 18714 - DNA, 75 bp, synthetic construct
  source 1..75: mol_type = other DNA
accctaaaaccagcgattggcatagcaaggcttcgaagtatttaaattccaatattgtagaaaaagttgatgatg

SEQ ID NO: 18715 - DNA, 75 bp, synthetic construct
  source 1..75: mol_type = other DNA
ctgaaatctttaatgtcgatatacgcactattgatcgctggcaaactcaggggctccctcagatatctggtggag

SEQ ID NO: 18716 - DNA, 75 bp, synthetic construct
  source 1..75: mol_type = other DNA
acagtggtgggccgattttctggatgcaaacagagaaaaatttatcagtccatttgaatatgcaaagattaataa

SEQ ID NO: 18717 - DNA, 75 bp, synthetic construct
  source 1..75: mol_type = other DNA
tatccgggtaaagtatccccgtttgagttcaccacacttgatgtgatcgcccgactcaggcaggagacggtcatt

SEQ ID NO: 18718 - DNA, 75 bp, synthetic construct
  source 1..75: mol_type = other DNA
aaagaccatattgtcatcacgcctctgtccgggttgacgaaaaagagcgtcaggtccgctgtaaaatctgcggtg

SEQ ID NO: 18719 - DNA, 75 bp, synthetic construct
  source 1..75: mol_type = other DNA
gagacagcaaaccacctatatggcggcgtgtgctggttccagagcaaatcccctttagtaaacttcatgccgtga

SEQ ID NO: 18720 - DNA, 75 bp, synthetic construct
  source 1..75: mol_type = other DNA
tctgaagcgcagtcccgtattcaggacgccgactatgcgaccgaagtgtccaacatgtcgaaagcgcagattatc

SEQ ID NO: 18721 - DNA, 75 bp, synthetic construct
  source 1..75: mol_type = other DNA
cggtgcgcaaaatgagaatgcgccaaaggcaagcgacattaacgcaacgcttggtctgatccgcgaaaacaatga

SEQ ID NO: 18722 - DNA, 75 bp, synthetic construct
  source 1..75: mol_type = other DNA
acactgtatccggaaaacatctgtatttttggtattgtcactcacgtgatacacaggacgcgggagttacgctga

SEQ ID NO: 18723 - DNA, 75 bp, synthetic construct
  source 1..75: mol_type = other DNA
cgcgctacagcctgcatcgcttgcgccactggattgccctgccgatcggctttgctttgttctggcatgacacct

SEQ ID NO: 18724 - DNA, 75 bp, synthetic construct
  source 1..75: mol_type = other DNA
atgggcgcactccccaataggaaatacgcggtcgttacccgctcaggttggacatcaaatgatgacaatgtagtt

SEQ ID NO: 18725 - DNA, 75 bp, synthetic construct
  source 1..75: mol_type = other DNA
atgcggcatttatacgcaacgatattattgtttactaccctgctggcaggaattgcctttcctgcacaggctgaa

SEQ ID NO: 18726 - DNA, 75 bp, synthetic construct
  source 1..75: mol_type = other DNA
atactgcgcgtcatctgtcgccggcctggaatgccgggattcagttcagtcccgtagagacggtggttattgacc

SEQ ID NO: 18727 - DNA, 75 bp, synthetic construct
  source 1..75: mol_type = other DNA
caaactatctaaataaaggtgatagtggctctcctttatttgcgtatgactctctggaaaaaaaatgggttttag

SEQ ID NO: 18728 - DNA, 75 bp, synthetic construct
  source 1..75: mol_type = other DNA
gtgcggtttggtgacggttatgaacagcgccgccccacagggctgaatcctcaactgaagacgtttcaggcggtg

SEQ ID NO: 18729 - DNA, 75 bp, synthetic construct
  source 1..75: mol_type = other DNA
gacggaagcgataaatacccgtggtctcagcctgtgctgtatcacatttgcctcgagatgcgttcaaaggggatt

SEQ ID NO: 18730 - DNA, 75 bp, synthetic construct
  source 1..75: mol_type = other DNA
aaaccggatggtacgccgcgcaaactgctggatgtgacgcgcctgcatcagcttggctggtatcacgaaatctca

SEQ ID NO: 18731 - DNA, 75 bp, synthetic construct
  source 1..75: mol_type = other DNA
gactggcgggaacgtgcggaacagcgataaagccacacgatatgcaggcagcgattgcctgtagctcgtgccacg

SEQ ID NO: 18732 - DNA, 75 bp, synthetic construct
  source 1..75: mol_type = other DNA
cagccgccgccgcgctcactacgctgatgcacgcgcttattgatatttctgttattgctgacagggcgcataaac

SEQ ID NO: 18733 - DNA, 75 bp, synthetic construct
  source 1..75: mol_type = other DNA
ggccattatggatatggatgtgaacgcgatgatgaccgtgatcccccgcatttccagtccggcactgactgcaca

SEQ ID NO: 18734 - DNA, 75 bp, synthetic construct
  source 1..75: mol_type = other DNA
gcgggatatagatatttatgagcctgacgggccgacgaaccttctggcatgggaaaggcttaagaacaaagagtt

SEQ ID NO: 18735 - DNA, 75 bp, synthetic construct
  source 1..75: mol_type = other DNA
taatgatgggtggataattcctggtgcgtcgtggaaaccgtcacactggatgccgctaccagaaccgccgcagga

SEQ ID NO: 18736 - DNA, 75 bp, synthetic construct
  source 1..75: mol_type = other DNA
aaaatcacacagacgatggtgagcagttgaacaacacggatgctccggatgatgttaaagccgtccgggtacgga

SEQ ID NO: 18737 - DNA, 75 bp, synthetic construct
  source 1..75: mol_type = other DNA
tgtgagtgtgtggagcatatcctggccagtggtctggtctgtgatgtgctgcgtataccggatgaaccgtcccgt

SEQ ID NO: 18738 - DNA, 75 bp, synthetic construct
  source 1..75: mol_type = other DNA
ctggcccgtcaggtgcatacgagtattttgcccgcagcgccagcggtctggtgcgtgatgcgcgggctatcagtc

SEQ ID NO: 18739 - DNA, 75 bp, synthetic construct
  source 1..75: mol_type = other DNA
gctggactttgaaaccattcttgccgaacgcaaggcgacactgatttccctttacccggaagaccagcaggaggc

SEQ ID NO: 18740 - DNA, 75 bp, synthetic construct
  source 1..75: mol_type = other DNA
ccgatctggcctgggcaacgatgcacgcactgtttaacgaaccgctgcagggcgagtccgccaataccagcaata

SEQ ID NO: 18741 - DNA, 75 bp, synthetic construct
  source 1..75: mol_type = other DNA
cattaattgctttgttattacccgaaaaaccagaaattgcacatgaaattgcccagcgtctactggggcaaaaaa

SEQ ID NO: 18742 - DNA, 75 bp, synthetic construct
  source 1..75: mol_type = other DNA
gtgatgccattaaccactgaaacagcgctggatatcctcattgcgtggctgcaggacaatatcgactgcgggtcc

SEQ ID NO: 18743 - DNA, 75 bp, synthetic construct
  source 1..75: mol_type = other DNA
atgaaaaaatcagaagtattaggctattttggcggagttgttaaaacagccgcagctctaggaacgtcaaaaacc

SEQ ID NO: 18744 - DNA, 75 bp, synthetic construct
  source 1..75: mol_type = other DNA
ctgcggcagaagattttatgaaatcccatgtcgaaccaacgataagagacgttcctgtattactggagctggctc

SEQ ID NO: 18745 - DNA, 75 bp, synthetic construct
  source 1..75: mol_type = other DNA
cccgaaaaccgcccttatctgcgcgcgctttatgcaacaattctcgcaaatgtgcacttacagcgtcatcaggat

SEQ ID NO: 18746 - DNA, 75 bp, synthetic construct
  source 1..75: mol_type = other DNA
gcaaacccggctttactgacaaagcacaacagcaatgatgatttcagccttcttctgccgtctgttggggcacaa

SEQ ID NO: 18747 - DNA, 75 bp, synthetic construct
  source 1..75: mol_type = other DNA
gtgggtaagcatcattggaaagtggaaaaacaacctgagtggtacgtgaaagctgtcagaaaaactatcgcggca

SEQ ID NO: 18748 - DNA, 75 bp, synthetic construct
  source 1..75: mol_type = other DNA
ctgtggcggcccttcccggtgataccctcgctgctgcactgatgctgaaaacgctcgggactgtcagcgtcgacg

SEQ ID NO: 18749 - DNA, 75 bp, synthetic construct
  source 1..75: mol_type = other DNA
aggcgcttactgacgctgtaccgcagttaaaaaacaatcccgaaatgatgcgtatctttgccgatgaggggaata

SEQ ID NO: 18750 - DNA, 75 bp, synthetic construct
  source 1..75: mol_type = other DNA
tcatgagcagaaaaaagctggggtgatatttgaagctgaagaagttatcactcttttaacttctgtgcttaaaac

SEQ ID NO: 18751 - DNA, 75 bp, synthetic construct
  source 1..75: mol_type = other DNA
cggtttcctgatttctataacgaagaaatattcagggaggtgaccgaagagagcgagtcaacatttaaagaactt

SEQ ID NO: 18752 - DNA, 75 bp, synthetic construct
  source 1..75: mol_type = other DNA
ttgatctggcgctcctggaattttgaggacggtgccgggtactggatgaaccagtacatcagggatttcgggatt

SEQ ID NO: 18753 - DNA, 75 bp, synthetic construct
  source 1..75: mol_type = other DNA
ttttacggtgcgtggctaccagaaagggaccgtacacattgtctttaagcgtcctgaccttgttgaaaaactgaa

SEQ ID NO: 18754 - DNA, 75 bp, synthetic construct
  source 1..75: mol_type = other DNA
tggaccatcaaaacctacggcccggatcgcgttgccggtttctcgccgatcccggcgatgtcgatggtttcttac

SEQ ID NO: 18755 - DNA, 75 bp, synthetic construct
  source 1..75: mol_type = other DNA
cgtctgtgtaccgattatcacggtggtatctggcacttttcgacgctcagcaacggcggcgcttttatggcccct

SEQ ID NO: 18756 - DNA, 75 bp, synthetic construct
  source 1..75: mol_type = other DNA
atgcgcatgaatgttttcgaaatggaagggtttcttcgtgggagatgtgtaccgcgagatctgaaagtgaatgaa

SEQ ID NO: 18757 - DNA, 75 bp, synthetic construct
  source 1..75: mol_type = other DNA
cgtacctggaattttgaggacggtgccgggtactggatgaaccatgtcatccgggatttcgggattcttaagtaa

SEQ ID NO: 18758 - DNA, 75 bp, synthetic construct
  source 1..75: mol_type = other DNA
cagctatcccaacaactggatacatccgtcgctttcgcatgccggaattgctaggtgtttcactgcctactattg

SEQ ID NO: 18759 - DNA, 75 bp, synthetic construct
  source 1..75: mol_type = other DNA
atggtctggcgtacctggaattttgaggacggtgccgggtactggatgaaccatgccatccgtgatttcgggatt

SEQ ID NO: 18760 - DNA, 75 bp, synthetic construct
  source 1..75: mol_type = other DNA
tcatggccagatgatgctgttgaagttgatgagcaagtgtatattgagttttccggattaccgccgaaaggaaaa

SEQ ID NO: 18761 - DNA, 75 bp, synthetic construct
  source 1..75: mol_type = other DNA
ggcccagcggatctcgcaaaactgtcatattcctgtaaggatcacccctgatgtacaggcgtatctgagcgtgac

SEQ ID NO: 18762 - DNA, 75 bp, synthetic construct
  source 1..75: mol_type = other DNA
gttgttaaggaatcctcacgacaatggatcaatccccgtccggtcatggataaaaacaccggcaaaaccgttccc

SEQ ID NO: 18763 - DNA, 75 bp, synthetic construct
  source 1..75: mol_type = other DNA
tgacggaaactgatcacgagaaccccagcaaggaaactctcacagctgcccggcatacgccggaaaaagatatcc

SEQ ID NO: 18764 - DNA, 75 bp, synthetic construct
  source 1..75: mol_type = other DNA
taagtatcacgggtggttttttgttcggactgtgcatggcctctttccactggtggcgcaggaaagttaaccggc

SEQ ID NO: 18765 - DNA, 75 bp, synthetic construct
  source 1..75: mol_type = other DNA
accgacaaattcctgagtttaccgtcagaactcagaaaatcactgacatgggacagaggaatggaactggccaga

SEQ ID NO: 18766 - DNA, 75 bp, synthetic construct
  source 1..75: mol_type = other DNA
ccttagccttcattagtggtaaggcaccggaaatcaaaccctcgcccggcggcgacacgccatcggggccgtctg

SEQ ID NO: 18767 - DNA, 75 bp, synthetic construct
  source 1..75: mol_type = other DNA
ggatcatcgtgaaaccgtaaatcagaaccgtgcagcaagatatatccgcaaaatccgcgaaatgctggttactgg

SEQ ID NO: 18768 - DNA, 75 bp, synthetic construct
  source 1..75: mol_type = other DNA
gctgcgcagggctggagcattaagaatggcggaattcagttgtcagatggtgtatttaagatcaccaagcagagc

SEQ ID NO: 18769 - DNA, 75 bp, synthetic construct
  source 1..75: mol_type = other DNA
aaagtcatcgcctgcattgaagaccctatagtgatcaagcagatccttgatcacctgaagcacaaagccgaaacc

SEQ ID NO: 18770 - DNA, 75 bp, synthetic construct
  source 1..75: mol_type = other DNA
cagtcatagtgctgtgtttaacggtgctgggatttacgcttctggtcggggattcgctgtgtgagttcaccgtaa

SEQ ID NO: 18771 - DNA, 75 bp, synthetic construct
  source 1..75: mol_type = other DNA
cacttgggttgtattttaattacctggtgcatggtatgggcgtcattttgatgagcctgaatatggcctcgctgg

SEQ ID NO: 18772 - DNA, 75 bp, synthetic construct
  source 1..75: mol_type = other DNA
tgacctgttcatgaccaaccgtaccaacggtgttgcaacctatcgtaacacagatttctttggcatggttgaagg

SEQ ID NO: 18773 - DNA, 75 bp, synthetic construct
  source 1..75: mol_type = other DNA
atgaatacagcatttgcacttgttctgacagtttttcttgtttccggagagccagttgatattgcagtcagtgtt

SEQ ID NO: 18774 - DNA, 75 bp, synthetic construct
  source 1..75: mol_type = other DNA
tcgcctgactattctgcaggaagaccagggacaattactgactcttgccggtgagcctgacggaaaactccgcgc

SEQ ID NO: 18775 - DNA, 75 bp, synthetic construct
  source 1..75: mol_type = other DNA
atgaaaaaaatattattaatagctgcatcactttcatttttttcagcaagtgtgctggctgcgccagattgtgta

SEQ ID NO: 18776 - DNA, 75 bp, synthetic construct
  source 1..75: mol_type = other DNA
aaacaggctgccagcgcgacggtgatacagactcaggccgtggtgaagcatgcgcaggggcatgtttcgctggcg

SEQ ID NO: 18777 - DNA, 75 bp, synthetic construct
  source 1..75: mol_type = other DNA
ccgtgcggcgggtggtggaaccgttcggattcctgatccgcattattgagtggtggcagaccggagaaacaccgg

SEQ ID NO: 18778 - DNA, 75 bp, synthetic construct
  source 1..75: mol_type = other DNA
aacccagtgataacgatttggccgaagaggaactgttatcgcagggagccacacagcgtgtgttggacgcgactc

SEQ ID NO: 18779 - DNA, 75 bp, synthetic construct
  source 1..75: mol_type = other DNA
atgagcactgataaagaagaatttgcactatattgcgaagcaaaaaatgacaaagtaagaaaacgcctgggaatt

SEQ ID NO: 18780 - DNA, 75 bp, synthetic construct
  source 1..75: mol_type = other DNA
tgctaagcaggaaacagaagaagaagaaaatgatgaagaaaaaccgcaaccatcttgcgcaatggcagatgaaca

SEQ ID NO: 18781 - DNA, 75 bp, synthetic construct
  source 1..75: mol_type = other DNA
tgaagacagtgatgcaaccattgaaataactaggaagaaaaagtcatccgatggagaaaagaaaaagacacgtcc

SEQ ID NO: 18782 - DNA, 75 bp, synthetic construct
  source 1..75: mol_type = other DNA
gctggcggttctatggtcttgtaggttttggcgcaatagcactgctttccgctggcgtctgggcgttgcaatatg

SEQ ID NO: 18783 - DNA, 75 bp, synthetic construct
  source 1..75: mol_type = other DNA
gagtaatctgctgttttctctcggtgccagtatgacgcttggcggtgttgcacagatgctggcccctaaacccag

SEQ ID NO: 18784 - DNA, 75 bp, synthetic construct
  source 1..75: mol_type = other DNA
tgaaacgaagctgcatgacggttcaggtcaacgtaattatggttgcagtcgttggtcgggacatcttctggatgg

SEQ ID NO: 18785 - DNA, 75 bp, synthetic construct
  source 1..75: mol_type = other DNA
tctgctggttcatcatccgatgctggaaggcattctcctgtctgaatgtgaacgtctgaggcagcgttctctggc

SEQ ID NO: 18786 - DNA, 75 bp, synthetic construct
  source 1..75: mol_type = other DNA
agtgatgcttgtgccagaggatatgtctgtcggatggttcagcaaggctctggagagtgttgacgaagttcgcat

SEQ ID NO: 18787 - DNA, 75 bp, synthetic construct
  source 1..75: mol_type = other DNA
cggttaaaagcgccgaatgatgagagtaaggaaaatccgttgccaccttcacctgcggaaaaagtcagtccggag

SEQ ID NO: 18788 - DNA, 75 bp, synthetic construct
  source 1..75: mol_type = other DNA
cgcgtcgatcgctttatgtctgcctggaaaaatgcgggattcagcgttgttggtcacctggtcttcaccaaaaac

SEQ ID NO: 18789 - DNA, 75 bp, synthetic construct
  source 1..75: mol_type = other DNA
aatggtgccgtgatccacatcgtgccgcgtctggcgggtgctaaaagtggcggtatttttcaggcagtgctgggg

SEQ ID NO: 18790 - DNA, 75 bp, synthetic construct
  source 1..75: mol_type = other DNA
agtaaccatccgttcagcatgtggggcagcatcttcgtggatgagactatggcggtggcggcggcagaccggctg

SEQ ID NO: 18791 - DNA, 75 bp, synthetic construct
  source 1..75: mol_type = other DNA
ggcggtcatatcgccagacgctgcagtgagcggaagcgggtgcgtatccccgccatgaaagtcagcgagtggggg

SEQ ID NO: 18792 - DNA, 75 bp, synthetic construct
  source 1..75: mol_type = other DNA
gatttacaacccggcaccattgactatgaacgctaccggctcacaaaagcgcaggcagatgcgcaggaactgaaa

SEQ ID NO: 18793 - DNA, 75 bp, synthetic construct
  source 1..75: mol_type = other DNA
atctcaagcccagggacaaactctacaaagtgaatgaccgggaaggtctctatgtgggggtcgcctcagaaaacg

SEQ ID NO: 18794 - DNA, 75 bp, synthetic construct
  source 1..75: mol_type = other DNA
ccgacgttgtcaggcagcacacagtcccccgttttttactgaagcacttcagcaagccggtaaagggaaaacgcc

SEQ ID NO: 18795 - DNA, 75 bp, synthetic construct
  source 1..75: mol_type = other DNA
gtcgcaagtggtgatgtatataattctggctacggcttattcccgtctgaacaggctcgcaaggactggcaaagc

SEQ ID NO: 18796 - DNA, 75 bp, synthetic construct
  source 1..75: mol_type = other DNA
gagtgccggaagagcgaagctatgcagcgtgtactggctttctatcagggtaattttcaggaggcggtactgtga

SEQ ID NO: 18797 - DNA, 75 bp, synthetic construct
  source 1..75: mol_type = other DNA
ccgtggggctaatcagttttacagcgtcatggaacggctgaagatgctcgattccctgcaggcaacacagcttca

SEQ ID NO: 18798 - DNA, 75 bp, synthetic construct
  source 1..75: mol_type = other DNA
ccgcgactagttgaacctttcgcgggttcctgtgctgtgatgatggagacggattatccctgctatctggttgcg

SEQ ID NO: 18799 - DNA, 75 bp, synthetic construct
  source 1..75: mol_type = other DNA
agaaaagttaggtattctttcactagcaagcagtaacaaaaatttgctgatgtggtcgcattatgcttctgaaca

SEQ ID NO: 18800 - DNA, 75 bp, synthetic construct
  source 1..75: mol_type = other DNA
gacggcgaaatacgccgctacgacaggcgcctgaatataatctgtcgcgagtgccggaagagcgaagctatgcag

SEQ ID NO: 18801 - DNA, 75 bp, synthetic construct
  source 1..75: mol_type = other DNA
tggatatccgggtgccggaccatctgatagtcggtggcagccaggttttctcctttgcggaacacggcctgcttt

SEQ ID NO: 18802 - DNA, 75 bp, synthetic construct
  source 1..75: mol_type = other DNA
ggaataaaaaatgcagtaatcctgtttcagaatttgatgaggcaaatgccttaaggttatgcgatgatcattata

SEQ ID NO: 18803 - DNA, 75 bp, synthetic construct
  source 1..75: mol_type = other DNA
aaaccctcttcaccggcaccatcaaccgcacggaagtccatccccgggaagtgattaaacgcgccctgtaccaca

SEQ ID NO: 18804 - DNA, 75 bp, synthetic construct
  source 1..75: mol_type = other DNA
acattgtgcagccgttgccatcgtttaccgaaacgcaagcagatgagctgatttttccgtcccttcgcagggcaa

SEQ ID NO: 18805 - DNA, 75 bp, synthetic construct
  source 1..75: mol_type = other DNA
atgcaacagctttcctttctgcccggagagatgacgcccggcgagcgcagcctcattcagcgggccctgaaaacc

SEQ ID NO: 18806 - DNA, 75 bp, synthetic construct
  source 1..75: mol_type = other DNA
caggctacggattattcccctctgaacaggctcgtaaggactggcaaaacgcccgcaaaaaattatcgagggcaa

SEQ ID NO: 18807 - DNA, 75 bp, synthetic construct
  source 1..75: mol_type = other DNA
actggcgctacgccataacgctgccgctgtgattcttgcccataaccatccatccggagagacagaacctagtaa

SEQ ID NO: 18808 - DNA, 75 bp, synthetic construct
  source 1..75: mol_type = other DNA
tccgggtgctgtatctgaataaccagaatcagttgattgccggtgaaaccctcttcaccggcaccatcaaccgca

SEQ ID NO: 18809 - DNA, 75 bp, synthetic construct
  source 1..75: mol_type = other DNA
gaatcagctgattgcgggtgaaaccctcttcacaggcaccatcaaccgcacagaagtccatccccgggaggtgat

SEQ ID NO: 18810 - DNA, 75 bp, synthetic construct
  source 1..75: mol_type = other DNA
tcgaattgttcattaaatccccgcttgaaaacgggcttacccgtggcgaacaaatggaactggcacgaattgcac

SEQ ID NO: 18811 - DNA, 75 bp, synthetic construct
  source 1..75: mol_type = other DNA
cacagaaaattattgaagcagccgatgaggttattagtgcgctggccggaactaacgaggatgttcaccctggta

SEQ ID NO: 18812 - DNA, 75 bp, synthetic construct
  source 1..75: mol_type = other DNA
tggaggcagaacgcgatgcgttgcgggaggaagtcgcccgactgaatcaggaaatacgccgccggcagatggagc

SEQ ID NO: 18813 - DNA, 75 bp, synthetic construct
  source 1..75: mol_type = other DNA
gaaacgtgcccgtgcgcgccgcgatgcaggcagaacccgccaggacattgtcaccctggtgaaacggcagctgac

SEQ ID NO: 18814 - DNA, 75 bp, synthetic construct
  source 1..75: mol_type = other DNA
aacgtttccagggatgcgctgaacacggcatacagtgaacacccggagtggttttctgggcttgtctccggggat

SEQ ID NO: 18815 - DNA, 75 bp, synthetic construct
  source 1..75: mol_type = other DNA
gaagtcgattttggccgatcgacgaagaataacatcatacaaggtagcggtaaggagtggtcaaaacaggatcgt

SEQ ID NO: 18816 - DNA, 75 bp, synthetic construct
  source 1..75: mol_type = other DNA
gggttctatgttgaccggttacgccaaccctgtacgtctcaccacctctgtgattggcgtcccatgtggtgagtt

SEQ ID NO: 18817 - DNA, 75 bp, synthetic construct
  source 1..75: mol_type = other DNA
gtcgctttgattccgatgtgcttgttgaacgcctgacacgccagacgctgtatcgcgccaatcgcctgttcatgg

SEQ ID NO: 18818 - DNA, 75 bp, synthetic construct
  source 1..75: mol_type = other DNA
ataacgctggtttcaaagaaagtaacgaacagaaaagaatcaaatacgcacgctatgtctacaataaatacatgg

SEQ ID NO: 18819 - DNA, 75 bp, synthetic construct
  source 1..75: mol_type = other DNA
atccccggggcaaagtgattcgggagcttagcagtgaggaagagactgcagtaaagacggtctgtggactgaaaa

SEQ ID NO: 18820 - DNA, 75 bp, synthetic construct
  source 1..75: mol_type = other DNA
tcggtcgttctttttgaccatgccctgagcccggcgcaagagcgtaacctggagcgtttgtgcgagtgtcgtgtc

SEQ ID NO: 18821 - DNA, 75 bp, synthetic construct
  source 1..75: mol_type = other DNA
attgaacaggctggatccctgcgtggtctgtcgctgtctgatgtgctgaatctgaaagcggataccatgttcacg

SEQ ID NO: 18822 - DNA, 75 bp, synthetic construct
  source 1..75: mol_type = other DNA
ctgaacgagctggcggcggcgctgggcaatgacccgaattttgctaccaccatgactaatgcgcttgcgggtaag

SEQ ID NO: 18823 - DNA, 75 bp, synthetic construct
  source 1..75: mol_type = other DNA
ttgaattgttcattaaattttcaggaggcggtactgtgagtgaaattagctatcaggcttcaattaccgctggca

SEQ ID NO: 18824 - DNA, 75 bp, synthetic construct
  source 1..75: mol_type = other DNA
agacaggtttccgtattttacggggaatgatgttgccagcctggcgaccctgacaaaagtcgggcgggatattct

SEQ ID NO: 18825 - DNA, 75 bp, synthetic construct
  source 1..75: mol_type = other DNA
atgattgatgtcttagggccggagaaacgcagacggcgtactacacaggaaaagatcgctattgttcagcagagc

SEQ ID NO: 18826 - DNA, 75 bp, synthetic construct
  source 1..75: mol_type = other DNA
cctacctttaaccgattaatgctggatgattaccgcaacaagatcctcagcggtgaaatctttttcagtggtgat

SEQ ID NO: 18827 - DNA, 75 bp, synthetic construct
  source 1..75: mol_type = other DNA
gctctctgttgcgaaaagagaaaccaggctggcagatgatgtaaaactattgcgcctggaggaacaggaaaggcg

SEQ ID NO: 18828 - DNA, 75 bp, synthetic construct
  source 1..75: mol_type = other DNA
aagcctgtggcacggggatctattccagagcaacatgtacgaagtctgtttacagctaccagccagacttgtttc

SEQ ID NO: 18829 - DNA, 75 bp, synthetic construct
  source 1..75: mol_type = other DNA
gcctcaacctggtgacggcggctatcgtgctgtggaacacggtgtacctggaacgcgccacccaggggttggtcg

SEQ ID NO: 18830 - DNA, 75 bp, synthetic construct
  source 1..75: mol_type = other DNA
acagtcagcatgtggggggaagaggttccgtggaaatgggcgttgctaattcaggcagtcactgccggggcgctc

SEQ ID NO: 18831 - DNA, 75 bp, synthetic construct
  source 1..75: mol_type = other DNA
atgaaccttgaagccttaccgaaatattactccccgaaatctccaaaactgagcgatgacgcaccggcgacaggc

SEQ ID NO: 18832 - DNA, 75 bp, synthetic construct
  source 1..75: mol_type = other DNA
ctccctgccttatctggctaccggcgccggatatcactgcaacgttccccgagtgtttctcgcaactcatcctgg

SEQ ID NO: 18833 - DNA, 75 bp, synthetic construct
  source 1..75: mol_type = other DNA
aatcacagctccgggtgattaccctgaaaatacaaccactatcgccccgttaacgccatatgataaatgggatgg

SEQ ID NO: 18834 - DNA, 75 bp, synthetic construct
  source 1..75: mol_type = other DNA
tggatatccgggtgccggaccatctgataatcggtggcagccaggttttctcctttgctgaacacggtctgcttt

SEQ ID NO: 18835 - DNA, 75 bp, synthetic construct
  source 1..75: mol_type = other DNA
ggcttgcgttcaaacgtgatactgacagaggattcagaagactggatgccctcatgtgcatcggtcacaaatgac

SEQ ID NO: 18836 - DNA, 75 bp, synthetic construct
  source 1..75: mol_type = other DNA
taccgggataaagagcagtaaaggcatccaggttccgaccacgaagaaatcacttccccaaattaacagtgtgca

SEQ ID NO: 18837 - DNA, 75 bp, synthetic construct
  source 1..75: mol_type = other DNA
atggctgaatacaaccgcctgctctcacagcgggtggcggcttatgcttccgaaatcaaccggctgaaggcgctg

SEQ ID NO: 18838 - DNA, 75 bp, synthetic construct
  source 1..75: mol_type = other DNA
gaaacgcgggaatatatttccacatcaactgaatatcttgcggttggcgtcggtatcccggcatgttcttgttta

SEQ ID NO: 18839 - DNA, 75 bp, synthetic construct
  source 1..75: mol_type = other DNA
gtgccggaggagtgaagttatgcagcgcatactggcattttatcagggaaatgttcgatattttagacgttacta

SEQ ID NO: 18840 - DNA, 75 bp, synthetic construct
  source 1..75: mol_type = other DNA
ccattgttctgccgaccattggccttgtcggctgcgatcgcgttgaacccggtaatgttggcatcaaagtaaata

SEQ ID NO: 18841 - DNA, 75 bp, synthetic construct
  source 1..75: mol_type = other DNA
atggcagagattattcccatgactgaagaacagaaattccagttagagatttacaaactggtcatgaaccagaac

SEQ ID NO: 18842 - DNA, 75 bp, synthetic construct
  source 1..75: mol_type = other DNA
aatacaccgcccgacagtctgtgctgtgagctggttctgccggccggaactctcaggctgaaaggtgaactgaca

SEQ ID NO: 18843 - DNA, 75 bp, synthetic construct
  source 1..75: mol_type = other DNA
ttctgcatccaccgcgaccacgaaggcgtcagaagctgccacctcagcccgggatgcggcggcctcaaaagaggc

SEQ ID NO: 18844 - DNA, 75 bp, synthetic construct
  source 1..75: mol_type = other DNA
cgcttgctggtcttgcgacaggcgcaaataaattgccgtactttaccggtacagacactgtttctcagactgact

SEQ ID NO: 18845 - DNA, 75 bp, synthetic construct
  source 1..75: mol_type = other DNA
tctacaaaaaaaaatccatgaatttaatcagtggatagggatgcatattatcaatttctcagaatataatataga

SEQ ID NO: 18846 - DNA, 75 bp, synthetic construct
  source 1..75: mol_type = other DNA
caaaaacggtaattcgtatccgcaaaggtagctctaacggtgtggaactgactgggctgcaacaggacgaagaaa

SEQ ID NO: 18847 - DNA, 75 bp, synthetic construct
  source 1..75: mol_type = other DNA
aggcccgcgccgtcagccggaaaagaatgttttcaccgatgaacagatagagaaactggaagaaatcttccattc

SEQ ID NO: 18848 - DNA, 75 bp, synthetic construct
  source 1..75: mol_type = other DNA
caagctgggccgaagctcccgatggttaaaaagcgaagtcgaaaactggctacaggaaagaatcgaccagtctcg

SEQ ID NO: 18849 - DNA, 75 bp, synthetic construct
  source 1..75: mol_type = other DNA
ggtaagaaaagggttagtgcgcgtggttggtgaggcaattcttggtgttgatggtgccatcgagatgaccgaaga

SEQ ID NO: 18850 - DNA, 75 bp, synthetic construct
  source 1..75: mol_type = other DNA
agctgattgccggtgaaaccctcttcaccggcaccatcaaccgcacggaagtccatccccgggaagtgattaaac

SEQ ID NO: 18851 - DNA, 75 bp, synthetic construct
  source 1..75: mol_type = other DNA
atggaaagacagctttatcccaaagatggccatgcttctggctgtgctggagtggggtgttgaagacgaggaatt

SEQ ID NO: 18852 - DNA, 75 bp, synthetic construct
  source 1..75: mol_type = other DNA
tgagaaatgggtgacagataccgaggcacagcacggcgcagcagtagatgcagcagaagcacagcgccagtcgct

SEQ ID NO: 18853 - DNA, 75 bp, synthetic construct
  source 1..75: mol_type = other DNA
aagtagcttcaacgctggcaatggcaatcagcaaagggcgtctgattcgcgtaaatcagaacggtaaattccgtt

SEQ ID NO: 18854 - DNA, 75 bp, synthetic construct
  source 1..75: mol_type = other DNA
agccgtgaagaagttctcaacgaactgtgggaactcaaaaaaaatggcgttgttgataaaacgggtcacacctgg

SEQ ID NO: 18855 - DNA, 75 bp, synthetic construct
  source 1..75: mol_type = other DNA
acggaaaccgatggtaaagcctttcctcagccagccggtgttgcgttaccggtacagaaagatgcaacacaggaa

SEQ ID NO: 18856 - DNA, 75 bp, synthetic construct
  source 1..75: mol_type = other DNA
gtaaatcagaacggtaaatttcgttactgcataccgggcaataatttaccagcagagccgaaagctgcatcggta

SEQ ID NO: 18857 - DNA, 75 bp, synthetic construct
  source 1..75: mol_type = other DNA
acttaacgctgtgctggattacattgacgcggtggaggcaacagataccagcaccgcgcctgatgtcatctggcc

SEQ ID NO: 18858 - DNA, 75 bp, synthetic construct
  source 1..75: mol_type = other DNA
cccgcaatgttgtgacgatgacgcgatgatcatttgcgggtgcatggcccgtctgaaaaagaacaacagcgattt

SEQ ID NO: 18859 - DNA, 75 bp, synthetic construct
  source 1..75: mol_type = other DNA
acattgtgcagtcgttgccatcgtttaccgaaacgcgagcggatgacctcgttctgccatcgctgcatatggcaa

SEQ ID NO: 18860 - DNA, 75 bp, synthetic construct
  source 1..75: mol_type = other DNA
tcggtaaaaaattacagaaagcggagggcgtggttgaagggatgttaatgttacttggtgtcagactggaaatgg

SEQ ID NO: 18861 - DNA, 75 bp, synthetic construct
  source 1..75: mol_type = other DNA
ccgtgcggcgggtggtggagccgttcggattcctgatccgcattattgagtggtggcagaccggagaaacaccgg

SEQ ID NO: 18862 - DNA, 75 bp, synthetic construct
  source 1..75: mol_type = other DNA
ctggaccgccatcttcatgaacccggcgtggccttcacctccacccgtgcggcacgagaatggctgattctgaac

SEQ ID NO: 18863 - DNA, 75 bp, synthetic construct
  source 1..75: mol_type = other DNA
caagggtcttatcaccccatccgatggtcgtatcgatgtccagcttcatgtttcagcgctcaatctccgcgatgc

SEQ ID NO: 18864 - DNA, 75 bp, synthetic construct
  source 1..75: mol_type = other DNA
gttatccagagcgtgaaaaatgttttgacgatgcactaaaaattattgatgaactgcgtaaagcagagaaagaat

SEQ ID NO: 18865 - DNA, 75 bp, synthetic construct
  source 1..75: mol_type = other DNA
agcgtcaaccagctctccggtaactccggatggttggataagctgtagtgagcgaatgccggacgacaggcagga

SEQ ID NO: 18866 - DNA, 75 bp, synthetic construct
  source 1..75: mol_type = other DNA
tgatttgtccgttatttttcgcccttcccgctgaggctgtcgccacaaacacattactggacagttgctttattc

SEQ ID NO: 18867 - DNA, 75 bp, synthetic construct
  source 1..75: mol_type = other DNA
atggctgattctgaacatggcgggactggagcgtgaagagttccgggtgctgtatctgaacaaccagaatcagct

SEQ ID NO: 18868 - DNA, 75 bp, synthetic construct
  source 1..75: mol_type = other DNA
gggcgctgactgatgccgtcacggtgctgaaaaccagtcccgagatgctgcggatattcgtggataacgggagta

SEQ ID NO: 18869 - DNA, 75 bp, synthetic construct
  source 1..75: mol_type = other DNA
atggcagtacagatttcaggcgtgctgaaagacggtgcaggaaaaccgatacagaactgcaccattcagctcaaa

SEQ ID NO: 18870 - DNA, 75 bp, synthetic construct
  source 1..75: mol_type = other DNA
aacgcgctgtcaggctgaatatggcaacagacgaggaacgcacacgactggaagcatgggaacgctacagtgttc

SEQ ID NO: 18871 - DNA, 75 bp, synthetic construct
  source 1..75: mol_type = other DNA
taccgttttctgacatccgcgaggagctgccgcgcggcacgtttgcttataccgatgtcccgacgatgattattc

SEQ ID NO: 18872 - DNA, 75 bp, synthetic construct
  source 1..75: mol_type = other DNA
ctgcaatcggtgtgctgggtagtctggtttttggcctgctgacgtatctgacaaacctttatttcaagattaaag

SEQ ID NO: 18873 - DNA, 75 bp, synthetic construct
  source 1..75: mol_type = other DNA
caaccgcctgtacacttcactcggcgacgccgctgtaggtcgctttagcgacggcgaagtcagtgtacaaattaa

SEQ ID NO: 18874 - DNA, 75 bp, synthetic construct
  source 1..75: mol_type = other DNA
gaagacatgctgcagctgaatctggataacccaattgtggtttctccggacatcggcggcgttgtgcgtgcccgc

SEQ ID NO: 18875 - DNA, 75 bp, synthetic construct
  source 1..75: mol_type = other DNA
gagtgggaagcgaaaatcctggaactggctggcttcctggattcttacattccggaaccagagcgtgcgattgac

SEQ ID NO: 18876 - DNA, 75 bp, synthetic construct
  source 1..75: mol_type = other DNA
gaagcatggcgtgatgattatgaagcaggaaaaactccggtcgaagcatattgtgatgagtggggcgatgaatga

SEQ ID NO: 18877 - DNA, 75 bp, synthetic construct
  source 1..75: mol_type = other DNA
gcagggtaatggactggttcatttttccaggcggacgcctttccgtaaaccggcatcatctgatgctcgcccttc

SEQ ID NO: 18878 - DNA, 75 bp, synthetic construct
  source 1..75: mol_type = other DNA
tggatgtggctgcacggcaccgggtgcagttttcgatgcctgagtccgatgctgtcacaatgctgaaaagcagac

SEQ ID NO: 18879 - DNA, 75 bp, synthetic construct
  source 1..75: mol_type = other DNA
cggatcttcaccgcaagatgctgctggcgacgctgtggaacaccggcgcgcgcattaatgaagcgctcgcgctga

SEQ ID NO: 18880 - DNA, 75 bp, synthetic construct
  source 1..75: mol_type = other DNA
aaggacgaggcccggcagcaaattaatgattacatattgaactactacaacagcgtcagacctcaccattataac

SEQ ID NO: 18881 - DNA, 75 bp, synthetic construct
  source 1..75: mol_type = other DNA
gtcaaggactggactgtatccacattacgtaaagcaaatcaggagcaggttacactggaaaccgacggtcttctg

SEQ ID NO: 18882 - DNA, 75 bp, synthetic construct
  source 1..75: mol_type = other DNA
acatttgaggggaaaatagccgcgcaggcacaaacgtttgaagaaaaactggcttccctgtctgtggtattacag

SEQ ID NO: 18883 - DNA, 75 bp, synthetic construct
  source 1..75: mol_type = other DNA
cgttatggcgtcagtctcattcatctggatgccagcgctgaatgcctgccggatttacccactttcgactggtaa

SEQ ID NO: 18884 - DNA, 75 bp, synthetic construct
  source 1..75: mol_type = other DNA
aatgttgacgagaacaactactggctgcgccgtgaagcagcgggtgatatccggcgcgtgaataaaaaggtgaat

SEQ ID NO: 18885 - DNA, 75 bp, synthetic construct
  source 1..75: mol_type = other DNA
ggccaccagcccggtggtgtcgcaactccagccttcctttcgcacgacggtagtccgggaacaggctcgaagcga

SEQ ID NO: 18886 - DNA, 75 bp, synthetic construct
  source 1..75: mol_type = other DNA
atattccggcatcaggatattacggtgcggcatcgagaacgaatggaaaccaggtatcatcaaaccgcccgacac

SEQ ID NO: 18887 - DNA, 75 bp, synthetic construct
  source 1..75: mol_type = other DNA
atgatgccgttaagtttctacgcagtgaagcgtctggtgtacgtttgttcgccgaccagcttcgcaaaggaggca

SEQ ID NO: 18888 - DNA, 75 bp, synthetic construct
  source 1..75: mol_type = other DNA
cagcatatggcgagacctgatgaagaagtcgggcatgatttcgctcatggatgctcaggctcgtgaccagtggta

SEQ ID NO: 18889 - DNA, 75 bp, synthetic construct
  source 1..75: mol_type = other DNA
tgagacgaagcagcatgacggttctggtcaacgtaattatggttgcagccgtggagcggggcgtctactggatgg

SEQ ID NO: 18890 - DNA, 75 bp, synthetic construct
  source 1..75: mol_type = other DNA
tgaaacgaagctgcataacggttccgggcaacgtaattatggttgcagtcgtgggccggggcgtctactggatgg

SEQ ID NO: 18891 - DNA, 75 bp, synthetic construct
  source 1..75: mol_type = other DNA
agacgctgctgacagaaagggaagtcagttttatgaaaggactgttcagaattgtggatatgaagcggtggtatc

SEQ ID NO: 18892 - DNA, 75 bp, synthetic construct
  source 1..75: mol_type = other DNA
atgaaactttccctgacgctggaagccgacagcattaacgtgcgggcgctgaacatggggcgcattgtcgttgac

SEQ ID NO: 18893 - DNA, 75 bp, synthetic construct
  source 1..75: mol_type = other DNA
tcagaacagaggcaaaaaaactctccccatccttactggttgaattaatcaattcaaattatggacaaaaccaga

SEQ ID NO: 18894 - DNA, 75 bp, synthetic construct
  source 1..75: mol_type = other DNA
tgaaactggaaatcctccaggcgtatggaatggcaagtcgtaaatttgatgagtttgttgatgctatggcggata

SEQ ID NO: 18895 - DNA, 75 bp, synthetic construct
  source 1..75: mol_type = other DNA
attcgcacatgaggatgtcactatggcaaccacccctacccaaactcaccctaaaattgatgttatccatgggaa

SEQ ID NO: 18896 - DNA, 75 bp, synthetic construct
  source 1..75: mol_type = other DNA
tatcggtcaggaagaagaagcgcaactgaagaaaattgcgcaggcgctgcagttgccgctggagcagtacctgtg

SEQ ID NO: 18897 - DNA, 75 bp, synthetic construct
  source 1..75: mol_type = other DNA
agaactgcagcagcgaagctggccagcgagcgtctttacattagtacagagctggtttttttacttgagcgattt

SEQ ID NO: 18898 - DNA, 75 bp, synthetic construct
  source 1..75: mol_type = other DNA
gtaaggcgcatggtttcactttgcagcatgttgctgcgggtgttcaagtcaatccagcgacgttgagtcgtattg

SEQ ID NO: 18899 - DNA, 75 bp, synthetic construct
  source 1..75: mol_type = other DNA
ccgccccaaacgcgccaaaatggaaaagcctgaagtaaaccttgtggcgatgttaaaagacgctttggctaacag

SEQ ID NO: 18900 - DNA, 75 bp, synthetic construct
  source 1..75: mol_type = other DNA
ggagttgttgtcatatcgtcgccgcgtggagatgtaccaggagaaagaaaaaattacttaccactggaagaagcc

SEQ ID NO: 18901 - DNA, 75 bp, synthetic construct
  source 1..75: mol_type = other DNA
ccggacgaaaatgatgtactgatgcagaaggcggcgggcctcgccggtggagtccgtttcggggaggagggaagg

SEQ ID NO: 18902 - DNA, 75 bp, synthetic construct
  source 1..75: mol_type = other DNA
ggagtgatgcatttgttattcgcagtgtttccgttcttcctgaaagtattcccgctggtttcagtgttcttgcgg

SEQ ID NO: 18903 - DNA, 75 bp, synthetic construct
  source 1..75: mol_type = other DNA
atgagaaaaaataatacggcaataatattcggcggcctgtttttttcctgcagcgtgatggccgcaaacggtacg

SEQ ID NO: 18904 - DNA, 75 bp, synthetic construct
  source 1..75: mol_type = other DNA
tttttactgggtggccctgcctctgacaacggtgaatggggtttcccagttccagcctgaatggatatgctggga

SEQ ID NO: 18905 - DNA, 75 bp, synthetic construct
  source 1..75: mol_type = other DNA
aactggatcgctaccgggtgatagtggtggatgatcttggctatgtcaaacgcgacagcgccgaaacgggagtac

SEQ ID NO: 18906 - DNA, 75 bp, synthetic construct
  source 1..75: mol_type = other DNA
agttgccaaaacgctaagcgaatacgacttcagtcaggtgccggaactgaatggagctcagttccggcaactctg

SEQ ID NO: 18907 - DNA, 75 bp, synthetic construct
  source 1..75: mol_type = other DNA
atgacattagcagcaatcaccatggccgccccggaagccgccggacctgtgcagatgtaccgcgcgacttactca

SEQ ID NO: 18908 - DNA, 75 bp, synthetic construct
  source 1..75: mol_type = other DNA
tatggagcaggttcgtttaaccccattctggttggaagggggcagaaatgcagtgcagaccagaattaattctca

SEQ ID NO: 18909 - DNA, 75 bp, synthetic construct
  source 1..75: mol_type = other DNA
atgctaaaacagcaagatatgacagaaacggcgaaagttgtttttaatgaattaagcatcgaaccggcaacagtc

SEQ ID NO: 18910 - DNA, 75 bp, synthetic construct
  source 1..75: mol_type = other DNA
gtactgccgctgcatggcctgaccggcgtgggctggagcgactcctggagcgaatacgcctgggtgcgtgaacag

SEQ ID NO: 18911 - DNA, 75 bp, synthetic construct
  source 1..75: mol_type = other DNA
atgcgtgactgccattcttcagatgataaagacgtcattgcaattgatggaaaaacgctccggcactcttatgac

SEQ ID NO: 18912 - DNA, 75 bp, synthetic construct
  source 1..75: mol_type = other DNA
tgcccgtactgcacagacagcgccttacgatcgatacacctgtcacctttgcggcagtgcgctcagataccaccc

SEQ ID NO: 18913 - DNA, 75 bp, synthetic construct
  source 1..75: mol_type = other DNA
gtgaacctcccacaagacggcatcaaattgcatcgtggtaacttcaccgctatcggccagcagatccagccttat

SEQ ID NO: 18914 - DNA, 75 bp, synthetic construct
  source 1..75: mol_type = other DNA
aggccagcgaaaaaaacgcaaaatccagccagacggcagcgaaaaccagtgagacgaatgccaaagacagtgaag

SEQ ID NO: 18915 - DNA, 75 bp, synthetic construct
  source 1..75: mol_type = other DNA
tccggatgaagccgggcgttacagtatggatgttgagtatggccagtacagcgttatcctgctggttgaaggttt

SEQ ID NO: 18916 - DNA, 75 bp, synthetic construct
  source 1..75: mol_type = other DNA
ctcaaaaagccagtgagtcattacaaagtgcagcagatgctgagttgtcaaaaaagacggcagaaagtgcagccg

SEQ ID NO: 18917 - DNA, 75 bp, synthetic construct
  source 1..75: mol_type = other DNA
aatactggggagaagaacacgtatggtgggacggcagggctgcttttcatggtgaggttgtcagacctgcctgta

SEQ ID NO: 18918 - DNA, 75 bp, synthetic construct
  source 1..75: mol_type = other DNA
tcaaaaaactgaccgagcaatacaacgtgacctacatcggcatcgactcgacaggtgtcggccacggggtttacg

SEQ ID NO: 18919 - DNA, 75 bp, synthetic construct
  source 1..75: mol_type = other DNA
gcaaaaaaggtcaacagggccaggctactgacgcgctgaacagggcaaaacaacaggcggggaatgatgatccgt

SEQ ID NO: 18920 - DNA, 75 bp, synthetic construct
  source 1..75: mol_type = other DNA
cgtgctgcctgtccttcagaacgaagccagacaacaaaaacgtgggctctggtcagatgctgatccggttccccc

SEQ ID NO: 18921 - DNA, 75 bp, synthetic construct
  source 1..75: mol_type = other DNA
gctggtggcgtggaatgtcttgaaagctggttacttcgtgaaaagggctgtcagtggcctcattccgactggcac

SEQ ID NO: 18922 - DNA, 75 bp, synthetic construct
  source 1..75: mol_type = other DNA
atgaatgaacgtgaactgtccattatccgtgcgctgggtgaagaattttccgcagtgctggcggatttacagcgc

SEQ ID NO: 18923 - DNA, 75 bp, synthetic construct
  source 1..75: mol_type = other DNA
gcaaatcagtgtgcgcgggcaggggataaattaccggatttgctggatgaatatatcagagcaacaactgaataa

SEQ ID NO: 18924 - DNA, 75 bp, synthetic construct
  source 1..75: mol_type = other DNA
cctggagcacgcgccccggcgtatcgacaaatcatcaacgcgatagataatatgacagacattgagcaggaaaaa

SEQ ID NO: 18925 - DNA, 75 bp, synthetic construct
  source 1..75: mol_type = other DNA
actaatcggcgaactgtacgccattgagcacgaaatacgcgggttgccggtgtctgaacgcctggcggtcaggca

SEQ ID NO: 18926 - DNA, 75 bp, synthetic construct
  source 1..75: mol_type = other DNA
atggaagacgcaagccttacaactaaaggtgttgtgaaacttagcagtgctgttgatagcaccagtgaatcgctg

SEQ ID NO: 18927 - DNA, 75 bp, synthetic construct
  source 1..75: mol_type = other DNA
tccggatgaagccgggcgttacagcatggacgttgagtacggtcagtacagcgttattctgttggtggagggatt

SEQ ID NO: 18928 - DNA, 75 bp, synthetic construct
  source 1..75: mol_type = other DNA
cacgccctgttaaatgagccactcaccgccggtatcagcaccccgctgacatccaccattctggagttttactga

SEQ ID NO: 18929 - DNA, 75 bp, synthetic construct
  source 1..75: mol_type = other DNA
gtgtcgcctgccgtggtacagggggcaccggatatcacccgggaaatccagcaggatattgcccggcgaatgagg

SEQ ID NO: 18930 - DNA, 75 bp, synthetic construct
  source 1..75: mol_type = other DNA
ttctctggcgttacaggataaagcaaagtgtcagccgacggggaaactgctgggataacagtccaatggaacgct

SEQ ID NO: 18931 - DNA, 75 bp, synthetic construct
  source 1..75: mol_type = other DNA
tatacaggccttaaatatcaacaacttctctggcgttgcagaataaatcaaagcgtcagtcggcggggaaactgc

SEQ ID NO: 18932 - DNA, 75 bp, synthetic construct
  source 1..75: mol_type = other DNA
tatacaggactgaaatatcaacaacttctctggcgttacaggataaagcaaagtgtcagccgacggggaaactgc

SEQ ID NO: 18933 - DNA, 75 bp, synthetic construct
  source 1..75: mol_type = other DNA
aaatcagcattcactggctggtctttttgctggttatcgtagcgtattgcgcaatggagtttcgtggtttcttcc

SEQ ID NO: 18934 - DNA, 75 bp, synthetic construct
  source 1..75: mol_type = other DNA
agctgcttgctcaacaaaatctgacagcatgggtgattgacgtcatccgtcacgcaataagcggtacgcaggagc

SEQ ID NO: 18935 - DNA, 75 bp, synthetic construct
  source 1..75: mol_type = other DNA
tacctcgttctctatcaactttgatgacagcattgataagactgccgaaacggatgaagaacgggaagcacgata

SEQ ID NO: 18936 - DNA, 75 bp, synthetic construct
  source 1..75: mol_type = other DNA
acgaccagatgacctcagacgccgctgtggatgaggccattctcatcaacgaatacaccttcaccgaaaccggtc

SEQ ID NO: 18937 - DNA, 75 bp, synthetic construct
  source 1..75: mol_type = other DNA
gtgctggcactgcgacaaccagctgcgggagcagacatctgattcactggagcaacttgctcagcagaatctggc

SEQ ID NO: 18938 - DNA, 75 bp, synthetic construct
  source 1..75: mol_type = other DNA
ccttatgcctggcggcagataaaggtgacctgtgccgcctggtcatcacgggttcgcatgctgcgggttgaattc

SEQ ID NO: 18939 - DNA, 75 bp, synthetic construct
  source 1..75: mol_type = other DNA
cctgaacaaataattactccccgtcgtcgggaagataaacagaacgatctctggacaacctggcagcgggttcag

SEQ ID NO: 18940 - DNA, 75 bp, synthetic construct
  source 1..75: mol_type = other DNA
aatttttcgttttgtctgcacaaatggcctggtgtgcggaaataattttggcgaaatccgcgttccacataaagg

SEQ ID NO: 18941 - DNA, 75 bp, synthetic construct
  source 1..75: mol_type = other DNA
ctggaaggcatttttgtggaagccaccctatgcataccggcagataaaggtgacctgtgccgggtggtctgcgcg

SEQ ID NO: 18942 - DNA, 75 bp, synthetic construct
  source 1..75: mol_type = other DNA
atttcagcgggtgcattctggccggatattgtgctgcgcgagctgcgtctggcggtacgactgccgggccgcgtg

SEQ ID NO: 18943 - DNA, 75 bp, synthetic construct
  source 1..75: mol_type = other DNA
accctaacgtcgccaaccgcaacaaagggccgcgccgtcagccggaaaagaatgttttcaccgatgaacagattg

SEQ ID NO: 18944 - DNA, 75 bp, synthetic construct
  source 1..75: mol_type = other DNA
gccgtcggtgcgtgaagtgcgttttggtgacgggtactcacagcgtatggcggcagggctgaatgctgacctgaa

SEQ ID NO: 18945 - DNA, 75 bp, synthetic construct
  source 1..75: mol_type = other DNA
gcgccatcaataccggttctgaaaatgtaaacattaacggaaagcccgctgcaagggccgccgtcacccttcccc

SEQ ID NO: 18946 - DNA, 75 bp, synthetic construct
  source 1..75: mol_type = other DNA
ggaattatctttgacaacaatgaggataaaacggattcggcagcactgttgtcctgtattgaacaggcgagggag

SEQ ID NO: 18947 - DNA, 75 bp, synthetic construct
  source 1..75: mol_type = other DNA
gtaccagaaaaattgcagggaaaacgctggatcgtctgaagaaactgatttggctggcggcacaggatgtgaaga

SEQ ID NO: 18948 - DNA, 75 bp, synthetic construct
  source 1..75: mol_type = other DNA
aagcatggttgagcgaattacaggacgttcttgatcgctgtccatcaccgaaaaaaattggtttttacaccattg

SEQ ID NO: 18949 - DNA, 75 bp, synthetic construct
  source 1..75: mol_type = other DNA
agtaaattttttgagggagaaaaagacgatgtcgaaacggtcgatgtcatcttgcgcccaaaagtttatttccgg

SEQ ID NO: 18950 - DNA, 75 bp, synthetic construct
  source 1..75: mol_type = other DNA
tatttgttttttcatgtcaggtattttctgctgatattcatggacggggcgtgcgtgttctggatggcaatacca

SEQ ID NO: 18951 - DNA, 75 bp, synthetic construct
  source 1..75: mol_type = other DNA
gcaaactatacattcactgactcccgtcgagaaagcgatgacgaaagtctcaatggcaagtcgctgaaaggggaa

SEQ ID NO: 18952 - DNA, 75 bp, synthetic construct
  source 1..75: mol_type = other DNA
ccctggttgctcccggtaagcggtacgaacaaccagcgttgcgtgaatcacatttctgaaccagataccgaaatt

SEQ ID NO: 18953 - DNA, 75 bp, synthetic construct
  source 1..75: mol_type = other DNA
ggcgaaatgacttatatcttgcgggtgattggtgattcaatgattgatgagtaccgcccgggagacatgattttt

SEQ ID NO: 18954 - DNA, 75 bp, synthetic construct
  source 1..75: mol_type = other DNA
atgaacaaaaaaatatacattttattcgccctgacagcaggactgtttatctctgttcatgcttcagaaaatgtg

SEQ ID NO: 18955 - DNA, 75 bp, synthetic construct
  source 1..75: mol_type = other DNA
gaatactctttaaggtacttctcaaggataaacgcacatggtgcgaatctctccggttcatgttcgtttaccgca

SEQ ID NO: 18956 - DNA, 75 bp, synthetic construct
  source 1..75: mol_type = other DNA
cttgttaatgatgaacgaatgattacattcaggttaacacctgatattgatgaacgggaatttgtaacccgttat

SEQ ID NO: 18957 - DNA, 75 bp, synthetic construct
  source 1..75: mol_type = other DNA
acgtcatgaactgaactacactgtgcaggaagcgttaaaacccgtaacggttggcgatgcgatcagttactggct

SEQ ID NO: 18958 - DNA, 75 bp, synthetic construct
  source 1..75: mol_type = other DNA
tgcgatcctgacccgcgatatgcgcaacgcccagcgttttgttaacgaagtggattcgtccgctgtttacgttaa

SEQ ID NO: 18959 - DNA, 75 bp, synthetic construct
  source 1..75: mol_type = other DNA
tccagaaaggcaatcagggggcaggcaatatcaccgactgtacggtgattgtgaccaaaaaagcggcttccggca

SEQ ID NO: 18960 - DNA, 75 bp, synthetic construct
  source 1..75: mol_type = other DNA
ctggcaaacccggcactgctgacaaaatccggtgcaaaagatgacttcagtcttctgcttccgtccgtgggtgcg

SEQ ID NO: 18961 - DNA, 75 bp, synthetic construct
  source 1..75: mol_type = other DNA
ctgtacccacagagtttgccgatctcaaagttcgcgatgaaaaaacactaccgtcattaggcgcaacgttattca

SEQ ID NO: 18962 - DNA, 75 bp, synthetic construct
  source 1..75: mol_type = other DNA
tgtagtgatgaagagaaggggctggctctgcagtgggtttctgaattgactgatgaactcatggcaaaaatcaga

SEQ ID NO: 18963 - DNA, 75 bp, synthetic construct
  source 1..75: mol_type = other DNA
tgtcggctgccgttctggcgctgattggtgcaggtgcttctgcgcctgaaatcctcgaccagtttctggatgaaa

SEQ ID NO: 18964 - DNA, 75 bp, synthetic construct
  source 1..75: mol_type = other DNA
gggtatcaactctggaacagacaaccaaaaatcaacgtcgggaaatcgaaagtgcaggttttaacatcaaatctc

SEQ ID NO: 18965 - DNA, 75 bp, synthetic construct
  source 1..75: mol_type = other DNA
gtcaagggttattaagatatctaaatatgaacgagaaaactttaggtcaacgcattagagaaagacgtaagcagg

SEQ ID NO: 18966 - DNA, 75 bp, synthetic construct
  source 1..75: mol_type = other DNA
ggtgacagatactgaggcacaacacggtgccgcagtagaagcggcagaagcacagcgccagtcactgattgatgc

SEQ ID NO: 18967 - DNA, 75 bp, synthetic construct
  source 1..75: mol_type = other DNA
gctggcagacctccacggaactggtggaagacccggaagccatactgcgctacgggcgcaacctgctgaagatgg

SEQ ID NO: 18968 - DNA, 75 bp, synthetic construct
  source 1..75: mol_type = other DNA
atgaacggtataaaaacggggctggggatcacgccgggtgagcacattatcagtgccgactctgcgctcagcaga

SEQ ID NO: 18969 - DNA, 75 bp, synthetic construct
  source 1..75: mol_type = other DNA
caggaactggtgaaactggttactgaacgcagcaatcagccactgcatgatgtggacctggacagttatttatga

SEQ ID NO: 18970 - DNA, 75 bp, synthetic construct
  source 1..75: mol_type = other DNA
tcacatttagctaatcctaaactttttctacactatggcgatttgacagatacttccaatctgacccgtatttta

SEQ ID NO: 18971 - DNA, 75 bp, synthetic construct
  source 1..75: mol_type = other DNA
gttcaggccaggttcagagctgatgcccctgtttatgcaggggcgtgtcctgctggagcctgagccggaacgtta

SEQ ID NO: 18972 - DNA, 75 bp, synthetic construct
  source 1..75: mol_type = other DNA
atctgggcaaacgaagcgttactgatatcctcccgctggaaatgctggaaattctgcgccgcatagaaaaacgtg

SEQ ID NO: 18973 - DNA, 75 bp, synthetic construct
  source 1..75: mol_type = other DNA
atgaacgcaaaaatcagatacggcctgtcggctgccgttctggcgctgattggtgcaggggcgtctgcgcctgaa

SEQ ID NO: 18974 - DNA, 75 bp, synthetic construct
  source 1..75: mol_type = other DNA
atcagaatggtatcgctataactgcaggcgatattaccgtttataactacgatgctgaaaaccgtgaatatctct

SEQ ID NO: 18975 - DNA, 75 bp, synthetic construct
  source 1..75: mol_type = other DNA
agacgtgggtatgagtttaggaaagccctcagcctcgattatcgtcactggataatctacgtcaggctgccgtac

SEQ ID NO: 18976 - DNA, 75 bp, synthetic construct
  source 1..75: mol_type = other DNA
tattaccgtctataactatgatggtaaaactcgggaatatatttctacttcaaatgaatatcttgccattggtgt

SEQ ID NO: 18977 - DNA, 75 bp, synthetic construct
  source 1..75: mol_type = other DNA
cagtgagacgggttatatcaacaggctcagacgccttgcccgacaggcgccggattttatcgacgtccatgctca

SEQ ID NO: 18978 - DNA, 75 bp, synthetic construct
  source 1..75: mol_type = other DNA
agcaaattaccacagataaagaatataataatattatctctaatactgacgtattagagagtgccacagcagaca

SEQ ID NO: 18979 - DNA, 75 bp, synthetic construct
  source 1..75: mol_type = other DNA
agccaatatcagccagcctgacgccgatgaactgcttgcagtatcacgtggtgaatttgttgaagggattagcga

SEQ ID NO: 18980 - DNA, 75 bp, synthetic construct
  source 1..75: mol_type = other DNA
aaaacgccgggcgtatcccgcgtgctttgcattgagtgcgaagcaccaattccgccagcacgacgtcgcgccatt

SEQ ID NO: 18981 - DNA, 75 bp, synthetic construct
  source 1..75: mol_type = other DNA
acctggctgcgctgtacatgctgaaggttcaaaaaacgaaagacggcattccctatgtggccgggattggtgcag

SEQ ID NO: 18982 - DNA, 75 bp, synthetic construct
  source 1..75: mol_type = other DNA
ccgggtgtgcagctttgcattacctgtcaggaaatcgcagagctgaaaggcaaacattacaacggaggtgctgta

SEQ ID NO: 18983 - DNA, 75 bp, synthetic construct
  source 1..75: mol_type = other DNA
ctgtccggattctgattcagttacagcgtaatggccgctgggtgacggaaaaggacgtcaccattaacggcaaga

SEQ ID NO: 18984 - DNA, 75 bp, synthetic construct
  source 1..75: mol_type = other DNA
agacctgattatcaacaaaggagctactgttaccgcccagggaaaaatgtatgtagataaagctattgaactggc

SEQ ID NO: 18985 - DNA, 75 bp, synthetic construct
  source 1..75: mol_type = other DNA
aggcgctggcatgggtggagaaaaacatcaaagtgccactgaccgaaccccagaaagcggggatcgcgtcattct

SEQ ID NO: 18986 - DNA, 75 bp, synthetic construct
  source 1..75: mol_type = other DNA
cgtatccgctcaaataattgctacggtcaggtatcccgtcgcgaccaggagagtgcgctggcatgctggggtatc

SEQ ID NO: 18987 - DNA, 75 bp, synthetic construct
  source 1..75: mol_type = other DNA
gaaagccacaaaagcgaaggctggaagcaatacaagccaggacaatcccgtcatcagcgcggttatggttcgaaa

SEQ ID NO: 18988 - DNA, 75 bp, synthetic construct
  source 1..75: mol_type = other DNA
atgacacagactgaatcagcgattctggtgcatgcccggcggtgtgcgcctgcggagtcgtgcggcttcgtgata

SEQ ID NO: 18989 - DNA, 75 bp, synthetic construct
  source 1..75: mol_type = other DNA
taaaccgctgtatcaggattttctcttccgtacaaaagcggcgctgtcgaagaacccgaaaaacaggcttctggc

SEQ ID NO: 18990 - DNA, 75 bp, synthetic construct
  source 1..75: mol_type = other DNA
tgtcggctgccgttctggcgctgattggtgcaggggcgtctgcgcctgaaatcctcgaccagtttcttgacgaaa

SEQ ID NO: 18991 - DNA, 75 bp, synthetic construct
  source 1..75: mol_type = other DNA
acggcattatgacccgggcagttaagcgaggtcttgcccggataaaaaagccattatccgcccgtcatatgaatg

SEQ ID NO: 18992 - DNA, 75 bp, synthetic construct
  source 1..75: mol_type = other DNA
gtgaacctcccacaagatggcatcaaattacatcgcggtaacttcaccgctgtcggtcagcagatccagacttat

SEQ ID NO: 18993 - DNA, 75 bp, synthetic construct
  source 1..75: mol_type = other DNA
gctctttactcgttcgtctataacgtgggcgcaggcaatttcagaacatctactcttcttcgcaaaataaaccag

SEQ ID NO: 18994 - DNA, 75 bp, synthetic construct
  source 1..75: mol_type = other DNA
tctttgtggatgcgggaaacaaaaagctggtcttctggtttgtacgtgttgatgacgaagggtatccggaaatag

SEQ ID NO: 18995 - DNA, 75 bp, synthetic construct
  source 1..75: mol_type = other DNA
gccagtggccgggccagcaatgatgcagaagggtatctggggctgtttcgggaaaaaataggaaaactgcatctg

SEQ ID NO: 18996 - DNA, 75 bp, synthetic construct
  source 1..75: mol_type = other DNA
atggtaagcctgtgattcctggcatgaagctgtcgaaggaaaaatgcgaccgggttaacgctatcgaacgggata

SEQ ID NO: 18997 - DNA, 75 bp, synthetic construct
  source 1..75: mol_type = other DNA
atgaagattgaatatacgccagaacgtgggcggggattcgttcgccctggtgaaactgaaaaacaacaaaattgg

SEQ ID NO: 18998 - DNA, 75 bp, synthetic construct
  source 1..75: mol_type = other DNA
ctggcagagaaaattaaggataagaatttcctgaaattaatcgaacagtggctgaaggcaggatatgtggacaat

SEQ ID NO: 18999 - DNA, 75 bp, synthetic construct
  source 1..75: mol_type = other DNA
actcaaaagaatacacagacacctatagctatggcgataactgcagcattaacagcgatgtcaattgcctgtcag

SEQ ID NO: 19000 - DNA, 75 bp, synthetic construct
  source 1..75: mol_type = other DNA
tcgccgactggcagcactcaacatgctggcagagcgcaacatccttccggctgactggcctgtacgcgtgaaggt

SEQ ID NO: 19001 - DNA, 75 bp, synthetic construct
  source 1..75: mol_type = other DNA
aatcagattgacgtgtgcagacctggaaatttacgtgggcctgttaatctttactctctgattctggctgattcc

SEQ ID NO: 19002 - DNA, 75 bp, synthetic construct
  source 1..75: mol_type = other DNA
atgtggatggagttcgacagggtatccccgctgggtgatgagcgcggggatatccgtaatgcacagatcgtgaaa

SEQ ID NO: 19003 - DNA, 75 bp, synthetic construct
  source 1..75: mol_type = other DNA
ccaacgataaatatccaatggccaaaaatgggacaatatttactttctccgaaagatgcgttagcaccatttata

SEQ ID NO: 19004 - DNA, 75 bp, synthetic construct
  source 1..75: mol_type = other DNA
atggcgacgatcgattctatgaataaggacaccacacgtttgagcgatggacccgactggacgttcgacctgctg

SEQ ID NO: 19005 - DNA, 75 bp, synthetic construct
  source 1..75: mol_type = other DNA
cggcaactgttatccggtcgataaagttattcacatggacaataacgaaatcccggcaggattaaaaacagcgcc

SEQ ID NO: 19006 - DNA, 75 bp, synthetic construct
  source 1..75: mol_type = other DNA
tgccggtgattacttccagacgggatcatcaacaacaggatatgtgatacctgagcgaaattactggatgtcgct

SEQ ID NO: 19007 - DNA, 75 bp, synthetic construct
  source 1..75: mol_type = other DNA
ccgccacgttcagcgaatgctgaaactggcagaccttgcgcctgtcatcctcgatgcgctggcagaagaccgcat

SEQ ID NO: 19008 - DNA, 75 bp, synthetic construct
  source 1..75: mol_type = other DNA
cttcagtggctgtatgccatcgatgtgctgattgaaacacagggcgaggtctgcctccttccccttcccggcgat

SEQ ID NO: 19009 - DNA, 75 bp, synthetic construct
  source 1..75: mol_type = other DNA
gatctcggttttgatgacagtcacgttgtgacaatgccggaactgtgctggtggctgattcgtaatgacctggcg

SEQ ID NO: 19010 - DNA, 75 bp, synthetic construct
  source 1..75: mol_type = other DNA
taatgaatatccgtccccaatcctgcccaaagaacgctggcgttaccagatggtgaatatgtatccggacagcgg

SEQ ID NO: 19011 - DNA, 75 bp, synthetic construct
  source 1..75: mol_type = other DNA
tgaactacgtgtctctggatacccaatcaaaggcaggggtgagacaggttcccagcacggaaggccaatggaagt

SEQ ID NO: 19012 - DNA, 75 bp, synthetic construct
  source 1..75: mol_type = other DNA
gtgctgacgcgacgaaaaaaggtggcgcgaaaacgaaaggccgtggacgtaaggccgcgcagcccgagcctcagc

SEQ ID NO: 19013 - DNA, 75 bp, synthetic construct
  source 1..75: mol_type = other DNA
tttatttggtcatgtcaggaatttcagaatatggcacaaggcattgactgatgctcaggtgggggagtcaatcta

SEQ ID NO: 19014 - DNA, 75 bp, synthetic construct
  source 1..75: mol_type = other DNA
atttcacaccatcgggtatagcgcagccgggattatttgatgaaatccagccccgtaaaaacagtgaaaagttaa

SEQ ID NO: 19015 - DNA, 75 bp, synthetic construct
  source 1..75: mol_type = other DNA
tgaccgaaagtgaagtggcggtggcggggaacagtaaattccgcttcgtgggggctgatgccttctcgccagatg

SEQ ID NO: 19016 - DNA, 75 bp, synthetic construct
  source 1..75: mol_type = other DNA
gaaaacacgaacgggagttattaaataaaatatgcattgtttcaatgctggcccgtttacgcctgatgcaaaaag

SEQ ID NO: 19017 - DNA, 75 bp, synthetic construct
  source 1..75: mol_type = other DNA
tggtttttattcgctccagtgaactcagatatgcccgctgggctgaaattgatattgacaattcaatgtggacta

SEQ ID NO: 19018 - DNA, 75 bp, synthetic construct
  source 1..75: mol_type = other DNA
cgaaatggcgatttgaaaagaatcgcccctgtcagggagtgaagagacaatttatctttacgccgtcacgtcctt

SEQ ID NO: 19019 - DNA, 75 bp, synthetic construct
  source 1..75: mol_type = other DNA
tcatttattgccctccgtctgaatgtttcatcagaaaccgtcgatgcctcacatcaggcgcttctgcaatatatc

SEQ ID NO: 19020 - DNA, 75 bp, synthetic construct
  source 1..75: mol_type = other DNA
ctggcacaggatcgcccgtcgctggccattgtgtccgggcagggcggtgcagccgggcagcgtgagcgggtggct

SEQ ID NO: 19021 - DNA, 75 bp, synthetic construct
  source 1..75: mol_type = other DNA
gtccatcggcctggagcaactgctggcggtcaatcctgcctggctgctggttgcccactatcgcgaagagagcat

SEQ ID NO: 19022 - DNA, 75 bp, synthetic construct
  source 1..75: mol_type = other DNA
ttagcgcaactatcatttcaggttgtacttcttccgtaccattgataaagaaaactcaatcaggaaaacctgagg

SEQ ID NO: 19023 - DNA, 75 bp, synthetic construct
  source 1..75: mol_type = other DNA
tgccttagaaagtatatttgaacattatcttgattatattattgataataataaaaaccttatccctatccaaga

SEQ ID NO: 19024 - DNA, 75 bp, synthetic construct
  source 1..75: mol_type = other DNA
tatcggtgcaggtgatgatcgcatcgtgctttctggcgtgctttatcctgaaattacaggtggcgaagtgtcgct

SEQ ID NO: 19025 - DNA, 75 bp, synthetic construct
  source 1..75: mol_type = other DNA
atgatgatgatctacggcatgtttgtttttgagctgcgcacattgccgcatcagcagttacagcaaaacaaaagc

SEQ ID NO: 19026 - DNA, 75 bp, synthetic construct
  source 1..75: mol_type = other DNA
atgccgggcgtaccggtggaggccttttccggacgctcacagactatccgggaggccgtcggggaagacgcctcg

SEQ ID NO: 19027 - DNA, 75 bp, synthetic construct
  source 1..75: mol_type = other DNA
cgagtgagtcactggcagccctggtgaatgccggtgtgcgtggtggtgaacagtttgatgccatcaaccagagtg

SEQ ID NO: 19028 - DNA, 75 bp, synthetic construct
  source 1..75: mol_type = other DNA
ccggtaacgcacgtttcacgcgacgaactacaggcattacacattgcacgagctgaagaactaccagctgttact

SEQ ID NO: 19029 - DNA, 75 bp, synthetic construct
  source 1..75: mol_type = other DNA
aaccacaggtacggatatcacggcaacgactgacctttgatgagtggatgatgatttataatgcagcggaaaagg

SEQ ID NO: 19030 - DNA, 75 bp, synthetic construct
  source 1..75: mol_type = other DNA
atctggcgcaggcgaaatgggacacgccgcgggtggtgaagggcgtgcgcttcagtctgcgcctgaccagtggaa

SEQ ID NO: 19031 - DNA, 75 bp, synthetic construct
  source 1..75: mol_type = other DNA
tagtcttgcgtgtcatatcacatcccgccagctaaaccacgtcgaagcggcagaactgctgcgtgtgaccgctga

SEQ ID NO: 19032 - DNA, 75 bp, synthetic construct
  source 1..75: mol_type = other DNA
gagaaaagccggcgcatccagcttctggaagaaatgctgaaactggttcgtcaacagcgcttcggaaaaaaatgt

SEQ ID NO: 19033 - DNA, 75 bp, synthetic construct
  source 1..75: mol_type = other DNA
gagttctggcacgacgaaaagaattacgcctaacacaacgagaagctgcacgcctcgctggggtagctcacgtca

SEQ ID NO: 19034 - DNA, 75 bp, synthetic construct
  source 1..75: mol_type = other DNA
atgttgaccacaacaagccacgacagcgtgttgctgcgtgccgacgatcccctgatcgacatgaactacatcacc

SEQ ID NO: 19035 - DNA, 75 bp, synthetic construct
  source 1..75: mol_type = other DNA
tcccctgatcgacatgaactacatcaccagtttcaccggtatgacagataaatggttttacaagctgatcagtga

SEQ ID NO: 19036 - DNA, 75 bp, synthetic construct
  source 1..75: mol_type = other DNA
tggaatggcaagtcgtaaatttgatgagtttgttgatgctatggcggatatggggaaagcggtacagaaactgaa

SEQ ID NO: 19037 - DNA, 75 bp, synthetic construct
  source 1..75: mol_type = other DNA
gtgacgccgggggaaaccctgtcggtaaactgggatggaaaaatacagtgtcaggtaaatgtaccggagacagca

SEQ ID NO: 19038 - DNA, 75 bp, synthetic construct
  source 1..75: mol_type = other DNA
ttttctgccaccacgatgctgttttcactgggggccagcatgattctgggcggtgtggcccagatgctggccccg

SEQ ID NO: 19039 - DNA, 75 bp, synthetic construct
  source 1..75: mol_type = other DNA
atctgcatactatacttcctacgtcctatccgatacatggatttttcttttatccatttttggacaataatggaa

SEQ ID NO: 19040 - DNA, 75 bp, synthetic construct
  source 1..75: mol_type = other DNA
cgccagaaccagagacgtcttgcctacgcatcagatgtttaccggatttataccgggataaaaagcagtaaaggt

SEQ ID NO: 19041 - DNA, 75 bp, synthetic construct
  source 1..75: mol_type = other DNA
aacagccacgcggaataaaacacaaagacacagaggtaattattttcgcgggtagtgatgcctgggcacacgcga

SEQ ID NO: 19042 - DNA, 75 bp, synthetic construct
  source 1..75: mol_type = other DNA
agcttgtacaggtggttaatgctgtagatgtacaaaaacaactaaatgcgttgtttaccagtttgttttttactc

SEQ ID NO: 19043 - DNA, 75 bp, synthetic construct
  source 1..75: mol_type = other DNA
gacatcatccggagaaacgcagtgcccgtgcgcagcgcgatgactggctgaagaaagagatacagcgcgtatacg

SEQ ID NO: 19044 - DNA, 75 bp, synthetic construct
  source 1..75: mol_type = other DNA
cagcaaaatattcttgtgcagatgcttggggatctgccggtcggatttatttaccgtgactgccagggcagcgcg

SEQ ID NO: 19045 - DNA, 75 bp, synthetic construct
  source 1..75: mol_type = other DNA
ctatttcctttatggcgacagtgttacttttattgctctttgcttgccatagcaccattgccaacgcagctgtcg

SEQ ID NO: 19046 - DNA, 75 bp, synthetic construct
  source 1..75: mol_type = other DNA
ccgctgcggtggttttcggtggataaaacgcaaatcgctggtgaaagtctgcatcttaaccttcaacagcggttg

SEQ ID NO: 19047 - DNA, 75 bp, synthetic construct
  source 1..75: mol_type = other DNA
gccatcggtattaatccggtaacgggatatggcagcggactgatgcaggtagattcccagcattttaacgaactg

SEQ ID NO: 19048 - DNA, 75 bp, synthetic construct
  source 1..75: mol_type = other DNA
atgtcgatgataaaaagctatgccgcaaaagaagcgggtggcgaactggaagtttatgagtacgatcccggtgaa

SEQ ID NO: 19049 - DNA, 75 bp, synthetic construct
  source 1..75: mol_type = other DNA
aagcagggcggcgtactggttccccgtaaatatcacctcatcagaaccgcttatgaaatcaacgaagagccgacc

SEQ ID NO: 19050 - DNA, 75 bp, synthetic construct
  source 1..75: mol_type = other DNA
gagtgggcgtttgtgggttgccacccttttccattttggtttgaatctgtgtcacttgttattctttacctatcc

SEQ ID NO: 19051 - DNA, 75 bp, synthetic construct
  source 1..75: mol_type = other DNA
atccaataccttggtttaagagaactcggtaccagcggtgaaaagatccccctgttgagcacggctaacacatgg

SEQ ID NO: 19052 - DNA, 75 bp, synthetic construct
  source 1..75: mol_type = other DNA
tgggtgtatcaatggttttttgtggaaaccccccttttgatgaaacactggccagaaaaatgcgtattgccagac

SEQ ID NO: 19053 - DNA, 75 bp, synthetic construct
  source 1..75: mol_type = other DNA
gatattgaattggttaattgtgatatcacttcatttaaggggggggaggagtctcggcagcaaaaaaagggactg

SEQ ID NO: 19054 - DNA, 75 bp, synthetic construct
  source 1..75: mol_type = other DNA
ccatgcgaattcaccaacaacatccgacatcccgtctttttccgttctgtaccggcaaataccgctggcacggtg

SEQ ID NO: 19055 - DNA, 75 bp, synthetic construct
  source 1..75: mol_type = other DNA
gataaccagaaagccgcagtgctgaaaaataacaacgggaaggtggtgttcaactccgggttcctgctgctggcc

SEQ ID NO: 19056 - DNA, 75 bp, synthetic construct
  source 1..75: mol_type = other DNA
atgaccagatggtcgacatggcgtttatcactcaactgaccggcttaaccgataagtggttttacaaactcatca

SEQ ID NO: 19057 - DNA, 75 bp, synthetic construct
  source 1..75: mol_type = other DNA
atgaaaaagattctcgtatcatttgttgccattatggctgccgcttcatctgccatggctgcagagacaatgaac

SEQ ID NO: 19058 - DNA, 75 bp, synthetic construct
  source 1..75: mol_type = other DNA
aaggatacggtagctcagactgatttaacgtcagtcggtcgcgatattctggctaaaacaagcacactggccgtt

SEQ ID NO: 19059 - DNA, 75 bp, synthetic construct
  source 1..75: mol_type = other DNA
ataccgaaaaggcctttgaatatatcgccggtgcgccgcaggggcagaaggataatccgcttattaatattctgg

SEQ ID NO: 19060 - DNA, 75 bp, synthetic construct
  source 1..75: mol_type = other DNA
tgacgacataccagtaaaagtgctggcaccgggcagaaaaaaggcaaaaacaggacgcatctggacgtatgtccg

SEQ ID NO: 19061 - DNA, 75 bp, synthetic construct
  source 1..75: mol_type = other DNA
gtgcaaataaccgaagcattaatttcagagccgggagacatccggcgttttattcagcaggcggtggaccactgg

SEQ ID NO: 19062 - DNA, 75 bp, synthetic construct
  source 1..75: mol_type = other DNA
gcaaaacaccgcacacaaaaggcggtggatgagctggtggattgcgtggcggaactggaaggacaggtaagccag

SEQ ID NO: 19063 - DNA, 75 bp, synthetic construct
  source 1..75: mol_type = other DNA
cggaaattaaatcattcatcactggtttcctgagcgacccggcgcacgataaccaatcttcagacagcctgcttg

SEQ ID NO: 19064 - DNA, 75 bp, synthetic construct
  source 1..75: mol_type = other DNA
cattaacccggatgaagggggctgccatgcgactgaccgggatgctgtaccggaatccggatcttgctgagcggg

SEQ ID NO: 19065 - DNA, 75 bp, synthetic construct
  source 1..75: mol_type = other DNA
atcggtatgttgagcgtgaattgccgggagggagaacctctgtattttatcagcgaaaaaatagtttacgatcgt

SEQ ID NO: 19066 - DNA, 75 bp, synthetic construct
  source 1..75: mol_type = other DNA
cgtctggggaatgcccgggcagatgatctggtgcgcaataacggaatagcggctaatgcggtggccctgcataag

SEQ ID NO: 19067 - DNA, 75 bp, synthetic construct
  source 1..75: mol_type = other DNA
ctgatgaaagcggtgtatgagatggcccgtaaaggtgcgcaggatgagattcaggcgcagatgcgtgatggcggc

SEQ ID NO: 19068 - DNA, 75 bp, synthetic construct
  source 1..75: mol_type = other DNA
gatagcaccgaacttacaaaaaaaattaacgtgatcggtgtgaccgaccagaaaggcgaaaaagtcctcatggac

SEQ ID NO: 19069 - DNA, 75 bp, synthetic construct
  source 1..75: mol_type = other DNA
tccgacattttacggcgtatgttgaaattttccgccgcatcacagcctgctgctccggtgacgaaagaggttcgc

SEQ ID NO: 19070 - DNA, 75 bp, synthetic construct
  source 1..75: mol_type = other DNA
ggaaaaggccagagccgcccatcttgagaacgcccgcctgatggatgagaccgtcacggccattgaacgggcaga

SEQ ID NO: 19071 - DNA, 75 bp, synthetic construct
  source 1..75: mol_type = other DNA
ctggatgcgagattgccatacttcagatgataaagacgtcatcgcaattgatggaaaaacactccggcattctta

SEQ ID NO: 19072 - DNA, 75 bp, synthetic construct
  source 1..75: mol_type = other DNA
cctatctgagtctggtcaccgatgcctgctccagaaaaattatgggctaccatgttggggaaaacctgcagacag

SEQ ID NO: 19073 - DNA, 75 bp, synthetic construct
  source 1..75: mol_type = other DNA
tcaaaacctttgacggcaaaagcggcaagggtcttatcaccccatccgatggtcgtatcgatgtccagcttcatg

SEQ ID NO: 19074 - DNA, 75 bp, synthetic construct
  source 1..75: mol_type = other DNA
cagcaggaaagcagtctggtcgccactgcgataaatcacaataaaaacaaatccggaaaaatcatcagtacggat

SEQ ID NO: 19075 - DNA, 75 bp, synthetic construct
  source 1..75: mol_type = other DNA
gtttattcaaaaagccgccgaaatgggtaatggtggcggaactggtagaaaccagccgcctgtgggggcgcattg

SEQ ID NO: 19076 - DNA, 75 bp, synthetic construct
  source 1..75: mol_type = other DNA
gccgggcgcaattaatataaataaggacaaaaaaacaggtaaagccagtagcacggattatgggttgatgcaaat

SEQ ID NO: 19077 - DNA, 75 bp, synthetic construct
  source 1..75: mol_type = other DNA
acgcatacctaccaagctgggatacaaaaatccaaagcatgttcaggtcattgaaataaccaaccatttcccagg

SEQ ID NO: 19078 - DNA, 75 bp, synthetic construct
  source 1..75: mol_type = other DNA
cgtggctgggtcgtaaacatcgtgacaatactctcacgctgaaacgcttttcatcgggggtgggcttctggtgcc

SEQ ID NO: 19079 - DNA, 75 bp, synthetic construct
  source 1..75: mol_type = other DNA
gttcctgtattactggagctggctccgtggtttggcagaaaacatcgggacaacacgcttaccctgaaacgtttc

SEQ ID NO: 19080 - DNA, 75 bp, synthetic construct
  source 1..75: mol_type = other DNA
ctgtgctttctgctctgtttatggtcaacgtccaggcggcagacacgatggcgaaagactccatatctaagccgc

SEQ ID NO: 19081 - DNA, 75 bp, synthetic construct
  source 1..75: mol_type = other DNA
aaaaatccaaagcatgttcaggtcattgaaataaccaaccatttcccaggcggttattgggaagatcaggggtac

SEQ ID NO: 19082 - DNA, 75 bp, synthetic construct
  source 1..75: mol_type = other DNA
tacgcgaactggcgactgacctgcaacgaatggcaacgcctcaaaaattactggcgtttcgcgcaatgctctcgc

SEQ ID NO: 19083 - DNA, 75 bp, synthetic construct
  source 1..75: mol_type = other DNA
tcaacattcaggatcttgctgaatatatagataaacggcgtgaagaaggcagaattgaatgggagagggtaagaa

SEQ ID NO: 19084 - DNA, 75 bp, synthetic construct
  source 1..75: mol_type = other DNA
ttgagttccgctgtgataacggagaaaaactgcgggtcacgttcgcgctggactgctgtgaccgtgaggcactgc

SEQ ID NO: 19085 - DNA, 75 bp, synthetic construct
  source 1..75: mol_type = other DNA
gtcgatggtattaagctcgctgaactgattaacaaagtcgctgaaaacggttattcactccgcgtggtggatgaa

SEQ ID NO: 19086 - DNA, 75 bp, synthetic construct
  source 1..75: mol_type = other DNA
tctgttaagtccgccctgcgccttgatcctgacgctatcctgaacggggagatacgtgaccatgcctccgccatc

SEQ ID NO: 19087 - DNA, 75 bp, synthetic construct
  source 1..75: mol_type = other DNA
ccggaaatcagcgaagcgaacattctgagcacatttaaacaactgcaccagaacaaagatgaagtgtttgagcga

SEQ ID NO: 19088 - DNA, 75 bp, synthetic construct
  source 1..75: mol_type = other DNA
gtcggggagattgcgcagaatacttacctttcacgcgaacgctgccagttaatactgacccagctggttatggcg

SEQ ID NO: 19089 - DNA, 75 bp, synthetic construct
  source 1..75: mol_type = other DNA
accattacctgttttcctaacctgagtcccggagagatatctcgtttccgtaactcgctgaatgcgaaaattaat

SEQ ID NO: 19090 - DNA, 75 bp, synthetic construct
  source 1..75: mol_type = other DNA
cctcctcttctgcgtattctctggcggctgggtatccggcttccgccattaccctttatgccgttctggcaggtc

SEQ ID NO: 19091 - DNA, 75 bp, synthetic construct
  source 1..75: mol_type = other DNA
cactgatttgtcgtcacgcccgcaacctgctgctggcgcagggctggccggaagagacggatgttgaccagcgga

SEQ ID NO: 19092 - DNA, 75 bp, synthetic construct
  source 1..75: mol_type = other DNA
ctgaagaaagattttgaggagcgtcacaccgggcttggcaatgctcaccgcccgatgatccttgagatggggctg

SEQ ID NO: 19093 - DNA, 75 bp, synthetic construct
  source 1..75: mol_type = other DNA
attaattttgtctttcatgttttcactgattatgtggatgatgattatttaaagtcatttaatgaaacagcaaaa

SEQ ID NO: 19094 - DNA, 75 bp, synthetic construct
  source 1..75: mol_type = other DNA
tgaaatctggcgtgacctgatgcaacgctccgggatgctttccttaatggatgcacaggcccgtgatacatggta

SEQ ID NO: 19095 - DNA, 75 bp, synthetic construct
  source 1..75: mol_type = other DNA
ccggcaattgactgaaatctcagtactgacaaaaagcattggtggtaaaagcgcacgggactgggcgatgaaaca

SEQ ID NO: 19096 - DNA, 75 bp, synthetic construct
  source 1..75: mol_type = other DNA
acatcacagaaagcaaagcgctgcatcaacattcaggatcttgctgaatatatagataaacggcgtgaagaaggc

SEQ ID NO: 19097 - DNA, 75 bp, synthetic construct
  source 1..75: mol_type = other DNA
gtgtttacgggaaaatactgcgaacacctgccactgtatcgtcagagtgaaatctttgcccgacagggtgtcgaa

SEQ ID NO: 19098 - DNA, 75 bp, synthetic construct
  source 1..75: mol_type = other DNA
gcccgacagggtgccgaactgagccgtgcattaatctccaactgggttgacgcgtgctgccagttaatgactccg

SEQ ID NO: 19099 - DNA, 75 bp, synthetic construct
  source 1..75: mol_type = other DNA
gccgacgacgcgctaaattctgagtggataagccacggtgcaatctggaataacccaccgtacagcaatatcagg

SEQ ID NO: 19100 - DNA, 75 bp, synthetic construct
  source 1..75: mol_type = other DNA
tggatgagaaccccttctccggtcacctgtttatctttcgcggccgacggggtgacacgattaaaatcctgtggg

SEQ ID NO: 19101 - DNA, 75 bp, synthetic construct
  source 1..75: mol_type = other DNA
tatcactgatggacggattaattttatcgaaccatcgacagggctggagaagaagggaaacagcaaaggctccat

SEQ ID NO: 19102 - DNA, 75 bp, synthetic construct
  source 1..75: mol_type = other DNA
ggcgtgatgctttattccgtgcattacgtgaattattcagcctgtttgagtatgcaccgacaattctgacgtcgg

SEQ ID NO: 19103 - DNA, 75 bp, synthetic construct
  source 1..75: mol_type = other DNA
ctgaacaccatcatgaaaggctacgcgcgttattacgccaccaatacggtaaaactgggcggggtccgtattccg

SEQ ID NO: 19104 - DNA, 75 bp, synthetic construct
  source 1..75: mol_type = other DNA
gggtctggaacccggtatcttctgcgccatccatacgtatggccgtcgtctcaactggcatccgcatgtgcatgt

SEQ ID NO: 19105 - DNA, 75 bp, synthetic construct
  source 1..75: mol_type = other DNA
cgatatgcgtaaatccttcaacggactgggagaacaggtacaacatgtgctgaatgataatcccttctccggtca

SEQ ID NO: 19106 - DNA, 75 bp, synthetic construct
  source 1..75: mol_type = other DNA
agcaaggtcgatgtgggcttcgagaagcgcgaggccgtcgtcacttttgacgacaccaaggccagcgtacagaag

SEQ ID NO: 19107 - DNA, 75 bp, synthetic construct
  source 1..75: mol_type = other DNA
gggtaagccacggtgcaatctggaataacccaccgtacagcaatatcaggccgtgggtggaaaaagccgctgagc

SEQ ID NO: 19108 - DNA, 75 bp, synthetic construct
  source 1..75: mol_type = other DNA
tgggtattgatgttgccaaactatcgctggacatcgccaccaccgacacgattgagccattcactgtgggtaacg

SEQ ID NO: 19109 - DNA, 75 bp, synthetic construct
  source 1..75: mol_type = other DNA
gctgcctcctgtgaacccgggatatccatctcaaaacttgctcttgaaaatggcattaacgccaatctgttgttc

SEQ ID NO: 19110 - DNA, 75 bp, synthetic construct
  source 1..75: mol_type = other DNA
tcaacggcactatatccaacgaaaccgctcttctcgttaatgcccgtgatttacacactttcctcgatgtgggta

SEQ ID NO: 19111 - DNA, 75 bp, synthetic construct
  source 1..75: mol_type = other DNA
ccccgtcgtcttatccgtgcccgcatccggttaagtccggcacgaccggataaggtttacgcaaaggtttacatc

SEQ ID NO: 19112 - DNA, 75 bp, synthetic construct
  source 1..75: mol_type = other DNA
ctgtatgatcccaaggtttatgacgaatatcgtaagacgaagcgggcggggcggttgaacaatgaaaatcactcc

SEQ ID NO: 19113 - DNA, 75 bp, synthetic construct
  source 1..75: mol_type = other DNA
ccatgcgtattcaccaacagcatcctgcatcccgtctttttccgttctgcacaggtaagtaccgctggcacggtg

SEQ ID NO: 19114 - DNA, 75 bp, synthetic construct
  source 1..75: mol_type = other DNA
ttaaaacagagatttgtcaaaggtatttcggaaatcgaaataccttctgctggcggtaaacagttaatgatatgc

SEQ ID NO: 19115 - DNA, 75 bp, synthetic construct
  source 1..75: mol_type = other DNA
gcctccctgaaatatctcagcgaccacccgaaactgcagggtattgcccagcagaacagctttaaacacacctga

SEQ ID NO: 19116 - DNA, 75 bp, synthetic construct
  source 1..75: mol_type = other DNA
atgaaaatcatcacccgtggtgaagccatgcgtattcaccaacagcatcctgcatcccgtctatttccgttctgc

SEQ ID NO: 19117 - DNA, 75 bp, synthetic construct
  source 1..75: mol_type = other DNA
aatcgaccaggagcagggctggcataaaacgctgtccaacgtcggggtgaacggtgttaccggcatcagcgcatc

SEQ ID NO: 19118 - DNA, 75 bp, synthetic construct
  source 1..75: mol_type = other DNA
gcaatgatcatttgtggctgtatggcccggttgaataagaacaacaaagaattacacgatttgctggtagattat

SEQ ID NO: 19119 - DNA, 75 bp, synthetic construct
  source 1..75: mol_type = other DNA
tgaaatgtggcgtgacatgcgctggtcggttgcccgtatccaggacaaagcgcgctgcatcgtggggcaaatctg

SEQ ID NO: 19120 - DNA, 75 bp, synthetic construct
  source 1..75: mol_type = other DNA
cctgcgatgatgaatttggcgctgaagtgtattccggggccacaacagagaaacaggcgtgggaagtttttcgtc

SEQ ID NO: 19121 - DNA, 75 bp, synthetic construct
  source 1..75: mol_type = other DNA
gaaagcatcaaagttttttactacgagcgcgccgtgtgtgcgatggcgaccgcgtcgctttatgagcgttatcgc

SEQ ID NO: 19122 - DNA, 75 bp, synthetic construct
  source 1..75: mol_type = other DNA
ttagcggctggcgcacgccttgcggcctcgtctccagaagcaatgcaatcatggctgcaaaacaacgccaaggaa

SEQ ID NO: 19123 - DNA, 75 bp, synthetic construct
  source 1..75: mol_type = other DNA
tcaccagtggagcactcggaactgcctatggctatttctgcgctctggtcagtttatcgtgacgtaggggtgtac

SEQ ID NO: 19124 - DNA, 75 bp, synthetic construct
  source 1..75: mol_type = other DNA
atatgtggacggagcggttagggatactggcgggaacacatgaaaacgtaaccacattgccaatagccagagaaa

SEQ ID NO: 19125 - DNA, 75 bp, synthetic construct
  source 1..75: mol_type = other DNA
gggtagtctggtgtttggcctgttgacgtatctgacaaatctttatttcaagattaaagaagataagcgtaaggc

SEQ ID NO: 19126 - DNA, 75 bp, synthetic construct
  source 1..75: mol_type = other DNA
gcacctgccgtccggcatcctgaaagacgccacttccgttcgcctcttcctgaaagcaacagatagcgaggagta

SEQ ID NO: 19127 - DNA, 75 bp, synthetic construct
  source 1..75: mol_type = other DNA
cggcacgactgatgtgtaaacgcacacccatgctgacggaagcgttcgggattgaggttaacgcctcaaacatga

SEQ ID NO: 19128 - DNA, 75 bp, synthetic construct
  source 1..75: mol_type = other DNA
cggatcgctgatgatatggtggagattatcgaagagtcctttgggttaccccggggatggatggatggtatcgtt

SEQ ID NO: 19129 - DNA, 75 bp, synthetic construct
  source 1..75: mol_type = other DNA
tgataacagtggcggatgtgatgctggcgttacatggcagctacgacaacaaaaactcgggcgaaaaatttttgc

SEQ ID NO: 19130 - DNA, 75 bp, synthetic construct
  source 1..75: mol_type = other DNA
gtgcgggtattacttcgacctgttctggtaccggaactcgggctggtggcccttaagccaggtcgtgaatccatg

SEQ ID NO: 19131 - DNA, 75 bp, synthetic construct
  source 1..75: mol_type = other DNA
ttacatcgctgcctcccgggataagatgaagagccgctttgactccgttgctgaacaaaccggaatgtttgccgg

SEQ ID NO: 19132 - DNA, 75 bp, synthetic construct
  source 1..75: mol_type = other DNA
acagaatgccccgcgtcacagccagtatcaaccgcacagataaccagtcagatggccggaaatatccgggcgtta

SEQ ID NO: 19133 - DNA, 75 bp, synthetic construct
  source 1..75: mol_type = other DNA
gcaggctgtgatggacaatgttctggagaatctgaatcaggcacagcaacagattgccattttccagagtcaggt

SEQ ID NO: 19134 - DNA, 75 bp, synthetic construct
  source 1..75: mol_type = other DNA
ggcgttatcactccgggtgaatgcaaaatcggtatccagccgggtcacattcacaaaccgggtaaagtgggtatc

SEQ ID NO: 19135 - DNA, 75 bp, synthetic construct
  source 1..75: mol_type = other DNA
atggatatcacgccgatacttcatgcaatttgtgctgtggcggtacaggggctggctggtctttttaccggaaac

SEQ ID NO: 19136 - DNA, 75 bp, synthetic construct
  source 1..75: mol_type = other DNA
cgcgagacgaaaaacgagcaggtggtgctgcaccagattgttgatcgccggacagcgtcgatgcgcagcgtgggg

SEQ ID NO: 19137 - DNA, 75 bp, synthetic construct
  source 1..75: mol_type = other DNA
atgggagcattacccaaccgaaagtatgcggtcgtaacacgttcaagttttacatctgacaatgagaacgtagtg

SEQ ID NO: 19138 - DNA, 75 bp, synthetic construct
  source 1..75: mol_type = other DNA
gttgtttttgatgcagttccaggtttagattcagaggctggatatcgccatcaggaagagttgaggaaaaaaagt

SEQ ID NO: 19139 - DNA, 75 bp, synthetic construct
  source 1..75: mol_type = other DNA
ggaaaactgcgcatgtgggggcgctggtcgtatattggcggcggtaagacggggaatatgtttaaccagttgctg

SEQ ID NO: 19140 - DNA, 75 bp, synthetic construct
  source 1..75: mol_type = other DNA
ttggcgatgcgatcagttactggctggaaacgcacgtaaaggaaaaccgtgtcgattatgtatgcctgaaaagtc

SEQ ID NO: 19141 - DNA, 75 bp, synthetic construct
  source 1..75: mol_type = other DNA
aatgaaatggtcagacataaacgacaaccatcttcacattgaacagggtaaaacaggggctaagctcgccattcc

SEQ ID NO: 19142 - DNA, 75 bp, synthetic construct
  source 1..75: mol_type = other DNA
ccaatccgggttgtagcggtggagaaatcgccgcagcactgaatacaccaaccacaaccattaatgcggagctac

SEQ ID NO: 19143 - DNA, 75 bp, synthetic construct
  source 1..75: mol_type = other DNA
ttgggttatcgctcgccacgggaatatctgcggcagcgggcctgtaatgggttaagtgataacagatgtctggaa

SEQ ID NO: 19144 - DNA, 75 bp, synthetic construct
  source 1..75: mol_type = other DNA
tatggttcagcgctcaccattaagacggggcatggcaacatactggtttctgaaaggagagaagcaggcggggca

SEQ ID NO: 19145 - DNA, 75 bp, synthetic construct
  source 1..75: mol_type = other DNA
cagctttttcaggccggagacgcgcaagaacgtttttccattcagtctatttccaaagtgctgagtctcgttgtc

SEQ ID NO: 19146 - DNA, 75 bp, synthetic construct
  source 1..75: mol_type = other DNA
tacgtcgacgagattttctggatcccgaattttcaggtactgcgtaaggtggcatcaggtatggcctcacagagt

SEQ ID NO: 19147 - DNA, 75 bp, synthetic construct
  source 1..75: mol_type = other DNA
ccgatatcgcatgggcgaccatgcacgccctgttaaacgaaccgctttctgccggtagcggcatgcagcctaaat

SEQ ID NO: 19148 - DNA, 75 bp, synthetic construct
  source 1..75: mol_type = other DNA
aaagcggagaacaccttcgtctcgccacgctggaaagtgtctggattcagggcaaactgcgtatgtgggggcgct

SEQ ID NO: 19149 - DNA, 75 bp, synthetic construct
  source 1..75: mol_type = other DNA
ccgtgaaaaatcgtggcataagaccaccgtcggggaagtggtgaaggaaatagcctcgcggcataagctgaagat

SEQ ID NO: 19150 - DNA, 75 bp, synthetic construct
  source 1..75: mol_type = other DNA
cgctggcgctgccggaactctgaagctgatgccggaaaacagcttaatgcgtggctcgccagtggagggcttctc

SEQ ID NO: 19151 - DNA, 75 bp, synthetic construct
  source 1..75: mol_type = other DNA
aacttcgatctgcgtgataagaatcaacgcccgggacgtaacccgaaaacgggcgaggatattcccattacagca

SEQ ID NO: 19152 - DNA, 75 bp, synthetic construct
  source 1..75: mol_type = other DNA
tgaaaagaaccgcagctggacacgctattttctggcgcgggaattgcgtaaatcactgaagccggagcgacgaca

SEQ ID NO: 19153 - DNA, 75 bp, synthetic construct
  source 1..75: mol_type = other DNA
cggtcattgatggtaaggacgggacaccattcatgctgtcgcagtctccggtcggcacgtttacggcagacaagt

SEQ ID NO: 19154 - DNA, 75 bp, synthetic construct
  source 1..75: mol_type = other DNA
ttttgcatgacccgcgacgacaggcgcggctgttgttctggcagggattttccgtaccacaaatcgccgacacac

SEQ ID NO: 19155 - DNA, 75 bp, synthetic construct
  source 1..75: mol_type = other DNA
atctgttattcatccggcaggggcagggtaaaagcgccagcggtaaaccactaccggtgatcactatcacacgca

SEQ ID NO: 19156 - DNA, 75 bp, synthetic construct
  source 1..75: mol_type = other DNA
tggcgaaagtgccgcaaagctctgtcgaccagatgtctccggcagacctgaatgcagcggcgtggcttgtggctg

SEQ ID NO: 19157 - DNA, 75 bp, synthetic construct
  source 1..75: mol_type = other DNA
tattgcgggtaagaaggcagacctgattatcagctctgccctgctacgccgggtgatggcggtgaaaatgtcgga

SEQ ID NO: 19158 - DNA, 75 bp, synthetic construct
  source 1..75: mol_type = other DNA
atcttatcgccctgctgacagcggcaacggtcctgacagcctgcacgccaaagggcagtgtggaacaacataccc

SEQ ID NO: 19159 - DNA, 75 bp, synthetic construct
  source 1..75: mol_type = other DNA
tattactctttacgcaaaacttggatataaaggggatatgagaaagctgcaggctaaagcattttctgcaacggc

SEQ ID NO: 19160 - DNA, 75 bp, synthetic construct
  source 1..75: mol_type = other DNA
gtggtgagcgcggtgcgtcactgtacagtcttatcgggacgtgcaaattaaacggcgtggatccggaacgctatc

SEQ ID NO: 19161 - DNA, 75 bp, synthetic construct
  source 1..75: mol_type = other DNA
aagaaaaaatctgcaaaatgccaaaaggctctgttcctgccctgcaacaggaaatgctacgacgtgtcggtaagc

SEQ ID NO: 19162 - DNA, 75 bp, synthetic construct
  source 1..75: mol_type = other DNA
tgtttatgacggacaacaatggacggtcacacggcatgaacgctttaacggtaagccaatgatctttattgagta

SEQ ID NO: 19163 - DNA, 75 bp, synthetic construct
  source 1..75: mol_type = other DNA
ggaaacgagaatcccagcaatgaaatttacggattgggatcaattcaggtggtggttaaattatttacagggata

SEQ ID NO: 19164 - DNA, 75 bp, synthetic construct
  source 1..75: mol_type = other DNA
tacgcaacgagctaacgttcctccaagagcgatgtaaagaaattaactgttgggttggcgaagatgtatttcgct

SEQ ID NO: 19165 - DNA, 75 bp, synthetic construct
  source 1..75: mol_type = other DNA
aaacctgtggtacggggatttattgcagagcggcatgtacgaagtctgtttaccgataccagccggatttgctcc

SEQ ID NO: 19166 - DNA, 75 bp, synthetic construct
  source 1..75: mol_type = other DNA
atgctaatcactcaaggaatctcaagtcaagggttattaagatatctaaatatgaacgagaaaactttaggtcaa

SEQ ID NO: 19167 - DNA, 75 bp, synthetic construct
  source 1..75: mol_type = other DNA
atgcgtattgaaatctgcatagccaaagaaaaaatgactaaaatgccaaccggtgctgtggatgcgttaaaggaa

SEQ ID NO: 19168 - DNA, 75 bp, synthetic construct
  source 1..75: mol_type = other DNA
gagcgacagtattgtataagggcgataaaatggtgcttaacctggacaggtctcgtgttccaactgagtgtatag

SEQ ID NO: 19169 - DNA, 75 bp, synthetic construct
  source 1..75: mol_type = other DNA
taaagctttcgctgaaggaacctggagttccgctattggcgccatgacccatgcaattggtccggcttcaatggc

SEQ ID NO: 19170 - DNA, 75 bp, synthetic construct
  source 1..75: mol_type = other DNA
gttgaggactaccgctgcgccgcactggtggaaaacatccagattggcgatttcagcgccgctgcagcagaagcc

SEQ ID NO: 19171 - DNA, 75 bp, synthetic construct
  source 1..75: mol_type = other DNA
tcaggatggggctaaaacgtgtgaggaactggcggataagttcggtgttagcattcgcaaggttgcttccacgtt

SEQ ID NO: 19172 - DNA, 75 bp, synthetic construct
  source 1..75: mol_type = other DNA
taatcacgaaacgaaaacactcggcagcgaaattctgagttttgcatgtgagtatacaaaagctgctgccgaaaa

SEQ ID NO: 19173 - DNA, 75 bp, synthetic construct
  source 1..75: mol_type = other DNA
gctgacagccatgacggcctcgtttgtgctggccacaccgaccgagacggacggggcgctgtttcccggtcgtat

SEQ ID NO: 19174 - DNA, 75 bp, synthetic construct
  source 1..75: mol_type = other DNA
gcactggcgaatgccggggatgatacaggtataggcgtcgaccatggctatggttttaacaatctcggctgggtt

SEQ ID NO: 19175 - DNA, 75 bp, synthetic construct
  source 1..75: mol_type = other DNA
ggcgtctgaacataatctgtcgcgagtgccggaaaagcgaagctatgcagcgagtgctggcgttttatcaaggaa

SEQ ID NO: 19176 - DNA, 75 bp, synthetic construct
  source 1..75: mol_type = other DNA
tcaacgccgtcgagcgggcgagtgccgaggcgatcacccgtgctaaccggcgcatctacgacgccttggccgaac

SEQ ID NO: 19177 - DNA, 75 bp, synthetic construct
  source 1..75: mol_type = other DNA
gtgccggaagtccggcgcagatgcggcgggctgaaggcattaattttaatcagaacaatcacgtggtgattcaga

SEQ ID NO: 19178 - DNA, 75 bp, synthetic construct
  source 1..75: mol_type = other DNA
attgaactcttttccagagaagataaacccttatccggagagagttatatacgtctgcaggttgaaatttttctt

SEQ ID NO: 19179 - DNA, 75 bp, synthetic construct
  source 1..75: mol_type = other DNA
cggggctgtttgattccatggtggaaaaatatcgttctgacctgtcggaattcggaggtcagtgtctcgggggct

SEQ ID NO: 19180 - DNA, 75 bp, synthetic construct
  source 1..75: mol_type = other DNA
aagccacgatgccagaaaactgctgcagatgaccggagaatggctgaatacaacaggggctgatcagcagtcccc

SEQ ID NO: 19181 - DNA, 75 bp, synthetic construct
  source 1..75: mol_type = other DNA
ctcaatcatcgtagtgagccagttgccggtggaaaactggtacaaaatgatcggagactccacacatgcggatgc

SEQ ID NO: 19182 - DNA, 75 bp, synthetic construct
  source 1..75: mol_type = other DNA
caaactgcaaataatgggaaaataggttctatcaataccttcgattttgatggcgaatatataagctggacaaca

SEQ ID NO: 19183 - DNA, 75 bp, synthetic construct
  source 1..75: mol_type = other DNA
agagaacacccacgcggcatggacgaaatacaaccttgccgccagaacccgctggttacaggacgaacctacggg

SEQ ID NO: 19184 - DNA, 75 bp, synthetic construct
  source 1..75: mol_type = other DNA
cttcgccaggcttccgcttattttgcgaaggcggagttcgaccgcctctggaaaaatgatgccactgctggataa

SEQ ID NO: 19185 - DNA, 75 bp, synthetic construct
  source 1..75: mol_type = other DNA
gtctcagtcattacttcagaacaactgcaaaaaaaaccggtttcagatctggtcgatgcagtaaaagatgttgaa

SEQ ID NO: 19186 - DNA, 75 bp, synthetic construct
  source 1..75: mol_type = other DNA
atagatacgacgacagaagacactggaatattcgagatctgatcagagaggaacttggtaaggatgagcaatccg

SEQ ID NO: 19187 - DNA, 75 bp, synthetic construct
  source 1..75: mol_type = other DNA
tagcggaggaagtggcggtgctaaaacacctggcaccggcgctaatgccattcagcatcaggctcagaactggag

SEQ ID NO: 19188 - DNA, 75 bp, synthetic construct
  source 1..75: mol_type = other DNA
cagacccccgtcctgcaattccgcatgacgaagtaatggctgaaatggaaaaccttattgcgcaaatagcttcga

SEQ ID NO: 19189 - DNA, 75 bp, synthetic construct
  source 1..75: mol_type = other DNA
gtgctttatgcgctgagagattatctggttctgggatacgagcgcaaagaggtttgtgcgcgatacgatgtgtcg

SEQ ID NO: 19190 - DNA, 75 bp, synthetic construct
  source 1..75: mol_type = other DNA
tatttattttttcatggcctgtattatctgcagatatccacgggcgtgttattcgtgtactggacggtgatacca

SEQ ID NO: 19191 - DNA, 75 bp, synthetic construct
  source 1..75: mol_type = other DNA
ccgttagtaagcttttggctgaaatgcgcggatgtgtagagcgcgttcaaaatctacgccgcgactttgaagctc

SEQ ID NO: 19192 - DNA, 75 bp, synthetic construct
  source 1..75: mol_type = other DNA
tgagagttgggtgcgccagctcaggcgagagcgtcaggggattgcgccctctgccacacctattactccagacca

SEQ ID NO: 19193 - DNA, 75 bp, synthetic construct
  source 1..75: mol_type = other DNA
ctgtggtgcgcttagtctggggctgaatcattaccgtgataacgccatcgcctacaaagagcagcgcgataaagc

SEQ ID NO: 19194 - DNA, 75 bp, synthetic construct
  source 1..75: mol_type = other DNA
cccggaacggcaactggaaggcgtcaaggttgatcgcgcttttagcgacaaggcatccggcaaggatgtcaagcg

SEQ ID NO: 19195 - DNA, 75 bp, synthetic construct
  source 1..75: mol_type = other DNA
ataaagcattaacgcagatggcacaggagagtggcggtagtgcaaccgtgcgtctgaacactctggactggcttg

SEQ ID NO: 19196 - DNA, 75 bp, synthetic construct
  source 1..75: mol_type = other DNA
gcggctgcattatctgccagtgccgcgtcaacaagtgccgggcaggcctcagccagtgccaccgccgccggaaaa

SEQ ID NO: 19197 - DNA, 75 bp, synthetic construct
  source 1..75: mol_type = other DNA
ggctggataccctgggtatggatgagctgatagcgaaagcctggcgttttgtgcgtgagcgtttccgcagttacc

SEQ ID NO: 19198 - DNA, 75 bp, synthetic construct
  source 1..75: mol_type = other DNA
ctgaaagccaaaccccatccggagctggcttaccgtgcagtcctgggtctgctggcacttcagaaaaaatacggc

SEQ ID NO: 19199 - DNA, 75 bp, synthetic construct
  source 1..75: mol_type = other DNA
ttgatccacgccctgcaggaaaagctgagcaaccgggaacgcgaaatagaccatctgcaggcgcaactggataag

SEQ ID NO: 19200 - DNA, 75 bp, synthetic construct
  source 1..75: mol_type = other DNA
ctgggctgaggcggacaataacatcgctgaaaatgcgttgcggatggtcagtctgggccgcaaaaactacctgtt

SEQ ID NO: 19201 - DNA, 75 bp, synthetic construct
  source 1..75: mol_type = other DNA
tcacacgccagttatcagaaaaaaagccagtgatttgagtgcactgatgatgcttttcagccaacaggccggtca

SEQ ID NO: 19202 - DNA, 75 bp, synthetic construct
  source 1..75: mol_type = other DNA
agaccgtcgctgacggtgtccaatctgttcggtctggtcaccgggatggcggaagacctgcagagtctggtgggg

SEQ ID NO: 19203 - DNA, 75 bp, synthetic construct
  source 1..75: mol_type = other DNA
gatatatcccatgacacgctggagaaactcattttcccgcccaaagacacctctgcgtcagagcttgttatgcct

SEQ ID NO: 19204 - DNA, 75 bp, synthetic construct
  source 1..75: mol_type = other DNA
agactggagatcacaaattcatcactttgatgattttgacgaaaatgaatgggatcctaatttgtctgcacaata

SEQ ID NO: 19205 - DNA, 75 bp, synthetic construct
  source 1..75: mol_type = other DNA
atgaaggaacagaaccgcgcagagattcaggagttgctcaccaaggttccgcaaggtactccagagttccagatg

SEQ ID NO: 19206 - DNA, 75 bp, synthetic construct
  source 1..75: mol_type = other DNA
acctatcgcggtgatgagtgcggttatcacggtccggcggtcgcggatgaatatgaccagccgacgtccgatatc

SEQ ID NO: 19207 - DNA, 75 bp, synthetic construct
  source 1..75: mol_type = other DNA
caagctgggccgcagctcccgctggctgaaaagtgaagtggaagcctggctgcaggcgcgtattgcacagccccg

SEQ ID NO: 19208 - DNA, 75 bp, synthetic construct
  source 1..75: mol_type = other DNA
tgaggcggacaataacatcgctgaaaatgcgttgcggatggtcagtctgggccgcaaaaactacctgttcttcgg

SEQ ID NO: 19209 - DNA, 75 bp, synthetic construct
  source 1..75: mol_type = other DNA
aagccgttccctgaatcactaccccgtgacgaaaagcgactgttgcctgcggcgccgtgctgcccgaactgcggc

SEQ ID NO: 19210 - DNA, 75 bp, synthetic construct
  source 1..75: mol_type = other DNA
gtgttcagtgccggattgatgatgacaatgaacaggagaattctcttcttatgatgtatctggctgctgccaggg

SEQ ID NO: 19211 - DNA, 75 bp, synthetic construct
  source 1..75: mol_type = other DNA
cagtttccgcacgggagtgactggtctgaagtattgcgcctgactgacattgttacagagaaggtctcttccggc

SEQ ID NO: 19212 - DNA, 75 bp, synthetic construct
  source 1..75: mol_type = other DNA
gtgtatgacccggcagtacagcgtccgttgcgtcagacccgcacccgtaagccgttccctgaatcactaccccgt

SEQ ID NO: 19213 - DNA, 75 bp, synthetic construct
  source 1..75: mol_type = other DNA
gaccattcttgccggtatcagcgccggcggtatgtactgcccggaatgtggtaccgttcactggccggatggtgt

SEQ ID NO: 19214 - DNA, 75 bp, synthetic construct
  source 1..75: mol_type = other DNA
gttcgcatgccccgtctctgctctgcagaacgcctctctgaaagtatggtcgatgaaatatttcagaagggggct

SEQ ID NO: 19215 - DNA, 75 bp, synthetic construct
  source 1..75: mol_type = other DNA
tacctggcagaaatacgatgtgaagacagcaagcccatcaaaagcgacagcctacattggctgggcaccggaccc

SEQ ID NO: 19216 - DNA, 75 bp, synthetic construct
  source 1..75: mol_type = other DNA
ggccaggacatggtttataagactgaaaaatcggaatccataccgccacagaatggcaataccccgcgggaatac

SEQ ID NO: 19217 - DNA, 75 bp, synthetic construct
  source 1..75: mol_type = other DNA
ctgtctgccctgctggcgcagacggaggaagtgagcgtgccgctggcctcgctgattaaatcaccgctgaatgtg

SEQ ID NO: 19218 - DNA, 75 bp, synthetic construct
  source 1..75: mol_type = other DNA
aaggaaaaatcatcacaactgatgcgatgggttgccagaaagatattgcagagaagatacaaaaacagggaggtg

SEQ ID NO: 19219 - DNA, 75 bp, synthetic construct
  source 1..75: mol_type = other DNA
aatgataaagacgtcattgcaattgatggaaaaacgctccggcactcttatgacaagagtcgccgcaggggagcg

SEQ ID NO: 19220 - DNA, 75 bp, synthetic construct
  source 1..75: mol_type = other DNA
atgcccgcctgcgggcactgttgcagacgcaacaggacaccatccgccagatggccgaatacaaccgcctgctct

SEQ ID NO: 19221 - DNA, 75 bp, synthetic construct
  source 1..75: mol_type = other DNA
gatgaatatttctggataccaaaattccaggagctgcgcaaagtggcttccggtatggctattcacaaaaaatgg

SEQ ID NO: 19222 - DNA, 75 bp, synthetic construct
  source 1..75: mol_type = other DNA
tgccatgcagtcgctgattctgccgccaccggcacgccaggcgctggcacaggcggcactgacttaccgttatgg

SEQ ID NO: 19223 - DNA, 75 bp, synthetic construct
  source 1..75: mol_type = other DNA
tttcaaaacgttaactgagaatcaggaagtcgaatttggtattgagaacggacctaaaggccccgcggctgttca

SEQ ID NO: 19224 - DNA, 75 bp, synthetic construct
  source 1..75: mol_type = other DNA
gcgctgacgtatggcggtaatttccacaccgtcggtgcggttctcacgccgttgccggttccggcctttacgctg

SEQ ID NO: 19225 - DNA, 75 bp, synthetic construct
  source 1..75: mol_type = other DNA
gcagaggaaatggcagacgcagcgcagagcgcaatgcttgccactaccggctttgatgtcgatctgctgctgcag

SEQ ID NO: 19226 - DNA, 75 bp, synthetic construct
  source 1..75: mol_type = other DNA
ttttacacgacccgcgtcgtcaggcggcgctgctgtactggcagggattttccgtgccgcagattgccgccatgt

SEQ ID NO: 19227 - DNA, 75 bp, synthetic construct
  source 1..75: mol_type = other DNA
aataccagaacctgctgatgtgcgagttcgtggacgatctcgcgtccgtgttcccgctcagcgagctgcaggcgt

SEQ ID NO: 19228 - DNA, 75 bp, synthetic construct
  source 1..75: mol_type = other DNA
atcaccgaagtggcgaaaaataacgcgcttactgatgatgatttttctgcgggaaagtcttcgacggcgagctga

SEQ ID NO: 19229 - DNA, 75 bp, synthetic construct
  source 1..75: mol_type = other DNA
catccagctaccagatgttacccggatattttcgtgccatctgcaccaatggcctggtctgcggtcagtcgctgg

SEQ ID NO: 19230 - DNA, 75 bp, synthetic construct
  source 1..75: mol_type = other DNA
atgaaataccacgtcagtgcgtgacgcctggcgattatgttcttcatgaaggtcggacatatatcgcttcagcaa

SEQ ID NO: 19231 - DNA, 75 bp, synthetic construct
  source 1..75: mol_type = other DNA
gtgctgatgccgcaggcatcattctgacttcccttgtgattaaccgccagttgtggctgtaccacgacagcggtg

SEQ ID NO: 19232 - DNA, 75 bp, synthetic construct
  source 1..75: mol_type = other DNA
ttaacatggcccgcttcatcagaagccagacgctgaccctgctggaaaaactgaatgaactggacgccgacgacc

SEQ ID NO: 19233 - DNA, 75 bp, synthetic construct
  source 1..75: mol_type = other DNA
agccgtctgtgcagcagacgctggaagatcagatccagcagtccgccgcattcctgacgctgattaacgtcacgc

SEQ ID NO: 19234 - DNA, 75 bp, synthetic construct
  source 1..75: mol_type = other DNA
tggtgacgaacatcagcccgtcactaccgccgacattctgacaccgcgacgccgggaggattacggtaaggacct

SEQ ID NO: 19235 - DNA, 75 bp, synthetic construct
  source 1..75: mol_type = other DNA
attcgtggacgatctcgcgtccgtatttccgctcagcgagctgcaggcatgcatggtggacagttgggaagtctg

SEQ ID NO: 19236 - DNA, 75 bp, synthetic construct
  source 1..75: mol_type = other DNA
atcagtgcgaatacatcgtctggggcagcaaaggccatttagataaatcgccttcgggaccgttcgacggctgca

SEQ ID NO: 19237 - DNA, 75 bp, synthetic construct
  source 1..75: mol_type = other DNA
aacacaacgggttatctacctccgtgaaggctatgaacatgaatgcttcagtccgctcgaacagtttcgtcgtaa

SEQ ID NO: 19238 - DNA, 75 bp, synthetic construct
  source 1..75: mol_type = other DNA
atgactaaaaatactcgtttttcccccgaagtccgtcaacgggcagtccgtatggttctggaaagtcagagcgaa

SEQ ID NO: 19239 - DNA, 75 bp, synthetic construct
  source 1..75: mol_type = other DNA
tttattaatagtagcctgcttctcgaaaaaggagcaaaactgactgcacagagtggtattttcacaaataacact

SEQ ID NO: 19240 - DNA, 75 bp, synthetic construct
  source 1..75: mol_type = other DNA
gacggctgggccgggctgcgcgatcttaacggcaacatcatgcaggaaagtttgttttccctgcgtgaaaacctg

SEQ ID NO: 19241 - DNA, 75 bp, synthetic construct
  source 1..75: mol_type = other DNA
gggcaatggatacagaatggcgggatagccggaaacaccactgttaccacaaatggtcgtcaggtcgtgctggag

SEQ ID NO: 19242 - DNA, 75 bp, synthetic construct
  source 1..75: mol_type = other DNA
cagaagttctgacaaatctccgcctgatagaacgcactcaggccgcattcattgatggcacgcaacgtgccgtat

SEQ ID NO: 19243 - DNA, 75 bp, synthetic construct
  source 1..75: mol_type = other DNA
gacggtacacgtccgcagtttggccgcaacgatccctgcccttgtggttcaggtaaaaaatttaaaaagtgctgc

SEQ ID NO: 19244 - DNA, 75 bp, synthetic construct
  source 1..75: mol_type = other DNA
ggggctgatccggaagtgatggatattctggccacattgtcggcggacgttttttctgcacgacagtaccgggat

SEQ ID NO: 19245 - DNA, 75 bp, synthetic construct
  source 1..75: mol_type = other DNA
accgccagagcacaaaaaacctcaaatcaggcacacttcaggcgctacagaatgaaatcgaaccgcgtcagccgg

SEQ ID NO: 19246 - DNA, 75 bp, synthetic construct
  source 1..75: mol_type = other DNA
gcatcgatgaccgagaacggtcagcgtcgggatatgcaccctgccgaacagattgccggattccgcgcaatggcg

SEQ ID NO: 19247 - DNA, 75 bp, synthetic construct
  source 1..75: mol_type = other DNA
aatcaagacagcgtattgcactgatttttgatgtaggcgtttctaccatttatcgaaaatttccggcaaataaga

SEQ ID NO: 19248 - DNA, 75 bp, synthetic construct
  source 1..75: mol_type = other DNA
acaacggtgggttgacgccggaagaatcagagaacagataccgtttttactgtaaaaccgtggccaatattactt

SEQ ID NO: 19249 - DNA, 75 bp, synthetic construct
  source 1..75: mol_type = other DNA
atgctgattgtcacgatgagtcacgacgtgtcacgcatctgtcacgacaagtcacgacagataaagatacagata

SEQ ID NO: 19250 - DNA, 75 bp, synthetic construct
  source 1..75: mol_type = other DNA
ttctctttgcactaccgcgcaccacgtaccggacgtaatccgaagactggcgataaagtagaactggaaggaaaa

SEQ ID NO: 19251 - DNA, 75 bp, synthetic construct
  source 1..75: mol_type = other DNA
gaaagtaccgaatttacgaaaagaattaacgtaatcggtgtaactgaccagaaaggcgaaaaagttctcctggac

SEQ ID NO: 19252 - DNA, 75 bp, synthetic construct
  source 1..75: mol_type = other DNA
gcgcagttaaaacagcgtcacgcaacgatgcgttttgaagaaatgaacgacgtcgaacgtgaacggctggtttgt

SEQ ID NO: 19253 - DNA, 75 bp, synthetic construct
  source 1..75: mol_type = other DNA
gacctcttctgacactggcattgaattattacctgtagagataacgccgggtgaacagaaagaacctgtggcggc

SEQ ID NO: 19254 - DNA, 75 bp, synthetic construct
  source 1..75: mol_type = other DNA
cacgaaagcgaaccgtaaggcgggcatgtatcgcgagcaggaagaacgggcggcacaccgtaacgactggatgta

SEQ ID NO: 19255 - DNA, 75 bp, synthetic construct
  source 1..75: mol_type = other DNA
agtacaggatattcccggtgtgctggccgtgtttgctgaacgccgtaaggacagttttggcccgtatgtccggct

SEQ ID NO: 19256 - DNA, 75 bp, synthetic construct
  source 1..75: mol_type = other DNA
agacgaagataatgaacccgttatggtttttaacggagagaaaaatgtgccggcagacagtctgaaaccgcagcc

SEQ ID NO: 19257 - DNA, 75 bp, synthetic construct
  source 1..75: mol_type = other DNA
gtaatgtgctgctcgaaaaccattcgtctctagaggtcagggagaattttactggtggtattgaggcttatgaca

SEQ ID NO: 19258 - DNA, 75 bp, synthetic construct
  source 1..75: mol_type = other DNA
tggatatattcccatttgcagaattgaaggagcgcatccagaaagcggtttcgatgaagatttccaaatggaaca

SEQ ID NO: 19259 - DNA, 75 bp, synthetic construct
  source 1..75: mol_type = other DNA
ctctcagggaacaccggcaaaagataataagaatataacggcaacgctccagtttactccgactgaaagccagaa

SEQ ID NO: 19260 - DNA, 75 bp, synthetic construct
  source 1..75: mol_type = other DNA
ctggcccgctcacggggaaaacgcgctggtgtggcggttgcgctgtctcttgctgctgtcacatcagtcccggca

SEQ ID NO: 19261 - DNA, 75 bp, synthetic construct
  source 1..75: mol_type = other DNA
ccgaccgaatccgtggccattgatattgcttatgaaggctccggcagtggcgactggcgcactgacggtttcatc

SEQ ID NO: 19262 - DNA, 75 bp, synthetic construct
  source 1..75: mol_type = other DNA
tgttttcattttccggggccgcagcggcagtcaggttaaactgctgtggtccaccggtgacgggctgtgcctcct

SEQ ID NO: 19263 - DNA, 75 bp, synthetic construct
  source 1..75: mol_type = other DNA
taactgacaataaggggaaaacgcacgatgtgctgaccggaagtgatgacggtcgccacagcaacacgtctctgg

SEQ ID NO: 19264 - DNA, 75 bp, synthetic construct
  source 1..75: mol_type = other DNA
aatctgatgttgctcgaatatgccggggagcgaatgctctctcacatcgttgccgagcacggcgactaccaggcg

SEQ ID NO: 19265 - DNA, 75 bp, synthetic construct
  source 1..75: mol_type = other DNA
gtgctctggtgatggacggagctgcggatatctccggtacattcacccaggaaaacgggcgtctgacgctgcagg

SEQ ID NO: 19266 - DNA, 75 bp, synthetic construct
  source 1..75: mol_type = other DNA
cgggatacgaaaaacgagcaggtggtactgaaccagattgttgatcgccggacggcatcgttacgcggtgtgggg

SEQ ID NO: 19267 - DNA, 75 bp, synthetic construct
  source 1..75: mol_type = other DNA
tttccgctgcgaccctgagtctgtgtctgctgacacccgctcatgcagaagagcaacgttatatcagtatccgca

SEQ ID NO: 19268 - DNA, 75 bp, synthetic construct
  source 1..75: mol_type = other DNA
aattgctgagagtgaattggcgttcctgaccccggaagaaattaaacgtctgctggatgcctgcgccgattctca

SEQ ID NO: 19269 - DNA, 75 bp, synthetic construct
  source 1..75: mol_type = other DNA
atgaaaaagataagaggtttgtgtcttccggtaatgctgggggcagtgttaatgtctcagcatgtacatgcagct

SEQ ID NO: 19270 - DNA, 75 bp, synthetic construct
  source 1..75: mol_type = other DNA
tatttttatcaggggggaacgcttccacgaaagagtgtcatgctcacattcgatgatggttatcttgataactgg

SEQ ID NO: 19271 - DNA, 75 bp, synthetic construct
  source 1..75: mol_type = other DNA
tgatgctgacagtaatctgcagagtctgtgctggccgtgtcataaggcgaagacggcccgtgaacggttaaagtg

SEQ ID NO: 19272 - DNA, 75 bp, synthetic construct
  source 1..75: mol_type = other DNA
tgatgagcaatgcctcggaactgcgtgggctacatggcgatctgcatcatgaaaacatcatgttctccagtcgcg

SEQ ID NO: 19273 - DNA, 75 bp, synthetic construct
  source 1..75: mol_type = other DNA
atgccgggttacacagagtatgtcctggctgaaggatctttctcatacgggcaggcggttgctgtcataacagct

SEQ ID NO: 19274 - DNA, 75 bp, synthetic construct
  source 1..75: mol_type = other DNA
ctgaacggcaagataccggtaaataccgacgctgcgctaaaatttgcggctctgttaaaggtaaaaccagaggac

SEQ ID NO: 19275 - DNA, 75 bp, synthetic construct
  source 1..75: mol_type = other DNA
cggcgcgtggtgaccttcagacccgggcagaagttaaaaagccgggtcgaaaacgcttcgcccaaagacgagtaa

SEQ ID NO: 19276 - DNA, 75 bp, synthetic construct
  source 1..75: mol_type = other DNA
agatttacccggttatcacctgtactatccacaccgtcgacatgctggctcggcattctcattatttatagatag

SEQ ID NO: 19277 - DNA, 75 bp, synthetic construct
  source 1..75: mol_type = other DNA
ccgatgtcgtttctgaacgttttgatgcaggcgtccgtctgggtggggagatggataaagatatgatcgccattc

SEQ ID NO: 19278 - DNA, 75 bp, synthetic construct
  source 1..75: mol_type = other DNA
gaccgtaatggctctcagttaatccgggattttatgcgccagaccgttgaacggcagcataatacctggttccgt

SEQ ID NO: 19279 - DNA, 75 bp, synthetic construct
  source 1..75: mol_type = other DNA
ttacatattgccaaaaaactgcttccgtatatccctaataacgcggggatcctgctggtaccatgctgtcgtggt

SEQ ID NO: 19280 - DNA, 75 bp, synthetic construct
  source 1..75: mol_type = other DNA
cgatgcagacagtaatctgcagagcctgtgctggccgtgtcataaggcgaagacggcccgtgaacggctgaagta

SEQ ID NO: 19281 - DNA, 75 bp, synthetic construct
  source 1..75: mol_type = other DNA
ccgtgcgcagcgcgatgactggctgaagagagagatacagcgcgtatacgatgaaaatcatcaggtgtacggtgt

SEQ ID NO: 19282 - DNA, 75 bp, synthetic construct
  source 1..75: mol_type = other DNA
accaatgtgcaaagcgccattgcgaaagccggtaaaaaaggcacgctggccgcgtccctgcaggccatcgccgac

SEQ ID NO: 19283 - DNA, 75 bp, synthetic construct
  source 1..75: mol_type = other DNA
gaactcaggcgttgcatacattatctgccgggtttggctgttcccctgaaaagctgaaaaaagtgctgctttcgc

SEQ ID NO: 19284 - DNA, 75 bp, synthetic construct
  source 1..75: mol_type = other DNA
gaaatgtactatcgccgggactacagaaatgtagaagagctggaaaatgccgttaacgaatacataacttactgg

SEQ ID NO: 19285 - DNA, 75 bp, synthetic construct
  source 1..75: mol_type = other DNA
gtaatgacccgaactttgcgacaacaatgacaaatgcgctggcaggcaaacagcctctggatgcaactttaaccg

SEQ ID NO: 19286 - DNA, 75 bp, synthetic construct
  source 1..75: mol_type = other DNA
aaaccgcgcattctcggcgtgccaggtcacgataacaaagccgttgctactgagttgctgagtgtggcgcaaagc

SEQ ID NO: 19287 - DNA, 75 bp, synthetic construct
  source 1..75: mol_type = other DNA
gcgacgtcgtggcagcacatattttgtatcaaaagccggtgagcgttatcgccgggctgtggcgcttattgttcg

SEQ ID NO: 19288 - DNA, 75 bp, synthetic construct
  source 1..75: mol_type = other DNA
gaaaaatgccactgaaacgcaatggcttaaagatgccccgtcacagccattgcaacagtcactgaaagaccttga

SEQ ID NO: 19289 - DNA, 75 bp, synthetic construct
  source 1..75: mol_type = other DNA
tgcgcgttgttgaagtcaacgaaggcactcgatccattactacggtgagcaccgccatcgtgggcatggtctgca

SEQ ID NO: 19290 - DNA, 75 bp, synthetic construct
  source 1..75: mol_type = other DNA
gccgacaccctcggctcctgtggttacgtttatctggctgtttatccggcacaggcacccgcaaccacctcataa

SEQ ID NO: 19291 - DNA, 75 bp, synthetic construct
  source 1..75: mol_type = other DNA
tccctggtggggactaccctgcacagtgacgccctgtttcggcgcccgtctggtgcaggagggtaaccggttgca

SEQ ID NO: 19292 - DNA, 75 bp, synthetic construct
  source 1..75: mol_type = other DNA
cagcctcacaacatcgtaagacacccagatatgccgcctgctgcatttgagcatatgtggagtacattaaaatct

SEQ ID NO: 19293 - DNA, 75 bp, synthetic construct
  source 1..75: mol_type = other DNA
ttggcgaaaatctcggccagttcgtgcaggaaaaatttcttgatactcaatccctggtggcattgattcgacgcc

SEQ ID NO: 19294 - DNA, 75 bp, synthetic construct
  source 1..75: mol_type = other DNA
tccccgtggatacattccaccttcagcgaatgaaagaaggtaagcgtcaacggagcaccgtattgacgcttattt

SEQ ID NO: 19295 - DNA, 75 bp, synthetic construct
  source 1..75: mol_type = other DNA
ggtatttttgctgcagagcgtattgccgctgacacggtaaaaatcttccaccatcagccgcttaccgttgtgaaa

SEQ ID NO: 19296 - DNA, 75 bp, synthetic construct
  source 1..75: mol_type = other DNA
tttcctgtaacgccctctggcaaaagtgtgtccttgcaactctgtatcgggctgcagctacacatcctgaaatta

SEQ ID NO: 19297 - DNA, 75 bp, synthetic construct
  source 1..75: mol_type = other DNA
gcgctggcggactggtttgcggtggtggcgctgtttcgccgcgtgccgattccgatcatttctcgtcatacggcg

SEQ ID NO: 19298 - DNA, 75 bp, synthetic construct
  source 1..75: mol_type = other DNA
ggcgatcacttaccgtgaaaacttcagtcagcgtgaaggaatgctgatctggcccgactttactggctgggacac

SEQ ID NO: 19299 - DNA, 75 bp, synthetic construct
  source 1..75: mol_type = other DNA
actacttcctgatggttactacattttcgacaacaactttttgcctgaaaaactaaaaaaaccttttgttgtgat

SEQ ID NO: 19300 - DNA, 75 bp, synthetic construct
  source 1..75: mol_type = other DNA
gtgagagcactgctgacccctgaaattgccccgcgtatggggatcgtcttgttcagacccggttcagagctgatg

SEQ ID NO: 19301 - DNA, 75 bp, synthetic construct
  source 1..75: mol_type = other DNA
catcaccgttgatccagagtctccggaatctttcatgaagctgcctaaacgtcgccgctgggttaaggagaaata

SEQ ID NO: 19302 - DNA, 75 bp, synthetic construct
  source 1..75: mol_type = other DNA
cagcgacgaacgagtgattcgtgctgctggtggcgctggcgcattgtctgactggttactgcgccatgttaaatc

SEQ ID NO: 19303 - DNA, 75 bp, synthetic construct
  source 1..75: mol_type = other DNA
cacaggaaaagacggtggtcagcattgccgttgatccggagtcaccggctcagtatctccagcgccagaaaccac

SEQ ID NO: 19304 - DNA, 75 bp, synthetic construct
  source 1..75: mol_type = other DNA
ggggagtctgctgtttgggctgctgacatatctgacgaacctgtatttcaagattaaagaagaccgtcgtaaggc

SEQ ID NO: 19305 - DNA, 75 bp, synthetic construct
  source 1..75: mol_type = other DNA
aggaaaggtgagcacgaatctgattttcaaggagtgtcgccagagtgccgcgatgaagcgggtgttggcatttta

SEQ ID NO: 19306 - DNA, 75 bp, synthetic construct
  source 1..75: mol_type = other DNA
ctggttgccactcccgtccctgatgaacagcgcatcagtttctggccgcaacattttggcctcattccacagtgg

SEQ ID NO: 19307 - DNA, 75 bp, synthetic construct
  source 1..75: mol_type = other DNA
ggcagctcccggagataacgacattttatctcttgagccggaagccctgcagattgcggataatgaaggaacaga

SEQ ID NO: 19308 - DNA, 75 bp, synthetic construct
  source 1..75: mol_type = other DNA
atgaacactccatacattgagttatttgcaggcagtcagcaggtatccacgacgctggtacattttgccgctgat

SEQ ID NO: 19309 - DNA, 75 bp, synthetic construct
  source 1..75: mol_type = other DNA
ctggcactgcgataaccagctgcgtgatcagttcacggaacggctggaatcaatggcaacggataactgtgcccg

SEQ ID NO: 19310 - DNA, 75 bp, synthetic construct
  source 1..75: mol_type = other DNA
atggcaacacaagaccaatgtttgttggtcagggcgatcagatattcatgaacgacgtgttcctgaaacgcctga

SEQ ID NO: 19311 - DNA, 75 bp, synthetic construct
  source 1..75: mol_type = other DNA
gccacggtggtccgccgccgggtgtatgcgcgttttctggatgcggtgaactttgtggcaggcaatccggaggcc

SEQ ID NO: 19312 - DNA, 75 bp, synthetic construct
  source 1..75: mol_type = other DNA
ataactggacaccaacaaccagtatcagcgatctgctggttgtggtgatgaaaaaatccacagcaggtatcagta

SEQ ID NO: 19313 - DNA, 75 bp, synthetic construct
  source 1..75: mol_type = other DNA
tattttcagataacagcggtcccgaaactggctgtatatgacccgacggtgcagtttgagttctggttctcggaa

SEQ ID NO: 19314 - DNA, 75 bp, synthetic construct
  source 1..75: mol_type = other DNA
cacattaagcccgggaaggatttctggttttacgtgcgcagcgtcaacctggtggggaaatctgcgtttgtggaa

SEQ ID NO: 19315 - DNA, 75 bp, synthetic construct
  source 1..75: mol_type = other DNA
gcatggtgggtaaatggctggtatcccacagcaagtatcagcgatttgctggttgttgtgatgaagaaagccact

SEQ ID NO: 19316 - DNA, 75 bp, synthetic construct
  source 1..75: mol_type = other DNA
ggaaagaaggcggtaacagtcttatcgactgggaaaaatggcaaccggcaatagataaagcgaaggatgcgatca

SEQ ID NO: 19317 - DNA, 75 bp, synthetic construct
  source 1..75: mol_type = other DNA
atacttaactctttgtgggatggtggttctcttttcatcgacaggaaatcatctcccggaattattttgaaggat

SEQ ID NO: 19318 - DNA, 75 bp, synthetic construct
  source 1..75: mol_type = other DNA
gatattgagtttggattctggctggattcggcagcgagcgacaaaaatgctctgtgcgctcactggctaactgag

SEQ ID NO: 19319 - DNA, 75 bp, synthetic construct
  source 1..75: mol_type = other DNA
tgaaagccgcgcgttgtctgcctgttgttctggcagccctgattttcgccggttgtggcacccatactcccgatc

SEQ ID NO: 19320 - DNA, 75 bp, synthetic construct
  source 1..75: mol_type = other DNA
cgtcatgttccatagcgaccagggaagtcagtatacaggactgaaatatcaacagcttctctggcgttacaggat

SEQ ID NO: 19321 - DNA, 75 bp, synthetic construct
  source 1..75: mol_type = other DNA
atggaaaacattgcgctcattggtatcgatctgggtaaaaactcttttcatattcattgccaggatcgtcgcggg

SEQ ID NO: 19322 - DNA, 75 bp, synthetic construct
  source 1..75: mol_type = other DNA
ttttgatattggtctgtccacgctctataaaaaatttccctcatcagcgacaaagaataaattgtgtcatccctt

SEQ ID NO: 19323 - DNA, 75 bp, synthetic construct
  source 1..75: mol_type = other DNA
accgttgagcagatggcgctgaccattcgccacggtagcggtattgtttgcctgtgcattactgaagatcgccgt

SEQ ID NO: 19324 - DNA, 75 bp, synthetic construct
  source 1..75: mol_type = other DNA
gatcacagacggggggcgcaactggttgtcgttcaactggcccagctaccgttctcgtatcagaggtgtggctgc

SEQ ID NO: 19325 - DNA, 75 bp, synthetic construct
  source 1..75: mol_type = other DNA
agtgcatacaacagcgacagacggtagtgatgcttgtgccagaggatatgtcagtcggatggttcagcaaggctc

SEQ ID NO: 19326 - DNA, 75 bp, synthetic construct
  source 1..75: mol_type = other DNA
gcgattacgtctggcggcagagccgcagactggaagacgggaagtttcggcccttacggatgcccggaaaacctt

SEQ ID NO: 19327 - DNA, 75 bp, synthetic construct
  source 1..75: mol_type = other DNA
gtcacgctttcaccgttaacgccatatgataaatgggatggtgagaaatgggtgacagatactgaggcacagcat

SEQ ID NO: 19328 - DNA, 75 bp, synthetic construct
  source 1..75: mol_type = other DNA
tctaccgtgaaattatatggttctgctccagttacctgctgaaatccggaccagaggctacgaggacgattatca

SEQ ID NO: 19329 - DNA, 75 bp, synthetic construct
  source 1..75: mol_type = other DNA
aaagcaaaaagcactggagtcaaaattgcataaagaaattcgcgccggtaaagattgtaaggcaacagagtcaga

SEQ ID NO: 19330 - DNA, 75 bp, synthetic construct
  source 1..75: mol_type = other DNA
cgatagcgttcctgaactgagccatatccgaggatgtgaattttgtgatggtgaccaacgttattttgatgactg

SEQ ID NO: 19331 - DNA, 75 bp, synthetic construct
  source 1..75: mol_type = other DNA
catctgcagatggaatgcgctttgttacgccagtcagaacaatcaatgccggaccgaaccgcaaatactttggta

SEQ ID NO: 19332 - DNA, 75 bp, synthetic construct
  source 1..75: mol_type = other DNA
gagcgtattatcagcagggctgctgataacaacgaaacctactcatcgcttcagcgttgcggtctgttaaataca

SEQ ID NO: 19333 - DNA, 75 bp, synthetic construct
  source 1..75: mol_type = other DNA
attcagatattagcagaaaaataaaagaccagacaggattctggctggcagctattgatgatacccgcatggatt

SEQ ID NO: 19334 - DNA, 75 bp, synthetic construct
  source 1..75: mol_type = other DNA
gctgggtggtggagcagatgtcggagctgacagccatgacggcctcgtttgtgctggccacaccgaccgagacgg

SEQ ID NO: 19335 - DNA, 75 bp, synthetic construct
  source 1..75: mol_type = other DNA
tgaacggagaggccacatccacagtctggtcgctgaagagcgttttatctccgccctgccacatttctctttcat

SEQ ID NO: 19336 - DNA, 75 bp, synthetic construct
  source 1..75: mol_type = other DNA
aacgcagattgccacggcgcgggcaagggcagccgtgtaccgggctcagcaggctgtggcggcagcccgcgggac

SEQ ID NO: 19337 - DNA, 75 bp, synthetic construct
  source 1..75: mol_type = other DNA
gataacgtaaaaatatcaatagagcgcctggctaaatctggagttattcaacttcctgcattgcaggttttcgaa

SEQ ID NO: 19338 - DNA, 75 bp, synthetic construct
  source 1..75: mol_type = other DNA
ccctcgctgccgttgttgcccccgtgtgggccgccacccagaccgtcacgctgtccgtgcctggcatgacctgcg

SEQ ID NO: 19339 - DNA, 75 bp, synthetic construct
  source 1..75: mol_type = other DNA
aatcagattgacgtgtgcagacctggaaatttacatgggcctgttaatctttactctctgattctggctgattcc

SEQ ID NO: 19340 - DNA, 75 bp, synthetic construct
  source 1..75: mol_type = other DNA
aagctggcacaggtggcgtatggagtgctgaagtcaggcgtaccgttcgatgcgtcacggcataatccggtagct

SEQ ID NO: 19341 - DNA, 75 bp, synthetic construct
  source 1..75: mol_type = other DNA
gggcgcatgggcaccggagcactccgtgacggagttcagtcacagccaggaagcgaaactggcagaagcgcagca

SEQ ID NO: 19342 - DNA, 75 bp, synthetic construct
  source 1..75: mol_type = other DNA
gctgattttgaagacaatgacttcagcggcaaacgctccctgatggagtctgtcgaagcgaagaccaaagacatt

SEQ ID NO: 19343 - DNA, 75 bp, synthetic construct
  source 1..75: mol_type = other DNA
cagagcaggctgtcagggctattgccgggcaggagcaggacagggcttcgtcatcagaacgggaaactgcgctgc

SEQ ID NO: 19344 - DNA, 75 bp, synthetic construct
  source 1..75: mol_type = other DNA
atgactgacacgcattctattgcacaaccgttcgaagcagaagtctccccggcaaataaccgtcatgtcaccgtc

SEQ ID NO: 19345 - DNA, 75 bp, synthetic construct
  source 1..75: mol_type = other DNA
cgacgaagaaacgaaactcgcgcagaccgtttccaatatcatcggcaccaccgacgaaaacggtcagtacaccgg

SEQ ID NO: 19346 - DNA, 75 bp, synthetic construct
  source 1..75: mol_type = other DNA
cgctgttgccttcttaggtacggcaattgatgctacgcatactgatgtactggctctgcagagttcagctgcggg

SEQ ID NO: 19347 - DNA, 75 bp, synthetic construct
  source 1..75: mol_type = other DNA
tgaccaatttgcctgataatattttacgtcgttttggcggtggacttgtggttgcgggcgttgtggtctactaca

SEQ ID NO: 19348 - DNA, 75 bp, synthetic construct
  source 1..75: mol_type = other DNA
tgaccatagagcaggagcgcccaaaggttgcaccagagcttaccgcagcctttgaaaactttatggacatgcaca

SEQ ID NO: 19349 - DNA, 75 bp, synthetic construct
  source 1..75: mol_type = other DNA
gcgggcttacaaaaacttcttccggaagcgggctgcttttccccgattcaaaaagcggggacagaatgatgcatt

SEQ ID NO: 19350 - DNA, 75 bp, synthetic construct
  source 1..75: mol_type = other DNA
gcgttccgtttgaaggtctgaaagaacgtccgtttaaattacgcctcagcattatcactggcgatcgtcctgtac

SEQ ID NO: 19351 - DNA, 75 bp, synthetic construct
  source 1..75: mol_type = other DNA
cgaactctggcgtgacctgatgcaacgttcagggatgctgtcattaatggatgcacaagcccgtgatacatggta

SEQ ID NO: 19352 - DNA, 75 bp, synthetic construct
  source 1..75: mol_type = other DNA
tgagccgggattacaaaaccaggccgccctgcaaatttagtaataaaattatcatcaacaacctggtgagatggg

SEQ ID NO: 19353 - DNA, 75 bp, synthetic construct
  source 1..75: mol_type = other DNA
ggcgcttgccgcgacactggatgcgcagggatacagtgttaacgacatcatccatatcctgatggcagaaggagg

SEQ ID NO: 19354 - DNA, 75 bp, synthetic construct
  source 1..75: mol_type = other DNA
aaagaggtgactggtgtggcttctggagtaacgaggatgtatcggtgtggtggaaccgtctgtgtgacaatgtac

SEQ ID NO: 19355 - DNA, 75 bp, synthetic construct
  source 1..75: mol_type = other DNA
cttctgcagaccactgaagatgtgcagtttgaaccgtgccccggactgacggctgccggacgtggtgttgtatcg

SEQ ID NO: 19356 - DNA, 75 bp, synthetic construct
  source 1..75: mol_type = other DNA
tacggtcatggttaatgcggaaatacggcgacgatgcagcgcatgatgtgtcaggcttgaatacctttatccgtt

SEQ ID NO: 19357 - DNA, 75 bp, synthetic construct
  source 1..75: mol_type = other DNA
atgccgataatatgcgtgccgtcagtgtgcttaacctgggtactattgatgaaccaggtcacgcagataacaccg

SEQ ID NO: 19358 - DNA, 75 bp, synthetic construct
  source 1..75: mol_type = other DNA
ggctgccggacgtggtgttgtatcgccggagaatatcgcgttcacccgctggctgacacacctgcagaacggtgt

SEQ ID NO: 19359 - DNA, 75 bp, synthetic construct
  source 1..75: mol_type = other DNA
gacctcttctgacactggcgttgaattattacctgtagaaataacgccggatgagcagaaagaacctgtggcggc

SEQ ID NO: 19360 - DNA, 75 bp, synthetic construct
  source 1..75: mol_type = other DNA
ggctggcgatgcgcaacgggttatctgccgcatcgatgaatgccggggatggagcgccgggcgggcgctggctcc

SEQ ID NO: 19361 - DNA, 75 bp, synthetic construct
  source 1..75: mol_type = other DNA
gtacatgatgaccaaaaacgtcaagttcctggtcggttttgccatcatctctgtatttattgctgtgggtatgac

SEQ ID NO: 19362 - DNA, 75 bp, synthetic construct
  source 1..75: mol_type = other DNA
gtgatttaatcactggatgggaaaaacgccaggtgcttaaagaggacaacggcaatatttcgcaaaccgcaaaat

SEQ ID NO: 19363 - DNA, 75 bp, synthetic construct
  source 1..75: mol_type = other DNA
atgtacgcaaaatcctttattgcatttgatggcaacggacgtctgaccggtgcccgtaccgcacagacagcgcct

SEQ ID NO: 19364 - DNA, 75 bp, synthetic construct
  source 1..75: mol_type = other DNA
atcatgataattcgaccgttcttgcccacacgcacgagcggtattctcacgcatttaagtcagactggtaccagc

SEQ ID NO: 19365 - DNA, 75 bp, synthetic construct
  source 1..75: mol_type = other DNA
atgataagggacaggaaagctgaagagctggagtcaaaagggctataccggagagctgccgcacgatgggcagaa

SEQ ID NO: 19366 - DNA, 75 bp, synthetic construct
  source 1..75: mol_type = other DNA
cgactccggccaggggataccctgctggtctggaaactggatcgccttggacgcagtatgcagcaccttgtcctt

SEQ ID NO: 19367 - DNA, 75 bp, synthetic construct
  source 1..75: mol_type = other DNA
tggtggctacagcgagagggcatatattcaatgatgccaataagcgtaccgcgctaaacagtgcgctgttatttc

SEQ ID NO: 19368 - DNA, 75 bp, synthetic construct
  source 1..75: mol_type = other DNA
ttctgctgatggtggcctgcagtggtgtctgtcgtgctgccgttcagaacgtaccggacgggtacgtgcgggtgg

SEQ ID NO: 19369 - DNA, 75 bp, synthetic construct
  source 1..75: mol_type = other DNA
tgcattttcacgatctacggcatgaagcaatcagccgcttcttcgaactgggtagtctgaatgtaatggagattg

SEQ ID NO: 19370 - DNA, 75 bp, synthetic construct
  source 1..75: mol_type = other DNA
gctgccaccagcgaagtgtggtggccggaagatgcagatcatattgcttttattcgcgggcgtattggttttgaa

SEQ ID NO: 19371 - DNA, 75 bp, synthetic construct
  source 1..75: mol_type = other DNA
gatgtttgttggtcagggcgatcagatattcatgaacgaagtgttcctgaaatatctgacggctcccaccattac

SEQ ID NO: 19372 - DNA, 75 bp, synthetic construct
  source 1..75: mol_type = other DNA
catgtgtacgaacgggaaatggactctgaaaaattatcagccatttttggtgaagatatgtcagatgtaatggtt

SEQ ID NO: 19373 - DNA, 75 bp, synthetic construct
  source 1..75: mol_type = other DNA
gacaaatttcgacgaaaatgtaagtgttagatttttgtattttgtgcttagccatagcctgaagaaatatctcga

SEQ ID NO: 19374 - DNA, 75 bp, synthetic construct
  source 1..75: mol_type = other DNA
atggatactatcgatcttggcaacagcgaatctctggtatgtggtgtgttccccaaccaggacggcacattcacc

SEQ ID NO: 19375 - DNA, 75 bp, synthetic construct
  source 1..75: mol_type = other DNA
gcctgcaataccctgggtattttcggtttgcgaaatggatggaacgacttgctcaggggatagctgatggagtta

SEQ ID NO: 19376 - DNA, 75 bp, synthetic construct
  source 1..75: mol_type = other DNA
cttggcgacatgacaaaacttgccaaaaaagtcctggctggggaaatcgaatcccctgatgtgctcgtcggggga

SEQ ID NO: 19377 - DNA, 75 bp, synthetic construct
  source 1..75: mol_type = other DNA
atgcccccgtgtcttttttcacagggggatgatatggcaacgaaagagcaaaatctgaaacggcttgatgaactg

SEQ ID NO: 19378 - DNA, 75 bp, synthetic construct
  source 1..75: mol_type = other DNA
atgaaaaatattgcgacaggcggcgttctggaacgcatccgccgactgaccccgccacatgtaaccgccccattc

SEQ ID NO: 19379 - DNA, 75 bp, synthetic construct
  source 1..75: mol_type = other DNA
agcgggaaaaaattaaggggctgatcgtggaattcgtacgccttaacggacgaggcacgattcggcagttatcgg

SEQ ID NO: 19380 - DNA, 75 bp, synthetic construct
  source 1..75: mol_type = other DNA
caacaaatgaccagaacacaggtttacaaagaaatgcgctggaatgtgcaggatgtgagcagatttttgaagata

SEQ ID NO: 19381 - DNA, 75 bp, synthetic construct
  source 1..75: mol_type = other DNA
cgtcagttgcgggtggaaaaaattctgaatcgctcaggcatccagccgttgcaccgtaaatgctcgtttgcgaat

SEQ ID NO: 19382 - DNA, 75 bp, synthetic construct
  source 1..75: mol_type = other DNA
gttttccctgttttaattttattggctggtggtgggatcgctttacctgcattacagggagtgatgtctatccaa

SEQ ID NO: 19383 - DNA, 75 bp, synthetic construct
  source 1..75: mol_type = other DNA
aaacatgctgtacttgagcaggagaataaatatgtcgaggcagcaaatgaattacgggtttataaatcgcaactg

SEQ ID NO: 19384 - DNA, 75 bp, synthetic construct
  source 1..75: mol_type = other DNA
tgcgctgactgacgcggaattacggcgcaaggctgccgatgaactgacctgtatgacagcgcgaattaaccgtgg

SEQ ID NO: 19385 - DNA, 75 bp, synthetic construct
  source 1..75: mol_type = other DNA
atggctaatgcctggctcagattgtggcatgacatgccaaatgaccccaagtggcgaacgattgccagggtatca

SEQ ID NO: 19386 - DNA, 75 bp, synthetic construct
  source 1..75: mol_type = other DNA
cctcccaactgtacgcacttgcagcccgacatgggctcaagctccatggcccgctgactgtcaatgagcttgggc

SEQ ID NO: 19387 - DNA, 75 bp, synthetic construct
  source 1..75: mol_type = other DNA
tccggatcttatctggtcattaccagacggagaaatacgccgctacgacaggcgtctgaacataatctgtagcga

SEQ ID NO: 19388 - DNA, 75 bp, synthetic construct
  source 1..75: mol_type = other DNA
aatcagctggaagaagaattgggcattcagttgtttgttcgttcccatcgcaaagtggaattaacgcacgagggg

SEQ ID NO: 19389 - DNA, 75 bp, synthetic construct
  source 1..75: mol_type = other DNA
tgccgagcacggcgactaccaggcgaccgaaattgcagcggaactaatggcgaagctgtatgccgcatctgagga

SEQ ID NO: 19390 - DNA, 75 bp, synthetic construct
  source 1..75: mol_type = other DNA
acggctggcaaatcacctgggggctggatgctgagcatgagcgctttacctccaaccagatgttcttcgatctgg

SEQ ID NO: 19391 - DNA, 75 bp, synthetic construct
  source 1..75: mol_type = other DNA
taaggcagaccggcttatcaccgaacgtctggtacaggcactgggcctggtggatatccgggtgccggaccatct

SEQ ID NO: 19392 - DNA, 75 bp, synthetic construct
  source 1..75: mol_type = other DNA
gtcaaaacagtgggtaaggctttcccgcgggactcccgggcaccggagcggtggccatcagggaccattaccgtc

SEQ ID NO: 19393 - DNA, 75 bp, synthetic construct
  source 1..75: mol_type = other DNA
tctgctgtggttgtggtatgaactggccattcatggtgcgccacagaacaatcacgcacaggcccgggaacgcat

SEQ ID NO: 19394 - DNA, 75 bp, synthetic construct
  source 1..75: mol_type = other DNA
ttcgtgaaatcgctgaaaaaacaaaaattgccggtgaagcacctgtaatgcctttcgatcagcgaattaatgcgc

SEQ ID NO: 19395 - DNA, 75 bp, synthetic construct
  source 1..75: mol_type = other DNA
tctcattacggggctgattggtaagggaaacgtacgtagcaggcaggagcaggaatattctcaccgcgactgtga

SEQ ID NO: 19396 - DNA, 75 bp, synthetic construct
  source 1..75: mol_type = other DNA
gccgccaatatgttctacgatccggctgacagagacgacctttgtctcgatcctagacgcattgcacagatggcg

SEQ ID NO: 19397 - DNA, 75 bp, synthetic construct
  source 1..75: mol_type = other DNA
gatcgactggagcgaggcccgcgttgatgaccctgccatcgacatggccgcgcaccttatggtctttggtgaaga

SEQ ID NO: 19398 - DNA, 75 bp, synthetic construct
  source 1..75: mol_type = other DNA
gtgcaatacttgcagaggtcattggtacaaccttaatgaagttttcagaaggttttacacggttatggccatctg

SEQ ID NO: 19399 - DNA, 75 bp, synthetic construct
  source 1..75: mol_type = other DNA
tttctgacccgcatcaacattgtgccggtcagcgaaatgaaaggggaaaaaattggcatcggtgtcaccggctcc

SEQ ID NO: 19400 - DNA, 75 bp, synthetic construct
  source 1..75: mol_type = other DNA
agatgcgatgccttaatgaatatggaggcaagagggatctcgcttaccaaaaaacgacttgatgagatacgacaa

SEQ ID NO: 19401 - DNA, 75 bp, synthetic construct
  source 1..75: mol_type = other DNA
atgaccgaatctgaaatactgcgattaatccgctgtgctggtggaatcagccagttggctgacgaacaggccgcg

SEQ ID NO: 19402 - DNA, 75 bp, synthetic construct
  source 1..75: mol_type = other DNA
ctgatataaaaatgacgatggtttatgctcatttttcgccagatcatttagaagatgctgtaacaaaaaatccac

SEQ ID NO: 19403 - DNA, 75 bp, synthetic construct
  source 1..75: mol_type = other DNA
acaccatcaccgttaatgctacggggaacgcagaaaacaccgtaaaaaacatcgcatttaactatattgtgaggc

SEQ ID NO: 19404 - DNA, 75 bp, synthetic construct
  source 1..75: mol_type = other DNA
ccctcaaggagcgaattgcgttcattcaacgcgatgtggatctgcttgctcaaaataaggggagatcatttgctg

SEQ ID NO: 19405 - DNA, 75 bp, synthetic construct
  source 1..75: mol_type = other DNA
acagggagtattttctttgcagacggcacaccccggaaaattgattttacgctgtcgctcacccgcgttgatgaa

SEQ ID NO: 19406 - DNA, 75 bp, synthetic construct
  source 1..75: mol_type = other DNA
atttctcaacgcttctcgaagggtatggtggaaatcaccataccttctgccggtggggtgcaagccatgatttgt

SEQ ID NO: 19407 - DNA, 75 bp, synthetic construct
  source 1..75: mol_type = other DNA
acgcttgccggtgtgctttatcccgaactgaccggcggcaagctgacgatgaccacgctcaggctgatggcagag

SEQ ID NO: 19408 - DNA, 75 bp, synthetic construct
  source 1..75: mol_type = other DNA
gatgaacagaaagtcacactggagaaaggggataacggctggacatccagtgacccgacgttgatcccggacagc

SEQ ID NO: 19409 - DNA, 75 bp, synthetic construct
  source 1..75: mol_type = other DNA
atggtaaacctgttattccgggcatgaaactgtcgaaggaaaaatgcgaccaggttaatgccattgaacgggata

SEQ ID NO: 19410 - DNA, 75 bp, synthetic construct
  source 1..75: mol_type = other DNA
agggaacagcagaatccaccaccatcaacaaaaatggacggcagattatcttattttccgggctagcccgtgaca

SEQ ID NO: 19411 - DNA, 75 bp, synthetic construct
  source 1..75: mol_type = other DNA
gggggaacagccagtgatacggttattcgtgacggcgggggacagagcctgaacgggctggcggtgaacaccacg

SEQ ID NO: 19412 - DNA, 75 bp, synthetic construct
  source 1..75: mol_type = other DNA
actgacgctggctgccgggggaagtctgagtggcagaacacagctcagtaaaggcgccagcatggtactgaatgg

SEQ ID NO: 19413 - DNA, 75 bp, synthetic construct
  source 1..75: mol_type = other DNA
cgtattcgttcaaataactgctatggacaggtctcacggcgtgaccaggagagcgcgctggcgtgctggggaatt

SEQ ID NO: 19414 - DNA, 75 bp, synthetic construct
  source 1..75: mol_type = other DNA
ttccctgcttccgttcttatttgcctgatgccctgcgtttaagatttgaagataaactgaccatccgggccatcg

SEQ ID NO: 19415 - DNA, 75 bp, synthetic construct
  source 1..75: mol_type = other DNA
cgcgatgttggactctcgcgaacccaggccaaagcattcatggccgggggatatggcgctttatccctgcgtgat

SEQ ID NO: 19416 - DNA, 75 bp, synthetic construct
  source 1..75: mol_type = other DNA
atgagcagaaagaaccggtggcggccattgcgccgtctttatccacttccactcagaccagtgtcagtgccggct

SEQ ID NO: 19417 - DNA, 75 bp, synthetic construct
  source 1..75: mol_type = other DNA
gcggtggccattgcggaggcagacggcgaaattgagccggaagagcgcaaggtgctggaagagattgccggtgtt

SEQ ID NO: 19418 - DNA, 75 bp, synthetic construct
  source 1..75: mol_type = other DNA
gtgttactttttctactggttcttgcgagctcatcgaaacagtatccagtcatgctgttaaggagatttttgcac

SEQ ID NO: 19419 - DNA, 75 bp, synthetic construct
  source 1..75: mol_type = other DNA
tttacaaaaaagacttgtagaaattaatatttggctaaagaaaaaaataatagccttcaaagattattcattgaa

SEQ ID NO: 19420 - DNA, 75 bp, synthetic construct
  source 1..75: mol_type = other DNA
gcgcaaataaaaggatgcaggataatatatctgaatttctgggggcgtatggaataaatcactcagtgtacatgg

SEQ ID NO: 19421 - DNA, 75 bp, synthetic construct
  source 1..75: mol_type = other DNA
aaatacggtcgcgcaaacaaactttctggtctggataaggcactggctgctggcgccactgaaatcacaaaagaa

SEQ ID NO: 19422 - DNA, 75 bp, synthetic construct
  source 1..75: mol_type = other DNA
ggtcttgtgatgacggtgctgaccgttggtctggtgtcgtgtgcaggaaaatcattaccccgtttctggcccggg

SEQ ID NO: 19423 - DNA, 75 bp, synthetic construct
  source 1..75: mol_type = other DNA
gggcgcacgcattcttaaccagacaatgccgcaggttgctgcgaaactgggtgattcagtcactatctggcatca

SEQ ID NO: 19424 - DNA, 75 bp, synthetic construct
  source 1..75: mol_type = other DNA
tgcgattacctggccgatagtggccgtcggtgcggcgattgtggcgggggcgctactcatccgtaaatattggga

SEQ ID NO: 19425 - DNA, 75 bp, synthetic construct
  source 1..75: mol_type = other DNA
gacagacgatgagctggaaaccgtcatgcagcggctggacgatgcctttgaatatggtgcggatgtcagcgttgt

SEQ ID NO: 19426 - DNA, 75 bp, synthetic construct
  source 1..75: mol_type = other DNA
ttttagcagcgttctcatggggggcagctatcgtaatgagcaaaaaaggagttgaagaactagatgccggagggg

SEQ ID NO: 19427 - DNA, 75 bp, synthetic construct
  source 1..75: mol_type = other DNA
tgtcccttgaagtacagaacgcggtcctggttaagttcggtacatgtgaaaacatcaccgttgatatggtgatta

SEQ ID NO: 19428 - DNA, 75 bp, synthetic construct
  source 1..75: mol_type = other DNA
tcgaaatgtacaatgcatcgcttcccgttccgctttcactggctgaatgtcgggctattggcaagagcattgcga

SEQ ID NO: 19429 - DNA, 75 bp, synthetic construct
  source 1..75: mol_type = other DNA
ggctggtgaaggatgtcgatgattttgttgcgtcagcggttgttttgtatgaccagatgaatcgcggcggcccgg

SEQ ID NO: 19430 - DNA, 75 bp, synthetic construct
  source 1..75: mol_type = other DNA
acaaaggcaacaaaactcccgcattcagcatcagtattgaggggaaggatatcaccactgtgctggacaaacgcc

SEQ ID NO: 19431 - DNA, 75 bp, synthetic construct
  source 1..75: mol_type = other DNA
agatataaaaaaactgaatgctcgcttagctttaacgaaggtcattcagctaccggatgagcatatatcaggcga

SEQ ID NO: 19432 - DNA, 75 bp, synthetic construct
  source 1..75: mol_type = other DNA
tgggaaacccgtggtaagcccggcggggtgatgttccacagcgatcagggcagtcattatacgagcaggcagttc

SEQ ID NO: 19433 - DNA, 75 bp, synthetic construct
  source 1..75: mol_type = other DNA
cccgaatgatccgaaatgggtgaaggggattgaaacccgcgattcagtgaatcagaaccagcaagaaacggaaca

SEQ ID NO: 19434 - DNA, 75 bp, synthetic construct
  source 1..75: mol_type = other DNA
tttggtccagcgggggtaaccgcagcaaaactccgcgaactgggtgtcattcgcggcaaaattgccactatcttc

SEQ ID NO: 19435 - DNA, 75 bp, synthetic construct
  source 1..75: mol_type = other DNA
tggcgagacggcagatcactcaattaaggtgaacggtcatcacgaaatcacatccaccagcaggacgtgtgacca

SEQ ID NO: 19436 - DNA, 75 bp, synthetic construct
  source 1..75: mol_type = other DNA
tatcaactgaccgacgtggcggaagaagcggatgtgctgctgctgaacacctgctcaatccgcgagaaggctcag

SEQ ID NO: 19437 - DNA, 75 bp, synthetic construct
  source 1..75: mol_type = other DNA
tgccgcctttgctggtggcccgtatgcgcagccacagttctgaatattaccgtgagatcgtcgaacggagggatc

SEQ ID NO: 19438 - DNA, 75 bp, synthetic construct
  source 1..75: mol_type = other DNA
gcaggcccggcaggcccacagggaccgaaaggagaaacaggtgcggctggcccggtgggggcaaccggacctcag

SEQ ID NO: 19439 - DNA, 75 bp, synthetic construct
  source 1..75: mol_type = other DNA
aaataatcagacaccaaaaaaacaaagaccccgcatatccctttcaggaacatttgttgatgcaactctgtattc

SEQ ID NO: 19440 - DNA, 75 bp, synthetic construct
  source 1..75: mol_type = other DNA
gcccttcgctacgaccgccagactatttttggccttgtccgtgaacgtccgatcgacattcacaaagaccctgtg

SEQ ID NO: 19441 - DNA, 75 bp, synthetic construct
  source 1..75: mol_type = other DNA
cagtcactgccgccatttgtcgcgaatacaagcagacatggaaaacgctggatgaagaactggcctacgctctct

SEQ ID NO: 19442 - DNA, 75 bp, synthetic construct
  source 1..75: mol_type = other DNA
gaccgtatcgcgatgattaacccggagaacggcaacaccacgccgctgtttgtggcgcaggggaatcagctgttc

SEQ ID NO: 19443 - DNA, 75 bp, synthetic construct
  source 1..75: mol_type = other DNA
gatcgacattcacaaagaccctgtggcactgaacaaatacattactgaatacctgactacaaagggcgtgtttga

SEQ ID NO: 19444 - DNA, 75 bp, synthetic construct
  source 1..75: mol_type = other DNA
gcgcagtcatagctcagcctattttcgggaactagtggagacgcgggaacgactggtgagagacgctgatgattt

SEQ ID NO: 19445 - DNA, 75 bp, synthetic construct
  source 1..75: mol_type = other DNA
tggcgcagcaaactgcagcaacaaatgagttcgtcagagcgtgaaagtgaactggccgctgaaaatgcccgcctg

SEQ ID NO: 19446 - DNA, 75 bp, synthetic construct
  source 1..75: mol_type = other DNA
tagagcgtgaggggccgttctacttcctcttcaccgataaggatggcgaaaaatatggtcgtgcaaacaaacttt

SEQ ID NO: 19447 - DNA, 75 bp, synthetic construct
  source 1..75: mol_type = other DNA
gctggggattggtattttactggtggtgaaatgcgccaaccttccggcgatggttttagcaaccttactcggagc

SEQ ID NO: 19448 - DNA, 75 bp, synthetic construct
  source 1..75: mol_type = other DNA
ccagggccggtaaaagttaccgctgacgaagtaaacaaaattatgcaggcagccaatatcagccagcctgacgcc

SEQ ID NO: 19449 - DNA, 75 bp, synthetic construct
  source 1..75: mol_type = other DNA
taccgtgacaacgcgctcacctacaaagcgcagcgcgataaaaaagccagagagctggaacaggcgaatgccacc

SEQ ID NO: 19450 - DNA, 75 bp, synthetic construct
  source 1..75: mol_type = other DNA
ctcggtatcagagacggaatcatcagcgatcaggccgcattgagaacgcttcaggaatatatccgcactcagtgc

SEQ ID NO: 19451 - DNA, 75 bp, synthetic construct
  source 1..75: mol_type = other DNA
ggattgctgggttggccgtttgttgcaaaaggctgaagggatagttgacggcatgttgatgatgcttgatatcaa

SEQ ID NO: 19452 - DNA, 75 bp, synthetic construct
  source 1..75: mol_type = other DNA
atgatcatttgcgggtgcatggcccgtctgaaaaagaacaacagcgatttgcatgatttattggtggactattat

SEQ ID NO: 19453 - DNA, 75 bp, synthetic construct
  source 1..75: mol_type = other DNA
tttataaaaagaaaaaaactcccattaaactcaaaagcgatacttgcttatgcgacaggcgtttttgaaccattc

SEQ ID NO: 19454 - DNA, 75 bp, synthetic construct
  source 1..75: mol_type = other DNA
cgatatcctccgggctcgccgggcaaccggcctgatgacccgcgacaattacagaacggtaaataacattaccct

SEQ ID NO: 19455 - DNA, 75 bp, synthetic construct
  source 1..75: mol_type = other DNA
cctgtcggccttcgccgcgctcagggatccgctctccagggcttactacacccgcaaaatgagtcagggaaaacg

SEQ ID NO: 19456 - DNA, 75 bp, synthetic construct
  source 1..75: mol_type = other DNA
atgagcagggtaaccgcgattatctccgctctggttatttgcatcatcctctgcctgtcatgggctgttaatcat

SEQ ID NO: 19457 - DNA, 75 bp, synthetic construct
  source 1..75: mol_type = other DNA
atgacattggttcggtgttgctatcgatcactcctagtgatgcagtcaaaatcattctgtgtgcaaagttagaac

SEQ ID NO: 19458 - DNA, 75 bp, synthetic construct
  source 1..75: mol_type = other DNA
ctatgtggaatgcgtacagacagatcgatggtatgagccgccagtgagttttgacgggctggcgcgcacctttcg

SEQ ID NO: 19459 - DNA, 75 bp, synthetic construct
  source 1..75: mol_type = other DNA
attcaggacgatggcatgtagcgcgttaatagaatcaggattgtggtcccgtgatgcagtggaacgtcagatgag

SEQ ID NO: 19460 - DNA, 75 bp, synthetic construct
  source 1..75: mol_type = other DNA
ctccagaacatatcgtgaaagactctacagcattgtggaatgaagttgaaagagttgagcgccagagcaatggtc

SEQ ID NO: 19461 - DNA, 75 bp, synthetic construct
  source 1..75: mol_type = other DNA
ctggttacctgatttggtttggtgaaactggcgttcacgaattcgcgtacctggtcagggactacgtaaacaaaa

SEQ ID NO: 19462 - DNA, 75 bp, synthetic construct
  source 1..75: mol_type = other DNA
aaacgttctgtgatgaatcatattgcggccctttgtgattccgggctggtaaaaaaagtcacccggaaaggtgaa

SEQ ID NO: 19463 - DNA, 75 bp, synthetic construct
  source 1..75: mol_type = other DNA
atgtctaaagaaaagtttgaacgtacaaaaccgcacgttaacgtgggtactatcggccacgttgaccagggtaaa

SEQ ID NO: 19464 - DNA, 75 bp, synthetic construct
  source 1..75: mol_type = other DNA
cgggtaatccaaaaactgttgcccaatatcaactgacaaaaaattttgatgttatctggttatggtccgaagagg

SEQ ID NO: 19465 - DNA, 75 bp, synthetic construct
  source 1..75: mol_type = other DNA
tccaggaaaccagttgaggtagaaagactacaaaaagtttatgtccgagacccgatggtaaaagcttggatttta

SEQ ID NO: 19466 - DNA, 75 bp, synthetic construct
  source 1..75: mol_type = other DNA
tatggttctggaaagtcaggatgaatatgactcacagtgggcggcaatttgttccattgccccaaagattggctg

SEQ ID NO: 19467 - DNA, 75 bp, synthetic construct
  source 1..75: mol_type = other DNA
acgctaaaactgagtacttcaatctgacactgaaaggcctggggtatctcagcaacattcgtcaggttaatcatc

SEQ ID NO: 19468 - DNA, 75 bp, synthetic construct
  source 1..75: mol_type = other DNA
gcgccgggacagacctggacaacctcgcgggcaatatgaacacaaagcgcctgaccatcactccggcaacggata

SEQ ID NO: 19469 - DNA, 75 bp, synthetic construct
  source 1..75: mol_type = other DNA
attctctggttctgaaattcagcaagatgatgttttactcaacataacgggagcatctatcggccgatgcgctaa

SEQ ID NO: 19470 - DNA, 75 bp, synthetic construct
  source 1..75: mol_type = other DNA
ttgatggcaacggacgtctgacgggcgcccgtactgcacaggccgcaccttatgctcactacacctgccaccttt

SEQ ID NO: 19471 - DNA, 75 bp, synthetic construct
  source 1..75: mol_type = other DNA
atgtacgcaaaatcctttctcgctcttgatggcaacggacgtctgacgggggcccgtaccgcacagactgcgcct

SEQ ID NO: 19472 - DNA, 75 bp, synthetic construct
  source 1..75: mol_type = other DNA
cgtgttcaggtcattaatacaactcacagtaacttcctcttactgactaaactgtgcacattattgatcgataaa

SEQ ID NO: 19473 - DNA, 75 bp, synthetic construct
  source 1..75: mol_type = other DNA
gtcacttcgctggatacgatgagtgatgaagtggttgtttctggttatgtttttgaggttcagacctcgcagtct

SEQ ID NO: 19474 - DNA, 75 bp, synthetic construct
  source 1..75: mol_type = other DNA
atctgccagcgtctcggcattgatcaggtgccggcacgggtgagtgctgtcagtggcgatcgtttcctgaaggtg

SEQ ID NO: 19475 - DNA, 75 bp, synthetic construct
  source 1..75: mol_type = other DNA
attgacagccacgagggaaattacaggctttaccgcattgaaggtggcaccccgtccgttattggcatttaccag

SEQ ID NO: 19476 - DNA, 75 bp, synthetic construct
  source 1..75: mol_type = other DNA
atgcttaagacaaacagcctccggaagggcatgattcatgggtgtcgctggtgtcaggccaacccggaaaaattc

SEQ ID NO: 19477 - DNA, 75 bp, synthetic construct
  source 1..75: mol_type = other DNA
aactgaaagaacatgaacagtcacgacgtcacccggacgcctcgctgaccgcaaaaggctttgttcaactcagta

SEQ ID NO: 19478 - DNA, 75 bp, synthetic construct
  source 1..75: mol_type = other DNA
gggagttgtgtgggacatgcatggaaaaaaaggggaagacctaaatgcaggtaaaaatcttcaatttacaggaaa

SEQ ID NO: 19479 - DNA, 75 bp, synthetic construct
  source 1..75: mol_type = other DNA
ttctcaccacattattcacagcggagagtcattgtctgtcaccttcagagataagccagaaactgcagtttacca

SEQ ID NO: 19480 - DNA, 75 bp, synthetic construct
  source 1..75: mol_type = other DNA
ggcttgctgacgtatctgacaaacctttatttcaagattaaagaagataagcgtaaggctgcgagaggtgaataa

SEQ ID NO: 19481 - DNA, 75 bp, synthetic construct
  source 1..75: mol_type = other DNA
gataattttccagagttaatagatatatacaattcatgctttagtgaaaatatattgtcatatgatattcaggat

SEQ ID NO: 19482 - DNA, 75 bp, synthetic construct
  source 1..75: mol_type = other DNA
aacaaacaagactacaggcgcgaatggatgagttacgggcagagattgcatttgctcagaagggcgaaaagccat

SEQ ID NO: 19483 - DNA, 75 bp, synthetic construct
  source 1..75: mol_type = other DNA
tgtacttctgtacggtggtctgtgtgctgtatctcctttcgggtggataccgggccatgcgtgacgtctggcgca

SEQ ID NO: 19484 - DNA, 75 bp, synthetic construct
  source 1..75: mol_type = other DNA
gcgttccgtttgaaggcctgaaagaacgtccgtttaaattacgcctcagcattatcactggtgatcgccctgtac

SEQ ID NO: 19485 - DNA, 75 bp, synthetic construct
  source 1..75: mol_type = other DNA
atgagcaagaaaaaagggaaaacaccgcgacctgcggcaaaaacaatcaccgccagcgccccgaaaatggaagca

SEQ ID NO: 19486 - DNA, 75 bp, synthetic construct
  source 1..75: mol_type = other DNA
aaccatattatctgggcgaagccgtccggacgctggaacgggtgcaacaaggaaagcctgcgggcgtatttcccc

SEQ ID NO: 19487 - DNA, 75 bp, synthetic construct
  source 1..75: mol_type = other DNA
ttcaaggagtgtcgccagagtgccgcgatgaaacgagtgttggcagtgtatggagatatgaacttaaacttgctg

SEQ ID NO: 19488 - DNA, 75 bp, synthetic construct
  source 1..75: mol_type = other DNA
ttggtaatcccccatacagccgcgccagtcagcatgaggggcaatacatcaccggcatgcgttacatcatgaaac

SEQ ID NO: 19489 - DNA, 75 bp, synthetic construct
  source 1..75: mol_type = other DNA
gagagatgacgcccggcgagcgcagcctcattctgcgggccctgaaaaccctggaccgccatcttcatgaacccg

SEQ ID NO: 19490 - DNA, 75 bp, synthetic construct
  source 1..75: mol_type = other DNA
gagaagtccgggtgccacaccggggaaacgtggtggacagggtcatagaaggtgcttacgaagtggtgggcgtgt

SEQ ID NO: 19491 - DNA, 75 bp, synthetic construct
  source 1..75: mol_type = other DNA
tttgaacacgctgacgaagggctgacggagcacgcgcagcaatgtccttatgtcaggccggaacgcagagaaata

SEQ ID NO: 19492 - DNA, 75 bp, synthetic construct
  source 1..75: mol_type = other DNA
gccgacattctgacaccacgacgccgggaggattacggtaaggacctgtggagtacttatcagaccatccaggag

SEQ ID NO: 19493 - DNA, 75 bp, synthetic construct
  source 1..75: mol_type = other DNA
ctcattgtgaatgagtatcgggagcagggcggcggcaccatcgatttccctgatgatgtcagccgtgcacgccag

SEQ ID NO: 19494 - DNA, 75 bp, synthetic construct
  source 1..75: mol_type = other DNA
accctgaatttgtctttgtgtttgcggctgtccgtcgcgcagaccgtcatccccgtatctgtatgcttcgcaccg

SEQ ID NO: 19495 - DNA, 75 bp, synthetic construct
  source 1..75: mol_type = other DNA
gccccttcgttgcccccagtgccgttattcaggcccgccagcgcctgggaagtgaggctgtccgccgcgtgttca

SEQ ID NO: 19496 - DNA, 75 bp, synthetic construct
  source 1..75: mol_type = other DNA
ctgaagcttgaaaaacttgagatcaaaagagaaatccagaaaatccttgaagatgagtcagaaaagggcgaacgg

SEQ ID NO: 19497 - DNA, 75 bp, synthetic construct
  source 1..75: mol_type = other DNA
tgtttgaccggatagaggagatgcgtgatgccatgcagtcgctgattctgccgccaccggcacgccaggcgctgg

SEQ ID NO: 19498 - DNA, 75 bp, synthetic construct
  source 1..75: mol_type = other DNA
cacccgctggcaggcaaaaaagccattaccattgaagaactggcgcaatatccgttggtgacatataccttcggc

SEQ ID NO: 19499 - DNA, 75 bp, synthetic construct
  source 1..75: mol_type = other DNA
ggatgactggtggcgcaacggccagaacctttacctggacaatatggcggtcaccggcttttaccgggtgcccct

SEQ ID NO: 19500 - DNA, 75 bp, synthetic construct
  source 1..75: mol_type = other DNA
gggaaaccgcggctcatgatgttcgtgaggaaacatccggcgcgttaacgcgcatcagagttctgacctgcctcc

SEQ ID NO: 19501 - DNA, 75 bp, synthetic construct
  source 1..75: mol_type = other DNA
gggagggccgtgattcatattgtaccgaggctggcaggggccgggggaaatggtgtttttcaggtggtgctgggg

SEQ ID NO: 19502 - DNA, 75 bp, synthetic construct
  source 1..75: mol_type = other DNA
atgcttagacaacatcaggatagcctcttaccgcgctttgcgcaaggagaagaaggccatgaaactaccgggaaa

SEQ ID NO: 19503 - DNA, 75 bp, synthetic construct
  source 1..75: mol_type = other DNA
ccctgcagtgggtttctgaattgactgatgaactcatggcaaaaatcagaagccacgaatacaaccgctcaatgg

SEQ ID NO: 19504 - DNA, 75 bp, synthetic construct
  source 1..75: mol_type = other DNA
aaagtgaggtacggcaaaagacagttgtcaggacactcagattctctcctgttgaggatgaaaccatcaggaaaa

SEQ ID NO: 19505 - DNA, 75 bp, synthetic construct
  source 1..75: mol_type = other DNA
gtggccaaagcacttgcggcgcttgcaggcagcgcccctgagacactggatacgcttaaagagctggctgacgct

SEQ ID NO: 19506 - DNA, 75 bp, synthetic construct
  source 1..75: mol_type = other DNA
gtgccctgtcgatgcagatgccgggattccgccgtcagatgaacgaaggctggtaccagatacgtattcgcggtg

SEQ ID NO: 19507 - DNA, 75 bp, synthetic construct
  source 1..75: mol_type = other DNA
tgcatctctattgtgactgccgccagtgtacggaaggtgtatatccagtgccagacttcggtgagtatataggta

SEQ ID NO: 19508 - DNA, 75 bp, synthetic construct
  source 1..75: mol_type = other DNA
tgtgggaactgaaaaaggctggcttcgttgataaaagcgtatacacctggcgtgtggctggcgaaggtgaatccg

SEQ ID NO: 19509 - DNA, 75 bp, synthetic construct
  source 1..75: mol_type = other DNA
ttgctgggttgggcgcttattgcaaaaggcagaaggcatcattgaaggtatgttgataatgttagaaatagaatt

SEQ ID NO: 19510 - DNA, 75 bp, synthetic construct
  source 1..75: mol_type = other DNA
atggaaaacccgtttttcccggtatgaaactgtcgaaggaaaaatgcgaccaggtcaacgccattgagcgtgata

SEQ ID NO: 19511 - DNA, 75 bp, synthetic construct
  source 1..75: mol_type = other DNA
gggcgctttttggcgaaaaacctcgtatcttgctggaaaatagtgattttactgtcacgtcttttcgctatgaca

SEQ ID NO: 19512 - DNA, 75 bp, synthetic construct
  source 1..75: mol_type = other DNA
gaagctgtcgaaggaaaaatgcgaccgggttaacgctatcgaacgggataaggcgctggcatgggtggagcgtaa

SEQ ID NO: 19513 - DNA, 75 bp, synthetic construct
  source 1..75: mol_type = other DNA
tgcggagtcgtgcggcttcgtggtgagaacgccggagggggagcggtatatcccttgtgtgaatatctctgcaga

SEQ ID NO: 19514 - DNA, 75 bp, synthetic construct
  source 1..75: mol_type = other DNA
atgacacagacagaatcagtgattctggcacacacccggcggtgtgtgcctgcggagtcgtgcggcttcgtggtg

SEQ ID NO: 19515 - DNA, 75 bp, synthetic construct
  source 1..75: mol_type = other DNA
aggaagtgatcacccgtacggtgaaagtgaccaacgtgggtaaaccttctgtggcggaagaacgcagcgaaatta

SEQ ID NO: 19516 - DNA, 75 bp, synthetic construct
  source 1..75: mol_type = other DNA
cggtgaaaggttccggtaccacactgtgggtgtacaccggcactggtgatgcttatgcaaacccgttgtcagacg

SEQ ID NO: 19517 - DNA, 75 bp, synthetic construct
  source 1..75: mol_type = other DNA
cgggagacgaaaaacgagcaggtggtattgcaccagataattgatcgccggacagcatcactgtgcagtgtcggg

SEQ ID NO: 19518 - DNA, 75 bp, synthetic construct
  source 1..75: mol_type = other DNA
cctgaaacgaaggctcttgtggaattactggaagaagaaactacgggagattcccgtagtattcctgtcatcacc

SEQ ID NO: 19519 - DNA, 75 bp, synthetic construct
  source 1..75: mol_type = other DNA
tgctgcgtctgcggcgggccggagagataaccggacaacatgtccctgaaatcattctgctcaactcccatgacg

SEQ ID NO: 19520 - DNA, 75 bp, synthetic construct
  source 1..75: mol_type = other DNA
acctgtctaactcttcagtgcttggtgcctgtcagaaactccaggaggctgttggcttaccgaatctggcaccgc

SEQ ID NO: 19521 - DNA, 75 bp, synthetic construct
  source 1..75: mol_type = other DNA
ggccttcccgagagtggtaaaggagaggccctggaaataccccacagccccgaaaaagagccagtcagttgctta

SEQ ID NO: 19522 - DNA, 75 bp, synthetic construct
  source 1..75: mol_type = other DNA
gtaacgcttacctggagaaacgcacaaaccggttcggagaggtcatcgctcttgagcctgctctggcaaaataca

SEQ ID NO: 19523 - DNA, 75 bp, synthetic construct
  source 1..75: mol_type = other DNA
tgcaggggcgggtacttgatggagatttaatcaccggatgggaaaaacgccaggtactgaaagaggacaatggca

SEQ ID NO: 19524 - DNA, 75 bp, synthetic construct
  source 1..75: mol_type = other DNA
ttattcattctgagaatgcattaaaccgggcactggaaatgaaagcggtattaattaaattaaccgaagttcatg

SEQ ID NO: 19525 - DNA, 75 bp, synthetic construct
  source 1..75: mol_type = other DNA
catagaaatggttcgtaggtatgctcaccttgcgcctaatcatttgacagagcatgcgaggaaaatagacgacat

SEQ ID NO: 19526 - DNA, 75 bp, synthetic construct
  source 1..75: mol_type = other DNA
caagacaataccgtttcggtagggaacagcacaacacaacgcaaaattaccaatatggctgccggtcttatacaa

SEQ ID NO: 19527 - DNA, 75 bp, synthetic construct
  source 1..75: mol_type = other DNA
tcagtcagggcacagaccccgtgaaaatgccggattttgatattctcgcggagggtaaaacgctgtccggcgtgg

SEQ ID NO: 19528 - DNA, 75 bp, synthetic construct
  source 1..75: mol_type = other DNA
atcaaagccactcatcgggcgatcgcgcaattgcaattggtcaagtgtcaaacgccgcaggaaacaggtccacag

SEQ ID NO: 19529 - DNA, 75 bp, synthetic construct
  source 1..75: mol_type = other DNA
ttcgaaccgctggacccagaagaacggggccgcaccttcgaagctctggattgcacagattggcgcgatgactga

SEQ ID NO: 19530 - DNA, 75 bp, synthetic construct
  source 1..75: mol_type = other DNA
gcggttggtggatacgtgaagtgggcttgtttgatgagtccggggcattgattgccgtgggtaactgcccggaaa

SEQ ID NO: 19531 - DNA, 75 bp, synthetic construct
  source 1..75: mol_type = other DNA
ataaagctgacggcgcaaatgctatcgcgctgggtaatggtagtgttacaggtggcgcaaatgctattgctcttg

SEQ ID NO: 19532 - DNA, 75 bp, synthetic construct
  source 1..75: mol_type = other DNA
ctattgcatgcatttgtaaaaaagacacagaaaacaccggtgaaggctatcgaaatcgccagaactcgcctgaag

SEQ ID NO: 19533 - DNA, 75 bp, synthetic construct
  source 1..75: mol_type = other DNA
atgacccgaattttgcgaccaccatgactaacgcgcttgcgggtaagcaaccgaaggatgccaccctgacggcgc

SEQ ID NO: 19534 - DNA, 75 bp, synthetic construct
  source 1..75: mol_type = other DNA
gtaacgcctacctggagaaacgcacgaaccgcttcggtgaagttatagcccttgagcctgctctggcaaaataca

SEQ ID NO: 19535 - DNA, 75 bp, synthetic construct
  source 1..75: mol_type = other DNA
cagtgtcgctccgtcactggccggaattaaaatcccgcacatcgaccagtcgcaggagtctgatgcaaaattcct

SEQ ID NO: 19536 - DNA, 75 bp, synthetic construct
  source 1..75: mol_type = other DNA
ggtcgttacgcaaagacgaatggttttacatctcttgctattggggactcctcccttgccgatggtgaaaaaact

SEQ ID NO: 19537 - DNA, 75 bp, synthetic construct
  source 1..75: mol_type = other DNA
atgggaaagagtaagaagaaccgcgctgcgtcacagaaccagacccagcataaaagccagacttcagccgaagca

SEQ ID NO: 19538 - DNA, 75 bp, synthetic construct
  source 1..75: mol_type = other DNA
gtgacgaaattgtctataaaataaatgaaattgtggaaagaagacgtgcagaaggagctaaaagtacagatgtaa

SEQ ID NO: 19539 - DNA, 75 bp, synthetic construct
  source 1..75: mol_type = other DNA
cgtcagcaggaactctcactggcaacagtaacagcccgggtggcaaccctgttcccttcatcatttccggtactc

SEQ ID NO: 19540 - DNA, 75 bp, synthetic construct
  source 1..75: mol_type = other DNA
gtatgcctacagttacttttgcgggctggcatatgaagaaggcaaagccgaactgaacgaaacgatggctaaccg

SEQ ID NO: 19541 - DNA, 75 bp, synthetic construct
  source 1..75: mol_type = other DNA
aagtaaagaatgcacgggttgcggcaggtcttactcttaaagaagctgctgatatttttggttatcaactgaatt

SEQ ID NO: 19542 - DNA, 75 bp, synthetic construct
  source 1..75: mol_type = other DNA
atggctaaggtgaacctgtatatcagcaatgatgcctatgaaaaaataaatgcgattattgagaagcgtcgacag

SEQ ID NO: 19543 - DNA, 75 bp, synthetic construct
  source 1..75: mol_type = other DNA
ttttgggtattgagtctctcagtcctcatgtctccggaaatccaaagtttgaatatgccaatatggttgaagata

SEQ ID NO: 19544 - DNA, 75 bp, synthetic construct
  source 1..75: mol_type = other DNA
agcaaacttttgaccaggctgaataatagcgatctgctgcttctggatgactgggggctggaacctctctcatca

SEQ ID NO: 19545 - DNA, 75 bp, synthetic construct
  source 1..75: mol_type = other DNA
acgtcgggctggatgttcataaagaaaccttggcgattgctacacctgaatggcttggcgaagttcgttattatg

SEQ ID NO: 19546 - DNA, 75 bp, synthetic construct
  source 1..75: mol_type = other DNA
agaacactttatcagccgggaaataatgcgggcaacggtgtttaattatatcgaatgtgattacaatcggtggcg

SEQ ID NO: 19547 - DNA, 75 bp, synthetic construct
  source 1..75: mol_type = other DNA
ctgttcactcgcagtacccgcagcattgagttaacggagtccgggcgttattttttccgcaaagctaccgacctg

SEQ ID NO: 19548 - DNA, 75 bp, synthetic construct
  source 1..75: mol_type = other DNA
gaggcggcatatagtctctcccgggatcaaaaacgtatgctgtatctgttcgttgaccagatcagaaaatctgat

SEQ ID NO: 19549 - DNA, 75 bp, synthetic construct
  source 1..75: mol_type = other DNA
agataatcaggatgtcgttgccacactcattgtgaatgagtatcgggagcagggcggcggcaccatcgatttccc

SEQ ID NO: 19550 - DNA, 75 bp, synthetic construct
  source 1..75: mol_type = other DNA
gaagcgttaaaagctggccgttctcttgatgagtttctcatcaaaaaagatgcttccagcactgctggtgacgaa

SEQ ID NO: 19551 - DNA, 75 bp, synthetic construct
  source 1..75: mol_type = other DNA
cattgattcttggtcttttagccggtatcggcccgatgtgtaccgatctttatttgccggctttgccggagatgt

SEQ ID NO: 19552 - DNA, 75 bp, synthetic construct
  source 1..75: mol_type = other DNA
ccgccgtattcggtgaaatggattggcagcgatgacccgacgctgattaacgatgagcgttttgccccggctggc

SEQ ID NO: 19553 - DNA, 75 bp, synthetic construct
  source 1..75: mol_type = other DNA
gtgctgtctaaacataaaacggataccaaagttcagtttattgacgccagcgaactgttcaaaaaagagactaac

SEQ ID NO: 19554 - DNA, 75 bp, synthetic construct
  source 1..75: mol_type = other DNA
catcccggaaatgagtgatgaacagttctatggctacatgttggcaaacaaggatgctctacacacctacgttaa

SEQ ID NO: 19555 - DNA, 75 bp, synthetic construct
  source 1..75: mol_type = other DNA
atgttaaatccgctgatattcacaaaattacccttagccagcgcagatagtacgaacgtcgctcgaaacatcggt

SEQ ID NO: 19556 - DNA, 75 bp, synthetic construct
  source 1..75: mol_type = other DNA
caacgttgaccagaaaatatgaaggttcaacttgtcttccgaacgtagctctttacgcggcaggctaccggaaat

SEQ ID NO: 19557 - DNA, 75 bp, synthetic construct
  source 1..75: mol_type = other DNA
atgaatatcaacacggaaacccgcgaaattctgcgtaattacagggccgtgattaatgcgcggcgtcgtgaaatg

SEQ ID NO: 19558 - DNA, 75 bp, synthetic construct
  source 1..75: mol_type = other DNA
gaactatctttctgccaaaggtcgtgctgcgattgtctgcttcccgggtattttttaccgtggcggcgcagagca

SEQ ID NO: 19559 - DNA, 75 bp, synthetic construct
  source 1..75: mol_type = other DNA
taaatggccccagtcatttggtgtcctgtttgctgtgtttgccacaaaagtttctggctcgactaacgaagcata

SEQ ID NO: 19560 - DNA, 75 bp, synthetic construct
  source 1..75: mol_type = other DNA
actgatacggctgctctggtcacggttgtggcactggtgacgctgcataccgatgcacttcacgccacgcgggat

SEQ ID NO: 19561 - DNA, 75 bp, synthetic construct
  source 1..75: mol_type = other DNA
acactgactgggcaaaaaagacgttatgacgataacttcagattgaatgtggtcagagatgttattgataattct

SEQ ID NO: 19562 - DNA, 75 bp, synthetic construct
  source 1..75: mol_type = other DNA
catattttcttatcaataccagtggctacaagtcagagggtgaaatgattcttagtattgcgtcggactatgcgg

SEQ ID NO: 19563 - DNA, 75 bp, synthetic construct
  source 1..75: mol_type = other DNA
atcaaaataaagctaataacatccaattaagatatgatgataagcagtttcatacaacggttatcaaagatgttc

SEQ ID NO: 19564 - DNA, 75 bp, synthetic construct
  source 1..75: mol_type = other DNA
gagccaaaaaatacgaattctcccgagtggtgggcgtggcgctggtccgcacatttcggactttgcgaagatgag

SEQ ID NO: 19565 - DNA, 75 bp, synthetic construct
  source 1..75: mol_type = other DNA
gggatgagcgcagatggtgcaacgaagtggcaatataatcacaacggtgagctcgttattacgggcgacaatacc

SEQ ID NO: 19566 - DNA, 75 bp, synthetic construct
  source 1..75: mol_type = other DNA
tcctgaaacatcacccgatacagggcacagccatgaccagggaccttctctgccgtccgccacgcagcaggaaca

SEQ ID NO: 19567 - DNA, 75 bp, synthetic construct
  source 1..75: mol_type = other DNA
gctacaaaaaagactcgaagaactaaatgagtggttgggggaaaaggttatttcttttgaaccatataaatttga

SEQ ID NO: 19568 - DNA, 75 bp, synthetic construct
  source 1..75: mol_type = other DNA
tggatgagctggtggattgcgtggcggaactggaaggacaggtaagccagtttgaaatactggtgaaggagttta

SEQ ID NO: 19569 - DNA, 75 bp, synthetic construct
  source 1..75: mol_type = other DNA
ataaccgacagaaaaagcggcgagcaaaaatgctgtcagcatatccgtacaacaatttcagaagtgaatcgtacg

SEQ ID NO: 19570 - DNA, 75 bp, synthetic construct
  source 1..75: mol_type = other DNA
atattacagggggggttccggccagaaacatttctctctatgcaaaacttggatataaaggagatatacagaatt

SEQ ID NO: 19571 - DNA, 75 bp, synthetic construct
  source 1..75: mol_type = other DNA
aaggacgggcttcagatcatcccgttgtcagaagtcgcggcgaaggatgaatttcttaacatcaagaacgtgagt

SEQ ID NO: 19572 - DNA, 75 bp, synthetic construct
  source 1..75: mol_type = other DNA
tggtcccgcgtgaagggatgcaggtgagtgagaaaccgtcggtggcgagggtacggtttggtgacggttatgaac

SEQ ID NO: 19573 - DNA, 75 bp, synthetic construct
  source 1..75: mol_type = other DNA
aagcaaagctgcattgccgtattgatgatgattacgaagatacgttgatacaggcgtacatcgatgcggcgctgg

SEQ ID NO: 19574 - DNA, 75 bp, synthetic construct
  source 1..75: mol_type = other DNA
gacccatgatgaacaggaactgtttgaagtcattaataaaaaattactggagcatcttgatgatgtcagctcata

SEQ ID NO: 19575 - DNA, 75 bp, synthetic construct
  source 1..75: mol_type = other DNA
gattggttgcggtccagacataccctggtccgcgaaaggggagcagctactttttaaagcattgacctacaatca

SEQ ID NO: 19576 - DNA, 75 bp, synthetic construct
  source 1..75: mol_type = other DNA
tacatgaaaatgttgatacaatatatacccgtccatttacgcataacgacgatagaagacaacccagagataata

SEQ ID NO: 19577 - DNA, 75 bp, synthetic construct
  source 1..75: mol_type = other DNA
tctggaaatcgcactggtatcgctggcagcagagccagccggtaaattgcatgaatacaaaccagtgggatatca

SEQ ID NO: 19578 - DNA, 75 bp, synthetic construct
  source 1..75: mol_type = other DNA
attctggtggttttctggctggcattggtgcgcaaaacgagaatgcgccaaaggcaagcgacattaacgcaacgc

SEQ ID NO: 19579 - DNA, 75 bp, synthetic construct
  source 1..75: mol_type = other DNA
agggattatcgcagcgcggatgattcgccggtcaactggaccttctccggcggagagcagacagatccccgcgca

SEQ ID NO: 19580 - DNA, 75 bp, synthetic construct
  source 1..75: mol_type = other DNA
tatgcagtttcatctgaaaacccgggaagaaccgctttttgctgctgtctacacgccggaaaaacaacctgatgc

SEQ ID NO: 19581 - DNA, 75 bp, synthetic construct
  source 1..75: mol_type = other DNA
tctgaccggtcatgaaatcaggaccgtcctggcacgcctggaggacatcccggaagaacagcggattgagtccgg

SEQ ID NO: 19582 - DNA, 75 bp, synthetic construct
  source 1..75: mol_type = other DNA
tagatctcagcgccacacaaattggcgtactgagtagctgtatgcttatcgcctatggtatcagcaaaggagtga

SEQ ID NO: 19583 - DNA, 75 bp, synthetic construct
  source 1..75: mol_type = other DNA
tcagggcggcatcgccgtcagaccttgcggatgcgcttgctcaaaaaattcgtgaaggatggcaaccatacggcg

SEQ ID NO: 19584 - DNA, 75 bp, synthetic construct
  source 1..75: mol_type = other DNA
cgggcgcgtcctgacgcttcaacgattttatggtggctggaacagagtgaagaagccagaaaatcgctaaccagc

SEQ ID NO: 19585 - DNA, 75 bp, synthetic construct
  source 1..75: mol_type = other DNA
cggcaggttataaaccggtcgcctctggcagcgaaaagaccccggaaggcttacgtaatagcgacgcgctggcgt

SEQ ID NO: 19586 - DNA, 75 bp, synthetic construct
  source 1..75: mol_type = other DNA
cagatggcgcactcatcaccggactgacctttcttgaccccaaagatgccacacaggttcaggggctgtttcagc

SEQ ID NO: 19587 - DNA, 75 bp, synthetic construct
  source 1..75: mol_type = other DNA
tcgacgtgttcacccgctgcgtgctcggcatggtcgtcacgctggaagcgccgtctgccccgatttattgttcac

SEQ ID NO: 19588 - DNA, 75 bp, synthetic construct
  source 1..75: mol_type = other DNA
aaacggcaatgtacagaatgaagcagttgttgggagattcactgacgctgcgtgactacgatggtcaggtagcgg

SEQ ID NO: 19589 - DNA, 75 bp, synthetic construct
  source 1..75: mol_type = other DNA
agcatttgcaggtcaggtttggtgacgggccgtggcaggatgtcaaggggctggatgaagtgggcagtgatacag

SEQ ID NO: 19590 - DNA, 75 bp, synthetic construct
  source 1..75: mol_type = other DNA
ccgcctgattatcacaaagggatatccgaagcgcgacgattccagccgcagaattgatgttccgtatgacggata

SEQ ID NO: 19591 - DNA, 75 bp, synthetic construct
  source 1..75: mol_type = other DNA
ccgaagcgcgacgattccagccgcagaattgacgtcccgtatgacggatatgaaatcaagacaatcacacatccg

SEQ ID NO: 19592 - DNA, 75 bp, synthetic construct
  source 1..75: mol_type = other DNA
acactctgcgggtatccgcagcaacggcattgagaaagtgctcgccggagaaacctctctcgatgaagttctgcg

SEQ ID NO: 19593 - DNA, 75 bp, synthetic construct
  source 1..75: mol_type = other DNA
ggacataaagtccaggcaaccaccgatcgctataacgatacccgaggtcaggaatgggttaagttggttatttga

SEQ ID NO: 19594 - DNA, 75 bp, synthetic construct
  source 1..75: mol_type = other DNA
atggccggtattgtctgcagatattcatggacggggcttcgtgtactggacggtgataccatcgaggtaatggac

SEQ ID NO: 19595 - DNA, 75 bp, synthetic construct
  source 1..75: mol_type = other DNA
catcatctggatgctgcacggttcgctgtgtgaaatacggatgagtttctggggagcggagtttgcggcgttctt

SEQ ID NO: 19596 - DNA, 75 bp, synthetic construct
  source 1..75: mol_type = other DNA
aagtaggtgatgatatttttgcggataatactattcgtaatctcgaatcatggggaattaataccacttatgttg

SEQ ID NO: 19597 - DNA, 75 bp, synthetic construct
  source 1..75: mol_type = other DNA
atattactgccggacaatcgggaaccttgtcagatgatgatcgtggcggttttatatggttgggcggtctggcat

SEQ ID NO: 19598 - DNA, 75 bp, synthetic construct
  source 1..75: mol_type = other DNA
aaaccgtccctgtttgcccgtgtcacggcgctgtttaccaaaaaagagcagtccgatgacgcccggttctctgat

SEQ ID NO: 19599 - DNA, 75 bp, synthetic construct
  source 1..75: mol_type = other DNA
cagatccgcgcccagcaattccccatgacgaagttgagcgcagaatggcagaacgctttgctaaaatgcgcaagg

SEQ ID NO: 19600 - DNA, 75 bp, synthetic construct
  source 1..75: mol_type = other DNA
atttatacaaggtatgggttatcagctgataaaacatttacttacgtgcttccagaactagccaataagctgaga

SEQ ID NO: 19601 - DNA, 75 bp, synthetic construct
  source 1..75: mol_type = other DNA
ggatgttctgatacctggaaggcttcagacaaaaagccgggtgaagccgctgttctctggatcaagcgtggtgat

SEQ ID NO: 19602 - DNA, 75 bp, synthetic construct
  source 1..75: mol_type = other DNA
ttctggtcgctgacggcgaaaggctgcatgttcggcaagaacatcaccagtcccgcaaatccgcgcgagacgcag

SEQ ID NO: 19603 - DNA, 75 bp, synthetic construct
  source 1..75: mol_type = other DNA
ttctcagaatcatgcggaatggtgatgagaatgctgatgacattgcagggcgcttcaccgggacgtataccggag

SEQ ID NO: 19604 - DNA, 75 bp, synthetic construct
  source 1..75: mol_type = other DNA
attgccgaactgcgccaacgtgtcgaggctggcgagcaaaagaccaagcttgctcgtgaattcggaatcagtcgc

SEQ ID NO: 19605 - DNA, 75 bp, synthetic construct
  source 1..75: mol_type = other DNA
atggctgacattaaagatgtggagcaggtcgcgcaggagctgcagcagaagtttgacgattttaaggcaaaaaac

SEQ ID NO: 19606 - DNA, 75 bp, synthetic construct
  source 1..75: mol_type = other DNA
cgccggttatcctcgctatcgcagccctcatcacagccatcaccggcctgataaaagtcctgaaaagcaagaaga

SEQ ID NO: 19607 - DNA, 75 bp, synthetic construct
  source 1..75: mol_type = other DNA
tgcctacccgaaacttgcagtcgcttatccgtcaggcgtgatccctgatatgcgtggctggacgattaagggcaa

SEQ ID NO: 19608 - DNA, 75 bp, synthetic construct
  source 1..75: mol_type = other DNA
tgcctatcccatgctcgaagactcgactgcgatggtcatccagcctggttcgtccacgcccgactgggtcgtgcc

SEQ ID NO: 19609 - DNA, 75 bp, synthetic construct
  source 1..75: mol_type = other DNA
aatgattttctcggtgccatgtcggaggatgacgtccggccggaggcactgcgtcgttttgaactgatggtggaa

SEQ ID NO: 19610 - DNA, 75 bp, synthetic construct
  source 1..75: mol_type = other DNA
aacgccagcctgcgcgcctcgctggacagggcgaacaatgtcgccagcgggcagcagacgaccatcaccatgctg

SEQ ID NO: 19611 - DNA, 75 bp, synthetic construct
  source 1..75: mol_type = other DNA
gctttccgtaccccttgcgtttcctgttcgccagcaagccagaagccattggcccggtgctgggcatcgtgcagc

SEQ ID NO: 19612 - DNA, 75 bp, synthetic construct
  source 1..75: mol_type = other DNA
cgtgcaccactgtactacagcccgggttacggcccagcgtcactgtacgactacaaaggcaggggccgaaccttt

SEQ ID NO: 19613 - DNA, 75 bp, synthetic construct
  source 1..75: mol_type = other DNA
tgaaagacggcacaggaaaaccggtagagaactgtaccattcaactgaaagccagacggaccagcagcacggtgg

SEQ ID NO: 19614 - DNA, 75 bp, synthetic construct
  source 1..75: mol_type = other DNA
gaaaaccgacagaatccatttgaaagacgcggcacgaatgctggaagtttctgtaatgactattcgtcgcgatct

SEQ ID NO: 19615 - DNA, 75 bp, synthetic construct
  source 1..75: mol_type = other DNA
ctgatgatacggatgtgcttctccgtatacaccatgttatcggagagctgcccacgtatggttatcgtcgggtat

SEQ ID NO: 19616 - DNA, 75 bp, synthetic construct
  source 1..75: mol_type = other DNA
ggctaaatcttgctgaatatatgctctatctaccgatgcgtgatgcattctcttccggggatctaaaaaccgtct

SEQ ID NO: 19617 - DNA, 75 bp, synthetic construct
  source 1..75: mol_type = other DNA
cacgctggaagcagtctggatccaggggaaattacggatgtgggggcggtggtcgtatatcggtgggggtaaatc

SEQ ID NO: 19618 - DNA, 75 bp, synthetic construct
  source 1..75: mol_type = other DNA
cctgcttctgattatattgttgctgaaacgacttataaatttggcgcaactgatccttattctgaatcagttgcg

SEQ ID NO: 19619 - DNA, 75 bp, synthetic construct
  source 1..75: mol_type = other DNA
ttgtggttctatgccggtgtccagcatggtgcaaattggcaccactcagggtctgcgttacctgcactgcaacct

SEQ ID NO: 19620 - DNA, 75 bp, synthetic construct
  source 1..75: mol_type = other DNA
aaaaacctaatgtgacagcaatactttgtggtggtacgtatcgtgccagaagtgatgctttttacgatgccagta

SEQ ID NO: 19621 - DNA, 75 bp, synthetic construct
  source 1..75: mol_type = other DNA
cggaacgcgctattcattccattctgatgagtaataaaggcgataccgtagacagcgtattctatatagaaggtg

SEQ ID NO: 19622 - DNA, 75 bp, synthetic construct
  source 1..75: mol_type = other DNA
aaaaaactctcatatagccacacttgtagaccgaaaatcacgttatacgatcatccttagactcaggggcaaaga

SEQ ID NO: 19623 - DNA, 75 bp, synthetic construct
  source 1..75: mol_type = other DNA
acctgatgacgagggcgatctggaggaaaggctgcttcgggccagagctgaactgacagaagaacaggccgtagc

SEQ ID NO: 19624 - DNA, 75 bp, synthetic construct
  source 1..75: mol_type = other DNA
taagcggctatgtgcagcaaaaattcagcgggccgtggtttggcgggctttctggcgtggtgtatgcgctgatgg

SEQ ID NO: 19625 - DNA, 75 bp, synthetic construct
  source 1..75: mol_type = other DNA
tgcggtatctgcagccagacgtgaggacccgtacttcaaagccagttacgacaacgtggactacagccagatccc

SEQ ID NO: 19626 - DNA, 75 bp, synthetic construct
  source 1..75: mol_type = other DNA
ggaaaactgcgcatgtgggggcgctggtcgtatattggcggcggtaagacgggaaatatgtttaaccagttgctg

SEQ ID NO: 19627 - DNA, 75 bp, synthetic construct
  source 1..75: mol_type = other DNA
gaaaaccgacagaatccatttgaaagacgcagcgcgaatgctggaagtttctgtaatgactattcgtcgcgatct

SEQ ID NO: 19628 - DNA, 75 bp, synthetic construct
  source 1..75: mol_type = other DNA
ggcaatggcgttatccagtacgcttgattccatccctttatccatgcagcgacagtttcctgatttaacaccgcg

SEQ ID NO: 19629 - DNA, 75 bp, synthetic construct
  source 1..75: mol_type = other DNA
cctccactgaaagtggtgtcggggttaatcttggtaacctttatgcccgcgatggcgatatcaccctggatgcca

SEQ ID NO: 19630 - DNA, 75 bp, synthetic construct
  source 1..75: mol_type = other DNA
gaaaggatgcttgatgccctggatgaccaggagctggtgaaactggttactgagcgcagcagtcagcctctgcat

SEQ ID NO: 19631 - DNA, 75 bp, synthetic construct
  source 1..75: mol_type = other DNA
caaaagcagatggttcacaaacgaatgatttacaacgtgatgcattaatcagtgcaggggttgaggtgactcata

SEQ ID NO: 19632 - DNA, 75 bp, synthetic construct
  source 1..75: mol_type = other DNA
tggtgattacactgctggacgcgatgggaattggtctgatcatgccggtattaccgtcactgctgcgggaatatc

SEQ ID NO: 19633 - DNA, 75 bp, synthetic construct
  source 1..75: mol_type = other DNA
aggatatccttactgaaaacaaaaagtttattattccttcttatcagcgtccttacagttggacggtagataatg

SEQ ID NO: 19634 - DNA, 75 bp, synthetic construct
  source 1..75: mol_type = other DNA
agctgcgcttgatggagatgagttccgcgttccccttaattctcctgtaatacttgttcaatccggcaaccgcgc

SEQ ID NO: 19635 - DNA, 75 bp, synthetic construct
  source 1..75: mol_type = other DNA
gtctgaatctggccgatgaactgctgagcgaaaacgtcaccagcaaaaagttgtttccgtactttgccggattgt

SEQ ID NO: 19636 - DNA, 75 bp, synthetic construct
  source 1..75: mol_type = other DNA
gtttgatgagcaagcatggttgctcattgccattctgaaacctgaacctcataaactggctcgagataacaacca

SEQ ID NO: 19637 - DNA, 75 bp, synthetic construct
  source 1..75: mol_type = other DNA
atgaccaccgaagaactggctgaatgcctcggtgtggctaaacaaactgttaaccgttggatcagagaaaaaggc

SEQ ID NO: 19638 - DNA, 75 bp, synthetic construct
  source 1..75: mol_type = other DNA
cccttgcttaatattaaatggccaaggacagcactgattactctgtctgataaggatgcaaatggggaaaaatta

SEQ ID NO: 19639 - DNA, 75 bp, synthetic construct
  source 1..75: mol_type = other DNA
acgccggtatccagacggccgcgtctggttgcttattttattatggggtttctggttattgctgtcattttatct

SEQ ID NO: 19640 - DNA, 75 bp, synthetic construct
  source 1..75: mol_type = other DNA
tcatattcaagtaaaaatgtattaagaggtttacattatcaaagcgagccgtatgctcaagggaagctagtaaga

SEQ ID NO: 19641 - DNA, 75 bp, synthetic construct
  source 1..75: mol_type = other DNA
cgttgtcgggctgcccgtgccggatgcgaccggcgggcgtctggaaattctctgtcggctgggaggggaaaaatg

SEQ ID NO: 19642 - DNA, 75 bp, synthetic construct
  source 1..75: mol_type = other DNA
cgatagaacataataattatattttatcgattaaagatgcaagggctaaagaattgcataacatgaaggaattat

SEQ ID NO: 19643 - DNA, 75 bp, synthetic construct
  source 1..75: mol_type = other DNA
aagatacaaaaacagggaggtgattatttattcgcggtaaaaggaaaccaggggcggctaaataaagcctttgag

SEQ ID NO: 19644 - DNA, 75 bp, synthetic construct
  source 1..75: mol_type = other DNA
ctgaaagcgggcggggaagcgaagggtatcatcaacgaagtgaccggcggtaagcgttcactgctgcagggctat

SEQ ID NO: 19645 - DNA, 75 bp, synthetic construct
  source 1..75: mol_type = other DNA
tctaaatcttccaaaggggttttacgtggtctgcattatcagttagaaccttatgcacaaggaaaactggtacgc

SEQ ID NO: 19646 - DNA, 75 bp, synthetic construct
  source 1..75: mol_type = other DNA
tggtggagctgcggaacaaaccagcccatgaactgaaggaagtgggcgatcagtggcgcacgccggacaacattt

SEQ ID NO: 19647 - DNA, 75 bp, synthetic construct
  source 1..75: mol_type = other DNA
gctggcactgtccctgatttacccgcagagcgtggccgtcaattttgtcgccgcctgggcgattctggcgacggt

SEQ ID NO: 19648 - DNA, 75 bp, synthetic construct
  source 1..75: mol_type = other DNA
gtcgaggtttgtcgcataacatcaaacaggccgaaggggttgcgatggatgcctctggtaatatttatatcgtta

SEQ ID NO: 19649 - DNA, 75 bp, synthetic construct
  source 1..75: mol_type = other DNA
gtcacgtcgctgtttttgcagccggtgccgtggcgcagacgggcggcggctctggtggtgatggtggcgacgttt

SEQ ID NO: 19650 - DNA, 75 bp, synthetic construct
  source 1..75: mol_type = other DNA
aacccggcaggcctgagttaccgctaccagtatgagcaggaccgcatcaccgtcacggacagcctgaaccggcgt

SEQ ID NO: 19651 - DNA, 75 bp, synthetic construct
  source 1..75: mol_type = other DNA
ggcgtcgctgttcttccggctgatacgtacggcctgtcgtcagcgtcttgaggagcgggaactatgtcaaagctg

SEQ ID NO: 19652 - DNA, 75 bp, synthetic construct
  source 1..75: mol_type = other DNA
ttcaatgcgacacgttttgtaacagccaataatggcggtacagctattttggatgtgggttcaccagcaatcggt

SEQ ID NO: 19653 - DNA, 75 bp, synthetic construct
  source 1..75: mol_type = other DNA
atgaaaataacgacagtcggcgtatgcataatttgcggaatttttccgttgctgattttgccccaattgcctggg

SEQ ID NO: 19654 - DNA, 75 bp, synthetic construct
  source 1..75: mol_type = other DNA
gtcgaaagcgcagattatccagcaggcaggtaactccgtgctgtccaaagctaaccaggtaccgcagcaggttct

SEQ ID NO: 19655 - DNA, 75 bp, synthetic construct
  source 1..75: mol_type = other DNA
atgagacactttatctatcaggacgaaaaatcacataaattctgggcggttgagcagcagggaaacgagctgcat

SEQ ID NO: 19656 - DNA, 75 bp, synthetic construct
  source 1..75: mol_type = other DNA
cggcagaagtgcccgccgtgccagagccagtggcgatgtcgcgctgtggctggttcagacggatgcgtttaagga

SEQ ID NO: 19657 - DNA, 75 bp, synthetic construct
  source 1..75: mol_type = other DNA
tctatcgtgaaattatatggttctgctccggttacctgcggaaatccggaccagaggctacgaggacgatcatca

SEQ ID NO: 19658 - DNA, 75 bp, synthetic construct
  source 1..75: mol_type = other DNA
gaatccgatatcagacatcgaccccctgggtttatctatgtgggaggatgcaaaatcgggggcatgtactaatgg

SEQ ID NO: 19659 - DNA, 75 bp, synthetic construct
  source 1..75: mol_type = other DNA
gtgctgagacgtataccggtcgtgaagtacaggatattcccggtgtgctggccgtgtttgctgaacgtcgtaagg

SEQ ID NO: 19660 - DNA, 75 bp, synthetic construct
  source 1..75: mol_type = other DNA
gctggagaaaaaagacggcagtaaaatctggacccgttttgcgctatcgaaagtgagcgccgaggggaaagttta

SEQ ID NO: 19661 - DNA, 75 bp, synthetic construct
  source 1..75: mol_type = other DNA
gccgatcaggcattgctggaagtggtcaatcgctttcgtgaaaaactcaaaccggatcagtatctctgtcgtatc

SEQ ID NO: 19662 - DNA, 75 bp, synthetic construct
  source 1..75: mol_type = other DNA
tcagctatgaacaactgacccggtttgcggaaaaacgcatccgggaatgcaatctggacagccagggcgcgattt

SEQ ID NO: 19663 - DNA, 75 bp, synthetic construct
  source 1..75: mol_type = other DNA
gagctctggagaaaatgcgcaaagtccgccagcgctgtggtgaagtgttccgctatgcaattgttactggtcggg

SEQ ID NO: 19664 - DNA, 75 bp, synthetic construct
  source 1..75: mol_type = other DNA
gccgtgagtgaggctaccgctgaggtagacgtcatttccgctgccgcactgagtgaacaacagctcgcgaaaatt

SEQ ID NO: 19665 - DNA, 75 bp, synthetic construct
  source 1..75: mol_type = other DNA
cgctatgcaattgttactggtcgggcagactacaaccctgctcccgatcttgcctgtgctttagctacaccgaaa

SEQ ID NO: 19666 - DNA, 75 bp, synthetic construct
  source 1..75: mol_type = other DNA
ctggccataaatggctatgcctcaatgaatgccataaagagacaggagctcattgacgccgactttcagcgcctc

SEQ ID NO: 19667 - DNA, 75 bp, synthetic construct
  source 1..75: mol_type = other DNA
cctgtgttaaaggtctggagcttatcgcagaaatgcgtggtgactgcgccgttttctacactatcacctgtccgt

SEQ ID NO: 19668 - DNA, 75 bp, synthetic construct
  source 1..75: mol_type = other DNA
attatctggtcggcatgtttgctgcatttcgtaaggcgatgcacaaagccggattgcgctggtatggcgtgcggg

SEQ ID NO: 19669 - DNA, 75 bp, synthetic construct
  source 1..75: mol_type = other DNA
ctatttgcgtgagacgattaagccatgcctggaacgactggagcatgtacgcgacagccagctatctgcatcttt

SEQ ID NO: 19670 - DNA, 75 bp, synthetic construct
  source 1..75: mol_type = other DNA
cagcatcggtgtggcagctggcgagtgtaaatcagcaacagaaatcatcgctgtttccgggccgcgctgctgggt

SEQ ID NO: 19671 - DNA, 75 bp, synthetic construct
  source 1..75: mol_type = other DNA
tctgacactgagcgccgggcataagcagggcaagagtggtgagaatgacactcgctttggcctggaagttaatta

SEQ ID NO: 19672 - DNA, 75 bp, synthetic construct
  source 1..75: mol_type = other DNA
gcctttggtcgcaccctgcgccaggccatccgcgtggaaggcgacaccctgccctcgtcgaaaggagtgctgtaa

SEQ ID NO: 19673 - DNA, 75 bp, synthetic construct
  source 1..75: mol_type = other DNA
tgctcgccaatgagaatgcagcaaacaccgtctcggtcaatgtcgctgatgaaggaagcaacccaatcaatgatc

SEQ ID NO: 19674 - DNA, 75 bp, synthetic construct
  source 1..75: mol_type = other DNA
ctgctgacgactatgattctcgcggtgtgacggcctctgttgagggtgggtatacctttgaagcgggaacattta

SEQ ID NO: 19675 - DNA, 75 bp, synthetic construct
  source 1..75: mol_type = other DNA
taattcacgggattattgaagagcaggaggaacgcgagttaatcctcatgattgaagagcagagagaacgccagc

SEQ ID NO: 19676 - DNA, 75 bp, synthetic construct
  source 1..75: mol_type = other DNA
gccggaggcaataccggacaagcggaaaagaccagaaacgcaggactcacacccattcctgaaaaacgttcagga

SEQ ID NO: 19677 - DNA, 75 bp, synthetic construct
  source 1..75: mol_type = other DNA
cgatcgggatcatttactcgcttttacgcttaatgttcccttcagtcattggatgcgtacagacagtcagtcggc

SEQ ID NO: 19678 - DNA, 75 bp, synthetic construct
  source 1..75: mol_type = other DNA
cagcaacatgcaccggaatgcggtgaaacaacagctctactgagcttgataaaagataaaggtctgctctcaggg

SEQ ID NO: 19679 - DNA, 75 bp, synthetic construct
  source 1..75: mol_type = other DNA
tggtttgctccccaattaatatttttcttgaaaaggatacgttgtcacttaagcccggctcagtcgttctggcca

SEQ ID NO: 19680 - DNA, 75 bp, synthetic construct
  source 1..75: mol_type = other DNA
ctgaatatcctgtacattatgtttggtgttcatggggggagctatttcctcggcatagtagaaactatcactttt

SEQ ID NO: 19681 - DNA, 75 bp, synthetic construct
  source 1..75: mol_type = other DNA
aatgcaaagatccccgtaaatgtcggttttatgccgaatatctgaatcacaaataccccaatgaattccctcagt

SEQ ID NO: 19682 - DNA, 75 bp, synthetic construct
  source 1..75: mol_type = other DNA
gagttttctctggttgaaaactgacgaacttgcgactttctttacctggactactatttatctgtcgaaggaaga

SEQ ID NO: 19683 - DNA, 75 bp, synthetic construct
  source 1..75: mol_type = other DNA
ctacgaagaaacccgtgaaaggcttaaggacgtacttgaaagacccctagacagagaaacggacagtgcttttga

SEQ ID NO: 19684 - DNA, 75 bp, synthetic construct
  source 1..75: mol_type = other DNA
agctcggcggtgggtgtcgcgctcgcggcaaccggtggcggtgatggttctaataccgggaccaccacaaccacg

SEQ ID NO: 19685 - DNA, 75 bp, synthetic construct
  source 1..75: mol_type = other DNA
tggagctgctgccgaagtacgccgcctgggcggagggtgtcctggctgccggaggcgcgcaacaggatgacgtgc

SEQ ID NO: 19686 - DNA, 75 bp, synthetic construct
  source 1..75: mol_type = other DNA
catggtgacgaataccaccatgctggaatatatgctgattcgtcgtaaagatgccccaatcatcgaaaagtctca

SEQ ID NO: 19687 - DNA, 75 bp, synthetic construct
  source 1..75: mol_type = other DNA
cgaagcgcgtagccgttgcccgtcaggttgtgttgctgtatttgtcgcccgtattcgtcagggggtgtgccgtgc

SEQ ID NO: 19688 - DNA, 75 bp, synthetic construct
  source 1..75: mol_type = other DNA
agctaccatcggtgcgttacctgtcgccgttgcccgctcagaaggagtcttgtcggatacctccctggactggcc

SEQ ID NO: 19689 - DNA, 75 bp, synthetic construct
  source 1..75: mol_type = other DNA
aaagatccgtcgaatcatccggtggcgggaataacggtgaacttcaccatgccacaggacgtggcggcaaacttt

SEQ ID NO: 19690 - DNA, 75 bp, synthetic construct
  source 1..75: mol_type = other DNA
tatgcatcgtgcatatggtgcgcaacagcctgcgcttcgtgtcatggaaggactacaaagccgtcactcgcgacc

SEQ ID NO: 19691 - DNA, 75 bp, synthetic construct
  source 1..75: mol_type = other DNA
tggtgaaacgaagtctgtgggtgccggtctctatgcctctgccatgtttgagtccggagcatatatcgacctcat

SEQ ID NO: 19692 - DNA, 75 bp, synthetic construct
  source 1..75: mol_type = other DNA
tgagcgaagccagcatcaatatggtgctcaaacgtatcggttacgatggcagggcaaccggtcatggttttcgtc

SEQ ID NO: 19693 - DNA, 75 bp, synthetic construct
  source 1..75: mol_type = other DNA
agtcattcagtcaatagactttcaacgcagcactacacacagattggaacacgtaatattaatatgactataact

SEQ ID NO: 19694 - DNA, 75 bp, synthetic construct
  source 1..75: mol_type = other DNA
tttcaaaatgttggtgctgaggataaggcaagacttaaattaaaagggaaaaaatttcttgagtctatagtggga

SEQ ID NO: 19695 - DNA, 75 bp, synthetic construct
  source 1..75: mol_type = other DNA
gatgtttttggcataacaccaagagcagcagaggaaagggttaagaaattgctcgaaatgggattaattataaaa

SEQ ID NO: 19696 - DNA, 75 bp, synthetic construct
  source 1..75: mol_type = other DNA
cgaagtcgtggtgtccccccaaaaaaaatgctgaatgaaatgattgagcaggcgcacctggattttgtggcaaat

SEQ ID NO: 19697 - DNA, 75 bp, synthetic construct
  source 1..75: mol_type = other DNA
agacggatgccgcaggccggacaacagaatacagcccggatgtggtgacgggcctcatcacgcgcatcaccacgc

SEQ ID NO: 19698 - DNA, 75 bp, synthetic construct
  source 1..75: mol_type = other DNA
gcgctgtttgccgttgcaggtgcgttgctgctggaaccggtagccgcgtcggcgctgagcttgcgcctgtaccgc

SEQ ID NO: 19699 - DNA, 75 bp, synthetic construct
  source 1..75: mol_type = other DNA
ctcatggggttctgagggattcgacgcgcagcaaagctacgtaattaaggggcttattccggctgaatcattatg

SEQ ID NO: 19700 - DNA, 75 bp, synthetic construct
  source 1..75: mol_type = other DNA
atctgcagccatcgacctgcgttgcgtaaacatggttgccgatctgtggcatgcgcctgcgccgaaaaatggtca

SEQ ID NO: 19701 - DNA, 75 bp, synthetic construct
  source 1..75: mol_type = other DNA
aaaacaccttaaacgatggttagccaaactggaaaaagacggcgtgatttgcgtcgatggggatgatgttcaccc

SEQ ID NO: 19702 - DNA, 75 bp, synthetic construct
  source 1..75: mol_type = other DNA
cactggctgcattattgcgcgacctcagtatgctgacaccggggaactgccacaggctgtttccttatgtcacag

SEQ ID NO: 19703 - DNA, 75 bp, synthetic construct
  source 1..75: mol_type = other DNA
agagcgccagaaaaaagaccggtcgcgttaagcgaaaaatgtttgcgaaacttatcaccagtcgttttttgcata

SEQ ID NO: 19704 - DNA, 75 bp, synthetic construct
  source 1..75: mol_type = other DNA
ggacgacgaaaatgtccacaagttgatggatttatccattaacaaaaactggatcgacaaagaagaatatccgca

SEQ ID NO: 19705 - DNA, 75 bp, synthetic construct
  source 1..75: mol_type = other DNA
tacgcgaaatcgctgcaggcgatggatttcagcgctattacggataagaccacttacaacaatattagctggcct

SEQ ID NO: 19706 - DNA, 75 bp, synthetic construct
  source 1..75: mol_type = other DNA
ggctgtggctggagtgaagaccgtacacgaatacgcggggattactgacaccagcccagtggatttatccgagca

SEQ ID NO: 19707 - DNA, 75 bp, synthetic construct
  source 1..75: mol_type = other DNA
agtacacgccaccagtagcaggggaaaacatccgcgataatgcgccaaatttccataaatggcttgaacatgctg

SEQ ID NO: 19708 - DNA, 75 bp, synthetic construct
  source 1..75: mol_type = other DNA
ttgcacaactggcccgggaacatggcgttgataacaacctgatttttaaatggctacgcctctggcaaagagaag

SEQ ID NO: 19709 - DNA, 75 bp, synthetic construct
  source 1..75: mol_type = other DNA
gcggtttgcttcaaactgaaagatggtgaagatccgggatacaccctgtacgacctctctgaacgtctgcgtctg

SEQ ID NO: 19710 - DNA, 75 bp, synthetic construct
  source 1..75: mol_type = other DNA
gtcggtgatgttcctgtgctggcctgtggcacttcctttatatgtcgattatatcggtgatgcaggcagaaggag

SEQ ID NO: 19711 - DNA, 75 bp, synthetic construct
  source 1..75: mol_type = other DNA
aaaccagatggacccggtgtacacgccggcgcgaaaaatccacctgtaccactgcgaccatcgcggcctgccgct

SEQ ID NO: 19712 - DNA, 75 bp, synthetic construct
  source 1..75: mol_type = other DNA
tgcttgcactccttgtaggctgtgcggttatccctgccacccatgcctactctgtgaatgttgtgtccagtcagc

SEQ ID NO: 19713 - DNA, 75 bp, synthetic construct
  source 1..75: mol_type = other DNA
tatgacgatttgcgcaagggcgaggatatcggcatggtcaaatctgaccgtcccaatcccaaccttgaaactttc

SEQ ID NO: 19714 - DNA, 75 bp, synthetic construct
  source 1..75: mol_type = other DNA
aaacgccgctacgctgctggtattgcgttttgtacaggctgtgggtgtctgcgccgcggcggttatctggcaagc

SEQ ID NO: 19715 - DNA, 75 bp, synthetic construct
  source 1..75: mol_type = other DNA
ttagccccgagtttcgcctcgaggctgcccagcttgtactcgatcagcattacaccgttgccgccgctgccactg

SEQ ID NO: 19716 - DNA, 75 bp, synthetic construct
  source 1..75: mol_type = other DNA
tcagcgacaaaccgattcccgacaaccgggaaaacatcactattcgtctggatggtcacatccagtccgttcagg

SEQ ID NO: 19717 - DNA, 75 bp, synthetic construct
  source 1..75: mol_type = other DNA
ttggtcgtatcggtcgactggtgttgggtcgattacttgaagtcaaaagcaacatagacgttgtcgctattaatg

SEQ ID NO: 19718 - DNA, 75 bp, synthetic construct
  source 1..75: mol_type = other DNA
actgaaatcaccgtcagagcagcagagattacttgtgttactggcagagaaaaaaaaccgaacaacgacggatga

SEQ ID NO: 19719 - DNA, 75 bp, synthetic construct
  source 1..75: mol_type = other DNA
ctgcatcagccagttccgctacagcgcacaaatccgcccttcttccgtggtgaccaaagactacacctttaaacg

SEQ ID NO: 19720 - DNA, 75 bp, synthetic construct
  source 1..75: mol_type = other DNA
gcagttgcagacagccagcagaacccgtgaaccgttattgattaatcacccgggactgcattttgctgtggtcac

SEQ ID NO: 19721 - DNA, 75 bp, synthetic construct
  source 1..75: mol_type = other DNA
agcagcccgtcatgcaaaaatgctcgaaaccgatcaggcgtgggaagtattcgaaaaactcgaagacagttactt

SEQ ID NO: 19722 - DNA, 75 bp, synthetic construct
  source 1..75: mol_type = other DNA
tgctgagaccattggcaacaatcagatgattgcggttaccaacaatcagatacagacggtgggcgttaaccagat

SEQ ID NO: 19723 - DNA, 75 bp, synthetic construct
  source 1..75: mol_type = other DNA
ctggcaaagtgtgccacctgatgaatccggatattaaccaggaaatctacggcatgccggaatatcttggcgcat

SEQ ID NO: 19724 - DNA, 75 bp, synthetic construct
  source 1..75: mol_type = other DNA
caacagcctagaaaaggatgatattccggtggtcagcgaagcgaatattctgagcacctttaagcaactgcattt

SEQ ID NO: 19725 - DNA, 75 bp, synthetic construct
  source 1..75: mol_type = other DNA
agtggatgtttgacatggtgaagaccatcgcgccatcagccagaaaaccgaattttgcagggtgggctaacgata

SEQ ID NO: 19726 - DNA, 75 bp, synthetic construct
  source 1..75: mol_type = other DNA
acaactttcaatgatggatttgcgattagtgtgctccagagtgatccggatgaagttgtcaaaatgctggggatg

SEQ ID NO: 19727 - DNA, 75 bp, synthetic construct
  source 1..75: mol_type = other DNA
gccatattgaagatagtctgaaagctatggtcatgcagaatcgtggagggcaaaaagtcattgagaggatactca

SEQ ID NO: 19728 - DNA, 75 bp, synthetic construct
  source 1..75: mol_type = other DNA
ccatcaacgcggaaccgtctggcacaaaaagggatttgatttcctgcttaacgataatacctacctgaaagttcg

SEQ ID NO: 19729 - DNA, 75 bp, synthetic construct
  source 1..75: mol_type = other DNA
ttggcctttccacaatgacaagatgggtcaaacaactgcgtgatgagcgtcagggcaaaacaccaaaagcctccc

SEQ ID NO: 19730 - DNA, 75 bp, synthetic construct
  source 1..75: mol_type = other DNA
aagtttccccccttatgtggaacaacatgatgaaacagtcccacatgaggggtttaacagcaacgctcatcaatc

SEQ ID NO: 19731 - DNA, 75 bp, synthetic construct
  source 1..75: mol_type = other DNA
aaataaaacttcatgaaagactctcaaaaaatgatattctcaatgtactagcagaacaaatgacgatgcttgaag

SEQ ID NO: 19732 - DNA, 75 bp, synthetic construct
  source 1..75: mol_type = other DNA
gagacggccatggtcccctccgccattggtgctgtaatgaaaaaacggaatgaggattacagggtaccagcagtg

SEQ ID NO: 19733 - DNA, 75 bp, synthetic construct
  source 1..75: mol_type = other DNA
agaataccgccattacgctgtagaaggtgatccggggcactacagtgaatgcctgtacaacatcgaagaaattat

SEQ ID NO: 19734 - DNA, 75 bp, synthetic construct
  source 1..75: mol_type = other DNA
taacgctagccgaagcccgcgaaaaacgcagtgaagctaggaaaatgctcgctgctggaggcgatccaggggtgg

SEQ ID NO: 19735 - DNA, 75 bp, synthetic construct
  source 1..75: mol_type = other DNA
gctggggcgcgaggcggatatgtcggggagtgctgcggatattgctcaacgtgtgtctgagtgggaagaggagct

SEQ ID NO: 19736 - DNA, 75 bp, synthetic construct
  source 1..75: mol_type = other DNA
aggatctgcttgagaaagcagaagcggaagaacaactgcgacaggaaaatgataaaaagctgctcgggcaggtgc

SEQ ID NO: 19737 - DNA, 75 bp, synthetic construct
  source 1..75: mol_type = other DNA
agcatctgctgaaggaagccgaggcggaagaaaagctgcgacaggaaaatgataaaaagcttatcgagaaagtgc

SEQ ID NO: 19738 - DNA, 75 bp, synthetic construct
  source 1..75: mol_type = other DNA
caaattcatcgccatgcccggtgggctggattattcccgcgccattgtggtggcttcagtgaaagaagcaccaat

SEQ ID NO: 19739 - DNA, 75 bp, synthetic construct
  source 1..75: mol_type = other DNA
tgcgcaaaccctgcatgcgtcgcaacagcgccagcaatccctgatatcgcaatcatgattgccaacaggcttgaa

SEQ ID NO: 19740 - DNA, 75 bp, synthetic construct
  source 1..75: mol_type = other DNA
cctgcgtgagatgaacgccgacaacctgcgcaaggtgccggccgatgcacccacggccttcatcaagccgcgctg

SEQ ID NO: 19741 - DNA, 75 bp, synthetic construct
  source 1..75: mol_type = other DNA
taacgggagaacaacaaggaagcatctccgcaggttgtgggactactgaatctataggtaatcgctggcagagcg

SEQ ID NO: 19742 - DNA, 75 bp, synthetic construct
  source 1..75: mol_type = other DNA
cgattgagtcaattaagcaggctgattcggctgttaagttggcacacgagaagttttcggcgctggcggcggaga

SEQ ID NO: 19743 - DNA, 75 bp, synthetic construct
  source 1..75: mol_type = other DNA
tcataaaaatacacttggcgctctctacacagaacttaaaggaaaagtggttcagcgtcatcaccgtctcaatgc

SEQ ID NO: 19744 - DNA, 75 bp, synthetic construct
  source 1..75: mol_type = other DNA
cagtgcatggggtggtggccggaaaacatttatccgggaggcgcatggctggtccctgcgccgtacccgtagcag

SEQ ID NO: 19745 - DNA, 75 bp, synthetic construct
  source 1..75: mol_type = other DNA
acacgcacgttcaggtcggggtcgacaaaaaacatgagctggacggactggatttgtttaccggtttcactgtca

SEQ ID NO: 19746 - DNA, 75 bp, synthetic construct
  source 1..75: mol_type = other DNA
agggtaaggttgtaaatgtaagattttcaaaaaataaatgccttatagaagccacattaaaaggattcaaatcag

SEQ ID NO: 19747 - DNA, 75 bp, synthetic construct
  source 1..75: mol_type = other DNA
gcgtctgaacggtgtggcagttgaggaactgtccagcaagttcaccgtagagccgtctgtgcagcagacgctgga

SEQ ID NO: 19748 - DNA, 75 bp, synthetic construct
  source 1..75: mol_type = other DNA
aggcattacctcatttccggttcataggtgaagtgctgtccggcttatgccctgaaccacatcaacccgcaacag

SEQ ID NO: 19749 - DNA, 75 bp, synthetic construct
  source 1..75: mol_type = other DNA
agacgaatctggtaagtttaagccctcgcgtagctataaactacacattgagtggggagactggtcaaaagccaa

SEQ ID NO: 19750 - DNA, 75 bp, synthetic construct
  source 1..75: mol_type = other DNA
gaaacggtgccggagttgctgtccaggctggtattccgggtacagaacccgccatcagggggaacacagtatgat

SEQ ID NO: 19751 - DNA, 75 bp, synthetic construct
  source 1..75: mol_type = other DNA
gccagttgacggaaattcgcggttctgctgtcggaatggctggcgcatttgccggtgcctttgccaccggacacc

SEQ ID NO: 19752 - DNA, 75 bp, synthetic construct
  source 1..75: mol_type = other DNA
tgatattgatttgctggttactgtgactgtaaggcttaatgaaacaacgcggcgagctttgctcaacgaccttct

SEQ ID NO: 19753 - DNA, 75 bp, synthetic construct
  source 1..75: mol_type = other DNA
ccgggaaactggccgcacgcctcggcatggatgccggtacagacctgatgaatacgctgaagaatacagcgttca

SEQ ID NO: 19754 - DNA, 75 bp, synthetic construct
  source 1..75: mol_type = other DNA
ccctggggcgtcattacacatttgattttattcggctggtttctctggtgtctgcgttttcgcattaaggctgcc

SEQ ID NO: 19755 - DNA, 75 bp, synthetic construct
  source 1..75: mol_type = other DNA
ttactgtaaattattacatgacgacaatcgctggaatgtttcagtttgctgcagatcacggttacttagaagcaa

SEQ ID NO: 19756 - DNA, 75 bp, synthetic construct
  source 1..75: mol_type = other DNA
cttttgatgcaccaggaaaagaaagttttaaagcccgcttactaagcctgatcgggacgcggagtgtaagggcag

SEQ ID NO: 19757 - DNA, 75 bp, synthetic construct
  source 1..75: mol_type = other DNA
atcgtcggacacatgtttcgtctgagttaccggcccaactggcgctggctggggatgtcggaagccgattcacat

SEQ ID NO: 19758 - DNA, 75 bp, synthetic construct
  source 1..75: mol_type = other DNA
gcgtcagtacaccgacgaatatcttgataacattacaccgccgttcacgaaagccttgtttacctacgtcaaaga

SEQ ID NO: 19759 - DNA, 75 bp, synthetic construct
  source 1..75: mol_type = other DNA
gggatgtgatttatgggaccaatgtccgtattgtcaaaccggtcaacatttatgaatgtgaactcagggacaacg

SEQ ID NO: 19760 - DNA, 75 bp, synthetic construct
  source 1..75: mol_type = other DNA
cacaccgggtgcggtgaaagtcggtaaaggtggcgaatatgccaacctggacgcagtggtgatggatgccgtcaa

SEQ ID NO: 19761 - DNA, 75 bp, synthetic construct
  source 1..75: mol_type = other DNA
gccgcagcgaattattctggctggtgcgcggcggcgtggcgaaactgaatgaaagtcaccgtcttgccccactct

SEQ ID NO: 19762 - DNA, 75 bp, synthetic construct
  source 1..75: mol_type = other DNA
gactgacagtctgcctcctgatggcgggatgtcagggcactcagaaactacagcaacgggatgcggccatgccgg

SEQ ID NO: 19763 - DNA, 75 bp, synthetic construct
  source 1..75: mol_type = other DNA
ccattacgacagtcagcaccggctggtgcactacacgcggacacaatatgcagagccgctggtcgaaagtcgcta

SEQ ID NO: 19764 - DNA, 75 bp, synthetic construct
  source 1..75: mol_type = other DNA
atggacaagcgcagaaccattgccttcaaactaaatccagatgtaaatcaaacagataaaattgtttgtgataca

SEQ ID NO: 19765 - DNA, 75 bp, synthetic construct
  source 1..75: mol_type = other DNA
acgaacagtccgcaggggccgtggtggatactcggctggagtgagcgggtaccgggtgtggatgagatgctgcct

SEQ ID NO: 19766 - DNA, 75 bp, synthetic construct
  source 1..75: mol_type = other DNA
gcaagagaaaaaatccgtcatgagctgcgtacactggagctgggggttcccgcagaggccagaggtcagccggaa

SEQ ID NO: 19767 - DNA, 75 bp, synthetic construct
  source 1..75: mol_type = other DNA
gttgaggactaccgctgcgcagcactggtggaaaacatccagattggcgacttcagcgccgccgccgcagaagcc

SEQ ID NO: 19768 - DNA, 75 bp, synthetic construct
  source 1..75: mol_type = other DNA
cgagcacactattgatgacagtggctttaccacacagcttgagcttgaagcaaaaatcccggaatggatagcgga

SEQ ID NO: 19769 - DNA, 75 bp, synthetic construct
  source 1..75: mol_type = other DNA
ctaccccgaaatgcatggcacggtaacaggatttaaaagcgagattgataatcaggactggatcattgcaaaagc

SEQ ID NO: 19770 - DNA, 75 bp, synthetic construct
  source 1..75: mol_type = other DNA
ggcttgatcttaattacgggaaaaagaaaaaagtcagcgtgaaacgccgcaaaccgaaaaaggagaaaagcagca

SEQ ID NO: 19771 - DNA, 75 bp, synthetic construct
  source 1..75: mol_type = other DNA
gcgttgagaaccatggcggatcactccgcatatggttcatgtataaaggcacacgagtgcgggaaagtctcggtg

SEQ ID NO: 19772 - DNA, 75 bp, synthetic construct
  source 1..75: mol_type = other DNA
aaaatgctgaacatgatcgccgacctgctcaacgctatcaaagatggacgctgggctgatgccgtcagcatcggc

SEQ ID NO: 19773 - DNA, 75 bp, synthetic construct
  source 1..75: mol_type = other DNA
gtgttttcaatatcgacatcgagacctgcagcggctgcggcggcgccatgaaagtcatcgcctgcattgaagacc

SEQ ID NO: 19774 - DNA, 75 bp, synthetic construct
  source 1..75: mol_type = other DNA
acttcatggaaataaatcactcacgaataacatcgtacgagattgcggattacatgatccgcactaaatctcttc

SEQ ID NO: 19775 - DNA, 75 bp, synthetic construct
  source 1..75: mol_type = other DNA
gattaccggggcgatgaatgcgggtataacggtccggcagtggcggatgagttcgacaaccccaccacggatatc

SEQ ID NO: 19776 - DNA, 75 bp, synthetic construct
  source 1..75: mol_type = other DNA
ataaagcatcttacactccctattgaaaataagatacattatctgatgtcagatattcataaacaatttaaagat

SEQ ID NO: 19777 - DNA, 75 bp, synthetic construct
  source 1..75: mol_type = other DNA
ggttgtcctgctgacgcccggagacgatcctctcagggcatttttgatatgggtactgtcagaatccatcggcgc

SEQ ID NO: 19778 - DNA, 75 bp, synthetic construct
  source 1..75: mol_type = other DNA
tgttttttctttgggcggtagccaataaccttaacgacattttattacctcaattccagcaggcttttacgctga

SEQ ID NO: 19779 - DNA, 75 bp, synthetic construct
  source 1..75: mol_type = other DNA
tggcaggggcgacagtatcaggcgtatcccattcaggggacgggatttgaactgaacggcaagggcagtgctgcc

SEQ ID NO: 19780 - DNA, 75 bp, synthetic construct
  source 1..75: mol_type = other DNA
atggaacgacaattaagggcggtgcttcacgcgtagagggagggagtgcgaatggaatactcattgatggtggta

SEQ ID NO: 19781 - DNA, 75 bp, synthetic construct
  source 1..75: mol_type = other DNA
cacaaaggcggagttatcccgcgtggagatagtcgagctgctcagtcaggagtcggaaaaatttcacaacatcgg

SEQ ID NO: 19782 - DNA, 75 bp, synthetic construct
  source 1..75: mol_type = other DNA
atcccgtggccatcagataccgttccgtctggttatgccctgatgcaggggcagacttttgacaaatctgcatac

SEQ ID NO: 19783 - DNA, 75 bp, synthetic construct
  source 1..75: mol_type = other DNA
cccatatcatatgactcaagatgaaaacccactccgcgctgccatgattgtctttctcatgatgcaggacgccaa

SEQ ID NO: 19784 - DNA, 75 bp, synthetic construct
  source 1..75: mol_type = other DNA
tggagcagatgcaaaaccagatggacccggtgtacacgccggcgcgaaaaatccacctgtaccactgcgaccatc

SEQ ID NO: 19785 - DNA, 75 bp, synthetic construct
  source 1..75: mol_type = other DNA
ggtaaattctgttgatgaaaaatatcagaaactgcgggcagaactccatgaaacacggaaaaacattccgcccaa

SEQ ID NO: 19786 - DNA, 75 bp, synthetic construct
  source 1..75: mol_type = other DNA
ccgggctgctcgccgtggtgctgtggctgcgccacgataacgcgaatttatcccgctcctttgaaaaggcgaacc

SEQ ID NO: 19787 - DNA, 75 bp, synthetic construct
  source 1..75: mol_type = other DNA
gtctgctttgcaatcagaacgggaacgtttgattatgccgagcgattccctgactcacctaacctgaagctattt

SEQ ID NO: 19788 - DNA, 75 bp, synthetic construct
  source 1..75: mol_type = other DNA
tcgcgtggctgctattttgcggcagcctcgccgccccctcggcgtggggttttgagaccaattacgatcgcggac

SEQ ID NO: 19789 - DNA, 75 bp, synthetic construct
  source 1..75: mol_type = other DNA
gacagagcagcttaacccggcgggcttaagctacacctactgttatgagcaaaaccgcatcaccatcaccgacag

SEQ ID NO: 19790 - DNA, 75 bp, synthetic construct
  source 1..75: mol_type = other DNA
ccccgcctgcgcagacgccagtgattgtcgccaacgcctgcccgaaagtgagcctttgcccgatgccgggcagtg

SEQ ID NO: 19791 - DNA, 75 bp, synthetic construct
  source 1..75: mol_type = other DNA
cggaaattaccgtcagccatgtgcttattcagatgctcgccatgccacgcagtgacctgcgggttattacccgcc

SEQ ID NO: 19792 - DNA, 75 bp, synthetic construct
  source 1..75: mol_type = other DNA
tatgataaaattgaagaatttaaaattattgagtattcaaaaatacaatgtcaatattttgtagatatgactaat

SEQ ID NO: 19793 - DNA, 75 bp, synthetic construct
  source 1..75: mol_type = other DNA
gataaccgagacttaccgagtttttatcgattaagaagtggttttgataaagtatgcagaagagcgcgctcaagc

SEQ ID NO: 19794 - DNA, 75 bp, synthetic construct
  source 1..75: mol_type = other DNA
ggttgcaccagcgcgccgcctgtgccgacgccggtgattgtttacaacgcatgtccgaaggtcagcctttgcccg

SEQ ID NO: 19795 - DNA, 75 bp, synthetic construct
  source 1..75: mol_type = other DNA
tgttttccaacaggcatagtattctttattgctctaatatttatagggactgtttcagacattattggcgtaagg

SEQ ID NO: 19796 - DNA, 75 bp, synthetic construct
  source 1..75: mol_type = other DNA
ttgcatatcacccagggaaaaaccggaatgcgtctggcgttaccgcttacactacgctgtgatgccattgggata

SEQ ID NO: 19797 - DNA, 75 bp, synthetic construct
  source 1..75: mol_type = other DNA
tggtcccggctggaaagcgcccttcgatatccgcttacagatacgcgatgaaggcctgatactcaacgacagcgg

SEQ ID NO: 19798 - DNA, 75 bp, synthetic construct
  source 1..75: mol_type = other DNA
taatttcgtcaatgatttgtcgggcagacgtggaatataccaggcaggtattaaagcctcattcagcagtacgtt

SEQ ID NO: 19799 - DNA, 75 bp, synthetic construct
  source 1..75: mol_type = other DNA
caggatgatctgtacagtatttcacagacaccgcaggtgtggctcgatcatcaggtaatggagcgtaacggggaa

SEQ ID NO: 19800 - DNA, 75 bp, synthetic construct
  source 1..75: mol_type = other DNA
attgccgccgtacacggcattttacgactgggtgcggtctatctgccagtggatccggtgctaccgccacagcgt

SEQ ID NO: 19801 - DNA, 75 bp, synthetic construct
  source 1..75: mol_type = other DNA
agcctataccctcgatgaactggctgattatctcgatttgagcgcctcagcgcgccgtagcatcgataaacatta

SEQ ID NO: 19802 - DNA, 75 bp, synthetic construct
  source 1..75: mol_type = other DNA
gtcgatgatttttcataaagagaaaaatatttatgtttgcctctcctgccataaacaaacagagccatttcttcc

SEQ ID NO: 19803 - DNA, 75 bp, synthetic construct
  source 1..75: mol_type = other DNA
aactcggcgaaagcatccgctgcaagccagatggctgcaaaagcaagtgaagacgcagccagagagtatgcaagc

SEQ ID NO: 19804 - DNA, 75 bp, synthetic construct
  source 1..75: mol_type = other DNA
cgctggcggtgctggaattttgaatccgatgccggcaaacaacttaatgcgtggctcgccagtgaagggcttctc

SEQ ID NO: 19805 - DNA, 75 bp, synthetic construct
  source 1..75: mol_type = other DNA
cacccaaagataagaaattgataaaaatccttaaggatgaaattaggacctatataagtctaccagaaaaaaata

SEQ ID NO: 19806 - DNA, 75 bp, synthetic construct
  source 1..75: mol_type = other DNA
aaccagctgacggcggtggtgtccccggacgggctggagagccgccgggaatatgatgaaccgggcaggctggta

SEQ ID NO: 19807 - DNA, 75 bp, synthetic construct
  source 1..75: mol_type = other DNA
gagcaataccttaatacagttgcgacatgcagaacccgggatacggcattgctaaagtcgtttgacgctttccgc

SEQ ID NO: 19808 - DNA, 75 bp, synthetic construct
  source 1..75: mol_type = other DNA
gtggcagtgtggtgttcccgccggtgctggtgcagatgctcgaccggctggaaagtgaaatcctggctgaccggg

SEQ ID NO: 19809 - DNA, 75 bp, synthetic construct
  source 1..75: mol_type = other DNA
tttgtgcagttatttctggtgcagaaagttgggaagatatagaggatttcggggaaacacatctcgatttcttga

SEQ ID NO: 19810 - DNA, 75 bp, synthetic construct
  source 1..75: mol_type = other DNA
aatcagggcagagctttacaggggtatacagccgaacctcccctggctggatcgcaatcgcgctcctcattgttt

SEQ ID NO: 19811 - DNA, 75 bp, synthetic construct
  source 1..75: mol_type = other DNA
tggagctgctgccgaaatacgctgcctgggcagagggtgtcctggctgccggaggcactcaacaggatgacgtgc

SEQ ID NO: 19812 - DNA, 75 bp, synthetic construct
  source 1..75: mol_type = other DNA
gaacgcttctggcgttgtattggcgacatgggcaggatatttatgcattgctacccgcattctcgaactgtggcg

SEQ ID NO: 19813 - DNA, 75 bp, synthetic construct
  source 1..75: mol_type = other DNA
tccgagcctgtttcattccgtaaggagaacagagcgaggcatgaagccaatgtacggctgcgcaggttcgttgaa

SEQ ID NO: 19814 - DNA, 75 bp, synthetic construct
  source 1..75: mol_type = other DNA
ttgccattcgtattgtggccattgctgttctggtctgggcaatccgttggtggtgatatgaaccgtgttctgtgc

SEQ ID NO: 19815 - DNA, 75 bp, synthetic construct
  source 1..75: mol_type = other DNA
gccggatgtgggctggtcatataaccccggttcggcggcatttggtacggatcaggcactgattcgaaaactggt

SEQ ID NO: 19816 - DNA, 75 bp, synthetic construct
  source 1..75: mol_type = other DNA
ctgatggggcagtttggtgactccatccagcgaacgcagggggcgatcaaaaatctcgagcgtcaggcgcgttca

SEQ ID NO: 19817 - DNA, 75 bp, synthetic construct
  source 1..75: mol_type = other DNA
gtagagctgtacgacaccatcatgggttgtcttggctatacttcaccggatggtggaattaacgaaaacaacaac

SEQ ID NO: 19818 - DNA, 75 bp, synthetic construct
  source 1..75: mol_type = other DNA
tggctattttgccagtagctgcggaggtgcgccaatatccgccatccgtcaatacattgaacaacagcaaacacc

SEQ ID NO: 19819 - DNA, 75 bp, synthetic construct
  source 1..75: mol_type = other DNA
ctggatgcttgactaccattcttcagatgataaagacgtcatcgcaattgatggaaaaatacaccggcattctta

SEQ ID NO: 19820 - DNA, 75 bp, synthetic construct
  source 1..75: mol_type = other DNA
gtaactcagccaacataataaaaaacaaagacttctctcctgatgaaatagataaatcctcaaatattaataacg

SEQ ID NO: 19821 - DNA, 75 bp, synthetic construct
  source 1..75: mol_type = other DNA
ggtattaaggtgaataaaggcgctgaaagtttttatgtcgagccttttgaacaggacgccggactgaataaataa

SEQ ID NO: 19822 - DNA, 75 bp, synthetic construct
  source 1..75: mol_type = other DNA
atgagcaccatcctgaaatgggcgggtaataaaaccgccattatgtccgaactgaaaaaataccttcctgctggc

SEQ ID NO: 19823 - DNA, 75 bp, synthetic construct
  source 1..75: mol_type = other DNA
aaaaggcttcgtctaacaacaattcctttagtgcgatttacaaggaatggtacgagcacaagaagcaagtctggt

SEQ ID NO: 19824 - DNA, 75 bp, synthetic construct
  source 1..75: mol_type = other DNA
agaaacaatagagtccttagttccgaagatatcaaataatatgaaaaccaatttcccggcaagcggtgtgagtgc

SEQ ID NO: 19825 - DNA, 75 bp, synthetic construct
  source 1..75: mol_type = other DNA
atccgcaaaaaagtagagcgacagaatttttgtttctcattctgtttatcgtattgatgataccgatatcccctc

SEQ ID NO: 19826 - DNA, 75 bp, synthetic construct
  source 1..75: mol_type = other DNA
gctcctaattctgatggtttacctgaatggatagatattcccgaaccaactgaagaggaaattattgcgttggca

SEQ ID NO: 19827 - DNA, 75 bp, synthetic construct
  source 1..75: mol_type = other DNA
gaaataaaaccgccataatgtccgaactgaaaaagcatcttcctgctggcccgcgactggttgaacctttcgcgg

SEQ ID NO: 19828 - DNA, 75 bp, synthetic construct
  source 1..75: mol_type = other DNA
atgaccgagagctgacttccctattaaaggagctgctcgagatggaaggcttcaacgtgattgttgcccacgatg

SEQ ID NO: 19829 - DNA, 75 bp, synthetic construct
  source 1..75: mol_type = other DNA
aacaatcataagcccgaacatgataaccgtgatcaggctggtgggcaattaccttgcttgttggggccgtattgt

SEQ ID NO: 19830 - DNA, 75 bp, synthetic construct
  source 1..75: mol_type = other DNA
tattcgtaacttcacgacaaaaacatgcattaccgattgcatgattaaagtcttcctcggacgtgatggtttacc

SEQ ID NO: 19831 - DNA, 75 bp, synthetic construct
  source 1..75: mol_type = other DNA
aaatcaaagacaaaaaaaaatcaatggaagaaaccattgcccggtggctggcggcacaaaaaagccgccgggcgt

SEQ ID NO: 19832 - DNA, 75 bp, synthetic construct
  source 1..75: mol_type = other DNA
tggggggaattccaaaagaacggctgaagttagcctctggtgtatttaatttaacacgtaatcttgggggcgcaa

SEQ ID NO: 19833 - DNA, 75 bp, synthetic construct
  source 1..75: mol_type = other DNA
ggggatttatttcagtgaaccccgtgcgcagcacatcctgaatttctacaaatttgtgccccatgtaaaaggggc

SEQ ID NO: 19834 - DNA, 75 bp, synthetic construct
  source 1..75: mol_type = other DNA
ttttcccaaagaatcattcagaatatgatctaaggtataaaatatgtgctgattataagcttattcaagaggtgt

SEQ ID NO: 19835 - DNA, 75 bp, synthetic construct
  source 1..75: mol_type = other DNA
ccagtgacacgctgacaacacagggacagataaccgccgggcagaatctcacggccagcgccaccacgctgacgc

SEQ ID NO: 19836 - DNA, 75 bp, synthetic construct
  source 1..75: mol_type = other DNA
cgctcacggtgaatcagacgctgaacaatcaggcgaacggaaaactgctcagtgcaggtgtgctgacgctgaagg

SEQ ID NO: 19837 - DNA, 75 bp, synthetic construct
  source 1..75: mol_type = other DNA
actatgcagccgggggatgaactggtggtctggaagctggacaggataggccgcaacgttctgcatgcgctgttg

SEQ ID NO: 19838 - DNA, 75 bp, synthetic construct
  source 1..75: mol_type = other DNA
attcctgcaggtaaaacgttacacatccttggaagcctgcgcggcaacggcagagggcgatttgtcttacaggac

SEQ ID NO: 19839 - DNA, 75 bp, synthetic construct
  source 1..75: mol_type = other DNA
gccacggttcagataccaaattcaatctgttcaacagccgtcgtatcgatgccatcgatgtgaccagcaaaacgg

SEQ ID NO: 19840 - DNA, 75 bp, synthetic construct
  source 1..75: mol_type = other DNA
gtggggatcgcaatccagcaccaaccagcacatacaccggaacacactaaggtttatcagactgacaatgccacg

SEQ ID NO: 19841 - DNA, 75 bp, synthetic construct
  source 1..75: mol_type = other DNA
ggaaaacccggacctgctggtcctcaggggcagcccggtccacagggacttaaaggtgacaggggcgagccagga

SEQ ID NO: 19842 - DNA, 75 bp, synthetic construct
  source 1..75: mol_type = other DNA
gtaagttcggtgaacttgaatcaaaactggaaacggcgttgcgggagtgtcgttctgctggaatcacgattgata

SEQ ID NO: 19843 - DNA, 75 bp, synthetic construct
  source 1..75: mol_type = other DNA
gttatcacgacaaccatgctgaaaaataccggctttttgtccagcgggtttactgagacaaacagcgaggggcag

SEQ ID NO: 19844 - DNA, 75 bp, synthetic construct
  source 1..75: mol_type = other DNA
gcaacgttcgcggcacccgtactgtctgcgctgacagcaagctggagccggaaaaatgtaatgcttacaactgcc

SEQ ID NO: 19845 - DNA, 75 bp, synthetic construct
  source 1..75: mol_type = other DNA
tgggcgttctgtaggttggctgctgtccgaggttatggaatgggttaaaagccgggatcgcattaattcaggtaa

SEQ ID NO: 19846 - DNA, 75 bp, synthetic construct
  source 1..75: mol_type = other DNA
ccgctgcaggggcggtatatcactcaggatccgattgggctgaaggggggatggaacctgtatacatatccgctg

SEQ ID NO: 19847 - DNA, 75 bp, synthetic construct
  source 1..75: mol_type = other DNA
actccgttcagggttttcggtatttcgacgatcgcgatctattaggttttgttgacggtactgaaaatccggtcg

SEQ ID NO: 19848 - DNA, 75 bp, synthetic construct
  source 1..75: mol_type = other DNA
caacgctcgcaggcacgaatgcagacagccatggagcaaagaaaagctgtgatgcaacgtcggtatgatgaacaa

SEQ ID NO: 19849 - DNA, 75 bp, synthetic construct
  source 1..75: mol_type = other DNA
caccgtttcagtggtctgccgctgggggaatacaccctgacggtgcgggccattaacagctacggccagcagggc

SEQ ID NO: 19850 - DNA, 75 bp, synthetic construct
  source 1..75: mol_type = other DNA
atgcggcccttaatgccaccggtgcagacgccggataatcttttccatgatggtaatccgctcacaggtgagctg

SEQ ID NO: 19851 - DNA, 75 bp, synthetic construct
  source 1..75: mol_type = other DNA
tccgagtgaataatattcaactggataatacccaccttgcttacaaattgcgcggtatccaaatctctgccggga

SEQ ID NO: 19852 - DNA, 75 bp, synthetic construct
  source 1..75: mol_type = other DNA
cgttggcaaatcggcatttgtggaggctgttggccagccgagtgatgatgcatccggctatctgaattttttcaa

SEQ ID NO: 19853 - DNA, 75 bp, synthetic construct
  source 1..75: mol_type = other DNA
ctacattgctcgcgatcgtccttgccacaacaatgccggttgcgcacgccgccgtaccgaaagatatgctggtga

SEQ ID NO: 19854 - DNA, 75 bp, synthetic construct
  source 1..75: mol_type = other DNA
cgccaggggcggcacactggcgggcaccaccacgctgaataacggcgccatacttaccctttccgggaagacggt

SEQ ID NO: 19855 - DNA, 75 bp, synthetic construct
  source 1..75: mol_type = other DNA
tgtgcgtgccggtttccgtctgggcagccacaacgatatgacctttggtgaaggcacctcatcccgtgacaccct

SEQ ID NO: 19856 - DNA, 75 bp, synthetic construct
  source 1..75: mol_type = other DNA
cggttcgtagtcgtattaaattcttttttcgtccggatgacctgaaaataacaccgaatgatgcttatcaaaaag

SEQ ID NO: 19857 - DNA, 75 bp, synthetic construct
  source 1..75: mol_type = other DNA
ccgtcccggtcagtccgattggctcaagaattaagtttatccgatctgagattttggaattctataaaaacaaag

SEQ ID NO: 19858 - DNA, 75 bp, synthetic construct
  source 1..75: mol_type = other DNA
ccgtcgcctgttccgctgtgtctccatccgggaaaacacggacggcacctttgccatcacggcggtgcagcacgt

SEQ ID NO: 19859 - DNA, 75 bp, synthetic construct
  source 1..75: mol_type = other DNA
actgaaggaacggcaaataccactgtggtttatgccggcggcgaccagactgtacatggtcacgcactggatacc

SEQ ID NO: 19860 - DNA, 75 bp, synthetic construct
  source 1..75: mol_type = other DNA
acgcaccgcaaatcacgggtgttgcacaaacgaatgcaaaggtcactgtctcacagaacaaccgtattatttatc

SEQ ID NO: 19861 - DNA, 75 bp, synthetic construct
  source 1..75: mol_type = other DNA
taacagcagtaatgacggtgggcgcatgacttttaacggcgatcgtatcgatgtgtatgatcagaatggtgtgct

SEQ ID NO: 19862 - DNA, 75 bp, synthetic construct
  source 1..75: mol_type = other DNA
cctgaagccattatgcccctgacccgggcggcggatggctcgctgggcgtacgcgcggtgggcagtatgaacggc

SEQ ID NO: 19863 - DNA, 75 bp, synthetic construct
  source 1..75: mol_type = other DNA
ggtgcagtcactggtgcagaccacgtcaaagggcgaccgtaatccttcctctgtccggattctgattcagttaca

SEQ ID NO: 19864 - DNA, 75 bp, synthetic construct
  source 1..75: mol_type = other DNA
gcctggtcaaagatggcttctctgtccagagaacagaaattaccggcggaagagagaaaagcgcgagaaattatt

SEQ ID NO: 19865 - DNA, 75 bp, synthetic construct
  source 1..75: mol_type = other DNA
cgcagaccgtcaataagaaactggaagaccagagtgcagcgatccagcagatacagaaggttcaggttgatacaa

SEQ ID NO: 19866 - DNA, 75 bp, synthetic construct
  source 1..75: mol_type = other DNA
tgataatgtggcaacagccgtgggcgcgctggttgccgtcggggttgcccggtactttggcaatatggcctccgg

SEQ ID NO: 19867 - DNA, 75 bp, synthetic construct
  source 1..75: mol_type = other DNA
tgagtctatattcttttattgtgcaaagtgctccctgtgcattgaccaatgtcggggaacaacgtggaacatata

SEQ ID NO: 19868 - DNA, 75 bp, synthetic construct
  source 1..75: mol_type = other DNA
gtaatacctacgccatcccctattctggcgaagaagtgatgttgcactgggcaaataaggaccagtactacatta

SEQ ID NO: 19869 - DNA, 75 bp, synthetic construct
  source 1..75: mol_type = other DNA
caccttacaacttatacccagcgtaatacagcagactactttatccataaagatctcggtggttttttaacgaac

SEQ ID NO: 19870 - DNA, 75 bp, synthetic construct
  source 1..75: mol_type = other DNA
gcgggcccgtcagtgcggggcaggtgatgatgactatctttttgacgtctgtcgtttcagtgagccgatctctgc

SEQ ID NO: 19871 - DNA, 75 bp, synthetic construct
  source 1..75: mol_type = other DNA
aacggtgcccgctttgagccgcagtcaggttccctgaacagcgtcatcccaccggcagtgcagcacctgacggtg

SEQ ID NO: 19872 - DNA, 60 bp, synthetic construct
  source 1..60: mol_type = other DNA
atgtcaaccggattacgtttcacactggaagtggacggcctgccgccggatgcttttgcg

SEQ ID NO: 19873 - DNA, 75 bp, synthetic construct
  source 1..75: mol_type = other DNA
aggaaagacctctgcgaggtacgaatccgaaccggccagacggaggtcgctgtcttcacagtttacgaacctgag

SEQ ID NO: 19874 - DNA, 75 bp, synthetic construct
  source 1..75: mol_type = other DNA
attagatgggagccagacgagtaggattcgtattgtaagaacagggggagagtttcctcaagacagagaaaaatt

SEQ ID NO: 19875 - DNA, 75 bp, synthetic construct
  source 1..75: mol_type = other DNA
gtggacgtgggattgttgtgcatggctgtaaaagcgcctgcggctcggtggtgtatgccagtctgccggatgtgg

SEQ ID NO: 19876 - DNA, 75 bp, synthetic construct
  source 1..75: mol_type = other DNA
gcaacctgctgaatgaagagaacccgcatcagctgcagcagcttatccggctgccggggcagcagtatgatgagg

SEQ ID NO: 19877 - DNA, 75 bp, synthetic construct
  source 1..75: mol_type = other DNA
gcgctgtcgttatctgcctgctggtttccatggcctgggccattaaccactaccgcgacaacgccatcacctaca

SEQ ID NO: 19878 - DNA, 75 bp, synthetic construct
  source 1..75: mol_type = other DNA
ctttactgccacgttcacggcgctgaaagggaatgccacggcattactgacagcaccttcccgcatggcctcatc

SEQ ID NO: 19879 - DNA, 75 bp, synthetic construct
  source 1..75: mol_type = other DNA
cgaataccctgaccggtatctgatgacgcaaaactactttgatccctatcctgatgatttgggtctgcgtctggc

SEQ ID NO: 19880 - DNA, 75 bp, synthetic construct
  source 1..75: mol_type = other DNA
tggggttattctttaaatattttttatcgttaacgaaaattgatcctggtcaaaactatatatctctgccatcaa

SEQ ID NO: 19881 - DNA, 75 bp, synthetic construct
  source 1..75: mol_type = other DNA
tacgcaaaacggcgacagcgccggatgcgtggtggtggcaccgccagccgtgcctggtggtaagttccgcattct

SEQ ID NO: 19882 - DNA, 75 bp, synthetic construct
  source 1..75: mol_type = other DNA
atcatgacctgacccgctatcacacccgaaccgggatgggcgttgaatactggcgcgattacctgaaactgagcg

SEQ ID NO: 19883 - DNA, 75 bp, synthetic construct
  source 1..75: mol_type = other DNA
gaagatgtagatgagttgtgtaagaaagtgacaagttggatgtattcgcatcctggagagagaattagatatgaa

SEQ ID NO: 19884 - DNA, 75 bp, synthetic construct
  source 1..75: mol_type = other DNA
gtatgttttgccattcgtacaggaaactttgattacgctgcgcagttccctgactctcctaacctcaaggctttt

SEQ ID NO: 19885 - DNA, 75 bp, synthetic construct
  source 1..75: mol_type = other DNA
gcagagtaggtggacgccgtcctaagttgaccaccgaacagtgggcacagattgggcgtttactcgaggccggag

SEQ ID NO: 19886 - DNA, 75 bp, synthetic construct
  source 1..75: mol_type = other DNA
caacaaatgaccagaacacggaattgcagcgtaacgcgctggagtgcgcaggatgcgagcggatttttgaggata

SEQ ID NO: 19887 - DNA, 75 bp, synthetic construct
  source 1..75: mol_type = other DNA
ccagccgggcagttttgaagcggagctgtttaaccgggaaggaaaactgtggccggaagcggatgtgaccctgat

SEQ ID NO: 19888 - DNA, 75 bp, synthetic construct
  source 1..75: mol_type = other DNA
tcaggaaggccagtaccaggattaccagcgcacgcagtatgaagtgtatgactaccccggacgtttcaagggtgc

SEQ ID NO: 19889 - DNA, 75 bp, synthetic construct
  source 1..75: mol_type = other DNA
gtacgtttgctcgaggttttgataatgtccgccagggtgatgaactggatgtcccggcacaagttagtgaaaaaa

SEQ ID NO: 19890 - DNA, 75 bp, synthetic construct
  source 1..75: mol_type = other DNA
gataatagttgtgtggagaactgtttaaaagggaagtttaaagaggtaaggccgcgttattctgtattgcctgat

SEQ ID NO: 19891 - DNA, 75 bp, synthetic construct
  source 1..75: mol_type = other DNA
ccgctgcaggggcggtatatcactcaggatccgattgggctgaaggggggatggaatttttatcagtatccgttg

SEQ ID NO: 19892 - DNA, 75 bp, synthetic construct
  source 1..75: mol_type = other DNA
cctgtgtcgatctggctctgtgggatctgttcggcaaagtggtcgggcttccggtttataaacttttaggcggcg

SEQ ID NO: 19893 - DNA, 75 bp, synthetic construct
  source 1..75: mol_type = other DNA
acattatcggcaggtgacactctggttgtctggaagctggacaggttggggcgcagtatgcggcatctcgttacg

SEQ ID NO: 19894 - DNA, 75 bp, synthetic construct
  source 1..75: mol_type = other DNA
gccctgccgaagcggctgaagctcgctgggaagagatagacatagaagcacaagagtggaagattcctgcagcac

SEQ ID NO: 19895 - DNA, 75 bp, synthetic construct
  source 1..75: mol_type = other DNA
gacgaattggtggacgtcgtcccaaacttacaccagaacaatgggcgcaggccgggcgattaattgcatcaggcg

SEQ ID NO: 19896 - DNA, 75 bp, synthetic construct
  source 1..75: mol_type = other DNA
gccttctgcctgctgaaaccagttgcccggcctgtggaggtgttctgaaagaaatgggggaaacaatctcagagc

SEQ ID NO: 19897 - DNA, 75 bp, synthetic construct
  source 1..75: mol_type = other DNA
agaaagttgggatcgcggcattgatgttttttatacctcctataatttaagtcagtatcgctcttatgacagcaa

SEQ ID NO: 19898 - DNA, 75 bp, synthetic construct
  source 1..75: mol_type = other DNA
tttgatgtggttcaccttgatgttgcaggcctgatcggcacggacaacacttacggtgcggtcgcacagttccag

SEQ ID NO: 19899 - DNA, 75 bp, synthetic construct
  source 1..75: mol_type = other DNA
tctatggttatcgcaaaatccatttagatctgcgggacagcgggcaacagtacggagtgaacagagtctggcgac

SEQ ID NO: 19900 - DNA, 75 bp, synthetic construct
  source 1..75: mol_type = other DNA
atctggaatctgtacaccctgaacaacggcggggcatttatggcacccgaaccggatgacgatgatgacgaaaca

SEQ ID NO: 19901 - DNA, 75 bp, synthetic construct
  source 1..75: mol_type = other DNA
tggagcctgaagaaagctgttgcccggagtgtggcggtgagctggattatctgggggaagtcagtgcagaacaac

SEQ ID NO: 19902 - DNA, 75 bp, synthetic construct
  source 1..75: mol_type = other DNA
ggttcacactgatgacacaccagtaaaagtactggcaccgggcaggaagaaggcgaaaacaggatatatctggac

SEQ ID NO: 19903 - DNA, 75 bp, synthetic construct
  source 1..75: mol_type = other DNA
gctacgggatggggaaacgtctgggggccgcagacgtggacaaatgggcactgtatgccattgcgcagtactgcg

SEQ ID NO: 19904 - DNA, 75 bp, synthetic construct
  source 1..75: mol_type = other DNA
agtgcaggatattcccggtgtgctggccgtgtttgctgaacgtcgtaaggacagttttggtccgtatgtccggct

SEQ ID NO: 19905 - DNA, 75 bp, synthetic construct
  source 1..75: mol_type = other DNA
ggcattcagcggcgctaaacatgagagagagcatactgatatttactgtaagcgtcgtctcagcaccgtctggca

SEQ ID NO: 19906 - DNA, 75 bp, synthetic construct
  source 1..75: mol_type = other DNA
aaatgagcccggaagccgccggtattgctgcctgtctgatgacgtacagccatcatgcctgtcgtacggagaatt

SEQ ID NO: 19907 - DNA, 75 bp, synthetic construct
  source 1..75: mol_type = other DNA
ggaaaaactggatgttcgcgggttccgacagcggtggtgaacatgcggcggtgttgtactcgctgatcggcacat

SEQ ID NO: 19908 - DNA, 75 bp, synthetic construct
  source 1..75: mol_type = other DNA
atgagtcagaaatacctcattcggatcactgagctggaaaggttgctctctgagcaggctgaagccctccgtcag

SEQ ID NO: 19909 - DNA, 75 bp, synthetic construct
  source 1..75: mol_type = other DNA
ctgtcgaaaaaatccagactgggcgaagcgtgcagctatgtactgaatcagtgggatgccctctgttattacagt

SEQ ID NO: 19910 - DNA, 75 bp, synthetic construct
  source 1..75: mol_type = other DNA
ttgcgacagtcgcgccatcgtcgtccgttaccggcacatctcccccgtgaaatataccgcctggagcctgaagaa

SEQ ID NO: 19911 - DNA, 75 bp, synthetic construct
  source 1..75: mol_type = other DNA
cagataacggcggtcccgcgtcttgcggtgtatgacccgacggtacagtttgagttctggttttcggaggcaaaa

SEQ ID NO: 19912 - DNA, 75 bp, synthetic construct
  source 1..75: mol_type = other DNA
agctgttgcccggagtgtggcggtgagctggattatctgggggaagtcagcgcagaacaactggaactggtgagc

SEQ ID NO: 19913 - DNA, 75 bp, synthetic construct
  source 1..75: mol_type = other DNA
tcatgcggatccgctggcgtttgaagaaaaatatggttctcagattgatttaatttttcgttttcttgatcacgc

SEQ ID NO: 19914 - DNA, 75 bp, synthetic construct
  source 1..75: mol_type = other DNA
cagtaacgcacgggtaattcgtgctgctggtggtgctggtgcattgtctgactggctgttgcgccatattaaatc

SEQ ID NO: 19915 - DNA, 75 bp, synthetic construct
  source 1..75: mol_type = other DNA
ggggagtctgctgtttgggctgctgacatatctgacgaacctgtatttcaaaattaaagaagaccggcgtaaggc

SEQ ID NO: 19916 - DNA, 75 bp, synthetic construct
  source 1..75: mol_type = other DNA
gcgcagtcttccgtccggcgtcgttgcagccgttagccagccgttggctgaggataaaacattactaccattttt

SEQ ID NO: 19917 - DNA, 75 bp, synthetic construct
  source 1..75: mol_type = other DNA
gtgcgggtattacttcgacctgttccggtaccggaacttgggctggtggtgctaaaaccgggccgtgaatccatg

SEQ ID NO: 19918 - DNA, 75 bp, synthetic construct
  source 1..75: mol_type = other DNA
gtgcgggtattacttcgacctgttctggtaccggaactcgggctggtggtccttaagccaggtcgtgaatccatg

SEQ ID NO: 19919 - DNA, 75 bp, synthetic construct
  source 1..75: mol_type = other DNA
cgcagacggtggatttcacgctcgggtctcaggggctgcggcacacacccggtgacattattgaaatctgtgata

SEQ ID NO: 19920 - DNA, 75 bp, synthetic construct
  source 1..75: mol_type = other DNA
gtaatgaggagaatgcacgccagatagcgcaggttcgccagtatgtggatcaaaaaagcagtgaaatcatgacga

SEQ ID NO: 19921 - DNA, 75 bp, synthetic construct
  source 1..75: mol_type = other DNA
accggcaaataccgctggcacggcagcactgaagcgtataccggtcgtgaagtgcaggatattcccggtgtgttg

SEQ ID NO: 19922 - DNA, 75 bp, synthetic construct
  source 1..75: mol_type = other DNA
gtgaccctggagccccgtatcttcggctggatggaccgtctttgcgaagactactgtggtggtatctggaatctg

SEQ ID NO: 19923 - DNA, 75 bp, synthetic construct
  source 1..75: mol_type = other DNA
cgggcattgcctacggcacctccgcaggcagtgctggctactggtttttacagtggcttgatcaggtcagtcctt

SEQ ID NO: 19924 - DNA, 75 bp, synthetic construct
  source 1..75: mol_type = other DNA
aacgtcacgattaacgagaactgtcgggttctgggaaaattgtccgcgaaccagattgaaggcgatctcgttaaa

SEQ ID NO: 19925 - DNA, 75 bp, synthetic construct
  source 1..75: mol_type = other DNA
ggtggggacgggatactggctactgcagttgctggacaaagtctccccatcccagtgggtggcaataggcgtatt

SEQ ID NO: 19926 - DNA, 75 bp, synthetic construct
  source 1..75: mol_type = other DNA
cggctgtgggtctacgtccgtgatgaccgtaacgccggttcggaaatgcccccggcggtctggttcgcgtactca

SEQ ID NO: 19927 - DNA, 75 bp, synthetic construct
  source 1..75: mol_type = other DNA
tgaaacgggaatttgatggcgcaccggaagatgcagcgggcgcattgttgagcgttgctgacatgatgaaagctg

SEQ ID NO: 19928 - DNA, 75 bp, synthetic construct
  source 1..75: mol_type = other DNA
gcaaagcgcaatttatagttactgccgttaaaggcgaaatcaaacgccgccagcgccgcaaggccaaagagcagg

SEQ ID NO: 19929 - DNA, 75 bp, synthetic construct
  source 1..75: mol_type = other DNA
acagcacagggaacccctgcattatacatcgccatgagcaagggtaatgaagacgtcgtgttatcttatatatcg

SEQ ID NO: 19930 - DNA, 75 bp, synthetic construct
  source 1..75: mol_type = other DNA
agcgtcactctggagtttaaggttttccataaaggcaatcagtgggcaggtaatatcaccgactgtacggtgatt

SEQ ID NO: 19931 - DNA, 75 bp, synthetic construct
  source 1..75: mol_type = other DNA
tttaaagctgttgccacaaattttcctgtcgttaatgaccttccccctgaaggtgagatcgattttacctggagt

SEQ ID NO: 19932 - DNA, 75 bp, synthetic construct
  source 1..75: mol_type = other DNA
ataccattctcgcggcatccggaggctccggcccggttcccctgtatcccccgttgtcacatgccatctcgcttt

SEQ ID NO: 19933 - DNA, 75 bp, synthetic construct
  source 1..75: mol_type = other DNA
gagttacgcaaactcaaccagtttcgtacgtttgctcgaggttttgataatgtccgccagggtgatgaactggat

SEQ ID NO: 19934 - DNA, 75 bp, synthetic construct
  source 1..75: mol_type = other DNA
tatattgaaaacatagttgctaaactcctctacgccccggccgtatgtaatcaatcatttcttgcatgggaacga

SEQ ID NO: 19935 - DNA, 75 bp, synthetic construct
  source 1..75: mol_type = other DNA
agtcatctgctccggcatagttttgcaactgaaatgcgcacgctgaatacaccgctggatgttctggcgcagttg

SEQ ID NO: 19936 - DNA, 75 bp, synthetic construct
  source 1..75: mol_type = other DNA
tatgacgaactgcacaatgcaaaagggatcaacttcatctgggaagccctggacacccaggagctggagcagcgt

SEQ ID NO: 19937 - DNA, 75 bp, synthetic construct
  source 1..75: mol_type = other DNA
ctgcgggctatctggaacttttccgggaaaagataggaaaaacgcatctggcagaggcgctgtgggcagagattg

SEQ ID NO: 19938 - DNA, 75 bp, synthetic construct
  source 1..75: mol_type = other DNA
gctgcggcagcacaaggtgtggtaaacgccgcaacccaacaaccagttcctgcacaattcgccattgcaaatgcc

SEQ ID NO: 19939 - DNA, 75 bp, synthetic construct
  source 1..75: mol_type = other DNA
ttgtggacttcctcaacggcgacccggaccagccgattattatggggcgtacctaccaccatgaaaaccgcacac

SEQ ID NO: 19940 - DNA, 75 bp, synthetic construct
  source 1..75: mol_type = other DNA
cataatctgaatctgagacaacatctggcaaggctgggacggaagtcactgtcgttctcaaaatcggtggagctg

SEQ ID NO: 19941 - DNA, 75 bp, synthetic construct
  source 1..75: mol_type = other DNA
aacagtgctacccgaacacggcgattgtggggctgcaggtggatgcggagcagtttggcggtcagcagatgacgg

SEQ ID NO: 19942 - DNA, 75 bp, synthetic construct
  source 1..75: mol_type = other DNA
gtatcccacagcaagtatcagcgatttgctggttgttgtgatgaagaaagccactgcaggcatcacgattagctg

SEQ ID NO: 19943 - DNA, 75 bp, synthetic construct
  source 1..75: mol_type = other DNA
gacggccacacgctggcacggctgtgggcgtcgctgccaccggatatccggttaagcccgcatctttacctggcg

SEQ ID NO: 19944 - DNA, 75 bp, synthetic construct
  source 1..75: mol_type = other DNA
aaggaagggtggcagccttatggtagtgcgctgatttcgacagctggttatggtgcggagttcatccagccagtt

SEQ ID NO: 19945 - DNA, 75 bp, synthetic construct
  source 1..75: mol_type = other DNA
gattgaaggtgatattgtcaaaacggtgggaaaagcctttccgagaaatggcagttatgccagcggtacaataac

SEQ ID NO: 19946 - DNA, 75 bp, synthetic construct
  source 1..75: mol_type = other DNA
gcgcagcttcctcggcaacagcggcaggaaattccgcgaaggcggcaaaaacgtccgagacgaacgctaagtctt

SEQ ID NO: 19947 - DNA, 75 bp, synthetic construct
  source 1..75: mol_type = other DNA
gctggtatcccacagcaagtatcagcgatttgctggttgttgtgatgaagaaagccactgcaggcatcacgatta

SEQ ID NO: 19948 - DNA, 75 bp, synthetic construct
  source 1..75: mol_type = other DNA
cccttatagccaccctgagtggaacggcatgccaggctcatgcttattcagtcaccgtcgtcgccagccggcctg

SEQ ID NO: 19949 - DNA, 75 bp, synthetic construct
  source 1..75: mol_type = other DNA
atcatcaggcaacgccccgtcatggaatatgatgcatcccatctcggcaatatggttaaccgactggaagaagca

SEQ ID NO: 19950 - DNA, 75 bp, synthetic construct
  source 1..75: mol_type = other DNA
aaaatgtttgcttccggagggcagggacatgggtttgccgctgaacggggaaaccatattgtcgacagagtccgt

SEQ ID NO: 19951 - DNA, 75 bp, synthetic construct
  source 1..75: mol_type = other DNA
gaagtggatatccaccctaatcccaaaatcggtgcgggctggcagcttcgcggacagcaaaaacacgtggtgacg

SEQ ID NO: 19952 - DNA, 75 bp, synthetic construct
  source 1..75: mol_type = other DNA
aaactcaatgttggtgattatcctgcaatgagtatcacccaggcaagagagcgtcgccaacaattcagaaactgg

SEQ ID NO: 19953 - DNA, 75 bp, synthetic construct
  source 1..75: mol_type = other DNA
gacaatgggattttcttctcaagcaaccctatgaatttattcttactcaatcgtttatttttgaatcacccacaa

SEQ ID NO: 19954 - DNA, 75 bp, synthetic construct
  source 1..75: mol_type = other DNA
tccgctgtatcaggaaaaattgccggagcgctggttgaagaagatcgcgtcaaaattctggcaatgattcaggag

SEQ ID NO: 19955 - DNA, 75 bp, synthetic construct
  source 1..75: mol_type = other DNA
tattagtgctaaagatgcaaaaagcacacagaaagcctggaattgtcgtcactccagacagtcaaacgataaaaa

SEQ ID NO: 19956 - DNA, 75 bp, synthetic construct
  source 1..75: mol_type = other DNA
gccatttgcctatttccggctccataaaagcacgcggcgggatttatgaagtcctggcacatgcagaaaaactgg

SEQ ID NO: 19957 - DNA, 75 bp, synthetic construct
  source 1..75: mol_type = other DNA
ggtcccgaaagcgaacccatccgcgctgccgccgtgaaaaaactggaagcgtatatcacggcacagcaccggctg

SEQ ID NO: 19958 - DNA, 75 bp, synthetic construct
  source 1..75: mol_type = other DNA
atggtaggttttttcttcaccggtagcgctattatgggaattctggtcagtcaatttctggcaaggcactccgat

SEQ ID NO: 19959 - DNA, 75 bp, synthetic construct
  source 1..75: mol_type = other DNA
gtgtaaccgatcccgcagaagcgtcccggctgattcgtcggggacatctgacttatactcaggcccgtaatatca

SEQ ID NO: 19960 - DNA, 75 bp, synthetic construct
  source 1..75: mol_type = other DNA
ttaccggttaatacacaaaacctgtccgtcattaactgtgaaaaattacaaatcacagacataccatcgacagta

SEQ ID NO: 19961 - DNA, 75 bp, synthetic construct
  source 1..75: mol_type = other DNA
ctgagcatgaaaatattaatgctattgaattatatgaaaatgagtggaagatctttgaagataaatactggtcgg

SEQ ID NO: 19962 - DNA, 75 bp, synthetic construct
  source 1..75: mol_type = other DNA
agttatgcgagtcgctacccggattacagccgtattcccgccatcaccctgaaaggtcagtggctggaagccgcc

SEQ ID NO: 19963 - DNA, 75 bp, synthetic construct
  source 1..75: mol_type = other DNA
atgaatacagaaaacccacaatcctttattcttaaggctgtaaaagaactggcagctattagcgaggaatcagtt

SEQ ID NO: 19964 - DNA, 75 bp, synthetic construct
  source 1..75: mol_type = other DNA
acatacgacaaagtgaccgtcactgttggcgctgacggcaatgccaccgacgccagtgttgaatttatcggaaaa

SEQ ID NO: 19965 - DNA, 75 bp, synthetic construct
  source 1..75: mol_type = other DNA
cggtagaacgtcagtttaacggtcagatgattgttgagctgaccggcgagacccgggacaccggcaaaaccctgt

SEQ ID NO: 19966 - DNA, 75 bp, synthetic construct
  source 1..75: mol_type = other DNA
gctggatgaagccaccgggaaactggtggtctgggatggacagaaagccggtagtgcggttggcatactggtact

SEQ ID NO: 19967 - DNA, 75 bp, synthetic construct
  source 1..75: mol_type = other DNA
acttaaataatggcggatatggagcgagacccaacaaaccgcctacgcccgatccaagtaaattgccggacatag

SEQ ID NO: 19968 - DNA, 75 bp, synthetic construct
  source 1..75: mol_type = other DNA
gagagctgattgccagcatggatacattcatatggctggcagaaagagcggggtatcagataacagcacctgctc

SEQ ID NO: 19969 - DNA, 75 bp, synthetic construct
  source 1..75: mol_type = other DNA
agagtcacggcagagaagaaacccgtcttcatattgtttgcgatgtccctgatgagcttattgatttcacgtttg

SEQ ID NO: 19970 - DNA, 75 bp, synthetic construct
  source 1..75: mol_type = other DNA
ctgccagcggttatgcacatcccaaaattatccccggcgctatttatcgggataagaacggcaacagagtaacag

SEQ ID NO: 19971 - DNA, 75 bp, synthetic construct
  source 1..75: mol_type = other DNA
atgttcgctttgattaatcagggacaactgtataccgacagtgccggttacccggtaataattattcgctgcata

SEQ ID NO: 19972 - DNA, 75 bp, synthetic construct
  source 1..75: mol_type = other DNA
gattagcagggcttttaagtatgcgcttgatgaaatcacaaagaaaaaatccccggtggccgccggggactctaa

SEQ ID NO: 19973 - DNA, 75 bp, synthetic construct
  source 1..75: mol_type = other DNA
atggcattaacagatatcaaagtcagagcagccaagccaacggataagcaatataagctgactgatggtggcggt

SEQ ID NO: 19974 - DNA, 75 bp, synthetic construct
  source 1..75: mol_type = other DNA
ctttcagcgtgccttgaacctgcctgacgacgccaaccaggattcgatcaaggcatcgttcaagaacggggtgct

SEQ ID NO: 19975 - DNA, 75 bp, synthetic construct
  source 1..75: mol_type = other DNA
tgaaactaatcggcgaactgtacgccattgagcacgaaatacgcgggttgccggtgtctgaacgcctggcggtca

SEQ ID NO: 19976 - DNA, 75 bp, synthetic construct
  source 1..75: mol_type = other DNA
acggcctgcaagctccggcacggagacagcaacgaactgccgttcggcggtttcccgggtacatctcttatcagg

SEQ ID NO: 19977 - DNA, 75 bp, synthetic construct
  source 1..75: mol_type = other DNA
cggtatatcaggaagcactgggttgcgttgtgcaacttctgtgatgacggtctggcggaggcggacaataacaca

SEQ ID NO: 19978 - DNA, 75 bp, synthetic construct
  source 1..75: mol_type = other DNA
tggcaagatgtaagtaaatttctgggtgacaaatcaaagtctcatgcattagtgtggaaaaattttggtcaggag

SEQ ID NO: 19979 - DNA, 75 bp, synthetic construct
  source 1..75: mol_type = other DNA
aaaccgacagctaccggggtggtggcatgatgggtgcggtaagtattgatctcggtctggacgactccgcgcttg

SEQ ID NO: 19980 - DNA, 75 bp, synthetic construct
  source 1..75: mol_type = other DNA
ttgctggaaaccgcgaaacgcaacggtctggagccgcatgcctggctgacagacgtcctgatgcgtctgccggag

SEQ ID NO: 19981 - DNA, 75 bp, synthetic construct
  source 1..75: mol_type = other DNA
tgtatttttctggtgaaccggcacagatcgctgagattaaacgactggccagcggtgcagtcacaccgttttatc

SEQ ID NO: 19982 - DNA, 75 bp, synthetic construct
  source 1..75: mol_type = other DNA
cagggaaaacataactattcatctggacgatcacatccggtctcttcagggaaaagaatgctatgaagatgagat

SEQ ID NO: 19983 - DNA, 75 bp, synthetic construct
  source 1..75: mol_type = other DNA
ctatcgtgcggtgacgacaaagaaagccgacagccgtcatccggcaatggtggaactcgccgccttcctgcgcga

SEQ ID NO: 19984 - DNA, 75 bp, synthetic construct
  source 1..75: mol_type = other DNA
tctaatgaaataagcagtacagaagaaagaaaagcggctacacctctggctgtcaaaactctccatgatttggtt

SEQ ID NO: 19985 - DNA, 75 bp, synthetic construct
  source 1..75: mol_type = other DNA
gtgactgataaacgcaaaaaacgcgccgatgccgggcgcagcgccctgacccgcgacgaagccgcgctgatatct

SEQ ID NO: 19986 - DNA, 75 bp, synthetic construct
  source 1..75: mol_type = other DNA
atgatcaaagagactgttacgatgagtcataaggaactcgaccgacttcacattattcaggagtcacttaatcgc

SEQ ID NO: 19987 - DNA, 75 bp, synthetic construct
  source 1..75: mol_type = other DNA
tgtttgccaaagtagttgaatttggctcttttaccgccgccgccagacagctacagatgagcgtttcgtccatca

SEQ ID NO: 19988 - DNA, 75 bp, synthetic construct
  source 1..75: mol_type = other DNA
atgacagcaaacgcacaagcagccccggttgggtagttatgtgggatggctggttcagacatcaggatatggctg

SEQ ID NO: 19989 - DNA, 75 bp, synthetic construct
  source 1..75: mol_type = other DNA
cggcgcaaattacaacgttgaacgtctcgttattacgcctgctgatgaaaccacgctgccgccgacacctgctgt

SEQ ID NO: 19990 - DNA, 75 bp, synthetic construct
  source 1..75: mol_type = other DNA
cgatttgaggcgcttaataataaaggagaatatatttttatcagaaatagtgtcccgggattgagttcagtatgc

SEQ ID NO: 19991 - DNA, 75 bp, synthetic construct
  source 1..75: mol_type = other DNA
agaatatgaatttcttgtccgtaaacttaatgaaaccacagaggaattgagcggggttgcgcaagcgcagagaga

SEQ ID NO: 19992 - DNA, 75 bp, synthetic construct
  source 1..75: mol_type = other DNA
gacggaacctggcaagtgacgctgcctgccacggaagtccaggcactggcggagggtaattacgctgtcaatgcc

SEQ ID NO: 19993 - DNA, 75 bp, synthetic construct
  source 1..75: mol_type = other DNA
tatgcctccggggagattgtcgtcggtggtgagttttgtccggcttcggccattcatctgattgataacctgcga

SEQ ID NO: 19994 - DNA, 75 bp, synthetic construct
  source 1..75: mol_type = other DNA
aatactaatgagaacggtattgctgaagttacccttaagggcacggttttgggtgttcatacagccgaagccata

SEQ ID NO: 19995 - DNA, 75 bp, synthetic construct
  source 1..75: mol_type = other DNA
caaaaatacttgatctcactgccgcggcatttttacttgtcgcctttctgactggtattgcgggcgctctccaga

SEQ ID NO: 19996 - DNA, 75 bp, synthetic construct
  source 1..75: mol_type = other DNA
atcgagatgcgcggacgtgtgacggaaattgatatgggggaagccaaacagggcgaagccacatcacacacttac

SEQ ID NO: 19997 - DNA, 75 bp, synthetic construct
  source 1..75: mol_type = other DNA
tgcgaccgatagcaattctttactttggcaagatgtaagtaaatttctgggtgacaaatcaaagtctcatgcatt

SEQ ID NO: 19998 - DNA, 75 bp, synthetic construct
  source 1..75: mol_type = other DNA
tttttgatatggatggcacaatcctggatacggagcctacgcaccgtaaagcgtggcgcgaagtattagggcact

SEQ ID NO: 19999 - DNA, 75 bp, synthetic construct
  source 1..75: mol_type = other DNA
ataacaatcgacgattgctggaaaggctgggccatactcctccggcagaagcagaaaaagcttattatgcttcca

SEQ ID NO: 20000 - DNA, 75 bp, synthetic construct
  source 1..75: mol_type = other DNA
gattgagcgtggcgggtccggtcggtgcatatgagtatcacggccgcagcgccgacgggcgggtcgctgacgttt

SEQ ID NO: 20001 - DNA, 75 bp, synthetic construct
  source 1..75: mol_type = other DNA
ccggggccggatggtggcgcaccgtcacacgggccgaccggaaatctgttaccgttacgacagcgacgggcgggt

SEQ ID NO: 20002 - DNA, 75 bp, synthetic construct
  source 1..75: mol_type = other DNA
ctacgacgatacggggcgggtggtggagcaactgaacccggcagggttaagctaccgctatctttatgagcagga

SEQ ID NO: 20003 - DNA, 75 bp, synthetic construct
  source 1..75: mol_type = other DNA
gaccagtatgccggaggccaccggctgaaacaggccggaaacacgcagtatgactatgacgccgcaggccggatg

SEQ ID NO: 20004 - DNA, 75 bp, synthetic construct
  source 1..75: mol_type = other DNA
ggctgcaagatcgcaaacagatgcgcgtgcgctactacggcctgaaccactggtggtcggcgatatcccgcagtt

SEQ ID NO: 20005 - DNA, 75 bp, synthetic construct
  source 1..75: mol_type = other DNA
atggcaacaatggacagtaaatatattcagcacctcaggaaaataagtgctgtactgctcaggctgataagcaga

SEQ ID NO: 20006 - DNA, 75 bp, synthetic construct
  source 1..75: mol_type = other DNA
agacgagcttatagaaaaagcaatcgctttcaagcgtgcctatcgtcaccagtaccaacaaaaagccggatggaa

SEQ ID NO: 20007 - DNA, 75 bp, synthetic construct
  source 1..75: mol_type = other DNA
ttccccgctttaaccttacattatgcttcccccgttactggatgacgtggacaggtatcggtattatctgtgtgt

SEQ ID NO: 20008 - DNA, 75 bp, synthetic construct
  source 1..75: mol_type = other DNA
catcggcttcattcgtgaatgagatgatggagctgcgtcagcaggtaatggaggggcagattggtggatttctcc

SEQ ID NO: 20009 - DNA, 75 bp, synthetic construct
  source 1..75: mol_type = other DNA
ctcgttatgctggcatggcgtcggtaaaatatatcgctcgaatgccacagcagagaaagcttgctgtacttactg

SEQ ID NO: 20010 - DNA, 75 bp, synthetic construct
  source 1..75: mol_type = other DNA
atctcaagcagaagttagtggaatgcaatcgctataactactgcgcagatgcagtgaagaacgtagaggatgcct

SEQ ID NO: 20011 - DNA, 75 bp, synthetic construct
  source 1..75: mol_type = other DNA
gattatccctggcggcgttagttttcgttctggggattgatttttggctggaagccttatttttattccgcccga

SEQ ID NO: 20012 - DNA, 75 bp, synthetic construct
  source 1..75: mol_type = other DNA
ttattgctctaatatttatagggactgtatcagacattattggcgtaaggattgatagtaagtatattatggcga

SEQ ID NO: 20013 - DNA, 75 bp, synthetic construct
  source 1..75: mol_type = other DNA
cgcgattgtctctctgacaatcaccgaaaaagggtatttccactctccggcgaccggacagttaatgctcgatca

SEQ ID NO: 20014 - DNA, 75 bp, synthetic construct
  source 1..75: mol_type = other DNA
agcgttataagtgccgtatacgtaagccttggttcaaggtcccatctgtatatagcacagagattggaatgttaa

SEQ ID NO: 20015 - DNA, 75 bp, synthetic construct
  source 1..75: mol_type = other DNA
tgcgtgaggcggcagtagcaattgaaacagtagcaacgcctcaaaaattgctggcatttcgtatgaaagtcacac

SEQ ID NO: 20016 - DNA, 75 bp, synthetic construct
  source 1..75: mol_type = other DNA
tgaagcggatgttaaataaggggctggaaagccttgcagaaggagaaaaaccgctgctccacagtgatcaagggt

SEQ ID NO: 20017 - DNA, 75 bp, synthetic construct
  source 1..75: mol_type = other DNA
tatttagtctattaacattgtgtggcggtacaatttataaattaccgtcgctgaaagatgcgttttatatcccga

SEQ ID NO: 20018 - DNA, 75 bp, synthetic construct
  source 1..75: mol_type = other DNA
tcccggagaactcagtctgtgcagactgagtacaggcaatggcatctggccatccgtctgtgaccggaacggtta

SEQ ID NO: 20019 - DNA, 75 bp, synthetic construct
  source 1..75: mol_type = other DNA
ccttttaatggtacattgaatttctcaattaaaaataccggaggatgccgtccttctgcacagtctctggaaata

SEQ ID NO: 20020 - DNA, 75 bp, synthetic construct
  source 1..75: mol_type = other DNA
cagcggcatcatcgaagaacgcggcgaaaacctcagaaacgaatgcagctaacagcgcacaggcggcagcgtcct

SEQ ID NO: 20021 - DNA, 75 bp, synthetic construct
  source 1..75: mol_type = other DNA
agcagtcattatgccagtttctttcgcgtgcataagccgctgcgtagctatgtcaatccgatcatgccaatctac

SEQ ID NO: 20022 - DNA, 75 bp, synthetic construct
  source 1..75: mol_type = other DNA
ggagagccacaggtcggcccttcatctgagccggattggtactacgtcatcgtactggccgggcaatccaatgcc

SEQ ID NO: 20023 - DNA, 75 bp, synthetic construct
  source 1..75: mol_type = other DNA
ttacagccatgacacaggctgaactgacccggaaagtgaatgaatatcttgcgaaggggtggcatcttcaggggg

SEQ ID NO: 20024 - DNA, 75 bp, synthetic construct
  source 1..75: mol_type = other DNA
agcgaaacgaatgccaaagccagtgaaactgcggcaaaaaacagccaggttgcagcagcccaaagcgagagcgcg

SEQ ID NO: 20025 - DNA, 75 bp, synthetic construct
  source 1..75: mol_type = other DNA
cggtttcgcaggttggcggcagcgtggacgctgcgcgcgggtcactggagagccttgcccgttttatccgtaata

SEQ ID NO: 20026 - DNA, 75 bp, synthetic construct
  source 1..75: mol_type = other DNA
cgggtgtggcggacggtttactaccggctggccactgaagaagaaatttcaggcaggaagagcaccaatcagatt

SEQ ID NO: 20027 - DNA, 75 bp, synthetic construct
  source 1..75: mol_type = other DNA
ttcatccactgtcataaaggcactatcggcgcaatccggcgtgtggtggagccgctcggctatctcatcaacgtg

SEQ ID NO: 20028 - DNA, 75 bp, synthetic construct
  source 1..75: mol_type = other DNA
gtccggcacatattgatgcttttggcgaactgctgcgccggaagggatgcaggggcttttttatccatacggggc

SEQ ID NO: 20029 - DNA, 75 bp, synthetic construct
  source 1..75: mol_type = other DNA
tcagcgggcataaaacagaaaatcaggtgttgatttacgatcgtaaaacaaaaatcacaccaacactggatttgc

SEQ ID NO: 20030 - DNA, 75 bp, synthetic construct
  source 1..75: mol_type = other DNA
cgctgcgtgcccgctgcccgtattttgaaaaccgggtggcaggcgcggcacagttcaaaaatctgccggaggtcg

SEQ ID NO: 20031 - DNA, 75 bp, synthetic construct
  source 1..75: mol_type = other DNA
agcaaaataaaacacactttattgctgaagtcccttccctctcagggataatggaagaagccaaagatgaactac

SEQ ID NO: 20032 - DNA, 75 bp, synthetic construct
  source 1..75: mol_type = other DNA
atgagtaattcactgttaccgccatcagccagccgtttcatgcgttgcgccgaagctgtcggagcgcgcattaca

SEQ ID NO: 20033 - DNA, 75 bp, synthetic construct
  source 1..75: mol_type = other DNA
ccgtgtacaaagtagcgacgtttttattgcccgctcacaccacggctccgtctctaaagaacaacgagcaatcac

SEQ ID NO: 20034 - DNA, 75 bp, synthetic construct
  source 1..75: mol_type = other DNA
agtttgctactgttaatgcataccttaacagttgtgggaaaaccatcttttctacaaaagaggagttttcaaaag

SEQ ID NO: 20035 - DNA, 75 bp, synthetic construct
  source 1..75: mol_type = other DNA
taaaacatttgatctccgtaagaattttttaaatcagtgttcaacggcagacccggctgcaatctcactgatcat

SEQ ID NO: 20036 - DNA, 75 bp, synthetic construct
  source 1..75: mol_type = other DNA
ttctcagacgaagtgatgactggaaggatggccgccgcagtcttcacactgatgatacggatgtgcttctccgga

SEQ ID NO: 20037 - DNA, 75 bp, synthetic construct
  source 1..75: mol_type = other DNA
gacggtggagcggctggcggcacagatagagccggtttatttgcctgagcgaaaaatacatctttatcactgtga

SEQ ID NO: 20038 - DNA, 75 bp, synthetic construct
  source 1..75: mol_type = other DNA
gctgccgtcgagtgtgtcatttccgatacctgtatcgcgggtatggctgaagccgctgcttgcgaagaaaaattc

SEQ ID NO: 20039 - DNA, 75 bp, synthetic construct
  source 1..75: mol_type = other DNA
gacctcattgacccagatataatatcaaaaggtttaattcctcattttgtcgattatctgacagaaagagtttat

SEQ ID NO: 20040 - DNA, 75 bp, synthetic construct
  source 1..75: mol_type = other DNA
aaataccagtcattgtggtgaaaaaacgtcgaactttttcggaaccttccctatccgaaaaaacagatattatcg

SEQ ID NO: 20041 - DNA, 75 bp, synthetic construct
  source 1..75: mol_type = other DNA
ggtatccggctggaggcggtgtggctgacacacgacccggcctacccggatgaacagccgactgcgccgctggcg

SEQ ID NO: 20042 - DNA, 75 bp, synthetic construct
  source 1..75: mol_type = other DNA
cgcactccttgtctggcagcagcgagcacatcagcaccgctacttagcctgccatgttctgctgacctcagacac

SEQ ID NO: 20043 - DNA, 75 bp, synthetic construct
  source 1..75: mol_type = other DNA
gttaccctgtaccacaacgatttaacctgcgaagccgacacccttggcagttgcggctacgtatacatcgccatt

SEQ ID NO: 20044 - DNA, 75 bp, synthetic construct
  source 1..75: mol_type = other DNA
gtatgcaaaagggctgacctgcgaagccgacaccctcggcagttgtggttacgtttatctggcggtttatccgac

SEQ ID NO: 20045 - DNA, 75 bp, synthetic construct
  source 1..75: mol_type = other DNA
attatcccgacgacaacaacgaccgcccctggtgggggctaccctgcaccgtgacgccctgtttcggggcacgtc

SEQ ID NO: 20046 - DNA, 75 bp, synthetic construct
  source 1..75: mol_type = other DNA
tgctgcgtcctgccgtcatgatgatgtcgttgtcagtgctgagtctgacggcacaggcggatgaactgatgaagt

SEQ ID NO: 20047 - DNA, 75 bp, synthetic construct
  source 1..75: mol_type = other DNA
acgttacagccccccgacgcagccactggtggtggacggtgccgggatgcctggcaatggtgttactgaacgcag

SEQ ID NO: 20048 - DNA, 75 bp, synthetic construct
  source 1..75: mol_type = other DNA
cgtccgggacattctactccaattccgcagaaacatcagcaggcatcaaaagcgaaatcacaccaactcagatag

SEQ ID NO: 20049 - DNA, 75 bp, synthetic construct
  source 1..75: mol_type = other DNA
gccctatgcgcgggtggtggaaagcacctggctgcgtgatgtgctctcctggattctgccggcggtggccttctt

SEQ ID NO: 20050 - DNA, 75 bp, synthetic construct
  source 1..75: mol_type = other DNA
accctgacggattccgttggcgaccttaaagacgatgccctgctgtggaatggcaccgcgttcagcgccgcgcac

SEQ ID NO: 20051 - DNA, 75 bp, synthetic construct
  source 1..75: mol_type = other DNA
ccttcagtgcgaagatgattccgcaaaacggaaaatgaccgaaattctgtctgatgagttttatgctgctgaaaa

SEQ ID NO: 20052 - DNA, 75 bp, synthetic construct
  source 1..75: mol_type = other DNA
ctgcacccggacagtacactcacagtgtggccggataaccgcatcgcggaggatgcgcactatgtctaccgccac

SEQ ID NO: 20053 - DNA, 75 bp, synthetic construct
  source 1..75: mol_type = other DNA
aaaacgtttctttcgatggcacagaaggtgatgctaataccctgaaagatggtgataatgtgctgcattatactg

SEQ ID NO: 20054 - DNA, 75 bp, synthetic construct
  source 1..75: mol_type = other DNA
gtcagccggtgagcgtcaggaagaccaggcgcatgctgccctgctggcgcttgaaaccgagctccggacgctgga

SEQ ID NO: 20055 - DNA, 75 bp, synthetic construct
  source 1..75: mol_type = other DNA
tttacggatatcgccacgcagcttgccggtggtcagaatccctggctcatcctgctgcaacagggcggtcaggtg

SEQ ID NO: 20056 - DNA, 75 bp, synthetic construct
  source 1..75: mol_type = other DNA
tgttaatcacacctctggcacgctacgcaaaacagccgttattgatacgcactcgccgcctgttaggcttatggt

SEQ ID NO: 20057 - DNA, 75 bp, synthetic construct
  source 1..75: mol_type = other DNA
tcatcagtccccggattgccgacaggatcaccaatggcgggcgcaactggttgtcgtttaactggcccagctacc

SEQ ID NO: 20058 - DNA, 75 bp, synthetic construct
  source 1..75: mol_type = other DNA
gcaaggtatccattacccgctcgcaactggcaatgctcctcgataagctggactggcgtcagccaaaaacatcca

SEQ ID NO: 20059 - DNA, 75 bp, synthetic construct
  source 1..75: mol_type = other DNA
ctccctgacgtgggggagcaggttgaggtgctgctcgatgccaacggcgaggatggtgttattctgggcgcggtg

SEQ ID NO: 20060 - DNA, 75 bp, synthetic construct
  source 1..75: mol_type = other DNA
ctccgcaatgcgatgaaaagcgccaaaggtccaggcaacttccgcaacctgtttatgtactcacctaacggcaaa

SEQ ID NO: 20061 - DNA, 75 bp, synthetic construct
  source 1..75: mol_type = other DNA
actgcagaaaagattaacagaattaaataattgggcagatattgaaataataaaatttgggaattacactattta

SEQ ID NO: 20062 - DNA, 75 bp, synthetic construct
  source 1..75: mol_type = other DNA
ctgcggcgacgaaacagatccagcataaaaaccagacttcagccgaagcattcagcttcggtgatcccgttcctg

SEQ ID NO: 20063 - DNA, 75 bp, synthetic construct
  source 1..75: mol_type = other DNA
gtacgctgctgaaaatggtttcagtgtgatcagcagttcactgggcatttcacgctggaaaaatatgcagcaggt

SEQ ID NO: 20064 - DNA, 75 bp, synthetic construct
  source 1..75: mol_type = other DNA
gcagagcggcaacggaaattaaaaagtttgaaaaacgcgatctggcacaggcggtgattaacgccgcatacctgg

SEQ ID NO: 20065 - DNA, 75 bp, synthetic construct
  source 1..75: mol_type = other DNA
accggatattaatcaggagatctacggcctgcctggctatctttctgctattccatccgctctgctcaacgagtc

SEQ ID NO: 20066 - DNA, 75 bp, synthetic construct
  source 1..75: mol_type = other DNA
atgcacgcaaaagaagaaggtatcatcagagcactgaaagaaatttcaaagatggaaagcgaagtagcgaaaaaa

SEQ ID NO: 20067 - DNA, 75 bp, synthetic construct
  source 1..75: mol_type = other DNA
aacgtcaacaatcctgaagctcaggctgcgtatggcagagcaacagatgctattaataaaatagaatcagccttg

SEQ ID NO: 20068 - DNA, 75 bp, synthetic construct
  source 1..75: mol_type = other DNA
cggaaaatcagtatgtggtcctgaaagaggccgccacgaaacggcagttatctgagcaggaaaaatccctgctgg

SEQ ID NO: 20069 - DNA, 75 bp, synthetic construct
  source 1..75: mol_type = other DNA
ggcgatcacttatcgtgaaaacttcagccagcgcgaaggaatgctgatctggcccgactttactggctgggacac

SEQ ID NO: 20070 - DNA, 75 bp, synthetic construct
  source 1..75: mol_type = other DNA
gggtgcgatgtacctgaaatcagaggatggtcaggactggtatgagtgtcagtcgttattttcagcagagacgct

SEQ ID NO: 20071 - DNA, 75 bp, synthetic construct
  source 1..75: mol_type = other DNA
caaacgccagctggctgagctgggcgacaagatagaacaccagaagcggctgaatgagctggcacagcaggcggc

SEQ ID NO: 20072 - DNA, 75 bp, synthetic construct
  source 1..75: mol_type = other DNA
tatcgtctgatgcgcgggtatgcggaaggtggttatgtcggcggtgccggaagtccggcgcagatgcggcgggcg

SEQ ID NO: 20073 - DNA, 75 bp, synthetic construct
  source 1..75: mol_type = other DNA
acagcaccggctggggcgcgacatccgtctgtctgccatttatgccgctttgcatgtggaaggcgtgcagcgtgt

SEQ ID NO: 20074 - DNA, 75 bp, synthetic construct
  source 1..75: mol_type = other DNA
acctcgctggcggtggcgacaggtgcgctggcgtacgcctggtaccagggggattccacgctttcagcgtttaat

SEQ ID NO: 20075 - DNA, 75 bp, synthetic construct
  source 1..75: mol_type = other DNA
tgttcaacgtgtggaactggcttctccgctggcggatgtggttctgaacaaaacgcaggcggcatcatgtacgca

SEQ ID NO: 20076 - DNA, 75 bp, synthetic construct
  source 1..75: mol_type = other DNA
cgatgggcggcgatcttgaccatctcgctgctaactacaacgtgaaacgcctgacggtgacacctgctgatgatg

SEQ ID NO: 20077 - DNA, 75 bp, synthetic construct
  source 1..75: mol_type = other DNA
ggtggtgcttacggtcctaagccgtgaaggcgacggaacagcagaaaaagacctgctggatgtggtggagaaagc

SEQ ID NO: 20078 - DNA, 75 bp, synthetic construct
  source 1..75: mol_type = other DNA
cggttacttacccatcacccgagtcgttggctctggttgctgatgtgcaataccacgaaccatatctgtcagccg

SEQ ID NO: 20079 - DNA, 75 bp, synthetic construct
  source 1..75: mol_type = other DNA
gggagtgggattttaaggaaatgctctggacagtaccgaaagagcacagcaaaacgaaggtcgccatattcaggc

SEQ ID NO: 20080 - DNA, 75 bp, synthetic construct
  source 1..75: mol_type = other DNA
agtgggtaatgctgaaattgtgccattcagcccacgcaggtatctctatcatgcctatctggcttatatgagggc

SEQ ID NO: 20081 - DNA, 75 bp, synthetic construct
  source 1..75: mol_type = other DNA
cagcaaaatattcttgtccagatgcttggggatctgccggtcggatttatttaccgtgactgtcagggcagcgct

SEQ ID NO: 20082 - DNA, 75 bp, synthetic construct
  source 1..75: mol_type = other DNA
gccgtaaccgtcgtcgccgctacagctcatattgcggagaaatcggaccggctccggataaccttatcgccagag

SEQ ID NO: 20083 - DNA, 75 bp, synthetic construct
  source 1..75: mol_type = other DNA
aaatgacgaaccggcgtcatgaggaaaactggaaactcagggcagaagcatgcagaaaaaaagggaaacctgttc

SEQ ID NO: 20084 - DNA, 75 bp, synthetic construct
  source 1..75: mol_type = other DNA
tcggcggagaggccagcacaaaccggactgcgccactgctgtgtgaaccggacgcacaaaaacgggcgaccggat

SEQ ID NO: 20085 - DNA, 75 bp, synthetic construct
  source 1..75: mol_type = other DNA
tcttaagcttgtagcggctagtgaatgtagtgatgaagagaaagggctggctctgcagtgggtttctgaactgac

SEQ ID NO: 20086 - DNA, 75 bp, synthetic construct
  source 1..75: mol_type = other DNA
aaattatccctgcgacagactggtattttcgtcacgataatgtctctggtgtaacaggaaagtcaacactatatc

SEQ ID NO: 20087 - DNA, 75 bp, synthetic construct
  source 1..75: mol_type = other DNA
atcttccggcaaagacaaatttcaccggaaattatgatgacgaattaaaaccccgcgttgaatgccgtcctgatg

SEQ ID NO: 20088 - DNA, 75 bp, synthetic construct
  source 1..75: mol_type = other DNA
ttacaccctcagaattgtgcgaaacggaaaaaaacttgaagccggaaattattttgccgtgctgggattccgggt

SEQ ID NO: 20089 - DNA, 75 bp, synthetic construct
  source 1..75: mol_type = other DNA
cgggatatcaataacgaacaaaataaacgagcactggcagccatattctttatggcaaaaattccggctgaacgt

SEQ ID NO: 20090 - DNA, 75 bp, synthetic construct
  source 1..75: mol_type = other DNA
gaagcagattaaatcacagttgccacacctgaccgctgtaatggtgaaagaaacctgcacagcgggttgcattta

SEQ ID NO: 20091 - DNA, 75 bp, synthetic construct
  source 1..75: mol_type = other DNA
agagcatggtctgctgcagctggataaacatgatgtggatctggccgccgaactgaatgaattacgtgagctgtt

SEQ ID NO: 20092 - DNA, 75 bp, synthetic construct
  source 1..75: mol_type = other DNA
tacaccttgagcgtgacagtgactgtgtgaacgtgatgattacgaatacgatgtccggccaggttcccgctaatc

SEQ ID NO: 20093 - DNA, 75 bp, synthetic construct
  source 1..75: mol_type = other DNA
atctgctgaaaaaagtgcaattcagggagacagcatgacaatgatggatatgagcagtcacgatcaggccgcaat

SEQ ID NO: 20094 - DNA, 75 bp, synthetic construct
  source 1..75: mol_type = other DNA
gcagcttgccggtggtcagaatccctggctcatcctgctgcaacagggcggtcaggtgaaggactccttcggcgg

SEQ ID NO: 20095 - DNA, 75 bp, synthetic construct
  source 1..75: mol_type = other DNA
taagtctgtaaaagatcttgctgataccaaagcgccaatagaaagcccgagtctgacaggaacgccaaccgcgcc

SEQ ID NO: 20096 - DNA, 75 bp, synthetic construct
  source 1..75: mol_type = other DNA
cctgttgagcacggctaacacatggagttcacgccagactttcaacggcgggatcaccggggcgctggcagggaa

SEQ ID NO: 20097 - DNA, 75 bp, synthetic construct
  source 1..75: mol_type = other DNA
tatcactcaactgaccggcctgaccgataagtggttttacaaactcatcaaggatggtgactttcctgcgcccat

SEQ ID NO: 20098 - DNA, 75 bp, synthetic construct
  source 1..75: mol_type = other DNA
atgaccagatggtcgacatggcatttatcactcaactgaccggcttaaccgataagtggttttacaaactcatca

SEQ ID NO: 20099 - DNA, 75 bp, synthetic construct
  source 1..75: mol_type = other DNA
cggccgggaatgagttccgcgcaactgcgccagcaactacagggacgttatcaggaactgcgcaatgagttatga

SEQ ID NO: 20100 - DNA, 75 bp, synthetic construct
  source 1..75: mol_type = other DNA
catgtcttcgccgcaccaaaacaggatgctgagcatacctacgaatcactggttcgcgccttccgctacttcggt

SEQ ID NO: 20101 - DNA, 75 bp, synthetic construct
  source 1..75: mol_type = other DNA
tgtggtcagccggtatcgatacgaatatcgctggatgacgagttgcggatctacagtaatgagaaactggtggcc

SEQ ID NO: 20102 - DNA, 75 bp, synthetic construct
  source 1..75: mol_type = other DNA
tgctcagaatgtgggataaacgtcagcggggttataaagcgatggggtacaggattatagctgacggcgatgaat

SEQ ID NO: 20103 - DNA, 75 bp, synthetic construct
  source 1..75: mol_type = other DNA
gtaaactgagaactgtcgcttcagaaggtaatgttgcacgctttacccagcgttttgggcgttttgttgatgcga

SEQ ID NO: 20104 - DNA, 75 bp, synthetic construct
  source 1..75: mol_type = other DNA
aactgaagaaagtaacggccatcgtgtcagtctgccgttatcggttttcgatccccaggactaccatccactgct

SEQ ID NO: 20105 - DNA, 75 bp, synthetic construct
  source 1..75: mol_type = other DNA
ctcaattatgccaacgaatttgatctgaatatcaaaggctggctcctcaacgaacccaattaccgcctgggactc

SEQ ID NO: 20106 - DNA, 75 bp, synthetic construct
  source 1..75: mol_type = other DNA
catcttcagaactaacacaggctgaagctgtgaaggttcttggattcctgaaacagaaagtcacagagcagaagg

SEQ ID NO: 20107 - DNA, 75 bp, synthetic construct
  source 1..75: mol_type = other DNA
gttgcattatttcgtcggttgtttcgtgggcgtgatgatgtatgggcacttagatgggaaagtaaaaccagcggc

SEQ ID NO: 20108 - DNA, 75 bp, synthetic construct
  source 1..75: mol_type = other DNA
aaaatcaacagcggacaggttgatccgctggcggcccattatatatctcccgtcgatgaggacagctatacgctg

SEQ ID NO: 20109 - DNA, 75 bp, synthetic construct
  source 1..75: mol_type = other DNA
ggcggctgccagcatccacgtgatggagctggaccgcgacgtgtggctggaaaatacccagccgatgctgtcaca

SEQ ID NO: 20110 - DNA, 75 bp, synthetic construct
  source 1..75: mol_type = other DNA
atcttgaagcactggcccgtgccagaagagatgagcaggacgacgatgagatgagtctggaagaaatcgcggctg

SEQ ID NO: 20111 - DNA, 75 bp, synthetic construct
  source 1..75: mol_type = other DNA
gttagcggtaaaggatgggtttatgagatcacttccttatccggagtacaggccagaacgccgacgttttattac

SEQ ID NO: 20112 - DNA, 75 bp, synthetic construct
  source 1..75: mol_type = other DNA
tgaacgccttagagcaattgcagcaggactatacgcagcggctgaaagactgggagagcgccttcacggatttgc

SEQ ID NO: 20113 - DNA, 75 bp, synthetic construct
  source 1..75: mol_type = other DNA
cccggaacccgccggttgtcgctatatgcagctcacggcgaggctgtgctgacggacggctcactgtggacgctg

SEQ ID NO: 20114 - DNA, 75 bp, synthetic construct
  source 1..75: mol_type = other DNA
catgggaaacattgaaagtgataattcctcagggagaaagtcgtcaactactgattaacggcattgaggcttatg

SEQ ID NO: 20115 - DNA, 75 bp, synthetic construct
  source 1..75: mol_type = other DNA
ttagtacgtgcaggtgcaggtattcctcttagtgaacgtataacatacgtgagtgaagcggaagataatcatcgt

SEQ ID NO: 20116 - DNA, 75 bp, synthetic construct
  source 1..75: mol_type = other DNA
tccataacaaaagaggatttacttttcgtaaggagagatttgttgaccggttaccaaaagctttctaatggaaag

SEQ ID NO: 20117 - DNA, 75 bp, synthetic construct
  source 1..75: mol_type = other DNA
atgactgaacagcaaatccggctggtctgccgtcagtgcatggaccgctgccgggcgggtgaaacgtggcccccg

SEQ ID NO: 20118 - DNA, 75 bp, synthetic construct
  source 1..75: mol_type = other DNA
caacaaggggaaaacgcacgatgtgctgaccggaagtgatgacggtcgccacagcaacacgtctctggcgtgggg

SEQ ID NO: 20119 - DNA, 75 bp, synthetic construct
  source 1..75: mol_type = other DNA
cgctttattcaaccgccttcgtgcagatggcgatcagattttcccgctgggatgggcaatgattttacagcgcgc

SEQ ID NO: 20120 - DNA, 75 bp, synthetic construct
  source 1..75: mol_type = other DNA
gatgaagggaaaaaaagagaataccttgcgtattcttgatgcaacaaataaccaattgccacaggatcgggaaag

SEQ ID NO: 20121 - DNA, 75 bp, synthetic construct
  source 1..75: mol_type = other DNA
cgatattctccgcgcccgcaaagccaccgggttgatgactcgcaacgattacagaacggtgaccgacatcaccac

SEQ ID NO: 20122 - DNA, 75 bp, synthetic construct
  source 1..75: mol_type = other DNA
cattcagacactgggtgatgaattgctacaaaaagctgagaagaaaaaaaacattgtctggcgttatgaaaattt

SEQ ID NO: 20123 - DNA, 75 bp, synthetic construct
  source 1..75: mol_type = other DNA
acaccctcgacgcgctttgcgcccggtattacgggcgcactgagggcgtggtcgagacggtgctgcaggctaatc

SEQ ID NO: 20124 - DNA, 75 bp, synthetic construct
  source 1..75: mol_type = other DNA
ggcaacgacaacgacgagtatggttacccgacaacaaaacaggatggtacgacttttacaatggcgaatggttct

SEQ ID NO: 20125 - DNA, 75 bp, synthetic construct
  source 1..75: mol_type = other DNA
tggaatgatgatcatactgtcaatgaaccatggatgtatccggaagtaacacccgcgattcgtagtgcaattgag

SEQ ID NO: 20126 - DNA, 75 bp, synthetic construct
  source 1..75: mol_type = other DNA
cttttgaggtctgccagaataacaaagcggcatggcttcagcgcaaaaatgaactggcggcagccgaacaggaat

SEQ ID NO: 20127 - DNA, 75 bp, synthetic construct
  source 1..75: mol_type = other DNA
tggaagacgttgccctttcaggtggcaataatgaactgcatgggtaatgaccggatccgcacaattaatcttata

SEQ ID NO: 20128 - DNA, 75 bp, synthetic construct
  source 1..75: mol_type = other DNA
gacaacgggcaagccgcacgtctgaacaaggacttcttcgctaacgccaaagcccagagctggtggcggttacgt

SEQ ID NO: 20129 - DNA, 75 bp, synthetic construct
  source 1..75: mol_type = other DNA
atgcaactgaattccaccgaaatcagcgaactgatcaagcagcgcattgctcagttcaatgttgtgagtgaagct

SEQ ID NO: 20130 - DNA, 75 bp, synthetic construct
  source 1..75: mol_type = other DNA
ttttgttgtcttctttggttatgggctgtacgcaacataaaacagatatgcctcgacagttggttaaggcattac

SEQ ID NO: 20131 - DNA, 75 bp, synthetic construct
  source 1..75: mol_type = other DNA
cacataaggaaactttaaaagaaatcgggtgtaaatgggcggcaaagaaaaaacaatggttttatcgtccagacg

SEQ ID NO: 20132 - DNA, 75 bp, synthetic construct
  source 1..75: mol_type = other DNA
gaaaatcaagactttatgattatttcccaagttcgggaaaaaataggcagaggccgtcctgcaaaagactaccac

SEQ ID NO: 20133 - DNA, 75 bp, synthetic construct
  source 1..75: mol_type = other DNA
aatacatgcgacgcggaagcgatcttgaatcatggtggtatgtgcaggatggcaaggatgcgtttcagtttcgcc

SEQ ID NO: 20134 - DNA, 75 bp, synthetic construct
  source 1..75: mol_type = other DNA
atgttgttaaatcgtaaaaataactttatcgctgcgattgttctgggggcgtttctcctgtctggctgtggtgcg

SEQ ID NO: 20135 - DNA, 75 bp, synthetic construct
  source 1..75: mol_type = other DNA
accactggaaagcctaaccctgcgccagcgtatcaccgataaatatctggtgaatctggccgaatcggtcaacag

SEQ ID NO: 20136 - DNA, 75 bp, synthetic construct
  source 1..75: mol_type = other DNA
gtacgccgtcatttttccagtctggaggcggatgccagaaaaaccgccagtactgttgaacaggggctgagccga

SEQ ID NO: 20137 - DNA, 75 bp, synthetic construct
  source 1..75: mol_type = other DNA
tgggcggtgccggaagtccggcgcagatgcggcgggctgaaggcattaattttaatcagaacaatcacgtggtga

SEQ ID NO: 20138 - DNA, 75 bp, synthetic construct
  source 1..75: mol_type = other DNA
gcagacaaaatggatttgcgggagtcccagacctggctgaacagcggttatgaaggtgccattgccggtgcagca

SEQ ID NO: 20139 - DNA, 75 bp, synthetic construct
  source 1..75: mol_type = other DNA
ctcccggcaggcgaaaaggctgccctaattatcctcccgaatttaaacagctgctcgttgctgcctcctgtgaac

SEQ ID NO: 20140 - DNA, 75 bp, synthetic construct
  source 1..75: mol_type = other DNA
taatcagtcatgttagtgaaaatgtaaaggcgatgaaatttgcagtaaaacagacagcattcaaaaattctctcg

SEQ ID NO: 20141 - DNA, 75 bp, synthetic construct
  source 1..75: mol_type = other DNA
cctgcagggcatgttctacgtgttagcctggttgaccgtgaatgtcagaaggtgatttgtgaaccgctgggccgt

SEQ ID NO: 20142 - DNA, 75 bp, synthetic construct
  source 1..75: mol_type = other DNA
atgaatatatcagagcaacaactgaataatatggtggccgccgtttcggttgcgctgcagcctctggtcagggtt

SEQ ID NO: 20143 - DNA, 75 bp, synthetic construct
  source 1..75: mol_type = other DNA
ctacaaaatctcagtgaagctgaaattgttctgactttcaacgcggaaatgcgcggattggcgaactactacagt

SEQ ID NO: 20144 - DNA, 75 bp, synthetic construct
  source 1..75: mol_type = other DNA
tttaattcccatggttgtaacggttgctgggatgatacatcactgaattttgaccataaggattttctctggtgt

SEQ ID NO: 20145 - DNA, 75 bp, synthetic construct
  source 1..75: mol_type = other DNA
ggccaaaaacgtggctggagatgctgcagaagtctcatccataaccaagcccggtgcagaaattcatgagtatca

SEQ ID NO: 20146 - DNA, 75 bp, synthetic construct
  source 1..75: mol_type = other DNA
gaggaattgcagtccagtcagtaccacgatctggcagaggcactgagatcagtggagggggtagatgttgaaagt

SEQ ID NO: 20147 - DNA, 75 bp, synthetic construct
  source 1..75: mol_type = other DNA
tgtgttcccaggggataggagaagggcactgttgcaaatagtcggtggtgataaacttatcatccccttttgctg

SEQ ID NO: 20148 - DNA, 75 bp, synthetic construct
  source 1..75: mol_type = other DNA
ggatcacgccgggtgagcacattattagtgccgactctgcgctcagcagaaatatccggcagtgtttctgccttt

SEQ ID NO: 20149 - DNA, 75 bp, synthetic construct
  source 1..75: mol_type = other DNA
atgaaactggccctgacgctggaagcccacagcgttaacgtacagtcactgaacatggggcgaatcgtcgttgac

SEQ ID NO: 20150 - DNA, 75 bp, synthetic construct
  source 1..75: mol_type = other DNA
atgaaactggccctgacgctggaagccgacagcgttaacgtgcaggcgctgaacatggggcgaattgtcgttgac

SEQ ID NO: 20151 - DNA, 75 bp, synthetic construct
  source 1..75: mol_type = other DNA
gctggaaaatctacgttaaaaatggtctggtgacctgggaaatccaacagaccgactacccgcgcactcgccctg

SEQ ID NO: 20152 - DNA, 75 bp, synthetic construct
  source 1..75: mol_type = other DNA
ttaactactacggcaccgtaggttctaaccgcgatgagtttgttgtagtgcgtaagatgaagaacattgactggt

SEQ ID NO: 20153 - DNA, 75 bp, synthetic construct
  source 1..75: mol_type = other DNA
atgttagcgcttaacgtcaatattcctttcagccactggctgcgttctgacagtaaatctcagtggcgacatgcc

SEQ ID NO: 20154 - DNA, 75 bp, synthetic construct
  source 1..75: mol_type = other DNA
tctccaccgggatgctgtgtgcttccgcgtcgagtaacgaaaccggctatttaacgcaaaaattctcccgcgcgc

SEQ ID NO: 20155 - DNA, 75 bp, synthetic construct
  source 1..75: mol_type = other DNA
cacaggggacatttccgtcagggcgttttcgaactgcacggctgtcgcgtcgtgtggccggaatctttgtggtaa

SEQ ID NO: 20156 - DNA, 75 bp, synthetic construct
  source 1..75: mol_type = other DNA
taatttcattctcggacgaagttctgccggcacgttgtcattgtcggtggatgaacgcggtttacgttatgacat

SEQ ID NO: 20157 - DNA, 75 bp, synthetic construct
  source 1..75: mol_type = other DNA
aagaaaaaatcagcaaaatgccaaaaggttctgttcctgccctgcagcaagagatgctgcgacgtgtcagtaaac

SEQ ID NO: 20158 - DNA, 75 bp, synthetic construct
  source 1..75: mol_type = other DNA
tcggcctcactaaaaacgatttacaaggggctacgcttgccatcgtccctggcgacccggatcgtgtggaaaaga

SEQ ID NO: 20159 - DNA, 75 bp, synthetic construct
  source 1..75: mol_type = other DNA
gggtaataacgtctttgtgttccgcaacactgcatctggcgacatcatgaccgcgcgcggcggcgccttccagaa

SEQ ID NO: 20160 - DNA, 75 bp, synthetic construct
  source 1..75: mol_type = other DNA
gcaccccgactggcagaacgccaaagagggcgggacggtggcctgggtgttcgactgcatcaaaattgacccgtt

SEQ ID NO: 20161 - DNA, 75 bp, synthetic construct
  source 1..75: mol_type = other DNA
atgagcgcatcggcactggtttgcctcgcccctggtagtgaagagactgaagccgtcaccactatcgatctgctg

SEQ ID NO: 20162 - DNA, 75 bp, synthetic construct
  source 1..75: mol_type = other DNA
tcacggggtcaatgactggccccaccggggtgattgacctcggcgccggttctgccaactccgaagagggcatta

SEQ ID NO: 20163 - DNA, 75 bp, synthetic construct
  source 1..75: mol_type = other DNA
ggcagaagcccgggcaagtaaagcactggctgaggccgtacaggcccagcaggatgtggaaaccacccgccagac

SEQ ID NO: 20164 - DNA, 75 bp, synthetic construct
  source 1..75: mol_type = other DNA
gttacagaagcgactgcaggagcttaacgactggctgggcgaagaaataattcgcttcgaaccttatatgtttta

SEQ ID NO: 20165 - DNA, 75 bp, synthetic construct
  source 1..75: mol_type = other DNA
agactgccgtattcgttcaaacaactgttacggtcaggtatcccgtcgtgaccaggagagcgcgctggcgtgctg

SEQ ID NO: 20166 - DNA, 75 bp, synthetic construct
  source 1..75: mol_type = other DNA
gatgagcgttctcgcaagagagctggttgccagcggcgatgtatacaactctggttacgggttattcccgtctga

SEQ ID NO: 20167 - DNA, 75 bp, synthetic construct
  source 1..75: mol_type = other DNA
gatgagcattcttgccagagagctggttgccagtggttatgtatacaactccggctacgggttattcccgtctga

SEQ ID NO: 20168 - DNA, 75 bp, synthetic construct
  source 1..75: mol_type = other DNA
gtccctataacattggccccggtaagtgtttcccgtcgacgttttataagcggctgaatgccggtgatcgtaaag

SEQ ID NO: 20169 - DNA, 75 bp, synthetic construct
  source 1..75: mol_type = other DNA
aggcgctggagtgggtggagcgcaatattaaagtaccgctgaccgaaccccagaaggcgggtatcgcgtcatttt

SEQ ID NO: 20170 - DNA, 75 bp, synthetic construct
  source 1..75: mol_type = other DNA
caactggacgaagaaagaaaacaagtgatgaaaattatgcagaaggtgtgggaagacgacagctggctgcattaa

SEQ ID NO: 20171 - DNA, 75 bp, synthetic construct
  source 1..75: mol_type = other DNA
aagaccgccagcaatactggaatgcgctaccgctggaaaaagcgggcgcagccaaaattatcgagcagccacagc

SEQ ID NO: 20172 - DNA, 75 bp, synthetic construct
  source 1..75: mol_type = other DNA
cagtggcaggatgttctggaggagtgccggcagacagaggccgggccagaagaacggctgcgtattgcactgctg

SEQ ID NO: 20173 - DNA, 75 bp, synthetic construct
  source 1..75: mol_type = other DNA
gtgcatgcgaagcgattcgctggtggattaaggatggcggacgcgattgccgcattcgttcaaataactgttacg

SEQ ID NO: 20174 - DNA, 75 bp, synthetic construct
  source 1..75: mol_type = other DNA
gaccgggagcatgtgacgattgcgagatacgaatgattattcgtctggcgagggggaaaacaataactgctctca

SEQ ID NO: 20175 - DNA, 75 bp, synthetic construct
  source 1..75: mol_type = other DNA
ttactccagaaaatctcgcattagctttaaccggaaagtcagacctgccagtggagctaaaactgcgaaatgttg

SEQ ID NO: 20176 - DNA, 75 bp, synthetic construct
  source 1..75: mol_type = other DNA
ttcttcgccaccgctgggggcgtctgcgcttatatcgtttcctcggttctgttttgaccgattaccgaatactga

SEQ ID NO: 20177 - DNA, 75 bp, synthetic construct
  source 1..75: mol_type = other DNA
caaagtaagaaaacgtctcggtattaaaggcggtttttactgggctgaagcgaaaaaattatccattgccatctc

SEQ ID NO: 20178 - DNA, 75 bp, synthetic construct
  source 1..75: mol_type = other DNA
atgcgaaaaataattactcatttcaaagttgttttaacgttacttctaccagtaaccgtatctgcccagcagata

SEQ ID NO: 20179 - DNA, 75 bp, synthetic construct
  source 1..75: mol_type = other DNA
cgcacgccgcagtcgtgtggaatgggaaaacagacagcgcaagaagcagggactggatgcactgggtatggatga

SEQ ID NO: 20180 - DNA, 75 bp, synthetic construct
  source 1..75: mol_type = other DNA
ttcttctggtgctgtcggggagtctttcttccgccgtggctgctgataaaaaaggggctgaaaagttctactatc

SEQ ID NO: 20181 - DNA, 75 bp, synthetic construct
  source 1..75: mol_type = other DNA
caacgtgatgtagcagaacttgacgccagatacacaaaggagcttgctgatgctaatgcgactatcgaaagtctc

SEQ ID NO: 20182 - DNA, 75 bp, synthetic construct
  source 1..75: mol_type = other DNA
attacggtcgatggtgttagcgttgagaaggtcagcggctgcgccagagaatttctggtcgtagatggctttctc

SEQ ID NO: 20183 - DNA, 75 bp, synthetic construct
  source 1..75: mol_type = other DNA
tcagaaacgcccattatcttgaaaatggtgcggttgactgcgaggtgttatttgaaggtgaaacggaattcgtcc

SEQ ID NO: 20184 - DNA, 75 bp, synthetic construct
  source 1..75: mol_type = other DNA
cttatacctgcgaggtaacggattctgcagaacagccgcagagcattacctctgatgcgtgtacagtaacggtta

SEQ ID NO: 20185 - DNA, 75 bp, synthetic construct
  source 1..75: mol_type = other DNA
acgttgagtccagagctgatgtggcgcttatgaatgaaaaaacgaccgagctgctcaacctgttaaaagaggaat

SEQ ID NO: 20186 - DNA, 75 bp, synthetic construct
  source 1..75: mol_type = other DNA
aatttctgaaacccgggaagatagtggtggggggcgatgtgcgcctcacaagcgagtcgctgaagctggcgctgg

SEQ ID NO: 20187 - DNA, 75 bp, synthetic construct
  source 1..75: mol_type = other DNA
atgaatccagtatttgcacttattctgacggtttttcttgtttccggagagccagttgatattgcagtcagtgtt

SEQ ID NO: 20188 - DNA, 75 bp, synthetic construct
  source 1..75: mol_type = other DNA
gaaaatacgaacgggagctattaaataaaatatgcattctttcaatgctggcacgtttacgcccgatgcaaaaag

SEQ ID NO: 20189 - DNA, 75 bp, synthetic construct
  source 1..75: mol_type = other DNA
ggaaacaagaacgggagctattggataaaatatgcattgtttcaatgctggcccgtttacgcctgatgcaaaaag

SEQ ID NO: 20190 - DNA, 75 bp, synthetic construct
  source 1..75: mol_type = other DNA
gagcgacagtgttgtacaagggcgataaaatggtgttaaacctagatagatctcgtattccaactgagtgtatag

SEQ ID NO: 20191 - DNA, 75 bp, synthetic construct
  source 1..75: mol_type = other DNA
gtcagaaggaacggataacgggcgacaaccgacacgtaaccacggttatgatgttattgttggtggcgaactgtt

SEQ ID NO: 20192 - DNA, 75 bp, synthetic construct
  source 1..75: mol_type = other DNA
gtgagcgaaattaattaccaggcactgcgtgaggtggcggaacgtgcaattccagcaatggaacgcctgttaatg

SEQ ID NO: 20193 - DNA, 75 bp, synthetic construct
  source 1..75: mol_type = other DNA
agcttattttaaccaatgatggttattcatggcattgcgcactttatgatatattatttcatctggttttacgaa

SEQ ID NO: 20194 - DNA, 75 bp, synthetic construct
  source 1..75: mol_type = other DNA
ggaatgttaagggcgttgccggagataatctgcataaaataggtagtggtactctggatgtaaaaatagcacagg

SEQ ID NO: 20195 - DNA, 75 bp, synthetic construct
  source 1..75: mol_type = other DNA
cgcatggtcatcatcgtcagcagtgtggcctcagtggagctgaccattgacaccacaacggtgatggcgacgcag

SEQ ID NO: 20196 - DNA, 75 bp, synthetic construct
  source 1..75: mol_type = other DNA
atgcaaaatcttaatcctcagcgtaaagccttcctcgatatgttggcgtggtcagaaggaacggataacgggcga

SEQ ID NO: 20197 - DNA, 75 bp, synthetic construct
  source 1..75: mol_type = other DNA
ccttgcgctcaacatcgaaagtcgtggttataccgtctctattttcaaccgttcccgtgaaaagacggaagaagt

SEQ ID NO: 20198 - DNA, 75 bp, synthetic construct
  source 1..75: mol_type = other DNA
cgctgaaaggtccttctattatgcccggtggccagaaagaagcctatgaactggttgcgccgatcctgaccaaga

SEQ ID NO: 20199 - DNA, 75 bp, synthetic construct
  source 1..75: mol_type = other DNA
aaagctgctggcgtatctggctcatcaatttcactatgggaaagcgaccatacagccccgcgcgggcaaaatttg

SEQ ID NO: 20200 - DNA, 75 bp, synthetic construct
  source 1..75: mol_type = other DNA
cgcggatgccctgaacagggatattgcgacaattcacagcaatatcgtgcaggaatacaacacccttaaagggta

SEQ ID NO: 20201 - DNA, 75 bp, synthetic construct
  source 1..75: mol_type = other DNA
cgctgaaaggcccatctatcatgcctggtggccagaaagatgcgtatgaaatggttgtgccaatcctgaccaaga

SEQ ID NO: 20202 - DNA, 75 bp, synthetic construct
  source 1..75: mol_type = other DNA
ttgatatgccggattttgagcgtgaggatgactggtggcgcaacggtcagaacctttacctggacaatatggagg

SEQ ID NO: 20203 - DNA, 75 bp, synthetic construct
  source 1..75: mol_type = other DNA
cacagaaaattattgaagcagccgatgaggttattagtgcgcttgccggaactaacgaggatgttcaccctggta

SEQ ID NO: 20204 - DNA, 75 bp, synthetic construct
  source 1..75: mol_type = other DNA
ccggcctgatacatcagagcaatacgttgcgttaaaaacagctgttcagtctctgatgccactggttattgcaac

SEQ ID NO: 20205 - DNA, 75 bp, synthetic construct
  source 1..75: mol_type = other DNA
gccagcctggcaaccctgacaaaagtcgggcgggatattcttgcgaaatcgaccgttgctgccgttatcgaatac

SEQ ID NO: 20206 - DNA, 75 bp, synthetic construct
  source 1..75: mol_type = other DNA
ggaagaaaaaccaatgcctaatcctcttagcatgtacgcggttgatgctgttgccgctattgcagaggtgagagg

SEQ ID NO: 20207 - DNA, 75 bp, synthetic construct
  source 1..75: mol_type = other DNA
caaggcgctggccggaaaccccggcaagcgagccctgaataaagatgaacctgtttttacgcccatcaaaggtgt

SEQ ID NO: 20208 - DNA, 75 bp, synthetic construct
  source 1..75: mol_type = other DNA
attgcccaggggaacccgatgccggtgccttacggggaaatgctggttggctcccgccgtatatcccaggacatc

SEQ ID NO: 20209 - DNA, 75 bp, synthetic construct
  source 1..75: mol_type = other DNA
agctgcaggtactgcaatcatgcctggttggggtacagcaattggtgctggcgtcggtcttcttggttcactttt

SEQ ID NO: 20210 - DNA, 75 bp, synthetic construct
  source 1..75: mol_type = other DNA
gggcgaggagctacacagtggcgcagcactttccgtacacagaggtgcacgcgttcgcctgcctgacgggcggat

SEQ ID NO: 20211 - DNA, 75 bp, synthetic construct
  source 1..75: mol_type = other DNA
ttgccattcaggaagaccgccacgagctgggcaatgatattactccgcgctttaaggtggagtatgtcgacggct

SEQ ID NO: 20212 - DNA, 75 bp, synthetic construct
  source 1..75: mol_type = other DNA
ggtaacgcccgtgcggatgatctggtccgcaataacggtattgccgcaaacgccgttgaaattcataaagaccat

SEQ ID NO: 20213 - DNA, 75 bp, synthetic construct
  source 1..75: mol_type = other DNA
tggcctcagcacgtatcagaacgaactcgcgctgcaggggcaggactacgaggaggtcatggaacaacaggaata

SEQ ID NO: 20214 - DNA, 75 bp, synthetic construct
  source 1..75: mol_type = other DNA
cgtctggggaatgcccgggcagatgatctggtgcgcaataacgggatagcggctaatgcggtggccctgcataag

SEQ ID NO: 20215 - DNA, 75 bp, synthetic construct
  source 1..75: mol_type = other DNA
gacaactataacaaggcgctgtttgacgccctgacccacgcgggtgtgtgggaagacgacagccaggtgaaaaga

SEQ ID NO: 20216 - DNA, 75 bp, synthetic construct
  source 1..75: mol_type = other DNA
cgttttgtacaggctgtgggtgtctgcgccgcggcggttatctggcaagcgttagtgacggattattatccttca

SEQ ID NO: 20217 - DNA, 75 bp, synthetic construct
  source 1..75: mol_type = other DNA
ttattccggtatcacctggcattattggcagatatgaaacgggcgttgtcagcgcacgcgcactgcataaagcgc

SEQ ID NO: 20218 - DNA, 75 bp, synthetic construct
  source 1..75: mol_type = other DNA
accttcattaagaaagaaaaattttactgacgcatataatgcagcatcttctcatatcgaatactggataggtgc

SEQ ID NO: 20219 - DNA, 75 bp, synthetic construct
  source 1..75: mol_type = other DNA
gcgcgccgttctcctccgggaaggtggcctccgtggtggacaccctgaagctgattattccgcagcaggaagccc

SEQ ID NO: 20220 - DNA, 75 bp, synthetic construct
  source 1..75: mol_type = other DNA
gcgctggccgaagaccaacagaaagcgattgagtcaattaagcaggctgatgcagctgttaagttggcacacgag

SEQ ID NO: 20221 - DNA, 75 bp, synthetic construct
  source 1..75: mol_type = other DNA
atgctggtggagtggggaccggttatcccggaaggtaaggtcgagatcactatcagtaagtacgaaaaagcgagt

SEQ ID NO: 20222 - DNA, 75 bp, synthetic construct
  source 1..75: mol_type = other DNA
gattattgatatcaataacgacgattcgctcgatatcagtatcagcctgaggctcaccgagcgcacgctcgtcaa

SEQ ID NO: 20223 - DNA, 75 bp, synthetic construct
  source 1..75: mol_type = other DNA
aaaaagagccgcaggacgtgccgggcgtggtgataccgccaccgggcgtgagcgagccggtaattaaaaacacct

SEQ ID NO: 20224 - DNA, 75 bp, synthetic construct
  source 1..75: mol_type = other DNA
aagaatatcccggaacccacgccgccggagccggtcacccgcccgatggagctttatatcaatggcgaactggtg

SEQ ID NO: 20225 - DNA, 75 bp, synthetic construct
  source 1..75: mol_type = other DNA
gtttgccatggtttgcttttatcaatgtcagttttgcattgataattttgctgcgccgtgttctgtttaatgacc

SEQ ID NO: 20226 - DNA, 75 bp, synthetic construct
  source 1..75: mol_type = other DNA
ctgttctgctcccgcaaaaacggctgaacaaattatttcagatgccgacgctgcgttataccgggcgaaagaaag

SEQ ID NO: 20227 - DNA, 75 bp, synthetic construct
  source 1..75: mol_type = other DNA
catcagcgcaaaagcccgcggtctcactgaccgtcaggcgcagcgggagtctgaagcgcagcgtcttcgtgacgt

SEQ ID NO: 20228 - DNA, 75 bp, synthetic construct
  source 1..75: mol_type = other DNA
atgaaaacattacccgacacacacatacgggaggcatcgcgctgcccgtctcccgtcaccgtctggcagacactg

SEQ ID NO: 20229 - DNA, 75 bp, synthetic construct
  source 1..75: mol_type = other DNA
aataaagaccttgccacggtcgccagacaaattaacccgtacatcaacgtcgatataccggaaacaacgcgcggc

SEQ ID NO: 20230 - DNA, 75 bp, synthetic construct
  source 1..75: mol_type = other DNA
tggatatccgggtgccggaccatctgataatcggtggcagccaggttttctcctttgcggaacacggtctgcttt

SEQ ID NO: 20231 - DNA, 75 bp, synthetic construct
  source 1..75: mol_type = other DNA
ccgggcgaattcaacgctggcaatggcaataagcaaaggtcgtctgattcgagtaaatcagaacggtaaatttcg

SEQ ID NO: 20232 - DNA, 75 bp, synthetic construct
  source 1..75: mol_type = other DNA
tagcgatgacgcccggtgagcgcagcctcattcagcgggccctgaaaaccctgaaccgccatcttcatgaacccg

SEQ ID NO: 20233 - DNA, 75 bp, synthetic construct
  source 1..75: mol_type = other DNA
gaagctgtcaaaggaaaaatgcgaccgggttaatgccatcgaacgtgacaaggcgctggcatgggtggagaaaaa

SEQ ID NO: 20234 - DNA, 75 bp, synthetic construct
  source 1..75: mol_type = other DNA
gaaggggcgattaagcaaaatatcccgactctgtttactgattcaacagaagcagaggccattaaactgtttgcc

SEQ ID NO: 20235 - DNA, 75 bp, synthetic construct
  source 1..75: mol_type = other DNA
ggagattgaacataatttgtagcgagtgccggaagagcgaagttatgcagcgtgtactggtgttttatcagggaa

SEQ ID NO: 20236 - DNA, 75 bp, synthetic construct
  source 1..75: mol_type = other DNA
ggcgtatgaacataatctgtcgcgagtgccggaaaagcgaagctatgcagcgagtgctggcgttttatcagggga

SEQ ID NO: 20237 - DNA, 75 bp, synthetic construct
  source 1..75: mol_type = other DNA
tctcattctgcgggccctgaaaaccctggaccgtcatcttcatgaacccggtgtggccttcacctccacccgtgc

SEQ ID NO: 20238 - DNA, 75 bp, synthetic construct
  source 1..75: mol_type = other DNA
atgaaacagctttcctttttacccggcgagatgacgccacaggaccggcgtctcattcagcgggcgctcagggct

SEQ ID NO: 20239 - DNA, 75 bp, synthetic construct
  source 1..75: mol_type = other DNA
aggctgatgtcatcatctctaatcgaatgtcagaagagcttaaagatgcagcagacaaggtctacacccgcgatc

SEQ ID NO: 20240 - DNA, 75 bp, synthetic construct
  source 1..75: mol_type = other DNA
attcctgaacaactgagtaaacgggagaggtattccgaaaaatggcaacgacgaacgcattctgtctggcgtcac

SEQ ID NO: 20241 - DNA, 75 bp, synthetic construct
  source 1..75: mol_type = other DNA
ttgctgggttgggcgtttattgcaaaaagcggaaggagtagttgatggtatgttgataatgctagatattgaatt

SEQ ID NO: 20242 - DNA, 75 bp, synthetic construct
  source 1..75: mol_type = other DNA
agaggtattccgaaaaatggcaacgacgaacgcattctgtctggcgtcaccgccactggcacgcatctgccttca

SEQ ID NO: 20243 - DNA, 75 bp, synthetic construct
  source 1..75: mol_type = other DNA
acctgattcgcaccgcctacgacctcgcagaagagctgaacgattacggcgagcaaagcgtacagatttacggga

SEQ ID NO: 20244 - DNA, 75 bp, synthetic construct
  source 1..75: mol_type = other DNA
gcgggctggttcggtatctgcgggaaaattttaacggtgtcagggggttcagtgtggcgacttcatggaatggca

SEQ ID NO: 20245 - DNA, 75 bp, synthetic construct
  source 1..75: mol_type = other DNA
atgatcatttgtggatgcatggctcgcctgaaaaagaacaacagcgatttgcacgatttattagtggattattat

SEQ ID NO: 20246 - DNA, 75 bp, synthetic construct
  source 1..75: mol_type = other DNA
gcgggagctgaataaacaccgggatattttcagttcgattgctgatattccggttcattcaccgacaacaaagtg

SEQ ID NO: 20247 - DNA, 75 bp, synthetic construct
  source 1..75: mol_type = other DNA
gagcgagtctgcgccgcgctgcgggagctgaataaacaccgggatattttcagttcgattgctgatattccggtt

SEQ ID NO: 20248 - DNA, 75 bp, synthetic construct
  source 1..75: mol_type = other DNA
gagcgagtctgcgccgcgctgcgggagctgaacaagtgccgggatattctccgggatattaccgccaccagagaa

SEQ ID NO: 20249 - DNA, 75 bp, synthetic construct
  source 1..75: mol_type = other DNA
ggcggtggtaaccgcaacggggcggctggcacgcgttaatcagaacggtaaatttcgttactgcatgccgggcga

SEQ ID NO: 20250 - DNA, 75 bp, synthetic construct
  source 1..75: mol_type = other DNA
aaccggtgtcaccggtaccgaaagtgacagcgcaaatgctgactgaggcgattgaacaacatggcccacaaacgg

SEQ ID NO: 20251 - DNA, 75 bp, synthetic construct
  source 1..75: mol_type = other DNA
cgtcgggcgaaaagtcatgtccagaagtgggagcgagtctgcgccgcgctgcgggagctgaacaagcaccgggat

SEQ ID NO: 20252 - DNA, 75 bp, synthetic construct
  source 1..75: mol_type = other DNA
tttgaacacactgacgacgggctgactgagcacggtcaacagtgcccttatgtcagaccggagcgcagggagata

SEQ ID NO: 20253 - DNA, 75 bp, synthetic construct
  source 1..75: mol_type = other DNA
atatgaaaattagcgcaattgattacagtcaaaatatcaacggtgattacaaagctactgttacaggaggcggag

SEQ ID NO: 20254 - DNA, 75 bp, synthetic construct
  source 1..75: mol_type = other DNA
aattctggcactggtagtcaagatatgcctaagcacaggcgcacgctggcgagaagcaataaatcttacccgctc

SEQ ID NO: 20255 - DNA, 75 bp, synthetic construct
  source 1..75: mol_type = other DNA
gcaactggccggaagagacaaagcgacaggtgattcgtgatgcatggctgatacaccgacacaaagggaccatca

SEQ ID NO: 20256 - DNA, 75 bp, synthetic construct
  source 1..75: mol_type = other DNA
actttttccggggattatctccgcgtaactgacaacaagggaaaaacgcacgacgtgctgaccggaagtgatgac

SEQ ID NO: 20257 - DNA, 75 bp, synthetic construct
  source 1..75: mol_type = other DNA
aggaagagtggcaaggcggctgggtccgcgatgtgaatggcaagatccgtccgcgtctgggcagcaagatgggcg

SEQ ID NO: 20258 - DNA, 75 bp, synthetic construct
  source 1..75: mol_type = other DNA
gctactattctgacctctatcagaagcgggtatgcgaagggtatcactgtcagaccccgtagcattgcacttaat

SEQ ID NO: 20259 - DNA, 75 bp, synthetic construct
  source 1..75: mol_type = other DNA
atggcaaaagatctgaaaacactggcgctggccagactgtccggatttcgtcataaaacggtgaaggtgccggaa

SEQ ID NO: 20260 - DNA, 75 bp, synthetic construct
  source 1..75: mol_type = other DNA
gctggatacgcgtcgtggttctaactctgagctggaaactgccgtgaaagacctgggtatggctgtttcatacaa

SEQ ID NO: 20261 - DNA, 75 bp, synthetic construct
  source 1..75: mol_type = other DNA
gacggtacggtctggcgtctgctgaatggctttaagctgttccgcgaaaaactggatacccgtcgcggctcaaat

SEQ ID NO: 20262 - DNA, 75 bp, synthetic construct
  source 1..75: mol_type = other DNA
aatcaggtggaccagttcggcggttataccggaatgacgcccgccgattttcgcggctttgtttgtcagctcgcc

SEQ ID NO: 20263 - DNA, 75 bp, synthetic construct
  source 1..75: mol_type = other DNA
agggtggtggcagaaaacgaatgggcaaactgtacggcgatcactcttaacatgaccggggtgtccgatggctga

SEQ ID NO: 20264 - DNA, 75 bp, synthetic construct
  source 1..75: mol_type = other DNA
tgaattcaccatgacgcagtccgcaccgctgatggtgctgccggatccggatgagtttgtggtggtacaggtgaa

SEQ ID NO: 20265 - DNA, 75 bp, synthetic construct
  source 1..75: mol_type = other DNA
gtctcttccggcaggactgcaggcgggtatcaccaccggcatacagggtacacctggtctgtttctgtgaattaa

SEQ ID NO: 20266 - DNA, 75 bp, synthetic construct
  source 1..75: mol_type = other DNA
gaaaaaatcagtgaagcgtttttacgatacgctggtggttcggtttgacattgaagagtcatgggcggagcggca

SEQ ID NO: 20267 - DNA, 75 bp, synthetic construct
  source 1..75: mol_type = other DNA
agtattgagtaaagataactcaattgcatataccgttcatgagcctgtgctaaaagacttcgcccgtatggcagc

SEQ ID NO: 20268 - DNA, 75 bp, synthetic construct
  source 1..75: mol_type = other DNA
ataattctaccgttatggattcggtagataaaatcagctccagttatcaaacacaatttgctaatgatattatgt

SEQ ID NO: 20269 - DNA, 75 bp, synthetic construct
  source 1..75: mol_type = other DNA
gatgcgacgcctgatgaaatacatgacgaagcaaaagatattttctttaactactgcaattactcatatcacgaa

SEQ ID NO: 20270 - DNA, 75 bp, synthetic construct
  source 1..75: mol_type = other DNA
agaagggggcaagatccagcagctggctgaagtcgaagtggcttttactgccgactatatcgattacatggcgga

SEQ ID NO: 20271 - DNA, 75 bp, synthetic construct
  source 1..75: mol_type = other DNA
aaaagctaatccagactgcaaattaccggagaaggcgatggactacctgaagcggaacgaactgataagcgcgga

SEQ ID NO: 20272 - DNA, 75 bp, synthetic construct
  source 1..75: mol_type = other DNA
gcgtgcagtttaacccgaccgaatccgtgaccattgaccttgcttatgaaggttccggtagtggcgactggcgat

SEQ ID NO: 20273 - DNA, 75 bp, synthetic construct
  source 1..75: mol_type = other DNA
atctggatgatgactactttgacatgttgcaggaagagctttgtggcgtggtggaggcatccggtgccagcctgg

SEQ ID NO: 20274 - DNA, 75 bp, synthetic construct
  source 1..75: mol_type = other DNA
taactgacaacaaggggaaaacgcacgatgtgctgaccggaagtgatgacggtcgccacagcgacacctctctgg

SEQ ID NO: 20275 - DNA, 75 bp, synthetic construct
  source 1..75: mol_type = other DNA
gctgaccggaagtgatgacggtcgccacagcaacacgtctctggcgtggggagctggcgtgcagtttaacccgac

SEQ ID NO: 20276 - DNA, 75 bp, synthetic construct
  source 1..75: mol_type = other DNA
ggggtcagttactaatatcccgtatggaatagaacaggttatatctgatgaaaccattttttcatcagcaaaaac

SEQ ID NO: 20277 - DNA, 75 bp, synthetic construct
  source 1..75: mol_type = other DNA
atgcgtaaattatgtgctgttattttgtccgcagtagtctggcagatcgccgctgctacgccagcgagtgcagca

SEQ ID NO: 20278 - DNA, 75 bp, synthetic construct
  source 1..75: mol_type = other DNA
aagcatccatgaccagtattgagatagctgagctggtgggaagcagaccagatagtgttaagagaactattgaaa

SEQ ID NO: 20279 - DNA, 75 bp, synthetic construct
  source 1..75: mol_type = other DNA
ggcaacacgccatcgggtccgtctgcagatacgtccgttcgcacaatctccctgctgccggcagccggagaggct

SEQ ID NO: 20280 - DNA, 75 bp, synthetic construct
  source 1..75: mol_type = other DNA
aagaatcttaacgccgataaatatgaggcggtatatggcggttacaagggcagggaagcacagaatattttcttt

SEQ ID NO: 20281 - DNA, 75 bp, synthetic construct
  source 1..75: mol_type = other DNA
acatatcagccgcattatacatacaacatcaacattcctgtgcgccacaacgatcctgaaagcatcgataatatt

SEQ ID NO: 20282 - DNA, 75 bp, synthetic construct
  source 1..75: mol_type = other DNA
agatgaatttcatgattctgaaagatgtgaatgaacacatggaaggtctgtttcaacgtttttctaaactgttgc

SEQ ID NO: 20283 - DNA, 75 bp, synthetic construct
  source 1..75: mol_type = other DNA
gctcgtcgccgctggaggtcgccgccgccgctgcgttctctgagattcagcgcgtgccggtaccgctgcgcaccc

SEQ ID NO: 20284 - DNA, 75 bp, synthetic construct
  source 1..75: mol_type = other DNA
atgaccacaccaaatccactggcaaaaacgaaaggtgcgggaacgacgttctggatgtacaccggcaagggcgat

SEQ ID NO: 20285 - DNA, 75 bp, synthetic construct
  source 1..75: mol_type = other DNA
ttgctggcgatatgctggatgcagggggaattcgatatgacgaatgccagttacgcccagcagccagcagcattt

SEQ ID NO: 20286 - DNA, 75 bp, synthetic construct
  source 1..75: mol_type = other DNA
gctgaatctgcaaaacgcctggagtctggcagaggcagaaaaaacagtggatgtgtcgcgattacgccgtctggt

SEQ ID NO: 20287 - DNA, 75 bp, synthetic construct
  source 1..75: mol_type = other DNA
cacaggtaacggcattactgggtacacctgtatctgctgagacgctggctgccggtacagtccggacagatgtct

SEQ ID NO: 20288 - DNA, 75 bp, synthetic construct
  source 1..75: mol_type = other DNA
gtaaaaacacttgatgaaggtgtcacaaaaatgtgcctggttcacatcggaaagaatctgcccgcagaaaaaaaa

SEQ ID NO: 20289 - DNA, 75 bp, synthetic construct
  source 1..75: mol_type = other DNA
cagacttattcttcgcaatacgatgcggtgtatggtgcatacaagacgaaatccgcaaaaaaaatcttctttgtg

SEQ ID NO: 20290 - DNA, 75 bp, synthetic construct
  source 1..75: mol_type = other DNA
gacacttgggaacgaagcttttaatcgtgagttagcaaagttaaatcaaaatctacgtgaaacactttctaagtt

SEQ ID NO: 20291 - DNA, 75 bp, synthetic construct
  source 1..75: mol_type = other DNA
aactcgagcgcggcgatgtgcttccccatgacatggtcgaatcctccgctactgcatggcgggatgaaatgagca

SEQ ID NO: 20292 - DNA, 75 bp, synthetic construct
  source 1..75: mol_type = other DNA
accggggaggaagtggccgatctcagccaccgggaaaatgacatcaaaaatgcgataaacctgatgttctgggga

SEQ ID NO: 20293 - DNA, 75 bp, synthetic construct
  source 1..75: mol_type = other DNA
gccagacggaccaacgaatctttccgcatggatgagacttaagaataaagaattacctccttcaccgcatcacta

SEQ ID NO: 20294 - DNA, 75 bp, synthetic construct
  source 1..75: mol_type = other DNA
ttggcggttctactggtgctatctatcgtcagttctctattaccattgtttcagcaatggcgctgtcggtactgg

SEQ ID NO: 20295 - DNA, 75 bp, synthetic construct
  source 1..75: mol_type = other DNA
tagccagggtaaaacggtgtatcactcccccggtgcgccggatatccgcgagtttacgcgtgacgccatacccga

SEQ ID NO: 20296 - DNA, 75 bp, synthetic construct
  source 1..75: mol_type = other DNA
tcaggttgcgggcgatccgctgatgctgcgtcgggcgttaagcaacctgctttctaatgccctgcgttatacgcc

SEQ ID NO: 20297 - DNA, 75 bp, synthetic construct
  source 1..75: mol_type = other DNA
acggcagcataatacctggttccgtgaccaggtctgggcagacagcctcggtactaaccatctgttaccgatgtc

SEQ ID NO: 20298 - DNA, 75 bp, synthetic construct
  source 1..75: mol_type = other DNA
gttttaacgtcgataaatttgtcgcaaaaatcgaggaagttgcaaaggctgtctggggtattgaaaaaactcgaa

SEQ ID NO: 20299 - DNA, 75 bp, synthetic construct
  source 1..75: mol_type = other DNA
aagaacttcagcgcctataccgatgctaactacctcggtggtggtgacgtagatcaagactggtccgcgaacgtg

SEQ ID NO: 20300 - DNA, 75 bp, synthetic construct
  source 1..75: mol_type = other DNA
atggtcggtggtcagtgttcgacaccaaaaacttcgagaagaacttcgagaggattaagggtgatgaggaaacta

SEQ ID NO: 20301 - DNA, 75 bp, synthetic construct
  source 1..75: mol_type = other DNA
ttgatgtagagcagcaaatgaacgcttatgtacttggtagttattatgctgcaaataaaaaattcccggataaaa

SEQ ID NO: 20302 - DNA, 75 bp, synthetic construct
  source 1..75: mol_type = other DNA
tgaggtgtttatatctcgcgccagaattttgtttgaggaagcaaacagtgagctggcttattacaacataaggca

SEQ ID NO: 20303 - DNA, 75 bp, synthetic construct
  source 1..75: mol_type = other DNA
gctaatcagtacgcactggcgctgtactggccggtttctgccctgccgcaaggggttactctggaaggaaatgcc

SEQ ID NO: 20304 - DNA, 75 bp, synthetic construct
  source 1..75: mol_type = other DNA
tcctcctgctgaaacagcgcctggccgaacaggaagcgctgatccacgccctgcaggaaaagctgagcaaccggg

SEQ ID NO: 20305 - DNA, 75 bp, synthetic construct
  source 1..75: mol_type = other DNA
aatttcacaacgtggaagcactgtccgtcaggaagtggttgccgggttaacaacgtttctggcgatggtctactc

SEQ ID NO: 20306 - DNA, 75 bp, synthetic construct
  source 1..75: mol_type = other DNA
cggacgcaccaaagccacagggcgcgctggataattattttaaaattaccgctcgtggcagtaccgttcgtcagg

SEQ ID NO: 20307 - DNA, 75 bp, synthetic construct
  source 1..75: mol_type = other DNA
atgccaaagggatgaccacccgtgagatagccgctgcgttcaaagaactgtatgacgcagatgtttcaccggcac

SEQ ID NO: 20308 - DNA, 75 bp, synthetic construct
  source 1..75: mol_type = other DNA
ctcaggcgtatggtcaacctgacaacccggtggacatttgcgaggaacggagaacccccgccatacttaccgccg

SEQ ID NO: 20309 - DNA, 75 bp, synthetic construct
  source 1..75: mol_type = other DNA
aaaaacaatacgggtaggggtcgtctcagaaaacggaaaataaagcacgctaagccggttgcagaggccgtagcg

SEQ ID NO: 20310 - DNA, 75 bp, synthetic construct
  source 1..75: mol_type = other DNA
ccgataacacgattgctctgggcaatcaaagcctggcagtagctgctggtgcaattgccatcggtcaggggaata

SEQ ID NO: 20311 - DNA, 75 bp, synthetic construct
  source 1..75: mol_type = other DNA
aaagcgggcaagattcataacgtctatatcgcgatgcaaatgtgcgacggcgcgcgagtgaaaaaactggtccat

SEQ ID NO: 20312 - DNA, 75 bp, synthetic construct
  source 1..75: mol_type = other DNA
aaaatggctgcgttacgtcattgagcatatccaggattggccggcaaaccgggtacgcgatctgttgccctggaa

SEQ ID NO: 20313 - DNA, 75 bp, synthetic construct
  source 1..75: mol_type = other DNA
gaggatggggagtacgcgacacaaccactgagcaaactgtttccaaagccggattatgcccgtctggaaaaagaa

SEQ ID NO: 20314 - DNA, 75 bp, synthetic construct
  source 1..75: mol_type = other DNA
taaaaaaattactgaaggataaagataaagacaaaaaagatgaacatggcggcattggtacgccagctacccgtg

SEQ ID NO: 20315 - DNA, 75 bp, synthetic construct
  source 1..75: mol_type = other DNA
ccaaaacggtaattcgtatccgcaaaggtagctctaacggtgtggaacttaccggactgcaactggacgaagaaa

SEQ ID NO: 20316 - DNA, 75 bp, synthetic construct
  source 1..75: mol_type = other DNA
aaagggaaacttattcctactgataccggatatgcgcttattgatgccctgcctggtatagcggttaatcctgat

SEQ ID NO: 20317 - DNA, 75 bp, synthetic construct
  source 1..75: mol_type = other DNA
aaagctacctccgctatgtccttgacgtcatagccgactggccgataaaccgggtcggcgaactgctcccctggc

SEQ ID NO: 20318 - DNA, 75 bp, synthetic construct
  source 1..75: mol_type = other DNA
catgtgcttggcgtcatagcagactggccggtcaaccgggtcagcgaactgcttccgtggcgcatagcactgcca

SEQ ID NO: 20319 - DNA, 75 bp, synthetic construct
  source 1..75: mol_type = other DNA
gtggggcttatcagtgacataggcagtcaggtggcggatattgcgcgtacacagggagaactgaatgcgttgaag

SEQ ID NO: 20320 - DNA, 75 bp, synthetic construct
  source 1..75: mol_type = other DNA
gggttgacgcgtgctgccagttaatgacaccggtgaatgatgccctgtaccgttatgtaatgaacacccgcaagg

SEQ ID NO: 20321 - DNA, 75 bp, synthetic construct
  source 1..75: mol_type = other DNA
tgacacactggcccggcacgaacttaaacagagcagtaaagtggctttaccggaagccatggtgaagggatatat

SEQ ID NO: 20322 - DNA, 75 bp, synthetic construct
  source 1..75: mol_type = other DNA
ttcactgctgtcgggctgggtggatgcatgctgccggctgctgtctccgctggaagaggcgcttcatggctatgt

SEQ ID NO: 20323 - DNA, 75 bp, synthetic construct
  source 1..75: mol_type = other DNA
tggcagcgcacatcgacagggtttacaaattttgcctgggtcaatacatctggtgatacttacgatatttacgtt

SEQ ID NO: 20324 - DNA, 75 bp, synthetic construct
  source 1..75: mol_type = other DNA
tgtcccggtgctgttgccaggcaataagaaaacgaagaccgggcggttatggacctacgttcgtgacgaccgtaa

SEQ ID NO: 20325 - DNA, 75 bp, synthetic construct
  source 1..75: mol_type = other DNA
ctctttccccaattacacacaaccaaattcccgttatcactaccgagttactggcacagctttactgtaccgaga

SEQ ID NO: 20326 - DNA, 75 bp, synthetic construct
  source 1..75: mol_type = other DNA
catttgatgccaccggtaacggcggttatctggcagaagccgcccgtctgatttatggcccggagatgatcgact

SEQ ID NO: 20327 - DNA, 75 bp, synthetic construct
  source 1..75: mol_type = other DNA
attatctaacggcaagatgctgaataatgagcaagtccaagacttaatcaacacctcaaaactgatggcaaatac

SEQ ID NO: 20328 - DNA, 75 bp, synthetic construct
  source 1..75: mol_type = other DNA
ccggaccggaaaggcatccatccacaaaatcacctggccggttacagcggagtgcttcaggccgatgcttacggt

SEQ ID NO: 20329 - DNA, 75 bp, synthetic construct
  source 1..75: mol_type = other DNA
acaaccgacaaatacccaacagcagcagagtcaatccggatcatatacctcaaaatcaggcattcaatttacggt

SEQ ID NO: 20330 - DNA, 75 bp, synthetic construct
  source 1..75: mol_type = other DNA
atcttcaagcgccaatggtccgcaatggtgtgtgctgaaaacaggcctgtatgacgatgtgtaccgcgctatcga

SEQ ID NO: 20331 - DNA, 75 bp, synthetic construct
  source 1..75: mol_type = other DNA
aaattcaatttctacggtatcggttggtggttctgaaacccggccgcgcaacgtcgcatttaactatatcgtgag

SEQ ID NO: 20332 - DNA, 75 bp, synthetic construct
  source 1..75: mol_type = other DNA
agggattgttcagctcagtagcgccacgaacagcacgtctgaaacactggcagcgacaccaaaagctgttaaggc

SEQ ID NO: 20333 - DNA, 75 bp, synthetic construct
  source 1..75: mol_type = other DNA
ccggaacgccaacaacaccaacagcgccacaggggactaatagtacccagatcgcaagcacggctttcgttatgg

SEQ ID NO: 20334 - DNA, 75 bp, synthetic construct
  source 1..75: mol_type = other DNA
catgccgggctgaacaagggcgaggcgcgcaatgcgctggcccgtgccgtgttcttcaaccgccttggtgaaatc

SEQ ID NO: 20335 - DNA, 75 bp, synthetic construct
  source 1..75: mol_type = other DNA
caattatgagtacgataatattatctatgttgaaaagaaaattaatatattaggtgcggtagtgacatatgcaca

SEQ ID NO: 20336 - DNA, 75 bp, synthetic construct
  source 1..75: mol_type = other DNA
caggaaacagatgtactcggaagcaggatgcagcgcacgctggccggggtgcggggcagtatccgccatgtcact

SEQ ID NO: 20337 - DNA, 75 bp, synthetic construct
  source 1..75: mol_type = other DNA
ggaaaagcttactgaagccagacttgaagaagtattaacggcttataaagcagatatcccgttaggcatgattag

SEQ ID NO: 20338 - DNA, 75 bp, synthetic construct
  source 1..75: mol_type = other DNA
gactggccgcatgggctgatgatgagatgttacctgtgacacaaatcagctcaaaaaagtttgaagcacagtctg

SEQ ID NO: 20339 - DNA, 75 bp, synthetic construct
  source 1..75: mol_type = other DNA
cagcgtcgtgaagaggtgaacattaatgtgcaccgggagcgtggggaggatgttgagccgggagatgatttctga

SEQ ID NO: 20340 - DNA, 75 bp, synthetic construct
  source 1..75: mol_type = other DNA
gttcgctcaagaagagagcgtgggcgatgtggcctacgtcattggtggcgctgagatattcaagcgacttgcctt

SEQ ID NO: 20341 - DNA, 75 bp, synthetic construct
  source 1..75: mol_type = other DNA
aaaatcgacaacgactttgagccgaagctgattcagaccgtgcgcggcgtgggctatatgcttgaggtgccggat

SEQ ID NO: 20342 - DNA, 75 bp, synthetic construct
  source 1..75: mol_type = other DNA
acagctggagtcgtacttacctgcagaagagtgtacctatgacaattacagtactgggaaccccactgagctgga

SEQ ID NO: 20343 - DNA, 75 bp, synthetic construct
  source 1..75: mol_type = other DNA
atgcgttccgacgttcaggctgctaaagatgacgcagctcgtgctaaccagcgtctggacaacatggctactaaa

SEQ ID NO: 20344 - DNA, 75 bp, synthetic construct
  source 1..75: mol_type = other DNA
aatgttgatatcatcagttatttgccgaggcttcccactatcggagaatcgcttctggcaagtaattttatattt

SEQ ID NO: 20345 - DNA, 75 bp, synthetic construct
  source 1..75: mol_type = other DNA
gcacagtaccggaacgtctttatcgaggatgatcagggaacgcattttcgcctggttgtccgtcaggatggcacg

SEQ ID NO: 20346 - DNA, 75 bp, synthetic construct
  source 1..75: mol_type = other DNA
gggaacggcgaaaaaggatgagaagcaggtgaacggggcgttctatcacgttcactggtacaaatacccgctgac

SEQ ID NO: 20347 - DNA, 75 bp, synthetic construct
  source 1..75: mol_type = other DNA
agtcgatgccattgttaaaaatgccaatgtccctaaaggctcattttattactactttaagagtaaagaggatta

SEQ ID NO: 20348 - DNA, 75 bp, synthetic construct
  source 1..75: mol_type = other DNA
ctgtgttcttcccctgccatccgatgcggggcatcgtctgttcccgtccgttccttttcgtgaaggtgagcgtcg

SEQ ID NO: 20349 - DNA, 75 bp, synthetic construct
  source 1..75: mol_type = other DNA
acttcgaggactacctggtgccgcccgcgaaattcgccagcctcaagcaggccagcgaattgccgctggccgtgg

SEQ ID NO: 20350 - DNA, 75 bp, synthetic construct
  source 1..75: mol_type = other DNA
ggcatcgaccggcgctactacgaactgtgcgcgctgtccgagttgaagaactccctgcgctcgggcgacatctgg

SEQ ID NO: 20351 - DNA, 75 bp, synthetic construct
  source 1..75: mol_type = other DNA
gtctatatggaaagagcggtcgatgccctgaagcgtaaaggggtgaagatcaacgagcaactgctgtcgcatttg

SEQ ID NO: 20352 - DNA, 75 bp, synthetic construct
  source 1..75: mol_type = other DNA
tggagctgagtcgttcactgctgtcggactgggtggatgcatgctgccggctactgtcaccgctggaagaagcgc

SEQ ID NO: 20353 - DNA, 75 bp, synthetic construct
  source 1..75: mol_type = other DNA
tctgaaatgtacggccgccagggcgtggagctgagtcgttcactgctgtcggactgggtggatgcatgctgccgg

SEQ ID NO: 20354 - DNA, 75 bp, synthetic construct
  source 1..75: mol_type = other DNA
aactgattgaaagttttggtgaagtctgtgttcttcccctgccatccgatgcggggcatcgtctgttcccgtccg

SEQ ID NO: 20355 - DNA, 75 bp, synthetic construct
  source 1..75: mol_type = other DNA
cttatcccgccgaacagcgtgaagccgtctccgccgcgctggagctggaatcggaacccctgaacgttatcgccc

SEQ ID NO: 20356 - DNA, 75 bp, synthetic construct
  source 1..75: mol_type = other DNA
accgacccgccgtatctcgtcggtttccgtgaccgttccgggcgcaccatcgccggcgataaaaccgatgaatgg

SEQ ID NO: 20357 - DNA, 75 bp, synthetic construct
  source 1..75: mol_type = other DNA
tcggaaccccttaacgttatcgctcaaaccatgtcgtttcgtgaaatgctgttacgccagcgggttaacgagggc

SEQ ID NO: 20358 - DNA, 75 bp, synthetic construct
  source 1..75: mol_type = other DNA
gatgccgggaatcagtatcgctttcagtgacattctcttttctatgggggcagcgatgacgcttggtggtgttgc

SEQ ID NO: 20359 - DNA, 75 bp, synthetic construct
  source 1..75: mol_type = other DNA
gtgaaatgctggttggttcacgacggatatcccaggacatcagcacccgtgatgagggcggtgacgggaaagtgg

SEQ ID NO: 20360 - DNA, 75 bp, synthetic construct
  source 1..75: mol_type = other DNA
gccaaagggacatccattaattcttatgtcaaacgaaggctatgcagcgaaagcgggtcaggccgtgatcaacct

SEQ ID NO: 20361 - DNA, 75 bp, synthetic construct
  source 1..75: mol_type = other DNA
tgggctggaaatattcaggcaaccgccatcacccgacggaaaagcccgttaccagcctgcaaccgctgattgaga

SEQ ID NO: 20362 - DNA, 75 bp, synthetic construct
  source 1..75: mol_type = other DNA
aggataatatttttaaacgcttcacaactcttgtaattgattttttcaagcagaagtttgtatgggctaaagcaa

SEQ ID NO: 20363 - DNA, 75 bp, synthetic construct
  source 1..75: mol_type = other DNA
aatgtatatgggggtaatggtcttggtggctcaggaagtagcggaggtgcagggttaagcggggatgatattata

SEQ ID NO: 20364 - DNA, 75 bp, synthetic construct
  source 1..75: mol_type = other DNA
agaaccgactttcaggtgcaaatcgtaacgcactcattgcgggaggaattatggcaaacactgctgagatattca

SEQ ID NO: 20365 - DNA, 75 bp, synthetic construct
  source 1..75: mol_type = other DNA
atggcttccattcattcgctcctcagtgcatgccagacgacaccccgggatgtggctgaaccggctcaggtgcgt

SEQ ID NO: 20366 - DNA, 75 bp, synthetic construct
  source 1..75: mol_type = other DNA
tgggctggaaatattcaggcaatcgtcatcacccgacggaaaagcccgttaccagcctgcaaccactgattgaga

SEQ ID NO: 20367 - DNA, 75 bp, synthetic construct
  source 1..75: mol_type = other DNA
ccatcaattttattacgtattcattgatgctttctctggcaggagtgcctgtctatgccgtcgattttaatacgg

SEQ ID NO: 20368 - DNA, 75 bp, synthetic construct
  source 1..75: mol_type = other DNA
acaaacaaatctgcgagatgtacagccgcgtcagccgcgatccgttctggtgccgtaacgtgctcagcccgtcga

SEQ ID NO: 20369 - DNA, 75 bp, synthetic construct
  source 1..75: mol_type = other DNA
gaaggcattctcctgtctgaatgtgaacgtctgaggcagcgttcgctggcaaataaactgatcagcctcttccgt

SEQ ID NO: 20370 - DNA, 75 bp, synthetic construct
  source 1..75: mol_type = other DNA
gccgtcttcgctatggttggttactacatggctgccgaaattgagaagttgcgggcgcagagagacgcattagcg

SEQ ID NO: 20371 - DNA, 75 bp, synthetic construct
  source 1..75: mol_type = other DNA
aaccgggtatggatgtggcttcggctccttccgtcagggaggtgcgctttggtgatggttactcccagcgcgcgc

SEQ ID NO: 20372 - DNA, 75 bp, synthetic construct
  source 1..75: mol_type = other DNA
gcagccgaactggagaagcagcaattgattaatcaggccaacgattatatgaacagtaaacaatggcctggtaaa

SEQ ID NO: 20373 - DNA, 75 bp, synthetic construct
  source 1..75: mol_type = other DNA
ctccacgaaagctaccagaaatggctgaccggcttcacccggcacgccgtatcctggggcgtgtgtcatccgaat

SEQ ID NO: 20374 - DNA, 75 bp, synthetic construct
  source 1..75: mol_type = other DNA
attgaagatcaacatggagcgccagtggcctgagccaaaagatggtgagcctcgcttgcacattaaagaacccgg

SEQ ID NO: 20375 - DNA, 75 bp, synthetic construct
  source 1..75: mol_type = other DNA
cagagattcagttgcggcatgtgttctggctgtccactcttggattaacggccatcgcctggctaacggctccct

SEQ ID NO: 20376 - DNA, 75 bp, synthetic construct
  source 1..75: mol_type = other DNA
ctgtatggtgagatgcgagtggggtcgcgtgtgatttcacagagtatcagtactgctgatgagggtgatggtggt

SEQ ID NO: 20377 - DNA, 75 bp, synthetic construct
  source 1..75: mol_type = other DNA
ctggaaagcctttctgtggacgccgccttatggctggcggcagatcagggtgacctgcgcaaaatggacatcgcg

SEQ ID NO: 20378 - DNA, 75 bp, synthetic construct
  source 1..75: mol_type = other DNA
gcaggggccagtatgatcctgggcggagtggcgcagatgctggcaccgaaagccaggacgcccacggcagccagt

SEQ ID NO: 20379 - DNA, 75 bp, synthetic construct
  source 1..75: mol_type = other DNA
gcggcgttgattgctacggcaatctggatgccggggatcagtatcgctttcagtgacattctcttttcaatgggt

SEQ ID NO: 20380 - DNA, 75 bp, synthetic construct
  source 1..75: mol_type = other DNA
catttcatattagcaccaattaatgctccagaacatatcgtgaaagactctacagcattgtggaatgaagttgaa

SEQ ID NO: 20381 - DNA, 75 bp, synthetic construct
  source 1..75: mol_type = other DNA
tcgcaatgttcacgaactggcaatccgtcatggtgtgacatttaacacagtctataaagccatccgacgaatgcg

SEQ ID NO: 20382 - DNA, 75 bp, synthetic construct
  source 1..75: mol_type = other DNA
atggaaacgtcactaccaaacgttaatacgtctgaagggtgttttaatattggtattctgctcagtaaccgggag

SEQ ID NO: 20383 - DNA, 75 bp, synthetic construct
  source 1..75: mol_type = other DNA
aaaagccgctgctatgcaacaactacttaccggtaaaacccgtttgccacagtttgcgttgcgcaaagatggctc

SEQ ID NO: 20384 - DNA, 75 bp, synthetic construct
  source 1..75: mol_type = other DNA
gggaaatagcaatgacacgaccaattgtacgtgaaggggcgatgtcagaagtcgaactgttacgtatgcagcgcc

SEQ ID NO: 20385 - DNA, 75 bp, synthetic construct
  source 1..75: mol_type = other DNA
tcatgtcgccttgataaagggtacgtttatgaaaccgataaagaaatatctctagagggcatcaaaaatagttca

SEQ ID NO: 20386 - DNA, 75 bp, synthetic construct
  source 1..75: mol_type = other DNA
agaaagcctgcatgaaaaacaggaactgccgccagtacggttaaaaacacaatcatattcgctgcgtctggaatg

SEQ ID NO: 20387 - DNA, 75 bp, synthetic construct
  source 1..75: mol_type = other DNA
aagtttaatgaagcccttgctaaactaaattcaagtgtacgagaagcaattgctaaagccagaggtcatacatcc

SEQ ID NO: 20388 - DNA, 75 bp, synthetic construct
  source 1..75: mol_type = other DNA
atatgaagtgggtgccacggacgaagaaatttctgttgaatgcgatctgaaggcaaatatggcggggattgtaac

SEQ ID NO: 20389 - DNA, 75 bp, synthetic construct
  source 1..75: mol_type = other DNA
tcgtaccggatgccttacccgtggtgcgtaaagccagctggcactgcacgaaacaaggcattggatcttgtaggt

SEQ ID NO: 20390 - DNA, 75 bp, synthetic construct
  source 1..75: mol_type = other DNA
taccacgtccgcagatcattgaatcactggattatgagagcatactgaaagacgtgaaggcctttatgattgatg

SEQ ID NO: 20391 - DNA, 75 bp, synthetic construct
  source 1..75: mol_type = other DNA
ttgctggtatcatcggtactgcgggctgtgtgggtctgtggggctacctgctgtatcagggcgtggtcgatccgc

SEQ ID NO: 20392 - DNA, 75 bp, synthetic construct
  source 1..75: mol_type = other DNA
atgtcgcgccagtgcacgcatcattatgggcgttggcctcaacacggttttacgtcacttaaaaaactcaggccg

SEQ ID NO: 20393 - DNA, 75 bp, synthetic construct
  source 1..75: mol_type = other DNA
ttattcccttacgctcacggttaacggtaggtgatagttataccgatggcgatatttttgatagtgtgaactttc

SEQ ID NO: 20394 - DNA, 75 bp, synthetic construct
  source 1..75: mol_type = other DNA
gtgaaaagtgcgcgccttgtgctggctgccatcctgctgtttctggtagtggcagtggatttcaccggacggctg

SEQ ID NO: 20395 - DNA, 75 bp, synthetic construct
  source 1..75: mol_type = other DNA
atgatgtctgtcatttctgatggcgtcctcattggtttggcgatctacttcgcttatccgttagttcgtaaagca

SEQ ID NO: 20396 - DNA, 75 bp, synthetic construct
  source 1..75: mol_type = other DNA
cgacagcattatttttgccaccgatacggacgtggtgctgaaagccggattgcttctggtcaatgccacggccac

SEQ ID NO: 20397 - DNA, 75 bp, synthetic construct
  source 1..75: mol_type = other DNA
tactctgctgctttatttttccggcgtcagggaaagatgcaggctggcagtggtataacgaaaagatgaaacagc

SEQ ID NO: 20398 - DNA, 75 bp, synthetic construct
  source 1..75: mol_type = other DNA
ctgcacgggtacggggcaatgaatggcgatcgttacgagtttacaaaagacagcacggaagattccgttttccac

SEQ ID NO: 20399 - DNA, 75 bp, synthetic construct
  source 1..75: mol_type = other DNA
ggaagtgggtatgggtaaagttggtatgccgctgcgtgtcgccgtaaccggtgcggggcagtctccggcgctgga

SEQ ID NO: 20400 - DNA, 75 bp, synthetic construct
  source 1..75: mol_type = other DNA
ggtaatgccgggcgacaacatcaaaatggttgttaccctgatccacccgatcgcgatggacgacggtctgcgttt

SEQ ID NO: 20401 - DNA, 75 bp, synthetic construct
  source 1..75: mol_type = other DNA
actctcggtggctggcttggtggtgcgttactgtggcacttcgccctgatgtggattctgctgattaatgccacg

SEQ ID NO: 20402 - DNA, 75 bp, synthetic construct
  source 1..75: mol_type = other DNA
accacctatgtggtgcagggctggcgacagggtaacggtacgctgtggcagcccaaccagcgggtgattgtcttt

SEQ ID NO: 20403 - DNA, 75 bp, synthetic construct
  source 1..75: mol_type = other DNA
accatcgaactgccggaaggtgtagagatggtaatgccgggcgacaacatcaaaatggttgttaccctgatccac

SEQ ID NO: 20404 - DNA, 75 bp, synthetic construct
  source 1..75: mol_type = other DNA
agctaggttatcagccagtccttaccctggatgaaggtatcgagaaaactgccgcctggctacgcgaccacggaa

SEQ ID NO: 20405 - DNA, 75 bp, synthetic construct
  source 1..75: mol_type = other DNA
atgttcaggtcggctttgacaaaaaacatgaactggacggtgtggacctgtttaccggtgtcacgatgacctata

SEQ ID NO: 20406 - DNA, 75 bp, synthetic construct
  source 1..75: mol_type = other DNA
acggtgatatggacctgagcatgaagaacagggacttcagtccgctggttggaagaacaggggttgaactgggca

SEQ ID NO: 20407 - DNA, 75 bp, synthetic construct
  source 1..75: mol_type = other DNA
cagcggacgtccgaccgtggtgctcggggatgcccgtcaggtcaatccggataacatttcatggggataccgggg

SEQ ID NO: 20408 - DNA, 75 bp, synthetic construct
  source 1..75: mol_type = other DNA
ggcgtatacctgcaaagcgagaagaaattaaaggtgtgcgttattcgtaccgaggcatgaagatgaaagaggaac

SEQ ID NO: 20409 - DNA, 75 bp, synthetic construct
  source 1..75: mol_type = other DNA
ggcatgcaatggtggccagttacgagatgatcttcacgcaaccggacagtgtcacctacagcaaaacggggatgc

SEQ ID NO: 20410 - DNA, 75 bp, synthetic construct
  source 1..75: mol_type = other DNA
agtacccggttgtggcgctgattaccgagtggcgcgatgaaaacggcaacgttgaagttcgtagcgagaagagcg

SEQ ID NO: 20411 - DNA, 75 bp, synthetic construct
  source 1..75: mol_type = other DNA
gtggtgagtggttacgcaataacctgaacgccattgccgcctttatggggacccggacgtgggattccatcgaaa

SEQ ID NO: 20412 - DNA, 75 bp, synthetic construct
  source 1..75: mol_type = other DNA
tttgaatgtgttatgccgcgtcagcagttcgaaagagatttcattctggtaaaaaattgcaagacagataatcag

SEQ ID NO: 20413 - DNA, 75 bp, synthetic construct
  source 1..75: mol_type = other DNA
attgaataataatcatgatgaatcagaagagtcgcgtatcgtgcaattcaactaccagatagaattacgtcagag

SEQ ID NO: 20414 - DNA, 75 bp, synthetic construct
  source 1..75: mol_type = other DNA
ggataactggatcagcattatcctgggggattcggttactgttggcagtggagccattattctgtctccgtatat

SEQ ID NO: 20415 - DNA, 75 bp, synthetic construct
  source 1..75: mol_type = other DNA
atgctgacgaaatatgcccttgtggcagtcatagtgctgtgtttgacggtgctgggatttacgcttctggtcgga

SEQ ID NO: 20416 - DNA, 75 bp, synthetic construct
  source 1..75: mol_type = other DNA
gaaaccagacctgtgcgcaatttctatgtcggcactaacgatccccgggtgattttgtgcctgacccgccaggcg

SEQ ID NO: 20417 - DNA, 75 bp, synthetic construct
  source 1..75: mol_type = other DNA
cggtgcaccattgaaaatgccacagatgcattaaatgctataaagaaagcgaatactgattcaaatcggggataa

SEQ ID NO: 20418 - DNA, 75 bp, synthetic construct
  source 1..75: mol_type = other DNA
atgcagaaaaaacactgactgaagcattacagaatttacgtgatgcgtatacctgtgaagcagccgaggatgccc

SEQ ID NO: 20419 - DNA, 75 bp, synthetic construct
  source 1..75: mol_type = other DNA
gcgtggaatccagacccaataaacgtcccatgaactcagacctgaaaaactccggggaaatagaggctgatgccg

SEQ ID NO: 20420 - DNA, 75 bp, synthetic construct
  source 1..75: mol_type = other DNA
cctgaaagccgatgccccggtggcgctgtacggtaatgacaaagatgtcgacgccgtcaaaacgcgactgcaaaa

SEQ ID NO: 20421 - DNA, 75 bp, synthetic construct
  source 1..75: mol_type = other DNA
ctgtcagggagtttatgaccagcgccacgctgctggcttttgtggatttgccgtttatcctgcttttcatcggtg

SEQ ID NO: 20422 - DNA, 75 bp, synthetic construct
  source 1..75: mol_type = other DNA
tgaaaataagtttctgatgaataaaaatccggattacgtatcgcctccatccattgaggagttgtccagaaaact

SEQ ID NO: 20423 - DNA, 75 bp, synthetic construct
  source 1..75: mol_type = other DNA
attatcaggcagaaatatcatgatactcctgctgaaacgccgtatgcgccgggagaacacattaagggagggcag

SEQ ID NO: 20424 - DNA, 75 bp, synthetic construct
  source 1..75: mol_type = other DNA
atgacgtggaaagacagacttcaggacgcgtcatttcgcggtgtgccgtttaaggttgaagaagaaagtgcggga

SEQ ID NO: 20425 - DNA, 75 bp, synthetic construct
  source 1..75: mol_type = other DNA
tgcgtgccaaggcagaaaaagcaacgtgtggtgtatggtcgctcgaatatggagagagccgatttgattgtgatg

SEQ ID NO: 20426 - DNA, 75 bp, synthetic construct
  source 1..75: mol_type = other DNA
ccagtaacaagcgatggagtgaagatcatcgatcgcgcgttcttcgctatcttgagctttatattttccctcata

SEQ ID NO: 20427 - DNA, 75 bp, synthetic construct
  source 1..75: mol_type = other DNA
cagagcatttagatgaacgtcggctaatgattcagtggtgggctgactacttgggagcaaataaagaaaaatata

SEQ ID NO: 20428 - DNA, 75 bp, synthetic construct
  source 1..75: mol_type = other DNA
cagaaggcaatgaatgcgttttccgaagccttcggaattgacggcatggaaccaggggatccagctcgcgcaatc

SEQ ID NO: 20429 - DNA, 75 bp, synthetic construct
  source 1..75: mol_type = other DNA
atggcaactgactcacaactaaccatagaaacggccctgaatgtcggcctggcacttctcggttggctttacatc

SEQ ID NO: 20430 - DNA, 75 bp, synthetic construct
  source 1..75: mol_type = other DNA
actctaacggcgagatgacttggcaagccaaaaactacacacagtattcgtcctactttatgaagattacttgct

SEQ ID NO: 20431 - DNA, 75 bp, synthetic construct
  source 1..75: mol_type = other DNA
agaagagttccgctgggtgcagtaccgggcgcagtatttcaaaggtgaggcgaaagtagatatcaccttctccga

SEQ ID NO: 20432 - DNA, 75 bp, synthetic construct
  source 1..75: mol_type = other DNA
gctggattatctggacgcactggagctggtcgatacttccagtgcgccagatattgaatggcctacgcctccggc

SEQ ID NO: 20433 - DNA, 75 bp, synthetic construct
  source 1..75: mol_type = other DNA
tacgcccgctggagcgtgaagatttacgctatgtacatcaactcgacaataacgccagtgtgatgcgttactggt

SEQ ID NO: 20434 - DNA, 75 bp, synthetic construct
  source 1..75: mol_type = other DNA
aaaatatcaagggatcattcctggcgatctggcacaagattacaacgtaagaaaaatggttcccgtgtcagcgag

SEQ ID NO: 20435 - DNA, 75 bp, synthetic construct
  source 1..75: mol_type = other DNA
ttacactcaggatattacattttattcatctctgaattatacgggaaaacaaatctgggcagcacaaagaaatgg

SEQ ID NO: 20436 - DNA, 75 bp, synthetic construct
  source 1..75: mol_type = other DNA
cagggacctgaaaccggagaccagtgtaaccgaagagatcggtattatttataataatgacagtggtttttcagc

SEQ ID NO: 20437 - DNA, 75 bp, synthetic construct
  source 1..75: mol_type = other DNA
aacctgaccgataatctcactctcaaaggagggatcgcaaaagcatttcgggccccttcgattcgtgaggtcagt

SEQ ID NO: 20438 - DNA, 75 bp, synthetic construct
  source 1..75: mol_type = other DNA
tggtactttacgtaaagaattgattggcgctatagctttcattgaaggggtaatgtcaatgattaaattttctga

SEQ ID NO: 20439 - DNA, 75 bp, synthetic construct
  source 1..75: mol_type = other DNA
atgaccacttttaccgacaaagaactgattaaagagcgtatcagcagccttgacgtgcgagacgatattgagcgc

SEQ ID NO: 20440 - DNA, 75 bp, synthetic construct
  source 1..75: mol_type = other DNA
aaaagaatttaaccagccatactggcgaattaatgaagaatcatgttactggcgtgatgctttattccgtgcatt

SEQ ID NO: 20441 - DNA, 75 bp, synthetic construct
  source 1..75: mol_type = other DNA
aattcgatgcgcttgaagctaaatgtgcagcacaggaaaacaaagtaataccagtgtcagctgaactgccaccag

SEQ ID NO: 20442 - DNA, 75 bp, synthetic construct
  source 1..75: mol_type = other DNA
ttaacagtcagtcagcgtcgtactttatttatgcatgccggattgactgaaaaagaattcaaccagccatactgg

SEQ ID NO: 20443 - DNA, 75 bp, synthetic construct
  source 1..75: mol_type = other DNA
catgccagcgtgatgagtggaacagccagctgatgagcgacacctgtcctgaaatcaccctggacaatgtactgg

SEQ ID NO: 20444 - DNA, 75 bp, synthetic construct
  source 1..75: mol_type = other DNA
ctcaccaattcggatgttcaggtgatcaataccttcttaacacgagtgagcaaactggaactatctcaacaagag

SEQ ID NO: 20445 - DNA, 75 bp, synthetic construct
  source 1..75: mol_type = other DNA
atgaaagagcttgagttaaagaaaccgattaccgctcatggcgagacactctccgtactggagtttgatgagccc

SEQ ID NO: 20446 - DNA, 75 bp, synthetic construct
  source 1..75: mol_type = other DNA
catggtacccagagccagtaaacatcgccctggttttatggcacgtatagcccctaaccagcgtaatggagaggg

SEQ ID NO: 20447 - DNA, 75 bp, synthetic construct
  source 1..75: mol_type = other DNA
tatggctgacgttattgagcggcggcgtcactggacgcaggaactgttgtcccgtgagctgcagcgttcgttacg

SEQ ID NO: 20448 - DNA, 75 bp, synthetic construct
  source 1..75: mol_type = other DNA
gcacgcgcgctggccttccccggagatctgcccgcaggcgcagtgctggcgctgattggcagcccttgctttgtc

SEQ ID NO: 20449 - DNA, 75 bp, synthetic construct
  source 1..75: mol_type = other DNA
cgaggaactgagcttctcacaggccgatgaactggctgatacgcagattcgcttccctgcatttttactgacgac

SEQ ID NO: 20450 - DNA, 75 bp, synthetic construct
  source 1..75: mol_type = other DNA
actgatgggacgtctgcgcaaaaaaatacaggcacaatatccgcaagaagtgattaccaccgttcgcggccaggg

SEQ ID NO: 20451 - DNA, 75 bp, synthetic construct
  source 1..75: mol_type = other DNA
gccgcaagcgttccatattgaaggcgtgatgttccagatccgtaacgtgaatggcgcgatgccgttcccggaaga

SEQ ID NO: 20452 - DNA, 75 bp, synthetic construct
  source 1..75: mol_type = other DNA
caggatggttaaggcgaacaaaaccacgtcaaaaaacgctgcgaatatcacctgagacaatttataaaacgctgt

SEQ ID NO: 20453 - DNA, 75 bp, synthetic construct
  source 1..75: mol_type = other DNA
attgctgaaggatttattgacggatgtctgtcgatgctgggtgtaaggctggagatggacgactggctgcccaaa

SEQ ID NO: 20454 - DNA, 75 bp, synthetic construct
  source 1..75: mol_type = other DNA
cgttttttacgtctgccggaagtgatgcacctgtgcggcctgtcacgctcgaccatctatgaactcatccgtaag

SEQ ID NO: 20455 - DNA, 75 bp, synthetic construct
  source 1..75: mol_type = other DNA
ccgggagagaatccgggatatcagaccgggcgtctggcccgctccatcggttattacgttcccaaaaaaacgacg

SEQ ID NO: 20456 - DNA, 75 bp, synthetic construct
  source 1..75: mol_type = other DNA
gagcgccgtgagcgtcgcgatgatttcgcaaacgaaaccgctgatgatgctgaagctggggattctgaagagtaa

SEQ ID NO: 20457 - DNA, 75 bp, synthetic construct
  source 1..75: mol_type = other DNA
ggtttagcgtattccgcagaattaccggcaatggatgacctgaaagcggaagccaaatcgcaactggaagagatc

SEQ ID NO: 20458 - DNA, 75 bp, synthetic construct
  source 1..75: mol_type = other DNA
ccgcacccgtgctgttaccggtattgatggcgatgtgaagctcaatcgcgccctgtgggtgatggcagaaaacat

SEQ ID NO: 20459 - DNA, 75 bp, synthetic construct
  source 1..75: mol_type = other DNA
ttatatcaatgactttggtggattaagtttttatgaaataaactgccctgtagtaaataacatttgtaatatttc

SEQ ID NO: 20460 - DNA, 75 bp, synthetic construct
  source 1..75: mol_type = other DNA
tctgcataaagcgattggcgctgtcctgagtgaaagcaatccggcgtccgcccttaatcatctcaaccatgcgtt

SEQ ID NO: 20461 - DNA, 75 bp, synthetic construct
  source 1..75: mol_type = other DNA
tagttacttgggaacaccaaataacacctatctaaaatataatcccaaagctaaagggaatggagttacaattat

SEQ ID NO: 20462 - DNA, 75 bp, synthetic construct
  source 1..75: mol_type = other DNA
gctgacactgtggccggatattgagctgatcagtggacaacgtctgttgcaactgctgaatggcaccttactgag

SEQ ID NO: 20463 - DNA, 75 bp, synthetic construct
  source 1..75: mol_type = other DNA
ctgcgcgcacgtctgagggtaggcattgcggatactttattgactggcctggcgtctgtcaggggcgggagagca

SEQ ID NO: 20464 - DNA, 75 bp, synthetic construct
  source 1..75: mol_type = other DNA
atgcccgcctgcgggcactgttgcagacgcaacaggacaccatccgccagatggcgaaatacaaccgcctgctct

SEQ ID NO: 20465 - DNA, 75 bp, synthetic construct
  source 1..75: mol_type = other DNA
agggtacaatgcggaagtggtccgcatgaaaaaacaaaagctacagttaaaagatgagatgctcaaaatcctgca

SEQ ID NO: 20466 - DNA, 75 bp, synthetic construct
  source 1..75: mol_type = other DNA
cagatggaggcggaatacatcccggagcggaggctgcatctttaccactgtgaccaccggggactgccgcaggcg

SEQ ID NO: 20467 - DNA, 75 bp, synthetic construct
  source 1..75: mol_type = other DNA
acgaagcggattataaagtcagtcacagtggaatcagtctgagcggtggtggcagcttcggggataaatttcagg

SEQ ID NO: 20468 - DNA, 75 bp, synthetic construct
  source 1..75: mol_type = other DNA
atggcaatatctgcaggtcgtctgacacagatgataagtgttctgaacccggtgttaacccgtaatgctgccgga

SEQ ID NO: 20469 - DNA, 75 bp, synthetic construct
  source 1..75: mol_type = other DNA
gtgacaatatggatgttgctcgtgaatatcccgattatcgcttccatgtaacagacagtattatctttacttctg

SEQ ID NO: 20470 - DNA, 75 bp, synthetic construct
  source 1..75: mol_type = other DNA
aacggtcgatacccaaccgccaacgcttgccatcaacaccatcgctcaggacaacatcatcagtgctgcggaaca

SEQ ID NO: 20471 - DNA, 75 bp, synthetic construct
  source 1..75: mol_type = other DNA
cggtattaagcggatcggcaacttcctttaacaatcaaaacaccgcaaaaacggatgttaatggtctggcgacta

SEQ ID NO: 20472 - DNA, 75 bp, synthetic construct
  source 1..75: mol_type = other DNA
cgcaacgccacctgaacaatccccagttaaaagcaaacgattcactaccttttgggtatggtttttttcctgttg

SEQ ID NO: 20473 - DNA, 75 bp, synthetic construct
  source 1..75: mol_type = other DNA
atcccattccaggctcgctatgttgctgtaggtggtgcagctggtgctggtattgccaacgccgacgccaccttt

SEQ ID NO: 20474 - DNA, 75 bp, synthetic construct
  source 1..75: mol_type = other DNA
aattaaataaaattagtcatgatgaagcatcaacttttataaaaagtttgttgagagcaaaatatgccaaaacga

SEQ ID NO: 20475 - DNA, 75 bp, synthetic construct
  source 1..75: mol_type = other DNA
gcctgcaggttgggcagcgtcgggttggacgtttgatgcgccagaataacattacagttgttcgaacgcgtaaat

SEQ ID NO: 20476 - DNA, 75 bp, synthetic construct
  source 1..75: mol_type = other DNA
tcgcggcagatatcatcatcagccagaagcgaatcggcaacctgcctgctgtgcgtgtgccgtacttcccggcga

SEQ ID NO: 20477 - DNA, 75 bp, synthetic construct
  source 1..75: mol_type = other DNA
gccttgatgcactggtgatggatgcgaccaacaacctgattgagccgtggtatcaggaagaccctgaccttgtgg

SEQ ID NO: 20478 - DNA, 75 bp, synthetic construct
  source 1..75: mol_type = other DNA
gtaatccagtgcgcacttgaaacgggcgcctcgcttaactggctcacgaccggacatggttcaaagcaaacttca

SEQ ID NO: 20479 - DNA, 75 bp, synthetic construct
  source 1..75: mol_type = other DNA
gatggacccggtgtacacgccggcgcgaaaaatccacctgtaccactgcgaccatcgcggcctgccgctggcgct

SEQ ID NO: 20480 - DNA, 75 bp, synthetic construct
  source 1..75: mol_type = other DNA
ccaccagcaaagacgtgcagcgctggtctccttgggtatgcctttttattctgtttgccggggcatttgtcgcgc

SEQ ID NO: 20481 - DNA, 75 bp, synthetic construct
  source 1..75: mol_type = other DNA
gaccatcggccatttttgccggatcttacggctggcgctcttctggcgtgttgcataaagcgcaaaccttactgc

SEQ ID NO: 20482 - DNA, 75 bp, synthetic construct
  source 1..75: mol_type = other DNA
ccctgttgtggatccggaaggcccatcagtttatcgcccggaggccggaagctatatcagcaacattgccgcagc

SEQ ID NO: 20483 - DNA, 75 bp, synthetic construct
  source 1..75: mol_type = other DNA
actgcgaccatcgcggcctgccgctggcgcttgtcagcacggaaggggcaacagaatggtgcgcagaatacgatg

SEQ ID NO: 20484 - DNA, 75 bp, synthetic construct
  source 1..75: mol_type = other DNA
tctggtagaacataatcttcatgaagtagaagacatcagattaacatcctgtcactcagccaacataacaaaaaa

SEQ ID NO: 20485 - DNA, 75 bp, synthetic construct
  source 1..75: mol_type = other DNA
ttattctgctgttctgtggcttcagcggaaacgtgttgtgcaaagaatcgattaatgaagcgatagaacgtttgt

SEQ ID NO: 20486 - DNA, 75 bp, synthetic construct
  source 1..75: mol_type = other DNA
atgaatctggtgatgtcagataatgcccgtaacaagctgggctgctacatgacgcgacaggcgtcgattaacaat

SEQ ID NO: 20487 - DNA, 75 bp, synthetic construct
  source 1..75: mol_type = other DNA
tggggcgttatcagggattaatacccgctttatccattcgtaacagggagagtatgactcatgtttcctattcgt

SEQ ID NO: 20488 - DNA, 75 bp, synthetic construct
  source 1..75: mol_type = other DNA
cttgataaactttctgaagtaacaggattccctccatattggtttatgttgccaccaagtgaggacgaacagatt

SEQ ID NO: 20489 - DNA, 75 bp, synthetic construct
  source 1..75: mol_type = other DNA
ccgtgaactgacggttcaggccactaccggtactaactccgattctgacctggactccatccaggacgaaatcaa

SEQ ID NO: 20490 - DNA, 75 bp, synthetic construct
  source 1..75: mol_type = other DNA
tgctgaaattttaacattttcccggccaaatgatgaacaacggcactatttgctgcattcaaaacttacgggatt

SEQ ID NO: 20491 - DNA, 75 bp, synthetic construct
  source 1..75: mol_type = other DNA
tcaagtacaaccgagacagcaaaggcgagcgtcacgtaatagttaacggcgtcctgatggtcaaacagggcaaaa

SEQ ID NO: 20492 - DNA, 75 bp, synthetic construct
  source 1..75: mol_type = other DNA
agtcaattattgacgatttgtgtaatcagattatcagccggatggtaaaaaatgacgtagtgaatgaggtcgcaa

SEQ ID NO: 20493 - DNA, 75 bp, synthetic construct
  source 1..75: mol_type = other DNA
catcgctgctggttaaacaaagcccggcaatgcattacggtcacggctggatcatgggggaggatggtaaacgct

SEQ ID NO: 20494 - DNA, 75 bp, synthetic construct
  source 1..75: mol_type = other DNA
gcactgaactgaacgtcgaggtaccgctgtcggatgatctcaatgtcagtctaaacgccatgacacagcatcgca

SEQ ID NO: 20495 - DNA, 75 bp, synthetic construct
  source 1..75: mol_type = other DNA
catactgtcggtattggtgctcatacgcactccgttgcgattggttcacatggacacaccatcaccgttaacgct

SEQ ID NO: 20496 - DNA, 75 bp, synthetic construct
  source 1..75: mol_type = other DNA
aaggcaagttttcagcgactctacaaagtgttaaatattttaggagtggagatgtcccttaattctgcgcctatt

SEQ ID NO: 20497 - DNA, 75 bp, synthetic construct
  source 1..75: mol_type = other DNA
aattagccaatatttttaataaaaaacataaagaacacatggatgatcgttttatccatctaattagaagcaatg

SEQ ID NO: 20498 - DNA, 75 bp, synthetic construct
  source 1..75: mol_type = other DNA
aaaaaataaggacttaatatttactggcggtggagatatcctcctgaaatcctcttttgataatggtgctggcgg

SEQ ID NO: 20499 - DNA, 75 bp, synthetic construct
  source 1..75: mol_type = other DNA
ggtctgaaccggactattaccgccatcttgaacaggcgcgaatggtcgggcatgacatcagggaatggctggata

SEQ ID NO: 20500 - DNA, 75 bp, synthetic construct
  source 1..75: mol_type = other DNA
ataaaaatgatgctgccgttttgcttgttgatcaccaggctggtttactttcccttgtacgggatatcgaacccg

SEQ ID NO: 20501 - DNA, 75 bp, synthetic construct
  source 1..75: mol_type = other DNA
tcgccgtaatcttggggggcgttctgtaggctggttgctttccgaagttatggactgggtgcaaagccgtgaccg

SEQ ID NO: 20502 - DNA, 75 bp, synthetic construct
  source 1..75: mol_type = other DNA
aagtgcgtgacgggtgatgatgtgcgtccgatgcttgagcagatggtgaaggacgcagcaagccatatccctgtt

SEQ ID NO: 20503 - DNA, 75 bp, synthetic construct
  source 1..75: mol_type = other DNA
attatgaaaaacagtccgtggtgctcagtgagctgtccgggctgcagagaattgaatatctggcgtttgttcagc

SEQ ID NO: 20504 - DNA, 75 bp, synthetic construct
  source 1..75: mol_type = other DNA
ttcgctggagcaggcccgcgaaaagctgttgaacgagatggggcgcgagtccacgccatccaataaaaatacccc

SEQ ID NO: 20505 - DNA, 75 bp, synthetic construct
  source 1..75: mol_type = other DNA
gtgaattcactctataccgctgaaggtgtaatggataaacactcgctgtggcagcgttatgtcccgctggtgcgt

SEQ ID NO: 20506 - DNA, 75 bp, synthetic construct
  source 1..75: mol_type = other DNA
taacgtgcgtgaactgaccccggcaattctggcggtactaccgctggaatatcgcggttacctggttgagcagga

SEQ ID NO: 20507 - DNA, 75 bp, synthetic construct
  source 1..75: mol_type = other DNA
cgaccgtctggccagcgcagcaaactctcccgtgcgggaagcttatgatggcgcggccatacacgccagttactg

SEQ ID NO: 20508 - DNA, 75 bp, synthetic construct
  source 1..75: mol_type = other DNA
tggtatccgcgcagattgcgatcaccgcatcgccaatctcagcggcagtggtttacatgtcttccgtgatggaag

SEQ ID NO: 20509 - DNA, 75 bp, synthetic construct
  source 1..75: mol_type = other DNA
gtgacctggtttgaactgggggagaacgacaaaaaccagaagctgtacagcatgaaggtatgcccgccgctgtgg

SEQ ID NO: 20510 - DNA, 75 bp, synthetic construct
  source 1..75: mol_type = other DNA
atgagattttcttccgtcaggctgcttctgatccctctgataactgcaactatcgctcttacaggatgcacacca

SEQ ID NO: 20511 - DNA, 75 bp, synthetic construct
  source 1..75: mol_type = other DNA
tgacctggtacggctgggacggcgaccggctgaccacgatacagaacgacaggagccgcatccagacgatttatc

SEQ ID NO: 20512 - DNA, 75 bp, synthetic construct
  source 1..75: mol_type = other DNA
acattgtgcagtcgttgccatcgtttactgaaacgcaagcggataacctgattttaccatcgctgcatatggcaa

SEQ ID NO: 20513 - DNA, 75 bp, synthetic construct
  source 1..75: mol_type = other DNA
atggagaccgtttttgacgcactgaaagcgatgggaaaagctacgtcggtagaactggctgagcgacttgatatc

SEQ ID NO: 20514 - DNA, 75 bp, synthetic construct
  source 1..75: mol_type = other DNA
cgatgaatggggcaacctgctgaatgaagagaacccgcatcagctgcagcagcttatccgcctgccggggcagca

SEQ ID NO: 20515 - DNA, 75 bp, synthetic construct
  source 1..75: mol_type = other DNA
atgccggaccctcactccgtgatcagattatggctctggatgaggcaaaaggggctgaggcgcaggctgaaaaac

SEQ ID NO: 20516 - DNA, 75 bp, synthetic construct
  source 1..75: mol_type = other DNA
atgtctgaatggtgcaaaaaccgttttgaaattaccggtaaatcagtctgtcttgatgtacttacacagtggatt

SEQ ID NO: 20517 - DNA, 75 bp, synthetic construct
  source 1..75: mol_type = other DNA
tggggaggccagcgagcagaccgccggactttgagtgagttgctggacatctggtggaaatatcacgggcaaaac

SEQ ID NO: 20518 - DNA, 75 bp, synthetic construct
  source 1..75: mol_type = other DNA
gacaatgggatttccttctcaaacaaccctatgaatttattcttactcaatcctttatttttgagtcaccaacaa

SEQ ID NO: 20519 - DNA, 75 bp, synthetic construct
  source 1..75: mol_type = other DNA
tcagctcttggcgtaagtgttgactggctgctcaatggcacctctgattcgaatgttagatttgttgggcatgtt

SEQ ID NO: 20520 - DNA, 75 bp, synthetic construct
  source 1..75: mol_type = other DNA
tatgtgttattttgacaccataagtcagcatttcataattatggatgcagaccaacagaaacagcattgtaaata

SEQ ID NO: 20521 - DNA, 75 bp, synthetic construct
  source 1..75: mol_type = other DNA
ttgtgcatgatgccgggaaggtatatgacatagatatagtaagtctcaatctgagtaaaactttaacatgggcgc

SEQ ID NO: 20522 - DNA, 75 bp, synthetic construct
  source 1..75: mol_type = other DNA
tgtttggctgtttttttgtgttggtctttattggtgtgcccatttcgttctcaatcggtattgccactgtagctt

SEQ ID NO: 20523 - DNA, 75 bp, synthetic construct
  source 1..75: mol_type = other DNA
ctaaagcgatagagcttctctcgggggcaactgaaagcggatataaagctgttgcaccaatttattcaactactg

SEQ ID NO: 20524 - DNA, 75 bp, synthetic construct
  source 1..75: mol_type = other DNA
tgcgaccgatagcaattctttactttggcaagatttaagtaaatttctgggtgacaaatcaaagtctcatgcatt

SEQ ID NO: 20525 - DNA, 75 bp, synthetic construct
  source 1..75: mol_type = other DNA
atgctattccttctcatactgtattgtctcggcagtatgataattgtcttaatttttgattttatcgctgaatat

SEQ ID NO: 20526 - DNA, 75 bp, synthetic construct
  source 1..75: mol_type = other DNA
gaagccactcgtaatttcacgggttataaacctgtgaaaaaggaaaatctggtgttcgtatcgcgtagagcatca

SEQ ID NO: 20527 - DNA, 75 bp, synthetic construct
  source 1..75: mol_type = other DNA
accgtgtggagcgctcctacggcagctttcagcgtgccttgaacctgcctgacgacgccaaccaggattcgatca

SEQ ID NO: 20528 - DNA, 75 bp, synthetic construct
  source 1..75: mol_type = other DNA
acgtattgcagggtggcgcaagtctgattaatgcaatcagccaggggcttggtggccccaaggttttggatgatg

SEQ ID NO: 20529 - DNA, 75 bp, synthetic construct
  source 1..75: mol_type = other DNA
tgatggtcagtacatcagcacggtggattatgagtgcgtaaaaatcagcgatctgattgccatgatggttggtcg

SEQ ID NO: 20530 - DNA, 75 bp, synthetic construct
  source 1..75: mol_type = other DNA
gtggcgcacgtcttcggtgaacacactctggccacactggagcgtcttctgagcctgctgtcggcctttgaggtc

SEQ ID NO: 20531 - DNA, 75 bp, synthetic construct
  source 1..75: mol_type = other DNA
acgatgccggttatagcggaaccagtatgacgggcgggaaaggcgctgcagggatttgtattatcgaggagtttg

SEQ ID NO: 20532 - DNA, 75 bp, synthetic construct
  source 1..75: mol_type = other DNA
gccggaaacacgcagtatgactatgacgccgcaggccggatggtcagccgcaccagacaccgtgacggctatcgc

SEQ ID NO: 20533 - DNA, 75 bp, synthetic construct
  source 1..75: mol_type = other DNA
gtggaggcctccggtgccagcctggagaaagggcggcacgaccagttgcttaccgcgcttcgtgcgctgctgtta

SEQ ID NO: 20534 - DNA, 75 bp, synthetic construct
  source 1..75: mol_type = other DNA
tcctgtcaataatgagccaatcagaattagggcgtcgtcttggtaaaacaccgcaaaccataagtgggtggttta

SEQ ID NO: 20535 - DNA, 75 bp, synthetic construct
  source 1..75: mol_type = other DNA
tgctttttgaccccgatttttgcgacttcaatttgtgggtaacacgccgagtgcaaacggtggatgaggacggga

SEQ ID NO: 20536 - DNA, 75 bp, synthetic construct
  source 1..75: mol_type = other DNA
gtgaagtaactcattcagatataacaaatttaattaacctggattatcggttagtaaaagagatggtcaataaat

SEQ ID NO: 20537 - DNA, 75 bp, synthetic construct
  source 1..75: mol_type = other DNA
atgtcagtaaaaacactcttgatctatgcctcttacgggagggcatcaaagggaggatcaaaactcgtaagctaa

SEQ ID NO: 20538 - DNA, 75 bp, synthetic construct
  source 1..75: mol_type = other DNA
ttttccggcgactttcgcgagaatgtggttttcctgtttcaccacatcgtttcagacatacgctggcaaccagac

SEQ ID NO: 20539 - DNA, 75 bp, synthetic construct
  source 1..75: mol_type = other DNA
gatttctgcgcagataaaccagtacggcgctggagtgatgagcgaaaagcagcgacccgtcgccggaatctggat

SEQ ID NO: 20540 - DNA, 75 bp, synthetic construct
  source 1..75: mol_type = other DNA
gccaccaccgtatccatgggaaatggcggtgtactgctggccgattccggtgccgctgtcagtggtacccggagc

SEQ ID NO: 20541 - DNA, 75 bp, synthetic construct
  source 1..75: mol_type = other DNA
gcgtttgcgaaccctttgtcggacactgactggctgcgtcttgcgatggtgaaggatctgcaacctggcgaaatg

SEQ ID NO: 20542 - DNA, 75 bp, synthetic construct
  source 1..75: mol_type = other DNA
gccgtcaaatccggcgcaatggcaaccgacacggttgtgaataccggcgcggaagggggaccagatgcagaaaat

SEQ ID NO: 20543 - DNA, 75 bp, synthetic construct
  source 1..75: mol_type = other DNA
gggaaaactggggaatctggcgaaactgggcaaactgggaaacctgctggggaaaagcgggaagctgctgggcgc

SEQ ID NO: 20544 - DNA, 75 bp, synthetic construct
  source 1..75: mol_type = other DNA
gggacaggtcatgttgcctatctggatggcccctgtgcaggggtaagtgcagtaaaacgtcaggtactgccggtg

SEQ ID NO: 20545 - DNA, 75 bp, synthetic construct
  source 1..75: mol_type = other DNA
ccgggaaattggtgtatttgatgagcacggcgatttgatcgcggtgggcaatactgccgaaagttacaagccagc

SEQ ID NO: 20546 - DNA, 75 bp, synthetic construct
  source 1..75: mol_type = other DNA
tgtacatcatgctccatcaacacccggagacctgttatatcatattcgcgccgcccggatggatctttgttttga

SEQ ID NO: 20547 - DNA, 75 bp, synthetic construct
  source 1..75: mol_type = other DNA
aagccgccggcattaccgcctgcctgatgacgtacagccatcacgcctgtcgtacagaaaattatgccatgacgg

SEQ ID NO: 20548 - DNA, 75 bp, synthetic construct
  source 1..75: mol_type = other DNA
cgctgtatgaatcacgcctgaagggagaactgcacgttatcagcaagcgatatacgcagcgcattgagcggcata

SEQ ID NO: 20549 - DNA, 75 bp, synthetic construct
  source 1..75: mol_type = other DNA
tcggtggagttgcatgacaaggtcatcgggcattatctgaacataaaacactatcagtacataaaacactatcag

SEQ ID NO: 20550 - DNA, 75 bp, synthetic construct
  source 1..75: mol_type = other DNA
cgaaatcaaccggctgaaggcgctggttgcgaaactgcaacgtatgcagttcggtaaaagctcagaaaaacttcg

SEQ ID NO: 20551 - DNA, 75 bp, synthetic construct
  source 1..75: mol_type = other DNA
gggtgagcaatatgacccggcactgccatcttccctgcgccagtcttcagcccgtaaaccgttaccggctgcact

SEQ ID NO: 20552 - DNA, 75 bp, synthetic construct
  source 1..75: mol_type = other DNA
tgccgtctgtctcgggaaaaagaattcttatgacctttgtcaaatattaagcccaaaaagaccttacgcagctcc

SEQ ID NO: 20553 - DNA, 75 bp, synthetic construct
  source 1..75: mol_type = other DNA
agtgatccgcacagaacgggtaaaaaaagcctgtacaaaatgtgactgtattgttgaagcaccggcgccgtcccg

SEQ ID NO: 20554 - DNA, 75 bp, synthetic construct
  source 1..75: mol_type = other DNA
tgcactgacacgtgccgaagaaaagatcgaagaagatgaacgggaaatagaacatctgcgggctcagatagaaaa

SEQ ID NO: 20555 - DNA, 75 bp, synthetic construct
  source 1..75: mol_type = other DNA
cacaatatgcagagccgctggtcgaaagccgctatctttacgacccgctgggccgcagggtggcaaaacgggtgt

SEQ ID NO: 20556 - DNA, 75 bp, synthetic construct
  source 1..75: mol_type = other DNA
atggcaaaaaacactatcaacgacaaatcaaaacagatttcaattcgtatcccacatgatgcttttgatggcatg

SEQ ID NO: 20557 - DNA, 75 bp, synthetic construct
  source 1..75: mol_type = other DNA
tgcctactttgaatggaacagaacagtaaccactttccgatatcctcttcaaaattcgaagaaatcacgagaaat

SEQ ID NO: 20558 - DNA, 75 bp, synthetic construct
  source 1..75: mol_type = other DNA
cattgcaccaccatactttattctccgagcttatcaagcgtcaggaatttggagtatggttcagagttgaagact

SEQ ID NO: 20559 - DNA, 75 bp, synthetic construct
  source 1..75: mol_type = other DNA
ggtcaggaaagaatgcccggggctgacagtccacaggaactgatgaaaagagcaaaggagtatcaggataagcac

SEQ ID NO: 20560 - DNA, 75 bp, synthetic construct
  source 1..75: mol_type = other DNA
gatagaacatcatcggcaaggccgcccggagcactggcgcacagtggagcgctggcaacatcttgatgaattaat

SEQ ID NO: 20561 - DNA, 75 bp, synthetic construct
  source 1..75: mol_type = other DNA
tgttggtatcggtgcaggtgttgacgcttcagttatgactctggcttgtagaacgtggcaagaatgctgggtcaa

SEQ ID NO: 20562 - DNA, 75 bp, synthetic construct
  source 1..75: mol_type = other DNA
cagcatggggtatgacgctgccgggcgcatcaccgtgctgaccaacgagaacggcagccagtccacgttccggta

SEQ ID NO: 20563 - DNA, 75 bp, synthetic construct
  source 1..75: mol_type = other DNA
agcacttgatcagcttggtttctctgctggcgttctgtcaacactcaaatcactgggtaaaatgaaggggcttat

SEQ ID NO: 20564 - DNA, 75 bp, synthetic construct
  source 1..75: mol_type = other DNA
ttatatcggctggaacttattgatccgaataacccggacgtcgttgccgcccgtttccgttctttgttacgtcag

SEQ ID NO: 20565 - DNA, 75 bp, synthetic construct
  source 1..75: mol_type = other DNA
gcggatgcgcttcagcagtccggcggcgaagacggtggcagtgtggtgttcccgccggtgctggtgcagatgctc

SEQ ID NO: 20566 - DNA, 75 bp, synthetic construct
  source 1..75: mol_type = other DNA
agcgtactgccggaatggccttccaaccgagttggcgaactcctgccatggaacgtagtactcaccaataaataa

SEQ ID NO: 20567 - DNA, 75 bp, synthetic construct
  source 1..75: mol_type = other DNA
accactgatactgcatatagagtttcttcaacagttactagtactgagaacttagtgtgtagttttttgaaccct

SEQ ID NO: 20568 - DNA, 75 bp, synthetic construct
  source 1..75: mol_type = other DNA
cctggtcgatcgtaataacaatattgtcctcgaatatcgcaagaaagagctggtgcggctgacgctgaccgatcc

SEQ ID NO: 20569 - DNA, 75 bp, synthetic construct
  source 1..75: mol_type = other DNA
gcggctgcatcatctgccagcgccgcgtcaacaagtgccgggcaggcctcagccagtgccaccgctgccggaaag

SEQ ID NO: 20570 - DNA, 75 bp, synthetic construct
  source 1..75: mol_type = other DNA
ggcaatgaggctgtatatattcagtactcttcggggattgttggcggcaatatgacccgctcttcgccatcagcc

SEQ ID NO: 20571 - DNA, 75 bp, synthetic construct
  source 1..75: mol_type = other DNA
cgaagacggtggcagtgtggtgttcccgccggtgctggtgcagatgctcgaccggctggaaagtgaaatcctggc

SEQ ID NO: 20572 - DNA, 75 bp, synthetic construct
  source 1..75: mol_type = other DNA
acatggcgaccacagccgttgctgaaaccgctggtcgacggcccgcagagcgctgtcgtgacaggaccggcaggc

SEQ ID NO: 20573 - DNA, 75 bp, synthetic construct
  source 1..75: mol_type = other DNA
atgattttaccggcgcgacggatatcgccagttttctggtggaaaacggtctaccaacggtacaaattaacggtg

SEQ ID NO: 20574 - DNA, 75 bp, synthetic construct
  source 1..75: mol_type = other DNA
caggtaggctaacgattagtgaattgattgatgccctggcgaaagataaaaattacacagcttccagatggtatc

SEQ ID NO: 20575 - DNA, 75 bp, synthetic construct
  source 1..75: mol_type = other DNA
accgttctgctgacgactatgattctcgcggtgtgacggcctctgttgagggtgggtatacctttgaagcgggaa

SEQ ID NO: 20576 - DNA, 75 bp, synthetic construct
  source 1..75: mol_type = other DNA
gcgcatcagcggttacagcgctgggctgtacgcgacctggtatcagaacgatgcgaataagaccggcgcttatgt

SEQ ID NO: 20577 - DNA, 75 bp, synthetic construct
  source 1..75: mol_type = other DNA
ctgagattctacggagatatgcaaatggattgattgaacaagcttataaaacagatcctcaggtatttggctcag

SEQ ID NO: 20578 - DNA, 75 bp, synthetic construct
  source 1..75: mol_type = other DNA
acattcatatttatatgagtatatccttggtgctcattcgtttgatcagcaaaacattaaaactgtttccttttg

SEQ ID NO: 20579 - DNA, 75 bp, synthetic construct
  source 1..75: mol_type = other DNA
gatggcgacatgtcatatgcccgtatcggtttcaaaggtgaaactcagatcgctgaccaattcactggttatggt

SEQ ID NO: 20580 - DNA, 75 bp, synthetic construct
  source 1..75: mol_type = other DNA
tgagcaatcttttttctgaatcatttccaattttcagtattccttatcataaagctttttcccagaatttcgttt

SEQ ID NO: 20581 - DNA, 75 bp, synthetic construct
  source 1..75: mol_type = other DNA
ggagcgggtgccgggggcggacgaggtgctgccgcctccgccgcccgcataccgggtgctgacgggggtggtgga

SEQ ID NO: 20582 - DNA, 75 bp, synthetic construct
  source 1..75: mol_type = other DNA
tggcgttagtgtctgttggtgtaagtgcaaacaccataacgatgcaatgcggcaactttcgtatggatgcgatcc

SEQ ID NO: 20583 - DNA, 75 bp, synthetic construct
  source 1..75: mol_type = other DNA
ctgaaaaggtttaacgggttaatctcacagcgaaaactgcgatatgcagacgataagccctggaccacggcatct

SEQ ID NO: 20584 - DNA, 75 bp, synthetic construct
  source 1..75: mol_type = other DNA
atgttagctcgttcagggaaggtaagcatggctacgaagaagagaagtggagaagaaataaatgaccgacaaata

SEQ ID NO: 20585 - DNA, 75 bp, synthetic construct
  source 1..75: mol_type = other DNA
agcgcacagaagcgttgttccgggttgtgccaccgagtctgtatctggctctggggatgacggagaaagaagaga

SEQ ID NO: 20586 - DNA, 75 bp, synthetic construct
  source 1..75: mol_type = other DNA
acgagaaattgtgattggcatagataatacttatccgacaattattttcgatcagttgattagtctcggagataa

SEQ ID NO: 20587 - DNA, 75 bp, synthetic construct
  source 1..75: mol_type = other DNA
tggacttactcaccagtcctgtctggatcgtttcgccctttgaggaacagttaatttatgccaacagcgcggcgc

SEQ ID NO: 20588 - DNA, 75 bp, synthetic construct
  source 1..75: mol_type = other DNA
tcactgggtaaaaccattgcctcaaaagacgtgatgacccgcacagtgaaaatcagcggtgtggggcgtccgtat

SEQ ID NO: 20589 - DNA, 75 bp, synthetic construct
  source 1..75: mol_type = other DNA
atgccgttgagaaagtcagttttgatctctggcctggcgaaacgctatcgctggtgggcgagtctggcagcggta

SEQ ID NO: 20590 - DNA, 75 bp, synthetic construct
  source 1..75: mol_type = other DNA
ttgtaatggctggtggtacgggtagccgtctttggcccctctcaagagagcactatccgaagcaatttctgcaat

SEQ ID NO: 20591 - DNA, 75 bp, synthetic construct
  source 1..75: mol_type = other DNA
gagcagttagctaaattaccatcagaatgtcgggattctgatgacagcgccgtaatgagctggactgcagctggc

SEQ ID NO: 20592 - DNA, 75 bp, synthetic construct
  source 1..75: mol_type = other DNA
aacgggcaactccttggtaatactctcacaggtaatgacgcagcaaaaggagtcggtgtactcatagaaggttta

SEQ ID NO: 20593 - DNA, 75 bp, synthetic construct
  source 1..75: mol_type = other DNA
aagccctggatactatcgccagtagcctgaaaaaaaccgtcgaacaatatggcaatgaggctgtatatattcagt

SEQ ID NO: 20594 - DNA, 75 bp, synthetic construct
  source 1..75: mol_type = other DNA
ttgaggcacaaatcgacgcatatgttgatgaagtgctggcccgaatggttggccgttctccggctgaaaacagca

SEQ ID NO: 20595 - DNA, 75 bp, synthetic construct
  source 1..75: mol_type = other DNA
atcagatggtataacgagcggcgtataaaattatcgctgggtgccgtcagccccaaaatgtaccgccaacaatgc

SEQ ID NO: 20596 - DNA, 75 bp, synthetic construct
  source 1..75: mol_type = other DNA
aacgcgggctggcgcaccttttttgttgataatcaggtgaagacgctgattagcgaggcgctggtgaataatcgg

SEQ ID NO: 20597 - DNA, 75 bp, synthetic construct
  source 1..75: mol_type = other DNA
ccaggaaactacgaacttgatttttatgtaaataaccagtggcgtggaaaacaagatatcacgatcccagagtca

SEQ ID NO: 20598 - DNA, 75 bp, synthetic construct
  source 1..75: mol_type = other DNA
tggtggcccgtcgccgccaggttgtgaatatgatttccactgagcagcagcgtaaatctgccgccagtaactatt

SEQ ID NO: 20599 - DNA, 75 bp, synthetic construct
  source 1..75: mol_type = other DNA
tcgatgtatcaaaactcactcttgatgttcatgtgtctcctgcacagcttcatcagactgtatcaaacaacgagt

SEQ ID NO: 20600 - DNA, 75 bp, synthetic construct
  source 1..75: mol_type = other DNA
cccttcgatgtggtaaccggtaaacgactgtacagcaacatgttgatccgggcgttggaagtgacgacggacaag

SEQ ID NO: 20601 - DNA, 75 bp, synthetic construct
  source 1..75: mol_type = other DNA
taagcaaggccttaagtggcgaaaagatgaaaaagaaagatcgcgatgctgatttgcgctggattcatggcgtta

SEQ ID NO: 20602 - DNA, 75 bp, synthetic construct
  source 1..75: mol_type = other DNA
actgatttcatgaaagcggtatattttctgtatctcaatcgtcatggttaccgtgggttatgtcgctataacaag

SEQ ID NO: 20603 - DNA, 75 bp, synthetic construct
  source 1..75: mol_type = other DNA
tccgtttgttccaggaaggtcatctgctacgtaatagcatcgctatttttgtgctaaccacgctgttctatttta

SEQ ID NO: 20604 - DNA, 75 bp, synthetic construct
  source 1..75: mol_type = other DNA
cctgcgctttgattatctcagcgactccggcgggaacttcagccccagtctgaatctttcgcaggaattgggcga

SEQ ID NO: 20605 - DNA, 75 bp, synthetic construct
  source 1..75: mol_type = other DNA
gacggcaatacggcgtggagcgcggaatatgatgaatggggcaaccagcttaatgaggagaacccgcatcacctg

SEQ ID NO: 20606 - DNA, 75 bp, synthetic construct
  source 1..75: mol_type = other DNA
gagaaaaagaaaggccgccagacgactcatatcgtattttccttccgtgatattacctcgatgacaacagaatag

SEQ ID NO: 20607 - DNA, 75 bp, synthetic construct
  source 1..75: mol_type = other DNA
tatccattggtagtggccaatattctgttcactatgtccaactactggatggattttcagttgaaccggtgagag

SEQ ID NO: 20608 - DNA, 75 bp, synthetic construct
  source 1..75: mol_type = other DNA
ggccggcgggaggaatacggcgcgctacctgggtcgttatctgaagaagccgccgatagcggcctcccggctggc

SEQ ID NO: 20609 - DNA, 75 bp, synthetic construct
  source 1..75: mol_type = other DNA
ctccatgacagacaggcatggagcaacgactccggtacggatgaatggcatagttgggcgcaacattatgcggtt

SEQ ID NO: 20610 - DNA, 75 bp, synthetic construct
  source 1..75: mol_type = other DNA
aaaaatctcgacagcgcatgggaaggtcttcgtattcgcatcagtgatctggttgacggtccgctgcgttctgtc

SEQ ID NO: 20611 - DNA, 75 bp, synthetic construct
  source 1..75: mol_type = other DNA
gtgacaccgcagatcatgaagctccagttgattgctctgggtgaagagtggattgaacaggggctggtcgagaat

SEQ ID NO: 20612 - DNA, 75 bp, synthetic construct
  source 1..75: mol_type = other DNA
agacggtgcgcagcttcggcagcagggcaggcagtaatgccgcatatgaactgaccagcacatacacccccgcag

SEQ ID NO: 20613 - DNA, 75 bp, synthetic construct
  source 1..75: mol_type = other DNA
ttaaaactgataggatttaacctaacaagaatgactaactggacagctacttatctgagcggtacaggtactaca

SEQ ID NO: 20614 - DNA, 75 bp, synthetic construct
  source 1..75: mol_type = other DNA
atgctcaccgttaagcagattgaagcagcaaagccgaaagaaaaaccataccgcctactcgatggtaatggcctg

SEQ ID NO: 20615 - DNA, 75 bp, synthetic construct
  source 1..75: mol_type = other DNA
tagttgatgcaattgaaaataagcaatctttaacagtcgtttacttaggagggagccagcccggaacattaagga

SEQ ID NO: 20616 - DNA, 75 bp, synthetic construct
  source 1..75: mol_type = other DNA
tggtcgtccgatcgcttatcgatcagggcgttaaacaagtattcggttatcccggaggcgcagtccttgatattt

SEQ ID NO: 20617 - DNA, 75 bp, synthetic construct
  source 1..75: mol_type = other DNA
gtacaaatatcaggcatgtacattcggttattcgttttatcagatatttgattaacacgtatatctcgccgagat

SEQ ID NO: 20618 - DNA, 75 bp, synthetic construct
  source 1..75: mol_type = other DNA
cgccaggaaaacattggcgcaggcagcgacgcattataaaaaattcaaaagcatggcaccgttacctgaaatggt

SEQ ID NO: 20619 - DNA, 75 bp, synthetic construct
  source 1..75: mol_type = other DNA
aagggtttcttcgcgggaaatgtgtaccgcgagatctgaaagtgaacgaaacaaatgctgagtacctagtacgta

SEQ ID NO: 20620 - DNA, 75 bp, synthetic construct
  source 1..75: mol_type = other DNA
acgctaatgatgggtggataattcctggtgcgtcgtggaaaccgtcacactggatgccgctaccagaaccgccgc

SEQ ID NO: 20621 - DNA, 75 bp, synthetic construct
  source 1..75: mol_type = other DNA
gatggggaccggataatgaagaaaaagcccgtcatcaggaggttcagcaacaacgatttgatgaactgagtaaaa

SEQ ID NO: 20622 - DNA, 75 bp, synthetic construct
  source 1..75: mol_type = other DNA
agataggtagagagaaagctggcatgagccaagctcaactagctgaaaaaattggactttcacaacaatctgtag

SEQ ID NO: 20623 - DNA, 75 bp, synthetic construct
  source 1..75: mol_type = other DNA
cgtatggaacgggggcgaccttggtcagttgtcatcaggtgacacactgcccaaaggttattacgtatacgccca

SEQ ID NO: 20624 - DNA, 75 bp, synthetic construct
  source 1..75: mol_type = other DNA
tcgccctatattgcagccacaaagcgtggagaatatctctctgtctttgaagtcagcggtgctttcagggaaatg

SEQ ID NO: 20625 - DNA, 75 bp, synthetic construct
  source 1..75: mol_type = other DNA
tatggtgtttacaccaaagcccgtcgtaacatcatcactgggaaaatcatgcccgcagcgcctgggggctctgct

SEQ ID NO: 20626 - DNA, 75 bp, synthetic construct
  source 1..75: mol_type = other DNA
aacgctcagcaacagtggctccctgctcagtggcggtcccctgaccatgaatacccgcgactttacccagagcgg

SEQ ID NO: 20627 - DNA, 75 bp, synthetic construct
  source 1..75: mol_type = other DNA
actctggaagagaaattgtactactgctcttgtataagaagaaacagacacaaatacagctacgggcgtcaggca

SEQ ID NO: 20628 - DNA, 75 bp, synthetic construct
  source 1..75: mol_type = other DNA
aataccgtcgccagcgacaatatcgtcaacgccagcgaagccgatgcgggtgtgacggtgagcggcagcaccacc

SEQ ID NO: 20629 - DNA, 75 bp, synthetic construct
  source 1..75: mol_type = other DNA
ccagatagatcggatgaagaaggttgcgatatagactacatggagccttcagagatttatcaacttggtaaagat

SEQ ID NO: 20630 - DNA, 75 bp, synthetic construct
  source 1..75: mol_type = other DNA
aaatgtcgcctgggatttgtcagaggtcgaagagtggattgaggcacgtaaatcatcgggtgatcaagctgcgcg

SEQ ID NO: 20631 - DNA, 75 bp, synthetic construct
  source 1..75: mol_type = other DNA
actgaagatctggaaacgtggcgcgcccgcgtcattgagcggtattactggacgcctcagggcggggctgacggg

SEQ ID NO: 20632 - DNA, 75 bp, synthetic construct
  source 1..75: mol_type = other DNA
gaacctataccgattcatatcagttaggagatggggaactgcttgtttgtacggtgaatatccctgctggcgtat

SEQ ID NO: 20633 - DNA, 75 bp, synthetic construct
  source 1..75: mol_type = other DNA
tcgcccgtgacgcgcactatctttaccggtatgaccgtcacggcaggctgacagagaaaaccgacctcatcccgg

SEQ ID NO: 20634 - DNA, 75 bp, synthetic construct
  source 1..75: mol_type = other DNA
agggggccacggctgccagcgggtatatgcgctgggaaggtgtcagcgatggcctgaaggtgaccgccgggagtg

SEQ ID NO: 20635 - DNA, 75 bp, synthetic construct
  source 1..75: mol_type = other DNA
aatgtcagttttaaccaatgctaaagctgatgcgacccgaatagataatggcggggttatggatgttgcaggaaa

SEQ ID NO: 20636 - DNA, 75 bp, synthetic construct
  source 1..75: mol_type = other DNA
cggcagaagcagaaaaagcttattatgcttccatcggaaacgatgatctggcagcctgagttcacagataaaaca

SEQ ID NO: 20637 - DNA, 75 bp, synthetic construct
  source 1..75: mol_type = other DNA
gtctttacaaagcggaggtaatacaccgtaatagctggaaaaaccggacagaagtggaactgcccactcacgtgg

SEQ ID NO: 20638 - DNA, 75 bp, synthetic construct
  source 1..75: mol_type = other DNA
atgaatatcaacttaatttatcgtcatccgtgtgagctggaaattgaatcattgctgagccgtgaagagccatat

SEQ ID NO: 20639 - DNA, 75 bp, synthetic construct
  source 1..75: mol_type = other DNA
gcggttaatgatttcatggatagcgtccaccatatttggtgtccactattctctcaggaatttcaggatctgcca

SEQ ID NO: 20640 - DNA, 75 bp, synthetic construct
  source 1..75: mol_type = other DNA
atgccgtggcaaccattaaggcgatgcactgagccgggctgtaataagcgcgtgaagtccggcaagtgtgaagag

SEQ ID NO: 20641 - DNA, 75 bp, synthetic construct
  source 1..75: mol_type = other DNA
aaaaggcgacacaaaaattgatctgaagcgtttttccagccagggatatgttgagcccggaaaatacaatttaca

SEQ ID NO: 20642 - DNA, 75 bp, synthetic construct
  source 1..75: mol_type = other DNA
ttttggcgcaaaggccatttctactatcgcggagtcaaaacgatttccgctgcacgaaatgcgcgatgatgtcgc

SEQ ID NO: 20643 - DNA, 75 bp, synthetic construct
  source 1..75: mol_type = other DNA
agtccgggcaactatccttattacggtccgactaagatccaaggttatattggtacttatgaacaagatggaagt

SEQ ID NO: 20644 - DNA, 75 bp, synthetic construct
  source 1..75: mol_type = other DNA
atatatggaacagagccgtgcaaccccatgtacgcgccaaaacgtcagtagtgcaatacaaaacaaaattaactc

SEQ ID NO: 20645 - DNA, 75 bp, synthetic construct
  source 1..75: mol_type = other DNA
tttcagaaaaaagactttatagatgcaggtgtagggtgcatacactatggtcaaatctatacgtattacggaaca

SEQ ID NO: 20646 - DNA, 75 bp, synthetic construct
  source 1..75: mol_type = other DNA
gcggttcactcgacgcctggtttaaaatttcacaacgtggaagcactgtccgtcaggaagtggttgccgggttaa

SEQ ID NO: 20647 - DNA, 75 bp, synthetic construct
  source 1..75: mol_type = other DNA
caccctctcagccgtgaaccctttgttccggaaatgattgtcagcaaagatgaatgccattttaatctaatagaa

SEQ ID NO: 20648 - DNA, 75 bp, synthetic construct
  source 1..75: mol_type = other DNA
aacgtccgggtgcagcgcttcaactggttggcaaagtaaatgatatttatgcgcctgaactggaaattgaagtaa

SEQ ID NO: 20649 - DNA, 75 bp, synthetic construct
  source 1..75: mol_type = other DNA
ttcttgccctgccggtgatatcagttgccggcactaccgtttataccgactcggcacatctgccggttaatccgc

SEQ ID NO: 20650 - DNA, 75 bp, synthetic construct
  source 1..75: mol_type = other DNA
tgatgttggtaaggcgcttgtttatctaggtaaagaacaagctgttactggtggtcatgccactattttcaaacc

SEQ ID NO: 20651 - DNA, 75 bp, synthetic construct
  source 1..75: mol_type = other DNA
tggcccgttcaatggatctggacatctataaccttcatccggcacacgctaaacgcattgaggaaattatcgctg

SEQ ID NO: 20652 - DNA, 75 bp, synthetic construct
  source 1..75: mol_type = other DNA
cgaaaaaattatccattgccatctcccgtggtgctgttgcgattgacgatgcaggctacgatgaagatgacttta

SEQ ID NO: 20653 - DNA, 75 bp, synthetic construct
  source 1..75: mol_type = other DNA
agtcgcaaaaatccgtttggcgatatcaaatcggacggcacggtgaaaacggctcttcaaaaccttggtttggga

SEQ ID NO: 20654 - DNA, 75 bp, synthetic construct
  source 1..75: mol_type = other DNA
tggttgtacctcgctggcatcaaagatgtttatacgtgcgaaattgtcggctacgccatgggagagcgcatgaca

SEQ ID NO: 20655 - DNA, 75 bp, synthetic construct
  source 1..75: mol_type = other DNA
aaaaacaaaaatgcacctttgtttttcaacctgaagtgtcagcgagagtaaaaaattatggtgaccattttaccg

SEQ ID NO: 20656 - DNA, 75 bp, synthetic construct
  source 1..75: mol_type = other DNA
tgcttggcgtcatagcagactggccggtcaaccgggtcagcgaactgcttccgtggcgcatagcactgccagctg

SEQ ID NO: 20657 - DNA, 75 bp, synthetic construct
  source 1..75: mol_type = other DNA
caaaagtcatcaagagctggtttaagattgatacatatcgcaaatttgaagacctctcattgattcagttctacc

SEQ ID NO: 20658 - DNA, 75 bp, synthetic construct
  source 1..75: mol_type = other DNA
gcccgcagggttaaaattgattgaacaacgacccgttgttgatcctggcactactggtagcgacaacaacaccaa

SEQ ID NO: 20659 - DNA, 75 bp, synthetic construct
  source 1..75: mol_type = other DNA
ccatcctgtactgacgcgccagctactgattgcaggcggtgcgctgctggcagtgactgcaaccgtaggctcgtt

SEQ ID NO: 20660 - DNA, 75 bp, synthetic construct
  source 1..75: mol_type = other DNA
atgaatgctaaaattcaaacgatacctgaattactgatctgcaccaggggaaatcagacagaagtcgccagaata

SEQ ID NO: 20661 - DNA, 75 bp, synthetic construct
  source 1..75: mol_type = other DNA
tgtttagtgaaaatggcctctatgctgtgcgcgttgagaatggaactattgtcagtcactgccgcattaaatgtt

SEQ ID NO: 20662 - DNA, 75 bp, synthetic construct
  source 1..75: mol_type = other DNA
gtagtactatagatctggaagagatatctcaagtagatcaaaagataagcaagtatttgatatctcaaactaata

SEQ ID NO: 20663 - DNA, 75 bp, synthetic construct
  source 1..75: mol_type = other DNA
tcaacccggaggggctggactaccgctttgagtacggagagagccgggtaatcatcacggacagcctgaaccggc

SEQ ID NO: 20664 - DNA, 75 bp, synthetic construct
  source 1..75: mol_type = other DNA
gatatcatcgagtggtgggggaaactggatgccgaaacgaaaaccctgatagaggttatcggcggtctggttgtc

SEQ ID NO: 20665 - DNA, 75 bp, synthetic construct
  source 1..75: mol_type = other DNA
tattattggaatatctaagactgaaagaaaaagaacagcttgatattattgataaaaatggacaagaaagattat

SEQ ID NO: 20666 - DNA, 75 bp, synthetic construct
  source 1..75: mol_type = other DNA
aaaatgagaccgctcaggtcttactgcgcggtgagctcatcgatgccggagcgcgggcacagcgtcgggaacaga

SEQ ID NO: 20667 - DNA, 75 bp, synthetic construct
  source 1..75: mol_type = other DNA
cactgacagatgtcaccaaaggggcaacttatggcgtgtcttttgagagcgttgtccttgaggttaatacccctg

SEQ ID NO: 20668 - DNA, 75 bp, synthetic construct
  source 1..75: mol_type = other DNA
ggatctgaaaaagctggaaatcagtaccaatgcgatggggcgttacagctccattgtaagaaatatggttccccg

SEQ ID NO: 20669 - DNA, 75 bp, synthetic construct
  source 1..75: mol_type = other DNA
aggtgagatcgattttacctggagtgaacgctatcaactcagcaaagactccatgacatgggaactaaaaccggg

SEQ ID NO: 20670 - DNA, 75 bp, synthetic construct
  source 1..75: mol_type = other DNA
cacgcgaagcgcaatctgccattatgaccgatgaaatcccgttagatgatgcactgttacaattgcgggaattta

SEQ ID NO: 20671 - DNA, 75 bp, synthetic construct
  source 1..75: mol_type = other DNA
aatcgccagattacccgttacagcgatacccgctggcatgaagattccgtgcgtaaccgctggttcagcgtaatg

SEQ ID NO: 20672 - DNA, 75 bp, synthetic construct
  source 1..75: mol_type = other DNA
tcatggcggttatgggacttgccggtgttctccggggtaaaaaggtccgcactaccgtcagccggaaaaccgttg

SEQ ID NO: 20673 - DNA, 75 bp, synthetic construct
  source 1..75: mol_type = other DNA
ggcatgaaaaggtagggcaggcaaaaccagtggcatggcgatatcgctacgtgaaaaaaggcgttacagactttc

SEQ ID NO: 20674 - DNA, 75 bp, synthetic construct
  source 1..75: mol_type = other DNA
aaaatagtattcgtggaacatataaccatgctcagtatttagagaaaagacgctctatgatgcaatggtatagta

SEQ ID NO: 20675 - DNA, 75 bp, synthetic construct
  source 1..75: mol_type = other DNA
tgccagtcgactggaggcctggcaggccctccaggtttttctgaaacgatatccggcccgacggattgatgtggg

SEQ ID NO: 20676 - DNA, 75 bp, synthetic construct
  source 1..75: mol_type = other DNA
cgggcatggaactttgaaccggatgccggtgaaggtcttaaccgctatatccgcacctcaggcatccatacaggc

SEQ ID NO: 20677 - DNA, 75 bp, synthetic construct
  source 1..75: mol_type = other DNA
cgcttacaacgttgggtcgcgtgctctttccacatctacactgctgaaaaagctgaatgctggcgatataaaagg

SEQ ID NO: 20678 - DNA, 75 bp, synthetic construct
  source 1..75: mol_type = other DNA
taagttgggaagaacttcacgatggttaaaaagtgatctggaagaatggttatattatcgtatttacgaatcgag

SEQ ID NO: 20679 - DNA, 75 bp, synthetic construct
  source 1..75: mol_type = other DNA
gaagaagcaggcgttcattgatgcgcttgtcatggctggaacaccaccagcacaagctgaaaaaatgttcatgga

SEQ ID NO: 20680 - DNA, 75 bp, synthetic construct
  source 1..75: mol_type = other DNA
ccttcttcagagagcccccagctacttcctgtgactctcgatgcagctgccgaacagccagaatcgctcgcagag

SEQ ID NO: 20681 - DNA, 75 bp, synthetic construct
  source 1..75: mol_type = other DNA
tggcctgttcggtgtgccccggcggggtgacgtccggccatccggtcaatccgctgctgggtgcaaaggtccttc

SEQ ID NO: 20682 - DNA, 75 bp, synthetic construct
  source 1..75: mol_type = other DNA
ccaactctgtatcaagtgtgacgaatgccattgaaagggccaaggaactatcaggactcgtcgtatcacgattaa

SEQ ID NO: 20683 - DNA, 75 bp, synthetic construct
  source 1..75: mol_type = other DNA
catacttggagggtttaatgaaaatgtagatataatgtatctctattattatctaatgcacacattgaaacctta

SEQ ID NO: 20684 - DNA, 75 bp, synthetic construct
  source 1..75: mol_type = other DNA
ggtgttaaaagcctgcggtgcagtagattacttctgtcagcacgggcatggcttgatatcgaaaaaacgcgttga

SEQ ID NO: 20685 - DNA, 75 bp, synthetic construct
  source 1..75: mol_type = other DNA
gccagacggaccaacgaatctttccgcatggatgagacttaagaataaagaattacctccttcagtacataacta

SEQ ID NO: 20686 - DNA, 75 bp, synthetic construct
  source 1..75: mol_type = other DNA
gtgaattgtttgaagaagtatcgcgccacgaagtcggtatggatgtactgacgaaattacttaaccgccgtttcc

SEQ ID NO: 20687 - DNA, 75 bp, synthetic construct
  source 1..75: mol_type = other DNA
cggcaattgatgcgcatgatgatgcagttcaggccgtttaccggaaagcacatttcagcggtggtggttcgtccg

SEQ ID NO: 20688 - DNA, 75 bp, synthetic construct
  source 1..75: mol_type = other DNA
ggcctgtattacaaccgccaccgctattatgacccgctgcaggggaggtatatcactcaggatccgattgggctg

SEQ ID NO: 20689 - DNA, 75 bp, synthetic construct
  source 1..75: mol_type = other DNA
tcttgaatctgcggctgaagaaatgcagaaagcagcagagcttgctcatttttccaaagatgatacagaccctgt

SEQ ID NO: 20690 - DNA, 75 bp, synthetic construct
  source 1..75: mol_type = other DNA
cttccggcgctggctgtacaagctggaaaaagatggggttattcgtatcgatggggatgatgtagcgccgctata

SEQ ID NO: 20691 - DNA, 75 bp, synthetic construct
  source 1..75: mol_type = other DNA
acgggctttattactggaacagcgtgacggtgatgaagctctggcaataaagcagcaaacggatccggttgttga

SEQ ID NO: 20692 - DNA, 75 bp, synthetic construct
  source 1..75: mol_type = other DNA
attttccggttcgacaacattgtaagggaggacgaaaaagacaaggaattaccggaaaagatagcggcagaaatc

SEQ ID NO: 20693 - DNA, 75 bp, synthetic construct
  source 1..75: mol_type = other DNA
ggccgttatcagttaagcgaactggacaatttacagattgttgatgaaggacgatacagagcaaaggtcatacgc

SEQ ID NO: 20694 - DNA, 75 bp, synthetic construct
  source 1..75: mol_type = other DNA
cgatgcggcgcaatatatccgccaggatattcaggcgtggacggcagattatcgcgtcagctggcatcagaaggt

SEQ ID NO: 20695 - DNA, 75 bp, synthetic construct
  source 1..75: mol_type = other DNA
gccgcagcgagtcaatgtggctggttcgcggtggtaaggcagcgcagccggacggccacacgctggcacggctgt

SEQ ID NO: 20696 - DNA, 75 bp, synthetic construct
  source 1..75: mol_type = other DNA
ccgccgggatgtgcagtacgaggcgcgcccgttgctcggtttcacttggaatgatgagcaggcaattgaagatat

SEQ ID NO: 20697 - DNA, 75 bp, synthetic construct
  source 1..75: mol_type = other DNA
gtggcgaagcgattctcgccgccctgaaaacgcagttccccggcgcggtgctggatgaagagcgacaaacgcctg

SEQ ID NO: 20698 - DNA, 75 bp, synthetic construct
  source 1..75: mol_type = other DNA
agcggcgctgggtgtggggcgccctgcatttatcagggaagcacagggctggtccctgcgtcgttcccgcgtcag

SEQ ID NO: 20699 - DNA, 75 bp, synthetic construct
  source 1..75: mol_type = other DNA
ataacagccagcgcagtagtcagtgaatttggtggcaccatcgttatgaatggtgataatttagtcgagacgggg

SEQ ID NO: 20700 - DNA, 75 bp, synthetic construct
  source 1..75: mol_type = other DNA
gtgtcgggacgtattgttgagctgaatataaaagacaaccagctggttaacgcgggggatcttctgctcacgatc

SEQ ID NO: 20701 - DNA, 75 bp, synthetic construct
  source 1..75: mol_type = other DNA
gtacgctgaatgattttctcggtgccatgacggaggatgatgcccgtccggaggcactgcgccgttttgagctga

SEQ ID NO: 20702 - DNA, 75 bp, synthetic construct
  source 1..75: mol_type = other DNA
caatatccgaacgcatcagatacggcattggtttgtcactatggcattaaatgaaattcaccgcagcgctgagtc

SEQ ID NO: 20703 - DNA, 75 bp, synthetic construct
  source 1..75: mol_type = other DNA
aaaggaaaaaaagtatccgggggcatttttacacctataagaaatcggtaaaagggcgaaaaaagaaacgttcga

SEQ ID NO: 20704 - DNA, 75 bp, synthetic construct
  source 1..75: mol_type = other DNA
tgccattctgaatgaaaaagaggctgtgaaaaatattcccggtattaccataaaaagtgatattgaggatttttc

SEQ ID NO: 20705 - DNA, 75 bp, synthetic construct
  source 1..75: mol_type = other DNA
cacctttacggtgacgaagggggcggctgtatttgccaatgcagggcagagcgcagatatcaggacggatgcgca

SEQ ID NO: 20706 - DNA, 75 bp, synthetic construct
  source 1..75: mol_type = other DNA
caaagatgtgctgctgttaggtgctggtagtgtcctgctgaaatatgatttgaaaaattatttaaatatcaaaaa

SEQ ID NO: 20707 - DNA, 75 bp, synthetic construct
  source 1..75: mol_type = other DNA
gatgtagaagttgcggtgcgtgagaaaaaccgtgatgcactttcgcgcaagttggagattgaacaacaagaagcg

SEQ ID NO: 20708 - DNA, 75 bp, synthetic construct
  source 1..75: mol_type = other DNA
ccgtggcagcctcgcgtcagctaccgaaaacagtgggcgcgctggcgggtgatgattctgccgatattgctgatt

SEQ ID NO: 20709 - DNA, 75 bp, synthetic construct
  source 1..75: mol_type = other DNA
cacggcttacgccgcttttattcgtgttcgctccttttttggcacagtcaaatatgactgtttatcctatggctg

SEQ ID NO: 20710 - DNA, 75 bp, synthetic construct
  source 1..75: mol_type = other DNA
gctgcttacattcataaagcagaacatctggaagaacgccgactgatgctacagtggtgggccgattttctgaat

SEQ ID NO: 20711 - DNA, 75 bp, synthetic construct
  source 1..75: mol_type = other DNA
actcgaatccggccagtgatatggctggtgcgctatctacaaccaaagtgcgacattaccctgcgttaccttcct

SEQ ID NO: 20712 - DNA, 75 bp, synthetic construct
  source 1..75: mol_type = other DNA
caatgcctgcagttctacgctggtgaaattgctcaatcagcggcgctgggcagaagcgtgccgacagttgccgcg

SEQ ID NO: 20713 - DNA, 75 bp, synthetic construct
  source 1..75: mol_type = other DNA
ttccagccgaacgcgaacctctgccaggcgtaaaattctcacaccggggctccaagatgcgaacaccacatcttg

SEQ ID NO: 20714 - DNA, 75 bp, synthetic construct
  source 1..75: mol_type = other DNA
atctcgatgagcgtaggctaatgctacagtggtgggctgactatcttgatgccaaccgtaaagggatattacgac

SEQ ID NO: 20715 - DNA, 75 bp, synthetic construct
  source 1..75: mol_type = other DNA
ccatcggtttattattggcatgtagtaccggtatggcaaaaacacagcatttaacgctggaacaacgcatggcat

SEQ ID NO: 20716 - DNA, 75 bp, synthetic construct
  source 1..75: mol_type = other DNA
ctgatccgtcgactatcgccgccaccaacagtgatttaagtaccttaaaggcaacggttgaggatggcagtggta

SEQ ID NO: 20717 - DNA, 75 bp, synthetic construct
  source 1..75: mol_type = other DNA
acgttgttaatgttgatgtgatcatgtcgccgcgtgcagcatcagggcgaaattttggtgcattactcattctcg

SEQ ID NO: 20718 - DNA, 75 bp, synthetic construct
  source 1..75: mol_type = other DNA
gagcaggttgttcagacgctgaataacagccgggagcgtcagcttgctttttccctctggcttaaacgcctggca

SEQ ID NO: 20719 - DNA, 75 bp, synthetic construct
  source 1..75: mol_type = other DNA
cttcaggtcaggctccagtcgttctgaccagcaataaagtcggtacatatacggtgactgcatcgttccataacg

SEQ ID NO: 20720 - DNA, 75 bp, synthetic construct
  source 1..75: mol_type = other DNA
tatccgctttttgcaccataacgcatgccgcaccggaagatatcaccttcacgggtacgctgatcgaacctccgg

SEQ ID NO: 20721 - DNA, 75 bp, synthetic construct
  source 1..75: mol_type = other DNA
agtctatgcgacagcagcacgtgaaggtgcacctcaggccagacaggtggccgatcgatggcacctgctaaaaaa

SEQ ID NO: 20722 - DNA, 75 bp, synthetic construct
  source 1..75: mol_type = other DNA
ttcgacaggaggcgtcgggacggtcaatgttgagggagaggactctgttctgacgaccgaattattcgaaatagg

SEQ ID NO: 20723 - DNA, 75 bp, synthetic construct
  source 1..75: mol_type = other DNA
gcaggtaaaacatcgacggttaatttgcgtaaatcctctggactgacaacgaaattcagtagattgacgctgggt

SEQ ID NO: 20724 - DNA, 75 bp, synthetic construct
  source 1..75: mol_type = other DNA
gaacaggctgaagagccgcagccgccggagcccgttacccggccagttgagctgtatgttaacggtgagctcgtg

SEQ ID NO: 20725 - DNA, 75 bp, synthetic construct
  source 1..75: mol_type = other DNA
aacgcgcagggactggcgaaccgctgtataccggacagcctgcccgccgtggaatggctgacctacggcagcggc

SEQ ID NO: 20726 - DNA, 75 bp, synthetic construct
  source 1..75: mol_type = other DNA
ctgccatcctgctgtttctggtagtggtggtggatttcaccggacggctgatgtcggtgctggcagatggtgtgc

SEQ ID NO: 20727 - DNA, 75 bp, synthetic construct
  source 1..75: mol_type = other DNA
aacagtccatgcttttacaacctggaagaaattgatcgctggattgagcgccaggcatcagcaagaccaagacgt

SEQ ID NO: 20728 - DNA, 75 bp, synthetic construct
  source 1..75: mol_type = other DNA
agataagtaataaagaaaaagaaatttttatcagtgaggagcgttttttctccctgctggaaagggtgagtgctt

SEQ ID NO: 20729 - DNA, 75 bp, synthetic construct
  source 1..75: mol_type = other DNA
atggatgttgaaccggggctgtaccgtgtgaccctgaacacagaagggcgtatgccgtcatacgtcggtgacatt

SEQ ID NO: 20730 - DNA, 75 bp, synthetic construct
  source 1..75: mol_type = other DNA
tgccaagaaaacaggaagcacgttagttgttaacggtgcaacttacgatgttagtgcagatggtaaaacgataac

SEQ ID NO: 20731 - DNA, 75 bp, synthetic construct
  source 1..75: mol_type = other DNA
agcccgcgccggccttggctaccagtttgacctgtttgccaacggtgaaaccgtactgcgtgatgcgtccggtga

SEQ ID NO: 20732 - DNA, 75 bp, synthetic construct
  source 1..75: mol_type = other DNA
tgaagtggccctgttcgataaagacgatcggcaaagtaatcctcatgccataaccgctggacttaactatacccc

SEQ ID NO: 20733 - DNA, 75 bp, synthetic construct
  source 1..75: mol_type = other DNA
gataaatccgagctggtcattcgccaggcagatttagtgagcgatgcagctgaacgctatcaggggcaagtttgc

SEQ ID NO: 20734 - DNA, 75 bp, synthetic construct
  source 1..75: mol_type = other DNA
tgaccatcgccaaacttgagcacggaggccaccagcttacacaggcagatcaacgggagatagaacgatcagtta

SEQ ID NO: 20735 - DNA, 75 bp, synthetic construct
  source 1..75: mol_type = other DNA
cacgctgctggagaaacgtcaggcgctggaagaagagaaagccaaacttaacggtcgcgtaacggcgatgccgaa

SEQ ID NO: 20736 - DNA, 75 bp, synthetic construct
  source 1..75: mol_type = other DNA
cctggattcattaacatctatacccagaaatatctgggcggtggtgtggtggattcgaacgccatcaagattctg

SEQ ID NO: 20737 - DNA, 75 bp, synthetic construct
  source 1..75: mol_type = other DNA
gccgaataaactgcccactaataaagaaagcattttttatctgaatgttctggatattccaccaaatagtccaga

SEQ ID NO: 20738 - DNA, 75 bp, synthetic construct
  source 1..75: mol_type = other DNA
cacgcagacgccgcgtaacccggatacaggaacgcattcgctttatctggaataacgaagcacgcacgctgaaaa

SEQ ID NO: 20739 - DNA, 75 bp, synthetic construct
  source 1..75: mol_type = other DNA
cacatccagattatggtgggctgggcgggggcaccgaaaggtgcgccggtctccgttgacgccggttacgccaac

SEQ ID NO: 20740 - DNA, 75 bp, synthetic construct
  source 1..75: mol_type = other DNA
atcactcccggcaatgattaacgccggaggcgtacaaatgggattcagggctgactcatttggcccgattgcata

SEQ ID NO: 20741 - DNA, 75 bp, synthetic construct
  source 1..75: mol_type = other DNA
cgcgtggcaacctttctgaagtgctcaacaatgttgaagccggggaagaggttgaaatcacccgcagaggccgtg

SEQ ID NO: 20742 - DNA, 75 bp, synthetic construct
  source 1..75: mol_type = other DNA
gctgacgcgcgtgccaatggccttagcgaagcgatgcttgaccgtctggcactgacgcccgcacggctgaaaggc

SEQ ID NO: 20743 - DNA, 75 bp, synthetic construct
  source 1..75: mol_type = other DNA
ttacaccaacgccagcctgctggtgcgtgatgattttgctttcgaagacggtctgttcagcggctacgacgctga

SEQ ID NO: 20744 - DNA, 75 bp, synthetic construct
  source 1..75: mol_type = other DNA
tgggtgatgcgatcagctactggctggaaatgcacgtaaaggaaaaccgtgtcgattacgtatgcctgaaaagcc

SEQ ID NO: 20745 - DNA, 75 bp, synthetic construct
  source 1..75: mol_type = other DNA
tgggtgcagagagcgaagctgctgaaaatgcgacggctattggcaataacgcgcatgcaaaaggggtgaatagca

SEQ ID NO: 20746 - DNA, 75 bp, synthetic construct
  source 1..75: mol_type = other DNA
cttcggctacaccctgcgtcgtaaggggatgcctgttgccgacaaatacgacggagccggtggcaaggtgaagta

SEQ ID NO: 20747 - DNA, 75 bp, synthetic construct
  source 1..75: mol_type = other DNA
catcagggtgcattgcctagcattaggtggtgttgatctgaccagtccggcaggaaaaatgacaatgcaggtgat

SEQ ID NO: 20748 - DNA, 75 bp, synthetic construct
  source 1..75: mol_type = other DNA
cagccgggaagagcgtgaggcactggaagccaggcaacaggccatgatggaagggcagcaggagggcggacatgt

SEQ ID NO: 20749 - DNA, 75 bp, synthetic construct
  source 1..75: mol_type = other DNA
aaaacagataccggatcgcaacaaggctattttcttgccggacgttcactaaaagcgccggttattgccgcttcg

SEQ ID NO: 20750 - DNA, 75 bp, synthetic construct
  source 1..75: mol_type = other DNA
gaaatacgctgatggcgcggagttcagttataaccgcgcgacccatacgctgacggtcagaggaggtattgagcg

SEQ ID NO: 20751 - DNA, 75 bp, synthetic construct
  source 1..75: mol_type = other DNA
gtttatgacgtagcccgtaaggcggcaatggatgttgtgaccgggcagatgcgtgatggtggtctgttctccgga

SEQ ID NO: 20752 - DNA, 75 bp, synthetic construct
  source 1..75: mol_type = other DNA
ggaaagcggaaaatcagtatgcggtcctgaaagaggcagccacgaaacggcagttatctgagcaggaaaaatccc

SEQ ID NO: 20753 - DNA, 75 bp, synthetic construct
  source 1..75: mol_type = other DNA
gcgccagattaacgcggcaagggtaaaacattgcggtgcttctgcgctggtttgcgaagagtgtgacgcgccaat

SEQ ID NO: 20754 - DNA, 75 bp, synthetic construct
  source 1..75: mol_type = other DNA
atgccggacaacgtagattttattcaggaacaacaggctgaattactggagcgtcagattaacgcggcaagggta

SEQ ID NO: 20755 - DNA, 75 bp, synthetic construct
  source 1..75: mol_type = other DNA
aacagcagaagaattagcctgaaattaaaaggtctgactccaattgaatatcggaatcagacctatatgcctcgt

SEQ ID NO: 20756 - DNA, 75 bp, synthetic construct
  source 1..75: mol_type = other DNA
aacacggaaggcgcggggctgggattatcaattacaaggtcgatcattcatgctcacggcggcgagctgtcagca

SEQ ID NO: 20757 - DNA, 75 bp, synthetic construct
  source 1..75: mol_type = other DNA
tgttgccatagcgtctgtgctcatcactggtccgagtggtgacgatggcctggaaggtgtcagctacataccata

SEQ ID NO: 20758 - DNA, 75 bp, synthetic construct
  source 1..75: mol_type = other DNA
atgcctccatcattacgaaaagccgttgctgctattggtggcggagcaattgctatagcatcagtgttaatcact

SEQ ID NO: 20759 - DNA, 75 bp, synthetic construct
  source 1..75: mol_type = other DNA
atgaagctgtcaaaggaaaaatgcgaccgggttaatgccatcgaacgtgacaaggcgctggcatgggtggagaaa

SEQ ID NO: 20760 - DNA, 75 bp, synthetic construct
  source 1..75: mol_type = other DNA
gtgtttcccgtcgacgttttataaacgaattaatgcaggcgatcgcaggggagcgtgtgaagcgattcgctggtg

SEQ ID NO: 20761 - DNA, 75 bp, synthetic construct
  source 1..75: mol_type = other DNA
caaagcagaatgcaaagccctcctgaataaagaccttgccacggtcgccagacaaattaacccgtacatcaaagt

SEQ ID NO: 20762 - DNA, 75 bp, synthetic construct
  source 1..75: mol_type = other DNA
accgatgaccttggattcgacgcctctcgtgtcgtgccaacagctaatgaaaaccgtccacgtaacatcgccttt

SEQ ID NO: 20763 - DNA, 75 bp, synthetic construct
  source 1..75: mol_type = other DNA
cagagagctgggaggatgttctggctaacggtaccagtcttgttctgacaggcagttgtggtaccggaaaaaatc

SEQ ID NO: 20764 - DNA, 75 bp, synthetic construct
  source 1..75: mol_type = other DNA
atctgccgtggtgccacccgggtggatggcagaccagtagtccccggcatgaagctgacgaaggaaaaatgcgct

SEQ ID NO: 20765 - DNA, 75 bp, synthetic construct
  source 1..75: mol_type = other DNA
tgaacagcgtgaggaaatgaagcaggagtttccctcaacgccacaggaggcgtttctgacgtccggacgacgtgt

SEQ ID NO: 20766 - DNA, 75 bp, synthetic construct
  source 1..75: mol_type = other DNA
ggactttgagtgagttgctggacatctggtggaaatatcacgggcaaaaccacgagcatggaacaaaagagttta

SEQ ID NO: 20767 - DNA, 75 bp, synthetic construct
  source 1..75: mol_type = other DNA
atgattgacgctcatgacttcacaagatgggtgcgcacacaggacacccgtctggctcccgttcttcagggatta

SEQ ID NO: 20768 - DNA, 75 bp, synthetic construct
  source 1..75: mol_type = other DNA
cccttgaacaaccgctggcgtcgcttcccgatacgcttcgccagcttattcttgaacgtattcagaatctcaccc

SEQ ID NO: 20769 - DNA, 75 bp, synthetic construct
  source 1..75: mol_type = other DNA
tgtagtgatgaagagaaggggctggctctgcagtgggtttctgagttgactgatgagctgatggcgagaattcgc

SEQ ID NO: 20770 - DNA, 75 bp, synthetic construct
  source 1..75: mol_type = other DNA
gcaaggcggaaagcgccgaggcggttatcgatgaactgtggcgggatatgcgctggtcggtggcgcgtattcagg

SEQ ID NO: 20771 - DNA, 75 bp, synthetic construct
  source 1..75: mol_type = other DNA
gccggaggcgtattttcgtattgcaccggaagactggctgcaggcagagatgcagggggagattgtggcgctggt

SEQ ID NO: 20772 - DNA, 75 bp, synthetic construct
  source 1..75: mol_type = other DNA
cgtcaccgccactggcacgtatctgccttcacggggatttacaacgatttggccgccgcctcagcctgtatgtga

SEQ ID NO: 20773 - DNA, 75 bp, synthetic construct
  source 1..75: mol_type = other DNA
attcagtaccaccattaacaatgcgctggcactaaaagcaccgctgtcgagtccggcactcaccggaacgccaac

SEQ ID NO: 20774 - DNA, 75 bp, synthetic construct
  source 1..75: mol_type = other DNA
cctgatttacgtggtgagtttattcgtggctgggatgacggacgtggtatggatacggggagggcaatattatca

SEQ ID NO: 20775 - DNA, 75 bp, synthetic construct
  source 1..75: mol_type = other DNA
gaggtgtacacgaaggtgtttgcgctcgatgtggcagcaaggcacagggtgcagttttcgatgcctgagtccgat

SEQ ID NO: 20776 - DNA, 75 bp, synthetic construct
  source 1..75: mol_type = other DNA
tgcagacgatggtggccacactgaaaatccccatggaacggcgtaataaacgaacaggcaggacagagaaagcgc

SEQ ID NO: 20777 - DNA, 75 bp, synthetic construct
  source 1..75: mol_type = other DNA
atatcgcaaaacatctgattcaggttcacttcatcaatgagcacactggcgaagtggtggataagcagcttcgaa

SEQ ID NO: 20778 - DNA, 75 bp, synthetic construct
  source 1..75: mol_type = other DNA
gatggtgagcgccaatggtcgttgggtctacaaattacaaggtagtaccaatagccagggtgaatactccgccgc

SEQ ID NO: 20779 - DNA, 75 bp, synthetic construct
  source 1..75: mol_type = other DNA
gcgtaaagcctgctggtactgcagacaatgtcgccacgcttattatggggagcagtactgtacacactgccagac

SEQ ID NO: 20780 - DNA, 75 bp, synthetic construct
  source 1..75: mol_type = other DNA
cttattttcttgaaaaagaaggtgacaattacaggcttacaaaaaggataaaagccagaacaaatgttaaaatcg

SEQ ID NO: 20781 - DNA, 75 bp, synthetic construct
  source 1..75: mol_type = other DNA
atcgcgctggcagatacgctttctgacttcggtatcgctaactcgattattcagcgaaaagaaatcagccacctt

SEQ ID NO: 20782 - DNA, 75 bp, synthetic construct
  source 1..75: mol_type = other DNA
gctgctcgcgcattcgaccagatcgataacgcgccggaagaaaaagctcgtggtatcaccatcaacacttctcac

SEQ ID NO: 20783 - DNA, 75 bp, synthetic construct
  source 1..75: mol_type = other DNA
tacagcattgtggaatgaagttgaacgggtcgagcgtcagcaaaatggtcaaacagcccgttatttcgatgtttc

SEQ ID NO: 20784 - DNA, 75 bp, synthetic construct
  source 1..75: mol_type = other DNA
aaattgtgaaacgttcagaaggtaggtcttccgttgcgaaggctgcctatcatgctcgtacacgtataacagatg

SEQ ID NO: 20785 - DNA, 75 bp, synthetic construct
  source 1..75: mol_type = other DNA
tggttcatgatgaactgccaaaatacctgctggcccctgaagtgagcgccctgctccattacgtcccggatctgc

SEQ ID NO: 20786 - DNA, 75 bp, synthetic construct
  source 1..75: mol_type = other DNA
atgtcaggctccgttatacacagccagtctgcagtcatggtaccggcagtgtattctgccgggcagcctgcatcg

SEQ ID NO: 20787 - DNA, 75 bp, synthetic construct
  source 1..75: mol_type = other DNA
ctggatcatggcccgaatcaggcatgagatcttctacagccttgcatcgcttaatcagcgcattcgggagttgct

SEQ ID NO: 20788 - DNA, 75 bp, synthetic construct
  source 1..75: mol_type = other DNA
cccgtgaattagcccctgccgaccagcagacagtcaggaaagccttatctctgctggagtgccagctacgtgaaa

SEQ ID NO: 20789 - DNA, 75 bp, synthetic construct
  source 1..75: mol_type = other DNA
cttgatgtgtcgcatgttcgtagcaaaatgacagggattacaaaaacctggtgtgatccgaatatcggcgtgtcc

SEQ ID NO: 20790 - DNA, 75 bp, synthetic construct
  source 1..75: mol_type = other DNA
gtatcatgcttctatgataagccatttataaaaaaacatttttttgagattgtgatgattgcttttgtggcatat

SEQ ID NO: 20791 - DNA, 75 bp, synthetic construct
  source 1..75: mol_type = other DNA
caaaactctccgatgtgattgagcagcaactggagtttttgatcctcgaaggcactctccgcccgggcgaaaaac

SEQ ID NO: 20792 - DNA, 75 bp, synthetic construct
  source 1..75: mol_type = other DNA
gaaccgattcggtgaagttatcgcccttgagcctgcgctggcaaaatacacccgacgtgggttagacctggatac

SEQ ID NO: 20793 - DNA, 75 bp, synthetic construct
  source 1..75: mol_type = other DNA
cgtgcctgcccgtcctgcggaaaaaaggccacagacctgtggatagcgacacagctgaatcgtcttcctgactgc

SEQ ID NO: 20794 - DNA, 75 bp, synthetic construct
  source 1..75: mol_type = other DNA
tgtcagaagtcgcagcgaaggatgaatttctgaacatcaagaacgtcagccgtgatgacatgatggcggcgcacc

SEQ ID NO: 20795 - DNA, 75 bp, synthetic construct
  source 1..75: mol_type = other DNA
ctgacccgcgtcaatgacgtgctgggaaaatgcgggacaacggggacgctttatcgtgcgcttaaggccatcgca

SEQ ID NO: 20796 - DNA, 75 bp, synthetic construct
  source 1..75: mol_type = other DNA
gcctctcaggattgtataacattggtcatgatgtcggtggtttttctggtgataagcctgatccagaattatttg

SEQ ID NO: 20797 - DNA, 75 bp, synthetic construct
  source 1..75: mol_type = other DNA
attatccacctggaagttcattcttatctggctggtgtttgtgattatggcctccggttatttcatcggtcagat

SEQ ID NO: 20798 - DNA, 75 bp, synthetic construct
  source 1..75: mol_type = other DNA
ccaaatctttccccctgccctggtccacctacgtccgtttactttccgttaaaaacgctgacgcccgcagctttt

SEQ ID NO: 20799 - DNA, 75 bp, synthetic construct
  source 1..75: mol_type = other DNA
gaagcagctgcagctgaagcaagaaagaaagcggcaactgaagctgctgaaaaagccaaagcagaagctgagaag

SEQ ID NO: 20800 - DNA, 75 bp, synthetic construct
  source 1..75: mol_type = other DNA
attttctggatgcaaacagggaggagtgtatcagtccgtttgaatatgcaaaagttaacaatccactgaaaaggt

SEQ ID NO: 20801 - DNA, 75 bp, synthetic construct
  source 1..75: mol_type = other DNA
gttcccgttactggcgtctccgttatcgtattctgggtaaggagaaaaccctggcacttggtgtgtatccggaag

SEQ ID NO: 20802 - DNA, 75 bp, synthetic construct
  source 1..75: mol_type = other DNA
attacagggtgcattgctggtggtcgattcctcacttaccccggttgatggttctctgcttgtatgcgctctgga

SEQ ID NO: 20803 - DNA, 75 bp, synthetic construct
  source 1..75: mol_type = other DNA
actatgacttccggaatgacagtgcattcacaccatgggtatcagcagggattggttacgccaggattcatcaga

SEQ ID NO: 20804 - DNA, 75 bp, synthetic construct
  source 1..75: mol_type = other DNA
tgcgccttatcaccaatctgatccgcataggtgtagtcaccgaagtggaccgggaaaactggctttgtcgggtga

SEQ ID NO: 20805 - DNA, 75 bp, synthetic construct
  source 1..75: mol_type = other DNA
tggtcagcacatacagtgaactgaaccggcagtatacggaactgcagagtgaatataagcatctgcggcggtatt

SEQ ID NO: 20806 - DNA, 75 bp, synthetic construct
  source 1..75: mol_type = other DNA
cgggaacccgtattcccagctgcccgacgacgttcgcgacgaattccagctgagtattaacagcacacgcgagca

SEQ ID NO: 20807 - DNA, 75 bp, synthetic construct
  source 1..75: mol_type = other DNA
cgggacggaattatccgcgaccaaacagcactgagaacgcttcaggaatacatcaggacgcaatgccttcgatga

SEQ ID NO: 20808 - DNA, 75 bp, synthetic construct
  source 1..75: mol_type = other DNA
gaaatgaggtgcagaagctggacgtagcagggctgataggtgagcgcatcagcctggattttcagcggctggaag

SEQ ID NO: 20809 - DNA, 75 bp, synthetic construct
  source 1..75: mol_type = other DNA
gtagtgaaagacggcaaaagacgatcctgagagcggtccggttctcaccggatgaggatgaaactatctgtaaga

SEQ ID NO: 20810 - DNA, 75 bp, synthetic construct
  source 1..75: mol_type = other DNA
agtaaaccatgaaactaccgggaaacgcccttatctggtgcgtattaatcgtgtgctgcacgttgttgatattca

SEQ ID NO: 20811 - DNA, 75 bp, synthetic construct
  source 1..75: mol_type = other DNA
aggacagggaccagcatatccgcagcctgcgcattatcagtgccgtactggcaggatttctgttgctggcctgta

SEQ ID NO: 20812 - DNA, 75 bp, synthetic construct
  source 1..75: mol_type = other DNA
atcattctgctcaactcccatgacggtacctccagctaccagatgctgccgggttacttcaggttcgtctgccag

SEQ ID NO: 20813 - DNA, 75 bp, synthetic construct
  source 1..75: mol_type = other DNA
aacgtgcagtgattctggtagccgcctggcttggcgatgcccgcctgatcgacaacaaaatggtcgaactggcgt

SEQ ID NO: 20814 - DNA, 75 bp, synthetic construct
  source 1..75: mol_type = other DNA
ttacggtaaggacctgtggagtgcttatcagaccattcaggagaatatgctgaaaggcggaatttcaggtcgcag

SEQ ID NO: 20815 - DNA, 75 bp, synthetic construct
  source 1..75: mol_type = other DNA
cacaggcggcactgacttaccgttatggtgacgaacatcagcccgtcaccaccgccgacattctgacaccacgac

SEQ ID NO: 20816 - DNA, 75 bp, synthetic construct
  source 1..75: mol_type = other DNA
tggctaacgaatttcgtgatctgcttgttgagaaattcaaagacagcaaagtagaaacctttattggtactttca

SEQ ID NO: 20817 - DNA, 75 bp, synthetic construct
  source 1..75: mol_type = other DNA
cgctaccacctgcgtgatcctgcacccggatggcgcccgtatttcatatgacccggaggccagcgcgctggttgt

SEQ ID NO: 20818 - DNA, 75 bp, synthetic construct
  source 1..75: mol_type = other DNA
tggaatcgaaaggagatagtgaaatcgtaattaaaatgactaaatcgatattgaatatattaacatccggagata

SEQ ID NO: 20819 - DNA, 75 bp, synthetic construct
  source 1..75: mol_type = other DNA
gttaaatgggttgttctggctgaggtgctggtcggtgcggtcatgtacatgatgaccaaaaacgtcaagttcctg

SEQ ID NO: 20820 - DNA, 75 bp, synthetic construct
  source 1..75: mol_type = other DNA
cgcccacgccgcatgatgccgcgttccggtcgttcctggcgaatcccgacgtcgccagagattttctggaactgc

SEQ ID NO: 20821 - DNA, 75 bp, synthetic construct
  source 1..75: mol_type = other DNA
ggctgatgacgatgcagaagcaactggaaggggcacaggactatatccgcactcagtgtactaagcaggcttttt

SEQ ID NO: 20822 - DNA, 75 bp, synthetic construct
  source 1..75: mol_type = other DNA
attcgcgtacggcgttgcagatgcttgatgatgatgaaaagggagtaaatttaacttacaccccaggaggaaatc

SEQ ID NO: 20823 - DNA, 75 bp, synthetic construct
  source 1..75: mol_type = other DNA
atgaaacagcaaatgttagccatcgcgacccgggaagggtttgaagtgaataaactgatttgggtgaaacagcct

SEQ ID NO: 20824 - DNA, 75 bp, synthetic construct
  source 1..75: mol_type = other DNA
taccgtgataacgccataacctacaaagagcagcgcgataaaaaagtcagtgagctggagcaggcaaatgcaacc

SEQ ID NO: 20825 - DNA, 75 bp, synthetic construct
  source 1..75: mol_type = other DNA
cctggttaagttcggtacatgtgaaaacatcaccgttgatatggcgattgacgcgcaggaattactgcaggaaga

SEQ ID NO: 20826 - DNA, 75 bp, synthetic construct
  source 1..75: mol_type = other DNA
atggttgtgtccgctattgccagtacacctcaaactgagttctcatggttccgatacggacagtataacgaaacg

SEQ ID NO: 20827 - DNA, 75 bp, synthetic construct
  source 1..75: mol_type = other DNA
aggagattgcacttcaggccgggttagcagagcgcggaaccagtgcaaaaagcagtaaagcggcaaaagagaaaa

SEQ ID NO: 20828 - DNA, 75 bp, synthetic construct
  source 1..75: mol_type = other DNA
cgatcgcgatgtacgcacaatcgttgagctggggaaagccatagacttcgatgccagaacggctattccattcga

SEQ ID NO: 20829 - DNA, 75 bp, synthetic construct
  source 1..75: mol_type = other DNA
tgatgcactgttacaattgcgggaatttatcgacgaaaactccggtgaattttttgttcaggtctggggaaatgg

SEQ ID NO: 20830 - DNA, 75 bp, synthetic construct
  source 1..75: mol_type = other DNA
gagttacatcaatgactacggcggacgtccggtgctgcagttctcctgtggtggtagccgctgtaccgcagtgaa

SEQ ID NO: 20831 - DNA, 75 bp, synthetic construct
  source 1..75: mol_type = other DNA
ccgggcaaggtgagtgctgacccacagaatacatctcaggggaaggtggcaaaaacgataagcatatcctgtcca

SEQ ID NO: 20832 - DNA, 75 bp, synthetic construct
  source 1..75: mol_type = other DNA
ggcggttgttcatcaaacaaaatcattaacaggggccagcatctggcaggcaggtcccgggggatttaatgtgga

SEQ ID NO: 20833 - DNA, 75 bp, synthetic construct
  source 1..75: mol_type = other DNA
caaagcgccgacgccagcggcggggaataataccacgcaacttgcgaccaccgcgtttgttcaggcggcactgac

SEQ ID NO: 20834 - DNA, 75 bp, synthetic construct
  source 1..75: mol_type = other DNA
atagcgttgtatcagggaaaaggaatgtcaacacctcttacattaggtaatggttcaggaaatggttacagagtg

SEQ ID NO: 20835 - DNA, 75 bp, synthetic construct
  source 1..75: mol_type = other DNA
ttattgatgcactattggttcataagatggccagggctttattgccgctggtggctgaaaagcatgaggtggacc

SEQ ID NO: 20836 - DNA, 75 bp, synthetic construct
  source 1..75: mol_type = other DNA
ttgccccagtcggggaaatgttcgctccactggctcccatttttgatggtctcggcgagaaactgcgcggcgtct

SEQ ID NO: 20837 - DNA, 75 bp, synthetic construct
  source 1..75: mol_type = other DNA
ctttccgttgtttgctctggtgtgggggctgaatctgtcccgccatgcgcatatcaggcagtcggccattaaccg

SEQ ID NO: 20838 - DNA, 75 bp, synthetic construct
  source 1..75: mol_type = other DNA
gtttgcctttgcggttgtggcacaggtgctgatgtggagtgaaacgcgcacctggtggcgttccgcagggtgcat

SEQ ID NO: 20839 - DNA, 75 bp, synthetic construct
  source 1..75: mol_type = other DNA
ctccgcaacgcgatgaaaagcgccaaaggaccgggcaacttccgtaacttgtttatgtactcgcctaacggcaaa

SEQ ID NO: 20840 - DNA, 75 bp, synthetic construct
  source 1..75: mol_type = other DNA
ctactggtttgtgcaatacggtatgaccacgcagccatatcagttcacgaaaggcagcatctttcatctgatgga

SEQ ID NO: 20841 - DNA, 75 bp, synthetic construct
  source 1..75: mol_type = other DNA
gcggggaaacacgatgatcacggaaagccagtttaaggtggctgacctctcgattgatctcgtatccagaaaagt

SEQ ID NO: 20842 - DNA, 75 bp, synthetic construct
  source 1..75: mol_type = other DNA
aagatgattttttcaatatcaaaaaggttagtgcagaagatttgttgagtgctcatagggtaccaccacaaatga

SEQ ID NO: 20843 - DNA, 75 bp, synthetic construct
  source 1..75: mol_type = other DNA
tttgtgcaggactatctggtatttggtaacgcctacctggagaaacgcacgaaccgcttcggtgaagttatcgcc

SEQ ID NO: 20844 - DNA, 75 bp, synthetic construct
  source 1..75: mol_type = other DNA
gtgcaaaacataaatttaaacaaaagcattatatggcaggcatttttaattatttaaagtattataaagaaaaat

SEQ ID NO: 20845 - DNA, 75 bp, synthetic construct
  source 1..75: mol_type = other DNA
ctgggaatgtttgatagtaagccttatccggttcaggtagctgtggctcaggctaatcgatatacatctcaggaa

SEQ ID NO: 20846 - DNA, 75 bp, synthetic construct
  source 1..75: mol_type = other DNA
gcgcgctccgaacctgcagctggcagtggagctgacggacgccggccgggccgtggcacagcctctgctgctggc

SEQ ID NO: 20847 - DNA, 75 bp, synthetic construct
  source 1..75: mol_type = other DNA
gaagagttgcagaacggcaaatggggcgaaatcgcccctttcactgtcacgccggaacttatcgccgcggcgaag

SEQ ID NO: 20848 - DNA, 75 bp, synthetic construct
  source 1..75: mol_type = other DNA
caagagatcccgaatgctgagacgatgaaacaaaccgaaagccatgcggtgaaaatcgtggtggaagcggcgcgt

SEQ ID NO: 20849 - DNA, 75 bp, synthetic construct
  source 1..75: mol_type = other DNA
gattatcgtcggttttctgatctttattttcgccagctactccgcacagcgttatctgaccgaagcggcaaatgg

SEQ ID NO: 20850 - DNA, 75 bp, synthetic construct
  source 1..75: mol_type = other DNA
ttttattcagcacaagcagcgaaattcccttatctggctgcctactgatggtgacgccgaaaactttatgaagtc

SEQ ID NO: 20851 - DNA, 75 bp, synthetic construct
  source 1..75: mol_type = other DNA
caatggcgttatccagtacgcttgattccatccctttatccatgcagcgacagtttcctgatttaacaccgcgcc

SEQ ID NO: 20852 - DNA, 75 bp, synthetic construct
  source 1..75: mol_type = other DNA
ggcataacgccacgccgcatccgcactggtgcggcctgaccctgctggccatcgatggtgtgttctggcgcacac

SEQ ID NO: 20853 - DNA, 75 bp, synthetic construct
  source 1..75: mol_type = other DNA
cgccagacacatgccgggaacccggcgctctacccgcaggtcaaaatggtctgccagatggaactgaccagccat

SEQ ID NO: 20854 - DNA, 75 bp, synthetic construct
  source 1..75: mol_type = other DNA
gcgcagctcgaaaaagctgacccggactttatggcggagcgcgaggacgttatcagcgacgaaggacgatttaac

SEQ ID NO: 20855 - DNA, 75 bp, synthetic construct
  source 1..75: mol_type = other DNA
aaggaataaagatctgaccatcagtgtgaaggacgacaggcgccgtatttacggcgtggaaggtgcggtggacta

SEQ ID NO: 20856 - DNA, 75 bp, synthetic construct
  source 1..75: mol_type = other DNA
aggatgcgagcacgacgaaaaaggggatagtacagctcagcagtgcgactaacagcacttccgagtcactggcgg

SEQ ID NO: 20857 - DNA, 75 bp, synthetic construct
  source 1..75: mol_type = other DNA
tatgggttgatatttataaagaagcacagcatgcaggggaagttcctcctggatggaatcctccggaggctaccc

SEQ ID NO: 20858 - DNA, 75 bp, synthetic construct
  source 1..75: mol_type = other DNA
gagtaagcggaacgactatctggaggatgtttatatcctgtcctgcaaatgcactcgcagccagaaggcatagaa

SEQ ID NO: 20859 - DNA, 75 bp, synthetic construct
  source 1..75: mol_type = other DNA
agacgtagtggagaaagttattgaaggggcttacgaggtggtgggcgtgtttgaccggatagaggagaagcgtga

SEQ ID NO: 20860 - DNA, 75 bp, synthetic construct
  source 1..75: mol_type = other DNA
cactatgttcccagtattttcggtgaagaccggcatacttcccgcagtaaacgatatgcgtacattcccaccatc

SEQ ID NO: 20861 - DNA, 75 bp, synthetic construct
  source 1..75: mol_type = other DNA
tcagatgccgctaatgagcaagcttcaaaggtgcttaataatgctggtacaggtagtactttgaagaagtattct

SEQ ID NO: 20862 - DNA, 75 bp, synthetic construct
  source 1..75: mol_type = other DNA
taaaggccgtgaagatggtctgcgcgatctggagcgtaaggcattgcaggtgggcaccgatgaagacggtggcta

SEQ ID NO: 20863 - DNA, 75 bp, synthetic construct
  source 1..75: mol_type = other DNA
ccaaagttcagtttattgatgccagcgaactattcaaaaaagagaccaacaacaatatcctgaccgatgcccata

SEQ ID NO: 20864 - DNA, 75 bp, synthetic construct
  source 1..75: mol_type = other DNA
atgataatctggatcaacggacctttcggcgccggaaagacgacgctcgctaagcggctgcgcgatcggcgttcc

SEQ ID NO: 20865 - DNA, 75 bp, synthetic construct
  source 1..75: mol_type = other DNA
tattaaatgtttgagatgttctgaggaattctcgacaacccatttttgggccgtcgagaaaatcaatgacttagg

SEQ ID NO: 20866 - DNA, 75 bp, synthetic construct
  source 1..75: mol_type = other DNA
tggacgatgccactgcgggactggcgtatggcaatgagccgctttattatcgagttcggtgaccgcctggacggt

SEQ ID NO: 20867 - DNA, 75 bp, synthetic construct
  source 1..75: mol_type = other DNA
tcccaaccaggacggcacgtttaccgcgatgacgtataccagaagcaaaacgtttaaaactgaagctggcgcgcg

SEQ ID NO: 20868 - DNA, 75 bp, synthetic construct
  source 1..75: mol_type = other DNA
aaactaaaacccggtgacacgctgatggtctggaaactggacaggctggggcgcagtatgcgccaccttgttgcg

SEQ ID NO: 20869 - DNA, 75 bp, synthetic construct
  source 1..75: mol_type = other DNA
ttatcgggaacgttaactctgtattcccggccctctatcgcccaatgctggttggtgcccgcattaggtgacttt

SEQ ID NO: 20870 - DNA, 75 bp, synthetic construct
  source 1..75: mol_type = other DNA
aaaattcttgaacatctccacagcgttattcattacgaacccgtgattggcattatgggtaaatccggcaccggc

SEQ ID NO: 20871 - DNA, 75 bp, synthetic construct
  source 1..75: mol_type = other DNA
tgtcggtggttaatgacattaaaacggcgatcagtcagaaagtgaaactgagaccgggtaccagcgtgtcattct

SEQ ID NO: 20872 - DNA, 75 bp, synthetic construct
  source 1..75: mol_type = other DNA
acatcaaaacacgcctccggcgttcactcttcagaaggtatcccgtggcatgagctgccagcttcacacagggga

SEQ ID NO: 20873 - DNA, 75 bp, synthetic construct
  source 1..75: mol_type = other DNA
cggggaggagaaataacactgactcatccctctgctgaactcatgagcactgtcctgcgcgaactgatgcggggg

SEQ ID NO: 20874 - DNA, 75 bp, synthetic construct
  source 1..75: mol_type = other DNA
gaacggatcgatcaccaggaataccgacaaattctggcagaaacagaacaggaagctcatctgaaaaaattacgt

SEQ ID NO: 20875 - DNA, 75 bp, synthetic construct
  source 1..75: mol_type = other DNA
ttgaatgggttaaacgggtacagaataacaatgtggctctgactgcatttaattgccccaaatgcaaagagcaaa

SEQ ID NO: 20876 - DNA, 75 bp, synthetic construct
  source 1..75: mol_type = other DNA
tcagttttgccctgacggcatcggtcttctggctcagcaccggcgatcgcgatgctgccctgcagacagctgctg

SEQ ID NO: 20877 - DNA, 75 bp, synthetic construct
  source 1..75: mol_type = other DNA
cagttcgatcaatcctacgccgagcagctgtttgagctacgcgaaatgctcgaaacacattccctgcaacacttt

SEQ ID NO: 20878 - DNA, 75 bp, synthetic construct
  source 1..75: mol_type = other DNA
gaatttggtgagtatatagcgttactgatccgccaggatgatgcacgcgtgcgcgggcgtataaaatcgatcagc

SEQ ID NO: 20879 - DNA, 75 bp, synthetic construct
  source 1..75: mol_type = other DNA
agggaaaagatagtaaaagaaatgattattgaaaggaatatgtgttattttgacaccataagtcagcatttcata

SEQ ID NO: 20880 - DNA, 75 bp, synthetic construct
  source 1..75: mol_type = other DNA
aactgcttccggaaccacaggcggaagatgtcaccacggaaaatggtgatattcagccggagtcaccggtgacgg

SEQ ID NO: 20881 - DNA, 75 bp, synthetic construct
  source 1..75: mol_type = other DNA
gtatgctaaagggctgacctgccatgcggacaccctcggcagctgtggttacgtttatcttgctgtttatccgac

SEQ ID NO: 20882 - DNA, 75 bp, synthetic construct
  source 1..75: mol_type = other DNA
ctcatcccgacgacaatcacgaccgcccctggtgggggcttccctgcacagtgaggccctgtttcggggcacgtc

SEQ ID NO: 20883 - DNA, 75 bp, synthetic construct
  source 1..75: mol_type = other DNA
atgaaatcgcacctgatgaacaaaaaaactatggcgcaaagctgccgcgtaagtgcgacagcgttcgacaagtgg

SEQ ID NO: 20884 - DNA, 75 bp, synthetic construct
  source 1..75: mol_type = other DNA
cgcttcccgacgacaataacgaccgcccctggtggggactgccctgcaccgtgacgccctgttttggcgcccgtc

SEQ ID NO: 20885 - DNA, 75 bp, synthetic construct
  source 1..75: mol_type = other DNA
atgactgacacgtattctattgcacaaccgttcgaagcagaagtctctccggcaaataaccgtcatgtcaccgtc

SEQ ID NO: 20886 - DNA, 75 bp, synthetic construct
  source 1..75: mol_type = other DNA
gtctggtattttgccgccgatctgaacgccccacgctggatacgtactgctgacggcatacaggttatcgacggg

SEQ ID NO: 20887 - DNA, 75 bp, synthetic construct
  source 1..75: mol_type = other DNA
ctttcagcgcgttttaacacggcactggaagccagcctgcaggcgtggcagcagaaacaccacgcggtcattctg

SEQ ID NO: 20888 - DNA, 75 bp, synthetic construct
  source 1..75: mol_type = other DNA
gactattagataaggaattacgaagggcttcggtatcattgaaaactttgaagagtaaaggtgtaaattcattca

SEQ ID NO: 20889 - DNA, 75 bp, synthetic construct
  source 1..75: mol_type = other DNA
tatcttgatggcaacgctcgtcagaacctggccactttctgccagacttgggacgacgaaaatgtccacaaattg

SEQ ID NO: 20890 - DNA, 75 bp, synthetic construct
  source 1..75: mol_type = other DNA
gggtaagccacggtgcaatctggaataacccaccgtacagcaatatcaggccgtgggtggaaaaagctgctgagc

SEQ ID NO: 20891 - DNA, 75 bp, synthetic construct
  source 1..75: mol_type = other DNA
cagattatcaatgatgaattatatcttgatggcaacgctcgtcagaacctggccactttctgccagacctgggac

SEQ ID NO: 20892 - DNA, 75 bp, synthetic construct
  source 1..75: mol_type = other DNA
tcggcgtgacctacaccggtaactatgagttcccacaaccgctgcacgatgcgctggataaattccaggccgaca

SEQ ID NO: 20893 - DNA, 75 bp, synthetic construct
  source 1..75: mol_type = other DNA
gcggtgaactctcatcaaacggtaaggtactgcatacccataaacaccccggcgacagtggcggcacaacagggg

SEQ ID NO: 20894 - DNA, 75 bp, synthetic construct
  source 1..75: mol_type = other DNA
atgagccatgctgatatgaacaactgcagcggctttaacgaggtcgccgcagcattctcatggaacagcccgaaa

SEQ ID NO: 20895 - DNA, 75 bp, synthetic construct
  source 1..75: mol_type = other DNA
ggtctgggagcgttatttttttaatgaatcacgtgatcctgtccagcacgaaatggagcaggataagctcattag

SEQ ID NO: 20896 - DNA, 75 bp, synthetic construct
  source 1..75: mol_type = other DNA
agataactggcaacaggcagtatcagaagaacgcgctatccgttgtgccaaaagattaattcaatgtaaaggata

SEQ ID NO: 20897 - DNA, 75 bp, synthetic construct
  source 1..75: mol_type = other DNA
agacaacgtttatccgtttaccagaagtaataaaacgcaccggatttggtaaaacgtggatttacgaactgatta

SEQ ID NO: 20898 - DNA, 75 bp, synthetic construct
  source 1..75: mol_type = other DNA
gatcatgttgctcatctcattgatggagatgctccctgccgcattagccgccgaaggaatgtcccccgttctggg

SEQ ID NO: 20899 - DNA, 75 bp, synthetic construct
  source 1..75: mol_type = other DNA
tgctgtggcgtcatccgatcttaaccgtgcgtcatctcatcgatgacaagcgtccggtgccggagttgccagaaa

SEQ ID NO: 20900 - DNA, 75 bp, synthetic construct
  source 1..75: mol_type = other DNA
ggctccgcgcacatcacgttcaggaaaccagagctggttgacagactgaatgacattattgcgaaatactatcca

SEQ ID NO: 20901 - DNA, 75 bp, synthetic construct
  source 1..75: mol_type = other DNA
gtttccattcttaaccgaccgatccccgctattcactacatgattgcggcggctggcggtaattctattccttgc

SEQ ID NO: 20902 - DNA, 75 bp, synthetic construct
  source 1..75: mol_type = other DNA
ctgatccgcttccacggcatgtatcagcaggatgaccgcgacatccgcgccgaacgtgctgaacagaagctggag

SEQ ID NO: 20903 - DNA, 75 bp, synthetic construct
  source 1..75: mol_type = other DNA
cactgctgcaaatcgacacacttatccggcaactggctgacatctcagttctgacggaaagcattggaggtaaaa

SEQ ID NO: 20904 - DNA, 75 bp, synthetic construct
  source 1..75: mol_type = other DNA
cccctgtaaatttggcagtaaaattatcgtcaacaatctggtgagatgggaccatagatttcatcttatcaccgg

SEQ ID NO: 20905 - DNA, 75 bp, synthetic construct
  source 1..75: mol_type = other DNA
ggacgcagattgataacggtcagcttgcgcctgacctggctgaaatcaggacgtccattacggatgtcagcaatg

SEQ ID NO: 20906 - DNA, 75 bp, synthetic construct
  source 1..75: mol_type = other DNA
gagcgaataactggacaccaacaaccagtatcagcgatctgctggttgtggtgatgaaaaaatccacagcaggta

SEQ ID NO: 20907 - DNA, 75 bp, synthetic construct
  source 1..75: mol_type = other DNA
cagtcagtggagtgtatccggcccgcacattaagcccgggaaggatttctggttttacgtgcgcagcgtcaacct

SEQ ID NO: 20908 - DNA, 75 bp, synthetic construct
  source 1..75: mol_type = other DNA
gtggccatcagggaccattaccgtcagggtttatgacgatcagccgtttgaccggcaaattgttattccagcggt

SEQ ID NO: 20909 - DNA, 75 bp, synthetic construct
  source 1..75: mol_type = other DNA
cagcggcggtaatcctccggcattttccctgacaccggacgggcggctgacggcgaaaaatgccgatatcagcgg

SEQ ID NO: 20910 - DNA, 75 bp, synthetic construct
  source 1..75: mol_type = other DNA
gattaacagttatggccagcagggggaaccggccaccaccacgttcaggattaatgcacctgcggtacccgccac

SEQ ID NO: 20911 - DNA, 75 bp, synthetic construct
  source 1..75: mol_type = other DNA
agtacaggatattcccggtgtgctggctgtgtttgctgaacgccgtaaggacagttttggcccgtatgtccggct

SEQ ID NO: 20912 - DNA, 75 bp, synthetic construct
  source 1..75: mol_type = other DNA
ggggagtctgctgtttggtctgctgacatatctgacgaacctgtatttcaaaattaaagaagaccggcgtaaggc

SEQ ID NO: 20913 - DNA, 75 bp, synthetic construct
  source 1..75: mol_type = other DNA
tcgttgaagcaccggcaccgtcccgtccgatagcgcgtggtgtcgcgggcccgggattacttgcccgcgtgttaa

SEQ ID NO: 20914 - DNA, 75 bp, synthetic construct
  source 1..75: mol_type = other DNA
atgccatgacggttcattattaccgtctgcgggattacgccctgcagcatccggaatgcagcgccattatgcgca

SEQ ID NO: 20915 - DNA, 75 bp, synthetic construct
  source 1..75: mol_type = other DNA
gcgtgttgtggtaagccagccgacgatccccatcacctgattggtcatggtcagggcggaatggggacaaaatct

SEQ ID NO: 20916 - DNA, 75 bp, synthetic construct
  source 1..75: mol_type = other DNA
gtggaaagcctgctgatgatccccaccacctgataggccacggtcagggtggaatgggtacaaaagcgcatgacc

SEQ ID NO: 20917 - DNA, 75 bp, synthetic construct
  source 1..75: mol_type = other DNA
tcaggagatttttaatcagtccacgacggatgctcagggcgtattttcctcagttatagatatgcctgccggaca

SEQ ID NO: 20918 - DNA, 75 bp, synthetic construct
  source 1..75: mol_type = other DNA
gaatcgttcatgaggcggcctaaacgtcgccgttgggttaatgagaaatacacgcgctgggtaaagacacagccg

SEQ ID NO: 20919 - DNA, 75 bp, synthetic construct
  source 1..75: mol_type = other DNA
aattatcctggtgggcggcctgcaatcaggtggtggatgcactacctgaggcagtagcgcgtcgttcgctgggat

SEQ ID NO: 20920 - DNA, 75 bp, synthetic construct
  source 1..75: mol_type = other DNA
acgtattaccactgtcagcaacagagacatcatcctgataaacgcagtgcacatgcacagcgcgatgactggctg

SEQ ID NO: 20921 - DNA, 75 bp, synthetic construct
  source 1..75: mol_type = other DNA
gaacttctttggtcacctgaaagaagaaatgtactatcgccgggactacagaaatgtagaagagctggaaaatgc

SEQ ID NO: 20922 - DNA, 75 bp, synthetic construct
  source 1..75: mol_type = other DNA
tgctattgataccagcacgccgatggggcgttttttctttcatgtgatgggtgccctggctgaaatggagcgaga

SEQ ID NO: 20923 - DNA, 75 bp, synthetic construct
  source 1..75: mol_type = other DNA
atcattgatgtgtttgccggatacatcgtggggtggcgggtctcatcgtccatggaaacgacattcgtgctggat

SEQ ID NO: 20924 - DNA, 75 bp, synthetic construct
  source 1..75: mol_type = other DNA
cagccagaaagctgcgaagacgagtgaaactaacgcaaagtccagccagacggcagcgaagaccagcgaaacgaa

SEQ ID NO: 20925 - DNA, 75 bp, synthetic construct
  source 1..75: mol_type = other DNA
ccgaaactgaatggagtggctggcccggcattccaggtcataaaagacagtctgacactggggctgaatgcgctg

SEQ ID NO: 20926 - DNA, 75 bp, synthetic construct
  source 1..75: mol_type = other DNA
aggggacattcagcgagtccacgggggccagtcaggattcggcacgctggggggtgggcaagccgttatatcagg

SEQ ID NO: 20927 - DNA, 75 bp, synthetic construct
  source 1..75: mol_type = other DNA
cagcggcatcatcgaagaacgcggcgaaaacctcagaaacgaatgcagctaacagcgcacaggcggcagcggcct

SEQ ID NO: 20928 - DNA, 75 bp, synthetic construct
  source 1..75: mol_type = other DNA
gacgctgacggatgttacaaaaaatgcagcgtatggcgttgagatagaaagtctggtgctggagataaatgcacc

SEQ ID NO: 20929 - DNA, 75 bp, synthetic construct
  source 1..75: mol_type = other DNA
cgcgaaccagattgaaggcgatctcgttaaaacagtgggcaaagctttcccccgggactcccgtgcaccggagcg

SEQ ID NO: 20930 - DNA, 75 bp, synthetic construct
  source 1..75: mol_type = other DNA
gaggcacgcgatacacgggttatggttttgaagttcgcaaaaacggcgtattaatcgcatccagagaaactaaag

SEQ ID NO: 20931 - DNA, 75 bp, synthetic construct
  source 1..75: mol_type = other DNA
tctcaaatccacgcagatgatgagcgtgattgatgcgattggtgagggaccgatagaaggtccggtgaagggact

SEQ ID NO: 20932 - DNA, 75 bp, synthetic construct
  source 1..75: mol_type = other DNA
actgattgttgaacgaacaaaagctggactggaagctgctcgcgcacaggggcgaattggtggacgtcgtcccaa

SEQ ID NO: 20933 - DNA, 75 bp, synthetic construct
  source 1..75: mol_type = other DNA
atgcttattggctatgtacgtgtatcaacaaatgaccagaataccgatctacaacgtaatgcgctgaactgtgca

SEQ ID NO: 20934 - DNA, 75 bp, synthetic construct
  source 1..75: mol_type = other DNA
ccgctgacggacacggacggcaatcctgtgatacatggtgtgacagcggtctggcgcgccggggagcaggagcag

SEQ ID NO: 20935 - DNA, 75 bp, synthetic construct
  source 1..75: mol_type = other DNA
tctcaaatccacgcagatgatgagtgtgattgatgcgattggtgagggaccgatagaaggcccggtgaagggact

SEQ ID NO: 20936 - DNA, 75 bp, synthetic construct
  source 1..75: mol_type = other DNA
cgatggtagcggagttaatacaccgacaaacaacccgtcagaagatcctgatattgtcgggtctggttattacgg

SEQ ID NO: 20937 - DNA, 75 bp, synthetic construct
  source 1..75: mol_type = other DNA
aaatccagggcgctgatgaccggtattgatgaactggacgcaaaaacgggcggtatggagcccggagacctggta

SEQ ID NO: 20938 - DNA, 75 bp, synthetic construct
  source 1..75: mol_type = other DNA
cttccccatgacatggtcgaatcttccgctgctgcatggcgggatgaaatgagcaggaaggtcgccggtaaatga

SEQ ID NO: 20939 - DNA, 75 bp, synthetic construct
  source 1..75: mol_type = other DNA
gtaccgtggatttgtggcgacacgacgtattactggaaaaacacatacggcacacagtatgactccgtctacggc

SEQ ID NO: 20940 - DNA, 75 bp, synthetic construct
  source 1..75: mol_type = other DNA
cccatgacgccgggcaatccgcgcagatacagcaataaccgcatgtcgggcagtaaaacggagcgtttattttga

SEQ ID NO: 20941 - DNA, 75 bp, synthetic construct
  source 1..75: mol_type = other DNA
tggtcatgtgctgatgcgaaacctgccgatggtgcagaccattctggtgggcattaccattggtatcttcccgct

SEQ ID NO: 20942 - DNA, 75 bp, synthetic construct
  source 1..75: mol_type = other DNA
aacaacgtctggcacatgtctccattggtcatgtaactatgcgaaacctgccgatggtccagactatcctgacgg

SEQ ID NO: 20943 - DNA, 75 bp, synthetic construct
  source 1..75: mol_type = other DNA
tcccatgacgccgggcaatccgcgcagatacagcaataaccgcatgtcgggtagtaaaacggagcgtttattttg

SEQ ID NO: 20944 - DNA, 75 bp, synthetic construct
  source 1..75: mol_type = other DNA
actcaaaacggcgtcccgatgagccgttaccgtgccggacgtctgatgaaatatctgaacctgagcagttgtcag

SEQ ID NO: 20945 - DNA, 75 bp, synthetic construct
  source 1..75: mol_type = other DNA
gcgtaatcgctggttcagcgtgatggcggggccgtctgtgcgcgtgaatgaatggttcagcgcgtatgcgatggc

SEQ ID NO: 20946 - DNA, 75 bp, synthetic construct
  source 1..75: mol_type = other DNA
gacggtcgccacagcaacacgtctctggcgtggggggctggcgtgcagtttaacccgaccgaatccgtggccatt

SEQ ID NO: 20947 - DNA, 75 bp, synthetic construct
  source 1..75: mol_type = other DNA
cgttcattccaaacgcatttctggaaaagctgctcaaagaagacatatccgtaagtcagtttaacgatgttctta

SEQ ID NO: 20948 - DNA, 75 bp, synthetic construct
  source 1..75: mol_type = other DNA
accggtagtgatgcgcattatggcttcgtatgcgtttgaagattatgcccgtagcgcggcgagcaaaaaacagtg

SEQ ID NO: 20949 - DNA, 75 bp, synthetic construct
  source 1..75: mol_type = other DNA
aatcgccagcttacccgttacagcgatacccgctggcatgaagattccgttcgtaaccgctggttcagcgtaatg

SEQ ID NO: 20950 - DNA, 75 bp, synthetic construct
  source 1..75: mol_type = other DNA
caatggacgcaatggcaagcgcgtgcgtaagcaatttgccacgaaaggcgaagccatagcattcgaaaacttcac

SEQ ID NO: 20951 - DNA, 75 bp, synthetic construct
  source 1..75: mol_type = other DNA
gtgctgcgcgatattctgggccatgtcgatataaaaatgacaatgatttacgcccacttcgctcccgaccatctg

SEQ ID NO: 20952 - DNA, 75 bp, synthetic construct
  source 1..75: mol_type = other DNA
tgtccgtagccatttgtctggccgtatccggtgcgcctgcatgggcgtctgaacatcagtccacgctgagcgcgg

SEQ ID NO: 20953 - DNA, 75 bp, synthetic construct
  source 1..75: mol_type = other DNA
ctcacctctaaaatgtttgcccactatcgagataaacgcctgacaggcgagatctacttcagcgagaaatggaag

SEQ ID NO: 20954 - DNA, 75 bp, synthetic construct
  source 1..75: mol_type = other DNA
gctttacttttctgaccatgggctgtcggtcagcgacagtgctaatcctgttcatcatgatggtcatgtgcaggg

SEQ ID NO: 20955 - DNA, 75 bp, synthetic construct
  source 1..75: mol_type = other DNA
gaaattaaccatgttcatcgccgcgcagaatttcagataattatctccccggagtatcaggggaaaggtctggca

SEQ ID NO: 20956 - DNA, 75 bp, synthetic construct
  source 1..75: mol_type = other DNA
gctgaagcagccaaaaaatatcaaactgaagatttcttcaaccaggttgagtcaaaagagtatgtagaagatgca

SEQ ID NO: 20957 - DNA, 75 bp, synthetic construct
  source 1..75: mol_type = other DNA
tggaggactgaaagtcggtgatggaaccgtaattctgaatcaacgccctgatgataatggacacaagcaagcctt

SEQ ID NO: 20958 - DNA, 75 bp, synthetic construct
  source 1..75: mol_type = other DNA
gaagtcgtgctggtggcaatgttgctttccgggatcagtcatccctgggttttagttttaacagcaacaatgggt

SEQ ID NO: 20959 - DNA, 75 bp, synthetic construct
  source 1..75: mol_type = other DNA
tggcatcactggaacgcgaacagattcgccacgagcatgccaaatggtctgactccacatttggctgcgttggcc

SEQ ID NO: 20960 - DNA, 75 bp, synthetic construct
  source 1..75: mol_type = other DNA
gcgccgggacagacctggacaacctcgcgggcaatatgaacacaaagcgcctggttatcactccggcaacggata

SEQ ID NO: 20961 - DNA, 75 bp, synthetic construct
  source 1..75: mol_type = other DNA
ggttccctgcgcagcttcctgaagtaagaattatcctaggggatgctgtagtggaagtagcaaaacagggaagac

SEQ ID NO: 20962 - DNA, 75 bp, synthetic construct
  source 1..75: mol_type = other DNA
tcgaattattcattaaaaatccgcttgaaaacgggcttactcgtggcgaacaaatggaactggcacgaattgcac

SEQ ID NO: 20963 - DNA, 75 bp, synthetic construct
  source 1..75: mol_type = other DNA
tcccgcgcctgactgagagagcgcaggagccggaaccacaaccagttcgtgaaaccagacctgtgcgcaatttct

SEQ ID NO: 20964 - DNA, 75 bp, synthetic construct
  source 1..75: mol_type = other DNA
gatgctcatgctgaatggggggttaaacctaaaattcttggtgttggtggcggcttaggtgttaaaggtggtggt

SEQ ID NO: 20965 - DNA, 75 bp, synthetic construct
  source 1..75: mol_type = other DNA
attccgtgaaagccactcccagccagaacgaaacaattttctggcgcgtcgtgagcggtgcttacggaaaagcag

SEQ ID NO: 20966 - DNA, 75 bp, synthetic construct
  source 1..75: mol_type = other DNA
agaagcagcattccagctgttacagttgcacgccgaaaagctgaccgttcctgattatatccaggaggcactggc

SEQ ID NO: 20967 - DNA, 75 bp, synthetic construct
  source 1..75: mol_type = other DNA
gctgaggcagccaaaaaatatcaaactgaagatttcttcaaccaggttgagtcaaaagagtatgtagaggatgca

SEQ ID NO: 20968 - DNA, 75 bp, synthetic construct
  source 1..75: mol_type = other DNA
cgatagcggtctggttggcagagaaccagcaaaatattgaagcgcattacggtaaatcgcttcatgaagttgtcg

SEQ ID NO: 20969 - DNA, 75 bp, synthetic construct
  source 1..75: mol_type = other DNA
gggcctggcgctgggcgcgacgtcaccgccggggcgattcagtcggatatcaaccggctggcacagttgttgtaa

SEQ ID NO: 20970 - DNA, 75 bp, synthetic construct
  source 1..75: mol_type = other DNA
caacgtcgaatgaaactcactccatgtgtggtgatgacatgctatatgctgcccggcaatatgcagataagtgag

SEQ ID NO: 20971 - DNA, 75 bp, synthetic construct
  source 1..75: mol_type = other DNA
gtggcggttacatgatgccggatggcgaccgttttcatctggttaacggtgaaaactggtttgaccgcacggtca

SEQ ID NO: 20972 - DNA, 75 bp, synthetic construct
  source 1..75: mol_type = other DNA
taaatcctggatcaaagacaaagtccaggaaccacgaccttttgttatctggctggaaaaaacacatcatattcc

SEQ ID NO: 20973 - DNA, 75 bp, synthetic construct
  source 1..75: mol_type = other DNA
atgacacaacaaggggatgctgtagctggggagctggcgacagaaaaagtgggtgttaaagggtatctggccttt

SEQ ID NO: 20974 - DNA, 75 bp, synthetic construct
  source 1..75: mol_type = other DNA
atgattgctcatcacttcagaactgatgaaataccacgtcagtgcgtgacacctggcgattatgttcttcatgaa

SEQ ID NO: 20975 - DNA, 75 bp, synthetic construct
  source 1..75: mol_type = other DNA
acctttggccgctatggcgttgggggtatcactctggcagaagcccgtgagcgacttggtgaagccaagcggatg

SEQ ID NO: 20976 - DNA, 75 bp, synthetic construct
  source 1..75: mol_type = other DNA
gatgaacgggaagggcagcagtgcccgcccgtcgctgacggtgtcgaatctgttcggtctggtcaccggaatggc

SEQ ID NO: 20977 - DNA, 75 bp, synthetic construct
  source 1..75: mol_type = other DNA
acctcaagccgagggataaactctacaaggtgaatgaccgggacggcctctatgtggctgtcactcctgccggtt

SEQ ID NO: 20978 - DNA, 75 bp, synthetic construct
  source 1..75: mol_type = other DNA
aatttccggaagccattatctaatgccgcgctgaactctctgatcgacagaacggtgaaaataataaatgaagat

SEQ ID NO: 20979 - DNA, 75 bp, synthetic construct
  source 1..75: mol_type = other DNA
taatacctcaagcgtggaagcggtcattcgcgatgtgacagaaattaatcccaacgcggtaatgattataaaatc

SEQ ID NO: 20980 - DNA, 75 bp, synthetic construct
  source 1..75: mol_type = other DNA
tgggaagatatagaggattttggggaaacacatctcgattttttgaagcaatatggtgattttgaaaatggtatt

SEQ ID NO: 20981 - DNA, 75 bp, synthetic construct
  source 1..75: mol_type = other DNA
cctgatgtcacccttcgggacttaacgctttccccgggctaccacagtgattatgcccctcaacccattccggag

SEQ ID NO: 20982 - DNA, 75 bp, synthetic construct
  source 1..75: mol_type = other DNA
tcccggtggcactcactgcccggaacctgatgtcacccttcgggacttaacgctttccccgggctaccacagtga

SEQ ID NO: 20983 - DNA, 75 bp, synthetic construct
  source 1..75: mol_type = other DNA
gaaccagccacatgcgcagttctggctggtttttgacattgaccgcgagggggctgcgattgactggagcgaccg

SEQ ID NO: 20984 - DNA, 75 bp, synthetic construct
  source 1..75: mol_type = other DNA
ggatttatccggcgatgtccgcgatccctgcactggcagggatgattaccacgatggttcagcagggctatgact

SEQ ID NO: 20985 - DNA, 75 bp, synthetic construct
  source 1..75: mol_type = other DNA
tatggaagagccgtgcatctggttcagcggattctgcagccagggggacggagcctgttttgaaggacgctggca

SEQ ID NO: 20986 - DNA, 75 bp, synthetic construct
  source 1..75: mol_type = other DNA
aaatccagataattgctgcaacgacactcggtgatagtctggtgaaaattgacccggcatacaccaaaaaagaaa

SEQ ID NO: 20987 - DNA, 75 bp, synthetic construct
  source 1..75: mol_type = other DNA
aatggccgctgtacgaaaaaatcgcagcagcattcagacaggccagccgggaactgaatattccggtggaatggg

SEQ ID NO: 20988 - DNA, 75 bp, synthetic construct
  source 1..75: mol_type = other DNA
cggtctgcggacaatatcggtggggtctattatcgcccggttcagatttatattaataatgcctggagaacggta

SEQ ID NO: 20989 - DNA, 75 bp, synthetic construct
  source 1..75: mol_type = other DNA
agccggggaatcactatctggtctataacgacaaattcattaagattagcgattcctgtccggctaagccccctt

SEQ ID NO: 20990 - DNA, 75 bp, synthetic construct
  source 1..75: mol_type = other DNA
tacgactgggcggaaaatgcgcgtaaggatgaagtaaagtttcagttgagcctggcgtttccgctgtggcgtggg

SEQ ID NO: 20991 - DNA, 75 bp, synthetic construct
  source 1..75: mol_type = other DNA
agatatacaccgatagtgctggctacccgataaaaattgttcgctgcataaacaacactgtgttgtacagaagaa

SEQ ID NO: 20992 - DNA, 75 bp, synthetic construct
  source 1..75: mol_type = other DNA
ggtccttgatgaaattggcatgcagcgggatacgcgcaacgagcaggtcacgctgaaccagatagtcgaccgcag

SEQ ID NO: 20993 - DNA, 75 bp, synthetic construct
  source 1..75: mol_type = other DNA
aatacgcgctgagccaggccaaatccatagctgacgaactgatgaccgggtgcacgaattttgtgttcagcggta

SEQ ID NO: 20994 - DNA, 75 bp, synthetic construct
  source 1..75: mol_type = other DNA
gcaaaaagtttcgcgtggctgtctccggatcaactgttgatggccgcgaaatcagtccggtgcatctgcgtgaag

SEQ ID NO: 20995 - DNA, 75 bp, synthetic construct
  source 1..75: mol_type = other DNA
atgcaggatattccacaggaaacacatcatgagacgacacgcctcactcagtcagcccaggcggtgctctgggaa

SEQ ID NO: 20996 - DNA, 75 bp, synthetic construct
  source 1..75: mol_type = other DNA
atgcgcgttttctggatgcggtgaattttgtggcaggcaatcctgaggcagacccggagcaggagctgacggacc

SEQ ID NO: 20997 - DNA, 75 bp, synthetic construct
  source 1..75: mol_type = other DNA
agaaaacgaagaccgggcggttatggacctgcgttcgtgacgaccgtaacgccgggtcaacgctggcgccggcgg

SEQ ID NO: 20998 - DNA, 75 bp, synthetic construct
  source 1..75: mol_type = other DNA
tcagggcaaacaaacaggctgaatgcgattatctgttcagtgctctgcgtcggctggaaatccggggcgtgacgg

SEQ ID NO: 20999 - DNA, 75 bp, synthetic construct
  source 1..75: mol_type = other DNA
agctgacaacgtcacttgccaccacaaactacgcgattacccgggtaaacgacagggtcagttcactggtcagtg

SEQ ID NO: 21000 - DNA, 75 bp, synthetic construct
  source 1..75: mol_type = other DNA
gcttacacaatcccggcaaaaactaaaggctataaaggtgttttgtctgtcggacgggtccagacacccgtgctt

SEQ ID NO: 21001 - DNA, 75 bp, synthetic construct
  source 1..75: mol_type = other DNA
gaaaactataatcctgattacaaagcctggaaagttgaaacactccctttacgtctttaccccgtcaaatatcag

SEQ ID NO: 21002 - DNA, 75 bp, synthetic construct
  source 1..75: mol_type = other DNA
gtcgttccgggaatgctgggcaaagcaggttttcctcccgcagctgtgtttgttgccacctgtctggtcgcgggc

SEQ ID NO: 21003 - DNA, 75 bp, synthetic construct
  source 1..75: mol_type = other DNA
gaacaatacgcccgcattccgctacgtgatgacaccgtagatgagcatgcacaggatatgctttatgacttcgtt

SEQ ID NO: 21004 - DNA, 75 bp, synthetic construct
  source 1..75: mol_type = other DNA
tttttaaatcagtgttcaacggcagacccggctgcaatctcactgatcatgagtaagtttggtcgcgtcagaggc

SEQ ID NO: 21005 - DNA, 75 bp, synthetic construct
  source 1..75: mol_type = other DNA
atgaatccgtctgatgccattgaggcaattgaaaaaccgctggcctccctgccttactcactctcccgtcacatc

SEQ ID NO: 21006 - DNA, 75 bp, synthetic construct
  source 1..75: mol_type = other DNA
acctggtactgtggctgattaaagccgatgaccgtgccctgtctgtggatgagtatttctggcgacacatcctgc

SEQ ID NO: 21007 - DNA, 75 bp, synthetic construct
  source 1..75: mol_type = other DNA
aggtacaggaaaacgcctgaaaggctggttgccagtggcctgtattaatccggaaagaaagggacaggccacacg

SEQ ID NO: 21008 - DNA, 75 bp, synthetic construct
  source 1..75: mol_type = other DNA
aggggcgggaggtgcagattatcgctgctgaccgtcgctcgcagatgaacctgaagcaggatgaacggctgtccg

SEQ ID NO: 21009 - DNA, 75 bp, synthetic construct
  source 1..75: mol_type = other DNA
gtggactgtgtgctgtgggtaaaagcggatgaaattgtcgctaacgattataatcccaatgtcatggccccaagc

SEQ ID NO: 21010 - DNA, 75 bp, synthetic construct
  source 1..75: mol_type = other DNA
aaactgctgaaacattcactggagcaggatgggttcacgcagcctgtggttgtctcggaagagaaggagcattat

SEQ ID NO: 21011 - DNA, 75 bp, synthetic construct
  source 1..75: mol_type = other DNA
gaacatggggcgaattgtcgttgacgtcgatggtgttgagcttgccgaactgattaacgtggtctgcgataatgg

SEQ ID NO: 21012 - DNA, 75 bp, synthetic construct
  source 1..75: mol_type = other DNA
tcatgccctgtatctcgatggtcgccgtgaaatgatgcaatggtacgctgactacattgattcactttccatcca

SEQ ID NO: 21013 - DNA, 75 bp, synthetic construct
  source 1..75: mol_type = other DNA
acggcaaaagacaacgcctggctgtactcgctgtcgcatcagacgaatgacaccggcgaatcagaatggattcat

SEQ ID NO: 21014 - DNA, 75 bp, synthetic construct
  source 1..75: mol_type = other DNA
atgaaactggccctgacaccggaagccgacagcgttaacgtacaggcactgaacatggggcgcattgtcgttgac

SEQ ID NO: 21015 - DNA, 75 bp, synthetic construct
  source 1..75: mol_type = other DNA
gcgtctgtgttgcctctgttgcacgcacagttctgcgtgccgtccgtgacacggtggtctctgttgcccgcgcgg

SEQ ID NO: 21016 - DNA, 75 bp, synthetic construct
  source 1..75: mol_type = other DNA
ccgtgaacagtttaccggtgcggtggaccggatatttgacacggcggagagcgtctgtgttgcctctgttgcacg

SEQ ID NO: 21017 - DNA, 75 bp, synthetic construct
  source 1..75: mol_type = other DNA
gatacgctggtcagtgcgctcatgacagcgcttcccgaccatgccgccagtcccctgatgacccgcctgcaggac

SEQ ID NO: 21018 - DNA, 75 bp, synthetic construct
  source 1..75: mol_type = other DNA
cggcgctggggaaagtagcgttcgcgataccgagtatgctgcgctgtaccgtgaacaactttcccggctcgatct

SEQ ID NO: 21019 - DNA, 75 bp, synthetic construct
  source 1..75: mol_type = other DNA
agccgcaaaatctgcctgctgcatgagctgttccagccagtaaatccgatctgtgcagtgtcggttcgtctgcaa

SEQ ID NO: 21020 - DNA, 75 bp, synthetic construct
  source 1..75: mol_type = other DNA
tcgtcttcgtaaagacaaaaaacgtgaaaaggtaatgattaacctggctgctctgactgttgatgctttgtctgc

SEQ ID NO: 21021 - DNA, 75 bp, synthetic construct
  source 1..75: mol_type = other DNA
tcgctgggccgggagaacgccagaaacgaagcgcaggccagcaccctgaaaagtaccgccgacaccctgaatatc

SEQ ID NO: 21022 - DNA, 75 bp, synthetic construct
  source 1..75: mol_type = other DNA
accaaaacattggttcatgacgcacagcagcacacagattttgtccgtgccatacagcgtaaaaatgaagtggtt

SEQ ID NO: 21023 - DNA, 75 bp, synthetic construct
  source 1..75: mol_type = other DNA
gccacccggaactgttgtacagggagcttgcccggctggcaggctccctgctcacattctcgcttgagcataatg

SEQ ID NO: 21024 - DNA, 75 bp, synthetic construct
  source 1..75: mol_type = other DNA
gccaggcgctggagaaagtggccgccacgggggactgccggcaggtggctcgggcgttgctgaataacccgggag

SEQ ID NO: 21025 - DNA, 75 bp, synthetic construct
  source 1..75: mol_type = other DNA
atgacaagtattcaacaacgagcagaactgcaccgccagatatggcaaattgccaatgatgtcagaggttctgtt

SEQ ID NO: 21026 - DNA, 75 bp, synthetic construct
  source 1..75: mol_type = other DNA
atgaagaaaggcgatgcggctgaacatgcagagttccatatgaaagacaaccgctgggtgcctggctggatgtgt

SEQ ID NO: 21027 - DNA, 75 bp, synthetic construct
  source 1..75: mol_type = other DNA
ggtcagcttgaagcctggcaggagaatgccatgttcgatacagggcgttacaggcgaaaaaaaatccggtaccgc

SEQ ID NO: 21028 - DNA, 75 bp, synthetic construct
  source 1..75: mol_type = other DNA
gatgaggtaaccggaaaaatgatcacgcgggataatccaccgatcccgggtaaacaatcactggcgaaaggctca

SEQ ID NO: 21029 - DNA, 75 bp, synthetic construct
  source 1..75: mol_type = other DNA
cgcatttacaatcagaaaggcatcttttcaaacacaaaagattccgaagaaggcttaacacatatactctcagag

SEQ ID NO: 21030 - DNA, 75 bp, synthetic construct
  source 1..75: mol_type = other DNA
atgccacgtttttttgcccgccatgccgccacgctgtttttcccgatggcgttgattttgtatgactttgccgcg

SEQ ID NO: 21031 - DNA, 75 bp, synthetic construct
  source 1..75: mol_type = other DNA
atgtggcatcatcctgaaatgcagcgggcttcctgaaaaaagtaaccggggtcgaccacgactggacagccccct

SEQ ID NO: 21032 - DNA, 75 bp, synthetic construct
  source 1..75: mol_type = other DNA
tgaacgacgccacggatgacacgacagacaccgacgacggagaagcgcgcatcagtacagacgcgttctggccgg

SEQ ID NO: 21033 - DNA, 75 bp, synthetic construct
  source 1..75: mol_type = other DNA
ttggtctgatccgcgaaaacaatgaactggctcgctcaggtgcaaataacgttggtctgaccgcgttacgtggtc

SEQ ID NO: 21034 - DNA, 75 bp, synthetic construct
  source 1..75: mol_type = other DNA
aaggtcgatggcaggaagctctatttatcaccaatcatggacctgtataatggagaaatagtctcatataacctt

SEQ ID NO: 21035 - DNA, 75 bp, synthetic construct
  source 1..75: mol_type = other DNA
tgcatagcgagcacgcccaactggcggtggatgcactgttaatagcttccggtcgtcaaccggctaccgcttcgt

SEQ ID NO: 21036 - DNA, 75 bp, synthetic construct
  source 1..75: mol_type = other DNA
ggactggtcagggccgtactccgaaagcaatagtggctgctattgaggcaggtaaaacactggaagatttccaga

SEQ ID NO: 21037 - DNA, 75 bp, synthetic construct
  source 1..75: mol_type = other DNA
ataatcctgctcaactctcacgatggcagcagttcgtaccagatgctgccgggactatttcgtgcggtttgtcag

SEQ ID NO: 21038 - DNA, 75 bp, synthetic construct
  source 1..75: mol_type = other DNA
acagtctttgagcctgtaaacagttttcagaaaaaccagaagaagctggcgagacttcagcgacagttaagccgc

SEQ ID NO: 21039 - DNA, 75 bp, synthetic construct
  source 1..75: mol_type = other DNA
gatgaggtaactggcaggatgattacgctggataatccgccgatttccggtaagcagtcgtacgcaaaaggttca

SEQ ID NO: 21040 - DNA, 75 bp, synthetic construct
  source 1..75: mol_type = other DNA
gaacaaaatatcaatagtcaccgaagcaatgaatgaagcacttcgtaaacttgagcaacgtgtattaaatacgct

SEQ ID NO: 21041 - DNA, 75 bp, synthetic construct
  source 1..75: mol_type = other DNA
gatccaacaccaaacccggagccgacgcctgagccaacgccggacccagaacctacgccggaaccgacacctgat

SEQ ID NO: 21042 - DNA, 75 bp, synthetic construct
  source 1..75: mol_type = other DNA
gtggcaactgcgcttaaagacaaagcggagcaggcaggaggttctcatttccgaatcacttcattgggaggaaaa

SEQ ID NO: 21043 - DNA, 75 bp, synthetic construct
  source 1..75: mol_type = other DNA
acttcctgaccggccaggctttaacgtcggttctggatatgcttttctcgtttatctttctggctgtaatgtgga

SEQ ID NO: 21044 - DNA, 75 bp, synthetic construct
  source 1..75: mol_type = other DNA
aaactggcctgagccttacattaagattaacggtaattgctctataattggtacagtgattttctcgggaaaacc

SEQ ID NO: 21045 - DNA, 75 bp, synthetic construct
  source 1..75: mol_type = other DNA
acaatatatttgaaataggctacaatataatgaacaccgatctggtcattggcgaaaaaatttatttcaggacac

SEQ ID NO: 21046 - DNA, 75 bp, synthetic construct
  source 1..75: mol_type = other DNA
ggagaaagcgtcagtggaggaaatcagtctgccactgctgacgaaaatgtcctcagagcgcacgctggcagtcta

SEQ ID NO: 21047 - DNA, 75 bp, synthetic construct
  source 1..75: mol_type = other DNA
aactgcgcaccgatttgttcagcgatgacggggacggttatgtcgaccgcgtggcgctcgatgctgccctgctgg

SEQ ID NO: 21048 - DNA, 75 bp, synthetic construct
  source 1..75: mol_type = other DNA
gctgggaagataacggtatcacccgttacgtcactgaaattcttgttaagaccacgggcaccgtgcagatgctgg

SEQ ID NO: 21049 - DNA, 75 bp, synthetic construct
  source 1..75: mol_type = other DNA
aactgcgtactgatttgttcagcgatgacggggacggttatgtcgaccgcgtggcgctcgatgctgccctgctgg

SEQ ID NO: 21050 - DNA, 75 bp, synthetic construct
  source 1..75: mol_type = other DNA
gcgcactgcttgccggtgaggaaaacgccaggctgcgtgcgacccactggttacatgagaggggcatgaaagtat

SEQ ID NO: 21051 - DNA, 75 bp, synthetic construct
  source 1..75: mol_type = other DNA
gtgcgcagtgaacaggcagctcaggtggcgattgcgcggatgaaccgggccattgatgaggtactgagacgatga

SEQ ID NO: 21052 - DNA, 75 bp, synthetic construct
  source 1..75: mol_type = other DNA
ctacaatcggcgcgtggaactgtatcgggaaacggagaaaatcacgtaccactggaagaagccggagcggttgcg

SEQ ID NO: 21053 - DNA, 75 bp, synthetic construct
  source 1..75: mol_type = other DNA
aactcggttaccgtatcttctaaaaaaatgaaccgttaccgacttaatcggggtggggagcgtgctgcaaatagt

SEQ ID NO: 21054 - DNA, 75 bp, synthetic construct
  source 1..75: mol_type = other DNA
atgtctggacccccgaaaaccccgccacgcctgcatttgatacgaggcaacccctcaaagcggccagttaaagac

SEQ ID NO: 21055 - DNA, 75 bp, synthetic construct
  source 1..75: mol_type = other DNA
ttgtgaacaattaacctactgcgcaaaaaatgaatctgagcagtgggattatatcaaccatgtggagaagcgcca

SEQ ID NO: 21056 - DNA, 75 bp, synthetic construct
  source 1..75: mol_type = other DNA
gcgtgccgcagtttgaacatgcgctttgcacgtttatggcgaaaaagccgctgtttatgattggtcacagcgtcg

SEQ ID NO: 21057 - DNA, 75 bp, synthetic construct
  source 1..75: mol_type = other DNA
atgaatattttgagaaagcttatgcagagtctgtgcggttgcggaaagcatgatgactgtgaaaacgggcagtcg

SEQ ID NO: 21058 - DNA, 75 bp, synthetic construct
  source 1..75: mol_type = other DNA
attgtgcgatggtggcggcgggtgaaacatccggtcgcttggatgtggtacttagtcgtctggctgactataccg

SEQ ID NO: 21059 - DNA, 75 bp, synthetic construct
  source 1..75: mol_type = other DNA
ccgccactgcctgttaaacggtaatgcttatgcggtgattcagtgggggcgtgatggttttccggtggctttaca

SEQ ID NO: 21060 - DNA, 75 bp, synthetic construct
  source 1..75: mol_type = other DNA
tttgcgttctgcccaggacaggtgcgtcaggccgtggcagtgatgccccttgcggcgaaggttctcaaacaggtg

SEQ ID NO: 21061 - DNA, 75 bp, synthetic construct
  source 1..75: mol_type = other DNA
gcgacgatgtggcggggctgtcacaggcgggggagtttccgtttaacccggacacatcggcaggagcggagacgg

SEQ ID NO: 21062 - DNA, 75 bp, synthetic construct
  source 1..75: mol_type = other DNA
attgcctgcagtgatgaacgcggtttctgtcatcgctgaggcggtggccacgatgccgtgttatctgtatctggt

SEQ ID NO: 21063 - DNA, 75 bp, synthetic construct
  source 1..75: mol_type = other DNA
tacctggtacgcaatgagaaggggaaggaggcccgagagtggcttgattctcatccggtcgatcacatcctcaac

SEQ ID NO: 21064 - DNA, 75 bp, synthetic construct
  source 1..75: mol_type = other DNA
atcaagatcggtgaacgtgctgcagggtatcgactttcagaggttcaggcatggatccgtggtgagtggcatcct

SEQ ID NO: 21065 - DNA, 75 bp, synthetic construct
  source 1..75: mol_type = other DNA
aaaggaggggaaattccccaagcgaatcaaaatcggatctacggcggtggcttatagactctctgagattcaagc

SEQ ID NO: 21066 - DNA, 75 bp, synthetic construct
  source 1..75: mol_type = other DNA
atgcagacccgggataaccttgagcgcatggtggttatcaaggcgtttatcgcggtacgggtgctgggcctgcgg

SEQ ID NO: 21067 - DNA, 75 bp, synthetic construct
  source 1..75: mol_type = other DNA
tgggtttcttctacaaattgcccgggaaaagcgaaagcaaatgatgcaactaacccgtggcgtttaaagcgtacc

SEQ ID NO: 21068 - DNA, 75 bp, synthetic construct
  source 1..75: mol_type = other DNA
ggtggcgtactgccgctatgccgatgattttgtcctcatcgtcaaaggcaccaaagcacaggcggaagccatcag

SEQ ID NO: 21069 - DNA, 75 bp, synthetic construct
  source 1..75: mol_type = other DNA
gcattgagttccgctacgaaaaaatcacctggacttacaaagacggcaacatcattcattccgactcgtggaatg

SEQ ID NO: 21070 - DNA, 75 bp, synthetic construct
  source 1..75: mol_type = other DNA
gccgcattcgtttctgacgttttcgccgcaccggcactggtggccgccgcgctttttgaggactctgcagcggca

SEQ ID NO: 21071 - DNA, 75 bp, synthetic construct
  source 1..75: mol_type = other DNA
aacttcgccgcatcgctgacagcactgttatcaggcaactacagtgaaagcaaagtcgatatggctgaacaactc

SEQ ID NO: 21072 - DNA, 75 bp, synthetic construct
  source 1..75: mol_type = other DNA
tactaaaagcagtaatagtgaactgacgaaaacagagatcttcgctgttaaaaagcagattaaagagcttcgctc

SEQ ID NO: 21073 - DNA, 75 bp, synthetic construct
  source 1..75: mol_type = other DNA
aaaccaacaaccgggagcaggcgcggctctacgccgaagcagaacagaccagtgcactgctgagacaacgacaac

SEQ ID NO: 21074 - DNA, 75 bp, synthetic construct
  source 1..75: mol_type = other DNA
atcccctgaaagcacagcggctggctgagaagataaataataaacgggaggcggtatgcacaaagcatctcctgt

SEQ ID NO: 21075 - DNA, 75 bp, synthetic construct
  source 1..75: mol_type = other DNA
aggccgtcgggcgcgaaagaccccttacacgtgacgagatgcgtcaggtgcaaggtgttttatccacgattaacc

SEQ ID NO: 21076 - DNA, 75 bp, synthetic construct
  source 1..75: mol_type = other DNA
tggcgttattactggcggcgctgggctggcagacgtggcggctggctgatgccagccagaccatcagcacgcagg

SEQ ID NO: 21077 - DNA, 75 bp, synthetic construct
  source 1..75: mol_type = other DNA
agctaaatcctctggttcaagtgagtgatgttgtggctggctttatgcagcactattttgattatctcaatagcc

SEQ ID NO: 21078 - DNA, 75 bp, synthetic construct
  source 1..75: mol_type = other DNA
gacgacgaaaacctgcccgtggtgctcgacgccatcctgaaccggggcgcacgtttttcggcggtggaaatgtat

SEQ ID NO: 21079 - DNA, 75 bp, synthetic construct
  source 1..75: mol_type = other DNA
cgctggtttgaccgggatattctgcgggagatggtcctggaagcccggactgaaatccgcagcatggcggatgca

SEQ ID NO: 21080 - DNA, 75 bp, synthetic construct
  source 1..75: mol_type = other DNA
acggatgttgaccagcgaaatccgaactatccgggctggatcagcatttacgtgcggctggatgcgccccggctg

SEQ ID NO: 21081 - DNA, 75 bp, synthetic construct
  source 1..75: mol_type = other DNA
tggcagaagatgcgcggcgtatccgggcggcgctgaccaccaccggtcagacgttgctgacccgccagacgcgcc

SEQ ID NO: 21082 - DNA, 75 bp, synthetic construct
  source 1..75: mol_type = other DNA
attaccgcagcaaagacctcacaccgaaaaaatcaaggctactggctgacaccatttcagctgtttatctcgatg

SEQ ID NO: 21083 - DNA, 75 bp, synthetic construct
  source 1..75: mol_type = other DNA
ggcattacgtatatgcttctgatgacggttttgatcccaacttttccacccaaaaagccgacacaacacgaatga

SEQ ID NO: 21084 - DNA, 75 bp, synthetic construct
  source 1..75: mol_type = other DNA
cttaatcgcacctatgctaatcggagtaacgccgaacgggcagcgaaaatgcagtgggaacgcctgcaacgcggc

SEQ ID NO: 21085 - DNA, 75 bp, synthetic construct
  source 1..75: mol_type = other DNA
aagaaaatggcagttggctttgcctgattgacttagaacacgcactacgcgtcgctggcattcgcatcaaaggag

SEQ ID NO: 21086 - DNA, 75 bp, synthetic construct
  source 1..75: mol_type = other DNA
ggaagcatttttattatgacaggataaataaagacgacatcgttattaacgatatcgcggtttctctttcaaata

SEQ ID NO: 21087 - DNA, 75 bp, synthetic construct
  source 1..75: mol_type = other DNA
tacgcgaactggcgactgacctgcaacgaatggcaacgcatcaaaaattactggcgtttcgcgcaatgctctcgc

SEQ ID NO: 21088 - DNA, 75 bp, synthetic construct
  source 1..75: mol_type = other DNA
tacctgtgcgatcagcgagcctccgatcaggcgcgtgaccgttaccgtgaggcgctggcctggctgaaagatgtc

SEQ ID NO: 21089 - DNA, 75 bp, synthetic construct
  source 1..75: mol_type = other DNA
gcaaacctgccttcattgaccgggtaaaccggctggaaatggtcaacggtgccagcaatgacgatcgcagtgttc

SEQ ID NO: 21090 - DNA, 75 bp, synthetic construct
  source 1..75: mol_type = other DNA
gtcagtgcaacaaaagccgcagaactgacaggaggatcggtcatctttcctgcgttcaccgatgccgaaaaagcg

SEQ ID NO: 21091 - DNA, 75 bp, synthetic construct
  source 1..75: mol_type = other DNA
tgatccgcgagaacaaaccgctgatctcactatgggcacaatggtatatcggcctgatggtgccaccattaatgc

SEQ ID NO: 21092 - DNA, 75 bp, synthetic construct
  source 1..75: mol_type = other DNA
acctatcacgctcatagtggacaactacatcatccataaaagtcgggaaacacagcgctggctgaaagaaaatcc

SEQ ID NO: 21093 - DNA, 75 bp, synthetic construct
  source 1..75: mol_type = other DNA
tattgtttgctgcactgtctgccgggcaggcaatggcctcagatgtggcattcaggggtaatctgcttgacagac

SEQ ID NO: 21094 - DNA, 75 bp, synthetic construct
  source 1..75: mol_type = other DNA
ctcgaaggcacaccggagcagcacaaagcgcaggacgtttacaacatcagacgagacgaattagaaggagctgct

SEQ ID NO: 21095 - DNA, 75 bp, synthetic construct
  source 1..75: mol_type = other DNA
cgcctgaacaattacgtaaacaggcacaggaaatgttacgacaggcggaacaactggaaaagacaggcgtaacaa

SEQ ID NO: 21096 - DNA, 75 bp, synthetic construct
  source 1..75: mol_type = other DNA
gattaatattgataaattaaaagctaaaatagcaagtgattcatcagagattgcaaggctaaataatattgatat

SEQ ID NO: 21097 - DNA, 75 bp, synthetic construct
  source 1..75: mol_type = other DNA
tgcgaatacatgacctgtcagtgtgccgtgtacatcggcggtcatttcatcttacagggtggaaaaggccagtaa

SEQ ID NO: 21098 - DNA, 75 bp, synthetic construct
  source 1..75: mol_type = other DNA
aagccgtatgcagaagtcggattgcctgctttacaacaactgcaaggactgatgactctggaagggcagaataaa

SEQ ID NO: 21099 - DNA, 75 bp, synthetic construct
  source 1..75: mol_type = other DNA
agagattatatccgaggcgtcctgaagaaaagaattatttcttccgatgtttttctggttatggctggaatgtat

SEQ ID NO: 21100 - DNA, 75 bp, synthetic construct
  source 1..75: mol_type = other DNA
taataattcaagagaatgctgatgttattgtaggctggaactcaaattcaattgtaaataatattatctccgcaa

SEQ ID NO: 21101 - DNA, 75 bp, synthetic construct
  source 1..75: mol_type = other DNA
cccttgttatgcgccgtgcgcgcgatttgattgctgattatggatggcctgaccataccgatgttgatcagcgtg

SEQ ID NO: 21102 - DNA, 75 bp, synthetic construct
  source 1..75: mol_type = other DNA
gaagataagcagaacggactggagatttattgcttcggtcttgtgtgctttcggaatggcatcagacatcagtcc

SEQ ID NO: 21103 - DNA, 75 bp, synthetic construct
  source 1..75: mol_type = other DNA
ggtcaaaggggcatgtcatatcatcgaggggcagaaacagcccggaaaacgcctgtggattgcggagggttatgc

SEQ ID NO: 21104 - DNA, 75 bp, synthetic construct
  source 1..75: mol_type = other DNA
tgcggttatcggcctgggcacgatactgggaaaaatgatggaagtatccggggccgcagaaagaattggtctgac

SEQ ID NO: 21105 - DNA, 75 bp, synthetic construct
  source 1..75: mol_type = other DNA
tttgacctgaccacgtttgatgatgagcgcgactttttcgccgcctgccgtgctcttcaccaggatgaagccgat

SEQ ID NO: 21106 - DNA, 75 bp, synthetic construct
  source 1..75: mol_type = other DNA
gccagcgccatcttgatgacctgatggcggaaaaaagtaagtcgtttcgttaccgcttcgacaaggacctggctg

SEQ ID NO: 21107 - DNA, 75 bp, synthetic construct
  source 1..75: mol_type = other DNA
gtaatgcagccagggatgcaacgaccgcagcagaaaaagcccgggagtcagcagaaagcgcacagtcagcggaac

SEQ ID NO: 21108 - DNA, 75 bp, synthetic construct
  source 1..75: mol_type = other DNA
tccggatgaagccggtcgttacagcatggacgttgagtacggtcagtacagcgttattctgttggtggaagggtt

SEQ ID NO: 21109 - DNA, 75 bp, synthetic construct
  source 1..75: mol_type = other DNA
cggggcccgcgggtcctcaggggccgaagggagataaaggagagcgtggcgacaccggtcctgtcggggcaaccg

SEQ ID NO: 21110 - DNA, 75 bp, synthetic construct
  source 1..75: mol_type = other DNA
gagttcaccctttacgcctcctcgtttgcccgtggacgcacacgctacacgccgctaaaacgctgggcgctaacg

SEQ ID NO: 21111 - DNA, 75 bp, synthetic construct
  source 1..75: mol_type = other DNA
cagatttttatcatccagaattcgaaaaatgcttaatttggaatgatcctataataaatgtgaaatggccaatta

SEQ ID NO: 21112 - DNA, 75 bp, synthetic construct
  source 1..75: mol_type = other DNA
atttggtcagcatcattcagttattctatccgaagaaaattttcttcagttttatattcctccaggtttcgctca

SEQ ID NO: 21113 - DNA, 75 bp, synthetic construct
  source 1..75: mol_type = other DNA
ggaaagatgctcgatgccatggacgatcaggaactggttaagctagtcgccgaacgcagcaaccagaagctgcac

SEQ ID NO: 21114 - DNA, 75 bp, synthetic construct
  source 1..75: mol_type = other DNA
tctcaatctagtaaaggcgtgttgcgagggttacattatcaattagaaccttatgctcaaggaaagcttgttcgc

SEQ ID NO: 21115 - DNA, 75 bp, synthetic construct
  source 1..75: mol_type = other DNA
tatcttcgacaacgatgaagataaaacggattcggcagcactgttgccctgtattgaacaggccagggaggatat

SEQ ID NO: 21116 - DNA, 75 bp, synthetic construct
  source 1..75: mol_type = other DNA
ataagacggattcagcagcactgttgccctgcatcgaacaggcccgggaggatgtccgtgctgttcgtcatctgc

SEQ ID NO: 21117 - DNA, 75 bp, synthetic construct
  source 1..75: mol_type = other DNA
gaaaatgaaagtgacctgctgcagccggaaggcccgccctttcatctctgtgccttctgccacgcctggcactgt

SEQ ID NO: 21118 - DNA, 75 bp, synthetic construct
  source 1..75: mol_type = other DNA
ataaaacggattcagcagcactgctgccctgcattaaacaggccagggaagatatccgtaccctgcgccaactgc

SEQ ID NO: 21119 - DNA, 75 bp, synthetic construct
  source 1..75: mol_type = other DNA
taaacccgcaatataaaacgaaaaaacagactgtttttcaaaagattagcgcatttattgaaaaatttaaggggg

SEQ ID NO: 21120 - DNA, 75 bp, synthetic construct
  source 1..75: mol_type = other DNA
caggtttggtgacgggccgtggcaggatgttaaggggctggatgaagtgggcagtgatacaggcagaacaggaga

SEQ ID NO: 21121 - DNA, 75 bp, synthetic construct
  source 1..75: mol_type = other DNA
atttgcaggtcaggtttggtgacgggccgtggcaggatgttaagggactggatgaagtgggcagtgatacaggca

SEQ ID NO: 21122 - DNA, 75 bp, synthetic construct
  source 1..75: mol_type = other DNA
gcttcagaacctcaatggtgtggtgtttaatgacagcgagtggcggcgtttcacggagcagtatctggataaccc

SEQ ID NO: 21123 - DNA, 75 bp, synthetic construct
  source 1..75: mol_type = other DNA
ttttgaccttgccctgcagacaacggtgccggaaatcaaaaccgcaaaagacttcctgcagaaaatggcaagcga

SEQ ID NO: 21124 - DNA, 75 bp, synthetic construct
  source 1..75: mol_type = other DNA
cgaataagctgtatcaggtggcgcttttcacggctgccaaccgcaaccgctcaatggtgaatatactcactgaac

SEQ ID NO: 21125 - DNA, 75 bp, synthetic construct
  source 1..75: mol_type = other DNA
caacaaaaaagctactcctgaatattcgctctgttcgtgtttttgcgcgagaaaccagctttgaacaactgctgg

SEQ ID NO: 21126 - DNA, 75 bp, synthetic construct
  source 1..75: mol_type = other DNA
tcagcctgagcttgccgcgaagctgatgaaagatgttatcgctgaaccctaccgtgaacggttactgcctggctt

SEQ ID NO: 21127 - DNA, 75 bp, synthetic construct
  source 1..75: mol_type = other DNA
gtattacgtcctctacgtcacgccgcgtcagtggaatgactggtacacctccacgtccggcaaggactggaacca

SEQ ID NO: 21128 - DNA, 75 bp, synthetic construct
  source 1..75: mol_type = other DNA
tatgcgtctgactgaagacgtaccagatgtgagacaggaactgcttaaccgtttgttgtccggtaaaaaactgac

SEQ ID NO: 21129 - DNA, 75 bp, synthetic construct
  source 1..75: mol_type = other DNA
aatggactattacgactctgacacatactgtcagcccggataacggttttacaaccagtattgaactcgaagtga

SEQ ID NO: 21130 - DNA, 75 bp, synthetic construct
  source 1..75: mol_type = other DNA
atctgttattcattcggcagggacagggcaaaagcgccactggtaaaccactgccagtgatcactatcacacgca

SEQ ID NO: 21131 - DNA, 75 bp, synthetic construct
  source 1..75: mol_type = other DNA
aggcaactgcggccagcggcagaggagacggacggtatccgtcagggctgcatgatggcgctgaaatcagcacgg

SEQ ID NO: 21132 - DNA, 75 bp, synthetic construct
  source 1..75: mol_type = other DNA
atgaccgataccaccatgcaattgctcagtcagggcacagaccccgtgaaaatgccggattttgatattctcgcg

SEQ ID NO: 21133 - DNA, 75 bp, synthetic construct
  source 1..75: mol_type = other DNA
tgccactaagcgtaaagcgatggcccgtggactaaggaaaattttgctcgcccgccacgccttgttcgatgaagt

SEQ ID NO: 21134 - DNA, 75 bp, synthetic construct
  source 1..75: mol_type = other DNA
cctgtccgatcatgaaatcaggaccgtcctggcgcgcctggaggacatcccggaagaccagcggactgaatccgg

SEQ ID NO: 21135 - DNA, 75 bp, synthetic construct
  source 1..75: mol_type = other DNA
ttttggaaaatgggtaggagtttatttatcgtctgtgaataattatcaactttggattcctgaagggtttgcaca

SEQ ID NO: 21136 - DNA, 75 bp, synthetic construct
  source 1..75: mol_type = other DNA
aaatcatataaaggtactcttagggggttacactttcaaaccagtaatccgcaaggaaaattagtaagagtaata

SEQ ID NO: 21137 - DNA, 75 bp, synthetic construct
  source 1..75: mol_type = other DNA
atcatcaataacgtgagcgaaaaccgccaggtgaccgtccctgctgaactgctggcgtccctgattcagaccgct

SEQ ID NO: 21138 - DNA, 75 bp, synthetic construct
  source 1..75: mol_type = other DNA
ttgatttttgaaaaatcctctacccgtacccgctgtgcctttgaagtcgcggcctttgatcaaggtgcgcaggtg

SEQ ID NO: 21139 - DNA, 75 bp, synthetic construct
  source 1..75: mol_type = other DNA
attttcttaagctgcttgattacaccccagcagagattcaatacctgattgatttggctatcaatcttaaagccg

SEQ ID NO: 21140 - DNA, 75 bp, synthetic construct
  source 1..75: mol_type = other DNA
ctagattaatatggttacctccggtaccagttaatttagaagacgtaaacaaactaccggtggtaataacaccca

SEQ ID NO: 21141 - DNA, 75 bp, synthetic construct
  source 1..75: mol_type = other DNA
ggcgcgatcgccgccggacgtgagcacctgggttacccggaactgccagcgactatcgcctcgaaacaactgctg

SEQ ID NO: 21142 - DNA, 75 bp, synthetic construct
  source 1..75: mol_type = other DNA
gggcgtacatgaatacaacgacaaacgaggaaacaaagcccgtggcgagattgaattactgttaaaagaaacgaa

SEQ ID NO: 21143 - DNA, 75 bp, synthetic construct
  source 1..75: mol_type = other DNA
tgaaggcacctcatcccgtgacaccctgcgcgacagtgcaaaacaccgtgtgcgtgaactgccggtgaactggtg

SEQ ID NO: 21144 - DNA, 75 bp, synthetic construct
  source 1..75: mol_type = other DNA
ttattacctgtagaaataacgccggatgagcagaaaaaacctgtggcggccattgcgccgtctttatccacttcc

SEQ ID NO: 21145 - DNA, 75 bp, synthetic construct
  source 1..75: mol_type = other DNA
actcagaccagagtcagtgccagttcctgcaaggtggaattccgtcacggtaacatgacgctggaaaatccatcg

SEQ ID NO: 21146 - DNA, 75 bp, synthetic construct
  source 1..75: mol_type = other DNA
gcggtcaggcggatgccctgatgctggaaaaaggcagttcattcacgctgaacgccggtgatacggccacggata

SEQ ID NO: 21147 - DNA, 75 bp, synthetic construct
  source 1..75: mol_type = other DNA
tactgcagcaacggttcttggcagcaaccgtctggggaatttcacggtggaaaacggtaaggctgacggcgttgt

SEQ ID NO: 21148 - DNA, 75 bp, synthetic construct
  source 1..75: mol_type = other DNA
gttgaaggaacagcaaataccactgtggtttatgccggcggcgaccagacggtacatggccacgcactggatacc

SEQ ID NO: 21149 - DNA, 75 bp, synthetic construct
  source 1..75: mol_type = other DNA
ggcagggactttccctggatgacggccaggataacgccggttatgtgaagttcgggcatggcagtacacaacatg

SEQ ID NO: 21150 - DNA, 75 bp, synthetic construct
  source 1..75: mol_type = other DNA
ggaagggggaccggatgcagaaaacggtgataccgggcagtttgttcgcggggatgccgtacgcacaaccatcaa

SEQ ID NO: 21151 - DNA, 75 bp, synthetic construct
  source 1..75: mol_type = other DNA
tgaaaaaccgttagcgattatggttccggcgtggaatgaaacgggcgtcatcggcaatatggccgagctggcggc

SEQ ID NO: 21152 - DNA, 75 bp, synthetic construct
  source 1..75: mol_type = other DNA
ctataacccaaaaactcataaagtcattggttactattacaacatcgatcctggttacctgatttggtttggtga

SEQ ID NO: 21153 - DNA, 75 bp, synthetic construct
  source 1..75: mol_type = other DNA
accaacaccattccgttccaggcgcgttattttgcaaccggtgccgcaacccctggcgcagctaatgcggatgcg

SEQ ID NO: 21154 - DNA, 75 bp, synthetic construct
  source 1..75: mol_type = other DNA
gggtatgtttctgatgcgatgaaagtggtggattctgccgtatcggatgccgccaggctgttgcagggggatatc

SEQ ID NO: 21155 - DNA, 75 bp, synthetic construct
  source 1..75: mol_type = other DNA
ggcatggagcaaccgttactgtcgcaaaggggaacgtgtccatcggcgctgactccagggataagcaggcacaaa

SEQ ID NO: 21156 - DNA, 75 bp, synthetic construct
  source 1..75: mol_type = other DNA
aagggctgcttgcggcaaatggcgcggtgcgcctggatgcactgagccttgataatcgcagggggaaagtgcagg

SEQ ID NO: 21157 - DNA, 75 bp, synthetic construct
  source 1..75: mol_type = other DNA
tttactgttttaaccatgacatatgcgattttactgatgccattgcttgtcattaaatattttaaagggaggcag

SEQ ID NO: 21158 - DNA, 75 bp, synthetic construct
  source 1..75: mol_type = other DNA
gctggatgaagcgatgctgacgggcgaacctatcccgcagcaaaaaggcgaaggcgatagcgtccatgccgggac

SEQ ID NO: 21159 - DNA, 75 bp, synthetic construct
  source 1..75: mol_type = other DNA
gtgaaggataacagtgaagttaccggggttgccaaagatccgagcggtaatgaaagtgacccgtcaaccgtaacc

SEQ ID NO: 21160 - DNA, 75 bp, synthetic construct
  source 1..75: mol_type = other DNA
ctggcatcaaaagttcagaacgtcctgaaggatgacccgttctccgggcatctgttcatcttccgcggacgccgg

SEQ ID NO: 21161 - DNA, 75 bp, synthetic construct
  source 1..75: mol_type = other DNA
agcaacataaaaagtttcatggttttgatgatctggaaaccacgacagcaaaaaaatatcgccgtctgctttctt

SEQ ID NO: 21162 - DNA, 75 bp, synthetic construct
  source 1..75: mol_type = other DNA
cgctggcgctgttgcaggtgccgattgttatccgcaccaccgagaacatgctgaaactggtgccggacagcctgc

SEQ ID NO: 21163 - DNA, 75 bp, synthetic construct
  source 1..75: mol_type = other DNA
ggtggtcaggcggaatcaagaatgacggtacagatagacgtctgggcagatggacccgatctggcgcgtgaaatc

SEQ ID NO: 21164 - DNA, 75 bp, synthetic construct
  source 1..75: mol_type = other DNA
tggaaggtgctctggctgttattgctgttgtgggcgtttactgcctggttgtgtttttgatggatcgactaggga

SEQ ID NO: 21165 - DNA, 75 bp, synthetic construct
  source 1..75: mol_type = other DNA
acgtattgaggatcttgaaagacaagttcgattccttgaaatgcggcttacgtatctaaaaaagctgaaagcctt

SEQ ID NO: 21166 - DNA, 75 bp, synthetic construct
  source 1..75: mol_type = other DNA
catggcccaaaagccctgcacagcagcaagcagatgataatgctgcaaaagcattgacaaaatggtggaacgata

SEQ ID NO: 21167 - DNA, 75 bp, synthetic construct
  source 1..75: mol_type = other DNA
aaaagcgggttgcatgctcaatgatttcaccccaacaggggtttcgcagctgaatctgttcgatgatactcagcc

SEQ ID NO: 21168 - DNA, 75 bp, synthetic construct
  source 1..75: mol_type = other DNA
atggctgattcaatggaccttgtacagcagcgcgttgaagaagaacgcccgcgccatatccacaccgcccgcaat

SEQ ID NO: 21169 - DNA, 75 bp, synthetic construct
  source 1..75: mol_type = other DNA
cgtgaactgccggtgaactggtgggtacagccttctgttatccgcactttcagctcccggggtgacatgagcatg

SEQ ID NO: 21170 - DNA, 75 bp, synthetic construct
  source 1..75: mol_type = other DNA
tgcacaagtatggacttgcactgaacacggtaattaacgaggggggctggcaggttgttaaggccggtggtactg

SEQ ID NO: 21171 - DNA, 75 bp, synthetic construct
  source 1..75: mol_type = other DNA
ggaaagcagcggcagctatggcttcgtccgtctggagggtgacctgatgagaacagaggttgccggtatgtctgt

SEQ ID NO: 21172 - DNA, 75 bp, synthetic construct
  source 1..75: mol_type = other DNA
ccgggaataccaccgttaatcagaagggcagactgcaggtggacgccggtggtacagccacgaatgtcaccctga

SEQ ID NO: 21173 - DNA, 75 bp, synthetic construct
  source 1..75: mol_type = other DNA
ccggctgctgacacggttgtacaggcgggagaaaccgtgagcggcggaacactgataaatcatgaccgccagact

SEQ ID NO: 21174 - DNA, 75 bp, synthetic construct
  source 1..75: mol_type = other DNA
tgatgaagacagcaaccttgaaagcctgtgctggtcgtgtcacgcagcgaagaccgcgcgtgagcggctcaagtg

SEQ ID NO: 21175 - DNA, 75 bp, synthetic construct
  source 1..75: mol_type = other DNA
tcatccctaaatcgcatggcggcactgatgtcgacagtaatctgcagagtttgtgctggccgtgtcataaggcga

SEQ ID NO: 21176 - DNA, 75 bp, synthetic construct
  source 1..75: mol_type = other DNA
gaccaaacggctggagcgtgggcgcttcgcctggccgtcagcccgtgatggcaaagtgttccttacgcaggcgca

SEQ ID NO: 21177 - DNA, 75 bp, synthetic construct
  source 1..75: mol_type = other DNA
gccgcgttcgcggctgcccccataccaccactgactcgtcaggctattgcgaaagccacaaaagcgaaggctgga

SEQ ID NO: 21178 - DNA, 75 bp, synthetic construct
  source 1..75: mol_type = other DNA
atgtttatttccctgatgacagggcaaacagaaacaacggagataaaaatgaacatgcgtaatattattactgca

SEQ ID NO: 21179 - DNA, 75 bp, synthetic construct
  source 1..75: mol_type = other DNA
gatcatcttggtgccgaagttctggaagaactccgcctgttacaggaatcaacccgtattggccttgtgctgatg

SEQ ID NO: 21180 - DNA, 75 bp, synthetic construct
  source 1..75: mol_type = other DNA
ttcctacaaacattgatgaacgggtaatgatttgtccgttaacaaacgaccagcttatgacaaaatcaaccacta

SEQ ID NO: 21181 - DNA, 75 bp, synthetic construct
  source 1..75: mol_type = other DNA
ggatgtagctggtcttctcgcataccttggtttgggagaagcggcgaaaagggatgtgggcacaggagataatca

SEQ ID NO: 21182 - DNA, 75 bp, synthetic construct
  source 1..75: mol_type = other DNA
tctcctgatggccctgtgggggcctttgtccggcaccagttacggcattgccgggctgctgatgctggcagtcag

SEQ ID NO: 21183 - DNA, 75 bp, synthetic construct
  source 1..75: mol_type = other DNA
agcctatttcaccggcgacccaagcagagccgcgcttaaggtttcttttttcggccccttctatggcgggtataa

SEQ ID NO: 21184 - DNA, 75 bp, synthetic construct
  source 1..75: mol_type = other DNA
attactgacatgcagcagcgccagcgttctgctgatgcactcgatgctaaatacacgaaggagttagctgatgcg

SEQ ID NO: 21185 - DNA, 75 bp, synthetic construct
  source 1..75: mol_type = other DNA
atatccgggaaacacaaaaatcactgcgcgagctgaacggtcacgcatcccgtattgagggatttcgcaagacca

SEQ ID NO: 21186 - DNA, 75 bp, synthetic construct
  source 1..75: mol_type = other DNA
cttgatagctgcaaaaatgtcggcgtcatatttggtcaggcactggcctctgccttgatggctccgctcaatgtt

SEQ ID NO: 21187 - DNA, 75 bp, synthetic construct
  source 1..75: mol_type = other DNA
atggctaatactgtaaaaatatccagttgtgagttaatcaacgctgattgcctggaatttatccagaccttaccg

SEQ ID NO: 21188 - DNA, 75 bp, synthetic construct
  source 1..75: mol_type = other DNA
cgtgcgaaaaaccggcagaaatgctgcagcagataatcagcgcgagcagtcgtcctggtgacatggtggcggatt

SEQ ID NO: 21189 - DNA, 75 bp, synthetic construct
  source 1..75: mol_type = other DNA
atgaaaaaattaacctgctttaaagcctatgatattcgcggaaaattaggcgaagaactgaatgaagatattgcc

SEQ ID NO: 21190 - DNA, 75 bp, synthetic construct
  source 1..75: mol_type = other DNA
ctgtgcgcaggacgttgccgcggtaacaggcgcaaccgtaaccagcataaatcaggctgcggctaaaatggcgcg

SEQ ID NO: 21191 - DNA, 75 bp, synthetic construct
  source 1..75: mol_type = other DNA
aaccacattatctgggcgaagccgtccggacgctggaacgggtgcaataaggaaagtctgcgggcgtattttccg

SEQ ID NO: 21192 - DNA, 75 bp, synthetic construct
  source 1..75: mol_type = other DNA
aaaacaaccaccctgaccgttactgtggaaccggaaaatgcaacggataagacattcagggcgatttccgccgat

SEQ ID NO: 21193 - DNA, 75 bp, synthetic construct
  source 1..75: mol_type = other DNA
agagaaagtggagacctcgatttatgtcgtgaagcgatgaatgcgataaagaatgctgatatacctgccccccct

SEQ ID NO: 21194 - DNA, 75 bp, synthetic construct
  source 1..75: mol_type = other DNA
cggtaaaaggttccggcaccacgctctgggtttataccggaaatggcgatgcctgggcaaacccgctgtcagatg

SEQ ID NO: 21195 - DNA, 75 bp, synthetic construct
  source 1..75: mol_type = other DNA
cagtaggatgggcggcacttcagtatgttcagcccggcaccattgttggtgtaggtacaggttccaccgccgcac

SEQ ID NO: 21196 - DNA, 75 bp, synthetic construct
  source 1..75: mol_type = other DNA
agcgcctgctcggcaagaaaacgatggaaaatgaactcctcaaagaagccgttgaatatggacgggcaaaaaagt

SEQ ID NO: 21197 - DNA, 75 bp, synthetic construct
  source 1..75: mol_type = other DNA
tagagcgtgaggggccgttctatttcctcttcgcagataaggacggagaaaaatacggtcgcgcaaacaaacttt

SEQ ID NO: 21198 - DNA, 75 bp, synthetic construct
  source 1..75: mol_type = other DNA
tgatgctgttgaaaaaattcaggctctgttaccggcgatcgaaaaggcaatgccgcctctgctggtggcccgtat

SEQ ID NO: 21199 - DNA, 75 bp, synthetic construct
  source 1..75: mol_type = other DNA
tggatatcattggcgatatgccagcatacgggtatcgccgtgtctgggcgatactcaggcggcagtcccgaaatg

SEQ ID NO: 21200 - DNA, 75 bp, synthetic construct
  source 1..75: mol_type = other DNA
aatgctatgtgttagcagctgactttaaaaacaactacccaccaaacatccccaacactcaggtcggcgtatatg

SEQ ID NO: 21201 - DNA, 75 bp, synthetic construct
  source 1..75: mol_type = other DNA
gggaaaccacagcgcctgcaggactgactggtgccctgaatatgagtctgcatgagctggaaaaaatgctggagc

SEQ ID NO: 21202 - DNA, 75 bp, synthetic construct
  source 1..75: mol_type = other DNA
tggcaattatccgcttatgtttcccggccgtaatgatccaaggaaaacaatgagcgaggctagcataaaccaagt

SEQ ID NO: 21203 - DNA, 75 bp, synthetic construct
  source 1..75: mol_type = other DNA
tcagcaacgcaacgatatgggcgatttagccatgagggctaacgtcgctctttctcagggaccggaagcctacag

SEQ ID NO: 21204 - DNA, 75 bp, synthetic construct
  source 1..75: mol_type = other DNA
gtgacggtaaaactgcgtctggccgctgtggcactcctgctgtttctggtggtgatggtggatttcaccagcagg

SEQ ID NO: 21205 - DNA, 75 bp, synthetic construct
  source 1..75: mol_type = other DNA
gctggcgaacgcaaccattactgatatgcaggtgcgccagcgcgatgttgctgcgctcgatgcaaaatactcgag

SEQ ID NO: 21206 - DNA, 75 bp, synthetic construct
  source 1..75: mol_type = other DNA
attactgacatgcagcagcgccagcgtgatgctgatgcactcgatgctaaatacaccggagaactagctgatgcg

SEQ ID NO: 21207 - DNA, 75 bp, synthetic construct
  source 1..75: mol_type = other DNA
gaaaaggcaagtgttattgcaaaactgcaatctctcggctttgtaattgctggttatgaagaacttgcgatccct

SEQ ID NO: 21208 - DNA, 75 bp, synthetic construct
  source 1..75: mol_type = other DNA
gcggcaactgccctgattgtggcgcggtgatgggtgacgcaacataccaggaaacattcgatgaagagaatcagg

SEQ ID NO: 21209 - DNA, 75 bp, synthetic construct
  source 1..75: mol_type = other DNA
gtggcaactgccctgattgtggtgcggtgatgggcgacgcaacataccaggaaacattcgatgacaagaaccagg

SEQ ID NO: 21210 - DNA, 75 bp, synthetic construct
  source 1..75: mol_type = other DNA
agaagatagcgctgttgcggtggccactgccattgaagctggtgatgagcgtcgcgcacgcgcaaaatttcattg

SEQ ID NO: 21211 - DNA, 75 bp, synthetic construct
  source 1..75: mol_type = other DNA
accagaaccagcatgaatcggaacggaactaccaaaaagcggaacaaaacagtccaaatgcgttacaaaacgagc

SEQ ID NO: 21212 - DNA, 75 bp, synthetic construct
  source 1..75: mol_type = other DNA
aaagcactggcctggggaaaacaatacgagaacgacgccagagtcctgtttgagttcacctccggcgtgaatgtt

SEQ ID NO: 21213 - DNA, 75 bp, synthetic construct
  source 1..75: mol_type = other DNA
gtttgatgaaatcaatattgtacgtggcaagccagtatctggtggacggctggagataagaattacagaggtggg

SEQ ID NO: 21214 - DNA, 75 bp, synthetic construct
  source 1..75: mol_type = other DNA
gaatttttaagcttgccaacttactgggctccggcaagcctgtttccgctaccgacattataacctatctggact

SEQ ID NO: 21215 - DNA, 75 bp, synthetic construct
  source 1..75: mol_type = other DNA
gatctcaggcgctgctttcactttcatccggttttggttgtagtgtaatggagctaaaaaaggttttgttatctc

SEQ ID NO: 21216 - DNA, 75 bp, synthetic construct
  source 1..75: mol_type = other DNA
cgcatgcgggagtgttaatggacgatgagcagtttgatgaaatcaatatcgttcgtggtcagccagtatctggtg

SEQ ID NO: 21217 - DNA, 75 bp, synthetic construct
  source 1..75: mol_type = other DNA
cctgtgggaagacttacgtaaaacgcttccagagatcggagcagttccggctattccacagcaatcttctctttt

SEQ ID NO: 21218 - DNA, 75 bp, synthetic construct
  source 1..75: mol_type = other DNA
atgacctcgggaaaaaagctgcagcggactttatgcaacagcagtcccgtgatggcggtcagttaagcggagtgt

SEQ ID NO: 21219 - DNA, 75 bp, synthetic construct
  source 1..75: mol_type = other DNA
cgtcagattggtgggcatggttatggttcaatctacccggggccaatcggcgcggttatttccccattgcttggt

SEQ ID NO: 21220 - DNA, 75 bp, synthetic construct
  source 1..75: mol_type = other DNA
actgaatttggccacctgaacagaggtgatatgctcacctcagaacaacacaggtgctccaatgaaaaaaagaaa

SEQ ID NO: 21221 - DNA, 75 bp, synthetic construct
  source 1..75: mol_type = other DNA
cgttaaaaatggtgagagcaccttcacagcctcagctaatgagcaagcttcaaaggtgcttaagtcgggtaatgc

SEQ ID NO: 21222 - DNA, 75 bp, synthetic construct
  source 1..75: mol_type = other DNA
tcaggtacccgcatctggctcgttgccgacgttaccgatatgcgtaaatccttcaacggatacgacatatgctga

SEQ ID NO: 21223 - DNA, 75 bp, synthetic construct
  source 1..75: mol_type = other DNA
tttaccgggatgacatcgaccgttttctggaaatacgcacccggcgcatcaaccaggacagcacaaagcgcgtcc

SEQ ID NO: 21224 - DNA, 75 bp, synthetic construct
  source 1..75: mol_type = other DNA
gtcttcgtattcagatgaccttccaaggtgtagaatttcgttcaatcgtagggcaaactgatatttcagcagcca

SEQ ID NO: 21225 - DNA, 75 bp, synthetic construct
  source 1..75: mol_type = other DNA
gcataacggcgaatggaagacactgagcagtgacaaagtggggaaaacggggttcattgagaatgtgtacgctaa

SEQ ID NO: 21226 - DNA, 75 bp, synthetic construct
  source 1..75: mol_type = other DNA
ttggaagcgtagtagcaagttttatttgccttgctgttgaacgcctaccacatcaacttaaatggagagaagccc

SEQ ID NO: 21227 - DNA, 75 bp, synthetic construct
  source 1..75: mol_type = other DNA
ccggaaatggcagcgcgagccgatgccgtaaaaagctatctgaaagaagatgaagcttttaaccgctatctcagt

SEQ ID NO: 21228 - DNA, 75 bp, synthetic construct
  source 1..75: mol_type = other DNA
acccgcacgcagacacccggaccagcttcacaggacgggccggatgtgcagcaggcggtgacacaggcgattgcc

SEQ ID NO: 21229 - DNA, 75 bp, synthetic construct
  source 1..75: mol_type = other DNA
gaatggatgcagacgctgaaggaaaccgggttcgacatccgggcgtatcgtgacgcggcggaccaacgggcggag

SEQ ID NO: 21230 - DNA, 75 bp, synthetic construct
  source 1..75: mol_type = other DNA
agtgccggagatcacgctggccggatgctgggcccatgcccgcaggggcttcgccgacctgtataaaatcagtaa

SEQ ID NO: 21231 - DNA, 75 bp, synthetic construct
  source 1..75: mol_type = other DNA
tctgaacctgcccacgctggatgaggccgtgaacaccctgaaaccctggtggccgggattatttgacggtgacac

SEQ ID NO: 21232 - DNA, 75 bp, synthetic construct
  source 1..75: mol_type = other DNA
cgccagctaaaccacgtcgaagcggcagaactgctgcgtgtgactgctgaagcaatccagaacgaagcgcaggag

SEQ ID NO: 21233 - DNA, 75 bp, synthetic construct
  source 1..75: mol_type = other DNA
cccgtgaccctgaacagcttcgcgctctggcaattgccatggtgcaaaaagctatggctgagagtcagaatcttg

SEQ ID NO: 21234 - DNA, 75 bp, synthetic construct
  source 1..75: mol_type = other DNA
agacgctggaaaatttcagtgaaaagctggaggtcgaagggcgcagcttgtggcaggacgcacgtcgacgtttta

SEQ ID NO: 21235 - DNA, 75 bp, synthetic construct
  source 1..75: mol_type = other DNA
ccagtcgggatggggcggtaaaccggaagtgcagaccattcgtcgtctggtgaccgaaagtgaagtggcggtggc

SEQ ID NO: 21236 - DNA, 75 bp, synthetic construct
  source 1..75: mol_type = other DNA
ggccggaatggaacgctggcagtggcaggatatgccattctggcaggtcatcgcagaggctggtatggcggcaag

SEQ ID NO: 21237 - DNA, 75 bp, synthetic construct
  source 1..75: mol_type = other DNA
gcccgtttgtacgcaaactttctattctgttgttagaaaagggcataactttcgaatttattaatgaactgccct

SEQ ID NO: 21238 - DNA, 75 bp, synthetic construct
  source 1..75: mol_type = other DNA
tttttgtacgcgaaaaaaagaaattgtgaaaacgtcaggacatcatgcaaggtttttgatgtgtcaaccaacatc

SEQ ID NO: 21239 - DNA, 75 bp, synthetic construct
  source 1..75: mol_type = other DNA
ggccgcagcagccgctggtacaaaagcgaagtggagcagtggatgcaacagcgaatcgaagagtcacgaggagca

SEQ ID NO: 21240 - DNA, 75 bp, synthetic construct
  source 1..75: mol_type = other DNA
aggccatttcccgaaacccatcaagctgggccgcagcagccgctggtacaaaagtgaagtggagcagtggatgca

SEQ ID NO: 21241 - DNA, 75 bp, synthetic construct
  source 1..75: mol_type = other DNA
atttgagtcgctacagtggcacggtggttaaccgtccgacgttttttgcttttgcaaaaggcgcgggtgtgatgg

SEQ ID NO: 21242 - DNA, 75 bp, synthetic construct
  source 1..75: mol_type = other DNA
ggcagctgtggacgctcagtcgtgctatttccgggaatggtatcacgcaacatgctgcagccggtgcgctggctc

SEQ ID NO: 21243 - DNA, 75 bp, synthetic construct
  source 1..75: mol_type = other DNA
acgctgaaaaatataacgagtgggtgaaaaagttctcagagcagatttttaaaattactggcgacgagaatgcgg

SEQ ID NO: 21244 - DNA, 75 bp, synthetic construct
  source 1..75: mol_type = other DNA
agagacccggctaatggtgctgaatgaccgacaaaagccagaaaacctcgttgactacacaactgcgctgattca

SEQ ID NO: 21245 - DNA, 75 bp, synthetic construct
  source 1..75: mol_type = other DNA
tagcctggcgtgtcatatctcatcccgtcagctaaaccacgtggaagcagcagaactactgcgtgtaactgctga

SEQ ID NO: 21246 - DNA, 75 bp, synthetic construct
  source 1..75: mol_type = other DNA
ctggcggcgcaggaagcgttaagtacggcaattgatgcgcatgatgatgctgtccaggccgtttaccggaaagcg

SEQ ID NO: 21247 - DNA, 75 bp, synthetic construct
  source 1..75: mol_type = other DNA
gaaatcagcacagtgttacaagacggggatattcaatattgccgccgttaactggcctgagagcgtcgacaccga

SEQ ID NO: 21248 - DNA, 75 bp, synthetic construct
  source 1..75: mol_type = other DNA
aaggccgtttggtggcgatgaccggcgacggcaccaacgatgctccggcgctggcgcaggcagatgtcgcggtgg

SEQ ID NO: 21249 - DNA, 75 bp, synthetic construct
  source 1..75: mol_type = other DNA
gatttcaaccggcagaaggagacagtcctttgcgacaagttaaccgctggttcaaagatcactacggagtgcccg

SEQ ID NO: 21250 - DNA, 75 bp, synthetic construct
  source 1..75: mol_type = other DNA
actgccggtgtctcctggcacaacgacatgttcactacagcactggatgttgacctgaccccggccagtggcttc

SEQ ID NO: 21251 - DNA, 75 bp, synthetic construct
  source 1..75: mol_type = other DNA
gatggcgatcagattttcccgctgggatgggcaatggttttacagcgcgcggctggcactcactacattgcggat

SEQ ID NO: 21252 - DNA, 75 bp, synthetic construct
  source 1..75: mol_type = other DNA
tacgcaaaacggcgacagcgccggatgcgtagtggtggcaccgccagccgtgccgggtggtaagttccgcattct

SEQ ID NO: 21253 - DNA, 75 bp, synthetic construct
  source 1..75: mol_type = other DNA
cacgtctttaaacaatacatcatcgacttcgccaaagaagtcgaggtggagctaaaaggcgatccgatggtgctt

SEQ ID NO: 21254 - DNA, 75 bp, synthetic construct
  source 1..75: mol_type = other DNA
tcaaaaaactgaccgaacagtacaacgtgacatacatcggcatcgactcaactggcgtcggccacggggtttacg

SEQ ID NO: 21255 - DNA, 75 bp, synthetic construct
  source 1..75: mol_type = other DNA
tgcagatgaaacgcccgacggtgcagagctggaaacagcgcgacggctgggacagcgttgcccccatcagccgtg

SEQ ID NO: 21256 - DNA, 75 bp, synthetic construct
  source 1..75: mol_type = other DNA
agccagaccggcaacgaggcagaccttaatccgaacgtcgctaaccgcaacaaaggcgggcggcgcaaaccgaaa

SEQ ID NO: 21257 - DNA, 75 bp, synthetic construct
  source 1..75: mol_type = other DNA
tcgctctcaggaagcctcgctggagaacgaatgcgtggaaaacgtcagttccgtcgaaatcatgaaggcaacgga

SEQ ID NO: 21258 - DNA, 75 bp, synthetic construct
  source 1..75: mol_type = other DNA
aagaagacgcagaagttctgcgctttgataattttgacgatgccgttgagtgctgcgcagacctgaatattccct

SEQ ID NO: 21259 - DNA, 75 bp, synthetic construct
  source 1..75: mol_type = other DNA
cagccacgtgctgtcaaacgcctactccgccgcagtatttagctatctggcggatgatctgcgcgagcttcagca

SEQ ID NO: 21260 - DNA, 75 bp, synthetic construct
  source 1..75: mol_type = other DNA
cctcttgctgtatggcataacttctccggctctccggatacggcagaagattactgtgcaacatactcaccatta

SEQ ID NO: 21261 - DNA, 75 bp, synthetic construct
  source 1..75: mol_type = other DNA
gcctgctggataccgcgcttgccggaaagctggcagctgaccgggggcgatcaggcgcagtgtcgggatcagatt

SEQ ID NO: 21262 - DNA, 75 bp, synthetic construct
  source 1..75: mol_type = other DNA
cgagcagccggcagcggtgctgaagcgcctggagcaggcggtgctgcgcggtgatcgcattgtggtctcggccgt

SEQ ID NO: 21263 - DNA, 75 bp, synthetic construct
  source 1..75: mol_type = other DNA
atgcgccataacacggcaaagattgccgttaacgttggcgttcgtgagcagatagagtccggcgttggtgcatgg

SEQ ID NO: 21264 - DNA, 75 bp, synthetic construct
  source 1..75: mol_type = other DNA
tttaaactcatgggaatatgtgccagaccatcgcggagaaatcgtctataacaccgaaacgggagacgccaaaga

SEQ ID NO: 21265 - DNA, 75 bp, synthetic construct
  source 1..75: mol_type = other DNA
agtttattgccacgaaggcggggaatattaccgtctataactatgatagtgaaacacgggaatatatttccacat

SEQ ID NO: 21266 - DNA, 75 bp, synthetic construct
  source 1..75: mol_type = other DNA
tgagaaatgggtgacagatactgaggcacagcataatgccgcagtagacgcggcagaagcactgcgccagtcact

SEQ ID NO: 21267 - DNA, 75 bp, synthetic construct
  source 1..75: mol_type = other DNA
gaaacgcgggaatatatttctacatcaactgaatatctcgctgtcggcgtcggtatcccggcatgttcctgtttg

SEQ ID NO: 21268 - DNA, 75 bp, synthetic construct
  source 1..75: mol_type = other DNA
tgctgacccgcacctgatgctccgtctggccattgaaactgtcgctcatgattatgacgtgatagttatcgacag

SEQ ID NO: 21269 - DNA, 75 bp, synthetic construct
  source 1..75: mol_type = other DNA
acgataaaggaaggaaaaagcgtaatcgtcttcccattcaggtggttaaaattccgatggcggccccactgaagc

SEQ ID NO: 21270 - DNA, 75 bp, synthetic construct
  source 1..75: mol_type = other DNA
caacggcgattaatcagtcttcgtcacaggttgcccgggaaaccagggtgagacggaaactggtaaaggaacggt

SEQ ID NO: 21271 - DNA, 75 bp, synthetic construct
  source 1..75: mol_type = other DNA
atgaatgctattccttatttcgactatagcctggcacccttctggccatcttatcagaacaaagtcatcggcgtc

SEQ ID NO: 21272 - DNA, 75 bp, synthetic construct
  source 1..75: mol_type = other DNA
ccgggtgaagcggcaccgtaccagaagcagatcacccgggatgtggtgctggacagtcgttcaccggactgcgaa

SEQ ID NO: 21273 - DNA, 75 bp, synthetic construct
  source 1..75: mol_type = other DNA
tgatttcgctggcggatgaatggagctccgtgaatgcccgtctgaaacaggcgtcgcagtcatcggatgaatttg

SEQ ID NO: 21274 - DNA, 75 bp, synthetic construct
  source 1..75: mol_type = other DNA
gaagcggcgggcacccttgtgcaactgattgaccagcgggtacaggcggtgatgttatccatgcgtcgtgacgga

SEQ ID NO: 21275 - DNA, 75 bp, synthetic construct
  source 1..75: mol_type = other DNA
gacggcatcgcgccgatttcccgcgttgaaagcagccttgaggccaggctgattcagctcatcgccaagccgcaa

SEQ ID NO: 21276 - DNA, 75 bp, synthetic construct
  source 1..75: mol_type = other DNA
ccgatatcgcatgggcgaccatgcacgccctgttaaacgaacctctttccgccggtagcggcatgcattcaacga

SEQ ID NO: 21277 - DNA, 75 bp, synthetic construct
  source 1..75: mol_type = other DNA
gaaggcgatggcggacgatggtcaactgacggcggataaagtcgttcccgcgttaatcagccagctggggatatt

SEQ ID NO: 21278 - DNA, 75 bp, synthetic construct
  source 1..75: mol_type = other DNA
agtctgattcagttgaagttgcgggccgggcggaagttgacgcaggcagaaaccacccggcttaatgccgtgctg

SEQ ID NO: 21279 - DNA, 75 bp, synthetic construct
  source 1..75: mol_type = other DNA
aacttattgccacgaaggcggggaatattaccgtctataactatgatggtgaaacacgggaatatatttctgaat

SEQ ID NO: 21280 - DNA, 75 bp, synthetic construct
  source 1..75: mol_type = other DNA
ttatccgaaaaaacagatattatcgcgcctgcatttactgaacaggcggcagaattaacccccgtcggaataaat

SEQ ID NO: 21281 - DNA, 75 bp, synthetic construct
  source 1..75: mol_type = other DNA
gcacagcatagtgccgcagtagacgcggcagaagcacagcgccagtcactgattgatgcagcaatggcttccatt

SEQ ID NO: 21282 - DNA, 75 bp, synthetic construct
  source 1..75: mol_type = other DNA
gttaacggtcatgaagtactgatcgccagcggaggacaattcgcacaaaaagcggcagaggccgggttggtggtg

SEQ ID NO: 21283 - DNA, 75 bp, synthetic construct
  source 1..75: mol_type = other DNA
cgccggcgataaaaccgatgaatggctgcaaccggcctgtaatgaaatgtaccgcgtgctgaaaaaagatgcgct

SEQ ID NO: 21284 - DNA, 75 bp, synthetic construct
  source 1..75: mol_type = other DNA
ggctttatgggatatctgaaagggaaaagcagtctgatgctttacgagcagtttggtgatttgaaattcaagtac

SEQ ID NO: 21285 - DNA, 75 bp, synthetic construct
  source 1..75: mol_type = other DNA
ctgtcgagtaacatgatcaatgctttcctcaacaatcgctcacttcgcaaagcctctgaagaggtagcagcggaa

SEQ ID NO: 21286 - DNA, 75 bp, synthetic construct
  source 1..75: mol_type = other DNA
ccggacgccggtatatcggtatcgagctgcttgaacagtatcaccgtgccggacagcaacgactggccgccgtgc

SEQ ID NO: 21287 - DNA, 75 bp, synthetic construct
  source 1..75: mol_type = other DNA
gtgaaaacggggtccgaagccatccgggcgctggccatgcagatcccggcatttcgtcagaaactgagcgacggc

SEQ ID NO: 21288 - DNA, 75 bp, synthetic construct
  source 1..75: mol_type = other DNA
tttcgtcagaaactgaatgacggctggtatcaggtgcgcattgccgggcgtgatgcaggtgaaaccgaattatct

SEQ ID NO: 21289 - DNA, 75 bp, synthetic construct
  source 1..75: mol_type = other DNA
ctgtacggtgaaatgcgcgtggggtcgcgggtggcttctcaggagatcagcacggcagacgagggggacggtggt

SEQ ID NO: 21290 - DNA, 75 bp, synthetic construct
  source 1..75: mol_type = other DNA
ggaatggggctatagataccattaattgtgttaaaagtttaatggatttaaatgttagcgattataaaattatca

SEQ ID NO: 21291 - DNA, 75 bp, synthetic construct
  source 1..75: mol_type = other DNA
ttcttgacgccatggaagatgtccagccgctgaaacgtgctacagatgtccactggcatccaacgcgtaaccaac

SEQ ID NO: 21292 - DNA, 75 bp, synthetic construct
  source 1..75: mol_type = other DNA
accaaactggctgctattgaagccgagtgggaaacgcaacctgcgcctgctgcctttactctgttcggcattcct

SEQ ID NO: 21293 - DNA, 75 bp, synthetic construct
  source 1..75: mol_type = other DNA
gtagcctcttccttgcagagaggtcaaagtttatgacgaaatatgcccttatcgggttgctcgccgtgtgcgcca

SEQ ID NO: 21294 - DNA, 75 bp, synthetic construct
  source 1..75: mol_type = other DNA
cccgaggcggaaaacgactcgaacgggttcctgagactatcatgaacgaagttcttggccgcctgtccacaattc

SEQ ID NO: 21295 - DNA, 75 bp, synthetic construct
  source 1..75: mol_type = other DNA
ctgtggcgtcgggcaaaagccctcggacagaaaccggcttacttctgggtctggctggtcacgctgacagtgaca

SEQ ID NO: 21296 - DNA, 75 bp, synthetic construct
  source 1..75: mol_type = other DNA
atccagacccatcttacgaacacaaatcaatatcatcattatatttcggaattgatatcaaaaaaggtactgcgt

SEQ ID NO: 21297 - DNA, 75 bp, synthetic construct
  source 1..75: mol_type = other DNA
gcggggctgaagtctggcgctatggacgaaatcaaggttatcaaccgtggagggcaggcatattgcgtaaaagat

SEQ ID NO: 21298 - DNA, 75 bp, synthetic construct
  source 1..75: mol_type = other DNA
tgttaccgttcacgcaatcggtaagacacgtagcattgagcgtatcaacaaagcgctggcctttattgctgaacg

SEQ ID NO: 21299 - DNA, 75 bp, synthetic construct
  source 1..75: mol_type = other DNA
tgtgggctttgatattcaccttcaggactgcagcactgtcgtcagtcagcgggtggggatttccttttatggcgt

SEQ ID NO: 21300 - DNA, 75 bp, synthetic construct
  source 1..75: mol_type = other DNA
gggaccgtacacattgtctttaagcgttctgaccttgttgaaaaactgaatgatattattgcacggcattatcct

SEQ ID NO: 21301 - DNA, 75 bp, synthetic construct
  source 1..75: mol_type = other DNA
cacatagcaccacacttacttacagaatcggggaaggagaggaaatcactcaggaaatccctctttatatcgtgt

SEQ ID NO: 21302 - DNA, 75 bp, synthetic construct
  source 1..75: mol_type = other DNA
ataccctgtgcgctgctgtcggtctttctggtcctgaaaggttgggcactgatgggtgacgcgatgagtcatgcg

SEQ ID NO: 21303 - DNA, 75 bp, synthetic construct
  source 1..75: mol_type = other DNA
cccgtgaagcgttaaagatgcttcttgatggcgtgagtcgccgcgaggtaaagcaatacctggttggtaagcaaa

SEQ ID NO: 21304 - DNA, 75 bp, synthetic construct
  source 1..75: mol_type = other DNA
atatgagcaacggtgatgaagtgtcgatcacctgtggcgaagcggcgagcattgttgatcgtattcgtggcttct

SEQ ID NO: 21305 - DNA, 75 bp, synthetic construct
  source 1..75: mol_type = other DNA
atcatgatagacggttgtgtcgcacggttacgtaaatataaacaagaagaatatgagttagttattgcccacttt

SEQ ID NO: 21306 - DNA, 75 bp, synthetic construct
  source 1..75: mol_type = other DNA
accggatatcaccacttatctgctcggttctaacgccgcagctgtagtgcgtcacgcagagtgctccgtgctggt

SEQ ID NO: 21307 - DNA, 75 bp, synthetic construct
  source 1..75: mol_type = other DNA
cgcatggccgaacggctgggggagatacagaaacgggtaatcactgtctgtgaccgggaagcggatatctggcat

SEQ ID NO: 21308 - DNA, 75 bp, synthetic construct
  source 1..75: mol_type = other DNA
cactggttataaacacgcagctggcaatgaaaattggcttaaacgaagccattgttttgcaacaactgcactact

SEQ ID NO: 21309 - DNA, 75 bp, synthetic construct
  source 1..75: mol_type = other DNA
cagccgcatcagttacgcgcagccgtaaaactaagaaggggcagccagtaaacgacaaccccgaaagcgcgcaat

SEQ ID NO: 21310 - DNA, 75 bp, synthetic construct
  source 1..75: mol_type = other DNA
attacttacccgcgttaccagcgtcttttttgcgatgactgcggcgcataccaatgatgaattacagcgtcttga

SEQ ID NO: 21311 - DNA, 75 bp, synthetic construct
  source 1..75: mol_type = other DNA
attcgatgcaacaaacagtgacctatgtgccgaacgtcgcgaatgccgaaatcacgctggcagcctcgaaggatc

SEQ ID NO: 21312 - DNA, 75 bp, synthetic construct
  source 1..75: mol_type = other DNA
tgccgaggaacacggagataattgggttagcgaattaacggagactccagccaccgatgcttttctggctgaagt

SEQ ID NO: 21313 - DNA, 75 bp, synthetic construct
  source 1..75: mol_type = other DNA
ggtagtgaagtgattgatgctgttatcgcaggccagaatcaggcttacagggaactaagaagaataagagataat

SEQ ID NO: 21314 - DNA, 75 bp, synthetic construct
  source 1..75: mol_type = other DNA
agaaagcggcaactgaagctgctgaaaaagccaaagcagaagctgagaagaaagcggctgctgaaaaggctgcag

SEQ ID NO: 21315 - DNA, 75 bp, synthetic construct
  source 1..75: mol_type = other DNA
aattctgatcctgaaaggtatgttatcgcaacttgtccagcttgaaagctggtatggggcattgacaggctttaa

SEQ ID NO: 21316 - DNA, 75 bp, synthetic construct
  source 1..75: mol_type = other DNA
atgagtaacgaatatcaaagcaccagtataaaccctgatgtttttgaacaatttcttaccctcctgaatacacac

SEQ ID NO: 21317 - DNA, 75 bp, synthetic construct
  source 1..75: mol_type = other DNA
tcgtttactcctgacaacataaatgcggacattagtcttggaactctgagcggaaaaacaaaagagcgcgtttat

SEQ ID NO: 21318 - DNA, 75 bp, synthetic construct
  source 1..75: mol_type = other DNA
tggtgaaaccgctaattgacaccggacagtaccgcagagctattacccatgtagtgagggataaagatgccgact

SEQ ID NO: 21319 - DNA, 75 bp, synthetic construct
  source 1..75: mol_type = other DNA
accgtacagtagtatttcacgataccagtattgatgagtacttcaggatcggttcgacgatcaaaactgaccggg

SEQ ID NO: 21320 - DNA, 75 bp, synthetic construct
  source 1..75: mol_type = other DNA
gtggcagccggtttatcaggtgacgtttccggatggttccgtggatgtgctgacccaggatgaaatctggcatgt

SEQ ID NO: 21321 - DNA, 75 bp, synthetic construct
  source 1..75: mol_type = other DNA
ccaccgccgctggagcgactgacgtttgagactgagatcacctcggaatacctgttaaccctgaaagggggcaac

SEQ ID NO: 21322 - DNA, 75 bp, synthetic construct
  source 1..75: mol_type = other DNA
aacagtccccatatctgcgggcagtcgatattctgcgggcgcgacaggcaactggtttattgaaaagaaatcgta

SEQ ID NO: 21323 - DNA, 75 bp, synthetic construct
  source 1..75: mol_type = other DNA
taaccactctgcgcccttcaccactggcgaagggaaacccgcagcacactaatctggtcgagatcgaaaaaatat

SEQ ID NO: 21324 - DNA, 75 bp, synthetic construct
  source 1..75: mol_type = other DNA
tctgccgcatggcacggcgattgacctgcccgacgtggcatcgtcacccgtaacagaaactatcaacctttggga

SEQ ID NO: 21325 - DNA, 75 bp, synthetic construct
  source 1..75: mol_type = other DNA
catggttcggaagaaaacaccgcgataatacgctcaccctgaagcgtttttcctccggtgtgggtttctggtgtc

SEQ ID NO: 21326 - DNA, 75 bp, synthetic construct
  source 1..75: mol_type = other DNA
ctggtgcagaaattcatgagtatcagcctacccctggcgatattaaacgtgcgcagggggcacaactgattctcg

SEQ ID NO: 21327 - DNA, 75 bp, synthetic construct
  source 1..75: mol_type = other DNA
gttccaacgcttttaccagcatcttaatggggttccagaagtaattgtctcttcgggtgtgacgccagtagggat

SEQ ID NO: 21328 - DNA, 75 bp, synthetic construct
  source 1..75: mol_type = other DNA
ctgtggggaggagcagtatctgaaatttggcgatgaatccacgccttttggccttaaatgggagaaggacagccc

SEQ ID NO: 21329 - DNA, 75 bp, synthetic construct
  source 1..75: mol_type = other DNA
tggtggtggatgatgacattagccactgcactattttgcaggctttgctgcgcggctggggctataacgtcgcgc

SEQ ID NO: 21330 - DNA, 75 bp, synthetic construct
  source 1..75: mol_type = other DNA
gacagccagcaaatcccgaccttcagtatgctgggttatcacccggatcaggagtgcaccctgcgccgtatcctg

SEQ ID NO: 21331 - DNA, 75 bp, synthetic construct
  source 1..75: mol_type = other DNA
gaaaggaagtcacaagacaggccgatgtgaaccggatacaaccgctgattaacgagctggagaagctacccaaac

SEQ ID NO: 21332 - DNA, 75 bp, synthetic construct
  source 1..75: mol_type = other DNA
cctgtatatgttcgcgtctggtcaatggaggggagggaaggagtaacttataacatttcatcagatggcggcatt

SEQ ID NO: 21333 - DNA, 75 bp, synthetic construct
  source 1..75: mol_type = other DNA
gtcaaccgggatacctggtgtcgtgccggtgattaccgcgctccgggatcactggccgggatgattaaacaggcg

SEQ ID NO: 21334 - DNA, 75 bp, synthetic construct
  source 1..75: mol_type = other DNA
actggccgggatgattaaacaggcctggtgcagtgccctgggtgtggataccggagatcataccacgctggtgca

SEQ ID NO: 21335 - DNA, 75 bp, synthetic construct
  source 1..75: mol_type = other DNA
gaaccacaacccgcaatatccgtttccccaatcacataattgaacagatcaacatcgcccttgagcataaagggt

SEQ ID NO: 21336 - DNA, 75 bp, synthetic construct
  source 1..75: mol_type = other DNA
ggcttgagctggttgcatggccggaggggataaccggctttgagattgacgtggtgctgaacgagaactggcctc

SEQ ID NO: 21337 - DNA, 75 bp, synthetic construct
  source 1..75: mol_type = other DNA
tgcgtttcccggatgtaccggcagcaacggacgcagctgtgatatcccgcttcatcaatgccctgaaagcccgaa

SEQ ID NO: 21338 - DNA, 75 bp, synthetic construct
  source 1..75: mol_type = other DNA
ttcaggatgacagtatcctggctcatcttgacaatgaatccggggatacgtcacgatttccggcactgctggcgg

SEQ ID NO: 21339 - DNA, 75 bp, synthetic construct
  source 1..75: mol_type = other DNA
caaaaacaatacacttttgatgaagtagcaagaaatgaaaaaaaatacaatttaaatatttacgacattttcttt

SEQ ID NO: 21340 - DNA, 75 bp, synthetic construct
  source 1..75: mol_type = other DNA
gcatcccgccgatcatcggcgcactgttgccaagcgccagcttcttcttaatcagcctgtggctgttaatgagaa

SEQ ID NO: 21341 - DNA, 75 bp, synthetic construct
  source 1..75: mol_type = other DNA
tggagtgaatccagattaaacatctcattgctgatgcttgatattgagcattttgcgcgcggtaaggggctgcgt

SEQ ID NO: 21342 - DNA, 75 bp, synthetic construct
  source 1..75: mol_type = other DNA
cgcaacgcggggtaaaagcggaagtcttgctggatggctacggttcgccggatctcagcgatgagtttgtcaatg

SEQ ID NO: 21343 - DNA, 75 bp, synthetic construct
  source 1..75: mol_type = other DNA
cgcaaacagcgcaggcgcggacagaaacggcgctcgatacactcatgagcactgaatcaccggaaactattcagg

SEQ ID NO: 21344 - DNA, 75 bp, synthetic construct
  source 1..75: mol_type = other DNA
cacgggcgactcagccctgcctgtcacccgttgaaatctggcagcggttactgacttgtctgttgtcgcagcact

SEQ ID NO: 21345 - DNA, 75 bp, synthetic construct
  source 1..75: mol_type = other DNA
tgcgccagttagcttcttcctctggctggcagctacggtttgaggggcgttcagactggctacccattgcggcat

SEQ ID NO: 21346 - DNA, 75 bp, synthetic construct
  source 1..75: mol_type = other DNA
cgttttataacgagtcagaagataaaatctggtttggtaatctgatcagcgaactggcaagactaaacaatgaaa

SEQ ID NO: 21347 - DNA, 75 bp, synthetic construct
  source 1..75: mol_type = other DNA
gccggtttctgataccgttcacgagcgctttatccgtctgcccgaagtgatgcatctgtgcggcctgtcccgctc

SEQ ID NO: 21348 - DNA, 75 bp, synthetic construct
  source 1..75: mol_type = other DNA
tctcctgatctgtgggaagaaggaataaatgctgggcttctaaactatagttttaatggtaattctattaataat

SEQ ID NO: 21349 - DNA, 75 bp, synthetic construct
  source 1..75: mol_type = other DNA
tgcgtgcactacgcaaaggccaggcctcagcattttattatggtgatcccctgggcgaaatgcgcctggtaagca

SEQ ID NO: 21350 - DNA, 75 bp, synthetic construct
  source 1..75: mol_type = other DNA
gatcattgttgatgaaggcattcctgcggatagtctggaaggactgcgaaaggctggggttgaagtgattctggt

SEQ ID NO: 21351 - DNA, 75 bp, synthetic construct
  source 1..75: mol_type = other DNA
attgaaaaactggagtgctatatcgctgaattgaaaaaaagcaccccaacaaaaaatgaggtgcttgcagcagat

SEQ ID NO: 21352 - DNA, 75 bp, synthetic construct
  source 1..75: mol_type = other DNA
aggcccaacattaaccggctttaattctgcttacagaactgcatcaaccagcgacaaggtgtcaatgacttacag

SEQ ID NO: 21353 - DNA, 75 bp, synthetic construct
  source 1..75: mol_type = other DNA
attgccggtattaaggtgaataaaggcgctgaaagtttttatgtcgagccttttgaacaggacgccggactgaat

SEQ ID NO: 21354 - DNA, 75 bp, synthetic construct
  source 1..75: mol_type = other DNA
ttgcaccgattaaaaccgatattgaaaccctttcaaaaggcgttcagggatggtgtgaagcgaaccgcgacgaac

SEQ ID NO: 21355 - DNA, 75 bp, synthetic construct
  source 1..75: mol_type = other DNA
cgctgactaatttgagtggaaaggatgtagctggtcttctcgcataccttggtttgggagaagcggcaaaacggg

SEQ ID NO: 21356 - DNA, 75 bp, synthetic construct
  source 1..75: mol_type = other DNA
accccgcagtacttcatgcgggagtaccagctgcaggagggggatattgacctctctgatgcaccggttgcggac

SEQ ID NO: 21357 - DNA, 75 bp, synthetic construct
  source 1..75: mol_type = other DNA
agaccgacaagggcatcgtgctggccagcaccttgatcgagcacctgcggcagcagtcggtcattctgcctgccc

SEQ ID NO: 21358 - DNA, 75 bp, synthetic construct
  source 1..75: mol_type = other DNA
tggaagaaatcggggccggagatggcttcgctggaggcctggctggaagaacatgagaaatacaggagtgttgca

SEQ ID NO: 21359 - DNA, 75 bp, synthetic construct
  source 1..75: mol_type = other DNA
ctgtaccgcagatgcctgcctcaccgcccggcccggaaggcgaaccacagccaggaaacacccccgtatccttcc

SEQ ID NO: 21360 - DNA, 75 bp, synthetic construct
  source 1..75: mol_type = other DNA
agaaggggcggcacgaccagttacttaccgcacttcgcgcgctgctgttaagccgcaagaatccgtttggcgata

SEQ ID NO: 21361 - DNA, 75 bp, synthetic construct
  source 1..75: mol_type = other DNA
atgagaacgtcattagtcacccgtgaagagatgatcgaggcaattgaacagcacactgcctgtatcagtaccagg

SEQ ID NO: 21362 - DNA, 75 bp, synthetic construct
  source 1..75: mol_type = other DNA
gcggtatttattccgatggcattcttcggcggttctactggggcaatttatcgccagttctctatcaccatcgtt

SEQ ID NO: 21363 - DNA, 75 bp, synthetic construct
  source 1..75: mol_type = other DNA
gatgttctgtgtgataccggactgcaacctgtattttcagaggatgatcgtgaacaggtgattgccgtgtatggc

SEQ ID NO: 21364 - DNA, 75 bp, synthetic construct
  source 1..75: mol_type = other DNA
gcggtgtcagtctggctgcggtcgcaaactccgaagtcgatgcactgattaaggtgctgccgcgcatgacggcac

SEQ ID NO: 21365 - DNA, 75 bp, synthetic construct
  source 1..75: mol_type = other DNA
actggtcttcactcgtcgtcagtgctatgcgctgccggaacgcctcgacctggtgaaaggtaccgttattggcca

SEQ ID NO: 21366 - DNA, 75 bp, synthetic construct
  source 1..75: mol_type = other DNA
attacggagaaatttgcagcccggattgcaccgattaaaaccgatattgaaaccctttcaaaaggcgttcaggga

SEQ ID NO: 21367 - DNA, 75 bp, synthetic construct
  source 1..75: mol_type = other DNA
ggctctcgaaaaccttggtttgggagaagcggcaaaacggaatgtgggaacaggggaaaatcagataccagatat

SEQ ID NO: 21368 - DNA, 75 bp, synthetic construct
  source 1..75: mol_type = other DNA
tgacgaaagcctctcgtttaccccatactctgtccatttcctgttattttgtattccggtgcgtatctccgttgg

SEQ ID NO: 21369 - DNA, 75 bp, synthetic construct
  source 1..75: mol_type = other DNA
tcgcggcctgaaaagcccggcggatgtgctgacgtttacgggccacgaacagctcagctcacccttccgctacga

SEQ ID NO: 21370 - DNA, 75 bp, synthetic construct
  source 1..75: mol_type = other DNA
taactataagtccatggcttatgttggaaacattgttgagtttatcaagtacaaactgaagaatgttgccgcagg

SEQ ID NO: 21371 - DNA, 75 bp, synthetic construct
  source 1..75: mol_type = other DNA
tattaatgatgatggttatgcctgtgagctatgcggcatgttatagtgagttatctgttcagcacaatttggttg

SEQ ID NO: 21372 - DNA, 75 bp, synthetic construct
  source 1..75: mol_type = other DNA
attttaatactgattccaaacaaacaattgatgtcagattattgaatcaaaatatagacatgatattgggaggcg

SEQ ID NO: 21373 - DNA, 75 bp, synthetic construct
  source 1..75: mol_type = other DNA
ctacaggtttgcagcaggcgcggcagcgtattctggcgcttgaaacagcacttagattacatgggctgattgact

SEQ ID NO: 21374 - DNA, 75 bp, synthetic construct
  source 1..75: mol_type = other DNA
gcatctatgaaaaagcgctccccgccggggagtgctggctggaacgcctgcaactggcaaaaacgttgggcttcg

SEQ ID NO: 21375 - DNA, 75 bp, synthetic construct
  source 1..75: mol_type = other DNA
ggcgcaaatgctattgctcttggacaaggtagttatgccggtttagaaaatggcattgcaattggtggtcaagcc

SEQ ID NO: 21376 - DNA, 75 bp, synthetic construct
  source 1..75: mol_type = other DNA
cctcacgcccaccagcaacagaacccaccacaggaaaagacggtggtcagcattgccgttgatcctgagtctccg

SEQ ID NO: 21377 - DNA, 75 bp, synthetic construct
  source 1..75: mol_type = other DNA
ccatcttgcgcaatggcagataaacaggcaacggctgaaacagtggaaccggatgcaactgaacatcatcaggac

SEQ ID NO: 21378 - DNA, 75 bp, synthetic construct
  source 1..75: mol_type = other DNA
aaccggaaagttaattatagacaacctttttcaagaggttattgattacgcgaaagaaaaatatatcagcggagg

SEQ ID NO: 21379 - DNA, 75 bp, synthetic construct
  source 1..75: mol_type = other DNA
gaaaagggcggcacaggagggtgagtattctgatgccaggagcaatccggccatgctgcgtctgagcataaaata

SEQ ID NO: 21380 - DNA, 75 bp, synthetic construct
  source 1..75: mol_type = other DNA
catgccggcctgaacaagggcgaggcgcgcaatgcgctggccagggcagtgtttttcaaccgcctgggtgaaatc

SEQ ID NO: 21381 - DNA, 75 bp, synthetic construct
  source 1..75: mol_type = other DNA
cagttgttattacgatttgagggtcttacccgtgttgaatatggacggacggaaggagaagcaacaatccgtacc

SEQ ID NO: 21382 - DNA, 75 bp, synthetic construct
  source 1..75: mol_type = other DNA
tgactaatcagggcgcagcacggctggctaacgcgacgatgcttggcagtaagctgaatctgacgcaaatggccg

SEQ ID NO: 21383 - DNA, 75 bp, synthetic construct
  source 1..75: mol_type = other DNA
aaaggaattttgatggcctgcccggtgcaaaagatatcattctgggcgaattgactaagagggttcaccgggtct

SEQ ID NO: 21384 - DNA, 75 bp, synthetic construct
  source 1..75: mol_type = other DNA
ccataacggcgaaccatacgttcccatgaaacctgtcgttgcggggatggggctggcctggcaatcacagttggc

SEQ ID NO: 21385 - DNA, 75 bp, synthetic construct
  source 1..75: mol_type = other DNA
attgtgtacccgatgtggagctggcgagactgcgaacagccatgaaagcccatcaggcactggcgctggtcttcg

SEQ ID NO: 21386 - DNA, 75 bp, synthetic construct
  source 1..75: mol_type = other DNA
ggcaaagccacggtggatggcatccagttgcgctttaccggctctatccagcgtgatgataccggggaagtgcag

SEQ ID NO: 21387 - DNA, 75 bp, synthetic construct
  source 1..75: mol_type = other DNA
tctcgctgcatatcgtggtcgtataatgacaaaaattgcggttcagctttctttactaacatttgttcgctcaag

SEQ ID NO: 21388 - DNA, 75 bp, synthetic construct
  source 1..75: mol_type = other DNA
cttgagctttatatcttccctcatatcggatcgtccgatatccgccagcttaaaacaagccacctgttagccccg

SEQ ID NO: 21389 - DNA, 75 bp, synthetic construct
  source 1..75: mol_type = other DNA
aaacaggacggtgctcttatcttccagggacacccggttattcatgcagggcaaactgtttctgcatcgcagagt

SEQ ID NO: 21390 - DNA, 75 bp, synthetic construct
  source 1..75: mol_type = other DNA
ctgctgattacggggcggtgattacaaataatgcacagcaaaaatcccagcttttactggatcttaaggctcagg

SEQ ID NO: 21391 - DNA, 75 bp, synthetic construct
  source 1..75: mol_type = other DNA
gaaggagcgcatccagaaagcggtttcgatgaagatttccaaatggaacagcaggccaacgctgaattcatcgcc

SEQ ID NO: 21392 - DNA, 75 bp, synthetic construct
  source 1..75: mol_type = other DNA
ttaataaacggggggatcagaatattccggctgaaacgccgtatgcgccgggagaagaaattaagggagggtggc

SEQ ID NO: 21393 - DNA, 75 bp, synthetic construct
  source 1..75: mol_type = other DNA
tgctgccgggatactcgtttaacgcccatctggtggcgggtttaacgccgattgaggccaacggttatctcgatt

SEQ ID NO: 21394 - DNA, 75 bp, synthetic construct
  source 1..75: mol_type = other DNA
caaacgtggcaggcatcgcgatcagctattgaaataaccgcgccaaagtttatcgacagcagagaagcattagcc

SEQ ID NO: 21395 - DNA, 75 bp, synthetic construct
  source 1..75: mol_type = other DNA
caccaggtattcactgactggcccctttccggtgaatattcctgcgggcaactggcccgggctcttttcccgggg

SEQ ID NO: 21396 - DNA, 75 bp, synthetic construct
  source 1..75: mol_type = other DNA
tgctgcgggtaataaaacccgtcttgcatttgcaggtctgaagtttggtgagtttggcaccattgattatggtcg

SEQ ID NO: 21397 - DNA, 75 bp, synthetic construct
  source 1..75: mol_type = other DNA
ggttcagcggatcacggaaagctgccatattccggtacggatcacacctgatgtactggcatacctgaatacatc

SEQ ID NO: 21398 - DNA, 75 bp, synthetic construct
  source 1..75: mol_type = other DNA
gaagataaatatcaacaattcaaagacttgaataagatgataatcaagccagccatcgccgaactgaacgaaaaa

SEQ ID NO: 21399 - DNA, 75 bp, synthetic construct
  source 1..75: mol_type = other DNA
tcaggaaaaaggtctgaatggtactctgacgattgaacaaactgatcctttaaccggtaaagtgactgaaaagca

SEQ ID NO: 21400 - DNA, 75 bp, synthetic construct
  source 1..75: mol_type = other DNA
agcggccctggactaactgaagatatgcgaactcatcttttccggcgggcatcagtgttatgtcatgaaccgtca

SEQ ID NO: 21401 - DNA, 75 bp, synthetic construct
  source 1..75: mol_type = other DNA
acaaaacggggcgttacgccaacagacgccggaaaaattctctatacccatgcacgggccattttacgtcagtgt

SEQ ID NO: 21402 - DNA, 75 bp, synthetic construct
  source 1..75: mol_type = other DNA
actgatgatgacgagttactgagcaacaagctaaagcaaattagagaaataaggttagcaggacttgaagttatc

SEQ ID NO: 21403 - DNA, 75 bp, synthetic construct
  source 1..75: mol_type = other DNA
tttcaatgatagagcgtgtgataacaaatttactggataatgctgtacgccacacacctccggaaggctcgatca

SEQ ID NO: 21404 - DNA, 75 bp, synthetic construct
  source 1..75: mol_type = other DNA
cctttcgatgaagcgaataaattagtctttgctaccggcccattaactggatctggtgccccctgtagttctcgc

SEQ ID NO: 21405 - DNA, 75 bp, synthetic construct
  source 1..75: mol_type = other DNA
ggcgatcccggactacaattttgaccgtgttgagttactcatcagtgaactggaagcacttgtaggaaacatgga

SEQ ID NO: 21406 - DNA, 75 bp, synthetic construct
  source 1..75: mol_type = other DNA
agaagccactggattgcggtatggtttatcatatggtcttcagtaatcaacctcattattttgtatggtttttat

SEQ ID NO: 21407 - DNA, 75 bp, synthetic construct
  source 1..75: mol_type = other DNA
gccggtataccatccggccgccacacagcacgcattcgagcgggtcacgactcaggaactgtttcaccatttgtg

SEQ ID NO: 21408 - DNA, 75 bp, synthetic construct
  source 1..75: mol_type = other DNA
aatgaagatggaaacatacaggattatcgcctcctctggtcaggcgatatttcagggcaaacagcagaactatgt

SEQ ID NO: 21409 - DNA, 75 bp, synthetic construct
  source 1..75: mol_type = other DNA
ccgcatgttcgagaagagcacgcaccactacaccgacagcgtaggcggtattctgcgcagtacggggcgttacct

SEQ ID NO: 21410 - DNA, 75 bp, synthetic construct
  source 1..75: mol_type = other DNA
taagtcagcagaccggcggagacagtctgacacagacagcgctgcagcagtatgagccggtggtggttggctctc

SEQ ID NO: 21411 - DNA, 75 bp, synthetic construct
  source 1..75: mol_type = other DNA
tcagcaatggcgctgtcggtactggtggcgttgatcctgactccagctctttgtgccaccatgctgaaaccgatt

SEQ ID NO: 21412 - DNA, 75 bp, synthetic construct
  source 1..75: mol_type = other DNA
agaccctgaccaacagcggtctgttgcagggggaggcctcactcaccgttaacacacagaggcttgataatcagc

SEQ ID NO: 21413 - DNA, 75 bp, synthetic construct
  source 1..75: mol_type = other DNA
tgcttgagtatctcggcgatagtgagacgctgaataaggagtggctgcgggagccggaagagactcccgcaacgg

SEQ ID NO: 21414 - DNA, 75 bp, synthetic construct
  source 1..75: mol_type = other DNA
gatcgatcgtcagagggttaaaaaaatatatccctttgcggagcggattacggaatgctggcggtctattacaca

SEQ ID NO: 21415 - DNA, 75 bp, synthetic construct
  source 1..75: mol_type = other DNA
ttgttactactgatgacattgttcacgaagttaccctggaaggaaagcgtattggctacgtgattaagacagaaa

SEQ ID NO: 21416 - DNA, 75 bp, synthetic construct
  source 1..75: mol_type = other DNA
tatgccagtaaagaatcctgccatcaggcaagagacgagcaaaaaatttccggtgaatgtctcccgttaaacaaa

SEQ ID NO: 21417 - DNA, 75 bp, synthetic construct
  source 1..75: mol_type = other DNA
tttgccggtagcggggtccgtattgaaggaagctgtccgtcattatttgtgcggacggatacggtgcgtgccgtg

SEQ ID NO: 21418 - DNA, 75 bp, synthetic construct
  source 1..75: mol_type = other DNA
actgaaaaaataccttcctgctggcacgcgactggttgaacctttcgcgggttcttgtgctgtgatgatggagac

SEQ ID NO: 21419 - DNA, 75 bp, synthetic construct
  source 1..75: mol_type = other DNA
aaaattgcgaaaactactatccttagcatggatgatgtgaaggctagatatattgtgacagggtgtgtagttgct

SEQ ID NO: 21420 - DNA, 75 bp, synthetic construct
  source 1..75: mol_type = other DNA
tgtttctccggatgacgggggcagctgttatctctggctcaaccgtgggcaaccacccgctgttaaccggcgacg

SEQ ID NO: 21421 - DNA, 75 bp, synthetic construct
  source 1..75: mol_type = other DNA
atgttgtgccgatcctttcggcgacggcaaccgctggcgggatattcatggcgctgatgcgcaaaacgtttgtcc

SEQ ID NO: 21422 - DNA, 75 bp, synthetic construct
  source 1..75: mol_type = other DNA
agctttgagcgtgtactgatgcccggtctcgaaaaaaatcagtacagcatcctgtgggtggagcaccaggacaag

SEQ ID NO: 21423 - DNA, 75 bp, synthetic construct
  source 1..75: mol_type = other DNA
cggcaatctatatgtcagatggatataatatgacagaagatggtgccacgttaaaggctcaaaattatgcctggg

SEQ ID NO: 21424 - DNA, 75 bp, synthetic construct
  source 1..75: mol_type = other DNA
gtgccccaggcgcaatcggcccttatgttcagggcgttgatttaggcagcatggtcttcacctccgggcaaattc

SEQ ID NO: 21425 - DNA, 75 bp, synthetic construct
  source 1..75: mol_type = other DNA
tggaaaaacaccgggaaggggtgaaagaggcgatgatgcagcacaggaaggacgtgttaaagctggcagggaata

SEQ ID NO: 21426 - DNA, 75 bp, synthetic construct
  source 1..75: mol_type = other DNA
acgttacaatacggaatataagtccaacaatcagatagcctctttttcccagcccgactgggaaagtcgtaaatt

SEQ ID NO: 21427 - DNA, 75 bp, synthetic construct
  source 1..75: mol_type = other DNA
gagagaggtttagaccgagagttagttctgatggtgacccgactttcaccagacgatcttatcgcgcaaagccac

SEQ ID NO: 21428 - DNA, 75 bp, synthetic construct
  source 1..75: mol_type = other DNA
aattgctggatggggttgaggttgagtggaaaacccttgaggatatttctataaagatatcatctggaggaaccc

SEQ ID NO: 21429 - DNA, 75 bp, synthetic construct
  source 1..75: mol_type = other DNA
agcgtgaccatgaaggataaggactttaatccgctgattgggcgtaccggtgttgatgtgggtaaatccttctcc

SEQ ID NO: 21430 - DNA, 75 bp, synthetic construct
  source 1..75: mol_type = other DNA
accacgctgaatatcaaaggagagagttaccggttaaaagagaaacgtaaagctggagtgctgaccaaaaacaca

SEQ ID NO: 21431 - DNA, 75 bp, synthetic construct
  source 1..75: mol_type = other DNA
cagcaggcgctgcgtgatgtcgttgcttatgcagtacagaacggtatcccggttccgaccttcgccgctgcggtt

SEQ ID NO: 21432 - DNA, 75 bp, synthetic construct
  source 1..75: mol_type = other DNA
gcaggtgcaggcacggatgctgctattgattccctcaagccatacctcgataaaggtgacatcatcattgatggt

SEQ ID NO: 21433 - DNA, 75 bp, synthetic construct
  source 1..75: mol_type = other DNA
gagcacgatttacatgccctgagcgagcaacagaaggcggactgtgtggtgctgaatccggaaaagtcccaccct

SEQ ID NO: 21434 - DNA, 75 bp, synthetic construct
  source 1..75: mol_type = other DNA
aaagtgctgtctggcccgcaggctaaactggctagtgataaagctgagtttgttgagaaagtacgccgtgccttg

SEQ ID NO: 21435 - DNA, 75 bp, synthetic construct
  source 1..75: mol_type = other DNA
aacatacgctcaatactcaaccggttgaagatacttcgttatcgacaccagctgccccgatggtggattcgttaa

SEQ ID NO: 21436 - DNA, 75 bp, synthetic construct
  source 1..75: mol_type = other DNA
ccaaaagcggtgaagtctgcctatgacaatgctgaaaaacgtcttcagaaagatcagaacggtgcggatattccg

SEQ ID NO: 21437 - DNA, 75 bp, synthetic construct
  source 1..75: mol_type = other DNA
agactggcagatgatgtaaggctcttgcgtcaggaggagcgggaaaggcgaaaaaatatagaaaagctaattcag

SEQ ID NO: 21438 - DNA, 75 bp, synthetic construct
  source 1..75: mol_type = other DNA
gtcattgataaactggttacaaagtgctggcaggaagaagcatatgctgaggcgcaattaagaaaagtgacgaga

SEQ ID NO: 21439 - DNA, 75 bp, synthetic construct
  source 1..75: mol_type = other DNA
gttgcgaatggtgacgtatacaactctggctacgggttattcccgtctgagcaggcacgtaaagactggcaaaac

SEQ ID NO: 21440 - DNA, 75 bp, synthetic construct
  source 1..75: mol_type = other DNA
agcgggaaaaaatcaaggggcaggttgttgagctagtacgccggagtgggcgcgagacgttacggcaactggaag

SEQ ID NO: 21441 - DNA, 75 bp, synthetic construct
  source 1..75: mol_type = other DNA
gacagaaccacgcgtgaagtggtgcttacagatgcagggcagcagttggctttgcgtcttgagcgactgctggat

SEQ ID NO: 21442 - DNA, 75 bp, synthetic construct
  source 1..75: mol_type = other DNA
atggcaaaagtatttacacaagaagagcgggaaaaaattaaggggcagattgttgaacttgtacgtctgagcggt

SEQ ID NO: 21443 - DNA, 75 bp, synthetic construct
  source 1..75: mol_type = other DNA
acaggcgcgtaaggactggcaaaatgcccgtaaaaagctctcaagggcaaagctgaagaaaccatctgcggttga

SEQ ID NO: 21444 - DNA, 75 bp, synthetic construct
  source 1..75: mol_type = other DNA
caaacctcagaaaggaataaaggcggtctctataccagaataaaaaaagaaagtgactttctttctatggataga

SEQ ID NO: 21445 - DNA, 75 bp, synthetic construct
  source 1..75: mol_type = other DNA
tgtgggaactcaaaaaaaatggcgttgttgataaaacgggtcacacctggtttctggctgtcgaaggtgaatccg

SEQ ID NO: 21446 - DNA, 75 bp, synthetic construct
  source 1..75: mol_type = other DNA
cggtactgacgcaggccgggacggatgccgacgcggatttgtccgcctttatcgaaccactggacaccctccggg

SEQ ID NO: 21447 - DNA, 75 bp, synthetic construct
  source 1..75: mol_type = other DNA
gacggagaaatacgccgctatgacaggcgtctgaatataatctgtcgcgagtgccggaagagcgaagtcatgcag

SEQ ID NO: 21448 - DNA, 75 bp, synthetic construct
  source 1..75: mol_type = other DNA
cgacatttatctttctgttattgattactggcggcgtttacccgctgctgaccaccgtgctggggcaatggtggt

SEQ ID NO: 21449 - DNA, 75 bp, synthetic construct
  source 1..75: mol_type = other DNA
gaaaacacatcattgccatatcagcaggttgcccgggaagtgaaagcgccccgtgaacggctgaagtatgcactg

SEQ ID NO: 21450 - DNA, 75 bp, synthetic construct
  source 1..75: mol_type = other DNA
atgaacatcgaaaaaagcagattaatttctgaggccgcccctcatctgaacgcctctctgggcacaattaacggt

SEQ ID NO: 21451 - DNA, 75 bp, synthetic construct
  source 1..75: mol_type = other DNA
atgagaatcaatatcacgttggataaagagcaaaaaattagtcaggcaacgttggatgcacttgaggctgagctg

SEQ ID NO: 21452 - DNA, 75 bp, synthetic construct
  source 1..75: mol_type = other DNA
gcgtggccttcacctccacccgtgcagcacgggaatggctgattcttaacatggcgggactggagcgtgaagaat

SEQ ID NO: 21453 - DNA, 75 bp, synthetic construct
  source 1..75: mol_type = other DNA
gagaaaatggttataagtgtccttctcgttttactgaaagatttcataatcgttttaatataacaccaagagaga

SEQ ID NO: 21454 - DNA, 75 bp, synthetic construct
  source 1..75: mol_type = other DNA
gcgtgatgcagggaatgtcgaccaaatggtatctgctgttcccggttggtattgcctggtttgccatctacttct

SEQ ID NO: 21455 - DNA, 75 bp, synthetic construct
  source 1..75: mol_type = other DNA
ggcacgggaatggctgattctgaagatggcgggactggagcgtgaagagttccgggtactgtatctgaacaacca

SEQ ID NO: 21456 - DNA, 75 bp, synthetic construct
  source 1..75: mol_type = other DNA
gcatgaaaacgctgggggatgcggtgaaaaatacgcttctcacgcccaatgaggcccgtaaacgggagaacctgc

SEQ ID NO: 21457 - DNA, 75 bp, synthetic construct
  source 1..75: mol_type = other DNA
cctgccgttcgccagccgctggcggaggataaatcattactgccgtttttcagcaatgagcgtgtgattcgtgct

SEQ ID NO: 21458 - DNA, 75 bp, synthetic construct
  source 1..75: mol_type = other DNA
taaattacttcttgaatgcgttgtaaaaacacaatcatcagtagcgaaaattttgggtattgagtctctcagtcc

SEQ ID NO: 21459 - DNA, 75 bp, synthetic construct
  source 1..75: mol_type = other DNA
tggcgctgaatgaggccaaagccatcctgattgctgattgtgaaaatgggggggggttatgcgtgatgatcgttt

SEQ ID NO: 21460 - DNA, 75 bp, synthetic construct
  source 1..75: mol_type = other DNA
gctccggtcgtcaaacgtgcgcgcgaaaaagtcgaacacgattttaaccagcaggtgatcaatcgagaactcgcc

SEQ ID NO: 21461 - DNA, 75 bp, synthetic construct
  source 1..75: mol_type = other DNA
cgaagggcctttgtgtaatcgtcggtatttcattttcactaatgctggttgctctttttctttccataacctgga

SEQ ID NO: 21462 - DNA, 75 bp, synthetic construct
  source 1..75: mol_type = other DNA
ttctgtatttttgtttttctgccctgactggcctgcagaaagatgatgaaagaaaaaatgatgaaaggaatgaag

SEQ ID NO: 21463 - DNA, 75 bp, synthetic construct
  source 1..75: mol_type = other DNA
tgaaatcaagacaatcacacatccgcacttcggcgataaaccggtaaaggtgttcgctataaaggtgaatattga

SEQ ID NO: 21464 - DNA, 75 bp, synthetic construct
  source 1..75: mol_type = other DNA
tactggggatggtggctttcatggtcgccgtttgtggggatgttcatcgcacgggtctcccgcgggcgaaccatt

SEQ ID NO: 21465 - DNA, 75 bp, synthetic construct
  source 1..75: mol_type = other DNA
gctctatttcgatgggcgcttcgtcgagtgcaagcataaatgcgggttactccatcgcgatgggggtatttgctt

SEQ ID NO: 21466 - DNA, 75 bp, synthetic construct
  source 1..75: mol_type = other DNA
cgatgtcactgcgaatgaaagcacaactggcctgtgatgcactgcaaatggcgttgtggcggagaagacgcccgg

SEQ ID NO: 21467 - DNA, 75 bp, synthetic construct
  source 1..75: mol_type = other DNA
ggaatccggcgacgggcagttatagcgttgccagtgaaacagcaaagagccgtggtaagaaatctggtcgcagta

SEQ ID NO: 21468 - DNA, 75 bp, synthetic construct
  source 1..75: mol_type = other DNA
ggtcaaaaacccttgcaactggtggagcatccatggcgttcggggttagtgcaaaagcaatgggtgacagaagtg

SEQ ID NO: 21469 - DNA, 75 bp, synthetic construct
  source 1..75: mol_type = other DNA
gaagcatgggaacgctacagtgttctggtcagccgtgtggatcctgcaaatcctgaatggccggaaatgccgcaa

SEQ ID NO: 21470 - DNA, 75 bp, synthetic construct
  source 1..75: mol_type = other DNA
ggcgatctttattctttcagtctgatgtctgccggggcggcatcggcctggcatgatgttgcgcttgagttgact

SEQ ID NO: 21471 - DNA, 75 bp, synthetic construct
  source 1..75: mol_type = other DNA
tgatccacgcgcgtgggatgtggcaagcatgatggattttgctgtgccggtggtggcgtgtctgctggtctggcg

SEQ ID NO: 21472 - DNA, 75 bp, synthetic construct
  source 1..75: mol_type = other DNA
atagcgtacgacaaagataatatcatccgctatgtggaaaaggatgtgacagctatcagaccggatggattaagt

SEQ ID NO: 21473 - DNA, 75 bp, synthetic construct
  source 1..75: mol_type = other DNA
atgaatcatctttacgaacaactgaccgcacttaaactcaccggcttccgtgatgcgcttaaaaagcaacttgct

SEQ ID NO: 21474 - DNA, 75 bp, synthetic construct
  source 1..75: mol_type = other DNA
agggtattttactccggaagaaaaaaagtcatttattgatgcacaaaacgcctttatttttgggtgtcatgagta

SEQ ID NO: 21475 - DNA, 75 bp, synthetic construct
  source 1..75: mol_type = other DNA
cgtaattatgttggccagcacatttgagcaatggcatctggtcggaaataagaatatggatatattggctaaggg

SEQ ID NO: 21476 - DNA, 75 bp, synthetic construct
  source 1..75: mol_type = other DNA
gcggacagggaacgtcaggatattgtcaccctggtgaaacggcagctgacgcgcgaaatcgcggaagggcgcttc

SEQ ID NO: 21477 - DNA, 75 bp, synthetic construct
  source 1..75: mol_type = other DNA
gcgtcgacgggctattgatgcgctgctgcagggactctgttttcactatgatccgctggccaaccgcgtccagtg

SEQ ID NO: 21478 - DNA, 75 bp, synthetic construct
  source 1..75: mol_type = other DNA
agaaactgaaaaagttgctggcgctggccgcatccggcaacccgcacgaggccgctctggcactgcgccgagccc

SEQ ID NO: 21479 - DNA, 75 bp, synthetic construct
  source 1..75: mol_type = other DNA
tgttacaattgcgggaatttatcgacgaaaactccggtgaattttttgttcaggtctggggaaatggagccaact

SEQ ID NO: 21480 - DNA, 75 bp, synthetic construct
  source 1..75: mol_type = other DNA
cgagaaataagtttattcatgattttgttaaatcgtggaataaagttatgaatagcgatcggtttgatttaaaca

SEQ ID NO: 21481 - DNA, 75 bp, synthetic construct
  source 1..75: mol_type = other DNA
tgcgtccgtgaaagaagcaccaattgggatcgaggtcatccccgcgcacgtcactgaatatctgaacaaagtact

SEQ ID NO: 21482 - DNA, 75 bp, synthetic construct
  source 1..75: mol_type = other DNA
cactatattacgaagccaaaaatgacaaaatcagaaaacgtcttggaattaaaggcggtttttactggcgcacag

SEQ ID NO: 21483 - DNA, 75 bp, synthetic construct
  source 1..75: mol_type = other DNA
cctcagcccgggatgcgtcggcttcaaaagaggcggcaaaatcatcagaaacgagcgcagcctcgagcgccagta

SEQ ID NO: 21484 - DNA, 75 bp, synthetic construct
  source 1..75: mol_type = other DNA
attaaccgttgccagcggtcagttcgatattatccgcagctcggttatctccatcaccgacgatcagcgtttgca

SEQ ID NO: 21485 - DNA, 75 bp, synthetic construct
  source 1..75: mol_type = other DNA
ggcatcgggggcggcggacaaactgcaactgaccgatatatcaaaatcggcgacgtatacgctgctgattgacag

SEQ ID NO: 21486 - DNA, 75 bp, synthetic construct
  source 1..75: mol_type = other DNA
accactgcctgcatgatgtgcaggatttgagccgtttttctcatccgaaagccagcgcagagcagtatgggtgtg

SEQ ID NO: 21487 - DNA, 75 bp, synthetic construct
  source 1..75: mol_type = other DNA
cgaactggaagaaatccaggatgacaaaccgtccctgtttgcccgtgtcacggcgctgttcaccaaaaaagagca

SEQ ID NO: 21488 - DNA, 75 bp, synthetic construct
  source 1..75: mol_type = other DNA
ctgacacctcggcgctggatatccccgccgttctgatgccctaccagcagcgctgggtggctgacacgtctccgc

SEQ ID NO: 21489 - DNA, 75 bp, synthetic construct
  source 1..75: mol_type = other DNA
acgttaaagaacccaagcgcagcaaagcgcagaatgaccgtatgtggccgatgctgaacgatgtttcgcgtcagg

SEQ ID NO: 21490 - DNA, 75 bp, synthetic construct
  source 1..75: mol_type = other DNA
tgctgaagaaatcacggagggtccgctggcgggcaagatggcactgtatgccgacgttgagccaacggaatcact

SEQ ID NO: 21491 - DNA, 75 bp, synthetic construct
  source 1..75: mol_type = other DNA
tgcctgtcagaaactccaggaggctgttggcttaccgaatctggcaccgcgctatgccattgatgctcctgctga

SEQ ID NO: 21492 - DNA, 75 bp, synthetic construct
  source 1..75: mol_type = other DNA
ccaacgcacaaaaggccagcaaaccacaacaactgaccgccagcgcaccgccaaaaacgacagcgttcaccttcg

SEQ ID NO: 21493 - DNA, 75 bp, synthetic construct
  source 1..75: mol_type = other DNA
ccgtgtttcacctgctggagccggatattaatcaggagctgtacggcctgccggaatatctcagcgcccttaact

SEQ ID NO: 21494 - DNA, 75 bp, synthetic construct
  source 1..75: mol_type = other DNA
ctgcggcgacgaatcagctcaagcataaaagccagacttcagccgaagcattcagctttggcgatcccgttcctg

SEQ ID NO: 21495 - DNA, 75 bp, synthetic construct
  source 1..75: mol_type = other DNA
gcgtgccgccgcaaatgatggggattatgcctaataatgttggaggatttggggatgtggagaaggccgcaaatg

SEQ ID NO: 21496 - DNA, 75 bp, synthetic construct
  source 1..75: mol_type = other DNA
tgaagagtgcctgcgggagaataaacccctgcaccgccatacccgcttcagacgtcaggagctggcacaggatga

SEQ ID NO: 21497 - DNA, 75 bp, synthetic construct
  source 1..75: mol_type = other DNA
tttctggcgaatggaccatgatgccgactatggcgtgctgaatgatattgccagagggcaatcagatccccgaaa

SEQ ID NO: 21498 - DNA, 75 bp, synthetic construct
  source 1..75: mol_type = other DNA
tcgatggtacggagggggacgctaatctcctgaaagatggtgataatgtactgcattatacagctgttgttaaga

SEQ ID NO: 21499 - DNA, 75 bp, synthetic construct
  source 1..75: mol_type = other DNA
tctgcgcgataccaatctacaccgcaaatctcagggacgccctcttatcaaaattggtcaactccactacggtaa

SEQ ID NO: 21500 - DNA, 75 bp, synthetic construct
  source 1..75: mol_type = other DNA
ttatcgatgctgattacgacaccgacaactggtttgaacgtgccaaaggaatggaatgggagcctgagaggggga

SEQ ID NO: 21501 - DNA, 75 bp, synthetic construct
  source 1..75: mol_type = other DNA
caaaggtaaggttgaacggatggtgaaatacctcaaggaaaacttcttcatccggtaccgccggttcgacagctt

SEQ ID NO: 21502 - DNA, 75 bp, synthetic construct
  source 1..75: mol_type = other DNA
tacagcgaataaaccaacaggcctgacagatggaactgtatatgtaatttacagttcgcacattaaaccgactgc

SEQ ID NO: 21503 - DNA, 75 bp, synthetic construct
  source 1..75: mol_type = other DNA
atgaataccccagtttcactgatggatgaccagatggtcgacatgtcgtttatcactcagctgaccggcctgacc

SEQ ID NO: 21504 - DNA, 75 bp, synthetic construct
  source 1..75: mol_type = other DNA
agaatagtgttcgtgggacatataatcatgcgcaatatttggaacaacgaagacaaatgctagagtggtattcga

SEQ ID NO: 21505 - DNA, 75 bp, synthetic construct
  source 1..75: mol_type = other DNA
ggatggcagtttctgacacagccatcaccggcggagcagcaactcagggcgctgctgacaccaccaccggatgtg

SEQ ID NO: 21506 - DNA, 75 bp, synthetic construct
  source 1..75: mol_type = other DNA
atacggcgcaggatgcaagcacaacgcaaaagggattagttcagctcagtagcgaaactaacagcgacagcgaaa

SEQ ID NO: 21507 - DNA, 75 bp, synthetic construct
  source 1..75: mol_type = other DNA
ccgggccatgccaccggacgaccgtgacaacctgcccctgctgtatcagaccgaaacattcctgaaggcactgag

SEQ ID NO: 21508 - DNA, 75 bp, synthetic construct
  source 1..75: mol_type = other DNA
agcccgtaaccagaatggcagtgaacagcagcaaaaacaggctgaaatggcactgaatcagctgattaatcgtta

SEQ ID NO: 21509 - DNA, 75 bp, synthetic construct
  source 1..75: mol_type = other DNA
tggctaacccgttcgctcagaagcgtcatggcgggaagataccggtattcacattccactggcgggatgatcctc

SEQ ID NO: 21510 - DNA, 75 bp, synthetic construct
  source 1..75: mol_type = other DNA
gcaatgttcttgacgacccaactgtagcttgcgataaatgcggtgccacgcctcatgttgtagtgctgggcaaac

SEQ ID NO: 21511 - DNA, 75 bp, synthetic construct
  source 1..75: mol_type = other DNA
atggcttccgttcattcactcctcagtgcatgtcagacgacaccccgtgatgtggctgaacaggttcaggcgcgt

SEQ ID NO: 21512 - DNA, 75 bp, synthetic construct
  source 1..75: mol_type = other DNA
ggaacaggggaaactcaatcgacgggagattagtgctctaactggcgtcgctcctctaaacagagactccgggaa

SEQ ID NO: 21513 - DNA, 75 bp, synthetic construct
  source 1..75: mol_type = other DNA
gtgtgcagatattcatggacgggttgttcgtgtactggacggtgataccatcgaggtcatggactcacggaaggc

SEQ ID NO: 21514 - DNA, 75 bp, synthetic construct
  source 1..75: mol_type = other DNA
tgctcttggggggcctcgcactcacctgctcgatcgcatttcaggcaagtgcaactgaaaaattcaaggtcatta

SEQ ID NO: 21515 - DNA, 75 bp, synthetic construct
  source 1..75: mol_type = other DNA
cgcctgataatgcactgatttatgtagataatattcgtgatgcgctggtgaaatacgatcagggaaatgctgaaa

SEQ ID NO: 21516 - DNA, 75 bp, synthetic construct
  source 1..75: mol_type = other DNA
accaaattcaatctgttcaacagccgccgtatcgatgccatcgatgtaaccagcaaaacggagccgcacccatga

SEQ ID NO: 21517 - DNA, 75 bp, synthetic construct
  source 1..75: mol_type = other DNA
cgcagcgaattgcgtgagatccccccacacgactggggtaagacgctgaaagagatggatttaaatctctctttc

SEQ ID NO: 21518 - DNA, 75 bp, synthetic construct
  source 1..75: mol_type = other DNA
gcacccccatctcttgctgcaacagttaatgcagatatatcgtatcaaacatttcgggattttgccgaaaataaa

SEQ ID NO: 21519 - DNA, 75 bp, synthetic construct
  source 1..75: mol_type = other DNA
gaaaataacggcgtcgcatccgaagacctgctggctgtggtgcgtaacgcccttaatggcgaggacgtcaggccg

SEQ ID NO: 21520 - DNA, 75 bp, synthetic construct
  source 1..75: mol_type = other DNA
taaaactgggagcgttaagttagcttttacaggcccaacagttagtggtcatcctagtgagttagctactaacgg

SEQ ID NO: 21521 - DNA, 75 bp, synthetic construct
  source 1..75: mol_type = other DNA
gccctagttaagaaagacacaagtggcaatgatgtagctgaaggtgccttctcagcagttgcgaatttcaacctt

SEQ ID NO: 21522 - DNA, 75 bp, synthetic construct
  source 1..75: mol_type = other DNA
ttgctcaacagcagggagcagccgacaaccgccagtgaaggaactgaacgaataccacgttgcaggcggtttcga

SEQ ID NO: 21523 - DNA, 75 bp, synthetic construct
  source 1..75: mol_type = other DNA
ttcagatgatgacgaactgctggcaaaagccaccgacgtttacagcgttcgtcgggaagaattaaacgaaacatc

SEQ ID NO: 21524 - DNA, 75 bp, synthetic construct
  source 1..75: mol_type = other DNA
cgagcggcggcgcgcggcgttggcccatctggacgcgcaactggcctccatgccagccgagcgggcgcacgagga

SEQ ID NO: 21525 - DNA, 75 bp, synthetic construct
  source 1..75: mol_type = other DNA
cagccgccgaagccatcataacgctaatgcacgcgctgattgatatttctgttatcgcagacatggcgcataagc

SEQ ID NO: 21526 - DNA, 75 bp, synthetic construct
  source 1..75: mol_type = other DNA
agcctggtcagtcaggggtatctcattggtggtgattgctggctggacgagtcggtgaacgacaaagacacgctg

SEQ ID NO: 21527 - DNA, 75 bp, synthetic construct
  source 1..75: mol_type = other DNA
cgcagttattccgtacgcgttttaaagccgtgagtccgaaacgggtggacacgcctggacacggtatggggaacc

SEQ ID NO: 21528 - DNA, 75 bp, synthetic construct
  source 1..75: mol_type = other DNA
atagcgcaggcgtatcagcagcagatagcggagagtcgcaggccggaagaggagacaacaccacgtgagacgtaa

SEQ ID NO: 21529 - DNA, 75 bp, synthetic construct
  source 1..75: mol_type = other DNA
ctctcacgtccggtgtggatagcgcaggcgtatcagcagcagatagcggagagccgcaggccggaagaggagaca

SEQ ID NO: 21530 - DNA, 75 bp, synthetic construct
  source 1..75: mol_type = other DNA
ggtctgaaaccaccggcatgggccgctgcagcttttgaggccggagtgaaaaaatcaaacgaggaggagcaagat

SEQ ID NO: 21531 - DNA, 75 bp, synthetic construct
  source 1..75: mol_type = other DNA
ctggttgaaccgctaatatgctccgcacgctatacaggaagcacattccggcgaggagaagcaacgattaagccg

SEQ ID NO: 21532 - DNA, 75 bp, synthetic construct
  source 1..75: mol_type = other DNA
tggttgccacgggggccagctccatgtcgtgggagtaccgttacacactgaacgcggtgattgaggatttcagcg

SEQ ID NO: 21533 - DNA, 75 bp, synthetic construct
  source 1..75: mol_type = other DNA
aactgacggagcgtgtgctggtcagcactgacggtagtgtgtcgagtgttgaagctatagcggaacctgatgaac

SEQ ID NO: 21534 - DNA, 75 bp, synthetic construct
  source 1..75: mol_type = other DNA
gcccggcactgaccggaacgccaacaacaccaactgcacaacagggaacgaataatacccaaatcgcaagcacgg

SEQ ID NO: 21535 - DNA, 75 bp, synthetic construct
  source 1..75: mol_type = other DNA
aaggccgcgtatgacctggctaacggaaaatataccgctcaggacgccacgacggcacgaaaagggatagtccag

SEQ ID NO: 21536 - DNA, 75 bp, synthetic construct
  source 1..75: mol_type = other DNA
accggcctgatgacccgcgacaattacagaacggtaaataacattacccaggggaagcatccggaggcgaaacaa

SEQ ID NO: 21537 - DNA, 75 bp, synthetic construct
  source 1..75: mol_type = other DNA
ggcagtcggccagttcacgcccgtctcctgttgaaatctggcagatactgctggcccggttgctggaccagcact

SEQ ID NO: 21538 - DNA, 75 bp, synthetic construct
  source 1..75: mol_type = other DNA
acggaaactgatggtaaagcctttcctcaaccagcaggtgttgcgttaccgggacaggaagctgcaacacaggaa

SEQ ID NO: 21539 - DNA, 75 bp, synthetic construct
  source 1..75: mol_type = other DNA
taccgttttctgacgtccgcgaggagctgccacgcggtacgtttgcttataccagtgttccgacgatgattattc

SEQ ID NO: 21540 - DNA, 75 bp, synthetic construct
  source 1..75: mol_type = other DNA
ggcaggcggccagttctcgcccgtctcctgttgaaatctggcagacactgctcacccgactgctggaccagcact

SEQ ID NO: 21541 - DNA, 75 bp, synthetic construct
  source 1..75: mol_type = other DNA
tttcctgctggctggaagaggcacttcttcgggggattattcgtccgccacgggcgcgttttgatttttatcagg

SEQ ID NO: 21542 - DNA, 75 bp, synthetic construct
  source 1..75: mol_type = other DNA
tgcgtttaacggcgaaatctttgtgcagccggtctgggatacggagagcacgcaactgtttcgtacgcgttttaa

SEQ ID NO: 21543 - DNA, 75 bp, synthetic construct
  source 1..75: mol_type = other DNA
gcgccgcctgtctggtttccagaaaaacatcgccctatctgagccaggacgcgttaagcgagtttcgcgcacagc

SEQ ID NO: 21544 - DNA, 75 bp, synthetic construct
  source 1..75: mol_type = other DNA
agacgagcatttgccatccgcgggccagtgtcacagttgatgaagcatgttcgcaagtggcggatttactgcaac

SEQ ID NO: 21545 - DNA, 75 bp, synthetic construct
  source 1..75: mol_type = other DNA
gcaagaatcccgttaccgggttaatgccatcggtattaatccggtaacgggatatggcagcggactgatgcaggt

SEQ ID NO: 21546 - DNA, 75 bp, synthetic construct
  source 1..75: mol_type = other DNA
cggtaatgtgtgatggtctgttagtgggtaatgccgaaattattccgttcagtccgcgcaggtatctttatcacg

SEQ ID NO: 21547 - DNA, 75 bp, synthetic construct
  source 1..75: mol_type = other DNA
ggatcaggtacagggagaaacctgggataaaatagcggtccccgatgatgaaaaaatcgacctcattggtaagtt

SEQ ID NO: 21548 - DNA, 75 bp, synthetic construct
  source 1..75: mol_type = other DNA
tgaattttggcgaggctgagcaggcactgctgacaggacacgctttccaccctgcacctaagtctcatgaaccgt

SEQ ID NO: 21549 - DNA, 75 bp, synthetic construct
  source 1..75: mol_type = other DNA
gatatcatctctggaatacataattgagaatgaaacgccccaggatgtggaaattactcgagtttacaccatgaa

SEQ ID NO: 21550 - DNA, 75 bp, synthetic construct
  source 1..75: mol_type = other DNA
agctggctgaaaaagcgtggcgtgcccgtcttgaggctcatgatgaacgttcttgctcattattcagtgaggttt

SEQ ID NO: 21551 - DNA, 75 bp, synthetic construct
  source 1..75: mol_type = other DNA
ctggttactgaatatatcaaaggcaccactggttttgataagtttcatgactgtggcgcaatttcggcaatgatt

SEQ ID NO: 21552 - DNA, 75 bp, synthetic construct
  source 1..75: mol_type = other DNA
aactatgccgggcgtccaaccgcgctgaccaaatgccagaacattacagccgggacgaacaccacgctgtatctg

SEQ ID NO: 21553 - DNA, 75 bp, synthetic construct
  source 1..75: mol_type = other DNA
accgcgaagcacggttaaaaggtgaagtacgaaatgaagatggcacgtttatgtcgcccgttaagccccgcacgg

SEQ ID NO: 21554 - DNA, 75 bp, synthetic construct
  source 1..75: mol_type = other DNA
aaaaaatatattcaggaaaagacgaacatttccctgaactatgtctgtggagaatcatctgaagagattatggcc

SEQ ID NO: 21555 - DNA, 75 bp, synthetic construct
  source 1..75: mol_type = other DNA
tgaattatatgaaatgattaagataaacggttatgaaaatacccttacctgtttatctccggagtcactgccttc

SEQ ID NO: 21556 - DNA, 75 bp, synthetic construct
  source 1..75: mol_type = other DNA
gtgctgatttacaacatgcttttctactatctcactcgcatgattgtaagtccccactttgcgcagatattgtgg

SEQ ID NO: 21557 - DNA, 75 bp, synthetic construct
  source 1..75: mol_type = other DNA
atggaatatgagcagcgcaaaggagaactcacccgcctgtcgcaacgctggctcgccaagcgtctggaggcggtc

SEQ ID NO: 21558 - DNA, 75 bp, synthetic construct
  source 1..75: mol_type = other DNA
agaacggcgctaagggtgtgctatccggtgaattttcagaaactacgtttataagctgcccggaatgctttggtg

SEQ ID NO: 21559 - DNA, 75 bp, synthetic construct
  source 1..75: mol_type = other DNA
agtatccaggcgagcaatatcttaatgagctaatcaccaacatagagtttgctgcaagggcaccagttgaagtcg

SEQ ID NO: 21560 - DNA, 75 bp, synthetic construct
  source 1..75: mol_type = other DNA
tgttgatggagtatccggacgagctgttgtgggaatgcaaggaggacgcgctggcgttgatccgccgcgacgcgc

SEQ ID NO: 21561 - DNA, 75 bp, synthetic construct
  source 1..75: mol_type = other DNA
attgccactgtagaaagttcactcataccagaccgaataaatcacaacaaagaaaaaggaaaaatattaagcacc

SEQ ID NO: 21562 - DNA, 75 bp, synthetic construct
  source 1..75: mol_type = other DNA
gccgggcgcaattaacataaataaggacagaaaaacaggcaaagccagtagtacggattatgggttgatgcaaat

SEQ ID NO: 21563 - DNA, 75 bp, synthetic construct
  source 1..75: mol_type = other DNA
ccagcgacgggctatgtaagcttcagcgatgcagctcacgcaataacggactatatcgttggatattacagcgca

SEQ ID NO: 21564 - DNA, 75 bp, synthetic construct
  source 1..75: mol_type = other DNA
gcgctatagagcgcatggtagaagcatatggcttcaagactcgacaggcgttgtgcgatcacttaggaatctcta

SEQ ID NO: 21565 - DNA, 75 bp, synthetic construct
  source 1..75: mol_type = other DNA
ccggacagccccgaaataaaattcagtgatcgcagggcagcccttgaactgatgacgcaaatcgaatcgaccgtg

SEQ ID NO: 21566 - DNA, 75 bp, synthetic construct
  source 1..75: mol_type = other DNA
acggggcagattgctccgcctctctctcttgatggcttcttcgattcggagggcgatcaggtttcaaccgaaaca

SEQ ID NO: 21567 - DNA, 75 bp, synthetic construct
  source 1..75: mol_type = other DNA
tttatgccgtatctggtgtacctggattgattgctgcaaacagcattactaacagtgcttaccagttcggttatg

SEQ ID NO: 21568 - DNA, 75 bp, synthetic construct
  source 1..75: mol_type = other DNA
aaccactctggagagtcagattcagactcaggcagcagattttgataaccgtatctaccagatggaactgcaacg

SEQ ID NO: 21569 - DNA, 75 bp, synthetic construct
  source 1..75: mol_type = other DNA
gcagcaccaccacgggcggtgaaaccacaccgggcgcggtgaaagtcggtaaaggtggcgaatatgccaacctgg

SEQ ID NO: 21570 - DNA, 75 bp, synthetic construct
  source 1..75: mol_type = other DNA
tacgtggtggaagactacgccgccggttgcctggtggaaaaaattaaggtcggtgatttctccacaccggccagg

SEQ ID NO: 21571 - DNA, 75 bp, synthetic construct
  source 1..75: mol_type = other DNA
tatttctcaacagcacctaaccgaggagaaagaaaaggatcatatccattcaatagcccttgccctaatggtact

SEQ ID NO: 21572 - DNA, 75 bp, synthetic construct
  source 1..75: mol_type = other DNA
gaaagccgccgctggctggcatcgtgcggcctgaccgtggagcagatgcaaaaccagatggacccggtgtacacg

SEQ ID NO: 21573 - DNA, 75 bp, synthetic construct
  source 1..75: mol_type = other DNA
gatgacattaccactgttgatattgccaattatcgggatcaacggttggcgcaaattaacccccgaacggggcgt

SEQ ID NO: 21574 - DNA, 75 bp, synthetic construct
  source 1..75: mol_type = other DNA
cctgaacaaatctcagtcttctcttagctctgctattgagcgtctctcttctggcctgcgtattaacagtgctaa

SEQ ID NO: 21575 - DNA, 75 bp, synthetic construct
  source 1..75: mol_type = other DNA
attacaccccggcggagccggatgttgcaggcgcgatgtacctgaagtctgaggatggtcaggactggtatgagt

SEQ ID NO: 21576 - DNA, 75 bp, synthetic construct
  source 1..75: mol_type = other DNA
tacgtcaatgaccgcaaagcagggaccttcagcgttgacctgacaaacgctacgaaggcactgccaacattagca

SEQ ID NO: 21577 - DNA, 75 bp, synthetic construct
  source 1..75: mol_type = other DNA
gtgtgaacgtactggcgaaagacggttcgatgaaaattcaggttggtgcgaatgacggccagactatcactattg

SEQ ID NO: 21578 - DNA, 75 bp, synthetic construct
  source 1..75: mol_type = other DNA
cgaccaccggggcctgccgctggcgctcatcagcgaagacggcaatacggcgtggcgcggggagtatgatgaatg

SEQ ID NO: 21579 - DNA, 75 bp, synthetic construct
  source 1..75: mol_type = other DNA
agacgcgggaatacggctacagcgccacgggcaggctggagagtgtgcgcaccctcgcaccagacctggacatcc

SEQ ID NO: 21580 - DNA, 75 bp, synthetic construct
  source 1..75: mol_type = other DNA
aagcatactggattatattgaacaggaacagttaactgctgaagatcgtaaccattgtatgaaactgtctaaaaa

SEQ ID NO: 21581 - DNA, 75 bp, synthetic construct
  source 1..75: mol_type = other DNA
attgctggcagaactatctacgaaaaaacgggggaacaaatggctattgaaggcgctgcggcgactgttccatta

SEQ ID NO: 21582 - DNA, 75 bp, synthetic construct
  source 1..75: mol_type = other DNA
ttctttctgtattatctttttcacctttcgctcaggatgctaaaccagcagggtcttcaaaagaaaaaattacac

SEQ ID NO: 21583 - DNA, 75 bp, synthetic construct
  source 1..75: mol_type = other DNA
tgaagttagaaaagcatacaatcgttctacttatctcgtgcagcgaattgaattgatggattggtggggagaata

SEQ ID NO: 21584 - DNA, 75 bp, synthetic construct
  source 1..75: mol_type = other DNA
tttaattatatcgaatgtgattacaatcggtggcggcggcacagttggtgtggcggcctcagtccggaacaattt

SEQ ID NO: 21585 - DNA, 75 bp, synthetic construct
  source 1..75: mol_type = other DNA
aggaaattccgcgaaggcggcaaaaacgtccgagacgaacgctaagtcttctgaaacagcagcgggacagagcgc

SEQ ID NO: 21586 - DNA, 75 bp, synthetic construct
  source 1..75: mol_type = other DNA
aatgggggacctttagttttgggggggttagggatgaatatagaggaaatagatcgccacagaattctataaatg

SEQ ID NO: 21587 - DNA, 75 bp, synthetic construct
  source 1..75: mol_type = other DNA
gtggcgcacgtcctcggtgaacgcactctggccacactggagcgtcttctgagcctgctgtcggcctttgaggtc

SEQ ID NO: 21588 - DNA, 75 bp, synthetic construct
  source 1..75: mol_type = other DNA
aaaacgacaaaccgtttatctgcgcgaagttttggataacgccaaattccgcgataatccgtcgccattaaccgt

SEQ ID NO: 21589 - DNA, 75 bp, synthetic construct
  source 1..75: mol_type = other DNA
gatggaatatatgctcgaggacagaaagaaaaacagaataaagaagatggatattcatggagagtaagatacagt

SEQ ID NO: 21590 - DNA, 75 bp, synthetic construct
  source 1..75: mol_type = other DNA
ttttactgacacttatggcacggtctatgatacgaccatgctccaaaatgccctacagaccgaccaagccgagac

SEQ ID NO: 21591 - DNA, 75 bp, synthetic construct
  source 1..75: mol_type = other DNA
atgatgaagatgctctgaaagaaatttttaagcgaagcaatattcgcatggcagggaatgtctgtaatcagatga

SEQ ID NO: 21592 - DNA, 75 bp, synthetic construct
  source 1..75: mol_type = other DNA
tttcgtcatcccgaactcactcgtcaattaagattgataaggaccgttatctctccggcaatcctatcgaggtga

SEQ ID NO: 21593 - DNA, 75 bp, synthetic construct
  source 1..75: mol_type = other DNA
tgaccgtcacggcaggctgacagagaaaaccgacctcatcccggaaggggttatccgcacggatgatgagcggac

SEQ ID NO: 21594 - DNA, 75 bp, synthetic construct
  source 1..75: mol_type = other DNA
gataaaaattgaacgggaagccaccttgcaacctgttaccgttcgtgaggcacttgaatactggcttgataatta

SEQ ID NO: 21595 - DNA, 75 bp, synthetic construct
  source 1..75: mol_type = other DNA
aagctggaattgcgccggaaattcatactggcgatgatgacgcactgaaggagattttaacccatgtcaccgagg

SEQ ID NO: 21596 - DNA, 75 bp, synthetic construct
  source 1..75: mol_type = other DNA
gaaaactggcaccctccgttatttctaaaacgcagggttatgatcctgactcccgtctgagcagagccacgcttg

SEQ ID NO: 21597 - DNA, 75 bp, synthetic construct
  source 1..75: mol_type = other DNA
atggcgggactggtactctcctcgacgctgctcggtcagttgttgttttttgaaattacgggcggctgctcctgg

SEQ ID NO: 21598 - DNA, 75 bp, synthetic construct
  source 1..75: mol_type = other DNA
ctgccgctggcccttatcagcaaggaagggacaacagaatggtgcgcagaatacgatgaatggggcaacctgctg

SEQ ID NO: 21599 - DNA, 75 bp, synthetic construct
  source 1..75: mol_type = other DNA
atgacggtattgttgattacctgataaatggtcgcaaagcagaacgtcagtacacacgtgatgaacttgatcatc

SEQ ID NO: 21600 - DNA, 75 bp, synthetic construct
  source 1..75: mol_type = other DNA
gcccaatcccgatgcaaaatgggaaggatataaagaaattgggcttactgaaaaagagtttgaaaaactcaaaga

SEQ ID NO: 21601 - DNA, 75 bp, synthetic construct
  source 1..75: mol_type = other DNA
agaagttcaggcgttgctgggtgacgcgcaaactatcgccgaccaggaacgttttcgcgcattatcacgcgaata

SEQ ID NO: 21602 - DNA, 75 bp, synthetic construct
  source 1..75: mol_type = other DNA
tatttttatccctgtcaggctgtaatgatgctttggctatccagagtacaatgttttactcgtttaatgataaca

SEQ ID NO: 21603 - DNA, 75 bp, synthetic construct
  source 1..75: mol_type = other DNA
tctcagaacagtccatcgccattctgaaacagattaaggatatcaccggtaataatgaactgatcttccccggcg

SEQ ID NO: 21604 - DNA, 75 bp, synthetic construct
  source 1..75: mol_type = other DNA
gaccagaacgcttaaagatatggggattgaccagaaaaaagaagatcctttacggggcacgaagtacaggggtga

SEQ ID NO: 21605 - DNA, 75 bp, synthetic construct
  source 1..75: mol_type = other DNA
tcagcacgtgccgccagcacgtcagccggacaggccgcgtcgtcggctcagtcagcgtcttccagcgcaggaacg

SEQ ID NO: 21606 - DNA, 75 bp, synthetic construct
  source 1..75: mol_type = other DNA
ccgtcacagtaaccctggctggacagagttttaccactaccgtgcaggccgatggctcctggagtctgacggtac

SEQ ID NO: 21607 - DNA, 75 bp, synthetic construct
  source 1..75: mol_type = other DNA
cgagttacgtttcgcgcgttggggtgaattcgacttcgataaatctctttggcgcatacctgcaaaacgagaaga

SEQ ID NO: 21608 - DNA, 75 bp, synthetic construct
  source 1..75: mol_type = other DNA
ctgcgctcgtttctgatgattttgccgcctcttttgaagccgacgcatcccgggctgaggtggcagcttctgacg

SEQ ID NO: 21609 - DNA, 75 bp, synthetic construct
  source 1..75: mol_type = other DNA
cgaaatggcaagaccagcgcgtggtcggcataatcggtgatgagttgcatgatgggattggcggttgctccagag

SEQ ID NO: 21610 - DNA, 75 bp, synthetic construct
  source 1..75: mol_type = other DNA
gcaccacggatgtgataaacaaccatgctgagaccattggcaacaatcagatgattgcggttaccaacaatcaga

SEQ ID NO: 21611 - DNA, 75 bp, synthetic construct
  source 1..75: mol_type = other DNA
gaagctgcgctactggcgctcgaggatgcgttcgtttctgatgattttgccgcctcttttgaagccgacgcatcc

SEQ ID NO: 21612 - DNA, 75 bp, synthetic construct
  source 1..75: mol_type = other DNA
aaagcatccctgaaggtcatatggtgttagtagatactggacgcgagccagtgaatggaagccttgttgtagcca

SEQ ID NO: 21613 - DNA, 75 bp, synthetic construct
  source 1..75: mol_type = other DNA
atgttattggtgtggtaaacgatgagactgtagatggcagccaaagagtagatgaacgaggtacaacaaataaca

SEQ ID NO: 21614 - DNA, 75 bp, synthetic construct
  source 1..75: mol_type = other DNA
tgtgccgcgctgcgggagctgaacaagtaccgggatattctgcgggatattgccgccaccagagaacagcagcgg

SEQ ID NO: 21615 - DNA, 75 bp, synthetic construct
  source 1..75: mol_type = other DNA
agtcctgcggtaagtggtacatcagtattcagacagaaagtgaagtatcaactccggttcacccttcagcatcaa

SEQ ID NO: 21616 - DNA, 75 bp, synthetic construct
  source 1..75: mol_type = other DNA
cgtaacggtgacgtcagggaatctgcgtttatctggtttaccgtccgtaccgcactgctgcttgtcagcagtatc

SEQ ID NO: 21617 - DNA, 75 bp, synthetic construct
  source 1..75: mol_type = other DNA
atcagaaaaaacatcacgttgccgcatggcgcgccagcggccttacccgtgaacagtactgtgaactttacgaca

SEQ ID NO: 21618 - DNA, 75 bp, synthetic construct
  source 1..75: mol_type = other DNA
aagggcgggactcgtacaacctgaataaatacatctggcgttttatcgccctgagcacggcacaaccgcgcgtga

SEQ ID NO: 21619 - DNA, 75 bp, synthetic construct
  source 1..75: mol_type = other DNA
ttgcgcagtgcgggctgacggtggagcaactggccagacaggtggagccggaatacacaccggcgcgaaaagttc

SEQ ID NO: 21620 - DNA, 75 bp, synthetic construct
  source 1..75: mol_type = other DNA
aaacaagccagagcacctgagattattccagtttcagtgtctggcgctcccggtatggctgatggcagaccattg

SEQ ID NO: 21621 - DNA, 75 bp, synthetic construct
  source 1..75: mol_type = other DNA
gcgagcgcggagctctgctgtacggactaatcgggagctgtcggttgaacggtatcgatccagaagcgtatctgc

SEQ ID NO: 21622 - DNA, 75 bp, synthetic construct
  source 1..75: mol_type = other DNA
gcctgtctcaaatccagagtcgcattaacgaagatcgcttcctcaaaaataacggctccggaaatgaaattggtt

SEQ ID NO: 21623 - DNA, 75 bp, synthetic construct
  source 1..75: mol_type = other DNA
acatattggccacataaagccttatgccagttcatcctctcatcgaaaacatcagcaggtgaagggataacgggc

SEQ ID NO: 21624 - DNA, 75 bp, synthetic construct
  source 1..75: mol_type = other DNA
gtacgctgaatgattttctcggtgccatgacggaggatgatgcccgtcctgaggcactgcgccgttttgaactga

SEQ ID NO: 21625 - DNA, 75 bp, synthetic construct
  source 1..75: mol_type = other DNA
gctggcatcggatgaaatccctgacggtacgcgtgaccgccggggatggtggggagacagttttcgcccgcgtcc

SEQ ID NO: 21626 - DNA, 75 bp, synthetic construct
  source 1..75: mol_type = other DNA
tagtatcacaattagcattggcttgcactctggctatcacctctcaggctaatgcaactacttataacacctgga

SEQ ID NO: 21627 - DNA, 75 bp, synthetic construct
  source 1..75: mol_type = other DNA
tgaccagtttgaaaaatggtgattatacggttacggcctctgtgagctctggttctcaggctaatcaacaggtga

SEQ ID NO: 21628 - DNA, 75 bp, synthetic construct
  source 1..75: mol_type = other DNA
tctagagctcaatctagatgctaattccccatacgtttattataatggttctcgcgatctaactattcaaacaat

SEQ ID NO: 21629 - DNA, 75 bp, synthetic construct
  source 1..75: mol_type = other DNA
ccttgatgaaggcgatttaaagccggatgtagtgaaacgctttgaggaaatggtggcgcaggcgcagcagagcgc

SEQ ID NO: 21630 - DNA, 75 bp, synthetic construct
  source 1..75: mol_type = other DNA
ctgtttcccggtgaggacggttacagccgcagcgagtcactgtggctggtgcgcggcggcgtcctgagactggat

SEQ ID NO: 21631 - DNA, 75 bp, synthetic construct
  source 1..75: mol_type = other DNA
aattgctttattttatttcaaaacagcaaagcaggaggaaaatcgtcgagtcgatttatatttcatctgttactt

SEQ ID NO: 21632 - DNA, 75 bp, synthetic construct
  source 1..75: mol_type = other DNA
tgattgatggcgcaggcatccccatgtccggatgccacataattctgaaatcccgggtaaacacctcagaagtgg

SEQ ID NO: 21633 - DNA, 75 bp, synthetic construct
  source 1..75: mol_type = other DNA
ccgtaatagctggaaaaaccggacagaagtggaactggccacactaacgtgggtggactggtataacaatcgacg

SEQ ID NO: 21634 - DNA, 75 bp, synthetic construct
  source 1..75: mol_type = other DNA
cggctggtgcactacacgcggacacaatatgaagagccgctggtcgaaagtcgctatctttacgacccgctgggc

SEQ ID NO: 21635 - DNA, 75 bp, synthetic construct
  source 1..75: mol_type = other DNA
gaacatggggcgaattgtcgttgatgtcgatggtgttaatctcactgaactgattaacaaggtcgctgaaaacgg

SEQ ID NO: 21636 - DNA, 75 bp, synthetic construct
  source 1..75: mol_type = other DNA
tcgccggcggggattttgtcctgccgcagtatcaggaggaaatacggaaaaatctcgacccacgctaccatgagg

SEQ ID NO: 21637 - DNA, 75 bp, synthetic construct
  source 1..75: mol_type = other DNA
aatcacaactgacaactgtcagagtcccactagatgttatgcaagggatggaatccgttaagctggacggtgaaa

SEQ ID NO: 21638 - DNA, 75 bp, synthetic construct
  source 1..75: mol_type = other DNA
ggggcggtatatcactcaggacccgatagggctggagggggggatggagtctgtatgcgtacccgctgaatccgg

SEQ ID NO: 21639 - DNA, 75 bp, synthetic construct
  source 1..75: mol_type = other DNA
tgagctggaatttgaagacctgcctgaaaccgtgttcaccgccctgaccgaaaaggtgaaatccatttttggccg

SEQ ID NO: 21640 - DNA, 75 bp, synthetic construct
  source 1..75: mol_type = other DNA
tcgcagaccttctgttaactgaagaaaaatcagtatttcgctatcttgaagggcagaataatcctattgttaatg

SEQ ID NO: 21641 - DNA, 75 bp, synthetic construct
  source 1..75: mol_type = other DNA
ggtaatgatccggaggaactgctgaatgatacagaaaccaccgccagtgcgaatattgtccgttatgtactgata

SEQ ID NO: 21642 - DNA, 75 bp, synthetic construct
  source 1..75: mol_type = other DNA
agatgttgatcttacattgaattggggaagactgagtagtattctgcccgactatcatggacaagactccgttcg

SEQ ID NO: 21643 - DNA, 75 bp, synthetic construct
  source 1..75: mol_type = other DNA
ctggaaattacttgtcaacacaagatgttgaagttttacaacgtgcgaccagagatcatcaaatggaaagactca

SEQ ID NO: 21644 - DNA, 75 bp, synthetic construct
  source 1..75: mol_type = other DNA
tcacgactggatcgcctcatttaaacaagccttcagcgaagggcaaacggtcgtcgtgcctgccggattggtttg

SEQ ID NO: 21645 - DNA, 75 bp, synthetic construct
  source 1..75: mol_type = other DNA
gatgaggagtccggcctgtattacaaccgccaccgctattatgacccgctgcaggggaggtatatcactcaggat

SEQ ID NO: 21646 - DNA, 75 bp, synthetic construct
  source 1..75: mol_type = other DNA
aaggcttatacgtcgattaccggcggtaatgaaggcggttatccggtattccagcatatccgccggcttatcgat

SEQ ID NO: 21647 - DNA, 75 bp, synthetic construct
  source 1..75: mol_type = other DNA
gtggcgcacgtattcggtgaacgcacgctggccacgctggagcgtcttctgggcctgctgtcggcctttgaggtc

SEQ ID NO: 21648 - DNA, 75 bp, synthetic construct
  source 1..75: mol_type = other DNA
tcactggcggcaacgccaaaagccgttaaggccgcgtatgacctggctaacgggaaatacaccgcacaggatgca

SEQ ID NO: 21649 - DNA, 75 bp, synthetic construct
  source 1..75: mol_type = other DNA
taaacaaccgagactcaggaatactgcatttttcattatggcaacttgttacagtaacagagtgaatgacataac

SEQ ID NO: 21650 - DNA, 75 bp, synthetic construct
  source 1..75: mol_type = other DNA
agtgctgcaggaaatatcaaaagttcttatgaatgccgcgattgtcaacgggatcaagacggcggcaaacagtat

SEQ ID NO: 21651 - DNA, 75 bp, synthetic construct
  source 1..75: mol_type = other DNA
gctggacaaccgataacggttttatgattaaccacatgacgtcggtaaaaactgtcacagaagggcttgcagaag

SEQ ID NO: 21652 - DNA, 75 bp, synthetic construct
  source 1..75: mol_type = other DNA
gccttacggggagtggccgtaggccggaaaaactggctgttcgcgggttccgacagcggtggtgaacatgcggcg

SEQ ID NO: 21653 - DNA, 75 bp, synthetic construct
  source 1..75: mol_type = other DNA
tgccgtctgtctcgggaaaaagaattcttatgacctttgtcaaatattaagtccaaaaagaccttacgcagctcc

SEQ ID NO: 21654 - DNA, 75 bp, synthetic construct
  source 1..75: mol_type = other DNA
cccggagcaacacctccgccccttccggggtatcctgcaggcggatgcgttcacaggttacgacaggttgttcag

SEQ ID NO: 21655 - DNA, 75 bp, synthetic construct
  source 1..75: mol_type = other DNA
gtctgtgcgaagactactgcgggggcatctggaatctgtacaccctgaacaacggtggcgcatttatggcacctg

SEQ ID NO: 21656 - DNA, 75 bp, synthetic construct
  source 1..75: mol_type = other DNA
cgttatatcgcggattaaagaacctgaaacagtcagactgtatcttggattttacaaactcttattcggggattt

SEQ ID NO: 21657 - DNA, 75 bp, synthetic construct
  source 1..75: mol_type = other DNA
atgcaatgacggctcattattaccgtctgcgggattacgccctgcaacatccggaatacgacgccattatgcgca

SEQ ID NO: 21658 - DNA, 75 bp, synthetic construct
  source 1..75: mol_type = other DNA
cgtgaagtgcaggatattcccggtgtgctggccgtgtttgctgaacgccgtaaggacagttttggcccgtatgtc

SEQ ID NO: 21659 - DNA, 75 bp, synthetic construct
  source 1..75: mol_type = other DNA
ttatggcacccgaaccggatgatgatgacgaaacatgggtactgttcaatgccatgaacggtaaccgcgctgaaa

SEQ ID NO: 21660 - DNA, 75 bp, synthetic construct
  source 1..75: mol_type = other DNA
gcactttggcctcattccacagtgggtgaccctggagccccgtgtcttcggctggatggaccgtctgtgtgaaga

SEQ ID NO: 21661 - DNA, 75 bp, synthetic construct
  source 1..75: mol_type = other DNA
tccggcgtgggaacttaaagaacagtgcagccagtggcaaagcgaaatcacttttattaaccatcgccagaacgc

SEQ ID NO: 21662 - DNA, 75 bp, synthetic construct
  source 1..75: mol_type = other DNA
aaaaacaggtgtaagagcaatcgcctttattgaaagtgaggtggatgcgtggattgaacgagctattcagacatc

SEQ ID NO: 21663 - DNA, 75 bp, synthetic construct
  source 1..75: mol_type = other DNA
tacggataaccctcgatacattgcggagaaaaattatatggaagctttactcaaaaaagcatctccccataccgt

SEQ ID NO: 21664 - DNA, 75 bp, synthetic construct
  source 1..75: mol_type = other DNA
gatgacttcgggcaacccggtaaatccgctgctgggggcgaaggtgctgcccggcgagacggaccttgcgctgcc

SEQ ID NO: 21665 - DNA, 75 bp, synthetic construct
  source 1..75: mol_type = other DNA
atgataaccaggaaacactcgttttcagccagttctctgcacaacgtaaagacgaccgaaccatcggtaacattg

SEQ ID NO: 21666 - DNA, 75 bp, synthetic construct
  source 1..75: mol_type = other DNA
ctggttgccaccctcatccctgatgaacagcgcataagcttctggccgcaacattttggcctcattccacagtgg

SEQ ID NO: 21667 - DNA, 75 bp, synthetic construct
  source 1..75: mol_type = other DNA
cccggattacttgcccgcgtgttaacgggaaaatactgcgaacacctgccactgtatcgtcagagtgaaatcttt

SEQ ID NO: 21668 - DNA, 75 bp, synthetic construct
  source 1..75: mol_type = other DNA
gacgggcgttccgcgaccgtctggcggctaatggcaagaaaggaaaggtgattctcggcgcgatgatgcgcaagc

SEQ ID NO: 21669 - DNA, 75 bp, synthetic construct
  source 1..75: mol_type = other DNA
agccgcagcgaagaagccagccatgccgatctggcctgggcaacgatgcacgcactgtttaacgaaccgctgcag

SEQ ID NO: 21670 - DNA, 75 bp, synthetic construct
  source 1..75: mol_type = other DNA
acaaagctttagtattccaggttcttcagttggtaagattcagtggagaatagtaactgattatggtggagatag

SEQ ID NO: 21671 - DNA, 75 bp, synthetic construct
  source 1..75: mol_type = other DNA
cgcaagcaacggaccatctggttgcagcgatggagacactggatcccagaagtcaggacattatccgcgcgcgct

SEQ ID NO: 21672 - DNA, 75 bp, synthetic construct
  source 1..75: mol_type = other DNA
cgtggacgcaacaaagccgacaaggtggacatcgacctgtcccacagcaatctggcccccggcctgctgtgcgca

SEQ ID NO: 21673 - DNA, 75 bp, synthetic construct
  source 1..75: mol_type = other DNA
tacctgagcagcatacatttgatgttgtgattgacggaaatcagctgcttgggcctgatgaatatatattatcag

SEQ ID NO: 21674 - DNA, 75 bp, synthetic construct
  source 1..75: mol_type = other DNA
tcgatggaaccatcaacaacgaaccagttttactttgcaatgctcgcaatctgcacgcttttcttggtattggta

SEQ ID NO: 21675 - DNA, 75 bp, synthetic construct
  source 1..75: mol_type = other DNA
gcgatggtcgccagccagatgaaacgggcagccaacgacaaagccattgcacagatgttggcatcaaaaaagtcc

SEQ ID NO: 21676 - DNA, 75 bp, synthetic construct
  source 1..75: mol_type = other DNA
ttagcggatgtttgaccgggtctgccgttcgcttcgacggcggacacaagcgtatgggctttgtcatggatgaac

SEQ ID NO: 21677 - DNA, 75 bp, synthetic construct
  source 1..75: mol_type = other DNA
agggatagtttatggggctatatggcattagtatcagatcagggaaatagtgtagccgcaaaaaaggttctgctc

SEQ ID NO: 21678 - DNA, 75 bp, synthetic construct
  source 1..75: mol_type = other DNA
aaacacttccacagccccgactgtatctggtggaggagtgcgctgaagaacagacgaaagccgcacctttaccgg

SEQ ID NO: 21679 - DNA, 75 bp, synthetic construct
  source 1..75: mol_type = other DNA
gtgacctggtttgaactgggggagaacgacaaaaaccagatgctgtacagcatgaaggtgtgcccgccgctgtgg

SEQ ID NO: 21680 - DNA, 75 bp, synthetic construct
  source 1..75: mol_type = other DNA
gtatcataatctttctaacggaaaaacaacgccgattaaagggaggtcagtagttacggttaattactacatgac

SEQ ID NO: 21681 - DNA, 75 bp, synthetic construct
  source 1..75: mol_type = other DNA
cggtttttttgtgcgtgccgtatcgccacgtctttttcgcgtcagaattatggtggggcgtacagggccagcatc

SEQ ID NO: 21682 - DNA, 75 bp, synthetic construct
  source 1..75: mol_type = other DNA
gaggcactgcgccgttttgaactgatggtggaagaggtggcgcgtaacgcgtccgcagtggcacagaacacggca

SEQ ID NO: 21683 - DNA, 75 bp, synthetic construct
  source 1..75: mol_type = other DNA
tggcgatcgccattacgccacgctgaaactatcgacatggagtagcgcgcagcaatccgatgcgtatgccatccg

SEQ ID NO: 21684 - DNA, 75 bp, synthetic construct
  source 1..75: mol_type = other DNA
tgtcggcgactcgagtaccgcgcaggttgatctgcagaagtcgaaaaatgaagtggtcgctgacggcaatgacag

SEQ ID NO: 21685 - DNA, 75 bp, synthetic construct
  source 1..75: mol_type = other DNA
accattaacaccgtctccggcgatgacattatcagtggcgcagaaaaaggtgcgccactgacccttaccggtagc

SEQ ID NO: 21686 - DNA, 75 bp, synthetic construct
  source 1..75: mol_type = other DNA
agtgttaataccgtggcgggcgacgatattcttaataatgccgagcaggccgtcgcgcagatcatctccggacaa

SEQ ID NO: 21687 - DNA, 75 bp, synthetic construct
  source 1..75: mol_type = other DNA
gcggtattgcccgtggggccacgccggaaagcagcggcagctatggattcgtccgtctggagggtgacctgatga

SEQ ID NO: 21688 - DNA, 75 bp, synthetic construct
  source 1..75: mol_type = other DNA
cgggcgcggtgacgggggtgacggacggcgcgggccgccgttttcacctggcgctgaccacgcaggcgcagcggg

SEQ ID NO: 21689 - DNA, 75 bp, synthetic construct
  source 1..75: mol_type = other DNA
ttacacttaaaaataactcggcactggcaaataaagtgacttggaccattgttaatgattatggtggattccagc

SEQ ID NO: 21690 - DNA, 75 bp, synthetic construct
  source 1..75: mol_type = other DNA
ctaacattggttttatgtccaagttgagtaacaaggcagatcataagtattgccatagcctggctaaagaagtgt

SEQ ID NO: 21691 - DNA, 75 bp, synthetic construct
  source 1..75: mol_type = other DNA
cgggtgacggaagagcatgactggggcggcgtggtctggcgttaccgctatgacgccgatggcctgtgtaccgcc

SEQ ID NO: 21692 - DNA, 75 bp, synthetic construct
  source 1..75: mol_type = other DNA
agcctggcggatgcgcttcagcagtccggcggcgaagacggtggcagtgtggtgttcccgccggtgctggtgcag

SEQ ID NO: 21693 - DNA, 75 bp, synthetic construct
  source 1..75: mol_type = other DNA
agcgaaactaatgctaaatccagtgaaacaaacgcggcgaaatctgcggcggacgcacttaattatcgcaaccag

SEQ ID NO: 21694 - DNA, 75 bp, synthetic construct
  source 1..75: mol_type = other DNA
cgacggtgacagtgatacggcggttaacccgtatcacgcccagtacattctgcgccgccgcgacgattacctgga

SEQ ID NO: 21695 - DNA, 75 bp, synthetic construct
  source 1..75: mol_type = other DNA
taagtggaaatcgagaatttatctttcccagccgcatcaagccaaaccagccgatgaacagtcagaccgtaaacg

SEQ ID NO: 21696 - DNA, 75 bp, synthetic construct
  source 1..75: mol_type = other DNA
agcggatttaatgagctgaagtttgatgatgcgacagggagagaacaggtctacatccacgcgcagaagaacatg

SEQ ID NO: 21697 - DNA, 75 bp, synthetic construct
  source 1..75: mol_type = other DNA
aaaaatcacataaattctgggcggtggagcaacagggaaacgagttgcatatcagttggggaaaagttggcacca

SEQ ID NO: 21698 - DNA, 75 bp, synthetic construct
  source 1..75: mol_type = other DNA
tgtgtgtggcgatggcattgagcggtcagacatgggcaactgatacatcgatcctggatataactgatgacaccc

SEQ ID NO: 21699 - DNA, 75 bp, synthetic construct
  source 1..75: mol_type = other DNA
tcctcaacggcgatccggaccagccgatcattatggggcgcacctaccaccaggaaaaccgcacccccggcagcc

SEQ ID NO: 21700 - DNA, 75 bp, synthetic construct
  source 1..75: mol_type = other DNA
ccgatgtggtcaggcagcatacggttccccgttttttactgaagcatttcagtacgccgggaaagggtaagcggc

SEQ ID NO: 21701 - DNA, 75 bp, synthetic construct
  source 1..75: mol_type = other DNA
cggacaggagctctgaacgtcaaaggtgcattagtgtcatctccgtgcatactggatacgccagaagttaacttc

SEQ ID NO: 21702 - DNA, 75 bp, synthetic construct
  source 1..75: mol_type = other DNA
tcgataatctttttgaccgtcagttagattttattatctccccacagcatgtatctgcacgagttcaggaactgg

SEQ ID NO: 21703 - DNA, 75 bp, synthetic construct
  source 1..75: mol_type = other DNA
tttgaagtggcgcagtttgtcgaaaaaccgaatctggaaaccgcccaggcctatgtggcaagcggcgaatattac

SEQ ID NO: 21704 - DNA, 75 bp, synthetic construct
  source 1..75: mol_type = other DNA
tccagtcctagatgtcgagttatcagcgggtaatggatgtttggctgaaatagttgaatcaactgtagactggtt

SEQ ID NO: 21705 - DNA, 75 bp, synthetic construct
  source 1..75: mol_type = other DNA
actgccgtaaaacatggcagctacagttcacttacaccgcctctcagcccggtacacaccagaaaattattgata

SEQ ID NO: 21706 - DNA, 75 bp, synthetic construct
  source 1..75: mol_type = other DNA
gaagcaaggccagagcgatacgaaaaaggagaagtaccaatattgaataccaaagaacatccgtatttgagcaat

SEQ ID NO: 21707 - DNA, 75 bp, synthetic construct
  source 1..75: mol_type = other DNA
caaagatcgtaaaaatttggggcaatagtttactacctgtacttaacaatggagattttgttgctgttgatgttt

SEQ ID NO: 21708 - DNA, 75 bp, synthetic construct
  source 1..75: mol_type = other DNA
cgcacccgattgatggcctgtccggtgaatatgcggagaaatcccttgaagaatgggcggaacagattcgcaaag

SEQ ID NO: 21709 - DNA, 75 bp, synthetic construct
  source 1..75: mol_type = other DNA
tactgacaatcaagcagtggcgcgaaacatacggaccgggtagcaacgttgtactgccagcagaagaagcggaag

SEQ ID NO: 21710 - DNA, 75 bp, synthetic construct
  source 1..75: mol_type = other DNA
cgacggcactttatcgtggttagggaacgccttgtactggatgctgctaccagaaccgccgcagggagtgaatga

SEQ ID NO: 21711 - DNA, 75 bp, synthetic construct
  source 1..75: mol_type = other DNA
aacattgtttgctgtatactcgcaagaacaagtaataataaataaagcatcttctacaattgctttaatatcaag

SEQ ID NO: 21712 - DNA, 75 bp, synthetic construct
  source 1..75: mol_type = other DNA
tggaaaacatggtccgcaccggcgtcgtttcggaggtggatctgaaaaactggcgcattcgcgctaccagcggcg

SEQ ID NO: 21713 - DNA, 75 bp, synthetic construct
  source 1..75: mol_type = other DNA
aagcgttcagtccatatatactagcgtcgcgatttgctacctatacgccgtttttcaatctcaactattttgctt

SEQ ID NO: 21714 - DNA, 75 bp, synthetic construct
  source 1..75: mol_type = other DNA
atggtgctcactggcagcggcatgctttgcactaccgctaacgccgaagagtattatttcgaccccattatgctg

SEQ ID NO: 21715 - DNA, 75 bp, synthetic construct
  source 1..75: mol_type = other DNA
agtgcaggtgtgctgacgctgaaggcagacagtgtcacaaacgacgggcaattacagggaaatgtcaccaccatc

SEQ ID NO: 21716 - DNA, 75 bp, synthetic construct
  source 1..75: mol_type = other DNA
aatcatcctcattttccaccggaatgcaggttcttcgtgctcaaatggccgccagtggtggtggagaaattacag

SEQ ID NO: 21717 - DNA, 75 bp, synthetic construct
  source 1..75: mol_type = other DNA
cttttacttttttatcatgggagcctacttcccgtttttcccgatttggctacatgacatcaaccatatcagcaa

SEQ ID NO: 21718 - DNA, 75 bp, synthetic construct
  source 1..75: mol_type = other DNA
atgtttatgatcccccggaacgttttatcgcttacataaaaaaaaacagagaaaatctgaacatcacactttcag

SEQ ID NO: 21719 - DNA, 75 bp, synthetic construct
  source 1..75: mol_type = other DNA
ctatcgaagactgtctgaacacgctatcccgtttctctgtcgcaagcagttttgttgagtattgcgatttacgta

SEQ ID NO: 21720 - DNA, 75 bp, synthetic construct
  source 1..75: mol_type = other DNA
tggcatcacaatggtatttatcgcgccctcatcctctgcgcaggacaagccagccagcactgacaataccaatgt

SEQ ID NO: 21721 - DNA, 75 bp, synthetic construct
  source 1..75: mol_type = other DNA
gggaaagaagtaccttacggtacgaaaggaagtacccgacctgattggtgtaatggtaatacatgtggtattgag

SEQ ID NO: 21722 - DNA, 75 bp, synthetic construct
  source 1..75: mol_type = other DNA
caacgttctgttgaacagagtcttgagcaactttctaacatatcgtcagagttcgaacgatcaagtcaactacga

SEQ ID NO: 21723 - DNA, 75 bp, synthetic construct
  source 1..75: mol_type = other DNA
cactacagccatcatgcgctatgcagtgcaaagtgggttaattgattataacccggcacaagagatggctggggc

SEQ ID NO: 21724 - DNA, 75 bp, synthetic construct
  source 1..75: mol_type = other DNA
ttatcgaatattagcattgaagataaagcaagattaaaattacgaggaaaaaggtttcttggggatatgattggg

SEQ ID NO: 21725 - DNA, 75 bp, synthetic construct
  source 1..75: mol_type = other DNA
tcatcagagttgaaactgccaccggtgaactggccagaacgcagcgccgcagcctggcggatgcgcttcagcagt

SEQ ID NO: 21726 - DNA, 75 bp, synthetic construct
  source 1..75: mol_type = other DNA
ggcccgattgttgaagccctgtccaaaatgctggctgcgggcgttaacttcatggttgtccatgacatgctgccg

SEQ ID NO: 21727 - DNA, 75 bp, synthetic construct
  source 1..75: mol_type = other DNA
cggggttttatgagagcacgcgcccggttgttgtttacagaaacagtgatggttcttttcaatgtggttttgtta

SEQ ID NO: 21728 - DNA, 75 bp, synthetic construct
  source 1..75: mol_type = other DNA
agtcgtggtgtccccccaaaaaaactgctgaatgaaatgattgagcaggcgtaccaggactttgtggcaaatgag

SEQ ID NO: 21729 - DNA, 75 bp, synthetic construct
  source 1..75: mol_type = other DNA
cccgcaaggccattaccgaagtgaagaagatggagaaccgtgacgcagtggaggcgaccgtctggggcgcgtact

SEQ ID NO: 21730 - DNA, 75 bp, synthetic construct
  source 1..75: mol_type = other DNA
atgtttttctggcctatctggcggagcgcggcgtcgataaaacgatcctcaaaaaactctgtatcgataatcccg

SEQ ID NO: 21731 - DNA, 75 bp, synthetic construct
  source 1..75: mol_type = other DNA
gcagtcacagcagcggggaatgcagaggaaagctcgacccgtgccggagagtctgaaaaagccgccggagctgat

SEQ ID NO: 21732 - DNA, 75 bp, synthetic construct
  source 1..75: mol_type = other DNA
atgtctcaggctgagcgtcgttatgaccgcctgtctgtccggctttctctgattatcagccgtctgctcgcgggt

SEQ ID NO: 21733 - DNA, 75 bp, synthetic construct
  source 1..75: mol_type = other DNA
gtccggcggcgaagacggtggcagtgtggtgttcccgccggtgctggtgcagatgctcgaccggctggaaagtga

SEQ ID NO: 21734 - DNA, 75 bp, synthetic construct
  source 1..75: mol_type = other DNA
ggggagcgaggaccgcagggaataccaggcctgaagggggataccggagagcgggggcctaaaggggaccagggg

SEQ ID NO: 21735 - DNA, 75 bp, synthetic construct
  source 1..75: mol_type = other DNA
acgggatgaggcccgaaaactgatttcggaggggattgacccttgcgaacagaaaagagctaaaaaagtagtccc

SEQ ID NO: 21736 - DNA, 75 bp, synthetic construct
  source 1..75: mol_type = other DNA
gcgctgcgcgttatgggttatgacacgaaggtagaggtttgtgggcacggtttcaggacaatggcctgtagttca

SEQ ID NO: 21737 - DNA, 75 bp, synthetic construct
  source 1..75: mol_type = other DNA
tggtgctgggagagaatattctttcctgtgacacggaaagaagcatcagagagcggttttctgaatatcaggtca

SEQ ID NO: 21738 - DNA, 75 bp, synthetic construct
  source 1..75: mol_type = other DNA
attccgggcgatggcgtgcagtgcattgattgaatcaggtttgtggtcccgcgatgctgtggaacgtcagatgag

SEQ ID NO: 21739 - DNA, 75 bp, synthetic construct
  source 1..75: mol_type = other DNA
agtagccgaggtcaccatgacgcctgaaagaaacggctcgtatactgtaaaagcatccctagcgaatggagcttc

SEQ ID NO: 21740 - DNA, 75 bp, synthetic construct
  source 1..75: mol_type = other DNA
atgtttagcataagaaccctactacctattagcgccagcgtatcagttccgacaaaacaatctcaatccatccca

SEQ ID NO: 21741 - DNA, 75 bp, synthetic construct
  source 1..75: mol_type = other DNA
caaactggccgataacggtactcccgtccggcccggtcagaatatcgtgacgccggagattatgacgctccagct

SEQ ID NO: 21742 - DNA, 75 bp, synthetic construct
  source 1..75: mol_type = other DNA
ataacaatcgcattccgctggtacagattgaaatcaataattcaatggccgtgaccggcactccaccacagcgtc

SEQ ID NO: 21743 - DNA, 75 bp, synthetic construct
  source 1..75: mol_type = other DNA
cggtcccggctggaaagcgccctctgatatccacttacagttacgcgataacgaactgatactcaatgataacgg

SEQ ID NO: 21744 - DNA, 75 bp, synthetic construct
  source 1..75: mol_type = other DNA
tgagcagcaggagatcataaaagaactaaaaaacaaaaaagaggctatggaagatcttgtcgcacgttggttggc

SEQ ID NO: 21745 - DNA, 75 bp, synthetic construct
  source 1..75: mol_type = other DNA
tacacgacgcggtatgagtacgaccggtacggtcaacaaatcgccgttcaccgggaagaaggcatcagcacttac

SEQ ID NO: 21746 - DNA, 75 bp, synthetic construct
  source 1..75: mol_type = other DNA
ccactgttaattaccggttcgataaatgcaagtggactggtatttatcgactcatattacgataatccgtctacg

SEQ ID NO: 21747 - DNA, 75 bp, synthetic construct
  source 1..75: mol_type = other DNA
tcactgttacgtactcaaatgttagaaatcattaatggtttcgattattacaaaggtctttatggttcgggtaaa

SEQ ID NO: 21748 - DNA, 75 bp, synthetic construct
  source 1..75: mol_type = other DNA
ggagccgcagccaaaagcggccacccgtaccccgcgtaagacccggagcgtgacaccggcaaaacgtggacgccc

SEQ ID NO: 21749 - DNA, 75 bp, synthetic construct
  source 1..75: mol_type = other DNA
gcatgtttatgagtgtagtaagtgctgggttgtcgtggtatatcactaagccaaaaccacaaaaggctgaggtcg

SEQ ID NO: 21750 - DNA, 75 bp, synthetic construct
  source 1..75: mol_type = other DNA
aatagataaccacgggaaggaaataacaaacagaaaaggattacctaatgtctgcagagttcatggtaatatgta

SEQ ID NO: 21751 - DNA, 75 bp, synthetic construct
  source 1..75: mol_type = other DNA
ggggtggggtatagccatagtgccggtgtggaatccccgtggaacgcggtagctggtgtgaactggtcgttctga

SEQ ID NO: 21752 - DNA, 75 bp, synthetic construct
  source 1..75: mol_type = other DNA
gctgtttacttcttcctcttccggttgccatattcattgggtgcttactttctcaggacgatgaccgattttttg

SEQ ID NO: 21753 - DNA, 75 bp, synthetic construct
  source 1..75: mol_type = other DNA
ctcgccggagatatggccgggacggcgaattgtgctgacggggcatccgcaggcgaacctgaaccgggaatggca

SEQ ID NO: 21754 - DNA, 75 bp, synthetic construct
  source 1..75: mol_type = other DNA
cgtctggatgtgatgtgtacaccggatctggttaaccagttccgcttcatggccgcgcagatccgtttcattttg

SEQ ID NO: 21755 - DNA, 75 bp, synthetic construct
  source 1..75: mol_type = other DNA
tgcagacgcttgttgcggcggctggttcaggagagctgcaaaaactgaccagagaattgcagggggcaaggggag

SEQ ID NO: 21756 - DNA, 75 bp, synthetic construct
  source 1..75: mol_type = other DNA
ccatccagcaggccatcagacgcaccgaacagtacaacaaccagcttgaacgcgaacggcaggcgcttgcgcgtg

SEQ ID NO: 21757 - DNA, 75 bp, synthetic construct
  source 1..75: mol_type = other DNA
cgtgagcgccgtaatgcctggcgacgcgggaaaaagcagacgttcagggaatatattgcgcagatgtcgattgcc

SEQ ID NO: 21758 - DNA, 75 bp, synthetic construct
  source 1..75: mol_type = other DNA
acgcgccgtaacgctcactccggcacaggcagaatatctgataacagggaaaatattacccactgtgttattcag

SEQ ID NO: 21759 - DNA, 75 bp, synthetic construct
  source 1..75: mol_type = other DNA
agcagaagcagacgataagtacgttggcaaccgtttcagcagggctgaccggcggtctaaccggaaacagcaccg

SEQ ID NO: 21760 - DNA, 75 bp, synthetic construct
  source 1..75: mol_type = other DNA
cgcgaaaaacatccgtcaaacaaacgctgatcaatcctggcgacgttacggttgtcatttatgagccctctgtgg

SEQ ID NO: 21761 - DNA, 75 bp, synthetic construct
  source 1..75: mol_type = other DNA
gaaacaaacgctgaatatcttgtccgtaagttcggtgaacttgaatcaaaactggaaacggcgttgcgggagtgt

SEQ ID NO: 21762 - DNA, 75 bp, synthetic construct
  source 1..75: mol_type = other DNA
cagaagatattctcaatgaaattattgctggtgcaaatacctcgcttgagcaacttcttgcgttagcactgagag

SEQ ID NO: 21763 - DNA, 75 bp, synthetic construct
  source 1..75: mol_type = other DNA
caggtgctggttcattcggatcagggcagtcagtacacaagccatgagtggcagtcgttcctgaaatcacacggc

SEQ ID NO: 21764 - DNA, 75 bp, synthetic construct
  source 1..75: mol_type = other DNA
tcagataagttcctgaaaaggaaaaaacggtctcctgtagctgaagataaagttcaaaactcgttaacaccagaa

SEQ ID NO: 21765 - DNA, 75 bp, synthetic construct
  source 1..75: mol_type = other DNA
taaacctctttctcgaccggtagatcacggtttccgcgataactgcgaatgctctagttgccagaccacggcccg

SEQ ID NO: 21766 - DNA, 75 bp, synthetic construct
  source 1..75: mol_type = other DNA
aattacatcgcggtaacttcaccgctatcggtcggcagatccagccttatctggaggacggcaaatgctttcgca

SEQ ID NO: 21767 - DNA, 75 bp, synthetic construct
  source 1..75: mol_type = other DNA
actcgcttgaacaaatcattcccggtacagctgctgaatttgatttcaatcatcagcgacttaatttgagcattc

SEQ ID NO: 21768 - DNA, 75 bp, synthetic construct
  source 1..75: mol_type = other DNA
ctggcaccggtgccggcttctccggcaatcacggctccggtggcacaaccggctaagggaggcttcctgaaaaaa

SEQ ID NO: 21769 - DNA, 75 bp, synthetic construct
  source 1..75: mol_type = other DNA
ggccggtcagactgcggagcgcgctgcagatgatggcggggccggcatggcagcttgaggtggatgatgtgcagc

SEQ ID NO: 21770 - DNA, 75 bp, synthetic construct
  source 1..75: mol_type = other DNA
catcaactgaatacagaacagcggaagccgctgaacctaaaagcataataatgaaagtatggtcgggtgaaaatt

SEQ ID NO: 21771 - DNA, 75 bp, synthetic construct
  source 1..75: mol_type = other DNA
cccgcgaacccgcgaagaatgaaagcaccacggtgaagcgtaagcgcaggactaagaagcagaagaaagagccgg

SEQ ID NO: 21772 - DNA, 75 bp, synthetic construct
  source 1..75: mol_type = other DNA
tcacgttctgggcgtcagtgacgacagccggtatcggcgtgatgacgctgagcgaaaaaattgccgtggccggtt

SEQ ID NO: 21773 - DNA, 75 bp, synthetic construct
  source 1..75: mol_type = other DNA
aacgaaacaccattgcaaaggatatgcgtgcactgcatgaaaaaattggtgataacgcatggactgatgagcaac

SEQ ID NO: 21774 - DNA, 75 bp, synthetic construct
  source 1..75: mol_type = other DNA
cccacaatatccgatgatcgagatcaacggaaactgcaaaatcatcggcgtagttgtcgatgcaaaactagcaaa

SEQ ID NO: 21775 - DNA, 75 bp, synthetic construct
  source 1..75: mol_type = other DNA
tggttccaaatgggtaggttcagcaactacatcagcgaatgttgacgttgactctactgtatcgactgactggta

SEQ ID NO: 21776 - DNA, 75 bp, synthetic construct
  source 1..75: mol_type = other DNA
atcaggcggagttcagcatcaaagcaatgtgccgtgtgctccgggtggcccgcagcggctggtatacatggtgtc

SEQ ID NO: 21777 - DNA, 75 bp, synthetic construct
  source 1..75: mol_type = other DNA
cggcaagtttacggatggtaaagcgttattccatgccgatcataaaaatcttattgcgaaggatatggacatgga

SEQ ID NO: 21778 - DNA, 75 bp, synthetic construct
  source 1..75: mol_type = other DNA
cttcgcagatgaggttatacccgcgattacagcaatggcccgaattgaatcaaaacgaatcggagatttttcaaa

SEQ ID NO: 21779 - DNA, 75 bp, synthetic construct
  source 1..75: mol_type = other DNA
tgatggcccggaagcggttgatttagtggtgctgctggcgattccccccaatgaagcgggtactacgcatatgca

SEQ ID NO: 21780 - DNA, 75 bp, synthetic construct
  source 1..75: mol_type = other DNA
tgtctcggtaaaggcaggggctaccaacattattgtgctggaagccaattttgaacatggtgtaaaaacgacaca

SEQ ID NO: 21781 - DNA, 75 bp, synthetic construct
  source 1..75: mol_type = other DNA
atccgggacaatacgtattactactgtagaacatgcagcaaaaacgatattgttaccagcaatgcgcacattcct

SEQ ID NO: 21782 - DNA, 75 bp, synthetic construct
  source 1..75: mol_type = other DNA
ttcccggtaacagcaataccagcagtactgagacaaccgccccggaggttgcacaccagtcagaacgtctgcctg

SEQ ID NO: 21783 - DNA, 75 bp, synthetic construct
  source 1..75: mol_type = other DNA
accggctgaccacaatacagaacgacagaacccgcatccagacgatttatcagccggggagcttcacgccactca

SEQ ID NO: 21784 - DNA, 75 bp, synthetic construct
  source 1..75: mol_type = other DNA
gcagcagaattattttcagggatacggcacattgctattaatattttgacgaatgataaggtattcaaggcaggg

SEQ ID NO: 21785 - DNA, 75 bp, synthetic construct
  source 1..75: mol_type = other DNA
atcgtgcggcctgaccgtggagcagatgcaaaaccagatggacccggtgtacacgccggcgcgaaaaatccacct

SEQ ID NO: 21786 - DNA, 75 bp, synthetic construct
  source 1..75: mol_type = other DNA
taactgaattagcagatttttgcaacgcacaaagaattcctttgagtgctatggaacgagcccataagaaaggaa

SEQ ID NO: 21787 - DNA, 75 bp, synthetic construct
  source 1..75: mol_type = other DNA
tggaaatgccgtataattatgaggatatcatattgattaataatgaatggcagtatgagtttttccgtctccgtt

SEQ ID NO: 21788 - DNA, 75 bp, synthetic construct
  source 1..75: mol_type = other DNA
cacgaagcattgcgcctgcaggttcgactgcccgcgagcgtggaacttgacgatctgctacaggcgggcggcatt

SEQ ID NO: 21789 - DNA, 75 bp, synthetic construct
  source 1..75: mol_type = other DNA
agtgcaagtgtgattgacagaaatggaaatgctaacggtgatactaatgttactggaaaaaactttgctgttggt

SEQ ID NO: 21790 - DNA, 75 bp, synthetic construct
  source 1..75: mol_type = other DNA
cgtcagattgaatttctgcgtatggggatggatatcaatgcctggctggtttcccggtcaatgtggaatacggac

SEQ ID NO: 21791 - DNA, 75 bp, synthetic construct
  source 1..75: mol_type = other DNA
atgaatgcgctttgaagggaatgcttctacaaggaaatcatcaatgcttaaagaaaacttcaacgaactgcaaat

SEQ ID NO: 21792 - DNA, 75 bp, synthetic construct
  source 1..75: mol_type = other DNA
gacagctgtttttaatgcagacaacagtgtcgctctggggtatggctctcaggtgaatggagaaagcaatgtact

SEQ ID NO: 21793 - DNA, 75 bp, synthetic construct
  source 1..75: mol_type = other DNA
ccgaagcgaaagccaaatgtctaaatcagaaagatggtaaacaaaaatatgtagttgttgagcaatggttgaaga

SEQ ID NO: 21794 - DNA, 75 bp, synthetic construct
  source 1..75: mol_type = other DNA
ccaccggtcttattaactgtattgcattttcagcacaggcagtggatacgacgattactgtgacgggtaatgttt

SEQ ID NO: 21795 - DNA, 75 bp, synthetic construct
  source 1..75: mol_type = other DNA
gcgccaggtgtttaaggaaaaagtacagcagcgcccactgaaccaacagcaacgtgataacgcccgccagcgtgt

SEQ ID NO: 21796 - DNA, 75 bp, synthetic construct
  source 1..75: mol_type = other DNA
ctccagacgggagaatgatgtagttgagttaataaagcaggacccttcgagtctttcgccatttgctcagattgt

SEQ ID NO: 21797 - DNA, 75 bp, synthetic construct
  source 1..75: mol_type = other DNA
atgccttatgtatgtaatgaatcgatttcatacttgcttggtgaaaaagggatactgaaagaaatagatgacctt

SEQ ID NO: 21798 - DNA, 75 bp, synthetic construct
  source 1..75: mol_type = other DNA
gaaactgaaattgaaagcttatttcgcgtcacccggttattgaaagagcaggggaccggcattgtgtatatctcc

SEQ ID NO: 21799 - DNA, 75 bp, synthetic construct
  source 1..75: mol_type = other DNA
cgctgtaccgtcagtcggaaatctatgcccgccagggcgtggagctgcaccgcaatacgatggggcgctgggttg

SEQ ID NO: 21800 - DNA, 75 bp, synthetic construct
  source 1..75: mol_type = other DNA
agttctacagcaaacagcaaggtcagacaccgcaaatgtagtaactcagacggggcaatcgcaagccaacaggat

SEQ ID NO: 21801 - DNA, 75 bp, synthetic construct
  source 1..75: mol_type = other DNA
aaggcgggcgggcagcccgccaggcccggatgctcatcagttacagcgaagtcagcataaaaaatcccgacaaca

SEQ ID NO: 21802 - DNA, 75 bp, synthetic construct
  source 1..75: mol_type = other DNA
cgggaaggccggagatgcgctaccgctacgacgataccgggcgggtggtggagcagctgaacccggcaggcctga

SEQ ID NO: 21803 - DNA, 75 bp, synthetic construct
  source 1..75: mol_type = other DNA
gggcggacgcaacgttatcattatgacctgaccggaaaactcacgcagagtgaagatgaggggcttgtcaccctc

SEQ ID NO: 21804 - DNA, 75 bp, synthetic construct
  source 1..75: mol_type = other DNA
tgccaggcttaatcgattgtgccgccttagtaatttttcactagggcagcgcacactattgaagttttgcccggt

SEQ ID NO: 21805 - DNA, 75 bp, synthetic construct
  source 1..75: mol_type = other DNA
agatggaaggtaagtttgtcgaatggggccgacctccaacgcttgacggtatgaccggtcacgctggtgagctgc

SEQ ID NO: 21806 - DNA, 75 bp, synthetic construct
  source 1..75: mol_type = other DNA
gagtcggacgctgatgtgtgtttcgcaatacgcaatgctggaagcgataattgaattcttacgcgaggagtgctg

SEQ ID NO: 21807 - DNA, 75 bp, synthetic construct
  source 1..75: mol_type = other DNA
caaaagagtccaacgctttttatcgccgtaacctggccgccgggcaaaaaggtctttccgttgcgtttgaccttg

SEQ ID NO: 21808 - DNA, 75 bp, synthetic construct
  source 1..75: mol_type = other DNA
gccggcgcgaaaaatccacctgtaccactgcgaccatcgcggcctgccgctggcgcttgtcagcacggaaggggc

SEQ ID NO: 21809 - DNA, 75 bp, synthetic construct
  source 1..75: mol_type = other DNA
tgagcagggaatcaatcgcagtttcaatgattgtaggaagagataattgtgcttttgaccttgacagaggtaact

SEQ ID NO: 21810 - DNA, 75 bp, synthetic construct
  source 1..75: mol_type = other DNA
ataatgtattaaaatataaagaagttcatttcctttcgtgcagggcgctccgcttaactcaggggtacatcatat

SEQ ID NO: 21811 - DNA, 75 bp, synthetic construct
  source 1..75: mol_type = other DNA
cgacaaaacatcatcagaaatgagaaaataccttaaaagcatcaacgagtgtatgttccttatgaaaaacatagc

SEQ ID NO: 21812 - DNA, 75 bp, synthetic construct
  source 1..75: mol_type = other DNA
accgcagcgggctggccgggctgttccccggtcttgaccgacgactggtgaataccctgctgatgtgtgatgaag

SEQ ID NO: 21813 - DNA, 75 bp, synthetic construct
  source 1..75: mol_type = other DNA
accaagcataattacaatgtggatatgaccgctgggggacgtatagactcaactccttacaaagaaaatgtaggg

SEQ ID NO: 21814 - DNA, 75 bp, synthetic construct
  source 1..75: mol_type = other DNA
gggatcacgaactctacaaagccgcaggcctcatgattgttgctggactagtggacagcaaaaccggaaaaccaa

SEQ ID NO: 21815 - DNA, 75 bp, synthetic construct
  source 1..75: mol_type = other DNA
ctcacacagagtgaggatgagggacttgtcatcctctggtactacgatgaatcggaccgtatcactcaccgcacg

SEQ ID NO: 21816 - DNA, 75 bp, synthetic construct
  source 1..75: mol_type = other DNA
atccaagaccttcaaatagcatgaaggatctgaatgataacgccctggcgtacgatgatttcctgaacagcgaaa

SEQ ID NO: 21817 - DNA, 75 bp, synthetic construct
  source 1..75: mol_type = other DNA
gatcagcccgtcattccatctgaaggtgatccgtactttcgatatggtaaccagcgcaccggaaaaattatccgg

SEQ ID NO: 21818 - DNA, 75 bp, synthetic construct
  source 1..75: mol_type = other DNA
tgataggattttccagtacatcatatttcattaggctttttgtaaaacattttggcataacaccaaaacaattct

SEQ ID NO: 21819 - DNA, 75 bp, synthetic construct
  source 1..75: mol_type = other DNA
tgcttatccctctggctaatgttcttggctgtgatccaatgttgttattgactgatgcttataaacaaaatcagg

SEQ ID NO: 21820 - DNA, 75 bp, synthetic construct
  source 1..75: mol_type = other DNA
atgattattggtaatgaatccgtcgatctggctccgctgtttagtctgcacgactctcgcaacttcctgttaact

SEQ ID NO: 21821 - DNA, 75 bp, synthetic construct
  source 1..75: mol_type = other DNA
gaactgggggaagtcaaaagccaccttgaacagctcgacagcgtagggagtgccgccgtggtgtgccaccaggga

SEQ ID NO: 21822 - DNA, 75 bp, synthetic construct
  source 1..75: mol_type = other DNA
cagatcggactgaatgacaacttttttgaagcggggggcggctcaatccagatcgtgctgttgcatcgccgtatt

SEQ ID NO: 21823 - DNA, 75 bp, synthetic construct
  source 1..75: mol_type = other DNA
cttccgccatgtttgattccggtgcctatatcgacctgattggcaagtatgttcaccatgataatgagtacactg

SEQ ID NO: 21824 - DNA, 75 bp, synthetic construct
  source 1..75: mol_type = other DNA
tgagcaggttaaacgtgaaaatccgccagttgaaacgggagcatggaaagacgccgttgactgggtgcttaaaca

SEQ ID NO: 21825 - DNA, 75 bp, synthetic construct
  source 1..75: mol_type = other DNA
tcatctgtaaagggaaaattccggcttatcttggttccagctttgcctttatttcaccggtattgttactgttgc

SEQ ID NO: 21826 - DNA, 75 bp, synthetic construct
  source 1..75: mol_type = other DNA
aaaatgacacccgttttgccgtcgattttacctggcaacctggcagcgcaatgcagaaacagcttgacccgaatg

SEQ ID NO: 21827 - DNA, 75 bp, synthetic construct
  source 1..75: mol_type = other DNA
acgccgttgactgggtgcttaaacaagcttgtcaggctgtaaacactggcatcaatgaaagaagaacaattgaag

SEQ ID NO: 21828 - DNA, 75 bp, synthetic construct
  source 1..75: mol_type = other DNA
aatcagtgttgttagctctggctgccgaaaaaggtcaggcgtgggttgccaacgcaattactgaagaatatttgc

SEQ ID NO: 21829 - DNA, 75 bp, synthetic construct
  source 1..75: mol_type = other DNA
tctgtgggggctggcctgtatgcttccgccatgtttgattccggtgcctatatcgacctgattggcaagtatgtt

SEQ ID NO: 21830 - DNA, 75 bp, synthetic construct
  source 1..75: mol_type = other DNA
atggcaaacactgctgagatattcaattttccagtgccggatgtggcacaaaaggagccgcgcgtggcagatctc

SEQ ID NO: 21831 - DNA, 75 bp, synthetic construct
  source 1..75: mol_type = other DNA
cgttgcatcagcgatcgttctgttcgaccagatgaatcgtggtggtccggcgggtaattccgtggctgtgcattg

SEQ ID NO: 21832 - DNA, 75 bp, synthetic construct
  source 1..75: mol_type = other DNA
atcgtctgaatgccgaaccgacggtgttccggggattcaccacgccagagctgggtctggccgcactgagcggtg

SEQ ID NO: 21833 - DNA, 75 bp, synthetic construct
  source 1..75: mol_type = other DNA
cgacagggcatcatggtcggccccctgatcgtatggatgaattggataattttctgcctgaagacaaagctgcag

SEQ ID NO: 21834 - DNA, 75 bp, synthetic construct
  source 1..75: mol_type = other DNA
ggctctaaattctttgggtttgatatggataacgaatacatcggcgggttcgatgttggagcatgggggacaata

SEQ ID NO: 21835 - DNA, 75 bp, synthetic construct
  source 1..75: mol_type = other DNA
ggcggtcggatatgcttccagcctacgatcaagcccggcaacgtcatgatttaccgctattggccagcacaatcc

SEQ ID NO: 21836 - DNA, 75 bp, synthetic construct
  source 1..75: mol_type = other DNA
ttcaatggacgtggacatctataaccttcatccggcacacgctaaacgcattgaggaaattatcgctgaaaataa

SEQ ID NO: 21837 - DNA, 75 bp, synthetic construct
  source 1..75: mol_type = other DNA
acaaatgagtttgaaaaatacgttcgaggccattgctcgcgaatggcatcagtcaaaagccgatcggtggtcatt

SEQ ID NO: 21838 - DNA, 75 bp, synthetic construct
  source 1..75: mol_type = other DNA
agccggttttaatagtgcatggattgaaatgcaacttgcccacgttgataagaacagcattcgcggtgtatacaa

SEQ ID NO: 21839 - DNA, 75 bp, synthetic construct
  source 1..75: mol_type = other DNA
gttgagcttgttcatgaattgaccaacacccagaatttgggtgttgacccggtgagtgtgattcatgggggaaat

SEQ ID NO: 21840 - DNA, 75 bp, synthetic construct
  source 1..75: mol_type = other DNA
aaaacatcatcctctggtctttatcggtaggaacgatcctcgcaagccaattagtaaggaaagcattaaccaagt

SEQ ID NO: 21841 - DNA, 75 bp, synthetic construct
  source 1..75: mol_type = other DNA
atcagaatcaggagcaggccagagaatctgcacgccagtatgccgcaacaatcgacgaaattcgccagaaaacgt

SEQ ID NO: 21842 - DNA, 75 bp, synthetic construct
  source 1..75: mol_type = other DNA
ggaatatgctttccgcttcattgacttatttgctggaattggagggatacggaaaggttttgaggccattggagg

SEQ ID NO: 21843 - DNA, 75 bp, synthetic construct
  source 1..75: mol_type = other DNA
aacgtcttcgtcaactggctggcctgctggggcgcgaggcggatatgtcggggagtgctgcggatattgcgcaac

SEQ ID NO: 21844 - DNA, 75 bp, synthetic construct
  source 1..75: mol_type = other DNA
gtatacctcggcaaacctgagtgcgtacagcaacagtattgtggatacgcccacgtactttgcctttgcaaaagg

SEQ ID NO: 21845 - DNA, 75 bp, synthetic construct
  source 1..75: mol_type = other DNA
gcgtatcctgacgcccgccactggctggtgctgtgcggtcatggtaataacggcggcgatggctacgtggtcgcg

SEQ ID NO: 21846 - DNA, 75 bp, synthetic construct
  source 1..75: mol_type = other DNA
acagaacgccccgcgtcacagccagtaccaaccacacagataaccagtcggatggccggaaatatcagggcgtta

SEQ ID NO: 21847 - DNA, 75 bp, synthetic construct
  source 1..75: mol_type = other DNA
cagaaacgtcagtcgcctggacgaattacgcaatattatcgaagtcagaaaatggcaggtgaatcaggccgccgg

SEQ ID NO: 21848 - DNA, 75 bp, synthetic construct
  source 1..75: mol_type = other DNA
cgcacgatgggctggaccgagtaccagcaggtacgctacgccaccgcacgctcagtcttcaaatgggatggcacc

SEQ ID NO: 21849 - DNA, 75 bp, synthetic construct
  source 1..75: mol_type = other DNA
cattggtgaacaagaagagcaggcactgaaaaagatcgcccaggcgcttcagttgtcactggatgcttatctcta

SEQ ID NO: 21850 - DNA, 75 bp, synthetic construct
  source 1..75: mol_type = other DNA
gccagcagagcttccaccgttgcatcctttggcgcttcccgcaaaaggcggtgaagcgatggtgagtcgtgcagc

SEQ ID NO: 21851 - DNA, 75 bp, synthetic construct
  source 1..75: mol_type = other DNA
tggaacggcgtaataaacgaacaggcaggacagagaaagcgcggatctgggaagtgacggacagaacggtcagga

SEQ ID NO: 21852 - DNA, 75 bp, synthetic construct
  source 1..75: mol_type = other DNA
gctgtctgatattgcgggtactccagaggcggtcgatgttctgtgtctgtgccttgatattgccgatcaggacgg

SEQ ID NO: 21853 - DNA, 75 bp, synthetic construct
  source 1..75: mol_type = other DNA
gagaaaactattgctgcgcttcctgcttttgcaccgttctctggtgagattgcccagatgagcgccaatatccgc

SEQ ID NO: 21854 - DNA, 75 bp, synthetic construct
  source 1..75: mol_type = other DNA
gattccgctcgagcgacgtaataagcgtaccggcagaaccgaaaaggcgcgtatctgggaggtcactgaccggac

SEQ ID NO: 21855 - DNA, 75 bp, synthetic construct
  source 1..75: mol_type = other DNA
tataactggacattcgacgcatctcgctcagttcgcacagcatctgaaacccgctcccgtaacatcgcctttaat

SEQ ID NO: 21856 - DNA, 75 bp, synthetic construct
  source 1..75: mol_type = other DNA
tattcggcggcctgtttttttcctgcagcgtgatggccggagccggtacgctggcccccaccgtggtgccaatgg

SEQ ID NO: 21857 - DNA, 75 bp, synthetic construct
  source 1..75: mol_type = other DNA
cagcgcctgctggaagtcatcgaacagatcgggaattactcaaagcagattcgttcggcaatcgaagatggggtc

SEQ ID NO: 21858 - DNA, 75 bp, synthetic construct
  source 1..75: mol_type = other DNA
atgattctcgccaacgactttcttgaatacctgctcaacacagagcgtgatcttgccgttcgcgtgcgtgaacgt

SEQ ID NO: 21859 - DNA, 75 bp, synthetic construct
  source 1..75: mol_type = other DNA
ttgatggcaacggacgtctgaccggcgcacgtactgcacaggccgcaccttatgcccgctacacctgccaccttt

SEQ ID NO: 21860 - DNA, 75 bp, synthetic construct
  source 1..75: mol_type = other DNA
atgatccggaatattttcaaacgatttaccaatcagactttccgttgtcctcgccccggtcagtggtacaccacg

SEQ ID NO: 21861 - DNA, 75 bp, synthetic construct
  source 1..75: mol_type = other DNA
ctgtacgcaacataaaacagatatgccccgacagttggttaaggcattaccacaatatccggcctatgcagcggc

SEQ ID NO: 21862 - DNA, 75 bp, synthetic construct
  source 1..75: mol_type = other DNA
ttttacaagccgcaattcaagaaagaatatgaaatgatgaattataatgacgggtggtattatgttttagccaga

SEQ ID NO: 21863 - DNA, 75 bp, synthetic construct
  source 1..75: mol_type = other DNA
gagttcttcactttttattgcctacatgggatgccttggatgggggagtgcttatttctatggatggggtacttc

SEQ ID NO: 21864 - DNA, 75 bp, synthetic construct
  source 1..75: mol_type = other DNA
atgatgccacagcgaacgtttttaatgatgttaatcgtcgtctgtgtgacgattctgtgttttgtctggatggtg

SEQ ID NO: 21865 - DNA, 75 bp, synthetic construct
  source 1..75: mol_type = other DNA
ctggcgttattggagggaaagaacaaaaaggaccatggaagttagatgcaagattcaacaaaaaagagttaatta

SEQ ID NO: 21866 - DNA, 75 bp, synthetic construct
  source 1..75: mol_type = other DNA
ccggtggtcagaatccctggctgatcctgctgcaacagggcggtcaggtgaaggactccttcggcgggatgatcc

SEQ ID NO: 21867 - DNA, 75 bp, synthetic construct
  source 1..75: mol_type = other DNA
aacggctgaatgagctggcacagcaggctgcgcggtttgagcagcagcagggcgcgaagcaggcggcaatcagtg

SEQ ID NO: 21868 - DNA, 75 bp, synthetic construct
  source 1..75: mol_type = other DNA
ataaagcagaacatctggaagaacgtcgactgatgctacagtggtgggccgattttctggatgcaaacagagaaa

SEQ ID NO: 21869 - DNA, 75 bp, synthetic construct
  source 1..75: mol_type = other DNA
caacccaggatgtctgtggtcatggattccgggcgatggcatgtagtgcgttaatagaatcaggtttgtggtccc

SEQ ID NO: 21870 - DNA, 75 bp, synthetic construct
  source 1..75: mol_type = other DNA
agtcagccttgcagatggtgatattattttacttggtggccttgctgaacagaaagacagtaaggccagttccgg

SEQ ID NO: 21871 - DNA, 75 bp, synthetic construct
  source 1..75: mol_type = other DNA
gtgacgccatcaatcaaaagtcggacaatggatctcaagattcagcagcagctttccaactttgtgaccactgaa

SEQ ID NO: 21872 - DNA, 75 bp, synthetic construct
  source 1..75: mol_type = other DNA
ggtcccgcgatgctgtggaacgtcagatgagccatcaggagcgtaatggtgtacgtgctgcgtatatccataaag

SEQ ID NO: 21873 - DNA, 75 bp, synthetic construct
  source 1..75: mol_type = other DNA
acgataaccagactgaagtcgctcgctacgatctgaccgaagatgcgtccactgagactgccatgctgttcggcg

SEQ ID NO: 21874 - DNA, 75 bp, synthetic construct
  source 1..75: mol_type = other DNA
tcatcaccaagaactattcaggagccttatgtgtgtattgctacccagtccacctgtcaggcgaaatactggaac

SEQ ID NO: 21875 - DNA, 75 bp, synthetic construct
  source 1..75: mol_type = other DNA
cgaacctctgccaggcgtaaaattctcacaccggggatccaagatgcgaacaccacatcttgtgccactcagcaa

SEQ ID NO: 21876 - DNA, 75 bp, synthetic construct
  source 1..75: mol_type = other DNA
tttctctctccgaagctcgtacaaaacgggatgaggcccgaaaactgatttcagaggggattgacccttgcgaac

SEQ ID NO: 21877 - DNA, 75 bp, synthetic construct
  source 1..75: mol_type = other DNA
gacccggacgcgctcgacgagctttccgtactcgtctgcgccgcagaaaacggggaccatattgagccatataaa

SEQ ID NO: 21878 - DNA, 75 bp, synthetic construct
  source 1..75: mol_type = other DNA
ttacaatagcgtcaggcctcaccattacaacggtgggttgacgccggaagaatcagagaacagataccgttttta

SEQ ID NO: 21879 - DNA, 75 bp, synthetic construct
  source 1..75: mol_type = other DNA
ttcactggagcactatgttgcagcgctgcgacgcaatgccgcactgcgcgatgcagaaaaaacactgactgaagc

SEQ ID NO: 21880 - DNA, 75 bp, synthetic construct
  source 1..75: mol_type = other DNA
cgacacccggagatattcttctctatgaatatctggaaccgctcgatttgaaaatcaatgagttagcagagttgc

SEQ ID NO: 21881 - DNA, 75 bp, synthetic construct
  source 1..75: mol_type = other DNA
aatacctgagccatcagaagaggctgtgaaaaaaatggttgatgataaaaaggatagactgaaggggccattatg

SEQ ID NO: 21882 - DNA, 75 bp, synthetic construct
  source 1..75: mol_type = other DNA
ttcaaaactaacagcgttccccagggcgtccgcgaccgggcattcgaagaatgggagcagatcatcatagataac

SEQ ID NO: 21883 - DNA, 75 bp, synthetic construct
  source 1..75: mol_type = other DNA
accggcagcagattgactccgcccatgaaatcattcttaaagaacagcaggcggttcaggagtggcagagactgg

SEQ ID NO: 21884 - DNA, 75 bp, synthetic construct
  source 1..75: mol_type = other DNA
ccagtgtgtacagccatttcgcttcctctgctatcagcccgactgccagtgcggcaggcagtgtggttgacggta

SEQ ID NO: 21885 - DNA, 75 bp, synthetic construct
  source 1..75: mol_type = other DNA
tcgaaggtcagaaagaactgcggggtatgtggctggccgaaaatgaaggggcgaagttctggctcaatgtgctga

SEQ ID NO: 21886 - DNA, 75 bp, synthetic construct
  source 1..75: mol_type = other DNA
cgcaatgtcgcatcgaacaggttcagactgttttagggttctggcttgaaggggccagccccagcaacagagaca

SEQ ID NO: 21887 - DNA, 75 bp, synthetic construct
  source 1..75: mol_type = other DNA
cggtgaaactgcaggcggcaaagcggtgacggattcagttttgatctctgtgaaggataataaagtcacagtaca

SEQ ID NO: 21888 - DNA, 75 bp, synthetic construct
  source 1..75: mol_type = other DNA
cggatatcaagatgaccatggtttactcacatttctcaccagatcatcttgaagatgccgttactaagaacccat

SEQ ID NO: 21889 - DNA, 75 bp, synthetic construct
  source 1..75: mol_type = other DNA
tggtgcttaacctcgataaatgtatcggctgccatacctgttcggtgacctgtaaaaacgtctggaccggacgcg

SEQ ID NO: 21890 - DNA, 75 bp, synthetic construct
  source 1..75: mol_type = other DNA
caggtcataaaagacagtctgacactggggctgaatgcgctgacgctgacggatgttacaaaaaatgcagcgtat

SEQ ID NO: 21891 - DNA, 75 bp, synthetic construct
  source 1..75: mol_type = other DNA
ccttttatcctgcttttcatcggtgtcatcggacttgtggggggctggcttgctgttgttcctcttacactggtt

SEQ ID NO: 21892 - DNA, 75 bp, synthetic construct
  source 1..75: mol_type = other DNA
tgaaaatcagtttcttatgaataaaaatccggattatgtatcgcctccatctattgaggagttggccagaaaact

SEQ ID NO: 21893 - DNA, 75 bp, synthetic construct
  source 1..75: mol_type = other DNA
ggccagtcaggattcggctcgctggggagtgggtaagccgttatatcaggatctgcttttccgcacgaaggcagc

SEQ ID NO: 21894 - DNA, 75 bp, synthetic construct
  source 1..75: mol_type = other DNA
gtatcatgtactccagcccgggggactccgtaagacactttctcacgatgaattaatggctgtttattcaggtta

SEQ ID NO: 21895 - DNA, 75 bp, synthetic construct
  source 1..75: mol_type = other DNA
gtgaaagccgtaattactccctttgtacaaaaagagcttggcgtcgccacattcaaagtggatcaggaagtcaga

SEQ ID NO: 21896 - DNA, 75 bp, synthetic construct
  source 1..75: mol_type = other DNA
tggtgtgacaaccatattgtccacgctgaacgagacaatagcgcggtgttgttgtgctggcatcacgataaccat

SEQ ID NO: 21897 - DNA, 75 bp, synthetic construct
  source 1..75: mol_type = other DNA
accgtattaaacgtgctaaaagtactgggcgtgatccgaaaattccgaaactgtctggaaggcatctacatgcca

SEQ ID NO: 21898 - DNA, 75 bp, synthetic construct
  source 1..75: mol_type = other DNA
gttacgccagcgggtcaatgagggtgcacgcgcctgcatgttaagccacagcgccgggacagacctggacaacct

SEQ ID NO: 21899 - DNA, 75 bp, synthetic construct
  source 1..75: mol_type = other DNA
ccgggatattgccgcacaagtgttctgctgcaaaaagtgttctggtaaagcgtgggatttttattcagagcgggc

SEQ ID NO: 21900 - DNA, 75 bp, synthetic construct
  source 1..75: mol_type = other DNA
catttcatattagctccagttaatgcaccggaacatatcataaaagactctacagcattgtggaatgaagttgaa

SEQ ID NO: 21901 - DNA, 75 bp, synthetic construct
  source 1..75: mol_type = other DNA
cgactccccaaaagcagaaaaacaacaaccggctcttggagcacctgaaccatacagaaggccagtcgtaaaatc

SEQ ID NO: 21902 - DNA, 75 bp, synthetic construct
  source 1..75: mol_type = other DNA
cggtcacgggccaggaaggcggcgctggagtggttatgcagcgcccgcatactggacagtctgtctctgtatccg

SEQ ID NO: 21903 - DNA, 75 bp, synthetic construct
  source 1..75: mol_type = other DNA
ctgaaccagaagatattgtattagcaaaaacgcgttccgattcttctaccaaagaaacgcaaagacctgtactgg

SEQ ID NO: 21904 - DNA, 75 bp, synthetic construct
  source 1..75: mol_type = other DNA
acgccccggtggcacgtaaacagttccgcgatgcggtcatgcaaaaactgaccacgctgggtattgacgccgata

SEQ ID NO: 21905 - DNA, 75 bp, synthetic construct
  source 1..75: mol_type = other DNA
attcaggaacatgggaaatttggtaactcaaccacgaatgacttctacctgtcaggcccattggttaaggataaa

SEQ ID NO: 21906 - DNA, 75 bp, synthetic construct
  source 1..75: mol_type = other DNA
ctcaacgaccaccgataccggagaaacgccgcgtattgaaggattctccagccgcgacggcaatgtcgaatttgc

SEQ ID NO: 21907 - DNA, 75 bp, synthetic construct
  source 1..75: mol_type = other DNA
cagaagaagcaccattcttcgactttccggctggccccgcgtaataactttatggctgacgttattgagcggcgg

SEQ ID NO: 21908 - DNA, 75 bp, synthetic construct
  source 1..75: mol_type = other DNA
ttgtaccttgctcatgaaaccgggcttggtccggaaggggcttcgaaggggcttaaaagggctgttgaagctggt

SEQ ID NO: 21909 - DNA, 75 bp, synthetic construct
  source 1..75: mol_type = other DNA
aaccggatatggaggtgaactcgcagccatcggtgcgtgaagtgcgttttggtgacgggtactcacagcgtatgg

SEQ ID NO: 21910 - DNA, 75 bp, synthetic construct
  source 1..75: mol_type = other DNA
atgacagtgatgacgctcaatctcgttgaaaaacagccagcaaccatgcgtcggataattggtaagcatcttgcc

SEQ ID NO: 21911 - DNA, 75 bp, synthetic construct
  source 1..75: mol_type = other DNA
acccgggaggaggcccggcatctggaagcgtttctggcagagcacgggggctggaaggcatttttgtggaagcca

SEQ ID NO: 21912 - DNA, 75 bp, synthetic construct
  source 1..75: mol_type = other DNA
atcgctgggaaatcgaactgggatacagggagataaaacagacgatgcaactgagcaggctgacgctgagaagta

SEQ ID NO: 21913 - DNA, 75 bp, synthetic construct
  source 1..75: mol_type = other DNA
cagataacgtgaaggataacagtgaagttaccggggttgccaaagatccgagcggtaatgaaagtgacccgtcaa

SEQ ID NO: 21914 - DNA, 75 bp, synthetic construct
  source 1..75: mol_type = other DNA
tgcgcgccccgaatctgcagctggcagtggagctgacggatgccggccgggccatagcacaccctcttctgctgg

SEQ ID NO: 21915 - DNA, 75 bp, synthetic construct
  source 1..75: mol_type = other DNA
cggagggctttaaaatccacgaacgccagcgcgagatgaaggaacaactgaataatctggatgatttgcgttcaa

SEQ ID NO: 21916 - DNA, 75 bp, synthetic construct
  source 1..75: mol_type = other DNA
cctgtgaataaagctgatgcagatcggatagcagaagagatcgaaacggcagaacacattaagaagttacgtgcc

SEQ ID NO: 21917 - DNA, 75 bp, synthetic construct
  source 1..75: mol_type = other DNA
cctttcagttgatgggcggtaagccggagaatgtcgggtcactaggagatattgaaaaagtggcaaaggtctttg

SEQ ID NO: 21918 - DNA, 75 bp, synthetic construct
  source 1..75: mol_type = other DNA
gcacaagtgtttgtccgaaatgagttaactcctttacaggaacggttcaaagaactaaacaactggttagaaatg

SEQ ID NO: 21919 - DNA, 75 bp, synthetic construct
  source 1..75: mol_type = other DNA
gttgtcgggctgcccgtgccggatgcgaccggcgggcgtctggaaattctctgtcggctgggaggggaaaaatga

SEQ ID NO: 21920 - DNA, 75 bp, synthetic construct
  source 1..75: mol_type = other DNA
tgggaataccttcaggccagcaatggcgcgttttttatggaagcgccccaacctctttggctctcgttacctaac

SEQ ID NO: 21921 - DNA, 75 bp, synthetic construct
  source 1..75: mol_type = other DNA
atggctgccggagttgcatatgttgcgatgaagccaatcgttgaaaaccttggaatgagctggtcaacgcagcaa

SEQ ID NO: 21922 - DNA, 75 bp, synthetic construct
  source 1..75: mol_type = other DNA
ggatttgctgattgtcgacgaagtcggcgttcagtttggcagtgcggctgaaatggccattttgcaggaaattat

SEQ ID NO: 21923 - DNA, 75 bp, synthetic construct
  source 1..75: mol_type = other DNA
tattccttcacgctggcagaactggtgaccaaaggacatctgagaccattaaaagaggcgtcagaggcagaaaac

SEQ ID NO: 21924 - DNA, 75 bp, synthetic construct
  source 1..75: mol_type = other DNA
ttcgtcgaagctctggcacacccattttccaggctgtggtgtttatgcgtacaccgtggttctttcgagataatg

SEQ ID NO: 21925 - DNA, 75 bp, synthetic construct
  source 1..75: mol_type = other DNA
ccagccgcacaactcccgggaaacctgccgcctcccggcgctgctcttgtacaggaaggcgcatcgctggattct

SEQ ID NO: 21926 - DNA, 75 bp, synthetic construct
  source 1..75: mol_type = other DNA
atgacccgcgccgctgttccggcaattccgtatcggaggtgctggataaattcagaaaaaactacgaccggataa

SEQ ID NO: 21927 - DNA, 75 bp, synthetic construct
  source 1..75: mol_type = other DNA
accgttgcgaaaagcgacaatagacaaattccctgaatatatcgacccgcgcctgcgtaattaccgctcacgcta

SEQ ID NO: 21928 - DNA, 75 bp, synthetic construct
  source 1..75: mol_type = other DNA
aagctttccttgatatggtggcatggtcagaaggaacggataacgggcgacaaccgacacgtaaccacggttatg

SEQ ID NO: 21929 - DNA, 75 bp, synthetic construct
  source 1..75: mol_type = other DNA
tatgaacataaaatcggtgacctgatttcccggtttaaagaggctggtggggtggtaaatgaagttgagctataa

SEQ ID NO: 21930 - DNA, 75 bp, synthetic construct
  source 1..75: mol_type = other DNA
aaaaggatgcacaccacatctatctcactgacggcacttacttttgcgccactaatgtggcgcgggtgaatctta

SEQ ID NO: 21931 - DNA, 75 bp, synthetic construct
  source 1..75: mol_type = other DNA
ggcgtcatggcggcagacctcagaaactgacagagaaagagcgggagcaaatcgcccgtttgctggctaatggcg

SEQ ID NO: 21932 - DNA, 75 bp, synthetic construct
  source 1..75: mol_type = other DNA
ctgcaaaccccgcacatgaaggcgtacagcgaagccgtaaaaggcgacgtgctggagatgaatatccgtattctg

SEQ ID NO: 21933 - DNA, 75 bp, synthetic construct
  source 1..75: mol_type = other DNA
tccggcctggatgttacagcttctgcgtaaggcccgggaccgcattatccacttgctggtcacactgtgggatcg

SEQ ID NO: 21934 - DNA, 75 bp, synthetic construct
  source 1..75: mol_type = other DNA
atgaggaaacgctgttccgggggattatgctgaacgtcttccgttcacggtactgctggacgatgtggctggggg

SEQ ID NO: 21935 - DNA, 75 bp, synthetic construct
  source 1..75: mol_type = other DNA
actgtaggcgctgcgactggcgagatatctgtatcttctgtcgccgacacgttacgtagattgtatggttctgcg

SEQ ID NO: 21936 - DNA, 75 bp, synthetic construct
  source 1..75: mol_type = other DNA
atggcacgcaacgcaaaatattacaatcatgataattcgaccgttcttgcccacacgcacgagcggtattctcac

SEQ ID NO: 21937 - DNA, 75 bp, synthetic construct
  source 1..75: mol_type = other DNA
cttgcttgctggtcctggctggttgttcaacctcttctcagccagaagcacctaaaccgccgcagattggtatgg

SEQ ID NO: 21938 - DNA, 75 bp, synthetic construct
  source 1..75: mol_type = other DNA
tatcgccatcagagaactggcgtttggcgctggtacattacacgcggcagtggcgtcttatgtgcagtctccgca

SEQ ID NO: 21939 - DNA, 75 bp, synthetic construct
  source 1..75: mol_type = other DNA
acattccataataatgacagtgtgacctttgatttttgtaaacgtttttctcagacgctggcatcatttcgggga

SEQ ID NO: 21940 - DNA, 75 bp, synthetic construct
  source 1..75: mol_type = other DNA
cgatgaaaaaggttctgttgtaacaccagcggcgcttatacgctggaattaccggatgaatccagacagaatttt

SEQ ID NO: 21941 - DNA, 75 bp, synthetic construct
  source 1..75: mol_type = other DNA
ttctggaccgccgcgaactgctggactatgtggaatgcgtacagatggatcgctggtatgagccgcccgtcagct

SEQ ID NO: 21942 - DNA, 75 bp, synthetic construct
  source 1..75: mol_type = other DNA
ggcattaaaattatcccgctcagtgaagtggcgacgaaggacgatttttttaatatcaaaaaagccagcgccgca

SEQ ID NO: 21943 - DNA, 75 bp, synthetic construct
  source 1..75: mol_type = other DNA
gtgccagcttcagaaaatggggatgacgccggagcagattaagcaggctaccggactttccgaagctgaactgaa

SEQ ID NO: 21944 - DNA, 75 bp, synthetic construct
  source 1..75: mol_type = other DNA
aagtgcgcttgatgtgacggaagaagtaattgattcaattttacaggcaatgcaggggcgggtacttgatggaga

SEQ ID NO: 21945 - DNA, 75 bp, synthetic construct
  source 1..75: mol_type = other DNA
gaaggtgaaggctggttcattggttccattcatgacactgaagatggtcctgtttgtgtatggctgagaaataag

SEQ ID NO: 21946 - DNA, 75 bp, synthetic construct
  source 1..75: mol_type = other DNA
tcaaaagttcagatggattacatctgcctgcaataccctgggtattttcggtttgcgaaatggatggaacgactt

SEQ ID NO: 21947 - DNA, 75 bp, synthetic construct
  source 1..75: mol_type = other DNA
tgagattgagctgagcacagaagaaacgcttaagcctgtaacggttaaagacgccctggaatattggttggtgaa

SEQ ID NO: 21948 - DNA, 75 bp, synthetic construct
  source 1..75: mol_type = other DNA
acaaaaagctaaaagcattgctgggttctgagcgtgaagcgccgatcatgattgccgatggtgaggggctaagcg

SEQ ID NO: 21949 - DNA, 75 bp, synthetic construct
  source 1..75: mol_type = other DNA
caaccgtgaggcgtttcacaaggcggaagaggaactgaaacgggaagggcataccgtcttaaacccggcagtact

SEQ ID NO: 21950 - DNA, 75 bp, synthetic construct
  source 1..75: mol_type = other DNA
gtggcggacgttgggaaaaaaccggatataagcgagcgtgtcttaagcaacaaagaacttggcgaattattgcag

SEQ ID NO: 21951 - DNA, 75 bp, synthetic construct
  source 1..75: mol_type = other DNA
ttatactcttcgcattgtcagaaatggttatccattaaaggctggcgattactacgctgcattgcgttttaaact

SEQ ID NO: 21952 - DNA, 75 bp, synthetic construct
  source 1..75: mol_type = other DNA
caggaaaaatgatgatgcaagtaatttcagcagtcgctgaatttgaacgagaccttttacttgaacgcactcatt

SEQ ID NO: 21953 - DNA, 75 bp, synthetic construct
  source 1..75: mol_type = other DNA
tgtgacaaaactggatcgccttggttgtaatgcaatggatatcaggaaaacagtggaacaactgaccgaaacagg

SEQ ID NO: 21954 - DNA, 75 bp, synthetic construct
  source 1..75: mol_type = other DNA
cggaagtggtcaccgggcatacggacgttatttgctcaaccagtatccgccacattctggctgtacgaaagagta

SEQ ID NO: 21955 - DNA, 75 bp, synthetic construct
  source 1..75: mol_type = other DNA
ggtaatggcagccagtctctggcagataacgcaattgctattggtcagggcaacaaggctaatggcactgatgct

SEQ ID NO: 21956 - DNA, 75 bp, synthetic construct
  source 1..75: mol_type = other DNA
ggccttacaggcggcgaacgatatcgccacgaaaggctttgatgagcagacccgtcgcctgaaagaaaacatggg

SEQ ID NO: 21957 - DNA, 75 bp, synthetic construct
  source 1..75: mol_type = other DNA
ccagagccggagtcagcgccggggaaagacctcctctttccgtgccaaccttcagggtgcatgggatgaccgtga

SEQ ID NO: 21958 - DNA, 75 bp, synthetic construct
  source 1..75: mol_type = other DNA
ttaccgggtcatcacggtcagtgatgaacgtgatgttgccagctcccgacctttactccctctcatttattcaca

SEQ ID NO: 21959 - DNA, 75 bp, synthetic construct
  source 1..75: mol_type = other DNA
gggagtttgaattcgctaatctgggctttattccgctctcttactacaagaaccgggattatgcctgcttcttct

SEQ ID NO: 21960 - DNA, 75 bp, synthetic construct
  source 1..75: mol_type = other DNA
ccgcaggaactggcatatggcgagcgtggcgcaggcgcgtccatccctccgttcagcaccctggtgtttgaagtc

SEQ ID NO: 21961 - DNA, 75 bp, synthetic construct
  source 1..75: mol_type = other DNA
attaatgcagcgcaggatctgaaatgggctaatgaagccagggctaagcaggctgaaaatctgtccgctctggag

SEQ ID NO: 21962 - DNA, 75 bp, synthetic construct
  source 1..75: mol_type = other DNA
ggcaggtgatggagtggcgagaggaagcctataccctcgatgaactggctgattatctcgatttgagcgcctcag

SEQ ID NO: 21963 - DNA, 75 bp, synthetic construct
  source 1..75: mol_type = other DNA
gagcgtcactggcagacctggaaattcccggacgaaaccccggaatttgccgcacatatcaatgtgaatcaggaa

SEQ ID NO: 21964 - DNA, 75 bp, synthetic construct
  source 1..75: mol_type = other DNA
aacctttacctggacaatatggcggtcaccggcttttaccgggtgcccctgtcctctgcacaggcgggcgatatt

SEQ ID NO: 21965 - DNA, 75 bp, synthetic construct
  source 1..75: mol_type = other DNA
cgcaacagcggcgcgctacagaaagccattaatcaacgtatggcgcgtgaacgcgtcctgacccttcttaacgcg

SEQ ID NO: 21966 - DNA, 75 bp, synthetic construct
  source 1..75: mol_type = other DNA
atgacattccggaagaatgaaccgcgatgtgatgagccgtcagaaatgaccgaggctgaacaacgtctgttcatc

SEQ ID NO: 21967 - DNA, 75 bp, synthetic construct
  source 1..75: mol_type = other DNA
gattaaggacggtggcagagactgccgtattcgctcaaacaactgctacggtcaggtttcacggcgtgaccagga

SEQ ID NO: 21968 - DNA, 75 bp, synthetic construct
  source 1..75: mol_type = other DNA
aggcgctggcatgggtggagcgcaatattaaagtaccactgaccgaaccacagaaagcgggtatagcgtcatttt

SEQ ID NO: 21969 - DNA, 75 bp, synthetic construct
  source 1..75: mol_type = other DNA
gatgggtgcgcacacaggacacccgtctggctcccattcttcagggattatttgatctctacatccgtggtcgtg

SEQ ID NO: 21970 - DNA, 75 bp, synthetic construct
  source 1..75: mol_type = other DNA
tgggcgatgaatattggctgccacctgactattccgcagagctgcgagttccagctgctccgcgacaagcaggag

SEQ ID NO: 21971 - DNA, 75 bp, synthetic construct
  source 1..75: mol_type = other DNA
gggcgctcttcactggcgggctagccgccatcctcgcctcggcttgctgcctggggccgctggttctgatcgccc

SEQ ID NO: 21972 - DNA, 75 bp, synthetic construct
  source 1..75: mol_type = other DNA
atggcctatgcgcaccttgcgcctgattacctgcaaaacgcagtagcgttaaacccactaaagggtggtttaacg

SEQ ID NO: 21973 - DNA, 75 bp, synthetic construct
  source 1..75: mol_type = other DNA
atgccggtcattaatactcaccagaatatcgccgcatttctggacatgctggcctattccgaagggacggcgacg

SEQ ID NO: 21974 - DNA, 75 bp, synthetic construct
  source 1..75: mol_type = other DNA
gacaaagtctctccgtcccagtgggtggcgataggtgtgctggggagtctgctgtttggcctgctgacgtatctg

SEQ ID NO: 21975 - DNA, 75 bp, synthetic construct
  source 1..75: mol_type = other DNA
acgtcagccaattgtatcaacagcaggcggcagcatctgcggctaatgctaaccgaccatcaggactgcaatcag

SEQ ID NO: 21976 - DNA, 75 bp, synthetic construct
  source 1..75: mol_type = other DNA
ttataaaattattaaacttttcattattattccacacatcattagatgagaattttgatactattgaaaaaagaa

SEQ ID NO: 21977 - DNA, 75 bp, synthetic construct
  source 1..75: mol_type = other DNA
ctgctgtgctgctttggcgcatcggtggccaatcatgccgccatatactgcggcaacggtgaactgcttcaccat

SEQ ID NO: 21978 - DNA, 75 bp, synthetic construct
  source 1..75: mol_type = other DNA
caaagacgagcgaaaccaacgcaaagtccagccagacggcagcgaaaaccagcgaaacgaatgccaaagccagtg

SEQ ID NO: 21979 - DNA, 75 bp, synthetic construct
  source 1..75: mol_type = other DNA
gcagtacggctgtgtcggccagggtttacatattgccaaaaaactgctcccgtatatcccgaataacgcggggat

SEQ ID NO: 21980 - DNA, 75 bp, synthetic construct
  source 1..75: mol_type = other DNA
gttcgtggcagaacgtcctgaccagctgtgggtggctgattttacttacgtcagcacatggcagggcttcgtcta

SEQ ID NO: 21981 - DNA, 75 bp, synthetic construct
  source 1..75: mol_type = other DNA
tgtcattattggtagagatacattaatagcaagtaaagtatttattagtgatcataatcatggtattttttctaa

SEQ ID NO: 21982 - DNA, 75 bp, synthetic construct
  source 1..75: mol_type = other DNA
ttaactgatatcactaaaaatgccgcgtacggcgtcgatatcggcagcctggtgctggaaatcaataatcccgca

SEQ ID NO: 21983 - DNA, 75 bp, synthetic construct
  source 1..75: mol_type = other DNA
gtgtcagacacgctccatgaaacaaattatcccgacgacaacaacgaccgcccctggtgggggctaccctgcacc

SEQ ID NO: 21984 - DNA, 75 bp, synthetic construct
  source 1..75: mol_type = other DNA
ctcatcccgatgacaatcacgaccgcccctggtgggggcttccctgcacagtgaggccctgttttggcgctcgtc

SEQ ID NO: 21985 - DNA, 75 bp, synthetic construct
  source 1..75: mol_type = other DNA
caccttagccttcatcagtggtaaggcaccggaaatcaaaccctcgcccggcggcgacacgccatcggggccgtc

SEQ ID NO: 21986 - DNA, 75 bp, synthetic construct
  source 1..75: mol_type = other DNA
atttcgttcgtccacatcctgagcagtatacgtggatcctcaagttgctgaaaacgcgtaaagaaggggaagagg

SEQ ID NO: 21987 - DNA, 75 bp, synthetic construct
  source 1..75: mol_type = other DNA
cagcgataaaggctctcagtatgtatcgctggcctacacgcagcggcttaaggaagccggattactggcatcaac

SEQ ID NO: 21988 - DNA, 75 bp, synthetic construct
  source 1..75: mol_type = other DNA
tatgggcccgtcgaccgtccggcacagtccatcacagtgataaaggttctcagtatgtatcgctggcctacacac

SEQ ID NO: 21989 - DNA, 75 bp, synthetic construct
  source 1..75: mol_type = other DNA
tcactggcctatacggagcgactaaaagaagccggattactggcatcaacagggagtacaggcgactcgtatgac

SEQ ID NO: 21990 - DNA, 75 bp, synthetic construct
  source 1..75: mol_type = other DNA
gcactggagcaggcgttgtgggcccgtcggccgtccggcacaatccaccacagtgataaaggttctcagtatgta

SEQ ID NO: 21991 - DNA, 75 bp, synthetic construct
  source 1..75: mol_type = other DNA
gagtccgcccaggcactctacacctttatagagagcctgccccgggatccggcaccgatatcgctggcgcggctg

SEQ ID NO: 21992 - DNA, 75 bp, synthetic construct
  source 1..75: mol_type = other DNA
gtggataaatcctccggtgaagtcgtaaatcttacacctaatgccagtaatacagtgcagcctgtggcactgatg

SEQ ID NO: 21993 - DNA, 75 bp, synthetic construct
  source 1..75: mol_type = other DNA
accgcatagcacgatggtgtttatcgggattcagttgccggaggatgagattcgggcagcgtttgcggggttgag

SEQ ID NO: 21994 - DNA, 75 bp, synthetic construct
  source 1..75: mol_type = other DNA
ttatagagagcctgccccgggatccggcaccgatatcgctggcgcggctgcgtgcacgcctcaatctgaagtctc

SEQ ID NO: 21995 - DNA, 75 bp, synthetic construct
  source 1..75: mol_type = other DNA
ccgcaccgatgagaagcacacccgggaatacatcacccatctggtacagtcagcctactacgatactgaacggga

SEQ ID NO: 21996 - DNA, 75 bp, synthetic construct
  source 1..75: mol_type = other DNA
agatatacaccgatagtgctggctacccggtaaaaattactcgcagtactgttcactcggtattctttcggagga

SEQ ID NO: 21997 - DNA, 75 bp, synthetic construct
  source 1..75: mol_type = other DNA
gaacacattgatcacagagaatatcaccagatcctggctgaaacagaacaggaagctcatctgaaaaaattacgg

SEQ ID NO: 21998 - DNA, 75 bp, synthetic construct
  source 1..75: mol_type = other DNA
ttgttctgtcggctctgtccctcagttctacagcggctctggccgctgccacgacggtaaatggtgggaccgttc

SEQ ID NO: 21999 - DNA, 75 bp, synthetic construct
  source 1..75: mol_type = other DNA
cgctttaattaagtctggggttttcactgaacttgaagaagtaacaaagttaaagaaccagcttgcacttgacgc

SEQ ID NO: 22000 - DNA, 75 bp, synthetic construct
  source 1..75: mol_type = other DNA
gcagcagtgctgggttactggcttgaccgttcgctcttccccaaagcccgtcccggtcagtacctgaaacatgac

SEQ ID NO: 22001 - DNA, 75 bp, synthetic construct
  source 1..75: mol_type = other DNA
ggtggtgctgactgtccttagccgcgaaggcgatggaactgcagaaaaagacctgctggacgtggtggaaaaagc

SEQ ID NO: 22002 - DNA, 75 bp, synthetic construct
  source 1..75: mol_type = other DNA
ataaaaaagccagttttgtgctggctaaaaaacttgagcaatgcacgtcaggtgcaattacgaaatctgacttaa

SEQ ID NO: 22003 - DNA, 75 bp, synthetic construct
  source 1..75: mol_type = other DNA
tccccggagtttaaacagttctttagccaatacagtattgctgtgggatcaaccggaaatctggggttatcaatt

SEQ ID NO: 22004 - DNA, 75 bp, synthetic construct
  source 1..75: mol_type = other DNA
ccttaatggcgaggacgtcaggccggtggccgaccgcgtgaccgtgcagtctgccgccattgttgaataccagat

SEQ ID NO: 22005 - DNA, 75 bp, synthetic construct
  source 1..75: mol_type = other DNA
ttgccagcggccccgctcggcctgaatttatgaacggcgatatttaccgcgataaatacggcggcacggtaacga

SEQ ID NO: 22006 - DNA, 75 bp, synthetic construct
  source 1..75: mol_type = other DNA
ctgccagcggtctctctcggcctgaaatcagacacggagatatttaccgcgacaccagacgtgggggacgagtgg

SEQ ID NO: 22007 - DNA, 75 bp, synthetic construct
  source 1..75: mol_type = other DNA
gtctgacgatgggggacagttatacccggggggatatttttgacggtgtaaatttcagggggattcaactggcct

SEQ ID NO: 22008 - DNA, 75 bp, synthetic construct
  source 1..75: mol_type = other DNA
gccgaattactttgcgggatcagttgcaacttatgatgcaaatcgaattgttaaatgtggtttttatgatgaata

SEQ ID NO: 22009 - DNA, 75 bp, synthetic construct
  source 1..75: mol_type = other DNA
aagttagcaaccaatctattcttacgactcatattgagtatcaatatacggatgttaacctgttagctgtgcatc

SEQ ID NO: 22010 - DNA, 75 bp, synthetic construct
  source 1..75: mol_type = other DNA
aggcttaatacctgtcttgcactgttgcggcccacgctgaacgagccgatcccaccacatctgattgacgggttt

SEQ ID NO: 22011 - DNA, 75 bp, synthetic construct
  source 1..75: mol_type = other DNA
gttgatcaaaccgttcagttaggacaggttcgtaccgcatcgctggcacaggaaggagcgaccagttctgctgtc

SEQ ID NO: 22012 - DNA, 75 bp, synthetic construct
  source 1..75: mol_type = other DNA
gcggaacagtacgtgttctgcggtgaaaacgatttttctctggctgaaagaatgctggctgcagatgatcgttac

SEQ ID NO: 22013 - DNA, 75 bp, synthetic construct
  source 1..75: mol_type = other DNA
cgctgcgaaaggtgtgcaagctatcggtgcgtaaacaaaagcaggtgcaggaatttattggggtgattagtagca

SEQ ID NO: 22014 - DNA, 75 bp, synthetic construct
  source 1..75: mol_type = other DNA
ggcaatcagggggcaggcaatatcaccgactgtacggtgattgtgaccaaaaaagccgcttccggcatcagtatt

SEQ ID NO: 22015 - DNA, 75 bp, synthetic construct
  source 1..75: mol_type = other DNA
gtggtaagccagccgacgatcctcatcacctgattggtcatggtcagggtggaatgggtacaaaagcgcatgacc

SEQ ID NO: 22016 - DNA, 75 bp, synthetic construct
  source 1..75: mol_type = other DNA
gtatcccacagcaagtatcagcgatttgctggttgtggtgatgaagaaagccaccgcaggcatcagtatcagctg

SEQ ID NO: 22017 - DNA, 75 bp, synthetic construct
  source 1..75: mol_type = other DNA
gtatcttcatcaggagcgaataactggacaccaacaaccagtatcagcgatctgctggttgtggtgatgaaaaaa

SEQ ID NO: 22018 - DNA, 75 bp, synthetic construct
  source 1..75: mol_type = other DNA
ggagacagaaaacagcctcacacagctggttgcgaaaaaaaatgatgagctgtcactgggtatatcacaggtgag

SEQ ID NO: 22019 - DNA, 75 bp, synthetic construct
  source 1..75: mol_type = other DNA
ctcagtgggcggcaataggcgtgctggggagtctgctgtttgggctgctgacatatctgacgaacctgtatttca

SEQ ID NO: 22020 - DNA, 75 bp, synthetic construct
  source 1..75: mol_type = other DNA
acgatccgcatcatctgattggtcacgggcagggcggaatgggaacaaaagcacatgatctctttgtgttgcctt

SEQ ID NO: 22021 - DNA, 75 bp, synthetic construct
  source 1..75: mol_type = other DNA
cgggtgtgtcatacaccacgtcagcggtggggacgggatactggttactgcagctgctggacaaagtctctccgt

SEQ ID NO: 22022 - DNA, 75 bp, synthetic construct
  source 1..75: mol_type = other DNA
catacaccacgtcagcggtagggacgggatactggttactgcaactgctggacaaagtctctccgtcccagtggg

SEQ ID NO: 22023 - DNA, 75 bp, synthetic construct
  source 1..75: mol_type = other DNA
ccgcaatgaggcagtgatccgtcgtgctggtggggtggaatgtcttgaaagctggttacttcgtgaaaaaggctg

SEQ ID NO: 22024 - DNA, 75 bp, synthetic construct
  source 1..75: mol_type = other DNA
gtgcgggtattacttcgatctgttctggtaccggaactcggtctggttatcgttaagccaggccgtgaatcaatg

SEQ ID NO: 22025 - DNA, 75 bp, synthetic construct
  source 1..75: mol_type = other DNA
atgtcaggctcccttattccgaacgcccaccgcgcccatcccgcacataccagcaacggatctggaggtaacgtg

SEQ ID NO: 22026 - DNA, 75 bp, synthetic construct
  source 1..75: mol_type = other DNA
agcatggatgattgacgtcatacgccatgcaatgaatggcacgcaggagcgggaattatcgctggctgaattatc

SEQ ID NO: 22027 - DNA, 75 bp, synthetic construct
  source 1..75: mol_type = other DNA
ctggtgggcggtctgcaatcaggtggtggatgcactacctgaggctgtatcgcgtcgttcgctgggattaccagc

SEQ ID NO: 22028 - DNA, 75 bp, synthetic construct
  source 1..75: mol_type = other DNA
cggcgaaaaatgccgatatcagcggtaacgtgaatgcgaactccgggacgctcaacaacgtcacgattaacgaga

SEQ ID NO: 22029 - DNA, 75 bp, synthetic construct
  source 1..75: mol_type = other DNA
ctgtatgtcatcggccagaattgcgaccagtcggtgccggatggctttggtggcacggagccgcgcatcacctgt

SEQ ID NO: 22030 - DNA, 75 bp, synthetic construct
  source 1..75: mol_type = other DNA
ggggactctccctgccgtcactgcgtcgtcgcctgttccgctgtgtttccatccgggaaaacacggacggcacct

SEQ ID NO: 22031 - DNA, 75 bp, synthetic construct
  source 1..75: mol_type = other DNA
tccagaaaggcaatcagggggcagggaatatcaccgactgtacggtgattgtgaccaaaaaagcggcttccggta

SEQ ID NO: 22032 - DNA, 75 bp, synthetic construct
  source 1..75: mol_type = other DNA
ctacctcgcagtacctgacgtcggtgattctgaataatctccctgagcgcccctttaacatccggatggtcaggg

SEQ ID NO: 22033 - DNA, 75 bp, synthetic construct
  source 1..75: mol_type = other DNA
tagtctggaagctggacaggctggggcgtagtatgcggcatctggtcattctggttgaggaactgcgcgaacgcg

SEQ ID NO: 22034 - DNA, 75 bp, synthetic construct
  source 1..75: mol_type = other DNA
caacaaatgaccagaacacggaattgcagcgtaacgcgctggagtgcgcgggatgtgagcggatttttgaggaca

SEQ ID NO: 22035 - DNA, 75 bp, synthetic construct
  source 1..75: mol_type = other DNA
accggcagtgcagcacctgacggtggaggtgagcgcagctgacggccagtatctggcgcaggcgaaatgggacac

SEQ ID NO: 22036 - DNA, 75 bp, synthetic construct
  source 1..75: mol_type = other DNA
gggctttagccgaaatggaacgtgaattaattgtagaacgtacactggccgggctggcagcagcacgcgcacaag

SEQ ID NO: 22037 - DNA, 75 bp, synthetic construct
  source 1..75: mol_type = other DNA
catgccgcctgatagtgaagaaaaatggtgctgaaatttataaccgtaccgcgctggataatacgctgatttaca

SEQ ID NO: 22038 - DNA, 75 bp, synthetic construct
  source 1..75: mol_type = other DNA
atcgcgatgattaccccggagaatggcaacaccacgccgctgtttgtggcgcaggggaatcagctgttcatgaac

SEQ ID NO: 22039 - DNA, 75 bp, synthetic construct
  source 1..75: mol_type = other DNA
gtgaaatcacgctgccatcctccggcaccacgctgataagcctggttgacggacaggggaatccggtcagcgtgg

SEQ ID NO: 22040 - DNA, 75 bp, synthetic construct
  source 1..75: mol_type = other DNA
actgtcagattaaagggaaactgtcagccaaccagattgaaggcgatattgtcaaaacagtgggtaaggctttcc

SEQ ID NO: 22041 - DNA, 75 bp, synthetic construct
  source 1..75: mol_type = other DNA
ggttgatacaaataataacctgaacagcatgtgggctgtgaagctgcagcagatgcaggacggacgcctttatat

SEQ ID NO: 22042 - DNA, 75 bp, synthetic construct
  source 1..75: mol_type = other DNA
tggtaaatgactggtatcccacagcaagtatcagcgatttgctggttgtggtgatgaagaaagccaccgcaggca

SEQ ID NO: 22043 - DNA, 75 bp, synthetic construct
  source 1..75: mol_type = other DNA
tgcaccttcgcggcccatcgagcggggtatcgccggaccggggctgctggcccgcgtgctgacctcgaagtatgc

SEQ ID NO: 22044 - DNA, 75 bp, synthetic construct
  source 1..75: mol_type = other DNA
cgagctctaccgcgacggccatataaaggaagccgcgtgctgggcccatgcccgccgaaaaatccacgatgttca

SEQ ID NO: 22045 - DNA, 75 bp, synthetic construct
  source 1..75: mol_type = other DNA
cattaatagcgataacttcgccagcggtaagcaatgtttaacatttgagcaacttgttcagggtgggagctatac

SEQ ID NO: 22046 - DNA, 75 bp, synthetic construct
  source 1..75: mol_type = other DNA
ttacagtgatgacggtctggcggaggcggataataatgctgcggaaagagcgcttcgtgcagtctgtctcggaaa

SEQ ID NO: 22047 - DNA, 75 bp, synthetic construct
  source 1..75: mol_type = other DNA
aggaaataacggaatcaatgattgtaaaaactgaagaatgtacttatgaccatgtcaggggaaattttgttataa

SEQ ID NO: 22048 - DNA, 75 bp, synthetic construct
  source 1..75: mol_type = other DNA
cgtttaacctggtcagactccagcaatacatgaacaagaagttcaaaatgacggcacaaaaaacgctggatatta

SEQ ID NO: 22049 - DNA, 75 bp, synthetic construct
  source 1..75: mol_type = other DNA
caaaatgtgactgtattgttgaagcaccggcgccgtcccgcccgatagagcgtggtatcgcgggccccggattac

SEQ ID NO: 22050 - DNA, 75 bp, synthetic construct
  source 1..75: mol_type = other DNA
ctccgctatgtccttgacgtcatagccgactggccgataaaccgggtcggcgaactgctcccctggcgcgtagca

SEQ ID NO: 22051 - DNA, 75 bp, synthetic construct
  source 1..75: mol_type = other DNA
tttgcaacttcaggaaacagccaacagcagcaaagtagcaatcatcaaaataatcctgaatacgacgattccatc

SEQ ID NO: 22052 - DNA, 75 bp, synthetic construct
  source 1..75: mol_type = other DNA
gaaaatgcacccgaccggaaaaccagaagaacttatggcagaactggtcaggactgcgaatagtggtggaacagt

SEQ ID NO: 22053 - DNA, 75 bp, synthetic construct
  source 1..75: mol_type = other DNA
acaccggagactctgcgtgtctgggtacgccagcatgagcgggataccggaggcggtgatggcgggctcaccacc

SEQ ID NO: 22054 - DNA, 75 bp, synthetic construct
  source 1..75: mol_type = other DNA
tattcgtagcctgactacaaaaacatgcatttctgactgcatgattaaagtcttcctcggtcgtgatggtttacc

SEQ ID NO: 22055 - DNA, 75 bp, synthetic construct
  source 1..75: mol_type = other DNA
gtcaccgcgggtggtactctgggaaatcgacctgacggtacagggtggtgagcggtattttttctgtaatgagct

SEQ ID NO: 22056 - DNA, 75 bp, synthetic construct
  source 1..75: mol_type = other DNA
actctctgtagagggtgttaatatcccatcattattacaagtcataaagccgggaacttatgtgtttttatgggt

SEQ ID NO: 22057 - DNA, 75 bp, synthetic construct
  source 1..75: mol_type = other DNA
tatggaaggcgcggaaggcaatgtgtttgtgttacgcaagacttatcagaacgagcaggcagcaagacgcgcagc

SEQ ID NO: 22058 - DNA, 75 bp, synthetic construct
  source 1..75: mol_type = other DNA
aggcagacatctgcgaatcacttcacgaccacgccgacgaactctaccgcagttgcctcgcacgcttcggcgatg

SEQ ID NO: 22059 - DNA, 75 bp, synthetic construct
  source 1..75: mol_type = other DNA
cggacgaccgacgaatggcgggaatggcaactggctgagggccggaagcgcagcgaggaagttaaccgccagaat

SEQ ID NO: 22060 - DNA, 75 bp, synthetic construct
  source 1..75: mol_type = other DNA
gccagtatgggcaaagtgtacaaaaggcgtgtatccgtcttactgggaggaatggaaaaaagtcagggaggtggt

SEQ ID NO: 22061 - DNA, 75 bp, synthetic construct
  source 1..75: mol_type = other DNA
gcaaagtgtgcggaaccccgtttgtgccgtttcgctcgtatcagaaagtttgttgcggtcagtgcgcacttgaac

SEQ ID NO: 22062 - DNA, 75 bp, synthetic construct
  source 1..75: mol_type = other DNA
ttgatgctcacgatatcttcagccacagtacaaccaaaattggttttcgccgtagtactttcttgcgcagttata

SEQ ID NO: 22063 - DNA, 75 bp, synthetic construct
  source 1..75: mol_type = other DNA
tctggcgtggggggctggcgtgcagtttaacccgaccgaatccgtggccattgatattgcttatgaaggctccgg

SEQ ID NO: 22064 - DNA, 75 bp, synthetic construct
  source 1..75: mol_type = other DNA
agacagaaaacggtgaggttccatacaccgactggatgaaaaaattaagacgtaaagaccagaccgcagcgttaa

SEQ ID NO: 22065 - DNA, 75 bp, synthetic construct
  source 1..75: mol_type = other DNA
ttggagggaataaaaaaactcagacagccgatttagataaagccgttagttatctgcaagattttaaaaagaggt

SEQ ID NO: 22066 - DNA, 75 bp, synthetic construct
  source 1..75: mol_type = other DNA
accgaatccgtggccattgatattgcttatgaaggctccggcagtggcgactggcgcactgacggtttcatcgtg

SEQ ID NO: 22067 - DNA, 75 bp, synthetic construct
  source 1..75: mol_type = other DNA
tgtccgcagccatttatctgaccgtatccggtgcgcctgcatgggcgtctgagcagcaggccacgctgagcgcgg

SEQ ID NO: 22068 - DNA, 75 bp, synthetic construct
  source 1..75: mol_type = other DNA
acctggtgacgctgttaaaagaagtggcagatttcgatatctccgtggcggcgtatccggaagttcacccggaag

SEQ ID NO: 22069 - DNA, 75 bp, synthetic construct
  source 1..75: mol_type = other DNA
gatttgtggcgtgacgcccgctgggccatcagccgggtacaggatgcgccgcactgcacagtggagcttatctga

SEQ ID NO: 22070 - DNA, 75 bp, synthetic construct
  source 1..75: mol_type = other DNA
gtctggaaaacacccacaacggcaaagtgctgccgcgtgaatacctgaaagaagcatgggaatttacccgcgagc

SEQ ID NO: 22071 - DNA, 75 bp, synthetic construct
  source 1..75: mol_type = other DNA
attaacgcctcgccgattgtccgcctggtgacccatcttgacgtctcgcgtgaacaactggcggaagttgccgcc

SEQ ID NO: 22072 - DNA, 75 bp, synthetic construct
  source 1..75: mol_type = other DNA
tacgcagggaggacgcaggaagcgaagcgctggttatctcatgcaccaaaatgaaggacgcggaggaactcaaag

SEQ ID NO: 22073 - DNA, 75 bp, synthetic construct
  source 1..75: mol_type = other DNA
tggctgggagactggtgcagtgaagagcagcatccggtgatctggtcaaccacgcaggctgcagaacacttaccg

SEQ ID NO: 22074 - DNA, 75 bp, synthetic construct
  source 1..75: mol_type = other DNA
ggccggagagcgcacgttcttccggcgtttaaaagaggggctgaccggcgaaggcgctgcacggcagaatgccat

SEQ ID NO: 22075 - DNA, 75 bp, synthetic construct
  source 1..75: mol_type = other DNA
aatgatgatattgaaaaagcattgttccgtatatccagatttaatgaccggattcaaagttttctgttcagcaaa

SEQ ID NO: 22076 - DNA, 75 bp, synthetic construct
  source 1..75: mol_type = other DNA
ctgctgagaatggacagtgagcggcgcatgaaaacgctgggggatgcggtgaaaaatacgcttctcacgcccaat

SEQ ID NO: 22077 - DNA, 75 bp, synthetic construct
  source 1..75: mol_type = other DNA
gtaaagagcgctatgaagacgagatgttcatcattaaatactttaagaagggatctgcacacatcactttcaaaa

SEQ ID NO: 22078 - DNA, 75 bp, synthetic construct
  source 1..75: mol_type = other DNA
cacgttgtgacggtacggtatgcagcactgcaacaagccgaaatgcttatccggcaactggctgaaatttcagtg

SEQ ID NO: 22079 - DNA, 75 bp, synthetic construct
  source 1..75: mol_type = other DNA
tttcgctgatatcccaggatatcgccaaaatgcggctgcgtcttatgcagacggatgcgcatgggatacgcaggg

SEQ ID NO: 22080 - DNA, 75 bp, synthetic construct
  source 1..75: mol_type = other DNA
ggatggcgatgaaatggcgttggcgcaagcgtatggaagccgcaggtaagccgaccaacaaaccaaacctggtgt

SEQ ID NO: 22081 - DNA, 75 bp, synthetic construct
  source 1..75: mol_type = other DNA
cccgtctgcctcggcggatgcgtggcatgtggctttccctgatggtgcggtcattgagtacgagcccgaaaccgg

SEQ ID NO: 22082 - DNA, 75 bp, synthetic construct
  source 1..75: mol_type = other DNA
cctgcgataacgtgcgtgaaaacggtcatgtggcgaaggtcgcggtactggggctggctcaggcgcgtgacccgc

SEQ ID NO: 22083 - DNA, 75 bp, synthetic construct
  source 1..75: mol_type = other DNA
aaaatccagattgcagtagagaagatatatccctcgcacttggaagaagcgcaacttctatcagtaatgaattat

SEQ ID NO: 22084 - DNA, 75 bp, synthetic construct
  source 1..75: mol_type = other DNA
atcttgcgggaataatgagaaagataaaaatagggctggcgctgggatctggcgcggcaagaggttggtcgcata

SEQ ID NO: 22085 - DNA, 75 bp, synthetic construct
  source 1..75: mol_type = other DNA
ctggatgttgaagtgaatggctttaacggtggtgttctgaacggtgttccttctgcatatcactggtatacagaa

SEQ ID NO: 22086 - DNA, 75 bp, synthetic construct
  source 1..75: mol_type = other DNA
gatgcaataacggcgttgcgaaaccatctggataccgccaaacaatcaatgattcgttccatcaggcaacatcac

SEQ ID NO: 22087 - DNA, 75 bp, synthetic construct
  source 1..75: mol_type = other DNA
cgccagtaagtgatgacatcagcagagcgctggcttttgctattaagtgggtggcggtcggtatcgctgtgtctc

SEQ ID NO: 22088 - DNA, 75 bp, synthetic construct
  source 1..75: mol_type = other DNA
ctctgctgggaaccttattactttccggctgcgccggaacgaactctgattttgagtgtgatgccaccacgtcag

SEQ ID NO: 22089 - DNA, 75 bp, synthetic construct
  source 1..75: mol_type = other DNA
ccggtcactggaatacgataattttccggaaatcagtgaagcgaacattctgagcacatttgaacaactgcacca

SEQ ID NO: 22090 - DNA, 75 bp, synthetic construct
  source 1..75: mol_type = other DNA
cgttatctgctcaaccagtatccgccacattctggctgtacgaaaaagtacactgctgcaaatcgacacacttat

SEQ ID NO: 22091 - DNA, 75 bp, synthetic construct
  source 1..75: mol_type = other DNA
atgatgccagttagccataatctctgcattttcttaaacgttggtttgggagaagcggcaaaacgggatgtgggg

SEQ ID NO: 22092 - DNA, 75 bp, synthetic construct
  source 1..75: mol_type = other DNA
tacttcaagaacgggttttacagcccgtatgtcaggcgccggtgggtttaatctttgctatatagcgaaagggag

SEQ ID NO: 22093 - DNA, 75 bp, synthetic construct
  source 1..75: mol_type = other DNA
gcagggtgcagatggaaaacgtatcaggcggaaatttaaaactaaaggtgaagctcaagcattcgaacgtcatgt

SEQ ID NO: 22094 - DNA, 75 bp, synthetic construct
  source 1..75: mol_type = other DNA
atggaacttaaaaaattgatggaacatatttctattatccccgattacagacaaacctggaaagtggaacataaa

SEQ ID NO: 22095 - DNA, 75 bp, synthetic construct
  source 1..75: mol_type = other DNA
gaactggctgcaaggttacgcctggtgaaaccgaaacggcgtaaagactacaaacagcgaattacagaccatcag

SEQ ID NO: 22096 - DNA, 75 bp, synthetic construct
  source 1..75: mol_type = other DNA
gctatgtaggcttgtcaaacgggcttctaatcgcacaaaatcatgaggttgtggcattagatattttaccgtcac

SEQ ID NO: 22097 - DNA, 75 bp, synthetic construct
  source 1..75: mol_type = other DNA
atggaacttaaaaaattgatggaacatatttctattatccccgattacagacaagcctggaaagtggagcataaa

SEQ ID NO: 22098 - DNA, 75 bp, synthetic construct
  source 1..75: mol_type = other DNA
gcctgccgatgccattgcccgggcggaagacgtggtgttgtgcctgtccgggatgatcgaagctgttcgtccgga

SEQ ID NO: 22099 - DNA, 75 bp, synthetic construct
  source 1..75: mol_type = other DNA
ttctgaactgtcagccctgcagcgtattgagcatcttgcctggttgaaagagcaggaaaaaaaggctgaatccag

SEQ ID NO: 22100 - DNA, 75 bp, synthetic construct
  source 1..75: mol_type = other DNA
tcacacggatgatctcgcttttggtcttcgcatctccggcaaagggcgtgcgctgcttgcgcggtacatccagca

SEQ ID NO: 22101 - DNA, 75 bp, synthetic construct
  source 1..75: mol_type = other DNA
taatccatgtcgcccgtcgggagctacaactcgacgacgacacttaccgcgcttttctgatgcagaaaacgggca

SEQ ID NO: 22102 - DNA, 75 bp, synthetic construct
  source 1..75: mol_type = other DNA
tcaggtcgttgattaccgcgttgtgaagatgcccgttaccaaaggtgggaagctggagctgactatcactgaact

SEQ ID NO: 22103 - DNA, 75 bp, synthetic construct
  source 1..75: mol_type = other DNA
tgggggaaacccgctatcagctggctgacggctcgttgctgtgcagagacgtgccgataggacgaacaggtaagc

SEQ ID NO: 22104 - DNA, 75 bp, synthetic construct
  source 1..75: mol_type = other DNA
tcaacaatgccaaagggtttggtttcatctgccctgaaggcggcggcgaagatattttcgctcattattccacca

SEQ ID NO: 22105 - DNA, 75 bp, synthetic construct
  source 1..75: mol_type = other DNA
tttgccgtcctgctggcgaacatcacggttcctctgatcgattactacacgcgtccgcgcgtctacggccatcgc

SEQ ID NO: 22106 - DNA, 75 bp, synthetic construct
  source 1..75: mol_type = other DNA
aagaaagcggataacggctggttacaacttaataccgccaaaacagataaggatggacgaattaaggcactgtgg

SEQ ID NO: 22107 - DNA, 75 bp, synthetic construct
  source 1..75: mol_type = other DNA
gcatctccctatgtcagctatgaagccgtgatgcataaacgtgagcagcgccgcaagtcactggagtttttccgt

SEQ ID NO: 22108 - DNA, 75 bp, synthetic construct
  source 1..75: mol_type = other DNA
caaggaaacgggtaaatccctgcgtgataacgctgaatacgttaatgcctgggcgtctcttcatcgtgttcagca

SEQ ID NO: 22109 - DNA, 75 bp, synthetic construct
  source 1..75: mol_type = other DNA
gcgccatgtcacacttaacggctcggaagaaagcattattactgacgatgaacgcccttttgtggcacatcgacc

SEQ ID NO: 22110 - DNA, 75 bp, synthetic construct
  source 1..75: mol_type = other DNA
agcagggtgatgtgatcctgctggatgaaccttttaccggcgttgatgtgaaaaccgaagcgaaaatcatcagcc

SEQ ID NO: 22111 - DNA, 75 bp, synthetic construct
  source 1..75: mol_type = other DNA
cgtacaagagccaatgtggcaactgaaaccgcaaatatacaaacaattatcacaagtgcccagagcctgctaaaa

SEQ ID NO: 22112 - DNA, 75 bp, synthetic construct
  source 1..75: mol_type = other DNA
gtcaccatccgcgcccggagtgcagattttcgcgggacgctcaattcccgccgtgaaggctcctggcatgacacc

SEQ ID NO: 22113 - DNA, 75 bp, synthetic construct
  source 1..75: mol_type = other DNA
tactgtcaatccggataacggttttacgaccagtctggagcttgaagtgaagattaatgatttcgaaatggaatg

SEQ ID NO: 22114 - DNA, 75 bp, synthetic construct
  source 1..75: mol_type = other DNA
actttctgaataatagtggcttcacgacgtccttagaacttgaggtaaggctttctgatgtggagtacgaaacag

SEQ ID NO: 22115 - DNA, 75 bp, synthetic construct
  source 1..75: mol_type = other DNA
cctgaccacggtatatgccacgaaagcacaggccatgcgtgccgctcaggcgaagtgggataaactgcaacgggg

SEQ ID NO: 22116 - DNA, 75 bp, synthetic construct
  source 1..75: mol_type = other DNA
tagccgcgcgtcacaagctgaagatggcactgggtaaagacctgtcggataagcccgtggaacatatagaccaga

SEQ ID NO: 22117 - DNA, 75 bp, synthetic construct
  source 1..75: mol_type = other DNA
taaacaacaaaaatgaactggttattcccttcagtaaccgtaacggcgcgatacgctcttaccagcgtattccgg

SEQ ID NO: 22118 - DNA, 75 bp, synthetic construct
  source 1..75: mol_type = other DNA
ctgcgaccaccgaaagcctgcgtgcggcaacgcacgacgtgctggctggcctgaccgcgcgtgaagcgaaagttc

SEQ ID NO: 22119 - DNA, 75 bp, synthetic construct
  source 1..75: mol_type = other DNA
aaattaccgacaagaagggaaagggccttcccgagagtggtaaaggagaggccctggaaataccccacagccccg

SEQ ID NO: 22120 - DNA, 75 bp, synthetic construct
  source 1..75: mol_type = other DNA
gcggtgctttgcagccaactggtaccgcaggaatttgcttttgaagcgttaatgcatgatgcaacagaagcgtat

SEQ ID NO: 22121 - DNA, 75 bp, synthetic construct
  source 1..75: mol_type = other DNA
aagcccgtggagcatatagaccagactaatgagagtgacggcagttttttgatgcggctggcgcgccagtacggt

SEQ ID NO: 22122 - DNA, 75 bp, synthetic construct
  source 1..75: mol_type = other DNA
aagggaaatttaccgttgatgaggttgaacaccggggcgcgccggatgtggttaccatccgcgcccggagtgcag

SEQ ID NO: 22123 - DNA, 75 bp, synthetic construct
  source 1..75: mol_type = other DNA
atgaccattctggactatatcgccgccaatccggggtgtagcggtggagaaatcgccgcagcactgaatacccca

SEQ ID NO: 22124 - DNA, 75 bp, synthetic construct
  source 1..75: mol_type = other DNA
gcacccaatggggtgacgaaggtaaaggtaagatcgtcgatcttctgactgaacgggctaaatatgttgtacgct

SEQ ID NO: 22125 - DNA, 75 bp, synthetic construct
  source 1..75: mol_type = other DNA
ggcaggtcgggctgccggttcgtggcgctgtcctgacggtgtatatcggctggaaaggttttgccctggtatgca

SEQ ID NO: 22126 - DNA, 75 bp, synthetic construct
  source 1..75: mol_type = other DNA
ccgtgaaggctcctggcatgacaccacgctcggtgcgattgttgaggcgatagcctcccgtaacaggctggaagc

SEQ ID NO: 22127 - DNA, 75 bp, synthetic construct
  source 1..75: mol_type = other DNA
tgcggtcattacgctggcgctgggctggaaggggcagccgcttttccctaaaggggcattcacagtggacgagat

SEQ ID NO: 22128 - DNA, 75 bp, synthetic construct
  source 1..75: mol_type = other DNA
accgtcggggaagtggtgaaggaaatagctgtgcggcacaaactgaagatggcattgggtaaagacctgtcagat

SEQ ID NO: 22129 - DNA, 75 bp, synthetic construct
  source 1..75: mol_type = other DNA
cccgcgaacccgcgaagaaagaaagcactacggtgaagcgtaagcgcaagactaagaagcagaagaaagagccgg

SEQ ID NO: 22130 - DNA, 75 bp, synthetic construct
  source 1..75: mol_type = other DNA
gccggtacttccggcagacggaacgcaggtgtctttcccgtatgccggtgagtggctggcagaagacgaaatcag

SEQ ID NO: 22131 - DNA, 75 bp, synthetic construct
  source 1..75: mol_type = other DNA
gcgacgttacttatcaaccgtcacggcggcgtactgccgccgctcctggcctccgccattcagaaactgaccgga

SEQ ID NO: 22132 - DNA, 75 bp, synthetic construct
  source 1..75: mol_type = other DNA
cccacaatatccgatgattgagatcaacgggaactgcaaaatcatcggtgtagttgtcgatgcaaaaatagcaaa

SEQ ID NO: 22133 - DNA, 75 bp, synthetic construct
  source 1..75: mol_type = other DNA
atgtactcaccggcaaaatattctgccgattactgaacacgcatccggcacctcaggttttgatttattctggtt

SEQ ID NO: 22134 - DNA, 75 bp, synthetic construct
  source 1..75: mol_type = other DNA
gttctgcgggaggtggtccgggaagcccgggccgaaatccgcagcatggcggatgccctggcaaaaatccggaaa

SEQ ID NO: 22135 - DNA, 75 bp, synthetic construct
  source 1..75: mol_type = other DNA
gtggactggcttcttgatgtttttgcaacctggctctacggcttaaaagtaatcgcgataacgttagcggtcatc

SEQ ID NO: 22136 - DNA, 75 bp, synthetic construct
  source 1..75: mol_type = other DNA
cctcgaagaggccaaagcggcgaacaaaatcagcccggtcagtgagtcacccatcgaccccttcggggcgaccgg

SEQ ID NO: 22137 - DNA, 75 bp, synthetic construct
  source 1..75: mol_type = other DNA
gaattacgagaagcgccataccaaacaggggatacagaccaacctgacgctgaaagaggaaagctacggcgactg

SEQ ID NO: 22138 - DNA, 75 bp, synthetic construct
  source 1..75: mol_type = other DNA
atgcgaaaaggaaggaagtcagttaatggcctcgttttgcaaacagataaaaaattaagatggtttactactata

SEQ ID NO: 22139 - DNA, 75 bp, synthetic construct
  source 1..75: mol_type = other DNA
tggcgctggcactcgttgcgctgggctggcagtcgtggcggcttaacagcgccagccacaccatcgaaacgcagc

SEQ ID NO: 22140 - DNA, 75 bp, synthetic construct
  source 1..75: mol_type = other DNA
atatcgtcgattcagatcagatcgaagacatcatccaaatgatcaacgacatgggcattcaggtgatggaagaag

SEQ ID NO: 22141 - DNA, 75 bp, synthetic construct
  source 1..75: mol_type = other DNA
gaaacggaagcccgttaaaaccgcatgaaatagcgccatcggccagactgacccggtcggaacgaatgcaaatta

SEQ ID NO: 22142 - DNA, 75 bp, synthetic construct
  source 1..75: mol_type = other DNA
tagaccgcgcatttcttgcactttctcacagtgaaaacatgatggaaatattgcgcatatggcttgaaacacttg

SEQ ID NO: 22143 - DNA, 75 bp, synthetic construct
  source 1..75: mol_type = other DNA
acatcgaggggagggaacaggctttcatacaagggctattaagtcagatctccgctcattgcgtaaacctctata

SEQ ID NO: 22144 - DNA, 75 bp, synthetic construct
  source 1..75: mol_type = other DNA
ccgggcgcaaatgttcgaggcttccagccatatctttgacatagagaaggtagtggaagcagatcttcaaaaggc

SEQ ID NO: 22145 - DNA, 75 bp, synthetic construct
  source 1..75: mol_type = other DNA
atgaatatcagcacagagacccgcgaaattctgcgcaattacaaagctgtgattaatgcacgacgtcgtgagatg

SEQ ID NO: 22146 - DNA, 75 bp, synthetic construct
  source 1..75: mol_type = other DNA
tgacgggaaatgcaggtccacagggtccaaagggagataccggtgcggcaggcccggcaggcccacagggaccga

SEQ ID NO: 22147 - DNA, 75 bp, synthetic construct
  source 1..75: mol_type = other DNA
cacaacatcgaaatatctgttcggtattggtgcagcggttctggtttatttcgggattaaaaaactgaaaaaagg

SEQ ID NO: 22148 - DNA, 75 bp, synthetic construct
  source 1..75: mol_type = other DNA
tgcacctggcctttgatggttatcccaccgggcttgatgagaactatatcgaaacgctgacccgacaattattaa

SEQ ID NO: 22149 - DNA, 75 bp, synthetic construct
  source 1..75: mol_type = other DNA
atttgcaggtcaggtttggtgacgggccgtggcaggatgtcaaggggctggatgaagtgggcagtgatacaggca

SEQ ID NO: 22150 - DNA, 75 bp, synthetic construct
  source 1..75: mol_type = other DNA
gatgaaaagaagaaaaaagctcaaaccacacaaagtaattttaataaaaacgctccgcagcaactaacagacaaa

SEQ ID NO: 22151 - DNA, 75 bp, synthetic construct
  source 1..75: mol_type = other DNA
atcaggaactggttaagctagtcgccgaacgcagcaaccagaagctgcacgatgtggatctggatagctacttat

SEQ ID NO: 22152 - DNA, 75 bp, synthetic construct
  source 1..75: mol_type = other DNA
atggataagaaaatatgcgttgtttcaatgagcgtcggcaaaccggcgtcaatgactgctgcatggatcaacaat

SEQ ID NO: 22153 - DNA, 75 bp, synthetic construct
  source 1..75: mol_type = other DNA
gagaacagtcgcggcgagtttctgcttggcaaaagaaccaaccgcccggcgcagggttactggtttgtgccggga

SEQ ID NO: 22154 - DNA, 75 bp, synthetic construct
  source 1..75: mol_type = other DNA
ccagtgcaagcgtcagtgaactgaaaaaaaatccaatggcgacagtcagtgccggagagggttatcctgttgcca

SEQ ID NO: 22155 - DNA, 75 bp, synthetic construct
  source 1..75: mol_type = other DNA
atggaacttaaaaaactgatggaacatatttctattatccccgattacagacaagcctggaaagtagaacataaa

SEQ ID NO: 22156 - DNA, 75 bp, synthetic construct
  source 1..75: mol_type = other DNA
cttatccaacgctttggctccgcgctaaatctcaatgtccactaccacatgctgtttctcgatggtgtctatgcc

SEQ ID NO: 22157 - DNA, 75 bp, synthetic construct
  source 1..75: mol_type = other DNA
cccgaagaggggctgaaacggatgctgggcgaaacccggcactacggtattcccgccacgctgcggggcatggtg

SEQ ID NO: 22158 - DNA, 75 bp, synthetic construct
  source 1..75: mol_type = other DNA
atgccatgttcgatacagggcgttacaggcgaaaaaaaatccggtaccgcgatgaagtgactggaaaaatgataa

SEQ ID NO: 22159 - DNA, 75 bp, synthetic construct
  source 1..75: mol_type = other DNA
atggccactttaacaaaaaaagaacgggcatggttgaatgaattacaggacgttcttgatcgctgtccatcacca

SEQ ID NO: 22160 - DNA, 75 bp, synthetic construct
  source 1..75: mol_type = other DNA
gcaaaaaaggccagcagggccaggctactgacgctctaaatagggctaagcaacaggcggggaatgatgatccat

SEQ ID NO: 22161 - DNA, 75 bp, synthetic construct
  source 1..75: mol_type = other DNA
cagatggtgaaggaggctgtaagccatatccctgttccgcgcgacggtcgtgactatgatcccgatgttctgcag

SEQ ID NO: 22162 - DNA, 75 bp, synthetic construct
  source 1..75: mol_type = other DNA
agtctcaggaaataaacctggattatatccttggactgattttcgaacacaacagacaaaataaaggcaagggcg

SEQ ID NO: 22163 - DNA, 75 bp, synthetic construct
  source 1..75: mol_type = other DNA
taaacccgcaatataaaacgaaaaaacagaccgttttccagaaaatcgtcacgtttattgaaaagttcaaaggag

SEQ ID NO: 22164 - DNA, 75 bp, synthetic construct
  source 1..75: mol_type = other DNA
gctggcgaacgagcgcaaggtttcggtctccacgcatcgtcaggcattggcggccttgctgttcttctacggcaa

SEQ ID NO: 22165 - DNA, 75 bp, synthetic construct
  source 1..75: mol_type = other DNA
agccgaagaagaagctaaggcagcagctgaagctctcgcaaagcaaattgagtctgaccatgaaatagcgatttt

SEQ ID NO: 22166 - DNA, 75 bp, synthetic construct
  source 1..75: mol_type = other DNA
tgttaattgtcgtctgtgtgacgatactgtgttttgtctggatggtgagggattcgctttgcggattccgtgtcg

SEQ ID NO: 22167 - DNA, 75 bp, synthetic construct
  source 1..75: mol_type = other DNA
gtaaagcggtttccgcaagagtaatcaggtcaacccttgttgacgtttttcgaggggcaatagccgaggggcatg

SEQ ID NO: 22168 - DNA, 75 bp, synthetic construct
  source 1..75: mol_type = other DNA
ggtcacggatgcagggcaggctggtgttgctgcaatgattatcaacgatgccctacaccacagcgaaactccagc

SEQ ID NO: 22169 - DNA, 75 bp, synthetic construct
  source 1..75: mol_type = other DNA
aatacggcattatcagccggactatgatgaatattcgttcattgcgtgtgtttgcccgtgagattgattttgagc

SEQ ID NO: 22170 - DNA, 75 bp, synthetic construct
  source 1..75: mol_type = other DNA
accgagcttcggacaatgggttggcgttcatctttcaggggaaaacaaacgacagttatggattccggaaggatt

SEQ ID NO: 22171 - DNA, 75 bp, synthetic construct
  source 1..75: mol_type = other DNA
agaaagttatgggcaatgggttggagtatttttatctgaggataataatagacagttatggatacctgaaggatt

SEQ ID NO: 22172 - DNA, 75 bp, synthetic construct
  source 1..75: mol_type = other DNA
taaaacttttggcaaatgggtcggtgtaaatctttctgctgaaaacaaacgacagttgtggattccagaaggatt

SEQ ID NO: 22173 - DNA, 75 bp, synthetic construct
  source 1..75: mol_type = other DNA
cagatctgatcgttcttgaaccaaaagtgtttagtgatgaacgcggcttttttatggagagttataatcagattg

SEQ ID NO: 22174 - DNA, 75 bp, synthetic construct
  source 1..75: mol_type = other DNA
gactttgctgataagcgtggtatgcgttatgtgcgggttaacgctcctgcaggtgcaacatctggaaaatattac

SEQ ID NO: 22175 - DNA, 75 bp, synthetic construct
  source 1..75: mol_type = other DNA
agtcccctggtgcatcattctgacagggggctgcaatactgttcagcgctctatcagtcagttcatgaaagaaat

SEQ ID NO: 22176 - DNA, 75 bp, synthetic construct
  source 1..75: mol_type = other DNA
gaaccgccccgggtttcctggagagtgttttatctgtgaactcaggctgccagatcatcgtttccgatggaagca

SEQ ID NO: 22177 - DNA, 75 bp, synthetic construct
  source 1..75: mol_type = other DNA
acgacgaaaaaggggatagtacagctcagcagtgcgaccaacagtacgtctgaaacgctggcggcaacgccaaag

SEQ ID NO: 22178 - DNA, 75 bp, synthetic construct
  source 1..75: mol_type = other DNA
taatgaaaatgatctgatcttctttgataatggccaggagataccgctcgttataagcatgatcccggatgcaat

SEQ ID NO: 22179 - DNA, 75 bp, synthetic construct
  source 1..75: mol_type = other DNA
actgatagcgaaagcctggcgttttgtgcgtgagcgtttccgcagttaccagacagagcttaagtcccggggaat

SEQ ID NO: 22180 - DNA, 75 bp, synthetic construct
  source 1..75: mol_type = other DNA
gtgcgtgagcgtttccgcagttaccagacagagcttaagtcccggggaataaagcgtgcccgtgcgcgtcgtgat

SEQ ID NO: 22181 - DNA, 75 bp, synthetic construct
  source 1..75: mol_type = other DNA
tgtgcgcaaacgcgttgctgaaattcacagcactgcgccagtcgtcgaggaagatgaagaaaaacaggaaattgt

SEQ ID NO: 22182 - DNA, 75 bp, synthetic construct
  source 1..75: mol_type = other DNA
ctcccgttttgatttcgccattcatgtggcacatgcccgttcgaagggactgcgtcggcgcatgccaccggtact

SEQ ID NO: 22183 - DNA, 75 bp, synthetic construct
  source 1..75: mol_type = other DNA
ctgcggtcagaccggcggcggcaactgccctgattgtggcgcggtgatgggcgacgcaacataccaggaaacatt

SEQ ID NO: 22184 - DNA, 75 bp, synthetic construct
  source 1..75: mol_type = other DNA
gttaattttctttatgagtcatcggaaagaccatattgtcatcacgcctctgttcgggttgacgaaaaagagcgt

SEQ ID NO: 22185 - DNA, 75 bp, synthetic construct
  source 1..75: mol_type = other DNA
accttcccggcacgttcttgcgttgaagttgcccgtctgccgaaagacgtgaagattgagatcgaagcgatcgct

SEQ ID NO: 22186 - DNA, 75 bp, synthetic construct
  source 1..75: mol_type = other DNA
cgtgactatttcggtgcgcatacttataagcgcattgataaagaaggtgtgttccataccgaatggctggattaa

SEQ ID NO: 22187 - DNA, 75 bp, synthetic construct
  source 1..75: mol_type = other DNA
agactggcagatgatgtaaggatcttgcgccaggaggaacgggaaaggcggagaaatatagaaaagctaattcag

SEQ ID NO: 22188 - DNA, 75 bp, synthetic construct
  source 1..75: mol_type = other DNA
cccgcctgcaccgacgccagtgattgtcgccaacgcctgcccgaaagtgagcctttgcccgatgccgggcagtga

SEQ ID NO: 22189 - DNA, 75 bp, synthetic construct
  source 1..75: mol_type = other DNA
aagcagcatgacggttccgggcaacgtaattatggttgcagtcgtgggccggggcgtctactggatggcaggtga

SEQ ID NO: 22190 - DNA, 75 bp, synthetic construct
  source 1..75: mol_type = other DNA
gctgggacagccgcactatggcggcatcgtggaacggatcatcggcacggcgatgcagatgattcacgacgaact

SEQ ID NO: 22191 - DNA, 75 bp, synthetic construct
  source 1..75: mol_type = other DNA
acgtccgagacgaatgccaggtcttctgaaacggcagcggaacagagcgcctcagctgcggcagactctgagaca

SEQ ID NO: 22192 - DNA, 75 bp, synthetic construct
  source 1..75: mol_type = other DNA
tttctgaatttgaaaccgtcgagcaagaaaatagttataacgaatggctgcgtgcaaaagtggccgcaagccttg

SEQ ID NO: 22193 - DNA, 75 bp, synthetic construct
  source 1..75: mol_type = other DNA
tatgtctgcaaagaactggtgtatgcctatgcaatgtggataagcccgtcattccatctgaaggtgatccgtact

SEQ ID NO: 22194 - DNA, 75 bp, synthetic construct
  source 1..75: mol_type = other DNA
cgggttaagcaggtgatgccaactgaaaactggtatcgcgagcatatgccgccggtcaaggctgcgctggaagat

SEQ ID NO: 22195 - DNA, 75 bp, synthetic construct
  source 1..75: mol_type = other DNA
atgggtaaaaaaagctactggtggtactgtaaaagaaggtgattttactgcagttgctaactttaatctgagtta

SEQ ID NO: 22196 - DNA, 75 bp, synthetic construct
  source 1..75: mol_type = other DNA
gtgcactgctgaaacagtatggtatacgcctgacggctaatcaggcatatcaccagatggtgaaactggggatcg

SEQ ID NO: 22197 - DNA, 75 bp, synthetic construct
  source 1..75: mol_type = other DNA
tacggttcacaggcaattggcggtattgttaacttcatcaccaaaaagggtgaatctccggactccctatatcac

SEQ ID NO: 22198 - DNA, 75 bp, synthetic construct
  source 1..75: mol_type = other DNA
atgcaagaagggcaaaaccgtaaaacatcgtccctgagtattctcgccatcgctggggtggaaccatatcaggag

SEQ ID NO: 22199 - DNA, 75 bp, synthetic construct
  source 1..75: mol_type = other DNA
aggggaagccgtgggctggtgactggaaatatgtaccgacaaaagaggattgtaacgacaggccgaactatgaaa

SEQ ID NO: 22200 - DNA, 75 bp, synthetic construct
  source 1..75: mol_type = other DNA
cgaaacaggtgcatggaaagatgctgttgactgggtactcaaagaggcttgtcaggttgtaaacattcgcatcaa

SEQ ID NO: 22201 - DNA, 75 bp, synthetic construct
  source 1..75: mol_type = other DNA
tgtgtttgcggggcgcacactgacggtgacccgttatgacacgtacaacggtaaaccccggatttttgtcgaaca

SEQ ID NO: 22202 - DNA, 75 bp, synthetic construct
  source 1..75: mol_type = other DNA
ccggcgctgcagaaattgaagcagcatatcagaacgggcaaaccgtgaccgtccggcatgttctgcttggtgacg

SEQ ID NO: 22203 - DNA, 75 bp, synthetic construct
  source 1..75: mol_type = other DNA
aagagcagaagattagccaggctacactggacgcccttgaatccgagctttaccgtaatttgcgccctctgtatc

SEQ ID NO: 22204 - DNA, 75 bp, synthetic construct
  source 1..75: mol_type = other DNA
cgtttgaaatccgggtataccgccattaccgcattgtgcatggtactcgggtcgcgctggcattcctgctcactt

SEQ ID NO: 22205 - DNA, 75 bp, synthetic construct
  source 1..75: mol_type = other DNA
cgtcatcttttatgctggttggctgtacgcctcgcattgaagtcgctgcacctaaggaaccgatcactatcaata

SEQ ID NO: 22206 - DNA, 75 bp, synthetic construct
  source 1..75: mol_type = other DNA
attgcactggaaaaactggccagttttcctggttctgctgatatttaccacgcaattcacctttcatttgacata

SEQ ID NO: 22207 - DNA, 75 bp, synthetic construct
  source 1..75: mol_type = other DNA
gtcttcgccgccgctgggtgcgcctgcgcttatatcgttttcctggttctgttttgaccgattaccgaatactga

SEQ ID NO: 22208 - DNA, 75 bp, synthetic construct
  source 1..75: mol_type = other DNA
ccggagagataaaaggccgtcaggatgtgattcaggcgctcacagaggcggggcttgaagtggtcagggtgacgc

SEQ ID NO: 22209 - DNA, 75 bp, synthetic construct
  source 1..75: mol_type = other DNA
tgtatgtgggtgctgaagcaggctaccgctatcatgtaacagaagactcctggattgagccgcaggcagaactgg

SEQ ID NO: 22210 - DNA, 75 bp, synthetic construct
  source 1..75: mol_type = other DNA
acaaccggataacgccaacgctaaaaccggtaatacgatgccgtgggtgtttgactgcggcaagattgaccaggt

SEQ ID NO: 22211 - DNA, 75 bp, synthetic construct
  source 1..75: mol_type = other DNA
atgatttacatcggtctgccgcaatggtcgcatcctaaatgggtgcggttggggatcaccagccttgaagagtat

SEQ ID NO: 22212 - DNA, 75 bp, synthetic construct
  source 1..75: mol_type = other DNA
taattctgggcaaacgcgaagaagccctgcgtattgctcaggagatgctggagagaggtttagaccgagagttag

SEQ ID NO: 22213 - DNA, 75 bp, synthetic construct
  source 1..75: mol_type = other DNA
atgaatcaaatcgaccgtttgctcactattatgcagcgcctgcgcgatccggaaaacggctgcccgtgggataaa

SEQ ID NO: 22214 - DNA, 75 bp, synthetic construct
  source 1..75: mol_type = other DNA
ggcattgttgatcttgaacaagcgcgtgaaatggtacgcatcaacggcgaccttgggcgtcttggcgggttatta

SEQ ID NO: 22215 - DNA, 75 bp, synthetic construct
  source 1..75: mol_type = other DNA
cggtgataatgccaatgcgtcaaaagagtatgcaatggcgctgggagcaagtagcaaagctggcggtgctgatag

SEQ ID NO: 22216 - DNA, 75 bp, synthetic construct
  source 1..75: mol_type = other DNA
gtaagaggccccggaacgttatcgttcacacggaccgtggaggccagtactgttcagcagattatcagccgggaa

SEQ ID NO: 22217 - DNA, 75 bp, synthetic construct
  source 1..75: mol_type = other DNA
gtggattcagatgcgcgataacaacgctatctttgggaaaaatatagttaacactgatagcgctcaggcgttgct

SEQ ID NO: 22218 - DNA, 75 bp, synthetic construct
  source 1..75: mol_type = other DNA
tggcggtgcatcaatggcctttggggttagtgcaatatcagaaggcgatagaagtatagcactgggtgcctcttc

SEQ ID NO: 22219 - DNA, 75 bp, synthetic construct
  source 1..75: mol_type = other DNA
tcgccaggttactgcgggctggagaacttacccctgtctggatccctgacctgactcatgaagctatgcgggatc

SEQ ID NO: 22220 - DNA, 75 bp, synthetic construct
  source 1..75: mol_type = other DNA
gggaaatatgttcaaccaattactgacctctaaaaagctgacaaaaacggcaattaacgaggcgctccggaggat

SEQ ID NO: 22221 - DNA, 75 bp, synthetic construct
  source 1..75: mol_type = other DNA
ctgaataacagtggtgctgttcagggggcttccctgacgctcggcagtacaacgctcagcaacagtggctccctg

SEQ ID NO: 22222 - DNA, 75 bp, synthetic construct
  source 1..75: mol_type = other DNA
atatttatgttatatggtgcagataaaaacaataaactacgcagaagactgatttatgacgcactaggaataatt

SEQ ID NO: 22223 - DNA, 75 bp, synthetic construct
  source 1..75: mol_type = other DNA
gcttcacaacagcagcggacctgctgctacagctgtccacttcacagcgtcagggccgttacaaaacgactctca

SEQ ID NO: 22224 - DNA, 75 bp, synthetic construct
  source 1..75: mol_type = other DNA
tgtcccacctgctgccggcggcccagggcttggcccgtcttccggcggacgagcgcatccagcgccttcgcgccg

SEQ ID NO: 22225 - DNA, 75 bp, synthetic construct
  source 1..75: mol_type = other DNA
atggcggttggcagagccatgctgtatgagaaagaagacacgctgtccgaccacattgagtcctacgggatccgc

SEQ ID NO: 22226 - DNA, 75 bp, synthetic construct
  source 1..75: mol_type = other DNA
ttaatgccgcaaatcagtatgcacgtgatgtggttcgcggaaaaattcaggtttgccgttatgtcgttctggcct

SEQ ID NO: 22227 - DNA, 75 bp, synthetic construct
  source 1..75: mol_type = other DNA
caggcggtcaccgaactcgataataaagcggctcattgccatacgccagtcccgcagtggcatcgtccatttctg

SEQ ID NO: 22228 - DNA, 75 bp, synthetic construct
  source 1..75: mol_type = other DNA
tcaccagtggagcagtctgaactgcctatggctatttctgcgctctggtcggtttatcgtgatgtgggggtgtac

SEQ ID NO: 22229 - DNA, 75 bp, synthetic construct
  source 1..75: mol_type = other DNA
ttgtattttttgacaaaaatgctatgtgtagatctgtatttacagtcttgtgtggaggatggaaaggaacctgat

SEQ ID NO: 22230 - DNA, 75 bp, synthetic construct
  source 1..75: mol_type = other DNA
acacgcttacctgataccgttcgacaaacgccagaaagtaaatggaagatgggaaaccgtatctacagaagcaca

SEQ ID NO: 22231 - DNA, 75 bp, synthetic construct
  source 1..75: mol_type = other DNA
ctgggcgaaattccctggcttgcagaaaatccagaaaatgcggcaaccggaaagtacatcaatcttgccttaatg

SEQ ID NO: 22232 - DNA, 75 bp, synthetic construct
  source 1..75: mol_type = other DNA
ggaagaagacccggacattccgggtatcgggtattacggttcgaaatggcgtgacagctcagccacctggacgtc

SEQ ID NO: 22233 - DNA, 75 bp, synthetic construct
  source 1..75: mol_type = other DNA
caacaccgatcctgttcttcctgtcctgcagggagaagtacgacagcagaaacgtggtctgtgggcagacagcgc

SEQ ID NO: 22234 - DNA, 75 bp, synthetic construct
  source 1..75: mol_type = other DNA
ttttactccggtgtgctcctgtttattctgtatttttgtttttctgccctgactgacctgcagaaacctgatgaa

SEQ ID NO: 22235 - DNA, 75 bp, synthetic construct
  source 1..75: mol_type = other DNA
cccggcagaagacccggacctggaagccgtcggttattacggttcaaagtggcgtaatgaccagaagacctggac

SEQ ID NO: 22236 - DNA, 75 bp, synthetic construct
  source 1..75: mol_type = other DNA
caaagaggcggcaaaatcatcagaaacgaacgcctccacaagcgccagcagtgcagcctcctcggcaacggcggc

SEQ ID NO: 22237 - DNA, 75 bp, synthetic construct
  source 1..75: mol_type = other DNA
gtgacgattcatacgtcaccagcatattctgctaataagccggaagggttaacggacggtacagtttattcactc

SEQ ID NO: 22238 - DNA, 75 bp, synthetic construct
  source 1..75: mol_type = other DNA
cttgcaatggtacagcagttccgtgctgaccttgccgggctggcggcgcagtgtcacggtggaagtccggcatca

SEQ ID NO: 22239 - DNA, 75 bp, synthetic construct
  source 1..75: mol_type = other DNA
taatgcgcggtggaaatggacaacagattacaaccgtcgctcgatagcggaaacggcgatgtaccgggtaaaaca

SEQ ID NO: 22240 - DNA, 75 bp, synthetic construct
  source 1..75: mol_type = other DNA
accgcctcggtcgtgatcttcgtcatctcattaatacagtgcacgacctgaccgcgagggggaccggtctgaaag

SEQ ID NO: 22241 - DNA, 75 bp, synthetic construct
  source 1..75: mol_type = other DNA
agagcagggggttgataccaaaattttgctaggccattcgaatcaaaaaatgaccgatatttacaacgacgcacg

SEQ ID NO: 22242 - DNA, 75 bp, synthetic construct
  source 1..75: mol_type = other DNA
gaacggtgaaatggcgctcagtgcactgaatttaagcaacagcggacaatggattgcaaaaaatctgaccctgaa

SEQ ID NO: 22243 - DNA, 75 bp, synthetic construct
  source 1..75: mol_type = other DNA
ctgaaagcgggcggggaagcgaagggtatcatcaacgaagtgaccggcggtaaccgttcactgctgcagggctat

SEQ ID NO: 22244 - DNA, 75 bp, synthetic construct
  source 1..75: mol_type = other DNA
agaaaaaacaaaaaaattttcattcgctgttgtcccttttccctcactcgttcgacttattcattgaaaccaaaa

SEQ ID NO: 22245 - DNA, 75 bp, synthetic construct
  source 1..75: mol_type = other DNA
cgcctgtgtaatgactactggaataagcgaattatgttccgggaatatgaccgcctgattatcacaaagggatat

SEQ ID NO: 22246 - DNA, 75 bp, synthetic construct
  source 1..75: mol_type = other DNA
ggttcgggtcggggctgcctgggtatatgagcagtacaagggggaagggctaatggaacggaaacgtacgttaag

SEQ ID NO: 22247 - DNA, 75 bp, synthetic construct
  source 1..75: mol_type = other DNA
cccgtttgagaaccttcgccgcaaggggcatcactgccacggcctgacgcacctgtcctgggcagaacgcaaaat

SEQ ID NO: 22248 - DNA, 75 bp, synthetic construct
  source 1..75: mol_type = other DNA
agaaatcgggggcgctggtttacagcggccacggcgccagcggcaagcaggtgtggctgtttaccggccagggct

SEQ ID NO: 22249 - DNA, 75 bp, synthetic construct
  source 1..75: mol_type = other DNA
ccgaacgcgtggaaatcgacgtcagtcataacgcccttgccggtgggcttctctgtgcggacggccagtggcggc

SEQ ID NO: 22250 - DNA, 75 bp, synthetic construct
  source 1..75: mol_type = other DNA
ctcgaccagctcaaacgcgaaaacagtgatgaggactttaagaacctgtttatgtgcgagtttgtcgacgataaa

SEQ ID NO: 22251 - DNA, 75 bp, synthetic construct
  source 1..75: mol_type = other DNA
agaacgtgaaagcgttttttccagccgtccgggagtttgtctataaccccaatgttaaaaacgccctggtactca

SEQ ID NO: 22252 - DNA, 75 bp, synthetic construct
  source 1..75: mol_type = other DNA
ctacgcatggagtacagcccggacgaatatcagaacctgctgatgtgcgagttcgtggacgatctcgcgtccgtg

SEQ ID NO: 22253 - DNA, 75 bp, synthetic construct
  source 1..75: mol_type = other DNA
tgagagcagtctggcggacagtaatgccagtgcccgggcatctgacgacgcgcagttgctgggatatggtgaagg

SEQ ID NO: 22254 - DNA, 75 bp, synthetic construct
  source 1..75: mol_type = other DNA
tatgcccgcctgttccactggtattgaccctggcgaaaacattccgggaagagtggcagtatttacaggtaaggg

SEQ ID NO: 22255 - DNA, 75 bp, synthetic construct
  source 1..75: mol_type = other DNA
tgagaaatgggtgaccgatactgaggcacagcatagcgccgcagtagacgcggcagaagcacagcgtcagtcact

SEQ ID NO: 22256 - DNA, 75 bp, synthetic construct
  source 1..75: mol_type = other DNA
tgaaacatttaaatactatacgacagcgacatttatcgcttcggtcgtcgctctggcgggcacattcctgctgtc

SEQ ID NO: 22257 - DNA, 75 bp, synthetic construct
  source 1..75: mol_type = other DNA
cccgcccactggacccgtgagtatactcacgagtgcgtggaaaaaataaagaccctgtttcctcatcttcgtgct

SEQ ID NO: 22258 - DNA, 75 bp, synthetic construct
  source 1..75: mol_type = other DNA
gggctatataagagcagcgcgtatccacttacccagtgcggttgagaaaatcgcctttgaccgcttccatgtggc

SEQ ID NO: 22259 - DNA, 75 bp, synthetic construct
  source 1..75: mol_type = other DNA
gtggctgagataaaaacgctgcatctggtcccgcgtgaagggatgcaggtgagtgagaagccgtcggtggtgagg

SEQ ID NO: 22260 - DNA, 75 bp, synthetic construct
  source 1..75: mol_type = other DNA
atcacctgctttgccgctacggtgtcgcgcttattgcacatggacaaaatataactctcgccatgaaagaggggg

SEQ ID NO: 22261 - DNA, 75 bp, synthetic construct
  source 1..75: mol_type = other DNA
atactttcttgcttgaaatgatgaaggataaatcgaaagacgttacacttgctgtgatctatgcattaggtgaag

SEQ ID NO: 22262 - DNA, 75 bp, synthetic construct
  source 1..75: mol_type = other DNA
gcaaggtactccagagttccagatgctgatgctgcaatacttcacgctgcttgacggtaaaggcgtcgagatgat

SEQ ID NO: 22263 - DNA, 75 bp, synthetic construct
  source 1..75: mol_type = other DNA
tgcttgccgggatgacatccaccgaatatgccgactggcgacatttttaccgcacgcattattttcaggataccc

SEQ ID NO: 22264 - DNA, 75 bp, synthetic construct
  source 1..75: mol_type = other DNA
tgccgggcggtaagttccgtattcttgagcgccaccagtggcgcggtatggacttccgcgcccaggcggacgcca

SEQ ID NO: 22265 - DNA, 75 bp, synthetic construct
  source 1..75: mol_type = other DNA
cagcgagacgagttacatcaacaaactcagacaccttgctcaacgggagcctgactttattgatatacacgctca

SEQ ID NO: 22266 - DNA, 75 bp, synthetic construct
  source 1..75: mol_type = other DNA
ccgccgtaggtgctgagtttaatgcctggaaatgggcacagttacgtaccggttaccgccagaatctggccagca

SEQ ID NO: 22267 - DNA, 75 bp, synthetic construct
  source 1..75: mol_type = other DNA
cgggaaaaactgaaagagcaggttgaggcgctgggctatgaaacggaagtggtgggtaagcacggtatgtgggaa

SEQ ID NO: 22268 - DNA, 75 bp, synthetic construct
  source 1..75: mol_type = other DNA
gtcagtggagtacgggaacaggccatgctgactcagaccattcgcagtgagctgaaaacacagggcgtactcgga

SEQ ID NO: 22269 - DNA, 75 bp, synthetic construct
  source 1..75: mol_type = other DNA
gaaagtaaaaacctggccttcagcatggtggacctgctgacagaggcgaagtcgtttgctgcagaaggaaccagt

SEQ ID NO: 22270 - DNA, 75 bp, synthetic construct
  source 1..75: mol_type = other DNA
tggatacgcgtaaatccaaacagcacgtcgatcctgaaatcaaaatgaccgagtggatgcagacgctgaaggaaa

SEQ ID NO: 22271 - DNA, 75 bp, synthetic construct
  source 1..75: mol_type = other DNA
gaccagctgcaggccatcgcgcccggtcagcctttccgtctccagcagacgcgcagtgctgccgatgtggtcatc

SEQ ID NO: 22272 - DNA, 75 bp, synthetic construct
  source 1..75: mol_type = other DNA
agaacgcacgcgcggtcgctggcgtttctatgacgagaaccataaacaggtaaaggcagagccgatcctgtacac

SEQ ID NO: 22273 - DNA, 75 bp, synthetic construct
  source 1..75: mol_type = other DNA
cgagaagtgacctttctgtggcgcgcccgacatcctctgcagggcgtttatctgcgtctgaaccgggtgacggat

SEQ ID NO: 22274 - DNA, 75 bp, synthetic construct
  source 1..75: mol_type = other DNA
gatggccatgctcgggggggataaacgtcttattgatgcacataaccaggccgtggattttgctgtccgtcaggt

SEQ ID NO: 22275 - DNA, 75 bp, synthetic construct
  source 1..75: mol_type = other DNA
ggaaacggttcacgatgaccgaacaacagaccctgctgtctcatggcgtggcaacggcgtatgtcgaaagcgggg

SEQ ID NO: 22276 - DNA, 75 bp, synthetic construct
  source 1..75: mol_type = other DNA
tgggatgcgctgaacacggcatacagtgaacacccggagtggttttctgggcttgtctccggggatgagaattaa

SEQ ID NO: 22277 - DNA, 75 bp, synthetic construct
  source 1..75: mol_type = other DNA
gtaccggaacagaacgccacgctaaccatttcgctaccaacgcatcacgcagcaacatccgctacagcctgagcg

SEQ ID NO: 22278 - DNA, 75 bp, synthetic construct
  source 1..75: mol_type = other DNA
acgcggcagaagtacggcgccagtcactgattgatgctgctatggcttccattagtctgattcagctgaaattgc

SEQ ID NO: 22279 - DNA, 75 bp, synthetic construct
  source 1..75: mol_type = other DNA
gcacagcacggcgcagcagtagatgcagcagaagcacagcgcccgttgctgattgatactgcaatggcctccatc

SEQ ID NO: 22280 - DNA, 75 bp, synthetic construct
  source 1..75: mol_type = other DNA
ccgagaaaactggttaaagagcgatccagactgaaacgagctacggtcagaaatccgaatgcaaaaattatcgtt

SEQ ID NO: 22281 - DNA, 75 bp, synthetic construct
  source 1..75: mol_type = other DNA
tagtggtgtcgttgtagttggctatgaaggaagcttattattaactcgtcagggtcaattagtagaaaacttcat

SEQ ID NO: 22282 - DNA, 75 bp, synthetic construct
  source 1..75: mol_type = other DNA
accgcccacggtgcgcagggggcgagtgaaacctttgccatcgcgcttgaaggcacggaaggtaaccggaaactg

SEQ ID NO: 22283 - DNA, 75 bp, synthetic construct
  source 1..75: mol_type = other DNA
atgcaacacgaactacagcctgattccctggttgatttgaaattcatcatggccgatactggcttcggtaaaacc

SEQ ID NO: 22284 - DNA, 75 bp, synthetic construct
  source 1..75: mol_type = other DNA
aacaggcagactttgagcgtttagcagcgttctatccctaccgcgatgagcatgggttaccagtacttgaagaaa

SEQ ID NO: 22285 - DNA, 75 bp, synthetic construct
  source 1..75: mol_type = other DNA
gtatccggaacagctgatggcgtgactgtcagtaccgggcttgagctggggccggactctgatgacaacaccggc

SEQ ID NO: 22286 - DNA, 75 bp, synthetic construct
  source 1..75: mol_type = other DNA
cggattctggcaggctcccgcagccatcagaccggtgtaaacggtgaaaataacagcgtccgtctcagcattcag

SEQ ID NO: 22287 - DNA, 75 bp, synthetic construct
  source 1..75: mol_type = other DNA
tccactcagaccagagtcagtgccagttcctgcaaggtggagttcctgaaccgccccgggaatcctggagactaa

SEQ ID NO: 22288 - DNA, 75 bp, synthetic construct
  source 1..75: mol_type = other DNA
tcactggacctgcaggccggactggaagcccgtgtccgggaaaatatcaccctgggcgttcaggccggttatgcc

SEQ ID NO: 22289 - DNA, 75 bp, synthetic construct
  source 1..75: mol_type = other DNA
tgagtgaactgccggtgaactggtgggtacagccttctgttatccgcaccttcagctcccggggtgacatgagca

SEQ ID NO: 22290 - DNA, 75 bp, synthetic construct
  source 1..75: mol_type = other DNA
cagagcgttaaaagtggcgggctggcaacaggaaccatcatcaacaccggcgcagaaggcggccctgattctgac

SEQ ID NO: 22291 - DNA, 75 bp, synthetic construct
  source 1..75: mol_type = other DNA
tatccgggttgtggatgcacagaatggtgccaccacagaagaaggtgcgtttgccctgagtcgcccgcttcaggc

SEQ ID NO: 22292 - DNA, 75 bp, synthetic construct
  source 1..75: mol_type = other DNA
tgaaaatggtcgtcagattgtggctgctgaaggaacagcaaataccactgtggtttatgccggcggcgaccagac

SEQ ID NO: 22293 - DNA, 75 bp, synthetic construct
  source 1..75: mol_type = other DNA
gcggtgtggcggttgcactgtctcttgccgcggtcacgtcactcccggtgctggctgctgacatcgttgtgcacc

SEQ ID NO: 22294 - DNA, 75 bp, synthetic construct
  source 1..75: mol_type = other DNA
gcgtcctgacaattcaacgcgaattacaagtttcgatgcaatcactattactcaaagcaggtttaaacacagaac

SEQ ID NO: 22295 - DNA, 75 bp, synthetic construct
  source 1..75: mol_type = other DNA
accttcttctgtttcgccagaaagtaacagcaataatgcaatcagcgatacagctattacgttaaaacggaacac

SEQ ID NO: 22296 - DNA, 75 bp, synthetic construct
  source 1..75: mol_type = other DNA
gcttcttcaggagtctgaagaacgaatggatgccggtggtgggttacgtaagcttcagcgaggcagctcacgcca

SEQ ID NO: 22297 - DNA, 75 bp, synthetic construct
  source 1..75: mol_type = other DNA
cccgtggtaagcccggcggggtgatgttccacagcgatcagggcagtcattatacgagcaggcagttccggcagt

SEQ ID NO: 22298 - DNA, 75 bp, synthetic construct
  source 1..75: mol_type = other DNA
atggatagccatacgcttattcaggcgctgatttatctcggttcggcggcgctgattgttcccattgcggtacgt

SEQ ID NO: 22299 - DNA, 75 bp, synthetic construct
  source 1..75: mol_type = other DNA
cctgcaaggtggaattccgtcacggtaacatgacgctggaaaatccatcgccagagctgctcacagtgttgatcc

SEQ ID NO: 22300 - DNA, 75 bp, synthetic construct
  source 1..75: mol_type = other DNA
aggtggagttccgtcacggtaacatgacgctggaaaatccttcaccagagctgctcactgtgttgatccgtgaac

SEQ ID NO: 22301 - DNA, 75 bp, synthetic construct
  source 1..75: mol_type = other DNA
agcaccgaagtggcgaaaaataacgcgctgactgatgatgatttttctgcgggaaagtcttcgacggcgagctga

SEQ ID NO: 22302 - DNA, 75 bp, synthetic construct
  source 1..75: mol_type = other DNA
gcgcaggtaaaagtccggcatattgagctatatatgagaagccggagtaatgtttctgggcgaacaagggaaaat

SEQ ID NO: 22303 - DNA, 75 bp, synthetic construct
  source 1..75: mol_type = other DNA
caaccagaaaggcgaagatgcatggcctattacctctaccacgttcattctgatccacaaagatcagaagaaacc

SEQ ID NO: 22304 - DNA, 75 bp, synthetic construct
  source 1..75: mol_type = other DNA
tttccctctggcgaaaaagggagaaggacgggcccgtctgccttcactttatgccagcttcggtaagctgggtga

SEQ ID NO: 22305 - DNA, 75 bp, synthetic construct
  source 1..75: mol_type = other DNA
accggggaaattttcgcaaccaaccgtgagcaggtggaagcgatgatcgaatatttgtggaaaataagacgcaga

SEQ ID NO: 22306 - DNA, 75 bp, synthetic construct
  source 1..75: mol_type = other DNA
gcttgcttgttcaggtagccagagagtcagacgacagaataacagcactggaagaagaaaacgcagaattaagac

SEQ ID NO: 22307 - DNA, 75 bp, synthetic construct
  source 1..75: mol_type = other DNA
gatgacgaagggtatccggaaatagcccgctgtacggagcgggagtttgcaaccattcttgccggtatcagtgcc

SEQ ID NO: 22308 - DNA, 75 bp, synthetic construct
  source 1..75: mol_type = other DNA
ccgtctggagtttgacgccggacataccgacattgcgcagtcattcatggcaatccgtcgcgccaccaccgccag

SEQ ID NO: 22309 - DNA, 75 bp, synthetic construct
  source 1..75: mol_type = other DNA
cttcacgacgatgacttctttgacgaagaagacgcagaagttctgcgctttgataattttgacgatgccgttgag

SEQ ID NO: 22310 - DNA, 75 bp, synthetic construct
  source 1..75: mol_type = other DNA
atggcccgttcagctaaaccccgtaaacgcaaacccgcacaacaaagaagcaaacttccccgctatgttgtgaaa

SEQ ID NO: 22311 - DNA, 75 bp, synthetic construct
  source 1..75: mol_type = other DNA
gatggcatggagatctgcacgtattcttaatcgcgtaatgggacgtgatttattcgatctcagtatgccgcccgc

SEQ ID NO: 22312 - DNA, 75 bp, synthetic construct
  source 1..75: mol_type = other DNA
cggcaaggtgcaccttactccggctcagttatccatgcttcttgaaggtatcaactggaagcacccgaaacgaac

SEQ ID NO: 22313 - DNA, 75 bp, synthetic construct
  source 1..75: mol_type = other DNA
agcgcctgctcggtaaaaaacgatggaaaatgaactccttaaagaagccgttgaatatgggcgtgcaaaaaagtg

SEQ ID NO: 22314 - DNA, 75 bp, synthetic construct
  source 1..75: mol_type = other DNA
gccgtgttcgtggctgccgccataccaccacagacccgtcaggctactgcgaaagccacaaaagcgaaggctgga

SEQ ID NO: 22315 - DNA, 75 bp, synthetic construct
  source 1..75: mol_type = other DNA
tgaacggtcatcacgaaatcacatccaccagcaggacgtgtgaccatctaatgatcgaccttgaaaccatgggaa

SEQ ID NO: 22316 - DNA, 75 bp, synthetic construct
  source 1..75: mol_type = other DNA
atgagagagaccacactgtattccctgctgtctcaactggccggaggacaggtttatccttatgtggtcccgctg

SEQ ID NO: 22317 - DNA, 75 bp, synthetic construct
  source 1..75: mol_type = other DNA
gaatttagtaagactatcgatctggaaactgctggcggagtcattgatcgggacaccattaaatggtggcttaag

SEQ ID NO: 22318 - DNA, 75 bp, synthetic construct
  source 1..75: mol_type = other DNA
ggcgggcaggcggagtcctcagtgtcggtgcagatcgacgtttatgccgggactgtgacgcaggcgcgtcagata

SEQ ID NO: 22319 - DNA, 75 bp, synthetic construct
  source 1..75: mol_type = other DNA
tgctgtcggaactggccggaggacaggtttatccttatgtggtcccgctgacggagggaaagcctgcggtatctc

SEQ ID NO: 22320 - DNA, 75 bp, synthetic construct
  source 1..75: mol_type = other DNA
tgccaccatttgctgcccttaccggtatacgctgcagtaccgcacatatcacggaaacggacaacgcctggctgt

SEQ ID NO: 22321 - DNA, 75 bp, synthetic construct
  source 1..75: mol_type = other DNA
gtaccgatgcgtggtcgtacccggttctgcggcttaaacgcctgggggtgtcaaaaaccttccgtcgtctggttg

SEQ ID NO: 22322 - DNA, 75 bp, synthetic construct
  source 1..75: mol_type = other DNA
actgaacatggggcgcattgtcgttgacgtcgatggtattgagcttgctgaactgattaacgtggtctgcgataa

SEQ ID NO: 22323 - DNA, 75 bp, synthetic construct
  source 1..75: mol_type = other DNA
tgattaacaaggtcgctgaaaacggttattcactccgtgtggtggacgactccgaccaacagtcaacctgcacac

SEQ ID NO: 22324 - DNA, 75 bp, synthetic construct
  source 1..75: mol_type = other DNA
gtaccgatgcgtggtcatacccggttctgcggcttaagcgcctgggcctgtcaaaaacgttccgtcgtctggttg

SEQ ID NO: 22325 - DNA, 75 bp, synthetic construct
  source 1..75: mol_type = other DNA
gatgcagagtatgaagccctgtaccgtgacattctgcctgaacttgacctggtactgtggctgattaaagccgat

SEQ ID NO: 22326 - DNA, 75 bp, synthetic construct
  source 1..75: mol_type = other DNA
cagaatattcgcgaaaaaacggaggcggtattccgtctgttccggcccgtacatccggttgttgccgtatcggcc

SEQ ID NO: 22327 - DNA, 75 bp, synthetic construct
  source 1..75: mol_type = other DNA
atgctgggtggggaaagtatgaaggaaaagaagactgctgcgccgtttgtcgtcacgtttatcttcattggctat

SEQ ID NO: 22328 - DNA, 75 bp, synthetic construct
  source 1..75: mol_type = other DNA
cattaaaccattcgctttccggcctgccacagtgggtgtctgaacgtatattgcagcagataaatcgattaaccc

SEQ ID NO: 22329 - DNA, 75 bp, synthetic construct
  source 1..75: mol_type = other DNA
gtggcgctgcccttcgctgctgacgcttgtctggtcgcctcatcttttgaagcagacgccgatgatgccgatgac

SEQ ID NO: 22330 - DNA, 75 bp, synthetic construct
  source 1..75: mol_type = other DNA
cactcaccgcggagtatccttcgatttcgtcctcgtggggtgagcagcgccgagcttgcattattgacacggcag

SEQ ID NO: 22331 - DNA, 75 bp, synthetic construct
  source 1..75: mol_type = other DNA
cgggctgaggtggcagcttctgacgctttcgtggtcgcggtggatgcagaagtggcggctgattgttgtgacgct

SEQ ID NO: 22332 - DNA, 75 bp, synthetic construct
  source 1..75: mol_type = other DNA
atgcgttcgtttctgatgattttgccgcttcttttgaggccgccgcatcccgggccgaggtcgcagcttctgatg

SEQ ID NO: 22333 - DNA, 75 bp, synthetic construct
  source 1..75: mol_type = other DNA
atgagaaagggattaagaacgggatcatgaatccgaacgaagcccgtgagcgtgagggaatgccgccgcgtgaag

SEQ ID NO: 22334 - DNA, 75 bp, synthetic construct
  source 1..75: mol_type = other DNA
gacgatatcggccacattactgaacgagaacggcgtcacggagtggacgccgctgttttatgaggaccatccggc

SEQ ID NO: 22335 - DNA, 75 bp, synthetic construct
  source 1..75: mol_type = other DNA
gtaccgatgcgtggtcatacccggttttgcggcttaagcgcctaggcctgtcaaaaacgttccgccgtctggttg

SEQ ID NO: 22336 - DNA, 75 bp, synthetic construct
  source 1..75: mol_type = other DNA
gttgggaatttcaaccttatcttgctgaaaactatgttcgccacttgttggcggagatcgctaacgtacttgagc

SEQ ID NO: 22337 - DNA, 75 bp, synthetic construct
  source 1..75: mol_type = other DNA
agtccggagcagaagctgacgctgtgcgacgatgtggcggggctgtcacaggcgggggagtttccgtttaacccg

SEQ ID NO: 22338 - DNA, 75 bp, synthetic construct
  source 1..75: mol_type = other DNA
tggtgacgaacatcagcccgtcaccactgccgacattctgacaccacgacgccgggaggattacggtaaggacct

SEQ ID NO: 22339 - DNA, 75 bp, synthetic construct
  source 1..75: mol_type = other DNA
atcataatagacggttgtgtcgctaggttgcgtaaatacaagccggcagagtatgagctgataattgctcacttt

SEQ ID NO: 22340 - DNA, 75 bp, synthetic construct
  source 1..75: mol_type = other DNA
gccggttacaaacctgccgtgaaaagccgcttcagtaagtcagctagtagcaaattcgctcatactatcgctttt

SEQ ID NO: 22341 - DNA, 75 bp, synthetic construct
  source 1..75: mol_type = other DNA
accgaaataccgatcgtctgctctgtctactgacgttactgcctgtgctgattctggctgtcgtttcaggcgtca

SEQ ID NO: 22342 - DNA, 75 bp, synthetic construct
  source 1..75: mol_type = other DNA
tctgattacccaaccgggtgattacccggcggacaccaccacaaaacagccggccacgccatgggatacctggaa

SEQ ID NO: 22343 - DNA, 75 bp, synthetic construct
  source 1..75: mol_type = other DNA
aggccgaaaaagacagggagctaccggaaaagatcgcggctgaaatccctgtcattatccgccgattgctggcga

SEQ ID NO: 22344 - DNA, 75 bp, synthetic construct
  source 1..75: mol_type = other DNA
tggctgacggacgccttatccgtcaccgtctgcgcaaagataaaaaacgtgaaaaagtgatgatcaacatagcag

SEQ ID NO: 22345 - DNA, 75 bp, synthetic construct
  source 1..75: mol_type = other DNA
taaccctgtctgtcttcatggctgctttaatggtttgtgttgctgaaccagctttcgctgatgatgtatcgacga

SEQ ID NO: 22346 - DNA, 75 bp, synthetic construct
  source 1..75: mol_type = other DNA
gtggtccttgttccattcatgatccggaaactgctctggaatatgctcgtcgatttaaagcccttgccgcagagg

SEQ ID NO: 22347 - DNA, 75 bp, synthetic construct
  source 1..75: mol_type = other DNA
caaaaggtggtgaaggtaaatcaacacaatccgcaaatcttgctggttttctggccgatgcaggtatacgtaccc

SEQ ID NO: 22348 - DNA, 75 bp, synthetic construct
  source 1..75: mol_type = other DNA
taccgacaaggataattactatgtgctgggcagcatgggagaacgctgggccggcaggggggctgaacagctggg

SEQ ID NO: 22349 - DNA, 75 bp, synthetic construct
  source 1..75: mol_type = other DNA
tttcagttatcaattgggcagaaaagcaggaatgtattgataatcagcgtattgggttatggggaacatcgctgg

SEQ ID NO: 22350 - DNA, 75 bp, synthetic construct
  source 1..75: mol_type = other DNA
atgaagacttacaacgccaatcccggttacgaaatggatcaccagctgctggggcactttaaccagcatctggat

SEQ ID NO: 22351 - DNA, 75 bp, synthetic construct
  source 1..75: mol_type = other DNA
gggttatatgcaggcgtttgtgaagtatggactgcgcaacctcaaagaaggggcgaagttccgcaaaggcattga

SEQ ID NO: 22352 - DNA, 75 bp, synthetic construct
  source 1..75: mol_type = other DNA
tgaacagcgctgacacagataccaccgacaccgatgacggcgacgccatggtgagcgcgggtgacttctggccgg

SEQ ID NO: 22353 - DNA, 75 bp, synthetic construct
  source 1..75: mol_type = other DNA
ccaaattaccgtataaagcgatggactgcctgaagcgaaacggactgattggcgctgagatagtttacgatgacc

SEQ ID NO: 22354 - DNA, 75 bp, synthetic construct
  source 1..75: mol_type = other DNA
cgtaactcttgagcatgtgtcggtcacggatgcagggcaggctggtgttgctgcaatgattatcaacgatgccct

SEQ ID NO: 22355 - DNA, 75 bp, synthetic construct
  source 1..75: mol_type = other DNA
gttggggcattttcctaagctgatatcaccacaatttgtccgtccattcgttaaaagtaacaaaaacgactttgt

SEQ ID NO: 22356 - DNA, 75 bp, synthetic construct
  source 1..75: mol_type = other DNA
atgagtggtgaacgacgttgccttcacttttctcctcaggctgccagaatctggacggattattacaacgatgtg

SEQ ID NO: 22357 - DNA, 75 bp, synthetic construct
  source 1..75: mol_type = other DNA
ccacaatacagttgtccctgttgccagaaggtgttcagcggtgaaatgccggcacatatcctcccgaaaagtgcc

SEQ ID NO: 22358 - DNA, 75 bp, synthetic construct
  source 1..75: mol_type = other DNA
ttaaaagcaacaaaaatgatttcgtcgatgccgaggctatctgtgaagcagcgtcgcgtccatcaatgcgttttg

SEQ ID NO: 22359 - DNA, 75 bp, synthetic construct
  source 1..75: mol_type = other DNA
gcgctggagaacgacaccgcgcgtcaggtgcaggtgtttgaagccgcctgtcagtcgggatggggcggtaaaccg

SEQ ID NO: 22360 - DNA, 75 bp, synthetic construct
  source 1..75: mol_type = other DNA
cggtatcacccgttacgtcactgaaattcttgttaagaccacgggcaccatgcagatgctgggacgtgccgcagg

SEQ ID NO: 22361 - DNA, 75 bp, synthetic construct
  source 1..75: mol_type = other DNA
atgcctgctgtggactgctgtgtccagcttatccacagcattttgtgcacggttctgtggacaaaatacctggtt

SEQ ID NO: 22362 - DNA, 75 bp, synthetic construct
  source 1..75: mol_type = other DNA
ggcgaaggtcagggcgtggacgccggagatgcgtgccggaagtggcgtggtggtgtcctggcgttatggaaacgt

SEQ ID NO: 22363 - DNA, 75 bp, synthetic construct
  source 1..75: mol_type = other DNA
ctgcctccttccccttcccggcgatgcagcagaacgcttgttcccgtcggtgcggtttcgtgtcagggaacgcag

SEQ ID NO: 22364 - DNA, 75 bp, synthetic construct
  source 1..75: mol_type = other DNA
gcgacgtcgtggcagcacatattttgtatcaaaagccggtgagcgttatcgccgtgatgtggcgcttattgttcg

SEQ ID NO: 22365 - DNA, 75 bp, synthetic construct
  source 1..75: mol_type = other DNA
atgcgtatagagtttgttttgccttacccgccgacggtgaacacctactggcgacgtcgtggcagcacatatttt

SEQ ID NO: 22366 - DNA, 75 bp, synthetic construct
  source 1..75: mol_type = other DNA
ggaagccattgccgctctgaaaccagacctgatcattgccgacagcagtcgccatgcgggggtttacatcgcctt

SEQ ID NO: 22367 - DNA, 75 bp, synthetic construct
  source 1..75: mol_type = other DNA
ggttgtgttcagtgcgaaaaaacgccagtggggaagtcaggaagatttggtgtgcgcacagtggatctggggacg

SEQ ID NO: 22368 - DNA, 75 bp, synthetic construct
  source 1..75: mol_type = other DNA
ccacatggcgcgaaattcagtgagggccgcgtatatccataaagcagagcatctggaagaacggcgattgatgct

SEQ ID NO: 22369 - DNA, 75 bp, synthetic construct
  source 1..75: mol_type = other DNA
gctgacggcgggcagcaggatgaagtgattgccacgctgatggtgtgggcgattgactgcggcgatcttccgctg

SEQ ID NO: 22370 - DNA, 75 bp, synthetic construct
  source 1..75: mol_type = other DNA
tgacatcgccgaaatcactgcgcaactggataaactgctgccgccctctgttgaagaagacgacaaagcgccccg

SEQ ID NO: 22371 - DNA, 75 bp, synthetic construct
  source 1..75: mol_type = other DNA
atggaccgcaaacctattgaagatgtgatcttcgaaattaataactttatctcgctcggtggtcgcaccattgtt

SEQ ID NO: 22372 - DNA, 75 bp, synthetic construct
  source 1..75: mol_type = other DNA
aagcaggcggcgactaccgcggtgaaacagactcaggcactggcggggaatgcgcaggcgcatgtttcgttgtca

SEQ ID NO: 22373 - DNA, 75 bp, synthetic construct
  source 1..75: mol_type = other DNA
atatggcgtattttcccttttaccggtatgccatgacgtttgaagaatttgttccggcattttcttcctggtttg

SEQ ID NO: 22374 - DNA, 75 bp, synthetic construct
  source 1..75: mol_type = other DNA
ctgcgccatgcttactcattctggtgatggcggtgcgcctttaggcgctgggcgagggttcgtgatgactgcaga

SEQ ID NO: 22375 - DNA, 75 bp, synthetic construct
  source 1..75: mol_type = other DNA
gtgcacccaccgacatcgtgactcactggcacaatatcaactgggccaagtgccgtcgcgaggtcagaaggctgc

SEQ ID NO: 22376 - DNA, 75 bp, synthetic construct
  source 1..75: mol_type = other DNA
tgaaatcctgcgagatatcgaatccctgctgccgcataacgaatccctgttccagaaggtgaacttcctgatgca

SEQ ID NO: 22377 - DNA, 75 bp, synthetic construct
  source 1..75: mol_type = other DNA
atggcggcgtaatcccgaaaaacaggtgctggttcattcggatcagggcagtcagtacacaagccatgagtggca

SEQ ID NO: 22378 - DNA, 75 bp, synthetic construct
  source 1..75: mol_type = other DNA
acaacgaagccggactcacagaacaggaacgcaaacttctccacgtgctggcaacagcggaaaaaaacgacttac

SEQ ID NO: 22379 - DNA, 75 bp, synthetic construct
  source 1..75: mol_type = other DNA
gaagagaagcagctctctgataaccaggatttacatgaaaaatactttctggaattaatggacatcattaataaa

SEQ ID NO: 22380 - DNA, 75 bp, synthetic construct
  source 1..75: mol_type = other DNA
tgccaccaccggtggcggtaaaacagaaaccacctttgcctggctgctcaacccgctctgctggggaagaggctt

SEQ ID NO: 22381 - DNA, 75 bp, synthetic construct
  source 1..75: mol_type = other DNA
caaccatgcttgctgtcattaacgaaccaattggcggcgaaggagaaaacgagcgtttcacggttatggagttct

SEQ ID NO: 22382 - DNA, 75 bp, synthetic construct
  source 1..75: mol_type = other DNA
gctcactgcttgccggtgaggaaaacgccaggctgcgtgcaacccactggttacatgagagaggcctgaaagtat

SEQ ID NO: 22383 - DNA, 75 bp, synthetic construct
  source 1..75: mol_type = other DNA
gtacgcaggggaaaactgcgccgcaatgtggtgatcctttcccggcgctcccgcgatggcgggatggaatccggt

SEQ ID NO: 22384 - DNA, 75 bp, synthetic construct
  source 1..75: mol_type = other DNA
tctggttggctggctggagcaggttctgtgtgccgtgccggcgaatattaccatgactgatgttgtatcccgttc

SEQ ID NO: 22385 - DNA, 75 bp, synthetic construct
  source 1..75: mol_type = other DNA
agcggtggagcatcttcgcgcactggagaaaaaaggcgtcatcacgataaagcgtggcgtggcccggggtatcac

SEQ ID NO: 22386 - DNA, 75 bp, synthetic construct
  source 1..75: mol_type = other DNA
acacacacagattcgtgatgagcgtttttttaagaccaataactctcaatatgatttggttaacggtatgtatct

SEQ ID NO: 22387 - DNA, 75 bp, synthetic construct
  source 1..75: mol_type = other DNA
aaaaaagcgcgtaagttgaaaatgaaaagagcacaaagattacttgagaaaatggcatgtgaccgggtttcgcca

SEQ ID NO: 22388 - DNA, 75 bp, synthetic construct
  source 1..75: mol_type = other DNA
ctggctgggagatcgcggtaatccggtggtacctcagttggatgctaaaattactacagtatcgggtgataaaat

SEQ ID NO: 22389 - DNA, 75 bp, synthetic construct
  source 1..75: mol_type = other DNA
aacagaacgtctgccgctgctccgcccgatggcgcccaatctgacctggtcaatggatttcgtcatggacgcact

SEQ ID NO: 22390 - DNA, 75 bp, synthetic construct
  source 1..75: mol_type = other DNA
tgtatacactgaatgagctatcctccaccgcacaggaaaaagcccgcgactggtaccgtcagcatcatgctgaca

SEQ ID NO: 22391 - DNA, 75 bp, synthetic construct
  source 1..75: mol_type = other DNA
ttaatgcccggttcgacatccgcattctgaaacagactgctgccgcacatagcgatccggctgactggctggaag

SEQ ID NO: 22392 - DNA, 75 bp, synthetic construct
  source 1..75: mol_type = other DNA
tgattgaccaggctggccttggtcacgaaaaactgactcaggcgcgtaaccagttgcttgcagaagcagcgaagc

SEQ ID NO: 22393 - DNA, 75 bp, synthetic construct
  source 1..75: mol_type = other DNA
tctataaaaagattgccgctgattgcgaggcgtttatatcgcggaccagaactttgtttgaggaagcaaacagtg

SEQ ID NO: 22394 - DNA, 75 bp, synthetic construct
  source 1..75: mol_type = other DNA
atccgttcgttgtatcgcaatttcacccaccactacatcaaagcaaaacgcagcatcggtgtggcagctggcgag

SEQ ID NO: 22395 - DNA, 75 bp, synthetic construct
  source 1..75: mol_type = other DNA
gaccatggtggtgaacgccagtgaaaagctcacccacagcgggaaaagcagtgccccgtcgctcagcctcagtgc

SEQ ID NO: 22396 - DNA, 75 bp, synthetic construct
  source 1..75: mol_type = other DNA
gatggtaaggtctggcgtctgctgaatggctttaagctgttccgcgaaaaactggatacccgtcgtggctcaaat

SEQ ID NO: 22397 - DNA, 75 bp, synthetic construct
  source 1..75: mol_type = other DNA
gcttaatgccgttaacccttgcgggggccatgtttgtattaattaacaacgtttttctaagctttggggaggggt

SEQ ID NO: 22398 - DNA, 75 bp, synthetic construct
  source 1..75: mol_type = other DNA
ggataaagcggcaaatggtgtgccggtcgtgaacattgccacgccgaacggggccgggatttcgcataaccggtt

SEQ ID NO: 22399 - DNA, 75 bp, synthetic construct
  source 1..75: mol_type = other DNA
atgcgcagagacagaacagggccgaaatataaagcgttagacatgacagagcacgccttaaaggtggcaatcagg

SEQ ID NO: 22400 - DNA, 75 bp, synthetic construct
  source 1..75: mol_type = other DNA
ccgctggcgcgaactggaagaacaaatccgcaaaccaatgagccagatcgaaatggttgctgcaatggcgcttga

SEQ ID NO: 22401 - DNA, 75 bp, synthetic construct
  source 1..75: mol_type = other DNA
ggcatctctggcgtaacggcggcctgcagccgaccggcgaacatgaaacatcgctacttcccgtgacgttaactc

SEQ ID NO: 22402 - DNA, 75 bp, synthetic construct
  source 1..75: mol_type = other DNA
ttctgattgagttaagttttaactctcagaaagttttaaaaggcttggaaaaagccgagaaacaaacgatgcaaa

SEQ ID NO: 22403 - DNA, 75 bp, synthetic construct
  source 1..75: mol_type = other DNA
ttttgacgatccggagtcgctgggttttgccagtagtgggatccgtattgaaggaagcaacccgtcattatttgt

SEQ ID NO: 22404 - DNA, 75 bp, synthetic construct
  source 1..75: mol_type = other DNA
agcgggcatttcaacattccctacggtaattataaaaatccgtatttcccagaaaaagaaattcgcgcatttgca

SEQ ID NO: 22405 - DNA, 75 bp, synthetic construct
  source 1..75: mol_type = other DNA
cccccttctttcgtgctcaaattgaaaaaaataatcaatacaattcagtttggggcaaacactaccgccagcttg

SEQ ID NO: 22406 - DNA, 75 bp, synthetic construct
  source 1..75: mol_type = other DNA
gtgaggaaaacttctggatagaccggatttcgccggatgatggcggaagctgtcatctctggcttgggcgtggcg

SEQ ID NO: 22407 - DNA, 75 bp, synthetic construct
  source 1..75: mol_type = other DNA
ggatacagtatctgctgagtctggttcccgactgcccgtggcagcatattgtgttcacacttccctgccagtact

SEQ ID NO: 22408 - DNA, 75 bp, synthetic construct
  source 1..75: mol_type = other DNA
cttggattcgacgcctctcgtgtcgtgccaacagctaatgaaaaccgtccacgtaacatcgcctttaattatatt

SEQ ID NO: 22409 - DNA, 75 bp, synthetic construct
  source 1..75: mol_type = other DNA
catgaagttatccagcgtggcaattatggcccgcctggctgatttcagtaatgacgaaggtgtgtgctggccatc

SEQ ID NO: 22410 - DNA, 75 bp, synthetic construct
  source 1..75: mol_type = other DNA
tatcttccccgtgccagcatggagcaacgaaaaagtgaactgcttgagcagcgggcagagccagttccttcccgc

SEQ ID NO: 22411 - DNA, 75 bp, synthetic construct
  source 1..75: mol_type = other DNA
atgagaacgtcattagtcacccgtgaagagatgatcgaggcaattgaacagcacacaatctgtatcagcaccagg

SEQ ID NO: 22412 - DNA, 75 bp, synthetic construct
  source 1..75: mol_type = other DNA
aaggtgctgccgcgcatgacggcaccgatgctgaccgagcaggaagtcgccgcgctggaactgcctgaccttgtg

SEQ ID NO: 22413 - DNA, 75 bp, synthetic construct
  source 1..75: mol_type = other DNA
agagggacagactcttgatgctattttgtgttattcagttcctgatattcaccctgcagagtttagttttgcaga

SEQ ID NO: 22414 - DNA, 75 bp, synthetic construct
  source 1..75: mol_type = other DNA
ttcttttctctgtccacaacgtgttcgcttctccactgccggccctcctgagggatgctctcattcatgatccat

SEQ ID NO: 22415 - DNA, 75 bp, synthetic construct
  source 1..75: mol_type = other DNA
acatcatcggcctggacggttcagtggaccgcaaggaaactcaccgtgcgccttatgtcaaagggaccttcaagg

SEQ ID NO: 22416 - DNA, 75 bp, synthetic construct
  source 1..75: mol_type = other DNA
ctcggtgaactggtcggtgtttaccgccttgccgcgcagcctgccaccaccactctccagttctccgtggatgag

SEQ ID NO: 22417 - DNA, 75 bp, synthetic construct
  source 1..75: mol_type = other DNA
ctgtaccgagccgggtaccgctggcaacggctggcaaccggcgcaggtcagtcagttactcgatgagattgataa

SEQ ID NO: 22418 - DNA, 75 bp, synthetic construct
  source 1..75: mol_type = other DNA
ctgaacgacccggcctaccgtcgtctgcgtatcatcaccgataacctcaaacaggaagagcatgccattgtccag

SEQ ID NO: 22419 - DNA, 75 bp, synthetic construct
  source 1..75: mol_type = other DNA
tcttccagatggcatgctggttctggggaatactgctgcagatgggatccgttgttacggtgccattcaggatgc

SEQ ID NO: 22420 - DNA, 75 bp, synthetic construct
  source 1..75: mol_type = other DNA
agtgtgttgtccgtctccggggtgtaccaggttgaactggtgacaccgccactgcgggtggtggcagaaaacgaa

SEQ ID NO: 22421 - DNA, 75 bp, synthetic construct
  source 1..75: mol_type = other DNA
cgaaactggtcggtgaaatggtcagggcagaaatggaacggcgcgcccgtgccgggcgtggcagtttttacgata

SEQ ID NO: 22422 - DNA, 75 bp, synthetic construct
  source 1..75: mol_type = other DNA
gcctgggcaaacgaaattcgcctgatgtgtgtgcaggatggtcgtactcacaaacaaatctgcgagatgtacagc

SEQ ID NO: 22423 - DNA, 75 bp, synthetic construct
  source 1..75: mol_type = other DNA
agtaatcgctgctgttgggtttgtcgctggtaaggcaatttactcagataatgttgtgtttaggcgaaggatgta

SEQ ID NO: 22424 - DNA, 75 bp, synthetic construct
  source 1..75: mol_type = other DNA
ttgacgaaaagcttatggcgcttcacaagtggttttgggaacaaagtgaagccgagcgcgccgctggcattcgca

SEQ ID NO: 22425 - DNA, 75 bp, synthetic construct
  source 1..75: mol_type = other DNA
gtaaatcgcctgaagatgctgaaacgccagatgtatggtcgagccggatttgaactactcaggcagagggtcatg

SEQ ID NO: 22426 - DNA, 75 bp, synthetic construct
  source 1..75: mol_type = other DNA
cggataaaaacagtcgtaatggtctaaaacttctacagaagcaagctgatttactaaaaataatcatggaggata

SEQ ID NO: 22427 - DNA, 75 bp, synthetic construct
  source 1..75: mol_type = other DNA
cctcctgtttttggtttgttgttttatgaacaggaaagattaacaggaggtgtttttcgttatgtgttgataagg

SEQ ID NO: 22428 - DNA, 75 bp, synthetic construct
  source 1..75: mol_type = other DNA
atggtctggcgtacctggaattttgaggacggtgccgggtactggatgaaccatgccatcagggatttcgggatt

SEQ ID NO: 22429 - DNA, 75 bp, synthetic construct
  source 1..75: mol_type = other DNA
acctgaatactgccggcacgacagatgttattccgtctgtggctatcgaccgcatcatcgcgcagcgtaacgaag

SEQ ID NO: 22430 - DNA, 75 bp, synthetic construct
  source 1..75: mol_type = other DNA
gcagatagcactggactgcccgcttgggtcgatgcgccgcctccaacgcatgaagagcttattgaaattactcaa

SEQ ID NO: 22431 - DNA, 75 bp, synthetic construct
  source 1..75: mol_type = other DNA
gtggctggattatctggacgcactggaactggttgattcctccagtgcgccagatattgaatggcctacgcctcc

SEQ ID NO: 22432 - DNA, 75 bp, synthetic construct
  source 1..75: mol_type = other DNA
taaggctgtaaaaatcgcagaagcagaatccctgcaggcagaatcacgtaaaacaaaagtgactttctccgtcgc

SEQ ID NO: 22433 - DNA, 75 bp, synthetic construct
  source 1..75: mol_type = other DNA
taaaaacttatcagtttcatttatatgagattgttattgctgccgaagcagagaaacagctgcgaatagactggg

SEQ ID NO: 22434 - DNA, 75 bp, synthetic construct
  source 1..75: mol_type = other DNA
gacggtacggtgatccacattgttccccggcttgccggtgcaaagcatggcggaatttttcagaccatcctgggg

SEQ ID NO: 22435 - DNA, 75 bp, synthetic construct
  source 1..75: mol_type = other DNA
ccgggggatgtcattcatctggtaccccggactgaaggagccaaaagtgggggtgtttttcagacggtgctgggt

SEQ ID NO: 22436 - DNA, 75 bp, synthetic construct
  source 1..75: mol_type = other DNA
gtgccctgtcgctgcagctgtcgggattccgccgtcagatgaatgaaggctggtaccgggtacgtattcgcggtg

SEQ ID NO: 22437 - DNA, 75 bp, synthetic construct
  source 1..75: mol_type = other DNA
ggaaccctgtgggctggctgggggccgcggctgtatcgggcatgtatgcggcaggggccagtatgatcctgggcg

SEQ ID NO: 22438 - DNA, 75 bp, synthetic construct
  source 1..75: mol_type = other DNA
tttcgtcagaaactgaatgagggctggtatcaggtgcgcattgccgggcgtgatgcaggcgaaaacgaattatct

SEQ ID NO: 22439 - DNA, 75 bp, synthetic construct
  source 1..75: mol_type = other DNA
ggtgaaatgcgcgtggggtcacgtgtggcatctcaggagattagcacggcagatgaaggggatggtggtcaggtt

SEQ ID NO: 22440 - DNA, 75 bp, synthetic construct
  source 1..75: mol_type = other DNA
ctgtacggtgaaatgcgcgtggggtcacgggtgatttctcaggagatcagcacggcagatgaaggagatggtggt

SEQ ID NO: 22441 - DNA, 75 bp, synthetic construct
  source 1..75: mol_type = other DNA
tgtacggtgaaatgcgcgtggggtcacgtgttgtctctcaggagattagcacggcagacgagggggacggtggtc

SEQ ID NO: 22442 - DNA, 75 bp, synthetic construct
  source 1..75: mol_type = other DNA
ctacaaaatggccgacggcggcggtttgtatctcgagatttcggctaagggctctaaatactggcgcatgaaata

SEQ ID NO: 22443 - DNA, 75 bp, synthetic construct
  source 1..75: mol_type = other DNA
gtgggtaaatcaaaatgccaggtttatggcaacaagatagaaccgtgtacgaccctggcaaaatcccttgagcat

SEQ ID NO: 22444 - DNA, 75 bp, synthetic construct
  source 1..75: mol_type = other DNA
gatatgggtgccgttccttgccatcttcaccattgcggcgtggtttggcatgaacgatcttgctacctcgaaagc

SEQ ID NO: 22445 - DNA, 75 bp, synthetic construct
  source 1..75: mol_type = other DNA
tggtttcagaacgatggcgtgtagttcgctgattgaatcaggattgtggtcgagggatgcagtggaacggcagat

SEQ ID NO: 22446 - DNA, 75 bp, synthetic construct
  source 1..75: mol_type = other DNA
tctctggcgtcgtgacggaccggtaatgatttcttttgatgatctgtggagtgcgataacgcatggcggacagtg

SEQ ID NO: 22447 - DNA, 75 bp, synthetic construct
  source 1..75: mol_type = other DNA
cattttttctctggtgaggcgatttcaccaggtattcactgactggcctctttccggtgaatattcctgcgggca

SEQ ID NO: 22448 - DNA, 75 bp, synthetic construct
  source 1..75: mol_type = other DNA
tcgctacttcccgtgacgttaacgccggagccggataataaaatcccggcaccagtgcagatacctgaacagata

SEQ ID NO: 22449 - DNA, 75 bp, synthetic construct
  source 1..75: mol_type = other DNA
ttacccgcgctggtgctggcggcgacctggtttgataacgcggcgcgtgacgcggacattatccggcgtaatgcc

SEQ ID NO: 22450 - DNA, 75 bp, synthetic construct
  source 1..75: mol_type = other DNA
gtttgatccgcctgcacatccttcaccatgcagccgaggaacctgtctttgggctggggatcatcgaagagctac

SEQ ID NO: 22451 - DNA, 75 bp, synthetic construct
  source 1..75: mol_type = other DNA
ggggagtcggactaaaatacgatgctgacaacctttacctggctacaacatattccgaaactcagaatctgacga

SEQ ID NO: 22452 - DNA, 75 bp, synthetic construct
  source 1..75: mol_type = other DNA
ggggatgatggagataagacatacgcacgtctgggctttaaaggtgaaactcagattaatgaccagttgactggt

SEQ ID NO: 22453 - DNA, 75 bp, synthetic construct
  source 1..75: mol_type = other DNA
cctgcttgccttcgcgacacggggatggatggcgttcccgatcatggtcctgcttgcttcgggtggcatcggaat

SEQ ID NO: 22454 - DNA, 75 bp, synthetic construct
  source 1..75: mol_type = other DNA
gaagccaagaaaaggcaaattatggtcagtgatttgatgttagaaatcattactgaagcagcagagaacatcaaa

SEQ ID NO: 22455 - DNA, 75 bp, synthetic construct
  source 1..75: mol_type = other DNA
aaaaaattgcaagacagataatcagaggcgtgccgcaggctatatccgtaaaattcgggcaatgttagttgccgg

SEQ ID NO: 22456 - DNA, 75 bp, synthetic construct
  source 1..75: mol_type = other DNA
acctcagccggccagagtgattgggaaaaccgtcagtttacaatggataaactgaagcttgatgcagcaacattc

SEQ ID NO: 22457 - DNA, 75 bp, synthetic construct
  source 1..75: mol_type = other DNA
ctctgctgcgtattctctggcggctgggtatccggcttccgccattgccctttatgccgttctggcaggttacgc

SEQ ID NO: 22458 - DNA, 75 bp, synthetic construct
  source 1..75: mol_type = other DNA
gcaagaagcacgggcgtactttgtcgcccggaaaaatgtcagagagccagttctggttattagctgaaatatctc

SEQ ID NO: 22459 - DNA, 75 bp, synthetic construct
  source 1..75: mol_type = other DNA
cggaagcatgacatattttacaggaagtgcagcgaataaagcattccatacactgacggttgatgagctgacgac

SEQ ID NO: 22460 - DNA, 75 bp, synthetic construct
  source 1..75: mol_type = other DNA
ggcttgcgcagtgcgggctgacggtggagcaactggccagacaggtggagccggaatacacaccggcgcgaaaag

SEQ ID NO: 22461 - DNA, 75 bp, synthetic construct
  source 1..75: mol_type = other DNA
tggcctgtacgatgatgcgggaacgttaattgctgtggcgaacatggccgaaagttataagccagctcttgccga

SEQ ID NO: 22462 - DNA, 75 bp, synthetic construct
  source 1..75: mol_type = other DNA
gaggacagttgtggcgcacgttttcggtgaacgcactctggccacactggcgcgtcttctgagcctgctgtcggc

SEQ ID NO: 22463 - DNA, 75 bp, synthetic construct
  source 1..75: mol_type = other DNA
caggaagcgttaaagccggtaacggttggcgatgcgctcacctactggcttgagtcgtacgcaaaggaaaaccgt

SEQ ID NO: 22464 - DNA, 75 bp, synthetic construct
  source 1..75: mol_type = other DNA
gtggccagatgtatagtggcgcgcctcatggcggttatgggacttgccggtgttctccggggtaaaaaggtccgc

SEQ ID NO: 22465 - DNA, 75 bp, synthetic construct
  source 1..75: mol_type = other DNA
tgatgtcatggctggcctggctgctgatgctgctgtatgcctttgcgcccctcagctatctgtgtggtcgcccgt

SEQ ID NO: 22466 - DNA, 75 bp, synthetic construct
  source 1..75: mol_type = other DNA
atacaggcatggcttgatacaggggacccgtcttcccctcctgactctgtcagggtgccgtttattattacgcct

SEQ ID NO: 22467 - DNA, 75 bp, synthetic construct
  source 1..75: mol_type = other DNA
tctggggtatgagactgagcccggtatctgggctgaaagtatcagtacgggaaagcgctacgctgcaatgcctga

SEQ ID NO: 22468 - DNA, 75 bp, synthetic construct
  source 1..75: mol_type = other DNA
acagtctttccaatctggctttttcccagcctctgacttggatgaagtgtttacacttcagtttgagataagcga

SEQ ID NO: 22469 - DNA, 75 bp, synthetic construct
  source 1..75: mol_type = other DNA
acaacgaatacacaggcaatggcgttacgacttcattcccttatacctttagggttttcaaggaatctgatctgg

SEQ ID NO: 22470 - DNA, 75 bp, synthetic construct
  source 1..75: mol_type = other DNA
attattttgaagttcaactggaaatataacgcctgggctaaatctatatatgaagttggcatagttttatcagcc

SEQ ID NO: 22471 - DNA, 75 bp, synthetic construct
  source 1..75: mol_type = other DNA
aggtaaggctgggcgatgtcgccaccgtcgaaatgggggcggagaaatacgattatcttagccgcttcaatggta

SEQ ID NO: 22472 - DNA, 75 bp, synthetic construct
  source 1..75: mol_type = other DNA
cggtggcgcataacgaacagtatcgccagctcattgaaggctacatgctgcgccataaagtgaaaccgggcatta

SEQ ID NO: 22473 - DNA, 75 bp, synthetic construct
  source 1..75: mol_type = other DNA
gagtgggcgcttgtgggtggcaacccttttccattttggtctgaatctgtgtcacttgttattctttacctatcc

SEQ ID NO: 22474 - DNA, 75 bp, synthetic construct
  source 1..75: mol_type = other DNA
aattgctggatggggttgaagttgagtggttgccattggctaaagtttgtcgtttaataaacgggagagcatata

SEQ ID NO: 22475 - DNA, 75 bp, synthetic construct
  source 1..75: mol_type = other DNA
tcgcgcttacaccgatcatttttatgatgatcgtgttggttgttggcatcggtgttatgggctggcctgccagcg

SEQ ID NO: 22476 - DNA, 75 bp, synthetic construct
  source 1..75: mol_type = other DNA
atgctggctatctcaagtaacatctcaaagatggtaatatttatttttgctattataatcgttgtttttttatgc

SEQ ID NO: 22477 - DNA, 75 bp, synthetic construct
  source 1..75: mol_type = other DNA
cgcatggttattattgtcagtaacgtggcgtccgttgagctgagtattgatgccagcacagtgatggcgacgcag

SEQ ID NO: 22478 - DNA, 75 bp, synthetic construct
  source 1..75: mol_type = other DNA
aaggaggctgccctgcaggtactgatgaacacactcacccacacggcagagcatgaggtgccgtaccggatggaa

SEQ ID NO: 22479 - DNA, 75 bp, synthetic construct
  source 1..75: mol_type = other DNA
tcagtcatgggaaactgcaatgcgacgcgccgggattcgctaccgcaaagcatatcagtccaggcacacttatgc

SEQ ID NO: 22480 - DNA, 75 bp, synthetic construct
  source 1..75: mol_type = other DNA
atgattacggtcaccgcgtgtcccgcgacaccgttcatactcatattgcctggcttgccgagcaggggctggtgc

SEQ ID NO: 22481 - DNA, 75 bp, synthetic construct
  source 1..75: mol_type = other DNA
cactgactgttccggttatgtaacccgctatgaccatgaccgttttggtcaggtgacggcggtgcaccgcgagga

SEQ ID NO: 22482 - DNA, 75 bp, synthetic construct
  source 1..75: mol_type = other DNA
gcaaatgcacttaaccgttaccagtcagtaattaaaaacatgttgccaatgttaggtgaaaaaagactggtttca

SEQ ID NO: 22483 - DNA, 75 bp, synthetic construct
  source 1..75: mol_type = other DNA
gagcagctagaaaatttatccgcggagtgcagagaaaataaagatagtgcagttttaccatgggcagctgcaggt

SEQ ID NO: 22484 - DNA, 75 bp, synthetic construct
  source 1..75: mol_type = other DNA
aaccgaacgctgaagaatttactggtaccgtcattagattctgttccggcatgggtatatggtgtgacagggaaa

SEQ ID NO: 22485 - DNA, 75 bp, synthetic construct
  source 1..75: mol_type = other DNA
tatacaggcattcgccctggtgaactgtgtgcgcttgggtgggaggacatagatctgaaaaatggaacaatgatg

SEQ ID NO: 22486 - DNA, 75 bp, synthetic construct
  source 1..75: mol_type = other DNA
caatcaccaccataataactccccagttccggatgatggcggtgatacgcctgttccgccagacgacggcggtga

SEQ ID NO: 22487 - DNA, 75 bp, synthetic construct
  source 1..75: mol_type = other DNA
ttaaaaacgaaaataccagctatagccagattgtcacagagtgtcgtatgcgttacgccgtacagatgttattga

SEQ ID NO: 22488 - DNA, 75 bp, synthetic construct
  source 1..75: mol_type = other DNA
ctggagggcgatattaaagggtgtttcgataacatcagccatgactggctgctttcccatattccgctggacagg

SEQ ID NO: 22489 - DNA, 75 bp, synthetic construct
  source 1..75: mol_type = other DNA
ttaccgttcttttgtctctgccctcatatggcagtgtggttattatggggaccagggttatttatcctgcagaac

SEQ ID NO: 22490 - DNA, 75 bp, synthetic construct
  source 1..75: mol_type = other DNA
ctcgattttttgaagcaatatggtgattttgaaaatggtattcctgttcacgataccattgccagagttgtatcc

SEQ ID NO: 22491 - DNA, 75 bp, synthetic construct
  source 1..75: mol_type = other DNA
ggttgagaaaccttttatttataaggaaacatatgcagaatatcggattgaaattcgaggaaaaatggacgggta

SEQ ID NO: 22492 - DNA, 75 bp, synthetic construct
  source 1..75: mol_type = other DNA
cgttgtgaatgaccttcctccggaaggcgtgtttgataccgaattctgcaaccgatacgaaaaaggcggggaaga

SEQ ID NO: 22493 - DNA, 75 bp, synthetic construct
  source 1..75: mol_type = other DNA
acccggaaaatttacctgccgcgccactggtgtgctacgactggacgccacgcggtgagctggcggcggtgtatg

SEQ ID NO: 22494 - DNA, 75 bp, synthetic construct
  source 1..75: mol_type = other DNA
ggttgcacatccgcaccgcctgcgccagcgccggtgattgtggtcaacggatgcccgagagtgagcctttgcccg

SEQ ID NO: 22495 - DNA, 75 bp, synthetic construct
  source 1..75: mol_type = other DNA
tgaacctgacgtcgtcctgtgggcaagcgacgattttgaatcgacctgtgccactctggactacctgatcgttaa

SEQ ID NO: 22496 - DNA, 75 bp, synthetic construct
  source 1..75: mol_type = other DNA
atcagggaaactgatagtggacggccttttaaaagaggttgttgactacgtaaaagagaaatatatcagtggagg

SEQ ID NO: 22497 - DNA, 75 bp, synthetic construct
  source 1..75: mol_type = other DNA
tcgcaggcttgtaccatctggtagccagtggtaccacaacctggcacgattatgctgcgctggtttttgaagagg

SEQ ID NO: 22498 - DNA, 75 bp, synthetic construct
  source 1..75: mol_type = other DNA
accccgcaatactttaagcgtgagtaccaactgcaggacggcgatattgacgagacatcaccgtcggaacgccag

SEQ ID NO: 22499 - DNA, 75 bp, synthetic construct
  source 1..75: mol_type = other DNA
tccccctcagcgcagagcaacaggccgccatgcaggctgtggctgtcaccgaacaacgtcgtcgtcagggacgca

SEQ ID NO: 22500 - DNA, 75 bp, synthetic construct
  source 1..75: mol_type = other DNA
tacaagattaagctccggtcttcaggctatcgccttgtataccaggttatagacgagaaagttgtcgttttcgtg

SEQ ID NO: 22501 - DNA, 75 bp, synthetic construct
  source 1..75: mol_type = other DNA
gatgaacggcagcgcaccggtagacctcggccttgatgacgatgcgctgtcaatggagtggtcgctcggtggctt

SEQ ID NO: 22502 - DNA, 75 bp, synthetic construct
  source 1..75: mol_type = other DNA
aatatgagaagtatcgcggcggcggtatgccgggggcggtggatgtggatttgggactggatgacagtgcactgg

SEQ ID NO: 22503 - DNA, 75 bp, synthetic construct
  source 1..75: mol_type = other DNA
tcaagtatgcgttattggttcgtttaatgttgatatcatcagttatttgccgaggcttcccactatcggagaatc

SEQ ID NO: 22504 - DNA, 75 bp, synthetic construct
  source 1..75: mol_type = other DNA
acgtctgtacttgttcacgtcattggctccctcatcatgacagctttaggcttttttatcataaccatacttttc

SEQ ID NO: 22505 - DNA, 75 bp, synthetic construct
  source 1..75: mol_type = other DNA
ataaggatgcaattgtgcgggaggctcttcttcgtgattttaatactccaccctttaaaaaagtgccggcttact

SEQ ID NO: 22506 - DNA, 75 bp, synthetic construct
  source 1..75: mol_type = other DNA
attgaaaaactggagtgctatatcgctgaattgaaaaaaagcaccccaacaaaaaatgaggtgcttgcagcagac

SEQ ID NO: 22507 - DNA, 75 bp, synthetic construct
  source 1..75: mol_type = other DNA
tgttgccacatgtggcgattagtcttgaccgtactgaaggtgccacgctggagttctacgaagctgaggcgaaaa

SEQ ID NO: 22508 - DNA, 75 bp, synthetic construct
  source 1..75: mol_type = other DNA
ttctaataagtcttatattgccacagccacattgccctttgtatttcctaataaggtgctgggcgttatccctct

SEQ ID NO: 22509 - DNA, 75 bp, synthetic construct
  source 1..75: mol_type = other DNA
ggatgttctgaacaaacagcgcggtgatgaccagcgtcgtattgaaaagttgggacaggacaatgccgccctggc

SEQ ID NO: 22510 - DNA, 75 bp, synthetic construct
  source 1..75: mol_type = other DNA
atattcgcatttgctatccgtatggcaattatgagtacgataatattatctatgttgaaaagaaaattaatatat

SEQ ID NO: 22511 - DNA, 75 bp, synthetic construct
  source 1..75: mol_type = other DNA
tgggcgatggcggcggagtattgccgacgccggacgcaaagcagactgcactggtaaatgagaaacgccgggctg

SEQ ID NO: 22512 - DNA, 75 bp, synthetic construct
  source 1..75: mol_type = other DNA
gagtattggtaacacaggtgggagcgaaacccgtccacgaaatattgcatttaactatatcgtgagagctgcgta

SEQ ID NO: 22513 - DNA, 75 bp, synthetic construct
  source 1..75: mol_type = other DNA
tccggaaggctggcaataaaaattattgcagagccaccggataagcgccgccgcgacctggacaatatcctgaag

SEQ ID NO: 22514 - DNA, 75 bp, synthetic construct
  source 1..75: mol_type = other DNA
tacaaaatcaaacttcgcgcatcggggtttcgtctggtctatcaggttattgatgacatgctaattattgcggtt

SEQ ID NO: 22515 - DNA, 75 bp, synthetic construct
  source 1..75: mol_type = other DNA
ggctgaagttgatgagcaggccatgaaagaaggcgtgccccagtttgtgatggcgtatatcgacatacgcctggg

SEQ ID NO: 22516 - DNA, 75 bp, synthetic construct
  source 1..75: mol_type = other DNA
attgacttccacaaacagaaaaaactggaacgccttgccgcacggctgggcgtcacatacaccggagaaatcata

SEQ ID NO: 22517 - DNA, 75 bp, synthetic construct
  source 1..75: mol_type = other DNA
tacaaaatcaaacttcgcgcatcggggtttcgtctggtatatcaggtgagtgatgacatgttaattattgctgtt

SEQ ID NO: 22518 - DNA, 75 bp, synthetic construct
  source 1..75: mol_type = other DNA
ttgttgaatgaactggacgaacaggcgaagcgacaggctgtgatgaatgagctgaaggcgaagccgcgttctgaa

SEQ ID NO: 22519 - DNA, 75 bp, synthetic construct
  source 1..75: mol_type = other DNA
gagatcctggaagcggaggcgcagagaacaggccagagcaagacaaccgttctaaaggcagcgctggccgcattc

SEQ ID NO: 22520 - DNA, 75 bp, synthetic construct
  source 1..75: mol_type = other DNA
gcgatgatggatatgctgctggcgaagaaacgctcggaagatcgccgcaactggttgcaagagaaaggcgacatg

SEQ ID NO: 22521 - DNA, 75 bp, synthetic construct
  source 1..75: mol_type = other DNA
tattatgaactgcgttccttgccgtgcattgaggatattctggcaatacaccccacgttgccagcaagaattcat

SEQ ID NO: 22522 - DNA, 75 bp, synthetic construct
  source 1..75: mol_type = other DNA
cgtcctgggtggtgtcacttggcagattagcatcatatggcgcgatccttactggattatggacctgcagaacga

SEQ ID NO: 22523 - DNA, 75 bp, synthetic construct
  source 1..75: mol_type = other DNA
gtgacacaggggcaggttctgaccggtagtggctgtactgctaacggtaattgcctcccgcacgggaatggtgac

SEQ ID NO: 22524 - DNA, 75 bp, synthetic construct
  source 1..75: mol_type = other DNA
gcgtgatgataccggagaagtgcaggccgtggagcttgtggtgcgtgggcgtcacaaagaagtggattccggcga

SEQ ID NO: 22525 - DNA, 75 bp, synthetic construct
  source 1..75: mol_type = other DNA
ctgacgctgccgaaattcacccgcaaatatgagaagtatcgcggtggcggaatgccgggggcggtggatgtggat

SEQ ID NO: 22526 - DNA, 75 bp, synthetic construct
  source 1..75: mol_type = other DNA
gttgagggcgcctcgcatatggctgaaggttacacccgcagtcagaatggcaatattggcgtgtgtattggcaca

SEQ ID NO: 22527 - DNA, 75 bp, synthetic construct
  source 1..75: mol_type = other DNA
aaaaaaattagcgcaggcagccacaccagatggtaaaccggtccgcctgactcacatggccgtgggtgacggcgg

SEQ ID NO: 22528 - DNA, 75 bp, synthetic construct
  source 1..75: mol_type = other DNA
ctgccatcttattaatggcaccgttagccttttctgcacaatcattggctgaatcattaacggtggaacaacgcc

SEQ ID NO: 22529 - DNA, 75 bp, synthetic construct
  source 1..75: mol_type = other DNA
caccgtcagggaatgataatgaacagcatcggcgtggatgtggctgtctgttatgaatatccgtcgcccatactt

SEQ ID NO: 22530 - DNA, 75 bp, synthetic construct
  source 1..75: mol_type = other DNA
ttacattaaccaacgaaatggctgacatggtgcgcgcccgtgtggcttccggtgcatacgcttcagaaagcgaag

SEQ ID NO: 22531 - DNA, 75 bp, synthetic construct
  source 1..75: mol_type = other DNA
tatcgctggatgacgagttgcggatctacagtaatgagaaactggtggcctcacatcgcctctgttcggcatcgt

SEQ ID NO: 22532 - DNA, 75 bp, synthetic construct
  source 1..75: mol_type = other DNA
agcacaacgaaaacgttgagtggtataaaaataacactgacgcgattgatgctgctggcgacaaagctcgtgagg

SEQ ID NO: 22533 - DNA, 75 bp, synthetic construct
  source 1..75: mol_type = other DNA
ttcgacatccgccatgtgtcctgggacagctatatcgaggttggtggtaatcgttacagcgttcccgaagcgctg

SEQ ID NO: 22534 - DNA, 75 bp, synthetic construct
  source 1..75: mol_type = other DNA
ggttcgcgccttccgctacttcggtggttgtgtgaaaacggtgctggttgataaccagaaggctgcggtgctgaa

SEQ ID NO: 22535 - DNA, 75 bp, synthetic construct
  source 1..75: mol_type = other DNA
gccgcgctaagcctgaagataaaccctatacgcttggggatgggcaaggcttgtcattgcttatagaacctaatg

SEQ ID NO: 22536 - DNA, 75 bp, synthetic construct
  source 1..75: mol_type = other DNA
ccacaggggcagggtaaagtaacttttaacggaactgttgttgatgctccatgcagcatttctcagaaatcagct

SEQ ID NO: 22537 - DNA, 75 bp, synthetic construct
  source 1..75: mol_type = other DNA
acaatgactatccgtcgtaattatacaaaactcggggagttcactctaccaaaaacagaagcgggaactgatcgt

SEQ ID NO: 22538 - DNA, 75 bp, synthetic construct
  source 1..75: mol_type = other DNA
gctgctgaaaatggtttcagtgtgatcagcagttcactgggcatttcacgctggaaaaatatgcagcaggttaac

SEQ ID NO: 22539 - DNA, 75 bp, synthetic construct
  source 1..75: mol_type = other DNA
attaattgtccgtacaactccagtgtcagagacctttgcgaagaaattcttctaaagttagatgatgctagcggc

SEQ ID NO: 22540 - DNA, 75 bp, synthetic construct
  source 1..75: mol_type = other DNA
cgtcgctttttctccattgtttttctcattgttctattagtttgcattcattcactgataacaactataaaataa

SEQ ID NO: 22541 - DNA, 75 bp, synthetic construct
  source 1..75: mol_type = other DNA
tacgttgtaagttatatggctgagcgaggtcaggaagctggatacaggttcctctctgctcagcagggaggcaaa

SEQ ID NO: 22542 - DNA, 75 bp, synthetic construct
  source 1..75: mol_type = other DNA
gtttaactcgctgcgtctgcccgtgctgaacagcatcagcggccagaatcccaatgcggaattacttgccgggca

SEQ ID NO: 22543 - DNA, 75 bp, synthetic construct
  source 1..75: mol_type = other DNA
gctgcttcaggacgttaacgtgggatggctggagcacatcagaaccgacgccagcgaacgcgttatgaatgacgt

SEQ ID NO: 22544 - DNA, 75 bp, synthetic construct
  source 1..75: mol_type = other DNA
caccgccaattatcccgcgcgtaaatttggcgtacgtagcgctatgccgacagggatggcgctcaaattatgccc

SEQ ID NO: 22545 - DNA, 75 bp, synthetic construct
  source 1..75: mol_type = other DNA
cgtcgacgagtaatatttaatttctctgaggttgtaccagagaacgaacgcgatccgatgctggcgaaaaagata

SEQ ID NO: 22546 - DNA, 75 bp, synthetic construct
  source 1..75: mol_type = other DNA
agcttgtgcaggtggctaatgctgaagatgtgcaaaaaaaattaaatgcgttgtttaccagtttgtttttcactc

SEQ ID NO: 22547 - DNA, 75 bp, synthetic construct
  source 1..75: mol_type = other DNA
acccttaaagtattaccaaaataatgttggagtgaccattactttattacaggtaatggaagagtacaaaattaa

SEQ ID NO: 22548 - DNA, 75 bp, synthetic construct
  source 1..75: mol_type = other DNA
gaagctggcggcggcaggcgtacaggatgcaaatttttatcctgagggtatgcacggccaggaggtgcagaactg

SEQ ID NO: 22549 - DNA, 75 bp, synthetic construct
  source 1..75: mol_type = other DNA
cctcgcatgggatacggtcaccagtaccaccgccaccgcgtatgccaccgcccgtgcgctgggtctgcgcgctaa

SEQ ID NO: 22550 - DNA, 75 bp, synthetic construct
  source 1..75: mol_type = other DNA
ggcctgactttactggctgggacacggtgctgaatgccgaagcaacggcatatgctaccgcccgtgcgcttggtc

SEQ ID NO: 22551 - DNA, 75 bp, synthetic construct
  source 1..75: mol_type = other DNA
cgttccggggctgattagaggcgcagagatatgcgtaagtattgctgaacagcttcgtaaaggagtcatccagtg

SEQ ID NO: 22552 - DNA, 75 bp, synthetic construct
  source 1..75: mol_type = other DNA
gaggatggtcaggactggtatgagtgtcaggcgttgttttcgccggagacgctgaaggtggtgtatgacagccgg

SEQ ID NO: 22553 - DNA, 75 bp, synthetic construct
  source 1..75: mol_type = other DNA
gacggacacaatggcagaagcgcacatgtgggcagtggacaaaccgctgaacccgtcgctggcgcgcgacattat

SEQ ID NO: 22554 - DNA, 75 bp, synthetic construct
  source 1..75: mol_type = other DNA
tttgtaaaaaaggtaatttgatgaaaacaaaaaaattgatgatggttgcactggtcagttccactctggcccttt

SEQ ID NO: 22555 - DNA, 75 bp, synthetic construct
  source 1..75: mol_type = other DNA
gggatatctggcaaagaccgacaggattgatgcaaaagtgttgtctcaaatggccgaggtaataaaccgtcatcc

SEQ ID NO: 22556 - DNA, 75 bp, synthetic construct
  source 1..75: mol_type = other DNA
acggtgttaccggcatcagtgcctctgtattctgggatttgcaggagtccggcaccgatgctgacctgttgaacg

SEQ ID NO: 22557 - DNA, 75 bp, synthetic construct
  source 1..75: mol_type = other DNA
accgtttccaatatcatcggcaccactgacgaaaacggtcagtacaccggactgaaagccctgctggcggcggag

SEQ ID NO: 22558 - DNA, 75 bp, synthetic construct
  source 1..75: mol_type = other DNA
aagacgtgacacctgataagggagatcgcgataagcgacgctctcgtatcaaggagctattcaaccgtggaactg

SEQ ID NO: 22559 - DNA, 75 bp, synthetic construct
  source 1..75: mol_type = other DNA
atgcccgccgttgacctttcccagttaccggaacccgccatcatcgcggagcctgactttgaagcaattctggct

SEQ ID NO: 22560 - DNA, 75 bp, synthetic construct
  source 1..75: mol_type = other DNA
gatgaaaaatgcgcaaaaaactctgaaaaaaactgcgcaaattcggcagaaacgaaacggattcgtggttcccga

SEQ ID NO: 22561 - DNA, 75 bp, synthetic construct
  source 1..75: mol_type = other DNA
caatggatttgctgatcatcgacgaagtcggcgttcagtttggcagcgcggctgaaatggctattttgcaggaaa

SEQ ID NO: 22562 - DNA, 75 bp, synthetic construct
  source 1..75: mol_type = other DNA
gaaaataacggtgtcgcatccgaagacctgctggctgtggtgcgtaacgcccttaatggcgaggacgtcaggccg

SEQ ID NO: 22563 - DNA, 75 bp, synthetic construct
  source 1..75: mol_type = other DNA
aagagtcagagcttctgacaaatctccgcctgatagaacgctctcaagctgtattcattgatgacgcgcaacgtg

SEQ ID NO: 22564 - DNA, 75 bp, synthetic construct
  source 1..75: mol_type = other DNA
cattattgccgaactgcacggcaaatacctgataacgccttaccacacaaaagagtcagagcttctgacaaatct

SEQ ID NO: 22565 - DNA, 75 bp, synthetic construct
  source 1..75: mol_type = other DNA
agaaaaagaatagcggtttgagtatcagtgcgttagcgcgtcaatatggcgtttcaagagcgactgtagcagcta

SEQ ID NO: 22566 - DNA, 75 bp, synthetic construct
  source 1..75: mol_type = other DNA
gataaagccacacgatatgcaggcagcgattgcctgtaactcatgccacgatttaatcgacgggagagtaaaaac

SEQ ID NO: 22567 - DNA, 75 bp, synthetic construct
  source 1..75: mol_type = other DNA
agataatcagcgctagcagtcgtccgggtgacctgattgcagattttttcatggggtcgggttcgacagtgaaag

SEQ ID NO: 22568 - DNA, 75 bp, synthetic construct
  source 1..75: mol_type = other DNA
gataatcagccgtctggtggcaggggaaacactgagtgtgcgtaagctggccgctgagtttggtgtgtcggtgcg

SEQ ID NO: 22569 - DNA, 75 bp, synthetic construct
  source 1..75: mol_type = other DNA
caacacaggtattacatatgtccagtaatcacgaaacgaaaacactcggcagcgaaattctgaattttgcatgtg

SEQ ID NO: 22570 - DNA, 75 bp, synthetic construct
  source 1..75: mol_type = other DNA
taaacgcgccctgtatcacaatgccgctgctgtggtgctggcacacaatcacccgtccggtgaagtcacacccag

SEQ ID NO: 22571 - DNA, 75 bp, synthetic construct
  source 1..75: mol_type = other DNA
tcgtcaccgtgtctgacgtcatgagcgtgttgcatgacagctacgacaacggcaaatccggggaaaaatttttac

SEQ ID NO: 22572 - DNA, 75 bp, synthetic construct
  source 1..75: mol_type = other DNA
gcgggctggtccggtatctgcgggaaaattttaacggtgtcagggtacagtgtggcgacttcatggaatggcagc

SEQ ID NO: 22573 - DNA, 75 bp, synthetic construct
  source 1..75: mol_type = other DNA
gttcgctgatgaacgtgtgattgagcagcatattgaggcaggcatttcactgtgtgatgcggtgaactttctcgt

SEQ ID NO: 22574 - DNA, 75 bp, synthetic construct
  source 1..75: mol_type = other DNA
gagcgtgtctgcgccgcgctgcgggagttgaacaagcatcgggatattgttcgacagattactgatttttcccgc

SEQ ID NO: 22575 - DNA, 75 bp, synthetic construct
  source 1..75: mol_type = other DNA
aagcactgaaaaaagcctcgtcgcacgagattgcagcccgtcttgaaatcagccgtgacgatgctgttaccgaac

SEQ ID NO: 22576 - DNA, 75 bp, synthetic construct
  source 1..75: mol_type = other DNA
ttgacggactggcgcgcaccttccgcgctgccgtgcatcatagttccccgattgcagtaaagtgcaacattctga

SEQ ID NO: 22577 - DNA, 75 bp, synthetic construct
  source 1..75: mol_type = other DNA
atgcaacagatttcctttctgcccggagaaatgacgcccggcgagcgcagtctcattctgcgggctctgaaaacc

SEQ ID NO: 22578 - DNA, 75 bp, synthetic construct
  source 1..75: mol_type = other DNA
ggtgatgttgaaaaagccagccgcgtctttgtccgcaacgaactgatgacgttacagaagcgactgcaggagctt

SEQ ID NO: 22579 - DNA, 75 bp, synthetic construct
  source 1..75: mol_type = other DNA
atgggaaagagtaagaagaaccgcgctgcgtcgacgaaacagatccagcataaaggccagacttcagccgaagca

SEQ ID NO: 22580 - DNA, 75 bp, synthetic construct
  source 1..75: mol_type = other DNA
gaatcaactgattgccggtgaaaccctctttaccggcaccatcaaccgcacggaagtccatccccgggaagtgat

SEQ ID NO: 22581 - DNA, 75 bp, synthetic construct
  source 1..75: mol_type = other DNA
agcacgggaatggctgattctgaacatggcgggactggagcgtgaagaattccgggtgctgtatctgaataacca

SEQ ID NO: 22582 - DNA, 75 bp, synthetic construct
  source 1..75: mol_type = other DNA
atgcaacaactttcctttctgcccggagagatgacacccggtgagcgcagcctcattcagcgggccctgaaaacc

SEQ ID NO: 22583 - DNA, 75 bp, synthetic construct
  source 1..75: mol_type = other DNA
agcgggaaaaaattaaggggcaggttgttgaactcgtacgccagagcggtcgcgagacgttacggcaactggaag

SEQ ID NO: 22584 - DNA, 75 bp, synthetic construct
  source 1..75: mol_type = other DNA
aataacgtgatgttattatgtgctttcaaagaaaacgcaggtatttttcgcacaaacttttctcgcaacacatcc

SEQ ID NO: 22585 - DNA, 75 bp, synthetic construct
  source 1..75: mol_type = other DNA
gaaaaaactggtatgaggaagtaagtaattttcaggaagacacgataaagattgtttacgacgagaataatataa

SEQ ID NO: 22586 - DNA, 75 bp, synthetic construct
  source 1..75: mol_type = other DNA
atgccgcacatgcgcgtacaagtcgctatatcactgacacgacaaaagagcgttatcaccagtgtcagaacgtga

SEQ ID NO: 22587 - DNA, 75 bp, synthetic construct
  source 1..75: mol_type = other DNA
ggctgccataactcgatgtcgctggcgttaatggcggtgtgtaaaccgggcgatattgtcgcggtcgaatccccc

SEQ ID NO: 22588 - DNA, 75 bp, synthetic construct
  source 1..75: mol_type = other DNA
caaatcgccgtgctgacatttcgggtaaatggatgttcaaagatggcgtagtggtaaagcgaacttataccgagg

SEQ ID NO: 22589 - DNA, 75 bp, synthetic construct
  source 1..75: mol_type = other DNA
aatcgtaatatggcaaggagtcgaggttatccagagcgtgaaaaatgtttcgatgcagcactaaaaattattgat

SEQ ID NO: 22590 - DNA, 75 bp, synthetic construct
  source 1..75: mol_type = other DNA
tgcgtgagatagcaaaacaggcaacacagggcgaatgggtcgcatttatttcgccgggtactggtacgtatgcgg

SEQ ID NO: 22591 - DNA, 75 bp, synthetic construct
  source 1..75: mol_type = other DNA
aacgccatcatcatgctcgaccgcatagatacgctggaaaattgcgatgatgaccgtattgaggctgttaaggct

SEQ ID NO: 22592 - DNA, 75 bp, synthetic construct
  source 1..75: mol_type = other DNA
catattactcaggaacaagctgcggcacgcattggcatttctattcggcaggttaaacgtctggtgcaacggtat

SEQ ID NO: 22593 - DNA, 75 bp, synthetic construct
  source 1..75: mol_type = other DNA
ggaaaaatacgcgctggtacgaactgaccagccaggattcagcgcctgtacccgctctcagttaatcaacagcat

SEQ ID NO: 22594 - DNA, 75 bp, synthetic construct
  source 1..75: mol_type = other DNA
tcccgtcaccatctggcagactctgctcacccggctgctggaccagcactacggtctcacgctgaatgacacacc

SEQ ID NO: 22595 - DNA, 75 bp, synthetic construct
  source 1..75: mol_type = other DNA
tgtgcgatgcggtgaactttctcgtggaaaaatacgcactggtacgaaccgaccagccgggattcagcgcaggaa

SEQ ID NO: 22596 - DNA, 75 bp, synthetic construct
  source 1..75: mol_type = other DNA
atgaatacattacccgacactcacgtacgggaggcatcgggctgcccgtctcccgtcaccatctggcagacactg

SEQ ID NO: 22597 - DNA, 75 bp, synthetic construct
  source 1..75: mol_type = other DNA
acggcctcacactgaatgacacaccgtttgccgatgaacgtgtgattgagcagcatattgaagctggcatttcac

SEQ ID NO: 22598 - DNA, 75 bp, synthetic construct
  source 1..75: mol_type = other DNA
ctgattaaccagaaacgcattgcaccgctgaatcttctgagcgttgaccctaacaatcagagccagattattgcg

SEQ ID NO: 22599 - DNA, 75 bp, synthetic construct
  source 1..75: mol_type = other DNA
caggcgaaccacgcgaccacatgagcacgttgcagcttgagcacctttcttaccttgagcagagcaatatcacgc

SEQ ID NO: 22600 - DNA, 75 bp, synthetic construct
  source 1..75: mol_type = other DNA
tttcctgctggctggaagaggcacttcttcgggggattatccgtccgccacgggcacgttttgatttttatcagg

SEQ ID NO: 22601 - DNA, 75 bp, synthetic construct
  source 1..75: mol_type = other DNA
gtgcaaataaccgaagccttactttcagagccgggggaaatccggcgttttgttcagcaggcggtggaccactgg

SEQ ID NO: 22602 - DNA, 75 bp, synthetic construct
  source 1..75: mol_type = other DNA
gtcaaccgggatacctggtgtcgtgccggcgattaccgcgatccggggtcactggccgggatgattaaacaggcc

SEQ ID NO: 22603 - DNA, 75 bp, synthetic construct
  source 1..75: mol_type = other DNA
tcgacgcttaccagaaacgtaagcatcgggaaggtaaacgcgtgcattcctcgaccctgcattacgcctgggccc

SEQ ID NO: 22604 - DNA, 75 bp, synthetic construct
  source 1..75: mol_type = other DNA
gcgaaagacattggtgagccttctgtcctgaaccgtgcaggtggtgcgccaacgctggcggtaggtatcgctcac

SEQ ID NO: 22605 - DNA, 75 bp, synthetic construct
  source 1..75: mol_type = other DNA
gtggtgctgaacccggaactgaaaatgcctgccatgacccagtacattgacggtactggcccgctgtggaaaggc

SEQ ID NO: 22606 - DNA, 75 bp, synthetic construct
  source 1..75: mol_type = other DNA
ttcagcaggtgctggaacgcgctgactatctggcgaaggagcataccaaagctcacggcaccggtgagcgcaact

SEQ ID NO: 22607 - DNA, 75 bp, synthetic construct
  source 1..75: mol_type = other DNA
tcgcaacgtcagcgaactgaccacccgttatggtgtcactttcaatacggtttacaaggccattcgccggatgcg

SEQ ID NO: 22608 - DNA, 75 bp, synthetic construct
  source 1..75: mol_type = other DNA
cgtctaacctgaccctgtggtctggttctaaagcaatcaacgaagatgctgcgggtaactacatccactacggtg

SEQ ID NO: 22609 - DNA, 75 bp, synthetic construct
  source 1..75: mol_type = other DNA
aattcaaaatcagaaaaattaagcgggatattgagcgcagttgtaataatgccataaaatacttcgaactttttg

SEQ ID NO: 22610 - DNA, 75 bp, synthetic construct
  source 1..75: mol_type = other DNA
ttaatatacggaaatatcgggatattcctgttgaaacgccgtatgcgccgggagaacacattaagggagggcagc

SEQ ID NO: 22611 - DNA, 75 bp, synthetic construct
  source 1..75: mol_type = other DNA
tcaggttgctgacattctggcatcgcagcatgactgtaagcagcgtcgtggatcacagctgccggttaacctgaa

SEQ ID NO: 22612 - DNA, 75 bp, synthetic construct
  source 1..75: mol_type = other DNA
cacctcgctgagactgcgggcgcagcgggcgtatgacggcctgagtgttgctggcccgtcaggtgcatacgagta

SEQ ID NO: 22613 - DNA, 75 bp, synthetic construct
  source 1..75: mol_type = other DNA
attaccttacggttgatgatcttgttgaaatcaatcattccctaattgaattacagacgccagatgagcccgttg

SEQ ID NO: 22614 - DNA, 75 bp, synthetic construct
  source 1..75: mol_type = other DNA
gaaacgcagcgttgcgaaagctgccgttgagttgattcagccaggtcatcgggtgctcctcgattccgggaccac

SEQ ID NO: 22615 - DNA, 75 bp, synthetic construct
  source 1..75: mol_type = other DNA
gattagcagggcttttaagtatgcgcttgatggaatcaccaataaaaaacgcccggcggcaaccgagcgttctga

SEQ ID NO: 22616 - DNA, 75 bp, synthetic construct
  source 1..75: mol_type = other DNA
cgctgcatccgctggcgttgccggacgtgtcattgcaatatgaaccggacggacgttcggttattcgtctgcgct

SEQ ID NO: 22617 - DNA, 75 bp, synthetic construct
  source 1..75: mol_type = other DNA
gaacaaccggtggcaggtaacgcctggcaagccgaagagcagcaatccacttttgctccacagtctacataccag

SEQ ID NO: 22618 - DNA, 75 bp, synthetic construct
  source 1..75: mol_type = other DNA
gctgtcgattttcttcggtctggcgctgtttaccctggttgcttacatcattttgtcatttgcgcttgatccaat

SEQ ID NO: 22619 - DNA, 75 bp, synthetic construct
  source 1..75: mol_type = other DNA
ttccccgttgggctttgaggataatgacaggctctggccaaaaggcgagtcggcgttcagcggctaccagttgct

SEQ ID NO: 22620 - DNA, 75 bp, synthetic construct
  source 1..75: mol_type = other DNA
atgacatttctgaaccagttaatgctgtacttctgtacggtggtctgtgtgctgtatctcctttcgggtggatac

SEQ ID NO: 22621 - DNA, 75 bp, synthetic construct
  source 1..75: mol_type = other DNA
tgtatttctgcacggcagtatgtgcgttatatctggtgagtggtggttataaggccatcagaaattatgttcgcc

SEQ ID NO: 22622 - DNA, 75 bp, synthetic construct
  source 1..75: mol_type = other DNA
ttgaagctattaaacgcggcacggtaattgaccatatccccgcccagatcggttttaagctgttgagtctgttca

SEQ ID NO: 22623 - DNA, 75 bp, synthetic construct
  source 1..75: mol_type = other DNA
tgtgtaatgaagatggcctgacccaggctgaagttctgaccgcactgataaaaagtgaagcgcaaaaacgatgca

SEQ ID NO: 22624 - DNA, 75 bp, synthetic construct
  source 1..75: mol_type = other DNA
acgtgagttgcctgctgaacatcagtgggcgattacaacgggaagggcagaaagtcaaagtgatgcatattgctg

SEQ ID NO: 22625 - DNA, 75 bp, synthetic construct
  source 1..75: mol_type = other DNA
ggacagcaacgtctggctgccgtacagcgggccatgcagcagggggccgcgaatgatgactggtttatgccggag

SEQ ID NO: 22626 - DNA, 75 bp, synthetic construct
  source 1..75: mol_type = other DNA
agggcacctcgtgttcaccaaaaactacacatccaaatctgcgtatgtcgcgtaccgccacgaatgcgcttacat

SEQ ID NO: 22627 - DNA, 75 bp, synthetic construct
  source 1..75: mol_type = other DNA
agaaacaggtaatcactgtctgtgaccgggaagcggatatctggcattacctgcattataaagtcagccgcggga

SEQ ID NO: 22628 - DNA, 75 bp, synthetic construct
  source 1..75: mol_type = other DNA
accagcctgcaaccgctgattgagagcttcacacatccgaacgcgattgtgctggacccgtttgcaggcagcggc

SEQ ID NO: 22629 - DNA, 75 bp, synthetic construct
  source 1..75: mol_type = other DNA
atggaaagaggggaaatctggcttgtctcgcttgatcctaccgcaggtcatgagcagcagggaacgcggccggtg

SEQ ID NO: 22630 - DNA, 75 bp, synthetic construct
  source 1..75: mol_type = other DNA
aaaaataaaactgcaaggccagcaaggtacacagtccaacctaaacgccggaatggttaaagagtttgaactaga

SEQ ID NO: 22631 - DNA, 75 bp, synthetic construct
  source 1..75: mol_type = other DNA
gctggcagtttgctctgaccgcgctgtatcactttttatttgtaccccttaccctggggctgatttttttgctgg

SEQ ID NO: 22632 - DNA, 75 bp, synthetic construct
  source 1..75: mol_type = other DNA
tctcgcttgatcctaccgcaggtcatgagcagcagggaacgcggccagtgctgattgtcacaccggcggccttta

SEQ ID NO: 22633 - DNA, 75 bp, synthetic construct
  source 1..75: mol_type = other DNA
taattatctgacagacaggaacggaaaaatattgccagttattcctggcatgatagccagcgtggatataaaaac

SEQ ID NO: 22634 - DNA, 75 bp, synthetic construct
  source 1..75: mol_type = other DNA
atgtcctgaaaatgggtatcggtggcggcgcatcgaaagccgcacagacgctcagtgactactacatcaaacgtg

SEQ ID NO: 22635 - DNA, 75 bp, synthetic construct
  source 1..75: mol_type = other DNA
gagcagagtctgtcgagaaatgacggtgaagaccagaccagaagaaacgctgaaaatatgttcggagatgactga

SEQ ID NO: 22636 - DNA, 75 bp, synthetic construct
  source 1..75: mol_type = other DNA
atgaaaattcgtcaggcgcagaccagcgcaacctacattctgccggaccccggcgaactgaataaacgcgtcctg

SEQ ID NO: 22637 - DNA, 75 bp, synthetic construct
  source 1..75: mol_type = other DNA
gaacggaaaatctcgcgccgttcccgtttctgatgcggtacttgcgttaattaaaacccgcagaaccggattgtt

SEQ ID NO: 22638 - DNA, 75 bp, synthetic construct
  source 1..75: mol_type = other DNA
gcaaatggcccggttcccacctaccttgatctgctgaacgtcactacccggacagtggtacagggtttgcacagc

SEQ ID NO: 22639 - DNA, 75 bp, synthetic construct
  source 1..75: mol_type = other DNA
aaaaaaacgcagctacttacgtttatctgaacggtacgcgcctgactgtggagcttccgtaccagaccgtacgag

SEQ ID NO: 22640 - DNA, 75 bp, synthetic construct
  source 1..75: mol_type = other DNA
aacgtcttgtttctctgccgcacacaatgctgttacgcctgtggcaggccgtgttctcactgtgtctgttgctct

SEQ ID NO: 22641 - DNA, 75 bp, synthetic construct
  source 1..75: mol_type = other DNA
tgcgctgcagcctctggtcagggttgtaccgatgacggcagttgaatgggctgaccagtattattatctgccgaa

SEQ ID NO: 22642 - DNA, 75 bp, synthetic construct
  source 1..75: mol_type = other DNA
tggaaaacgctgccattccagatcgccatcatgaacagcatggggaatgatcagatccgcactgttaatctgatt

SEQ ID NO: 22643 - DNA, 75 bp, synthetic construct
  source 1..75: mol_type = other DNA
ggcgtaatgaagctctggactgtctggtgtatgcctatgcagcgctgcgcatttccgttcagcggtggcaactgg

SEQ ID NO: 22644 - DNA, 75 bp, synthetic construct
  source 1..75: mol_type = other DNA
atgaatatatcagagcaacaactgaataatatgatgagtgctgtcacaacagcattacagcccctgataagggca

SEQ ID NO: 22645 - DNA, 75 bp, synthetic construct
  source 1..75: mol_type = other DNA
gtgccggttttactcgatcttgcaccgtggtttgggcgtaaacatcgtgataataccctcacgctgaaacgtttt

SEQ ID NO: 22646 - DNA, 75 bp, synthetic construct
  source 1..75: mol_type = other DNA
tcaagagcatttgattatcgattaggtgaagtttgggatctaaaaaatgaagtcacatctgaattcataaccaga

SEQ ID NO: 22647 - DNA, 75 bp, synthetic construct
  source 1..75: mol_type = other DNA
ccgcacggcaaaacacaaccccctgaaccgcttcaaattaagccctgaaaacctgatttcagtggcaacgcccgt

SEQ ID NO: 22648 - DNA, 75 bp, synthetic construct
  source 1..75: mol_type = other DNA
gttacgctatcgcactgaacctcgagcgcgactctgtaggtgcggttgttatgggtccgtacgctgaccttgccg

SEQ ID NO: 22649 - DNA, 75 bp, synthetic construct
  source 1..75: mol_type = other DNA
cgacaataattttaagttgaaaataatgcgtggagctattggagacgaaaagtcaaataagcctgtaattctcac

SEQ ID NO: 22650 - DNA, 75 bp, synthetic construct
  source 1..75: mol_type = other DNA
ggcaacaaagccaaaaacgcatggggtggtgatgtcacgattgctgccacagcagacaaatatggctacattatc

SEQ ID NO: 22651 - DNA, 75 bp, synthetic construct
  source 1..75: mol_type = other DNA
gctcgcagagctgggcatggccttctggcatgatttagcggctccggtcattgctggcattcttgccagtatgat

SEQ ID NO: 22652 - DNA, 75 bp, synthetic construct
  source 1..75: mol_type = other DNA
gagttttcgcccgatctgaaagcattacctcccggtgaacatggcttccatattcatgccaaaggaagctgccag

SEQ ID NO: 22653 - DNA, 75 bp, synthetic construct
  source 1..75: mol_type = other DNA
tttttggcagcaaaacaaagcttgccaatgccgcaggagttaggctggcaagcgttgctgcatgggggaaactgg

SEQ ID NO: 22654 - DNA, 75 bp, synthetic construct
  source 1..75: mol_type = other DNA
ggctctgcaacgggaagcgcaggaacaaaaacgcggtttgtgggccgatgcaaatccggttccaccgtgggagtg

SEQ ID NO: 22655 - DNA, 75 bp, synthetic construct
  source 1..75: mol_type = other DNA
cagggatggcgctcaaattatgcccacatctcaccttgcttccggggcgctttgacgcctacaaagaagcctcaa

SEQ ID NO: 22656 - DNA, 75 bp, synthetic construct
  source 1..75: mol_type = other DNA
gagcatatcgacgccggtatatcactgtgcgacgccgtgaattttattgtggagaagtacgatctggtgcgcatc

SEQ ID NO: 22657 - DNA, 75 bp, synthetic construct
  source 1..75: mol_type = other DNA
ctctgtggtcgtgtggttgacctctgtgacagtgaactcgatcaccgcattgcacttcagttcggtggtggtaat

SEQ ID NO: 22658 - DNA, 75 bp, synthetic construct
  source 1..75: mol_type = other DNA
gcgggtgaatgtcctgaagggtgaacagcgtcgggtcagtggtagtgcccgggtttccctcaagcgtcgtatctg

SEQ ID NO: 22659 - DNA, 75 bp, synthetic construct
  source 1..75: mol_type = other DNA
aggaagcaatattacttaccgaacaataaatgattatggcgcacttacccccaaaatgacgggcgtaatggaata

SEQ ID NO: 22660 - DNA, 75 bp, synthetic construct
  source 1..75: mol_type = other DNA
tttcggagagtggggcaaatccatttggtcttacggtggatgcagtgatggaagagtaccggcgctggcgcaatg

SEQ ID NO: 22661 - DNA, 75 bp, synthetic construct
  source 1..75: mol_type = other DNA
ggcgacaactggcagcacccaaacgcccgccagggccaacgccaattgaattgctgaaacaggaatatgagcgcc

SEQ ID NO: 22662 - DNA, 75 bp, synthetic construct
  source 1..75: mol_type = other DNA
atgagtaatacatcatacccaacaggcgttgaaaatcatggcggatcactccgcatatggtttcactataacggc

SEQ ID NO: 22663 - DNA, 75 bp, synthetic construct
  source 1..75: mol_type = other DNA
tcagtcaaatcgttctgaaaaaattccttccgggttttatgtcagatttagttctggcgaaaaccgtagaccgtc

SEQ ID NO: 22664 - DNA, 75 bp, synthetic construct
  source 1..75: mol_type = other DNA
ctttttccgctgtggcgaccatcactggctgatgttctccccgcaggggatgacgcccggcggataccggttccg

SEQ ID NO: 22665 - DNA, 75 bp, synthetic construct
  source 1..75: mol_type = other DNA
tacgagtacatccggacttgcttcgtcatgatctccgcatcctggttattgaccttgatccgcaggcatccagta

SEQ ID NO: 22666 - DNA, 75 bp, synthetic construct
  source 1..75: mol_type = other DNA
cgctgcacatgtgcataacgtgaataagctgctgttcctcggctcatcctgcatctatccgaagctggcgaagca

SEQ ID NO: 22667 - DNA, 75 bp, synthetic construct
  source 1..75: mol_type = other DNA
agatgaagataagcaaccaggcgaaccgatcccagataatcagccagttaatctgacagaagatcaaaaagagtt

SEQ ID NO: 22668 - DNA, 75 bp, synthetic construct
  source 1..75: mol_type = other DNA
gatcttcaccccggaacacttgaatttgagcgccatcgcctgactcgtgctcaggcgacggcgcaggaactgaaa

SEQ ID NO: 22669 - DNA, 75 bp, synthetic construct
  source 1..75: mol_type = other DNA
tatcaggggcgtgtgggagactttgagttcaccacgctggatgtgatagcccgcctcagacaggacgccacaacg

SEQ ID NO: 22670 - DNA, 75 bp, synthetic construct
  source 1..75: mol_type = other DNA
ttcagactacagcaaaaatggtgcaggcatagaaaactataacttcatcactactgctggtcttaagtacacatt

SEQ ID NO: 22671 - DNA, 75 bp, synthetic construct
  source 1..75: mol_type = other DNA
aagaaggcacgaaccgaggccgagcgtttcactaaggctgtgtttgatcgaattgagtttgttaggggtgaggcg

SEQ ID NO: 22672 - DNA, 75 bp, synthetic construct
  source 1..75: mol_type = other DNA
tatccgacatgccgccacccttaatgcctccgatcttcatatcactccgggccgggacaacacagacttcaccta

SEQ ID NO: 22673 - DNA, 75 bp, synthetic construct
  source 1..75: mol_type = other DNA
tctatagccgttgcggaaatgtttcataacgctgcatggggagtgcgaacattgtggtttgaactcgtcacaaaa

SEQ ID NO: 22674 - DNA, 75 bp, synthetic construct
  source 1..75: mol_type = other DNA
tcagaaacgtatgcaacagaaatacgggaaggacatacaaccgtctcaacagcagctttctgatgatgacctgat

SEQ ID NO: 22675 - DNA, 75 bp, synthetic construct
  source 1..75: mol_type = other DNA
gccctttgggcagagttataccaccggcatccgtcgtaatacgagtaccggtcgtctggaggccctgacctgctc

SEQ ID NO: 22676 - DNA, 75 bp, synthetic construct
  source 1..75: mol_type = other DNA
cgcgctgcggctgaacgtgtgctgacaaagctgccggaaggtggggcgggtgtgaaatacctgcgaaaaattaac

SEQ ID NO: 22677 - DNA, 75 bp, synthetic construct
  source 1..75: mol_type = other DNA
atgcgtgactgccattcttcagatgataaagacgtcatcgcaattgatggaaaaacgctccggcactcttatgac

SEQ ID NO: 22678 - DNA, 75 bp, synthetic construct
  source 1..75: mol_type = other DNA
tggaacggcgtaataaacggacaggcaggagagagaaagcgcggatctgggaagtgacggacagaacggtcaggg

SEQ ID NO: 22679 - DNA, 75 bp, synthetic construct
  source 1..75: mol_type = other DNA
tgcgccgcgctgcgggagctgaacaagcaccgggatattgttcgacagattgtcgattcctccagtcgtattgtg

SEQ ID NO: 22680 - DNA, 75 bp, synthetic construct
  source 1..75: mol_type = other DNA
ccgtgttttttaaccaggtcatgaccaatgccccgttgttgctgggtattgtgacctgtctgggctacatcctac

SEQ ID NO: 22681 - DNA, 75 bp, synthetic construct
  source 1..75: mol_type = other DNA
gatggacgatttgaggcgcttaataataaaggagaatatatttttatcagaaatagtgtcccgggattgagttca

SEQ ID NO: 22682 - DNA, 75 bp, synthetic construct
  source 1..75: mol_type = other DNA
aagaaatgataaaaattaataatattatgattcataaatacactgtattatatacatcaaattgtattatggata

SEQ ID NO: 22683 - DNA, 75 bp, synthetic construct
  source 1..75: mol_type = other DNA
atggaattttgacaatgcttttttaagcaggttttcaaaaaaataccttgctctgttcacatccagcgcattcta

SEQ ID NO: 22684 - DNA, 75 bp, synthetic construct
  source 1..75: mol_type = other DNA
cgggagataaagagtatgcagaggttctcgttgctattacagagcttgctaatactctgcgaagaaatttaatgg

SEQ ID NO: 22685 - DNA, 75 bp, synthetic construct
  source 1..75: mol_type = other DNA
agcgcactgaaagcggggcgcatgaaaggtgaaatgatgtggttaacatcacagtccccggaagacgccataaac

SEQ ID NO: 22686 - DNA, 75 bp, synthetic construct
  source 1..75: mol_type = other DNA
catggcattgaattaaacgctgccgtggaaagcattatgcgaatgcctgtcgaagaacgccggacagcccttctt

SEQ ID NO: 22687 - DNA, 75 bp, synthetic construct
  source 1..75: mol_type = other DNA
ctccatgggtgaatcacgttgaacggctatggcaggcgcttcacgacacaataacgcacaaccatcagtgccgtt

SEQ ID NO: 22688 - DNA, 75 bp, synthetic construct
  source 1..75: mol_type = other DNA
gatggcgtatatccgacagcttaaagaaatgcactttaatgatattgccagtgaggggcattaccaggcgattcc

SEQ ID NO: 22689 - DNA, 75 bp, synthetic construct
  source 1..75: mol_type = other DNA
cgttatcgtgccacggcctcacgggtaatgaagcggctgaacgaattgcagggtgatgcccggcggctgaaatat

SEQ ID NO: 22690 - DNA, 75 bp, synthetic construct
  source 1..75: mol_type = other DNA
gtattgagcgttacgccgccgcagagggtgatgtggggatgtttatcacgctgaccgcgccgtcaaagtatcacc

SEQ ID NO: 22691 - DNA, 75 bp, synthetic construct
  source 1..75: mol_type = other DNA
acggcaaatgggtaataagtattgatgccgaagtaacaatccgcgatatcactcgtttacctggtggaagaatct

SEQ ID NO: 22692 - DNA, 75 bp, synthetic construct
  source 1..75: mol_type = other DNA
cttgcaggaagatggtttttatattttcgataaagaatttctaccatctacgctcaaaaatccgtttgtaatcac

SEQ ID NO: 22693 - DNA, 75 bp, synthetic construct
  source 1..75: mol_type = other DNA
gatcgtgctggtgtaaacgcttttattcgcggaatagaccggatcgccaatcagaaactaccagcggcagttctt

SEQ ID NO: 22694 - DNA, 75 bp, synthetic construct
  source 1..75: mol_type = other DNA
ccgctcttttcaacaactttacctgccccctgaactcaagattcaggaaggtgccagaaaaaattacgaaaaaat

SEQ ID NO: 22695 - DNA, 75 bp, synthetic construct
  source 1..75: mol_type = other DNA
agatcaaaataaatcccaataaaggtggtaaggctgcgattgagcgattagtcgaagcctatggctttacgacac

SEQ ID NO: 22696 - DNA, 75 bp, synthetic construct
  source 1..75: mol_type = other DNA
cgcaacgaagccccgacgcgtgtgatgagcaatatcaccgatgctgacggtaaggtcgtttcggcagtgattcgc

SEQ ID NO: 22697 - DNA, 75 bp, synthetic construct
  source 1..75: mol_type = other DNA
agtcattagaagtggttctatcggctcggctgcaaaagaattagggttaactcaaccggccgtcagtaaaatcat

SEQ ID NO: 22698 - DNA, 75 bp, synthetic construct
  source 1..75: mol_type = other DNA
atgaaacatactgatatccgtgctgcagtgctggatgcactcgagcagcatgaacacggggcgacgctgtttgat

SEQ ID NO: 22699 - DNA, 75 bp, synthetic construct
  source 1..75: mol_type = other DNA
accgtagtattgtgatggtcctgtcactgctggttttaccactgagcgcacgggctgatgagctgatgaaatggg

SEQ ID NO: 22700 - DNA, 75 bp, synthetic construct
  source 1..75: mol_type = other DNA
ctgatggcagagaataaccgtcttccggaaggttttgcctggaccgacggggataataatgtggtgccggtgacg

SEQ ID NO: 22701 - DNA, 75 bp, synthetic construct
  source 1..75: mol_type = other DNA
tttatacgactcactattaatcatatttgtcataactttgagaagtttactacacaagaaggaaatcaaggaaac

SEQ ID NO: 22702 - DNA, 75 bp, synthetic construct
  source 1..75: mol_type = other DNA
accggataaaactggtgctggaaaaaacagggcttaagcaagcagaactagcccgcagaataggtgttgcccaac

SEQ ID NO: 22703 - DNA, 75 bp, synthetic construct
  source 1..75: mol_type = other DNA
ttgcagctttatgcggcttattggctctgtctggttgtgcctctaaaatcacccagccagataaatattctggtt

SEQ ID NO: 22704 - DNA, 75 bp, synthetic construct
  source 1..75: mol_type = other DNA
catcaacaaaaaccagtcttcaatgtctactgccattgagcgtctgtcttccggtctgcgtatcaacagcgcaaa

SEQ ID NO: 22705 - DNA, 75 bp, synthetic construct
  source 1..75: mol_type = other DNA
atttgaggcgcttaataataaaggagaatatatttttatcagaaatagtgtcccgggattgagttcagtatgcat

SEQ ID NO: 22706 - DNA, 75 bp, synthetic construct
  source 1..75: mol_type = other DNA
attggactgaaggggggatggaacctgtatggatatcaattgaatccgatatcagacatcgaccccctgggttta

SEQ ID NO: 22707 - DNA, 75 bp, synthetic construct
  source 1..75: mol_type = other DNA
tgacgggctggatgtcgctgtcacggaaaccgcaagtgacctggtacggctgggacggcgaccggctgaccacga

SEQ ID NO: 22708 - DNA, 75 bp, synthetic construct
  source 1..75: mol_type = other DNA
gcgaatccggtggcctgccatcactgcaacaatgccccttgcgttacggcttgtccggttaatgctctgactttc

SEQ ID NO: 22709 - DNA, 75 bp, synthetic construct
  source 1..75: mol_type = other DNA
cacacgggccgaccggaaatccgttaccgttacgacagcgacgggcgggtgacagaacagctaaacccggcaggc

SEQ ID NO: 22710 - DNA, 75 bp, synthetic construct
  source 1..75: mol_type = other DNA
tgacgggaccggcaggcgaggaaatcttctgtgatgaacatggccgcgtgcgggtgaaatttaactgggaccgct

SEQ ID NO: 22711 - DNA, 75 bp, synthetic construct
  source 1..75: mol_type = other DNA
tcatactccaactgaccggttgcgtagccagaatgcaatcaaatctgacagtccgcttcgagcgaaaatcggaag

SEQ ID NO: 22712 - DNA, 75 bp, synthetic construct
  source 1..75: mol_type = other DNA
aacacccgtaccgaggtgagcaccctctgcatcagccagtttcgctacagcgcacaaatccgcccttcttccgtg

SEQ ID NO: 22713 - DNA, 75 bp, synthetic construct
  source 1..75: mol_type = other DNA
tttctaactaccagttagaggagttgttagataaaattgaagtatgtgcatttaatgtggagcatgcacaattgc

SEQ ID NO: 22714 - DNA, 75 bp, synthetic construct
  source 1..75: mol_type = other DNA
accgatgctgaatgaacattacgatgtcaccacagcagcctatgctgtcggttacgaaagctatcccatttcagt

SEQ ID NO: 22715 - DNA, 75 bp, synthetic construct
  source 1..75: mol_type = other DNA
tgaaatcgacgtgctgaacttcatctggcgcattgatggtaaggatgttcttcctgaccgcacccgctccatgct

SEQ ID NO: 22716 - DNA, 75 bp, synthetic construct
  source 1..75: mol_type = other DNA
tctcttcctgacgtgaattacaaaagtttgcgccgtttacccaatttattaatagacccgacaacactagacaaa

SEQ ID NO: 22717 - DNA, 75 bp, synthetic construct
  source 1..75: mol_type = other DNA
gcgacgttactcgttaaccgccacgatggcgtactgccgccgcacctggcctccgccattcagaaactgaccgga

SEQ ID NO: 22718 - DNA, 75 bp, synthetic construct
  source 1..75: mol_type = other DNA
tttggttttgacaaggaatctatacaattgatagaaagggagttattagtgattctatcgaaagatgttatatga

SEQ ID NO: 22719 - DNA, 75 bp, synthetic construct
  source 1..75: mol_type = other DNA
ctgaagtcgctgtctctggggaaattgctaacaccgatcgtgtgttaaatatcgcttacggtattgaccgtaact

SEQ ID NO: 22720 - DNA, 75 bp, synthetic construct
  source 1..75: mol_type = other DNA
ccgtgagttttgtgtccagtacggtgaaactgattacgatttcctgtgccggatggcggcggaggaaggcatctt

SEQ ID NO: 22721 - DNA, 75 bp, synthetic construct
  source 1..75: mol_type = other DNA
agtctggttttatccctgagtggtatgccggtctccaccggtgatgttcagaacggtgaacaggttcccctgaca

SEQ ID NO: 22722 - DNA, 75 bp, synthetic construct
  source 1..75: mol_type = other DNA
actggatatgattgcgggtttttctccgggctataaaaaaatagctattggtgacgatgtggttcaggtcgccag

SEQ ID NO: 22723 - DNA, 75 bp, synthetic construct
  source 1..75: mol_type = other DNA
tagaaaaaatggcatcgttttccactgttttgtctgagacagtctcattagctaatgaatactggcatccagaaa

SEQ ID NO: 22724 - DNA, 75 bp, synthetic construct
  source 1..75: mol_type = other DNA
atggagattgtcggcacctttgacgacggtctggacgtgttgaagtttttgcagcataaccgcgtcgacgccatt

SEQ ID NO: 22725 - DNA, 75 bp, synthetic construct
  source 1..75: mol_type = other DNA
cctgtttaagcagaaaatcgtcagaaggtaaaccacaaatatttacaaccttacgaaatattgatcttacccttc

SEQ ID NO: 22726 - DNA, 75 bp, synthetic construct
  source 1..75: mol_type = other DNA
gacgtttatacaggtggtatcagcaatggaacgacaattaagggtggtaattcacacataagtggggggactgcg

SEQ ID NO: 22727 - DNA, 75 bp, synthetic construct
  source 1..75: mol_type = other DNA
tccggggcttcggttttccggcgttgaacatgccgcagtggccatccgattggtcgggcatgctgaagccggccc

SEQ ID NO: 22728 - DNA, 75 bp, synthetic construct
  source 1..75: mol_type = other DNA
gtagcgacaactacgcgggtgatgaaatggtcactaaagtggtgccggtacgcaatgtgtcggtacgcgagctgg

SEQ ID NO: 22729 - DNA, 75 bp, synthetic construct
  source 1..75: mol_type = other DNA
tttgacaggccggatgataccggtgcggtgatccagtctcagactatccagctctgcgtcacggtggtcttccgc

SEQ ID NO: 22730 - DNA, 75 bp, synthetic construct
  source 1..75: mol_type = other DNA
atcattcaccttgtaaccgggaagtcgataagggtttctttgtcatctgaaattctggcaaaaaaactaggcatt

SEQ ID NO: 22731 - DNA, 75 bp, synthetic construct
  source 1..75: mol_type = other DNA
ttttcgccaaaatggatttgtttggattcgatgagtttatccccgtgctttctggctctgaaactggcctgtcta

SEQ ID NO: 22732 - DNA, 75 bp, synthetic construct
  source 1..75: mol_type = other DNA
ggcttttctgtaacccccattcacagggacagtttttccagattaataaacagaaataaccacctggctcgcaac

SEQ ID NO: 22733 - DNA, 75 bp, synthetic construct
  source 1..75: mol_type = other DNA
ggacagcgccctcagcatgtggccggataaccgtatcgcccgtgacgcgcactatctttaccggtatgaccgtca

SEQ ID NO: 22734 - DNA, 75 bp, synthetic construct
  source 1..75: mol_type = other DNA
ttcctgccaacatcgcagaccgttgcctgataaaccctcagcagtacgaggcgatgtatcaacaatctattaacg

SEQ ID NO: 22735 - DNA, 75 bp, synthetic construct
  source 1..75: mol_type = other DNA
gccgcgcatccgatatctggcgcgaagtggcctcgctgtttcgcccacccagccggttaccagtagcggaagcca

SEQ ID NO: 22736 - DNA, 75 bp, synthetic construct
  source 1..75: mol_type = other DNA
aaagaaaaaagcagaagcagaagccgccaaagccgcagccgaagcgcagaaaaaagccgaggcagccgctgcggc

SEQ ID NO: 22737 - DNA, 75 bp, synthetic construct
  source 1..75: mol_type = other DNA
gatcgattcagatgccattttgcagttaccggtactggcgaaaacgacgcgatacggttaattcggctcgcgtca

SEQ ID NO: 22738 - DNA, 75 bp, synthetic construct
  source 1..75: mol_type = other DNA
aggatattgaaggtttagaaagttacctggctaatggctatgtagaggctaactcttttaacgacccagaggatg

SEQ ID NO: 22739 - DNA, 75 bp, synthetic construct
  source 1..75: mol_type = other DNA
ccggctcatcaccgcttgaagtcgccgctgcaaaagcctgtgcggaaattgaaaaaacgccggtcagtattcgtg

SEQ ID NO: 22740 - DNA, 75 bp, synthetic construct
  source 1..75: mol_type = other DNA
gcccgaaaaccaaatgggctttgaaacttcttactgccgcatttttagcagcgagtcccgcggcgaagagtgctg

SEQ ID NO: 22741 - DNA, 75 bp, synthetic construct
  source 1..75: mol_type = other DNA
ggtgctgattcctaccgttagtgatgatggtcgcattatgtctgatgatgaagctattgataacttcatgaggac

SEQ ID NO: 22742 - DNA, 75 bp, synthetic construct
  source 1..75: mol_type = other DNA
aacatatcaccaaacgctttcctggagtgttggcgcttaatgacgtgcaatttaccctacgccggggcgaggttc

SEQ ID NO: 22743 - DNA, 75 bp, synthetic construct
  source 1..75: mol_type = other DNA
cctgctcttgcccaagtatttaatgatgaaatacttgattatagtagctcaatgtctttatcagcaggtgattcc

SEQ ID NO: 22744 - DNA, 75 bp, synthetic construct
  source 1..75: mol_type = other DNA
taaaccgaccagcgttggtggtgattccttacaacaacccttcttctggactggtgaattctcatggggttggct

SEQ ID NO: 22745 - DNA, 75 bp, synthetic construct
  source 1..75: mol_type = other DNA
cgtgtgagggatgtctgtccggatgaaagcataattgatcttaagctggagggaagtaaaactcacagggaatgg

SEQ ID NO: 22746 - DNA, 75 bp, synthetic construct
  source 1..75: mol_type = other DNA
ttgaacaatctgcaaaaaatgtcccccttttatttgagtatacagaatctgttattatggaaaatcgggcagagc

SEQ ID NO: 22747 - DNA, 75 bp, synthetic construct
  source 1..75: mol_type = other DNA
tctgcggcttaaacgactgggcctgtccagaacgttccgtcgtctggttgtcattctcatccgccgttatggcgt

SEQ ID NO: 22748 - DNA, 75 bp, synthetic construct
  source 1..75: mol_type = other DNA
atatgaagacccggtggaatatatcctgggaaatgaaaacgatctgctcccaccgcatcaggcagaaatcgggcg

SEQ ID NO: 22749 - DNA, 75 bp, synthetic construct
  source 1..75: mol_type = other DNA
aaataaaatgtgcgaaaccttcttttgatttgtctcaattatccacatctgtgttacagttgtcacaacaagaac

SEQ ID NO: 22750 - DNA, 75 bp, synthetic construct
  source 1..75: mol_type = other DNA
cctggtggatctcgccctggaagagagcggcatcgctgaacaacatgatgccggatggtggaatgccgccacctg

SEQ ID NO: 22751 - DNA, 75 bp, synthetic construct
  source 1..75: mol_type = other DNA
ccggtgaacccgctactgggtgcgaaggtgctgccgggcgagacggatcttgcgctgcccggcccgttgccgttt

SEQ ID NO: 22752 - DNA, 75 bp, synthetic construct
  source 1..75: mol_type = other DNA
gctctgccggtggttaccatgggcgggctggcgctggccggaagctggcttcatcagcatgtcagcgaacgtcgc

SEQ ID NO: 22753 - DNA, 75 bp, synthetic construct
  source 1..75: mol_type = other DNA
caggtgattaaggaaggaggaactaccgcgcataccaccatcaaccagaaaggaaagctgcaggtgaatgccggc

SEQ ID NO: 22754 - DNA, 75 bp, synthetic construct
  source 1..75: mol_type = other DNA
aaagcgcccttcgatatccgcttacagatacgcgatgaaggcctgatactcaacgacagcggtggtaggagcatt

SEQ ID NO: 22755 - DNA, 75 bp, synthetic construct
  source 1..75: mol_type = other DNA
gggccggtggaacaataatttcaataatgaccccgacacagaatagttatccagtcactatcggcgcaggtgggg

SEQ ID NO: 22756 - DNA, 75 bp, synthetic construct
  source 1..75: mol_type = other DNA
acagttacgcaattagtgaaaagagtcacggcagagaagaaacccgtcttcatattgtttgcgatgtccctgatg

SEQ ID NO: 22757 - DNA, 75 bp, synthetic construct
  source 1..75: mol_type = other DNA
gatgtgctgacgctggatgttgaaatgccgcggatggacggactggatttcctcgaaaaattaatgcgtttgcgt

SEQ ID NO: 22758 - DNA, 75 bp, synthetic construct
  source 1..75: mol_type = other DNA
atcaggtacgtacaccccgacgccaggaacaaaacggatcagggtcacaataacgggcggcggtggcggaggggg

SEQ ID NO: 22759 - DNA, 75 bp, synthetic construct
  source 1..75: mol_type = other DNA
ctgattaaccagaaacgcattgcgccgctgaatcttctgagtgttgaccctaacaatcagagccagattattgcg

SEQ ID NO: 22760 - DNA, 75 bp, synthetic construct
  source 1..75: mol_type = other DNA
gtggtatggatgacggatggctggccgctttatgaatcacgcctgaagggagaactgcacgttatcagcaagcga

SEQ ID NO: 22761 - DNA, 75 bp, synthetic construct
  source 1..75: mol_type = other DNA
cacgctgtcgaaaaaatccagactgggcgaagcgttcagctatgtactgaatcagtgggacgccctctgttatta

SEQ ID NO: 22762 - DNA, 75 bp, synthetic construct
  source 1..75: mol_type = other DNA
ccatgcgtattcaccaacagcatcctgcatcccgtctttttccgttctgcaccggcaaataccgctggcacggca

SEQ ID NO: 22763 - DNA, 75 bp, synthetic construct
  source 1..75: mol_type = other DNA
atgacaacctcttcgcataatttcaccacaccttctgtttccgtggccgctgcatcagggaataaccagtctcag

SEQ ID NO: 22764 - DNA, 75 bp, synthetic construct
  source 1..75: mol_type = other DNA
cctcttcggcctgtgcaccggagactgacctgcaacaactggtagccactcccgtccctgatgaacggcgcatca

SEQ ID NO: 22765 - DNA, 75 bp, synthetic construct
  source 1..75: mol_type = other DNA
atgctcgctatcatgcgcaagacatacggattcaataagccgatggatcgactcacaaacacgcagatagcagcc

SEQ ID NO: 22766 - DNA, 75 bp, synthetic construct
  source 1..75: mol_type = other DNA
gccacacttccggcctgtataccgaagcgcggtcaggtctctgatgtacgcagaccgcgcactgaacaacgtccc

SEQ ID NO: 22767 - DNA, 75 bp, synthetic construct
  source 1..75: mol_type = other DNA
gcggtgaccgatgacccggcaagcctcggcaccgaatacctcgaattctgcagccgtgcgacccagaacccgttg

SEQ ID NO: 22768 - DNA, 75 bp, synthetic construct
  source 1..75: mol_type = other DNA
cctcattttccaaagatggctattcctccaacaatactggaattactggcatagccggtgaacatgatcagttaa

SEQ ID NO: 22769 - DNA, 75 bp, synthetic construct
  source 1..75: mol_type = other DNA
tgacccgtataaacatatcgacgacaccacacttccggcctatatgccgaagcgtggtcaggcctctgacgtacg

SEQ ID NO: 22770 - DNA, 75 bp, synthetic construct
  source 1..75: mol_type = other DNA
tcagtttatcgcccggaggccggaagctatatcagcaacattgccgcagccaactcgctgtttagccatcgttta

SEQ ID NO: 22771 - DNA, 75 bp, synthetic construct
  source 1..75: mol_type = other DNA
aaagatcatgattgttttactattttcgctaagggtactattttttccgcgtttcctgtcttaaataataaagcc

SEQ ID NO: 22772 - DNA, 75 bp, synthetic construct
  source 1..75: mol_type = other DNA
atatttctattatccctgattacagacaagcctggaaagtggaacataaattatcggatattctactgttgacta

SEQ ID NO: 22773 - DNA, 75 bp, synthetic construct
  source 1..75: mol_type = other DNA
atgaacaatgcaccgcatttgtatttcgcctggcaacaactcgtcgaaaaaagccagctcatgttacgcctggca

SEQ ID NO: 22774 - DNA, 75 bp, synthetic construct
  source 1..75: mol_type = other DNA
ccgtgaacgtgaacaacttgcggcctggtatcaaccgattccagaaccggttaaagaaccagaaccgatcaaatc

SEQ ID NO: 22775 - DNA, 75 bp, synthetic construct
  source 1..75: mol_type = other DNA
agacggcgggagcggtaaaagtacattcacacacatagccagccttctggcagggaaacagaacacggtaagcgc

SEQ ID NO: 22776 - DNA, 75 bp, synthetic construct
  source 1..75: mol_type = other DNA
tcttgaacttgtcccatccgagatagaaaaactatatatccctatcgttgaaggattagaacataacgttgaaga

SEQ ID NO: 22777 - DNA, 75 bp, synthetic construct
  source 1..75: mol_type = other DNA
ggcgcgaaaaattcacctgtaccactgcgaccatcgcggcctgccgctggcccttatcagcacggaagggacaac

SEQ ID NO: 22778 - DNA, 75 bp, synthetic construct
  source 1..75: mol_type = other DNA
tgggaacaccaaataacacctatctaaaatataatcccaaagctaaagggaatggagttacaattatcaggcaag

SEQ ID NO: 22779 - DNA, 75 bp, synthetic construct
  source 1..75: mol_type = other DNA
gcatcaacaacagcagccagagccggaacgtgacatttattgcggatgtcaggacggcgaagatcgctgatctgg

SEQ ID NO: 22780 - DNA, 75 bp, synthetic construct
  source 1..75: mol_type = other DNA
agacatccgagacgaacgcgaaagcgtcggaaaccagcgcagaatcctcaaaaacggctgccgcatcgtccgcca

SEQ ID NO: 22781 - DNA, 75 bp, synthetic construct
  source 1..75: mol_type = other DNA
ttaattatatcgaatgtgattacaatcggtggcggcggcacagttggtgtggcggcctcagtccggaacaatttg

SEQ ID NO: 22782 - DNA, 75 bp, synthetic construct
  source 1..75: mol_type = other DNA
gaatactggcggctgcgtcatcttctgctacgcttgcttatgacggtacaattaattttactgggaaagtcgttg

SEQ ID NO: 22783 - DNA, 75 bp, synthetic construct
  source 1..75: mol_type = other DNA
aggcgcttgcccggacgttactgggtcgcgctaagttattagagagcaagaacaatccgttcaaaggagaagaat

SEQ ID NO: 22784 - DNA, 75 bp, synthetic construct
  source 1..75: mol_type = other DNA
tgctgcagcaacctcgcccatttttcatgatcttttttgtcgagttatgggagcgattcggctactacggcgtgc

SEQ ID NO: 22785 - DNA, 75 bp, synthetic construct
  source 1..75: mol_type = other DNA
ggaatgtactgaccgttaacggcaactataccggaaacaatggcctgatgacgttcaacgcgacgctgggcggcg

SEQ ID NO: 22786 - DNA, 75 bp, synthetic construct
  source 1..75: mol_type = other DNA
atgagcggcaccgaagctgccgaactgctgcgccgtgaagcaacccgctttgagaatgaatcacaggagctgcac

SEQ ID NO: 22787 - DNA, 75 bp, synthetic construct
  source 1..75: mol_type = other DNA
gtgacctggtttgaactgggggagaacgacaaaaaccagatgctgtacagcatgaaggtgcacccgccgctgtgg

SEQ ID NO: 22788 - DNA, 75 bp, synthetic construct
  source 1..75: mol_type = other DNA
tggaagtggacggcctgccaccggatgcttttgcggtggtctcctttcatctgaaccagtcactctcttcgctct

SEQ ID NO: 22789 - DNA, 75 bp, synthetic construct
  source 1..75: mol_type = other DNA
ttcgacagtacgcaaattcgcggcgcgcgtttgtatactgataacgatatgctacccgccagccagaatggcttt

SEQ ID NO: 22790 - DNA, 75 bp, synthetic construct
  source 1..75: mol_type = other DNA
ctgttttttttgaatttctttgctctgatgagtttctgccgcgaaagaaagttaaccaaaatgaagaagtgaata

SEQ ID NO: 22791 - DNA, 75 bp, synthetic construct
  source 1..75: mol_type = other DNA
gatgagacgaaggtttaccatgcctgtccgtcggtgattgattttctgccatgggtggaatatctggacgaagag

SEQ ID NO: 22792 - DNA, 75 bp, synthetic construct
  source 1..75: mol_type = other DNA
gccgccgtttgcagatgcgcataaactggttgaggaagggcaggatctgcagtgcgtggatgagcactcactgcc

SEQ ID NO: 22793 - DNA, 75 bp, synthetic construct
  source 1..75: mol_type = other DNA
atgttgagtatattgggcaacacctgttgctggcctgttcgcctgctctgtcgggtgctggatgttcatcccagt

SEQ ID NO: 22794 - DNA, 75 bp, synthetic construct
  source 1..75: mol_type = other DNA
ccatggtgtcaatgaccaatatgattaacaacattgccgagcgcgatcagtatctgggacgggatattctgtttg

SEQ ID NO: 22795 - DNA, 75 bp, synthetic construct
  source 1..75: mol_type = other DNA
ttcggtgacgccggccgcaacggaagggcgtacggaagagcgcctggcgcaaatcagggacatggtggaggatgc

SEQ ID NO: 22796 - DNA, 75 bp, synthetic construct
  source 1..75: mol_type = other DNA
ttgtggtgatgggcattctgacataccggaacgccagtcaacagagcatgggaatattgttgtgaagcaaagcgc

SEQ ID NO: 22797 - DNA, 75 bp, synthetic construct
  source 1..75: mol_type = other DNA
gtttcacctacaaaaaaccgtcaggcgtcccccataaattcagtgaagagaaacaaaggcaattcattgaatatt

SEQ ID NO: 22798 - DNA, 75 bp, synthetic construct
  source 1..75: mol_type = other DNA
aaacgcgattcctgaatgtccagcttctgcagaacagcatggatgcgccgaaaatcatcggatctttcccttgta

SEQ ID NO: 22799 - DNA, 75 bp, synthetic construct
  source 1..75: mol_type = other DNA
gcactaaaacgcgtttcctgaacgtccagttgttgcagaacagcatggatgctccgaaaattattggctctttcc

SEQ ID NO: 22800 - DNA, 75 bp, synthetic construct
  source 1..75: mol_type = other DNA
gcatggtggacagttgggaagtctggaccgactttcatgctctggccctgcgcccgtttggctggcgcgaagtgt

SEQ ID NO: 22801 - DNA, 75 bp, synthetic construct
  source 1..75: mol_type = other DNA
cccaaacgcaacactaaagacagcagttacagcggaatggtttgaacgaaataaagcggaattaggttattggta

SEQ ID NO: 22802 - DNA, 75 bp, synthetic construct
  source 1..75: mol_type = other DNA
tggtctggacagcagctacaccctgattctcgtcgacggtaaacgcgttaactcccgcaatgccgtcttccgcca

SEQ ID NO: 22803 - DNA, 75 bp, synthetic construct
  source 1..75: mol_type = other DNA
caatccgtcgcgccaccaccgccagcggcaaccgcccgacctatgaagctagccgcagcgaagaagccagccacg

SEQ ID NO: 22804 - DNA, 75 bp, synthetic construct
  source 1..75: mol_type = other DNA
ccgccgccctgcttgaaacctacccgtggctgcccgtggaggaagacggtcggctgcacgacccggtgctgcggg

SEQ ID NO: 22805 - DNA, 75 bp, synthetic construct
  source 1..75: mol_type = other DNA
tctgtgttgcaatggcgttaagcagtcagacatgggcggcagatacgtcgatagcggaaacatcggatgaatctc

SEQ ID NO: 22806 - DNA, 75 bp, synthetic construct
  source 1..75: mol_type = other DNA
agccagcggccacgatacgtgttgattgaaggcccggctgattttaatgaccgggtagacgaacttttttttccc

SEQ ID NO: 22807 - DNA, 75 bp, synthetic construct
  source 1..75: mol_type = other DNA
atacatctactgagctgttctatgatctggcaaagcgttctttcgaagcaagctggaaaacaatgcaaaatatgt

SEQ ID NO: 22808 - DNA, 75 bp, synthetic construct
  source 1..75: mol_type = other DNA
ggtacgcgcctgtttgcgcggtcgctccatccgccggcgtattaatcatcccgatcgcttgaattacccaatgaa

SEQ ID NO: 22809 - DNA, 75 bp, synthetic construct
  source 1..75: mol_type = other DNA
aaggtcttacaacatcccagatttactaaatatactttgtggttcatgactgatcaggtagctccagaagccggg

SEQ ID NO: 22810 - DNA, 75 bp, synthetic construct
  source 1..75: mol_type = other DNA
attggtaagtatattcagcaacgtagagtaactcgagcagccatctacttacggttaacaaaccttcctattgac

SEQ ID NO: 22811 - DNA, 75 bp, synthetic construct
  source 1..75: mol_type = other DNA
atccacattttgatgaatcctgtcgtgcattcgcattgcgccacaacctggtgcaactggcagaacgtgctggca

SEQ ID NO: 22812 - DNA, 75 bp, synthetic construct
  source 1..75: mol_type = other DNA
tcaccgtgctcactggtaatgacaatgtcaatttgcaacgtgccggaatcgatttggcgatctactttgatgatg

SEQ ID NO: 22813 - DNA, 75 bp, synthetic construct
  source 1..75: mol_type = other DNA
gtgaaataccgttatgagtttacggacgcgctggggctgattacgtccttcagttatgccaatgctgaggatgag

SEQ ID NO: 22814 - DNA, 75 bp, synthetic construct
  source 1..75: mol_type = other DNA
tatatgaaaatgttgatagggtatattcctgtacatcttcggatatcaaccattgaggacaacccggaaatcacg

SEQ ID NO: 22815 - DNA, 75 bp, synthetic construct
  source 1..75: mol_type = other DNA
taatctttttgctgtgggcgatggtggcggtgatttatgcaccgctgatcccggcagctctcacgctgatatcgc

SEQ ID NO: 22816 - DNA, 75 bp, synthetic construct
  source 1..75: mol_type = other DNA
tagtaagaaagtatttacagccatgggagcaggtggagcgcaacctaatatttctaaggaaaaaatcgttgccac

SEQ ID NO: 22817 - DNA, 75 bp, synthetic construct
  source 1..75: mol_type = other DNA
tgctgcagaacctaatgacgtgcaactggcgcgctattttcatcttgatgaacgggatctggccttcattaacca

SEQ ID NO: 22818 - DNA, 75 bp, synthetic construct
  source 1..75: mol_type = other DNA
aaatatttgatcaagtgcggaaagatttaaactgtgaccggttttactctgaactaaaacgccacaatgtctcac

SEQ ID NO: 22819 - DNA, 75 bp, synthetic construct
  source 1..75: mol_type = other DNA
gataacgcagtgttaataaaaggacttgaggaggttgtgaatgttaaatttcgcagagacacgcgacttatagaa

SEQ ID NO: 22820 - DNA, 75 bp, synthetic construct
  source 1..75: mol_type = other DNA
cgacagcgacaggtcgatgtcctggctggcctgggagccatgtctgacaaattcggtaaatccagtgacaaactg

SEQ ID NO: 22821 - DNA, 75 bp, synthetic construct
  source 1..75: mol_type = other DNA
atcggcttgccgtcagactatcgatgattattggccgtctggtggcaggtgagacgctggatatgcgcaaactgg

SEQ ID NO: 22822 - DNA, 75 bp, synthetic construct
  source 1..75: mol_type = other DNA
gaacatctggcctggatctcccggcagataattccgacagaagctgatgaagccgaactcctgaaacactgcgca

SEQ ID NO: 22823 - DNA, 75 bp, synthetic construct
  source 1..75: mol_type = other DNA
tgcgaccgttcgccgccgtcgtttaccgggggacatggttatctggatggtggtggccatggcctttttccgcaa

SEQ ID NO: 22824 - DNA, 75 bp, synthetic construct
  source 1..75: mol_type = other DNA
atgtttgattacaagatttccaaacatccgcattttgatgaagcctgtagagcttttgcactacgtcacaatatg

SEQ ID NO: 22825 - DNA, 75 bp, synthetic construct
  source 1..75: mol_type = other DNA
aacgttccgtaccgtatcacaagggcagaacaggccgccgagcgctggggaagaggctccatgattgcccgcatg

SEQ ID NO: 22826 - DNA, 75 bp, synthetic construct
  source 1..75: mol_type = other DNA
atgaccactattaccaaagagcgactgctgacaatcaagcagtggcgcgaaacatacggacctggtagcaacgtt

SEQ ID NO: 22827 - DNA, 75 bp, synthetic construct
  source 1..75: mol_type = other DNA
tgagaaatgggtgacggataccggggcacagcatagcgccgcagtagatgcagcagaagcacagcgccagtcgct

SEQ ID NO: 22828 - DNA, 75 bp, synthetic construct
  source 1..75: mol_type = other DNA
tttttcgctctgctgaatcttggttttgaatactgggaaccaactggcggcgctatctcctccaatgaacgcaag

SEQ ID NO: 22829 - DNA, 75 bp, synthetic construct
  source 1..75: mol_type = other DNA
ctggatatcaaacctgaaggtggcgatcccgcactttgtcaggctgcgttggcagcagctaaacttgcgaagatc

SEQ ID NO: 22830 - DNA, 75 bp, synthetic construct
  source 1..75: mol_type = other DNA
ggcgcttccgaacacccctcgcttgaggacttcaatgcggcaatgtatgcaatgagtcagttcattgcgtatcag

SEQ ID NO: 22831 - DNA, 75 bp, synthetic construct
  source 1..75: mol_type = other DNA
ggtcaaaacagcgttacggtgccccacgcctgacggatgaactgcgtgctcagggttacccctttaacgtaaaaa

SEQ ID NO: 22832 - DNA, 75 bp, synthetic construct
  source 1..75: mol_type = other DNA
caaatcgtacacattattgaagagggcggttggacggtattccgtaatatgccgctgatttttgctgtcggttta

SEQ ID NO: 22833 - DNA, 75 bp, synthetic construct
  source 1..75: mol_type = other DNA
atgttagctcgttcagggaaggtaagcatggctacgaagaagagaagtggagaagaaataaatgaccgacaaatc

SEQ ID NO: 22834 - DNA, 75 bp, synthetic construct
  source 1..75: mol_type = other DNA
cattagactaaaagatcatctcgatcgttttcccgacttttataatgcatctttagtaaaggaggaagctgaaga

SEQ ID NO: 22835 - DNA, 75 bp, synthetic construct
  source 1..75: mol_type = other DNA
atatttctattatccccgattacagacaagcctggaaagtggaatataaattatcggatattctactgttgacta

SEQ ID NO: 22836 - DNA, 75 bp, synthetic construct
  source 1..75: mol_type = other DNA
attattgagtcaattgatgctgagggaggcgcaaactatggcattttcggatacctttctgctaatcagtggtct

SEQ ID NO: 22837 - DNA, 75 bp, synthetic construct
  source 1..75: mol_type = other DNA
cattagccgaatggaaaaaataccgggtgctgctgatgcgagttgatacagcagacccggactggcctactcctc

SEQ ID NO: 22838 - DNA, 75 bp, synthetic construct
  source 1..75: mol_type = other DNA
gactcgaaaggactcgggaatttcaaaaacttgtttttctacgcgcccaacggcaaaccggatggcatcaagatt

SEQ ID NO: 22839 - DNA, 75 bp, synthetic construct
  source 1..75: mol_type = other DNA
atttaaccgttttctgcgtgccggatttgcagaactgaatgctgaagagcgtaatctgatgcgtgaactgcgggc

SEQ ID NO: 22840 - DNA, 75 bp, synthetic construct
  source 1..75: mol_type = other DNA
agttggcacaggaaattattcgcacgaatcaaccactgattgaccgtattgttaatcaggaagtggacaaaatta

SEQ ID NO: 22841 - DNA, 75 bp, synthetic construct
  source 1..75: mol_type = other DNA
ttacgtttttcacatccgtcatggtcaccggtataggggttatgacgctgagcgagaagatggcgctggcaggac

SEQ ID NO: 22842 - DNA, 75 bp, synthetic construct
  source 1..75: mol_type = other DNA
tattgaaagtaaaggcgacaaaaccactatcgaaagcgtgaccctgaaagatatcagtaaatatataaaggatga

SEQ ID NO: 22843 - DNA, 75 bp, synthetic construct
  source 1..75: mol_type = other DNA
ccgcgaaaaatcgtggcacaagaccactgtcggggaagtggtgaaggaaatagccgtacgtcacaagctgaagat

SEQ ID NO: 22844 - DNA, 75 bp, synthetic construct
  source 1..75: mol_type = other DNA
acatgtttggatcgaatgttgaaataggtcgttattttccccgaaggggaagggctagaaccggacaggctgtag

SEQ ID NO: 22845 - DNA, 75 bp, synthetic construct
  source 1..75: mol_type = other DNA
taacaagattctggcgtgttaccaacgcgaagctaacaaggaaatagctcgtctattaaatattccgcaggagtt

SEQ ID NO: 22846 - DNA, 75 bp, synthetic construct
  source 1..75: mol_type = other DNA
atcacaactgatgcgatgggctgccagaaagatattgcagaaaagatacaaaaacagggaggtgattatttattc

SEQ ID NO: 22847 - DNA, 75 bp, synthetic construct
  source 1..75: mol_type = other DNA
atggccctgaagtgtcctgaatgtggcgcggtcgctcacgccagaaccagcgcctatgaagctccgtcggttaaa

SEQ ID NO: 22848 - DNA, 75 bp, synthetic construct
  source 1..75: mol_type = other DNA
ccggaacatctgcccgtgaggcggcaacccatgcgactgatgctgcaggctcagcacgcgccgccagcacgtccg

SEQ ID NO: 22849 - DNA, 75 bp, synthetic construct
  source 1..75: mol_type = other DNA
tggtaaaacggcttaacctgttctcccgccaggcgctggagatggccgcctctgaatgtatgagccagcaggcag

SEQ ID NO: 22850 - DNA, 75 bp, synthetic construct
  source 1..75: mol_type = other DNA
atctctcccaaagcccgctcccttatcctctggacagaacgcggagcagcccgccacgcaaaaatgctcgaaacc

SEQ ID NO: 22851 - DNA, 75 bp, synthetic construct
  source 1..75: mol_type = other DNA
acggcgaccgaagaactcctgacaacggtcagaaatgcgctgaatgccgaagacgttcgcccggtcggtgaccgt

SEQ ID NO: 22852 - DNA, 75 bp, synthetic construct
  source 1..75: mol_type = other DNA
agacgaaaggtgcggggacgacgttctggatgtataccggcaacggcgatgcgtttgcgaaccctttgtcggaca

SEQ ID NO: 22853 - DNA, 75 bp, synthetic construct
  source 1..75: mol_type = other DNA
ttcggctcaggaaatgcaggcttaatgtggggactgtccgggatgtttgaacgggtaaaaataagtcatgagttt

SEQ ID NO: 22854 - DNA, 75 bp, synthetic construct
  source 1..75: mol_type = other DNA
atggctggttggtttgaactcagtaagagcagtgataatcaattccggtttgtgctaaaagcgggcaatggtgag

SEQ ID NO: 22855 - DNA, 75 bp, synthetic construct
  source 1..75: mol_type = other DNA
gcctggtggaggtgattcatcaacgttttgtccttgccggagccaaacttgcgcaagctgataaagcaaaattaa

SEQ ID NO: 22856 - DNA, 75 bp, synthetic construct
  source 1..75: mol_type = other DNA
cgcggggaccgaagggggataagggagacaccgggccacagggtattcccgggccaaaaggcgataccggcgagc

SEQ ID NO: 22857 - DNA, 75 bp, synthetic construct
  source 1..75: mol_type = other DNA
aaacaaaaccaactatcgtttttttacagtccgcttatatggcaatcctggggagcgtagcttcaatattcgtcg

SEQ ID NO: 22858 - DNA, 75 bp, synthetic construct
  source 1..75: mol_type = other DNA
caaaggccgttcgtcgttctgtgctggcaagactcaaagcgatgcatggtattcagatcccccggactttacctg

SEQ ID NO: 22859 - DNA, 75 bp, synthetic construct
  source 1..75: mol_type = other DNA
caggatattaaacggtatatggctcattaccgctttaggtttggtggcaaccgcaggactggcctggggagctaa

SEQ ID NO: 22860 - DNA, 75 bp, synthetic construct
  source 1..75: mol_type = other DNA
ggctgaatgattttatgcagcagcacggcacagcactggcggccgcactggcaccggagctgatgggctacagtg

SEQ ID NO: 22861 - DNA, 75 bp, synthetic construct
  source 1..75: mol_type = other DNA
gggaatccctgcgctggagtctgctggttgctctgaacaaaacccgcccgtacaccgccagcgagacgctgctgc

SEQ ID NO: 22862 - DNA, 75 bp, synthetic construct
  source 1..75: mol_type = other DNA
atgatgacgctggcggggaaaaatctccgccttttcctgccggtccccggacagagcacaaaggatgtcgccgcc

SEQ ID NO: 22863 - DNA, 75 bp, synthetic construct
  source 1..75: mol_type = other DNA
gacatgggattcagcaataaaaagagcgggtatccgatcccgtaaagcgtatcagtcacgccatacctatgcgtg

SEQ ID NO: 22864 - DNA, 75 bp, synthetic construct
  source 1..75: mol_type = other DNA
cataggggaaaaacgtcttgcttcgtctgtaacaaaggaagatttacagtttatcaggaaagatttgttaaccgg

SEQ ID NO: 22865 - DNA, 75 bp, synthetic construct
  source 1..75: mol_type = other DNA
actcatggtctgttatttatcgtaaaaattccggagaagatatcaatatcacttccctgacgtttaaaaatagtc

SEQ ID NO: 22866 - DNA, 75 bp, synthetic construct
  source 1..75: mol_type = other DNA
ttgtcggtaccgtgctggattatgccggacgcggcagtcagcgctggtcgaaatggcgtccgacgctttgtttat

SEQ ID NO: 22867 - DNA, 75 bp, synthetic construct
  source 1..75: mol_type = other DNA
acagccagcagcccccggaggtgggcggggcaaaagcctcccgatctcgggattcagtgaacaggactacggctc

SEQ ID NO: 22868 - DNA, 75 bp, synthetic construct
  source 1..75: mol_type = other DNA
atggcgcgtggctgcattctgaccgttctgctgatgctggcaggcagcggtatgtgtcaggctgttgcgcagacc

SEQ ID NO: 22869 - DNA, 75 bp, synthetic construct
  source 1..75: mol_type = other DNA
ttctccgaacacacaacttggcccgcgcgtgattgtagaacgtaatttacctagtggaacttactcactccgaca

SEQ ID NO: 22870 - DNA, 75 bp, synthetic construct
  source 1..75: mol_type = other DNA
atgattctgtactgcgtaaacaatctgccgtttggatacagcaatcccctaagtgttatgttcaaccagttactt

SEQ ID NO: 22871 - DNA, 75 bp, synthetic construct
  source 1..75: mol_type = other DNA
attttgaatcatccacagttcaaaaaatataccatgtggttcatgactgagacgatatcaccagaagctgggcag

SEQ ID NO: 22872 - DNA, 75 bp, synthetic construct
  source 1..75: mol_type = other DNA
ttgatgatttctatctgcaagtttgtaccgcttgtgaggacaaacttcttgagctggaatggaaacttgaagtcg

SEQ ID NO: 22873 - DNA, 75 bp, synthetic construct
  source 1..75: mol_type = other DNA
acgacatgatcaccaacggtgtgctgcaggcgaatgtggctttcgacaaggcgcaactgaactgccagaacatgg

SEQ ID NO: 22874 - DNA, 75 bp, synthetic construct
  source 1..75: mol_type = other DNA
gacccgctggaaattcgcgaactccacaaactggttcgtgacactgacaaagttttccctaatcctggtaattca

SEQ ID NO: 22875 - DNA, 75 bp, synthetic construct
  source 1..75: mol_type = other DNA
tgccgggattttactggttccctgtgcccgtggcggctctgcttttacaaccggcgcagttggctcattcgatcc

SEQ ID NO: 22876 - DNA, 75 bp, synthetic construct
  source 1..75: mol_type = other DNA
acgttggctatgtttcgccaacgccgaaaagcgccaccagcgggccgattaccagctgggcaacgtgggaattag

SEQ ID NO: 22877 - DNA, 75 bp, synthetic construct
  source 1..75: mol_type = other DNA
acattgatcgcggtcttctgacaaaagaatggcgaaaagggaatcgtgtttcacgcatcactcgcacggcttccg

SEQ ID NO: 22878 - DNA, 75 bp, synthetic construct
  source 1..75: mol_type = other DNA
cgaccttcacaaactggtacgcgacacagacaaagttttccctaatcccgttaattccagtctggggttaatgac

SEQ ID NO: 22879 - DNA, 75 bp, synthetic construct
  source 1..75: mol_type = other DNA
gcctcttatacaggcgaaaaaaattaaaactgtctcaggccgcattaggtaagctggtcaaagtggctcacgtaa

SEQ ID NO: 22880 - DNA, 75 bp, synthetic construct
  source 1..75: mol_type = other DNA
ctaacgacagtacaacgacaatcgcaacaaatgatatggtgcaagagcatgttaccaacttcactaaagaactgt

SEQ ID NO: 22881 - DNA, 75 bp, synthetic construct
  source 1..75: mol_type = other DNA
atctgacggaagaaatgcgccgcacgctacaggatatttcaagattgtcagatcgaaattcccgaaaaggcttct

SEQ ID NO: 22882 - DNA, 75 bp, synthetic construct
  source 1..75: mol_type = other DNA
agctgttggatggcgttgaggtcgagtggaagacacttgggcaaacttgcaaaattgaaacaggaaagcttaatg

SEQ ID NO: 22883 - DNA, 75 bp, synthetic construct
  source 1..75: mol_type = other DNA
atacgcaggtgcgcgctttcacgtatgacgcgcagcacccgggccggatggtggcgcaccgttacgcgggaaggc

SEQ ID NO: 22884 - DNA, 75 bp, synthetic construct
  source 1..75: mol_type = other DNA
gtgttttcgctcagtgatattcaccttgtgcagcccctcactgagagttttaaacgcaacgagcgcttttaccga

SEQ ID NO: 22885 - DNA, 75 bp, synthetic construct
  source 1..75: mol_type = other DNA
tagtcatacccgcattggtgttggtgcggaatactggcgcgattatctgaaactgagcgccaatggttatatccg

SEQ ID NO: 22886 - DNA, 75 bp, synthetic construct
  source 1..75: mol_type = other DNA
acatcccggagcggaggctgcatctttaccactgtgaccaccggggactgccgcaggcgctcatcagcccggaag

SEQ ID NO: 22887 - DNA, 75 bp, synthetic construct
  source 1..75: mol_type = other DNA
aaatccttgcaatggatactgactcactcgtttagtggcagagcagttgctgtcagacgagttacagagaatagc

SEQ ID NO: 22888 - DNA, 75 bp, synthetic construct
  source 1..75: mol_type = other DNA
ttaaaagatacctatagtcataaaataaatctgaatggcaataatgtaaccataaaaaacacagatataacatta

SEQ ID NO: 22889 - DNA, 75 bp, synthetic construct
  source 1..75: mol_type = other DNA
ttggtctggagtttgagaaatcggcatttggtaagtacaacgtggataacgcggtgaacgccagcttccgttact

SEQ ID NO: 22890 - DNA, 75 bp, synthetic construct
  source 1..75: mol_type = other DNA
gctgaaagcggtgaaaccggacagttgtgtggtgcgtgaagcgcaggactggctgcgcgacagaaaacttgtgga

SEQ ID NO: 22891 - DNA, 75 bp, synthetic construct
  source 1..75: mol_type = other DNA
gtcaacacaaaaaatgatgttgaagtcagtaatgccagtcttaccatgcaaggccatgcaacagagcatgcaata

SEQ ID NO: 22892 - DNA, 75 bp, synthetic construct
  source 1..75: mol_type = other DNA
cgacaaaaaacatgagctggacggactggatttgtttaccggtttcactgtcacacacactgacagcagtgcctc

SEQ ID NO: 22893 - DNA, 75 bp, synthetic construct
  source 1..75: mol_type = other DNA
ttcaatgaaaattcaggttggtgcgaatgatggtcaaactatctccatcgatctgaagaaaattgattcttcaac

SEQ ID NO: 22894 - DNA, 75 bp, synthetic construct
  source 1..75: mol_type = other DNA
aaggtctgactcaggccgcacgtaacgccaacgacggtatctctctggcgcagaccactgaaggcgcgctgtctg

SEQ ID NO: 22895 - DNA, 75 bp, synthetic construct
  source 1..75: mol_type = other DNA
tgttgtccgcaatccagaaggttgccaagattcgtgccgatttcgatgattttgacggtgacaggcgaggtatcg

SEQ ID NO: 22896 - DNA, 75 bp, synthetic construct
  source 1..75: mol_type = other DNA
gtggtgatattagtgctaaagatgcaaaaagcacacagaaagcctggaattgtcgtcactccagacagtcaaacg

SEQ ID NO: 22897 - DNA, 75 bp, synthetic construct
  source 1..75: mol_type = other DNA
ccaagtaaaagtcaccgctgacgaagtaaacaaaattatgcaggcagccaatatcagccagcctgacgccgataa

SEQ ID NO: 22898 - DNA, 75 bp, synthetic construct
  source 1..75: mol_type = other DNA
tcttctattcacagtgacagggtcattctggctatgaaggactatctggtaggtgggcactcccgtaaggaggtc

SEQ ID NO: 22899 - DNA, 75 bp, synthetic construct
  source 1..75: mol_type = other DNA
ttgcgccctctctcgatagcgcaacaattaccccgcaaatttatcccgaaggaaaactgcgctgtaccgcaccgg

SEQ ID NO: 22900 - DNA, 75 bp, synthetic construct
  source 1..75: mol_type = other DNA
acgaaacaatccgaaccagtagcgcaacaggaaccggaaaaagtctgcaccgcctgcggtcagagcggtggcggc

SEQ ID NO: 22901 - DNA, 75 bp, synthetic construct
  source 1..75: mol_type = other DNA
ggtgttttcaggattcggtcagtttaatgattatttcacgaaaactcagcgaatcagaaaatgttgatgatgttt

SEQ ID NO: 22902 - DNA, 75 bp, synthetic construct
  source 1..75: mol_type = other DNA
taaagataacattaagcagcagatcaccagcctcaatgactcccttgaaaaccaggagaaagttgctcaggagca

SEQ ID NO: 22903 - DNA, 75 bp, synthetic construct
  source 1..75: mol_type = other DNA
ggtggcgtttgccagcggagtacaacgaattgcgcgagtacatcaattagggcttagggataagccggggcgtaa

SEQ ID NO: 22904 - DNA, 75 bp, synthetic construct
  source 1..75: mol_type = other DNA
tcattctgaaagcgaaaatcgctatcaacaactgggacggtcggaacgactctctgcctcccatccttgacgctg

SEQ ID NO: 22905 - DNA, 75 bp, synthetic construct
  source 1..75: mol_type = other DNA
ctgtaaattttgaacatatcagtaattcagcgtggcgtgtggcaaccagtgatatctcacagcaatacagattca

SEQ ID NO: 22906 - DNA, 75 bp, synthetic construct
  source 1..75: mol_type = other DNA
cgaaagaggccagcaatgtacagcagagtgttaaccatatgcttggcgacgatgttgatcgtgagctgcgcaaca

SEQ ID NO: 22907 - DNA, 75 bp, synthetic construct
  source 1..75: mol_type = other DNA
aagaattcaatctgagaacgcattcgaaaagattgccagagagtggcatcagatgaaatcggcaaaatggtctgc

SEQ ID NO: 22908 - DNA, 75 bp, synthetic construct
  source 1..75: mol_type = other DNA
tgcgttattactacttgaaaattcataccagatatctcagatatcaaatatgattggaatttccagtgcgtctta

SEQ ID NO: 22909 - DNA, 75 bp, synthetic construct
  source 1..75: mol_type = other DNA
taccccttcagcaatctacgatcaggctgaatcttcagtaccctgccaaatccggctttaaaggcgaacccgata

SEQ ID NO: 22910 - DNA, 75 bp, synthetic construct
  source 1..75: mol_type = other DNA
cgctacgcaattgcaacaggtagggcggagtacaatcctgctgcggatctctccagcgctctcgaagtgcatcaa

SEQ ID NO: 22911 - DNA, 75 bp, synthetic construct
  source 1..75: mol_type = other DNA
aaaggtccgcactaccgtcagccggaaagccattaccgcaggcgaccgcgtaaaccgtcagttcggggcagaacg

SEQ ID NO: 22912 - DNA, 75 bp, synthetic construct
  source 1..75: mol_type = other DNA
tcggagacatcgcgcagtggggacgtcatccggtatgcttatgataatccgcacagtgaattaccggccacgaca

SEQ ID NO: 22913 - DNA, 75 bp, synthetic construct
  source 1..75: mol_type = other DNA
ttgatgaacaggccagtcgggtgaaatccctgcaggaaaaaatcgcaggatatcagtatgttctggcgaacccgg

SEQ ID NO: 22914 - DNA, 75 bp, synthetic construct
  source 1..75: mol_type = other DNA
cgcacctgcacaactggtcgcagttcgcgataccaacagagtcgggcattaactccaggctgttgcagattctta

SEQ ID NO: 22915 - DNA, 75 bp, synthetic construct
  source 1..75: mol_type = other DNA
actggcagggcagattaatatcggcatgggggccagtatttcccgcagtctgatgccagctgtcatatctcgttt

SEQ ID NO: 22916 - DNA, 75 bp, synthetic construct
  source 1..75: mol_type = other DNA
aacagccgatctggttgattgctctgctttgccactccagcagagcggaaaaaacctgctcagaatagtcactga

SEQ ID NO: 22917 - DNA, 75 bp, synthetic construct
  source 1..75: mol_type = other DNA
agcatttgcaggtcaggtttggtgacgggccgtggcaggatgttaaggggctggatgaagtgggcagtgatacag

SEQ ID NO: 22918 - DNA, 75 bp, synthetic construct
  source 1..75: mol_type = other DNA
tgtaatcaggttattggtgatcttcttaatgagctttatcacatagaagaaaagattaaaaacagtgaaaaactc

SEQ ID NO: 22919 - DNA, 75 bp, synthetic construct
  source 1..75: mol_type = other DNA
acaaaaatgcgtactgaacatcttgtaccgctttcctcccaggcgatgaccattctgcagcagatttatacgatt

SEQ ID NO: 22920 - DNA, 75 bp, synthetic construct
  source 1..75: mol_type = other DNA
gagctatagaggaagacagctaacccgcctcgctgtgcgactcactttactgacttttgttcgttcaagtgagat

SEQ ID NO: 22921 - DNA, 75 bp, synthetic construct
  source 1..75: mol_type = other DNA
atggcagaatcatttgcaacaggttccgatcatcaggttgtaaacgagctcaacggggaaagactgagagaacct

SEQ ID NO: 22922 - DNA, 75 bp, synthetic construct
  source 1..75: mol_type = other DNA
ataaaaagtggtcggaagaacatagcaggcgagtactgaaaagcctggaggataatctgtttccagctattggta

SEQ ID NO: 22923 - DNA, 75 bp, synthetic construct
  source 1..75: mol_type = other DNA
atgcacctgctgatcaaccccaatggttcaaaatactggcgactccaataccgtttcgatggcaaacagaaagtt

SEQ ID NO: 22924 - DNA, 75 bp, synthetic construct
  source 1..75: mol_type = other DNA
cagttgtcatcaggtgacacactgcccaaaggttattacgtatacgctcagccgctggatgaacaggctcaatca

SEQ ID NO: 22925 - DNA, 75 bp, synthetic construct
  source 1..75: mol_type = other DNA
ttaactataccgcaagccgtcttgctgctgctttcaatcacggatttatcaataagtctttacgtgaagttttcg

SEQ ID NO: 22926 - DNA, 75 bp, synthetic construct
  source 1..75: mol_type = other DNA
aagacgtcatcaaacagcaggacgctgatttcgatctcgacaaaatggtgaatgtttatccgttgaccccgcgcc

SEQ ID NO: 22927 - DNA, 75 bp, synthetic construct
  source 1..75: mol_type = other DNA
atgacagtcagaatatcgggtgtgctgaaggatggtacgggaaaagcggtaccgggatgcacgatagagctgaaa

SEQ ID NO: 22928 - DNA, 75 bp, synthetic construct
  source 1..75: mol_type = other DNA
gccgataccgtgcgtgatatccgtggctttgccaccaagttctatactgaagagggtatttttgacctcgttggc

SEQ ID NO: 22929 - DNA, 75 bp, synthetic construct
  source 1..75: mol_type = other DNA
accagaatttcaacagcccgaatcagcagtcgtactggtattccacctgtaagctgcaggtgctgaagaacgggg

SEQ ID NO: 22930 - DNA, 75 bp, synthetic construct
  source 1..75: mol_type = other DNA
atgaaattttctgttgttaatgcagtagtgctgctgttgctgattgtacttactggtgttttttatatgaaaaag

SEQ ID NO: 22931 - DNA, 75 bp, synthetic construct
  source 1..75: mol_type = other DNA
gataaccgttcggcttgataacatgaccaatattcccgacggtatggactggggcgtcattgatggcaacctgat

SEQ ID NO: 22932 - DNA, 75 bp, synthetic construct
  source 1..75: mol_type = other DNA
atgctgcgtgagctcatcgatataaaaaaatgggagattaatcaggccgccggtcgctatatccgctcacatgag

SEQ ID NO: 22933 - DNA, 75 bp, synthetic construct
  source 1..75: mol_type = other DNA
aacgctggggggcatgggcggcaagtggtaacaccggggtggactattctccgatcgctgccggattcaaaggac

SEQ ID NO: 22934 - DNA, 75 bp, synthetic construct
  source 1..75: mol_type = other DNA
atgcgtgatattcagatggttctggagcgttggggagcatgggcggcgagtgatagttctggagtagactattcg

SEQ ID NO: 22935 - DNA, 75 bp, synthetic construct
  source 1..75: mol_type = other DNA
acctggggagaattcatcggggtgatcagcatgattaccctgtttgcccgcgcccgttcagccggtccggtaaaa

SEQ ID NO: 22936 - DNA, 75 bp, synthetic construct
  source 1..75: mol_type = other DNA
tctcttctatgatattccccgtgcatgccggaatggttattttcgggacccgtatcatttacccggcagagcaga

SEQ ID NO: 22937 - DNA, 75 bp, synthetic construct
  source 1..75: mol_type = other DNA
gcattctttgattgtggcccattacctgtatggcatctcgaaaagaaagcttgcaagagctcgcaaaaaagatga

SEQ ID NO: 22938 - DNA, 75 bp, synthetic construct
  source 1..75: mol_type = other DNA
tgtgataatttcgttattgataatgtcgatatggtcaatagtgccggcatgttaatcggttacggcgtgattaaa

SEQ ID NO: 22939 - DNA, 75 bp, synthetic construct
  source 1..75: mol_type = other DNA
ccggggccggatggtggcgcaccgtcacacgggccgaccggaaatccgttaccgttacgacagcgacgggcgggt

SEQ ID NO: 22940 - DNA, 75 bp, synthetic construct
  source 1..75: mol_type = other DNA
cgctgggcgttaaccgggtgaagatattcgaacgctggaaagctatcgacaccagggataagcggaaaaaattca

SEQ ID NO: 22941 - DNA, 75 bp, synthetic construct
  source 1..75: mol_type = other DNA
gatttggcccggtaacgcaaatctacattggcggcaaaaagcccagcgtgatgcgtaatctggtcattgataaca

SEQ ID NO: 22942 - DNA, 75 bp, synthetic construct
  source 1..75: mol_type = other DNA
cccgtaaacagcgcaccgcttccttatcttcccctgacacaccccgccctctctcagcctcagcgttccccgaca

SEQ ID NO: 22943 - DNA, 75 bp, synthetic construct
  source 1..75: mol_type = other DNA
gacaagatcaagcggcaatttctggccagtggctatatgcacctgcccggcaaaaagattgtcagtgttactgca

SEQ ID NO: 22944 - DNA, 75 bp, synthetic construct
  source 1..75: mol_type = other DNA
cctgacggtaacggagaacggcaaagacgcaggcgtactgagcctgacttataccggtgaagatcgcgaacagat

SEQ ID NO: 22945 - DNA, 75 bp, synthetic construct
  source 1..75: mol_type = other DNA
gcggtcaggtgccgccaaatccttctgaactgttgatgagcgaacgctttgccgaactggtgaactgggcgagta

SEQ ID NO: 22946 - DNA, 75 bp, synthetic construct
  source 1..75: mol_type = other DNA
aacactatgacacgtttgataatgtatcaaagatttattctgataaattccctcaaggaaaagatttagatctat

SEQ ID NO: 22947 - DNA, 75 bp, synthetic construct
  source 1..75: mol_type = other DNA
tatccgtgtacatcagccccgatattatcgccgcacttaatgcgcgctttgaggagaacgcagaggcaggaaaaa

SEQ ID NO: 22948 - DNA, 75 bp, synthetic construct
  source 1..75: mol_type = other DNA
gcaaaaaatagcatcagcgcagatgcgtttgaatcgtctcaagaccaaagagaaatccttatcaaagagtgctga

SEQ ID NO: 22949 - DNA, 75 bp, synthetic construct
  source 1..75: mol_type = other DNA
atatctgacctgaaacagcatggacagatactgctggtcgttgaccagcctgctaccatcagggcgttacccgtc

SEQ ID NO: 22950 - DNA, 75 bp, synthetic construct
  source 1..75: mol_type = other DNA
cgagagctgcattgaagcattccatgaggcagaaatcagcctcagtcacaccgctttccgccgtaatcaatggga

SEQ ID NO: 22951 - DNA, 75 bp, synthetic construct
  source 1..75: mol_type = other DNA
aaatcgacaacgcagcgtcggtcatcgctttgcaatggctgcagctgcatcatcaagcgttaaaaaatgagtggg

SEQ ID NO: 22952 - DNA, 75 bp, synthetic construct
  source 1..75: mol_type = other DNA
aggggcggggcttcgttcgtcctggtgaaactaaaaagccatgttatcgggtattttcaggcataaaaaaagcgg

SEQ ID NO: 22953 - DNA, 75 bp, synthetic construct
  source 1..75: mol_type = other DNA
gccgtagtcggtattgatatcgactacgaaacggtcgggcaaaatggcagtatgctgatggttagcgtcagcggt

SEQ ID NO: 22954 - DNA, 75 bp, synthetic construct
  source 1..75: mol_type = other DNA
gtacacgaaggtgtttgcgctggatgtggctgcacggcaccgggtgcagttttcgatgcctgagtccgatgctgt

SEQ ID NO: 22955 - DNA, 75 bp, synthetic construct
  source 1..75: mol_type = other DNA
cttcagacatgggctggtgaaaatggtctgatctttacgggagcacatgacccacgtaaaccaatcagtgaaaac

SEQ ID NO: 22956 - DNA, 75 bp, synthetic construct
  source 1..75: mol_type = other DNA
cgaagtgaacaacgtgatggtgataacaaaggtgcgccgctgagttatacccctgaacacatggtgaatgcgaaa

SEQ ID NO: 22957 - DNA, 75 bp, synthetic construct
  source 1..75: mol_type = other DNA
ttccagttataagtaaaattcctcttataggctggattttcagtagcaaggcagacagcaatgaacagcgtatta

SEQ ID NO: 22958 - DNA, 75 bp, synthetic construct
  source 1..75: mol_type = other DNA
atggcagtacagatttcaggtgtgctgaaagacggtgcaggaaaaccgatacagaactgcaccattcagctcaaa

SEQ ID NO: 22959 - DNA, 75 bp, synthetic construct
  source 1..75: mol_type = other DNA
ttgcccacacaggacagccgggacattattgccgccgcatgcagagccttaaaccatgtctggcgtgaagggtac

SEQ ID NO: 22960 - DNA, 75 bp, synthetic construct
  source 1..75: mol_type = other DNA
aggcttacgaagaatacttcgaaggccttgccgaaggcgaagaagctctcagcttcagcgaatttaaacaggcgc

SEQ ID NO: 22961 - DNA, 75 bp, synthetic construct
  source 1..75: mol_type = other DNA
ttgttgcctcagttgatgaattgaaaccgaccagtaagcgaggtcgtaaggcggcagacaatggcaacagtactg

SEQ ID NO: 22962 - DNA, 75 bp, synthetic construct
  source 1..75: mol_type = other DNA
tcctcagggagaaagtcgtcaactactgattaacggcattgaggcttatgaatggaatatgaacctatcctgtaa

SEQ ID NO: 22963 - DNA, 75 bp, synthetic construct
  source 1..75: mol_type = other DNA
tgccatacagcgtgccacagatgccctgcgtgaagcccttctgtcctggcttgcgaagggggaaaaattaattat

SEQ ID NO: 22964 - DNA, 75 bp, synthetic construct
  source 1..75: mol_type = other DNA
gctggctgatgtggcggggacaactgaggcggttgacgtgctttgcctctgtctggatatcgctgatcaggatgg

SEQ ID NO: 22965 - DNA, 75 bp, synthetic construct
  source 1..75: mol_type = other DNA
ccattgcatacgctgacggcacctgtgacgcgaaagaaatcgcggtactggaaaaaaccattgcagcacttcctg

SEQ ID NO: 22966 - DNA, 75 bp, synthetic construct
  source 1..75: mol_type = other DNA
caggtttacttactgcgccgttgtcgtctttgcgccgcacggcatcactgacgggaaatgtcctgaaaactgtag

SEQ ID NO: 22967 - DNA, 75 bp, synthetic construct
  source 1..75: mol_type = other DNA
gagaaaaccattgcagcacttcctgcctttgcgccgttctccggtgagattgcacaaatgagtgcaaatatccgc

SEQ ID NO: 22968 - DNA, 75 bp, synthetic construct
  source 1..75: mol_type = other DNA
gcccgttatgaagcgtcgccgcgttctgccaatgccgaagctcttcgtcagctggctgatgttgccggtactgat

SEQ ID NO: 22969 - DNA, 75 bp, synthetic construct
  source 1..75: mol_type = other DNA
aacgatgcgatggtggggcacaatggcttattcatttctataaaaaacatggaaaatgaaaaaattgttgaactc

SEQ ID NO: 22970 - DNA, 75 bp, synthetic construct
  source 1..75: mol_type = other DNA
acctgctgcccgtcgtgcggcttatccgtcagccacgcgttgtgtttcctgtcagtcagtttttgaagcaaaaaa

SEQ ID NO: 22971 - DNA, 75 bp, synthetic construct
  source 1..75: mol_type = other DNA
tcgcgccagactataccgatgatgaactttatgagtggatgcaccagaaaattaaggctgcgcaggacctgaaat

SEQ ID NO: 22972 - DNA, 75 bp, synthetic construct
  source 1..75: mol_type = other DNA
aagaaaaagaccgggaaagaagttaccagtattcagtttaccgcacgggaaaaaatgacgggtcttgaaagctat

SEQ ID NO: 22973 - DNA, 75 bp, synthetic construct
  source 1..75: mol_type = other DNA
gcggcgctgagacgggctggtattgatgatttcagatttcacgacttgagacacacctgggcaagttggctggtt

SEQ ID NO: 22974 - DNA, 75 bp, synthetic construct
  source 1..75: mol_type = other DNA
tcagtggctggcgtttaatcaacggattatgcagggagaagcctctctgtcgacgctgaatcaaccggaatttta

SEQ ID NO: 22975 - DNA, 75 bp, synthetic construct
  source 1..75: mol_type = other DNA
tctgaactgacagatgaactcatggcaaaaatcagaacccacgaatacaaccgctcaatggatgtcatcagctga

SEQ ID NO: 22976 - DNA, 75 bp, synthetic construct
  source 1..75: mol_type = other DNA
cagtgttcgcccgttatcatacggttttatttcgcaggacgacctggcaaaacagttcctgaacgtttctgaaga

SEQ ID NO: 22977 - DNA, 75 bp, synthetic construct
  source 1..75: mol_type = other DNA
gccggaacgggaaggggagcacgaccggaacggattaagctgggaaattatcctgatctgagtctgaaagctgcc

SEQ ID NO: 22978 - DNA, 75 bp, synthetic construct
  source 1..75: mol_type = other DNA
cagttatctgagcaggaaaaatccctgctggcccatgagaaagagacgctggagtacaaacgccagctggctgag

SEQ ID NO: 22979 - DNA, 75 bp, synthetic construct
  source 1..75: mol_type = other DNA
tatcaacggacaggccgggccgcagctgatgaaagcggtgtatgagatggcccgtaaaggtgcgcaggatgagat

SEQ ID NO: 22980 - DNA, 75 bp, synthetic construct
  source 1..75: mol_type = other DNA
acatggcccgcaagggggcgcaggatgagattcaggcgcagatgcgtgatggcggcgtcttttccggaggcaggc

SEQ ID NO: 22981 - DNA, 75 bp, synthetic construct
  source 1..75: mol_type = other DNA
ctgatgaaggcggtgtatgacatggcccgcaagggggcacaggatgaactccggctgcagttgcgtgatggcggt

SEQ ID NO: 22982 - DNA, 75 bp, synthetic construct
  source 1..75: mol_type = other DNA
attcatgtatgtcttgaagcaacaggcaactatggtactgccctcgctacttttctgtacgaaaagaatctgaaa

SEQ ID NO: 22983 - DNA, 75 bp, synthetic construct
  source 1..75: mol_type = other DNA
gtacgttgctcttggaagcggggacggacggtgggaagaagaaaccgatccaggagtacgcggaatagaccagtt

SEQ ID NO: 22984 - DNA, 75 bp, synthetic construct
  source 1..75: mol_type = other DNA
gaatccaagattgtatgctgtttataacctgaccgataatctcactctcaaaggggggatcgcaaaagcatttcg

SEQ ID NO: 22985 - DNA, 75 bp, synthetic construct
  source 1..75: mol_type = other DNA
acgatacgatacatcgatggtttactctggtgataacctgaaaggtgagattgaggctatttataatagtcttga

SEQ ID NO: 22986 - DNA, 75 bp, synthetic construct
  source 1..75: mol_type = other DNA
atgttcagcagcccgcggagatgcgctttaaccgcgcccgtgtccggcgggcgtttgtcacgattgggcagcgtc

SEQ ID NO: 22987 - DNA, 75 bp, synthetic construct
  source 1..75: mol_type = other DNA
gaaattgctgtttatcaggagaaagttattcgtgaggttaaatctggtaaaaaagataaatataatcattgggat

SEQ ID NO: 22988 - DNA, 75 bp, synthetic construct
  source 1..75: mol_type = other DNA
aagcgttcctggcagagcacggaggctggaaggcatttttgtggaagccaccctatgcataccggcagataaagg

SEQ ID NO: 22989 - DNA, 75 bp, synthetic construct
  source 1..75: mol_type = other DNA
gggtttaaccatttctcgttatattggcgcagttgcaattttgtgggtgctggcgattggttttaatcctgcgct

SEQ ID NO: 22990 - DNA, 75 bp, synthetic construct
  source 1..75: mol_type = other DNA
atgacagtgatgacgctcaatctcgttgaaaaacagccagcaactatgcgccggataattggtaagcatctggcc

SEQ ID NO: 22991 - DNA, 75 bp, synthetic construct
  source 1..75: mol_type = other DNA
aagtgagtatgcatatattagttttttaacagtcagtcagcgtcgtactttatttatgcatgccggattgactga

SEQ ID NO: 22992 - DNA, 75 bp, synthetic construct
  source 1..75: mol_type = other DNA
tcttccgcagtctgaaaacagaatgggtgccaacgaatggttacgcaggcaaggacgaggcccggcagcaaatta

SEQ ID NO: 22993 - DNA, 75 bp, synthetic construct
  source 1..75: mol_type = other DNA
aagcaccgatttcctgtcccggaatccggaaatcatcaatctgtttcaggactacgtccagaactgcgtgctggg

SEQ ID NO: 22994 - DNA, 75 bp, synthetic construct
  source 1..75: mol_type = other DNA
ggcagtacggaaccgtggggcaggggctgcatatcgccaaaaaactgctgccgtttataccggcgaatgcgggca

SEQ ID NO: 22995 - DNA, 75 bp, synthetic construct
  source 1..75: mol_type = other DNA
tctgtcactcagtatccgacctggagagcgggtgggtattattggctcaatagggtgtggcaaatcgacgctact

SEQ ID NO: 22996 - DNA, 75 bp, synthetic construct
  source 1..75: mol_type = other DNA
gccgaggaatggggtgtggacgacgaccagcgccggttcttcgtccgcttcggtgtgagcaaggccaactatggc

SEQ ID NO: 22997 - DNA, 75 bp, synthetic construct
  source 1..75: mol_type = other DNA
gttacttctatggctcaagtaaatcagccagccagatcatccgccagaatgtcaccatcaatgcgctgaaggagg

SEQ ID NO: 22998 - DNA, 75 bp, synthetic construct
  source 1..75: mol_type = other DNA
atggcaaaaacaaaacaggaatggctgtatcagttacggcgatgttcatcagtcaatacgctggaaaaaattatt

SEQ ID NO: 22999 - DNA, 75 bp, synthetic construct
  source 1..75: mol_type = other DNA
cgggctggcattgactggagtgatgatgatgcgcatcaggccagcagtggttcacgggccagcaatgatgctcgt

SEQ ID NO: 23000 - DNA, 75 bp, synthetic construct
  source 1..75: mol_type = other DNA
cggagattgcagaacgccgtcgggctatggcgtggtcttttgttcaggaacaggtgcagcctggtgttgataatg

SEQ ID NO: 23001 - DNA, 75 bp, synthetic construct
  source 1..75: mol_type = other DNA
aattaaacttgatactgtcccgtctgacatcgacaggatcatcttcgttgtgacgatccatgatgctcaggctcg

SEQ ID NO: 23002 - DNA, 75 bp, synthetic construct
  source 1..75: mol_type = other DNA
tcgccagagctttggtcaggtatccggtgcgtttattcgtctggttaatgacgataaccagactgaagtcgctcg

SEQ ID NO: 23003 - DNA, 75 bp, synthetic construct
  source 1..75: mol_type = other DNA
ctgctccattacgtcccggatctgcgccgcaagatgctgctggccacactgtggaacaccggtgcgcgcattaat

SEQ ID NO: 23004 - DNA, 75 bp, synthetic construct
  source 1..75: mol_type = other DNA
gtccggcactcaccggaacgccaacagcacctactgcggcacagtcggttaacaatacacagattgccaccacgg

SEQ ID NO: 23005 - DNA, 75 bp, synthetic construct
  source 1..75: mol_type = other DNA
atgtacgcaaaatcctttattgcatttgatggcaacgggcgtctgacgggtgcccgtaccgcacagactgcacct

SEQ ID NO: 23006 - DNA, 75 bp, synthetic construct
  source 1..75: mol_type = other DNA
acggatttacgtcaggggcgtgtgcgtattcgctacaaatatacgcccgttccgccactggaagacatggagctt

SEQ ID NO: 23007 - DNA, 75 bp, synthetic construct
  source 1..75: mol_type = other DNA
cacacaatattaatgcatcgcccacatccagaaagttatattaaaggtggaacgctgaaagctattaaacagaac

SEQ ID NO: 23008 - DNA, 75 bp, synthetic construct
  source 1..75: mol_type = other DNA
caatgtcaccacgattattatggggagcggtactgcacacactgccagaccgggcgcttcagtgaggagggggta

SEQ ID NO: 23009 - DNA, 75 bp, synthetic construct
  source 1..75: mol_type = other DNA
aggttcctgtgacaaaggaaaccctgaaggcccctgcgggtctgtcttcagtggcagatgcagtatggatgggga

SEQ ID NO: 23010 - DNA, 75 bp, synthetic construct
  source 1..75: mol_type = other DNA
ttgccggattcagcactgttgaccaggcaatgacccgtcgtaaggagcttggtttgcgagaagcacagcttgctc

SEQ ID NO: 23011 - DNA, 75 bp, synthetic construct
  source 1..75: mol_type = other DNA
atgagcggatttgcacaggggttacttgccggattcagcactgttgaccaggcaatgacccgtcgtaaggagctt

SEQ ID NO: 23012 - DNA, 75 bp, synthetic construct
  source 1..75: mol_type = other DNA
ggaactttgattacagagccaaagttgatgaccgcaattacacactgcaggaaagggagtttaacgccaaccaga

SEQ ID NO: 23013 - DNA, 75 bp, synthetic construct
  source 1..75: mol_type = other DNA
gaagtccgcaaaaactgaaagtgacagagtgcgtctgcaacctgatatggaacatcttcttgccgggcttattgc

SEQ ID NO: 23014 - DNA, 75 bp, synthetic construct
  source 1..75: mol_type = other DNA
tatcggccacgttgaccaaggtaaaactactctgaccgctgcaatcaccaccgtactggctaaaacctacggcgg

SEQ ID NO: 23015 - DNA, 75 bp, synthetic construct
  source 1..75: mol_type = other DNA
tggatgtggctgcacggcaccgggtgcagttttcgatgcctgagtccgatgcggtgtctatgctcaaaagaattc

SEQ ID NO: 23016 - DNA, 75 bp, synthetic construct
  source 1..75: mol_type = other DNA
gtaacacaccagactacatacctacactctcatctggtaagcgcaatgggacaaaattaagaccgccggggttcc

SEQ ID NO: 23017 - DNA, 75 bp, synthetic construct
  source 1..75: mol_type = other DNA
acctcctgtaaatgattttgaatgcacaccaacaagcccggaagataggaaatcagtatctaaattgaaaccacc

SEQ ID NO: 23018 - DNA, 75 bp, synthetic construct
  source 1..75: mol_type = other DNA
tgctgaccggacatgaaaatgaggttgtatcagcgcagccggataccgtgactgatacggctgatctggtcacgg

SEQ ID NO: 23019 - DNA, 75 bp, synthetic construct
  source 1..75: mol_type = other DNA
ttgacggactggcgcgcaccttccgcgccgccgtgcatcacagttccccgattgcagtaaagtgcaacattctga

SEQ ID NO: 23020 - DNA, 75 bp, synthetic construct
  source 1..75: mol_type = other DNA
ggcctgccaggctatctttctgccattccatccgccctgctcaacgagtctgccacgctgttccgccgtaagtat

SEQ ID NO: 23021 - DNA, 75 bp, synthetic construct
  source 1..75: mol_type = other DNA
acgcaagattccaaagtggtgtattgaccgtattccttctgatgctcaaatcataggtgaaacggaattacatta

SEQ ID NO: 23022 - DNA, 75 bp, synthetic construct
  source 1..75: mol_type = other DNA
atggctaacgcctggctcagattatggcatgacatgccaaatgatcctaagtggcgaacaatttccagggtgtca

SEQ ID NO: 23023 - DNA, 75 bp, synthetic construct
  source 1..75: mol_type = other DNA
gcaacagcctgcggttcgtttcctggaaggactacaaagccgtcacccgcgacctgaaagccatctaccaggccc

SEQ ID NO: 23024 - DNA, 75 bp, synthetic construct
  source 1..75: mol_type = other DNA
accgggatggataaccagatcctgtcgttgtacgccaaaggcctgacaaccgtaagcgtacagcctgaaccgtct

SEQ ID NO: 23025 - DNA, 75 bp, synthetic construct
  source 1..75: mol_type = other DNA
tgagtattatgagcaagggcattcagtaaaaatggttgataaggaggtggtattgataacactgcgtgttaatca

SEQ ID NO: 23026 - DNA, 75 bp, synthetic construct
  source 1..75: mol_type = other DNA
tcgctggcgtgcggcgttcttgccatggccgtggccgggtcgttgcgcttcttcgggtttcctgaagatgccgtg

SEQ ID NO: 23027 - DNA, 75 bp, synthetic construct
  source 1..75: mol_type = other DNA
ctggctaaaaacgaaaggggatacaggaaagcgtaaaaccttcgtgaacaccactctgggcgaaacatgggagcc

SEQ ID NO: 23028 - DNA, 75 bp, synthetic construct
  source 1..75: mol_type = other DNA
atcacgcacaggcccaacgcatcgataccgattacaagcgcctcaaaaaactcatctggccggagggtgacagtt

SEQ ID NO: 23029 - DNA, 75 bp, synthetic construct
  source 1..75: mol_type = other DNA
aaaaacggctgcgctggtactggcgtaacccttccgatctttgcccgtggcacatggatgaaacctacgtgaagg

SEQ ID NO: 23030 - DNA, 75 bp, synthetic construct
  source 1..75: mol_type = other DNA
aaggtccaggcaatttccgcaacctgtttatgtactcacctaatggcaaaaaggatgggcttcagatcattcctc

SEQ ID NO: 23031 - DNA, 75 bp, synthetic construct
  source 1..75: mol_type = other DNA
taataatgcgggaggatttggcgatgtagttaaagcggctaaagtttttgtcaggaatgagttagggcatctaca

SEQ ID NO: 23032 - DNA, 75 bp, synthetic construct
  source 1..75: mol_type = other DNA
agtgaaggcattgtgtcgatgtttcgtgtggacccggatttggctggtccattaatggcgatggtgaccaccatg

SEQ ID NO: 23033 - DNA, 75 bp, synthetic construct
  source 1..75: mol_type = other DNA
gttgcaaaaaaggatgcgtgaagtaaatgactggttagaacaaaaaattttgcgatttgagccatattctttggg

SEQ ID NO: 23034 - DNA, 75 bp, synthetic construct
  source 1..75: mol_type = other DNA
gatctcagacagtcgcttgagcaggaagcagttgaactcatgtcagcggtgaccgcaattcgtaacattcacgag

SEQ ID NO: 23035 - DNA, 75 bp, synthetic construct
  source 1..75: mol_type = other DNA
atggggttcaggttcagaaagtcgatcaacattattcctggcgttcgcctcaacctgagtaacggtgcaccgagc

SEQ ID NO: 23036 - DNA, 75 bp, synthetic construct
  source 1..75: mol_type = other DNA
ttcccgacggtaaatgcgaacaaacaggtgacggctttctcttcgtcacagcaggacaccgaccagtacggcatg

SEQ ID NO: 23037 - DNA, 75 bp, synthetic construct
  source 1..75: mol_type = other DNA
agggccgaacagtattcaaactggaagtgtgatgctgaagaacatgaaaaaaggctcgccacgactcaggcagat

SEQ ID NO: 23038 - DNA, 75 bp, synthetic construct
  source 1..75: mol_type = other DNA
atgtcggtactggcagatggtgtgctggtggcggggatggtgataatggtgttgcctttgctgaagagtgtaaaa

SEQ ID NO: 23039 - DNA, 75 bp, synthetic construct
  source 1..75: mol_type = other DNA
ccatacccgcaccattaacggcatcgacggtgacgtaaagttaaaccgcgcgttatgggtgatggcggagaacat

SEQ ID NO: 23040 - DNA, 75 bp, synthetic construct
  source 1..75: mol_type = other DNA
aaatggtcagcatgtacctgaaatcattattttaaacagccacgatggggcatcgagttttcagttacttccagg

SEQ ID NO: 23041 - DNA, 75 bp, synthetic construct
  source 1..75: mol_type = other DNA
gagaatatgctgaaaggcgggatttccggtcgcagtgcaaaaggaaaacgtatccatacccgtgccattcacagc

SEQ ID NO: 23042 - DNA, 75 bp, synthetic construct
  source 1..75: mol_type = other DNA
gtataaaccagatacgccgtgaccggcctctgacccacgaagagctgatgagtcatgtacccagcgtgttcggga

SEQ ID NO: 23043 - DNA, 75 bp, synthetic construct
  source 1..75: mol_type = other DNA
ttattcattacgaacccgtgattggcattatgggtaaatccggcaccggcaaaagcagcctgtgtaatgctattt

SEQ ID NO: 23044 - DNA, 75 bp, synthetic construct
  source 1..75: mol_type = other DNA
atattgccatgcatcagtttttactgaatgaaggcgcagatccctcgcgttttctgtttgttctcagccatgccg

SEQ ID NO: 23045 - DNA, 75 bp, synthetic construct
  source 1..75: mol_type = other DNA
gctgcgcgatgttccgcaacagcaatcgccgggtgacctttcgcccgcagcatgggcaacaggttttagttcgcg

SEQ ID NO: 23046 - DNA, 75 bp, synthetic construct
  source 1..75: mol_type = other DNA
ctgataacggaagtcatactgagttcacactccagagctgcggcactggcggttgattctgccgccgcaaaactg

SEQ ID NO: 23047 - DNA, 75 bp, synthetic construct
  source 1..75: mol_type = other DNA
ccgcagccgtcacacggatgatacggatgtgcttcgccgtatacaccatgttatcggagagctacccacatatgg

SEQ ID NO: 23048 - DNA, 75 bp, synthetic construct
  source 1..75: mol_type = other DNA
ttccggtacatcatcaggaaaaaatgggcacgatggacccaacgtttaatccggtgatcaccgatgactctgcgg

SEQ ID NO: 23049 - DNA, 75 bp, synthetic construct
  source 1..75: mol_type = other DNA
gctggatgctgatcatgagcgctttacctccaaccagatgttcttcgacctggctcaggcaagcgcttccggagg

SEQ ID NO: 23050 - DNA, 75 bp, synthetic construct
  source 1..75: mol_type = other DNA
ctttataccttgcggaagcctatcgccattttggtcatgatgaccgggcgcggctgttgcttgaggatcaactga

SEQ ID NO: 23051 - DNA, 75 bp, synthetic construct
  source 1..75: mol_type = other DNA
ctactgtaaatctaagcgagctatacatgaaaatcccctccgcgccgccatgattgtctttctcatgatgcagag

SEQ ID NO: 23052 - DNA, 75 bp, synthetic construct
  source 1..75: mol_type = other DNA
ctcactgggtgccagcatgatactgggtggtgtggcccagatgctggccccgaaggcaaagacgccggagtacaa

SEQ ID NO: 23053 - DNA, 75 bp, synthetic construct
  source 1..75: mol_type = other DNA
gcgccctgtcgatgcagatgccgggctttcgccgtcagatgaacgaaggctggtaccagatacgtattgccggtg

SEQ ID NO: 23054 - DNA, 75 bp, synthetic construct
  source 1..75: mol_type = other DNA
aggataccgcgccggaggcggtgtatgcccgtcttcacgaacaactgggtgagggagcggtcatccacattgtgc

SEQ ID NO: 23055 - DNA, 75 bp, synthetic construct
  source 1..75: mol_type = other DNA
gcgattcacaagttccgctgtgtgccacatctttccgggcggcgctttgagcacggggtgacggactgttacacg

SEQ ID NO: 23056 - DNA, 75 bp, synthetic construct
  source 1..75: mol_type = other DNA
gcacggggtgacggactgttacacgctgttccgggatgcataccatctggcgggaattgagatgccggattttca

SEQ ID NO: 23057 - DNA, 75 bp, synthetic construct
  source 1..75: mol_type = other DNA
cgcatcttaccgggcggcgctttgagcacggggtgacggactgttacacgctgttccgggatgcttaccatctgg

SEQ ID NO: 23058 - DNA, 75 bp, synthetic construct
  source 1..75: mol_type = other DNA
atctgtcggggggccacgatggtggatggaaaacccgtttttcccggtatgaaactgtcgaaggaaaaatgcgac

SEQ ID NO: 23059 - DNA, 75 bp, synthetic construct
  source 1..75: mol_type = other DNA
ctcccggcgaatctcccaggacatcagtacccgtgatgagggcggagacgggaaagtggtggttatcgggcgggg

SEQ ID NO: 23060 - DNA, 75 bp, synthetic construct
  source 1..75: mol_type = other DNA
cgcatcgtccgccagttcggcggcgtcatcggcatcatctgcgtctgcttcaaaagatgaggcgaccagacaggc

SEQ ID NO: 23061 - DNA, 75 bp, synthetic construct
  source 1..75: mol_type = other DNA
atgtttgtcaaacctgttaaagggcggtcagttcctgatcctgcccgcggcgaccttttgcccgccgaagggcga

SEQ ID NO: 23062 - DNA, 75 bp, synthetic construct
  source 1..75: mol_type = other DNA
ctggctctgcagtgggtttctgagttgactgatgagctgatggcgagaattcgcgctcatgaatacaaccactag

SEQ ID NO: 23063 - DNA, 75 bp, synthetic construct
  source 1..75: mol_type = other DNA
ctatccagtgggtgtccgaactgaccgacgagctgatggcgaaaatccgcagccatgaatactgccggtcaatgg

SEQ ID NO: 23064 - DNA, 75 bp, synthetic construct
  source 1..75: mol_type = other DNA
tcacgaccgcccctggtgggggctgccctgcaccgttcgtgacagtgacaccccgttttggcgcccgtctggtgc

SEQ ID NO: 23065 - DNA, 75 bp, synthetic construct
  source 1..75: mol_type = other DNA
ttccgctctctgggtggctgtcacgggtattttccactcgttggctttttactctatccgcgggaatatttactt

SEQ ID NO: 23066 - DNA, 75 bp, synthetic construct
  source 1..75: mol_type = other DNA
tgccttacggggaaatgctggttggctcccgccgtatatcccaggacatcagcacccgtgatgaaggcgggggcg

SEQ ID NO: 23067 - DNA, 75 bp, synthetic construct
  source 1..75: mol_type = other DNA
aaagatgctctcaaacacacttatctcggttatgaaaccaaagaactggttgatgtcgtaaccggtgaaatcacc

SEQ ID NO: 23068 - DNA, 75 bp, synthetic construct
  source 1..75: mol_type = other DNA
aaatacgtaatgttgaagaggcattaaaaacgtatgaaaagtaccgggctgacattaacaaaaaaattaatgcaa

SEQ ID NO: 23069 - DNA, 75 bp, synthetic construct
  source 1..75: mol_type = other DNA
atgttattgtcggtggcgaactgttcactgattactccgatcacccccgcaaacttgtcacgctaaatccgaaac

SEQ ID NO: 23070 - DNA, 75 bp, synthetic construct
  source 1..75: mol_type = other DNA
cgcacctggaacgctggccccgactcaatggcccgtctttatccggtagtaatggcggcgaaatccgatacggca

SEQ ID NO: 23071 - DNA, 75 bp, synthetic construct
  source 1..75: mol_type = other DNA
tcaaatcaacagccgccggacgttatcagcttctttcacgctggtgggatgcttaccgtaagcagcttgctctga

SEQ ID NO: 23072 - DNA, 75 bp, synthetic construct
  source 1..75: mol_type = other DNA
agtatgaacataaaatcggtgacctgattgcccgattcaaagaggctggcggggtggtaaatgaagttgagctat

SEQ ID NO: 23073 - DNA, 75 bp, synthetic construct
  source 1..75: mol_type = other DNA
cgccacgccgcatccgcactggtgcggcctgaccctgctggccatcgatggtgtgttctggcgcacaccggatac

SEQ ID NO: 23074 - DNA, 75 bp, synthetic construct
  source 1..75: mol_type = other DNA
tcttcggggcatccgtaccggagcgtgttgcttatctgacagccgggatcgactcccaactggatcgatatgaaa

SEQ ID NO: 23075 - DNA, 75 bp, synthetic construct
  source 1..75: mol_type = other DNA
cggagcaggctgacgctgagaagtaaaaagccggagcttgtggagcaagagctgtggggtgtcttactggcttat

SEQ ID NO: 23076 - DNA, 75 bp, synthetic construct
  source 1..75: mol_type = other DNA
gcctatggtatcagcaaaggagtgatgagtagccttgccgataaagccagtccgaaagtctttatggcgtgtggg

SEQ ID NO: 23077 - DNA, 75 bp, synthetic construct
  source 1..75: mol_type = other DNA
cgtattcgctcaaataactgttacggtcaggtattccgtcgtgaccaggagagcgcgctggcgtgctggggaatc

SEQ ID NO: 23078 - DNA, 75 bp, synthetic construct
  source 1..75: mol_type = other DNA
acagcggtgaggtgcgtgctgagcggcatgacgataacccggcgcacattatcggttatggatcggtgtttgact

SEQ ID NO: 23079 - DNA, 75 bp, synthetic construct
  source 1..75: mol_type = other DNA
tcgcaactgctattggtggcggggctattgccatagcatctgtgctcatctctggtccgagcggcaacgatggtc

SEQ ID NO: 23080 - DNA, 75 bp, synthetic construct
  source 1..75: mol_type = other DNA
tgtcggctactgtactagtgctgattggtgcaggcgcgtctgctcctcaaatacttgaccagtttctggacgaaa

SEQ ID NO: 23081 - DNA, 75 bp, synthetic construct
  source 1..75: mol_type = other DNA
aacaccagaccctgcacaaacaaaactgattaaccagaaacgcattgcaccgctgaatcttctgagtgttgaccc

SEQ ID NO: 23082 - DNA, 75 bp, synthetic construct
  source 1..75: mol_type = other DNA
ggttgccgctgatggtaagcttcgtaagctactctgccttcctttgaagaagttaaatggatggctgttcagcat

SEQ ID NO: 23083 - DNA, 75 bp, synthetic construct
  source 1..75: mol_type = other DNA
atgacaacaagtgatgccatcgctttagctgcgcttgtagtatcgatttacactatcatatcgtcagaaatgaaa

SEQ ID NO: 23084 - DNA, 75 bp, synthetic construct
  source 1..75: mol_type = other DNA
atgcgtagaaatgaaactattgaattgattaatgaaatttttaattctgcggatatgcagaataagaatcccgtc

SEQ ID NO: 23085 - DNA, 75 bp, synthetic construct
  source 1..75: mol_type = other DNA
atgttcgctttgattcaacgcggtcagatatacacggacagagctggataccccgtggtgattactcgcatcact

SEQ ID NO: 23086 - DNA, 75 bp, synthetic construct
  source 1..75: mol_type = other DNA
atgttccgttgcccgctttgtggcgcatctgcccgcatccgtaccagtcgtccggaaaatgattcaaataccgtg

SEQ ID NO: 23087 - DNA, 75 bp, synthetic construct
  source 1..75: mol_type = other DNA
aacaactttttcaagaccgccgacaatactgtgttccattctatcaacgtgcctatgtatggactcagcaagacc

SEQ ID NO: 23088 - DNA, 75 bp, synthetic construct
  source 1..75: mol_type = other DNA
atgactgacacgcattctattgcacaaccgttcgaaccagaagtctctcctgcaaataaccgtcaattaaccgtg

SEQ ID NO: 23089 - DNA, 75 bp, synthetic construct
  source 1..75: mol_type = other DNA
ttctggtgtgcgctgggggcattgtgtttcttatttatcagtagtttgtttaaaccacagcacagaaaaaatcaa

SEQ ID NO: 23090 - DNA, 75 bp, synthetic construct
  source 1..75: mol_type = other DNA
taacattatgcgttccagaaaaaggggtttttgtcaagaacgcactgaactccaacatatgcactctttatgata

SEQ ID NO: 23091 - DNA, 75 bp, synthetic construct
  source 1..75: mol_type = other DNA
ccattttcgatcagttctctgaagctcgccagaaaggctttctcaccgtcatggatctcaaggagcgcggcattc

SEQ ID NO: 23092 - DNA, 75 bp, synthetic construct
  source 1..75: mol_type = other DNA
catttcagcgcggcagcccgtcgggggattatttctgacagatttgtagaagcaattttgcagttttggcgcgaa

SEQ ID NO: 23093 - DNA, 75 bp, synthetic construct
  source 1..75: mol_type = other DNA
gtaaagatactcacgccctgtccgagcctgcgttcatttccgtactggaagtgctggcagcgaacggcgttgatg

SEQ ID NO: 23094 - DNA, 75 bp, synthetic construct
  source 1..75: mol_type = other DNA
ggccagccaggattcggcgcgctggggtgtgggtaaaccgttatatcaggacctgattgcgcgcaccaaagctgc

SEQ ID NO: 23095 - DNA, 75 bp, synthetic construct
  source 1..75: mol_type = other DNA
gtgcctgctgccgctgctgaccggttgcggaagtacgcgaacagtttacgtgagcattccgaagactccactacc

SEQ ID NO: 23096 - DNA, 75 bp, synthetic construct
  source 1..75: mol_type = other DNA
gcggcaaagaaatccgaaactgcagcggcatcatcgaagaacgcggcgaaaacctcagaaacgaatgcagctaat

SEQ ID NO: 23097 - DNA, 75 bp, synthetic construct
  source 1..75: mol_type = other DNA
ccaccaacgcaccaacggaagatccggatgctgcaagtgagggatattacggttcggcatcccgaacgaacaaaa

SEQ ID NO: 23098 - DNA, 75 bp, synthetic construct
  source 1..75: mol_type = other DNA
tggttcaggagattaactttgtaagacagacagccactgccgggcagtttccggtcagtgaatgccggttttctt

SEQ ID NO: 23099 - DNA, 75 bp, synthetic construct
  source 1..75: mol_type = other DNA
atgaccacaacgcaaaaaacgactgatgttacagccccccgacgcagccactggtggtggacggtgccgggatgc

SEQ ID NO: 23100 - DNA, 75 bp, synthetic construct
  source 1..75: mol_type = other DNA
cttaaggataaatgggatgagagtgaaatacaggagcgaggtaaaaagttgggggaaattgcattgaaagtatgg

SEQ ID NO: 23101 - DNA, 75 bp, synthetic construct
  source 1..75: mol_type = other DNA
tgatggctctgtttgttttatggaaggacaacaccacgccggggaaattactggttaaggagattaacttcgtaa

SEQ ID NO: 23102 - DNA, 75 bp, synthetic construct
  source 1..75: mol_type = other DNA
cccgcaatcagcataccgtcacgctgtatgcgaaggggctggcctgtgaagccgataccctcagcagttgtggtt

SEQ ID NO: 23103 - DNA, 75 bp, synthetic construct
  source 1..75: mol_type = other DNA
atgagcagaaaaaataaaaaagtgcgcatgagtacacgcattgagcttgctgatgcgctcaggaaagaatcgtcg

SEQ ID NO: 23104 - DNA, 75 bp, synthetic construct
  source 1..75: mol_type = other DNA
ccactatgggcggcgctccagaatgagggtgacaagctggtttacacgtatgactttggcgactggtgggattgc

SEQ ID NO: 23105 - DNA, 75 bp, synthetic construct
  source 1..75: mol_type = other DNA
cagtggtcttccggtgaccgggttcaggtggtggccgcactgatggccatcgagagagagttgcgcagcttacgg

SEQ ID NO: 23106 - DNA, 75 bp, synthetic construct
  source 1..75: mol_type = other DNA
tgccggttgcccgcccgtcatgggatcattctcgtctggaatcacgcattgtgcatctcggttgcggggcgtttc

SEQ ID NO: 23107 - DNA, 75 bp, synthetic construct
  source 1..75: mol_type = other DNA
aaagcgtgggtcagcaatacgctgaagacgtttgattttgagcgtcgttcactggtgatgctggcgttgtggtaa

SEQ ID NO: 23108 - DNA, 75 bp, synthetic construct
  source 1..75: mol_type = other DNA
gccttcactctcggcggtgaagccaccgacatcgtggtgatgcgcattatgtgtcgtcgcggcttcgaaatggac

SEQ ID NO: 23109 - DNA, 75 bp, synthetic construct
  source 1..75: mol_type = other DNA
gactacaaagcctccctgaaatatctcagcgatcacccgaaactgcagggtattgcccagcagaacagctttaaa

SEQ ID NO: 23110 - DNA, 75 bp, synthetic construct
  source 1..75: mol_type = other DNA
ctgccccttcaggcgatgacagttacgtgcgaccgttgtttgccgatcgttgccaggccggttttccttcgcctg

SEQ ID NO: 23111 - DNA, 75 bp, synthetic construct
  source 1..75: mol_type = other DNA
aagccagcatagtaaaaattcctttgttcacagagcgatgccctgcgggttttccgtcaccggcagcaaactata

SEQ ID NO: 23112 - DNA, 75 bp, synthetic construct
  source 1..75: mol_type = other DNA
atgaaaaacggccttgaactgaaagcgccagtaactgatgacatcagcagagcacaggcttttgctattaagtgg

SEQ ID NO: 23113 - DNA, 75 bp, synthetic construct
  source 1..75: mol_type = other DNA
cgtaaattcggggggcgcttacatgcccgggaggatgggataaaaccatttattcagtcagtacgccagggatac

SEQ ID NO: 23114 - DNA, 75 bp, synthetic construct
  source 1..75: mol_type = other DNA
atatgtttaatggtgatcgcttgacgtttatgaaaacatattatctttccagcagtaactctaataaacccagta

SEQ ID NO: 23115 - DNA, 75 bp, synthetic construct
  source 1..75: mol_type = other DNA
gacatcgtgctcaacagtacgcaggcgtctttctgtaccgaatacagcgtcgtgaccggaggctcggatgagtga

SEQ ID NO: 23116 - DNA, 75 bp, synthetic construct
  source 1..75: mol_type = other DNA
tgcccgtatcgccagtgaccgcgtgtggagttacgagattaccgaccatgccagcggctggatttacgttgagta

SEQ ID NO: 23117 - DNA, 75 bp, synthetic construct
  source 1..75: mol_type = other DNA
atgacagaaagtattggaggtaaaacttctctggactgggccatgaaacaggattttcgctgtggctgctggctc

SEQ ID NO: 23118 - DNA, 75 bp, synthetic construct
  source 1..75: mol_type = other DNA
atcgtcaacaatctggtgaggggggaccggtggggattgcatcttatcaccgggcaacaggcagatcgactcgcc

SEQ ID NO: 23119 - DNA, 75 bp, synthetic construct
  source 1..75: mol_type = other DNA
atctgggctgacagtatcagtaccggaaagatggtggccggagcggatgaatattttgcccggcacgacatgatg

SEQ ID NO: 23120 - DNA, 75 bp, synthetic construct
  source 1..75: mol_type = other DNA
ggttaattaccggagcctggtacagtgccttagggttagaactggaagatcaccagggactagttcatttccctg

SEQ ID NO: 23121 - DNA, 75 bp, synthetic construct
  source 1..75: mol_type = other DNA
caccacagaaaaaaacggttgtcagtatcgccgttgatccggagtctcctgaatcgttcatgaggcggcctaaac

SEQ ID NO: 23122 - DNA, 75 bp, synthetic construct
  source 1..75: mol_type = other DNA
actggctgttacgccacgttaaatcctgccagtggcctcatggtgactaccatcacagtgaaaccgtcatacatc

SEQ ID NO: 23123 - DNA, 75 bp, synthetic construct
  source 1..75: mol_type = other DNA
tcatgctgatccgctggcatttgaagaaaagcatggttcccagattgatttaatttttcgttttcttgatcacgc

SEQ ID NO: 23124 - DNA, 75 bp, synthetic construct
  source 1..75: mol_type = other DNA
gataccgtggcatttgaagagaagtatggctcccagctggagctgatatttcgttttatcgatcgtgcgctggca

SEQ ID NO: 23125 - DNA, 75 bp, synthetic construct
  source 1..75: mol_type = other DNA
cgccggggtaaaagattttgaagaaaaacacggcagccagctgttgttgctgattcgttttttaatgcacgcgag

SEQ ID NO: 23126 - DNA, 75 bp, synthetic construct
  source 1..75: mol_type = other DNA
agcgagaacatgaccacaatgcgacacgcgccgggcgcaatccgtctgtgctggcactgcgataaccagctgcgc

SEQ ID NO: 23127 - DNA, 75 bp, synthetic construct
  source 1..75: mol_type = other DNA
acaccatgacgaactgcatgcggataccgtggcatttgaagagaagtatggttcccaactggagctgatatttcg

SEQ ID NO: 23128 - DNA, 75 bp, synthetic construct
  source 1..75: mol_type = other DNA
tacggcaaaagcgttcgcatacctgctgaaacagtgggatggcctgaacgtgtactgcagtaatggctgggtgga

SEQ ID NO: 23129 - DNA, 75 bp, synthetic construct
  source 1..75: mol_type = other DNA
tgctgcctgtctgatgacgtacagtcatcacgcctgtcgtacggagtgttatgccatgacggtccattattaccg

SEQ ID NO: 23130 - DNA, 75 bp, synthetic construct
  source 1..75: mol_type = other DNA
aacatctgcgggctcagatagaaaaactgcgccggatgctgttcggtacccgttctgaaaaactgcgtcgtgaag

SEQ ID NO: 23131 - DNA, 75 bp, synthetic construct
  source 1..75: mol_type = other DNA
ccatgcgtattcaccaacagcatccggcatcccgtctttttccgttctgcaccggtaagtaccgctggcacggca

SEQ ID NO: 23132 - DNA, 75 bp, synthetic construct
  source 1..75: mol_type = other DNA
aaatgagcccggaagctgccggcattgccgcctgtctgatgacgtacagccatcatgcctgtcgtacggagaatt

SEQ ID NO: 23133 - DNA, 75 bp, synthetic construct
  source 1..75: mol_type = other DNA
cccagtgggtggcaataggcgtattgggtagcctggtgtttggcttgctgacgtatctgacaaacctttatttca

SEQ ID NO: 23134 - DNA, 75 bp, synthetic construct
  source 1..75: mol_type = other DNA
gggtagcctggtatttggcctgctgacgtacctgacaaatctttatttcaagattaaagaagacaggcgtaaggc

SEQ ID NO: 23135 - DNA, 75 bp, synthetic construct
  source 1..75: mol_type = other DNA
tgacggtccattattaccggctgcgggattacgccctgcaacatccggaatacgacgccattatgcgcatcattg

SEQ ID NO: 23136 - DNA, 75 bp, synthetic construct
  source 1..75: mol_type = other DNA
tgatgacacaccagtaaaagtactggcaccgggcaggaagaaggcgaaaacaggatatatctggacgtatgtccg

SEQ ID NO: 23137 - DNA, 75 bp, synthetic construct
  source 1..75: mol_type = other DNA
aggaaagacctctgcgaggtacgaatccgaaccggccagacggaggtcactgtcttcacagcctacgaatctgaa

SEQ ID NO: 23138 - DNA, 75 bp, synthetic construct
  source 1..75: mol_type = other DNA
accggggcttaaaaaactgctcaggacactatcggcaggagacactctggttgtctggaagctggacagactggg

SEQ ID NO: 23139 - DNA, 75 bp, synthetic construct
  source 1..75: mol_type = other DNA
tgccgccacggtgaacctgattaacggcagcggtaagccggtgagtgtggacatcaccgaacaccccgcgccgga

SEQ ID NO: 23140 - DNA, 75 bp, synthetic construct
  source 1..75: mol_type = other DNA
gccagcgggcagcccagcaatgatggtgaagggtatctggaaattttccgggggctgatagatgagacgcttctg

SEQ ID NO: 23141 - DNA, 75 bp, synthetic construct
  source 1..75: mol_type = other DNA
ggcgcacaggcggacgtcgcccgaagctgacaaaagaacagcatgagcaaatagcaaggctgattaaaaacggtc

SEQ ID NO: 23142 - DNA, 75 bp, synthetic construct
  source 1..75: mol_type = other DNA
gacgcattggcggacgtcgcccgaagttgacaaaagaacaacatgagcaaatagcgaggttgatcgaaaatggct

SEQ ID NO: 23143 - DNA, 75 bp, synthetic construct
  source 1..75: mol_type = other DNA
tcagccggaaagccgttgccgcaggcgaccgcgtaaaccgtcagtttgtggcagaacgtcctgaccagttgtggg

SEQ ID NO: 23144 - DNA, 75 bp, synthetic construct
  source 1..75: mol_type = other DNA
cagtattgataccagtaccccaatgggccgtttcttttttcatgtcatgggtgccctggctgaaatggaacgcga

SEQ ID NO: 23145 - DNA, 75 bp, synthetic construct
  source 1..75: mol_type = other DNA
ttcctcgccagaaggtggcgatcatttatgatgttggcgtatcgactttgtataagaagtttccagtcggagata

SEQ ID NO: 23146 - DNA, 75 bp, synthetic construct
  source 1..75: mol_type = other DNA
ccggtgctggacagtgaggggaataccaacatctccggcgtcacggtggtgttccgggcaggtgagcaggagcag

SEQ ID NO: 23147 - DNA, 75 bp, synthetic construct
  source 1..75: mol_type = other DNA
tcggtatcagcgtggctggtgaatgactggtatcccacggcaagcatcagcgatttgctggttgtggtgatgaag

SEQ ID NO: 23148 - DNA, 75 bp, synthetic construct
  source 1..75: mol_type = other DNA
gtggaggctgtcggtcgggcgagcgatgatgcggaaggttacctggattttttcaaaggagaaatcgggaaaaca

SEQ ID NO: 23149 - DNA, 75 bp, synthetic construct
  source 1..75: mol_type = other DNA
tcaggagcgaataactggacaccaacaaccagtatcagcgatctgctggttgtggtgatgaaaaaatccacagca

SEQ ID NO: 23150 - DNA, 75 bp, synthetic construct
  source 1..75: mol_type = other DNA
gattgaaggcgatattgtcaaaacggtcagcaagtctttcccccgcacgaacagttatgccagtggcaccatcac

SEQ ID NO: 23151 - DNA, 75 bp, synthetic construct
  source 1..75: mol_type = other DNA
atgattaacctgttaatcatcgttctgagggcggtagctgcgcttgcaaacgcgctgattgcagttctggaactg

SEQ ID NO: 23152 - DNA, 75 bp, synthetic construct
  source 1..75: mol_type = other DNA
atcaccaaacatgtgcgcctttatactcaggtttacagcggttacggcgaatcgctcatcgactataacttcaac

SEQ ID NO: 23153 - DNA, 75 bp, synthetic construct
  source 1..75: mol_type = other DNA
gctgcgtcaaacccgcacccgcaaaccgttccccgaattactcccccgcgatgaaaaacggctgctgccggcagc

SEQ ID NO: 23154 - DNA, 75 bp, synthetic construct
  source 1..75: mol_type = other DNA
gtggtcagggccgggagcaggcagataacgagtggcatgacgcgattaactggctgggagactggtgcagtgaag

SEQ ID NO: 23155 - DNA, 75 bp, synthetic construct
  source 1..75: mol_type = other DNA
tgccggtgtttatgttgcctatggcagtatatgcacaagaggcaacggtgaaagaggtgcatgacgcgccagcgg

SEQ ID NO: 23156 - DNA, 75 bp, synthetic construct
  source 1..75: mol_type = other DNA
atgctgaaaactgattccctgcgtgaagccatgacccgttcatgccgatggtgtcaggccaacccggaaaaattc

SEQ ID NO: 23157 - DNA, 75 bp, synthetic construct
  source 1..75: mol_type = other DNA
cttaaagcgcgaagaagggacttacagccccgcagttactggattaagcaggcacagcaggccgtgaatgcttat

SEQ ID NO: 23158 - DNA, 75 bp, synthetic construct
  source 1..75: mol_type = other DNA
cgtggtcgagtggtcttattgagtttggttacgtcctgccggaaggtgcattgccgatagttgccggaaagcctg

SEQ ID NO: 23159 - DNA, 75 bp, synthetic construct
  source 1..75: mol_type = other DNA
cccggcattctcaaatcagtggtggtgcagcccggaacacggaactaaattagcgctcgaacgacgaaataaaga

SEQ ID NO: 23160 - DNA, 75 bp, synthetic construct
  source 1..75: mol_type = other DNA
cttcgccatgtgcttggcgtcatagcagactggccggtcaaccgggtcagcgaactgcttccgtggcgcatagca

SEQ ID NO: 23161 - DNA, 75 bp, synthetic construct
  source 1..75: mol_type = other DNA
aaggggaatgccggcagagcagcggcttgctgaacgtcagcgaaaaacgaaaccgctgttgaaatccctggaaag

SEQ ID NO: 23162 - DNA, 75 bp, synthetic construct
  source 1..75: mol_type = other DNA
tccagaaagctaccttcgccatgtgcttggcgtcatagcagactggccggtcaaccgggtcagcgaactgcttcc

SEQ ID NO: 23163 - DNA, 75 bp, synthetic construct
  source 1..75: mol_type = other DNA
tggagctgagccgttcactgctgtcgggctgggtggatgcatgctgccggcagctgtctccgctggaagaggcgc

SEQ ID NO: 23164 - DNA, 75 bp, synthetic construct
  source 1..75: mol_type = other DNA
tgatcggcacctgccgtctgaacggtatcgatccggaagcgtatctgcgccatattctgagcgtactgccggaat

SEQ ID NO: 23165 - DNA, 75 bp, synthetic construct
  source 1..75: mol_type = other DNA
gcttctggctcatatcgtcaccgggaagtatgcagaccatctgccgttataccgccagtcagaaatataccgtcg

SEQ ID NO: 23166 - DNA, 75 bp, synthetic construct
  source 1..75: mol_type = other DNA
ttgagctgcttaaagccatgttgcgtaagcaacagagtcggcttcgccagtattcctgtcaggtcgcgggctatg

SEQ ID NO: 23167 - DNA, 75 bp, synthetic construct
  source 1..75: mol_type = other DNA
ggtgacggcacatactgcgataatcccgaccgctaatgtgcctgatatcaacgcactaacacccgacgaacgcaa

SEQ ID NO: 23168 - DNA, 75 bp, synthetic construct
  source 1..75: mol_type = other DNA
cgttgaagagttcattaatgaactatacgatgaactcacaggcatgatttctgacgttgacctgggcgagatgaa

SEQ ID NO: 23169 - DNA, 75 bp, synthetic construct
  source 1..75: mol_type = other DNA
taactgacaacaaggggaaaacgcatgatgtgctgaccggaagtgatgacggtcgccacagcaacacgtctctgg

SEQ ID NO: 23170 - DNA, 75 bp, synthetic construct
  source 1..75: mol_type = other DNA
gtccttcagttatgccaatgctgaggatgagcaaaaaacgcactacagcgatacccgctggcatgaagattccgt

SEQ ID NO: 23171 - DNA, 75 bp, synthetic construct
  source 1..75: mol_type = other DNA
ttttcttttttggctgtgtgtttgttcatggtgtttttgccggtccgtttcctccgcccggcatgacccttcctg

SEQ ID NO: 23172 - DNA, 75 bp, synthetic construct
  source 1..75: mol_type = other DNA
atgaaactggaagatttaccgaaatactattccccgaaatcgccaggcctgactgatgcatccgcctcgacatca

SEQ ID NO: 23173 - DNA, 75 bp, synthetic construct
  source 1..75: mol_type = other DNA
gaacatcagtccacgctgagcgcggggtatcttcatgcccggaccaacgttcccggcagtgatgatctgaacggg

SEQ ID NO: 23174 - DNA, 75 bp, synthetic construct
  source 1..75: mol_type = other DNA
gatgtcgggtggaaatatccttgctttgcaaaaaatcctcggacatcacgatataaaaatgactatgcgttacgc

SEQ ID NO: 23175 - DNA, 75 bp, synthetic construct
  source 1..75: mol_type = other DNA
ctatcatgatggcttcatttgccgcaaacgcgtctgtattaccggaaactcctgtgccatttaaaagtggtaccg

SEQ ID NO: 23176 - DNA, 75 bp, synthetic construct
  source 1..75: mol_type = other DNA
aatggttcagcgcgtatgcgatggcgggtgtggcttacagccgtgtgtcgactttctccggggattatcttcgcg

SEQ ID NO: 23177 - DNA, 75 bp, synthetic construct
  source 1..75: mol_type = other DNA
gatgagcaaaaaacgcactacagcgatacccgctggcatgaagattccgtgcgtaaccgctggttcagcgtgatg

SEQ ID NO: 23178 - DNA, 75 bp, synthetic construct
  source 1..75: mol_type = other DNA
tgaaccgtgcgggcatccagccgcttcacaggaagtgctcattcgggaactaccgggtgcagaacgacggtcagc

SEQ ID NO: 23179 - DNA, 75 bp, synthetic construct
  source 1..75: mol_type = other DNA
tactgaaccagatcgtcgaccgcagaacggcatcactgcgcagtgtcgggatgctgactaacctgaatcacggtg

SEQ ID NO: 23180 - DNA, 75 bp, synthetic construct
  source 1..75: mol_type = other DNA
atgatttcagttatgcttttgaaaaaattcgcaatgcgatttccgcgccaggagaaaataatgtttatgctgcca

SEQ ID NO: 23181 - DNA, 75 bp, synthetic construct
  source 1..75: mol_type = other DNA
gatttacagccattacctgcagactgagcacaaaaggtttgtgaaactggctgaagagctggctgccggccgctg

SEQ ID NO: 23182 - DNA, 75 bp, synthetic construct
  source 1..75: mol_type = other DNA
tggtcaccgtggcggatgtgatgagcgcgttacatgccagctatgacgacggactgtcaggggaaaaatttttgc

SEQ ID NO: 23183 - DNA, 75 bp, synthetic construct
  source 1..75: mol_type = other DNA
aaaacggtagcggagtggcgcgagtggcaactttccgaaggccagaaacgttgtgaggagatcaaccgtcagaat

SEQ ID NO: 23184 - DNA, 75 bp, synthetic construct
  source 1..75: mol_type = other DNA
ttctggcaagagtcagcagatttgtgccgcaggatgcaatccctccgtaccgtacggtggcggagtggcgggaat

SEQ ID NO: 23185 - DNA, 75 bp, synthetic construct
  source 1..75: mol_type = other DNA
ttcttgaacgggtgcgccgtctggttccaccgcacgttacagcaccgttccggacgaccgacgagtggctggaat

SEQ ID NO: 23186 - DNA, 75 bp, synthetic construct
  source 1..75: mol_type = other DNA
tcatcactgtgtctgatgtcatgagtgtgttgcacgacagttacgacaacggcaaatcaggtgaaaaatttttac

SEQ ID NO: 23187 - DNA, 75 bp, synthetic construct
  source 1..75: mol_type = other DNA
tggctgagccgcatcatgacggcacagttcactggcacctgttgtgtttcatgcgcaaaaaagaccgccgtgcca

SEQ ID NO: 23188 - DNA, 75 bp, synthetic construct
  source 1..75: mol_type = other DNA
tgtctggagcgactggattgtgtacgcgacagtcagctatccgcttctttccgttttatggcaagccatcaaggg

SEQ ID NO: 23189 - DNA, 75 bp, synthetic construct
  source 1..75: mol_type = other DNA
tgctgccgatggacgaatgccttgcccgctgcgcgctggatatctctggtcgcccgcacctggaatataaagccg

SEQ ID NO: 23190 - DNA, 75 bp, synthetic construct
  source 1..75: mol_type = other DNA
cgaccagggcgcttgcgccccttggactcgtggcaataactgtccccttgctgaaaatttgtaccaacaagggaa

SEQ ID NO: 23191 - DNA, 75 bp, synthetic construct
  source 1..75: mol_type = other DNA
tgctggctggtcaggcggcaaggcaaaagggggacaaaaaagcaggtgcgccggtactggataacccgcgccttg

SEQ ID NO: 23192 - DNA, 75 bp, synthetic construct
  source 1..75: mol_type = other DNA
cggcagaccaaacccgacctggacaaacgcgacggtaagacaaagcagcgattatctggtcggcatgtttgctgc

SEQ ID NO: 23193 - DNA, 75 bp, synthetic construct
  source 1..75: mol_type = other DNA
gttttctacactatcacctgtccgtcgcgtttccattccacgctaaataacggcagaccaaacccgacctggaca

SEQ ID NO: 23194 - DNA, 75 bp, synthetic construct
  source 1..75: mol_type = other DNA
aaggccattaacccttatctggacccggcggaagttgcgccggtttctacgctttcaaacctgatcactctgtac

SEQ ID NO: 23195 - DNA, 75 bp, synthetic construct
  source 1..75: mol_type = other DNA
atgcgcaaaaaagatcgccgcgccattactgctttgttgcgtaagtttgccattcgtgaagaccgcgaggagctg

SEQ ID NO: 23196 - DNA, 75 bp, synthetic construct
  source 1..75: mol_type = other DNA
gctgacgacgcgctaaattctgagtggataagccacggtgcaatctggaataacccaccgtacagcaatatcagg

SEQ ID NO: 23197 - DNA, 75 bp, synthetic construct
  source 1..75: mol_type = other DNA
cgcgccggtcgttcacgtgtctggtgggctccgtctgtgggcgagcaggttttactgctggccgtgggtggtgaa

SEQ ID NO: 23198 - DNA, 75 bp, synthetic construct
  source 1..75: mol_type = other DNA
atgcgcctgcaccgaaaaatggtcaggccgttggcaccaacaccattggttcttccgaggcctgtatgctcggcg

SEQ ID NO: 23199 - DNA, 75 bp, synthetic construct
  source 1..75: mol_type = other DNA
atacaccctgtacgacctctctgaacgtctgcgtctgcgcggctggcaggttccggccttcactctcggcggtga

SEQ ID NO: 23200 - DNA, 75 bp, synthetic construct
  source 1..75: mol_type = other DNA
gagtgaacaacagctcgcgaaaatttctgctgcgatggaaaaacgtctgtcacgcaaagttaagctgaattgcaa

SEQ ID NO: 23201 - DNA, 75 bp, synthetic construct
  source 1..75: mol_type = other DNA
caccgtcctggcaagcgggccgacagacaccacttttacagccgagaacctggagctggcttttagcggcgtact

SEQ ID NO: 23202 - DNA, 75 bp, synthetic construct
  source 1..75: mol_type = other DNA
atgaaagatttaacactcaaatttgccgacagggccgacttttcggcctttatgggaagtattggctattataat

SEQ ID NO: 23203 - DNA, 75 bp, synthetic construct
  source 1..75: mol_type = other DNA
tcctccgctggaagatatggagctttaccagacgtttactgatgaatactttgatcccgcatttgcggtgttggg

SEQ ID NO: 23204 - DNA, 75 bp, synthetic construct
  source 1..75: mol_type = other DNA
atctgtgcgcgttattgcggcgaaagcatatcccgcgccattgcatttggcggtgcgttcaacgtggatttatgg

SEQ ID NO: 23205 - DNA, 75 bp, synthetic construct
  source 1..75: mol_type = other DNA
gcgtattggtacatcaccatcgatccgggcagcggtcaaactgttgttgttgacgatggtgcgaaaaagcgagct

SEQ ID NO: 23206 - DNA, 75 bp, synthetic construct
  source 1..75: mol_type = other DNA
ggatgcgtgatgcgcagtcgtggagccacatcgaagttcatcccgaatgtaacgcgatttacgcggcactggact

SEQ ID NO: 23207 - DNA, 75 bp, synthetic construct
  source 1..75: mol_type = other DNA
cgtgcgaaaaactccaaccgcagcgaaaacccgctgctgcaggatgttaacaaaggctggttgcagaaaatccgt

SEQ ID NO: 23208 - DNA, 75 bp, synthetic construct
  source 1..75: mol_type = other DNA
attcagagatgagtcgaaagttatatcttttatgtatgataagaacaaaacttatatcttgtcgtttgtgattgt

SEQ ID NO: 23209 - DNA, 75 bp, synthetic construct
  source 1..75: mol_type = other DNA
cagtaatggctgggtggaaatcgacaacaacatcgcagagaacgccttacggggagtggccgtaggccggaaaaa

SEQ ID NO: 23210 - DNA, 75 bp, synthetic construct
  source 1..75: mol_type = other DNA
gcaccccgtcagccctgacggaggaagcgctgaaacggatcggcgaactgtacgccatcgaggcagagataaggg

SEQ ID NO: 23211 - DNA, 75 bp, synthetic construct
  source 1..75: mol_type = other DNA
gacccggagcaggagctgagcgaccgctgggtggtggagcagatgtcagagctgacggccatgacggcctcgttt

SEQ ID NO: 23212 - DNA, 75 bp, synthetic construct
  source 1..75: mol_type = other DNA
gttgcgtcagacccgcccccgtaagccgttccctgaatcactaccccgtgacgaaaagcgactgttgcctgcggc

SEQ ID NO: 23213 - DNA, 75 bp, synthetic construct
  source 1..75: mol_type = other DNA
aaaaatacggcacaacagaaaatagtagttgggtatcggcttctgttggttctcttctggacaaaggagccaaag

SEQ ID NO: 23214 - DNA, 75 bp, synthetic construct
  source 1..75: mol_type = other DNA
atgtttctgaaaacagaacaatttgaatataacggtgtgtctgtcacgctttccgaattgtctgcgctgcagcgt

SEQ ID NO: 23215 - DNA, 75 bp, synthetic construct
  source 1..75: mol_type = other DNA
aaaccaaaggtttggtggcttgtattgaagcagctgacgcgatgtgtaaggccgccaacgttgagttgattggct

SEQ ID NO: 23216 - DNA, 75 bp, synthetic construct
  source 1..75: mol_type = other DNA
aaaaaagcgcatagcagaactggaagccgaacctgtaagccaaacttgcaagttgaacgagccatcgggcaactc

SEQ ID NO: 23217 - DNA, 75 bp, synthetic construct
  source 1..75: mol_type = other DNA
gaagacgtggtgttgtgcctgtccgggatgatcgaagctgttcgtccggatactgatattactgaagtggcgaaa

SEQ ID NO: 23218 - DNA, 75 bp, synthetic construct
  source 1..75: mol_type = other DNA
gggccacactgcatattgaggtgtttttaccagcacaggtaccggattcggagctggattcgtggatggaaagcc

SEQ ID NO: 23219 - DNA, 75 bp, synthetic construct
  source 1..75: mol_type = other DNA
gagaaaaacgggagcaggtaaaggagagctttcgccgcaatgaagatctgaccccgcttgtacgccttgcccagg

SEQ ID NO: 23220 - DNA, 75 bp, synthetic construct
  source 1..75: mol_type = other DNA
ccatcgataatatggttcgtaatgtgcgcaatgctttttctgggctatatggttctgataatcaaaagcaggaaa

SEQ ID NO: 23221 - DNA, 75 bp, synthetic construct
  source 1..75: mol_type = other DNA
acgatggttacgcagggctatgagtatcgtcgtgatgacgatatggcgttatggagctctgcagatctgacttat

SEQ ID NO: 23222 - DNA, 75 bp, synthetic construct
  source 1..75: mol_type = other DNA
ccagtcagaagtctggcaagaaagatgcagtgatttggttcactgcgaaaagtgtagcgcgcgccaatctccaac

SEQ ID NO: 23223 - DNA, 75 bp, synthetic construct
  source 1..75: mol_type = other DNA
taccaggacaagagccattacaggtattgatggtgatataagaatcaacaaggcgttgtgggtgattgccgaaca

SEQ ID NO: 23224 - DNA, 75 bp, synthetic construct
  source 1..75: mol_type = other DNA
taccaggacaagagccattacaggtattgatggtgatatccgaatcaacaaggcgttatggatgattgccgaaca

SEQ ID NO: 23225 - DNA, 75 bp, synthetic construct
  source 1..75: mol_type = other DNA
taccagaacaagagccattacaggcattgacggtgatatccgaatcaacaaagcattatggatgattgccgaaaa

SEQ ID NO: 23226 - DNA, 75 bp, synthetic construct
  source 1..75: mol_type = other DNA
atctccttgctggacagcctgcagcgagaaggcttccagccattctttgcctgtcagacccgtgtgcgtgatccg

SEQ ID NO: 23227 - DNA, 75 bp, synthetic construct
  source 1..75: mol_type = other DNA
attgctgataatatcgcgacgattttacgcgatcagggcgtcgatattatcctcaatgcccatgtggagcgaatc

SEQ ID NO: 23228 - DNA, 75 bp, synthetic construct
  source 1..75: mol_type = other DNA
ggcggcgggctgttctgtctcttgaagaacatcataaagcctggttgttgtggtgttacagcgggagtatttgtt

SEQ ID NO: 23229 - DNA, 75 bp, synthetic construct
  source 1..75: mol_type = other DNA
ccggctcatcaccgcttgaagttgctgccgcaaaagcctgtgcggaaattgaaaaaacgccggtcaggattcgtg

SEQ ID NO: 23230 - DNA, 75 bp, synthetic construct
  source 1..75: mol_type = other DNA
cagttgcaggcatgggcagagcagcaggtcagggcgaatccccttcagcattccgataaccagtttctcgatgaa

SEQ ID NO: 23231 - DNA, 75 bp, synthetic construct
  source 1..75: mol_type = other DNA
tgcgtgagcagctcattatcgccaccgctgatttgagtggggcaacaaaaggtcagcttgaagcctggcaagaga

SEQ ID NO: 23232 - DNA, 75 bp, synthetic construct
  source 1..75: mol_type = other DNA
ctttacctgattgacctagaacacgcattacgcgtctctggcattcgcatcaaaggagaggagcatggaaataaa

SEQ ID NO: 23233 - DNA, 75 bp, synthetic construct
  source 1..75: mol_type = other DNA
cggtagccggactgggcatgcatatgctgccagccacaaaagccattcctaaagagatgctaccgatcgtcgaca

SEQ ID NO: 23234 - DNA, 75 bp, synthetic construct
  source 1..75: mol_type = other DNA
atgatcgacgaacgtgaatttggcaaaaaattacaggcaggcagaaaaagtgtgtcaggagggcataaatacaga

SEQ ID NO: 23235 - DNA, 75 bp, synthetic construct
  source 1..75: mol_type = other DNA
cggcgtgaaatagccagaaaattcggtatgccgctgcgcacagtgaataactacgtctatttcgacaggagggtt

SEQ ID NO: 23236 - DNA, 75 bp, synthetic construct
  source 1..75: mol_type = other DNA
acaacaacccgtctgttacatgcagcaacggaagcggtcgcccatgtgatcgccgaactggagctctggaaacgt

SEQ ID NO: 23237 - DNA, 75 bp, synthetic construct
  source 1..75: mol_type = other DNA
cccgcttatcaacttttactgaatgataagctggccgacggcgcaggcgcgggctggcttgcggccagtcacaca

SEQ ID NO: 23238 - DNA, 75 bp, synthetic construct
  source 1..75: mol_type = other DNA
atggaaataaagacacggagagaaaccaggcagacgttggcgcagtggtttgaagagaagggatttcagaaggga

SEQ ID NO: 23239 - DNA, 75 bp, synthetic construct
  source 1..75: mol_type = other DNA
atgacacagtttcttatcgcgcgtgcaattcagggcaccagtatctgttttattgccaccgttggttatgtcacg

SEQ ID NO: 23240 - DNA, 75 bp, synthetic construct
  source 1..75: mol_type = other DNA
taactgcaatatttgaattattctgtttcgttatatcagttcctgtggttgccatttacttaatttttatactct

SEQ ID NO: 23241 - DNA, 75 bp, synthetic construct
  source 1..75: mol_type = other DNA
ctcaattatccgggccatgatggaaggcggcacagcaaaaatttatcactgcaacgattctgataaatgcctgaa

SEQ ID NO: 23242 - DNA, 75 bp, synthetic construct
  source 1..75: mol_type = other DNA
accgtgtatgaagattctcaaccggggacgctgaatgattttctcggtgccatgtcggaggatgacgtccgtccg

SEQ ID NO: 23243 - DNA, 75 bp, synthetic construct
  source 1..75: mol_type = other DNA
tcgggaatatcagcgttactgtaatcttggttgggaaacaggacaacctgatggtgacgcaggctatgcactctg

SEQ ID NO: 23244 - DNA, 75 bp, synthetic construct
  source 1..75: mol_type = other DNA
agattgcggttttccaggggcaggtaaaggtccagcaggatgcattgctggttgttgaccgtcagatgagctaca

SEQ ID NO: 23245 - DNA, 75 bp, synthetic construct
  source 1..75: mol_type = other DNA
atgtttacatgtaactatagccatgctcgcgataacctggcctcgttgctcgagctggcggttgatgaaaatcag

SEQ ID NO: 23246 - DNA, 75 bp, synthetic construct
  source 1..75: mol_type = other DNA
tgtgctgctgctgaacacctgctcaatccgcgagaaggctcaggaaaaagtcttccatcagttgggtcgctggaa

SEQ ID NO: 23247 - DNA, 75 bp, synthetic construct
  source 1..75: mol_type = other DNA
accacgaaagcgtcagaagcagccacttcagcacgggatgcgtcggcttcaaaagaggcggcaaaatcatcagaa

SEQ ID NO: 23248 - DNA, 75 bp, synthetic construct
  source 1..75: mol_type = other DNA
aaatcgactaaaaatgtcctgcgagggcttcattttcagaaaacaaagcctcagggaaaactagtttcagtaacc

SEQ ID NO: 23249 - DNA, 75 bp, synthetic construct
  source 1..75: mol_type = other DNA
actattataatccttactcgcaacagacactgtcatgggatgatcctgagttgggtattctatggccattagaca

SEQ ID NO: 23250 - DNA, 75 bp, synthetic construct
  source 1..75: mol_type = other DNA
gaactggactttattgataaagtcttctttgtggtcgacaggaaagacctcgattaccagaccatgaaggaatat

SEQ ID NO: 23251 - DNA, 75 bp, synthetic construct
  source 1..75: mol_type = other DNA
ggcggctggtggacgacccacaggtaaaacataccagcaagggaacacccatgacactggcacggatggcggtat

SEQ ID NO: 23252 - DNA, 75 bp, synthetic construct
  source 1..75: mol_type = other DNA
cgagtcaatcgcccactcaaacaaacggttacgaacgccaccaacccgaccagacgctgctctaccagctggttg

SEQ ID NO: 23253 - DNA, 75 bp, synthetic construct
  source 1..75: mol_type = other DNA
aagcatggttgagcgaattacaggacgttcttgatcgctgcccatcaccgaaaaaaattggtttttacaccattg

SEQ ID NO: 23254 - DNA, 75 bp, synthetic construct
  source 1..75: mol_type = other DNA
gtcctggcgtttggcagacaggccgaagcactggcaaagcaccgcaagggtgaactcctgagcgtggcgggtaac

SEQ ID NO: 23255 - DNA, 75 bp, synthetic construct
  source 1..75: mol_type = other DNA
cacggtgctggcggatttacagcgcacatttgaggagaagatggccgcgcaggcacaagcgtttgaagagaaact

SEQ ID NO: 23256 - DNA, 75 bp, synthetic construct
  source 1..75: mol_type = other DNA
ccgatgatgtgcgtccgatgcttgagcagatggtgaaagaggctgtaagccatatccctgctccgcgtgacggtc

SEQ ID NO: 23257 - DNA, 75 bp, synthetic construct
  source 1..75: mol_type = other DNA
taacctattttccacttgaagacctcattaaaaataatggcaaaaaaatcaggtctgataagaaacacttcttag

SEQ ID NO: 23258 - DNA, 75 bp, synthetic construct
  source 1..75: mol_type = other DNA
gcactgcaacagtatgaccggtgataaacccggagaagctcattcatcaggctggaccctggctgcaaaacgtgg

SEQ ID NO: 23259 - DNA, 75 bp, synthetic construct
  source 1..75: mol_type = other DNA
agcatggcacggcacatcgaaaaatgtttcgacctgcctgtcggatggcttgatcaagaacaccagacaacgaac

SEQ ID NO: 23260 - DNA, 75 bp, synthetic construct
  source 1..75: mol_type = other DNA
ctgaaaagccgactggacaataagcccatctctcgtctcccctacctcactctcccccttctcgtttggcgcgat

SEQ ID NO: 23261 - DNA, 75 bp, synthetic construct
  source 1..75: mol_type = other DNA
ggtcttgcctggcgaattgttcagggcgatgtgccggaagtgatggctgactgtacgatttactctctcgatatc

SEQ ID NO: 23262 - DNA, 75 bp, synthetic construct
  source 1..75: mol_type = other DNA
aaacatgaagtcagccgtctcgatgtggtgaactttatctctcatggcacgcgtaaagacgagccgacacagtct

SEQ ID NO: 23263 - DNA, 75 bp, synthetic construct
  source 1..75: mol_type = other DNA
cgcgcatttcatgaagccggattgtggaaccactttcaggaaatcgccttcgatatgagcgcggtgctctcaact

SEQ ID NO: 23264 - DNA, 75 bp, synthetic construct
  source 1..75: mol_type = other DNA
taaaaacaggtgaaaatgttctccgggctgctgtggaacggattaactgggtttttgatacttttgcggagattt

SEQ ID NO: 23265 - DNA, 75 bp, synthetic construct
  source 1..75: mol_type = other DNA
gtgcacagccaggcatttcataccgaacgggcctgtcgcgatgcattgcgcgccattaaaaaggagaatgttggc

SEQ ID NO: 23266 - DNA, 75 bp, synthetic construct
  source 1..75: mol_type = other DNA
gaaattaatgagcttgaaattattgccgggcaggcaatactgcctgaagagagttttctctggttgaaaactgac

SEQ ID NO: 23267 - DNA, 75 bp, synthetic construct
  source 1..75: mol_type = other DNA
tgctgttcggcaagctcgcggaagtggcaggtgaatatctgcgcaagggtgcgcaggtctacatcgaaggtcagc

SEQ ID NO: 23268 - DNA, 75 bp, synthetic construct
  source 1..75: mol_type = other DNA
aagatgagccggttacccaggcgcgattacaatcctacttcactcaggaggggtataccgtttccgttacggcga

SEQ ID NO: 23269 - DNA, 75 bp, synthetic construct
  source 1..75: mol_type = other DNA
cagcaacatgtcaaagtcagcagcgggtacggtcagccagccggggcgcaatgtccgggcaaaatcaggtttaaa

SEQ ID NO: 23270 - DNA, 75 bp, synthetic construct
  source 1..75: mol_type = other DNA
aacgtagtataaacgtatacttaaatgcagggttacttgaagaagcaaaagatcttgatctgaatgtttctgcta

SEQ ID NO: 23271 - DNA, 75 bp, synthetic construct
  source 1..75: mol_type = other DNA
ccgcgctggcggcggggattagccccaattacatcaatgcccacggtaaaccgcagtcgattagcgccgaaacca

SEQ ID NO: 23272 - DNA, 75 bp, synthetic construct
  source 1..75: mol_type = other DNA
gcgctaagaaagtggccggcaagacgatggagcggctgaagaaactgatatggctggcggcacaggacgtgaaag

SEQ ID NO: 23273 - DNA, 75 bp, synthetic construct
  source 1..75: mol_type = other DNA
cttgatagtgaggctttattgtttgtaatgagaacacgttcaaaacaaaaggcggcattttcaaagcaaagtgtt

SEQ ID NO: 23274 - DNA, 75 bp, synthetic construct
  source 1..75: mol_type = other DNA
gcacgtccgatggcgcgtgtcatccaggacaacctgaaaaaaccgctcgccaacgaactgctgtttggttcgctg

SEQ ID NO: 23275 - DNA, 75 bp, synthetic construct
  source 1..75: mol_type = other DNA
ttcgccagcagctgatagtggccaccgccgatctgagtggtgcgacgaaagggcaactggtagcttttgcagaga

SEQ ID NO: 23276 - DNA, 75 bp, synthetic construct
  source 1..75: mol_type = other DNA
ttcgcgagcaactcatggtggctaccgctgatttgagcggagtaacgaaaggccagcttgaagcctggctggagc

SEQ ID NO: 23277 - DNA, 75 bp, synthetic construct
  source 1..75: mol_type = other DNA
aggatgaggtgctgaggctgaaacaaatcagtgggctgacagagctgtttcaggatgaaaatttcagtccggcat

SEQ ID NO: 23278 - DNA, 75 bp, synthetic construct
  source 1..75: mol_type = other DNA
aggatgggtttacacaaccagtcgtggtatcggaagaaaaagatcattatctggtggtggatggttatcatcgtc

SEQ ID NO: 23279 - DNA, 75 bp, synthetic construct
  source 1..75: mol_type = other DNA
tttacaggcagagggtatctgttacgtaccgatgctttgtcgtatccggtgctacaccttaaacgtctgggcctg

SEQ ID NO: 23280 - DNA, 75 bp, synthetic construct
  source 1..75: mol_type = other DNA
tcgatcagatgaaagatgtacgggagaaggctactaaatcttatgatgaggctgaatatgtagttgataagaaaa

SEQ ID NO: 23281 - DNA, 75 bp, synthetic construct
  source 1..75: mol_type = other DNA
aggatgaagtgctgagactgaaacagattagcgggctggcggaactgtttcaggaagaaaatttcagtcaatcct

SEQ ID NO: 23282 - DNA, 75 bp, synthetic construct
  source 1..75: mol_type = other DNA
gcagccagcaacgccgagaaaattgcccgtaaggggggactgtcaagcgacgcagtacaggcgcttcgtcgcgag

SEQ ID NO: 23283 - DNA, 75 bp, synthetic construct
  source 1..75: mol_type = other DNA
tgacagaaattcctcagggcatggagctaacaattaatgagaaaggcgaaccaatactgattgaggttaatcagt

SEQ ID NO: 23284 - DNA, 75 bp, synthetic construct
  source 1..75: mol_type = other DNA
tggaccaggatgaagtgctgaggctgaaacagattagcgggctgacagagctgtttcaggaagagaatttcagcc

SEQ ID NO: 23285 - DNA, 75 bp, synthetic construct
  source 1..75: mol_type = other DNA
atgcaaacttataacaccaatcccgcttacgaaatggctccccagctcctggagcactttaaccagcatctggat

SEQ ID NO: 23286 - DNA, 75 bp, synthetic construct
  source 1..75: mol_type = other DNA
gaatggcattatcccggagcaggccagggtaatcacgcaggtggtgatactggatgcggataaaaagcagataca

SEQ ID NO: 23287 - DNA, 75 bp, synthetic construct
  source 1..75: mol_type = other DNA
tggatgcggataaaaagcagatacagtgcgtggtaagaccgctgcaaatcctgcgtgctgacgggaggtgggaaa

SEQ ID NO: 23288 - DNA, 75 bp, synthetic construct
  source 1..75: mol_type = other DNA
gacctgagtaccgtagaaaaagaaaccatcgatactatatccggtaacgtgcgtcgtgcctttatcggtctgtac

SEQ ID NO: 23289 - DNA, 75 bp, synthetic construct
  source 1..75: mol_type = other DNA
ttgcgcctgactgatatcgtgctggaaaaagtttcttccggcaggccagcaggcggctatcaccaccggtataca

SEQ ID NO: 23290 - DNA, 75 bp, synthetic construct
  source 1..75: mol_type = other DNA
ctgaagcctggcgtgatgactacgaagcaggaaaaactccggtcgaagcatattgtgatgagtggggcgatgaat

SEQ ID NO: 23291 - DNA, 75 bp, synthetic construct
  source 1..75: mol_type = other DNA
cgtttgtgatgagtgtggatgttgccagcgactcttttatgcagacggcggagatgctgctggagaagaaggcga

SEQ ID NO: 23292 - DNA, 75 bp, synthetic construct
  source 1..75: mol_type = other DNA
tctgcgacttaaacgcctgggcctgtcaaaaacgtttcgtcgtctggtcgtaacgctcatccgccgttatggcgt

SEQ ID NO: 23293 - DNA, 75 bp, synthetic construct
  source 1..75: mol_type = other DNA
ctgaagcctggcgtgatgactacgaagcaggaaaaacacctgtcgaagcatattgtgatgagtggggcgatgaat

SEQ ID NO: 23294 - DNA, 75 bp, synthetic construct
  source 1..75: mol_type = other DNA
atgtccttaaaaggtcttcgctttacgctggaggttgacggccaggagccggacacctttgcagtgttgagcttc

SEQ ID NO: 23295 - DNA, 75 bp, synthetic construct
  source 1..75: mol_type = other DNA
tctgttgccattggtggtggcgtggggctgatcggtgtcgatgctattcgtggggctgcaatgcgagtaatcggt

SEQ ID NO: 23296 - DNA, 75 bp, synthetic construct
  source 1..75: mol_type = other DNA
ataggaaatacgcggtcgttacccgctcaggttggacatcaaatgatgacaatgtagttgtatttcagtcaatcg

SEQ ID NO: 23297 - DNA, 75 bp, synthetic construct
  source 1..75: mol_type = other DNA
gattaatgcccgccgacgtgatgccggtcagcgggaactgaccaccgcgcaggtgatggatgaaatctgcgaata

SEQ ID NO: 23298 - DNA, 75 bp, synthetic construct
  source 1..75: mol_type = other DNA
atgaaaatgcacaatgtccctcattcctggcctgacttactggaactcttacaaagttggtggcgtggagacaca

SEQ ID NO: 23299 - DNA, 75 bp, synthetic construct
  source 1..75: mol_type = other DNA
ttcacgccagccataaagattggctgcatgatgtttatcgctcacctgtatgaaaatcgccagattgtcgcggat

SEQ ID NO: 23300 - DNA, 75 bp, synthetic construct
  source 1..75: mol_type = other DNA
ttacagccctctctgtgccgggtaaaaccgtgtcagatgattttattcatgctgttctcagtaactgcgccacaa

SEQ ID NO: 23301 - DNA, 75 bp, synthetic construct
  source 1..75: mol_type = other DNA
aagccgattacatcgcacagcggcatcgtcgcctacaggaccagtggcacatctactgcaattcgctggttcagg

SEQ ID NO: 23302 - DNA, 75 bp, synthetic construct
  source 1..75: mol_type = other DNA
ggctcattgaggagtgccgcggagaatgcccgccccgtgtcaggaaaaattatattctccagtgtggcccgggcc

SEQ ID NO: 23303 - DNA, 75 bp, synthetic construct
  source 1..75: mol_type = other DNA
gcaaaacaccgcgcacaaaaagcggtggatgagctggtggattgtgtggcagagctggaaacaaaagttggaaaa

SEQ ID NO: 23304 - DNA, 75 bp, synthetic construct
  source 1..75: mol_type = other DNA
aaacaattcactgaacaagccctgagtaatattgccaggagcttaggtgttgatattgctgatctctttacctca

SEQ ID NO: 23305 - DNA, 75 bp, synthetic construct
  source 1..75: mol_type = other DNA
ttgcgctggcgctcatgtccgggaaaaacaaaacagcgtcagccattgccgccggttattcggcgaagaccgcca

SEQ ID NO: 23306 - DNA, 75 bp, synthetic construct
  source 1..75: mol_type = other DNA
aatcgatggtgcagttgcgctgattatggcggttggcagagccatgctgtacgagaaagaagacacgctgtctga

SEQ ID NO: 23307 - DNA, 75 bp, synthetic construct
  source 1..75: mol_type = other DNA
cgcagcattaatggtagaacggattgaggcacacaatagccctggttctcttgcgtattgtgaacaacgcgaccg

SEQ ID NO: 23308 - DNA, 75 bp, synthetic construct
  source 1..75: mol_type = other DNA
atttgacacttcaggaccgactcgttaaggagctcaggcttaaggggatctgtacaatagaagcggccaatgcat

SEQ ID NO: 23309 - DNA, 75 bp, synthetic construct
  source 1..75: mol_type = other DNA
tactatctggctggtgctttacatagtggaacgggcaaagtcagctatgtgggtggcaacagcaaaagctcagcc

SEQ ID NO: 23310 - DNA, 75 bp, synthetic construct
  source 1..75: mol_type = other DNA
ctcagcgcacgtgatctgagtagtcgtttcaattacacggtcgcatccttgcatacttgccgccttactgtacta

SEQ ID NO: 23311 - DNA, 75 bp, synthetic construct
  source 1..75: mol_type = other DNA
agcaactggctctggcactgctgcgcaaggtcggcgtgcgcatgctggtgattgtcgacaacctctcgcgcaacc

SEQ ID NO: 23312 - DNA, 75 bp, synthetic construct
  source 1..75: mol_type = other DNA
acagattgatattgaatgggattatgcgaataatgtcattattattctgccgtctggcattgcacctagctactt

SEQ ID NO: 23313 - DNA, 75 bp, synthetic construct
  source 1..75: mol_type = other DNA
ctatcaatgaagccttgcgcaaaatgaaaaaagcggggattgataaacctgaactggaggaattttttcgggagc

SEQ ID NO: 23314 - DNA, 75 bp, synthetic construct
  source 1..75: mol_type = other DNA
aagaaagagccagaaatgacggtcagatattatatcagttctgctgatttaaccgctgagaaattcgccacagcg

SEQ ID NO: 23315 - DNA, 75 bp, synthetic construct
  source 1..75: mol_type = other DNA
gaagctcagatggagcgtaaagagtcatcctttaatcagacagagtttaataaggtacttcttgagtgtgttgta

SEQ ID NO: 23316 - DNA, 75 bp, synthetic construct
  source 1..75: mol_type = other DNA
catcgattttgcaggaaaatggaggccagatttaatagtctatccccctcttgatccggcaggcccattggttgc

SEQ ID NO: 23317 - DNA, 75 bp, synthetic construct
  source 1..75: mol_type = other DNA
atgccatttgctcgttatttctgcattttcataaacgttggtttgggagaagcggcaaaacgaaatgtgggaaca

SEQ ID NO: 23318 - DNA, 75 bp, synthetic construct
  source 1..75: mol_type = other DNA
atgatgccgcgtattaaacctctttttattctttgtgccgccttactgacggtgacgcctgcagtgtcagcggat

SEQ ID NO: 23319 - DNA, 75 bp, synthetic construct
  source 1..75: mol_type = other DNA
agacacactgaccaccacagaaaaatcagtcacgcacagtgacggtaacctcatgctgaacagcgcgtcttccac

SEQ ID NO: 23320 - DNA, 75 bp, synthetic construct
  source 1..75: mol_type = other DNA
cacgctgcggctgcactggcacaccactatttctggaaggacaacacacttctacgcatgatgccgcgtaaacgt

SEQ ID NO: 23321 - DNA, 75 bp, synthetic construct
  source 1..75: mol_type = other DNA
tttcagacaccagtaaagatgcggttaacggttcccagttgaaagaaaccaaagacgatgtggccaccaacacag

SEQ ID NO: 23322 - DNA, 75 bp, synthetic construct
  source 1..75: mol_type = other DNA
caagcatcgaccgcgcttgatggtggtggggctagcgaaagcactccattgaccgatacctggattgccattggt

SEQ ID NO: 23323 - DNA, 75 bp, synthetic construct
  source 1..75: mol_type = other DNA
gaattgaattgctggatatcagcaaagagcatctgcgtcaggatttcgacgactccccggaaatcattcagagcg

SEQ ID NO: 23324 - DNA, 75 bp, synthetic construct
  source 1..75: mol_type = other DNA
attgccgtgggcaactgcccggaaagctataagccgcaactggctgaaggcagcgggcgcacccagaccgtgcgc

SEQ ID NO: 23325 - DNA, 75 bp, synthetic construct
  source 1..75: mol_type = other DNA
gataatgcctgcgtggaaagcttctttcattcgctgaaagtggaatgtatccatggagaacactttatcagccgg

SEQ ID NO: 23326 - DNA, 75 bp, synthetic construct
  source 1..75: mol_type = other DNA
gaagatcgcatacttcaactcgaccaggaaatatctcgcctgttacctgagtggtctctgtgcaatctggtctgc

SEQ ID NO: 23327 - DNA, 75 bp, synthetic construct
  source 1..75: mol_type = other DNA
atgcattcggaaaatattgcggcttacgtcgggctggatgtgcataaagaaacgttggcggttgctattgctgca

SEQ ID NO: 23328 - DNA, 75 bp, synthetic construct
  source 1..75: mol_type = other DNA
tgttgctgccgggttatgtgaaggggatgagcagtcgccggaaaagcgccccgtaattttagaggcgcagaatgt

SEQ ID NO: 23329 - DNA, 75 bp, synthetic construct
  source 1..75: mol_type = other DNA
gcggtaaaacgttcctggcatgtgcacttggtcataatgcctgccgacagggatacaaggtctactattatcgcc

SEQ ID NO: 23330 - DNA, 75 bp, synthetic construct
  source 1..75: mol_type = other DNA
gtctggtcgtgggcgtgcgccaaaaccgattgctgaagcattggcaagcggtcgctctcttgatgagtttctcat

SEQ ID NO: 23331 - DNA, 75 bp, synthetic construct
  source 1..75: mol_type = other DNA
gaatcacggacctcaacaaacaggccggtgatgaagtgacgttcagcatcatgcacaaactctctaaacgtccga

SEQ ID NO: 23332 - DNA, 75 bp, synthetic construct
  source 1..75: mol_type = other DNA
gtctggtcgtggacgtgcgccaaaaccgattaatgaagcgttgaaagccgggcgttctattgatgaatttctcat

SEQ ID NO: 23333 - DNA, 75 bp, synthetic construct
  source 1..75: mol_type = other DNA
cgagcacaccattgataacagcggctttaccacgcagcttgagcttgaagcaaaaatcccggaatggatagcaga

SEQ ID NO: 23334 - DNA, 75 bp, synthetic construct
  source 1..75: mol_type = other DNA
attctgaaaaacatgtccgacttaagcctggaaacgacgctgtttaatgagaaattgtcgatgccggtggcactg

SEQ ID NO: 23335 - DNA, 75 bp, synthetic construct
  source 1..75: mol_type = other DNA
atggagcaaaacccgcagtcacagctgaaacttcttgtcacccgtggtaaggagcaaggctatctgacctatgcc

SEQ ID NO: 23336 - DNA, 75 bp, synthetic construct
  source 1..75: mol_type = other DNA
tcagttccgcattgctgaccgcgaggcgtatacgggggtacgcgcttactggcttgatcttaattacgggaaaaa

SEQ ID NO: 23337 - DNA, 75 bp, synthetic construct
  source 1..75: mol_type = other DNA
aggtatcccggcaacagagatgttcaaagttattccactgtcgccaggccatacctatgggatgtttatggaacg

SEQ ID NO: 23338 - DNA, 75 bp, synthetic construct
  source 1..75: mol_type = other DNA
atctggtccccggaagagattcaggccctcgctgacggaatggatatttccctgtccgatcatgaaatcaggacc

SEQ ID NO: 23339 - DNA, 75 bp, synthetic construct
  source 1..75: mol_type = other DNA
cgtcccggaatgcgtcacccgccgtcaggcggtggttaatcaggcccgcatcctgctgaaaaacaacacacacga

SEQ ID NO: 23340 - DNA, 75 bp, synthetic construct
  source 1..75: mol_type = other DNA
acgagctggtttgtcagccaaaatgagcattcgtgcgatagctactgcgctgaatcgcagtccttcgacgatctc

SEQ ID NO: 23341 - DNA, 75 bp, synthetic construct
  source 1..75: mol_type = other DNA
atgtacggaacatgcgaaacgctatgccgggagctggcagcaaagtatccgggagacgcgccgctgatgctggtt

SEQ ID NO: 23342 - DNA, 75 bp, synthetic construct
  source 1..75: mol_type = other DNA
gtcctggcgcgcctggaggacatcccggaagaccagcggattgagtccggtatttcttccggcgtggcgatggag

SEQ ID NO: 23343 - DNA, 75 bp, synthetic construct
  source 1..75: mol_type = other DNA
tctccggcagcattcattacgacaacgtggcaccgtgttttcttggtggtatgcagttgatgatcgaagaaaacg

SEQ ID NO: 23344 - DNA, 75 bp, synthetic construct
  source 1..75: mol_type = other DNA
atgtttgaagaacgtttagagactattcggtctgtttgtgaaaacttaaagttacaagccaatccagccttaaga

SEQ ID NO: 23345 - DNA, 75 bp, synthetic construct
  source 1..75: mol_type = other DNA
gattccaaagtggtgtatcgaccgtatcccttccgatgctcaaattataggtgaaacggaactacattatcttgt

SEQ ID NO: 23346 - DNA, 75 bp, synthetic construct
  source 1..75: mol_type = other DNA
aatctactgcttcgactgactggtatgatgttacaggtaatagcctgtatccgggcgttgtaacagaagcaaatg

SEQ ID NO: 23347 - DNA, 75 bp, synthetic construct
  source 1..75: mol_type = other DNA
caaagatgattggctgtcatgaatcgaagataagcagaacggactggaggtttattgcttcggtcttgtgtgctt

SEQ ID NO: 23348 - DNA, 75 bp, synthetic construct
  source 1..75: mol_type = other DNA
ctacaagtcagagggtgaaatgattcttagtattgcgtcggactatgcggaatatgtggcagagacgcgttacag

SEQ ID NO: 23349 - DNA, 75 bp, synthetic construct
  source 1..75: mol_type = other DNA
atggagaaaaccttcactggcaacctgtagaaacgaaattgacgacatcctgaaagcgtcattatttgttttgta

SEQ ID NO: 23350 - DNA, 75 bp, synthetic construct
  source 1..75: mol_type = other DNA
taacattcctgtaatcgctgtgaaacctaggggggcagaacgcatccctgtaataattcaagagaatgctgatgt

SEQ ID NO: 23351 - DNA, 75 bp, synthetic construct
  source 1..75: mol_type = other DNA
gttcagcttattaatgctgatggtctcaaacgcaccctgaaaggcggtcaggtcaaaggggcatgtcatatcatc

SEQ ID NO: 23352 - DNA, 75 bp, synthetic construct
  source 1..75: mol_type = other DNA
cccgcaagggtttccccgaccgggaatgtctgatgctcacagccatacataaaaccggcggcgtgacgttccgcg

SEQ ID NO: 23353 - DNA, 75 bp, synthetic construct
  source 1..75: mol_type = other DNA
gcatgccggacaggaagtggagctgccggagctgcaggggcagacccggcgtgaaatgatccagttgtgggggtg

SEQ ID NO: 23354 - DNA, 75 bp, synthetic construct
  source 1..75: mol_type = other DNA
gatgcgtgtgaaggtgttgttgccctgccgccggtcttcggtgactggaatgatgccttcacgcagtacggcggg

SEQ ID NO: 23355 - DNA, 75 bp, synthetic construct
  source 1..75: mol_type = other DNA
acttcacactattcagtctgaacgattaaaaacggacttctctttatttaaaaaacaaccatctattgaaagtgc

SEQ ID NO: 23356 - DNA, 75 bp, synthetic construct
  source 1..75: mol_type = other DNA
atggccgttaaagcctccgggcgttttgtccctccgtcagcatttgccgcaggcaccggtaagacgaccggtgct

SEQ ID NO: 23357 - DNA, 75 bp, synthetic construct
  source 1..75: mol_type = other DNA
acagtggtgattttgcgttgtatatcagcgcgcagggtggggcaaatgtcccgcgcgattgtcagactgtcaggg

SEQ ID NO: 23358 - DNA, 75 bp, synthetic construct
  source 1..75: mol_type = other DNA
agattgttgatgaaatctgcgattttgtggtgaatcagcaggcggttttcctcggcggtcactatatccttcagg

SEQ ID NO: 23359 - DNA, 75 bp, synthetic construct
  source 1..75: mol_type = other DNA
acagcgttctttgagtggcttctctatggtgatctatacctacactacttccacctgaatatggagtattgggga

SEQ ID NO: 23360 - DNA, 75 bp, synthetic construct
  source 1..75: mol_type = other DNA
ggggcgaggaaccgcccctgaatggcaaatgaaacgggaaatgttgagtcagtgttatacaactaaatggcgaga

SEQ ID NO: 23361 - DNA, 75 bp, synthetic construct
  source 1..75: mol_type = other DNA
tcgatggcatccctgattgcgatggccggtgacacggtcattatgccggaaaatgccttcatgatgatccataaa

SEQ ID NO: 23362 - DNA, 75 bp, synthetic construct
  source 1..75: mol_type = other DNA
ggaaggtttcaccactgacggcattgccacaaaaatccgtattgatgccggagtggcaccacttgactggcgcgg

SEQ ID NO: 23363 - DNA, 75 bp, synthetic construct
  source 1..75: mol_type = other DNA
agagcagattgatcaaaaaatttaccgcactaggcccgtatattcgtgaaggtaagtgcgaagataatcgattct

SEQ ID NO: 23364 - DNA, 75 bp, synthetic construct
  source 1..75: mol_type = other DNA
gactggtgagagacgctgatgattttgtcgcagtggcaatcgccggtttcaatcagatgaatcgtggtggcccgg

SEQ ID NO: 23365 - DNA, 75 bp, synthetic construct
  source 1..75: mol_type = other DNA
gccgcgcccgtgccaaatttacctggcaattcctggagcaatatccggctgctcaggactgcgcttataaatttc

SEQ ID NO: 23366 - DNA, 75 bp, synthetic construct
  source 1..75: mol_type = other DNA
gcactgacccggtcagaggcggtgttgcagaaaagtctggagaaaacggaagaggcagatttggcactgagaaac

SEQ ID NO: 23367 - DNA, 75 bp, synthetic construct
  source 1..75: mol_type = other DNA
ctgatgaagaggtgaagaagctgcgggcggaagtgaccgcattagcggttgaggcggaatctgccatcgccgtcc

SEQ ID NO: 23368 - DNA, 75 bp, synthetic construct
  source 1..75: mol_type = other DNA
tccagttcagatgcttccactgaaaaactgaaaagcctcggcattcacgtttttgatctcaacgaagtcgacagc

SEQ ID NO: 23369 - DNA, 75 bp, synthetic construct
  source 1..75: mol_type = other DNA
taagcttcagcgaggcagctcacgccataacggactatatcgttggatattacagcgcactaagaccgcacgaat

SEQ ID NO: 23370 - DNA, 75 bp, synthetic construct
  source 1..75: mol_type = other DNA
atagagcgactctggaatccgcagggtatggctacgcagcctgcacaaccggcagcaggcacgtcagccaggaca

SEQ ID NO: 23371 - DNA, 75 bp, synthetic construct
  source 1..75: mol_type = other DNA
tgctgggataacagcccaatggagcgcttcttcaggagtctgaagaacgaatgggtgccggcgacgggctatgta

SEQ ID NO: 23372 - DNA, 75 bp, synthetic construct
  source 1..75: mol_type = other DNA
cacaaactgatgcagtggaaactgaggtatctgatatcccaaaaaatgaaaccgcgccggaagctgaaccatctg

SEQ ID NO: 23373 - DNA, 75 bp, synthetic construct
  source 1..75: mol_type = other DNA
gcccttcgctacgaccgccaaactatttttggccttgtccgtgagcgtccgatcgacattcacaaagatcccgta

SEQ ID NO: 23374 - DNA, 75 bp, synthetic construct
  source 1..75: mol_type = other DNA
atgatcggaagcatgcctaactgtgatcgattcagatgccattttgcaaccactgtgcagggagtcttgccggtt

SEQ ID NO: 23375 - DNA, 75 bp, synthetic construct
  source 1..75: mol_type = other DNA
aagagaagctgttactgcattgataaaacttggtaatttacatagtaatgacttcttgtttcgatcccgggtcgg

SEQ ID NO: 23376 - DNA, 75 bp, synthetic construct
  source 1..75: mol_type = other DNA
gaacgaccagaaagcggaacaaaacagcccaaatacgcaacaaaacgagccagaaacgaaacaacctgaaccagt

SEQ ID NO: 23377 - DNA, 75 bp, synthetic construct
  source 1..75: mol_type = other DNA
tttttgttcaggtctggggaaatggagccaacttcgacaacacgattttgcgccgttcatacgaacggcagggga

SEQ ID NO: 23378 - DNA, 75 bp, synthetic construct
  source 1..75: mol_type = other DNA
acaatcgttgagctgggaaaaacaatcgactttgatgccagaaccgttattccattcgaaggcgtgcgccacaat

SEQ ID NO: 23379 - DNA, 75 bp, synthetic construct
  source 1..75: mol_type = other DNA
cccgaatgatccgaaatgggtgaaggggattgaaacccgcgattctgtgcaccagaaccagtcagaaacggaaca

SEQ ID NO: 23380 - DNA, 75 bp, synthetic construct
  source 1..75: mol_type = other DNA
aaactgctggcggagtcattgatcgggacaccattaaatggtggcttaagcaatcacgcgaagcgcaatctgcca

SEQ ID NO: 23381 - DNA, 75 bp, synthetic construct
  source 1..75: mol_type = other DNA
accacactgaatggcggttaccagtatgtgcacagggacggacttgcgctgaacacggtaattaacgaggggggc

SEQ ID NO: 23382 - DNA, 75 bp, synthetic construct
  source 1..75: mol_type = other DNA
gacgccccggtaacgttccataaactgaccaccagtaacctcaccggtcagggtggcaccatcaatatgcgtgtt

SEQ ID NO: 23383 - DNA, 75 bp, synthetic construct
  source 1..75: mol_type = other DNA
acggcggtattgcccgtggggccacgccggaaagcagcggcagctatggcttcgtccgtctggagggtgacctgc

SEQ ID NO: 23384 - DNA, 75 bp, synthetic construct
  source 1..75: mol_type = other DNA
ggtgataccgggcagtttgttcgcggaaatgccgtacgtaccaccatcaataaaaatggtcgtcagattgtggct

SEQ ID NO: 23385 - DNA, 75 bp, synthetic construct
  source 1..75: mol_type = other DNA
acagcatgaaagcgtcatcggacaataacgacttccgcgcccggggctggggctggctgggctcactggaaaccg

SEQ ID NO: 23386 - DNA, 75 bp, synthetic construct
  source 1..75: mol_type = other DNA
tcattccgaaagctcatggtggcacggatgcagacagtaacctgcagagtctgtgctggccctgccataaagcaa

SEQ ID NO: 23387 - DNA, 75 bp, synthetic construct
  source 1..75: mol_type = other DNA
tgggaagtcatccgggagcggatactaaagcgcgacaaagggttatgtcagaaccatcttcggcagggagttgtg

SEQ ID NO: 23388 - DNA, 75 bp, synthetic construct
  source 1..75: mol_type = other DNA
ttgaccactcacaccacaagctcaaaattcgcggcctgaaaagcccggtggacgtgctgacgtttacgggccggg

SEQ ID NO: 23389 - DNA, 75 bp, synthetic construct
  source 1..75: mol_type = other DNA
tgcgatcaaaaagcgtaaagtgttcccgacagacgactcggtgaaaaaagtggtgtggctggcaatccagtctgc

SEQ ID NO: 23390 - DNA, 75 bp, synthetic construct
  source 1..75: mol_type = other DNA
gtggactggcttcttgatgtttttgctacctggctctacggcttaaaagtaatcgcgataacgttagcggtcatc

SEQ ID NO: 23391 - DNA, 75 bp, synthetic construct
  source 1..75: mol_type = other DNA
tctttctggttttcctgtttattggtgtaagtcctgacacaaacgccgccactgtaaatcagacacttaaatgcg

SEQ ID NO: 23392 - DNA, 75 bp, synthetic construct
  source 1..75: mol_type = other DNA
actgggcggttactacgggcggcttcaacagtgaaacagtacaggacgtcatgctgggagcggtggaacgccgct

SEQ ID NO: 23393 - DNA, 75 bp, synthetic construct
  source 1..75: mol_type = other DNA
gcgggcagcagaaatgttggagtgcatgatgctgtcgtcctgggaaaggcgctgggcatatctcctcctgagctc

SEQ ID NO: 23394 - DNA, 75 bp, synthetic construct
  source 1..75: mol_type = other DNA
tgagtccgtttgaatccctgctgattgtggatttaggcggaaccacgctggatgtggcaaaggttcaggggcaac

SEQ ID NO: 23395 - DNA, 75 bp, synthetic construct
  source 1..75: mol_type = other DNA
gaactcttctggcattggcgttgaattattacctgtggagatgacgctggatgagcggccttaccccgtttttta

SEQ ID NO: 23396 - DNA, 75 bp, synthetic construct
  source 1..75: mol_type = other DNA
agaacgtcgctggcgagccagtaaagtggccgggaagaaacaaattcccgcttttatcgataatgactatagcga

SEQ ID NO: 23397 - DNA, 75 bp, synthetic construct
  source 1..75: mol_type = other DNA
agaaagcaaacgaaatattatatgcattttccataatcgggattattccattaatggctatattaatacttcgaa

SEQ ID NO: 23398 - DNA, 75 bp, synthetic construct
  source 1..75: mol_type = other DNA
cgatcgagaaagatgagatgaaccgggtatttatcttcgggaaagttattgggagcatgccgcagacgtatagga

SEQ ID NO: 23399 - DNA, 75 bp, synthetic construct
  source 1..75: mol_type = other DNA
cggcctgctggcagaagcgttcctcgaaaaaaatcccggcgcgaagatcatccacgatccacgtctctcctggaa

SEQ ID NO: 23400 - DNA, 75 bp, synthetic construct
  source 1..75: mol_type = other DNA
acttccgtgatttcgcttactgcgacagcggcatgatcccgtggctgctggtcgccgaactggtgtgcctgaaag

SEQ ID NO: 23401 - DNA, 75 bp, synthetic construct
  source 1..75: mol_type = other DNA
atgagcagaattatcaccaccaccgtgtatacgctggatgaactttcctgcccggcacgggaaaaagcccgcgac

SEQ ID NO: 23402 - DNA, 75 bp, synthetic construct
  source 1..75: mol_type = other DNA
tggtgcgcgaaggggctcgcccgatcagcggtgataccggactgcgcgatgtccagcgtctggcagaagccaacg

SEQ ID NO: 23403 - DNA, 75 bp, synthetic construct
  source 1..75: mol_type = other DNA
aaatcctcacattacgctgggaacacctcgatttgcagcacggagtggcgcatcttcctgaaacgaaaaatggtt

SEQ ID NO: 23404 - DNA, 75 bp, synthetic construct
  source 1..75: mol_type = other DNA
gctataagccgcaactggctgaaggtagcgggcgcactcagaccgtgcgcatggtgctgattaccagcagtacgg

SEQ ID NO: 23405 - DNA, 75 bp, synthetic construct
  source 1..75: mol_type = other DNA
cgtccgggtgacctggttgcagatttttttatgggctcaggttcaacggtaaaagctgcactggcgctcgggcgt

SEQ ID NO: 23406 - DNA, 75 bp, synthetic construct
  source 1..75: mol_type = other DNA
gggaagtgcgtgttccacaccggggaaatgtggtggacagagtcattgaaggggcttacgaggtggtggaggttt

SEQ ID NO: 23407 - DNA, 75 bp, synthetic construct
  source 1..75: mol_type = other DNA
gaagcaatgccagttgcatggtcctgtgctcacaatatggttttgttcaatgctgaatctgttgcggcatacgca

SEQ ID NO: 23408 - DNA, 75 bp, synthetic construct
  source 1..75: mol_type = other DNA
atgcgaaccaggtacgtcgtgatcgtccgctgacacacgaagaactgatgcgccatgtaccgagtatttttgggg

SEQ ID NO: 23409 - DNA, 75 bp, synthetic construct
  source 1..75: mol_type = other DNA
tgacgaacatcagcccgtcaccaccgccgacattctgacgccacgacgccgggaggattacggtaaggacctgtg

SEQ ID NO: 23410 - DNA, 75 bp, synthetic construct
  source 1..75: mol_type = other DNA
tgattgctcatgctaatgaaagtgtgaaatccatgaaatttgctgcgcgacagaccgtgtttaagacttcaagag

SEQ ID NO: 23411 - DNA, 75 bp, synthetic construct
  source 1..75: mol_type = other DNA
gtgagcttcatcgtatcgcggataccctgcaggcggtgcagaaacgtaacttctggcagcttcaggctgaaatca

SEQ ID NO: 23412 - DNA, 75 bp, synthetic construct
  source 1..75: mol_type = other DNA
ttttccggctcagcaacggcaggtttatggaagagccgtgcatctggttcagcggattctgcagccagggggacg

SEQ ID NO: 23413 - DNA, 75 bp, synthetic construct
  source 1..75: mol_type = other DNA
ggcactggcggcgtcactggatgcgcaggggtacagcgtcagtgacatcatccatatcctgatggcggaaggagg

SEQ ID NO: 23414 - DNA, 75 bp, synthetic construct
  source 1..75: mol_type = other DNA
ctgaatatgcttcgcctggctcgcgctgtgatcccggctgctgttctgatgatgttcttcccgcagctggcgatg

SEQ ID NO: 23415 - DNA, 75 bp, synthetic construct
  source 1..75: mol_type = other DNA
cgaaacgttctcggtatcagagacggaatcatcagcgaccaggcagcattgagaacgcttcaggaatatatccgt

SEQ ID NO: 23416 - DNA, 75 bp, synthetic construct
  source 1..75: mol_type = other DNA
cctgcgggtcaatgccagttgctccgcagccgtgcgtgaagccaccggacccaccagcgtggataatgcaaccag

SEQ ID NO: 23417 - DNA, 75 bp, synthetic construct
  source 1..75: mol_type = other DNA
gtaatgatttgcaggatgcattagaaaagtatgagcgcgagaagcgcgccaaagcccgcgcaagcatgatgcatg

SEQ ID NO: 23418 - DNA, 75 bp, synthetic construct
  source 1..75: mol_type = other DNA
aaagctgaaaatgaaactctgcgcgctgatgttgccgctggtcgtaagcgcctgcgggtcaatgccagttgctcc

SEQ ID NO: 23419 - DNA, 75 bp, synthetic construct
  source 1..75: mol_type = other DNA
ggcagacaccgctgaacgggattatttcatcctcagagaacggttgatgacaatgcagaagcagctggaaggggc

SEQ ID NO: 23420 - DNA, 75 bp, synthetic construct
  source 1..75: mol_type = other DNA
atgaataaaaatattgccgtgacgggcaagggtgacgcacgtcatgtaaaaaaattctgtgattttcgtgatctg

SEQ ID NO: 23421 - DNA, 75 bp, synthetic construct
  source 1..75: mol_type = other DNA
atgaataaaaatattgccgtgacgggcaaggggtacgctcgtccagtgaaaaaattctgcgatattcgtgatctc

SEQ ID NO: 23422 - DNA, 75 bp, synthetic construct
  source 1..75: mol_type = other DNA
gtgatgttgctgcacttgatgccagatactcgagggaattagccgatgcgagagctgaaaatgaaactctgcgcg

SEQ ID NO: 23423 - DNA, 75 bp, synthetic construct
  source 1..75: mol_type = other DNA
atgaaccgtgttctgtgtgtggtgattattgtcatgctggtggcctgtggtgcgcttagtctggggctgaatcat

SEQ ID NO: 23424 - DNA, 75 bp, synthetic construct
  source 1..75: mol_type = other DNA
atatcatcaaaacggtggcactggtgctgatggtactggaccatgcaaaccgcattctgcatctggaccagacgt

SEQ ID NO: 23425 - DNA, 75 bp, synthetic construct
  source 1..75: mol_type = other DNA
gttgctgctggcagtatggctgcctttgtccggtaccagttacggcattgccgggctgctgatgctggcggtcag

SEQ ID NO: 23426 - DNA, 75 bp, synthetic construct
  source 1..75: mol_type = other DNA
ggctaacgcgacgatgctcggcagtaagctgaatctgacgcaaatggccgttggtgatgcgaatggtgtcttgcc

SEQ ID NO: 23427 - DNA, 75 bp, synthetic construct
  source 1..75: mol_type = other DNA
atgattcgtttatcattatttatatcgctgcttctgacatcggtcactgtactggctgatgtgcagattaacatc

SEQ ID NO: 23428 - DNA, 75 bp, synthetic construct
  source 1..75: mol_type = other DNA
cggggacacagctcgaccgccagttacaggatgcgctcgaaaaatacgagcgggataaacgtgcgcgcgcccgtg

SEQ ID NO: 23429 - DNA, 75 bp, synthetic construct
  source 1..75: mol_type = other DNA
cgatataaatcgggtaaggagcttgccggtaacatggccgctgcaggtgctgccggggtcggtattgcgacagcg

SEQ ID NO: 23430 - DNA, 75 bp, synthetic construct
  source 1..75: mol_type = other DNA
gacccgaccgcttaaatccatccagaccgcgagtaaaaccctgtcgggcgatattcgcgacacacaaaaagggct

SEQ ID NO: 23431 - DNA, 75 bp, synthetic construct
  source 1..75: mol_type = other DNA
actcaaagagcttggcgttaaaacctcggacaaaaagggaaatatgcgtccgttgttcaccattctgaaagagat

SEQ ID NO: 23432 - DNA, 75 bp, synthetic construct
  source 1..75: mol_type = other DNA
gtggtcaattgggtaaccagttgcaggatgcgttagaaaaatatgaacgcgacaagcgagccaaagcccgcgcta

SEQ ID NO: 23433 - DNA, 75 bp, synthetic construct
  source 1..75: mol_type = other DNA
aatgacggctcgctcttctgctgacaatcgaagtgccagtcgcggtcctgtagctgtgttacgcggaatccgtga

SEQ ID NO: 23434 - DNA, 75 bp, synthetic construct
  source 1..75: mol_type = other DNA
gtcaaagatgtatttctggcttcctcactactgggccaaatgatgaaaacgcaaataataaaccgtcaagtgata

SEQ ID NO: 23435 - DNA, 75 bp, synthetic construct
  source 1..75: mol_type = other DNA
gccgagttcaaatgcgtataaatcgtcgcggactacgatgctactttccacgccggatggtcgtcaggcactgca

SEQ ID NO: 23436 - DNA, 75 bp, synthetic construct
  source 1..75: mol_type = other DNA
ggggggcagtccgggacgcttgtacaaagccgttctttatctggcgataccgctaagtatttttgtcacccttct

SEQ ID NO: 23437 - DNA, 75 bp, synthetic construct
  source 1..75: mol_type = other DNA
atgagcagcaagcttcatggtcttgtctgggaaggatgcgccttcaccggcatgatcttatcccgggtggcagtg

SEQ ID NO: 23438 - DNA, 75 bp, synthetic construct
  source 1..75: mol_type = other DNA
cagaaaatgcgcgaggaacaggcgcaggccatggctctggcggaggctcaggataaagcggctgctgcgttttat

SEQ ID NO: 23439 - DNA, 75 bp, synthetic construct
  source 1..75: mol_type = other DNA
tgggcgtgtccagcgggattcgttctgggtaaaaaacatcatgagtccggcaaaactccgggaaaaatgggatga

SEQ ID NO: 23440 - DNA, 75 bp, synthetic construct
  source 1..75: mol_type = other DNA
gcgactgacttttgatgagtggatgatgatttataacgcagcggaaaaggatggttactttttacagcgcggtat

SEQ ID NO: 23441 - DNA, 75 bp, synthetic construct
  source 1..75: mol_type = other DNA
aaagtcacaacgaccgtcagcaaaaaccacgcaatgatagtcattgaggatttgaaggtcagcaacatgtcaaag

SEQ ID NO: 23442 - DNA, 75 bp, synthetic construct
  source 1..75: mol_type = other DNA
cgccagcttgagtacaagcagctctggcgtggcggtcaggtgcttgctgttccgccagcgtacacaagccagcgt

SEQ ID NO: 23443 - DNA, 75 bp, synthetic construct
  source 1..75: mol_type = other DNA
gtttcattggtgcagacaatttaaaaactatttttaatgattctcatcttaaggaaacctcgttaaaatcaattt

SEQ ID NO: 23444 - DNA, 75 bp, synthetic construct
  source 1..75: mol_type = other DNA
gcggaaaaacaaacactggtacgtaacaatggttcagaagttcagtcattagatccgcacaaaattgaaggtgtt

SEQ ID NO: 23445 - DNA, 75 bp, synthetic construct
  source 1..75: mol_type = other DNA
gcctgcaggtggcatccgtcagtgaagatgcgatgacggttgttgtgccggggcgggctgaaccggcctccctgc

SEQ ID NO: 23446 - DNA, 75 bp, synthetic construct
  source 1..75: mol_type = other DNA
cctgccgttatcaaaggggaacttctggcgacatatcgtcagatggagcgtgccggtattgtggaaaattacgat

SEQ ID NO: 23447 - DNA, 75 bp, synthetic construct
  source 1..75: mol_type = other DNA
tgagtctacaggaaaggtcgtactcgataaggataaaaaaacagccgtatcattatcgctacgcatgcgaatttt

SEQ ID NO: 23448 - DNA, 75 bp, synthetic construct
  source 1..75: mol_type = other DNA
tctcaccggaaatcgtcgatgcttctcaccaggcacttctgcagtatatccgtccgggcgcgcagaataagatga

SEQ ID NO: 23449 - DNA, 75 bp, synthetic construct
  source 1..75: mol_type = other DNA
cgtcgaatacgctggttccgttgttttatgcggaaatggataactcggcggcgaatactgcacaggacagcggag

SEQ ID NO: 23450 - DNA, 75 bp, synthetic construct
  source 1..75: mol_type = other DNA
attaccgacaaagcgttacgtgaagaactggtgacgctgaccggcgggcaaaaacacgtagcgcaagcggcggag

SEQ ID NO: 23451 - DNA, 75 bp, synthetic construct
  source 1..75: mol_type = other DNA
gggtggggagcgtgctgcaaatagtgcacttcagatcatcgctatcggacgtttacgaactgtaagcgtgcagca

SEQ ID NO: 23452 - DNA, 75 bp, synthetic construct
  source 1..75: mol_type = other DNA
tctctatacaataataaatttgacaaaaacactaaagtacaaggttatgaacttttcgatatagaagctaaaaaa

SEQ ID NO: 23453 - DNA, 75 bp, synthetic construct
  source 1..75: mol_type = other DNA
atgacgacgttaactcaatgccagcagcaggtgctggatatgctgatttcttaccagcaagagcgtggctttccg

SEQ ID NO: 23454 - DNA, 75 bp, synthetic construct
  source 1..75: mol_type = other DNA
tggcacctgaactgattaaacgtaatgctgttggatacgaaagcgcttcgcagttgctcatcactgccggagata

SEQ ID NO: 23455 - DNA, 75 bp, synthetic construct
  source 1..75: mol_type = other DNA
atgacgagaatgactgaaactgatctactaaaaataattcgccgcattaccggaatcagtcagcagcctgacgaa

SEQ ID NO: 23456 - DNA, 75 bp, synthetic construct
  source 1..75: mol_type = other DNA
ggttaccggcgcatctggcaactactgcgtcgggagggccttcacgtcaaccacaagcgggtataccgcatctat

SEQ ID NO: 23457 - DNA, 75 bp, synthetic construct
  source 1..75: mol_type = other DNA
gacagattgacaaaagggccgctgagaaaatcagcgccagtcagtcagccggaagcaaacccgaagagccgctcg

SEQ ID NO: 23458 - DNA, 75 bp, synthetic construct
  source 1..75: mol_type = other DNA
gatggagaagtctacgccagcttcagcgctccggagcttttaccctttctgaaatattatgcgaccctgctgctc

SEQ ID NO: 23459 - DNA, 75 bp, synthetic construct
  source 1..75: mol_type = other DNA
tggctggcactgaagcactggtgactacgctggggatattttcagctaataaaggggtaattcctgcatttacgc

SEQ ID NO: 23460 - DNA, 75 bp, synthetic construct
  source 1..75: mol_type = other DNA
ttgcaggcagtcagcaggtatccacgacgctggtacattttgccgctgatgctggcgttattcaggaatttaccc

SEQ ID NO: 23461 - DNA, 75 bp, synthetic construct
  source 1..75: mol_type = other DNA
acacgatctggacgttgccatggcaggaatgggcgatcagcaacggcagcggtaccagtcgcagttgcgtctacg

SEQ ID NO: 23462 - DNA, 75 bp, synthetic construct
  source 1..75: mol_type = other DNA
acactgaaaaatataacgagtgggtgaaaaaattctctgagcagatttttaaaattactggcgacgagaatgtgg

SEQ ID NO: 23463 - DNA, 75 bp, synthetic construct
  source 1..75: mol_type = other DNA
ttgagaagaagatcagtagccgccccgtggaaaaaatccgccagtggcgacagcgttatgcccgtccgatactgg

SEQ ID NO: 23464 - DNA, 75 bp, synthetic construct
  source 1..75: mol_type = other DNA
ggtggtttgtgaaccgctgggccgtaattaccgcgtcagtatgccgcttatagccttttgctccggaaaaatgtt

SEQ ID NO: 23465 - DNA, 75 bp, synthetic construct
  source 1..75: mol_type = other DNA
attataaatgtaatgcatgcacaatccttgaggacattcttgggtgagcattgctctaaaattgtaattattgat

SEQ ID NO: 23466 - DNA, 75 bp, synthetic construct
  source 1..75: mol_type = other DNA
ccgcatgcctggttgacagacgtcctgatgcgtctgccggagtggccggaggagcgactggcagagttgctgcct

SEQ ID NO: 23467 - DNA, 75 bp, synthetic construct
  source 1..75: mol_type = other DNA
tactgaataacgccttaaaaatcgccgttatggaaaatggtgatttgtctcttattcaactttgtcttgataaag

SEQ ID NO: 23468 - DNA, 75 bp, synthetic construct
  source 1..75: mol_type = other DNA
ccctgggatcgcgccgcggtggacgcgaccacggagattaaggtggcgctgcgcatggccggcacgccgatcggc

SEQ ID NO: 23469 - DNA, 75 bp, synthetic construct
  source 1..75: mol_type = other DNA
ggatcccccgtgaggggatggagacgacacgaaagccatcagttattacggtaaagtttggtgacggatatgaac

SEQ ID NO: 23470 - DNA, 75 bp, synthetic construct
  source 1..75: mol_type = other DNA
tatcgtgaagatggaccgcttggcatgaccagccgccgtcggggtaaatccagcaacaatcagttgccccaggga

SEQ ID NO: 23471 - DNA, 75 bp, synthetic construct
  source 1..75: mol_type = other DNA
ataacgctcgccatgaaagagggggtaccacagcgtgttctgctgaaagacttccagggcgatatgcggctggtg

SEQ ID NO: 23472 - DNA, 75 bp, synthetic construct
  source 1..75: mol_type = other DNA
ggctgtatcagttccgtcgttgttcatcccgggagacactggaaaaagtgatttcccacacgcgttataaactta

SEQ ID NO: 23473 - DNA, 75 bp, synthetic construct
  source 1..75: mol_type = other DNA
gaacgtcttatggaaacccgaaatggcccggttctggtggcatcaccggccctgcgcggtattgcgctgctgcgt

SEQ ID NO: 23474 - DNA, 75 bp, synthetic construct
  source 1..75: mol_type = other DNA
gtgggtaagcatcactggaaagtagaaaaacagcctgagtggtacgtgaaagctgtcagaaaaactatcgcggcg

SEQ ID NO: 23475 - DNA, 75 bp, synthetic construct
  source 1..75: mol_type = other DNA
ggctgtatcagttccgtcgttgttcatcccgggagacgctggaaaaagtgatttcccacacacgttataaactta

SEQ ID NO: 23476 - DNA, 75 bp, synthetic construct
  source 1..75: mol_type = other DNA
gtaatcgtctcatcccggaaagtttcagtggtgaaatcatctggatgcatcccgaaaaccgcccttatctgcgcg

SEQ ID NO: 23477 - DNA, 75 bp, synthetic construct
  source 1..75: mol_type = other DNA
aataaaaacctggcaaccgctaaaatcaacttctgtgctaagcgcattctgatgcgtaatcaaatgagcaaaata

SEQ ID NO: 23478 - DNA, 75 bp, synthetic construct
  source 1..75: mol_type = other DNA
aagcgggagataccaccgcagagagcggtgaagttcagcctgaatcaccggtcgccgatgcgactgaaccgcaac

SEQ ID NO: 23479 - DNA, 75 bp, synthetic construct
  source 1..75: mol_type = other DNA
tttgaaccgggaatgacggtctcccttgttgcccggcaacatggtgtggcagccagccagttatttctctggcgt

SEQ ID NO: 23480 - DNA, 75 bp, synthetic construct
  source 1..75: mol_type = other DNA
aaacgactgctgttgcgcccacgcccggcactggagccggtttcagacagcccggagttccgcacactgtatccg

SEQ ID NO: 23481 - DNA, 75 bp, synthetic construct
  source 1..75: mol_type = other DNA
ggcgcaccggcagctccggagccggaaggcatcgcgggtgaggggagtgcttcagatagcggtgaccccacacct

SEQ ID NO: 23482 - DNA, 75 bp, synthetic construct
  source 1..75: mol_type = other DNA
cgttctatgccagctgcgagaaagtatttcgccctgatttgcgaaacaaacccgttgtggtgctcagtaacaacg

SEQ ID NO: 23483 - DNA, 75 bp, synthetic construct
  source 1..75: mol_type = other DNA
tccgccgcagtatttagctatctggcggatgatctgcgcgagcttcagcagctcatcgagcagcaaaacaaaccc

SEQ ID NO: 23484 - DNA, 75 bp, synthetic construct
  source 1..75: mol_type = other DNA
aagcgggagataccaccgcagagaacggtaaacctcagcctgaattaccggtagccgatgcaactgaaccgcaac

SEQ ID NO: 23485 - DNA, 75 bp, synthetic construct
  source 1..75: mol_type = other DNA
aaagaaccctgttacagcaatgccgctgtggaaaagctttcattgccacacaggacagccgggacattattgccg

SEQ ID NO: 23486 - DNA, 75 bp, synthetic construct
  source 1..75: mol_type = other DNA
acttaacgctgtgctggattatattgacgcggtgacggcaacagataccagcacagcgccggacgtcatctggcc

SEQ ID NO: 23487 - DNA, 75 bp, synthetic construct
  source 1..75: mol_type = other DNA
gattacattgacgcggtggtggcaacagataccagcaccgcgccggatgtcatctggcctgaactaccggaggcg

SEQ ID NO: 23488 - DNA, 75 bp, synthetic construct
  source 1..75: mol_type = other DNA
cagatgaatttggtgttacagaacgtaccttacagcgcgattttcatcagcgtctggttcacctggacttagagt

SEQ ID NO: 23489 - DNA, 75 bp, synthetic construct
  source 1..75: mol_type = other DNA
aaattggcataagcaatgatatttcggcatttctggcagaacacccggagacagaactgaccatggacgaatggc

SEQ ID NO: 23490 - DNA, 75 bp, synthetic construct
  source 1..75: mol_type = other DNA
gattacattgacgcggtgacggcaacagataccagcaccgcgcctgatattatttggcctgtattccctgagact

SEQ ID NO: 23491 - DNA, 75 bp, synthetic construct
  source 1..75: mol_type = other DNA
attacccggtacgtgagctgttgggcatcagtcaggcagatgaacgcctgatttataacacggtgctgggccgga

SEQ ID NO: 23492 - DNA, 75 bp, synthetic construct
  source 1..75: mol_type = other DNA
ccggacggaagctgacgcaggcagaaacaacccgccttaacgctgtgctggattacattgacgcggtgacggcaa

SEQ ID NO: 23493 - DNA, 75 bp, synthetic construct
  source 1..75: mol_type = other DNA
ttaatctgtctctgaaacatgaactgaatgagtggctgacagagagaggttatgccggactggcggataaccgga

SEQ ID NO: 23494 - DNA, 75 bp, synthetic construct
  source 1..75: mol_type = other DNA
atgaagtaccttaacactactgattgtagcctcttccttgcagagaggtcaaagtttatgacgaaatatgccctt

SEQ ID NO: 23495 - DNA, 75 bp, synthetic construct
  source 1..75: mol_type = other DNA
gcgccgacgattttaaaaacctgttcatgtgtgaatttgttgacgacaaggcgtcggtgttcccgttcgaggagc

SEQ ID NO: 23496 - DNA, 75 bp, synthetic construct
  source 1..75: mol_type = other DNA
ttgataagcaaccagcatggctggtggcagcaatacgaagaacgattgctgatttacctcatggctatgaggaag

SEQ ID NO: 23497 - DNA, 75 bp, synthetic construct
  source 1..75: mol_type = other DNA
agaaagcggcaggacttgccggaggcgtccggttcggtggggacggagggcgcgatattttatcgtctgcggatg

SEQ ID NO: 23498 - DNA, 75 bp, synthetic construct
  source 1..75: mol_type = other DNA
cgtgacttatatcggtatcgactcaaccggcgttggtcacggggtttacgagaacgtgaaagcgttctttcctgc

SEQ ID NO: 23499 - DNA, 75 bp, synthetic construct
  source 1..75: mol_type = other DNA
ataccgggatcgcacggatacttccgctccggaacggacgactgataacctgtcttaccgacaaccaggagccct

SEQ ID NO: 23500 - DNA, 75 bp, synthetic construct
  source 1..75: mol_type = other DNA
ctggtcgctgaagagcgttttatctccgccctgccacatttccattttatcagtaatgtcatacacaatttccgg

SEQ ID NO: 23501 - DNA, 75 bp, synthetic construct
  source 1..75: mol_type = other DNA
aggtggaaaacgcctttatggcctgggtgggcggtgtgaatgaagccagcggctcgacgaaaacgctctccggcg

SEQ ID NO: 23502 - DNA, 75 bp, synthetic construct
  source 1..75: mol_type = other DNA
ttccgtaaatgcccgtctgaaacaggcatcacagtcatccgatgaattttcgtcatcacagaaagtgctgatgga

SEQ ID NO: 23503 - DNA, 75 bp, synthetic construct
  source 1..75: mol_type = other DNA
tttactgcggatacgctcactacgcaggttaatcttaacgttaccgaggacaatttcatcgccaataacattgga

SEQ ID NO: 23504 - DNA, 75 bp, synthetic construct
  source 1..75: mol_type = other DNA
atgaagtgttaatgattcaggaaggccagtgttgggtcatcgacgatgtgcgctacttaggcggtagcgttcatg

SEQ ID NO: 23505 - DNA, 75 bp, synthetic construct
  source 1..75: mol_type = other DNA
gctggcaggaatgagtgagcaagagattgcgctggcggcagaggcggctcgcgagaaaggtctggataacaaatg

SEQ ID NO: 23506 - DNA, 75 bp, synthetic construct
  source 1..75: mol_type = other DNA
aagcttaccgacaacaagacttatccggtgatatgtctcgtgataacgttcatcgttgggatggatatgtcactt

SEQ ID NO: 23507 - DNA, 75 bp, synthetic construct
  source 1..75: mol_type = other DNA
gttatgctcgcggaaagcagagactttgctgaacttgtggcaatgaaagccagtgcgctcatgaaagatatgagc

SEQ ID NO: 23508 - DNA, 75 bp, synthetic construct
  source 1..75: mol_type = other DNA
ccagtgtcagctgaactgccaccagcaaatgaaagtgttctgttatttgatgctaatggagaaggctggctgatt

SEQ ID NO: 23509 - DNA, 75 bp, synthetic construct
  source 1..75: mol_type = other DNA
ctggtacgtccgttttatctgctggaggggcgcaacgttcctgacttcaggaacagcatcggggcgcagtatggt

SEQ ID NO: 23510 - DNA, 75 bp, synthetic construct
  source 1..75: mol_type = other DNA
ttaatgtcccggatgcagtatttgcctggatgctggatggtagaggcggcgttaaaccgctggaaaatacagatg

SEQ ID NO: 23511 - DNA, 75 bp, synthetic construct
  source 1..75: mol_type = other DNA
aaaaagaaaccggagaatggcagtggacatttcaggtcggggaccttgaaaacgtcaatatcactcactgggcag

SEQ ID NO: 23512 - DNA, 75 bp, synthetic construct
  source 1..75: mol_type = other DNA
gggcgctggccacgcagcttccggcgtttcgccagaaactgaatgagggctggtatcaggtgcgcatttccgggc

SEQ ID NO: 23513 - DNA, 75 bp, synthetic construct
  source 1..75: mol_type = other DNA
gtttcgccagaaactgaatgagggctggtatcaggtgcgcattgccgggcgtgatgcaggcgaaaatgaattatc

SEQ ID NO: 23514 - DNA, 75 bp, synthetic construct
  source 1..75: mol_type = other DNA
attcgaaagaatgcattgacgtaattcgtgaagaagtaaagcgatggaatgattcccgcgccgctggcattcgca

SEQ ID NO: 23515 - DNA, 75 bp, synthetic construct
  source 1..75: mol_type = other DNA
tgaccgatgatgcagattatgatctacagcgattcgactgcggcgaggaagcgttaaatctctttctgacgacac

SEQ ID NO: 23516 - DNA, 75 bp, synthetic construct
  source 1..75: mol_type = other DNA
tgttcggtgaaatgcgcgtggggtcacgtgtggcatctcaggagatcagtacagctgatgaaggtgatggtggtg

SEQ ID NO: 23517 - DNA, 75 bp, synthetic construct
  source 1..75: mol_type = other DNA
gtttcgtcagaaactgaatgagggctggtatcaggtgcgcattgccgggcgtgatgcaggcgaaaacgaattatc

SEQ ID NO: 23518 - DNA, 75 bp, synthetic construct
  source 1..75: mol_type = other DNA
cggtgtgtttcaggcggtgctgggtgcggcgctgattgcggtggcatggtggaaccctgttggctggctgggggc

SEQ ID NO: 23519 - DNA, 75 bp, synthetic construct
  source 1..75: mol_type = other DNA
cagtaacattctcttttctatgggggcagcgatgacgcttggtggtgtcgcacagatgctggcccctaaacccaa

SEQ ID NO: 23520 - DNA, 75 bp, synthetic construct
  source 1..75: mol_type = other DNA
cggctgttatggcggttgctatatggatgccgggggtaggaattatggcgagtaatctgctgttttctctcggtg

SEQ ID NO: 23521 - DNA, 75 bp, synthetic construct
  source 1..75: mol_type = other DNA
gaggagaatatgctcctgccggtttctggtcaggagctgcccattcgctggcttgcgcaacacggcagcgaaaaa

SEQ ID NO: 23522 - DNA, 75 bp, synthetic construct
  source 1..75: mol_type = other DNA
accaattggtatcgaggctactccccaccgtgttaccgaatatctgaacaaagtactgaccgaaaccgaccatgc

SEQ ID NO: 23523 - DNA, 75 bp, synthetic construct
  source 1..75: mol_type = other DNA
gtgatgattggcgatttaagttctcacggcgtgttgttaggtattttagggttttttattataaccgtgttgtca

SEQ ID NO: 23524 - DNA, 75 bp, synthetic construct
  source 1..75: mol_type = other DNA
tatttttctatagcgctggggcggatatcgcacgtaaacagagttgtgtattcgctggcaccttattatgcagat

SEQ ID NO: 23525 - DNA, 75 bp, synthetic construct
  source 1..75: mol_type = other DNA
ggtgcttttgccggcagttcactgacagtgcatgatggcggtcatcttacagcactgaacggtcttttcagcgac

SEQ ID NO: 23526 - DNA, 75 bp, synthetic construct
  source 1..75: mol_type = other DNA
cgaagctcatggagtcagatatgcccaaagagctccgggcatcccttaccaaccaactcaggttaattctgacac

SEQ ID NO: 23527 - DNA, 75 bp, synthetic construct
  source 1..75: mol_type = other DNA
ctacaaaatggccgatggtggtggtttgtatcttgaggtttcggccaaaggttccaaatactggcgcatgaaata

SEQ ID NO: 23528 - DNA, 75 bp, synthetic construct
  source 1..75: mol_type = other DNA
gggggcggtctgtatgcttcagcattgtttgagtccggtgcctatatcgatttgattggtaaatatattcaccat

SEQ ID NO: 23529 - DNA, 75 bp, synthetic construct
  source 1..75: mol_type = other DNA
cttacgccagggatttcataaccagattatcggtgccaacatcaccaactgtaagttcagcgacttacagggcga

SEQ ID NO: 23530 - DNA, 75 bp, synthetic construct
  source 1..75: mol_type = other DNA
ccgttgataacggattttatattgaacctgaaagcaggtttattcctgaatcagctattgaaatcagtgttaacc

SEQ ID NO: 23531 - DNA, 75 bp, synthetic construct
  source 1..75: mol_type = other DNA
aggctgtcgccggaacggattactggcagtctgtacaggcgcaggccggatatgtctacctcagctggaatgccg

SEQ ID NO: 23532 - DNA, 75 bp, synthetic construct
  source 1..75: mol_type = other DNA
attacggctcaatcgattacggccgtaactacggtgtagcatacgacatcggtgcgtggactgacgtcctgccag

SEQ ID NO: 23533 - DNA, 75 bp, synthetic construct
  source 1..75: mol_type = other DNA
ccgcaaaaaacggcatcagcattggacagaggttatggccctgcataacaagggatgtagtttcagggaaatatc

SEQ ID NO: 23534 - DNA, 75 bp, synthetic construct
  source 1..75: mol_type = other DNA
atgaacatagggcgactgcgtgacaggataacgattcagaccctgaaacagaccagggatataaccggcgaaata

SEQ ID NO: 23535 - DNA, 75 bp, synthetic construct
  source 1..75: mol_type = other DNA
actctgccgtcaccaaaaacctgacgccggtgccaatgcagatcgccaatcagcaaagttacatcgagagtgtga

SEQ ID NO: 23536 - DNA, 75 bp, synthetic construct
  source 1..75: mol_type = other DNA
tcccgtctgccgggaaataccgcagcactgtctgaactgaatgcctccggcctgacgaccctgctgaatgcggtc

SEQ ID NO: 23537 - DNA, 75 bp, synthetic construct
  source 1..75: mol_type = other DNA
cccggcctgcagcgatgatgacggccttatcatcgaaaactgccttacgcgcctgaagaagaaaaaaccggacga

SEQ ID NO: 23538 - DNA, 75 bp, synthetic construct
  source 1..75: mol_type = other DNA
cggtggcgtttatcggtctgctggtgccacatctggcgcgcttctgggcaggcttcgatcagcgcaacgtactgc

SEQ ID NO: 23539 - DNA, 75 bp, synthetic construct
  source 1..75: mol_type = other DNA
gacgaaatgggcaaagcatgttggtaacgggatgagtgttccgccagtgcgacgacaactggaaggggcgaaaca

SEQ ID NO: 23540 - DNA, 75 bp, synthetic construct
  source 1..75: mol_type = other DNA
gtcgtaacagcaaagctgcataccggtttctgggtaaaatcctcaacaacgtgaagaagtggcagatcccgcgat

SEQ ID NO: 23541 - DNA, 75 bp, synthetic construct
  source 1..75: mol_type = other DNA
ccgctaactcgtgacgaatttattcgcctgatagatgcttgccgacatcagcagacgaaaaacctgtggtcattg

SEQ ID NO: 23542 - DNA, 75 bp, synthetic construct
  source 1..75: mol_type = other DNA
cgcggtcgttatgtcagtctgatggccggccctgtctggcagctcagtgagcgggtcagtctctatggcatggcc

SEQ ID NO: 23543 - DNA, 75 bp, synthetic construct
  source 1..75: mol_type = other DNA
cttgttgttgaatggctatgagttaacagcaccaggcgatgaaatcgtggaaatggcagagggactggcctgcaa

SEQ ID NO: 23544 - DNA, 75 bp, synthetic construct
  source 1..75: mol_type = other DNA
agcggtgaaaacagcgccgccgcgttgctggagaaaatcaaagctgaacgcgcagccagcgggggtaaaaaagcc

SEQ ID NO: 23545 - DNA, 75 bp, synthetic construct
  source 1..75: mol_type = other DNA
tgcctatgaatccggcctacccaaccctctacccggaagagctgcagattttcggggtggtgacggcattcatac

SEQ ID NO: 23546 - DNA, 75 bp, synthetic construct
  source 1..75: mol_type = other DNA
aggcatatcgtatgcatcaggtgttactactgcctcgctttgcacggcttaccattgcccttggcttagcaactg

SEQ ID NO: 23547 - DNA, 75 bp, synthetic construct
  source 1..75: mol_type = other DNA
ccggtaacttttcagcgtgggttattgaagcctgcagaagaaggctgtcaacagagcgttcgggtatgaattaca

SEQ ID NO: 23548 - DNA, 75 bp, synthetic construct
  source 1..75: mol_type = other DNA
gtcgtgaacttgagtcagcaggtgcagctattagccggacaagtcgaccgcttgagtcggttatttatcacgaac

SEQ ID NO: 23549 - DNA, 75 bp, synthetic construct
  source 1..75: mol_type = other DNA
tatccgccattctgcctcccttggtgcctccgaccttcatatgacgccagggcgggacaacacagacttcaccta

SEQ ID NO: 23550 - DNA, 75 bp, synthetic construct
  source 1..75: mol_type = other DNA
aggcagaggtgacacgacaggctgatgtgacgcgcatactgccgctgattaacgagctggaagcgctgccaggac

SEQ ID NO: 23551 - DNA, 75 bp, synthetic construct
  source 1..75: mol_type = other DNA
cgtgtatctcaggctcttgttaatgccggtgtaatgaatcaggcaaataattttatcggtaagttagtccagata

SEQ ID NO: 23552 - DNA, 75 bp, synthetic construct
  source 1..75: mol_type = other DNA
gcttcaggacgtgcgcgaaaaaatgaccgacctggcgcgcatggaaaccgtgctatccgaacttgtgttcgcctg

SEQ ID NO: 23553 - DNA, 75 bp, synthetic construct
  source 1..75: mol_type = other DNA
aatgggcttcactgacacccatcttcgctgctatatcatgcacgatgatccggatgggcagcatattcatatcat

SEQ ID NO: 23554 - DNA, 75 bp, synthetic construct
  source 1..75: mol_type = other DNA
gatgatggttatacgcgcattgcaaatgagttgctggaagctgtgatgctggccggattaacacagcaccagctt

SEQ ID NO: 23555 - DNA, 75 bp, synthetic construct
  source 1..75: mol_type = other DNA
atcgccgcctggtcatcctgcgttcactgatggactgcaataacgaggctaacgaatccattttgcaggattgcc

SEQ ID NO: 23556 - DNA, 75 bp, synthetic construct
  source 1..75: mol_type = other DNA
gttgcgtggcgacatgaaatcccgctttgaagcgtatgccacggggatcaactgggggatttattcccctaatga

SEQ ID NO: 23557 - DNA, 75 bp, synthetic construct
  source 1..75: mol_type = other DNA
gtcgatatgaagtggacatccgccctactggacgtaatggaaaacgcatccgtaggaagtttgataagaaaagcg

SEQ ID NO: 23558 - DNA, 75 bp, synthetic construct
  source 1..75: mol_type = other DNA
cagggttgctggtgctggccggatggggcatcagcggtttggctgttgctggcagtgatatcaaacaggtggatc

SEQ ID NO: 23559 - DNA, 75 bp, synthetic construct
  source 1..75: mol_type = other DNA
gtcctctggatgaagtgacccgtggtcaggggagtattattcccggcagcagggagcaggttatacagacccttg

SEQ ID NO: 23560 - DNA, 75 bp, synthetic construct
  source 1..75: mol_type = other DNA
atgaaaattcgtcaggcgcagaccagcgcaacctacattctgcctgacccaggcgagctgaataaacgcgtcctg

SEQ ID NO: 23561 - DNA, 75 bp, synthetic construct
  source 1..75: mol_type = other DNA
gccagtactggtttatctctctgattctgaatattgctctgggatatctggatgaacgaaaactccgtaaatctg

SEQ ID NO: 23562 - DNA, 75 bp, synthetic construct
  source 1..75: mol_type = other DNA
ccgaagctggttaccgccaccatgaggcacagcggaaaaaaagtaacatcggaacccaaatgggcaacttctcat

SEQ ID NO: 23563 - DNA, 75 bp, synthetic construct
  source 1..75: mol_type = other DNA
gaatacatcacccatctggtacagtcagcctactacgatactgagcgggatattgttcagttacaggctgatccc

SEQ ID NO: 23564 - DNA, 75 bp, synthetic construct
  source 1..75: mol_type = other DNA
gtagagcaataggctgtattttgagaaagctgtgtgagtggaaaagtgtacggattctggaagctgaatgctgtg

SEQ ID NO: 23565 - DNA, 75 bp, synthetic construct
  source 1..75: mol_type = other DNA
cgctggctattgccagcggtatttctgctcaatgggccatagcagcggatatgccagccagcccggcacccacta

SEQ ID NO: 23566 - DNA, 75 bp, synthetic construct
  source 1..75: mol_type = other DNA
ctggcagccgtagcgctggtactgggcaccgttgtgctgattaagatgaagcgcacccaatacatctgggtaact

SEQ ID NO: 23567 - DNA, 75 bp, synthetic construct
  source 1..75: mol_type = other DNA
ttcagcaggtgctggaacgtgctgactatctggcgaaggagcataccaaagctcactgcaccggtgagcgcaatt

SEQ ID NO: 23568 - DNA, 75 bp, synthetic construct
  source 1..75: mol_type = other DNA
gaaaccgtattgcgggacgcatcaggtgaaaaacgtatcaaaggtgaaaaagacagccgtatgctgatgtccgtt

SEQ ID NO: 23569 - DNA, 75 bp, synthetic construct
  source 1..75: mol_type = other DNA
gagccagggttcgcaggtggcggggttcagtaccgattatttaatcgaccttgtcacacgctttattaactggca

SEQ ID NO: 23570 - DNA, 75 bp, synthetic construct
  source 1..75: mol_type = other DNA
cggcgcaaacattactagaggtttggcaaggatctctcctgaaactaaagttgttcttcccgagttcttactgtg

SEQ ID NO: 23571 - DNA, 75 bp, synthetic construct
  source 1..75: mol_type = other DNA
aaggtggtatggcacaaaaacatttgaatgtaggtgcttatcaggtactgaaaattaatttaccaccgctgcgtg

SEQ ID NO: 23572 - DNA, 75 bp, synthetic construct
  source 1..75: mol_type = other DNA
tactcatcatccttcacatctggctctgtagacagggtggtgctcacttctggagtgaatccagattaaacatct

SEQ ID NO: 23573 - DNA, 75 bp, synthetic construct
  source 1..75: mol_type = other DNA
gacgcgctgcgtaaggttgacgtgggcgcgcaggtcagcggtcagttgaaaacgctgtcggtggcgattggcgat

SEQ ID NO: 23574 - DNA, 75 bp, synthetic construct
  source 1..75: mol_type = other DNA
ttcgccgtgcagctctgttacctgcgctttcctggtgtcatcctgggcgtcgatgagccgccgtttccgcccttg

SEQ ID NO: 23575 - DNA, 75 bp, synthetic construct
  source 1..75: mol_type = other DNA
cgacggccaacgagctgccggacgccatcatcaccgagtcaggcttgaagatcacgccgctcgacgcggcggtac

SEQ ID NO: 23576 - DNA, 75 bp, synthetic construct
  source 1..75: mol_type = other DNA
cggcactcgtgcggcgatcaacatgactggcggcgatgcggccctggacctgaccgcaatgccggccgtggtgtt

SEQ ID NO: 23577 - DNA, 75 bp, synthetic construct
  source 1..75: mol_type = other DNA
ctgattggcgagcagctggatcgtggcctgtctgaattccgctggcagggtaagcgtgcggataaatttaaccgt

SEQ ID NO: 23578 - DNA, 75 bp, synthetic construct
  source 1..75: mol_type = other DNA
taagcaaagttaaaggatcgatgggaagccacgagcgccatgcattgcctggtgttatcggtgacgatcttttgc

SEQ ID NO: 23579 - DNA, 75 bp, synthetic construct
  source 1..75: mol_type = other DNA
tttccggggaatattcctgcgtgcaactggcccgggctctgttcccggggcgatacccttcagccccgacagtaa

SEQ ID NO: 23580 - DNA, 75 bp, synthetic construct
  source 1..75: mol_type = other DNA
gattatgcggagcatgcccgcatcgggggtaagcctggcctgcagttcgtcggcgacaggctggacgaaatccag

SEQ ID NO: 23581 - DNA, 75 bp, synthetic construct
  source 1..75: mol_type = other DNA
attgcggtggcgaactgcccggaaacgtacaaaccgcagttgcaggaaggcagcggtcgtacccagactatccgc

SEQ ID NO: 23582 - DNA, 75 bp, synthetic construct
  source 1..75: mol_type = other DNA
ggcgggaaattatatatgggctttgacgtctgtacttgttcacgtcattggctccctcatcatgacagctttagg

SEQ ID NO: 23583 - DNA, 75 bp, synthetic construct
  source 1..75: mol_type = other DNA
atgcgaaagttcaaaataattattgaaacgggaatagccggtggagatttcgaggatgaattcgaagtggatgat

SEQ ID NO: 23584 - DNA, 75 bp, synthetic construct
  source 1..75: mol_type = other DNA
ggctcaggtactgcatgataaatacatgatctggtgcggtgagcagctatggtctgcattcgttctggcgtctgt

SEQ ID NO: 23585 - DNA, 75 bp, synthetic construct
  source 1..75: mol_type = other DNA
tcggtaaaacggcgcgcgagaaagcgaaaaaaggcgatgcaggcaaaaaaggcggcaagcgtcgtcaggtcggta

SEQ ID NO: 23586 - DNA, 75 bp, synthetic construct
  source 1..75: mol_type = other DNA
ccgtgatggctacggctttctgcgggttgaagggcgtaaagatgatttgtatctctccagcgagcagatgaaaac

SEQ ID NO: 23587 - DNA, 75 bp, synthetic construct
  source 1..75: mol_type = other DNA
ccggagaagacgtgactcaggctgaacagccacaacagccacaacagccacaacagccacaacagccacaacagc

SEQ ID NO: 23588 - DNA, 75 bp, synthetic construct
  source 1..75: mol_type = other DNA
tggtataccgccgggccattgcggggctgaatgtatcagggctgaagaaaaacgcgcgggatatcagtctgctga

SEQ ID NO: 23589 - DNA, 75 bp, synthetic construct
  source 1..75: mol_type = other DNA
ttctggctggcgaaggcaacaaagctttcacctctgaagaattcactcacttcctggaagaactgaccaaacagt

SEQ ID NO: 23590 - DNA, 75 bp, synthetic construct
  source 1..75: mol_type = other DNA
aaatccagaacttctgtctgcacggaacagtgtcgacgggtaagtcagaggttattcgacgtcttgccaactatg

SEQ ID NO: 23591 - DNA, 75 bp, synthetic construct
  source 1..75: mol_type = other DNA
atgtttcttgaacatgtcacccgtgacggagagcgctgggactctctcgcatggcagtactacggcgacccgctg

SEQ ID NO: 23592 - DNA, 75 bp, synthetic construct
  source 1..75: mol_type = other DNA
cagctttctactccatgcactgacagcatcataaacagcattgcagcaggcattttcaccaaagagggggcagca

SEQ ID NO: 23593 - DNA, 75 bp, synthetic construct
  source 1..75: mol_type = other DNA
cgacattacgcgcttacgtgggcgttatgcgtggtcaaaagacggcactgattcatggtttatcactgaccttga

SEQ ID NO: 23594 - DNA, 75 bp, synthetic construct
  source 1..75: mol_type = other DNA
gaatgcaacggattttatgacgttccgcgcccgcgtccgacgccgcctgtaagacgaaacgcaactgagcagcct

SEQ ID NO: 23595 - DNA, 75 bp, synthetic construct
  source 1..75: mol_type = other DNA
tagatgtagccatgaatacaggtctggcgcttatcggttatggctatatcacttttatgtcattcaggtggttga

SEQ ID NO: 23596 - DNA, 75 bp, synthetic construct
  source 1..75: mol_type = other DNA
tacaaaataaaattacgtgcgtcaggttttcgcctggtctatcaggtgattgacgaacaattaattatcgctgtt

SEQ ID NO: 23597 - DNA, 75 bp, synthetic construct
  source 1..75: mol_type = other DNA
aaaatggaaaaacgcattgaattcgaccttgagtacatccgtgagtggagcctctggttcgatatcaaaattgtt

SEQ ID NO: 23598 - DNA, 75 bp, synthetic construct
  source 1..75: mol_type = other DNA
aaccaataacggcatcaatgattataagtcctgataaatgtgtttatgatcctatcaagggaaacttcattataa

SEQ ID NO: 23599 - DNA, 75 bp, synthetic construct
  source 1..75: mol_type = other DNA
caggcgtgggaagtattcgaaaaactggaagactgttatttcaaccaaaaacaaccaccagcggcacaaaacaca

SEQ ID NO: 23600 - DNA, 75 bp, synthetic construct
  source 1..75: mol_type = other DNA
cctggacgcactggaaatggtcgatacttccagtgcgccagatattgaatggcctacgcctccggcagtacaggc

SEQ ID NO: 23601 - DNA, 75 bp, synthetic construct
  source 1..75: mol_type = other DNA
attcctctcgtcactggcgctgatctgctggcgcagtacgcctgtatgggacttggttttaagctgttggtggtc

SEQ ID NO: 23602 - DNA, 75 bp, synthetic construct
  source 1..75: mol_type = other DNA
cgtatcagttttggcagtgcgaagcatcctgactgtcgggggattacggttgatgagctgcagaaaattcagttc

SEQ ID NO: 23603 - DNA, 75 bp, synthetic construct
  source 1..75: mol_type = other DNA
gcgtgacgataccggggaagtgcaggccgtggagcttgtcgtgcgtggacgtcacaaagaagtggattccggcga

SEQ ID NO: 23604 - DNA, 75 bp, synthetic construct
  source 1..75: mol_type = other DNA
ttatatacgtcgtttgcctcaagatccctgggggggggattatcagctgttaaatcctggtcagtacagcaatat

SEQ ID NO: 23605 - DNA, 75 bp, synthetic construct
  source 1..75: mol_type = other DNA
gcggggctgtatcatcgggcgggaaaaggtgaaatcaacgaactggtgaacctgcctgatatcttggggatggag

SEQ ID NO: 23606 - DNA, 75 bp, synthetic construct
  source 1..75: mol_type = other DNA
gtttaccagtaccgataaagccatcgagccggagtcggtactgatgcaggacggcgcattcagcctgagcgcccc

SEQ ID NO: 23607 - DNA, 75 bp, synthetic construct
  source 1..75: mol_type = other DNA
ccgcaaatcgtcgaaaaaatcctgcgcgagcggcaccagatgcgcggtcaggacttcgtgtttaacctcaaaagc

SEQ ID NO: 23608 - DNA, 75 bp, synthetic construct
  source 1..75: mol_type = other DNA
ggacttttacctgaaaatgaaaagattacctccgttgatgttgaagactggacaccggagcgtcgattctcagtt

SEQ ID NO: 23609 - DNA, 75 bp, synthetic construct
  source 1..75: mol_type = other DNA
ctttgacccggaaaaaacagggaagcatctcggtccatggtctcctgatggccacctgggtgatctccctgcgct

SEQ ID NO: 23610 - DNA, 75 bp, synthetic construct
  source 1..75: mol_type = other DNA
gcctgatttcttacaacctgatcatcgctggcttgaattgcagttgcgtatgctgctggagcaggtggaacaatt

SEQ ID NO: 23611 - DNA, 75 bp, synthetic construct
  source 1..75: mol_type = other DNA
atgacgattgcagaacgtcttattcaaaaaggcgcacttgaagtggcgcgggaaatagcctgccggctgcgggat

SEQ ID NO: 23612 - DNA, 75 bp, synthetic construct
  source 1..75: mol_type = other DNA
acaggttagggtattagccgagccacttaagaaaaatgcttatggtcaatatctgctgaaaatggttaaaggtta

SEQ ID NO: 23613 - DNA, 75 bp, synthetic construct
  source 1..75: mol_type = other DNA
caaaaacgtatacgaataaaccagaagggaaaacattgcaggcagtctgttcattatttccgtggaataatgtat

SEQ ID NO: 23614 - DNA, 75 bp, synthetic construct
  source 1..75: mol_type = other DNA
gcaatttactgaaacaaagcacgatgtcgacgggtaatgtccaacaaacaatcgatgccgccgactaccaggtac

SEQ ID NO: 23615 - DNA, 75 bp, synthetic construct
  source 1..75: mol_type = other DNA
aaatctctattcacgaagtggttaaaacgctggtcgaagcgatcatcctcgtgttcctggttatgtatctgttcc

SEQ ID NO: 23616 - DNA, 75 bp, synthetic construct
  source 1..75: mol_type = other DNA
acgtgaaacggctccgtcgtataccgatgaaaaacagtttctgggctcatcgtattttcttgaccgcctcgggct

SEQ ID NO: 23617 - DNA, 75 bp, synthetic construct
  source 1..75: mol_type = other DNA
cctttgcttgttgactgaagaagaaattcagtggtggatgtcgggtggagtattccctgatccatggccacagaa

SEQ ID NO: 23618 - DNA, 75 bp, synthetic construct
  source 1..75: mol_type = other DNA
ccattgggttgtcggcgaagaacgcgatccttatcgtcgaattcgccaaagacttgatggataaagaaggtaaag

SEQ ID NO: 23619 - DNA, 75 bp, synthetic construct
  source 1..75: mol_type = other DNA
aaagaatctgcccgcagaaaaaaaagccggatttctggcaactctgatcgcaatgaaattaaacggtgaaatctg

SEQ ID NO: 23620 - DNA, 75 bp, synthetic construct
  source 1..75: mol_type = other DNA
atgaccacaccaaatccactggcaaagacgaaaggtgcggggacgacgttctggatgtataccggcaacggcgat

SEQ ID NO: 23621 - DNA, 75 bp, synthetic construct
  source 1..75: mol_type = other DNA
gatggtgcagtggtgggctgattatttagatataaatagaatgcaatatgtgacaccgtatgacttcgcaaagga

SEQ ID NO: 23622 - DNA, 75 bp, synthetic construct
  source 1..75: mol_type = other DNA
ctgctggaaattggcagtcagcaactggcatttacccatcaggaagcgaagcagttttttgattgccgtctgtca

SEQ ID NO: 23623 - DNA, 75 bp, synthetic construct
  source 1..75: mol_type = other DNA
tcacacacagtacgtctgacttcggtaatattctgctggatgttgcgaacaaagccattctgcagggctgggaag

SEQ ID NO: 23624 - DNA, 75 bp, synthetic construct
  source 1..75: mol_type = other DNA
tgattgaagacgccaaaccggcaagtcgccacctgaccgggctggctatcagtctgagctcgaccggcgaactgt

SEQ ID NO: 23625 - DNA, 75 bp, synthetic construct
  source 1..75: mol_type = other DNA
gccatcaacaagtggaacggtactctgccgcaatacatgaccagcggtgccaatacaccatttatccagattaaa

SEQ ID NO: 23626 - DNA, 75 bp, synthetic construct
  source 1..75: mol_type = other DNA
actcaggtggaagaaaaagtcagccacgttgctgaaacagtcgagcaaattaaaaagggcactattcgtgagggc

SEQ ID NO: 23627 - DNA, 75 bp, synthetic construct
  source 1..75: mol_type = other DNA
acaggcatgagtcctttttttacgcgggtatttcacgcaatgaaacaccattaaaaaatcttccaagttcagacg

SEQ ID NO: 23628 - DNA, 75 bp, synthetic construct
  source 1..75: mol_type = other DNA
cctgttccatggccttcagccacaccgccaacaggctggctgaaatgcaacggtgcggctttttctgctgaagaa

SEQ ID NO: 23629 - DNA, 75 bp, synthetic construct
  source 1..75: mol_type = other DNA
agtggtatgacgctggtggagagttcccccggcagggatgtgaaggatgtgaaatggcgacggacttcaccgcat

SEQ ID NO: 23630 - DNA, 75 bp, synthetic construct
  source 1..75: mol_type = other DNA
gataacgcggttactgtcacggaaatatccggacctggtgataccggatgcgctggcagcagaaggaagcagtaa

SEQ ID NO: 23631 - DNA, 75 bp, synthetic construct
  source 1..75: mol_type = other DNA
ttttcataaacgttggtttgggagaaggctctgcattacccgttggtgtccctgttccatggccttccgccactc

SEQ ID NO: 23632 - DNA, 75 bp, synthetic construct
  source 1..75: mol_type = other DNA
aggtacggcgtgaggatccgccagttgaaaccggagcatggaaagacgctattgactgggtactcaaggaggcct

SEQ ID NO: 23633 - DNA, 75 bp, synthetic construct
  source 1..75: mol_type = other DNA
agaaaatcgccgatattatcagcgtaattgacggcattgccttccagaccaatattctggctttgaacgcggcgg

SEQ ID NO: 23634 - DNA, 75 bp, synthetic construct
  source 1..75: mol_type = other DNA
aaacaaaatcattaacaggggccagcatctggcaggcaggtcccgggggatttaatgtggacattatagcggtgg

SEQ ID NO: 23635 - DNA, 75 bp, synthetic construct
  source 1..75: mol_type = other DNA
ggtttaggagaaggctcagcattgcctgttggcgtacctgttccgtggccctcagccactccgccaacaggctgg

SEQ ID NO: 23636 - DNA, 75 bp, synthetic construct
  source 1..75: mol_type = other DNA
gttgctatggtgccattaaggatgcacaggcgttgtctgaaggagtggtggcttcttcccgttacccgaaacact

SEQ ID NO: 23637 - DNA, 75 bp, synthetic construct
  source 1..75: mol_type = other DNA
tgcgtatcatcactgataacctcaaacaggaagagcacgctattgtgcaggtggaagaaatgcaggcggtgaatg

SEQ ID NO: 23638 - DNA, 75 bp, synthetic construct
  source 1..75: mol_type = other DNA
tctgctttcggccggcacgctctcccttgatggaaattcactggataaccgcggcactgtccagggtaaccatgt

SEQ ID NO: 23639 - DNA, 75 bp, synthetic construct
  source 1..75: mol_type = other DNA
tactcggttataccgaacaaaaagtgaaatttcgtgcgctgtttctggaactgtttttccgccgtacggtgaatt

SEQ ID NO: 23640 - DNA, 75 bp, synthetic construct
  source 1..75: mol_type = other DNA
caggtggattacgccattgaagccaacatcactatctatcgtgatcaggatgccaactcgataaaggacaacgcc

SEQ ID NO: 23641 - DNA, 75 bp, synthetic construct
  source 1..75: mol_type = other DNA
attggttacgccaggattcatcagaaaacaaccggtatcagcacctgggattacgggtacggatacagtggtcgt

SEQ ID NO: 23642 - DNA, 75 bp, synthetic construct
  source 1..75: mol_type = other DNA
tgtatgggtccaccacatattgcaatttttattctcttttaaaatatattccacgggcgtcattagtgcgagcgc

SEQ ID NO: 23643 - DNA, 75 bp, synthetic construct
  source 1..75: mol_type = other DNA
cctggcgaaccagcggtgagcttaatattcctttgaatgtgatggttgatcaaacgctgaccgttggtgcagagt

SEQ ID NO: 23644 - DNA, 75 bp, synthetic construct
  source 1..75: mol_type = other DNA
ttgctgactcccttgtcaaaggctgggaaaccagaattccggcaatgaaatttagcgaatgggatcaattccggt

SEQ ID NO: 23645 - DNA, 75 bp, synthetic construct
  source 1..75: mol_type = other DNA
caacaaagcggtcgctgcctttgccgggttcgttggctacatgctgatgaacatgagcattaattattacctgac

SEQ ID NO: 23646 - DNA, 75 bp, synthetic construct
  source 1..75: mol_type = other DNA
aatgtggattatgtcaccagttttgaactgccttttcgcttgttgcttacccgtacaccacaactgattgccgcg

SEQ ID NO: 23647 - DNA, 75 bp, synthetic construct
  source 1..75: mol_type = other DNA
ttactccagaaaatctcgcattagcgttaacaggaaagtcagacctaccagtagacataaagctgcgaaatattg

SEQ ID NO: 23648 - DNA, 75 bp, synthetic construct
  source 1..75: mol_type = other DNA
ttggatttgcccctatatttccagacatctgttatcacttaacccattacaagcccgctgccgcagatattcccg

SEQ ID NO: 23649 - DNA, 75 bp, synthetic construct
  source 1..75: mol_type = other DNA
tgttgagctagtacgccggagtgggcgcgagacgttacggcaactggaagccaagacaggtgcgacaagatatct

SEQ ID NO: 23650 - DNA, 75 bp, synthetic construct
  source 1..75: mol_type = other DNA
atgcaacagatttcctttctgcccggagaaatgacgcccggcgagcgcagcctcattcagcgggccctgaaaacc

SEQ ID NO: 23651 - DNA, 75 bp, synthetic construct
  source 1..75: mol_type = other DNA
agcgagaaaaaattaaagggcagattgttgatcttgtacgccagagcgggcgagagacgttacgacaactggaag

SEQ ID NO: 23652 - DNA, 75 bp, synthetic construct
  source 1..75: mol_type = other DNA
gtggcaaaagtttttacacaagaagagcgggagaaaattaaagggcaggttgttgaactcgtacgccagagtggg

SEQ ID NO: 23653 - DNA, 75 bp, synthetic construct
  source 1..75: mol_type = other DNA
atggttcagaaaattttgtcggataaggttatgaatgaaagaacaaatgcgtattactcttattatcttggagag

SEQ ID NO: 23654 - DNA, 75 bp, synthetic construct
  source 1..75: mol_type = other DNA
gcgcttatatcgttttcctggttctgttttgaccgattaccgaatactgaagaattacgccaaaaccctgacagg

SEQ ID NO: 23655 - DNA, 75 bp, synthetic construct
  source 1..75: mol_type = other DNA
ttgccagttgatgatgatttgttaagtgaacaggaacttaaagattacggtgtggatattgatgcgctcaacgcc

SEQ ID NO: 23656 - DNA, 75 bp, synthetic construct
  source 1..75: mol_type = other DNA
gaccagtataaagaagataacctggacaaaaccacacacacaccgctggctacaggtttgctgggtggctttgat

SEQ ID NO: 23657 - DNA, 75 bp, synthetic construct
  source 1..75: mol_type = other DNA
aatgaaatcgaacaacgtctgaaaccacactacccggaaatctggctgcatatgtgggaatccccgtccttcaga

SEQ ID NO: 23658 - DNA, 75 bp, synthetic construct
  source 1..75: mol_type = other DNA
acctcggctgcagtggttagctttcccaccgttggcggtgtcatcagcaaaagcctcggacgcatcgctggcagt

SEQ ID NO: 23659 - DNA, 75 bp, synthetic construct
  source 1..75: mol_type = other DNA
cggataaatactgttttacagaacggaacgaatccccccgtcttcgccggcagtggcaggatgttctggaggagt

SEQ ID NO: 23660 - DNA, 75 bp, synthetic construct
  source 1..75: mol_type = other DNA
agattgtagaaaaccaggtcacctatccgcttaccaccaccatgctgtccgtacctggcgcaaaaaccgtgcgtg

SEQ ID NO: 23661 - DNA, 75 bp, synthetic construct
  source 1..75: mol_type = other DNA
aattgatggatggggttgaggttgagtggttgccactctcaaaagtattcaacttaaggaatggttatacaccgt

SEQ ID NO: 23662 - DNA, 75 bp, synthetic construct
  source 1..75: mol_type = other DNA
cccgctctcagttaataaacagcatcgatatcctccgggctcgccgggcgactggcctgatgacccgcgacaatt

SEQ ID NO: 23663 - DNA, 75 bp, synthetic construct
  source 1..75: mol_type = other DNA
ctcaacaaacaccagatacagacgctggccaccatgacggcggcgatgttcagcagcaccttcgaaaaactctgc

SEQ ID NO: 23664 - DNA, 75 bp, synthetic construct
  source 1..75: mol_type = other DNA
ctcacccgactgctggatcagcactacggccttacgctgaatgacacaccgttcgctgatgaacgtgtgattgag

SEQ ID NO: 23665 - DNA, 75 bp, synthetic construct
  source 1..75: mol_type = other DNA
cagcatattgaggcaggtatttcactgtgcgatgcggtgaactttctcgtggaaaaatacgcgctggtgcgtact

SEQ ID NO: 23666 - DNA, 75 bp, synthetic construct
  source 1..75: mol_type = other DNA
gataatccgcttattaatattctggagaagttctccagctggtatgacacgaatcacgtgacgctgggcggtgtc

SEQ ID NO: 23667 - DNA, 75 bp, synthetic construct
  source 1..75: mol_type = other DNA
ccagcgcaaacgtgagctggcgttttttcatgggccgtcgacgttttatcgccgcacgacaggcgtcactgatgt

SEQ ID NO: 23668 - DNA, 75 bp, synthetic construct
  source 1..75: mol_type = other DNA
ttggctggggatgcgggagaccacggcaaaaagttttgtcggggaggtggaagcagcctggtcggaatacgcaga

SEQ ID NO: 23669 - DNA, 75 bp, synthetic construct
  source 1..75: mol_type = other DNA
attgacgggctcaaggaagtccaggaatcagtgatgcgcattgaggccggactgagcacgtatgagaaagagctg

SEQ ID NO: 23670 - DNA, 75 bp, synthetic construct
  source 1..75: mol_type = other DNA
cgccggtgcgccgcaggggcagaaggataatccgcttattaatattctggagaagttctccagctggtatgacac

SEQ ID NO: 23671 - DNA, 75 bp, synthetic construct
  source 1..75: mol_type = other DNA
gatattaaaacagaaacggtggcggacattgtgcagtcgctgccattgttcaccgaaacgcgagcggatgacctg

SEQ ID NO: 23672 - DNA, 75 bp, synthetic construct
  source 1..75: mol_type = other DNA
tactgaaacgcaagcggatgacttggttttaccatcgctgcatatagcaaaccgcgaactgcgtcgggcgaaaaa

SEQ ID NO: 23673 - DNA, 75 bp, synthetic construct
  source 1..75: mol_type = other DNA
tcatgtccagaagtgggagcgagtctgcgccgcgctgcgggagctgaacaagcaccgagatatggttgccgggat

SEQ ID NO: 23674 - DNA, 75 bp, synthetic construct
  source 1..75: mol_type = other DNA
aatcagcaaaggtcgtctgattcgtgtaaaccagaacggtaaatttcgttactgcatgccgggcgataagttacc

SEQ ID NO: 23675 - DNA, 75 bp, synthetic construct
  source 1..75: mol_type = other DNA
agtcgtgaagaagtgctgaacgaactatgggaactgaaaaaggctggttttgttgataaaagcgcgtacacctgg

SEQ ID NO: 23676 - DNA, 75 bp, synthetic construct
  source 1..75: mol_type = other DNA
tgaatggatgcgctcactgaaacggcacgaacgccgggcgctgatgcgttcgctgcgtgacaaacaggcaaaaaa

SEQ ID NO: 23677 - DNA, 75 bp, synthetic construct
  source 1..75: mol_type = other DNA
atgaaaacattacccgacacacacgtacgggcggcatcgcgctgcccgtctccggttgaaatctggcagacactg

SEQ ID NO: 23678 - DNA, 75 bp, synthetic construct
  source 1..75: mol_type = other DNA
tccattgccgccggttttaagggattaattacttcaaaagtaaaatctcgcccgcaatgttgtgacgatgacgcg

SEQ ID NO: 23679 - DNA, 75 bp, synthetic construct
  source 1..75: mol_type = other DNA
gtaggtggtatgacgtttatggcgcttgcccgtaaacatgggcgttctgattgctgggttgggcgtttattgcaa

SEQ ID NO: 23680 - DNA, 75 bp, synthetic construct
  source 1..75: mol_type = other DNA
tcagctcggtggtacgccgccggtgaaaggccaacagcttaacgcctctattattgctcagacgcgtctgacctc

SEQ ID NO: 23681 - DNA, 75 bp, synthetic construct
  source 1..75: mol_type = other DNA
gggtgttctgatacccggaaggcttctgacaaaaagtctggtggatccgctgtgctctgggtcacgcgtggtgac

SEQ ID NO: 23682 - DNA, 75 bp, synthetic construct
  source 1..75: mol_type = other DNA
gttcggcagcgtcatcggcatcatctgcgtctgcttcaaaagatgaggcgaccagacaggcgtcagcagcgaagg

SEQ ID NO: 23683 - DNA, 75 bp, synthetic construct
  source 1..75: mol_type = other DNA
aggcaattccgcgaaggcggcaaaaacgtccgagacgaacgctaagtcttctgagacggcagcagcacagagtgc

SEQ ID NO: 23684 - DNA, 75 bp, synthetic construct
  source 1..75: mol_type = other DNA
tgagacgaagcagcatgacggttccgggcaacgtaattatggttgcagtcgtgggctggggcgtctactggatgg

SEQ ID NO: 23685 - DNA, 75 bp, synthetic construct
  source 1..75: mol_type = other DNA
tgttcgagttaatagcgcatcgctatgaacgtgggagcctggtgataaccagtaaccatccgttcagcatgtggg

SEQ ID NO: 23686 - DNA, 75 bp, synthetic construct
  source 1..75: mol_type = other DNA
tgaaagctctgcctgatgcccagttcgaagtggttcattcactggcgaagtggaaacgtcagaccttagggcaac

SEQ ID NO: 23687 - DNA, 75 bp, synthetic construct
  source 1..75: mol_type = other DNA
gcccgaagtttgctgatacgggcaaagcctatctggtcggcctggctgccactgatgatcccgccagtctgggta

SEQ ID NO: 23688 - DNA, 75 bp, synthetic construct
  source 1..75: mol_type = other DNA
aaaccgatatccgacggggaaggcattgtgttttcctgatgcatgttcacctggtctttgtcaccagataccgac

SEQ ID NO: 23689 - DNA, 75 bp, synthetic construct
  source 1..75: mol_type = other DNA
tgcttctgctgaagtcatttgtggaaaatacgggcggttatctttcggaactggtgagtaaaacgttcaaccttt

SEQ ID NO: 23690 - DNA, 75 bp, synthetic construct
  source 1..75: mol_type = other DNA
cggcattccatttttagtcatgctggttgccattttcttttccaccgcctggcgagtcctgacgttatcgggact

SEQ ID NO: 23691 - DNA, 75 bp, synthetic construct
  source 1..75: mol_type = other DNA
gcggagattgattgtaagccagtccgggattttgttgccaaggctaatccggctaccgtgctggaattactggat

SEQ ID NO: 23692 - DNA, 75 bp, synthetic construct
  source 1..75: mol_type = other DNA
ttgcaatctgctgaaaaaatgcctccttctgctactgattcggtgcaggaggcaatgaatgatgtgcgccttaaa

SEQ ID NO: 23693 - DNA, 75 bp, synthetic construct
  source 1..75: mol_type = other DNA
tgggaagttaccccgcatgaaattcgccctgatatttatcctaacccaaccgacggtttacctgttggattcaag

SEQ ID NO: 23694 - DNA, 75 bp, synthetic construct
  source 1..75: mol_type = other DNA
aaaacaaggccgccctgacgctgcgcgagctagagcgctggctcacattggcggtcggcacctaccacggttcgg

SEQ ID NO: 23695 - DNA, 75 bp, synthetic construct
  source 1..75: mol_type = other DNA
cggcatcatcgaagaacgcggcgaaaacctcagaaacgaatgcagctaacagcgcacaggcggcagcgtcctcgc

SEQ ID NO: 23696 - DNA, 75 bp, synthetic construct
  source 1..75: mol_type = other DNA
ttctgtatttttgtttttctgccctgactggcctgcagaaagctgatgaaagaaaaaatgatgaaaggaatgaag

SEQ ID NO: 23697 - DNA, 75 bp, synthetic construct
  source 1..75: mol_type = other DNA
gtaaattctgttgatgcgaaatatcaggaactgcgggcagaactccatgaagcccggaaaaacattccatcaaaa

SEQ ID NO: 23698 - DNA, 75 bp, synthetic construct
  source 1..75: mol_type = other DNA
tttctctggtgctctcgggcgtattcagcgtacccatcaggcggtaaacaggctggttcctttttatatatcaga

SEQ ID NO: 23699 - DNA, 75 bp, synthetic construct
  source 1..75: mol_type = other DNA
tatatcagcgcacagaacaaaagaataaaaactgccacccgtaccagccgtggtgaccagtttgctgaaggctgg

SEQ ID NO: 23700 - DNA, 75 bp, synthetic construct
  source 1..75: mol_type = other DNA
aacccttgcaactgccatacgccagttctctcaggggattgtcagtaatgaaattgaaactgcgctcagtgctcc

SEQ ID NO: 23701 - DNA, 75 bp, synthetic construct
  source 1..75: mol_type = other DNA
cagagcggcatgtacgaagtatgtttacagataccagccagatttgttccactactgcggaggtgcgatcactta

SEQ ID NO: 23702 - DNA, 75 bp, synthetic construct
  source 1..75: mol_type = other DNA
tccttaccttgtgaattttgcctttgctgattattccaggtctgcggcaagtaaggctcgctgtgagcattgtgc

SEQ ID NO: 23703 - DNA, 75 bp, synthetic construct
  source 1..75: mol_type = other DNA
attactccccaaaatctccaaaattgagcgatgacgctccagcgacaggcaccggttgtttaacaattacggatg

SEQ ID NO: 23704 - DNA, 75 bp, synthetic construct
  source 1..75: mol_type = other DNA
gtggcattgtgtgatgtgtgagcagttttttcatgggaagaagttctgtgaggcctgtggtacggggatttattg

SEQ ID NO: 23705 - DNA, 75 bp, synthetic construct
  source 1..75: mol_type = other DNA
gacctttaccgagtggaataacggtgaactgagcagctacctgatcgacatcaccaaagacatcttcactaaaaa

SEQ ID NO: 23706 - DNA, 75 bp, synthetic construct
  source 1..75: mol_type = other DNA
cgcgacggctttgcgtttcttgctatgggtttcacgggtaaacgtgctgcccagttcaaagaggcatacatcaat

SEQ ID NO: 23707 - DNA, 75 bp, synthetic construct
  source 1..75: mol_type = other DNA
acgtgctgcccggttcaaagaggcatacatcaacgcctttaacctgatggagaagagtttatcaggtgccgatgc

SEQ ID NO: 23708 - DNA, 75 bp, synthetic construct
  source 1..75: mol_type = other DNA
gctggcaaataatggaatgcgtggtgtaagccggattcttctcaagctacctgtcgactatcccgtaaaatacac

SEQ ID NO: 23709 - DNA, 75 bp, synthetic construct
  source 1..75: mol_type = other DNA
atcgtgcaaacgctgacacaacgcggcgtgcatatcgaattcgtcaaggaacacctcagttttactggcgaagac

SEQ ID NO: 23710 - DNA, 75 bp, synthetic construct
  source 1..75: mol_type = other DNA
cagcggtgataccggactgcgcgacgtccagcgtctggctgaagccaacgactttcctcccgtcgatgaaaccaa

SEQ ID NO: 23711 - DNA, 75 bp, synthetic construct
  source 1..75: mol_type = other DNA
cgcgcgccgcagccgtgtggtatgggaaaacaaacaacgcaaaaagcaggggctggataccctgggcatggatga

SEQ ID NO: 23712 - DNA, 75 bp, synthetic construct
  source 1..75: mol_type = other DNA
ctttcgaaaaaactactggcgagttgaccttggtaatagaaaaattaccgccaattgaaatcagttcttcctttc

SEQ ID NO: 23713 - DNA, 75 bp, synthetic construct
  source 1..75: mol_type = other DNA
catgagcaactggacgaactgctgaaagcggcgctggcgatgcttatctgggggggaaaggtacgcgttatctcc

SEQ ID NO: 23714 - DNA, 75 bp, synthetic construct
  source 1..75: mol_type = other DNA
gaaaacagacagcgcaagaagcagggactggatgcactgggtatggatgaactgatagcgaaagcctggcgtttt

SEQ ID NO: 23715 - DNA, 75 bp, synthetic construct
  source 1..75: mol_type = other DNA
gacgggcagcaggtctggctaccgcaaccttactggaacggcgtcaccgttcatgatttacgccataacgacgct

SEQ ID NO: 23716 - DNA, 75 bp, synthetic construct
  source 1..75: mol_type = other DNA
gcaggacccggcaaccgatgcaggtctgcttaaccagaacgatatcaccacgcttatccgcaaagacggtttccg

SEQ ID NO: 23717 - DNA, 75 bp, synthetic construct
  source 1..75: mol_type = other DNA
tctgaaatgctcaataaaatccgcgatggtgaaacgttggtggtagcgaagcttgatcgtctggggcgtgatgcg

SEQ ID NO: 23718 - DNA, 75 bp, synthetic construct
  source 1..75: mol_type = other DNA
atttaatcgacgggcgggtaaaaacaagcgattacaccaaagaagatttacgcctgatgcatgcagaaggtgttt

SEQ ID NO: 23719 - DNA, 75 bp, synthetic construct
  source 1..75: mol_type = other DNA
ccccctcaataaacctgtgctgattaccaatgtgcagagcgcaattgcaaaggccggtaaaaaaggcacgctggc

SEQ ID NO: 23720 - DNA, 75 bp, synthetic construct
  source 1..75: mol_type = other DNA
atctgaaaaccgttatggaacagctggctcagggtaaacgccgttgccagcaacaattcacctctcaagaagtgc

SEQ ID NO: 23721 - DNA, 75 bp, synthetic construct
  source 1..75: mol_type = other DNA
tcttgttgcctgcatgcgcaagctgttaaccattctgaatgcaatgatccgaaagaatgaagaatggagtgattc

SEQ ID NO: 23722 - DNA, 75 bp, synthetic construct
  source 1..75: mol_type = other DNA
agacgccgaagcgcagaccatttccaatatcatcggcggcacggatgagaacggtaaatataccggcatcaaggc

SEQ ID NO: 23723 - DNA, 75 bp, synthetic construct
  source 1..75: mol_type = other DNA
atgatatttaaccgtaataaaaaacgagatgaacaacagaattcttctgttgttttgccatcaactgaaaatgta

SEQ ID NO: 23724 - DNA, 75 bp, synthetic construct
  source 1..75: mol_type = other DNA
tttgaaggcacaggtgtagatgagaaggggatagtggtttctgttaatggtgaggatgctccagcagttaaacct

SEQ ID NO: 23725 - DNA, 75 bp, synthetic construct
  source 1..75: mol_type = other DNA
atgcccctgatcacgcggcttatgctgcaaaacttcaaaaagtttccggaactggacctgcgcttcagcaacgat

SEQ ID NO: 23726 - DNA, 75 bp, synthetic construct
  source 1..75: mol_type = other DNA
tagttacggttaattactacatgacgacaattgcaggaatgtttcaatttgcggctgataacggctatatcgtgt

SEQ ID NO: 23727 - DNA, 75 bp, synthetic construct
  source 1..75: mol_type = other DNA
cctgtttatctttcgcggccgacggggtgacacgattaaaattctgtgggctgatgctgatggtctgtgcctgtt

SEQ ID NO: 23728 - DNA, 75 bp, synthetic construct
  source 1..75: mol_type = other DNA
tggtgtggagcgatcgtaatggcgaggacagagaaaaaatttcatgctgccctgactgcttgatagctgaggcca

SEQ ID NO: 23729 - DNA, 75 bp, synthetic construct
  source 1..75: mol_type = other DNA
tatggaatctgataccgacctgcgactgcgcacgcaacaggcgtttgagggattgagcgtggcgggtccggtcgg

SEQ ID NO: 23730 - DNA, 75 bp, synthetic construct
  source 1..75: mol_type = other DNA
gggcgcgacatccgtctgtctgccatttatgccgctttgcatgtggaaggcgtgcagcgtgtcgaactggctgca

SEQ ID NO: 23731 - DNA, 75 bp, synthetic construct
  source 1..75: mol_type = other DNA
atgaaaaaactgtttgcctctctcgccatcgctgccgttgttgcccccgtgtgggccgccacccagaccgtcacg

SEQ ID NO: 23732 - DNA, 75 bp, synthetic construct
  source 1..75: mol_type = other DNA
ccactcatctacgctgggctggctgtactgcttttagccttacggtataagaagttgctttcccttttcaaccgg

SEQ ID NO: 23733 - DNA, 75 bp, synthetic construct
  source 1..75: mol_type = other DNA
agagtcatcttacaccccggggcggtgggaaacactgccgtttcaggttgccatcatgaacagcatggggaatga

SEQ ID NO: 23734 - DNA, 75 bp, synthetic construct
  source 1..75: mol_type = other DNA
tgctatgacgaactctcctcgtttgaaccggatgtggaaaaagaaggttcaccaactctgcttggcgataagcgt

SEQ ID NO: 23735 - DNA, 75 bp, synthetic construct
  source 1..75: mol_type = other DNA
ggcgtaacgaagcgctggactgcctggtgtatgcctacgcggcattacgtgtgtccgtgcaacgctggcagcttg

SEQ ID NO: 23736 - DNA, 75 bp, synthetic construct
  source 1..75: mol_type = other DNA
aggttgcacttgatacactccgcgcccgtcgtggtgatacctggtacccggtttttcatctggctccacctgccg

SEQ ID NO: 23737 - DNA, 75 bp, synthetic construct
  source 1..75: mol_type = other DNA
gtcactgccgcgacttgacggattcgaacggtgtggtgagtcgtttgacaccattattagtgcaaaccccgtttc

SEQ ID NO: 23738 - DNA, 75 bp, synthetic construct
  source 1..75: mol_type = other DNA
ggacagccgcgccgtgcatgatttctttgccagcgaacgcattgaccaggtctatctggcggcggcgaaagtggg

SEQ ID NO: 23739 - DNA, 75 bp, synthetic construct
  source 1..75: mol_type = other DNA
gtgtggcaggacagcttcccgggctgggtggttatattggtaaaaacggaacagcaaccggcgcattcggcgcct

SEQ ID NO: 23740 - DNA, 75 bp, synthetic construct
  source 1..75: mol_type = other DNA
atgcttaaagttgacgcaattactttttttggcagcaaaacaaagcttgccaatgccgcaggagtgagactggca

SEQ ID NO: 23741 - DNA, 75 bp, synthetic construct
  source 1..75: mol_type = other DNA
caggcgcgccttgatttattaaccggtaaacgggtggtgtctgtccagaaagatggtcgcagaattgaatatacg

SEQ ID NO: 23742 - DNA, 75 bp, synthetic construct
  source 1..75: mol_type = other DNA
gattcacacaaatgtaagggaacgtttgtcgattttgttaatcttaatggtttccagattgaccctcaatttgaa

SEQ ID NO: 23743 - DNA, 75 bp, synthetic construct
  source 1..75: mol_type = other DNA
ggatcacgccgggtgagcacattatcagtgccgattctgcgctcagcagaaatatcaggcattgtttctgccttt

SEQ ID NO: 23744 - DNA, 75 bp, synthetic construct
  source 1..75: mol_type = other DNA
ccgctgacggacacggacggtaatcccgtgatacacggtgtgactgcggtctggcgtgccggggagcaggagcag

SEQ ID NO: 23745 - DNA, 75 bp, synthetic construct
  source 1..75: mol_type = other DNA
ccgtgcaacgctggcagcttgatctggctgtactggcaaaatcccgggaagaagagacgacccggccaaccctga

SEQ ID NO: 23746 - DNA, 75 bp, synthetic construct
  source 1..75: mol_type = other DNA
gccattgtcgtggtgggggtggtactgctggttgcggtcatctggctgcttggtaaatccgcgtccatcatcctg

SEQ ID NO: 23747 - DNA, 75 bp, synthetic construct
  source 1..75: mol_type = other DNA
gttccactgacgacggttcagtgggctgatcaacattattatctgccgaaagaatcttcatacactcccggacaa

SEQ ID NO: 23748 - DNA, 75 bp, synthetic construct
  source 1..75: mol_type = other DNA
aaaccgtataaatgtcgcgatgtcacgcgcaatggatcgactgttgattgtgggtaatgccgatatctggaaggg

SEQ ID NO: 23749 - DNA, 75 bp, synthetic construct
  source 1..75: mol_type = other DNA
cagagaaacccatcctgtttaccggaaaaactgccgctgttaatggctattccgtggcgggaacagcggagggct

SEQ ID NO: 23750 - DNA, 75 bp, synthetic construct
  source 1..75: mol_type = other DNA
gtcgcctgatgaaagacgagccggaatacaaccgcatcgccacctaccagtccatcaatgacgcttatgtcgttg

SEQ ID NO: 23751 - DNA, 75 bp, synthetic construct
  source 1..75: mol_type = other DNA
ctggttcatggcttcaggccacgggctcgcgtcacaattcgtaagcaagatattgatgaaagccagttcgaaatt

SEQ ID NO: 23752 - DNA, 75 bp, synthetic construct
  source 1..75: mol_type = other DNA
cttggaccggaacaactggcgagtctggcagacacgcaaatcatcgacaaagggcgctattacgtgcgcgtttat

SEQ ID NO: 23753 - DNA, 75 bp, synthetic construct
  source 1..75: mol_type = other DNA
ctaaaattgagcatgatgctgccgagccggagattatcctgacggtctggggtaaagggtacaaatttgctgtcg

SEQ ID NO: 23754 - DNA, 75 bp, synthetic construct
  source 1..75: mol_type = other DNA
gtaccggagaacagccagatgctatgggattcagaaattcagcatcatgcctgatagaggcgaagtgttctcgtg

SEQ ID NO: 23755 - DNA, 75 bp, synthetic construct
  source 1..75: mol_type = other DNA
ttatccctgcgacagactggtatttccgtcacgataatgtctccggtgtggcaggaaagtcaacagtataccaac

SEQ ID NO: 23756 - DNA, 75 bp, synthetic construct
  source 1..75: mol_type = other DNA
ccaaaattgaacaggatgcagcagagccaaagatgatccagaccgtctggggaaaagggtataggttttcagttg

SEQ ID NO: 23757 - DNA, 75 bp, synthetic construct
  source 1..75: mol_type = other DNA
agatcagaacggtgcggatattccgggaaaggataccttcacgaaaaatatcggtgcctgtcgtgcttatagcgg

SEQ ID NO: 23758 - DNA, 75 bp, synthetic construct
  source 1..75: mol_type = other DNA
gcaggctgcaacgccgaaagcagtaaaggccgcgtatgatcttgctaacggtaaatatactgcgcaggatgccag

SEQ ID NO: 23759 - DNA, 75 bp, synthetic construct
  source 1..75: mol_type = other DNA
aaaccgttatcaccgatacaggtgccaaaaaattagctcaggcagccgcgccagatggtaagcctgtccgcctga

SEQ ID NO: 23760 - DNA, 75 bp, synthetic construct
  source 1..75: mol_type = other DNA
ctgttatgccttaaacatgagcgaataaaaaaagaaactatcaggcaaaaaaatgcacatattctggatcatggc

SEQ ID NO: 23761 - DNA, 75 bp, synthetic construct
  source 1..75: mol_type = other DNA
aaactatctgcctggatggactacaaaaaagaagtaaaagccgtcgacacttcgacggctcctgagattagctgg

SEQ ID NO: 23762 - DNA, 75 bp, synthetic construct
  source 1..75: mol_type = other DNA
caaatgccgaaaactatataccactccgccagttccggtaatacaggctgatgtcgcgcaagcaattgaaaacct

SEQ ID NO: 23763 - DNA, 75 bp, synthetic construct
  source 1..75: mol_type = other DNA
gcatgggaacgctacagcgttctggtcagccgtgtggatcctgcaaatcctgaatggccggaaatgccgcaataa

SEQ ID NO: 23764 - DNA, 75 bp, synthetic construct
  source 1..75: mol_type = other DNA
gtccggaaattctgggaagaacaggacgttgctcagattgaagggattgttgtcgatggcgctgtacgtgatgtt

SEQ ID NO: 23765 - DNA, 75 bp, synthetic construct
  source 1..75: mol_type = other DNA
gaagctgcaggactgttaccagcaataacccttgttgagaaatttgataacctgacacaaacactacaggctctg

SEQ ID NO: 23766 - DNA, 75 bp, synthetic construct
  source 1..75: mol_type = other DNA
gcgctcccggaagaggcgatgacgggctggaacgaaggcatgacccgcttacagcagctggctgagcgcctgaac

SEQ ID NO: 23767 - DNA, 75 bp, synthetic construct
  source 1..75: mol_type = other DNA
gttttccgaaacttttccaggttttgcggcggcagggatacccgtggaatcacaaaaggatccatcgtatttatt

SEQ ID NO: 23768 - DNA, 75 bp, synthetic construct
  source 1..75: mol_type = other DNA
gtttgcctgtcggtccagttgctgaaaaggaacggtggcggcacgatatgctgattcgttttcctgaagatacag

SEQ ID NO: 23769 - DNA, 75 bp, synthetic construct
  source 1..75: mol_type = other DNA
tcgtgccactgagcgaggtcgccacaaaggatgactttttcaacatcaagaaggccagtgccgccgatctgatgg

SEQ ID NO: 23770 - DNA, 75 bp, synthetic construct
  source 1..75: mol_type = other DNA
ggacaggatccgcgagataaacggctggctcagcgccgaagttattcaattcaaaaattactctttagacgataa

SEQ ID NO: 23771 - DNA, 75 bp, synthetic construct
  source 1..75: mol_type = other DNA
tctgcgcgataccaatctacaccgcaaatctcagggacgccctcttatcaaaattggccaactccactacggaaa

SEQ ID NO: 23772 - DNA, 75 bp, synthetic construct
  source 1..75: mol_type = other DNA
cgccagccaaatacacccgacgcggagtcgacgattcgattttctggtttgtggaaaacttcacccagccgcacg

SEQ ID NO: 23773 - DNA, 75 bp, synthetic construct
  source 1..75: mol_type = other DNA
atgagtaagaaaaaagggaaaacaccgcagccagcggtgaaaacaatgaccgccagcgccccgaaaatggaggca

SEQ ID NO: 23774 - DNA, 75 bp, synthetic construct
  source 1..75: mol_type = other DNA
caccattacaacggaattgtttgggagcctgtatctgataaggaactccagcggtctatggcgaagatttttatt

SEQ ID NO: 23775 - DNA, 75 bp, synthetic construct
  source 1..75: mol_type = other DNA
tgctgtggcgcagagtatattgatcgtcacaaggaatcacaagaagcattaaatatgttaggatgcaataaacta

SEQ ID NO: 23776 - DNA, 75 bp, synthetic construct
  source 1..75: mol_type = other DNA
caggaacgacgcagaaaaatttatgctacaaaaatacagaacatttatcgcaatataaagaacaaacgagggtac

SEQ ID NO: 23777 - DNA, 75 bp, synthetic construct
  source 1..75: mol_type = other DNA
gcctgatgtttataagtgggatctgcgaagccgccgattgttttgatcttgcaggccgggattacaaaatagacc

SEQ ID NO: 23778 - DNA, 75 bp, synthetic construct
  source 1..75: mol_type = other DNA
gtgggagaaggagcagacagaaggcacctcagatccatttgctgagattgagaaggcattatttgttgcagctcg

SEQ ID NO: 23779 - DNA, 75 bp, synthetic construct
  source 1..75: mol_type = other DNA
caagctgggccgcagttcccgatggctgaaaagtgaagtggaagcctggctgcaggcgcgtattgcacagtcccg

SEQ ID NO: 23780 - DNA, 75 bp, synthetic construct
  source 1..75: mol_type = other DNA
caaactgggtcgcagttcccgctggctgaaaagcgaagtggaagcctggctgcaggcgcggattgctcagtcccg

SEQ ID NO: 23781 - DNA, 75 bp, synthetic construct
  source 1..75: mol_type = other DNA
ccacgacgccgggaggattacggtaaggacctgtggagtgcttatcagaccattcaggagaatatgctgaaaggc

SEQ ID NO: 23782 - DNA, 75 bp, synthetic construct
  source 1..75: mol_type = other DNA
aatttttatcagtatccgttgaatccgatctcaaatatagatccattaggattagaaacactaaaatgcattaag

SEQ ID NO: 23783 - DNA, 75 bp, synthetic construct
  source 1..75: mol_type = other DNA
gtggcttcctgagcatcggcaagagccgtgccaaggtattcatggagaagaacactggcgtgacctttgccgatg

SEQ ID NO: 23784 - DNA, 75 bp, synthetic construct
  source 1..75: mol_type = other DNA
ccacgtgcaaatgacgctgcctggcacctcactcccgacgaatttaactggctgattgccggtgtgactggcagc

SEQ ID NO: 23785 - DNA, 75 bp, synthetic construct
  source 1..75: mol_type = other DNA
gagttcgctggtttaatatgtaaggataatagtggcagatatttctcaacagcacctaaccgaggagaaagaaaa

SEQ ID NO: 23786 - DNA, 75 bp, synthetic construct
  source 1..75: mol_type = other DNA
gaacagggacaaatgcttcaggagatgaaagacaaaaaagagttaatggagcgcacaattgaaagatggctcgct

SEQ ID NO: 23787 - DNA, 75 bp, synthetic construct
  source 1..75: mol_type = other DNA
gatattggggatggttattaccttgaaggtggaattgctggtgttcctggtgcgactctgtctgtacaggcgaaa

SEQ ID NO: 23788 - DNA, 75 bp, synthetic construct
  source 1..75: mol_type = other DNA
gtaccgaatacggccccgacaggggtatccgcctttcggcggtgtggctgatgcacgacccggcatacccggaga

SEQ ID NO: 23789 - DNA, 75 bp, synthetic construct
  source 1..75: mol_type = other DNA
tgacacaggttcagtcactgacagagcaactgaagcgtcagcaggagagtgctgatgccggcgccggaggacagg

SEQ ID NO: 23790 - DNA, 75 bp, synthetic construct
  source 1..75: mol_type = other DNA
tatgaccttgctaacgggaaatataccgcacaggacgccaccatagcgcgaaaaggccttgtccagctcagtagt

SEQ ID NO: 23791 - DNA, 75 bp, synthetic construct
  source 1..75: mol_type = other DNA
aatatgggcctgttccggcggatgcgacggaagaacagcggcaggcatatctggcaaaactgcgtgatacgccgg

SEQ ID NO: 23792 - DNA, 75 bp, synthetic construct
  source 1..75: mol_type = other DNA
gccgaacaactggaatctcagggactatggcgaagagccgccgctcgttggcttgacgtaatgaaagaggcccac

SEQ ID NO: 23793 - DNA, 75 bp, synthetic construct
  source 1..75: mol_type = other DNA
tagaaaaacagacgcttaaaaacagtaaaaatccggcagagcgcgaaaaggcgcaacagaaatataatgctctgc

SEQ ID NO: 23794 - DNA, 75 bp, synthetic construct
  source 1..75: mol_type = other DNA
cgatcgtcaattacaatgaaaagcaattttcatatcctagtgtagatgagtggagtgggttttctggttattcag

SEQ ID NO: 23795 - DNA, 75 bp, synthetic construct
  source 1..75: mol_type = other DNA
tctcccagatcatttttggagtttttggctaagatatttaccctgggttatgtggattttagcaaacgctccaac

SEQ ID NO: 23796 - DNA, 75 bp, synthetic construct
  source 1..75: mol_type = other DNA
caacatagtcacagcagccaaggatttcagagtttgtctggggcaatggtgctcagcctgtatggaataataacc

SEQ ID NO: 23797 - DNA, 75 bp, synthetic construct
  source 1..75: mol_type = other DNA
gctaaagttcttaaacgatgtatattacccgctcctgatggtggcgtagaaaaactatcaaaacccaacttacat

SEQ ID NO: 23798 - DNA, 75 bp, synthetic construct
  source 1..75: mol_type = other DNA
agctagtaagttatggtctgttgagactgccgaaattttattcggacccgcccaaaattacatatcttccgtcgt

SEQ ID NO: 23799 - DNA, 75 bp, synthetic construct
  source 1..75: mol_type = other DNA
gaagagcttaaacgcttaccctctgaatgcacccctttagtcgaacaaaacctgatgccatggcttgccacaggc

SEQ ID NO: 23800 - DNA, 75 bp, synthetic construct
  source 1..75: mol_type = other DNA
aggatccgattggactgaaggggggatggaacctgtatggatatcaattgaatccgatatcagacatcgaccccc

SEQ ID NO: 23801 - DNA, 75 bp, synthetic construct
  source 1..75: mol_type = other DNA
ggtgttaacccgtaatgctgccggagaaatgacggaagaatgggtgtcatgcgggaaaattcatgcggatatccg

SEQ ID NO: 23802 - DNA, 75 bp, synthetic construct
  source 1..75: mol_type = other DNA
cggcaggagcctgtattttgagcacctgtttcccggtgaggacggttacagccgcagcgagtcactctggctggt

SEQ ID NO: 23803 - DNA, 75 bp, synthetic construct
  source 1..75: mol_type = other DNA
tccctctggaaaatggaatgaaagccgaaagtacactatttctggaaaaaaggcgtatttaccagtggatgcttt

SEQ ID NO: 23804 - DNA, 75 bp, synthetic construct
  source 1..75: mol_type = other DNA
gatggcttcgcgttccttgctatgggctttactggcaaacgtgcagcccggttcaaagaggcatacatcaacgcc

SEQ ID NO: 23805 - DNA, 75 bp, synthetic construct
  source 1..75: mol_type = other DNA
gtaaaagtgaacgactgtctgttttaaataatgctgaacaggaagcattgtatggcctccctgatttcgatgacg

SEQ ID NO: 23806 - DNA, 75 bp, synthetic construct
  source 1..75: mol_type = other DNA
gccggaatttacacctgctgagcttgccgcattccgggattactggatggcggaggggaaggttttcacgcaggt

SEQ ID NO: 23807 - DNA, 75 bp, synthetic construct
  source 1..75: mol_type = other DNA
accgactgatgcaccggggacactgaacgcgtttctgaatgcaccaaaggatggtgatttacgtccggaggtgat

SEQ ID NO: 23808 - DNA, 75 bp, synthetic construct
  source 1..75: mol_type = other DNA
tctgtgaggagtttgcaacctcgcgcaacatcatccgtgaggtgttccgttcgctgatggcgaagcggctgattg

SEQ ID NO: 23809 - DNA, 75 bp, synthetic construct
  source 1..75: mol_type = other DNA
gggaccctaattctcctggatttactttctcagatattacgcagcggctaatcccatcaataattcttgcggcct

SEQ ID NO: 23810 - DNA, 75 bp, synthetic construct
  source 1..75: mol_type = other DNA
aaccattggtgatgctgtagcccggcaggaagatattgatattacgttgtatcctttgagccttgctacccgagg

SEQ ID NO: 23811 - DNA, 75 bp, synthetic construct
  source 1..75: mol_type = other DNA
cgaactgaccagcacatacacccccgcaggccagttacagagccagcacctgaacagcctggtatatgaccgtga

SEQ ID NO: 23812 - DNA, 75 bp, synthetic construct
  source 1..75: mol_type = other DNA
agacattgttacttgatgtgtcgaatgactaagacatttggatcaacaatagctgacgtgataggtaaaaatcat

SEQ ID NO: 23813 - DNA, 75 bp, synthetic construct
  source 1..75: mol_type = other DNA
gggattcaggaatgggccaaaaaatatcatccagatgctcgtgcggctgttgatacagtactcagacggccacct

SEQ ID NO: 23814 - DNA, 75 bp, synthetic construct
  source 1..75: mol_type = other DNA
atatcgttatccggtgggcaaacaaaattcaacaggcagcgcgggaggttcgtaatatgccggtaacagaagaga

SEQ ID NO: 23815 - DNA, 75 bp, synthetic construct
  source 1..75: mol_type = other DNA
ggcgtcgttacttccccaaattacaggctgaaaagtggtattttcggcactgttggcgacgccttaacgggcctg

SEQ ID NO: 23816 - DNA, 75 bp, synthetic construct
  source 1..75: mol_type = other DNA
atgacgttcacagtaaaaaccattcctgacatgctccttgaggcatatggaaatcagaccgaggtagcccgaata

SEQ ID NO: 23817 - DNA, 75 bp, synthetic construct
  source 1..75: mol_type = other DNA
cgctcattgattatgaaaactgttgcaatctgagaaatatatcgcttgctgattataccgatttgattttatttg

SEQ ID NO: 23818 - DNA, 75 bp, synthetic construct
  source 1..75: mol_type = other DNA
attgagcttgctaaaggcaatgctggggccttcggcctgtattcattctttgctgaaaatatcgacccaacctgc

SEQ ID NO: 23819 - DNA, 75 bp, synthetic construct
  source 1..75: mol_type = other DNA
agcctggcggatacccttcagcagtccggcggcgaagacggtggcagtgtggtgttcccgccggtgctggtgcag

SEQ ID NO: 23820 - DNA, 75 bp, synthetic construct
  source 1..75: mol_type = other DNA
taatccgtgaaaaagaatgcagagagctaacaggcgtttgccgtacaactcgttatgagatggaaaaacaaggcc

SEQ ID NO: 23821 - DNA, 75 bp, synthetic construct
  source 1..75: mol_type = other DNA
acgccaaggattacacggctttcgtgaccaaaatcttggtcaacgaggatggcgatatccgccgccggatcatgt

SEQ ID NO: 23822 - DNA, 75 bp, synthetic construct
  source 1..75: mol_type = other DNA
aagcaacaaatcccatttgttatatcattaataggaatataagatttggtttttctttgagtagggaactttcga

SEQ ID NO: 23823 - DNA, 75 bp, synthetic construct
  source 1..75: mol_type = other DNA
aaatcctcgctttgcaatgccctttttgaacatcctctcagcccagtcagccatgcagaaggctgcacacgtaaa

SEQ ID NO: 23824 - DNA, 75 bp, synthetic construct
  source 1..75: mol_type = other DNA
atcgcgatgaagctgacgatttttacagacatcaggctgatattaaatattattcatttctcgcaggcccagctt

SEQ ID NO: 23825 - DNA, 75 bp, synthetic construct
  source 1..75: mol_type = other DNA
tcacatacactacgttcagattatggttcacaagagacagataccagttatctcaatctgcgcaatggactgaat

SEQ ID NO: 23826 - DNA, 75 bp, synthetic construct
  source 1..75: mol_type = other DNA
aacctgatgcccccaggtgtttatagcgttgatatttttatcaacggtaaaatgtttgaacgtcaggatgtgaca

SEQ ID NO: 23827 - DNA, 75 bp, synthetic construct
  source 1..75: mol_type = other DNA
taaggcaaggctggtgctgacgaaggacggacaaatttttctcaacggcacaaaaattcatttgcagggtaagga

SEQ ID NO: 23828 - DNA, 75 bp, synthetic construct
  source 1..75: mol_type = other DNA
tggaaagatgtaagtaaatttttgggtgataaatcaaagtctcatgcattagtgtggaaagattttggtcaggag

SEQ ID NO: 23829 - DNA, 75 bp, synthetic construct
  source 1..75: mol_type = other DNA
atgcaaacagaagctgaagtcttaaccgatcataacgagctaatttgctcgaccagtattgagcgtatcgtgacg

SEQ ID NO: 23830 - DNA, 75 bp, synthetic construct
  source 1..75: mol_type = other DNA
ctgacccgcagtatcgggggaaaaaccgcgctggactgggctatgaagcaggatttccgttgcggctgctggttg

SEQ ID NO: 23831 - DNA, 75 bp, synthetic construct
  source 1..75: mol_type = other DNA
agtgaaggtattgtgtcgatgtttcgtgtggacccagatctggctggtccattgatggcgatggttactaccatg

SEQ ID NO: 23832 - DNA, 75 bp, synthetic construct
  source 1..75: mol_type = other DNA
tcgccgacaaaaatgaaaaaatagactcactctccaccagactggagaagaaatcccgtattcagccgcctgagc

SEQ ID NO: 23833 - DNA, 75 bp, synthetic construct
  source 1..75: mol_type = other DNA
attgttcacgaagcacgcttttatatggcacaaagtgctgaggccatgctagaggcaggtaaacgactgataata

SEQ ID NO: 23834 - DNA, 75 bp, synthetic construct
  source 1..75: mol_type = other DNA
ggcagcagcacccgtggtggatgaaaacagtatccgtgcgcaggtactggcagagcaaaaagcgcgtgtaaacgg

SEQ ID NO: 23835 - DNA, 75 bp, synthetic construct
  source 1..75: mol_type = other DNA
cgcccagcaaatggtgcacagaaagaacccttattgctgcaactggactgaaatcaggaaccattgccagagcaa

SEQ ID NO: 23836 - DNA, 75 bp, synthetic construct
  source 1..75: mol_type = other DNA
ctttatgtttcagatgtcttcaaatataggatggcaaagaggtcaccgcaatgccctaatgaacgcaattcattc

SEQ ID NO: 23837 - DNA, 75 bp, synthetic construct
  source 1..75: mol_type = other DNA
tgtattccctgtggtatgaacttcacccgtttgagaaccttcgccgcaaggggcatcactgccacggcctgacgc

SEQ ID NO: 23838 - DNA, 75 bp, synthetic construct
  source 1..75: mol_type = other DNA
tgaaaccacacaatttgaaattcaatccgtgattgctcgttgccgctttcatcaggaaaaaggcggtgtgcgatg

SEQ ID NO: 23839 - DNA, 75 bp, synthetic construct
  source 1..75: mol_type = other DNA
agcaagcttaaaaatgccctttcttcttccgtacgtgagcaggaaatggctactgaaatcacccgccttaagcga

SEQ ID NO: 23840 - DNA, 75 bp, synthetic construct
  source 1..75: mol_type = other DNA
cataatgcctttaaaaacggattcaggcagcgtttactggttcaatacacattacagcccaccggaaaaaaatgt

SEQ ID NO: 23841 - DNA, 75 bp, synthetic construct
  source 1..75: mol_type = other DNA
tgaagaatgtcaaagtcgataacacagcgaaaatgcactggatcaacgtcttcgattctatagaaagcagggtga

SEQ ID NO: 23842 - DNA, 75 bp, synthetic construct
  source 1..75: mol_type = other DNA
tccacaaaagccgggaaacacagcgctggctgaagcagaatccgaagttcagggtgatttatcagctggtttact

SEQ ID NO: 23843 - DNA, 75 bp, synthetic construct
  source 1..75: mol_type = other DNA
acagactggtatggaatcacattacgggtaccctggtggtggcttccgaactggcacgctcacggggaaaaggcg

SEQ ID NO: 23844 - DNA, 75 bp, synthetic construct
  source 1..75: mol_type = other DNA
ctgcgggcagttataaaactcgggtacatattagaaggggactctcagacgccgccgttaacctggtcagaaatc

SEQ ID NO: 23845 - DNA, 75 bp, synthetic construct
  source 1..75: mol_type = other DNA
cgtccgctttggactggagtttgagaaatccgcctttggtaagtacaacgttgataatgcagtcaacgctaactt

SEQ ID NO: 23846 - DNA, 75 bp, synthetic construct
  source 1..75: mol_type = other DNA
ggatggtggtgttactggcaatagcatttctgttgtcagtgaataaaaagagcatcagtttgcgcacggttggag

SEQ ID NO: 23847 - DNA, 75 bp, synthetic construct
  source 1..75: mol_type = other DNA
ggcgttctggaggttcaggacggtggtgaggctaagcatgttgagcaacaatccggcggcgcattaattgcttcc

SEQ ID NO: 23848 - DNA, 75 bp, synthetic construct
  source 1..75: mol_type = other DNA
atgaacaggaccagtccccattattgtcgccgctcagtactttccttattgatatctgccttgatatatgccccg

SEQ ID NO: 23849 - DNA, 75 bp, synthetic construct
  source 1..75: mol_type = other DNA
tggagcaactggccagacaggtggagccggaatacacaccggcgcgaaaagttcatttttaccactgcgaccacc

SEQ ID NO: 23850 - DNA, 75 bp, synthetic construct
  source 1..75: mol_type = other DNA
ggaccatgcagaaccagccggatgctgtgcgtatctgggccattgaggtggcgctcagcagtgaagccgggaaga

SEQ ID NO: 23851 - DNA, 75 bp, synthetic construct
  source 1..75: mol_type = other DNA
gccggtcagttatccggtgaaggtaacagtgcggccttccgtgagtttgcatggcggtttgtcaacattgttgcc

SEQ ID NO: 23852 - DNA, 75 bp, synthetic construct
  source 1..75: mol_type = other DNA
ggcgtggctaaactcgccacgctgtcagatggcacagtctttgagcctgtaaacagttttcagaaaaaccagaag

SEQ ID NO: 23853 - DNA, 75 bp, synthetic construct
  source 1..75: mol_type = other DNA
tggatatcagcaatcaatttgatcagggcgttgatgatctgaaccagcaagttgaaaaagcgttggaggatttag

SEQ ID NO: 23854 - DNA, 75 bp, synthetic construct
  source 1..75: mol_type = other DNA
ggaagttgtaacgacatgctggaagaaatggatctgattgagcaggttgactccatcagacgtcatttacagccc

SEQ ID NO: 23855 - DNA, 75 bp, synthetic construct
  source 1..75: mol_type = other DNA
gattatctaagcaaactcagtgaaaatcagcgggaaatatttttaccttttactctgccgcgtctgtcagatgat

SEQ ID NO: 23856 - DNA, 75 bp, synthetic construct
  source 1..75: mol_type = other DNA
aattacgatccctccaacgtgattatgctcaccggacgcgcctcagtcgtggagcgtctgacggaggtgatccag

SEQ ID NO: 23857 - DNA, 75 bp, synthetic construct
  source 1..75: mol_type = other DNA
ggaacgaatcttctggtatgtgggtggtgacttctgagctaacccgcaaaggtgggcaacggcatcgaaaaataa

SEQ ID NO: 23858 - DNA, 75 bp, synthetic construct
  source 1..75: mol_type = other DNA
tcaccgccgaagatgtcaaaggcaatttgtcgaatcgtgaacagagcatggtggtcgttcaggcacctacgctaa

SEQ ID NO: 23859 - DNA, 75 bp, synthetic construct
  source 1..75: mol_type = other DNA
cccctttcacacgccctttccctgtttcccctgaacagggcaggctctgtctggcggggacagggaaatctgatg

SEQ ID NO: 23860 - DNA, 75 bp, synthetic construct
  source 1..75: mol_type = other DNA
tcagttttgttttcgaacgcgatccggagcgtggaagggatgaaatcgaagccatgctcttaccccagcgaaaat

SEQ ID NO: 23861 - DNA, 75 bp, synthetic construct
  source 1..75: mol_type = other DNA
ctctttttcagtcagcatactctccatcgtactgacgagcgtacgcagattaacaacggcttaggttggcgtcat

SEQ ID NO: 23862 - DNA, 75 bp, synthetic construct
  source 1..75: mol_type = other DNA
cactttccccggggttcagccacctcactgatagaacaccgcgcccgtacacatgacagtgaaaacgtcatccat

SEQ ID NO: 23863 - DNA, 75 bp, synthetic construct
  source 1..75: mol_type = other DNA
ctttcttgcgaaactccattagtaataactaacgagcagcatcgttttgtggtcgcagaacaattgcgtcaaata

SEQ ID NO: 23864 - DNA, 75 bp, synthetic construct
  source 1..75: mol_type = other DNA
ggtgcgcagaatacgatgaatggggcaacctgctgaatgaagagaacccgcatcagctgcagcagcttatccgcc

SEQ ID NO: 23865 - DNA, 75 bp, synthetic construct
  source 1..75: mol_type = other DNA
gtacaccgtccccgcctgttcattgccgaagcggggaactcgtttggtctgctggccgattattttgagagtctc

SEQ ID NO: 23866 - DNA, 75 bp, synthetic construct
  source 1..75: mol_type = other DNA
aaacgccggcgtgtggagctgaccacggtgcttctgggggctggtctgcagccggtgcggcctgagtttgacgtg

SEQ ID NO: 23867 - DNA, 75 bp, synthetic construct
  source 1..75: mol_type = other DNA
tagcattgttcagggttcagccggggtacgtattggtgcccccaccggcgtggcctgttcggtgtgccccggcgg

SEQ ID NO: 23868 - DNA, 75 bp, synthetic construct
  source 1..75: mol_type = other DNA
gcagcaggaggttatgcgcgttgggattacggtagagagtgaggcggggccaaagaaaaacccggcactcacggc

SEQ ID NO: 23869 - DNA, 75 bp, synthetic construct
  source 1..75: mol_type = other DNA
gaagagggagaaagccgaagccgactacccgtaaggaactggcaggcaatcccggcaagcgggcattaaataagt

SEQ ID NO: 23870 - DNA, 75 bp, synthetic construct
  source 1..75: mol_type = other DNA
tcagtaagaaagcaggtattgataacgccacagttgctatttatggttgtgacaactttgtgattgataatattg

SEQ ID NO: 23871 - DNA, 75 bp, synthetic construct
  source 1..75: mol_type = other DNA
atgccggttatagcggaaccagtatgacgggcgggaaaggcgctgcagggatttgtattatcgaggagtttgcat

SEQ ID NO: 23872 - DNA, 75 bp, synthetic construct
  source 1..75: mol_type = other DNA
tgtttccgttcttcctgaaagtattcccgctggtttcagtgttcttgcggggcttgaggatgatgaatccctttt

SEQ ID NO: 23873 - DNA, 75 bp, synthetic construct
  source 1..75: mol_type = other DNA
cagcgcattgagcgacataacctgaatctgagacaacatctggcaaggctgggacggaagtcactgtcgttctca

SEQ ID NO: 23874 - DNA, 75 bp, synthetic construct
  source 1..75: mol_type = other DNA
tatacatcagcagcaaaagtgcgacggcagaagaagccctgaagcgaatcagtgaactgtacgccatcgaggatg

SEQ ID NO: 23875 - DNA, 75 bp, synthetic construct
  source 1..75: mol_type = other DNA
gccttacggggagtggccgtaggccggaaaaactggatgttcgcgggttccgacagcggtggtgaacatgcggcg

SEQ ID NO: 23876 - DNA, 75 bp, synthetic construct
  source 1..75: mol_type = other DNA
aaatgagcccggaagctgccggtattgccgcctgtctgatggcgtacagccatcacgcctgtcgtacggagtgtt

SEQ ID NO: 23877 - DNA, 75 bp, synthetic construct
  source 1..75: mol_type = other DNA
cccggcgaaaaatccacgatgtatacatcagcagcaaaagtgcgacggcagaagaagccctgaagcgaatcagtg

SEQ ID NO: 23878 - DNA, 75 bp, synthetic construct
  source 1..75: mol_type = other DNA
gccgctacctctacgacccgctgggacggcgaatggcgaaacgggtatggcggcgggagcgtgacctgacggggt

SEQ ID NO: 23879 - DNA, 75 bp, synthetic construct
  source 1..75: mol_type = other DNA
ccttccccttctcccgttttacggcagaagagtttcgccatttttttgcctggtgtgcccgccaccgcgtcagtg

SEQ ID NO: 23880 - DNA, 75 bp, synthetic construct
  source 1..75: mol_type = other DNA
aaagcagccgaggagatcgggcaactcgtcaccatcgcgcgtgaagaactccagcgtcgcaagacccaagaatca

SEQ ID NO: 23881 - DNA, 75 bp, synthetic construct
  source 1..75: mol_type = other DNA
aatttaatcactggtgggcaacagagggcgactgggttgaagagcctaactatcgccgtaatggtatgagcgggg

SEQ ID NO: 23882 - DNA, 75 bp, synthetic construct
  source 1..75: mol_type = other DNA
taacatttttcttcgttatcttttcagttaatgcgattgctaaggagtttaccttagatttctcaacagcaaaga

SEQ ID NO: 23883 - DNA, 75 bp, synthetic construct
  source 1..75: mol_type = other DNA
cgaagccactgaacaggccagcgcagcagcgaggtctgcttccgcagcgaagacatccgaaacgaacgcgaaagc

SEQ ID NO: 23884 - DNA, 75 bp, synthetic construct
  source 1..75: mol_type = other DNA
ttaggcgttagaggcggtggtcgggctggcattgactggagtgatgatgatgcgcatcaggccagcagtggttca

SEQ ID NO: 23885 - DNA, 75 bp, synthetic construct
  source 1..75: mol_type = other DNA
ccggacgccatttttacgatttctttggtgagaacgtctttcgcgccgatatgtgtaacgctgacgtaaaattgg

SEQ ID NO: 23886 - DNA, 75 bp, synthetic construct
  source 1..75: mol_type = other DNA
cgccaccatttgctgccctgaccggcatacgctgcagtaccgcgcatatcactgcaaaggacaacgcctggctgt

SEQ ID NO: 23887 - DNA, 75 bp, synthetic construct
  source 1..75: mol_type = other DNA
gtctttcaccgtcccttacactacacctgtgattgctttgcgggaaaactatctgaaatatagcttggttggcgg

SEQ ID NO: 23888 - DNA, 75 bp, synthetic construct
  source 1..75: mol_type = other DNA
ccattacgacagtcagcaccggctggtgcactacacgcggacacaatatgaagagccgctggtcgaaagtcgcta

SEQ ID NO: 23889 - DNA, 75 bp, synthetic construct
  source 1..75: mol_type = other DNA
attacctgatgactctcgaaaaggagggaaagataaaacgctcgccggtaaggagaggtgccagtaccttatggg

SEQ ID NO: 23890 - DNA, 75 bp, synthetic construct
  source 1..75: mol_type = other DNA
tcacggagctgaaaactccgtgccggacaacagaaattgccatacattttgggctgagtgcctatcaggccagat

SEQ ID NO: 23891 - DNA, 75 bp, synthetic construct
  source 1..75: mol_type = other DNA
cgctatgaccatgaccgttttggtcaggtgacggcggtgcaccgcgaggaagggctgagtcagtaccgcgcatac

SEQ ID NO: 23892 - DNA, 75 bp, synthetic construct
  source 1..75: mol_type = other DNA
tgcgtgaggcggcagagaaagcaacgtggggagactgggactcatataaaccacaccgtggcgcacgtggttatg

SEQ ID NO: 23893 - DNA, 75 bp, synthetic construct
  source 1..75: mol_type = other DNA
aggtggatttatcattaggtaaatggattgatggaaaagacaagattagtcaattaataatacttaacacgatga

SEQ ID NO: 23894 - DNA, 75 bp, synthetic construct
  source 1..75: mol_type = other DNA
cagccagcatctcctgcagctcacggtaactgatgccgtatttgcagtaccagcgtacggcccacagaatgatgt

SEQ ID NO: 23895 - DNA, 75 bp, synthetic construct
  source 1..75: mol_type = other DNA
cgcgtttgcggtggtttcctttcatctcacccagtcactctcttcacttttttccctcgacctttctctggtcag

SEQ ID NO: 23896 - DNA, 75 bp, synthetic construct
  source 1..75: mol_type = other DNA
caaaatttcacgagtgctttattaactggatgcgtgactgccattcttcagatgataaagacgtcattgcaattg

SEQ ID NO: 23897 - DNA, 75 bp, synthetic construct
  source 1..75: mol_type = other DNA
gatgggggtaaaccgttatgccgtgccgggtatggagagactgccggctgacacctgcacatcactgaattccat

SEQ ID NO: 23898 - DNA, 75 bp, synthetic construct
  source 1..75: mol_type = other DNA
agtgccacattgcgttatatggcccagtattatgcaacaggacaatctaccgcaggggatgtaaaagcgacggtc

SEQ ID NO: 23899 - DNA, 75 bp, synthetic construct
  source 1..75: mol_type = other DNA
ccctttgcacctcactcctgcttaccaacgttgctgcacacgccaaagaagtcaaaataggtatggcgattgatg

SEQ ID NO: 23900 - DNA, 75 bp, synthetic construct
  source 1..75: mol_type = other DNA
atggacgttgagtacgggcagtacagcgttattctgttggtggagggattcccgccgtcacatgccgggaccatc

SEQ ID NO: 23901 - DNA, 75 bp, synthetic construct
  source 1..75: mol_type = other DNA
aagcgacactccctgtttatgatcgtaataacctggccccaagaattgttcatttaggctttggtgcatttcacc

SEQ ID NO: 23902 - DNA, 75 bp, synthetic construct
  source 1..75: mol_type = other DNA
gcctcttacataggcgtaaaaaattaaaactgtctcaggccgcattaggtaagctggtcaaagtggctcacgtaa

SEQ ID NO: 23903 - DNA, 75 bp, synthetic construct
  source 1..75: mol_type = other DNA
attgaggcacttaattccaataaatcagattataaaatgattgctgatgatcagcaaaggaaacttgcctgtgtc

SEQ ID NO: 23904 - DNA, 75 bp, synthetic construct
  source 1..75: mol_type = other DNA
gactggggatattatgaggtcaacttaatcggcggcgaacagcaaattgccgatttacaacagcaagataatctt

SEQ ID NO: 23905 - DNA, 75 bp, synthetic construct
  source 1..75: mol_type = other DNA
atcagtatccgttgaatccgatctcaaatatagatccattaggattagaaacactaaaatgcattaagccactgc

SEQ ID NO: 23906 - DNA, 75 bp, synthetic construct
  source 1..75: mol_type = other DNA
ttctttctgtattgtctttttcacctttcgctcaggatgctaaaccagtagagtcttcaaaagaaaaaatcacac

SEQ ID NO: 23907 - DNA, 75 bp, synthetic construct
  source 1..75: mol_type = other DNA
agaaagcggcagcagagaaagctgcagccgacaaaaaagcagcagaaaaagcggctgctgaaaaggcagcagctg

SEQ ID NO: 23908 - DNA, 75 bp, synthetic construct
  source 1..75: mol_type = other DNA
gactatgggccgctggaccagatgcagctcaccaccgcagcacgctactgccagctcatcatgaaggagcacaaa

SEQ ID NO: 23909 - DNA, 75 bp, synthetic construct
  source 1..75: mol_type = other DNA
tgttgtgaaacttagcagtgctgttgatagcaccagtgaatcgctggccgcaacgccaaaagcagttaaagcagc

SEQ ID NO: 23910 - DNA, 75 bp, synthetic construct
  source 1..75: mol_type = other DNA
aattgcatcgcggtaacttcaccgctatcggtcagcagatccagccttatctggaggacggaaaatgctttcgca

SEQ ID NO: 23911 - DNA, 75 bp, synthetic construct
  source 1..75: mol_type = other DNA
ggtgcaccagtgcagcgaactggaagcagcgtttcatgtggcacgaaagctggacgggctacgtggtctggctgg

SEQ ID NO: 23912 - DNA, 75 bp, synthetic construct
  source 1..75: mol_type = other DNA
ccagcagtttctctcccttgaatttgcgcaggtgctggacaaaatggcctacctgacgatatggcagggcgatga

SEQ ID NO: 23913 - DNA, 75 bp, synthetic construct
  source 1..75: mol_type = other DNA
aaaatccgagttgcaggggaaaatggttttcccacatgggctgaaatacctccaccatcacatgaggaacttatt

SEQ ID NO: 23914 - DNA, 75 bp, synthetic construct
  source 1..75: mol_type = other DNA
ttcctataatggatataatatatatcttgaacttcagtccagaggaagtttttcacttgatgcagaagataatga

SEQ ID NO: 23915 - DNA, 75 bp, synthetic construct
  source 1..75: mol_type = other DNA
ccggttctgtccgattttatcaattctgtggatgttgcccgcgatcaggttctcattcagtcgctgatgtttgaa

SEQ ID NO: 23916 - DNA, 75 bp, synthetic construct
  source 1..75: mol_type = other DNA
cggtttcgcaggttggcggcagcgtggacgctgcgcgatcttctctggaaagcctctcccggtttattcgtaaca

SEQ ID NO: 23917 - DNA, 75 bp, synthetic construct
  source 1..75: mol_type = other DNA
gggggattttctagtctgggctaatgaatgtcttaagaaaaataagcagatatttgatggagctttaggtaatcc

SEQ ID NO: 23918 - DNA, 75 bp, synthetic construct
  source 1..75: mol_type = other DNA
attttgaagtgcgtttcccgacagagatccagcgttcggagaatacggaactgttaacaccggggacaattgaat

SEQ ID NO: 23919 - DNA, 75 bp, synthetic construct
  source 1..75: mol_type = other DNA
agataaaaatgaaacgggtaactggagcgaagagtctgatggcgtttacaccaccacccgaaccgcgaagattgc

SEQ ID NO: 23920 - DNA, 75 bp, synthetic construct
  source 1..75: mol_type = other DNA
tgatgctcctgagcagacgcaggatacatttttcggggtacttcccgcagagcctgcagaagcatctgcccgtgt

SEQ ID NO: 23921 - DNA, 75 bp, synthetic construct
  source 1..75: mol_type = other DNA
cgttaaccttaccgcgccgaccattggcatcaatatcatcgccaccgatgacataattaacgccagcgaaaaagg

SEQ ID NO: 23922 - DNA, 75 bp, synthetic construct
  source 1..75: mol_type = other DNA
cagtattagtggcgatgccgccagcgcacaaattgtcgcgatgcaagtgacaacgggtaacccggatgtgctggc

SEQ ID NO: 23923 - DNA, 75 bp, synthetic construct
  source 1..75: mol_type = other DNA
tcccgcaggaggatgatatcgaccggatgggcgtttcaccggaagactggcagcgttcggttgatcccctgctga

SEQ ID NO: 23924 - DNA, 75 bp, synthetic construct
  source 1..75: mol_type = other DNA
cgctaactgtgctcctggttgggttgaatagccaggtatcagtagccaaatcctccgacgatgataatgacgaga

SEQ ID NO: 23925 - DNA, 75 bp, synthetic construct
  source 1..75: mol_type = other DNA
atccggtagacgcagaggcgtgcgagaagtacctggcacagttacgggaactggaggcatacagggcgtaccgaa

SEQ ID NO: 23926 - DNA, 75 bp, synthetic construct
  source 1..75: mol_type = other DNA
ccatgaaaaatctggatgcaattgatcgccgtgccgttccccgggcctctgccacgacactgaaccgagtggcgg

SEQ ID NO: 23927 - DNA, 75 bp, synthetic construct
  source 1..75: mol_type = other DNA
cccgcgaacccgcgaagaaagaaagcacaacggtgaagcgtaagcgcaggactaagaatcagaagaaagagccgg

SEQ ID NO: 23928 - DNA, 75 bp, synthetic construct
  source 1..75: mol_type = other DNA
ccatacttatagcacaaagggcaaatgaagaaagcgagataaagtcaagtcgggttaaattatcatggaagaaaa

SEQ ID NO: 23929 - DNA, 75 bp, synthetic construct
  source 1..75: mol_type = other DNA
ctggtgaatcagctccccgaccgcaatgaatttcaccgcctgcaactggatatcagcaacctgcggggcgaaatc

SEQ ID NO: 23930 - DNA, 75 bp, synthetic construct
  source 1..75: mol_type = other DNA
aaacgcaggtatttttcgcacaaacttctctcgcaacacatccgaccacttaagcaaaaaagcggcatatactga

SEQ ID NO: 23931 - DNA, 75 bp, synthetic construct
  source 1..75: mol_type = other DNA
ggccgcagggtggcaaaacgggtatggcggcgtgaacgggacctgacgggctggatgtcgctgtcacggaaaccg

SEQ ID NO: 23932 - DNA, 75 bp, synthetic construct
  source 1..75: mol_type = other DNA
gtacgttgcgaccagacacagtcggtcagctataccctgtcaggttctgtaacaggaagtggtaatactgtattc

SEQ ID NO: 23933 - DNA, 75 bp, synthetic construct
  source 1..75: mol_type = other DNA
tgacaggctggagagggacagggggtggactgcatcacaactgaacgaagtgcagatcgttgttgatgagatccg

SEQ ID NO: 23934 - DNA, 75 bp, synthetic construct
  source 1..75: mol_type = other DNA
ccctgcgcaacggaagatgccaccggcagccggaaaaccatgacgtggagccgttacggtcagttgctgagcttc

SEQ ID NO: 23935 - DNA, 75 bp, synthetic construct
  source 1..75: mol_type = other DNA
cggcaaacttatccgcagcgaggatgaggggctggtcacccactggcactatgacgaagcagaccgcctcacgca

SEQ ID NO: 23936 - DNA, 75 bp, synthetic construct
  source 1..75: mol_type = other DNA
ccgttgtgggtggcgtggatacacataaagatttgcacgttgccgctgtcgtagatcagaacaataaagtccttg

SEQ ID NO: 23937 - DNA, 75 bp, synthetic construct
  source 1..75: mol_type = other DNA
taccgcgataacgccattacctacaaagcgcaacgcgataaaaaagccagtgagctgaagctggcgaacgtgaca

SEQ ID NO: 23938 - DNA, 75 bp, synthetic construct
  source 1..75: mol_type = other DNA
tggagatatatataaaaatatcaaagagccatgtttgattaaagttggccttttcgaaaatgataaacttctggg

SEQ ID NO: 23939 - DNA, 75 bp, synthetic construct
  source 1..75: mol_type = other DNA
ggttacagtgcaacggagctacgttcaccaaagaacaatatcctgttctggccagagtctacccgaccctccgtc

SEQ ID NO: 23940 - DNA, 75 bp, synthetic construct
  source 1..75: mol_type = other DNA
gtgaaaatcatacccagagcactgagtgcgggtctggcgctggctgccgtacctgcacaggcattcgtcacctat

SEQ ID NO: 23941 - DNA, 75 bp, synthetic construct
  source 1..75: mol_type = other DNA
caactcgttgggaaagaactgttcgctcgtcacggtcgcaacaaactgttaactgaacatggcattcaacttctt

SEQ ID NO: 23942 - DNA, 75 bp, synthetic construct
  source 1..75: mol_type = other DNA
gcggcgcgatgttcacgccagtgctgctgtttcccttcgccgggattgtggtgggtcttgccatcttgctgcaaa

SEQ ID NO: 23943 - DNA, 75 bp, synthetic construct
  source 1..75: mol_type = other DNA
ttttcgatagtgtcagctttcgtggtgtgcagctggcgtcagatgacaacatgctgccagacagcctgaaagggt

SEQ ID NO: 23944 - DNA, 75 bp, synthetic construct
  source 1..75: mol_type = other DNA
tttgacaagctggaagagcgggtgattggtgccaggggaattattgtggagcctcagccattacgaaaaaacggg

SEQ ID NO: 23945 - DNA, 75 bp, synthetic construct
  source 1..75: mol_type = other DNA
tggatggttttctgaaaggtaaatgcatcccacgagatctaaaggttaacgaaacaaacgctgaatatcttgtcc

SEQ ID NO: 23946 - DNA, 75 bp, synthetic construct
  source 1..75: mol_type = other DNA
gaaataaagcgacttaccacaataggaggcaaagtcgtttctcctgataccattcatgtaactgcgaaggatgat

SEQ ID NO: 23947 - DNA, 75 bp, synthetic construct
  source 1..75: mol_type = other DNA
cacctgtaaaagcttccgatgccacgctgactgacggtaacttttccgcttacgccacattgcaggtggattatc

SEQ ID NO: 23948 - DNA, 75 bp, synthetic construct
  source 1..75: mol_type = other DNA
tgacggctattcgtgaaaccgctcagattgcaaaactaatgaacgaggcaaaaactcaagctgaagtaaatgcgg

SEQ ID NO: 23949 - DNA, 75 bp, synthetic construct
  source 1..75: mol_type = other DNA
caggcgtggctcaccgccagcggtgaaggtgcggcgctgacagaaaaacatattaatgcggcctttaaagaggtt

SEQ ID NO: 23950 - DNA, 75 bp, synthetic construct
  source 1..75: mol_type = other DNA
aagggtgaaaaggggacgccagaattatccctgcgtgacgatccggcacaggaaaccctgcgtttcagcgccgat

SEQ ID NO: 23951 - DNA, 75 bp, synthetic construct
  source 1..75: mol_type = other DNA
caaccggcgaaacacttcctgctaatgcaacagagaaacaacgtcaggaatatcttgcgaaactgcgtgacacgc

SEQ ID NO: 23952 - DNA, 75 bp, synthetic construct
  source 1..75: mol_type = other DNA
gggccgatatcaataactatgccgggcagattaaatctgctatcgaaagtaagttctatgacgcatcgtcctatg

SEQ ID NO: 23953 - DNA, 75 bp, synthetic construct
  source 1..75: mol_type = other DNA
ttttcataaacgttggtttgggagaaggtgctccagctattggcgttccgttcttctggccgtccgccgcaatgc

SEQ ID NO: 23954 - DNA, 75 bp, synthetic construct
  source 1..75: mol_type = other DNA
gcaccgaaacaggagaatcgaaagaaatcacagctctgggtgattaccctgaaaatacaaccactatcgccccgt

SEQ ID NO: 23955 - DNA, 75 bp, synthetic construct
  source 1..75: mol_type = other DNA
gggagaaagcgcagtgccgcagcctggcggagaagatacagcaggaagggagcgaagacggtcacggtgtggtgt

SEQ ID NO: 23956 - DNA, 75 bp, synthetic construct
  source 1..75: mol_type = other DNA
atgagcgagcaactctccctttctgtatccgacctgacgcgtatcctggtcgaagatgcattaactgaaatgttt

SEQ ID NO: 23957 - DNA, 75 bp, synthetic construct
  source 1..75: mol_type = other DNA
atgatgtcacaaaacaagttcgccaaagaagaagtgaaaggcaaaatttctattttcttgaaaagaacagaaaaa

SEQ ID NO: 23958 - DNA, 75 bp, synthetic construct
  source 1..75: mol_type = other DNA
cggaagatctggaggctaaaggcctgtaccggagagcggcggcccgatgggctgaggtcatgcaacaggtgaaca

SEQ ID NO: 23959 - DNA, 75 bp, synthetic construct
  source 1..75: mol_type = other DNA
aagttagcttggcgtgttccgcgtgataactggcatgagtatagagaaggtgggataaatatgaccaatgccttg

SEQ ID NO: 23960 - DNA, 75 bp, synthetic construct
  source 1..75: mol_type = other DNA
atatatttggaacgatgataatataaataaatctctcatattgagggagttatggataatggaatccagaagaca

SEQ ID NO: 23961 - DNA, 75 bp, synthetic construct
  source 1..75: mol_type = other DNA
gagctgccatatccgcattggttggttcatcaccagaagctcttgataccctgaatgagcttgccgcagcacttg

SEQ ID NO: 23962 - DNA, 75 bp, synthetic construct
  source 1..75: mol_type = other DNA
catcacagtgggtggaaaatcctactatggtgcggaacttcaactaccagctccagttggtggggcatacactat

SEQ ID NO: 23963 - DNA, 75 bp, synthetic construct
  source 1..75: mol_type = other DNA
tcggaagaaaaaaccgcgatcacacatatagataaaggcttcgactttttagggcagaacgtcaggaagtacaac

SEQ ID NO: 23964 - DNA, 75 bp, synthetic construct
  source 1..75: mol_type = other DNA
gctgatttacctgatgctgtgcgccggttgcaccagcgcgccgcctgtgccgacgccggtgattgtttacaacgc

SEQ ID NO: 23965 - DNA, 75 bp, synthetic construct
  source 1..75: mol_type = other DNA
caaagcggtaaatggggtgaaatcgccccgttcatcgtcacgccggaacttatttcggcagcgaagaatgccaaa

SEQ ID NO: 23966 - DNA, 75 bp, synthetic construct
  source 1..75: mol_type = other DNA
ccaacggtggcaccggcacccagattaatggtgatgacgccacggcaaacaacaacggcaaaaccaccgttgacg

SEQ ID NO: 23967 - DNA, 75 bp, synthetic construct
  source 1..75: mol_type = other DNA
atacaggcgatagagaggaaactatccgccgcagacttaataaatggtctacaggtgatctaaaagtagagattg

SEQ ID NO: 23968 - DNA, 75 bp, synthetic construct
  source 1..75: mol_type = other DNA
atgagttaggatatgtttatggtaatgaagaaaaaacaaatgaaattgtaaaaaaaacatccgggttatgtcatt

SEQ ID NO: 23969 - DNA, 75 bp, synthetic construct
  source 1..75: mol_type = other DNA
gcggttggtggatacgtgaagtgggcctgtttgatgaatccggggcattgattgccgtgggaaactgcccggaaa

SEQ ID NO: 23970 - DNA, 75 bp, synthetic construct
  source 1..75: mol_type = other DNA
atggaaagcacagccttacagcaggcctttgacacctgtcagaataacaaagcagcatggctgcaacgcaaaaat

SEQ ID NO: 23971 - DNA, 75 bp, synthetic construct
  source 1..75: mol_type = other DNA
atctgtgcttggtgcctgtcagaaactccaggaggctgttggcttaccgaatctggcaccgcgctatgccattga

SEQ ID NO: 23972 - DNA, 75 bp, synthetic construct
  source 1..75: mol_type = other DNA
atgcatacagtttctgaaaatcagtgcggtaaatacgcattaatgctgcaacaggccagaaccgaagcacaggcc

SEQ ID NO: 23973 - DNA, 75 bp, synthetic construct
  source 1..75: mol_type = other DNA
ttaataccacgacagtcggcaactgcgatatttgcggtgagcagagcgacgcgctcctgagcctgatgacgacca

SEQ ID NO: 23974 - DNA, 75 bp, synthetic construct
  source 1..75: mol_type = other DNA
ttgaaattaacaagcgagtggcaatttgctgtggatttgctcccgaagattgcgaaatcgcaaagttgggaacat

SEQ ID NO: 23975 - DNA, 75 bp, synthetic construct
  source 1..75: mol_type = other DNA
agccgccacgtctgcatccaccgcgaccacgaaagcgtcagaagctgccacgtcagccagggatgcggcggcctc

SEQ ID NO: 23976 - DNA, 75 bp, synthetic construct
  source 1..75: mol_type = other DNA
aaacgtatcaacaggcatgcaccactgtttgcggatgaactgatagcccgtgaactggctgaacgaccggattat

SEQ ID NO: 23977 - DNA, 75 bp, synthetic construct
  source 1..75: mol_type = other DNA
acctgatcgaaggtctcactgtgtacttcgccttaaaaagcggctccaccacattaacgtcattaacagcggtga

SEQ ID NO: 23978 - DNA, 75 bp, synthetic construct
  source 1..75: mol_type = other DNA
acataaattaaatttagttagtaagtgccaaaatcagcacaaggcaaaagggttgcactttcatcataagggcaa

SEQ ID NO: 23979 - DNA, 75 bp, synthetic construct
  source 1..75: mol_type = other DNA
attcactgcctgccatgcgtaccgattaatgaggtggcaaaagagaaactgccacattacgtcatgagtgcaacc

SEQ ID NO: 23980 - DNA, 75 bp, synthetic construct
  source 1..75: mol_type = other DNA
ccattgttctgcctgccattggccttgtcggttgtgatcgtgttgagcctggtaatgtgggcatcaaagtcaaca

SEQ ID NO: 23981 - DNA, 75 bp, synthetic construct
  source 1..75: mol_type = other DNA
taccttccagtccgggaccgatcctgatatcgcgcaagtgcaggtgcagaacaaactccagctcgccacgccgtt

SEQ ID NO: 23982 - DNA, 75 bp, synthetic construct
  source 1..75: mol_type = other DNA
catttcgcggcatcggtaaaacgtttcccggcgttaaggcgctgacggatattagttttgactgctatgccggtc

SEQ ID NO: 23983 - DNA, 75 bp, synthetic construct
  source 1..75: mol_type = other DNA
aaaggttcgtggccactgccagaaaagttacgtcagataaaggcgggtatgaataaggaccagatttatcagctg

SEQ ID NO: 23984 - DNA, 75 bp, synthetic construct
  source 1..75: mol_type = other DNA
atgagttgtgtaagaaagtgacaagttggatgtattcgcatcctggagagagaattagatatgaacgttttaaga

SEQ ID NO: 23985 - DNA, 75 bp, synthetic construct
  source 1..75: mol_type = other DNA
gtcgaggaaattatcgctgaaaataaaccgcccttttctgttttccgcgacaaattcatcaccatgcctggcggg

SEQ ID NO: 23986 - DNA, 75 bp, synthetic construct
  source 1..75: mol_type = other DNA
gttgaagggattagcgacccgaatgatccaaaatgggtgaaggggatccagagtcgcgatgatgatgaccagaat

SEQ ID NO: 23987 - DNA, 75 bp, synthetic construct
  source 1..75: mol_type = other DNA
gcttggcgtcatagcagactggccggtcaaccgggtcagcgaactgcttccgtggcgcatagcactgccagctga

SEQ ID NO: 23988 - DNA, 75 bp, synthetic construct
  source 1..75: mol_type = other DNA
gataacacggtgttaataaaaggtttccatgatgttattcatgttagcttttgcagagacacgcgacttatagaa

SEQ ID NO: 23989 - DNA, 75 bp, synthetic construct
  source 1..75: mol_type = other DNA
gaaagagctgaaacgggttaccgacgaacgggacatattaaaaaaagccgctgtagattcaatctgtcaatgcaa

SEQ ID NO: 23990 - DNA, 75 bp, synthetic construct
  source 1..75: mol_type = other DNA
aatggtttaccggtactgaaatctccggcgattgattatgtcgcacgtgctgaaaatcagcgaatgcagttactt

SEQ ID NO: 23991 - DNA, 75 bp, synthetic construct
  source 1..75: mol_type = other DNA
cattgttggtgaatatccaacaagtgcatgcttcagcagctattgtagcctctaccgccgcgactacggctgctg

SEQ ID NO: 23992 - DNA, 75 bp, synthetic construct
  source 1..75: mol_type = other DNA
tgtataccactgtgcaggatggcggtcgtcacggttttcgccagtcgggtatcagccactgcggcgcactggata

SEQ ID NO: 23993 - DNA, 75 bp, synthetic construct
  source 1..75: mol_type = other DNA
aagccctgatgacctcctggcgtaaggattttcagggcggtcttgaagacgccccgtcgcagtacagcaaaattg

SEQ ID NO: 23994 - DNA, 75 bp, synthetic construct
  source 1..75: mol_type = other DNA
aagactggtctaatgattctttagaaacatgtaagatgaagtgctccggaaataacattggacgttttattagat

SEQ ID NO: 23995 - DNA, 75 bp, synthetic construct
  source 1..75: mol_type = other DNA
ccctcgcccatgagcatctgcatattgatctctccggctttaaaaacaacgtggactgccgccttgatcagtatg

SEQ ID NO: 23996 - DNA, 75 bp, synthetic construct
  source 1..75: mol_type = other DNA
ggattaaaccgttgttgcatcagtgcgtgcgggttcttgataaaccgggcattacgccagatggtttaacattag

SEQ ID NO: 23997 - DNA, 75 bp, synthetic construct
  source 1..75: mol_type = other DNA
tcgctgggccgggagaacgccagaaacgaagcgcaggccagcaccctgaaaagtaccgtcgacaccctgaatatc

SEQ ID NO: 23998 - DNA, 75 bp, synthetic construct
  source 1..75: mol_type = other DNA
aaattccgatttttctgttggtcgtaatgcaaatgtaatcggggacattcaggccagtaaatcaaacattactat

SEQ ID NO: 23999 - DNA, 75 bp, synthetic construct
  source 1..75: mol_type = other DNA
atgagttgctggaagctgtgatgctggccggattaacacagcaccagcttctggtcttcctggctgtcatgcgca

SEQ ID NO: 24000 - DNA, 75 bp, synthetic construct
  source 1..75: mol_type = other DNA
atccaacggaaacagagaatgataatagccagtttcaaaatcagagtctaagggagagtatcgacaaaagtctcg

SEQ ID NO: 24001 - DNA, 75 bp, synthetic construct
  source 1..75: mol_type = other DNA
gcgatttcatggcataacgttgaagacgaagctgccgaccagcgttttatgtcagtgcggacatcagcactgcgt

SEQ ID NO: 24002 - DNA, 75 bp, synthetic construct
  source 1..75: mol_type = other DNA
cggtgccttacggtgaaatgctggttggctcccggcgaatctcccaggacatcagtacccgtgatgaaggcggtg

SEQ ID NO: 24003 - DNA, 75 bp, synthetic construct
  source 1..75: mol_type = other DNA
atgtgtggacgcttttcacagtcaatgacccgtgaagattatcttgcccttctcgctgatgaatcagaacgcgat

SEQ ID NO: 24004 - DNA, 75 bp, synthetic construct
  source 1..75: mol_type = other DNA
aaatgcggcgaaaacataatcctgtttaatcctgacacagttgaagcatacgcaaaacgtgcggagatatcacct

SEQ ID NO: 24005 - DNA, 75 bp, synthetic construct
  source 1..75: mol_type = other DNA
agatcttgaggcatacactggcagcataatcactaaaaatgcaaccaagattgtgatgcttacaggtgttcgaac

SEQ ID NO: 24006 - DNA, 75 bp, synthetic construct
  source 1..75: mol_type = other DNA
tcactcaggatccgattgggctgaaggggggatggaatttttatcagtatccgctgaatccggttcagtatatag

SEQ ID NO: 24007 - DNA, 75 bp, synthetic construct
  source 1..75: mol_type = other DNA
aatccaaagccttccagtgaatgtatgtataacagaaaagcaatagatgcctgggtcgcttcaatgaaaaacaaa

SEQ ID NO: 24008 - DNA, 75 bp, synthetic construct
  source 1..75: mol_type = other DNA
gaaaatgcgcagaccacatattgtacctttgtctactcaggtggtagacctctttaaacagctaaagcctatcac

SEQ ID NO: 24009 - DNA, 75 bp, synthetic construct
  source 1..75: mol_type = other DNA
atcgacgaaattcgccagaaaacgtcggcaatgtcgcttcctgaagcgtcagataatgaggaaaagacgcggcag

SEQ ID NO: 24010 - DNA, 75 bp, synthetic construct
  source 1..75: mol_type = other DNA
gcgaaatcgctgcaggcgatggatttcagcaccatcgctgataaaacctcatataacgccattgaatggcccgtc

SEQ ID NO: 24011 - DNA, 75 bp, synthetic construct
  source 1..75: mol_type = other DNA
atgagagtagaaaataataatgtttctgggcaaaaccatgacccggaacagattgatttgattgatttactggtg

SEQ ID NO: 24012 - DNA, 75 bp, synthetic construct
  source 1..75: mol_type = other DNA
cgggaatttatcgacgaaaactccggtgaattttttgttcaggtctggggaaatggagccaacttcgacaacgtg

SEQ ID NO: 24013 - DNA, 75 bp, synthetic construct
  source 1..75: mol_type = other DNA
attgaatcggcgcagcaattatttccgggcgtaactcaggtggcggtatttgataccagtttccaccagacgatg

SEQ ID NO: 24014 - DNA, 75 bp, synthetic construct
  source 1..75: mol_type = other DNA
tatttcattaccctgacagacctgaaaataggtggaaaagtagttaaaaatcaaatgatttccccctttgataaa

SEQ ID NO: 24015 - DNA, 75 bp, synthetic construct
  source 1..75: mol_type = other DNA
tcgccggagatatggccgggacggcgaattgtgctgacggggcatccgcaggcgaacctgaaccgggaatggcag

SEQ ID NO: 24016 - DNA, 75 bp, synthetic construct
  source 1..75: mol_type = other DNA
caactgggaccgttataacccggcagaccaagacagttcgtgctggatccgtgtggcacaggcgtgggcaggcac

SEQ ID NO: 24017 - DNA, 75 bp, synthetic construct
  source 1..75: mol_type = other DNA
gcaataacgccggagtcggtgctgatgcaggacggcgcattcagcctgacggcaccgccggtacagggaatgccg

SEQ ID NO: 24018 - DNA, 75 bp, synthetic construct
  source 1..75: mol_type = other DNA
agcccgtcatgcaaaaatgctcgaaaccgatcaggcgtgggaagtattcgaaaaactcgaagacagttacttcaa

SEQ ID NO: 24019 - DNA, 75 bp, synthetic construct
  source 1..75: mol_type = other DNA
ggtgttgaccattggcgtcccttacgactggcctcttcgtattacagaatcaaagataatgaatggactccagaa

SEQ ID NO: 24020 - DNA, 75 bp, synthetic construct
  source 1..75: mol_type = other DNA
cgtattgatttaccgtctcgcaatattcagccgttaccaattttcgtgacaaaaagggggcacccgttaacttca

SEQ ID NO: 24021 - DNA, 75 bp, synthetic construct
  source 1..75: mol_type = other DNA
atcgccaggaaacagtatacagaaaaatggttcagaaaatatgacacatggagcgccggatattacgaactgatg

SEQ ID NO: 24022 - DNA, 75 bp, synthetic construct
  source 1..75: mol_type = other DNA
cagcacttcggcaggaagtggaagagcataaaaatacacttggcgctctctatacggaacttaaaggaaaagtgg

SEQ ID NO: 24023 - DNA, 75 bp, synthetic construct
  source 1..75: mol_type = other DNA
ggggttttcgcttgatgattcaggtacccgcagcacagggcgttatctcggtggtataacattttctctggataa

SEQ ID NO: 24024 - DNA, 75 bp, synthetic construct
  source 1..75: mol_type = other DNA
ccgttcatatgaacggcaggagatcccctgcccgtggcgttacaccaatgatcgtgatgtaagaacgattgttgc

SEQ ID NO: 24025 - DNA, 75 bp, synthetic construct
  source 1..75: mol_type = other DNA
cataaccagcaagaaacggaacagaaaggccataaagcggaacaacacagtccaaatgcgcaacaaaacgagcca

SEQ ID NO: 24026 - DNA, 75 bp, synthetic construct
  source 1..75: mol_type = other DNA
cggtagcaaaagtggtggcaggaaataagcgttaccccggcgtcgttgcgctggataacgttaacttcacgctca

SEQ ID NO: 24027 - DNA, 75 bp, synthetic construct
  source 1..75: mol_type = other DNA
ggaggtggcactccgctatccaatatggtcaaagaggttgcggctgattttgcggcgaagcttcgcaaaggaggc

SEQ ID NO: 24028 - DNA, 75 bp, synthetic construct
  source 1..75: mol_type = other DNA
gcgatggtggaaaaattccgcgcagacctggctgaacaggcggaacagtgtaccggtggcagtgctgctggcgtt

SEQ ID NO: 24029 - DNA, 75 bp, synthetic construct
  source 1..75: mol_type = other DNA
atgacaaacttcacgaccagcacgccgcatgatgcattatttaaaacctttctcacgcaccctgacactgcgcgg

SEQ ID NO: 24030 - DNA, 75 bp, synthetic construct
  source 1..75: mol_type = other DNA
aacgaaacattaccgacctcaaaacccgtgacctacttcaaccaattaaggcggctgaaaagtccgggcatcttg

SEQ ID NO: 24031 - DNA, 75 bp, synthetic construct
  source 1..75: mol_type = other DNA
ctttgccgtgggagacggaagaaacacctgtttcatcaagtgaaaaggtagctaatgataatgaggaggatgtgt

SEQ ID NO: 24032 - DNA, 75 bp, synthetic construct
  source 1..75: mol_type = other DNA
cattatcattcagcaaattattgaggagcgtttgacaagcagtgttgtccaaaatgacattgcaatctattattt

SEQ ID NO: 24033 - DNA, 75 bp, synthetic construct
  source 1..75: mol_type = other DNA
tcagcacaggacatggcctacgatatgtacccggatgatgaatcagataactatcggcctgtttctccttcactc

SEQ ID NO: 24034 - DNA, 75 bp, synthetic construct
  source 1..75: mol_type = other DNA
aattattcttcaacctacgcaaaactaaacaacgactcggctggtttaatcaggatgaagtggacatggtcgccc

SEQ ID NO: 24035 - DNA, 75 bp, synthetic construct
  source 1..75: mol_type = other DNA
gcggaagataaaatagtttgtcgtcaggcggtgaataaagccggtgttgtgaatgaaaactctgtcgtttattcc

SEQ ID NO: 24036 - DNA, 75 bp, synthetic construct
  source 1..75: mol_type = other DNA
aacgccagctggcagaacgggatgaagagctggctatcctccaaaaggccgcgacatacttcgcgaagcgcctga

SEQ ID NO: 24037 - DNA, 75 bp, synthetic construct
  source 1..75: mol_type = other DNA
acgttcctgctcgtgacctggcccccctgctccgccagatgatggatgcgggtagcgtcggtaatgttgtgcatt

SEQ ID NO: 24038 - DNA, 75 bp, synthetic construct
  source 1..75: mol_type = other DNA
tttacgctcgcaggtgacgatggcgctgaaaaaatatcgcccacaggctgatgataccgatctgcttgccgagtt

SEQ ID NO: 24039 - DNA, 75 bp, synthetic construct
  source 1..75: mol_type = other DNA
agatgccatctaggtactgccaggcagacgaagagtggattcagcagcagttacaggggctgcctccgtcactga

SEQ ID NO: 24040 - DNA, 75 bp, synthetic construct
  source 1..75: mol_type = other DNA
gtcagtcaggcactggcgcgttgtttcctgatatggaccaccatctggtcaattcattgctgagcagcaaggact

SEQ ID NO: 24041 - DNA, 75 bp, synthetic construct
  source 1..75: mol_type = other DNA
tattatcgttattgttacaggtttagtcacactaagtctgttaccacaactgggaaaagttgacagttttgtcat

SEQ ID NO: 24042 - DNA, 75 bp, synthetic construct
  source 1..75: mol_type = other DNA
ccatcgtgtgctaaaaagtctggaagataatctttttgcagcgcttggtgaacgtaatatcgctgagttaaaaac

SEQ ID NO: 24043 - DNA, 75 bp, synthetic construct
  source 1..75: mol_type = other DNA
atggcattaacagatatcaaagtcagaacagccaaaccaacggataagcaatataagctgactgatggtggaggt

SEQ ID NO: 24044 - DNA, 75 bp, synthetic construct
  source 1..75: mol_type = other DNA
cgccccgctcttgatctttctcgcctgcctgaacttttgtcgcgtattggcagttacaaggggcaacctgtcacc

SEQ ID NO: 24045 - DNA, 75 bp, synthetic construct
  source 1..75: mol_type = other DNA
tgccgctttctcatcaagctttagcaattcttaaagatgtttacaaacttagtggtgatcgcgattttgttttca

SEQ ID NO: 24046 - DNA, 75 bp, synthetic construct
  source 1..75: mol_type = other DNA
atgggcgcgcagaatatccctcatccggggtgttacccgggttctgaaccccgtggtaaacatcccggcaatttt

SEQ ID NO: 24047 - DNA, 75 bp, synthetic construct
  source 1..75: mol_type = other DNA
atggcaaacctacctgaaaccccgcagtgggaagaaggcatctaccagattgaggtctctgaccccgttctgggc

SEQ ID NO: 24048 - DNA, 75 bp, synthetic construct
  source 1..75: mol_type = other DNA
ggagagcaacaacttgccgaactggacaacctgcaaatcgtaccggacggacgctatcgcgtgcgtctctaccag

SEQ ID NO: 24049 - DNA, 75 bp, synthetic construct
  source 1..75: mol_type = other DNA
cgggcgagacggaccttgcgctgcccggcccgctgccgtttattctttcccgcgcctacagcagctaccggacca

SEQ ID NO: 24050 - DNA, 75 bp, synthetic construct
  source 1..75: mol_type = other DNA
atgaatatgatgaccgtgccgtttcacggcgattctctttatgtggttaaccataacggcgaaccatacgttccc

SEQ ID NO: 24051 - DNA, 75 bp, synthetic construct
  source 1..75: mol_type = other DNA
tgattggaatttccagtgcgtcttattttattagggtttttaataaacattatggtgttacaccaaagcagtttt

SEQ ID NO: 24052 - DNA, 75 bp, synthetic construct
  source 1..75: mol_type = other DNA
tggcgatggcatgtttgtgtctggcaaacatatcctgggctactgtttgtgcaaatagtactggcgtagcagaag

SEQ ID NO: 24053 - DNA, 75 bp, synthetic construct
  source 1..75: mol_type = other DNA
acagactggcggtcaggctgtcgttgattatcagccgcctcgtagcgggtgaaacgctggatatgcaaaagctcg

SEQ ID NO: 24054 - DNA, 75 bp, synthetic construct
  source 1..75: mol_type = other DNA
accgcagcgggatggccggtcttttccctggctttgaccgtcgtctggtaaacgcactgctgatgtgcgatgagt

SEQ ID NO: 24055 - DNA, 75 bp, synthetic construct
  source 1..75: mol_type = other DNA
tagaaacatgtaagatgaagtgctccggaaataacattggacgttttattagatttgtattcaccggagtgatgt

SEQ ID NO: 24056 - DNA, 75 bp, synthetic construct
  source 1..75: mol_type = other DNA
gcatcaaaatatggacacttaaataatggcggatatggagcgagacccaacaaaccgcctacgcccgatccaagt

SEQ ID NO: 24057 - DNA, 75 bp, synthetic construct
  source 1..75: mol_type = other DNA
tctctgatactattgtattattcagagagaagttaataagagagttgattaaaaaaaatatcacggtttatacat

SEQ ID NO: 24058 - DNA, 75 bp, synthetic construct
  source 1..75: mol_type = other DNA
gctataaagccttccttgctgaggtcaacaaccttaacaaacgtatgggtgatctgcgtgacattaacggtgagt

SEQ ID NO: 24059 - DNA, 75 bp, synthetic construct
  source 1..75: mol_type = other DNA
ctggctcaatgtgctgactgaactgaaaaaccgcggtctgaacgatatcctcatcacctgtgtagatagcctgaa

SEQ ID NO: 24060 - DNA, 75 bp, synthetic construct
  source 1..75: mol_type = other DNA
gcgtgaacgtactggctaaaaacggttctatggcaattcaggttggcgcgaacgatggccagactatctctatcg

SEQ ID NO: 24061 - DNA, 75 bp, synthetic construct
  source 1..75: mol_type = other DNA
agtacaggatattcccggtgtgctggccgtgtttgctgaacgtcgtaaggacagttttggcccgtatgtccggct

SEQ ID NO: 24062 - DNA, 75 bp, synthetic construct
  source 1..75: mol_type = other DNA
ataaaacaggttcggcagcactgttgcgctgtatcgaacaggccagggagggtatccgtaccctgcgccaacagt

SEQ ID NO: 24063 - DNA, 75 bp, synthetic construct
  source 1..75: mol_type = other DNA
gtgggtcaggaggtgattgtggacttcctcaacggcgacccggaccagccgattattatggggcgtacctaccac

SEQ ID NO: 24064 - DNA, 75 bp, synthetic construct
  source 1..75: mol_type = other DNA
cacgaaggtgtttgcactggatgtggctgcacggcaccgggtgcagtttgcgatgcctgaagtggatgcggtagc

SEQ ID NO: 24065 - DNA, 75 bp, synthetic construct
  source 1..75: mol_type = other DNA
tatcatcaaagttggtgaagaagttgaaatcgttggtatcaaagagactcagaagtctacctgtactggcgttga

SEQ ID NO: 24066 - DNA, 75 bp, synthetic construct
  source 1..75: mol_type = other DNA
atgggacataagtccatcagttcaacggaagtctacacgaaggtttttgcgctggatgtggctgcccggcaccgg

SEQ ID NO: 24067 - DNA, 75 bp, synthetic construct
  source 1..75: mol_type = other DNA
gctataagccgcaactggctgaaggcagcgggcgtacccagaccgtgcgcatggtgctgattaccagcagcacgg

SEQ ID NO: 24068 - DNA, 75 bp, synthetic construct
  source 1..75: mol_type = other DNA
ttacagtgcgggcatattaatatgcaagggcgctattcatttatagtgccggaatcagtcagtaagggtgagctg

SEQ ID NO: 24069 - DNA, 75 bp, synthetic construct
  source 1..75: mol_type = other DNA
gtaatacaggtttttatgtccgctgccagatgtacgacggaagaccatcaacaagtgctttttcctggagagttt

SEQ ID NO: 24070 - DNA, 75 bp, synthetic construct
  source 1..75: mol_type = other DNA
aactcaactggtacttcaagaacgggttttacagcccgtatgtcaggcgccggtgggtttaatctttgctatata

SEQ ID NO: 24071 - DNA, 75 bp, synthetic construct
  source 1..75: mol_type = other DNA
cgtcattcaggaagtggctggctgaacaggggcttatcggtcaggacgtggcgttgtccgccattgctgccgcac

SEQ ID NO: 24072 - DNA, 75 bp, synthetic construct
  source 1..75: mol_type = other DNA
attaccggaatgcgtcgctggggatggaacagcaacgactccagttgcagaaatacaaccagcgacggcttgagt

SEQ ID NO: 24073 - DNA, 75 bp, synthetic construct
  source 1..75: mol_type = other DNA
tgatatgcagtttctgttgtgggatgcacagcgccgtgctggtatcagtgatgctgaaattaccgctgctatgga

SEQ ID NO: 24074 - DNA, 75 bp, synthetic construct
  source 1..75: mol_type = other DNA
gacgcaacaggacaccatccgccagatggccgaatacaactgcctgctctcacagcgggtggcggcttatgcttc

SEQ ID NO: 24075 - DNA, 75 bp, synthetic construct
  source 1..75: mol_type = other DNA
atcatgggcatctatggcgaacagctaccttgctgctgctggttcgtcagaacgtattgatcatcgttcccttca

SEQ ID NO: 24076 - DNA, 75 bp, synthetic construct
  source 1..75: mol_type = other DNA
cactccgatcgttcgtggttctgctctgaaagcgctggaaggcgacgcagagtgggaagcgaaaatcctggaact

SEQ ID NO: 24077 - DNA, 75 bp, synthetic construct
  source 1..75: mol_type = other DNA
gcgacaacatcaaaatggttgttaccctgatccacccgatcgcgatggacgacggtctgcgtttcgcaatccgtg

SEQ ID NO: 24078 - DNA, 75 bp, synthetic construct
  source 1..75: mol_type = other DNA
atgccagtttttttattggtctttccagtggtctgtcatggctggcgtgggcaacccgtattccggtggtactga

SEQ ID NO: 24079 - DNA, 75 bp, synthetic construct
  source 1..75: mol_type = other DNA
aacataaaagttactggaaccgtgaagaacacacgatagaggaaatccgcgcaaaatatggttcgaccggacagc

SEQ ID NO: 24080 - DNA, 75 bp, synthetic construct
  source 1..75: mol_type = other DNA
tgcttattaaacgagttaatgatgtcatcagccgtttcaccgactatacacatgtaatgtgtgttggtggtgggg

SEQ ID NO: 24081 - DNA, 75 bp, synthetic construct
  source 1..75: mol_type = other DNA
tcccttactggcaaatatatacctcgacaaactggaccgttttgtagaacagaacttaattcctgcatatacaag

SEQ ID NO: 24082 - DNA, 75 bp, synthetic construct
  source 1..75: mol_type = other DNA
cgatacactcttcaggaaaaatcctacgaggcttgtgctgctgaattaattcctgatgaggaaggagagagtctc

SEQ ID NO: 24083 - DNA, 75 bp, synthetic construct
  source 1..75: mol_type = other DNA
cccctcttcgttatccgggaggtaaggcaaaattcttgccacatattgaacaaatactccgcaacaatgatctca

SEQ ID NO: 24084 - DNA, 75 bp, synthetic construct
  source 1..75: mol_type = other DNA
ggttcaaaattttttggttttgatatggataacgaattcatcagtggttttgatgtaggggcatggggagtatta

SEQ ID NO: 24085 - DNA, 75 bp, synthetic construct
  source 1..75: mol_type = other DNA
agggattcgctttgcgtactccggctccagcagggaaacacagtgcttgtggcaacgttagcctacgaagttaaa

SEQ ID NO: 24086 - DNA, 75 bp, synthetic construct
  source 1..75: mol_type = other DNA
gacactggagacctgggcggataaaaccgggaaggcattcaaatcgatgtgggatgccattctggatatcggtcg

SEQ ID NO: 24087 - DNA, 75 bp, synthetic construct
  source 1..75: mol_type = other DNA
atgagaaaaaataatacagcaataatattcggcggcctgtttttttcctgcaacgtgatggccggagccggtacg

SEQ ID NO: 24088 - DNA, 75 bp, synthetic construct
  source 1..75: mol_type = other DNA
aaggaaacataccaggataatcagcctagcggagttgaatgcaatttttataaaataaaaaagaatattcagacc

SEQ ID NO: 24089 - DNA, 75 bp, synthetic construct
  source 1..75: mol_type = other DNA
gcggcagtgcactcagataccacccgcaatacgacactgaacggccctggtttgaacacgctgacgaagggctga

SEQ ID NO: 24090 - DNA, 75 bp, synthetic construct
  source 1..75: mol_type = other DNA
aaggcgcggggcgtaccattcagctggtcagtgacctgcgcggaaccggagaagaagccggagcgtgggaaacgt

SEQ ID NO: 24091 - DNA, 75 bp, synthetic construct
  source 1..75: mol_type = other DNA
cccgcaaggccatcacagaagtgaagaagatggagaaccgtgatgcggtggaggcgaccgtctggggcgcatatt

SEQ ID NO: 24092 - DNA, 75 bp, synthetic construct
  source 1..75: mol_type = other DNA
ttaatagaatcaggtttgtggtcccgcgatgcagttgaacgtcagatgagccatcaggaacgtaacggtgtacgt

SEQ ID NO: 24093 - DNA, 75 bp, synthetic construct
  source 1..75: mol_type = other DNA
aatcagtgaaaatactgtaaataaagccctgagggtgatggggtatgacacaacccgggaagtctgtggccatgg

SEQ ID NO: 24094 - DNA, 75 bp, synthetic construct
  source 1..75: mol_type = other DNA
agacgcagccaggacaaagtgcgcaggatattgcgcgggaggtggcacgccagcttgatgaacgtgaacgcaggc

SEQ ID NO: 24095 - DNA, 75 bp, synthetic construct
  source 1..75: mol_type = other DNA
ctttgcttagtaagaggaagcaaattatttacttattaatgcagagtatgcgtattgatggatatatggagcgtt

SEQ ID NO: 24096 - DNA, 75 bp, synthetic construct
  source 1..75: mol_type = other DNA
ccggtcagtaaccgaaccctgatgagtctgctggcgtccggcgaagacctggcatcacagggctggcgctattat

SEQ ID NO: 24097 - DNA, 75 bp, synthetic construct
  source 1..75: mol_type = other DNA
gtatcatgtgcttcagcccggtgggctccgtaataaactgtctcacgaagcgttaatggctgtttattctggtta

SEQ ID NO: 24098 - DNA, 75 bp, synthetic construct
  source 1..75: mol_type = other DNA
aagtgtttacgaccggtcgtggtacgccgtacggcctgatggcggtacccgtcattaaaatggcgacccgcaccg

SEQ ID NO: 24099 - DNA, 75 bp, synthetic construct
  source 1..75: mol_type = other DNA
gagtggttatcctgtccattgcttatactgcagataaatatggctgccatttgttatcacgtattggcgcttatt

SEQ ID NO: 24100 - DNA, 75 bp, synthetic construct
  source 1..75: mol_type = other DNA
gggtgatggcagtgaaaatgtcggacaggccggcgtcttccggttcatacgccagcaatttgcgggaatatgagt

SEQ ID NO: 24101 - DNA, 75 bp, synthetic construct
  source 1..75: mol_type = other DNA
gcgtggaatccagacccaataaacgcccaatgaactcggacctgaaaaactccggggaaatcgaggcggatgccg

SEQ ID NO: 24102 - DNA, 75 bp, synthetic construct
  source 1..75: mol_type = other DNA
acatacgataatgtgccagcagcggaatgtgtgaaaataaccactgcggcggcaggcaacttttataccgctaaa

SEQ ID NO: 24103 - DNA, 75 bp, synthetic construct
  source 1..75: mol_type = other DNA
aaaagttaataaggttaaaaatagatactgaatggataaaaaagcagcctggattttgctcatataaaaagctga

SEQ ID NO: 24104 - DNA, 75 bp, synthetic construct
  source 1..75: mol_type = other DNA
attacgtgatgcgcatacctgtgaagcagctgaagatgccctgaaggatgcgcagaacatgatggcctcattgtc

SEQ ID NO: 24105 - DNA, 75 bp, synthetic construct
  source 1..75: mol_type = other DNA
gtgaaaaatattgcgacaggcggtgttcttgaacgtatccgtaagctgactccgcagcatgtaaccgcgccgtgc

SEQ ID NO: 24106 - DNA, 75 bp, synthetic construct
  source 1..75: mol_type = other DNA
aattgtgagaaacggaaaaaaacttgaagccggaaattattttgctgtgctgggattccgggtcgattatgagtg

SEQ ID NO: 24107 - DNA, 75 bp, synthetic construct
  source 1..75: mol_type = other DNA
cggacggtggaggagtggcgggaatggcaacttgctgaaggacgaaaacgcagcgaggagattaaccgccagaat

SEQ ID NO: 24108 - DNA, 75 bp, synthetic construct
  source 1..75: mol_type = other DNA
ggcaaatccggggaaaaatttttacaggagctttgcggggttgatttgctggtcctggatgaaataggcgttcag

SEQ ID NO: 24109 - DNA, 75 bp, synthetic construct
  source 1..75: mol_type = other DNA
ggcgtgtatccgtcttactgggaggaatggaaaaaagtcagggaggtggtaaaagttgcctgtccggagtgtggc

SEQ ID NO: 24110 - DNA, 75 bp, synthetic construct
  source 1..75: mol_type = other DNA
agtacgaaatgaagatggcacgcttatgtcgcccgttaagccccgcacggtaaaccttgaacagcgcaatctatc

SEQ ID NO: 24111 - DNA, 75 bp, synthetic construct
  source 1..75: mol_type = other DNA
aaaggatttatatgaagaactgcctaagaataggggaaaattatttacaccttgtaggaaagcttttgaacgtgc

SEQ ID NO: 24112 - DNA, 75 bp, synthetic construct
  source 1..75: mol_type = other DNA
cccgaccgaatccgtaaccattgaccttgcttatgaaggttccggtagtggcgactggcgaacggatgcatttat

SEQ ID NO: 24113 - DNA, 75 bp, synthetic construct
  source 1..75: mol_type = other DNA
tgcttaagcacaggcgcacgctggcgagaagccgtaaatcttactcgttcacaggtgaccaaataccgaattacc

SEQ ID NO: 24114 - DNA, 75 bp, synthetic construct
  source 1..75: mol_type = other DNA
cgggtttattgatagcgataacagcatgctgaatgttgcagtctcccgtgcgaaggacagttttctggtcttcgg

SEQ ID NO: 24115 - DNA, 75 bp, synthetic construct
  source 1..75: mol_type = other DNA
atgaaagagcttgagttaaagaaaccgattatcgctcatggtgagacactctccgtactggagtttgatgaaccc

SEQ ID NO: 24116 - DNA, 75 bp, synthetic construct
  source 1..75: mol_type = other DNA
attctgatcgaggccttttatcaccgcctgtatggcagggcaccggaggatgacggggttcacatcatcgctatc

SEQ ID NO: 24117 - DNA, 75 bp, synthetic construct
  source 1..75: mol_type = other DNA
atgccactgatcacgcggcttatgctgcaaaacttcaaaaagtttccggaactggacctgcgcttcagcaacgat

SEQ ID NO: 24118 - DNA, 75 bp, synthetic construct
  source 1..75: mol_type = other DNA
ctcgacgatggcgttaaggttaactacggcaagtttggcgatctgctggcagatgtcaaagccatcaccggcaat

SEQ ID NO: 24119 - DNA, 75 bp, synthetic construct
  source 1..75: mol_type = other DNA
tgacctgcgcaaaatggacgtcgcgggtcagtatgttgcgtgttgagttcagcgcagagtttaaacaggtggtga

SEQ ID NO: 24120 - DNA, 75 bp, synthetic construct
  source 1..75: mol_type = other DNA
ggtgcatggtggaataacgaccctgtcattgctgcccgtaatattcatatcagttggggggatattcagaatgac

SEQ ID NO: 24121 - DNA, 75 bp, synthetic construct
  source 1..75: mol_type = other DNA
tgcacctgtgcggcctgtcacgctcgaccatctatgaactcatccgtaagggggaatttccgccgcaggtgagtc

SEQ ID NO: 24122 - DNA, 75 bp, synthetic construct
  source 1..75: mol_type = other DNA
gtcacagacagaaagagcgaagatatcgataccattgatggtaactggcaggtcgatgaaggacgtcgttactgg

SEQ ID NO: 24123 - DNA, 75 bp, synthetic construct
  source 1..75: mol_type = other DNA
ttcgctgtaccggagccagacagggtatggtgcggagatattacgtatatctgggcaggaaatcgctggtgctat

SEQ ID NO: 24124 - DNA, 75 bp, synthetic construct
  source 1..75: mol_type = other DNA
cccggaaaacatcagtacaaaaatgctcgtcaggaacatacctgcctgccgaatctgcttgagcgccagttcgct

SEQ ID NO: 24125 - DNA, 75 bp, synthetic construct
  source 1..75: mol_type = other DNA
gaaagtaataatatagcaacaatacaggctggtgtaaaagcactctatacatcagcatccagttttaccggatta

SEQ ID NO: 24126 - DNA, 75 bp, synthetic construct
  source 1..75: mol_type = other DNA
gatctggatgctctcaatgaactgtctgagcttgttcgtgatgcagaatgcggagtacatattgagccatacgca

SEQ ID NO: 24127 - DNA, 75 bp, synthetic construct
  source 1..75: mol_type = other DNA
gaaacacgcgccacaggatgcagaagctattctgacaaacaccagttcaccggagattgcagaacgtcgtcgggc

SEQ ID NO: 24128 - DNA, 75 bp, synthetic construct
  source 1..75: mol_type = other DNA
agcagcagaccaccggttagcagaattaatcaccggaaagttatatgacaggataccaaaagaaatatggaaata

SEQ ID NO: 24129 - DNA, 75 bp, synthetic construct
  source 1..75: mol_type = other DNA
tcagacgctatctgcgccatctgttcttagacagtgcacgcattgataacgagcatgccgcacaggagtatacgc

SEQ ID NO: 24130 - DNA, 75 bp, synthetic construct
  source 1..75: mol_type = other DNA
atgagtctgttaaatgacgttcagaaattcattgaagcccatccggggtgtacttccggagacattgcggatgct

SEQ ID NO: 24131 - DNA, 75 bp, synthetic construct
  source 1..75: mol_type = other DNA
ggggcagttgtagtaaaaccgattgagaacaaaggcatttatgcaggaaacccggcaagactgatcagaatatta

SEQ ID NO: 24132 - DNA, 75 bp, synthetic construct
  source 1..75: mol_type = other DNA
gcatgggcttgtagcgcgtgtcacgatgaaatcgaccgacgcacccataatctcgacaacaaagacgccagactt

SEQ ID NO: 24133 - DNA, 75 bp, synthetic construct
  source 1..75: mol_type = other DNA
agctacagtatggtgcagagcaggaggtcatgttccgccagcgacatcagcccggtctgcgaggtctgtcggact

SEQ ID NO: 24134 - DNA, 75 bp, synthetic construct
  source 1..75: mol_type = other DNA
gtgctggcgagcctcggtgggctggtttcctgtgcggcaaaggttcatttcaaagaagcaggcaacgccatgaat

SEQ ID NO: 24135 - DNA, 75 bp, synthetic construct
  source 1..75: mol_type = other DNA
tcctctgttgaaagagaggccggctctgacaccaacaactctgctggagatgctacaggataaatatcccggcca

SEQ ID NO: 24136 - DNA, 75 bp, synthetic construct
  source 1..75: mol_type = other DNA
ctaactatgcggcaaatgccggtaagtcaggcggcgagttctttacaccgcagcacgtctctaagctgattgcac

SEQ ID NO: 24137 - DNA, 75 bp, synthetic construct
  source 1..75: mol_type = other DNA
gcgatgacgtataccagaagcaaaacgtttaaaactgaagctggcgcgcgtcgctggttaaccagaaacactgac

SEQ ID NO: 24138 - DNA, 75 bp, synthetic construct
  source 1..75: mol_type = other DNA
gccttcatcactcagcaggttatgcggcacaaccgtaacaatcaggatctggtcaaggaagaacgtcttcatctg

SEQ ID NO: 24139 - DNA, 75 bp, synthetic construct
  source 1..75: mol_type = other DNA
cacggtcagcaaaatcgaccagttgcgtaaagatattgatgcgattgtggctgaaattgaaggctgcgaggtgca

SEQ ID NO: 24140 - DNA, 75 bp, synthetic construct
  source 1..75: mol_type = other DNA
gggtggtacgccgggagggcgatccgctggaagtggcgcagtggctgcaggcctgtcacgatgcaggaatggagg

SEQ ID NO: 24141 - DNA, 75 bp, synthetic construct
  source 1..75: mol_type = other DNA
atggcggcgctggggattatcgctgtactggttgccgcgatatggggaatgcaccagaagacgcagcgccttgaa

SEQ ID NO: 24142 - DNA, 75 bp, synthetic construct
  source 1..75: mol_type = other DNA
tggtgtggagcgatcgtaatggcgaggacagagaaaaaatttcatgctgccctgactgcttgatcgctgaggcca

SEQ ID NO: 24143 - DNA, 75 bp, synthetic construct
  source 1..75: mol_type = other DNA
atcagttaccgtgagctgcaggagatgctggctgaacgcggagtgaatgtcgatcactccacgatttaccgctgg

SEQ ID NO: 24144 - DNA, 75 bp, synthetic construct
  source 1..75: mol_type = other DNA
gctcgcgcaggcattcaaccgatcccgggacgcctcgcattcttcccgaatcgtcgcgcggcgatggcggattta

SEQ ID NO: 24145 - DNA, 75 bp, synthetic construct
  source 1..75: mol_type = other DNA
gtatcacctgttgcgggagtacgttaatacgctggagaacgaaagccagaatcgtatttatcgtgccattgatta

SEQ ID NO: 24146 - DNA, 75 bp, synthetic construct
  source 1..75: mol_type = other DNA
atcgcggccacctggttgagcaggatagctacatggctcggctggctgaaatggaaaaggaactcagtgaggcaa

SEQ ID NO: 24147 - DNA, 75 bp, synthetic construct
  source 1..75: mol_type = other DNA
atatcgaaagctctccacataataatccatcaaattatgttgatacggttgatataatccgagaaacaagagtct

SEQ ID NO: 24148 - DNA, 75 bp, synthetic construct
  source 1..75: mol_type = other DNA
ggtcagtatgctggaatcacaagaacatccgtgattgcatgtatgaaacgacttgaggcacatggtttaatcaag

SEQ ID NO: 24149 - DNA, 75 bp, synthetic construct
  source 1..75: mol_type = other DNA
acggcaataaccgcgccatccgccttccccgagatctggattttgagggggtgagcgagctggagattgtccggg

SEQ ID NO: 24150 - DNA, 75 bp, synthetic construct
  source 1..75: mol_type = other DNA
accaggagctggtgaaactggttactgagcgcagcagtcagcctctgcatgatgtggacctggacagttatttat

SEQ ID NO: 24151 - DNA, 75 bp, synthetic construct
  source 1..75: mol_type = other DNA
ctaatggtcgctatttctacgttgctgaactttattcaggaagcacgttccactaaagcggcagatgccctgaaa

SEQ ID NO: 24152 - DNA, 75 bp, synthetic construct
  source 1..75: mol_type = other DNA
ggtccggccgacctggagctcgtttgcggcactcgaaaaggccgacgcagactttatggcggagcgtgaggacat

SEQ ID NO: 24153 - DNA, 75 bp, synthetic construct
  source 1..75: mol_type = other DNA
taaaggccgtgaagacggtctgcgcgatctggagcgtaaggcattgcaggtgggcaccgatgaagacggtggcta

SEQ ID NO: 24154 - DNA, 75 bp, synthetic construct
  source 1..75: mol_type = other DNA
aaacgtggtggacagggtcatagaaggcgcttacgaagtggtgggcgtgtttgaccggattgaggaaaagcgtga

SEQ ID NO: 24155 - DNA, 75 bp, synthetic construct
  source 1..75: mol_type = other DNA
gaatatgaagagcaaaacttcagcggtagccgctcagtcatggagtccgtggaggctaaaagcaaagaaatcatg

SEQ ID NO: 24156 - DNA, 75 bp, synthetic construct
  source 1..75: mol_type = other DNA
gagaatatgctgaaaggcgggatttccggtcgcagtgccagaggaaaacgtatccatacccgggccattcacagc

SEQ ID NO: 24157 - DNA, 75 bp, synthetic construct
  source 1..75: mol_type = other DNA
gggaaggcttccagccattcttcgcctgccagacccgtgtgcgcgacccgggccgtcggggatacacaaaacaca

SEQ ID NO: 24158 - DNA, 75 bp, synthetic construct
  source 1..75: mol_type = other DNA
ttcgagcattataacgaatggcatccgcatagtgcgctgggttatcgctcgccacgggaatatctgcggcagcgg

SEQ ID NO: 24159 - DNA, 75 bp, synthetic construct
  source 1..75: mol_type = other DNA
aggcgcggatgcgaggttaaaaaagcccttagcctcgactaccgtcactggataatctccgtcaggcttccttac

SEQ ID NO: 24160 - DNA, 75 bp, synthetic construct
  source 1..75: mol_type = other DNA
atggatacgctcaatcttggcaacaacgaatctctggtatgcggtgtgttccctaaccaggacggcacgtttacc

SEQ ID NO: 24161 - DNA, 75 bp, synthetic construct
  source 1..75: mol_type = other DNA
ccttatttccggatgggaaaaacgtcaggtgctgaaagaggacaatggtaacgtttcgcaaacggcaaaatcccc

SEQ ID NO: 24162 - DNA, 75 bp, synthetic construct
  source 1..75: mol_type = other DNA
gagactgcgtgtcacgttcgcgctggactgctgtgatcgtgaggcactgcactgggcggtcactaccggcggctt

SEQ ID NO: 24163 - DNA, 75 bp, synthetic construct
  source 1..75: mol_type = other DNA
gtttctctgcgcgtccctgtatgtgctgaccctcttccctgattccgttatccacacatcggagatattcacgtg

SEQ ID NO: 24164 - DNA, 75 bp, synthetic construct
  source 1..75: mol_type = other DNA
gtttctctgcgcatcactgtatgcactaaccctcctccctgattccgttttccgcacttcggagatattcacgtg

SEQ ID NO: 24165 - DNA, 75 bp, synthetic construct
  source 1..75: mol_type = other DNA
acaatcgtcagcgtcgtcactctcgtctggggaatatctccccggcagccttcagggaaaaatatcatcagatgg

SEQ ID NO: 24166 - DNA, 75 bp, synthetic construct
  source 1..75: mol_type = other DNA
atgcataacctgtcaatttctgaccttaacagcattcagtttgacgagaaatttaccgggcagttgctggtcaat

SEQ ID NO: 24167 - DNA, 75 bp, synthetic construct
  source 1..75: mol_type = other DNA
attgcgaagaaaggtcagttgctgagtagctttgcgcatctgcgtgatgacggtacaaccgcatcttcttgctgg

SEQ ID NO: 24168 - DNA, 75 bp, synthetic construct
  source 1..75: mol_type = other DNA
cgtgaggattacggctttgaagatggcctgttcaccggctacgacgcggaaaaacgcaagtacgataaatcctcc

SEQ ID NO: 24169 - DNA, 75 bp, synthetic construct
  source 1..75: mol_type = other DNA
gcgccagattaacgcggcaagggtaaaacattgcggtgtttctgcgctggtttgcgaagagtgtgacgcgccaat

SEQ ID NO: 24170 - DNA, 75 bp, synthetic construct
  source 1..75: mol_type = other DNA
acggtctcggagctctctctccagggactcgataatgacaataataaccgatttgataaatcttccgcgaccctc

SEQ ID NO: 24171 - DNA, 75 bp, synthetic construct
  source 1..75: mol_type = other DNA
ccaggcggtggatattgaagtcagtcttcatgacgacttttcgccagtgattcagtcacgacgcgcctggtttag

SEQ ID NO: 24172 - DNA, 75 bp, synthetic construct
  source 1..75: mol_type = other DNA
acgatctggctgcgccggtggactatcgcgagcaggcggagtccatgtttaacgaagagagcaaggccatccgtc

SEQ ID NO: 24173 - DNA, 75 bp, synthetic construct
  source 1..75: mol_type = other DNA
tctgatccttctaaggcttatagggaacttggatggaaagcgaagcgtgggttggaagaaatggttcgagatgcc

SEQ ID NO: 24174 - DNA, 75 bp, synthetic construct
  source 1..75: mol_type = other DNA
gcaagcatatttacccgcgccttggtcgttatccgatcaccagatgtgaaacccgccattgggtggcctgttttg

SEQ ID NO: 24175 - DNA, 75 bp, synthetic construct
  source 1..75: mol_type = other DNA
tgacgatgtcgattttcaggaacgcatggcagaacacatccgctacatggctgaaaccatcgcccgtcaccaaat

SEQ ID NO: 24176 - DNA, 75 bp, synthetic construct
  source 1..75: mol_type = other DNA
gcaataaaagagcatatcagtaatgttcctgagctgaaaaaacagaacgacctcctgctgtctattccgggtatt

SEQ ID NO: 24177 - DNA, 75 bp, synthetic construct
  source 1..75: mol_type = other DNA
gaccagggatggcagtatcgtatgagaagatatcaaaatatccttaaagaacatggtattaaacaaagcatgtcc

SEQ ID NO: 24178 - DNA, 75 bp, synthetic construct
  source 1..75: mol_type = other DNA
cagcggctggttcgcagcgtgggggaacacctgacggcctggcaccggatgcgcggatatctgacagaacgtcag

SEQ ID NO: 24179 - DNA, 75 bp, synthetic construct
  source 1..75: mol_type = other DNA
tacccgaaccaaaaccgacaaagctgactccagactgattgcacgcttttgtaaagccgcgcagccagatccatg

SEQ ID NO: 24180 - DNA, 75 bp, synthetic construct
  source 1..75: mol_type = other DNA
aaaagaaataatattctttatctgcgtaggggttttggtaggcggtgtcatttctagggcgttttttaatttgta

SEQ ID NO: 24181 - DNA, 75 bp, synthetic construct
  source 1..75: mol_type = other DNA
atgaacgtaaaaatcagatacagcctgtcggctgctgttctggcactgattgccgtcggtgcgcccgcgcctgac

SEQ ID NO: 24182 - DNA, 75 bp, synthetic construct
  source 1..75: mol_type = other DNA
tgttgccagatgtggcgattagtcttgaccgtactgaagatgccacgctggagttttacgaagctgaggcgaaaa

SEQ ID NO: 24183 - DNA, 75 bp, synthetic construct
  source 1..75: mol_type = other DNA
gaagctgtcgaaggaaaaatgcgaccaggttaacgctattgaacgtgataaggcgctggcatgggtggagcgcaa

SEQ ID NO: 24184 - DNA, 75 bp, synthetic construct
  source 1..75: mol_type = other DNA
atcctcgaccagtttctggatgaaaaggaaggtaaccacaccacagcataccgtgatggtgcgggtatctggacc

SEQ ID NO: 24185 - DNA, 75 bp, synthetic construct
  source 1..75: mol_type = other DNA
taatttcattctcggacgaagttctgccggcacgttgtcattatcagtggatgaacgtggtttgcgttacgacat

SEQ ID NO: 24186 - DNA, 75 bp, synthetic construct
  source 1..75: mol_type = other DNA
acggcaccgttattttagaaaacgaagctcgcgttgtagatatcgccgttaaaggcggaaaaattgctgctatcg

SEQ ID NO: 24187 - DNA, 75 bp, synthetic construct
  source 1..75: mol_type = other DNA
cgaattacgcgccctgaaggttcgtgaattactcgatcaggccggtattgcccgccggttccaggactgtgagtt

SEQ ID NO: 24188 - DNA, 75 bp, synthetic construct
  source 1..75: mol_type = other DNA
aacgcgagaagcaggttgttaagttcaatacgttgcgtgaagattttgccggtcaggtgtttctccttcggcact

SEQ ID NO: 24189 - DNA, 75 bp, synthetic construct
  source 1..75: mol_type = other DNA
gcaatcagaggggctttttatgatgcaggaacacgatctgcgagaatgccgaataacacaactgatataggcaaa

SEQ ID NO: 24190 - DNA, 75 bp, synthetic construct
  source 1..75: mol_type = other DNA
tgaagctgcgggtgaattaggtgataaaacgctacttcctgttttagatactatgttgtacaagtttgatgacaa

SEQ ID NO: 24191 - DNA, 75 bp, synthetic construct
  source 1..75: mol_type = other DNA
tgcagggggagattgtggcactggtccacagtcatcccggtgggctgccctggctgagcgaggctgaccggcggc

SEQ ID NO: 24192 - DNA, 75 bp, synthetic construct
  source 1..75: mol_type = other DNA
aaagtaagataacacattatactactatcactattgccctcacaggggcagtggtttatctacaaaccattctac

SEQ ID NO: 24193 - DNA, 75 bp, synthetic construct
  source 1..75: mol_type = other DNA
cgactcgagggggatgcgcgtcgcgttgctgttctgtgtctttccactggcgcaaggtggggggaagcagctggc

SEQ ID NO: 24194 - DNA, 75 bp, synthetic construct
  source 1..75: mol_type = other DNA
tggcgcatgcccggcggtgtgcgccagcggagtcgtgcggcttcgtgataagcaccccggagggcgaacggtacc

SEQ ID NO: 24195 - DNA, 75 bp, synthetic construct
  source 1..75: mol_type = other DNA
acatcatgctcggtaaaacgtataccgaagcagaatgcaaagccctcctgaataaagaccttgccacggtcgcca

SEQ ID NO: 24196 - DNA, 75 bp, synthetic construct
  source 1..75: mol_type = other DNA
atggtaaacctgttgttccaggcatgaagttgtcgaaggcaaaatgcgctcaggttaacgccattgagcgtaata

SEQ ID NO: 24197 - DNA, 75 bp, synthetic construct
  source 1..75: mol_type = other DNA
atggggcgcagccctgagtgccggagggctgactgccaccacgatgctgttctcactgggtgccagcatgatact

SEQ ID NO: 24198 - DNA, 75 bp, synthetic construct
  source 1..75: mol_type = other DNA
ctgccctggctgagtgaggctgacaggcggctgcaggtgcagagcgatttgccttggtggctggtctgccggggt

SEQ ID NO: 24199 - DNA, 75 bp, synthetic construct
  source 1..75: mol_type = other DNA
aactcggcgaaagcatcggcagcaagccagacagcagctaaagcaagtgaagacgcagccagagagtatgcaagt

SEQ ID NO: 24200 - DNA, 75 bp, synthetic construct
  source 1..75: mol_type = other DNA
agcaactccagcttcttggggtaaatctgcaaatatgaatgtcgctgaggttggaactgatagttttggttttac

SEQ ID NO: 24201 - DNA, 75 bp, synthetic construct
  source 1..75: mol_type = other DNA
atggatgttgagtatggccagtacagcgtcaccctgctggttgaaggttttccaccttcacatgccgggaccatt

SEQ ID NO: 24202 - DNA, 75 bp, synthetic construct
  source 1..75: mol_type = other DNA
aggggacattcagtgcggacacgggggccagccaggattcggcgcgctggggtgtgggtaaaccgttatatcagg

SEQ ID NO: 24203 - DNA, 75 bp, synthetic construct
  source 1..75: mol_type = other DNA
tgtcgcccgggttctgcgtggactgttctggtgtctgaaatacaccgtcattctgccactggccacaatggccct

SEQ ID NO: 24204 - DNA, 75 bp, synthetic construct
  source 1..75: mol_type = other DNA
ccggtcagtgaatgccggttttcttcctcagaccttcccggagcagaagaaaaagaaatctgccattaccgcaat

SEQ ID NO: 24205 - DNA, 75 bp, synthetic construct
  source 1..75: mol_type = other DNA
aaagagggctggcagccatacggcggaccggttgccattacgccgtacacactgatgcaggcggtggctattgaa

SEQ ID NO: 24206 - DNA, 75 bp, synthetic construct
  source 1..75: mol_type = other DNA
aaggagggctggcagccgtttggtagtccggtggccataaccccttataccctgatgcaggcgattgcagcagaa

SEQ ID NO: 24207 - DNA, 75 bp, synthetic construct
  source 1..75: mol_type = other DNA
gcgtagtatgcggcatctggtcattctggttgaggagttgcgcgaacgtggcgttaattttcgcagcctgacgga

SEQ ID NO: 24208 - DNA, 75 bp, synthetic construct
  source 1..75: mol_type = other DNA
actgatagttgaacgtaccagggcggggattgctgcagctcgcgacaaaggcagagtaggtggacgccgtcctaa

SEQ ID NO: 24209 - DNA, 75 bp, synthetic construct
  source 1..75: mol_type = other DNA
acgactatgccgggaccctgaccggcggacgtatcctgtccatcgatgccgccagccgcaccctgacactggacc

SEQ ID NO: 24210 - DNA, 75 bp, synthetic construct
  source 1..75: mol_type = other DNA
cagaagtatgaaacaccttatcacgcttatagaggagttgcgggaaaaaggtgttaatttccgtagtctgacaga

SEQ ID NO: 24211 - DNA, 75 bp, synthetic construct
  source 1..75: mol_type = other DNA
gcgcagtatgcggcatcttgttacgttgatagaagagttgcgccagcgaggtgtgaatttccgaagcctgactga

SEQ ID NO: 24212 - DNA, 75 bp, synthetic construct
  source 1..75: mol_type = other DNA
ttcaattgataccagtaccccaatggggcgctttttctttcatgtgatgggtgccctggctgaaatggagcgtga

SEQ ID NO: 24213 - DNA, 75 bp, synthetic construct
  source 1..75: mol_type = other DNA
tctcatcgtctatggaaacgacatttgtgctggatgctctggagcaggcgttatgggcccgtcgaccgtccggca

SEQ ID NO: 24214 - DNA, 75 bp, synthetic construct
  source 1..75: mol_type = other DNA
acattatcggcaggtgacactctggttgtctggaagctggatcggctggggcgtagtatgcggcatctggtcatt

SEQ ID NO: 24215 - DNA, 75 bp, synthetic construct
  source 1..75: mol_type = other DNA
ttacggcattggtacatcgacgatttatcgttaccaccccgcaggagaatcaagcggaacaatagagaagagtca

SEQ ID NO: 24216 - DNA, 75 bp, synthetic construct
  source 1..75: mol_type = other DNA
ttactcaccggcgaatcttggcgtggtgagtggcgggaatgcacgctattacgatattcaggaactgacgattgg

SEQ ID NO: 24217 - DNA, 75 bp, synthetic construct
  source 1..75: mol_type = other DNA
ttgctctacactctctggagctactacaaaatgtgggggcgcatgacgacagaaactctccgccgtaacgaaaac

SEQ ID NO: 24218 - DNA, 75 bp, synthetic construct
  source 1..75: mol_type = other DNA
tcaggcgcaggaaggagaaaagcatgacccgttctgatgatacccatgaaaacgaggcaaacatgacgccggaag

SEQ ID NO: 24219 - DNA, 75 bp, synthetic construct
  source 1..75: mol_type = other DNA
tggtcatgcaggcatcatttctacggcaaaactctttcaactttctcacaccagcctctcacactggattaatct

SEQ ID NO: 24220 - DNA, 75 bp, synthetic construct
  source 1..75: mol_type = other DNA
tcaaactgtggccaacttttcgagatcaaactcattttattcaaagtcttaatgttgataatattgacgatctcc

SEQ ID NO: 24221 - DNA, 75 bp, synthetic construct
  source 1..75: mol_type = other DNA
tcccgctacctgccacataaaatgtcggggaggagaaataacactgactcatccctctgctgaactcatgagcac

SEQ ID NO: 24222 - DNA, 75 bp, synthetic construct
  source 1..75: mol_type = other DNA
acactggaagaacaaccggtgctcaacagtaaatcgtggctgagcagtttgcaaaacgattacagccttcctgaa

SEQ ID NO: 24223 - DNA, 75 bp, synthetic construct
  source 1..75: mol_type = other DNA
tacagcagcaaacggcagatctgttttatgaaaaccgtctggtgccgaaaaaagtcgatattcgccagcgcatct

SEQ ID NO: 24224 - DNA, 75 bp, synthetic construct
  source 1..75: mol_type = other DNA
gaacacattgatcacagagaatatcaccagatcctggctgaaacagagcaggagaaccatctgaaaaaattacgt

SEQ ID NO: 24225 - DNA, 75 bp, synthetic construct
  source 1..75: mol_type = other DNA
cccgccatcagcataccgtggcactgtatgcgaaagggctgacctgcgatgccgacaccctcggctcctgtggtt

SEQ ID NO: 24226 - DNA, 75 bp, synthetic construct
  source 1..75: mol_type = other DNA
atgcatataccttcaccgaagccggtctccacgccggctgacctgtcatcgttaaactatcattcaccgattttc

SEQ ID NO: 24227 - DNA, 75 bp, synthetic construct
  source 1..75: mol_type = other DNA
cactgaagaactattttgctcaactgaatggtcaggatgtgaatgacctctatgagctggtactggctgaagtag

SEQ ID NO: 24228 - DNA, 75 bp, synthetic construct
  source 1..75: mol_type = other DNA
gtatgcaaaagggctgacctgcaaagccgataccctcagcagttgtgattacgtttatctggctgtttatccgac

SEQ ID NO: 24229 - DNA, 75 bp, synthetic construct
  source 1..75: mol_type = other DNA
gtgtcagactcactccatgaaacaaattatcccgacgataacaacgaccgcccctggtgggggctaccctgcacc

SEQ ID NO: 24230 - DNA, 75 bp, synthetic construct
  source 1..75: mol_type = other DNA
cggtgctgacctacgcgaagctggacctgtgggcgaagtttcaggatttccaggtgcgtatccgtgacgccatcg

SEQ ID NO: 24231 - DNA, 75 bp, synthetic construct
  source 1..75: mol_type = other DNA
tacggtaatgccagtgcaggatacagtcacagtgggggttaccggcaactgtattatgggctgagtggcggtatt

SEQ ID NO: 24232 - DNA, 75 bp, synthetic construct
  source 1..75: mol_type = other DNA
gtgtcagacacacaccccgggacaacgcatcccgacaacaacaacgaccgcccctggtgggggctcccctgcacc

SEQ ID NO: 24233 - DNA, 75 bp, synthetic construct
  source 1..75: mol_type = other DNA
atgcgccaggaaacccgctttaaatttaatgcctacctgtcccgtgttgccgaactgaacggcatcgacgccggt

SEQ ID NO: 24234 - DNA, 75 bp, synthetic construct
  source 1..75: mol_type = other DNA
ggaaaaaatccgctcaatgtaccgtgaaagcgacatcgtaccgggagagcagaccgccaccagcatactgaagca

SEQ ID NO: 24235 - DNA, 75 bp, synthetic construct
  source 1..75: mol_type = other DNA
tggtaccggaactcgggctggtggtccttaagccaggtcgtgaatccatgcaggtatttcacaatcctcgagtgc

SEQ ID NO: 24236 - DNA, 75 bp, synthetic construct
  source 1..75: mol_type = other DNA
cacacgctgggtaaagacacagccgtgtgcgtgttgtggtaagccagcggacgatcctcatcatctgattggtca

SEQ ID NO: 24237 - DNA, 75 bp, synthetic construct
  source 1..75: mol_type = other DNA
gttatggtaccggcgcaatggtgttgtgttggcactgcgacaaccaactgcgtgaccagacatcggaatcactgg

SEQ ID NO: 24238 - DNA, 75 bp, synthetic construct
  source 1..75: mol_type = other DNA
cggtaccggaacttgggctggtggtccttaaaccaggccgtgaatccatgcaggtattccataaccctcgagtgc

SEQ ID NO: 24239 - DNA, 75 bp, synthetic construct
  source 1..75: mol_type = other DNA
cctctggcgttcgaagaaaagcatggttctcaggttgatttaatttttcgttttcttgatcacgcctttgcaact

SEQ ID NO: 24240 - DNA, 75 bp, synthetic construct
  source 1..75: mol_type = other DNA
ttgccccgcgtatggggatcgtattgttcagacccggttcagagctgatgcccctgtttatgcaggggcgtgtcc

SEQ ID NO: 24241 - DNA, 75 bp, synthetic construct
  source 1..75: mol_type = other DNA
atgatccgcatcacatcattggtcatggcctgggaggtatgggaacaaaggctgatgatttgtttgttattccgc

SEQ ID NO: 24242 - DNA, 75 bp, synthetic construct
  source 1..75: mol_type = other DNA
ttgtgacaatgccggaactgtgctggtggctgattcgtaatgatctggcggatgccttaccggaaagtgcagccc

SEQ ID NO: 24243 - DNA, 75 bp, synthetic construct
  source 1..75: mol_type = other DNA
tgcagtctgtctcggaaagaaaaactcttatgacctttgtcaaatattaagcccaaaaagaccttacgcagctcc

SEQ ID NO: 24244 - DNA, 75 bp, synthetic construct
  source 1..75: mol_type = other DNA
cgggggcatctggaatctgtacaccctgaacaacggtggcgcatttatggcacctgaaccggatgacgatgatga

SEQ ID NO: 24245 - DNA, 75 bp, synthetic construct
  source 1..75: mol_type = other DNA
gaagttgaacaggctgaggccctgctgaaacaacgcgaacaggacagtgatcgttacagtgggcgggaagacgat

SEQ ID NO: 24246 - DNA, 75 bp, synthetic construct
  source 1..75: mol_type = other DNA
ctgggtgaagttagtgctgagcagctggaactggtgagtagcgccctgaaagtgatccgcactgttcgggtaaaa

SEQ ID NO: 24247 - DNA, 75 bp, synthetic construct
  source 1..75: mol_type = other DNA
gtccggaagctgccggtattgccgcctgtctgatgacgtacagccatcatgcctgtcgtacggaatgttatgcca

SEQ ID NO: 24248 - DNA, 75 bp, synthetic construct
  source 1..75: mol_type = other DNA
cccagtgggtggcaataggtgtgctggggagtctgctgtttggcctgctgacgtatctgactaacctgtatttca

SEQ ID NO: 24249 - DNA, 75 bp, synthetic construct
  source 1..75: mol_type = other DNA
cacgcgctgggtgaagacacagccgtgtgcgtgttgtggtaagccagccgacgatccccatcacctgattggtca

SEQ ID NO: 24250 - DNA, 75 bp, synthetic construct
  source 1..75: mol_type = other DNA
agtgcaggatattcccggtgtgctggccgtgtttgctgaacgccgtaaggacagttttggcccgtatgtccgact

SEQ ID NO: 24251 - DNA, 75 bp, synthetic construct
  source 1..75: mol_type = other DNA
ggggagtctgctgtttggcctgctgacgtatctgacaaacctttatttcaagattaaagaagataagcgtaaggc

SEQ ID NO: 24252 - DNA, 75 bp, synthetic construct
  source 1..75: mol_type = other DNA
aaggatgtcaccattaacggcaagaccacctcgcagtttctggcgtcggtgattctggataatctgcctccccgt

SEQ ID NO: 24253 - DNA, 75 bp, synthetic construct
  source 1..75: mol_type = other DNA
tcttaagtccacgcagatgatgagcgtgattgacgccattggtgaagggccgattgaaggtccggtgaaggggct

SEQ ID NO: 24254 - DNA, 75 bp, synthetic construct
  source 1..75: mol_type = other DNA
atcagcgatgatcataactttgaccgccagattattattccgcccattatttttaacggtatagcgtatgacgat

SEQ ID NO: 24255 - DNA, 75 bp, synthetic construct
  source 1..75: mol_type = other DNA
agattgataacggtcagcttgcgcctgacctggctgaaatcaggacgtccattacggatgtcagcaatgaaatca

SEQ ID NO: 24256 - DNA, 75 bp, synthetic construct
  source 1..75: mol_type = other DNA
gatggtgtggagacatacggtgtgtggggactctccctgccgtcactgcgtcgtcgcctgttccgctgtgtctcc

SEQ ID NO: 24257 - DNA, 75 bp, synthetic construct
  source 1..75: mol_type = other DNA
gccgccagcggtgcagcacctgactgccgaagtcaccgcagacagcggggagtatcaggtgctggcgcgatggga

SEQ ID NO: 24258 - DNA, 75 bp, synthetic construct
  source 1..75: mol_type = other DNA
ccctttaacatccggatggtccgggagacagcggacagcaccccggaccagctgcagaataagacgctctggtcg

SEQ ID NO: 24259 - DNA, 75 bp, synthetic construct
  source 1..75: mol_type = other DNA
tctcaaatccacgcagatgatgagcgtgattgatgcgattggtgagggaccgatagaaggcccggtgaaaggcct

SEQ ID NO: 24260 - DNA, 75 bp, synthetic construct
  source 1..75: mol_type = other DNA
gaccgtatcgcgatgataaatccggagagcggcaacagcacgccgttatttgtggcgcaggggaatcagctgttc

SEQ ID NO: 24261 - DNA, 75 bp, synthetic construct
  source 1..75: mol_type = other DNA
tacacgggttatggttttgaagttcgcaaaaacggtgtattaatcgcatccagagaaactaaaggggccattccc

SEQ ID NO: 24262 - DNA, 75 bp, synthetic construct
  source 1..75: mol_type = other DNA
ataacggtcagcttgcgcctgacctggctgaaatcaggacgtccattacggatgtcagcaatgaaatcacgcaga

SEQ ID NO: 24263 - DNA, 75 bp, synthetic construct
  source 1..75: mol_type = other DNA
ccacctcgcagttcctggcctcggtgattctggataatctgcctccccggccctttaacatccggatggtcaggg

SEQ ID NO: 24264 - DNA, 75 bp, synthetic construct
  source 1..75: mol_type = other DNA
cggtgctgaaatttataaccgaacgaccctggataatacgctgatatatacgggtgttattgatatgcctgccgg

SEQ ID NO: 24265 - DNA, 75 bp, synthetic construct
  source 1..75: mol_type = other DNA
acatcacggcacagcctgctcctgaccggatacaggtcagcgccctgcctgatggcgtggcgacatacggggtat

SEQ ID NO: 24266 - DNA, 75 bp, synthetic construct
  source 1..75: mol_type = other DNA
ttgtggctgtaccacgacagcggggatgcaggactgacccatctttaccggatgcgcgatgcgcagttgtggcgt

SEQ ID NO: 24267 - DNA, 75 bp, synthetic construct
  source 1..75: mol_type = other DNA
ggattattgcaaaagccgagcacaccattgataacagcggctttaccacgcagcttgagcttgaggcaaaaatcc

SEQ ID NO: 24268 - DNA, 75 bp, synthetic construct
  source 1..75: mol_type = other DNA
tttgcaacttcaggaaacagccaacagcaacaaagcagtaaccagcagaacactcctgtatacgacgattccatc

SEQ ID NO: 24269 - DNA, 75 bp, synthetic construct
  source 1..75: mol_type = other DNA
tcatcaatcaaaacagaaacggcgacagtcttcgattgcctttgcattgtacagagccttgttgatgccctgttt

SEQ ID NO: 24270 - DNA, 75 bp, synthetic construct
  source 1..75: mol_type = other DNA
tcctcctttggcaatagctatagttccgataactattttttctcatgaagtaaaaaactatgctgtttatgtgaa

SEQ ID NO: 24271 - DNA, 75 bp, synthetic construct
  source 1..75: mol_type = other DNA
atgcaggatattcacggggaaagcctgatcgagtcggttaaatcggagcagtcaccgcgggtggtgctctgggaa

SEQ ID NO: 24272 - DNA, 75 bp, synthetic construct
  source 1..75: mol_type = other DNA
ggaggatttgcagagcctggtgggggccacggtggtccgccgccgggtgtatgcgcgttttctggatgcggtgaa

SEQ ID NO: 24273 - DNA, 75 bp, synthetic construct
  source 1..75: mol_type = other DNA
actgagcgaggccagaaggttgagaacccggcagacctagttaggccagcaagcattgccagatttgagccaaga

SEQ ID NO: 24274 - DNA, 75 bp, synthetic construct
  source 1..75: mol_type = other DNA
catgctggcgaacacctgtatgtgggattaccggggcgatgaatgcgggtataacggtccggcagtggcggatga

SEQ ID NO: 24275 - DNA, 75 bp, synthetic construct
  source 1..75: mol_type = other DNA
gaagagtatctggcgactaaagatctcaatttccgcgctacgacagataagtatgacgcgtataaaaatgccgat

SEQ ID NO: 24276 - DNA, 75 bp, synthetic construct
  source 1..75: mol_type = other DNA
caaaagaagcgggcggcgaactggaagtttatgagtacgatcccggtgagctgaggccacaagatgttgaagtgc

SEQ ID NO: 24277 - DNA, 75 bp, synthetic construct
  source 1..75: mol_type = other DNA
tctggtggtgatggtggcgacgtttatctcgctggtcgctgccgggtggatttttaccgcgctgatttatctcgt

SEQ ID NO: 24278 - DNA, 75 bp, synthetic construct
  source 1..75: mol_type = other DNA
ggcgcagtaaaagcggcggtggattccggtgttgagtccgcacagcgcattggcgaggtggtgacgtcgttggtt

SEQ ID NO: 24279 - DNA, 75 bp, synthetic construct
  source 1..75: mol_type = other DNA
atggaacttaaaaaattgatggaacatatttctattacacccgattacagacaagcctggaaagtggtgcataaa

SEQ ID NO: 24280 - DNA, 75 bp, synthetic construct
  source 1..75: mol_type = other DNA
attgacgtgcgtgtctccaccatgccttccgcctggggcgagcgcgtggtgctgcgactgctggacaaaaaccag

SEQ ID NO: 24281 - DNA, 75 bp, synthetic construct
  source 1..75: mol_type = other DNA
ctctgtcgtgggaatgcgctggaaatattgccgctgattgagccagaaagcattgatgccttaatcactgacccg

SEQ ID NO: 24282 - DNA, 75 bp, synthetic construct
  source 1..75: mol_type = other DNA
tgcatagtctggtcctcggacagatcaagacggatgagaaatccaatgagattacagccattcctgaacttctta

SEQ ID NO: 24283 - DNA, 75 bp, synthetic construct
  source 1..75: mol_type = other DNA
ggtcggacctatccggtggaagtgcgctatcgcccgattgttgaagaagccgatgacaccgagcgcgatcagttg

SEQ ID NO: 24284 - DNA, 75 bp, synthetic construct
  source 1..75: mol_type = other DNA
tggcggagcagttgcgtgaagcaggcgcggatgtgatgcgtcaggacaccaatatgctgtttgttcgcgtcgggg

SEQ ID NO: 24285 - DNA, 75 bp, synthetic construct
  source 1..75: mol_type = other DNA
atgattaatttgttaatcatcgttctcagggctgtggtcgccgttgcaaacgcgctgattgcaattctggaactg

SEQ ID NO: 24286 - DNA, 75 bp, synthetic construct
  source 1..75: mol_type = other DNA
attctgccagacgtcgaaagcctgcgtattccggtacagtatctggcgaatctgctgaccgccggtgataccaaa

SEQ ID NO: 24287 - DNA, 75 bp, synthetic construct
  source 1..75: mol_type = other DNA
tacgaaagcggtcaggtaaccgaagcggcttgtatggcacatgcccgacgcaagatccacgatgtacatgtccgc

SEQ ID NO: 24288 - DNA, 75 bp, synthetic construct
  source 1..75: mol_type = other DNA
gtggcagctttctaatagcgatgagtcatcaccgtttcgtgaaactaactacgaaccgcaattgttcctcggttt

SEQ ID NO: 24289 - DNA, 75 bp, synthetic construct
  source 1..75: mol_type = other DNA
ctttattaattctctcaggcataaggaattaactgaaatactgacaaaaatatcttttcctgaaaaatccgggag

SEQ ID NO: 24290 - DNA, 75 bp, synthetic construct
  source 1..75: mol_type = other DNA
gagagcttgcccgtcaaattagaaggtcgcacctgcatcgttatgacgcgccaagcgctggagcttccgggtgtt

SEQ ID NO: 24291 - DNA, 75 bp, synthetic construct
  source 1..75: mol_type = other DNA
cgcgaccgaaagaacccaactggaccgcatgggccaatgacgtgcgcacaatgcggatgctggatggcagaactc

SEQ ID NO: 24292 - DNA, 75 bp, synthetic construct
  source 1..75: mol_type = other DNA
tccctgccggcagccgtctggttcgcgtattcggcagatcgcaaaggagaacatccgcagctccacctggcaaag

SEQ ID NO: 24293 - DNA, 75 bp, synthetic construct
  source 1..75: mol_type = other DNA
gcgtatctgcgccatatcctgagcgtactgccggaatggccttccaaccgagttgatgaactcctgccatggaac

SEQ ID NO: 24294 - DNA, 75 bp, synthetic construct
  source 1..75: mol_type = other DNA
gattaccgtggagaggaatgtgggtataacggcccggcagtggctgacgagttcgacaaacccaccacggatatc

SEQ ID NO: 24295 - DNA, 75 bp, synthetic construct
  source 1..75: mol_type = other DNA
tggcaggggcgtaagtatgaggcgtacccgattgatggcagcggctttgaaatgaacgggaaaggcagcagtgcc

SEQ ID NO: 24296 - DNA, 75 bp, synthetic construct
  source 1..75: mol_type = other DNA
tctcccgtcgtatcgcacagatggaagctgacctgaaggcacttcagaaagaaagtgatacccttaccggtcggg

SEQ ID NO: 24297 - DNA, 75 bp, synthetic construct
  source 1..75: mol_type = other DNA
cattcagtgtggtgatgagtcgttctatgcccgtgccagaaaaacaactgacagcggatttgaggcgtttcttgg

SEQ ID NO: 24298 - DNA, 75 bp, synthetic construct
  source 1..75: mol_type = other DNA
aacggagcgtcatgtctcattgaggtgaaatgctcacggtctgatttcctggctgaccggaaaaaggtgttccgg

SEQ ID NO: 24299 - DNA, 75 bp, synthetic construct
  source 1..75: mol_type = other DNA
atgcagatgatggctgggctgaggcggacaataacatcgctgaaaatgcgttgcggatggtcagtctgggccgca

SEQ ID NO: 24300 - DNA, 75 bp, synthetic construct
  source 1..75: mol_type = other DNA
catcttcgttccatcttggaatggaggttcttcgtgctcaagttgcagccactgggcgtggagaatttacaatgg

SEQ ID NO: 24301 - DNA, 75 bp, synthetic construct
  source 1..75: mol_type = other DNA
cggcatcactgccgcgcctggctgaagggaacttccggacaatgccggtgcagaccgtcaccgcgaccactccgt

SEQ ID NO: 24302 - DNA, 75 bp, synthetic construct
  source 1..75: mol_type = other DNA
gttcatcattaaatactttaagaagggatctgcacacatcactttcaaaaggctggaactgattgacagaattaa

SEQ ID NO: 24303 - DNA, 75 bp, synthetic construct
  source 1..75: mol_type = other DNA
cctgtcgctcaaacgggtggatgaatccctgtccgatatgtttggtgatctcagtgcgcagctgaataatctgca

SEQ ID NO: 24304 - DNA, 75 bp, synthetic construct
  source 1..75: mol_type = other DNA
ggctgccggacgtggtgctgtatcaccggaaaatatcgcgttcacccgctggctgacacacctgcagaacggtgt

SEQ ID NO: 24305 - DNA, 75 bp, synthetic construct
  source 1..75: mol_type = other DNA
ggctccgcacacatcacgttcaggaaaccagaactggttgatcggctaaatgatattattgccaggcactatccg

SEQ ID NO: 24306 - DNA, 75 bp, synthetic construct
  source 1..75: mol_type = other DNA
tatcgttcaccacaaaaatcaccgggcgtggtcaacagtggctgaccagaaggctgctctatagcggaatgctga

SEQ ID NO: 24307 - DNA, 75 bp, synthetic construct
  source 1..75: mol_type = other DNA
tttcgttgcgtcgatggttactacaccagtattgatatggcgacagcactacattcacaaacattgctgacattg

SEQ ID NO: 24308 - DNA, 75 bp, synthetic construct
  source 1..75: mol_type = other DNA
ttcagaaaaccagaactggttgacagactgaatgatattatcgcaaaacactatcctgatatgctggcagtatag

SEQ ID NO: 24309 - DNA, 75 bp, synthetic construct
  source 1..75: mol_type = other DNA
tcagtggcaaaccagtccccgacaaccgggaaaatatcatcattcatctggatgaccatatccggtctgttcagg

SEQ ID NO: 24310 - DNA, 75 bp, synthetic construct
  source 1..75: mol_type = other DNA
cgctgtctaagctgtctccggaaatggtgagcgccagcaccctggcaggtgacccgatcaccgcgcgcctgactg

SEQ ID NO: 24311 - DNA, 75 bp, synthetic construct
  source 1..75: mol_type = other DNA
tacctgagaatgagctagcatctttacgttatattgtgcagcaaaatcaaaatgatactgtaatcataaaagaac

SEQ ID NO: 24312 - DNA, 75 bp, synthetic construct
  source 1..75: mol_type = other DNA
gaacgcgagccgcactggcaaaaaatccgcagaacaaattcctcggcgtatgctggatgcaaggcgaatttgact

SEQ ID NO: 24313 - DNA, 75 bp, synthetic construct
  source 1..75: mol_type = other DNA
ctggacgacggcactgcgaagcagtcatttcagcgcggcagcccgtcgggggattatttctgacaggtttgtaga

SEQ ID NO: 24314 - DNA, 75 bp, synthetic construct
  source 1..75: mol_type = other DNA
aaccggaaatctggggttatcaattggtattatgagcgcccgcatcggctttaaagtaacggtgcatatgtctgc

SEQ ID NO: 24315 - DNA, 75 bp, synthetic construct
  source 1..75: mol_type = other DNA
aattcatgcccgtgtaatggtgactcgcaatgctgggtgactaaaggctggcatgaaacgaaattaatagtgtga

SEQ ID NO: 24316 - DNA, 75 bp, synthetic construct
  source 1..75: mol_type = other DNA
tccctgtccgatatgtttggtgatctcagtgcgcagctgaataatctgcaggacatggcaacatctgccttaagc

SEQ ID NO: 24317 - DNA, 75 bp, synthetic construct
  source 1..75: mol_type = other DNA
cttaatctcgggctgacggcaggtaaagtttggtataaaacaccgaaccataatttcaatgggctgcaattaggc

SEQ ID NO: 24318 - DNA, 75 bp, synthetic construct
  source 1..75: mol_type = other DNA
cgctatcctgaatgaaaaagaggccgtgaaaaatattcccggtatttccattaaaagcgacattgaggatttttc

SEQ ID NO: 24319 - DNA, 75 bp, synthetic construct
  source 1..75: mol_type = other DNA
gttctggtcgttgcaggccgaagacagtgatgccaacagcctcaacaacaaagaaatcacgaccattattcgtcg

SEQ ID NO: 24320 - DNA, 75 bp, synthetic construct
  source 1..75: mol_type = other DNA
ttatcgtgcgcttaaggccatcgcagaccaggtgagcacaaaggtgatcgtcgttcgcgtggctgaacacaaaga

SEQ ID NO: 24321 - DNA, 75 bp, synthetic construct
  source 1..75: mol_type = other DNA
gcgggtcactgtcgtctaatggcaaggtactccacacccataaacacccgggcgacagcggcgggcaaacggggg

SEQ ID NO: 24322 - DNA, 75 bp, synthetic construct
  source 1..75: mol_type = other DNA
gttatcatccgagcgggtgatatggtcattgatggcagcgtacgcggtcgtcttgagcgccttgcagacgtcttg

SEQ ID NO: 24323 - DNA, 75 bp, synthetic construct
  source 1..75: mol_type = other DNA
agttcactggcacctgttgtgtttcatgcgcaaaaaagaccgccgtgccatcactgcattactgcgtaagtttgc

SEQ ID NO: 24324 - DNA, 75 bp, synthetic construct
  source 1..75: mol_type = other DNA
cattcgtgaagaccgcgaggagctgggtaataacacgggaccacgctttaagtctgagctgataaacccgcgcaa

SEQ ID NO: 24325 - DNA, 75 bp, synthetic construct
  source 1..75: mol_type = other DNA
gtacaccccctattcaaagtttggatattcgcaaaatgccaaaactaacagacatgcagatccgcgcatggatta

SEQ ID NO: 24326 - DNA, 75 bp, synthetic construct
  source 1..75: mol_type = other DNA
aaatggagcaggataagctcattagccgcgcaaagcttgcgcatgagcagcagctttttaacccggacatggtca

SEQ ID NO: 24327 - DNA, 75 bp, synthetic construct
  source 1..75: mol_type = other DNA
tacgggttactgatgatgaacatgcacggttactggaacgctgtgagggtaaacagctggcggtatggatgcggc

SEQ ID NO: 24328 - DNA, 75 bp, synthetic construct
  source 1..75: mol_type = other DNA
cggatctcggcgatcagcgcggcttcggtatcattgcttaaagggttaggggtctgggatgcagtacaggctatg

SEQ ID NO: 24329 - DNA, 75 bp, synthetic construct
  source 1..75: mol_type = other DNA
ttttaatgccttctatggagaagaagagatcccagtaattgatggccaggattataaattggaaatacgggggct

SEQ ID NO: 24330 - DNA, 75 bp, synthetic construct
  source 1..75: mol_type = other DNA
atgctggcagaacgttttcctgattcatcccgtctgctgctggaagactgggagcgttatctggggttaccggaa

SEQ ID NO: 24331 - DNA, 75 bp, synthetic construct
  source 1..75: mol_type = other DNA
catactttccctgtaacacgccggtcactggctgcattattgcgtgacctcagtatgctgacgccgggaaactgc

SEQ ID NO: 24332 - DNA, 75 bp, synthetic construct
  source 1..75: mol_type = other DNA
acgcatgattgaagcctgtgacgaaaacaccatcggcgtggtgccgactttcggcgtgacctacaccggtaacta

SEQ ID NO: 24333 - DNA, 75 bp, synthetic construct
  source 1..75: mol_type = other DNA
ccatcaccgcgacggtaccgctggtgacggtgaaagccgagacccgcatcaccctcgatacaccggaagtggtct

SEQ ID NO: 24334 - DNA, 75 bp, synthetic construct
  source 1..75: mol_type = other DNA
cggcgatcgtattggctgggttaagggcattgatgataactggcacctgacgctgtttatcgaaaatggtcgcat

SEQ ID NO: 24335 - DNA, 75 bp, synthetic construct
  source 1..75: mol_type = other DNA
caccaaacagtggcaggcgatcgataaatttgccggtgaaaacaccatctatggcagcattcgcctgaccaaccg

SEQ ID NO: 24336 - DNA, 75 bp, synthetic construct
  source 1..75: mol_type = other DNA
cactggggtattgcagccctcacgctgaccggcttgtttgtcctgtctgtgacgcggctgctgcgggccttcaga

SEQ ID NO: 24337 - DNA, 75 bp, synthetic construct
  source 1..75: mol_type = other DNA
cactgacgcactgaacagggcaaaacaacagacaagccagcacgatgacccgtacggggataacataccgtttta

SEQ ID NO: 24338 - DNA, 75 bp, synthetic construct
  source 1..75: mol_type = other DNA
tcgatcagtgaaggcgcttcccgattatctcttcctgaaggcactttaggacaatgggttaccgccgccagaaaa

SEQ ID NO: 24339 - DNA, 75 bp, synthetic construct
  source 1..75: mol_type = other DNA
ggcgactgattgacgacccgcagacaaaacagaccagtaagggcacaccgatgacgctggcacgtatggcggtat

SEQ ID NO: 24340 - DNA, 75 bp, synthetic construct
  source 1..75: mol_type = other DNA
gcaggttatcgcagacagcgtaatcagtgcgagaacggcgcgaccgggcggcaaaaaaggccagcaggggcaggc

SEQ ID NO: 24341 - DNA, 75 bp, synthetic construct
  source 1..75: mol_type = other DNA
tgacgctgtgggggccattccggtaccgcgtgatggtcgtgattatgatccggatgtactgcagcaggcggtgaa

SEQ ID NO: 24342 - DNA, 75 bp, synthetic construct
  source 1..75: mol_type = other DNA
atctcagcgaaaagtctgccaggacattgccggggagagcaatatttttgctgactgggcggcttcccgccaggg

SEQ ID NO: 24343 - DNA, 75 bp, synthetic construct
  source 1..75: mol_type = other DNA
tgctggtggtctgtagtgcgctgtggctggcaacagaccattaccgtgataacgccatcacctacaaagcgcagc

SEQ ID NO: 24344 - DNA, 75 bp, synthetic construct
  source 1..75: mol_type = other DNA
taccgcgataacgccataacctacaaagagcagcgcgataaaaaagtcagtgagctggagctggcaaatgcaacc

SEQ ID NO: 24345 - DNA, 75 bp, synthetic construct
  source 1..75: mol_type = other DNA
gttaccgatgttactgaatttgcagtcaatgggcgcaagctgtatttgtctccagtaatagatctcttcaacaac

SEQ ID NO: 24346 - DNA, 75 bp, synthetic construct
  source 1..75: mol_type = other DNA
ttcgctcggcaacatggatgccattgacgtggtacgcggtggtggtgcggtgcgttacggaccgcagagcgtggg

SEQ ID NO: 24347 - DNA, 75 bp, synthetic construct
  source 1..75: mol_type = other DNA
aatcaaagctccgggtgattaccctgaaaatacaaccactatcgcccctttatctccatacgataaatgggatgg

SEQ ID NO: 24348 - DNA, 75 bp, synthetic construct
  source 1..75: mol_type = other DNA
aggttgccagacagcaacgccagcaacgggtgaaacaggcgatggcgtccgtcgatcttatcaacctcaaactgc

SEQ ID NO: 24349 - DNA, 75 bp, synthetic construct
  source 1..75: mol_type = other DNA
aaggtataagagaggattggaaacctattgcacaaggagctaaaaaagtaaaagcagacgtatatacttcaagcg

SEQ ID NO: 24350 - DNA, 75 bp, synthetic construct
  source 1..75: mol_type = other DNA
gcagttacgtgaaaagccggacacacagttgcaggcatgggcagagcagcaggtcagggcgaatccccttcagca

SEQ ID NO: 24351 - DNA, 75 bp, synthetic construct
  source 1..75: mol_type = other DNA
cgctggatattctgattgcgtggatgcaggacaatattgactgcgaatcagggattatcttcgacaacgatgagg

SEQ ID NO: 24352 - DNA, 75 bp, synthetic construct
  source 1..75: mol_type = other DNA
atcccggtgcagaatcgctggggtatgattcagatggccatgaaattatggccgttgatatttatgtaaaccctc

SEQ ID NO: 24353 - DNA, 75 bp, synthetic construct
  source 1..75: mol_type = other DNA
attaatgaaaaacagttagaaaaattaaatcctcagggaaatttacgtatagcaatagaaaaatttgggtggaat

SEQ ID NO: 24354 - DNA, 75 bp, synthetic construct
  source 1..75: mol_type = other DNA
cactggctgacggtatggaaatttctctgaccgatcatgaaatcaggaccgtcctggcgcgcatggaggacatcc

SEQ ID NO: 24355 - DNA, 75 bp, synthetic construct
  source 1..75: mol_type = other DNA
gccgcagcggaacgtgcagagcgtgaacgcattgaagccgagcaacgagcacagcgcgaagcaaaagaggcagca

SEQ ID NO: 24356 - DNA, 75 bp, synthetic construct
  source 1..75: mol_type = other DNA
gcgttaaagtttacttctgcgatcctcagagtccttggcagcggggaacaaatgagaacacaaatgggctaattc

SEQ ID NO: 24357 - DNA, 75 bp, synthetic construct
  source 1..75: mol_type = other DNA
ccctcgctgacggaatggatatttccctgtccgatcatgaaatcaggaccgtcctggcgcggctggaggacatcc

SEQ ID NO: 24358 - DNA, 75 bp, synthetic construct
  source 1..75: mol_type = other DNA
agcaggaaaagcgagagcatgaagaacgcttaaaaagagaagctgaagagaaagccagagcagaagccgaagcaa

SEQ ID NO: 24359 - DNA, 75 bp, synthetic construct
  source 1..75: mol_type = other DNA
gaagcgcagattttcgggatgaatttaacgtcaagcgcgaagtatcctggcatgatgtgaccgttgaacgcgtgg

SEQ ID NO: 24360 - DNA, 75 bp, synthetic construct
  source 1..75: mol_type = other DNA
ataacgagagaaaacctgatgctggcttatcagcgcgtggtggaaaacaaaggcgcggcgggggtggataacctc

SEQ ID NO: 24361 - DNA, 75 bp, synthetic construct
  source 1..75: mol_type = other DNA
gcccggtcgaatcacatttgttaaaactaaaggaaagaagaaccgcactgtaccgatttcacctcaattgcaggc

SEQ ID NO: 24362 - DNA, 75 bp, synthetic construct
  source 1..75: mol_type = other DNA
acttactggcatttactatggctgcccgctatagaagtttcagcaaggcggcgaaggaactgggcttaaccacat

SEQ ID NO: 24363 - DNA, 75 bp, synthetic construct
  source 1..75: mol_type = other DNA
aaagcaggatagcggcggaagaggccgtaaaccgaatccccaccgtggtgggacctcccgggccaaagggggaac

SEQ ID NO: 24364 - DNA, 75 bp, synthetic construct
  source 1..75: mol_type = other DNA
taagagaaaaaccaataatatcagaaaaagatagcaatctattaccctttgctcatttaactcgcaaacaaataa

SEQ ID NO: 24365 - DNA, 75 bp, synthetic construct
  source 1..75: mol_type = other DNA
aaactgcagcaaaaaacagccaggttgcagcagcccaaagcgagagcgcggcagccggttctgcgacttcagcag

SEQ ID NO: 24366 - DNA, 75 bp, synthetic construct
  source 1..75: mol_type = other DNA
ttttccgccttcacatgccgggaccattaccgtctatgaaggttccagaccaggtacgctgaatgattttctcgg

SEQ ID NO: 24367 - DNA, 75 bp, synthetic construct
  source 1..75: mol_type = other DNA
attattatgatccaaccgatgaaagcggtcttatctggaacgatcccgatctgggcatagaatggcctgtttctc

SEQ ID NO: 24368 - DNA, 75 bp, synthetic construct
  source 1..75: mol_type = other DNA
atatctgttcaggcatttgataaatggggcgttcctcctgttgagcgtcgggggagggaagttttttatgacgtt

SEQ ID NO: 24369 - DNA, 75 bp, synthetic construct
  source 1..75: mol_type = other DNA
gacacagcagacaggcatggtatcaggacaacacaaggcgcagaaaacggcaggaacatcatgctcaggttcttg

SEQ ID NO: 24370 - DNA, 75 bp, synthetic construct
  source 1..75: mol_type = other DNA
tcaaaatcttctaaaggggtactgcgtggcttgcactatcagttacctccccatgcccagggcaagttagtgcgt

SEQ ID NO: 24371 - DNA, 75 bp, synthetic construct
  source 1..75: mol_type = other DNA
gtcagcgtcttccagcgcaggaacggcatcaacaaaggccactgaagcggaaaaaagtgctgccgctgcagagtc

SEQ ID NO: 24372 - DNA, 75 bp, synthetic construct
  source 1..75: mol_type = other DNA
ctgaagcatggcgttatgactacgaagcaggaaaaactccggtcgaagcatattgtgatgagtggggcgatgaat

SEQ ID NO: 24373 - DNA, 75 bp, synthetic construct
  source 1..75: mol_type = other DNA
gtggcggggtttggtatgcaggagaacaacggctggcagatgcgttatcacctgcgtattgagccgccgttatgg

SEQ ID NO: 24374 - DNA, 75 bp, synthetic construct
  source 1..75: mol_type = other DNA
actccacggatgacggctttatggggcgctcacctgtaaccatctgccgcgaatcgctggggcttgggctggccc

SEQ ID NO: 24375 - DNA, 75 bp, synthetic construct
  source 1..75: mol_type = other DNA
gaagacatcgccaggatgttcaacgtgtcgccgatttttcttcaggaatacagcaacagcacctacagcaatttc

SEQ ID NO: 24376 - DNA, 75 bp, synthetic construct
  source 1..75: mol_type = other DNA
ggaagggaagcaggagcataagacgacggggaaccatgtcagcctggtggagggaaagcacagcctggtggtgaa

SEQ ID NO: 24377 - DNA, 75 bp, synthetic construct
  source 1..75: mol_type = other DNA
aaacagccagacctaaagaaaaagactataaactctctgacgaacgtggtttatatctgctggttaaaaccacgg

SEQ ID NO: 24378 - DNA, 75 bp, synthetic construct
  source 1..75: mol_type = other DNA
tcccggagaaatcagtctgtgcagactgagtacaggcaatggcatctggccatccgtctgtgaccggaacggtta

SEQ ID NO: 24379 - DNA, 75 bp, synthetic construct
  source 1..75: mol_type = other DNA
gacgtcgatggtattgagctcgctgaactgattaacatggtctgcgataacggctactcccttcgtgttgttgat

SEQ ID NO: 24380 - DNA, 75 bp, synthetic construct
  source 1..75: mol_type = other DNA
atatgtggggatttgttggtgtcggcttcattatcagcggcgttgctgtgctcaacttgctatctaaggcaagtg

SEQ ID NO: 24381 - DNA, 75 bp, synthetic construct
  source 1..75: mol_type = other DNA
agtcaggcatagccggtctgatacacctcggtattcgatatgcagatgttgaggtcatgaaaattgctggagatg

SEQ ID NO: 24382 - DNA, 75 bp, synthetic construct
  source 1..75: mol_type = other DNA
atacctaaagaaaatggcagttggctttacctgattgacctagaacacgcattacgcgtcgctgacattcgtatc

SEQ ID NO: 24383 - DNA, 75 bp, synthetic construct
  source 1..75: mol_type = other DNA
cacccgctccggtatatctccggtggcatggtgtgaagcaaggggactgaattacgcaacagcccgtcgttacat

SEQ ID NO: 24384 - DNA, 75 bp, synthetic construct
  source 1..75: mol_type = other DNA
ggcgacctcgcgtgggcaaccatgcttgccgtcattaacgagccgctgggcgatgaggacggtgcaacaggaatg

SEQ ID NO: 24385 - DNA, 75 bp, synthetic construct
  source 1..75: mol_type = other DNA
tctcagacgtctttgccgccttcgcggaattgcctgccgccgttgccgaggaagcggcactactggcgcttgatg

SEQ ID NO: 24386 - DNA, 75 bp, synthetic construct
  source 1..75: mol_type = other DNA
gctgtcgaggcagagtgagaaacctcgccagcgggatttaatcgctgccgtgcgcgctagggtccttgagggaca

SEQ ID NO: 24387 - DNA, 75 bp, synthetic construct
  source 1..75: mol_type = other DNA
aattgtaaaaacgctaaggaaggtttgtttaggtataagcaattacatcctaagcatgttgactataaagatgca

SEQ ID NO: 24388 - DNA, 75 bp, synthetic construct
  source 1..75: mol_type = other DNA
gccgtttcagaagacctggcgtttgtctcagacgtctttgccgccttcgcggaattgcctgccgccgttgccgag

SEQ ID NO: 24389 - DNA, 75 bp, synthetic construct
  source 1..75: mol_type = other DNA
gcgggcgtggtgctgtttatcgtcatcgccatcctcgagccgatgctgcaactgaacaatatggttggaatgtaa

SEQ ID NO: 24390 - DNA, 75 bp, synthetic construct
  source 1..75: mol_type = other DNA
gcgctggccgaagaccagcagaaagcgattgagtcaattaagcaggctgattcggctgttaagttggcacacgag

SEQ ID NO: 24391 - DNA, 75 bp, synthetic construct
  source 1..75: mol_type = other DNA
aatatgagtataaggatttcaaagcggcgcagagtgattgctgtatgcaccctggttcagacctggtagggaagg

SEQ ID NO: 24392 - DNA, 75 bp, synthetic construct
  source 1..75: mol_type = other DNA
cagagtgagttacgtcagcgcgttgaggcgctgggttatgaaaccgaagtggtcggtaagcacggtatgtgggag

SEQ ID NO: 24393 - DNA, 75 bp, synthetic construct
  source 1..75: mol_type = other DNA
gggctgaaattctgatactccggcagtgcgcgggaacgatgactgtcgaaagtatcggcagtctgattggtcgta

SEQ ID NO: 24394 - DNA, 75 bp, synthetic construct
  source 1..75: mol_type = other DNA
atggaaagtaatatcaaagggttagttgccgccgggcatgagatggcttcggaactgaaagcagaatgtggtgcc

SEQ ID NO: 24395 - DNA, 75 bp, synthetic construct
  source 1..75: mol_type = other DNA
ttccgcgtgaactggacgaacaacaaaaagcagcacttgctgcagatattaccgacgttattattcgccatctga

SEQ ID NO: 24396 - DNA, 75 bp, synthetic construct
  source 1..75: mol_type = other DNA
tgagaaattgatacggatagagatccagatggcagagggctttatcgatggctgtctctcaatgcttgatgttcg

SEQ ID NO: 24397 - DNA, 75 bp, synthetic construct
  source 1..75: mol_type = other DNA
gccactcggatacagcgaaagcgttcacctatctgctgaagcaatgggacgctctgaacgaatactgccgcaatg

SEQ ID NO: 24398 - DNA, 75 bp, synthetic construct
  source 1..75: mol_type = other DNA
gcgtctgtattgcctctgttgcacgcacggttctgcgtgccgtccgtgacacggtggtctctgttgcccgtgcgg

SEQ ID NO: 24399 - DNA, 75 bp, synthetic construct
  source 1..75: mol_type = other DNA
tcccgaccatgccgccagtcccctgatgacccgcctgcaggacgagctgcgcacggaatctgtccggtctcaggc

SEQ ID NO: 24400 - DNA, 75 bp, synthetic construct
  source 1..75: mol_type = other DNA
tacgtgaacgttattcacctgtgccagtaccgaaatgccctatttgcggcgaggaaatgtcaattcagcgaatat

SEQ ID NO: 24401 - DNA, 75 bp, synthetic construct
  source 1..75: mol_type = other DNA
atgaatccgtctgatgccattgaggcaattgaaaaaccgctctcctccctgccttattcactttcccgtcacatc

SEQ ID NO: 24402 - DNA, 75 bp, synthetic construct
  source 1..75: mol_type = other DNA
tccttttgcacaggagcctgtggactgtgtgctgtgggtaaaagcagatgaggtggtggccaatgattacaatcc

SEQ ID NO: 24403 - DNA, 75 bp, synthetic construct
  source 1..75: mol_type = other DNA
agtgcttcctgaaggcgcggtcaccctgctttcaacacagatttatgacctgaatatttacaaacagggacacgc

SEQ ID NO: 24404 - DNA, 75 bp, synthetic construct
  source 1..75: mol_type = other DNA
cggaagaacatcctctgcatggcggcaccggtattgctcatactcgctgggcgacccacggtgaaccttcagaag

SEQ ID NO: 24405 - DNA, 75 bp, synthetic construct
  source 1..75: mol_type = other DNA
ttactctatctgtatctgcagttgttcagggtagtgtagttatcatgggaacccgtgttgtttatccggcgactc

SEQ ID NO: 24406 - DNA, 75 bp, synthetic construct
  source 1..75: mol_type = other DNA
cgcacatccagagtggagtttcagtacatgcgaaaagcgaattgctaattggttagctgttgctgagtattcttt

SEQ ID NO: 24407 - DNA, 75 bp, synthetic construct
  source 1..75: mol_type = other DNA
gaaaaatggctgaattgctgaatgattcacaccctgagtggtgttttcggacgtgctgcagtcgggtagatgtat

SEQ ID NO: 24408 - DNA, 75 bp, synthetic construct
  source 1..75: mol_type = other DNA
tgatcaacggcaatcaaaaaagctggctggcacattgtaccgattcagaggcgttaataatcgacagggttattg

SEQ ID NO: 24409 - DNA, 75 bp, synthetic construct
  source 1..75: mol_type = other DNA
tatgaagggcgggggatgagtaagcgcaaaatggctgaattgctaaatgatgcacaccctgagtggtgttttcgg

SEQ ID NO: 24410 - DNA, 75 bp, synthetic construct
  source 1..75: mol_type = other DNA
ccgcagcaatctgtattggctggggtatcacaacatcgaaatatctgttcggtattggtgcagcggttctggttt

SEQ ID NO: 24411 - DNA, 75 bp, synthetic construct
  source 1..75: mol_type = other DNA
ccactggatgacagggaaaaaggcttcatttccagcaccaccgtccccgtctttaaatatcttattgacccgcag

SEQ ID NO: 24412 - DNA, 75 bp, synthetic construct
  source 1..75: mol_type = other DNA
caccgctaacgcttgcttcgctgtgtagcgacaatcacagttggctgaaaaactggcttacccataagctgcaat

SEQ ID NO: 24413 - DNA, 75 bp, synthetic construct
  source 1..75: mol_type = other DNA
gtgagcacagaagaagccagagaaatgatacagcggtaccgtgaagcggaaatggccgtactggaggggaagtct

SEQ ID NO: 24414 - DNA, 75 bp, synthetic construct
  source 1..75: mol_type = other DNA
gggataacaaagccggaggaaatctcagcgttaccgggacaacgggactgacactgaatcagtcccgtctggtga

SEQ ID NO: 24415 - DNA, 75 bp, synthetic construct
  source 1..75: mol_type = other DNA
aaaacacaatcatcagtagcgaaaattttgggtattgagtctctcagtcctcatgtctccggaaatccaaagttt

SEQ ID NO: 24416 - DNA, 75 bp, synthetic construct
  source 1..75: mol_type = other DNA
gaatatgccaatatggtagaagatatcagagataaagtgtcagttgagatggagagatttttcccaagaaatgat

SEQ ID NO: 24417 - DNA, 75 bp, synthetic construct
  source 1..75: mol_type = other DNA
acatttaccccgggttgtggccgggcgtcgcctgggtgtaccaaaatcaacagtttgtagtatgttcgtgcgctt

SEQ ID NO: 24418 - DNA, 75 bp, synthetic construct
  source 1..75: mol_type = other DNA
tgatccgcgcgcgtgggatgtggcaagcctgatggattttgctgtgccggtggtggcgtgtctgctggtctggct

SEQ ID NO: 24419 - DNA, 75 bp, synthetic construct
  source 1..75: mol_type = other DNA
cagcgttcaatcaggctgagtttaataaggtacttcttgaatgtgcggtaaaaacacagtcaacagttgctaaga

SEQ ID NO: 24420 - DNA, 75 bp, synthetic construct
  source 1..75: mol_type = other DNA
gtcatcgccgctttcccggagttcctgttcagcaagcagacaaattgacccaattacgtcgcttagcctgtagtg

SEQ ID NO: 24421 - DNA, 75 bp, synthetic construct
  source 1..75: mol_type = other DNA
gacatagtttttcctgaaatcccagatacattcaagttggtatttgagcaagatttcgagtctaacattaactat

SEQ ID NO: 24422 - DNA, 75 bp, synthetic construct
  source 1..75: mol_type = other DNA
tctctgtcgtcgtcctaatgcgcagcagaatcgcatccagttttttgaactgtggctgaattccaaattgcgtca

SEQ ID NO: 24423 - DNA, 75 bp, synthetic construct
  source 1..75: mol_type = other DNA
ccacatattccagaatggcggcaaccattaattgctttgttattacccgaaaaaccagaaattgcacatgaaatt

SEQ ID NO: 24424 - DNA, 75 bp, synthetic construct
  source 1..75: mol_type = other DNA
aaagacaattattatgcgatttctgcggttgcctacgataacaaaggcaatgcctcaaaacgcgtgcagacagag

SEQ ID NO: 24425 - DNA, 75 bp, synthetic construct
  source 1..75: mol_type = other DNA
ctgttgcaattgctttctgttcagtagcaaatgcggcggatcagggacaaggtaaagtaaattttaaaggaaccg

SEQ ID NO: 24426 - DNA, 75 bp, synthetic construct
  source 1..75: mol_type = other DNA
aacccatgcgactgatgctgcaggctcagcgcgtgcagccagcacgtcagccggacaggccgcgacttcggctca

SEQ ID NO: 24427 - DNA, 75 bp, synthetic construct
  source 1..75: mol_type = other DNA
gtatcagtctgtctttactaccggaacgcagtcaggtgaggcaacgattactgttagcgttgatggcatgagcaa

SEQ ID NO: 24428 - DNA, 75 bp, synthetic construct
  source 1..75: mol_type = other DNA
ggaacgtctggtgcgtcagacgctgtttcgcgcaaaccgcctcttgatggaggcatataccgaaattctggaact

SEQ ID NO: 24429 - DNA, 75 bp, synthetic construct
  source 1..75: mol_type = other DNA
aaagtttctttccagccaacagactgttgaacttgttcaggaattgaccgatacccaaaatttgggtgtcggtcc

SEQ ID NO: 24430 - DNA, 75 bp, synthetic construct
  source 1..75: mol_type = other DNA
ctccaggaggctgttggcttaccgaatctggcaccgcgctatgccattgatgctcctgctgatgcacacgatggc

SEQ ID NO: 24431 - DNA, 75 bp, synthetic construct
  source 1..75: mol_type = other DNA
accacgaaggcgtcagaagctgccacctcggcacggggtgcggcggcctcaaaagaggcagcgaaatcttcagaa

SEQ ID NO: 24432 - DNA, 75 bp, synthetic construct
  source 1..75: mol_type = other DNA
tcgagagaggaattgcttaagagaaattcttttccgtcagtgaatcaaaacaaatatctgaatgcgatgtggcgc

SEQ ID NO: 24433 - DNA, 75 bp, synthetic construct
  source 1..75: mol_type = other DNA
tgcccttctcagtgatcttactaatatccatatacggacttttaaaagctttgcgccgggatttgaccaagcgtg

SEQ ID NO: 24434 - DNA, 75 bp, synthetic construct
  source 1..75: mol_type = other DNA
ctgcaggaagaagcacgacagcagaaacgtggtctgtgggcagacagcgctcctgttccgccctgggtatggcgc

SEQ ID NO: 24435 - DNA, 75 bp, synthetic construct
  source 1..75: mol_type = other DNA
taacggaggtggtggcggcgctaaaacgccaggcaccggcgctaatgctattcagcatcaggctcagaactggag

SEQ ID NO: 24436 - DNA, 75 bp, synthetic construct
  source 1..75: mol_type = other DNA
cccgacgcgctcaacgcgcgcctccccaatacggatagcggcagaaaaagtaccgcgctgctgctcagcgccgcc

SEQ ID NO: 24437 - DNA, 75 bp, synthetic construct
  source 1..75: mol_type = other DNA
acagtgaagattacattacggcttacgcccataatgacacgatgctggtaaataatgggcaaagcgtgaaggctg

SEQ ID NO: 24438 - DNA, 75 bp, synthetic construct
  source 1..75: mol_type = other DNA
accgctgagtcctatgacgacagttatctcgatgatgaagatgcggactggaccgcgaccggacaggggcagaaa

SEQ ID NO: 24439 - DNA, 75 bp, synthetic construct
  source 1..75: mol_type = other DNA
aaaacggctgccgcatcgtccgccagttcggcggcgtcatcggcatcatcggcgtctgcttcaaaagatgaggcg

SEQ ID NO: 24440 - DNA, 75 bp, synthetic construct
  source 1..75: mol_type = other DNA
gaaatgtgggtaccaacgagccgtcagaagatccggatgttgcggatattgggtattacggagccggtggtcgaa

SEQ ID NO: 24441 - DNA, 75 bp, synthetic construct
  source 1..75: mol_type = other DNA
atctgatttcccgcacaaaagcggcattgcagaaaaatcccaaaaacgttctgctggccgtctgctggatgcagg

SEQ ID NO: 24442 - DNA, 75 bp, synthetic construct
  source 1..75: mol_type = other DNA
caattgtaaattacgacgggaaaaaattcacgtatccagtcgctgatgagtggcggggattctcagcagtaatgg

SEQ ID NO: 24443 - DNA, 75 bp, synthetic construct
  source 1..75: mol_type = other DNA
atggtacatgaccgcatagcggaggaactcgaggcaaaaggcttttaccggagggcgtcggcgcgatggggtgaa

SEQ ID NO: 24444 - DNA, 75 bp, synthetic construct
  source 1..75: mol_type = other DNA
atttgtctgttactgatgttgttgttcctgctactgctactgctactgctactgttcttctttttcctgctgctc

SEQ ID NO: 24445 - DNA, 75 bp, synthetic construct
  source 1..75: mol_type = other DNA
caaccgtaaattatgacgggaaacaattcacgtatctggctgctgatgagtggccgggattctcaacaaacatat

SEQ ID NO: 24446 - DNA, 75 bp, synthetic construct
  source 1..75: mol_type = other DNA
cactgatttgtcgccacgcccgtaacctgctgctggcgcagggctggccggaagagacggatgttgaccagcgta

SEQ ID NO: 24447 - DNA, 75 bp, synthetic construct
  source 1..75: mol_type = other DNA
acttccggcagacggaacacaggtgtttttcccgtatgccggagaatggctgaccgaagacgaaatcagggcagt

SEQ ID NO: 24448 - DNA, 75 bp, synthetic construct
  source 1..75: mol_type = other DNA
cctcatccagtgccgactttgatgatttacgccagcgcatacagctacaggccaacgccaaagagtttaagctga

SEQ ID NO: 24449 - DNA, 75 bp, synthetic construct
  source 1..75: mol_type = other DNA
tgaaacaggaatttgatggcgcaccggaagatacagatattgcgctgttatgtgttgctgacatggtaaaagctg

SEQ ID NO: 24450 - DNA, 75 bp, synthetic construct
  source 1..75: mol_type = other DNA
aagggcagcgtggaacaacatacccggcattacgtatatgcttctgatgacggttttgatcccaacttttccacc

SEQ ID NO: 24451 - DNA, 75 bp, synthetic construct
  source 1..75: mol_type = other DNA
aaagtgattccactggcaccaggacatgcctacgggatgtttatggaacgttttaacgagttatcggagttacgc

SEQ ID NO: 24452 - DNA, 75 bp, synthetic construct
  source 1..75: mol_type = other DNA
gggggtgacggccagcggtaaaaaaatcccgcagattaccatcacccgcagcgacggcgaccgtcatcattttgc

SEQ ID NO: 24453 - DNA, 75 bp, synthetic construct
  source 1..75: mol_type = other DNA
atctgttattcatccggcagggacagggcaaaagcgccagcggtaaacctctgccggtgatcactatcacacgca

SEQ ID NO: 24454 - DNA, 75 bp, synthetic construct
  source 1..75: mol_type = other DNA
cggcggaacctccggaaaaagttgtctcggtggccacagataaagactggcgtgaatttgaagccgaactgtcac

SEQ ID NO: 24455 - DNA, 75 bp, synthetic construct
  source 1..75: mol_type = other DNA
ccaacagtaacactccggaaatccgggaggcactggtgatcggcaacctcgtttttacaccggtccacactgagg

SEQ ID NO: 24456 - DNA, 75 bp, synthetic construct
  source 1..75: mol_type = other DNA
aatgcccgtctgcccgcgccgggaaaagaccgcgcgccggtggcgctgaaaggggccgcgctcacgcgccgcccc

SEQ ID NO: 24457 - DNA, 75 bp, synthetic construct
  source 1..75: mol_type = other DNA
cagtcatggcagcagtggtccaacagccaaaagccggaggacaggcaggaaaaaactctgcatcaggatctctcc

SEQ ID NO: 24458 - DNA, 75 bp, synthetic construct
  source 1..75: mol_type = other DNA
gaaagcgttacgtatgccagaaaacgtcggctcacatctgtttatcggtgaagaccgacatccggtctccgcgcc

SEQ ID NO: 24459 - DNA, 75 bp, synthetic construct
  source 1..75: mol_type = other DNA
aaaggtagtcaggccttcggaaaagtggccttggccactggggagaatgccattgccttgggtagtaacagcaat

SEQ ID NO: 24460 - DNA, 75 bp, synthetic construct
  source 1..75: mol_type = other DNA
atagggccatagcaatcggtagtggagctaaatcgactgccgattattcccttacgctggggaatggatctaagg

SEQ ID NO: 24461 - DNA, 75 bp, synthetic construct
  source 1..75: mol_type = other DNA
ctggagcaggatttatctccctccggtccgttaagtgcgtttcggggacatgtttcaaaaaaaacagaaaacatt

SEQ ID NO: 24462 - DNA, 75 bp, synthetic construct
  source 1..75: mol_type = other DNA
tggcgcgtgcgcgttcgcagcggcgaactggaaacaggctggctgcgctggaacaccacgcgcgcgggagccttc

SEQ ID NO: 24463 - DNA, 75 bp, synthetic construct
  source 1..75: mol_type = other DNA
atgacactctgcactgggacaaaaccgagggagcatttagtgccagctatatcgtcaaaaacgctgatggcagcc

SEQ ID NO: 24464 - DNA, 75 bp, synthetic construct
  source 1..75: mol_type = other DNA
tgctgagttatcaaagctggattatcgtaacaatagagggctggacagggccctcatccgttcactcagtcaggg

SEQ ID NO: 24465 - DNA, 75 bp, synthetic construct
  source 1..75: mol_type = other DNA
cttttctgggactggttccaggggaatattccagtggaaacagcattcgtcccaggggaataacaaaagttggaa

SEQ ID NO: 24466 - DNA, 75 bp, synthetic construct
  source 1..75: mol_type = other DNA
gcattagctcaggcagggttagatacaggtactggtgttacccctgctggtcataataatggaacaggttggata

SEQ ID NO: 24467 - DNA, 75 bp, synthetic construct
  source 1..75: mol_type = other DNA
atggataacctacaaaggaaagctaccgggaagaattactggttctctgaagactcctccggaatcacaacctta

SEQ ID NO: 24468 - DNA, 75 bp, synthetic construct
  source 1..75: mol_type = other DNA
cgccgccgaaaaggcgctttcgctggccaacgggaatgccgcagctggcggcgctattgctggtgctgctggtcg

SEQ ID NO: 24469 - DNA, 75 bp, synthetic construct
  source 1..75: mol_type = other DNA
ccgaccgtgaccttaacggcgacggccagaacaaagccgcagcggccgcaggagcctgcgagggcattgttgccc

SEQ ID NO: 24470 - DNA, 75 bp, synthetic construct
  source 1..75: mol_type = other DNA
gcgtataccggatgaaccgccccgccgctggtttgaccgtggtgttctgcgggaggtggtccgggaagcccggaa

SEQ ID NO: 24471 - DNA, 75 bp, synthetic construct
  source 1..75: mol_type = other DNA
ttgttagtcactcatgggattatgataagcaattgaaaaatttgaaaagtctcattgaaaaaaatagtacaatta

SEQ ID NO: 24472 - DNA, 75 bp, synthetic construct
  source 1..75: mol_type = other DNA
tctctgggtggatgataccggtgagacggattttgacaccttccgcgatgcctggtggggcgaggctgacagtga

SEQ ID NO: 24473 - DNA, 75 bp, synthetic construct
  source 1..75: mol_type = other DNA
ggctggtctgacaggtcaggttatgtcgttacgggttcagttaacggaaaccgtgatgaattaattgatacaact

SEQ ID NO: 24474 - DNA, 75 bp, synthetic construct
  source 1..75: mol_type = other DNA
agcgtggggaacgttacatgctctgctggcggatattaatagtcagggtcaggtgcagatggcgatgaacggcgg

SEQ ID NO: 24475 - DNA, 75 bp, synthetic construct
  source 1..75: mol_type = other DNA
atgtctgttgttgcacctgctgtatacgttggaacctggcacaaatacaactgtggaagcatcgctggccgctgg

SEQ ID NO: 24476 - DNA, 75 bp, synthetic construct
  source 1..75: mol_type = other DNA
ttcaggggtaatctgcttgacagaccctgccatgtgtccggtgacagtctgaataaacatgtcgtcttcaaaacc

SEQ ID NO: 24477 - DNA, 75 bp, synthetic construct
  source 1..75: mol_type = other DNA
atgtctctcactaaattactgccggttattctgttgatgatggctacaggtgtgcaggcctccacccgggatgaa

SEQ ID NO: 24478 - DNA, 75 bp, synthetic construct
  source 1..75: mol_type = other DNA
gcagggctataacaccgcgtggatagaaacgcagctcgctcacgttgataagaactcaattcgtggcacatacaa

SEQ ID NO: 24479 - DNA, 75 bp, synthetic construct
  source 1..75: mol_type = other DNA
tcctgatggcgaaaaagttccagcagctggaataacccaggcttattttgagttgggtatgacgtttcctgaact

SEQ ID NO: 24480 - DNA, 75 bp, synthetic construct
  source 1..75: mol_type = other DNA
aatacctttcaccaaaactagagccaaaagcgacaacgttgtcgcttttaggtaaggcaaaattatttgaacttg

SEQ ID NO: 24481 - DNA, 75 bp, synthetic construct
  source 1..75: mol_type = other DNA
gagttgatggcgctacccaatgcctttgatgcattcgtggagcaaaccaagcgagtcacttcaacctgccttgtt

SEQ ID NO: 24482 - DNA, 75 bp, synthetic construct
  source 1..75: mol_type = other DNA
cacttgcatctgtacatgaaatgatggagtcactccatgatatcggtgcaatcacaaaacaaactatgcgcgaat

SEQ ID NO: 24483 - DNA, 75 bp, synthetic construct
  source 1..75: mol_type = other DNA
tgtggggctcatgacttgatatttattggtgatcacgattcgcacaagcccatgagtgagaatacagtaaatagt

SEQ ID NO: 24484 - DNA, 75 bp, synthetic construct
  source 1..75: mol_type = other DNA
tactggtaccgcccgacagaggtcagggatgagcacaccggagcgttgctgggatatcgcaagcgttttcagggc

SEQ ID NO: 24485 - DNA, 75 bp, synthetic construct
  source 1..75: mol_type = other DNA
tggcctgttaacctggatggggggcatggtggggtctgtggtttctggtgtggcttcaaaaatcactggtgctgt

SEQ ID NO: 24486 - DNA, 75 bp, synthetic construct
  source 1..75: mol_type = other DNA
tggggctactgaaatcacgaaagaagaatatttcgcccgcaaaaacggtacatactcaggttcacaacaaaatac

SEQ ID NO: 24487 - DNA, 75 bp, synthetic construct
  source 1..75: mol_type = other DNA
actggtataacaatcgacgattgctggaaaggctgggccatactcctccggcagaagcagaaaaagcttattatg

SEQ ID NO: 24488 - DNA, 75 bp, synthetic construct
  source 1..75: mol_type = other DNA
atctgcgcgatgaatctgaccacgagaacccgacccgtctggtgattgtgccgcgttccaaccgcgtggatatgg

SEQ ID NO: 24489 - DNA, 75 bp, synthetic construct
  source 1..75: mol_type = other DNA
ccaccacacagatcaaagcagctaaaccagcggaaaaagaatacaccttacaggatggcggcgggctttttctcg

SEQ ID NO: 24490 - DNA, 75 bp, synthetic construct
  source 1..75: mol_type = other DNA
gcaaaaaatgaagttatcgacaaagatcgcgaagactggaagcgcatttccgcatcaatgcgcaaacaacccgat

SEQ ID NO: 24491 - DNA, 75 bp, synthetic construct
  source 1..75: mol_type = other DNA
cagaaacgaaacaacctgaaccagtagtgcaacaggaaccggaaaagatctgcaccgcctgcggtcagagcggtg

SEQ ID NO: 24492 - DNA, 75 bp, synthetic construct
  source 1..75: mol_type = other DNA
tccgctgggtggagaaagacaccactgatgcggttgaaaaaattcaggcgttgttaccagcaatcgaaaaagcaa

SEQ ID NO: 24493 - DNA, 75 bp, synthetic construct
  source 1..75: mol_type = other DNA
gatcgacattcacaaagatcctgtggcactgaacaaatacattactgaatacctgactacaaagggcgtgtttga

SEQ ID NO: 24494 - DNA, 75 bp, synthetic construct
  source 1..75: mol_type = other DNA
tgtcccggtcgaaccagaatccgatccgatgaacgtcaattttgacaagctgtcccctgaagtacagaacgcggt

SEQ ID NO: 24495 - DNA, 75 bp, synthetic construct
  source 1..75: mol_type = other DNA
aagatttaatagtcaagagtctcaaagcttttgatgacaaaatcacaacactttcatccatgaaccaaaccttgg

SEQ ID NO: 24496 - DNA, 75 bp, synthetic construct
  source 1..75: mol_type = other DNA
gagccgactgtcttcgcctggatggaccgcttctgcgccgactacagcggaggtatctggaatttttatacgctc

SEQ ID NO: 24497 - DNA, 75 bp, synthetic construct
  source 1..75: mol_type = other DNA
agctgctcgacccgctggagattcgcgaccttcacaaactggtacgcgacactgacaaagttttccctaatcccg

SEQ ID NO: 24498 - DNA, 75 bp, synthetic construct
  source 1..75: mol_type = other DNA
accggggaaattttcgcaaccaaccgtgagcaggtggaagcgatgatcgaatacctgtggaaactaagaagcaga

SEQ ID NO: 24499 - DNA, 75 bp, synthetic construct
  source 1..75: mol_type = other DNA
gcagcctgactgagctgaaaaaatatcgcaaaagccacccggaaaagatggccttcagctatagctacgcgctca

SEQ ID NO: 24500 - DNA, 75 bp, synthetic construct
  source 1..75: mol_type = other DNA
gccaccgtatcgtgatctcggccatcacctactccgagatgcgcttcggtgccaccggcccgaaggcctcgcctc

SEQ ID NO: 24501 - DNA, 75 bp, synthetic construct
  source 1..75: mol_type = other DNA
gagtgagaaaccgtcggtggcgagggtacggtttggtgacggttatgaacagcgccgcccgacgggacttaatgc

SEQ ID NO: 24502 - DNA, 75 bp, synthetic construct
  source 1..75: mol_type = other DNA
tttagcggcggggcacgccgttcttgcctgtggagagatggtgcagtcaggccgcccgttgaagcaggaacccac

SEQ ID NO: 24503 - DNA, 75 bp, synthetic construct
  source 1..75: mol_type = other DNA
agccgcatgctgccgaattaccttgaggatctgcaaaatccgctgtggctggtaactcaggaatatgaatcatga

SEQ ID NO: 24504 - DNA, 75 bp, synthetic construct
  source 1..75: mol_type = other DNA
tggtttatgccggcggcgaccagactgtacatggtcacgcactggataccacgctgaatgggggataccagtatg

SEQ ID NO: 24505 - DNA, 75 bp, synthetic construct
  source 1..75: mol_type = other DNA
ctgccagaaacaccacggtcaccgcaaacggtctgcaggatgtcatggcaggtggcagtgccacggatacggtta

SEQ ID NO: 24506 - DNA, 75 bp, synthetic construct
  source 1..75: mol_type = other DNA
aaccccgcagaacattttcaaatgagtttaaacttcaaatggttaaactggcttcacaaccaggagcctctgttg

SEQ ID NO: 24507 - DNA, 75 bp, synthetic construct
  source 1..75: mol_type = other DNA
gagatgccgtacgcaccaccatcaataaaaatggtcgtcagattgtggctgctgaaggaacggcaaataccactg

SEQ ID NO: 24508 - DNA, 75 bp, synthetic construct
  source 1..75: mol_type = other DNA
aaccgtctgggcaatttcacggtggaaaacggtaatgctgacggtgttgttctggagtccggtggtcgcctggat

SEQ ID NO: 24509 - DNA, 75 bp, synthetic construct
  source 1..75: mol_type = other DNA
gactatctccgctgggctgctgaagatatgaataacctgtatttcagtcataccgttgaaaatattgatttcgac

SEQ ID NO: 24510 - DNA, 75 bp, synthetic construct
  source 1..75: mol_type = other DNA
cgatattaagcatctgaccgatgtgctggaaatagataaagatatgcgtgcgcttatgcagcggatcgaaaatgg

SEQ ID NO: 24511 - DNA, 75 bp, synthetic construct
  source 1..75: mol_type = other DNA
ggccaatggatacaaaatggcggtaccgccaacaacactactgtcaccggtggtggtcttcagagagtgaatgcc

SEQ ID NO: 24512 - DNA, 75 bp, synthetic construct
  source 1..75: mol_type = other DNA
tgcatgagggcggggttgccaccggtacaattatcaaccgcgacggttaccagagcgttaaaagtggcgggctgg

SEQ ID NO: 24513 - DNA, 75 bp, synthetic construct
  source 1..75: mol_type = other DNA
accaatattcccgacggtatggactggggcgtcattgatggcaacctgataaacatcgcagttggtccgagtgat

SEQ ID NO: 24514 - DNA, 75 bp, synthetic construct
  source 1..75: mol_type = other DNA
aatgttggcgttaccagcctgacgtttatgaaaaacaatggcgaaatgccgcttgatgctgatctgaatacattt

SEQ ID NO: 24515 - DNA, 75 bp, synthetic construct
  source 1..75: mol_type = other DNA
agcagtgcaggaagaaatggctaacgaatttcgtgatctgcttgttgagaaattcaaagacagcaaagtagaaac

SEQ ID NO: 24516 - DNA, 75 bp, synthetic construct
  source 1..75: mol_type = other DNA
tggttctgcgcattattcagctggaagcggtgcaggaagaaatggctaacgaatttcgtgatctgcttgttgaga

SEQ ID NO: 24517 - DNA, 75 bp, synthetic construct
  source 1..75: mol_type = other DNA
aaggaaaatcgaaatgcagcatgaagagtttcagaaaatgacagagcgcgagcaagtacctttattgaaatcgcc

SEQ ID NO: 24518 - DNA, 75 bp, synthetic construct
  source 1..75: mol_type = other DNA
gtgcagttctatcccgggaaacatccgtgcgaaaaaccggcagaaatgctgcagcagataatcagcgcaagcagt

SEQ ID NO: 24519 - DNA, 75 bp, synthetic construct
  source 1..75: mol_type = other DNA
ccggacgctggaacggatgcaacaaggaaagcctgcgggcgtatttccccgccacagagcgcattctgttcgcgg

SEQ ID NO: 24520 - DNA, 75 bp, synthetic construct
  source 1..75: mol_type = other DNA
tggctgcctgcccgggaatgactgtggagagcgcccgggctgtgctggctgcgggatcaggtaaggcagaaccgg

SEQ ID NO: 24521 - DNA, 75 bp, synthetic construct
  source 1..75: mol_type = other DNA
gattcgctaccagggaagaacgggaaggaaaggtgagcactaacctgatttttaaggagtgtcgccagagtgccg

SEQ ID NO: 24522 - DNA, 75 bp, synthetic construct
  source 1..75: mol_type = other DNA
atgcgattagccagtcgttttggtcatgtaaaccagatacgccgtgaccgtccgctgacacatgaagaactgatg

SEQ ID NO: 24523 - DNA, 75 bp, synthetic construct
  source 1..75: mol_type = other DNA
atgcgactagccagtcgttttggttatgctgcaaaccagatacgccgtgaccgtccgctgacacacgaagaactg

SEQ ID NO: 24524 - DNA, 75 bp, synthetic construct
  source 1..75: mol_type = other DNA
accgtactggaaagcctgcagcgggaaggttttcagccattcttcgcctgccagacccgcgtacgtgacccgggc

SEQ ID NO: 24525 - DNA, 75 bp, synthetic construct
  source 1..75: mol_type = other DNA
gctgacattctgacaccacgacgccgggaggattacgggcaggacctgtggagcgcatatcagaccattcaggag

SEQ ID NO: 24526 - DNA, 75 bp, synthetic construct
  source 1..75: mol_type = other DNA
agcatcgacaccggcattaagctcaatcgcgcattgtgggtgatggcagaaacgctactggagagcctgcgctga

SEQ ID NO: 24527 - DNA, 75 bp, synthetic construct
  source 1..75: mol_type = other DNA
tattacagaccatgagcgcacaggaatacgaagacagtcgtgctgcgggaagtgatgttcgttgtcgcctcacac

SEQ ID NO: 24528 - DNA, 75 bp, synthetic construct
  source 1..75: mol_type = other DNA
cgaagccaaagcccgcgccgatgtggtcgtcgtcagtattttcgttaacccgatgcagtttgaccgcccggaaga

SEQ ID NO: 24529 - DNA, 75 bp, synthetic construct
  source 1..75: mol_type = other DNA
tgtttgccagccggcccgagatcatggggtgggtgctgggcatcgtttaccgcgtcattgccacgcacctggtca

SEQ ID NO: 24530 - DNA, 75 bp, synthetic construct
  source 1..75: mol_type = other DNA
tgtgcaaatcacacagccgggagattacccttcagatacgacggtgaaacagccagctaccatctatgatgtctg

SEQ ID NO: 24531 - DNA, 75 bp, synthetic construct
  source 1..75: mol_type = other DNA
tggatgaactgaccaagataattaaggattctgacggtaaaaccgaggaattggttaaggtcatgcaggataact

SEQ ID NO: 24532 - DNA, 75 bp, synthetic construct
  source 1..75: mol_type = other DNA
aaacgtgccgccgaggggctgcaggttaaatacaacagcctcaccgagtcggttaaacgccagcaacgcgagctg

SEQ ID NO: 24533 - DNA, 75 bp, synthetic construct
  source 1..75: mol_type = other DNA
ggaacgatggccggagttaagctgctgatgcccggttatgagtttgcgcagaaaaactcagaattgcaggccgtg

SEQ ID NO: 24534 - DNA, 75 bp, synthetic construct
  source 1..75: mol_type = other DNA
cgcgctgatgctgccgcttaatgcgttcaacaaactgcgcagcggtattgactgggtactggaaaaactcggtgt

SEQ ID NO: 24535 - DNA, 75 bp, synthetic construct
  source 1..75: mol_type = other DNA
gagcaactgtcattctcgaagagttgttatttcgggatcgacattaaaaacggcaccatgctgtatgtgcgcatt

SEQ ID NO: 24536 - DNA, 75 bp, synthetic construct
  source 1..75: mol_type = other DNA
acgttgatgcgcggtttgcagcgtatcgatcgtgtcgagatcgactctcctcgccgcgccagcagcggcgatagc

SEQ ID NO: 24537 - DNA, 75 bp, synthetic construct
  source 1..75: mol_type = other DNA
atgaaccgcgttctgtgtgtggtcatcattgccctgctggtggcctgtggtgcgcttagtctggggctgaatcat

SEQ ID NO: 24538 - DNA, 75 bp, synthetic construct
  source 1..75: mol_type = other DNA
cgccagcgcgatgttgctgcgctcgatgcaaaatactcgagggaattagccgatgcgagagctgaaaatgaaact

SEQ ID NO: 24539 - DNA, 75 bp, synthetic construct
  source 1..75: mol_type = other DNA
agaaactgaagtcgccaaaacatcactcaacacataccgtgccgtcatcaaaaatatcctgagcataatcggtga

SEQ ID NO: 24540 - DNA, 75 bp, synthetic construct
  source 1..75: mol_type = other DNA
agggatattgcgacaattcacagcaatatcgtgcaggaatacaacacccttaaagggtatagctggaaatggctg

SEQ ID NO: 24541 - DNA, 75 bp, synthetic construct
  source 1..75: mol_type = other DNA
ccgccagcgtgggcaatgatgccaccgtcgaactctctccaattgctggacgaaaccttctcggtatcagatccg

SEQ ID NO: 24542 - DNA, 75 bp, synthetic construct
  source 1..75: mol_type = other DNA
actggcacaggcggctcagcggggtgaacgcgttcccacgccaggcgagctacccgcaaacattgatgaacgggt

SEQ ID NO: 24543 - DNA, 75 bp, synthetic construct
  source 1..75: mol_type = other DNA
ttcacttatgaccgatatgacaaatctgagaattgccttatatcaggggaataacacgtcaaccagactcacatt

SEQ ID NO: 24544 - DNA, 75 bp, synthetic construct
  source 1..75: mol_type = other DNA
agggaaatcattaccccgtttctggcccgggcattttttcccgattttctatgcctgtcatctggctgtgctggg

SEQ ID NO: 24545 - DNA, 75 bp, synthetic construct
  source 1..75: mol_type = other DNA
tgccagcgccgccgcactcggtgtgccgttaaaaattacccatatggcggtaggcgatggcggcggaacattacc

SEQ ID NO: 24546 - DNA, 75 bp, synthetic construct
  source 1..75: mol_type = other DNA
atttattcagtatcaataccgcgacactgggctataaaacgccgctacccgccattattgatgcctgcgccgcac

SEQ ID NO: 24547 - DNA, 75 bp, synthetic construct
  source 1..75: mol_type = other DNA
accgttacggtgtcgccgcaggtggtcgccgactggctgcactcaacatgctggcagagcgcaacatccttccgg

SEQ ID NO: 24548 - DNA, 75 bp, synthetic construct
  source 1..75: mol_type = other DNA
gatacccgttctgaacgactgactgtgacaaccgctccgtcctgtgcggggcatcaccggagagatgaggatgag

SEQ ID NO: 24549 - DNA, 75 bp, synthetic construct
  source 1..75: mol_type = other DNA
accgccacggtgtcgccgcaggtggtcgccgactggcagcactcaacatgctggcagagcgtggcatcattccgg

SEQ ID NO: 24550 - DNA, 75 bp, synthetic construct
  source 1..75: mol_type = other DNA
cgcagtgaggatgatgtggctgacgacgctgaccgcacggaacaggggctggagagcgcgtcagtggaggaaatc

SEQ ID NO: 24551 - DNA, 75 bp, synthetic construct
  source 1..75: mol_type = other DNA
acctgaaaaagccgcagattatcgacgccctgaatgacgccggactgtccggtgctgcacgggacgcggagaaga

SEQ ID NO: 24552 - DNA, 75 bp, synthetic construct
  source 1..75: mol_type = other DNA
ccggactgtccggtgctgcgcgggacgcggagaaaatgaagaaaggcgatgccgctgaacatgcagagttccaca

SEQ ID NO: 24553 - DNA, 75 bp, synthetic construct
  source 1..75: mol_type = other DNA
ttgtactcgttggtcgtctgggtaaagacccggaagtccgttacatccccaacgggggcgcagtggcaaacctgc

SEQ ID NO: 24554 - DNA, 75 bp, synthetic construct
  source 1..75: mol_type = other DNA
ttgactcgctggaaacggctatcggattccacatgcgtgactggtggcagccaaccagagggaattattttggag

SEQ ID NO: 24555 - DNA, 75 bp, synthetic construct
  source 1..75: mol_type = other DNA
tgctgattgaaacacagggcgaggtctgcctccttccccttcccggtgatgcagcagagcgcttgttcccgtcgg

SEQ ID NO: 24556 - DNA, 75 bp, synthetic construct
  source 1..75: mol_type = other DNA
tgagattgactatgaaaaacggccttgaactgaaagcgcctgtaactgatgacgtcagcagagcgctggcttttg

SEQ ID NO: 24557 - DNA, 75 bp, synthetic construct
  source 1..75: mol_type = other DNA
taagtgacaaaaaaattcgccaggcagtccgtcagtttcatccgcaatctttccaacaattgcgtaagtttattc

SEQ ID NO: 24558 - DNA, 75 bp, synthetic construct
  source 1..75: mol_type = other DNA
ggttcagttttcactggaagacatcatcagcgatctggccgtgccacggctcgaatccctgacagtggaggtggt

SEQ ID NO: 24559 - DNA, 75 bp, synthetic construct
  source 1..75: mol_type = other DNA
gcgtattcagcagcagatccgacaggccagaaacagtggcgggattggtcagcaggattatctggcgctgatttc

SEQ ID NO: 24560 - DNA, 75 bp, synthetic construct
  source 1..75: mol_type = other DNA
gcacctgctgccttatctcgcctgggcattttccgttgaccgctgggatcgcaactggccggaagagacaaagcg

SEQ ID NO: 24561 - DNA, 75 bp, synthetic construct
  source 1..75: mol_type = other DNA
cagggatgaagccctggcggatgaatacgcgaaactggttgagaattacagtacagaaaaggaaatatgggagca

SEQ ID NO: 24562 - DNA, 75 bp, synthetic construct
  source 1..75: mol_type = other DNA
atggcagttcgtggcattaacaaggtcattctcgtgggacgtctgggaaaagatccggaagtccgttacatcccc

SEQ ID NO: 24563 - DNA, 75 bp, synthetic construct
  source 1..75: mol_type = other DNA
cgatgccgaggctatctgtgaagcagcgtcgcgtccatcaatgcgttttgtgcaaccccgaacggaatctcagca

SEQ ID NO: 24564 - DNA, 75 bp, synthetic construct
  source 1..75: mol_type = other DNA
aggtgattttcttgaatgggcaaaagttgcaattcagaaaaaaaatacttctttcgatgctattattggcaaccc

SEQ ID NO: 24565 - DNA, 75 bp, synthetic construct
  source 1..75: mol_type = other DNA
caccatcatcccgtaacaggctatacgtggcctgctcacgggcacggggcaacatctattttattccggaaagcc

SEQ ID NO: 24566 - DNA, 75 bp, synthetic construct
  source 1..75: mol_type = other DNA
acgcagctatgttgggagtaaaagcactgcggttatcacgagaactgagaatgttatgtggcctccctctgcacg

SEQ ID NO: 24567 - DNA, 75 bp, synthetic construct
  source 1..75: mol_type = other DNA
acatcgacctgatagaagccgtgggaaatcaccccgacattatcgccgggagcaacaacggtgatggatacgact

SEQ ID NO: 24568 - DNA, 75 bp, synthetic construct
  source 1..75: mol_type = other DNA
aacatatcaaagtagttagtttcccggtttattgtccatatcatcagggcgaggcatatgtaaagatgactggac

SEQ ID NO: 24569 - DNA, 75 bp, synthetic construct
  source 1..75: mol_type = other DNA
ctgtcggagcggtgttccttactcaccacttcacactcagacgtgaggagagaactgcagcagcgaagctggcca

SEQ ID NO: 24570 - DNA, 75 bp, synthetic construct
  source 1..75: mol_type = other DNA
tgagagctgggtacgccagctcaggcgagagcgccagggtattacgccctctgccacacccattactccagacca

SEQ ID NO: 24571 - DNA, 75 bp, synthetic construct
  source 1..75: mol_type = other DNA
ttggtccggaacagcgtaagggactatggctttatcatgttctggagccggaaacgtggggccgaatgtgtgaga

SEQ ID NO: 24572 - DNA, 75 bp, synthetic construct
  source 1..75: mol_type = other DNA
acaggcagatgcacaggaactgaaaaatgcccgcgacagtgggcaggtgattgatactggtttttgtatgtatgc

SEQ ID NO: 24573 - DNA, 75 bp, synthetic construct
  source 1..75: mol_type = other DNA
tccctatttagataatgtcacaaatgcggcaaggatagagagtgatcgtatgataggtatttttgttgatggcga

SEQ ID NO: 24574 - DNA, 75 bp, synthetic construct
  source 1..75: mol_type = other DNA
ctaccgtcgccgcgtggagatgtatcgggagaaggagaaaataacgtaccactggaagaagccggaacgactgcg

SEQ ID NO: 24575 - DNA, 75 bp, synthetic construct
  source 1..75: mol_type = other DNA
tcgcggggtgatagaaagtacccgcagcgacatcgctaaacgtcagggggaactggcgcaggcgaataatgcatt

SEQ ID NO: 24576 - DNA, 75 bp, synthetic construct
  source 1..75: mol_type = other DNA
gctcactgcttgccggtgaggaaaacgcaaggctgcgtgcaacccactggttacatgagagaggcctgaaagtat

SEQ ID NO: 24577 - DNA, 75 bp, synthetic construct
  source 1..75: mol_type = other DNA
ggagacgctcagcagggcagaaaacaataaggttctgcgcgatgccacccgtgccggtgctgaagttatgcggga

SEQ ID NO: 24578 - DNA, 75 bp, synthetic construct
  source 1..75: mol_type = other DNA
cctgccattgctaagattacgtactatagacagtgatatagaagggaagttgggagcgtttctgtcaggcctgac

SEQ ID NO: 24579 - DNA, 75 bp, synthetic construct
  source 1..75: mol_type = other DNA
agcgaggtgaagcaaaaaatggttaacccggatggaccgccgatgagcggcagccagtcccgcgctaagggttcc

SEQ ID NO: 24580 - DNA, 75 bp, synthetic construct
  source 1..75: mol_type = other DNA
gtaccagaaaaattgcagggaaaacgcaggaacgcctgaaaaaattaatctggctggcggcgcaggcagtaaaag

SEQ ID NO: 24581 - DNA, 75 bp, synthetic construct
  source 1..75: mol_type = other DNA
acctatttcatggaacggctacggcactaccggcagttaagcctcctgctgccaaaaggaaacgatccggtatat

SEQ ID NO: 24582 - DNA, 75 bp, synthetic construct
  source 1..75: mol_type = other DNA
tggaatgagtccaacggcttttacgatttcgtttatctggatacagaaaactccacctttaatatttcgtatgag

SEQ ID NO: 24583 - DNA, 75 bp, synthetic construct
  source 1..75: mol_type = other DNA
agcgatgtctgccacggcaggacttgtgacggctgcacgtaatgaagttgcactggcggaagcacagttcagggg

SEQ ID NO: 24584 - DNA, 75 bp, synthetic construct
  source 1..75: mol_type = other DNA
aggtggaaaacgcctttatggcctgggtgggcggcgcgaatgaggccagcggagcgacgaaaacgctctccggcg

SEQ ID NO: 24585 - DNA, 75 bp, synthetic construct
  source 1..75: mol_type = other DNA
ttcaacaaggggcgcagccggattgccgaccgcatcgaaatcgacatcagtcacagcgcgctcgccggtggccag

SEQ ID NO: 24586 - DNA, 75 bp, synthetic construct
  source 1..75: mol_type = other DNA
tcgataaactagaggaattatttttcgaccagtctttcgagtaccagttgcagtggtaccgcgcaggactggagc

SEQ ID NO: 24587 - DNA, 75 bp, synthetic construct
  source 1..75: mol_type = other DNA
tcactggagccctgccggctcatttattacagcggtagctggtatctgatcgcgttacagaagggaaaactgcag

SEQ ID NO: 24588 - DNA, 75 bp, synthetic construct
  source 1..75: mol_type = other DNA
ctggattacattgacgcggtgactgcaacagataccagcaccgcgccggatgtcatctggcctgaactaccggag

SEQ ID NO: 24589 - DNA, 75 bp, synthetic construct
  source 1..75: mol_type = other DNA
gaaacacgagaatatatttccacatcaactgaatatcttgctgttggtgtcggtattccggcatgttcctgttta

SEQ ID NO: 24590 - DNA, 75 bp, synthetic construct
  source 1..75: mol_type = other DNA
taccttacagcgcgattttcatcagcgtctggttcacctggacttagagtacagaaatggccggtacagtctcag

SEQ ID NO: 24591 - DNA, 75 bp, synthetic construct
  source 1..75: mol_type = other DNA
cggtatccctgcatattcctgtttagatgcccctggcacacataaggcgggttatgctatctgccgttcgatgga

SEQ ID NO: 24592 - DNA, 75 bp, synthetic construct
  source 1..75: mol_type = other DNA
cagctctgctcactgataaaatactggcatacaatcctgaagacaatcagggagcacgctggctactgggaccgg

SEQ ID NO: 24593 - DNA, 75 bp, synthetic construct
  source 1..75: mol_type = other DNA
cctcgctgccgctctgatgctgaaaagctacggtacggtcagtgtcgacggtaaagtcagtgatgccgacctgaa

SEQ ID NO: 24594 - DNA, 75 bp, synthetic construct
  source 1..75: mol_type = other DNA
tgtttgtaaactggctctataatcattcctctgtgctgcatgaacgggcagaaatcattaaatgcgccgaaatgc

SEQ ID NO: 24595 - DNA, 75 bp, synthetic construct
  source 1..75: mol_type = other DNA
tggtatgaacttggtcttctgcattttctgaatggggagcatgttaaggctgccacagcttttcgtcatggcttt

SEQ ID NO: 24596 - DNA, 75 bp, synthetic construct
  source 1..75: mol_type = other DNA
gcaccatcattgcatctgctgtattattttcctttaacgctgcagcagcgacgtcatattttgaagcgcgtaacg

SEQ ID NO: 24597 - DNA, 75 bp, synthetic construct
  source 1..75: mol_type = other DNA
ctgactggctggatgtaacagagaacgctttattcaaccgccttcgtgcagatggcgatcagattttcccgctgg

SEQ ID NO: 24598 - DNA, 75 bp, synthetic construct
  source 1..75: mol_type = other DNA
ttgattatcgtctttttgattcccctggcgttaaaaggcgtgagttataaaccgcttaccgcttctgccatgttg

SEQ ID NO: 24599 - DNA, 75 bp, synthetic construct
  source 1..75: mol_type = other DNA
atgaagaaaaatcatattacccgcaccatcattgcatctgctgtattattttcctttaacgctgcagcagcgacg

SEQ ID NO: 24600 - DNA, 75 bp, synthetic construct
  source 1..75: mol_type = other DNA
ggctggcactcactacattgcggatgctgtcgcacagtctgctggtggggtgttcgtatcgcttcctgaaattga

SEQ ID NO: 24601 - DNA, 75 bp, synthetic construct
  source 1..75: mol_type = other DNA
caggaagggatggctgaggtcgcccggtttattgaaatgaacggctcttttgccgacgagaacagggactggtga

SEQ ID NO: 24602 - DNA, 75 bp, synthetic construct
  source 1..75: mol_type = other DNA
atgacaccagaaattatcctacaacgtaccgggatcgacgtgagaggtgtcgagcagggagattatgcatggcaa

SEQ ID NO: 24603 - DNA, 75 bp, synthetic construct
  source 1..75: mol_type = other DNA
atgacgataagctttaacaccattccgtcgaatacgctggttccgctgttttatgcggaaatggataaccaggcg

SEQ ID NO: 24604 - DNA, 75 bp, synthetic construct
  source 1..75: mol_type = other DNA
acgctggttggcggttgtattgggctaattttgtatttgctgtcgcagctcccggccttgttccccctcggcaat

SEQ ID NO: 24605 - DNA, 75 bp, synthetic construct
  source 1..75: mol_type = other DNA
tcctattatccgaggtatttggtttgaaaaaaactggcctggttttcttaatgggacaatttaccagccacagga

SEQ ID NO: 24606 - DNA, 75 bp, synthetic construct
  source 1..75: mol_type = other DNA
gcgacgccgtggcagcacatattttgtatcaaaagccggggagcgttatcgccgggcagtggcgcttattgttcg

SEQ ID NO: 24607 - DNA, 75 bp, synthetic construct
  source 1..75: mol_type = other DNA
attgaccacggtaaaacgccagcatcgccccgctcttgatctttctcgcctgcctgaacttttgtcgcgtattag

SEQ ID NO: 24608 - DNA, 75 bp, synthetic construct
  source 1..75: mol_type = other DNA
tacaacacaacggaacaatggctggaacagtttccgttctggtcagagtcaacgttaaagcgtgcgtttgcaagt

SEQ ID NO: 24609 - DNA, 75 bp, synthetic construct
  source 1..75: mol_type = other DNA
ttgctgggtcattcgaatcaaaaaatgaccgatatttacaacgatgcacgcggcaaggagtggaaaaaactggtc

SEQ ID NO: 24610 - DNA, 75 bp, synthetic construct
  source 1..75: mol_type = other DNA
acctggctgattgagaaagctggaatcgtggttcacagatgccaacgcaacccatttaccggaaaccgcattttt

SEQ ID NO: 24611 - DNA, 75 bp, synthetic construct
  source 1..75: mol_type = other DNA
acaggttgcccgggagacaaaggttcgccggaaactggttaaggaacggtccagactgaaacgggcgacggtcag

SEQ ID NO: 24612 - DNA, 75 bp, synthetic construct
  source 1..75: mol_type = other DNA
tgagaaatgggtgacagatactgaggcacagcatagtgccgcagtagacgcggcagaagcacagcgccagtcgct

SEQ ID NO: 24613 - DNA, 75 bp, synthetic construct
  source 1..75: mol_type = other DNA
ctcaaccgtgcgctgcgtgaacagtcctgctcccgggtacggcggatcctgcttcgtctgccgtgggaacatgac

SEQ ID NO: 24614 - DNA, 75 bp, synthetic construct
  source 1..75: mol_type = other DNA
gctaaagtgttaggggtttctcaaaagtggttgcaattgggcattgaggataacgcgtctttcccagaccttgtt

SEQ ID NO: 24615 - DNA, 75 bp, synthetic construct
  source 1..75: mol_type = other DNA
aatgtggatattattatctggcacagttttccttttgccggtgttcattcacaggaatattgcggtgtactgttc

SEQ ID NO: 24616 - DNA, 75 bp, synthetic construct
  source 1..75: mol_type = other DNA
ttatgcggaaatggataaccaggcggcgaatactgcacaggacagcggagcatcgctgctgattggtcatgccaa

SEQ ID NO: 24617 - DNA, 75 bp, synthetic construct
  source 1..75: mol_type = other DNA
cgggcaggagcgtgaccgggctgccataactgaacgggaagccgcgctgccggagagtgtgctgcgtgaatcaca

SEQ ID NO: 24618 - DNA, 75 bp, synthetic construct
  source 1..75: mol_type = other DNA
tacaggcagtgcgctgatggccatgaaggatgccggggtgaacacatatcgctggcaggggggagaacagcgacc

SEQ ID NO: 24619 - DNA, 75 bp, synthetic construct
  source 1..75: mol_type = other DNA
cctttactcgtcttcaggctgcagattatggtgctattatttctaataataacaaaaataaatctgaattaacac

SEQ ID NO: 24620 - DNA, 75 bp, synthetic construct
  source 1..75: mol_type = other DNA
atgaagggaatattacgctgaaccataactcagccctggatatcggcagcaggttcaccggggggattgacgctt

SEQ ID NO: 24621 - DNA, 75 bp, synthetic construct
  source 1..75: mol_type = other DNA
gaagcgcaatctgccattatgaccgatgaaatcccgttagatgatgcactgttacaattgcgggaatttatcgac

SEQ ID NO: 24622 - DNA, 75 bp, synthetic construct
  source 1..75: mol_type = other DNA
actgtaagggggatcgttcgaggagttttcattgctgataaatggctaaaatcaacgcgtgaacattttcctacg

SEQ ID NO: 24623 - DNA, 75 bp, synthetic construct
  source 1..75: mol_type = other DNA
ggataacagccatatcacactgggaagtgacagggcatttgtggataaaaatgacggaacaggaaattatgtcat

SEQ ID NO: 24624 - DNA, 75 bp, synthetic construct
  source 1..75: mol_type = other DNA
gtcgttatcttttacgcgactggaaaccagaaaatccggccttctgggaaaataaaggaaaacatattgctcgaa

SEQ ID NO: 24625 - DNA, 75 bp, synthetic construct
  source 1..75: mol_type = other DNA
ataggctggccgccggaacggattcaggaggtcacgggactttccggtgaagaactgaaaaagctgtttcctgat

SEQ ID NO: 24626 - DNA, 75 bp, synthetic construct
  source 1..75: mol_type = other DNA
caggttatgcaggacgatttcgatgcccccgtagactttgtttccggactgggccccctgaactggacatacgac

SEQ ID NO: 24627 - DNA, 75 bp, synthetic construct
  source 1..75: mol_type = other DNA
cacccattcctggtatgccggtgctgaaacgggttaccgctatcacctgacagaggacacgttcattgagccgca

SEQ ID NO: 24628 - DNA, 75 bp, synthetic construct
  source 1..75: mol_type = other DNA
agatacagacaaaattggagggattctggtaaaaaaatacctttcaggaagtcttttttcaaaattcagacaaga

SEQ ID NO: 24629 - DNA, 75 bp, synthetic construct
  source 1..75: mol_type = other DNA
ggaatgcctggcgacagcgcgcaggattctgctcgatgcgtcaggtgatatttttctttacgggtttgaagactg

SEQ ID NO: 24630 - DNA, 75 bp, synthetic construct
  source 1..75: mol_type = other DNA
ttcatggaaaagcgtttcggtgacttagtagatcgtcggagagcaaaaaacggcgataacgaatacatggcatgg

SEQ ID NO: 24631 - DNA, 75 bp, synthetic construct
  source 1..75: mol_type = other DNA
agctaattgactcgtcgactatcgactttaaaaatctatatgaaatagatcaaatgctccatatgattatgctag

SEQ ID NO: 24632 - DNA, 75 bp, synthetic construct
  source 1..75: mol_type = other DNA
aaaaagccagatgcggcgctatgcctcaagattgagcgtgtacgccgcaatgcacgggatggtcgctataagctg

SEQ ID NO: 24633 - DNA, 75 bp, synthetic construct
  source 1..75: mol_type = other DNA
gtggcatgcagccactgagcaccgtggggctgtcatcagccgccccctccacggcctcactgccggaactcaatg

SEQ ID NO: 24634 - DNA, 75 bp, synthetic construct
  source 1..75: mol_type = other DNA
actgggatttacgcttctggtcggagactcgctgtgtgagttcaccgtaaaggaacgtaatattgagtttaaggc

SEQ ID NO: 24635 - DNA, 75 bp, synthetic construct
  source 1..75: mol_type = other DNA
gtggctggattatctggacgcactggagctgatcgatacttccggtgcgtgtagtggcacactaaatttggccac

SEQ ID NO: 24636 - DNA, 75 bp, synthetic construct
  source 1..75: mol_type = other DNA
caaacgcccttatcgaggcaagctacaagctcactttgcaggaacagcgcttcctgctggtctgtatcagccgcc

SEQ ID NO: 24637 - DNA, 75 bp, synthetic construct
  source 1..75: mol_type = other DNA
cagacaatccggaattgatcctgcgtgtgctacagctgagatttgacgagtcactgtcgtacccgcgcatttctg

SEQ ID NO: 24638 - DNA, 75 bp, synthetic construct
  source 1..75: mol_type = other DNA
gaattaatattcggaaatatcatgatattcctgctgaaacgccgtatgcgccgggagaacaaattaagggagggt

SEQ ID NO: 24639 - DNA, 75 bp, synthetic construct
  source 1..75: mol_type = other DNA
gtaaaagcagactatgtgcgaaccgctcaaaagttgggattcaatgtcaatgaattattatgggttaaacaataa

SEQ ID NO: 24640 - DNA, 75 bp, synthetic construct
  source 1..75: mol_type = other DNA
ctggcgttacggggtatgcgtgttctggtgccatcatcactggcaacggccatgatacagcacggaacggctgaa

SEQ ID NO: 24641 - DNA, 75 bp, synthetic construct
  source 1..75: mol_type = other DNA
gttgaaaaggcagctttgcagtcagcacaaagaattgaaaagaacctaaataaaggtttcaggattaatacaaaa

SEQ ID NO: 24642 - DNA, 75 bp, synthetic construct
  source 1..75: mol_type = other DNA
aaaatcatcgaccgcaacgccggggaaggatacgcgaaagcacatcccgaactgattagcgcattcatgacaacg

SEQ ID NO: 24643 - DNA, 75 bp, synthetic construct
  source 1..75: mol_type = other DNA
cagagccgaaatataaggcgttagatatggctgaactggctttaaaggtggcaatcagaacgatagaccgccacg

SEQ ID NO: 24644 - DNA, 75 bp, synthetic construct
  source 1..75: mol_type = other DNA
aaaaaatgagtctggtgcacattggtaagaatctgcccgcagaaaaaaaagccgcatttctggcaacgctgattg

SEQ ID NO: 24645 - DNA, 75 bp, synthetic construct
  source 1..75: mol_type = other DNA
aaaattatgtcggtttccggggtcgtgcgcggcgcaaagagtactggatgtttattctggtcaacatcatcttta

SEQ ID NO: 24646 - DNA, 75 bp, synthetic construct
  source 1..75: mol_type = other DNA
gcaccgtatagcctccgtctcaatgatggagcaacaggctaatgagctgtatagcattctgggaacgattctaca

SEQ ID NO: 24647 - DNA, 75 bp, synthetic construct
  source 1..75: mol_type = other DNA
atgggcgtcagcgtcatgcagttggttgctccgctggtggtatcactgtcgattttcgcagtatttggtagccag

SEQ ID NO: 24648 - DNA, 75 bp, synthetic construct
  source 1..75: mol_type = other DNA
tggggtgttcatggaattctttaaccagaaacctgacttctcctgacagtcgtattttatcctctgtaagggatg

SEQ ID NO: 24649 - DNA, 75 bp, synthetic construct
  source 1..75: mol_type = other DNA
gacggggatgtgttattcagctggcagtgctatgcgccacggaagcagttcgctgacccggttgaccggccagtc

SEQ ID NO: 24650 - DNA, 75 bp, synthetic construct
  source 1..75: mol_type = other DNA
caaaaccagccacctgttagcccctattaaaaaggttgatgccagtggcaagcatgacgttgcacagcgtcttca

SEQ ID NO: 24651 - DNA, 75 bp, synthetic construct
  source 1..75: mol_type = other DNA
ccacatcattgctgcggaaatgccgaaacagctggggtatgcactgaaacaacaactgaggttatggctgacccg

SEQ ID NO: 24652 - DNA, 75 bp, synthetic construct
  source 1..75: mol_type = other DNA
gcatggatttagaacaatggcgcgtggagccttgggagagtcaggattatggagtgatgacgcaatagagcgtca

SEQ ID NO: 24653 - DNA, 75 bp, synthetic construct
  source 1..75: mol_type = other DNA
agaacgcctgcatgaaaaacaggaactgccgccagtacggttaaaaacacaatcatattcgctgcgtctggaatg

SEQ ID NO: 24654 - DNA, 75 bp, synthetic construct
  source 1..75: mol_type = other DNA
aacgatagcgattgggtttatttttcgcatgaagggcatgcaattaataaaaaaagccacttaaagactggcgat

SEQ ID NO: 24655 - DNA, 75 bp, synthetic construct
  source 1..75: mol_type = other DNA
atgaatagtctgctgccaccgggttcaacttcactggagcgccgactggcgcaaacctgtagcgggatttctgat

SEQ ID NO: 24656 - DNA, 75 bp, synthetic construct
  source 1..75: mol_type = other DNA
cccgcggcggcaaacgactcgaacgggtgccagagactatcatggacgacgttcttggccgtctggccaccatcc

SEQ ID NO: 24657 - DNA, 75 bp, synthetic construct
  source 1..75: mol_type = other DNA
tccgtgcagaagcttattccgaatcactgacatttccggatgacgtgcctgcagatttgagggagagggaaagta

SEQ ID NO: 24658 - DNA, 75 bp, synthetic construct
  source 1..75: mol_type = other DNA
cctctgaaagatctcatggttgagtactgcgagcaaaaagggataacacaggctcagttcattgagaaaattatc

SEQ ID NO: 24659 - DNA, 75 bp, synthetic construct
  source 1..75: mol_type = other DNA
gcggcacccattctaaaaaagaaacatgcgtgatcgcattcgcacttttctacattattttcgccgtcccattac

SEQ ID NO: 24660 - DNA, 75 bp, synthetic construct
  source 1..75: mol_type = other DNA
tggcaggcaaaaccagctgatcagcggcggttatctgaactgatagaggactggtggatgcttgacggacgtaat

SEQ ID NO: 24661 - DNA, 75 bp, synthetic construct
  source 1..75: mol_type = other DNA
tggcgattgatgttgattatctcgagcccggtaacgggcctgacggcgatatcgaacatcacaccgaaataaccc

SEQ ID NO: 24662 - DNA, 75 bp, synthetic construct
  source 1..75: mol_type = other DNA
attaatgcacagaaattaattgcatacccaataactgttcccccccttcccgaacaagctgaaatcgttcgccgc

SEQ ID NO: 24663 - DNA, 75 bp, synthetic construct
  source 1..75: mol_type = other DNA
tgacagcccgtgccggtctgggctaccagttcgacctgctggctaacggcgaaaccgtattgcgggacgcatcag

SEQ ID NO: 24664 - DNA, 75 bp, synthetic construct
  source 1..75: mol_type = other DNA
aaaatacctgatgcccgcagcaagcagacactacaaaaagaagaaaatcgctaggagcgaaagtggtgaaagtta

SEQ ID NO: 24665 - DNA, 75 bp, synthetic construct
  source 1..75: mol_type = other DNA
tgccccgccttttatgctgattccgcgtagtatccggagaaaagtggatggattcagacagtcaaaaggtgaagc

SEQ ID NO: 24666 - DNA, 75 bp, synthetic construct
  source 1..75: mol_type = other DNA
tacactcagcgcattgagcgacataatctgaatctgagacaacatctggcaaggctgggacggaagttactgtcg

SEQ ID NO: 24667 - DNA, 75 bp, synthetic construct
  source 1..75: mol_type = other DNA
ccggcgattaccgcgctccggggtcactggccggaatgattaaacaggcctggtgcagtgccctgggggtggatg

SEQ ID NO: 24668 - DNA, 75 bp, synthetic construct
  source 1..75: mol_type = other DNA
ccggcgattaccgcgctccgggatcactggccgggatgattaaacaggcctggtgcagtgccctgggggtggatg

SEQ ID NO: 24669 - DNA, 75 bp, synthetic construct
  source 1..75: mol_type = other DNA
atataatgagccgctgcaacaacctgtacagccacagcagccgtattatgcgcctgcggctgaacaacctgtgca

SEQ ID NO: 24670 - DNA, 75 bp, synthetic construct
  source 1..75: mol_type = other DNA
aaaacactatcacctgatgctgctggtcaaccgggatacctggtgtcgtgccggcgattaccgcgctccgggatc

SEQ ID NO: 24671 - DNA, 75 bp, synthetic construct
  source 1..75: mol_type = other DNA
ggaagcgcgtcagcaatctcctgatggctgcgtgatggtattcgccgcccgtattcgccagggggaaacctatgc

SEQ ID NO: 24672 - DNA, 75 bp, synthetic construct
  source 1..75: mol_type = other DNA
ccgtctcggtgatccgcgtcgtacacgacgccttgtgtcactggcctcttctctcgctcagcatgcaggtctttc

SEQ ID NO: 24673 - DNA, 75 bp, synthetic construct
  source 1..75: mol_type = other DNA
tctgctggttcatcatccgatgctggaaggcattctgctgtctgaatgtgaacgtctgaggcagcgttcgctggc

SEQ ID NO: 24674 - DNA, 75 bp, synthetic construct
  source 1..75: mol_type = other DNA
gccagcgttaaaggaatgaatgattctgctgatggtgccatgaatcttgttaaaaccagcaatggctggagagcc

SEQ ID NO: 24675 - DNA, 75 bp, synthetic construct
  source 1..75: mol_type = other DNA
cgcagttgtgtttagtgcgaaaaaacgccagtggggtagccaggaggatctggcgtgtgcgcagtggatatgggg

SEQ ID NO: 24676 - DNA, 75 bp, synthetic construct
  source 1..75: mol_type = other DNA
ggctggcgttctctctggtacacctggggacaaaaagaaaccggagaatggcagtggacatttcaggtcggggac

SEQ ID NO: 24677 - DNA, 75 bp, synthetic construct
  source 1..75: mol_type = other DNA
tgattaaagaaattaaagagcgtatcagcagccttgacgtgcgagacgatattgagcgccgtgcttatgaaatcg

SEQ ID NO: 24678 - DNA, 75 bp, synthetic construct
  source 1..75: mol_type = other DNA
tatcgtcatgccgccggtcagcactggtccgcaacgctggctgaaattgaacgggtaaagcgcatctaccaggca

SEQ ID NO: 24679 - DNA, 75 bp, synthetic construct
  source 1..75: mol_type = other DNA
ccagtgttgggtcatcgacgatgtgcgctacttaggcggtagcgttcatgccacagcgggtacgctccgtcagtc

SEQ ID NO: 24680 - DNA, 75 bp, synthetic construct
  source 1..75: mol_type = other DNA
ctcggatggaagtaagcgcatagcagagttagaaagtgattctcaggcacaaaagttagttgaagcaatcattgt

SEQ ID NO: 24681 - DNA, 75 bp, synthetic construct
  source 1..75: mol_type = other DNA
gtgagcaagattgattatcaggcactgcgtgctaaggcagaaaaagcaacgtgtggcgagtggtcgctcgaatat

SEQ ID NO: 24682 - DNA, 75 bp, synthetic construct
  source 1..75: mol_type = other DNA
tttgctcggttttgacccgataagccgccgtaaaaatccaccggaaacagaagaagaggacgagcttgaccgcct

SEQ ID NO: 24683 - DNA, 75 bp, synthetic construct
  source 1..75: mol_type = other DNA
tagttgaagcaatcattgttgcgatagaaaacgaacaggaacgtctttttgatgaagattacctaatggattcga

SEQ ID NO: 24684 - DNA, 75 bp, synthetic construct
  source 1..75: mol_type = other DNA
attacagtgcataattccggaggaatattgggcggtaatggcgtaaacggtggtgatggtattaatggtagtaat

SEQ ID NO: 24685 - DNA, 75 bp, synthetic construct
  source 1..75: mol_type = other DNA
gtgaaaacgggggccgaagccatccgggcgctggccacacagctccctgcgtttcgtcagaaactgagcgacggc

SEQ ID NO: 24686 - DNA, 75 bp, synthetic construct
  source 1..75: mol_type = other DNA
aatggtgccgtgatccacatcgtaccgcgtccggcgggtgctaaaagtggcggtatttttcaggcagtgctgggg

SEQ ID NO: 24687 - DNA, 75 bp, synthetic construct
  source 1..75: mol_type = other DNA
ccgtctgctgccgtaccgtgattacaaccaggaatccggtctgttcatgaatgacaccacgatgggctttatgct

SEQ ID NO: 24688 - DNA, 75 bp, synthetic construct
  source 1..75: mol_type = other DNA
ctcaggcggttaactccctcgtcacagcactgaaactgcctgacgaatccgcaaaggccaatgaagttctgggcg

SEQ ID NO: 24689 - DNA, 75 bp, synthetic construct
  source 1..75: mol_type = other DNA
cgtccagggtaaccttacagcagcattacaattttgtaatgaaccaggctgtttctataacatatgatttatggc

SEQ ID NO: 24690 - DNA, 75 bp, synthetic construct
  source 1..75: mol_type = other DNA
acccgatcgtttctatcgaagacggtctggacgaatctgactgggacggtttcgcataccagaccaaagttctgg

SEQ ID NO: 24691 - DNA, 75 bp, synthetic construct
  source 1..75: mol_type = other DNA
cagttcaaagggcgatgacttcgaatttatccgccagtgccgggaacagaacatggatatccatgacgccgtcta

SEQ ID NO: 24692 - DNA, 75 bp, synthetic construct
  source 1..75: mol_type = other DNA
gtgaggaggcgtaacgcgagaggcgggataagcagaacagtctcagtgtatctcgatgaagatacaaataaccaa

SEQ ID NO: 24693 - DNA, 75 bp, synthetic construct
  source 1..75: mol_type = other DNA
ttgagtcaccccggattgaagcaaacaagctccgtggtatgcctgattgttacaagatggagagcatgaaaaacc

SEQ ID NO: 24694 - DNA, 75 bp, synthetic construct
  source 1..75: mol_type = other DNA
tagttacttttttatctatgttttctttttccgccgtcgcaatgccttttaaaactattgaacgtgagagtttca

SEQ ID NO: 24695 - DNA, 75 bp, synthetic construct
  source 1..75: mol_type = other DNA
acttgaggcatgtggtgaggcgtttctggcgcaggttcgccagcaggcggaaaaactggtcagggagatggcggc

SEQ ID NO: 24696 - DNA, 75 bp, synthetic construct
  source 1..75: mol_type = other DNA
atattcagaaaacaaacgagagggtaaaaactctttttgtgaaaatagatttaaacggtatcaagtttggatttt

SEQ ID NO: 24697 - DNA, 75 bp, synthetic construct
  source 1..75: mol_type = other DNA
acagccacaacagccacaacagccacaacagccacaacagccacaacagccacaacagccacaacagccacaaca

SEQ ID NO: 24698 - DNA, 75 bp, synthetic construct
  source 1..75: mol_type = other DNA
tgggctttgatattggaagtaccaacagaactaaaatcagatttacttacacttctgctacaacaaattcaattt

SEQ ID NO: 24699 - DNA, 75 bp, synthetic construct
  source 1..75: mol_type = other DNA
ttgttgtcagtggggccacccgactgacgtctgcagaaaccgacagactggtggcaccgtgggtgaatcagtgtc

SEQ ID NO: 24700 - DNA, 75 bp, synthetic construct
  source 1..75: mol_type = other DNA
tgactggatgcggggtgtccgggaagatcagaaaaacggctggctgtttatctcgtcgaatgccgacacccatgc

SEQ ID NO: 24701 - DNA, 75 bp, synthetic construct
  source 1..75: mol_type = other DNA
acagagcactgaaggaatggcaaaaactcggtcacactgttcgtgagcaattcaaaaagaaactgtcagaacgcc

SEQ ID NO: 24702 - DNA, 75 bp, synthetic construct
  source 1..75: mol_type = other DNA
tgatgagaaggtcgttttgcttgtgatttctgtgggaaaaagagaaggcagcgacgtctatcacatggcagatac

SEQ ID NO: 24703 - DNA, 75 bp, synthetic construct
  source 1..75: mol_type = other DNA
gctgccctccgggctgttgttactgattccggttatcgaggctgaagaagccagtacagaagaggatattgcccc

SEQ ID NO: 24704 - DNA, 75 bp, synthetic construct
  source 1..75: mol_type = other DNA
cgtaccggttgtttcaatggcagtcagtaccataccggttatcacgaagtttgacagtttcagaaggatgtttgt

SEQ ID NO: 24705 - DNA, 75 bp, synthetic construct
  source 1..75: mol_type = other DNA
aatcagcgatctggctgaactgttttcagtttcacgtccaacagtctaccggacacttttgcgagggaaaaatga

SEQ ID NO: 24706 - DNA, 75 bp, synthetic construct
  source 1..75: mol_type = other DNA
atggctgattcgaatctcaatgagccggtaacaattcaggctacacgactcgatacatcaatccttccacgcaat

SEQ ID NO: 24707 - DNA, 75 bp, synthetic construct
  source 1..75: mol_type = other DNA
tcttcgctcattcccgggcattgccaaacgctctgatgtgaacggtgtatcgcgcggcgtcgagtacaacatggc

SEQ ID NO: 24708 - DNA, 75 bp, synthetic construct
  source 1..75: mol_type = other DNA
tggtcgcgtatcaatggcgcatggtcgaacatcacaggcggtaggcgttaatggtcaactggtcgagtatcgcta

SEQ ID NO: 24709 - DNA, 75 bp, synthetic construct
  source 1..75: mol_type = other DNA
gatatttatgagcctgacgggccgacgaaccttctggcatgggaaaggcttaagaacaaagagttgccgccttca

SEQ ID NO: 24710 - DNA, 75 bp, synthetic construct
  source 1..75: mol_type = other DNA
tgaagataattccgtctctgtgggtaacacaacagatcagcgaaaaattgtcaatatggcagcaggtgatatcag

SEQ ID NO: 24711 - DNA, 75 bp, synthetic construct
  source 1..75: mol_type = other DNA
ttgttacaccgcaccacccgccgcgtcaccattaccgaagaaggagagcggatttatgaatgggcgcagcggatt

SEQ ID NO: 24712 - DNA, 75 bp, synthetic construct
  source 1..75: mol_type = other DNA
tcagcgcgtacgtggttgagtatcgtagaaaatgggaaacctgatacatctatagctgttaattttcattcgatc

SEQ ID NO: 24713 - DNA, 75 bp, synthetic construct
  source 1..75: mol_type = other DNA
aacgcgaaaaacagtgagacagccgcaaagacgagcgaaaccaacgcaaagtccagccagacggcagcgaaaacc

SEQ ID NO: 24714 - DNA, 75 bp, synthetic construct
  source 1..75: mol_type = other DNA
ctttatgtttctgctcttgataataatggttacatccttcctttcggcgcaatgtcttacgaaccgtttgatatt

SEQ ID NO: 24715 - DNA, 75 bp, synthetic construct
  source 1..75: mol_type = other DNA
atatactgaggatagctggaatattcacctgctattgctataaagatgctgaggaaattgaatcaattgcgcttt

SEQ ID NO: 24716 - DNA, 75 bp, synthetic construct
  source 1..75: mol_type = other DNA
agttgcgcttcaccggctctatccagcgtgacgataccggagaagtgcaggccgtggaacttgtggtgcgtggac

SEQ ID NO: 24717 - DNA, 75 bp, synthetic construct
  source 1..75: mol_type = other DNA
aaccagaaaatcccggacagtggcgttctgacgcagaaagtgaaagagcagattgctgaccagctgaaacaggca

SEQ ID NO: 24718 - DNA, 75 bp, synthetic construct
  source 1..75: mol_type = other DNA
gccatcgcgccggagtcggtgctgatgcaggacggcgcattcagcctgacggcaccaccggtacagggaatgccg

SEQ ID NO: 24719 - DNA, 75 bp, synthetic construct
  source 1..75: mol_type = other DNA
ttgccgccgggcatgagatggcttcggaactgaaagctgaatgtggtgccgttgatatgcgtagtgtggcaaagc

SEQ ID NO: 24720 - DNA, 75 bp, synthetic construct
  source 1..75: mol_type = other DNA
ttgccggaacctactgcaaaacgccgtttgctgattcgtatgcgttcatcagcaatccggcaacaggtgcgccgt

SEQ ID NO: 24721 - DNA, 75 bp, synthetic construct
  source 1..75: mol_type = other DNA
aacttcctgcaaaaaggcgataaagaggcagcggaaagcggcgcgttttatgcccgtatccgccacgaacgctac

SEQ ID NO: 24722 - DNA, 75 bp, synthetic construct
  source 1..75: mol_type = other DNA
tggaatatcactgaacatgttctgcgctacctgattgttgaccggacagcagcgcctgccgggatatctgcggag

SEQ ID NO: 24723 - DNA, 75 bp, synthetic construct
  source 1..75: mol_type = other DNA
cctcgtggaatcagtatgctcaggacaataatctgacaccggagcaggttcaagaagggatgaatcgtatagcta

SEQ ID NO: 24724 - DNA, 75 bp, synthetic construct
  source 1..75: mol_type = other DNA
acggccagcgccaccacgctgacgcaggacggaatattgctggcgaaaagtcatgcgggactcaatgccggtacg

SEQ ID NO: 24725 - DNA, 75 bp, synthetic construct
  source 1..75: mol_type = other DNA
actgcacttgatgacgatgaaaagggagtaactttaagttacacccttggtggtgagcagaatctaagcattgtg

SEQ ID NO: 24726 - DNA, 75 bp, synthetic construct
  source 1..75: mol_type = other DNA
gacgcagggcaacagtgtcagcgtggatgtgcagaacgcacagcttgacggaacacaggctgccagagacatcct

SEQ ID NO: 24727 - DNA, 75 bp, synthetic construct
  source 1..75: mol_type = other DNA
cctgccggatgaggatccgcagaatctcgctgacccggtctatcgccgtcgccgcattatccttcagaacatgaa

SEQ ID NO: 24728 - DNA, 75 bp, synthetic construct
  source 1..75: mol_type = other DNA
gacggtaccgtctggcgtctgctgaatggctttaaattgttccgcgaaaaactggatacccgtcgcggctctaat

SEQ ID NO: 24729 - DNA, 75 bp, synthetic construct
  source 1..75: mol_type = other DNA
cggtgctcagcggtaaatacaccatgaccggggaagcgttcgagcctgttgaagtcgatatgggccgcagcgctg

SEQ ID NO: 24730 - DNA, 75 bp, synthetic construct
  source 1..75: mol_type = other DNA
tattattaacccggtgaaagattttgcgaccgttattgcagagcctcgtcttgatgataacagccagaccacctt

SEQ ID NO: 24731 - DNA, 75 bp, synthetic construct
  source 1..75: mol_type = other DNA
aaggaagcagcccgtcattatttgtgcggacggatacggtgcgtgccgtgcggcgtggtgacacgctgaccatta

SEQ ID NO: 24732 - DNA, 75 bp, synthetic construct
  source 1..75: mol_type = other DNA
gccatcaacaagtggaacggtacactgccgcaatacatgaccagcggtgccaacacaccatttattcaggttaag

SEQ ID NO: 24733 - DNA, 75 bp, synthetic construct
  source 1..75: mol_type = other DNA
atgtacaagaaagatgttatcgaccacttcggaacccagcgtgctgtagctaaagcgttaggcattagcgacgca

SEQ ID NO: 24734 - DNA, 75 bp, synthetic construct
  source 1..75: mol_type = other DNA
gtgatggtgctgctggtggcggtgtcggcgaaacgaccgctggaattcagcctgttcccgaccattttgctgatc

SEQ ID NO: 24735 - DNA, 75 bp, synthetic construct
  source 1..75: mol_type = other DNA
ccagatggaccaacgaatctttccgcatgggtaaggcttaagagcaaagagttgccgccttcactgcatcactac

SEQ ID NO: 24736 - DNA, 75 bp, synthetic construct
  source 1..75: mol_type = other DNA
gtcagaaaaaccgcttcaacggcacaacgaacgacgtcgagcgcgtcatcctctttgtgggttacggcgacacta

SEQ ID NO: 24737 - DNA, 75 bp, synthetic construct
  source 1..75: mol_type = other DNA
aaggaatcaaatttggccgcaggcgtaccgtggacaggaacgtcgtgctgacgcttcatcagaagggcactggtg

SEQ ID NO: 24738 - DNA, 75 bp, synthetic construct
  source 1..75: mol_type = other DNA
ccccagaccggcacacctgccaccgatctggatgatgactactttgacatgttgcaggaggaactttgcagtgtt

SEQ ID NO: 24739 - DNA, 75 bp, synthetic construct
  source 1..75: mol_type = other DNA
ctggtggaagaaatggtgctgaatcagtgagttcacctgatgcctcctctttaattaaagaaaccagaccacgga

SEQ ID NO: 24740 - DNA, 75 bp, synthetic construct
  source 1..75: mol_type = other DNA
gccgcgcatccgatatctggcgcgaagtggcctcgctgtttcgcccacctggccggttaccagtagcggaagcca

SEQ ID NO: 24741 - DNA, 75 bp, synthetic construct
  source 1..75: mol_type = other DNA
taccgcgcttcgtgcgctgctgttaagccgcaagaatccgtttggcgatatcaaatctgatggcacggtgaaaac

SEQ ID NO: 24742 - DNA, 75 bp, synthetic construct
  source 1..75: mol_type = other DNA
atgagcgagattaattatcaggaagggcatgaaaaggcagggcaggcaaaaccagtggcatggcgatatcgctac

SEQ ID NO: 24743 - DNA, 75 bp, synthetic construct
  source 1..75: mol_type = other DNA
taaccggctttaattctgcttacagaacgtcatcaaccagtgacacggtatctatgcattacagttggtgggctg

SEQ ID NO: 24744 - DNA, 75 bp, synthetic construct
  source 1..75: mol_type = other DNA
gggaatatgtggggggcgaccaactggagcactaccggcttcatagctcactgcaattatggtcttgaaggtggt

SEQ ID NO: 24745 - DNA, 75 bp, synthetic construct
  source 1..75: mol_type = other DNA
gcggtaatcaattatctcgaccgcagttcgctgtcggtagcaaatttaacgattcgtgaagaattgggattaagt

SEQ ID NO: 24746 - DNA, 75 bp, synthetic construct
  source 1..75: mol_type = other DNA
tggacaatccggtcaagcgtggtgagcaggttatcgaacaggtcacgctgatgaaacctaatgccgggacgctgc

SEQ ID NO: 24747 - DNA, 75 bp, synthetic construct
  source 1..75: mol_type = other DNA
atctccttaaaccatggcgtacatgccaaagtttccacgccagtgcatttacgaaaagcacgtacttgctatgat

SEQ ID NO: 24748 - DNA, 75 bp, synthetic construct
  source 1..75: mol_type = other DNA
aaatgacacgatccattggttcaaaacgacacgctgtcatcgggtcaaaatggcccaatgatcttacagagaata

SEQ ID NO: 24749 - DNA, 75 bp, synthetic construct
  source 1..75: mol_type = other DNA
cgttttgcttcaaagagagtcagcgtggggttcacgtctgtacaggctgtttagcgacggtgttatatggcactt

SEQ ID NO: 24750 - DNA, 75 bp, synthetic construct
  source 1..75: mol_type = other DNA
gctaaacaaatataaactgacaccggttgatgtgattaaccagttgaaggtacagaacgatcagatcgctgccgg

SEQ ID NO: 24751 - DNA, 75 bp, synthetic construct
  source 1..75: mol_type = other DNA
ggaacaggtactggcagtgtatggtcctgtgcatacgcgactattgcggcaggcgctggagctggttactgatgc

SEQ ID NO: 24752 - DNA, 75 bp, synthetic construct
  source 1..75: mol_type = other DNA
tggactcattcggcatcggcgctacagaagatgcagaacgctttggtgacgtcggggctgacaccctgggtcata

SEQ ID NO: 24753 - DNA, 75 bp, synthetic construct
  source 1..75: mol_type = other DNA
cgcttgctatggcgggcgtattttcagcccaggctctggctgatgagaacaaaactggcttttatgtgactggta

SEQ ID NO: 24754 - DNA, 75 bp, synthetic construct
  source 1..75: mol_type = other DNA
cgaagctgtcggagcgcgcattacagacatcccggtagacctcaacacgctgtggtcaccggacacctgcccggt

SEQ ID NO: 24755 - DNA, 75 bp, synthetic construct
  source 1..75: mol_type = other DNA
atgagtaattcgttgttaccaccatcagccagcaatttcatgcgttgtgccgaagctgtcggagcgcgcattaca

SEQ ID NO: 24756 - DNA, 75 bp, synthetic construct
  source 1..75: mol_type = other DNA
gaacgagtctgcgccgcgctgcgggagctgaacaagcaccgggatattcttcgggatattaccgcgaccggagag

SEQ ID NO: 24757 - DNA, 75 bp, synthetic construct
  source 1..75: mol_type = other DNA
tcggtaaaaaattacagaaagcggagggtgtggttgaagggatgttaatgttacttggtgtcagactggaaatgg

SEQ ID NO: 24758 - DNA, 75 bp, synthetic construct
  source 1..75: mol_type = other DNA
atcttccggtaactgaagcacgcaccattcgtcgcgctctccgcttactggaaaaatatcagcgccagcctggcg

SEQ ID NO: 24759 - DNA, 75 bp, synthetic construct
  source 1..75: mol_type = other DNA
gagagatgacgcccggtgagcgcagcctcattcagcgggccctgaaaaccctggaccgtcatcttcatgaacccg

SEQ ID NO: 24760 - DNA, 75 bp, synthetic construct
  source 1..75: mol_type = other DNA
atgcacagtcagttaagagaacgtatccggctgatgcgcgcaaggctggataacgccgcgccggttgctgaaatc

SEQ ID NO: 24761 - DNA, 75 bp, synthetic construct
  source 1..75: mol_type = other DNA
accggcctgatggcccgcgacaattacagaacggtaaataacattaccttgggtaaacatccgggggcgaaacaa

SEQ ID NO: 24762 - DNA, 75 bp, synthetic construct
  source 1..75: mol_type = other DNA
ggaaaaatacgcactggtacgaaccgaccagccgggattcagcgcaggaacttcgtcgcagttaatcaacagcat

SEQ ID NO: 24763 - DNA, 75 bp, synthetic construct
  source 1..75: mol_type = other DNA
aacagtccccatatctgcgggcagtcgatattctgcgggcgcgacaggcaacaggtttattgaaagcgcggcacg

SEQ ID NO: 24764 - DNA, 75 bp, synthetic construct
  source 1..75: mol_type = other DNA
accggcctgatgacccgcgacaattacagaacggtaaatgacattaccctgggcaggcatccggaggaggcgaaa

SEQ ID NO: 24765 - DNA, 75 bp, synthetic construct
  source 1..75: mol_type = other DNA
gatgagtgttctcgccagagagctggttgccagtggcgatgtatacaattctggctacgggttattcccgtctga

SEQ ID NO: 24766 - DNA, 75 bp, synthetic construct
  source 1..75: mol_type = other DNA
ggcgcctaaacataatctgtcgcgagtgccggaagagtgaagctatgcagcgtgtactggctttctatcagggta

SEQ ID NO: 24767 - DNA, 75 bp, synthetic construct
  source 1..75: mol_type = other DNA
atgtttaatcttccgggatggttgtttaccgttatagcgctggtcctcaccctgttcgttatcgggctgatattt

SEQ ID NO: 24768 - DNA, 75 bp, synthetic construct
  source 1..75: mol_type = other DNA
ggcgtcagaacataatctgtcgcgagtgccggaagagtgaggttatgcagcgagtgctggcgttttatcagggta

SEQ ID NO: 24769 - DNA, 75 bp, synthetic construct
  source 1..75: mol_type = other DNA
agcgggaaaaaattaaagggcagatcgttgatctcgtacgccagagtgggcgcgagacgttacgacaactggaag

SEQ ID NO: 24770 - DNA, 75 bp, synthetic construct
  source 1..75: mol_type = other DNA
gtgccggaaaagcgaagttatgcagcgtgtactggcattttaccagagtaatttcaggaggttgtctggtgagca

SEQ ID NO: 24771 - DNA, 75 bp, synthetic construct
  source 1..75: mol_type = other DNA
gagaaatgacaaccagagagcgcagcctcattcagcgggccctgaaagccctggaccgccatcttcatgaacccg

SEQ ID NO: 24772 - DNA, 75 bp, synthetic construct
  source 1..75: mol_type = other DNA
ggcgtcagaacatgatttgccgtgagtgccgggaaagcgaagttatgcagcgtatactaacgttctattggggaa

SEQ ID NO: 24773 - DNA, 75 bp, synthetic construct
  source 1..75: mol_type = other DNA
acaggctcgtaaggattggcaaaacgcccgcaaaaaactatccagggcaaaggtgaaaaaaacggttgtggttga

SEQ ID NO: 24774 - DNA, 75 bp, synthetic construct
  source 1..75: mol_type = other DNA
gattattgatgaggcggcgcgctcgatttcaagtgagctggccattgcaatgcagtcagcccggcgtgtcctgtt

SEQ ID NO: 24775 - DNA, 75 bp, synthetic construct
  source 1..75: mol_type = other DNA
taatggctatgaagctaatgatatgattttcgaacatcctaaaaaggtgtatcgagaatatctggcaaaatctga

SEQ ID NO: 24776 - DNA, 75 bp, synthetic construct
  source 1..75: mol_type = other DNA
gcagcatgcttcatcgaacagattttcacgatgattaccaaacggtaatggcatacaaagtttctgaagtcatcg

SEQ ID NO: 24777 - DNA, 75 bp, synthetic construct
  source 1..75: mol_type = other DNA
atgaaaacgattgaagttgatgatgaactctacagctatattgccagccacactaagcatatcggcgagagcgca

SEQ ID NO: 24778 - DNA, 75 bp, synthetic construct
  source 1..75: mol_type = other DNA
aacgatcgccgttacaagaaaaaggcgctcggcaaaattggggggaagcagcatgttttttacgtgctgatgttc

SEQ ID NO: 24779 - DNA, 75 bp, synthetic construct
  source 1..75: mol_type = other DNA
tatccgcagctgaccatccgtgtatctggctacgcagtacgtttcaactcgctgactaaagaacagcagcaggac

SEQ ID NO: 24780 - DNA, 75 bp, synthetic construct
  source 1..75: mol_type = other DNA
tcgcagcggccttcgctgttgtcggcttttgcagtaccgcctctgcggtaacttatcctctgccaaccgacggga

SEQ ID NO: 24781 - DNA, 75 bp, synthetic construct
  source 1..75: mol_type = other DNA
catcagacaacgattgatcaccatatcagcgaattcctgaataaaggaaaactgaagcccgaaaacggcggctca

SEQ ID NO: 24782 - DNA, 75 bp, synthetic construct
  source 1..75: mol_type = other DNA
gcgcttaaccagatgggagcaagtcaacgcggcgaagttctcctggcacattatggcggtgaactggcgattcat

SEQ ID NO: 24783 - DNA, 75 bp, synthetic construct
  source 1..75: mol_type = other DNA
ttcggcgcggagatgcaacgattaagccgggtaatggtattgagcaagcaactcactggatgccgctaccggaac

SEQ ID NO: 24784 - DNA, 75 bp, synthetic construct
  source 1..75: mol_type = other DNA
ggtaccttctgcccgtaaggtgaatggtaaggcgctttcagcggatataacactgacaccgaaagatattggtac

SEQ ID NO: 24785 - DNA, 75 bp, synthetic construct
  source 1..75: mol_type = other DNA
gcaggatttggcgggcaaatggctgagtggttgccaccggcgcagagtgccgatgcggccctgctgcccgcgttg

SEQ ID NO: 24786 - DNA, 75 bp, synthetic construct
  source 1..75: mol_type = other DNA
tcgagccggtggaggacgggcagacccgtggggctaatcagttttacagcgtcatggaacggctgaagatgctgg

SEQ ID NO: 24787 - DNA, 75 bp, synthetic construct
  source 1..75: mol_type = other DNA
taatttctcataatcatggaatacctacaaaagtggggtcagttactaatatcccgtatggaatagaacaggtta

SEQ ID NO: 24788 - DNA, 75 bp, synthetic construct
  source 1..75: mol_type = other DNA
atgaacgccacaattcaaacgataccagagcttcttatccagacacgaggcaatcagaccgaagtggcgaggatg

SEQ ID NO: 24789 - DNA, 75 bp, synthetic construct
  source 1..75: mol_type = other DNA
atgctctatgcgcagaaagtcgaatctacagacacctccagcctgccagtaacgtttcccgaacaaccagaatga

SEQ ID NO: 24790 - DNA, 75 bp, synthetic construct
  source 1..75: mol_type = other DNA
aaagcgcaactgagaaaccaggatgccgatccacagcagcgttttacttccgctggcggcactgaccagacactg

SEQ ID NO: 24791 - DNA, 75 bp, synthetic construct
  source 1..75: mol_type = other DNA
gtactgtttctgttggtgatgtgtttgtatcttcatggggatatgagcaaactaacgttaatttctaccaggtta

SEQ ID NO: 24792 - DNA, 75 bp, synthetic construct
  source 1..75: mol_type = other DNA
ggcgtatttgatacggaattctgcaaccgttacgaaaaaggcggggaagatggcatcacaatggtatttatcgcg

SEQ ID NO: 24793 - DNA, 75 bp, synthetic construct
  source 1..75: mol_type = other DNA
atgagcgctgataaacagacttttgcactacactgcgaagcaaaaaacgataaagtcagaaaacgccttggcatc

SEQ ID NO: 24794 - DNA, 75 bp, synthetic construct
  source 1..75: mol_type = other DNA
ctcccgttttgatttcgccattcatgtggcgcatgcccgttcgcgtggtctgcgtcggcgcatgccaccggtgct

SEQ ID NO: 24795 - DNA, 75 bp, synthetic construct
  source 1..75: mol_type = other DNA
ggagaaccctggcggcaatcagcatcacgccagcgataataaaactggcgaggcgacagatcccttaattaaggt

SEQ ID NO: 24796 - DNA, 75 bp, synthetic construct
  source 1..75: mol_type = other DNA
cacgtatgtggagatcaccggggctattgagcaggctggatccctgcgtggtctgtcgctgtctgatgtgctgaa

SEQ ID NO: 24797 - DNA, 75 bp, synthetic construct
  source 1..75: mol_type = other DNA
gactggatgaagtgatgattaaaaaaatgtcgtcacgcgattttattcagttgtgcgctgtggctgtaaatttta

SEQ ID NO: 24798 - DNA, 75 bp, synthetic construct
  source 1..75: mol_type = other DNA
tgatcgaccttgaaaccatgggaaaaaatcctgatgccccgatcatctcaataggtgcaatatttttcgatccgc

SEQ ID NO: 24799 - DNA, 75 bp, synthetic construct
  source 1..75: mol_type = other DNA
gaggagagcatgcttctgcctgtctccggtcaggaactgcccattcgttggcttgctcaacacggcagcgaaaaa

SEQ ID NO: 24800 - DNA, 75 bp, synthetic construct
  source 1..75: mol_type = other DNA
ggcatgagcgggttttagatagaattagaaacctcgaatgttccgctgaatttactgaacacaattttgtgttaa

SEQ ID NO: 24801 - DNA, 75 bp, synthetic construct
  source 1..75: mol_type = other DNA
tctggtagaaacccttcttaacttgcaggctgaacgtattcgtctggcggataaggctaattttcatattcaccg

SEQ ID NO: 24802 - DNA, 75 bp, synthetic construct
  source 1..75: mol_type = other DNA
ggtttttttgcgcacgtttcctcacatccaaattatggtggggcgtgcaggggcatcgaaagatgcgccggggtc

SEQ ID NO: 24803 - DNA, 75 bp, synthetic construct
  source 1..75: mol_type = other DNA
atgaacagtttaacggcaaataaccgtttgtcgcaacaaccggtggtcagcgtcgctgaacaccggttgttatgg

SEQ ID NO: 24804 - DNA, 75 bp, synthetic construct
  source 1..75: mol_type = other DNA
gcaacatattaatgagccagagaaaatgctggcggcactgaaagcttttgtacaaccgatgaaagcggctacacg

SEQ ID NO: 24805 - DNA, 75 bp, synthetic construct
  source 1..75: mol_type = other DNA
gcgaacagggaacgtcaggatatcgtcaccctggtgaaacggcagctgacgcgtgaaatctcggaaggacgcttc

SEQ ID NO: 24806 - DNA, 75 bp, synthetic construct
  source 1..75: mol_type = other DNA
gagcgtcgtgtgaaggagcgcatgattctgtcacgtaaccgcaattacagtcggctggccacagcttccccctga

SEQ ID NO: 24807 - DNA, 75 bp, synthetic construct
  source 1..75: mol_type = other DNA
atgaagcaaacctttctgcttcgcaacgaagcaatcagaaataacgccatagacgccattctctcactacccatc

SEQ ID NO: 24808 - DNA, 75 bp, synthetic construct
  source 1..75: mol_type = other DNA
gcgaaatcgaccgtcgcgtgaaggaacgcatgataatgtcgcggaacaacaactacacacggctggccacagcct

SEQ ID NO: 24809 - DNA, 75 bp, synthetic construct
  source 1..75: mol_type = other DNA
atggacacgaacgatgaattcccagacaaaaaagatattccctgcttccgttcttatttgcctgatgctctgcgt

SEQ ID NO: 24810 - DNA, 75 bp, synthetic construct
  source 1..75: mol_type = other DNA
atatcaagcgtctgcgaaagaaaattggattaacgcagaaagaatgtgcagagatgttcgggatgacagcccgtt

SEQ ID NO: 24811 - DNA, 75 bp, synthetic construct
  source 1..75: mol_type = other DNA
atcaggcacacttcaggcgctacagaatgaaatcgaacaacgtctgaaaccacactacccggaaatctggctgcg

SEQ ID NO: 24812 - DNA, 75 bp, synthetic construct
  source 1..75: mol_type = other DNA
gacaaggataaagaacgtatcctgtctctgctggaagaaatctggcaggacgacagctggctgcctgcagcatga

SEQ ID NO: 24813 - DNA, 75 bp, synthetic construct
  source 1..75: mol_type = other DNA
ttgattatctatatcacacagagcttagagacgcactttctcttcgtgaaaacgtatatggcttgagtggacatc

SEQ ID NO: 24814 - DNA, 75 bp, synthetic construct
  source 1..75: mol_type = other DNA
aaggatttttttaaaaatgttgaaaagaaaaaggggaaaatccgctggggtaaaacatttgatctccgtaagaat

SEQ ID NO: 24815 - DNA, 75 bp, synthetic construct
  source 1..75: mol_type = other DNA
ggtgatgtggagaaggccgcgcgggtttacgcaattaacgagctgatgcccgtcatggaggccatgaagcacatc

SEQ ID NO: 24816 - DNA, 75 bp, synthetic construct
  source 1..75: mol_type = other DNA
atgccgcaggttgctgcgaaactgggtgattcagtcactatctggcatcagagcggcaaaggttcgcaacaatcc

SEQ ID NO: 24817 - DNA, 75 bp, synthetic construct
  source 1..75: mol_type = other DNA
agcgggttaaaactggatgaagataaaaagcgagtgatggaaataatgcagcaggtctgggaggacgacagctgg

SEQ ID NO: 24818 - DNA, 75 bp, synthetic construct
  source 1..75: mol_type = other DNA
tgcccggtcaggtgaagcccttcagaaggcttttgcagataaagaagaattactgaagcagcaggctgagactct

SEQ ID NO: 24819 - DNA, 75 bp, synthetic construct
  source 1..75: mol_type = other DNA
atgctccagatattaatcgcattatgagtaataatcatcatgcccctgaacatcagcccgtatcacctatggttg

SEQ ID NO: 24820 - DNA, 75 bp, synthetic construct
  source 1..75: mol_type = other DNA
atgtcaaagcaacagatcggcgtcgtcggtatggctgtgatgggacgcaatcttgcgctcaacatcgaaagccgt

SEQ ID NO: 24821 - DNA, 75 bp, synthetic construct
  source 1..75: mol_type = other DNA
gctgattactccaggtctgcggcaagtaaggctcgctgtgagcattgttcaggtacgggattttataatgtattg

SEQ ID NO: 24822 - DNA, 75 bp, synthetic construct
  source 1..75: mol_type = other DNA
ctggcacgtaaaacaatctgcttctcgcgttccgtggaaatccacgaaaaagtcatcggctccttcattgaaaag

SEQ ID NO: 24823 - DNA, 75 bp, synthetic construct
  source 1..75: mol_type = other DNA
ggaaaacaatccggaatggaaaactgtcgcctttaataccaatggtgaaatggttgcgccgaacggttctattgg

SEQ ID NO: 24824 - DNA, 75 bp, synthetic construct
  source 1..75: mol_type = other DNA
gatctcaccgccatgtcggttgaggttgtcacttttttgttgaagaagtcggtgcttgccggtttaccgacagcc

SEQ ID NO: 24825 - DNA, 75 bp, synthetic construct
  source 1..75: mol_type = other DNA
ggaaaggcggtggaagtggcccggtcgattacctgctggggcgggagcgtaaccgcgaaggcgcaacggtgctcc

SEQ ID NO: 24826 - DNA, 75 bp, synthetic construct
  source 1..75: mol_type = other DNA
acgcgcggacaggcgctggaaatactcgaggcggactactggtatggaccacgttttgaccaggtggcagcgtta

SEQ ID NO: 24827 - DNA, 75 bp, synthetic construct
  source 1..75: mol_type = other DNA
tcaggctgacgctcaggaattaaaaaatgcaaaagagtccgctgaagtggtggagaccgcattctgcacgttcgt

SEQ ID NO: 24828 - DNA, 75 bp, synthetic construct
  source 1..75: mol_type = other DNA
gacgcgtaatcagcatctgctgggaaaaatcaacagcggactggttgaccctctggcggcccattacatctctcc

SEQ ID NO: 24829 - DNA, 75 bp, synthetic construct
  source 1..75: mol_type = other DNA
gtgggagcgtcatatcaaatcatctccagaccaacacaaaattacgcctgtggtaacggtgttttctctgtgtat

SEQ ID NO: 24830 - DNA, 75 bp, synthetic construct
  source 1..75: mol_type = other DNA
tatccgccattctgcctctcttggtgcctcagaccttcatatgaccccgggacgagacaacacggacttcaccta

SEQ ID NO: 24831 - DNA, 75 bp, synthetic construct
  source 1..75: mol_type = other DNA
acgttgtctggaaagcgggaggccgcgccggggtgacgctgtcgggcactgtcatgcagaccatgcagaatgttg

SEQ ID NO: 24832 - DNA, 75 bp, synthetic construct
  source 1..75: mol_type = other DNA
ggcacctatcatgtctcatggcctggcaaccaactctattggttatctggtcaccgacgacaatgcaatggtgtg

SEQ ID NO: 24833 - DNA, 75 bp, synthetic construct
  source 1..75: mol_type = other DNA
tgctggcaaggctggacaggctggagcagcaggggcagattgcgttacccggatttgataaaggcatttcagcct

SEQ ID NO: 24834 - DNA, 75 bp, synthetic construct
  source 1..75: mol_type = other DNA
gctgtactggcaaaatcccgggaagaagagacgacccggccaaccctgaaagaactggcagcgaagctgtccgga

SEQ ID NO: 24835 - DNA, 75 bp, synthetic construct
  source 1..75: mol_type = other DNA
ggctgtactggcaaaatcccgggaagaagagacgacccggccaaccctgaaagaactggcagcgaagctgtccgg

SEQ ID NO: 24836 - DNA, 75 bp, synthetic construct
  source 1..75: mol_type = other DNA
ccatcgccaaagtggtgggttacaaaggtcgggtggtttttgatgccagtaaaccggatggtacgccgcgcaaac

SEQ ID NO: 24837 - DNA, 75 bp, synthetic construct
  source 1..75: mol_type = other DNA
gcctgcctcaagtcattgcgtgacggcgatgtgctggtggtctggaagctcgatcgcctcggacgatcgcttgcc

SEQ ID NO: 24838 - DNA, 75 bp, synthetic construct
  source 1..75: mol_type = other DNA
tttgccaccgaacagattgaccaggtttatctggcggcggcaaaagtgggcggtattgtggcgaacaatacctat

SEQ ID NO: 24839 - DNA, 75 bp, synthetic construct
  source 1..75: mol_type = other DNA
actgggctggtaccacgaaatcactctggaagcgggcctggccagcacctaccagtggtttttgcaaaaccagca

SEQ ID NO: 24840 - DNA, 75 bp, synthetic construct
  source 1..75: mol_type = other DNA
cgtggcctccggatctggctgagtttgtggcgttgatttcggagagcggggcaaatccatttggcctgacggtgg

SEQ ID NO: 24841 - DNA, 75 bp, synthetic construct
  source 1..75: mol_type = other DNA
gcgattggcgacactggcatcgttattcacaaaagttttcgtagccctgttactggcagaattaattttaccctg

SEQ ID NO: 24842 - DNA, 75 bp, synthetic construct
  source 1..75: mol_type = other DNA
gcgcgaaaaaattcgcccactccaatggtcaactgaacgacaccctgaccgaagtcgcggatggcacactgcgcg

SEQ ID NO: 24843 - DNA, 75 bp, synthetic construct
  source 1..75: mol_type = other DNA
gacgttcagtgaaccatgaatgtactttcgtgtttaaccctcaagtggttagaaaaagcgaacaggtaggttttg

SEQ ID NO: 24844 - DNA, 75 bp, synthetic construct
  source 1..75: mol_type = other DNA
atggaagaaataccgtgtgctgctgatgcgtgttgatacgtcaacagcacccgatattgaatggcctacgcctcc

SEQ ID NO: 24845 - DNA, 75 bp, synthetic construct
  source 1..75: mol_type = other DNA
ccgtttacccgtctggatgaactggcgcacaacgcgctggcgaaggggctgattgataaagatgaagccgctatt

SEQ ID NO: 24846 - DNA, 75 bp, synthetic construct
  source 1..75: mol_type = other DNA
ttctcaacgggcagaccaaagcccgttacggtaaatcccatgaaatcgccgtgaagttgggactgaaatcaacag

SEQ ID NO: 24847 - DNA, 75 bp, synthetic construct
  source 1..75: mol_type = other DNA
tggacacaagtctgattggaccgatccttacggcgctgcttgccgctgcggggttctactgtaagttttggttta

SEQ ID NO: 24848 - DNA, 75 bp, synthetic construct
  source 1..75: mol_type = other DNA
tgacatggcggctgaatgcaaaactgtacttttaccccggcccggaatccgaacctattctggccgcggcggaat

SEQ ID NO: 24849 - DNA, 75 bp, synthetic construct
  source 1..75: mol_type = other DNA
agcgaccgaagagcacggggccagactgttcagcaatggtgcggtgacgtcgggtgtgttgcgtacagagcagac

SEQ ID NO: 24850 - DNA, 75 bp, synthetic construct
  source 1..75: mol_type = other DNA
tccgatgattctggaaatggggctggactggaagccggtggcactgaatgccgaggacagccagttcctggaaac

SEQ ID NO: 24851 - DNA, 75 bp, synthetic construct
  source 1..75: mol_type = other DNA
aagcaagaatttgacagttacgctaccaactgtctctgctaattcattagattcaagcggaaaagtagtgggcct

SEQ ID NO: 24852 - DNA, 75 bp, synthetic construct
  source 1..75: mol_type = other DNA
gaactgctgcccgtcgatcccggctgtgtggtaccgaagcttaacagtagctgggagccggtctatcaggtcaca

SEQ ID NO: 24853 - DNA, 75 bp, synthetic construct
  source 1..75: mol_type = other DNA
tgcgtcagggtgctggcggagtctgttggtatgctgccctgcagcctctacaaaatcaccggcactcttaaaaca

SEQ ID NO: 24854 - DNA, 75 bp, synthetic construct
  source 1..75: mol_type = other DNA
tgtgcgatgcagtgaactttcttgttgaaaaatacgcactggtgcgtaccgaccagccggaattcagtgcctgta

SEQ ID NO: 24855 - DNA, 75 bp, synthetic construct
  source 1..75: mol_type = other DNA
tgatatcctccgggcacgccgggcaacaggtctgatgacccgcgacaattacagaacggtaaataacattaccct

SEQ ID NO: 24856 - DNA, 75 bp, synthetic construct
  source 1..75: mol_type = other DNA
gctgaaagaacgacaactccctgccccaggtccactctgcagagcctgattgataatgcgttaaccggccgccct

SEQ ID NO: 24857 - DNA, 75 bp, synthetic construct
  source 1..75: mol_type = other DNA
cagcgtcgtgtcagtggcagtgcccgggtttccctcaaacgtcgtatctggcggagggatgccggacactgttgt

SEQ ID NO: 24858 - DNA, 75 bp, synthetic construct
  source 1..75: mol_type = other DNA
caccaaacgtctggaggaaggccaatttatctggcctgcggtgcgtgacggtaaggtatccattacccgctcgca

SEQ ID NO: 24859 - DNA, 75 bp, synthetic construct
  source 1..75: mol_type = other DNA
aactggatattgaactggtgagtgcaccggggaacagcagtaaggatgtttttaaaggaagtgaacaggcaatag

SEQ ID NO: 24860 - DNA, 75 bp, synthetic construct
  source 1..75: mol_type = other DNA
ccgtgctcggccttatcctgatttcatccacggcaagtgctgcaacctgtcgtgcgggtagcgcggcacaggccg

SEQ ID NO: 24861 - DNA, 75 bp, synthetic construct
  source 1..75: mol_type = other DNA
tcttacgggcacttagggaaagctatgcagctcgtaatcctttaaaaagcggaacaattcaatatcttcattact

SEQ ID NO: 24862 - DNA, 75 bp, synthetic construct
  source 1..75: mol_type = other DNA
tcagagcaaaacgtgggttttatttggtaaaaccaatcacggcaagctcagcggcgaaatactgtaccggttggt

SEQ ID NO: 24863 - DNA, 75 bp, synthetic construct
  source 1..75: mol_type = other DNA
cctgtttatctttcgcggccgacggggtgacacgattaaaatcctgtgggctgatgctgatggtctgtgcctgtt

SEQ ID NO: 24864 - DNA, 75 bp, synthetic construct
  source 1..75: mol_type = other DNA
cctatcctgccgaacagcgtgaagccgtctccgccgcgctggagctggaatcggaacccctgaacgttatcgctc

SEQ ID NO: 24865 - DNA, 75 bp, synthetic construct
  source 1..75: mol_type = other DNA
ctgagcgtcagaccccgatcacagtcaagaaagcgctctccaaggtcgaaggcgtgagcaaggtcgatgtgggct

SEQ ID NO: 24866 - DNA, 75 bp, synthetic construct
  source 1..75: mol_type = other DNA
agttttgtggctggtacatctcccccctggacggctgacacgtgttgtggccgcttcagcccccggaaagtccac

SEQ ID NO: 24867 - DNA, 75 bp, synthetic construct
  source 1..75: mol_type = other DNA
ttgctttaatacatggtgcaggattagataaagatgcatccgttgcaataggtactgcggctggtggttttttag

SEQ ID NO: 24868 - DNA, 75 bp, synthetic construct
  source 1..75: mol_type = other DNA
tcttgaaagatatctggggcgataggaaattcccggttgatccagtatggattgccaatgagttagggttggatg

SEQ ID NO: 24869 - DNA, 75 bp, synthetic construct
  source 1..75: mol_type = other DNA
aagaccagttcgttgacatgacttttatcaccagtctgctgcaaatgacagacaagtggatttataagctcatta

SEQ ID NO: 24870 - DNA, 75 bp, synthetic construct
  source 1..75: mol_type = other DNA
atcttcgcggagattaaggcaatgggttatacgggcggacgttccatgctgcgttactacatccagcccaaacgt

SEQ ID NO: 24871 - DNA, 75 bp, synthetic construct
  source 1..75: mol_type = other DNA
aaaatagtattcgtggaacttataatcatgcgctgtatttagaaaagcgaagagatatgcttcagtggtactctt

SEQ ID NO: 24872 - DNA, 75 bp, synthetic construct
  source 1..75: mol_type = other DNA
actacaaaagagcctattagagctgaacaactggttaaaggaggatgtaatacattttgaggattataacttaga

SEQ ID NO: 24873 - DNA, 75 bp, synthetic construct
  source 1..75: mol_type = other DNA
cctttcagttgatgggcggcaagccggagaacgtcgggtcgctgggtgatattgagaaagtggcaaaggtctttg

SEQ ID NO: 24874 - DNA, 75 bp, synthetic construct
  source 1..75: mol_type = other DNA
aacttaaggtttattgtttacaaagtatggcaacaaccaatccggttttgaggggaaatgagagaaaagaattcc

SEQ ID NO: 24875 - DNA, 75 bp, synthetic construct
  source 1..75: mol_type = other DNA
gaggagcgtaatcgcctgacgctggaagccctggacgatgtgacatccggacagattatcgaccatcaggctgta

SEQ ID NO: 24876 - DNA, 75 bp, synthetic construct
  source 1..75: mol_type = other DNA
atatctggctaaaacagataaacttgacgccgccatgctagcacaactggccctggtcattgatcgccatccgga

SEQ ID NO: 24877 - DNA, 75 bp, synthetic construct
  source 1..75: mol_type = other DNA
ttgcccaacttcagggggggagcgttgttttcatccactataagtctaccgaaccagaggatttggggaaacttc

SEQ ID NO: 24878 - DNA, 75 bp, synthetic construct
  source 1..75: mol_type = other DNA
ttccgctaataaagttaatctcaagtttgaagaagctaaacctgttcttgaagatcaactggcgaaatcagttgc

SEQ ID NO: 24879 - DNA, 75 bp, synthetic construct
  source 1..75: mol_type = other DNA
tgggtattgatgtttctaaaacaactctggacattgctactgctaacaacgagtttgctcagtttactgctggta

SEQ ID NO: 24880 - DNA, 75 bp, synthetic construct
  source 1..75: mol_type = other DNA
tgcaaatgcaggtggaatacctggtgctttagcaggaatactttctacattaaaccaggaaatccaggggaaagt

SEQ ID NO: 24881 - DNA, 75 bp, synthetic construct
  source 1..75: mol_type = other DNA
ataaaacggattcagcagcactgttgccctgtatcgaacaggccagagaggatatccataccctgcgccaactgc

SEQ ID NO: 24882 - DNA, 75 bp, synthetic construct
  source 1..75: mol_type = other DNA
ccaatggtatgaatctggaattgtggttccaacgcttttaccagcatctcaatggggttccagaagtaattgtct

SEQ ID NO: 24883 - DNA, 75 bp, synthetic construct
  source 1..75: mol_type = other DNA
aaaatccttgaacatctccacggtgttattcattacgagcccgtgattggcattatgggtaaatccggcaccggc

SEQ ID NO: 24884 - DNA, 75 bp, synthetic construct
  source 1..75: mol_type = other DNA
tatttatccgttttattgattttcgcggtgaactgttattacgcgcatccgctattgatggagtggctccggcgg

SEQ ID NO: 24885 - DNA, 75 bp, synthetic construct
  source 1..75: mol_type = other DNA
gcgcggaaatcatcccgtaccgcgtggaagccaccatttttctctatccggggccggaagcagagccggtaatgg

SEQ ID NO: 24886 - DNA, 75 bp, synthetic construct
  source 1..75: mol_type = other DNA
tttcttgagcgccatgacaacgtatctttccctgcttattataaattttgcgtttctctggatgcttacctgtat

SEQ ID NO: 24887 - DNA, 75 bp, synthetic construct
  source 1..75: mol_type = other DNA
cagcggcaaaagccagcctgcagaggtacattgccagtcagacgcggcttggtcgggatattcgccgtagcgcca

SEQ ID NO: 24888 - DNA, 75 bp, synthetic construct
  source 1..75: mol_type = other DNA
gatggaaagcgatgaagcgttacgcctgcgtgtgcccgcagcctttgaagggctttcagttgcggggccaactgc

SEQ ID NO: 24889 - DNA, 75 bp, synthetic construct
  source 1..75: mol_type = other DNA
atagcttaggttgtaaagttaaggctattattcactcggatatctcagcgtcatggagactttgtgatatatctt

SEQ ID NO: 24890 - DNA, 75 bp, synthetic construct
  source 1..75: mol_type = other DNA
agatctccgtagcgcaactcgctcgtgagcatgggatcaacgataatttgctgttcaagtggcgccagtactggc

SEQ ID NO: 24891 - DNA, 75 bp, synthetic construct
  source 1..75: mol_type = other DNA
ccgatgcagtcaaagccagaggttatcagatcatgacttccccggataaagcttactactggatccaggctaacg

SEQ ID NO: 24892 - DNA, 75 bp, synthetic construct
  source 1..75: mol_type = other DNA
agttcaggacatacgcaacgttctggccgtctttgctgagcgccgtcaggatcgtaatggtccctatgtcattct

SEQ ID NO: 24893 - DNA, 75 bp, synthetic construct
  source 1..75: mol_type = other DNA
atggtagtgcctgatgaaatggatttgcttacctgccatctcgacggtgtaactaaaacatatgctgatggctgg

SEQ ID NO: 24894 - DNA, 75 bp, synthetic construct
  source 1..75: mol_type = other DNA
tggggcttctggtgctggggcaacggctactcaaaaatcctgcgatgcgcctgcgctgggataaaaccttgctgc

SEQ ID NO: 24895 - DNA, 75 bp, synthetic construct
  source 1..75: mol_type = other DNA
atgtttctgccgggacggctgaatcattgcctgctgtgatgaacgcggtttctgtcatcgctgaggcggtggcca

SEQ ID NO: 24896 - DNA, 75 bp, synthetic construct
  source 1..75: mol_type = other DNA
ttcatcatccagtccacttgtgcccctactaacgacaacctgatggaattagtcgttatggttgatgccctgcgt

SEQ ID NO: 24897 - DNA, 75 bp, synthetic construct
  source 1..75: mol_type = other DNA
ttcgaacggtggagacgcgacgcgttcaggggctggagtttgaagaacaggccagagtcattgaagagttcacgt

SEQ ID NO: 24898 - DNA, 75 bp, synthetic construct
  source 1..75: mol_type = other DNA
agatcagcatggtttcaggggccagcattggcgcattcaatggtgccattatcgcggcctctcccgatctgtcag

SEQ ID NO: 24899 - DNA, 75 bp, synthetic construct
  source 1..75: mol_type = other DNA
cgctggaggttgacggccaggagccggacacctttgcagtggtgagcttccggttaatccagaaccagtcttatc

SEQ ID NO: 24900 - DNA, 75 bp, synthetic construct
  source 1..75: mol_type = other DNA
ggtactgtggctgattaaagccgatgaccgtgccctgtctgtggatgagtatttctggcgacacatcctgcagtg

SEQ ID NO: 24901 - DNA, 75 bp, synthetic construct
  source 1..75: mol_type = other DNA
gggacatcagcgggtactgtttgtggtgacgcaggccgacaaaacggagccctgccatgaatgggatatggccgg

SEQ ID NO: 24902 - DNA, 75 bp, synthetic construct
  source 1..75: mol_type = other DNA
tctgaccggaccgcaactgacagcatgccaccctccgctgccctgagcggtatacgctgcagcacctcacatatc

SEQ ID NO: 24903 - DNA, 75 bp, synthetic construct
  source 1..75: mol_type = other DNA
acgaacacggacgtgtgcgagtgcagtttcactgggacaggtataacccggcaacggaggcgagttcatgctggg

SEQ ID NO: 24904 - DNA, 75 bp, synthetic construct
  source 1..75: mol_type = other DNA
actcgctgtcgcatcagaccagtgacgttggtgaatcagaatggattcatttcacaggtagcggatatctgttac

SEQ ID NO: 24905 - DNA, 75 bp, synthetic construct
  source 1..75: mol_type = other DNA
ggccaaagtcttcagttatatcgaccgtgtcgtgttctggaagctggctcactggctggcccgcaaataccgtac

SEQ ID NO: 24906 - DNA, 75 bp, synthetic construct
  source 1..75: mol_type = other DNA
tttaccttgaaaatatccataaacaagaatcataccctgccagtgagagggataattatctgttaggcttattaa

SEQ ID NO: 24907 - DNA, 75 bp, synthetic construct
  source 1..75: mol_type = other DNA
tgagagctgggtacgtcagctcaggcgagagcgccaaggtattgcgccctctgcaacacccattacccctgaaca

SEQ ID NO: 24908 - DNA, 75 bp, synthetic construct
  source 1..75: mol_type = other DNA
agtcttatgtatcttcggcattaacgacgacattatttggctccggcgttggtgagcgggaagttggtaagctga

SEQ ID NO: 24909 - DNA, 75 bp, synthetic construct
  source 1..75: mol_type = other DNA
gctttctgtcagcattgaagaaagccttcaacggtggtgatgttacgcccgccgatccggtcgtttttacgagcg

SEQ ID NO: 24910 - DNA, 75 bp, synthetic construct
  source 1..75: mol_type = other DNA
tacataccgtacgggatccgtgtgatgacctggtttgagtttctgcacggtttctgttttcgccctttcctgcag

SEQ ID NO: 24911 - DNA, 75 bp, synthetic construct
  source 1..75: mol_type = other DNA
gccaccacagttgaagaacagcgccagtcacggcgctacgcgccatgcccggcgcacataaaaaaatccggaaac

SEQ ID NO: 24912 - DNA, 75 bp, synthetic construct
  source 1..75: mol_type = other DNA
ccgccccggaagccgccagcccggtgcagatgtaccgcgcgacctactcaccggatgacaacaaactgcgcctgt

SEQ ID NO: 24913 - DNA, 75 bp, synthetic construct
  source 1..75: mol_type = other DNA
gcggctacccgaaggtaatccctatctgaggacggagaccagaaacacgtatacatcgcgctttacagaagtggc

SEQ ID NO: 24914 - DNA, 75 bp, synthetic construct
  source 1..75: mol_type = other DNA
ccgaacaaaccccggcactatgaacgttatctgcagcgtatgaaggaaaggaggaaggaatgggggattctgtga

SEQ ID NO: 24915 - DNA, 75 bp, synthetic construct
  source 1..75: mol_type = other DNA
cggaagcaggatgctgggctcatgcacggcgcaaaatccacgatgtatatatcagtaccaaaagcgcgacggcgg

SEQ ID NO: 24916 - DNA, 75 bp, synthetic construct
  source 1..75: mol_type = other DNA
acatgcaaacaggcgctaaagttttgccgcaggcggcgctacgcgtttagcaacgccctggacgatttgatcgtt

SEQ ID NO: 24917 - DNA, 75 bp, synthetic construct
  source 1..75: mol_type = other DNA
catattacgcgatcagatatttactcatccgtcgatgagcgaatcactcaatgatctattttcattagtcaaata

SEQ ID NO: 24918 - DNA, 75 bp, synthetic construct
  source 1..75: mol_type = other DNA
ggggtattaaaagcgattgttgataataaaacccaacgtatattaggggcatcactgctgtgtgttgactcccac

SEQ ID NO: 24919 - DNA, 75 bp, synthetic construct
  source 1..75: mol_type = other DNA
gccgatgcaccgccggaggcaatttcgggttacgtggtttgccggactgccacgctgaacgggtgggagcatgtg

SEQ ID NO: 24920 - DNA, 75 bp, synthetic construct
  source 1..75: mol_type = other DNA
gacaatgaaagagatacatcttaacagtgacgaacaacatttatttggcagagctgcattgatggccaggtacga

SEQ ID NO: 24921 - DNA, 75 bp, synthetic construct
  source 1..75: mol_type = other DNA
gtgaatacctacagcatcacattaccctggcctccgagcaataatcgctattaccgccataatcgcgggcgcacg

SEQ ID NO: 24922 - DNA, 75 bp, synthetic construct
  source 1..75: mol_type = other DNA
gaagttatttcttacagcctttcggaaagaccagtgatgaacatggttgagaatatgctcgatcaggcattcaaa

SEQ ID NO: 24923 - DNA, 75 bp, synthetic construct
  source 1..75: mol_type = other DNA
gtgacacatgtggtgaagtgttgatgcatatcaaccacccgcaggcacttacactacttatccatgcaagcgagc

SEQ ID NO: 24924 - DNA, 75 bp, synthetic construct
  source 1..75: mol_type = other DNA
atgaaactggcaccgaacgtaaaaaaacagccacgcggaataaaacacaaagacacagaggtaattattttcgcg

SEQ ID NO: 24925 - DNA, 75 bp, synthetic construct
  source 1..75: mol_type = other DNA
atctgttctgaatgtgctgtggaactggattctgttccgtaaattttcctctccggaacaagtcgaaaatgtggc

SEQ ID NO: 24926 - DNA, 75 bp, synthetic construct
  source 1..75: mol_type = other DNA
gttatttgccagacagcatatggcatggattatcccacttattattgggatgattatatttattattgctcctta

SEQ ID NO: 24927 - DNA, 75 bp, synthetic construct
  source 1..75: mol_type = other DNA
gggcgcacgcgtggcgtatgactttggcccgcagatggcagatctgaacctggcattcggtgtgaaaaacatctt

SEQ ID NO: 24928 - DNA, 75 bp, synthetic construct
  source 1..75: mol_type = other DNA
aaagaaattggcgctgacagttcaggacggccagtatggattaattccccacccccttcaaaagaggatgaggtg

SEQ ID NO: 24929 - DNA, 75 bp, synthetic construct
  source 1..75: mol_type = other DNA
ggcttcagcgggtataacgagctggagtcactgttgcgtgagcgggggtacgtcatcagcaaatccgctatccat

SEQ ID NO: 24930 - DNA, 75 bp, synthetic construct
  source 1..75: mol_type = other DNA
ttgtcaaaaagcgaaccgccaaaccccaccggccaaagcactaccgtctggtaaagaccggtgagctcattggga

SEQ ID NO: 24931 - DNA, 75 bp, synthetic construct
  source 1..75: mol_type = other DNA
gccgctgccgccgagaaaattgcccgtaagggcgggctctctgcggaagccgtacaggcactgcgccgggaaatt

SEQ ID NO: 24932 - DNA, 75 bp, synthetic construct
  source 1..75: mol_type = other DNA
cctgatgatcaccttgtcacagtctggcgaaaccgcggataccctggcgggcctgcgtctgtcgaaagagctggg

SEQ ID NO: 24933 - DNA, 75 bp, synthetic construct
  source 1..75: mol_type = other DNA
gggctgaaatcctgatactccggcagtgtgcgggaacgatgagagtcgaaagcatcggttatctgattggccgta

SEQ ID NO: 24934 - DNA, 75 bp, synthetic construct
  source 1..75: mol_type = other DNA
gaaatcgttctggttacgcactcgtccaagaatgcggttgaaaaccacttcgacacctcttacgaactcgaagcg

SEQ ID NO: 24935 - DNA, 75 bp, synthetic construct
  source 1..75: mol_type = other DNA
ggttttgctcatctggttttatatggcttacaggagtggacagtggattgtcagtgtagcctgtagcaagggatg

SEQ ID NO: 24936 - DNA, 75 bp, synthetic construct
  source 1..75: mol_type = other DNA
atcgtgaaggtaaagtcagccgcattgttgaatttatcgaaaaaccggatcagccgcagacgctggactcagaca

SEQ ID NO: 24937 - DNA, 75 bp, synthetic construct
  source 1..75: mol_type = other DNA
gtagtgctgtcagaaccaaagcgcggcaactgcggatctgcatgattctgaaaggagactttcacccgtcagcca

SEQ ID NO: 24938 - DNA, 75 bp, synthetic construct
  source 1..75: mol_type = other DNA
gattttcaccagtcagcaaaatatccgcagcgcgatatcgagctggtgcggcatcttcatcagtgcggtatgtcc

SEQ ID NO: 24939 - DNA, 75 bp, synthetic construct
  source 1..75: mol_type = other DNA
ctacagcatcgtgttcctttatcccggcaggctatttacattctggaaaatatacgtggcctgcatgatgaactg

SEQ ID NO: 24940 - DNA, 75 bp, synthetic construct
  source 1..75: mol_type = other DNA
cgaaaaaaatgacggaagcgcataagcagcttctggccctgcagcagcgtatcagtgatttagccggtaaaaagc

SEQ ID NO: 24941 - DNA, 75 bp, synthetic construct
  source 1..75: mol_type = other DNA
tcaccctggctaaccgtgccggctggattgataaattaatgactccgaaaggcctggcggtggggggagttatcg

SEQ ID NO: 24942 - DNA, 75 bp, synthetic construct
  source 1..75: mol_type = other DNA
gcgtattgctccgacattccaggaggtggatgttcttattaccatgcttgcaaggagtgctgtcggggccagact

SEQ ID NO: 24943 - DNA, 75 bp, synthetic construct
  source 1..75: mol_type = other DNA
atgactgaacgcatagaatttgttttgccttacccgccgacggtgaatacctactggcgacgtcatggcaatacg

SEQ ID NO: 24944 - DNA, 75 bp, synthetic construct
  source 1..75: mol_type = other DNA
atggccgaaattaactttcaggtactgcgggaaaatgatgcgggtgaattgacaggagtggcgacagctggcaga

SEQ ID NO: 24945 - DNA, 75 bp, synthetic construct
  source 1..75: mol_type = other DNA
aagcgtatgcggcagagcgtctggcaaaaatccgccgtcagaaccggagaaaagctgaacttcgggctgtgcttg

SEQ ID NO: 24946 - DNA, 75 bp, synthetic construct
  source 1..75: mol_type = other DNA
agccggggacgttccgcatcgttgttggcgtgcttgagcagggtattaccgaggaaatgtatcaggagctggagc

SEQ ID NO: 24947 - DNA, 75 bp, synthetic construct
  source 1..75: mol_type = other DNA
aaagaacttcgttatgcaaaccgtatgtcctgtttctacttcaaaaaaaatgccatatttgtaatgtcgttcccc

SEQ ID NO: 24948 - DNA, 75 bp, synthetic construct
  source 1..75: mol_type = other DNA
tgccgaccgcattcaggagatccacattaaagtgatccatatcctgatccagttaattgaaaaagagatggttaa

SEQ ID NO: 24949 - DNA, 75 bp, synthetic construct
  source 1..75: mol_type = other DNA
gggcagaaaatcgtggctgttcgccggttcgcagatggcgggagaacgcgccgcgcaaataatgagcttgctgga

SEQ ID NO: 24950 - DNA, 75 bp, synthetic construct
  source 1..75: mol_type = other DNA
tgaaacagaaagcggcccctctcagggtatttgatgaacgttttggcaccagaccgttagatgccataaccgtaa

SEQ ID NO: 24951 - DNA, 75 bp, synthetic construct
  source 1..75: mol_type = other DNA
agcctgacgcacacggctggcgggagttggagggtgagaccgcgaaatctgagcgggtgaacgaccggaaaatca

SEQ ID NO: 24952 - DNA, 75 bp, synthetic construct
  source 1..75: mol_type = other DNA
gatattatccgcagctcggttatctccatcaccgacgatcagcgtttgcaggtgttactgattggtttctccttt

SEQ ID NO: 24953 - DNA, 75 bp, synthetic construct
  source 1..75: mol_type = other DNA
atgcgccgccagcttgagtacaagcagctctggcgtggcggtcaggtgcttgctgttccgccagcgtacacaagc

SEQ ID NO: 24954 - DNA, 75 bp, synthetic construct
  source 1..75: mol_type = other DNA
gattacgatccttattctaccgggttacaccaacaaacggcattgacagaaaaatttgggattttgactataaca

SEQ ID NO: 24955 - DNA, 75 bp, synthetic construct
  source 1..75: mol_type = other DNA
cactccagaagccatcaaaggatatgaagaggccgataaagagctggagatggtcgaaatgttatacgaaatgag

SEQ ID NO: 24956 - DNA, 75 bp, synthetic construct
  source 1..75: mol_type = other DNA
acgctggtcggcggttgtattgggctaattttgtatttgctgtcgcagctcccggccttattccccctcagcaat

SEQ ID NO: 24957 - DNA, 75 bp, synthetic construct
  source 1..75: mol_type = other DNA
ctggccgccgtggacgtcagcccgatcggtattgccgacgataacgatgcaaaacgcatcctgcccgaagtgcgt

SEQ ID NO: 24958 - DNA, 75 bp, synthetic construct
  source 1..75: mol_type = other DNA
tgcttacggatgcgctgaaacagctgtcgaaagatgaacaccccatactgcacagcgatcaaggttggcaatatc

SEQ ID NO: 24959 - DNA, 75 bp, synthetic construct
  source 1..75: mol_type = other DNA
tagacagtgacagctatcagttacttaaatccgcaaacgtgaatatctcaggcctggtaaatacggccatgcaaa

SEQ ID NO: 24960 - DNA, 75 bp, synthetic construct
  source 1..75: mol_type = other DNA
gcaggaaaaatttctcgatacccaatcgctggtggcattgattcgacgtcacgaaccggcgttgttgattggcaa

SEQ ID NO: 24961 - DNA, 75 bp, synthetic construct
  source 1..75: mol_type = other DNA
ctggacactgacactgcgtttacccgcaagttactgcggctcctattcgctgctggaaatcccccccggcactac

SEQ ID NO: 24962 - DNA, 75 bp, synthetic construct
  source 1..75: mol_type = other DNA
gcgcactgcgccgggccattgagccgctgggatacctcattcgcgtgtctgagtggtgggaattcggcggagaac

SEQ ID NO: 24963 - DNA, 75 bp, synthetic construct
  source 1..75: mol_type = other DNA
gatggagtccatccgactcaggccactaaaatcagctatggctggatacgcaaaggccagaaaaaagcagtaaaa

SEQ ID NO: 24964 - DNA, 75 bp, synthetic construct
  source 1..75: mol_type = other DNA
aagtagacagaattcagtgtaatgacacaggaaaacgcatctacgaaacacttgcttacctctataaaggaaagc

SEQ ID NO: 24965 - DNA, 75 bp, synthetic construct
  source 1..75: mol_type = other DNA
tgacaggaaaatgcagtaaacatttgtgttggccggaaggttattataacaaggattatattcagatcgctgaag

SEQ ID NO: 24966 - DNA, 75 bp, synthetic construct
  source 1..75: mol_type = other DNA
tgaaacaattgaaaagcatcttgcgtggcttgacgggatccttaaaaacctgccgggacagatctccctttctga

SEQ ID NO: 24967 - DNA, 75 bp, synthetic construct
  source 1..75: mol_type = other DNA
cctcttatgcccgtgtaggcgtgaaaggtgaaactcagatcaaccctgaactgactggttacggtcagtttgaac

SEQ ID NO: 24968 - DNA, 75 bp, synthetic construct
  source 1..75: mol_type = other DNA
gaatatgactgcgtaatgccgcgccgtcagtttgagcgtgattttattctggtggaaaacaaacaacaggcagtg

SEQ ID NO: 24969 - DNA, 75 bp, synthetic construct
  source 1..75: mol_type = other DNA
ggcgctggaagcgtgttctgtggatttggttgcgctccgtcaggaactggaagcctttattgaacaaaccacacc

SEQ ID NO: 24970 - DNA, 75 bp, synthetic construct
  source 1..75: mol_type = other DNA
ccgcaatgccctggaggcagttaccgctttttgtggcgaccagtgtgtataccgatgaaccttataatgttaccc

SEQ ID NO: 24971 - DNA, 75 bp, synthetic construct
  source 1..75: mol_type = other DNA
cgccctcctgtcgctggaagaccaccagaaatcctggttgctgtggaactacagcgacaatatccgctttgagta

SEQ ID NO: 24972 - DNA, 75 bp, synthetic construct
  source 1..75: mol_type = other DNA
acagaacgcaacacgcggtaagcccaccagcagggaaaaagcacgggaaaatattaagaaaataaaaagcatgct

SEQ ID NO: 24973 - DNA, 75 bp, synthetic construct
  source 1..75: mol_type = other DNA
tgatgtggttgaagtcgggagcaccgaaaacacggcggatgataccgacgctgcgccgaaaaaacggagtaaatc

SEQ ID NO: 24974 - DNA, 75 bp, synthetic construct
  source 1..75: mol_type = other DNA
atcagcctggaatgtaaacattattcgctgaccagcgatgcgccatcggggaaggaaggtgccgcattcatggcg

SEQ ID NO: 24975 - DNA, 75 bp, synthetic construct
  source 1..75: mol_type = other DNA
cgacgagggtggctatgtggactgtgttgcgctcgatgctgccctgctggaaaaactccaggctgtcgctgaaca

SEQ ID NO: 24976 - DNA, 75 bp, synthetic construct
  source 1..75: mol_type = other DNA
cggtattacccgttacgtcaccgaaatccttgttaaaaccacgggcaccatgcagatgctggggagtgcaccaca

SEQ ID NO: 24977 - DNA, 75 bp, synthetic construct
  source 1..75: mol_type = other DNA
aagaacgcctgaacgaactgatgacgcgttacgacgcgctggaaaaccagtgtgaggaatccgacctgctggaag

SEQ ID NO: 24978 - DNA, 75 bp, synthetic construct
  source 1..75: mol_type = other DNA
ggcaaatctgctgccgtggctggcgtggtcattttcggttgaccgctgggatgataagtggccggaagcgacaaa

SEQ ID NO: 24979 - DNA, 75 bp, synthetic construct
  source 1..75: mol_type = other DNA
gtacagaaaaggaaatatgggagcaaaagcaaaaagcactggagtcaaaattgcataaagaaattcgcgccggta

SEQ ID NO: 24980 - DNA, 75 bp, synthetic construct
  source 1..75: mol_type = other DNA
tcgcggaagccggtctggcagcaaaggaggccggtcacgctgtccgtgagatggagcggtggatggtgccgaaca

SEQ ID NO: 24981 - DNA, 75 bp, synthetic construct
  source 1..75: mol_type = other DNA
gtggcaaacctgcaggtcgccacgtcggaaacctggcgtgacaaacagacaggggagatgcgggagcagacagaa

SEQ ID NO: 24982 - DNA, 75 bp, synthetic construct
  source 1..75: mol_type = other DNA
caccaccgagcactgtcaggcgctggcgctggagaacgacaccgcgcgtcaggtgcaggtgtttgaagccgcctg

SEQ ID NO: 24983 - DNA, 75 bp, synthetic construct
  source 1..75: mol_type = other DNA
acgggacatgacgacattcctgtcactcagtcaggaggtgctgttatccctgctcagtttctgcaccgcatgcag

SEQ ID NO: 24984 - DNA, 75 bp, synthetic construct
  source 1..75: mol_type = other DNA
gggaggcagagcagaaagcccgtgcgtaccaggcgctggttgctcaggctgaaatcgaactggcattccattcac

SEQ ID NO: 24985 - DNA, 75 bp, synthetic construct
  source 1..75: mol_type = other DNA
tgctgattgaaacacagggcgaggtctgcctccttccccttcccggcgatgcagcagaacgcttgttcccgtcgg

SEQ ID NO: 24986 - DNA, 75 bp, synthetic construct
  source 1..75: mol_type = other DNA
tccggccacgctgcgcggcatggtgaacaatgacctgaaggccacggctgaagcggtgctggcactggtgaagga

SEQ ID NO: 24987 - DNA, 75 bp, synthetic construct
  source 1..75: mol_type = other DNA
acggttggggcacttactttgaagatcctaacggcgaagacggcgacgatgaagattttgtcgatgaagacgatg

SEQ ID NO: 24988 - DNA, 75 bp, synthetic construct
  source 1..75: mol_type = other DNA
caaattttcgtacccctgggctagaggagtgcagaaaaattgtttccacccttaatcggcttggtgctcattgtg

SEQ ID NO: 24989 - DNA, 75 bp, synthetic construct
  source 1..75: mol_type = other DNA
tgaatatttctttagcgccccagaactttttgctcctcgtttcccttcattgtggcaacgtttctgccaatttta

SEQ ID NO: 24990 - DNA, 75 bp, synthetic construct
  source 1..75: mol_type = other DNA
ctggtgcgccgcacttgctgccagcgttatcgcttaccggatgtgcagcaatgtggcgattgtacgctgaaatga

SEQ ID NO: 24991 - DNA, 75 bp, synthetic construct
  source 1..75: mol_type = other DNA
gtagtgcggagcatccggtcttttatgaagatgaagtgtatatctatcttaatcccaaaaccggtgcggactggc

SEQ ID NO: 24992 - DNA, 75 bp, synthetic construct
  source 1..75: mol_type = other DNA
aaaaattaatgagtgttagagaaaacgatgatggcactgtcacaaaatactacacagacggaagtgaagagcagg

SEQ ID NO: 24993 - DNA, 75 bp, synthetic construct
  source 1..75: mol_type = other DNA
acaaagctgatggcgtggatgccatcgctctgggtaatggtagccagtcgagaggcttaaacaccattgccttag

SEQ ID NO: 24994 - DNA, 75 bp, synthetic construct
  source 1..75: mol_type = other DNA
atgaataaaatatttaaagttatctggaatccggcaacaggcagttacaccgttgccagcgaaacggcgaagagc

SEQ ID NO: 24995 - DNA, 75 bp, synthetic construct
  source 1..75: mol_type = other DNA
gacggtaatggatgaaacgaacaagaaagcgccattaaacagccctgcactgaccggaacgccaacgacgccaac

SEQ ID NO: 24996 - DNA, 75 bp, synthetic construct
  source 1..75: mol_type = other DNA
gccggacaatccggtggcggaaaatctgttccggtgaaagaactaatcgacagaattattcagaaatataaggaa

SEQ ID NO: 24997 - DNA, 75 bp, synthetic construct
  source 1..75: mol_type = other DNA
cttttttttggcgcccgccgggtattaacagaaaaatcagagtggtgtgtcgaacgtggtcagcgacagaacata

SEQ ID NO: 24998 - DNA, 75 bp, synthetic construct
  source 1..75: mol_type = other DNA
gatcttgaagccacgggcccgtcccaccccgacatggacctcgatgcccgaacggacgttagatttcgagttcta

SEQ ID NO: 24999 - DNA, 75 bp, synthetic construct
  source 1..75: mol_type = other DNA
atgtatcaccttcgggttccacaaacagaagaagaattagagcgttactatcagtttcgctgggaaatgttgcgt

SEQ ID NO: 25000 - DNA, 75 bp, synthetic construct
  source 1..75: mol_type = other DNA
gtagaagacaccgctgcgcgcctgcaaagcaagggaattagcgcggcggcctatcatgccgggctggaaaataat

SEQ ID NO: 25001 - DNA, 75 bp, synthetic construct
  source 1..75: mol_type = other DNA
ctgacccgccagacgcgccgctttcgcctggttgtgaaggaaagcgatcacccctgctggctcgatgaagacgac

SEQ ID NO: 25002 - DNA, 75 bp, synthetic construct
  source 1..75: mol_type = other DNA
agattgttgatgaaatctgcgattttgtgacgaatcagcaggcggttttcctcggtggtcactatatccttcagg

SEQ ID NO: 25003 - DNA, 75 bp, synthetic construct
  source 1..75: mol_type = other DNA
gtctttggcctgaccgcccttaccttaatcttcacattgttaagcggtatctatatctaccgccacatgccgcag

SEQ ID NO: 25004 - DNA, 75 bp, synthetic construct
  source 1..75: mol_type = other DNA
catatgaggaaaggcaatatgggcaaaatggacaagatggacaagatgaaaaaggatgatatgggtaaaaaagac

SEQ ID NO: 25005 - DNA, 75 bp, synthetic construct
  source 1..75: mol_type = other DNA
ggcacggcaccgcccggtgccgcagaacatgtgactatggaggattcgggaatgtctgttgttgcacctgctgta

SEQ ID NO: 25006 - DNA, 75 bp, synthetic construct
  source 1..75: mol_type = other DNA
atgaaggctgcgaagaggcttatcgtctctgggtggatgataccggtgagacggattttgacaccttccgcgatg

SEQ ID NO: 25007 - DNA, 75 bp, synthetic construct
  source 1..75: mol_type = other DNA
aaatcacattaaagttatcaacgttcgtggggacagtatgtgtccaaccattgagccaggagatctcatcttcgt

SEQ ID NO: 25008 - DNA, 75 bp, synthetic construct
  source 1..75: mol_type = other DNA
ggtcaggggcacctgtcacacccttgaaggacagaatcaggccggaaaacgtctgtggatagcggagggatacgc

SEQ ID NO: 25009 - DNA, 75 bp, synthetic construct
  source 1..75: mol_type = other DNA
ggcagccgtgcattctggcctttgacctggcgcgtaagctggatatgaacagcatggcgcgactttatacccgcg

SEQ ID NO: 25010 - DNA, 75 bp, synthetic construct
  source 1..75: mol_type = other DNA
gtgatcggcttccgcaatgttgatatggcggaactgcttatccacaccctgactgagcgcgtagctataactgaa

SEQ ID NO: 25011 - DNA, 75 bp, synthetic construct
  source 1..75: mol_type = other DNA
gtgcggatggcgatatggaaggtattccggtggcgctaatggaagcgatggcggtcggcattccggtggtttcta

SEQ ID NO: 25012 - DNA, 75 bp, synthetic construct
  source 1..75: mol_type = other DNA
atgcctccttctgctactgattcggtgcaggaggcaatgaatgatgtgcgtcttaaaatgaaaaaattattctga

SEQ ID NO: 25013 - DNA, 75 bp, synthetic construct
  source 1..75: mol_type = other DNA
tcaattatccgggccatgatggaaggcggcacagcaaaaatttatcactgcaacgattctgataaatgcctgaaa

SEQ ID NO: 25014 - DNA, 75 bp, synthetic construct
  source 1..75: mol_type = other DNA
tgtgccggttataaccaggacccggtgaaatttatttccagagcaggcgtacccggtatcggtgcttcatttttc

SEQ ID NO: 25015 - DNA, 75 bp, synthetic construct
  source 1..75: mol_type = other DNA
atgcttcgcattaaacctcttctggttctttgtgccgctttactgacggtcacacccgcagcgtcagcggatgtg

SEQ ID NO: 25016 - DNA, 75 bp, synthetic construct
  source 1..75: mol_type = other DNA
gaattgacgtcccgtataacggatatgaaataaaaacaatcacacatccacacttcggtgataaaccggtaaagg

SEQ ID NO: 25017 - DNA, 75 bp, synthetic construct
  source 1..75: mol_type = other DNA
tttcagctaccactcctggtttgcgatgcttttttcggcagggatggggatcggcctgatgttctttggcgttgc

SEQ ID NO: 25018 - DNA, 75 bp, synthetic construct
  source 1..75: mol_type = other DNA
tttttagtcatgctggttgccattttcttttccaccgcctggcgagtcctgacgttatcgggactggtggggtga

SEQ ID NO: 25019 - DNA, 75 bp, synthetic construct
  source 1..75: mol_type = other DNA
gcaggtgaatgccggtttgaaccatcttttcggggtgcccatcaatgaaacggtgcaggtaattctgatcgtggt

SEQ ID NO: 25020 - DNA, 75 bp, synthetic construct
  source 1..75: mol_type = other DNA
catcacggggttagcgacgatttcggtggtgtccggcctggacaagggaatacgcatcctgtctgagcttaatct

SEQ ID NO: 25021 - DNA, 75 bp, synthetic construct
  source 1..75: mol_type = other DNA
catcacggggttagcgacgatttcagtggtgtccggtctggataagggaatacgtatcctgtctgaactcaatct

SEQ ID NO: 25022 - DNA, 75 bp, synthetic construct
  source 1..75: mol_type = other DNA
acaaaaactgaagttgataataagctgaaaaacaaagtggaagtgaacgatctggaaagtggtcgttatggcgga

SEQ ID NO: 25023 - DNA, 75 bp, synthetic construct
  source 1..75: mol_type = other DNA
ctgctgagaatggacagcgaacggcgcatgaaaacgctgggtgagtcggtgaaaaatacgcttctcacgcccaat

SEQ ID NO: 25024 - DNA, 75 bp, synthetic construct
  source 1..75: mol_type = other DNA
cctctgtcgtcgtcccaacgcccagcagaaccgcatccagttttttgaactgtggctgaacgccaaactgcgtca

SEQ ID NO: 25025 - DNA, 75 bp, synthetic construct
  source 1..75: mol_type = other DNA
tcatgtctccggaaacccgaagtttgaatatgccagtatggttgacgatatcagagagaaagtgtctgttgagat

SEQ ID NO: 25026 - DNA, 75 bp, synthetic construct
  source 1..75: mol_type = other DNA
atatcagctaacaaagaattttgatgttatctggttatggtccgaagacggtaaaaactggtatgaggaagtaaa

SEQ ID NO: 25027 - DNA, 75 bp, synthetic construct
  source 1..75: mol_type = other DNA
cagttgcaggctctaaaaggtgttggtcagctaattgcaataaccctggttgctgaactgggtgatttttcgcga

SEQ ID NO: 25028 - DNA, 75 bp, synthetic construct
  source 1..75: mol_type = other DNA
cgtctggcattgcacctgactacttggagcaatattccagatttgaattacgcctacgtaaacatttatcactgg

SEQ ID NO: 25029 - DNA, 75 bp, synthetic construct
  source 1..75: mol_type = other DNA
gagctaccctgacgctcggcagtacaacgctcagcaacagtggctccctgctcagtggcggtcccctgaccgtga

SEQ ID NO: 25030 - DNA, 75 bp, synthetic construct
  source 1..75: mol_type = other DNA
ccatgctcagtgcacagcacctgaaccagacttccggggccgtgaatgcagctgaaaatgtcacccttaccacca

SEQ ID NO: 25031 - DNA, 75 bp, synthetic construct
  source 1..75: mol_type = other DNA
actactaaatgtcctgagtcagcgttatgtggggcgagggatgagtaagagaaggatggccgagttattaaacga

SEQ ID NO: 25032 - DNA, 75 bp, synthetic construct
  source 1..75: mol_type = other DNA
cacgctggaaagtgtctggattcaggggaaactacgtatgtgggggcgctggtcgtatattggcggcggtaagac

SEQ ID NO: 25033 - DNA, 75 bp, synthetic construct
  source 1..75: mol_type = other DNA
gtgtcaaaaaaaataacacaaacagctatcaatgaagccttgcgcaaaatgaaaaaagcggggattgataaacct

SEQ ID NO: 25034 - DNA, 75 bp, synthetic construct
  source 1..75: mol_type = other DNA
tcgatggcatctgtgattgcgatggccggtgatacggtcattatgccggaaaatgccttcatgatgatccataag

SEQ ID NO: 25035 - DNA, 75 bp, synthetic construct
  source 1..75: mol_type = other DNA
cctgacttaggaataagttggccagaatatagctatataatttccgataaagataagaatggaatttccttcgct

SEQ ID NO: 25036 - DNA, 75 bp, synthetic construct
  source 1..75: mol_type = other DNA
cccttcttataagtgttggttcggaattttattatcgtctgataataaaaaacagttatggattccagagggatg

SEQ ID NO: 25037 - DNA, 75 bp, synthetic construct
  source 1..75: mol_type = other DNA
gagacggcagagtttttgtataagacgacgaattactatgcaccgatatatgaaaaaagtattctttggtctgat

SEQ ID NO: 25038 - DNA, 75 bp, synthetic construct
  source 1..75: mol_type = other DNA
gaatatttagctattaattggaaagaaaaaaaagcgataatctctgagaaagacatgaaacaaccatcattcaga

SEQ ID NO: 25039 - DNA, 75 bp, synthetic construct
  source 1..75: mol_type = other DNA
aagatgctatagtgattacacctgaagtatttgctgattctagggggtatttttttgaaagctttaattatcggg

SEQ ID NO: 25040 - DNA, 75 bp, synthetic construct
  source 1..75: mol_type = other DNA
ctcttgcttaatattaaatggccgagcacagcactgatcactctgtctgataaggatgcaaatggggaaagattt

SEQ ID NO: 25041 - DNA, 75 bp, synthetic construct
  source 1..75: mol_type = other DNA
ctgatgtgctgatttttgaaccaaaagtttttggggatgaacgtggcttcttttttgagagttttaatcagagga

SEQ ID NO: 25042 - DNA, 75 bp, synthetic construct
  source 1..75: mol_type = other DNA
atttttacgatccaaaggatgaaggtgggattatctggaatgatccggatattgcgattgactggccggtaacag

SEQ ID NO: 25043 - DNA, 75 bp, synthetic construct
  source 1..75: mol_type = other DNA
aagatgctgttattatcgagcctaaaatttttggtgacgaacgaggctatttttttgaagtctatcagaaaaaac

SEQ ID NO: 25044 - DNA, 75 bp, synthetic construct
  source 1..75: mol_type = other DNA
aagatgtaaaaatcattaaaccaattattcatgaagatgaaagaggattttttatggagagttggaatcagaaag

SEQ ID NO: 25045 - DNA, 75 bp, synthetic construct
  source 1..75: mol_type = other DNA
agcaagcgcgcaggagtagctaaaggcacggtatataactacttcccaacaaaggaattattgtttgaagcggtt

SEQ ID NO: 25046 - DNA, 75 bp, synthetic construct
  source 1..75: mol_type = other DNA
gcgcgtcctctgctcggctttaccggtgaggatgtgcagatgattgaagagattatcctggctcaccttgagcgt

SEQ ID NO: 25047 - DNA, 75 bp, synthetic construct
  source 1..75: mol_type = other DNA
cgttaacgggcgcgcctatctggtcgggctggcgatgaccgacaccccggcaagcctgggcactgagcgcctgaa

SEQ ID NO: 25048 - DNA, 75 bp, synthetic construct
  source 1..75: mol_type = other DNA
tgttactctgggatgatgtcataaccttattccatgaatttggtcatacgctgcacggcctttttgcccgccagc

SEQ ID NO: 25049 - DNA, 75 bp, synthetic construct
  source 1..75: mol_type = other DNA
ctcgatagagaatctgtgatttgcaccgtgaaaataagagcgcaacaaaaagcgattttttcacgacgagatatt

SEQ ID NO: 25050 - DNA, 75 bp, synthetic construct
  source 1..75: mol_type = other DNA
ctggacagggatgctcttatttcagtaatgcgggtacgttcacggaaaaagtcgcttaatttagaaccatatctt

SEQ ID NO: 25051 - DNA, 75 bp, synthetic construct
  source 1..75: mol_type = other DNA
ataaaacggattcagcagcactgctgccctgcattgaacaggcccggcaggatgtccgtaccctgcgtcatctgc

SEQ ID NO: 25052 - DNA, 75 bp, synthetic construct
  source 1..75: mol_type = other DNA
cccggcaggcggcagaaagtgcagcctcagcaaagcagtcagaggaggcgtcctcgtcctcggcctctgcggccg

SEQ ID NO: 25053 - DNA, 75 bp, synthetic construct
  source 1..75: mol_type = other DNA
ctcagctgcggcaggctcaaaaacagcggctgcgtcgtctgccagtgcagcgtcaacaagtgccgggcaggcctc

SEQ ID NO: 25054 - DNA, 75 bp, synthetic construct
  source 1..75: mol_type = other DNA
gggcctcccgggccaaagggggaaccggggcccgcgggtcctcaggggccgaagggagataaaggagagcgtgga

SEQ ID NO: 25055 - DNA, 75 bp, synthetic construct
  source 1..75: mol_type = other DNA
taaacgaaatctggataaggatgataacaaaattatcgtcaccactattcagaaactcaataacctgatgaaagc

SEQ ID NO: 25056 - DNA, 75 bp, synthetic construct
  source 1..75: mol_type = other DNA
atctcggcgggaggatacagacgaacctggaagaaatcagggtacaggaagagacattgcggaaactgaacgcga

SEQ ID NO: 25057 - DNA, 75 bp, synthetic construct
  source 1..75: mol_type = other DNA
atgagttcaacgcagaaacccgccgacgtcacggcagaacgacgcagccactggtggtggacggtgccaggttgt

SEQ ID NO: 25058 - DNA, 75 bp, synthetic construct
  source 1..75: mol_type = other DNA
acgggcagtgatgcctttaagcaaaaagcgatgcagttgatcatcgagcacaacatcaaagtgcgcatgaaattc

SEQ ID NO: 25059 - DNA, 75 bp, synthetic construct
  source 1..75: mol_type = other DNA
ttttcagcatgtcatcaacgcccagttagaacacatcggggtttccacccccaacagtaacaccccggaaatccg

SEQ ID NO: 25060 - DNA, 75 bp, synthetic construct
  source 1..75: mol_type = other DNA
aactggaaagtctggtcaaaaaccatcagaaaggtgacgtggtgacactgacacttcagaaccgcgaacaattca

SEQ ID NO: 25061 - DNA, 75 bp, synthetic construct
  source 1..75: mol_type = other DNA
gggtaaaagcgccagcggtaaaccactaccggtgatcactatcacacgcaaggacggcgacagtcaccgctttac

SEQ ID NO: 25062 - DNA, 75 bp, synthetic construct
  source 1..75: mol_type = other DNA
gctggtctgtggggttgactggcaacaggtgaaagggcatgacctggcaaaatgggtataccaggaagaacccga

SEQ ID NO: 25063 - DNA, 75 bp, synthetic construct
  source 1..75: mol_type = other DNA
aaagtggcgcatatcgcggcttcctggacggcagacctgccggctggtacagggattatcgcagcgcggatgatt

SEQ ID NO: 25064 - DNA, 75 bp, synthetic construct
  source 1..75: mol_type = other DNA
atgaatatcagcacagaaacccgcgaaattctgcgcaattacaaagccgtgattaatgcgcggcgtcgtgagatg

SEQ ID NO: 25065 - DNA, 75 bp, synthetic construct
  source 1..75: mol_type = other DNA
agattgttgatgaaatctgcgattttgtggcgaatcagcaggcggttttcctgggcggtcagtacatccttcagg

SEQ ID NO: 25066 - DNA, 75 bp, synthetic construct
  source 1..75: mol_type = other DNA
caccggaggtgcagcttaccgtcagtggttgtccgcgagtgacgccgtgtcagctggatcaggcagcgccacaca

SEQ ID NO: 25067 - DNA, 75 bp, synthetic construct
  source 1..75: mol_type = other DNA
gaaacgccggaagcaatacagcaagagctgctgcaacgcattgacaaggtttttgatttttttctgaaccagtaa

SEQ ID NO: 25068 - DNA, 75 bp, synthetic construct
  source 1..75: mol_type = other DNA
gctctatgccgacgcagaacagaccagcgcactgctgagacaacgacaacaccggattgaggaactgaaacgtga

SEQ ID NO: 25069 - DNA, 75 bp, synthetic construct
  source 1..75: mol_type = other DNA
acaaaggcaacaaaactccggcattcagcatcagtattgagggcagggatatcaccactgtgctggataaccgcc

SEQ ID NO: 25070 - DNA, 75 bp, synthetic construct
  source 1..75: mol_type = other DNA
ccgcgggcagcaagccgggcgttattggtgatgtgatggaaggcatttccgtcggtacgctgttccatgcccagg

SEQ ID NO: 25071 - DNA, 75 bp, synthetic construct
  source 1..75: mol_type = other DNA
gtaaagcggcttccgcaaaattaatcaggtcaacccttgttgacgtttttcgtgaggcaatagccgaggggcatg

SEQ ID NO: 25072 - DNA, 75 bp, synthetic construct
  source 1..75: mol_type = other DNA
tatttcttccggtgcggcgatggagatcatcaataacgtgagagaaaaccgccaggtgaccgtccctgctgaact

SEQ ID NO: 25073 - DNA, 75 bp, synthetic construct
  source 1..75: mol_type = other DNA
atgtacggaacatgcgaaacgctatgccgggagctggcagcaaagtatccgggaaacacgccgctgatgctgctt

SEQ ID NO: 25074 - DNA, 75 bp, synthetic construct
  source 1..75: mol_type = other DNA
gccgggagctggcagcaaagtatccgggaaacacgccgctgatgctgcttatctggtccccggaagagattcagg

SEQ ID NO: 25075 - DNA, 75 bp, synthetic construct
  source 1..75: mol_type = other DNA
tttagcgcctactgttcgctggtgtatgtcacgccaatcctcggtggctttttggcggataaagttctcggcaat

SEQ ID NO: 25076 - DNA, 75 bp, synthetic construct
  source 1..75: mol_type = other DNA
cggaagggcgggcagatctctacacggaaatgcctgtgaaggtcagtggttttaaacagccgatagatgatgcgg

SEQ ID NO: 25077 - DNA, 75 bp, synthetic construct
  source 1..75: mol_type = other DNA
gggcaaaagcgccactggtaaaccactgccagtgatcactatcacacgcaaggacggcgacagtcaccgctttac

SEQ ID NO: 25078 - DNA, 75 bp, synthetic construct
  source 1..75: mol_type = other DNA
acaaaggcaacaaaactccggcattcagtatcagtattgagggcagggatatcaccactgtgctggataaccgtc

SEQ ID NO: 25079 - DNA, 75 bp, synthetic construct
  source 1..75: mol_type = other DNA
ccaatccgggttgtagcggtggagaaatcgccgcagcactgaataccccaaccacaaccattaatgcggagttac

SEQ ID NO: 25080 - DNA, 75 bp, synthetic construct
  source 1..75: mol_type = other DNA
tcagttccgcattgctgaccgcgaagcgtatacgggtgtacgcgcctactggcttgatcttaattacgggaaaaa

SEQ ID NO: 25081 - DNA, 75 bp, synthetic construct
  source 1..75: mol_type = other DNA
aacaaaaggtgtgttattttctattaactatttggatcatagcacactagacttcagaaagcacaactcaaaaaa

SEQ ID NO: 25082 - DNA, 75 bp, synthetic construct
  source 1..75: mol_type = other DNA
ccccgcgtcaccctgtcatccgtcaccacggcgcgcagttttgacgggcgaatgacggtcacgttaaccggccag

SEQ ID NO: 25083 - DNA, 75 bp, synthetic construct
  source 1..75: mol_type = other DNA
ttgagttgcagattaaggtcgcctgttacatggcagtgctgaaatgggaaccccgcgtcaccctgtcatccgtca

SEQ ID NO: 25084 - DNA, 75 bp, synthetic construct
  source 1..75: mol_type = other DNA
caccaggcaaccatagaaatcacggatgtaatgcggcttacccgtgcggtgaaaaatacctggcgccacaactct

SEQ ID NO: 25085 - DNA, 75 bp, synthetic construct
  source 1..75: mol_type = other DNA
tgaccaggcatatgacgacgatacgccccgccttggctggctgacaacccgtcagagcaaacctgttctgaccga

SEQ ID NO: 25086 - DNA, 75 bp, synthetic construct
  source 1..75: mol_type = other DNA
gatctggcaaacggaaaacaaccggcagatgccacgctcactgctctggcaggacttgccactgcagcagatcgg

SEQ ID NO: 25087 - DNA, 75 bp, synthetic construct
  source 1..75: mol_type = other DNA
aagacttctctccgaaaagccaggacgctgtggcattgcaacagattaaagagcgtggcgctttaccgatgattg

SEQ ID NO: 25088 - DNA, 75 bp, synthetic construct
  source 1..75: mol_type = other DNA
caatcagctacatcgggcgcgatgaacttgaggcatgtggtgaggcctttctggcgcaggttcgccagcaggcgg

SEQ ID NO: 25089 - DNA, 75 bp, synthetic construct
  source 1..75: mol_type = other DNA
ggctgaaatggacaccgggcgaaccctccagcgtcttttacctgtgtgaacataatgcctgcgtcattaagcagc

SEQ ID NO: 25090 - DNA, 75 bp, synthetic construct
  source 1..75: mol_type = other DNA
agtatgaacataaaatcggtgacctgattgcccgatttaaaaaagctggcggaacggtcagagagattgaggtat

SEQ ID NO: 25091 - DNA, 75 bp, synthetic construct
  source 1..75: mol_type = other DNA
agtatgaacataaaataggcgacctgattgcccgatttaaagaggctggtggggaagtaaatgaagctgagatat

SEQ ID NO: 25092 - DNA, 75 bp, synthetic construct
  source 1..75: mol_type = other DNA
gagcgtgtgaggcgattcgctggtggattaaggacggtggcagagactgccgtattcgttcaaacaactgctacg

SEQ ID NO: 25093 - DNA, 75 bp, synthetic construct
  source 1..75: mol_type = other DNA
gcgccggtgttctgctgttaagtatggcggtattgccggtggcagaggcatcgctgaacaccgcgcagatagtgg

SEQ ID NO: 25094 - DNA, 75 bp, synthetic construct
  source 1..75: mol_type = other DNA
gctggggctggacttgcgaaattaattggttcatcaactccgtggggtgctggtatcggtgctggtatcggtctg

SEQ ID NO: 25095 - DNA, 75 bp, synthetic construct
  source 1..75: mol_type = other DNA
tgggtgctggcaatttcagaacatcgacgcttcttcgcaaaataaaccagggcgatatcaaaggcgcatgtgatc

SEQ ID NO: 25096 - DNA, 75 bp, synthetic construct
  source 1..75: mol_type = other DNA
gtccctataacattggccccggtaagtgttttccgtcgacgttttataagcggctgaatgctggtgatcgtaaag

SEQ ID NO: 25097 - DNA, 75 bp, synthetic construct
  source 1..75: mol_type = other DNA
gtgttttccgtcgacgttttataagcggctgaatgccggtgatcgtaagggcgcatgcgaggcgattcgctggtg

SEQ ID NO: 25098 - DNA, 75 bp, synthetic construct
  source 1..75: mol_type = other DNA
gtgactcagaaactccactatggtttatcggtagccgttctggcgctgattgcggcaggtgcttctgcgcctgaa

SEQ ID NO: 25099 - DNA, 75 bp, synthetic construct
  source 1..75: mol_type = other DNA
cgtattcgctcaaataactgttatggtcaggtatcccgtcgtgaccaggagagcgctctggcgtgctggggaatc

SEQ ID NO: 25100 - DNA, 75 bp, synthetic construct
  source 1..75: mol_type = other DNA
atgcctccatcattacgaaaagccgttgctgctgctattggtggcggagcaattgctatagcatcagtgttaatt

SEQ ID NO: 25101 - DNA, 75 bp, synthetic construct
  source 1..75: mol_type = other DNA
gttacaacaaactgttcaacggtgcgccgccggaaggtgacattgctgtcgagtactggagtacggtggcgaaaa

SEQ ID NO: 25102 - DNA, 75 bp, synthetic construct
  source 1..75: mol_type = other DNA
taatcagaatgtaggactggtgatccgcaatgataaaattgaggtttatgatcagaatggacgactggctgttcg

SEQ ID NO: 25103 - DNA, 75 bp, synthetic construct
  source 1..75: mol_type = other DNA
cgggctaatccaccactctgatcgaggttcacagtactgcgcatacgattaccgggtcatacaggagcagtttgg

SEQ ID NO: 25104 - DNA, 75 bp, synthetic construct
  source 1..75: mol_type = other DNA
tccggcctggatgttacagcttctgcgtaaagcccgggaccgcattatccacctactgatcacactgtgggagcg

SEQ ID NO: 25105 - DNA, 75 bp, synthetic construct
  source 1..75: mol_type = other DNA
atgaggcatatatcaccggaagaacttattgcgcttcatgatgcgaatataagccgctacggcggcctgcctggc

SEQ ID NO: 25106 - DNA, 75 bp, synthetic construct
  source 1..75: mol_type = other DNA
tattgttaccatgagcgaaaaaggcgcattatggatgacccgcgatcaggaagtccatgttcctgcattcaaagt

SEQ ID NO: 25107 - DNA, 75 bp, synthetic construct
  source 1..75: mol_type = other DNA
ttggcgaggtacgggtgccacacaagggggacgtggtgagtcaggttattgagggggcgtatgaagtgctgggga

SEQ ID NO: 25108 - DNA, 75 bp, synthetic construct
  source 1..75: mol_type = other DNA
accctgctggataacctgcagcgcgaagggtttcaccccttttttgcctgccagtcacgcgttcgtgaccctgaa

SEQ ID NO: 25109 - DNA, 75 bp, synthetic construct
  source 1..75: mol_type = other DNA
ccatacccgggccattcacagcattgataccgacattaagctcaaccgcgcattgtgggtgatggcagaaacgat

SEQ ID NO: 25110 - DNA, 75 bp, synthetic construct
  source 1..75: mol_type = other DNA
aaggcgtgaaagtcgattcttatgagctgggctggcgctttactggcaataatctgcgtacccaaatcgcggcct

SEQ ID NO: 25111 - DNA, 75 bp, synthetic construct
  source 1..75: mol_type = other DNA
tggctcaggcaagcgcttccggagggctgaacaacaagaagatttacaccaccgggcgctatccgtcgtatgaca

SEQ ID NO: 25112 - DNA, 75 bp, synthetic construct
  source 1..75: mol_type = other DNA
atgaatgaaattaaagaaataccagtagtacgtgatgaatatggctgctggacgcatcctgaatatgaaaaattc

SEQ ID NO: 25113 - DNA, 75 bp, synthetic construct
  source 1..75: mol_type = other DNA
cgccacgctgttccgccgtaagtattacatcaacggcagccatgcaggcttcatcatgtacatgaccgacgccgc

SEQ ID NO: 25114 - DNA, 75 bp, synthetic construct
  source 1..75: mol_type = other DNA
accggacattaaccaggagatctacggcttgcccggctatctttctgccattccgtccgccctgctcaatgagtc

SEQ ID NO: 25115 - DNA, 75 bp, synthetic construct
  source 1..75: mol_type = other DNA
aaaaaaagtttcccggaaaggtgaaaaagggaactcgagcaatatttatcttcttcgtcttgatggtgcaaaaga

SEQ ID NO: 25116 - DNA, 75 bp, synthetic construct
  source 1..75: mol_type = other DNA
caacaaccgcgtttccggtggaaatgcttgagcgcatggatgtgcttaacagtttgaccggcgcgctgtacggcc

SEQ ID NO: 25117 - DNA, 75 bp, synthetic construct
  source 1..75: mol_type = other DNA
atgaatatattaatactggtgtaagtatgcccgcctgttccactggtattgaccctggcgaaaacattccgggaa

SEQ ID NO: 25118 - DNA, 75 bp, synthetic construct
  source 1..75: mol_type = other DNA
gactcatgatgaacaggaactgtttgaagtcattaataaaaaattactggcacatttttctgatgccagctcata

SEQ ID NO: 25119 - DNA, 75 bp, synthetic construct
  source 1..75: mol_type = other DNA
caggccggaatggagtaactgtttcagtttttcagatgcagtagatgccgtagttgacagaattgctgatttaga

SEQ ID NO: 25120 - DNA, 75 bp, synthetic construct
  source 1..75: mol_type = other DNA
gacaactggcaaagatagttcatgattatgccagtcggttcccacagacagctgaaggcgatgctcaattactgc

SEQ ID NO: 25121 - DNA, 75 bp, synthetic construct
  source 1..75: mol_type = other DNA
atgccaaaggcatgactacgcgggaaatcgttgccacgttcaaagaaatgtacgacgccgatgtctcgcccacgc

SEQ ID NO: 25122 - DNA, 75 bp, synthetic construct
  source 1..75: mol_type = other DNA
cgctgaccggacatgaaaatgaggttgtatcagcgcagccggataccgtgactgatacggctgatctggtcacgg

SEQ ID NO: 25123 - DNA, 75 bp, synthetic construct
  source 1..75: mol_type = other DNA
gatacccctctcagcccggaaaatgtgcttaccgtacataaaaatgaggtggtatcagcgcagccagatacagtg

SEQ ID NO: 25124 - DNA, 75 bp, synthetic construct
  source 1..75: mol_type = other DNA
ttaaagggataaataattacccgaataagattactgttactgtggcactggaaattggtgggtatccgtcactgt

SEQ ID NO: 25125 - DNA, 75 bp, synthetic construct
  source 1..75: mol_type = other DNA
tgctgttgaacagggcctgagccgccaggcgctggctgcacaaaaagccgggatttccgtcgggcagtataaagc

SEQ ID NO: 25126 - DNA, 75 bp, synthetic construct
  source 1..75: mol_type = other DNA
attcacgctctaaggtgatttcaacgccgcgtattcttactcagtctggtcagactggttacatttccgtaggta

SEQ ID NO: 25127 - DNA, 75 bp, synthetic construct
  source 1..75: mol_type = other DNA
atgtgcaaagcttaggcgtgatttatatcaatcataatttcgccactgaaagtgaagcacgtcaggcattaaatg

SEQ ID NO: 25128 - DNA, 75 bp, synthetic construct
  source 1..75: mol_type = other DNA
tgtgactattgaaaattggcatactcaaaaggagatactcctaaacaatgataaatatagtatgcttgaagtcgc

SEQ ID NO: 25129 - DNA, 75 bp, synthetic construct
  source 1..75: mol_type = other DNA
gtgctggacgaggcgaaaatcggtgtcgcatccatgctcggtagtcgggtacgggtgaaaacctggagctggttt

SEQ ID NO: 25130 - DNA, 75 bp, synthetic construct
  source 1..75: mol_type = other DNA
gatcaccctgccgatggtcggggtcacctcgctggcggtggcgacaggtgcgctggcgtacgcctggtaccaggg

SEQ ID NO: 25131 - DNA, 75 bp, synthetic construct
  source 1..75: mol_type = other DNA
ggtttgctccttaacggtcttgttgaaaatatcttcataaatgatattgatcctgccctttattctttttggttt

SEQ ID NO: 25132 - DNA, 75 bp, synthetic construct
  source 1..75: mol_type = other DNA
aagccggtgaactggcggcaagggacagggctgagcgtgagtcgtcacagctgaagtataccggagaggcgcaga

SEQ ID NO: 25133 - DNA, 75 bp, synthetic construct
  source 1..75: mol_type = other DNA
gtgtagggctggtgttttcaggcctagtcctgtggaaacccgtccagtgttcgttgctaagtacgctgctaggtg

SEQ ID NO: 25134 - DNA, 75 bp, synthetic construct
  source 1..75: mol_type = other DNA
gttcccgttactggcgtctccgttatcgtattttgggtaaggagaagactcttgcacttggtgtgtatccagaag

SEQ ID NO: 25135 - DNA, 75 bp, synthetic construct
  source 1..75: mol_type = other DNA
gcgatgctgttgaacgtcagatgagccatcaggaacgtaacggtgtacgcgctgcttacatccataaagccgaac

SEQ ID NO: 25136 - DNA, 75 bp, synthetic construct
  source 1..75: mol_type = other DNA
cctttatcggcaatcgggatatcacaacactcaataccccggacctgcttatccctgttcgtgctgcagaagcta

SEQ ID NO: 25137 - DNA, 75 bp, synthetic construct
  source 1..75: mol_type = other DNA
tggaaggccagaccatcgttgaatattgcggtgtggtgactggcgaagcgattttaggcgcgaatattttccgtg

SEQ ID NO: 25138 - DNA, 75 bp, synthetic construct
  source 1..75: mol_type = other DNA
taaggaaatgccttgaaactgcaaacatgcttgcacacagcgggatcaggtttgttccaattcccgctgtcactg

SEQ ID NO: 25139 - DNA, 75 bp, synthetic construct
  source 1..75: mol_type = other DNA
aaactgagcaggtaagaattttcatggataaacgagggcttgagagcaagacccaggcaaatcatgaactggcaa

SEQ ID NO: 25140 - DNA, 75 bp, synthetic construct
  source 1..75: mol_type = other DNA
gtgagtgtatatcttattgataaacgtcgacgtgggcaacaaataccacctgtaggaattccgaatcacacatgg

SEQ ID NO: 25141 - DNA, 75 bp, synthetic construct
  source 1..75: mol_type = other DNA
atgggaaccactcagcaggtcattctgattacaaccgtaacggcaggggcagaactggcacagcagcgttttgtc

SEQ ID NO: 25142 - DNA, 75 bp, synthetic construct
  source 1..75: mol_type = other DNA
atatcaaaggtttctttgacaatatcccccacaaactattgctgaatacactggcagagaaaattaaggataaga

SEQ ID NO: 25143 - DNA, 75 bp, synthetic construct
  source 1..75: mol_type = other DNA
atcaacgacccggtgaatcagatatcctgagcgggaatgcttttgctgatctggagattcgtgattctgatgggc

SEQ ID NO: 25144 - DNA, 75 bp, synthetic construct
  source 1..75: mol_type = other DNA
ggaacgtctccctgagtaaagcagctccgtcaatgaaaaatgtcctggtgggccttggctgggatgcgcgttcaa

SEQ ID NO: 25145 - DNA, 75 bp, synthetic construct
  source 1..75: mol_type = other DNA
aactgaatgaattacgtgagctgttcgagcctctggcagacgaaacaggaaagacaatcaccgttgaaggagagg

SEQ ID NO: 25146 - DNA, 75 bp, synthetic construct
  source 1..75: mol_type = other DNA
cgtcatgggctggctgtgcaaaagaggcacgtaaagatgggtggcgaataagtgccgacaaaacgcgtgcttttg

SEQ ID NO: 25147 - DNA, 75 bp, synthetic construct
  source 1..75: mol_type = other DNA
acagtagacgactgctaccgcgtggacttcacaccacacgggctggcgttgcactgcctgacaccacacggcgaa

SEQ ID NO: 25148 - DNA, 75 bp, synthetic construct
  source 1..75: mol_type = other DNA
ggcacgtaaagatgggtggcgaataagtgccgacaaaacgcgtgcttttgcgccagggcataaaattttgaggag

SEQ ID NO: 25149 - DNA, 75 bp, synthetic construct
  source 1..75: mol_type = other DNA
atgaattcgttacaaatcttgagttttgtcggttttacgctgctggtggcggtcatcacctggtggaaggtccgc

SEQ ID NO: 25150 - DNA, 75 bp, synthetic construct
  source 1..75: mol_type = other DNA
gtgtcgttgatccggtactgaccagtatcgcccgtggctataaaaatgccgcattcatcggcgaacgtattttcc

SEQ ID NO: 25151 - DNA, 75 bp, synthetic construct
  source 1..75: mol_type = other DNA
acgccctgacccacgcgggggtgtgggaagacgacagtcaggtgaaaagaatgctggtggagtggggaccggtta

SEQ ID NO: 25152 - DNA, 75 bp, synthetic construct
  source 1..75: mol_type = other DNA
cgggaattgagatgccggattttcatcgcggggatgactggtggcgtcacggccagaatctctatctggataata

SEQ ID NO: 25153 - DNA, 75 bp, synthetic construct
  source 1..75: mol_type = other DNA
tggggcgcagccctgagtgccggagggctgactgccaccacgatgctgttctcactgggtgccagcatgatactg

SEQ ID NO: 25154 - DNA, 75 bp, synthetic construct
  source 1..75: mol_type = other DNA
aactccatcgcggtaacttcgcggccatcggccagcagattcagccattgctggatgccgggcaatgcttacgcc

SEQ ID NO: 25155 - DNA, 75 bp, synthetic construct
  source 1..75: mol_type = other DNA
cgcattgcctgatttcagcccgttgtcgcaggacaaacttgcgattcagttaatccgcgaacgcggtgccattga

SEQ ID NO: 25156 - DNA, 75 bp, synthetic construct
  source 1..75: mol_type = other DNA
ccgggaagagcgtgaggcgctggaagcaagacaacaggccatgatggaagggcagcaggagggcggacatgtctc

SEQ ID NO: 25157 - DNA, 75 bp, synthetic construct
  source 1..75: mol_type = other DNA
ggacatcaacgccaccagccggataaaggtcaatacggggccgctggcggggcgtgtactgaatatcatcgggca

SEQ ID NO: 25158 - DNA, 75 bp, synthetic construct
  source 1..75: mol_type = other DNA
ggcgctaaggcagaactggcgctggcggagaaactggggcatgcggtgatttttcaggagacagccagtgtgcaa

SEQ ID NO: 25159 - DNA, 75 bp, synthetic construct
  source 1..75: mol_type = other DNA
atgtgaaaattgagctgctggatctgtccaaagacgatctgcgtcaggattttgaggatgcgccggaaattattc

SEQ ID NO: 25160 - DNA, 75 bp, synthetic construct
  source 1..75: mol_type = other DNA
tgttcgagcccctggcagacgaaacaggaaagacaatcacggttgaaggagagggcgttgttgccggagacagcg

SEQ ID NO: 25161 - DNA, 75 bp, synthetic construct
  source 1..75: mol_type = other DNA
gcgaacagtcgtattaatgcccgtcttgtcggtgtttttcttctgctggctatgctggcgtcttttatgaataac

SEQ ID NO: 25162 - DNA, 75 bp, synthetic construct
  source 1..75: mol_type = other DNA
gctggctgatgtgtggcgctgtacagatagcgatgatcagcagccgtattattcacgtctgctcaaaatgctggt

SEQ ID NO: 25163 - DNA, 75 bp, synthetic construct
  source 1..75: mol_type = other DNA
atgagactgcgattctctgttccacttttcttttttggctgtgtgtttgttcatggtgtttttgccggtccgttt

SEQ ID NO: 25164 - DNA, 75 bp, synthetic construct
  source 1..75: mol_type = other DNA
gggagtaagtagcgccgcatctgcggctaacgcgattgccgtaggccgcaacagtgctgcggcaggcgtagacag

SEQ ID NO: 25165 - DNA, 75 bp, synthetic construct
  source 1..75: mol_type = other DNA
ttataccctacgtgttgtccgtaatggtcagccgttaaaggcagggaattattatgccgcattgcgttttaaggt

SEQ ID NO: 25166 - DNA, 75 bp, synthetic construct
  source 1..75: mol_type = other DNA
ggaggaaggggtagcaaactcgaacgtttaacgcttggccgttaccctgatatgccgctaaaacttgcgcgagaa

SEQ ID NO: 25167 - DNA, 75 bp, synthetic construct
  source 1..75: mol_type = other DNA
atgtgtaagcaggctctgaagttttgccgcgtacatcgttatgcggttagcaatgctctggatgacctgactatc

SEQ ID NO: 25168 - DNA, 75 bp, synthetic construct
  source 1..75: mol_type = other DNA
tacccgtgccattcacagcattgacactgacattaagctcaaccgcgcattgtgggtgatggcggaaaccctgct

SEQ ID NO: 25169 - DNA, 75 bp, synthetic construct
  source 1..75: mol_type = other DNA
tgaatttcgtaacgaagccctgaaactcgctgaacgcatcggtgtggccgccgcagcccgtgaactcagcctgta

SEQ ID NO: 25170 - DNA, 75 bp, synthetic construct
  source 1..75: mol_type = other DNA
atgatcccgttaccttccgggaccaaaatttggctggttgccggtatcaccgatatgagaaatagcttcaacggc

SEQ ID NO: 25171 - DNA, 75 bp, synthetic construct
  source 1..75: mol_type = other DNA
tgaaggacggagcgggtgagcctgtcgtaaactgtgcgattgaattgcgtgccagaagaaccagtccgacagttg

SEQ ID NO: 25172 - DNA, 75 bp, synthetic construct
  source 1..75: mol_type = other DNA
tactgcggcaacggttcttggcagcaaccgtctgggcaatttcacggtggaaaacggtaaggctgacggcgttgt

SEQ ID NO: 25173 - DNA, 75 bp, synthetic construct
  source 1..75: mol_type = other DNA
aaccgtctggggaatttcacggtggaaaacggtaaggctgacggtgttgttctggagtccggtggtcgcctggat

SEQ ID NO: 25174 - DNA, 75 bp, synthetic construct
  source 1..75: mol_type = other DNA
tcatccctaaagcgcatggcggcaccgatgcagacagtaatctgcagagcctgtgctggccgtgccataagacga

SEQ ID NO: 25175 - DNA, 75 bp, synthetic construct
  source 1..75: mol_type = other DNA
tggcaaccgcccgacctacgaagccagccgcagcgaagaagccagccatgccgatctggcatgggcaaccatgca

SEQ ID NO: 25176 - DNA, 75 bp, synthetic construct
  source 1..75: mol_type = other DNA
gagcgttttgcgcttttctcactcttcaggccacaaatcattcgcgtggtgctgaacccggtaaaactgacctgg

SEQ ID NO: 25177 - DNA, 75 bp, synthetic construct
  source 1..75: mol_type = other DNA
cggcctgccgcgcattgtttccaccattgaagatatgcagtggatggttgataccgtaaacagcatggcgaacgg

SEQ ID NO: 25178 - DNA, 75 bp, synthetic construct
  source 1..75: mol_type = other DNA
ccggcgccagccgggtacacagcatccctttttatctgcaaagaatttctgcggggttccccagcccggcccagg

SEQ ID NO: 25179 - DNA, 75 bp, synthetic construct
  source 1..75: mol_type = other DNA
gcacagagcataagacgtttgataatatgattctgacaggcattgactacgaatataaaacagaatcagctttac

SEQ ID NO: 25180 - DNA, 75 bp, synthetic construct
  source 1..75: mol_type = other DNA
tcaccctgggcgttcaggccggttatgcccacagcatcaacggcagcagcgctgaaggttatagcagtcaggcca

SEQ ID NO: 25181 - DNA, 75 bp, synthetic construct
  source 1..75: mol_type = other DNA
tagatggtattgagcatacttatacgttatacagcagtgtaagtggcgcaaatgtgtatattgataacaatatta

SEQ ID NO: 25182 - DNA, 75 bp, synthetic construct
  source 1..75: mol_type = other DNA
aaaaacatgctcgtcaaatagatctgctggaaaatctgacggcagttattcaggattatccaaatccagcctgta

SEQ ID NO: 25183 - DNA, 75 bp, synthetic construct
  source 1..75: mol_type = other DNA
tgtcacctttgaagatgaaaaaggtggtaagcacaccgtgacgctggagaaaggggataacggctggacatccag

SEQ ID NO: 25184 - DNA, 75 bp, synthetic construct
  source 1..75: mol_type = other DNA
cagctggtcgcggaagggaaaagccagaccatgaacagccgccacctgaccggtgatgcggtggatgttgtggcc

SEQ ID NO: 25185 - DNA, 75 bp, synthetic construct
  source 1..75: mol_type = other DNA
gcggcggaatttcttcaggtggtcgcagaaaatcgcgggctaagccaggaagagctagcggacagattagtccca

SEQ ID NO: 25186 - DNA, 75 bp, synthetic construct
  source 1..75: mol_type = other DNA
tcatcaaccgtgagtttgtagaagttctacgctcggttgagtactcgtttgacgatgctcgtcacatgttcgatg

SEQ ID NO: 25187 - DNA, 75 bp, synthetic construct
  source 1..75: mol_type = other DNA
ggtgataccgggcagaccgtctacggagatgccgtacgcaccaccatcaataaaaatggtcgtcagattgtggct

SEQ ID NO: 25188 - DNA, 75 bp, synthetic construct
  source 1..75: mol_type = other DNA
accaccacgctgaataacggtgccacgtttacccttgccgggaagacggtgaacaacgataccctgaccatccgt

SEQ ID NO: 25189 - DNA, 75 bp, synthetic construct
  source 1..75: mol_type = other DNA
actgagccgtgctgttgcaaaaggcaacgccccggtaacgttccataaactgacaaccagtaacctcaccggtca

SEQ ID NO: 25190 - DNA, 75 bp, synthetic construct
  source 1..75: mol_type = other DNA
gaagttcgggcatggcagtgcacaacatgtgcgtgccggtttccgtctgggcagccacaacgatatgagctttgg

SEQ ID NO: 25191 - DNA, 75 bp, synthetic construct
  source 1..75: mol_type = other DNA
aaagtgaaaaacctgaacggacagaatggcaccatcagcctgcgtgtacgcccggatatggcacagaacaatgct

SEQ ID NO: 25192 - DNA, 75 bp, synthetic construct
  source 1..75: mol_type = other DNA
cctgtatctgctcgtttatcatgcgcgagcagccggaagcggtgctgacgcgcctggagcaggcagtactgcgcg

SEQ ID NO: 25193 - DNA, 75 bp, synthetic construct
  source 1..75: mol_type = other DNA
gcacaacacggtgccgcagtagaagcggcagaagcacagcgccagtcactgattgatgcagcaatggcttccatc

SEQ ID NO: 25194 - DNA, 75 bp, synthetic construct
  source 1..75: mol_type = other DNA
tgtgcaaatcacacaaccgggagattaccctcctgatacgacggtgaaacagccagctactatctatgatgtctg

SEQ ID NO: 25195 - DNA, 75 bp, synthetic construct
  source 1..75: mol_type = other DNA
tcatctgccgtcgaaaaacatatccctgaagcgccagccaggaagaagaaaaagaaaaaacaccgtttcccacgt

SEQ ID NO: 25196 - DNA, 75 bp, synthetic construct
  source 1..75: mol_type = other DNA
atgacaactgcggcaagatgctggtcgccacctctgaactcgaaatggaacggatgcgcgcgttgtgggaacgca

SEQ ID NO: 25197 - DNA, 75 bp, synthetic construct
  source 1..75: mol_type = other DNA
cttattctgcatgctgcagtgggctccgctacggtggcaatgatgggggcaacggcaattgttgcacccatgctg

SEQ ID NO: 25198 - DNA, 75 bp, synthetic construct
  source 1..75: mol_type = other DNA
agctgacgcaggcagaaacaacccgacttaacgccgtgctggattatattgacgcggtgacggtaacagatacca

SEQ ID NO: 25199 - DNA, 75 bp, synthetic construct
  source 1..75: mol_type = other DNA
agcagcgcttccgcaacggtgcggaacgccatgctaaccgtttcgctaccagtgcatcacgtagcaactctcgct

SEQ ID NO: 25200 - DNA, 75 bp, synthetic construct
  source 1..75: mol_type = other DNA
tatccggcgcgaacgtctgcctaaagaactgagctatgcgctgaaacaacaactgaggattgtgataaagcgatg

SEQ ID NO: 25201 - DNA, 75 bp, synthetic construct
  source 1..75: mol_type = other DNA
aacgtctcttgggatgcgctgaacaccgcatatagtgaacaccatgagtggttttcagagcttacctccggggat

SEQ ID NO: 25202 - DNA, 75 bp, synthetic construct
  source 1..75: mol_type = other DNA
gattacattgacgcggtgacggcaactgataccagcaccgcgccggatatcaattggcctgctcccccggaggcg

SEQ ID NO: 25203 - DNA, 75 bp, synthetic construct
  source 1..75: mol_type = other DNA
atggcaaggtccgattatgatattattaatctgtctctgaaacatgaactgaatgagtggctgacagagagaggt

SEQ ID NO: 25204 - DNA, 75 bp, synthetic construct
  source 1..75: mol_type = other DNA
gagcagaataaggtgtaccagtccatgctggttatgaacggtcagcatacggaattcaaccgtctgctggggctg

SEQ ID NO: 25205 - DNA, 75 bp, synthetic construct
  source 1..75: mol_type = other DNA
cttcacaccaaaattccagcgtgttgacctgtttaactacaacgtgctggttaaaaattacgacagcagcgcttt

SEQ ID NO: 25206 - DNA, 75 bp, synthetic construct
  source 1..75: mol_type = other DNA
gatttcaaccggcaaaaggagacagtcctttgcgacaagttaaccgctggttcaaagatcactacggagtgcccg

SEQ ID NO: 25207 - DNA, 75 bp, synthetic construct
  source 1..75: mol_type = other DNA
tgactggaaagccttcgaccgtgccgtcgacagccactccggggtaccgcagacagcggcccgcctgaaagagag

SEQ ID NO: 25208 - DNA, 75 bp, synthetic construct
  source 1..75: mol_type = other DNA
cggccggacaaaaatggtcactgggcttcacaccaaaattccagcgtgttgacctgtttaactacaatacgctga

SEQ ID NO: 25209 - DNA, 75 bp, synthetic construct
  source 1..75: mol_type = other DNA
caaaacggtattaacgctgatatcggtgccagcatggacctggatgacaactggacgctgggtctggtcgcacag

SEQ ID NO: 25210 - DNA, 75 bp, synthetic construct
  source 1..75: mol_type = other DNA
cggtatggctattcacaagaaatggcggcagacctatttttccacaccatccagtctgacccacagtgcttatcc

SEQ ID NO: 25211 - DNA, 75 bp, synthetic construct
  source 1..75: mol_type = other DNA
acttcgccaaagaagtggaggtggagctgaaaggcgatccgatggtgcttcccaacggggccacgctttacttcc

SEQ ID NO: 25212 - DNA, 75 bp, synthetic construct
  source 1..75: mol_type = other DNA
ttgacgagcagaaaagtaagattaaatccttacaggaaaaaattgctggctatcagtatgtgctggcaaacccgg

SEQ ID NO: 25213 - DNA, 75 bp, synthetic construct
  source 1..75: mol_type = other DNA
agccgcaccgaggaagccagccacgccgatatcgcatgggcgaccatgcacgccctgttaaacgaaccgctttct

SEQ ID NO: 25214 - DNA, 75 bp, synthetic construct
  source 1..75: mol_type = other DNA
aggcctacgacattatcagtcaccgtcgtctggagtttgacgccggacacaccgacatagcgcagtcatttatgg

SEQ ID NO: 25215 - DNA, 75 bp, synthetic construct
  source 1..75: mol_type = other DNA
ttctcccgcgaggcactgctgcgcgcactcaaaaccggccataaccagatatttttatcagccagtaaaacgcag

SEQ ID NO: 25216 - DNA, 75 bp, synthetic construct
  source 1..75: mol_type = other DNA
cgggcacttcgcgagcgcgagcatctgtctcaacctgttttcgccagatatcttaatgtcagtaaaaacctcatt

SEQ ID NO: 25217 - DNA, 75 bp, synthetic construct
  source 1..75: mol_type = other DNA
ccggaaagaaaaacatggcttcgcactggtttggtaccagtcagtggcagttaccgaacgagggtgattacaaca

SEQ ID NO: 25218 - DNA, 75 bp, synthetic construct
  source 1..75: mol_type = other DNA
gaaagcggggatgtgcgggcctataaaatccgtttcccaaatggcacggtggatgtgttccgtggctgggtcagc

SEQ ID NO: 25219 - DNA, 75 bp, synthetic construct
  source 1..75: mol_type = other DNA
gaactggaaaagccacatcaccaactggtcagcacatacagtgaactgaaccgacactatacggaactgcagagt

SEQ ID NO: 25220 - DNA, 75 bp, synthetic construct
  source 1..75: mol_type = other DNA
cgtgtgagaaaccggcggatatgctcaggcaaataatcaatgccagtagtcgacctggtgatctggttgctgatt

SEQ ID NO: 25221 - DNA, 75 bp, synthetic construct
  source 1..75: mol_type = other DNA
ctggtttggtaccagtcagtggcagttaccgaacgagggtgattacaacaaattgcaggcgttgtttgcgcgtgt

SEQ ID NO: 25222 - DNA, 75 bp, synthetic construct
  source 1..75: mol_type = other DNA
agaaggcccaacgttaaccggctttaattctgcttacagaacgtcatcaaccagcgacacggtatcgatgaatta

SEQ ID NO: 25223 - DNA, 75 bp, synthetic construct
  source 1..75: mol_type = other DNA
aatatgaacaatgctctgtggtactctgacggaaactcaacgatcggaacgctgaagagtgcgggaggacgagtt

SEQ ID NO: 25224 - DNA, 75 bp, synthetic construct
  source 1..75: mol_type = other DNA
atttccgcgaaaaaaatctgatgttgtatgtcattttccatcttgcccttgaaacagccatgcggcagggcgaaa

SEQ ID NO: 25225 - DNA, 75 bp, synthetic construct
  source 1..75: mol_type = other DNA
aaccatattatctgggcgaagccgtccggacgctggaacggatgcaacaaggaaagcctgcgggcgtatttcccc

SEQ ID NO: 25226 - DNA, 75 bp, synthetic construct
  source 1..75: mol_type = other DNA
ttttccccgtccaggttcgtttcacgccagcccacgaacgtttccacctggcattatgttcgccgggagacgtct

SEQ ID NO: 25227 - DNA, 75 bp, synthetic construct
  source 1..75: mol_type = other DNA
atgccagtggcatttgaatttaaatgcgttccgtttgaaggtctgaaagaacgtccgtttaaattacgcctcagc

SEQ ID NO: 25228 - DNA, 75 bp, synthetic construct
  source 1..75: mol_type = other DNA
ttacttcaggttcgtctgtcagaacggatgcgtctgtggtcagtctccgggggaagtgcgtgttccgcatcgggg

SEQ ID NO: 25229 - DNA, 75 bp, synthetic construct
  source 1..75: mol_type = other DNA
agcatcgacaccgatattaagctcaatcgcgcattatgggtgatggcggaaacgctgctggagaacatgcgctga

SEQ ID NO: 25230 - DNA, 75 bp, synthetic construct
  source 1..75: mol_type = other DNA
agcatcgacacggacattaggctcaaccgcgcattgtgggtgatggcagaaacgctgctggagagcctgcgctga

SEQ ID NO: 25231 - DNA, 75 bp, synthetic construct
  source 1..75: mol_type = other DNA
cttcatatgaacgcaattatccagaggaaggcggctttgctcaggggacgcttgagatcctcgaaggcgggaatt

SEQ ID NO: 25232 - DNA, 75 bp, synthetic construct
  source 1..75: mol_type = other DNA
atcatggcgaaccattcaccggcagcggtacagggtggcgtgccacagacgtcagcagacggtgatgcggacgtg

SEQ ID NO: 25233 - DNA, 75 bp, synthetic construct
  source 1..75: mol_type = other DNA
taggaactctttcaacattcctgtttattgcagaaaaggcaggatatgacgttattgcaccagcagatgaagatg

SEQ ID NO: 25234 - DNA, 75 bp, synthetic construct
  source 1..75: mol_type = other DNA
atgaattacgatgaaataacgaaaattaccgctgaacgtattagcgactacatgactgaagcagttaatacagac

SEQ ID NO: 25235 - DNA, 75 bp, synthetic construct
  source 1..75: mol_type = other DNA
ggtggtatacctataatgactaaaaccggtcatgcttacattaagcaaagaatgcgtgaagaggatgccgtatat

SEQ ID NO: 25236 - DNA, 75 bp, synthetic construct
  source 1..75: mol_type = other DNA
ggtatagcgctgtatcagggaaaaggaatgtcaacacctcttacattaggtaatggttcaggaaatggttacaga

SEQ ID NO: 25237 - DNA, 75 bp, synthetic construct
  source 1..75: mol_type = other DNA
gaggcggaatcagctatcgccgtccgactgtccagcgcttttgagacgctgtgtgcatattgtgctgaaaacatg

SEQ ID NO: 25238 - DNA, 75 bp, synthetic construct
  source 1..75: mol_type = other DNA
gccggactgacgcttgacgatgttgatcgcatgtcagtacgtgaattgcgtcaggccctgcgcgaagcgcgcgaa

SEQ ID NO: 25239 - DNA, 75 bp, synthetic construct
  source 1..75: mol_type = other DNA
gcgcagccacagttcagcttattttcgggagctggtggagacgcgggaacgactggtgagagacgctgatgattt

SEQ ID NO: 25240 - DNA, 75 bp, synthetic construct
  source 1..75: mol_type = other DNA
cgacgaaaactccggtgaattttttgttcaggtctggggtaatggggccaacttcgacaacgtgattttacgccg

SEQ ID NO: 25241 - DNA, 75 bp, synthetic construct
  source 1..75: mol_type = other DNA
taattgacgatagtaagtttaccaaaacagctggtattgatactgatgacatcgttgctgtaggtctggtttacc

SEQ ID NO: 25242 - DNA, 75 bp, synthetic construct
  source 1..75: mol_type = other DNA
aagaaatcccgtattcagccgcctgagcctgatgaagaggttaagaagctgcgggcggaagtgacagcattagcg

SEQ ID NO: 25243 - DNA, 75 bp, synthetic construct
  source 1..75: mol_type = other DNA
cgcgagatgctgcaatggtatgccgactacatggtaagccttgagaaaggcggtaatgtcgtacagggaacgttt

SEQ ID NO: 25244 - DNA, 75 bp, synthetic construct
  source 1..75: mol_type = other DNA
cgacgccgcgtactgctgactcccgggcattacctgggaaactgggaccatcgtctgcgtcatcttcaggagcag

SEQ ID NO: 25245 - DNA, 75 bp, synthetic construct
  source 1..75: mol_type = other DNA
atgaactcctcaaagaagccgttgaatatggacgggcaaaaaagtggatagcgcacgcgcccttattgcccgggg

SEQ ID NO: 25246 - DNA, 75 bp, synthetic construct
  source 1..75: mol_type = other DNA
ccgtattttgcagcgtggtcgtgttcttgttgaaggttcgttcagtggtaaatgtacgcaattacactcccggac

SEQ ID NO: 25247 - DNA, 75 bp, synthetic construct
  source 1..75: mol_type = other DNA
ctgctgtggccgccggagaacaggttgttcctgcctctgaacttgctgccgccatgaagcagattaaagaactcc

SEQ ID NO: 25248 - DNA, 75 bp, synthetic construct
  source 1..75: mol_type = other DNA
gctcaggactgcgcttataaatttcttgtctgcgaagataaacccggcatgccccgccctgctatcgactcctgg

SEQ ID NO: 25249 - DNA, 75 bp, synthetic construct
  source 1..75: mol_type = other DNA
gagcctatcacattattgagcggacagttgacattctcccttatactgtcatcgctctttatttttatatctaaa

SEQ ID NO: 25250 - DNA, 75 bp, synthetic construct
  source 1..75: mol_type = other DNA
ctgagtacaatcctgcacctgatttagctatcgctctggccgttcccaagcaaaaacaccatccatttttatccg

SEQ ID NO: 25251 - DNA, 75 bp, synthetic construct
  source 1..75: mol_type = other DNA
cgtattgacggattccgcaaagccagcgcccagcttgccgtgaccggtcattcgcttgagaaagcgaaacaggaa

SEQ ID NO: 25252 - DNA, 75 bp, synthetic construct
  source 1..75: mol_type = other DNA
ggaccacatcaatctgatattccagctgaagcaggaatggatgtttctggccgggcgaggagcctttccgctgtt

SEQ ID NO: 25253 - DNA, 75 bp, synthetic construct
  source 1..75: mol_type = other DNA
gcaacgccggtcacgctgaatatggcgctggcgaaccgccgcacgatggaagaaaacgccgccctgctgatgggg

SEQ ID NO: 25254 - DNA, 75 bp, synthetic construct
  source 1..75: mol_type = other DNA
cctgctggaaatcctctccgaatggctggtgttccgccgcgataccgtgcgccgccgactgaactatcgtctgga

SEQ ID NO: 25255 - DNA, 75 bp, synthetic construct
  source 1..75: mol_type = other DNA
acgtaactggaaaaaacggcaggacgcagagcgcaaagagactggaaaatacacgtctgttgttgatcttgcccg

SEQ ID NO: 25256 - DNA, 75 bp, synthetic construct
  source 1..75: mol_type = other DNA
ccattccggacgaacaggcaataaaggaagaaggtgcagtcgctgtagccactgccattgaagccggtgacgaac

SEQ ID NO: 25257 - DNA, 75 bp, synthetic construct
  source 1..75: mol_type = other DNA
gttgaagcgttgatgaaaatgccagaagttaacgccatgtatccggagcttaagctgcatgccatcgggtgggtt

SEQ ID NO: 25258 - DNA, 75 bp, synthetic construct
  source 1..75: mol_type = other DNA
caaggccgttattttctccctgcatgttgcctgccactttaagcgcatgcaccagaacatcgtcgacaaaatcga

SEQ ID NO: 25259 - DNA, 75 bp, synthetic construct
  source 1..75: mol_type = other DNA
ttcaccgcgatgacatataccaaaagcaaaacgtttaaaaccgaatctggcgcgcgttgctggttagccagaaac

SEQ ID NO: 25260 - DNA, 75 bp, synthetic construct
  source 1..75: mol_type = other DNA
ggctatgagcgcgggctgacgctgccgcttcgccatccttcagggctgtttgatggtgaaacggaagccgtatgg

SEQ ID NO: 25261 - DNA, 75 bp, synthetic construct
  source 1..75: mol_type = other DNA
cgatgacgttctcaagagtaattgctgtcgtagttacattgaacgttactggcgcggctgggcagccgactgtat

SEQ ID NO: 25262 - DNA, 75 bp, synthetic construct
  source 1..75: mol_type = other DNA
acggcgtcattaccagctttaaacacctctcctcgtcacaggacgaagcccgttacgaagtgcgccttgaacccc

SEQ ID NO: 25263 - DNA, 75 bp, synthetic construct
  source 1..75: mol_type = other DNA
ctgttgttctggcaacctgcttgctcagtggctgcgtcaatgagcaaaaggtcaatcagctggcgagcaatgtgc

SEQ ID NO: 25264 - DNA, 75 bp, synthetic construct
  source 1..75: mol_type = other DNA
gcgcttttatgaacaggtaaagcgtgagaatccgccagttgaaactggggcatggaaagatgcggttgactgggt

SEQ ID NO: 25265 - DNA, 75 bp, synthetic construct
  source 1..75: mol_type = other DNA
accgaaaagacgttcagcaaatcatccgccaacttaagttagacattttcaccaaatcacgactccgcatcaaag

SEQ ID NO: 25266 - DNA, 75 bp, synthetic construct
  source 1..75: mol_type = other DNA
gggaaacactacttcaaattggaaggggctggattgcgggaatttaagaacaaggttactcaaagtaacttagtt

SEQ ID NO: 25267 - DNA, 75 bp, synthetic construct
  source 1..75: mol_type = other DNA
agccggggttacggagcatgtcggatacctggaaactgctccgtacgctttctgcattgcagattgataaagcat

SEQ ID NO: 25268 - DNA, 75 bp, synthetic construct
  source 1..75: mol_type = other DNA
gtggtgactggtacagattaccaacccaggtgattcgaaagccgctaagcgatatagccagtaaaaaacgctctg

SEQ ID NO: 25269 - DNA, 75 bp, synthetic construct
  source 1..75: mol_type = other DNA
atacaagaagcataaagagcagttggaaaaattgtcgatggagttggaagccgctaaacagcgggaaaaagatct

SEQ ID NO: 25270 - DNA, 75 bp, synthetic construct
  source 1..75: mol_type = other DNA
aggtttcctgccctttgcgccagaggctgatttctgggtgggtaaacacggtgcgccgaaaattgaaatccagat

SEQ ID NO: 25271 - DNA, 75 bp, synthetic construct
  source 1..75: mol_type = other DNA
atgagcggactgggtaatatctccggggctctggggaaaagtgttccggcgtttaacgcactctctgaatccatg

SEQ ID NO: 25272 - DNA, 75 bp, synthetic construct
  source 1..75: mol_type = other DNA
cagtcggtcattctgcccgccctcaacgccgtcgagcgggcgagtgccgaggcgatcacccgtgctaaccggcgc

SEQ ID NO: 25273 - DNA, 75 bp, synthetic construct
  source 1..75: mol_type = other DNA
acacccacatttctgaccagtacgcgccatttcacaccaaggtcgtgaacgtcggcgtgcgcgattcgacctacg

SEQ ID NO: 25274 - DNA, 75 bp, synthetic construct
  source 1..75: mol_type = other DNA
tctcagggccgggatatccgcatctatcgcgagctgcgtaccgacccgctggtcggtggctgcatccgcaggcgt

SEQ ID NO: 25275 - DNA, 75 bp, synthetic construct
  source 1..75: mol_type = other DNA
cagcgcagcagcagttcaacagtccgacgggcttgccgctgaccttaagggactaccgtctgtatatctcctact

SEQ ID NO: 25276 - DNA, 75 bp, synthetic construct
  source 1..75: mol_type = other DNA
ctgcaggaacggctggcccgtattctctttgtggcaaatatccggggacgtctgcatgagcgtgacaacggctga

SEQ ID NO: 25277 - DNA, 75 bp, synthetic construct
  source 1..75: mol_type = other DNA
cgccctgcgctccggcgacatctgggtcaagggctcgcggcagttccgcgacttcgacgactacctgctgccggc

SEQ ID NO: 25278 - DNA, 75 bp, synthetic construct
  source 1..75: mol_type = other DNA
agcactcacttatcctcaatcgcgaggccggttcgttcttctttttaggcgaattgctggtcgatattccgctgc

SEQ ID NO: 25279 - DNA, 75 bp, synthetic construct
  source 1..75: mol_type = other DNA
aacgataacctgctctttaactggcggcatctctggcgtaacggcggcctgcagccgcccggcgaacatgaaaca

SEQ ID NO: 25280 - DNA, 75 bp, synthetic construct
  source 1..75: mol_type = other DNA
gcgctggaaagtcgtaaaggtgagcacccacttctcgatgagcacatagcgtgggcgattgcgcagcaaatagag

SEQ ID NO: 25281 - DNA, 75 bp, synthetic construct
  source 1..75: mol_type = other DNA
aaagtatcttgagtaataaagggctaatgccgctgctttggcgcttcttccctggtcatcctaaccttcttgcat

SEQ ID NO: 25282 - DNA, 75 bp, synthetic construct
  source 1..75: mol_type = other DNA
atggctacaccgcttattcgtgtcatgaacggacacatctacagagtaccaaatcgtcgtaagcgtaagcctgag

SEQ ID NO: 25283 - DNA, 75 bp, synthetic construct
  source 1..75: mol_type = other DNA
ttgctgaaacagatcgctggcggcaagtttatgatggtgggcgcagggactaactataagtccatggcttatgtt

SEQ ID NO: 25284 - DNA, 75 bp, synthetic construct
  source 1..75: mol_type = other DNA
ttgatggcaccaatctgacgcaaaacatcatgtctgctttggaagcggtcgcgcagacggccaagcagattcagg

SEQ ID NO: 25285 - DNA, 75 bp, synthetic construct
  source 1..75: mol_type = other DNA
cagacaaagaatcagttcaactataaagataacagctatgttttcgtgcttgaacgtggtggtgcctggtgctac

SEQ ID NO: 25286 - DNA, 75 bp, synthetic construct
  source 1..75: mol_type = other DNA
aaaaaaccgctctagccgttgcactcgcaaccggctttatcaccactaccaccgcccctgtgcaagctggtatcc

SEQ ID NO: 25287 - DNA, 75 bp, synthetic construct
  source 1..75: mol_type = other DNA
cgtcacgcagctggtggagcagaacaggcacacgggcttattgctgggggaagtgaaacaggaaaccagcgtatc

SEQ ID NO: 25288 - DNA, 75 bp, synthetic construct
  source 1..75: mol_type = other DNA
gtgggcgaagtcaaacatcagaatggaaggcatcccgggatcggcaaagaagcagcaatggcgctttatattgac

SEQ ID NO: 25289 - DNA, 75 bp, synthetic construct
  source 1..75: mol_type = other DNA
cggcagctatggcagtggtgtcttttggtgcaaatgcagctccacaggggcagggaaaagtaacttttaacggaa

SEQ ID NO: 25290 - DNA, 75 bp, synthetic construct
  source 1..75: mol_type = other DNA
ttttaacctgctgttctgcgtgctggtgatacgcgcacgcgggaacgtcacaaaaatctttccattgttgaggtg

SEQ ID NO: 25291 - DNA, 75 bp, synthetic construct
  source 1..75: mol_type = other DNA
gccattcatggtgcgccacagaacaatcacgcacaggcccgggaacgcatcgataccgattatcagcgcctcaaa

SEQ ID NO: 25292 - DNA, 75 bp, synthetic construct
  source 1..75: mol_type = other DNA
gctcgtatcagtctggaaaagaaactggaaacccgatctccgcgccttgtaagcctcgctaaaaaagcctcggtc

SEQ ID NO: 25293 - DNA, 75 bp, synthetic construct
  source 1..75: mol_type = other DNA
aaagccgccgaggagatcgggcaactcgtcaccgtcgcgcgtgaagaactccagcgacgcaaggtcaaagagcag

SEQ ID NO: 25294 - DNA, 75 bp, synthetic construct
  source 1..75: mol_type = other DNA
ccattataacggtgggctgacgccggaagagtcagagaacagataccatttttactgtaaaaccgtggccaatat

SEQ ID NO: 25295 - DNA, 75 bp, synthetic construct
  source 1..75: mol_type = other DNA
ctgattttacttacgtcagcacatggcagggcttcgtctatgtggcgttcatcattgatgtgtttgccggatgta

SEQ ID NO: 25296 - DNA, 75 bp, synthetic construct
  source 1..75: mol_type = other DNA
tgccatgacggaagaggatgtcatgccggaggcattgcgtcgttttgaggcaatggtggaagaagtggcacgcaa

SEQ ID NO: 25297 - DNA, 75 bp, synthetic construct
  source 1..75: mol_type = other DNA
acagatgtacggtaagccggtgagtgaactgagcgagacagagaagcagacggtctcgacactggcaacggttgc

SEQ ID NO: 25298 - DNA, 75 bp, synthetic construct
  source 1..75: mol_type = other DNA
cccggcgtgctcggcgtggtacgtagtgacaaccagtgtcaggtgattatcggcaataccgtttcacaagccttt

SEQ ID NO: 25299 - DNA, 75 bp, synthetic construct
  source 1..75: mol_type = other DNA
attttgataaagcgctggtgccatttttgttagtcctgtgtacatcttctttgtttaaaaaagaagtaaaatcag

SEQ ID NO: 25300 - DNA, 75 bp, synthetic construct
  source 1..75: mol_type = other DNA
ggcatcgttcaggactggtgtgaacaggagctgctcccgttgctcgatgcgctgtcgccgctcaataaacacgta

SEQ ID NO: 25301 - DNA, 75 bp, synthetic construct
  source 1..75: mol_type = other DNA
aaaatgcaatcattgcaggatgggtcaatgtaatcaccatggggcagggctggaaaggaaccgttggatggaatg

SEQ ID NO: 25302 - DNA, 75 bp, synthetic construct
  source 1..75: mol_type = other DNA
atgactaacaggaatttcagacaaattataaatctgcttgatttgcgctggcaacgtcgtgttccggttattcat

SEQ ID NO: 25303 - DNA, 75 bp, synthetic construct
  source 1..75: mol_type = other DNA
ctactatgatgcacatcagcaaaactacaattgaaaaaaggttagtccccatcccctgcccggataatccggaga

SEQ ID NO: 25304 - DNA, 75 bp, synthetic construct
  source 1..75: mol_type = other DNA
gggatgccaaagaccagtggttctcttcctttatgctgcgcatcaacgatacctgcagtttccatcgtctcttcg

SEQ ID NO: 25305 - DNA, 75 bp, synthetic construct
  source 1..75: mol_type = other DNA
aagaagcaaacagccttgtatggctatgggattatgccaaccgctcacaggcattattccgcgaactgtatccgg

SEQ ID NO: 25306 - DNA, 75 bp, synthetic construct
  source 1..75: mol_type = other DNA
tgccgatatcgcgcatgagatcagaacgcccatcaccaatctggtgacgcagactgaaatcgcactgagtcagga

SEQ ID NO: 25307 - DNA, 75 bp, synthetic construct
  source 1..75: mol_type = other DNA
gtgtattgcgatccgccgtatgacggtacgttttccagctatcacactgatggtttcactgaagatgaccagtat

SEQ ID NO: 25308 - DNA, 75 bp, synthetic construct
  source 1..75: mol_type = other DNA
gcggtgaaagacctcgaacacggaactggctttctgattgcaaagatcaccggatgctttaaaaaccctgattac

SEQ ID NO: 25309 - DNA, 75 bp, synthetic construct
  source 1..75: mol_type = other DNA
tttgccgggttttacaggcaaatcagacgagaataaccggacggatataattgtggtgcttcaggctcgcagggt

SEQ ID NO: 25310 - DNA, 75 bp, synthetic construct
  source 1..75: mol_type = other DNA
tcgtcccaaagaaccgaactggacagcctgggcaaacgaaattcgcctgatgtgtgtgcaggatggtcgtactca

SEQ ID NO: 25311 - DNA, 75 bp, synthetic construct
  source 1..75: mol_type = other DNA
gcgcactgcgccgggccattgagccgctgggatacctcattcgcgtgtctgagtggtgggagttcgacggagaac

SEQ ID NO: 25312 - DNA, 75 bp, synthetic construct
  source 1..75: mol_type = other DNA
ccttatgacaccacgccattcgtccagctttctattcacgaagtggtaaaaacgctgttcgaagccattatgctg

SEQ ID NO: 25313 - DNA, 75 bp, synthetic construct
  source 1..75: mol_type = other DNA
cctttctgcaattactgccgtcagggcttgcctggaataaaagccccgacagcaaattatctgcgctggcgcagg

SEQ ID NO: 25314 - DNA, 75 bp, synthetic construct
  source 1..75: mol_type = other DNA
ttaagtcaggcatagccggtctgatacacctcggtattcgatatgcagatgttgaggtcatgaaaattgctggag

SEQ ID NO: 25315 - DNA, 75 bp, synthetic construct
  source 1..75: mol_type = other DNA
aaaggcatggaaaatgctaactggcggtcagcgttatccggttgcttatctgacagcagaggaagctttttcccg

SEQ ID NO: 25316 - DNA, 75 bp, synthetic construct
  source 1..75: mol_type = other DNA
cgaaactgccaagaaaaatacagtcaacttatttactttggaaacaaggggctaacatgaaagaaatgttacctc

SEQ ID NO: 25317 - DNA, 75 bp, synthetic construct
  source 1..75: mol_type = other DNA
tcaaaatatgatgaacacgtttctggtaaaaaagggcaccagatagccgaagagtttgtacgagccgggttactg

SEQ ID NO: 25318 - DNA, 75 bp, synthetic construct
  source 1..75: mol_type = other DNA
caaattagtggtgataaggagtttctttttcctggggatcacgatgctacgaaagttatgagtgaaaatacggta

SEQ ID NO: 25319 - DNA, 75 bp, synthetic construct
  source 1..75: mol_type = other DNA
tgatcactactctggtagaccgttaacccgactggcggttgaactgactttgttggttttcatccgctcaagcga

SEQ ID NO: 25320 - DNA, 75 bp, synthetic construct
  source 1..75: mol_type = other DNA
aatgattcagtggtgggctgactacttgggagcaaataaagaaaaatatatcacaccttatgattatgctaagtc

SEQ ID NO: 25321 - DNA, 75 bp, synthetic construct
  source 1..75: mol_type = other DNA
tgcggctggcggcagaaaatgcaacaccaggcgaatggtgtactgatgactatggggttattgccaatgccggac

SEQ ID NO: 25322 - DNA, 75 bp, synthetic construct
  source 1..75: mol_type = other DNA
gttaaaacacttaacgaaggtgtcaaaaaaatgagtctggtgcacattggtaagaatctgcccgcagaaaaaaaa

SEQ ID NO: 25323 - DNA, 75 bp, synthetic construct
  source 1..75: mol_type = other DNA
cgtctaacccgaaaatctccacagataatgtaagtctgttcgataaagcgaaacatgcaaacgtactggagagcg

SEQ ID NO: 25324 - DNA, 75 bp, synthetic construct
  source 1..75: mol_type = other DNA
attggctacgtgattaaaacagaaaataaagaaaccccattcactgtagttgatatcgacggtccatcaggcaac

SEQ ID NO: 25325 - DNA, 75 bp, synthetic construct
  source 1..75: mol_type = other DNA
cctgcggattaattttggcacccagcgctactggctggagcagtccattaaccgaatgctgaaaaatgacaaata

SEQ ID NO: 25326 - DNA, 75 bp, synthetic construct
  source 1..75: mol_type = other DNA
gtgttctgcagcggacggtggctgtcgctgttgttcctgaaaaaatggaataaacgccgtaagcaggatgaacgc

SEQ ID NO: 25327 - DNA, 75 bp, synthetic construct
  source 1..75: mol_type = other DNA
gctgggatatctcattcgtgtgtctgagtggtgggagttcgacggcgaacccggaacattcaaggttgatgttgg

SEQ ID NO: 25328 - DNA, 75 bp, synthetic construct
  source 1..75: mol_type = other DNA
gaaatcaatccggaaatggagaatcgcctgagtgccgtgcttgccgcaagagaagcagaaggtcgccagatggcc

SEQ ID NO: 25329 - DNA, 75 bp, synthetic construct
  source 1..75: mol_type = other DNA
agcctcttcgaaccggatgtcccggaggttgtttccggagaagacgtgactcaggctgaacagccgcaacagccg

SEQ ID NO: 25330 - DNA, 75 bp, synthetic construct
  source 1..75: mol_type = other DNA
cagcgtcgtgaagaggtgaacattaatgtgcaccgggagcgcggggaggatgttgagccgggagatgatttctga

SEQ ID NO: 25331 - DNA, 75 bp, synthetic construct
  source 1..75: mol_type = other DNA
gggaaattcagaaaatgcgggagcttggcggagagctgaaacgccacggcatttccctgacaggcagcgataaca

SEQ ID NO: 25332 - DNA, 75 bp, synthetic construct
  source 1..75: mol_type = other DNA
cgtggggtctggttgcgggatggtgaatccatcaatgcggatggcagtcgttatggtgatccccgacgctcacgt

SEQ ID NO: 25333 - DNA, 75 bp, synthetic construct
  source 1..75: mol_type = other DNA
cagaacataatttgtcgcgagtgccggaagagcgaagctatgcagcgtgtactggctttttatcagggtaattat

SEQ ID NO: 25334 - DNA, 75 bp, synthetic construct
  source 1..75: mol_type = other DNA
aaagtccggcgtttaccgggacaccaaaagcgccaacgccagcggcggggaataatactacgcagcttgcgacca

SEQ ID NO: 25335 - DNA, 75 bp, synthetic construct
  source 1..75: mol_type = other DNA
cgctgaatatgctctatatcgacccgcagaacagcagccagattattgccgaacaggtgatcccagaaaacgagg

SEQ ID NO: 25336 - DNA, 75 bp, synthetic construct
  source 1..75: mol_type = other DNA
ctattagctctcgtagtgttaaacgttatggtgaaattagtgaaaatgtaggtacagaaactcgtcctcgtaaca

SEQ ID NO: 25337 - DNA, 75 bp, synthetic construct
  source 1..75: mol_type = other DNA
tacaaaattaagcttcgcgcatccggttacaggctcgtttatcaggtaattgatgagaaggtcgttttgcttgtg

SEQ ID NO: 25338 - DNA, 75 bp, synthetic construct
  source 1..75: mol_type = other DNA
aatcacgcattgaaaaactggagaacagcgtcgttgaactgaataaaaaactgtcggtgcagatcccttccgaag

SEQ ID NO: 25339 - DNA, 75 bp, synthetic construct
  source 1..75: mol_type = other DNA
ttcaggatgctctctcaaagccatcatcaattgtaggctatcgagacgaagctgagcgagtcgcggatgagcaat

SEQ ID NO: 25340 - DNA, 75 bp, synthetic construct
  source 1..75: mol_type = other DNA
gacagcgacggggagagccagcgaattgatccggccagctatccggaagactgggatgtcctgctgacggatgtt

SEQ ID NO: 25341 - DNA, 75 bp, synthetic construct
  source 1..75: mol_type = other DNA
ctggctggagaaacaaccggaaggttcagtgcgtccggtagtcattgagtcggtgacaaaaatcatggcgtgcgg

SEQ ID NO: 25342 - DNA, 75 bp, synthetic construct
  source 1..75: mol_type = other DNA
cgcttgcaatggcaggcatgttttcggcccagactctggctgatgagagcaaaacaggcttttatgtgaccggta

SEQ ID NO: 25343 - DNA, 75 bp, synthetic construct
  source 1..75: mol_type = other DNA
ccgccacatgacagggctgaatatcattcaggaaattccgggggatatttttgcagcggcggcaacttatgacgg

SEQ ID NO: 25344 - DNA, 75 bp, synthetic construct
  source 1..75: mol_type = other DNA
gagtggtgggagttcggcggagaaccgggaacatttaccgttgaagtcggcacgctggacagtggcgtgacggag

SEQ ID NO: 25345 - DNA, 75 bp, synthetic construct
  source 1..75: mol_type = other DNA
gccacacaaaaaaggtctgcttccggtgtaaaagtcgctcctgcccgcactgcggagtgaaggctggcgcacagt

SEQ ID NO: 25346 - DNA, 75 bp, synthetic construct
  source 1..75: mol_type = other DNA
agctttattgcggcagcgcttgcgcagtacacagccaacaaaagtgggctggacgtgcttgatgatggtgacctg

SEQ ID NO: 25347 - DNA, 75 bp, synthetic construct
  source 1..75: mol_type = other DNA
tctcgagggagtattggtaatactggcgggagtgaaacccgtccacgaaatatcgcatttaattacatcgtaagg

SEQ ID NO: 25348 - DNA, 75 bp, synthetic construct
  source 1..75: mol_type = other DNA
ttttcataaacgttggtttgggagaaggctctgcattaccggttggtgtgcctgttccgtggccttcagccactc

SEQ ID NO: 25349 - DNA, 75 bp, synthetic construct
  source 1..75: mol_type = other DNA
tggtgctgttcatctccggactgttgccacacaaaaaaggtctgcttccggtgtaaaagtcgctcctgcccgcac

SEQ ID NO: 25350 - DNA, 75 bp, synthetic construct
  source 1..75: mol_type = other DNA
ggtccctggtgttccacaaccggtggttactggcagagatgagccgcattgctgcggatgtgatactggaaatct

SEQ ID NO: 25351 - DNA, 75 bp, synthetic construct
  source 1..75: mol_type = other DNA
gtgtacagggaaatcattaccccgtttctggcccggggattttttcccgacgttctatgcctgtcatctggctgt

SEQ ID NO: 25352 - DNA, 75 bp, synthetic construct
  source 1..75: mol_type = other DNA
cccgactgaaccgttcaaaacgttatgtgttcacccgggatgatttcagggatatcgctggctatgatcaggttg

SEQ ID NO: 25353 - DNA, 75 bp, synthetic construct
  source 1..75: mol_type = other DNA
ggcctgacggtggagcagatgcaaaaccagatggacccggtgtacacgccggcgcgaaaaatccacctgtaccac

SEQ ID NO: 25354 - DNA, 75 bp, synthetic construct
  source 1..75: mol_type = other DNA
ggcagccgtttgattttgacgatgaaatgcagacccgcagcgatgagctggcaatggtcatgaagcgtacgcagg

SEQ ID NO: 25355 - DNA, 75 bp, synthetic construct
  source 1..75: mol_type = other DNA
ctgggtggagcgaccgagtgcgccatctggtcggtctactacccgataggtgaggtggaatcgacgtggaccagt

SEQ ID NO: 25356 - DNA, 75 bp, synthetic construct
  source 1..75: mol_type = other DNA
acgctactaccgcgattatatcgcggcgaacagcaacgatgacgcatcactgcctccgccggagcaggataaacg

SEQ ID NO: 25357 - DNA, 75 bp, synthetic construct
  source 1..75: mol_type = other DNA
tttcagcggtcagtcattttacccttggtgccgtactggagcagcaggagcatactgccgccctgaccgaccgcc

SEQ ID NO: 25358 - DNA, 75 bp, synthetic construct
  source 1..75: mol_type = other DNA
gagtcgccagatagcccctcaaacgcgctcaaaagctctcagacgcacgaaacgggttttagatgcccgccaggg

SEQ ID NO: 25359 - DNA, 75 bp, synthetic construct
  source 1..75: mol_type = other DNA
atgaatagaatctatcgcgtgatatggaattgcactctacaggtatttcaggcctgctcggaattaactcgcagg

SEQ ID NO: 25360 - DNA, 75 bp, synthetic construct
  source 1..75: mol_type = other DNA
cgtatgccgcacgcctcccgccaaaggaggctgtcgcgtatttccgcgccaaaggctacaacatcacctggaact

SEQ ID NO: 25361 - DNA, 75 bp, synthetic construct
  source 1..75: mol_type = other DNA
ttactggatgcgctggcggtggagatcctggcgcgtcatcatgattattcactgcctgcggcgggggaatcctgg

SEQ ID NO: 25362 - DNA, 75 bp, synthetic construct
  source 1..75: mol_type = other DNA
aaggccgcgcaacccgagtctcagccgcaactgccggagggggaggattacgggttttcagacgatatcccgttc

SEQ ID NO: 25363 - DNA, 75 bp, synthetic construct
  source 1..75: mol_type = other DNA
tggtagtacgccaccaggcgctgacagatatgcacacgcaggaactgaaccgcactgaaacggcgcgggaagtcc

SEQ ID NO: 25364 - DNA, 75 bp, synthetic construct
  source 1..75: mol_type = other DNA
acggattgcccgcaaccgggttgcgtttctttaccgtgtacggcccctggggtcgtccggatatggcactgttta

SEQ ID NO: 25365 - DNA, 75 bp, synthetic construct
  source 1..75: mol_type = other DNA
gtcaggaaataaagaatttagtatgggaagtccgggaaagaccggtgccaggcgataatgaagcattaattaaaa

SEQ ID NO: 25366 - DNA, 75 bp, synthetic construct
  source 1..75: mol_type = other DNA
taattttgtttcaagaacgtccaaaaataatggcgtctccgccagggttaaattaaaagatggtattagtccatg

SEQ ID NO: 25367 - DNA, 75 bp, synthetic construct
  source 1..75: mol_type = other DNA
cagtgggcgatgaacaacggatataaccatttcagcggaacggataccggtccgctggctgctgtcagggcaacg

SEQ ID NO: 25368 - DNA, 75 bp, synthetic construct
  source 1..75: mol_type = other DNA
cggaaaatgcattttatgctgttaatttaaaaaatacttatgaagtaaatggaacatggcccgctgatgcattag

SEQ ID NO: 25369 - DNA, 75 bp, synthetic construct
  source 1..75: mol_type = other DNA
gccagcagccgaaagaattagtctggaaacaacgcgagatacctattccgggtgacaatgaagcattaataaaaa

SEQ ID NO: 25370 - DNA, 75 bp, synthetic construct
  source 1..75: mol_type = other DNA
gacctaccagtggtggattggtgcctgtaacgagctggttaccgaaaacttaagcccgattacgaaaacgccgga

SEQ ID NO: 25371 - DNA, 75 bp, synthetic construct
  source 1..75: mol_type = other DNA
tcaccgacgagtacccgatggtactgtcaacggtgcgtgaagttggtcactactcttgccgttcgatgaccggta

SEQ ID NO: 25372 - DNA, 75 bp, synthetic construct
  source 1..75: mol_type = other DNA
tatcttatcgaccatcttgctttgcgttcatcagccacgcaatccgcttcacttcaagcgctcaagtttttctat

SEQ ID NO: 25373 - DNA, 75 bp, synthetic construct
  source 1..75: mol_type = other DNA
ctggtcacctccatgaacagttgcccggcgaatacagaacaggtgtgcctggagttctcctcggtgatcgagagt

SEQ ID NO: 25374 - DNA, 75 bp, synthetic construct
  source 1..75: mol_type = other DNA
gcgcactgtttcaggcggttcgcctgatgggctgtattaacgttattgtgggcgtaccgggtgtgggtaaaacgg

SEQ ID NO: 25375 - DNA, 75 bp, synthetic construct
  source 1..75: mol_type = other DNA
aaagcggtcaggtaaccgaagcggcttgtatggcacatgcccgacgcaagatccacgatgtacatgtccgccatc

SEQ ID NO: 25376 - DNA, 75 bp, synthetic construct
  source 1..75: mol_type = other DNA
gtctgatgaaaacctccgcacttggcagtcttgcgctggcaagcagtgctttcactctgccattttcccaaatgg

SEQ ID NO: 25377 - DNA, 75 bp, synthetic construct
  source 1..75: mol_type = other DNA
gcatagggatacagggctaaatattcttgatatcgccgctaactatgctgatttcgtaacggaaactgttttaag

SEQ ID NO: 25378 - DNA, 75 bp, synthetic construct
  source 1..75: mol_type = other DNA
tgggaaaagttgcttttgatttattaattgaactctcttctgtgcacagtattaaaattattaatgctctttatg

SEQ ID NO: 25379 - DNA, 75 bp, synthetic construct
  source 1..75: mol_type = other DNA
atgcagacaatcatctatcagataaccccgagcaaatggtgtacggagagagtcctcattgcatcaacagggctc

SEQ ID NO: 25380 - DNA, 75 bp, synthetic construct
  source 1..75: mol_type = other DNA
tggcaggccgtaacatcatggttacggtaaagcctgatggcagtgtgattggagaggaagttcgtcctttcccaa

SEQ ID NO: 25381 - DNA, 75 bp, synthetic construct
  source 1..75: mol_type = other DNA
aaagagtgcaccaatatctacgcgccgttggcgaaccgtcttgggattgggcaactgaaatgggagctggaagat

SEQ ID NO: 25382 - DNA, 75 bp, synthetic construct
  source 1..75: mol_type = other DNA
acacctggccgattgaagtcaccgctgaagatgtcaaaggcaatttttcgaatcgtgaacagagcatggtagtcg

SEQ ID NO: 25383 - DNA, 75 bp, synthetic construct
  source 1..75: mol_type = other DNA
ctatcgaggcgcaataacagcccccaaagctacagttagcatgaataatgcgatctggcatctaaatagccagtc

SEQ ID NO: 25384 - DNA, 75 bp, synthetic construct
  source 1..75: mol_type = other DNA
gcgcgaaaaatccacctgtaccactgcgaccatcgcggcctgccgctggcgctcatcagcacggaaggggcaaca

SEQ ID NO: 25385 - DNA, 75 bp, synthetic construct
  source 1..75: mol_type = other DNA
gcgaactgctgccgttctggttgccgtgggtgaacggcgtgctggagcagggcaaaggtgcacaggatgacattc

SEQ ID NO: 25386 - DNA, 75 bp, synthetic construct
  source 1..75: mol_type = other DNA
aaggtgtgtgaagcaacagccaccacagaaggtgtatgacgctacggtgtcgtttgccttcaacgtggggacggg

SEQ ID NO: 25387 - DNA, 75 bp, synthetic construct
  source 1..75: mol_type = other DNA
tgctgcgtgtggagcgggcgctggaaagatgtgtgaagcaacagccgccacaaaaggtgtatgactcggtggtgt

SEQ ID NO: 25388 - DNA, 75 bp, synthetic construct
  source 1..75: mol_type = other DNA
gatattgaaaatgccatgtggactattcctgctgaacgcgagcctctgccaggcgtaaatttctcgcaccggggt

SEQ ID NO: 25389 - DNA, 75 bp, synthetic construct
  source 1..75: mol_type = other DNA
gcactacgatgcgtcggaccgcatcacgcaccggacggtgaacggcgacccggcagagcagtggcagtatgatga

SEQ ID NO: 25390 - DNA, 75 bp, synthetic construct
  source 1..75: mol_type = other DNA
aaacgacgatgatttcggtgaggccaccaccaccgcgctgcgggcccgcacagaggacgcatttattgcccgtta

SEQ ID NO: 25391 - DNA, 75 bp, synthetic construct
  source 1..75: mol_type = other DNA
agcgcgggtgtctggaccgatggcattggtaatacatcgggcgtcattcccggcaaaaccatcacggaacgacag

SEQ ID NO: 25392 - DNA, 75 bp, synthetic construct
  source 1..75: mol_type = other DNA
cggtcgagaaccgctatcgccagctttttcgccagcgtctggtaatactggcggttatttttatcgctatcattg

SEQ ID NO: 25393 - DNA, 75 bp, synthetic construct
  source 1..75: mol_type = other DNA
gtctccagggattaatggctacctcgaaaatgataagacttactcggccggtggccgctccctcactcgcactag

SEQ ID NO: 25394 - DNA, 75 bp, synthetic construct
  source 1..75: mol_type = other DNA
gtgactcacaagacaaaacagtttcaaccagtaaaaaaacgtaaacagcattcgcctgaatttctcagtgaagcc

SEQ ID NO: 25395 - DNA, 75 bp, synthetic construct
  source 1..75: mol_type = other DNA
tccaaaaaatacaggcgcacgggatcgccgataacacaatttacgcgactgaaggaacacaaattatcttcaccg

SEQ ID NO: 25396 - DNA, 75 bp, synthetic construct
  source 1..75: mol_type = other DNA
aaagctaccaaatggtattgaggcatatttttctaagcattacccaaatgtgtatgatgactttgatattccatt

SEQ ID NO: 25397 - DNA, 75 bp, synthetic construct
  source 1..75: mol_type = other DNA
cctcttatctgagtccgggaaatcccccggcagataaagagcagaatgatccgctggcacaggttttccataatg

SEQ ID NO: 25398 - DNA, 75 bp, synthetic construct
  source 1..75: mol_type = other DNA
tccaacaatgtataaaaaccagggtgacataatcactattatggtcggggaagacattgatttttctgatatcta

SEQ ID NO: 25399 - DNA, 75 bp, synthetic construct
  source 1..75: mol_type = other DNA
ggattatgccaaccgctcacaggcattgttccgtgagttgtatcccgcattaaaactgattcagtctggctattc

SEQ ID NO: 25400 - DNA, 75 bp, synthetic construct
  source 1..75: mol_type = other DNA
cgcttctgctcgccctcgcctcacccgcggtactcgccgcgccgggatcctgtgagcgcatacagagcgatatat

SEQ ID NO: 25401 - DNA, 75 bp, synthetic construct
  source 1..75: mol_type = other DNA
atgtctggttttttccagcgtctgtttggcaaggataataagcctgctatcgctcgcggtccgctgggacttcat

SEQ ID NO: 25402 - DNA, 75 bp, synthetic construct
  source 1..75: mol_type = other DNA
taagtatcttgtgctggcaatcatctgtgtgggcggtctgtccggcctggtcgccagccagagcacaggaagaaa

SEQ ID NO: 25403 - DNA, 75 bp, synthetic construct
  source 1..75: mol_type = other DNA
cctcccaatccgggaagctctatggctgggtcgaaagaattggtaacaaggttccccatccttttttgctcttta

SEQ ID NO: 25404 - DNA, 75 bp, synthetic construct
  source 1..75: mol_type = other DNA
atggctggctggcatcttgataccaaaatggcgcaggatatcgtggcacgtaccatgcgcatcatcgataccaat

SEQ ID NO: 25405 - DNA, 75 bp, synthetic construct
  source 1..75: mol_type = other DNA
caggcattaacggacctgctttataacgaatcgcggccgggtggacttgtattgccttcatcattctggcgggct

SEQ ID NO: 25406 - DNA, 75 bp, synthetic construct
  source 1..75: mol_type = other DNA
tccaggagtgccggaaggtaactttgcgcagcaacggaagctgtcatacggatatcgctccctaccggctggtcc

SEQ ID NO: 25407 - DNA, 75 bp, synthetic construct
  source 1..75: mol_type = other DNA
tgcaggtaatttagataatgcaaatcaaacaattacggcaattctgtcctctctcagcaccgatgagcaactaga

SEQ ID NO: 25408 - DNA, 75 bp, synthetic construct
  source 1..75: mol_type = other DNA
gaaagtatcagcttatcatactcatggtgcagatagtcatggagaatattgggacgaaatattttcaggtaaaga

SEQ ID NO: 25409 - DNA, 75 bp, synthetic construct
  source 1..75: mol_type = other DNA
gccgaaaacgggtatctggagaaaaacccgtttaattcaataacaccgctgaggaaatcaaaaccagtgccggat

SEQ ID NO: 25410 - DNA, 75 bp, synthetic construct
  source 1..75: mol_type = other DNA
ctgaaacgcgatctggcacgtaacagcgtgctgaccatcattgaacgcgacaatgagcgcgtgggcagcaacccg

SEQ ID NO: 25411 - DNA, 75 bp, synthetic construct
  source 1..75: mol_type = other DNA
tggcgtcacccgtgatggtattcctgaaccctggcatcttgactggcatatcgggttaatgagtattgtcgtggg

SEQ ID NO: 25412 - DNA, 75 bp, synthetic construct
  source 1..75: mol_type = other DNA
ggcaatataatcacaacggtgagcttgttattacgggtgataatgccacagtaaacaacaatggcaaaaccaccg

SEQ ID NO: 25413 - DNA, 75 bp, synthetic construct
  source 1..75: mol_type = other DNA
catttccaggtatagttttcccgctgccgcaaaatcggctgccgggcgtaggaacccgagttacttattggcgac

SEQ ID NO: 25414 - DNA, 75 bp, synthetic construct
  source 1..75: mol_type = other DNA
agagaactctttgcaggccaaaatatcggaatgtacctttactgttgatattgaaaaacttcactgtcctggtga

SEQ ID NO: 25415 - DNA, 75 bp, synthetic construct
  source 1..75: mol_type = other DNA
acattgatcgcggtcttctgacaaaagaatggcgaaaaggaaatcgtgtttcacgcatcacgcgtacggcttccg

SEQ ID NO: 25416 - DNA, 75 bp, synthetic construct
  source 1..75: mol_type = other DNA
ggttgccccttccggattcttatgatcgtcctgatccacgtattatgcagctggcacgcaggaatacacaaaccc

SEQ ID NO: 25417 - DNA, 75 bp, synthetic construct
  source 1..75: mol_type = other DNA
ctggctaaaacctacggcggtgctgctcgcgcattcgaccagatcgataacgcgccggaagaaaaagctcgtggt

SEQ ID NO: 25418 - DNA, 75 bp, synthetic construct
  source 1..75: mol_type = other DNA
cttcatgatgttcagaatatgagtctgctgaaccatccaaaagcagacctgaaaaaagggcagtatggttgtgtg

SEQ ID NO: 25419 - DNA, 75 bp, synthetic construct
  source 1..75: mol_type = other DNA
tggcatcacaatgatatttatagcgccttccccctcagttcaggacaaaccagccagctctgacaataccaacgt

SEQ ID NO: 25420 - DNA, 75 bp, synthetic construct
  source 1..75: mol_type = other DNA
tcactcgcacggcttccggtgctaatgctggcggcggaaacctcaccgatcgcggcgaaggtttcgtacacgatc

SEQ ID NO: 25421 - DNA, 75 bp, synthetic construct
  source 1..75: mol_type = other DNA
gcaggcccgtttacaggctaatcctgcgatggcgagtgcagttgataccgtgactggcctcggtgcttcattcgg

SEQ ID NO: 25422 - DNA, 75 bp, synthetic construct
  source 1..75: mol_type = other DNA
cattaaaaaaagcagcagagcaaacccgcaatgcgggaaacagactcattttacttatccctaaagattataaag

SEQ ID NO: 25423 - DNA, 75 bp, synthetic construct
  source 1..75: mol_type = other DNA
gaaagccttgtgtggaatgcggcatacctgatccatgtatttttgatgttattagtgattttccagaggccggcg

SEQ ID NO: 25424 - DNA, 75 bp, synthetic construct
  source 1..75: mol_type = other DNA
gggccagcacgtcggcggtacagaatagcggcaacaaaaccacaaagcctccagatacttcactgctgaaaagca

SEQ ID NO: 25425 - DNA, 75 bp, synthetic construct
  source 1..75: mol_type = other DNA
atccgttcgctgtatcgcaattttactcaccactatatcaaggtaaaacgcagcatcggtgtggcagctggcgag

SEQ ID NO: 25426 - DNA, 75 bp, synthetic construct
  source 1..75: mol_type = other DNA
atggacaacaaaatatcaacctattctccggcattcagtattgtgtcatggatagctctcgttggtggtatcgtt

SEQ ID NO: 25427 - DNA, 75 bp, synthetic construct
  source 1..75: mol_type = other DNA
cgtggagcacagggcgcacagggaccggcaggcccgacgggggcaacggggcctgctggtcctcgtggtgagacg

SEQ ID NO: 25428 - DNA, 75 bp, synthetic construct
  source 1..75: mol_type = other DNA
atgagcctgattattgatgttatttcgcgtaaaacatccgtcaaacaaacgctgattaatcctggcgacgtcacg

SEQ ID NO: 25429 - DNA, 75 bp, synthetic construct
  source 1..75: mol_type = other DNA
cggtgcgattgtttctctgctcggcctgctgttgctgcttgcacaaatccgtcgcagccacagtcgtaaatttca

SEQ ID NO: 25430 - DNA, 75 bp, synthetic construct
  source 1..75: mol_type = other DNA
cagcccgcaggcaccacaataacggtgacgctgaacgggcaaaattacaccgccataacagatgcttccggcaac

SEQ ID NO: 25431 - DNA, 75 bp, synthetic construct
  source 1..75: mol_type = other DNA
ctacgctcaatggatggctgtgtgcttacgggaattgcgggaacaaacatgccagacaagagccgtatagatgaa

SEQ ID NO: 25432 - DNA, 75 bp, synthetic construct
  source 1..75: mol_type = other DNA
aaacgctggctaaaagtgcacagtgggcaacaaagcaatggccacagttttccggtgtggtcgcgctgacggcag

SEQ ID NO: 25433 - DNA, 75 bp, synthetic construct
  source 1..75: mol_type = other DNA
tttacaaccatgctcagtatctcgataagcgcagagaaatgatgcagtggtgggcggactggcttgatgaaaagg

SEQ ID NO: 25434 - DNA, 75 bp, synthetic construct
  source 1..75: mol_type = other DNA
accgcagcggtacgcagatgcgccactttacttacgatgataaataccggggccggatggtggggcaccgttatg

SEQ ID NO: 25435 - DNA, 75 bp, synthetic construct
  source 1..75: mol_type = other DNA
gaggagtccggcctgtattacaaccgccaccgctattatgacccgctgcaggggcggtatatcactcaggatccg

SEQ ID NO: 25436 - DNA, 75 bp, synthetic construct
  source 1..75: mol_type = other DNA
tcctgaacgcactgctgatggctgtatggcggcgtaatccccaaaaacaggtgctggttcattcggatcagggca

SEQ ID NO: 25437 - DNA, 75 bp, synthetic construct
  source 1..75: mol_type = other DNA
ttattatgacctttatatcagggatatgttgataagaaatctggaaaaaggacaatccttagttgataatggagt

SEQ ID NO: 25438 - DNA, 75 bp, synthetic construct
  source 1..75: mol_type = other DNA
gtctctgcaacgttgctggcaatcttcttcgtaccggtgttctttgtggtgatccgccgttgctttaaaggataa

SEQ ID NO: 25439 - DNA, 75 bp, synthetic construct
  source 1..75: mol_type = other DNA
agatggaactttagaatcaatttccgtgccgcaaggatgggagttgtgttatctgaatgatattggcgattgggg

SEQ ID NO: 25440 - DNA, 75 bp, synthetic construct
  source 1..75: mol_type = other DNA
cgcagaacacctggcgttcgtgaagaaaaactgaaaaatattaatggagatgataaagacggaataaaacaataa

SEQ ID NO: 25441 - DNA, 75 bp, synthetic construct
  source 1..75: mol_type = other DNA
aggtaataccaatatgcgcagaacacctggcgttcgggaagatagactgaaaaatattaatagagatgataaaga

SEQ ID NO: 25442 - DNA, 75 bp, synthetic construct
  source 1..75: mol_type = other DNA
atggtctggcgacttttgatctgaaaagtagtaagcaggaagacaacacggttgaagtcacccttgaaaatggcg

SEQ ID NO: 25443 - DNA, 75 bp, synthetic construct
  source 1..75: mol_type = other DNA
tcgctgaaaatgccctgcgggcggtcagtctgggtcgtaaaaacttcctgttcttcggctctgaccatggtggtg

SEQ ID NO: 25444 - DNA, 75 bp, synthetic construct
  source 1..75: mol_type = other DNA
gggaaagagatgaagagaaaataataacaggtgtaacaattgatattggtatatctggaacagtgatttctgaga

SEQ ID NO: 25445 - DNA, 75 bp, synthetic construct
  source 1..75: mol_type = other DNA
gcatattgctgaaacggagatgccgaaacaactgggttatgcactgaagcagcaactgaggttatttctgacacg

SEQ ID NO: 25446 - DNA, 75 bp, synthetic construct
  source 1..75: mol_type = other DNA
tgatattctccgggcacgccgggcaaccggcctgatgacacgcgacaactacagaacggtaaataacattaccct

SEQ ID NO: 25447 - DNA, 75 bp, synthetic construct
  source 1..75: mol_type = other DNA
cagcatattgaggcaggtatttcactgtgtgatgcggtgaactttctcgtggaaaaatacgcgctggtgcgtacc

SEQ ID NO: 25448 - DNA, 75 bp, synthetic construct
  source 1..75: mol_type = other DNA
gattcgggataccgcgccgggggccatgtgtgatgcggtggagattaacagcgggctggtccggtatctgcggga

SEQ ID NO: 25449 - DNA, 75 bp, synthetic construct
  source 1..75: mol_type = other DNA
cgggagctgaacaagcaccgggatattgttcgacagattgtcgattcctccagtcgtattgtgtcggaaaagtga

SEQ ID NO: 25450 - DNA, 75 bp, synthetic construct
  source 1..75: mol_type = other DNA
gtcgtctgattcgcgtaaatcagaacggtaaatttcgttactgcctgccggacggtaatttaccagcagagccga

SEQ ID NO: 25451 - DNA, 75 bp, synthetic construct
  source 1..75: mol_type = other DNA
ggcagtcggccagttcacgcccatctcctgttgaaatctggcagacactgctcacccgactgctggaccagcact

SEQ ID NO: 25452 - DNA, 75 bp, synthetic construct
  source 1..75: mol_type = other DNA
gcgaggagaagcaacgattaagccgggtaatggtattgagcaggcaactcactggatgccgctaccggagccacc

SEQ ID NO: 25453 - DNA, 75 bp, synthetic construct
  source 1..75: mol_type = other DNA
aattataaaaatggtggcatttcctacaggtcggctcgtgatggttatgggtttgaattaggttggtcagatttc

SEQ ID NO: 25454 - DNA, 75 bp, synthetic construct
  source 1..75: mol_type = other DNA
gtgcaaataaccgaagcattactttcagagccaggggaaatccggcgttttgttcagcaggcggtggatcactgg

SEQ ID NO: 25455 - DNA, 75 bp, synthetic construct
  source 1..75: mol_type = other DNA
gataatccgcttattaatattctggagaagttctccagctggtatgacacgaataacgtgacactgggcggtgtc

SEQ ID NO: 25456 - DNA, 75 bp, synthetic construct
  source 1..75: mol_type = other DNA
catccgccaatgagtcgtggcgctattttatggggcggcgaaaatttattgcgtcccggctggccacgcagatgt

SEQ ID NO: 25457 - DNA, 75 bp, synthetic construct
  source 1..75: mol_type = other DNA
tgatttaccggcagagccggaagctgcatccgtagcggaaaccgatggtaaagcctttcctcagccagcaggtgt

SEQ ID NO: 25458 - DNA, 75 bp, synthetic construct
  source 1..75: mol_type = other DNA
atgcagcagctttcctttctgcccggcgcgatgacgcccggcgaacgcagtctcattctgcgggccctgaaaacc

SEQ ID NO: 25459 - DNA, 75 bp, synthetic construct
  source 1..75: mol_type = other DNA
agcgggaaaaaattaaagggctgatcgtggaattcgtacgccttaacggacgaggcacgattcggcagttatcgg

SEQ ID NO: 25460 - DNA, 75 bp, synthetic construct
  source 1..75: mol_type = other DNA
atgcagcagctttcctttctgcccggagaaatgacaaccagagagcgcagtctcattctgcgggccctgaaaacc

SEQ ID NO: 25461 - DNA, 75 bp, synthetic construct
  source 1..75: mol_type = other DNA
tttttcacgaaacaattcccgtcaacatgaacaccctgaagctggaagtcagtcgtgcagcggctgaaagtctca

SEQ ID NO: 25462 - DNA, 75 bp, synthetic construct
  source 1..75: mol_type = other DNA
cgtacgtgaatggctgcgactgcatatggccgcgcttgagcgggaagagttccgggtgttgtatctggacaacca

SEQ ID NO: 25463 - DNA, 75 bp, synthetic construct
  source 1..75: mol_type = other DNA
tttttaagagctaaaaatatttgcaaagataattttctaataatagtagcgttattcatattgttgtgttttaac

SEQ ID NO: 25464 - DNA, 75 bp, synthetic construct
  source 1..75: mol_type = other DNA
gaagaggtcgctccaaaagttagcgctgacatgatgattgagtttatcgctcaggagggggctaaaacctgtgaa

SEQ ID NO: 25465 - DNA, 75 bp, synthetic construct
  source 1..75: mol_type = other DNA
agaactggctgcgcgacttgatatcagtcgtgaagaggctgtcaacgagctgtgggaactcaaaagaaatggcgt

SEQ ID NO: 25466 - DNA, 75 bp, synthetic construct
  source 1..75: mol_type = other DNA
ggtacagaaagatgcaacacaggaagatattaaaacagaaactgtggcggacattgtgcagtcgctgcacatggc

SEQ ID NO: 25467 - DNA, 75 bp, synthetic construct
  source 1..75: mol_type = other DNA
atagcacaaaaagaattatatgtttatttatactttttcttgttttccctgattttttgttttatacattagggg

SEQ ID NO: 25468 - DNA, 75 bp, synthetic construct
  source 1..75: mol_type = other DNA
ttttcgccgcaacgacagtctgtgcagtctggttgaagacccggtgtttattcaggccttaccccattttcgctt

SEQ ID NO: 25469 - DNA, 75 bp, synthetic construct
  source 1..75: mol_type = other DNA
cgatggtgatgaccccgcagtattcagaccaatacaaaaatacatcaatggcacatggtataacgtcgcacaggt

SEQ ID NO: 25470 - DNA, 75 bp, synthetic construct
  source 1..75: mol_type = other DNA
acctgtctcaactacgtgctggaaagtccgtactggaacgtaaaaggtaactttttctgttatctgaacgatcat

SEQ ID NO: 25471 - DNA, 75 bp, synthetic construct
  source 1..75: mol_type = other DNA
ccgtggcagggggaatatcttttgcagcaggggtggtgccaggcacttgttgctaaagggctgattaaagactta

SEQ ID NO: 25472 - DNA, 75 bp, synthetic construct
  source 1..75: mol_type = other DNA
atggcctaaaaatcgtcattatgttgggaatgctggtcattattctctgcggtatccgttttgccgccgagatca

SEQ ID NO: 25473 - DNA, 75 bp, synthetic construct
  source 1..75: mol_type = other DNA
tgtaacctggcttgatactgctaatcagggccaccgagcacatcatcttgaagatcgcggaacaagcatttacaa

SEQ ID NO: 25474 - DNA, 75 bp, synthetic construct
  source 1..75: mol_type = other DNA
cgataatttatttcaccatacccgcgatgttattgcgtttgtcacccggacatggaacatcattttcagcattcc

SEQ ID NO: 25475 - DNA, 75 bp, synthetic construct
  source 1..75: mol_type = other DNA
cgaccacctcttcccgctccctctactgtgctaccagccgcgatatgatcaagttctccctgagcgttcggctga

SEQ ID NO: 25476 - DNA, 75 bp, synthetic construct
  source 1..75: mol_type = other DNA
ttgcctgtcgttatattcctcaaatactaggatacgaaacaccaagtacatgtctgtcatttttacctcaagttt

SEQ ID NO: 25477 - DNA, 75 bp, synthetic construct
  source 1..75: mol_type = other DNA
gatccgctggtcggggttgtctgggcagatgccggaaccagtgcagaagaagtgccggtaaaactcaatgtctga

SEQ ID NO: 25478 - DNA, 75 bp, synthetic construct
  source 1..75: mol_type = other DNA
acgcgcttcggtaaagatatgccgggggcaatggcggaatatggcagggagtatataaaacggaaaacgaagcac

SEQ ID NO: 25479 - DNA, 75 bp, synthetic construct
  source 1..75: mol_type = other DNA
agagtggcttatttctccccaacccagcatcaccgctttgcatttcctgctcatctggtcacggcatcaggcagt

SEQ ID NO: 25480 - DNA, 75 bp, synthetic construct
  source 1..75: mol_type = other DNA
atgttagccatctgcctgatgtttataaatgagatctgccatgccactgattgctttgatcttgcaggccgggat

SEQ ID NO: 25481 - DNA, 75 bp, synthetic construct
  source 1..75: mol_type = other DNA
gagggatttaaggacattgttaaaattgacactgttgacagttatcagggaaaggaaaatcggatcattatcctg

SEQ ID NO: 25482 - DNA, 75 bp, synthetic construct
  source 1..75: mol_type = other DNA
gcgcttaaatgaaaatgggttttatttaccatcaagcctggccgataaagattatttctcgtatcagaaacggat

SEQ ID NO: 25483 - DNA, 75 bp, synthetic construct
  source 1..75: mol_type = other DNA
tggcgctggaacagtggccgattaaaggcatcattctggtgccaaactgtaataatccgctgggatttattatgc

SEQ ID NO: 25484 - DNA, 75 bp, synthetic construct
  source 1..75: mol_type = other DNA
atgctcaaacccgacagcctgcgcagggcgctgactgatgccgtcacggtgctgaaaaccagccccgagatgctg

SEQ ID NO: 25485 - DNA, 75 bp, synthetic construct
  source 1..75: mol_type = other DNA
tttactcagttaagcagtgcgaccaacagcacgtctgaaacactcgccgcaacaccaaaagcggtaaaagcagca

SEQ ID NO: 25486 - DNA, 75 bp, synthetic construct
  source 1..75: mol_type = other DNA
gtcgttacgggttcagttaacggaaaccgtgatgaattaattgatacaacacaggcaaggccaattcagtattgc

SEQ ID NO: 25487 - DNA, 75 bp, synthetic construct
  source 1..75: mol_type = other DNA
atggtctatgaccacaacggcgttattatttgtattgaaaaggatgtttcagcaattaatccagaaggcgcaagc

SEQ ID NO: 25488 - DNA, 75 bp, synthetic construct
  source 1..75: mol_type = other DNA
gcatcaacccggatgttgttgagcagtttctggcccttatgaacacacattgtaaatcctcagaagaggcgctcg

SEQ ID NO: 25489 - DNA, 75 bp, synthetic construct
  source 1..75: mol_type = other DNA
tgcctgataacgggcatctgtatgtcaaagttaagtcaaatcctaaagcgccagctgaagtaaatgtgactttct

SEQ ID NO: 25490 - DNA, 75 bp, synthetic construct
  source 1..75: mol_type = other DNA
cgaggtatcggtgattgtctggatgaggctgagcaagagcttatcgttaccattaacaaatatgccagtcagttg

SEQ ID NO: 25491 - DNA, 75 bp, synthetic construct
  source 1..75: mol_type = other DNA
cagcgacatgcctgctgacattgttgagataagtacagacttatacaatgaattaattgccggacagcaggaagg

SEQ ID NO: 25492 - DNA, 75 bp, synthetic construct
  source 1..75: mol_type = other DNA
ccggcaatccagaaacaggagtaaagccagaacctgaatttaataatacaagttatgtacaacgtataggattta

SEQ ID NO: 25493 - DNA, 75 bp, synthetic construct
  source 1..75: mol_type = other DNA
ggaaaccagaattccggcaatgaaatttagcgaatgggatcaattccggtggtggttaaactacctgcaagggta

SEQ ID NO: 25494 - DNA, 75 bp, synthetic construct
  source 1..75: mol_type = other DNA
accgccaggtaaagaacccgaatccggtgttcacaccccgtgaaggtgccggaacgctgaagttctgcgaaaaac

SEQ ID NO: 25495 - DNA, 75 bp, synthetic construct
  source 1..75: mol_type = other DNA
gggtatggatgaactgatagcgaaagcctggcgttttgtgcgtgagcgtttccgcagttaccagacagagcttaa

SEQ ID NO: 25496 - DNA, 75 bp, synthetic construct
  source 1..75: mol_type = other DNA
cccgaccattcccatcggccttttgatgtatgccaacctggtgtttaacaaaggcattgatgagttttatgccga

SEQ ID NO: 25497 - DNA, 75 bp, synthetic construct
  source 1..75: mol_type = other DNA
gactgatccatcacggatatatgttcgaactgaaaggggaaagctacaggaaaaagacagcgaaggcggtaacaa

SEQ ID NO: 25498 - DNA, 75 bp, synthetic construct
  source 1..75: mol_type = other DNA
ctggctgtaagtctgtatgaccgcatcaacgacgcggcgctactggccagtctcataaatttgtcgctgaaccct

SEQ ID NO: 25499 - DNA, 75 bp, synthetic construct
  source 1..75: mol_type = other DNA
tgcggactggcgacagagtccggtgcaggaaaactctccatcacccgtgccacccgggccctgacgttcctgtca

SEQ ID NO: 25500 - DNA, 75 bp, synthetic construct
  source 1..75: mol_type = other DNA
atgagcactgataaagaagaatttgcactatattgcgaagcaaaaaatgacaaagtaagaaaacgcctaggaatt

SEQ ID NO: 25501 - DNA, 75 bp, synthetic construct
  source 1..75: mol_type = other DNA
gcgcggatgtgtagagcgcgttcaaaatctacgccgcgactttgaagctcacatcaatcattcacaaaaagcggc

SEQ ID NO: 25502 - DNA, 75 bp, synthetic construct
  source 1..75: mol_type = other DNA
aaaggtggtttttactggactacagcaaaaaaattatctgttgcaatctcccgctgcattaccgcaatggatgac

SEQ ID NO: 25503 - DNA, 75 bp, synthetic construct
  source 1..75: mol_type = other DNA
caggtcagattctgcctgttcgatggctggcacagcacggcagcgaaaaaccgatcacacacgtttcgcgggacg

SEQ ID NO: 25504 - DNA, 75 bp, synthetic construct
  source 1..75: mol_type = other DNA
tggtatcacaatggtacttatcgcgccctcgccctctgttcaggataaaccagccagcactgacaataccaacgt

SEQ ID NO: 25505 - DNA, 75 bp, synthetic construct
  source 1..75: mol_type = other DNA
tgcagcccataacccactggcaaaccgcaagcagaatcctgccaatctctttaccgctgcagaggaaacggtgat

SEQ ID NO: 25506 - DNA, 75 bp, synthetic construct
  source 1..75: mol_type = other DNA
gtcgcagaaggtgatgtgagcacacctgttgtggtgaagccgacaggtggagaaggtgcagtaatcagcgccacc

SEQ ID NO: 25507 - DNA, 75 bp, synthetic construct
  source 1..75: mol_type = other DNA
gcgggacaacgtccggcgtcccgtggatttgcggtgacaccacgtacgactggaaggcgaagtatgcagtgcagt

SEQ ID NO: 25508 - DNA, 75 bp, synthetic construct
  source 1..75: mol_type = other DNA
ttctgtatttttgcttttttgccctgactgacctgcagaaagctgatgaaagaaaaagtgatgaaaggaatgaag

SEQ ID NO: 25509 - DNA, 75 bp, synthetic construct
  source 1..75: mol_type = other DNA
caaaggtcctctgtgtgattgtcggtatttcattttcactaatgctggttgctctttttctgtccctcgcctggg

SEQ ID NO: 25510 - DNA, 75 bp, synthetic construct
  source 1..75: mol_type = other DNA
gtctccttgaatatccggatgctgccttatggcagcatcaacaagagatgtttgaggcgattgccgcgtcgaaaa

SEQ ID NO: 25511 - DNA, 75 bp, synthetic construct
  source 1..75: mol_type = other DNA
tcagggcggcgtcgccgtcagaccttgcggagcgactgacacaaaaactgaaggaggggtggcagccatttggca

SEQ ID NO: 25512 - DNA, 75 bp, synthetic construct
  source 1..75: mol_type = other DNA
cttcagccagagatgcggcggcctccaaagaggcggcaaaatcatcagaaacgaacgcctccacaagcgccagca

SEQ ID NO: 25513 - DNA, 75 bp, synthetic construct
  source 1..75: mol_type = other DNA
agagagcccgttatctcgtgaagtatgagacgaagcagcatgacggttctggtcaacgtaattatggttgcagtc

SEQ ID NO: 25514 - DNA, 75 bp, synthetic construct
  source 1..75: mol_type = other DNA
gtggaaatggattggcagatgagcggcaagcccttgctgctctacctagacaacgcggccgagttcaagagcgag

SEQ ID NO: 25515 - DNA, 75 bp, synthetic construct
  source 1..75: mol_type = other DNA
ggatattaccaaaaatgcagcgtatggcgttgagatagaaagtctggtgctggagataaatgcaccggcatcatc

SEQ ID NO: 25516 - DNA, 75 bp, synthetic construct
  source 1..75: mol_type = other DNA
tgtcacgatgaactgcggcgtaagaaaatcagcgcgcttatccctccccgaaaaggtgcgggttactggcccggt

SEQ ID NO: 25517 - DNA, 75 bp, synthetic construct
  source 1..75: mol_type = other DNA
atgaaagagacgaaaaacatcgataccgaaaacacggtagttactgacactgtgaaagaaaccagtgagcgtggc

SEQ ID NO: 25518 - DNA, 75 bp, synthetic construct
  source 1..75: mol_type = other DNA
actcaagaagtaaacttttgtgatatatgggataccgaggtaaaaataactgagtctggagttaaaaactctagt

SEQ ID NO: 25519 - DNA, 75 bp, synthetic construct
  source 1..75: mol_type = other DNA
accgatctgtactgggcccgttcgcgcgtgctggaatacctgaatcaggttcagggcaaactgcctgcgggtgtg

SEQ ID NO: 25520 - DNA, 75 bp, synthetic construct
  source 1..75: mol_type = other DNA
ctttaccgaagtacgctacaaaggcactaaaaccatcgccattacccctgactactctgaagtggccaaattgtg

SEQ ID NO: 25521 - DNA, 75 bp, synthetic construct
  source 1..75: mol_type = other DNA
tctccgttgagcgcgtctcgtcactgaaagcggtgatcgggaacgtcgcgattctaggtggcccggcccttgggg

SEQ ID NO: 25522 - DNA, 75 bp, synthetic construct
  source 1..75: mol_type = other DNA
atgcctgcacaaattgactatcttgcggataaatattgttttacagaactgaatgaatctccacgcctttgccag

SEQ ID NO: 25523 - DNA, 75 bp, synthetic construct
  source 1..75: mol_type = other DNA
aagattgcccggcaaaatgctgtaaacaaaatctggatgctcgaaggttacttgctgaagcagaagctaagcgaa

SEQ ID NO: 25524 - DNA, 75 bp, synthetic construct
  source 1..75: mol_type = other DNA
caaagtgaatgaccgggaaggtctctatgtgggggtcgcctcagaaaacggaatctatggtcactcccgtttttg

SEQ ID NO: 25525 - DNA, 75 bp, synthetic construct
  source 1..75: mol_type = other DNA
ctgcgtgaagaatggggcatcagccagaaaaatgtggtgtttaacgataaacggtttggttgcgtgtacagcctg

SEQ ID NO: 25526 - DNA, 75 bp, synthetic construct
  source 1..75: mol_type = other DNA
agattgcccgggaagtgaaagtgccccgtgaacggctgaagtatgcgctggaagccggtttactggtgactgcac

SEQ ID NO: 25527 - DNA, 75 bp, synthetic construct
  source 1..75: mol_type = other DNA
atgcatatacgaattgactatctggcggataaaaactgctttacagaactgaatgaatctccacgccttcgccgg

SEQ ID NO: 25528 - DNA, 75 bp, synthetic construct
  source 1..75: mol_type = other DNA
gctacttcaaacagaagggtgaaacctttgccgatgggcatggccagcttctcaataccaaccgtgactgggagg

SEQ ID NO: 25529 - DNA, 75 bp, synthetic construct
  source 1..75: mol_type = other DNA
aaacggctggcccgcaaaacgctctgtttttcacgttctgttgagcttcatgaaaaagtcatcggggcattcatc

SEQ ID NO: 25530 - DNA, 75 bp, synthetic construct
  source 1..75: mol_type = other DNA
aagcggttgggtcgtaaaacaatctgcttctcacgctcagttgagatccacgaaaaagtgatcggagcgtttatc

SEQ ID NO: 25531 - DNA, 75 bp, synthetic construct
  source 1..75: mol_type = other DNA
acccggcttcatggcacgcctgtttataagatttgtgggcgttgcaatggaaaccggtttagccgtttaccaacc

SEQ ID NO: 25532 - DNA, 75 bp, synthetic construct
  source 1..75: mol_type = other DNA
ggtaataccttcttccaggacaccattcgtcgtaaccgtgagctttctgccgaaggctttaacttcattggtacc

SEQ ID NO: 25533 - DNA, 75 bp, synthetic construct
  source 1..75: mol_type = other DNA
atatcagcgaactgagtgcatttactgaaaaaggcattctggaagccaccgccagtgtttcacaaacgccacaac

SEQ ID NO: 25534 - DNA, 75 bp, synthetic construct
  source 1..75: mol_type = other DNA
gtataaaaacacttatggtggcaggttcgctgtataccgaattgcagactgtgttccgatgcgtgagaaacgccc

SEQ ID NO: 25535 - DNA, 75 bp, synthetic construct
  source 1..75: mol_type = other DNA
tcagttactcgcaccgccgataaagattctgcaaaaacttttgttcaggagacgctgaaagatacctgggagtct

SEQ ID NO: 25536 - DNA, 75 bp, synthetic construct
  source 1..75: mol_type = other DNA
cttcttttaaattcagaaagggaggacagtgttgccagtatggcgctttatgcagaccgctggctggaagaagca

SEQ ID NO: 25537 - DNA, 75 bp, synthetic construct
  source 1..75: mol_type = other DNA
aagaaaaaatgactaaaatgccaaacggtgctgtggatgcgttaaaggaagaattaacccgacgcatcagtaaac

SEQ ID NO: 25538 - DNA, 75 bp, synthetic construct
  source 1..75: mol_type = other DNA
cctgtttgccaacggtgaaaccgtactgcgtgatgcgtccggtgagaaacgtatcaaaggtgaaaaagacggtcg

SEQ ID NO: 25539 - DNA, 75 bp, synthetic construct
  source 1..75: mol_type = other DNA
cggttcgattgacctcgggtacggttctgcaagttctgaagaggggattgtggttgcgatgggcggccctaaaaa

SEQ ID NO: 25540 - DNA, 75 bp, synthetic construct
  source 1..75: mol_type = other DNA
tgctggaagcatggaaaaagtatcgggtattgctgaaccgtgttgatacgtcaactgcacaggatattgaatggc

SEQ ID NO: 25541 - DNA, 75 bp, synthetic construct
  source 1..75: mol_type = other DNA
atgaaactgacgcctgttattgctgcactgcgtgcccgctgtccgtattttgaaaaccgggttgcaggcgcggcc

SEQ ID NO: 25542 - DNA, 75 bp, synthetic construct
  source 1..75: mol_type = other DNA
gatctgaccgagctggtctcatcacaagctaaagtgatgctcgcgggcattgatacgctgtggcactgctccagc

SEQ ID NO: 25543 - DNA, 75 bp, synthetic construct
  source 1..75: mol_type = other DNA
catcctttcctgtgatacggagaagagtatccgggagcggttttctgtttaccaggtggcggggcagcgtgccgg

SEQ ID NO: 25544 - DNA, 75 bp, synthetic construct
  source 1..75: mol_type = other DNA
gccctctggatgaagtgacccgtggtcagggaagtattattcccggtagtagggagcaggttatacagactcttg

SEQ ID NO: 25545 - DNA, 75 bp, synthetic construct
  source 1..75: mol_type = other DNA
ctgacggaaatccgtgtcggcccgcctgatgcttatctgcctgaacccgaagcccccggcgcgcggaaaaagaaa

SEQ ID NO: 25546 - DNA, 75 bp, synthetic construct
  source 1..75: mol_type = other DNA
atgagtatatttatctcatggcttgttctgattatttcggtggcctgcgccattgggattatgcgaattattaat

SEQ ID NO: 25547 - DNA, 75 bp, synthetic construct
  source 1..75: mol_type = other DNA
cagacggtgaatatcaactacagtctggcgggtaaacccacgccgcgccgtgaactggtaatctgcaacttctga

SEQ ID NO: 25548 - DNA, 75 bp, synthetic construct
  source 1..75: mol_type = other DNA
cggaaatataagtattgatgaagacgcatctatgaacctgtctgtaggaaatgctaatgttcacgcaaatactat

SEQ ID NO: 25549 - DNA, 75 bp, synthetic construct
  source 1..75: mol_type = other DNA
gatcccgcccaaaatgagcgtatccggctttatgggatatctgaaagggaaaagcagtctgatgctttacgagca

SEQ ID NO: 25550 - DNA, 75 bp, synthetic construct
  source 1..75: mol_type = other DNA
ttctgattatttcggtggtctgcgccattgggattatgcaaattattcattcagtaaaaaagattgaacgctttt

SEQ ID NO: 25551 - DNA, 75 bp, synthetic construct
  source 1..75: mol_type = other DNA
tctacccgacaccagaacaggctgaatttatcaacgcccagttcggtgcagtgcgttttgcgtacaacaaagctc

SEQ ID NO: 25552 - DNA, 75 bp, synthetic construct
  source 1..75: mol_type = other DNA
actgacatttccggataacgttcctgaggatttgcgggagcgggaaagtacggtctattttctccggaagacgga

SEQ ID NO: 25553 - DNA, 75 bp, synthetic construct
  source 1..75: mol_type = other DNA
acagtgttcaggattaccggcgtgatgaagtgaaaccggggtatgtgaaggagaccaccaccgccagtgatggcc

SEQ ID NO: 25554 - DNA, 75 bp, synthetic construct
  source 1..75: mol_type = other DNA
gaaggggcgaaacacccgcaagggccaacgccaattgaacggctgaaacaggaatacgaacgccggaaggcagct

SEQ ID NO: 25555 - DNA, 75 bp, synthetic construct
  source 1..75: mol_type = other DNA
agacgagtatttgtcacccgcgagccagtgtcacagttgatgaacaatgttcgcaagtggtggatttactgcagc

SEQ ID NO: 25556 - DNA, 75 bp, synthetic construct
  source 1..75: mol_type = other DNA
tctgccgcatggcacggcaattgacctgcccgacgtggcatcgtcacccgtaacagaaactatcaacctttggga

SEQ ID NO: 25557 - DNA, 75 bp, synthetic construct
  source 1..75: mol_type = other DNA
aacagactccgtatatttccgtagtagatattctgcgagcaaggcgctctaccgacttgctaaaaactaacgtga

SEQ ID NO: 25558 - DNA, 75 bp, synthetic construct
  source 1..75: mol_type = other DNA
gtgaaaaactgtttgcgcccgcaaaagagccgggacggtatattggcgtcagggtggaggacttccggtgtgaag

SEQ ID NO: 25559 - DNA, 75 bp, synthetic construct
  source 1..75: mol_type = other DNA
aaactggaccctaatgaagcttattatcgggtattggttaccaccagtaataattatcttacagacaggaatgga

SEQ ID NO: 25560 - DNA, 75 bp, synthetic construct
  source 1..75: mol_type = other DNA
ggcagccgggaacccgggcggtgatgttcagccagcctgtcagccagttactggccgctgcccgtatggatgtgt

SEQ ID NO: 25561 - DNA, 75 bp, synthetic construct
  source 1..75: mol_type = other DNA
tgaacaactacaccaacgcgggcctgagtattctgttcctgattgtggtgtacagcatcatcttctacggtttca

SEQ ID NO: 25562 - DNA, 75 bp, synthetic construct
  source 1..75: mol_type = other DNA
acataccctgggtgattctcggaatcatcggtgcattctgcctcgcggtagttgcattacgtcggggggagcacg

SEQ ID NO: 25563 - DNA, 75 bp, synthetic construct
  source 1..75: mol_type = other DNA
aatggtgagcttctacggctggaaccgcgtcgatcgctttatggccgcctggaaaaatgcgggattcagcgttgt

SEQ ID NO: 25564 - DNA, 75 bp, synthetic construct
  source 1..75: mol_type = other DNA
cagaaaaagcttattatgcttccatcggaaacgatgatctggcagcctgagttcacagataaaacactctccagg

SEQ ID NO: 25565 - DNA, 75 bp, synthetic construct
  source 1..75: mol_type = other DNA
aacatgacactgttaccgtttatccagcccggctcacaccggttgcagttactgttcagcatgagcctgtccgac

SEQ ID NO: 25566 - DNA, 75 bp, synthetic construct
  source 1..75: mol_type = other DNA
aggtacgattaacatagtgaacggaacaccaattcacgaacgttcccgaaatatcgataacagacgctctctggg

SEQ ID NO: 25567 - DNA, 75 bp, synthetic construct
  source 1..75: mol_type = other DNA
ggacgcactggaactggtcgatacttccagtgcaccagatattgaatggcctacgcctccggcagttcaggccag

SEQ ID NO: 25568 - DNA, 75 bp, synthetic construct
  source 1..75: mol_type = other DNA
aggccaacgaatacatgaacagtaaacaatggcccggtaaagccgctattggtcgtctgaaaggtgacgaactgg

SEQ ID NO: 25569 - DNA, 75 bp, synthetic construct
  source 1..75: mol_type = other DNA
agtttggcggtgatggctggacccagaccgataacttcatgacagcccgtacttccggggtattaacctatcgta

SEQ ID NO: 25570 - DNA, 75 bp, synthetic construct
  source 1..75: mol_type = other DNA
cataaagttggtgaaggcacattaaccgttaatggaaaaggggttaataatggaggactgaaagtcggtgatgga

SEQ ID NO: 25571 - DNA, 75 bp, synthetic construct
  source 1..75: mol_type = other DNA
cctgacggtgaataaactggatgcaacaggcagtgattttgttttgcgtacggacctgaaaaatgccgataaaat

SEQ ID NO: 25572 - DNA, 75 bp, synthetic construct
  source 1..75: mol_type = other DNA
aattctggctgcttgcagagatatcgccgattcgcagtgaaaaagtgctttatgcgctgagagattatctggttc

SEQ ID NO: 25573 - DNA, 75 bp, synthetic construct
  source 1..75: mol_type = other DNA
tcccgtttgccgggaaatgcctcatcactgtctgaactgaatgcctccggcctgacgtccctgctgaatgcagtc

SEQ ID NO: 25574 - DNA, 75 bp, synthetic construct
  source 1..75: mol_type = other DNA
ctatcatcagaggactgtcataaatatctgacaacagctctccggcagggacacaaggtgaggcatctatcctgt

SEQ ID NO: 25575 - DNA, 75 bp, synthetic construct
  source 1..75: mol_type = other DNA
atgcaggtaaatacaacagaacagaaaaatcaaaaaagcccagggcaagacgttgtaacgccagtatttaaacaa

SEQ ID NO: 25576 - DNA, 75 bp, synthetic construct
  source 1..75: mol_type = other DNA
taaatacatctggcgttttatcgccctgagcacggcacaaccgcgcgtgattaccattgaggccaccagcgaaca

SEQ ID NO: 25577 - DNA, 75 bp, synthetic construct
  source 1..75: mol_type = other DNA
ggattacctggacgcactggaactggtggatacctccagtgctccagatattgaatggcctacacctccggtaac

SEQ ID NO: 25578 - DNA, 75 bp, synthetic construct
  source 1..75: mol_type = other DNA
acaccgcccctggatgatgatctgatagtgaatttatgcaccagtgaacatctgctggttcatcatccgatgctg

SEQ ID NO: 25579 - DNA, 75 bp, synthetic construct
  source 1..75: mol_type = other DNA
gatggtgagtttctatggctggaaccgtattgaccgctttatggcagcctggaaacgcgccggattcagcgttgt

SEQ ID NO: 25580 - DNA, 75 bp, synthetic construct
  source 1..75: mol_type = other DNA
ggctgactgccaccacgatgctgttctcactgggtgccagcatgatactgggtggtgtggcccagatgctggccc

SEQ ID NO: 25581 - DNA, 75 bp, synthetic construct
  source 1..75: mol_type = other DNA
tcgaatacaaggaagatgttatctgcaaaaactctgatggcagcacgcacagaggggtaagtctggatatacgtt

SEQ ID NO: 25582 - DNA, 75 bp, synthetic construct
  source 1..75: mol_type = other DNA
gttattggtatctcattacgcactattgccaaaaagagaaggtgctctgatggcactattaggaaggagttgcaa

SEQ ID NO: 25583 - DNA, 75 bp, synthetic construct
  source 1..75: mol_type = other DNA
cttatgattgatggatgtgtggcgaggttgcgtaaatataagccagaagaatatgagctactaattgcccacttt

SEQ ID NO: 25584 - DNA, 75 bp, synthetic construct
  source 1..75: mol_type = other DNA
ccagctgatgagcgacacctgtcctgaaatcaccctggacaatgtactggcaacttttcgccatctgaatgccag

SEQ ID NO: 25585 - DNA, 75 bp, synthetic construct
  source 1..75: mol_type = other DNA
acctgaaacgccaaccactgatgctttcctggctgaagtccgggcgcagggggtggatgctgctatagaagctgc

SEQ ID NO: 25586 - DNA, 75 bp, synthetic construct
  source 1..75: mol_type = other DNA
atgagcgaatatttcagaatacttcagggactgcctgacggtccttttacccgcaaacaggccgaagccgttgcc

SEQ ID NO: 25587 - DNA, 75 bp, synthetic construct
  source 1..75: mol_type = other DNA
gaaggcacaagactactgcgccccggtgtcgccaaacctgtctggcataattcgcttcgcctgccaaagggagaa

SEQ ID NO: 25588 - DNA, 75 bp, synthetic construct
  source 1..75: mol_type = other DNA
gaacgcaaggcccaatttgttgcgcttcatccgaaagatgagcaggaagccgtgatccgcacgctggaactggaa

SEQ ID NO: 25589 - DNA, 75 bp, synthetic construct
  source 1..75: mol_type = other DNA
tttcgacatcgcagcaggatactgagaaccaacggctggagcttgggcaggctgggtggcaaattgattactggt

SEQ ID NO: 25590 - DNA, 75 bp, synthetic construct
  source 1..75: mol_type = other DNA
taccggaccccgccatcatcgcggagcctgactttgaggcaattctggctgacacaaaggccatgatgattgcgg

SEQ ID NO: 25591 - DNA, 75 bp, synthetic construct
  source 1..75: mol_type = other DNA
gcccctgcagaaatctccagtgttggagctgtaaatggcgcttatcaagaaggggggcgttttaaagccttttat

SEQ ID NO: 25592 - DNA, 75 bp, synthetic construct
  source 1..75: mol_type = other DNA
agaggacgggtattcgacagtattcagaaacttgacggcgcaggccaggatgcgctgcgcaccgggcaggtgatt

SEQ ID NO: 25593 - DNA, 75 bp, synthetic construct
  source 1..75: mol_type = other DNA
tacttatgtatttagacgttattttggtgtttctccaagtcaatactctcagaggagttcagaaagtaaaattct

SEQ ID NO: 25594 - DNA, 75 bp, synthetic construct
  source 1..75: mol_type = other DNA
atctgcccagtcacagctcggcgttaaaccacgcattctgggtgtacctggtcacgacaccaaggcggtagctac

SEQ ID NO: 25595 - DNA, 75 bp, synthetic construct
  source 1..75: mol_type = other DNA
ctatggcgatataccgccagcatccgcagtcccggttgtttcccttctgcacgggtaaatacaaatggtctggca

SEQ ID NO: 25596 - DNA, 75 bp, synthetic construct
  source 1..75: mol_type = other DNA
tatgccaccgcccgtgcgctcggtctgcgcgccaaaattgatgagcagactggatggcacaaaagcctgtccaac

SEQ ID NO: 25597 - DNA, 75 bp, synthetic construct
  source 1..75: mol_type = other DNA
gcaggacacggcaaccgatgctggactgctgaaccagaacgacgtcaccacccttatccgcaaagacggtttccg

SEQ ID NO: 25598 - DNA, 75 bp, synthetic construct
  source 1..75: mol_type = other DNA
gtaaagcgggggagtccggtacgctggcccgttcgctggatgccatcgctgaccaggcaaaacccgtgaccattg

SEQ ID NO: 25599 - DNA, 75 bp, synthetic construct
  source 1..75: mol_type = other DNA
cgatatgcgtaaatccttcaacggtctgggagaacaggtacaacatgtgctggatgagaaccccttctcaggtca

SEQ ID NO: 25600 - DNA, 75 bp, synthetic construct
  source 1..75: mol_type = other DNA
gtttgttgattaccgcggaaaactggcaagccaaggtgtagacagcgaagaaatattcgccaataactttgcagc

SEQ ID NO: 25601 - DNA, 75 bp, synthetic construct
  source 1..75: mol_type = other DNA
tacagatacaggttgcggaaatatttgtcttgcaggtgctgtggtggaagttattggcactcgcggcgcaatgac

SEQ ID NO: 25602 - DNA, 75 bp, synthetic construct
  source 1..75: mol_type = other DNA
catttacacagggtagcaatactctggttggggcagggacagcctggaacgtaacagctaatggtgtgttgccgg

SEQ ID NO: 25603 - DNA, 75 bp, synthetic construct
  source 1..75: mol_type = other DNA
acagtgatgagtcatcgtggcatctcgttgaagatcatcggggtaaaacggtttatgacgtggcttccggcgacg

SEQ ID NO: 25604 - DNA, 75 bp, synthetic construct
  source 1..75: mol_type = other DNA
acaggttatcgaccatcaggctgtacaggcctggtcggacagcctcagtactgacaatccgttaccggtgccacg

SEQ ID NO: 25605 - DNA, 75 bp, synthetic construct
  source 1..75: mol_type = other DNA
atgaacatgaaaaaaacgctgctggtcatactgaccagcatctcgctggcttctccggctgccgtggcagcaacc

SEQ ID NO: 25606 - DNA, 75 bp, synthetic construct
  source 1..75: mol_type = other DNA
ctcactacaaggttgactccatcagggagtcatggacaagtatcttaaaacgcgcaggtctgagacacagaaaat

SEQ ID NO: 25607 - DNA, 75 bp, synthetic construct
  source 1..75: mol_type = other DNA
gtgagcagaagcgggtgcgtatccccgccatgaaagtcagcgaatggggccacctgctccgcgcgcttgaaattg

SEQ ID NO: 25608 - DNA, 75 bp, synthetic construct
  source 1..75: mol_type = other DNA
ctgacatgcctgatgaagtgcgcgcaaagctgcacaaaatcaccggtctgtttctgcgtgacggtggtgatgccg

SEQ ID NO: 25609 - DNA, 75 bp, synthetic construct
  source 1..75: mol_type = other DNA
ctatgtggaatgcgtacagatggaccgttggtatgagccaccagtgagtttcgacggcctggcgcgaaccttccg

SEQ ID NO: 25610 - DNA, 75 bp, synthetic construct
  source 1..75: mol_type = other DNA
tggggtaaatttcgtccgtgggtactgtttggcgcactgccattcgggatcgtctgtgtactggcctatagcacg

SEQ ID NO: 25611 - DNA, 75 bp, synthetic construct
  source 1..75: mol_type = other DNA
ttttcttcacagaaaatcgaccaggtttatttggcagcagcaaaagtcggaggtattttagctaacagttcttat

SEQ ID NO: 25612 - DNA, 75 bp, synthetic construct
  source 1..75: mol_type = other DNA
ctcggcatcgagcgcgtcactctctaccgatatgtcggtcccaaaggcgagctcagagaccatggaaagcatgtt

SEQ ID NO: 25613 - DNA, 75 bp, synthetic construct
  source 1..75: mol_type = other DNA
cgctggcgaaagtggtgggcttcaagggacgcgtggtttttgatgcgtcgaaaccggacgggacgccgcgcaaac

SEQ ID NO: 25614 - DNA, 75 bp, synthetic construct
  source 1..75: mol_type = other DNA
gcagaagtctcatccataaccaagcctggtgcagaaattcatgagtatcagcctacccctggcgatattaaacgt

SEQ ID NO: 25615 - DNA, 75 bp, synthetic construct
  source 1..75: mol_type = other DNA
gtaccactgacgacagttcagtgggctgatcagcattattatctgccaaaagagtcttcatatactcccgggcaa

SEQ ID NO: 25616 - DNA, 75 bp, synthetic construct
  source 1..75: mol_type = other DNA
gcattctttcagcaccatccggcaagtgaacatcaggggccgatgcactggggacatgccaccagtccggacatg

SEQ ID NO: 25617 - DNA, 75 bp, synthetic construct
  source 1..75: mol_type = other DNA
tgaatatcaaaggctggctcctcaacgaacccaattaccgcctgggactcatggccggatatcaggaaagccgtt

SEQ ID NO: 25618 - DNA, 75 bp, synthetic construct
  source 1..75: mol_type = other DNA
ccgaggacagccagttcctggaaacccgcaagtttcagctggaagaaatctgtcgcctgttccgcgtgccgctgc

SEQ ID NO: 25619 - DNA, 75 bp, synthetic construct
  source 1..75: mol_type = other DNA
aaaatcaacagcggactggttgaccctctggcggcccattacatctctcccattgatgaggacagctatacgctg

SEQ ID NO: 25620 - DNA, 75 bp, synthetic construct
  source 1..75: mol_type = other DNA
gaagaaggtgtggaacccaggctcagcgccagtattgggtttatgtcaaaaatgaccggcaaacgtgaccacgag

SEQ ID NO: 25621 - DNA, 75 bp, synthetic construct
  source 1..75: mol_type = other DNA
tgggtgcagcattgctggcaaaggtcagaaagccggaggaggtgcagttgcgtgcctggttactccagttcctga

SEQ ID NO: 25622 - DNA, 75 bp, synthetic construct
  source 1..75: mol_type = other DNA
ataaaacggattcgacagcactgctgccctgcattgaacaggccagggaagatatccgtaccctgcgccaactgc

SEQ ID NO: 25623 - DNA, 75 bp, synthetic construct
  source 1..75: mol_type = other DNA
atgttattaaatcgtaaaaataactttatcgctgcggttgttctgggggcgtttctcctttctggctgtggtgcg

SEQ ID NO: 25624 - DNA, 75 bp, synthetic construct
  source 1..75: mol_type = other DNA
taaatgttcaattacccgcaataacccttatcctttttgcgctctgtgttgggatattttgttacctcgcacaat

SEQ ID NO: 25625 - DNA, 75 bp, synthetic construct
  source 1..75: mol_type = other DNA
cggtgtgggccttgctgctggtctggtgggtatggctgcagatgcgatggtggaagatgtgaactataccatgat

SEQ ID NO: 25626 - DNA, 75 bp, synthetic construct
  source 1..75: mol_type = other DNA
tggcccataacgctggggtgagcgtacatatcgtgcgcgactacctggtgcgcggcttgttacggccggtggcct

SEQ ID NO: 25627 - DNA, 75 bp, synthetic construct
  source 1..75: mol_type = other DNA
catctggcttgaacccgccagcgaacgcacggtatttctgcagatcaaaaacacgtctgataaagacatgagtgg

SEQ ID NO: 25628 - DNA, 75 bp, synthetic construct
  source 1..75: mol_type = other DNA
acctgaactgggaagtctttcacgtcgagagattagtgcacttataggtgtggctcctgtaaacagagactccgg

SEQ ID NO: 25629 - DNA, 75 bp, synthetic construct
  source 1..75: mol_type = other DNA
cgaaaaaggccgccagatacgccgatacttcatcgagtgcgaaaagaaacttcgcagcatgcaaccagcgcagca

SEQ ID NO: 25630 - DNA, 75 bp, synthetic construct
  source 1..75: mol_type = other DNA
cgttactgggcgttggtgaatcgagcgacgcttaccatatttcggccccgcatccgcagggcgaaggggcgatcc

SEQ ID NO: 25631 - DNA, 75 bp, synthetic construct
  source 1..75: mol_type = other DNA
cgacgtgccctggcagaactgaacagccagttgacggaaattcgcggttctgctgtcggaatggctggcgcattt

SEQ ID NO: 25632 - DNA, 75 bp, synthetic construct
  source 1..75: mol_type = other DNA
atcctcatatgttaaggcatgcttgcggttatgaactggcggagcgtggtgcagatacccgtttaattcaggatt

SEQ ID NO: 25633 - DNA, 75 bp, synthetic construct
  source 1..75: mol_type = other DNA
gaagctggcaacgttaaagcgttacgttgaagctatgggaggaaagttgagcctagatgttgaactccctaccgg

SEQ ID NO: 25634 - DNA, 75 bp, synthetic construct
  source 1..75: mol_type = other DNA
gcgacctcaccgctatcgttgccccggacggcagccgcagtgagatacagtatgatgcgtggggaaaggccgtca

SEQ ID NO: 25635 - DNA, 75 bp, synthetic construct
  source 1..75: mol_type = other DNA
ttaccgggatggcggaccgcttcgggcggacgctgacgtaccggcgtgaggccgccggtgacctggccggggaaa

SEQ ID NO: 25636 - DNA, 75 bp, synthetic construct
  source 1..75: mol_type = other DNA
acgctggagttttcggtgtcagcatggctggtaaatgactggtatcccacagcaagtatcagcgatttgctggtt

SEQ ID NO: 25637 - DNA, 75 bp, synthetic construct
  source 1..75: mol_type = other DNA
ttaactggtttaaatcgctgctgtcaccgatggagtccagcaaggaaacgctggataaatgtaccagtgctggcg

SEQ ID NO: 25638 - DNA, 75 bp, synthetic construct
  source 1..75: mol_type = other DNA
acgtggagacgtgactgaaattgttcacgctggcgatcctgatgatgagggacagctacttgttgatgaagtcct

SEQ ID NO: 25639 - DNA, 75 bp, synthetic construct
  source 1..75: mol_type = other DNA
cgcagaggccggacgtcagcaggaaagcatttccgcagtcacaacaaatacacaggcatcactatccccccgcct

SEQ ID NO: 25640 - DNA, 75 bp, synthetic construct
  source 1..75: mol_type = other DNA
atggatgctggcgttctcgttctagcagttcaacaatacccaatcacaaaacaattcactgataacgaactttgc

SEQ ID NO: 25641 - DNA, 75 bp, synthetic construct
  source 1..75: mol_type = other DNA
gaggcagggctgagcatgttgtgctggaaaataccggccaactgacggtcgtagctcaaacctcggcggtagata

SEQ ID NO: 25642 - DNA, 75 bp, synthetic construct
  source 1..75: mol_type = other DNA
cccgttttctgggaacatttctgacggatttaactcaggttctgcctggtgttcaacattttgtcgcggtacagc

SEQ ID NO: 25643 - DNA, 75 bp, synthetic construct
  source 1..75: mol_type = other DNA
agggagacatgacccagtacggcggcccgatagtccaggggtcggcaggcgtgagaattggcgcgccaaccggcg

SEQ ID NO: 25644 - DNA, 75 bp, synthetic construct
  source 1..75: mol_type = other DNA
aacgttcgtgcgggttttgttccggtaattggtgaagccgttttgggagttgatggctcagtggatatgattgaa

SEQ ID NO: 25645 - DNA, 75 bp, synthetic construct
  source 1..75: mol_type = other DNA
ggccagtttcgttttcgtgcgcagccggtgtttccggctgatgtgaaggcgggagagtattccggggcgctgact

SEQ ID NO: 25646 - DNA, 75 bp, synthetic construct
  source 1..75: mol_type = other DNA
ccagctgcgccatgatggtggggcagcctcgcaggatgaggtgcgtcgggtcagcgtgcgctgggtcgatggttt

SEQ ID NO: 25647 - DNA, 75 bp, synthetic construct
  source 1..75: mol_type = other DNA
gtttgtttttccattaagacgggtaatttcgactatgccgctcagtttccggactctcccaacctgagaaaattt

SEQ ID NO: 25648 - DNA, 75 bp, synthetic construct
  source 1..75: mol_type = other DNA
aagacggtggcagtgtggtgttcccgccggtgctggtgcagatgctcgaccggctggaaagtgaaatcctggctg

SEQ ID NO: 25649 - DNA, 75 bp, synthetic construct
  source 1..75: mol_type = other DNA
ttccgatggattttaatatttatgaaattccgggcagcgtttatcgtcgcgcaaaagaaatcgtcctgaaaagag

SEQ ID NO: 25650 - DNA, 75 bp, synthetic construct
  source 1..75: mol_type = other DNA
gcatcagcaattcttaaatatgcaggtctgacctctgcatttattgccggtgtggcccctgatggtgaagccctg

SEQ ID NO: 25651 - DNA, 75 bp, synthetic construct
  source 1..75: mol_type = other DNA
ttaccaaaagctttctaatggaaagacttcttccataaaagggcgctcagtggtcacggtaaactactatatgac

SEQ ID NO: 25652 - DNA, 75 bp, synthetic construct
  source 1..75: mol_type = other DNA
taatcgaagaagccaaattaaaaatagcgattgcgaaatgccatcccaattcaggcgtggcacgagtagagggtg

SEQ ID NO: 25653 - DNA, 75 bp, synthetic construct
  source 1..75: mol_type = other DNA
atgatgcggaagtcggttcactgattgccgcgtacctggcaaaacatgatatgcaggttaccgtagaaccgcgcg

SEQ ID NO: 25654 - DNA, 75 bp, synthetic construct
  source 1..75: mol_type = other DNA
cggcgattgattatgtcgcacgtgctgaaaatcagcgaatgcagttacttgctcatgccgataatgtcacagctg

SEQ ID NO: 25655 - DNA, 75 bp, synthetic construct
  source 1..75: mol_type = other DNA
tcggtaaccaaagaggaattgctgtatatcaggaaagatttgctgaccgggtatcagaattcaacgaaaaacaaa

SEQ ID NO: 25656 - DNA, 75 bp, synthetic construct
  source 1..75: mol_type = other DNA
atgaaaattcgttcacaagtcggcatggtgctgaatctcgataagtgcatcggctgccacacctgttcagttacc

SEQ ID NO: 25657 - DNA, 75 bp, synthetic construct
  source 1..75: mol_type = other DNA
tttctgagttgattgctcgttggtttgagatgtacggtaaaaccttgtcctctggtgcagagcgcaaagtcaaac

SEQ ID NO: 25658 - DNA, 75 bp, synthetic construct
  source 1..75: mol_type = other DNA
gaaaaactgactgccggccgggatgtaacgcttgccgcgaaaaacatcacacaggataccgccagccagattaac

SEQ ID NO: 25659 - DNA, 75 bp, synthetic construct
  source 1..75: mol_type = other DNA
ctctcaatgatgaacagaatttattctgtactattacttttcaacacgttatcgatgaaaacaaaacatatatat

SEQ ID NO: 25660 - DNA, 75 bp, synthetic construct
  source 1..75: mol_type = other DNA
tggcctgttcggtatgtccgggagggattacctatgctaacccggtgaacccgctgctgggtgcgaaggtgctgc

SEQ ID NO: 25661 - DNA, 75 bp, synthetic construct
  source 1..75: mol_type = other DNA
gagatgttcgggcttttgcctctgatgcacagggaatggaaagaaccgtgtttggtggaacaaatcaggcggatg

SEQ ID NO: 25662 - DNA, 75 bp, synthetic construct
  source 1..75: mol_type = other DNA
cctgcggatatccgcttacagctgcgcgataacacactgatactcagtgataacggcggcagaagcctgtatttt

SEQ ID NO: 25663 - DNA, 75 bp, synthetic construct
  source 1..75: mol_type = other DNA
actcacccgtaatccgccggatattctgatcaccacacccgaatcactctatctgatgctgacctcccgcgcgcg

SEQ ID NO: 25664 - DNA, 75 bp, synthetic construct
  source 1..75: mol_type = other DNA
caaattatgttgaatatatttcaaaaaacaatcccccttatttatcaaaaaagagagatgccagtataaatctaa

SEQ ID NO: 25665 - DNA, 75 bp, synthetic construct
  source 1..75: mol_type = other DNA
ttcaacatggagtcgcagtagtggccaaaccgcagaatggaagaatctcagcagctatttgcagcgggcggttat

SEQ ID NO: 25666 - DNA, 75 bp, synthetic construct
  source 1..75: mol_type = other DNA
cgcggcctgccgctggcgcttgtcagcacggaaggggcaacagaatggtgcgcagaatacgatgaatggggcaac

SEQ ID NO: 25667 - DNA, 75 bp, synthetic construct
  source 1..75: mol_type = other DNA
gaagttttaaatctcattggttgttgtatctttgtgttattgtttttggtattacgaacttagtcgcctcttccg

SEQ ID NO: 25668 - DNA, 75 bp, synthetic construct
  source 1..75: mol_type = other DNA
tggcgaagggctgccgttacctgaaacctatgaccgccctgagccgcgcattatgcagctggcgcgccgtagtac

SEQ ID NO: 25669 - DNA, 75 bp, synthetic construct
  source 1..75: mol_type = other DNA
atgcagagtaataatgttgctgctggtgcagcaggcgcagcaacgggagagctggcagccagagcgatcggaatg

SEQ ID NO: 25670 - DNA, 75 bp, synthetic construct
  source 1..75: mol_type = other DNA
ccggtggtaacacaagcctggatgccgcgaatgatattctgttgagtggcgccgcaaacacacaaaaaacaacgg

SEQ ID NO: 25671 - DNA, 75 bp, synthetic construct
  source 1..75: mol_type = other DNA
ccagtgaaacgctgtttgtcgccggtaaaacgccacggctttcacgttttgcatttagcgatgatccaaaatggg

SEQ ID NO: 25672 - DNA, 75 bp, synthetic construct
  source 1..75: mol_type = other DNA
cgttctacgctgatgagctaaaaagtatttatgaaaatgcaggtagctggcctgacgatgccgttgaagtagact

SEQ ID NO: 25673 - DNA, 75 bp, synthetic construct
  source 1..75: mol_type = other DNA
aggctccttttccactcaaaaaagatgatactgagtattacctgctaaccagcgaacacgttagcgtatctgaat

SEQ ID NO: 25674 - DNA, 75 bp, synthetic construct
  source 1..75: mol_type = other DNA
atgaaaactgacagcacaggtattgccgcccgtatgatgctctccctggacagggagcgaatttgcgaatgcctg

SEQ ID NO: 25675 - DNA, 75 bp, synthetic construct
  source 1..75: mol_type = other DNA
ttataggttcggcgaatattgatgtcgccggatattcacatgaatcattaaattatgcggattcaaatccaggta

SEQ ID NO: 25676 - DNA, 75 bp, synthetic construct
  source 1..75: mol_type = other DNA
atgaatagaatctatcgcgtgatatggaattgcaccctacaggtatttcaggcctgctcggaattaactcgcagg

SEQ ID NO: 25677 - DNA, 75 bp, synthetic construct
  source 1..75: mol_type = other DNA
actgatgaagaggaactgcgcgatgtcaggaagtatggtttcggtgagatatttcagtgtccgccagataaatat

SEQ ID NO: 25678 - DNA, 75 bp, synthetic construct
  source 1..75: mol_type = other DNA
cgctgtagtacctcatatcacagcgcaggtattttttatggttgtaatttgcgtgatgattcaggtcgctttgcg

SEQ ID NO: 25679 - DNA, 75 bp, synthetic construct
  source 1..75: mol_type = other DNA
gtacgtattggtgcccccaccggcgtggcctgttcggtgtgccccggcggggtgacgtccggccatccggtcaat

SEQ ID NO: 25680 - DNA, 75 bp, synthetic construct
  source 1..75: mol_type = other DNA
aaaaacccgttcgcgtaaatttccccgtcgtgaatgaccttccaccggaaggcgtgtttgatactgaattctgca

SEQ ID NO: 25681 - DNA, 75 bp, synthetic construct
  source 1..75: mol_type = other DNA
ccagcgtgatgacaccggcgagaccgtgccggttgaggttgttctccgtggccgtcagaaagaaatcgacctcgg

SEQ ID NO: 25682 - DNA, 75 bp, synthetic construct
  source 1..75: mol_type = other DNA
agttgcgctttaccggctctatccagcgtgatgataccggggaagtacaggccgtggagcttgtggtgcgtggac

SEQ ID NO: 25683 - DNA, 75 bp, synthetic construct
  source 1..75: mol_type = other DNA
cccggattcggttatctgggagctttacgccgcaaccggtgtggatgccgtaccgattcgttttgcaggctctta

SEQ ID NO: 25684 - DNA, 75 bp, synthetic construct
  source 1..75: mol_type = other DNA
tattgaaacgactcagtaaattcggttctgtaaaagtatccgatctgtccaatagcctcaatgtaacgaaagaaa

SEQ ID NO: 25685 - DNA, 75 bp, synthetic construct
  source 1..75: mol_type = other DNA
agtttgagctgattacctactgggacggcttcgaggccacgttcggcgtcgattatgcggagcatgcccgcatcg

SEQ ID NO: 25686 - DNA, 75 bp, synthetic construct
  source 1..75: mol_type = other DNA
tgcaaaagatatcattctgggcgaattgactaagagggttcaccgggtcttccctgatgctgatgtccgggtaaa

SEQ ID NO: 25687 - DNA, 75 bp, synthetic construct
  source 1..75: mol_type = other DNA
atgttttctataagtaacttatcatttatcggtttccttaaaaggattattttttcctcagattcactaccgggg

SEQ ID NO: 25688 - DNA, 75 bp, synthetic construct
  source 1..75: mol_type = other DNA
tcttgagcattatcgctttgtgcaaaatttgccagaaaaatattctaaatttttgtttccacaaaaatcggtatc

SEQ ID NO: 25689 - DNA, 75 bp, synthetic construct
  source 1..75: mol_type = other DNA
tacatgctgaccagtcgttagaagtgattgacgatgggcgcgggatgccggtggatattcacccggaagagggtg

SEQ ID NO: 25690 - DNA, 75 bp, synthetic construct
  source 1..75: mol_type = other DNA
ggaaaagcacatgagcctgttgagttacaaatgttggcagagaaagtagatgagccacccgtaaaatttttcttt

SEQ ID NO: 25691 - DNA, 75 bp, synthetic construct
  source 1..75: mol_type = other DNA
cacaccacaagcttaaaattcgcggtctgcaaagcccggtggacgtgctgacttttacgggccgggaacaactca

SEQ ID NO: 25692 - DNA, 75 bp, synthetic construct
  source 1..75: mol_type = other DNA
tagactcgcttgatactattgcgaaaaatgaaatcgcttatgcgcttgaaaattatgatacagcccagggaataa

SEQ ID NO: 25693 - DNA, 75 bp, synthetic construct
  source 1..75: mol_type = other DNA
catctggagggtggtttcgtcggtatggcagctgctccgtcaggtgcttctactggttcccgtgaagctctggaa

SEQ ID NO: 25694 - DNA, 75 bp, synthetic construct
  source 1..75: mol_type = other DNA
aggggacggactcgccgcaggaagtgcacgggaaggagtaaacccaggaatactggctacatacggtgacggggg

SEQ ID NO: 25695 - DNA, 75 bp, synthetic construct
  source 1..75: mol_type = other DNA
gtggataacctacaaaggaaagctaccgggaagaattactggttctctgaagacgccaccgacggcattgcggtc

SEQ ID NO: 25696 - DNA, 75 bp, synthetic construct
  source 1..75: mol_type = other DNA
ctttgatagtgataccaatacggtggatgtcgccattcgcaggctccgcgcaaaagttgatgatccttttcctga

SEQ ID NO: 25697 - DNA, 75 bp, synthetic construct
  source 1..75: mol_type = other DNA
gagttttatgaggcagcagccagaatgagaatcagacaggtattcctggatgttgctgccgggttatgtgtaggg

SEQ ID NO: 25698 - DNA, 75 bp, synthetic construct
  source 1..75: mol_type = other DNA
aatggtggggtctgcacctgcggcactggatacattgaacgaactggcagcggcgctggggaatgacccgaactt

SEQ ID NO: 25699 - DNA, 75 bp, synthetic construct
  source 1..75: mol_type = other DNA
tcaacgctcagtttcggcatccctttgccgggcactggggcgatggcaccacatcatcatcggacggacagaatt

SEQ ID NO: 25700 - DNA, 75 bp, synthetic construct
  source 1..75: mol_type = other DNA
ttcccctcagcacagagcaacaggccgcatggcgggcagtggcagagacggaaaaacgccgccatcagggaaaca

SEQ ID NO: 25701 - DNA, 75 bp, synthetic construct
  source 1..75: mol_type = other DNA
ggcagcagcccaggacggactttctacacccacatctccgaccaatacgcgccattccacaccaaggtggtcaat

SEQ ID NO: 25702 - DNA, 75 bp, synthetic construct
  source 1..75: mol_type = other DNA
gcggtggccgccatccctgatgacagcagcatcgaactcaaagcagcggatggcaaggcggacagcagcgaggta

SEQ ID NO: 25703 - DNA, 75 bp, synthetic construct
  source 1..75: mol_type = other DNA
atacgggcagcgggagcagacccggcgcgagcacctggtcgaactgcaaacggtgttcggcttccagccctttac

SEQ ID NO: 25704 - DNA, 75 bp, synthetic construct
  source 1..75: mol_type = other DNA
gtaaaaacccgttatgcgtgcgatgccttgagaaggggatatatacgcccgccgtggtggtggatcacattatcc

SEQ ID NO: 25705 - DNA, 75 bp, synthetic construct
  source 1..75: mol_type = other DNA
cgcttatccagcgaagagattgccgctgccgattacgtcattctcgctaccgggcgtggcctgagcggtgatgat

SEQ ID NO: 25706 - DNA, 75 bp, synthetic construct
  source 1..75: mol_type = other DNA
atgattaaatcaaaaatcgtgctgttatcagcactggtttcctgcgccctgatttcaggctgtaaagaagaaaat

SEQ ID NO: 25707 - DNA, 75 bp, synthetic construct
  source 1..75: mol_type = other DNA
atttgatgtgatagttgatggagatcagaaggttattcctggcgaatatatgctttcaataagcggtgagtgtat

SEQ ID NO: 25708 - DNA, 75 bp, synthetic construct
  source 1..75: mol_type = other DNA
gctctgacgggttcgagttctgctgtgataacggagagagactgcgtgtcacgttcgcgctggactgctgtgatc

SEQ ID NO: 25709 - DNA, 75 bp, synthetic construct
  source 1..75: mol_type = other DNA
atggatggcggcgcgaattgctgcccgcgagcaaggaggccatgcgtgaaacttgctttgcagtctcatctcctt

SEQ ID NO: 25710 - DNA, 75 bp, synthetic construct
  source 1..75: mol_type = other DNA
tacaacttacgcagtgcagcgtatccgtggcgctatgctggatgaacttcgcagccgtgactgggtgccgcgcag

SEQ ID NO: 25711 - DNA, 75 bp, synthetic construct
  source 1..75: mol_type = other DNA
gcaggtggcactgcgtcaggaactggagaacgccgcgaagcgtgaagcacagcgcgagaaaaccatcacgaggtt

SEQ ID NO: 25712 - DNA, 75 bp, synthetic construct
  source 1..75: mol_type = other DNA
agcaccaggtgaattatgtgagatatgctgatgatttcatctgttcaggcagctcccgtgaattgctggaaaatg

SEQ ID NO: 25713 - DNA, 75 bp, synthetic construct
  source 1..75: mol_type = other DNA
ttcagtcaaaaggatccgtcagcgccagttgcatgccagaaaagttacgacacgcgagttctctgttatcagtga

SEQ ID NO: 25714 - DNA, 75 bp, synthetic construct
  source 1..75: mol_type = other DNA
ggacggcttcgggcgctcactgattttccaccgcgaggccgcaggcgagctggctggcgaaatcaccggggtgac

SEQ ID NO: 25715 - DNA, 75 bp, synthetic construct
  source 1..75: mol_type = other DNA
cgccacgtttgccgatcgcgtcttcttttgtaactccggtgcggaagccaacgaagcggcgctaaaactggcgcg

SEQ ID NO: 25716 - DNA, 75 bp, synthetic construct
  source 1..75: mol_type = other DNA
tcacaaatgctgcaacgctggctggaaaaatatcatgcagttgcagaactacctgaaccgccccgctttgtggaa

SEQ ID NO: 25717 - DNA, 75 bp, synthetic construct
  source 1..75: mol_type = other DNA
aagtaaagccggagctatcagcagtcctgctggacgttgatttagctgagattgaagatttccctgataagattt

SEQ ID NO: 25718 - DNA, 75 bp, synthetic construct
  source 1..75: mol_type = other DNA
gaaaagcatggttcccaggttgatttaatttttcgttttcttgatcacgcctttgcaaccggcgtgctcgggtaa

SEQ ID NO: 25719 - DNA, 75 bp, synthetic construct
  source 1..75: mol_type = other DNA
aagccagatctgaacatgaaccagttggttgctgaagttgaacaaagcctgaacaaaaagatcccttctatgcac

SEQ ID NO: 25720 - DNA, 75 bp, synthetic construct
  source 1..75: mol_type = other DNA
cggttgcccataacgagcagtaccgttcgctgattgaaggctacatgctgcgccataaagtgaagccaggcatta

SEQ ID NO: 25721 - DNA, 75 bp, synthetic construct
  source 1..75: mol_type = other DNA
agtaaaccggaaacatcagggaataacaccaacaaatggtattacggaaatgctgatacaacttttgagccatta

SEQ ID NO: 25722 - DNA, 75 bp, synthetic construct
  source 1..75: mol_type = other DNA
aagccatcacgctgaaaatcgacccgtcggtggtactggcgacccgtaaatatgtggatgacaaaatctcagaac

SEQ ID NO: 25723 - DNA, 75 bp, synthetic construct
  source 1..75: mol_type = other DNA
tcgtggcagaacgacctgaccagctgtgggtggctgattttacttacgtcagcacatggcagggcttcgtctatg

SEQ ID NO: 25724 - DNA, 75 bp, synthetic construct
  source 1..75: mol_type = other DNA
cccgtccgtcaaacctgcgcggccttcagggggatgtggtgattgatgaagccgcgttccacgagtcactggatg

SEQ ID NO: 25725 - DNA, 75 bp, synthetic construct
  source 1..75: mol_type = other DNA
tgaattgcccgataacattatgcattcctgaaactggtgtttttgtcagaaatgcaaaaaactcagaaatatgtt

SEQ ID NO: 25726 - DNA, 75 bp, synthetic construct
  source 1..75: mol_type = other DNA
atttatctgtttatatgcccctttccctccaaaacaaccttctggatttgcaccggcatcattttatttttcgtt

SEQ ID NO: 25727 - DNA, 75 bp, synthetic construct
  source 1..75: mol_type = other DNA
accacagcggcgatcggatgagttatccgacgttgcgtctggcactgttgagcggcgactggatcccgctaacgt

SEQ ID NO: 25728 - DNA, 75 bp, synthetic construct
  source 1..75: mol_type = other DNA
agagttgtatcctgtatcagtcctgcaaaatttcatgagtgctttattaactggatgcgtgactgccattcatca

SEQ ID NO: 25729 - DNA, 75 bp, synthetic construct
  source 1..75: mol_type = other DNA
atgaatatgatggccgtgccgtttcacggcaactctctttatgtagttaaccataatggcgaaccatacgttccc

SEQ ID NO: 25730 - DNA, 75 bp, synthetic construct
  source 1..75: mol_type = other DNA
accgttcgtgacagtgtgctgcaagcggatgcgtacgccgggttcaacgagctgtatcgcaatggtgggataacg

SEQ ID NO: 25731 - DNA, 75 bp, synthetic construct
  source 1..75: mol_type = other DNA
ctaccgcgcaaccatccaaaatggcaggaatgggaaaaacgcgggaaagagctactcaccaaagacagtgcgtaa

SEQ ID NO: 25732 - DNA, 75 bp, synthetic construct
  source 1..75: mol_type = other DNA
atgaaagacggccttgaactgaaagcgcctgtaactgatgacgtcagcagagcgctggcttttgctattaagtgg

SEQ ID NO: 25733 - DNA, 75 bp, synthetic construct
  source 1..75: mol_type = other DNA
ttcacgacggatatcccaggacatcagcacccgtgatgagggcgggggcggaaaggtcgtggttatcgggcggca

SEQ ID NO: 25734 - DNA, 75 bp, synthetic construct
  source 1..75: mol_type = other DNA
gaaatgcaattagctcacgtagataaaaatactattcgaggtacatataaccatgcacaatatttagagaagaga

SEQ ID NO: 25735 - DNA, 75 bp, synthetic construct
  source 1..75: mol_type = other DNA
cagggcaagagcggtgagaatgacactcgctttggcctggaagttaattatcggattggcgaacctctggagaaa

SEQ ID NO: 25736 - DNA, 75 bp, synthetic construct
  source 1..75: mol_type = other DNA
ctgacagaagatttaagttttatccgagcactgccgcattttcagtttattcaacaggcaatcaccaacataact

SEQ ID NO: 25737 - DNA, 75 bp, synthetic construct
  source 1..75: mol_type = other DNA
tatggtaacccgttgcaggggcaagaagttacgctgactttaccgcagggtgtgaccagcaagacggggaataca

SEQ ID NO: 25738 - DNA, 75 bp, synthetic construct
  source 1..75: mol_type = other DNA
tgcaataacgcaatggcagatgtcatattgtcaccagactggcgtccgggtacgaataactcgggtgttggggct

SEQ ID NO: 25739 - DNA, 75 bp, synthetic construct
  source 1..75: mol_type = other DNA
gaacccactggcactattggacaaagctatcgcttctgttgataaattccgttcttctctgggtgcggtacagaa

SEQ ID NO: 25740 - DNA, 75 bp, synthetic construct
  source 1..75: mol_type = other DNA
tctaacaatgcactgaaactgagcgattctatcactcaggttggtgcgagtggttcactggcagatgtgaaactg

SEQ ID NO: 25741 - DNA, 75 bp, synthetic construct
  source 1..75: mol_type = other DNA
aatatgtctaaagcgcagatcgttcagcaggccggtaactccgtgctgtccaaagctaaccaggttcctcagcag

SEQ ID NO: 25742 - DNA, 75 bp, synthetic construct
  source 1..75: mol_type = other DNA
ttcctgaattacctgcgtcactagaatatattaatgtaagtgacaatcacctgtctgtacttccgaggttaccaa

SEQ ID NO: 25743 - DNA, 75 bp, synthetic construct
  source 1..75: mol_type = other DNA
gatcatccagcaggcaggtaactccgtgctgtccaaagctaaccaggtaccgcagcaggttctgtctctgctgca

SEQ ID NO: 25744 - DNA, 75 bp, synthetic construct
  source 1..75: mol_type = other DNA
gcgcagatcatccagcaggcgggtaactccgtgctgtctaaagctaaccaggtgccgcagcaggttctgtctctg

SEQ ID NO: 25745 - DNA, 75 bp, synthetic construct
  source 1..75: mol_type = other DNA
gtgaaagaccgccacttttacagacaatcccgcttagtttgcaacatttgttcgccatgtttggtgcaaccgtcc

SEQ ID NO: 25746 - DNA, 75 bp, synthetic construct
  source 1..75: mol_type = other DNA
accagccgtaaagtgttgttcacccaggcgggaatgctgctggtggatcaggcgcgtaccgtgctgcgtgaggtg

SEQ ID NO: 25747 - DNA, 75 bp, synthetic construct
  source 1..75: mol_type = other DNA
ttctgcctggtttcttttatcgtgaagaaagcggggaccggctggctggacgtgctgtttccacctgcggcaatg

SEQ ID NO: 25748 - DNA, 75 bp, synthetic construct
  source 1..75: mol_type = other DNA
atcccagaacttcttaacatgctggatattaaaggaaaaatcatcacaactgatgcgatgggttgccagaaagat

SEQ ID NO: 25749 - DNA, 75 bp, synthetic construct
  source 1..75: mol_type = other DNA
gaaaatttagactacattctattttcgccaaatttggcgaaaactccaggccgccgccgcaaggattaccacctc

SEQ ID NO: 25750 - DNA, 75 bp, synthetic construct
  source 1..75: mol_type = other DNA
gctaccacaggcaaccctggatgataaacagcagaccgcactgaataacagcgagcgcgaactggctctgtcccg

SEQ ID NO: 25751 - DNA, 75 bp, synthetic construct
  source 1..75: mol_type = other DNA
gcgtggaaggtaacattcacgcaaattgaccgtgaatataacacgttcactggtatgtattctgacaaagcagaa

SEQ ID NO: 25752 - DNA, 75 bp, synthetic construct
  source 1..75: mol_type = other DNA
ataacgccgtggaagcgttaaaagttattgccgaaccaatgggcgagccgtccggcgatttgctgccgttcgcca

SEQ ID NO: 25753 - DNA, 75 bp, synthetic construct
  source 1..75: mol_type = other DNA
gttcaatggacgtggatatttataaccttcatcccgcgcacgctaaacgcattgaggaaattatcgctgaaaata

SEQ ID NO: 25754 - DNA, 75 bp, synthetic construct
  source 1..75: mol_type = other DNA
tagaggctaagcctcgactacaaaaaaataagagtacgcgttgccaattctattggtcagaaaagcatccagatg

SEQ ID NO: 25755 - DNA, 75 bp, synthetic construct
  source 1..75: mol_type = other DNA
gcaggctacgacgaggatgatttcaaaaaacccgttcgcgtaaatttccccgtcgtgaatgaccttccaccggaa

SEQ ID NO: 25756 - DNA, 75 bp, synthetic construct
  source 1..75: mol_type = other DNA
ggaacaaaattctttggatttgacatggataacgaatacatcgccggttttgatgacggcgcatgggggagatta

SEQ ID NO: 25757 - DNA, 75 bp, synthetic construct
  source 1..75: mol_type = other DNA
gaaagatctgcgtatccgtcagattcaggaagcgttgcagtatgcgaatcaggcgcaggtgacaaagccgcagat

SEQ ID NO: 25758 - DNA, 75 bp, synthetic construct
  source 1..75: mol_type = other DNA
gctgatgatcaactggatgaactggcagacctgagaatcatcgacgaggggcgctattgtgtccggctgtacaag

SEQ ID NO: 25759 - DNA, 75 bp, synthetic construct
  source 1..75: mol_type = other DNA
agggaaattcagaatcaacagaaacgcctacccccgtcctgcgccccgaagctggaagttacgtcgctaacctgg

SEQ ID NO: 25760 - DNA, 75 bp, synthetic construct
  source 1..75: mol_type = other DNA
gcactatgtcagggcttgtaacagccttcgatatcgatacggcggttggcgtgcaactcgatatcctcggcctgt

SEQ ID NO: 25761 - DNA, 75 bp, synthetic construct
  source 1..75: mol_type = other DNA
taaaaagccccatttaacggcattgataatccaatatttttcacaacttgatctatctccttatttaacaggtgc

SEQ ID NO: 25762 - DNA, 75 bp, synthetic construct
  source 1..75: mol_type = other DNA
tgaggcgccgaccatttctaacttatctgatcataaggaaagtcatgtttcgttaatgctaaaggaaatgtttgg

SEQ ID NO: 25763 - DNA, 75 bp, synthetic construct
  source 1..75: mol_type = other DNA
tgggaaacggcgatcccttttcttccctggactattgttccttactggagtctggatcttttatatggattttcg

SEQ ID NO: 25764 - DNA, 75 bp, synthetic construct
  source 1..75: mol_type = other DNA
gtgactctatcggaaagattagaaatcagcttgaaagcaagttgagcactgttaaaaaacagtttgattatcagg

SEQ ID NO: 25765 - DNA, 75 bp, synthetic construct
  source 1..75: mol_type = other DNA
accgcgtaaaccgtcagttcgtggcagaacgacctgaccagctgtgggtggctgattttacttacgtcagcacat

SEQ ID NO: 25766 - DNA, 75 bp, synthetic construct
  source 1..75: mol_type = other DNA
cttatcaggccttgtattatccctccagtgcagagaaaatcggccagttttctctgcctgcagtccgcatgccgt

SEQ ID NO: 25767 - DNA, 75 bp, synthetic construct
  source 1..75: mol_type = other DNA
aacaatcgacgattgctggaaaggctgggccatactcctccggcagaagcagaaaaagcttattatgcttccatc

SEQ ID NO: 25768 - DNA, 75 bp, synthetic construct
  source 1..75: mol_type = other DNA
atattcgtcttgatcttgccgatgccattttgctcagcaaagctaaaaaagatctctcatttgccgagattgccg

SEQ ID NO: 25769 - DNA, 75 bp, synthetic construct
  source 1..75: mol_type = other DNA
agaaaaaattcagaagctgatcccagcaattctggcaatccttccgcgcgagttgcgtcaccgactctgcatctt

SEQ ID NO: 25770 - DNA, 75 bp, synthetic construct
  source 1..75: mol_type = other DNA
ttgtcattcttggcgctgaaaaaacattcaataatatctacataaccagtggtgatggaactgtccgactgaatg

SEQ ID NO: 25771 - DNA, 75 bp, synthetic construct
  source 1..75: mol_type = other DNA
ccctgatcaaagagttcgaaggttgcaagctcactgcctatcaggacagcgtcggcgtttggacgatcggttatg

SEQ ID NO: 25772 - DNA, 75 bp, synthetic construct
  source 1..75: mol_type = other DNA
cgccggcgcgaaaaatccacctgtaccactgcgaccatcgcggcctgccgctggcgcttgtcagcacggaagggg

SEQ ID NO: 25773 - DNA, 75 bp, synthetic construct
  source 1..75: mol_type = other DNA
gtttcagagaagcgactcggccttgttatggatggaacggtagaccttggcgggaaatcaacttatcgcatcatt

SEQ ID NO: 25774 - DNA, 75 bp, synthetic construct
  source 1..75: mol_type = other DNA
gattttccagaaagagatgatcatattataagaatattctggcttaatcagaaccggatcacggcaattccggaa

SEQ ID NO: 25775 - DNA, 75 bp, synthetic construct
  source 1..75: mol_type = other DNA
acaaactgcgtagcgcactggcggcagattatgttgtgcaacaggacgcgttacagaaagagggtgatgcggttt

SEQ ID NO: 25776 - DNA, 75 bp, synthetic construct
  source 1..75: mol_type = other DNA
agaaattattatggatgacatgattctgcattcagccgtagcgttaagcccgttatggattgtgcattctcttgc

SEQ ID NO: 25777 - DNA, 75 bp, synthetic construct
  source 1..75: mol_type = other DNA
ttgaagaactgcttgcccagcaaaaagcgtgcgatgctgcgccgaccctgcgttgtcgcagtgaagtcgggcaga

SEQ ID NO: 25778 - DNA, 75 bp, synthetic construct
  source 1..75: mol_type = other DNA
catggctgaaagtttgcctgcatcttgccggattgttgccgtttctctggctggtctgggcgatcaatcacggtg

SEQ ID NO: 25779 - DNA, 75 bp, synthetic construct
  source 1..75: mol_type = other DNA
cgtttgccttcaacgtggggacgggcaatgcctgcagctccacgctggtgaaattgctcaatcagcggcgctggg

SEQ ID NO: 25780 - DNA, 75 bp, synthetic construct
  source 1..75: mol_type = other DNA
acttgctgacgcccgacggttaagagcggattacctttccttgttagccaacggaattgacccgcaaattcaagc

SEQ ID NO: 25781 - DNA, 75 bp, synthetic construct
  source 1..75: mol_type = other DNA
aagcggcgctcttgcttttgagtccgttgccagagactggcatgcaagcaacatcaaatggtcagaaactcacgc

SEQ ID NO: 25782 - DNA, 75 bp, synthetic construct
  source 1..75: mol_type = other DNA
atgtcgatggttcatgatgaactgccgaaatatctgctggctccggaagtgagtgccctgctccattacgtcccg

SEQ ID NO: 25783 - DNA, 75 bp, synthetic construct
  source 1..75: mol_type = other DNA
acgctttgctcgttggtctgagatcgatttcgaaacatcaatgtggacaatacctgcagagcgcgaagctattga

SEQ ID NO: 25784 - DNA, 75 bp, synthetic construct
  source 1..75: mol_type = other DNA
aaaatctggctgcccccctcccccggtgaacaggtgctgttgctctgcccgggcggcagtcctgaaatggccgtt

SEQ ID NO: 25785 - DNA, 75 bp, synthetic construct
  source 1..75: mol_type = other DNA
agcgtctttattggatacatcggcaccgattcgatcggcaatcttattaaaaaacttgcagcaaaaaaggcggga

SEQ ID NO: 25786 - DNA, 75 bp, synthetic construct
  source 1..75: mol_type = other DNA
gccttgaattgcttgaaaatgaattgtcgcaaaataaacaagagctgaaagcaacacagaatgaactgggagtat

SEQ ID NO: 25787 - DNA, 75 bp, synthetic construct
  source 1..75: mol_type = other DNA
ctgctgtctgaccgcgattacacctggaacgacaacggcgaactcatccgcatcagcagcccgcgccagacccgg

SEQ ID NO: 25788 - DNA, 75 bp, synthetic construct
  source 1..75: mol_type = other DNA
aacagcctgctgtctgaccgcgattacacctggaacgacaacggcgaactcatccgcatcagcagcccgcgccag

SEQ ID NO: 25789 - DNA, 75 bp, synthetic construct
  source 1..75: mol_type = other DNA
agatagaatccaaagtacagcttcattgggatgagaagcgcacatttgaagtaaccgaagacgagagcaaagaga

SEQ ID NO: 25790 - DNA, 75 bp, synthetic construct
  source 1..75: mol_type = other DNA
gtgaaacagatgtataaaaatttaaagcttacgacaataagtaaaatgataaaaaatatttattgttcattatcc

SEQ ID NO: 25791 - DNA, 75 bp, synthetic construct
  source 1..75: mol_type = other DNA
ttgagtttattaaccctcccgcaaccgaaactgttgttggagtagcaagatttgctaatgaacaagaaattgatg

SEQ ID NO: 25792 - DNA, 75 bp, synthetic construct
  source 1..75: mol_type = other DNA
gggtctgtatgacgatgccggaacactgattgcggtcgctaacatggcggaaagctataagcctgaactcgctga

SEQ ID NO: 25793 - DNA, 75 bp, synthetic construct
  source 1..75: mol_type = other DNA
tcactactgccggagccgcgaagctggcagccgccactgtccccggcgggaaaaaagtaactctgtctgcaatgg

SEQ ID NO: 25794 - DNA, 75 bp, synthetic construct
  source 1..75: mol_type = other DNA
cagttacttacccatcgcccgagtcactggctctggtggctgatgtgcaataccacgaaccatatctgtcagccg

SEQ ID NO: 25795 - DNA, 75 bp, synthetic construct
  source 1..75: mol_type = other DNA
gcacactgaacctgatggatgcgacatcatcgttcgatactgtgggtatcaatgtcggtaattttggtagcggta

SEQ ID NO: 25796 - DNA, 75 bp, synthetic construct
  source 1..75: mol_type = other DNA
ccgtcaggccaagaagcattttgaccgactgcatgctcaggatcaaatcaagcgcaaagcacgacgcgagcgctt

SEQ ID NO: 25797 - DNA, 75 bp, synthetic construct
  source 1..75: mol_type = other DNA
ttcgtcagcaaaaatcgacccgccagtcactaacagggacacaagctattttcttgtatccgttaaatgcattaa

SEQ ID NO: 25798 - DNA, 75 bp, synthetic construct
  source 1..75: mol_type = other DNA
gtctgatgaaaacctccgcacttggcagtctcgcgctggcaagcagtgctttcactctgccattttcccaaatgg

SEQ ID NO: 25799 - DNA, 75 bp, synthetic construct
  source 1..75: mol_type = other DNA
ctcaggctgctgagttagcgctgcttttacgtcgtgttatgcaggctttcaatgttggacccggcacagataaac

SEQ ID NO: 25800 - DNA, 75 bp, synthetic construct
  source 1..75: mol_type = other DNA
aagccttaactgacgccgtgccggtgctggcacgaaaccccgatatgatgcgtgtctttatcgacaacgggaatc

SEQ ID NO: 25801 - DNA, 75 bp, synthetic construct
  source 1..75: mol_type = other DNA
ggcgaaaaaagaaacactgctgtctcttgcaaatgttcatgcggtgaatgaaaaagggcaaagctccgtcgatat

SEQ ID NO: 25802 - DNA, 75 bp, synthetic construct
  source 1..75: mol_type = other DNA
cactggttatctttaccgtattgggtcaatgcgtagtaggcgcgctgattgttagcggaattggctggttcgccg

SEQ ID NO: 25803 - DNA, 75 bp, synthetic construct
  source 1..75: mol_type = other DNA
atccagggatggatacaaagacagcaagtgattacctgccacagacaaattggccaacaactcaattaccaccag

SEQ ID NO: 25804 - DNA, 75 bp, synthetic construct
  source 1..75: mol_type = other DNA
gtcttgccgtactcctgctgggcggctgccacgcaacaccacacaaacccgattacggcgctgcatccgatgtgg

SEQ ID NO: 25805 - DNA, 75 bp, synthetic construct
  source 1..75: mol_type = other DNA
cagtgatgtaacaccggttatcgagcaaaagaacgatacagacaaagcaacatggactctgatcggctataaatc

SEQ ID NO: 25806 - DNA, 75 bp, synthetic construct
  source 1..75: mol_type = other DNA
gaatacccggagaatttacctgccgcgccgctggtgcgctatggctggacgccgcgcggcgaactggcggcagtg

SEQ ID NO: 25807 - DNA, 75 bp, synthetic construct
  source 1..75: mol_type = other DNA
cttttttcttactttccacgagagaatataaatcaacggggcttgatgtactgaatatcgccgccgattatgcgg

SEQ ID NO: 25808 - DNA, 75 bp, synthetic construct
  source 1..75: mol_type = other DNA
gggcggtgaatcaaacacagcagcgtgatgcttcccgatcccgcgcccagcaacgacttgtacgtcgtcaccagc

SEQ ID NO: 25809 - DNA, 75 bp, synthetic construct
  source 1..75: mol_type = other DNA
tgctggcagccctgcgcaacaacccagggttgaacaacgccaaactggcagggcttcccggagtggtacatcatc

SEQ ID NO: 25810 - DNA, 75 bp, synthetic construct
  source 1..75: mol_type = other DNA
tccttgctttagtctccagtcatttaatggctggagttatgggtgatgataatatatttttaagtaattcggatt

SEQ ID NO: 25811 - DNA, 75 bp, synthetic construct
  source 1..75: mol_type = other DNA
tgacgatcccggaaaaatccgcccaggaaaagatgtatcgggtgcatccttctacagttttatgacttatagctc

SEQ ID NO: 25812 - DNA, 75 bp, synthetic construct
  source 1..75: mol_type = other DNA
aatcatgttctggttcggctcagagcgcaacgtgcggtggagtgatgactcctggcgagagtatgaatggtcaca

SEQ ID NO: 25813 - DNA, 75 bp, synthetic construct
  source 1..75: mol_type = other DNA
taccattcaaacgggttggtgcccagtctccagggattaatggctacctcgaaaatgataagacttactcggccg

SEQ ID NO: 25814 - DNA, 75 bp, synthetic construct
  source 1..75: mol_type = other DNA
tgcggggaggcgtggggacaacaaccatcaccgccgcattagcctggtcattacaaatgttgggagaaaatgtcc

SEQ ID NO: 25815 - DNA, 75 bp, synthetic construct
  source 1..75: mol_type = other DNA
cccgcgtggatgaaacctttgaggctatccgcgacagcctgaatcagcaggccatcaataacatcgccagaaagc

SEQ ID NO: 25816 - DNA, 75 bp, synthetic construct
  source 1..75: mol_type = other DNA
aagggcgggactcgcacaacctgaataaatacatctggcgttttctggccctgagtgccggagaatctcaaatca

SEQ ID NO: 25817 - DNA, 75 bp, synthetic construct
  source 1..75: mol_type = other DNA
tatgcaaatcattatttctctactgctcagcttctttacctgtcttatctgcaaatggtattcctgataaaatga

SEQ ID NO: 25818 - DNA, 75 bp, synthetic construct
  source 1..75: mol_type = other DNA
tcaagttactaactgggctgatcagggatggatgcaatctttaaccccaaatgaggcgaacagtagatttaatat

SEQ ID NO: 25819 - DNA, 75 bp, synthetic construct
  source 1..75: mol_type = other DNA
gcctgctggtttctgtgcctgcatttgcctggcaaccacaaaccggcgacatcatctttcagatctctcgctcat

SEQ ID NO: 25820 - DNA, 75 bp, synthetic construct
  source 1..75: mol_type = other DNA
gaagtggataatgatgcgacgcctgatgaaatacatgacgaagcaaaagatattttctttaactactgcaattaa

SEQ ID NO: 25821 - DNA, 75 bp, synthetic construct
  source 1..75: mol_type = other DNA
tgcaatggtggaagatataaattacacaatgattacagatgttcagattgccgagcgaaccagaaccagcgtcag

SEQ ID NO: 25822 - DNA, 75 bp, synthetic construct
  source 1..75: mol_type = other DNA
atgataggcgataagaaaactgtagcttgtaataaaggtaatttgatgaaaacaaaaaaattgatgatggttgca

SEQ ID NO: 25823 - DNA, 75 bp, synthetic construct
  source 1..75: mol_type = other DNA
ggcatgaatcaactggtgcgtttcgcggagttgatgtcacaaagcaaagcgactgtaccgaaacatcttgaaggc

SEQ ID NO: 25824 - DNA, 75 bp, synthetic construct
  source 1..75: mol_type = other DNA
atgagtgactatcatcacggcgtgcaggtgctggagattaacgacggcacccgcgtcatttccaccgtatccaca

SEQ ID NO: 25825 - DNA, 75 bp, synthetic construct
  source 1..75: mol_type = other DNA
accaatgtgcagagcgcaattgcaaaggccggtaaaaaaggcacgctggcggcatcgttgcaggccatcgccgac

SEQ ID NO: 25826 - DNA, 75 bp, synthetic construct
  source 1..75: mol_type = other DNA
ttgccgctatggtggtacgtagacgccagttgataacaatgttggttgcggaacggaacagacttcaccctgcac

SEQ ID NO: 25827 - DNA, 75 bp, synthetic construct
  source 1..75: mol_type = other DNA
tcaaaatttcggcaaattcacagtcattccagtcggagatccagcgggcgtcccgtatgggcagtgaatattacc

SEQ ID NO: 25828 - DNA, 75 bp, synthetic construct
  source 1..75: mol_type = other DNA
gtgtactgcgtgatactattgacaatgaagttaaatccttactggaaaaaaaatcaaaagataaacacggaaata

SEQ ID NO: 25829 - DNA, 75 bp, synthetic construct
  source 1..75: mol_type = other DNA
cccggacgaaatcatctcaatcagcagtagcatggcactcaaagataaactcatcatcgagctttcgcagccgac

SEQ ID NO: 25830 - DNA, 75 bp, synthetic construct
  source 1..75: mol_type = other DNA
atcctcatatgttaaggcatgcttgcggttatgaactggcggagcgtggtgcagatactcgtttaattcaggatt

SEQ ID NO: 25831 - DNA, 75 bp, synthetic construct
  source 1..75: mol_type = other DNA
tttttggcgcgctgtttgcgttgtatatcatttggggctcaacctattttgtcattcggattggcgtggaaagct

SEQ ID NO: 25832 - DNA, 75 bp, synthetic construct
  source 1..75: mol_type = other DNA
agccagcgcgaaggaatgctgatctggcccgactttactggctgggacacggtgctgaatgccgaagcaacggca

SEQ ID NO: 25833 - DNA, 75 bp, synthetic construct
  source 1..75: mol_type = other DNA
ctcacagactgtggtgaaacccggggacgctgggtgattgaaggcgacctgtccagttacttcgacaccgtacat

SEQ ID NO: 25834 - DNA, 75 bp, synthetic construct
  source 1..75: mol_type = other DNA
cgcgtcgtagggtcttcgcgcaaaccgggctggcctcggaccaactggcgaatctcaccgaacatatacgcgagg

SEQ ID NO: 25835 - DNA, 75 bp, synthetic construct
  source 1..75: mol_type = other DNA
gtcgtgcatcgtcattcaacaccgagcgcgtggatcacatttatcaggatccgcacacctgcaacccgaaattcc

SEQ ID NO: 25836 - DNA, 75 bp, synthetic construct
  source 1..75: mol_type = other DNA
ccatgccgttgccagagccatctgtcacggtcaaaaaggtgagataagaaaacgatataccgacggtcaggaaga

SEQ ID NO: 25837 - DNA, 75 bp, synthetic construct
  source 1..75: mol_type = other DNA
tcgggcaacagttaaacttaacggggcaaaccaggtagatgcagataatatcagctggggatatcggggtgggaa

SEQ ID NO: 25838 - DNA, 75 bp, synthetic construct
  source 1..75: mol_type = other DNA
ggtcgggatattcgccgtagtgctatttttgccgcgctgcatgttgagggtgttcaacgtgtggagctggcttca

SEQ ID NO: 25839 - DNA, 75 bp, synthetic construct
  source 1..75: mol_type = other DNA
tcgggtatatcagcgcatggggctgtaagaccatttccgaggtgaaagcctaccgccagaatttcagccagcgtg

SEQ ID NO: 25840 - DNA, 75 bp, synthetic construct
  source 1..75: mol_type = other DNA
actacacccgcacggcgcaggtgctgacggacacaatggcagaagcgcacatgtgggcggtggacaaaccgctga

SEQ ID NO: 25841 - DNA, 75 bp, synthetic construct
  source 1..75: mol_type = other DNA
cagccgccgccgcactcactacgctgatgcacgcgcttattgatattgaatgcacagcagagcttgcacaaaagg

SEQ ID NO: 25842 - DNA, 75 bp, synthetic construct
  source 1..75: mol_type = other DNA
ctgcgtgtgcctgcggcttttgaagggctttcggttgcggggccaaccgcagcttatgaatttcatgcccgaagc

SEQ ID NO: 25843 - DNA, 75 bp, synthetic construct
  source 1..75: mol_type = other DNA
ctgacggtgacgcctgctgataatgacgctgtgccgcccgttgcggctgtgatggaaagcgatgaagcgttacgc

SEQ ID NO: 25844 - DNA, 75 bp, synthetic construct
  source 1..75: mol_type = other DNA
tcgattttttaaaacgttcgcagcagtttgttattcccatttatcaacggacttattcatggacagaacaacaat

SEQ ID NO: 25845 - DNA, 75 bp, synthetic construct
  source 1..75: mol_type = other DNA
tgacttcagcggtgggcttaaaatgaccgctcgcgaagtgatggatattgacgaagcccgggaaaaatatgctcg

SEQ ID NO: 25846 - DNA, 75 bp, synthetic construct
  source 1..75: mol_type = other DNA
gcgcgggatacctctgacaccggtcaggtgctgctgtatcgcggcacatccctgcgggactggcgccaggaacgg

SEQ ID NO: 25847 - DNA, 75 bp, synthetic construct
  source 1..75: mol_type = other DNA
cgcggcgcatctgcacaacgtgaacaagctgttgttcctcggctcatcctgtatctacccgaaaatggcgaaaca

SEQ ID NO: 25848 - DNA, 75 bp, synthetic construct
  source 1..75: mol_type = other DNA
ggcaaaacgcgaccgctgggcatacccacaatgagggaccgggccatgcaggcactgtggctgctggctctggaa

SEQ ID NO: 25849 - DNA, 75 bp, synthetic construct
  source 1..75: mol_type = other DNA
tatctggcgttgatttatcctaaaaatgaacaggatgatttaacagaagaacaaagaaaggcattgaaactattg

SEQ ID NO: 25850 - DNA, 75 bp, synthetic construct
  source 1..75: mol_type = other DNA
tacgcgttcctcggcgacggtgaaatggacgaaccggaatccaaaggtgcgatcaccatcgctacccgtgaaaaa

SEQ ID NO: 25851 - DNA, 75 bp, synthetic construct
  source 1..75: mol_type = other DNA
gcagacgaaaaacctgtggtcattggctgtgtacacaggaatgcgtcacggtgaactggtctccctggcctggga

SEQ ID NO: 25852 - DNA, 75 bp, synthetic construct
  source 1..75: mol_type = other DNA
atgaaaacattacccgatacacacgtacgggaggcatcgcgctgcccgtctcccgtcatcatctggcagattctg

SEQ ID NO: 25853 - DNA, 75 bp, synthetic construct
  source 1..75: mol_type = other DNA
tatcagtgattcgatggatgatattggtggcgaaatttcgggcgcagatcgttttatctttggtcacactccggt

SEQ ID NO: 25854 - DNA, 75 bp, synthetic construct
  source 1..75: mol_type = other DNA
gcttcagaacccggtggacggtgtgacggcttattacggacgtgacagtggtttccggatggacagtgaggcgcg

SEQ ID NO: 25855 - DNA, 75 bp, synthetic construct
  source 1..75: mol_type = other DNA
agccgtacgccattgccaaaatcgccgggatcaagctgtgcgagtcctacaaccgtcagtacaaccgtgactatc

SEQ ID NO: 25856 - DNA, 75 bp, synthetic construct
  source 1..75: mol_type = other DNA
gactcaacctggacggcatcagctaacgctcgcggacgtttgtatctgcatcgcggcgtagaaatgacttacacc

SEQ ID NO: 25857 - DNA, 75 bp, synthetic construct
  source 1..75: mol_type = other DNA
tcacgtggaggcgacgattcgcgatgttccctgcctgaaaaaactttctccctggctgggacgtaaacatcgtga

SEQ ID NO: 25858 - DNA, 75 bp, synthetic construct
  source 1..75: mol_type = other DNA
tggtcgttgggtctacaaattacaaggtagtaccaatagccagggtgaatactccgccgcactcggtgccggtat

SEQ ID NO: 25859 - DNA, 75 bp, synthetic construct
  source 1..75: mol_type = other DNA
atcaacggcaatgtgacgaataaagttgacccgtctacagtatgtaacgcagataaaactactatcaaactggaa

SEQ ID NO: 25860 - DNA, 75 bp, synthetic construct
  source 1..75: mol_type = other DNA
tttacggtacgaaagccaaagtagcgaaagctgctggcgttgacccatctgctgtttctcaatggcaagagctag

SEQ ID NO: 25861 - DNA, 75 bp, synthetic construct
  source 1..75: mol_type = other DNA
cctggctgggacgtaaacatcgtgataataccatcacgctgaaacgcttttcatcgggtgtgggcttctggtgcc

SEQ ID NO: 25862 - DNA, 75 bp, synthetic construct
  source 1..75: mol_type = other DNA
gtggatttgtgacaataccgggatgtggacgcgtgacggtctgacattttacagcgccggtgatgaggaaatccc

SEQ ID NO: 25863 - DNA, 75 bp, synthetic construct
  source 1..75: mol_type = other DNA
ggccgcggccagcattcacgtgatggagctggatctcgaggtgtggcaggagaacaccgagccgatgctgtcgca

SEQ ID NO: 25864 - DNA, 75 bp, synthetic construct
  source 1..75: mol_type = other DNA
gtgcgcgggcaggggataaattaccggatttactcgatgaatatatcagagcaacaactgaataatatgatggct

SEQ ID NO: 25865 - DNA, 75 bp, synthetic construct
  source 1..75: mol_type = other DNA
tggggggagcggcagcaaaaaactaccgtgaaaaatccgtggatgtggtctgttatgacgagctttcctcgttcg

SEQ ID NO: 25866 - DNA, 75 bp, synthetic construct
  source 1..75: mol_type = other DNA
tattcagtgcaggagcctgattgaagagatgatagctgacggggatttcagctggcaggcatgtcatgagatgtt

SEQ ID NO: 25867 - DNA, 75 bp, synthetic construct
  source 1..75: mol_type = other DNA
ccgcacttaagcaggaggtgactgacagggcggatgaaaccagccaggcattcacccgcctgaaaaacagtctcg

SEQ ID NO: 25868 - DNA, 75 bp, synthetic construct
  source 1..75: mol_type = other DNA
atgaccactattaccaaagaacgtattgaattgttcattaaaaatccgcttgaaaacgggcttacccgtggtgaa

SEQ ID NO: 25869 - DNA, 75 bp, synthetic construct
  source 1..75: mol_type = other DNA
cctttgacccgcgagtctatggttgccgcattaacctggaacatctgcgcggcatcctgcctgacggtattttta

SEQ ID NO: 25870 - DNA, 75 bp, synthetic construct
  source 1..75: mol_type = other DNA
aatgtgattgtctgcgattttgtcggcgaccctgacctgattttcgtgccggtagccgcgtggctgcgtgagaac

SEQ ID NO: 25871 - DNA, 75 bp, synthetic construct
  source 1..75: mol_type = other DNA
aacaaatacagcgttagccctgaacaatatctcaaggcggctatagtaattttgcacgctgacaatattctggtg

SEQ ID NO: 25872 - DNA, 75 bp, synthetic construct
  source 1..75: mol_type = other DNA
agactcagtagaactgtttacccggaagtttaaaagcgcctgggctacccaaaaaaacagaataaaaaatagggt

SEQ ID NO: 25873 - DNA, 75 bp, synthetic construct
  source 1..75: mol_type = other DNA
gtcatacaatgccggattccgtaaggacagacatgaaacaagagagcaatatgctaataaagtatggagaattta

SEQ ID NO: 25874 - DNA, 75 bp, synthetic construct
  source 1..75: mol_type = other DNA
tcacacctgaagaaatcattatatatcctcaatacgccatgcgtggcactgtatcaaatgaaaaggaaacaaaag

SEQ ID NO: 25875 - DNA, 75 bp, synthetic construct
  source 1..75: mol_type = other DNA
gacgaaaacggcgaaactaaaacctggactggccagggccgtactccagctgtaatcaaaaaagcaatggatgag

SEQ ID NO: 25876 - DNA, 75 bp, synthetic construct
  source 1..75: mol_type = other DNA
gctacagcccggcagttattggtttaagttatgtcccgcaaactatcgcgtttctgattggtggttatggctgtc

SEQ ID NO: 25877 - DNA, 75 bp, synthetic construct
  source 1..75: mol_type = other DNA
accgagtggatgctctatgcgcagaaagtcgaatctacagacacctccagcctgccagtaacgtttcccgaacaa

SEQ ID NO: 25878 - DNA, 75 bp, synthetic construct
  source 1..75: mol_type = other DNA
ccgccgccggagccggtcacccgcccgatggagctgtatatcaatggcgaactggtgagcaagtgggatgaatga

SEQ ID NO: 25879 - DNA, 75 bp, synthetic construct
  source 1..75: mol_type = other DNA
cgggcgcgttttgatttttatcaggcgcgatcagcctggtcacgggcagagtggattggtgccggaagaatggcc

SEQ ID NO: 25880 - DNA, 75 bp, synthetic construct
  source 1..75: mol_type = other DNA
actttctgcgggccggggttgaggtcgatcggtatgggcgggcgattgcgtaccatatctgtgaggatgattttc

SEQ ID NO: 25881 - DNA, 75 bp, synthetic construct
  source 1..75: mol_type = other DNA
gcgctgatgggcgaggattatcaggacattttccgccagcaggtcagggaatctgcagagcgggaaaaagccgga

SEQ ID NO: 25882 - DNA, 75 bp, synthetic construct
  source 1..75: mol_type = other DNA
ctttgcctgataaccacgaattactcgctaaagaatggcgggagtctgctgaatctctcggcctgcatatcggtg

SEQ ID NO: 25883 - DNA, 75 bp, synthetic construct
  source 1..75: mol_type = other DNA
ccgccgcacgcctggcatccacacttcagcaggaccagaacaccatgaaaacacccgttaccgtgctttctgaca

SEQ ID NO: 25884 - DNA, 75 bp, synthetic construct
  source 1..75: mol_type = other DNA
gatcatattgtcgggcatatgtttctgatcagctaccgtccgaactggcgctggctggggatgcgggagaccgcg

SEQ ID NO: 25885 - DNA, 75 bp, synthetic construct
  source 1..75: mol_type = other DNA
cagttgaaggcagcagcaaagcggctgcatacgctacaggctggaacgcctgccgcgccgctatgcttcatggga

SEQ ID NO: 25886 - DNA, 75 bp, synthetic construct
  source 1..75: mol_type = other DNA
cactgacggtagtgtgtcgagtgttgaagctatagcggaacctgatgaacctgaagaaatgtggacggtgaaacg

SEQ ID NO: 25887 - DNA, 75 bp, synthetic construct
  source 1..75: mol_type = other DNA
cgggcaacagattcatgcattctgtacttccttttaccgacaggtgcatgaacgtattactgagcgtaatcacat

SEQ ID NO: 25888 - DNA, 75 bp, synthetic construct
  source 1..75: mol_type = other DNA
attccctgcaggcaacacagcttcagtcggccatagtgaaggcgatgtatgcagcgacgattgaaagtgaccttg

SEQ ID NO: 25889 - DNA, 75 bp, synthetic construct
  source 1..75: mol_type = other DNA
atgaaacgaacgcctgtcctgattgatgtgaacggcgttccgcttcgggagagcctcagctacaacgggggcggc

SEQ ID NO: 25890 - DNA, 75 bp, synthetic construct
  source 1..75: mol_type = other DNA
atgcgaacgctgatgcactggtacaggacgcgcgctcatccctgctggatgaatggcacaaggaagctgacgacc

SEQ ID NO: 25891 - DNA, 75 bp, synthetic construct
  source 1..75: mol_type = other DNA
ccgatataaaaatgacgatgatctattctcatttttcaccagaacacttagaagatgcagtaactaagaatcctt

SEQ ID NO: 25892 - DNA, 75 bp, synthetic construct
  source 1..75: mol_type = other DNA
gaaaatggttgtgtgagtgctaccctaacgggcgggacggcaagcgcgtgcgcaagcaatttgcgacgaaaggcg

SEQ ID NO: 25893 - DNA, 75 bp, synthetic construct
  source 1..75: mol_type = other DNA
aagacgtactggacgaacaactggcaggactagcgaaagcgcatccatcgctgacactgcatcaggatccggtgt

SEQ ID NO: 25894 - DNA, 75 bp, synthetic construct
  source 1..75: mol_type = other DNA
agagtcaacgtaaatatatgcaacatgaatatttacatagtcaggccagtttcagagggcaacaggcaaactgcg

SEQ ID NO: 25895 - DNA, 75 bp, synthetic construct
  source 1..75: mol_type = other DNA
cggtcaggctttactggcgaagcggatgggtaaaactgaaattattgccgaaaccggtgccggtcagcatggcgt

SEQ ID NO: 25896 - DNA, 75 bp, synthetic construct
  source 1..75: mol_type = other DNA
ggaaaacggtggagattgtcgctggcgcaaatatcagtagcggagagctggtacaggtgggcgatatttttgctg

SEQ ID NO: 25897 - DNA, 75 bp, synthetic construct
  source 1..75: mol_type = other DNA
ggatatattggaggagttattgctgatggttcaaataggacaataacaataccatcaaacggtattaactataat

SEQ ID NO: 25898 - DNA, 75 bp, synthetic construct
  source 1..75: mol_type = other DNA
ttccgtcagccctgctcaacgagtccgccacgctgttccgacgcaaatattatattaatggcagccatgcaggat

SEQ ID NO: 25899 - DNA, 75 bp, synthetic construct
  source 1..75: mol_type = other DNA
ccgggtataggacttggaagttttaatccaaactacaatggaggtttattaaactcaggatttaactcatcaaca

SEQ ID NO: 25900 - DNA, 75 bp, synthetic construct
  source 1..75: mol_type = other DNA
ctttctgctcatcgtcgtttcccgctgggcagcgaagatgacgcggtgcgggcgcaggggctggagattatgcgt

SEQ ID NO: 25901 - DNA, 75 bp, synthetic construct
  source 1..75: mol_type = other DNA
aagcataaaagccagatccatcgaagatacatacagccagaatacataattgctcaagccaaattccgaggacaa

SEQ ID NO: 25902 - DNA, 75 bp, synthetic construct
  source 1..75: mol_type = other DNA
ctaaactggttacccctccccctgttcctggtgattatttgcataaagaacaactcaccgatgatgaaaaagagt

SEQ ID NO: 25903 - DNA, 75 bp, synthetic construct
  source 1..75: mol_type = other DNA
aaacgcaaatcgccggtgaaagtttgcatctcaaccttcaacagcggctgacgcgatttgccgcagagaatgcgc

SEQ ID NO: 25904 - DNA, 75 bp, synthetic construct
  source 1..75: mol_type = other DNA
ttaatccgtctcactttgcccgcgcgttgagtgctgccggaatgctggaagcgggaggcgaccgccgttacaaga

SEQ ID NO: 25905 - DNA, 75 bp, synthetic construct
  source 1..75: mol_type = other DNA
tccaccctggcaatgtgatatttgagacacagagccgtttgctttttctcatcgatatccccgatttttcaccgt

SEQ ID NO: 25906 - DNA, 75 bp, synthetic construct
  source 1..75: mol_type = other DNA
cagtatcgtatggctccaccgattggtaatctcgtatcgaagacgttttatgacgggaagcttctgaatggagta

SEQ ID NO: 25907 - DNA, 75 bp, synthetic construct
  source 1..75: mol_type = other DNA
taaaacctgggatgaacgccgcggcgggcgcggtgtgcgactggtggggctgcatgtgacgttgcttgacccgca

SEQ ID NO: 25908 - DNA, 75 bp, synthetic construct
  source 1..75: mol_type = other DNA
gcggaaaagaaaaaggtagttgaactgcctgtaaagaaaaaagagcgggtaaaagacgataacgcttcatcactg

SEQ ID NO: 25909 - DNA, 75 bp, synthetic construct
  source 1..75: mol_type = other DNA
tagctacaaaaaatagtggtctacccaagcctgcattaaatcagatgggagccagccagagaggggaagtgttac

SEQ ID NO: 25910 - DNA, 75 bp, synthetic construct
  source 1..75: mol_type = other DNA
taatattcaatttttcggaagttgtaccggagaacgaacgtgaccctatgctggctgaaaaaatagaaggagagc

SEQ ID NO: 25911 - DNA, 75 bp, synthetic construct
  source 1..75: mol_type = other DNA
caaaagatgcactggaacgagaagagcgggcgctatggcgtaaatatcagcctgattttctggagggtgaaagca

SEQ ID NO: 25912 - DNA, 75 bp, synthetic construct
  source 1..75: mol_type = other DNA
aaaagcagtaaaggtatccggattccggtcacgaagaaatcacttccggaaattaacagcgtgcagaacaattaa

SEQ ID NO: 25913 - DNA, 75 bp, synthetic construct
  source 1..75: mol_type = other DNA
gccatgcaagtgcccagatggtattcaatgtatacggagcatggatgactgacagcaatgcagaacagatcgcaa

SEQ ID NO: 25914 - DNA, 75 bp, synthetic construct
  source 1..75: mol_type = other DNA
caaaacctgcgagctggcctgtaaagactacaaagatttgacgccagaagtcagcttccgccgcatttatgaata

SEQ ID NO: 25915 - DNA, 75 bp, synthetic construct
  source 1..75: mol_type = other DNA
tattcctgcctgcgggccttacggatggatttcttctacaggaaagatacgcctgatttcttacaacctgatcat

SEQ ID NO: 25916 - DNA, 75 bp, synthetic construct
  source 1..75: mol_type = other DNA
tggactggctggaatactgaagtttacatcttcccaaccttcaaacaaatgaagacctacgatgagccgttcagc

SEQ ID NO: 25917 - DNA, 75 bp, synthetic construct
  source 1..75: mol_type = other DNA
attatctgatttttaatgatgatttcataaaaagaagaatactcattaatccagcgacacatcctgtcggcgtga

SEQ ID NO: 25918 - DNA, 75 bp, synthetic construct
  source 1..75: mol_type = other DNA
atgattaccagttatgaagccactgttgtaactactgatgacattgttcacgaggttaatctggaaggaaagcgt

SEQ ID NO: 25919 - DNA, 75 bp, synthetic construct
  source 1..75: mol_type = other DNA
cgctcagggcgtggcagtccggttcattgatgacgggatcagtaccgacggtgatatggggcaaatggtggtcac

SEQ ID NO: 25920 - DNA, 75 bp, synthetic construct
  source 1..75: mol_type = other DNA
gataataatcagctgatacctgacagggtcatgtttgacctcagagcggaagtcatgaaagtcttcgagtttttc

SEQ ID NO: 25921 - DNA, 75 bp, synthetic construct
  source 1..75: mol_type = other DNA
tgaaaaagaacctgattgcgattgccgtcgtgataagcctgttgattgttctgatcattcgaatcgctgtccgtc

SEQ ID NO: 25922 - DNA, 75 bp, synthetic construct
  source 1..75: mol_type = other DNA
tgtttctccggatgacggagggagttgttatctctggctcaaccgggggcaaccacctgccgccagccgtcgccg

SEQ ID NO: 25923 - DNA, 75 bp, synthetic construct
  source 1..75: mol_type = other DNA
ggtttcgccggatgatggtggaagctgtcatctctggctcaaccgtgggcaaccacccgctgttaaccggcgacg

SEQ ID NO: 25924 - DNA, 75 bp, synthetic construct
  source 1..75: mol_type = other DNA
tgtttccaagattgagcagcgtcttaaaaacactaaagcgtttaagattaaaactgagattgaggatactttaaa

SEQ ID NO: 25925 - DNA, 75 bp, synthetic construct
  source 1..75: mol_type = other DNA
gacggaagcaccttctatgtagggaaaggcaaaggtaaccgcgtatttgcccatatgcgcggtgaagtggcagcg

SEQ ID NO: 25926 - DNA, 75 bp, synthetic construct
  source 1..75: mol_type = other DNA
ctggcgctgggaaaataccccgaagtctcgccggcggatgctcgggcacgccgggatgaggcccgtaaactatta

SEQ ID NO: 25927 - DNA, 75 bp, synthetic construct
  source 1..75: mol_type = other DNA
atggatattactgagtttccttctggagtaattgaacaccttggctggtatgtataccgattgattgatccgagg

SEQ ID NO: 25928 - DNA, 75 bp, synthetic construct
  source 1..75: mol_type = other DNA
agagcaggacagtattagtgccattaaacaactggcaattcagcgccctgccaccccccctagcaacgaggtcga

SEQ ID NO: 25929 - DNA, 75 bp, synthetic construct
  source 1..75: mol_type = other DNA
tatcgcacgtaaacagagttgtgtattcgctggcaccttattatgcagatccgggcaatgatttttttgacagac

SEQ ID NO: 25930 - DNA, 75 bp, synthetic construct
  source 1..75: mol_type = other DNA
aagccgagcagaaagcggctcaggccgagaaatcgggggcatatactttcgaaacgatcgctcgtgaatggcatg

SEQ ID NO: 25931 - DNA, 75 bp, synthetic construct
  source 1..75: mol_type = other DNA
ctggccttccgtcacgcatccggcactgaacaatgcaccggcggtgaaaaacacggttgacctgccgacgtggga

SEQ ID NO: 25932 - DNA, 75 bp, synthetic construct
  source 1..75: mol_type = other DNA
actgaacaaggcagaactgcacttgctgatgcgaaaacaaaggtcaaggagctgttcggagagttggtagaaggt

SEQ ID NO: 25933 - DNA, 75 bp, synthetic construct
  source 1..75: mol_type = other DNA
cagaaggcaatgaatgcgttttccgaagccttcgggattgacagcatggagccaggaggtccagctcgcgtaatt

SEQ ID NO: 25934 - DNA, 75 bp, synthetic construct
  source 1..75: mol_type = other DNA
gcttattgatttaaatttaacgcttggcgctaactggaatatgaaaacaccacgtcaattattctctgaatatgt

SEQ ID NO: 25935 - DNA, 75 bp, synthetic construct
  source 1..75: mol_type = other DNA
gccaggaggtccagctcgcgtaattagcagaggtgacgttgtaattcttgtataccggagcgaagagaaaaatga

SEQ ID NO: 25936 - DNA, 75 bp, synthetic construct
  source 1..75: mol_type = other DNA
gtagtgttaaacgttatggtgaaattagtggaaatgtaggtacagaaacccgtccacgaaatattgcatttaact

SEQ ID NO: 25937 - DNA, 75 bp, synthetic construct
  source 1..75: mol_type = other DNA
tctggccaacgggacatccggtacatggttttacactgacgacattgctgtcactgacgcgtggcttcgcgcaca

SEQ ID NO: 25938 - DNA, 75 bp, synthetic construct
  source 1..75: mol_type = other DNA
cggtgagtttattcgtggctgggatgacggacgtggagtggataacggaaggggattattaacgcttcaggacgg

SEQ ID NO: 25939 - DNA, 75 bp, synthetic construct
  source 1..75: mol_type = other DNA
ttttcttaaacgttggtttgggagaaggtgctccagctattggcgttccgttcttctggccgtccgctgcaatgc

SEQ ID NO: 25940 - DNA, 75 bp, synthetic construct
  source 1..75: mol_type = other DNA
ctgaaatgcaatggtgcgcctttttctgccgaagagtatccggaactggcaaaagtttatccgacaaataaattg

SEQ ID NO: 25941 - DNA, 75 bp, synthetic construct
  source 1..75: mol_type = other DNA
ggaactttgcaaaggtcgttggacttaagcaaaacgcccttttctcatggttgcgccagaacggcattctcatgg

SEQ ID NO: 25942 - DNA, 75 bp, synthetic construct
  source 1..75: mol_type = other DNA
tggctgcactctgacagcgatgacccgtactcgtccggcacgctgtggggtgctgctgccgggctcagcaccacc

SEQ ID NO: 25943 - DNA, 75 bp, synthetic construct
  source 1..75: mol_type = other DNA
tatctggttttttgatgagagctgtccgggaggagctgtctgggtgcttgaagatggctctctcgaatggacctg

SEQ ID NO: 25944 - DNA, 75 bp, synthetic construct
  source 1..75: mol_type = other DNA
atctggatgatgactactttgacatgttgcaggaggagctttgcagcgttgtggaggcgtccggtgccagcctgg

SEQ ID NO: 25945 - DNA, 75 bp, synthetic construct
  source 1..75: mol_type = other DNA
gcaggttatcgaacaggtcacgctgatgaaacccagtgccgggacgctgcgcggtgtcagtctggctgcggtcgc

SEQ ID NO: 25946 - DNA, 75 bp, synthetic construct
  source 1..75: mol_type = other DNA
cgcagaaggataagttcggcgcgggtaaaaacggttttacccgtggtaacccccagactggcacgcctgccaccg

SEQ ID NO: 25947 - DNA, 75 bp, synthetic construct
  source 1..75: mol_type = other DNA
gggaagaatacctggtgatgagtggtgatgagtttatggaaaggttctcctggcatgtggcggataaggggttcc

SEQ ID NO: 25948 - DNA, 75 bp, synthetic construct
  source 1..75: mol_type = other DNA
gttgttacggtgccattcaggatgctcaggcgttgtccgaaggtgtggtggcctcttcccgttatccgaaacact

SEQ ID NO: 25949 - DNA, 75 bp, synthetic construct
  source 1..75: mol_type = other DNA
atcaacacgccgcacgcgacgctcaccacgggcaaacctgtgatgaatgccgacggcagcctgcaggcgctggag

SEQ ID NO: 25950 - DNA, 75 bp, synthetic construct
  source 1..75: mol_type = other DNA
acgctgagcctggtgtactggaacagacggcccaggcttacattgaatcgcatggtgccattgaacgtcatcttg

SEQ ID NO: 25951 - DNA, 75 bp, synthetic construct
  source 1..75: mol_type = other DNA
atgtacgccaggcgtattcatctgacctccactgaaagtggtgtcggggttaatcttggtaacctttatgcccgc

SEQ ID NO: 25952 - DNA, 75 bp, synthetic construct
  source 1..75: mol_type = other DNA
gaatatgaatggtatcgataacctgatgtatatgtcctccaccagcgattccgccggtagcgtgacaattaccct

SEQ ID NO: 25953 - DNA, 75 bp, synthetic construct
  source 1..75: mol_type = other DNA
gccacataaaaaaggtctgcttccggtgtaaaagtcgctcctgcccgcactgcggagtgaaggctggcgcacagt

SEQ ID NO: 25954 - DNA, 75 bp, synthetic construct
  source 1..75: mol_type = other DNA
tggcatgtggcggataaggggttccgtatggtgaggtactacggtttcctgagtccggtgaagcgccggttactg

SEQ ID NO: 25955 - DNA, 75 bp, synthetic construct
  source 1..75: mol_type = other DNA
gagttacaaggacgagtggggcgataaatataagtcagaagttgatgttaaaagtcatgacatcctgcttggtgt

SEQ ID NO: 25956 - DNA, 75 bp, synthetic construct
  source 1..75: mol_type = other DNA
gcttccggatgaagcggaaagggcgcgcaagaaaatcgaagacgcacagcgtgcggccattcttcaggacaaggt

SEQ ID NO: 25957 - DNA, 75 bp, synthetic construct
  source 1..75: mol_type = other DNA
gaactgaataaccaggggatctggctgcgggaaggcgaacgggcagcggcggatggcagtatcaccggaaccccc

SEQ ID NO: 25958 - DNA, 75 bp, synthetic construct
  source 1..75: mol_type = other DNA
atggtgaattaccgtcttatatcactggcgctgacacctgtagtttgtatacacaatccctggcattgaaacaca

SEQ ID NO: 25959 - DNA, 75 bp, synthetic construct
  source 1..75: mol_type = other DNA
ggagatgctaatccgctcacgggcaaacgtatttacagcgcagggttgccggagtgtcttgaaaaaggccggaaa

SEQ ID NO: 25960 - DNA, 75 bp, synthetic construct
  source 1..75: mol_type = other DNA
cgttaggtattgatcctgttgaaattcgtttacgcaacgccgcccgcgaaggagatgctaatccgctcacgggca

SEQ ID NO: 25961 - DNA, 75 bp, synthetic construct
  source 1..75: mol_type = other DNA
ttaaaccagccagaaaagccagctccggtttaccgcttgataaccatccgcagtccaggaaaattcgtgcgctat

SEQ ID NO: 25962 - DNA, 75 bp, synthetic construct
  source 1..75: mol_type = other DNA
ttcagtaccgattatttaatcgaccttgtcacacgctttattaactggcagatgattggggccatttttgtttta

SEQ ID NO: 25963 - DNA, 75 bp, synthetic construct
  source 1..75: mol_type = other DNA
tcggcgcaatccggcgtgtggtggagccgctcggctatctcattaacgtaaaggaatggtgggagacaaacgacc

SEQ ID NO: 25964 - DNA, 75 bp, synthetic construct
  source 1..75: mol_type = other DNA
ggaaaacgactcgaacgggttccggagactatcatgaacgaagttcttggccgcctgtccactattctgacttga

SEQ ID NO: 25965 - DNA, 75 bp, synthetic construct
  source 1..75: mol_type = other DNA
tgactgtttttggtaataaccatattgccaacaaagcacaaaacttcgaagctgttgcacaatatcagttcgact

SEQ ID NO: 25966 - DNA, 75 bp, synthetic construct
  source 1..75: mol_type = other DNA
tcatgtgatgcgtcatacgttcgccacgcatttcatgatgaacgggggaaacatcgttaccctgcaacggattct

SEQ ID NO: 25967 - DNA, 75 bp, synthetic construct
  source 1..75: mol_type = other DNA
atgttgctcacacccgccgcgcacatttcatggacgatggcaccaagataatgattgcacagtgccggaatattt

SEQ ID NO: 25968 - DNA, 75 bp, synthetic construct
  source 1..75: mol_type = other DNA
gtcagcagcaggcactggcttacgacgacccgcacggcaggctggtgattggcggtattggctcaacgcgggcac

SEQ ID NO: 25969 - DNA, 75 bp, synthetic construct
  source 1..75: mol_type = other DNA
tgccggacgttatcagctcaacatgtggagcaaaatcttccagccgctatccgtggcggtgatgatgctgatggc

SEQ ID NO: 25970 - DNA, 75 bp, synthetic construct
  source 1..75: mol_type = other DNA
agccctttaacggaacgattccattcagggttttgcagcgtggacgtgttctggttaaggatatcttcagtggta

SEQ ID NO: 25971 - DNA, 75 bp, synthetic construct
  source 1..75: mol_type = other DNA
gaggctggaggaattggggattagcgaacgtttgcagcaggaatgcaatgccgttgtttgggatccggcgaaagg

SEQ ID NO: 25972 - DNA, 75 bp, synthetic construct
  source 1..75: mol_type = other DNA
cgcaacgccacctgaacaatccccagttaaaagcaaacgattcactaccttttgggtatggttttttttcctgtt

SEQ ID NO: 25973 - DNA, 75 bp, synthetic construct
  source 1..75: mol_type = other DNA
gggggaggtttattcgaaccgctggacccagaagaacggggccgcaccttcgaagctctggattgcacagattgg

SEQ ID NO: 25974 - DNA, 75 bp, synthetic construct
  source 1..75: mol_type = other DNA
atcgggtgctggtgtatatgccgatgattgccgaagcgcatattactctgctggcctgcgcgcgcattggcgcta

SEQ ID NO: 25975 - DNA, 75 bp, synthetic construct
  source 1..75: mol_type = other DNA
tgcagatgataataacgcagatctcatcccatgcctgagtacagaccttcttgtcagtcttggcataaaaaaatc

SEQ ID NO: 25976 - DNA, 75 bp, synthetic construct
  source 1..75: mol_type = other DNA
aagccctgactcatagcccgtggggaacgtataccgttgcgttcaccattccgctggcgctgtttatggggatct

SEQ ID NO: 25977 - DNA, 75 bp, synthetic construct
  source 1..75: mol_type = other DNA
gggagttcggggagcttaaaggcaaaaaacactatcacctgctgctgctggtcaaccgggatacctggtgtcgtg

SEQ ID NO: 25978 - DNA, 75 bp, synthetic construct
  source 1..75: mol_type = other DNA
acgaagccgaaatgcgctacctgcgtgaagcggggaaagaatttgcgcaggcttaccccgaccgcgccgcgatgc

SEQ ID NO: 25979 - DNA, 75 bp, synthetic construct
  source 1..75: mol_type = other DNA
ttcatggttcccgggatatcaacagggtacttgcagagccagacgacaaaccatcagatcatttctggcagctat

SEQ ID NO: 25980 - DNA, 75 bp, synthetic construct
  source 1..75: mol_type = other DNA
ccacagcctgggaaggttttaccaaaggtgactggcagaatgaagtaaacgtccgtgacttcattcagaaaaact

SEQ ID NO: 25981 - DNA, 75 bp, synthetic construct
  source 1..75: mol_type = other DNA
tgtgtcatgaagatggcctgactcaggctgaagttctgaccgcactgataaaaagtgaagcgcaaaaacgatgta

SEQ ID NO: 25982 - DNA, 75 bp, synthetic construct
  source 1..75: mol_type = other DNA
ggcatcatgatagacggttgtgtggctcggttgcgaaagtataaaccagaggaatatgagctgctcatagctcac

SEQ ID NO: 25983 - DNA, 75 bp, synthetic construct
  source 1..75: mol_type = other DNA
acaggggcttgagaaaacgcctggtattcacctcggaaagtctgcctgtgcgatggaaacacgcggtatcgaaac

SEQ ID NO: 25984 - DNA, 75 bp, synthetic construct
  source 1..75: mol_type = other DNA
agaaccggagctgaaaatagcgcagcaactggtactcgagttctaccgtattctgaaaacccaaaataaatcaca

SEQ ID NO: 25985 - DNA, 75 bp, synthetic construct
  source 1..75: mol_type = other DNA
tccagcgtcaaggggatgaatgaaccggaagaaggcatgattaatcttgttcaaaccagcaatggctggaaagcg

SEQ ID NO: 25986 - DNA, 75 bp, synthetic construct
  source 1..75: mol_type = other DNA
gcgggaataaagtctgcaattccagaatcacgggatattgaagatgacaatgacaatatggatgacgtatctctc

SEQ ID NO: 25987 - DNA, 75 bp, synthetic construct
  source 1..75: mol_type = other DNA
agccaattgccgaaatgatgtatccggatccagcagtagaggaattaaaggctattgctgacaaaatgcgtttaa

SEQ ID NO: 25988 - DNA, 75 bp, synthetic construct
  source 1..75: mol_type = other DNA
tcgtctggatctaatctggaaaggcaaatcaaagaagatgaagacagtagttcaactctggaagaggcaggggaa

SEQ ID NO: 25989 - DNA, 75 bp, synthetic construct
  source 1..75: mol_type = other DNA
attcgcagtcgcgatatcagtctgggtgatgacccgggtattaatggacagctgtgggacgtcaaccgtattgat

SEQ ID NO: 25990 - DNA, 75 bp, synthetic construct
  source 1..75: mol_type = other DNA
tacatcaccggatcaggaaagttatgggcggcagtgacgaactgaccaatctcgagttgttacatccgaactgcc

SEQ ID NO: 25991 - DNA, 75 bp, synthetic construct
  source 1..75: mol_type = other DNA
cctgagacaatttataaaacgctgtactttcgtagccgtgaagcgctacaccacctgaatatacagcatctgcga

SEQ ID NO: 25992 - DNA, 75 bp, synthetic construct
  source 1..75: mol_type = other DNA
cggtcgcatagccttcgccatggcaggcgtcatacccgcaaaggcgaaagaggtacgattaacatagtgaacgga

SEQ ID NO: 25993 - DNA, 75 bp, synthetic construct
  source 1..75: mol_type = other DNA
atccgaatatctactacttccataatctgacgcccggttgggtgtcattcaatggtgaaaaaccggagattgcca

SEQ ID NO: 25994 - DNA, 75 bp, synthetic construct
  source 1..75: mol_type = other DNA
tgcaggcatttatcggggagctggacggcggcgtatttgaaacaaaaatcggcgcagttctcagtgaagtcgctt

SEQ ID NO: 25995 - DNA, 75 bp, synthetic construct
  source 1..75: mol_type = other DNA
atgcgcaatgaaatagccatcaatcaccagatgcttcgtgcagcacaaaacaaagcagtaatagccagatttatt

SEQ ID NO: 25996 - DNA, 75 bp, synthetic construct
  source 1..75: mol_type = other DNA
actgcgagcaaaaagggataacacaggctcagttcattgagaaaattatcaaagatgaactgcagagactggatg

SEQ ID NO: 25997 - DNA, 75 bp, synthetic construct
  source 1..75: mol_type = other DNA
ttgcaagaaaacgtcttacacacaaagagataaaagtttttgtcaaaaaccctctgaaagatctcatggttgagt

SEQ ID NO: 25998 - DNA, 75 bp, synthetic construct
  source 1..75: mol_type = other DNA
gtatgccaatgatgaaacacacaatggttcttatcttgatagctggctgcaatacagctggtttgataatcatat

SEQ ID NO: 25999 - DNA, 75 bp, synthetic construct
  source 1..75: mol_type = other DNA
tggtatcaggtacggattgccgggcgggatgcaggagaaaccgaattatcatcccgtcttaatgagccgctggca

SEQ ID NO: 26000 - DNA, 75 bp, synthetic construct
  source 1..75: mol_type = other DNA
gtcttaatgagccgctggcaaatggtgccgtgatccacatcgtgccgcgtctggcgggagctaaaagtggcggtg

SEQ ID NO: 26001 - DNA, 75 bp, synthetic construct
  source 1..75: mol_type = other DNA
gtttcgtcagaaactgagcgacggctggtaccaggtacgcattgccgggcgtgatgcaggtgaaaccgaattgtc

SEQ ID NO: 26002 - DNA, 75 bp, synthetic construct
  source 1..75: mol_type = other DNA
tgacgccagaagctgaacaattattgcccgttttacagcgttacggcttcgaaacgctcgaaaaactggcagttt

SEQ ID NO: 26003 - DNA, 75 bp, synthetic construct
  source 1..75: mol_type = other DNA
gcgaatattgccttttgtatggcaatgacgccagaagctgaacaattattgcccgttttacagcgttacggcttc

SEQ ID NO: 26004 - DNA, 75 bp, synthetic construct
  source 1..75: mol_type = other DNA
aggggcattcgtcgccggagtattctgcgcggtggcgacgggatacctgaaagacaacagccgaatcaagcaaga

SEQ ID NO: 26005 - DNA, 75 bp, synthetic construct
  source 1..75: mol_type = other DNA
gaagaatatccgcaatccgcagccatcgacctgcgttgcgtaaatatggttgccgatctgtggcatgcgcctgcg

SEQ ID NO: 26006 - DNA, 75 bp, synthetic construct
  source 1..75: mol_type = other DNA
gttggcaccaacaccattggttcttccgaggcctgtatgctcggcgggatggcgatgaaatggcgttggcgcaag

SEQ ID NO: 26007 - DNA, 75 bp, synthetic construct
  source 1..75: mol_type = other DNA
atggaaagagtccccctaaagcagactgacagacatcacaaatccccgggtggggatttgtgtataagagacagg

SEQ ID NO: 26008 - DNA, 75 bp, synthetic construct
  source 1..75: mol_type = other DNA
tcaggtcgttgattaccgcgttgtgaagatgccggttgtcaaaggtggaaagctggaactgaccatcactgaact

SEQ ID NO: 26009 - DNA, 75 bp, synthetic construct
  source 1..75: mol_type = other DNA
atcgcgatggaaccctgattagcgaaccgccgagtgattttcaggtggaccgttttgacaaactcgcctttgaac

SEQ ID NO: 26010 - DNA, 75 bp, synthetic construct
  source 1..75: mol_type = other DNA
atgctcacctcagaacaacacaggtgctccaatgaaaaaagaaattttagcgcagagtttaaacgcgaatccgct

SEQ ID NO: 26011 - DNA, 75 bp, synthetic construct
  source 1..75: mol_type = other DNA
catcattaaggatacgcaaatatcgtcattattcgatgaatacgcggttgctgttgagcatcaacttcgtggctg

SEQ ID NO: 26012 - DNA, 75 bp, synthetic construct
  source 1..75: mol_type = other DNA
tcaacttctcccgcccggcgggtcaggtaattgcacagtactatgaattcctgcgcctcggtcgtgaaggctata

SEQ ID NO: 26013 - DNA, 75 bp, synthetic construct
  source 1..75: mol_type = other DNA
aatacatgcgacgcggaagcgatcttgaatcatggtggtatgtgcaggatggcaaggacgcgtttcagtttcgtc

SEQ ID NO: 26014 - DNA, 75 bp, synthetic construct
  source 1..75: mol_type = other DNA
aaggtattctcaacgcgatggcgcgtccgcagacggcgattgtctctctgacggtcacggaaaaaggctactgcg

SEQ ID NO: 26015 - DNA, 75 bp, synthetic construct
  source 1..75: mol_type = other DNA
cacattctggctgtacgaaagagtacattgctgcaaatcgacacacttatccgacaactggctgaaatatcagca

SEQ ID NO: 26016 - DNA, 75 bp, synthetic construct
  source 1..75: mol_type = other DNA
atgtctgatatcacagcctcccgtccggaagtggtcaacgggcatacggaagttatctgctcaaccagtatccac

SEQ ID NO: 26017 - DNA, 75 bp, synthetic construct
  source 1..75: mol_type = other DNA
cggtggcggaagccgtcgtgacaactcagcgtgactggggtaaccgaaccgatcgtaaaaatgccaaaaccaaat

SEQ ID NO: 26018 - DNA, 75 bp, synthetic construct
  source 1..75: mol_type = other DNA
aggttgccgcttatctggcggatgaaatcgccaaactggggccgtatgagttcatctgtacgggtcgcccggacg

SEQ ID NO: 26019 - DNA, 75 bp, synthetic construct
  source 1..75: mol_type = other DNA
tgtacgacctctctgaacgtctgcgtctgcgcggctggcaggttccggccttcactctcggcggtgaagccaccg

SEQ ID NO: 26020 - DNA, 75 bp, synthetic construct
  source 1..75: mol_type = other DNA
tggcatgcgcctgcgccgaaaaatggtcaggccgttggcaccaacaccattggttcttccgaggcctgtatgctc

SEQ ID NO: 26021 - DNA, 75 bp, synthetic construct
  source 1..75: mol_type = other DNA
aaaaactggatcgacaaagaagaatatccgcaatctgcagccatcgacctgcgttgcgtaaacatggttgccgat

SEQ ID NO: 26022 - DNA, 75 bp, synthetic construct
  source 1..75: mol_type = other DNA
tatcttgatggcaacgctcgtcagaacctggccactttctgccagacctgggacgacgaaaatgtccacaagttg

SEQ ID NO: 26023 - DNA, 75 bp, synthetic construct
  source 1..75: mol_type = other DNA
cctgtctactcttgtcgctgcgcatatgagtatgtgtcttgatgccgcttgtggtgatttgtatgccaccgatga

SEQ ID NO: 26024 - DNA, 75 bp, synthetic construct
  source 1..75: mol_type = other DNA
ttgtggctgtaccacgacagcggggatgcagggctgactcacctgtacaggatgcgcgatgcgcagttgtggagc

SEQ ID NO: 26025 - DNA, 75 bp, synthetic construct
  source 1..75: mol_type = other DNA
atgaacgggagtataaggaagatgatgcgtgtcacctgcgggatgttactgatggtcatgagtggtgtgtcgcag

SEQ ID NO: 26026 - DNA, 75 bp, synthetic construct
  source 1..75: mol_type = other DNA
tatgactcacaatgggcgacaatttgttccattgctccaaagattggctgtacgccggagactctgcgtgtctgg

SEQ ID NO: 26027 - DNA, 75 bp, synthetic construct
  source 1..75: mol_type = other DNA
acagatagcgacggtaatcgccagcattacgtttcatgcggactggaagcagccgaaggatttcgcagaatgcct

SEQ ID NO: 26028 - DNA, 75 bp, synthetic construct
  source 1..75: mol_type = other DNA
ggacgcaggggacgtattcttcccttgccctgaaagcggttcagttatcgctgcggcatattccggcatcactgc

SEQ ID NO: 26029 - DNA, 75 bp, synthetic construct
  source 1..75: mol_type = other DNA
gaatgaaaaaggggagccggtgacctggcaggggcgtgaatatcaggcgtacccgattgaggggagtggctttga

SEQ ID NO: 26030 - DNA, 75 bp, synthetic construct
  source 1..75: mol_type = other DNA
gtgcttaccgatacaaaattaaagaacctcaagccacaggacaaactgtacaaagtttccgatcgtgacgggctg

SEQ ID NO: 26031 - DNA, 75 bp, synthetic construct
  source 1..75: mol_type = other DNA
aggaaagacaaatgcagcaagtgcctgcgcggttgtgaaatgcgcgggaatgtggcaaacggcggttttttcctt

SEQ ID NO: 26032 - DNA, 75 bp, synthetic construct
  source 1..75: mol_type = other DNA
gtatgtatgagtttgtggtgaatgatgctcctgaacaggcagaggacgccgggcctgcagagcctgtttctgcgg

SEQ ID NO: 26033 - DNA, 75 bp, synthetic construct
  source 1..75: mol_type = other DNA
agagttgtatcctgtatcagtcctgcaaaatttcacgagtgctttattaactggatgcgtgattgccattcttca

SEQ ID NO: 26034 - DNA, 75 bp, synthetic construct
  source 1..75: mol_type = other DNA
atgagcgccgcgcttcaatacttcgacgaaaatttaccccatcgtccctatcacacggatgatctcgcttttggt

SEQ ID NO: 26035 - DNA, 75 bp, synthetic construct
  source 1..75: mol_type = other DNA
tgcactggcgtctggacgtggtaatgaatgaagacgactgcaaaataagaagaggaaatgcagcagaattatttt

SEQ ID NO: 26036 - DNA, 75 bp, synthetic construct
  source 1..75: mol_type = other DNA
gggagatgaaacgaaggtagctgaagttactgaaatgaagaattcagagagactgaatgatatgcctcaccttta

SEQ ID NO: 26037 - DNA, 75 bp, synthetic construct
  source 1..75: mol_type = other DNA
taaaatggtttaacgctgataaaggtttcggctttatttctcctgttgatggtagtaaagatgtgtttgtgcatt

SEQ ID NO: 26038 - DNA, 75 bp, synthetic construct
  source 1..75: mol_type = other DNA
gatgaactggctgattatctcgatttgagcgcctcagcgcgccgtagcatcgataaacattacggaatggggaga

SEQ ID NO: 26039 - DNA, 75 bp, synthetic construct
  source 1..75: mol_type = other DNA
ggcgtgaactgcgtggctatgatgccatgacagcagcttatgcccgtgcaagaaaaacacggagactggcacaat

SEQ ID NO: 26040 - DNA, 75 bp, synthetic construct
  source 1..75: mol_type = other DNA
gaacgctcccgcgccgaacatcaccgttaaaaatcctgtgaacggacacgctcacctgctctacgcactcaacat

SEQ ID NO: 26041 - DNA, 75 bp, synthetic construct
  source 1..75: mol_type = other DNA
ttctggcagcttcaggctgaaatcagtcaccggggacgttactgccatccgtacagcatggatatcaccgtcacc

SEQ ID NO: 26042 - DNA, 75 bp, synthetic construct
  source 1..75: mol_type = other DNA
atgtcagatatcacaatctcccgtccggaggtgatcagcgggcatacggacgttatctgctcaaccagtatccgc

SEQ ID NO: 26043 - DNA, 75 bp, synthetic construct
  source 1..75: mol_type = other DNA
gaaaacctcagaaacgaatgcagctaacagcgcacaggcggcagcggcctcgcagactgcatcggcaaactccgc

SEQ ID NO: 26044 - DNA, 75 bp, synthetic construct
  source 1..75: mol_type = other DNA
atccgagggctgacctgagcaaagggcagtacggctgtgtcggccagggtttacatattgccaaaaaactgctcc

SEQ ID NO: 26045 - DNA, 75 bp, synthetic construct
  source 1..75: mol_type = other DNA
gtctcatcgtctatggaaacgacatttgtgctggatgctctggagcaggcgttatgggcccgtcgaccgtccggc

SEQ ID NO: 26046 - DNA, 75 bp, synthetic construct
  source 1..75: mol_type = other DNA
atcattgatgtgtttgccggatacattgtggggtggcgggtctcatcgtccatggagacgacattcgtgctggat

SEQ ID NO: 26047 - DNA, 75 bp, synthetic construct
  source 1..75: mol_type = other DNA
atgccactgctggataagctgcgtgagcagtacggggtcggaccggtatgcagtgaacagcatattgccccgtca

SEQ ID NO: 26048 - DNA, 75 bp, synthetic construct
  source 1..75: mol_type = other DNA
gcgacgatattaatcacggaagcattctgggctctgaaagaacgcccgaacatcgatgttcaacgcgtcacgttt

SEQ ID NO: 26049 - DNA, 75 bp, synthetic construct
  source 1..75: mol_type = other DNA
ttatcccagagtcatatcagatgatttgttttacgctgtacaggaaattcggttggcaccttttggtattagcaa

SEQ ID NO: 26050 - DNA, 75 bp, synthetic construct
  source 1..75: mol_type = other DNA
tcctcctgtcagcacagcgtgcggaaagtgccgccgagcgcagcattaagcgtgaaaaagaaatccgggccgcat

SEQ ID NO: 26051 - DNA, 75 bp, synthetic construct
  source 1..75: mol_type = other DNA
cagggctgtatggcacactgctggaggacaataatctgggatacagcatccagagtggttatacccggggagggt

SEQ ID NO: 26052 - DNA, 75 bp, synthetic construct
  source 1..75: mol_type = other DNA
cctgccgggaaaaatcagtaaatgccatgcttatttccctgataacagaacaaacagacacaacggagataaaaa

SEQ ID NO: 26053 - DNA, 75 bp, synthetic construct
  source 1..75: mol_type = other DNA
gtatgcaaaagggctgacctgcgaagccgacaccctcggcagctgtggttacgtttatctggctgtttatccaac

SEQ ID NO: 26054 - DNA, 75 bp, synthetic construct
  source 1..75: mol_type = other DNA
gcagggcttcgtctatgtggcgttcatcattgatgtgtttgccggatgtatcgtggggtggcgagtctcatcgtc

SEQ ID NO: 26055 - DNA, 75 bp, synthetic construct
  source 1..75: mol_type = other DNA
cagcggatggacacggatatcgcagaagtgacccggaaaatcggggaggcggaaaacagcctcacgcagctggtt

SEQ ID NO: 26056 - DNA, 75 bp, synthetic construct
  source 1..75: mol_type = other DNA
atacagcaacaacccggcctggtgtctgtgggacatgctgactcacccgcgctacggcatgggaaaacgtctggg

SEQ ID NO: 26057 - DNA, 75 bp, synthetic construct
  source 1..75: mol_type = other DNA
ggtagcgtcactctggagtttaagattttccagaaaggcaatcagggggcaggcaatatcaccgactgtacggtg

SEQ ID NO: 26058 - DNA, 75 bp, synthetic construct
  source 1..75: mol_type = other DNA
tggagtttaagattttccagaaaggcaatcagggggcaggcaatatcaccgactgtacggtgattgtgaccaaaa

SEQ ID NO: 26059 - DNA, 75 bp, synthetic construct
  source 1..75: mol_type = other DNA
cacattaagcccggaaaggatttctggttttatgtgcgcagcgtcaacctggtgggtaaatctgcttttgtggaa

SEQ ID NO: 26060 - DNA, 75 bp, synthetic construct
  source 1..75: mol_type = other DNA
cttacgcgccgaaaggcaaggagaagcaggctatgaagcagcaaaaggcgatgttagtcgccctgatcgtcatct

SEQ ID NO: 26061 - DNA, 75 bp, synthetic construct
  source 1..75: mol_type = other DNA
accggggcttaaaaaactgctcaggacactatcggcaggtgacacactggttgtctggaagctggacaggttggg

SEQ ID NO: 26062 - DNA, 75 bp, synthetic construct
  source 1..75: mol_type = other DNA
tcatcgtccatggaaacgacattcgtgctggatgcactggagcaggcgttatgggcccgtcgaccgtccggcacg

SEQ ID NO: 26063 - DNA, 75 bp, synthetic construct
  source 1..75: mol_type = other DNA
acaacgaaacgcactgaactgcgcaggatgtgaactgatttttgaggataaaatcagcggaacaaagtcagcccg

SEQ ID NO: 26064 - DNA, 75 bp, synthetic construct
  source 1..75: mol_type = other DNA
aggaaagacctctgcgaggtacgaatccgaaccgaccagacggaggtcgctgtcttcacagcttacgaacttggg

SEQ ID NO: 26065 - DNA, 75 bp, synthetic construct
  source 1..75: mol_type = other DNA
gcactgatttttgatgtaggtatttccacaatttatagaaaatttccggtaaataagagcaatgaatctccctga

SEQ ID NO: 26066 - DNA, 75 bp, synthetic construct
  source 1..75: mol_type = other DNA
tgaggcttcagagaaagcgaagatcgagcaggtcttgcgtaaccagcctgcgttgtccgcgtttacgtcagaaat

SEQ ID NO: 26067 - DNA, 75 bp, synthetic construct
  source 1..75: mol_type = other DNA
atgctgcatgaactctggctgcagagcggtactggacagcgtcgctgggaagagttaccggatgatgtcagggaa

SEQ ID NO: 26068 - DNA, 75 bp, synthetic construct
  source 1..75: mol_type = other DNA
cttctgcagaccactgaagatgtgcggtttgaaccatgccccggactgacggctgccggacgtggtgttttatcg

SEQ ID NO: 26069 - DNA, 75 bp, synthetic construct
  source 1..75: mol_type = other DNA
attacgccgggcaactggtgatggatacatttggcatttcgattcccggtctgcgaattgcaggcggcttaatcg

SEQ ID NO: 26070 - DNA, 75 bp, synthetic construct
  source 1..75: mol_type = other DNA
attggcgatatcaccgcacgttatgccccgctcaccgagagcctgaaaaaacgcatggccgaactgcagtccggt

SEQ ID NO: 26071 - DNA, 75 bp, synthetic construct
  source 1..75: mol_type = other DNA
cgattataaaacttgagttattcagtagtctcccctcttgcaactcacacccaaaactgcctaacgaaaagttat

SEQ ID NO: 26072 - DNA, 75 bp, synthetic construct
  source 1..75: mol_type = other DNA
cagaccgtcaccgcgaccactccgtccggcagcagacctgcggtgacggcacttccggagcagaaactgctggca

SEQ ID NO: 26073 - DNA, 75 bp, synthetic construct
  source 1..75: mol_type = other DNA
aagctatcacccgcaatctcgatcgcgaaatctggcgtgacctgatgcaatgctccgggatgctttccttaatgg

SEQ ID NO: 26074 - DNA, 75 bp, synthetic construct
  source 1..75: mol_type = other DNA
ctgacggaaagcattggaggtaaaaccgcccgggactgggccatgaaacaggattttcgctgtggctgctggctg

SEQ ID NO: 26075 - DNA, 75 bp, synthetic construct
  source 1..75: mol_type = other DNA
gtgaatgtcatgaggctcacgggttaaaaataagaaaccaggtgaataacctcttccagaaacatcccagaataa

SEQ ID NO: 26076 - DNA, 75 bp, synthetic construct
  source 1..75: mol_type = other DNA
gatgtttatcatcagccatccagtgtgttttttgttattaaaccgtctgcgtggggaaaaccacgtattaattaa

SEQ ID NO: 26077 - DNA, 75 bp, synthetic construct
  source 1..75: mol_type = other DNA
tgcacccggaacaactggatgctcctgcaccgcataccgaagtggccagtctgcaccccaatcatgtctggcaga

SEQ ID NO: 26078 - DNA, 75 bp, synthetic construct
  source 1..75: mol_type = other DNA
caggaaggcattaagtgggctttcgtcagcaaagaagctcgcgatgtggccaacgataacgagatatgggagggc

SEQ ID NO: 26079 - DNA, 75 bp, synthetic construct
  source 1..75: mol_type = other DNA
tgcaggctgcccggcaggcatacgcccgggaatatgacgaggaaacaacagaaaccgctgattttggctcttacg

SEQ ID NO: 26080 - DNA, 75 bp, synthetic construct
  source 1..75: mol_type = other DNA
cgctgcgccaggtgtgcaagctgtcggcgcgtaaacaaaagcaggtgcaggattttattggggtaattaccggta

SEQ ID NO: 26081 - DNA, 75 bp, synthetic construct
  source 1..75: mol_type = other DNA
gcataaggacattcgccggctgactgaagatgaccgctacaagctggccgtgtttgttgccgtgcagcgcgcacg

SEQ ID NO: 26082 - DNA, 75 bp, synthetic construct
  source 1..75: mol_type = other DNA
ttggtggtgattgctggctggacgagtcggtgaacgacaaagacacgcttaaagccggaaaactcaccatcgact

SEQ ID NO: 26083 - DNA, 75 bp, synthetic construct
  source 1..75: mol_type = other DNA
ttggtcaatttgactctgtaagtgccattcatggtaattctggcattggtgtgtcttcagttacgaaagctgcaa

SEQ ID NO: 26084 - DNA, 75 bp, synthetic construct
  source 1..75: mol_type = other DNA
aagctgtcggcacgtaaacaaaagcaggtgcaggcgtttattggagtgattgccggtaaacagaaagtcgcgtaa

SEQ ID NO: 26085 - DNA, 75 bp, synthetic construct
  source 1..75: mol_type = other DNA
gacatgggtttgccgctgaacggggaaaccatattgtcgacagagtccgtctgaaaaacgcacggatcctcggtg

SEQ ID NO: 26086 - DNA, 75 bp, synthetic construct
  source 1..75: mol_type = other DNA
acaattagcgagatttgcgcatacgcatcccggaggcccgtcatgtcactttaacgacattattccactgactca

SEQ ID NO: 26087 - DNA, 75 bp, synthetic construct
  source 1..75: mol_type = other DNA
gatcttcagaaggtatcccgtggcatgaactgccaacgtcacacaggggaaacaatcagatgagtttgcctttac

SEQ ID NO: 26088 - DNA, 75 bp, synthetic construct
  source 1..75: mol_type = other DNA
ggcagctattagcgaggaatcagttataaacacatcggcgctttgccgccttttagaaattgatgcaaataatgt

SEQ ID NO: 26089 - DNA, 75 bp, synthetic construct
  source 1..75: mol_type = other DNA
attcgcaatggacagggctatcccggcgcggtcagctttgggtatttactgacagaacagtatggatttccggtt

SEQ ID NO: 26090 - DNA, 75 bp, synthetic construct
  source 1..75: mol_type = other DNA
gaatgaaaaaggggaggcggttacctggcaggggcggcaatatcaggcatacccgattgacggcagtggctttga

SEQ ID NO: 26091 - DNA, 75 bp, synthetic construct
  source 1..75: mol_type = other DNA
cgatatggtcagttctcgctggataaatcactggcttcacgccgtgaacgtctggtcaagcgtgcagaaaagcag

SEQ ID NO: 26092 - DNA, 75 bp, synthetic construct
  source 1..75: mol_type = other DNA
cgttgtttgccagtagttttctcagcgctacactattacccggcaactccgaagtcgtgctggtggcaatgttgc

SEQ ID NO: 26093 - DNA, 75 bp, synthetic construct
  source 1..75: mol_type = other DNA
ggcgggaaaccgcgccaccaaagccttttgcgatcaaaacggcattcgctatgacaactgcggcaagatgctggt

SEQ ID NO: 26094 - DNA, 75 bp, synthetic construct
  source 1..75: mol_type = other DNA
ctttaaccgcgcccgtgtccggcgggcgtttgtcacgattgggcagcgtcatatgcgtgatgcccgtcggctggt

SEQ ID NO: 26095 - DNA, 75 bp, synthetic construct
  source 1..75: mol_type = other DNA
tcaatcagcgatgaagttgtgttgattggtgatcggtattatgtgaaagccacggcaactattaccgatggcgaa

SEQ ID NO: 26096 - DNA, 75 bp, synthetic construct
  source 1..75: mol_type = other DNA
gttcctggagtcaggtacagaaaattatggcctgtagtcgagggacaattagtagtgctgtaaaatcgaggaagt

SEQ ID NO: 26097 - DNA, 75 bp, synthetic construct
  source 1..75: mol_type = other DNA
ctggctgtccactcttggattaacggccatcgcctggctaacggctccctttgccggggttatggcatcgtttta

SEQ ID NO: 26098 - DNA, 75 bp, synthetic construct
  source 1..75: mol_type = other DNA
atggcgaaagccggtctgctggaacagaaccgactttcaggtgcaaatcgtaacacactcattgcgggaggaatt

SEQ ID NO: 26099 - DNA, 75 bp, synthetic construct
  source 1..75: mol_type = other DNA
agtcgtttctggctgagcacgggggctggaaggcctttctgtggacgccgccttatggctaccggcagataaagg

SEQ ID NO: 26100 - DNA, 75 bp, synthetic construct
  source 1..75: mol_type = other DNA
cggtaagcggcacgaacaaccagcgttgcgtgaatcacatttctgaaccggacactgaaataccgccgggattca

SEQ ID NO: 26101 - DNA, 75 bp, synthetic construct
  source 1..75: mol_type = other DNA
tctcaaaacgccgtcaggttggcgcaagtgagtatgcatatattagttttttaacagtcagtcagcgtcgcactt

SEQ ID NO: 26102 - DNA, 75 bp, synthetic construct
  source 1..75: mol_type = other DNA
ggcggctggcaccacgtaataactttatggctgatgtcatcgaccagcgtcgttactggacacaaaagttactgt

SEQ ID NO: 26103 - DNA, 75 bp, synthetic construct
  source 1..75: mol_type = other DNA
caggcctcaccattataacggagggctgacgccggaagagtcagagaacagataccatttttactgtaaaaccgt

SEQ ID NO: 26104 - DNA, 75 bp, synthetic construct
  source 1..75: mol_type = other DNA
gtcacctacagcaaaacggggatgctgtttggcgcagaactggtatcaaaaagcaccgactttttgtcccgcaat

SEQ ID NO: 26105 - DNA, 75 bp, synthetic construct
  source 1..75: mol_type = other DNA
tcggctggagcctgtcagcgaatgccgatactgcactgataagcagtgccttgcggatggcgtatgaggtgcgtg

SEQ ID NO: 26106 - DNA, 75 bp, synthetic construct
  source 1..75: mol_type = other DNA
atggacaaagaatataaaacactcatcaacaaagcacttgagcgtttttattttcgcttaagcgcatcaggcgtt

SEQ ID NO: 26107 - DNA, 75 bp, synthetic construct
  source 1..75: mol_type = other DNA
ggactgaaatatcaacagcttctctggcgttacaggataaagcaaagtgtcagccgacggggaaactgctgggat

SEQ ID NO: 26108 - DNA, 75 bp, synthetic construct
  source 1..75: mol_type = other DNA
gaatccattcgtcataagccccgttacacagatgagcaaaaacaggttgccgttgaacattatcttaaccacggc

SEQ ID NO: 26109 - DNA, 75 bp, synthetic construct
  source 1..75: mol_type = other DNA
gcgacaggcttggacactccggagataagtttccgctggcaaaggctcagcgcgatgccttaagccattttctgg

SEQ ID NO: 26110 - DNA, 75 bp, synthetic construct
  source 1..75: mol_type = other DNA
gtaaaaatcttcaatttacaggaaataatggagagattattttacacgactctatagatcaaggggctggctatt

SEQ ID NO: 26111 - DNA, 75 bp, synthetic construct
  source 1..75: mol_type = other DNA
acgatgtcgaaacggtcgatgtcgtcttgcgcccaaaagtttatttccggttactgcagcatggtaaggaccgtt

SEQ ID NO: 26112 - DNA, 75 bp, synthetic construct
  source 1..75: mol_type = other DNA
cagcggcgttacgtgccgaattgattgccggatttgcgcatactgaatggttgggattgaccgtatttgaacatt

SEQ ID NO: 26113 - DNA, 75 bp, synthetic construct
  source 1..75: mol_type = other DNA
cctgcttgaacctttgccaaaaggagcattttcgattggtgagattgggcagtatgacaaatacaagacaatcca

SEQ ID NO: 26114 - DNA, 75 bp, synthetic construct
  source 1..75: mol_type = other DNA
ggacaggaactgctgtcacaggcccgtgttctggcaaaatatctgcgtgaccagcctgagggctggctggcggct

SEQ ID NO: 26115 - DNA, 75 bp, synthetic construct
  source 1..75: mol_type = other DNA
tgcccgtaccgcacagactgcaccttacgatcgctacacttgccacctttgcggcagtgcactcagataccaccc

SEQ ID NO: 26116 - DNA, 75 bp, synthetic construct
  source 1..75: mol_type = other DNA
ctggcccccactgtggtgccaatggtgaacggtggtcaggccagtattgccatcagcaataccagcccgaatctg

SEQ ID NO: 26117 - DNA, 75 bp, synthetic construct
  source 1..75: mol_type = other DNA
ttgatggcaacggacgtctgaccggtgcccgtaccgcacagactgcaccttatgatcgctacacctgccaccttt

SEQ ID NO: 26118 - DNA, 75 bp, synthetic construct
  source 1..75: mol_type = other DNA
atgcctcagcagtgtcggattttgaactgcggttaccgtcggaaggtacgccggcccgctggcaggcggggctga

SEQ ID NO: 26119 - DNA, 75 bp, synthetic construct
  source 1..75: mol_type = other DNA
gcaatacgacactgaacgtccctggtttgaacacactgacgacgggctgactgagcacggtcatgagtgccctta

SEQ ID NO: 26120 - DNA, 75 bp, synthetic construct
  source 1..75: mol_type = other DNA
ggaaaattacctgcaggctggtatcaggtcccggtgacaaaggaaaccctgcaggccccggcggggctgtcttca

SEQ ID NO: 26121 - DNA, 75 bp, synthetic construct
  source 1..75: mol_type = other DNA
ccttgccgaaggcgaagaagccctcagcttcagcgaatttaaacaggcgctttccagcccggcaaaatctaacgg

SEQ ID NO: 26122 - DNA, 75 bp, synthetic construct
  source 1..75: mol_type = other DNA
agaagaagtggtgtcacgggcaccggtacgcaggggaaaactgcgccgcaatgtggtggtcctttcccggcgctc

SEQ ID NO: 26123 - DNA, 75 bp, synthetic construct
  source 1..75: mol_type = other DNA
atgacgacaccaaccagacggataagtttctatctgaagccagtcgccgtcaatagtgaacgggaggcgtgtaat

SEQ ID NO: 26124 - DNA, 75 bp, synthetic construct
  source 1..75: mol_type = other DNA
tgggatggggaagcgcgctgtcatggttttggcaaagaaatcgccattaaacacattcggccagtaatgcctctt

SEQ ID NO: 26125 - DNA, 75 bp, synthetic construct
  source 1..75: mol_type = other DNA
ggatggtgtcattctgggcgcggtgtactcagaagtcgataaaccgccgttcagcgacaaaaatgtccggggcac

SEQ ID NO: 26126 - DNA, 75 bp, synthetic construct
  source 1..75: mol_type = other DNA
tcactggccgcgctttatggcgatatcggtaaacaggcggaatcgctcatcggtaaggctggcagtatggcgact

SEQ ID NO: 26127 - DNA, 75 bp, synthetic construct
  source 1..75: mol_type = other DNA
ccgcacaccaagttcgaatctgaagtgtacattctgtccaaagatgaaggcggtcgtcatactccgttcttcaaa

SEQ ID NO: 26128 - DNA, 75 bp, synthetic construct
  source 1..75: mol_type = other DNA
gcggtatcatcaaagttggtgaagaagttgaaatcgttggtatcaaggagactcagaagtctacctgtactggcg

SEQ ID NO: 26129 - DNA, 75 bp, synthetic construct
  source 1..75: mol_type = other DNA
ctcctgttctaattgctcctgagccaaaaaaatccactaaactgaaaatcccttattctcaacataccagagcga

SEQ ID NO: 26130 - DNA, 75 bp, synthetic construct
  source 1..75: mol_type = other DNA
gatgcagctaaacaggaagctgttgaagtctataagacattcagtgaacttgaccttgaaattgttcttgatgtc

SEQ ID NO: 26131 - DNA, 75 bp, synthetic construct
  source 1..75: mol_type = other DNA
actagactatataccaacactagtagcagacagaaaaaagccaatacctaaattgaaaccaccgggttattataa

SEQ ID NO: 26132 - DNA, 75 bp, synthetic construct
  source 1..75: mol_type = other DNA
ggcaaaacatcttgccgcgccggacccgcattcacagtatgcacccaaagaaagtccaacgtttaccggaacccc

SEQ ID NO: 26133 - DNA, 75 bp, synthetic construct
  source 1..75: mol_type = other DNA
gagggagtatcggtaatactggcgggagtgaaacccgtccacgaaatattgcatttaactttatcgtgagggctg

SEQ ID NO: 26134 - DNA, 75 bp, synthetic construct
  source 1..75: mol_type = other DNA
tgaaggtgtacgtggatgacctgatagcaaaacatcttgccgcactggacccgcattcacagtatgcacccaaag

SEQ ID NO: 26135 - DNA, 75 bp, synthetic construct
  source 1..75: mol_type = other DNA
atgcagcacctgccggcaccgatccaccatgcccgggatgccgctcagcttcctgttgccatcgattatccggca

SEQ ID NO: 26136 - DNA, 75 bp, synthetic construct
  source 1..75: mol_type = other DNA
caacaatcctgcgttggctgcggctttaattaccagccagggattttccggagaggtcacggatatgtttcttat

SEQ ID NO: 26137 - DNA, 75 bp, synthetic construct
  source 1..75: mol_type = other DNA
tcaaagccgcaggtgaagtattagatgttgctaaaactgcaacacaatgtgaaagcggtgggaatagcaacacat

SEQ ID NO: 26138 - DNA, 75 bp, synthetic construct
  source 1..75: mol_type = other DNA
cggcagacctacaatgcccacaaacacaccgaaaatggtgatggtggcgggatcactgacacgccggatcaaccg

SEQ ID NO: 26139 - DNA, 75 bp, synthetic construct
  source 1..75: mol_type = other DNA
ggtcaaagactacgagcagaatggcatggaagaacatgaccttcacacttacttcacttaccgtaaaaaggagct

SEQ ID NO: 26140 - DNA, 75 bp, synthetic construct
  source 1..75: mol_type = other DNA
tcattgcacaggccaaaaaagcaggcgatccagtccctcccgtttatctggggcgttatcagttaagcgaactgg

SEQ ID NO: 26141 - DNA, 75 bp, synthetic construct
  source 1..75: mol_type = other DNA
catgatggctggtttgaaagtgataacgcaattgtgactaactgttttggtcatattatcgaatcacagccaccg

SEQ ID NO: 26142 - DNA, 75 bp, synthetic construct
  source 1..75: mol_type = other DNA
ccgaccgccagtgtgcctgatgttaacgcactcagcaccgacgagcgcaatgtttacctggcgatcgcacaacac

SEQ ID NO: 26143 - DNA, 75 bp, synthetic construct
  source 1..75: mol_type = other DNA
acacctacgttgatctggccgaaatggtcaaagactacgagcagaatggcatggaagaacatgaccttcacactt

SEQ ID NO: 26144 - DNA, 75 bp, synthetic construct
  source 1..75: mol_type = other DNA
tcgcctggattactggcaacgatttccgtgaccttgctcagcgcaacaatattcaggcaccatacgcgctgaacg

SEQ ID NO: 26145 - DNA, 75 bp, synthetic construct
  source 1..75: mol_type = other DNA
cacctgccggagccaaaaccccgtctgccctcttccgaaggcgactggtcgcatgtattccaggatgtgacgtgg

SEQ ID NO: 26146 - DNA, 75 bp, synthetic construct
  source 1..75: mol_type = other DNA
ggggcttttgcgtagcgaaaagctcaataagtcgaagcgcgacatgaccaatttctacacgattaattacgagag

SEQ ID NO: 26147 - DNA, 75 bp, synthetic construct
  source 1..75: mol_type = other DNA
ctgccaccgccaatggttgcattgggaaggacaacgcacttccctggccaccactaaaaggcgatctggccagat

SEQ ID NO: 26148 - DNA, 75 bp, synthetic construct
  source 1..75: mol_type = other DNA
acgacccaatgtcatcgggtcaaaatggcctgatgatcttacagagaatacaacagagattactacagagaataa

SEQ ID NO: 26149 - DNA, 75 bp, synthetic construct
  source 1..75: mol_type = other DNA
ctgtacggtgaactgacaggcatgatttctgatgttgacctgggcgagatgaagattgaacccgctgcgccagca

SEQ ID NO: 26150 - DNA, 75 bp, synthetic construct
  source 1..75: mol_type = other DNA
atgagaagcggctgctgccgactgagccgtgttgcccggagtgcggtggttcgctgagttacctgggtgaggatg

SEQ ID NO: 26151 - DNA, 75 bp, synthetic construct
  source 1..75: mol_type = other DNA
aactgcgtcgtgaagttgaactggctgaggctctgctgaaacaacgtgaacaggacagcgatcgttacagtgggc

SEQ ID NO: 26152 - DNA, 75 bp, synthetic construct
  source 1..75: mol_type = other DNA
cttgctgaacgtcagcgaaaaacgaaaccgttgttgaaatccctggaaagctggttgcgtgaaaagatgaagacc

SEQ ID NO: 26153 - DNA, 75 bp, synthetic construct
  source 1..75: mol_type = other DNA
tgtgcttggcgtcatagcagactggccggtcaaccgggtcagcgaactgcttccgtggcgcatagcactgccagc

SEQ ID NO: 26154 - DNA, 75 bp, synthetic construct
  source 1..75: mol_type = other DNA
actcaggtgaagcacaatcgcaagagagtattcaggacaaaatatctcaatgtaagtttcctgttagttcaggaa

SEQ ID NO: 26155 - DNA, 75 bp, synthetic construct
  source 1..75: mol_type = other DNA
ctactacaccatgaccggacattttcaacgcggcgctgatgttatcagggcgaactggaaacctggtgagttcgc

SEQ ID NO: 26156 - DNA, 75 bp, synthetic construct
  source 1..75: mol_type = other DNA
cagaaaaggcatccatccgcagactcatcttgcttgcttcagcggtgtgctgcaagcggatgcgtacgccgggtt

SEQ ID NO: 26157 - DNA, 75 bp, synthetic construct
  source 1..75: mol_type = other DNA
tagcgccttccgggttatccggacggtacgggaaaaacatgcctgtactcagtgcgataccatcgtgcaggcacc

SEQ ID NO: 26158 - DNA, 75 bp, synthetic construct
  source 1..75: mol_type = other DNA
ttgtcacagaataagcccggtaaaatacgggcttatgaacgacatctttctgacgacatcttcctgctgaaacag

SEQ ID NO: 26159 - DNA, 75 bp, synthetic construct
  source 1..75: mol_type = other DNA
atgaatcaaaaatacctcattcgcattgcagaactggaatgccagctccgtcagaaagaccagcaactgagtctg

SEQ ID NO: 26160 - DNA, 75 bp, synthetic construct
  source 1..75: mol_type = other DNA
atgaaaattccctcattacagtccaacttcaacttttccgccccggcaggatactctgctctcattgctcctaat

SEQ ID NO: 26161 - DNA, 75 bp, synthetic construct
  source 1..75: mol_type = other DNA
ctacgcacagcaacctgcgctgtttacagccatgctgaagcagtttcgtgctgacctcactgtgtttaacgcgca

SEQ ID NO: 26162 - DNA, 75 bp, synthetic construct
  source 1..75: mol_type = other DNA
cctgcagaaaagcttttgagcgcgcagtaaaacgagccggtatagacctgcctgaaggccagtgcacacacgtgt

SEQ ID NO: 26163 - DNA, 75 bp, synthetic construct
  source 1..75: mol_type = other DNA
atacccgctggcatgaagattcagtgcgtaaccgctggttcagcgtgatggcggggccgtctgtacgcgtgaatg

SEQ ID NO: 26164 - DNA, 75 bp, synthetic construct
  source 1..75: mol_type = other DNA
ttacggacacgctggggctggtgacgtcattcagctatgcaggagacaagaatcgccagcttacccgttacagcg

SEQ ID NO: 26165 - DNA, 75 bp, synthetic construct
  source 1..75: mol_type = other DNA
ggtgacaccgggcggtgtcgcctgtaaatataacgacatcattccggcggaccattgtctgcatgatgtgcagga

SEQ ID NO: 26166 - DNA, 75 bp, synthetic construct
  source 1..75: mol_type = other DNA
gtatcatgtgcttcagcccggagggctccgtaagacactttctcacgatgaattaatggctgtttattctggtta

SEQ ID NO: 26167 - DNA, 75 bp, synthetic construct
  source 1..75: mol_type = other DNA
cagcgtcaggggattgagccggtactggccggtaaactggcacgcaaggtggctgcggctcaggcagcctatatg

SEQ ID NO: 26168 - DNA, 75 bp, synthetic construct
  source 1..75: mol_type = other DNA
gttctgaaaggtctgagccactggagccggggacgcacaatggtggtggtgacacatcgtctgcaggttctgaat

SEQ ID NO: 26169 - DNA, 75 bp, synthetic construct
  source 1..75: mol_type = other DNA
ggtgatgtgaccacgcctgtggttgtgcccgacacaggggctggtggctctccgggagtggctaccactgaaccg

SEQ ID NO: 26170 - DNA, 75 bp, synthetic construct
  source 1..75: mol_type = other DNA
ccatgggattttttgatcttattggtgctttttttctggttacttttattgcagaacgtcgcaaaaaacgcacct

SEQ ID NO: 26171 - DNA, 75 bp, synthetic construct
  source 1..75: mol_type = other DNA
tcccggcagcgaaaatctgaacgggattaacgtgaaataccgttatgagtttacggacacgctggggctgattac

SEQ ID NO: 26172 - DNA, 75 bp, synthetic construct
  source 1..75: mol_type = other DNA
catcgctgacgaactgatgaccgggtgcacgaattttgtgttcagcggtaagccgggtaccggaaagaaccacct

SEQ ID NO: 26173 - DNA, 75 bp, synthetic construct
  source 1..75: mol_type = other DNA
aacggcgggcgatgggtgaattttaactgggagagctggcgcccgaatgttggtcagccaggaattgagaagtaa

SEQ ID NO: 26174 - DNA, 75 bp, synthetic construct
  source 1..75: mol_type = other DNA
atggtgaaggggcgcagcgtgattatcgtcaccgtgtctgacgtcatgagcgtgttgcatgacagctacgacaac

SEQ ID NO: 26175 - DNA, 75 bp, synthetic construct
  source 1..75: mol_type = other DNA
atgactacattattcagaaaagaatatccgagaaaaagtagagcgacagaatttttgtttctcattatatttatc

SEQ ID NO: 26176 - DNA, 75 bp, synthetic construct
  source 1..75: mol_type = other DNA
catagctgacgaactgatgacaggctgtacgaattttgtgttcagcggtaagcccggcaccggaaaaaatcatct

SEQ ID NO: 26177 - DNA, 75 bp, synthetic construct
  source 1..75: mol_type = other DNA
tctctaccaaaagaggagggatatacgttcattccaaacgcatttctggaaaagctgctcaaagaagacatatcc

SEQ ID NO: 26178 - DNA, 75 bp, synthetic construct
  source 1..75: mol_type = other DNA
ggaagtgatgacggtcgccacagcaacacgtctctggcgtggggggctggcgtgcagtttaacccgaccgaatcc

SEQ ID NO: 26179 - DNA, 75 bp, synthetic construct
  source 1..75: mol_type = other DNA
gcggggccgtctgtgcgcgtgaatgaatggttcagcgcgtatgcgatggcgggcgtggcttacagccgtgtgtcg

SEQ ID NO: 26180 - DNA, 75 bp, synthetic construct
  source 1..75: mol_type = other DNA
tgcggatgaggaagcacagactcagacgggcgataacaatgtggcaccgacgccggatgccagtgtggagcagac

SEQ ID NO: 26181 - DNA, 75 bp, synthetic construct
  source 1..75: mol_type = other DNA
atgaaactggaagatttaccgaaatactactccccaaaatcccctggcctgaccgatgcatcggcctcaacgtca

SEQ ID NO: 26182 - DNA, 75 bp, synthetic construct
  source 1..75: mol_type = other DNA
atgaatggttcagcgcgtatgcgatggcgggtgtagcttacagccgtgtgtcgactttctccggggattatcttc

SEQ ID NO: 26183 - DNA, 75 bp, synthetic construct
  source 1..75: mol_type = other DNA
accggaaaaagaagccatcgtggataacggtgcccgctttgagccgcagtcaggttccctgaacagcgtcatccc

SEQ ID NO: 26184 - DNA, 75 bp, synthetic construct
  source 1..75: mol_type = other DNA
aacagcacctaaccgaggagaaagaaaaggatcatatccattcaatagcccttgccctaatggtactgagaaagt

SEQ ID NO: 26185 - DNA, 75 bp, synthetic construct
  source 1..75: mol_type = other DNA
ggcggcgaatcgcacaatgctgatggcaggctggggaattcagcgccagcaatatggtgaacagaaacactggat

SEQ ID NO: 26186 - DNA, 75 bp, synthetic construct
  source 1..75: mol_type = other DNA
aaaccttccccaaaagataaatatgttgcatatgctattaacattcctgactatgagctggcagccgatgtatat

SEQ ID NO: 26187 - DNA, 75 bp, synthetic construct
  source 1..75: mol_type = other DNA
tacggggcgggtggtggagcaactgaacccggcagggttaagctaccgctatctttatgagcaggaccgcatcac

SEQ ID NO: 26188 - DNA, 75 bp, synthetic construct
  source 1..75: mol_type = other DNA
acaccattgaggccgcagataaattaaaaaacacgaatggaaaagctcgtggtgcggttttgctgctgattgatg

SEQ ID NO: 26189 - DNA, 75 bp, synthetic construct
  source 1..75: mol_type = other DNA
atgacgatgtactgaaaaagatccgcacgcttgaatgctccgcatcattcactgcccgcaatttttcggtgagtg

SEQ ID NO: 26190 - DNA, 75 bp, synthetic construct
  source 1..75: mol_type = other DNA
cgcatgacgcattatttaaatcctttctcacgcaccctgacaccgcgcgggattttatggagatccacttaccca

SEQ ID NO: 26191 - DNA, 75 bp, synthetic construct
  source 1..75: mol_type = other DNA
ggagttgagcgacggcactttatcgtggttagggaacgccttgttctggatgccgctaccagaaccgccgcagga

SEQ ID NO: 26192 - DNA, 75 bp, synthetic construct
  source 1..75: mol_type = other DNA
aatacatctttatcactgtgaccaccggggcctgccgctggcgcttatcagtgaagacggcaatacggcgtggag

SEQ ID NO: 26193 - DNA, 75 bp, synthetic construct
  source 1..75: mol_type = other DNA
cgagcagtatttgttggacctggtgaaacaggaattgcgccggaaattcatactggcgatgatgatgcactgaag

SEQ ID NO: 26194 - DNA, 75 bp, synthetic construct
  source 1..75: mol_type = other DNA
atggatatgctcaatcttggcaacaacgaatctctggtatgcggagtattccccaacctggacggcacgttcacc

SEQ ID NO: 26195 - DNA, 75 bp, synthetic construct
  source 1..75: mol_type = other DNA
taaacgctctgaattgaatggggagtatgaagttcgttatggttcccatcgtttaggtagtgatgattttatgtc

SEQ ID NO: 26196 - DNA, 75 bp, synthetic construct
  source 1..75: mol_type = other DNA
cgaaacggtgacgtcagggagtctgcgtttatctggtttactgcccgcactgttctgctgctggttgccagcatc

SEQ ID NO: 26197 - DNA, 75 bp, synthetic construct
  source 1..75: mol_type = other DNA
tggttgactcaaaccgacgaaaacgcatctgtagcacaggcttctaaagtgacagcgcaaatgctgatcgaggcg

SEQ ID NO: 26198 - DNA, 75 bp, synthetic construct
  source 1..75: mol_type = other DNA
caccagcgaacaggaagcccgccagcaatccccaactggctgcgtgatgatattcgccgcccgtattcgtcagga

SEQ ID NO: 26199 - DNA, 75 bp, synthetic construct
  source 1..75: mol_type = other DNA
tgctccccggtctgggcggatttataggaaaaaatggcacagcaaccggtgtttttggtggatggacagataaac

SEQ ID NO: 26200 - DNA, 75 bp, synthetic construct
  source 1..75: mol_type = other DNA
ggaagcacgccagcaatccccggctggctgcgtgatggtattcgccgcccgtattcgtcagggggtacaccatga

SEQ ID NO: 26201 - DNA, 75 bp, synthetic construct
  source 1..75: mol_type = other DNA
agctcgaacagcggggattatggcgcagagccgctgcacgctggcaggaattgctgctgaactacctgcaggaag

SEQ ID NO: 26202 - DNA, 75 bp, synthetic construct
  source 1..75: mol_type = other DNA
acgaagtcattaaggcgctgaaggctgctggcatcgatcctcttaaactggctgaagccctctcagcgatgaagc

SEQ ID NO: 26203 - DNA, 75 bp, synthetic construct
  source 1..75: mol_type = other DNA
gaacgaggacgtgattacctgttaaatggatctgtggtcggaatgcctcagatgcaaatttcaattagtgcaaaa

SEQ ID NO: 26204 - DNA, 75 bp, synthetic construct
  source 1..75: mol_type = other DNA
agggattgatgctacagcactcgcagcagcggctaagaataaagcacagaatgataaattcacgtttaatggagt

SEQ ID NO: 26205 - DNA, 75 bp, synthetic construct
  source 1..75: mol_type = other DNA
caatgactttactggtgagatgcagattgaaaacggtgaagttaccctgggccgcagcaactccctgatgaatgt

SEQ ID NO: 26206 - DNA, 75 bp, synthetic construct
  source 1..75: mol_type = other DNA
acgcactggcaaaacaccacaaaggcgaactggtgagcgtggcgggtaacatgcaggtaagccagtggacaggcc

SEQ ID NO: 26207 - DNA, 75 bp, synthetic construct
  source 1..75: mol_type = other DNA
tgtattcaaacagattgttgcagaatatggtgaggttaggataagaaatgaaggaaaggccagtgaatatattgc

SEQ ID NO: 26208 - DNA, 75 bp, synthetic construct
  source 1..75: mol_type = other DNA
agccagctacacggtgacggcgaacgtcaccgacagcgcgggcaacagcaattccgccagccataacgtgcaggt

SEQ ID NO: 26209 - DNA, 75 bp, synthetic construct
  source 1..75: mol_type = other DNA
attatggcgatgaagtggcgctgtttggtaaagacgagcgacaaaatgatcctcacgcgattaccgcaggtttga

SEQ ID NO: 26210 - DNA, 75 bp, synthetic construct
  source 1..75: mol_type = other DNA
caaaagttagatcgtccgatgttcagcaactgattaaaatttatcttgattctaatggtggtggtaatgtcgtgg

SEQ ID NO: 26211 - DNA, 75 bp, synthetic construct
  source 1..75: mol_type = other DNA
ctcaacaatgaactgctggcgcagggtaagatcatgattgacagcgcgtcaggcacactgcccgacggcaccgtc

SEQ ID NO: 26212 - DNA, 75 bp, synthetic construct
  source 1..75: mol_type = other DNA
tctggcgggcatgaagcttggcgacacgccgctgctggagtacacgcgcgaccgcatgcaccgggagacggtgcg

SEQ ID NO: 26213 - DNA, 75 bp, synthetic construct
  source 1..75: mol_type = other DNA
agaactttgttcagcagtcagaagagaggcggggtagcgcctttacgcaggaagtgaaacgctacctggagcgct

SEQ ID NO: 26214 - DNA, 75 bp, synthetic construct
  source 1..75: mol_type = other DNA
cgaggcacctatacaagttttcatatctggatgaatagcagacaaatgggaaatattcctggtcactatattata

SEQ ID NO: 26215 - DNA, 75 bp, synthetic construct
  source 1..75: mol_type = other DNA
atatattttcgattaccttagtcgctacattaggtggtttattatttggctacgacaccgccgttatttccggta

SEQ ID NO: 26216 - DNA, 75 bp, synthetic construct
  source 1..75: mol_type = other DNA
cagaaggtacaatcactaaaaattcatcatttactgtacaattttctgtgaataattgtatcaaggtatttgttc

SEQ ID NO: 26217 - DNA, 75 bp, synthetic construct
  source 1..75: mol_type = other DNA
gatgaatatttctggataccgaaatttcaggagctgcgcaaagtggcttccggtatggctattcacaaaaaatgg

SEQ ID NO: 26218 - DNA, 75 bp, synthetic construct
  source 1..75: mol_type = other DNA
accgacatagcgcagtcctttatggcaatccgtcgctccaccaccgccagtggcaaccgcccgacctatgaagcc

SEQ ID NO: 26219 - DNA, 75 bp, synthetic construct
  source 1..75: mol_type = other DNA
atgggcaaaggtggcggcaaggcgcacacgccggttgaggcaaaggacaatcttaagtccacgcagatgatgagc

SEQ ID NO: 26220 - DNA, 75 bp, synthetic construct
  source 1..75: mol_type = other DNA
cgataacccagtgcactatgcggatgccattcgttataatgctcgaacgcctctgcaaggttctttgctgccgtt

SEQ ID NO: 26221 - DNA, 75 bp, synthetic construct
  source 1..75: mol_type = other DNA
gatatccgcttacagatacgcgatgaaggcctgatactcaacgacagcggcggcaggagcattcactttgagccg

SEQ ID NO: 26222 - DNA, 75 bp, synthetic construct
  source 1..75: mol_type = other DNA
gcagcgaggtctgcttctgcagcaaaaacctctgaaacaaatgcaaagacttcagcagacaatgctgcttcctct

SEQ ID NO: 26223 - DNA, 75 bp, synthetic construct
  source 1..75: mol_type = other DNA
atggaaaatcttgctctgacgacgttattgctgccttttatcggcgcactggtcgtttcgttttcgccacaacgt

SEQ ID NO: 26224 - DNA, 75 bp, synthetic construct
  source 1..75: mol_type = other DNA
acttcggagacctgagaaaggcagtagatcgcacttatgctgaaatgggtatagatggtgtaagcgatgaaatat

SEQ ID NO: 26225 - DNA, 75 bp, synthetic construct
  source 1..75: mol_type = other DNA
cgcagcctggcggatgcgcttcagcagtccggcggcgaagacggtggcagtgtggtgttcccgccggtgctggtg

SEQ ID NO: 26226 - DNA, 75 bp, synthetic construct
  source 1..75: mol_type = other DNA
cacaaaaacttagaggtggctattacaccccacaaaatttagctgattatgtaactaaatgggtcttaagtaaga

SEQ ID NO: 26227 - DNA, 75 bp, synthetic construct
  source 1..75: mol_type = other DNA
tgcgtgaggcggcagagaaagcaacgtggggagactgggactcatataaaccacaccgtggcgcacgtggttata

SEQ ID NO: 26228 - DNA, 75 bp, synthetic construct
  source 1..75: mol_type = other DNA
tcactcaggatccgattggactgaaggggggatggaacctgtatggatatcaattgaatccgatatcagacatcg

SEQ ID NO: 26229 - DNA, 75 bp, synthetic construct
  source 1..75: mol_type = other DNA
gctgaatttattgctgcctttaatccaaaggttgctttggcattactggatgaactggaaagaaaccagcaatac

SEQ ID NO: 26230 - DNA, 75 bp, synthetic construct
  source 1..75: mol_type = other DNA
aaagcagtcaggtttttctgccctttcgctggcaagagctgtcatagaaaaatcagcgctgccaactgtttttag

SEQ ID NO: 26231 - DNA, 75 bp, synthetic construct
  source 1..75: mol_type = other DNA
gtacactttctgcttccgtagtcacagcttcagagaatgaccagcctcaactggttgccactctcgttcctcatg

SEQ ID NO: 26232 - DNA, 75 bp, synthetic construct
  source 1..75: mol_type = other DNA
ggttatccctgccacccatgcctactctgtgaatgttgtgtccagtcagccggtcacccgacagatcatgccgga

SEQ ID NO: 26233 - DNA, 75 bp, synthetic construct
  source 1..75: mol_type = other DNA
atggctacaccgcttattcgtgtcatgaacgggcacatttacagagtaccaaatcgtcgtaagcgtaaacctgag

SEQ ID NO: 26234 - DNA, 75 bp, synthetic construct
  source 1..75: mol_type = other DNA
aggtcactgttatgactgctggtttaccgaacccgctgaaaaggcaatgaaagccatcacccgtagcattgaccg

SEQ ID NO: 26235 - DNA, 75 bp, synthetic construct
  source 1..75: mol_type = other DNA
gcaggcgaggaaatcttctgcgacgaacatggtcgcgtgcgggtgaagttcaactgggaccgttataacccggca

SEQ ID NO: 26236 - DNA, 75 bp, synthetic construct
  source 1..75: mol_type = other DNA
gtgagtgaggaaagccgccgctggctggcatcgtgcggcctgaccgtggagcagatgcaaaaccagatggacccg

SEQ ID NO: 26237 - DNA, 75 bp, synthetic construct
  source 1..75: mol_type = other DNA
accgccacagagcttggtactatcgtaccgaaagggatggaagattactggctgcgcccaattcgattttatgaa

SEQ ID NO: 26238 - DNA, 75 bp, synthetic construct
  source 1..75: mol_type = other DNA
atatttctattatccccgattacagacaagcctggaaaatggaacataagttatcggatattctactgttgacta

SEQ ID NO: 26239 - DNA, 75 bp, synthetic construct
  source 1..75: mol_type = other DNA
gccggcatgacgcttgacgatgttgatcgcatgtcagtacgtgaattgcgtcaggccctgcgtgaagcgcgcgaa

SEQ ID NO: 26240 - DNA, 75 bp, synthetic construct
  source 1..75: mol_type = other DNA
agtggactaatggcgatgcagaaaagcgcatgacaggagctgactggctgacagcaattgagatgtacaaaccaa

SEQ ID NO: 26241 - DNA, 75 bp, synthetic construct
  source 1..75: mol_type = other DNA
tggttgagttaagaacggatgcaccggcagagctggaagtcccggtcagttaccggggaaatctgcagatagcgc

SEQ ID NO: 26242 - DNA, 75 bp, synthetic construct
  source 1..75: mol_type = other DNA
gggacggcgcatatcgtattcaagagacctgaactggtttataagcttaacgacatcattgcccggcactatccg

SEQ ID NO: 26243 - DNA, 75 bp, synthetic construct
  source 1..75: mol_type = other DNA
ctgaacgggcaaaatggcgcatccgataccatgctgcgcgccagcgcctcattctttaatggcggcaaatacagc

SEQ ID NO: 26244 - DNA, 75 bp, synthetic construct
  source 1..75: mol_type = other DNA
ggctgaagcggggataccgtctgacagagctggtagtgatgcatgagcccctggcccggatgcggtggtgcggct

SEQ ID NO: 26245 - DNA, 75 bp, synthetic construct
  source 1..75: mol_type = other DNA
gatccaacaccaaacccggagccgacgcctgagccaacgccggacccagagcctacgccagaaccgatacctgat

SEQ ID NO: 26246 - DNA, 75 bp, synthetic construct
  source 1..75: mol_type = other DNA
cagccgggatgtgcagtacgaggcgcgcccgttgctcggtttcaatagtatagatatgagaattattgagcggtt

SEQ ID NO: 26247 - DNA, 75 bp, synthetic construct
  source 1..75: mol_type = other DNA
gtgaagaatatttgcaacacccgcaagaacggtttatccccgctggcgcggggagctcggcatagccaggctgat

SEQ ID NO: 26248 - DNA, 75 bp, synthetic construct
  source 1..75: mol_type = other DNA
taaagaaaagcgcgctggcagtgagtgtggccctgctgctctcatctcaggctttggctcataaaacactttctg

SEQ ID NO: 26249 - DNA, 75 bp, synthetic construct
  source 1..75: mol_type = other DNA
aacgatggcttcttgcccgcatccgtaatgaaaccttccacacgctcagggcgctgaatgcgcgccttagggagt

SEQ ID NO: 26250 - DNA, 75 bp, synthetic construct
  source 1..75: mol_type = other DNA
tgagaacccttgcagataggctcaactttgcaatgtacgaaatgggaatgagccaagctcagttggctaaggcag

SEQ ID NO: 26251 - DNA, 75 bp, synthetic construct
  source 1..75: mol_type = other DNA
gcaggcgaggaaatcttctgtgatgaacatggccgcgtgcgggtgaaatttaactgggaccgctataacccgtca

SEQ ID NO: 26252 - DNA, 75 bp, synthetic construct
  source 1..75: mol_type = other DNA
ccggaacaaatatgaagacacatctggagcaggaaggatgtcgaactcgggttactgttgtgcctcctggctttg

SEQ ID NO: 26253 - DNA, 75 bp, synthetic construct
  source 1..75: mol_type = other DNA
ggtctacatccacgcgcagaagaacatgaacaccgaggtgctgaataaccgcaccacggatgtgataaacaacca

SEQ ID NO: 26254 - DNA, 75 bp, synthetic construct
  source 1..75: mol_type = other DNA
gcggggagacagtacgctaccgctacgatgacgcgcacagtgagttaccggcgacgacaacggatgcgacgggca

SEQ ID NO: 26255 - DNA, 75 bp, synthetic construct
  source 1..75: mol_type = other DNA
atgactccgggcaggcgggaggataaatgcccgtctgcccgcgccgggaaaagaccgcgcgccggtggcgctgaa

SEQ ID NO: 26256 - DNA, 75 bp, synthetic construct
  source 1..75: mol_type = other DNA
aggcgctcggcaagaaaagagatgatatcgagattatttctgattcgcacgggctcaacgccagaatcagccagg

SEQ ID NO: 26257 - DNA, 75 bp, synthetic construct
  source 1..75: mol_type = other DNA
aagaccgcgcgccggtggcgctgaaaggggccgcgcttacgcgccgcccctttcattacgcggacgttctgctgt

SEQ ID NO: 26258 - DNA, 75 bp, synthetic construct
  source 1..75: mol_type = other DNA
actgcataccgggcgataatttaccagcagagccgaaagcagcatcggtagcggaaactgatggtaaggcctttc

SEQ ID NO: 26259 - DNA, 75 bp, synthetic construct
  source 1..75: mol_type = other DNA
atggctcgactctttaccccttcagaatcaaagtactacctgatggcgctggatgcaggcaccggaagtattcgg

SEQ ID NO: 26260 - DNA, 75 bp, synthetic construct
  source 1..75: mol_type = other DNA
aatgttctcatcttacgaataagtatggtgatgataatctcatgtatgttttttgtaagggtggttatgaatttg

SEQ ID NO: 26261 - DNA, 75 bp, synthetic construct
  source 1..75: mol_type = other DNA
ctgtattttcagctctgaccctgggtgttgcgacaagtgcgtctgccgcacctgctactgtcaatggtggtacag

SEQ ID NO: 26262 - DNA, 75 bp, synthetic construct
  source 1..75: mol_type = other DNA
ccggtgtacacgccggcgcgaaaaatccacctgtaccactgcgaccatcgcggcctgccgctggcccttatcagc

SEQ ID NO: 26263 - DNA, 75 bp, synthetic construct
  source 1..75: mol_type = other DNA
ggtatatcactcaggacccgatagggctggagggggggatggagtctgtatgcgtacccgctgaatccggtgaat

SEQ ID NO: 26264 - DNA, 75 bp, synthetic construct
  source 1..75: mol_type = other DNA
ttcagaccaaaacctgaagatatcttcaaatgtggacagacgctcaaaaaaactaaacagaaatatggccattat

SEQ ID NO: 26265 - DNA, 75 bp, synthetic construct
  source 1..75: mol_type = other DNA
aaatcttttgatgatctaaaggatgtcattatatcgaaaataaggatgatcagctcatccgttccagaaggggtg

SEQ ID NO: 26266 - DNA, 75 bp, synthetic construct
  source 1..75: mol_type = other DNA
accgctgagcttaccgctgagcttaacatgcgtaaaaaacagtacaactactatcgcgaccagttgttgagtttt

SEQ ID NO: 26267 - DNA, 75 bp, synthetic construct
  source 1..75: mol_type = other DNA
gtgatatggcctggcatattgctgccaatattcagtttccaccaaattttgatgagtcaaaacagtatccggcga

SEQ ID NO: 26268 - DNA, 75 bp, synthetic construct
  source 1..75: mol_type = other DNA
taatttaccgatttaaagaaagtcgccaaacattaatcaccgaagatgtaggtaatggatttacacgtgcattgt

SEQ ID NO: 26269 - DNA, 75 bp, synthetic construct
  source 1..75: mol_type = other DNA
taaaaaaacactgtcctcctttggcataaaagttgatgcgctcaaatcgttcaatgatgtggatgagacggtttg

SEQ ID NO: 26270 - DNA, 75 bp, synthetic construct
  source 1..75: mol_type = other DNA
ttttctttgagtagggaactttcgacattggaaatattagacctcaatcaagaaaaattagatattctaaagtta

SEQ ID NO: 26271 - DNA, 75 bp, synthetic construct
  source 1..75: mol_type = other DNA
tggtgctcatacgcactccgttgcgattggttcacatggacacaccatcaccgttaacgctgctggtaacgcgga

SEQ ID NO: 26272 - DNA, 75 bp, synthetic construct
  source 1..75: mol_type = other DNA
cgaccagtaattatctttaatgcccggttcgacatccgcattctgaaacagactgctgccgcacatagcgatccg

SEQ ID NO: 26273 - DNA, 75 bp, synthetic construct
  source 1..75: mol_type = other DNA
ataacgcaccctatctggcagccctgacttttgttctgcttactggtatcgctgaacttatcgccctgctctgcg

SEQ ID NO: 26274 - DNA, 75 bp, synthetic construct
  source 1..75: mol_type = other DNA
tattaattgttctactggctggtggctattttcttcatcttaaacgttactgtaaagcttttcgccatgacagag

SEQ ID NO: 26275 - DNA, 75 bp, synthetic construct
  source 1..75: mol_type = other DNA
atgacagagcagaaacgaccggtactgacactgaaacggaaaacggaaggggaaacaccgacccggagccggaaa

SEQ ID NO: 26276 - DNA, 75 bp, synthetic construct
  source 1..75: mol_type = other DNA
ttttgatttctggggaaaaacccgacgcggcgagaaagacgggggcgacgactatcaccttctttgctggcattc

SEQ ID NO: 26277 - DNA, 75 bp, synthetic construct
  source 1..75: mol_type = other DNA
atggaacgacaattaagggtggtaattcacacataagtggggggactgcgaatggaaccatcattgatggtggag

SEQ ID NO: 26278 - DNA, 75 bp, synthetic construct
  source 1..75: mol_type = other DNA
aagccgatcagagagccaagcaagcatcatccggtatgcgtaagctggagcttgtacttgatgctcaggaaattg

SEQ ID NO: 26279 - DNA, 75 bp, synthetic construct
  source 1..75: mol_type = other DNA
tgccgcctgtctgatgacgtacagtcatcacgcctgccgtacggagtgttatgccatgacggttcattattaccg

SEQ ID NO: 26280 - DNA, 75 bp, synthetic construct
  source 1..75: mol_type = other DNA
gtgttgtactcgctgatcggcacatgccgtctgaacaatgtggagccagaaaagtggctgcgttacgtcattgaa

SEQ ID NO: 26281 - DNA, 75 bp, synthetic construct
  source 1..75: mol_type = other DNA
ctgtctgatgacgtacagtcatcacgcctgtcgtacggagtgttatgccatgacggtccattattaccggctgcg

SEQ ID NO: 26282 - DNA, 75 bp, synthetic construct
  source 1..75: mol_type = other DNA
atgaatggatggtggagaagaatggcacgctgtcgaaaaaatccagactgggcgaagcgttcagctatgtactga

SEQ ID NO: 26283 - DNA, 75 bp, synthetic construct
  source 1..75: mol_type = other DNA
aaaatggctgcgctacgtcattgaacatatccaggactggccggcaaaccgggtacgcgatctgttgccctggaa

SEQ ID NO: 26284 - DNA, 75 bp, synthetic construct
  source 1..75: mol_type = other DNA
gggaattatcgctggctgaattatcctggtgggcggtctgcaatcaggtggcggacgcgctaccggaggcagtat

SEQ ID NO: 26285 - DNA, 75 bp, synthetic construct
  source 1..75: mol_type = other DNA
agcatggatgattgacgtcatccgccacgcaatgaatggcatacaggaacgggaattatcgctggctgaattatc

SEQ ID NO: 26286 - DNA, 75 bp, synthetic construct
  source 1..75: mol_type = other DNA
tggtgccggaacttggggtggttatcgttaagccaggtcgtgaatccatgcaggtattccataacggcagagtgc

SEQ ID NO: 26287 - DNA, 75 bp, synthetic construct
  source 1..75: mol_type = other DNA
cagttgctggacagggtttccccgtctcagtgggcggcaataggcgtgctggggagtctgctgtttggtctgctg

SEQ ID NO: 26288 - DNA, 75 bp, synthetic construct
  source 1..75: mol_type = other DNA
atgaaatccatggacaaaatttcaacgggcattgcctacggcacctccgcaggcagtgctggctactggttttta

SEQ ID NO: 26289 - DNA, 75 bp, synthetic construct
  source 1..75: mol_type = other DNA
cactcacccgtggagtcagataacgggagtgcctgctgcctcgctgacggcaaaaggcaccgtacaattgagcag

SEQ ID NO: 26290 - DNA, 75 bp, synthetic construct
  source 1..75: mol_type = other DNA
tataagggcagcgggtttaatgaactgaagtttgacgatgcgacagggaaagaacaggtctacatccacgcgcag

SEQ ID NO: 26291 - DNA, 75 bp, synthetic construct
  source 1..75: mol_type = other DNA
atgcatttcctcaatagcggacagattgagctacagcttgacgatcatcgctactcggtggaagcgcccctgttt

SEQ ID NO: 26292 - DNA, 75 bp, synthetic construct
  source 1..75: mol_type = other DNA
gtcggcaagcagtatgtggatgcgtcatgtcggagggcacgaacgttcaagggccggtgacggtcagctaaatac

SEQ ID NO: 26293 - DNA, 75 bp, synthetic construct
  source 1..75: mol_type = other DNA
ccggagaggaaacttcatctttaccactgtgaccaccgtgggctgccgctggcgcttatcagcccggaaggggaa

SEQ ID NO: 26294 - DNA, 75 bp, synthetic construct
  source 1..75: mol_type = other DNA
atcattgtgcaccgtaatgaacctgactacctttcccgtcgcatttataatgctgaacagcgtgagtctatcatt

SEQ ID NO: 26295 - DNA, 75 bp, synthetic construct
  source 1..75: mol_type = other DNA
aaagctgcacgttatcagcaagtgttacactcagcgcattgagcgacataatctgaatctgagacaacatctggc

SEQ ID NO: 26296 - DNA, 75 bp, synthetic construct
  source 1..75: mol_type = other DNA
cctgaagggaaagctgcacgttatcagcaagcgttacactcagcgcattgagcgacataatctgaatctgagaca

SEQ ID NO: 26297 - DNA, 75 bp, synthetic construct
  source 1..75: mol_type = other DNA
gcgagctctgccgtccggggttgtacctgccgttcaccagccgctggcggaagataaatcactactgccattttt

SEQ ID NO: 26298 - DNA, 75 bp, synthetic construct
  source 1..75: mol_type = other DNA
gtgatagacgccatcagtgaagggccgattgaaggtccggtggacggattaaaaagtgtgctgctgaacagtacg

SEQ ID NO: 26299 - DNA, 75 bp, synthetic construct
  source 1..75: mol_type = other DNA
tctgggacggcagtctgaaaccggcatacagcaacaacccggcctggtgcctgtgggacatgctgacccacccgc

SEQ ID NO: 26300 - DNA, 75 bp, synthetic construct
  source 1..75: mol_type = other DNA
ataataacctgaacagcatgtgggctgtgaagctgcagcagatgcaggacggacgcctttatatcgcgggtattg

SEQ ID NO: 26301 - DNA, 75 bp, synthetic construct
  source 1..75: mol_type = other DNA
aatgcctggctgaccacacagcgtaaggcgtgggatgttctcagtgatttctgctcggcgatgcgctgtatgccg

SEQ ID NO: 26302 - DNA, 75 bp, synthetic construct
  source 1..75: mol_type = other DNA
aatttataaccgaacggctctggataatacgctgatatacacgggtgttattgatatgcctgcaggcagtggcgt

SEQ ID NO: 26303 - DNA, 75 bp, synthetic construct
  source 1..75: mol_type = other DNA
caccatcacggtaagaatcagtgatgatcagaaatttgaccggcaggtcatgataccgccagtgttattccgcgg

SEQ ID NO: 26304 - DNA, 75 bp, synthetic construct
  source 1..75: mol_type = other DNA
tcggtgtcagcatggctggtaaataactggtatcccacagcaagtatcagcgatttgctggttgtggtgatgaag

SEQ ID NO: 26305 - DNA, 75 bp, synthetic construct
  source 1..75: mol_type = other DNA
atattcatgaatgaagtgttcctgaaatatctgacggctcccaccattaccagcggcggtaatcctccggcattt

SEQ ID NO: 26306 - DNA, 75 bp, synthetic construct
  source 1..75: mol_type = other DNA
ctggcactgtgacaatcttctccgtgaccagttcacggaacggctggaagcaatggcaacggataactgtgcccg

SEQ ID NO: 26307 - DNA, 75 bp, synthetic construct
  source 1..75: mol_type = other DNA
ttgtgacaatgccggaactgtgctggtggctggttcgtaatgatctggcggatgccttaccggaaagtgcagccc

SEQ ID NO: 26308 - DNA, 75 bp, synthetic construct
  source 1..75: mol_type = other DNA
gttatggtaccggcgcaatggtgttgtgctggcactgcgacaaccagctgcgcgaccagacctccgaatcactcg

SEQ ID NO: 26309 - DNA, 75 bp, synthetic construct
  source 1..75: mol_type = other DNA
tgccgttgatccggagtcaccggctcagtatctccagcgccagaaaccacaacgggaagagatgcctgtatacac

SEQ ID NO: 26310 - DNA, 75 bp, synthetic construct
  source 1..75: mol_type = other DNA
agcaacttgctcaacaaaacctgacagcatggatgattgacgtcatccgtcacgcaataagcggtgcgcaggagc

SEQ ID NO: 26311 - DNA, 75 bp, synthetic construct
  source 1..75: mol_type = other DNA
accgtatcttcatcaggagcgaataactggacaccaacaaccagtatcagcgatctgctggttgtggtgatgaaa

SEQ ID NO: 26312 - DNA, 75 bp, synthetic construct
  source 1..75: mol_type = other DNA
ttcctgaaatatctgacggctcccaccattaccagcggcggtaatcctccggcattttccctgacaccggacggg

SEQ ID NO: 26313 - DNA, 75 bp, synthetic construct
  source 1..75: mol_type = other DNA
gccgtctgatagtgcggaaaaacggtgctgaaatttataaccgtaccgcgctggataatacgctgatttacagtg

SEQ ID NO: 26314 - DNA, 75 bp, synthetic construct
  source 1..75: mol_type = other DNA
ctcttttaatatcaccatctgctccttccctgatatggtggtcactgagcggtatattagtgattattgttggta

SEQ ID NO: 26315 - DNA, 75 bp, synthetic construct
  source 1..75: mol_type = other DNA
aatgtcgtcacgcgattttattcagttgtgcgcagtggctgtaaattttatgagcgagccagactctggcgcgaa

SEQ ID NO: 26316 - DNA, 75 bp, synthetic construct
  source 1..75: mol_type = other DNA
gacggaaaggcattcagtatcggaggcggtcaggcggatgccctgatgctggaaaaaggcagttcattcacgctg

SEQ ID NO: 26317 - DNA, 75 bp, synthetic construct
  source 1..75: mol_type = other DNA
gacctgatattgctcgatatctatatgcaaaaagagaacgggctcgatttactgcctgtcctgcataacgcgcgt

SEQ ID NO: 26318 - DNA, 75 bp, synthetic construct
  source 1..75: mol_type = other DNA
tacgtcaatgaccgtaaagcggggactttcactgtggacctgaagaacgcagagaaagttctgcccactcccgga

SEQ ID NO: 26319 - DNA, 75 bp, synthetic construct
  source 1..75: mol_type = other DNA
gcggcaaaacgtcatagcccggagaacgacccattaatgctggtgctggcggcggatcatgtgattgccgatgaa

SEQ ID NO: 26320 - DNA, 75 bp, synthetic construct
  source 1..75: mol_type = other DNA
agcaaggtctgggtattttcggcggcgcaattgccgaccgctttggtgccaaaccgatgattgttaccggtatgc

SEQ ID NO: 26321 - DNA, 75 bp, synthetic construct
  source 1..75: mol_type = other DNA
gcggtatgaatacaacatcgccggtgacctgaccgccgtcattgccccggacggcagcagaaacgggacacagta

SEQ ID NO: 26322 - DNA, 75 bp, synthetic construct
  source 1..75: mol_type = other DNA
cgactatttggtaatggatttggagctatgattgataatgcatttgaagttgaaactcggccaggaagcttcctc

SEQ ID NO: 26323 - DNA, 75 bp, synthetic construct
  source 1..75: mol_type = other DNA
ccgggcagtggctgatactcggctggccggagcgtgtgccggaggcggacgaggtgccgccgccggagccgcccg

SEQ ID NO: 26324 - DNA, 75 bp, synthetic construct
  source 1..75: mol_type = other DNA
aaaaatattatttataaaataattaatgaccaaaaaattagtagagggaatggtcattttataagtataatggtt

SEQ ID NO: 26325 - DNA, 75 bp, synthetic construct
  source 1..75: mol_type = other DNA
cgcagcgtaatcgcgccagcattatggggctgttctatatgggcgcaccgctggcgttaacactgggatcaccgc

SEQ ID NO: 26326 - DNA, 75 bp, synthetic construct
  source 1..75: mol_type = other DNA
gaaaccgattacgatttcctgtgccggatggcggcggaggaaggcatcttcttttatgaggagcacgcgcaaaaa

SEQ ID NO: 26327 - DNA, 75 bp, synthetic construct
  source 1..75: mol_type = other DNA
gaccatgccgccggaggaagtgaacaatattgcccgttttaaatccctgacggaggagcagaaggcggtactgct

SEQ ID NO: 26328 - DNA, 75 bp, synthetic construct
  source 1..75: mol_type = other DNA
gcgacaccgtgcgttatctgccggagtcctttgagatcccctggaatccgaacacccgtaccgaggtgagcaccc

SEQ ID NO: 26329 - DNA, 75 bp, synthetic construct
  source 1..75: mol_type = other DNA
cttaagtccgcatcgttatctggcgacaaacagtccgcaggggccgtggtggctgctcggttggtgtgagcgggt

SEQ ID NO: 26330 - DNA, 75 bp, synthetic construct
  source 1..75: mol_type = other DNA
cagcaactttacgcctgccctttaaagagaaactctcttacggtattggcgacctggcctctaacatcctgctgg

SEQ ID NO: 26331 - DNA, 75 bp, synthetic construct
  source 1..75: mol_type = other DNA
cggaatgggtggacagggatattctgtaccgtatggcatcccgtgcagaaccgcaggagacaccggagggaatga

SEQ ID NO: 26332 - DNA, 75 bp, synthetic construct
  source 1..75: mol_type = other DNA
atgtgctgactttcgatccgctgaacaagctggaccgtacccagaacgcgcatctgctgctgttcggaccaacgg

SEQ ID NO: 26333 - DNA, 75 bp, synthetic construct
  source 1..75: mol_type = other DNA
aaaaaacggtgaatgcgctgatggatacgtttccggaaggaacggtgctgtgcatgaccattgtggtacagccac

SEQ ID NO: 26334 - DNA, 75 bp, synthetic construct
  source 1..75: mol_type = other DNA
taccgtgaggggcggcagatgctgccggaggatttgcagtccgccctgtgggagatctcccgtgacagcagccgt

SEQ ID NO: 26335 - DNA, 75 bp, synthetic construct
  source 1..75: mol_type = other DNA
gtcaggatgaaaacgacgtggacacgtatgttgaccagctcagggggtacgtgaaacctcatgcagaaggctcct

SEQ ID NO: 26336 - DNA, 75 bp, synthetic construct
  source 1..75: mol_type = other DNA
caaaaaaacgggtttcttccccggtgtcgcagcatgacggagaagcggtatctccggatatgaaagaaagagtgg

SEQ ID NO: 26337 - DNA, 75 bp, synthetic construct
  source 1..75: mol_type = other DNA
aaatgattaatagcgccgggatgttaatcggctatggggtaattaaaggcaaatatctctcgataccgcaaaatt

SEQ ID NO: 26338 - DNA, 75 bp, synthetic construct
  source 1..75: mol_type = other DNA
cattgaacgttattaacgtcggcatcgccatgtttagcgatgacctgaaaaagcagcatgtagaagtgactcaac

SEQ ID NO: 26339 - DNA, 75 bp, synthetic construct
  source 1..75: mol_type = other DNA
tgtttggcaaaatcgcaccgctggacgaactggtcagcatggtgcgcagcggtcagaaagtttacacctcgatgg

SEQ ID NO: 26340 - DNA, 75 bp, synthetic construct
  source 1..75: mol_type = other DNA
atgctggaaaaagtagaaaatcaaaatcatgctaaatgggaagtccataattttaccatgggctaccagcggcaa

SEQ ID NO: 26341 - DNA, 75 bp, synthetic construct
  source 1..75: mol_type = other DNA
atatggatgctattgttggcggagctcataatggggccgccgatgcaatgagacattgttacttgatgtgtcgaa

SEQ ID NO: 26342 - DNA, 75 bp, synthetic construct
  source 1..75: mol_type = other DNA
gggggagttgcgcattggttttacttcgtccgctccttttattcgggcggtgtccgatacgttatcgctgtttcg

SEQ ID NO: 26343 - DNA, 75 bp, synthetic construct
  source 1..75: mol_type = other DNA
gtgacgtccggccatccggtcaatcccctgctcggtgcaaaggtccttcccggtgaaaccgacatcgccctgccc

SEQ ID NO: 26344 - DNA, 75 bp, synthetic construct
  source 1..75: mol_type = other DNA
gatgagcaaaaaacgcgctacagcgatacccgctggcatgaagattccgtgcgtaaccgctggttcagcgtgatg

SEQ ID NO: 26345 - DNA, 75 bp, synthetic construct
  source 1..75: mol_type = other DNA
gagttagcggcggcgctgggcaacgacccgaattttgcgaccaccatgactaacgcgcttgcgggtaagcaaccg

SEQ ID NO: 26346 - DNA, 75 bp, synthetic construct
  source 1..75: mol_type = other DNA
cgcagaaggataagttcggcgcgggtaagaacggttttacccgtggtaacccccagactggcacacctgccaccg

SEQ ID NO: 26347 - DNA, 75 bp, synthetic construct
  source 1..75: mol_type = other DNA
tgccagccaatcttatgatgaaaataataaagaagaggagcgttttaatctgtttatctccattcctttctactg

SEQ ID NO: 26348 - DNA, 75 bp, synthetic construct
  source 1..75: mol_type = other DNA
ttttaagcggtaaagaaatgagacggattgatgttattcacaaggagctggagcggctgacgtatgggctggaac

SEQ ID NO: 26349 - DNA, 75 bp, synthetic construct
  source 1..75: mol_type = other DNA
gcggcaataactctttgatgaaacatgatgtggtgcaaggaaataatatagtagatcttgatttactacgtaatt

SEQ ID NO: 26350 - DNA, 75 bp, synthetic construct
  source 1..75: mol_type = other DNA
ccgggcagtgatgtgattgtctgcgctgaaatggacgaacagtggggctacgtcggtgctaaatcacgtcagcgc

SEQ ID NO: 26351 - DNA, 75 bp, synthetic construct
  source 1..75: mol_type = other DNA
gatgcgatgggttgccagaaagatattgcagagaagatacaaaaacagggaggtgattatttattcgctgtaaaa

SEQ ID NO: 26352 - DNA, 75 bp, synthetic construct
  source 1..75: mol_type = other DNA
gaggggggatagataaaaaactggcatcaaaaatattcaggcaataccatcatgaacttatgtctgaagtaaaaa

SEQ ID NO: 26353 - DNA, 75 bp, synthetic construct
  source 1..75: mol_type = other DNA
aacgaccgcgatattttgatatccgaccacatcatcgagcgcatcaactgtaccaacggcaaaatcaactggggc

SEQ ID NO: 26354 - DNA, 75 bp, synthetic construct
  source 1..75: mol_type = other DNA
tttatttgttgtttaccttgggtttgataacaattcaaattctgacatcgtattttatggacataaaacaccaaa

SEQ ID NO: 26355 - DNA, 75 bp, synthetic construct
  source 1..75: mol_type = other DNA
cactgatagaacaccgcgcccgtacacatgacagtgaaaacgtcatccatgatctggctgcagaactcatccgta

SEQ ID NO: 26356 - DNA, 75 bp, synthetic construct
  source 1..75: mol_type = other DNA
cagtcaggtgtaacacgggaaacgcggggttagttaacgtcaacctgagtctgacggcaaccacagaccccagct

SEQ ID NO: 26357 - DNA, 75 bp, synthetic construct
  source 1..75: mol_type = other DNA
gaagcaatggtctgcaaaagcggtctgggatttgtatgtggtgaaaccgggtcaggaaaatcaacgctgtgttca

SEQ ID NO: 26358 - DNA, 75 bp, synthetic construct
  source 1..75: mol_type = other DNA
atgaacctttccctgacgctggaagcagacagcgttaacgtgcaggcgctgaacatgggacgcattgtcgttgac

SEQ ID NO: 26359 - DNA, 75 bp, synthetic construct
  source 1..75: mol_type = other DNA
ccattgaagactgtatcagtaccctgtcacggtattccgtttccgcattcttccccgattactgtgatctgcaca

SEQ ID NO: 26360 - DNA, 75 bp, synthetic construct
  source 1..75: mol_type = other DNA
cgccaccatctgcggcccttaccggcatacgctgcagtaccgcgcatatcacggcaaaggacaacgcctggctgt

SEQ ID NO: 26361 - DNA, 75 bp, synthetic construct
  source 1..75: mol_type = other DNA
cggcagctacccacgccagaacggcctggccgtggcgctccgcgagctgggccgcatcgagcgcacgctgttcat

SEQ ID NO: 26362 - DNA, 75 bp, synthetic construct
  source 1..75: mol_type = other DNA
ccaaggacaacgagctgcccgatgccatcctcaccgagtcagggctgaaaatcaccccgctggatgcggcggtgc

SEQ ID NO: 26363 - DNA, 75 bp, synthetic construct
  source 1..75: mol_type = other DNA
aagtttgtggtaccgcgtcaggacgcgacctacgataacccgtatggcttccctgacctgtcgatgtgcttctgg

SEQ ID NO: 26364 - DNA, 75 bp, synthetic construct
  source 1..75: mol_type = other DNA
acgtgccgggcggagagtatccaggccgtgaatctgctgccggtggtggccgacaaccggctgtgtcagggggga

SEQ ID NO: 26365 - DNA, 75 bp, synthetic construct
  source 1..75: mol_type = other DNA
ttccctcatcatctacattgaggacaagatgtaccgcacgccgcgcagcctgaagaagtgctgcaccatcgacga

SEQ ID NO: 26366 - DNA, 75 bp, synthetic construct
  source 1..75: mol_type = other DNA
cgcgcaatgcgctggccagggcagtgtttttcaaccgcctgggtgaaatccgcgaccgcagtttcgagcagcagc

SEQ ID NO: 26367 - DNA, 75 bp, synthetic construct
  source 1..75: mol_type = other DNA
ctataacagaatcaatgattatgagaaaagatgaatgtcactttgattcaaaaaaagaatcctttgttgcaagtg

SEQ ID NO: 26368 - DNA, 75 bp, synthetic construct
  source 1..75: mol_type = other DNA
gtggctctggaaaggcaattaaatggaggtgtcgattttttaaggagtgttaataactattttcagagtgtcatg

SEQ ID NO: 26369 - DNA, 75 bp, synthetic construct
  source 1..75: mol_type = other DNA
gcgttggcgtactttttacgacaaccacaccttgatcctttttggaaattaatgataacaacgggactttgtgga

SEQ ID NO: 26370 - DNA, 75 bp, synthetic construct
  source 1..75: mol_type = other DNA
cctacgccaagctgtcctggctgcaagcctggcacatccgcgacgaaacctattcggggtcggttccggctgagg

SEQ ID NO: 26371 - DNA, 75 bp, synthetic construct
  source 1..75: mol_type = other DNA
gaaaaacgccgccatcagggtaacacgctggctgaatatccgtatgcgggggcgtttttccgctgtctgaacgga

SEQ ID NO: 26372 - DNA, 75 bp, synthetic construct
  source 1..75: mol_type = other DNA
ccgctgccattaataatgacccgaaattcagtaccaccattaacaatgcgctggcactgaaagcgccgctgttaa

SEQ ID NO: 26373 - DNA, 75 bp, synthetic construct
  source 1..75: mol_type = other DNA
accgcccgttatacgccgcagattgaaaatcttaaaaagcaaatcaaagtgctttttaaagggattcaggactgg

SEQ ID NO: 26374 - DNA, 75 bp, synthetic construct
  source 1..75: mol_type = other DNA
gatgaatgatgaagtggcagaaatcaccgcccgttatacgccgcagattgaaaaccttaaaaaagaaatcaaagt

SEQ ID NO: 26375 - DNA, 75 bp, synthetic construct
  source 1..75: mol_type = other DNA
cgtacccgtggaacgccccgctaccggttatcgatcctgaaacgttcggcagagcacagccaaccgcattacgcc

SEQ ID NO: 26376 - DNA, 75 bp, synthetic construct
  source 1..75: mol_type = other DNA
tttacggtgtcacgcattgttgtcagtggggccacccgactgacgtctgcagaaaccgacagactggtggcaccg

SEQ ID NO: 26377 - DNA, 75 bp, synthetic construct
  source 1..75: mol_type = other DNA
aatcattgcaggtctagcatatgcatctattgaattaaatcaaaaagcaaaatgcattcgtccaataattttttt

SEQ ID NO: 26378 - DNA, 75 bp, synthetic construct
  source 1..75: mol_type = other DNA
gtattggtatatggctctaccaccgttcagacaatccacgcgatttaattccggggagaaaagacgatggtaacg

SEQ ID NO: 26379 - DNA, 75 bp, synthetic construct
  source 1..75: mol_type = other DNA
ctgatctgaataaaaaattgtcggtgctgatcccttctgaagatgaaaaaaaacgccgcgatgagcagtttgcgg

SEQ ID NO: 26380 - DNA, 75 bp, synthetic construct
  source 1..75: mol_type = other DNA
tatcagtaattcagcgtggcgtgtggcaaccagtgatatctcacagcaatacagattcagttatatttcgatagg

SEQ ID NO: 26381 - DNA, 75 bp, synthetic construct
  source 1..75: mol_type = other DNA
cgcagcaatggttgttccaatggttattggctcattaccgaacgttacgagcttcgacaggttcagaagaatatt

SEQ ID NO: 26382 - DNA, 75 bp, synthetic construct
  source 1..75: mol_type = other DNA
acgacgcacatcattaaattaccgattggcgaaatcaggcagcccaatgcgacgctcgatctcagccaaagcgtt

SEQ ID NO: 26383 - DNA, 75 bp, synthetic construct
  source 1..75: mol_type = other DNA
acaaccagcgggtaggcgagttaacgaagttagccaatggcgcgcacacctttaagtatgcaccggagtggttag

SEQ ID NO: 26384 - DNA, 75 bp, synthetic construct
  source 1..75: mol_type = other DNA
gtctctccgggaatacaccggtgacccgaaaaatcctctgcaaccgccggcaatacgcaggcaggttcccggtgc

SEQ ID NO: 26385 - DNA, 75 bp, synthetic construct
  source 1..75: mol_type = other DNA
accagaaaaagggaagacgcgggcccgtcgtatcgacttccgacatgtgatcgacagtctggcaaaaaagcccgg

SEQ ID NO: 26386 - DNA, 75 bp, synthetic construct
  source 1..75: mol_type = other DNA
tgcagcagctgaaagcgagagcgcggcagccggttctgcgacttcagcagctggatcagcaactgctgcggctaa

SEQ ID NO: 26387 - DNA, 75 bp, synthetic construct
  source 1..75: mol_type = other DNA
agaatcaccgcaaacacaaaagcgataaatctccttgaggtcaggttaacaaccgccgaagggaagatagtcgta

SEQ ID NO: 26388 - DNA, 75 bp, synthetic construct
  source 1..75: mol_type = other DNA
cacttcgatatctatcaagggatcgggccggaagccggacaccgcgcaggttggtacaaccactatggacgtgtc

SEQ ID NO: 26389 - DNA, 75 bp, synthetic construct
  source 1..75: mol_type = other DNA
cttgagtcatggctggaactggcgagagccaatggttggtttgttgttcgcagagataaactggtggaaaggctg

SEQ ID NO: 26390 - DNA, 75 bp, synthetic construct
  source 1..75: mol_type = other DNA
aaagaattgatcgaattattcgatgctcttccatcttccgagcaggaagccttgctgtctgaaatgcgcgcaaga

SEQ ID NO: 26391 - DNA, 75 bp, synthetic construct
  source 1..75: mol_type = other DNA
tcccgaaaagtgctgttgagacgtcagtcatcgcacaggtgatcatcaataaatacggtgagcacctgcctctgt

SEQ ID NO: 26392 - DNA, 75 bp, synthetic construct
  source 1..75: mol_type = other DNA
taaatctatttaccattatcacatatggaaagtggttccagattcgaatcttatttgtaaacagtttctatatta

SEQ ID NO: 26393 - DNA, 75 bp, synthetic construct
  source 1..75: mol_type = other DNA
tactctttaaggaattgctcaagggcaaaagcacatggcgcgaatctttctgattcatgctctatctttctgcgc

SEQ ID NO: 26394 - DNA, 75 bp, synthetic construct
  source 1..75: mol_type = other DNA
gtttcagtattcataatgataatttcagtgagctggaatgggagtgtaaccggccatcctttgttgtatccggtg

SEQ ID NO: 26395 - DNA, 75 bp, synthetic construct
  source 1..75: mol_type = other DNA
tcccagatttttttccgcacgtagcggtggatatatcaatatacacaaatgtagaagatgattattttttttctt

SEQ ID NO: 26396 - DNA, 75 bp, synthetic construct
  source 1..75: mol_type = other DNA
atgatgccctcagggaatggctgaaactggataaatccgttcaacaacagttcgcaaaaaaactaaaaaaatgca

SEQ ID NO: 26397 - DNA, 75 bp, synthetic construct
  source 1..75: mol_type = other DNA
aacactgacgccagcaagcatgagaaggaacagataagccgtactgttcaggaaatgtttgaaaaggctgatatg

SEQ ID NO: 26398 - DNA, 75 bp, synthetic construct
  source 1..75: mol_type = other DNA
acgcgcattgatgcggagttgtcgatggctgtattaagggaatatagagaaaagtttccggcatggcgggatgcg

SEQ ID NO: 26399 - DNA, 75 bp, synthetic construct
  source 1..75: mol_type = other DNA
ctcaccccgtccgggtcgggaatacaaaattcagacgtcatacggcaatgaagctgcgtctggttgtcagggtaa

SEQ ID NO: 26400 - DNA, 75 bp, synthetic construct
  source 1..75: mol_type = other DNA
acacagaattttccattggtggtactgaactgctgctgtttaaacagatgggcaaagctacggtggatggcatcc

SEQ ID NO: 26401 - DNA, 75 bp, synthetic construct
  source 1..75: mol_type = other DNA
acggtgatttaagtgccgatatccggcagcttgagaacgcgctggcacgctgtgccagccaggtaaaaatgatta

SEQ ID NO: 26402 - DNA, 75 bp, synthetic construct
  source 1..75: mol_type = other DNA
caccgtcagggcatgattatgaacaccatcgggcagaacacggcggtctgttatgagtatccgtcgcccattctt

SEQ ID NO: 26403 - DNA, 75 bp, synthetic construct
  source 1..75: mol_type = other DNA
gagcctgttcgcgtcaattaataccgtaacggctgctgcgcaaaaatttccgtctggattaattttacagtgcgg

SEQ ID NO: 26404 - DNA, 75 bp, synthetic construct
  source 1..75: mol_type = other DNA
tcttcgctcattcccgggcattgccaaacgttctgatgtgaacggcgtatcgcgcggcgtcgagtacaacatggc

SEQ ID NO: 26405 - DNA, 75 bp, synthetic construct
  source 1..75: mol_type = other DNA
aatttcccatcctttcagccgtggactcatccgatttttgtcttgaatgcctgctgaatgccatcaaaaacgatg

SEQ ID NO: 26406 - DNA, 75 bp, synthetic construct
  source 1..75: mol_type = other DNA
tcacggatatctgctggagctgtattttcccgctctcgctgggcagtatcaaagtcagtcagggtaaggtccccg

SEQ ID NO: 26407 - DNA, 75 bp, synthetic construct
  source 1..75: mol_type = other DNA
ctgaaacgctggcggcaacaccaaaggcggtaaaggcagcatatgaccttgctaacgggaaatataccgcacagg

SEQ ID NO: 26408 - DNA, 75 bp, synthetic construct
  source 1..75: mol_type = other DNA
ttgtccaaatgttttcgatgaatgtttatggggcggacactaacggaactacaggtaatttccctattgcatttc

SEQ ID NO: 26409 - DNA, 75 bp, synthetic construct
  source 1..75: mol_type = other DNA
ttcatgacaacggcggctgcaaactttgccacgctgaccgaacgggagattgctgaagcggaggaagtgacaaca

SEQ ID NO: 26410 - DNA, 75 bp, synthetic construct
  source 1..75: mol_type = other DNA
tgacggtttttcttataacgggtgagccacagaatgtgattaccggaatttatgccagtaaagaatcatgcctcc

SEQ ID NO: 26411 - DNA, 75 bp, synthetic construct
  source 1..75: mol_type = other DNA
gcgagctggttctgccggccggaactctcaggctgaaaggtgaactgacaccggcgttattacagacacttatcc

SEQ ID NO: 26412 - DNA, 75 bp, synthetic construct
  source 1..75: mol_type = other DNA
atataaatcaacggggcttgatgtactgaatatcgccgccgattatgctgatttcgtgacagaggttattttaag

SEQ ID NO: 26413 - DNA, 75 bp, synthetic construct
  source 1..75: mol_type = other DNA
taatcgtatcatcccggaaagtttctgtggtgaaataatctggatgcatcccgaaaaccggccttatctgcgcgc

SEQ ID NO: 26414 - DNA, 75 bp, synthetic construct
  source 1..75: mol_type = other DNA
cctgcgccagaagatcgccgacgcactcaaccgactggccagcaaaatgaccactgacaaatttatcgacggcgg

SEQ ID NO: 26415 - DNA, 75 bp, synthetic construct
  source 1..75: mol_type = other DNA
aggtatgaaattacctgagtattcgcaagttaaagcaagtccgtattatacagattgccgtgcgtttgccatgga

SEQ ID NO: 26416 - DNA, 75 bp, synthetic construct
  source 1..75: mol_type = other DNA
aactggaaataatcagaaacataataagagagtcgttactgggaaatgcggcaattattgcgctgatatatgcag

SEQ ID NO: 26417 - DNA, 75 bp, synthetic construct
  source 1..75: mol_type = other DNA
ggtaaatctgcaacagaaatcattgctgtttccgggccgagctgctggttgggatttgatccttcgcgtggcgtg

SEQ ID NO: 26418 - DNA, 75 bp, synthetic construct
  source 1..75: mol_type = other DNA
tatgccggaatgggtgtccgcgttgaaggctctacaccgtcattatttgtgcggacggatacggtgcgtgccgtg

SEQ ID NO: 26419 - DNA, 75 bp, synthetic construct
  source 1..75: mol_type = other DNA
gtacgttttccggctatcacactgatggcttcactgaggatgaccagtatcacctggcatccgttcttgaacatc

SEQ ID NO: 26420 - DNA, 75 bp, synthetic construct
  source 1..75: mol_type = other DNA
aacgtcttcgtgaactggctggcctgctggggcgcgaggcggatatgtcggggagtgcagcggatatcgcacagc

SEQ ID NO: 26421 - DNA, 75 bp, synthetic construct
  source 1..75: mol_type = other DNA
ggaagttaacaatctgaacaaacgtatgggtgacctgcgtgacacaaacggtgatgccggtgcctgggcgcgcat

SEQ ID NO: 26422 - DNA, 75 bp, synthetic construct
  source 1..75: mol_type = other DNA
ccggaccgctgacacaggcatttgaagatgcccgcgaccgcatcattgctgcggaaatgccgaaacagctggggt

SEQ ID NO: 26423 - DNA, 75 bp, synthetic construct
  source 1..75: mol_type = other DNA
tggcagtttgacctgctgaataatggagagaccgtactgcgtgatgcgtccggggagaaacggataaaaggagag

SEQ ID NO: 26424 - DNA, 75 bp, synthetic construct
  source 1..75: mol_type = other DNA
ggaaggtcggctgcttgtggaggccgcccctctaggtcatatcaaacgtcggtatatcaatatagcgcccttgaa

SEQ ID NO: 26425 - DNA, 75 bp, synthetic construct
  source 1..75: mol_type = other DNA
tgcagttttttgacaactacacagttacatccttaacggaccaaacatggaccggaggtggtatcattactgaaa

SEQ ID NO: 26426 - DNA, 75 bp, synthetic construct
  source 1..75: mol_type = other DNA
gccacatccggtattacgcaatggggccattgcccgtgatctggcagcggagatacgcacccgatggagtgaatg

SEQ ID NO: 26427 - DNA, 75 bp, synthetic construct
  source 1..75: mol_type = other DNA
agtccttttctacagggacgaatatgaaaaatattttgattcgttaaaagatggcgatgaatgcttgagttttaa

SEQ ID NO: 26428 - DNA, 75 bp, synthetic construct
  source 1..75: mol_type = other DNA
tcgtctctacaactggtcatgtgttttctgttgtgcgcgtgacgctttgcacaatttgccttaaacatgaaaaaa

SEQ ID NO: 26429 - DNA, 75 bp, synthetic construct
  source 1..75: mol_type = other DNA
gtaaacgcacctgcgccagcgcaccgctggatccgctgacccgcgccgtggtgatttccctgttcacctggcggc

SEQ ID NO: 26430 - DNA, 75 bp, synthetic construct
  source 1..75: mol_type = other DNA
atctacactttgccgctgaacgatcgcgtccggcggtggagctgcttgccagggtgtcgctggagaatatcgaat

SEQ ID NO: 26431 - DNA, 75 bp, synthetic construct
  source 1..75: mol_type = other DNA
gtgagtgagtcaaaatgccaaattaatggcaataagatagaaccatgtgcagcactggcaaaatcccttgagcat

SEQ ID NO: 26432 - DNA, 75 bp, synthetic construct
  source 1..75: mol_type = other DNA
aacagcacggtaaaatgctgacgggcggtgcattaaacgtcaacgccagagacatcagcaatagtgggcagcttc

SEQ ID NO: 26433 - DNA, 75 bp, synthetic construct
  source 1..75: mol_type = other DNA
ttcagcagggaaaccgctggcttaactggctggagaagcagccggaagggtctgtgcgtccggtggtgattgagt

SEQ ID NO: 26434 - DNA, 75 bp, synthetic construct
  source 1..75: mol_type = other DNA
tcaacatatccagggtgatggataacgccacacatgtggcggtgtacttcggctcttacctgaaaaagccaccgg

SEQ ID NO: 26435 - DNA, 75 bp, synthetic construct
  source 1..75: mol_type = other DNA
gcggcgatgtggttgctggtttccgtgatattgccgatcctgtgctggcaagtgaggcggcttatattcagtgtc

SEQ ID NO: 26436 - DNA, 75 bp, synthetic construct
  source 1..75: mol_type = other DNA
ggcgcgcaaaactgatcacccgtacattccctgataacaccggacgaacgggccgacgggcgcaggccgcaggtg

SEQ ID NO: 26437 - DNA, 75 bp, synthetic construct
  source 1..75: mol_type = other DNA
cttcctgttcaggacggattttgcctgaacaaaaacgcgagctgaacggacgtggggtctggttacgggatggtg

SEQ ID NO: 26438 - DNA, 75 bp, synthetic construct
  source 1..75: mol_type = other DNA
gcaggctactattctgacctctatcagaagcgggtatgcgaagggtatcactgtcagaccccgtagcattgcact

SEQ ID NO: 26439 - DNA, 75 bp, synthetic construct
  source 1..75: mol_type = other DNA
acggctgacgccccaattaacgggtaaaggccagcagtggttaactcgcaagctacttgatgctggtttgttaaa

SEQ ID NO: 26440 - DNA, 75 bp, synthetic construct
  source 1..75: mol_type = other DNA
tcattacggcaaagtgtgggtcaataatcaggaagtgatggagcatcagggcggctatacgccatttgaagccga

SEQ ID NO: 26441 - DNA, 75 bp, synthetic construct
  source 1..75: mol_type = other DNA
ttgatgcctcaaatacaggagggaatttgattccatcaccgacacttcattctcgagggagtattggtaatactg

SEQ ID NO: 26442 - DNA, 75 bp, synthetic construct
  source 1..75: mol_type = other DNA
cctgatttacgcggtgagtttattcgtggctgggatgacggacgtggagtggataacggaaggggattattaacg

SEQ ID NO: 26443 - DNA, 75 bp, synthetic construct
  source 1..75: mol_type = other DNA
acttctcggcggcaaatgttgttccaacagcaaatgaaaatcgtccacgtaacatcgcctttaattatattgtga

SEQ ID NO: 26444 - DNA, 75 bp, synthetic construct
  source 1..75: mol_type = other DNA
tgagcagggagagtttgatttttacaggcaaatttatcctgtgacagggggagagcacaaggttgaagccttgat

SEQ ID NO: 26445 - DNA, 75 bp, synthetic construct
  source 1..75: mol_type = other DNA
aataatttttgctgtagcttttatagctggtaaggcgatcttcgctgataatgttatgttcaggcgaaggatgta

SEQ ID NO: 26446 - DNA, 75 bp, synthetic construct
  source 1..75: mol_type = other DNA
gtggtggcgaaaacgtcttatatagcagaagacggtatcgaaaaacgttatcttccagatggcatgctggttctg

SEQ ID NO: 26447 - DNA, 75 bp, synthetic construct
  source 1..75: mol_type = other DNA
gtatcatcaacgaagtgaccggcggtaagcgttcactgctgcagggctatacggaagtggccggcaaagcggcga

SEQ ID NO: 26448 - DNA, 75 bp, synthetic construct
  source 1..75: mol_type = other DNA
tgcgtatcattaccgataacctcaaacaggaagagcacgccattgtccaggtggaagaaatgcaggcggtaaatg

SEQ ID NO: 26449 - DNA, 75 bp, synthetic construct
  source 1..75: mol_type = other DNA
cagccagcagtttcatgcgttgtgccgaagccgtcgggacacgcattacagacattccggtagacctcaacacgc

SEQ ID NO: 26450 - DNA, 75 bp, synthetic construct
  source 1..75: mol_type = other DNA
tcagcgtcaaaatacgaaaacaacctggcatggagcctgggtgccggtgttaaatacgatgtgacgcaggatttc

SEQ ID NO: 26451 - DNA, 75 bp, synthetic construct
  source 1..75: mol_type = other DNA
atgagcactaaattaaccggctatgtatgggatggttgcgctgcgtcaggcatgaaattatccagcgtggcaatt

SEQ ID NO: 26452 - DNA, 75 bp, synthetic construct
  source 1..75: mol_type = other DNA
tctccagcgggattcgttctgggtaaaaaacatcatgagtccggcaaaactccgggaaaaatgggatgaactggt

SEQ ID NO: 26453 - DNA, 75 bp, synthetic construct
  source 1..75: mol_type = other DNA
caaacaaatctgcgagatgtacagccgcgtcagccgcgatccgttctggtgccgtaacgtgctcagcccgtcgaa

SEQ ID NO: 26454 - DNA, 75 bp, synthetic construct
  source 1..75: mol_type = other DNA
agtaaatgcgggttatttaagtatatgcattaagagactcgctcgagttgaacgaattgtctcagggctagtcaa

SEQ ID NO: 26455 - DNA, 75 bp, synthetic construct
  source 1..75: mol_type = other DNA
tgacgctaatgatgggtggataattcctggtgcgtcgtggaaaccgtcacactggatgccgctaccagaaccgcc

SEQ ID NO: 26456 - DNA, 75 bp, synthetic construct
  source 1..75: mol_type = other DNA
gaccacagctctggcatgagactcaagatgtgctggcgctgcccaccgttagtgcaccggtcacgcaggctcctg

SEQ ID NO: 26457 - DNA, 75 bp, synthetic construct
  source 1..75: mol_type = other DNA
ttgatgcaagggtacgcttcgccgctgcggtcacccggtccctccttcccgtctgccgtgattttccggtcgttc

SEQ ID NO: 26458 - DNA, 75 bp, synthetic construct
  source 1..75: mol_type = other DNA
caggatatggaacaaacggcgttaatggggctgcttaatgccatccgccgctacgggctgccggacgaaggtttt

SEQ ID NO: 26459 - DNA, 75 bp, synthetic construct
  source 1..75: mol_type = other DNA
aatttcgaggttacacctcatgaactccggcctgatatctacccgaatccgaccgatggtttacctgttggatgt

SEQ ID NO: 26460 - DNA, 75 bp, synthetic construct
  source 1..75: mol_type = other DNA
tacatttaccgccaatgcagagcaacttctgcagccacagtttacggtagaacaactacgtgagctgggtattaa

SEQ ID NO: 26461 - DNA, 75 bp, synthetic construct
  source 1..75: mol_type = other DNA
gcttgctcaacacggcagcgaaaaaccggtaacgcacgtttcacgcgacgaactccaggcattacacattgcacg

SEQ ID NO: 26462 - DNA, 75 bp, synthetic construct
  source 1..75: mol_type = other DNA
tcatcgctgcgctacttgccgccaaggagcagggtattggtgcaatgctggcttttatcatggcgtatctgcgtg

SEQ ID NO: 26463 - DNA, 75 bp, synthetic construct
  source 1..75: mol_type = other DNA
ccattaacggtagtcagttatatgcgatagcgaagacactgaaagatgaccttgatgccattaatccgacgtgga

SEQ ID NO: 26464 - DNA, 75 bp, synthetic construct
  source 1..75: mol_type = other DNA
aaccgtattgatatttactgagagctcagatcaactttccagggcaacagatcgcgtacccggtttgccggccag

SEQ ID NO: 26465 - DNA, 75 bp, synthetic construct
  source 1..75: mol_type = other DNA
attatggtttgggcaccgattcgtttgctggatatccagcagaagaaagtggagagggcgaccggcgttgatttg

SEQ ID NO: 26466 - DNA, 75 bp, synthetic construct
  source 1..75: mol_type = other DNA
cagacgaggttgccgatcgtgtgcgggcgctgattgatgaaaaaaacctggaggcgggcatgaagttgcccgctg

SEQ ID NO: 26467 - DNA, 75 bp, synthetic construct
  source 1..75: mol_type = other DNA
gggacaaagtcgctttggtgtttattacgagaaaaccaataatacccgcatgaatgaaggattatccggcggtgg

SEQ ID NO: 26468 - DNA, 75 bp, synthetic construct
  source 1..75: mol_type = other DNA
atcactactgtgctggacaaccgcctgatggggcttacgctgacggataaccggggctttgaagcggaccagctt

SEQ ID NO: 26469 - DNA, 75 bp, synthetic construct
  source 1..75: mol_type = other DNA
tatatgatttcctgacactggaagcctgtcgcaatttctgtcaggcagcaaaagatcgtaacctttcacaaccag

SEQ ID NO: 26470 - DNA, 75 bp, synthetic construct
  source 1..75: mol_type = other DNA
attgctggattttgccagtaacctgacggctaccagcctgctcggcctgagtcctcagcagacgtatcaggagct

SEQ ID NO: 26471 - DNA, 75 bp, synthetic construct
  source 1..75: mol_type = other DNA
ggcgctggaagtgacgacggacaagacaaccgaaaatgtcctgtccgccgtccttaccctgagggaggtccttat

SEQ ID NO: 26472 - DNA, 75 bp, synthetic construct
  source 1..75: mol_type = other DNA
atggagcaggcacaggagcggcgcaatgagcttattgcacgcattgccgaccagatgcagcaccgaccactaaaa

SEQ ID NO: 26473 - DNA, 75 bp, synthetic construct
  source 1..75: mol_type = other DNA
ggttttaacccagatgtcattgaagctgctttagcgcactctgacaaaaacgaagttagaagagcatataaccgc

SEQ ID NO: 26474 - DNA, 75 bp, synthetic construct
  source 1..75: mol_type = other DNA
gccgtcaggcgctgcgttcagcttcccactggtatgccgtgctaagcggcgagcgcgtcagcccacaacaggaag

SEQ ID NO: 26475 - DNA, 75 bp, synthetic construct
  source 1..75: mol_type = other DNA
tgaagtacgaagagcttataaccgctcaacgtaccttaataaaagaatagaacttatggcatggtggggaaggtt

SEQ ID NO: 26476 - DNA, 75 bp, synthetic construct
  source 1..75: mol_type = other DNA
tggaagcactacgggttatggatgcgatcgatcgccggggcagttttgcggcggcggcggatgagctgggacgcg

SEQ ID NO: 26477 - DNA, 75 bp, synthetic construct
  source 1..75: mol_type = other DNA
tttaccgcccattgcacaggcattaaaagagcacttggctgcctatgaaaaatcgaaaggtcctgaggctttagg

SEQ ID NO: 26478 - DNA, 75 bp, synthetic construct
  source 1..75: mol_type = other DNA
agatattgccaaagcgttacgtctgggcgttgaagatgttttgctgaaaccagttaaagatctgaatcgcttgcg

SEQ ID NO: 26479 - DNA, 75 bp, synthetic construct
  source 1..75: mol_type = other DNA
ccgcaggcatcatcgggatgatcctcgctattctggcattcctcggcattggcccgattgttgaagccctgtcca

SEQ ID NO: 26480 - DNA, 75 bp, synthetic construct
  source 1..75: mol_type = other DNA
atgagttttaacgcaaaggatatgacccagggcggtcagattgcgtccatgcgtatccgcatgttcagccagatc

SEQ ID NO: 26481 - DNA, 75 bp, synthetic construct
  source 1..75: mol_type = other DNA
gccggatatggataagtcttctgtaccggtgttaatcccccgtaatgagcagtttacaaccaacgccggggaaat

SEQ ID NO: 26482 - DNA, 75 bp, synthetic construct
  source 1..75: mol_type = other DNA
ataattttaggtgcggaagttgccaaggctcttgattgtgatgtttttacggtggataaggatcttgttttaggt

SEQ ID NO: 26483 - DNA, 75 bp, synthetic construct
  source 1..75: mol_type = other DNA
atgcgtgatattcaaatggttctggatcgttggggagcatgggcggcgagtgatagttcaggagtagactattct

SEQ ID NO: 26484 - DNA, 75 bp, synthetic construct
  source 1..75: mol_type = other DNA
ttttaacccggacgttggtgtccgactggtttcgttcgcggttcactggatcaagtctgaaattcatgagtatgt

SEQ ID NO: 26485 - DNA, 75 bp, synthetic construct
  source 1..75: mol_type = other DNA
atgtgtgatgacgaagatggtcgtgaatataacggtcataacgagttttcttatggaagacgcgggattcccctt

SEQ ID NO: 26486 - DNA, 75 bp, synthetic construct
  source 1..75: mol_type = other DNA
actttcccgactggctggggcggtggttttacgatgagctgacctatgaagagcgcggcagtgacggaaaatggc

SEQ ID NO: 26487 - DNA, 75 bp, synthetic construct
  source 1..75: mol_type = other DNA
gaaagaaacggctcgtatactgtaaaagcatccctagcgaatggagcttcacttgagaaacaactggaggctatt

SEQ ID NO: 26488 - DNA, 75 bp, synthetic construct
  source 1..75: mol_type = other DNA
tacagttcgctcgtaaagcagaaaaatgcgacagaagatgttgttttaataggcaaaatgattttagatgaagtt

SEQ ID NO: 26489 - DNA, 75 bp, synthetic construct
  source 1..75: mol_type = other DNA
aacttatccgcagcgaggatgaggggctggtcacccactggcactatgacgaagcagaccgcctcacgcaccgca

SEQ ID NO: 26490 - DNA, 75 bp, synthetic construct
  source 1..75: mol_type = other DNA
ctggaatcacctcacaaaacaatcaacatcatcaaacagaacaaataccctctacacaaataccgcaatccgaat

SEQ ID NO: 26491 - DNA, 75 bp, synthetic construct
  source 1..75: mol_type = other DNA
ggaggtcaataagaatgtctataccaccattggtgttgcgggcgtcggaaacctcaatattagcgatggcggtaa

SEQ ID NO: 26492 - DNA, 75 bp, synthetic construct
  source 1..75: mol_type = other DNA
cgagcagtcacgcgaagctgccgatttattgctgcaacgctatcctttccagggcgatgcgcgtgtcagccagac

SEQ ID NO: 26493 - DNA, 75 bp, synthetic construct
  source 1..75: mol_type = other DNA
acccgcgacattcagtgcagcgccatcctcgcaaatgatcatcagccagaatacggtctctactaatacgcaggg

SEQ ID NO: 26494 - DNA, 75 bp, synthetic construct
  source 1..75: mol_type = other DNA
aacatttgatgcacgtaaagcatttttaaatcagtgttcatcagctgatcccgcagccatatctaaaataatgag

SEQ ID NO: 26495 - DNA, 75 bp, synthetic construct
  source 1..75: mol_type = other DNA
tcacgaacggtctggtagcggctggcgtgtggaatggtggccctatcggacagctgaattccggcgatacgctga

SEQ ID NO: 26496 - DNA, 75 bp, synthetic construct
  source 1..75: mol_type = other DNA
atgccgggtgcctcccggtgaattctgcaatgaccagacagaatccgcaacttgcctatacaatacgcaaccaaa

SEQ ID NO: 26497 - DNA, 75 bp, synthetic construct
  source 1..75: mol_type = other DNA
ttgattgaatccggcttatggtcaagagatgcggttgaacgtcagatgagtcatcaggagcgcaacggagtacgt

SEQ ID NO: 26498 - DNA, 75 bp, synthetic construct
  source 1..75: mol_type = other DNA
atgtgccgctgataagcatcagcctggtggccattcttttcatcgcagctgcattaagccttttcccacaacaat

SEQ ID NO: 26499 - DNA, 75 bp, synthetic construct
  source 1..75: mol_type = other DNA
gcaagcggtcactaccacgtacagcaatatcacactcgaagacgaccagggcagtcacttccgtctggtggttcg

SEQ ID NO: 26500 - DNA, 75 bp, synthetic construct
  source 1..75: mol_type = other DNA
atcaggctgcggcaaaaatggcgcgggcaggaatcctggtcattgatggtaaggtctggcgaacggtatgttatt

SEQ ID NO: 26501 - DNA, 75 bp, synthetic construct
  source 1..75: mol_type = other DNA
ctgtgtattataaagaaaaaccagcttatcttgatgaggcgttgaatagtcttgccatacaaacctataaggctg

SEQ ID NO: 26502 - DNA, 75 bp, synthetic construct
  source 1..75: mol_type = other DNA
acgcagtcagcatcgacaacgtgaaacctggtgtcactacagactggaaagaaaccgcagatggcgtctataagg

SEQ ID NO: 26503 - DNA, 75 bp, synthetic construct
  source 1..75: mol_type = other DNA
gaacccggcggcatatgaaaccatttatagcggatataaaaaccgggcttccgagaacattcactttgttccact

SEQ ID NO: 26504 - DNA, 75 bp, synthetic construct
  source 1..75: mol_type = other DNA
cagtttactgcgatggtgaaaaaattccgtgcggatcttggtgctttctccggtcagtgtattggtggttcatca

SEQ ID NO: 26505 - DNA, 75 bp, synthetic construct
  source 1..75: mol_type = other DNA
caccgatcgcggcgaaggtttcgtccacgatctgacgtcactggcgcgcgatgtagccactggcgtactggcccg

SEQ ID NO: 26506 - DNA, 75 bp, synthetic construct
  source 1..75: mol_type = other DNA
tcgtggttgcgtccgtgaaagaagcaccaattgggatcgaggtcatccccgcacacgtcactgaatatctgaaca

SEQ ID NO: 26507 - DNA, 75 bp, synthetic construct
  source 1..75: mol_type = other DNA
tacgcaacaaaacgagccagaaacgaaacaacctgaaccagtagtgcaacaggaaccggaaaagatctgcaccgc

SEQ ID NO: 26508 - DNA, 75 bp, synthetic construct
  source 1..75: mol_type = other DNA
gcgcagaatatcaacccggcgcagcagcgcatggcagagaaagccgcctgctcccctgaaaagtgctttaaagcg

SEQ ID NO: 26509 - DNA, 75 bp, synthetic construct
  source 1..75: mol_type = other DNA
ggacagaggctgccgtttttgaaggtcagtccggtattgaggccggactggcggatgaattaatcaatgcgtcgg

SEQ ID NO: 26510 - DNA, 75 bp, synthetic construct
  source 1..75: mol_type = other DNA
aagagaacccgcatcagctgcagcagcttatccgcctgccggggcagcagtatgatgaggagtccggcctgtatt

SEQ ID NO: 26511 - DNA, 75 bp, synthetic construct
  source 1..75: mol_type = other DNA
ggaagatatagaccttaaagcgaggactataaccatccgccggaattatacaaaactaggcgaattcactccacc

SEQ ID NO: 26512 - DNA, 75 bp, synthetic construct
  source 1..75: mol_type = other DNA
gatgctggacgcggggcgttgtactttctacaccccggcatcgctgggagatgtgaaactggaactttttgcggt

SEQ ID NO: 26513 - DNA, 75 bp, synthetic construct
  source 1..75: mol_type = other DNA
gcatagccacaggcaccaatatcaacagcggaacgcaaaatatcaaaagcggcgggaaagctgacacaacaatta

SEQ ID NO: 26514 - DNA, 75 bp, synthetic construct
  source 1..75: mol_type = other DNA
aggtcatttcctccccggtgccggtcattctgtttatcgacgaagcacataccctgattggcgcgggcaaccagc

SEQ ID NO: 26515 - DNA, 75 bp, synthetic construct
  source 1..75: mol_type = other DNA
atgaacgaaaacacaacactgaacgcactgatttgtcgtcacgcccgcaacctgctgctggcgcagggctggccg

SEQ ID NO: 26516 - DNA, 75 bp, synthetic construct
  source 1..75: mol_type = other DNA
tttactggctggcctctctactcaaaagctgggggaatcatggctatcgaagctgtttccgcgactattccgcta

SEQ ID NO: 26517 - DNA, 75 bp, synthetic construct
  source 1..75: mol_type = other DNA
aggtctgcatcgcggaaaaatcccgccgcaccgggcttacctgggcggaagccgggcgtaacgtcattaccgctg

SEQ ID NO: 26518 - DNA, 75 bp, synthetic construct
  source 1..75: mol_type = other DNA
taatagaaatatcttctatacatagccacaaggtaattcctgcattatatgatcaccttgttaaaggaattccaa

SEQ ID NO: 26519 - DNA, 75 bp, synthetic construct
  source 1..75: mol_type = other DNA
ctcctgggatattccggctggacagtccgcaccctctgtatacgtctgtacagcctgcttcagggtaagcaggca

SEQ ID NO: 26520 - DNA, 75 bp, synthetic construct
  source 1..75: mol_type = other DNA
cacgcacgcactatcaaaccgttactgcgctgccgtcttcagctatctggccgaagacctggcagaactgcaaag

SEQ ID NO: 26521 - DNA, 75 bp, synthetic construct
  source 1..75: mol_type = other DNA
cggcgatgcttggggctctggcggttcttaccgctggtgctgctcatgcagagctgctggaatacacctttaagg

SEQ ID NO: 26522 - DNA, 75 bp, synthetic construct
  source 1..75: mol_type = other DNA
tgttatcttacttgaagatattccttcacatagcgactggaaaaataaacgtcaacttcttgaatatttaatgcc

SEQ ID NO: 26523 - DNA, 75 bp, synthetic construct
  source 1..75: mol_type = other DNA
tctgggacatgaaacagagcacagtatctgggctgacagtatcagtaccgggaagcggtacgctgcaatacctga

SEQ ID NO: 26524 - DNA, 75 bp, synthetic construct
  source 1..75: mol_type = other DNA
aaaaacactaaagcgtttaagattaaaacggaaattgaggatactttaaagccacttagacaaccaagacagcca

SEQ ID NO: 26525 - DNA, 75 bp, synthetic construct
  source 1..75: mol_type = other DNA
acagcgctgtggcccggggctttattgccgtatctgagtttgccaggaaatgtgttcataagtctgtcagacgtc

SEQ ID NO: 26526 - DNA, 75 bp, synthetic construct
  source 1..75: mol_type = other DNA
acccgcaccaccagcggtaacgtctctgctcccgcgcagtctacccaggatggcgcgcctgccgaaccgcagtaa

SEQ ID NO: 26527 - DNA, 75 bp, synthetic construct
  source 1..75: mol_type = other DNA
atgtttgattaccaagtttccaaacatccacattttgatgaagcctgtcgtgcattcgcactgcgccacaacctg

SEQ ID NO: 26528 - DNA, 75 bp, synthetic construct
  source 1..75: mol_type = other DNA
tggtttcagttctgctgttgccgaccacagtcatggccacagacggaaatgcccctccacagaacagacagcagc

SEQ ID NO: 26529 - DNA, 75 bp, synthetic construct
  source 1..75: mol_type = other DNA
cattaatgaagcactggcgctgacgcggggggatttttcgctcgcgcctccgtatccgtttgtgcagcttgcgac

SEQ ID NO: 26530 - DNA, 75 bp, synthetic construct
  source 1..75: mol_type = other DNA
gcctgaatggcctgaggcgggtagtgttggtgtgacttttgttcaggataataaccctgacattttccccggaga

SEQ ID NO: 26531 - DNA, 75 bp, synthetic construct
  source 1..75: mol_type = other DNA
gctgttcagtgccgaacgtgaaggcggcgcgttgacggaagcaggatgctgggctcatgcgcggcgcaaaatcca

SEQ ID NO: 26532 - DNA, 75 bp, synthetic construct
  source 1..75: mol_type = other DNA
aagacgccaccggcttctttcgtgacggcatgaccatcatggtgggcggatttatggggattggcactccatccc

SEQ ID NO: 26533 - DNA, 75 bp, synthetic construct
  source 1..75: mol_type = other DNA
ttgaggcgcgtcttgatgctgaagtggatgccattctggatgagctgctggggggatccgttcctgatgtcgtac

SEQ ID NO: 26534 - DNA, 75 bp, synthetic construct
  source 1..75: mol_type = other DNA
atgacctatgcgcaccttgcgcctgactacctgcagaacgccgtcgctctgaatccactaaaaggcggagtgacg

SEQ ID NO: 26535 - DNA, 75 bp, synthetic construct
  source 1..75: mol_type = other DNA
ttccatggtttaaatctggtgaattatctgaagattacataaccgattcagaagaacatattacagcattggcat

SEQ ID NO: 26536 - DNA, 75 bp, synthetic construct
  source 1..75: mol_type = other DNA
tattgcacaatacacaaccgtctgagcctgaagcgcaggaaagtgaaaaagcagagagtcccggcattattgata

SEQ ID NO: 26537 - DNA, 75 bp, synthetic construct
  source 1..75: mol_type = other DNA
gatgctattgttggcggagctcataatggggccgccgatgcaatgagacattgttacttgatgtgtcgaatgact

SEQ ID NO: 26538 - DNA, 75 bp, synthetic construct
  source 1..75: mol_type = other DNA
cgacgggccagcccgttggtcagccacttgggccgacaatcagcgtgtttaagctgaccaataagccggtggcgt

SEQ ID NO: 26539 - DNA, 75 bp, synthetic construct
  source 1..75: mol_type = other DNA
cagattctgaagcaagagagatttatgaagaatgtgaagctaaggttaatcatttaaatgtaacccagaaaaagg

SEQ ID NO: 26540 - DNA, 75 bp, synthetic construct
  source 1..75: mol_type = other DNA
tacacacaactagcacaaaaaacaacgccccgcagtgatgggaacacatacggggcgtctaaccaaaccattaat

SEQ ID NO: 26541 - DNA, 75 bp, synthetic construct
  source 1..75: mol_type = other DNA
atatatccgcattagctggccttctggcaaaactttctggaagtgttgcgctgtggttaattgatgagagattta

SEQ ID NO: 26542 - DNA, 75 bp, synthetic construct
  source 1..75: mol_type = other DNA
ttcaggccttaccccattttcgctttatccagcagtcgctgcttgcgtttgttccggccgacagcccaccggaat

SEQ ID NO: 26543 - DNA, 75 bp, synthetic construct
  source 1..75: mol_type = other DNA
aattcaactggtacagctaataacactttccttttgggaggtggcgcttttaacatggattcaccaggaagtctt

SEQ ID NO: 26544 - DNA, 75 bp, synthetic construct
  source 1..75: mol_type = other DNA
ctttaactggaaataataagaagaatgagcctcatgataaaggatgggcaattttggagcagggaacaatagcgc

SEQ ID NO: 26545 - DNA, 75 bp, synthetic construct
  source 1..75: mol_type = other DNA
gcaaaaatgttgctggatacgctggcgtggatacttgaaaaactcggtgtgcttccggatgaagcggaaagggcg

SEQ ID NO: 26546 - DNA, 75 bp, synthetic construct
  source 1..75: mol_type = other DNA
tttcagatgctgagggtaaaaaattatccgatgcggttggtgccctaagccccaaaatgagtgaaaaggcttttc

SEQ ID NO: 26547 - DNA, 75 bp, synthetic construct
  source 1..75: mol_type = other DNA
ccgtcgtttaataaaatgcctggaaaagagcatattaactgtgatgcagatgctgaaagcacagtggttaagcag

SEQ ID NO: 26548 - DNA, 75 bp, synthetic construct
  source 1..75: mol_type = other DNA
atgaaggactatctggtaggtgggcactcccgtaaggaggtctgcgagaaataccagatgaataatgggtatttc

SEQ ID NO: 26549 - DNA, 75 bp, synthetic construct
  source 1..75: mol_type = other DNA
cactggttataaacacacagcttgcgatgaagattggcttaaatgaagccattgtgttgcagcagttgcattact

SEQ ID NO: 26550 - DNA, 75 bp, synthetic construct
  source 1..75: mol_type = other DNA
cagggtaaaaatgatcggggtgatctccggaaagctaatggtgatggtcacggtttctcagccagttatgaatat

SEQ ID NO: 26551 - DNA, 75 bp, synthetic construct
  source 1..75: mol_type = other DNA
tgatatgctccgggctcgcagggcgaccggcctgatgacccggaacaattacagaatggtaaataacattaccca

SEQ ID NO: 26552 - DNA, 75 bp, synthetic construct
  source 1..75: mol_type = other DNA
gccgccttgccagccagatggcacgcaacccggaaggcccgcaacggctgaaggatgacgcaatggatgcggtac

SEQ ID NO: 26553 - DNA, 75 bp, synthetic construct
  source 1..75: mol_type = other DNA
cggtgcagtattacagccgggttatcatgaatccgccgttcagccacgggcaggatatccggcatatcctgcggg

SEQ ID NO: 26554 - DNA, 75 bp, synthetic construct
  source 1..75: mol_type = other DNA
atggggtaaagatactgatgcgtgatatccggcaggttcttgagcgctggggtgcatgggcggcaaataactatg

SEQ ID NO: 26555 - DNA, 75 bp, synthetic construct
  source 1..75: mol_type = other DNA
catgaatccgccgttcagccacgggcaggatatccggcatatcctgcgggccttttccctgttgcgtccgggtgg

SEQ ID NO: 26556 - DNA, 75 bp, synthetic construct
  source 1..75: mol_type = other DNA
ggccggactgagcacgtatgagaaagagctggcgctgatgggcgaggattatcaggacattttccgccagcaggt

SEQ ID NO: 26557 - DNA, 75 bp, synthetic construct
  source 1..75: mol_type = other DNA
tactccattcgacagaaggaaacatctacgggcaacagattcatgcattctgcacttccttttatcgacaactgc

SEQ ID NO: 26558 - DNA, 75 bp, synthetic construct
  source 1..75: mol_type = other DNA
aagcagacccgtctggtgcatgaggtgtggcgacatactgttaatcgcgtcttcctggacgcaacacatcagaac

SEQ ID NO: 26559 - DNA, 75 bp, synthetic construct
  source 1..75: mol_type = other DNA
cgttctctggtagtggacgatgggaacggatcccgcgtgaacttcccaccgggcgtccggccatgctgcatattt

SEQ ID NO: 26560 - DNA, 75 bp, synthetic construct
  source 1..75: mol_type = other DNA
aggcggcctggtcggaatacgccgaagggatgtttggcgagatcgacgtggaaggaaaacgcacgttcacggaat

SEQ ID NO: 26561 - DNA, 75 bp, synthetic construct
  source 1..75: mol_type = other DNA
atctggtgcgcaataacggaatagcggctaatgcggtggctctgcataaggatcacattgtcgggcatatgtttc

SEQ ID NO: 26562 - DNA, 75 bp, synthetic construct
  source 1..75: mol_type = other DNA
gaaactaatacgcattgagatacagatggctgaggggtttattgatggatgcctttcaattctggatgttaaact

SEQ ID NO: 26563 - DNA, 75 bp, synthetic construct
  source 1..75: mol_type = other DNA
ggcacgggaatggctgattctgaacatggcgggactggagcgtgaagaattccgggtgctgtatctgaataacca

SEQ ID NO: 26564 - DNA, 75 bp, synthetic construct
  source 1..75: mol_type = other DNA
aggccgggcgaatgaaggcgtggaccacgccgcgcgtaccgcgcatgaagaggtgctgtatcgtctgcgtctggc

SEQ ID NO: 26565 - DNA, 75 bp, synthetic construct
  source 1..75: mol_type = other DNA
tggatatccgggtaccggaccatctgatagttggtggcaaccaggttttctcctttgcggaacacggcctgcttt

SEQ ID NO: 26566 - DNA, 75 bp, synthetic construct
  source 1..75: mol_type = other DNA
cgatcgtgctgggcattcaaaccctggagatgggggtattaggtggcattgtggttggggttatcacctattttc

SEQ ID NO: 26567 - DNA, 75 bp, synthetic construct
  source 1..75: mol_type = other DNA
tttccctttctgggcggcgaatttacccagttgacctttggctttatcgctatggtcggtggctttgcttttacc

SEQ ID NO: 26568 - DNA, 75 bp, synthetic construct
  source 1..75: mol_type = other DNA
ccggctacgggctatttccctctgaacaggctcgtaaggactggcaaaacgcccgcaaaaaactatcgagggcaa

SEQ ID NO: 26569 - DNA, 75 bp, synthetic construct
  source 1..75: mol_type = other DNA
atggaaagacagcttcatcccaaaaatgggaatgcttctggctgttcttgaatggggtgttgaagacgaggagtt

SEQ ID NO: 26570 - DNA, 75 bp, synthetic construct
  source 1..75: mol_type = other DNA
gcacgacaggagcgggaaatgtttgttgtgctctacctcgataaccagaaccgactgctggaacacgaaacgcta

SEQ ID NO: 26571 - DNA, 75 bp, synthetic construct
  source 1..75: mol_type = other DNA
atggcaggactggagcgggaagagttccgggtgctgtatctgaacaaccagaatcagctgattgcgggtgaaacc

SEQ ID NO: 26572 - DNA, 75 bp, synthetic construct
  source 1..75: mol_type = other DNA
gttgccagtggcgatgtatataactccggctacgggctatttccctctgaacaggctcgtaaggactggcaaaac

SEQ ID NO: 26573 - DNA, 75 bp, synthetic construct
  source 1..75: mol_type = other DNA
acgtctggtacaggcactgggcctggtggatatccgggtgccggaccatctgatagtcggtggcagccaggtttt

SEQ ID NO: 26574 - DNA, 75 bp, synthetic construct
  source 1..75: mol_type = other DNA
gcggggagaaaataccgttactcagtacagcgaatacctggaccaatcgacaaacactcagcggtggcctttctg

SEQ ID NO: 26575 - DNA, 75 bp, synthetic construct
  source 1..75: mol_type = other DNA
taccgggataaaaagcagtaaaggtatccggattccggtcacgaagaaatcacttccggaaattaacagcgtgca

SEQ ID NO: 26576 - DNA, 75 bp, synthetic construct
  source 1..75: mol_type = other DNA
ggagacagccagcttgacgaactggcagacctgaaaattatcgacgatggtcgctattgtgtccggctgtacaag

SEQ ID NO: 26577 - DNA, 75 bp, synthetic construct
  source 1..75: mol_type = other DNA
ctgttccgctaaaagcgggtgaacgtctggccggtctcaatcatgttgccgaattgcgcgcgagatattggggcg

SEQ ID NO: 26578 - DNA, 75 bp, synthetic construct
  source 1..75: mol_type = other DNA
taacgggaacgaaagcgaataccccggaaggacgagctcagattgtttcacgtgagcgcgaagtgttacagcaca

SEQ ID NO: 26579 - DNA, 75 bp, synthetic construct
  source 1..75: mol_type = other DNA
gtttattaaagatatacgtgatccacgggatgttaattatgaacgaaataaacgggcactggctgctatattctt

SEQ ID NO: 26580 - DNA, 75 bp, synthetic construct
  source 1..75: mol_type = other DNA
tattcctcagatactgggatatgaaacaccaagtgcatggatttcattttcccctcatgcttttgaagcaataga

SEQ ID NO: 26581 - DNA, 75 bp, synthetic construct
  source 1..75: mol_type = other DNA
ttgccttatcatcaagtagcaaaggtggagtatgtggctggtattctgaagcaatctcgccatctggatgacatc

SEQ ID NO: 26582 - DNA, 75 bp, synthetic construct
  source 1..75: mol_type = other DNA
aactccggattcctgttgctggccgaccactataacttcctgccacgggcatgccgtccacgcagggccagaaca

SEQ ID NO: 26583 - DNA, 75 bp, synthetic construct
  source 1..75: mol_type = other DNA
caaactgggccgcagttcccgctggctgaaaagcgaagtggaagcctggctgcaggcgcggattgctcagtcccg

SEQ ID NO: 26584 - DNA, 75 bp, synthetic construct
  source 1..75: mol_type = other DNA
caccgaaaaactatattgtgcctggtgatccggctattgagtacgtacaaacgcactctgcaccacagccaatac

SEQ ID NO: 26585 - DNA, 75 bp, synthetic construct
  source 1..75: mol_type = other DNA
aagaacagaaattccagttagagatttacaaactggtcatgaaccagaacgcagccgcagaggaagcatttcagt

SEQ ID NO: 26586 - DNA, 75 bp, synthetic construct
  source 1..75: mol_type = other DNA
cggcttaccaccagccagccggaacggttggcgattaccgtaagcttttatccgtaggtgcagtccacgtaaaag

SEQ ID NO: 26587 - DNA, 75 bp, synthetic construct
  source 1..75: mol_type = other DNA
gttatccagagcgtgaaaaatgtttcgatgcagcactaaaaattattgatgaactaagaaaaaatgaaaaagaat

SEQ ID NO: 26588 - DNA, 75 bp, synthetic construct
  source 1..75: mol_type = other DNA
cgacagcccgaaaccgcgccagcgggttcggcggagactggcaggtgcgccagcagctgcctgtcggagtcgggc

SEQ ID NO: 26589 - DNA, 75 bp, synthetic construct
  source 1..75: mol_type = other DNA
attaactggatgttatacatgcagcaggttgatgccacagatacctctgttcttcctgtaacattcccggaacaa

SEQ ID NO: 26590 - DNA, 75 bp, synthetic construct
  source 1..75: mol_type = other DNA
agcagtaaaggccgcgtatgaccttgctaacgcaaaatataccgctcaggacgccacgacggcacaaaaagggat

SEQ ID NO: 26591 - DNA, 75 bp, synthetic construct
  source 1..75: mol_type = other DNA
tgtttatgacgtagcccgtaaggcggcaatggatgttgtgaccgggcagatgcgcgatggtggtctgttctccgg

SEQ ID NO: 26592 - DNA, 75 bp, synthetic construct
  source 1..75: mol_type = other DNA
aagctgtagtgagcgaatgccggaagaaacgggtgacattattgttgtttctgatggcattgtaatgtcagggat

SEQ ID NO: 26593 - DNA, 75 bp, synthetic construct
  source 1..75: mol_type = other DNA
cgtccggtccgtcgctttttctccattgttttcctcattgttctattaggttgcattcattcactgataacaact

SEQ ID NO: 26594 - DNA, 75 bp, synthetic construct
  source 1..75: mol_type = other DNA
gagcaaccagaaggcatcgcgcccacctggaccgtttcttcgttgcacgaactggagcagctcctgtgtaaacac

SEQ ID NO: 26595 - DNA, 75 bp, synthetic construct
  source 1..75: mol_type = other DNA
gcttatattttcaaacatccggctggaaaattattctgggctttaacggatgaaagcaataaagagcaatcggac

SEQ ID NO: 26596 - DNA, 75 bp, synthetic construct
  source 1..75: mol_type = other DNA
atgtcagggggtacagtacccctcagacttatttcattaatcctgcttttttctcttattccacccgcccgagct

SEQ ID NO: 26597 - DNA, 75 bp, synthetic construct
  source 1..75: mol_type = other DNA
tttctgccggggaatcttcgttgaggccgggcgcaattaatataaataaggacaaaaaaacaggtaaagccagta

SEQ ID NO: 26598 - DNA, 75 bp, synthetic construct
  source 1..75: mol_type = other DNA
gaggtggatgttcagggggcacagcaagccgtcgaggcgaacacccgcgcgcgcggaaaatcaaaatacgatcac

SEQ ID NO: 26599 - DNA, 75 bp, synthetic construct
  source 1..75: mol_type = other DNA
tgcttgcttctactgtttcatttggcgttaatgctgctaatcagggacagggcgttattaacttcaaaggtacag

SEQ ID NO: 26600 - DNA, 75 bp, synthetic construct
  source 1..75: mol_type = other DNA
aaacagatgagtcaggtgtaaaagttccatcttcactacgtgctattggcactcgtggtgtttatagattaggtg

SEQ ID NO: 26601 - DNA, 75 bp, synthetic construct
  source 1..75: mol_type = other DNA
atgaacacagccctttcaccgatggtttctgaatttgaaactgtcgagcaagaaaacagttacaacgaatggctg

SEQ ID NO: 26602 - DNA, 75 bp, synthetic construct
  source 1..75: mol_type = other DNA
acaaagatacctggtgctcgctcggggatttcagcgaaccgtcttcgctggcgacgatgatccaggaggcatggt

SEQ ID NO: 26603 - DNA, 75 bp, synthetic construct
  source 1..75: mol_type = other DNA
ctggcgggcaagatggcactgtatgccgacgttgagccaacggaatcactggtggaactggtgaaaaaaggccag

SEQ ID NO: 26604 - DNA, 75 bp, synthetic construct
  source 1..75: mol_type = other DNA
tgacggtttttcttgtttccggtgaaccggttgacatggttactggcgtatacggctcaatgaaagaatgcatgg

SEQ ID NO: 26605 - DNA, 75 bp, synthetic construct
  source 1..75: mol_type = other DNA
aaagcgtgcccgtgcgcgtcgtgatgcgggcagggaacgtcaggatatcgtcaccctggtgaaacgacagctgac

SEQ ID NO: 26606 - DNA, 75 bp, synthetic construct
  source 1..75: mol_type = other DNA
caggaaaactctccatcacccgtgccacccgggccctgacgttcctgtcagagctgggactgattacctaccaga

SEQ ID NO: 26607 - DNA, 75 bp, synthetic construct
  source 1..75: mol_type = other DNA
acaccgtcgctgtttaccgccctcgatgtgtcagaggatgcggtggccgccgcgcgtcgcagtcgtgtggaatgg

SEQ ID NO: 26608 - DNA, 75 bp, synthetic construct
  source 1..75: mol_type = other DNA
ccgcagcaaccgaacagaaaattccaggcaactgttatcaggtcgataaagttattcaccaggataacgaaatcc

SEQ ID NO: 26609 - DNA, 75 bp, synthetic construct
  source 1..75: mol_type = other DNA
tctatgatgcgtactttcatcaagaaagtatacgcagctatcgaagctggcgacaaagctgctgcacagaaagca

SEQ ID NO: 26610 - DNA, 75 bp, synthetic construct
  source 1..75: mol_type = other DNA
gtattccgctgctgcgtggcgataatgaacagcagctggcggagcgcgtcaggttacacctttgcgcacaacgtc

SEQ ID NO: 26611 - DNA, 75 bp, synthetic construct
  source 1..75: mol_type = other DNA
gtgctggcactgcgacaaccagttgcgtgaccagacctccgaatcacttgagcaacttgctcaccaaaacttgtc

SEQ ID NO: 26612 - DNA, 75 bp, synthetic construct
  source 1..75: mol_type = other DNA
taccacacagccgggcgtctggcaggggcaggccgccggctatgcttacggtggctccctgtatgcccgtactca

SEQ ID NO: 26613 - DNA, 75 bp, synthetic construct
  source 1..75: mol_type = other DNA
acttcaggccggtggcgatgtgagtctgaacagccggagtgatatcaccatcagtggttttaccggcacggcagg

SEQ ID NO: 26614 - DNA, 75 bp, synthetic construct
  source 1..75: mol_type = other DNA
ttcagatcaggtagccgctgaaatggctgaacaacccagtcctgcagagattgcagaggttttgatgagaaaatt

SEQ ID NO: 26615 - DNA, 75 bp, synthetic construct
  source 1..75: mol_type = other DNA
gaccatggcggtgaacgccagtgaaaagctcacccacagcgggaaaagcagcgccccgtcgctcagcctcagtgc

SEQ ID NO: 26616 - DNA, 75 bp, synthetic construct
  source 1..75: mol_type = other DNA
catgactcacagtgagcaggaaaaagttgcgcaatttttgtcacgcgaaggaattcgtaatttccttgctcgtct

SEQ ID NO: 26617 - DNA, 75 bp, synthetic construct
  source 1..75: mol_type = other DNA
tcgtgttgttatcgctggcggtggcggggctgtttctggcgaagcatgaaaacgccagcctgcgcgcctcgctgg

SEQ ID NO: 26618 - DNA, 75 bp, synthetic construct
  source 1..75: mol_type = other DNA
tatccggattatcctcagaagtgtaaatcagcattctcctttgctgatgcaattgcatgcggcaggtatacggac

SEQ ID NO: 26619 - DNA, 75 bp, synthetic construct
  source 1..75: mol_type = other DNA
gatacgttcggggtctttgataacggatggcacacactggcttttgagtttgccggaaacaacagcattcaggtg

SEQ ID NO: 26620 - DNA, 75 bp, synthetic construct
  source 1..75: mol_type = other DNA
atcgtaaaaatacctggcaggcgctcaacctcaaacgctatggcgccgagtcgcggaacctgattttgtctgcca

SEQ ID NO: 26621 - DNA, 75 bp, synthetic construct
  source 1..75: mol_type = other DNA
aggtcatggactcacggaaggcggtgcggatcaggctggtaaatattgatgcaccggaaaagaaacaggattatg

SEQ ID NO: 26622 - DNA, 75 bp, synthetic construct
  source 1..75: mol_type = other DNA
tggagaccagtttgctgaaggctgggtactggccgttatcagtgaaatacagtcctttgccctgaccgatgatga

SEQ ID NO: 26623 - DNA, 75 bp, synthetic construct
  source 1..75: mol_type = other DNA
tggcgtgaaagcggtggatgcgggacatcgggtactgtttatgccactggacagactgatcgcgacactgatgaa

SEQ ID NO: 26624 - DNA, 75 bp, synthetic construct
  source 1..75: mol_type = other DNA
ctgtcgagcacctgtctctattccgacatcattttgccgacggcgacctggtacgaaaaagacgacatgaatact

SEQ ID NO: 26625 - DNA, 75 bp, synthetic construct
  source 1..75: mol_type = other DNA
gagatcacgtgctggcaacagcgatactggatcggttgctacatcactcaaccacgctgaatatcaaaggagaga

SEQ ID NO: 26626 - DNA, 75 bp, synthetic construct
  source 1..75: mol_type = other DNA
attctggaaaatatacgtggcctgcatgatgaactggtgttcccttcacccagaaagcagcagatcctttccgat

SEQ ID NO: 26627 - DNA, 75 bp, synthetic construct
  source 1..75: mol_type = other DNA
aagaaaaaatcagcaaaatgccaaacggtgctgtggatgcgttaaaggaagaattaacccgacgcatcagtaaac

SEQ ID NO: 26628 - DNA, 75 bp, synthetic construct
  source 1..75: mol_type = other DNA
tggctctactctcgctccgtcttcaatttgctacaatggcggcggcagccacagcctccgccccaacccatacag

SEQ ID NO: 26629 - DNA, 75 bp, synthetic construct
  source 1..75: mol_type = other DNA
atgaacggacaaatatcaattgttcgaccgggagcatgtgacgatcgcgagatacgaatgattattcgtctggcg

SEQ ID NO: 26630 - DNA, 75 bp, synthetic construct
  source 1..75: mol_type = other DNA
gtaaaaccatcagccgaaggaatatccactgcagcccagacgctgggacaacgcacgctcacacctgaagatctg

SEQ ID NO: 26631 - DNA, 75 bp, synthetic construct
  source 1..75: mol_type = other DNA
gcattagcattaacaggaaagtcagacctgccagtagagctaaagctgcgaaatgttgagattaaggtgaaatag

SEQ ID NO: 26632 - DNA, 75 bp, synthetic construct
  source 1..75: mol_type = other DNA
ccaaatcaacgatcaactgactggtttcggtcagtgggaatatgaattcaaaggcaaccgcgctgaatctcaagg

SEQ ID NO: 26633 - DNA, 75 bp, synthetic construct
  source 1..75: mol_type = other DNA
agtctgcgctggagcgtgttgaggtagtgaaaggtccatattccgtactgtacggttcacaggcaattggcggta

SEQ ID NO: 26634 - DNA, 75 bp, synthetic construct
  source 1..75: mol_type = other DNA
gtcttcgccgccgctgggtgcgcctgcgcttatatcgttttcctggttctgttttgaccgattaccggatactga

SEQ ID NO: 26635 - DNA, 75 bp, synthetic construct
  source 1..75: mol_type = other DNA
attcctgacagaaggaatttctttgaaaatccccggatttataacgggaaagagacaataacactgaagccagcg

SEQ ID NO: 26636 - DNA, 75 bp, synthetic construct
  source 1..75: mol_type = other DNA
cagagcggtatgtacaaagtatgtttacagctaccagccagacttgttccaggactgtggaagtgcgagcactta

SEQ ID NO: 26637 - DNA, 75 bp, synthetic construct
  source 1..75: mol_type = other DNA
atgaaagacatcgatactgaaacccggaataacaccgtagcggatgatgtgacggcaggtgaggatatggctgtc

SEQ ID NO: 26638 - DNA, 75 bp, synthetic construct
  source 1..75: mol_type = other DNA
gtgaagtcagtcagcctcggttatgtgcggcaggaacgacttaaagatcgcctgcaccgtgaaattattgagcgt

SEQ ID NO: 26639 - DNA, 75 bp, synthetic construct
  source 1..75: mol_type = other DNA
gcgctggccatctcaaataaagcagcgcaactcgaaccgctggaaattcgcgatctccacaaactggttcgtgac

SEQ ID NO: 26640 - DNA, 75 bp, synthetic construct
  source 1..75: mol_type = other DNA
tatctttaatgaatggaatgaaggcgagctgagcagctatctgattgacatcactaaggatatcttcaacaaaaa

SEQ ID NO: 26641 - DNA, 75 bp, synthetic construct
  source 1..75: mol_type = other DNA
gatatttcattttccagaactacctgtacctgatttttctgctgtttccaacaaaggtgcaacaacatcaattgg

SEQ ID NO: 26642 - DNA, 75 bp, synthetic construct
  source 1..75: mol_type = other DNA
gagtatttagaagggaatgccttcccgtcggactcatcgacacagttcagacaaatactcagagttctcgatatt

SEQ ID NO: 26643 - DNA, 75 bp, synthetic construct
  source 1..75: mol_type = other DNA
cagcaggactatacgcagcggctgaaagactgggagagcgccttcacggatttgcagcatatgttcgagctgaca

SEQ ID NO: 26644 - DNA, 75 bp, synthetic construct
  source 1..75: mol_type = other DNA
aaaccggtttagtcgtttaccgaccacgctggcacgacgtcatgtccagaagctggtaccagacctgaccgatta

SEQ ID NO: 26645 - DNA, 75 bp, synthetic construct
  source 1..75: mol_type = other DNA
tgagcagatggctgcattgtccagattgggtaacgattatcgcccaacaagtgcttatgaacgtggtcagcgtta

SEQ ID NO: 26646 - DNA, 75 bp, synthetic construct
  source 1..75: mol_type = other DNA
gaaaaagtatcgggtgttgctgaaccgtgttgatacatcagtagtaccggatattgagtggccagtagcacctat

SEQ ID NO: 26647 - DNA, 75 bp, synthetic construct
  source 1..75: mol_type = other DNA
ttatcaagtccgtcaatggtcagccctatcgaatcaacactaccgggctgaataacgttcgcgctcagctcgata

SEQ ID NO: 26648 - DNA, 75 bp, synthetic construct
  source 1..75: mol_type = other DNA
accagatgcttcgtgcggcacaaaacaaagcagtaatagccagatttattggtgattcaaaaatgtggcttgaag

SEQ ID NO: 26649 - DNA, 75 bp, synthetic construct
  source 1..75: mol_type = other DNA
cttcctcatctggtgcaaaacgagcatacagaaagggtaaacctttgagtgaagcagaacgacagagagcagctt

SEQ ID NO: 26650 - DNA, 75 bp, synthetic construct
  source 1..75: mol_type = other DNA
caaaaccattgatatgccgattaaggggcatgtcagcttccggggtaaaaacggtatcaagggcgaagtggtgat

SEQ ID NO: 26651 - DNA, 75 bp, synthetic construct
  source 1..75: mol_type = other DNA
aataaggtgatttccagcgtaataccaggtgctttttcggttgaaaagaaattgcttgaattactggaaaaacaa

SEQ ID NO: 26652 - DNA, 75 bp, synthetic construct
  source 1..75: mol_type = other DNA
tgctaacccgcaggaaggttctgttgtttttgacgatcagatccgtggtccgatcgagttcagcaaccaggagct

SEQ ID NO: 26653 - DNA, 75 bp, synthetic construct
  source 1..75: mol_type = other DNA
caacggatgcgcagaactggttacaggcgcgcgggagtcatgtaaatgaatcatatctcggcgtggcgcgtccga

SEQ ID NO: 26654 - DNA, 75 bp, synthetic construct
  source 1..75: mol_type = other DNA
gatggtgagcttctacggctggaaccgcgtcgatcgctttatggccgcctggaaaaatgcgggattcagcgtggt

SEQ ID NO: 26655 - DNA, 75 bp, synthetic construct
  source 1..75: mol_type = other DNA
aataccagtctggaggaggaataaccgttgaaacttggtcaatcactacagacaaaaaagctctttactccaaag

SEQ ID NO: 26656 - DNA, 75 bp, synthetic construct
  source 1..75: mol_type = other DNA
cacgtttctatgatcaacggcgatgacggtaaaaaactgtccaaacgtcacggggcggtcagcgtaatgcagtat

SEQ ID NO: 26657 - DNA, 75 bp, synthetic construct
  source 1..75: mol_type = other DNA
tcccggtgaaacagtatgtgactcaggtcaatgccgataacagcgtgacctttcgctactttgcccctggggcaa

SEQ ID NO: 26658 - DNA, 75 bp, synthetic construct
  source 1..75: mol_type = other DNA
ccgtcagtggcagcgggtgattgccgtgccgggcaagttgacattgatgtctgatgatctcactaacgttaccgt

SEQ ID NO: 26659 - DNA, 75 bp, synthetic construct
  source 1..75: mol_type = other DNA
cgggacattcccggctacctgttcgccggtggtgtggcttatgacggcgatgtaattacggtttaccccggataa

SEQ ID NO: 26660 - DNA, 75 bp, synthetic construct
  source 1..75: mol_type = other DNA
ttcgcgagttcggtatgaccgcgattgctaacggtatctccctgcacggtggcttcctgccgtacacctccacct

SEQ ID NO: 26661 - DNA, 75 bp, synthetic construct
  source 1..75: mol_type = other DNA
acctatctggaacttgagcgactgataagcgatgccaaaccatgtagccgccacatgatcggcatgtccatcaat

SEQ ID NO: 26662 - DNA, 75 bp, synthetic construct
  source 1..75: mol_type = other DNA
ggcaacaacgcatccgtgagatggtgctgtgcgcactggatgttcatccccgcctgacggcacttcgggttgacc

SEQ ID NO: 26663 - DNA, 75 bp, synthetic construct
  source 1..75: mol_type = other DNA
actggccgggatgattaaacaggcgtggtgcagtgccctgggagtggatgccggacgttatgacacgctggcaca

SEQ ID NO: 26664 - DNA, 75 bp, synthetic construct
  source 1..75: mol_type = other DNA
tccgtgtgaccaggttgaatccgcggtcgcgtggaaatacggcgttgagcgtcaggacggcccgactgcgcttat

SEQ ID NO: 26665 - DNA, 75 bp, synthetic construct
  source 1..75: mol_type = other DNA
gatatgattaagacatctgaagagacaaataaagcatacagaaaaacaatactggagaaagatgaaatcgtaatg

SEQ ID NO: 26666 - DNA, 75 bp, synthetic construct
  source 1..75: mol_type = other DNA
aaacggaaaagttcgaattattcctgtctctgatgaagttgttagtgagatcaaaacaaagaaatccggcctttt

SEQ ID NO: 26667 - DNA, 75 bp, synthetic construct
  source 1..75: mol_type = other DNA
cctgataaaaggccatatcgtgctggttgaacgaccggaagagccgttaatgtcgttaaaagatttggcgatgga

SEQ ID NO: 26668 - DNA, 75 bp, synthetic construct
  source 1..75: mol_type = other DNA
gggattgcgccattagcaggtagtgaatcggacatttgcgaactgcaaaagatgtattttcttccggctattcgc

SEQ ID NO: 26669 - DNA, 75 bp, synthetic construct
  source 1..75: mol_type = other DNA
ttggtatcaacttcgctctgggtgtggctaccggtctgaccatggagttccagttcgggactaactggtcttact

SEQ ID NO: 26670 - DNA, 75 bp, synthetic construct
  source 1..75: mol_type = other DNA
tggccacctggtgtttaccaaaacctacacatcgaaggccgcatatgtgggctatcgccacgaatgcgcctacat

SEQ ID NO: 26671 - DNA, 75 bp, synthetic construct
  source 1..75: mol_type = other DNA
ttttacctcatggcaaaaagtcacggattcagtgtgatgatgacgaaggcattatgatagacagttgtgtggctc

SEQ ID NO: 26672 - DNA, 75 bp, synthetic construct
  source 1..75: mol_type = other DNA
atgtgtgcgctggatcgtagagaaaggccacttaacagtcaatctgtaaataaatacatccttaacgttcagaat

SEQ ID NO: 26673 - DNA, 75 bp, synthetic construct
  source 1..75: mol_type = other DNA
cagcggacgggaggcactggatgacctggtacgtcctttttatctgctggaggggcgcaacgttcctgacttccg

SEQ ID NO: 26674 - DNA, 75 bp, synthetic construct
  source 1..75: mol_type = other DNA
agcagggaccatcgctggctgaacttaataaaaaagttcgtgagatactgaaaactccggcatggagaacgctgg

SEQ ID NO: 26675 - DNA, 75 bp, synthetic construct
  source 1..75: mol_type = other DNA
cttcgctacatttcatcgccaaatatcgtctaccgggcgtcgggttactggcggcatcgccaatgcccaggcctg

SEQ ID NO: 26676 - DNA, 75 bp, synthetic construct
  source 1..75: mol_type = other DNA
agccaattgccgaaatgatgtacccgaatccagctgtagaggaattaaaagctatcgctgacaaaatgtgtttaa

SEQ ID NO: 26677 - DNA, 75 bp, synthetic construct
  source 1..75: mol_type = other DNA
ccccgcctgccctcttccgaaggcgactggtcgcatgtattccaggatgtgacgtggggtgaaagcgatggataa

SEQ ID NO: 26678 - DNA, 75 bp, synthetic construct
  source 1..75: mol_type = other DNA
taaacaaggtggactggtcggcagtctgaaaattggctgttctcccgtcgccactgactgcgtatcccaggcgat

SEQ ID NO: 26679 - DNA, 75 bp, synthetic construct
  source 1..75: mol_type = other DNA
aagccacgcagtgaaatgggtgtgacttgtgttggtcgccagaaaatgaaattaggcagcaaaccacttatttga

SEQ ID NO: 26680 - DNA, 75 bp, synthetic construct
  source 1..75: mol_type = other DNA
ccgtgcgtagcctcaataatcctattgcatcggcctatctccaagtacttttgctcactggtgctcggcgtgaag

SEQ ID NO: 26681 - DNA, 75 bp, synthetic construct
  source 1..75: mol_type = other DNA
ccttcgaaagacttcgcagattcaccttaccggaagggaaaaaacaaacttttctttgggatgcagatgtaacaa

SEQ ID NO: 26682 - DNA, 75 bp, synthetic construct
  source 1..75: mol_type = other DNA
gcgtattattactgtgcttttcgtccccattaatttctcaggctgcgacactggacgtacgtggtggatatcgta

SEQ ID NO: 26683 - DNA, 75 bp, synthetic construct
  source 1..75: mol_type = other DNA
cagcaatattatgttttccatgggggctgccatgtcgctgggtggggtggctcagatgctggccccgaaggcaaa

SEQ ID NO: 26684 - DNA, 75 bp, synthetic construct
  source 1..75: mol_type = other DNA
cctcgctggacaatatgattgctcagggtaatcctgtgccggtgccatacggtgaaatgctggttggttcccgac

SEQ ID NO: 26685 - DNA, 75 bp, synthetic construct
  source 1..75: mol_type = other DNA
aatggtgagcttctatggctggaaccgcgtcgatcgctttatggccgcctggaaaaatgcgggattcagcgttgt

SEQ ID NO: 26686 - DNA, 75 bp, synthetic construct
  source 1..75: mol_type = other DNA
atggtgagcttctatggctggaaccgcgtcgatcgctttatggccgcctggaaaaatgcgggattcagcgtggtt

SEQ ID NO: 26687 - DNA, 75 bp, synthetic construct
  source 1..75: mol_type = other DNA
agccaggacgcccacggcagcaagtacagataacggcaaacagaacacctatttctcctcactggataacatggt

SEQ ID NO: 26688 - DNA, 75 bp, synthetic construct
  source 1..75: mol_type = other DNA
cgcgtctggcaggagccaaaagtggcggtgtgtttcaggctgtgctgggggcggctgttatggcggttgctatat

SEQ ID NO: 26689 - DNA, 75 bp, synthetic construct
  source 1..75: mol_type = other DNA
gtgaaaacgggagccgaagccatccgggcgctggccacgcagctaccgtcgtttcgccagaaactgaatgagggc

SEQ ID NO: 26690 - DNA, 75 bp, synthetic construct
  source 1..75: mol_type = other DNA
gcccgtcttaatgaaccgctggcaaatggtgctgtgatccatatcgtgccgcgtctggcaggagccaaaagtggc

SEQ ID NO: 26691 - DNA, 75 bp, synthetic construct
  source 1..75: mol_type = other DNA
ggtgaaatgcgtgtggggtcacgggtaatttcgcaggaaatcagcacggcagacgaaggggatggtggtgaaatc

SEQ ID NO: 26692 - DNA, 75 bp, synthetic construct
  source 1..75: mol_type = other DNA
gcggctgtatcgggcatgtatgcggcaggggccagtatgatcctgggcggtgtggcgcagatgctggcaccgaaa

SEQ ID NO: 26693 - DNA, 75 bp, synthetic construct
  source 1..75: mol_type = other DNA
gagtattctgttcctgattgtggtgtacagcatcatcttctacggtttcaaaacctggctgaaggtgcgtaacag

SEQ ID NO: 26694 - DNA, 75 bp, synthetic construct
  source 1..75: mol_type = other DNA
cgagggtatccgcgccaaaatgcgcagcctggtcagtcagggctatctcattggtggtgattgctggctggatga

SEQ ID NO: 26695 - DNA, 75 bp, synthetic construct
  source 1..75: mol_type = other DNA
tttctgctgatgtgttctgggatctgcaggacacggcaacagatgcgggactgctgaaccagaacgacgtcacca

SEQ ID NO: 26696 - DNA, 75 bp, synthetic construct
  source 1..75: mol_type = other DNA
ccgcgacggtttccgcttctggggtaaccgtacctgctctgatgacccgctgttcctctttgaaaactacacccg

SEQ ID NO: 26697 - DNA, 75 bp, synthetic construct
  source 1..75: mol_type = other DNA
tggcccagcagatcctgatggatcgtttccccgagagtattcagcggatcctcgccaaccaactgggtctggatt

SEQ ID NO: 26698 - DNA, 75 bp, synthetic construct
  source 1..75: mol_type = other DNA
gcaggacccggcaaccgatgcaggtctgctgaaccagaacgacgtcaccacacttgtgcgtaaagacggtttccg

SEQ ID NO: 26699 - DNA, 75 bp, synthetic construct
  source 1..75: mol_type = other DNA
ggatatcgactggcccgaatcgaatgacgacctttggaaagatggtgaagaaggtgcttatgcgatgggttatga

SEQ ID NO: 26700 - DNA, 75 bp, synthetic construct
  source 1..75: mol_type = other DNA
aaaaaaatgcagctacctacgtttatctgaacggtacgcgcctgacagtagaacttccgtaccagaccgttcgcg

SEQ ID NO: 26701 - DNA, 75 bp, synthetic construct
  source 1..75: mol_type = other DNA
gcagaagtctcatccataaccaagcccggtgcagaaattcatgagtatcagcctacccctggcgatattaaacgt

SEQ ID NO: 26702 - DNA, 75 bp, synthetic construct
  source 1..75: mol_type = other DNA
attgtgttacgagaggtcaagaaatgacccaagcaattgctatcgctcaattcggtgatgatagtcctgaagctc

SEQ ID NO: 26703 - DNA, 75 bp, synthetic construct
  source 1..75: mol_type = other DNA
caagtgtcattttaatataacaaaacaatgtttttacgcattacccatatacccacttcaacaaaacagtattta

SEQ ID NO: 26704 - DNA, 75 bp, synthetic construct
  source 1..75: mol_type = other DNA
tgaccttatcgcgatgaacaaggccgcgcagaaggtctacacctcaatggaaattcagccgaactttgccaacac

SEQ ID NO: 26705 - DNA, 75 bp, synthetic construct
  source 1..75: mol_type = other DNA
tgcctgcgccgcagattgtcgatgtgccggactttgagacgctgcttgccgaacgcaaggccgaatttgttgcgc

SEQ ID NO: 26706 - DNA, 60 bp, synthetic construct
  source 1..60: mol_type = other DNA
atggagatcggttcgtgtcactttcacagaaccgtttttaaattaccttcactgatctcc

SEQ ID NO: 26707 - DNA, 75 bp, synthetic construct
  source 1..75: mol_type = other DNA
aaatccagtgctgataatgcagcgattaaagaaggtgagtttactgcggttactaacttcaatctggcctacgaa

SEQ ID NO: 26708 - DNA, 75 bp, synthetic construct
  source 1..75: mol_type = other DNA
gtaactcaaggtttattacaggtattcgccttggcggtctgtcatctgttcagacatggaatggtcccggctggt

SEQ ID NO: 26709 - DNA, 75 bp, synthetic construct
  source 1..75: mol_type = other DNA
ctgaaatgcataaaaaaatgatgaaagctaaacccggagctaccaacgaaacagcaaagtcattttctgaaatga

SEQ ID NO: 26710 - DNA, 75 bp, synthetic construct
  source 1..75: mol_type = other DNA
gtgaagtccgcaaccagaatggaagcgagcagcagcaaaaacaaatgaaagatgcatttgttaagctgattcact

SEQ ID NO: 26711 - DNA, 75 bp, synthetic construct
  source 1..75: mol_type = other DNA
cggtagctatggcagtggtgtcttttggtgcaaatgcagctccacaggggcagggaaaagtaacttttaacggaa

SEQ ID NO: 26712 - DNA, 75 bp, synthetic construct
  source 1..75: mol_type = other DNA
ttcatccgaaagatgagcaggaagccgtgatccgaacgctggaactggaatctgaacccgtcactaaattgttgc

SEQ ID NO: 26713 - DNA, 75 bp, synthetic construct
  source 1..75: mol_type = other DNA
gcacgggcggtgatgctggcctgtgccgccggtaatgaccttgatgtgattggtgccaattacaacaccacgcgc

SEQ ID NO: 26714 - DNA, 75 bp, synthetic construct
  source 1..75: mol_type = other DNA
cttatcccgccgaacagcgtgaagccgtttccgccgcgctggagctggaatcggaacccctgaacgttatcgccc

SEQ ID NO: 26715 - DNA, 75 bp, synthetic construct
  source 1..75: mol_type = other DNA
gacaattgcaggaatgtttcaatttgcggctgataacggctatatcgtgtcaaacccatttaacggcctgacacc

SEQ ID NO: 26716 - DNA, 75 bp, synthetic construct
  source 1..75: mol_type = other DNA
ttgcaagatacggttataccggagcagcccgccctcagggggactggcagacatccgcagcgctgacccgccagc

SEQ ID NO: 26717 - DNA, 75 bp, synthetic construct
  source 1..75: mol_type = other DNA
agaggaagcctttctggtggataaaatcatcattatggggcgtcccgatgaggaagagacgctgttacgtgtgga

SEQ ID NO: 26718 - DNA, 75 bp, synthetic construct
  source 1..75: mol_type = other DNA
tgttccgccagtgcgacgacaactggaaggggcgaaacacccgcaagggccaacgccaattgaacggctgaaaca

SEQ ID NO: 26719 - DNA, 75 bp, synthetic construct
  source 1..75: mol_type = other DNA
actcgcggagatgattacttcggacaggacttcacattttttgaagccttaagaacggtcgatcggttaatgact

SEQ ID NO: 26720 - DNA, 75 bp, synthetic construct
  source 1..75: mol_type = other DNA
ccggccctgtctggcagctcagtgagcgggtcagtctctatggcatggccgggatggcgtacacccgctggtctg

SEQ ID NO: 26721 - DNA, 75 bp, synthetic construct
  source 1..75: mol_type = other DNA
ttatcctctgtcaacatcttatcgcaaataccgagttcagctatttggcactccctgaaaattataaccgtttgt

SEQ ID NO: 26722 - DNA, 75 bp, synthetic construct
  source 1..75: mol_type = other DNA
ttgatggcggaagtcagagcacaaaagtggtgatgtacgatctggaaggtaacgtggtttgcgaaggcaaaggct

SEQ ID NO: 26723 - DNA, 75 bp, synthetic construct
  source 1..75: mol_type = other DNA
cgccgctatcgtgaatgcgaaacgccttgaactgaaacctgctactgatacagaagctgccatcatggagagcga

SEQ ID NO: 26724 - DNA, 75 bp, synthetic construct
  source 1..75: mol_type = other DNA
tatgtccccttctccagctttcgtcaccggggcgggatgctgcgccacgatgcgccggaacgctattaccacacg

SEQ ID NO: 26725 - DNA, 75 bp, synthetic construct
  source 1..75: mol_type = other DNA
gccaacgctttgcgctggtgcgtaaatgaaatggaacgtcgttataagctgatgtccgccctaggtgtgcgtaat

SEQ ID NO: 26726 - DNA, 75 bp, synthetic construct
  source 1..75: mol_type = other DNA
tgcgtgagattgctaataaagccagagttaccaccattcttcagagtaaggcctggaaagatacccagcgaatac

SEQ ID NO: 26727 - DNA, 75 bp, synthetic construct
  source 1..75: mol_type = other DNA
agccaccgaactgtttgccgatgagcgtttcgatggcattcccgaaaaagtcatggataccacaccagaggatat

SEQ ID NO: 26728 - DNA, 75 bp, synthetic construct
  source 1..75: mol_type = other DNA
acagcgcatgcacaccacttcaggatcgtttggccgacgcatcaactgagtttgatgttggtcagcaacatttgt

SEQ ID NO: 26729 - DNA, 75 bp, synthetic construct
  source 1..75: mol_type = other DNA
gaagaaaatctacgctgcattcaagaaagcgcaggaaaccaaaggcaaagcgacggtaatccttgctcataccat

SEQ ID NO: 26730 - DNA, 75 bp, synthetic construct
  source 1..75: mol_type = other DNA
gccaaccctgctgggggataagcgtattgagggctctgtatggccaaaatccattcgcggctcgacgcctaaaat

SEQ ID NO: 26731 - DNA, 75 bp, synthetic construct
  source 1..75: mol_type = other DNA
agcaattcgcacgtcattcccgcgctgctgcgccgcttccatgaagccgcccagcagaatgcatctgatgtggtg

SEQ ID NO: 26732 - DNA, 75 bp, synthetic construct
  source 1..75: mol_type = other DNA
cagttgtttcagtttgaacccagggaggtcagacggatttttgctggcgagtacgaaatccgttacgaacttaat

SEQ ID NO: 26733 - DNA, 75 bp, synthetic construct
  source 1..75: mol_type = other DNA
aggtcagacggatttttgctggcgagtacgaaatccgttacgaacttaatggccagactatttatgtattgcgcc

SEQ ID NO: 26734 - DNA, 75 bp, synthetic construct
  source 1..75: mol_type = other DNA
tatgcccgtatgaaagccgatcccacgcctgcggatgaagccacgtcgtatgccatccgttttcctgatgatccg

SEQ ID NO: 26735 - DNA, 75 bp, synthetic construct
  source 1..75: mol_type = other DNA
gcgcctgaaggcgaagagccggagcctggacacagcgcagaaggttgttgtgggtgcagcattgctggcaaaggt

SEQ ID NO: 26736 - DNA, 75 bp, synthetic construct
  source 1..75: mol_type = other DNA
atggcagctaactatctgcatggtcccgaaaccattgaggtggaaaacggtgcccgcccggttaaaacggtgaaa

SEQ ID NO: 26737 - DNA, 75 bp, synthetic construct
  source 1..75: mol_type = other DNA
gaagatatagatgccggagtatcgctcagcgatgcggtgaactttctggtcgaaaaatacgaactggttcgaatc

SEQ ID NO: 26738 - DNA, 75 bp, synthetic construct
  source 1..75: mol_type = other DNA
cagcagtatatcgacactggtgccgtattttgcggaaacctgacattgatgaaagtgaaaggtgatggtgcagca

SEQ ID NO: 26739 - DNA, 75 bp, synthetic construct
  source 1..75: mol_type = other DNA
aaggctcgaacgccgcctcggctgaaattgaccgcgtatcaacgctggaaatgtgccggattatcaacgatgaag

SEQ ID NO: 26740 - DNA, 75 bp, synthetic construct
  source 1..75: mol_type = other DNA
catctgccctgaaggcggcggcgaagatattttcgctcattattctaccattcagatggatggttacagaacgct

SEQ ID NO: 26741 - DNA, 75 bp, synthetic construct
  source 1..75: mol_type = other DNA
ggcatgtttgccgcaggtctgatcttgtatattgcagtcaaaccagacgtacatcttgaccatattcttttcggc

SEQ ID NO: 26742 - DNA, 75 bp, synthetic construct
  source 1..75: mol_type = other DNA
gcgaaacgccgcgcgttgtttataattcgagaacggataagccgtggccggtggcgctttatttgacgcctgtga

SEQ ID NO: 26743 - DNA, 75 bp, synthetic construct
  source 1..75: mol_type = other DNA
atgagcggcaatatcgaacataccggcgggtcactgtcgtctaatggcaaggtactccacacccataaacacccg

SEQ ID NO: 26744 - DNA, 75 bp, synthetic construct
  source 1..75: mol_type = other DNA
aactcgcgcgcgcactgcgcaacatgattcgcaccggcattatcgtcgaaaccgaccttaacgccggtcgctgcc

SEQ ID NO: 26745 - DNA, 75 bp, synthetic construct
  source 1..75: mol_type = other DNA
ccgccaacactgatggcgcagtggtattttggtgatgccagcagcaaattccgtccttacgttggtgcaggtatt

SEQ ID NO: 26746 - DNA, 75 bp, synthetic construct
  source 1..75: mol_type = other DNA
gcagatgcagccagcgctatggatgtcggcctttccacaatgacgcgatgggtgaaacaattacgtgatgagcgg

SEQ ID NO: 26747 - DNA, 75 bp, synthetic construct
  source 1..75: mol_type = other DNA
gataggctacctggcgaagcagtccgtattcgaacctggcaatattgcgcagtggattgcacgaaatctgatgag

SEQ ID NO: 26748 - DNA, 75 bp, synthetic construct
  source 1..75: mol_type = other DNA
catcattaatgatgcaaaaaaatcgtcaatattcgataaatacgcgattgttgttgagcatcaacttcgtggctg

SEQ ID NO: 26749 - DNA, 75 bp, synthetic construct
  source 1..75: mol_type = other DNA
accctggacacaccggaagtggtctgcactaacaaactgactaccggcacgctggaagtgcagaagggcgggacg

SEQ ID NO: 26750 - DNA, 75 bp, synthetic construct
  source 1..75: mol_type = other DNA
gggatgccggagtatatcggtgggttgctgtcggtgagtctgtcgaactcagcggatacgttccgcaagctctac

SEQ ID NO: 26751 - DNA, 75 bp, synthetic construct
  source 1..75: mol_type = other DNA
gatctggaaagaatgttgcacctgttcagcggtaaaccaatccccgacaaccggggaaacatcacccttcgtctg

SEQ ID NO: 26752 - DNA, 75 bp, synthetic construct
  source 1..75: mol_type = other DNA
tgagctggaattataaaaccaactctccctgtaaatttggaagtaaaatcattatcaacaatctggtgagatggg

SEQ ID NO: 26753 - DNA, 75 bp, synthetic construct
  source 1..75: mol_type = other DNA
ggctccgcgcatatcacgttcagaaaaccagaactggttgacaggcttaatgatattattgccagacactatcct

SEQ ID NO: 26754 - DNA, 75 bp, synthetic construct
  source 1..75: mol_type = other DNA
gacaggccattgcgaaactggctgaacactacggcatcatgtttttttaccgggggcaggaccccatcgacgggc

SEQ ID NO: 26755 - DNA, 75 bp, synthetic construct
  source 1..75: mol_type = other DNA
gccgacgacgcactcaattctgagtggataagccacggtgcaatctggaataacccaccgtacagcaatatcagg

SEQ ID NO: 26756 - DNA, 75 bp, synthetic construct
  source 1..75: mol_type = other DNA
caacaacaatcaagttggcatggaatgacaatgggaaaatctgtaagtcgttgtcgcaaaactcatttcgtcatg

SEQ ID NO: 26757 - DNA, 75 bp, synthetic construct
  source 1..75: mol_type = other DNA
tctgcgtctgcgcggctggcaggttccggccttcactctcggcggtgaagccaccgacatcgtggtgatgcgcat

SEQ ID NO: 26758 - DNA, 75 bp, synthetic construct
  source 1..75: mol_type = other DNA
caactcaacaagaagcattcgaatgtggttacctgcgctctggcaaataaactggctcgaattgcctgggcaatc

SEQ ID NO: 26759 - DNA, 75 bp, synthetic construct
  source 1..75: mol_type = other DNA
ataatttaatggcgaaacatggtgtcagcgatgagcatatcgtgatgcgtgtaacaggctgcccgaacggttgtg

SEQ ID NO: 26760 - DNA, 75 bp, synthetic construct
  source 1..75: mol_type = other DNA
agaccagacaggattctggctggcagctattgatgatacccgcatggattgtcattcaatagcttattatgatat

SEQ ID NO: 26761 - DNA, 75 bp, synthetic construct
  source 1..75: mol_type = other DNA
gccaagccgggagcgcaagcggattactaccgtagtgttcttgttgaaggtggcattgtagaaattaccggagaa

SEQ ID NO: 26762 - DNA, 75 bp, synthetic construct
  source 1..75: mol_type = other DNA
ttcgacggaaacagtgtcagcgctgattttatggataacagggaacagcctggtatgcaggaaagggagtcattc

SEQ ID NO: 26763 - DNA, 75 bp, synthetic construct
  source 1..75: mol_type = other DNA
gacgggcagaacaggctgaagccagcggtaacctgcaggtgagcgtggaagaccttgtcagaaccggcgcgtttc

SEQ ID NO: 26764 - DNA, 75 bp, synthetic construct
  source 1..75: mol_type = other DNA
ccgcagcggctgtaaagccccgtcgtcatacccgtttcagacgcgaagacatccccgcgccggaaattgaccccg

SEQ ID NO: 26765 - DNA, 75 bp, synthetic construct
  source 1..75: mol_type = other DNA
agcggtattttttctgcaatgagctgaatgaaaaaggggagccggtgacctggcaggggcgtgaatatcaggcgt

SEQ ID NO: 26766 - DNA, 75 bp, synthetic construct
  source 1..75: mol_type = other DNA
acatatgtacgttttaacagcgggttaaatttactggggtggcaactgcattctgatgccagtttcagtaaaaca

SEQ ID NO: 26767 - DNA, 75 bp, synthetic construct
  source 1..75: mol_type = other DNA
gtcaccgcgggtggtgctctgggaaatcgacctgacggtgcagggcggtgagcggtattttttctgcaatgagct

SEQ ID NO: 26768 - DNA, 75 bp, synthetic construct
  source 1..75: mol_type = other DNA
atgaaataccacgccagtgcgtcactcccggcgattacgttatgtatcagggaagaacatatgttgcatctgtca

SEQ ID NO: 26769 - DNA, 75 bp, synthetic construct
  source 1..75: mol_type = other DNA
cggctaaacgtgacggtatcaaaaagattcgtggtgccgagacgtttgcggtacataccgacagttatatgaaac

SEQ ID NO: 26770 - DNA, 75 bp, synthetic construct
  source 1..75: mol_type = other DNA
agtaaaacatctctggattttagctcatatattattgaggctataagagagaagcttgaacgtgatggtgcaata

SEQ ID NO: 26771 - DNA, 75 bp, synthetic construct
  source 1..75: mol_type = other DNA
gtcacgtcgctgtttttgcagccggtgccgtggcgcagacgggcggcggctctggtagtgatggtggcgacgttt

SEQ ID NO: 26772 - DNA, 75 bp, synthetic construct
  source 1..75: mol_type = other DNA
ggcgtcgctgtttttccggctgatacgtacggcctgccgtcagcgttttgaggggcgggaaccatgtcaaagctg

SEQ ID NO: 26773 - DNA, 75 bp, synthetic construct
  source 1..75: mol_type = other DNA
gctgccgataacgagcaggaacagctgcgccgcgaggaattgagtgaacaggtctgggagcgttatttctttaat

SEQ ID NO: 26774 - DNA, 75 bp, synthetic construct
  source 1..75: mol_type = other DNA
gctgccgataacgagcaggaacagctgcgccgcgaggcactgagtgatcaggtctgggagcgttatttctttaat

SEQ ID NO: 26775 - DNA, 75 bp, synthetic construct
  source 1..75: mol_type = other DNA
ttctggcagatgtcagcgcccagccttctcatatcagcaagccgctgatgcaacgtatcgaatacttcagcagcc

SEQ ID NO: 26776 - DNA, 75 bp, synthetic construct
  source 1..75: mol_type = other DNA
cttatgcggttatggtcatcaaatcaacggttcccgttggttttaccgcagcgatgcataagaaatatcgtactg

SEQ ID NO: 26777 - DNA, 75 bp, synthetic construct
  source 1..75: mol_type = other DNA
tcaaggcagggttaagacgtaagatgcgaaaagcagccatggacagaaactatctggcgtcagtccttgcgggga

SEQ ID NO: 26778 - DNA, 75 bp, synthetic construct
  source 1..75: mol_type = other DNA
cgcaaaaacatggctgcgtgcgtgaggcgatgattatcacgtccgcgctctccattcaggatccgcgcgagcgtc

SEQ ID NO: 26779 - DNA, 75 bp, synthetic construct
  source 1..75: mol_type = other DNA
cggctaaataaagcctttgaggaaaaatttccgctgaaagaattaaataatccagagcatgacagttacgcaatg

SEQ ID NO: 26780 - DNA, 75 bp, synthetic construct
  source 1..75: mol_type = other DNA
ttctggactgcggtcgagattttactgaaagttccgctggcgcacgaacactggtcgttggtctgcagcccgaaa

SEQ ID NO: 26781 - DNA, 75 bp, synthetic construct
  source 1..75: mol_type = other DNA
attcgctgtaaaaggaaaccaggggcggctaaataaagccttcgaggaaaaatttccgctgaaagaattaaataa

SEQ ID NO: 26782 - DNA, 75 bp, synthetic construct
  source 1..75: mol_type = other DNA
ctgacggaaaatattggcggtaaagccgccccggactgggcgatgaaacagaattttcgctgtggttgctggatg

SEQ ID NO: 26783 - DNA, 75 bp, synthetic construct
  source 1..75: mol_type = other DNA
aaaaaacgaaagtcatccagagcctgaggtacggacactgccagtctgacctgttaaaggccgcagggctggcca

SEQ ID NO: 26784 - DNA, 75 bp, synthetic construct
  source 1..75: mol_type = other DNA
agcgacatcatcctgataaacgcagtgcccgtgcgcagcgcgatgactggctgaagaaagagatactgcgcgtat

SEQ ID NO: 26785 - DNA, 75 bp, synthetic construct
  source 1..75: mol_type = other DNA
gtgacagatatcaccgaattcagggctggcggacaaaaactgtacctgtccccgatacttgatttgtttaacggg

SEQ ID NO: 26786 - DNA, 75 bp, synthetic construct
  source 1..75: mol_type = other DNA
cttccctgccggaaaaaatcaggaaatgccctgtttatttccatgatgacagaacaaacagaagcaacggagata

SEQ ID NO: 26787 - DNA, 75 bp, synthetic construct
  source 1..75: mol_type = other DNA
gccgtgaggcgttttatgatgttgccagcgtgatagacaatagggttaacaatgcaattagccagcttacaaacg

SEQ ID NO: 26788 - DNA, 75 bp, synthetic construct
  source 1..75: mol_type = other DNA
attcgaacgctggaaagctatcgacaccagggataagcgtgaaaaattcacggcgctgattccggcaattatgga

SEQ ID NO: 26789 - DNA, 75 bp, synthetic construct
  source 1..75: mol_type = other DNA
tcatatacaccaatacatgtgaaaagaaagtcatctgtatcccggcaacagaagatattaacattgcgattatgc

SEQ ID NO: 26790 - DNA, 75 bp, synthetic construct
  source 1..75: mol_type = other DNA
atcctgccgtagtggatcgtgaaactgacgaacttatagaaaaagcaattgctttcaagcttgcgtatcgacagc

SEQ ID NO: 26791 - DNA, 75 bp, synthetic construct
  source 1..75: mol_type = other DNA
cagcctactacgatactgaacgggatattgttcagttacaggctgatccccgcctttttgaactgtaccagtttg

SEQ ID NO: 26792 - DNA, 75 bp, synthetic construct
  source 1..75: mol_type = other DNA
tccggcagtgcagcacctcacggtggaggtgagcgcggatgatggccagtatctggcgcaggcgaaatgggacac

SEQ ID NO: 26793 - DNA, 75 bp, synthetic construct
  source 1..75: mol_type = other DNA
acgactatgccgggaccatgaccggcggacgtgtcctgtccatcgatgccgccagccgcaccctgacactggacc

SEQ ID NO: 26794 - DNA, 75 bp, synthetic construct
  source 1..75: mol_type = other DNA
acaggattgcgatgattaatcctgcgaatggcaacacaaagccgatgtttgttggtcagggcgatcagatattca

SEQ ID NO: 26795 - DNA, 75 bp, synthetic construct
  source 1..75: mol_type = other DNA
ctggatgcgctggagcaggcgttgtgggcccgccgtccgtccggcaccatccatcacagcgataaaggctctcag

SEQ ID NO: 26796 - DNA, 75 bp, synthetic construct
  source 1..75: mol_type = other DNA
atcattgatgtgtttgccggatatatcgtgggatggcgggtctcatcgtccatggaaacgacattggtgctggat

SEQ ID NO: 26797 - DNA, 75 bp, synthetic construct
  source 1..75: mol_type = other DNA
ctgattttacctgggtaagcacatggcagggcttcgtttatgtggcgttcatcattgatgtgttcgccggataca

SEQ ID NO: 26798 - DNA, 75 bp, synthetic construct
  source 1..75: mol_type = other DNA
ctggttgaggagttgcgcgaacgtggcgttaattttcgcagcctgacggatgctattgataccagcacaccgatg

SEQ ID NO: 26799 - DNA, 75 bp, synthetic construct
  source 1..75: mol_type = other DNA
gcctttacaaagcggaggtaatacaccgtaagagctggaaaaaccggacagaagtggagctggccacactcacgt

SEQ ID NO: 26800 - DNA, 75 bp, synthetic construct
  source 1..75: mol_type = other DNA
gccgacaccctcggctcctgtggttacgtttatctggctgtttatccgacaccagcactcgcaaccacctcataa

SEQ ID NO: 26801 - DNA, 75 bp, synthetic construct
  source 1..75: mol_type = other DNA
ctgaataatctgcaggacacggcaacatctgccttaagtgatatcagtaaaacggtgggagggctgctgtcgtga

SEQ ID NO: 26802 - DNA, 75 bp, synthetic construct
  source 1..75: mol_type = other DNA
ctggatgttgaagtgaatggctttaacggtggtgttctgaacggtgttccttctgcatatcactggtatacggaa

SEQ ID NO: 26803 - DNA, 75 bp, synthetic construct
  source 1..75: mol_type = other DNA
tcgattaccacgaagttcgcaccaaacgcgccattattgagaactcgcgccacgttatgctggttgtcgatcact

SEQ ID NO: 26804 - DNA, 75 bp, synthetic construct
  source 1..75: mol_type = other DNA
aagtaaagaaatcaagaagaggtctcccacgtcatactaaaaacccatttcttaatgatacaagtctacatacaa

SEQ ID NO: 26805 - DNA, 75 bp, synthetic construct
  source 1..75: mol_type = other DNA
agctgtttgagctacgcgaaatgctcgaaacacattccctgcaacactttctcaaccttcccgatgatgaccctc

SEQ ID NO: 26806 - DNA, 75 bp, synthetic construct
  source 1..75: mol_type = other DNA
ctcgatcttttggctcgtgtcgaacgagagctaccggtgcggctcgaccaagagcgcaccgttaacccaggatga

SEQ ID NO: 26807 - DNA, 75 bp, synthetic construct
  source 1..75: mol_type = other DNA
accggtgggggtttcatcttatcaccgggcaacaggccgatcgacttgccgacctggaaagaatgctgcatctgt

SEQ ID NO: 26808 - DNA, 75 bp, synthetic construct
  source 1..75: mol_type = other DNA
ccggtcactggaatacgataattttccggaaatcagcgaagcgaacattctgagtacgtttgagcaactgcacca

SEQ ID NO: 26809 - DNA, 75 bp, synthetic construct
  source 1..75: mol_type = other DNA
ccggaaatcagcgaggcgaatatcctgagcacatttgaacaactgcaccagaacaaagatgaagtgtttgagcga

SEQ ID NO: 26810 - DNA, 75 bp, synthetic construct
  source 1..75: mol_type = other DNA
atgtcaggtatcacaatctcccgtcctgaagtggtcaacgggcatacggacgttatctgttccacctcaatcgga

SEQ ID NO: 26811 - DNA, 75 bp, synthetic construct
  source 1..75: mol_type = other DNA
ggatctgcacacatcactttcaaaaggctggagctgattgacagaattaacgatataatagccaggcactttcct

SEQ ID NO: 26812 - DNA, 75 bp, synthetic construct
  source 1..75: mol_type = other DNA
agatgtcaccacggaaaatggtgatattcagccggagtcaccggtgacggatatgacagacacacaacccgaacc

SEQ ID NO: 26813 - DNA, 75 bp, synthetic construct
  source 1..75: mol_type = other DNA
atgtttctgaaaacagaacaatttgaatataacggtgtgtccgtcacgctttccgaattgtctgcgctgcagcgt

SEQ ID NO: 26814 - DNA, 75 bp, synthetic construct
  source 1..75: mol_type = other DNA
ataagctggcggcaatgggcgcgactgaggagcaggcaggagaaactctgggtttatcgcccgggggcgatacca

SEQ ID NO: 26815 - DNA, 75 bp, synthetic construct
  source 1..75: mol_type = other DNA
tttctgaatcagtgttcaacggctgatcctgctgctatatcgaaaatcatgagtaagttcggtaagattaagggg

SEQ ID NO: 26816 - DNA, 75 bp, synthetic construct
  source 1..75: mol_type = other DNA
gtgacgccctgtttcggggcacgtctggtgcaggagggcaatcagttgcattaccttgccgaccgcgccggtatc

SEQ ID NO: 26817 - DNA, 75 bp, synthetic construct
  source 1..75: mol_type = other DNA
aacccgcgttttctgtctgatgacccggatgcggttgcggacctgtctgcatttacacaggggcaggagcttccg

SEQ ID NO: 26818 - DNA, 75 bp, synthetic construct
  source 1..75: mol_type = other DNA
tagcagagcgtgatgtgtccgttttacaggcatttggtgtacgaatggaattcacccgcggtgatatgctgaagg

SEQ ID NO: 26819 - DNA, 75 bp, synthetic construct
  source 1..75: mol_type = other DNA
ttaagtgcccaataacattatgcgttccagaaaaaggggtttttgtcaagaacgcactgaactccaacatatgca

SEQ ID NO: 26820 - DNA, 75 bp, synthetic construct
  source 1..75: mol_type = other DNA
cccctgttaaaaaacctcgcctcagcggctggctgctgacctcagtgctgttgctgggcaccatcgctctggtct

SEQ ID NO: 26821 - DNA, 75 bp, synthetic construct
  source 1..75: mol_type = other DNA
gatgctgccctgcagacagctgctgtccaggcaggaaaaaccttcacccgcacactggctgtctacgtcacaacc

SEQ ID NO: 26822 - DNA, 75 bp, synthetic construct
  source 1..75: mol_type = other DNA
cgctgttgccttcttaggtacggcaattgatgctacgcgtactgatgtactggctctgcagagttctgctgcagg

SEQ ID NO: 26823 - DNA, 75 bp, synthetic construct
  source 1..75: mol_type = other DNA
gaactggctggggaatgtctctgatgttcttcgggattcttattgtcggatatggcctgctttattggtggcaca

SEQ ID NO: 26824 - DNA, 75 bp, synthetic construct
  source 1..75: mol_type = other DNA
ctatgagcctgtcatcaacgacagttatcaggcgctggctgagcactatggcacggttattatcccggcccgccc

SEQ ID NO: 26825 - DNA, 75 bp, synthetic construct
  source 1..75: mol_type = other DNA
tcagtggttacaggaatggaaacaaaggagaaatagatatgcaattaagaaagtagcaaaaaatgcagaaagatc

SEQ ID NO: 26826 - DNA, 75 bp, synthetic construct
  source 1..75: mol_type = other DNA
taaaaatattcgcacttcaatatatagcttttcatcagacagagcattatgcatggttggttcctgcgcattgga

SEQ ID NO: 26827 - DNA, 75 bp, synthetic construct
  source 1..75: mol_type = other DNA
cgtggcatatttaggcgtttaaccacctatatcgtcgattttttcaaagagaaatttatctgggccaagaaggaa

SEQ ID NO: 26828 - DNA, 75 bp, synthetic construct
  source 1..75: mol_type = other DNA
tcggaacccctgaacgttatcgcccagacaacagcgtttcgtgaaatgctgttacgccagcgggtcaatgagggg

SEQ ID NO: 26829 - DNA, 75 bp, synthetic construct
  source 1..75: mol_type = other DNA
taccggaacccgccatcatcgcggagcctgattttgaggcaattctggctgacacaaaggccatgatgattgcgt

SEQ ID NO: 26830 - DNA, 75 bp, synthetic construct
  source 1..75: mol_type = other DNA
tatcggccacgttgaccaaggtaaaactactctgaccgctgcaatcactaccgtactggctaaaacctacggcgg

SEQ ID NO: 26831 - DNA, 75 bp, synthetic construct
  source 1..75: mol_type = other DNA
tgttctggtttatgaggtcgacagccagtggggaaaagtgtatatcctgcgagtattgcatactgcacagaagtg

SEQ ID NO: 26832 - DNA, 75 bp, synthetic construct
  source 1..75: mol_type = other DNA
aacgtggccgttgtgccgccgatgaagctgaacccgatcatcacccgcgtgttgtttccggcgtttgccaaaatt

SEQ ID NO: 26833 - DNA, 75 bp, synthetic construct
  source 1..75: mol_type = other DNA
cgctgactaatttgagtggaaaggatgtagctggtcttctcgcataccttggtttgggagaattatctctggctg

SEQ ID NO: 26834 - DNA, 75 bp, synthetic construct
  source 1..75: mol_type = other DNA
gctgcacggcaccgggtgcagttttcgatgcctgagtccgatgcggtcacaatgctgaaaaacagacatgcataa

SEQ ID NO: 26835 - DNA, 75 bp, synthetic construct
  source 1..75: mol_type = other DNA
ctccattatgtgcccgatttgcaccgcaagatgctgctggcaaccctctggaacaccggcgcacgtatcaacgag

SEQ ID NO: 26836 - DNA, 75 bp, synthetic construct
  source 1..75: mol_type = other DNA
aataaaggagaagaatattatctgttcttggatgaggtgagaaggaatctgagagttatttattctgcgtatcgt

SEQ ID NO: 26837 - DNA, 75 bp, synthetic construct
  source 1..75: mol_type = other DNA
ctgcgattgatgtcggtaacatgctggcggaaaaaattctgtctggcagtacgcaagaagagattaccgagaaat

SEQ ID NO: 26838 - DNA, 75 bp, synthetic construct
  source 1..75: mol_type = other DNA
gatgcgccgtgcgcggtcggcaccgggtgaaaaccccggttatcagaccggacgcctggctcgttcgattggtta

SEQ ID NO: 26839 - DNA, 75 bp, synthetic construct
  source 1..75: mol_type = other DNA
caatgtgattttcagccagctggtggatgaaatcaccaccgagccggattacgaagcagctctggctgtactgaa

SEQ ID NO: 26840 - DNA, 75 bp, synthetic construct
  source 1..75: mol_type = other DNA
aacacatccgtcgatacatggacaaaagaggggagcagagtaaaacgcaagccaaccatgaaaaaagcagtatgt

SEQ ID NO: 26841 - DNA, 75 bp, synthetic construct
  source 1..75: mol_type = other DNA
ggttcagttgtggtaaaaccgattgagaacaaaggcatttatgcaggaaacccggcaagactgctcagaatatta

SEQ ID NO: 26842 - DNA, 75 bp, synthetic construct
  source 1..75: mol_type = other DNA
gcattcactgacgcagcaatgcagaaaaacaccgtagaagagcttaaacaggcgttcgccaaagcgtggaagatg

SEQ ID NO: 26843 - DNA, 75 bp, synthetic construct
  source 1..75: mol_type = other DNA
tcccgtgaggaggccacggcgctggagtcgtttctggctgagcacgggggctggaaggcctttctgtggacgccg

SEQ ID NO: 26844 - DNA, 75 bp, synthetic construct
  source 1..75: mol_type = other DNA
aatccggatgctcctgatgagcgttgggtaacggacataacctacatcaggacccacgaaggctggctgtatctt

SEQ ID NO: 26845 - DNA, 75 bp, synthetic construct
  source 1..75: mol_type = other DNA
gtgagtctctcgatgcctggactatgcggggaaatcttaaacaaccaaacagtaaaagagaaacgcataattcac

SEQ ID NO: 26846 - DNA, 75 bp, synthetic construct
  source 1..75: mol_type = other DNA
gtttttattcttttttgttgtttctgtcataaccacaattgcatgcggatacactgagaagaataccaccgggaa

SEQ ID NO: 26847 - DNA, 75 bp, synthetic construct
  source 1..75: mol_type = other DNA
aaaagtgacggcatttctgccggaaaatgtactgaccatcggaggtcaatttcagcatgcagagctccgtgatga

SEQ ID NO: 26848 - DNA, 75 bp, synthetic construct
  source 1..75: mol_type = other DNA
ctctcgtactcaaactacgcaagcagtcggtagccgcaacgttgaaagataactcagcattgctgacaggcttat

SEQ ID NO: 26849 - DNA, 75 bp, synthetic construct
  source 1..75: mol_type = other DNA
tgatcaggcatccgatattattactaatcagcgccagattcagacgacagtccagattaaggatggtcagacgtt

SEQ ID NO: 26850 - DNA, 75 bp, synthetic construct
  source 1..75: mol_type = other DNA
aaagcgactgcaggagctgaatgactggctggatgaagaggttatccgttttgaagcctatgacttaggacttaa

SEQ ID NO: 26851 - DNA, 75 bp, synthetic construct
  source 1..75: mol_type = other DNA
actcgccaagttattcgataacgaaaaagacatacaggctattttgacggccaaaacgacgcaggacattttgtc

SEQ ID NO: 26852 - DNA, 75 bp, synthetic construct
  source 1..75: mol_type = other DNA
ttactgcgataccgcaacagctactccggcgaaagcaaagaaaatggctgctctgatagaaaactggactccacc

SEQ ID NO: 26853 - DNA, 75 bp, synthetic construct
  source 1..75: mol_type = other DNA
gtggtcatcggcccttttatcaacgcaagtgcagtcttactgggtggcgttttcggcgcactccttagccaacgc

SEQ ID NO: 26854 - DNA, 75 bp, synthetic construct
  source 1..75: mol_type = other DNA
gattctgtgttttgtctggatggtgagggattcgctttgcggactccggctccagcagggaaacacagtgcttgt

SEQ ID NO: 26855 - DNA, 75 bp, synthetic construct
  source 1..75: mol_type = other DNA
ccgtttttctgaagaggctgcacgggtaaagaaagaactgggtgaaaccagtgaccttgcggatttgatggccgg

SEQ ID NO: 26856 - DNA, 75 bp, synthetic construct
  source 1..75: mol_type = other DNA
gtacggtcagtgccgttgatgccgacagggttcaggcccgcgttcgtctgcctgaatgcgataatctgcgcacaa

SEQ ID NO: 26857 - DNA, 75 bp, synthetic construct
  source 1..75: mol_type = other DNA
atcggtcgtccggaatcctcagcggatatgctcgccagtgcgcagaaggcatttgatgaggcggataaaaaatgg

SEQ ID NO: 26858 - DNA, 75 bp, synthetic construct
  source 1..75: mol_type = other DNA
gcgccagttccgtaacgtgacggcagagcagattgcgtatgttgcacagctgcagcgttccggtgatgaggccgg

SEQ ID NO: 26859 - DNA, 75 bp, synthetic construct
  source 1..75: mol_type = other DNA
acacatccaatactggacgagaccctgaatttgacagataagcccgtgctgatttcatttcccactggtactctt

SEQ ID NO: 26860 - DNA, 75 bp, synthetic construct
  source 1..75: mol_type = other DNA
cacccggtaactggctggtcgtcctgattaacctggtgttctgcgtgctggtgatacgagcacgcgggaacgtat

SEQ ID NO: 26861 - DNA, 75 bp, synthetic construct
  source 1..75: mol_type = other DNA
tacgtgagatagcaaaactggcaacccagggcgaatgggtcgcattcatttcgccgggcactgatacatatgcgg

SEQ ID NO: 26862 - DNA, 75 bp, synthetic construct
  source 1..75: mol_type = other DNA
cggcactgtgggccacgccagtaaaaggtgcgcttctctggggtgtcggtaagatggttgcagccatccgccgaa

SEQ ID NO: 26863 - DNA, 75 bp, synthetic construct
  source 1..75: mol_type = other DNA
ctaagcaacaacagcaagccgcaataaatgccatcctcgcaacaccactcgataaagacaagccagtcaccatcc

SEQ ID NO: 26864 - DNA, 75 bp, synthetic construct
  source 1..75: mol_type = other DNA
ggtcagtgacctgcgcggaaccggagaagaagccggtgcgtgggaaacgtccacgccttacgaatccctgcttgt

SEQ ID NO: 26865 - DNA, 75 bp, synthetic construct
  source 1..75: mol_type = other DNA
gtacaaattaaccatccgcaagtcatccgcaccttgctactggtggctgataaaaacaaacccagcctgcaacgt

SEQ ID NO: 26866 - DNA, 75 bp, synthetic construct
  source 1..75: mol_type = other DNA
ctgcatttgttaagaaagataatagtggcaagaatgtagctgaaggtgccttctcagcagttgcgaatttcaacc

SEQ ID NO: 26867 - DNA, 75 bp, synthetic construct
  source 1..75: mol_type = other DNA
atcctgctctggatatggctggcgcattgacctctgtaaaacgacagcatcgccccgctcttgatctttcacgtc

SEQ ID NO: 26868 - DNA, 75 bp, synthetic construct
  source 1..75: mol_type = other DNA
aaagcgagcacgatgggcgatcgggaagctgaactggcaacgctcgaatttttaaaacagtgggtgcctgcggga

SEQ ID NO: 26869 - DNA, 75 bp, synthetic construct
  source 1..75: mol_type = other DNA
aatccggcgtttcctggttgctggagaaactcggcattgtcagtaaagaggctgcaaaggcgaaactgccggaaa

SEQ ID NO: 26870 - DNA, 75 bp, synthetic construct
  source 1..75: mol_type = other DNA
atggcaaccgcactgcacgtttttatgaaatgcaggatgccatcaaggctgccagcgaacagttgccgatggaaa

SEQ ID NO: 26871 - DNA, 75 bp, synthetic construct
  source 1..75: mol_type = other DNA
gcagcaggtgcttaataaaaatgaattccagctactgcttgggtgtcatgagtataatcagctcaaagaagctga

SEQ ID NO: 26872 - DNA, 75 bp, synthetic construct
  source 1..75: mol_type = other DNA
accatgaacggtggtcgttgggtgaattttaactgggagagctggcggtcaaacgttggacgtcagggtatgtga

SEQ ID NO: 26873 - DNA, 75 bp, synthetic construct
  source 1..75: mol_type = other DNA
ggtgatggaccgtatgaccatgaacggtggtcgttgggtgaattttaactgggagagctggcggtcaaacgttgg

SEQ ID NO: 26874 - DNA, 75 bp, synthetic construct
  source 1..75: mol_type = other DNA
attatggatctggctgccgtgtatttagttgctattgctcgtggtcacattttcaacgatgcaaataagcgaaca

SEQ ID NO: 26875 - DNA, 75 bp, synthetic construct
  source 1..75: mol_type = other DNA
acgtgctatctgaatccaggtcaagctgaaatgtttaatatagctattggatatacgcgttcagttcacgggaat

SEQ ID NO: 26876 - DNA, 75 bp, synthetic construct
  source 1..75: mol_type = other DNA
cgatgagtacgcttcttggcgagcgtgtgatggaccgcatggtcatgaacggtggtcgctgggtgaattttaact

SEQ ID NO: 26877 - DNA, 75 bp, synthetic construct
  source 1..75: mol_type = other DNA
aaattcgaaagggacggtgtctgggaattacgagttgattacggtcctggttacagggtttattattcaatcgaa

SEQ ID NO: 26878 - DNA, 75 bp, synthetic construct
  source 1..75: mol_type = other DNA
tcccggcagcgatgatctgaacgggattaacgtgaaataccgttatgagtttacggacacactggggatggtgac

SEQ ID NO: 26879 - DNA, 75 bp, synthetic construct
  source 1..75: mol_type = other DNA
ccgtctgtgcgcgtgaatgaatggttcagcgcgtatgcgatggcgggtgtggcttacagccgtgtgtcgactttc

SEQ ID NO: 26880 - DNA, 75 bp, synthetic construct
  source 1..75: mol_type = other DNA
cccgaccgaatccgtggccattgatattgcttatgaaggctccggcagtggcgactggcgcactgacggcttcat

SEQ ID NO: 26881 - DNA, 75 bp, synthetic construct
  source 1..75: mol_type = other DNA
agaaaaggcatccatccgcagactcatcttgcttgcttcagcggtgtgctgcaagcggatgcgtacgccgggttc

SEQ ID NO: 26882 - DNA, 75 bp, synthetic construct
  source 1..75: mol_type = other DNA
tgttcatatctttctgacgaacaattcagcgaagcgccgcaggtcatcgatgccctgaaatcagttttcgatcag

SEQ ID NO: 26883 - DNA, 75 bp, synthetic construct
  source 1..75: mol_type = other DNA
agagcacaccccgctgtattgccagtcagaaatatacggccggcaaggtgtggagctgagccgttcactgctgtc

SEQ ID NO: 26884 - DNA, 75 bp, synthetic construct
  source 1..75: mol_type = other DNA
gtctgtctcggaaagaaaaactttatgttctttggcagcgatcacggcggcgagcgtggagcactgttgtacggg

SEQ ID NO: 26885 - DNA, 75 bp, synthetic construct
  source 1..75: mol_type = other DNA
aaaaggcatccatccgcagacccatcttgcggggttcagtggtgtactgcaggcggatgcatacgccgggttcaa

SEQ ID NO: 26886 - DNA, 75 bp, synthetic construct
  source 1..75: mol_type = other DNA
cgtttaacctggtcagactccagcaatacatgaacaaaaagttcaaaatgacggcacaaaaaacgctggatatta

SEQ ID NO: 26887 - DNA, 75 bp, synthetic construct
  source 1..75: mol_type = other DNA
cgaaatcaaccggctgaaggcgctggttgcgaaactgcagcgcatgcagttcggtaaaagctcagaaaaacttcg

SEQ ID NO: 26888 - DNA, 75 bp, synthetic construct
  source 1..75: mol_type = other DNA
cgcgcggctggcgctttcggtgcgcataaccctgcctgatggttcggtaagacccatgattttttatgctgatct

SEQ ID NO: 26889 - DNA, 75 bp, synthetic construct
  source 1..75: mol_type = other DNA
taactaaggccctgctgacagtggtctgtatgctggcggcacctttgacacaggcgatttcggtcggcaatctga

SEQ ID NO: 26890 - DNA, 75 bp, synthetic construct
  source 1..75: mol_type = other DNA
gccgccatttttctgcctaccggcactcaggccaacctggtcgctctgctcagtcactgcgaacgcggcgaagag

SEQ ID NO: 26891 - DNA, 75 bp, synthetic construct
  source 1..75: mol_type = other DNA
atgcgtaaattatgtgctgttattttgtccgcagtagtctggcaggtcgccgctgctacgccagcgagtgcagca

SEQ ID NO: 26892 - DNA, 75 bp, synthetic construct
  source 1..75: mol_type = other DNA
gatgaaatatctgaacctgagcagttgtcagcccggaaaacatcagtacaaaaatgctcgtcaggaacatacctg

SEQ ID NO: 26893 - DNA, 75 bp, synthetic construct
  source 1..75: mol_type = other DNA
atgctggccctgcaactggccgcacagattgcaggcgggccggatctgctggaggtgggcgaactgcccaccggc

SEQ ID NO: 26894 - DNA, 75 bp, synthetic construct
  source 1..75: mol_type = other DNA
catcgacaaggtgactgagcaggggcatggcgtgcttctgttcaccatggagatggcgaacattcagattggtga

SEQ ID NO: 26895 - DNA, 75 bp, synthetic construct
  source 1..75: mol_type = other DNA
cctgacgtcgtggcgatgaccgggactggtaacccgttcctgatgtcgttcttcacccagaccacagacggcaaa

SEQ ID NO: 26896 - DNA, 75 bp, synthetic construct
  source 1..75: mol_type = other DNA
gataatcatctttccaggcgggctctggaggatattccttcacttgcggttccagtgcttcttttactgaatgct

SEQ ID NO: 26897 - DNA, 75 bp, synthetic construct
  source 1..75: mol_type = other DNA
cctggcgtgaatcccgtggggacatcggtaaaggaatggagagcgtaccttcggggggggggcagccaggatatt

SEQ ID NO: 26898 - DNA, 75 bp, synthetic construct
  source 1..75: mol_type = other DNA
cagagcagcatacgtggcgaagaaaatattgtaggaagacagtattctgaactacaaaatcaccataaaacagag

SEQ ID NO: 26899 - DNA, 75 bp, synthetic construct
  source 1..75: mol_type = other DNA
atttgcttctatttatcggcgtaagaaagcgatgctgacgctcgggcaggctgcgctggaagatgcctgggaata

SEQ ID NO: 26900 - DNA, 75 bp, synthetic construct
  source 1..75: mol_type = other DNA
gcaatggaaagctatccggattggcgacctgccgattatccgggattccgaaatccagaacttctgtctgcacgg

SEQ ID NO: 26901 - DNA, 75 bp, synthetic construct
  source 1..75: mol_type = other DNA
cgcgctggtattgattgggaagataatgatgcgcatacggcaagtagtaatactcagtcgagccataatgctcgt

SEQ ID NO: 26902 - DNA, 75 bp, synthetic construct
  source 1..75: mol_type = other DNA
tggtcatgtaactatgcgaaacctgccgatggtccagactatcctgacggggattgctattggtattttcccgct

SEQ ID NO: 26903 - DNA, 75 bp, synthetic construct
  source 1..75: mol_type = other DNA
gccccggccagtaagcgtaccctgatgagtctgctggcatccggcgaagacctggcatcacagggctggcgctat

SEQ ID NO: 26904 - DNA, 75 bp, synthetic construct
  source 1..75: mol_type = other DNA
cagatataaaaatgacaatggtctatgcccatttcgcaccagaacatcttgaagatgctgttactaaaaacccct

SEQ ID NO: 26905 - DNA, 75 bp, synthetic construct
  source 1..75: mol_type = other DNA
gtcaacacaccgctgtttaaaaaatatacattatggattatgacagatgagattgcgccagaatccgggcagatt

SEQ ID NO: 26906 - DNA, 75 bp, synthetic construct
  source 1..75: mol_type = other DNA
tgcccattttgcaccggatcatctggaagatgccgttaccaaaaatccacttcataacctcaactggcatcgcta

SEQ ID NO: 26907 - DNA, 75 bp, synthetic construct
  source 1..75: mol_type = other DNA
gaacatcagtccacgctgagcgcgggctatcttcatgcctcgacgaacgttcccggcagcgatgatcttaacggg

SEQ ID NO: 26908 - DNA, 75 bp, synthetic construct
  source 1..75: mol_type = other DNA
atggttcaaattacatggcaaatctcttactgccggacagcatgtctacaacaagctgctgttgatggttgacgc

SEQ ID NO: 26909 - DNA, 75 bp, synthetic construct
  source 1..75: mol_type = other DNA
cgccgtccatgacagccgtagcaggcttatcgatcagcatacagtcgatatgatcggcaacactatacttgatgc

SEQ ID NO: 26910 - DNA, 75 bp, synthetic construct
  source 1..75: mol_type = other DNA
gtcggcacgtttacggcagacaagttgcgcgtgaccgatatcactaaaaatgcgacttacccggtactgattgac

SEQ ID NO: 26911 - DNA, 75 bp, synthetic construct
  source 1..75: mol_type = other DNA
gcatgtgacagacattaccaaaagtgcgacttacccggtactgatagacagcattgcggtggaagtgaataacgc

SEQ ID NO: 26912 - DNA, 75 bp, synthetic construct
  source 1..75: mol_type = other DNA
atccgaaggcagacctgagcaaagggcagtacggctgtgtcggccagggcttacatattgccaaaaaactgctcc

SEQ ID NO: 26913 - DNA, 75 bp, synthetic construct
  source 1..75: mol_type = other DNA
agttgatgaagctccgacagaatggcatgactggaaaaatcgcattagttacagcaaatcaagacatggccgtgc

SEQ ID NO: 26914 - DNA, 75 bp, synthetic construct
  source 1..75: mol_type = other DNA
cgttgatctgcaagaccctatcgaagttattcctcacttgatagagaaatggcaggccggtgcagatatggttct

SEQ ID NO: 26915 - DNA, 75 bp, synthetic construct
  source 1..75: mol_type = other DNA
gggattccctacgatgatgttgataccggaatcgagcgcatgaatgaaatgacacaacaggcgcaaaaagcactt

SEQ ID NO: 26916 - DNA, 75 bp, synthetic construct
  source 1..75: mol_type = other DNA
gaagaggctgagattgttaaagaaaaggcagaaaaaaacggactgacagtttcaactctgataagaaaaactgtg

SEQ ID NO: 26917 - DNA, 75 bp, synthetic construct
  source 1..75: mol_type = other DNA
gcactgcgcaatttatcgttacagccatgcgaggcgagatcaaacgccgccagcgccgcaagaccaaagaatcag

SEQ ID NO: 26918 - DNA, 75 bp, synthetic construct
  source 1..75: mol_type = other DNA
aaatgctccgtaaacaatacacttccgaattccgcgatgaagcactgaaactcgctgaacgcatcggtgttgccg

SEQ ID NO: 26919 - DNA, 75 bp, synthetic construct
  source 1..75: mol_type = other DNA
ccgatttatgtatcagtgacagatgttcttacccctgcacaggtaaaacaacgtcaggatgaggaaaatcgcctc

SEQ ID NO: 26920 - DNA, 75 bp, synthetic construct
  source 1..75: mol_type = other DNA
tcttataaagatggtgatgtaaccaagcacacaaatgagacatttgatacaagtgaaggcgttgctgttaatctt

SEQ ID NO: 26921 - DNA, 75 bp, synthetic construct
  source 1..75: mol_type = other DNA
aaagacagcaagtgattacctgccacagacaaattggccaacaactcaattaccaccaggatatacttgtgcaga

SEQ ID NO: 26922 - DNA, 75 bp, synthetic construct
  source 1..75: mol_type = other DNA
atgggcgatccgtacttcaaagtcagacccataatcgagcgtcataacatcgctatttttagctctaattacact

SEQ ID NO: 26923 - DNA, 75 bp, synthetic construct
  source 1..75: mol_type = other DNA
aagccatatgtcgatagagtccgttttcctggtgaaatttattatgcttaccggatgccgtacggctgagattcg

SEQ ID NO: 26924 - DNA, 75 bp, synthetic construct
  source 1..75: mol_type = other DNA
attaattacagtggcagtgttcgtaaaaccttaatttcatcttacctgttagccccgcgcggctttgttgaataa

SEQ ID NO: 26925 - DNA, 75 bp, synthetic construct
  source 1..75: mol_type = other DNA
tgtaaagcttttcgccatgacagagatgcgctgttagctgcccgaagtaaattagataaacgctccgataaagaa

SEQ ID NO: 26926 - DNA, 75 bp, synthetic construct
  source 1..75: mol_type = other DNA
aaaccgtattgcgggatgcatctggtgaaaaacgcatcaaaggtgaaaaggacagccgtatgctgatgtccgttg

SEQ ID NO: 26927 - DNA, 75 bp, synthetic construct
  source 1..75: mol_type = other DNA
catttaccttccctgatggtacgagcacggaagatattggcaccgccattgatgagtattttgctggtcaggctg

SEQ ID NO: 26928 - DNA, 75 bp, synthetic construct
  source 1..75: mol_type = other DNA
ccactgggtaaagtcagtaaaaatgcattttcaggtgtaggtagtctggcgtcgccacagaagttcagtattaag

SEQ ID NO: 26929 - DNA, 75 bp, synthetic construct
  source 1..75: mol_type = other DNA
aaaccgacagctatcgtggtggtggcatgatgggggcggtaagtattgatctcggtctggacgactccgcgcttg

SEQ ID NO: 26930 - DNA, 75 bp, synthetic construct
  source 1..75: mol_type = other DNA
ttttttgtgaaatgttaaaaaccccttcagcggggcagttttcattttttacagcgcatcccggcattacacgtg

SEQ ID NO: 26931 - DNA, 75 bp, synthetic construct
  source 1..75: mol_type = other DNA
acccccgaggaaattgtcgtcggcggtgaatattacccggcctcggccatccatttgattgataacctgagagtg

SEQ ID NO: 26932 - DNA, 75 bp, synthetic construct
  source 1..75: mol_type = other DNA
gataatattcttgaccctcttgaaaaaaacatgatttgcaatggactgtttgaaatggcttcgttgttacgcgat

SEQ ID NO: 26933 - DNA, 75 bp, synthetic construct
  source 1..75: mol_type = other DNA
agcgccctcctctggtatatgcctgaccagcgtcaccacatgttgttcgccaccatgtggaataccgggatccgt

SEQ ID NO: 26934 - DNA, 75 bp, synthetic construct
  source 1..75: mol_type = other DNA
ccggtatgacacggaagggtatgtgacggagcatatttctcaggaggaggaagcgtatgcggcagagcgtctgga

SEQ ID NO: 26935 - DNA, 75 bp, synthetic construct
  source 1..75: mol_type = other DNA
ttttgtggggcaggctaataatacaaccattaacggaggaagacagacaattcatgacgggggcatttccaccgg

SEQ ID NO: 26936 - DNA, 75 bp, synthetic construct
  source 1..75: mol_type = other DNA
gacagtcgctatcctcagataagccgaagctggcaggctaactggccgaatcttgccacgttcttcgcttatcca

SEQ ID NO: 26937 - DNA, 75 bp, synthetic construct
  source 1..75: mol_type = other DNA
acgggagacttcccgaagataacagaagatagcccaaaagcatcgtcaaaaaggaatgaggttatttactcttta

SEQ ID NO: 26938 - DNA, 75 bp, synthetic construct
  source 1..75: mol_type = other DNA
tcttaaaaataacactgtcggtattgcttgtggcgatttttctgccaaatgtagcgatgcatgtattgaaaaata

SEQ ID NO: 26939 - DNA, 75 bp, synthetic construct
  source 1..75: mol_type = other DNA
ccgcctgccggggcagcagtatgatgaggagtccggcctgtattacaaccgccaccgctattatgacccgctgca

SEQ ID NO: 26940 - DNA, 75 bp, synthetic construct
  source 1..75: mol_type = other DNA
caaaagtgcctggcgaacagcacttcaggaactgaagatagaaaacttgcattttcatgacctccgtcatgaggc

SEQ ID NO: 26941 - DNA, 75 bp, synthetic construct
  source 1..75: mol_type = other DNA
tgtatgccgtcgattttaatacggatgttctggatgccgaagacagacagaatattgatatttcccggttctccc

SEQ ID NO: 26942 - DNA, 75 bp, synthetic construct
  source 1..75: mol_type = other DNA
taacgggaaatacactgcacaggatgccaccacagcgcgaaaaggtcttgtccagctcagtagcgccaccaacag

SEQ ID NO: 26943 - DNA, 75 bp, synthetic construct
  source 1..75: mol_type = other DNA
atgaacaaaatttttaaagttatctggaatccggcaacaggcagttacaccgttgccagtgaaacggcaaaaagc

SEQ ID NO: 26944 - DNA, 75 bp, synthetic construct
  source 1..75: mol_type = other DNA
tgctggaactgccaaaacccgaaaagcggcttccggcgcaggtgttcagcgaggacgagacgcggcaggtgctac

SEQ ID NO: 26945 - DNA, 75 bp, synthetic construct
  source 1..75: mol_type = other DNA
aaagtgaaatcctggctgaccgggtgagtgaggaaagccgccgctggctggcatcgtgcggcctgaccgtggagc

SEQ ID NO: 26946 - DNA, 75 bp, synthetic construct
  source 1..75: mol_type = other DNA
acaaacagtccgcaggggccgtggtggctgctcggctggtgtgagcgggtgccggaagcggatgaggtgctgccc

SEQ ID NO: 26947 - DNA, 75 bp, synthetic construct
  source 1..75: mol_type = other DNA
gtgcaggccttgctatatcctcactgccggcaatggcttcagtgacctatcaggatattgtgtctgccgcaacca

SEQ ID NO: 26948 - DNA, 75 bp, synthetic construct
  source 1..75: mol_type = other DNA
aggtaaataaaaaggcagaaaaactctggaatatatctctgatcgatcaactgataacggaagtcatacagagct

SEQ ID NO: 26949 - DNA, 75 bp, synthetic construct
  source 1..75: mol_type = other DNA
ggaggatgttgccattctttgtcatttggatccgagcattccatatacacacccaagcctagcgcacacggaaga

SEQ ID NO: 26950 - DNA, 75 bp, synthetic construct
  source 1..75: mol_type = other DNA
tcagcaccggctggtgcactacacgcggacacaatatgcagagccgctggtcgaaagtcgctatctttacgaccc

SEQ ID NO: 26951 - DNA, 75 bp, synthetic construct
  source 1..75: mol_type = other DNA
gcctacctgggacgaaatgaaaaaggcgttctccccggcttcaaaaccgtgatggttgcgccttttagtacggtc

SEQ ID NO: 26952 - DNA, 75 bp, synthetic construct
  source 1..75: mol_type = other DNA
gtcttgaactggggattgatatgggcgcggtggatctggtgattcaggtggcaacgccgctttctgttgccagtg

SEQ ID NO: 26953 - DNA, 75 bp, synthetic construct
  source 1..75: mol_type = other DNA
ggttcttcgtgctcaaatggccgccagtggcggtggagaaattacagtaggcgggcagacggtccgtatcacata

SEQ ID NO: 26954 - DNA, 75 bp, synthetic construct
  source 1..75: mol_type = other DNA
tcgggccgggtttaccccttgaaattgttgaaattgatgtggcaccgccgaagaaaggtgaagtgctggtgaaaa

SEQ ID NO: 26955 - DNA, 75 bp, synthetic construct
  source 1..75: mol_type = other DNA
tcactggacagcctgatgctcaacggagagggtatattgatacaattacagggggctgatattcgcgaaaaaaca

SEQ ID NO: 26956 - DNA, 75 bp, synthetic construct
  source 1..75: mol_type = other DNA
gcaaaaaaggccagcaagggcaggctactgacgcactgaacagggcaaaacaacaggcgggtaacgacgatccgt

SEQ ID NO: 26957 - DNA, 75 bp, synthetic construct
  source 1..75: mol_type = other DNA
taggctactggatcgtcgccggcctgttgctgctgacgctgcagaactactggcaggcggccaagaccgtcgagc

SEQ ID NO: 26958 - DNA, 75 bp, synthetic construct
  source 1..75: mol_type = other DNA
atcccgtatgccacagacccggcaggtaaccgcctgcccgacccggagctgcacccggacagcaccctcagcatg

SEQ ID NO: 26959 - DNA, 75 bp, synthetic construct
  source 1..75: mol_type = other DNA
caaaaaacagcaaaggctggatgaacagcacctatggtggcggctggtatatgtccgattcgtcctggttgcgca

SEQ ID NO: 26960 - DNA, 75 bp, synthetic construct
  source 1..75: mol_type = other DNA
ataatctgcaaaccgttctcggttatgacttgttagccggtcagcgagtgttgcgggagcagattgcccgcctga

SEQ ID NO: 26961 - DNA, 75 bp, synthetic construct
  source 1..75: mol_type = other DNA
tcgattccagccgctgtactggctgtaaaacctgcgaactggcgtgcaaagattttaaagttggttacgtatcgt

SEQ ID NO: 26962 - DNA, 75 bp, synthetic construct
  source 1..75: mol_type = other DNA
attgcgcctgctggcgctgtatgtggagcattactgggcggtggctgcgccgcagaatatggcgcataaaaaacg

SEQ ID NO: 26963 - DNA, 75 bp, synthetic construct
  source 1..75: mol_type = other DNA
gacggacgtcacccggtcaccgggatgcatggtgaacctgggcttcagcctgccggcttttggtaaaacggcaca

SEQ ID NO: 26964 - DNA, 75 bp, synthetic construct
  source 1..75: mol_type = other DNA
ccgtgatgcggtcagtacgtcaggtgtgactgccatgaatccccgttatatccggacagaaccccgggagttaac

SEQ ID NO: 26965 - DNA, 75 bp, synthetic construct
  source 1..75: mol_type = other DNA
gatcatgatgtgcttcttgcggggttcccgtgccagccatttagccttgctggtgttagtaagaaaaactcactt

SEQ ID NO: 26966 - DNA, 75 bp, synthetic construct
  source 1..75: mol_type = other DNA
tgactatatctatcacggcaacataaacgggaatctggacgtacttcagcatcatgagacgaaaaaagagaaccg

SEQ ID NO: 26967 - DNA, 75 bp, synthetic construct
  source 1..75: mol_type = other DNA
cggaaacttgccggattgaagccggagataaacaaatgacggtcaatatggggcaaatcagcagtaaccggtttc

SEQ ID NO: 26968 - DNA, 75 bp, synthetic construct
  source 1..75: mol_type = other DNA
ggatgctcgtccatctttaaataatggcattgtcggatttgatgaaggctggaatgcctgccgggatgccatgct

SEQ ID NO: 26969 - DNA, 75 bp, synthetic construct
  source 1..75: mol_type = other DNA
tcaaagatttagtggcatcagggcatgcgttagctgacgacatgacaggcgcaccatccgtgcttgttcgctgtt

SEQ ID NO: 26970 - DNA, 75 bp, synthetic construct
  source 1..75: mol_type = other DNA
ggggggctggagcctgcaggacacagccattgttagaataatttttgatactggctgcaggatacatgaggcctg

SEQ ID NO: 26971 - DNA, 75 bp, synthetic construct
  source 1..75: mol_type = other DNA
tcttttgcccataagattaattttcctgttgaaacgccctgttttcagattaaacagacggaactgaagggggct

SEQ ID NO: 26972 - DNA, 75 bp, synthetic construct
  source 1..75: mol_type = other DNA
tggcgtacccggactggtgatgctgggggcagcagcatggtatacgctgtaccagaatcaggagcaggccaggga

SEQ ID NO: 26973 - DNA, 75 bp, synthetic construct
  source 1..75: mol_type = other DNA
tgaactgaaagcgcctgtaactgatgacgtcagcagagcgctggcttttgctattaagtgggtggcggtcggtat

SEQ ID NO: 26974 - DNA, 75 bp, synthetic construct
  source 1..75: mol_type = other DNA
aacgccgcaggcgacctgactgccgttatcaccccggacggcaaccggagcgagacacagtacgatgcgtgggga

SEQ ID NO: 26975 - DNA, 75 bp, synthetic construct
  source 1..75: mol_type = other DNA
ccgacagatacgcagatacttcatcgagtgcgaaaagaaacttcgcaacatgcagtcggcacaagcagaaccaca

SEQ ID NO: 26976 - DNA, 75 bp, synthetic construct
  source 1..75: mol_type = other DNA
gcgtgaacgtgctggctaaaaacggttctatggcgattcaggttggcgcgaatgatgggcagaccatcaacatcg

SEQ ID NO: 26977 - DNA, 75 bp, synthetic construct
  source 1..75: mol_type = other DNA
tgctggcgctgctgctggcggccagcctgcacgcagaaaatacgcacaaggaggtgcgtatcgcgtcaccgtggc

SEQ ID NO: 26978 - DNA, 75 bp, synthetic construct
  source 1..75: mol_type = other DNA
cggctgatttatctggatctcgaatgccatcagggctgctatcgcctacggacaggggccgggccgcagggcgag

SEQ ID NO: 26979 - DNA, 75 bp, synthetic construct
  source 1..75: mol_type = other DNA
aggcaactatcgttatgtttttcctgggcgaaatgatccgagtaagccaatgagtgaggccgctatcaatcagct

SEQ ID NO: 26980 - DNA, 75 bp, synthetic construct
  source 1..75: mol_type = other DNA
ggatttggaggcatactccggcagcataatcaccaaaaatgcaactaagatagttatgcttactggtgtaagaac

SEQ ID NO: 26981 - DNA, 75 bp, synthetic construct
  source 1..75: mol_type = other DNA
taaagccgtgcgcttctatgaaaaggttaagcgtgaaaatccgccagtcgaaaccggagcatggaaagacgctgt

SEQ ID NO: 26982 - DNA, 75 bp, synthetic construct
  source 1..75: mol_type = other DNA
ccattaccgggcgcaggcgggtaacgctgattgccgaggagcagcgctgtgagcggctggctccctgtcggttac

SEQ ID NO: 26983 - DNA, 75 bp, synthetic construct
  source 1..75: mol_type = other DNA
aactgagcgccaatggttatattcgggcttctggctggaaaaaatcgccggatattgaggattatcaggaacgcc

SEQ ID NO: 26984 - DNA, 75 bp, synthetic construct
  source 1..75: mol_type = other DNA
ggccggaggtgtggcacgtcgtcgcgtgattttccgtttcgacaatatcgtcagtgaggccgaaaaagacaggga

SEQ ID NO: 26985 - DNA, 75 bp, synthetic construct
  source 1..75: mol_type = other DNA
accgcaatcgtctgctaccagaagacaacgtaatggctcgtctggcaaggctggagaaggaaaccagcgaagcga

SEQ ID NO: 26986 - DNA, 75 bp, synthetic construct
  source 1..75: mol_type = other DNA
aacgacagcaggcggaacgggatgaagaacaggccattctccaaaaggccgcgacatacttcgcgaagcgcctga

SEQ ID NO: 26987 - DNA, 75 bp, synthetic construct
  source 1..75: mol_type = other DNA
tcaaagtgggatcaaaccaggttgaaaaggtggggatcattcgtgcgctgacggtgggtgtggcttaccagacga

SEQ ID NO: 26988 - DNA, 75 bp, synthetic construct
  source 1..75: mol_type = other DNA
ccggcaactggctgaaatctcagcaatgacagaaagtattggcggtaaaaccgcactggactgggccatgaaaca

SEQ ID NO: 26989 - DNA, 75 bp, synthetic construct
  source 1..75: mol_type = other DNA
aaacgattggacttgttcgtgcgctgaccgtgggcgtggcgtaccagacgacggtaggtggcattatgaacactt

SEQ ID NO: 26990 - DNA, 75 bp, synthetic construct
  source 1..75: mol_type = other DNA
atctgcagggcatggaaggcgataaccttctccgtgagctgctgcgcaccaccgccctgctgaactggcagatga

SEQ ID NO: 26991 - DNA, 75 bp, synthetic construct
  source 1..75: mol_type = other DNA
gggccgacctccaacgcttgacggtatgaccggtcacgctggtgagctgccgaactgccgctgttacaaagaaat

SEQ ID NO: 26992 - DNA, 75 bp, synthetic construct
  source 1..75: mol_type = other DNA
attatcaatgtcaaagcgtactgcacaggtaatgatgcaggcatcaataaaatatttatcaccacaacttgagtc

SEQ ID NO: 26993 - DNA, 75 bp, synthetic construct
  source 1..75: mol_type = other DNA
ccaccacaattatcactgcatattttgacattggtagaggggattggactgctaataaagggttccgtgaaaaac

SEQ ID NO: 26994 - DNA, 75 bp, synthetic construct
  source 1..75: mol_type = other DNA
tgagcgtactgccggaatggctctccaaccgtgttgacgaccacctgccatggaacgtggttcccaccaataaat

SEQ ID NO: 26995 - DNA, 75 bp, synthetic construct
  source 1..75: mol_type = other DNA
cgtgcagtcggtcaatcacaatctaatatatgtaataaggactttgctgcctgttttgttcttttttgctctgag

SEQ ID NO: 26996 - DNA, 75 bp, synthetic construct
  source 1..75: mol_type = other DNA
ccgcagttacaacagtgacgaatacccagatgaagaaaccagtattgataaggttgatattatcgggcgtttatt

SEQ ID NO: 26997 - DNA, 75 bp, synthetic construct
  source 1..75: mol_type = other DNA
tggcgtcaccgccactggcacgcatctgccttcacggggatttgcaacgatttggccgccgcctcagcctgtacg

SEQ ID NO: 26998 - DNA, 75 bp, synthetic construct
  source 1..75: mol_type = other DNA
aaggtaaccttcacgcaaattgaccgtgaatataacacgttcactggtatgtattctgacaaagcagaagtcgaa

SEQ ID NO: 26999 - DNA, 75 bp, synthetic construct
  source 1..75: mol_type = other DNA
ctatcgttaccggcagtgacccgcgcgggctgccggaattcagcgccatccgcgaggaaataaacaaagccagcc

SEQ ID NO: 27000 - DNA, 75 bp, synthetic construct
  source 1..75: mol_type = other DNA
aagaagcaaacagccttgtatggttatgggattatgccaaccgctcacaggcattattccgcgaactgtatccgg

SEQ ID NO: 27001 - DNA, 75 bp, synthetic construct
  source 1..75: mol_type = other DNA
cctgaccgtggagcagatgcaaaaccagatggacccggtgtacacgccggcgcgaaaaatccacctgtaccactg

SEQ ID NO: 27002 - DNA, 75 bp, synthetic construct
  source 1..75: mol_type = other DNA
tggtgcgcgaaggggctcgcccgatcagcggtgataccggactgcgcgacgtccagcgtctggcagaagccaacg

SEQ ID NO: 27003 - DNA, 75 bp, synthetic construct
  source 1..75: mol_type = other DNA
cgtgcagaacgcttccgcatactggatgcgccagcactctctccgctgcctctggcaccttatgaatacacggaa

SEQ ID NO: 27004 - DNA, 75 bp, synthetic construct
  source 1..75: mol_type = other DNA
gatcctggtcagtcaacagagctgattgaacgttatgaagaattgtatggtttacctgacacctgctctcctgtt

SEQ ID NO: 27005 - DNA, 75 bp, synthetic construct
  source 1..75: mol_type = other DNA
tgaaagatgacccgttctccgggcatatcttcgtcttccggggccgcagtggcaaaatggtgaaaatactgtggg

SEQ ID NO: 27006 - DNA, 75 bp, synthetic construct
  source 1..75: mol_type = other DNA
atggaccccgaacagggggagtgctatttatctggaaggattctgttgatgaaaatcgaagaattacgtgaaatt

SEQ ID NO: 27007 - DNA, 75 bp, synthetic construct
  source 1..75: mol_type = other DNA
aacgtgcacgcctggatacggaaaatatctatcttctgcctcttgctcgtggcaataaccataattacgatggaa

SEQ ID NO: 27008 - DNA, 75 bp, synthetic construct
  source 1..75: mol_type = other DNA
ccgacccggagctgcacccggacagcaccctcagcatgtggccggataaccgtatcgcccgtgacgcgcactatc

SEQ ID NO: 27009 - DNA, 75 bp, synthetic construct
  source 1..75: mol_type = other DNA
ctatgaagatccggtggaatacattctggggggagagaatgaccttctgccaccccatcaggccgaaatcgggcg

SEQ ID NO: 27010 - DNA, 75 bp, synthetic construct
  source 1..75: mol_type = other DNA
gcgccatgcgggaagagtggcgctaaacgcgggggcatcatcgacagtatcagaggtgcgcccgtcatcgccttc

SEQ ID NO: 27011 - DNA, 75 bp, synthetic construct
  source 1..75: mol_type = other DNA
cggcggatacgggatcaggttctgaccatgtatcagacgggcagcattgaggcatcagaagctgcgctcttcatc

SEQ ID NO: 27012 - DNA, 75 bp, synthetic construct
  source 1..75: mol_type = other DNA
cgggtgcgttgttccagtgcaacgttaccaaccacactcatgtcctccctgattgatgaactgttcggtcgggaa

SEQ ID NO: 27013 - DNA, 75 bp, synthetic construct
  source 1..75: mol_type = other DNA
cggacatcattggtatcggtgaaatcagggattatgaaacagcagatgccgcagtccaggcgggtaataccggac

SEQ ID NO: 27014 - DNA, 75 bp, synthetic construct
  source 1..75: mol_type = other DNA
gaggcggcaggggatagacaaggtcagccagctaaagaaagaatcatggatcttaaaaataacactgtcggtatt

SEQ ID NO: 27015 - DNA, 75 bp, synthetic construct
  source 1..75: mol_type = other DNA
cgctggctaaagggaaggggaatgacgagaaaaactggtatctgaccagtaaatgggacggcgtaacgccagcgg

SEQ ID NO: 27016 - DNA, 75 bp, synthetic construct
  source 1..75: mol_type = other DNA
cagctattggtcgcgctattatcgctaagggcagtataaaagatgtcctcaattaccttggtttgggggaaggct

SEQ ID NO: 27017 - DNA, 75 bp, synthetic construct
  source 1..75: mol_type = other DNA
ttaagcagcaattgatgagtgaatccgcgtttaaggattgctttttaacggatgtttcagccgatacgcggctgt

SEQ ID NO: 27018 - DNA, 75 bp, synthetic construct
  source 1..75: mol_type = other DNA
acaagcctgtatcacacttaagaatttattgcagtttcatataaattctcccgatataaataacgaaaaagccgt

SEQ ID NO: 27019 - DNA, 75 bp, synthetic construct
  source 1..75: mol_type = other DNA
ccggcttccggagttatgttcaggcccaggggacgctggtaaataataccaatctcactgatgaaactggcaaag

SEQ ID NO: 27020 - DNA, 75 bp, synthetic construct
  source 1..75: mol_type = other DNA
cgtcgtatccgggatcagattctggaaatgtatatccggaatgaagttgaccgaagagaagcgattctttttatc

SEQ ID NO: 27021 - DNA, 75 bp, synthetic construct
  source 1..75: mol_type = other DNA
gtttcgaaaaagctgacgaaaacagcagttaatgaggttttacgcagaatgaagaaatccgggctggaaaaaccg

SEQ ID NO: 27022 - DNA, 75 bp, synthetic construct
  source 1..75: mol_type = other DNA
aacaccggaaatatcattgagtgtgcagacttacaagagacgaccaacgccattaaagttcattttttaacacag

SEQ ID NO: 27023 - DNA, 75 bp, synthetic construct
  source 1..75: mol_type = other DNA
atgcacagtctggtcatcgggcagatcaagacggataagaaatccaatgagatcacagctatcccagaacttctt

SEQ ID NO: 27024 - DNA, 75 bp, synthetic construct
  source 1..75: mol_type = other DNA
tgccagcgccgccgcgctcggtgtgccgttaaaaattacccatatggcggtcggcgatggcggcggaacattacc

SEQ ID NO: 27025 - DNA, 75 bp, synthetic construct
  source 1..75: mol_type = other DNA
gttcaactcagtagcgccactaacagcgattctgaaacgctggctgcaacgccgaaagcggttaaggccgcgtat

SEQ ID NO: 27026 - DNA, 75 bp, synthetic construct
  source 1..75: mol_type = other DNA
atttgccagaggtatgaatatcctgaccaagaatgacaaagttgatgcctggatgctggcttgttatggctccct

SEQ ID NO: 27027 - DNA, 75 bp, synthetic construct
  source 1..75: mol_type = other DNA
tgttgaagggctttggttcatcgaactcatcactcttgctgcgttatcaggttctccctcatctgaaatcactag

SEQ ID NO: 27028 - DNA, 75 bp, synthetic construct
  source 1..75: mol_type = other DNA
aatcagcggtgccctgaaagaaatggatgaaaacccggaccagacggcccccgggacactggagtcactgattgc

SEQ ID NO: 27029 - DNA, 75 bp, synthetic construct
  source 1..75: mol_type = other DNA
taataccggttatcggtggatgctgtactatcgctaacgcatgcccggccaagtttgcctgcattggttgtgcag

SEQ ID NO: 27030 - DNA, 75 bp, synthetic construct
  source 1..75: mol_type = other DNA
cgcctcggcttcggaaatcgcccgcgtgctggaaagcctgacgaaaaacagcggcgagaaccagccagcgacgct

SEQ ID NO: 27031 - DNA, 75 bp, synthetic construct
  source 1..75: mol_type = other DNA
aggtaacgctacaagtacgactattaatgaaggagttcagatagtatttgatggcggcacagcctcaacgacaac

SEQ ID NO: 27032 - DNA, 75 bp, synthetic construct
  source 1..75: mol_type = other DNA
acgtcatcgtcgtccgttaccagcacatcttccccgtgaaatacaccgcctggagcctgaagaaagttgttgccc

SEQ ID NO: 27033 - DNA, 75 bp, synthetic construct
  source 1..75: mol_type = other DNA
ggggagtctgctgtttggtctgctgacatatctgacgaacctgtatttcaaaatcagagaagaccggcgtaaggc

SEQ ID NO: 27034 - DNA, 75 bp, synthetic construct
  source 1..75: mol_type = other DNA
tgacctgcaacaactggttgccaccctcgtccctgatgaacagcgcatcagcttctggccgcagcactttggcct

SEQ ID NO: 27035 - DNA, 75 bp, synthetic construct
  source 1..75: mol_type = other DNA
tgatgacacaccagtaaaagtactggcaccgggcaggaagaaggcgaaaacaggatatatttggacgtatgtccg

SEQ ID NO: 27036 - DNA, 75 bp, synthetic construct
  source 1..75: mol_type = other DNA
atgaacggtaaccgcgctgaaatgagcccggaagccgccggtattgccgcctgtctgatgacgtacagtcatcat

SEQ ID NO: 27037 - DNA, 75 bp, synthetic construct
  source 1..75: mol_type = other DNA
ggggagtctgctgtttggtctgctgacgtacctgacgaacctgtatttcaaaattaaagaagaccggcgtaaggc

SEQ ID NO: 27038 - DNA, 75 bp, synthetic construct
  source 1..75: mol_type = other DNA
cacgcaataagcggtacgcaggagcgtgaattatctctggctgaattatcctggtgggcggtccgcaatcaggtg

SEQ ID NO: 27039 - DNA, 75 bp, synthetic construct
  source 1..75: mol_type = other DNA
cgttaagccaggccgtgaatcaatgtcagtattccataacggcagaatattggtggaaccggaacccaaaaacat

SEQ ID NO: 27040 - DNA, 75 bp, synthetic construct
  source 1..75: mol_type = other DNA
agcaacttgctcaccaaaacctgtcagcatggatgattgacgtcattcgtcacgcaatgaatggcacacaggagc

SEQ ID NO: 27041 - DNA, 75 bp, synthetic construct
  source 1..75: mol_type = other DNA
aggataaaacattactgccatttttcagcgatgagcgggttattcgtgcagcaggtggtgcaggtgcactgtctg

SEQ ID NO: 27042 - DNA, 75 bp, synthetic construct
  source 1..75: mol_type = other DNA
acaacatcgcagagaacgccttacggggagtggccgtaggccggaaaaactggctcttcgcgggttccgacagcg

SEQ ID NO: 27043 - DNA, 75 bp, synthetic construct
  source 1..75: mol_type = other DNA
gcagaagtccggggatgtacagcagaacagcgtctggcggcaagaaaagccagagctgcgccactgatgcagtca

SEQ ID NO: 27044 - DNA, 75 bp, synthetic construct
  source 1..75: mol_type = other DNA
aaatgagcccggaagccgccggtattgccgcctgtctgatggcgtacagccatcacgcctgtcgtacagagaatt

SEQ ID NO: 27045 - DNA, 75 bp, synthetic construct
  source 1..75: mol_type = other DNA
tgatgacgaaacatgggtactgttcagtgccatgaacggtaaccgcgcagaaatgagcccggaagccgccggtat

SEQ ID NO: 27046 - DNA, 75 bp, synthetic construct
  source 1..75: mol_type = other DNA
cactcagcgcattgagcgacataacctgaatctgagacaacatctggcaaggctgggacggaagtcactgtcgtt

SEQ ID NO: 27047 - DNA, 75 bp, synthetic construct
  source 1..75: mol_type = other DNA
cacgcctgaagggaaagctgcacgttatcagcaagcgttacactcagcgcattgagcgacataatctgaatctga

SEQ ID NO: 27048 - DNA, 75 bp, synthetic construct
  source 1..75: mol_type = other DNA
ctggccgtgtttgcagaacgccgtaaggacagttttggcccgtatgtccgtctgatgagcgtcaccctgaactga

SEQ ID NO: 27049 - DNA, 75 bp, synthetic construct
  source 1..75: mol_type = other DNA
ccgcaagcttcacactgacgacacaccggtaaaggtactggcaccgggcctgaaaaagacgaaaacagggcgcac

SEQ ID NO: 27050 - DNA, 75 bp, synthetic construct
  source 1..75: mol_type = other DNA
cacagcgggtggcggcttatgcttccgaaatcaaccggctgaaggcgctggttgcgaaactgcaacgtatgcagt

SEQ ID NO: 27051 - DNA, 75 bp, synthetic construct
  source 1..75: mol_type = other DNA
acgccatcgtcgtccgttaccggagcatctgccccgcgaaataaaccgcctggagcctgaagaaagctgttgccc

SEQ ID NO: 27052 - DNA, 75 bp, synthetic construct
  source 1..75: mol_type = other DNA
cggtggtatctggaatctgtacaccctgaacaacggcggggcatttatggcacccgaaccggatgacgatgatga

SEQ ID NO: 27053 - DNA, 75 bp, synthetic construct
  source 1..75: mol_type = other DNA
agtgcaggatattcccggcgtgctggctgtgtttgccgaacgccgtaaggacagttttggtccgtatgtccggct

SEQ ID NO: 27054 - DNA, 75 bp, synthetic construct
  source 1..75: mol_type = other DNA
gatgcaggaatcctcagttggacccgcattgagcatgaacttcgacatgcgcaaagacgttcgcggcgtctttat

SEQ ID NO: 27055 - DNA, 75 bp, synthetic construct
  source 1..75: mol_type = other DNA
tggtcgcaaacggcctggcatgaacctatccataatttaggtgggatgcccggtgcgtggttggcagatacgctg

SEQ ID NO: 27056 - DNA, 75 bp, synthetic construct
  source 1..75: mol_type = other DNA
cgccctccgggtaattgcactggggcggcactctatctgtaaactaatttttaccccacgtccttcacggtgcgc

SEQ ID NO: 27057 - DNA, 75 bp, synthetic construct
  source 1..75: mol_type = other DNA
cggttgttggtttgcctggcgtcatcagtccagcgacgaatacattgattattttgccgtttcgctacgcatcat

SEQ ID NO: 27058 - DNA, 75 bp, synthetic construct
  source 1..75: mol_type = other DNA
cggaggtgtgtcacgccgtcgggtgattttccggttcgacaacattgtaagggaggacgaaaaagacaaggaatt

SEQ ID NO: 27059 - DNA, 75 bp, synthetic construct
  source 1..75: mol_type = other DNA
tggggcgaatccgttctcgctggatgattttgaattttcgccaatgaaagcgttgctggatgatggtccacacga

SEQ ID NO: 27060 - DNA, 75 bp, synthetic construct
  source 1..75: mol_type = other DNA
acaaacagtccgcaggggccgtggtggctgctcggttggtgtgagcgggtgccggaagcggatgaggtgctgcct

SEQ ID NO: 27061 - DNA, 75 bp, synthetic construct
  source 1..75: mol_type = other DNA
atgagcgaacagtacctgataacgctcgacgagtggaaaccaaaacggttcagtctcccaataacaaacactacc

SEQ ID NO: 27062 - DNA, 75 bp, synthetic construct
  source 1..75: mol_type = other DNA
cggatcggcaacttccttcaacaatcaaaacaccgcaaaaacggatgttaatggtctggcgacttttgatctgaa

SEQ ID NO: 27063 - DNA, 75 bp, synthetic construct
  source 1..75: mol_type = other DNA
aatgcaaaagcaacagcgcgaggaagccgttgatccgctcagcgtggaactgaacgcccagcagcgttatcttga

SEQ ID NO: 27064 - DNA, 75 bp, synthetic construct
  source 1..75: mol_type = other DNA
accttgccagtgaccaggcggtaaacagtcttatcaaggccgagatcaatggcagtagtcagtctgtggaagtga

SEQ ID NO: 27065 - DNA, 75 bp, synthetic construct
  source 1..75: mol_type = other DNA
cggcggggcacgccgttcttgcctgtggagagatggtgcagtcaggccgctcgttgaagcaggaacccaccgaaa

SEQ ID NO: 27066 - DNA, 75 bp, synthetic construct
  source 1..75: mol_type = other DNA
gacgtctggagctgggatatcggcaccacgccgatgggcttcaacgtggtggatgtggtcggcggcatcagttac

SEQ ID NO: 27067 - DNA, 75 bp, synthetic construct
  source 1..75: mol_type = other DNA
tagttacaggagataaacttgatcctgttggccttatagggaaaggtcatactatcgaacagctagatgcaatac

SEQ ID NO: 27068 - DNA, 75 bp, synthetic construct
  source 1..75: mol_type = other DNA
tcgatgagtggaagccaaaacggttcagtctcccaataacaaacactaccctggtgaaatacggaaaactaggat

SEQ ID NO: 27069 - DNA, 75 bp, synthetic construct
  source 1..75: mol_type = other DNA
tttttgtgaatcctgcgcttaaggatgactacatcaatgtaaattcatggccagatgatgctgttgaagttgatg

SEQ ID NO: 27070 - DNA, 75 bp, synthetic construct
  source 1..75: mol_type = other DNA
ttaaacacagcggtattgccgctggagcgctggtggtgacatcggcagcaccgctacccgcatgggcagaagaga

SEQ ID NO: 27071 - DNA, 75 bp, synthetic construct
  source 1..75: mol_type = other DNA
aataatgctgataaatctatttctgtatttagcaaagaagaaaaaataccttatctcatccaggcttgggtagat

SEQ ID NO: 27072 - DNA, 75 bp, synthetic construct
  source 1..75: mol_type = other DNA
aactggaactgtgcagcctcgaaatccccaccgaagacccctgatgaaaagcaggatacgccggatatgagagag

SEQ ID NO: 27073 - DNA, 75 bp, synthetic construct
  source 1..75: mol_type = other DNA
cagtaagcgccctggaaaaacctgaggttgcaccacaggtcagtgttcccacaatgccatcagccgaaccgaggt

SEQ ID NO: 27074 - DNA, 75 bp, synthetic construct
  source 1..75: mol_type = other DNA
ctaccggtatgatgataccggtcgggtgacggagcaggtcaacccggaggggctggactaccgctttgagtacgg

SEQ ID NO: 27075 - DNA, 75 bp, synthetic construct
  source 1..75: mol_type = other DNA
aacttttactaaagaaaatggtaattctgaaaaaagagaaagcgtttacacatatgctgaacgtggtctcacatc

SEQ ID NO: 27076 - DNA, 75 bp, synthetic construct
  source 1..75: mol_type = other DNA
gcgggtggtgaagaaggagcatgcggacgggagcatcacccgcagcgagtatgatgaggcggggaggctgaaggc

SEQ ID NO: 27077 - DNA, 75 bp, synthetic construct
  source 1..75: mol_type = other DNA
aagtggtccgtggcccgatgtcgtcgctgtacggttccgatgcgctcggcggtgtagtgaatatcatcaccaaaa

SEQ ID NO: 27078 - DNA, 75 bp, synthetic construct
  source 1..75: mol_type = other DNA
ataatcagacgttcattgccagtcttccacaggggcttgatattccggacactccggaaaagcaacaacagcctg

SEQ ID NO: 27079 - DNA, 75 bp, synthetic construct
  source 1..75: mol_type = other DNA
tgctgataaacccagttatgctcataatgtactcaccagtattgaagaggatggcgaggacgtcgacatactgcg

SEQ ID NO: 27080 - DNA, 75 bp, synthetic construct
  source 1..75: mol_type = other DNA
taccgtgcattcctaatgttattgcctattcacggatcttctatgtatcaaacagggtctccactcctgcaacgc

SEQ ID NO: 27081 - DNA, 75 bp, synthetic construct
  source 1..75: mol_type = other DNA
acggcgacaggctgacgacggtacagaccgacaccacgcgtatccagacggtataccagccggggagcttcgcgc

SEQ ID NO: 27082 - DNA, 75 bp, synthetic construct
  source 1..75: mol_type = other DNA
aatacactacgctcaaccgccattaaaggagacataatgcccggttcccttaatattggttcgttaaaaaaagag

SEQ ID NO: 27083 - DNA, 75 bp, synthetic construct
  source 1..75: mol_type = other DNA
cgatgttatttggtgaatatgattttctcgcccgttttgagaaagctgcgcagtgtggttttcgcggcgttgaat

SEQ ID NO: 27084 - DNA, 75 bp, synthetic construct
  source 1..75: mol_type = other DNA
aacaggctggtcgtggtctggtaaacataccatttgacgtattgcagggtggcgcaagtctgattaatgcaatca

SEQ ID NO: 27085 - DNA, 75 bp, synthetic construct
  source 1..75: mol_type = other DNA
gggggtgtttggtcccggctggaaagcgcccttcgatatccgcttacaggttcatgagcgggaactgatactcaa

SEQ ID NO: 27086 - DNA, 75 bp, synthetic construct
  source 1..75: mol_type = other DNA
gcgacaaggagaacaaaccaccgaggatagcccagggcagcagcaacgtctttatcaacaatcagcctgccgcac

SEQ ID NO: 27087 - DNA, 75 bp, synthetic construct
  source 1..75: mol_type = other DNA
cgcctgtttccgatgcggcgtgggaacagattgaagaggaagcaacccgtacacttaaacgtttccttgctgctc

SEQ ID NO: 27088 - DNA, 75 bp, synthetic construct
  source 1..75: mol_type = other DNA
tggtgcgcagaatatgatgaatggggcaacctgctgaatgaagagaacccgcatcagctgcagcagcttatccgg

SEQ ID NO: 27089 - DNA, 75 bp, synthetic construct
  source 1..75: mol_type = other DNA
ataagcgccccacgtttaaaagagcattacgcaacatcagtatgaccagcatatttatcactatgatgctgatct

SEQ ID NO: 27090 - DNA, 75 bp, synthetic construct
  source 1..75: mol_type = other DNA
gttctgctcgaatccacgggcggttatgaagatgctgttgtctgtttcctgcagtctcttggctatgacgtttct

SEQ ID NO: 27091 - DNA, 75 bp, synthetic construct
  source 1..75: mol_type = other DNA
atggaagaacaagcaaacaagattctcgtagaactactgcaaaaagccagtaatggaatagacgcggctgtttca

SEQ ID NO: 27092 - DNA, 75 bp, synthetic construct
  source 1..75: mol_type = other DNA
cgacggcaccgtgatgtggagctgaccgctgctggagcgtggtttctcaaagaagggcgctctgttgtcaaaaaa

SEQ ID NO: 27093 - DNA, 75 bp, synthetic construct
  source 1..75: mol_type = other DNA
gtggtattgtactggtggttatatccagtctggcgcaggcagttgaactgagtcttaataccagtgatggaagga

SEQ ID NO: 27094 - DNA, 75 bp, synthetic construct
  source 1..75: mol_type = other DNA
gaccgataacctcaatacagaagataattgtattttactggatgaagcggttcatggtggacaatatcagtggga

SEQ ID NO: 27095 - DNA, 75 bp, synthetic construct
  source 1..75: mol_type = other DNA
ctccagtccttcatcatttttttcaatatactcatctgagagatgcacatttttatagatgtaaactcatagaac

SEQ ID NO: 27096 - DNA, 75 bp, synthetic construct
  source 1..75: mol_type = other DNA
ttatgatggttactgctccggcgatggctgcaattcagtgcggcaactacacgatgaccggtgacggaatgactg

SEQ ID NO: 27097 - DNA, 75 bp, synthetic construct
  source 1..75: mol_type = other DNA
ggggatgacggagaaagaagagaaggctgagcggcgcatgctgatgaaggaacataactgcagcgaactggaggc

SEQ ID NO: 27098 - DNA, 75 bp, synthetic construct
  source 1..75: mol_type = other DNA
agatggaaatctctgcccgcatgatgatcaccggaggggatccgaaagaagaagcagcgctcaaacgtgcggaca

SEQ ID NO: 27099 - DNA, 75 bp, synthetic construct
  source 1..75: mol_type = other DNA
gaggagcagaaggcggtgctgatgtcggcgagcaaactgtccggctgttatacggagggggttgtcctggcgaag

SEQ ID NO: 27100 - DNA, 75 bp, synthetic construct
  source 1..75: mol_type = other DNA
agtcctcgacggatgtttactactgtatccaaagcggcattgatggcgatcgggcagggcgtcaggaggtacgaa

SEQ ID NO: 27101 - DNA, 75 bp, synthetic construct
  source 1..75: mol_type = other DNA
ccatcaccgcaaccgtaccgctggtactggtgaaagcctcgaccagtatcaccctcgacaccccggaggtgattt

SEQ ID NO: 27102 - DNA, 75 bp, synthetic construct
  source 1..75: mol_type = other DNA
atggaccagaagctgttaacggatttccgctcagaactactcgattcacgttttggtgcaaaggccatttctact

SEQ ID NO: 27103 - DNA, 75 bp, synthetic construct
  source 1..75: mol_type = other DNA
atgggactcgatatttactttctggctcgtgataaccatcacagtggtgccgttgtgggaacacaggaacatcag

SEQ ID NO: 27104 - DNA, 75 bp, synthetic construct
  source 1..75: mol_type = other DNA
tgcaggtgatgcgttcccgggctgccctgcaagataaagctctcggcggggaatatccattcaggatggcaacct

SEQ ID NO: 27105 - DNA, 75 bp, synthetic construct
  source 1..75: mol_type = other DNA
ttgaacgaaagtttttgctggatgctcttgaatttggtgttctgaaggactggaaagaaaatccggtaaaagaac

SEQ ID NO: 27106 - DNA, 75 bp, synthetic construct
  source 1..75: mol_type = other DNA
atggcaaaaatccgatatctgcagggtacacatgatgcccggcccggggatatccgggatgtcgcacagccgtgt

SEQ ID NO: 27107 - DNA, 75 bp, synthetic construct
  source 1..75: mol_type = other DNA
tcacaaagcacaatggctaatagatatgcacgcgataccttccctgctgattgggttgttatatgttcaatggaa

SEQ ID NO: 27108 - DNA, 75 bp, synthetic construct
  source 1..75: mol_type = other DNA
cattattaaggatacgcaaatatcgtcattattcgatgaatacgcggttgctgttgagcatcaacttcgtggctg

SEQ ID NO: 27109 - DNA, 75 bp, synthetic construct
  source 1..75: mol_type = other DNA
tgaagaattttccgcagtgctggcggatttacagcgcacatttgaggggaaaatagccgcgcaggcacaaacgtt

SEQ ID NO: 27110 - DNA, 75 bp, synthetic construct
  source 1..75: mol_type = other DNA
gctactggatgaacaaaactgcctgatgctgcatgaactctggctgcagagtggtactggccagcgtcgctggga

SEQ ID NO: 27111 - DNA, 75 bp, synthetic construct
  source 1..75: mol_type = other DNA
gaggatgtatcggtgtggtggaaccgtctgtgtgacaacgtcctgccggaaaaaccatgccgtttgacctgctga

SEQ ID NO: 27112 - DNA, 75 bp, synthetic construct
  source 1..75: mol_type = other DNA
aaagcgacgttattgcagaattaagccgccgtttcagttgcacgctggagcactggtatgccgagcagggctgca

SEQ ID NO: 27113 - DNA, 75 bp, synthetic construct
  source 1..75: mol_type = other DNA
agacgtcctgatgcgtctgccggagtggccggaggagcgactggcagagttgctgcctcttgagggatttacctt

SEQ ID NO: 27114 - DNA, 75 bp, synthetic construct
  source 1..75: mol_type = other DNA
atgccaaactggtgctcgaatcgtatgcatttttctggtgaaccggcacagattgctgagattaaacgactggcc

SEQ ID NO: 27115 - DNA, 75 bp, synthetic construct
  source 1..75: mol_type = other DNA
gagaactgggcagcgccagatgaagcagagcgcgccttcgctgtcctattcaatgtattggggatcgaagccccc

SEQ ID NO: 27116 - DNA, 75 bp, synthetic construct
  source 1..75: mol_type = other DNA
agaatcaatgggttaggcttaaatcaaagtttttgtgtgtatgtattcgaaggcgaacaaggaaagcgagacagt

SEQ ID NO: 27117 - DNA, 75 bp, synthetic construct
  source 1..75: mol_type = other DNA
taaataccggatgaaaccctctcttaaccgtgaattttatatccggtttgcggcagagtttggttatgaaataga

SEQ ID NO: 27118 - DNA, 75 bp, synthetic construct
  source 1..75: mol_type = other DNA
acaccgcgggtatgacgaaaaacatgtgccgctcactgggcatcgacctgatagcacacaagccgcataacgccc

SEQ ID NO: 27119 - DNA, 75 bp, synthetic construct
  source 1..75: mol_type = other DNA
caatcccgacttcttaccggacgaggacaagagtacgccgcagctcgatcttttggctcgtgtcgaacgagagct

SEQ ID NO: 27120 - DNA, 75 bp, synthetic construct
  source 1..75: mol_type = other DNA
agattatccagatgacgatgtgaaacgttcagaaaagcgtatcattattcgagaattgtggtcatcaccattgat

SEQ ID NO: 27121 - DNA, 75 bp, synthetic construct
  source 1..75: mol_type = other DNA
cctggcctccgagcaataatcgctattaccgccataatcgtgggcgcacgcacgtcagcgcagaggggcaggcat

SEQ ID NO: 27122 - DNA, 75 bp, synthetic construct
  source 1..75: mol_type = other DNA
ggtgtacacatccccgccatgaaaaacacggctttcgggcaggtgctccgcacacttgaactgaaacgcgctttt

SEQ ID NO: 27123 - DNA, 75 bp, synthetic construct
  source 1..75: mol_type = other DNA
atgcaatatgcgaaacctgtcactctgaatgttgaagagtgcgaccgtctctcctttctgccgtatctgtttggc

SEQ ID NO: 27124 - DNA, 75 bp, synthetic construct
  source 1..75: mol_type = other DNA
tactgactggcgacaactaccagctttaaccgatgcgtttcaggccagcggctttacatggcgcggcatcattgc

SEQ ID NO: 27125 - DNA, 75 bp, synthetic construct
  source 1..75: mol_type = other DNA
aaaccagttgccgcgagctgacggttacgcaactggaacagacgctcgatgcaatgaaagaacgcggctttaaga

SEQ ID NO: 27126 - DNA, 75 bp, synthetic construct
  source 1..75: mol_type = other DNA
actcagggcaaaaaaatgcaaatagttgagctgaagacagaaggtgtaggattacatggtgtcgctcgtctgaca

SEQ ID NO: 27127 - DNA, 75 bp, synthetic construct
  source 1..75: mol_type = other DNA
gcagcaccaccacaggcggtgaaaccacaccgggcgcggtgaaagtcggtaaaggtggcgaatatgccaacctgg

SEQ ID NO: 27128 - DNA, 75 bp, synthetic construct
  source 1..75: mol_type = other DNA
atcgacctgacggtgcagggtggtgagcggtattttttctgcaatgagctgaatgaaaaaggggaggcggttacc

SEQ ID NO: 27129 - DNA, 75 bp, synthetic construct
  source 1..75: mol_type = other DNA
atcgacctgacggtacagggcggtgagcggtattttttctgcaatgagctgaatgaaaaaggggagccggtcacc

SEQ ID NO: 27130 - DNA, 75 bp, synthetic construct
  source 1..75: mol_type = other DNA
tggcaggggcggcaatatcaggcgtacccgattgagggcagtggctttgagatgaacggaaagggcagcagtgcc

SEQ ID NO: 27131 - DNA, 75 bp, synthetic construct
  source 1..75: mol_type = other DNA
acctttggccgctatggcgttgggggtatcactctggcagaagcccgtgagcgacttagtgaagccaagcggatg

SEQ ID NO: 27132 - DNA, 75 bp, synthetic construct
  source 1..75: mol_type = other DNA
atcagaagctgaccgaaatcacccacgaggacttgcgagcactgaccgacgccatcgtagagcgcggtgcgcctg

SEQ ID NO: 27133 - DNA, 75 bp, synthetic construct
  source 1..75: mol_type = other DNA
gatacgcacacaccagaaattcaggctgcacgcggtcgcaagggcggttctaagtctaagcgcagcacagtggct

SEQ ID NO: 27134 - DNA, 75 bp, synthetic construct
  source 1..75: mol_type = other DNA
atgaagaaattatccctttcactgatgctgaacgtgtcgctggcgctgatgctggcactgtccctgatttacccg

SEQ ID NO: 27135 - DNA, 75 bp, synthetic construct
  source 1..75: mol_type = other DNA
gacgctatgaagtggacattagacctcgcggtcgcgacggaaaacgcatccgcaggaaatttgaaagaaaagctg

SEQ ID NO: 27136 - DNA, 75 bp, synthetic construct
  source 1..75: mol_type = other DNA
atgagcatgtgtcttgatgccgcttgtggtgatttgtacgccaccgatgatgttaagccagaagaaatccgcaag

SEQ ID NO: 27137 - DNA, 75 bp, synthetic construct
  source 1..75: mol_type = other DNA
tgtctggaacgactggagcatgtacgcgacagccagctatctgcatcttttcgttttatggcaagccatgaaggg

SEQ ID NO: 27138 - DNA, 75 bp, synthetic construct
  source 1..75: mol_type = other DNA
aaatgagccaggatcaggtgaaacgcctgtccaccctggtagcagcgcatatgagcatgtgtcttgaggccgctt

SEQ ID NO: 27139 - DNA, 75 bp, synthetic construct
  source 1..75: mol_type = other DNA
ctataaaacttctgcacgcaatgggatgcgaggtgacagcctttagttctaatccggcgaaagagcaggaagtgc

SEQ ID NO: 27140 - DNA, 75 bp, synthetic construct
  source 1..75: mol_type = other DNA
gaaaagagtcacggcagagaagaaatccgtcttcatattgtttgcgatgtccctgatgaacttattgatttcacg

SEQ ID NO: 27141 - DNA, 75 bp, synthetic construct
  source 1..75: mol_type = other DNA
atgagcgccgcgcttcaatacttcgaagaaaatttacctcatcgtccctatcacacggatgatctcgctttcggc

SEQ ID NO: 27142 - DNA, 75 bp, synthetic construct
  source 1..75: mol_type = other DNA
gtaaaaggaaaccaggggcggctaaataaagcctttgaggaaaaatttccgctgaaagaattaaataatccagag

SEQ ID NO: 27143 - DNA, 75 bp, synthetic construct
  source 1..75: mol_type = other DNA
ctgagtgaaagcaatccggcttccgcccttaatcatctcaaccatgcgttgcagctcgatccccgctgtggcgtg

SEQ ID NO: 27144 - DNA, 75 bp, synthetic construct
  source 1..75: mol_type = other DNA
ggggaaacacatctcgattttttaaaacaatatggtgattttgaaaatggtattcctgttcacgataccatcgcc

SEQ ID NO: 27145 - DNA, 75 bp, synthetic construct
  source 1..75: mol_type = other DNA
aatggcgctcgccgtcgctattaattgtctggctggcgctaagcctggcggtggcctgcgtgctggcgctgggca

SEQ ID NO: 27146 - DNA, 75 bp, synthetic construct
  source 1..75: mol_type = other DNA
tctcaaatccacgcagatgatgagtgtgattgatgcgattggtgagggaccgatagaaggcccggtgaaggggct

SEQ ID NO: 27147 - DNA, 75 bp, synthetic construct
  source 1..75: mol_type = other DNA
tcttaagtccacgcagatgatgagcgtgattgatgccattggtgaagggccgattgaaggtccggtgaaggggct

SEQ ID NO: 27148 - DNA, 75 bp, synthetic construct
  source 1..75: mol_type = other DNA
ctgtatgccatcgggcagtactgcgatcagacggtcccggatggtttcggggggaccgagccgcggatgaccttt

SEQ ID NO: 27149 - DNA, 75 bp, synthetic construct
  source 1..75: mol_type = other DNA
ttcctcgccagaaggtggcgatcatctatgatgttggtgtatcgacactgtataagaagtttccggtcggagata

SEQ ID NO: 27150 - DNA, 75 bp, synthetic construct
  source 1..75: mol_type = other DNA
gccgggactgaaaaaactgctcaggacattatcggcaggtgacactctggttgtctggaagctggatcggctggg

SEQ ID NO: 27151 - DNA, 75 bp, synthetic construct
  source 1..75: mol_type = other DNA
gcggggcttcgtctatgtggcgttcatcattgatgtgtttgccggatacatcgtggggtggcgggtctcatcgtc

SEQ ID NO: 27152 - DNA, 75 bp, synthetic construct
  source 1..75: mol_type = other DNA
caacaaatgaacaaaacactgctttacaacgaaatgcccttgaaagcgcaggatgtgagctaatttttgaggaca

SEQ ID NO: 27153 - DNA, 75 bp, synthetic construct
  source 1..75: mol_type = other DNA
ttttgatattggcctgtccacgctctataaaaaattccccgcctcagtgacaaaaaataaattgtgtcatccctt

SEQ ID NO: 27154 - DNA, 75 bp, synthetic construct
  source 1..75: mol_type = other DNA
gccgtattggtgggcgaccacctaaactaaccaaagcggaatgggagcaggccgggcgtttattagcacaaggaa

SEQ ID NO: 27155 - DNA, 75 bp, synthetic construct
  source 1..75: mol_type = other DNA
tacggacgcaacctgctgaagatggacgcgttcggctgtaccagccgcggtcaggcccaccgtgccggactgtgg

SEQ ID NO: 27156 - DNA, 75 bp, synthetic construct
  source 1..75: mol_type = other DNA
tccagaaaggcaatcagggcgcaggtaacatcacagactgtacggtgattgtgaccaaaaaagctgcttccggta

SEQ ID NO: 27157 - DNA, 75 bp, synthetic construct
  source 1..75: mol_type = other DNA
gtcacgattaacgagaactgtcgggttctgggaaaactgtccgcgaaccagattgaaggcgatctcgttaaaaca

SEQ ID NO: 27158 - DNA, 75 bp, synthetic construct
  source 1..75: mol_type = other DNA
cattcaggtgccgtcaaactatgacccggaaaaacgtacttacagcggtatctgggacgggagtatgaaaccggc

SEQ ID NO: 27159 - DNA, 75 bp, synthetic construct
  source 1..75: mol_type = other DNA
attattacttttatatccgcagtgtgaacatcgtcggtaaatcagcgtttgtggaagctgtcggccggccggtta

SEQ ID NO: 27160 - DNA, 75 bp, synthetic construct
  source 1..75: mol_type = other DNA
acactcctcgcgaagcgaaagataacctgaaatccacgcagttactgagcgtgattgatgcgatcagtgaagggc

SEQ ID NO: 27161 - DNA, 75 bp, synthetic construct
  source 1..75: mol_type = other DNA
gccagccgtaccctgacgctggaccgggaggtgacactgccggagaccggcacggccactgttaatctgattaac

SEQ ID NO: 27162 - DNA, 75 bp, synthetic construct
  source 1..75: mol_type = other DNA
ccacctcgcagttcctggcgtcggtgattctggataatctgccgccccggccctttaacatccggatggtcaggg

SEQ ID NO: 27163 - DNA, 75 bp, synthetic construct
  source 1..75: mol_type = other DNA
tatgggacttgccggtgttctccggggtaaaaaggtccgcactaccgtcagccggaaagccgttgccgcaggcga

SEQ ID NO: 27164 - DNA, 75 bp, synthetic construct
  source 1..75: mol_type = other DNA
ttcatacatgtggtttgaaacaggcgacaacggcaatgaatatttcaaatggagaagccgccagagcaccacaac

SEQ ID NO: 27165 - DNA, 75 bp, synthetic construct
  source 1..75: mol_type = other DNA
tgacagacgatgatccggatatgaaacaccgcaggaaactgctggaaagtatcccgggtatcggagagaaaacat

SEQ ID NO: 27166 - DNA, 75 bp, synthetic construct
  source 1..75: mol_type = other DNA
gcgttgaactggttgtcgtcggcgtatttgctttctgtctggcagttgttgcctggctaatgaaaactttcgatg

SEQ ID NO: 27167 - DNA, 75 bp, synthetic construct
  source 1..75: mol_type = other DNA
gcccgcaagccgtttcagctggcatggcatacgacggcagaaacccgggcgatgatggcgacatcgagcgcatac

SEQ ID NO: 27168 - DNA, 75 bp, synthetic construct
  source 1..75: mol_type = other DNA
cgtatccggagtatagggattctgggatggagtggtgtaatgaattaccactaaactggaaaaaaactaagctga

SEQ ID NO: 27169 - DNA, 75 bp, synthetic construct
  source 1..75: mol_type = other DNA
aaatatacacggacagggccggataccctgtggtgattactcgctgtacggaccgctctgtgttctttcgacgta

SEQ ID NO: 27170 - DNA, 75 bp, synthetic construct
  source 1..75: mol_type = other DNA
gcttcattcacgcctgctattcccgtcagcctgagcttgccgcgaagctgatgaaagatgttatcgctgaaccct

SEQ ID NO: 27171 - DNA, 75 bp, synthetic construct
  source 1..75: mol_type = other DNA
tgatgcccgggcgtggaaaaaagcgaaactgcgcagccatggcgttacggtcgtggaatatgagcaagattatgg

SEQ ID NO: 27172 - DNA, 75 bp, synthetic construct
  source 1..75: mol_type = other DNA
atccgagggctgacctgagcaaagggcagtacggctgtgtcggtcagggtttacatattgccaaaaaactgctcc

SEQ ID NO: 27173 - DNA, 75 bp, synthetic construct
  source 1..75: mol_type = other DNA
aactgtataccgacaatgccggttacccggtaaaaattgttcgctgcataaacaacactgtgttgtacagaagaa

SEQ ID NO: 27174 - DNA, 75 bp, synthetic construct
  source 1..75: mol_type = other DNA
aaaattgatgatgactttgagccaaaactgatccataccgttcgcggtgccggatatgtcctggagatcagagaa

SEQ ID NO: 27175 - DNA, 75 bp, synthetic construct
  source 1..75: mol_type = other DNA
cctgaaagtgtggatgaacacaaaaaggccaacgcctttgccggcagtgccctgagtcacgcggcgctgccgtaa

SEQ ID NO: 27176 - DNA, 75 bp, synthetic construct
  source 1..75: mol_type = other DNA
accgatggtagtggcaacaatacctccaccaacgcaccaacggaagatccggatgctgcaagtgagggatattac

SEQ ID NO: 27177 - DNA, 75 bp, synthetic construct
  source 1..75: mol_type = other DNA
atgaaaatcactcctgaacaggctcgtgaggctctggatgcctggatatgtcgaccaggaatgacacaggagcag

SEQ ID NO: 27178 - DNA, 75 bp, synthetic construct
  source 1..75: mol_type = other DNA
taattaaacgatatggcctttatggtggtcttaggcttcttaaagatatattcttaacaaaatttttattttgtt

SEQ ID NO: 27179 - DNA, 75 bp, synthetic construct
  source 1..75: mol_type = other DNA
taaagcaggttgccctcgacggctgtgggattgcctggctgccggagtacgccatccaacaagaaattcgcagcg

SEQ ID NO: 27180 - DNA, 75 bp, synthetic construct
  source 1..75: mol_type = other DNA
aagggatgctatggattgacggcgaacctaaccgcctgctgttccagggcgtccagcgcctctacagcgccgact

SEQ ID NO: 27181 - DNA, 75 bp, synthetic construct
  source 1..75: mol_type = other DNA
acactgtatgcgaaggggctgacctgtgaagccgacaccctcggctcctgtggttacgtttatctggctgtttat

SEQ ID NO: 27182 - DNA, 75 bp, synthetic construct
  source 1..75: mol_type = other DNA
tgagcaacatcaccgacgctgacggtaaggtcgtttcagcagtgattcgtgtaggtcgaaacggcgactatgaga

SEQ ID NO: 27183 - DNA, 75 bp, synthetic construct
  source 1..75: mol_type = other DNA
gatacgcgcaaagaagttgtctataccgattgggagcaggtggcgaatttcgcccgagaaatcgcccatttaacc

SEQ ID NO: 27184 - DNA, 75 bp, synthetic construct
  source 1..75: mol_type = other DNA
aaactacgagtcgatgaatatcgactatgtggtcgaggcgtatgccgccgggtgcctgctggaaaacatcaccct

SEQ ID NO: 27185 - DNA, 75 bp, synthetic construct
  source 1..75: mol_type = other DNA
gcctcgatgcactggtgatggatgcgaccaacaacctgattgagccgtggtatcaggaagaccctgaccttgtgg

SEQ ID NO: 27186 - DNA, 75 bp, synthetic construct
  source 1..75: mol_type = other DNA
ggtgctgcggtgttcctttcttcaaaagcctctgatttcgtaaacggccacctgttgtttgttgatggcggcatg

SEQ ID NO: 27187 - DNA, 75 bp, synthetic construct
  source 1..75: mol_type = other DNA
cgctggataatcaggaagaacctgaaaaactgaccattgaacctactgttaaaaatcagtcattacctttagcgg

SEQ ID NO: 27188 - DNA, 75 bp, synthetic construct
  source 1..75: mol_type = other DNA
tatatccagcaagttgacgaccaggtaaatgaagaactggaacaagacctgaaagacaacatcgcgctgcgaatg

SEQ ID NO: 27189 - DNA, 75 bp, synthetic construct
  source 1..75: mol_type = other DNA
agtcgtttctggctgagcacgggggctggaaggcctttctgtggacgccgccttatggttacaggcagataaagg

SEQ ID NO: 27190 - DNA, 75 bp, synthetic construct
  source 1..75: mol_type = other DNA
gctcggttaaaacagcgtcacgcagtaatgcgctttgaagaaatgaatgatgtcgaccgcgaacgtctggcttgt

SEQ ID NO: 27191 - DNA, 75 bp, synthetic construct
  source 1..75: mol_type = other DNA
ccggataattggtaagcatcttgccgtccctcgctggcaggagacatgtgattattataatcagatgatggagcg

SEQ ID NO: 27192 - DNA, 75 bp, synthetic construct
  source 1..75: mol_type = other DNA
tgatatgcagttcctgttgtgggatgcacagcgccgtgctggtatcagtgatgctgaaattaccgctgctatgga

SEQ ID NO: 27193 - DNA, 75 bp, synthetic construct
  source 1..75: mol_type = other DNA
ttttgaatttgcgcagtctcagtttgagcaccggaaagagaatgatcagcgtacatatgatcttaatgtcaggaa

SEQ ID NO: 27194 - DNA, 75 bp, synthetic construct
  source 1..75: mol_type = other DNA
atcggacgccaatccgcttaagatgatgtcaacggtaggctatgctgcgaaagcgggtcaggccgtgaacaacct

SEQ ID NO: 27195 - DNA, 75 bp, synthetic construct
  source 1..75: mol_type = other DNA
cattctgtccactgaaggcgacggcacagcaacggaggcgttgcttaataccgttcgcgccgttctgaatgcaga

SEQ ID NO: 27196 - DNA, 75 bp, synthetic construct
  source 1..75: mol_type = other DNA
gaacctgtggccaccgtgtttcagcatcatgtttttcagagagtatctttgtaaagaaacatatttctgaaatat

SEQ ID NO: 27197 - DNA, 75 bp, synthetic construct
  source 1..75: mol_type = other DNA
tttacgcctggcttcagcagccgcattcacaacgccatcaggcagacctgagactgacaggacagattaaacagt

SEQ ID NO: 27198 - DNA, 75 bp, synthetic construct
  source 1..75: mol_type = other DNA
aaaagaattcaaccagccatactggcgaattaatgaagaatcatgttactggcgtgatgctttattccgtgcatt

SEQ ID NO: 27199 - DNA, 75 bp, synthetic construct
  source 1..75: mol_type = other DNA
aaaatagcgcagtttgcttcacgctatcaatatgatcccgaactggctcgtggtatgtacctatatgaacaccgc

SEQ ID NO: 27200 - DNA, 75 bp, synthetic construct
  source 1..75: mol_type = other DNA
tcattcaacagtgccagttcacttaattacaacgctgaacgggacgtctttacccctcaactggcattcgaagtg

SEQ ID NO: 27201 - DNA, 75 bp, synthetic construct
  source 1..75: mol_type = other DNA
cttgatgcccgcgagtttttacgcgctgaacgcgctgcgcaaccgcaggttgatgaagggctttcttacccgttg

SEQ ID NO: 27202 - DNA, 75 bp, synthetic construct
  source 1..75: mol_type = other DNA
catgatggccagccgtatgcgcagtgcaatggaaagctatccggattggcgacctgccgattatccgggattccg

SEQ ID NO: 27203 - DNA, 75 bp, synthetic construct
  source 1..75: mol_type = other DNA
aattcattgaagcccatccggggtgtacttcaggtgacattgcggatgcttttgctggttactcacgacagtgcg

SEQ ID NO: 27204 - DNA, 75 bp, synthetic construct
  source 1..75: mol_type = other DNA
atgaatatcagaaaactgttttgtccggacaacacaccacggattttattgtttttattcttttttgttatttct

SEQ ID NO: 27205 - DNA, 75 bp, synthetic construct
  source 1..75: mol_type = other DNA
cgataaagtagaactggaaggaaaatacgttcctcactttaaacctggtaaagaactgcgcgatcgcgccaatat

SEQ ID NO: 27206 - DNA, 75 bp, synthetic construct
  source 1..75: mol_type = other DNA
atcaatcggttgctcgatagcggtagttcctggagtcaggtacagaaaattatggcctgtagtcgagggacaatt

SEQ ID NO: 27207 - DNA, 75 bp, synthetic construct
  source 1..75: mol_type = other DNA
gtgattctcttgatgcctggactatgcggggaaatcttaaacaaccaaacagtaaaagagaaacacataactcac

SEQ ID NO: 27208 - DNA, 75 bp, synthetic construct
  source 1..75: mol_type = other DNA
cgagtcacccttggaggcgaagatgtccgcctgttagtcccgactacatttatgaatctcagcggcaaagccgtt

SEQ ID NO: 27209 - DNA, 75 bp, synthetic construct
  source 1..75: mol_type = other DNA
attcaggaacatgggaaatttggtaactcaaccacaaatgacttctatctgtcaggcccattgattaaggataaa

SEQ ID NO: 27210 - DNA, 75 bp, synthetic construct
  source 1..75: mol_type = other DNA
tcaaaaggccaggggggaacaggccagggatgatagcgcggcctctgcatctgagtttatccgtggtctgaaaca

SEQ ID NO: 27211 - DNA, 75 bp, synthetic construct
  source 1..75: mol_type = other DNA
caatgtcatcacgattattatggggagcggtactgcacacactgccataccgggcacttcagtgaggaggcagtg

SEQ ID NO: 27212 - DNA, 75 bp, synthetic construct
  source 1..75: mol_type = other DNA
atgtacgcaaaatcctttctcgctcttgatggcaacggacgtctgacgggcgcccgtactgcacaggccgcacct

SEQ ID NO: 27213 - DNA, 75 bp, synthetic construct
  source 1..75: mol_type = other DNA
cacgattattatggggagcagtactgcacacactgtcatacagggcgtttcagtgaggaggcagtggcaggatga

SEQ ID NO: 27214 - DNA, 75 bp, synthetic construct
  source 1..75: mol_type = other DNA
aacactcttattcgcatggggttcacatggaccggtggagcctactggcaagcacctcaccccattttatccggc

SEQ ID NO: 27215 - DNA, 75 bp, synthetic construct
  source 1..75: mol_type = other DNA
tatgcccactacacctgccacctttgcggcagtgcactcagataccacccgcaatacgacaccgaacggccctgg

SEQ ID NO: 27216 - DNA, 75 bp, synthetic construct
  source 1..75: mol_type = other DNA
tatccgcctgcctgcttttttccggcagcgtgctggcaggaaacggcacactggcacctacagtggttccgatgg

SEQ ID NO: 27217 - DNA, 75 bp, synthetic construct
  source 1..75: mol_type = other DNA
atcgctctggacctcagctatcgctatcttgatgcaggtgacagcagtgtgagttacaaggacgagtggggcgat

SEQ ID NO: 27218 - DNA, 75 bp, synthetic construct
  source 1..75: mol_type = other DNA
tattggcgaacaagaagagctggccctgaaaaagatcgcacaggcgcttcagttgtcactggatgcttatctcta

SEQ ID NO: 27219 - DNA, 75 bp, synthetic construct
  source 1..75: mol_type = other DNA
cactgttgtatgggcttatcggcacttgccttctgaacgacattgatccggaagcgtatctgcgccatatcctga

SEQ ID NO: 27220 - DNA, 75 bp, synthetic construct
  source 1..75: mol_type = other DNA
gaatgttcgcattcccgttccagactgaaatcgcttttgtagcagcgatttaccccaccgctaaaaaccttaccg

SEQ ID NO: 27221 - DNA, 75 bp, synthetic construct
  source 1..75: mol_type = other DNA
aaatccagaaaatgcaaatagactactcagtaaaagaaaaaacatacgaacttgtcgataagctcatggatgccc

SEQ ID NO: 27222 - DNA, 75 bp, synthetic construct
  source 1..75: mol_type = other DNA
atgagcttacgtgaaaaaaccatcagcggcgcgaagtggtcggcgattgccacggtgatcatcatcggcctcggg

SEQ ID NO: 27223 - DNA, 75 bp, synthetic construct
  source 1..75: mol_type = other DNA
atctccggtcgtggtaccgttgttactggtcgtgtagaacgcggtatcatcaaagttggtgaagaagttgaaatc

SEQ ID NO: 27224 - DNA, 75 bp, synthetic construct
  source 1..75: mol_type = other DNA
atgaataaagcattactgccactgttactctgctgctttatttttccggcgtcagggaaagatgcaggctggcag

SEQ ID NO: 27225 - DNA, 75 bp, synthetic construct
  source 1..75: mol_type = other DNA
ccgaatcaggtaaacacaaaagacaaactaacaaaagacaatataaaacctttttcgtccgagaattctggcgaa

SEQ ID NO: 27226 - DNA, 75 bp, synthetic construct
  source 1..75: mol_type = other DNA
tagtgttcgtccgttatcatacggttttatttcgcaggacgacctggcaaaacagttcctgaatgtctctgagga

SEQ ID NO: 27227 - DNA, 75 bp, synthetic construct
  source 1..75: mol_type = other DNA
agtgggaagcgaaaatcctggaactggctggcttcctggattcctacattccggaaccagagcgtgcgattgaca

SEQ ID NO: 27228 - DNA, 75 bp, synthetic construct
  source 1..75: mol_type = other DNA
tcaacttctacaagctgctgtcggtggtggggattatcaactttccggcgctgctggggctgatggtggtgtcga

SEQ ID NO: 27229 - DNA, 75 bp, synthetic construct
  source 1..75: mol_type = other DNA
gaactcaccacgttgtactggctgaacgtcgggctggggcttgtggtgtgcgtggcggtgtttttgttgagtgat

SEQ ID NO: 27230 - DNA, 75 bp, synthetic construct
  source 1..75: mol_type = other DNA
ggccacacctaataacgttcacgtttcaatgatcgtggatgaccaggtcagtaatacaggtttttatgtccgctg

SEQ ID NO: 27231 - DNA, 75 bp, synthetic construct
  source 1..75: mol_type = other DNA
gtggagaatgcggccgctgacggggtgtcattctctgtgccggtcacaccgcacacgttcaggcacagttatgcg

SEQ ID NO: 27232 - DNA, 75 bp, synthetic construct
  source 1..75: mol_type = other DNA
aacggtcgggtacggcggggaaagatgtgcctgcggggtataagctgactgaggtgggggtgattcctgaggatt

SEQ ID NO: 27233 - DNA, 75 bp, synthetic construct
  source 1..75: mol_type = other DNA
accatgccagcaagggcgcggccatgatgggcgcaggcgaccagcagcaggccagccggggcagctcggtactgg

SEQ ID NO: 27234 - DNA, 75 bp, synthetic construct
  source 1..75: mol_type = other DNA
tggtgacccatcttgacgtctcgcgtgaacaactggcggaagttgccgcccactggcatgcgttcctggcgcgtt

SEQ ID NO: 27235 - DNA, 75 bp, synthetic construct
  source 1..75: mol_type = other DNA
tgcaccgtagtaacgatatccttcgccagacttccgcttattttgcgaaggcggagtttgaccgcctctggaaaa

SEQ ID NO: 27236 - DNA, 75 bp, synthetic construct
  source 1..75: mol_type = other DNA
aagaattcgcccagcggctagcgcaagcctgtaaagaagctggtcttgatgaacatggtaggggaatggccatag

SEQ ID NO: 27237 - DNA, 75 bp, synthetic construct
  source 1..75: mol_type = other DNA
tcactgctgtcgggctgggtggatgcatgctgccggctactgtcaccgctggaagaagcgcttcaggactatgtg

SEQ ID NO: 27238 - DNA, 75 bp, synthetic construct
  source 1..75: mol_type = other DNA
aggtggagtatgtagctggtattctgaagcaatctcgccacctagatgacatcgaggccagggaatggctgaaaa

SEQ ID NO: 27239 - DNA, 75 bp, synthetic construct
  source 1..75: mol_type = other DNA
atgcagagattgccacggtactggccgggccgttgatattgccaaaacagagcagtgggggagagttgtcgagaa

SEQ ID NO: 27240 - DNA, 75 bp, synthetic construct
  source 1..75: mol_type = other DNA
tgttacagagaaggtctcttccggcagggctgcaggcgggtatcaccaccggcatacagggtacacctggtctgt

SEQ ID NO: 27241 - DNA, 75 bp, synthetic construct
  source 1..75: mol_type = other DNA
agtctcctgccgataagtatgatctcatcaataaaacgtcccgtgtttctcctgacagtggccgtttttatgaac

SEQ ID NO: 27242 - DNA, 75 bp, synthetic construct
  source 1..75: mol_type = other DNA
ttgttgaggtggtcaatcataacctgaatgtctcatcaacagcggaaggactttacacatcacaacccgggatca

SEQ ID NO: 27243 - DNA, 75 bp, synthetic construct
  source 1..75: mol_type = other DNA
gatttacagtcagtacctgcagactgagcacaaagggtttgtgaagctggctgaagaactggcggctgaccgctg

SEQ ID NO: 27244 - DNA, 75 bp, synthetic construct
  source 1..75: mol_type = other DNA
ggcggtcagtctgggtcgtaaaaacttcctgttcttcggctctgaccatggtggtgagcggggagcgctactgta

SEQ ID NO: 27245 - DNA, 75 bp, synthetic construct
  source 1..75: mol_type = other DNA
cttggcgtcatagcagactggccggtcaaccgggtcagcgaactgcttccgtggcgcatagcactgccagctgaa

SEQ ID NO: 27246 - DNA, 75 bp, synthetic construct
  source 1..75: mol_type = other DNA
gtcagtcacagattcacctgacacctgtcccccgtcagaaaccccgaacgccagtaagccagaatccccgggacg

SEQ ID NO: 27247 - DNA, 75 bp, synthetic construct
  source 1..75: mol_type = other DNA
tgttcggtcttgtcaccgggatggcggaggatttgcagagcctggtgggtgccacggtggtccgccgccgggtgt

SEQ ID NO: 27248 - DNA, 75 bp, synthetic construct
  source 1..75: mol_type = other DNA
ctacctccgctatgtccttgacgtcatagccgactggccgataaaccgggtcggcgaactgctcccctggcgcgt

SEQ ID NO: 27249 - DNA, 75 bp, synthetic construct
  source 1..75: mol_type = other DNA
ggacagacgctttatcgacaatctgctgcgtcatcatcgggataacgttgagcttccgttatcccgccagggcga

SEQ ID NO: 27250 - DNA, 75 bp, synthetic construct
  source 1..75: mol_type = other DNA
ccgcaagcttcacactgacgacacaccggtaaaggtactggcaccgggcctgaaaaagacgaaaacagggcgcat

SEQ ID NO: 27251 - DNA, 75 bp, synthetic construct
  source 1..75: mol_type = other DNA
agcgatggcttcttgcccgcatccgtaatgaaaccttccacacgctcagggcgctgaatgcacgccttcgggagt

SEQ ID NO: 27252 - DNA, 75 bp, synthetic construct
  source 1..75: mol_type = other DNA
atgaacgacatctcttctgacgacatcttcctgctaaaacagcgcctggccgaacaggaagcgctgatccacgcc

SEQ ID NO: 27253 - DNA, 75 bp, synthetic construct
  source 1..75: mol_type = other DNA
ggcgccgtgctgcccgaactgcggcggttcactgagctatctgggcgaggataccgccgaacagctggagttgat

SEQ ID NO: 27254 - DNA, 75 bp, synthetic construct
  source 1..75: mol_type = other DNA
taccaggtgcagaacgaagcgcagcgatacgcgttgagtcaggcgaaatccatcgctgatgaactgatgaccggg

SEQ ID NO: 27255 - DNA, 75 bp, synthetic construct
  source 1..75: mol_type = other DNA
tttccgaagcccctttcttacgcgaacaggaggttgctgtcataacagcttaccgcaatgtgtttatccaggatg

SEQ ID NO: 27256 - DNA, 75 bp, synthetic construct
  source 1..75: mol_type = other DNA
ctggttgaactgtttttcgaagagatccgtcgcgctctggaaaacggcgaacaggtgaaactctctggttttggt

SEQ ID NO: 27257 - DNA, 75 bp, synthetic construct
  source 1..75: mol_type = other DNA
tgggtatcatcaaatcgcccgacgcatttcagctcatgggcgcgtcgtggcattattcccgatcgtatggcaact

SEQ ID NO: 27258 - DNA, 75 bp, synthetic construct
  source 1..75: mol_type = other DNA
tgccggattcatacgatgctccggatccgcgcattaaacagctggcgcgccgcagtacagtgacgccgggcgggg

SEQ ID NO: 27259 - DNA, 75 bp, synthetic construct
  source 1..75: mol_type = other DNA
cggtgaggggcttcctctgccgcagacatatgaccgtcctgacccgcgtataaagcaactggctcgtcgcagcac

SEQ ID NO: 27260 - DNA, 75 bp, synthetic construct
  source 1..75: mol_type = other DNA
ccgctggtgattctggcaggaatattactgcagcgaccgctttcgcgtcatattaatgcctccatgcgggaatca

SEQ ID NO: 27261 - DNA, 75 bp, synthetic construct
  source 1..75: mol_type = other DNA
gatctggatgcacttaacgaactttccgagctgatctatgccgcagaatgcggggaacatattgaaccgtataag

SEQ ID NO: 27262 - DNA, 75 bp, synthetic construct
  source 1..75: mol_type = other DNA
ggtgccaacgaatggttacgcaggcaaggacgaggcccggcagcaaattaatgattacatattgaactactacaa

SEQ ID NO: 27263 - DNA, 75 bp, synthetic construct
  source 1..75: mol_type = other DNA
catcgacaaggtgactgagcaggggcatggcgtgcttctgttcaccatggagatggcgaacatccagattggtga

SEQ ID NO: 27264 - DNA, 75 bp, synthetic construct
  source 1..75: mol_type = other DNA
tgcgccgccactaccagatgtcagagacgcagatttactccgttatccgcaaccagcgtcgcctgcatcaggaac

SEQ ID NO: 27265 - DNA, 75 bp, synthetic construct
  source 1..75: mol_type = other DNA
ctattcgcaaggccgagggattaacacaaaaaaaattttgcgagcttagtggattagcacttagttcgttgaaaa

SEQ ID NO: 27266 - DNA, 75 bp, synthetic construct
  source 1..75: mol_type = other DNA
attaacgtgaaataccgttatgagtttacggacacgctggggctggtgacgtcattcagctatgcaggagacaag

SEQ ID NO: 27267 - DNA, 75 bp, synthetic construct
  source 1..75: mol_type = other DNA
gtcattcagctatgcaggagacaggaatcgccagattacccgttacagcgatacccgctggcatgaagattccgt

SEQ ID NO: 27268 - DNA, 75 bp, synthetic construct
  source 1..75: mol_type = other DNA
gtcattcagttatgccaacgctgaagatgagcaaaaaacgcattacagcgatacccgctggcatgaagattccgt

SEQ ID NO: 27269 - DNA, 75 bp, synthetic construct
  source 1..75: mol_type = other DNA
atgcgtaaattatgtgctgttattctgtccgcagtagtctggctggttgccgctggtacgccagcgagtgcagca

SEQ ID NO: 27270 - DNA, 75 bp, synthetic construct
  source 1..75: mol_type = other DNA
attaacgtgaaataccgttatgagtttacggacacactggggatggtgacgtcgttcagctatgcaggagacagg

SEQ ID NO: 27271 - DNA, 75 bp, synthetic construct
  source 1..75: mol_type = other DNA
attaacgtgaaataccgttatgagtttacggacgcgctggggctgattacgtccttcagttatgccaatgctgaa

SEQ ID NO: 27272 - DNA, 75 bp, synthetic construct
  source 1..75: mol_type = other DNA
ctcacatctaaaatgtttgcccattatcgagataaacgactgacaggtgagatctacttcagcgagaaatggaag

SEQ ID NO: 27273 - DNA, 75 bp, synthetic construct
  source 1..75: mol_type = other DNA
ggatgcccgtacaaaaaaatctacttcaactggaagagcggtaagtctgagaagtgcatcttctgctatccgcgt

SEQ ID NO: 27274 - DNA, 75 bp, synthetic construct
  source 1..75: mol_type = other DNA
cgactgccgcgcttgctgctggcactgtttgtcggtgcagccctcgccgtggcgggcgtgctgatacaggggatt

SEQ ID NO: 27275 - DNA, 75 bp, synthetic construct
  source 1..75: mol_type = other DNA
cgtggggggctggcgtgcagtttaacccgaccgaatccgtggccattgaccttgcttatgaaggttccggcagtg

SEQ ID NO: 27276 - DNA, 75 bp, synthetic construct
  source 1..75: mol_type = other DNA
gtcgcttatgaaggctccggcagcggtgactggcgtaccaacagtttcatcgttggtgtcggttataaattctga

SEQ ID NO: 27277 - DNA, 75 bp, synthetic construct
  source 1..75: mol_type = other DNA
gggaatacaccctgacggtcagggcgattaacagttatggccagcagggggaaccggccaccaccacgttcagga

SEQ ID NO: 27278 - DNA, 75 bp, synthetic construct
  source 1..75: mol_type = other DNA
cggcaacgctggcggcgatgccggagatgacggtggaaaaagcccgcccgatcctggctgcttcaccgcaggcgg

SEQ ID NO: 27279 - DNA, 75 bp, synthetic construct
  source 1..75: mol_type = other DNA
tcatgtccagaagtgggagcgagtctgcgccgcgctgcgggagctgaacaagcaccgggatattgtccgacagat

SEQ ID NO: 27280 - DNA, 75 bp, synthetic construct
  source 1..75: mol_type = other DNA
ccggcagcggtgcagggtggcgtgccacagacgtcagcagacggtgatgcggacgtgaaaatgctcatggccatg

SEQ ID NO: 27281 - DNA, 75 bp, synthetic construct
  source 1..75: mol_type = other DNA
cagaatgagaatcatgaggccggtaataaatacatcccttacgggaaaatggcttcctggctggttgagtggaaa

SEQ ID NO: 27282 - DNA, 75 bp, synthetic construct
  source 1..75: mol_type = other DNA
ataaacccgatgggccagcaacagcagggatagatgatttgggtgaaattttagctaagatgaaacagagaacat

SEQ ID NO: 27283 - DNA, 75 bp, synthetic construct
  source 1..75: mol_type = other DNA
agcaactagtatcaatccatgccgatattaacgggcaagctaataatacaaccattaatggaggcagacagtcaa

SEQ ID NO: 27284 - DNA, 75 bp, synthetic construct
  source 1..75: mol_type = other DNA
aatgaatgatccaagggttagccagattaatgctcgtttcatggccgcttatcgaagctcccgtttatccttggg

SEQ ID NO: 27285 - DNA, 75 bp, synthetic construct
  source 1..75: mol_type = other DNA
aacctttactcgcggtcctgtttttctacaaagaaatcatgcaacgcggcggcaatctgatgctctccattattg

SEQ ID NO: 27286 - DNA, 75 bp, synthetic construct
  source 1..75: mol_type = other DNA
tactgaaatcacccgccttaagcgacaactggctgaacgggatgaagaactggctattctccaaaaggccgcgac

SEQ ID NO: 27287 - DNA, 75 bp, synthetic construct
  source 1..75: mol_type = other DNA
aatggaaccatcattgatggtggagggcagacagtaacaactcaggggcatgttgatggtacaacgataaataag

SEQ ID NO: 27288 - DNA, 75 bp, synthetic construct
  source 1..75: mol_type = other DNA
cactgttgattaactggaactgtgcagcctcgaaatccccaccgaagacccctgatgaaaagcaggatacgccgg

SEQ ID NO: 27289 - DNA, 75 bp, synthetic construct
  source 1..75: mol_type = other DNA
aattatagccgaaaaatacaggaaacacggcgagagcttaccggagaggctcaggcagagcgagaagcagcaaaa

SEQ ID NO: 27290 - DNA, 75 bp, synthetic construct
  source 1..75: mol_type = other DNA
atggttttattggacgtaacctgtgcttacgccttcaggaagcaggctactgtgaccttgttaagattgaccgcg

SEQ ID NO: 27291 - DNA, 75 bp, synthetic construct
  source 1..75: mol_type = other DNA
ggaccgtatgaccatgaatggtggtcgttgggtgaattttaactgggagagctggcggtcaaacgttggacgtca

SEQ ID NO: 27292 - DNA, 75 bp, synthetic construct
  source 1..75: mol_type = other DNA
ttcttccattcaggctgaactggttaatgcttatggtcaaagtaaagctgcagcagaaaaacatattgaacgcta

SEQ ID NO: 27293 - DNA, 75 bp, synthetic construct
  source 1..75: mol_type = other DNA
ttaatgtcctgaagcaacctttatccattcttcctgaacatatctccgatttggttctggagcatatacgccaga

SEQ ID NO: 27294 - DNA, 75 bp, synthetic construct
  source 1..75: mol_type = other DNA
gttcgggctggcgctggactgctacagcagtacaccacagcggctggaagcagcctccccggcagccgggaaggg

SEQ ID NO: 27295 - DNA, 75 bp, synthetic construct
  source 1..75: mol_type = other DNA
aattcattgaatacccaacccgacctgcggggatacaaacctttaatgagcagtctattctttctctttatagag

SEQ ID NO: 27296 - DNA, 75 bp, synthetic construct
  source 1..75: mol_type = other DNA
gccgctcggctatctgattgaggtgagggagtggtggcagctcaacgaggagccggggacgttccgtatcgttgt

SEQ ID NO: 27297 - DNA, 75 bp, synthetic construct
  source 1..75: mol_type = other DNA
ttggctcatcgctgctcgaggtcgccgccgcccgcgcggccgcagatattgagcgtgtgccggtaccgcttcgca

SEQ ID NO: 27298 - DNA, 75 bp, synthetic construct
  source 1..75: mol_type = other DNA
atgaaactgaaagctattatattggccaccggtcttattaactgtattgcattttcagcacaggcagtggatacg

SEQ ID NO: 27299 - DNA, 75 bp, synthetic construct
  source 1..75: mol_type = other DNA
ccagccgttgaaatctatagctatatagctggattcaatgaacaagggcaagaatgttacgctactcaaaaaaca

SEQ ID NO: 27300 - DNA, 75 bp, synthetic construct
  source 1..75: mol_type = other DNA
tcacctttaaaggtgccggtgttgacacaagaaacggcagcaccgttgagtggaatatccggtatgataataaag

SEQ ID NO: 27301 - DNA, 75 bp, synthetic construct
  source 1..75: mol_type = other DNA
atctgtttgttcagggaaaaagaaccggtgacaaggaatacgcagaagtgcttgttgccataaccgaacttacaa

SEQ ID NO: 27302 - DNA, 75 bp, synthetic construct
  source 1..75: mol_type = other DNA
tgtcttattttattaggattttcaacaaacattttggtgttacacctaagcagttttttaattattttaaaagtg

SEQ ID NO: 27303 - DNA, 75 bp, synthetic construct
  source 1..75: mol_type = other DNA
aggcgctggcgaagaaagcgggcggcagcttcaaaacggtgaatgaccgtatccatattacaaaacggttcagtg

SEQ ID NO: 27304 - DNA, 75 bp, synthetic construct
  source 1..75: mol_type = other DNA
cagcgcgtttccggtgcattttttgggataatggttggttcgggggcaccgggaacgcgcttcagtcagaccttg

SEQ ID NO: 27305 - DNA, 75 bp, synthetic construct
  source 1..75: mol_type = other DNA
atacgcctgcacaggaacgcagcaaactcacccgtaatccgccggatattctgatcaccacacccgaatcactct

SEQ ID NO: 27306 - DNA, 75 bp, synthetic construct
  source 1..75: mol_type = other DNA
aagtgccggagatcacgctggccggatgctgggccatgcccgcaggggcttcgccgacctgtataaaatcagtaa

SEQ ID NO: 27307 - DNA, 75 bp, synthetic construct
  source 1..75: mol_type = other DNA
gcataagaagtttaaaggaactgtgcttgttggcgtcccggtaatggcgttggagtatttagccgcagagcttcg

SEQ ID NO: 27308 - DNA, 75 bp, synthetic construct
  source 1..75: mol_type = other DNA
gaggacggttgtggcgcacgtcttcggtgaacgcactctggccacactggagcgtcttctgagcctgctgtcggc

SEQ ID NO: 27309 - DNA, 75 bp, synthetic construct
  source 1..75: mol_type = other DNA
accgggactaactccgattcggatctggactccattcaggacgaaatcaaatcccgtctggacgaaattgaccgc

SEQ ID NO: 27310 - DNA, 75 bp, synthetic construct
  source 1..75: mol_type = other DNA
ggaaatcgcaggaaataacattctgcttgctggcaggtatcctgatgttcatggcaatgatggttgccggacgcg

SEQ ID NO: 27311 - DNA, 75 bp, synthetic construct
  source 1..75: mol_type = other DNA
gtggagtggctgacgtatggcagcggttatcttgcggggatgaagctgggcggaacgccgctggtcgagtacacg

SEQ ID NO: 27312 - DNA, 75 bp, synthetic construct
  source 1..75: mol_type = other DNA
tggttctggcagggcagtcaaacggcatgtcgtatggtgaaggtcttccgctgccggagacatatgaccgtccgg

SEQ ID NO: 27313 - DNA, 75 bp, synthetic construct
  source 1..75: mol_type = other DNA
tgcatcgattttattcagtggcacaactgttgcaactaagaataatgtattggctcttcaagggtccgcatcagg

SEQ ID NO: 27314 - DNA, 75 bp, synthetic construct
  source 1..75: mol_type = other DNA
aaatgccatattgtatatctgaaatggaaaggcctaaagaagaatatgatgcacttactttaagtgatgttccct

SEQ ID NO: 27315 - DNA, 75 bp, synthetic construct
  source 1..75: mol_type = other DNA
taaattttggtttcactcgcaccgatgcacaggtttacatcagtctgttgaaaaacggtcgtagcagtggttaca

SEQ ID NO: 27316 - DNA, 75 bp, synthetic construct
  source 1..75: mol_type = other DNA
ccgacaggaagcgatgtccgttgccgaagcgttcaattactggattgaaaggcactgtatcgctaacgggctagt

SEQ ID NO: 27317 - DNA, 75 bp, synthetic construct
  source 1..75: mol_type = other DNA
tctctctgagttaggttgcccgccgcacgtaattgaaaagctgctcgggcatcagatggtgggggttatggcgca

SEQ ID NO: 27318 - DNA, 75 bp, synthetic construct
  source 1..75: mol_type = other DNA
ggagttcattttttgagcttggttcagcttctgatatgcttaatttctttagctatctaaataaattatctcgaa

SEQ ID NO: 27319 - DNA, 75 bp, synthetic construct
  source 1..75: mol_type = other DNA
gaaaatggcgtgaaacaaacgttaatcgtcagttttgtcggcgactcgagtaccgcacaggttgatctgcagaag

SEQ ID NO: 27320 - DNA, 75 bp, synthetic construct
  source 1..75: mol_type = other DNA
tttatacttcactgattcatatctgaatggtgacgttaccaaatatactaacgaaaccttccgtaccccagctgg

SEQ ID NO: 27321 - DNA, 75 bp, synthetic construct
  source 1..75: mol_type = other DNA
ggttctcaggctaatcaacaggtgaattttatcggtgatcaaagtactgcagccctgaccctcagtgtgccttca

SEQ ID NO: 27322 - DNA, 75 bp, synthetic construct
  source 1..75: mol_type = other DNA
ggctggaacgatgaggcatttaatccaaaggatgcgcagcgttatctctgccgtatctggagcctgatgcgcacg

SEQ ID NO: 27323 - DNA, 75 bp, synthetic construct
  source 1..75: mol_type = other DNA
tagtgccattattggtcctgtagggaattctatcaaatgttattatgttagcagcttatcagggttttattatac

SEQ ID NO: 27324 - DNA, 75 bp, synthetic construct
  source 1..75: mol_type = other DNA
cgtgttacgcgcatcattaacggcggtctgaacggtattgaggatcgtaaggtccgatacaacaaggcgcgggcg

SEQ ID NO: 27325 - DNA, 75 bp, synthetic construct
  source 1..75: mol_type = other DNA
acaggcataaccctgtacaacatcaggaggcatccagtatggggtatgtctctatacaccgccagtttatggaca

SEQ ID NO: 27326 - DNA, 75 bp, synthetic construct
  source 1..75: mol_type = other DNA
cgaccacatctgggagaattatatgaggcgtataaaacgacactgacagatatgaaaccagaatatatcggctcc

SEQ ID NO: 27327 - DNA, 75 bp, synthetic construct
  source 1..75: mol_type = other DNA
agatcgcgttcagtacctgcttagaaagttcaaaaaactcggcatgattgactgggtttcacacggtaaattctc

SEQ ID NO: 27328 - DNA, 75 bp, synthetic construct
  source 1..75: mol_type = other DNA
cgggcatggaactttgaacccgatgccgctgaaagtcttaaccgctacatccgcacctctggcatccgtacaggc

SEQ ID NO: 27329 - DNA, 75 bp, synthetic construct
  source 1..75: mol_type = other DNA
tttttctgcttctgccggaggagtatggcccagcctttccagcaatcgtcgattgttataccagtccacccacgt

SEQ ID NO: 27330 - DNA, 75 bp, synthetic construct
  source 1..75: mol_type = other DNA
gtgaaaaatgctggaggaagcggcgcggccacgctaaacgggatcgaactcataactgtgaatggcgatgaatct

SEQ ID NO: 27331 - DNA, 75 bp, synthetic construct
  source 1..75: mol_type = other DNA
atggaaaatgccgtgctcccgaataagcaatgcaccgaaggcgatcaacatgccaatggcaataatgaaacaggc

SEQ ID NO: 27332 - DNA, 75 bp, synthetic construct
  source 1..75: mol_type = other DNA
tgatgccgttcaaacataataatctgcggcttctggggctgagtaacaaaatcctgctggctgatgagatccacg

SEQ ID NO: 27333 - DNA, 75 bp, synthetic construct
  source 1..75: mol_type = other DNA
acatgtggcggcactgtagacataagcaccatcgaatggtggcttcaacgctctggcgaagcccgtgccgccatt

SEQ ID NO: 27334 - DNA, 75 bp, synthetic construct
  source 1..75: mol_type = other DNA
ttggtggggggcttgctgctatggctttggctgcaggtggtggtggcggcagcaagcacagacatgaaaaccatg

SEQ ID NO: 27335 - DNA, 75 bp, synthetic construct
  source 1..75: mol_type = other DNA
ttgccggccagacggttagcgtgacggcggacaacggcgcaacggttgctccggtggtcatcacagggccggacg

SEQ ID NO: 27336 - DNA, 75 bp, synthetic construct
  source 1..75: mol_type = other DNA
tgcgatggaacgctggattattaacgtgctttctgcccaggttgacgatgtcgaaaggctaatacaaatccagca

SEQ ID NO: 27337 - DNA, 75 bp, synthetic construct
  source 1..75: mol_type = other DNA
ttaccacctgccagcgcgtcacgttgctgactgacggaaatcgttgcgaaagactggccccttacaggctgattg

SEQ ID NO: 27338 - DNA, 75 bp, synthetic construct
  source 1..75: mol_type = other DNA
gcttaccacgaaatccttcctgaagcgccaagaatccgcgcactgaatgacaagcgtaaaaaccagatccgaacg

SEQ ID NO: 27339 - DNA, 75 bp, synthetic construct
  source 1..75: mol_type = other DNA
agctgctggatggagctgaggttgagtggttgccattatcttcattatgcaacctaataacgacagggaaattga

SEQ ID NO: 27340 - DNA, 75 bp, synthetic construct
  source 1..75: mol_type = other DNA
gcacgaagttcaggactctgctggtgacggtactggtaccttcgttgtttcttctggcagcgacaactatgctgt

SEQ ID NO: 27341 - DNA, 75 bp, synthetic construct
  source 1..75: mol_type = other DNA
ccggcggatacggtggcggttgatcttgcgtacgaagtggccggtcatggtgactggcgaacggatgcgtttatt

SEQ ID NO: 27342 - DNA, 75 bp, synthetic construct
  source 1..75: mol_type = other DNA
acaagaattacgtttcgcacgctgggaggatatcgattttgagacaaaattatgggagattccggcagaagtaat

SEQ ID NO: 27343 - DNA, 75 bp, synthetic construct
  source 1..75: mol_type = other DNA
aatgagttggtcaaagctgctgatgagcttggaatagaaatacaccgtactgaacgagatgatacagcgattgca

SEQ ID NO: 27344 - DNA, 75 bp, synthetic construct
  source 1..75: mol_type = other DNA
atgtttaaaggacaaaaaacattggccgcactggccgtatctctgctgttcacagcacctgtttatgcggctgat

SEQ ID NO: 27345 - DNA, 75 bp, synthetic construct
  source 1..75: mol_type = other DNA
ttcactggtacaaatacccggtgacgtactggctgaacattatcacgtctgcagggtgtctgatgggcggggata

SEQ ID NO: 27346 - DNA, 75 bp, synthetic construct
  source 1..75: mol_type = other DNA
aaacagcaaaaccaaaagaaaagccctataagctagctgatggtggcggaatgtatctactgattaacactaatg

SEQ ID NO: 27347 - DNA, 75 bp, synthetic construct
  source 1..75: mol_type = other DNA
aacgtgcaaaaccacaagacaagccatacacattgaacgatggacaaggtctgtcattgcttatcaatcccgatg

SEQ ID NO: 27348 - DNA, 75 bp, synthetic construct
  source 1..75: mol_type = other DNA
aaataaagtaacaaaagaaaatgatgtttatgatagtctaaatttttcaagcaaagatttaacgaattcttatat

SEQ ID NO: 27349 - DNA, 75 bp, synthetic construct
  source 1..75: mol_type = other DNA
gcccgtgcgtcagaagaagcctccgcagacagtgaagaggcttcccgccgtaatgcagagtcagccgctgaaaat

SEQ ID NO: 27350 - DNA, 75 bp, synthetic construct
  source 1..75: mol_type = other DNA
ggctggcagtgaatcttgatgtcgaaagtaacatcaatatttctaacaactcccgcgttgctggtatcagcctga

SEQ ID NO: 27351 - DNA, 75 bp, synthetic construct
  source 1..75: mol_type = other DNA
tagagaatgggccgtgtgtatcatcatttattatttcaggaggcagcgcaacgacaagagccagtgatttggtta

SEQ ID NO: 27352 - DNA, 75 bp, synthetic construct
  source 1..75: mol_type = other DNA
ccaccggcacagccatcacccagaactcagaaaaactggccaccgtcattgcccaggacgggcaggccacccgtc

SEQ ID NO: 27353 - DNA, 75 bp, synthetic construct
  source 1..75: mol_type = other DNA
aggagttgctcgactgcatttccaggcttcgggatgatgtaaatgccctcactgttgcattttcatatctggcct

SEQ ID NO: 27354 - DNA, 75 bp, synthetic construct
  source 1..75: mol_type = other DNA
gctttgctgtgtttatgctctcgttaagtagtgtagcacttgcagctcctaaaggtatctgtacccctgataatg

SEQ ID NO: 27355 - DNA, 75 bp, synthetic construct
  source 1..75: mol_type = other DNA
gcgcggcgctgaagttagatctggtgacttcacctgaacaactggaacaggagctacaggccgcgcgctcagctg

SEQ ID NO: 27356 - DNA, 75 bp, synthetic construct
  source 1..75: mol_type = other DNA
cggctggtatcagcgccggactggctgtgcgctggtttcaaccagtagatgcagcgatgaaagaattcggcatta

SEQ ID NO: 27357 - DNA, 75 bp, synthetic construct
  source 1..75: mol_type = other DNA
caggcggacaatcagtcgttggttgtcttacctggaagaaaatcgcgcgcttgtccgcatccctgttgctggcaa

SEQ ID NO: 27358 - DNA, 75 bp, synthetic construct
  source 1..75: mol_type = other DNA
acactgaactgaacgccgaggtaccgctgtcggatgatctcaatgtcagtctgaacgccatgacacagcatcgta

SEQ ID NO: 27359 - DNA, 75 bp, synthetic construct
  source 1..75: mol_type = other DNA
gtggctgcttttgccagaagggcaacggatacatatgccgatgcggatggtggcgttccctggaatgccgaatca

SEQ ID NO: 27360 - DNA, 75 bp, synthetic construct
  source 1..75: mol_type = other DNA
cgggcaacaggccgatcgacttgccgatctggaaagaatgctacacctgttcagcggcaaaccgatccccgacaa

SEQ ID NO: 27361 - DNA, 75 bp, synthetic construct
  source 1..75: mol_type = other DNA
caggcaatccgaaaaccgcagaacaatatcagatgacaaaacaacatggtatcacctggcttttttcggaagatg

SEQ ID NO: 27362 - DNA, 75 bp, synthetic construct
  source 1..75: mol_type = other DNA
gcggtgctgctgggcggcatggttggcgcggggattgtgttggggcgtaacgctctgcgtaattacaacgcgaag

SEQ ID NO: 27363 - DNA, 75 bp, synthetic construct
  source 1..75: mol_type = other DNA
tcgaatgaagctgattgttactttgttggacaacatttttttgaatttgaagaatactatccggcaatagaaatg

SEQ ID NO: 27364 - DNA, 75 bp, synthetic construct
  source 1..75: mol_type = other DNA
gagccagcaccgctggctcaccacagctacgaaggtgcattgaaggcaattgcatttgaactggaaaaacggaat

SEQ ID NO: 27365 - DNA, 75 bp, synthetic construct
  source 1..75: mol_type = other DNA
cgccatcacatccggcacctgacccggaaatactgaagagcacaatcagggctatgaagcagtcagaacagcggg

SEQ ID NO: 27366 - DNA, 75 bp, synthetic construct
  source 1..75: mol_type = other DNA
ttaagacgtaagatgcgaaaagcagccatggacagaaactatctcgcgtcagtccttgcggggagcgggctttcg

SEQ ID NO: 27367 - DNA, 75 bp, synthetic construct
  source 1..75: mol_type = other DNA
tattcaggcacaaacttacttcatcgatttgccttgctgggcgcagagtgaagaagaggacgattcgcctgatac

SEQ ID NO: 27368 - DNA, 75 bp, synthetic construct
  source 1..75: mol_type = other DNA
ggctctgcgcacatcacgttcaggaagccagaactggttgacagactgaatgatattatcgcaaaacactatcct

SEQ ID NO: 27369 - DNA, 75 bp, synthetic construct
  source 1..75: mol_type = other DNA
ggaacaacgaaaattgtcgatctcgctaatgctctcggtgttacaccggaatggttaagttctggtgtaggttct

SEQ ID NO: 27370 - DNA, 75 bp, synthetic construct
  source 1..75: mol_type = other DNA
gatcgcaggtgtccgggaagcgcggttactttcagagaatttcgaactactggaggactggagcgagcaactacc

SEQ ID NO: 27371 - DNA, 75 bp, synthetic construct
  source 1..75: mol_type = other DNA
cggaaacccgccggattataaatgtttcagatggtgttaaggatagtgatgcggccacaaaaggacagatggaca

SEQ ID NO: 27372 - DNA, 75 bp, synthetic construct
  source 1..75: mol_type = other DNA
atcatgggtgaggatggtaaacgctggcatccgtgccgttcacaagatgaattgctggcagaactatctacgaaa

SEQ ID NO: 27373 - DNA, 75 bp, synthetic construct
  source 1..75: mol_type = other DNA
gaccctgacagaccccgtgacagggaagtcaggagaagtgaaatcactggtttcgtcgctacaaaccaaatatgc

SEQ ID NO: 27374 - DNA, 75 bp, synthetic construct
  source 1..75: mol_type = other DNA
aatcagcggtgccctgaaagaaatggatgaaaacccggacctgacagcccccggcacactggaatcactgattac

SEQ ID NO: 27375 - DNA, 75 bp, synthetic construct
  source 1..75: mol_type = other DNA
gcacatgaaccggttgcagcaaaaaaaacctattcatggcgcgatattgatccctctcacaccattcacaacaaa

SEQ ID NO: 27376 - DNA, 75 bp, synthetic construct
  source 1..75: mol_type = other DNA
actggcgctcgggcgcatgagttcctgcagataaggctggtacctgagcatctttatcgattgaatctgacagag

SEQ ID NO: 27377 - DNA, 75 bp, synthetic construct
  source 1..75: mol_type = other DNA
acggccccacgaccagtcgatggcaatatttattgagtaaagatttaggtctgatatttatccctattgaaattt

SEQ ID NO: 27378 - DNA, 75 bp, synthetic construct
  source 1..75: mol_type = other DNA
ctgcagcagcttatccgcctgccggggcagcagtatgatgaggagtccggcctgtattacaaccgccaccgctat

SEQ ID NO: 27379 - DNA, 75 bp, synthetic construct
  source 1..75: mol_type = other DNA
tgagctggaattcgaggacgtccccgatactgtcctcaacagcctgaccgacaaggtcaaagccattttcagccg

SEQ ID NO: 27380 - DNA, 75 bp, synthetic construct
  source 1..75: mol_type = other DNA
ggacgcagcgataaaacgtgccggactccgccatcgaaaatcatatcagtcgagacatacttatgcctgctggtc

SEQ ID NO: 27381 - DNA, 75 bp, synthetic construct
  source 1..75: mol_type = other DNA
agttactgcgtaacgaaagtccacgcccgatgaagttcaacatcactcatggtaaagggcgtaaaggcatcatca

SEQ ID NO: 27382 - DNA, 75 bp, synthetic construct
  source 1..75: mol_type = other DNA
tgtcgcaacaagggaatcattacaggaactcgcagagcgtgtcggaatgattaacgcgaatattcaggggggggt

SEQ ID NO: 27383 - DNA, 75 bp, synthetic construct
  source 1..75: mol_type = other DNA
cagctatgatgacccggcgagtgagctgccgacagggatacaggacgcgacgggcagtacaaaacagatggcatg

SEQ ID NO: 27384 - DNA, 75 bp, synthetic construct
  source 1..75: mol_type = other DNA
gctctggttgccgtcggggtagcccgatattttggcaatatggcgtcttctgctggatctgcaactgccggatta

SEQ ID NO: 27385 - DNA, 75 bp, synthetic construct
  source 1..75: mol_type = other DNA
atggttcatcaacattacggaactcagaccgttaatcgcggtgccgtccggccaggtatgctggttaaacacaaa

SEQ ID NO: 27386 - DNA, 75 bp, synthetic construct
  source 1..75: mol_type = other DNA
tatggatgatttaaaaatagtaaaaaatacggaagcatgggtatggtataaaaattgcgatagtaaaaataaaaa

SEQ ID NO: 27387 - DNA, 75 bp, synthetic construct
  source 1..75: mol_type = other DNA
ctgaaacgctggcggcaacatcaaatgcagtaaaagctgcctatgacaatgctgaaaaacgtctgcagaaagcta

SEQ ID NO: 27388 - DNA, 75 bp, synthetic construct
  source 1..75: mol_type = other DNA
ctgctgaatattctggctgaagccagtattcagccggataaggcgcagttaaaccagcttacgctgtccattaaa

SEQ ID NO: 27389 - DNA, 75 bp, synthetic construct
  source 1..75: mol_type = other DNA
gtactcaatatggcagcaacattaccgttggtctttgatgctgagctaaacagtattcgcgagcggttgaacata

SEQ ID NO: 27390 - DNA, 75 bp, synthetic construct
  source 1..75: mol_type = other DNA
ttataaatcagcttgatatgcgctggcgacgtcgtgttccggttattcatcagacggagaccgctgaatgtggac

SEQ ID NO: 27391 - DNA, 75 bp, synthetic construct
  source 1..75: mol_type = other DNA
tggccgctgtatgaatcacgcctgaagggaaagctgcacgttatcagcaagcgttacactcagcgcattgagcga

SEQ ID NO: 27392 - DNA, 75 bp, synthetic construct
  source 1..75: mol_type = other DNA
gggctaatttaagtttagaaaatgaaattaaatatcttaatgatgttacctcattagtcgcagaagactggactt

SEQ ID NO: 27393 - DNA, 75 bp, synthetic construct
  source 1..75: mol_type = other DNA
atgcaatatgcgaaacctgtcactctgaatgttgaagagtgcgaccgtctgtcttttctgccttacctgtttggc

SEQ ID NO: 27394 - DNA, 75 bp, synthetic construct
  source 1..75: mol_type = other DNA
cgatgctgctggttctggtgctgattggtcttaatatgcgaccactgctcacctccgtcgggccactgctaccgc

SEQ ID NO: 27395 - DNA, 75 bp, synthetic construct
  source 1..75: mol_type = other DNA
ccggcgatgaccgttttactgggaaaaaccaccctgaccacaccggcaggacgtgaggggctttctccccgggtc

SEQ ID NO: 27396 - DNA, 75 bp, synthetic construct
  source 1..75: mol_type = other DNA
tgatgctggggaggctggagcgggaactgcggcagggcagcgtgagtgaagaaagccagcagtggcttgcgcagt

SEQ ID NO: 27397 - DNA, 75 bp, synthetic construct
  source 1..75: mol_type = other DNA
ctgcgttacgtcattgaacatatccaggactggccggcaaaccgggtacgcgatctgttgccctggaaagttgat

SEQ ID NO: 27398 - DNA, 75 bp, synthetic construct
  source 1..75: mol_type = other DNA
caggcattgcctacggcacctccgcaggcagtgctggctactggtttttacagctgctcgataaagtcacgccct

SEQ ID NO: 27399 - DNA, 75 bp, synthetic construct
  source 1..75: mol_type = other DNA
catcatgcctgtcgcacggagtgttatgccatgacggttcattattaccgtctgcgggactacgccctgcagcat

SEQ ID NO: 27400 - DNA, 75 bp, synthetic construct
  source 1..75: mol_type = other DNA
caggatattcccggtgtgctggccgtgtttgctgaacgccgtaaggacagttttggtccgtatgtccggctgatg

SEQ ID NO: 27401 - DNA, 75 bp, synthetic construct
  source 1..75: mol_type = other DNA
aaagaccaacaactgagtctggttgaagagacggaggtcttcctgcgttctgcgctggcacgtgccgaagaaaag

SEQ ID NO: 27402 - DNA, 75 bp, synthetic construct
  source 1..75: mol_type = other DNA
tgtgctgggtagcctggtatttggcctgctgacgtacctgacaaacctttatttcaagattaaagaagataagcg

SEQ ID NO: 27403 - DNA, 75 bp, synthetic construct
  source 1..75: mol_type = other DNA
ggttaatgaaaagtacacgcgctgggttaagacgcagccgtgcgcatgttgtggaaagcctgctgatgatcccca

SEQ ID NO: 27404 - DNA, 75 bp, synthetic construct
  source 1..75: mol_type = other DNA
tggtgccggaacttggcctggtggtccttaagcccggacgcgaatcactgcctgtttttcattgcggcagggtgc

SEQ ID NO: 27405 - DNA, 75 bp, synthetic construct
  source 1..75: mol_type = other DNA
gttatggtaccggcgcaatggtgttgtgctggcactgcgacaaccaactgcgtgaccagacatcggaatcactgg

SEQ ID NO: 27406 - DNA, 75 bp, synthetic construct
  source 1..75: mol_type = other DNA
ggggagtctgctgtttgggctgctgacgtacctgactaacctgtatttcaaaatcagagaggaccggcgtaaggc

SEQ ID NO: 27407 - DNA, 75 bp, synthetic construct
  source 1..75: mol_type = other DNA
gcatgcggataccgtggcatttgaagagaagtatggttcccaactggagctgatatttcgttttatcgatcgcgc

SEQ ID NO: 27408 - DNA, 75 bp, synthetic construct
  source 1..75: mol_type = other DNA
actgcgccggatgctgttcggttcccgttctgaaaaactgcagcgtgaggttgaacaggctgaggcccaactgaa

SEQ ID NO: 27409 - DNA, 75 bp, synthetic construct
  source 1..75: mol_type = other DNA
cggcccgctgccgttcattctctcccgcacctacagcagctaccggaccaggacacccgcgccggtgggagtgtt

SEQ ID NO: 27410 - DNA, 75 bp, synthetic construct
  source 1..75: mol_type = other DNA
aaatgacagggattacaaaaacctggtgtgatccgaatatcggcgtgtccctgattacatccggggttaaggaac

SEQ ID NO: 27411 - DNA, 75 bp, synthetic construct
  source 1..75: mol_type = other DNA
catcagcagcaaaagtgcgacggcagaagaagcactgaagcgaatcagtgaactgtacgccatcgaggatgaaat

SEQ ID NO: 27412 - DNA, 75 bp, synthetic construct
  source 1..75: mol_type = other DNA
aactgcgtcgtgaagttgaacaggctgaggccctgctgaaacaacacgaacaggacagcgatcgttacagtgggc

SEQ ID NO: 27413 - DNA, 75 bp, synthetic construct
  source 1..75: mol_type = other DNA
ggcatcccgtctttttccgttctgtaccggtaaataccgctggcacggcggtgctgaggcgtataccggtcgtga

SEQ ID NO: 27414 - DNA, 75 bp, synthetic construct
  source 1..75: mol_type = other DNA
cgttctgaaaaactgcgtcgcgaggttgaacaggctgaggccctgctgaagcaacgcgaacaggacagcgatcgt

SEQ ID NO: 27415 - DNA, 75 bp, synthetic construct
  source 1..75: mol_type = other DNA
gatgacgtacagccatcatgcctgtcgtacggagaattatgccatgacggtccattattaccggttgcgggatta

SEQ ID NO: 27416 - DNA, 75 bp, synthetic construct
  source 1..75: mol_type = other DNA
ccgtctgaacggtatcgatccggaagcgtatctgcgccatattctgagcgtactgccggaatggccctccaaccg

SEQ ID NO: 27417 - DNA, 75 bp, synthetic construct
  source 1..75: mol_type = other DNA
atgaaacgacatctgaacaccagctacaggctggtatggaatcacattacgggtaccctggtggtggcctccgaa

SEQ ID NO: 27418 - DNA, 75 bp, synthetic construct
  source 1..75: mol_type = other DNA
aaaggacagtccaaattatggcaacccggtgaacccggtgctgggtgcaaaggtgctgccgggcgagacggacat

SEQ ID NO: 27419 - DNA, 75 bp, synthetic construct
  source 1..75: mol_type = other DNA
tgacacccgttactaatatagtggctgacacctttatcaaggtaatcgatgaaaagacaaagccccgcaagtgtc

SEQ ID NO: 27420 - DNA, 75 bp, synthetic construct
  source 1..75: mol_type = other DNA
cctgcggtcagtaacgctgttgcacgcctgaaggtgatgtttaatgacgagctttttgttcgttatggccgtggt

SEQ ID NO: 27421 - DNA, 75 bp, synthetic construct
  source 1..75: mol_type = other DNA
ccggataaccgcatcgcagaggatgcgcactatgtttaccactatgatgaatacggcagactgacggagaagacg

SEQ ID NO: 27422 - DNA, 75 bp, synthetic construct
  source 1..75: mol_type = other DNA
attttctgatggataaagatgcgcaggggtatatcgacctgtctgatttggatttaacaagttgtcattttaaag

SEQ ID NO: 27423 - DNA, 75 bp, synthetic construct
  source 1..75: mol_type = other DNA
ttaaaacatctattggtaaaaaggcgttgtttaagttaacaagacacgatgggaaaaaagttccttttggtgctg

SEQ ID NO: 27424 - DNA, 75 bp, synthetic construct
  source 1..75: mol_type = other DNA
caggcgaactggttggtgagatctcgaaggtgtttgactgcgaggtccgacactggtacagcgagccggtacacg

SEQ ID NO: 27425 - DNA, 75 bp, synthetic construct
  source 1..75: mol_type = other DNA
acaggccggtaacgggaatgtggccgcggtggcttctgcgccggtgatccgtgtggagcagaaactggataaggg

SEQ ID NO: 27426 - DNA, 75 bp, synthetic construct
  source 1..75: mol_type = other DNA
agttggtcttcgaacatttagatctaaaatttacaaagcacactaatgcttgggttccattcttactttcttcat

SEQ ID NO: 27427 - DNA, 75 bp, synthetic construct
  source 1..75: mol_type = other DNA
aactgtctgcgctgtatatcgctgttctttcatcattgcctttctttttttgtgcagatgttgcggccagaagct

SEQ ID NO: 27428 - DNA, 75 bp, synthetic construct
  source 1..75: mol_type = other DNA
atcagtgacattatcagcgaatggcagaaaagtgatgtatcagacagactcagaattatcagattatgtctggaa

SEQ ID NO: 27429 - DNA, 75 bp, synthetic construct
  source 1..75: mol_type = other DNA
ttaataataaaggagaatatatttttatcagaaatagtgtcccgggattgagttcagtatgcataccgtatcatg

SEQ ID NO: 27430 - DNA, 75 bp, synthetic construct
  source 1..75: mol_type = other DNA
aatcacgtattaatcacccacatcaaccgtaacatcatcaacgattatctgttgtttttaaataagaacttaacc

SEQ ID NO: 27431 - DNA, 75 bp, synthetic construct
  source 1..75: mol_type = other DNA
gttaacgttgacggagaaaccctggggaacgtttattcttgcttctactttcgaagatgacaaaacagcggcaga

SEQ ID NO: 27432 - DNA, 75 bp, synthetic construct
  source 1..75: mol_type = other DNA
attgccaacgaaataaaagattatggctactattcagtaatctacagaaccaaactacgcaaatttattaaaaaa

SEQ ID NO: 27433 - DNA, 75 bp, synthetic construct
  source 1..75: mol_type = other DNA
gcccggcgctgatcgtgctgatgtctatcgccaccggtctggcggtagccagtaactattacgcccagccattgc

SEQ ID NO: 27434 - DNA, 75 bp, synthetic construct
  source 1..75: mol_type = other DNA
tgaatgtaccgaaggaagaacgagaagcaatgttcttcggcggcctgttctcttatgaccttgtggcgggatttg

SEQ ID NO: 27435 - DNA, 75 bp, synthetic construct
  source 1..75: mol_type = other DNA
taggtccagataaatttgattctatagatagcaccgcatatgacgccttaaataaaataaatagccaatctattt

SEQ ID NO: 27436 - DNA, 75 bp, synthetic construct
  source 1..75: mol_type = other DNA
tcctgaagaatattctttctatgctgaagcacatttgccaaaaatccggcatattcaggataatagtacaggaga

SEQ ID NO: 27437 - DNA, 75 bp, synthetic construct
  source 1..75: mol_type = other DNA
atcgaagcgaaggcgctgcgcaaactgcgtcacccgagccgttctgaagtgctgcgtagcttcctggacgattaa

SEQ ID NO: 27438 - DNA, 75 bp, synthetic construct
  source 1..75: mol_type = other DNA
tccgtaaacagcgcgccacgtctttatcttcccctgccggtccccgttctgcttcctcttctctggttttccccg

SEQ ID NO: 27439 - DNA, 75 bp, synthetic construct
  source 1..75: mol_type = other DNA
gtgaagacggccgccctggacctcgcccgcgagcgccaggcgcacgaggccggcgcgcggacccgcgccacggcc

SEQ ID NO: 27440 - DNA, 75 bp, synthetic construct
  source 1..75: mol_type = other DNA
tatgtgatcgaggcttacgcggccggttgcctgattgagaacatcaatttaggtgacttcaccgcacctgccgca

SEQ ID NO: 27441 - DNA, 75 bp, synthetic construct
  source 1..75: mol_type = other DNA
tccctaccgattcacggcaatgcctgaaaccgacaacacttacccgatagcggttacagcggaagattcgaaagg

SEQ ID NO: 27442 - DNA, 75 bp, synthetic construct
  source 1..75: mol_type = other DNA
ttcgcgcctggtttactggcggtgcgacagcagaaaaaggcgctggcggcggtgattatcacgaccagggggcga

SEQ ID NO: 27443 - DNA, 75 bp, synthetic construct
  source 1..75: mol_type = other DNA
aatggtgcgcagaatacgatgaatggggcaacctgctgaatgaagagaacccgcatcagctgcagcagcttatcc

SEQ ID NO: 27444 - DNA, 75 bp, synthetic construct
  source 1..75: mol_type = other DNA
tatgactctatcgacgcgggcgaccgctaccaggtgaaacgcatcaccgtgaaaccgggcgagggcttgtcggta

SEQ ID NO: 27445 - DNA, 75 bp, synthetic construct
  source 1..75: mol_type = other DNA
gcccgaccggaaggtctgttcagggatacgctggtcacaggtcagccatggcgtggtcagcagcggcgcacgagg

SEQ ID NO: 27446 - DNA, 75 bp, synthetic construct
  source 1..75: mol_type = other DNA
aagggctctggctttatcatgttctggagccagaaacttgggccaggatgtgttcccgggtgtcaggcgctggca

SEQ ID NO: 27447 - DNA, 75 bp, synthetic construct
  source 1..75: mol_type = other DNA
tatgatgaggagtccggcctgtattacaaccgccaccgctattatgacccgctgcaggggcggtatatcactcag

SEQ ID NO: 27448 - DNA, 75 bp, synthetic construct
  source 1..75: mol_type = other DNA
tcaccctgggcgttcaggcaggttatgtccacagcgtcagcggcagcagcgctgaaggctataacggtcaggcca

SEQ ID NO: 27449 - DNA, 75 bp, synthetic construct
  source 1..75: mol_type = other DNA
ctggcagggactttccctggatgacggtaaggacaacgccggttatgtgaagttcgggcatggcagtgcacaaca

SEQ ID NO: 27450 - DNA, 75 bp, synthetic construct
  source 1..75: mol_type = other DNA
tatctctgttggcactgagcatgtattctcattttagtgtttcaacagagttgaatctagattttatccagggga

SEQ ID NO: 27451 - DNA, 75 bp, synthetic construct
  source 1..75: mol_type = other DNA
tgacggaagaaagaaaaatgaaactagaacgactggctataaatgccagtgtaaaactaggaaaaacaattacat

SEQ ID NO: 27452 - DNA, 75 bp, synthetic construct
  source 1..75: mol_type = other DNA
gtaagcaatggtgttgtcaataacactggaaccggtgctcctgccggtttcgttcatcgggaagggcaggcgtct

SEQ ID NO: 27453 - DNA, 75 bp, synthetic construct
  source 1..75: mol_type = other DNA
aagaactatcagcgttataacgaacggataaaaggaaaacgtcaggaatggggaatactatgcaacaacgattaa

SEQ ID NO: 27454 - DNA, 75 bp, synthetic construct
  source 1..75: mol_type = other DNA
cagcagaacacctttgttccgtggcataatcgccagcgttgtgctgttcgtaatggcaacgattggcttctctct

SEQ ID NO: 27455 - DNA, 75 bp, synthetic construct
  source 1..75: mol_type = other DNA
aatacaaacaagagcttgcacagattagtagcttcaatgactttttgagtgttccacgagaatttagtaaggtta

SEQ ID NO: 27456 - DNA, 75 bp, synthetic construct
  source 1..75: mol_type = other DNA
tcacgccggacagcctgccgccggtggagtggctgacctacggcagcggttatctggcgggcatgaagcttggcg

SEQ ID NO: 27457 - DNA, 75 bp, synthetic construct
  source 1..75: mol_type = other DNA
tggcgcgattacctgaaactgagcggcaacggttatctgcgcctcagtaactggcgtagtgcaccggaactcgac

SEQ ID NO: 27458 - DNA, 75 bp, synthetic construct
  source 1..75: mol_type = other DNA
ggatgtgcatcaaaatttactgcagggacaaaatgttaccttcacggtcgtgaatggtgcggcggtttttgccga

SEQ ID NO: 27459 - DNA, 75 bp, synthetic construct
  source 1..75: mol_type = other DNA
acagccgccagcgcgtcgagctgcgcgatgtgatcctgcactatcgcgacgggctgctacccatcctcgcgccgt

SEQ ID NO: 27460 - DNA, 75 bp, synthetic construct
  source 1..75: mol_type = other DNA
aagggatgaaaaaaacagcgcctgacggcgctgtgtctggcatgcctgcaatccgggaaaccggaccaggaaaaa

SEQ ID NO: 27461 - DNA, 75 bp, synthetic construct
  source 1..75: mol_type = other DNA
ttgagctgcttaaagccatgttgcgtaagcaacagagtcggcttcgacagtatgcctgtcaggtcgcgggctatg

SEQ ID NO: 27462 - DNA, 75 bp, synthetic construct
  source 1..75: mol_type = other DNA
tggttaaatactgaggatgtatttacaacaagaaattataaaagcgattactacctttctgtatgtcgtatcgaa

SEQ ID NO: 27463 - DNA, 75 bp, synthetic construct
  source 1..75: mol_type = other DNA
ttttgcggggcttttcagtgccctgatcaccctgccatcgctgccgtcactgtcttcaggaggcctgaatacccg

SEQ ID NO: 27464 - DNA, 75 bp, synthetic construct
  source 1..75: mol_type = other DNA
ggaaaagcgggaagctgctgggcgcaaagctcggcgcgttgctggggaaaacaggtaagtcgttaaaaagtattg

SEQ ID NO: 27465 - DNA, 75 bp, synthetic construct
  source 1..75: mol_type = other DNA
ctggtcacatctgcagtaaaagatgccctttctcttgcgagaacaaaaggaagtagctatcttgctgacgatata

SEQ ID NO: 27466 - DNA, 75 bp, synthetic construct
  source 1..75: mol_type = other DNA
tgaaaggcggggagatagccccagtaaaattgccaccaaatctgtcttcacaaattttgctgcagcgaccggata

SEQ ID NO: 27467 - DNA, 75 bp, synthetic construct
  source 1..75: mol_type = other DNA
ggatgttggcgagcttcgtgaagctgttcgagttaaacttaaagcccgtaaagagtggcgagttgctcaacaacc

SEQ ID NO: 27468 - DNA, 75 bp, synthetic construct
  source 1..75: mol_type = other DNA
gggtggggagcgtgctgcaaatagtgcacttcacatcatcgctatcggacgtttacgaactgacgataaaacaaa

SEQ ID NO: 27469 - DNA, 75 bp, synthetic construct
  source 1..75: mol_type = other DNA
tgtacttctgtacggtggtctgtgtgctgtatctcctttcgggtgggtacagggcagtgcgcgattgctggcgca

SEQ ID NO: 27470 - DNA, 75 bp, synthetic construct
  source 1..75: mol_type = other DNA
aaacaaatttctctgaatgaatatgaggaagtatttaaaaaatctgattttaaaattttactggggcgcctgaca

SEQ ID NO: 27471 - DNA, 75 bp, synthetic construct
  source 1..75: mol_type = other DNA
gttttgtttggcccttgctgggcgacgatctatgcaggaacactggatacagttgataacgaacatacagaaatg

SEQ ID NO: 27472 - DNA, 75 bp, synthetic construct
  source 1..75: mol_type = other DNA
ataggggcgctgttcctggcatatgttgcactggctccaagtttcagcgcggtctatgtcgccgtcctggtaagt

SEQ ID NO: 27473 - DNA, 75 bp, synthetic construct
  source 1..75: mol_type = other DNA
gcgcagcgtgaagccgatattgaaaacgaaaaactccgtaaagaggtcgaagatttgagagctgccagcgagact

SEQ ID NO: 27474 - DNA, 75 bp, synthetic construct
  source 1..75: mol_type = other DNA
tactgcagccagcatttttcggcagatgtgcccgttatggagttctcacgcccggacagggaggacgcgcaatga

SEQ ID NO: 27475 - DNA, 75 bp, synthetic construct
  source 1..75: mol_type = other DNA
cggagcaggcaggaggttctcatttccgaatcacttcattgggaggaaaaaataaacttgatggaactgccatta

SEQ ID NO: 27476 - DNA, 75 bp, synthetic construct
  source 1..75: mol_type = other DNA
atgacgacgttaactcaatgccagcagcaggtgctggatatgctgatttcttatcagaaagagcgtggctttccg

SEQ ID NO: 27477 - DNA, 75 bp, synthetic construct
  source 1..75: mol_type = other DNA
tcgcagaggctggtatggcggcaagggaggccggtcatgccgtccgtgagatggagcgatggatggtgccgaaca

SEQ ID NO: 27478 - DNA, 75 bp, synthetic construct
  source 1..75: mol_type = other DNA
cgctgggtgcctggctggatgggttcaccacgtccacagacggatgccactgaacgcgccgataacctggctgat

SEQ ID NO: 27479 - DNA, 75 bp, synthetic construct
  source 1..75: mol_type = other DNA
ctggttgttcatgccctgcctggtgaccgccacggtgtcgccgcaggtggtcgccgactggcagcactcaacatg

SEQ ID NO: 27480 - DNA, 75 bp, synthetic construct
  source 1..75: mol_type = other DNA
ctcaaaaactacgtggtggttattatacaccacaaaacatcgctgactttacaaccaaatgggttcttaataaca

SEQ ID NO: 27481 - DNA, 75 bp, synthetic construct
  source 1..75: mol_type = other DNA
acatgaagccgattatggatctgcgtaagcagtacggtgaagcgtttgaaaaacgccacggcatccgtctgggct

SEQ ID NO: 27482 - DNA, 75 bp, synthetic construct
  source 1..75: mol_type = other DNA
tgctcagtttctgtaccgcgtgcagtcttaacggtgtccagacccgcgagtgtggtcacacgtcacgcagtccgc

SEQ ID NO: 27483 - DNA, 75 bp, synthetic construct
  source 1..75: mol_type = other DNA
gaaaaaaggtggcgcaaaaacgaaaggccgtggacgtaaggccgcgcagccggagcctcagccgcaaccgccgga

SEQ ID NO: 27484 - DNA, 75 bp, synthetic construct
  source 1..75: mol_type = other DNA
accgcatgggggagccggatcctgacgtgatgagcggtaagaaacgttctgtttattcaccaccggttaaagcgg

SEQ ID NO: 27485 - DNA, 75 bp, synthetic construct
  source 1..75: mol_type = other DNA
aaggccgcgcagccagagcctcagccgcaaccgccggagggggaggattacgggttttcagacgacatcccgttc

SEQ ID NO: 27486 - DNA, 75 bp, synthetic construct
  source 1..75: mol_type = other DNA
ggctgaacatgcagagcaccatatgaaagacaaccgctgggtgcctggctggatgtgtgcaccacatccacagac

SEQ ID NO: 27487 - DNA, 75 bp, synthetic construct
  source 1..75: mol_type = other DNA
cgcgaaaacgaaaggccgtggacgtaaggccgcgcagccggagcctcagccgcaaccgccggagggtgacgatta

SEQ ID NO: 27488 - DNA, 75 bp, synthetic construct
  source 1..75: mol_type = other DNA
tggtttctatgctctgctttgtctatgtcggagtctacttctggcgtgaaagcaaagtacgtaatgcactggctg

SEQ ID NO: 27489 - DNA, 75 bp, synthetic construct
  source 1..75: mol_type = other DNA
gtcagcagcatcatcggtgtactgacagcaaaaccatcccgtaaacgtcgtaaaaaccgtacagagccttaccgt

SEQ ID NO: 27490 - DNA, 75 bp, synthetic construct
  source 1..75: mol_type = other DNA
ttgataatcagcgaaatgcaacgcaagcttgccacatgggcagccaccgatccgtccctacggattcaacggctg

SEQ ID NO: 27491 - DNA, 75 bp, synthetic construct
  source 1..75: mol_type = other DNA
ggcacaggatcattcgcaaacgcagtcgttatggcgagatgcgagtggtctcaacgatcccgcaggagaaagcca

SEQ ID NO: 27492 - DNA, 75 bp, synthetic construct
  source 1..75: mol_type = other DNA
gggtaacggacataacctacatcaggacccacgaaggctggctgtatcttgccgtggttgttgatctgttctcac

SEQ ID NO: 27493 - DNA, 75 bp, synthetic construct
  source 1..75: mol_type = other DNA
taaattctggtgtgtgcgcgaaggcaaaacaatgtcgctgcagatgctccgtgaacatatgactctcgaagggat

SEQ ID NO: 27494 - DNA, 75 bp, synthetic construct
  source 1..75: mol_type = other DNA
tgactctgctgtggaaaaccatcaaggcgggacatatcgatgtcggtctctttcgggcggccagtgaaggtgtgc

SEQ ID NO: 27495 - DNA, 75 bp, synthetic construct
  source 1..75: mol_type = other DNA
tgcctcttttgaggccgccgcatcccgggctgaggtggctgcttctgacgccttcgtggtcgcggcggatgcaga

SEQ ID NO: 27496 - DNA, 75 bp, synthetic construct
  source 1..75: mol_type = other DNA
ggttgttccgttatcagcagctacactcaaaatcaccgtcttataaggacgcttttaaaagttctacgagtaaag

SEQ ID NO: 27497 - DNA, 75 bp, synthetic construct
  source 1..75: mol_type = other DNA
cagccgtttttgaggattctgcgctggtttccgacgctttcgcgttcgtctcggatgtcttcgctgcggaagcag

SEQ ID NO: 27498 - DNA, 75 bp, synthetic construct
  source 1..75: mol_type = other DNA
gtgatgcggcagaagcaataaaaatagcagccacaccacaaaaattgctggcatttcgtatgaaggtcacacctc

SEQ ID NO: 27499 - DNA, 75 bp, synthetic construct
  source 1..75: mol_type = other DNA
tgcctcttttgaggccgccgcaccccgtgccgaggtggcagcttctgacgccttcgtggtcgctgtggatgcaga

SEQ ID NO: 27500 - DNA, 75 bp, synthetic construct
  source 1..75: mol_type = other DNA
tttgtctctctttttccggtggtaaagattccaccgtgcttttccatcttttggctgatgtggcccgcaggaaaa

SEQ ID NO: 27501 - DNA, 75 bp, synthetic construct
  source 1..75: mol_type = other DNA
tacgggatgaactttgagtttatgccggaactgaagtggagcttcggctacccaggcgcgattatctttatgatc

SEQ ID NO: 27502 - DNA, 75 bp, synthetic construct
  source 1..75: mol_type = other DNA
atgaaaaaaagaaatttcagcgcagagtttaaacgcgaatccgctcaactggtcgttgaccagaattacaccgtg

SEQ ID NO: 27503 - DNA, 75 bp, synthetic construct
  source 1..75: mol_type = other DNA
cttaagcgtacccagcgaggccgatggattggtgtgatgtggattggcgtgttgcttgccgctgcgttgtgcctg

SEQ ID NO: 27504 - DNA, 75 bp, synthetic construct
  source 1..75: mol_type = other DNA
gccgagcttctggagatcgaactgaccgaatcggtcgcattcggcaatccagccctgttcgccagtttcgacgcc

SEQ ID NO: 27505 - DNA, 75 bp, synthetic construct
  source 1..75: mol_type = other DNA
ggcggtaacgccccagattacccacaaatggaacaagctgcttgccagctatgtttctgccggtttctcggtgac

SEQ ID NO: 27506 - DNA, 75 bp, synthetic construct
  source 1..75: mol_type = other DNA
atgacgtgcaggttgatgaaagcctgatgaccttcgacaggcagccgttgcatcatccgctctccatctatgaca

SEQ ID NO: 27507 - DNA, 75 bp, synthetic construct
  source 1..75: mol_type = other DNA
aaccttttactgggtggcacttcccctgaccacggtaaacggtgtctcgcagtttcagccggagtggatatgctg

SEQ ID NO: 27508 - DNA, 75 bp, synthetic construct
  source 1..75: mol_type = other DNA
aacgtcgattctctgtactgttcattgactgggaagcccagtaccagtgcaccattgaacatattcagaagatgc

SEQ ID NO: 27509 - DNA, 75 bp, synthetic construct
  source 1..75: mol_type = other DNA
tctggagccggaaacctgggccaggatgtgtgagcgggtgtcaggcgctgccagcggggcgctttatgccaatga

SEQ ID NO: 27510 - DNA, 75 bp, synthetic construct
  source 1..75: mol_type = other DNA
caccagtcccgcaaatccgcgcgagacgcagccgcatttcttcgaatcccgattccctgagctgttaaagctgct

SEQ ID NO: 27511 - DNA, 75 bp, synthetic construct
  source 1..75: mol_type = other DNA
caaacattcagcggtggcctttctggtgaactatccggcaatgcttctacagctgcaaaattaaaaactgccagg

SEQ ID NO: 27512 - DNA, 75 bp, synthetic construct
  source 1..75: mol_type = other DNA
tgtatcaccgatacaaccgttgcccccgtgtggggcagtggttcgccaccagcaacggtcacgttctgcgggttt

SEQ ID NO: 27513 - DNA, 75 bp, synthetic construct
  source 1..75: mol_type = other DNA
acgctgagctgctggggtacgggcagggtgagcgggtccgtgaacggatgcgggagctgcagcagattcgtgacg

SEQ ID NO: 27514 - DNA, 75 bp, synthetic construct
  source 1..75: mol_type = other DNA
cgtcaatgtctttgcctgaagcctcagataatgaaggacgaacacgggcggcgctggcagagcagaaccggctga

SEQ ID NO: 27515 - DNA, 75 bp, synthetic construct
  source 1..75: mol_type = other DNA
tcaaaaaactgaccgaacagtacaacgtgacatacatcggcatcgactcgacaggtgtcggtcacggggtttacg

SEQ ID NO: 27516 - DNA, 75 bp, synthetic construct
  source 1..75: mol_type = other DNA
cgtgacctacatcggcatcgactcaaccggcgttggtcacggggtttacgagaacgtgaaagcgttctttcctgc

SEQ ID NO: 27517 - DNA, 75 bp, synthetic construct
  source 1..75: mol_type = other DNA
tgacctgactggcgacccgattgtcatcggtaacaacggcgcaaaactgatttttctcggtaccaattccaacac

SEQ ID NO: 27518 - DNA, 75 bp, synthetic construct
  source 1..75: mol_type = other DNA
aaattccacccgtttctggcgctgttgctggccagcttcttcgtgggaacgatgatgggcatggggccactggat

SEQ ID NO: 27519 - DNA, 75 bp, synthetic construct
  source 1..75: mol_type = other DNA
acttaacgctgtgctggattacattgacgcggtgacggcaacagataccagcacagcgccggacgtcatctggcc

SEQ ID NO: 27520 - DNA, 75 bp, synthetic construct
  source 1..75: mol_type = other DNA
aatttatcgccacccaggcaggaaatattacggtttataactatgatggtgaaacacgggaatatattttcacat

SEQ ID NO: 27521 - DNA, 75 bp, synthetic construct
  source 1..75: mol_type = other DNA
tattactgtctataattatgatggtgaaacacgggaatatatttccatatcaactgaatatcttgccgttggtgt

SEQ ID NO: 27522 - DNA, 75 bp, synthetic construct
  source 1..75: mol_type = other DNA
caataagacagtgtatccacatctctctgatgactgagcgatggtatccgtcactggagccctgccggctcattt

SEQ ID NO: 27523 - DNA, 75 bp, synthetic construct
  source 1..75: mol_type = other DNA
ggcatttctggcagaaaacccggatacagaactgtccatggacgaatggttctgtgcagtgtcctgcataacctc

SEQ ID NO: 27524 - DNA, 75 bp, synthetic construct
  source 1..75: mol_type = other DNA
gaccgactttcatgcactggcgctgcgcccgtttggctggcgcgaggtgtggatcggttatgacccggcaaaagg

SEQ ID NO: 27525 - DNA, 75 bp, synthetic construct
  source 1..75: mol_type = other DNA
ctctgcggtcgatcaccgactggcagaactgacaatgaacaagctttacgatcgtgttcccgcttcagtctggaa

SEQ ID NO: 27526 - DNA, 75 bp, synthetic construct
  source 1..75: mol_type = other DNA
cgtttgacacctatatggacggcgatctgatccatatcgagaaaatcacgctcgatattacggataacagcgctg

SEQ ID NO: 27527 - DNA, 75 bp, synthetic construct
  source 1..75: mol_type = other DNA
ttatggcgaccgccgaaacataaccggatggtcagggtggtatgccgtgagtggagcgtcacggataacgtccgg

SEQ ID NO: 27528 - DNA, 75 bp, synthetic construct
  source 1..75: mol_type = other DNA
gagcgttttgcgcttttctcacttttcaggccacaaatcattcgcgtggtgctgaacccggtaaaactgacctgg

SEQ ID NO: 27529 - DNA, 75 bp, synthetic construct
  source 1..75: mol_type = other DNA
atgcttgatacctgtatctgctcgttcatcatgcgtgaacagccagaagccgtcctgaagcgtctggagcaggcg

SEQ ID NO: 27530 - DNA, 75 bp, synthetic construct
  source 1..75: mol_type = other DNA
tcttaatggggaactggtaaaagctgcaactgcatttcgtcgcggctttgcggcaaatacttacatcgcagaaat

SEQ ID NO: 27531 - DNA, 75 bp, synthetic construct
  source 1..75: mol_type = other DNA
tgtaccgggtggaaaagcgaaggtggagtattgctatgcagtgaatgtaccaggtgacagggaaattgtaaccca

SEQ ID NO: 27532 - DNA, 75 bp, synthetic construct
  source 1..75: mol_type = other DNA
cgtgacctatatcggcatcgactcgacgggtgtcggtcacggggtttatgaaaacgtgaaagcgttttttccagc

SEQ ID NO: 27533 - DNA, 75 bp, synthetic construct
  source 1..75: mol_type = other DNA
gcatgaggaagagcaggtggagaggccggatgaggacaaaatgctgatgcagaaagcggcaggacttgccggagg

SEQ ID NO: 27534 - DNA, 75 bp, synthetic construct
  source 1..75: mol_type = other DNA
gagcgcgtggtggagacaaacaatggcccgatgctgatagcgtctccgtcgttacgcggtgttgcactgctgcgc

SEQ ID NO: 27535 - DNA, 75 bp, synthetic construct
  source 1..75: mol_type = other DNA
atcgacagtcagagcaacgtgtcgcagactgctgcacgtctgaagacgcgacttcaggacttccgtcacacgcat

SEQ ID NO: 27536 - DNA, 75 bp, synthetic construct
  source 1..75: mol_type = other DNA
ttggagttgctgctcataaagggggcgtttacaaaacctctgtttctgttcatcttgctcaggatctggctctga

SEQ ID NO: 27537 - DNA, 75 bp, synthetic construct
  source 1..75: mol_type = other DNA
gcagtgtggaaaaacgcacgaatgctcgttactggatagtggtgatgttgtttatcgtcacatccttcaactacg

SEQ ID NO: 27538 - DNA, 75 bp, synthetic construct
  source 1..75: mol_type = other DNA
tagccttgcgtgccatatcacatcccgccagctaaaccacgttgaagcggctgaactgctgcgtgtggcagctga

SEQ ID NO: 27539 - DNA, 75 bp, synthetic construct
  source 1..75: mol_type = other DNA
ttgtgttatgcgcattgctgataagcgcaatgctgcctgggtggtcatgggcagaatctgcatggcaagactctt

SEQ ID NO: 27540 - DNA, 75 bp, synthetic construct
  source 1..75: mol_type = other DNA
acctgaaggtgtcgacccaaattattgctggtgggatgttgatccagttgatgctgcaaatgaagctatgagtta

SEQ ID NO: 27541 - DNA, 75 bp, synthetic construct
  source 1..75: mol_type = other DNA
tcgttgaaggtggaaacagagccttcgagtgcaagatagaagatgttgaaataattgggaaaattataagtttaa

SEQ ID NO: 27542 - DNA, 75 bp, synthetic construct
  source 1..75: mol_type = other DNA
ctaaaaccggatcggatgatgcagggcttaatattttactgacagtggctcgtctggaagaacgccgggcaaggg

SEQ ID NO: 27543 - DNA, 75 bp, synthetic construct
  source 1..75: mol_type = other DNA
agacaccaccaccattaacttcagtcacagtacggcatctgatgacctggggaataccaccactaacccgaagac

SEQ ID NO: 27544 - DNA, 75 bp, synthetic construct
  source 1..75: mol_type = other DNA
ctgacaaaattaacgacagaaatcgccagctattgcgctgatgaatttaagaaactgaacgacaaaaggaactgg

SEQ ID NO: 27545 - DNA, 75 bp, synthetic construct
  source 1..75: mol_type = other DNA
gccccggcttcttgcctgtggtatccgggaagttttactggatgaggtgtctcagcggaatatcccgctctctca

SEQ ID NO: 27546 - DNA, 75 bp, synthetic construct
  source 1..75: mol_type = other DNA
atgtaccaggatcttattcgtaatgaactgaacgaagcggcggaaacgctggctaactttttaaaagatgacgcc

SEQ ID NO: 27547 - DNA, 75 bp, synthetic construct
  source 1..75: mol_type = other DNA
tgacactgaagcggaaaacggaaggagagacgcctgtccgcagccggaaaaccatcatcaatgtcaccacgccac

SEQ ID NO: 27548 - DNA, 75 bp, synthetic construct
  source 1..75: mol_type = other DNA
acctgaaggaaacgcaccaaattattgctggtgggaggttgatccggttgatgctgcaaatgaagccatgagtta

SEQ ID NO: 27549 - DNA, 75 bp, synthetic construct
  source 1..75: mol_type = other DNA
cacgttgtacgaagctctgcgcacggttgatcgtctgctgcgtggacagaatttcattaaacaggctgatttata

SEQ ID NO: 27550 - DNA, 75 bp, synthetic construct
  source 1..75: mol_type = other DNA
tggtgggcgtgctgggtgcgcttttgctggcgtatggtgcctggctgatttatcccccggcggggtttgttgttg

SEQ ID NO: 27551 - DNA, 75 bp, synthetic construct
  source 1..75: mol_type = other DNA
ccagactgaaaaaggccacggtcaaaaatccgcacgtaaaaatcattgttaaccgcggtgatttacctgtcatca

SEQ ID NO: 27552 - DNA, 75 bp, synthetic construct
  source 1..75: mol_type = other DNA
atcagatcatcgctgtgattaagtcagttgaagccggacgaaccgttaaagatgtctgccgggaggccggtatct

SEQ ID NO: 27553 - DNA, 75 bp, synthetic construct
  source 1..75: mol_type = other DNA
ggtcagcatcgttatcagcgggcatttattcagcgattaaaaaatggtcgctggcatgtcatgcagcgtgtggcc

SEQ ID NO: 27554 - DNA, 75 bp, synthetic construct
  source 1..75: mol_type = other DNA
gaaagtaaaaacctggccttcagcatggtggacctgctgacagaggcgaagtcgtttgctgcagaaggaaccggt

SEQ ID NO: 27555 - DNA, 75 bp, synthetic construct
  source 1..75: mol_type = other DNA
agcgttggtgaccaaaggtgccttttatcatcactttaaaaataaaaaacaattactcagtgcctgttataagca

SEQ ID NO: 27556 - DNA, 75 bp, synthetic construct
  source 1..75: mol_type = other DNA
agagcagggaattgatacccaaattttgctgggtcattcgaatcaaaaaatgaccgatatttacaacgatgcacg

SEQ ID NO: 27557 - DNA, 75 bp, synthetic construct
  source 1..75: mol_type = other DNA
acgctggcaggctgaaaatcagcaggggatggctgagatcgcccgttttattgaaatgaacggctcttttgccga

SEQ ID NO: 27558 - DNA, 75 bp, synthetic construct
  source 1..75: mol_type = other DNA
acagcgtctggacggtgacagcggtttccggtgacagtgtcacgctgtcggacggacagcagacccgggtgattc

SEQ ID NO: 27559 - DNA, 75 bp, synthetic construct
  source 1..75: mol_type = other DNA
tggtggacctgctgacagaggcgaagtcgtttgctgcagaaggaaccggttttactgaactgggaggggaaatca

SEQ ID NO: 27560 - DNA, 75 bp, synthetic construct
  source 1..75: mol_type = other DNA
caccggcgaatcagaatggattcattttacaggtagcggatatctgttacgtaccgatgcgtggtcatacccggt

SEQ ID NO: 27561 - DNA, 75 bp, synthetic construct
  source 1..75: mol_type = other DNA
tgattattcctgcctgtactgtaagcaacacaactgttgactggcaggatgtagagattcagaccctgagtcaaa

SEQ ID NO: 27562 - DNA, 75 bp, synthetic construct
  source 1..75: mol_type = other DNA
tgccacttgtcgataagccattaattcaatacgtcgtgaatgaatgtattgcggctggcattactgaaattgtgc

SEQ ID NO: 27563 - DNA, 75 bp, synthetic construct
  source 1..75: mol_type = other DNA
cgcaggagtctgatgcgaaattcctgacccgtcttgcagaacgcaacggcggtgaggtgtcggtaaaaatgggaa

SEQ ID NO: 27564 - DNA, 75 bp, synthetic construct
  source 1..75: mol_type = other DNA
tagattttattctggatgagcatgagcggatattcagaaaacagggttctttgtgtatggcactgggtaagggct

SEQ ID NO: 27565 - DNA, 75 bp, synthetic construct
  source 1..75: mol_type = other DNA
cagtgtcgctccgtcactggccggaattaaaatcccgcacatcgaccagtcgcaggagtctgatgcgaaattcct

SEQ ID NO: 27566 - DNA, 75 bp, synthetic construct
  source 1..75: mol_type = other DNA
gcatatgctgccggccacaaaggcaattccaaaggagatgctgccgatcgttgataagccaatgattcagtacat

SEQ ID NO: 27567 - DNA, 75 bp, synthetic construct
  source 1..75: mol_type = other DNA
caccggaggtgcagcttaccgtcagtgggtgtccgcgagtgacgccgtgtcggctggatcaggcagcgccgcgca

SEQ ID NO: 27568 - DNA, 75 bp, synthetic construct
  source 1..75: mol_type = other DNA
tcatcatggcggattatcttggcctgattgagaagccgaaagcagatcgcaacgacctcgcaattgctcacatct

SEQ ID NO: 27569 - DNA, 75 bp, synthetic construct
  source 1..75: mol_type = other DNA
gagcttgaggcgctggcgcgtggtgcaattgtgaactatggcgcaaaagaatttcattaccatgttcagaaggcg

SEQ ID NO: 27570 - DNA, 75 bp, synthetic construct
  source 1..75: mol_type = other DNA
tcagttaccaacgggatctcggtatcacatgataatccggataaaggtcagcgtattcaggcgattccggtcgaa

SEQ ID NO: 27571 - DNA, 75 bp, synthetic construct
  source 1..75: mol_type = other DNA
gctgccgaagccgccgcgcaggtgctttccagcgtggaatctgaaatcgggcgcacgactgacccggtacgcatg

SEQ ID NO: 27572 - DNA, 75 bp, synthetic construct
  source 1..75: mol_type = other DNA
atgaccattctggactacatcgctactcatccggggtgtagcggcggagagatcgccgcagcactgaatacccca

SEQ ID NO: 27573 - DNA, 75 bp, synthetic construct
  source 1..75: mol_type = other DNA
cgaatgcggcagcgtcacaacaatcagcagccacttctgcatccgccgcgaccacgaaggcgtcagaagcagcca

SEQ ID NO: 27574 - DNA, 75 bp, synthetic construct
  source 1..75: mol_type = other DNA
taatgaaaatgatctgatcttctttgataatggccaggagataccactcgttataagcatgatcccggatgcaat

SEQ ID NO: 27575 - DNA, 75 bp, synthetic construct
  source 1..75: mol_type = other DNA
tacagatggtaatcatagccactcactgtccggcacagcagcatctgcaggtgcacacgcgcatactgtcggtat

SEQ ID NO: 27576 - DNA, 75 bp, synthetic construct
  source 1..75: mol_type = other DNA
gtcagctgtggatcccggaaggattcgcccacgggtttatggcgctgagcgatacggtgcagtttgtctacaagg

SEQ ID NO: 27577 - DNA, 75 bp, synthetic construct
  source 1..75: mol_type = other DNA
tcctgttttgagtaagtcagacattagcgggaataagatttacgctaatgatgaagttattgtccgtagtcagaa

SEQ ID NO: 27578 - DNA, 75 bp, synthetic construct
  source 1..75: mol_type = other DNA
ggacagaggaatggaactggccagacatctagaatttactgtcagcaccggcgttaaagtttacttctgcgatcc

SEQ ID NO: 27579 - DNA, 75 bp, synthetic construct
  source 1..75: mol_type = other DNA
gcccagcgcgttgccgactggttgggtaagaactacctgcaaaatcaggaaggttttgttcatatttgccggctg

SEQ ID NO: 27580 - DNA, 75 bp, synthetic construct
  source 1..75: mol_type = other DNA
aaagcgccacccaagtatcaatttgaagaaaatggtgaaacgaaatactggtctggtcgtggacgtgcgccaaaa

SEQ ID NO: 27581 - DNA, 75 bp, synthetic construct
  source 1..75: mol_type = other DNA
gtctgaattactggcaaccgctattagcggcgatgccgggttaaccatccagggcggcgcatctaccaccgaaga

SEQ ID NO: 27582 - DNA, 75 bp, synthetic construct
  source 1..75: mol_type = other DNA
ttttagaaaacatcttgcggcaagtgcggccgctcattggtcagggtaaagtcgcggattatattccggcgctgg

SEQ ID NO: 27583 - DNA, 75 bp, synthetic construct
  source 1..75: mol_type = other DNA
gttgagtatccgtacttcgtacccgcatgctgagagcgagtgggtatttttatctcgtaagggaaatccgctttc

SEQ ID NO: 27584 - DNA, 75 bp, synthetic construct
  source 1..75: mol_type = other DNA
catcaagaccaactgttgcagagcttggtgatgattcaggctggcatttctatagtcagcgaaatacagataact

SEQ ID NO: 27585 - DNA, 75 bp, synthetic construct
  source 1..75: mol_type = other DNA
atgcgaagagtcagggcgactacggaatatctcttggagaaactgccggggccaatggcctatatagcctggcac

SEQ ID NO: 27586 - DNA, 75 bp, synthetic construct
  source 1..75: mol_type = other DNA
atgaacatgcgtaatattaatgctattacagccctttctgtaccgggtaaaactatgtcagatgattttatgcat

SEQ ID NO: 27587 - DNA, 75 bp, synthetic construct
  source 1..75: mol_type = other DNA
accgtgatgctgttaaagccttccagcaacagctggcagaggtggcgattgccggtttccagccgcagtttaata

SEQ ID NO: 27588 - DNA, 75 bp, synthetic construct
  source 1..75: mol_type = other DNA
cgtgaagtcagaaggcttctcaatcaggtaatgcgtggtcatgatgctgacggcattgcttttccggtcagtcat

SEQ ID NO: 27589 - DNA, 75 bp, synthetic construct
  source 1..75: mol_type = other DNA
cgatgtcaccgcgaatgacagcacaactggcctgtgatgcactgcaaatggcgttgtggcggagaagacgcccgg

SEQ ID NO: 27590 - DNA, 75 bp, synthetic construct
  source 1..75: mol_type = other DNA
ttaacatgccgtggtggggcggttttgatccgcgcgtgtgggatgtggcaagcctgatggattttgctgtgccgg

SEQ ID NO: 27591 - DNA, 75 bp, synthetic construct
  source 1..75: mol_type = other DNA
atacattcaagttggtatttgagcaagatttcgagtctaacattaactattgttatcaaatctggcaaaagagtt

SEQ ID NO: 27592 - DNA, 75 bp, synthetic construct
  source 1..75: mol_type = other DNA
aaactttcagccagacaccataaagattgtttacgatgaaaataatattattgtcgccatcaccagagatgcctc

SEQ ID NO: 27593 - DNA, 75 bp, synthetic construct
  source 1..75: mol_type = other DNA
gaaaaaactggtatgaggaagtgaaaaactttcagccagacaccataaagattgtttacgatgaaaataatatta

SEQ ID NO: 27594 - DNA, 75 bp, synthetic construct
  source 1..75: mol_type = other DNA
gaagtggatgtttaaggacggaactgtggttaagcggatttatacagcagacgaacagcaacaacaggccgaatc

SEQ ID NO: 27595 - DNA, 75 bp, synthetic construct
  source 1..75: mol_type = other DNA
gcgatttcggtatacctgatcccggtatggctgatcgtgttaggtatcggctatctgtttaaagagaaaaccgcc

SEQ ID NO: 27596 - DNA, 75 bp, synthetic construct
  source 1..75: mol_type = other DNA
gctggcgcagggctggccggaagagacggatgttgaccagcgtaatccgaagtatccgggctggatcagcattta

SEQ ID NO: 27597 - DNA, 75 bp, synthetic construct
  source 1..75: mol_type = other DNA
atgaatgaaacgctgaatgcactgatttatcgccacgccagcaacctgttgctggcgcagggctggccggaagag

SEQ ID NO: 27598 - DNA, 75 bp, synthetic construct
  source 1..75: mol_type = other DNA
ctcgtcgacccagaagtcgaaccacgtaatggaaagctggtagtcgccaaacttgaaggagaaaacgaggcgaca

SEQ ID NO: 27599 - DNA, 75 bp, synthetic construct
  source 1..75: mol_type = other DNA
atgcgtgatatttaccacgaaacaacagaacgcgtatttcttgcactttctcacagtgaaaacatgctggaaata

SEQ ID NO: 27600 - DNA, 75 bp, synthetic construct
  source 1..75: mol_type = other DNA
agattgttgatgaaatctgcgattttgtggcgaatcagcaggctgttttcctgggcggtcactacatccttcagg

SEQ ID NO: 27601 - DNA, 75 bp, synthetic construct
  source 1..75: mol_type = other DNA
ccaaccaatgcaaaatgctttcaaaatgcgtaaacgtgttgagaaagttaagcatgttgctgttaaaagccttga

SEQ ID NO: 27602 - DNA, 75 bp, synthetic construct
  source 1..75: mol_type = other DNA
cttaccgggatgggggcgcgacgtcagccactgatgtgggccattactactgccgggtacaacattgaggggccg

SEQ ID NO: 27603 - DNA, 75 bp, synthetic construct
  source 1..75: mol_type = other DNA
ccaattatataaaaattgctgatgcaactacacctggaagtgtgaaggctattgcaactattactttctcatatc

SEQ ID NO: 27604 - DNA, 75 bp, synthetic construct
  source 1..75: mol_type = other DNA
tcgagatgctcaacggctcggtgcccaacgatgaactgttcgggatcatctataccgttgatgaaggtgacgact

SEQ ID NO: 27605 - DNA, 75 bp, synthetic construct
  source 1..75: mol_type = other DNA
gaaatgcgatggtaaagcggttaacgtggccagaaagatcgggcgcgagccttcttatgtatcaagaatgttgta

SEQ ID NO: 27606 - DNA, 75 bp, synthetic construct
  source 1..75: mol_type = other DNA
tctaagtccagtaaaggtgttttacgtggtcttcattatcagttagaaccttatgctcaaggaaaactggtgcgc

SEQ ID NO: 27607 - DNA, 75 bp, synthetic construct
  source 1..75: mol_type = other DNA
ttctgccgatatttggccggaactggaacgtactcagcctggtgcatggggacgtattcagctgactgatgccat

SEQ ID NO: 27608 - DNA, 75 bp, synthetic construct
  source 1..75: mol_type = other DNA
gtgaagtatggactacgcaacctgaaagaaggggcgaagttccgtaaagggattgagaagctgttaagcgaataa

SEQ ID NO: 27609 - DNA, 75 bp, synthetic construct
  source 1..75: mol_type = other DNA
tcgggtacaaaaagtgcagggctggagctggttgatatatatctctggatcttcaaacgctttatggaagggaag

SEQ ID NO: 27610 - DNA, 75 bp, synthetic construct
  source 1..75: mol_type = other DNA
gcgaagtcgatcctaaagaacgcgtggccctgctgtcgaaggtggcgaagaatgtggctacgctgtcccgcgcgt

SEQ ID NO: 27611 - DNA, 75 bp, synthetic construct
  source 1..75: mol_type = other DNA
ggagctacagtaaaagaaatatcaaaatttgataatatttattgtgatcagcttgaatgtttatttaatgaacaa

SEQ ID NO: 27612 - DNA, 75 bp, synthetic construct
  source 1..75: mol_type = other DNA
gttgatgccatgctgatgaccggcgacagctacgactgcggtaaaaaaatgggttatatgcaggcgtttgtgaag

SEQ ID NO: 27613 - DNA, 75 bp, synthetic construct
  source 1..75: mol_type = other DNA
cccctgcatttttactgcccgtttttcaactaactcgcgcaattcacttagttactggaacctccccttctctgc

SEQ ID NO: 27614 - DNA, 75 bp, synthetic construct
  source 1..75: mol_type = other DNA
tgattaatcaggtcaacgaatacataaacagtaagcaatggcctggtaaagcggcgattggtcgcctgaaaggtg

SEQ ID NO: 27615 - DNA, 75 bp, synthetic construct
  source 1..75: mol_type = other DNA
ggcaatctgctgtcaccgcacgtctggctgtggtcggtgctgggcaccagtttgtatgctttcgggattggtttg

SEQ ID NO: 27616 - DNA, 75 bp, synthetic construct
  source 1..75: mol_type = other DNA
tacctgaccctcgccatcgacgtgttcacccgctgcgtgctcggcatggtcgtcacgctggaagcgccgtctgcc

SEQ ID NO: 27617 - DNA, 75 bp, synthetic construct
  source 1..75: mol_type = other DNA
ccagaccgaaatgacggatatcctgatgcgcctgcaggagtcgcgggaaaacgacgatcccttcgcccgggcaaa

SEQ ID NO: 27618 - DNA, 75 bp, synthetic construct
  source 1..75: mol_type = other DNA
gtgacgcaggccgacaaaacagagccctgccatgaatgggatatggcaggtattcagccttctcccgcacaggaa

SEQ ID NO: 27619 - DNA, 75 bp, synthetic construct
  source 1..75: mol_type = other DNA
gaacccgtgattggcattatgggtaaaagcggggccggtaaatcctcactctgtaatgcactgtttcagggggag

SEQ ID NO: 27620 - DNA, 75 bp, synthetic construct
  source 1..75: mol_type = other DNA
agtcgtaatacaaggtgggacaaaactgagacacataaggcctcgcaatggcttgcaaggctttacatgttttga

SEQ ID NO: 27621 - DNA, 75 bp, synthetic construct
  source 1..75: mol_type = other DNA
tcaagaacgttccgtcgtctggtcgtcactctcacccggcgttatggcgtcagtctcattcatctggacgccggc

SEQ ID NO: 27622 - DNA, 75 bp, synthetic construct
  source 1..75: mol_type = other DNA
ggttctgcggcttaaacgcctggggctgtcaaaaacgttccgccgtctggttgtcacactcatccgacgttatgg

SEQ ID NO: 27623 - DNA, 75 bp, synthetic construct
  source 1..75: mol_type = other DNA
cgggaaaaactgaaagagcaggttgaggcgctgggctatgaaaccgaagtggtgggtaagcacggtatgtgggag

SEQ ID NO: 27624 - DNA, 75 bp, synthetic construct
  source 1..75: mol_type = other DNA
tcaacctcaagcgctatcaggcagaagtcagagagagggttgaacgtgctgccgctgccgccgagaaaattgccc

SEQ ID NO: 27625 - DNA, 75 bp, synthetic construct
  source 1..75: mol_type = other DNA
ctcgtggtggatggttttcatcgtcagctgctgggcagggaagcagacacagggaaacgcttgaagggctggcta

SEQ ID NO: 27626 - DNA, 75 bp, synthetic construct
  source 1..75: mol_type = other DNA
cagatgcacaaatcggtagtcgtctggaagatctggctgatgatttgatgctcacctctaaatactggacacgct

SEQ ID NO: 27627 - DNA, 75 bp, synthetic construct
  source 1..75: mol_type = other DNA
aaaagagtattagcatacgtttaaataatgacaatgaatctccggcattagtccagtcctggttagacgatggag

SEQ ID NO: 27628 - DNA, 75 bp, synthetic construct
  source 1..75: mol_type = other DNA
gtgataaacatgaatcccggagtgagcgttatacatatatcccaaccatcaatatcatcaataagttacgtgatg

SEQ ID NO: 27629 - DNA, 75 bp, synthetic construct
  source 1..75: mol_type = other DNA
gaggcactgcgtcgttttgaactgatggtggaagaagcggcgcgtcacgctgaggaggcgaagaagaatgccgga

SEQ ID NO: 27630 - DNA, 75 bp, synthetic construct
  source 1..75: mol_type = other DNA
aaaggcgacaggggagagcggggagagaccggtctgacgggaaatgcaggtccacagggtccaaagggagatacc

SEQ ID NO: 27631 - DNA, 75 bp, synthetic construct
  source 1..75: mol_type = other DNA
attattgagacaaacagccatggctggttcccggatacagatggcgcactcatcaccggactgacctttcttgac

SEQ ID NO: 27632 - DNA, 75 bp, synthetic construct
  source 1..75: mol_type = other DNA
ttccccggggcacgtatgccacacaccagggcggactctggcgggcgtatgaaaaaacgcacgggatgcggggat

SEQ ID NO: 27633 - DNA, 75 bp, synthetic construct
  source 1..75: mol_type = other DNA
ggcaagccgcgggatgcgcgccactgccgtccgcccacaccggttcgcggtacgcgcgccacgcgcccgagcgca

SEQ ID NO: 27634 - DNA, 75 bp, synthetic construct
  source 1..75: mol_type = other DNA
ttgcaggtcaggtttggtgacgggccgtggcaggatgttaaggggctggatgaagtgggcagtgatacaggcaga

SEQ ID NO: 27635 - DNA, 75 bp, synthetic construct
  source 1..75: mol_type = other DNA
caactaattactatatgccctctcatgaaggtgggataatatggaacgataaatcattgaatatacaatggcctt

SEQ ID NO: 27636 - DNA, 75 bp, synthetic construct
  source 1..75: mol_type = other DNA
ttgggtattctatggccattagacactgctccaattttatcggagaaggataagtcaggtagtagctttaaaaat

SEQ ID NO: 27637 - DNA, 75 bp, synthetic construct
  source 1..75: mol_type = other DNA
atgctgagctaaacgcaattgctgatgaaagaatgaagaatccggacattgtgaaggttagtctggatgacttat

SEQ ID NO: 27638 - DNA, 75 bp, synthetic construct
  source 1..75: mol_type = other DNA
tccgccgtcacacgccgggattatcaccgtgtatgaggactcaaagccgggcacactgaatgatttcctcggtgc

SEQ ID NO: 27639 - DNA, 75 bp, synthetic construct
  source 1..75: mol_type = other DNA
gagaaaatgctagatgctttggacaatcaggaactcgttaagcttgttgccgaacgcagcaaccagcagctgcat

SEQ ID NO: 27640 - DNA, 75 bp, synthetic construct
  source 1..75: mol_type = other DNA
ctaaagagttcaaagccgaagctgtcagaacggttcttgaaaatcaactttcaatcagtgaaggcgcttcccgat

SEQ ID NO: 27641 - DNA, 75 bp, synthetic construct
  source 1..75: mol_type = other DNA
attcgtaagcctgcaattacaattattgctcttgttattgggtatattgcgatattttctcgtcaacatacctca

SEQ ID NO: 27642 - DNA, 75 bp, synthetic construct
  source 1..75: mol_type = other DNA
ttgccctgactgcaggactgtttatttctgcccatgcttcggaaaatgtgaatacacccgaaaaccgccagttcc

SEQ ID NO: 27643 - DNA, 75 bp, synthetic construct
  source 1..75: mol_type = other DNA
gacttgttgctacaaaggcaggggatattaccgtttataactatgatggtgaaacgcgggaatatatttccacat

SEQ ID NO: 27644 - DNA, 75 bp, synthetic construct
  source 1..75: mol_type = other DNA
gatataattccattcgccgtgagcgcccgttaacggatgacgaattaatgcagtttgtgccgtctgttttttctg

SEQ ID NO: 27645 - DNA, 75 bp, synthetic construct
  source 1..75: mol_type = other DNA
cgttgccgccagcctgattaatcccgtcgtcggctttagtgcaatccctcttccggtcattgatgaacatcacta

SEQ ID NO: 27646 - DNA, 75 bp, synthetic construct
  source 1..75: mol_type = other DNA
cccgaagaggggctgaaacggatgctgggcgaaacccggcactacggtattccggccacactgcggggcatggtg

SEQ ID NO: 27647 - DNA, 75 bp, synthetic construct
  source 1..75: mol_type = other DNA
cagagtatatggaaggctttactgatgctgccactggtgaagctaaacgcggctttatggcagtagtttcagaac

SEQ ID NO: 27648 - DNA, 75 bp, synthetic construct
  source 1..75: mol_type = other DNA
ttagcgatcctgttgcggtagaaaaattcaaagcagaacattatgtggatgatgaaaagttcgctgaattgcaaa

SEQ ID NO: 27649 - DNA, 75 bp, synthetic construct
  source 1..75: mol_type = other DNA
cccgttattttgccaacacgacaaagcgcgataaaaacagttttgacttcaccatgaactgggcgaaatcagaca

SEQ ID NO: 27650 - DNA, 75 bp, synthetic construct
  source 1..75: mol_type = other DNA
gaccgctcgcatgatgtccctgcttaacgatggtaaaaaaatttactccagtattgagctggaaccacagtcaac

SEQ ID NO: 27651 - DNA, 75 bp, synthetic construct
  source 1..75: mol_type = other DNA
atgattaatcgtatcaagctggagcacatcctcgaatatgccaggcagcagaggcatattggtcagcattgtaaa

SEQ ID NO: 27652 - DNA, 75 bp, synthetic construct
  source 1..75: mol_type = other DNA
tacgcagaacggcgatagtgccggatgcgtggtggtggctccgccagccgtgccgggtggtaagttccgcattct

SEQ ID NO: 27653 - DNA, 75 bp, synthetic construct
  source 1..75: mol_type = other DNA
agtatgaacatagaatcggtgacctgatttcccgatttaaagaagctggtggggtggtaaatgaagctgagatat

SEQ ID NO: 27654 - DNA, 75 bp, synthetic construct
  source 1..75: mol_type = other DNA
gcgggggccagtggctatgtggtgaagccatttaccgccgcgacgctggaggaaaaactcaacaaaatctttgag

SEQ ID NO: 27655 - DNA, 75 bp, synthetic construct
  source 1..75: mol_type = other DNA
atccgtaactatctggccagtgtggagatcaccgacgtgatgcgccttacccgggctgtgaaaaactgctggcgg

SEQ ID NO: 27656 - DNA, 75 bp, synthetic construct
  source 1..75: mol_type = other DNA
ccactgagcgcggttttgacgggcgaatgactgtcactttgaccggccagcacaacgacaccggccagccacttt

SEQ ID NO: 27657 - DNA, 75 bp, synthetic construct
  source 1..75: mol_type = other DNA
tgacgtatcaggcctgccgtggggattttgtggtgcgtctcgacggcagcacctgtctgcagttatggaataaag

SEQ ID NO: 27658 - DNA, 75 bp, synthetic construct
  source 1..75: mol_type = other DNA
gttccgctttaatcatgactttgaacctgtgaataaagctgatgcagatcggatagcagaagagatcgaaacggc

SEQ ID NO: 27659 - DNA, 75 bp, synthetic construct
  source 1..75: mol_type = other DNA
atggcctttttattgaataaaagtgatatggcctcctccatcggtatctctgttcaggcatttgataaatggggc

SEQ ID NO: 27660 - DNA, 75 bp, synthetic construct
  source 1..75: mol_type = other DNA
gtgactaaagatgaagtggctgccggtaaagtatccatggatattccgaaggatgcggtgattgacgggcagaac

SEQ ID NO: 27661 - DNA, 75 bp, synthetic construct
  source 1..75: mol_type = other DNA
caggagctgcaaagcgggaaatggggcgaaatcgccccgttcaccgtcacgccggaacttattgcagcggcaaag

SEQ ID NO: 27662 - DNA, 75 bp, synthetic construct
  source 1..75: mol_type = other DNA
tcctttcgcagacggttgatcaggataataatcgcctgactgacgcgctgatttatacttctactgccaatcgaa

SEQ ID NO: 27663 - DNA, 75 bp, synthetic construct
  source 1..75: mol_type = other DNA
taaaggttcggtcccgcacaaattccgcaagtgggtaacagcagaagttctaccttcaattcgcaaacatggcga

SEQ ID NO: 27664 - DNA, 75 bp, synthetic construct
  source 1..75: mol_type = other DNA
atacttgaccagtttctggacgaaaaagaaggtaaccacacaatggcataccgcgatggttctggcatatggacc

SEQ ID NO: 27665 - DNA, 75 bp, synthetic construct
  source 1..75: mol_type = other DNA
tatcagcggtcgttctggcgctgattgctgcaggtgcttctgcgcctgaaatcctcgaccagtttcttgacgaaa

SEQ ID NO: 27666 - DNA, 75 bp, synthetic construct
  source 1..75: mol_type = other DNA
attctcgatcagtttctggatgaaaaagaggggaatcacaccactgcataccgcgatggctccggcatatggacc

SEQ ID NO: 27667 - DNA, 75 bp, synthetic construct
  source 1..75: mol_type = other DNA
ccgcgatggttccggcatatggaccatctgccgcggtgcaacgatggtggacggtaagccagtcgtaccaggaat

SEQ ID NO: 27668 - DNA, 75 bp, synthetic construct
  source 1..75: mol_type = other DNA
tgtcggctgccgttctggcgctgattgccgcaggggcgcctgcgcctgatattctcgaccagtttctggatgaaa

SEQ ID NO: 27669 - DNA, 75 bp, synthetic construct
  source 1..75: mol_type = other DNA
cgtatccgctcaaataattgctacggtcaggtatcccgtcgcgaccaggagagtgcgctggcatgttggggtatc

SEQ ID NO: 27670 - DNA, 75 bp, synthetic construct
  source 1..75: mol_type = other DNA
aatttattcgtggctgggatgacggacgtggtgtggatgccgggcgacaattattatcttcacagggggatgcaa

SEQ ID NO: 27671 - DNA, 75 bp, synthetic construct
  source 1..75: mol_type = other DNA
atgcataaagatcaatacactgatgccccctcccaggagcaggttcgtgtaaaaactatgcttaatagcaccatt

SEQ ID NO: 27672 - DNA, 75 bp, synthetic construct
  source 1..75: mol_type = other DNA
gcggtcaaggctgcatacgaccttgcagccggcaaggcgcccgtcagccacactcacccgtggagtcagataacg

SEQ ID NO: 27673 - DNA, 75 bp, synthetic construct
  source 1..75: mol_type = other DNA
agccatcagttgcttgcaccggcagacaatatctccattgcaaaaaatgaactggcggttctggggacgatttca

SEQ ID NO: 27674 - DNA, 75 bp, synthetic construct
  source 1..75: mol_type = other DNA
caccggaaatacgggctgccatcaccgcggagttgcgttcgttcctgctgcgtgatggttatccgcagggagaac

SEQ ID NO: 27675 - DNA, 75 bp, synthetic construct
  source 1..75: mol_type = other DNA
gcaaatcagtgtgcgcgggcgggggataaattaccggatttactcgatgaatatatcagagcaacaactgaataa

SEQ ID NO: 27676 - DNA, 75 bp, synthetic construct
  source 1..75: mol_type = other DNA
gcacgggtggcgttctcacgcattcaaatatgactggtatcagcacgatccctgtactgaagaacaggccgaatg

SEQ ID NO: 27677 - DNA, 75 bp, synthetic construct
  source 1..75: mol_type = other DNA
aaaatgcgcaaccggttgcgcagactcaaaacagcgaactgatttaccgtcttgaagatcgtccgccgcttcctc

SEQ ID NO: 27678 - DNA, 75 bp, synthetic construct
  source 1..75: mol_type = other DNA
cggcggtgcggagtccggagagtaacggaatagcagagagcttcgtgaaaacgataaagcgtgactacatcagta

SEQ ID NO: 27679 - DNA, 75 bp, synthetic construct
  source 1..75: mol_type = other DNA
atggcaattaagcattttcctgtcgttcgtttcacctccagaggacgtgaatacgaagtcgacgaacgtctgatt

SEQ ID NO: 27680 - DNA, 75 bp, synthetic construct
  source 1..75: mol_type = other DNA
ttcgtttcacctccagaggacgtgaatacgaagttgacgaacgcctgattaccacaatcgacaaacaccgttcag

SEQ ID NO: 27681 - DNA, 75 bp, synthetic construct
  source 1..75: mol_type = other DNA
gatggcatatccagattgcaaactattattgctgccactaatggattcattgcgagcaacgcttctgcttttgac

SEQ ID NO: 27682 - DNA, 75 bp, synthetic construct
  source 1..75: mol_type = other DNA
gcgcagaatcctcaaaaacggctgccgcatcgtccgccagttcggcggcgtcatcggcatcatctgcgtctgctt

SEQ ID NO: 27683 - DNA, 75 bp, synthetic construct
  source 1..75: mol_type = other DNA
ggaaggatttatccgctgttgtggaaaatatggaaattggcaccgggcagcgtggcgacggtcgtcatgcttttg

SEQ ID NO: 27684 - DNA, 75 bp, synthetic construct
  source 1..75: mol_type = other DNA
gcactgggtcgatcgcgagccgttcaccggtactatgcgttgcacagtaaaaacccgctatcgccagaccgacat

SEQ ID NO: 27685 - DNA, 75 bp, synthetic construct
  source 1..75: mol_type = other DNA
tggataagaaaagagcagagcgattaacaatacttgcccgtataaaccgttatgaaaatttatcgagagttgaaa

SEQ ID NO: 27686 - DNA, 75 bp, synthetic construct
  source 1..75: mol_type = other DNA
gcactgggtcgatcgcgaaccattcaccggcactatgcgttgcacggtaaaaacccgctatcgccagaccgatat

SEQ ID NO: 27687 - DNA, 75 bp, synthetic construct
  source 1..75: mol_type = other DNA
tggcaactgaaggggcgacagacctgtgggaaggctcacttatcgatcaactgataacggaagtcatactgagtt

SEQ ID NO: 27688 - DNA, 75 bp, synthetic construct
  source 1..75: mol_type = other DNA
tgagtctgatttgaaagagaaacaaacaaaacgtattacactggttttgaaaaatgatggatggtctgctgaacg

SEQ ID NO: 27689 - DNA, 75 bp, synthetic construct
  source 1..75: mol_type = other DNA
ttttcttatgatgtagaacgtgcaacgcaattgatgctcgctgttcactaccaggggaaggccatttgcggagtc

SEQ ID NO: 27690 - DNA, 75 bp, synthetic construct
  source 1..75: mol_type = other DNA
tctacaaaaacaactcgaggggctcaatgaatggttaggggagaaaattatgcgttttgaaaaatatgaactaac

SEQ ID NO: 27691 - DNA, 75 bp, synthetic construct
  source 1..75: mol_type = other DNA
tgtcagaagtcgcggcgaaggatgaatttcttaacatcaagaacgtgagtcgggatgacatgatggcagcgcatc

SEQ ID NO: 27692 - DNA, 75 bp, synthetic construct
  source 1..75: mol_type = other DNA
tccgcaatgagcttatcccgctacaggacaggatccgcgagataaacggctggctcggtcaggaggtcatccgct

SEQ ID NO: 27693 - DNA, 75 bp, synthetic construct
  source 1..75: mol_type = other DNA
tttaccgccgaggttgcagaaaccaaagtggcgatggtgaacaagtacgcgagggagaatgagcatccattgctg

SEQ ID NO: 27694 - DNA, 75 bp, synthetic construct
  source 1..75: mol_type = other DNA
ttcaccgcgatgacgtataccaaaagtaaaacgtttaaaaccgcagctggcgcgcatcgctggttagcaagaaac

SEQ ID NO: 27695 - DNA, 75 bp, synthetic construct
  source 1..75: mol_type = other DNA
tcgaatggtgcgccgttgcagacagccgaacctgaatacctggacggcctgagcgaaccgatcgggaaattttcg

SEQ ID NO: 27696 - DNA, 75 bp, synthetic construct
  source 1..75: mol_type = other DNA
tatcagcgaaaatttttccagctatattgaagccggtgatgacagtatctgttatgcgaaactggatgacagcgt

SEQ ID NO: 27697 - DNA, 75 bp, synthetic construct
  source 1..75: mol_type = other DNA
acgaaatcgaccgccgcacacattttgtcgatgctgagtatgcaaaagaatgcgcgctggaaggtatggcgagaa

SEQ ID NO: 27698 - DNA, 75 bp, synthetic construct
  source 1..75: mol_type = other DNA
ataatgccggtcggggccacgaaaatggctcggttgaaagtgcccacggacatctgaaaaggcgtatctgtcagg

SEQ ID NO: 27699 - DNA, 75 bp, synthetic construct
  source 1..75: mol_type = other DNA
gcctggcgtacaggactaccggagtcactgtacccggaggccctgatccccggtaaacgcgaaataggcagccag

SEQ ID NO: 27700 - DNA, 75 bp, synthetic construct
  source 1..75: mol_type = other DNA
cagggctgagcgtgagtcgtcacagctgaagtataccggagaggcgcagaaggcgtatgagcgcctgcagacgcc

SEQ ID NO: 27701 - DNA, 75 bp, synthetic construct
  source 1..75: mol_type = other DNA
acagggaaggcattcaaatcgatgtgggatgccattctggatatcggtcgtccggaatcctcagcggatatgctc

SEQ ID NO: 27702 - DNA, 75 bp, synthetic construct
  source 1..75: mol_type = other DNA
tacggggacggggggtaaatatgaacctgcggggattgttcatcgcggggagtttgtcttcacgaaggaggcgac

SEQ ID NO: 27703 - DNA, 75 bp, synthetic construct
  source 1..75: mol_type = other DNA
tcggcggtgccggaagtccggcgcagatgcggcgggcggaaggcattaattttaatcagaacaatcacgtggtga

SEQ ID NO: 27704 - DNA, 75 bp, synthetic construct
  source 1..75: mol_type = other DNA
cgcgtcaggcggtacagccattcaggcagctgcggcgaaattccattttgcgaccggaggatttacgggaaccgg

SEQ ID NO: 27705 - DNA, 75 bp, synthetic construct
  source 1..75: mol_type = other DNA
gccacgaaaggctttgatgagcagacccgtcgcctgaaagaaaacatggggacgctggagacctgggcggataaa

SEQ ID NO: 27706 - DNA, 75 bp, synthetic construct
  source 1..75: mol_type = other DNA
gtattccaatccactggggctttgagggtgtcgcgcgtaaaggttatatcgctaacactctgacgccgaatgtcg

SEQ ID NO: 27707 - DNA, 75 bp, synthetic construct
  source 1..75: mol_type = other DNA
tgaagagaaagcacataaaaaatcactggacgatgacaaaagccggatcggattctggcttcaacatttcgcagg

SEQ ID NO: 27708 - DNA, 75 bp, synthetic construct
  source 1..75: mol_type = other DNA
gggcgaagcaataattgatattatgaataccatgccttttgacgcagtatcaatcggtaatcatgagtttgacca

SEQ ID NO: 27709 - DNA, 75 bp, synthetic construct
  source 1..75: mol_type = other DNA
tgaccagtctggcttcctccatgaccgtacacagcctggatcagcgtcttaatcccgatttggctccgccggaaa

SEQ ID NO: 27710 - DNA, 75 bp, synthetic construct
  source 1..75: mol_type = other DNA
ctgggtatcacaccctgtttatggacaaactcagtacctggctgttctggttcaatatcggtctggtctttattt

SEQ ID NO: 27711 - DNA, 75 bp, synthetic construct
  source 1..75: mol_type = other DNA
ccgggtattgtgtattgaccagtatgctcatcacggagaaggtttgatatggaaccatattccgtggggtactga

SEQ ID NO: 27712 - DNA, 75 bp, synthetic construct
  source 1..75: mol_type = other DNA
tcaatgccggttagaatgcgcgatggcacagaatattatcgacctgttggcatctcaatatcctcagatacattt

SEQ ID NO: 27713 - DNA, 75 bp, synthetic construct
  source 1..75: mol_type = other DNA
aactgaaccagtcgggaaaagggaaagtgtggtttgcggggcgaggaaccgcccctgaatggcaaatgaaacggg

SEQ ID NO: 27714 - DNA, 75 bp, synthetic construct
  source 1..75: mol_type = other DNA
aatcagtgaaaataccgtaaataaggccctcagagtgatggggtatgacacaaccaaggaagtctgtggccatgg

SEQ ID NO: 27715 - DNA, 75 bp, synthetic construct
  source 1..75: mol_type = other DNA
gactgatgttgcaatggtgggccgattttctggatgcgaaccgggagaagggtatcagtccgtttgaatatgcaa

SEQ ID NO: 27716 - DNA, 75 bp, synthetic construct
  source 1..75: mol_type = other DNA
tatcgtcattgctatatttcttatcggttggggtattggtgttgtattctttttcgcagtgaaaagaaaacattc

SEQ ID NO: 27717 - DNA, 75 bp, synthetic construct
  source 1..75: mol_type = other DNA
acatatcacgacggaatcacagtggagaagcctggtgctgaaagccggcggaaaatactggcatgtgtacatgtc

SEQ ID NO: 27718 - DNA, 75 bp, synthetic construct
  source 1..75: mol_type = other DNA
tttcggtggtggggcgtctgcctccacggggacggccattcaggctgcggcggcgaacttccatttcgcgaccgg

SEQ ID NO: 27719 - DNA, 75 bp, synthetic construct
  source 1..75: mol_type = other DNA
acatcacaaaaagcaaaacgttgcatcaatattcaggatcttgcggaatacatagacaaaagacgagaagaagga

SEQ ID NO: 27720 - DNA, 75 bp, synthetic construct
  source 1..75: mol_type = other DNA
tttctttacggcgatgatcttcgcctgctcgttgggtattgcggtgtcggtaattagtatcccattactgatacg

SEQ ID NO: 27721 - DNA, 75 bp, synthetic construct
  source 1..75: mol_type = other DNA
aataatccgtttcagactatcgagcgtcatgatgttggcgtttctctcaaggtaacgcctgttgtcatgggtaac

SEQ ID NO: 27722 - DNA, 75 bp, synthetic construct
  source 1..75: mol_type = other DNA
ggcgctaaggcagagctggcactggcggagaaactggggcatgcagttattttccaggaggcaaccagtgagcga

SEQ ID NO: 27723 - DNA, 75 bp, synthetic construct
  source 1..75: mol_type = other DNA
gagggggcggtcatccatattgtgccgcgactggccggagccggaaagggcggactgcagattgtgctgggggcg

SEQ ID NO: 27724 - DNA, 75 bp, synthetic construct
  source 1..75: mol_type = other DNA
ggatgactggtggcgtaacggtcagaatctctatcttgacaatatggaggcgactggtttttaccgtgtcgcact

SEQ ID NO: 27725 - DNA, 75 bp, synthetic construct
  source 1..75: mol_type = other DNA
aaaatactgtttatgatgatatcattgaagctgcgggtgaattaggtgataaaacgctacttcctgttttagata

SEQ ID NO: 27726 - DNA, 75 bp, synthetic construct
  source 1..75: mol_type = other DNA
ctttcgccgtcagatgaacgaaggctggtaccagatacgtattgccggttatgacacggcaccggaggcggtgta

SEQ ID NO: 27727 - DNA, 75 bp, synthetic construct
  source 1..75: mol_type = other DNA
tgcagataaagagtgccctgccctggtggctggtctgccggggggaaattcacaaattccgctgtgtgccgcacc

SEQ ID NO: 27728 - DNA, 75 bp, synthetic construct
  source 1..75: mol_type = other DNA
tttctgccaccacgatgctgttttcactgggtgccagcatgatactgggtggtgtggcacagatgctggccccga

SEQ ID NO: 27729 - DNA, 75 bp, synthetic construct
  source 1..75: mol_type = other DNA
gcaacgacgaacgcattctgtctggcgtcaccgccactggtccgcatctgccttcacggggatttacaacgattt

SEQ ID NO: 27730 - DNA, 75 bp, synthetic construct
  source 1..75: mol_type = other DNA
agtgggatttaaaggattggatctggacagtgcctaaagaacacagcaaaggcggagagaagatattgcgcccta

SEQ ID NO: 27731 - DNA, 75 bp, synthetic construct
  source 1..75: mol_type = other DNA
gtggtcgaacttctgcctctggacaataaccttgaagagtttctgacgttcaaactgcaacgggcaggtaaacaa

SEQ ID NO: 27732 - DNA, 75 bp, synthetic construct
  source 1..75: mol_type = other DNA
gggattttacatcgtggatttggactgtaccgaaagagcatagcaaaacccgagagaaaatcgtgaggtcgatac

SEQ ID NO: 27733 - DNA, 75 bp, synthetic construct
  source 1..75: mol_type = other DNA
tacatggatatttgcatggcaatgattcgttgtgtggatgcgatttacatgctgaaaggctggcagcggtcagca

SEQ ID NO: 27734 - DNA, 75 bp, synthetic construct
  source 1..75: mol_type = other DNA
gtccgatgaccgggtataaaaatttcaaccgtgaggcgttccacaatgcggaagaggaactgaaacgggaagggc

SEQ ID NO: 27735 - DNA, 75 bp, synthetic construct
  source 1..75: mol_type = other DNA
cttaacgagcttgatctcgatgttgaggcggacctttgtgagaaactccacgatgatgcggagcatcttttccgt

SEQ ID NO: 27736 - DNA, 75 bp, synthetic construct
  source 1..75: mol_type = other DNA
cgcgccatttcacgctgtcgcaatatctgggcgtccctgccgggtgccggttacggtcagcgtgagcattcactg

SEQ ID NO: 27737 - DNA, 75 bp, synthetic construct
  source 1..75: mol_type = other DNA
gcagctcgggattaaacagggtgcagacagtgcattgtctgcccgcaagaaggtgtttaacggaggtggaatgtg

SEQ ID NO: 27738 - DNA, 75 bp, synthetic construct
  source 1..75: mol_type = other DNA
aacttggatggaaagcgaagcgtgggttggaagaaatggttcgagatgcctggaattggcaacaaaagaatccga

SEQ ID NO: 27739 - DNA, 75 bp, synthetic construct
  source 1..75: mol_type = other DNA
tgtagtgatgaagagaaggggctggccctgcagtgggtttctgaactaacagatgaactcatggcaaaaatcaga

SEQ ID NO: 27740 - DNA, 75 bp, synthetic construct
  source 1..75: mol_type = other DNA
aggcgtttagtgagcatttacaagcgggattaccgaaactggtcacttctcttgacgctattttgtcgtcagcta

SEQ ID NO: 27741 - DNA, 75 bp, synthetic construct
  source 1..75: mol_type = other DNA
tttcatgaacaacgctctctatcagaacggctgtaccgtgcacagggtatcgatacaaaaacattactaggacat

SEQ ID NO: 27742 - DNA, 75 bp, synthetic construct
  source 1..75: mol_type = other DNA
atgtgcaataaaaccacaccggacgcagccgccgccgcactcactacgctgatgcacgcgcttattgatattgaa

SEQ ID NO: 27743 - DNA, 75 bp, synthetic construct
  source 1..75: mol_type = other DNA
ctggctgctgacacggttgtacaggcgggagaaaccgtgagcggcggagcactggaaaatcatgacaaccagatt

SEQ ID NO: 27744 - DNA, 75 bp, synthetic construct
  source 1..75: mol_type = other DNA
atggagcaaaaaacattatccgcagaaccccgcagatcattttcaaataattttaaacttcaaatggttaaactg

SEQ ID NO: 27745 - DNA, 75 bp, synthetic construct
  source 1..75: mol_type = other DNA
tcaccacatcgccaataccattatcgaacatcgccacgatgaagcctggctgcgccagcacatccacaatgacgc

SEQ ID NO: 27746 - DNA, 75 bp, synthetic construct
  source 1..75: mol_type = other DNA
gggtttttcgggttacgggcgggtgatggttgtcggtggcggggcggagattgtggcacccgctatccgcgaagc

SEQ ID NO: 27747 - DNA, 75 bp, synthetic construct
  source 1..75: mol_type = other DNA
accagctggtgattaatggtggtcaggcaaccggcaaaacctggcttgcgtttacaaatgtcggaaacagtaacc

SEQ ID NO: 27748 - DNA, 75 bp, synthetic construct
  source 1..75: mol_type = other DNA
cggcggtattgcccgtggggccacgccggaaagcagcggcagctatggcttcgtccgtctggagggtgacctgct

SEQ ID NO: 27749 - DNA, 75 bp, synthetic construct
  source 1..75: mol_type = other DNA
tgtgaagttcgggcatggcagtgcacaacatgtgcgtgccggtttccgtctgggcagccacaacgatatgacctt

SEQ ID NO: 27750 - DNA, 75 bp, synthetic construct
  source 1..75: mol_type = other DNA
tgcgcagtgaaaatgcttatcgtgctgaagtccccctgtatgcctccatgctgacacaggcaatggactatgacc

SEQ ID NO: 27751 - DNA, 75 bp, synthetic construct
  source 1..75: mol_type = other DNA
tgaagttcgggcatggcagtgcacaacatgtgcgtgccggtttccgtctgggcagccacaacgatatgacctttg

SEQ ID NO: 27752 - DNA, 75 bp, synthetic construct
  source 1..75: mol_type = other DNA
atggtggggtctgtggtttctggtgtggcttcaaaaatcactggtgctgttgagtttttggggagcgtgaaggct

SEQ ID NO: 27753 - DNA, 75 bp, synthetic construct
  source 1..75: mol_type = other DNA
ccgggtgaaaacggacaaaacccattaccagcctggtgaactggtcaatgtcgaattaacctcgtcgctgaaagg

SEQ ID NO: 27754 - DNA, 75 bp, synthetic construct
  source 1..75: mol_type = other DNA
tgtcgttctcgccggacagcaggctcaccatgaaagcgctggaaatggcatgggaaacccgtggtaagcccggcg

SEQ ID NO: 27755 - DNA, 75 bp, synthetic construct
  source 1..75: mol_type = other DNA
aggttccggcacgggtgacagccgcctctggcgaacgtttcctgaaggtggagtttataccggcagaggaggaca

SEQ ID NO: 27756 - DNA, 75 bp, synthetic construct
  source 1..75: mol_type = other DNA
tgtcgcagcggcgatcgcctggggcaccctgactaacagtgggggtcagcctggtaatgctgttgtcgtgcattg

SEQ ID NO: 27757 - DNA, 75 bp, synthetic construct
  source 1..75: mol_type = other DNA
gcacgggtgagcgccgttcccggcgatcgcttcctgaaggtggaatttattccggcagaggagggcagaaaatga

SEQ ID NO: 27758 - DNA, 75 bp, synthetic construct
  source 1..75: mol_type = other DNA
aaacccgtggtaaacccggcggggtgatgttccacagcgatcagggtagtcattatacgagcaggcagttccggc

SEQ ID NO: 27759 - DNA, 75 bp, synthetic construct
  source 1..75: mol_type = other DNA
tgccacactgaacacaaccatccaggcagataactccagcgtcacgctgggcgacagccgggtatttatcgacaa

SEQ ID NO: 27760 - DNA, 75 bp, synthetic construct
  source 1..75: mol_type = other DNA
ttggtagcaaagaacaggccgatgtaagacttgctggctctgtcatgtcggcgctgcgtgtttctatgcccggca

SEQ ID NO: 27761 - DNA, 75 bp, synthetic construct
  source 1..75: mol_type = other DNA
ctggttacctgatttggtttggtgaaattggcgttcacgaattcgcgtacctggtcaaggactacgtaaacaaaa

SEQ ID NO: 27762 - DNA, 75 bp, synthetic construct
  source 1..75: mol_type = other DNA
ccaaagaattacctgattttttcaaggcattgtccagttactcaggaagcgcattggttgttatggcggctcgtc

SEQ ID NO: 27763 - DNA, 75 bp, synthetic construct
  source 1..75: mol_type = other DNA
tcactggccgcgctttatggcgatatcggtaaacaggcggaatcgctcatcggtaaggctggcagtatggcgacc

SEQ ID NO: 27764 - DNA, 75 bp, synthetic construct
  source 1..75: mol_type = other DNA
aaccgcctgggagcattctctgttgtggagggtaaagctgataatgtcgtactggaaaatggcggacgcctggat

SEQ ID NO: 27765 - DNA, 75 bp, synthetic construct
  source 1..75: mol_type = other DNA
atgtcggatgatatttcactggcaatggaaggcgcgctggccgttatttctgttgtgggcgtttactgcctggtt

SEQ ID NO: 27766 - DNA, 75 bp, synthetic construct
  source 1..75: mol_type = other DNA
tggcggacaaacagagagcagaacgtatcaaaaaggtaattctggaacactcgacttatgaagaactggccgaga

SEQ ID NO: 27767 - DNA, 75 bp, synthetic construct
  source 1..75: mol_type = other DNA
aatttttccaggcagtgatggttaccttaagatggggaactgtctcatgtcgtatggtgtgcggggaagtaacgc

SEQ ID NO: 27768 - DNA, 75 bp, synthetic construct
  source 1..75: mol_type = other DNA
catccaccagcagagcggggattcatctgatgatcgaccttgaaaccatgggaaaaaatcccgatgccccgatta

SEQ ID NO: 27769 - DNA, 75 bp, synthetic construct
  source 1..75: mol_type = other DNA
ggcgcaccgactgttccggagccggaaggcattgcggatgacagtgctgtttcagatggcgtcgggtctcagcct

SEQ ID NO: 27770 - DNA, 75 bp, synthetic construct
  source 1..75: mol_type = other DNA
atgtcccgttcagctaaaccccgtaaacgaaaacctgcccctcaaagaagcaaacttccccgctatgtcgtgaag

SEQ ID NO: 27771 - DNA, 75 bp, synthetic construct
  source 1..75: mol_type = other DNA
gtggtcatacagcgaaagaaaaccgcctgtcacaaagtaaattcagatgccaggtatgtggatatacagcgaacg

SEQ ID NO: 27772 - DNA, 75 bp, synthetic construct
  source 1..75: mol_type = other DNA
cgtgcgtgcaacgactaccggagcggatatcctgatcctgtcgctgctcgttatccagtgcgcgctgggcctgct

SEQ ID NO: 27773 - DNA, 75 bp, synthetic construct
  source 1..75: mol_type = other DNA
tgatgccggagattatgccggggcgctggagatcgggcgtcatgccctgcgtcatggctgggtgatgccgctggg

SEQ ID NO: 27774 - DNA, 75 bp, synthetic construct
  source 1..75: mol_type = other DNA
aaccattcttgccggtatcagtgccggtggtatgtactgcccggaatgcagcacagttcactggccggatggcgt

SEQ ID NO: 27775 - DNA, 75 bp, synthetic construct
  source 1..75: mol_type = other DNA
accgaatgcgacgccatgacggaacactactaccgtctgagagactacgcgctcaatcaccccgaatgcagcacc

SEQ ID NO: 27776 - DNA, 75 bp, synthetic construct
  source 1..75: mol_type = other DNA
gaaaggttcaccttactccggctcagttatctatgcttcttgaaggtatcaactggaagcacccgaaacgaacag

SEQ ID NO: 27777 - DNA, 75 bp, synthetic construct
  source 1..75: mol_type = other DNA
ggaggaagcgtttcagacacggttatcagtgccggaggcggacagagccttcaggggcaggcagtgaataccact

SEQ ID NO: 27778 - DNA, 75 bp, synthetic construct
  source 1..75: mol_type = other DNA
ctgccggtaacaccaccataaatcagaacggtgaactgagggtacatgccggcggggaagccactgcagtcaccc

SEQ ID NO: 27779 - DNA, 75 bp, synthetic construct
  source 1..75: mol_type = other DNA
gggcaaccggaaaaaccatcctgaacctggtgaacgccggcaacagtgcgtcggggctggcgaccagcggtaagg

SEQ ID NO: 27780 - DNA, 75 bp, synthetic construct
  source 1..75: mol_type = other DNA
cggcgcctttaactacaccctgaaccgtgacagcgatgaagactggtacctgcgcagtgaaaatgcttatcgtgc

SEQ ID NO: 27781 - DNA, 75 bp, synthetic construct
  source 1..75: mol_type = other DNA
acaatcagacaacaccggatgccgtactgagccgtgctgttgcaaaaggcaacgccccggtaacgttccataaac

SEQ ID NO: 27782 - DNA, 75 bp, synthetic construct
  source 1..75: mol_type = other DNA
gttaaagaccaaatcactgaaatggctttcaacggtgtcggaattcgcgatactgcccctatgctgaaaatcggc

SEQ ID NO: 27783 - DNA, 75 bp, synthetic construct
  source 1..75: mol_type = other DNA
tcagcaacttacttcctgcgggtttctggctcgtcaatggaagatggccgcatccatgatggtgacgtactggtt

SEQ ID NO: 27784 - DNA, 75 bp, synthetic construct
  source 1..75: mol_type = other DNA
gtagttacacccgactaggtttaaccgggtatctgttgagtagaggggttaaaaaaagagaaatcaacgacattg

SEQ ID NO: 27785 - DNA, 75 bp, synthetic construct
  source 1..75: mol_type = other DNA
gccatgaagcagattaaagaactccagcgtctgctcggcaaaaaaacgatggaaaatgaactccttaaagaagcc

SEQ ID NO: 27786 - DNA, 75 bp, synthetic construct
  source 1..75: mol_type = other DNA
cgatgcagacagtaacctacagagtctgtgctggccgtgtcataaggcgaagacggcccgtgaacggattaagta

SEQ ID NO: 27787 - DNA, 75 bp, synthetic construct
  source 1..75: mol_type = other DNA
gaaagccacaaaagcgaaggctggaagcaatacaagccaggccagtcccgacaccagcgcggttatggttcgaaa

SEQ ID NO: 27788 - DNA, 75 bp, synthetic construct
  source 1..75: mol_type = other DNA
gactggtgagagacgctgatgattttgtcgcagtggcaatcgccggtttcaatcagatgaaccgtggtggcccgg

SEQ ID NO: 27789 - DNA, 75 bp, synthetic construct
  source 1..75: mol_type = other DNA
ttgccagccggcccgagatcatggggtgggtgctgggcatcgtttaccgcgtcattgccacgcacctggtcaaga

SEQ ID NO: 27790 - DNA, 75 bp, synthetic construct
  source 1..75: mol_type = other DNA
gttcaatatcggcactctggagcaacctggacacgctgacaacaaggcactgctggaactgaaagccacatcacc

SEQ ID NO: 27791 - DNA, 75 bp, synthetic construct
  source 1..75: mol_type = other DNA
atgcactatgtgcccagtatttttggggaagaccggcatacctcccgcagtgaacgctatgcgtacattcccacc

SEQ ID NO: 27792 - DNA, 75 bp, synthetic construct
  source 1..75: mol_type = other DNA
ccatacccgggccattcacagcattgacaccgacattaagctcaatcgcgcgttatgggtgatggcggaaacgtt

SEQ ID NO: 27793 - DNA, 75 bp, synthetic construct
  source 1..75: mol_type = other DNA
gccgacattctgacgccacgacgcagggaggattacggtaaggacctgtggagtgcatatcagaccatccaggag

SEQ ID NO: 27794 - DNA, 75 bp, synthetic construct
  source 1..75: mol_type = other DNA
gcgctggcggtggatcgcaccgatggcatcagcatgacctttgccgactggcgctttaacctgcgctcctccaac

SEQ ID NO: 27795 - DNA, 75 bp, synthetic construct
  source 1..75: mol_type = other DNA
agtatcggtaaggccgtgacggcgaaagaagtgatcacccgcacggtgaaagtcactaacgtgggcaaaccttcc

SEQ ID NO: 27796 - DNA, 75 bp, synthetic construct
  source 1..75: mol_type = other DNA
tctgccggtgacaccagttttacgctggcctggaagccgggcgagaaagggcagcgcgatttgattgcctggttt

SEQ ID NO: 27797 - DNA, 75 bp, synthetic construct
  source 1..75: mol_type = other DNA
aaaagcggcactggcgctcgggcgtcgtgcgattggcgttgaactggagaccggacgttttgagcagacagtcag

SEQ ID NO: 27798 - DNA, 75 bp, synthetic construct
  source 1..75: mol_type = other DNA
acggcaaaacagatagtggatgccacaggaaagaaaaacatggtgtcgcactggttcagtgccagtcagtggcag

SEQ ID NO: 27799 - DNA, 75 bp, synthetic construct
  source 1..75: mol_type = other DNA
acgaggtggtgggcgtgtttgaccggatagaggagaagcgtgatgccatgcagtcgctggtcctgccgccaccgg

SEQ ID NO: 27800 - DNA, 75 bp, synthetic construct
  source 1..75: mol_type = other DNA
atggccacactatctgatacaataaaaccgaataaaacatatcttgaggcggtactgcgtacggcattgttagga

SEQ ID NO: 27801 - DNA, 75 bp, synthetic construct
  source 1..75: mol_type = other DNA
ggtttttataccaccaagcgaaccggcggtatgctggtggattctcaggcgattaagctgatgaaaattggggct

SEQ ID NO: 27802 - DNA, 75 bp, synthetic construct
  source 1..75: mol_type = other DNA
tcagctgggcagagctggaagcagtatacctgcataacagaacgtcgccttttcaggttccggcaccggtgcgtc

SEQ ID NO: 27803 - DNA, 75 bp, synthetic construct
  source 1..75: mol_type = other DNA
attacgggcttaatctcgggaaaggcttctctgccatcagagggaccagcacgccattcgtcagtaacgggctga

SEQ ID NO: 27804 - DNA, 75 bp, synthetic construct
  source 1..75: mol_type = other DNA
atacctgcatagcagaacatcgctttttcaggttccggcaccagtgcgtcctgaaaaaccagaataccatgcatt

SEQ ID NO: 27805 - DNA, 75 bp, synthetic construct
  source 1..75: mol_type = other DNA
gacgacctaccagaggctgcaggagaacctgctgaaaggcggcctgcccggacgtaccgcacagggtaaacgtac

SEQ ID NO: 27806 - DNA, 75 bp, synthetic construct
  source 1..75: mol_type = other DNA
accgtactggaaagtctgcagcgggaaggcttccagccctttttcgcctgccagacccgtgtgcgcgacccgggc

SEQ ID NO: 27807 - DNA, 75 bp, synthetic construct
  source 1..75: mol_type = other DNA
tgaaaggcgggatttccggtcgcagtgcaaaaggaaaacgtatccatacccgggccattcacagcattgataccg

SEQ ID NO: 27808 - DNA, 75 bp, synthetic construct
  source 1..75: mol_type = other DNA
agcatcgacaccgatattaaactcaaccgcgcattgtgggtgatggcagaaacgatgctggagagcctgcgctga

SEQ ID NO: 27809 - DNA, 75 bp, synthetic construct
  source 1..75: mol_type = other DNA
ggacaaaccagatccgccgcgaccgaccgttaacccgcgaagaactgatgcagcatgttcccagcgttttcagcg

SEQ ID NO: 27810 - DNA, 75 bp, synthetic construct
  source 1..75: mol_type = other DNA
ccatacccgtgccattcacagcattgacactgacattaagctcaatcgtgcattgtgggtgatggcagaaacact

SEQ ID NO: 27811 - DNA, 75 bp, synthetic construct
  source 1..75: mol_type = other DNA
cctgcaagtcgccgccacctgtgcaaagtcaacgaccggagccagcagcatgggcgatggagaaagcccaagact

SEQ ID NO: 27812 - DNA, 75 bp, synthetic construct
  source 1..75: mol_type = other DNA
aaactggaaagcacagtccgttatctgggcattgaagtcgatgatgcgttagagatctctgaatcgattgaaatc

SEQ ID NO: 27813 - DNA, 75 bp, synthetic construct
  source 1..75: mol_type = other DNA
aatattacaatattttttagctttttgtttttacttgaactccttgcgttggctcccagttcatttggcagggat

SEQ ID NO: 27814 - DNA, 75 bp, synthetic construct
  source 1..75: mol_type = other DNA
cgggattatttcactctcagagagcggttgatgatgatgcagaagcagctggaaggggcgcaggaatatatccgc

SEQ ID NO: 27815 - DNA, 75 bp, synthetic construct
  source 1..75: mol_type = other DNA
gccgtatcgtaggccaaaaaagaccacttcagatatctcatatctgggggatccgaatcaggcttgaactggaag

SEQ ID NO: 27816 - DNA, 75 bp, synthetic construct
  source 1..75: mol_type = other DNA
cagttttacatcggcacatatcgacacctggcgtcagcagggctatgaagacacgatgctggcgatggagcatat

SEQ ID NO: 27817 - DNA, 75 bp, synthetic construct
  source 1..75: mol_type = other DNA
gcatttgcaggcctgaaatttggtgattacggctcaatcgattacggccgtaactacggtgtagcatacgacatc

SEQ ID NO: 27818 - DNA, 75 bp, synthetic construct
  source 1..75: mol_type = other DNA
tcccctgcccgtggcgttactacaacgatcgcgatgtacgcacaatcgttgagctggggaaagccatagacttcg

SEQ ID NO: 27819 - DNA, 75 bp, synthetic construct
  source 1..75: mol_type = other DNA
atgagtaaagtctttatttgcgctgccattccggacgaacaggcaataaaacaagaaggcgctaaacctgtagcc

SEQ ID NO: 27820 - DNA, 75 bp, synthetic construct
  source 1..75: mol_type = other DNA
gcactgaacaaatacattactgaatacctgactacaaagggcgtgtttgaagatgaaggaagaaatcagagcgca

SEQ ID NO: 27821 - DNA, 75 bp, synthetic construct
  source 1..75: mol_type = other DNA
caccggcggggcgctcttacattgaccagagcaaaagcgaatacaacatcaatctgccgggaggtgttgcgccgg

SEQ ID NO: 27822 - DNA, 75 bp, synthetic construct
  source 1..75: mol_type = other DNA
tgaaggtgtacgtggatgacctgatagcaaaacatcttgccgcactggacctgcattcacagtatgcacccaaag

SEQ ID NO: 27823 - DNA, 75 bp, synthetic construct
  source 1..75: mol_type = other DNA
gcattttaagtgcggcaattgccacgcgcaccgagcggcgcagtggtctggcggcgttgtttagttcgcgggaat

SEQ ID NO: 27824 - DNA, 75 bp, synthetic construct
  source 1..75: mol_type = other DNA
ctgaataagcgaattaactcccgtacagatgatgcttttctgaaggagttaatgagactgggaaggatgcagaag

SEQ ID NO: 27825 - DNA, 75 bp, synthetic construct
  source 1..75: mol_type = other DNA
gactttaaacaaccaagaatgaaaagtttgctcgaaaagctttgggatattttgaaacaacaaggccgtccatga

SEQ ID NO: 27826 - DNA, 75 bp, synthetic construct
  source 1..75: mol_type = other DNA
tatcaggacatcgttccatgaatatgctgaaacggtatactcatcttcgtgcatggcaactggtcagtaaacttg

SEQ ID NO: 27827 - DNA, 75 bp, synthetic construct
  source 1..75: mol_type = other DNA
gcggcggtggccggtcttgtgatgacggtgctgaccgttggtctggtgtcgtgtgcaggaaaatcattaccccgt

SEQ ID NO: 27828 - DNA, 75 bp, synthetic construct
  source 1..75: mol_type = other DNA
gccagttcctgtaatacaggctgatgtcgcgcaggcaattgaaaaactcaaacggaaattagtggaatgcaatcg

SEQ ID NO: 27829 - DNA, 75 bp, synthetic construct
  source 1..75: mol_type = other DNA
cagttcgcatattatctggccggctttccctggtatgaggggaatatcctgtttgcctttgcagttgcggcacag

SEQ ID NO: 27830 - DNA, 75 bp, synthetic construct
  source 1..75: mol_type = other DNA
caggaacatacaacacaccatacctgagttacatcaatgactacggcggacgtccggtgctgcagttctcctgtg

SEQ ID NO: 27831 - DNA, 75 bp, synthetic construct
  source 1..75: mol_type = other DNA
gataacaaacagcttccctatctggcccaggcatgggtggagaatgaaaagaaagaaaaaatcaccacaggcccg

SEQ ID NO: 27832 - DNA, 75 bp, synthetic construct
  source 1..75: mol_type = other DNA
cccgctctcagttaataaacagcatcgatatcctccgggctcgcagggcgaccggcctgatgaccagcgacaatt

SEQ ID NO: 27833 - DNA, 75 bp, synthetic construct
  source 1..75: mol_type = other DNA
cgggtgagtgaggaaagccgccgctggctggcatcgtgcggcctgaccgtggagcagatgcaaaaccagatggac

SEQ ID NO: 27834 - DNA, 75 bp, synthetic construct
  source 1..75: mol_type = other DNA
tcaaatagttaccccaaatcaagaacgtactataattaaaggtatagtcgagagatcaaatggggttattgctcc

SEQ ID NO: 27835 - DNA, 75 bp, synthetic construct
  source 1..75: mol_type = other DNA
atatcagtaatgaagggcttgttgtcagcaacggaggaagctcactcggttatggagaaaccggcgtcgggaatg

SEQ ID NO: 27836 - DNA, 75 bp, synthetic construct
  source 1..75: mol_type = other DNA
ataaaaagtggtcggaagaacatagtcgacgagtgcttaaaagcctggaggacaatctcttccctgccataggta

SEQ ID NO: 27837 - DNA, 75 bp, synthetic construct
  source 1..75: mol_type = other DNA
taggaatagattatgacttactagcaatcacttccctagtgattaacggcaaaacaaaagaagtaaaactacatc

SEQ ID NO: 27838 - DNA, 75 bp, synthetic construct
  source 1..75: mol_type = other DNA
aagttagtgaaaacacaaaacagcgcaatttattttccaaaaaaatgactttgtgcataagtttgttttttgttt

SEQ ID NO: 27839 - DNA, 75 bp, synthetic construct
  source 1..75: mol_type = other DNA
agacatgccgatgttcctcggttctatgattgcaggtccgctgggcggctggtgcattaagcacttcgaccgctg

SEQ ID NO: 27840 - DNA, 75 bp, synthetic construct
  source 1..75: mol_type = other DNA
gcagcgctgggccgtctttttcggacgaaccagatagtatcacagcttgcttcatattatggggagcaggaaagg

SEQ ID NO: 27841 - DNA, 75 bp, synthetic construct
  source 1..75: mol_type = other DNA
gcacgtacacagaaaaacgcgaagacccgtacttcaaagccagttacgacaatgtggactacagccagatcccgg

SEQ ID NO: 27842 - DNA, 75 bp, synthetic construct
  source 1..75: mol_type = other DNA
atgaggaaagtaaagttaaataacgacgatttaattcagtatctgaacaccattaatacattaaaacaatatcca

SEQ ID NO: 27843 - DNA, 75 bp, synthetic construct
  source 1..75: mol_type = other DNA
cgccgaattgcaggacaaatacctgattaccccttaccccgtaagagagtcagaagttctgacaaatctccgcct

SEQ ID NO: 27844 - DNA, 75 bp, synthetic construct
  source 1..75: mol_type = other DNA
gatgagtgaaaatacaatcaataatgcactgagacttatgggatacaacacacaggaggaggtttgtggacatgg

SEQ ID NO: 27845 - DNA, 75 bp, synthetic construct
  source 1..75: mol_type = other DNA
tttactcagttaagtagcgcaacaaacagcaccagtgaagagctggcggcaacgccaaaggcagtaaaagcagcc

SEQ ID NO: 27846 - DNA, 75 bp, synthetic construct
  source 1..75: mol_type = other DNA
aaacgggaatagccggtggagatttcgaggatgaattcgaagtggatgatgatgcgacgcctgatgaaatacatg

SEQ ID NO: 27847 - DNA, 75 bp, synthetic construct
  source 1..75: mol_type = other DNA
gacggcaatgtatacatgcgtaaactcgccaataagtggaatggcactgatggtccgtggggcgtatggcgtcac

SEQ ID NO: 27848 - DNA, 75 bp, synthetic construct
  source 1..75: mol_type = other DNA
gccttttgtctttttctattattacagcattgtttccattgaacgcgatggcaacaaaattaaccatagagcagc

SEQ ID NO: 27849 - DNA, 75 bp, synthetic construct
  source 1..75: mol_type = other DNA
ttcagaatggactgattgctccgggcgtatggaacgggggcgaccttggtcagttgtcatcaggtgacacgctgc

SEQ ID NO: 27850 - DNA, 75 bp, synthetic construct
  source 1..75: mol_type = other DNA
ctggcggtgtggtttttttgcatgggggcgtcaataaaattaagcgcgacgggaacggtactgcgtaaatccggt

SEQ ID NO: 27851 - DNA, 75 bp, synthetic construct
  source 1..75: mol_type = other DNA
ttaaatcagattatgacatagttattcttcgcctgtctgttattataatatttatgctcttcgggacctataaat

SEQ ID NO: 27852 - DNA, 75 bp, synthetic construct
  source 1..75: mol_type = other DNA
catatggtctcgaagagaaatattttaaccgtattctctatctatacattcacctcttataacatgaacaaaaaa

SEQ ID NO: 27853 - DNA, 75 bp, synthetic construct
  source 1..75: mol_type = other DNA
tttttacctcttttttcaacatgttgaaattcgccagacagtgtctggcgaattaacaccattgggaattccgca

SEQ ID NO: 27854 - DNA, 75 bp, synthetic construct
  source 1..75: mol_type = other DNA
ggtggggaaagcctttccccggaataacagttatgccagcgggacggtaaccgtcacagtttacgatgaccaggg

SEQ ID NO: 27855 - DNA, 75 bp, synthetic construct
  source 1..75: mol_type = other DNA
tgtacggctgcgcaggttcgttgaaacacacgggcgtgcattacaggggtatacgactcagccgcccctggcagg

SEQ ID NO: 27856 - DNA, 75 bp, synthetic construct
  source 1..75: mol_type = other DNA
tttatactcgggcaaataaaaatttgcaaaaaatgcgaagataatgtttttaatattttgaacaatatggcattg

SEQ ID NO: 27857 - DNA, 75 bp, synthetic construct
  source 1..75: mol_type = other DNA
gacggtgaactgatcccgggcgaggcattaacccggatgaagggggctgccatgcgactgaccgggatgctgtac

SEQ ID NO: 27858 - DNA, 75 bp, synthetic construct
  source 1..75: mol_type = other DNA
caaaaacagggaggtgattatttattcgcggtaaaaggaaaccaggggcggctaaataaagcctttgaggaaaaa

SEQ ID NO: 27859 - DNA, 75 bp, synthetic construct
  source 1..75: mol_type = other DNA
ttgtcaataagcacttaggttacagatacacaggagtattcaaaaccctggcaagtattgatgacaaaccgtccc

SEQ ID NO: 27860 - DNA, 75 bp, synthetic construct
  source 1..75: mol_type = other DNA
aacgggtaaattaactggagttcttcctgcctatgggaatggaggagggatcgttgcaactaatggtgggaccgg

SEQ ID NO: 27861 - DNA, 75 bp, synthetic construct
  source 1..75: mol_type = other DNA
gtgcaaaaattgcctacatcaacggtctgaaatcaccatctgagcagcagcgattacttgtattactggcagaga

SEQ ID NO: 27862 - DNA, 75 bp, synthetic construct
  source 1..75: mol_type = other DNA
ttgatcggtaagcttcatgagcgccaacaaaacgtgccggtcttcctgttgggcgatcgggaaaaagccctcgcc

SEQ ID NO: 27863 - DNA, 75 bp, synthetic construct
  source 1..75: mol_type = other DNA
taaaggttcagtcccgcacaaattccgcaagtgggtaacagcagaagttctgccttcaattcgcaaacatggcga

SEQ ID NO: 27864 - DNA, 75 bp, synthetic construct
  source 1..75: mol_type = other DNA
atttaaggccttcacaacggcctgtggagcgtcgtgtggcagaagttgaagatggttatacccgtcttgcaaatg

SEQ ID NO: 27865 - DNA, 75 bp, synthetic construct
  source 1..75: mol_type = other DNA
ctggagtttgagaaatccgcctttggtaagtacaacgttgataatgcagtcaacgctaatttccgttactcgttc

SEQ ID NO: 27866 - DNA, 75 bp, synthetic construct
  source 1..75: mol_type = other DNA
tcactcaccgcacggtgaacggcgaaccggcagagcagtggcagtatgatggccacggctggctgagagaaatca

SEQ ID NO: 27867 - DNA, 75 bp, synthetic construct
  source 1..75: mol_type = other DNA
ggtcgtcgtgcggcgttacgtgagatcgaggatgtgaaacacgatacgcgtgaagcggaagatgtgctggatgtg

SEQ ID NO: 27868 - DNA, 75 bp, synthetic construct
  source 1..75: mol_type = other DNA
attactgatatgcagatacgccagcgtgatgtcgctgcacttgatgccagatactcgagggaattagccgatgcg

SEQ ID NO: 27869 - DNA, 75 bp, synthetic construct
  source 1..75: mol_type = other DNA
aaaccgacagctatcgtggtggtggcatgatgggagcagtaagtattgatctcggtctggacgactccgcgcttg

SEQ ID NO: 27870 - DNA, 75 bp, synthetic construct
  source 1..75: mol_type = other DNA
gctttgtctcttctctgtccgtcctggcggcaatgccgctactgtcgccccgcgttgcgcgggcggcaaccggca

SEQ ID NO: 27871 - DNA, 75 bp, synthetic construct
  source 1..75: mol_type = other DNA
gtgtgagttctcataaagtggctgttagccaactggtggaaactaacgaatctctgttcaacaaagaaacctctc

SEQ ID NO: 27872 - DNA, 75 bp, synthetic construct
  source 1..75: mol_type = other DNA
agtatacgtgctaaatgcgcaactggaggaatgtccggtcggggtggaaggagagatttgcattggcgggatggg

SEQ ID NO: 27873 - DNA, 75 bp, synthetic construct
  source 1..75: mol_type = other DNA
ggtgcccccaccggcgtggcctgttcggtgtgccccggcggagtgacgtccggccatccggtcaatcccctgctc

SEQ ID NO: 27874 - DNA, 75 bp, synthetic construct
  source 1..75: mol_type = other DNA
ttggtgggtgaacgccggcgatgctttcatgatatacagccttgctgaaaatttttgcagtagcaatggctacac

SEQ ID NO: 27875 - DNA, 75 bp, synthetic construct
  source 1..75: mol_type = other DNA
tctggaacgtgaacgggcagagcaggcggaaaagaaaaaggtagttgaactgcctgtaaagaaaaaagagccatg

SEQ ID NO: 27876 - DNA, 75 bp, synthetic construct
  source 1..75: mol_type = other DNA
acaggccgaaggggttgcgatggatgcctctggtaatatttatatcgttagcgaaccaaatcgtttttatcgctt

SEQ ID NO: 27877 - DNA, 75 bp, synthetic construct
  source 1..75: mol_type = other DNA
gctaaccgttttacggcaaatattaaaggtctgacccaggcttcccgtaacgcgaatgatggtatttctgttgcg

SEQ ID NO: 27878 - DNA, 75 bp, synthetic construct
  source 1..75: mol_type = other DNA
aaacagttctcctggaaggaccagggaatgaacctcaccatgaaggataaggactttaatccgctgattgggcgt

SEQ ID NO: 27879 - DNA, 75 bp, synthetic construct
  source 1..75: mol_type = other DNA
agccgccgctggctggcatcgtgcggcctgaccgtggagcagatgcaaaaccagatggacccggtgtacacgccg

SEQ ID NO: 27880 - DNA, 75 bp, synthetic construct
  source 1..75: mol_type = other DNA
ttcatccggcacacgctaaacgcattgaggaaattatcgctgaaaataaaccacccttttctgttttccgcgaca

SEQ ID NO: 27881 - DNA, 75 bp, synthetic construct
  source 1..75: mol_type = other DNA
gaagccgacggtggcggatgcgatgcgttatgccctgaaacagtccggctacacactctgcgccacggggcctgc

SEQ ID NO: 27882 - DNA, 75 bp, synthetic construct
  source 1..75: mol_type = other DNA
ccagttaccggtcagccagctggctcctgttccggtcaccgttccttttgtgggtcgtgaaccgggtgtgaaggc

SEQ ID NO: 27883 - DNA, 75 bp, synthetic construct
  source 1..75: mol_type = other DNA
gggttatcagttaccggcacgccagctggcgccggtaccggcggtggtgaaggtatccggtgcggagcagaaaaa

SEQ ID NO: 27884 - DNA, 75 bp, synthetic construct
  source 1..75: mol_type = other DNA
ggtgctgatgcgcagaccgtgcaggatacggtgacgcaggttatcgaacagaatatgaatggtatcgataacctg

SEQ ID NO: 27885 - DNA, 75 bp, synthetic construct
  source 1..75: mol_type = other DNA
ggacgcaacgttaccactatgacctgaccggaaaactcacgcagagtgaagacgaggggcttatcaccctctggc

SEQ ID NO: 27886 - DNA, 75 bp, synthetic construct
  source 1..75: mol_type = other DNA
cacggtggccgatgccatgcgttatgccctgaaacagtccggttacacgctctgcgccaccggaccggccaacgg

SEQ ID NO: 27887 - DNA, 75 bp, synthetic construct
  source 1..75: mol_type = other DNA
ggcggaatactatcgccaacgtgccagtgccggtttgattattagcgaagccacgcaaatttctgcccaggcaaa

SEQ ID NO: 27888 - DNA, 75 bp, synthetic construct
  source 1..75: mol_type = other DNA
aacaatcactcaaacgacgtcgatgataatggttcctggtatccagtggttgcctttcgccctacgccagattac

SEQ ID NO: 27889 - DNA, 75 bp, synthetic construct
  source 1..75: mol_type = other DNA
acgatggggatagtctggtttctgtttattggtatccgtcatgctgtccgcacgggacaccagggcagtgtcttt

SEQ ID NO: 27890 - DNA, 75 bp, synthetic construct
  source 1..75: mol_type = other DNA
gatgaaacctgacagaattttactggcggaaattaaaggtggcgatgcctgggattttgtgaaagttgctggttc

SEQ ID NO: 27891 - DNA, 75 bp, synthetic construct
  source 1..75: mol_type = other DNA
ggagaatacagtacttattcaactttggacaaggctgctacagcgttttttgagaggctttcgttgatagcatcc

SEQ ID NO: 27892 - DNA, 75 bp, synthetic construct
  source 1..75: mol_type = other DNA
gaaagagagactgccaccgtatctcattatggttctggaaaaccagtacaaccgactgaatgagctggactcact

SEQ ID NO: 27893 - DNA, 75 bp, synthetic construct
  source 1..75: mol_type = other DNA
ccagtgagattattgaggcagaagatctttggttacttgatgttgtagatacgaacggttacgtatgctggggat

SEQ ID NO: 27894 - DNA, 75 bp, synthetic construct
  source 1..75: mol_type = other DNA
cgctgcacagggtacgaataacacgcagattgctacgaccgcttatgtaagagctgctatctctgcattggtcgg

SEQ ID NO: 27895 - DNA, 75 bp, synthetic construct
  source 1..75: mol_type = other DNA
aggtgctgccgggcgagacggaccttgcgctgcccggcccgctgccgtttattctttcccgcgcctacagcagct

SEQ ID NO: 27896 - DNA, 75 bp, synthetic construct
  source 1..75: mol_type = other DNA
cagatggacccggtgtacacgccggcgcgaaaaatccacctgtaccactgcgaccatcgcggcctgccgctggcc

SEQ ID NO: 27897 - DNA, 75 bp, synthetic construct
  source 1..75: mol_type = other DNA
caagaacctcatgatcgagggtgataaccttgaagtattgaagcttcttcaaaaaagctacactggaaaagttaa

SEQ ID NO: 27898 - DNA, 75 bp, synthetic construct
  source 1..75: mol_type = other DNA
aggcattacctcatttccggttcatcggtgaagtgctgtccggcttcgcccctgaaccacatccccccatagcag

SEQ ID NO: 27899 - DNA, 75 bp, synthetic construct
  source 1..75: mol_type = other DNA
atggttgcctccggagcagtttgcggtgatgcctttcccgggaatggattgccagtgcggggactgtggagctta

SEQ ID NO: 27900 - DNA, 75 bp, synthetic construct
  source 1..75: mol_type = other DNA
ttgttatatggataccttattttcttttttccaaaagaattaatatggttttttgtcgatagctatgtcgttgag

SEQ ID NO: 27901 - DNA, 75 bp, synthetic construct
  source 1..75: mol_type = other DNA
ttgtctttaagaacctgccccgcgcacttgctgttcgtggggagtggcaggagcggaagattgcgcaggtcagta

SEQ ID NO: 27902 - DNA, 75 bp, synthetic construct
  source 1..75: mol_type = other DNA
actggacgggcatctggtcagctcgcttctgggtgggcagggtgagcccccctgccttatctggcagggagaatc

SEQ ID NO: 27903 - DNA, 75 bp, synthetic construct
  source 1..75: mol_type = other DNA
cggctgatgtatctggacctggagtatcgtcagggccggtgtcgtctgctgtccggtagccgtcagcgggaactg

SEQ ID NO: 27904 - DNA, 75 bp, synthetic construct
  source 1..75: mol_type = other DNA
gactgtacagcaacatgttgatccgggcgttggaagtgacgacggacaagacaaccgaaaacgtcctgtccgccg

SEQ ID NO: 27905 - DNA, 75 bp, synthetic construct
  source 1..75: mol_type = other DNA
tatttctcttgcacttagcgcaggtaagaaatatgcaattgtgctgaagggaagatacctccttggagaagattc

SEQ ID NO: 27906 - DNA, 75 bp, synthetic construct
  source 1..75: mol_type = other DNA
gccccttcatcttataaaaatcattcatactcttatccttcatcctctattcgaagctcgcaatcaaataattca

SEQ ID NO: 27907 - DNA, 75 bp, synthetic construct
  source 1..75: mol_type = other DNA
cgggatggtgtgccagaggggcgtatgtatctgtccagaatcagtgaggccatcagtttgtctgctggtgaagtg

SEQ ID NO: 27908 - DNA, 75 bp, synthetic construct
  source 1..75: mol_type = other DNA
tcggaagtagagcagtggattgaggagcgtaagtcttcaggaatccaggctactcggcctggcaacaccataggg

SEQ ID NO: 27909 - DNA, 75 bp, synthetic construct
  source 1..75: mol_type = other DNA
ttgccggaagcggattgtatgtattcggtgccacagaaaaagtcatcccgatgacgattgcattatcgaaagaca

SEQ ID NO: 27910 - DNA, 75 bp, synthetic construct
  source 1..75: mol_type = other DNA
ccggcaagtgataaaggaggtggtaatgctgaaacagaacgcgtggttccgcggcgaaccgaaggccagcctgaa

SEQ ID NO: 27911 - DNA, 75 bp, synthetic construct
  source 1..75: mol_type = other DNA
acagaatggtgcgcagaatacgatgaatggggcaacctgctgaatgaagagaacccgcatcagctgcagcagctt

SEQ ID NO: 27912 - DNA, 75 bp, synthetic construct
  source 1..75: mol_type = other DNA
atgcaatactgcctgatgcgctatgccgatcaggccttgtattatccctccagtgcagagaaaatcggccagttt

SEQ ID NO: 27913 - DNA, 75 bp, synthetic construct
  source 1..75: mol_type = other DNA
cgtctttaccgataagggcggggaaaaatacggcagggcaaacaaactttctggtctggacaaggcgctggctgc

SEQ ID NO: 27914 - DNA, 75 bp, synthetic construct
  source 1..75: mol_type = other DNA
actggatgagacaactaatcagaaacttttagcagctagagatcgtagcggaagaacaaaaactaatgaggtgtt

SEQ ID NO: 27915 - DNA, 75 bp, synthetic construct
  source 1..75: mol_type = other DNA
gttactgcgtcaggcagcactgacgccacaggaaactgcgctgatcagtcctatccgtgaattgacctatcgcca

SEQ ID NO: 27916 - DNA, 75 bp, synthetic construct
  source 1..75: mol_type = other DNA
ccagaaagcgctgcataacgaattggctcgccgtggcataaacaaaccggtaattgccctggtgacacaaacgcg

SEQ ID NO: 27917 - DNA, 75 bp, synthetic construct
  source 1..75: mol_type = other DNA
taacgtcagtcggtcgcgatattctggccaaaacaagcgttcttgctgttatccaataccttggtttaagagaac

SEQ ID NO: 27918 - DNA, 75 bp, synthetic construct
  source 1..75: mol_type = other DNA
ggtgatggatgcgttaaacctgcgtgaagtgaccaaaattttctcctcgctgattgtttcccctatcgtcggcct

SEQ ID NO: 27919 - DNA, 75 bp, synthetic construct
  source 1..75: mol_type = other DNA
aaccagcttaatgaggagaacccgcatcacctgcaccagccgtaccggctgccggggcagcagtatgataaggag

SEQ ID NO: 27920 - DNA, 75 bp, synthetic construct
  source 1..75: mol_type = other DNA
aaggagagcgcggtgagagaggtcctcagggtagtgtcggcccggcaggtccgcggggtgagaaaggcgagcagg

SEQ ID NO: 27921 - DNA, 75 bp, synthetic construct
  source 1..75: mol_type = other DNA
gactattccagccgaacggatgaaagctaagcgggaacacattgttcctttatcacctcaggcaatagagattct

SEQ ID NO: 27922 - DNA, 75 bp, synthetic construct
  source 1..75: mol_type = other DNA
gtcatggaaacggctggtgattaacaaggaaaaacatatcacccgcaggggatacacgctctgctttctcagtaa

SEQ ID NO: 27923 - DNA, 75 bp, synthetic construct
  source 1..75: mol_type = other DNA
catggcgagccactggtcgagagccgctacctctacgacccgctgggacggcgaatggcgaaacgggtatggcgg

SEQ ID NO: 27924 - DNA, 75 bp, synthetic construct
  source 1..75: mol_type = other DNA
atgtctaataaaatctttacgcattccctacctatgcgctatgccgattttccaacgctggttgatgctttggac

SEQ ID NO: 27925 - DNA, 75 bp, synthetic construct
  source 1..75: mol_type = other DNA
acgctaatgacagtatcagcccgatatttgacaaggagaaagagcagaggcgtctgcagacagtggggcttatca

SEQ ID NO: 27926 - DNA, 75 bp, synthetic construct
  source 1..75: mol_type = other DNA
ggcgcagaccatcagcggccaggtgacgggcgcggcggcgggcgatacggttaccgtaacgcttggcgggaaaac

SEQ ID NO: 27927 - DNA, 75 bp, synthetic construct
  source 1..75: mol_type = other DNA
gtaaaggccctggaaaagcggtgaagcaagtcataccttttgaaggcaatgaaaagtcttttgaaacaatattga

SEQ ID NO: 27928 - DNA, 75 bp, synthetic construct
  source 1..75: mol_type = other DNA
tcctgatgctggtgagtataattatgctcaccgcgtgcattagccagtcaagaacatcatttataccgccacagg

SEQ ID NO: 27929 - DNA, 75 bp, synthetic construct
  source 1..75: mol_type = other DNA
atgatgctgaaaattaaacccgcagcgggaaaagccatccgtgacccgctcacgatgaaattactggcgtctgag

SEQ ID NO: 27930 - DNA, 75 bp, synthetic construct
  source 1..75: mol_type = other DNA
gctttacaacgccagggaaccacttgatatttttgagctacagaaatggttggggcattcttcacctgaatctac

SEQ ID NO: 27931 - DNA, 75 bp, synthetic construct
  source 1..75: mol_type = other DNA
gtcggctttctcgccagcaggcctatcgcattattcgcgatgccggtattgaagctggaaccgtaacgcagactc

SEQ ID NO: 27932 - DNA, 75 bp, synthetic construct
  source 1..75: mol_type = other DNA
gcgtggggaaaggcggtcagcaccacgcagggcgggctgacgcgcagtatggagtacgatgctgccggacgtgtc

SEQ ID NO: 27933 - DNA, 75 bp, synthetic construct
  source 1..75: mol_type = other DNA
cccgtaaaccgcacaccgcttcgttatcttcccctgacagtccccgccctctctcagctccttccttccccgaca

SEQ ID NO: 27934 - DNA, 75 bp, synthetic construct
  source 1..75: mol_type = other DNA
tgtcgggcgtttcgccaggacagagacgcactgcttgaagcgcggaacaaatacttaaacagtacgagagaagag

SEQ ID NO: 27935 - DNA, 75 bp, synthetic construct
  source 1..75: mol_type = other DNA
gagcaagtaaaagaaacaggcgagagcactgcgcaatttatcgttacagccatgcgaggcgagatcaaacgccgc

SEQ ID NO: 27936 - DNA, 75 bp, synthetic construct
  source 1..75: mol_type = other DNA
caggaccttgaccttaatgaaggtcgaataaatattcgccgactgaagaacggattttctaccgttcacccgtta

SEQ ID NO: 27937 - DNA, 75 bp, synthetic construct
  source 1..75: mol_type = other DNA
accacgcagggcgggctgacgcgcagtatggaatacgatgctgccggacgggtcatccgcctgaccagtgaaaac

SEQ ID NO: 27938 - DNA, 75 bp, synthetic construct
  source 1..75: mol_type = other DNA
gaccacagccgttgctgaaaccgctggtcgacggcccgcagagcgctgtcgtgacaggaccggcaggcgaggaaa

SEQ ID NO: 27939 - DNA, 75 bp, synthetic construct
  source 1..75: mol_type = other DNA
gacgtttatacaggtggtatcagcaatggaacgacaattaagggtggtaattcacactgtagtggtcaagtaata

SEQ ID NO: 27940 - DNA, 75 bp, synthetic construct
  source 1..75: mol_type = other DNA
agaagggctggcgctgaatttatctgttgaacgaaatattatgttaggaaactaccctgagtattccgatcgttt

SEQ ID NO: 27941 - DNA, 75 bp, synthetic construct
  source 1..75: mol_type = other DNA
ttccactcttgtcaccgaggctgtaggaacagggttcatccgcgcgctgtattcgacgtggttaagttatctccc

SEQ ID NO: 27942 - DNA, 75 bp, synthetic construct
  source 1..75: mol_type = other DNA
ttggtaagtggtgtaagcctaattataattcgttcgtggcgaccttttgccataatattgccaacaatatcgata

SEQ ID NO: 27943 - DNA, 75 bp, synthetic construct
  source 1..75: mol_type = other DNA
atgaaaattttagttactggcgctgcagggtttatcggtcgaaatttggttttccgccttaaggaagctggatat

SEQ ID NO: 27944 - DNA, 75 bp, synthetic construct
  source 1..75: mol_type = other DNA
cttcgggctggcgcttgactgctacagcggtacaccacaacggctggaagccgcgccggtggcttcaggcccggg

SEQ ID NO: 27945 - DNA, 75 bp, synthetic construct
  source 1..75: mol_type = other DNA
ataaaaatactcctatcatgctgagttcttccatccaggctgaatgtgataacgcttatggaaagagtaaagcag

SEQ ID NO: 27946 - DNA, 75 bp, synthetic construct
  source 1..75: mol_type = other DNA
tatcatctcgcaggtatcaatcgacctaaaaacgttgatgaatttgccgaggggaatagcaatctgactcaacag

SEQ ID NO: 27947 - DNA, 75 bp, synthetic construct
  source 1..75: mol_type = other DNA
aagacgtttcgaaaccatcatctcctttcttctgtcgaaagtaactttttctatctggctgagtttaatgactcg

SEQ ID NO: 27948 - DNA, 75 bp, synthetic construct
  source 1..75: mol_type = other DNA
tgagaaaatactgacgccgacagagtggaaactactgtgggttaagctggaaggaaagcagcttccggcgcaaac

SEQ ID NO: 27949 - DNA, 75 bp, synthetic construct
  source 1..75: mol_type = other DNA
gttagtgtggccagttccacttctgcacggtttttccagctcttacggtgtattacctccgctttgtaaagacca

SEQ ID NO: 27950 - DNA, 75 bp, synthetic construct
  source 1..75: mol_type = other DNA
caaacaatgtcatcgttggtcacggtagtattggtgcgggtgtcgactggcagaaacagactacgacgccgggta

SEQ ID NO: 27951 - DNA, 75 bp, synthetic construct
  source 1..75: mol_type = other DNA
ggcacggcaggcatatgactggctgagtctggcaccgctctttctggatactgaaacgacaggactggataatac

SEQ ID NO: 27952 - DNA, 75 bp, synthetic construct
  source 1..75: mol_type = other DNA
tttttgatgagattattgctgaaaaaggagatgtagctcctgatatctggataccagaactcctgaaacgcctga

SEQ ID NO: 27953 - DNA, 75 bp, synthetic construct
  source 1..75: mol_type = other DNA
ctcaatttaaaaccaatgccgctattggccgcaggttcccaaagaaaggaaagcctcgtggtagtcagggagttg

SEQ ID NO: 27954 - DNA, 75 bp, synthetic construct
  source 1..75: mol_type = other DNA
gcagcgttttgaaaacgcctcaaaggacagcacagaattaacgaaaagaattaacgtgatcggcgtgaccgacca

SEQ ID NO: 27955 - DNA, 75 bp, synthetic construct
  source 1..75: mol_type = other DNA
tattcctgttcacgatactattgccagagttgtatcctgtatcagtcctgcaaaatttcacgagtgctttattaa

SEQ ID NO: 27956 - DNA, 75 bp, synthetic construct
  source 1..75: mol_type = other DNA
gcgtgagctgaacaagcaccaggatattgtccgtcagattgtcgattcctccagtcgtattgtgtcggaaaagtg

SEQ ID NO: 27957 - DNA, 75 bp, synthetic construct
  source 1..75: mol_type = other DNA
ttgcggggagcgggctttcgtaatcttgccctggagagccgggtaatcatcacggacagcctgaaccggcgggag

SEQ ID NO: 27958 - DNA, 75 bp, synthetic construct
  source 1..75: mol_type = other DNA
gaaacgcttgcggcaacgccaaaggcggttaagacagcgtatgaccttgctaacgggaaatacactgcacaggat

SEQ ID NO: 27959 - DNA, 75 bp, synthetic construct
  source 1..75: mol_type = other DNA
tctgttggtatcggtgcaggtgttgacgcttcagttatgactctggcttgtagaacgtggcaagaatgctgggtc

SEQ ID NO: 27960 - DNA, 75 bp, synthetic construct
  source 1..75: mol_type = other DNA
atggaaaataatgataaattcttatcacaagacttattggaatcttatgccattcgtttgttgagcggaccattg

SEQ ID NO: 27961 - DNA, 75 bp, synthetic construct
  source 1..75: mol_type = other DNA
cgatcgtcagtttttaccgcgaattctgctgggcgaatatttccgcgatcaatttttacgattagtagaccaggc

SEQ ID NO: 27962 - DNA, 75 bp, synthetic construct
  source 1..75: mol_type = other DNA
ttcggttatgatatggatgctattgttggcggagctcataatggggccgccgatgcaatgagacattgttacttg

SEQ ID NO: 27963 - DNA, 75 bp, synthetic construct
  source 1..75: mol_type = other DNA
gctgcctggccattgccgtctccagtgcctgtcatgctgaagtattaacctacccggatccgctgggttcgtcgc

SEQ ID NO: 27964 - DNA, 75 bp, synthetic construct
  source 1..75: mol_type = other DNA
tgcccggtggtatccggatgtgctgccagccttctcagttaaccgatgttttccgggctcttcgccatgctgacg

SEQ ID NO: 27965 - DNA, 75 bp, synthetic construct
  source 1..75: mol_type = other DNA
atggaacaaacaagttacagcaaactatcacagcgagaaattgatcgcgctgaaactgatttactcatcaacctg

SEQ ID NO: 27966 - DNA, 75 bp, synthetic construct
  source 1..75: mol_type = other DNA
cgcgaaaaatccacctgtaccactgcgaccatcgcggcctgccgctggcgcttgtcagcacggaaggggcaacag

SEQ ID NO: 27967 - DNA, 75 bp, synthetic construct
  source 1..75: mol_type = other DNA
atattcgtgaagcacacgcgcgcggcgaacaggcaatgtccgtggttctgcgcgccagcattattaccccggaag

SEQ ID NO: 27968 - DNA, 75 bp, synthetic construct
  source 1..75: mol_type = other DNA
atttgcctgttactgatgatgttgttgttcctgctactgctactgctactgctactgctactgttcttctttttt

SEQ ID NO: 27969 - DNA, 75 bp, synthetic construct
  source 1..75: mol_type = other DNA
ttacaaccttcatgactatatcgatgatcagaaacactggctccgcgtttggcagagccatcttgaagagatcat

SEQ ID NO: 27970 - DNA, 75 bp, synthetic construct
  source 1..75: mol_type = other DNA
tcattatgtcattttatcaatggttgtaatgaggaagaattaataaaatatcctttcaatgatgaatctgctgtt

SEQ ID NO: 27971 - DNA, 75 bp, synthetic construct
  source 1..75: mol_type = other DNA
attctggtggttttctggctggcatcggtacgcaaaatgagaatgcgccaaaggcaagcgacattaacgcaacgc

SEQ ID NO: 27972 - DNA, 75 bp, synthetic construct
  source 1..75: mol_type = other DNA
cagatgctcgaccggctggaaagtgaaatcctggctgaccgggtgagtgaggaaagccgccgctggctggcatcg

SEQ ID NO: 27973 - DNA, 75 bp, synthetic construct
  source 1..75: mol_type = other DNA
ggatattgagctggtcagcgggcagcgtctgctgaaactgctgaacggggcattgctgccggatgaacttaccag

SEQ ID NO: 27974 - DNA, 75 bp, synthetic construct
  source 1..75: mol_type = other DNA
tcattaaaagatgccatgtacaacgataagattgggccatatagaacagagaatgttttagctcagactcttaca

SEQ ID NO: 27975 - DNA, 75 bp, synthetic construct
  source 1..75: mol_type = other DNA
tggccggataaccgcatcgcagaggatgcgcactatgtttaccactatgatgaatacggcagactgacggagaag

SEQ ID NO: 27976 - DNA, 75 bp, synthetic construct
  source 1..75: mol_type = other DNA
attgattgctgcaaacagcattactaacagtgcttaccagttcggttatgatatggatgctattgttggcggagc

SEQ ID NO: 27977 - DNA, 75 bp, synthetic construct
  source 1..75: mol_type = other DNA
aaatggagggataacagccagcgcagtagtcagtgaatttggtggcaccatctttatgaatggtgataattcagt

SEQ ID NO: 27978 - DNA, 75 bp, synthetic construct
  source 1..75: mol_type = other DNA
gtgtttttttcatgggcagagcagaacgaggtagtaaggcgtcaacagtgggatttattgggtaacagcgctcag

SEQ ID NO: 27979 - DNA, 75 bp, synthetic construct
  source 1..75: mol_type = other DNA
tgttgaattacctgcgggcgttacggcggtaatcaacggcaacgagcagcagtggctggagctggaatccgcagc

SEQ ID NO: 27980 - DNA, 75 bp, synthetic construct
  source 1..75: mol_type = other DNA
aatggcggaactcttgacctgaacggatataatcagtctttcaataaaattgctgcaactgattcaggtgctgta

SEQ ID NO: 27981 - DNA, 75 bp, synthetic construct
  source 1..75: mol_type = other DNA
gcaattttccctttcatatcactaactctctgggactcccacacacagagttaacgctctacgcatgccatgcag

SEQ ID NO: 27982 - DNA, 75 bp, synthetic construct
  source 1..75: mol_type = other DNA
ttactggtgcgggtattcgatgccttcgccgacgtctttgccggacgagtggtggacagtgtgaatacccgctgg

SEQ ID NO: 27983 - DNA, 75 bp, synthetic construct
  source 1..75: mol_type = other DNA
aatggggcaacctgctgaatgaagagaacccgcatcagctgcagcagcttatccgcctgccggggcagcagtatg

SEQ ID NO: 27984 - DNA, 75 bp, synthetic construct
  source 1..75: mol_type = other DNA
tcagtcgaccagatgccgacaaattgcttgccgcttctcgtggtgagtttgttgaagggattagcgacccgaatg

SEQ ID NO: 27985 - DNA, 75 bp, synthetic construct
  source 1..75: mol_type = other DNA
cggacctgggactgatgacctcttttatcgaagcatacctgggcgctgactacaccgatcgcggtctgcttacaa

SEQ ID NO: 27986 - DNA, 75 bp, synthetic construct
  source 1..75: mol_type = other DNA
atttcagcctggctggataccgaacacattgatcgcggtcttctgacaaaagaatggcgaaaagggaatcgtgtt

SEQ ID NO: 27987 - DNA, 75 bp, synthetic construct
  source 1..75: mol_type = other DNA
tctgaacgaggtcaacaacctgaacaaacgtatgggtgacctgcgtgacatcaacggcgaagccggtgcatgggc

SEQ ID NO: 27988 - DNA, 75 bp, synthetic construct
  source 1..75: mol_type = other DNA
actattctgacctctatcagaagcgggtatgcgaagggtatcactgtcagaccccgtagcattgcacttaattac

SEQ ID NO: 27989 - DNA, 75 bp, synthetic construct
  source 1..75: mol_type = other DNA
tgcccgggctatctggatggcggttcagcagccgggtaaagaaatcgccgtaaaaacagaagaacagcagtcggt

SEQ ID NO: 27990 - DNA, 75 bp, synthetic construct
  source 1..75: mol_type = other DNA
aacgagcaaagccccaagacaagccatacacattgaacgacgggcagggcctgtcattgcttatcaatcccgatg

SEQ ID NO: 27991 - DNA, 75 bp, synthetic construct
  source 1..75: mol_type = other DNA
gagtgttaaccatatgcttggcgacgatgttgatcgtgagctgcgcaacaactggacccgccccggtagtcgttg

SEQ ID NO: 27992 - DNA, 75 bp, synthetic construct
  source 1..75: mol_type = other DNA
gcagctctcaacagaaaactcattcgaggctatatgtcgtgagtggcactcaaataaagccgatcgctggacact

SEQ ID NO: 27993 - DNA, 75 bp, synthetic construct
  source 1..75: mol_type = other DNA
tcctgacgcgtctgccggagtggccggaggaccgactggcagagttgctacctcttgagggctttaccttctccg

SEQ ID NO: 27994 - DNA, 75 bp, synthetic construct
  source 1..75: mol_type = other DNA
cagcgtgcgtttaatcgtgcggcaccggctcctgtccccactccggcggcctccggtagttcaccacagaccacc

SEQ ID NO: 27995 - DNA, 75 bp, synthetic construct
  source 1..75: mol_type = other DNA
aaagatgggtccccgccaggctttacgcacgatataccgccgctgataccgtgctttgcgaactactaccggact

SEQ ID NO: 27996 - DNA, 75 bp, synthetic construct
  source 1..75: mol_type = other DNA
acaactggacgccgacaacgtacatcagtgatttactggttgtggtcatgaaaaaatccacggcagggatcagta

SEQ ID NO: 27997 - DNA, 75 bp, synthetic construct
  source 1..75: mol_type = other DNA
ccaacgccctatttcattaccgtaacaaatatgaaagcaggaaatagcaatctcccaaacaccatggtgccgcca

SEQ ID NO: 27998 - DNA, 75 bp, synthetic construct
  source 1..75: mol_type = other DNA
cgtgaaggatggcaaccatacggtgggccgttttcttcgtatacggatgatggcgcagcacttattcaggcgatt

SEQ ID NO: 27999 - DNA, 75 bp, synthetic construct
  source 1..75: mol_type = other DNA
gtgaacacggggtcgggccagtctgtcatgagctggatattgctccgtcaacgtactactggcatcagcaacgcc

SEQ ID NO: 28000 - DNA, 75 bp, synthetic construct
  source 1..75: mol_type = other DNA
tgacggaagacgatgaaaaccttgccgaactggctgatggtggcactgttgccggcctgacgcttgacgacgttg

SEQ ID NO: 28001 - DNA, 75 bp, synthetic construct
  source 1..75: mol_type = other DNA
ccactgatctgaatgctgaggtgccgctgtctgatgatctcaacatcagtcttaataccatggcacaacaccgcg

SEQ ID NO: 28002 - DNA, 75 bp, synthetic construct
  source 1..75: mol_type = other DNA
cctgttgagtacggctaacacatggagtgcgcgccagactttcaacggcgggatcaccggggcgctgacagggaa

SEQ ID NO: 28003 - DNA, 75 bp, synthetic construct
  source 1..75: mol_type = other DNA
tttaacgatcagttcgccgatgcagatattcgtaattatgtgggcaacgtctggtatcagcgcgaagtctttata

SEQ ID NO: 28004 - DNA, 75 bp, synthetic construct
  source 1..75: mol_type = other DNA
tggtaattttaaagcaatagataaccacgggaaggaaataacaaacagaaaaggattacctaatgtctgcagagt

SEQ ID NO: 28005 - DNA, 75 bp, synthetic construct
  source 1..75: mol_type = other DNA
cagtacggatttggggacgaaaaccacatcgtcgtttgattacggcactaaatccacgaataacactggtgcgca

SEQ ID NO: 28006 - DNA, 75 bp, synthetic construct
  source 1..75: mol_type = other DNA
cgccacgcgttacgacaaaacggcgagaaattacctggcgatggtgaaactgggctgcatccgactcttttatca

SEQ ID NO: 28007 - DNA, 75 bp, synthetic construct
  source 1..75: mol_type = other DNA
tatatttcagacaagcgagtggcttaataaagacatttccgaatactcaaacagatttattgatgattttgattg

SEQ ID NO: 28008 - DNA, 75 bp, synthetic construct
  source 1..75: mol_type = other DNA
tcagatacagctttaaatatccatggcacagaggatacagcaaaacaatttgcagaaaaagaagtggaagatccc

SEQ ID NO: 28009 - DNA, 75 bp, synthetic construct
  source 1..75: mol_type = other DNA
cggaagtggtcaacggggacattatctgctccacctcagtcagccacattctggctgtacaaaagagtacactgc

SEQ ID NO: 28010 - DNA, 75 bp, synthetic construct
  source 1..75: mol_type = other DNA
cactaacagatcgcgtaattcgtgaggatgaatgtcgtaagttaacaggcgtcagccgtactacacgctacgaac

SEQ ID NO: 28011 - DNA, 75 bp, synthetic construct
  source 1..75: mol_type = other DNA
aagaaagagatactgcgcgtatacgatgagaatcatcaggtatacggtgagcgtaaagtctggcgtcagttgtta

SEQ ID NO: 28012 - DNA, 75 bp, synthetic construct
  source 1..75: mol_type = other DNA
caaagctgctgtacggactgatgccgccggggcctgcatggagcgataccgacggcgtgcttgatggtctggcac

SEQ ID NO: 28013 - DNA, 75 bp, synthetic construct
  source 1..75: mol_type = other DNA
atgtcaaccggattacgtttcacacttgaagtggacggcctgccaccggatgcttttgcggtggtttcctttcat

SEQ ID NO: 28014 - DNA, 75 bp, synthetic construct
  source 1..75: mol_type = other DNA
gtatctggctcgttgccgggataaccgatatgcgtaagtctttcaacgggctgggtgaacaggtacagcatgtgt

SEQ ID NO: 28015 - DNA, 75 bp, synthetic construct
  source 1..75: mol_type = other DNA
aacacaaaattcatattgataaacaccgcgtttgtatcggtttatccccgctggcgcggggaacactttactaca

SEQ ID NO: 28016 - DNA, 75 bp, synthetic construct
  source 1..75: mol_type = other DNA
tggcctgttcggtgtgccccggcggggtgacgtccggccatccggtcaatccgctgctcggcgcgaaggtccttc

SEQ ID NO: 28017 - DNA, 75 bp, synthetic construct
  source 1..75: mol_type = other DNA
ccgaagtattaaccgatcataccgatgtgatttgctccaccagtattgaacgcatcgtcaccggacgtaatgcgg

SEQ ID NO: 28018 - DNA, 75 bp, synthetic construct
  source 1..75: mol_type = other DNA
ctggcactggcggcacgacagtattacggacagcgtctcggtgaactgtcacaggccatgagccaggggagcgta

SEQ ID NO: 28019 - DNA, 75 bp, synthetic construct
  source 1..75: mol_type = other DNA
cagtgattcacggttcgattacttctatgctgcctggcggttattatgatcgttttgatgcagatggtaataatc

SEQ ID NO: 28020 - DNA, 75 bp, synthetic construct
  source 1..75: mol_type = other DNA
gaataaatcctggttcaggatgcaggctggggggccgggtgacgcggatatttatatttatgacgagattggttt

SEQ ID NO: 28021 - DNA, 75 bp, synthetic construct
  source 1..75: mol_type = other DNA
atgtcagaactgactcttaccgaccccgaagtattaaccggccacaccgacgtgatttgctccaccagcattgag

SEQ ID NO: 28022 - DNA, 75 bp, synthetic construct
  source 1..75: mol_type = other DNA
ttatgacgcgcttggcgacgggggcagtctggttttatccctgagtggtatgccggtctccaccggtgatgttca

SEQ ID NO: 28023 - DNA, 75 bp, synthetic construct
  source 1..75: mol_type = other DNA
tggtttttacccaatgtgattaaaaactttagcggttttgctccacttggagcgatcctggcgctggttttaggt

SEQ ID NO: 28024 - DNA, 75 bp, synthetic construct
  source 1..75: mol_type = other DNA
accgctggggagcatgggcagcagcagataacagcggagtggactggcagccgatcgcggcaggcttcaaggggc

SEQ ID NO: 28025 - DNA, 75 bp, synthetic construct
  source 1..75: mol_type = other DNA
gtggctggattacctggacgcactggaactggtggatacctccagtgctccagatattgaatggcctacacctcc

SEQ ID NO: 28026 - DNA, 75 bp, synthetic construct
  source 1..75: mol_type = other DNA
acaaaatcaacctgattgataagagcgatttcacgaaagcatctggcgttgctaccgatgatatcgttgctgtag

SEQ ID NO: 28027 - DNA, 75 bp, synthetic construct
  source 1..75: mol_type = other DNA
ctggtacgtcctttttatctgctggaggggcgcaacgttcctgacttccggagcagcatcggggcgcagtatggt

SEQ ID NO: 28028 - DNA, 75 bp, synthetic construct
  source 1..75: mol_type = other DNA
actactggtgttgcaacttatcgtaacaacgacttctttggtctggtcgatggcctgaactttgctgctcagtat

SEQ ID NO: 28029 - DNA, 75 bp, synthetic construct
  source 1..75: mol_type = other DNA
tctggctggcggcgcgttgctgctggcggcgattttgcctgtctccgcaccgttcaaatttgccctgttggtcat

SEQ ID NO: 28030 - DNA, 75 bp, synthetic construct
  source 1..75: mol_type = other DNA
ttataagttgcatatgcagcaagccgtgtttcatcactattacgatgtgcatgtcgcggcggagtttcgttgccg

SEQ ID NO: 28031 - DNA, 75 bp, synthetic construct
  source 1..75: mol_type = other DNA
tcgtgaagaacgtctccagcctttccagcacctacagcatccgcatttacgagctgctccagcagttccgcagca

SEQ ID NO: 28032 - DNA, 75 bp, synthetic construct
  source 1..75: mol_type = other DNA
ctggagggcgatattaaagggtgtttcgataacatcagccatgactggctgctttcccatattccgatggacagg

SEQ ID NO: 28033 - DNA, 75 bp, synthetic construct
  source 1..75: mol_type = other DNA
atgcggcttctataacaacgtggaacgggtgggcatggattgcaggcgctgccctctacttgctctgcctgccgg

SEQ ID NO: 28034 - DNA, 75 bp, synthetic construct
  source 1..75: mol_type = other DNA
agccttgaacggcctcaatttcctgacgggctgtttccttttgccggagtcgcacaaaggcgaacgccggccgtt

SEQ ID NO: 28035 - DNA, 75 bp, synthetic construct
  source 1..75: mol_type = other DNA
aacagaaaatcttccagaattattcttaacaaaaatagatactgatacgtttttctctcagtggtcaaccaaaac

SEQ ID NO: 28036 - DNA, 75 bp, synthetic construct
  source 1..75: mol_type = other DNA
ttaccattgaggccaccagcgaacaggaagcacgccagcaatccccggctggctgcgtgatggtattcgccgccc

SEQ ID NO: 28037 - DNA, 75 bp, synthetic construct
  source 1..75: mol_type = other DNA
actgctggggcgcaccaaatccggcactctggtactgactgaggataacaccgggttacgttttgaactgacacc

SEQ ID NO: 28038 - DNA, 75 bp, synthetic construct
  source 1..75: mol_type = other DNA
ggaagcccgtcagcaatcaccggctggctgcgtgatggtattcgccgcccgtattcgtcagggggtgcaccatgt

SEQ ID NO: 28039 - DNA, 75 bp, synthetic construct
  source 1..75: mol_type = other DNA
accgtgacaccggaaatttcttccgtaatcaatttatgaccattctgttggtatcgttgctatgtgcgtttatca

SEQ ID NO: 28040 - DNA, 75 bp, synthetic construct
  source 1..75: mol_type = other DNA
atgaagaagattttactcgttgctggcgcagctctggcactggcgggatgtggtgagaaaggtgattttgagaaa

SEQ ID NO: 28041 - DNA, 75 bp, synthetic construct
  source 1..75: mol_type = other DNA
tcgaatacaaggaagacgttatctgtaaaaactctgatggcagtgcgcacatgggggtaagtctggatatacggt

SEQ ID NO: 28042 - DNA, 75 bp, synthetic construct
  source 1..75: mol_type = other DNA
atgagcgaatatttcagaatacttcagggactgcctgacggtccttttacccgcaaacatgccgaagccgttgcc

SEQ ID NO: 28043 - DNA, 75 bp, synthetic construct
  source 1..75: mol_type = other DNA
tgtttgatgatgaaggaaacctcgtaccgattaatcgtcctccagcaaactggaaacggctttactcaggctcta

SEQ ID NO: 28044 - DNA, 75 bp, synthetic construct
  source 1..75: mol_type = other DNA
acagatgctgaatacctggtgcgtaaattcgatgcgcttgaagctaaatgtgcagcacaggaaaacaaagtaata

SEQ ID NO: 28045 - DNA, 75 bp, synthetic construct
  source 1..75: mol_type = other DNA
ttatccaggaagcggaatcccgttgatatagcagccaatatcgagcgaaaaattttgctaaatgcttcgcaggag

SEQ ID NO: 28046 - DNA, 75 bp, synthetic construct
  source 1..75: mol_type = other DNA
tgcgggcaccacctggtgggagggcgacttgttccagggcaagccggactggaaaaagctgcataactatccgca

SEQ ID NO: 28047 - DNA, 75 bp, synthetic construct
  source 1..75: mol_type = other DNA
gactcgctgtgtgagttcaccgtaaaggaacgtaatattgagtttaaggctgttctcgcttacgaaccgaagaag

SEQ ID NO: 28048 - DNA, 75 bp, synthetic construct
  source 1..75: mol_type = other DNA
ttaactctgtggtttcttccggggctttcagtaatcatattcagtccgtcgattatttgtctggcggtgtgtcag

SEQ ID NO: 28049 - DNA, 75 bp, synthetic construct
  source 1..75: mol_type = other DNA
ttggctgcattcggtttttcaatttatgacaaaaataatgttgatgtgacaggcgtgcttacccccatattttac

SEQ ID NO: 28050 - DNA, 75 bp, synthetic construct
  source 1..75: mol_type = other DNA
agtctgcagccatggtaccggcagtgtattctgccggacagcctgcatcgctgcctgttgccattgattatccgg

SEQ ID NO: 28051 - DNA, 75 bp, synthetic construct
  source 1..75: mol_type = other DNA
gtcaagcaacgtgaagcggaggccaacatgctgcgtgcagaagctgccggacaggctgatgccattcgaacaaaa

SEQ ID NO: 28052 - DNA, 75 bp, synthetic construct
  source 1..75: mol_type = other DNA
aaatggttgctgcaatggcgcttgaagctgttcgccaacaaagacgtcttgagcaggtggaagagaaagtcacct

SEQ ID NO: 28053 - DNA, 75 bp, synthetic construct
  source 1..75: mol_type = other DNA
cggaatgctggcaggcaattacgtataactgtggttcggcgcaccgctgtacatatcagccgcattatgcataca

SEQ ID NO: 28054 - DNA, 75 bp, synthetic construct
  source 1..75: mol_type = other DNA
ataaccggatgaccaaaatggtcagcgatatgctgttcctggcacaggcagataataatcagctgatacctgaca

SEQ ID NO: 28055 - DNA, 75 bp, synthetic construct
  source 1..75: mol_type = other DNA
aagataaatcactactgccatttttcagcgatgagcgggtgatccgtgctgcgggtggcgctggtgcactgtctg

SEQ ID NO: 28056 - DNA, 75 bp, synthetic construct
  source 1..75: mol_type = other DNA
atcggacgtacactcaacgcgttttatcttatccgtgcccagactggagaaaatgattccggacacccagtgctg

SEQ ID NO: 28057 - DNA, 75 bp, synthetic construct
  source 1..75: mol_type = other DNA
gtatataaattaatattaaggtgtttcggaaaagaatatgattatagtcattcgaagttgctttccaggtattac

SEQ ID NO: 28058 - DNA, 75 bp, synthetic construct
  source 1..75: mol_type = other DNA
gcgcagagggaaactgatatcgaaaacgaaaagctccgcaaagaactggacgatttgcgtgcggcagcggagtca

SEQ ID NO: 28059 - DNA, 75 bp, synthetic construct
  source 1..75: mol_type = other DNA
accacagcggcggcaaactttgccacgctgacagaacgggagattgccgaagcggaacaggtaacaaccatcaac

SEQ ID NO: 28060 - DNA, 75 bp, synthetic construct
  source 1..75: mol_type = other DNA
ttatgaataatcctgctcagggacaggccctgaatattcctctggtcacggcaccggcgggaacttcagcagaga

SEQ ID NO: 28061 - DNA, 75 bp, synthetic construct
  source 1..75: mol_type = other DNA
aatggtccaatggtgggcagattatctttattccaacagagagaagcatatctctgcttttgaatttgcaaataa

SEQ ID NO: 28062 - DNA, 75 bp, synthetic construct
  source 1..75: mol_type = other DNA
ttggttatgaccagatatataaaatagttgataataatcttgctggtatagatttttctgccccacgattaaata

SEQ ID NO: 28063 - DNA, 75 bp, synthetic construct
  source 1..75: mol_type = other DNA
gggatcaactttcagaaagtgatcaacagcgccgtgaatttattgccaatatctcccatgatttacggacgccat

SEQ ID NO: 28064 - DNA, 75 bp, synthetic construct
  source 1..75: mol_type = other DNA
ctatggttttgaaggtcgagaagccccacctgaaatagcaaatctttatcttggaaaaaaataccagatgaatta

SEQ ID NO: 28065 - DNA, 75 bp, synthetic construct
  source 1..75: mol_type = other DNA
atgcgctaattcatcgcgaggctgctggatatattcccatttgcagaattgaaggagcgcatcctgaaagcggtt

SEQ ID NO: 28066 - DNA, 75 bp, synthetic construct
  source 1..75: mol_type = other DNA
ttgtaactaccgatgacattgttcacgaggtgaatctggaaggaaagcgcattggctacgtgattaaaacagaaa

SEQ ID NO: 28067 - DNA, 75 bp, synthetic construct
  source 1..75: mol_type = other DNA
aggaagtgatcacccgcacggtgaaggtcaccaatgtgggacgcccgtcgatggctgaagatcgcagtacggtga

SEQ ID NO: 28068 - DNA, 75 bp, synthetic construct
  source 1..75: mol_type = other DNA
ttaatattcggaaatatcatgatattcctgctgaaacgccgtatgcgccgggagaacaatgtaagggaggacaat

SEQ ID NO: 28069 - DNA, 75 bp, synthetic construct
  source 1..75: mol_type = other DNA
actatgtacaaaacggtgaaaactacctacagattaattttggctctcagcgctactggctggagcgatccacca

SEQ ID NO: 28070 - DNA, 75 bp, synthetic construct
  source 1..75: mol_type = other DNA
gattgagtattatgctaaaaaatatgaaaagtattttgatgatttaaaaataggtgaggagcctttgaatcttaa

SEQ ID NO: 28071 - DNA, 75 bp, synthetic construct
  source 1..75: mol_type = other DNA
tgcactggtccgtaatgcgctggcggaagcggtggtggcgcgtctggacacagactttgtggacccgaaaaaagc

SEQ ID NO: 28072 - DNA, 75 bp, synthetic construct
  source 1..75: mol_type = other DNA
cgcccgtcggggccaacaccaattgagttgctgaaacaggaatatgaacgccggaaagcggctggttttgtttga

SEQ ID NO: 28073 - DNA, 75 bp, synthetic construct
  source 1..75: mol_type = other DNA
catggcctccggacctggctgagtttgtggcactgatttcggaaagcggagccaatccattcggtctgacggtgg

SEQ ID NO: 28074 - DNA, 75 bp, synthetic construct
  source 1..75: mol_type = other DNA
gtttcacggtaccaaaaacacaggcgggaaccaatcgggtcattcatcttattaagccagcaatcgacgctctcc

SEQ ID NO: 28075 - DNA, 75 bp, synthetic construct
  source 1..75: mol_type = other DNA
gctcagggatgccgggcagtgctgtctctgtggtcgtgtggttgacctctgtgacagtgaactcgatcaccgaat

SEQ ID NO: 28076 - DNA, 75 bp, synthetic construct
  source 1..75: mol_type = other DNA
ctcacccgactgctggaccagcactacggccttacgctgaatgacacaccgttcgtggatgaacgtgtgattgag

SEQ ID NO: 28077 - DNA, 75 bp, synthetic construct
  source 1..75: mol_type = other DNA
catcgtctccagaagcaatgcaatcatggctgcaaaacaacgccaaggaactgactcgcgtcggtgttgacccta

SEQ ID NO: 28078 - DNA, 75 bp, synthetic construct
  source 1..75: mol_type = other DNA
ccatgggggaatatcgtagtggaaataacctgcaaagctctcccaagttcatacaaggtagcttgatgcatggtc

SEQ ID NO: 28079 - DNA, 75 bp, synthetic construct
  source 1..75: mol_type = other DNA
agaaagcaaaagcattaaaagaccacttcatttcatgcatggagttatcccaacgacggaaatgaaaaaatattg

SEQ ID NO: 28080 - DNA, 75 bp, synthetic construct
  source 1..75: mol_type = other DNA
atgaaattcacctcgcgctctatcaggctataactggcccggaggaagaccaaaaagcgtttaaacaagtcgcac

SEQ ID NO: 28081 - DNA, 75 bp, synthetic construct
  source 1..75: mol_type = other DNA
actacctttcgtttgatgatcttaccgaaattaatcgccttttaattgagcttcaaacaccagatgaacctgtta

SEQ ID NO: 28082 - DNA, 75 bp, synthetic construct
  source 1..75: mol_type = other DNA
tgtgctgctgatgcgtgttgatacgtcaacagcacccgatattgaatggcctacgcctccggcagttcaggccag

SEQ ID NO: 28083 - DNA, 75 bp, synthetic construct
  source 1..75: mol_type = other DNA
tgccagagtcgatctggacaagggctactggtggtcatcctccaatcaggagattctggggatcaccggcgtgga

SEQ ID NO: 28084 - DNA, 75 bp, synthetic construct
  source 1..75: mol_type = other DNA
atgaccacttttaccgacaaagaactgattaaagaaattaaagagcgtatcagcagccttgacgtgcgagacgat

SEQ ID NO: 28085 - DNA, 75 bp, synthetic construct
  source 1..75: mol_type = other DNA
gaatactggcggctgcgtcatcttctgctacgcttgcttatgacggtacaattacttttaatggaaaagttgttg

SEQ ID NO: 28086 - DNA, 75 bp, synthetic construct
  source 1..75: mol_type = other DNA
aaaaactgcgtatgaaattcggcggtcgttgtgcgtactgcggctgtgaactgccggagaaaggatggcatgccg

SEQ ID NO: 28087 - DNA, 75 bp, synthetic construct
  source 1..75: mol_type = other DNA
gcatggaatcggtgctgtgtaacgaatcagactttggcataaacatgaacaacgtcacaaattcatccattgatt

SEQ ID NO: 28088 - DNA, 75 bp, synthetic construct
  source 1..75: mol_type = other DNA
tttcctgtgcggcaaaggttcatttcaaagaagcaggcaacgccatgaatgaattaattgcgaatcatgacttcg

SEQ ID NO: 28089 - DNA, 75 bp, synthetic construct
  source 1..75: mol_type = other DNA
gactacagcaaaaatggtgcaggcatagaaaactataacttcatcactactgctggtcttaagtacaccttttaa

SEQ ID NO: 28090 - DNA, 75 bp, synthetic construct
  source 1..75: mol_type = other DNA
gtgttcttttcgggattatttcaacgaaaaagtgacgcgccggtgaccacgccagcagagctggcggatgctatc

SEQ ID NO: 28091 - DNA, 75 bp, synthetic construct
  source 1..75: mol_type = other DNA
gcgcacgctgacgctggacggactggtggggctgaatcccatcgcctatgcccgcgaggcaatatcgctggcagc

SEQ ID NO: 28092 - DNA, 75 bp, synthetic construct
  source 1..75: mol_type = other DNA
acatggtgcagaacaccgatcgcgccaccttcaacaatatcgaagaactggggctgggatttatcaactattcac

SEQ ID NO: 28093 - DNA, 75 bp, synthetic construct
  source 1..75: mol_type = other DNA
taacgctgcaattattaaaggtgcaattaattgggatttgatgccccagatatctatcggggctgctggctggac

SEQ ID NO: 28094 - DNA, 75 bp, synthetic construct
  source 1..75: mol_type = other DNA
ttcagactacagcaaaaatggtgcaggcatagaaaactataacttcatcactactgctggtcttaagtacacctt

SEQ ID NO: 28095 - DNA, 75 bp, synthetic construct
  source 1..75: mol_type = other DNA
ttcatcaatgccctgaaagcccgaatcgacgcttaccagaagcgtaagcgtcgtgaaggtaaacgcgtgcatccc

SEQ ID NO: 28096 - DNA, 75 bp, synthetic construct
  source 1..75: mol_type = other DNA
agcggtgccggtaaaacagagcggggtgcaactgacgccgtcggagtttaacgccacgatgaccatggtggtgga

SEQ ID NO: 28097 - DNA, 75 bp, synthetic construct
  source 1..75: mol_type = other DNA
cctacctggatgacatcgccgtgaagcagtggcgggaaaaatcgcggcagcttgcggaacggggagacctgaccc

SEQ ID NO: 28098 - DNA, 75 bp, synthetic construct
  source 1..75: mol_type = other DNA
acccgtaatgagggaaaacagggaccatcactgccgtacattccgtcaggaagttttgcgaaagccatgctgatt

SEQ ID NO: 28099 - DNA, 75 bp, synthetic construct
  source 1..75: mol_type = other DNA
tggcaggctaagccagcagatcagcgtcggttatccgaactgatagaggcctggtggttgcttgatggtcgtaac

SEQ ID NO: 28100 - DNA, 75 bp, synthetic construct
  source 1..75: mol_type = other DNA
aacgcaagcagttcctgtggctggggattgtgattgtcggatcggtatcagcaattggtggtgcgctttatctgt

SEQ ID NO: 28101 - DNA, 75 bp, synthetic construct
  source 1..75: mol_type = other DNA
tgtggatattgatgcgctcaacgccttcaaatttctgaccggaccagaaaccgtgctggcactgctggatgaacg

SEQ ID NO: 28102 - DNA, 75 bp, synthetic construct
  source 1..75: mol_type = other DNA
aatggcgaaaaaccggagattgccatcgttccccagagtctgcaccggctgatttatggtccggacaaacggagc

SEQ ID NO: 28103 - DNA, 75 bp, synthetic construct
  source 1..75: mol_type = other DNA
cgcggctgtatcgggcatgtatgcggcaggggccagtatgatcctgggcggtgtggcgcagatgctggcaccgaa

SEQ ID NO: 28104 - DNA, 75 bp, synthetic construct
  source 1..75: mol_type = other DNA
tcagctcgctgattgagggtgaggtgttccataacgaaaacccggttcggggaatacgtaagctgaaagtcagga

SEQ ID NO: 28105 - DNA, 75 bp, synthetic construct
  source 1..75: mol_type = other DNA
gtcaccgcgggtggtactctgggaaatcgacctgacggtacagggtggtgagcggtattttttctgcaatgagct

SEQ ID NO: 28106 - DNA, 75 bp, synthetic construct
  source 1..75: mol_type = other DNA
aggatatcaattcgctgacctctcacctgcatgaaaaagattttttgttaacgtgggaacagacgccagacgaac

SEQ ID NO: 28107 - DNA, 75 bp, synthetic construct
  source 1..75: mol_type = other DNA
atacgtcaggaaccctttaaatgaattaataaacggggggatcaggatattccggctgaaacgccgtatgcgccg

SEQ ID NO: 28108 - DNA, 75 bp, synthetic construct
  source 1..75: mol_type = other DNA
gtgagcggcacctggaaaaccaacctcacgccagacaaactgggcgtggtggcgctggacccggatgcactctcc

SEQ ID NO: 28109 - DNA, 75 bp, synthetic construct
  source 1..75: mol_type = other DNA
gcatcccgccgattatcggcgcgttgctgccaagcgccagcttcttcttaatcagcctgtggctgttaatgagaa

SEQ ID NO: 28110 - DNA, 75 bp, synthetic construct
  source 1..75: mol_type = other DNA
tgtgaacgatgcgctttcgattgatggtaaaacggtgctgttcgcggcgttgaccggcagcctggaaaaccatcc

SEQ ID NO: 28111 - DNA, 75 bp, synthetic construct
  source 1..75: mol_type = other DNA
aggggccagtcccgcagtcggcgcggaaaggggtattggcattgacgttcgtcatgctgggattaaccttctttt

SEQ ID NO: 28112 - DNA, 75 bp, synthetic construct
  source 1..75: mol_type = other DNA
cgtcctcatctgcatgagaagtcgatctacaagatgccgctcggcaagctgatgtgctgggtatgtatggcgttc

SEQ ID NO: 28113 - DNA, 75 bp, synthetic construct
  source 1..75: mol_type = other DNA
cgttcggttcaaatctctctgcgttgtggatattgaatgccaacggttggatgcaatacccgaccggtgcgcatt

SEQ ID NO: 28114 - DNA, 75 bp, synthetic construct
  source 1..75: mol_type = other DNA
atgcgtaagataacaaccgccgaggcactggcggcgcaaattcaggacggtgcgactattgctattagcggtaac

SEQ ID NO: 28115 - DNA, 75 bp, synthetic construct
  source 1..75: mol_type = other DNA
tcaactttgaaactatgcgtatggagatggtgagcttctccgagctggtgcttaacccggttgctcaggtgaaat

SEQ ID NO: 28116 - DNA, 75 bp, synthetic construct
  source 1..75: mol_type = other DNA
ctgatgacctcgctggcgtttatcctcggcgttatgccgctggttatcagtactggtgctggttccggcgcgcag

SEQ ID NO: 28117 - DNA, 75 bp, synthetic construct
  source 1..75: mol_type = other DNA
atgcaacaccgccagtcaacatccagggcgtacctctgccgttcaccatgatttatctgtttatatgcccctttc

SEQ ID NO: 28118 - DNA, 75 bp, synthetic construct
  source 1..75: mol_type = other DNA
gcgatgtactttccgaacccgcagtgctggtcggtttaatcgccctgattggcctgattgcacagaaaaaaccgg

SEQ ID NO: 28119 - DNA, 75 bp, synthetic construct
  source 1..75: mol_type = other DNA
gtcgtaatgcgtttattcagccgcaggtggacgcggtgatgttggaagggttgtcgcgttttcccaacgtgcgct

SEQ ID NO: 28120 - DNA, 75 bp, synthetic construct
  source 1..75: mol_type = other DNA
gcagtcttgtgcagctgattgaccagcgggtgcaggcggtgatgctgtccatgcgacgtgacggaggaatgctga

SEQ ID NO: 28121 - DNA, 75 bp, synthetic construct
  source 1..75: mol_type = other DNA
gttggcttaccgaatctggcaccgcgctatgccattgatgctcctgctgacgcgcctgatggctcaagtcgcccg

SEQ ID NO: 28122 - DNA, 75 bp, synthetic construct
  source 1..75: mol_type = other DNA
aaaacagggaggtgattatttattcgcggtaaaaggaaaccaggggcggctaaataaagcctttgaggaaaaatt

SEQ ID NO: 28123 - DNA, 75 bp, synthetic construct
  source 1..75: mol_type = other DNA
ttttcaatgcttcattccgggttattgttattagaagcaaatttaaattatcctgtcggctccagttttaacacc

SEQ ID NO: 28124 - DNA, 75 bp, synthetic construct
  source 1..75: mol_type = other DNA
gataacggatgtgcctgcagcttcactgacggtaaaaggcaccgtgcaactcagcagcgccactaacagcacgtc

SEQ ID NO: 28125 - DNA, 75 bp, synthetic construct
  source 1..75: mol_type = other DNA
ggaaaggcggtaaatcctgctccggctggctgtgggcttacgtcagcggagaaagagtaagcgtcaacggagcac

SEQ ID NO: 28126 - DNA, 75 bp, synthetic construct
  source 1..75: mol_type = other DNA
gggaagaaatgtggcaggaagcccatgcccgcgcctttaccgtcgctaaagtgacccgcctggatattctggaag

SEQ ID NO: 28127 - DNA, 75 bp, synthetic construct
  source 1..75: mol_type = other DNA
tgggatcgaggttatccctgcgcatgtcactgaatatctgaacaaggtgctgattgaaaccgatcatgccaaccc

SEQ ID NO: 28128 - DNA, 75 bp, synthetic construct
  source 1..75: mol_type = other DNA
gcgcagacctccaaaatttgaaaatctctttaagggattttcaaacgatcgccccaaatgtccgaaagctcatac

SEQ ID NO: 28129 - DNA, 75 bp, synthetic construct
  source 1..75: mol_type = other DNA
ctctttccccgatcacacacaaccagctcccagttgtcactacagagttactggccaaactatatggctgtagcg

SEQ ID NO: 28130 - DNA, 75 bp, synthetic construct
  source 1..75: mol_type = other DNA
tggtgtgtgctgaaaacaggcctgtatgacgatgtgtaccgcgctatcgacttcatttacgaaggcaatcagata

SEQ ID NO: 28131 - DNA, 75 bp, synthetic construct
  source 1..75: mol_type = other DNA
aagaccgtttgtgcggatcctgtccgaaaaagtgcgcgcgcgacgcggacgcccgccaaaagatgaagtccgtct

SEQ ID NO: 28132 - DNA, 75 bp, synthetic construct
  source 1..75: mol_type = other DNA
gcaattcgatgacattcgcgtaattcgtggcgtgaaagtaccaggcggaaggcttggaataaaaatcaccgaact

SEQ ID NO: 28133 - DNA, 75 bp, synthetic construct
  source 1..75: mol_type = other DNA
agtctataccgctgacggcactgaagcgaatcgtgagcaaatcaggaagggagcggcctgggtatacccggacta

SEQ ID NO: 28134 - DNA, 75 bp, synthetic construct
  source 1..75: mol_type = other DNA
accttgagtacatccgtgagtggagcctctggttcgatatcaaaattgtttttctgaccatcttcaaaggtttcg

SEQ ID NO: 28135 - DNA, 75 bp, synthetic construct
  source 1..75: mol_type = other DNA
gatcttcagcgcgggcctggtggcgttcagccatgattttgataatcgtctggtgacgtatctttgctggtatct

SEQ ID NO: 28136 - DNA, 75 bp, synthetic construct
  source 1..75: mol_type = other DNA
ggggatttagccgccggacaaatgctgatggagagcttccgtaatcagccgtggttagggtttgaagtggtgggc

SEQ ID NO: 28137 - DNA, 75 bp, synthetic construct
  source 1..75: mol_type = other DNA
gctgcgtgaatggtataacaaagcaccaacagaacgttcattaactatcatccgtcctaccgttatcttcggtga

SEQ ID NO: 28138 - DNA, 75 bp, synthetic construct
  source 1..75: mol_type = other DNA
attgaaagcgaagtttttacaaacaaggttcagtatccggatggcaagccgccagtatgggcaaagtgtacgaaa

SEQ ID NO: 28139 - DNA, 75 bp, synthetic construct
  source 1..75: mol_type = other DNA
aaggcagcggaggaaatcgggcaactcgtagccgtcgctcgtgaagaactccagcggcgtaaagccaaagaatct

SEQ ID NO: 28140 - DNA, 75 bp, synthetic construct
  source 1..75: mol_type = other DNA
caataggagtggatgcggcgaatatctcacgcctggaaacaggtaagcagaaacaattcactgaacaagccctga

SEQ ID NO: 28141 - DNA, 75 bp, synthetic construct
  source 1..75: mol_type = other DNA
gtgggtgaactccggcgatgctttcatgatatacagccttgctgaaaatttttgcagtagcaatggctacacact

SEQ ID NO: 28142 - DNA, 75 bp, synthetic construct
  source 1..75: mol_type = other DNA
gcaggtgaaggatgtattccgtattgaaatgctggatgtcagtgccagtgcgggaaatggccttatccagggcgg

SEQ ID NO: 28143 - DNA, 75 bp, synthetic construct
  source 1..75: mol_type = other DNA
aataacgaaggcgagagcaccatcaccaacggtggcaccggcacacagattaacggtgacgacgccacagcaaac

SEQ ID NO: 28144 - DNA, 75 bp, synthetic construct
  source 1..75: mol_type = other DNA
gacacagacaaatcaaaagcactgctaatccttttgatcccagctacgaatcgtactttgaagcacggctaaagg

SEQ ID NO: 28145 - DNA, 75 bp, synthetic construct
  source 1..75: mol_type = other DNA
aaaacggcctcccgtatccgtggggaaaatgagaccgctcaggtcttactgcgcggtgagctcatcgatgccgga

SEQ ID NO: 28146 - DNA, 75 bp, synthetic construct
  source 1..75: mol_type = other DNA
tgattaatggcgctggcgttccgatggcggaatgcaaaatttatttagatgcactggttaataccagtgaagtgg

SEQ ID NO: 28147 - DNA, 75 bp, synthetic construct
  source 1..75: mol_type = other DNA
tggtcaggtaactgaagctgtcctgacccaggatggccctgtactggagaatttcactgcagggcaaagtggcac

SEQ ID NO: 28148 - DNA, 75 bp, synthetic construct
  source 1..75: mol_type = other DNA
gtcttcagcaggcaatggcagatagccaggtgcggggcgtactgctggacattgacagtccgggcgggcaggccg

SEQ ID NO: 28149 - DNA, 75 bp, synthetic construct
  source 1..75: mol_type = other DNA
acccggatatcgcttctgccgggtattatggtgcggaatcacggggagatggcaactggacaacagcatccaggg

SEQ ID NO: 28150 - DNA, 75 bp, synthetic construct
  source 1..75: mol_type = other DNA
gaacagaggccgccgtttttgaaggtcagtccggcattgaggccgggctggcggatgaattagtcaatgcgtcgg

SEQ ID NO: 28151 - DNA, 75 bp, synthetic construct
  source 1..75: mol_type = other DNA
agtgggcgtgtttggtcccggctggaaagcgcccttcgatatccgcttacagatacgcgatgaaggcctgatact

SEQ ID NO: 28152 - DNA, 75 bp, synthetic construct
  source 1..75: mol_type = other DNA
tttttgctgtcaggaatctctgatgagtcacccatcaaaggcgtcaaagcaaagctgtatcgtcaagacggttca

SEQ ID NO: 28153 - DNA, 75 bp, synthetic construct
  source 1..75: mol_type = other DNA
aaccgcaccttatggcaataccgacggcaattattggcgttgggtgaacttcggccagtgggggggaggcggtat

SEQ ID NO: 28154 - DNA, 75 bp, synthetic construct
  source 1..75: mol_type = other DNA
tggtaatggctggatttcctcttttggagaggctcaacggggaatatttaggctgggcaaggaagaacaggctat

SEQ ID NO: 28155 - DNA, 75 bp, synthetic construct
  source 1..75: mol_type = other DNA
ctcatcacctgaagctcttgataccctgaatgagcttgcagcagcactgggcaatgacccgaactttgcgacaac

SEQ ID NO: 28156 - DNA, 75 bp, synthetic construct
  source 1..75: mol_type = other DNA
ggcatgacatgccaaatgatcccaaatggcgaaccattgccagggtctcaggacagccaatcgcaacagtgatgg

SEQ ID NO: 28157 - DNA, 75 bp, synthetic construct
  source 1..75: mol_type = other DNA
aagatgttgtttctttaggtgaaatgattcagaaggaaatttatgggcatgaacaaagaacattttcaccagttc

SEQ ID NO: 28158 - DNA, 75 bp, synthetic construct
  source 1..75: mol_type = other DNA
agttatgcttgtgccagaggatatgtcagtcggatggttcagcaaggctctggagagtgtcgacgaagttcgcat

SEQ ID NO: 28159 - DNA, 75 bp, synthetic construct
  source 1..75: mol_type = other DNA
gtggaatataacgccaacagaaataaatatatcaaagttaactgttggttggccgccagaaataaaaaaagcaat

SEQ ID NO: 28160 - DNA, 75 bp, synthetic construct
  source 1..75: mol_type = other DNA
agcattgtcggatttaccactcagatcgcgaacggtctggataaaatttactgggcatcccagcggacgggggcc

SEQ ID NO: 28161 - DNA, 75 bp, synthetic construct
  source 1..75: mol_type = other DNA
tcccggttcccccgaaaaaagacgtccaggtaccggagaaaacaatcacaagcaaaaatccggaagccgcagctg

SEQ ID NO: 28162 - DNA, 75 bp, synthetic construct
  source 1..75: mol_type = other DNA
agcattgtcggatttaccacccagatcgcgaatggtctggataaaatttactgggcatcccagcggacgggggcc

SEQ ID NO: 28163 - DNA, 75 bp, synthetic construct
  source 1..75: mol_type = other DNA
ttgccgacgcgcaccagaagttgcaggaaaaagaggcggtgctggtcgatattcgcgatccacagagtttcgcaa

SEQ ID NO: 28164 - DNA, 75 bp, synthetic construct
  source 1..75: mol_type = other DNA
gaaggtgaggacggttacacaaaaagtgcaaccgtgccgccaggtggcggtacgcctatggttgtcataaccatg

SEQ ID NO: 28165 - DNA, 75 bp, synthetic construct
  source 1..75: mol_type = other DNA
ccttatgtcaaagggaccttcaaggtgccgaagaattttccggtgagcaaaatcacctcgtctgatgagatgacc

SEQ ID NO: 28166 - DNA, 75 bp, synthetic construct
  source 1..75: mol_type = other DNA
gaatccgccagccgaaaccggagcatggaaagacgctgttgactgggtgctcaaagaggcttgccaggctgtaaa

SEQ ID NO: 28167 - DNA, 75 bp, synthetic construct
  source 1..75: mol_type = other DNA
gctttacctgcattccaaaatcctggaggcaacgaaacacgtccccgcaatatcacatttaactttttagtaagg

SEQ ID NO: 28168 - DNA, 75 bp, synthetic construct
  source 1..75: mol_type = other DNA
gtggaggcatccggtgccagcctggagaaggggaggcacgaccagctgcttaccgcgcttcgtgcgctgctgtta

SEQ ID NO: 28169 - DNA, 75 bp, synthetic construct
  source 1..75: mol_type = other DNA
ctatataattctataccgcgtaacaacatcaagcgttgaagtagtaaacgtgatccacgcaagacgccagtttcc

SEQ ID NO: 28170 - DNA, 75 bp, synthetic construct
  source 1..75: mol_type = other DNA
acaaaaccgcgatgcggtgattaccgatattaaacgcatcggggatttacagcgcgaagcatcacgtctggaaac

SEQ ID NO: 28171 - DNA, 75 bp, synthetic construct
  source 1..75: mol_type = other DNA
ccgggaagaattacttgttctctgaagatgccgccgtcaacactgcggtcagaaaaagatgatgttgaatcacgt

SEQ ID NO: 28172 - DNA, 75 bp, synthetic construct
  source 1..75: mol_type = other DNA
gcggtactggacagcgtcgctgggaagggttaccggatgatgtcagggaaactatcactgtgcatttcaccgcaa

SEQ ID NO: 28173 - DNA, 75 bp, synthetic construct
  source 1..75: mol_type = other DNA
gcatcagtttacattgacgatgcagagcgtatggcagaacaacaatctgatatggttaagaaaattgtctttgat

SEQ ID NO: 28174 - DNA, 75 bp, synthetic construct
  source 1..75: mol_type = other DNA
cttcctcaacaggtaccaagcgtgcataccggaaaggtaatcctgttccggccagagagagacaaagagcttctc

SEQ ID NO: 28175 - DNA, 75 bp, synthetic construct
  source 1..75: mol_type = other DNA
cgtagtgttaaacgttatggtgaaattagtgaaaatgtaggtacagaaactcgtcctcgtaacatcgcttttaat

SEQ ID NO: 28176 - DNA, 75 bp, synthetic construct
  source 1..75: mol_type = other DNA
taaaggaagctacatcgtagggcatacatctgttaaccagcacggcaatttaacaggagtttttgtttgccaaaa

SEQ ID NO: 28177 - DNA, 75 bp, synthetic construct
  source 1..75: mol_type = other DNA
tgcgtgctaaggcagaaaaagcaacgtgtggcgagtggtcgctcgaatatggagagggccgatttgatggtgatg

SEQ ID NO: 28178 - DNA, 75 bp, synthetic construct
  source 1..75: mol_type = other DNA
taaggagtggtcaaaacaggatcgtgacacgttcgacccgacatatgatatcgaccttttctgtgatcaggccag

SEQ ID NO: 28179 - DNA, 75 bp, synthetic construct
  source 1..75: mol_type = other DNA
gaaatgtatctggaaatggaacggctgattgccgatgccaaacccgcaagtcgccaccttatcggcctgaacatt

SEQ ID NO: 28180 - DNA, 75 bp, synthetic construct
  source 1..75: mol_type = other DNA
ttcagcagggaaaccgctggcttaactggctggagaagcagccggaaggggcagtacgtccggtggtgattgagt

SEQ ID NO: 28181 - DNA, 75 bp, synthetic construct
  source 1..75: mol_type = other DNA
ttcagcagggaaaccgctggcttaactggctggagaaacaaccggaaggttcagtgcgtccggtggtcattgagt

SEQ ID NO: 28182 - DNA, 75 bp, synthetic construct
  source 1..75: mol_type = other DNA
tacgccagaattcaccagaaaacaaccggtatcagtacctgggattatgagtacggaagcagtggtcgcgaatcg

SEQ ID NO: 28183 - DNA, 75 bp, synthetic construct
  source 1..75: mol_type = other DNA
cagccagcagtttcatgcgttgtgccgaagctgtcggaacgcgcattacagacatcccggtagacctcaacacgc

SEQ ID NO: 28184 - DNA, 75 bp, synthetic construct
  source 1..75: mol_type = other DNA
tgatgaccttaagaatgaggtatcactcaacactctgatgctgaatgcatactatgacttccggaatgacagtgc

SEQ ID NO: 28185 - DNA, 75 bp, synthetic construct
  source 1..75: mol_type = other DNA
attataccgaggctgaatttctggagtttgtaaaaaaaatatgtagagctgaaggtgctactgaagaggatgaca

SEQ ID NO: 28186 - DNA, 75 bp, synthetic construct
  source 1..75: mol_type = other DNA
atcaccccgctggatgcggcggtgccggatcgggcgcaggcgctgatcgaccaaaccagccagttactgccgcgc

SEQ ID NO: 28187 - DNA, 75 bp, synthetic construct
  source 1..75: mol_type = other DNA
aacggggcgttgcgatgacagtctccggctcactggtaaccggtcccggaaccggaagtgctttacttcctgacc

SEQ ID NO: 28188 - DNA, 75 bp, synthetic construct
  source 1..75: mol_type = other DNA
tgtcggaaagagaatcattactggcattaccggacgatgagttaacgctgacccgaatggcctatttcagtgagc

SEQ ID NO: 28189 - DNA, 75 bp, synthetic construct
  source 1..75: mol_type = other DNA
aggcgataagcgccgatcatgatgcacaacagcagcttgacgacgcgctggacattctgatgaacggaggtgtgt

SEQ ID NO: 28190 - DNA, 75 bp, synthetic construct
  source 1..75: mol_type = other DNA
ggtgacggcggccatcgtgctgtggaacacggtctacctggagcgtgcggcgcatgcgttgcgcggcaatggtca

SEQ ID NO: 28191 - DNA, 75 bp, synthetic construct
  source 1..75: mol_type = other DNA
cagggcaggtgggttgggaactgcagcgtgctctggctcctctgggtaacttgattgcgctcgatgttcactcca

SEQ ID NO: 28192 - DNA, 75 bp, synthetic construct
  source 1..75: mol_type = other DNA
ttgactaagagggttcaccgggtcttccctgatgctgatgtccgggtaaaaccgatgatgacactgccggcgatc

SEQ ID NO: 28193 - DNA, 75 bp, synthetic construct
  source 1..75: mol_type = other DNA
gcggatatcatcatcgcttctacgcacattgcgggcgaaatcaccgtgaccggcaacaaatacgtggttggcgtg

SEQ ID NO: 28194 - DNA, 75 bp, synthetic construct
  source 1..75: mol_type = other DNA
gagtaccacatgggaaacccggacgctggagtatgaaatgagtcagctacctgcacgtgaagtgaatggtcagta

SEQ ID NO: 28195 - DNA, 75 bp, synthetic construct
  source 1..75: mol_type = other DNA
ttgatggcggcaccggaacccgcattacgggtgatgatgcgacggccaacaacagtggcaataccaccgttgacg

SEQ ID NO: 28196 - DNA, 75 bp, synthetic construct
  source 1..75: mol_type = other DNA
atgaaacgtattttacttctgatactgcccctggttgcctgcatggcacaggctgacaggaacagtgattaccgg

SEQ ID NO: 28197 - DNA, 75 bp, synthetic construct
  source 1..75: mol_type = other DNA
gctattactacaacatcaccacgttctgtccggacacggatgaggacgcgctggtctgcgagcagcaggtcatta

SEQ ID NO: 28198 - DNA, 75 bp, synthetic construct
  source 1..75: mol_type = other DNA
ctgttggggtgcctgttccgtggccttcagccactccgccaacaggctggttgaaatgcaatggtgcggcttttt

SEQ ID NO: 28199 - DNA, 75 bp, synthetic construct
  source 1..75: mol_type = other DNA
tgaaggtgtacgtagatgacctgatggcaaaacatcttgctgcacaggacccacattcacagtacgcgccaaaag

SEQ ID NO: 28200 - DNA, 75 bp, synthetic construct
  source 1..75: mol_type = other DNA
tatgtggatgacaaagcactggagttgaaggtgtacgtggatgacctgatggcaaaacatcttgccgcaccggac

SEQ ID NO: 28201 - DNA, 75 bp, synthetic construct
  source 1..75: mol_type = other DNA
ttcattcacgaggaagtattggtaacacaggtggtagtgaaacccgcccccgcaatattgcatttaactatatcg

SEQ ID NO: 28202 - DNA, 75 bp, synthetic construct
  source 1..75: mol_type = other DNA
tgttaaacgttatggtgaaattagtgaaaatgtaggtacagaaactcgtcctcgtaacatcgcttttaattatat

SEQ ID NO: 28203 - DNA, 75 bp, synthetic construct
  source 1..75: mol_type = other DNA
atgagtaataacccacttgaggccgtcactcaggcggttaactctctcgtcacagcactgaagctgcctgacgag

SEQ ID NO: 28204 - DNA, 75 bp, synthetic construct
  source 1..75: mol_type = other DNA
cggtattccgttgtgtatccatctgatgtccagtcagctggttggtgacaggattgaatacgggctgcgtgagtt

SEQ ID NO: 28205 - DNA, 75 bp, synthetic construct
  source 1..75: mol_type = other DNA
ctgctgacgccgtcctaccgtaatcagctggcgttccttgatatctacggggacgggatgggcaacaccaactac

SEQ ID NO: 28206 - DNA, 75 bp, synthetic construct
  source 1..75: mol_type = other DNA
atctacgccgcaggcgactgcaccgaccagccgcagttcgtctatgtggcggcagcggccggcactcgcgccgcg

SEQ ID NO: 28207 - DNA, 75 bp, synthetic construct
  source 1..75: mol_type = other DNA
ggcaccgtctgtttgtggacccgttaagccgcgccatgtacagctctgacggcccggattttgagtttgtgcagc

SEQ ID NO: 28208 - DNA, 75 bp, synthetic construct
  source 1..75: mol_type = other DNA
atgagtaataacccacttgaggccgtcactcaggcggtgaactcccttgtcaccgcactgaaactgcctgatgaa

SEQ ID NO: 28209 - DNA, 75 bp, synthetic construct
  source 1..75: mol_type = other DNA
gcgttgtccgccattgctgccgcactgcatgtgcacggtgtgcaacgcgtggagataatcgaacccacacagaat

SEQ ID NO: 28210 - DNA, 75 bp, synthetic construct
  source 1..75: mol_type = other DNA
tcagaaccactgaacatcatcgctcaggctatggcatggcgggagctgttactgcggcagcgaatcaatgatggc

SEQ ID NO: 28211 - DNA, 75 bp, synthetic construct
  source 1..75: mol_type = other DNA
ttttataacagtaagcgtcggcatggttctagcgaacagatgtcaccgacagaatatgaaaaccagtattatcaa

SEQ ID NO: 28212 - DNA, 75 bp, synthetic construct
  source 1..75: mol_type = other DNA
ggaaattaaaagcctgccgaatatctgccagatacctttttgcccgcgccttttttaagaacgtcaggccgggga

SEQ ID NO: 28213 - DNA, 75 bp, synthetic construct
  source 1..75: mol_type = other DNA
aatcatttaagtcaggtaatggcagatttctggtgatcaggtctgagcagttaaaagattatgaatttaatatgg

SEQ ID NO: 28214 - DNA, 75 bp, synthetic construct
  source 1..75: mol_type = other DNA
agatgagcagcgttctaccaggaaaaaaaccttgtcaaggcaaaaacaatgagtcacaggtagtacagactactc

SEQ ID NO: 28215 - DNA, 75 bp, synthetic construct
  source 1..75: mol_type = other DNA
tgaagcgtatggcaagtctgatcgagtacacaacagcctgggctattggtcagggtgtcagatttaccgacagga

SEQ ID NO: 28216 - DNA, 75 bp, synthetic construct
  source 1..75: mol_type = other DNA
caccggaacatatcataaaagactctacagcattgtggaatgaagttgaacgggtcgagcgtcagcaaaatggtc

SEQ ID NO: 28217 - DNA, 75 bp, synthetic construct
  source 1..75: mol_type = other DNA
ttagcccaaaacagtctgataggaaactagactatataccaacactagtagcagacagaaaaaagccaataccta

SEQ ID NO: 28218 - DNA, 75 bp, synthetic construct
  source 1..75: mol_type = other DNA
ctatgtctttgatgaagtgctgggtgtctatattccacgctctacacatgaaagacgagtcagatttaacagtga

SEQ ID NO: 28219 - DNA, 75 bp, synthetic construct
  source 1..75: mol_type = other DNA
tccatctggatgtgaggcggaataatcgccggaattcagcaaggggcttcgaagaggctttaaaggggcttctaa

SEQ ID NO: 28220 - DNA, 75 bp, synthetic construct
  source 1..75: mol_type = other DNA
tggtgtggagcagcatgataatttcctgaatcagacgtttgaaaataccgataaacacatcacgatagtttctcc

SEQ ID NO: 28221 - DNA, 75 bp, synthetic construct
  source 1..75: mol_type = other DNA
cggatgaagaacgggaagcacgatatgccgccttgcagcaggagtggcgtcaatatctgtatgactcagagaggc

SEQ ID NO: 28222 - DNA, 75 bp, synthetic construct
  source 1..75: mol_type = other DNA
cttagacagtgcacgcattgataacgagcatgccgcacaggagtatacgcgcacagtttacagcgtcaatgtgcc

SEQ ID NO: 28223 - DNA, 75 bp, synthetic construct
  source 1..75: mol_type = other DNA
ggaagtcggatacagtcgcacacgtttatttgtgagaacgtaacactgggggagaactgcttcattggtcataac

SEQ ID NO: 28224 - DNA, 75 bp, synthetic construct
  source 1..75: mol_type = other DNA
ggtagtgtggttacaaagcccgtgctggtaaaaggcgtgtatgccggtaatccagccagacttttgagaacactt

SEQ ID NO: 28225 - DNA, 75 bp, synthetic construct
  source 1..75: mol_type = other DNA
tggcaaaatacctctttgagtcagagaagaatgcgctctcttttgattataaagagcgtaaggatttaaaaactt

SEQ ID NO: 28226 - DNA, 75 bp, synthetic construct
  source 1..75: mol_type = other DNA
ttacactcaggatattacattttattcatctctgaattatacaggaaaacaaatctgggcagcacaaagaaatgg

SEQ ID NO: 28227 - DNA, 75 bp, synthetic construct
  source 1..75: mol_type = other DNA
aaaagccggtctggtggagctggtggaaattaaccatgttcatcgccgcgcagaatttcagataattatctcccc

SEQ ID NO: 28228 - DNA, 75 bp, synthetic construct
  source 1..75: mol_type = other DNA
gtgtgctattcgctatatggaaatccatgactatctaggccacggttttcgtgttttgtcgcacccagacaaccc

SEQ ID NO: 28229 - DNA, 75 bp, synthetic construct
  source 1..75: mol_type = other DNA
cgatatggacctgtttgaggtccagccagcctcatctccacggggattactggcaaaatacctctttgagtcaga

SEQ ID NO: 28230 - DNA, 75 bp, synthetic construct
  source 1..75: mol_type = other DNA
ccagcaaaatattgaagcgcattacggcaaatcgcttcatgaagttgtcggtatcgtgacgccttttagcgcgca

SEQ ID NO: 28231 - DNA, 75 bp, synthetic construct
  source 1..75: mol_type = other DNA
gaccatcagccaggccgtccgtggcggaaaattacccgcaggctggtatcaggtcccggtgacaaaggaaaccct

SEQ ID NO: 28232 - DNA, 75 bp, synthetic construct
  source 1..75: mol_type = other DNA
tccggggagcatgggaggacagagcgaatgcgcaacttgggctttcagccgccacgttgcaggccgatcttgaaa

SEQ ID NO: 28233 - DNA, 75 bp, synthetic construct
  source 1..75: mol_type = other DNA
accttcggtggaaactccatcggaaggttcaaaattttttggttttgatatggataacgaattcatcagtggttt

SEQ ID NO: 28234 - DNA, 75 bp, synthetic construct
  source 1..75: mol_type = other DNA
ttaatgatcaccgagggaattaattacagcataacgattaatgatacacgtacaggtaaccagtatcagcggaaa

SEQ ID NO: 28235 - DNA, 75 bp, synthetic construct
  source 1..75: mol_type = other DNA
caaaatggcgatttgagaaggacaagccgcgtaaaggcgtgaagaaaacatttatctttagtccttcagcaccct

SEQ ID NO: 28236 - DNA, 75 bp, synthetic construct
  source 1..75: mol_type = other DNA
gtgaggttcaaaatttccctgaccacacgcctgagcctgattttttctgcggtgatgcttacggtatggtggtta

SEQ ID NO: 28237 - DNA, 75 bp, synthetic construct
  source 1..75: mol_type = other DNA
gggacgcctgccgtatggcccggataccgtacctgtccgcagctttaactatgttgaagaggtgaaaggaccgga

SEQ ID NO: 28238 - DNA, 75 bp, synthetic construct
  source 1..75: mol_type = other DNA
tcggtgcgctgaacggcatgctcagaatggaatgcaaccgtcgtgaaaatgcagatattgacgctcaggaatcgg

SEQ ID NO: 28239 - DNA, 75 bp, synthetic construct
  source 1..75: mol_type = other DNA
cccgtcgcctgaaagaaaacatgggaacactggagacctgggcggataaaacagggaaggcattcaaatcgatgt

SEQ ID NO: 28240 - DNA, 75 bp, synthetic construct
  source 1..75: mol_type = other DNA
gaagaagacagccggagggcggaatacggcacgctacctgggtcgttatctgaagaagccaccaatagcggcttc

SEQ ID NO: 28241 - DNA, 75 bp, synthetic construct
  source 1..75: mol_type = other DNA
cagcctgaaaaaccggcgcaaccagcagcagacagcgccccccatatgcagcaggtgaaaaagaatattcaggcg

SEQ ID NO: 28242 - DNA, 75 bp, synthetic construct
  source 1..75: mol_type = other DNA
cggcttatgctgcaatggtgggcagattttctggatgcaaacagggaggagtgtatcagtccgtttgaatatgca

SEQ ID NO: 28243 - DNA, 75 bp, synthetic construct
  source 1..75: mol_type = other DNA
tggtgaatcgtattttgtccaacaaccacagccatcgtcgcgatatggatgtaacaatcgttgttcattcgcctg

SEQ ID NO: 28244 - DNA, 75 bp, synthetic construct
  source 1..75: mol_type = other DNA
cactcttcggtccaaaatggagtcttgggtacagcggttccacgatgcactatacagatgcaccggatgctcaga

SEQ ID NO: 28245 - DNA, 75 bp, synthetic construct
  source 1..75: mol_type = other DNA
gattctttccagctatcttctggttatacttctattaatggtaaacgctacgtattcaactggaattacgacaaa

SEQ ID NO: 28246 - DNA, 75 bp, synthetic construct
  source 1..75: mol_type = other DNA
gggaacattctttttagctgcgatgcagataatggctgggtaaggagctgtaaaaaatacttcattcgttttcgt

SEQ ID NO: 28247 - DNA, 75 bp, synthetic construct
  source 1..75: mol_type = other DNA
tataggctggattttcagtagcaaggcagacagcaatgaacagcgtattatgtatattttgcttacagcacatat

SEQ ID NO: 28248 - DNA, 75 bp, synthetic construct
  source 1..75: mol_type = other DNA
caaatgcaatagccggtgcggcgaacgcacttaccggtatgtccggcagcagtggacatgctgaaggtaccacgt

SEQ ID NO: 28249 - DNA, 75 bp, synthetic construct
  source 1..75: mol_type = other DNA
tttttggtttatccggtgatctgactgaaaaggacatcaaggcggcatacaaaaaagcggctttaaaatatcatc

SEQ ID NO: 28250 - DNA, 75 bp, synthetic construct
  source 1..75: mol_type = other DNA
agtggagggggtagatgttgaaagtggtacgggtaaaaccggtgggctggaagtcagcattcgtggaatgccagc

SEQ ID NO: 28251 - DNA, 75 bp, synthetic construct
  source 1..75: mol_type = other DNA
ccataaatgataacaccaatagctatgtaaacagcggaaaggcccggttgcacggtgtggaatttgccggcacat

SEQ ID NO: 28252 - DNA, 75 bp, synthetic construct
  source 1..75: mol_type = other DNA
gccaaccatgaaaaaagcagtatgtcccgtgtttacagttgggggtatgagcgagggtacgtgaaggctaaccca

SEQ ID NO: 28253 - DNA, 75 bp, synthetic construct
  source 1..75: mol_type = other DNA
cgaaacgggccgggtgaaggaagccgggtgcctggcccacgcccgccgaaaaatccatgacgaggatgtgcgccg

SEQ ID NO: 28254 - DNA, 75 bp, synthetic construct
  source 1..75: mol_type = other DNA
cggtgtgaagcggggcgaggaactggcggaagccagcggtgatttatggcgtgacgcccgctgggccatcagccg

SEQ ID NO: 28255 - DNA, 75 bp, synthetic construct
  source 1..75: mol_type = other DNA
cgatggaatggaaactggcgctgccgctgcatccggaatatcgcacactgccgatggtctggtacgtgccgcctc

SEQ ID NO: 28256 - DNA, 75 bp, synthetic construct
  source 1..75: mol_type = other DNA
ccggatgtgcgcttattgatgccctgccaggtatagcggttaatcctgatatgacagcattatggtctgaaaaac

SEQ ID NO: 28257 - DNA, 75 bp, synthetic construct
  source 1..75: mol_type = other DNA
atgagactttttatcgcagaaaaacccgcagtagcaaatgatattgttaaggcacttggtggcaattttacccgc

SEQ ID NO: 28258 - DNA, 75 bp, synthetic construct
  source 1..75: mol_type = other DNA
cagcatcaggttacggggtcacttacgtaaggagcaggcagatggcagctcagttacagagtgcacagcaggaat

SEQ ID NO: 28259 - DNA, 75 bp, synthetic construct
  source 1..75: mol_type = other DNA
tatttcagacgctggcggaacaggccaggggagcacaaaaggacgcaatgaattcctggagtggcctgacggcca

SEQ ID NO: 28260 - DNA, 75 bp, synthetic construct
  source 1..75: mol_type = other DNA
ctcaggtttacagcggctatggcgaatcgctcatcgactataacttcaaccagacccgtgtcggtgtgggggtta

SEQ ID NO: 28261 - DNA, 75 bp, synthetic construct
  source 1..75: mol_type = other DNA
acataatacgtatgcgcgacctctgacgatgtccgagatggtggtgatgtttggatacgtgtaccgggagtcaaa

SEQ ID NO: 28262 - DNA, 75 bp, synthetic construct
  source 1..75: mol_type = other DNA
ccaccgtgttgaccaggttcagcgggcgcagttacatcttgagcagatattctcatggtggagcgccgggcgata

SEQ ID NO: 28263 - DNA, 75 bp, synthetic construct
  source 1..75: mol_type = other DNA
ccgcagtagcaaatgatattgttaaggcattaggtggaaattttacacgtcatgatggctggtttgaaagtgata

SEQ ID NO: 28264 - DNA, 75 bp, synthetic construct
  source 1..75: mol_type = other DNA
tatttatactatagatataaatcgttataatctctctgcaatagtctcagtaataggtctgttcaaaaaagagtc

SEQ ID NO: 28265 - DNA, 75 bp, synthetic construct
  source 1..75: mol_type = other DNA
gacccggagcaggagctgagtgaccgctgggtggtggagcagatgtcgcagctgacagccatgacggcctcgttt

SEQ ID NO: 28266 - DNA, 75 bp, synthetic construct
  source 1..75: mol_type = other DNA
tgaatgagtgtacaaaagcggagcaatccgcactggtcgtgctctgggaagtcgatctgaccgaagtcggtggcg

SEQ ID NO: 28267 - DNA, 75 bp, synthetic construct
  source 1..75: mol_type = other DNA
agctatctataacaaagccgagtatcgggagcagcgcacagccatgttacaggactgggctgacatgattgatga

SEQ ID NO: 28268 - DNA, 75 bp, synthetic construct
  source 1..75: mol_type = other DNA
acggggcgctgtttcccggtcgtatcatgctggcgaacacctgtatgtggacctaccgctctgatgagtgtggtt

SEQ ID NO: 28269 - DNA, 75 bp, synthetic construct
  source 1..75: mol_type = other DNA
caggcagtccggcaccaaaaagtgctgccgctgctggcgtcactggaggggtggctgcgggagaaacagaaaacc

SEQ ID NO: 28270 - DNA, 75 bp, synthetic construct
  source 1..75: mol_type = other DNA
cgcagacccatcttgcggggttcagtggtgtactgcaggcggatgcatacgccgggttcaacgagctgtaccggg

SEQ ID NO: 28271 - DNA, 75 bp, synthetic construct
  source 1..75: mol_type = other DNA
aggaaataacggaatcaatgattgtaaaacctgaagaatgtacttatgaccatgtcaggaaaaattttgttataa

SEQ ID NO: 28272 - DNA, 75 bp, synthetic construct
  source 1..75: mol_type = other DNA
agctaccttcgccatgtgcctggcgtcatagcagactggccggtcaaccgggtcagcgaactgcttccgtggcgc

SEQ ID NO: 28273 - DNA, 75 bp, synthetic construct
  source 1..75: mol_type = other DNA
gatggtcagtctgggccgcaaaaactcttatgacctttgtcaaatattaagcccaaaaagacctacgcagctccg

SEQ ID NO: 28274 - DNA, 75 bp, synthetic construct
  source 1..75: mol_type = other DNA
gcacttaaccagtggccggcactgacgtactatgcgaacgatggctgggtggaaatcgacaacaacatcgctgaa

SEQ ID NO: 28275 - DNA, 75 bp, synthetic construct
  source 1..75: mol_type = other DNA
gggcgaaaactgatgatgtccgcaggtgggcaatacagaatgcgaaggaaaccacctgggggctggctggcgtca

SEQ ID NO: 28276 - DNA, 75 bp, synthetic construct
  source 1..75: mol_type = other DNA
atgaacccttatatttatcttggtggcgcaatacttgcagaggtcattggtacaaccttaatgaagttttcagag

SEQ ID NO: 28277 - DNA, 75 bp, synthetic construct
  source 1..75: mol_type = other DNA
acctgccagctatcataggcatgatgttgatttgtgccggtgtgttagtcattaacttgttgtcacgaagtgcac

SEQ ID NO: 28278 - DNA, 75 bp, synthetic construct
  source 1..75: mol_type = other DNA
tgtgctgttgtgcaatgagatgccggaacttgccccggtgattactgataccgggcgtaaaacctgggtgaagtc

SEQ ID NO: 28279 - DNA, 75 bp, synthetic construct
  source 1..75: mol_type = other DNA
gattgcgccagaatccgggcagatttccccggtcgtcgcacactctgggccagaagaaacaacatcgtcacactc

SEQ ID NO: 28280 - DNA, 75 bp, synthetic construct
  source 1..75: mol_type = other DNA
atgaaattaagcgaaaagattaaggccttgcgtgaggctgaagggctaagccaatcaaaattctgtgaaatcata

SEQ ID NO: 28281 - DNA, 75 bp, synthetic construct
  source 1..75: mol_type = other DNA
atatctgaacctgagcagttgtcagcccggaaaacatcagtacaaaaatgctcgtcaggaacatacctgcctgcc

SEQ ID NO: 28282 - DNA, 75 bp, synthetic construct
  source 1..75: mol_type = other DNA
cgcgtcgtgagcggtgcttacggaaaagcagcaagcgcgctgcatcgggtgaagagtggtatctgtcagggaatt

SEQ ID NO: 28283 - DNA, 75 bp, synthetic construct
  source 1..75: mol_type = other DNA
aagacctggcatccatcttgtggagcagcggcgttacgtgccgaattgattgccggatttgcgcatactgaatgg

SEQ ID NO: 28284 - DNA, 75 bp, synthetic construct
  source 1..75: mol_type = other DNA
cgggctggtattgattgggaagataatgatgcgcatacggcaagtagtaatactcagtcgagccataatgctcgt

SEQ ID NO: 28285 - DNA, 75 bp, synthetic construct
  source 1..75: mol_type = other DNA
tataacggtgggttgacaccggaagagtccgggaacaggtaccatttttactgtaaaaccgtggccagtattact

SEQ ID NO: 28286 - DNA, 75 bp, synthetic construct
  source 1..75: mol_type = other DNA
ccggaaatcgccaatcttttccaggattatgtgcagaactgcgtgatgggggatatttacctgaaccacaaatac

SEQ ID NO: 28287 - DNA, 75 bp, synthetic construct
  source 1..75: mol_type = other DNA
cgctggtacgccagcgagcgcagcagagcatcagtccacactaagcgccgggtatcttcagacccatactgatat

SEQ ID NO: 28288 - DNA, 75 bp, synthetic construct
  source 1..75: mol_type = other DNA
acagaacgccccgagtcacagccagtaccaaccgcacagataaccagtcagatggccggaaatatcagggcgtta

SEQ ID NO: 28289 - DNA, 75 bp, synthetic construct
  source 1..75: mol_type = other DNA
ggcctggcacaggaaaaaaccacctggcggcggctattggcaaccaccttctggcgaaaggtcgcagtgtgattg

SEQ ID NO: 28290 - DNA, 75 bp, synthetic construct
  source 1..75: mol_type = other DNA
atagatctttgcaggtctcgtggtatctatgctgagcgggaaggtaatgggttgcttgtgagagtagatctgaga

SEQ ID NO: 28291 - DNA, 75 bp, synthetic construct
  source 1..75: mol_type = other DNA
aattacgagagcgagcttttagatggtggcaaagtgagcgaatccatcaggtcaaaatgcgctgctccatcaggt

SEQ ID NO: 28292 - DNA, 75 bp, synthetic construct
  source 1..75: mol_type = other DNA
ccgaagtccgtcaacgggcagttcgtatggttgtggaaagtcagggcgaatatgactcacaatgggcggcaattt

SEQ ID NO: 28293 - DNA, 75 bp, synthetic construct
  source 1..75: mol_type = other DNA
aagaagcgctggattacaccctcagaattgtgagaaacggaaaaaaacttgaagccggaaattattttgctgtgc

SEQ ID NO: 28294 - DNA, 75 bp, synthetic construct
  source 1..75: mol_type = other DNA
gaacatcagtccacgctgagcgcgggctatcttcatgcctcgacgaacgtttccggcagcgatgatctgaacggg

SEQ ID NO: 28295 - DNA, 75 bp, synthetic construct
  source 1..75: mol_type = other DNA
cccgaccgaatccgtggccgttgatgtcgcttatgaaggctccggcagtggtgactggcgcactgacgggttcat

SEQ ID NO: 28296 - DNA, 75 bp, synthetic construct
  source 1..75: mol_type = other DNA
atactcgctggcatgaagattccgttcgtaaccgctggttcagcgtaatggcggggccgtctgtgcgcgtgaatg

SEQ ID NO: 28297 - DNA, 75 bp, synthetic construct
  source 1..75: mol_type = other DNA
ttttcttttttggctgtgtgtttgttcatggtgtttttgccggtccgtttcctccgcccggcatgtcccttcctg

SEQ ID NO: 28298 - DNA, 75 bp, synthetic construct
  source 1..75: mol_type = other DNA
gttaatctgggttctacatttgctgatgatcaagatgctttattgatcgtcaaaaaagagggctattctaatctg

SEQ ID NO: 28299 - DNA, 75 bp, synthetic construct
  source 1..75: mol_type = other DNA
ctgggaaaagcagggctactttaagcctaatggcgatgaaagccaggaaagtttctgcatcatgatcccgccgcc

SEQ ID NO: 28300 - DNA, 75 bp, synthetic construct
  source 1..75: mol_type = other DNA
agtcgcgtaatcaataaatccgtattcctcgcactgggtatcaatatcgaaggccagaaagagttactgggtatg

SEQ ID NO: 28301 - DNA, 75 bp, synthetic construct
  source 1..75: mol_type = other DNA
tttaccgcgatgacgtataccagaagcaaaacgtttaaaactgaagctggcgcgcgtcgctggttaaccagaaac

SEQ ID NO: 28302 - DNA, 75 bp, synthetic construct
  source 1..75: mol_type = other DNA
acgggtccggttatgggacgatcgtctgagctgttacgttggcagcagcgaggtcatgagctgcccacgtgtcag

SEQ ID NO: 28303 - DNA, 75 bp, synthetic construct
  source 1..75: mol_type = other DNA
ttcccggcgagtctggctaaccgtgaccagaacgaactgaacgaaatccgccgccagtgggttctggctttccgg

SEQ ID NO: 28304 - DNA, 75 bp, synthetic construct
  source 1..75: mol_type = other DNA
acgaatctctggtgtacggcgtgtttcccaaccaggacggtacattcaccgcgatgacgtataccaaaagcaaaa

SEQ ID NO: 28305 - DNA, 75 bp, synthetic construct
  source 1..75: mol_type = other DNA
ctgcaaaccccgcacatgaaagcatatagcgaagccgtaaaaggtgacgtgctggagatgaatattcgtatcctg

SEQ ID NO: 28306 - DNA, 75 bp, synthetic construct
  source 1..75: mol_type = other DNA
agaatggccatggaggagatcgatgccagaacccgggaattactgacgggggtctgcacctcactggaagaggag

SEQ ID NO: 28307 - DNA, 75 bp, synthetic construct
  source 1..75: mol_type = other DNA
atggctaatgcctggctcagattgtggcatgacatgccaaatgatcccaaatggcgaaccattgccagggtctca

SEQ ID NO: 28308 - DNA, 75 bp, synthetic construct
  source 1..75: mol_type = other DNA
gcgaatctctggtatgtggcgtgttccccaaccaggacggtacgttcaccgcgatgacatataccaaaagcaaaa

SEQ ID NO: 28309 - DNA, 75 bp, synthetic construct
  source 1..75: mol_type = other DNA
accgcgatgacgtataccagaagcaaaacgtttaaaacggaagctggcgcgcgtcgctggttagcaagaaactct

SEQ ID NO: 28310 - DNA, 75 bp, synthetic construct
  source 1..75: mol_type = other DNA
gaggaaaagcgcgtaaaccgtcttgtaacagtccctgcggtgctgctggaaaaagtgatggtgatggctggtagt

SEQ ID NO: 28311 - DNA, 75 bp, synthetic construct
  source 1..75: mol_type = other DNA
aacggcgcacatgccggatacatcatgtacgtcactgatgccgtgcaggatcgcaacgatatcgaaatgcttcgc

SEQ ID NO: 28312 - DNA, 75 bp, synthetic construct
  source 1..75: mol_type = other DNA
taatatcaaaaaagccagcgccgctgacctgctggacgcgcaccgcatcccctttcagttgatgggcggcaagcc

SEQ ID NO: 28313 - DNA, 75 bp, synthetic construct
  source 1..75: mol_type = other DNA
ttgacggactggcgcgaaccttccgcgctgccgtgcatcacagttcaccaattgcggtgaaatgcaacattctga

SEQ ID NO: 28314 - DNA, 75 bp, synthetic construct
  source 1..75: mol_type = other DNA
attgcaaaagaattttgaatcactgaataactgggctggaaaagaaattatttcatttaatgactactgttttta

SEQ ID NO: 28315 - DNA, 75 bp, synthetic construct
  source 1..75: mol_type = other DNA
ctatgtggaatgcgtacagacagatcgctggtatgagccgccagtgagttttgacggactggcgcgaaccttccg

SEQ ID NO: 28316 - DNA, 75 bp, synthetic construct
  source 1..75: mol_type = other DNA
tatcaaccaggagatttatggtctgccgggttacctttctgccattccgtcagctctgctcaacgaatccgccac

SEQ ID NO: 28317 - DNA, 75 bp, synthetic construct
  source 1..75: mol_type = other DNA
ggtcaggccatgaaggaagtatgacctccattcatgctggttcagcccatgaagcaatcgacggttttattaccc

SEQ ID NO: 28318 - DNA, 75 bp, synthetic construct
  source 1..75: mol_type = other DNA
gtttccgatattgtcaatgaactgatggaggaaaagcgcgtaaaccgccttgtaacagtccctgcggtgctgctg

SEQ ID NO: 28319 - DNA, 75 bp, synthetic construct
  source 1..75: mol_type = other DNA
atgggcaaaggtggtggcaaggcgcacacgccggttgaggcaaaggacaatcttaagtccacgcagatgatgagc

SEQ ID NO: 28320 - DNA, 75 bp, synthetic construct
  source 1..75: mol_type = other DNA
cctatattccacatcgccttctcagccagcaggcatttacccgttttgtgcaggactatctggtttttggtaacg

SEQ ID NO: 28321 - DNA, 75 bp, synthetic construct
  source 1..75: mol_type = other DNA
ccacaacgaccgttagcgcaccgcaaaaaatggaggcgttcacctttggcgagccctctgccgttctggatcgtc

SEQ ID NO: 28322 - DNA, 75 bp, synthetic construct
  source 1..75: mol_type = other DNA
ggggggaaaaccgctctgaacaggcccggaaacacgcacaacaaacttttggtgacgccatcgggaaaagctttg

SEQ ID NO: 28323 - DNA, 75 bp, synthetic construct
  source 1..75: mol_type = other DNA
aaatgtggtggacagagtcattgaaggggcttacgaggtagtgggcgtgtttgaccggattgaggaaaagcgtga

SEQ ID NO: 28324 - DNA, 75 bp, synthetic construct
  source 1..75: mol_type = other DNA
gagtgcttatcagaccatccaggaaaatatgctgaaaggcgggatttccggtcgcagtgccagaggaaaacgtat

SEQ ID NO: 28325 - DNA, 75 bp, synthetic construct
  source 1..75: mol_type = other DNA
ggattaatcagatacgccgggaccgcccactgacccaagaagaattaatgcaggtcgtccccagcgtattcgggg

SEQ ID NO: 28326 - DNA, 75 bp, synthetic construct
  source 1..75: mol_type = other DNA
tgacgaacatcagcccgtcaccactgctgacattctgacaccacgacgcagggaggattacggtaaggacctgtg

SEQ ID NO: 28327 - DNA, 75 bp, synthetic construct
  source 1..75: mol_type = other DNA
cgtcaccaccgccgacattctgacgccgcgacgccgggaggattacggtaaggacctgtggagcgcatatcagac

SEQ ID NO: 28328 - DNA, 75 bp, synthetic construct
  source 1..75: mol_type = other DNA
aaggctttcagccgttcttcgcctgccagacccgtgtgcgcgaccagagccgccgggaatataccaaacacatgc

SEQ ID NO: 28329 - DNA, 75 bp, synthetic construct
  source 1..75: mol_type = other DNA
cggggaaaagccggctcatgtttgactcacgggaacaggcgcaggaagtgcaggaaggttttcggtttttaacct

SEQ ID NO: 28330 - DNA, 75 bp, synthetic construct
  source 1..75: mol_type = other DNA
ttaaagaaattgtaaaactcaccactactgctttttctggtgaaaatttgccgcttacggaatgccctgttgcgt

SEQ ID NO: 28331 - DNA, 75 bp, synthetic construct
  source 1..75: mol_type = other DNA
gagtatggcagcgagtttggcggctttttccccgtccaggtgcgtttcagcccgttccatgagcgttttcatatt

SEQ ID NO: 28332 - DNA, 75 bp, synthetic construct
  source 1..75: mol_type = other DNA
aaatgtggtggacagagtcattgaaagggcttacgaggtggtgggcgtttttgaccggatagaggagaagcgtga

SEQ ID NO: 28333 - DNA, 75 bp, synthetic construct
  source 1..75: mol_type = other DNA
cttcccgaagtaccgcatttctggctatggagaaaatacgtcaggctggcggaaacatcagttttgatcccaata

SEQ ID NO: 28334 - DNA, 75 bp, synthetic construct
  source 1..75: mol_type = other DNA
ctttcatgggggaaatctacggtaacccgcaggccacccagaaaatgctggatgatgcctttttcaacgtggagg

SEQ ID NO: 28335 - DNA, 75 bp, synthetic construct
  source 1..75: mol_type = other DNA
aatcaacgatggtgctctgacgggttcgagttccgctgtgataacggagaaaaactgcgagtcacgttcgcgctg

SEQ ID NO: 28336 - DNA, 75 bp, synthetic construct
  source 1..75: mol_type = other DNA
cgtatggtgaatcactacaaaaaaggcgttgaggtatcctctgaacagctacgagctggttgctgtttcggcaca

SEQ ID NO: 28337 - DNA, 75 bp, synthetic construct
  source 1..75: mol_type = other DNA
cactgacgacacttacttctgcgccaccaacgtggtgcaggtgaatcttatcagacaggtacaggagtcacgcag

SEQ ID NO: 28338 - DNA, 75 bp, synthetic construct
  source 1..75: mol_type = other DNA
atgccattcagcaattcttccctctccgcgcaagtgaaatcatatctgacgtttcttcctgaagaaatacgccag

SEQ ID NO: 28339 - DNA, 75 bp, synthetic construct
  source 1..75: mol_type = other DNA
cactgacggtacttacttctgcgccactaatgtggcgcgggtgaatcttatccgacaggtacaggatccacgcaa

SEQ ID NO: 28340 - DNA, 75 bp, synthetic construct
  source 1..75: mol_type = other DNA
cgtaaaggtaactgttacgacaacgctccgatggaaagcttctggggaacgctgaaaaatgagagcctgagccac

SEQ ID NO: 28341 - DNA, 75 bp, synthetic construct
  source 1..75: mol_type = other DNA
cgatacaaaaacattactaggacataaagtccaggcaaccaccgatcgctataacgatactcgaggtcaggaatg

SEQ ID NO: 28342 - DNA, 75 bp, synthetic construct
  source 1..75: mol_type = other DNA
agcagcagattcagggcggtaaagagctgaaagacgcactggctcagttaatccccggccttgatgtcagcagcc

SEQ ID NO: 28343 - DNA, 75 bp, synthetic construct
  source 1..75: mol_type = other DNA
gaccggcgtggcgggcccgctgctgtttgcttttattttcagtcagacacagcagagtgcggacggtacggtgtg

SEQ ID NO: 28344 - DNA, 75 bp, synthetic construct
  source 1..75: mol_type = other DNA
ttatggcgctcaggagccagcgcccacctgccgggctaatccaccactctgatcgaggttcacagtactgcgcat

SEQ ID NO: 28345 - DNA, 75 bp, synthetic construct
  source 1..75: mol_type = other DNA
caagactggaccgcttgcctttggcccggtttcattatcgtatatttggtataataagctttagtctgttattaa

SEQ ID NO: 28346 - DNA, 75 bp, synthetic construct
  source 1..75: mol_type = other DNA
gctacatttctgaaaacgcccgcatgaacttcatgcctgcggcatttcgtggcgctttcttcagcgcagatcact

SEQ ID NO: 28347 - DNA, 75 bp, synthetic construct
  source 1..75: mol_type = other DNA
cttcaggataaaaatgaggaagtccgtattgaagcaataatcggactttcctacagaaaagataaaagggtttta

SEQ ID NO: 28348 - DNA, 75 bp, synthetic construct
  source 1..75: mol_type = other DNA
ttttctgccaccacgatgctgttttcactgggtgccagtatgattctgggtggtgtggcccagatgctggcaccg

SEQ ID NO: 28349 - DNA, 75 bp, synthetic construct
  source 1..75: mol_type = other DNA
atatcgtctaatctgaacagattcagtcggggactgggatatgcaggaaaatttacaagtcttgctgactggatc

SEQ ID NO: 28350 - DNA, 75 bp, synthetic construct
  source 1..75: mol_type = other DNA
atgagtaatttaactaattgtaatacaacagaaaataccgctacggcgggggctaccaagtcagttattggtcgc

SEQ ID NO: 28351 - DNA, 75 bp, synthetic construct
  source 1..75: mol_type = other DNA
gtgaacacggcagcggaagccatccgtgccctgtcgctgcagatgccgggattccgccgtcagatgaacgaaggc

SEQ ID NO: 28352 - DNA, 75 bp, synthetic construct
  source 1..75: mol_type = other DNA
tggaggcgactggtttttaccgtgtcgcactgacagaggcgcagcctggcgacgtgctgctgtgctgctttggtt

SEQ ID NO: 28353 - DNA, 75 bp, synthetic construct
  source 1..75: mol_type = other DNA
tggcacacacccggcggtgtgtgcctgcggagtcgtgcggcttcgtggtgagaacgccggagggggagcggtata

SEQ ID NO: 28354 - DNA, 75 bp, synthetic construct
  source 1..75: mol_type = other DNA
tcaccgggcggcgctttgagcacggggtgacggactgttacacgctgttccgggacgcttaccatctggcgggga

SEQ ID NO: 28355 - DNA, 75 bp, synthetic construct
  source 1..75: mol_type = other DNA
gagggaacggttatccatattgtgccgcgactggccggagccggaaagggcggactacagattgtgctgggggca

SEQ ID NO: 28356 - DNA, 75 bp, synthetic construct
  source 1..75: mol_type = other DNA
tgggcgatgaatatcggctgccacctgacaattccgcagagctgtgaataccagcagctgcgcgataagcaggag

SEQ ID NO: 28357 - DNA, 75 bp, synthetic construct
  source 1..75: mol_type = other DNA
aaccgcagggtattttcagtaaatcaccggcaacgccgctgcagaataaaacggacacagcatacaaaatgaagg

SEQ ID NO: 28358 - DNA, 75 bp, synthetic construct
  source 1..75: mol_type = other DNA
accaaaaaagtggcgctggttgactgtatgcgtaaattgctgaccatcctgaacgcaatgctcagaaagaacgaa

SEQ ID NO: 28359 - DNA, 75 bp, synthetic construct
  source 1..75: mol_type = other DNA
gtgagagtttatattgccggcccaatgacgggatataaaaatttcaaccgtgaggcgtttcacaaggcggaagag

SEQ ID NO: 28360 - DNA, 75 bp, synthetic construct
  source 1..75: mol_type = other DNA
atgaacatagggcgactgcgtgacagggtaacgattcagaccctgaaacagaccagggatataaccggcgaaata

SEQ ID NO: 28361 - DNA, 75 bp, synthetic construct
  source 1..75: mol_type = other DNA
tgtcaccacccgtgttctggcaccttcgcaggatttaaaaagcggtatcctccggctggttattattcccggtgt

SEQ ID NO: 28362 - DNA, 75 bp, synthetic construct
  source 1..75: mol_type = other DNA
tctgtttctgttgtgttttttgtgggggcaattgtgggatggatttcggtgtcatattacagccgcataacctgt

SEQ ID NO: 28363 - DNA, 75 bp, synthetic construct
  source 1..75: mol_type = other DNA
atgccactacaatatatgtgccacatgaattatgcatatataccaaatgctacgttcagccagaatataccggac

SEQ ID NO: 28364 - DNA, 75 bp, synthetic construct
  source 1..75: mol_type = other DNA
catccgctggcggtaaaaaaggtattaacgccggatgattttcacggtgagaactacatcagcctttcccgtact

SEQ ID NO: 28365 - DNA, 75 bp, synthetic construct
  source 1..75: mol_type = other DNA
tcaggccctgccatcagcttcttttccaccaccggggatgactttgcccgagtactggggagaagaacacgtctg

SEQ ID NO: 28366 - DNA, 75 bp, synthetic construct
  source 1..75: mol_type = other DNA
atatgtgggtggagcggttggagatactggcgggaacacatgaaaacgtaaccacgctaccagtaaccagaataa

SEQ ID NO: 28367 - DNA, 75 bp, synthetic construct
  source 1..75: mol_type = other DNA
tttcacatacagggccggaacgggaagggagacacgacccgaacgcattaagctgggaagttatcctgatctgag

SEQ ID NO: 28368 - DNA, 75 bp, synthetic construct
  source 1..75: mol_type = other DNA
gtggctggtctgccggggtgacattcacaaattccgctgtgtgccacatctgacaggacggcgctttgagcacgg

SEQ ID NO: 28369 - DNA, 75 bp, synthetic construct
  source 1..75: mol_type = other DNA
ctgctgacggctgcagccttcggcacgatgaagaacagcgaaaatgagcttgctgagcaacttataggacaaacc

SEQ ID NO: 28370 - DNA, 75 bp, synthetic construct
  source 1..75: mol_type = other DNA
ctcgaaatgatggtctggtgtattgttggcatggtgcttgagcgtaaagaacctcttcaccagattgtgaatcgc

SEQ ID NO: 28371 - DNA, 75 bp, synthetic construct
  source 1..75: mol_type = other DNA
ggtatccggcccggcggattgacgtgggaattgctcaggtcaatctgggctggaacgggcaccgtttctcctcca

SEQ ID NO: 28372 - DNA, 75 bp, synthetic construct
  source 1..75: mol_type = other DNA
atgagtaataaatattgccaggcgctggtggagctgcggaacaaaccagcccatgaactgaaggaagtgggcgat

SEQ ID NO: 28373 - DNA, 75 bp, synthetic construct
  source 1..75: mol_type = other DNA
atgccagtgccatgcgtgataagggcgggcgctatgttttcctgatcaaagctgccaccagcgaagtgtggtggc

SEQ ID NO: 28374 - DNA, 75 bp, synthetic construct
  source 1..75: mol_type = other DNA
gaagtaaaaagccggagcttgtggagcaagagctgtggggtgtcttactggcttataatctggtgagatatcaga

SEQ ID NO: 28375 - DNA, 75 bp, synthetic construct
  source 1..75: mol_type = other DNA
agagcaagttacagagacgcatgtacacgcagaaagctctctggtatcgccataatggtgaccgcgaaggaatgc

SEQ ID NO: 28376 - DNA, 75 bp, synthetic construct
  source 1..75: mol_type = other DNA
cacgcagaaagctctctggtatcgccataatggcgaccgcgaaggaatgcgggtatgccttaatttgtcccgagt

SEQ ID NO: 28377 - DNA, 75 bp, synthetic construct
  source 1..75: mol_type = other DNA
actgggaaatgaagtgacagcccgcctgctgaccgtgacgcgcaaaggaaaagtctgccatctgctgacgtcgat

SEQ ID NO: 28378 - DNA, 75 bp, synthetic construct
  source 1..75: mol_type = other DNA
gtgagttccatgcttgagatttttatcccgctttgcgcctccgatcccatccgttggcagcaccgtaccaccgac

SEQ ID NO: 28379 - DNA, 75 bp, synthetic construct
  source 1..75: mol_type = other DNA
tcaaatcaacagccgccggacgttaccagcttctttcacgttggtgggatgcttaccgtaaacagcttggtttga

SEQ ID NO: 28380 - DNA, 75 bp, synthetic construct
  source 1..75: mol_type = other DNA
cgaattaatgcaggtgatcgcaggggagcgtgtgaggcgattcgctggtggattaaggacggtggcagagactgc

SEQ ID NO: 28381 - DNA, 75 bp, synthetic construct
  source 1..75: mol_type = other DNA
caaagacatcgttggtgtatggactgtatgttacgggcatacaggaaaagacattatgctcggtaaaacgtatac

SEQ ID NO: 28382 - DNA, 75 bp, synthetic construct
  source 1..75: mol_type = other DNA
gaagttgtcgaaggaaaaatgcgaccaggttaacgccattgaacgtgataaggcgctggagtgggtggagcgcaa

SEQ ID NO: 28383 - DNA, 75 bp, synthetic construct
  source 1..75: mol_type = other DNA
acggtaaacctgttattccgggaatgaaactgtcgaaggaaaaatgcgcccaggttaacgccattgagcgggata

SEQ ID NO: 28384 - DNA, 75 bp, synthetic construct
  source 1..75: mol_type = other DNA
gattaaggacggtggcagggactgccgtattcgctcaaataactgttacggtcaggtatcccggcgagaccagga

SEQ ID NO: 28385 - DNA, 75 bp, synthetic construct
  source 1..75: mol_type = other DNA
cttcacagtcgaaggaaagcgctgctgccagtgcgaagactgcatcagaaagcgcgaaggctgcgaccagcaaag

SEQ ID NO: 28386 - DNA, 75 bp, synthetic construct
  source 1..75: mol_type = other DNA
aaacttgtcacgctaaacccgaaactcaaatcaacagctgcaggccgttatcaacttctttcacgttggtgggat

SEQ ID NO: 28387 - DNA, 75 bp, synthetic construct
  source 1..75: mol_type = other DNA
atgtatgcccatcatcttcacagcaaggtatatggaaaaagttgatgttttgatattaatatttggatatataaa

SEQ ID NO: 28388 - DNA, 75 bp, synthetic construct
  source 1..75: mol_type = other DNA
atgaaatttctggaaaaactcaacagcaccgacattgagctgacagcgctgaccatctggatggccagaaaaacc

SEQ ID NO: 28389 - DNA, 75 bp, synthetic construct
  source 1..75: mol_type = other DNA
cggagaactggccagatatgctggagaacggtaccagtcttgttatgaccggcagttgcggtaccgggaaaaatc

SEQ ID NO: 28390 - DNA, 75 bp, synthetic construct
  source 1..75: mol_type = other DNA
gttgaggactaccgctgcgcagcactggtggaaaacatccagattggcgacttcagcgtcgccgtagaagccgga

SEQ ID NO: 28391 - DNA, 75 bp, synthetic construct
  source 1..75: mol_type = other DNA
acgcagttcagtcaggcactggcgcagggagtgctgcgcggtgaagagtttaactcggtgaatgagaacggcgat

SEQ ID NO: 28392 - DNA, 75 bp, synthetic construct
  source 1..75: mol_type = other DNA
acataaaaggaagtctaaaacagctgttttacatcagaagttttattttcttcgggattttgtggaaaggcgaaa

SEQ ID NO: 28393 - DNA, 75 bp, synthetic construct
  source 1..75: mol_type = other DNA
aggtggaaaacgcctttatggcctgggtgggcggtgcgaatgaggccagcggggtgacgaaaacgctctccggcg

SEQ ID NO: 28394 - DNA, 75 bp, synthetic construct
  source 1..75: mol_type = other DNA
atgcttcaaattattagaggcaaacttgtcatttttttaattaccctttgtttatttgttgtttaccttgggttt

SEQ ID NO: 28395 - DNA, 75 bp, synthetic construct
  source 1..75: mol_type = other DNA
gcgtcgcagtcatcggatgaatttgcgtcatcacagaaagtgctgatggatatcagccagcggacaggcaccgca

SEQ ID NO: 28396 - DNA, 75 bp, synthetic construct
  source 1..75: mol_type = other DNA
gataactcaacttgcgttccctatggctgcggcagcacaaggtgtggtaaacgccgcaacccaacaaccagttcc

SEQ ID NO: 28397 - DNA, 75 bp, synthetic construct
  source 1..75: mol_type = other DNA
atccgtgtggcacaggcgtgggcaggcaccggttttggccacctggcgataccgcgtgtgggtcaggaggtgatt

SEQ ID NO: 28398 - DNA, 75 bp, synthetic construct
  source 1..75: mol_type = other DNA
caataccatgtgtgaccttcgggccaggctgaacgatatggagcatcgctgtcgctttgattccgatgtgcttgt

SEQ ID NO: 28399 - DNA, 75 bp, synthetic construct
  source 1..75: mol_type = other DNA
gagctctgaagaactgctgagccggaccgatcgcaaggaccatcagacccgtgtcaggaaactcgctgaacacgc

SEQ ID NO: 28400 - DNA, 75 bp, synthetic construct
  source 1..75: mol_type = other DNA
cactgatagaacaccgcgcccgtacacatgacagtgaaaacgtcatccatgagctggcagcagaactcatccgta

SEQ ID NO: 28401 - DNA, 75 bp, synthetic construct
  source 1..75: mol_type = other DNA
atccgccgtgccctcgatcagggacacagtgactacccgatgatgtccggctgtacccggtttatgctcagcccc

SEQ ID NO: 28402 - DNA, 75 bp, synthetic construct
  source 1..75: mol_type = other DNA
ctcgccaccaatggcctaaataatttagttcctgaattccatttagataatgcagatcactatggagacttttaa

SEQ ID NO: 28403 - DNA, 75 bp, synthetic construct
  source 1..75: mol_type = other DNA
ccgccgggaatatgatgaaccgggcaggctggtatcggagacatcgcgcagcggggagacagtacgctaccgcta

SEQ ID NO: 28404 - DNA, 75 bp, synthetic construct
  source 1..75: mol_type = other DNA
agtgtggccagttccacttctgcacggtttttccagctcttacggtgtattacctccgctttgtaaagaccattg

SEQ ID NO: 28405 - DNA, 75 bp, synthetic construct
  source 1..75: mol_type = other DNA
ccggtgtggcgattgcgctgtctcttgctgctgtcacatcagtcccggcactggctgctgacacggttgtacagg

SEQ ID NO: 28406 - DNA, 75 bp, synthetic construct
  source 1..75: mol_type = other DNA
atgggactcatcacgcgcatcgctggcaaaaccggcgcgctcggcagcgtcgtttccgcgatgggctgcgccgcc

SEQ ID NO: 28407 - DNA, 75 bp, synthetic construct
  source 1..75: mol_type = other DNA
cacgctgacgctgaacgacagtaccgtcaccacggatgtcattgctcagcgcggtacagccctgaagctgaccgg

SEQ ID NO: 28408 - DNA, 75 bp, synthetic construct
  source 1..75: mol_type = other DNA
atgagtgctgaacaggatgccggtaaatccggaaagaaactggctgccctgcttggactgggcagcatcatctta

SEQ ID NO: 28409 - DNA, 75 bp, synthetic construct
  source 1..75: mol_type = other DNA
gacatggccgccacactggctgtgccgttcaccggtgacgggcatgatgccgcgcagatcctgcggacactcccc

SEQ ID NO: 28410 - DNA, 75 bp, synthetic construct
  source 1..75: mol_type = other DNA
ccttgataattcaatcatggttaaatattttaaagatgagaagccaacttatgctcgaatgacagcacatctccc

SEQ ID NO: 28411 - DNA, 75 bp, synthetic construct
  source 1..75: mol_type = other DNA
cggcgcgggccgccgttttcatctggcgctgaccacacaggcgcagcgggcgaaagccttccgtaaacagcgcga

SEQ ID NO: 28412 - DNA, 75 bp, synthetic construct
  source 1..75: mol_type = other DNA
ggaaagccgccgctggctggcatcgtgcggcctgaccgtggagcagatgcaaaaccagatggacccggtgtacac

SEQ ID NO: 28413 - DNA, 75 bp, synthetic construct
  source 1..75: mol_type = other DNA
gagcctgtggcgtgggcgcacagattaatcaacaagcgtaacggagtcgttcacccttgggtttacggtagcgca

SEQ ID NO: 28414 - DNA, 75 bp, synthetic construct
  source 1..75: mol_type = other DNA
ctgtagcgggtcttgggatgcatatgttgcctgccactaaggcgattcccaaagagatgctaccgatcgtcgaca

SEQ ID NO: 28415 - DNA, 75 bp, synthetic construct
  source 1..75: mol_type = other DNA
ctgaatctgagacaacatctggcaaggctgggacggaagtcactgtcgttctcaaaatcggtggagttgcatgac

SEQ ID NO: 28416 - DNA, 75 bp, synthetic construct
  source 1..75: mol_type = other DNA
tggcgacgtgaacgggacctgacgggctggatgtcgctgtcacggaaaccgcaagtgacctggtacggctgggac

SEQ ID NO: 28417 - DNA, 75 bp, synthetic construct
  source 1..75: mol_type = other DNA
tgcagtctgtctcggaaagaaaaattcttatgacctttgtcaaatattaagcccaaaaagacctacgcagctccg

SEQ ID NO: 28418 - DNA, 75 bp, synthetic construct
  source 1..75: mol_type = other DNA
tatctggaatctgtacacactgaacaacggtggcgcatttatagcgcccgaaccggatgacgatgatggcgaaac

SEQ ID NO: 28419 - DNA, 75 bp, synthetic construct
  source 1..75: mol_type = other DNA
ctactgcggtggtatctggaatctgtaccccctgaacaacggcggggcatttatggcccccgaaccggatgacga

SEQ ID NO: 28420 - DNA, 75 bp, synthetic construct
  source 1..75: mol_type = other DNA
tgtgcttcaggccgatgcttacggtggttaccgggtgttatacgaatccggcagaataacggaagccgcgtgtat

SEQ ID NO: 28421 - DNA, 75 bp, synthetic construct
  source 1..75: mol_type = other DNA
gaaggtggtgcgctgacagaagttgcgtgctgggcccatgcccggagaaaaatccacgatgtatacatcagcagc

SEQ ID NO: 28422 - DNA, 75 bp, synthetic construct
  source 1..75: mol_type = other DNA
ctgttgattaactggaactgtgcagcctcgaaatccccaccgaagacccctgatgaaaagcaggatacgccggat

SEQ ID NO: 28423 - DNA, 75 bp, synthetic construct
  source 1..75: mol_type = other DNA
cattccctttcgcccgtttcacggccgaagagtttcgctatttttttgcctggtgtgcccgacaccgcgtcagtg

SEQ ID NO: 28424 - DNA, 75 bp, synthetic construct
  source 1..75: mol_type = other DNA
gtccggtggccataaccccttataccctgatgcaggccattgcggcggaaggtgatgtcaccacaccagtggcgg

SEQ ID NO: 28425 - DNA, 75 bp, synthetic construct
  source 1..75: mol_type = other DNA
gtacctcacgccacggcgctgatgttttttatcctttgggttcaataccgcgttgctgtaattcttttcggagta

SEQ ID NO: 28426 - DNA, 75 bp, synthetic construct
  source 1..75: mol_type = other DNA
atttttctcggggcgagtatgggcaggcgatagtgcaccagaaaaaagagaaatagccgtctggcgacaatgtct

SEQ ID NO: 28427 - DNA, 75 bp, synthetic construct
  source 1..75: mol_type = other DNA
cgtctgcgtgtcttgtattggtgatagtgtgttgttggtcatggtactgccctgtaaagcaatgcgccgtagtac

SEQ ID NO: 28428 - DNA, 75 bp, synthetic construct
  source 1..75: mol_type = other DNA
cagatgcgcaaatggtatttcaggtatacggaaaatggatgtctgaaaacaataatgcacaggtagctttgttaa

SEQ ID NO: 28429 - DNA, 75 bp, synthetic construct
  source 1..75: mol_type = other DNA
acgaacgcatcctcgagcgccagtagcgcagcttcctcggcaacagcggcaggaaattccgcgaaggcggcaaaa

SEQ ID NO: 28430 - DNA, 75 bp, synthetic construct
  source 1..75: mol_type = other DNA
gagcgtgacctgacggggtggatgtcgctgtcgcgtaaaccggaggagacctggtacgggtgggacggtgacagg

SEQ ID NO: 28431 - DNA, 75 bp, synthetic construct
  source 1..75: mol_type = other DNA
tgtggttcagctcagtagcgccactaacagcccgtctgaaacgctggctgcgacaccaaaagcggttaaggcggt

SEQ ID NO: 28432 - DNA, 75 bp, synthetic construct
  source 1..75: mol_type = other DNA
gatgtcggtggctatgagcaagcgatgatttcagcgatgcgttataatccaagatacattttcttgggtgagatt

SEQ ID NO: 28433 - DNA, 75 bp, synthetic construct
  source 1..75: mol_type = other DNA
attgaaaactcgaacggtataggcctaaccatcaatgactatggcaccagtgtcgatcttggaagcggaagtaaa

SEQ ID NO: 28434 - DNA, 75 bp, synthetic construct
  source 1..75: mol_type = other DNA
ggcgatatctgggcctacatgagcgaagccttgactggtgcgccgggtaaaatcatcgcgtgcggcatgttgttc

SEQ ID NO: 28435 - DNA, 75 bp, synthetic construct
  source 1..75: mol_type = other DNA
ccatcttacaccatatcaggaaaacactgtttcattgaaccccgcttctttccctgaatatgcagaagtattgca

SEQ ID NO: 28436 - DNA, 75 bp, synthetic construct
  source 1..75: mol_type = other DNA
cattctcatattttgacttttacaatcaacaactgaatttaagtataccgaatgtagcactatatccaaaatata

SEQ ID NO: 28437 - DNA, 75 bp, synthetic construct
  source 1..75: mol_type = other DNA
cctttaatcttaaagcccgtgcagtgagtaaaggccaggttactcctggaaatatcagttctgttataaccgtca

SEQ ID NO: 28438 - DNA, 75 bp, synthetic construct
  source 1..75: mol_type = other DNA
catttcatataaaccgcattagcacttctgatttgcaggatttcttgactgcgcaaacctacagaccagaaatta

SEQ ID NO: 28439 - DNA, 75 bp, synthetic construct
  source 1..75: mol_type = other DNA
gattatggggagccatgtattgaaagatatgccactaagaaaacaggctgaaatattattttgtttagggggggt

SEQ ID NO: 28440 - DNA, 75 bp, synthetic construct
  source 1..75: mol_type = other DNA
gtggcagtatgacgaacgcggctggctgacagacatcagccatatcagcgaagggcaccgggtgacggtgcatta

SEQ ID NO: 28441 - DNA, 75 bp, synthetic construct
  source 1..75: mol_type = other DNA
accgacgctcggtcagtccgtttgttcttgtggcgagtgttgccgttttcttgaccgcgaccgccaatcttacct

SEQ ID NO: 28442 - DNA, 75 bp, synthetic construct
  source 1..75: mol_type = other DNA
acgctgttcaccggttggtcatgggtgaccattgctgaaaaactcggcggctggattttaaacattctcaccttc

SEQ ID NO: 28443 - DNA, 75 bp, synthetic construct
  source 1..75: mol_type = other DNA
gtgctgacgatcgctgtcgtgctctttggcgcgatgctactgatcaccacgctgttatcatcgtatcgctatgtg

SEQ ID NO: 28444 - DNA, 75 bp, synthetic construct
  source 1..75: mol_type = other DNA
atgtatcagtatccgttgaatcccatacaagtgatagacccaatggggttagatgcgattgagaatatgacatca

SEQ ID NO: 28445 - DNA, 75 bp, synthetic construct
  source 1..75: mol_type = other DNA
tgctaccaagtttgcttgtggcttttgttaaggtggattatccgacttggggcaagggtttgatgcgccgattgg

SEQ ID NO: 28446 - DNA, 75 bp, synthetic construct
  source 1..75: mol_type = other DNA
gagtattcagaacaaaatatctcaatgtaagttttctgtttgtccagagagacttcagtgcccgcttgaggctat

SEQ ID NO: 28447 - DNA, 75 bp, synthetic construct
  source 1..75: mol_type = other DNA
agcggttactggttgcccttgacaggcaggatgatggctggagtgatgacagccctaaccggctatttgttgtgg

SEQ ID NO: 28448 - DNA, 75 bp, synthetic construct
  source 1..75: mol_type = other DNA
tagaacatgtacggatgtggtaattaatatcccacaagagatacaaacaaatacacaggaaaatgatttgttatt

SEQ ID NO: 28449 - DNA, 75 bp, synthetic construct
  source 1..75: mol_type = other DNA
ttgggacgaaatattttcaggtaaagatgagaaaatagttaaaagtaaagataacaatatcaagtcattttattt

SEQ ID NO: 28450 - DNA, 75 bp, synthetic construct
  source 1..75: mol_type = other DNA
cacgtggagaataagctgcactggcgtctggacgtggtaatgaatgaagacgactgcaaaataagaagaggaaac

SEQ ID NO: 28451 - DNA, 75 bp, synthetic construct
  source 1..75: mol_type = other DNA
cagcaacagcagggatagatgatttgggtgaaattttagctaagatgaaacagagaacatcgagaggaataagaa

SEQ ID NO: 28452 - DNA, 75 bp, synthetic construct
  source 1..75: mol_type = other DNA
atcgctggggaaaatggttttcctgcatggtctgaaattccaccaccaacgcatgaggaacagattgccgcagcc

SEQ ID NO: 28453 - DNA, 75 bp, synthetic construct
  source 1..75: mol_type = other DNA
ctgtaccactgcgaccatcgcggcctgccgctggcgctcatcagcacggaaggggcaacagcgtggtgcgcagaa

SEQ ID NO: 28454 - DNA, 75 bp, synthetic construct
  source 1..75: mol_type = other DNA
attgaagacaacaaacaggaccgttatttgcacattacgttgtcttttcatgaaagtcacgtatcaaatgaaatg

SEQ ID NO: 28455 - DNA, 75 bp, synthetic construct
  source 1..75: mol_type = other DNA
ctgcgttataatgcacaatattatgccacagctcaggctacagctggtgatgtctctgccacagtaaattacacc

SEQ ID NO: 28456 - DNA, 75 bp, synthetic construct
  source 1..75: mol_type = other DNA
atgactctcaataaaaccgatcgcatcgtcattacgctgggtaaacagatcgttcacggcaaatacgtgccaggc

SEQ ID NO: 28457 - DNA, 75 bp, synthetic construct
  source 1..75: mol_type = other DNA
taccagggcttgttcgcgccgaaaggtgttcgacctgagacgttactccgacaggttaacaccgtttcgctaccg

SEQ ID NO: 28458 - DNA, 75 bp, synthetic construct
  source 1..75: mol_type = other DNA
ggcaaaatggtgaaaatactgtgggccgatcgtgacgggttatgcctgttcaccaaacgtctggccggtgacccg

SEQ ID NO: 28459 - DNA, 75 bp, synthetic construct
  source 1..75: mol_type = other DNA
agtattgatgcagatatttcactgcatgtccgctcacattttgcagatatatccggtcttcttgcctcatttaag

SEQ ID NO: 28460 - DNA, 75 bp, synthetic construct
  source 1..75: mol_type = other DNA
ggctaaaaccgacagaattgatgctgagctgcttgcgcagcttgcttctgttattcatgcccgacctgaccgtga

SEQ ID NO: 28461 - DNA, 75 bp, synthetic construct
  source 1..75: mol_type = other DNA
tcaggtcggataccggagcccgcgggcttgtaaaggcgaagccagtatcgtgtcgcccaacaggcttcagcgaca

SEQ ID NO: 28462 - DNA, 75 bp, synthetic construct
  source 1..75: mol_type = other DNA
gcgatactggagatgatgaagccgttaagtggaaatcgagaatttatctttcccagccgcatcaagccaaaccag

SEQ ID NO: 28463 - DNA, 75 bp, synthetic construct
  source 1..75: mol_type = other DNA
gatgctattaacgatccgattatgggatggattgtaaatgctacgcgatcgcgatggggtaagttcaaaccctgg

SEQ ID NO: 28464 - DNA, 75 bp, synthetic construct
  source 1..75: mol_type = other DNA
aagaatcaggaggactttctcgaggcaaattatatatatggcctcaacaatcttttgacactttatggcggtacg

SEQ ID NO: 28465 - DNA, 75 bp, synthetic construct
  source 1..75: mol_type = other DNA
attgagattttctacaatcgtcagcgtcgtcactctcgtctggggaatatctccccggcagccttcagggaaaaa

SEQ ID NO: 28466 - DNA, 75 bp, synthetic construct
  source 1..75: mol_type = other DNA
gcggtaccggcagtcgtctctggccgatgtctcgcgagctttacccgaaacagttcctccgtctgttcgggcaga

SEQ ID NO: 28467 - DNA, 75 bp, synthetic construct
  source 1..75: mol_type = other DNA
gcgttgggctggacagataattccaccacagccacattctcagcaatcacgaccgccggaatgtttctcggtgcg

SEQ ID NO: 28468 - DNA, 75 bp, synthetic construct
  source 1..75: mol_type = other DNA
cgaaaccgtaaaaaatgaccagacggtcacgatccaggaaggtaaccgccttcttacggtggaaaaaggccacaa

SEQ ID NO: 28469 - DNA, 75 bp, synthetic construct
  source 1..75: mol_type = other DNA
tacggacaaaaagcagtggtacacgcgtctgatgtgggtacagcacatggcaggattgttgccggtgaccggccg

SEQ ID NO: 28470 - DNA, 75 bp, synthetic construct
  source 1..75: mol_type = other DNA
aagttaacggacaacgattttcttatggaattaccggtgggaatgtttttgttagttgtcttgtttttgtttttt

SEQ ID NO: 28471 - DNA, 75 bp, synthetic construct
  source 1..75: mol_type = other DNA
agtctgaacacgcgtaatactaatgagaacggtattgctgaagttacccttaagggcacggttttgggtgttcat

SEQ ID NO: 28472 - DNA, 75 bp, synthetic construct
  source 1..75: mol_type = other DNA
gaatcggaccgtatcactcaccgcacggtgaacggcgaaccggcagagcagtggcagtatgatgaccacggctgg

SEQ ID NO: 28473 - DNA, 75 bp, synthetic construct
  source 1..75: mol_type = other DNA
ggcaactggagtctgggtgttccggcttccgttgtcagcggactggtggacggcagttatcctgtcagcgtctcg

SEQ ID NO: 28474 - DNA, 75 bp, synthetic construct
  source 1..75: mol_type = other DNA
gcccgtacaggtgatttaaaagggatcaacgtgaaataccgttatgaattcacggaccatctgggcggcatagcc

SEQ ID NO: 28475 - DNA, 75 bp, synthetic construct
  source 1..75: mol_type = other DNA
cagcagtatgatgaggagtccggcctgtattacaaccgccaccgctattatgacccgctgcaggggaggtatatc

SEQ ID NO: 28476 - DNA, 75 bp, synthetic construct
  source 1..75: mol_type = other DNA
aagtagtaagcaggaagacaacacggttgaagtcacccttgaaaatggcgtgaaacaaacgttaatcgtcagttt

SEQ ID NO: 28477 - DNA, 75 bp, synthetic construct
  source 1..75: mol_type = other DNA
gacggaaccgtccgcttttcctgataccctgccgggttacaccgaatatggccgggacaacggcatccgtctgtc

SEQ ID NO: 28478 - DNA, 75 bp, synthetic construct
  source 1..75: mol_type = other DNA
gaatggaaaatcccgcgcggttcctgtttctgatacggtgctttcgttgataaaaacccgaaaaaccgggctatt

SEQ ID NO: 28479 - DNA, 75 bp, synthetic construct
  source 1..75: mol_type = other DNA
cctgtgtagtgtttctgatgataggaggactgtctcaggctgccgagattacgttagtaagccacaggagtacgg

SEQ ID NO: 28480 - DNA, 75 bp, synthetic construct
  source 1..75: mol_type = other DNA
gcgattgcgttcttagtccgtggctattgcaccaccatcacgcgaaagggacagctaagcgcggcgggatggtta

SEQ ID NO: 28481 - DNA, 75 bp, synthetic construct
  source 1..75: mol_type = other DNA
ggtaaccgcgctgaaatgagcccggaagccgccggcattgccgcctgtctgatggcgtacagccatcacgcctgt

SEQ ID NO: 28482 - DNA, 75 bp, synthetic construct
  source 1..75: mol_type = other DNA
ttcatcttatcagtggaatgcaggcagatcgcctggctgacctggaaagaatgttgcatctgctcagcggtaaac

SEQ ID NO: 28483 - DNA, 75 bp, synthetic construct
  source 1..75: mol_type = other DNA
tgagcacatttgaacaactgcaccagaacaaagatgaagtgtttgagcggggggtgatcaacgtcttcaggggac

SEQ ID NO: 28484 - DNA, 75 bp, synthetic construct
  source 1..75: mol_type = other DNA
gacctggaaagaatgttgcatctgctcagcggtaaaccgatccccgacaaccgggggaatatcaccattaatctg

SEQ ID NO: 28485 - DNA, 75 bp, synthetic construct
  source 1..75: mol_type = other DNA
atgcacaggcccgtgatacatggtaccggtcactggagtacgataattttccggaaatcagtgaagcgaacattc

SEQ ID NO: 28486 - DNA, 75 bp, synthetic construct
  source 1..75: mol_type = other DNA
gatgatcacatccagtctgttcagggtaaagaggactatgaagatgagatgttcagcatcagatactttaagaag

SEQ ID NO: 28487 - DNA, 75 bp, synthetic construct
  source 1..75: mol_type = other DNA
atggaaaaaccggaagcagcaatgaaagccatcacccgcaatctcgatcgagaaatctggcgtgacctgatgcaa

SEQ ID NO: 28488 - DNA, 75 bp, synthetic construct
  source 1..75: mol_type = other DNA
agaagggaaacagcaaaggctccatgctgctgatttggcgaccgttcattagtcctcgacggatgtttactatcg

SEQ ID NO: 28489 - DNA, 75 bp, synthetic construct
  source 1..75: mol_type = other DNA
gccgtcggcgtcggctgatgcttttcacatcacctttcctgatggggctgttatcgagtacgagccggagaccgg

SEQ ID NO: 28490 - DNA, 75 bp, synthetic construct
  source 1..75: mol_type = other DNA
ccatcggcgtggtgccgactttcggcgtgacctacaccggtaactatgagttcccgcagccgctgcacgatgcgc

SEQ ID NO: 28491 - DNA, 75 bp, synthetic construct
  source 1..75: mol_type = other DNA
attatgcagaaactggccgcactgcagacggcaacaaagcgggcgctgtacgaagccattctgtatcccggcgtg

SEQ ID NO: 28492 - DNA, 75 bp, synthetic construct
  source 1..75: mol_type = other DNA
ttgatggatttgtcgatcaataaaaactggatcgacaaagaagaatatccgcaatccgcagccatcgacctgcgt

SEQ ID NO: 28493 - DNA, 75 bp, synthetic construct
  source 1..75: mol_type = other DNA
ccggaaatcagcgaagcgaatatcctgagcacgtttgaacaactgcaccagaacaaagatgaagtgtttgagcga

SEQ ID NO: 28494 - DNA, 75 bp, synthetic construct
  source 1..75: mol_type = other DNA
gttcagcgtaccggtcaccggagaactggacgacggcactgcgaagcagtcatttcagcgcggcagcccgtcggg

SEQ ID NO: 28495 - DNA, 75 bp, synthetic construct
  source 1..75: mol_type = other DNA
gcgtatccggggattaaagtctcgacggcagaagcccgggctattttaccggcgcagtatcgccgccaggattgc

SEQ ID NO: 28496 - DNA, 75 bp, synthetic construct
  source 1..75: mol_type = other DNA
catttcagcgcggcagcccgtcggggaattatttctgacaggtttgtagaagctattttgcagttttggcgcgaa

SEQ ID NO: 28497 - DNA, 75 bp, synthetic construct
  source 1..75: mol_type = other DNA
atgttcgctttgattaatcaggggcaactgtataccgatagtgctggctacccgataaaaattattcgctgcata

SEQ ID NO: 28498 - DNA, 75 bp, synthetic construct
  source 1..75: mol_type = other DNA
cagacgaaatattgttcaactgcagcccgtagcgtcggtgcggcattcgacggacaaaacggacagtatcgttac

SEQ ID NO: 28499 - DNA, 75 bp, synthetic construct
  source 1..75: mol_type = other DNA
gaacgcaaggcgacactgatttccctttacccggaagaccagcaggaggcggtcgcccgtaccctgacactggaa

SEQ ID NO: 28500 - DNA, 75 bp, synthetic construct
  source 1..75: mol_type = other DNA
cagggcacgctggagccgaccaacgagccttatgccattgccaaaatcgccgggatcaaactgtgcgaatcttac

SEQ ID NO: 28501 - DNA, 75 bp, synthetic construct
  source 1..75: mol_type = other DNA
ttaatacagaagcacggcgccgagtaaaatactggcgggaacatggttatgcatctagcggtaatcgaatcctta

SEQ ID NO: 28502 - DNA, 75 bp, synthetic construct
  source 1..75: mol_type = other DNA
agataacaggtggcaggctgtcgttgctggcactggagcagatggcagaacaggggaaagcatggcccctgattg

SEQ ID NO: 28503 - DNA, 75 bp, synthetic construct
  source 1..75: mol_type = other DNA
ttgccgtcggtgcgtagcttgagtcaggagcacggcgtcagcaccgtgcagcaggcgtatcagacgctggagacg

SEQ ID NO: 28504 - DNA, 75 bp, synthetic construct
  source 1..75: mol_type = other DNA
cgcctgtaactgatgacgtcagcagagcgctggcttttgctattaagtgggtggcggtcggtattgctgtgtctc

SEQ ID NO: 28505 - DNA, 75 bp, synthetic construct
  source 1..75: mol_type = other DNA
tgaatttaaacttcatatggttgaactggcttcgaaaccaaatgccaatgttgcacaactggcccgggaacatgg

SEQ ID NO: 28506 - DNA, 75 bp, synthetic construct
  source 1..75: mol_type = other DNA
ctgatgagctcgagcgcaagatcattcgcctgttcgcgctggggatgagctaccaggatatcagccgggagatcg

SEQ ID NO: 28507 - DNA, 75 bp, synthetic construct
  source 1..75: mol_type = other DNA
ccatccacagaaaacgcagtcaccgtcaatgaatgaggccgtgatgaagatagagcaggaagtgctcaccacctg

SEQ ID NO: 28508 - DNA, 75 bp, synthetic construct
  source 1..75: mol_type = other DNA
gatccacatcgcgaccgtgctcagatgctgaaagtcgaaaacgtccagcaggcgtggcagcaatggatcaacaaa

SEQ ID NO: 28509 - DNA, 75 bp, synthetic construct
  source 1..75: mol_type = other DNA
acaacaggccattttccaggagatggcgaaagagattgaccaggcggcagggaaagtcctgctgcgtgaagcggc

SEQ ID NO: 28510 - DNA, 75 bp, synthetic construct
  source 1..75: mol_type = other DNA
ttcgctcaacaacttggcacgccttatccgatttcggataagcgtattttgcaggcgatggagcagattagcggt

SEQ ID NO: 28511 - DNA, 75 bp, synthetic construct
  source 1..75: mol_type = other DNA
ttgtggctgtaccacgacagcggggatgcgggactgacacacctttaccggatgcgcgatgcgcagttgtggagc

SEQ ID NO: 28512 - DNA, 75 bp, synthetic construct
  source 1..75: mol_type = other DNA
tatccgccatcgctcatcggtacggtctgaaaccgcaaatcagcgaaatgctgatggatatcgaaatcgaccacg

SEQ ID NO: 28513 - DNA, 75 bp, synthetic construct
  source 1..75: mol_type = other DNA
gaacgcggctgaaaaactatctgaggtggattttaaagaggttaggcaggcattagccaaaatgcactacactgt

SEQ ID NO: 28514 - DNA, 75 bp, synthetic construct
  source 1..75: mol_type = other DNA
acgatggttacgcagggctatgagtatcgtcgtgatgacgatatggcgttatggagttctgctgatttgacttat

SEQ ID NO: 28515 - DNA, 75 bp, synthetic construct
  source 1..75: mol_type = other DNA
cactggcacgtggagaataagctgcactggcgtctggacgtggtaatgaatgaagacgactgcaaaataagaaga

SEQ ID NO: 28516 - DNA, 75 bp, synthetic construct
  source 1..75: mol_type = other DNA
cctggcctccgagcaataatcgctattaccgccataatcgcgggcgcacgcacatcagcgcagaggggcaggcat

SEQ ID NO: 28517 - DNA, 75 bp, synthetic construct
  source 1..75: mol_type = other DNA
atggcctgcgcgaagtgtcgtgcggctatgacgcggagtacgagcagaccgagccaggtaaagctgagcaggtcg

SEQ ID NO: 28518 - DNA, 75 bp, synthetic construct
  source 1..75: mol_type = other DNA
aaattcttgtttctggtgggagtaaggattttgagtgttccattgaggatattcaaattatagccagcattatct

SEQ ID NO: 28519 - DNA, 75 bp, synthetic construct
  source 1..75: mol_type = other DNA
attcagcaaggctttgaagcggcgaaaaatatcggcactcagccagtggcggctcaggtagctgccgcacctgcc

SEQ ID NO: 28520 - DNA, 75 bp, synthetic construct
  source 1..75: mol_type = other DNA
ttttgtgctgaatgaactgaaagccaaaggcctgtgccgcgattttctcgcccagcagaaagaccggggagacag

SEQ ID NO: 28521 - DNA, 75 bp, synthetic construct
  source 1..75: mol_type = other DNA
caaagcttactccactcgtgtgggtgcaggtccgttcccgactgaactgtttgatgaaactggcgagttcctctg

SEQ ID NO: 28522 - DNA, 75 bp, synthetic construct
  source 1..75: mol_type = other DNA
gttgcgtaagctgatgcgctttgccgcccgcagcaaggttgcgccgactaccgaactgttcccgatgtcgaaaat

SEQ ID NO: 28523 - DNA, 75 bp, synthetic construct
  source 1..75: mol_type = other DNA
acccattcctgaaaaacgttcaggaatgcccccggaacatctgcggtttgccacggggtttccatcgcaaccgaa

SEQ ID NO: 28524 - DNA, 75 bp, synthetic construct
  source 1..75: mol_type = other DNA
ggcggcagtattccgtcaggagcaggcctgcgtatcttctatcggaaccagcgtttgcaggaagatgataagtgg

SEQ ID NO: 28525 - DNA, 75 bp, synthetic construct
  source 1..75: mol_type = other DNA
ggtaaacgccagcagcagcaaccctgcgcatcgccgcaatgagatgatggcctgtgttaaaggtctggagcttat

SEQ ID NO: 28526 - DNA, 75 bp, synthetic construct
  source 1..75: mol_type = other DNA
tgctttcaattgatgcaaataatgtgcggcagcgtgtgtttcagactgggtgcagcacttttgaggcaatccaat

SEQ ID NO: 28527 - DNA, 75 bp, synthetic construct
  source 1..75: mol_type = other DNA
ctgtatgccatcgggcagtactgtgaccagcgtgtcccggacggcttcggagggacagagccgcggatgaccttt

SEQ ID NO: 28528 - DNA, 75 bp, synthetic construct
  source 1..75: mol_type = other DNA
gggggctgaagttgccgacgttgcgtcagcgcctgttccgctgtgtgagtatccgtgagaacgatgacggcacgt

SEQ ID NO: 28529 - DNA, 75 bp, synthetic construct
  source 1..75: mol_type = other DNA
cggcatgcagagtcaggtgctgctggcggcagacaggattgcgatgattaatcctgcgaatggcaacacaaagcc

SEQ ID NO: 28530 - DNA, 75 bp, synthetic construct
  source 1..75: mol_type = other DNA
gagcgccaccatacagcagatacagcgcgtgcagaaggacacaaatgatgacctggctgcactctacatgctgaa

SEQ ID NO: 28531 - DNA, 75 bp, synthetic construct
  source 1..75: mol_type = other DNA
aacaaccaacagtcatactggtattcaacctgtaagctgcaggtgctgaagaacggacaggaaatctttcagcaa

SEQ ID NO: 28532 - DNA, 75 bp, synthetic construct
  source 1..75: mol_type = other DNA
aacgagaactgtcgggttctgggaaaattgtccgcgaaccagattgaaggcgatctcgttaaaacagtgggcaaa

SEQ ID NO: 28533 - DNA, 75 bp, synthetic construct
  source 1..75: mol_type = other DNA
cctgccgttcgccagccgctggcggaggataaatcattactgccatttttcagcgatgagcgtgtgattcgtgct

SEQ ID NO: 28534 - DNA, 75 bp, synthetic construct
  source 1..75: mol_type = other DNA
tacgtcgttcgctggggttgcgtgcggaaaaaatccgctcaatgtaccgtgaaagcgacatcgtaccgggagagc

SEQ ID NO: 28535 - DNA, 75 bp, synthetic construct
  source 1..75: mol_type = other DNA
ccccgggtcttcggctggatggaccgtctgtatgaagactactgcggtggtatctggaatctgtacaccctgaac

SEQ ID NO: 28536 - DNA, 75 bp, synthetic construct
  source 1..75: mol_type = other DNA
atgaaaattatcacccgtggtgaagccatgcgcattcaccggcagcatcctgcatcccgtctttttccgttctgc

SEQ ID NO: 28537 - DNA, 75 bp, synthetic construct
  source 1..75: mol_type = other DNA
tgcatcagggaataaccagtctcagttggttgccactcccgtccctgatgaacagcgcatcagcttctggccgca

SEQ ID NO: 28538 - DNA, 75 bp, synthetic construct
  source 1..75: mol_type = other DNA
gaaaaacacggcagtcagctgttgttgctgattcgttttttaatgcacgcgagaaattcgggtgttctgaagtgg

SEQ ID NO: 28539 - DNA, 75 bp, synthetic construct
  source 1..75: mol_type = other DNA
gattgagctgacaccgggctattttcagataacagcggtcccgcgtcttgcggtgtatgacccgacggtacagtt

SEQ ID NO: 28540 - DNA, 75 bp, synthetic construct
  source 1..75: mol_type = other DNA
ggaggccaccatccagcagatacaaaaggttcagacggacaccagtaataacctgaacagtatgtgggccgtgaa

SEQ ID NO: 28541 - DNA, 75 bp, synthetic construct
  source 1..75: mol_type = other DNA
aagtttgaccggcaggtcatgataccgccagtgttattccgcggtggtaagcatgagaatttcaacagtaataac

SEQ ID NO: 28542 - DNA, 75 bp, synthetic construct
  source 1..75: mol_type = other DNA
acgcgccgggcgcaatccgtctgtgctggcactgcgataaccagctgcgcgatcagttcacggaacggctggaat

SEQ ID NO: 28543 - DNA, 75 bp, synthetic construct
  source 1..75: mol_type = other DNA
cagtaacgcacgggtgattcgtgctgctggtggtgctggtgcattgtctgactggctgttgcgccatattaaatc

SEQ ID NO: 28544 - DNA, 75 bp, synthetic construct
  source 1..75: mol_type = other DNA
gtgaggtgaccctgccggagacaggtgccgccacggtgaacctgattaacggcagcggtaagccggtgagcgtgg

SEQ ID NO: 28545 - DNA, 75 bp, synthetic construct
  source 1..75: mol_type = other DNA
gattttcatcaccaggtcagatgtctggtgattcattaaaccgccagagaaggcttattactgaatggctaaagg

SEQ ID NO: 28546 - DNA, 75 bp, synthetic construct
  source 1..75: mol_type = other DNA
atattgcaaaacatcttatgcaggtgcatttcgttgatgaacataccggagagattatcgataagcaggttaagc

SEQ ID NO: 28547 - DNA, 75 bp, synthetic construct
  source 1..75: mol_type = other DNA
tggtgcaagagggtaaccgcctgcattaccttgccgaccgcgccggtatcagaggccgcttcagcgacgcagatg

SEQ ID NO: 28548 - DNA, 75 bp, synthetic construct
  source 1..75: mol_type = other DNA
cttctctgtcggaaaaaatcaggaaatgccatgtttatttccctgatgacagggcaaacagaaacaacggagata

SEQ ID NO: 28549 - DNA, 75 bp, synthetic construct
  source 1..75: mol_type = other DNA
gacaacaccacgccggggaaattactggttcaggagattaactttgtaagacagacagccactgccgggcagttt

SEQ ID NO: 28550 - DNA, 75 bp, synthetic construct
  source 1..75: mol_type = other DNA
tggcagaggtgaaacgggtaagagaaaatgagcgcaataagattcgcgaaaaacaaattcaggcattaaatgatg

SEQ ID NO: 28551 - DNA, 75 bp, synthetic construct
  source 1..75: mol_type = other DNA
gggcgtggctcagtaatgagcgaccgggtctgatgtttgattttgccactgcatggttgcttcaaaataaggtat

SEQ ID NO: 28552 - DNA, 75 bp, synthetic construct
  source 1..75: mol_type = other DNA
tctgtccgaaatttgtcacatcacttgccggtttttccccgaaacagacgaccactattaataaagactccgtcc

SEQ ID NO: 28553 - DNA, 75 bp, synthetic construct
  source 1..75: mol_type = other DNA
cgttactggaaatgctggtggcgatagccatttttgcctcactggcactgatggcgcagcaggtgacaaacggcg

SEQ ID NO: 28554 - DNA, 75 bp, synthetic construct
  source 1..75: mol_type = other DNA
ctgccagcggccccgctcgtcctgaatttatgaacggcgatatttaccgcgataaatatggcggcatggtaacga

SEQ ID NO: 28555 - DNA, 75 bp, synthetic construct
  source 1..75: mol_type = other DNA
gcaaaactctttcaactttctcacaccagcctctcacactggattaatctttttcttcttcacggtcctcgggca

SEQ ID NO: 28556 - DNA, 75 bp, synthetic construct
  source 1..75: mol_type = other DNA
ctgacgctgacggatgttacaaaaaatgcagcgtatggcgttgagatagaaagtctggtgctggagataaatgca

SEQ ID NO: 28557 - DNA, 75 bp, synthetic construct
  source 1..75: mol_type = other DNA
ccttcgccaggcttccgcttattttgcgaaggcggagttcgaccgcctctggaaaaaataatgccctgctggata

SEQ ID NO: 28558 - DNA, 75 bp, synthetic construct
  source 1..75: mol_type = other DNA
gtaaggaaaatccgttgccaccttcacctgcggaaaaagtcagtccggagatggcggagaagcttgccctgcttg

SEQ ID NO: 28559 - DNA, 75 bp, synthetic construct
  source 1..75: mol_type = other DNA
gcattaattttcgcagcctgacggatgctattgataccagcacgccgatggggcgttttttctttcatgtgatgg

SEQ ID NO: 28560 - DNA, 75 bp, synthetic construct
  source 1..75: mol_type = other DNA
aaccattaccgtcagggtttatgacgatcagccgtttaaccggcagattgttattccggcggtggctttcagcgg

SEQ ID NO: 28561 - DNA, 75 bp, synthetic construct
  source 1..75: mol_type = other DNA
tcccccgtaagcaggttgcaatcatctatgatgtggctgtttccactctttataagaagtttccggcgtcatcat

SEQ ID NO: 28562 - DNA, 75 bp, synthetic construct
  source 1..75: mol_type = other DNA
gcatcaacggcaacatatatcaacaaatctggcgaactgaaaacggcggaaattaatgagccgcgatttgagtgt

SEQ ID NO: 28563 - DNA, 75 bp, synthetic construct
  source 1..75: mol_type = other DNA
ggggtgtgggtaaacctttatatcaggacctgattttgcgcacgaaggccgcattgcagaaaaacccaaaaaaca

SEQ ID NO: 28564 - DNA, 75 bp, synthetic construct
  source 1..75: mol_type = other DNA
tgcagcagcccaaagcgagagcgcggcagccggttctgcgacttcagcagctggatcagcaactgctgcggctaa

SEQ ID NO: 28565 - DNA, 75 bp, synthetic construct
  source 1..75: mol_type = other DNA
agtctccgttgatgatcaactgattggcgaccgcgccacgcagatcaaaacgctgaccaacggctgcatctgctg

SEQ ID NO: 28566 - DNA, 75 bp, synthetic construct
  source 1..75: mol_type = other DNA
gttagttttggaaaaggttttacatcaggtgtaggattacgagttgatgcatttatggatgccgtagtttccatt

SEQ ID NO: 28567 - DNA, 75 bp, synthetic construct
  source 1..75: mol_type = other DNA
ctgggaacaatgaaggttacgataacggcaacaaacacttataacaatgctattttagttcagaatacatcaaac

SEQ ID NO: 28568 - DNA, 75 bp, synthetic construct
  source 1..75: mol_type = other DNA
gtatttttcgtcactggacaacatgattgcccagggtaacccgatgccggtgccttacggggaaatgctggttgg

SEQ ID NO: 28569 - DNA, 75 bp, synthetic construct
  source 1..75: mol_type = other DNA
ctgccgaaaccaacgtcggcacctgcttcagtggagatcgtgttgtttcctccggataacaggatccgcgatctg

SEQ ID NO: 28570 - DNA, 75 bp, synthetic construct
  source 1..75: mol_type = other DNA
atggctatcgctgcaagttacaccatgcatctctattgtgattgcctccagtgtacagatggcaaatataagtcg

SEQ ID NO: 28571 - DNA, 75 bp, synthetic construct
  source 1..75: mol_type = other DNA
tacttgaagagtggctctcggcccagcgtcatgatttaggactcactgaaacgctccatacgcctgcgggaacag

SEQ ID NO: 28572 - DNA, 75 bp, synthetic construct
  source 1..75: mol_type = other DNA
aagccaaaaacaccggaatacagggcaacggataacggtaaacagaacacgtacttttcgtcgctggataacatg

SEQ ID NO: 28573 - DNA, 75 bp, synthetic construct
  source 1..75: mol_type = other DNA
ctgctgtgctgctttggttcatcggtgccgaatcatgccgccatttactgtggtgacggcgagctgctgcaccat

SEQ ID NO: 28574 - DNA, 75 bp, synthetic construct
  source 1..75: mol_type = other DNA
agcggagtcgtgcggcttcgtgataagcaccccggagggcgaacggtaccagccctgcgtgaatatctccgcaga

SEQ ID NO: 28575 - DNA, 75 bp, synthetic construct
  source 1..75: mol_type = other DNA
ctgaaatgccggattttcatcgcgaggatgactggtggcgcaacggccagaacctgtacctggacaacctggcgg

SEQ ID NO: 28576 - DNA, 75 bp, synthetic construct
  source 1..75: mol_type = other DNA
tattagggattgttttgtggagatgcttcaggataaaaatgaggaagtccgtattgaagcaataatcggactttc

SEQ ID NO: 28577 - DNA, 75 bp, synthetic construct
  source 1..75: mol_type = other DNA
ttttctgccaccacgatgctgttttcactgggggccagcatgattctgggtggtgtggctcagatgctggccccg

SEQ ID NO: 28578 - DNA, 75 bp, synthetic construct
  source 1..75: mol_type = other DNA
tcttaagcttgtagcggctagtgagtgcgatgatgaagagaagcggcttgctatccagtgggtttcggagctgac

SEQ ID NO: 28579 - DNA, 75 bp, synthetic construct
  source 1..75: mol_type = other DNA
ccggagaagctggacgcgctgaacaagtggtatgaccgcttagaacttctcgcgggtaatcactctaatatcgtt

SEQ ID NO: 28580 - DNA, 75 bp, synthetic construct
  source 1..75: mol_type = other DNA
ttaccagaaaaactagacgctctaaataaatggatggaacggcttgaggttatttctggtcagtattcaaatgta

SEQ ID NO: 28581 - DNA, 75 bp, synthetic construct
  source 1..75: mol_type = other DNA
tctaaacaggcgttacgtttctgcaaggttcgccgttatgctgccagtgatgctctggcctttctcaccattcag

SEQ ID NO: 28582 - DNA, 75 bp, synthetic construct
  source 1..75: mol_type = other DNA
ctgtcgctgagaaaatcctgctgcgatgcacctggcttgacccggcagagaaagaggcccgtcgtttgcatctgc

SEQ ID NO: 28583 - DNA, 75 bp, synthetic construct
  source 1..75: mol_type = other DNA
atgcgaattctgaactgttatatggcgaatgacagcaaggggcattttgttacggcgaaagaagcagcgaagcac

SEQ ID NO: 28584 - DNA, 75 bp, synthetic construct
  source 1..75: mol_type = other DNA
gcgatacatcgttgcgtaagatgctggggagggaaatcgatagagatagattttatgctgacggtgatggattga

SEQ ID NO: 28585 - DNA, 75 bp, synthetic construct
  source 1..75: mol_type = other DNA
aagccagcatccgtgccaaggtggagcacccgtttcgcatcatcaagcggcagttcggcttcgtgaaagccagat

SEQ ID NO: 28586 - DNA, 75 bp, synthetic construct
  source 1..75: mol_type = other DNA
tcactctgcaatgccctgtttgccagtgaggtatcaccggtcagcgatgtcgcggcctgtacacgtgagccactg

SEQ ID NO: 28587 - DNA, 75 bp, synthetic construct
  source 1..75: mol_type = other DNA
atgttctggcgcatgatcatttcggtaccgtttttctggtgtgcgatggctcaggccctgccatcagcttctttt

SEQ ID NO: 28588 - DNA, 75 bp, synthetic construct
  source 1..75: mol_type = other DNA
gatttatgaagcgcgcccgaacgtgacggttgatgtcgcttcgctgtgcctgaaaaccggtaacgcggtgatcct

SEQ ID NO: 28589 - DNA, 75 bp, synthetic construct
  source 1..75: mol_type = other DNA
ttacaccctcagaattgtgagaaacggaaaaaaacttgaagccggaaattattttgctgtgctgggattccgggt

SEQ ID NO: 28590 - DNA, 75 bp, synthetic construct
  source 1..75: mol_type = other DNA
cggggattgagatgccggattttcatcgcggggatgactggtggcgtcacggtcagaatctctatctggataatc

SEQ ID NO: 28591 - DNA, 75 bp, synthetic construct
  source 1..75: mol_type = other DNA
tatgaacatagaatcggtgacctgattgcccgatttaaagaagcgggtggggtggtaaatgaagctgagatataa

SEQ ID NO: 28592 - DNA, 75 bp, synthetic construct
  source 1..75: mol_type = other DNA
cgaaatctggcgtaacctgatgcagcgttccgggatgttttccttaatggatgcacaggcacgtgatacagggtt

SEQ ID NO: 28593 - DNA, 75 bp, synthetic construct
  source 1..75: mol_type = other DNA
aagctttcctcgatatggtggcatggtcagaaggaacggataacgggcgacaaccgacacgtaaccacggttatg

SEQ ID NO: 28594 - DNA, 75 bp, synthetic construct
  source 1..75: mol_type = other DNA
gttgagatcaccgacgtgatgcgcctgacccgggctgtgaaaaactgctggcggaatgacagcgaaaaaactgcg

SEQ ID NO: 28595 - DNA, 75 bp, synthetic construct
  source 1..75: mol_type = other DNA
gataaggcgcgccagcttttcgataccgcgtctcaggtctgtgaaattgtcgacggtgttcggcagtgtctgcag

SEQ ID NO: 28596 - DNA, 75 bp, synthetic construct
  source 1..75: mol_type = other DNA
ctgcagttatggaataaagaaggcagggtggtacgccgggagggcgatccgctggaagtggcgcagtggctgcag

SEQ ID NO: 28597 - DNA, 75 bp, synthetic construct
  source 1..75: mol_type = other DNA
atgaatggttatgtcgctacgacttgccgaaagtctgaaccgcttctggcgaccgctcatgatagcgctgctgtg

SEQ ID NO: 28598 - DNA, 75 bp, synthetic construct
  source 1..75: mol_type = other DNA
ggctcatgcccgccgaaagatccacgatgtgcacgtccgcatcccgtcagcactgacggaagaagccctggagca

SEQ ID NO: 28599 - DNA, 75 bp, synthetic construct
  source 1..75: mol_type = other DNA
acaactgacagtaatactctgaaggatggattgtgtagccaagcccacataggaactcaaccttatcggccaggt

SEQ ID NO: 28600 - DNA, 75 bp, synthetic construct
  source 1..75: mol_type = other DNA
gtgagtgatgaagccgatgaagcatattcagtgacagaacaactgaccatgacaggaataaaccggatacgccag

SEQ ID NO: 28601 - DNA, 75 bp, synthetic construct
  source 1..75: mol_type = other DNA
cgcgatcttgcaagtatgggacaacttgtgaaattaccgacaagaagggaaagggccttcccgagagtggtaaag

SEQ ID NO: 28602 - DNA, 75 bp, synthetic construct
  source 1..75: mol_type = other DNA
ctactatcaacgtgccattccacggcgcagagctttatgtcgtcaatcacaacggtgagccgtacaccccaatga

SEQ ID NO: 28603 - DNA, 75 bp, synthetic construct
  source 1..75: mol_type = other DNA
tggaaggtgtcagctacataccatacaaagatattgttggtgtatggactgtatgtcacggacacaccggaaaag

SEQ ID NO: 28604 - DNA, 75 bp, synthetic construct
  source 1..75: mol_type = other DNA
aggcgctggcatgggtggcgaaaaacatcaaagtgccactgactgaaccccagaaagcgggtattgcgtcattct

SEQ ID NO: 28605 - DNA, 75 bp, synthetic construct
  source 1..75: mol_type = other DNA
tgccgcgccggaggacggtaatgccgcttttgccctgtggcgtccctacagttgctgcaaaaagcggggccagaa

SEQ ID NO: 28606 - DNA, 75 bp, synthetic construct
  source 1..75: mol_type = other DNA
ggtgacggactgttacacgctgttccgggatgcataccatctggcgggaattgatatgccggattttgagcgtga

SEQ ID NO: 28607 - DNA, 75 bp, synthetic construct
  source 1..75: mol_type = other DNA
tctggtcagtcagacatccggcggtgtggagaacgccatcagcagcgggattgccgggctgtctgctggcggggg

SEQ ID NO: 28608 - DNA, 75 bp, synthetic construct
  source 1..75: mol_type = other DNA
ccgcgatggttctggcatatggaccatctgtcggggtgccacagtggtggatggaaaaaccgtttttcccaatat

SEQ ID NO: 28609 - DNA, 75 bp, synthetic construct
  source 1..75: mol_type = other DNA
agctccggtggtgtcctgcgcgtgccgatcgcctgctcaagtgcaggcgcggtcggtaacgctgacgacggtacg

SEQ ID NO: 28610 - DNA, 75 bp, synthetic construct
  source 1..75: mol_type = other DNA
ggtcagtcgtgcagatggcattccgtgcatcctgcccgcgtccgctcattatgccgcagagtcaatggtagctca

SEQ ID NO: 28611 - DNA, 75 bp, synthetic construct
  source 1..75: mol_type = other DNA
ttaaagggataaataattacccggataagattactgttactgtggcaccggaaattggtgggtatccgtcactgt

SEQ ID NO: 28612 - DNA, 75 bp, synthetic construct
  source 1..75: mol_type = other DNA
atcctcgaccagtttcttgacgaaaaagaaggtaaccacaccacggcataccgtgatggtgcggggatctggacc

SEQ ID NO: 28613 - DNA, 75 bp, synthetic construct
  source 1..75: mol_type = other DNA
tgccgcaggcgcgtctgctcctcagatacttgaccagtttctggacgaaaaagagggtaaccacacaaaggcata

SEQ ID NO: 28614 - DNA, 75 bp, synthetic construct
  source 1..75: mol_type = other DNA
gtccaatgacggggtatgaaaatttcaaccgtgaggcgtttcacaaggcagaagaggaactgaaacgggaagggc

SEQ ID NO: 28615 - DNA, 75 bp, synthetic construct
  source 1..75: mol_type = other DNA
gtggctgcacggcaccgggtgcagtttgcgatgccggaatctgatgcggttgcgatgctgaaacaattatcctga

SEQ ID NO: 28616 - DNA, 75 bp, synthetic construct
  source 1..75: mol_type = other DNA
atgtggctgcacggcaccgggtgcagttttcgatgcctgagtccgatgctgtcacaatgctgaaaaacagacacg

SEQ ID NO: 28617 - DNA, 75 bp, synthetic construct
  source 1..75: mol_type = other DNA
acggtcaggacctggattggggaggcggttgccgccgctgctgctgacggtgtgacgttctctgttccggtcaca

SEQ ID NO: 28618 - DNA, 75 bp, synthetic construct
  source 1..75: mol_type = other DNA
cgtaccggcagaaccgaaaaggcgcgtatctgggaggtcactgaccggacggtacggacctggctgaatgaagca

SEQ ID NO: 28619 - DNA, 75 bp, synthetic construct
  source 1..75: mol_type = other DNA
cctgaccaataatgagcagaccgcctccggcggtgtggtggttgccaccgtcaacaaaaagccctttacgttcat

SEQ ID NO: 28620 - DNA, 75 bp, synthetic construct
  source 1..75: mol_type = other DNA
tggtggaactcacttcattgctgacgctgtggcgcagtctgcaaatggcgtctttgtgtctcttcctgacgtcga

SEQ ID NO: 28621 - DNA, 75 bp, synthetic construct
  source 1..75: mol_type = other DNA
gcgccaatggtcgttgggtctacaaattacaaggtagtaccaatagccagggtgaatactccgccgcactcggtg

SEQ ID NO: 28622 - DNA, 75 bp, synthetic construct
  source 1..75: mol_type = other DNA
ggcgtgaggagtacccggtcctggattcagacgttgagaaactgtcaccattacagtgcgggcatattaatatgc

SEQ ID NO: 28623 - DNA, 75 bp, synthetic construct
  source 1..75: mol_type = other DNA
gcgcgcgtggatatcagctttaaattcaacgtatttaaaaccttcctgtttattccggcaattatcgtcggcgga

SEQ ID NO: 28624 - DNA, 75 bp, synthetic construct
  source 1..75: mol_type = other DNA
tatcggccacgttgaccaaggtaaaactactctgaccgctgcaatcacgaccgtactggctaaaacctacggcgg

SEQ ID NO: 28625 - DNA, 75 bp, synthetic construct
  source 1..75: mol_type = other DNA
aatgcccgtgttgtggtgtcgcagcagggacgggtgctgtacgactcgatggtccccgcagggccattcagtatt

SEQ ID NO: 28626 - DNA, 75 bp, synthetic construct
  source 1..75: mol_type = other DNA
gccatcggtgcgtgaagtgcgttttggtgacgggtattcgcagcgtatggcggcggggctgaatgctgacctgaa

SEQ ID NO: 28627 - DNA, 75 bp, synthetic construct
  source 1..75: mol_type = other DNA
ttgtccgggcttatttacgcgcctctacatctgaacaagatgcttctcgcgctctggctgcgattgatagttttg

SEQ ID NO: 28628 - DNA, 75 bp, synthetic construct
  source 1..75: mol_type = other DNA
cacgaaagcaaaccgtaaagcgggcatgtatcgcgagcaggaagaacgggcggcacaccgtaacgactggatgta

SEQ ID NO: 28629 - DNA, 75 bp, synthetic construct
  source 1..75: mol_type = other DNA
aagataaattgaagatcaacatggagcgccagtggcctgaaccaaaagatggtgagcctcgcttgcacattaaag

SEQ ID NO: 28630 - DNA, 75 bp, synthetic construct
  source 1..75: mol_type = other DNA
atcatgggcatctatggctaacagctaccttgctgctgctggttcgtcagaacgtattgatcatcgttcccttca

SEQ ID NO: 28631 - DNA, 75 bp, synthetic construct
  source 1..75: mol_type = other DNA
ctcactccagccatttcatccgaacaggcaaaaattagttgctatccaagattgaggccaccgggctatcataat

SEQ ID NO: 28632 - DNA, 75 bp, synthetic construct
  source 1..75: mol_type = other DNA
aatccggatgctccggatgagcgttgggtaacggacataacctacataaggacccacgaaggctggctgtatctt

SEQ ID NO: 28633 - DNA, 75 bp, synthetic construct
  source 1..75: mol_type = other DNA
agttcaatccggatgctcctgatgagcgttgggtaacggacataacctacatcaggacccacgaaggctggctgt

SEQ ID NO: 28634 - DNA, 75 bp, synthetic construct
  source 1..75: mol_type = other DNA
gaacggttctattcccattccagactgaaatccattttatttggacgattttctccaccgttaaacgcctggtta

SEQ ID NO: 28635 - DNA, 75 bp, synthetic construct
  source 1..75: mol_type = other DNA
tgatgaacatgcacgatataattacggtgatgacctggaaaaagtattaaacgttctttctggtttatctggtct

SEQ ID NO: 28636 - DNA, 75 bp, synthetic construct
  source 1..75: mol_type = other DNA
tctcaaactataccattagcactggaagttggcacgtacaggtgggcaaaaaaacgaaaactggtcaaccaaata

SEQ ID NO: 28637 - DNA, 75 bp, synthetic construct
  source 1..75: mol_type = other DNA
tgaaaacgatccagtgaaattactgattgtgctggctgcaaccgacagtaccagccacattgaagcgatttctca

SEQ ID NO: 28638 - DNA, 75 bp, synthetic construct
  source 1..75: mol_type = other DNA
agatgacggatgccctgacgctgaatgctgcggtgaataacctgctcaacaaggattacagtgacgtgagcctgt

SEQ ID NO: 28639 - DNA, 75 bp, synthetic construct
  source 1..75: mol_type = other DNA
gaattcattactgcttacccctctgggagaatctcatctggttacggtggggggcgagtttcagagctcgtccat

SEQ ID NO: 28640 - DNA, 75 bp, synthetic construct
  source 1..75: mol_type = other DNA
tctcccgataacacctgtacagcgatacaccttgagcgtgacagtgactgtgtgaacgtgatgattacgaatacg

SEQ ID NO: 28641 - DNA, 75 bp, synthetic construct
  source 1..75: mol_type = other DNA
gaacatcatcaaccttgaatggcaacaaatagatatgcagcgccgggtggcatggataaacccggaagagagtaa

SEQ ID NO: 28642 - DNA, 75 bp, synthetic construct
  source 1..75: mol_type = other DNA
actttatgagtggatgcgccagaaaattaatgcagcgcaggatctgaaatgggccaatgaagccagggctaagca

SEQ ID NO: 28643 - DNA, 75 bp, synthetic construct
  source 1..75: mol_type = other DNA
accttaccagaagtccgacttcgtgcttcagaattaatccgactttatccaaaagaaataatattctttatctgc

SEQ ID NO: 28644 - DNA, 75 bp, synthetic construct
  source 1..75: mol_type = other DNA
gctggggattggtattttactggtggtgaaatgtgccaaccttccagcgatggttttagctacgctacttggcgc

SEQ ID NO: 28645 - DNA, 75 bp, synthetic construct
  source 1..75: mol_type = other DNA
agcgcgtgctggagaaggtaaacgcgctgccgcaggacaagcgcctgtctgccatgactatgttgtttggtaaag

SEQ ID NO: 28646 - DNA, 75 bp, synthetic construct
  source 1..75: mol_type = other DNA
ccgccccaaacgcgccaaaatggaaaaaccagaagtaaaccttatagctatgttaaaagacgcaatagccaacag

SEQ ID NO: 28647 - DNA, 75 bp, synthetic construct
  source 1..75: mol_type = other DNA
aaggatttggccccctcaccatcactctgcaactcaaagacaaatatggtcagacgctggtgaccagaaaaatgg

SEQ ID NO: 28648 - DNA, 75 bp, synthetic construct
  source 1..75: mol_type = other DNA
gtttgaagatgatggcgaaacttggggatatactgaaggtaatgctctgtggcttgaatgggagctggactgcac

SEQ ID NO: 28649 - DNA, 75 bp, synthetic construct
  source 1..75: mol_type = other DNA
gcattgaccacggtaaaacgccagcatcgccctgctctggatctttcacgcctgcctgaacttctgtcgcgtatt

SEQ ID NO: 28650 - DNA, 75 bp, synthetic construct
  source 1..75: mol_type = other DNA
atgctggctgatttcacaccatcgggtatagcgcagccgggattatttgatgaaatccagccccgtaaaaacagt

SEQ ID NO: 28651 - DNA, 75 bp, synthetic construct
  source 1..75: mol_type = other DNA
tttttgattaaatgctttaatggtgatggttatgttcgttattacaaaaaagtagaaatcagcgcaaataaacag

SEQ ID NO: 28652 - DNA, 75 bp, synthetic construct
  source 1..75: mol_type = other DNA
gacgccggtgatgctgtatcacaaacagttacggcattacgttttgctaccatcgtgcctggcgcttattgctgg

SEQ ID NO: 28653 - DNA, 75 bp, synthetic construct
  source 1..75: mol_type = other DNA
gtgggcagattttctggatgcgaacagagaacaatgtatcagcccgtttgaatatgcaaagattaacaatccatt

SEQ ID NO: 28654 - DNA, 75 bp, synthetic construct
  source 1..75: mol_type = other DNA
accgggatatcacaacactcagtaccccggacctgcttatccctgttcgtgctgcagaagctaaacaaatttatg

SEQ ID NO: 28655 - DNA, 75 bp, synthetic construct
  source 1..75: mol_type = other DNA
tcgccggtgatgaacgcagtgcccgccgttcccttgtccgtgactatgtgctctcccttgctgcccgtctgccgg

SEQ ID NO: 28656 - DNA, 75 bp, synthetic construct
  source 1..75: mol_type = other DNA
gggcgcgagctaaaacagcacgtcatggccccgctgatttcttactttcgtgatgcgcgtaaatcactgggaata

SEQ ID NO: 28657 - DNA, 75 bp, synthetic construct
  source 1..75: mol_type = other DNA
gatgcgtgagcggtttaacgtgctgaaccatatcatctgggcaaagccgtccggacgctggaacgggtgcaacaa

SEQ ID NO: 28658 - DNA, 75 bp, synthetic construct
  source 1..75: mol_type = other DNA
atcaggctgcggctaaaatggcgcgggcaggaatcttagtcattgatggtaaggtctggcgaacggtatgttatt

SEQ ID NO: 28659 - DNA, 75 bp, synthetic construct
  source 1..75: mol_type = other DNA
tggcggcctgcccgggaatgaccgtggagaacgcccgggctgtgctggctgcgggatcaggtaaggccgaaccgg

SEQ ID NO: 28660 - DNA, 75 bp, synthetic construct
  source 1..75: mol_type = other DNA
agtgatggggatcctgacatgccaggaagcgaaaggacgtgaacagcttgccacgatgctggcaggacaacaggg

SEQ ID NO: 28661 - DNA, 75 bp, synthetic construct
  source 1..75: mol_type = other DNA
gaccgcgaccgggcagggacagaaatctgcaggtgataccagttttacgctggcctggaaaccgggagaggaagg

SEQ ID NO: 28662 - DNA, 75 bp, synthetic construct
  source 1..75: mol_type = other DNA
atggtgctgattaccagcagcacggacaatatcaccctgaaaatcgaccctgctgtagtgctggcaacccgcaag

SEQ ID NO: 28663 - DNA, 75 bp, synthetic construct
  source 1..75: mol_type = other DNA
ggtgctgttcagaaacggagatctgaatggcggtgcatttagtgctacagccagcatgagtatgatatataacta

SEQ ID NO: 28664 - DNA, 75 bp, synthetic construct
  source 1..75: mol_type = other DNA
ccaattatcgggatcaacggttggcgcaaattaacccccgaacggggcgtcaaataaccggaaacaccgtccgtc

SEQ ID NO: 28665 - DNA, 75 bp, synthetic construct
  source 1..75: mol_type = other DNA
cgccggtcagtgcgattaaggtgacgccgacatccggtacggtggcaaaagggaaaacaaccaccctgacggttt

SEQ ID NO: 28666 - DNA, 75 bp, synthetic construct
  source 1..75: mol_type = other DNA
tcaaattaacccacgaacagggcgtcaaatcaccggaaacaccgtccgtcttgaacttgctcttttatcatcatt

SEQ ID NO: 28667 - DNA, 75 bp, synthetic construct
  source 1..75: mol_type = other DNA
caccgcacaggaaaaagcccgcgactggtaccgtcagcatcatgctgacagcaactggtatgaaaacgtgtatga

SEQ ID NO: 28668 - DNA, 75 bp, synthetic construct
  source 1..75: mol_type = other DNA
accgccgacattctgacaccacgacgccgggaggattacggtaaggacctgtggagtgcttatcagaccattcag

SEQ ID NO: 28669 - DNA, 75 bp, synthetic construct
  source 1..75: mol_type = other DNA
gaaaaagtggcgagtgccgccgatgcgcgacgtatcgtcagccattacgagcgacgctggctgatagaggaatac

SEQ ID NO: 28670 - DNA, 75 bp, synthetic construct
  source 1..75: mol_type = other DNA
cctccagctaccagatgctgccgggttacttcaggttcgtctgccagaacggatgcgtctgtggtcagtctctgg

SEQ ID NO: 28671 - DNA, 75 bp, synthetic construct
  source 1..75: mol_type = other DNA
gggaagtgcgtgttccacaccggggagacgtagtggagaaagttattgaaggggcttacgaggtggtgggcgtgt

SEQ ID NO: 28672 - DNA, 75 bp, synthetic construct
  source 1..75: mol_type = other DNA
atactgcaaaccagatacgtcgtgaccgtccactgacacatgaagagctgatgcaccatgtgccggggattttcg

SEQ ID NO: 28673 - DNA, 75 bp, synthetic construct
  source 1..75: mol_type = other DNA
atgcgctgtaaaacgctgactgctgcagcagcagtactattgatgttgaccgcaggctgttccactctggagcga

SEQ ID NO: 28674 - DNA, 75 bp, synthetic construct
  source 1..75: mol_type = other DNA
atggacgccgttttaagtgttcagggtgcttctgcgcccgtcaaaaagaagtcgtttttttctaaattcactcgt

SEQ ID NO: 28675 - DNA, 75 bp, synthetic construct
  source 1..75: mol_type = other DNA
agtgcggtgaaatgggttattctggctgaggttctggtcggtgcggtcatgtatatgatgactaaaaacgtcaag

SEQ ID NO: 28676 - DNA, 75 bp, synthetic construct
  source 1..75: mol_type = other DNA
tgatgcagagtggtaactccacggttaaggcgaccttcggtaaggactccagtgttgttaaatgggttgttctgg

SEQ ID NO: 28677 - DNA, 75 bp, synthetic construct
  source 1..75: mol_type = other DNA
tattacagaccatgagcgcacaggaatatgaagatatccgggctgccggaagtgatgaacgtcgtgaactcacac

SEQ ID NO: 28678 - DNA, 75 bp, synthetic construct
  source 1..75: mol_type = other DNA
gtgcttctgcgcccgttgaaaagaaatcgtttttttctaaattcactcgtctgaatatgcttcgcctggttcgtg

SEQ ID NO: 28679 - DNA, 75 bp, synthetic construct
  source 1..75: mol_type = other DNA
atgagtaataacctgagacttgaggttttgctgaaagcggtcgaccaggcgacccgaccgcttaaatccatccag

SEQ ID NO: 28680 - DNA, 75 bp, synthetic construct
  source 1..75: mol_type = other DNA
acgaatgggtgccggcgacgggctatgtaagcttcagcgatgcagctcacgcaataacggactatatcgttggat

SEQ ID NO: 28681 - DNA, 75 bp, synthetic construct
  source 1..75: mol_type = other DNA
atgcgagaaataagtttattcatgattttgttaaatcgtggaataaagttatgaatagcgatcggtttgatttaa

SEQ ID NO: 28682 - DNA, 75 bp, synthetic construct
  source 1..75: mol_type = other DNA
ttaccgcttttacagggggcaacggatgccgccggttttatggcgcgggtggataccgttttgcagatgtacgga

SEQ ID NO: 28683 - DNA, 75 bp, synthetic construct
  source 1..75: mol_type = other DNA
tcaccctgttactgtcagccgctgccgtgcaggcctccacccgggatgaaatagagcgactctggaatccgcagg

SEQ ID NO: 28684 - DNA, 75 bp, synthetic construct
  source 1..75: mol_type = other DNA
aagccgtgttctgggcgtgtcacgtgcgcagttaacattacggatgaaggcatctgataacaagccagataaacg

SEQ ID NO: 28685 - DNA, 75 bp, synthetic construct
  source 1..75: mol_type = other DNA
ggtgacggcggttgtgcagccagctatccgttcggttgaaaaggataacgacggtaaccgcattaccaaaaatta

SEQ ID NO: 28686 - DNA, 75 bp, synthetic construct
  source 1..75: mol_type = other DNA
ggtgctctatgaagtggacctcatcaacatggtggaaatcgtggacggtgtggacctgatggaagcacaccgtaa

SEQ ID NO: 28687 - DNA, 75 bp, synthetic construct
  source 1..75: mol_type = other DNA
gaaaagggaaaccgcagatgcgctgaagcgtctgcgcgatgcagggtttattactctggatttacgcacggtgga

SEQ ID NO: 28688 - DNA, 75 bp, synthetic construct
  source 1..75: mol_type = other DNA
ttgtcctttggtgtttatccaacagtcacacttgctgatgccagacaaaaacgagaagacgcgaagaaactactc

SEQ ID NO: 28689 - DNA, 75 bp, synthetic construct
  source 1..75: mol_type = other DNA
acactgccaagccaaaagagaaggcttacaagctggctgatggtggtggtctgtatctcttggtaaaacctagtg

SEQ ID NO: 28690 - DNA, 75 bp, synthetic construct
  source 1..75: mol_type = other DNA
ggtactgaaacaactggcgctgcagtacggattttccgtatttccctataccctggatggtcagggtgatacggc

SEQ ID NO: 28691 - DNA, 75 bp, synthetic construct
  source 1..75: mol_type = other DNA
gggctccagacccgcgattctgtgaaccagaaccagcatgaatcggaacggaactaccaaaaagcggaacaaaac

SEQ ID NO: 28692 - DNA, 75 bp, synthetic construct
  source 1..75: mol_type = other DNA
ggctgatgacgatgcagaagcaactggaaggggcgcaggaatatatccgtactcagtgcattaagttgtcttttt

SEQ ID NO: 28693 - DNA, 75 bp, synthetic construct
  source 1..75: mol_type = other DNA
catcgtttcgagcgcggattggataaagtgaccgcaacatacagcttgcgcgacgacggcggcatcaacgttatt

SEQ ID NO: 28694 - DNA, 75 bp, synthetic construct
  source 1..75: mol_type = other DNA
cgggattatttcatcctcagagaacggttgatgacaatgcagaagcagctggaaggggcgcaggaatatatccgt

SEQ ID NO: 28695 - DNA, 75 bp, synthetic construct
  source 1..75: mol_type = other DNA
accagaaccagcaagaatcggaacagaacgaccagaaagcggaacaaaacagcccaaatacgcaacaaaacgagc

SEQ ID NO: 28696 - DNA, 75 bp, synthetic construct
  source 1..75: mol_type = other DNA
gctgaaatagcccggacttatttcgaactggggatgacgttcccggaactgtacgacgacagccatccggaagcc

SEQ ID NO: 28697 - DNA, 75 bp, synthetic construct
  source 1..75: mol_type = other DNA
gcatggcaatgaatgcctgggcgtatccagacggtgagaaagttccagcagctgaaatagcccggacttatttcg

SEQ ID NO: 28698 - DNA, 75 bp, synthetic construct
  source 1..75: mol_type = other DNA
gtatgacgacagccatccggaagccctggctcgcaatacccagaaaattttccgctgggtggagaaagacacccc

SEQ ID NO: 28699 - DNA, 75 bp, synthetic construct
  source 1..75: mol_type = other DNA
tggcgccactgaaatcacaaaagaagaatattttgcccgaaaaaatggcacatacacgggcttaccgcaaaatgt

SEQ ID NO: 28700 - DNA, 75 bp, synthetic construct
  source 1..75: mol_type = other DNA
ggtgttcatggtgaccgagacttagtcaagtatgtcgatgtcggtgctacttactactttaataaaaacatgtcc

SEQ ID NO: 28701 - DNA, 75 bp, synthetic construct
  source 1..75: mol_type = other DNA
gagaggtacgggtgccacataaaggcaatgtcgttgagaaggtgattgaaggggcttacgaagtgctcggggtgt

SEQ ID NO: 28702 - DNA, 75 bp, synthetic construct
  source 1..75: mol_type = other DNA
tatcaaaccgccagacctgattgccaccattgcatgttctgcctgccacgacgaaatcgaccgccgcacacattt

SEQ ID NO: 28703 - DNA, 75 bp, synthetic construct
  source 1..75: mol_type = other DNA
ggctggctggattgtgcggtaccggtatcaaaccgccagacctgattgccaccattgcatgttctgcctgccacg

SEQ ID NO: 28704 - DNA, 75 bp, synthetic construct
  source 1..75: mol_type = other DNA
acagaccactggatgctgtttaccccattgtttatcttgactgtatcgtcctgaaagttcggcaggacagtcgcg

SEQ ID NO: 28705 - DNA, 75 bp, synthetic construct
  source 1..75: mol_type = other DNA
tgctggatattctggcggatgatgtctggctccagaatgaataccacggggaagacgaaatctttaccggactgg

SEQ ID NO: 28706 - DNA, 75 bp, synthetic construct
  source 1..75: mol_type = other DNA
tccggcctggatgctgcagcttctgcgcaaagcccgtgatcgcattatccgcctgctgatcacactgtgggatcg

SEQ ID NO: 28707 - DNA, 75 bp, synthetic construct
  source 1..75: mol_type = other DNA
ccacgctaacccgttaccgcaacggcgtgctgcgctgcgatcccgccgttgccgggctgcgcctgagcgggacgt

SEQ ID NO: 28708 - DNA, 75 bp, synthetic construct
  source 1..75: mol_type = other DNA
ggtgaagaaaaatcagacccgcattaccggcatggacaaccagatcctggcgctgtatgccagagggatgactac

SEQ ID NO: 28709 - DNA, 75 bp, synthetic construct
  source 1..75: mol_type = other DNA
tacggtcagcaaaatcgaccagttgcgtaaagatatcgactcaattgtggcagagattgaaggtgacgaggtgca

SEQ ID NO: 28710 - DNA, 75 bp, synthetic construct
  source 1..75: mol_type = other DNA
atgaatgttcaaccaaatgtgcacactggattaaccccccccttacatcttgcacacccaccacatcctgcgcca

SEQ ID NO: 28711 - DNA, 75 bp, synthetic construct
  source 1..75: mol_type = other DNA
attcaccggaatttgaacaggcctggcaggaatatcccaaacgtgctggtggcaattccaagtcagcagccttca

SEQ ID NO: 28712 - DNA, 75 bp, synthetic construct
  source 1..75: mol_type = other DNA
tgggaaacgttgccgtttcaacgcgcgatcatgaatgcgatgggtaacgattacatacgtgaggtcaacgttgtt

SEQ ID NO: 28713 - DNA, 75 bp, synthetic construct
  source 1..75: mol_type = other DNA
tggacgcgcgacggtttatcctggttttcatcaacaggcaccgaaatcgacccgccagacagcgtgacgtttcac

SEQ ID NO: 28714 - DNA, 75 bp, synthetic construct
  source 1..75: mol_type = other DNA
ttccatccgccctgctcaacgagtccgccacgctgttccgccgtaagtattacatcaacggcagccatgcaggct

SEQ ID NO: 28715 - DNA, 75 bp, synthetic construct
  source 1..75: mol_type = other DNA
ccgtggtgctgacccgtggggatgtgcgccatatggctcaggactggaacctgtcagacgatgagctggaaaccg

SEQ ID NO: 28716 - DNA, 75 bp, synthetic construct
  source 1..75: mol_type = other DNA
gtcacatagcccaggactggagcctgtcagacgatgagctggaaaccgtcatgcagcggctggacgatgcctttg

SEQ ID NO: 28717 - DNA, 75 bp, synthetic construct
  source 1..75: mol_type = other DNA
attacaaaaacgcttaggagagataaatgaatggcttgataaaaaaataatagaatttgaaatatattcattctg

SEQ ID NO: 28718 - DNA, 75 bp, synthetic construct
  source 1..75: mol_type = other DNA
tacattaacggcagtcatgcaggcttcatcatgtatatgaccgacgccgcgcagaaccaggaagatgtgaacaac

SEQ ID NO: 28719 - DNA, 75 bp, synthetic construct
  source 1..75: mol_type = other DNA
ctccgcaacgcgatgaaaagcgccaaaggccctggcaacttccgcaatctgtttatgtactcgcctaacggcaaa

SEQ ID NO: 28720 - DNA, 75 bp, synthetic construct
  source 1..75: mol_type = other DNA
gttcccttcatcatttccggtactctccgttgctgcacctgtcggctggaaccttccggcgtttgtgtcgctgat

SEQ ID NO: 28721 - DNA, 75 bp, synthetic construct
  source 1..75: mol_type = other DNA
ccgtttctttctgtagccggggggcctatgccaatctggggttacccggtaccgagctgagttaccgtacccggt

SEQ ID NO: 28722 - DNA, 75 bp, synthetic construct
  source 1..75: mol_type = other DNA
gaagccctatgctgacctgtaaagagctttttagctattcggcaagtgagttatcagatgaagcgttaaaagccc

SEQ ID NO: 28723 - DNA, 75 bp, synthetic construct
  source 1..75: mol_type = other DNA
ctcagtcgattacgacaacttcctgttcaacgccggtctgctgatgcacatcaccgaacgccagcaggcatggct

SEQ ID NO: 28724 - DNA, 75 bp, synthetic construct
  source 1..75: mol_type = other DNA
caacttctcccagggcgtggagctgccggacccgggtaaatactatggtcgcggcatctatggtgctgcagtgaa

SEQ ID NO: 28725 - DNA, 75 bp, synthetic construct
  source 1..75: mol_type = other DNA
ctgattgacggtgtgcgcctcaactcttcacgttccgacagccgacaactggactctgtcgatccttttaatatc

SEQ ID NO: 28726 - DNA, 75 bp, synthetic construct
  source 1..75: mol_type = other DNA
aggccgccatgtgtgagaaactgcacgaactcgcagaagaactccagaacagcatacagacacgctttgaagcgg

SEQ ID NO: 28727 - DNA, 75 bp, synthetic construct
  source 1..75: mol_type = other DNA
acccgtaccattcacagcatcgacaccgacattaagctcaaccgggcgttgtgggtgatggcagaaacactgctg

SEQ ID NO: 28728 - DNA, 75 bp, synthetic construct
  source 1..75: mol_type = other DNA
taccacgtcccgagtatttttggagaagaccggcacacctcccgcagtgaacggtatgcgtacattcccaccatc

SEQ ID NO: 28729 - DNA, 75 bp, synthetic construct
  source 1..75: mol_type = other DNA
ccgccaccggcacgccaggcgctggcacaggcggcactgacttaccgttatggtgacgaacatcagcccgtcacc

SEQ ID NO: 28730 - DNA, 75 bp, synthetic construct
  source 1..75: mol_type = other DNA
tatactcagcctggcatttactgccagtgcctgaagaagttgacgaccaggactatgagtttgagtcttacgatt

SEQ ID NO: 28731 - DNA, 75 bp, synthetic construct
  source 1..75: mol_type = other DNA
gatgatgcctttttcaacgtggaggcctggatcaacagcgagctggcaaccgaatttgccgaacaggaagaaatt

SEQ ID NO: 28732 - DNA, 75 bp, synthetic construct
  source 1..75: mol_type = other DNA
cccggaagatatcgatcgagctgcagaagatctgaaaaaatgcaaattgatcgttttacaactggaagttcaact

SEQ ID NO: 28733 - DNA, 75 bp, synthetic construct
  source 1..75: mol_type = other DNA
aatcagcgatggtgctctgacgggtttgagttccgctgtgataacggagaaaaactgcgggtcacgttcgcgctg

SEQ ID NO: 28734 - DNA, 75 bp, synthetic construct
  source 1..75: mol_type = other DNA
tgtgctgtggatgttgtatctcgggcggattatctccgggatcactggtgccaccggcgcggttgcggcttcggt

SEQ ID NO: 28735 - DNA, 75 bp, synthetic construct
  source 1..75: mol_type = other DNA
agagcttcgtgaaaacgataaagcgtgactacataagtatcatgcccaaaccagacgggttaacggcagcaaaga

SEQ ID NO: 28736 - DNA, 75 bp, synthetic construct
  source 1..75: mol_type = other DNA
ccctcgattatcgtcactggataatctacgtcagactcccttattccgaacgcccaccgcgtccgtcccgcacat

SEQ ID NO: 28737 - DNA, 75 bp, synthetic construct
  source 1..75: mol_type = other DNA
tcatgctaccgggctaatgaaacacggcagtttgcccggatgttggggcttgaaccgaagaacacggcggtgcgg

SEQ ID NO: 28738 - DNA, 75 bp, synthetic construct
  source 1..75: mol_type = other DNA
cgtttgctttcagggatcacaggagctactggggctgtcgcggcatcggtcattgccgataccacctcagcttct

SEQ ID NO: 28739 - DNA, 75 bp, synthetic construct
  source 1..75: mol_type = other DNA
tgatacaaaaacattactgggacataaagtccaggcaaccaccgatcgttataacgatactcgtggtcaggaatg

SEQ ID NO: 28740 - DNA, 75 bp, synthetic construct
  source 1..75: mol_type = other DNA
catgcgcaaaattgatgaaagtccgtcagcaacaaaacgtcggggtatcagattaaaggcatgggttgatcgata

SEQ ID NO: 28741 - DNA, 75 bp, synthetic construct
  source 1..75: mol_type = other DNA
gtttcattgtttcagacatggggcgagaagggcttgaactccttctggatgaaatgattaacgacctgaatactc

SEQ ID NO: 28742 - DNA, 75 bp, synthetic construct
  source 1..75: mol_type = other DNA
atgtttgattttccccagcccggtgagatttaccgttctgccggttttcccgatgtggccgtggtcggcattctg

SEQ ID NO: 28743 - DNA, 75 bp, synthetic construct
  source 1..75: mol_type = other DNA
tgatggtatcactgcggggatcgggattgtcgccggaaaagacagtgaaggcaggcctgtaagtcaggttgcaat

SEQ ID NO: 28744 - DNA, 75 bp, synthetic construct
  source 1..75: mol_type = other DNA
tctaagtggcgattacacgctgattctggtcgatggacgacgtcagagcggtcgggaatccagaccaaacggcag

SEQ ID NO: 28745 - DNA, 75 bp, synthetic construct
  source 1..75: mol_type = other DNA
cagggctgtatggcacattgctgggggacaataatctgggatacagcatccagagtggttatacccggggagggt

SEQ ID NO: 28746 - DNA, 75 bp, synthetic construct
  source 1..75: mol_type = other DNA
atgggtaaaaacatgggctggctgggcgctgtttcactggatgccacccgtgcgaatgcccggttaccggatgaa

SEQ ID NO: 28747 - DNA, 75 bp, synthetic construct
  source 1..75: mol_type = other DNA
tggaagccagcctgcaggcgtggcagcagaaacaccacgcggtcattctggtgtcgcctgccgtggtacaggggg

SEQ ID NO: 28748 - DNA, 75 bp, synthetic construct
  source 1..75: mol_type = other DNA
aagtgcgacagcgttcgacaagtggggagtgactcccgttgaacgtaaaggccgtgaggcgttttatgatgttgc

SEQ ID NO: 28749 - DNA, 75 bp, synthetic construct
  source 1..75: mol_type = other DNA
gccgatacccttggcagttgtggttacgtttatctggctgtttatccgacaccggcagcgcccgcaatcaccgta

SEQ ID NO: 28750 - DNA, 75 bp, synthetic construct
  source 1..75: mol_type = other DNA
tcgccatggcaaacaagctggcacgaacagtatgggcgataaccgcccatgaccgtaagtatgacaggaaccacg

SEQ ID NO: 28751 - DNA, 75 bp, synthetic construct
  source 1..75: mol_type = other DNA
agaggtttatcaacctacgaggccgtatatcaactcaacaaactggaagagcaggacaagccgcgcgctgatgcg

SEQ ID NO: 28752 - DNA, 75 bp, synthetic construct
  source 1..75: mol_type = other DNA
gaactggctggggaatgtcgttgatgtttttcggaattcttatcattggatacggacttctttattggtggcaca

SEQ ID NO: 28753 - DNA, 75 bp, synthetic construct
  source 1..75: mol_type = other DNA
cgaaccgatcccgccgcacctgatcgaccgctttagtgtggatgttcttcctgatgttttaccggaatttacccc

SEQ ID NO: 28754 - DNA, 75 bp, synthetic construct
  source 1..75: mol_type = other DNA
gaattgattaaacgtcgtaatgacccggactttgttcggcaggttataaatgacgaaacaaaaactgatctggtc

SEQ ID NO: 28755 - DNA, 75 bp, synthetic construct
  source 1..75: mol_type = other DNA
gtggtctgggacggacagaaagccggtagtgcggttggcatactggtactgccgcttgaaggcacagaggcggtg

SEQ ID NO: 28756 - DNA, 75 bp, synthetic construct
  source 1..75: mol_type = other DNA
acaagtcacgacagataaagatacagatacagaattaaaccccacacataacgcgcgcatgcgcgagagtgctcc

SEQ ID NO: 28757 - DNA, 75 bp, synthetic construct
  source 1..75: mol_type = other DNA
aggcgttttattcttactccgcaccgcatatgcgggtgatgcgtgatctgataaagcagcatcgttctcccatgg

SEQ ID NO: 28758 - DNA, 75 bp, synthetic construct
  source 1..75: mol_type = other DNA
ataatacgacgcaaagagcgtatacccggaagcagctgtgaatggaaagatgtgacattagcaccaaaatccaga

SEQ ID NO: 28759 - DNA, 75 bp, synthetic construct
  source 1..75: mol_type = other DNA
gcacgtgcgcgagagtgctccgaccagtgagtcgagtggtacgccgttgcaggcagcagaacctgcatccctgga

SEQ ID NO: 28760 - DNA, 75 bp, synthetic construct
  source 1..75: mol_type = other DNA
gcactggagcaggcgttgtgggcccgtcggccgtccggcacaatccatcacagtgataaaggttctcagtatgta

SEQ ID NO: 28761 - DNA, 75 bp, synthetic construct
  source 1..75: mol_type = other DNA
ggcagaatatgaccgctgtcatcgagccgttttatcccaaggcgggcaatggccgacggccctatccgctggaga

SEQ ID NO: 28762 - DNA, 75 bp, synthetic construct
  source 1..75: mol_type = other DNA
attccggcagaccactgcctgcatgatgttcaggatatgagcgcactgaatcacccgaatgcagacctgagcaaa

SEQ ID NO: 28763 - DNA, 75 bp, synthetic construct
  source 1..75: mol_type = other DNA
atggcgggtgatgcactgacattccgtgtggcgtttgtcgttcgctggctgctgtgggtcgtcaggtttgtggtt

SEQ ID NO: 28764 - DNA, 75 bp, synthetic construct
  source 1..75: mol_type = other DNA
gatgctgcagattatgtcagggagactgaccggtcactgatgcaactggtcaccgcattatgggcaacactggca

SEQ ID NO: 28765 - DNA, 75 bp, synthetic construct
  source 1..75: mol_type = other DNA
gtgcctgctgccgctgctgaccggttgcggaaattcgcgaacggtttacgtgagcgctccggtggcaccactgcc

SEQ ID NO: 28766 - DNA, 75 bp, synthetic construct
  source 1..75: mol_type = other DNA
aacgactggcagacgctggagctggtgttcaccgccggcagtgccacggttactccgaaactgaatggagtggct

SEQ ID NO: 28767 - DNA, 75 bp, synthetic construct
  source 1..75: mol_type = other DNA
cgcttggcgttaatcgagtgaagatattcgaacgctggaaggctatcgacaccagggataagcgtgaaaagttca

SEQ ID NO: 28768 - DNA, 75 bp, synthetic construct
  source 1..75: mol_type = other DNA
agatatgcacacgcaggaactgaaccgcactgaaacggcgcgggaagtccagagaccgagcattgatgctcacct

SEQ ID NO: 28769 - DNA, 75 bp, synthetic construct
  source 1..75: mol_type = other DNA
tttgtattctgtgatgatgagtatacagatattgttcgtattctttttaccggagaggcctgctgtattctgaat

SEQ ID NO: 28770 - DNA, 75 bp, synthetic construct
  source 1..75: mol_type = other DNA
tgggtggcggtcggtgttgctgtgtccccgatgctgtatgggctggcaaaactggtcattgcgttgaaatcgtga

SEQ ID NO: 28771 - DNA, 75 bp, synthetic construct
  source 1..75: mol_type = other DNA
ggagataatcgaacccacacaaaatatggccatcagcgacatacaggcggcgcgctgtgagtcattcaccatcag

SEQ ID NO: 28772 - DNA, 75 bp, synthetic construct
  source 1..75: mol_type = other DNA
ccaaagaacagcagggcgagttggccggaaaagttggctcaacaccaggctacttacggctggttttcaatggtt

SEQ ID NO: 28773 - DNA, 75 bp, synthetic construct
  source 1..75: mol_type = other DNA
atgccaaactggtgcagtaaccgtatgcatttttctggtgaaccggcacagatcgctgagattaaacgactggcc

SEQ ID NO: 28774 - DNA, 75 bp, synthetic construct
  source 1..75: mol_type = other DNA
aagtcggcaacggtgatatgacactggtacgtttggccgacacccggggcacatccattctgattgatgtacata

SEQ ID NO: 28775 - DNA, 75 bp, synthetic construct
  source 1..75: mol_type = other DNA
aagctgcacgttatcagcaagcgttacactcagcgcattgagcgacataatctgaatctgagacaacatctggca

SEQ ID NO: 28776 - DNA, 75 bp, synthetic construct
  source 1..75: mol_type = other DNA
gacggggagctggttactgtcaccattaagactgccgctgcaaccggcaccctgaatgttctgctgcgttatacc

SEQ ID NO: 28777 - DNA, 75 bp, synthetic construct
  source 1..75: mol_type = other DNA
gagattgatcccaataataatcccagctatggcgtgctgtgtgggatgtcagtaatgggatttagtttagtgctg

SEQ ID NO: 28778 - DNA, 75 bp, synthetic construct
  source 1..75: mol_type = other DNA
ccggcagcagacctgcggtgacagcacatccggagcagaaactgctggcaccacgcccgctgtttaccgctgccc

SEQ ID NO: 28779 - DNA, 75 bp, synthetic construct
  source 1..75: mol_type = other DNA
aagtaaagaaatcaagaagaggtctacctcgccatgtaaaaaacccattccttaatgatacaaatatacatacaa

SEQ ID NO: 28780 - DNA, 75 bp, synthetic construct
  source 1..75: mol_type = other DNA
ctgccagcggttatgcacaccccaaaattatccccggcgctatttatctggataagaacggtaacagagtaacgg

SEQ ID NO: 28781 - DNA, 75 bp, synthetic construct
  source 1..75: mol_type = other DNA
gggagaactgagggaatttgaactggcagacggaaactggttactgaacaatgcctggtatgaaagaaacatggc

SEQ ID NO: 28782 - DNA, 75 bp, synthetic construct
  source 1..75: mol_type = other DNA
atggctaatttatcccctgtatctgttgtgcacgaaaaagtgcagatcgttatgacaattgaaaatggccaggta

SEQ ID NO: 28783 - DNA, 75 bp, synthetic construct
  source 1..75: mol_type = other DNA
gaacatattgaccaccagcagtattgcaaaatcctggcggacactgagcaggaaaagcacctgaaaaaattgcgc

SEQ ID NO: 28784 - DNA, 75 bp, synthetic construct
  source 1..75: mol_type = other DNA
tccggaaaatgattcaaacaccgtgcggcaaaagtattaccagtgtaacaatctggaatgcggcgtatgcttctc

SEQ ID NO: 28785 - DNA, 75 bp, synthetic construct
  source 1..75: mol_type = other DNA
catttcagcgcggcagcccgtcgagggattatttctgacaggtttgtagaagcaattttgcagttttggcgcgaa

SEQ ID NO: 28786 - DNA, 75 bp, synthetic construct
  source 1..75: mol_type = other DNA
gaaagccgagatgctgcgcttgcaaaaaacggtagaagaacgttttgggcacgagattagcgaagatgctctgcg

SEQ ID NO: 28787 - DNA, 75 bp, synthetic construct
  source 1..75: mol_type = other DNA
aaggtgaaattgtcagtttcaacactgatggttggatcaacgtcacaggtgttgctgagagatttgggaaacgca

SEQ ID NO: 28788 - DNA, 75 bp, synthetic construct
  source 1..75: mol_type = other DNA
gccatttgccgatttccggctccataaaagcacgtggcgggatttatgaagtcctggcccatgctgaaaaactgg

SEQ ID NO: 28789 - DNA, 75 bp, synthetic construct
  source 1..75: mol_type = other DNA
gcttcggctttggcggcgaagagagcgcaggggcttccttcctgcgtttcgacggcacgccgtggtccaccgata

SEQ ID NO: 28790 - DNA, 75 bp, synthetic construct
  source 1..75: mol_type = other DNA
cgcacattctggcgatcgctcaggcaattgctgaagaacgtgcgaaaaacggcatcactggcccttgctatgtgg

SEQ ID NO: 28791 - DNA, 75 bp, synthetic construct
  source 1..75: mol_type = other DNA
gtggataagtcgtccggtgagctggtgacactgacaccaaacaataacaacaccgtacaacctgtggcgctgatg

SEQ ID NO: 28792 - DNA, 75 bp, synthetic construct
  source 1..75: mol_type = other DNA
gatgccttaccggaaagtgcagcccgtaaggcactgagattaccgaagcctgttgtgccgtctgttacccgggaa

SEQ ID NO: 28793 - DNA, 75 bp, synthetic construct
  source 1..75: mol_type = other DNA
atgcaggggcgtgtcctgctggagcctgagccggaacgttattcatctttcgccagtggtgccgttccggcggca

SEQ ID NO: 28794 - DNA, 75 bp, synthetic construct
  source 1..75: mol_type = other DNA
cgcgaccagacatcagaatcactcgatcaacttgctcagcagaatctggttgcctggatgattgacgtcatccgt

SEQ ID NO: 28795 - DNA, 75 bp, synthetic construct
  source 1..75: mol_type = other DNA
cacgcaataagcggtacgcaggagagggagttatcgctggccgaattatcctggtgggcggcctgcaatcaggtg

SEQ ID NO: 28796 - DNA, 75 bp, synthetic construct
  source 1..75: mol_type = other DNA
accgtggcatttgaagagaagtatggctcccagctggagctgatatttcgttttatcgaccgtgtgttggcaatt

SEQ ID NO: 28797 - DNA, 75 bp, synthetic construct
  source 1..75: mol_type = other DNA
tgcggcggatgtggacaaatgggcgctgtatgtcatcggccagcattgcgatcagtcggtgccggacggttttgg

SEQ ID NO: 28798 - DNA, 75 bp, synthetic construct
  source 1..75: mol_type = other DNA
ggaaaaacggtgctgaaatttataaccgtaccgcgctggataatacgctgatttacagtggtgttattgatatgc

SEQ ID NO: 28799 - DNA, 75 bp, synthetic construct
  source 1..75: mol_type = other DNA
ttaaggggaaactgtcagccaatcagattgaaggcgatattgtcaaaacggtcagcaagtctttcccccgcacga

SEQ ID NO: 28800 - DNA, 75 bp, synthetic construct
  source 1..75: mol_type = other DNA
attggtcacgggcagggcggaatgggaacaaaagcacatgatctctttgtgttgcctttgtgcagaaagcatcac

SEQ ID NO: 28801 - DNA, 75 bp, synthetic construct
  source 1..75: mol_type = other DNA
ctgggcgaagcgttcagctatgtactgaatcagtgggatgccctctgttattacagtgatgacggtctggcggag

SEQ ID NO: 28802 - DNA, 75 bp, synthetic construct
  source 1..75: mol_type = other DNA
aatccagactgggcgaagcgttcagctatgtactgaatcagtgggacgccctctgttattacagtgatgacggac

SEQ ID NO: 28803 - DNA, 75 bp, synthetic construct
  source 1..75: mol_type = other DNA
tgcatcagggaataaccagtctcaactggttgccaccatagtccctgatgagcagcgcatcagcttctggccgca

SEQ ID NO: 28804 - DNA, 75 bp, synthetic construct
  source 1..75: mol_type = other DNA
gtgccggggcgtataccggtcgtgaagtacaggatattcccggtgtgctggccgtgtttgctgaacgccgtaagg

SEQ ID NO: 28805 - DNA, 75 bp, synthetic construct
  source 1..75: mol_type = other DNA
caggaagcactgggttgcgttgtgcaacttctgtgatgacggtctggcggaggcggacaataacacagcggaaag

SEQ ID NO: 28806 - DNA, 75 bp, synthetic construct
  source 1..75: mol_type = other DNA
agtgcaggatattcccggcgttcttgccgtgtttgcagaacgccgtaaggacagttttggctcgtatgtccggct

SEQ ID NO: 28807 - DNA, 75 bp, synthetic construct
  source 1..75: mol_type = other DNA
cagttgctcgatagagtaactccgtcacagtgggctgcaatcggtgtgctgggtagtctggtatttggcctgctg

SEQ ID NO: 28808 - DNA, 75 bp, synthetic construct
  source 1..75: mol_type = other DNA
gccatattctgagcgtactgccggaatggccctccaaccgtgttgacgaactcctgccatggaacgtagttctca

SEQ ID NO: 28809 - DNA, 75 bp, synthetic construct
  source 1..75: mol_type = other DNA
tgcactggcacgtgccgaagaaaagatcgaagaggaggagcgggaaatagaacatctgagggcccagatagaaaa

SEQ ID NO: 28810 - DNA, 75 bp, synthetic construct
  source 1..75: mol_type = other DNA
gaagaagccctgaagcgaatcagtgaactgtacgccatcgaggatgaaatacggggattaccggagtcagagcgt

SEQ ID NO: 28811 - DNA, 75 bp, synthetic construct
  source 1..75: mol_type = other DNA
gtatccaaatcattcccgaaaaaggctggtacgtggggtaacacggaaacaccaaacgggacggttacagtcacc

SEQ ID NO: 28812 - DNA, 75 bp, synthetic construct
  source 1..75: mol_type = other DNA
atgctaatcgccctgatcgtcatctgtttaaccgtcatagtgacggcactggtaacgaggaaagacctctgcgag

SEQ ID NO: 28813 - DNA, 75 bp, synthetic construct
  source 1..75: mol_type = other DNA
gacctctgcgaggtacgaatccgaaccgaccagacggaggtcgctgtcttcacagcttacgaacttggggagtaa

SEQ ID NO: 28814 - DNA, 75 bp, synthetic construct
  source 1..75: mol_type = other DNA
ggtaacgaggaaagacctctgcgaggtgcgaatccgaaccggccagacggaggtcgctgtcttcacagcttacga

SEQ ID NO: 28815 - DNA, 75 bp, synthetic construct
  source 1..75: mol_type = other DNA
ttgccatcacggcggtgcagcacgtaccggaaaaagaagccatcgtggataacggggccagctttgagccgcagt

SEQ ID NO: 28816 - DNA, 75 bp, synthetic construct
  source 1..75: mol_type = other DNA
attcccgtgcaccggagcggtggccatcagggaccattaccgtcagggtttatgacgatcagccgtttgaccggc

SEQ ID NO: 28817 - DNA, 75 bp, synthetic construct
  source 1..75: mol_type = other DNA
ttacagcattggtatatcgacaatttatcgttaccaccccgcaggagaatcaagtggaacaattgagaagagtaa

SEQ ID NO: 28818 - DNA, 75 bp, synthetic construct
  source 1..75: mol_type = other DNA
atgaaaatcaccaggtatacggtgtgcgtaaagtctggcgtcagttgttacgggaaggtatcagagtggccagat

SEQ ID NO: 28819 - DNA, 75 bp, synthetic construct
  source 1..75: mol_type = other DNA
ccgcgtaaactgtcagttcgtggcagaacgtcctgaccagctgtgggtggctgattttacttacgtcagcacatg

SEQ ID NO: 28820 - DNA, 75 bp, synthetic construct
  source 1..75: mol_type = other DNA
ccgtaagagctggaaaaaccgtgcagaagtggaactggccacactaacgtgggtggactggtataacaatcgacg

SEQ ID NO: 28821 - DNA, 75 bp, synthetic construct
  source 1..75: mol_type = other DNA
aacgcgatggcggagagcatcaatggtctttacaaagcgaaggtaatacaccgtaagagctggaaaaaccgtgca

SEQ ID NO: 28822 - DNA, 75 bp, synthetic construct
  source 1..75: mol_type = other DNA
atgggaatcatcaggtatacggtgtgcgtaaagtctggagtcagttgttacgggaaggaatcagggtagccagat

SEQ ID NO: 28823 - DNA, 75 bp, synthetic construct
  source 1..75: mol_type = other DNA
gtctcaggggctgcggcacacacccggtgacattattgaaatctgtgataatgactatgccgggaccctgaccgg

SEQ ID NO: 28824 - DNA, 75 bp, synthetic construct
  source 1..75: mol_type = other DNA
aatttataaccgtaccgcgctggataatacgctgatttacagtggcgttattgatatgcctgccggtcacggtca

SEQ ID NO: 28825 - DNA, 75 bp, synthetic construct
  source 1..75: mol_type = other DNA
gaccatacagcaaatccagcgggttcagtcagacacgcgcaatgagctgaatgccatgtatatgctgaaggtgca

SEQ ID NO: 28826 - DNA, 75 bp, synthetic construct
  source 1..75: mol_type = other DNA
acgcgcaccattacatccgcgaacattgaccgcctgcgggtcaccttcggggtgcagtcactgttggagaccacc

SEQ ID NO: 28827 - DNA, 75 bp, synthetic construct
  source 1..75: mol_type = other DNA
gaaaacaaaaaacggtattccctatgtggccgggattggcgcggggattgaggatgttgatggtcagacgctgag

SEQ ID NO: 28828 - DNA, 75 bp, synthetic construct
  source 1..75: mol_type = other DNA
gtgaggtgaccctgccggagacaggtgccgccacggtgaacctgattaacggcagcggtaagccggtgagtgtgg

SEQ ID NO: 28829 - DNA, 75 bp, synthetic construct
  source 1..75: mol_type = other DNA
gtggtggtggatgataacggcgtggggttccgctacagcttcagtgccctgaaggaccggcacacggcggtggag

SEQ ID NO: 28830 - DNA, 75 bp, synthetic construct
  source 1..75: mol_type = other DNA
gaatgcgaattccgggacgctcaacaacgtcacgattaacgagaactgtcgggttctgggaaaactgtccgcgaa

SEQ ID NO: 28831 - DNA, 75 bp, synthetic construct
  source 1..75: mol_type = other DNA
ggtaagaatcagtgatgatcagaaatttgaccggcaggtcatgataccgccagtgttattccgcggtggtaagca

SEQ ID NO: 28832 - DNA, 75 bp, synthetic construct
  source 1..75: mol_type = other DNA
ccgccccggactgggccatgaaacaggattttcgctgcggctgctggctgatggagaaaccggaaaccgcaatga

SEQ ID NO: 28833 - DNA, 75 bp, synthetic construct
  source 1..75: mol_type = other DNA
atccgcaaaaaagtagggcgacagaatttttgtttctcattctgtttatcgtattgatgataccgatatcccctc

SEQ ID NO: 28834 - DNA, 75 bp, synthetic construct
  source 1..75: mol_type = other DNA
cctgacagtggccgtttttatgaaccggacacagttctggatcaccgtgaacgggtacgcctttttattcagatc

SEQ ID NO: 28835 - DNA, 75 bp, synthetic construct
  source 1..75: mol_type = other DNA
agggcgatcttgttttacgtactttagccatgcccgccgataccaatgccaatggtgacatctttggtggttggt

SEQ ID NO: 28836 - DNA, 75 bp, synthetic construct
  source 1..75: mol_type = other DNA
gatgacgccagtttttcccgtattcaggaagcggtggaaggcgtcgcaacgtcacaggccgacattatcgaccgt

SEQ ID NO: 28837 - DNA, 75 bp, synthetic construct
  source 1..75: mol_type = other DNA
tctgaaccaatcgggcaacgctataaagcaacagaagcattatttaagtatgtcgcggttgatcccgaaggaaaa

SEQ ID NO: 28838 - DNA, 75 bp, synthetic construct
  source 1..75: mol_type = other DNA
atgacatcagacaatatcgctgaatatgttggtgagaataatcaatttactgagaagcctgtaactgaatacccc

SEQ ID NO: 28839 - DNA, 75 bp, synthetic construct
  source 1..75: mol_type = other DNA
cccgaccgaatccgtggccattgatattgcttatgaaggctccggcagcggtgactggcgtaccaacagtttcat

SEQ ID NO: 28840 - DNA, 75 bp, synthetic construct
  source 1..75: mol_type = other DNA
ttggagggaataaaaaaactcagacagtcgatttagataaagccgttagttatctgcaagattttaaaaagaggt

SEQ ID NO: 28841 - DNA, 75 bp, synthetic construct
  source 1..75: mol_type = other DNA
acctttccacttttccggctgtaacgcagcgggcactggaaaccatgaacacagccagaaacgcatggcttgaag

SEQ ID NO: 28842 - DNA, 75 bp, synthetic construct
  source 1..75: mol_type = other DNA
agcggcagctatcggaaatcgcctgctgaaagacggtcaggcagtgattgtggttaccgtggctgatgttatgag

SEQ ID NO: 28843 - DNA, 75 bp, synthetic construct
  source 1..75: mol_type = other DNA
tggttaccgtggctgatgttatgagtgccctccacgccagctatgacgatgggcagtcaggcgaaaaatttttgc

SEQ ID NO: 28844 - DNA, 75 bp, synthetic construct
  source 1..75: mol_type = other DNA
attcatgtattgaaacgaccatcaatcgtctttctagcgaagctggtacgatggttagtaatttctatcttgacc

SEQ ID NO: 28845 - DNA, 75 bp, synthetic construct
  source 1..75: mol_type = other DNA
tgcgcactgacggcacggtgacgcagccgcgtttaaaacaggttgccctgtcggcaatttcggaggtcaacgcag

SEQ ID NO: 28846 - DNA, 75 bp, synthetic construct
  source 1..75: mol_type = other DNA
gcagatgctgggatatgcctcgctggcagaggttccggcggaacagctggacggcaaaagtgagcgcattcagca

SEQ ID NO: 28847 - DNA, 75 bp, synthetic construct
  source 1..75: mol_type = other DNA
gcaatctggcgctgcatgttgacggtgcgcgcatctttaatgccgtggtggcttacggctgcgaactgaaagaga

SEQ ID NO: 28848 - DNA, 75 bp, synthetic construct
  source 1..75: mol_type = other DNA
cagagagcctccagtgtccctctgatgcaactcgatgcccaattatactggaaacaccagaagaaggggtatttg

SEQ ID NO: 28849 - DNA, 75 bp, synthetic construct
  source 1..75: mol_type = other DNA
acgtctttatcccgtgaagtatcagcctgttgaaagtgcagcaaaacaggttaaaacgattctcgaacttatcag

SEQ ID NO: 28850 - DNA, 75 bp, synthetic construct
  source 1..75: mol_type = other DNA
aaggcgctgcacggcagaatgccatcaatgcttcgcttgcacagggcgttgaggcgtccctgcgctggctgacgg

SEQ ID NO: 28851 - DNA, 75 bp, synthetic construct
  source 1..75: mol_type = other DNA
caggatggcgtggcgtcatccgtggtctgtcatgcagaacgtgtgggacacgcgcggctggcgctttcggtgcgc

SEQ ID NO: 28852 - DNA, 75 bp, synthetic construct
  source 1..75: mol_type = other DNA
caggagcaggtctataaggctgaaaaagcggagtcccagccaccgagccatggcaccacaaaacgtgaatacgca

SEQ ID NO: 28853 - DNA, 75 bp, synthetic construct
  source 1..75: mol_type = other DNA
agagatggagaactatattctgcgtctcaacgccattaatcatggcgatacggcaaaaacggaagcagtgaaagc

SEQ ID NO: 28854 - DNA, 75 bp, synthetic construct
  source 1..75: mol_type = other DNA
gcgagagagaagatccgccatgaactgcgaacacttgagcagggcgttcccgcagaggccggacgtcagcaggaa

SEQ ID NO: 28855 - DNA, 75 bp, synthetic construct
  source 1..75: mol_type = other DNA
ccatttgaaaaactgaagggtaatctcaggggatttctttcatgggttgacagtgccaaatctgatggcagttac

SEQ ID NO: 28856 - DNA, 75 bp, synthetic construct
  source 1..75: mol_type = other DNA
cccactggagctcccggttggcgtgctgaccgccattatcggtgcgccgtggtttgtctggttgcttgtgagaat

SEQ ID NO: 28857 - DNA, 75 bp, synthetic construct
  source 1..75: mol_type = other DNA
cagtctattcaaaacatgaagacggcgggtttattgatagcgataacagcatgctgaatgttgcagtctcccgtg

SEQ ID NO: 28858 - DNA, 75 bp, synthetic construct
  source 1..75: mol_type = other DNA
atcatatgactctgaaaagggtagcttacaatggagatataataaaaattcaggagtgggaacattaagtcaaga

SEQ ID NO: 28859 - DNA, 75 bp, synthetic construct
  source 1..75: mol_type = other DNA
gatgcttatgctaaagggcatttaggcataagtgtattgggtaacggtggaggggttggtctccaggccggagct

SEQ ID NO: 28860 - DNA, 75 bp, synthetic construct
  source 1..75: mol_type = other DNA
ggcgcgcacgctggctgaaatgctgacccaaaacggcgtcccgatgagccgttaccgtgccgggcgtctgatgaa

SEQ ID NO: 28861 - DNA, 75 bp, synthetic construct
  source 1..75: mol_type = other DNA
catgatatcgatgccagagctacacaagactttaaagaggccagcgattactttaccagtcgcaaggtcagtgag

SEQ ID NO: 28862 - DNA, 75 bp, synthetic construct
  source 1..75: mol_type = other DNA
tcggtcagaaatgcgttttctgggcggcgattattttcctggttctgctgctggtgagcggcgtgattatctggc

SEQ ID NO: 28863 - DNA, 75 bp, synthetic construct
  source 1..75: mol_type = other DNA
agtccgtcagcagaaaaatcagtgcccgtcatttcgcaggtatttttcagtggctgaccggcattcgtactgaaa

SEQ ID NO: 28864 - DNA, 75 bp, synthetic construct
  source 1..75: mol_type = other DNA
gctgattaattttgccgttcttaacgtcacagacagaaagagcgaggatatcgataccattgatggtaactggca

SEQ ID NO: 28865 - DNA, 75 bp, synthetic construct
  source 1..75: mol_type = other DNA
atgtatgattttgtgattattggcggcggcatcatcggcatgtcgaccgccatgcaactgattgatgtctatccg

SEQ ID NO: 28866 - DNA, 75 bp, synthetic construct
  source 1..75: mol_type = other DNA
tatggctgatgtcatcgaccagcgtcgttactggacacaaaagttactgtcccgtgagttacagcggtcattacg

SEQ ID NO: 28867 - DNA, 75 bp, synthetic construct
  source 1..75: mol_type = other DNA
atgagcaaagaattttacgcaagactggcagctattcaggagaatctgaacgcgccaaagaatcagtacaactca

SEQ ID NO: 28868 - DNA, 75 bp, synthetic construct
  source 1..75: mol_type = other DNA
atgcacaaaacagaaccaaaaatcgtcgcgcccggatacacaaatgaggaaatttacgagtggatggcaaagaag

SEQ ID NO: 28869 - DNA, 75 bp, synthetic construct
  source 1..75: mol_type = other DNA
ctgagccggagtggtactacgtcatcgtactggccgggcaatccaatgccatggcttacggtgaagggcttccgc

SEQ ID NO: 28870 - DNA, 75 bp, synthetic construct
  source 1..75: mol_type = other DNA
gcgaatttgacatgagcgctgccacctacgcacagcaaccggacctgttcacggccatgctgaagcagttccgta

SEQ ID NO: 28871 - DNA, 75 bp, synthetic construct
  source 1..75: mol_type = other DNA
cattcggcgcatttaataacgaatggcatacgctgggcttccgttttgccggtaacaacagtattgaggtgacgc

SEQ ID NO: 28872 - DNA, 75 bp, synthetic construct
  source 1..75: mol_type = other DNA
cccgaccgagtccgtggccattgatgtcgcttatgaaggttccggcagtggcgactggcgcactgacggtttcat

SEQ ID NO: 28873 - DNA, 75 bp, synthetic construct
  source 1..75: mol_type = other DNA
cgccggacgtagcggacgccgtgtgcgtaaacaattcgccaccaaaggcgaagcactggccttcgagcgatacac

SEQ ID NO: 28874 - DNA, 75 bp, synthetic construct
  source 1..75: mol_type = other DNA
ggccagccaggattcggcacgctggggtgtgggtaaaccgttatatcaggacctgatcgcacgcaccaaagcggc

SEQ ID NO: 28875 - DNA, 75 bp, synthetic construct
  source 1..75: mol_type = other DNA
ttggtgacagcgaacagctgcacgcgctgattgaccgtctggatgatattcctgatgatgagctgaaaaagaact

SEQ ID NO: 28876 - DNA, 75 bp, synthetic construct
  source 1..75: mol_type = other DNA
cttctgttcacaatggaaatggcgaacatccagattggtgaacgcatggtatctgcggctggaggaatgccggta

SEQ ID NO: 28877 - DNA, 75 bp, synthetic construct
  source 1..75: mol_type = other DNA
tcttgatctgcagacagagaacattgttctgaaagggctgaatcactggagccgtggacgcacaatggtggtggt

SEQ ID NO: 28878 - DNA, 75 bp, synthetic construct
  source 1..75: mol_type = other DNA
aaggaggggtggcagccatttggcagtccggtggccatcacgccttataccctgatgcaggccattgcggcggaa

SEQ ID NO: 28879 - DNA, 75 bp, synthetic construct
  source 1..75: mol_type = other DNA
cagaggagccaggcaaccgtccgacgacctcagcgccttctgttgcgccagaatattactatgtgatcgcgcttg

SEQ ID NO: 28880 - DNA, 75 bp, synthetic construct
  source 1..75: mol_type = other DNA
tggccggcactgacgtactatgcgaacgatggctgggtggaaatcgataacaacatcgctgaaaatgccctgcgg

SEQ ID NO: 28881 - DNA, 75 bp, synthetic construct
  source 1..75: mol_type = other DNA
cgcattgaaatggagaatgaaatattaaaaaaggctactgtagattcaatctgtcaatgcaacacccctttcaat

SEQ ID NO: 28882 - DNA, 75 bp, synthetic construct
  source 1..75: mol_type = other DNA
tgggtgattaaatgcgcattagaaaccaaagcggatctcgcctggctagttacaggaatcgaaacaccaaatagt

SEQ ID NO: 28883 - DNA, 75 bp, synthetic construct
  source 1..75: mol_type = other DNA
gatagaagccgggctgagtacctacgagaaagagtgtgcaaaacgcggcgatgactatcaggaaatttttgccca

SEQ ID NO: 28884 - DNA, 75 bp, synthetic construct
  source 1..75: mol_type = other DNA
cgcgccggtcgttcgcggacgtggtgggctccctcggtcggtgagcaggttctgctgctggcaatcggtggcgag

SEQ ID NO: 28885 - DNA, 75 bp, synthetic construct
  source 1..75: mol_type = other DNA
gataatccgcttattaatattctggagaagttctccagctggtatgacacgaataacgtgacactgggcggagtc

SEQ ID NO: 28886 - DNA, 75 bp, synthetic construct
  source 1..75: mol_type = other DNA
gctgcggctttaacgaggctgccgcatcgttctcatggaacagcccgaaaaaggccattaacccttatctggacc

SEQ ID NO: 28887 - DNA, 75 bp, synthetic construct
  source 1..75: mol_type = other DNA
cagcaaactatgacctacgcacactttgcaccggatttcttacaagatgcagtgactcttaacccggtgtcagga

SEQ ID NO: 28888 - DNA, 75 bp, synthetic construct
  source 1..75: mol_type = other DNA
atatttctattattcccgattacagacaagcctggaaagtggaacataaattatcggatattctattgttgacta

SEQ ID NO: 28889 - DNA, 75 bp, synthetic construct
  source 1..75: mol_type = other DNA
ccgcactattccgctgaactccctggcgcggcaggaggaagacttagacctgctgaaaacggctgccccgacggt

SEQ ID NO: 28890 - DNA, 75 bp, synthetic construct
  source 1..75: mol_type = other DNA
gcagcggctttaacgaggtcgcagcagcattctcatggagcagcccgaaaaaggccattaacccttatctggacc

SEQ ID NO: 28891 - DNA, 75 bp, synthetic construct
  source 1..75: mol_type = other DNA
tcatcggtgagcgttcagaacgcgcagaacgttttgctgcgttattacaggaaggcgcgattaagcaaaatatcc

SEQ ID NO: 28892 - DNA, 75 bp, synthetic construct
  source 1..75: mol_type = other DNA
aaattgatggatttgtcgatcaataaaaactggatcgacaaagaagaatatccgcaatccgcagccatcgacctg

SEQ ID NO: 28893 - DNA, 75 bp, synthetic construct
  source 1..75: mol_type = other DNA
ccggcaactggctgaaatctcagcaatgacagaaagtattggcggtaaaaccgcactggactgggcgatgaaaca

SEQ ID NO: 28894 - DNA, 75 bp, synthetic construct
  source 1..75: mol_type = other DNA
tgaaatctggcgtgacctgatgcaacgttcagggatgctttccttaatggatgcacaggcccgtgatacatggta

SEQ ID NO: 28895 - DNA, 75 bp, synthetic construct
  source 1..75: mol_type = other DNA
accggtgggggtttcatcttatcaccgggcaacaggcagatcgacttgccgacctggaaagaatgctgtatctgt

SEQ ID NO: 28896 - DNA, 75 bp, synthetic construct
  source 1..75: mol_type = other DNA
ccggggaaacatcacccttcgtctggatgatcacattcagtctgttcagggtaaagagagctatgaagatgagat

SEQ ID NO: 28897 - DNA, 75 bp, synthetic construct
  source 1..75: mol_type = other DNA
tgagctggaattacaaaaccaactccccctgtaaatttggtaataaaattatcgtcaacaatctggtgagatggg

SEQ ID NO: 28898 - DNA, 75 bp, synthetic construct
  source 1..75: mol_type = other DNA
ggggtgatcaacgttttcagaggactgagctgggattacaaaaccaattgcccctgtaaatttggcagtaaaatt

SEQ ID NO: 28899 - DNA, 75 bp, synthetic construct
  source 1..75: mol_type = other DNA
ggctctcaaaaatcgtaaggcaactttgttacaacatcatgggcttatcgcttgtgaggtgaatctggaaaaagc

SEQ ID NO: 28900 - DNA, 75 bp, synthetic construct
  source 1..75: mol_type = other DNA
tcgatctcggaaagcactccttccacattcattgtcaagacaagtctggtaaggctcttctgcgtaaaaaattta

SEQ ID NO: 28901 - DNA, 75 bp, synthetic construct
  source 1..75: mol_type = other DNA
tacgggttagcgatgaggagcacgcccggttactggaacgctgcgagggtaaacgactggcagaatggatgcggc

SEQ ID NO: 28902 - DNA, 75 bp, synthetic construct
  source 1..75: mol_type = other DNA
cggaagtggtcaacggacatacggacgttatctgctcaacctcagtcagccacattctggctgtacgaaagagta

SEQ ID NO: 28903 - DNA, 75 bp, synthetic construct
  source 1..75: mol_type = other DNA
atcgtcaacaacctggtgaggtgggaccggtgggggtttcatcttatcaccgggcaacaggcagatcgacttgcc

SEQ ID NO: 28904 - DNA, 75 bp, synthetic construct
  source 1..75: mol_type = other DNA
cgataaacattacgggatggggcgaaactgccacctgttcgaaatgacgcgcaaatgggcttacagggcgattcg

SEQ ID NO: 28905 - DNA, 75 bp, synthetic construct
  source 1..75: mol_type = other DNA
ccagacattaacgctgctggagaagctcaacgaactggacgcggatgaacaggcagatatctgtgaatcgcttca

SEQ ID NO: 28906 - DNA, 75 bp, synthetic construct
  source 1..75: mol_type = other DNA
tgtttggccttgtcaccgggatggcggaggacctgcagagtctggtgggggccacggtggtccgccgccgggtgt

SEQ ID NO: 28907 - DNA, 75 bp, synthetic construct
  source 1..75: mol_type = other DNA
gttgaggactaccgctgtgccgcactggtggaaaacatccagattggcgacttcagcgccgccgcagcagaaacc

SEQ ID NO: 28908 - DNA, 75 bp, synthetic construct
  source 1..75: mol_type = other DNA
ctatactatgaaatcgactcgcgagttttttttcatggatgggataataaaagcatacaatatgttactgagatt

SEQ ID NO: 28909 - DNA, 75 bp, synthetic construct
  source 1..75: mol_type = other DNA
taactctgtttgtaattatttcctttatttatactatagatataaatcgttataatctctctgcaatagtctcag

SEQ ID NO: 28910 - DNA, 75 bp, synthetic construct
  source 1..75: mol_type = other DNA
aagctaccttcgccatgtgcttggcgtcatagcagactggccggtcaaccgggtcagcgaactgcttccgtggcg

SEQ ID NO: 28911 - DNA, 75 bp, synthetic construct
  source 1..75: mol_type = other DNA
agtggagccagaaagctacctccgctatgtccttgacgtcatagccgactggccgataaaccgggtcggcgaact

SEQ ID NO: 28912 - DNA, 75 bp, synthetic construct
  source 1..75: mol_type = other DNA
cggaaggacagatgcagtaaatgcatgcgcgggtgtgagatgcgcggcatggtggctaatttcggcggtttcctt

SEQ ID NO: 28913 - DNA, 75 bp, synthetic construct
  source 1..75: mol_type = other DNA
gtgctggcgacaccgacggagacggacggggcgctgtttcccggtcgcatcatgctggcgaacacctgtatgtgg

SEQ ID NO: 28914 - DNA, 75 bp, synthetic construct
  source 1..75: mol_type = other DNA
gacttcccttgtgattaaccgccagttgtggctgtaccacgacagcggggatgcaggactgacccatctttaccg

SEQ ID NO: 28915 - DNA, 75 bp, synthetic construct
  source 1..75: mol_type = other DNA
agcgactggggtatctgcgaagttaacctgatgccaggcaacgaccgcgtgctgatcgaaaacctgaaaaaacag

SEQ ID NO: 28916 - DNA, 75 bp, synthetic construct
  source 1..75: mol_type = other DNA
gccaggacgaaggctaagaatcttaaggccataccgctgtcgtattttgaagctcatgcggaacttaaagcgacc

SEQ ID NO: 28917 - DNA, 75 bp, synthetic construct
  source 1..75: mol_type = other DNA
gatgggcacaccaagacgttctgctgatatagcaaaggaagaatccagaaacgctctaaatttcatgataatgga

SEQ ID NO: 28918 - DNA, 75 bp, synthetic construct
  source 1..75: mol_type = other DNA
atgagcgccgcgcttcaatacttcgaagaaaatttacccctccgcccctatcacacggatgatctcgctttcggc

SEQ ID NO: 28919 - DNA, 75 bp, synthetic construct
  source 1..75: mol_type = other DNA
cttcgcatctccggcaaagggcgtgcgcttcttgcgcggtacatccagcagaaccagcctcatgcgcagttctgg

SEQ ID NO: 28920 - DNA, 75 bp, synthetic construct
  source 1..75: mol_type = other DNA
gaaaatcgtgaactgcgccgcagtaacgatatccttcgccaggcttccgcttattttgcgaaggcggagttcgac

SEQ ID NO: 28921 - DNA, 75 bp, synthetic construct
  source 1..75: mol_type = other DNA
tttaaatttgtcggagccaacattttgcgcgtctggcttaacttcgaagaacgtcgcaacccaacgcaaggagcg

SEQ ID NO: 28922 - DNA, 75 bp, synthetic construct
  source 1..75: mol_type = other DNA
gatgcgtgatgcgcagttgtggagccacatcgaatttcaccccgaatgcaacgcgatttacgcagcactggactg

SEQ ID NO: 28923 - DNA, 75 bp, synthetic construct
  source 1..75: mol_type = other DNA
ttagtcaaagcctttgctaagaccgataaagattcgcttttttggggcgaacagaccatcgaacgtaaaaacgtt

SEQ ID NO: 28924 - DNA, 75 bp, synthetic construct
  source 1..75: mol_type = other DNA
atggaatttaaagatttaccaacgccattacaggaaatggcatcgaatatagttcgttcacaactggctactctt

SEQ ID NO: 28925 - DNA, 75 bp, synthetic construct
  source 1..75: mol_type = other DNA
acgatggttacgcagggctatgagtatcgtcgtgatgacgatatggcattgtggagctctgcagatctgacttat

SEQ ID NO: 28926 - DNA, 75 bp, synthetic construct
  source 1..75: mol_type = other DNA
caaagaaacaactttgtttatggcaggctcaaagagagcgcatgaatgagcgcgaatttctttccgtcccatccg

SEQ ID NO: 28927 - DNA, 75 bp, synthetic construct
  source 1..75: mol_type = other DNA
aggacaacttcacatggcaactcaaacaggcacagagttatcaggaaacgtttgatcgctttgcatcctggtgtg

SEQ ID NO: 28928 - DNA, 75 bp, synthetic construct
  source 1..75: mol_type = other DNA
acccgctggccaaccgcgtccagtgctccatcaccacgctggccattgagtgcggactggcgacagagtccggtg

SEQ ID NO: 28929 - DNA, 75 bp, synthetic construct
  source 1..75: mol_type = other DNA
tgaccgaaaccgatcatgccaaccctgatccggaaatcgtggatattgcctgcggtcgctcctctgccccgatac

SEQ ID NO: 28930 - DNA, 75 bp, synthetic construct
  source 1..75: mol_type = other DNA
gtcgaaagcaccacttgggttggccttatttctggcaaaagttggtgttcaggacgctcagtttgcgattgaagg

SEQ ID NO: 28931 - DNA, 75 bp, synthetic construct
  source 1..75: mol_type = other DNA
agcaatggagctacgttggcagtaaagcccggctacactggctctggtacgcgtacaacaccaaaacaggcggtg

SEQ ID NO: 28932 - DNA, 75 bp, synthetic construct
  source 1..75: mol_type = other DNA
agcaacagaagggtaagcgtgcagcaagaaccgtattgacggggatgtgttattcagtcggcagtgctacgcgcc

SEQ ID NO: 28933 - DNA, 75 bp, synthetic construct
  source 1..75: mol_type = other DNA
agggaaaacatccccccaaaaaatccagtcgatgccgacaaattactggctgcctcgcgtggagaattcgttgaa

SEQ ID NO: 28934 - DNA, 75 bp, synthetic construct
  source 1..75: mol_type = other DNA
ccagaaaactttctgtcgcagtttcccgctgcattgcagccatggacgatgcaggctacgacgaggatgatttca

SEQ ID NO: 28935 - DNA, 75 bp, synthetic construct
  source 1..75: mol_type = other DNA
cggaatatgatccgcttatcgggtgctacattccgaccgatatcacgttcacaccggcgctgtttgctgccctcg

SEQ ID NO: 28936 - DNA, 75 bp, synthetic construct
  source 1..75: mol_type = other DNA
tgctacgtccaaattatggtggggcgtgcaggggcatcgcaagatgcgccgggttctatgttgaccggttacgcc

SEQ ID NO: 28937 - DNA, 75 bp, synthetic construct
  source 1..75: mol_type = other DNA
tcgtgtagctggtaaagagaagctattggcactaggtgtgtatcctgaggttactctagccgatgctcgggcaaa

SEQ ID NO: 28938 - DNA, 75 bp, synthetic construct
  source 1..75: mol_type = other DNA
gcccaaattatggtggggcgtgcagggccaacttcggttgggccgggttctatgttgaccggtatttccacccct

SEQ ID NO: 28939 - DNA, 75 bp, synthetic construct
  source 1..75: mol_type = other DNA
gaagtcggcaaggtattcaccgataaggcttcaggcaaggacacacaacgtcccgaacttgaaaggctgctggcc

SEQ ID NO: 28940 - DNA, 75 bp, synthetic construct
  source 1..75: mol_type = other DNA
ttctggtcgctgacagcgaaaggctgcatgttcggcaagaacatcaccagtcccgcaaatccgcgcgagacgcag

SEQ ID NO: 28941 - DNA, 75 bp, synthetic construct
  source 1..75: mol_type = other DNA
acgcttcgcggcggccggggcgccggtgacctttatcaaggtgcatcaccagccggacggccatttcccgaacgg

SEQ ID NO: 28942 - DNA, 75 bp, synthetic construct
  source 1..75: mol_type = other DNA
ctgcaggggctgtgtttccactatgacccgctggccaaccgcgtccagtgctccatcaccacactggccattgag

SEQ ID NO: 28943 - DNA, 75 bp, synthetic construct
  source 1..75: mol_type = other DNA
gagctggggttgattacctaccagacggaatatgacccgcttatcgggtgctacattccgaccgacatcacgttc

SEQ ID NO: 28944 - DNA, 75 bp, synthetic construct
  source 1..75: mol_type = other DNA
gtaaggcgcacggatttactttgcagcatgttgctgcgggcgttcaggtcaatccagcgacgctgagtcgtattg

SEQ ID NO: 28945 - DNA, 75 bp, synthetic construct
  source 1..75: mol_type = other DNA
ccccgcgtgccggaacagcgctcaaaagcgaagtctgacagtggcaagcgtcacggggattcagccatcgcactg

SEQ ID NO: 28946 - DNA, 75 bp, synthetic construct
  source 1..75: mol_type = other DNA
cgctggaatctgcaaccgctactgcaaagcgcacagttaacaggaatgacggtaacaatcaaatcaaatacctgt

SEQ ID NO: 28947 - DNA, 75 bp, synthetic construct
  source 1..75: mol_type = other DNA
atgcaccggcagctatcggtccttacgtacagggcgttgatctgggcaatatgatcatcacctccggtcagatcc

SEQ ID NO: 28948 - DNA, 75 bp, synthetic construct
  source 1..75: mol_type = other DNA
cgtgagacgttacggcaactggaagctaaaacaggtgcgactagatatctgatgagcgttcttgccagagagctg

SEQ ID NO: 28949 - DNA, 75 bp, synthetic construct
  source 1..75: mol_type = other DNA
ctcatcactgaagctgctgcgcgaagcgatgcacctgaacccgaacgcaggtgtgaaacgcgagattgcaaccct

SEQ ID NO: 28950 - DNA, 75 bp, synthetic construct
  source 1..75: mol_type = other DNA
cgtgagacgttacggcaactggaagtcaagacaggtgcgacaagatatctgatgagcgttctcgcaagagagctg

SEQ ID NO: 28951 - DNA, 75 bp, synthetic construct
  source 1..75: mol_type = other DNA
agcgggaagaactgaagacgcgaattgtggaactcgtgcatcaggacggtcgggtcacgattcggcagttgtcag

SEQ ID NO: 28952 - DNA, 75 bp, synthetic construct
  source 1..75: mol_type = other DNA
gcccgcaaaaaactctcaagggcaaatctgaagaaaccatctgtggttgatccggatcttatctggtcattacca

SEQ ID NO: 28953 - DNA, 75 bp, synthetic construct
  source 1..75: mol_type = other DNA
tggatatccgggtgccggaccatctgatagtcggtggcagccaggttttctcctttgccgaatatggtctgcttt

SEQ ID NO: 28954 - DNA, 75 bp, synthetic construct
  source 1..75: mol_type = other DNA
acgaaaaatgatggtaaagcctttcctcagccagccggtgctgcgttaccagtacaggaagcggcaacacaggaa

SEQ ID NO: 28955 - DNA, 75 bp, synthetic construct
  source 1..75: mol_type = other DNA
tgcgccgcgctgcgggagctgaataaatatcgcgatattgtcgcccagctttgccaggaggaaaccagtgagcaa

SEQ ID NO: 28956 - DNA, 75 bp, synthetic construct
  source 1..75: mol_type = other DNA
gcgctggtaacggaaagtgatggtaaggcctttcctcagccagcaggtgctgcgttaccagtccgggaagccgca

SEQ ID NO: 28957 - DNA, 75 bp, synthetic construct
  source 1..75: mol_type = other DNA
cgtgcgattggcgttgaactggagaccggacgttttgagcagacagtcagggaagttcaggatttaatcgtttga

SEQ ID NO: 28958 - DNA, 75 bp, synthetic construct
  source 1..75: mol_type = other DNA
ctcagccagcaggtgctgcgttaccagtccgggaagccgcaacacaggaagaaattaaaacagaaactgtggcgg

SEQ ID NO: 28959 - DNA, 75 bp, synthetic construct
  source 1..75: mol_type = other DNA
tctactttcattaggagcacatcatgttaattgtttacttttatcagatagtaaacaatcattaataagtcgttg

SEQ ID NO: 28960 - DNA, 75 bp, synthetic construct
  source 1..75: mol_type = other DNA
tcggttatggtttgtggctgctggctggactgcttctgctggcaattctcatcaggatgtcattcagtctgtata

SEQ ID NO: 28961 - DNA, 75 bp, synthetic construct
  source 1..75: mol_type = other DNA
aaagagctgggtatcgccgataacgactggattgaagtcttcaacagcaacggtgcactgactgcccgtgcggtt

SEQ ID NO: 28962 - DNA, 75 bp, synthetic construct
  source 1..75: mol_type = other DNA
tcacgatgtgggtgaccgaagatgagcaccgccgtctgttggaacgctgcgacggtaaacagcttgcagcctgga

SEQ ID NO: 28963 - DNA, 75 bp, synthetic construct
  source 1..75: mol_type = other DNA
aaaaaatacacctcgggggttctgtcttttgcagagcagaccctgccaccgggagagcgtgaaagggtgatggag

SEQ ID NO: 28964 - DNA, 75 bp, synthetic construct
  source 1..75: mol_type = other DNA
ttatcagggcgatatgcgtgacctgacgcgtgggcaggcgctggaaatactcgaggcggactactggtacggacc

SEQ ID NO: 28965 - DNA, 75 bp, synthetic construct
  source 1..75: mol_type = other DNA
tgcagaaattggtcggaagattgcccggcagaatgctgtaaacaaaatctggatgctcgaaggttacttgctgaa

SEQ ID NO: 28966 - DNA, 75 bp, synthetic construct
  source 1..75: mol_type = other DNA
atgcaacagctttcctttctgcccggagagatgacgcccggcgagcgcagcctcattctgcgggccctgaaaacc

SEQ ID NO: 28967 - DNA, 75 bp, synthetic construct
  source 1..75: mol_type = other DNA
gggaaaatggttacaagtgtccttctcgttttactgaaaggttccataatcgttttaagataacaccaagagagc

SEQ ID NO: 28968 - DNA, 75 bp, synthetic construct
  source 1..75: mol_type = other DNA
agcggcattcgtttcgtgccgattattaccgcgctcaccctgtcgctggtgggtctgttcattcccatgctgtgg

SEQ ID NO: 28969 - DNA, 75 bp, synthetic construct
  source 1..75: mol_type = other DNA
atactgatattcttcctgcatattcagatgaagtgtcacagataataaatgaaaaaggtgatggcaataggtttt

SEQ ID NO: 28970 - DNA, 75 bp, synthetic construct
  source 1..75: mol_type = other DNA
gcatttctgaatcagtgttcaacggctgatcctgctgctatatcaaaaatcatgagtaagttcggcaaggttaaa

SEQ ID NO: 28971 - DNA, 75 bp, synthetic construct
  source 1..75: mol_type = other DNA
tgcgcgccgaagtggcggaggtggccaataccatgtgtgaccttcgggccaggctgaacgatatggagcatcgct

SEQ ID NO: 28972 - DNA, 75 bp, synthetic construct
  source 1..75: mol_type = other DNA
tggatgagctggtggattgcgtggcggaactggaaggcaaggtaagccagtttgaaactctggtgaaggagttta

SEQ ID NO: 28973 - DNA, 75 bp, synthetic construct
  source 1..75: mol_type = other DNA
cgcccgtcgtggaatgcacaaaccttctgagaacggcgacgcttgacgtcacaaaaggaggaaagatgagcggca

SEQ ID NO: 28974 - DNA, 75 bp, synthetic construct
  source 1..75: mol_type = other DNA
atgcgtctggtgatcgcggtgctttgcgtcagttggctactcaatatccagaccagattgaatccgttcgtaaag

SEQ ID NO: 28975 - DNA, 75 bp, synthetic construct
  source 1..75: mol_type = other DNA
cctgtattgcattagctctgagtggtcagggttgggcggcagatatcacagagatagaaaccaccacaggtgaaa

SEQ ID NO: 28976 - DNA, 75 bp, synthetic construct
  source 1..75: mol_type = other DNA
ctgtaacggtaggcgggaagcttcacggcgctggggctaatgcgttctacgaaggtatcgacaacgaggggaata

SEQ ID NO: 28977 - DNA, 75 bp, synthetic construct
  source 1..75: mol_type = other DNA
ttactgcccgctctgtaccggataaaagcgtatcagatgattttatgcatgctgttctcagtaactgcaccacaa

SEQ ID NO: 28978 - DNA, 75 bp, synthetic construct
  source 1..75: mol_type = other DNA
atgtgcaataaaaccacaccggacgcagcagccgccgcgctcactacgctgatgcacgcgcttattgatatttct

SEQ ID NO: 28979 - DNA, 75 bp, synthetic construct
  source 1..75: mol_type = other DNA
atgggaaccccctggttccagctcaaagaggcgcagtttcctgaaaaactgtacgttttttccagcaactacgag

SEQ ID NO: 28980 - DNA, 75 bp, synthetic construct
  source 1..75: mol_type = other DNA
gaatgataaggtattcaaggcagggttaagacgtaagatgcgaaaagcagccatggacagaaactatctggcgtc

SEQ ID NO: 28981 - DNA, 75 bp, synthetic construct
  source 1..75: mol_type = other DNA
taatggctcacagctttatgccatcagcgactcggtggcaaaacggcttggcgggggttcatcggtaaacgttga

SEQ ID NO: 28982 - DNA, 75 bp, synthetic construct
  source 1..75: mol_type = other DNA
cacagctttatacgatcagtgattcagtcgccaaacggctcgggggaggcgctactgtaggcaacgatggcagca

SEQ ID NO: 28983 - DNA, 75 bp, synthetic construct
  source 1..75: mol_type = other DNA
ggcgcacggcctttcgtgcagccggtggtgtcctgagcgacgagctgaaacagcgccacattgagcgcgtggcac

SEQ ID NO: 28984 - DNA, 75 bp, synthetic construct
  source 1..75: mol_type = other DNA
gcggcgcgtttgatatcaactacgacgggatcatgatccacgtggaaagcgccaccgtcaccatcaccgacaaca

SEQ ID NO: 28985 - DNA, 75 bp, synthetic construct
  source 1..75: mol_type = other DNA
gcgaagcatcgcgcacagaaagcagtagatgagctggtggactgtgtggcagagctggaaaccagagtcggaaag

SEQ ID NO: 28986 - DNA, 75 bp, synthetic construct
  source 1..75: mol_type = other DNA
atacttacgggtaaaaaaggacgctattctgctgagttaaaactcacagtagtaaaagaagtcgtggatgacggt

SEQ ID NO: 28987 - DNA, 75 bp, synthetic construct
  source 1..75: mol_type = other DNA
cggctggcgacgttactcgttaaccgccacgatggcgtgctgccgccgcacctggcctccgccattcagaaactg

SEQ ID NO: 28988 - DNA, 75 bp, synthetic construct
  source 1..75: mol_type = other DNA
agttccggcgtgatttttccctggtatatgccgcaccccgcagtaagcccatcagcagggaaaaagcgcggggaa

SEQ ID NO: 28989 - DNA, 75 bp, synthetic construct
  source 1..75: mol_type = other DNA
gaccgatgcactttaccagacgatgcaaaccgggatgggggcgcgtcgtcagccgctgatttttggtatcaccac

SEQ ID NO: 28990 - DNA, 75 bp, synthetic construct
  source 1..75: mol_type = other DNA
cggctaccggtaaccaagttgcacatcataatgagaaaccaacaactctggccggacttctggcagacccaaaaa

SEQ ID NO: 28991 - DNA, 75 bp, synthetic construct
  source 1..75: mol_type = other DNA
tagctgcgaaagcgaaaaacggcgtgattggttgcggtccagacataccctggtccgcgaaaggggagcagctac

SEQ ID NO: 28992 - DNA, 75 bp, synthetic construct
  source 1..75: mol_type = other DNA
tgtggcaacgtttctgccaattttatcaacaagatcctttgcagagactgcatcgcactaatgatacagactcgt

SEQ ID NO: 28993 - DNA, 75 bp, synthetic construct
  source 1..75: mol_type = other DNA
attcttcagaagacataccgtggcaggctctgccagcttcacacagggggaacaatcagatgagtttgcccttat

SEQ ID NO: 28994 - DNA, 75 bp, synthetic construct
  source 1..75: mol_type = other DNA
gtatcttcagcagcagaactacagtctggaggcgctgtcccgtcgtgatgcccgtgaggatccgttcgcgtcgtc

SEQ ID NO: 28995 - DNA, 75 bp, synthetic construct
  source 1..75: mol_type = other DNA
cgtgactacgatggtcaggttgcagaggctatggccctggtacgagcgctgaacaaaatgacgaaagcaggtatg

SEQ ID NO: 28996 - DNA, 75 bp, synthetic construct
  source 1..75: mol_type = other DNA
tatatgagcagtacaacacagatcccgtgctgcctgtccttcagaacgaagccagacaacaaaaacgtgggctct

SEQ ID NO: 28997 - DNA, 75 bp, synthetic construct
  source 1..75: mol_type = other DNA
ataccaaagtaaaaccaacagcagcgcaaatagcacaggaagaagtggcctggaaagggtggcaggattacaaaa

SEQ ID NO: 28998 - DNA, 75 bp, synthetic construct
  source 1..75: mol_type = other DNA
gtggctaacctgcaacttgccgtcaaaggtgaatacttcgatgccatgattcgcggagagaaaacggaagagtat

SEQ ID NO: 28999 - DNA, 75 bp, synthetic construct
  source 1..75: mol_type = other DNA
accagacaggcgtcagcagcgaagggcagcgccacgacggcatccacgaaggcgacagaggcagctggcagtgcg

SEQ ID NO: 29000 - DNA, 75 bp, synthetic construct
  source 1..75: mol_type = other DNA
cagatccgcgcccagcaattccccatgacgaagttgagcgcagaatggcagaacgctttgctaagatgcgcaagg

SEQ ID NO: 29001 - DNA, 75 bp, synthetic construct
  source 1..75: mol_type = other DNA
tgaacgcctggcacgtcagacgctgtatcgcgccaatcgcctgttcatggaggcatataccgaaattcttgaact

SEQ ID NO: 29002 - DNA, 75 bp, synthetic construct
  source 1..75: mol_type = other DNA
tccaggtggacgccttcccgtaaaccagcatcgtctgatgctcgcccttcttccgatgacacgcctttgtcgggt

SEQ ID NO: 29003 - DNA, 75 bp, synthetic construct
  source 1..75: mol_type = other DNA
gatagtacagctcagcagtgcgaccaacagcacgtctgaaacgctggcggcaacgccaaaggcagtaaaagcagc

SEQ ID NO: 29004 - DNA, 75 bp, synthetic construct
  source 1..75: mol_type = other DNA
atgaatcaaccaatacacaatgcttactggttatcccgttttgaaagtattctcaacagtgccctggcgcaacac

SEQ ID NO: 29005 - DNA, 75 bp, synthetic construct
  source 1..75: mol_type = other DNA
gctaccggaggcgctggccccgtcgcctgagctacggcaaagccagcttgagcttttacagcagattgacgccat

SEQ ID NO: 29006 - DNA, 75 bp, synthetic construct
  source 1..75: mol_type = other DNA
ggaccacgcagggacagaatctcaccgtgcaggcggacagatgggcgaacagtggttccgtgctggcaaccggta

SEQ ID NO: 29007 - DNA, 75 bp, synthetic construct
  source 1..75: mol_type = other DNA
cctgtttattgcgctgccagtgattggtttggtgatgatgtataaccggggcaacccgtggtttgcgtttggttt

SEQ ID NO: 29008 - DNA, 75 bp, synthetic construct
  source 1..75: mol_type = other DNA
ccttaataaatttagaggaaatcacggatcatgttatcgtttctggtggtggtgaaatatacaaaagcttgattt

SEQ ID NO: 29009 - DNA, 75 bp, synthetic construct
  source 1..75: mol_type = other DNA
cgcagtattacactggtgaatatcccaaacagaaacaaccgacgccaggcatccaggcgaagatgacaccggtac

SEQ ID NO: 29010 - DNA, 75 bp, synthetic construct
  source 1..75: mol_type = other DNA
aaaaatcacataaattctgggcggtggagcagcagggaaacgaactgaatatcagttggggcaaagtcggcacca

SEQ ID NO: 29011 - DNA, 75 bp, synthetic construct
  source 1..75: mol_type = other DNA
cgaaatgttcgaaaaagatccgcagaccgaagcgatcgtgatgatcggtgagatcggcggtagcgctgaagaaga

SEQ ID NO: 29012 - DNA, 75 bp, synthetic construct
  source 1..75: mol_type = other DNA
acgattcggacaagtgtctgaaggtggtggcggatgcaaatgtgaccatcgcccgggataaagccctgaagtcac

SEQ ID NO: 29013 - DNA, 75 bp, synthetic construct
  source 1..75: mol_type = other DNA
tccggtggcgctgatggaagcgatggcggtcggcattccggtggtttctactctgcatagcggaataccggaact

SEQ ID NO: 29014 - DNA, 75 bp, synthetic construct
  source 1..75: mol_type = other DNA
cacccaggccggagtctggcaggggcaggctgccgggtatgcctatggcggttctctgtatgcccgtaatcaggt

SEQ ID NO: 29015 - DNA, 75 bp, synthetic construct
  source 1..75: mol_type = other DNA
ctggttgttccactgattcaccatatccagaaactgactgaaagagttgatgaacttgagtcagaattaaagttg

SEQ ID NO: 29016 - DNA, 75 bp, synthetic construct
  source 1..75: mol_type = other DNA
attgcaggtgagagcaatatcttcgctgactgggccgcttcccgtcaggggtgcacggtcggagggcagtcttct

SEQ ID NO: 29017 - DNA, 75 bp, synthetic construct
  source 1..75: mol_type = other DNA
agcaatcaccttatcttcgcgcggtagatatactgcgagcacgacgggcaattggtttattgcgacgaagtatta

SEQ ID NO: 29018 - DNA, 75 bp, synthetic construct
  source 1..75: mol_type = other DNA
atggtgaagttgggccaaacaagaacgttccggggctgattagaggcgcagagatatgcgtaagtattgctgaac

SEQ ID NO: 29019 - DNA, 75 bp, synthetic construct
  source 1..75: mol_type = other DNA
atcactgatgtgcttactgccagcggtaaggcgggtgaatccggtacgctggcccgttcgctggatgccatcgct

SEQ ID NO: 29020 - DNA, 75 bp, synthetic construct
  source 1..75: mol_type = other DNA
aaggcaacagatattaccggggggataagacagtctgattggtattataaatataagaagttatcagagagtaac

SEQ ID NO: 29021 - DNA, 75 bp, synthetic construct
  source 1..75: mol_type = other DNA
cttccccggcaaactgttctggcatactgttgataatggaaatgatgatgttttttatatacttctttcatttta

SEQ ID NO: 29022 - DNA, 75 bp, synthetic construct
  source 1..75: mol_type = other DNA
atagtttaggaagtaaagttaaggctattattcacacggatatatctgcagcatggagactttgtgatatatctt

SEQ ID NO: 29023 - DNA, 75 bp, synthetic construct
  source 1..75: mol_type = other DNA
tgcgcgttgttgaagtcaacgaaggcactcgatccattaccacggtgagcaccgccatcgtgggcatggtctgca

SEQ ID NO: 29024 - DNA, 75 bp, synthetic construct
  source 1..75: mol_type = other DNA
ggaagacgaaaccacgaccaatatcatcggcgcagtgactgctgaaggtaaaaaaacaggtatgaaagccctgtt

SEQ ID NO: 29025 - DNA, 75 bp, synthetic construct
  source 1..75: mol_type = other DNA
ccatggctctgtaccggcaacatccgggctcccgactgtttcgcttctgtaccggcaaatataaatggactggca

SEQ ID NO: 29026 - DNA, 75 bp, synthetic construct
  source 1..75: mol_type = other DNA
accactggaaagcctgaccctgcgccagcgtatcaccgataaatatctggtgaatctggccgaatcggtcaacag

SEQ ID NO: 29027 - DNA, 75 bp, synthetic construct
  source 1..75: mol_type = other DNA
aatttcagccagcgcgagctgatggtcatctggcctgatttccttgcatgggataccaccacaaacgccaccgca

SEQ ID NO: 29028 - DNA, 75 bp, synthetic construct
  source 1..75: mol_type = other DNA
taaaaccatttccgaggtgaaagcctaccgccagaatttcagccagcgtgagctgatggtcatctggccggattt

SEQ ID NO: 29029 - DNA, 75 bp, synthetic construct
  source 1..75: mol_type = other DNA
gagatccacgaaccactcactcgcctgctaaaagagtttggccccaagcgacgcactgactatcccaatatgcct

SEQ ID NO: 29030 - DNA, 75 bp, synthetic construct
  source 1..75: mol_type = other DNA
gtgggccgctacccagaccgtcacgctagcggttcccggcatgacttgcgccgcctgcccgatcacagtcaagaa

SEQ ID NO: 29031 - DNA, 75 bp, synthetic construct
  source 1..75: mol_type = other DNA
ctgggagaacaggtacaacatgtgctggatgagaaccccttctccggtcacctgtttatctttcgcggccgacgg

SEQ ID NO: 29032 - DNA, 75 bp, synthetic construct
  source 1..75: mol_type = other DNA
ggttacggatggtggccgtaacctgttgtccttcaactggcccagctaccgggcacataccggaggtgtggcagc

SEQ ID NO: 29033 - DNA, 75 bp, synthetic construct
  source 1..75: mol_type = other DNA
ccgaacattcatcctcagaaagagtatttaattcgtaaggatgaaaatattcgctttgctgaacaacacggcgtg

SEQ ID NO: 29034 - DNA, 75 bp, synthetic construct
  source 1..75: mol_type = other DNA
aggtacatccaagccaatggatttagatattgagttagtaaattgcgatattacagcttttaaacaaggtcaagc

SEQ ID NO: 29035 - DNA, 75 bp, synthetic construct
  source 1..75: mol_type = other DNA
ggagataatcgaacccacacagaatatggccatcagcgacatacaggcggcgcgctgtgagtcgttcaccatcag

SEQ ID NO: 29036 - DNA, 75 bp, synthetic construct
  source 1..75: mol_type = other DNA
gcgcaggcggtgatggtggcttatgccatagggagcgatctggaccagctcgctgccaattacaacgtgaaacgc

SEQ ID NO: 29037 - DNA, 75 bp, synthetic construct
  source 1..75: mol_type = other DNA
ggtggtgctgactgtccttagccgcgaaggcgatggaactgcagaaaaagatctgctggacgtggtggaaaaagc

SEQ ID NO: 29038 - DNA, 75 bp, synthetic construct
  source 1..75: mol_type = other DNA
gtacatcgccagtcagacgcggcttggtcgggatattcgccgtagtgccatttttgccgcgctgcatgttgaggg

SEQ ID NO: 29039 - DNA, 75 bp, synthetic construct
  source 1..75: mol_type = other DNA
tggtgccaattacaacaccacgcgcctgattatcaccccggcagatgattcgactatcccgccgacaccggcagt

SEQ ID NO: 29040 - DNA, 75 bp, synthetic construct
  source 1..75: mol_type = other DNA
atggcaaccgttgacctgagtcagttacccgttcccgatgtggttgaggaactggactatgaaactatccttgcg

SEQ ID NO: 29041 - DNA, 75 bp, synthetic construct
  source 1..75: mol_type = other DNA
accggtaagtaccgctggcacggcagtgctgaggcgtataccggtcgtgaagtacaggatattcccggtgtgctg

SEQ ID NO: 29042 - DNA, 75 bp, synthetic construct
  source 1..75: mol_type = other DNA
ccacgctgggcgagacctgggaagaggccgtgggcgaaaaactcgatcaccaggtactgatggataaggttgtgc

SEQ ID NO: 29043 - DNA, 75 bp, synthetic construct
  source 1..75: mol_type = other DNA
tttcccgtgtctgctgggacatcggggggatcgatggcgaaatcgtttatcagaggtcaaaaaaacacggtgttt

SEQ ID NO: 29044 - DNA, 75 bp, synthetic construct
  source 1..75: mol_type = other DNA
gagattttttcgcagacagaggcgcagcaactggtggcggaagagctggtggagaagtgggaaaaaggaaagatg

SEQ ID NO: 29045 - DNA, 75 bp, synthetic construct
  source 1..75: mol_type = other DNA
gccttaaatgggagaaggacagccccgaaagcgttttctacctctgtgaacatcatggctgcgtgatccatcagt

SEQ ID NO: 29046 - DNA, 75 bp, synthetic construct
  source 1..75: mol_type = other DNA
gacgcaacgaagccctcgactgcctggtatatgcctatgctgccctgcgtatttcagttcagcggtggcagctgg

SEQ ID NO: 29047 - DNA, 75 bp, synthetic construct
  source 1..75: mol_type = other DNA
tgaacgcattagagcaactgcaacaggactatatgcagcggctgaacgaatgggagaacgccttcgtggaattgc

SEQ ID NO: 29048 - DNA, 75 bp, synthetic construct
  source 1..75: mol_type = other DNA
tttgccaatgaacgtatcgatcaggtgtatctggcggcggcaaaagtgggcggcattgtcgctaacaacacttac

SEQ ID NO: 29049 - DNA, 75 bp, synthetic construct
  source 1..75: mol_type = other DNA
ataccatgcaaaaaacttcttttagaaatcaccaggttaagcgattcagctcgcaacgttctaccaggcgtaaac

SEQ ID NO: 29050 - DNA, 75 bp, synthetic construct
  source 1..75: mol_type = other DNA
gctgggctggtatcacgaggtgtcgctggaacaagggctggcaagtacctaccagtggttcctggaaaaccagca

SEQ ID NO: 29051 - DNA, 75 bp, synthetic construct
  source 1..75: mol_type = other DNA
gagcttccgtaccagatcattcgcgaaataattagcgaagccgaaaaatctcgtcaggttaatggcgatgaaccc

SEQ ID NO: 29052 - DNA, 75 bp, synthetic construct
  source 1..75: mol_type = other DNA
ctacatcgtcggtgtgagcaaatgcctgcgtgatatccagacgcacgcggagtacatcaacgacaaggcagggtt

SEQ ID NO: 29053 - DNA, 75 bp, synthetic construct
  source 1..75: mol_type = other DNA
ccgccacagaacgattattgcttttgccgttgatggcagaaaagtctttattgtcggtatctatcatggtgggca

SEQ ID NO: 29054 - DNA, 75 bp, synthetic construct
  source 1..75: mol_type = other DNA
attgcgctgtgggataaatggcttgctcccgtgacgccagataatcccgcaggtgatgatgcggggtacgatgat

SEQ ID NO: 29055 - DNA, 75 bp, synthetic construct
  source 1..75: mol_type = other DNA
aacaaccgagttcgctttcaccgctggtgcaattggcgggaattcgcaaatgctttgatggtaaagaggtcattc

SEQ ID NO: 29056 - DNA, 75 bp, synthetic construct
  source 1..75: mol_type = other DNA
tccggcacggatcactccgtctgaatggtgccatcagtgaaaatatcctgaacctgctgatacgggagctcaaac

SEQ ID NO: 29057 - DNA, 75 bp, synthetic construct
  source 1..75: mol_type = other DNA
aggtaaatctaaaagcgattttttcaaagactcattaggttgccgacatgattcggacaataaaagaagcattca

SEQ ID NO: 29058 - DNA, 75 bp, synthetic construct
  source 1..75: mol_type = other DNA
tcttgatccacaaaataccggtaaacatgaagggccagaaggtgccgggcatttaggcgatctgcctgcactggt

SEQ ID NO: 29059 - DNA, 75 bp, synthetic construct
  source 1..75: mol_type = other DNA
atgaccaaagagcatgcacaaggtgtatttatccgttttattgattttcgcggtgaactgttattacgtgcatcc

SEQ ID NO: 29060 - DNA, 75 bp, synthetic construct
  source 1..75: mol_type = other DNA
gttccgattcgagtccgattgataaatatcgatgcaccggaaaaaaaacaaccctttggtcgctggtcaaccaat

SEQ ID NO: 29061 - DNA, 75 bp, synthetic construct
  source 1..75: mol_type = other DNA
atcatgaataccgccccggctactgtggatcccgtaacagtatgtagtaacgacaaaaataacatcacccttgaa

SEQ ID NO: 29062 - DNA, 75 bp, synthetic construct
  source 1..75: mol_type = other DNA
aaaaaccgcagccgctggcacgtccggtgatcctgtccaattccttcgcctttggcggcaataacgccagcattc

SEQ ID NO: 29063 - DNA, 75 bp, synthetic construct
  source 1..75: mol_type = other DNA
atgagaccatcaattatcttcgcaaccgccgagtatgtaaagcgtctgcgtgaagagtgcctgcgggagaataaa

SEQ ID NO: 29064 - DNA, 75 bp, synthetic construct
  source 1..75: mol_type = other DNA
cgatattgtcgcggtcgaatccccctgttattacggttcgatgcagatgctgcgcggcatgggcgtgaaagtgat

SEQ ID NO: 29065 - DNA, 75 bp, synthetic construct
  source 1..75: mol_type = other DNA
agctggctgctggtccatttttcctggcaggcgattttcgccaccctgtttgccattaccgtggtgctgattctg

SEQ ID NO: 29066 - DNA, 75 bp, synthetic construct
  source 1..75: mol_type = other DNA
agcggttaaggcggtaatggatgaaacgaacaagaaagccccattaaacagcccggcactgaccggaacgccaac

SEQ ID NO: 29067 - DNA, 75 bp, synthetic construct
  source 1..75: mol_type = other DNA
cgttacgggaaaagctattcacctttgatgtggatattttgcgcaacgatgtctgtgatatcagccttaacctgc

SEQ ID NO: 29068 - DNA, 75 bp, synthetic construct
  source 1..75: mol_type = other DNA
tccggcactggctcctctgttaggaagctggctgctggtccatttttcctggcaggcgattttcgccaccctgtt

SEQ ID NO: 29069 - DNA, 75 bp, synthetic construct
  source 1..75: mol_type = other DNA
ttaaaggcgtagaggatgcctgccgtgctgttagctatagccaagccgacaatcaaccagcatctggcaaccagg

SEQ ID NO: 29070 - DNA, 75 bp, synthetic construct
  source 1..75: mol_type = other DNA
atgaattatccaactatcgttaacggcatcgattttcgagatctgatttttgtggcaaacaacgatccggttaca

SEQ ID NO: 29071 - DNA, 75 bp, synthetic construct
  source 1..75: mol_type = other DNA
tgattaaagaaatcaaagaacgaatcggcagcctgcacgtgcgagacaatgttgagcgccgtgcttatgaaattg

SEQ ID NO: 29072 - DNA, 75 bp, synthetic construct
  source 1..75: mol_type = other DNA
aaaacgctgtatgtcagtgtgaaacaaaaatccactaaacagcaggaagctacccagccggacgatgtgattcgt

SEQ ID NO: 29073 - DNA, 75 bp, synthetic construct
  source 1..75: mol_type = other DNA
gtaaatggaagtacacggttagaaacgtcaacgagatgatgactacgttccatggtgtgacgattggtgacacat

SEQ ID NO: 29074 - DNA, 75 bp, synthetic construct
  source 1..75: mol_type = other DNA
cagcgcgaaaaggtcttgtccagctcagtagcgtcaccaacagcgattctgaaacgcttgcggcaacgccaaagg

SEQ ID NO: 29075 - DNA, 75 bp, synthetic construct
  source 1..75: mol_type = other DNA
ctgatgacccgggacaattacagaatggtaaataacattaccctgggcaagcatccggaggaggcgaaacaatga

SEQ ID NO: 29076 - DNA, 75 bp, synthetic construct
  source 1..75: mol_type = other DNA
ggaaaaatacgcgctggtacgaactgaccagccaggattcagcgcctgtacccgctctcagttaataaacagcat

SEQ ID NO: 29077 - DNA, 75 bp, synthetic construct
  source 1..75: mol_type = other DNA
acggcctcacgctgaatgacacaccgttcgctgatgaacgtgtgattgagcagcatattgaggcaggtatttcac

SEQ ID NO: 29078 - DNA, 75 bp, synthetic construct
  source 1..75: mol_type = other DNA
tcccgtcaccatctggcagacactgctcacccgactgctggaccagcactacggcctcacgctgaatgacacacc

SEQ ID NO: 29079 - DNA, 75 bp, synthetic construct
  source 1..75: mol_type = other DNA
tacgggcggcatcgcgctgcccgtctccggttgaaatctggcagacactgctgtcccgcctgctggaccagcatt

SEQ ID NO: 29080 - DNA, 75 bp, synthetic construct
  source 1..75: mol_type = other DNA
cgatatcctccgggctcgccgggcgactggcctgatgacccgcgacaattacagaacggtaaataacattaccct

SEQ ID NO: 29081 - DNA, 75 bp, synthetic construct
  source 1..75: mol_type = other DNA
tgcaacaaagctgaaaacagcacgaaaaattgctggagttggttttgatggttctagcgatatttcaattagtgc

SEQ ID NO: 29082 - DNA, 75 bp, synthetic construct
  source 1..75: mol_type = other DNA
agatgttggtgcatataccaaagctgaatcggattctcgctatgtacgagatattcgcctgggcacacgtgttgt

SEQ ID NO: 29083 - DNA, 75 bp, synthetic construct
  source 1..75: mol_type = other DNA
acgtgcttatttcggtgaatttcgatagctctctggttgaaccgctaatatgctccgcacgctataccggaagca

SEQ ID NO: 29084 - DNA, 75 bp, synthetic construct
  source 1..75: mol_type = other DNA
acggtgtcagcaactggacgcggattgcggcgacgctgccctccgggcgaccgggaatgatccatgtgtttcagc

SEQ ID NO: 29085 - DNA, 75 bp, synthetic construct
  source 1..75: mol_type = other DNA
cgatgcggccctgctgcccgcgttgcgtctggggaatgcccgggcagatgatctggtgcgcaataacggaatagc

SEQ ID NO: 29086 - DNA, 75 bp, synthetic construct
  source 1..75: mol_type = other DNA
caagtcaaactacaaatattgctaatatatcgttagcaaaacttaacccattaccagtatgtattcctccagcta

SEQ ID NO: 29087 - DNA, 75 bp, synthetic construct
  source 1..75: mol_type = other DNA
tatcactcaactgaccggcctgaccgataaatggttttacaagctcatcaaggatggtgcctttcctgcccccat

SEQ ID NO: 29088 - DNA, 75 bp, synthetic construct
  source 1..75: mol_type = other DNA
gctcgctcgctgggttaatgaactttatcccgacagacgacgtatatttaccagtaaggccaacccggttgcgcc

SEQ ID NO: 29089 - DNA, 75 bp, synthetic construct
  source 1..75: mol_type = other DNA
atgatgctggcgctcaggatggggcgcacattgtcagagttacgccgggaaatgtccgcatcagaaatcatgatg

SEQ ID NO: 29090 - DNA, 75 bp, synthetic construct
  source 1..75: mol_type = other DNA
cagatataaaaatgactatggtctattctcatttttcacctgagcatcttgaagatgctgtaacaaaaaaccctt

SEQ ID NO: 29091 - DNA, 75 bp, synthetic construct
  source 1..75: mol_type = other DNA
ggatacggacttcgataccagttacttcgacatccgccatgtgtcctgggacagctatatcgaggttggtggtaa

SEQ ID NO: 29092 - DNA, 75 bp, synthetic construct
  source 1..75: mol_type = other DNA
acaggttatcgaccatcaggctgtacaggcctgggcggacagcctcagtactgacaatccgttaccggtgccacg

SEQ ID NO: 29093 - DNA, 75 bp, synthetic construct
  source 1..75: mol_type = other DNA
tgcatcagtaacggcaaatggtacgagccgccggtcagcttctcagggctggcaaagagcctgcgctctgccgtg

SEQ ID NO: 29094 - DNA, 75 bp, synthetic construct
  source 1..75: mol_type = other DNA
gctggcggtcagcgtggccattccggggtggcagtttctgacacagccatcaccggaggagcagcattttacctg

SEQ ID NO: 29095 - DNA, 75 bp, synthetic construct
  source 1..75: mol_type = other DNA
atgcatgaccaggtaaataatgcacaggcacctgcccaccagatgcagtcatctgctgaaaaaagtgcaattcag

SEQ ID NO: 29096 - DNA, 75 bp, synthetic construct
  source 1..75: mol_type = other DNA
gaacgcccgcatgaatcactgaacaatatgacaccggaggaataccgacttcaccattatttggccgggttctca

SEQ ID NO: 29097 - DNA, 75 bp, synthetic construct
  source 1..75: mol_type = other DNA
ggtaaggataaagaaacttttgatccaaatgatgatattgagagctacgcagaatttagtgagggcgtcactaat

SEQ ID NO: 29098 - DNA, 75 bp, synthetic construct
  source 1..75: mol_type = other DNA
ccactgacgaaaagcgggagctgattaaagcaatgaatcattttcgtgcggtggtgagcttatttcccagacggc

SEQ ID NO: 29099 - DNA, 75 bp, synthetic construct
  source 1..75: mol_type = other DNA
ttgcctgtcacgaataatgatcctgccagtgtctatctcattcagtcatggatagaaaatgcgggtgaccagaaa

SEQ ID NO: 29100 - DNA, 75 bp, synthetic construct
  source 1..75: mol_type = other DNA
attaatttccaggttctgaagtttttaaagcaggttgagcggctttcttcagttaaaacaacgtatctacctcaa

SEQ ID NO: 29101 - DNA, 75 bp, synthetic construct
  source 1..75: mol_type = other DNA
gctgctgttcgaacatgttcatgccgagtcccgcgatcgcggccaggcaatggtggacctgctggcggagtatga

SEQ ID NO: 29102 - DNA, 75 bp, synthetic construct
  source 1..75: mol_type = other DNA
agcatgatcgaacacatcatgcagtcgatgcaattcccggcggaattgattgagaaggtttgcggaactatctaa

SEQ ID NO: 29103 - DNA, 75 bp, synthetic construct
  source 1..75: mol_type = other DNA
ccacagatgtggctgcgcagtgcttcctgaatgccttgattcgtgaaaccaaagactggcaactggcggaatccc

SEQ ID NO: 29104 - DNA, 75 bp, synthetic construct
  source 1..75: mol_type = other DNA
agcggcaggtgtcagggatgctgattattaccctgaaggaatgcacagccagaaacgggagaactggcgcgaata

SEQ ID NO: 29105 - DNA, 75 bp, synthetic construct
  source 1..75: mol_type = other DNA
cgaacgatcacaaatgttctgttagataaagatgctgatggatggttaccagcaacggcaggcattaacgacaga

SEQ ID NO: 29106 - DNA, 75 bp, synthetic construct
  source 1..75: mol_type = other DNA
gaagctggcggcggcaagtatacagaatgcgaattattaccctgatggcatgcacagccagaagtgtgagaactg

SEQ ID NO: 29107 - DNA, 75 bp, synthetic construct
  source 1..75: mol_type = other DNA
ctttttctgttatctgaacgatcataacgagaacaccattgttgacccttcggtgatctatttcgatttcgctaa

SEQ ID NO: 29108 - DNA, 75 bp, synthetic construct
  source 1..75: mol_type = other DNA
taccgggataaaaagcagtaaaagtatccggattccgaccacgaagaaatcacttccggaaatcaacagcgtgca

SEQ ID NO: 29109 - DNA, 75 bp, synthetic construct
  source 1..75: mol_type = other DNA
taaatgttcaattacccgcaataacccttatcctttttgcactctgtattgggatattttgttatctcgcacaat

SEQ ID NO: 29110 - DNA, 75 bp, synthetic construct
  source 1..75: mol_type = other DNA
gcgttacgggtcatggggtatgatacaaaagtagaggtttgtggtcatggctttcgaacaatggcctgtagttca

SEQ ID NO: 29111 - DNA, 75 bp, synthetic construct
  source 1..75: mol_type = other DNA
gtgtttgcgggaaaaaaatcggcccagatccgcgaaattttaatcaacgagtcagcttgggaagaaatgacctgc

SEQ ID NO: 29112 - DNA, 75 bp, synthetic construct
  source 1..75: mol_type = other DNA
atgctcatagatttggttttaccttacccgccgacggtgaacacctactggcgacgtcgtggcagcacatatttt

SEQ ID NO: 29113 - DNA, 75 bp, synthetic construct
  source 1..75: mol_type = other DNA
gtttgatgaaattaatattgtgcgcagtcagcttgtacctggtggtcggctgggcgtgaagatttacgaaattac

SEQ ID NO: 29114 - DNA, 75 bp, synthetic construct
  source 1..75: mol_type = other DNA
cgagcagtttgatgaaatcaatattgtgcgcggtcagcgcgttcctggggggcggctgggcgtgaagatttacaa

SEQ ID NO: 29115 - DNA, 75 bp, synthetic construct
  source 1..75: mol_type = other DNA
ttgatttaagtgttgatacggctgattttaaggaacagcttccgcgtattaaagcgcaactcaatggtaccgcca

SEQ ID NO: 29116 - DNA, 75 bp, synthetic construct
  source 1..75: mol_type = other DNA
tagccttgcgtgccatatcacatcccgccagctaaaccacgtcgaagcggcagaactgctgcgcgtgactgctga

SEQ ID NO: 29117 - DNA, 75 bp, synthetic construct
  source 1..75: mol_type = other DNA
atgacagagcagaagcgaccggtactgacactgaagcggaaaacggaaggggagacgcctgtccgcagccggaaa

SEQ ID NO: 29118 - DNA, 75 bp, synthetic construct
  source 1..75: mol_type = other DNA
cgccagctaaaccacgttgaagcggctgaactgctgcgtgtggcagctgaagcaatccagaacgaagcgcaggag

SEQ ID NO: 29119 - DNA, 75 bp, synthetic construct
  source 1..75: mol_type = other DNA
cttacacaggctgaggaagaggctacccgacagaaagtggcgtttatccgtcagcttaaagagcaggcaacccgc

SEQ ID NO: 29120 - DNA, 75 bp, synthetic construct
  source 1..75: mol_type = other DNA
ggcggggtcactggcgcaggtagtggggagcggtgcatttcacggtaacgatattggtatggtggcgaaagctgc

SEQ ID NO: 29121 - DNA, 75 bp, synthetic construct
  source 1..75: mol_type = other DNA
attgcagcagaagcgaacagccgtcttgccaggcagcaaatggaacaaatgctcagtctgcaggagaaaattatt

SEQ ID NO: 29122 - DNA, 75 bp, synthetic construct
  source 1..75: mol_type = other DNA
attgaacagatacggcgtgaacgtttgccgaaagaactggaatacgccctgaaacaacaactgaggattgcgata

SEQ ID NO: 29123 - DNA, 75 bp, synthetic construct
  source 1..75: mol_type = other DNA
gtcgtgatgtccggctgtattcctcactggatgaaacccgtactgcggaaaaacttgcccgccatccctccttta

SEQ ID NO: 29124 - DNA, 75 bp, synthetic construct
  source 1..75: mol_type = other DNA
aaatccgaatgccagaattatcgttaaccgcggtgatctccctgtgattaagctggggatcagaatgctggggcg

SEQ ID NO: 29125 - DNA, 75 bp, synthetic construct
  source 1..75: mol_type = other DNA
cctgctcccgggtacggcggatcctgcttcgtctgccatgtgaatatgacactaccttcagtagcagaaagacct

SEQ ID NO: 29126 - DNA, 75 bp, synthetic construct
  source 1..75: mol_type = other DNA
tatccggcgagaacgtctgccaaaagaactgagctatgcgctgaaacaacaactgaggattgtgataaagcgatg

SEQ ID NO: 29127 - DNA, 75 bp, synthetic construct
  source 1..75: mol_type = other DNA
ctggcaggagcgtgaacgggctgtcacttctgaacgggaagccgcgctgccggagagtgtactgcgtgaaccaca

SEQ ID NO: 29128 - DNA, 75 bp, synthetic construct
  source 1..75: mol_type = other DNA
gcgccaaaatgttggcgctctctttactgcttatcgccgctgctacctttgtcgttacgctgtttttgccgccca

SEQ ID NO: 29129 - DNA, 75 bp, synthetic construct
  source 1..75: mol_type = other DNA
tctgcagaaatcaaatacagtaaggcaggtcattcctatcatctcgttaatccgggtcaactggataaaaagaca

SEQ ID NO: 29130 - DNA, 75 bp, synthetic construct
  source 1..75: mol_type = other DNA
ctgagttttccgcattcctgacgcgccacatcagcgatacggtaaaaagctgggatgcgcgggatatgtcgcggc

SEQ ID NO: 29131 - DNA, 75 bp, synthetic construct
  source 1..75: mol_type = other DNA
acccgggcgcaaatatccgcagccgtatgtggcactgccggcttttgaccgtaacggcaagtcagctggtatctg

SEQ ID NO: 29132 - DNA, 75 bp, synthetic construct
  source 1..75: mol_type = other DNA
tgctgaccgtcgctcgcagatgaacatgaagcaggatgagcgtctgtccggtgagctgataaccgggcggcgtca

SEQ ID NO: 29133 - DNA, 75 bp, synthetic construct
  source 1..75: mol_type = other DNA
ctcagcggaatatcccgctctctcataaaaaactgcgcagggcactgaaggccatcacccgttcagaaagctatc

SEQ ID NO: 29134 - DNA, 75 bp, synthetic construct
  source 1..75: mol_type = other DNA
cttgatagccaagctttattgcttttaacgaaaacacgttcaaaacaaaagaccatattttcacagcaagatatt

SEQ ID NO: 29135 - DNA, 75 bp, synthetic construct
  source 1..75: mol_type = other DNA
atgtcgcagacagtaaatgcagagacttcctcatcgggaaaaaaacgaccttacagaaggggtaatcctgttcct

SEQ ID NO: 29136 - DNA, 75 bp, synthetic construct
  source 1..75: mol_type = other DNA
atgatatttaaatgtattcagtgcgaaagagatattacaaccctgcgttttcacagcgccatcgccgtgatgtcc

SEQ ID NO: 29137 - DNA, 75 bp, synthetic construct
  source 1..75: mol_type = other DNA
taatccgccgtgcttgtggaatcagcaagcagcatgacgaacaggccacgcagccggacagcgtgaccgcagata

SEQ ID NO: 29138 - DNA, 75 bp, synthetic construct
  source 1..75: mol_type = other DNA
gcctgaccagcggaatatcaaccgccagcagcgatctgtcgtcattatttaacgccagcagcgggatgtggaatt

SEQ ID NO: 29139 - DNA, 75 bp, synthetic construct
  source 1..75: mol_type = other DNA
ttgtcgcccttggtctcattctgacaggctacgcaactgctgcagatgaaattaatcgtcaggacgttgttggtt

SEQ ID NO: 29140 - DNA, 75 bp, synthetic construct
  source 1..75: mol_type = other DNA
cgagtggttatcggcgaaggagaaattgaccatgcgccgatgctgtggattggcgaagaggtgggcaaaggcgat

SEQ ID NO: 29141 - DNA, 75 bp, synthetic construct
  source 1..75: mol_type = other DNA
tataacagtaagcgtcggcatggttctagcgaacagatgtcaccgacagaatatgaaaaccagtattatcaacgg

SEQ ID NO: 29142 - DNA, 75 bp, synthetic construct
  source 1..75: mol_type = other DNA
caccgtggttggcgagcagggttctggcctgtctggtggccaacgacagcgtatagctatcgctcgtgcgctgat

SEQ ID NO: 29143 - DNA, 75 bp, synthetic construct
  source 1..75: mol_type = other DNA
ggggaacatgccgcgcgaagtctggtctggccgaagctaaaaccttttctcagagagtatcccgaaatcaatgtc

SEQ ID NO: 29144 - DNA, 75 bp, synthetic construct
  source 1..75: mol_type = other DNA
ttgatttcagttggtttatacctgtcgtaataaaatatcgacgtatctttattgaggtaattgtcgcttccattg

SEQ ID NO: 29145 - DNA, 75 bp, synthetic construct
  source 1..75: mol_type = other DNA
taatgatcgtctgtttgtttctcaacattcgggtctatctggcgatgtttattggcatcatcgcttactttttat

SEQ ID NO: 29146 - DNA, 75 bp, synthetic construct
  source 1..75: mol_type = other DNA
attctctcattcatccaccagcaggatatcgcatcgctggtatccgggctgttctcccgtctgcggggtggaggc

SEQ ID NO: 29147 - DNA, 75 bp, synthetic construct
  source 1..75: mol_type = other DNA
cgcagaagaactgcgcggcaaccgttctcagtggctgtatgccgtcgatgtgctgattgaaactcagggcgaggt

SEQ ID NO: 29148 - DNA, 75 bp, synthetic construct
  source 1..75: mol_type = other DNA
agcaagggaagaaaatattctctcacatgggatatgatgacgaagtagttgaaaagttaatacatgtttggaata

SEQ ID NO: 29149 - DNA, 75 bp, synthetic construct
  source 1..75: mol_type = other DNA
gccgactgagtaccattcttgaggacagtagtttgcctctttacctcagccagttattgctgaaattacaacagc

SEQ ID NO: 29150 - DNA, 75 bp, synthetic construct
  source 1..75: mol_type = other DNA
catgggatatgatgacgaagtagttgaaaagttaatacatgtttggaataagttaaaaaatagaaggcagcgaag

SEQ ID NO: 29151 - DNA, 75 bp, synthetic construct
  source 1..75: mol_type = other DNA
cgctgggtgcctggctggatgtgtgcaccacgcccacagacggatgccactgaacgtaccgataacctggctgat

SEQ ID NO: 29152 - DNA, 75 bp, synthetic construct
  source 1..75: mol_type = other DNA
gattttttcgggtatggccaataatgccagcggtggcgcagtatttttgcagcacagtgctgaatttacgatatc

SEQ ID NO: 29153 - DNA, 75 bp, synthetic construct
  source 1..75: mol_type = other DNA
tatgctggtttgagttacaaagattttggttcattcgactacggtcgtaatgtcggtgtcgcgtatgatgcagaa

SEQ ID NO: 29154 - DNA, 75 bp, synthetic construct
  source 1..75: mol_type = other DNA
ggggctgatgccttctcgccagatgaactgcgcaccgatttgttcagcgacgacgagggtggctatgtggactgt

SEQ ID NO: 29155 - DNA, 75 bp, synthetic construct
  source 1..75: mol_type = other DNA
cgctgggtgcctggctggatgtgtgcaccacatccacagacggataccactgaacgcaccgataacctggctgat

SEQ ID NO: 29156 - DNA, 75 bp, synthetic construct
  source 1..75: mol_type = other DNA
gagggatggtcacgggatatgacgacattcctgtcactcagccaggaggtactgttatccctgctcagtttctgc

SEQ ID NO: 29157 - DNA, 75 bp, synthetic construct
  source 1..75: mol_type = other DNA
gttatgcaatctgccgttcggcagatttaaactcatgggaatatgtgccagaccatcgcggtgaagttgtctata

SEQ ID NO: 29158 - DNA, 75 bp, synthetic construct
  source 1..75: mol_type = other DNA
gcaggtgagttaattgttgttgcccgaggtgttggtggaactggcgatgttaaaataacgactagagattgttat

SEQ ID NO: 29159 - DNA, 75 bp, synthetic construct
  source 1..75: mol_type = other DNA
ttactccgcaattggtcgtctgaaaggcctggccgaagttcgcggtgtcgaactggcgatccagcgcgctttctt

SEQ ID NO: 29160 - DNA, 75 bp, synthetic construct
  source 1..75: mol_type = other DNA
aaggcattgcggatgacagtgctgtttcagatggcgtcgggtctcagcctgatggtagcagtgagcctcagcctg

SEQ ID NO: 29161 - DNA, 75 bp, synthetic construct
  source 1..75: mol_type = other DNA
atgcctcctcgaaccccaaaagcctgccgcgttcgcggctgcccccataccaccactgactcgtcaggctattgc

SEQ ID NO: 29162 - DNA, 75 bp, synthetic construct
  source 1..75: mol_type = other DNA
agaaagcggaacaaaacagcccaaatgcgttacaaaacgagccagaaacgaaacaacctgaaccagtagtgcaac

SEQ ID NO: 29163 - DNA, 75 bp, synthetic construct
  source 1..75: mol_type = other DNA
gctgaaaagctgcgcggcgagcgtcagttctgcaggcatattgccgtgtttgtgaaaacatcgccgttcgccgta

SEQ ID NO: 29164 - DNA, 75 bp, synthetic construct
  source 1..75: mol_type = other DNA
aacacactgatactcagtgataacggcggcagaagcctgtattttgagcacctgtttcccggtgaggacggttac

SEQ ID NO: 29165 - DNA, 75 bp, synthetic construct
  source 1..75: mol_type = other DNA
ccggcccgctgccgttcatcctctcccgcacctacagcagttaccggacaaaaacgcccgcgccggtggggagcc

SEQ ID NO: 29166 - DNA, 75 bp, synthetic construct
  source 1..75: mol_type = other DNA
atgtcaaagccaaaatacccttttgaaaagcgccttgaagtcgtgaatcactacttcacaactgatgatggttac

SEQ ID NO: 29167 - DNA, 75 bp, synthetic construct
  source 1..75: mol_type = other DNA
gcgccatatccgtgctgcccgtgccagaacgccgggcgtgtcacgcgtgctttgcattgaatgtgaagcgccaat

SEQ ID NO: 29168 - DNA, 75 bp, synthetic construct
  source 1..75: mol_type = other DNA
ccgggagtgcagctttgcattacctgccaggaaatcgcagagctgaaaggcaaacattacaacggaggtgctgta

SEQ ID NO: 29169 - DNA, 75 bp, synthetic construct
  source 1..75: mol_type = other DNA
atgcccccacgaaccccaaaagcctgccgtgttcgcggctgccgccataccaccactgacccgtcaggctattgc

SEQ ID NO: 29170 - DNA, 75 bp, synthetic construct
  source 1..75: mol_type = other DNA
ccggcattgccacgcgtaacccccacttcaaccgcatgattgagcagatcgaaaaagtggcgatcaaatcccgcg

SEQ ID NO: 29171 - DNA, 75 bp, synthetic construct
  source 1..75: mol_type = other DNA
cacggtaattaacgaggggggctggcaggttgttaaggcaggtggtactgccggtaacaccaccataaatcagaa

SEQ ID NO: 29172 - DNA, 75 bp, synthetic construct
  source 1..75: mol_type = other DNA
taacatgatgctggaaaatccatcgccagagctgctcacggtgttgatccgcgaactgagcgggaggggaagatg

SEQ ID NO: 29173 - DNA, 75 bp, synthetic construct
  source 1..75: mol_type = other DNA
gtcacaaagaagtggattccggcgagtggaagacgggcgaaagcaacaccaccaaagtgaccagtaccaacagct

SEQ ID NO: 29174 - DNA, 75 bp, synthetic construct
  source 1..75: mol_type = other DNA
gtggccgcagagggggagttctgcaatgcgcaagatgagccaattgacctgcctgcggacgctctgattggcatt

SEQ ID NO: 29175 - DNA, 75 bp, synthetic construct
  source 1..75: mol_type = other DNA
ggtacagccacgaatgtcaccctgaagcagggaggcgcactggtcaccagtacggcggcaaccgtcaccggcagc

SEQ ID NO: 29176 - DNA, 75 bp, synthetic construct
  source 1..75: mol_type = other DNA
cagctggcgatgctgctggaaggtatcgactggcggcagcctaaaagactgcttacgtccctgactatgttgtaa

SEQ ID NO: 29177 - DNA, 75 bp, synthetic construct
  source 1..75: mol_type = other DNA
ctggctgcgaaagtacaaacggcgctgaaagacgatcccatgtccggccatgttttcattttccggggccgcagc

SEQ ID NO: 29178 - DNA, 75 bp, synthetic construct
  source 1..75: mol_type = other DNA
tgaaagacgatccgatgtcaggtcacgtttttatcttccgtgggcgtaatggcagtcaggtaaagctcctctggt

SEQ ID NO: 29179 - DNA, 75 bp, synthetic construct
  source 1..75: mol_type = other DNA
ttgtggcgggtaaggctgataatgtcgtactggaaaatggcggacgtctggatgtgctgagcggacacacagcca

SEQ ID NO: 29180 - DNA, 75 bp, synthetic construct
  source 1..75: mol_type = other DNA
catgacgttctcaccgtcccagaatggcacgtcactggacctgcaggccggactggaagcccgtgtccgggaaaa

SEQ ID NO: 29181 - DNA, 75 bp, synthetic construct
  source 1..75: mol_type = other DNA
ggccattcttgccggtatcagcgccggcggtatgtactgcccggagtgtggcacagttcactggccggacggagt

SEQ ID NO: 29182 - DNA, 75 bp, synthetic construct
  source 1..75: mol_type = other DNA
gtggatgatgccgcattaatgatggcttcagcggggatttccggaggtgtgagatatgtcccagccggttggtga

SEQ ID NO: 29183 - DNA, 75 bp, synthetic construct
  source 1..75: mol_type = other DNA
atgatgcactttagcactactgattgtagcctcttctttgcaaagatgtcaaagtttatgacgaaatataccctt

SEQ ID NO: 29184 - DNA, 75 bp, synthetic construct
  source 1..75: mol_type = other DNA
attgccctgactatcgtctttttactggcaaccgccacgctgtggccgttttccgcgtggggcggtaatgcagtc

SEQ ID NO: 29185 - DNA, 75 bp, synthetic construct
  source 1..75: mol_type = other DNA
tcttaatggggaactggtaaaagctgcaactgcatttcgtcgcggatttgcggcaaatacttacatcgcggaaat

SEQ ID NO: 29186 - DNA, 75 bp, synthetic construct
  source 1..75: mol_type = other DNA
ggctggtactcaccacattgcggatgctgtcgcacagtctgctggtggggtgtttgtatcacttccagaaattga

SEQ ID NO: 29187 - DNA, 75 bp, synthetic construct
  source 1..75: mol_type = other DNA
aacgttaaaaatgccctggtactcaaggcctacgacattatcagtcaccgccgtctggagtttgacgccggacac

SEQ ID NO: 29188 - DNA, 75 bp, synthetic construct
  source 1..75: mol_type = other DNA
tgcagcgctgcatggtcgatgtgatggaggaatgggaggactttgccccgttcgccgaccatccgttcggctctc

SEQ ID NO: 29189 - DNA, 75 bp, synthetic construct
  source 1..75: mol_type = other DNA
ttcgatgtctgtattgattcgtggatggccgacccgaaattacttaatttccagtatatgtggaatgttctgatg

SEQ ID NO: 29190 - DNA, 75 bp, synthetic construct
  source 1..75: mol_type = other DNA
tgcgggtggctgcaccctgttcgacctcgaccagctcaaacgcgaaaacagtgatgaggactttaagaacctgtt

SEQ ID NO: 29191 - DNA, 75 bp, synthetic construct
  source 1..75: mol_type = other DNA
tacgcagaacggcgacagcgccggatgcgtggtggtggcaccgccagccgtgccaggcggtaagttccgcattct

SEQ ID NO: 29192 - DNA, 75 bp, synthetic construct
  source 1..75: mol_type = other DNA
tcgtctggagtttgacgccggacacaccgacatagcgcagtcatttatggcaatccgtcgcgccaccaccgccag

SEQ ID NO: 29193 - DNA, 75 bp, synthetic construct
  source 1..75: mol_type = other DNA
tctggcatatgcatttctggagcagaatgccccgcgtaaggccctgaacgccgcgcttaaaggactggcggcagg

SEQ ID NO: 29194 - DNA, 75 bp, synthetic construct
  source 1..75: mol_type = other DNA
gggcaccctggtggtggcctccgaactggcccgctcacggggaaaacgcgccggtgtggcggttgcgctgtctct

SEQ ID NO: 29195 - DNA, 75 bp, synthetic construct
  source 1..75: mol_type = other DNA
gcactggaactggttgatacctccagtgctccagatattgaatggcctacgcctccggtagttcaggccagatga

SEQ ID NO: 29196 - DNA, 75 bp, synthetic construct
  source 1..75: mol_type = other DNA
gtcaggcagatggaaagctggatgatcaccacccggccccgtcgtcgtgaaccattatgggccgtgaccgacgaa

SEQ ID NO: 29197 - DNA, 75 bp, synthetic construct
  source 1..75: mol_type = other DNA
atggcccgttcagctaaaccccgtaaacgcaaacccgcaccacaaagaagcaaacttccccgctatgttgtgaaa

SEQ ID NO: 29198 - DNA, 75 bp, synthetic construct
  source 1..75: mol_type = other DNA
gctgttttcagctatctggcggatgatctgcacgagcttcaacagctcatccagcagcaaaacaaactccattaa

SEQ ID NO: 29199 - DNA, 75 bp, synthetic construct
  source 1..75: mol_type = other DNA
gagggaattacgtagattaagtgaaagtgatgatatggagattaaagttgcagctatcaaggctcttgggcgact

SEQ ID NO: 29200 - DNA, 75 bp, synthetic construct
  source 1..75: mol_type = other DNA
ccgcgcttaaaggactggcggcaggtaatcgtctcatcccggaaagtttcagtggtgaaatcatctggatgcatc

SEQ ID NO: 29201 - DNA, 75 bp, synthetic construct
  source 1..75: mol_type = other DNA
aactgttacgcactggcgctcatgaacaggcacgccatatactgcaggaacatgcagatgaattttcaccttact

SEQ ID NO: 29202 - DNA, 75 bp, synthetic construct
  source 1..75: mol_type = other DNA
acgccatcgccgccggtgccgtgctggtgacgaataatacgcgggaatttgagcgggtaccgggtcttgtgctgg

SEQ ID NO: 29203 - DNA, 75 bp, synthetic construct
  source 1..75: mol_type = other DNA
gcgtctcgccggcacgccgatcggtccgaacgacacggcgatagccggacacgccatcgctgcctgtgccattct

SEQ ID NO: 29204 - DNA, 75 bp, synthetic construct
  source 1..75: mol_type = other DNA
gccgtgctggtgacgaataatgtgcgggagtttgagcgggtaccgggcctggtgctggaagactgggtgaagtaa

SEQ ID NO: 29205 - DNA, 75 bp, synthetic construct
  source 1..75: mol_type = other DNA
cgctaccgccgcacaatggacaataatttccgcctggtgaatgtgtatatcaccgacatgaaaatcacggaaatc

SEQ ID NO: 29206 - DNA, 75 bp, synthetic construct
  source 1..75: mol_type = other DNA
aacagcaatggctggttcccgggtacagatggtgcgctcatcaccggactgacctttcttgaccccaaagatgcc

SEQ ID NO: 29207 - DNA, 75 bp, synthetic construct
  source 1..75: mol_type = other DNA
tggaataacacccgatatggcgctgaattttatcagttgatcacgatgttcggtgcaggcggtcgccagctatga

SEQ ID NO: 29208 - DNA, 75 bp, synthetic construct
  source 1..75: mol_type = other DNA
cggggcccgcgggtcctcaggggccgaagggagataaaggagagcgtggcgacaccggcccggcaggggcaaccg

SEQ ID NO: 29209 - DNA, 75 bp, synthetic construct
  source 1..75: mol_type = other DNA
tccgccttcacatgccgggaccattaccgtctatgaaggttccagaccaggtacgctgaatgattttctcggtgc

SEQ ID NO: 29210 - DNA, 75 bp, synthetic construct
  source 1..75: mol_type = other DNA
catgtcggaggatgacgtccggccggaggcactgcgtcgttttgaactgatggtggaagaagcggcgcgtcacgc

SEQ ID NO: 29211 - DNA, 75 bp, synthetic construct
  source 1..75: mol_type = other DNA
cggatacaaaaagatgagtcattggacaatggtttcgccagactgacccaaaatgaaattggcataaaaatgata

SEQ ID NO: 29212 - DNA, 75 bp, synthetic construct
  source 1..75: mol_type = other DNA
acccacttttggacagtgggtaggtgtatatttaaatgctaaaaacaagcgacaattatggataccggaaggatt

SEQ ID NO: 29213 - DNA, 75 bp, synthetic construct
  source 1..75: mol_type = other DNA
ctactgaattttattctcctgaccatgaacgctgcatcatttggaatgatcctgacttaggaataagttggccag

SEQ ID NO: 29214 - DNA, 75 bp, synthetic construct
  source 1..75: mol_type = other DNA
acctacgtttggcaagtgggttggtgtgaatttgtcggcggcgaataagcgccaattatggataccggaaggatt

SEQ ID NO: 29215 - DNA, 75 bp, synthetic construct
  source 1..75: mol_type = other DNA
aaaatgtaataaagaatacaccactaatttcaattgatttgatcattcaaaatgagaaaggtgagtatttagttg

SEQ ID NO: 29216 - DNA, 75 bp, synthetic construct
  source 1..75: mol_type = other DNA
gcctactaccgggagctcgccgaagatgctgagctaaacgcaattgctgatgaaagaatgaagaatccggacatt

SEQ ID NO: 29217 - DNA, 75 bp, synthetic construct
  source 1..75: mol_type = other DNA
cctctggatgacaaggaaaaaggctttatttccagtaccaccatccccgtcttcaaatacctggttgacccgcag

SEQ ID NO: 29218 - DNA, 75 bp, synthetic construct
  source 1..75: mol_type = other DNA
tgcaaactctgccgaccagtggtgatccgttcggtgacgggattggcaaggtagccgggtccagcctgcacgccg

SEQ ID NO: 29219 - DNA, 75 bp, synthetic construct
  source 1..75: mol_type = other DNA
gcaggacaatattgactgtgaatccgggattatcttcgacaacgatgaggatagaacggattcagcagcactgtt

SEQ ID NO: 29220 - DNA, 75 bp, synthetic construct
  source 1..75: mol_type = other DNA
cgctgactcaattacatggtgcttcggttacgtatcgcattgccgtcggcccccagcaagggcgcaaagtcttca

SEQ ID NO: 29221 - DNA, 75 bp, synthetic construct
  source 1..75: mol_type = other DNA
aacacacctgaaaaccgccagttcctgaagcagcaggaaaatttaagcagacaactgcgagaaaaacctgaccat

SEQ ID NO: 29222 - DNA, 75 bp, synthetic construct
  source 1..75: mol_type = other DNA
atgccatgtttgatacagggcgttacaggcgtaaaaaaatccggtaccgcgatgaagtgactggaaaaatgataa

SEQ ID NO: 29223 - DNA, 75 bp, synthetic construct
  source 1..75: mol_type = other DNA
ccagcctgggcacggaacgtctggcctttgcggcacaacaacgtatgcaactgatgacattcaactgtcagcagg

SEQ ID NO: 29224 - DNA, 75 bp, synthetic construct
  source 1..75: mol_type = other DNA
caacaatttcccattgaagcgatgtgtcaggtatttggtgtatccaggagcggttattacaactgggtacagcat

SEQ ID NO: 29225 - DNA, 75 bp, synthetic construct
  source 1..75: mol_type = other DNA
atgaatagaattgaacattaccatgactggcttcgtgatgcacatgcgatggagaaacaagctgaaaaaatgctt

SEQ ID NO: 29226 - DNA, 75 bp, synthetic construct
  source 1..75: mol_type = other DNA
tgaaaaataatggctacgtgcaggacacgaataatcaacgaaattatatgtttgagcggctggatcttggcgttg

SEQ ID NO: 29227 - DNA, 75 bp, synthetic construct
  source 1..75: mol_type = other DNA
catcgagtctgaaatcatcgaaatggcagaacaacgccaggaagaaggcacccagtggtttaaccgcgtaatggg

SEQ ID NO: 29228 - DNA, 75 bp, synthetic construct
  source 1..75: mol_type = other DNA
tatccttggactgattttcgaacacaacagacaaaacaaaggtaagggcgaaatgaccgaagaggtcaaacgctt

SEQ ID NO: 29229 - DNA, 75 bp, synthetic construct
  source 1..75: mol_type = other DNA
cgcccacgggtttatggcgctgagcgatacggtgcagtttgtctacaaggtgacgaactactacgcgccgcagtc

SEQ ID NO: 29230 - DNA, 75 bp, synthetic construct
  source 1..75: mol_type = other DNA
ttgctgtcccgcctgaggagacagaagccgtaaaaaatgcagtccccccgttaaatggccgcaaagctgtcgcat

SEQ ID NO: 29231 - DNA, 75 bp, synthetic construct
  source 1..75: mol_type = other DNA
tgcgttcaccgatgccgaaaaagcgcagggactgaccgatttcaatgacctggacgccagccggggacgggccgc

SEQ ID NO: 29232 - DNA, 75 bp, synthetic construct
  source 1..75: mol_type = other DNA
cccgggagagagcgtgactgccgtactgcacaattttggtcgtgctgaatatgcacccggcaaaggagagagttt

SEQ ID NO: 29233 - DNA, 75 bp, synthetic construct
  source 1..75: mol_type = other DNA
atctgttattcatccggcagggacagggcaaaagcgccagcggtaaaccactgccggtgatctcaatcacacgta

SEQ ID NO: 29234 - DNA, 75 bp, synthetic construct
  source 1..75: mol_type = other DNA
tggaaaggttttgccctggtatgcaaagggaaatttaccgttgatgaggttgaacaccggggcgcaccggatgtg

SEQ ID NO: 29235 - DNA, 75 bp, synthetic construct
  source 1..75: mol_type = other DNA
ctgctactgctactgctactgctactgctactgctactgctactgctactgttcttctttttcctgctgctctga

SEQ ID NO: 29236 - DNA, 75 bp, synthetic construct
  source 1..75: mol_type = other DNA
acccggacgggacgggaaacctgaacgatatggagcacctgaaacagtcagtcagggacatcctgaccaccccgc

SEQ ID NO: 29237 - DNA, 75 bp, synthetic construct
  source 1..75: mol_type = other DNA
tgtgcgcttttttgtggctggcggtgagtcacgctttggctgcggatagcacgattactatccgcggctatgtca

SEQ ID NO: 29238 - DNA, 75 bp, synthetic construct
  source 1..75: mol_type = other DNA
ctgttaccgcatgggcgtcaacgtggcgcatcccgcaatttaaaacggttggcctgccgacaatgggggcttacc

SEQ ID NO: 29239 - DNA, 75 bp, synthetic construct
  source 1..75: mol_type = other DNA
gtttcaacgcgtattctgaaagcaaccgaaagagcaagtacaattcgcgttaactatttcattaaagatttgtgg

SEQ ID NO: 29240 - DNA, 75 bp, synthetic construct
  source 1..75: mol_type = other DNA
tttaaacaaccgatagatgatgcggaatggaccattacgactctgactcataccgtcagcccggataatggtttt

SEQ ID NO: 29241 - DNA, 75 bp, synthetic construct
  source 1..75: mol_type = other DNA
atgtacggaacatgcgaaacgctatgccgggagctggcagcaaagtattcgggagacacgccactgatgctggtt

SEQ ID NO: 29242 - DNA, 75 bp, synthetic construct
  source 1..75: mol_type = other DNA
cggaagaccagcggactgaatccggtatttcttccggcgtggcgatggagatcatcaataacgtgagagaaaacc

SEQ ID NO: 29243 - DNA, 75 bp, synthetic construct
  source 1..75: mol_type = other DNA
gcgatagcgaagacgactatgaggagaaattgcttattgccagatgggaactgacagcagaacaggctgttacac

SEQ ID NO: 29244 - DNA, 75 bp, synthetic construct
  source 1..75: mol_type = other DNA
cctgatttggcaattgaatggcctttagatgatgaagatttattgatatcggaaaaagatttattaggaagaaaa

SEQ ID NO: 29245 - DNA, 75 bp, synthetic construct
  source 1..75: mol_type = other DNA
acgtccgagacgaacgccaggtcttctgaaacggcagcgggacagagcgcctcagctgcggcaggctcaaaaaca

SEQ ID NO: 29246 - DNA, 75 bp, synthetic construct
  source 1..75: mol_type = other DNA
agcaggctggcgcacgttacggtgtgccagaagggttgatgactgcactgggtgccaaggagtcttcttacaacc

SEQ ID NO: 29247 - DNA, 75 bp, synthetic construct
  source 1..75: mol_type = other DNA
catagaaatggttcgtaggtatgctcaccttgcgcctaatcatttgacagagcatgcaaggaaaatagacgacat

SEQ ID NO: 29248 - DNA, 75 bp, synthetic construct
  source 1..75: mol_type = other DNA
atgcagaatgaaataatgggttttctgagcagacataatggagggaaaaccgcagaaattgcggaggcgctggcg

SEQ ID NO: 29249 - DNA, 75 bp, synthetic construct
  source 1..75: mol_type = other DNA
aatgaagtggtcagacataaacgatggtcatcttcacattggacagagtaaaacaggagccaaaattgccattcc

SEQ ID NO: 29250 - DNA, 75 bp, synthetic construct
  source 1..75: mol_type = other DNA
atgaaagaacgtggtgttgtttttaatgacgatatggttagggccatcctcgaaggaaggaagacgcagactcgc

SEQ ID NO: 29251 - DNA, 75 bp, synthetic construct
  source 1..75: mol_type = other DNA
cgctgaaacattcgggctaacctccgctgaagccagtaaggatattcgacaggctttaaaaggttttgcgggtaa

SEQ ID NO: 29252 - DNA, 75 bp, synthetic construct
  source 1..75: mol_type = other DNA
gagcgtggggaaagtctggtgcttaatcttccgacgaagcaaaaggcgcaactttcacagatggcagacagtgaa

SEQ ID NO: 29253 - DNA, 75 bp, synthetic construct
  source 1..75: mol_type = other DNA
tgtttaggtataagcaattacatcctaagcatgttgactataaagatgcattcaaaaatgtattgggtaaagatg

SEQ ID NO: 29254 - DNA, 75 bp, synthetic construct
  source 1..75: mol_type = other DNA
cgtgagggaatgccgccgcgtgaaggtggcgacgagttcagccaggcatggaagcagactgtggaaattaaaggt

SEQ ID NO: 29255 - DNA, 75 bp, synthetic construct
  source 1..75: mol_type = other DNA
tggatgcagataaaaagcagatacagtgcgtggtaagaccgctgcaaattctgcgtgctgacgggacgtgggaaa

SEQ ID NO: 29256 - DNA, 75 bp, synthetic construct
  source 1..75: mol_type = other DNA
cggatattcacggtagaaaacgccgtggcgttctggaggcggattcagctcgacatgcccgccagttgctgcgtg

SEQ ID NO: 29257 - DNA, 75 bp, synthetic construct
  source 1..75: mol_type = other DNA
agcgtctgtgcggttgcggaaagcatgatggccgtgaacacgggcagtcgcttacagtacaactgcgactggggc

SEQ ID NO: 29258 - DNA, 75 bp, synthetic construct
  source 1..75: mol_type = other DNA
ggtttaggcggttttcttgttgcgctacgtcaggtaatcgaggcgcgaggggggatttccgaagccgccaggaaa

SEQ ID NO: 29259 - DNA, 75 bp, synthetic construct
  source 1..75: mol_type = other DNA
cgttatggcgtcagtctcattcatctggatgccggtgctgaatgtctgcaggatttacccactttcaactggtaa

SEQ ID NO: 29260 - DNA, 75 bp, synthetic construct
  source 1..75: mol_type = other DNA
ctcaaatcgattcctgttggaatcgcctacgcagtttggtcgggcctcgggatcgtcttggtcactgcgattgca

SEQ ID NO: 29261 - DNA, 75 bp, synthetic construct
  source 1..75: mol_type = other DNA
tcacacttacccgacgttatggcgtcagtctcattcatctggatgccagcgctgaatgcctgccggatttaccca

SEQ ID NO: 29262 - DNA, 75 bp, synthetic construct
  source 1..75: mol_type = other DNA
ggtttaggtggttttcttgttgcgctacgtcaggtaatcgaggcgcgaggggggatttccgaagctgccaggaaa

SEQ ID NO: 29263 - DNA, 75 bp, synthetic construct
  source 1..75: mol_type = other DNA
ccgcgggtgggccaggaggtgattgttgattttctgaacggggacccggaccagccgctggtcatgggccggacg

SEQ ID NO: 29264 - DNA, 75 bp, synthetic construct
  source 1..75: mol_type = other DNA
agggtaatcacgcaggtggtgatactggatgcagataaaaagcagatacagtgcgtggtaagaccgctgcaaatc

SEQ ID NO: 29265 - DNA, 75 bp, synthetic construct
  source 1..75: mol_type = other DNA
caactgtgcgcatcgtggaagttaatgtgccacgcgtcgctggcatttgcatcaaaggagacgcaggagagcaaa

SEQ ID NO: 29266 - DNA, 75 bp, synthetic construct
  source 1..75: mol_type = other DNA
cggtgttgaccgtgtgctgacagtggatctgcacgctgaacagattcagggtttcttcgacgttccggttgataa

SEQ ID NO: 29267 - DNA, 75 bp, synthetic construct
  source 1..75: mol_type = other DNA
tctgcttccgcaatatgatacagatatcgaatcccgggcaaacgaactgtggaaaaaggctgtgcacactatcaa

SEQ ID NO: 29268 - DNA, 75 bp, synthetic construct
  source 1..75: mol_type = other DNA
gaagattgcccggcagaatgctgtaaacaaaatctggatgctcgaaggttacttgctgaagcagaagttaagcga

SEQ ID NO: 29269 - DNA, 75 bp, synthetic construct
  source 1..75: mol_type = other DNA
agcaaagtcgatatggctgaacaactcaaccgaaaactgaaaggctgggccatgttctatcagttcgttgatttt

SEQ ID NO: 29270 - DNA, 75 bp, synthetic construct
  source 1..75: mol_type = other DNA
tgaaagatgatggcggtgcagatatcaaagggtccgtggatgttcaggaccgtgagggcagcattgaggtggtgg

SEQ ID NO: 29271 - DNA, 75 bp, synthetic construct
  source 1..75: mol_type = other DNA
agggtaatcacacaggtggtgatactggatgcggataaaaagcagatacagtgcgtggtaagaccgctgcaaatc

SEQ ID NO: 29272 - DNA, 75 bp, synthetic construct
  source 1..75: mol_type = other DNA
atactggatgcggataaaaagcagatacagtgcgtggtaagaccgctgcaaatcctgcgtgctgacgggacgtgg

SEQ ID NO: 29273 - DNA, 75 bp, synthetic construct
  source 1..75: mol_type = other DNA
gataaaaagcagatacagtgcgtggtaagaccgctgcaaatcctgcgtgctgacgggacgtgggaaaatattggc

SEQ ID NO: 29274 - DNA, 75 bp, synthetic construct
  source 1..75: mol_type = other DNA
cgtgatgacgttgataagttgatcatcggtagtttctgctctatcgggagtggggcttcctttatcatggctggc

SEQ ID NO: 29275 - DNA, 75 bp, synthetic construct
  source 1..75: mol_type = other DNA
cgctgcagaggacgctttctggcctgccacagtgggcatcagagcgtattctgcaacagataaaccagcttgctc

SEQ ID NO: 29276 - DNA, 75 bp, synthetic construct
  source 1..75: mol_type = other DNA
gatgcttacgcacttagctcgcaacaaaaagcgcgagcggcgattgacgccggacgatttaaagatgagatcgtc

SEQ ID NO: 29277 - DNA, 75 bp, synthetic construct
  source 1..75: mol_type = other DNA
gtcacatacccgtgccgttcgcggtatcgacggggacgtgaaacttaaccgggcactgtgggtgatggcggaagc

SEQ ID NO: 29278 - DNA, 75 bp, synthetic construct
  source 1..75: mol_type = other DNA
tcagattgtgaagcgaaaaggacggctatatgtgatttgtaaatctaatccacgttttaaggccgttcagggtcg

SEQ ID NO: 29279 - DNA, 75 bp, synthetic construct
  source 1..75: mol_type = other DNA
gcaagagcgtcagcctgaagcgggattgcctgccttatctgctttgcgcaatgttactggctgcggcaatgagca

SEQ ID NO: 29280 - DNA, 75 bp, synthetic construct
  source 1..75: mol_type = other DNA
gtggggaaagcaaatttcccgtactggcagtaaacctgtggtgttgtgggctctgggaggatatggcataagctt

SEQ ID NO: 29281 - DNA, 75 bp, synthetic construct
  source 1..75: mol_type = other DNA
ggatgcgtctgtggtcagtctctgggggaagtgcgtgttccgcaccggggaaatgtggtggacagagtcattgaa

SEQ ID NO: 29282 - DNA, 75 bp, synthetic construct
  source 1..75: mol_type = other DNA
atccttaaagaacatggtattaaacaaagcatgtccagaaaaggcaattgtctggataatgctgtggtggagtgt

SEQ ID NO: 29283 - DNA, 75 bp, synthetic construct
  source 1..75: mol_type = other DNA
agcataaattcaacattcaggggttctacacccaaaccctgcgcagcggctacctggagcaaggcaaacgcatca

SEQ ID NO: 29284 - DNA, 75 bp, synthetic construct
  source 1..75: mol_type = other DNA
gcacagcatagcgccgcagtagacgcggcagaagcacagcgccagtcactgattgatgctgcaatggcttccatc

SEQ ID NO: 29285 - DNA, 75 bp, synthetic construct
  source 1..75: mol_type = other DNA
aaacggacaacatgtcccggaaatcatcctgctcaattcccatgacggtacctccagctaccagatgctgccggg

SEQ ID NO: 29286 - DNA, 75 bp, synthetic construct
  source 1..75: mol_type = other DNA
ggtgcacagccggaaccatccccggaactgcttccggaaccacaggcggaagatgtcaccacggaaaatggtgat

SEQ ID NO: 29287 - DNA, 75 bp, synthetic construct
  source 1..75: mol_type = other DNA
cgcacagttctgcgtgccgtccgtgacacggtggtctctgttgcccgcgcggtatggaactggattttcttctga

SEQ ID NO: 29288 - DNA, 75 bp, synthetic construct
  source 1..75: mol_type = other DNA
cggacatcagcaggtgctgtttgtggtgacgcaggctgacaaaacggaaccctgccatgaatgggatatggcagg

SEQ ID NO: 29289 - DNA, 75 bp, synthetic construct
  source 1..75: mol_type = other DNA
cctgccatgaatgggatatggccggcattcagccttctcccgcacaggcacagaacattcgtgagaaaacagatg

SEQ ID NO: 29290 - DNA, 75 bp, synthetic construct
  source 1..75: mol_type = other DNA
ttattcccgccccggtgcggaccattattcaggccgtgcgttcctcggtggtgtcagtggcccgcgctgtctggg

SEQ ID NO: 29291 - DNA, 75 bp, synthetic construct
  source 1..75: mol_type = other DNA
gaccgtgccctgtctgtggatgagtatttctggcgacacatcctgcaccggggacatcagcgggtactgtttgtg

SEQ ID NO: 29292 - DNA, 75 bp, synthetic construct
  source 1..75: mol_type = other DNA
tgcgcagggtgcttcatgaggtcagtccttttgcacaggagcctgtggactgtgtgctgtgggtgaaagcagatg

SEQ ID NO: 29293 - DNA, 75 bp, synthetic construct
  source 1..75: mol_type = other DNA
acagctacgactgcggtaaaaaaatgggttatatgcaggcatttgtgaagtatggactacgcaacctgaaagaag

SEQ ID NO: 29294 - DNA, 75 bp, synthetic construct
  source 1..75: mol_type = other DNA
tcttgtacaacagcacattatttcggtaatggaaggagggcgggaagccttcgagcgacgcagggaagtttacgg

SEQ ID NO: 29295 - DNA, 75 bp, synthetic construct
  source 1..75: mol_type = other DNA
tggaggtgctgagcaagatgattcgacagtacttcagtcaggaacaatctgaagagaaaaccatacaggccctga

SEQ ID NO: 29296 - DNA, 75 bp, synthetic construct
  source 1..75: mol_type = other DNA
aaatagccaacctgttcgacaaagattatgagacagtctatggctaccaaactgcaggacgggaatacaccttgt

SEQ ID NO: 29297 - DNA, 75 bp, synthetic construct
  source 1..75: mol_type = other DNA
gtgtggtaggcgttgccagcgcctggtacttaaatcaggcaggacatgaggtcaccgtcattgatcgggagccgg

SEQ ID NO: 29298 - DNA, 75 bp, synthetic construct
  source 1..75: mol_type = other DNA
gtccggatatgaaggtggattcagagcccaaagtggtgacagttaaactgggtgatggttatgaacagcgtcgtc

SEQ ID NO: 29299 - DNA, 75 bp, synthetic construct
  source 1..75: mol_type = other DNA
cttctggcctgagtggaatcaccaggcattgtgccagacgtgccacaaccgtaagacgacacgggaagatccagc

SEQ ID NO: 29300 - DNA, 75 bp, synthetic construct
  source 1..75: mol_type = other DNA
agcctggcaggttggggaaacgttgaagcctggagataaccgttgtgcaggtgtcaggaatgagtatgcatcatt

SEQ ID NO: 29301 - DNA, 75 bp, synthetic construct
  source 1..75: mol_type = other DNA
cgcgattctggctgggagaaacggggagagaacttagaaaggcgggtgcagaagcgcaagttgttgctttttacc

SEQ ID NO: 29302 - DNA, 75 bp, synthetic construct
  source 1..75: mol_type = other DNA
ccccgttgggaggccacggcgctggaatcgtttctggcagagcacggaggctggaaagcctttctgtggacgccg

SEQ ID NO: 29303 - DNA, 75 bp, synthetic construct
  source 1..75: mol_type = other DNA
gactccacatttggctgcgttggccccattggtccactgaaacacctctcaaaagaggcactggaagccgcagcc

SEQ ID NO: 29304 - DNA, 75 bp, synthetic construct
  source 1..75: mol_type = other DNA
aacttgggatgacggtgatggcgaagacctgtatctcaaagaggtaacccactggatgcctctaccagaaccgcc

SEQ ID NO: 29305 - DNA, 75 bp, synthetic construct
  source 1..75: mol_type = other DNA
atgaaaacctttcgctggaaagtgaagccggatatggaggtgaactcgcagccatcggtgcgtgaagtgcgtttt

SEQ ID NO: 29306 - DNA, 75 bp, synthetic construct
  source 1..75: mol_type = other DNA
tgaattaccagttcctgccaggcacgctgattaattttgccgtacttaacgtcacagacagaaagagcgaagata

SEQ ID NO: 29307 - DNA, 75 bp, synthetic construct
  source 1..75: mol_type = other DNA
ggataactggatcagcattaccctgggggattcggttactgttggcagtggagccattattctgtctccgtatat

SEQ ID NO: 29308 - DNA, 75 bp, synthetic construct
  source 1..75: mol_type = other DNA
tgtcagcgggtacggcgcaggggccgtttaccggacgccggcagggcgtggccacacatctcttcgtctcggtac

SEQ ID NO: 29309 - DNA, 75 bp, synthetic construct
  source 1..75: mol_type = other DNA
atgattcgcacgatgctgcagggcaaactccaccgcgtgaaagtgactcatgcggacctgcactatgaaggttct

SEQ ID NO: 29310 - DNA, 75 bp, synthetic construct
  source 1..75: mol_type = other DNA
tacaatagcgtcaggcctcaccattacaacggtgggttgacgccggaagaatcagagaacagataccgtttttac

SEQ ID NO: 29311 - DNA, 75 bp, synthetic construct
  source 1..75: mol_type = other DNA
tgtcagcccggaaaacatcaatacaaaaatgcctgtcaggagcatacgtgtttgccgaatctgctcgagcgtcag

SEQ ID NO: 29312 - DNA, 75 bp, synthetic construct
  source 1..75: mol_type = other DNA
tatctcctcccgcctcgacctacgtaaggctattctcctcggagctacccggccggtactgatgaatgaactttc

SEQ ID NO: 29313 - DNA, 75 bp, synthetic construct
  source 1..75: mol_type = other DNA
cagcacggggctgacaactggaaaatcctgccgggtgtaccgttgtatgacacgattgttatcgtcactggtgag

SEQ ID NO: 29314 - DNA, 75 bp, synthetic construct
  source 1..75: mol_type = other DNA
gagctctggttgagttgctgttcaatgatcccgaggtcaccaagatccaaacggacccgtcgccgagcaacttgc

SEQ ID NO: 29315 - DNA, 75 bp, synthetic construct
  source 1..75: mol_type = other DNA
cacgagaggaagaaagcaagaaaggaatggattctgcacaagttacgggagctacaagctcttatgcacgcaagt

SEQ ID NO: 29316 - DNA, 75 bp, synthetic construct
  source 1..75: mol_type = other DNA
cgaaaggtcgtcaactgcataaatttggtggcagtagtctggctgatgtgaagtgttatttgcgtgtcgcgggca

SEQ ID NO: 29317 - DNA, 75 bp, synthetic construct
  source 1..75: mol_type = other DNA
taagttgttgcctaaaagagggcgtgaagagagcaatttaatgcccgaaatggggtatctccatattgatggtaa

SEQ ID NO: 29318 - DNA, 75 bp, synthetic construct
  source 1..75: mol_type = other DNA
agggcgtgatccgaaatctcctaagttatcaggaagacatatacatgccagtaaatcggcttttaatcataaagt

SEQ ID NO: 29319 - DNA, 75 bp, synthetic construct
  source 1..75: mol_type = other DNA
ttttctggccgggctggcacttctgaaaatgaatccggcagaggcttaccgactggctgcatgggctgacgatga

SEQ ID NO: 29320 - DNA, 75 bp, synthetic construct
  source 1..75: mol_type = other DNA
ttcacaaaaaactgatcgaggcactgaaaattcgtgccggccacgaaaatacctcagtcaacgccctcgccgcac

SEQ ID NO: 29321 - DNA, 75 bp, synthetic construct
  source 1..75: mol_type = other DNA
tctcggctacctgattgaagtaaaggagtggtggcaactcaacgaggagccaggaacatttcgcattgttgtcgg

SEQ ID NO: 29322 - DNA, 75 bp, synthetic construct
  source 1..75: mol_type = other DNA
atgaaggcaggagtcatgctggctgatttcacaccatcgggtatagcgcagccgggattatttgatgaaatccag

SEQ ID NO: 29323 - DNA, 75 bp, synthetic construct
  source 1..75: mol_type = other DNA
cacaggagattattgaactactggcaccgcaatatccgcagattcaattttctactccagataatcctcatacga

SEQ ID NO: 29324 - DNA, 75 bp, synthetic construct
  source 1..75: mol_type = other DNA
tccaagatgcgaacaccacatcttgtgccactcagccaacaggctgtagccatactggcagaacttcagacatgg

SEQ ID NO: 29325 - DNA, 75 bp, synthetic construct
  source 1..75: mol_type = other DNA
atgagtgccaatgaaaacaacctgatttggatcgatcttgagatgaccggtctggatcccgagcgcgatcgcatt

SEQ ID NO: 29326 - DNA, 75 bp, synthetic construct
  source 1..75: mol_type = other DNA
gctgcttacattcataaagcagaacatctggaagaacgtcgactgatgctacagtggtgggccgattttctggat

SEQ ID NO: 29327 - DNA, 75 bp, synthetic construct
  source 1..75: mol_type = other DNA
tttgattgggattccgggaaagtgctgattttcccagcacagccactgaccacgctaacaccagaacagattact

SEQ ID NO: 29328 - DNA, 75 bp, synthetic construct
  source 1..75: mol_type = other DNA
atgatgtctgtcatttctgatggcgtcctcattggtctggcgatctacttcgcttatccgctagtccgtaaagca

SEQ ID NO: 29329 - DNA, 75 bp, synthetic construct
  source 1..75: mol_type = other DNA
tctgctctgaaagcgctggaaggcgacgcagagtgggaagcgaaaatcctggaactggctggcttcctggattct

SEQ ID NO: 29330 - DNA, 75 bp, synthetic construct
  source 1..75: mol_type = other DNA
aattagagtcagagagcggtatggatgtcctccctaaaaataatcaatttaactcgtcaaaaataaacttcgtca

SEQ ID NO: 29331 - DNA, 75 bp, synthetic construct
  source 1..75: mol_type = other DNA
aaatcctatcgtgataaatccaaagtcagtaaggttgttgctggtaagaaaccatcagtcagtatttctgattct

SEQ ID NO: 29332 - DNA, 75 bp, synthetic construct
  source 1..75: mol_type = other DNA
aaccataggccctgaaggttttggtaaaaaagaaagaagctggaacgacagaaaaatgtctgttatatggcgtga

SEQ ID NO: 29333 - DNA, 75 bp, synthetic construct
  source 1..75: mol_type = other DNA
gggaagcgaaaatcctggaactggctggcttcctggattcttacattccggaaccagagcgtgcgattgacaagc

SEQ ID NO: 29334 - DNA, 75 bp, synthetic construct
  source 1..75: mol_type = other DNA
gcggcagtgcactcagataccacccgcaatacgacaccgaacggccctggtttgaacacactgacgacgggctga

SEQ ID NO: 29335 - DNA, 75 bp, synthetic construct
  source 1..75: mol_type = other DNA
caatgtcaccacgattattatggggagcggtactgcacacactgccagaccggaggtttcagtcttccccggaca

SEQ ID NO: 29336 - DNA, 75 bp, synthetic construct
  source 1..75: mol_type = other DNA
ttgccgaaggggatgaaagccgaaacgaactggacgaaggacaacggcaaactgaacgcagtgagactggtgcag

SEQ ID NO: 29337 - DNA, 75 bp, synthetic construct
  source 1..75: mol_type = other DNA
tatcggccacgttgaccatggtaaaactactctgaccgctgcaatcactaccgtactggctaaaacctacggcgg

SEQ ID NO: 29338 - DNA, 75 bp, synthetic construct
  source 1..75: mol_type = other DNA
ctgctccactatgttcccgatctgcaccgcaagatgctgctggcaacactgtggaatacgggcgcgcgtattaat

SEQ ID NO: 29339 - DNA, 75 bp, synthetic construct
  source 1..75: mol_type = other DNA
tcaataaagcacttgagcgctttcattttcgcttaaacgcatcaggcgctcatgctgaacgcgcagcccgagagt

SEQ ID NO: 29340 - DNA, 75 bp, synthetic construct
  source 1..75: mol_type = other DNA
aacgcgaaatagaccatctgcaggcgcagctggataaactccgccggatgaacttcggcagtcgttccgaaaaag

SEQ ID NO: 29341 - DNA, 75 bp, synthetic construct
  source 1..75: mol_type = other DNA
tttattatggccgacatttcttcgtttgctggcagataaagttgatatccgagatgccggatttgatatatgttt

SEQ ID NO: 29342 - DNA, 75 bp, synthetic construct
  source 1..75: mol_type = other DNA
gccgggtcagcgttggcacctgcagtgtggttcgcttacagcccggacaggaaaggcatccatccgcagactcat

SEQ ID NO: 29343 - DNA, 75 bp, synthetic construct
  source 1..75: mol_type = other DNA
ctccttgcttgctgcgcttgttcgtgtcgcggattttgtcactgatccaacgattaaaaaattgttgaaggataa

SEQ ID NO: 29344 - DNA, 75 bp, synthetic construct
  source 1..75: mol_type = other DNA
tgttatcaggccaaaaggttatttctgtaccggatgtgaatttaaaatctggagtgagttttctggtaagaaaat

SEQ ID NO: 29345 - DNA, 75 bp, synthetic construct
  source 1..75: mol_type = other DNA
gtgcacgttcgcaccccgtcagccctgacggaggaagcgctgaaacggatcggcgaactgtacgccatcgaggca

SEQ ID NO: 29346 - DNA, 75 bp, synthetic construct
  source 1..75: mol_type = other DNA
agaaagctgttgcccggagtgtggcggtgagctggattatctgggggaagtcagcgctgaacagctggaactggt

SEQ ID NO: 29347 - DNA, 75 bp, synthetic construct
  source 1..75: mol_type = other DNA
cgggctgggtggatgcatgctgccggctgctgtctccgctggaagaggcgcttcatggctatgtgctgactgacg

SEQ ID NO: 29348 - DNA, 75 bp, synthetic construct
  source 1..75: mol_type = other DNA
tgttaaaggggctgaaacctttgctgcctgggcggaaaagtggctacgtggctaccagatggcggactctacccg

SEQ ID NO: 29349 - DNA, 75 bp, synthetic construct
  source 1..75: mol_type = other DNA
cgtcgatgagcgtactaaaaaacagctaaaaaccgtcctgagcgtggacagcaattacttctggctgcgttcaga

SEQ ID NO: 29350 - DNA, 75 bp, synthetic construct
  source 1..75: mol_type = other DNA
tatcaactcattcgtaaaatatatagtaataattctcgcgcgaatagttttgaaatgacaatagatgaacttaaa

SEQ ID NO: 29351 - DNA, 75 bp, synthetic construct
  source 1..75: mol_type = other DNA
tgctgaaagccttcgggcgacacatagcccggagttttcaccgggggcgtggtgtacacatccccgccatgaaaa

SEQ ID NO: 29352 - DNA, 75 bp, synthetic construct
  source 1..75: mol_type = other DNA
tttctgaactgagccaagttagcgaagaaacaatagagtccttagttccgaagatatcaaataatatgaaaacca

SEQ ID NO: 29353 - DNA, 75 bp, synthetic construct
  source 1..75: mol_type = other DNA
ccgcagcggctgtaaagccccgccgtcatccccgtttcagacgcgaagacatccccgcgccggaacttgaccccg

SEQ ID NO: 29354 - DNA, 75 bp, synthetic construct
  source 1..75: mol_type = other DNA
gacttcccttgtgattaaccgccagttgtggctgtaccacgacagcggtgatgcaggactgacccagctttaccg

SEQ ID NO: 29355 - DNA, 75 bp, synthetic construct
  source 1..75: mol_type = other DNA
tatgatccggatgtactgcagcaggcggtgaatgatgcggttgcgaatattccggtaccggcggacggcaaaagt

SEQ ID NO: 29356 - DNA, 75 bp, synthetic construct
  source 1..75: mol_type = other DNA
ggttgcagatgtgcgctggtggaagtgaatatctggttcctggtcgttacaatttccggaagccattatctaatg

SEQ ID NO: 29357 - DNA, 75 bp, synthetic construct
  source 1..75: mol_type = other DNA
caaaggctggctgcagaaaatccgtgaagatgcaccggatcacgtcatgggtagcaccaccacgggcggtgaaac

SEQ ID NO: 29358 - DNA, 75 bp, synthetic construct
  source 1..75: mol_type = other DNA
gttgaggactaccgctgtgccgcactggtggaaaacatccagattggtgatttcagcgccgccgcagccgaaacc

SEQ ID NO: 29359 - DNA, 75 bp, synthetic construct
  source 1..75: mol_type = other DNA
acgctgtagtgatggatgcggtcaatgagcttatcgacgtggtctaccaggatgatgacgatctggtggtgattt

SEQ ID NO: 29360 - DNA, 75 bp, synthetic construct
  source 1..75: mol_type = other DNA
tgtaccggatgtgaatttaaaatctggagtgagttttctggtaagaaaatcacccaggcacaggccgaaaaactg

SEQ ID NO: 29361 - DNA, 75 bp, synthetic construct
  source 1..75: mol_type = other DNA
tcgcatggaaggtcagcttttactgaatacgatagacctgatcattgatgctgcaattgatgggcatggattggc

SEQ ID NO: 29362 - DNA, 75 bp, synthetic construct
  source 1..75: mol_type = other DNA
gggattttatgcgccagaccgttgaacggcagcataatacctggttccgtgaccaggttgcggcaggacgtcagc

SEQ ID NO: 29363 - DNA, 75 bp, synthetic construct
  source 1..75: mol_type = other DNA
cgtaagcaatttgctaccaaaggcgaagccattgcatttgaaagcttcaccatggacgaagtaaacaaaaagcca

SEQ ID NO: 29364 - DNA, 75 bp, synthetic construct
  source 1..75: mol_type = other DNA
gtcattcagttatgccaatgccaaagatgagcaaaaaacgcattacagcgatacccgctggcatgaagattccgt

SEQ ID NO: 29365 - DNA, 75 bp, synthetic construct
  source 1..75: mol_type = other DNA
atcacctataccaagacaaaaggtaagaaaaatcgtaccgtgccgatatctcaaaatctgtatgatgaactcccc

SEQ ID NO: 29366 - DNA, 75 bp, synthetic construct
  source 1..75: mol_type = other DNA
tcttcaatgaagaagaagcgatacctgttttctataaaacggtacgtgaattccaagagttgaagccatatgaag

SEQ ID NO: 29367 - DNA, 75 bp, synthetic construct
  source 1..75: mol_type = other DNA
acccatgacgccgggcaatccgcgcagatacagcaataaccgcatgtcgggcagtaaaacggagcgtttattttg

SEQ ID NO: 29368 - DNA, 75 bp, synthetic construct
  source 1..75: mol_type = other DNA
ctggcttatattcctacagggattgcttatgctatctggtcaggagtcggtattgtcctgattagcttactgtca

SEQ ID NO: 29369 - DNA, 75 bp, synthetic construct
  source 1..75: mol_type = other DNA
aacgggcattttctgcctgtggaccaggagagtgcccgggttctttccactcccatgacgccgggcaatccgcgc

SEQ ID NO: 29370 - DNA, 75 bp, synthetic construct
  source 1..75: mol_type = other DNA
cgacggtaacggcaacaacacgcccaccaacttaccggcagaagacccggatattgctgatgcaggttattacgg

SEQ ID NO: 29371 - DNA, 75 bp, synthetic construct
  source 1..75: mol_type = other DNA
agcgcagtcacgtttttctataagcctgaattacctgcagccttgaaaggtatgtctgtctgtatccggcccgga

SEQ ID NO: 29372 - DNA, 75 bp, synthetic construct
  source 1..75: mol_type = other DNA
tgtccgcagccatctgtctggccgtatccggtgcgcctgcatgggcgtctgaacatcagtccacactgagcgcgg

SEQ ID NO: 29373 - DNA, 75 bp, synthetic construct
  source 1..75: mol_type = other DNA
atgacgactccaaccagacggataagtttctatctgaagcctgcggccgtcaagaacgaaagcgaagcatgcgcc

SEQ ID NO: 29374 - DNA, 75 bp, synthetic construct
  source 1..75: mol_type = other DNA
gtggttgatttcgcaaacggaatcgatgttgcacaggagcatatccgcacggccggagagcgcacgttcttccgg

SEQ ID NO: 29375 - DNA, 75 bp, synthetic construct
  source 1..75: mol_type = other DNA
ttgcacgcagttatgccggagcggggcttctggcccatgttgttaccgggaaatatgcagaccatctgccgttat

SEQ ID NO: 29376 - DNA, 75 bp, synthetic construct
  source 1..75: mol_type = other DNA
aactgaatcatcttgaagaaaaactccaccgtgttgaccaggttcagcgggcacagttacatcttgagcagatat

SEQ ID NO: 29377 - DNA, 75 bp, synthetic construct
  source 1..75: mol_type = other DNA
gctggactgtcgaagaatgcagggcgatcaaggcgaagtatcagcagaaacttaaagacctgcgaaacagcagaa

SEQ ID NO: 29378 - DNA, 75 bp, synthetic construct
  source 1..75: mol_type = other DNA
aatggttcagcgcgtatgcgatggcgggagtggcttacagccgtgtgtcgactttctccggggattatctccgcg

SEQ ID NO: 29379 - DNA, 75 bp, synthetic construct
  source 1..75: mol_type = other DNA
cgtggccattgatattgcttatgaaggctccggcagtggcgactggcgcactgacggtttcatcgtgggtgtcgg

SEQ ID NO: 29380 - DNA, 75 bp, synthetic construct
  source 1..75: mol_type = other DNA
cgtgatggaccgcatgaccatgaacggtggtcgctgggtgaattttaactgggagagctggcgttcaaatgtcag

SEQ ID NO: 29381 - DNA, 75 bp, synthetic construct
  source 1..75: mol_type = other DNA
atgactaaaaatacacgtttttcccccgaagtccgtcaacgggcagttcgtatggttctggaaagtcagggcgaa

SEQ ID NO: 29382 - DNA, 75 bp, synthetic construct
  source 1..75: mol_type = other DNA
tattacaccagataattgatcgccggacagcatcactgtgcagtgtcgggatgttaacaaacctgaatcatgccg

SEQ ID NO: 29383 - DNA, 75 bp, synthetic construct
  source 1..75: mol_type = other DNA
gatggttggtattatgttcttgctcgttatgataattgtctggttttgtctacttctttcaatgcaggtagtaaa

SEQ ID NO: 29384 - DNA, 75 bp, synthetic construct
  source 1..75: mol_type = other DNA
attacaggaaagaataaaaggattaaatagttggtctaatgagaatataatccaattcaaaccgtatacacttga

SEQ ID NO: 29385 - DNA, 75 bp, synthetic construct
  source 1..75: mol_type = other DNA
tgctgccgtgcatcacagctcaccgatttacgtcaaacgcaatattctggcctcgacatttatcccgcatccgtg

SEQ ID NO: 29386 - DNA, 75 bp, synthetic construct
  source 1..75: mol_type = other DNA
agtgaaggtattgtgtcgatgtttcgtgtggacccggatctggctggtccattgatggcgatggttactaccatg

SEQ ID NO: 29387 - DNA, 75 bp, synthetic construct
  source 1..75: mol_type = other DNA
ccgctaacaccgtgcgtctgccctacagtttcagccgtcggtttagcctggtggcatggtgcgaagcgtcgctgg

SEQ ID NO: 29388 - DNA, 75 bp, synthetic construct
  source 1..75: mol_type = other DNA
actgtcgatttttatctctcctcccgtcgtaacagcaaagctgcataccggtttctgggtaaaatcctcaacaac

SEQ ID NO: 29389 - DNA, 75 bp, synthetic construct
  source 1..75: mol_type = other DNA
aaggacgggcttcagatcatcccgttgtcagaagtcgcggcgaaggatgagtttctgaatatcaagaacgtgagc

SEQ ID NO: 29390 - DNA, 75 bp, synthetic construct
  source 1..75: mol_type = other DNA
cgtaaagttctcgactctctggatgttgttgtgagcattgatttagatggaaacgtacgccgtatgaatgatatt

SEQ ID NO: 29391 - DNA, 75 bp, synthetic construct
  source 1..75: mol_type = other DNA
attactggacctatctggttggggccatttttattgtgttggtgccagggccaaataccctgtttgtactcaaaa

SEQ ID NO: 29392 - DNA, 75 bp, synthetic construct
  source 1..75: mol_type = other DNA
ctggaaacctcaccggcaaaatatacccgccgtggcgtggaagaggatgtttactggtgggtgccgtccttcaac

SEQ ID NO: 29393 - DNA, 75 bp, synthetic construct
  source 1..75: mol_type = other DNA
gaaccgcttcggtgaagtgatcgcccttgaacctgcgctggcaaaatacacccgacgcggattagacctggatac

SEQ ID NO: 29394 - DNA, 75 bp, synthetic construct
  source 1..75: mol_type = other DNA
tgttgttaatattccagatgatatacagcaacatgcaccggaatgcggtgaaacaacagctctactgagcttgat

SEQ ID NO: 29395 - DNA, 75 bp, synthetic construct
  source 1..75: mol_type = other DNA
ggtgtgtttatgctgcctaagctgaaaacggatgacatgaaaacgggtaagaaggtttatctgaagtcaggaaaa

SEQ ID NO: 29396 - DNA, 75 bp, synthetic construct
  source 1..75: mol_type = other DNA
gccgaaggcgtgttcctgctgcccaaacagtctgctgacgatattcagtccggcgcggtggtttatctgaaggac

SEQ ID NO: 29397 - DNA, 75 bp, synthetic construct
  source 1..75: mol_type = other DNA
gtgcagtggcggcgggaatggcatgggagcatgcgccgtcaggcaccaccacggtggcggttaaaatcaatgcct

SEQ ID NO: 29398 - DNA, 75 bp, synthetic construct
  source 1..75: mol_type = other DNA
ccgtggcacagcctctgctgctggcagagcaggaccgcctccgggcagaacagcgcgcggcggaagttgtcgtac

SEQ ID NO: 29399 - DNA, 75 bp, synthetic construct
  source 1..75: mol_type = other DNA
gccgttcacctttgaatggaacggtcgcacctggaacgctggccccgactcaatggcccgtctttatccggtagt

SEQ ID NO: 29400 - DNA, 75 bp, synthetic construct
  source 1..75: mol_type = other DNA
attatttgttgcatcattttttgctggttatcacatcgtggtgcaattgaacttgaacgtcacagagccgcatat

SEQ ID NO: 29401 - DNA, 75 bp, synthetic construct
  source 1..75: mol_type = other DNA
tcagcacagtaattaacaaatcagctaaagccggtttatccggcgtaattatccacgcagttacatgtattcagg

SEQ ID NO: 29402 - DNA, 75 bp, synthetic construct
  source 1..75: mol_type = other DNA
cccgtgctgttaacaagcgcggctataccgttggcatcacgcagaacgtgaaggccgttaatatgcaagcggcga

SEQ ID NO: 29403 - DNA, 75 bp, synthetic construct
  source 1..75: mol_type = other DNA
cagatcattatgggccgtcatgatgatgaagcgaccctcgtcagggtggacgaggcgattaacaaaacctatctc

SEQ ID NO: 29404 - DNA, 75 bp, synthetic construct
  source 1..75: mol_type = other DNA
gaccgctcatgatagcgctgctgtgtgcggtactgctgttacggggtgtcctgtggctgcggtgaataatgcctt

SEQ ID NO: 29405 - DNA, 75 bp, synthetic construct
  source 1..75: mol_type = other DNA
ggcaaatcagcagcacaccctgcaactcatttcacaaatcagtgaggcggccacgaatgaaaaacaacagaacat

SEQ ID NO: 29406 - DNA, 75 bp, synthetic construct
  source 1..75: mol_type = other DNA
aacgcgcactactggttggttaccaacctgtaccagaacatgcgggccaatgcgctgactgacgcggaattacgg

SEQ ID NO: 29407 - DNA, 75 bp, synthetic construct
  source 1..75: mol_type = other DNA
tgcacaggagtcgctgaaaaatacgcgttaatcgaacaatggcgacaacaatttcccattgaagcgatgtgtcag

SEQ ID NO: 29408 - DNA, 75 bp, synthetic construct
  source 1..75: mol_type = other DNA
cccaccggcactgctgaatgcgctgtctctgggcacagataatgaagttggcatggtcattgataatggccggct

SEQ ID NO: 29409 - DNA, 75 bp, synthetic construct
  source 1..75: mol_type = other DNA
gacgtatgttgccacacaggagggatggttgtacctcgctggcatcaaagatgtttatacgtgcgaaattgtcgg

SEQ ID NO: 29410 - DNA, 75 bp, synthetic construct
  source 1..75: mol_type = other DNA
tcggcaacgagcttccggcgtctccagtggagtggctgacggataatggttcatgctaccgggctaatgaaacac

SEQ ID NO: 29411 - DNA, 75 bp, synthetic construct
  source 1..75: mol_type = other DNA
gatgtgcttcgccgtatacaccatgttatcggagagctgcccacgtatggttatcgtcgggtatgggcgctgctt

SEQ ID NO: 29412 - DNA, 75 bp, synthetic construct
  source 1..75: mol_type = other DNA
tccaccggcactgctgaatgcgctgtctctgggtacagataatgaagttggcatggtcattgataatggccggct

SEQ ID NO: 29413 - DNA, 75 bp, synthetic construct
  source 1..75: mol_type = other DNA
ttggggtggggtatagccatggtgccggtgtggaatccccgtggaacggggtagctggtgtgaactggtcgttct

SEQ ID NO: 29414 - DNA, 75 bp, synthetic construct
  source 1..75: mol_type = other DNA
catcgacagggtttacaaattttgcctgggtcaatacatctggtgatacttacgatatttacgttgcaatcggaa

SEQ ID NO: 29415 - DNA, 75 bp, synthetic construct
  source 1..75: mol_type = other DNA
gcttgcgtgaaactgtgggtaataacgcctcattccattgccataacggcaatggttacagttctgatatcgatc

SEQ ID NO: 29416 - DNA, 75 bp, synthetic construct
  source 1..75: mol_type = other DNA
ttcctccgtttctgcctggctgttgcaacaacagggatatcaggtcgaaggcctgtttatgaagaactgggaaga

SEQ ID NO: 29417 - DNA, 75 bp, synthetic construct
  source 1..75: mol_type = other DNA
gatttactgccagtttaacggtcggaacatagaggagctgcggcgtgaacatcgtctgtcacaaccgcagattta

SEQ ID NO: 29418 - DNA, 75 bp, synthetic construct
  source 1..75: mol_type = other DNA
ccgcatagtgcgctgggttatcgctcgccacgggaatatctgcggcagcgggcttgtaatgggttaagtgataac

SEQ ID NO: 29419 - DNA, 75 bp, synthetic construct
  source 1..75: mol_type = other DNA
gagggcgttatctcggatgggagtaagcgtattgctgaactggagaaaagcgaagagcaactcatcaacgagcgt

SEQ ID NO: 29420 - DNA, 75 bp, synthetic construct
  source 1..75: mol_type = other DNA
atggatactatcgatcttggcaacaacgaatctctggtatgtggcgtgtttcccaatcaggacggcacattcacc

SEQ ID NO: 29421 - DNA, 75 bp, synthetic construct
  source 1..75: mol_type = other DNA
tgtgaagaaaaaccagacccggatcaccgggatggataaccagatcctgtcgttgtacgccaaaggcctgacaac

SEQ ID NO: 29422 - DNA, 75 bp, synthetic construct
  source 1..75: mol_type = other DNA
ggctggctggattgtgcggcaccggtattaaaccgccagaccttattgccaccattgcctgttctgcctgtcacg

SEQ ID NO: 29423 - DNA, 75 bp, synthetic construct
  source 1..75: mol_type = other DNA
gcgaatctctggtatgtggcgtgttccccaaccaggacggcacgttcaccgcgatgacgtataccaaaagcaaaa

SEQ ID NO: 29424 - DNA, 75 bp, synthetic construct
  source 1..75: mol_type = other DNA
caatattgatacatccactcccatgggacgtttctttttccatataatgggcgcgctggcggaaatggagcggga

SEQ ID NO: 29425 - DNA, 75 bp, synthetic construct
  source 1..75: mol_type = other DNA
atgaggcatatatcaccggaagaacttattgcgcttcatgatgcgaatataaaccgctacggcggcctgccggga

SEQ ID NO: 29426 - DNA, 75 bp, synthetic construct
  source 1..75: mol_type = other DNA
atgcacgaaaagaacatcgccctgctttgtgatgaagccgaccgacttttgcaactgaacattaatctgctccgg

SEQ ID NO: 29427 - DNA, 75 bp, synthetic construct
  source 1..75: mol_type = other DNA
tgaactggcctgagtctgtaacacaactatcagcaaaagttgctgcgtttgttggctcaggtatttctgttcagc

SEQ ID NO: 29428 - DNA, 75 bp, synthetic construct
  source 1..75: mol_type = other DNA
ggtcctccatctggaacatattcagcccgtccgcaatttattaatcacactgcaggaaaaactcgccaccccggc

SEQ ID NO: 29429 - DNA, 75 bp, synthetic construct
  source 1..75: mol_type = other DNA
tgatattaatatttggatatataaatgccctttttttaggggtgttcatggcggtcatgtgcattgaatactggc

SEQ ID NO: 29430 - DNA, 75 bp, synthetic construct
  source 1..75: mol_type = other DNA
gaaaacggcgattcgtactgtacgggatgcggtggtgtcggttgcccgtgccgtctgggactggattttcttctg

SEQ ID NO: 29431 - DNA, 75 bp, synthetic construct
  source 1..75: mol_type = other DNA
tgaagctccagcgcattgatttttttatcaagcttgtagcggctagtgagtgtagcgacgaagaaaagcggctgg

SEQ ID NO: 29432 - DNA, 75 bp, synthetic construct
  source 1..75: mol_type = other DNA
accaccccggacatccgctatgtgcgtgaggcgctgtaccagacagcccgtcatggtggatttatggccgtcatc

SEQ ID NO: 29433 - DNA, 75 bp, synthetic construct
  source 1..75: mol_type = other DNA
gcatgctgatataccagttccgccgtctccggaagtatataaagtatttcacaatggagtgctggattttaaacc

SEQ ID NO: 29434 - DNA, 75 bp, synthetic construct
  source 1..75: mol_type = other DNA
cggaactggtcaccgggcatacggacgttatctgctcaaccagtatccgccacattctggctgtacgaaagagta

SEQ ID NO: 29435 - DNA, 75 bp, synthetic construct
  source 1..75: mol_type = other DNA
aacgttcgccactccagcttgggtaaaagatgctctcaaacacacttatctcggttatgaaaccaaagaactggt

SEQ ID NO: 29436 - DNA, 75 bp, synthetic construct
  source 1..75: mol_type = other DNA
acgaacgcattctgtctggcatcaccgccactggtccgcatctgccttcacggggatttacaacgatttggccgc

SEQ ID NO: 29437 - DNA, 75 bp, synthetic construct
  source 1..75: mol_type = other DNA
tgccctgtcgctgcaggtgccgggattccgcggtcagatgaacgaaggctggtaccagatacgtattgccggtga

SEQ ID NO: 29438 - DNA, 75 bp, synthetic construct
  source 1..75: mol_type = other DNA
gccgcattccggaggcggtgtatgttctgacgcaggatgatgacacgcctgtaccgctggaagaggcttatgtta

SEQ ID NO: 29439 - DNA, 75 bp, synthetic construct
  source 1..75: mol_type = other DNA
gtgccctgtcgctgcaggtgccgggattccgctgtcagatgaacgaaggctggtatcagatacgtattgccggtg

SEQ ID NO: 29440 - DNA, 75 bp, synthetic construct
  source 1..75: mol_type = other DNA
atgccgcccgaaaacgggggctggaacccggtatcttctgcgccatccacacgtatggccgtcgtctcaactggc

SEQ ID NO: 29441 - DNA, 75 bp, synthetic construct
  source 1..75: mol_type = other DNA
taaaagccaaacttcagccgaagcattcagctttggcgatcccgttcctgttctggaccgccgtgaactgctgga

SEQ ID NO: 29442 - DNA, 75 bp, synthetic construct
  source 1..75: mol_type = other DNA
aacagagtgaagctgaatcagtgccggtacgccatgctgttcacagcgcccagcaaggaaaaggtggttgtggta

SEQ ID NO: 29443 - DNA, 75 bp, synthetic construct
  source 1..75: mol_type = other DNA
ggtattaaatcgatcctggaaaaaggtctggataaacaacctgttcaggatccaaaaccagatctgttatccacg

SEQ ID NO: 29444 - DNA, 75 bp, synthetic construct
  source 1..75: mol_type = other DNA
atgcgaataaccactctggcttccgtagtcattccctgtctcggattttcagccagcagcatagctgctgcagag

SEQ ID NO: 29445 - DNA, 75 bp, synthetic construct
  source 1..75: mol_type = other DNA
gattcgctttgcggatttcgtatcgagcagggaaatacggtgtttgtggcaacgttagcctacgaagttaaacgt

SEQ ID NO: 29446 - DNA, 75 bp, synthetic construct
  source 1..75: mol_type = other DNA
ctcttcaggcagcggatgtccggcgtagcggagatgaagcatttatcattcagcagcagcgtcaggaagcccttg

SEQ ID NO: 29447 - DNA, 75 bp, synthetic construct
  source 1..75: mol_type = other DNA
gcatcggttaaatgtggcaatacatgaaacactcaaaccagtgacggtaaaagaggctctggattactggatcag

SEQ ID NO: 29448 - DNA, 75 bp, synthetic construct
  source 1..75: mol_type = other DNA
atgatgacactggaagccgacagcgttaacgtacaggcgctggatatggggcacattgtcgttgacattgatggt

SEQ ID NO: 29449 - DNA, 75 bp, synthetic construct
  source 1..75: mol_type = other DNA
atactgatatttcagatgtatcgcgtgagttaattgcggcaattaaacaggggtatctcacagtaaaagccgccg

SEQ ID NO: 29450 - DNA, 75 bp, synthetic construct
  source 1..75: mol_type = other DNA
cacccgcgaaacccgtaatacctgcacctattgttccgtaggctgtgggctgttgatgtacagcctcggtgacgg

SEQ ID NO: 29451 - DNA, 75 bp, synthetic construct
  source 1..75: mol_type = other DNA
atgacattccggaagaataaaacgcgatgtgatgaacctgcagaaatgactgagaccgaacaacgtctgttcatt

SEQ ID NO: 29452 - DNA, 75 bp, synthetic construct
  source 1..75: mol_type = other DNA
cgtatccgctcaaataattgctacggtcaggtatcccggcgagatcaggaaagtgcgctggcgtgctggggaatc

SEQ ID NO: 29453 - DNA, 75 bp, synthetic construct
  source 1..75: mol_type = other DNA
gtgtttcagctcaacgttttaccggaaactgaacgccggagaccgtaaaggcgcatgtgctgaaattcgtcgctg

SEQ ID NO: 29454 - DNA, 75 bp, synthetic construct
  source 1..75: mol_type = other DNA
ccgcgatggttccggcatctggaccatctgtcggggggccacgatggtggatggaaaacccgtttttcccggtat

SEQ ID NO: 29455 - DNA, 75 bp, synthetic construct
  source 1..75: mol_type = other DNA
atgacattccggaagaatgaaccgcgatgtgatgaaccgtcagaaatgacagaggccgaacaacgtctgttcatc

SEQ ID NO: 29456 - DNA, 75 bp, synthetic construct
  source 1..75: mol_type = other DNA
gctttgcacgcctttcgctggtccgtgattatgtgctctccctttctgcacggctgcctgccggggaggtgatgt

SEQ ID NO: 29457 - DNA, 75 bp, synthetic construct
  source 1..75: mol_type = other DNA
caaccctgagaaagttcgtgctgacatccgcgataaactgattcagtaccaggaagaatgctttactgtgctgca

SEQ ID NO: 29458 - DNA, 75 bp, synthetic construct
  source 1..75: mol_type = other DNA
taccgcaaatcatcacctcgctggccgctctgattacggccgtaaccggcctaatcaaagtgctacgcgacaaag

SEQ ID NO: 29459 - DNA, 75 bp, synthetic construct
  source 1..75: mol_type = other DNA
ggtcaggtgtttctccttcggcacttctctggcgtagttgctccgatcatcgctggtcaccatgccggtacattc

SEQ ID NO: 29460 - DNA, 75 bp, synthetic construct
  source 1..75: mol_type = other DNA
aggaggttttgtattcttttttattcttaacatgattagcgcgatatacagtatcagcgatatgctcaagcaata

SEQ ID NO: 29461 - DNA, 75 bp, synthetic construct
  source 1..75: mol_type = other DNA
attctcgaccagtttctggatgaaaaggaaggtaaccacaccacggcataccgtgatggtgcgggtatctggacc

SEQ ID NO: 29462 - DNA, 75 bp, synthetic construct
  source 1..75: mol_type = other DNA
ggcggtcagcagtacagccggtggtccggagaatgccataagcaaaggtattgccggtctgtcagcaggaggagg

SEQ ID NO: 29463 - DNA, 75 bp, synthetic construct
  source 1..75: mol_type = other DNA
gtccctataacattggccccggtaagtgtttcccgtcgacgttttataagcggctgaatgctggtgatcgtaaag

SEQ ID NO: 29464 - DNA, 75 bp, synthetic construct
  source 1..75: mol_type = other DNA
gaaattggtgggtatccgtcactgttgttgccagatgtggcgattagtcttgaccgtactgaaggtgccacgctg

SEQ ID NO: 29465 - DNA, 75 bp, synthetic construct
  source 1..75: mol_type = other DNA
gtatgtcacggacacaccggaaaagacatcatgctcggtaaaacgtataccgaagcagaatgcaaagccctcctg

SEQ ID NO: 29466 - DNA, 75 bp, synthetic construct
  source 1..75: mol_type = other DNA
atcctcgaccagtttctggatgaaaaggaaggtaaccacaccacggcataccgtgatggcgcgggtatctggacc

SEQ ID NO: 29467 - DNA, 75 bp, synthetic construct
  source 1..75: mol_type = other DNA
ccgtgatggtgcgggtatctggaccatctgccgaggtgccatcatggtggatggtaagcctgtgattcctggcat

SEQ ID NO: 29468 - DNA, 75 bp, synthetic construct
  source 1..75: mol_type = other DNA
aggcgctggcatgggtggagaaaaacatcaaagtgccactgactgaaccccagaaagcgggtattgcgtcattct

SEQ ID NO: 29469 - DNA, 75 bp, synthetic construct
  source 1..75: mol_type = other DNA
ccgtgatggcgcgggtatctggaccatctgtcgcggtgccacccgggtggatggtaagcctgtcctcccgggcat

SEQ ID NO: 29470 - DNA, 75 bp, synthetic construct
  source 1..75: mol_type = other DNA
cagaaagcggggatcgcgtcattctgtccgtacaacattggccccggtaagtgtttcccgtcgacgttttataaa

SEQ ID NO: 29471 - DNA, 75 bp, synthetic construct
  source 1..75: mol_type = other DNA
acagagccttgttgatgccctgtttcgttcagtgaatttagaaaatgatgcaaatctgcgagggcgcacaatagc

SEQ ID NO: 29472 - DNA, 75 bp, synthetic construct
  source 1..75: mol_type = other DNA
tcccctggcgtatccggatggatctgatgcccggcggcatgaaggcgcttggggtcaagaaaaccctgctgacct

SEQ ID NO: 29473 - DNA, 75 bp, synthetic construct
  source 1..75: mol_type = other DNA
gccccctacattgccaccacaaaacaggggtattacctttccgtctttgaaatcagcggtgccctgaaagaaatg

SEQ ID NO: 29474 - DNA, 75 bp, synthetic construct
  source 1..75: mol_type = other DNA
ccgaactcactcgtcaattaaaattgataaagaccgttatctctccggcaatcctatcgaggtgacggtagaact

SEQ ID NO: 29475 - DNA, 75 bp, synthetic construct
  source 1..75: mol_type = other DNA
ctggcgaagctgaagtaccagacagcgctgggtgaactgaaaaccctgtcggagatacagaagcaggaactgctg

SEQ ID NO: 29476 - DNA, 75 bp, synthetic construct
  source 1..75: mol_type = other DNA
ggaggcattcagtggatttacgatggaggctcagcttcagatagtaccatcaacagtggttaccaggtcatctcc

SEQ ID NO: 29477 - DNA, 75 bp, synthetic construct
  source 1..75: mol_type = other DNA
tgaaaatccgccacgaagcttttcttgataatgtggaacaggcactgagacattcatctgatggcctgattctcc

SEQ ID NO: 29478 - DNA, 75 bp, synthetic construct
  source 1..75: mol_type = other DNA
tcgagaatgatttaagccagtcggcgttgctgctgacagtgccacaggcttacctcgaatataccagcagcgact

SEQ ID NO: 29479 - DNA, 75 bp, synthetic construct
  source 1..75: mol_type = other DNA
ctggtatcagaacgatgcgaataagaccggcgcttatgttgacagctgggcgctgtataactggtttgataacag

SEQ ID NO: 29480 - DNA, 75 bp, synthetic construct
  source 1..75: mol_type = other DNA
cagaatctgttggtatcggtgcaggtgttgacgcttcagttatgactctggcttgtagaacgtggcaagaatgct

SEQ ID NO: 29481 - DNA, 75 bp, synthetic construct
  source 1..75: mol_type = other DNA
aaagcagccgaggagatcgggcaactcatcaccgtcgcgcgtgaagaactccagcgtcgcaaggccaaagagcag

SEQ ID NO: 29482 - DNA, 75 bp, synthetic construct
  source 1..75: mol_type = other DNA
aggcaaggtgttgaaacgacgaaaccccgcactgtaggagcagtaacggggcttctaaccaacaacgtaaactag

SEQ ID NO: 29483 - DNA, 75 bp, synthetic construct
  source 1..75: mol_type = other DNA
tcatgaccgatacccaggccaccaatatggtcggttgctatagcggtaagccgctgaatacgcaaaatattgata

SEQ ID NO: 29484 - DNA, 75 bp, synthetic construct
  source 1..75: mol_type = other DNA
tgcgggcggtgtatgaccgcagcgggacgcaggtgcgcgggtttacttatgatgcggagcacgccgggcggatgg

SEQ ID NO: 29485 - DNA, 75 bp, synthetic construct
  source 1..75: mol_type = other DNA
atagtattttaaaattaatttgtaaggaagctgcatcagagacgtatcgcggtgctcttgaaactttacaaaaaa

SEQ ID NO: 29486 - DNA, 75 bp, synthetic construct
  source 1..75: mol_type = other DNA
ttatcggttactcccgaaaacctgaacgtattgaaaggatgcttgagaatatgtttattggtaatccaccgggta

SEQ ID NO: 29487 - DNA, 75 bp, synthetic construct
  source 1..75: mol_type = other DNA
gtcggggagataaaattggcctgacattgattcgtctgagtattgcaattgtttttatgtggattgggttattaa

SEQ ID NO: 29488 - DNA, 75 bp, synthetic construct
  source 1..75: mol_type = other DNA
aagataatgtactgccaccgcgggttagatcgaatggttacagttacgtgtggaaacccgaaggaagtacaagaa

SEQ ID NO: 29489 - DNA, 75 bp, synthetic construct
  source 1..75: mol_type = other DNA
gtggaggcctccggtgccagcctggagaaggagcggcacgaccagttgcttaccgcgcttcgtgcgctgctgtta

SEQ ID NO: 29490 - DNA, 75 bp, synthetic construct
  source 1..75: mol_type = other DNA
agcgaataaaatttttaaacaatatcaccacgagttaataactgaagtaaaaagaaagtcagattttaatttttc

SEQ ID NO: 29491 - DNA, 75 bp, synthetic construct
  source 1..75: mol_type = other DNA
atgccggaacgcatacggtacttaaagcaggtatttctgcggatacacaatctgatttcggtgcgggtgtcggcg

SEQ ID NO: 29492 - DNA, 75 bp, synthetic construct
  source 1..75: mol_type = other DNA
tgtgataaagactcccacctttatgagtctgattatctactaggtgttcatgatctttatcgggttggggctctt

SEQ ID NO: 29493 - DNA, 75 bp, synthetic construct
  source 1..75: mol_type = other DNA
aagccatcacgctgaaaatcgatccgtcggtggtactggcgacccgtaaatatgtggatgacaaaatctcagaac

SEQ ID NO: 29494 - DNA, 75 bp, synthetic construct
  source 1..75: mol_type = other DNA
tgctgtagtgctggcaacccgcaagtatgtggatgacaaaatatcagagcacgaacagtcacgacgtcacccgga

SEQ ID NO: 29495 - DNA, 75 bp, synthetic construct
  source 1..75: mol_type = other DNA
ctgtacgcgacctggtatcagaacgatgcgaataagaccggcgcttatgttgacagctgggcgctgtataactgg

SEQ ID NO: 29496 - DNA, 75 bp, synthetic construct
  source 1..75: mol_type = other DNA
cattccacagtgggtgaccctggagccccgtgtcttcggctggatggaccgtctgtgtgaagactactgcggtgg

SEQ ID NO: 29497 - DNA, 75 bp, synthetic construct
  source 1..75: mol_type = other DNA
tagttgaagcgccagcgccgtcccgcccgatagagcgcggcatcgcgggctccggattacttgcccgcgtgttaa

SEQ ID NO: 29498 - DNA, 75 bp, synthetic construct
  source 1..75: mol_type = other DNA
agtgcaggatattcccggtgtgctggctgtgtttgcagaacgccgtaaggacagttttggtccgtatgtccggct

SEQ ID NO: 29499 - DNA, 75 bp, synthetic construct
  source 1..75: mol_type = other DNA
cttccggggtatcctgcaggcggatgcgttcacaggttatgacaggctgttcagtgcagaacgtgaaggtggtgc

SEQ ID NO: 29500 - DNA, 75 bp, synthetic construct
  source 1..75: mol_type = other DNA
tgaaacaacgcgaacaggacagcgatcgttacagtgggcgggaagacgatccacaggttccccgccagttgcgac

SEQ ID NO: 29501 - DNA, 75 bp, synthetic construct
  source 1..75: mol_type = other DNA
ttgcagaactggaaagcctgctccgtcagaaagaccagcaactgagtctggttgaagagacggaggccttcctgc

SEQ ID NO: 29502 - DNA, 75 bp, synthetic construct
  source 1..75: mol_type = other DNA
agacggcggacagcacctcggaccagctgcagaataagacgctctggtcgtcatacaccgaaatcatcgatgtga

SEQ ID NO: 29503 - DNA, 75 bp, synthetic construct
  source 1..75: mol_type = other DNA
ccgtccgcctgctgattcagctgcagcgtaacggtaactgggtgacggaaaaggatgtcaccattaacggcaaga

SEQ ID NO: 29504 - DNA, 75 bp, synthetic construct
  source 1..75: mol_type = other DNA
cagataacggcagtcccgaaactgaccatttatgacccgacggtgcagtttgagttctggttttcggaggcaaaa

SEQ ID NO: 29505 - DNA, 75 bp, synthetic construct
  source 1..75: mol_type = other DNA
aattatctctggctgaattatcctggtgggcggtccgcaatcaggtggcggacgcgctaccggaagcggtattac

SEQ ID NO: 29506 - DNA, 75 bp, synthetic construct
  source 1..75: mol_type = other DNA
gtgagagcactactgacccctgaaattgccccgcgtatggggatcgtattgttcaggcccggttcagagctgatg

SEQ ID NO: 29507 - DNA, 75 bp, synthetic construct
  source 1..75: mol_type = other DNA
gcccggagtgtggcggtgagctggattatctgggggaagtcagcgctgaacagctggaactggtgagcagtgccc

SEQ ID NO: 29508 - DNA, 75 bp, synthetic construct
  source 1..75: mol_type = other DNA
atcccaagctcattcgtttacctgaggtaatgaacagaactggattcgggaagacatggatatatgagcttatta

SEQ ID NO: 29509 - DNA, 75 bp, synthetic construct
  source 1..75: mol_type = other DNA
atacgatctggcaaacggaaaacaaccggcagatgccacgctcactgctctggcaggacttgccactgcagcaga

SEQ ID NO: 29510 - DNA, 75 bp, synthetic construct
  source 1..75: mol_type = other DNA
ttcttgcctaagcctggcggtgggatgaacctgttaatcacctcagtggatggagataaaaccgctggcgcggcg

SEQ ID NO: 29511 - DNA, 75 bp, synthetic construct
  source 1..75: mol_type = other DNA
agtgccactaacagtacgtccgaagtgctggccgccacaccgaaagctgtcaaggctgcatatgacctggctaac

SEQ ID NO: 29512 - DNA, 75 bp, synthetic construct
  source 1..75: mol_type = other DNA
acggtctggcggaggcggataataatgctgcggaaagagcgcttcgtgcagtctgtctcggaaagaaaaacttta

SEQ ID NO: 29513 - DNA, 75 bp, synthetic construct
  source 1..75: mol_type = other DNA
cttggaaagaaaaattacgtgttcttcggtagcgatcacggcggcgagcgtggtgcactgctatacgggctgatc

SEQ ID NO: 29514 - DNA, 75 bp, synthetic construct
  source 1..75: mol_type = other DNA
aaatgagcccggaagccgccggtattgccgcctgtctgatgacgtacagccatcatgcctgtcgtacggagaatt

SEQ ID NO: 29515 - DNA, 75 bp, synthetic construct
  source 1..75: mol_type = other DNA
agcaaagcgttactgacgtcgctgcatgaatggatggtggagaagaatggcacgctgtcgaaaaaatccagactg

SEQ ID NO: 29516 - DNA, 75 bp, synthetic construct
  source 1..75: mol_type = other DNA
ctgcccggcccgctgccgttcatcctctcccgcacctacagcagttaccggacaaaaacgcccgcgccggtgggg

SEQ ID NO: 29517 - DNA, 75 bp, synthetic construct
  source 1..75: mol_type = other DNA
tcgacgagtggaaaccaaaacggttcagtctcccaataacaaacactaccctggtgaaatacggaaaactaggat

SEQ ID NO: 29518 - DNA, 75 bp, synthetic construct
  source 1..75: mol_type = other DNA
gttgcagagaaaaaggaacgcgaacaaaaagcgaaccaatggctccagcagcagattcttgcagaacattgccgt

SEQ ID NO: 29519 - DNA, 75 bp, synthetic construct
  source 1..75: mol_type = other DNA
gctggtacagcagggcggctttgacgggcggacgcaacgttatcattatgacctgaccggaaaactcacacagag

SEQ ID NO: 29520 - DNA, 75 bp, synthetic construct
  source 1..75: mol_type = other DNA
cctggatgtgctgacgcagtggattgaaggatgtgagacaccgcgttaccgccatgccatacagcagagtataca

SEQ ID NO: 29521 - DNA, 75 bp, synthetic construct
  source 1..75: mol_type = other DNA
atgtggccggataaccgtatcgcccgtgacgcgcactatctttaccggtatgaccgtcacggcaggctgacagag

SEQ ID NO: 29522 - DNA, 75 bp, synthetic construct
  source 1..75: mol_type = other DNA
tttatcttgctgtcatgttatcattcacagccaacgctgctgaatataaagaatatccacaaggagaaattacct

SEQ ID NO: 29523 - DNA, 75 bp, synthetic construct
  source 1..75: mol_type = other DNA
tcgttggcatactggcggggttgccggcttccggcgtaatggcagccggaaaccaggaaagcacgaagactacgt

SEQ ID NO: 29524 - DNA, 75 bp, synthetic construct
  source 1..75: mol_type = other DNA
gctaaaggcctgacgcgccgcgcgctgctggatttccacagccgctataaattgcagcttctggcgcaccatcag

SEQ ID NO: 29525 - DNA, 75 bp, synthetic construct
  source 1..75: mol_type = other DNA
tcagttggtaagattcagtggagaatagtaactgattatggtggagatagtaagatctaccaatcagaaggaaag

SEQ ID NO: 29526 - DNA, 75 bp, synthetic construct
  source 1..75: mol_type = other DNA
tgcgtggtggtggcaccgccagccgtgccgggcggtaagttccgtattcttgagcgccaccagtggcgcgggatg

SEQ ID NO: 29527 - DNA, 75 bp, synthetic construct
  source 1..75: mol_type = other DNA
aggcgaacctgaaccgggaatggcaggtggtggcaagtgaactgcacggcgaacagccacaggcggtgccaggac

SEQ ID NO: 29528 - DNA, 75 bp, synthetic construct
  source 1..75: mol_type = other DNA
atgaaaacccgtacacaacaaattgaagaattacagaaagagtggactcaaccgcgttgggaaggcattactcgc

SEQ ID NO: 29529 - DNA, 75 bp, synthetic construct
  source 1..75: mol_type = other DNA
aaatgcctggtcattcgcctgtaaaaccgccaatggtaccgctatccctattggcggtggcagcgccaatgttta

SEQ ID NO: 29530 - DNA, 75 bp, synthetic construct
  source 1..75: mol_type = other DNA
aactggaggctaaagggctgtaccggagagcggcggcacgttgggctgatgttatgtggctggtgagcactgaca

SEQ ID NO: 29531 - DNA, 75 bp, synthetic construct
  source 1..75: mol_type = other DNA
caggccaggtgcaaggggaatacgtggagttgagcgacggcactttatcgtggttagggaacgccttgttctgga

SEQ ID NO: 29532 - DNA, 75 bp, synthetic construct
  source 1..75: mol_type = other DNA
aacggatagcccaggaaacggctatcgagccacaggactggatgcccgatgcttaccgaaagacattgatccgcc

SEQ ID NO: 29533 - DNA, 75 bp, synthetic construct
  source 1..75: mol_type = other DNA
taatcagtcatgttagtgaaaatgtaaaggcgatgaaatttgcagtaaaacagacagtattcaaaaattctctcg

SEQ ID NO: 29534 - DNA, 75 bp, synthetic construct
  source 1..75: mol_type = other DNA
atggaaaccgtatttgacgcactgaaagcactgaaaagagcctcttcacaggtagtggcggcccgccttggaatc

SEQ ID NO: 29535 - DNA, 75 bp, synthetic construct
  source 1..75: mol_type = other DNA
cgcgtctatctggcgtttatggcgtacgcaggcaggagcaaaccgctaaacgtaaatgactttggcaaggctatg

SEQ ID NO: 29536 - DNA, 75 bp, synthetic construct
  source 1..75: mol_type = other DNA
ttggctgatgagcaactgaaaaacatcaccgattaccggatcattgatgaagatcgtcagtgtgtgcgtgtttac

SEQ ID NO: 29537 - DNA, 75 bp, synthetic construct
  source 1..75: mol_type = other DNA
ctaattttgctgaccctgaaaaggcacgggctttattactggaacagcgtgacggtgatgaagctctggcaataa

SEQ ID NO: 29538 - DNA, 75 bp, synthetic construct
  source 1..75: mol_type = other DNA
ttatgggatgatggcattccggcttttctgctgaactggcaggcgaatgcggggcgcagtgagtaccggggttac

SEQ ID NO: 29539 - DNA, 75 bp, synthetic construct
  source 1..75: mol_type = other DNA
cgtagcaaaccggatgccgtgatttgcctggcgaccggagccacgccattactgacgtatcattatctggtagaa

SEQ ID NO: 29540 - DNA, 75 bp, synthetic construct
  source 1..75: mol_type = other DNA
gcatcagcaaaggccactgaagcatcaaaaagtgctgccgctgcagagtcctcaaaaagcgcggcggccaccagt

SEQ ID NO: 29541 - DNA, 75 bp, synthetic construct
  source 1..75: mol_type = other DNA
aggcgtgaagcagggcagtgtcagcatcgtgggcatgacctctgacggagagtttgtggcagtggctgcggtgac

SEQ ID NO: 29542 - DNA, 75 bp, synthetic construct
  source 1..75: mol_type = other DNA
ccgtattacataacatacaataaaattgaagttgttcagaataaagacatcatgccagttgaacaaagtgggatg

SEQ ID NO: 29543 - DNA, 75 bp, synthetic construct
  source 1..75: mol_type = other DNA
accagctatagcactttcagcatttacagccttaaagcgtaatgaacaacaagatcctatacttttagttcttgc

SEQ ID NO: 29544 - DNA, 75 bp, synthetic construct
  source 1..75: mol_type = other DNA
cttcctcatcgaaagtaaagcgtcagtatcgaaaaggtaatccgctttctgcgtcagaacgtcaacagcaggctc

SEQ ID NO: 29545 - DNA, 75 bp, synthetic construct
  source 1..75: mol_type = other DNA
gtggagtgcgaaagcccggtggtgatttgcaatgagcagcaccgctttattgtcgcggaacagctgcgtcaactg

SEQ ID NO: 29546 - DNA, 75 bp, synthetic construct
  source 1..75: mol_type = other DNA
cagagcggtggactgctctatgtcggcctggccttgatggttggggtgtcggtctgggatttcatctcgccagca

SEQ ID NO: 29547 - DNA, 75 bp, synthetic construct
  source 1..75: mol_type = other DNA
agaacacgggcggtgcactggttaccagtactgctgcaactgtcatcggcacaaaccgtctggggaatttcacgg

SEQ ID NO: 29548 - DNA, 75 bp, synthetic construct
  source 1..75: mol_type = other DNA
gttgaaggaacagcaaataccactgtggtttatgccggcggcgaccagacggtacacgggcatgcgctggatacc

SEQ ID NO: 29549 - DNA, 75 bp, synthetic construct
  source 1..75: mol_type = other DNA
tttgtccaggggaatatgctgcaggccggggcctttaactacaccctcaaccgggacagtgatgagagctggtat

SEQ ID NO: 29550 - DNA, 75 bp, synthetic construct
  source 1..75: mol_type = other DNA
cgtttccgcgatgggctgcgccgcctgttttcctgccatcgccagctttggcgcggccatcggactgggcttctt

SEQ ID NO: 29551 - DNA, 75 bp, synthetic construct
  source 1..75: mol_type = other DNA
cccgcgtacatatggaaacaatgtctcaagcgggcaaataatgagccgagtcaaaatcgtggtaatgtacaacta

SEQ ID NO: 29552 - DNA, 75 bp, synthetic construct
  source 1..75: mol_type = other DNA
cggacggacgacgagcggacccaccactaccactacgacagccagcaccgtctggtgttctacacgcggatacag

SEQ ID NO: 29553 - DNA, 75 bp, synthetic construct
  source 1..75: mol_type = other DNA
ctgttggcataccagcatcatatggcggatttgaaacattagttgaaaatttaacaagatacaattcctcgggag

SEQ ID NO: 29554 - DNA, 75 bp, synthetic construct
  source 1..75: mol_type = other DNA
gggccgtcgaactctattaccggtacggaaagaaagcctccgttgtcgtcatggagctgggatatccttccacaa

SEQ ID NO: 29555 - DNA, 75 bp, synthetic construct
  source 1..75: mol_type = other DNA
tttcagaaaaaatcgcagttcaatattcggatgtcgttattacggataatgaggcaatttctgagtacgttttta

SEQ ID NO: 29556 - DNA, 75 bp, synthetic construct
  source 1..75: mol_type = other DNA
tacacaagaaggaaatcaaggacaccttacagaggtcaactttgaagaggttgcagaacggcttgtgcgtaatgc

SEQ ID NO: 29557 - DNA, 75 bp, synthetic construct
  source 1..75: mol_type = other DNA
aggcggtcacaaccgcaaggaataccacctcaccctcgacacagccaaagagcttgcgatggttgacgactgcgt

SEQ ID NO: 29558 - DNA, 75 bp, synthetic construct
  source 1..75: mol_type = other DNA
tcagctgtaacgttgtggaaacgcgccgcgatgatgtggcgcgcattttcaacattcagcgttattcactgaatg

SEQ ID NO: 29559 - DNA, 75 bp, synthetic construct
  source 1..75: mol_type = other DNA
cgtccccgtctgtttatcgctgaggccgggaactcgtttggtctgctggcggattattttgagagtctcgggctt

SEQ ID NO: 29560 - DNA, 75 bp, synthetic construct
  source 1..75: mol_type = other DNA
gtgaggaaaaaggtacagcagagaccagggaacgaccggaagcagaagcgggggcatcttcatcggcctttgttc

SEQ ID NO: 29561 - DNA, 75 bp, synthetic construct
  source 1..75: mol_type = other DNA
cgccacaagctttaccgggcggggatcagttttctgttacgggcagaggatatggacagcctgaagcgtaagcgg

SEQ ID NO: 29562 - DNA, 75 bp, synthetic construct
  source 1..75: mol_type = other DNA
aattgtattttactggatgaagcggttcatggtggacaatatcagtgggatatcagtgaacaccgactaaattta

SEQ ID NO: 29563 - DNA, 75 bp, synthetic construct
  source 1..75: mol_type = other DNA
ccccggtgtgcatcgtttttgattattcccgcacactcgcgcagaaggagttccccgtcgggctacggtctctgt

SEQ ID NO: 29564 - DNA, 75 bp, synthetic construct
  source 1..75: mol_type = other DNA
gcgtaacggtaactgggtgacggaaaaggatgtcaccattaacggcaagaccacctcacagttcctggcgtcggt

SEQ ID NO: 29565 - DNA, 75 bp, synthetic construct
  source 1..75: mol_type = other DNA
tactggcgctgaatttatcaaatatcgcaaacctgaagcgatacgagcttgatatggatggttgtgactcgttcg

SEQ ID NO: 29566 - DNA, 75 bp, synthetic construct
  source 1..75: mol_type = other DNA
gtatgccgcgccggattgagttcaccctgtcgctcaaacgggtggatgaatccctgtccgatatattcggtgatc

SEQ ID NO: 29567 - DNA, 75 bp, synthetic construct
  source 1..75: mol_type = other DNA
tggcgctgaatttatcaaatatcgcaaacctgaagcgatacgagcttgatatggatggttgcgactcgtgcggtc

SEQ ID NO: 29568 - DNA, 75 bp, synthetic construct
  source 1..75: mol_type = other DNA
aaaaactgacgattaaaaaaatgatcgatctttatcaagcgaaatgcccgcaggcgtcagcggagccggagcatt

SEQ ID NO: 29569 - DNA, 75 bp, synthetic construct
  source 1..75: mol_type = other DNA
tgtatttttctggtgaaccggcaaagattgctgagattaaacgactggccagcggtgcagtcacaccgttttatc

SEQ ID NO: 29570 - DNA, 75 bp, synthetic construct
  source 1..75: mol_type = other DNA
atgattacccgtaacccgtggcgcagcgatgtggcacaggtggttctgaccggtgaggacggccacgagacgttc

SEQ ID NO: 29571 - DNA, 75 bp, synthetic construct
  source 1..75: mol_type = other DNA
gatgatcacattcagtctgttcagggtaaagaggactatgaagatgagatgttcagcatcagatactttaagaag

SEQ ID NO: 29572 - DNA, 75 bp, synthetic construct
  source 1..75: mol_type = other DNA
tggcggcaaaagaaaccgaagcgctggtcaccggtacagacaacgccgcagatgcagctgccgcacgcaaggcga

SEQ ID NO: 29573 - DNA, 75 bp, synthetic construct
  source 1..75: mol_type = other DNA
atccctgcatgccgaacttcatggtggaccctaaaactcttcaatgcacgggtctgatcgaccttgggcggctcg

SEQ ID NO: 29574 - DNA, 75 bp, synthetic construct
  source 1..75: mol_type = other DNA
cagcagattatggtcaacgaaaatctgacgcccgatgagctggtcgggtgtgccgaaatagtccgggataattac

SEQ ID NO: 29575 - DNA, 75 bp, synthetic construct
  source 1..75: mol_type = other DNA
ctctgcttgccgagcggattgagcaagggctgtatcgtcacggggagaaattgccgtcggtgcgtagcttgagtc

SEQ ID NO: 29576 - DNA, 75 bp, synthetic construct
  source 1..75: mol_type = other DNA
ccgtcattaatggcagtcttggagttggtacgacgaatgcgttaggtggtagctctattgttcttggtgataatg

SEQ ID NO: 29577 - DNA, 75 bp, synthetic construct
  source 1..75: mol_type = other DNA
actcttcagaaggtatcccgtggcatgagctgccagcttcacacaggggaaacaatcagatgagtttgcctttac

SEQ ID NO: 29578 - DNA, 75 bp, synthetic construct
  source 1..75: mol_type = other DNA
aattattggtgaggttgatggagatgactggatggtgtcacgaccactacaaaaatacatttctggtaactggta

SEQ ID NO: 29579 - DNA, 75 bp, synthetic construct
  source 1..75: mol_type = other DNA
ctcgctatatattttggtggctcatttctaattatcagaatatacgtaacatggctggcggtgatttacgagacg

SEQ ID NO: 29580 - DNA, 75 bp, synthetic construct
  source 1..75: mol_type = other DNA
ttcctgatggaagtggcgcatttgcagaccagttgaataatgccaccgcgccttttgttcagacgcagtttgcct

SEQ ID NO: 29581 - DNA, 75 bp, synthetic construct
  source 1..75: mol_type = other DNA
aacatatcgcactggaggctcatacctttgactctgtaaaatttattctgaccaccgctctcgccgctggtctgc

SEQ ID NO: 29582 - DNA, 75 bp, synthetic construct
  source 1..75: mol_type = other DNA
catgtgaaagagcaggatctggtgcagccgtttgtggaagggctggccgatatcgttgatatggcggcgattcag

SEQ ID NO: 29583 - DNA, 75 bp, synthetic construct
  source 1..75: mol_type = other DNA
ggttttacagtaaatcctgtatgcagtaatcatttctccatatttatggcgagacaaaacactattgctcgcaac

SEQ ID NO: 29584 - DNA, 75 bp, synthetic construct
  source 1..75: mol_type = other DNA
agcttcatgtggggacttgatggtaaacatatcgcgctggaggctcacacctttgactctgtgaaatttattctg

SEQ ID NO: 29585 - DNA, 75 bp, synthetic construct
  source 1..75: mol_type = other DNA
tcaggaaatttatgaacgcccttacaacagctttatttccgatgcaacggcgaatggtctgattctcatgaaact

SEQ ID NO: 29586 - DNA, 75 bp, synthetic construct
  source 1..75: mol_type = other DNA
cacactggctgtctacgtcacaacccagcaacttcaccggctcagtgttgttcagggtatgctgaagcacattga

SEQ ID NO: 29587 - DNA, 75 bp, synthetic construct
  source 1..75: mol_type = other DNA
ggggtgatcaacgtcttcaggggactgagctggaattacaaaaccaactcaccctgtaaatttggcagtaaaatt

SEQ ID NO: 29588 - DNA, 75 bp, synthetic construct
  source 1..75: mol_type = other DNA
cgttaagccagaagaaatccgcaatacatgggaaagggtggcagcggaaaccctgcgtctggatgtcatcccgcc

SEQ ID NO: 29589 - DNA, 75 bp, synthetic construct
  source 1..75: mol_type = other DNA
tttgtgccgttatttctggtgcagaaggatgggaagatatagaggattttggggaaacacatctcgattttttga

SEQ ID NO: 29590 - DNA, 75 bp, synthetic construct
  source 1..75: mol_type = other DNA
tgaaccttttaccggcgttgatgtgaaaaccgaagcgaaaatcatcagcctgttgagggagttacgcgcggaagg

SEQ ID NO: 29591 - DNA, 75 bp, synthetic construct
  source 1..75: mol_type = other DNA
ctatgacgcggagtacgagcagaccgagccaggtaaagccgggcaggtcgatattaccggaaaccatgtggctct

SEQ ID NO: 29592 - DNA, 75 bp, synthetic construct
  source 1..75: mol_type = other DNA
ggactatttcaagaaacaaaatcttgaaagtttcttccctgagatccccgttgaatttcatattaataaagtgaa

SEQ ID NO: 29593 - DNA, 75 bp, synthetic construct
  source 1..75: mol_type = other DNA
cctgatgaacttattgatttcacgtttgaatggaaagggctgaagaaattatgcgtggcagtctcctttcggtcc

SEQ ID NO: 29594 - DNA, 75 bp, synthetic construct
  source 1..75: mol_type = other DNA
gttccattgctccaaagactggctgtacgccggagactctgcgtgtctgggttcgccagtatgagcgggataccg

SEQ ID NO: 29595 - DNA, 75 bp, synthetic construct
  source 1..75: mol_type = other DNA
aagcccgtatcacgataccaacttatttgcctataccgacaacgtattgcgttttgcgctgctggggtgggttgg

SEQ ID NO: 29596 - DNA, 75 bp, synthetic construct
  source 1..75: mol_type = other DNA
gttccattgccccaaagattggctgtacaccagagactctgcgtgtgtgggttcgtcagcatgagcgggataccg

SEQ ID NO: 29597 - DNA, 75 bp, synthetic construct
  source 1..75: mol_type = other DNA
tattttaacgaatgataaggtattcaaggcagggttaagacgtaagatgcgaaaagcagccatggacagaaacta

SEQ ID NO: 29598 - DNA, 75 bp, synthetic construct
  source 1..75: mol_type = other DNA
cgaatggcaggatatctacacccagttgcgccaggtggtgaaagaacttggcattccggttaacagcgaaccggc

SEQ ID NO: 29599 - DNA, 75 bp, synthetic construct
  source 1..75: mol_type = other DNA
gttatcatccgagcgggggatatggtcattgatggcagcgtacgcggtcgtcttgagcgccttgcagacgtcttg

SEQ ID NO: 29600 - DNA, 75 bp, synthetic construct
  source 1..75: mol_type = other DNA
tcggcgtgacctacaccggtaactatgagttcccgcagccgctgcacgatgcgctggataaattccaggccgaca

SEQ ID NO: 29601 - DNA, 75 bp, synthetic construct
  source 1..75: mol_type = other DNA
actgttgctggaagactacaaagcctccctgaaatatctcagcgaccacccgaaactgcagggtattgcccagca

SEQ ID NO: 29602 - DNA, 75 bp, synthetic construct
  source 1..75: mol_type = other DNA
atgtaccagctaaagataaccatccgagacagcaaaccacctatatggcggcgtgtgctggttccagagcaaatc

SEQ ID NO: 29603 - DNA, 75 bp, synthetic construct
  source 1..75: mol_type = other DNA
atgcacaggcccgtgatacatggtaccggtcactggagcacgataattttccggaaatcagtgaagcgaacattc

SEQ ID NO: 29604 - DNA, 75 bp, synthetic construct
  source 1..75: mol_type = other DNA
ttcaggaaaccagaactggttgacagacttaatgagattattgcgaaacactatccgggagtgttaccttcataa

SEQ ID NO: 29605 - DNA, 75 bp, synthetic construct
  source 1..75: mol_type = other DNA
acctggccactttctgccagacctgggacgacgacaatgtccacaagttgatggatttatccattaacaaaaact

SEQ ID NO: 29606 - DNA, 75 bp, synthetic construct
  source 1..75: mol_type = other DNA
gaaagcggtaggtatcattctctctatttctcttctcattgcgcctggtgccattgcggtactcctgacacaacg

SEQ ID NO: 29607 - DNA, 75 bp, synthetic construct
  source 1..75: mol_type = other DNA
agggcggtgatgtttctgacgataacccgaatgatgatgaaacccggttttatacggaaacctttgtctcagatt

SEQ ID NO: 29608 - DNA, 75 bp, synthetic construct
  source 1..75: mol_type = other DNA
tctgccggactaccctggttcagtgccaattcctcttaccgtttattgtgcgaaaagccaaaacctggggtatta

SEQ ID NO: 29609 - DNA, 75 bp, synthetic construct
  source 1..75: mol_type = other DNA
acagaacgcctcttaccaggttgccgcttatctggcggatgaaatcgccaaactggggccgtatgagttcatctg

SEQ ID NO: 29610 - DNA, 75 bp, synthetic construct
  source 1..75: mol_type = other DNA
agtcctcgacggatgtttactaccgtatccaaagcggcattgatggcgatcgggcagggcgtcaggagggcagca

SEQ ID NO: 29611 - DNA, 75 bp, synthetic construct
  source 1..75: mol_type = other DNA
gcgcggacgggcgcatttttgccggaagcgatccggtatataccgcaacaggtaccagtggtatcagtgttgcca

SEQ ID NO: 29612 - DNA, 75 bp, synthetic construct
  source 1..75: mol_type = other DNA
ttgccatcacggcggtgcagcacgtaccggaaaaagaagccattgtggataacggggccagctttgagccactgt

SEQ ID NO: 29613 - DNA, 75 bp, synthetic construct
  source 1..75: mol_type = other DNA
gaaccggccaccaccaccttccggattaacgcgccagcaaaacccgccaccattgaactgacgccggggtatttt

SEQ ID NO: 29614 - DNA, 75 bp, synthetic construct
  source 1..75: mol_type = other DNA
ggacgcctttatattgcgggtatcggtgccggtattgagaatacgccagcaggaatgcagagtcaggtgctgctg

SEQ ID NO: 29615 - DNA, 75 bp, synthetic construct
  source 1..75: mol_type = other DNA
aatatcaaaccgggccatgattattatttttatatccgcagtgtgaatactgttggcaaatcggcattcgtggag

SEQ ID NO: 29616 - DNA, 75 bp, synthetic construct
  source 1..75: mol_type = other DNA
ggtgtggccgtacaccaacagcgatgtggtggtggatgataacggcgtggggttccgctacagcttcagcgccct

SEQ ID NO: 29617 - DNA, 75 bp, synthetic construct
  source 1..75: mol_type = other DNA
acctgaaaaagaagccatcgtggataacggggcccgctttgagccgcagtcaggcaccctgaacagcgttatccc

SEQ ID NO: 29618 - DNA, 75 bp, synthetic construct
  source 1..75: mol_type = other DNA
acttacaccagaacaatgggcgcaggccgggcgattaattgcatcaggcgttcctcgccagaaggtggcgatcat

SEQ ID NO: 29619 - DNA, 75 bp, synthetic construct
  source 1..75: mol_type = other DNA
ttcctcgccagaaggtggctattatctatgatgttggtgtgtcaactttgtataagaggtttccagccagggtta

SEQ ID NO: 29620 - DNA, 75 bp, synthetic construct
  source 1..75: mol_type = other DNA
acactatcggcaggagacacgctggtcgtctggaagctggacaggttggggcgcagtatgcggcatcttgttacg

SEQ ID NO: 29621 - DNA, 75 bp, synthetic construct
  source 1..75: mol_type = other DNA
cctgagcaacatactgctgctggctgaccgtattgcgatgattaacccggaggacggcaacaccacgccgttatt

SEQ ID NO: 29622 - DNA, 75 bp, synthetic construct
  source 1..75: mol_type = other DNA
ccgctgacggacactgacggcaatcctgtgatacacggtgtgaccgcggtctggcgcgccggggagcaggagcag

SEQ ID NO: 29623 - DNA, 75 bp, synthetic construct
  source 1..75: mol_type = other DNA
gccagtggccgggcgagcaatgatgcggaagggtatctggactttttcagaggagaaatcgggaagacacatctg

SEQ ID NO: 29624 - DNA, 75 bp, synthetic construct
  source 1..75: mol_type = other DNA
ttaagggcatgctggaggcgactcaggtcagaggtgacttcgttaaagctgtatccaaatcatttccgaaacagg

SEQ ID NO: 29625 - DNA, 75 bp, synthetic construct
  source 1..75: mol_type = other DNA
catctggctcaggagctgtggacgcagattgataacggtcagcttgcgcctgacctggctgaaatcaggacgtcc

SEQ ID NO: 29626 - DNA, 75 bp, synthetic construct
  source 1..75: mol_type = other DNA
cacgccgaaggtggtgaagggggtgagctttatgcttcgcctgaccgtggcagcggatgacggcagtgagcggct

SEQ ID NO: 29627 - DNA, 75 bp, synthetic construct
  source 1..75: mol_type = other DNA
tagtacggaaaaacggtgctgaaatttataaccgtaccgcgctggataatacgctgatttacagtggtgttattg

SEQ ID NO: 29628 - DNA, 75 bp, synthetic construct
  source 1..75: mol_type = other DNA
gcagcgtaacgcgctggagtgcgcaggatgtgagctgatttttgaggataaaatcagcggcacgaagtccgaccg

SEQ ID NO: 29629 - DNA, 75 bp, synthetic construct
  source 1..75: mol_type = other DNA
cgcggctgatgctgcagattatgtcagggagactgaccggtcactgatgcaactggtcaccgcattctgggcaac

SEQ ID NO: 29630 - DNA, 75 bp, synthetic construct
  source 1..75: mol_type = other DNA
ctgttctggtgtctgaaatacgccgtcattctgccactggccacaatggccctgatggctctgtttgttttatgg

SEQ ID NO: 29631 - DNA, 75 bp, synthetic construct
  source 1..75: mol_type = other DNA
gctggcacttatgtatatgtcgtttgcggcaggcaccgggaaatatccggtgcgacccggaaaaatgaaatgtat

SEQ ID NO: 29632 - DNA, 75 bp, synthetic construct
  source 1..75: mol_type = other DNA
gacgctgacggatattaccaaaaatgcagcgtatggcgttgagatagaaagtctggtgctggagataaatgcacc

SEQ ID NO: 29633 - DNA, 75 bp, synthetic construct
  source 1..75: mol_type = other DNA
ctgagccggactggttctacgtggttgtgcttgccggacagtccaacggcatggcctacggtgaagggcttccgt

SEQ ID NO: 29634 - DNA, 75 bp, synthetic construct
  source 1..75: mol_type = other DNA
cctgccgggaaaaatcagtaaatgccctgtttattttcctgatgacagaacaaacagaaataacggagataaaaa

SEQ ID NO: 29635 - DNA, 75 bp, synthetic construct
  source 1..75: mol_type = other DNA
ttgagcaggaagtcctgaccacctggcctgctgatgccattgcccgggcggaagatgtggtgttgcgtctgtccg

SEQ ID NO: 29636 - DNA, 75 bp, synthetic construct
  source 1..75: mol_type = other DNA
tctgtccgaaatttgtcacatcacttgccggtttttccccgaaacagacgaccactattaataaagattccgtcc

SEQ ID NO: 29637 - DNA, 75 bp, synthetic construct
  source 1..75: mol_type = other DNA
gtgtcagacacactccccgacgacaacaacgaccgcccctggtgggggctgccctgcaccgtgacgccctgtttc

SEQ ID NO: 29638 - DNA, 75 bp, synthetic construct
  source 1..75: mol_type = other DNA
cgtcgccggattttcgacgacgggctgcgttgtgggggatggctttgccggagccggaatttacacctgctgaac

SEQ ID NO: 29639 - DNA, 75 bp, synthetic construct
  source 1..75: mol_type = other DNA
cttgatgaaaacatcccgcgaatgctgtccgattatctgatggaaactaccggaaatgtgcctgataagtttcag

SEQ ID NO: 29640 - DNA, 75 bp, synthetic construct
  source 1..75: mol_type = other DNA
gtctccctgctgccgacagccggagaggctgctgcgcagggctggaccatcaccggcggcagtgttgcgctggaa

SEQ ID NO: 29641 - DNA, 75 bp, synthetic construct
  source 1..75: mol_type = other DNA
ccacgtaaaccgtcagttcgtggcagaacgtccagaccagttgtgggtggctgattttacctgggtaagcacatg

SEQ ID NO: 29642 - DNA, 75 bp, synthetic construct
  source 1..75: mol_type = other DNA
gtggccagatgtacagtggcgcgcctcatggcggttatgggactttccggtgttctccggggtaaaaaggtccgc

SEQ ID NO: 29643 - DNA, 75 bp, synthetic construct
  source 1..75: mol_type = other DNA
ggcatcatcctgataaacgcagtgcccgtgcgcagcgcgatgactggctgaagaaagagatacagcgcgtatacg

SEQ ID NO: 29644 - DNA, 75 bp, synthetic construct
  source 1..75: mol_type = other DNA
aaatcagcggcacgaagtccgacaggccgggactgaaaaaactgctcaggacattatcggagggggatacactgg

SEQ ID NO: 29645 - DNA, 75 bp, synthetic construct
  source 1..75: mol_type = other DNA
agcagtacggggtcggaccggtatgcagcgaactgcatgttgccccgtcaacgtattaccactgtcagcaacagc

SEQ ID NO: 29646 - DNA, 75 bp, synthetic construct
  source 1..75: mol_type = other DNA
aatctgcacctgtgtatattggagagcgtgtgtggattggcgaaaatgtgacaatattaccaggtgcgtgtatag

SEQ ID NO: 29647 - DNA, 75 bp, synthetic construct
  source 1..75: mol_type = other DNA
ttttccgccttcacatgccggaaccattaccgtctatgaaggttccagaccaggtacgctgaatgattttctcgg

SEQ ID NO: 29648 - DNA, 75 bp, synthetic construct
  source 1..75: mol_type = other DNA
aataatgtgatcattgctggtgttccagctaaaattgttaaaaaatataactatgagcgtatgcaatgggaaaga

SEQ ID NO: 29649 - DNA, 75 bp, synthetic construct
  source 1..75: mol_type = other DNA
agttcgtggcagaacgtcctgaccagttgtgggtggctgattctacttacgtcagcacatggcagggggtcgtct

SEQ ID NO: 29650 - DNA, 75 bp, synthetic construct
  source 1..75: mol_type = other DNA
tcaaatcatttcccgttcttaaaggctaatgagatacctgattttcttcgcgccttaaacggatataccggaagt

SEQ ID NO: 29651 - DNA, 75 bp, synthetic construct
  source 1..75: mol_type = other DNA
agcatgcaaggaaaatagacgacatttttggtgataatgtcccaaatatgtcccactgtggaattatggaggata

SEQ ID NO: 29652 - DNA, 75 bp, synthetic construct
  source 1..75: mol_type = other DNA
cggaattgcttatccaggcacgaggcaatatgactgaagtttcacgaaaactgaactgtaatcgtgctacggtca

SEQ ID NO: 29653 - DNA, 75 bp, synthetic construct
  source 1..75: mol_type = other DNA
gaggcggcatatagtctttctagggatcaaaagcgtatgctgtatctgttcgttgaccagatcagaaaatccgac

SEQ ID NO: 29654 - DNA, 75 bp, synthetic construct
  source 1..75: mol_type = other DNA
atgtcaccgcagaataatcatctgcagcgtccgcctgctgctgtgttatacgccgatgaactggcaaaattaaaa

SEQ ID NO: 29655 - DNA, 75 bp, synthetic construct
  source 1..75: mol_type = other DNA
tcagcttgtcgtcgtgcaggaattgaagatttccgtttccatgacctcagacacacctgggcaagctggctgatc

SEQ ID NO: 29656 - DNA, 75 bp, synthetic construct
  source 1..75: mol_type = other DNA
acacttctacagcgtcgcccaacatgcggtgctttgcagccagctggtaccgcaggaatttgcttttgaagcgtt

SEQ ID NO: 29657 - DNA, 75 bp, synthetic construct
  source 1..75: mol_type = other DNA
aggtatcccggcaacagagatgttcaaagtgattccactggcaccgggccatgcctacgggatgtttatggaacg

SEQ ID NO: 29658 - DNA, 75 bp, synthetic construct
  source 1..75: mol_type = other DNA
aatggaccattacgactctgacacataccgtcagcccggataacggttttacgaccagtcttgagcttgaagtga

SEQ ID NO: 29659 - DNA, 75 bp, synthetic construct
  source 1..75: mol_type = other DNA
tgcggtcattacgctggcgctgggctggaaggggctgccgcttttcccgaaaggggcattcacggtggacgagat

SEQ ID NO: 29660 - DNA, 75 bp, synthetic construct
  source 1..75: mol_type = other DNA
gaaaaatcgtgctgccgcgccgtggtgcggtcattacgctggcgctgggctggaaggggctgccgcttttcccga

SEQ ID NO: 29661 - DNA, 75 bp, synthetic construct
  source 1..75: mol_type = other DNA
accaacgttcaaaaaatggtttggaataaccctttccgcagaaaataaacgacaattatggatacctgaaggatt

SEQ ID NO: 29662 - DNA, 75 bp, synthetic construct
  source 1..75: mol_type = other DNA
ctgaggtgctgatttttgaaccacgcatgtttggtgatgcgcggggtttcttctttgagagcttcagcagcaagg

SEQ ID NO: 29663 - DNA, 75 bp, synthetic construct
  source 1..75: mol_type = other DNA
aagattgtgtgatcattgaacctaaggtttttggcgattctcgcggttttttccttgaggcctggcataaagaaa

SEQ ID NO: 29664 - DNA, 75 bp, synthetic construct
  source 1..75: mol_type = other DNA
aactacgtttggcaagtgggttggtgtgaatttatctgctgagaataagcgccagttgtggatcccagagggatt

SEQ ID NO: 29665 - DNA, 75 bp, synthetic construct
  source 1..75: mol_type = other DNA
cgttcgagtcgaaatgttttgcgtggattgcatttccagaaaacgaaaccccagggtaaattagtcagcgtaatc

SEQ ID NO: 29666 - DNA, 75 bp, synthetic construct
  source 1..75: mol_type = other DNA
aaggtgttgtgaaacttagcagtgctgttgatagcaccagtgaatcgctggccgcaacgccaaaagcagttaaag

SEQ ID NO: 29667 - DNA, 75 bp, synthetic construct
  source 1..75: mol_type = other DNA
gattccaaagtggtgtattgaccgtattccttctgatgctcaaatcataggtgaaacggaattacattatcttgt

SEQ ID NO: 29668 - DNA, 75 bp, synthetic construct
  source 1..75: mol_type = other DNA
cagaaccttataccggcgaaactcagtctgaagttccgtgccgaatcattacgacctatgaaggcgacttaacac

SEQ ID NO: 29669 - DNA, 75 bp, synthetic construct
  source 1..75: mol_type = other DNA
attgctaagggggcaaatcagtgtgcgcgggcaggggataaattaccggatttacttgatgaatatatcagagca

SEQ ID NO: 29670 - DNA, 75 bp, synthetic construct
  source 1..75: mol_type = other DNA
aaaaaacgctgcgaatatcacctgagacaatttataaaacgctgtactttcgtagccgtgaagcgctacaccacc

SEQ ID NO: 29671 - DNA, 75 bp, synthetic construct
  source 1..75: mol_type = other DNA
cgaccgtaaattatgacgggaaaaaattcacgtatccggtcgctgatgagtggttcggatttcaagatgaagtgt

SEQ ID NO: 29672 - DNA, 75 bp, synthetic construct
  source 1..75: mol_type = other DNA
cccctgaacaattacgtaaacaggcacaggaaatgttgcgacaggcggaacaactggaaaaaacaggtgtaacaa

SEQ ID NO: 29673 - DNA, 75 bp, synthetic construct
  source 1..75: mol_type = other DNA
gctgcgatccctgagcttcatagagcgtaacgaaaacatcgtgttgctggggccatcgggcgtgggaaaaacgca

SEQ ID NO: 29674 - DNA, 75 bp, synthetic construct
  source 1..75: mol_type = other DNA
acaccgtcgatttactctgtcagcgccattacggcaccacgcagggggtgactgaggcggtactggccgccaatc

SEQ ID NO: 29675 - DNA, 75 bp, synthetic construct
  source 1..75: mol_type = other DNA
tgaaacaggaatttgatggcgcaccggaacacgaagcagacgcattgttgggcgttgctgacatgataaaagccg

SEQ ID NO: 29676 - DNA, 75 bp, synthetic construct
  source 1..75: mol_type = other DNA
cctggagtcggtggcgcgtcaggaaggcgttaagcgcgtgacctgtagcgcccgtgaagacgcggtggagttttt

SEQ ID NO: 29677 - DNA, 75 bp, synthetic construct
  source 1..75: mol_type = other DNA
atgataccaggatcaactggcaattactcgccattcgtgcactggtgaaagaaggtaaaaccggacaggcggtgg

SEQ ID NO: 29678 - DNA, 75 bp, synthetic construct
  source 1..75: mol_type = other DNA
gttgatctgtatttacagtcttgtgtggaggatggaaaggaacctgataccccgtttaaaggcgtgtttaacgtc

SEQ ID NO: 29679 - DNA, 75 bp, synthetic construct
  source 1..75: mol_type = other DNA
agaaactgaggctgccacgccgaaggctgtgaaaatcgcgtatgatctggcccggggaaaatacacagcccagga

SEQ ID NO: 29680 - DNA, 75 bp, synthetic construct
  source 1..75: mol_type = other DNA
gcatcaacaaatcccagcgctcgctgaacgaagatgacctgcttgaagccataataaagcttcaaggaagctctg

SEQ ID NO: 29681 - DNA, 75 bp, synthetic construct
  source 1..75: mol_type = other DNA
gccgactggcaaaaacgttatccgaacaatccgggcgcgaaaatgctgccaacgcagttggttaacgtaaaagcg

SEQ ID NO: 29682 - DNA, 75 bp, synthetic construct
  source 1..75: mol_type = other DNA
caccattgatgacctgtggcgggatatgcgctggtcggtctcgcgcctgcaggataagccgcgctgcatcgtggg

SEQ ID NO: 29683 - DNA, 75 bp, synthetic construct
  source 1..75: mol_type = other DNA
ctgtggaaaagcttccattgcccacacaggacagccgggacattattgccgccgcatgcagagccttaaaccatg

SEQ ID NO: 29684 - DNA, 75 bp, synthetic construct
  source 1..75: mol_type = other DNA
atggttgtattttttctaaaaatccctaatctcgattttgctgtttatttgaggcctttttatgtcccatatatg

SEQ ID NO: 29685 - DNA, 75 bp, synthetic construct
  source 1..75: mol_type = other DNA
acgcttcttgagcctgtaataatggaactacaagaaatagagacattgcacgacagatatagcgaacagcacacc

SEQ ID NO: 29686 - DNA, 75 bp, synthetic construct
  source 1..75: mol_type = other DNA
cgcaccgccgataaagattctgcaaaaacttttgttcaggagacgctgaaagatacctgggagtctgctgacgag

SEQ ID NO: 29687 - DNA, 75 bp, synthetic construct
  source 1..75: mol_type = other DNA
atgagtcattctttccaggagcaatacacctgcgtaactacgtcagcatttgctgcaggcaccggtaagacgttt

SEQ ID NO: 29688 - DNA, 75 bp, synthetic construct
  source 1..75: mol_type = other DNA
atgcgcatggcgaaaaagaatcgctgtttacggatgaggcgcaggctcacctgtatggtcatgttgctggcgctg

SEQ ID NO: 29689 - DNA, 75 bp, synthetic construct
  source 1..75: mol_type = other DNA
agattgttgatgaaatctgcgattttgtggtgaatcagcaggcggttttcctgggcggtcactacatcttacagg

SEQ ID NO: 29690 - DNA, 75 bp, synthetic construct
  source 1..75: mol_type = other DNA
actactcaaagatatccaatcaggagtaccgcatcacccaagacgacctggatgatctcactgacacaatcgaat

SEQ ID NO: 29691 - DNA, 75 bp, synthetic construct
  source 1..75: mol_type = other DNA
acgacgttagacattgctctaacgctttatctgtagaccccgccgaaaccgacgctgcccgcgccattgctgaac

SEQ ID NO: 29692 - DNA, 75 bp, synthetic construct
  source 1..75: mol_type = other DNA
agattaaatatggagtttttaaggctcctgataaacaaatctcatgataataacccaacattattacattgtgtt

SEQ ID NO: 29693 - DNA, 75 bp, synthetic construct
  source 1..75: mol_type = other DNA
ggggttttcacgcatcggaccgtagcgacagcccgaaaccgcgccagcgggttcggcggagactggcaggtgcgc

SEQ ID NO: 29694 - DNA, 75 bp, synthetic construct
  source 1..75: mol_type = other DNA
cagctcctgatggcctgctctgaccaaaacatagatgatatgacactcactatggatattagggatgaaccgcct

SEQ ID NO: 29695 - DNA, 75 bp, synthetic construct
  source 1..75: mol_type = other DNA
taatgagagaaatgattatatcagcaaaagatcaacagcaaatatcgctgactgaatatttagaaattgaatcat

SEQ ID NO: 29696 - DNA, 75 bp, synthetic construct
  source 1..75: mol_type = other DNA
gcactggggcggcgtaactaccggacgtggtttctgccaggtaaaggcaacggaacaaaagaatcatggtttttc

SEQ ID NO: 29697 - DNA, 75 bp, synthetic construct
  source 1..75: mol_type = other DNA
gcgctggcggcggagaatgcggggcttaaacagtcggagaaggaatttaataacttctgtcgtcaggagtactac

SEQ ID NO: 29698 - DNA, 75 bp, synthetic construct
  source 1..75: mol_type = other DNA
gagagaaatcgccagaaaatttggaatgccgttgcgcacagtgaataactacgtttatttcgacaggagagttca

SEQ ID NO: 29699 - DNA, 75 bp, synthetic construct
  source 1..75: mol_type = other DNA
gggctgaaatcctgatactccggcagtgtgcgggaacgatgagagtcgaaagcatcggttatctgattggtcgta

SEQ ID NO: 29700 - DNA, 75 bp, synthetic construct
  source 1..75: mol_type = other DNA
tcactgccgcgacggaggatgtcgcggacacggacgacggtgatgcacgcatcaccacggacgacttctggccgg

SEQ ID NO: 29701 - DNA, 75 bp, synthetic construct
  source 1..75: mol_type = other DNA
gcaccgaaacaggagaatcgaaagaaatcacagctccgggtgattatcctgaaaatacaaccactatcgccccgt

SEQ ID NO: 29702 - DNA, 75 bp, synthetic construct
  source 1..75: mol_type = other DNA
aagccagctatcactatcattgcgttgataattggctatatcgctatcttctcacgccagcatgcatcgtggatt

SEQ ID NO: 29703 - DNA, 75 bp, synthetic construct
  source 1..75: mol_type = other DNA
gataaccggtcagcatgtgcctgaaattattctgctcaactcccatgacggttcatccagctaccagatgttacc

SEQ ID NO: 29704 - DNA, 75 bp, synthetic construct
  source 1..75: mol_type = other DNA
cctcctcatcaggtacaaagcgagcataccgaaaaggtaatcctctgacgcttgcagaacgtcagcaggcatctc

SEQ ID NO: 29705 - DNA, 75 bp, synthetic construct
  source 1..75: mol_type = other DNA
tttcggtagcattttcctgtgggtgattatcggtgttatgcctgttgtcgtagcaaaagtggcgtggcgttttgt

SEQ ID NO: 29706 - DNA, 75 bp, synthetic construct
  source 1..75: mol_type = other DNA
gaaaatcagccagaatctggcccccaacacgattaaagacatctggcgttcgctggataaatatgtattcccgtt

SEQ ID NO: 29707 - DNA, 75 bp, synthetic construct
  source 1..75: mol_type = other DNA
gaagacatcgcccgcatgttcaacgtatcgcctatttttctgcaggaatacagcaacagcacctacagcaatttc

SEQ ID NO: 29708 - DNA, 75 bp, synthetic construct
  source 1..75: mol_type = other DNA
gtttcactgggacaggtataacccggcaacggaggcgagttcgtgctgggtgagggtgtcgcaggcgtgggcggg

SEQ ID NO: 29709 - DNA, 75 bp, synthetic construct
  source 1..75: mol_type = other DNA
gcaatttcagcgaggcaagccgcgcatttctcaccatgacgatgcgcccgtggctggcgaactttgaacagcaga

SEQ ID NO: 29710 - DNA, 75 bp, synthetic construct
  source 1..75: mol_type = other DNA
gcggcattcgtttctgacgttttcgcggcactggcgctggtagctgccgcgctttttgatgactctgcagcagca

SEQ ID NO: 29711 - DNA, 75 bp, synthetic construct
  source 1..75: mol_type = other DNA
atcctcaagcgccacggcggatgcaatatcctctgcccgttttgccgctgtctcggcgcgcgttgccgcggattc

SEQ ID NO: 29712 - DNA, 75 bp, synthetic construct
  source 1..75: mol_type = other DNA
gaacatggggcgcattgtcgttgacgtcgatggtgttaattttgctgaactgattaacgtggcctgcggcaatgg

SEQ ID NO: 29713 - DNA, 75 bp, synthetic construct
  source 1..75: mol_type = other DNA
tgtctcggaagagaaggagcattatctggtcgtggatggttttcatcgtcaattactgggcagggaagcaggtac

SEQ ID NO: 29714 - DNA, 75 bp, synthetic construct
  source 1..75: mol_type = other DNA
gtaatggccaaagcagctgataacgcagactggaaggcccgctggggtagcgtccatcacacagaccgtacgttg

SEQ ID NO: 29715 - DNA, 75 bp, synthetic construct
  source 1..75: mol_type = other DNA
gtactgatgcgtggccgtatccggttctgcggcttaagcgcctggggctgtcaaaaacgttccgccgtctggttg

SEQ ID NO: 29716 - DNA, 75 bp, synthetic construct
  source 1..75: mol_type = other DNA
acagcatgattatcactgacctgcccggggtgggcgagagccgggacagggatgcagagtatgaagccctgtacc

SEQ ID NO: 29717 - DNA, 75 bp, synthetic construct
  source 1..75: mol_type = other DNA
catgcgtcgggagaacaatgcccgtcttgcggattttgcagtggcggacgtgtcgttgttctggttgctgaatgc

SEQ ID NO: 29718 - DNA, 75 bp, synthetic construct
  source 1..75: mol_type = other DNA
gcgaagcgtttctgcatgcctttaccgggcaacctttgccggatgatgccgatctgcgtaaagagcgcagcgacg

SEQ ID NO: 29719 - DNA, 75 bp, synthetic construct
  source 1..75: mol_type = other DNA
ccctgccggctccgcaggacgggcgtgatgccacggcactggaaatactccccgccattgacgatcaaaaatcct

SEQ ID NO: 29720 - DNA, 75 bp, synthetic construct
  source 1..75: mol_type = other DNA
tctgcaactgcgtaaggcgttaaatgaagctcgccttgagcgagatatattaaattgcacaggagtcgctgaaaa

SEQ ID NO: 29721 - DNA, 75 bp, synthetic construct
  source 1..75: mol_type = other DNA
gcaaaaaaggtcaacagggccaggccactgacgcattgaacagggcaaaacaacagtcagggaatgatgaaccgt

SEQ ID NO: 29722 - DNA, 75 bp, synthetic construct
  source 1..75: mol_type = other DNA
atggctacaggttcaaaaaacgcaaaatcacaatcactgacagctcggatcccgcatgatgttattgaaggcatg

SEQ ID NO: 29723 - DNA, 75 bp, synthetic construct
  source 1..75: mol_type = other DNA
cgcaggacgggcgtgatgccacggcactggaaatactccccgccattgacgatcaaaaatcctttccccggggca

SEQ ID NO: 29724 - DNA, 75 bp, synthetic construct
  source 1..75: mol_type = other DNA
atttgcaggtcaggtttggtgacgggccgtggcaggatgttaaggggcttgatgaagtgggcagtgatacaggca

SEQ ID NO: 29725 - DNA, 75 bp, synthetic construct
  source 1..75: mol_type = other DNA
ccatatcaacattgcggaagccgatcactttaaacagttcctgcgtcagattgagcgtgtcaattcgaaagtttt

SEQ ID NO: 29726 - DNA, 75 bp, synthetic construct
  source 1..75: mol_type = other DNA
tccaaaaacagaatgtttgacggcaacaaagagctgaaagagtttgtgatgacgctgaccggctcactggtgttt

SEQ ID NO: 29727 - DNA, 75 bp, synthetic construct
  source 1..75: mol_type = other DNA
ggaggcggtaagccatatccctgttccgcgtgacggtcgtgactacgatccggaagtactgcagaaggcggtgaa

SEQ ID NO: 29728 - DNA, 75 bp, synthetic construct
  source 1..75: mol_type = other DNA
ggtggccttctcctgcaagaagcgcgggttctgcccgagttgcggcgcgcgacgcatggccgagagtgcgcggca

SEQ ID NO: 29729 - DNA, 75 bp, synthetic construct
  source 1..75: mol_type = other DNA
aggcattttcccgcaccaaccgtatttatgatgcaactaaaaccttcggtaatatcgtcactttccgggatctgg

SEQ ID NO: 29730 - DNA, 75 bp, synthetic construct
  source 1..75: mol_type = other DNA
cctgtattttgtgtcgttttccattcccgaagaggggctgaaacgaatgctgggcgaaacccggcactacggtat

SEQ ID NO: 29731 - DNA, 75 bp, synthetic construct
  source 1..75: mol_type = other DNA
ctcgatagagaatctgtgatttgcaccgtgaaaataagagcgcaacaaaaagcgactttttcacgacgagatatt

SEQ ID NO: 29732 - DNA, 75 bp, synthetic construct
  source 1..75: mol_type = other DNA
agattgattcttttgatgcgaaatttttagatataaatacattaagcaagcttatttatgaacgtaagagttttg

SEQ ID NO: 29733 - DNA, 75 bp, synthetic construct
  source 1..75: mol_type = other DNA
ctggcacacaactgctgtgccaggatgaacacccttcccttctggcggcgctggaatcccacaatgtggcggttg

SEQ ID NO: 29734 - DNA, 75 bp, synthetic construct
  source 1..75: mol_type = other DNA
attaatgaaaaacagttagaaaaattaaatccaccgcaagatttacgttctgcaatagaaaaaattgggtggaag

SEQ ID NO: 29735 - DNA, 75 bp, synthetic construct
  source 1..75: mol_type = other DNA
ctgcctcgctacatccaacaagaattcaacgacctcctccaatgtggccgtctggagtatggtttcatgcgggtt

SEQ ID NO: 29736 - DNA, 75 bp, synthetic construct
  source 1..75: mol_type = other DNA
atgcctgccgggtttacccactttcgactggtaaccatgaacaacatgaaatcattaaccacggaaaccgcactg

SEQ ID NO: 29737 - DNA, 75 bp, synthetic construct
  source 1..75: mol_type = other DNA
tgcagattatccagcagtttgaacagacgggttctcatgctaaccgttatgacgtcacgatcctggttaatggct

SEQ ID NO: 29738 - DNA, 75 bp, synthetic construct
  source 1..75: mol_type = other DNA
ctgccctgtattgaacaggccagggaagatatccgtaccctgcgtcagctgcagtttctgcaacagaaccggtga

SEQ ID NO: 29739 - DNA, 75 bp, synthetic construct
  source 1..75: mol_type = other DNA
ataaaacgcttcataaaagcactggaggccaaagtgcaaaaaagcactttggaacaaattcaaccacttaaaata

SEQ ID NO: 29740 - DNA, 75 bp, synthetic construct
  source 1..75: mol_type = other DNA
ataaaacggattcagcagcactgctgccctgcattaaacaggccagggaagatatccgtaccctgcgccaacagc

SEQ ID NO: 29741 - DNA, 75 bp, synthetic construct
  source 1..75: mol_type = other DNA
atgagtgaatccagaattacgcttaatgaagtaatggcccatcttcgccttgatgatgatttttatggtgaggtt

SEQ ID NO: 29742 - DNA, 75 bp, synthetic construct
  source 1..75: mol_type = other DNA
caggtccgctgtaaaatctgcggtgcagttgtggagccatttgactggatgctctctgtggcgaaaagagaaacc

SEQ ID NO: 29743 - DNA, 75 bp, synthetic construct
  source 1..75: mol_type = other DNA
atgggtgaaggaactatgtcagcattgccatggtaagggcgaagtcagcacagcgtgcagagggtgtaagggtaa

SEQ ID NO: 29744 - DNA, 75 bp, synthetic construct
  source 1..75: mol_type = other DNA
ctggttccttactatacggtgaaagagtttgttgaatctctggaaacgcctcgtcgcatcctgttaatggtgaaa

SEQ ID NO: 29745 - DNA, 75 bp, synthetic construct
  source 1..75: mol_type = other DNA
aatatccggcattgtttctgcctttcctgtcgtggccggttgattttgcagacagatgctcagggggcgtggttt

SEQ ID NO: 29746 - DNA, 75 bp, synthetic construct
  source 1..75: mol_type = other DNA
cgctgaaaggtccttccattatgcctggtgggcagaaagaagcctatgaactggttgcgccgatcctgaccaaaa

SEQ ID NO: 29747 - DNA, 75 bp, synthetic construct
  source 1..75: mol_type = other DNA
gtcattgataaactggtgacaaagtgctggcaggaagaagcatatgctgagacacaattgaggagagtgacaaga

SEQ ID NO: 29748 - DNA, 75 bp, synthetic construct
  source 1..75: mol_type = other DNA
cgtttaagcctcgaaaacgtcaaagcgatcgtggttgctgccgggctgagcgtgggcgatatcatcaagatgacc

SEQ ID NO: 29749 - DNA, 75 bp, synthetic construct
  source 1..75: mol_type = other DNA
aagagaaaatgactaaaatgccaaacggtgctgtggatgcgttaaaggaagaattaactcgacgcatcagtaagc

SEQ ID NO: 29750 - DNA, 75 bp, synthetic construct
  source 1..75: mol_type = other DNA
gtatctggctggttgccggtatcaccgacatgcgaaatggctttaacggcctggcctcaaaagttcagaacgtcc

SEQ ID NO: 29751 - DNA, 75 bp, synthetic construct
  source 1..75: mol_type = other DNA
gcagagctggttattccgccggaggtgggcggtttctggatgcgtgagcttggcctgtacgatgatgcgggaacg

SEQ ID NO: 29752 - DNA, 75 bp, synthetic construct
  source 1..75: mol_type = other DNA
ttaattgccgtggcgaacatggccgaaagttataagccagctcttgccgaaggctcagggcgttcgcagacctgc

SEQ ID NO: 29753 - DNA, 75 bp, synthetic construct
  source 1..75: mol_type = other DNA
cagagcggtatgtacgaagtctgtttacagctaccagccagatttgtaccaggactgcggaggtgcgagtactta

SEQ ID NO: 29754 - DNA, 75 bp, synthetic construct
  source 1..75: mol_type = other DNA
gcgaaatcgaccgtcgtgtgaaggaacgcatgataatgtcgcggaacaacaactacacacggctggccactgcct

SEQ ID NO: 29755 - DNA, 75 bp, synthetic construct
  source 1..75: mol_type = other DNA
gcgtcgacgggccattgatgcgctgctgcaggggctgtgtttccactatgacccgctggccaaccgcgtccagtg

SEQ ID NO: 29756 - DNA, 75 bp, synthetic construct
  source 1..75: mol_type = other DNA
agcgcgccattcagtctgaaaaggctcgtaagcacaacgcaagccgtcgctctatgatgcgtactttcatcaaga

SEQ ID NO: 29757 - DNA, 75 bp, synthetic construct
  source 1..75: mol_type = other DNA
tatttgcttttgtttctgttaatgcaatggcagctgattgtgcaaaaggtaaaattgagttctctaagtataatg

SEQ ID NO: 29758 - DNA, 75 bp, synthetic construct
  source 1..75: mol_type = other DNA
ttcttctcagtgcacaaattacggggatgacggtaaccattaaaactaatgcctgtcataatggagggggattca

SEQ ID NO: 29759 - DNA, 75 bp, synthetic construct
  source 1..75: mol_type = other DNA
gggaggcgacactgcatattgaggtttttctcagggcaaaagaaccggactcggcactggatatgtggatggaag

SEQ ID NO: 29760 - DNA, 75 bp, synthetic construct
  source 1..75: mol_type = other DNA
taccgaggaaactctcgctgctgcacgacatacaccggaaaaagatatcctggaagaagttaaccgcgaactggc

SEQ ID NO: 29761 - DNA, 75 bp, synthetic construct
  source 1..75: mol_type = other DNA
aaacctgtggtacggggatttattgcagagcggcatgtacgaagtatgtttacagataccagccagatttgctcc

SEQ ID NO: 29762 - DNA, 75 bp, synthetic construct
  source 1..75: mol_type = other DNA
tcgcctggctgaatctgtagggaaagcattcccccactctgcaaatcatcgcatcagcccggctgaattcgacaa

SEQ ID NO: 29763 - DNA, 75 bp, synthetic construct
  source 1..75: mol_type = other DNA
ccatctggcgcaatggcagatgaacaggcaacgactgaaacagtggaaccggatacaactgaacataatcaggac

SEQ ID NO: 29764 - DNA, 75 bp, synthetic construct
  source 1..75: mol_type = other DNA
accgggagttcctgtgcatggcgctacagcaggaatggaacggcaggcatcagcgcggtatggagtccaggctga

SEQ ID NO: 29765 - DNA, 75 bp, synthetic construct
  source 1..75: mol_type = other DNA
agaacataatctgtcgcgagtgccggaagagtgaggttatgcagcgagtgctggcgttttatcaggggaattttg

SEQ ID NO: 29766 - DNA, 75 bp, synthetic construct
  source 1..75: mol_type = other DNA
ctggtacaggcactgggcctggtggatatccgggtgccggaccatctgatagtcggtggcagccaggttttctcc

SEQ ID NO: 29767 - DNA, 75 bp, synthetic construct
  source 1..75: mol_type = other DNA
tccgggtgctgtatctgaacaaccagaataagctgattgccggtgaaaccctcttcaccggcaccatcaaccgta

SEQ ID NO: 29768 - DNA, 75 bp, synthetic construct
  source 1..75: mol_type = other DNA
ctggaccgccatcttcatgaacccggtgtggccttcacctccacccgtgcggcacgggaatggctgattctgaac

SEQ ID NO: 29769 - DNA, 75 bp, synthetic construct
  source 1..75: mol_type = other DNA
taaggcagaccggcttatcactgaacgtctggtacaggcgctggccctggtggatatccgggtgccggaccatct

SEQ ID NO: 29770 - DNA, 75 bp, synthetic construct
  source 1..75: mol_type = other DNA
gagcgagtctgcgcggcgctgcgggagctgaacaagcaccgggatattgtccgacagattacggattcttcccgc

SEQ ID NO: 29771 - DNA, 75 bp, synthetic construct
  source 1..75: mol_type = other DNA
accggcctgatgacccgcagccactacagaacggtaaatgacattaccctgggtaaacgtacggaggcaaaacga

SEQ ID NO: 29772 - DNA, 75 bp, synthetic construct
  source 1..75: mol_type = other DNA
cgatatcctccgggcccgccgggcgacaggcctgatgacccgcgacaattacagaatggtaaatgacattagcca

SEQ ID NO: 29773 - DNA, 75 bp, synthetic construct
  source 1..75: mol_type = other DNA
tcagcataccgtcacgctgtatgccagagggctgacctgcgaagccgacaccctcggcagctgtggttacgttta

SEQ ID NO: 29774 - DNA, 75 bp, synthetic construct
  source 1..75: mol_type = other DNA
aatcagcaaaggtcgtctgattcgcgtaaatcagggcggtaaatttcgttactgcataccgggcgataatttacc

SEQ ID NO: 29775 - DNA, 75 bp, synthetic construct
  source 1..75: mol_type = other DNA
tggctgattcaggctggtgaaagtgaaccggtgtcaccggtaccgaaagtgacagcgcaaatgctgactgaggcg

SEQ ID NO: 29776 - DNA, 75 bp, synthetic construct
  source 1..75: mol_type = other DNA
gagagatgacgcccggcgagcgcagtctcattctgcgggccctgcaaaccctggaccgccatcttcatgaacccg

SEQ ID NO: 29777 - DNA, 75 bp, synthetic construct
  source 1..75: mol_type = other DNA
acaaacgggggatgcccagcgtttccgtgcatttattggtgagatagcggaacgcgcaccacaagaaaaggagaa

SEQ ID NO: 29778 - DNA, 75 bp, synthetic construct
  source 1..75: mol_type = other DNA
atatcaaatcccttggaacagggtcccagacaaacataaatgcgcagattgtcaaaaatattaagatccccatcc

SEQ ID NO: 29779 - DNA, 75 bp, synthetic construct
  source 1..75: mol_type = other DNA
cgatgccgttggcgccctctcgaacactgggctgatcgcttgcgtggtgctcggtgccgcgttcgacgcacccgg

SEQ ID NO: 29780 - DNA, 75 bp, synthetic construct
  source 1..75: mol_type = other DNA
ggccagaaatccaatggcaacccggaaaaagcgctcaacttcctgacgccgcaccagaagtggggtatccactcc

SEQ ID NO: 29781 - DNA, 75 bp, synthetic construct
  source 1..75: mol_type = other DNA
gatctcaccgcgctgtcggtcgaggtggtgacttttttgttgaagaagtcggtgcttgccggtttaccgacagcc

SEQ ID NO: 29782 - DNA, 75 bp, synthetic construct
  source 1..75: mol_type = other DNA
ttattaaccatggcagaacgcgcccgcgccgcatccattccggatgccaccgagcgagtggcaaatgaagtgagc

SEQ ID NO: 29783 - DNA, 75 bp, synthetic construct
  source 1..75: mol_type = other DNA
gtttatcgcccccgcgctttacgccttccatatcgtcatgtctggcctggcgctgatggtaatggccctgctggg

SEQ ID NO: 29784 - DNA, 75 bp, synthetic construct
  source 1..75: mol_type = other DNA
agcacgggaatggctgattcttaacatggcgggactggagcgtgaagaattccgggtgctgtatctgaacaacca

SEQ ID NO: 29785 - DNA, 75 bp, synthetic construct
  source 1..75: mol_type = other DNA
taactgtattacccgcttgcgtctggtggtgaaagatatgggccttatcgatcagcaggcgctgaaagcggcagg

SEQ ID NO: 29786 - DNA, 75 bp, synthetic construct
  source 1..75: mol_type = other DNA
aagagcaaaaaattagtcaggcaacgttggatgcacttgaggctgagctgtaccgcaatcttcaacctatttacc

SEQ ID NO: 29787 - DNA, 75 bp, synthetic construct
  source 1..75: mol_type = other DNA
gcattagcattaaccggaaagtcagacctgccagtagagctaaagctgcgaaatgttgagattaaggtgaaatag

SEQ ID NO: 29788 - DNA, 75 bp, synthetic construct
  source 1..75: mol_type = other DNA
catgcagcgctacggctccggccgggttcagcaggtgatgccaaccgaaggctggtaccgggagcatatgcctcc

SEQ ID NO: 29789 - DNA, 75 bp, synthetic construct
  source 1..75: mol_type = other DNA
actatagtatttctgatatttatctttatcctgaacaaaaaacaataaattgtgtcgttgagattgaaaacattg

SEQ ID NO: 29790 - DNA, 75 bp, synthetic construct
  source 1..75: mol_type = other DNA
aaagcggtgagcatttacgcctgaaaacgctggaaagtgtctggatccaggggaaactgcgtatgtgggggcgtt

SEQ ID NO: 29791 - DNA, 75 bp, synthetic construct
  source 1..75: mol_type = other DNA
acgagacagcagagttgcccgacagcgaattctgagcatgctattgcgaacagacaaacattatgcaggaaagca

SEQ ID NO: 29792 - DNA, 75 bp, synthetic construct
  source 1..75: mol_type = other DNA
gtggaaagcttctttcattcgctgaaggtggaatatatccacggggaacgctttagcagccgggaaataatgcgg

SEQ ID NO: 29793 - DNA, 75 bp, synthetic construct
  source 1..75: mol_type = other DNA
gaaacatgggaacgctacagcgttctggtcagtcgtgtggatcttgcaaatcctgaatggccggaaataccgcaa

SEQ ID NO: 29794 - DNA, 75 bp, synthetic construct
  source 1..75: mol_type = other DNA
agatcatcctgattggtcgttggttacgtgcagacgccgaattgatcaatggttgggggtatctgaatttatgtt

SEQ ID NO: 29795 - DNA, 75 bp, synthetic construct
  source 1..75: mol_type = other DNA
gtggctccctgtatgcccgtactcaggtcaaaaatgttcagctgatttccatgacgctgccggatatcaatgccg

SEQ ID NO: 29796 - DNA, 75 bp, synthetic construct
  source 1..75: mol_type = other DNA
catgactcacagtgagcaggaaaaagttgcgcaatttttgtcacgcgaaggaattcgtcatttccttgctcgtct

SEQ ID NO: 29797 - DNA, 75 bp, synthetic construct
  source 1..75: mol_type = other DNA
cacgcaactgatgagtcgttatgagcagaacctgaactatacatctgtatcctctgcacagctgacgacaggagg

SEQ ID NO: 29798 - DNA, 75 bp, synthetic construct
  source 1..75: mol_type = other DNA
cctgttgcagggcgcaggtgcactggcgcttgcaggcgacaccctctcacagggccgtaacggacgctggctgac

SEQ ID NO: 29799 - DNA, 75 bp, synthetic construct
  source 1..75: mol_type = other DNA
ccgatgataccacactgaaaggccgcagcgttgccgggaaaacactcaccgtcagttccggcagcctgaacaacg

SEQ ID NO: 29800 - DNA, 75 bp, synthetic construct
  source 1..75: mol_type = other DNA
gacggtactgttacagcaccaacctacaatttaaaaaatggtagcaaaaataacgtaggggctgcgctcgctgta

SEQ ID NO: 29801 - DNA, 75 bp, synthetic construct
  source 1..75: mol_type = other DNA
caccggaacaacttcgtcggcaggcgcaggagatgcttcgttgtgctgaacagatggaaaaaacgagcgtgaaaa

SEQ ID NO: 29802 - DNA, 75 bp, synthetic construct
  source 1..75: mol_type = other DNA
ctcactgctctggcagggcttgctacagcggcagataaactcccttattttacaggggtagatcgtgccgcgtta

SEQ ID NO: 29803 - DNA, 75 bp, synthetic construct
  source 1..75: mol_type = other DNA
tggctggagttgctgatatttataagcagcagcaacagcaggagcgtaaagcggcattccagaaaggttatgcag

SEQ ID NO: 29804 - DNA, 75 bp, synthetic construct
  source 1..75: mol_type = other DNA
ggagaacgaaaaaccgcagtggacaaattattaatgaagcccctgtaccagcaggagatgcagttatattccaga

SEQ ID NO: 29805 - DNA, 75 bp, synthetic construct
  source 1..75: mol_type = other DNA
agtttcccctgagtgcgctgcctccactcattcgtgatgccgttattgaagctcagcaaattacgcaggctcccc

SEQ ID NO: 29806 - DNA, 75 bp, synthetic construct
  source 1..75: mol_type = other DNA
tatgtggatgacaaggcactggagctgaaggtgtacgtggatgatctgatggcaaaacaccttgccgcaccagat

SEQ ID NO: 29807 - DNA, 75 bp, synthetic construct
  source 1..75: mol_type = other DNA
aggaggggctgcagtagatgttgatgacggtactgttacagcaccaacctacaatttaaaaaatggtagcaaaaa

SEQ ID NO: 29808 - DNA, 75 bp, synthetic construct
  source 1..75: mol_type = other DNA
accagcaaaatcaccaacgttaaagatggcgacctgacggctggcagcaccgatgccgttaacggctctcagctg

SEQ ID NO: 29809 - DNA, 75 bp, synthetic construct
  source 1..75: mol_type = other DNA
actttcatgcgactattgtttttcatgagttgctccatgttttccacaatttaaatggggagcgtttgaaagttg

SEQ ID NO: 29810 - DNA, 75 bp, synthetic construct
  source 1..75: mol_type = other DNA
ctcatatggccgtgggcgacggtggcggcacgttgcccacaccagacagtaagcagacccgtctggtgcatgagg

SEQ ID NO: 29811 - DNA, 75 bp, synthetic construct
  source 1..75: mol_type = other DNA
gccaggactgttgggttgggggctttttcagaggaggtgctttcagaaaataaattccgcgaagagattgggatg

SEQ ID NO: 29812 - DNA, 75 bp, synthetic construct
  source 1..75: mol_type = other DNA
aataaccagatgaacgtgctgcgcgatgccgccaccattgggatcgccgcctgggcgatgacgctgattattatc

SEQ ID NO: 29813 - DNA, 75 bp, synthetic construct
  source 1..75: mol_type = other DNA
agcctgtcagaaactccaggaggctgttggcttaccgaatctggcaccgcgctatgccattgatgctcctgctga

SEQ ID NO: 29814 - DNA, 75 bp, synthetic construct
  source 1..75: mol_type = other DNA
acaggctgctgacaagatgcaggctggcgtgatcctgctggactttatgcgccgggagttaaacctgtctaactc

SEQ ID NO: 29815 - DNA, 75 bp, synthetic construct
  source 1..75: mol_type = other DNA
acgcaaccttgatgacctgcgccgcatcgtccaagggctgacacaacggggcgtgcgcatggagttcgtcaaaga

SEQ ID NO: 29816 - DNA, 75 bp, synthetic construct
  source 1..75: mol_type = other DNA
tttctgaatttgaaaccgttgagcaagaaaacagttataacgaatggttacgcgcaaaagtagccgcaagccttg

SEQ ID NO: 29817 - DNA, 75 bp, synthetic construct
  source 1..75: mol_type = other DNA
ccagtcatgggttaaacaggcaagcactaaaactgctgccgagggtgacttcactgccgttgctaacttcaatct

SEQ ID NO: 29818 - DNA, 75 bp, synthetic construct
  source 1..75: mol_type = other DNA
gtttgtcgcaacagctggtggtcagtgtcgctgaacacctgttgttacggcatgaatgcagattaccaaatcacc

SEQ ID NO: 29819 - DNA, 75 bp, synthetic construct
  source 1..75: mol_type = other DNA
acgacaagcatatcaagacctacaccatcaaattccctgactccggcttccgcgttgtcgcgctctccagccgtc

SEQ ID NO: 29820 - DNA, 75 bp, synthetic construct
  source 1..75: mol_type = other DNA
ctgacaccgcgagttataaggcccctcccgttctgttgccctaccagcagcgctgggtggcagatgcctctccgc

SEQ ID NO: 29821 - DNA, 75 bp, synthetic construct
  source 1..75: mol_type = other DNA
tgcaggaacttaaccgctggtttcgtgacggaagagggctttatgtccatgttattcgttgggagccagaaacac

SEQ ID NO: 29822 - DNA, 75 bp, synthetic construct
  source 1..75: mol_type = other DNA
agcgtcttttttatcgtccgcgctcacgcacgccagaattatggtgggctgggcaggggagccgaaaggctcgcc

SEQ ID NO: 29823 - DNA, 75 bp, synthetic construct
  source 1..75: mol_type = other DNA
tcaccaaagcgcacaaccgcgctcttgcggtttttttgtgtcatgagcagcattacgcccaaattatggtggggc

SEQ ID NO: 29824 - DNA, 75 bp, synthetic construct
  source 1..75: mol_type = other DNA
tgagacgaagcagcatgacggttccgggcaacgtaattatggttgcagtcgtgggccggggcgtctactggatgg

SEQ ID NO: 29825 - DNA, 75 bp, synthetic construct
  source 1..75: mol_type = other DNA
tattttcagcgagatcgttatggtcgtattctcgggcaggtttatgcaccagacggaatgaatgttaatcagttt

SEQ ID NO: 29826 - DNA, 75 bp, synthetic construct
  source 1..75: mol_type = other DNA
ttccggcggaccattgtctgcatgatgtgcaggacatgagccgtcttaaccatccgaaagcggacctgtcaaagg

SEQ ID NO: 29827 - DNA, 75 bp, synthetic construct
  source 1..75: mol_type = other DNA
tactggggatggtggctttcatggtcgccgtttgtaggtatgttcattgcacgcgtttcccgcggcaggacaatt

SEQ ID NO: 29828 - DNA, 75 bp, synthetic construct
  source 1..75: mol_type = other DNA
ctgcgttctgcgctctatcccattatcggcgatcgcatttacgggcctataggccacgcggttgatatcttcgcc

SEQ ID NO: 29829 - DNA, 75 bp, synthetic construct
  source 1..75: mol_type = other DNA
tggagtggcaaacacacccgtctggcagcgaatattctgggcctcgctcatgggcattgttgcaattgcgcttct

SEQ ID NO: 29830 - DNA, 75 bp, synthetic construct
  source 1..75: mol_type = other DNA
gtgtgagcgtacggtttaagttgccgggttcactggtgccgaatcagtttgccctgggcatttactggcagttgt

SEQ ID NO: 29831 - DNA, 75 bp, synthetic construct
  source 1..75: mol_type = other DNA
cagacaaaaagtctggtgaagccgctgttctctggatcaagcgtggtgatgtggaagcgatgcagaaagcccgga

SEQ ID NO: 29832 - DNA, 75 bp, synthetic construct
  source 1..75: mol_type = other DNA
ttgcatccctgaaagccaaaattcaggcttaccagcggaaaaaaagatgtgccaatcagcgtgtgcatgcaacca

SEQ ID NO: 29833 - DNA, 75 bp, synthetic construct
  source 1..75: mol_type = other DNA
ttccgatgacacgcctttgtcgggtggatgttctgataccaggaaggcttcagacaaaaagccgggtgaagccgc

SEQ ID NO: 29834 - DNA, 75 bp, synthetic construct
  source 1..75: mol_type = other DNA
ttaacaaaaacattgctgaagcggtggtcagtgatgcgggggctacgggaggtaaggccctgcaactgaataaac

SEQ ID NO: 29835 - DNA, 75 bp, synthetic construct
  source 1..75: mol_type = other DNA
gaatatgcagaccgtaaccgtgcagtggctaatcagcgaatgaccgggagtaatgcgcggtggaaatggacaaca

SEQ ID NO: 29836 - DNA, 75 bp, synthetic construct
  source 1..75: mol_type = other DNA
caatgatgccggtcaggaggtggagtacttcaatacgaagcttgagaacgtgaaggtggtgaaggttaacccggt

SEQ ID NO: 29837 - DNA, 75 bp, synthetic construct
  source 1..75: mol_type = other DNA
gagatgggccggaaaatggatgcctttaaggagcgggtgatccgtaacagtctgcggccccctgccgtgcccggt

SEQ ID NO: 29838 - DNA, 75 bp, synthetic construct
  source 1..75: mol_type = other DNA
atgaaatgccgggggctgattgccctgttgatatgggggcagagtgtggccgccgccgatcttggcacctggggg

SEQ ID NO: 29839 - DNA, 75 bp, synthetic construct
  source 1..75: mol_type = other DNA
tgtcgctgtagcgatcgcctggggcaccctgactaacagtggtggtcagcctggtaatgctgttgttgtgcattg

SEQ ID NO: 29840 - DNA, 75 bp, synthetic construct
  source 1..75: mol_type = other DNA
tgtcgcagtggcgattgccggtttcaatcagatgaaccgtggtggccctgcaggaaatgccgtggtgatgcacta

SEQ ID NO: 29841 - DNA, 75 bp, synthetic construct
  source 1..75: mol_type = other DNA
gatgattttgtcgcagtggcaatcgccggtttcaatcagatgaaccgtggtggcccggcaggaaatgctgtggca

SEQ ID NO: 29842 - DNA, 75 bp, synthetic construct
  source 1..75: mol_type = other DNA
ggcagaagcatggcgacgggctgccggtgttgcgccccggacagactggcagcagtttgcccgaaaaagggctga

SEQ ID NO: 29843 - DNA, 75 bp, synthetic construct
  source 1..75: mol_type = other DNA
tcagtgcgcagctgaataatttgcaggatacggcaacgtctgccttaagcgatatcagtaaaacggtgggagggc

SEQ ID NO: 29844 - DNA, 75 bp, synthetic construct
  source 1..75: mol_type = other DNA
tcagcaattaacgtgttgttattgcgccatgaacgcagttctctgccgctcggcaagtttttggtcaccgaaggc

SEQ ID NO: 29845 - DNA, 75 bp, synthetic construct
  source 1..75: mol_type = other DNA
attctcagacgacagtcccgtaacaaaggagtgccgttcgtgaatgcaaagcgcgtttatcggataatgagcgaa

SEQ ID NO: 29846 - DNA, 75 bp, synthetic construct
  source 1..75: mol_type = other DNA
atgaagaaattactggtaaccgtaaagccttttcagggaacaattccgttccgtattttgcagcgtggtcgtgtt

SEQ ID NO: 29847 - DNA, 75 bp, synthetic construct
  source 1..75: mol_type = other DNA
caggagtctgaagaacgaatgggtgccagcgacgggctatgtaagcttcagcgatgcagctcacgcaataacgga

SEQ ID NO: 29848 - DNA, 75 bp, synthetic construct
  source 1..75: mol_type = other DNA
gcctggtgaaagatatcgatgagtttgttgcggcagcgatcgtgttgttcgatcagatgaatcgtggtggtccgg

SEQ ID NO: 29849 - DNA, 75 bp, synthetic construct
  source 1..75: mol_type = other DNA
ctggtctggaaaaagcactagccttgggagctacggaaatcacaaaagaggaatacttcgcacgtaaaaacggca

SEQ ID NO: 29850 - DNA, 75 bp, synthetic construct
  source 1..75: mol_type = other DNA
aacatcaccgttgatatggcgattgacgcgcaggaattactgcaggaagacgttgctacctttgacgggcatatc

SEQ ID NO: 29851 - DNA, 75 bp, synthetic construct
  source 1..75: mol_type = other DNA
aatttaaaaagtcggctcgtactgtcggtgacgtactgggtaaataccatccgcatggcgacagcgcctgctatg

SEQ ID NO: 29852 - DNA, 75 bp, synthetic construct
  source 1..75: mol_type = other DNA
atggtctggcgcaactgtacgttctgccgccgcaaagcacgctgaccattcatgttgggaaacgcaaaattaaac

SEQ ID NO: 29853 - DNA, 75 bp, synthetic construct
  source 1..75: mol_type = other DNA
acgcgcttctggtggcagtacagcgataaatggatgaccgaatccaggcaggaaaagttgatatggcagagtgcg

SEQ ID NO: 29854 - DNA, 75 bp, synthetic construct
  source 1..75: mol_type = other DNA
tttctggtctggaaaaagcactggccctgggagctacggaaatcacaaaagaggaatacttcgcacgtaaaaacg

SEQ ID NO: 29855 - DNA, 75 bp, synthetic construct
  source 1..75: mol_type = other DNA
gaaacattcgatgaagagtatcaggttgaagttcaggaagatgatccggagaaaatggaaggcgctgaacatcca

SEQ ID NO: 29856 - DNA, 75 bp, synthetic construct
  source 1..75: mol_type = other DNA
tccggacggcgaaaaagtgccggctgcgaaaattaccaaagcgtatttcgagctgggaatgacgttcccggaact

SEQ ID NO: 29857 - DNA, 75 bp, synthetic construct
  source 1..75: mol_type = other DNA
gccaccatgcgctggatgatgcccgtcaccaggcgaaatacgttacagccacgatacaaaaactgatcccgaatc

SEQ ID NO: 29858 - DNA, 75 bp, synthetic construct
  source 1..75: mol_type = other DNA
aaggtgaacggtcatcacgaaatcacatccaccagcaggacgtgtgaccatctaatgatcgaccttgaaaccatg

SEQ ID NO: 29859 - DNA, 75 bp, synthetic construct
  source 1..75: mol_type = other DNA
gagctggggaaagccatagacttcgatgccagaacggctattccattcgaaggtgagcgccataatgcacttgat

SEQ ID NO: 29860 - DNA, 75 bp, synthetic construct
  source 1..75: mol_type = other DNA
ttatacgaaggtgacgctacctacagagctgctatcgacaaagcattaaaccctgttgggttaaacggaatgttt

SEQ ID NO: 29861 - DNA, 75 bp, synthetic construct
  source 1..75: mol_type = other DNA
actggaaaatggcggacgtctggatgtgctgagcggacacacagccaccagaacccttgtggatgatggcggaac

SEQ ID NO: 29862 - DNA, 75 bp, synthetic construct
  source 1..75: mol_type = other DNA
ccggtaacaccaccataaatcagaacggcgagctgagggttcatgccggcggtgaagcgtctgatgtcacccaga

SEQ ID NO: 29863 - DNA, 75 bp, synthetic construct
  source 1..75: mol_type = other DNA
tgtgctgaccggacacacagccactaatacccgcgtggatgatggcggaacgctggatgtccgcaacggtggcac

SEQ ID NO: 29864 - DNA, 75 bp, synthetic construct
  source 1..75: mol_type = other DNA
ctggctgggctcactggaaaccggtctgcccttcagtatcactgacaacctgatgctggagccacaactgcagta

SEQ ID NO: 29865 - DNA, 75 bp, synthetic construct
  source 1..75: mol_type = other DNA
gctggaaaaaggcagttcattcacgctgaacgccggtgatacggccacggataccacggtaaatggcggactgtt

SEQ ID NO: 29866 - DNA, 75 bp, synthetic construct
  source 1..75: mol_type = other DNA
tcgccaacaacactactgtcaccggtggtggtcttcagagagtgaatgccggaggaagcgtttcagacacggtta

SEQ ID NO: 29867 - DNA, 75 bp, synthetic construct
  source 1..75: mol_type = other DNA
tgatgccgacagtaatctgcagagtctgtgctggccgtgtcataaggcgaagacggcccgtgaacggcttaagtg

SEQ ID NO: 29868 - DNA, 75 bp, synthetic construct
  source 1..75: mol_type = other DNA
tttgaaccgggaatgacggtctcccttgttgcccggcaacatggtgtggcagccagccagctatttctctggcgt

SEQ ID NO: 29869 - DNA, 75 bp, synthetic construct
  source 1..75: mol_type = other DNA
tgatgccgacagtaatctgcagagtctgtgctggccgtgccacaaggcgaagacggcccgtgaacggcttaagtg

SEQ ID NO: 29870 - DNA, 75 bp, synthetic construct
  source 1..75: mol_type = other DNA
cgatgcagacagtaatctgcagagcctgtgctggccgtgccataagacgaagacggcccgtgaacggctaaagtg

SEQ ID NO: 29871 - DNA, 75 bp, synthetic construct
  source 1..75: mol_type = other DNA
gccgcgttcgcggctgccgccataccactactgacccgtcaggctactgcgaaagccacaaaagcgaaggctgga

SEQ ID NO: 29872 - DNA, 75 bp, synthetic construct
  source 1..75: mol_type = other DNA
ctctcatttacgcaggtggtgaccagtcggtacacggaagggccctgaataccacactgaatggcggttaccagt

SEQ ID NO: 29873 - DNA, 75 bp, synthetic construct
  source 1..75: mol_type = other DNA
agaccatgaacagccgccacctgaccggtgatgcggtggatgttgtggcctacattggcagtcaggtgtcatggg

SEQ ID NO: 29874 - DNA, 75 bp, synthetic construct
  source 1..75: mol_type = other DNA
atgcccggtaaattcagattcagtcgtcgaagtgagaaaaatctggagggcgtcaaaccacagctggttgctgtt

SEQ ID NO: 29875 - DNA, 75 bp, synthetic construct
  source 1..75: mol_type = other DNA
agcagaacttttgctaaaggcgaattgtcagtatcgcttggttcggtgagttctgctgaggggatggcctcgaat

SEQ ID NO: 29876 - DNA, 75 bp, synthetic construct
  source 1..75: mol_type = other DNA
ttgtacgaagatgacgctacctacagagctgctgtcgacaaagcattaaaccctgttgggttagacggaatgttt

SEQ ID NO: 29877 - DNA, 75 bp, synthetic construct
  source 1..75: mol_type = other DNA
tcagactgggaaaggggaataaagcgccctggtggccctgcccttcgtttgctttctgtggttgagaaaaacgga

SEQ ID NO: 29878 - DNA, 75 bp, synthetic construct
  source 1..75: mol_type = other DNA
ggtaagcacaccgtgacgctggagaaaggggataacggctggacatccagtgatccgacgctgatcccggacagc

SEQ ID NO: 29879 - DNA, 75 bp, synthetic construct
  source 1..75: mol_type = other DNA
ccatcagtaccggtctggagtatgggccggataacgaggccaataccggcggacaatggatacaaaatggcggta

SEQ ID NO: 29880 - DNA, 75 bp, synthetic construct
  source 1..75: mol_type = other DNA
agtaactccccggtaacgttccataaactgaccaccacgaacctcaccggccagggcggcaccatcaatatgcgt

SEQ ID NO: 29881 - DNA, 75 bp, synthetic construct
  source 1..75: mol_type = other DNA
agtgaattaccggtgaactggtgggtacagccttctgttatccgcaccttcagctcccggggagatatgcgtgtg

SEQ ID NO: 29882 - DNA, 75 bp, synthetic construct
  source 1..75: mol_type = other DNA
gggcgtacatgaatacgatgataaacggggaaacaaagcccgtggcgagattgagttattgttaaaagaaacgga

SEQ ID NO: 29883 - DNA, 75 bp, synthetic construct
  source 1..75: mol_type = other DNA
gatgcggcagatggagtttaccgtacccggcggtgcgcccatcaccggctttttgcatatgccgaaaggcgatgg

SEQ ID NO: 29884 - DNA, 75 bp, synthetic construct
  source 1..75: mol_type = other DNA
gagtgcttatcagaccatccaggaaaatatgctgaaaggcgggatttctggtcgcagcgctaaaggaaaacgtat

SEQ ID NO: 29885 - DNA, 75 bp, synthetic construct
  source 1..75: mol_type = other DNA
ttacttcagattcgtctgccagaacggctgcgtctgcggtcagtctctgggggaagtccatgtgccccaccgggg

SEQ ID NO: 29886 - DNA, 75 bp, synthetic construct
  source 1..75: mol_type = other DNA
ccagacccgcgtacgtgacccgggccgccgggggtataccaaacacatgctgcgtctgcgccgtgacggggagat

SEQ ID NO: 29887 - DNA, 75 bp, synthetic construct
  source 1..75: mol_type = other DNA
aaccggacaacatgtccctgaaattattctgctcaactcccatgacggtacctccagctaccagatgctgccggg

SEQ ID NO: 29888 - DNA, 75 bp, synthetic construct
  source 1..75: mol_type = other DNA
aggcggcactgacttaccgttatggtgataaacatcagccggtcaccaccgctgacattctgacaccacgacgcc

SEQ ID NO: 29889 - DNA, 75 bp, synthetic construct
  source 1..75: mol_type = other DNA
atgcactatgttcccagtattttcggtaaagaccggcatacttcccgcagtaaacggtatgcgtacattcccacc

SEQ ID NO: 29890 - DNA, 75 bp, synthetic construct
  source 1..75: mol_type = other DNA
tgtgcttaacctgggtactattgatgagccaggtcacgcagataacactgccactctcaaactgaaaaagacagc

SEQ ID NO: 29891 - DNA, 75 bp, synthetic construct
  source 1..75: mol_type = other DNA
gaggtgcgtcaggacatgcagcagcgcattgatgcggcgcaccggatgtttgccgaaaaagtggcgatgtatacg

SEQ ID NO: 29892 - DNA, 75 bp, synthetic construct
  source 1..75: mol_type = other DNA
ggtcgccccggttgggtagtcatgtgggatggctggttcagacttcaggatatggttgagggttacctggtgatg

SEQ ID NO: 29893 - DNA, 75 bp, synthetic construct
  source 1..75: mol_type = other DNA
aggcggcactgacttaccgttatggtgacgaacatcggcccgtcaccaccgccgacattctgacgccacgacgcc

SEQ ID NO: 29894 - DNA, 75 bp, synthetic construct
  source 1..75: mol_type = other DNA
atcaccgtactggaaagcctgcagcaggaaggttttcagccattcttcgcctgccagacctgtgtgcgcgacccg

SEQ ID NO: 29895 - DNA, 75 bp, synthetic construct
  source 1..75: mol_type = other DNA
gagaattgcgtgttccacaccggggaaatgtggtggagaaagttattgaaggtgcttacgaggtggtgggggttt

SEQ ID NO: 29896 - DNA, 75 bp, synthetic construct
  source 1..75: mol_type = other DNA
atgagaaccgtatcgatatttaaaaatggcaacaaccgtgccatccgtctgccccgggatctggattttgaggga

SEQ ID NO: 29897 - DNA, 75 bp, synthetic construct
  source 1..75: mol_type = other DNA
aactcgagcaatagtatattaataattaagggagcgaataaatttctttccccggaagatatcgatcgagctgca

SEQ ID NO: 29898 - DNA, 75 bp, synthetic construct
  source 1..75: mol_type = other DNA
gctggggatggtcacgtcaggcgaatgcccgacgccggacacggtatatacctatgccaacagtctgcaacgcac

SEQ ID NO: 29899 - DNA, 75 bp, synthetic construct
  source 1..75: mol_type = other DNA
attgccattctgaaacctgaacctcataaactggctcgagataacaaccaaatgcataaaattgggaaaatggca

SEQ ID NO: 29900 - DNA, 75 bp, synthetic construct
  source 1..75: mol_type = other DNA
agcgagccgaatgcctttcagcaagggatcagccgcgtcagtatgctgctgattcgctttatgctggtgatggct

SEQ ID NO: 29901 - DNA, 75 bp, synthetic construct
  source 1..75: mol_type = other DNA
cggcagattgccgccgggaaggctacatccgccgacgccattcctggcggctcagtcgattacgacaacttcctg

SEQ ID NO: 29902 - DNA, 75 bp, synthetic construct
  source 1..75: mol_type = other DNA
tttaccctcaacggtggcgtacgctatcagtacactgaaaacaagattgatgatttcatcggctacgcgcagcaa

SEQ ID NO: 29903 - DNA, 75 bp, synthetic construct
  source 1..75: mol_type = other DNA
gcagcgctaaaggaaaacgtatccatacccgtgccattcacagcattgacactgacattaagctcaaccgcgcat

SEQ ID NO: 29904 - DNA, 75 bp, synthetic construct
  source 1..75: mol_type = other DNA
ccgaacgtcagcaggcatggttcaatttttcccagggggtggcattgccggatccggggaaatattatggtcgcg

SEQ ID NO: 29905 - DNA, 75 bp, synthetic construct
  source 1..75: mol_type = other DNA
ctggtacgctgaacatcgatgaatcccggcagcttcagttgatcacacagtactataaaagccagggcgacgacg

SEQ ID NO: 29906 - DNA, 75 bp, synthetic construct
  source 1..75: mol_type = other DNA
aaaccgagtcgaaagtgaacggtcaatggcaaaaatatgacgtgaaggaatcaagtccatcgaaagcgacagctt

SEQ ID NO: 29907 - DNA, 75 bp, synthetic construct
  source 1..75: mol_type = other DNA
attactgatatgcagatacgccagcgtgatgtcgctgaacttgatgccagatactcgagggaattagccgatgcg

SEQ ID NO: 29908 - DNA, 75 bp, synthetic construct
  source 1..75: mol_type = other DNA
ttttaacgtttattgcttgtattgctggtggtcttgtctggtcagctaatcattaccacaataaagccattgaat

SEQ ID NO: 29909 - DNA, 75 bp, synthetic construct
  source 1..75: mol_type = other DNA
cgcatcaattattttttcacttgaatcagtgtttatattggtgttgtctgttcttatttgctcagttaaaattaa

SEQ ID NO: 29910 - DNA, 75 bp, synthetic construct
  source 1..75: mol_type = other DNA
cgctggtatggtcagtcagtgcacttacacttctggttctctggttcccgttatcttccaccagttacggtgctg

SEQ ID NO: 29911 - DNA, 75 bp, synthetic construct
  source 1..75: mol_type = other DNA
gcgctcaactggccgtaaccggccagtcgctggagaaggcaaagcgcgaggctgaagcgcttgccacgcaattca

SEQ ID NO: 29912 - DNA, 75 bp, synthetic construct
  source 1..75: mol_type = other DNA
ttgctgtactggtccgggcaattcgctggtggtgatatgaaccgtattctgtatgtggtgattattgtactgctg

SEQ ID NO: 29913 - DNA, 75 bp, synthetic construct
  source 1..75: mol_type = other DNA
cttcctggtgggcatattatcaactagcccgcaatacttactttatatttggaattccatgcttattattctatg

SEQ ID NO: 29914 - DNA, 75 bp, synthetic construct
  source 1..75: mol_type = other DNA
ccgaacagttgctgaagacggcaagctggaaatccacaccacctatgtgagtctgccgatgatccctcttgaaat

SEQ ID NO: 29915 - DNA, 75 bp, synthetic construct
  source 1..75: mol_type = other DNA
tcagtcagatattccaggtgctgagccggaacaatatgcacaggctacgaaacgaggagaacggaataacaatcc

SEQ ID NO: 29916 - DNA, 75 bp, synthetic construct
  source 1..75: mol_type = other DNA
aaagctgaaaatgaaactcttcgcgctgacgttgccgctggtcgtaagcgcctgcgtatcaacgccacctgtcca

SEQ ID NO: 29917 - DNA, 75 bp, synthetic construct
  source 1..75: mol_type = other DNA
ttgcggatggttaaaggaacagttgtggggacaactgacacattacgtgaaatgcagcgttatgaacaactgagt

SEQ ID NO: 29918 - DNA, 75 bp, synthetic construct
  source 1..75: mol_type = other DNA
gcaaaatgacactcgcccgcgccctcgacaaatacctgaaaaccgtctccgtacacaaaaaaggacaccttcagg

SEQ ID NO: 29919 - DNA, 75 bp, synthetic construct
  source 1..75: mol_type = other DNA
cggcgctggggaatgatccgaactttgccacgacaatgcttaatgcgctggcaggtaaacaaccgctggacaata

SEQ ID NO: 29920 - DNA, 75 bp, synthetic construct
  source 1..75: mol_type = other DNA
ctggaaacagcaatgcgccagggagaaattctctcattacgctgggaacacctcgatttgcagcacggcgtggcg

SEQ ID NO: 29921 - DNA, 75 bp, synthetic construct
  source 1..75: mol_type = other DNA
tggtcagcacatacagtgagctgaaccggcagtatatggaactgctgagtgaatataagcatctgcggcggtatt

SEQ ID NO: 29922 - DNA, 75 bp, synthetic construct
  source 1..75: mol_type = other DNA
acggcggaatcctacgatgataactatctggatgatgaggatgctgactgggtatccaccgggcaggggcagaaa

SEQ ID NO: 29923 - DNA, 75 bp, synthetic construct
  source 1..75: mol_type = other DNA
atgaagagtatagcaacactggttgtgtgtgcaatctccgggattgcctgtgtaaatttatctgcacatgcagca

SEQ ID NO: 29924 - DNA, 75 bp, synthetic construct
  source 1..75: mol_type = other DNA
cgttgcttctgacatcggtcgctgtactggctgatgtgcagattaacatcagaggaaatatctatattcctccat

SEQ ID NO: 29925 - DNA, 75 bp, synthetic construct
  source 1..75: mol_type = other DNA
cttgctcgaggccgcgattaaattccaacatggatgctgatttatatgggtataaatgggctcgcgataatgtcg

SEQ ID NO: 29926 - DNA, 75 bp, synthetic construct
  source 1..75: mol_type = other DNA
atggctaatgctacaatgccgaatagctacaatacaatgacccttgatttacctcgccgcttcccctggccgacg

SEQ ID NO: 29927 - DNA, 75 bp, synthetic construct
  source 1..75: mol_type = other DNA
ccagaatagtgtggtcattcgccttacatgttgcaacaaccacgattaacaaaaatctggccatagctcatattc

SEQ ID NO: 29928 - DNA, 75 bp, synthetic construct
  source 1..75: mol_type = other DNA
caggaaggcaaaacacctgcgcagactggcgacctgctgggctattcaccccgccacgtccagcgaatgctgaaa

SEQ ID NO: 29929 - DNA, 75 bp, synthetic construct
  source 1..75: mol_type = other DNA
acgctggagtgaccgggtggcagagcatgacctggaaaccctgttctggcagtggggcgagcgttttccgtcact

SEQ ID NO: 29930 - DNA, 75 bp, synthetic construct
  source 1..75: mol_type = other DNA
accgttacggtgtcgccgcaggtggtcgccgactggctgcactcaacatgctggcagagcgtggcattattccgg

SEQ ID NO: 29931 - DNA, 75 bp, synthetic construct
  source 1..75: mol_type = other DNA
ctgacaaaattaacgacagaactcgccagctattgcgctgatgaatttaagaaactgaacgacaaaaggaactgg

SEQ ID NO: 29932 - DNA, 75 bp, synthetic construct
  source 1..75: mol_type = other DNA
cgctggcggaatatccgtatgcgggggcgtttttccgctgtctgaacggaagccgcaggatatcgctgtctgacc

SEQ ID NO: 29933 - DNA, 75 bp, synthetic construct
  source 1..75: mol_type = other DNA
tgacaaacagacgggggagatgcgggagcagacagaatggcaccgcgtggtgctgttcggcaagctcgcggaagt

SEQ ID NO: 29934 - DNA, 75 bp, synthetic construct
  source 1..75: mol_type = other DNA
aatgttttaccgcagtttaaacacgaaccgaccaacttgtcgcatgttcaaattgcggttgaggcaatgctgttg

SEQ ID NO: 29935 - DNA, 75 bp, synthetic construct
  source 1..75: mol_type = other DNA
catggcaccaacgagaaggcaaaacgaacttttacaacactggggtgagcaaggttataaagtcatctttcatgc

SEQ ID NO: 29936 - DNA, 75 bp, synthetic construct
  source 1..75: mol_type = other DNA
cagaaatcgaagaattacagcgcaatacagcaataaaaatgcgtcgtctgaactaccagactgtatccgcaactc

SEQ ID NO: 29937 - DNA, 75 bp, synthetic construct
  source 1..75: mol_type = other DNA
cgaagtgtgaaccagaaaccacccgcaaagcaagccgtaaatctgcaaaaacgcaggaaactgtcctgtctgccc

SEQ ID NO: 29938 - DNA, 75 bp, synthetic construct
  source 1..75: mol_type = other DNA
tcggttatcgatgtgtatggcttctgatcggatatgatcgactggtcatgaaggtatttcaggtatttcattacg

SEQ ID NO: 29939 - DNA, 75 bp, synthetic construct
  source 1..75: mol_type = other DNA
ccccgctgggtgatgagcgcggggatatccgtaatgcgcagatcgtgaaagcggttttcggggcacaggggatga

SEQ ID NO: 29940 - DNA, 75 bp, synthetic construct
  source 1..75: mol_type = other DNA
ggcgttctgataggtgaactggcccgcggcaatttaggtgcgctgaggggatccggaataacgctggctaaccgt

SEQ ID NO: 29941 - DNA, 75 bp, synthetic construct
  source 1..75: mol_type = other DNA
cgcatccgtccatgcgcagacggtggagaagaacgcacaggctcatgaacgcatggcccgcgaggtggagaaaac

SEQ ID NO: 29942 - DNA, 75 bp, synthetic construct
  source 1..75: mol_type = other DNA
cagcagaacaggtgttctcgtcagccttcagcaacatgggaaatggcctggcaacttttgtcactaccggcaaac

SEQ ID NO: 29943 - DNA, 75 bp, synthetic construct
  source 1..75: mol_type = other DNA
acccgccaacggtgaacacctactggcgacgtcgtggcagcacatattttgtatcaaaagccggtgagcgttatc

SEQ ID NO: 29944 - DNA, 75 bp, synthetic construct
  source 1..75: mol_type = other DNA
aacgtcctgtggaaaaaatacggcaatggcgacaacggtattcccggccgatagtgaatgacctgtttgcctggc

SEQ ID NO: 29945 - DNA, 75 bp, synthetic construct
  source 1..75: mol_type = other DNA
atgacagagcagaagcgaccggtactgacactgaagcggaaaacagagggaacaacacctgtccgcagccggaaa

SEQ ID NO: 29946 - DNA, 75 bp, synthetic construct
  source 1..75: mol_type = other DNA
aaccacgtcgaagcggcagaactgctgcgtgtaactgctgaagcaatccagaacgaagcgcaggagatccactaa

SEQ ID NO: 29947 - DNA, 75 bp, synthetic construct
  source 1..75: mol_type = other DNA
agaaaaaaaattgccacaggcctgtctgacatcagatatggtcagactgatggggttaacagcagaatctctgga

SEQ ID NO: 29948 - DNA, 75 bp, synthetic construct
  source 1..75: mol_type = other DNA
agccgtgcggggaagtgactccacaggaacagaaagaggcagagacccggctgatgatgctgaatgaccgacgaa

SEQ ID NO: 29949 - DNA, 75 bp, synthetic construct
  source 1..75: mol_type = other DNA
gcgcgagcggcctttttcccctcaattaccctgaccagtggtctttccgcaagcagtacggagctgtccagcctg

SEQ ID NO: 29950 - DNA, 75 bp, synthetic construct
  source 1..75: mol_type = other DNA
agcagtcatgaccatatcagcgcctgtttcccgctggatacgtatccgcgcccggcagaaaaaagccagtatgaa

SEQ ID NO: 29951 - DNA, 75 bp, synthetic construct
  source 1..75: mol_type = other DNA
tgaataaggcactggtatttggtactaaattctggtgtgtgcgcgaaggcaaaacaatgtcgctgcagatgctcc

SEQ ID NO: 29952 - DNA, 75 bp, synthetic construct
  source 1..75: mol_type = other DNA
ccggatgacaacaaactgcgcctgtatgccgcgtcacgtcttgacccggagacgtataaaaaagtgcatgatgcc

SEQ ID NO: 29953 - DNA, 75 bp, synthetic construct
  source 1..75: mol_type = other DNA
cgagagcgccaaggtattgcgccctctgcaacacccattacccctgaacagcaacgtattcgcgagctggaaaag

SEQ ID NO: 29954 - DNA, 75 bp, synthetic construct
  source 1..75: mol_type = other DNA
aatccgcacaggcacttgatgaagtggaaagactggccgcgatgatcccgcccggtcagcccattcttgtggggc

SEQ ID NO: 29955 - DNA, 75 bp, synthetic construct
  source 1..75: mol_type = other DNA
ggtttttccctgctgctattccgtacaccttcacgctgtcatcaaaacggtcgctggtactgaaaatgctgcaaa

SEQ ID NO: 29956 - DNA, 75 bp, synthetic construct
  source 1..75: mol_type = other DNA
tgcagatagtattaagagtagcattacaggtttgattgataaagctaaaaaaaggatgagaactgttaaatatct

SEQ ID NO: 29957 - DNA, 75 bp, synthetic construct
  source 1..75: mol_type = other DNA
acgaaaacagagatcttcgctgttaaaaagcagattaaagagcttcgctcatgtcttacaggttctgatccgtcc

SEQ ID NO: 29958 - DNA, 75 bp, synthetic construct
  source 1..75: mol_type = other DNA
aaatcactttacagcaagcagtattaattcctgtgatttaaagcatcacacatccgatgggaaagttgaatccac

SEQ ID NO: 29959 - DNA, 75 bp, synthetic construct
  source 1..75: mol_type = other DNA
cgttgagctggaaggcaaagacagcaaaatagccaatcttaccgccgaacgcgatgctcttcgtgaaggtgagat

SEQ ID NO: 29960 - DNA, 75 bp, synthetic construct
  source 1..75: mol_type = other DNA
gaaacggctgaggcattccgtatccgggtgcgtgaggcatttcgccgtcgtgttgcggagactgaacagcatggc

SEQ ID NO: 29961 - DNA, 75 bp, synthetic construct
  source 1..75: mol_type = other DNA
ttggcctttccacaatgacaagatgggtcaaacaactgcgtgatgagcgtcagggcaaaacaccaaaagcctctc

SEQ ID NO: 29962 - DNA, 75 bp, synthetic construct
  source 1..75: mol_type = other DNA
actgcattcccgtatcgcaaatatccgcagggactaccttcacaaagtcacaacgaccgtcagcaaaaaccacgc

SEQ ID NO: 29963 - DNA, 75 bp, synthetic construct
  source 1..75: mol_type = other DNA
cacccttacacttttaccgcgcaaaaggcagtgatagcgatccccatcacgccacaggtgacgggaattgttact

SEQ ID NO: 29964 - DNA, 75 bp, synthetic construct
  source 1..75: mol_type = other DNA
tggatccatgctcggcattgcaggttatcaggtggtggaaatcgccattcagcgccgctttaagtcacaacaggg

SEQ ID NO: 29965 - DNA, 75 bp, synthetic construct
  source 1..75: mol_type = other DNA
aacgtcgtgcctgcaggctggcaggtttgtccctgtcgacttgccgttattcggctcagcgtccgggtgctgacg

SEQ ID NO: 29966 - DNA, 75 bp, synthetic construct
  source 1..75: mol_type = other DNA
agttttcccgtgatttttctctggtgcaggcggtaccgcgtaacgtgcccaccagcaacgtaaaggcactggcaa

SEQ ID NO: 29967 - DNA, 75 bp, synthetic construct
  source 1..75: mol_type = other DNA
ctggatagtgaggctttattatttgtaatgagaacacgttcaaaacaaaaggcggcattttcaaagcaaagtgtt

SEQ ID NO: 29968 - DNA, 75 bp, synthetic construct
  source 1..75: mol_type = other DNA
aaactgcggcaaaaaacagccaggttgcagcagcccaaagcgagagcgcggcagccggttctgcgacttcagcag

SEQ ID NO: 29969 - DNA, 75 bp, synthetic construct
  source 1..75: mol_type = other DNA
acagttggcggatgaaattgaaaacatctacagcgatctggagcagttgagccgggtaattatggaagggcatca

SEQ ID NO: 29970 - DNA, 75 bp, synthetic construct
  source 1..75: mol_type = other DNA
aattcagggatatattgcagatatgttccactcactacagctttcattcctggtttctatgctctgctttgtcta

SEQ ID NO: 29971 - DNA, 75 bp, synthetic construct
  source 1..75: mol_type = other DNA
gcacgatacaggtgaaaccaccttcaaaaggttgatagaagatgggacacagcgttatctcaaagcgttaaaccc

SEQ ID NO: 29972 - DNA, 75 bp, synthetic construct
  source 1..75: mol_type = other DNA
tgggggggcagtaaaggactcgaccactttcaggacgtctgcatcgtgatgggggccaaccactggatgcgcctc

SEQ ID NO: 29973 - DNA, 75 bp, synthetic construct
  source 1..75: mol_type = other DNA
cggggttgcttatcgacgacgagcagtttgatgaaatcaatattgtgcgcggtcaggtcgttcctggtggtcggt

SEQ ID NO: 29974 - DNA, 75 bp, synthetic construct
  source 1..75: mol_type = other DNA
ttattgaccaggctgagcgtgagcaaatcgaagagaacagctaccaagtaatggcgaagtggcaggagcatttaa

SEQ ID NO: 29975 - DNA, 75 bp, synthetic construct
  source 1..75: mol_type = other DNA
cgtccggttcggaggggacggagggcgcgatatttcaccttctgcggatgtggtggatgtcagcgaggatgatgt

SEQ ID NO: 29976 - DNA, 75 bp, synthetic construct
  source 1..75: mol_type = other DNA
gccgtttgcccttatggtcaagtcttacggaactgtcagcgtaaacggaaaagtaaacgatgcagacctggatta

SEQ ID NO: 29977 - DNA, 75 bp, synthetic construct
  source 1..75: mol_type = other DNA
tgtttgtaaactggctctataaccattcctccgtgctgcatgaacgagcagaaatcattaaatgcgccgaaatgc

SEQ ID NO: 29978 - DNA, 75 bp, synthetic construct
  source 1..75: mol_type = other DNA
catgctgatgaattttcaccttactggtatgaacttggtcttctgcattttcttaatggggaactggtaaaagct

SEQ ID NO: 29979 - DNA, 75 bp, synthetic construct
  source 1..75: mol_type = other DNA
agctcaccaccgccgcacgctactgccagctcattatgaaggagcacaaagaagggaaagatttcaaagaaattg

SEQ ID NO: 29980 - DNA, 75 bp, synthetic construct
  source 1..75: mol_type = other DNA
attacagcggtagctggtatctgatcgcgttacagaagggaaaactgcaggtctttcctctggcagatatcaaat

SEQ ID NO: 29981 - DNA, 75 bp, synthetic construct
  source 1..75: mol_type = other DNA
gtgttacagcgtctggcacgagatggctggttgaccattcaacatggcaagccgacgaaggtgaataatttctgg

SEQ ID NO: 29982 - DNA, 75 bp, synthetic construct
  source 1..75: mol_type = other DNA
ttctctccaatatgcatatgcacccgattcttctggcctggttggtggcacttattctgcatgctgcagtgggct

SEQ ID NO: 29983 - DNA, 75 bp, synthetic construct
  source 1..75: mol_type = other DNA
tggcgtacccggactggtgatgctgggggctgcagcatggtacacgctgtaccagaatcaggagcaggccaggga

SEQ ID NO: 29984 - DNA, 75 bp, synthetic construct
  source 1..75: mol_type = other DNA
gccagttgacggaaatccgcgcttcggctgtcggaatgaccggtgcgtttgccggtgcctttgccaccggacacc

SEQ ID NO: 29985 - DNA, 75 bp, synthetic construct
  source 1..75: mol_type = other DNA
ctcaggcgtcttgcccgacaggagcctgactttattgatgtccacgctcacctggcatacgtatttctggaacaa

SEQ ID NO: 29986 - DNA, 75 bp, synthetic construct
  source 1..75: mol_type = other DNA
gggccgggggattgcatctgaatggcaaatgaaacgggagatgctttcaccagcctatacaactcgctggtctga

SEQ ID NO: 29987 - DNA, 75 bp, synthetic construct
  source 1..75: mol_type = other DNA
gcccacgaagctgggggagaaaaacaccgtatttaatgcggtggagatcaaccactggctgaacgagcgccgcaa

SEQ ID NO: 29988 - DNA, 75 bp, synthetic construct
  source 1..75: mol_type = other DNA
agaatatttttattatctgtttctacagagtaatttacgatatcttgatagcggttctgctcaaagccaaataac

SEQ ID NO: 29989 - DNA, 75 bp, synthetic construct
  source 1..75: mol_type = other DNA
gtcagacgacagaataacagtactggaagaagaaaacgcagaattaaggcaaagattatctgcaattgaggcgac

SEQ ID NO: 29990 - DNA, 75 bp, synthetic construct
  source 1..75: mol_type = other DNA
caaatatgcaagccaccagcgcaactggttaataaaaaatgggcttccgttctataccaatcgtagtggaaaacc

SEQ ID NO: 29991 - DNA, 75 bp, synthetic construct
  source 1..75: mol_type = other DNA
ttatgcacatgctttatcaccggcagcccaggaaggtcatccaggcactggccgggcataaggatccgcgctcga

SEQ ID NO: 29992 - DNA, 75 bp, synthetic construct
  source 1..75: mol_type = other DNA
atactttcttgtttgaaatgatgaagagtaaatcaaaagacgttacacttgctgcgatctatgcattaggtgaag

SEQ ID NO: 29993 - DNA, 75 bp, synthetic construct
  source 1..75: mol_type = other DNA
aacacagcttaaggaaaatgaagcttacgtccgccttttaatcgggatggatgcggtttcccgacgggttggtgt

SEQ ID NO: 29994 - DNA, 75 bp, synthetic construct
  source 1..75: mol_type = other DNA
taaactcgccacgctgtcagatggcacagtctttgagcctgtaaacagttttcagaaaaaccagaagacgctggc

SEQ ID NO: 29995 - DNA, 75 bp, synthetic construct
  source 1..75: mol_type = other DNA
atgagtacccgaaatatccacgttaacaccgcgtcgtacacgcttcttgttgccgggagggaaaaaaacaccggg

SEQ ID NO: 29996 - DNA, 75 bp, synthetic construct
  source 1..75: mol_type = other DNA
tgaagactctccgcaacgtcagcagcagattcagcaggctgagcagcacctgcgggctcaagtctatatgctggc

SEQ ID NO: 29997 - DNA, 75 bp, synthetic construct
  source 1..75: mol_type = other DNA
agcttattgctacaaagtcgggggatattaccgtttataactatgatagtgagacgcaggaatatatttcagctt

SEQ ID NO: 29998 - DNA, 75 bp, synthetic construct
  source 1..75: mol_type = other DNA
ctggcacaggaccgtccgtcgctggccattgtgtccgggcagggcggtgcagccgggcagcgtgagcgggtggct

SEQ ID NO: 29999 - DNA, 75 bp, synthetic construct
  source 1..75: mol_type = other DNA
tgctgaccggtaatctggtgatggcactgtttaaccatgacaccagtcgcgatcaggacccacagttacacacgc

SEQ ID NO: 30000 - DNA, 75 bp, synthetic construct
  source 1..75: mol_type = other DNA
cgggaggtcatgaatgcagagcggctgttcagtacggcgcgggagctgcgggacgtggcggcagggcgtgccgtt

SEQ ID NO: 30001 - DNA, 75 bp, synthetic construct
  source 1..75: mol_type = other DNA
aacaatcggcatactgccgccggaagagggcgtgattgagcgggcacgcgctggtattgatgaggccatcagccg

SEQ ID NO: 30002 - DNA, 75 bp, synthetic construct
  source 1..75: mol_type = other DNA
aattgtcaggaaaatggcagagaacaaacctgacctgccggacggcaaaacagagctggctgtcagggatattgc

SEQ ID NO: 30003 - DNA, 75 bp, synthetic construct
  source 1..75: mol_type = other DNA
tgcaatggcggatgagccgtttgattatatcggcctgccgttcaacgacacggcctccgttaacacgctggtgac

SEQ ID NO: 30004 - DNA, 75 bp, synthetic construct
  source 1..75: mol_type = other DNA
gatctttatcagagcgattgttcagagagcagggggttgataccaaaattttgctaggccattcgaatcaaaaaa

SEQ ID NO: 30005 - DNA, 75 bp, synthetic construct
  source 1..75: mol_type = other DNA
gtttgatgaaatcaatattgtgcgcggtcaggtcgttcccggtgggcggttgggcgtgaaaatttacgaaataat

SEQ ID NO: 30006 - DNA, 75 bp, synthetic construct
  source 1..75: mol_type = other DNA
catagcagaggctataaaagccggaggttctcttgatgattttcttatatctcaggaagtatcatctggtcctga

SEQ ID NO: 30007 - DNA, 75 bp, synthetic construct
  source 1..75: mol_type = other DNA
agattctcgtgtgaaagaacgtatcgcgcgggcgggtcaatggtttggcgaaacgttaattgccgatgatgcctt

SEQ ID NO: 30008 - DNA, 75 bp, synthetic construct
  source 1..75: mol_type = other DNA
cgctactggtagtggttgtatgggggctaaattttgtggtcatcaaagtggggcttcataacatgccaccgctga

SEQ ID NO: 30009 - DNA, 75 bp, synthetic construct
  source 1..75: mol_type = other DNA
agattactggtggcgaagtgtcgctgtcgttgttgaccacgcaggcatatacaggacgtccttggcctttgattg

SEQ ID NO: 30010 - DNA, 75 bp, synthetic construct
  source 1..75: mol_type = other DNA
agcagatcacccgggatgtggtactggatcgccggtcaccggactgcgaagccctgtttaaggaccttatctggg

SEQ ID NO: 30011 - DNA, 75 bp, synthetic construct
  source 1..75: mol_type = other DNA
ttctgattgtccctactccggcagagctgttcgactacacctccgcactgcagtttttcgatatgcttcgtgacc

SEQ ID NO: 30012 - DNA, 75 bp, synthetic construct
  source 1..75: mol_type = other DNA
ctggttatgcaatttgccgttctgcagattttaactcatgggaatatgtgccagaccatcgcggtgaaatcgtct

SEQ ID NO: 30013 - DNA, 75 bp, synthetic construct
  source 1..75: mol_type = other DNA
gaaaatacaaccactatcgccccattaacgccatacgataaatgggatggtgagaaatgggtgaccgatactgag

SEQ ID NO: 30014 - DNA, 75 bp, synthetic construct
  source 1..75: mol_type = other DNA
attcgggctggataaagccgatcccgccgctaatgctggtagcctgaaaaccgatccatggacactgaaaatcag

SEQ ID NO: 30015 - DNA, 75 bp, synthetic construct
  source 1..75: mol_type = other DNA
atgtttctgataattctcacgccactggtgggcgtgctgggggcgcttttgctggcgtatggcgcctggctgatt

SEQ ID NO: 30016 - DNA, 75 bp, synthetic construct
  source 1..75: mol_type = other DNA
atgagggagtccaaaaaacaatgaccaacatcaccaagagaagtttagtagcagctggcgttctggctgcgctaa

SEQ ID NO: 30017 - DNA, 75 bp, synthetic construct
  source 1..75: mol_type = other DNA
tagtatcattactcagtttaaagcgagtaaagagcataccattgctaatggtcttcgtattcagatgaccttcca

SEQ ID NO: 30018 - DNA, 75 bp, synthetic construct
  source 1..75: mol_type = other DNA
taccatatcatccggggaagacaatatattcattataatcaaggcattagttagccttaggtattattttgaatc

SEQ ID NO: 30019 - DNA, 75 bp, synthetic construct
  source 1..75: mol_type = other DNA
ctgcgctccgcactctatcccattattggcgatcgcatatacggacctgtaggacatgcggttgatattttcgct

SEQ ID NO: 30020 - DNA, 75 bp, synthetic construct
  source 1..75: mol_type = other DNA
tgctgcatgacatgcaccatcgcttaacgcctattgaagcggcgcgctttggtaaaagcattgaagattatcgca

SEQ ID NO: 30021 - DNA, 75 bp, synthetic construct
  source 1..75: mol_type = other DNA
ttgcggcagcgaaggaagccatgcgcctgacgttcttccactggggtctgcacgcatgggcaatttatgccatcg

SEQ ID NO: 30022 - DNA, 75 bp, synthetic construct
  source 1..75: mol_type = other DNA
ataccaaagtaaaaccaacagcagcgcaaatagcacaggaagaagtggcctggaaagggtggcaggattatcaaa

SEQ ID NO: 30023 - DNA, 75 bp, synthetic construct
  source 1..75: mol_type = other DNA
agcgaattatgttccgggagtatgaccgcctgattatcacaaagggatatccgaagcgcgacgattccagccgca

SEQ ID NO: 30024 - DNA, 75 bp, synthetic construct
  source 1..75: mol_type = other DNA
ttaggcagaaatacactcaagctgaaataggtcgttatatgggggtcgctcaacagactgtttggcaatggttta

SEQ ID NO: 30025 - DNA, 75 bp, synthetic construct
  source 1..75: mol_type = other DNA
attaccgtctatgaaggttccagaccaggtacgctgaatgattttctcggtgccatgacggaagatgatgtcatg

SEQ ID NO: 30026 - DNA, 75 bp, synthetic construct
  source 1..75: mol_type = other DNA
gttcggcggcgtcatcggcatcatctgcgtctgcttcaaaagatgaggcgagcagacaggcatcagcagcgaaag

SEQ ID NO: 30027 - DNA, 75 bp, synthetic construct
  source 1..75: mol_type = other DNA
aagtcggttaacgtcagtttcaaaacgttcacccggggtgaaatcgcgcatctggtgattgattccaccgggctg

SEQ ID NO: 30028 - DNA, 75 bp, synthetic construct
  source 1..75: mol_type = other DNA
ccggcgaatgcgggtattctgctggttccgtgctgtcgtggtggttcagcgttcaccaccggagctgatggcaca

SEQ ID NO: 30029 - DNA, 75 bp, synthetic construct
  source 1..75: mol_type = other DNA
aaatcatctgcgctgacctgtcgctgaacaacgttacggactcagaggccttccccgggttaatccggcaaaccc

SEQ ID NO: 30030 - DNA, 75 bp, synthetic construct
  source 1..75: mol_type = other DNA
gagagcgactcgctgaccacgattcgcgatctgaagtcctttctttgcaccatcgcaaaacgggtgataatcgac

SEQ ID NO: 30031 - DNA, 75 bp, synthetic construct
  source 1..75: mol_type = other DNA
caggaaatccgaaaaccattgaacaatatcaactaacaaaaaaattcgacgttatctggttattttcagaggatg

SEQ ID NO: 30032 - DNA, 75 bp, synthetic construct
  source 1..75: mol_type = other DNA
gaagcatgggaacgctacagcgttcttgtaagccgcgtggatacggcaaagccagaatggccacaaaaacctgag

SEQ ID NO: 30033 - DNA, 75 bp, synthetic construct
  source 1..75: mol_type = other DNA
gttgttgaggttcctgatattacctccaaccgacgtgctgacgactcaggtaaatggatgtttaaggatggtgct

SEQ ID NO: 30034 - DNA, 75 bp, synthetic construct
  source 1..75: mol_type = other DNA
gtgatcggcttccgcaatgttgatatggcggaactgcgtatccacaccccggctgagcgcgtagctatagctgaa

SEQ ID NO: 30035 - DNA, 75 bp, synthetic construct
  source 1..75: mol_type = other DNA
atcgggctgagttcagcgtcaaagccatgtgccgtgtacttcgggttgcccgcagccgctggtatgccgagctcc

SEQ ID NO: 30036 - DNA, 75 bp, synthetic construct
  source 1..75: mol_type = other DNA
gagtcatgggaacgctacagtgttctggtcagccgtgtggatacggcaaatcctgaatggccacaaaagcctgaa

SEQ ID NO: 30037 - DNA, 75 bp, synthetic construct
  source 1..75: mol_type = other DNA
gcgctggcactccgccagatgtcgatggttcatgatgaactgccaaaatacctgctggcccctgaagtgagcgcc

SEQ ID NO: 30038 - DNA, 75 bp, synthetic construct
  source 1..75: mol_type = other DNA
aacgcggtaaaaacccggtgtgcatcgtttttgattattcccgcacactcgcgcagaaggagttccccgtcgggc

SEQ ID NO: 30039 - DNA, 75 bp, synthetic construct
  source 1..75: mol_type = other DNA
ggaaaactacgtatgtgggggcgctggtcgtatattggcggcggcaggtcagggaatatgtttaaccagttgctg

SEQ ID NO: 30040 - DNA, 75 bp, synthetic construct
  source 1..75: mol_type = other DNA
gtcgttgagattccagatataacagccaatcgtcgtgccgatgattcagggaagtggatgtttaaggacggaact

SEQ ID NO: 30041 - DNA, 75 bp, synthetic construct
  source 1..75: mol_type = other DNA
acccccgcgtggcgcaggcgtttgttgattacatggcgacgcagggtgttatcctcacgattcaacaacataacc

SEQ ID NO: 30042 - DNA, 75 bp, synthetic construct
  source 1..75: mol_type = other DNA
ccccgcctgcaccgacgccagtgattgtccacaacgcctgcccgaaagtgagtctttgcccgatgccgggcagtg

SEQ ID NO: 30043 - DNA, 75 bp, synthetic construct
  source 1..75: mol_type = other DNA
aacccgcgattctgtaaaccagaaccagcaagaatcggaacagaacgaccagaaagcggaacaaaacagcccaaa

SEQ ID NO: 30044 - DNA, 75 bp, synthetic construct
  source 1..75: mol_type = other DNA
gcaaaaaaaggaaccgtagttaccactgacaaatgggacgtaatagttgccgtaattaagcgtgctcacgaatac

SEQ ID NO: 30045 - DNA, 75 bp, synthetic construct
  source 1..75: mol_type = other DNA
ttacgtcggctccgtggtgttgctggttatgttattgccgtggagcgcgtatcaggcggggcaaagtccgttcgt

SEQ ID NO: 30046 - DNA, 75 bp, synthetic construct
  source 1..75: mol_type = other DNA
cacaggacaatgcaggagtgtgtgactgcagcaaccgaacagaaaattcccggtaactgttacccggtcgataaa

SEQ ID NO: 30047 - DNA, 75 bp, synthetic construct
  source 1..75: mol_type = other DNA
ccagaacaacgcaataacgtgatccgtatggagatggacacagaggacagttaccttcagagcctgcttactgct

SEQ ID NO: 30048 - DNA, 75 bp, synthetic construct
  source 1..75: mol_type = other DNA
cgcgaagtggtgaaacactacagacgcggggaatctgtaatcaaggaagaatgggtgaaggaactatgtcagcat

SEQ ID NO: 30049 - DNA, 75 bp, synthetic construct
  source 1..75: mol_type = other DNA
gctgattattccaggtctgcggcaagtaaggctcgctgtgagcattgtgctggtactggatttcataatgtattg

SEQ ID NO: 30050 - DNA, 75 bp, synthetic construct
  source 1..75: mol_type = other DNA
tcggtatggctgtgatggggcgcaacttggctctaaacatcgagagccgtggttataccgtatccgtctataatc

SEQ ID NO: 30051 - DNA, 75 bp, synthetic construct
  source 1..75: mol_type = other DNA
gattctgtgaaccagaaccagcaagaaacggaacagaacggccagaaagcggaacaaaacagcccaaatgcgtta

SEQ ID NO: 30052 - DNA, 75 bp, synthetic construct
  source 1..75: mol_type = other DNA
ctggtcccttattacacggttaaagagttcgtcgagtctcttgaaactccacgccgtatcctgttaatggtcaaa

SEQ ID NO: 30053 - DNA, 75 bp, synthetic construct
  source 1..75: mol_type = other DNA
atgaaaaaaacattattaatagctgcatcgctttcatttttttcagcaagtgcgctggcgacgcctgattgtgta

SEQ ID NO: 30054 - DNA, 75 bp, synthetic construct
  source 1..75: mol_type = other DNA
cattatcacgtgatattactgctcaacaaagatacctggtgctcgatcggggatttcagcgaaccgtcttcgctg

SEQ ID NO: 30055 - DNA, 75 bp, synthetic construct
  source 1..75: mol_type = other DNA
caggaagaacgcctgtctgaactggagtctgctctgcagaagcagcaaaccgcctttaatgaactggtgaataag

SEQ ID NO: 30056 - DNA, 75 bp, synthetic construct
  source 1..75: mol_type = other DNA
tctcgacagtgccctggcgcagcaccgtgccgtctcgttaatccgggtggatttacgtttccctgagtatatgcc

SEQ ID NO: 30057 - DNA, 75 bp, synthetic construct
  source 1..75: mol_type = other DNA
agcggtgaatgctggcaacgtcagaagacgctgctgacagaaagggaagtcagttttatgaaaggactgttcaga

SEQ ID NO: 30058 - DNA, 75 bp, synthetic construct
  source 1..75: mol_type = other DNA
gccctgaatatgtggtccggtattgtcttcagcattacatttttattttcggccatcgcctcaccgttttggggt

SEQ ID NO: 30059 - DNA, 75 bp, synthetic construct
  source 1..75: mol_type = other DNA
cgaactggaagaaatccaggaggacaagccgtccctgtttgcccgcgtcacggcgctgttcaccaaaaaagagca

SEQ ID NO: 30060 - DNA, 75 bp, synthetic construct
  source 1..75: mol_type = other DNA
tcaatatagagccagttaacgttattcgtggcggaaataaccaggggacgtatgtctgcaaagaactggtgtatg

SEQ ID NO: 30061 - DNA, 75 bp, synthetic construct
  source 1..75: mol_type = other DNA
ctggcgtatttcgccagccgtgaaattaacaaagggccggtgaaggcaagctcacgccgtcgtcgtcaggcggcc

SEQ ID NO: 30062 - DNA, 75 bp, synthetic construct
  source 1..75: mol_type = other DNA
caaaaagtgctgctgctgcagagtcatcaaaaagcgcggcagctaccagcgccagtgccgcgaaaacgtcagaaa

SEQ ID NO: 30063 - DNA, 75 bp, synthetic construct
  source 1..75: mol_type = other DNA
cggcgctgttcaccaaaaaagagcagtcagacgatgcccggttctctgatgtgcataaagccgtggagctggtcg

SEQ ID NO: 30064 - DNA, 75 bp, synthetic construct
  source 1..75: mol_type = other DNA
cagatccacgaccagcaataccgcacgacgaagtaatggcaaaaatggaaaaaatcatcaatcaaattgccatgg

SEQ ID NO: 30065 - DNA, 75 bp, synthetic construct
  source 1..75: mol_type = other DNA
caaagtgaactcaatcgcgttgggcagtaacagttcgtctgcaggagagaatgccatcgcgctaggagagggcag

SEQ ID NO: 30066 - DNA, 75 bp, synthetic construct
  source 1..75: mol_type = other DNA
atgaagaatgaaatactggaatttctgaacaggcataatggagggaaaacggcagaaattgcagaggcgctggcg

SEQ ID NO: 30067 - DNA, 75 bp, synthetic construct
  source 1..75: mol_type = other DNA
gatttcaggctgtaaagaagaaaataaaacgaatgtatccatcgaatttatgcattcttcggtggagcaggagcg

SEQ ID NO: 30068 - DNA, 75 bp, synthetic construct
  source 1..75: mol_type = other DNA
tcagcttgtcgtcgtgcaggaattgaagatttccgtttccatgacctcagacacacctgggcaagctggctgatt

SEQ ID NO: 30069 - DNA, 75 bp, synthetic construct
  source 1..75: mol_type = other DNA
ctttttacccgaactacccgtagcattgagctgaccgagcccgggcactaccttttttgcaaagcaactgacctg

SEQ ID NO: 30070 - DNA, 75 bp, synthetic construct
  source 1..75: mol_type = other DNA
gttgggtgccagtgagatccatccgtcattcctctatctgtccctggcgataatcgtttgtggctatggtctgtt

SEQ ID NO: 30071 - DNA, 75 bp, synthetic construct
  source 1..75: mol_type = other DNA
cggaagggcgggcagatctttacacggaaatgccagtgaaagttagtggctttaaacaaccgatagatgatgcgg

SEQ ID NO: 30072 - DNA, 75 bp, synthetic construct
  source 1..75: mol_type = other DNA
ttattccggtcgcaggactaggcatgcatatgctgccggccacaaaggcaattccaaaggagatgctgccgatcg

SEQ ID NO: 30073 - DNA, 75 bp, synthetic construct
  source 1..75: mol_type = other DNA
tcctttccgcaaccgtaacggcgcaatacgctcctaccagcgcattccggtcaccggcgggaaggatgcccgcat

SEQ ID NO: 30074 - DNA, 75 bp, synthetic construct
  source 1..75: mol_type = other DNA
atggctctttatggcctgtactggaaggtatcccggcaacagagatgttcaaagttattccactggcaccgggcc

SEQ ID NO: 30075 - DNA, 75 bp, synthetic construct
  source 1..75: mol_type = other DNA
taccgtcagcccggataacggttttacgaccagtcttgagcttgaagtgaggattggtgatcttgagatggaata

SEQ ID NO: 30076 - DNA, 75 bp, synthetic construct
  source 1..75: mol_type = other DNA
atgaaaaagataagagatttgtgtcttccggtaatgctgggggcagtgttaatgtctcagtattcacatgcagct

SEQ ID NO: 30077 - DNA, 75 bp, synthetic construct
  source 1..75: mol_type = other DNA
gcgatggagattatcagcaacgtgagcgaaaaccgccaggtgaccgtccctgctgaactgctggcgtccctgatt

SEQ ID NO: 30078 - DNA, 75 bp, synthetic construct
  source 1..75: mol_type = other DNA
ggctgcgtgcacagatgaagctgacaagccagtgctgggcgctgaaagagctggcaaaggatatctggaacaggc

SEQ ID NO: 30079 - DNA, 75 bp, synthetic construct
  source 1..75: mol_type = other DNA
tctaagtctactaaaggagtaattagaggattacattttcaattaccaccttattcacaggcaaaattagtacgc

SEQ ID NO: 30080 - DNA, 75 bp, synthetic construct
  source 1..75: mol_type = other DNA
gttcggcggcgtcatcggcatcatctgcgtctgcttcaaaagatgaggcgaccagacaggcgtcagcagcgaagg

SEQ ID NO: 30081 - DNA, 75 bp, synthetic construct
  source 1..75: mol_type = other DNA
cggccagcggcgtcacgctgtcggacggaaccgaaatcctgctctggccggggaagacggtttccctgccggagg

SEQ ID NO: 30082 - DNA, 75 bp, synthetic construct
  source 1..75: mol_type = other DNA
gtattacgtcctgtacgttacgccgcgtcagtggaatgactggtacacctcaacttccggcaaggactggaacca

SEQ ID NO: 30083 - DNA, 75 bp, synthetic construct
  source 1..75: mol_type = other DNA
aaagcgccgcctaaatatcagtttgaagaaaatggtgaaacgaaatactggtctggtcgtgggcgtgcgccaaaa

SEQ ID NO: 30084 - DNA, 75 bp, synthetic construct
  source 1..75: mol_type = other DNA
agaagaaaacggatatggataaccgtactgagatagcaatcagctggatcaacggtctgaaaaaaatccgtttcc

SEQ ID NO: 30085 - DNA, 75 bp, synthetic construct
  source 1..75: mol_type = other DNA
atgccgggttgtacatcacgtttattgcccgaaggccctttctcacgcaaccaggctcttgccgtcacaacggct

SEQ ID NO: 30086 - DNA, 75 bp, synthetic construct
  source 1..75: mol_type = other DNA
cccctcactttgaagggatcggagctataaaaatggtgttatccggcttcctcaaattgaggtttccaaaagaat

SEQ ID NO: 30087 - DNA, 75 bp, synthetic construct
  source 1..75: mol_type = other DNA
ctggtttgcccgcccgggggcggacctgtccatgctggaccgctggctgccccggccgcaggaagtctccatgaa

SEQ ID NO: 30088 - DNA, 75 bp, synthetic construct
  source 1..75: mol_type = other DNA
gtcttcgttctaccactgctcaattatttaaatcggctgatgcggttagtcttgctgatgcccttaaatctaaaa

SEQ ID NO: 30089 - DNA, 75 bp, synthetic construct
  source 1..75: mol_type = other DNA
caggacggcgagctggatgtgagcggcggtggtcacggtattgatatcaccggcgacagcgcaacggtggacaac

SEQ ID NO: 30090 - DNA, 75 bp, synthetic construct
  source 1..75: mol_type = other DNA
caactcaggctctctgtcgtgcaggaaggaaaaaccacctatgtcctgctttccgaaataaacaatatcacgctg

SEQ ID NO: 30091 - DNA, 75 bp, synthetic construct
  source 1..75: mol_type = other DNA
ccaagaagatggtgaacctgaaaacatcctgaaaatcgtcaaagaatggcggcgttcacaggggctacccttgtt

SEQ ID NO: 30092 - DNA, 75 bp, synthetic construct
  source 1..75: mol_type = other DNA
atgagtgaagacaaaattacacctgatgaagtcagggcacatcttcgccttgatgacttttccggagaaggcgaa

SEQ ID NO: 30093 - DNA, 75 bp, synthetic construct
  source 1..75: mol_type = other DNA
aatgatgtcgccagcctggcaaccctgacaaaagtcgggcgggatattcttgcgaaatcgaccgttgctgccgtt

SEQ ID NO: 30094 - DNA, 75 bp, synthetic construct
  source 1..75: mol_type = other DNA
ggaactacctatactggaggcatctattccaccgcaataggcagaggctcaagagtcgaggatggcgctgactat

SEQ ID NO: 30095 - DNA, 75 bp, synthetic construct
  source 1..75: mol_type = other DNA
agaaggccataactggattgcaattggtgaatatgccaaggcaacaacaaagaccatttcgggtatggccatggc

SEQ ID NO: 30096 - DNA, 75 bp, synthetic construct
  source 1..75: mol_type = other DNA
gccctcggccgttattcaaaagcattgggtaaattgtctattgctatgggggactcttccaaagcggaaggagca

SEQ ID NO: 30097 - DNA, 75 bp, synthetic construct
  source 1..75: mol_type = other DNA
tattacatcagtcatcaacgtcgagctcaatgtcagatacagatatcgagtctcttgtaaaagcatcgagcgttc

SEQ ID NO: 30098 - DNA, 75 bp, synthetic construct
  source 1..75: mol_type = other DNA
gcagtttcagattccagtaaagacgcggttaacggttcacaactgaaagccaccaatgatgatgttgagaccaat

SEQ ID NO: 30099 - DNA, 75 bp, synthetic construct
  source 1..75: mol_type = other DNA
ggcctgatggtgccaccattaatgctggcgctactgacgcaggaaaaagcattagatgtgtcgccggaacatttc

SEQ ID NO: 30100 - DNA, 75 bp, synthetic construct
  source 1..75: mol_type = other DNA
tggttccctgctgtcggcactgatagaccagccacaaaatccggcgttacgcctgcaggtcatgtcggcagtgta

SEQ ID NO: 30101 - DNA, 75 bp, synthetic construct
  source 1..75: mol_type = other DNA
acttccggcagacggaacgcaggtgtctttcccgtatgccggtgagtggctggcagaagacgaaatcagggctgt

SEQ ID NO: 30102 - DNA, 75 bp, synthetic construct
  source 1..75: mol_type = other DNA
ggttttatttcctcacatccacttttcagcgtcgtttatggccgcgcattgagcgcgtgaatcagcgccatgaaa

SEQ ID NO: 30103 - DNA, 75 bp, synthetic construct
  source 1..75: mol_type = other DNA
tgcagatagccacaatgccaacctgcttgcacttgaaaatacggtgtcagcggctgcgggactgggaatacagct

SEQ ID NO: 30104 - DNA, 75 bp, synthetic construct
  source 1..75: mol_type = other DNA
gcggtacgcagtgtcagttgccgggtggcagaagatacgcggcgtatccgggcggcgctgaccaccaccggtcag

SEQ ID NO: 30105 - DNA, 75 bp, synthetic construct
  source 1..75: mol_type = other DNA
atgagccggaaatcttaccccaacgtaaatgctgcaaatcagtatgcccgggatgtcgtgcgcggaaagattgtt

SEQ ID NO: 30106 - DNA, 75 bp, synthetic construct
  source 1..75: mol_type = other DNA
caggtatatatattgaccctgtaggtgccaatacaaaccccaatacttataacggtgcgacagcaagcttcggag

SEQ ID NO: 30107 - DNA, 75 bp, synthetic construct
  source 1..75: mol_type = other DNA
taagaacggcaaatcggcaatctctgccggtgttgccctgtattgttttgcctgtgataacgagttcggcgcgga

SEQ ID NO: 30108 - DNA, 75 bp, synthetic construct
  source 1..75: mol_type = other DNA
ttatggtgctggcaaaccgctacgactggcagctctttctggaggtgaccggtcccggcggcagcggcaaaagta

SEQ ID NO: 30109 - DNA, 75 bp, synthetic construct
  source 1..75: mol_type = other DNA
cctggcagacgctggttaatcatcattacgggctgcgtgacccgaacgcaccggagaacagacggacgcttgtca

SEQ ID NO: 30110 - DNA, 75 bp, synthetic construct
  source 1..75: mol_type = other DNA
tggggttggatttcaataaggtagcggagatgaaaaaatcgtttactgggtttgagaaacgaatacaaatcaaca

SEQ ID NO: 30111 - DNA, 75 bp, synthetic construct
  source 1..75: mol_type = other DNA
accattgcatgttctgcctgccacgacgaaatcgaccgccgcacacattttgtcgatgctgcatatgcaaaagaa

SEQ ID NO: 30112 - DNA, 75 bp, synthetic construct
  source 1..75: mol_type = other DNA
tctggcgctatgttcgctgcaccacgatgcttttgatatgggcgcattcgggctggatgaaaaccttaccatccg

SEQ ID NO: 30113 - DNA, 75 bp, synthetic construct
  source 1..75: mol_type = other DNA
gatggaaagcgatgaagcgttacgcctgcgtgtgcctgcagcatttgaaggactttcagttgcggggccaactgc

SEQ ID NO: 30114 - DNA, 75 bp, synthetic construct
  source 1..75: mol_type = other DNA
tgcctatcagtatcatggtcgcagtgccgacgggcgtgtcgcggatatctctgtcaccagtccgtctccggcctg

SEQ ID NO: 30115 - DNA, 75 bp, synthetic construct
  source 1..75: mol_type = other DNA
tgtcgatgctgcatatgcaaaagaatgcgcgctggaaggtatggcgagaacacaggttatctggctgaaagaggg

SEQ ID NO: 30116 - DNA, 75 bp, synthetic construct
  source 1..75: mol_type = other DNA
gaagaaaaccgcaaagctgacatctcggggcgctggggttttgacggggagaaaatcacggacctgctgaccgcg

SEQ ID NO: 30117 - DNA, 75 bp, synthetic construct
  source 1..75: mol_type = other DNA
gcaggacccggcaaccgatgcgggactgcttaaccagaacgacgtcaccacgcttatccgcaaagacggtttccg

SEQ ID NO: 30118 - DNA, 75 bp, synthetic construct
  source 1..75: mol_type = other DNA
agccagacggaccaacgaatctttccgcatggatgagacttaagaataaagaattacctccttcagtacataact

SEQ ID NO: 30119 - DNA, 75 bp, synthetic construct
  source 1..75: mol_type = other DNA
taccaaaccgccagacctgattgccaccattgcatgttctgcctgccacgacgaaatcgaccgccgcacacattt

SEQ ID NO: 30120 - DNA, 75 bp, synthetic construct
  source 1..75: mol_type = other DNA
gcgggtatgacaatgcatcatattttgtaagtgtttttagaggatattttggtgtgcctccgcaccaatatttat

SEQ ID NO: 30121 - DNA, 75 bp, synthetic construct
  source 1..75: mol_type = other DNA
ccgcaggccgacatagtgctgagtaagtcgcaggcgtcgaactgtaccgagtaccagataactatcgggggctcg

SEQ ID NO: 30122 - DNA, 75 bp, synthetic construct
  source 1..75: mol_type = other DNA
ggggatgtggagaaggcgagtcgagtttttgtgcgaaatgaattgaggccactacaaaagagcctattagagctg

SEQ ID NO: 30123 - DNA, 75 bp, synthetic construct
  source 1..75: mol_type = other DNA
cggcaccaatgtgaatgggcatacaaacgagttaggtactgctggtgataccggtacagcaattgttatttccag

SEQ ID NO: 30124 - DNA, 75 bp, synthetic construct
  source 1..75: mol_type = other DNA
tgtcagaagtggcggcgaaggatgagttcctgaatatcaagaacgtgagccgggacgacatgatggcggcgcatc

SEQ ID NO: 30125 - DNA, 75 bp, synthetic construct
  source 1..75: mol_type = other DNA
actcatgttaatcaacaactggagcaatggatagccgatgtggctgacaaacgggaacttcgccagttcaaagaa

SEQ ID NO: 30126 - DNA, 75 bp, synthetic construct
  source 1..75: mol_type = other DNA
aagaaaatgatgcagtggtatagtgattttattattaatttaaatggtgaaaatgatgagtgccagtttggaaga

SEQ ID NO: 30127 - DNA, 75 bp, synthetic construct
  source 1..75: mol_type = other DNA
atgatctcactcccatcaggtacccgcatctggctcgtggccggcgttaccgatatgcgtaaatccttcaacggt

SEQ ID NO: 30128 - DNA, 75 bp, synthetic construct
  source 1..75: mol_type = other DNA
cccggtgccgctggcagtgttcacttattacattgccggcattgccgtgatgctgtggatgtcccctgccatgac

SEQ ID NO: 30129 - DNA, 75 bp, synthetic construct
  source 1..75: mol_type = other DNA
ctgcgtattcagcaggcgtttgaaggtttaagcgtcgccgggtcggtgggtgcctatcagtatcatggtcgcagt

SEQ ID NO: 30130 - DNA, 75 bp, synthetic construct
  source 1..75: mol_type = other DNA
atgtcaaatatcatatacttatcaattaaaggaaaaacacaaggtttgatctctgagggctgtggttcgtatgca

SEQ ID NO: 30131 - DNA, 75 bp, synthetic construct
  source 1..75: mol_type = other DNA
tttgattccggtgcctatatcgacctgattggtaagtatgttcatcatgataatgagtacaccgcaacctttgcc

SEQ ID NO: 30132 - DNA, 75 bp, synthetic construct
  source 1..75: mol_type = other DNA
catggataagactaaaatcacccatgttaatgacggctttatctttctggggcacaggatcattcgcaaacgcag

SEQ ID NO: 30133 - DNA, 75 bp, synthetic construct
  source 1..75: mol_type = other DNA
ctgctcccgataacacttgatgccgaagatgttgtccctacaacctccccccggtcacaacctgtagctgctgcg

SEQ ID NO: 30134 - DNA, 75 bp, synthetic construct
  source 1..75: mol_type = other DNA
ccacctgggtgcagattgtctacgactggctggatgcgctgaaggatccgaacggcgtcaagacgtttattaaca

SEQ ID NO: 30135 - DNA, 75 bp, synthetic construct
  source 1..75: mol_type = other DNA
cgggccaccggggaatggtcggttcggccattgtccgccagcttgagcaacgagaaaacgtggatctgattctgc

SEQ ID NO: 30136 - DNA, 75 bp, synthetic construct
  source 1..75: mol_type = other DNA
gccaaccctgctgggggataagcgtattgaggggtcggtgtggccaaaatccattcgcggctcgacgcctaaaat

SEQ ID NO: 30137 - DNA, 75 bp, synthetic construct
  source 1..75: mol_type = other DNA
gaagagacgacccggccaacccttaaagaactggcagcgaagctgtccggaggagtgaatggttacagtcgctga

SEQ ID NO: 30138 - DNA, 75 bp, synthetic construct
  source 1..75: mol_type = other DNA
tccgggtgctgccggtaaaaggcgcatctgtctatggcaagccggtgatcaccatgccgaaaacccgcaatcagc

SEQ ID NO: 30139 - DNA, 75 bp, synthetic construct
  source 1..75: mol_type = other DNA
ccggtcatcgcggaatggtgggttccgcgattgttcgacagctggagcagcgcggtgacgtggaagtggttgtcc

SEQ ID NO: 30140 - DNA, 75 bp, synthetic construct
  source 1..75: mol_type = other DNA
ggactatatgcagcggctgaacgaatgggagaacgccttcgtggaattgcagaaaatgttttcgcttacgcaacg

SEQ ID NO: 30141 - DNA, 75 bp, synthetic construct
  source 1..75: mol_type = other DNA
ccggcgctataacgccaggtatcccgaccggggaggtgcgaaaaaggattccggaaacctgacccccactcagca

SEQ ID NO: 30142 - DNA, 75 bp, synthetic construct
  source 1..75: mol_type = other DNA
tgtgaaccgactacaaccgctgattaacgagctggagaagctacccagaccaccggcgaaaccgcagaaccacta

SEQ ID NO: 30143 - DNA, 75 bp, synthetic construct
  source 1..75: mol_type = other DNA
ccaaagccgatggctcgcagtctctcgacctgcagcacgacgccttgcgcgccgcaggtgtcgaacgggacaata

SEQ ID NO: 30144 - DNA, 75 bp, synthetic construct
  source 1..75: mol_type = other DNA
ccgggatggctgtttttccggcagcgcagtggacgacaacggcgtgctgtcgcttatctacaccggtcatctctg

SEQ ID NO: 30145 - DNA, 75 bp, synthetic construct
  source 1..75: mol_type = other DNA
ggtgtatgcctacgcggcattacgtgtgtccgtgcaacgctggcagcttgatctggctgtactggcaaaatcccg

SEQ ID NO: 30146 - DNA, 75 bp, synthetic construct
  source 1..75: mol_type = other DNA
aattacgtgtctgcgtggaatttctggcggcatggtgccagcaacggctgggcaagcccgacgaaggctatcagg

SEQ ID NO: 30147 - DNA, 75 bp, synthetic construct
  source 1..75: mol_type = other DNA
aataccaggaaggaagtcttactgctgtggccgccggagaacaggttgttcctgcctctgaacttgctgccgcca

SEQ ID NO: 30148 - DNA, 75 bp, synthetic construct
  source 1..75: mol_type = other DNA
tgatttcactggcggatgagtggagttccgtaaatgcccgtctgaaacaggcatcacagtcatccgatgaatttt

SEQ ID NO: 30149 - DNA, 75 bp, synthetic construct
  source 1..75: mol_type = other DNA
gaccgtgatcacgctccgttgatgcaagagatcaaccagaccggtggctacaacgacgaaatcgaaggcaagctg

SEQ ID NO: 30150 - DNA, 75 bp, synthetic construct
  source 1..75: mol_type = other DNA
gaacccggtcgccaaaccttgccgactcggtgatgatcaactatgccccaatgaattcagccctgaacatctggg

SEQ ID NO: 30151 - DNA, 75 bp, synthetic construct
  source 1..75: mol_type = other DNA
cagcgatattctccggtgagattgatgtgttcccaggggataggagaagggcactgttgcaaatagtcggtggtg

SEQ ID NO: 30152 - DNA, 75 bp, synthetic construct
  source 1..75: mol_type = other DNA
cactgacggcagtgtgtcgaacgttgaagcggtagcggaacctgatgaacctgaagaaatgtggacggtgaaacg

SEQ ID NO: 30153 - DNA, 75 bp, synthetic construct
  source 1..75: mol_type = other DNA
catcatggctgcgtgatccatcagtctgagcttgaccagagcaacgggcggtggatctgtgaaaacacggggatg

SEQ ID NO: 30154 - DNA, 75 bp, synthetic construct
  source 1..75: mol_type = other DNA
tcgcggcatcgagcgcacttatacccgtgacttgctcgtggaagtttttctcgacggacgcggcaacggcctgaa

SEQ ID NO: 30155 - DNA, 75 bp, synthetic construct
  source 1..75: mol_type = other DNA
ctttctggcacgacctggcggcaccgatcctggcgggaattattaccgcagcgattgtcggctggtggcgtaacc

SEQ ID NO: 30156 - DNA, 75 bp, synthetic construct
  source 1..75: mol_type = other DNA
atggttcatcaacattacggaacgcagaccgttaatcgcggtgcggtcatgccaggaatgctggtcaaacacaaa

SEQ ID NO: 30157 - DNA, 75 bp, synthetic construct
  source 1..75: mol_type = other DNA
acccgtccggtgaagtcactcccagtaaggcagatcgccttatcacggaacgcctggtacaggcactggccctgg

SEQ ID NO: 30158 - DNA, 75 bp, synthetic construct
  source 1..75: mol_type = other DNA
gctgccgtggtgctggcacacaatcacccgtccggtgaagtcacacccagcaaggcagaccgccttatcacggaa

SEQ ID NO: 30159 - DNA, 75 bp, synthetic construct
  source 1..75: mol_type = other DNA
gacggagaaatacgtcgctacgacaggcgtcagaacataatctgtcgcgagtgccggaagagtgaggttatgcag

SEQ ID NO: 30160 - DNA, 75 bp, synthetic construct
  source 1..75: mol_type = other DNA
agctgaagaaaccatctgcggttgatccggaccttatctggtcattaccagacggagaaatacgccgctacgaca

SEQ ID NO: 30161 - DNA, 75 bp, synthetic construct
  source 1..75: mol_type = other DNA
gtcgccataacatggtttgtcgcgagtgtctggaaagtgaagtaatgcagcgagtgttggcattttatcagggaa

SEQ ID NO: 30162 - DNA, 75 bp, synthetic construct
  source 1..75: mol_type = other DNA
atattatcagattatattgctataagtttctctacagcagagaatatcttaatgaaaacgcatacaaaaaacgat

SEQ ID NO: 30163 - DNA, 75 bp, synthetic construct
  source 1..75: mol_type = other DNA
cagaaccggggaaaatccagcgttttgttcagcaggcggtggaccactggccacatctgctggcagtccacttca

SEQ ID NO: 30164 - DNA, 75 bp, synthetic construct
  source 1..75: mol_type = other DNA
aaaattccgcaccttttccccggtgatgatctgaaacttcagaccgcgcaggattcagacaatggattttcggcg

SEQ ID NO: 30165 - DNA, 75 bp, synthetic construct
  source 1..75: mol_type = other DNA
atgaaaacattacccgatacactcgtacgggaggcatcgcgctgcccgtctcccgtcaccatctggcagactctg

SEQ ID NO: 30166 - DNA, 75 bp, synthetic construct
  source 1..75: mol_type = other DNA
gatgacctgattttaccatcgctgcatatggcaaacctcgaactgcgtcgggcgaaaagtcatgtccagaagtgg

SEQ ID NO: 30167 - DNA, 75 bp, synthetic construct
  source 1..75: mol_type = other DNA
tgcgccgcgctgcgggagctgaacaagcaccgggatattgttcgacagattactgatatttctcgccgtgttgca

SEQ ID NO: 30168 - DNA, 75 bp, synthetic construct
  source 1..75: mol_type = other DNA
cagaagtccatccccgggaggtgattaaacgcgccctgtaccacaatgccgctgccgtggtgctggcgcacaatc

SEQ ID NO: 30169 - DNA, 75 bp, synthetic construct
  source 1..75: mol_type = other DNA
ctcttcctgcaatcacccacaaccagatccccgttattacaactgaacttctggcgcagttatacggaacaaaaa

SEQ ID NO: 30170 - DNA, 75 bp, synthetic construct
  source 1..75: mol_type = other DNA
acctcggtacgccgcagttgaaagcatctacgtcgataaacgtcccggacccgacgccgtttgtgacttatttct

SEQ ID NO: 30171 - DNA, 75 bp, synthetic construct
  source 1..75: mol_type = other DNA
ttcgcagactggggagaaatgttcggagatcacgtgctggcaacagcgatactggatcggttgctacatcactca

SEQ ID NO: 30172 - DNA, 75 bp, synthetic construct
  source 1..75: mol_type = other DNA
ttacgggctgcacgacccgaacgcaccggagaacaggcggacacttgtcaccccgaataatctgccgaaagcgaa

SEQ ID NO: 30173 - DNA, 75 bp, synthetic construct
  source 1..75: mol_type = other DNA
acattacaaggacatgcgacagaacatgccatatttaaagaaggcaataacaactgtccaattccttttttatgt

SEQ ID NO: 30174 - DNA, 75 bp, synthetic construct
  source 1..75: mol_type = other DNA
ctgagtggtgccgaaaaaacacaacgatgtccagttttgcgtctgttgatatggatggattcaaaaaatttttaa

SEQ ID NO: 30175 - DNA, 75 bp, synthetic construct
  source 1..75: mol_type = other DNA
ggaaaccagaattccggcaatgacgtgcacggagtgggatcaattccggtggtggttaaactacctgcaagggta

SEQ ID NO: 30176 - DNA, 75 bp, synthetic construct
  source 1..75: mol_type = other DNA
ctcttcaccggcaccatcaaccgcacggaagtccatccccgggaagtgattaaacgtgccctgtaccacaatgcc

SEQ ID NO: 30177 - DNA, 75 bp, synthetic construct
  source 1..75: mol_type = other DNA
tgaacgttaaaattgagcatgagatcatcatcaaggcagacaaagatgtcgaagagctgcttgagacccgtagcg

SEQ ID NO: 30178 - DNA, 75 bp, synthetic construct
  source 1..75: mol_type = other DNA
tgcaaattaccggagaaggcgatggattacctgaaacgaaatggactgataagcgtggaggatgttttacgatga

SEQ ID NO: 30179 - DNA, 75 bp, synthetic construct
  source 1..75: mol_type = other DNA
tggacggcctgttctggttcggcagccagcgcattgcggcagatatcctgaggctgagaaagtacgggatgcgga

SEQ ID NO: 30180 - DNA, 75 bp, synthetic construct
  source 1..75: mol_type = other DNA
cctccgccaatgagtcgtggcgctattttatggggcggcgaaaatttattgcgtcccggctggccacgcagatgt

SEQ ID NO: 30181 - DNA, 75 bp, synthetic construct
  source 1..75: mol_type = other DNA
ttacttcacgttgttaacggaagagtacggaaagtacatggatggcccaggggtaattgctgttggggtaatcct

SEQ ID NO: 30182 - DNA, 75 bp, synthetic construct
  source 1..75: mol_type = other DNA
ttacttcacgttgttaacggaagagtacggaaagtacatgggtggcccaagggtaattgctgttggggtaatcct

SEQ ID NO: 30183 - DNA, 75 bp, synthetic construct
  source 1..75: mol_type = other DNA
caaccgtggagggcaggcatattgcgtaaaagatggagtgcaagttaatcccatgtatgcaagagggtggaatga

SEQ ID NO: 30184 - DNA, 75 bp, synthetic construct
  source 1..75: mol_type = other DNA
ctgttccattaagccccggtgaacgcctgaatggacttaatcacatagcggaattaagggcgaaagtttttggcc

SEQ ID NO: 30185 - DNA, 75 bp, synthetic construct
  source 1..75: mol_type = other DNA
aataccacgttgcaggcggtttcgatgaacagcactacgccctggtaaccggcaataaaaaactcatcaatactc

SEQ ID NO: 30186 - DNA, 75 bp, synthetic construct
  source 1..75: mol_type = other DNA
atgcatcagatgtttaccggatttacagcgggataaaaaacagtaaggggatccagcttcgtgcatctgaaaaac

SEQ ID NO: 30187 - DNA, 75 bp, synthetic construct
  source 1..75: mol_type = other DNA
caccgaaaaactatattgtgcctggtgatccggctattgaatatgtgcagacacattcagcaccacagccaatac

SEQ ID NO: 30188 - DNA, 75 bp, synthetic construct
  source 1..75: mol_type = other DNA
ttcgtgtgaaaggagacagcatgtggcccagaataaaatcaggagaatatgtactcattgagcctaacaccaaag

SEQ ID NO: 30189 - DNA, 75 bp, synthetic construct
  source 1..75: mol_type = other DNA
aagatactgaccgtcataaagagtcacagaaagcattaaaaatactgggatgtgacaagtcaattcatcttaatt

SEQ ID NO: 30190 - DNA, 75 bp, synthetic construct
  source 1..75: mol_type = other DNA
tgctcaagccaaattccgaggacaacaggttagtcattctatgtgtgaaggttttgttgtccataagatggtgtt

SEQ ID NO: 30191 - DNA, 75 bp, synthetic construct
  source 1..75: mol_type = other DNA
gaaaaagaaccggcattttagcaattggtgcccatcctgatgatatagaattaggatgtggtgcatctctttcat

SEQ ID NO: 30192 - DNA, 75 bp, synthetic construct
  source 1..75: mol_type = other DNA
atggctattgaaggcgctgcggcgactgttccattaagacccggtgaacgcctgaatggacttaatcatattgcg

SEQ ID NO: 30193 - DNA, 75 bp, synthetic construct
  source 1..75: mol_type = other DNA
ttgccgtcggtgcgcagcttaagtcaggagcacggcgtcagcatcagcaccgtgcagcaggcgtatcagacgctg

SEQ ID NO: 30194 - DNA, 75 bp, synthetic construct
  source 1..75: mol_type = other DNA
cagacagtgaagaggcttcccgccgtaatgcagagtcagccgctgaaaatgccggagtcgccaccacaaaagcgc

SEQ ID NO: 30195 - DNA, 75 bp, synthetic construct
  source 1..75: mol_type = other DNA
acagcacgtctgaaacactggccgcaacgccgaaagcggtaaaggccgcctatgaccttgctaacgggaaatata

SEQ ID NO: 30196 - DNA, 75 bp, synthetic construct
  source 1..75: mol_type = other DNA
atgtgaacggcgttccgcttcgtgagagtctcagctacaacgggggcggtgcaggatttggcgggcaaatggcgg

SEQ ID NO: 30197 - DNA, 75 bp, synthetic construct
  source 1..75: mol_type = other DNA
gctgttggctggaactggaatagcggggtctataacgcaaacattggtggcgcatcgacattaatcctccacttc

SEQ ID NO: 30198 - DNA, 75 bp, synthetic construct
  source 1..75: mol_type = other DNA
gaaatggatgttcaaagatggcgtagtggtaaagcgaacttataccgaggaagagcagaggcaacaagcggaaaa

SEQ ID NO: 30199 - DNA, 75 bp, synthetic construct
  source 1..75: mol_type = other DNA
cgtccggcccatcgctttttctccattatttttctcattattctattagtttgcattcattcactgataacaact

SEQ ID NO: 30200 - DNA, 75 bp, synthetic construct
  source 1..75: mol_type = other DNA
tcacctttgaagccgcacaccgactcccaaacgtgcctgatgggcataaatgtgggcgtttgcacggacactctt

SEQ ID NO: 30201 - DNA, 75 bp, synthetic construct
  source 1..75: mol_type = other DNA
cgatgcttatagtttagtaattgctattccacctcgaagcgaacagaaagccatagtgtcgaaagtaaatgaatt

SEQ ID NO: 30202 - DNA, 75 bp, synthetic construct
  source 1..75: mol_type = other DNA
atgaaatagccgaagcgatcgccctgcatactgcctgtatgccgacacgggagatccccggcgcaattgccaact

SEQ ID NO: 30203 - DNA, 75 bp, synthetic construct
  source 1..75: mol_type = other DNA
tgaatggcaactctccggtaactccggatagttggataagctgtagtgatcgaatgccggacgacaggcaggagg

SEQ ID NO: 30204 - DNA, 75 bp, synthetic construct
  source 1..75: mol_type = other DNA
cagatgtactgatttttgaaccgaaagtttttggtgatgagcgtggtttctttatggaaagctttaatcagaaag

SEQ ID NO: 30205 - DNA, 75 bp, synthetic construct
  source 1..75: mol_type = other DNA
agtgacgcccgcgagtgtgcagctccgggcgtcgtggcgtcgattgcttctggttgtggagaaactaacgcatga

SEQ ID NO: 30206 - DNA, 75 bp, synthetic construct
  source 1..75: mol_type = other DNA
cggatttcagtctgcttgtcccccggcgtgaggaagcgcagacggagaggccggatgaggaagacatgctgatgc

SEQ ID NO: 30207 - DNA, 75 bp, synthetic construct
  source 1..75: mol_type = other DNA
acggccggtgtctcctggcacaacgcgatgttcaccaccgcatttgatgtggatctgaccccggccagcggtttc

SEQ ID NO: 30208 - DNA, 75 bp, synthetic construct
  source 1..75: mol_type = other DNA
ggcatacaatcctgaagataatcagggtgcccgctggttgttgggttcagagctgttacgaacaggtgatcatga

SEQ ID NO: 30209 - DNA, 75 bp, synthetic construct
  source 1..75: mol_type = other DNA
ccggctctctggatacggcagaagattactatgcaacatactcaccattatggggacaatatccggaagcattgc

SEQ ID NO: 30210 - DNA, 75 bp, synthetic construct
  source 1..75: mol_type = other DNA
aactggatatgcatttttccgggctgacgtacgccgtactcagcctgtttttttgcgatccggatatgcatccct

SEQ ID NO: 30211 - DNA, 75 bp, synthetic construct
  source 1..75: mol_type = other DNA
aatggcggcaacgaagccgacttaaacccaaacgtcgccaaccgcaacaaaggcccgcgccgtcagccggaaaag

SEQ ID NO: 30212 - DNA, 75 bp, synthetic construct
  source 1..75: mol_type = other DNA
aggcgaagtctgtacaggaagctctggcgtcactggaatacaaccgtgtggcgaggatacgcgaggaggcagcag

SEQ ID NO: 30213 - DNA, 75 bp, synthetic construct
  source 1..75: mol_type = other DNA
ccgaacgcgtggaaatcgacgtcagtcataacgcccttgccggtggtcttctctgtgcggacggccagtggcggc

SEQ ID NO: 30214 - DNA, 75 bp, synthetic construct
  source 1..75: mol_type = other DNA
cagctttgcagagtgggctgtgggtgatttcaaccggcagaaggagacagtcctttgcgacaagttaaccgctgg

SEQ ID NO: 30215 - DNA, 75 bp, synthetic construct
  source 1..75: mol_type = other DNA
accgacatcaccagctcgtttatggctatccgcaagaccatgaccagcagcggacgcagcgccacctatgaggcc

SEQ ID NO: 30216 - DNA, 75 bp, synthetic construct
  source 1..75: mol_type = other DNA
ctgccgggccggatactgccgaagattattatgcaacatactcaccattatggggacaatatccggaagcattgc

SEQ ID NO: 30217 - DNA, 75 bp, synthetic construct
  source 1..75: mol_type = other DNA
gagcgttagttggttatatgcttaatgccaataaaattgcaaccgctgagataatacccgtttatgaggtaaagt

SEQ ID NO: 30218 - DNA, 75 bp, synthetic construct
  source 1..75: mol_type = other DNA
aagacggcgcgggtgacagtgctgtttcagatggcgttgtgtctcagcctgacggtagcagtgagcctcagcctg

SEQ ID NO: 30219 - DNA, 75 bp, synthetic construct
  source 1..75: mol_type = other DNA
atgacggaggcggatttgtatcctcatctggcgcatcttgccggcgggcaggtgtacccgtatgtggtccccctg

SEQ ID NO: 30220 - DNA, 75 bp, synthetic construct
  source 1..75: mol_type = other DNA
ccgcaatatctgccttggtacaggaaaacaaccttatttaccaccctgtgtgaagcatatgacacaatcctgttt

SEQ ID NO: 30221 - DNA, 75 bp, synthetic construct
  source 1..75: mol_type = other DNA
ctggcaacgctggagccggaagcgttttcaattccgctctaccggaaagccttcgaggttatccgcaagcaggcg

SEQ ID NO: 30222 - DNA, 75 bp, synthetic construct
  source 1..75: mol_type = other DNA
tatgcgcagaaaaataccgataacacctatatgttaagcgttaatggtgcatgtcatgccaccgcatttaaccag

SEQ ID NO: 30223 - DNA, 75 bp, synthetic construct
  source 1..75: mol_type = other DNA
cacctactccgagatgcgcttcggcgccaccggtccaaaggcatcgccacgccacgtgcagctggttgacgcgtt

SEQ ID NO: 30224 - DNA, 75 bp, synthetic construct
  source 1..75: mol_type = other DNA
taatcgccttatacctgaaggtttcagcggtgaaatcatctggatgaatccggaaaaccggccttatctgcgcgc

SEQ ID NO: 30225 - DNA, 75 bp, synthetic construct
  source 1..75: mol_type = other DNA
taccacagcgtgttctgctgaaagacttccagggcgatatgcggctggtgaaagaagcgtttcccgaaatggact

SEQ ID NO: 30226 - DNA, 75 bp, synthetic construct
  source 1..75: mol_type = other DNA
ttcagaaaattcaagatcgcggcattatcatctattcaaagtttagagcggcagaatttgatcaggatgacgttt

SEQ ID NO: 30227 - DNA, 75 bp, synthetic construct
  source 1..75: mol_type = other DNA
ttgatatctacccgtacatagccggggcggtcttcctgattggtagctggctgcgttatgactacgggcagtaca

SEQ ID NO: 30228 - DNA, 75 bp, synthetic construct
  source 1..75: mol_type = other DNA
caacaaatcaactggcagttgaacagtcccgtctcacacaaatgcagggcaaagcgcaatccattcaggatgtgc

SEQ ID NO: 30229 - DNA, 75 bp, synthetic construct
  source 1..75: mol_type = other DNA
ccttgatgccacgctgacggcattagctgggctggaaaccggtgcaaataaactcccgtatttcactggaaatga

SEQ ID NO: 30230 - DNA, 75 bp, synthetic construct
  source 1..75: mol_type = other DNA
acatcaggcgcttctgcaatatattcgtccgggggcacagaaccagatgaaagttattctggccgaagaagccca

SEQ ID NO: 30231 - DNA, 75 bp, synthetic construct
  source 1..75: mol_type = other DNA
gtcgtttgctgcagaaggaaccagttttgctgacctggggcgggaaatcaatgcgcagataaaacggggcgattt

SEQ ID NO: 30232 - DNA, 75 bp, synthetic construct
  source 1..75: mol_type = other DNA
cgtaaaggagaacatcagtcactggaggattttctggcgcggcatggcggtgtcagggcgtttcagtgggtgccg

SEQ ID NO: 30233 - DNA, 75 bp, synthetic construct
  source 1..75: mol_type = other DNA
ccggggcgttgtgcctgttctggtcgtggctggtggcgcgatatctcgaccgtacacagtcgtctgtcggcggag

SEQ ID NO: 30234 - DNA, 75 bp, synthetic construct
  source 1..75: mol_type = other DNA
gcgtcataaggggctttgcgggaatgaaattcctgtcagcctcaattactacggcttcggtgggggcgaagtgct

SEQ ID NO: 30235 - DNA, 75 bp, synthetic construct
  source 1..75: mol_type = other DNA
taaaaaacagccggttaggggggcgatggttggccccgatccgtcagtattaaaacctgatccgtcagataaaag

SEQ ID NO: 30236 - DNA, 75 bp, synthetic construct
  source 1..75: mol_type = other DNA
agattacaactggtgcgctaatggtaccccaccctctttccatgaacagcgatcattgtcggagcgtttgttcag

SEQ ID NO: 30237 - DNA, 75 bp, synthetic construct
  source 1..75: mol_type = other DNA
gaaccaaactgagtcactggtgatggacatgctggtaaatctggctccagacgctgaggtcaaagagaaattaca

SEQ ID NO: 30238 - DNA, 75 bp, synthetic construct
  source 1..75: mol_type = other DNA
ccggcgataaaatccactgggggccttttggccatttagtccgggaattacattttaacgccagtgaaaatggac

SEQ ID NO: 30239 - DNA, 75 bp, synthetic construct
  source 1..75: mol_type = other DNA
cactggttgatttgaaattcatcatggctgatactggctttggtaaaaccttcatctatgaccggattaagtccg

SEQ ID NO: 30240 - DNA, 75 bp, synthetic construct
  source 1..75: mol_type = other DNA
gatgcaccaggaacatataaagctggttatgccatctgccgctctgcggatttaaactcatgggaatatgtgcca

SEQ ID NO: 30241 - DNA, 75 bp, synthetic construct
  source 1..75: mol_type = other DNA
acttaacgccgtgctggattatattgacgcggtgacggtaacagataccagcactgcgccggatgtcatctggcc

SEQ ID NO: 30242 - DNA, 75 bp, synthetic construct
  source 1..75: mol_type = other DNA
agctcattgcaacaaaggcaggggatgttaccgtttataactatgatggtgaaacacgggaatatatttccactt

SEQ ID NO: 30243 - DNA, 75 bp, synthetic construct
  source 1..75: mol_type = other DNA
aggcagcacagcttgcgacggagggtatctcagggatggtgaataacatcacggagatgctgaacggaaacaaag

SEQ ID NO: 30244 - DNA, 75 bp, synthetic construct
  source 1..75: mol_type = other DNA
acgataaatgggatggtgagaaatgggtgacggataccgaggcacagcatagcgccgcagtagaagcggcagaag

SEQ ID NO: 30245 - DNA, 75 bp, synthetic construct
  source 1..75: mol_type = other DNA
atggataacgccatattaaatagcgagattatcgccaccaaagcagggaatattaccgtctataactatgatggt

SEQ ID NO: 30246 - DNA, 75 bp, synthetic construct
  source 1..75: mol_type = other DNA
caaattgcaggacagcttttatataaacgtttcctgggatgcgctgaacacggcatacagtgaacacccggagtg

SEQ ID NO: 30247 - DNA, 75 bp, synthetic construct
  source 1..75: mol_type = other DNA
aacggtcgggtacggtggggaaaggtgtgcctgcggggtataagctgactgagatggagatgattcctgaggatt

SEQ ID NO: 30248 - DNA, 75 bp, synthetic construct
  source 1..75: mol_type = other DNA
ccgggtgaagcggcaccgtaccagaaacagataacccgggatgtggtgctggacagtcgttcaccggactgcgaa

SEQ ID NO: 30249 - DNA, 75 bp, synthetic construct
  source 1..75: mol_type = other DNA
cagtttttcgatatgcttcgtgatctgctcaagaacgtagatcttaaagggttcgagcctgatgtacgtattttg

SEQ ID NO: 30250 - DNA, 75 bp, synthetic construct
  source 1..75: mol_type = other DNA
ggtttggtatggattttatcgaaaccgtcagtgcgctgatgaatgcaacccccggacgtgatctctgctggctcc

SEQ ID NO: 30251 - DNA, 75 bp, synthetic construct
  source 1..75: mol_type = other DNA
gccgcgttcgcggctgccgccaaaccaccactgatccgtcaggctattgtgaaagccacaaaagcgaaggctgga

SEQ ID NO: 30252 - DNA, 75 bp, synthetic construct
  source 1..75: mol_type = other DNA
cctgcgcatcaacgccaactgtccaggctccttgcgtaaagcccccatcacctccggcgtgggtaatgcaaccgg

SEQ ID NO: 30253 - DNA, 75 bp, synthetic construct
  source 1..75: mol_type = other DNA
catcaacaaagagtcggacagcctcgaccagaccgccgccaaaaccaatgccgccacacagggtaattcctacat

SEQ ID NO: 30254 - DNA, 75 bp, synthetic construct
  source 1..75: mol_type = other DNA
gaagacgattaccacggcaaacatattgcgtatttcatgcgacaagcattggcctggctggaagggcattcatgc

SEQ ID NO: 30255 - DNA, 75 bp, synthetic construct
  source 1..75: mol_type = other DNA
gccgcagctctggctgtccagtttaaaaatactgaacgaccgacaaatgcacaggcaaaggcaatggaagccgcg

SEQ ID NO: 30256 - DNA, 75 bp, synthetic construct
  source 1..75: mol_type = other DNA
tgatttagtagggtgtgctctcgaactatacaaggccatcgatgaaaacttcgattttttaatttcaatacattg

SEQ ID NO: 30257 - DNA, 75 bp, synthetic construct
  source 1..75: mol_type = other DNA
tgttccttttaaccagacgctgtatttcatcaatggcgatgatccggcgcaggtggcctggatgaaacgccagac

SEQ ID NO: 30258 - DNA, 75 bp, synthetic construct
  source 1..75: mol_type = other DNA
cgtgcaggcctccacccgggatgaaattgaacgactctggaatccgcagggtatggccgcgcagcctgcacaacc

SEQ ID NO: 30259 - DNA, 75 bp, synthetic construct
  source 1..75: mol_type = other DNA
tgctggtatgggggcagagtgtggctgcagctgatcttggcacctggggggatttgtggccggtaaaggagccgg

SEQ ID NO: 30260 - DNA, 75 bp, synthetic construct
  source 1..75: mol_type = other DNA
ttcttaatgcaataaaagcagggcactctggctttatagctggtaatcctgctcatgcattggatgataagacta

SEQ ID NO: 30261 - DNA, 75 bp, synthetic construct
  source 1..75: mol_type = other DNA
gcaattcctggaacattatccggctgctcaggactgcgcttataaatttcttgtttgcgaggataaacccggtat

SEQ ID NO: 30262 - DNA, 75 bp, synthetic construct
  source 1..75: mol_type = other DNA
atgcctggattaatatcatatgtgtcatcggcttcattcgtgaatgagatgatggagctgcgtcagcaggtaatg

SEQ ID NO: 30263 - DNA, 75 bp, synthetic construct
  source 1..75: mol_type = other DNA
atgcatcagaaaacagcagaacacgaacaaaccagagtattgctgaccatcaaaaacgggaaagtaatattcatt

SEQ ID NO: 30264 - DNA, 75 bp, synthetic construct
  source 1..75: mol_type = other DNA
gatcaccaatatcggccgtccgtcgctggcggaagatcagggggacatcacaccggtcaccggtattaccgtgac

SEQ ID NO: 30265 - DNA, 75 bp, synthetic construct
  source 1..75: mol_type = other DNA
tagtggaatgattccttggattttaatttgtgaacttttgagtctgacaaataaaaaattaggtgaactggtttg

SEQ ID NO: 30266 - DNA, 75 bp, synthetic construct
  source 1..75: mol_type = other DNA
atatggtcgaatctgttccatatcggcattttggggattttcttcgggcacctgttcggcatgttaacgccgcac

SEQ ID NO: 30267 - DNA, 75 bp, synthetic construct
  source 1..75: mol_type = other DNA
ccctaatccattactacctgagtgcagagaagataccagcagtgcggttataagacatagtgctgattttggtat

SEQ ID NO: 30268 - DNA, 75 bp, synthetic construct
  source 1..75: mol_type = other DNA
aatcaccaatattggtcgtccgtcgctggcggaggatcggggagaaatcacaccggtcaccggtattaccgtgac

SEQ ID NO: 30269 - DNA, 75 bp, synthetic construct
  source 1..75: mol_type = other DNA
aattcatgccctgtcggcctatctgacaccgtcgtgccgggaaatccttgaaacggatgcacgacgccgtaagga

SEQ ID NO: 30270 - DNA, 75 bp, synthetic construct
  source 1..75: mol_type = other DNA
cctcggcacggggtgcggcggcctcaaaagaggcagcgaaatcttcagaaacgaatgcatcatcaagtgccagta

SEQ ID NO: 30271 - DNA, 75 bp, synthetic construct
  source 1..75: mol_type = other DNA
gtgtgctgcacgttgttgatattcacactcctgacccggaatcgtctgtgcgaagtccggctgaaggacggatac

SEQ ID NO: 30272 - DNA, 75 bp, synthetic construct
  source 1..75: mol_type = other DNA
tcagaaagggcttataggctggtttgaaagcggggatgtgcgggcctataaaatccgtttcccgaacggcacggt

SEQ ID NO: 30273 - DNA, 75 bp, synthetic construct
  source 1..75: mol_type = other DNA
atgaaagcactggaaatggcatgggaaacccgtggtaagcccgtcggggtgatgttccacagcgatcaaggcagt

SEQ ID NO: 30274 - DNA, 75 bp, synthetic construct
  source 1..75: mol_type = other DNA
actggcaaatcatgacaaccagattgtcttcggtacgaccaacggaatgaccatcagtaccgggctggagtatgg

SEQ ID NO: 30275 - DNA, 75 bp, synthetic construct
  source 1..75: mol_type = other DNA
aaccgtctgggcaatttcactgtggaaaacggtaatgctgacggtgttgttctggagtccggtggtcgcctggat

SEQ ID NO: 30276 - DNA, 75 bp, synthetic construct
  source 1..75: mol_type = other DNA
tggtataaccggtattgtcgtcactcgttatgtgccgatttcagaacactgatatcgttactgaagtcgttatct

SEQ ID NO: 30277 - DNA, 75 bp, synthetic construct
  source 1..75: mol_type = other DNA
tcacaaagcacagtcagtgccagttcctgtaaagttgagttccgccacggtaacatgacgctggaaaatccttca

SEQ ID NO: 30278 - DNA, 75 bp, synthetic construct
  source 1..75: mol_type = other DNA
cccgtattgcccgggaacacgatatcaatgataacctcctgttcaaatggctcaggctctggcagaacgaagggc

SEQ ID NO: 30279 - DNA, 75 bp, synthetic construct
  source 1..75: mol_type = other DNA
accacactgaatggcggttaccagtatgtgcacaaggacggacttgcgctgaacacggtaattaacgaggggggc

SEQ ID NO: 30280 - DNA, 75 bp, synthetic construct
  source 1..75: mol_type = other DNA
gccgtgttcgcggctgccgccataccaccactgacccgtcaggctattgcgaaagccacaaaagcgaaggctgga

SEQ ID NO: 30281 - DNA, 75 bp, synthetic construct
  source 1..75: mol_type = other DNA
tgggaagtcatccgggagcggatacttaagcgcgacaaagggctgtgtcagaaccatctacggcaggcgatagtg

SEQ ID NO: 30282 - DNA, 75 bp, synthetic construct
  source 1..75: mol_type = other DNA
ttcgcctggccgtcagcccgggatggcaaagtgttcctcacaccggcacagctggcgatgctgctggaaggtatc

SEQ ID NO: 30283 - DNA, 75 bp, synthetic construct
  source 1..75: mol_type = other DNA
ctgagtggcagaacacagctcagtaaaggtgccagcatggtactgaatggtgatgtggtcagtaccggcgatatt

SEQ ID NO: 30284 - DNA, 75 bp, synthetic construct
  source 1..75: mol_type = other DNA
ctgtgcctcctgaccaaacggctggagcgtgggcgcttcgcctggccgtcagcccgtgatggcaaagtgttcctt

SEQ ID NO: 30285 - DNA, 75 bp, synthetic construct
  source 1..75: mol_type = other DNA
taacatgacgctggaaaatccttcaccagagctgctcacggtgttgatccgtgaactgaccgggaggggacgatg

SEQ ID NO: 30286 - DNA, 75 bp, synthetic construct
  source 1..75: mol_type = other DNA
atgacgctgtcgtattgggaaaggctcttggcatatctcctcctgagctcctctttggagaacaggaatcttctg

SEQ ID NO: 30287 - DNA, 75 bp, synthetic construct
  source 1..75: mol_type = other DNA
gcgcggctaaaaaaatcgagtttagcctgtcgcttaagcgggtggatgaatccctcgcggccatctacggcgacc

SEQ ID NO: 30288 - DNA, 75 bp, synthetic construct
  source 1..75: mol_type = other DNA
atgatgctgtcgtcctgggaaaggcgctgggcatatctcctcctgagctcctctttggggaaaaagactcttctg

SEQ ID NO: 30289 - DNA, 75 bp, synthetic construct
  source 1..75: mol_type = other DNA
tcacacttgctgatgccagacaaaaacgagaagacgcgaagaaactactcgcagcaggtgaagatcccggcgaag

SEQ ID NO: 30290 - DNA, 75 bp, synthetic construct
  source 1..75: mol_type = other DNA
cgcgagatgctccagtggtacgccgactatatggattcgctcgaacatggcggtaacgtggtgcatggcaagttc

SEQ ID NO: 30291 - DNA, 75 bp, synthetic construct
  source 1..75: mol_type = other DNA
ggctggagcaaccagctctgccgttggttttaacattcagctgaatgattgcgataccactgttgccacaaaagc

SEQ ID NO: 30292 - DNA, 75 bp, synthetic construct
  source 1..75: mol_type = other DNA
gagcaccgtcacgatgaagcctggctgcgccagcacattcacaatgacgcgcattacaacagcctgatggcggtt

SEQ ID NO: 30293 - DNA, 75 bp, synthetic construct
  source 1..75: mol_type = other DNA
gacctcttctgacactggcgttgaattattacctgtagaaataacgccggatgagcagaaaaaaactgtggcggc

SEQ ID NO: 30294 - DNA, 75 bp, synthetic construct
  source 1..75: mol_type = other DNA
aaccttgcaccgttcacgccactcgctcagcagtacgtatcacagttgcagaatctttcctctcttcaggggcaa

SEQ ID NO: 30295 - DNA, 75 bp, synthetic construct
  source 1..75: mol_type = other DNA
aggcgcgttattttgcaaccggtgctgcaaccccaggtgctgctaatgcggatgcgaccttcaaggttcagtatc

SEQ ID NO: 30296 - DNA, 75 bp, synthetic construct
  source 1..75: mol_type = other DNA
ccggcgtggaatgaaacgggcgtcatcggcaatatggccgagctggcggcgaccacgctcgactacgaaaactat

SEQ ID NO: 30297 - DNA, 75 bp, synthetic construct
  source 1..75: mol_type = other DNA
ggaacccggattgccatccctctggctctgcgttgcgataaattaaatctcaccctggatgatgtggtgtcatcc

SEQ ID NO: 30298 - DNA, 75 bp, synthetic construct
  source 1..75: mol_type = other DNA
agctggccgggcatgagcaaagcgaagtggcggtattgcggcataacctgactctgcgcatggctcatcaggaaa

SEQ ID NO: 30299 - DNA, 75 bp, synthetic construct
  source 1..75: mol_type = other DNA
accgtgtcagcaatggtgccagcctgtcaggtctgggcattgcagagagcgggagaagggaatcgcatggccgct

SEQ ID NO: 30300 - DNA, 75 bp, synthetic construct
  source 1..75: mol_type = other DNA
gggactgtggaaacgcgattactcataatactgtgtgttgcccgtattgtggttctgtcgaccccttcggctatt

SEQ ID NO: 30301 - DNA, 75 bp, synthetic construct
  source 1..75: mol_type = other DNA
atgtcacctgggatcgaagatacgccccaaaaaccactgtcctgctggccacttgcgttcagtgccgggcttctc

SEQ ID NO: 30302 - DNA, 75 bp, synthetic construct
  source 1..75: mol_type = other DNA
gaatgggtaaccattcaggccggattttacaccgaacatttttatccggacggtagtcgtgggcgcagggcaaaa

SEQ ID NO: 30303 - DNA, 75 bp, synthetic construct
  source 1..75: mol_type = other DNA
aagtaccgtcgacaccctgaatatcatcagcgccggggtacaggatatgcagcaggtgctggcgcaactccgcgt

SEQ ID NO: 30304 - DNA, 75 bp, synthetic construct
  source 1..75: mol_type = other DNA
aacaacgacctgaaggccacggctgaagctgtgttgtccctagtgaaggacagcgcgaccgatggtgttcagatt

SEQ ID NO: 30305 - DNA, 75 bp, synthetic construct
  source 1..75: mol_type = other DNA
gcggtggcgattcagtgaagtacacgaccaggaacagcctttaccgcgtctatctggcgtttatggcatacgcag

SEQ ID NO: 30306 - DNA, 75 bp, synthetic construct
  source 1..75: mol_type = other DNA
gccattaccgctggagtcatgctgcacattgaccgagacggcagaaaaagagattcatgcaaggcatcgctggca

SEQ ID NO: 30307 - DNA, 75 bp, synthetic construct
  source 1..75: mol_type = other DNA
gtgaatatagaacacctgaataaccggaactggtatcttgcgcaatataatacagccggcaaaaacagagaatct

SEQ ID NO: 30308 - DNA, 75 bp, synthetic construct
  source 1..75: mol_type = other DNA
atggtgatacgcaaaaagaagtgctgggactgtggaaacgcgattactcataatactgtgtgttgcccgtattgt

SEQ ID NO: 30309 - DNA, 75 bp, synthetic construct
  source 1..75: mol_type = other DNA
atgtttgaagaacgtttagagactattcggtctgtttgcgaaagactccagctacaaccaaatagacaaaagcta

SEQ ID NO: 30310 - DNA, 75 bp, synthetic construct
  source 1..75: mol_type = other DNA
cccgtatcatcagcacgcctgaacttattcgctataacgacaatatcgttggttatggctcccgtgagttgcggg

SEQ ID NO: 30311 - DNA, 75 bp, synthetic construct
  source 1..75: mol_type = other DNA
aacaactcaagaatagccgcgaaacgttgtcattacaacacaggcggctatatgacgctcgcagagctgggcatg

SEQ ID NO: 30312 - DNA, 75 bp, synthetic construct
  source 1..75: mol_type = other DNA
agagcacaagctgccgcagcaagagcacaggcaaggcaacagcaacaaatagcagcacgtaaagagaaagcagaa

SEQ ID NO: 30313 - DNA, 75 bp, synthetic construct
  source 1..75: mol_type = other DNA
aaaagcacatgccaaccatccgaccggaacagctaccgcagctaatgcacgatttatcggtcgccagcatagaac

SEQ ID NO: 30314 - DNA, 75 bp, synthetic construct
  source 1..75: mol_type = other DNA
aggggacctgaaagagctgagtctgtcagagctggaggagcgggcactgatgtatgcggcagacagtttccgtta

SEQ ID NO: 30315 - DNA, 75 bp, synthetic construct
  source 1..75: mol_type = other DNA
cgctggacatgcaggttgaggatttgtggcgggatgcccgctgggcaatatcagacatacgcggtgtcacccgca

SEQ ID NO: 30316 - DNA, 75 bp, synthetic construct
  source 1..75: mol_type = other DNA
tatactctcagagcatttcgagaatgttaaaaccaaggttcaaggtactgtagtaatgttttccgcttcaggaaa

SEQ ID NO: 30317 - DNA, 75 bp, synthetic construct
  source 1..75: mol_type = other DNA
atgaaaggcattgaagtggagacgccagccagtctggatttaacaagagcggcagcttttgccattcgtattata

SEQ ID NO: 30318 - DNA, 75 bp, synthetic construct
  source 1..75: mol_type = other DNA
cggtttggctacaaaatggagcagcaactggcccgggtgcgggcggcaaccgaggcagcgcgtctgcttgcccgg

SEQ ID NO: 30319 - DNA, 75 bp, synthetic construct
  source 1..75: mol_type = other DNA
ctactgaaattcttaatcagcttggcggaaatcgcttcattgctatgactggcgcaaagaactttgcctattttg

SEQ ID NO: 30320 - DNA, 75 bp, synthetic construct
  source 1..75: mol_type = other DNA
ctcgacaacgaatctttgatttataccatgaaaacaagatcgcaacaaaaagcgaccttttcgcggcgggttatt

SEQ ID NO: 30321 - DNA, 75 bp, synthetic construct
  source 1..75: mol_type = other DNA
tcagaacaaggcggtcagtgacacgcctctggatgacaaggaaaaaggctttatttccagtaccaccatccccgt

SEQ ID NO: 30322 - DNA, 75 bp, synthetic construct
  source 1..75: mol_type = other DNA
cgtaaaccgaatccccaccgtggtggggcctcccgggccaaagggggaaccggggcccgcgggtcctcaggggcc

SEQ ID NO: 30323 - DNA, 75 bp, synthetic construct
  source 1..75: mol_type = other DNA
gtcccagcaaaaagtctgtcaggacattgccggtgagagcaatatttttgctgactgggcggcttcccggcaggg

SEQ ID NO: 30324 - DNA, 75 bp, synthetic construct
  source 1..75: mol_type = other DNA
catatccctgttccgcgtgatggtcgtgactacgatccggaagtactgcagaaggcggtgaatgatgcggtcgca

SEQ ID NO: 30325 - DNA, 75 bp, synthetic construct
  source 1..75: mol_type = other DNA
atgaccgccgataaaccgggggatgcgcatgcatctggctggacgctggctgccaaacggggacgggatgctgga

SEQ ID NO: 30326 - DNA, 75 bp, synthetic construct
  source 1..75: mol_type = other DNA
atcaggaactcgttaagcttgttgccgaacgcagcaaccagcagctgcatgacgtggatctggatagttacttat

SEQ ID NO: 30327 - DNA, 75 bp, synthetic construct
  source 1..75: mol_type = other DNA
tggtggaagaggtgtcacgtaacgcctccgcggttgcacagaatacggcagccgcgaaaaaatcagccagcgatg

SEQ ID NO: 30328 - DNA, 75 bp, synthetic construct
  source 1..75: mol_type = other DNA
gcagggttactggtttgtgccgggagggcgcgtgcagaaagacgaaacgctggaagccgcatttgagcggctgac

SEQ ID NO: 30329 - DNA, 75 bp, synthetic construct
  source 1..75: mol_type = other DNA
gggccgggaaacattattgagacaaacagccatggctggttcccggatacagatggcgcactcatcaccggactg

SEQ ID NO: 30330 - DNA, 75 bp, synthetic construct
  source 1..75: mol_type = other DNA
tttggtgacgggccgtggcaggatgtcaaggggctggatgaagtgggcagtgatacaggcagaacaggagaatga

SEQ ID NO: 30331 - DNA, 75 bp, synthetic construct
  source 1..75: mol_type = other DNA
ccggcggacggcaaaagtattacccccgatgatgtgcgtccgatgcttgagcagatggtgaaagaggcggtaagc

SEQ ID NO: 30332 - DNA, 75 bp, synthetic construct
  source 1..75: mol_type = other DNA
gcaggacaatatcgactgcgaatccggaattatctttgacaacaatgaggataaaacggattcggcagcactgtt

SEQ ID NO: 30333 - DNA, 75 bp, synthetic construct
  source 1..75: mol_type = other DNA
atgtctgccggaccagcccactttcgactggtaaccagaaacaacatgaaatcattaaccacggaaaccgcactg

SEQ ID NO: 30334 - DNA, 75 bp, synthetic construct
  source 1..75: mol_type = other DNA
ataaaacggattcagcagcactgtttccctgtatcgaacaggccagagaggatatccgtaccctgcgccaactgc

SEQ ID NO: 30335 - DNA, 75 bp, synthetic construct
  source 1..75: mol_type = other DNA
atgccatgttcaatacagggcgttacagacgtaaaaaaatccggtaccgcgataaggtcactggaaaaatagtaa

SEQ ID NO: 30336 - DNA, 75 bp, synthetic construct
  source 1..75: mol_type = other DNA
aaccgccaatgggcaggtgcgttacgagctcaaaactccgtaccgcaatggcaccacccatgtgatcttcgagcc

SEQ ID NO: 30337 - DNA, 75 bp, synthetic construct
  source 1..75: mol_type = other DNA
atgaaatcattaaccacagaaacggcgctggatattctgattgcgtggctacagaacaatatcgactgcgaatcc

SEQ ID NO: 30338 - DNA, 75 bp, synthetic construct
  source 1..75: mol_type = other DNA
gggctcaatacaccaggctcccgcacagtggctgagctggaatctgaagttatgcaactgcgtaaggctttaaat

SEQ ID NO: 30339 - DNA, 75 bp, synthetic construct
  source 1..75: mol_type = other DNA
cgcagtgctggcggatttacagcgcacatttgaggggaaaatagccgcgcaggcacaaacgtttgaagaaaaact

SEQ ID NO: 30340 - DNA, 75 bp, synthetic construct
  source 1..75: mol_type = other DNA
caggcagaaggaagcggagaaaatcccctggtttcttcgctcgatgcgctggcgcaggtggaaaaaatcggagtc

SEQ ID NO: 30341 - DNA, 75 bp, synthetic construct
  source 1..75: mol_type = other DNA
taaatccgcaatataagacgaaaaaacagacggttttccagaagatcgtcgcgtttattgagaagtttaaaggtg

SEQ ID NO: 30342 - DNA, 75 bp, synthetic construct
  source 1..75: mol_type = other DNA
gattcaggattatcgttctgcctataacgatattcgtgactggcagcgccgtgagaaagaagctgacaaaaaaga

SEQ ID NO: 30343 - DNA, 75 bp, synthetic construct
  source 1..75: mol_type = other DNA
gcgattcgacgttaaaaaaattggcggctgtccaggcagaaaaagagcgtttttactccgacgggggcgggctgg

SEQ ID NO: 30344 - DNA, 75 bp, synthetic construct
  source 1..75: mol_type = other DNA
cattccgcaggagctggcgactgccgcatcgatgaccgagaacggtcagcgtcgggatatgcaccctgccgaaca

SEQ ID NO: 30345 - DNA, 75 bp, synthetic construct
  source 1..75: mol_type = other DNA
gtggcgctcgatgccgccctgctggaaaaactccaggctgtcgcagagttccttcgggaagccgaaggctgggga

SEQ ID NO: 30346 - DNA, 75 bp, synthetic construct
  source 1..75: mol_type = other DNA
ctggcagaccttgcgcctgtcatcctcgatgcgctggcagaagaccgcatcaccaccgagcactgtcaggcgctg

SEQ ID NO: 30347 - DNA, 75 bp, synthetic construct
  source 1..75: mol_type = other DNA
aacataccgctgtctgccggagccggaagcggtgctgacggaggcggaagaagaacgcctgaacgaactgatggc

SEQ ID NO: 30348 - DNA, 75 bp, synthetic construct
  source 1..75: mol_type = other DNA
acgctgaccgcacggaacaggtgcaggagaaagcgtcagtggaggaaatcagcctgccgttgctgacgaaaatgt

SEQ ID NO: 30349 - DNA, 75 bp, synthetic construct
  source 1..75: mol_type = other DNA
agcaggtgctggatatgctgatttcttatcagaaagagcgtggctttccgccaaccaatcaggaggtggcaacca

SEQ ID NO: 30350 - DNA, 75 bp, synthetic construct
  source 1..75: mol_type = other DNA
atgacagaagccgaaatactgcgattaatccgccgcgttgccggaatcagccagcaggccgacgaacagaccacg

SEQ ID NO: 30351 - DNA, 75 bp, synthetic construct
  source 1..75: mol_type = other DNA
ggttaccggcgtatctggcagcttctgcgacgtgaaggtctttgcgttaaccacaagcgggtttaccgcatctat

SEQ ID NO: 30352 - DNA, 75 bp, synthetic construct
  source 1..75: mol_type = other DNA
acttcgacgactacctgctgccggccgagaagttcgccgcactcaagcgcgagcaggccctgcccctggcgatca

SEQ ID NO: 30353 - DNA, 75 bp, synthetic construct
  source 1..75: mol_type = other DNA
gagaaaaaaggcgtcatcacgataaagcgtggcgtggcccggggtatcacgcttcataccacagtgaaggacgac

SEQ ID NO: 30354 - DNA, 75 bp, synthetic construct
  source 1..75: mol_type = other DNA
tcgacagtacatcatgattatgcccgggcgttaatattgtggcggcatgcatatcatgccgccacgctgactatt

SEQ ID NO: 30355 - DNA, 75 bp, synthetic construct
  source 1..75: mol_type = other DNA
cagaaatgaagctgattgactgcatggcgaaggtcagggcgtggacgctgcgtattaccgtgaaggagatcggtg

SEQ ID NO: 30356 - DNA, 75 bp, synthetic construct
  source 1..75: mol_type = other DNA
aaggctcgtatggttctgacgcataccggaaggctgaacagacgctgacagacagtctgaaccggaaactgaatg

SEQ ID NO: 30357 - DNA, 75 bp, synthetic construct
  source 1..75: mol_type = other DNA
tctttccgagggaagaatgatgaggtcgtaaaatgttcaattggagaacggactattagcttttctgttcgcaaa

SEQ ID NO: 30358 - DNA, 75 bp, synthetic construct
  source 1..75: mol_type = other DNA
ttgaaacagctcacacctaagcaggaactgttctgcagggaatatttaaaagatttaaacgccactcaggcagct

SEQ ID NO: 30359 - DNA, 75 bp, synthetic construct
  source 1..75: mol_type = other DNA
tgaaagagatacggaaaagtgaagggttaactcaagctgagtttgctgatgttactgggataaatctcggaacta

SEQ ID NO: 30360 - DNA, 75 bp, synthetic construct
  source 1..75: mol_type = other DNA
attgaccacggtaaaacgccagcatcgccccgctctgaatctttcacgcctgcctgaacttctgtcgcgtattga

SEQ ID NO: 30361 - DNA, 75 bp, synthetic construct
  source 1..75: mol_type = other DNA
tctgaacctgcccacactggatgaggccgtgaacaccctgaagccctggtggccgggattatttgacggtgacac

SEQ ID NO: 30362 - DNA, 75 bp, synthetic construct
  source 1..75: mol_type = other DNA
ctggatttactgtatgagcaaaacagagttgtacagtttattgacgacaaaacgtggtatgtcgcacctaacttt

SEQ ID NO: 30363 - DNA, 75 bp, synthetic construct
  source 1..75: mol_type = other DNA
tcgccgactggcagcactcaacatgctggcagagcgtggcatcattccggctgactggcctgtccgcgtgaaaat

SEQ ID NO: 30364 - DNA, 75 bp, synthetic construct
  source 1..75: mol_type = other DNA
agcagtacgccagcagtcgtgactttgcggcggcaacagggctagtgcctcgacagtacagcacgggaggtcgga

SEQ ID NO: 30365 - DNA, 75 bp, synthetic construct
  source 1..75: mol_type = other DNA
tgggcgttttcggtcgacaggtgggatgaaaagtggccggaagcaacaaaacgcgccgttatccgcgatgcgtat

SEQ ID NO: 30366 - DNA, 75 bp, synthetic construct
  source 1..75: mol_type = other DNA
caacaccactggagcgccgactggcgcaagcgtgcagcgggatttctgatttgcaggtgccgctgcgtgacctgt

SEQ ID NO: 30367 - DNA, 75 bp, synthetic construct
  source 1..75: mol_type = other DNA
cttgatagtgatgctttattgcttgtgacgagaacacgttcaaaacaaaaggcagcatttttacagcaaaatatt

SEQ ID NO: 30368 - DNA, 75 bp, synthetic construct
  source 1..75: mol_type = other DNA
tttgatgataaaaagggagtaaatttaacttacacccctgacggcaatcagaatatgagcattatctctgagtca

SEQ ID NO: 30369 - DNA, 75 bp, synthetic construct
  source 1..75: mol_type = other DNA
aaagagaaagcgccccgttgccggagcgcctttgtgaacgaatagcctactgcgccatattgcttactgtctacg

SEQ ID NO: 30370 - DNA, 75 bp, synthetic construct
  source 1..75: mol_type = other DNA
atgaacgtactaaaaaaacttatgcagcgtctgtgcggttgcggaaagcatgatgaccgtgaacacgggcagtcg

SEQ ID NO: 30371 - DNA, 75 bp, synthetic construct
  source 1..75: mol_type = other DNA
cgtgcaggtgaatattgggtataccttccggcatggaataacggactaaaactggcttatgaaagccgccctaaa

SEQ ID NO: 30372 - DNA, 75 bp, synthetic construct
  source 1..75: mol_type = other DNA
cctgtctggtcgcctcatcttttgaagcagacgccgatgatgccgatgacgccgccgaactggcggacgatgcgg

SEQ ID NO: 30373 - DNA, 75 bp, synthetic construct
  source 1..75: mol_type = other DNA
caccggaaacacccgcaactatttaccgtgggaggttctccaccttcgttactccacggatgacggttttatggg

SEQ ID NO: 30374 - DNA, 75 bp, synthetic construct
  source 1..75: mol_type = other DNA
tggccatccgtctgtgaccggaacggttacgcgtacggctgtccggaatttcagccgaatatcattcatccctga

SEQ ID NO: 30375 - DNA, 75 bp, synthetic construct
  source 1..75: mol_type = other DNA
atgaatccgtctgatgccattgaggcaattgaaaaaccactggcctccctgccttattcgctttcccgtcacatc

SEQ ID NO: 30376 - DNA, 75 bp, synthetic construct
  source 1..75: mol_type = other DNA
cgcacgcacgcgcgataaagaggggatagttttcgtgaggacagggagagaagcaggcgttctgataattgcaga

SEQ ID NO: 30377 - DNA, 75 bp, synthetic construct
  source 1..75: mol_type = other DNA
ttattcactccgcgtggtcgataaatccgaccaacacgcaaccagtacaccaccaccgttaacaacccttacctg

SEQ ID NO: 30378 - DNA, 75 bp, synthetic construct
  source 1..75: mol_type = other DNA
caccaccgtttacggcccttgccggcatacgctgcagtaccgcacatatcacggaaaaggacaacgcctggctgt

SEQ ID NO: 30379 - DNA, 75 bp, synthetic construct
  source 1..75: mol_type = other DNA
ataacagtgactgctctgtcttatttttcaccaatgaagacaaaagttatacagtcgaactcacgcattttttac

SEQ ID NO: 30380 - DNA, 75 bp, synthetic construct
  source 1..75: mol_type = other DNA
atgctgaaacagcaggatatgacagaaactgccagagcagtgtttaatgaattaagcgtcaccgaaccggcgaca

SEQ ID NO: 30381 - DNA, 75 bp, synthetic construct
  source 1..75: mol_type = other DNA
gagcgcggtaatagcccgtattgagtggatttttgaaacattttcatcaatatgcctgtctttttccggtggtaa

SEQ ID NO: 30382 - DNA, 75 bp, synthetic construct
  source 1..75: mol_type = other DNA
ggttgttgaccagaactacacggtggcagatgccgccaaagctatggatgttggcctttccacaatgacaagatg

SEQ ID NO: 30383 - DNA, 75 bp, synthetic construct
  source 1..75: mol_type = other DNA
cctggtggcctcgatacaggccaaaggcgcacgcctggccgtccctggcgtggtcgatctatccgacctggcggc

SEQ ID NO: 30384 - DNA, 75 bp, synthetic construct
  source 1..75: mol_type = other DNA
atattatatgtgaacaaaggttacgaactgaagacaaaagagatgaatacttgttgaatctgttagagaaagagc

SEQ ID NO: 30385 - DNA, 75 bp, synthetic construct
  source 1..75: mol_type = other DNA
aaatccttacaggtaaagttgttctgagcgcggtaatagcccgtattgagtggatttttgaaacattttcatcaa

SEQ ID NO: 30386 - DNA, 75 bp, synthetic construct
  source 1..75: mol_type = other DNA
cagcgcgagtattacgagggagttatctctgatgggtgcaagcgtattgctgaactggaagcgcgggaagttcaa

SEQ ID NO: 30387 - DNA, 75 bp, synthetic construct
  source 1..75: mol_type = other DNA
taaaggaagctacatcgtagggcatacatctgttaaccaacacggcaatttaacaggagtttttgtttgtcaaaa

SEQ ID NO: 30388 - DNA, 75 bp, synthetic construct
  source 1..75: mol_type = other DNA
acaatggacaataatttccgtctggtgaatgtgtatatcaccgacatgaaaatcacggaaatcccacagaaataa

SEQ ID NO: 30389 - DNA, 75 bp, synthetic construct
  source 1..75: mol_type = other DNA
gccggatggcatccctgatgagcaggataatgaccagggatgtaaagatattccctcctggcgtcgcatctgtaa

SEQ ID NO: 30390 - DNA, 75 bp, synthetic construct
  source 1..75: mol_type = other DNA
aaaaagcctgtcgggatgccttcagcgcgctgaaaaaagaaaacgtgggagaattcgctctccggggcgtctgcg

SEQ ID NO: 30391 - DNA, 75 bp, synthetic construct
  source 1..75: mol_type = other DNA
atgagtaaacagggagatgttcttgaaggtaatgataaaagcagaaagccaagatcagaaaaaaccattaagcaa

SEQ ID NO: 30392 - DNA, 75 bp, synthetic construct
  source 1..75: mol_type = other DNA
aagatttacgtgaactgtgcgatctcgacagcttaaaactggaatccgccagctttgtcgatgaaaaattgcggg

SEQ ID NO: 30393 - DNA, 75 bp, synthetic construct
  source 1..75: mol_type = other DNA
aagatcagaaaaaaccattaagcaaaaaatagcatcagcgcagatgcgtttgaatcgtctcaagactaaagagaa

SEQ ID NO: 30394 - DNA, 75 bp, synthetic construct
  source 1..75: mol_type = other DNA
gacggccggggcagaaaaacgccgtcgccggaaggaaaaactgcgcacagagcgtgcggaagataatccatggat

SEQ ID NO: 30395 - DNA, 75 bp, synthetic construct
  source 1..75: mol_type = other DNA
aggtggctaaagctgttggctgtaaagtagaagatgttgataaggagtttgtattaggcgtattaattcatttta

SEQ ID NO: 30396 - DNA, 75 bp, synthetic construct
  source 1..75: mol_type = other DNA
tcaatgtccaattacactggagcagcctgaaaaaggtatttttgtgaagaattcagatggttcagatgtatgtac

SEQ ID NO: 30397 - DNA, 75 bp, synthetic construct
  source 1..75: mol_type = other DNA
aatccaaaaccttccagcgaatgtatgtataacagaaaagcaatcgatgcctgggtcgcttcaatgaaaaacaaa

SEQ ID NO: 30398 - DNA, 75 bp, synthetic construct
  source 1..75: mol_type = other DNA
tgtcggcaaaaagtgaatggtttaaaaactatttacaacagcatccaggttttgaagatttttttattgccgttg

SEQ ID NO: 30399 - DNA, 75 bp, synthetic construct
  source 1..75: mol_type = other DNA
tgtggacaatccctgaaagccgcatgaaaatgcgacgtaaacatgtcgtaccactgtcacgacaggccactgaca

SEQ ID NO: 30400 - DNA, 75 bp, synthetic construct
  source 1..75: mol_type = other DNA
ttttgatgtactgcatgagagaatgctttattccaaaacactttcagaaaaaagtgatgaagaaattgttgcctt

SEQ ID NO: 30401 - DNA, 75 bp, synthetic construct
  source 1..75: mol_type = other DNA
atggcagtacggatttcaggtgtactgaaagatggcgcaggtaagccgatacaaaactgcaccattcagctaaag

SEQ ID NO: 30402 - DNA, 75 bp, synthetic construct
  source 1..75: mol_type = other DNA
caatcctggtctttattggcgttgatgtaggtaaagacacccattacgccgttgccgttaatcgttcaggtaaac

SEQ ID NO: 30403 - DNA, 75 bp, synthetic construct
  source 1..75: mol_type = other DNA
ggcgacgtgaacgggacctgacgggctggatgtcgctgtcacggaaaccgcaagtgacctggtacggctgggacg

SEQ ID NO: 30404 - DNA, 75 bp, synthetic construct
  source 1..75: mol_type = other DNA
tgtggggcttttgctcgatggcactctcaaatgtctcttttcacggctatttagtgcagccgcctaactgcacta

SEQ ID NO: 30405 - DNA, 75 bp, synthetic construct
  source 1..75: mol_type = other DNA
tcacagccgctaaactggagcatgaaggccaccagcttaccccggcagaggttcgggaaatggagcgcattattg

SEQ ID NO: 30406 - DNA, 75 bp, synthetic construct
  source 1..75: mol_type = other DNA
atggtcacgatttgtgttgacggtgaaaataagactcataaaattaccgactggacgctgtgggctggaaatgac

SEQ ID NO: 30407 - DNA, 75 bp, synthetic construct
  source 1..75: mol_type = other DNA
ccttgttggtcaatctggggatttatggggtagcgcaggcacaagagccgaccgatactcctgtttcacatgacg

SEQ ID NO: 30408 - DNA, 75 bp, synthetic construct
  source 1..75: mol_type = other DNA
catgatcctgcgtgcttcttacggcgtacgtggcgcactgtttcccggattattaagaggcggtattgctgccat

SEQ ID NO: 30409 - DNA, 75 bp, synthetic construct
  source 1..75: mol_type = other DNA
caatgataatcttctgttcaaatggctcaggctctcgctgatcaaagggcgtatatcacggcgtcttccggtaac

SEQ ID NO: 30410 - DNA, 75 bp, synthetic construct
  source 1..75: mol_type = other DNA
gattggttggcattgtctgtgacccgaagcgaggcagcctcactgtggtccaaggaggcgaaccatgaagaatga

SEQ ID NO: 30411 - DNA, 75 bp, synthetic construct
  source 1..75: mol_type = other DNA
gggatgctgttgaacgacagatgagtcatcaggaacgcaatggggtacgggctgcatatatccataaagctgagc

SEQ ID NO: 30412 - DNA, 75 bp, synthetic construct
  source 1..75: mol_type = other DNA
gctgcaaactgatgcgattcgactctacattcccggcgaatggatcagcgtctggcaggttgaactgcctgatgt

SEQ ID NO: 30413 - DNA, 75 bp, synthetic construct
  source 1..75: mol_type = other DNA
gtgagttccatccttgagatttttttcccgctttgcgccgctgatcccatccattggcagcgccgtacacccgat

SEQ ID NO: 30414 - DNA, 75 bp, synthetic construct
  source 1..75: mol_type = other DNA
ggttaacgctttccagtatgcaagccctaccgatgatgctaacgtcgtttatagtgtgcgctcactgctgccagg

SEQ ID NO: 30415 - DNA, 75 bp, synthetic construct
  source 1..75: mol_type = other DNA
gggtggccattgctgctctgctctcaggaagttgttttagcgccgccgccgcgcctcctgcgccgcccgtctcgt

SEQ ID NO: 30416 - DNA, 75 bp, synthetic construct
  source 1..75: mol_type = other DNA
cgaaaccactggcacgtggagaataagctgcactggcgtctggacgtggtaatgaatgaagacgactgcaaaata

SEQ ID NO: 30417 - DNA, 75 bp, synthetic construct
  source 1..75: mol_type = other DNA
aaggtgttatggactctcagggggagttgtgggttggtgactggaaatatgtaccgaaaaaagaggattgtaacg

SEQ ID NO: 30418 - DNA, 75 bp, synthetic construct
  source 1..75: mol_type = other DNA
ggggaaccagcttaatgaggagaacccgcatcacctgtaccagccgtaccgtttgccggggcagcagtatgatga

SEQ ID NO: 30419 - DNA, 75 bp, synthetic construct
  source 1..75: mol_type = other DNA
tgatcctcgatgccttagaaaaagaaggcagttttgcggcggcgtcggccaaactctacaagacgccgtccgctc

SEQ ID NO: 30420 - DNA, 75 bp, synthetic construct
  source 1..75: mol_type = other DNA
cgtgaattattcagcctgtttgagtatgcaccgacaattctgacgtcggtaaaaccagagcaatatctgcattaa

SEQ ID NO: 30421 - DNA, 75 bp, synthetic construct
  source 1..75: mol_type = other DNA
ccattttatccctgaataatactgctgactatatctatcacggcaacataaacgggaatctggacgtacttcagc

SEQ ID NO: 30422 - DNA, 75 bp, synthetic construct
  source 1..75: mol_type = other DNA
aaaccggagcatggaaagacgctgttgactgggtgctcaaagaggcctgccaggttgtaaacactggcatcaaag

SEQ ID NO: 30423 - DNA, 75 bp, synthetic construct
  source 1..75: mol_type = other DNA
atctgagaaagtcgctatcccaacatttgccgatgcagccaggcgtgtacatgcagaactgtctcctggatggga

SEQ ID NO: 30424 - DNA, 75 bp, synthetic construct
  source 1..75: mol_type = other DNA
gtgcccgacgtgcttatctttgcccatcgcagcgggatggccggtctttttcctggctttgaccgccgtctggtg

SEQ ID NO: 30425 - DNA, 75 bp, synthetic construct
  source 1..75: mol_type = other DNA
gactcgtaccctgaaggccactaaatcacaggcaaagccaacactgggtgagttcaccgaaactgaagcaggggt

SEQ ID NO: 30426 - DNA, 75 bp, synthetic construct
  source 1..75: mol_type = other DNA
gaagagccttacagaattaatacatatgcatttgacctagaggcaatactcatatcaggtaatggtagtcaggtt

SEQ ID NO: 30427 - DNA, 75 bp, synthetic construct
  source 1..75: mol_type = other DNA
acaaaaatgacaacaacgtttatgacagaacattccttgctggtaactacctgaaaatcggctggccgtcagtca

SEQ ID NO: 30428 - DNA, 75 bp, synthetic construct
  source 1..75: mol_type = other DNA
acattgctgcaaccaaaccattgataattacctttccggcgctggtaaccacccttcacgactcaatgcgaccgc

SEQ ID NO: 30429 - DNA, 75 bp, synthetic construct
  source 1..75: mol_type = other DNA
accggaaatatttatgctgatgatgcagcaaccattactctgggacagcctgaaactgaaacaccgactatatcg

SEQ ID NO: 30430 - DNA, 75 bp, synthetic construct
  source 1..75: mol_type = other DNA
tgtaaacgtagttaccgagaatagccagatggttgtaaaccacggcgtaggcttcaccgtacagatcaccgttca

SEQ ID NO: 30431 - DNA, 75 bp, synthetic construct
  source 1..75: mol_type = other DNA
catgatcctgcgtgcttcttacggtgtacgtggtgcactgtttcccggattattaaggggcggaattgccgccat

SEQ ID NO: 30432 - DNA, 75 bp, synthetic construct
  source 1..75: mol_type = other DNA
ttctctgttgtggtctttggtcgaccataagtttcgcagacgaagattacatcgaatatcgtggcatcagtagta

SEQ ID NO: 30433 - DNA, 75 bp, synthetic construct
  source 1..75: mol_type = other DNA
actatgcatcccacattccaaaaatatgctctatggcttatgacagataaaaccgcgccggacgcaggacaaatc

SEQ ID NO: 30434 - DNA, 75 bp, synthetic construct
  source 1..75: mol_type = other DNA
ccttgcgtgaggctgaagggctaagccaatcaaaattctgtgaaatcatagagttaccgctaagcacacttaaaa

SEQ ID NO: 30435 - DNA, 75 bp, synthetic construct
  source 1..75: mol_type = other DNA
atggtgcgcagaatacgatgaatggggcaacctgctgaatgaagagaacccgcatcagctgcagcagcttatccg

SEQ ID NO: 30436 - DNA, 75 bp, synthetic construct
  source 1..75: mol_type = other DNA
accgcagttacgcttcctgcaacggtttccgcaccgcccgtaacgcccgccgtcgtcaaatccgcattcagcact

SEQ ID NO: 30437 - DNA, 75 bp, synthetic construct
  source 1..75: mol_type = other DNA
ctaaggtataagcgtgggttctctgcaaaaaacttacgccaaatgaggcttttttacctcttttttcaacatgtt

SEQ ID NO: 30438 - DNA, 75 bp, synthetic construct
  source 1..75: mol_type = other DNA
cttcaaactcacagatgggcagggtatgcacctgctgatcaatcctaacggctcgaagtactggcgattacagta

SEQ ID NO: 30439 - DNA, 75 bp, synthetic construct
  source 1..75: mol_type = other DNA
tatgatcccaaagtttatgatgaatatcgtaagacgaagcgggcggggcggttgaacaatgaaaatcactcctga

SEQ ID NO: 30440 - DNA, 75 bp, synthetic construct
  source 1..75: mol_type = other DNA
cgaagccgccgattgctttgatcttgcaggtcgggattacaaaatagacccggatttactgagagcgatatcatg

SEQ ID NO: 30441 - DNA, 75 bp, synthetic construct
  source 1..75: mol_type = other DNA
gctgagtttgatcaggtggcatttctggctttccatcgttttgactgtgtgctggaagatgtggcagccatcaag

SEQ ID NO: 30442 - DNA, 75 bp, synthetic construct
  source 1..75: mol_type = other DNA
cgcaggaaattcgaaagaaaagctgaagcactagcatttgagcgatacacaatcgccaatgccagtcagaaagaa

SEQ ID NO: 30443 - DNA, 75 bp, synthetic construct
  source 1..75: mol_type = other DNA
gctattcaatgaccgtacagccagtacatgtctccacccgcacggcagcacggggaattctggagatggaactgt

SEQ ID NO: 30444 - DNA, 75 bp, synthetic construct
  source 1..75: mol_type = other DNA
cgttcatggagtgaaagtcaaataatgcaatcttatcatggcggaaagcaagatcttattagtgtggtattaagt

SEQ ID NO: 30445 - DNA, 75 bp, synthetic construct
  source 1..75: mol_type = other DNA
gcaggcgctatgtaccaatcgggtgcacaatcttgcctgggaagaagacgctcgctccggcgcatttgtggcgcg

SEQ ID NO: 30446 - DNA, 75 bp, synthetic construct
  source 1..75: mol_type = other DNA
tgccagcacaactattgaatgcggacgttatccggttgaaattttcatgatgggcgaagaagcaaaactggcagg

SEQ ID NO: 30447 - DNA, 75 bp, synthetic construct
  source 1..75: mol_type = other DNA
gtgatgtcgctgcacttgatgccagatactcgagggaattagccgatgcgagagctgaaaatgaaactctgcgtg

SEQ ID NO: 30448 - DNA, 75 bp, synthetic construct
  source 1..75: mol_type = other DNA
aataattgagccagttattgaattgtataacgacgtggtatgggctccgttcaacacactgcacaataaaattaa

SEQ ID NO: 30449 - DNA, 75 bp, synthetic construct
  source 1..75: mol_type = other DNA
gccggaaacccggtgagcgttacgcatccggtgactgtcgatctcactgcggtggcggtcagcatcaacgccatt

SEQ ID NO: 30450 - DNA, 75 bp, synthetic construct
  source 1..75: mol_type = other DNA
cccgtttgagaaccttcgccgcaaggggcatcactgccacggccggaaacgactgtccgggggcagaccgcaaaa

SEQ ID NO: 30451 - DNA, 75 bp, synthetic construct
  source 1..75: mol_type = other DNA
tctcccagagcatttttggagtttttggctaagatatttaccctgggttatgtggattttagcaaacgctccaac

SEQ ID NO: 30452 - DNA, 75 bp, synthetic construct
  source 1..75: mol_type = other DNA
accattaacggaggaagacagacaattcatgacgggggcatttccaccggtacgataatcgacagtggcaatcag

SEQ ID NO: 30453 - DNA, 75 bp, synthetic construct
  source 1..75: mol_type = other DNA
ctcgataaggcgctgaaggcacagaaaaataacgacgaagcaaccgccatccgcgaatttgaatatatacaccag

SEQ ID NO: 30454 - DNA, 75 bp, synthetic construct
  source 1..75: mol_type = other DNA
agtggctaaaacctcggcgaaaaatactaccattgatactggcggtaagctgattgtccagaaggaggctaaaac

SEQ ID NO: 30455 - DNA, 75 bp, synthetic construct
  source 1..75: mol_type = other DNA
gatccggtccctgaacaggatctattcgaggcactaaatgaaaccttgaagctatggaactcgcagcccgactgg

SEQ ID NO: 30456 - DNA, 75 bp, synthetic construct
  source 1..75: mol_type = other DNA
ccgtcaggagccggacggtctgccgccggtggagtggctgacgtatggcagcggttatcttgcggggatgaagct

SEQ ID NO: 30457 - DNA, 75 bp, synthetic construct
  source 1..75: mol_type = other DNA
atgagccggaaaatatttgtactttttgccctgactgcaggaatgcatatcactgttcatgcctcagacaatgtg

SEQ ID NO: 30458 - DNA, 75 bp, synthetic construct
  source 1..75: mol_type = other DNA
atggcactgacgaaaaaacaacgtgcagaactgcgcatgaagttcggtggtcgctgcgcttattgcggctgcgaa

SEQ ID NO: 30459 - DNA, 75 bp, synthetic construct
  source 1..75: mol_type = other DNA
ctgcccgacccggagctgcacccggacagcaccctcagcatgtggccggataaccgtatcgcccgtgacgcgcac

SEQ ID NO: 30460 - DNA, 75 bp, synthetic construct
  source 1..75: mol_type = other DNA
gctgaacccggaacaaccgcatcagctcactgcacgagatatctggctacttaccgatctgactgaagattcaac

SEQ ID NO: 30461 - DNA, 75 bp, synthetic construct
  source 1..75: mol_type = other DNA
ctgccgttgctggcgcatcatgttcgcctaacggccttgtaggccgcgataatacaggggcaatactttcgtgcc

SEQ ID NO: 30462 - DNA, 75 bp, synthetic construct
  source 1..75: mol_type = other DNA
aaagccactggtatcatgaaacgcaatccagtactacggagtatgacgttctgcctctggtcccggaagccgcaa

SEQ ID NO: 30463 - DNA, 75 bp, synthetic construct
  source 1..75: mol_type = other DNA
tgataaccgttaccgccagggcaatcgtagccaacgacagtacctgaatatgcaaaatggtgctaattttggccc

SEQ ID NO: 30464 - DNA, 75 bp, synthetic construct
  source 1..75: mol_type = other DNA
ggacgtttatcgatacataaggcagaattccgtactcttacccattctcgtcagatgaacaatggcacgacccat

SEQ ID NO: 30465 - DNA, 75 bp, synthetic construct
  source 1..75: mol_type = other DNA
gctccgtaacgatttattcgccaggctggacgtcagcgacacgctccggcgcatggatgaagacgtgcgggcaaa

SEQ ID NO: 30466 - DNA, 75 bp, synthetic construct
  source 1..75: mol_type = other DNA
gttcagcgcaacttgcagatcccgttgaagggtattgccgatgaacggcggcggcgcggcgaaacggaagtcaat

SEQ ID NO: 30467 - DNA, 75 bp, synthetic construct
  source 1..75: mol_type = other DNA
ctggcccaggagaaaaatctggcggcgttccgtggttactcctgtgataccgcaaccaaactctcactgcgttgc

SEQ ID NO: 30468 - DNA, 75 bp, synthetic construct
  source 1..75: mol_type = other DNA
aaccgttccgcattcgtgttattgagccagtaaaacgtaccactcgcgcttatcgtgaagaggcaattattaaat

SEQ ID NO: 30469 - DNA, 75 bp, synthetic construct
  source 1..75: mol_type = other DNA
atgtatggcgcagcactgtaagtaaagcgaattaccgcttttttatggttcgcatttcaggaaatccgggaagcc

SEQ ID NO: 30470 - DNA, 75 bp, synthetic construct
  source 1..75: mol_type = other DNA
agccgcagcaaggggtaaaactggaaggcgcatccagcaatttcatctcgccgcagccgggtaacatttatattc

SEQ ID NO: 30471 - DNA, 75 bp, synthetic construct
  source 1..75: mol_type = other DNA
tgcgcgatgattgcctggttcgttcgtgaccttctggactttatcggcctgagcagcaacctcgcctacatagcc

SEQ ID NO: 30472 - DNA, 75 bp, synthetic construct
  source 1..75: mol_type = other DNA
caccccgaaagcggtgaaagcggcaatggacaaagcggacggatgcctggagaaagcgaaaaacggtgacgatat

SEQ ID NO: 30473 - DNA, 75 bp, synthetic construct
  source 1..75: mol_type = other DNA
ttactgggatattcgtttagcggggctaacagtattcatagcagcgcagacagtgattctggcgacagctatttt

SEQ ID NO: 30474 - DNA, 75 bp, synthetic construct
  source 1..75: mol_type = other DNA
agatggctctccttagatgacaaaagaacggcttttgttccagaccccgacagggtgaaaactattgagctaatt

SEQ ID NO: 30475 - DNA, 75 bp, synthetic construct
  source 1..75: mol_type = other DNA
tcagtggttttaccggcacggcaggcagtctgacaatgaatgtggccggtaccctgctgaacagtgcgctgattt

SEQ ID NO: 30476 - DNA, 75 bp, synthetic construct
  source 1..75: mol_type = other DNA
tgcagaggaagcccggcgcatggctgagaatgcgcggggacctcagggcgaccaggggcccaaaggtgataccgg

SEQ ID NO: 30477 - DNA, 75 bp, synthetic construct
  source 1..75: mol_type = other DNA
gcatattagtccagatgttgacatcaaacagctacgagatgacatccccagatatattatggctgccagcgtcat

SEQ ID NO: 30478 - DNA, 75 bp, synthetic construct
  source 1..75: mol_type = other DNA
aatagcgccacgtcaatgacggtaacgcctgctgcatcaccggcgctgagcggccagaagtacggcattctggta

SEQ ID NO: 30479 - DNA, 75 bp, synthetic construct
  source 1..75: mol_type = other DNA
gcgatggcgataagttgccgcatcgtcatgtctttaacggcatgggttacgatggcgataatatttcaccgcatc

SEQ ID NO: 30480 - DNA, 75 bp, synthetic construct
  source 1..75: mol_type = other DNA
gaagccgttacaaggattcgcacggggctgtagtgaccgtacagcgcgtcgagcataaccgagtgaccttttacc

SEQ ID NO: 30481 - DNA, 75 bp, synthetic construct
  source 1..75: mol_type = other DNA
gcttttacaacctggaagaaatagatcgctggattgaacgccaggcatcagcaagaccaaggcgtcatcttactt

SEQ ID NO: 30482 - DNA, 75 bp, synthetic construct
  source 1..75: mol_type = other DNA
agtgcagagaaaatcggccagttttctctgcctgcagtccgcatgccgtatcgggccttgggttctaacctgttg

SEQ ID NO: 30483 - DNA, 75 bp, synthetic construct
  source 1..75: mol_type = other DNA
atcaacaacggacgaagttttgcacaaatatctcaggattttatgcttcaattatcttcaaatataggatggaaa

SEQ ID NO: 30484 - DNA, 75 bp, synthetic construct
  source 1..75: mol_type = other DNA
atgtttctgataattctcacgcctctggtgggcgtgctgggtgtgcttttgctggcgtatggcgcctggctgatt

SEQ ID NO: 30485 - DNA, 75 bp, synthetic construct
  source 1..75: mol_type = other DNA
gaataaatattcgccgactgaagaacggattttctaccgttcacccgttacgttttgatgagcgtgaagccgtgg

SEQ ID NO: 30486 - DNA, 75 bp, synthetic construct
  source 1..75: mol_type = other DNA
gacacgaaaactgaaatctgcgggcatggactcagggcaatggcctgtagcgccctggtggagtcggacctgtgg

SEQ ID NO: 30487 - DNA, 75 bp, synthetic construct
  source 1..75: mol_type = other DNA
atgacagattcaataaatgccaatgttgtagtgagtatgccttcgcaactcttcactatggcgcgttcttttaaa

SEQ ID NO: 30488 - DNA, 75 bp, synthetic construct
  source 1..75: mol_type = other DNA
aaccggctttgacggccgcacacagcgttatcaccacgacctgaccggcaaacttatccgcagcgaggatgaggg

SEQ ID NO: 30489 - DNA, 75 bp, synthetic construct
  source 1..75: mol_type = other DNA
acacaccgctggtggagtacacccgcgaccgcctgcaccgggaaacgctgcgcagcttcggccgttatgaactca

SEQ ID NO: 30490 - DNA, 75 bp, synthetic construct
  source 1..75: mol_type = other DNA
cgggtgatgggttacgacacgaaaaaggatatctgcggtcacggcttccgggcaatggcatgcagtgcgctgatg

SEQ ID NO: 30491 - DNA, 75 bp, synthetic construct
  source 1..75: mol_type = other DNA
gaccagacagttcaattggggcaagttcgagcggcaaaattagatgctgacggaaaaatgagttcacctgttggt

SEQ ID NO: 30492 - DNA, 75 bp, synthetic construct
  source 1..75: mol_type = other DNA
cccgacctggcgctcaattgttggcggttaccagcggcggcaccattccggatcgtggcatgtatagcgtgttat

SEQ ID NO: 30493 - DNA, 75 bp, synthetic construct
  source 1..75: mol_type = other DNA
taacgaatggcatccgcatagtgcgttgggttatcgctctccgcgagaatatcgacgtcagcgggtaatgttaac

SEQ ID NO: 30494 - DNA, 75 bp, synthetic construct
  source 1..75: mol_type = other DNA
ggtcaatctcctcgatatcaccagtgttgatgcacagaatcagcagcaggtgaaggatgcgatggtaaactatgc

SEQ ID NO: 30495 - DNA, 75 bp, synthetic construct
  source 1..75: mol_type = other DNA
tcgcgctgttattactgattattcttgtgccgttgacgctgctgatgacgctcgggctgtgggttcccacgctgg

SEQ ID NO: 30496 - DNA, 75 bp, synthetic construct
  source 1..75: mol_type = other DNA
caaaaccggggtgtccgacagtctcgcggccctgacccttgccactgttgccgcactgctgacgggaggtggcgc

SEQ ID NO: 30497 - DNA, 75 bp, synthetic construct
  source 1..75: mol_type = other DNA
aatgcagctagagatggaacaagcgtggcacatcaagcaggctcaagggctggagatatcgctgggaaagtgaga

SEQ ID NO: 30498 - DNA, 75 bp, synthetic construct
  source 1..75: mol_type = other DNA
tatatcactcaggatccgattgggctgaaggggggatggaatttttatcagtatccgttgaatccagttacgaat

SEQ ID NO: 30499 - DNA, 75 bp, synthetic construct
  source 1..75: mol_type = other DNA
gttgaaaaagcgttggaggatttagccaaccaatccctccgacacgaaatttcttgccgaatatcaaagtgcatt

SEQ ID NO: 30500 - DNA, 75 bp, synthetic construct
  source 1..75: mol_type = other DNA
atgcgtaaatatcctttaagtttactgaaggataaaaatattgtgactttttttgatttctggggaaaaacccga

SEQ ID NO: 30501 - DNA, 75 bp, synthetic construct
  source 1..75: mol_type = other DNA
ttgcaattttacggcgtaacccgctgattcagcagaacgaaattgcggacatgctgcaaatcagccgttcgcgcg

SEQ ID NO: 30502 - DNA, 75 bp, synthetic construct
  source 1..75: mol_type = other DNA
ccgtgttattcggattaaaaatactttgtgctgaaacattcccaggtttcaatcttgaagattacgatgatcttg

SEQ ID NO: 30503 - DNA, 75 bp, synthetic construct
  source 1..75: mol_type = other DNA
agcacaggaggaggctgaacgaatccgtcgcgaggctgaagcaaaagagcaagccagaatagcagaagaaaaaag

SEQ ID NO: 30504 - DNA, 75 bp, synthetic construct
  source 1..75: mol_type = other DNA
atgactaaaaatactcgtttttcccccgaagtccgtcaacgggcgattcatatggttctggaaagtcagggcgaa

SEQ ID NO: 30505 - DNA, 75 bp, synthetic construct
  source 1..75: mol_type = other DNA
gatcatggccctggatgaggcaaaaggggcagaagcgcaggctgaaaaactggcggcctgcccgggaatgaccgt

SEQ ID NO: 30506 - DNA, 75 bp, synthetic construct
  source 1..75: mol_type = other DNA
cttttctgccagtgcagccccggcaggaatggagaggtgtgtggggccggagaatatgccgatctggagagatgc

SEQ ID NO: 30507 - DNA, 75 bp, synthetic construct
  source 1..75: mol_type = other DNA
gcagaaacaccacgcggtcattctggtgtcgcctgctgtggtacagggggcaccggatatcacccgggaaatcca

SEQ ID NO: 30508 - DNA, 75 bp, synthetic construct
  source 1..75: mol_type = other DNA
gtacttcatcgccttttttgtcgtcgtgttgatatatgcagtggcaattaccaactcacttacggaacagctggc

SEQ ID NO: 30509 - DNA, 75 bp, synthetic construct
  source 1..75: mol_type = other DNA
tagttgaaggtggaaatagggctttcgaatgtaaaaaagaagaaatcgaaattattggaaaaattataagcataa

SEQ ID NO: 30510 - DNA, 75 bp, synthetic construct
  source 1..75: mol_type = other DNA
gaatttcttttgtcgatcgtagcgaagttttaacccatatcggtaatgagatgctcgccaaaggtgtggttcatg

SEQ ID NO: 30511 - DNA, 75 bp, synthetic construct
  source 1..75: mol_type = other DNA
agcataataagctttttctgcttctgccggaggagtatggcccagcctttccagcaatcgtcgattgttatacca

SEQ ID NO: 30512 - DNA, 75 bp, synthetic construct
  source 1..75: mol_type = other DNA
cagcttaatgaggagaacccgcatcacctgcaccagccgtaccggctgccggggcagcagtatgataaggagtcg

SEQ ID NO: 30513 - DNA, 75 bp, synthetic construct
  source 1..75: mol_type = other DNA
gattctttagaaacatgtaagatgaagtgctccggaaataacattggacgttttattagatttgtattcaccgga

SEQ ID NO: 30514 - DNA, 75 bp, synthetic construct
  source 1..75: mol_type = other DNA
gttgttgccacttgcgtgacggacaataacggtgcttatgtgattgaggctgagccggggtattacgaggttgcg

SEQ ID NO: 30515 - DNA, 75 bp, synthetic construct
  source 1..75: mol_type = other DNA
ggtcagccggctaaacgtcaggcagtgacgaacccgcaaaacactctgtttgcgattaaacgcctgattggtcgc

SEQ ID NO: 30516 - DNA, 75 bp, synthetic construct
  source 1..75: mol_type = other DNA
ttccagttcgaaagactttcacagatattgtaagttattgtactgatccgtttgcctctgtagaaaacaaggttt

SEQ ID NO: 30517 - DNA, 75 bp, synthetic construct
  source 1..75: mol_type = other DNA
atcctcctttaacattattggcagaggagccgctgatacccggtattgcgcgttttgagcaactttgccagttac

SEQ ID NO: 30518 - DNA, 75 bp, synthetic construct
  source 1..75: mol_type = other DNA
tatcatcaatatctttgtgtcccagatggtaaaggggactatacttgtggtggccaagaccaacggggagaatca

SEQ ID NO: 30519 - DNA, 75 bp, synthetic construct
  source 1..75: mol_type = other DNA
ggcggtgatgcttatactgttaacgtagatagcggagctgttaaagatactacagggaatgatatttttgttagt

SEQ ID NO: 30520 - DNA, 75 bp, synthetic construct
  source 1..75: mol_type = other DNA
gtcctggcatttggtaagcaggccgacgcgctggcgagacatgaaaaaggcgaccttatcagcgtggcgggtaac

SEQ ID NO: 30521 - DNA, 75 bp, synthetic construct
  source 1..75: mol_type = other DNA
gtcctggcatttggcagacaggccgaagcactggaaaggcaccgcaagggtgaactcctgagcgtggcgggtaac

SEQ ID NO: 30522 - DNA, 75 bp, synthetic construct
  source 1..75: mol_type = other DNA
gtcatcgtaaaccaggataaaactattgattttggcaaagagaaccagagcatcgattaccgtattacggtgact

SEQ ID NO: 30523 - DNA, 75 bp, synthetic construct
  source 1..75: mol_type = other DNA
tggcgcaaaaatgcgtactccgcatatcgtaccgctctcccgccaggcgattgcccttctgaaacagatacagga

SEQ ID NO: 30524 - DNA, 75 bp, synthetic construct
  source 1..75: mol_type = other DNA
gtgactatcagcagggccgggagttaacccggctggcggaggtgctgacactgcacctgttcatccgttccagcg

SEQ ID NO: 30525 - DNA, 75 bp, synthetic construct
  source 1..75: mol_type = other DNA
cagggatggaagcccgccagggcggagacagcttcgctggctccgttcacgacagcccgccccgccagggggacg

SEQ ID NO: 30526 - DNA, 75 bp, synthetic construct
  source 1..75: mol_type = other DNA
ctcgatggtgaatgggtgctgccgggagaggctatcaactgccgttgtacgtggtctcctgttatccctgggata

SEQ ID NO: 30527 - DNA, 75 bp, synthetic construct
  source 1..75: mol_type = other DNA
ccgcagtcaccaacctgaacaacaccactaccaacctgtccgaagcgcagtcccgtattcaggacgccgactatg

SEQ ID NO: 30528 - DNA, 75 bp, synthetic construct
  source 1..75: mol_type = other DNA
tttatttacattggataacgctgcttttcgttgcaataacctatgccgcgatggaactccgtggctggtttccta

SEQ ID NO: 30529 - DNA, 75 bp, synthetic construct
  source 1..75: mol_type = other DNA
accagaacatcgtcgacaaaatcgagtatctgaactgctcacgcgagttttttacccgcaatttcataccgggta

SEQ ID NO: 30530 - DNA, 75 bp, synthetic construct
  source 1..75: mol_type = other DNA
cctgatgcaggccattgcggcggaaggtgatgtcaccacaccagtggcggtgaccggtaatgagggtaaggcggt

SEQ ID NO: 30531 - DNA, 75 bp, synthetic construct
  source 1..75: mol_type = other DNA
gacaccacacgtatccagacggtatacgagccgggaagcttcacgccgctcatccgggtcgagacagagaacggc

SEQ ID NO: 30532 - DNA, 75 bp, synthetic construct
  source 1..75: mol_type = other DNA
tatgggatggttgcgctgcatcaggcatgaagttatccagcgtggcaattatggcccgcctggctgatttcagta

SEQ ID NO: 30533 - DNA, 75 bp, synthetic construct
  source 1..75: mol_type = other DNA
taccgtctccgaagtggaatcgacaagataaccgctcaggtcaactacctgcaggagtacatcaggacgcagtgc

SEQ ID NO: 30534 - DNA, 75 bp, synthetic construct
  source 1..75: mol_type = other DNA
cgcacctacagcagctaccggacccggacgcctgcgccggtggggatttttggccccggctggaaagcgccttct

SEQ ID NO: 30535 - DNA, 75 bp, synthetic construct
  source 1..75: mol_type = other DNA
gccgcagcgagtcaatgtggctggtgcgcggtggtaaggcagcgcagccggacggccacacgctggcgtggctgt

SEQ ID NO: 30536 - DNA, 75 bp, synthetic construct
  source 1..75: mol_type = other DNA
cacttaatcctcaaagcaaagcatacgcctgagtatgtaatgactgacgcaggagaaattctggtaggcagaggg

SEQ ID NO: 30537 - DNA, 75 bp, synthetic construct
  source 1..75: mol_type = other DNA
tgggcgatggagaaagcccaagacttacagcagatgctgaactcaattattaccgtctccgaagtggaatcgaca

SEQ ID NO: 30538 - DNA, 75 bp, synthetic construct
  source 1..75: mol_type = other DNA
ccggaacgctatctgcatcatgtacttgatgtcatcgccgactggcctgtgaaccgggtgggtgctctgctcccg

SEQ ID NO: 30539 - DNA, 75 bp, synthetic construct
  source 1..75: mol_type = other DNA
ctatatgacgccgcaggagttctgggagctggtggtcacctgtctgtgcctgaggggaaacttttacgcctacaa

SEQ ID NO: 30540 - DNA, 75 bp, synthetic construct
  source 1..75: mol_type = other DNA
accgctatgaaaaaggcggggaagatggcatcacaatgatatttatagcgccttccccctcagttcaggacaaac

SEQ ID NO: 30541 - DNA, 75 bp, synthetic construct
  source 1..75: mol_type = other DNA
tggtcttcgggccagcaaaagtcgttcaacagggagaattctggttctgagcctgctggcaacgttgagcactat

SEQ ID NO: 30542 - DNA, 75 bp, synthetic construct
  source 1..75: mol_type = other DNA
agctgaagaactgcctgctgttactgccctggctatttcccacaacacaaagctgctcgacccgctggagattcg

SEQ ID NO: 30543 - DNA, 75 bp, synthetic construct
  source 1..75: mol_type = other DNA
tctcaacaatcattgtagcggtagttgcggttcttgccggatggtggctgtggaattattacatgcaatctccgt

SEQ ID NO: 30544 - DNA, 75 bp, synthetic construct
  source 1..75: mol_type = other DNA
gaaattggcgggcatccgtcgttgttgttgccacatgtggcgattagtcttgaccgtactgaaggtgccacgctg

SEQ ID NO: 30545 - DNA, 75 bp, synthetic construct
  source 1..75: mol_type = other DNA
ctaatgaacttccccacttcctcaatgatctggcgggttataccggaagtattatcactaagacagccactcaaa

SEQ ID NO: 30546 - DNA, 75 bp, synthetic construct
  source 1..75: mol_type = other DNA
atgggacttgaaatgattatcggcctggctgttgctgtgctggctgcaattgcaggtgcttttggtctgggtaaa

SEQ ID NO: 30547 - DNA, 75 bp, synthetic construct
  source 1..75: mol_type = other DNA
ttctgcaagagttcggtacaacggttcatttgtcattgcctggtagcgtatccgagaaagaacgactgctactca

SEQ ID NO: 30548 - DNA, 75 bp, synthetic construct
  source 1..75: mol_type = other DNA
gagatagcactggatcgtgttccggcgaacgtcagtaaaattgcgatcaccgttgtcattgatggtgaagatacc

SEQ ID NO: 30549 - DNA, 75 bp, synthetic construct
  source 1..75: mol_type = other DNA
ccgccagcgctgtggagaggtgttccgctatgcaattgttactggtcgggctaactacaaccctgctcccgatct

SEQ ID NO: 30550 - DNA, 75 bp, synthetic construct
  source 1..75: mol_type = other DNA
gcgatgatgcgcaagctggcacaggtggcgtatggagtgctgaagtcaggcgtgccgttcgatgcgtcacggcat

SEQ ID NO: 30551 - DNA, 75 bp, synthetic construct
  source 1..75: mol_type = other DNA
caaggcgtcgcctgtaaacacgtgatccactcaatgacgcggttacagtccgccagttggcaaatgagtattgct

SEQ ID NO: 30552 - DNA, 75 bp, synthetic construct
  source 1..75: mol_type = other DNA
tatgatgaggagtccggcctgtattacaaccgccaccgctattatgacccgctgcaggggaggtatatcactcag

SEQ ID NO: 30553 - DNA, 75 bp, synthetic construct
  source 1..75: mol_type = other DNA
aaaacagaatccgagggacttacaatcatgctcaatatcttgaacatagaaaaaaaatgatgcaatggtattcag

SEQ ID NO: 30554 - DNA, 75 bp, synthetic construct
  source 1..75: mol_type = other DNA
ttgggggaaggctctgcattgcctgttggtgtaccggttccatggcccaccgccacaccgccagcaggctggtta

SEQ ID NO: 30555 - DNA, 75 bp, synthetic construct
  source 1..75: mol_type = other DNA
ctgcattcagacaatggcctgggtattccagcaataaccaggagtaaaaacgttgctgatagttggttatcaaag

SEQ ID NO: 30556 - DNA, 75 bp, synthetic construct
  source 1..75: mol_type = other DNA
ccgccctcacctgggatcagaaacagattgatgccgccacggcttatatgaaaaacaccgccagaccgtcagcgg

SEQ ID NO: 30557 - DNA, 75 bp, synthetic construct
  source 1..75: mol_type = other DNA
tttcgtgtcggaaactggtgataaagctgatatatttaataaaattaaatctctcgccgatcaagatcaacaatg

SEQ ID NO: 30558 - DNA, 75 bp, synthetic construct
  source 1..75: mol_type = other DNA
atgtctgatatcacagtctcccgtccggaagttgtcaactggcatacggacgttatctgctcaaccagtatcctc

SEQ ID NO: 30559 - DNA, 75 bp, synthetic construct
  source 1..75: mol_type = other DNA
acgctcaggctcgtgctgaatggtacaacagtctggaaaaggatgatattccggcggtcagcgaagagaatatcc

SEQ ID NO: 30560 - DNA, 75 bp, synthetic construct
  source 1..75: mol_type = other DNA
atgacagaaagtattggcggtaaaaccgccccggcctgggccatgaaacaggattttcgctgcggctgctggctg

SEQ ID NO: 30561 - DNA, 75 bp, synthetic construct
  source 1..75: mol_type = other DNA
atccttcatggcctatgactcccatcaacgggaactgcaagattatcggtgttgtcgtagaagcgagggtaaaat

SEQ ID NO: 30562 - DNA, 75 bp, synthetic construct
  source 1..75: mol_type = other DNA
cccccggtgctgagccggttaagtggtataaaaacacttatggtggcaggttcgctgtataccgaattgcagact

SEQ ID NO: 30563 - DNA, 75 bp, synthetic construct
  source 1..75: mol_type = other DNA
ccgggaaagtgggcagtagaacaggcggcattaggcgttcataaagtgatgtcttacagtgatgccggtagcgcc

SEQ ID NO: 30564 - DNA, 75 bp, synthetic construct
  source 1..75: mol_type = other DNA
aaaaagcggctttcgtggtttttccagcgtagcgactgccgcaaatcctgtatcgggctgttatgttgctatagg

SEQ ID NO: 30565 - DNA, 75 bp, synthetic construct
  source 1..75: mol_type = other DNA
ttgcgttccggcagtacccgtccgtggtgggaagttcccccgtcaacggtttactccttcgccttttatatcttc

SEQ ID NO: 30566 - DNA, 75 bp, synthetic construct
  source 1..75: mol_type = other DNA
ggcaggcgctacaagccgcacgtcgtattcaggcacaaacttacttcatcgatttgccttgctgggcgcagagtg

SEQ ID NO: 30567 - DNA, 75 bp, synthetic construct
  source 1..75: mol_type = other DNA
atggtggtcgttcaggcacctacgctaagccagaaagattcctcggtatcgttaagtacccaaacattgaacgcg

SEQ ID NO: 30568 - DNA, 75 bp, synthetic construct
  source 1..75: mol_type = other DNA
tgaccggctggagagggacagggggtggactgcatcacaactgaatgaagtacagattgtggttgatgagatccg

SEQ ID NO: 30569 - DNA, 75 bp, synthetic construct
  source 1..75: mol_type = other DNA
ctctccggcaatcctatcgaggtgacggtagaactgagagatgaaaatgacaaacctgttaaggagcaaaaacag

SEQ ID NO: 30570 - DNA, 75 bp, synthetic construct
  source 1..75: mol_type = other DNA
cgtgacggtgatgaagcactggcaataaagcaacagacggatccggttattgagttttgccagttcctgaatttt

SEQ ID NO: 30571 - DNA, 75 bp, synthetic construct
  source 1..75: mol_type = other DNA
atgtgggatagcgaaagaaaagatattgatgcccctgggtattatcggactgagcatttagtgttcgctgagagt

SEQ ID NO: 30572 - DNA, 75 bp, synthetic construct
  source 1..75: mol_type = other DNA
attgatatgccgcaaaacccggcgctcaggctgcaaattatggtggcgtgctattcggctatccagaagtgggag

SEQ ID NO: 30573 - DNA, 75 bp, synthetic construct
  source 1..75: mol_type = other DNA
tgccttttcgtctgcttttaacccggacgccacagctgattgttacacttcgggaagcatgggatatcagccaga

SEQ ID NO: 30574 - DNA, 75 bp, synthetic construct
  source 1..75: mol_type = other DNA
caaacttccccgctatgtcgtgaagcttcacgaagatgatttttttgacgaagaagacgcagaagttctgcgctt

SEQ ID NO: 30575 - DNA, 75 bp, synthetic construct
  source 1..75: mol_type = other DNA
tcacgccaaaatgctggaaaccgatcaggcgtgggaagtgttcgaaaaactggaagactgttatttcagccaaaa

SEQ ID NO: 30576 - DNA, 75 bp, synthetic construct
  source 1..75: mol_type = other DNA
cggtttatccccgctggcgcggggaacacctcaccgcttttgacgccagggaaatcggcggcggtttatccccgc

SEQ ID NO: 30577 - DNA, 75 bp, synthetic construct
  source 1..75: mol_type = other DNA
ggaaaacacttttttaagatcgaaggtgaagagttacgtgaattgaagcacagaccatctttaagtgggtctgtg

SEQ ID NO: 30578 - DNA, 75 bp, synthetic construct
  source 1..75: mol_type = other DNA
atgcaaactaagcttctggcaattatgcttgcagcacctgtggtattcagttctcaggaagcttctgcttctgat

SEQ ID NO: 30579 - DNA, 75 bp, synthetic construct
  source 1..75: mol_type = other DNA
gggccattgccctgatggacagcaaaaagatgtggcggagcaattatgcccctcctcttctgcgtattctatggc

SEQ ID NO: 30580 - DNA, 75 bp, synthetic construct
  source 1..75: mol_type = other DNA
gtatggatgttgttcagcgctgttgcggtgaacttaccgaaagtcggttttaattttacgaccgatcagctattt

SEQ ID NO: 30581 - DNA, 75 bp, synthetic construct
  source 1..75: mol_type = other DNA
tgcgtggagatgtcgcctctcgccgccggatgatcgagagtaacttgcgtctggtggtaaaaattgcccgccgtt

SEQ ID NO: 30582 - DNA, 75 bp, synthetic construct
  source 1..75: mol_type = other DNA
gtgaacgccataatgccctgcacgatgcgcgttaccaggcaaaatacgtttcagctatctggcaaaaactgttcc

SEQ ID NO: 30583 - DNA, 75 bp, synthetic construct
  source 1..75: mol_type = other DNA
accggtggcagggctgatgtcagtatgcataatgcactgtggactctgggtggggactctgccatccacagtctt

SEQ ID NO: 30584 - DNA, 75 bp, synthetic construct
  source 1..75: mol_type = other DNA
ctacaaaatggccgacggcggcggtttgtatctcgagatttcgcctaaggggtcaaaatactggcgcatgaaata

SEQ ID NO: 30585 - DNA, 75 bp, synthetic construct
  source 1..75: mol_type = other DNA
aatggttcaatggtgggctgattatttagatatgaataaagttaatcctttgactccttatgagtttgcacaaaa

SEQ ID NO: 30586 - DNA, 75 bp, synthetic construct
  source 1..75: mol_type = other DNA
aagtcgtacaaaaagaagctcgggccgagaattcgggggcatatacttttgaagctatcgcccgagaatggcatg

SEQ ID NO: 30587 - DNA, 75 bp, synthetic construct
  source 1..75: mol_type = other DNA
actgtgcagagtggcttaatcgactataaccctgcgcaagagattgccggtgcgattgctacggcgaaaagaaag

SEQ ID NO: 30588 - DNA, 75 bp, synthetic construct
  source 1..75: mol_type = other DNA
gttcggtaaagcctgaagcaaaagcctacaaactgactgatggtgatggcatggttttgctggttcaccctaacg

SEQ ID NO: 30589 - DNA, 75 bp, synthetic construct
  source 1..75: mol_type = other DNA
gcttccggtgcaaatgccggtggcgggaacaaaaccgatcgcaatccgaatttagtacacaccttcgatacgctg

SEQ ID NO: 30590 - DNA, 75 bp, synthetic construct
  source 1..75: mol_type = other DNA
aactaccctgtacttactgaatatccagcgaagacacatgaacaggaaatagctgaagcggagggaatgaaaaat

SEQ ID NO: 30591 - DNA, 75 bp, synthetic construct
  source 1..75: mol_type = other DNA
cgcccactatggcattctgctggcgctgtatgcgttgatgcaatttgcctgcgcacctgtgctgggcgcgctgtc

SEQ ID NO: 30592 - DNA, 75 bp, synthetic construct
  source 1..75: mol_type = other DNA
atcatgatagacggttgtgtggctcggttgcgaaagtataaacccgaagagtatgagttgatcattgctcacttt

SEQ ID NO: 30593 - DNA, 75 bp, synthetic construct
  source 1..75: mol_type = other DNA
accgctggggagcatgggcagcagcagataacagcggtgtggactggcagccgatagcggctggtttcaaggggc

SEQ ID NO: 30594 - DNA, 75 bp, synthetic construct
  source 1..75: mol_type = other DNA
atgcgtgatatgtatgaagtgatggatcgttggggggcttgggctgcttcagacaatagcggagtggactggcaa

SEQ ID NO: 30595 - DNA, 75 bp, synthetic construct
  source 1..75: mol_type = other DNA
tcgcttgccgcatttggcattctgcattcactcgcccaggcaatgatcaccggccctgtagccgcccggctcggc

SEQ ID NO: 30596 - DNA, 75 bp, synthetic construct
  source 1..75: mol_type = other DNA
ttccgtcaaaaattacctgtaaagacagacatcagaaaaaacagtgctcgccgcagaccggtgaccgggcgaagc

SEQ ID NO: 30597 - DNA, 75 bp, synthetic construct
  source 1..75: mol_type = other DNA
catcttgcgcaatggcagatgaacaggcaacggctgaaacagtggaaccggatgcaactgaacatcatcaggaca

SEQ ID NO: 30598 - DNA, 75 bp, synthetic construct
  source 1..75: mol_type = other DNA
tttccggtgatgccagcaatacccagaccaccaccgtggatatgaagtctgcgctgtatcaggatgtgaaaaatg

SEQ ID NO: 30599 - DNA, 75 bp, synthetic construct
  source 1..75: mol_type = other DNA
tattggtcgcatgttcatgtcgacgggctttatcaccgtcacggacaccccacaggtactggaaacggtccggac

SEQ ID NO: 30600 - DNA, 75 bp, synthetic construct
  source 1..75: mol_type = other DNA
ccgcaatgagcaggccggtatcgactggaacgcagtcttcagcgacagaacgctgggactgagtctcggcagcac

SEQ ID NO: 30601 - DNA, 75 bp, synthetic construct
  source 1..75: mol_type = other DNA
agaccgcaaagccaaaagacaaaacctataaaatggccgatggcggaggtctgtatcttgaggtttcggccaagg

SEQ ID NO: 30602 - DNA, 75 bp, synthetic construct
  source 1..75: mol_type = other DNA
aagttaccgtcgaaaaccccggtacgcccattgcgcccgaacacttaccgcgattgtttgaccgtttctaccgcg

SEQ ID NO: 30603 - DNA, 75 bp, synthetic construct
  source 1..75: mol_type = other DNA
acacacgagatgttgatatcaatgagccagacggaccaacgaatctttccgcatggatgagacttaagaataaag

SEQ ID NO: 30604 - DNA, 75 bp, synthetic construct
  source 1..75: mol_type = other DNA
acatcgctggcgtggatggaggatgactcgcgaattaccatcgtttccagcacccagatcccgcacattgttcgc

SEQ ID NO: 30605 - DNA, 75 bp, synthetic construct
  source 1..75: mol_type = other DNA
gagttcttttgggcttatcagtggagcttgttctagtgcggcatgtcgggttgatgtagagcagcaaatgaacgc

SEQ ID NO: 30606 - DNA, 75 bp, synthetic construct
  source 1..75: mol_type = other DNA
atgctgtcatactgtgttactcaggaatttaccgcaaactgtcgaaaaatatcacaaaattgttattccactgcc

SEQ ID NO: 30607 - DNA, 75 bp, synthetic construct
  source 1..75: mol_type = other DNA
gcggcatatgtgtctccggttgtgtcaggtaaggtactgcgcagtcgtggtggtgaaacccgcgtgttacgcccc

SEQ ID NO: 30608 - DNA, 75 bp, synthetic construct
  source 1..75: mol_type = other DNA
attctgatcggaatgtctacaggtatggcgggagctactatcagcctaccgataattgcggctgttgggtttgtc

SEQ ID NO: 30609 - DNA, 75 bp, synthetic construct
  source 1..75: mol_type = other DNA
acggccagcgccaccacgctgacacaggacggaatattgctggcgaaaggtcatgcgggactcgatgccggcacg

SEQ ID NO: 30610 - DNA, 75 bp, synthetic construct
  source 1..75: mol_type = other DNA
agtctggcaccgctctttctggatactgaaacgacaggactggataataccgcggaagccctggaaatcggcctg

SEQ ID NO: 30611 - DNA, 75 bp, synthetic construct
  source 1..75: mol_type = other DNA
gtatttgatgcagctaacacatacaacgctgagcctggtgtactggaacagacggcccaggcttacattgaatcg

SEQ ID NO: 30612 - DNA, 75 bp, synthetic construct
  source 1..75: mol_type = other DNA
gcaggtgtgaaagcaaaccgtatatttaccgataaggcatccggcagttcaacagaccgggaagggctggatttg

SEQ ID NO: 30613 - DNA, 75 bp, synthetic construct
  source 1..75: mol_type = other DNA
ctatcgcactcattgtggttcagtaccaactggcatctttaaaacaaaagatatctgacctcaagactgagaacg

SEQ ID NO: 30614 - DNA, 75 bp, synthetic construct
  source 1..75: mol_type = other DNA
acatgcaggggatgcgcaaggcagatatcatcaggcgactggaaaatgaactgggggaaacggcagaggatgtgt

SEQ ID NO: 30615 - DNA, 75 bp, synthetic construct
  source 1..75: mol_type = other DNA
ttgttactactgataacattgttcacgaggtttatctggaaggaaaacgcattggccacgtgattaaaacacaaa

SEQ ID NO: 30616 - DNA, 75 bp, synthetic construct
  source 1..75: mol_type = other DNA
cgatcgataggatctaatggcgaaggtaaagcgacacatttgtacattgatggtaatccttccaagtttctgcag

SEQ ID NO: 30617 - DNA, 75 bp, synthetic construct
  source 1..75: mol_type = other DNA
ggggctcgctggttgttgggttcagagctgttacgcactggcgctcatgaacaggcacgccatatactgcaggaa

SEQ ID NO: 30618 - DNA, 75 bp, synthetic construct
  source 1..75: mol_type = other DNA
cagattcctacagacacccatgagttcatgacgccggacggattgttgtcacgtcgcgcaattgttgctgtggaa

SEQ ID NO: 30619 - DNA, 75 bp, synthetic construct
  source 1..75: mol_type = other DNA
caacgccactggagcgccgactggcgcaaacctgtagcgggatttctgatctgcaggtgtcactgcgtgacttgt

SEQ ID NO: 30620 - DNA, 75 bp, synthetic construct
  source 1..75: mol_type = other DNA
cgtgaccgcgtcattccccgtgtgatggctgcggcgctgctgtcatccacggaacaggcatttgaacggcaggca

SEQ ID NO: 30621 - DNA, 75 bp, synthetic construct
  source 1..75: mol_type = other DNA
aaggaagcagcccgtcattatttgtgcggacggatacggttcgtgccgtgcggcgtggtgacacgctgaccatta

SEQ ID NO: 30622 - DNA, 75 bp, synthetic construct
  source 1..75: mol_type = other DNA
acggtgtggatacgccatatattgatcagatggagggcttcagtgtggatggcgtgacaacgaaagtgcgtattg

SEQ ID NO: 30623 - DNA, 75 bp, synthetic construct
  source 1..75: mol_type = other DNA
cactatctcagccaatcccctctgcagaagcgccgaaaaaactaagcctcaacgaggcagttgaaagagctaagc

SEQ ID NO: 30624 - DNA, 75 bp, synthetic construct
  source 1..75: mol_type = other DNA
ctgctgtagctgcatcagtactgatggcgatgtctgctcaggcagcagagatttacaataaagacagtaacaagc

SEQ ID NO: 30625 - DNA, 75 bp, synthetic construct
  source 1..75: mol_type = other DNA
agaaatcacgatctttccgtatatcaacgaaacaattatttccggcggcaccgcgcatgaaggcggggcggtcca

SEQ ID NO: 30626 - DNA, 75 bp, synthetic construct
  source 1..75: mol_type = other DNA
atgaaaactgttaatgagctgattaaggatatcaattcgctgacctctcacctgcatgaaaaagattttttgtta

SEQ ID NO: 30627 - DNA, 75 bp, synthetic construct
  source 1..75: mol_type = other DNA
cattggtcgccaatggttaccgtattcggcaggtgaatcgctgtatcgtatacccacaggaatgcaacagccttc

SEQ ID NO: 30628 - DNA, 75 bp, synthetic construct
  source 1..75: mol_type = other DNA
ctgaacctacgcgttctactgcacctttgttcacagagcgctgtccggcaggttttccatcaccggccgcggact

SEQ ID NO: 30629 - DNA, 75 bp, synthetic construct
  source 1..75: mol_type = other DNA
ccgacattcggggagtcctgtgcaccgtgggtgtttgacctggtggcggccctgtttggctcctacgatgcgcag

SEQ ID NO: 30630 - DNA, 75 bp, synthetic construct
  source 1..75: mol_type = other DNA
gcaaacctgtagcgggatttctgatctgcaggtgccgctgcgtgacttgtggaatccggctacctgtccggtcag

SEQ ID NO: 30631 - DNA, 75 bp, synthetic construct
  source 1..75: mol_type = other DNA
tttgcccgcacagcaggctttgctgtgtcgcttgacggcgccggcatacgtaccaccggcgttgtgcgttgcgat

SEQ ID NO: 30632 - DNA, 75 bp, synthetic construct
  source 1..75: mol_type = other DNA
agttcgaaaggcaagctgttggctctacaattaaaacaattggtcttccatattttaagaaattaagaatagctg

SEQ ID NO: 30633 - DNA, 75 bp, synthetic construct
  source 1..75: mol_type = other DNA
tataaggctgccatgcgcacactgcccgcacagttcacggatattgtcactcagcttgccggtggtcagaatccc

SEQ ID NO: 30634 - DNA, 75 bp, synthetic construct
  source 1..75: mol_type = other DNA
tttcatgcactgcggttttagctgatatattaacaagccatgcaaagggaaattttactgatatttttgagcagt

SEQ ID NO: 30635 - DNA, 75 bp, synthetic construct
  source 1..75: mol_type = other DNA
ggtatcagcgcatggtatatgctgaaaggtcgtgacttcgccttcgctaaacgctcctttgctatcgctgccagc

SEQ ID NO: 30636 - DNA, 75 bp, synthetic construct
  source 1..75: mol_type = other DNA
cggtcagcatccccgacgtttgaactgttttatcaggagtatcaatccctaagattaaaatctgtttttaaattt

SEQ ID NO: 30637 - DNA, 75 bp, synthetic construct
  source 1..75: mol_type = other DNA
cgcctgagcatctgagtttactgaaagaagcccagaggccaatagaacctacaaccgcgccagtgccagtgccag

SEQ ID NO: 30638 - DNA, 75 bp, synthetic construct
  source 1..75: mol_type = other DNA
caagggcgactcagccctgtctgtcacccgttgaaacctggcaacggctgctgactcatctgttatcgcagcact

SEQ ID NO: 30639 - DNA, 75 bp, synthetic construct
  source 1..75: mol_type = other DNA
gtatcgacggtaccaaatacaggaatgtctgggttgttggtgatctgcatggttgctacaccagactgatgtccg

SEQ ID NO: 30640 - DNA, 75 bp, synthetic construct
  source 1..75: mol_type = other DNA
tcgcaggagtcgggggcgcagataacattgtgagtctgatgcattgcgcaacgcgattacgttttaagttaaagg

SEQ ID NO: 30641 - DNA, 75 bp, synthetic construct
  source 1..75: mol_type = other DNA
aactctcggcagccgaggtggcaatatggtcgatcaggactggatggattccagtaaccccggaacctggacgga

SEQ ID NO: 30642 - DNA, 75 bp, synthetic construct
  source 1..75: mol_type = other DNA
cagtaattaaaaacatgttgcctatgttgggtgagaaaaaactggtttcatccataacaaaagaggatttacttt

SEQ ID NO: 30643 - DNA, 75 bp, synthetic construct
  source 1..75: mol_type = other DNA
acacatggtcaaattgaacgcatcgatcaggttgttgattctgaagatggtcttaaattgaaaagaattaagtgt

SEQ ID NO: 30644 - DNA, 75 bp, synthetic construct
  source 1..75: mol_type = other DNA
aatgaccttgctgaatctgtcgatttatctgcctttactaagggacgcgaggccccacctggtacatatcgggtc

SEQ ID NO: 30645 - DNA, 75 bp, synthetic construct
  source 1..75: mol_type = other DNA
tatcggtcacgtcggtagcaacaaagttcgcagcttctggctgggcctgacgcgcggtttaaccagcagcacgcc

SEQ ID NO: 30646 - DNA, 75 bp, synthetic construct
  source 1..75: mol_type = other DNA
tccataacaaaagaggatttacttttcgcaaggagagatttgttgaccggttaccaaaagctttctaatggaaag

SEQ ID NO: 30647 - DNA, 75 bp, synthetic construct
  source 1..75: mol_type = other DNA
catcgtggtcaccgattccagtaaattcaatcgttccagtttacataagatcattgatactcaacgtatcgacat

SEQ ID NO: 30648 - DNA, 75 bp, synthetic construct
  source 1..75: mol_type = other DNA
cgccgtcgggtgttattcctgatgtccagcctgatcacggtgaaacggtgattgaggtgatcaacaaaatactcg

SEQ ID NO: 30649 - DNA, 75 bp, synthetic construct
  source 1..75: mol_type = other DNA
gtcttgctgctcttgtatcgggatgcggtgaaaaaggggattttgagaaagcgatcaacgcaaaaatatcacaat

SEQ ID NO: 30650 - DNA, 75 bp, synthetic construct
  source 1..75: mol_type = other DNA
ggaagcacgccagcaatccccggctggctgcgtgatggtattcgccgcccgtattcgtcagggggtgtgccatgc

SEQ ID NO: 30651 - DNA, 75 bp, synthetic construct
  source 1..75: mol_type = other DNA
ttttttcctcgctggataatatgatcgcccaggggaatccgttaccggtactgtatggtgagatgcgagtggggt

SEQ ID NO: 30652 - DNA, 75 bp, synthetic construct
  source 1..75: mol_type = other DNA
gcggctgtatcgggcatgtatgcggcaggggccagtatgatcctgggtggtgtggcccagatgctggcaccgaaa

SEQ ID NO: 30653 - DNA, 75 bp, synthetic construct
  source 1..75: mol_type = other DNA
atgacaacaatgaatcctttccttgtgcaaagcacactgccgtatctggctcctcattttgatcaaattgccaat

SEQ ID NO: 30654 - DNA, 75 bp, synthetic construct
  source 1..75: mol_type = other DNA
ttgaaacgaaaggtctggtttctgcaattgaagctgcagataccatggtgaaatctgccaacgtgaccctagtgg

SEQ ID NO: 30655 - DNA, 75 bp, synthetic construct
  source 1..75: mol_type = other DNA
tgattcaaagaaagatgttgcaatttttcaggagtagaggggtgttaggtgaagagttcattaatgaaagaaaac

SEQ ID NO: 30656 - DNA, 75 bp, synthetic construct
  source 1..75: mol_type = other DNA
ccagtgtcagctgaactgccgccagcaaatgaaagtgttctgttatttgatgctaatggagaaggctggctgatt

SEQ ID NO: 30657 - DNA, 75 bp, synthetic construct
  source 1..75: mol_type = other DNA
gtgaatctttcgaaataaacgcatcaacaatttcaagtaaaacaaactctaccgtaaaaacatttaccacagaac

SEQ ID NO: 30658 - DNA, 75 bp, synthetic construct
  source 1..75: mol_type = other DNA
gttctccagtcgaaccaccttgccagacagcgcccacgtagccagtgcatcgactatccctaatcgtgatgcccg

SEQ ID NO: 30659 - DNA, 75 bp, synthetic construct
  source 1..75: mol_type = other DNA
cgcgtctggcgggagctaaaagtggcggtgtgtttcaggtggtgctgggggcggcgttgattgcggtggcatggt

SEQ ID NO: 30660 - DNA, 75 bp, synthetic construct
  source 1..75: mol_type = other DNA
ttctgattatttcggtggtctgcgccattgggattatgcgaattattcgttcagtaaaaaagattgaccgctttt

SEQ ID NO: 30661 - DNA, 75 bp, synthetic construct
  source 1..75: mol_type = other DNA
cgctgatgatcttcacggtcttcgggcaatgtgtagcgggtggttttatcgttctggctttggcgctgctcaaag

SEQ ID NO: 30662 - DNA, 75 bp, synthetic construct
  source 1..75: mol_type = other DNA
accagatgcttcgtgctgcacagaacaaagcagtaatagccagatttattggtgattccaaaatgtggcttgaag

SEQ ID NO: 30663 - DNA, 75 bp, synthetic construct
  source 1..75: mol_type = other DNA
cgttctgctggaatcacgattgataaccttgaggctaaatgcgcgaagatggctgctgaaaatacctcacttaag

SEQ ID NO: 30664 - DNA, 75 bp, synthetic construct
  source 1..75: mol_type = other DNA
ctgcccaggataacggcgatgtcgattttggtcagaatttaattgcccgtaatagcggcgtgattcgcgttggcg

SEQ ID NO: 30665 - DNA, 75 bp, synthetic construct
  source 1..75: mol_type = other DNA
cgctggctattgccagcggtatttctgctcagtgggccatagcagcggatatgccagccagcccggcacccacta

SEQ ID NO: 30666 - DNA, 75 bp, synthetic construct
  source 1..75: mol_type = other DNA
atgacacggcaccggaggcggtgtacgcccgtcttcacgaacagctgggtgagggaacggtcatccacattgtgc

SEQ ID NO: 30667 - DNA, 75 bp, synthetic construct
  source 1..75: mol_type = other DNA
ggatgccggggatcagtatcgctttcagtgacattctcttttcaatgggtgcggcgatgacgcttggtggtgtgg

SEQ ID NO: 30668 - DNA, 75 bp, synthetic construct
  source 1..75: mol_type = other DNA
accgcgtactcaaaaaagacgcgctgatggtgagtttctatggctggaaccgtattgaccgctttatggcagcct

SEQ ID NO: 30669 - DNA, 75 bp, synthetic construct
  source 1..75: mol_type = other DNA
tcccctggattgggggaaaacgtcgtctggccaaacacattctgcctcagttcccactccatacctgctatgtgg

SEQ ID NO: 30670 - DNA, 75 bp, synthetic construct
  source 1..75: mol_type = other DNA
aatgacgacgataacaaactgatatccatgctgagatggaataatacaaaagggatgggatatggaacctttaat

SEQ ID NO: 30671 - DNA, 75 bp, synthetic construct
  source 1..75: mol_type = other DNA
ggcgctgatgcgcagaccgtgcaggatacggtgacgcaggttatcgaacagaatatgaatggtatcgataacctg

SEQ ID NO: 30672 - DNA, 75 bp, synthetic construct
  source 1..75: mol_type = other DNA
agtaaattgtgaacggcttaaggcattaccgacgaccaaaaattggtctattgccatgtatttccgttttgtaat

SEQ ID NO: 30673 - DNA, 75 bp, synthetic construct
  source 1..75: mol_type = other DNA
cgatgtcggtccttatctgatttccagtgacgaatgtattcaggtaaaggagttcgagaaaaattattgtgcaga

SEQ ID NO: 30674 - DNA, 75 bp, synthetic construct
  source 1..75: mol_type = other DNA
aagataaagctctggcggaagctgcggccctgcttatattgagggaaaagttcaatgccctctgggacaacagcg

SEQ ID NO: 30675 - DNA, 75 bp, synthetic construct
  source 1..75: mol_type = other DNA
caacaggcactcgaccaggcgttagccggttttgacactgttgtactactggcagcggaacaccgcgatgacgtc

SEQ ID NO: 30676 - DNA, 75 bp, synthetic construct
  source 1..75: mol_type = other DNA
gcgtaaagtctggcgtcagttgttacgggaaggaatcagggtggccagatgtacagtggcacgtctcatggcggt

SEQ ID NO: 30677 - DNA, 75 bp, synthetic construct
  source 1..75: mol_type = other DNA
gaccgacaagctggtcatgggtatgggtagcaccactcgcgctaacagcgaagactgcctttttgcagtgaaagg

SEQ ID NO: 30678 - DNA, 75 bp, synthetic construct
  source 1..75: mol_type = other DNA
tgcgacgtcgccttgaaggtacacaggggctggttatcatcgacgaagctgatcatcttggtgccgaagttctgg

SEQ ID NO: 30679 - DNA, 75 bp, synthetic construct
  source 1..75: mol_type = other DNA
ctgtttttattgcaacggaaaatgaagaacgtgtaccagcagaatatctgccacgtatttctggtgtcttcgagc

SEQ ID NO: 30680 - DNA, 75 bp, synthetic construct
  source 1..75: mol_type = other DNA
tatattcgaccctccgcatcttgagcgtgttggtgataacgcctggatgggaaagaaatatggacggctgaataa

SEQ ID NO: 30681 - DNA, 75 bp, synthetic construct
  source 1..75: mol_type = other DNA
ggaggatgatttcgtaaataaagctggtatattaaagatgttagatgaatttattgaaaatgatttttcaataaa

SEQ ID NO: 30682 - DNA, 75 bp, synthetic construct
  source 1..75: mol_type = other DNA
tctcaaagcggcgctggcgatgtacaacagccaggatgaaaacataaagaatcactggttgcttgagtctgcaaa

SEQ ID NO: 30683 - DNA, 75 bp, synthetic construct
  source 1..75: mol_type = other DNA
tcatccgctggggcgtagcgtaacccgctgggaagcgggcaagaacatgcccaatgaccggcgtaactttgggta

SEQ ID NO: 30684 - DNA, 75 bp, synthetic construct
  source 1..75: mol_type = other DNA
ggcggtaaaggcagcatatgaccttgctaacgggaaatataccgcacaggacgctaccacagcgcgaaaaggtct

SEQ ID NO: 30685 - DNA, 75 bp, synthetic construct
  source 1..75: mol_type = other DNA
atccgcagtggccttgaactgctgacgcagaatggttttcttgcgacgggagtcgatgccattgtgtcaacgacg

SEQ ID NO: 30686 - DNA, 75 bp, synthetic construct
  source 1..75: mol_type = other DNA
aaccacgggcaggttttaccctgctggaagtgatggtggtgattgttattcttggcgtcctggcaagtctggtgg

SEQ ID NO: 30687 - DNA, 75 bp, synthetic construct
  source 1..75: mol_type = other DNA
ctgcagtagaaatactgaaaaaagaaggcattagcgttgcttttggtgtacccggcgcagcaataaacccactct

SEQ ID NO: 30688 - DNA, 75 bp, synthetic construct
  source 1..75: mol_type = other DNA
ataccatcaccgttaacgctgctggtaacgcggaaaacaccgttaaaaacatcgcatttaattatattgtgaggc

SEQ ID NO: 30689 - DNA, 75 bp, synthetic construct
  source 1..75: mol_type = other DNA
ttgccgggacttactgcaaaacgccgtttgctgattcgtatgcgttcatcagcaatccggcaacaggtgcgccgt

SEQ ID NO: 30690 - DNA, 75 bp, synthetic construct
  source 1..75: mol_type = other DNA
tgatgatcaattaattatcgctgttgtagctgtaggaaaacgtgaacgtagtgacgtttataatcttgccagtga

SEQ ID NO: 30691 - DNA, 75 bp, synthetic construct
  source 1..75: mol_type = other DNA
ggtcatgaaaattgctggagatgcccagctttctactccatgcactgacagcatcataaacagcattgcagcagg

SEQ ID NO: 30692 - DNA, 75 bp, synthetic construct
  source 1..75: mol_type = other DNA
cagcattgtgcttagcgagctgtatggcttttagctcatcagctattgcagacatcgtaatttcaggtacacgcg

SEQ ID NO: 30693 - DNA, 75 bp, synthetic construct
  source 1..75: mol_type = other DNA
atgaacgaatatcagtttgtgcttccatacccgccgtcggtgaacacctactggcgaagacggggaagccaatac

SEQ ID NO: 30694 - DNA, 75 bp, synthetic construct
  source 1..75: mol_type = other DNA
cggaagccctttatctcagccgccagaacctgacacagcgccagtatatggtggtgtggctggaatacctgacgg

SEQ ID NO: 30695 - DNA, 75 bp, synthetic construct
  source 1..75: mol_type = other DNA
tcccttgttagaaaactttctggcagaaagagggcttaccctctcaccagaaaagacacgaatcacacacatcag

SEQ ID NO: 30696 - DNA, 75 bp, synthetic construct
  source 1..75: mol_type = other DNA
agagaccgagcattgatgctcaccttctgtggcttgaagcagagctgaagcgtcttgagaagcagataaaagacc

SEQ ID NO: 30697 - DNA, 75 bp, synthetic construct
  source 1..75: mol_type = other DNA
tatcaccggcgacagcgcgacggtggataacaagggcaccatgaccgtcaccgatccggagtccatgggtatcca

SEQ ID NO: 30698 - DNA, 75 bp, synthetic construct
  source 1..75: mol_type = other DNA
atcgacatagaaaacaaaacattgttttcaccattaagaaaaatagtagataagagcggtaattctattaatgta

SEQ ID NO: 30699 - DNA, 75 bp, synthetic construct
  source 1..75: mol_type = other DNA
ggtcagggcgtgccggacattctctcttttggtgacgaattatcgccgcaaaatgtgcaggtccgctggcgtgaa

SEQ ID NO: 30700 - DNA, 75 bp, synthetic construct
  source 1..75: mol_type = other DNA
agtcaactggatatcccggaactccagcgccgggggctggtcattctggcttcggagagtaaggattttcgtctg

SEQ ID NO: 30701 - DNA, 75 bp, synthetic construct
  source 1..75: mol_type = other DNA
aactgaagcaagcacaaacagggttgtgcaccttatccagcccgctatcagtgtcctgaaaaatcaggctgaaat

SEQ ID NO: 30702 - DNA, 75 bp, synthetic construct
  source 1..75: mol_type = other DNA
gccgcagcctggcggagaagctgcagcaggaagggagcgaggacgggcacggcgtggtatttccggctgaactgg

SEQ ID NO: 30703 - DNA, 75 bp, synthetic construct
  source 1..75: mol_type = other DNA
gtccccgttcaccgttttcggatgggaagaacgccggaaacaggacttaccccggctgaatggtgtgaatttccg

SEQ ID NO: 30704 - DNA, 75 bp, synthetic construct
  source 1..75: mol_type = other DNA
ggcaacgattgcgcccggtaaagcaggtaactgcaaagaaactcctctcacaaagtattgttcgaggactatgcc

SEQ ID NO: 30705 - DNA, 75 bp, synthetic construct
  source 1..75: mol_type = other DNA
gcagttccggcgcgtaacgtgggcttattgctgggggccaggccgggtaatcgctactttacccgacgtattgat

SEQ ID NO: 30706 - DNA, 75 bp, synthetic construct
  source 1..75: mol_type = other DNA
atatgaacatcgcggagtgccaaaataccgggatcgctacagcgaagcgtatgtgattttcatctccaatcttaa

SEQ ID NO: 30707 - DNA, 75 bp, synthetic construct
  source 1..75: mol_type = other DNA
gccgtactggatgtataccggcatcaacgacagccatacccgcaggagccatctggcgctgcatggtctggtgct

SEQ ID NO: 30708 - DNA, 75 bp, synthetic construct
  source 1..75: mol_type = other DNA
caagaaggctcaaaagggagatttgattatcgcaactactagtgagaatgatgaggatgtatgtaaagctgttgc

SEQ ID NO: 30709 - DNA, 75 bp, synthetic construct
  source 1..75: mol_type = other DNA
ttgcataaagcgcaaaccttactgcaacgttatatgaacctggcgggcggttattccgggcatagcggcgattat

SEQ ID NO: 30710 - DNA, 75 bp, synthetic construct
  source 1..75: mol_type = other DNA
ataagatatatcagccgggaggaaatgagccgatattttacaggcgttgcacttgaggtctggcccggaagtgaa

SEQ ID NO: 30711 - DNA, 75 bp, synthetic construct
  source 1..75: mol_type = other DNA
aaaacaacctgccgacgccacactgaccgcactggcaggccttgccactgcggcagacaaacttccgtattttac

SEQ ID NO: 30712 - DNA, 75 bp, synthetic construct
  source 1..75: mol_type = other DNA
ccggtcccaccggggcgtatgaatattttgcccgcagtgccagcggtcaggtggcggacgcgcgcgcaaccagcc

SEQ ID NO: 30713 - DNA, 75 bp, synthetic construct
  source 1..75: mol_type = other DNA
gcgggggcttctcttgaacgaccgggcgggcgatttgccagatttgaaaccgcttttgatggattacgggctctt

SEQ ID NO: 30714 - DNA, 75 bp, synthetic construct
  source 1..75: mol_type = other DNA
atggcaaaccgcaagcaacagcgcgcccgcgctgagcgtcgtcacatccagactgaaatcaaccgcagacttttc

SEQ ID NO: 30715 - DNA, 75 bp, synthetic construct
  source 1..75: mol_type = other DNA
atcgcgcattatgctgttggtgttgctcgcagccgtgccaggaatcgcagcgcaactgtggttttttggttgggg

SEQ ID NO: 30716 - DNA, 75 bp, synthetic construct
  source 1..75: mol_type = other DNA
gtagttagtggcgcagtatatggttcaggacatggaatatttccttcggagcaggctcgtaaggactggggaaaa

SEQ ID NO: 30717 - DNA, 75 bp, synthetic construct
  source 1..75: mol_type = other DNA
tagcgacgtcatcgaaatcgataccgtcaacatggttgagaaggtgaacggcgtcgaccgtctggaacagcaccg

SEQ ID NO: 30718 - DNA, 75 bp, synthetic construct
  source 1..75: mol_type = other DNA
cacggatgccgtgacggacggctatatacgccggggatatatcaccagccgggcctttctgacagagcaggacct

SEQ ID NO: 30719 - DNA, 75 bp, synthetic construct
  source 1..75: mol_type = other DNA
taccctggtggattacacgtattcatggagtgactacctcagcaccattgataaccggggctggcggtggcgttc

SEQ ID NO: 30720 - DNA, 75 bp, synthetic construct
  source 1..75: mol_type = other DNA
ctatataattgttggcggtatatctcagggagaaattgtcaaatatgaaaggtcctgtttttgggtagcaatcgg

SEQ ID NO: 30721 - DNA, 75 bp, synthetic construct
  source 1..75: mol_type = other DNA
ccagcttactgctggttttggccgtttttggccttttacaactgacatcaggcggtctgttctttaatgccttaa

SEQ ID NO: 30722 - DNA, 75 bp, synthetic construct
  source 1..75: mol_type = other DNA
atgccatttgctcgttatttctgcattttcataaacgttggtttgggagaagcggcaaaacgggatgtggggaca

SEQ ID NO: 30723 - DNA, 75 bp, synthetic construct
  source 1..75: mol_type = other DNA
cgccccacagtcgtgcaaaattaatcagggcgatgttattaaggttaattttggattcatcaatggtcagaagtt

SEQ ID NO: 30724 - DNA, 75 bp, synthetic construct
  source 1..75: mol_type = other DNA
atgttttttacactcctctctttaataattattcaattatttgtcccttatcttctgggagtaaggaaaacggaa

SEQ ID NO: 30725 - DNA, 75 bp, synthetic construct
  source 1..75: mol_type = other DNA
aatattccggtaccggcggacggcaaaagtatcacccccgatgatgtgcgtccgatgcttgagcagatggtgaaa

SEQ ID NO: 30726 - DNA, 75 bp, synthetic construct
  source 1..75: mol_type = other DNA
ccgtcgctggtactggccctgtccacactgtggtgagtattttcagccctgcggcgatgtggttgctggtttccg

SEQ ID NO: 30727 - DNA, 75 bp, synthetic construct
  source 1..75: mol_type = other DNA
gaaatatagagggtcaagtcataaggttgcattgggactgggcacaactcctaatgctgtcagctaaaagaatga

SEQ ID NO: 30728 - DNA, 75 bp, synthetic construct
  source 1..75: mol_type = other DNA
actggaaccgaaagcggtcgcaggcgttgccggaattacagttaaatcaggcattgaggatttttctattattcc

SEQ ID NO: 30729 - DNA, 75 bp, synthetic construct
  source 1..75: mol_type = other DNA
atgaacaaagaaaacgtcattaccctggataatccggtcaagcgtggtgaacaggttatcgaacaggtcacgctg

SEQ ID NO: 30730 - DNA, 75 bp, synthetic construct
  source 1..75: mol_type = other DNA
cgcttgccatggcaggcatgttttcgacccaggctctggctgatgagagcaaaacaggcttttatgtgaccggta

SEQ ID NO: 30731 - DNA, 75 bp, synthetic construct
  source 1..75: mol_type = other DNA
attacccgggacattcccggctacctgttcgccggtggtgtggcttatgacggcgatgtaattacggtttacccc

SEQ ID NO: 30732 - DNA, 75 bp, synthetic construct
  source 1..75: mol_type = other DNA
gcaggtgctggccgtctatggtccggtacatgcccggttgctgcgtcaggcactggaactgatcgctgatgcaga

SEQ ID NO: 30733 - DNA, 75 bp, synthetic construct
  source 1..75: mol_type = other DNA
gggtgttcactccggacgaccgtgagcaggtgctggccgtctatggtccggtacatgcccggttgctgcgtcagg

SEQ ID NO: 30734 - DNA, 75 bp, synthetic construct
  source 1..75: mol_type = other DNA
aaaaaccttcatttttacgcccgtaaggtgatgaggatgtggcgttaccggataacgcggttactgtcacggaaa

SEQ ID NO: 30735 - DNA, 75 bp, synthetic construct
  source 1..75: mol_type = other DNA
cggtgagtttattcgtggctgggatgacggtcgttcagtagatactggtcgcagcgttatgtctgcacagagcgc

SEQ ID NO: 30736 - DNA, 75 bp, synthetic construct
  source 1..75: mol_type = other DNA
gagcattcagacaggaatgctggaaaagcaccgacatattgttgtagccaatgatggttacgacacaaaagatga

SEQ ID NO: 30737 - DNA, 75 bp, synthetic construct
  source 1..75: mol_type = other DNA
aaaaaccttcatttttacgcccgtaaggtgatgagcatgtggcgttaccggataacacggttgctgtcacggaaa

SEQ ID NO: 30738 - DNA, 75 bp, synthetic construct
  source 1..75: mol_type = other DNA
agacggtgagaaaaacggcgatgcaaatcaggtggagagggatgtatcagcggttactgaaggttgacccgctga

SEQ ID NO: 30739 - DNA, 75 bp, synthetic construct
  source 1..75: mol_type = other DNA
atgcttccccgttttgccgatatttttcagcagggaaaccgctggcttaactggctggagaaacagccggaaggt

SEQ ID NO: 30740 - DNA, 75 bp, synthetic construct
  source 1..75: mol_type = other DNA
tgactggatgcgtggtgtccgggaagatcagaaaaacggctggctgtttatctcgtcgaatgccgacacccatgc

SEQ ID NO: 30741 - DNA, 75 bp, synthetic construct
  source 1..75: mol_type = other DNA
gccactctcgtggcgctggccaccgtcaccgacgaaatcatcgacctgcacgaccgcatcctgggtaagctgttt

SEQ ID NO: 30742 - DNA, 75 bp, synthetic construct
  source 1..75: mol_type = other DNA
cgcgatcaacctgggcctgaccaagatggccgagtcctgccccggcacgacctacgcgaagctcgcttggctgca

SEQ ID NO: 30743 - DNA, 75 bp, synthetic construct
  source 1..75: mol_type = other DNA
ggcgcgggtattcagcttcatccgggatatgctcgacgatctggatctgtcccgcatcatcggcgagatgaccga

SEQ ID NO: 30744 - DNA, 75 bp, synthetic construct
  source 1..75: mol_type = other DNA
ggctggccaaagagaacagggcacgtattgatgacgtggtggatttcctgaaaaacgccagtgacagcgagcagt

SEQ ID NO: 30745 - DNA, 75 bp, synthetic construct
  source 1..75: mol_type = other DNA
gcctatcctgcgcagcgtgctggactccggtggtatcgcctgggtgtttgacatgggggacggctacaaatcgtt

SEQ ID NO: 30746 - DNA, 75 bp, synthetic construct
  source 1..75: mol_type = other DNA
tcggcatttcgcgcatctgaaatcgggcgacccggccaaagacaagaacctgttgctgaccacgatcctcgccga

SEQ ID NO: 30747 - DNA, 75 bp, synthetic construct
  source 1..75: mol_type = other DNA
tttccggtgaatattcctgcgggcaactggcccgggctcttttcccggggcgatatccttcaaccccgaccgtga

SEQ ID NO: 30748 - DNA, 75 bp, synthetic construct
  source 1..75: mol_type = other DNA
ttgcatgaccgcttcagcgacagcatgtgcattctgccgaccatagaagaccgcatcggcagatatatcccaccc

SEQ ID NO: 30749 - DNA, 75 bp, synthetic construct
  source 1..75: mol_type = other DNA
gttattgcccggtacgctgcgcgtgatcagcgtgcggatgaattaccttcctgctaacgccgcatttgccagcac

SEQ ID NO: 30750 - DNA, 75 bp, synthetic construct
  source 1..75: mol_type = other DNA
cattagactaaaagatcatctcaatcgttttcccgacttttataatgcatctttagtaaaggaggaagctgaaga

SEQ ID NO: 30751 - DNA, 75 bp, synthetic construct
  source 1..75: mol_type = other DNA
agtaactctgtgggtgatggtgtgaattttgttgctgtcagaccgcgaaatattgcatttaactttctggtgagg

SEQ ID NO: 30752 - DNA, 75 bp, synthetic construct
  source 1..75: mol_type = other DNA
aaatgagcttcccgcagttcagccgtctgctgccgtaccgtgattacaaccaggaatccggtctgttcatgaatg

SEQ ID NO: 30753 - DNA, 75 bp, synthetic construct
  source 1..75: mol_type = other DNA
ttgaagcgctggccagtggtgcggacaaggatgcagttgtgcgggaggctcttcttcgtgattttgataatccgc

SEQ ID NO: 30754 - DNA, 75 bp, synthetic construct
  source 1..75: mol_type = other DNA
ggagcatcagacaggtcttcctggatgttgctgccgggttatgtgaaggggatgagcagtcgccggaaaagcgcc

SEQ ID NO: 30755 - DNA, 75 bp, synthetic construct
  source 1..75: mol_type = other DNA
tggtataccgccgggccattgcggggctgaatgtatcaaggctgaagaaaaacgcgcgggatatcagtctgctga

SEQ ID NO: 30756 - DNA, 75 bp, synthetic construct
  source 1..75: mol_type = other DNA
aaaatgaaaccggaagaagagatggaacagcaactgccacccgggatcagtgaatccggtgaagtggtggatatg

SEQ ID NO: 30757 - DNA, 75 bp, synthetic construct
  source 1..75: mol_type = other DNA
gcttcgacaggttcagaagaatatttatctgtattatgttgtcatcggcatggtccggagtgatgtggtttttta

SEQ ID NO: 30758 - DNA, 75 bp, synthetic construct
  source 1..75: mol_type = other DNA
gctcattgaatttgccattgattacctgaagaacaataaaaagcaggggctgatgaagcgcgttggccgttgcat

SEQ ID NO: 30759 - DNA, 75 bp, synthetic construct
  source 1..75: mol_type = other DNA
gtgttcaaagtcgacaaaccactgaatgcagcctttccttcagataccagcgtctcagcgttaatcattggacgg

SEQ ID NO: 30760 - DNA, 75 bp, synthetic construct
  source 1..75: mol_type = other DNA
ccgcattcacagtatgcacccaaagaaagtccgacgtttaccgggacaccaaaagcgccaactccagcggcaggg

SEQ ID NO: 30761 - DNA, 75 bp, synthetic construct
  source 1..75: mol_type = other DNA
tctgcgtgttttggtctcacaagactacacaccagatagcggggctgttggttatattgcctgtgcaggttttag

SEQ ID NO: 30762 - DNA, 75 bp, synthetic construct
  source 1..75: mol_type = other DNA
acgcaatcctggctgtatctctggctaacgccaaagctgctgctgccgctaaaggcatgccgctgtacgagcaca

SEQ ID NO: 30763 - DNA, 75 bp, synthetic construct
  source 1..75: mol_type = other DNA
accgctgatttattactccgataacgggggcggtgaaaaaaaccgggtgcttgatgccgatattaccgggattct

SEQ ID NO: 30764 - DNA, 75 bp, synthetic construct
  source 1..75: mol_type = other DNA
acttcccccttcagcaccaacggaagaggtaccgcaaaccgattttcagtcggtcatgaaaaatttgcttaagcg

SEQ ID NO: 30765 - DNA, 75 bp, synthetic construct
  source 1..75: mol_type = other DNA
catccaccagcaggacgtgtgaccatctaatgatcgaccttgaaaccatgggaaaaaatcctgatgccccgatca

SEQ ID NO: 30766 - DNA, 75 bp, synthetic construct
  source 1..75: mol_type = other DNA
ccgttgacggacctcgggggaaaaacgtgtatttttagtcatcctgtttacctctttctcagggagtttagtctc

SEQ ID NO: 30767 - DNA, 75 bp, synthetic construct
  source 1..75: mol_type = other DNA
ctattatctcgagacacagaccttccccatcacctatatggacagtcaggtggcctataacgccactgtggtcag

SEQ ID NO: 30768 - DNA, 75 bp, synthetic construct
  source 1..75: mol_type = other DNA
tgccggtgctgatgattacgtgactaaaccgtttcatattgaagaggtgatggcgcgaatgcaggcattaatgcg

SEQ ID NO: 30769 - DNA, 75 bp, synthetic construct
  source 1..75: mol_type = other DNA
agttttcgctatcgttaatgccaccaatggtcaggttaaggcttacgaaattcgcccggacttaccgcacctgtt

SEQ ID NO: 30770 - DNA, 75 bp, synthetic construct
  source 1..75: mol_type = other DNA
ctggcaaaatgttggtcacgatcgtgataaagcgattcaaatcgtgaaacagcagaagattgaggaaagctctca

SEQ ID NO: 30771 - DNA, 75 bp, synthetic construct
  source 1..75: mol_type = other DNA
cgcctgcatctctggctgctgagcctgctttaccttgccaccttcggttcgtttatcggtttttctgcgggtttt

SEQ ID NO: 30772 - DNA, 75 bp, synthetic construct
  source 1..75: mol_type = other DNA
tatgccgtacagaacgattacatcgactcaaatccagccagcgatatggctggtgcgctatcgacaaccaaagcg

SEQ ID NO: 30773 - DNA, 75 bp, synthetic construct
  source 1..75: mol_type = other DNA
ctgccggacgcttacaaatccgtgatcgaagcactgaaacacggtgggctgaagaatcgtgtcagcgtcaacatc

SEQ ID NO: 30774 - DNA, 75 bp, synthetic construct
  source 1..75: mol_type = other DNA
agtgcaccggtcagcctgaaccagaaagactgggaaaaccgtcagtttacaatgaaaacactgtcgctgaaagac

SEQ ID NO: 30775 - DNA, 75 bp, synthetic construct
  source 1..75: mol_type = other DNA
atgcgccgacaattgttgagcgtcatcgtcaccgttacgaagtcaacaacatgctgttgaaacagattgaagatg

SEQ ID NO: 30776 - DNA, 75 bp, synthetic construct
  source 1..75: mol_type = other DNA
atacagaaaaggtaatcctctgacgcttgcagaacgtcagcaggcatccctggcaagaaaacgagctacacataa

SEQ ID NO: 30777 - DNA, 75 bp, synthetic construct
  source 1..75: mol_type = other DNA
tacagacatatacctctgatacgtcttgttgccagtgagttgtcaccaaagaaatcacctgatccagaaccatct

SEQ ID NO: 30778 - DNA, 75 bp, synthetic construct
  source 1..75: mol_type = other DNA
ctacgactggtattgcgacctgccgcccgcctcgccgatgacctggggcgagcaaaccgacgtaccggaatctgc

SEQ ID NO: 30779 - DNA, 75 bp, synthetic construct
  source 1..75: mol_type = other DNA
caagatgcagacatttgaacagggactgattgatgtctaccggaaattgtcatgggattacagaaccaataatcc

SEQ ID NO: 30780 - DNA, 75 bp, synthetic construct
  source 1..75: mol_type = other DNA
ttgatctggcgctcctggaattttgaggactgtgccgggtactggatgaaccggtacatcagggatttcggcatt

SEQ ID NO: 30781 - DNA, 75 bp, synthetic construct
  source 1..75: mol_type = other DNA
agtgggagaactggtctccgtacatgttattccacgcccacacattgaggtggaaaaaattctaccgaaggctat

SEQ ID NO: 30782 - DNA, 75 bp, synthetic construct
  source 1..75: mol_type = other DNA
aaagcggctattggtcgtctgaaaggcgaggaactggcgcaatataatctgtggctggattatctggacgcactg

SEQ ID NO: 30783 - DNA, 75 bp, synthetic construct
  source 1..75: mol_type = other DNA
ggcagctgcaaggctcactggcggcgctcaccagcctgacctcgatcgtcggacccctcctcttcacggcgatct

SEQ ID NO: 30784 - DNA, 75 bp, synthetic construct
  source 1..75: mol_type = other DNA
gcttaaccgtgcgatcaacgatgcggagtcggttctgggtacgacccgacgccgccgaccgctgggagtgaggtt

SEQ ID NO: 30785 - DNA, 75 bp, synthetic construct
  source 1..75: mol_type = other DNA
atcattgactgaatctattgatacaacaacgccacacggctcgttcctctttaacctttttggcacgctcgcgga

SEQ ID NO: 30786 - DNA, 75 bp, synthetic construct
  source 1..75: mol_type = other DNA
tgtctgaaaggtgaggaactggcacaatataatttgtggctggattacctggacgcactggaactggtcgatact

SEQ ID NO: 30787 - DNA, 75 bp, synthetic construct
  source 1..75: mol_type = other DNA
tctggacgcactggaactggttgatacttccggtgcgccagatattgaatggcctacgcctccggcagttcaggc

SEQ ID NO: 30788 - DNA, 75 bp, synthetic construct
  source 1..75: mol_type = other DNA
accgtgtgcagacaaataaatatttcaccaaatatcaacagactgttttaccgctacgcaacagtattcttcggg

SEQ ID NO: 30789 - DNA, 75 bp, synthetic construct
  source 1..75: mol_type = other DNA
gtgtaaaagccgctcctgtccgcactgcggggtgaaggctggcgcacagtggatacagtatctgctgagcctggt

SEQ ID NO: 30790 - DNA, 75 bp, synthetic construct
  source 1..75: mol_type = other DNA
gcacagaaccaggctgtaacaggcgcgtgaagtccggcaagtgtgaggagcacaggcgggcggcatggcgtgcag

SEQ ID NO: 30791 - DNA, 75 bp, synthetic construct
  source 1..75: mol_type = other DNA
ggcagcggcggccaggcacgacgggcggcaaattaccgtggaatgactggcgcaatgccacgacctggcgtaaag

SEQ ID NO: 30792 - DNA, 75 bp, synthetic construct
  source 1..75: mol_type = other DNA
atgtataatgctaatcccaattacgaaatggacttcatgattctgaaagacgtgaatgaacacatggaaggtctg

SEQ ID NO: 30793 - DNA, 75 bp, synthetic construct
  source 1..75: mol_type = other DNA
tttgccagtagtgggatccgtattgaaggaagtaacccgtcattatttgtgcttacggatacggtttgtgctgta

SEQ ID NO: 30794 - DNA, 75 bp, synthetic construct
  source 1..75: mol_type = other DNA
cgcctattaaagctaaccatttgcgaagcatactggattatattgaacaggaacagttaactgctgaagatcgta

SEQ ID NO: 30795 - DNA, 75 bp, synthetic construct
  source 1..75: mol_type = other DNA
caaagttgaagcgattaccatgcgtgcaacacgcgctttctcgcaaatcaaagatgcgatggttttcgcctttaa

SEQ ID NO: 30796 - DNA, 75 bp, synthetic construct
  source 1..75: mol_type = other DNA
cagtttaagattgatatcgaccaggaaaaagcgcaggcgctgggtgtttctatcaacgacattaacaccactctg

SEQ ID NO: 30797 - DNA, 75 bp, synthetic construct
  source 1..75: mol_type = other DNA
tgtgtatcctgaagtgctgtcgttggtatttgatgcagctaacacatacaacgctgagcctggtgtactggaaca

SEQ ID NO: 30798 - DNA, 75 bp, synthetic construct
  source 1..75: mol_type = other DNA
aaacccggcgtaaagatgttgccagcgaggccgatttctacggcgcgatggacggggcatcgaagtttgtgcgcg

SEQ ID NO: 30799 - DNA, 75 bp, synthetic construct
  source 1..75: mol_type = other DNA
ggcctggaaaaaaaaggctatctgacctcacgccacgaacgcaccgggcgacgtgaacggcgtgtttatgacatc

SEQ ID NO: 30800 - DNA, 75 bp, synthetic construct
  source 1..75: mol_type = other DNA
aaccattcttaactgatttctgtggggactttatcgtgtcagacacactgcccgggacaacgcatcccgacaaca

SEQ ID NO: 30801 - DNA, 75 bp, synthetic construct
  source 1..75: mol_type = other DNA
cttctgcagaccactgaagatgtgcggtttgaaccatgccccggactgacggctgccggacgtggtgttgtatcg

SEQ ID NO: 30802 - DNA, 75 bp, synthetic construct
  source 1..75: mol_type = other DNA
acgcatttgaacttagccgcattgaaccaggcacaacagccaggatagcgacaaaaggcgacctgatgatagtga

SEQ ID NO: 30803 - DNA, 75 bp, synthetic construct
  source 1..75: mol_type = other DNA
aggagttgctcgactgcatttcaaagcttcgggatgatgtaaatgccctcactgttgcattttcatatttggcct

SEQ ID NO: 30804 - DNA, 75 bp, synthetic construct
  source 1..75: mol_type = other DNA
aaagaatctgcccgcagaaaaaaaagccgaatttctggcaactctgattgcaatgaaattaaaaggtgaaatctg

SEQ ID NO: 30805 - DNA, 75 bp, synthetic construct
  source 1..75: mol_type = other DNA
tctcggctacctgattgaagtaaaggagtggtggcaactcaacgaggagccgggaacatttcgcattgttgtcgg

SEQ ID NO: 30806 - DNA, 75 bp, synthetic construct
  source 1..75: mol_type = other DNA
acattcatatttatatgagtatatcctgtgtgttcattcgtttgacaggcaaagcattaaaattgtttccttttg

SEQ ID NO: 30807 - DNA, 75 bp, synthetic construct
  source 1..75: mol_type = other DNA
tatttacaggcaaagatctaaacataatgagagctgagggaggttcaggttattggctagcaaaagcagaacggc

SEQ ID NO: 30808 - DNA, 75 bp, synthetic construct
  source 1..75: mol_type = other DNA
cagcgccaaaatataaagcgttagacatgacagagcacgccttaaaggtggcaatcagaacgatagaccgccacg

SEQ ID NO: 30809 - DNA, 75 bp, synthetic construct
  source 1..75: mol_type = other DNA
ggcgaaaaagcatgctctggtcacgcgaaaaagcggccagagaatttggcgtgacacagagaacatggcacgcct

SEQ ID NO: 30810 - DNA, 75 bp, synthetic construct
  source 1..75: mol_type = other DNA
tcgaatacaaggagcacgttatccataaaaacgctgatggaacagtgcgcatgggggtaagtctggacatacgtt

SEQ ID NO: 30811 - DNA, 75 bp, synthetic construct
  source 1..75: mol_type = other DNA
cgtcatggtgtgacatttaacacagtctataaagccatccgacgaatgcggcgtataaagtatcgtcagtattcc

SEQ ID NO: 30812 - DNA, 75 bp, synthetic construct
  source 1..75: mol_type = other DNA
ccgctctggtcatcgccaccagtgcaatggcgcaggatgatttaaccattagcagccttgcaaagggcgaaacca

SEQ ID NO: 30813 - DNA, 75 bp, synthetic construct
  source 1..75: mol_type = other DNA
gcgcaatgttcacgaactggcaattcgttatggtgtgacgtttaacactgtctataaagccatccgacgaatgcg

SEQ ID NO: 30814 - DNA, 75 bp, synthetic construct
  source 1..75: mol_type = other DNA
tctggccgggatgattaaacaggcgtggtgcagtgccctgggagtggatgtcgggtgccatgccacgctggtgca

SEQ ID NO: 30815 - DNA, 75 bp, synthetic construct
  source 1..75: mol_type = other DNA
gctatatcggtaaaactattttcaccaccatcatgatgacgctgttcatgctggtgtcgctgtcgggcattatca

SEQ ID NO: 30816 - DNA, 75 bp, synthetic construct
  source 1..75: mol_type = other DNA
tatctcttctgattccgttaaccccgcaatctgcattcgctcagagtgagccggagctgaagctggaaagtgtgg

SEQ ID NO: 30817 - DNA, 75 bp, synthetic construct
  source 1..75: mol_type = other DNA
gatggagcgacgcaaacggggtaaaagtgacacgattgatgctgaatgtgccgctcacgccgcattctccggaat

SEQ ID NO: 30818 - DNA, 75 bp, synthetic construct
  source 1..75: mol_type = other DNA
gggcatgtcagcttccggggtaaaaacggtatcaagggcgaagtggtgatgcgtaacggcaaaatcctcggctgg

SEQ ID NO: 30819 - DNA, 75 bp, synthetic construct
  source 1..75: mol_type = other DNA
cgctcatgttgctggcgggctgtgccgaagtcgaaaactataacaatgtcgtgaaaacccccgcgccggactggc

SEQ ID NO: 30820 - DNA, 75 bp, synthetic construct
  source 1..75: mol_type = other DNA
ttcaagcacaagacgtatgtaagtcaatttccgttggggttgttataaaacccacacaatattatgtccctgaag

SEQ ID NO: 30821 - DNA, 75 bp, synthetic construct
  source 1..75: mol_type = other DNA
gatgggtgatcctcgtgccagtcagatgacgcgaaaatttatgctcgggtaccggtccgacaaattacaggccgg

SEQ ID NO: 30822 - DNA, 75 bp, synthetic construct
  source 1..75: mol_type = other DNA
cgccttagcccgcgtcaacaatctgacgcaatccatcctggcaaaagcgttccgtggtgaactcaccgcccagtg

SEQ ID NO: 30823 - DNA, 75 bp, synthetic construct
  source 1..75: mol_type = other DNA
gatgggattcactgaaacccatcttcgctgctatatcatgcacgatgattcggacgggcagcatatccatataat

SEQ ID NO: 30824 - DNA, 75 bp, synthetic construct
  source 1..75: mol_type = other DNA
acgggtgaatattctgaagggtgaacagcgtcgtgtcagtggcagtgcacgtgtttccctcaagcgtcatatctg

SEQ ID NO: 30825 - DNA, 75 bp, synthetic construct
  source 1..75: mol_type = other DNA
ctacatgacgccgcaggaattctgggagctggttattgtctgcctgtgtctgcgggggaatttttacgcctacaa

SEQ ID NO: 30826 - DNA, 75 bp, synthetic construct
  source 1..75: mol_type = other DNA
gtcgatggtgtgaatctcgctgaactgattaaccatgtcgctgaaaacggttattcactccgcgtggtggaggaa

SEQ ID NO: 30827 - DNA, 75 bp, synthetic construct
  source 1..75: mol_type = other DNA
taaaattcatgtcgatttaaactggcgatatctgaacgagtatcttgatcaaatcagcgctaatgatgaagttct

SEQ ID NO: 30828 - DNA, 75 bp, synthetic construct
  source 1..75: mol_type = other DNA
cgatattctacgtgcccggaaagcctccggtctgatgaaacgcaacagtcacaaaactgttaccagggtaacggc

SEQ ID NO: 30829 - DNA, 75 bp, synthetic construct
  source 1..75: mol_type = other DNA
gacgaaatgggcaaagcatgttagtaacggcctgagcgttccgccagtccggcgacaactggcggcacccaaacg

SEQ ID NO: 30830 - DNA, 75 bp, synthetic construct
  source 1..75: mol_type = other DNA
ataacgttgctcaggcactgggtcgcccgctgcgacttgaaccgcaagcagaagatgcgccgcttaacaactatg

SEQ ID NO: 30831 - DNA, 75 bp, synthetic construct
  source 1..75: mol_type = other DNA
gttgctgccgtgcgttattgaaagccgatggcacgccagctgcgccgttgattagctggcaggatgcacgcgtta

SEQ ID NO: 30832 - DNA, 75 bp, synthetic construct
  source 1..75: mol_type = other DNA
accgggttgatgactcgcaacgattacagaacggtgaccgacatcaccaccggtaaataccgtggggggcatcga

SEQ ID NO: 30833 - DNA, 75 bp, synthetic construct
  source 1..75: mol_type = other DNA
aacttggtgagttcactctaccgaaaactgaagcaagcacaaacagggttgtgcaccttatccagcccgctatca

SEQ ID NO: 30834 - DNA, 75 bp, synthetic construct
  source 1..75: mol_type = other DNA
gtcagttactcgatgagattgataacgttaacctgctggtgagcaatctgatggccagttccggcggttcagaac

SEQ ID NO: 30835 - DNA, 75 bp, synthetic construct
  source 1..75: mol_type = other DNA
gtaaaaaccgtgacgccagctgcgccgcgtaaaatggccgtggcagatagcggggagaactgggaaacgttttaa

SEQ ID NO: 30836 - DNA, 75 bp, synthetic construct
  source 1..75: mol_type = other DNA
gcacgccagcaatccccggctggctgcgtgatggtattcgccgcccgtattcgtcagggggtgtgccatgcctga

SEQ ID NO: 30837 - DNA, 75 bp, synthetic construct
  source 1..75: mol_type = other DNA
gtgaaaacgggggccgaagccatccgggcgctggccatgcagatcccggcatttcgtcagaaactgagcgacggc

SEQ ID NO: 30838 - DNA, 75 bp, synthetic construct
  source 1..75: mol_type = other DNA
gcgacgctggctgatagaggaataccacaaggcgtggaaaagtggtggtacatgtgtggaatcgctgcgaatgca

SEQ ID NO: 30839 - DNA, 75 bp, synthetic construct
  source 1..75: mol_type = other DNA
ggttgagagataccaactccggcatggaatgtgatggtgttcgctggatttataacacaacggaacaatggctgg

SEQ ID NO: 30840 - DNA, 75 bp, synthetic construct
  source 1..75: mol_type = other DNA
gccagtgcattcatgaaagacaggggcatggcttccggggttattaacggtaatgaatttaatcagcaggggtaa

SEQ ID NO: 30841 - DNA, 75 bp, synthetic construct
  source 1..75: mol_type = other DNA
ggttatccgcctggggcgttcgtctgtacagcgttgtgtgaatcatatttctgagccggataccgaaattccgcc

SEQ ID NO: 30842 - DNA, 75 bp, synthetic construct
  source 1..75: mol_type = other DNA
atgaaaaaggctaaaatactttctggcgtattattactgtgcttttcgtccccattaatttctcaggctgcgaca

SEQ ID NO: 30843 - DNA, 75 bp, synthetic construct
  source 1..75: mol_type = other DNA
cattttagcagcaacggcacacgttacggaccctacgtaaaactgtcctgggacgcgacaaaagatcttaatttt

SEQ ID NO: 30844 - DNA, 75 bp, synthetic construct
  source 1..75: mol_type = other DNA
gcaggggccagtatgatcctgggtggtgtggcgcagatgctggcaccgaaagccaggacgcccacggcagccagt

SEQ ID NO: 30845 - DNA, 75 bp, synthetic construct
  source 1..75: mol_type = other DNA
ttattttctcaagactcccagcaagatcgaagtcattaacgatatcaacggtgaactggtaaatctgtatcgggt

SEQ ID NO: 30846 - DNA, 75 bp, synthetic construct
  source 1..75: mol_type = other DNA
gcatcggtcgatgaaagcgccatcaccggggaatcggcaccggtgatccgtgaatccggcggcgattttgcctcc

SEQ ID NO: 30847 - DNA, 75 bp, synthetic construct
  source 1..75: mol_type = other DNA
aatataatgcaacagccgatgtaccaactaaatggctggtatggtgcaaacggtggcgtgctacctcagtacttc

SEQ ID NO: 30848 - DNA, 75 bp, synthetic construct
  source 1..75: mol_type = other DNA
gaattaacgtttctatatcaggttaccatggcactggcgttttttatgtaccagagcatggtaaaccaacaacgc

SEQ ID NO: 30849 - DNA, 75 bp, synthetic construct
  source 1..75: mol_type = other DNA
ggatgaacctgaatgggcatcacgtgccgaaaaggttgccgcgcgtatgcaggatctcacctcttttattgttaa

SEQ ID NO: 30850 - DNA, 75 bp, synthetic construct
  source 1..75: mol_type = other DNA
agcagcagaccaccgtcttgctgaattaacaatgaacaggttatatgacagggttccaaaagaggtctgggcata

SEQ ID NO: 30851 - DNA, 75 bp, synthetic construct
  source 1..75: mol_type = other DNA
ctgcaaccggcctgtaatgagatgtaccgcgtgctgaaaaaagacgcgctgatggtgagcttctatggctggaac

SEQ ID NO: 30852 - DNA, 75 bp, synthetic construct
  source 1..75: mol_type = other DNA
ccatcacccgacggaaaagcccgttaccagcctgcaaccgctgattgagagcttcacacacccgaacgcgattgt

SEQ ID NO: 30853 - DNA, 75 bp, synthetic construct
  source 1..75: mol_type = other DNA
gatggtcagcttctacggctggaaccgcgtcgatcgctttatggccgcctggaaaaatgcgggattcagcgtggt

SEQ ID NO: 30854 - DNA, 75 bp, synthetic construct
  source 1..75: mol_type = other DNA
tgccggtgatgttaatgatgactggctgcaacctgccagcaatgagatgtaccgcgtactcaaaaaagacgcgct

SEQ ID NO: 30855 - DNA, 75 bp, synthetic construct
  source 1..75: mol_type = other DNA
cgccggcgataaaaccgatgaatggctgcaaccggcctgtaatgaaatgtaccgcgtactcaaaaaagacgcgct

SEQ ID NO: 30856 - DNA, 75 bp, synthetic construct
  source 1..75: mol_type = other DNA
tccgtgctggcaaccggtaaccttactgcttcggcaaccggtcagttgaccagtaccggcgatatcatgagccag

SEQ ID NO: 30857 - DNA, 75 bp, synthetic construct
  source 1..75: mol_type = other DNA
gcatcagccgcagaacactcgttaaatcaaccgcgataggttctctggcgctggctgcaggcggtttttctttac

SEQ ID NO: 30858 - DNA, 75 bp, synthetic construct
  source 1..75: mol_type = other DNA
ctggcgcggggaacaccgccgcggactcacgagcaggccatcacagaccggtttatccccgctggcgcggggaac

SEQ ID NO: 30859 - DNA, 75 bp, synthetic construct
  source 1..75: mol_type = other DNA
catctctgctcgttaaacaaaatccaggtatgcattacggtcacggctggatcgcgggtaaagatggtaagcgct

SEQ ID NO: 30860 - DNA, 75 bp, synthetic construct
  source 1..75: mol_type = other DNA
aaagcagcggaagaaatcgggcagcttgtcaccgttgcacgcgaagaactccagcgtcgcaagaccaaagaacca

SEQ ID NO: 30861 - DNA, 75 bp, synthetic construct
  source 1..75: mol_type = other DNA
acctgtcgggaaactcatacggggtttcatgtatggatgaatgcccgtcaggatggaggacgtccggaacattat

SEQ ID NO: 30862 - DNA, 75 bp, synthetic construct
  source 1..75: mol_type = other DNA
gatctaatggctataacaacaaaagaccttggtaattggataacatatgggccatctgggcaccccatttctaat

SEQ ID NO: 30863 - DNA, 75 bp, synthetic construct
  source 1..75: mol_type = other DNA
cttattcattaacagttgcagctatgctgtcagccgccatcgtctgtcagacagcacatgctgatgtcaacacac

SEQ ID NO: 30864 - DNA, 75 bp, synthetic construct
  source 1..75: mol_type = other DNA
ttgctgcggcaatggtgatgggcgtgttcacctctacggcaacaatcgctgcgggtaacaacggtactgcacgtt

SEQ ID NO: 30865 - DNA, 75 bp, synthetic construct
  source 1..75: mol_type = other DNA
caggtgacaggagatgtggttaatgccctggtggaaaaccgcggtctggtcagtgcccgggatggtcaggtgtac

SEQ ID NO: 30866 - DNA, 75 bp, synthetic construct
  source 1..75: mol_type = other DNA
gcataaccaatgctccgtctgcaccttttggtgtttatgacccttcaagtacaaacaacttaggccctggattaa

SEQ ID NO: 30867 - DNA, 75 bp, synthetic construct
  source 1..75: mol_type = other DNA
accagtttgaacgtgcaaacggttcgacttatcgggaactggagatagcgctgccccgtgaactgacaccggaac

SEQ ID NO: 30868 - DNA, 75 bp, synthetic construct
  source 1..75: mol_type = other DNA
ttaattccagtcccttctatggagatacaggaacgtatagtatctattctcgataaattcgacaccctgacaaac

SEQ ID NO: 30869 - DNA, 75 bp, synthetic construct
  source 1..75: mol_type = other DNA
aacataatttaaaccctaagtatgtctcatatttttttcaaacagaacaattccaaaatcaaaaaagacagtata

SEQ ID NO: 30870 - DNA, 75 bp, synthetic construct
  source 1..75: mol_type = other DNA
aaatcgagttgcgccagaaacaatacgagtactatcgtgatttactgttcagtttcccgaaacctgaaactgtca

SEQ ID NO: 30871 - DNA, 75 bp, synthetic construct
  source 1..75: mol_type = other DNA
tcagtggacataaaacagaaaatcaggtgttgatttatgatcgtaaaacaaaaatcacgccgacactggatttgc

SEQ ID NO: 30872 - DNA, 75 bp, synthetic construct
  source 1..75: mol_type = other DNA
acagagggctgctgacgcttatttctgctggcctgatgttctttatattgctcagggccgcggtgagtatgctgc

SEQ ID NO: 30873 - DNA, 75 bp, synthetic construct
  source 1..75: mol_type = other DNA
atatttctattatccccgattacagacaagcctggaaagtggaacataaattgtcggatattctactgttgacta

SEQ ID NO: 30874 - DNA, 75 bp, synthetic construct
  source 1..75: mol_type = other DNA
ccgaaaagtgctgttgagccatcggtcatcgcacaggttgtcatcagcaaatataccgaccatctgcccctgtat

SEQ ID NO: 30875 - DNA, 75 bp, synthetic construct
  source 1..75: mol_type = other DNA
acgggtgagccggtcaccattcagcagggcagcccgtggcggctcgacaccatctttcgcaccaatatgtccgta

SEQ ID NO: 30876 - DNA, 75 bp, synthetic construct
  source 1..75: mol_type = other DNA
aatggcggatatggtcggtgttgctggcgctgcactggccccgctggcaaaattgttacgccacgagcttctgac

SEQ ID NO: 30877 - DNA, 75 bp, synthetic construct
  source 1..75: mol_type = other DNA
attgaccttcattcaggaaaaaacatcattaatgatggattttccttccgtaaggatattcgatccggaatatca

SEQ ID NO: 30878 - DNA, 75 bp, synthetic construct
  source 1..75: mol_type = other DNA
cccgacatcagggatattcttgatattttccctcagccactgcgggaaaagctgttgaacaaaatcagtgaagcc

SEQ ID NO: 30879 - DNA, 75 bp, synthetic construct
  source 1..75: mol_type = other DNA
atgaacgctgaaactattaaagatttcctcgtctcgcttggcttcagtgtggatgatgctggagcaaaaaaattc

SEQ ID NO: 30880 - DNA, 75 bp, synthetic construct
  source 1..75: mol_type = other DNA
atgggacaaattttcaggaaagtactgatcgatgttttccgggaagctcagcaaacgggcgatgtcccgccaggc

SEQ ID NO: 30881 - DNA, 75 bp, synthetic construct
  source 1..75: mol_type = other DNA
cggcggcacacgttcgcaccagccgctatatgtctgacagcgtcaaagagagttacctgcagtgccagaatgtgc

SEQ ID NO: 30882 - DNA, 75 bp, synthetic construct
  source 1..75: mol_type = other DNA
atgcaaactaagcttctggcaattatgcttgtagcacctgttgtattttgctctcaggctgcttctacctctgat

SEQ ID NO: 30883 - DNA, 75 bp, synthetic construct
  source 1..75: mol_type = other DNA
cgtgcctccatcttagccgggctggcagggatgcaagggtacgcttcgccgctgcggtcacccggtccctccttc

SEQ ID NO: 30884 - DNA, 75 bp, synthetic construct
  source 1..75: mol_type = other DNA
ccgcagggtggcaaaacgggtgtggcggcgtgaacgggacctgacgggctggatgtcgctgtcacggaaaccgca

SEQ ID NO: 30885 - DNA, 75 bp, synthetic construct
  source 1..75: mol_type = other DNA
agttcttcaaaaatatactgtccccattacatcgctatcgccagaacgcgcttatcgatgcaaccagcgcagtca

SEQ ID NO: 30886 - DNA, 75 bp, synthetic construct
  source 1..75: mol_type = other DNA
acaggataacgggacaggcaaaaacgacgccggaacgattacgatgagcggaacatccgttgttgacggtgtgct

SEQ ID NO: 30887 - DNA, 75 bp, synthetic construct
  source 1..75: mol_type = other DNA
gcgccgccatgcttcaggctggaaactttcgggaaaataagggttcgtcaaccaataattttcgggaaatctcgg

SEQ ID NO: 30888 - DNA, 75 bp, synthetic construct
  source 1..75: mol_type = other DNA
actgatgctgaccacggatgcagggatcacggaaggcgtactccttcagcgaagcgatggtgttgtgtaccgcat

SEQ ID NO: 30889 - DNA, 75 bp, synthetic construct
  source 1..75: mol_type = other DNA
gcgctgccgctgactgatatccacgctgtcacgcttcaccccgacagttttaccccggacgctactgtgcgcaac

SEQ ID NO: 30890 - DNA, 75 bp, synthetic construct
  source 1..75: mol_type = other DNA
atgaagactcttgatatccgggtcgctttcagcgccgttgacaggctgacccgacctgccgaaaacgcccgccgc

SEQ ID NO: 30891 - DNA, 75 bp, synthetic construct
  source 1..75: mol_type = other DNA
atgattacggccaccgcgtgtcccgcgacaccgttcacacccacattgcctggcttgccgagcagggactggtgc

SEQ ID NO: 30892 - DNA, 75 bp, synthetic construct
  source 1..75: mol_type = other DNA
ccatcatgcgtgagtcggaacgtatgaatagaaaagaattcagtgacttaactggagttccgtatagctctcttt

SEQ ID NO: 30893 - DNA, 75 bp, synthetic construct
  source 1..75: mol_type = other DNA
cggattgcgcagtcgcctgctaaatctgtttggcaaccagaagaatatgaggtagcagaacatgaaattctgctc

SEQ ID NO: 30894 - DNA, 75 bp, synthetic construct
  source 1..75: mol_type = other DNA
ctcgtttccggcctgatgcatcacgatattctgaccggaagcgcaaagtcttttgctgatttaaacgcgcaggtt

SEQ ID NO: 30895 - DNA, 75 bp, synthetic construct
  source 1..75: mol_type = other DNA
tcccttgttagaaaactttctggcagataggggacttaccctctcgccagaaaagacgcgaatcacacacatcag

SEQ ID NO: 30896 - DNA, 75 bp, synthetic construct
  source 1..75: mol_type = other DNA
ctccctgcgatgcaaaacgaactgctggataagcactacctgcgtaagcatggggccaatgcctattacgggcag

SEQ ID NO: 30897 - DNA, 75 bp, synthetic construct
  source 1..75: mol_type = other DNA
tcagaaactgcgtgcagaactccatgaagccaagaaaaacattccacccaaaaatcctgtcgatgcagataaatt

SEQ ID NO: 30898 - DNA, 75 bp, synthetic construct
  source 1..75: mol_type = other DNA
gatattagtgctaaagatgcaaaaagcacacagaaagcctggaattgtcgtcactccagacagtcaaacgataaa

SEQ ID NO: 30899 - DNA, 75 bp, synthetic construct
  source 1..75: mol_type = other DNA
tgtatcaggatcttgtcagtcgaactaaagcggcacttgaggcgaatccaaagaatgtgctgttatctgtcgtat

SEQ ID NO: 30900 - DNA, 75 bp, synthetic construct
  source 1..75: mol_type = other DNA
gaccgcgattacacctggaacgacaacggcgaactcatccgcatcagcagcccgcgccagacccggagttacagc

SEQ ID NO: 30901 - DNA, 75 bp, synthetic construct
  source 1..75: mol_type = other DNA
atgaacaggcaacggctgaaacagtggaaccggatgcaactgaacatcatcaggacacgcagccgctggatgctc

SEQ ID NO: 30902 - DNA, 75 bp, synthetic construct
  source 1..75: mol_type = other DNA
ccgcgacaaattcatcaccatgcctggcgggctggattattcccgcgccatcgtggttgcgtccgtaaaagaagc

SEQ ID NO: 30903 - DNA, 75 bp, synthetic construct
  source 1..75: mol_type = other DNA
cctggacgctctggagtccgagctttaccgcaacctgcgccccctgtatcccaaaacggtaattcgtatccgcaa

SEQ ID NO: 30904 - DNA, 75 bp, synthetic construct
  source 1..75: mol_type = other DNA
cgaaacaggagcatggaaagatgctgttgattgggtactcaaagaggcctgctgtgctgtcattctgggtaaagc

SEQ ID NO: 30905 - DNA, 75 bp, synthetic construct
  source 1..75: mol_type = other DNA
ttgctgaggttgctgaggttgctgaggttgctgaggttgctgaggttgctgaggttgctgaggttgctgaggttg

SEQ ID NO: 30906 - DNA, 75 bp, synthetic construct
  source 1..75: mol_type = other DNA
atctggatgatgactactttgacatgttgcaggaggagctttgcagcgttgtggaggcatccggtgccagcctgg

SEQ ID NO: 30907 - DNA, 75 bp, synthetic construct
  source 1..75: mol_type = other DNA
cgcaagaatccgtttggcgatatcaaatcggatggcacggtgaaaacggctctcgaaaaccttggtttgggagaa

SEQ ID NO: 30908 - DNA, 75 bp, synthetic construct
  source 1..75: mol_type = other DNA
tggttacgacacaaaagatgaatgggaactggctacgattttcaaaaagacatacacacaaggacggggacttga

SEQ ID NO: 30909 - DNA, 75 bp, synthetic construct
  source 1..75: mol_type = other DNA
gaattgttatcacccgagacggtgaaaagcggatgaaattacattccactgaaacgtcctgggttgccggacgtt

SEQ ID NO: 30910 - DNA, 75 bp, synthetic construct
  source 1..75: mol_type = other DNA
aggcatgcgggatttaatcaagtcccagccggtctatgagatccagtattacggcaaaaccttccggatgaacgc

SEQ ID NO: 30911 - DNA, 75 bp, synthetic construct
  source 1..75: mol_type = other DNA
accttctttgttgtctcctggattctggggcatcaggggaaacagcagagtgaaaatgaggtgaccggcgggcgt

SEQ ID NO: 30912 - DNA, 75 bp, synthetic construct
  source 1..75: mol_type = other DNA
atgtcattccaactaaccaatgaaacttcaaatcagtggcttagtgttagttctcttgctgcggttattgcaggt

SEQ ID NO: 30913 - DNA, 75 bp, synthetic construct
  source 1..75: mol_type = other DNA
ggatatcgcgacgatgcagaacgactcgctgatgagcagtcagagcttgttaagaagatggtgtttgatacgctg

SEQ ID NO: 30914 - DNA, 75 bp, synthetic construct
  source 1..75: mol_type = other DNA
gatttgcgatcctgcggatatgctgatcattcagatgacggaggaaaaagcccgcgaacactccaaaaaacgact

SEQ ID NO: 30915 - DNA, 75 bp, synthetic construct
  source 1..75: mol_type = other DNA
gcggcaacgactaaacctgcaggtgcgaatgaaacacgcccacgaaatgtcgcttttaactatattgtgagggct

SEQ ID NO: 30916 - DNA, 75 bp, synthetic construct
  source 1..75: mol_type = other DNA
ttgaacgtgatgctgacaaaatcacggctgaaatgattgcacagtacgaagccgcaactggcaagacgctatacc

SEQ ID NO: 30917 - DNA, 75 bp, synthetic construct
  source 1..75: mol_type = other DNA
cgctgattctggcgttaatctgcgttactcagccgtttaacccgctggcgcagtttatcttcctgatgctgctgt

SEQ ID NO: 30918 - DNA, 75 bp, synthetic construct
  source 1..75: mol_type = other DNA
ccttcctggtgaagatccatctcaactgaatgatccggcttaccgccgtctgcgtatcattaccgataacctcaa

SEQ ID NO: 30919 - DNA, 75 bp, synthetic construct
  source 1..75: mol_type = other DNA
tccacggacccggacagtccgtatctgattacggtgaacccgaaactggatggtctcggacaggtggacagccat

SEQ ID NO: 30920 - DNA, 75 bp, synthetic construct
  source 1..75: mol_type = other DNA
ggaaatacggctgcagatgggatccgttgttacggtgccattcaggatgcgcaggcgttgtccgaaggtgtggtg

SEQ ID NO: 30921 - DNA, 75 bp, synthetic construct
  source 1..75: mol_type = other DNA
gacatcccggtagacctcaacacgctgtggtcgccggacacctgcccggtgcatctgctgccttatctcgcctgg

SEQ ID NO: 30922 - DNA, 75 bp, synthetic construct
  source 1..75: mol_type = other DNA
gcgttttacggggctgaagcggggttaccgactggcagagctggtcctgatgcatgagcgactggcacgacagca

SEQ ID NO: 30923 - DNA, 75 bp, synthetic construct
  source 1..75: mol_type = other DNA
cgtttttcatttgcagggccttcacgaggtgatggggttaattatgtaaccattcgtcctcgtaacattgcgttt

SEQ ID NO: 30924 - DNA, 75 bp, synthetic construct
  source 1..75: mol_type = other DNA
aggtgatgcgcatgtggcgttaccggataacgcgattactgtcccggaaatacccggagctggtgataccggctg

SEQ ID NO: 30925 - DNA, 75 bp, synthetic construct
  source 1..75: mol_type = other DNA
attttcagccggtgatggataacatgaccggataccggaataacccggattttgtggctgccggtcaggctgccc

SEQ ID NO: 30926 - DNA, 75 bp, synthetic construct
  source 1..75: mol_type = other DNA
gtgttcacacttccctgccagtactggtccctggtgttccacaaccggtggttactggcagagatgagccgcatt

SEQ ID NO: 30927 - DNA, 75 bp, synthetic construct
  source 1..75: mol_type = other DNA
tgttgccatatgtggcgattagtcttgaccgtactgaaggtgccacgctggagttttacgaagctgaggcgaaaa

SEQ ID NO: 30928 - DNA, 75 bp, synthetic construct
  source 1..75: mol_type = other DNA
accactcgcaccacaaactcaaaattcgcggcctgcaaggtccggtggatgtgctgaccttcgaaggccgcgaac

SEQ ID NO: 30929 - DNA, 75 bp, synthetic construct
  source 1..75: mol_type = other DNA
gcagagcactgaaggaatggcagaaactcggccacaccatccgtgaacaattcaaaaagaaactggcagaacggc

SEQ ID NO: 30930 - DNA, 75 bp, synthetic construct
  source 1..75: mol_type = other DNA
gccgacaacttcctgcaaaaaggcgataaagaggcagcggaaagcggcgcgttttacgcccgtatccgccacgaa

SEQ ID NO: 30931 - DNA, 75 bp, synthetic construct
  source 1..75: mol_type = other DNA
tgataagtgagaagcaaatggaagcgataaagaaaattcaggaagagcagcgtaaaaaatcaggaattggagtag

SEQ ID NO: 30932 - DNA, 75 bp, synthetic construct
  source 1..75: mol_type = other DNA
aggggcagacttttgacaaatctgcatacccgaaacttgcagccgcttatccgtcaggcgtgatccctgatatgc

SEQ ID NO: 30933 - DNA, 75 bp, synthetic construct
  source 1..75: mol_type = other DNA
atgacttatacggttaaattcagggatgatgccctcagggaatggctgaaactggataaatccgttcaacaacag

SEQ ID NO: 30934 - DNA, 75 bp, synthetic construct
  source 1..75: mol_type = other DNA
acggcggcgatgttcatcgtttaatgatcaccggattctgctggggtggacgtatcacctggctgtatgccgcgc

SEQ ID NO: 30935 - DNA, 75 bp, synthetic construct
  source 1..75: mol_type = other DNA
cagtcatcatcgcttctaccgacatccaaacctgcttaaaccaggccctgaacaggttaccgctcttgaaccaga

SEQ ID NO: 30936 - DNA, 75 bp, synthetic construct
  source 1..75: mol_type = other DNA
aagttttaaagcaggcaccgatccggacgaagccgtgcagcaagtacaaaaccagctgcaatcagccatgcgaaa

SEQ ID NO: 30937 - DNA, 75 bp, synthetic construct
  source 1..75: mol_type = other DNA
gcaacttggtggtacaccttccgtcgataagcaggcgctcaacgccaccattaacgcccagtcactgctgcaaac

SEQ ID NO: 30938 - DNA, 75 bp, synthetic construct
  source 1..75: mol_type = other DNA
atccccggctataacgcgaatccggacgagacaaaatattacggtggcgtgactgccggcggggatggcggcctg

SEQ ID NO: 30939 - DNA, 75 bp, synthetic construct
  source 1..75: mol_type = other DNA
taatgaagtcggagcctgggttatacactactccactgattatgttttcccaggcaacggtgacacgccatggct

SEQ ID NO: 30940 - DNA, 75 bp, synthetic construct
  source 1..75: mol_type = other DNA
cagggcaggtaggttgggaactacagcgtgctctggcacctctgggtaatttgattgctcttgatgttcactcca

SEQ ID NO: 30941 - DNA, 75 bp, synthetic construct
  source 1..75: mol_type = other DNA
gttattactataacatcaccacattctgtccggatacggatgaggatgcgctggtctgcgaacagcaggttatca

SEQ ID NO: 30942 - DNA, 75 bp, synthetic construct
  source 1..75: mol_type = other DNA
gctggccgcaacgccgaaagcggttaaggccgcgtatgacctggctaacggaaaatataccgctcaggacgccac

SEQ ID NO: 30943 - DNA, 75 bp, synthetic construct
  source 1..75: mol_type = other DNA
cctgaatttccatctggcccgtaacccggaaatcgccttcctgtggaacatggccgacaactacagcaacctgct

SEQ ID NO: 30944 - DNA, 75 bp, synthetic construct
  source 1..75: mol_type = other DNA
ttatcggcggttctgttggatgtactctgcgctggttactgtccacacgctttaacagtctttttccaaatctac

SEQ ID NO: 30945 - DNA, 75 bp, synthetic construct
  source 1..75: mol_type = other DNA
attcctctcgtcactggtgctgacctgctggcgcagtacgcctgtatggggcttggttttaagctggtggtggtc

SEQ ID NO: 30946 - DNA, 75 bp, synthetic construct
  source 1..75: mol_type = other DNA
acgagacaaaatattacggtggcgtgactgccggcggggatggcggcctgaaaaatgacggcaccacggaatggg

SEQ ID NO: 30947 - DNA, 75 bp, synthetic construct
  source 1..75: mol_type = other DNA
tgacatcttctctcccggcccggatggtataccgaacacggaagatgatattggtaactggacgcccggtcacac

SEQ ID NO: 30948 - DNA, 75 bp, synthetic construct
  source 1..75: mol_type = other DNA
gtcagacgatgagctggaaaccgtcatgcagcggctggacgatgcctttgaatatggtgcggatgtcagcattgt

SEQ ID NO: 30949 - DNA, 75 bp, synthetic construct
  source 1..75: mol_type = other DNA
taaggaactggtcgaaatcgacaccatcaacatgattgagaaggtgaatggcgtcgaccggctggagcaacaccg

SEQ ID NO: 30950 - DNA, 75 bp, synthetic construct
  source 1..75: mol_type = other DNA
cggatgacattctggattatgtggccatcgacaccgataacgccggacaactgcggatcagggttgttgagggaa

SEQ ID NO: 30951 - DNA, 75 bp, synthetic construct
  source 1..75: mol_type = other DNA
caggaagaacgcctgtctaaactggagactgccttgcaggcacagcaaaccgcctttaacgaactggtggacaag

SEQ ID NO: 30952 - DNA, 75 bp, synthetic construct
  source 1..75: mol_type = other DNA
atgagacactttatctatcaggacgaaaaatcacataaattctgggcggtggagcaacagggaaacgagttgcat

SEQ ID NO: 30953 - DNA, 75 bp, synthetic construct
  source 1..75: mol_type = other DNA
cgaactggaggaagtccaggacgacaaaccgtccctgttttcccgcgtcacggcgctgttcaccaaaaaagagca

SEQ ID NO: 30954 - DNA, 75 bp, synthetic construct
  source 1..75: mol_type = other DNA
cgaactggaagaaatccaggacgacaaaccgtccctgtttgcccgcgtcacggcgctgtttaccaaaaaagagca

SEQ ID NO: 30955 - DNA, 75 bp, synthetic construct
  source 1..75: mol_type = other DNA
gctacggcaaggtgacggcgctgtttgctgaagaaatcgcggaaggtccgctggcaggcaagatggcactgtatg

SEQ ID NO: 30956 - DNA, 75 bp, synthetic construct
  source 1..75: mol_type = other DNA
aaggcggcagccgcatcgtcagccagttcagcggcgtcatcggcatcatctgcgtctgcttcaaaagatgaggcg

SEQ ID NO: 30957 - DNA, 75 bp, synthetic construct
  source 1..75: mol_type = other DNA
cactatgcggatgccattcgttataatgctcgaacgcctctgcaaggttctttgctgccgttaacccgtctggtt

SEQ ID NO: 30958 - DNA, 75 bp, synthetic construct
  source 1..75: mol_type = other DNA
tgagcccggcgcaagagcgtaacctggagcgtttgtgcgagtgtcgtgtcatcgaccgcaccggccttattttag

SEQ ID NO: 30959 - DNA, 75 bp, synthetic construct
  source 1..75: mol_type = other DNA
gcatccctgcagatttatatattgtttatgaaacacagcaggtgacgcccgcgatggttaagctgttggctgcat

SEQ ID NO: 30960 - DNA, 75 bp, synthetic construct
  source 1..75: mol_type = other DNA
tcggaggcatccgagcaggcctggatggcatcggtgtacaaattctacggtgccggcgcatccgaagagcttgac

SEQ ID NO: 30961 - DNA, 75 bp, synthetic construct
  source 1..75: mol_type = other DNA
tgggtggcagacacctctccgcttaaggtgatagaaaagagccgtcgtaccggtattacatgggctgaggcatcc

SEQ ID NO: 30962 - DNA, 75 bp, synthetic construct
  source 1..75: mol_type = other DNA
tgtgctctggatcaagcgtggtgatgtggaagcgctgcagaaagcccggaacagagccagttatctcgtgaaata

SEQ ID NO: 30963 - DNA, 75 bp, synthetic construct
  source 1..75: mol_type = other DNA
gagcgccataatgcacttgatgacgcccgttaccaggcaaaatacgtttcagctatctggcaaaaactgatcccg

SEQ ID NO: 30964 - DNA, 75 bp, synthetic construct
  source 1..75: mol_type = other DNA
ggaaaaaatcctgatgccccgattatctcaataggtgcaatatttttcgatccgcaaaccggagatatgggaccg

SEQ ID NO: 30965 - DNA, 75 bp, synthetic construct
  source 1..75: mol_type = other DNA
caacaccgatcctgttcttcccgtcctgcagggagaagcacgacagcagaaacgtggtctgtgggcagacagcgc

SEQ ID NO: 30966 - DNA, 75 bp, synthetic construct
  source 1..75: mol_type = other DNA
attatgcccgtcatcaggagctgggattcaaagccatccgcgtgcagtgcggaatccctggtatgaaaaccacct

SEQ ID NO: 30967 - DNA, 75 bp, synthetic construct
  source 1..75: mol_type = other DNA
catttcattttcactcatgctggttgccattttcttttccaccgcctggcgagtcctgacgttatcgggactggt

SEQ ID NO: 30968 - DNA, 75 bp, synthetic construct
  source 1..75: mol_type = other DNA
cgcttagcaccctgttcaccgatgcccgcactcacaacggctggcgggagacacccgtcagcgatgagacgttac

SEQ ID NO: 30969 - DNA, 75 bp, synthetic construct
  source 1..75: mol_type = other DNA
accgctgagcttaccgctgagcttaacatgcgtaaaaaacaatacaactactatcgcgaccagttgttgagtttt

SEQ ID NO: 30970 - DNA, 75 bp, synthetic construct
  source 1..75: mol_type = other DNA
tgaaacgaagttgcataacggttccgggcaacgtaattatggttgcagtcgtgggccggggcgtctactggatgg

SEQ ID NO: 30971 - DNA, 75 bp, synthetic construct
  source 1..75: mol_type = other DNA
tggtggctggactgacagggggcgttatgcttatggaatgttctggcaatatcaaaacaatgaacgagccatcca

SEQ ID NO: 30972 - DNA, 75 bp, synthetic construct
  source 1..75: mol_type = other DNA
aatgcgggtattttgttagtgccgtgctgtcgtggtggctctgcgtttacagccggtgctgacggaacgttcagt

SEQ ID NO: 30973 - DNA, 75 bp, synthetic construct
  source 1..75: mol_type = other DNA
actacgaaagcgtcagaagctgccacctcagcccgggatgcgtcggcttcaaaagaggcggcaaaatcatcagaa

SEQ ID NO: 30974 - DNA, 75 bp, synthetic construct
  source 1..75: mol_type = other DNA
actgctaatggtgaggcggtaaaacgcgaagtggagcgtcgtgtgaaggagcgcatgattctgtcacgtaaccgt

SEQ ID NO: 30975 - DNA, 75 bp, synthetic construct
  source 1..75: mol_type = other DNA
atgaacgaccagcaaatcgaaaaagaaatcgttgagaaaggcaaaaccgctccgcgagttacgcctcaatatatc

SEQ ID NO: 30976 - DNA, 75 bp, synthetic construct
  source 1..75: mol_type = other DNA
cgggcttacgtggtgggcttgatgatgaacgcggcgcgctaactttgaagtatgtggagcttgcaaatgcaattg

SEQ ID NO: 30977 - DNA, 75 bp, synthetic construct
  source 1..75: mol_type = other DNA
agaacggctgcgtattgcactgctgaatgtggattacgtcaccagttttgaactgccttttcgcttgttgcttac

SEQ ID NO: 30978 - DNA, 75 bp, synthetic construct
  source 1..75: mol_type = other DNA
ggccattatggatatggatgttaacgcgatgatgaccgtgatcccccgcatttccagtccggcactgactgcaca

SEQ ID NO: 30979 - DNA, 75 bp, synthetic construct
  source 1..75: mol_type = other DNA
acagggtaagctgcctgcgggagtcagcgccgagctggggccagatgccacgggtgttggctggatctatgaata

SEQ ID NO: 30980 - DNA, 75 bp, synthetic construct
  source 1..75: mol_type = other DNA
ctatgtggaatgcgtacagatggatcgttggtatgagccgcctgtgagtttcgacggactggcgcgaactttccg

SEQ ID NO: 30981 - DNA, 75 bp, synthetic construct
  source 1..75: mol_type = other DNA
gcgtggccttcacctccacccgtgcggcacgagaatggctgattctgaacatggcgggactggagcgtgaagagt

SEQ ID NO: 30982 - DNA, 75 bp, synthetic construct
  source 1..75: mol_type = other DNA
aaaactttatacggtaactgatcaaatacgtaacaaaacaagtttctttttacctcagaatcctgagttaatata

SEQ ID NO: 30983 - DNA, 75 bp, synthetic construct
  source 1..75: mol_type = other DNA
atgcaacagctttcctttctgcccggagcgatgacgcccggtgagcgcagtctcattctgcgggccctgaaaacc

SEQ ID NO: 30984 - DNA, 75 bp, synthetic construct
  source 1..75: mol_type = other DNA
cgacataagtggcggaaatctcgctgaacaggcagtaaccgccgctctggcttaccgtacacaggctccgctcat

SEQ ID NO: 30985 - DNA, 75 bp, synthetic construct
  source 1..75: mol_type = other DNA
caaaattatgggagtttttacaaagtctggggaaaacctttatgttcccggtttcgcttcttgcctttatgggat

SEQ ID NO: 30986 - DNA, 75 bp, synthetic construct
  source 1..75: mol_type = other DNA
aacataaccgatggttaaaatcacgaataagtgctatcagaaaaaatgtcttatccggtcagtcactggcactgg

SEQ ID NO: 30987 - DNA, 75 bp, synthetic construct
  source 1..75: mol_type = other DNA
cttcaggggtatatcaacgcctacttaacggagactgatcacgagaaccccagcaaggaaactctcactgctgca

SEQ ID NO: 30988 - DNA, 75 bp, synthetic construct
  source 1..75: mol_type = other DNA
gtgagcataaaccgaattatttccgcgtttaccgttattctgctggtggtctgtggtgcgcttagtctggggctg

SEQ ID NO: 30989 - DNA, 75 bp, synthetic construct
  source 1..75: mol_type = other DNA
gacgagttcgttgatgagggaacctgggaggcgacactgcatattgaggtttttctcagggcaaaagaaccggac

SEQ ID NO: 30990 - DNA, 75 bp, synthetic construct
  source 1..75: mol_type = other DNA
tgatggaaaaggcggtgggcttcacctcccgttttgatttcgccattcatgtggcgcatgcccgttcgcgtggtc

SEQ ID NO: 30991 - DNA, 75 bp, synthetic construct
  source 1..75: mol_type = other DNA
ctccatcaccacactggccattgagtgcggactggcgacggagtctgctgccggaaaactctccatcacccgtgc

SEQ ID NO: 30992 - DNA, 75 bp, synthetic construct
  source 1..75: mol_type = other DNA
tggcgaaagtccaaaataagaaaagttttcaggacaaaagcctgtgtgatgaaactgtcgatgtggcaactttaa

SEQ ID NO: 30993 - DNA, 75 bp, synthetic construct
  source 1..75: mol_type = other DNA
aaaacgcctccagccgtactacgaccgggcagacaggccgagaattgatgcctggcagacgctggtgaatcacca

SEQ ID NO: 30994 - DNA, 75 bp, synthetic construct
  source 1..75: mol_type = other DNA
ccatcaaccagtgtattgctcaggaataagtggctgacaccgccggaggatattctggagcagattacccgtgaa

SEQ ID NO: 30995 - DNA, 75 bp, synthetic construct
  source 1..75: mol_type = other DNA
atactgccgaaagttacaagccagccgttgccgaagggtccggacgtgcacaaacatttcgcaccattctgaccg

SEQ ID NO: 30996 - DNA, 75 bp, synthetic construct
  source 1..75: mol_type = other DNA
cttcaagcaaattgccgatgactaccagcaggcgctgcgtgatgtcgttgcttatgcagtacagaacggtatccc

SEQ ID NO: 30997 - DNA, 75 bp, synthetic construct
  source 1..75: mol_type = other DNA
attactccccaaaatctccaaaattgagcgatgacgcaccggcgacaggctcaggtggtttaacgattacggatg

SEQ ID NO: 30998 - DNA, 75 bp, synthetic construct
  source 1..75: mol_type = other DNA
ttcgatgagaaactggcggcgaaatatccgtatgacccggcgtatctccccgtcgcacgactggaagatggcaca

SEQ ID NO: 30999 - DNA, 75 bp, synthetic construct
  source 1..75: mol_type = other DNA
acaaagttggtggcgtggagatacgccgttgggcgcagtggttatgtcaattgttatggctggcttgcgcattgc

SEQ ID NO: 31000 - DNA, 75 bp, synthetic construct
  source 1..75: mol_type = other DNA
ttcacgccagccataaagattggctgcatgatgtacgtgtcgcaactgtacgaatacagggccacggtcggggat

SEQ ID NO: 31001 - DNA, 75 bp, synthetic construct
  source 1..75: mol_type = other DNA
aacactggaagccttccacaaattcacttcaaagcacgcctcccccattcactcatcagagggcatcccgtggca

SEQ ID NO: 31002 - DNA, 75 bp, synthetic construct
  source 1..75: mol_type = other DNA
gtctgcgtgaggccatcaagtcaggcatggcggagacgaatgcggagctgtacgagtaccgcgaacagaaaattg

SEQ ID NO: 31003 - DNA, 75 bp, synthetic construct
  source 1..75: mol_type = other DNA
ctggcggatattaatagtcagggtcaggtgcagatggcgatgaacggcggcatctatgatgaaagctatgcgccg

SEQ ID NO: 31004 - DNA, 75 bp, synthetic construct
  source 1..75: mol_type = other DNA
gtaccgcacgatgattggtgataccgacgccaaagagataccgatggctgtctctgcgttgtggtctgtctatcg

SEQ ID NO: 31005 - DNA, 75 bp, synthetic construct
  source 1..75: mol_type = other DNA
aatgaatatttcaaatggagaagccgccagagcaccacaacaaaagacctgatgaatcttaaatgggatgctttg

SEQ ID NO: 31006 - DNA, 75 bp, synthetic construct
  source 1..75: mol_type = other DNA
atggtgctgattaccagcagtacggacaatatcatcctgaaaatcgaccctgctgtagtgctggcaacccgcaag

SEQ ID NO: 31007 - DNA, 75 bp, synthetic construct
  source 1..75: mol_type = other DNA
atgtttaatgtgattactcacccgaccgcactggatgagctgctggaattaccagacaatctgcgtggtcgcatg

SEQ ID NO: 31008 - DNA, 75 bp, synthetic construct
  source 1..75: mol_type = other DNA
ggcaatgcagcgagcgtcaacaagaggaaccgctgggaatgatgagcgtacagttcagttatcagatggcagaac

SEQ ID NO: 31009 - DNA, 75 bp, synthetic construct
  source 1..75: mol_type = other DNA
tggatgagctggtggattgtgtggcagagctggaaacaaaagttggaaaatttgaaaaattggtgcagggggtac

SEQ ID NO: 31010 - DNA, 75 bp, synthetic construct
  source 1..75: mol_type = other DNA
ccgacagcatcgatgacaccatcgatgaaatgtggcgtgacatgcgctggtcggttgcccgtatccaggacaaag

SEQ ID NO: 31011 - DNA, 75 bp, synthetic construct
  source 1..75: mol_type = other DNA
tggtggatgaatatcacgagcacgccacagatgcgctttacaccacgatgcttaccgggatgggggcgcgacgtc

SEQ ID NO: 31012 - DNA, 75 bp, synthetic construct
  source 1..75: mol_type = other DNA
tgatggtgcttgccgaacagctccagctggacagtcttatcggcgcagcgccggcgctgtcgcaacaggcggtgg

SEQ ID NO: 31013 - DNA, 75 bp, synthetic construct
  source 1..75: mol_type = other DNA
gatggttcatcaccccactgtgcggtggtggatgaatatcacgagcacgccacagatgcgctttacaccacgatg

SEQ ID NO: 31014 - DNA, 75 bp, synthetic construct
  source 1..75: mol_type = other DNA
ccgtatgacacggtgtacagcgtcgagaaaaatgaagatcgccggacagccgaacgctttcagaaatgggtggaa

SEQ ID NO: 31015 - DNA, 75 bp, synthetic construct
  source 1..75: mol_type = other DNA
gggaggtgtataccgaaatcccccgtaagaacggcaaatcggcaatctctgccggtgttgccctgtattgttttg

SEQ ID NO: 31016 - DNA, 75 bp, synthetic construct
  source 1..75: mol_type = other DNA
ctcgcgcttagaaacgggtaagcaaaaacaatttaccgaacaaacactgagtaatattgccaagagcttaggtgt

SEQ ID NO: 31017 - DNA, 75 bp, synthetic construct
  source 1..75: mol_type = other DNA
caaggtcggcgtgcgcatgctggtgattgtcgacaacctctcgcgcaaccaagacatcgcggtcggactgcaagt

SEQ ID NO: 31018 - DNA, 75 bp, synthetic construct
  source 1..75: mol_type = other DNA
ttatctggtggctgctggttggcgttctgctgattggttttgcagtcactgacggtttcgacatgggggtgggca

SEQ ID NO: 31019 - DNA, 75 bp, synthetic construct
  source 1..75: mol_type = other DNA
ggatgctgagtcaggaaagggcagttttgaacggaaagacgccaaaaatttcactcactggcatgggatagcggc

SEQ ID NO: 31020 - DNA, 75 bp, synthetic construct
  source 1..75: mol_type = other DNA
tgtttttaattttactccctaagctggcggtagcgggtccggatgattatgtgccttcgcagatagcggttaata

SEQ ID NO: 31021 - DNA, 75 bp, synthetic construct
  source 1..75: mol_type = other DNA
acgttggaacctggcacaaatacaactgtggaagcatcgctggccgctggtttgacctgaccacgtttgatgatg

SEQ ID NO: 31022 - DNA, 75 bp, synthetic construct
  source 1..75: mol_type = other DNA
ctcagtagcgccaccaacagcacgtctgaaacgcaggctgcaacgccgaaagcagtaaaggccgcgtatgacctt

SEQ ID NO: 31023 - DNA, 75 bp, synthetic construct
  source 1..75: mol_type = other DNA
accggtacgcttcagggtgcggacctgctggtgaattaccacacattcagcaacagcggtaccctgctgggaacc

SEQ ID NO: 31024 - DNA, 75 bp, synthetic construct
  source 1..75: mol_type = other DNA
catcacagcgaaaccgtcattcaccgttatggtaccggcgcaatggtgttgtgctggcactgcgacaaccagctg

SEQ ID NO: 31025 - DNA, 75 bp, synthetic construct
  source 1..75: mol_type = other DNA
caaaaggcagcgagaaaggtaacggtactgagtggactgaaaccacaacagacagcggtaaaaccgtcaccatca

SEQ ID NO: 31026 - DNA, 75 bp, synthetic construct
  source 1..75: mol_type = other DNA
caacggtcattgagctgtataccatggtgctgttattacgcatctggatgcagtgggctcattgtgatttttaca

SEQ ID NO: 31027 - DNA, 75 bp, synthetic construct
  source 1..75: mol_type = other DNA
gtgaagttctggcggatcatccaggactactaaatgtcctgagtcagcgttatgtggggcgagggatgagtaaga

SEQ ID NO: 31028 - DNA, 75 bp, synthetic construct
  source 1..75: mol_type = other DNA
ctccggcatctcccggaacattgctcccggtggccatcgattaccctgccgccctcgccctgcgccagatggcgc

SEQ ID NO: 31029 - DNA, 75 bp, synthetic construct
  source 1..75: mol_type = other DNA
gacagcagtctggcaaaagctaaatcggacgcacaggctgcgtttacgaaacagcaggggcgagcctctcttgtt

SEQ ID NO: 31030 - DNA, 75 bp, synthetic construct
  source 1..75: mol_type = other DNA
gcaggtgaatgccggtttgaaccatcttttcggcgtgcccatcaatgaaacggtacaggtcattttgatcgtggt

SEQ ID NO: 31031 - DNA, 75 bp, synthetic construct
  source 1..75: mol_type = other DNA
atgaaggtcggcttctttttactgaaatttccgctgtcgtcggaaaccttcgtcctcaatcaaattaccgcgttt

SEQ ID NO: 31032 - DNA, 75 bp, synthetic construct
  source 1..75: mol_type = other DNA
tgaaaaacaaagtggaagtgaacgatctggaaagtggtcgttatggcggagatttttacccgctgactggccgtg

SEQ ID NO: 31033 - DNA, 75 bp, synthetic construct
  source 1..75: mol_type = other DNA
gaatatgtggggggcgaccaactggagcactaccggcttcatagctcactgcaattatggtcttgaaggtggtgc

SEQ ID NO: 31034 - DNA, 75 bp, synthetic construct
  source 1..75: mol_type = other DNA
gaggctcagatggagcgtaaagagtctgcatttaatcagactgagtttaataaattgcttcttgaatgcgttgta

SEQ ID NO: 31035 - DNA, 75 bp, synthetic construct
  source 1..75: mol_type = other DNA
aacatcaagtattgcaatagggcaagaagcccaatctgggataggtagtacctcattaggtttcaagagccaggc

SEQ ID NO: 31036 - DNA, 75 bp, synthetic construct
  source 1..75: mol_type = other DNA
ccatggagaacactttatcagccgggaaataatgcgggcaacggtgtttaattatatcgaatgtgattacaatcg

SEQ ID NO: 31037 - DNA, 75 bp, synthetic construct
  source 1..75: mol_type = other DNA
agtgtagctagcggtactgacagcctcgcatttggcagacaatcacttgccagcgcagcgaacgctattgcgata

SEQ ID NO: 31038 - DNA, 75 bp, synthetic construct
  source 1..75: mol_type = other DNA
agtgtagctagtggtactgacagcctcgcattaggcagacaaacacttgccagtgcagcgaacgctattgcgata

SEQ ID NO: 31039 - DNA, 75 bp, synthetic construct
  source 1..75: mol_type = other DNA
aaagctaccaatgacgatgtcgaagccaacaccgccaatatcgctactaataccagcaacattgccacgaatacg

SEQ ID NO: 31040 - DNA, 75 bp, synthetic construct
  source 1..75: mol_type = other DNA
tatatcgaatgtgattacaatcggtggcggcggcacagttggtgtggcggcctcagtccggaacaatttgaaaac

SEQ ID NO: 31041 - DNA, 75 bp, synthetic construct
  source 1..75: mol_type = other DNA
atattccagtggaaacagcattcgtcccaggggaataacaaaagttggaaacagcgaactgagacgtctgcttta

SEQ ID NO: 31042 - DNA, 75 bp, synthetic construct
  source 1..75: mol_type = other DNA
cgacagtaccggatattataaaaatcaggggaccgcgcaaaacatccagttagagctacaggatgacagtggcaa

SEQ ID NO: 31043 - DNA, 75 bp, synthetic construct
  source 1..75: mol_type = other DNA
tatattaccgaccggattctgtaacacaatattccaaagatattgcatggaaagctcaacaacgattgtgttctc

SEQ ID NO: 31044 - DNA, 75 bp, synthetic construct
  source 1..75: mol_type = other DNA
gcattttcaggaagacacaataaagattgtttacgatgagaataatattattgtcgccattaccaaagatgcatc

SEQ ID NO: 31045 - DNA, 75 bp, synthetic construct
  source 1..75: mol_type = other DNA
ccggaaaccccaaaaccattgagcagtatcagcttacgaaaaaggctggcgttatctggctatatacagaagacg

SEQ ID NO: 31046 - DNA, 75 bp, synthetic construct
  source 1..75: mol_type = other DNA
agcgggaaaaaattaaagggcaggttgttgaactagtacgccggagtgggcgcgagacgttacggcaactggaag

SEQ ID NO: 31047 - DNA, 75 bp, synthetic construct
  source 1..75: mol_type = other DNA
gtttaagcgtcgccgggtcggtgggtgcctatcagtatcatggtcgcagtgctgacgggcgtgtcgcggatatct

SEQ ID NO: 31048 - DNA, 75 bp, synthetic construct
  source 1..75: mol_type = other DNA
gatggagtctgacaccgattatcgtctgcgtattcagcaggcgtttgaaggtttaagcgtcgccgggtcggtggg

SEQ ID NO: 31049 - DNA, 75 bp, synthetic construct
  source 1..75: mol_type = other DNA
aaccagttacgcattgctggagttgggcgtgaataatctggcgttattaggtaaggagttaattacccggcctta

SEQ ID NO: 31050 - DNA, 75 bp, synthetic construct
  source 1..75: mol_type = other DNA
cgttatatgcctgggataacattgacaaaaaatgggtattagctggagttactctgcataattatggagtaaaag

SEQ ID NO: 31051 - DNA, 75 bp, synthetic construct
  source 1..75: mol_type = other DNA
agcgcgaggccgtcgtcacttttgacgacaccaaggccagcgtacagaagctgaccaaggccaccgcagacgccg

SEQ ID NO: 31052 - DNA, 75 bp, synthetic construct
  source 1..75: mol_type = other DNA
ccgccggtaatgaccttgatgtgattggtgccaattacaacaccacgcgcctgattatcaccccggcagatgatt

SEQ ID NO: 31053 - DNA, 75 bp, synthetic construct
  source 1..75: mol_type = other DNA
atctgcccagtcacagctcggcgttaaaccgcgcattctcggcgtgccaggccacgacaccaaggcggtagctac

SEQ ID NO: 31054 - DNA, 75 bp, synthetic construct
  source 1..75: mol_type = other DNA
actacacccgcacggcgcaggtgctgacggacacaatggcagaagcgcacatgtgggcagtggacaaaccgctga

SEQ ID NO: 31055 - DNA, 75 bp, synthetic construct
  source 1..75: mol_type = other DNA
gacggacacaatggcagaagcgcacatgtgggcggtggacaaaccgctgaacccgtcgctggcgcgcgacattat

SEQ ID NO: 31056 - DNA, 75 bp, synthetic construct
  source 1..75: mol_type = other DNA
gacaaaaccacacgatatgcaggcggcgattgcctgtagctcatgccacgatctaatcgacgggcgggtaaaaac

SEQ ID NO: 31057 - DNA, 75 bp, synthetic construct
  source 1..75: mol_type = other DNA
ggcttatcatttagtaagttaattcttgaagagcgaatggtgatggcggaaaggttattaagctacaatttatat

SEQ ID NO: 31058 - DNA, 75 bp, synthetic construct
  source 1..75: mol_type = other DNA
tgaagccgaacaggatcgccagatgaatattctgacgggggcttctgcaccggcaagacagaaactgagtgttgg

SEQ ID NO: 31059 - DNA, 75 bp, synthetic construct
  source 1..75: mol_type = other DNA
agactggggctaccagctggcgcgtgaagagtttggcggtgaactgatcgacggcggcccgtggctgaaagttaa

SEQ ID NO: 31060 - DNA, 75 bp, synthetic construct
  source 1..75: mol_type = other DNA
attgcaagataggattcgtgaattaaatcattggtttggtgataatttaattaagttcaagccgtatacctttga

SEQ ID NO: 31061 - DNA, 75 bp, synthetic construct
  source 1..75: mol_type = other DNA
cggaagccatggtgaagggatatatcacccgcctggagaaccagcctgtgcagggtgaagtatcgtctccggtaa

SEQ ID NO: 31062 - DNA, 75 bp, synthetic construct
  source 1..75: mol_type = other DNA
gcacgagaaggcgaataatggtcagtcttccgttattcatcagcagcaggctgaaaagcatcgcagccagatcac

SEQ ID NO: 31063 - DNA, 75 bp, synthetic construct
  source 1..75: mol_type = other DNA
acgagcatgaaaaagccgctgttgtgcacgagaaggcgaataatggtcagtcttccgttattcatcagcagcagg

SEQ ID NO: 31064 - DNA, 75 bp, synthetic construct
  source 1..75: mol_type = other DNA
ttactggtgggtgccgtccttcaacgagccgacacctttcgcgcccggctccgtgtttcacctgctggagccgga

SEQ ID NO: 31065 - DNA, 75 bp, synthetic construct
  source 1..75: mol_type = other DNA
gatcagtctattgattttggacagctttcaaaaagcttccttcaagcaggaggcgtatccaaaccaatgaattta

SEQ ID NO: 31066 - DNA, 75 bp, synthetic construct
  source 1..75: mol_type = other DNA
atggagtacggtaaatacgaaacacttgcgagatacggttataccggagctgcccgtccacagggtgactggcag

SEQ ID NO: 31067 - DNA, 75 bp, synthetic construct
  source 1..75: mol_type = other DNA
agccccggcagcaaaaaaagggactgtgaagctggcttttagtggtccaagggtttctggtcataatgaggagtt

SEQ ID NO: 31068 - DNA, 75 bp, synthetic construct
  source 1..75: mol_type = other DNA
tggtgaaattgagccggaagagcgtaaggttctggaagagatcgccggtgttcttggcctgcgactggagaacca

SEQ ID NO: 31069 - DNA, 75 bp, synthetic construct
  source 1..75: mol_type = other DNA
ccgtttatcgatgctgattacgacactgacaactggtttgagcgagccaaaggaatggaatgggagcccgaacgt

SEQ ID NO: 31070 - DNA, 75 bp, synthetic construct
  source 1..75: mol_type = other DNA
tgcgtgtggaagacggcaccggcgacgacgaagaaacgaaactcgcgcagaccgtttccaatatcatcggcacca

SEQ ID NO: 31071 - DNA, 75 bp, synthetic construct
  source 1..75: mol_type = other DNA
cagggcacgctggagccgaccaacgagccttacgccattgccaaaatcgccgggatcaaactgtgcgaatcttac

SEQ ID NO: 31072 - DNA, 75 bp, synthetic construct
  source 1..75: mol_type = other DNA
tgctgcccacaaaaataatgtaaataaactgcttttcctcggttcgtcgtgtatttatcctaagttagcacacca

SEQ ID NO: 31073 - DNA, 75 bp, synthetic construct
  source 1..75: mol_type = other DNA
agcaactggtggcggaagagcttgtggagaagtgggaaaaaggaaagatgcgtctgctgtgggataacaaaaagc

SEQ ID NO: 31074 - DNA, 75 bp, synthetic construct
  source 1..75: mol_type = other DNA
atggttcatcagcactacggtacacagacagtaaaccgcggcgcagttcagccggggatgctcgtcaaacacaaa

SEQ ID NO: 31075 - DNA, 75 bp, synthetic construct
  source 1..75: mol_type = other DNA
cctttgccctgagcggggcatttgaagaactggatcacggtcatgatttttatgccccgcagtccctggtcgcgg

SEQ ID NO: 31076 - DNA, 75 bp, synthetic construct
  source 1..75: mol_type = other DNA
tatcagggacgagtcggagactttgaattcaccacactggatgtgatagcccggatccgggaagcaacaacaatc

SEQ ID NO: 31077 - DNA, 75 bp, synthetic construct
  source 1..75: mol_type = other DNA
atccaccacgctgagaaccgcctctgcggcgtaccttgaacagtacggcttcaacaacaccggcggtattcttct

SEQ ID NO: 31078 - DNA, 75 bp, synthetic construct
  source 1..75: mol_type = other DNA
tgtctgccagccagttcggtatggtcggtaaaagcccggcgatgcaacacctgctcagtgaaatcgccctcgtcg

SEQ ID NO: 31079 - DNA, 75 bp, synthetic construct
  source 1..75: mol_type = other DNA
gcgttcttccagcatcatcctgcaagcgcatatcaggggccaatgcactgggggcatgccaccagtaccgacatg

SEQ ID NO: 31080 - DNA, 75 bp, synthetic construct
  source 1..75: mol_type = other DNA
gcccaggcaatgctgaatgatctcgatgcagaaacgttgagagaagctgtaattcgcccaactattatcccaggc

SEQ ID NO: 31081 - DNA, 75 bp, synthetic construct
  source 1..75: mol_type = other DNA
tttttctgtttactgtttttcagtctgcaaatgcaggtggaatacctggtgttttcacattaaacctggaaatcc

SEQ ID NO: 31082 - DNA, 75 bp, synthetic construct
  source 1..75: mol_type = other DNA
ctgctgaaccagaacgacgtcaccacgcttgtgcgtaaagacggtttccgcttctggggttcccgctgcctgagt

SEQ ID NO: 31083 - DNA, 75 bp, synthetic construct
  source 1..75: mol_type = other DNA
ttccggtacgggacgctccgcctcaatggcaatgtctgcgaaaagcgccaggctctgctgatacaggaactgaag

SEQ ID NO: 31084 - DNA, 75 bp, synthetic construct
  source 1..75: mol_type = other DNA
atgagtgactatcatcacggcgtgcaggtactggagattaacgacggcacccgcgtcatttccaccgtatccaca

SEQ ID NO: 31085 - DNA, 75 bp, synthetic construct
  source 1..75: mol_type = other DNA
aaaacgctgtccaacgtcggggtgaacggtgttaccggcatcagcgcatctgtattctgggatttgcaggagtcc

SEQ ID NO: 31086 - DNA, 75 bp, synthetic construct
  source 1..75: mol_type = other DNA
actgaaagccctgctggcggcggagtcggtaaccggtgttaaaccgcgtattctcggcgtgccgggactggacac

SEQ ID NO: 31087 - DNA, 75 bp, synthetic construct
  source 1..75: mol_type = other DNA
ggttggataagctgtagtgagcgaatgccgaataccaaaacagccgttcttgttgccgtggagtttgacaggaaa

SEQ ID NO: 31088 - DNA, 75 bp, synthetic construct
  source 1..75: mol_type = other DNA
ctcgaagtccacgctggccgcggggatcatgatgactgcactgttactgaactggcggcaggcggcgggttacac

SEQ ID NO: 31089 - DNA, 75 bp, synthetic construct
  source 1..75: mol_type = other DNA
cctttgctgttgccctgttgccagctacattgtgtgctgctcagattcaggggaaagttattcgcgttctcgatg

SEQ ID NO: 31090 - DNA, 75 bp, synthetic construct
  source 1..75: mol_type = other DNA
actatccatcgtttcagaatcaggtctctacatccttattctgcgttgcaaagaggcaatgactgagggaacgag

SEQ ID NO: 31091 - DNA, 75 bp, synthetic construct
  source 1..75: mol_type = other DNA
tccgtcatctctttctcggttttgccgccgccgcagggctattgctgccgctttttaccaccttcaacctgatta

SEQ ID NO: 31092 - DNA, 75 bp, synthetic construct
  source 1..75: mol_type = other DNA
gctatatttatttctcgccgcgggagtcggctttctcgccagcaggcctatcgcattattcgcgatgccggtatt

SEQ ID NO: 31093 - DNA, 75 bp, synthetic construct
  source 1..75: mol_type = other DNA
tacgggaggcatcgtgctgcccgtctcccgtcaccatctggcatacactgctcacccgactgctggaccagcatt

SEQ ID NO: 31094 - DNA, 75 bp, synthetic construct
  source 1..75: mol_type = other DNA
tcccgtcaccatctggcagactctgctctcccgactgctggaccaacattacggccttacgctgaatgacacaca

SEQ ID NO: 31095 - DNA, 75 bp, synthetic construct
  source 1..75: mol_type = other DNA
gcatgatttattggtggactattatgtcggcggcatgacttttatggcgcttgcacgtaagcatgggcgatctga

SEQ ID NO: 31096 - DNA, 75 bp, synthetic construct
  source 1..75: mol_type = other DNA
tacaggcactgggcctggtggatatccgggtgccggaccatctgatagtcggtggcagccaggttttctcctttg

SEQ ID NO: 31097 - DNA, 75 bp, synthetic construct
  source 1..75: mol_type = other DNA
agtgggagcgagtctgtgctgcgctgcgggaactgaacaaacacagggatattctccgggatattaccgccacca

SEQ ID NO: 31098 - DNA, 75 bp, synthetic construct
  source 1..75: mol_type = other DNA
tgtgtgacgcggtgaactttcttgttgaaaaatacgcgctggtgcgtaccgaccagccggaattcagtgcctgta

SEQ ID NO: 31099 - DNA, 75 bp, synthetic construct
  source 1..75: mol_type = other DNA
atgaaacgaacgcctgtcctgattgatgtgaacggcgttccgcttcgggagagcctcagctacaccggtggcggt

SEQ ID NO: 31100 - DNA, 75 bp, synthetic construct
  source 1..75: mol_type = other DNA
agccgtgagtccgaaacgggtggacacgcctggacacggtatggggaaccgttttctgcgggccggtgtggaggt

SEQ ID NO: 31101 - DNA, 75 bp, synthetic construct
  source 1..75: mol_type = other DNA
tgaaaaatacgcactggtgcgtaccgaccagccggaattcagtgcctgtacccgctctcagttaataaacagcat

SEQ ID NO: 31102 - DNA, 75 bp, synthetic construct
  source 1..75: mol_type = other DNA
tgaaaaatacgtgctggtacgaactgaccagccgggattcagcgcaggagccccgtcgtctcagttaatcaacag

SEQ ID NO: 31103 - DNA, 75 bp, synthetic construct
  source 1..75: mol_type = other DNA
agacattcttcaagccaggaaagcgtgcgggttgatgagccggtgttcttacagagatgtaagtaatattgttct

SEQ ID NO: 31104 - DNA, 75 bp, synthetic construct
  source 1..75: mol_type = other DNA
taatcacgaaacaaaagtacttggcagcgaaattctgaattttgcatgtgaatatgcaaaagctgctgccgaaaa

SEQ ID NO: 31105 - DNA, 75 bp, synthetic construct
  source 1..75: mol_type = other DNA
agcgagaaaaaattaaggggctggttgttgaacttgtacgtctgagtggtcgcgagacgttacgggctctggagg

SEQ ID NO: 31106 - DNA, 75 bp, synthetic construct
  source 1..75: mol_type = other DNA
gcaggcgcgtaaagactggcaaaacgcccgcaaaaaactatcaaggacaaaggtgaagaaaccggttgtggttga

SEQ ID NO: 31107 - DNA, 75 bp, synthetic construct
  source 1..75: mol_type = other DNA
ggcatcataatataatttgtactgagtgtcgtaaaagcgaagttatgcagcgcatattgtcgttttatcagggga

SEQ ID NO: 31108 - DNA, 75 bp, synthetic construct
  source 1..75: mol_type = other DNA
gtggcaaaagtttttacacaggaagagcgggaaaaaattaaagagcaggtggtcgaacttgtgcgccagagcggt

SEQ ID NO: 31109 - DNA, 75 bp, synthetic construct
  source 1..75: mol_type = other DNA
agcgggaaaaaattaaagggcaggttgttgagctagtacgccggagtggacgcgagacgttacgacaactggagg

SEQ ID NO: 31110 - DNA, 75 bp, synthetic construct
  source 1..75: mol_type = other DNA
gacggagaaatacgtcgctacgacaggcgtcagaacataatctgtcgcgagtgccggaagagcgaagttatgcag

SEQ ID NO: 31111 - DNA, 75 bp, synthetic construct
  source 1..75: mol_type = other DNA
tccgggtgctgtatctgaacaaccagaatcagctgattgccggtgaaaccctcttcactggcaccatcaaccgca

SEQ ID NO: 31112 - DNA, 75 bp, synthetic construct
  source 1..75: mol_type = other DNA
gcgtggccttcacctccacgcatgcggcacgggaatggctgatactgaacatggcgggactggagcgggaagagt

SEQ ID NO: 31113 - DNA, 75 bp, synthetic construct
  source 1..75: mol_type = other DNA
caatacatctagcgtagaatcagtaattaaagatgttacagaaataaacccttgtgccgtaatgattattaagtc

SEQ ID NO: 31114 - DNA, 75 bp, synthetic construct
  source 1..75: mol_type = other DNA
ggcgtcagaacataatctgtcgcgagtgccggaagagtgaagttatgcagcgcatattgtcgttttatcagggtg

SEQ ID NO: 31115 - DNA, 75 bp, synthetic construct
  source 1..75: mol_type = other DNA
cgcgagtgccggaagagcgaagttatgcagcgagtgctggcgttttatcagggaaattatcagggggggctgtga

SEQ ID NO: 31116 - DNA, 75 bp, synthetic construct
  source 1..75: mol_type = other DNA
gcggcccggctggccacgcagatgttttcctgctggctggaagaggcacttcttcgggggattattcgtccgcca

SEQ ID NO: 31117 - DNA, 75 bp, synthetic construct
  source 1..75: mol_type = other DNA
accttccggcgaagacaaatttcaccggaaattatgatgacgaattaaagcctcgtgttgaaagtcgcgtcgatg

SEQ ID NO: 31118 - DNA, 75 bp, synthetic construct
  source 1..75: mol_type = other DNA
ttcacagtaccgacctgatatgccgttctggcgattacaaggcgacggattctggcaattacacaatgccgagct

SEQ ID NO: 31119 - DNA, 75 bp, synthetic construct
  source 1..75: mol_type = other DNA
caaaccatgaagtcatcacaatggcgatcccgtgtggtggtatcggcgaccgtgacggctggcggttacttaaag

SEQ ID NO: 31120 - DNA, 75 bp, synthetic construct
  source 1..75: mol_type = other DNA
tgtggtgaaactgctcattgcaaagtttagtgatctccatgagatgaaaattgcgcacagggatgtcgccgatca

SEQ ID NO: 31121 - DNA, 75 bp, synthetic construct
  source 1..75: mol_type = other DNA
agttttcagaaagacgaggtgacggccgagtatagcgaagtctacgaagttccgccgggtcatgtccggtttaat

SEQ ID NO: 31122 - DNA, 75 bp, synthetic construct
  source 1..75: mol_type = other DNA
aggcaattgccaatataaaaatctggcacaagggtgaacagcgcgcgccgcataagccattgttattgctatacg

SEQ ID NO: 31123 - DNA, 75 bp, synthetic construct
  source 1..75: mol_type = other DNA
aggaagtcgcccgactgaatcaggaaatacgccgccggcagatggagctggatattctgaaaaaggcggaggaaa

SEQ ID NO: 31124 - DNA, 75 bp, synthetic construct
  source 1..75: mol_type = other DNA
atgatagaaaaagcaaatgaactcagggccgtggaagaaacgcgccgtcttgcccatcgtgtacaaagtgtgtcg

SEQ ID NO: 31125 - DNA, 75 bp, synthetic construct
  source 1..75: mol_type = other DNA
caaatgatgatattgagagctacgcagaatttagtgagggcgtcactaatatcatcattatgggcggtaatgtat

SEQ ID NO: 31126 - DNA, 75 bp, synthetic construct
  source 1..75: mol_type = other DNA
gaaaatataattgctaatgatatccctcaggatgtcgaaattacgagagtttataccatgaataattctgacagg

SEQ ID NO: 31127 - DNA, 75 bp, synthetic construct
  source 1..75: mol_type = other DNA
aaaagagcagctactggtggttaacctttccggtcgcggcgataaagacatcttcaccgttcacgatattttgaa

SEQ ID NO: 31128 - DNA, 75 bp, synthetic construct
  source 1..75: mol_type = other DNA
gtagtcatgtgggatggctggttcagacttcaggatatggttgagggttacctggtgatgaagtctcttgatcag

SEQ ID NO: 31129 - DNA, 75 bp, synthetic construct
  source 1..75: mol_type = other DNA
ccagatggatttaaatgacggggataatgttgatatcagtatcagcctgcagcttaccgagcgcaccctcgtcag

SEQ ID NO: 31130 - DNA, 75 bp, synthetic construct
  source 1..75: mol_type = other DNA
aagcgctgattaacgccgtgccgcagctccgaaacaaccccgatatgctgcgcctttttgccgacaacggccata

SEQ ID NO: 31131 - DNA, 75 bp, synthetic construct
  source 1..75: mol_type = other DNA
ggtttgaaacaggcgacaacggcaatgaatatttcaaatggagaagccgccagagcaccacaacaaaagacctga

SEQ ID NO: 31132 - DNA, 75 bp, synthetic construct
  source 1..75: mol_type = other DNA
aaacaggaagcagggttgcaaatgataaagctgttggctggaactggaatagcggtgtttatgatgcagatatca

SEQ ID NO: 31133 - DNA, 75 bp, synthetic construct
  source 1..75: mol_type = other DNA
tcggcacggaatacctggaattctgccgcacggcaaaacacaaccccctgaaccgcttcaaattaagccctgaaa

SEQ ID NO: 31134 - DNA, 75 bp, synthetic construct
  source 1..75: mol_type = other DNA
ttaccgcttttacagggggcaacggatgctgccggttttatggcgcggatggataccgttctgcagatgtacgga

SEQ ID NO: 31135 - DNA, 75 bp, synthetic construct
  source 1..75: mol_type = other DNA
gtggatgcgttaaaacagaccattctgcaactggccgtaatgggtaaacttgtgccgcaggatccgaatgacgaa

SEQ ID NO: 31136 - DNA, 75 bp, synthetic construct
  source 1..75: mol_type = other DNA
tttaaataatggcatagtcggctttgatgaaggctggaacgcctgccgcgccgccatgcttcatggtgccgaacc

SEQ ID NO: 31137 - DNA, 75 bp, synthetic construct
  source 1..75: mol_type = other DNA
acagagtggatgctctttgcgcagaaagtcgaatctacagacacttccagcctgccagtaacgtttcccgaacaa

SEQ ID NO: 31138 - DNA, 75 bp, synthetic construct
  source 1..75: mol_type = other DNA
gttatccagagcgtgaaaaatgttttgacgatgcactgaaaattattgatgaactgcgtaaagctgagaaagaat

SEQ ID NO: 31139 - DNA, 75 bp, synthetic construct
  source 1..75: mol_type = other DNA
ttgctcaccgtctggggattgtacttttcaggcccggtcctgatgcgatgcctttgtttatgcaggggcgtgtgc

SEQ ID NO: 31140 - DNA, 75 bp, synthetic construct
  source 1..75: mol_type = other DNA
tgtgcagaaaacaccatgacgaactgcatgcggataccgtggcatttgaagagaagtatggttcccaactggagc

SEQ ID NO: 31141 - DNA, 75 bp, synthetic construct
  source 1..75: mol_type = other DNA
aaagtggctgcgctacgtcattgaacatatccaggactggccggcaaaccgggtacgcgatctgttgccctggaa

SEQ ID NO: 31142 - DNA, 75 bp, synthetic construct
  source 1..75: mol_type = other DNA
tggaccgtctgtgtgaagactactgcggtggtatttggaatctgtacaccctgaacaacggtggcgcatttatgg

SEQ ID NO: 31143 - DNA, 75 bp, synthetic construct
  source 1..75: mol_type = other DNA
ttatggcccccgaaccggatgatgatgatgacgaaacatgggtactgtttaacgtcatgaacggtaaccgcgctg

SEQ ID NO: 31144 - DNA, 75 bp, synthetic construct
  source 1..75: mol_type = other DNA
caccacaggaaaagacggtggtaagcatcaccgttgatccagagtctccggaatctttcatgaagctgcctaaac

SEQ ID NO: 31145 - DNA, 75 bp, synthetic construct
  source 1..75: mol_type = other DNA
atacgccccgtgaagccagagataacctgaaatcctcccagttgctgagtgtgattgacgccatcagtgaaggac

SEQ ID NO: 31146 - DNA, 75 bp, synthetic construct
  source 1..75: mol_type = other DNA
gtaattaccatcttcgtggacgcattctgcaggtaccgtcgaactatgatccacagacgcggcagtacagcggta

SEQ ID NO: 31147 - DNA, 75 bp, synthetic construct
  source 1..75: mol_type = other DNA
ctgggtgttgtctgttgtgcgtcgggatctcggttttgatgacagtcacgttgtgacaatgccggaactgtgctg

SEQ ID NO: 31148 - DNA, 75 bp, synthetic construct
  source 1..75: mol_type = other DNA
ttcgctacagcttcagcgccctgaaggaccgccacacggcggtggaggtgaattacaccgacccgcagaacggct

SEQ ID NO: 31149 - DNA, 75 bp, synthetic construct
  source 1..75: mol_type = other DNA
ccggaagaggaatgctgtcctgcctgtggtggtgaactcagttctctgggatgtgatgtgtcagagcaactggag

SEQ ID NO: 31150 - DNA, 75 bp, synthetic construct
  source 1..75: mol_type = other DNA
atataacactgggcaactcttcgggttagatggtataaaagcagataatccaataaaagcaaagcaagggagttc

SEQ ID NO: 31151 - DNA, 75 bp, synthetic construct
  source 1..75: mol_type = other DNA
ccatgcgtattcaccaacaacatccgacatcccgtctttttccgttctgtaccggcaaataccgctggcacggtg

SEQ ID NO: 31152 - DNA, 75 bp, synthetic construct
  source 1..75: mol_type = other DNA
gcccgccagggcatcgaactgagccgggcattactctccaactgggttgacgcatgttgtcagttaatgactccg

SEQ ID NO: 31153 - DNA, 75 bp, synthetic construct
  source 1..75: mol_type = other DNA
actcaccagacaggcagggaaaacatccggtacaacaccttcgtcccttccggggtatcctgcaggcggatgcgt

SEQ ID NO: 31154 - DNA, 75 bp, synthetic construct
  source 1..75: mol_type = other DNA
catcgaggatgaaatacggggattaccagagtcagagcgtcttgcagtcagacagcagcgaagcaaagcgttact

SEQ ID NO: 31155 - DNA, 75 bp, synthetic construct
  source 1..75: mol_type = other DNA
cagccatcacgcctgtcgtacagagaattatgccatgacggttcattattaccggctgcgggattatgccctgca

SEQ ID NO: 31156 - DNA, 75 bp, synthetic construct
  source 1..75: mol_type = other DNA
atgaaaatcatcacccgtggcgaagccatgcatattcaccgtcagcatccggcatcccgtctttttccgttctgt

SEQ ID NO: 31157 - DNA, 75 bp, synthetic construct
  source 1..75: mol_type = other DNA
actcccgtgcaccggagcggtggccatcagggaccattaccgtcagggtttatgacgatcagccgtttgaccggc

SEQ ID NO: 31158 - DNA, 75 bp, synthetic construct
  source 1..75: mol_type = other DNA
cagtatgtgtcactggcctatacggagcgactaaaagaagccggattactggcatcaacagggagtacaggcgac

SEQ ID NO: 31159 - DNA, 75 bp, synthetic construct
  source 1..75: mol_type = other DNA
atggcggagaagcttgccctgcttgagaaactgggcatcacgctggatgacctggaaaaactcttcaaatcccgc

SEQ ID NO: 31160 - DNA, 75 bp, synthetic construct
  source 1..75: mol_type = other DNA
atcaacagggagtacaggcgactcgtatgacaacgcgatggcggagagcatcaatggtctttacaaagcggaggt

SEQ ID NO: 31161 - DNA, 75 bp, synthetic construct
  source 1..75: mol_type = other DNA
cagcgtattgcactgatttttgacgtgggcgttgctaccatttatagaaaatttccggcgaataagagcaattaa

SEQ ID NO: 31162 - DNA, 75 bp, synthetic construct
  source 1..75: mol_type = other DNA
gccggacgattaattgcagcaggaattcctcgccagaaggtagcgatcatctatgatgttggtgtatcgacactg

SEQ ID NO: 31163 - DNA, 75 bp, synthetic construct
  source 1..75: mol_type = other DNA
gtgcagagcatgtcgcgcaagggcaactgtcttgataatgcggtaatggagaatttctttggtcacctgaaagaa

SEQ ID NO: 31164 - DNA, 75 bp, synthetic construct
  source 1..75: mol_type = other DNA
aactcggcgaaagcatccgctgcaagccagacggctgcaaaagcaagtgaagacgcagccagagagtatgcaagc

SEQ ID NO: 31165 - DNA, 75 bp, synthetic construct
  source 1..75: mol_type = other DNA
gccttacattccacagaatgccgggattttactggttccatgctgtcgtggtggttcggcattcacccagggcgc

SEQ ID NO: 31166 - DNA, 75 bp, synthetic construct
  source 1..75: mol_type = other DNA
gcattggtacaacctgagcgacggtgccatggaagatgtcctgtacgaaatcgcctccatgcgcctgtttgcccg

SEQ ID NO: 31167 - DNA, 75 bp, synthetic construct
  source 1..75: mol_type = other DNA
atacataacttactggaatcaaaaaagaataaaactcagtcttgggggactcagcccggtagaataccggactga

SEQ ID NO: 31168 - DNA, 75 bp, synthetic construct
  source 1..75: mol_type = other DNA
tgaagcggatgttaaataagggtctggaaagccttgctgaaggggagaaaccgctgctccacagtgatcaaggat

SEQ ID NO: 31169 - DNA, 75 bp, synthetic construct
  source 1..75: mol_type = other DNA
ggtaacgaggaaagacctttgcgaggtacgaatccgaaccggccagacggaggtcgctgtcttcacagcttacga

SEQ ID NO: 31170 - DNA, 75 bp, synthetic construct
  source 1..75: mol_type = other DNA
atatcccgcgcgaagcgaaggacaacctgaaatcatcccagatgctgagcgtgatagacgccatcagtgaagggc

SEQ ID NO: 31171 - DNA, 75 bp, synthetic construct
  source 1..75: mol_type = other DNA
ggggactctccctgccgtcactgcgccgtcgcctgttccgctgtgtctccatccgggaaaacacggacggcacct

SEQ ID NO: 31172 - DNA, 75 bp, synthetic construct
  source 1..75: mol_type = other DNA
ctgattaaaacggaactgctggaaacgcagaccgtggacttcagcgtgggcgcagaagggcttcgccatgtaccg

SEQ ID NO: 31173 - DNA, 75 bp, synthetic construct
  source 1..75: mol_type = other DNA
aagcggattgcggatatcaggcaggttgaaaccacagcccgctatcttggcacggcgctgtactggatagctgcc

SEQ ID NO: 31174 - DNA, 75 bp, synthetic construct
  source 1..75: mol_type = other DNA
cggcaaccccccgacgttttccctgacgccggaagggaagctgacagccaggaacgcggatatcagcggagcaat

SEQ ID NO: 31175 - DNA, 75 bp, synthetic construct
  source 1..75: mol_type = other DNA
tccggattgcggcaccggcagcgcctgtcactattgaactgataccagggtattttcagataacagcggtcccga

SEQ ID NO: 31176 - DNA, 75 bp, synthetic construct
  source 1..75: mol_type = other DNA
tttcaaaggagagatagggaaaacccatctggctcaggagctgtggacgcagattgataacggtcagcttgcgcc

SEQ ID NO: 31177 - DNA, 75 bp, synthetic construct
  source 1..75: mol_type = other DNA
acggcgcatccgctgccgcgttcattaagccgccttaacccggatttactgtacggcaatgtgctggcaagcggc

SEQ ID NO: 31178 - DNA, 75 bp, synthetic construct
  source 1..75: mol_type = other DNA
gcttttttttaatgagcggatggtatggtgaaaaattatattcgtttggtatcgaaatgctgaatttagcattcg

SEQ ID NO: 31179 - DNA, 75 bp, synthetic construct
  source 1..75: mol_type = other DNA
tggtgccactgttgaggggaccaatgccagcggtaagttcagtattgatggcacatccggtcaggccagcggcct

SEQ ID NO: 31180 - DNA, 75 bp, synthetic construct
  source 1..75: mol_type = other DNA
gtggattaagtagaaagaatttacaacatggtgataatcagatcacttattatataaatgaagctcaatatcaaa

SEQ ID NO: 31181 - DNA, 75 bp, synthetic construct
  source 1..75: mol_type = other DNA
tgatggtaacaattacggctttgagtttgtgaaacgtaacggaaaagctttcctgaacgtccagctgctgcagaa

SEQ ID NO: 31182 - DNA, 75 bp, synthetic construct
  source 1..75: mol_type = other DNA
aaggggactatacttgtggtggccaagaccaacggggagaatcaaaaggagatggtctatgggggccaggtaaag

SEQ ID NO: 31183 - DNA, 75 bp, synthetic construct
  source 1..75: mol_type = other DNA
ggacgcggcgggacggcggacagagtacggtctgaatgtggtgtccggcgatatcacggacatcaccacaccgga

SEQ ID NO: 31184 - DNA, 75 bp, synthetic construct
  source 1..75: mol_type = other DNA
agattctacaacgtgtcgacactcttcctctttatttacatgcttatgcctttcatttaaatatgcggctggaaa

SEQ ID NO: 31185 - DNA, 75 bp, synthetic construct
  source 1..75: mol_type = other DNA
gccgcgaagaagtcagccagcgatgccagcacatcagcccgtgaggcggcaacccatgcgactgatgctgcaggc

SEQ ID NO: 31186 - DNA, 75 bp, synthetic construct
  source 1..75: mol_type = other DNA
caatatactgtttacacctctgccgccagcaactgtcgatttccactcatcgcttaaatacgttgcccgccttcc

SEQ ID NO: 31187 - DNA, 75 bp, synthetic construct
  source 1..75: mol_type = other DNA
ctggctggcgcggggcggagtagcggcgcagcacagttcgcagccgctaagcgcgctctggcaggtgctgccgga

SEQ ID NO: 31188 - DNA, 75 bp, synthetic construct
  source 1..75: mol_type = other DNA
tgttttatgcattacaccgcgccaataccacgaaaggatttattgaaggcgctggcgtggtggccgttgcacgtg

SEQ ID NO: 31189 - DNA, 75 bp, synthetic construct
  source 1..75: mol_type = other DNA
gggattgcccgtcctgagggactgtttacggacaccctggtcaccggtcagccctggcggggacagcagcgacga

SEQ ID NO: 31190 - DNA, 75 bp, synthetic construct
  source 1..75: mol_type = other DNA
ccgtggaagatgcggtgcgcggcggatgtaacctgttcgatctcgaccagttgcgcatggagtacagcccggacg

SEQ ID NO: 31191 - DNA, 75 bp, synthetic construct
  source 1..75: mol_type = other DNA
tggtcaaaaaaaggtactactgttctggaagcaaataacccaactcccttctaccttaacattaaggagttaaat

SEQ ID NO: 31192 - DNA, 75 bp, synthetic construct
  source 1..75: mol_type = other DNA
acattatctgccagcaataatggtgtgctcgccaatgagaatgcagcaaacaccgtctcggtcaatgtcgctgat

SEQ ID NO: 31193 - DNA, 75 bp, synthetic construct
  source 1..75: mol_type = other DNA
gtggtgcgcagaatatgatgaatggggcaacctgctgaatgaagagaacccgcatcagctgcagcagcttatccg

SEQ ID NO: 31194 - DNA, 75 bp, synthetic construct
  source 1..75: mol_type = other DNA
ccggctgccggggcagcagtatgatgaggagtccggcctgtattacaaccgccaccgctattatgacccgctgca

SEQ ID NO: 31195 - DNA, 75 bp, synthetic construct
  source 1..75: mol_type = other DNA
gcagtcttcttttaccctgtattgttgtagcaaaaggtattggggtaacggcttcatctaatgatgttgtagatg

SEQ ID NO: 31196 - DNA, 75 bp, synthetic construct
  source 1..75: mol_type = other DNA
agacgggttgaactgacgacggtgctgctgggcgcgggcttacagccagtgcgcccggagtttgatgtcggaccg

SEQ ID NO: 31197 - DNA, 75 bp, synthetic construct
  source 1..75: mol_type = other DNA
cagcagtatgatgaggagtccggcctgtattacaaccgccaccgctattatgacccgctgcaggggcgatatatc

SEQ ID NO: 31198 - DNA, 75 bp, synthetic construct
  source 1..75: mol_type = other DNA
ttgtgtcatcaaaaatacttttatcccttagttttttttcatttgcaaatgaacaagtgtttggaaatgttgaaa

SEQ ID NO: 31199 - DNA, 75 bp, synthetic construct
  source 1..75: mol_type = other DNA
ggattcaccggtgttattggtggcctgatcagcatcgaaagtggattcagtatttacatgattctcgcgacagcg

SEQ ID NO: 31200 - DNA, 75 bp, synthetic construct
  source 1..75: mol_type = other DNA
atcacggacagcctgaaccggcgggaggtgctgtacacggagggcgagggcggcctgaagcgggtggtgaagaag

SEQ ID NO: 31201 - DNA, 75 bp, synthetic construct
  source 1..75: mol_type = other DNA
cattaatattaaattgccatcatcatgcatcacgagttgccagaatgacacctgatgagtttccttctatgtgcc

SEQ ID NO: 31202 - DNA, 75 bp, synthetic construct
  source 1..75: mol_type = other DNA
cttaaagattctccctcacagccattgcaacagtcactgaaagaccttgagcgggcttacaaaaacttcttccgg

SEQ ID NO: 31203 - DNA, 75 bp, synthetic construct
  source 1..75: mol_type = other DNA
catgtcgtatggtgaaggtcttccgctgccggagacatatgaccgtccggacccgcgtattaagcagctggcgcg

SEQ ID NO: 31204 - DNA, 75 bp, synthetic construct
  source 1..75: mol_type = other DNA
gatgtcgctgtcacggaaaccgcaagtgacctggtacggctgggacggcgaccggctgaccacaatacagaacga

SEQ ID NO: 31205 - DNA, 75 bp, synthetic construct
  source 1..75: mol_type = other DNA
taccagccggggagcttcacgccgctcatccgggtcgagacagagaacggcgagcgggagaaagcgcagcgccgc

SEQ ID NO: 31206 - DNA, 75 bp, synthetic construct
  source 1..75: mol_type = other DNA
gccaaagtctttcatgccgataaaacctattttgtgctgaacggcacatcggcagcgaataaagtggtgacgaat

SEQ ID NO: 31207 - DNA, 75 bp, synthetic construct
  source 1..75: mol_type = other DNA
cactcacccgtggagtcagataacgggagtgcctgctgcctcgctgacggcaaaaggcaccatacaattgagcag

SEQ ID NO: 31208 - DNA, 75 bp, synthetic construct
  source 1..75: mol_type = other DNA
atgaataatgtatttctgtaccggatgcctgttggcattgccggggctgtctctcgcccgcaggacttaaccgtc

SEQ ID NO: 31209 - DNA, 75 bp, synthetic construct
  source 1..75: mol_type = other DNA
tgaggcgaaagtaaataacaaccttagcctgtgggggaatgtcggtgtgcaactaggtgataaaggctatagcga

SEQ ID NO: 31210 - DNA, 75 bp, synthetic construct
  source 1..75: mol_type = other DNA
gaggttcataataaaggtagctggagtgaggagaatactggtgacaatgacagctatttttttctcaaggggtat

SEQ ID NO: 31211 - DNA, 75 bp, synthetic construct
  source 1..75: mol_type = other DNA
catacccggaaagacggaacgcgcattgaaacggaaggcgacggaaatgtgcaaacgcgacttggggtgaaaacc

SEQ ID NO: 31212 - DNA, 75 bp, synthetic construct
  source 1..75: mol_type = other DNA
agtcacagcaactgaatgccagatttccacatgaagtagtgagtggcattgaggcatccctacagccaggggaaa

SEQ ID NO: 31213 - DNA, 75 bp, synthetic construct
  source 1..75: mol_type = other DNA
tcctgtgaactgggcgaagttcatatcatcatggaagccactggggtatatcatgaacctctggcttatggcctt

SEQ ID NO: 31214 - DNA, 75 bp, synthetic construct
  source 1..75: mol_type = other DNA
cgccacggggatcgggatggtgcttattggtaacccgcgcggattgtttaaaggtggacgccgcgcctttgatga

SEQ ID NO: 31215 - DNA, 75 bp, synthetic construct
  source 1..75: mol_type = other DNA
gatgaaaccgctcgtcatatgtgggacaccattattcgtgagctctgtgcccagcgagttctttatgttactgat

SEQ ID NO: 31216 - DNA, 75 bp, synthetic construct
  source 1..75: mol_type = other DNA
aaaagtattcaacgtacactttgataataatgaagagttagttactgatggtgagcctgacgtagtatgtttaag

SEQ ID NO: 31217 - DNA, 75 bp, synthetic construct
  source 1..75: mol_type = other DNA
ggaacaaaacggatcagggtcacaataacgggcggcggtggcggagggggcggctgcaaggctatatccaataat

SEQ ID NO: 31218 - DNA, 75 bp, synthetic construct
  source 1..75: mol_type = other DNA
cggatcgtacgtgcactggctgcgggtatgggcgtggcccgtaaagaccttaaggcgatggcggacgacggcaaa

SEQ ID NO: 31219 - DNA, 75 bp, synthetic construct
  source 1..75: mol_type = other DNA
aataaagtaccgctacataatttattgcatcgaggatgggcttagaaatggcaatgaaaattatatacaaaaaat

SEQ ID NO: 31220 - DNA, 75 bp, synthetic construct
  source 1..75: mol_type = other DNA
gcatgatgcagcaggtaatcctgttgtcgggctggtgctctcgacgcgtcacgaaggtgttcaggacatcaccct

SEQ ID NO: 31221 - DNA, 75 bp, synthetic construct
  source 1..75: mol_type = other DNA
atcccattaagcgaacttatatccacagtccatccacatcttcataccataccgctaacatttttagattcatct

SEQ ID NO: 31222 - DNA, 75 bp, synthetic construct
  source 1..75: mol_type = other DNA
gggcggcggatggctcgctgggcgtacgcgcggtgggcagtatgaacggcagtgccggtctggtgtattccccgg

SEQ ID NO: 31223 - DNA, 75 bp, synthetic construct
  source 1..75: mol_type = other DNA
ccggctatggcacaaatgtataatgataaaactctggagtatagtgattccgccatggagttatccgctggcgat

SEQ ID NO: 31224 - DNA, 75 bp, synthetic construct
  source 1..75: mol_type = other DNA
tgcggaaaagctgacacacaaactgaaagagggctggcagccatatggcggaccggttgccattacgccgtacac

SEQ ID NO: 31225 - DNA, 75 bp, synthetic construct
  source 1..75: mol_type = other DNA
gagcctgttttgaagggcgctggcactggcagccagcgacaccccggaaaatcagggaatatgcccctcaggacc

SEQ ID NO: 31226 - DNA, 75 bp, synthetic construct
  source 1..75: mol_type = other DNA
acacaagcagtatggggaggttatcaggatgccgaggaatgggaaaaatatggtaaacatcaggagacagaatta

SEQ ID NO: 31227 - DNA, 75 bp, synthetic construct
  source 1..75: mol_type = other DNA
cagggatacggcacatcgctattaatattttgacgaatgataaggtattcaaggcagggttaagacgtaagatgc

SEQ ID NO: 31228 - DNA, 75 bp, synthetic construct
  source 1..75: mol_type = other DNA
ggaaactttcgcacagtatgtggctgatacgcacacgccagaaatacaggccaagagaggcaggaaaggtggcat

SEQ ID NO: 31229 - DNA, 75 bp, synthetic construct
  source 1..75: mol_type = other DNA
atgactaaaaatactcgtttttcccccgaggtccgtcaacgggcagttcgtatggttctggaaagtcagggcgaa

SEQ ID NO: 31230 - DNA, 75 bp, synthetic construct
  source 1..75: mol_type = other DNA
gtacggggcaatttgttactgcggcattaaaacgagaagttgaatatcgccagcggcgcaaggccaaagaaccag

SEQ ID NO: 31231 - DNA, 75 bp, synthetic construct
  source 1..75: mol_type = other DNA
tatccgggggctttgcactcagcattgcattaaggacaccatgattaaggtcttcctcggtcgtgacggattgcc

SEQ ID NO: 31232 - DNA, 75 bp, synthetic construct
  source 1..75: mol_type = other DNA
tcagcaatcagaacagaaacggcaactgcttttgattatctctgcatgattcagagtcttgctgatgttctgttg

SEQ ID NO: 31233 - DNA, 75 bp, synthetic construct
  source 1..75: mol_type = other DNA
cttcgccaggcttccgcttattttgcgaaggcggagttcgaccgcctctggaaaaataatgccgctgctggataa

SEQ ID NO: 31234 - DNA, 75 bp, synthetic construct
  source 1..75: mol_type = other DNA
cgagatcaccgaaccgcagtttgcctacggtatggaaggtctgttgcaacagcgtcaccgtgaagggcgtctttc

SEQ ID NO: 31235 - DNA, 75 bp, synthetic construct
  source 1..75: mol_type = other DNA
gatgtccctgatgaacttattgatttcacgtttgaatggaaagggctgaagaaattatgcgtggcagtctccttt

SEQ ID NO: 31236 - DNA, 75 bp, synthetic construct
  source 1..75: mol_type = other DNA
ggcgtcggtgttcttccggttgatacgcacggcctgtcgtcagcgttttgaggggcgggaaccatgtcaaagctg

SEQ ID NO: 31237 - DNA, 75 bp, synthetic construct
  source 1..75: mol_type = other DNA
cgcggtggatctggtgattcaggtggcaacgccgctttctgttgccagtgggttacaacgcattggtcgcgccgg

SEQ ID NO: 31238 - DNA, 75 bp, synthetic construct
  source 1..75: mol_type = other DNA
tgctgaacgtgtcgctggcgctgatgctggcactgtccctgatttacccgcagagcgtggccgtcagttttgtcg

SEQ ID NO: 31239 - DNA, 75 bp, synthetic construct
  source 1..75: mol_type = other DNA
cggggctttcgttcctcactcactggctgttatgcaatttagtgctgatatggcactgaatgaggctaaaaccat

SEQ ID NO: 31240 - DNA, 75 bp, synthetic construct
  source 1..75: mol_type = other DNA
gtgatgatgggccgctatgggcatatgggtatgttgcgtatcgccaaaaagagggatcgtcagattgtcaccgat

SEQ ID NO: 31241 - DNA, 75 bp, synthetic construct
  source 1..75: mol_type = other DNA
atgcccccggaacatctgcggtttgccacggggtttccatcgcaaccgaagattgccggtcccagagaaaagccg

SEQ ID NO: 31242 - DNA, 75 bp, synthetic construct
  source 1..75: mol_type = other DNA
cgtgatctggatgcgttcaaacaagaagctgatgttattatttctaaccgtatgtctgccgatctggctgatgta

SEQ ID NO: 31243 - DNA, 75 bp, synthetic construct
  source 1..75: mol_type = other DNA
ctgaagccacaagatgttgaagtgcaggtggattactgcgggatctgccattccgatctgtcgatgatcgataac

SEQ ID NO: 31244 - DNA, 75 bp, synthetic construct
  source 1..75: mol_type = other DNA
gttatgttggtctttcaaatggtattctgattgcgcaaaatcacgaagtggttgcactggatatcgttcaggcca

SEQ ID NO: 31245 - DNA, 75 bp, synthetic construct
  source 1..75: mol_type = other DNA
ctgcaacaacttatgacatggaaggacacccgatggatacccaacgattccaatcccaatttcattggcatttat

SEQ ID NO: 31246 - DNA, 75 bp, synthetic construct
  source 1..75: mol_type = other DNA
accgttctccatcttattccatcaggtattctccgcgagaatgtaaccagcatcatcggtaacggtgttgtgctg

SEQ ID NO: 31247 - DNA, 75 bp, synthetic construct
  source 1..75: mol_type = other DNA
acctggcgattatgttcttcatgaagggcggacatatatcgcttcagcaaacaatattgaaaagagaaaactcta

SEQ ID NO: 31248 - DNA, 75 bp, synthetic construct
  source 1..75: mol_type = other DNA
gagataaggggaatgacggcggagcagcgccttgccgaacgtcagttgaaaacgaaaccgctgctgaaatccctg

SEQ ID NO: 31249 - DNA, 75 bp, synthetic construct
  source 1..75: mol_type = other DNA
cttgcagggttcagcggtgtgctgcaggcggatgcgtatgccgggttcaacgaactttaccgcgatggacaaata

SEQ ID NO: 31250 - DNA, 75 bp, synthetic construct
  source 1..75: mol_type = other DNA
agtgcgatgccatcgtgcaggcccccgcgccttcacggcccatcgagcggggtatcgccggaccggggctgctgg

SEQ ID NO: 31251 - DNA, 75 bp, synthetic construct
  source 1..75: mol_type = other DNA
ggtgggtggtggagcagatgtcagcgctgacggccatgacggcctcgtttgtgctggcgacaccgacggagacgg

SEQ ID NO: 31252 - DNA, 75 bp, synthetic construct
  source 1..75: mol_type = other DNA
atgttctggaggcaggaaaggtgcacgcagatgacacgccggtgaaagtactggccccggggaacggaaagacga

SEQ ID NO: 31253 - DNA, 75 bp, synthetic construct
  source 1..75: mol_type = other DNA
cgaacaggaggcgctgaaccgtgccctgctggaaaagctgaacgagcgtgaacgcgaaatagaccatctgcaggc

SEQ ID NO: 31254 - DNA, 75 bp, synthetic construct
  source 1..75: mol_type = other DNA
cacgcaggctgcagaacacttaccggttcgcatgcctcgcctctgctctgcagaacgcctctctgaaagtatggt

SEQ ID NO: 31255 - DNA, 75 bp, synthetic construct
  source 1..75: mol_type = other DNA
cacaaaacaccttaaacgatggttagccaaactggaaaaagacgacgtgatctacattgacggtgatgatgtagg

SEQ ID NO: 31256 - DNA, 75 bp, synthetic construct
  source 1..75: mol_type = other DNA
ccagtggccggcactgacgtactatgcgaacgatggctgggtggaaatcgacaacaacatcgctgaaaatgccct

SEQ ID NO: 31257 - DNA, 75 bp, synthetic construct
  source 1..75: mol_type = other DNA
cgcttacagcccggacagaaaaggcatccatccgcagactcatcttgcttgcttcagcggtgtgctgcaagcgga

SEQ ID NO: 31258 - DNA, 75 bp, synthetic construct
  source 1..75: mol_type = other DNA
tttattctcggcgtgccgtatcgcgggtcgctgctgattctgttttttatctccagcctgtttttactcagtacc

SEQ ID NO: 31259 - DNA, 75 bp, synthetic construct
  source 1..75: mol_type = other DNA
acaggatttaaaagcgagattgataatcaggactggattattgcaaaagccgagcacaccattgataacagcggc

SEQ ID NO: 31260 - DNA, 75 bp, synthetic construct
  source 1..75: mol_type = other DNA
acgccgtggtgatggatgccgttaacgagcttatcgacgtggtctatcaggacgatgacgatctggtggtgattt

SEQ ID NO: 31261 - DNA, 75 bp, synthetic construct
  source 1..75: mol_type = other DNA
cctgtgggcgaagtttcaggatttccaggtgcgtatccgtgacgccatcgtgaaacgtcaggcactggaccgcat

SEQ ID NO: 31262 - DNA, 75 bp, synthetic construct
  source 1..75: mol_type = other DNA
ttgtggctgtaccacgacagcggtaacgcagggctgacacacctgtaccggatgcgtgatgcgcagttgtggagc

SEQ ID NO: 31263 - DNA, 75 bp, synthetic construct
  source 1..75: mol_type = other DNA
gcgccgatgccgcaggcatcattctgacttcccttgtgattaaccgccagttgtggctgtaccacgacagcgggg

SEQ ID NO: 31264 - DNA, 75 bp, synthetic construct
  source 1..75: mol_type = other DNA
gttgaggactaccgctgcgccgcactggtggaaaacatccagattggcgacttcagcgccgccgcagcagaaacc

SEQ ID NO: 31265 - DNA, 75 bp, synthetic construct
  source 1..75: mol_type = other DNA
atgcaggatattcacgaagaaagtctgagcgagtcggttaaatcagagcagtcaccgcgggtggtactctgggaa

SEQ ID NO: 31266 - DNA, 75 bp, synthetic construct
  source 1..75: mol_type = other DNA
tatgctggcgaatacctgtatgtggacctaccgctctgatgagtgtggttacacgggcggggctgtggcggatga

SEQ ID NO: 31267 - DNA, 75 bp, synthetic construct
  source 1..75: mol_type = other DNA
agtcttctttttgatagagattcgaaaggaaagtgccttggtttgtctctcctgtatcttgatacaggaggttat

SEQ ID NO: 31268 - DNA, 75 bp, synthetic construct
  source 1..75: mol_type = other DNA
atttttgcctttaatggctgtgagcgcagattcagagtagtaagtaaagataactggcaacatacagtatcggaa

SEQ ID NO: 31269 - DNA, 75 bp, synthetic construct
  source 1..75: mol_type = other DNA
ttttagaaattgatgcaaataatgtgcgccagcgtgtctttcagactgggtgcagcactttcgaagcaattcaat

SEQ ID NO: 31270 - DNA, 75 bp, synthetic construct
  source 1..75: mol_type = other DNA
ccattcgctataaatctgagaacaggtgctatatctgtcagccacggggccaaaattgatggtgggctggcgctt

SEQ ID NO: 31271 - DNA, 75 bp, synthetic construct
  source 1..75: mol_type = other DNA
ttgccctggttttggtgctcgaaggtttagggccgatgctttacccgaaggcatggaagaagatgatctctgcga

SEQ ID NO: 31272 - DNA, 75 bp, synthetic construct
  source 1..75: mol_type = other DNA
atgaaaattaaaactctggcaatcgttgttctgtcggctctgtccctcagttccacagcggctctggccgctgcc

SEQ ID NO: 31273 - DNA, 75 bp, synthetic construct
  source 1..75: mol_type = other DNA
aaaaggggcacttgttgtcgctttagctgggcagggaaaaaccaaaggtatggttgcacaacttggtattaatac

SEQ ID NO: 31274 - DNA, 75 bp, synthetic construct
  source 1..75: mol_type = other DNA
agatatacacggacagagccagataccctgtggtgattactcgcagcactgagcactcagtgttctttcgacgca

SEQ ID NO: 31275 - DNA, 75 bp, synthetic construct
  source 1..75: mol_type = other DNA
tccgcagaacaaattcctcggcgtatgctggatgcaaggcgaatttgacttaatgaccagtgactacgcgtcaca

SEQ ID NO: 31276 - DNA, 75 bp, synthetic construct
  source 1..75: mol_type = other DNA
cgattacgaagaaaccgctgctgttccattgttcccattcgctgagagagaatccttttgttcctctgttttaat

SEQ ID NO: 31277 - DNA, 75 bp, synthetic construct
  source 1..75: mol_type = other DNA
gtgcaggaaatatcagtgccctgaacaaagtgatgaagggtacgctggtgacatctctggcactggtagctgtca

SEQ ID NO: 31278 - DNA, 75 bp, synthetic construct
  source 1..75: mol_type = other DNA
ctctggcagcgtgaagggcgggtctgtcggccccgaaaaaactcatcgtcgcttcctgccctgatacccgtgcag

SEQ ID NO: 31279 - DNA, 75 bp, synthetic construct
  source 1..75: mol_type = other DNA
aacatatcgcactggaggctcatacttttgactctgtaaaatttattctgaccaccgctctcgccgctggtctgc

SEQ ID NO: 31280 - DNA, 75 bp, synthetic construct
  source 1..75: mol_type = other DNA
tgcgcgccaaaattgatgagcagaccgggtggcacaagagcctgtccaacgtaggcgtgaacggtgtcaccggaa

SEQ ID NO: 31281 - DNA, 75 bp, synthetic construct
  source 1..75: mol_type = other DNA
gccgacaccttcggctcctgtggttacgtttatctggctgtttatccgacactggcacccgcaaccacttcataa

SEQ ID NO: 31282 - DNA, 75 bp, synthetic construct
  source 1..75: mol_type = other DNA
tggtgcaggagggcaatcagttgcattaccttgccgaccgcgccggtatcagggggcagtttagcgacgcggatg

SEQ ID NO: 31283 - DNA, 75 bp, synthetic construct
  source 1..75: mol_type = other DNA
cttccctgccgggaaaaatcagtaaatgtcctgtttatcttcctgatgacagaacaaacagaaacaacggagata

SEQ ID NO: 31284 - DNA, 75 bp, synthetic construct
  source 1..75: mol_type = other DNA
aacgccttgccggtctgattgccagcctgtcaccggcggcgcgtcggcaaatggcggctgagattgcgaaaaagc

SEQ ID NO: 31285 - DNA, 75 bp, synthetic construct
  source 1..75: mol_type = other DNA
gtgaggctctggatgcctgggtatgccgaccaggaatgacacaggagcaggcgacgatattaatcacggaagcat

SEQ ID NO: 31286 - DNA, 75 bp, synthetic construct
  source 1..75: mol_type = other DNA
gaatccccgccatcagcataccgtcacgctgtatgcaaaagggctgacctgcaaagccgataccctcagcagttg

SEQ ID NO: 31287 - DNA, 75 bp, synthetic construct
  source 1..75: mol_type = other DNA
agatgaagaatgagctgcgttatcttcgcgcagaaaatgcatatctgaaagccatgcaggagcatcttctggaaa

SEQ ID NO: 31288 - DNA, 75 bp, synthetic construct
  source 1..75: mol_type = other DNA
ggtcagctggataccaattttaaaattggtcgtcgtgccgcgttacgcgagattgaggatgtgaaacacgatacg

SEQ ID NO: 31289 - DNA, 75 bp, synthetic construct
  source 1..75: mol_type = other DNA
agttccggcgtgatttttccctggtatatgccgcaccccgcagtaagcccatcagcagggaaaaagcgtggggaa

SEQ ID NO: 31290 - DNA, 75 bp, synthetic construct
  source 1..75: mol_type = other DNA
ggttgtctggtggaaaaaattaaggtcggtgatttctccacaccggctaaagcgaccgcagagccgggagcgtaa

SEQ ID NO: 31291 - DNA, 75 bp, synthetic construct
  source 1..75: mol_type = other DNA
gccgaattactttgcaggatcagttgcaacttatgatgcaaatcgaattgttaaatgtggtttttatgatgaata

SEQ ID NO: 31292 - DNA, 75 bp, synthetic construct
  source 1..75: mol_type = other DNA
atggcgggcgatcgggcgttgcgcagttcgcgcgaagtgccgcaagcgtggctggaggaagcgcaaaagcgcggc

SEQ ID NO: 31293 - DNA, 75 bp, synthetic construct
  source 1..75: mol_type = other DNA
cgtgatgatgtgctggctgcgcaccgcgttccgccgcaactgatgggggcgatgccgggcgaaaaaagtgcgttt

SEQ ID NO: 31294 - DNA, 75 bp, synthetic construct
  source 1..75: mol_type = other DNA
tatcagccatgcggccaccctcagcgcctcagatcttcacatcacgccggggcgtgacagtacggatttcacgta

SEQ ID NO: 31295 - DNA, 75 bp, synthetic construct
  source 1..75: mol_type = other DNA
gttcatgaatgttaaggcggcatcccgtgatgatgtgctggctgcgcaccgcgttccgccgcaactgatgggggc

SEQ ID NO: 31296 - DNA, 75 bp, synthetic construct
  source 1..75: mol_type = other DNA
ccatgaatggcgtcggatgtcgcgccagtgcacgcattatgggcgttggcctcaacacggttttacgtcacttaa

SEQ ID NO: 31297 - DNA, 75 bp, synthetic construct
  source 1..75: mol_type = other DNA
gatgccgggcgaaaaaagtgcgtttggtgatgtggagaaggccgcgcgggtttacgcaattaacgagctgatgcc

SEQ ID NO: 31298 - DNA, 75 bp, synthetic construct
  source 1..75: mol_type = other DNA
gtgccgactttcggcgtgacctacaccggtaactatgagttcccgcagccgctgcacgatgcgctggataaattc

SEQ ID NO: 31299 - DNA, 75 bp, synthetic construct
  source 1..75: mol_type = other DNA
ggtaacgcccgcgcggatgatctggtccgtaacaacggtattgcatcgaatgcagtggaaattcataaggatcat

SEQ ID NO: 31300 - DNA, 75 bp, synthetic construct
  source 1..75: mol_type = other DNA
caatcttttccggcctctccgactctggttccagtggaacttatcgacaccccgcgctgtgctacagatgctcct

SEQ ID NO: 31301 - DNA, 75 bp, synthetic construct
  source 1..75: mol_type = other DNA
gcgctggataaattccaggccgacaccggtatcgacatcgacatgcacatcgacgccgccagcggtggcttcctg

SEQ ID NO: 31302 - DNA, 75 bp, synthetic construct
  source 1..75: mol_type = other DNA
agactacaaagcctccctgaaatatctcagcgaccacccgaaactgcagggtattgcccagcagaacagctttaa

SEQ ID NO: 31303 - DNA, 75 bp, synthetic construct
  source 1..75: mol_type = other DNA
aggtgttggctgcgctgatggccatcggggaggagctgcgtcggctgcgtctggccgtcagggaacagggcgcgc

SEQ ID NO: 31304 - DNA, 75 bp, synthetic construct
  source 1..75: mol_type = other DNA
tccctgtccgatatattcggtgatctcagtgcgcaactgaataatctgcaggacacagcaacgtctgccttaagc

SEQ ID NO: 31305 - DNA, 75 bp, synthetic construct
  source 1..75: mol_type = other DNA
gattgctgagattaaacgactggccagcggtgcagtcacaccgttttatcgccgcgccacaaatgaaggtattca

SEQ ID NO: 31306 - DNA, 75 bp, synthetic construct
  source 1..75: mol_type = other DNA
tcagtacgcaactgaataatctgcaggacacggcaacatctgccttaagtgatatcagtaaaacggtgggagggc

SEQ ID NO: 31307 - DNA, 75 bp, synthetic construct
  source 1..75: mol_type = other DNA
ctggcgtcagcgtgtgaatgaggccgcacgggcggtaatgctggcctgtgccgccggtaatgaccttgatgtgat

SEQ ID NO: 31308 - DNA, 75 bp, synthetic construct
  source 1..75: mol_type = other DNA
tgggtggcggtcggtattgctgtgtctccgatgctgtatgggctggcaaaactggtcattgcgttgaaatcgtga

SEQ ID NO: 31309 - DNA, 75 bp, synthetic construct
  source 1..75: mol_type = other DNA
tgtatttttctggtgaaccggcacagatcgctgagattaaacgactggccagcggtgcagttacaccgctttatc

SEQ ID NO: 31310 - DNA, 75 bp, synthetic construct
  source 1..75: mol_type = other DNA
cccctgtaaatttggcaataaaattatcgtcaacaatctggtgagatgggaccgatggggattgcatcttatcac

SEQ ID NO: 31311 - DNA, 75 bp, synthetic construct
  source 1..75: mol_type = other DNA
tgagcacatttaaacaactgcaccagaataaggatgaagtgtttgagcggggggtgatcaacgtcttcagagggt

SEQ ID NO: 31312 - DNA, 75 bp, synthetic construct
  source 1..75: mol_type = other DNA
ccgcccgggactgggccatgaaacaggattttcgctgtggctgctggctgatggataaacctgaaacagcaatga

SEQ ID NO: 31313 - DNA, 75 bp, synthetic construct
  source 1..75: mol_type = other DNA
atgtctgatatcacagtctcccgtccggaagttgtcaacgggcatacggacgttatctgctcaaccagtatccgc

SEQ ID NO: 31314 - DNA, 75 bp, synthetic construct
  source 1..75: mol_type = other DNA
tcagcggcaaaccgatccctgacaaccgggaaaatatcatcattcggctggatgatcacatccgctccgttcagg

SEQ ID NO: 31315 - DNA, 75 bp, synthetic construct
  source 1..75: mol_type = other DNA
gcctgaccgtggagcagatgcaaaaccagatggacccggtgtacacgccggcgcgaaaaatccacctgtaccact

SEQ ID NO: 31316 - DNA, 75 bp, synthetic construct
  source 1..75: mol_type = other DNA
acgatggacatcatcagtctgggtggagcgaccgagtgcgccatctggtcggtctactacccgataggtgaggtg

SEQ ID NO: 31317 - DNA, 75 bp, synthetic construct
  source 1..75: mol_type = other DNA
cgttagcacctgttggcaatctggagacctacattcgagcagcgtactcatgtcccatgttgtcacaagaggaag

SEQ ID NO: 31318 - DNA, 75 bp, synthetic construct
  source 1..75: mol_type = other DNA
ttgagaactttgccagcagtattttcagtgccggaatggatttcctgtttacctggggagaattcatcggggtga

SEQ ID NO: 31319 - DNA, 75 bp, synthetic construct
  source 1..75: mol_type = other DNA
ggcatcaataattgtaaaacatgaagaatgcatttatgacgataccagaggaaacttcgttataaagggtaattg

SEQ ID NO: 31320 - DNA, 75 bp, synthetic construct
  source 1..75: mol_type = other DNA
ctcaattaccaccaggatatacttgtgcagaaccctatttattcccagacattaataaacccgatgggccagcaa

SEQ ID NO: 31321 - DNA, 75 bp, synthetic construct
  source 1..75: mol_type = other DNA
gccgcagcgagtcactctggctggtgcgcggcggtgtcctgaaactggatgaaggtcaccggctggccgcactct

SEQ ID NO: 31322 - DNA, 75 bp, synthetic construct
  source 1..75: mol_type = other DNA
gcggggtcactggcctgcttgattctgattggcaaaatctggccgggatttttaactctcggtggtgatttcacg

SEQ ID NO: 31323 - DNA, 75 bp, synthetic construct
  source 1..75: mol_type = other DNA
tcactgcttgcagacccggtattcgaaagtacattcggctggatgcctgcggatgaaacaatggaggatttgcgg

SEQ ID NO: 31324 - DNA, 75 bp, synthetic construct
  source 1..75: mol_type = other DNA
gtcttttgttgatatccacatcctgcgcttatgcctcctcaggagggtgtggagccgacagcactagcggtgcga

SEQ ID NO: 31325 - DNA, 75 bp, synthetic construct
  source 1..75: mol_type = other DNA
tgtaaacgtagttactgagaatagccagatggttgttaaccacggtgtaggcttctccgtacagatcacagtagc

SEQ ID NO: 31326 - DNA, 75 bp, synthetic construct
  source 1..75: mol_type = other DNA
tttattgccggcgtcctgctggtctttatcgatcgtgtcctcaatgccctgctggcaagcattggaatcgtcttc

SEQ ID NO: 31327 - DNA, 75 bp, synthetic construct
  source 1..75: mol_type = other DNA
attgaagagcagagagaacgccagcgcaaacaggagtccacgcagccggacagcgtgaccactgaaaattatgcg

SEQ ID NO: 31328 - DNA, 75 bp, synthetic construct
  source 1..75: mol_type = other DNA
ttggtaatacatctggcgtcattccaggcaaaaccattacggaacgacaggcagcggaagggctgatctccaacg

SEQ ID NO: 31329 - DNA, 75 bp, synthetic construct
  source 1..75: mol_type = other DNA
ggtgcactgggggagtcggggctatggagcgatgatgcgatagagcgtcagttaagccatacagaacgaaataat

SEQ ID NO: 31330 - DNA, 75 bp, synthetic construct
  source 1..75: mol_type = other DNA
tgccaaagtcagggcgataattcagacagatatatcagcaagctggacgcttggtgcgattgctctacagttgca

SEQ ID NO: 31331 - DNA, 75 bp, synthetic construct
  source 1..75: mol_type = other DNA
gatggtacagtggtgggctgattatttggaagagaataaactaagaatgataacaccatttgattacggaaaaat

SEQ ID NO: 31332 - DNA, 75 bp, synthetic construct
  source 1..75: mol_type = other DNA
cgtttgccttcaacgtggggacgggcaatgcctgtagttccacgctggtgaaattgctcaatcagcggcgctggg

SEQ ID NO: 31333 - DNA, 75 bp, synthetic construct
  source 1..75: mol_type = other DNA
tcctcgaatattagcattgaagataaagcaagggtaaaattaagaggaaaaagatttcttgaggatatggttggg

SEQ ID NO: 31334 - DNA, 75 bp, synthetic construct
  source 1..75: mol_type = other DNA
tttattcccttctgtctgatcatcgcagaatttgtttcgttaaataaaaactcagaagccggtgtctacgcgtgg

SEQ ID NO: 31335 - DNA, 75 bp, synthetic construct
  source 1..75: mol_type = other DNA
gtaaagtagaagatgtcgataaggaatttgtattaggaatgttattacaagcttcaaaaattaatgcggaggcta

SEQ ID NO: 31336 - DNA, 75 bp, synthetic construct
  source 1..75: mol_type = other DNA
tccatttatctagagcaacgcattacattgatggaatggtggggtaattatgttcataatcaaaaactcatatcg

SEQ ID NO: 31337 - DNA, 75 bp, synthetic construct
  source 1..75: mol_type = other DNA
gagagtgaggcatggcttgcgcagtgcgggctgacggcggaacagatggccgcgcagatggaggcggaatacatc

SEQ ID NO: 31338 - DNA, 75 bp, synthetic construct
  source 1..75: mol_type = other DNA
caaacgaacaatacgtagtttccctggcaacaggtgatcaaagcgtatttgaaaagcttgggtttgcttatgcga

SEQ ID NO: 31339 - DNA, 75 bp, synthetic construct
  source 1..75: mol_type = other DNA
tgtttctaacagtgacacatccctgattcgttcgctgtatcgcaattttactcaccactatatcaaggtaaaacg

SEQ ID NO: 31340 - DNA, 75 bp, synthetic construct
  source 1..75: mol_type = other DNA
atgcagtggggatgggcgcacggtttttgtgtagcaaatcctgttgatgtggttgaccatttgcttcctcagcag

SEQ ID NO: 31341 - DNA, 75 bp, synthetic construct
  source 1..75: mol_type = other DNA
aaacctatcgccgtaatcgaatgattgtttgtacgatttgcgcactcgttacgctcgcttcgaccctgagcgtgc

SEQ ID NO: 31342 - DNA, 75 bp, synthetic construct
  source 1..75: mol_type = other DNA
ctgtccttctggcggctggtgcaggcgattactgaccgcagacgcgtcaccctgcttgctgacgggcagcgttgt

SEQ ID NO: 31343 - DNA, 75 bp, synthetic construct
  source 1..75: mol_type = other DNA
atactacggtaactgctgataataacgtggagaaaaatgtcgcgtcgtttgccgcaaatgccgggacatttttaa

SEQ ID NO: 31344 - DNA, 75 bp, synthetic construct
  source 1..75: mol_type = other DNA
ggcactaatggggagtatcatctttttggtcatatccgtaatctgcgtatctggcataaagaattaactgatgcg

SEQ ID NO: 31345 - DNA, 75 bp, synthetic construct
  source 1..75: mol_type = other DNA
aaaactctataagaggaacatataatcacgcccaatattttgaaaagcgaaaggtgatgatgcaatggtattcag

SEQ ID NO: 31346 - DNA, 75 bp, synthetic construct
  source 1..75: mol_type = other DNA
tctctaaagaaagtgtatcacaggttattgaattactaggctacaaaggtcgcgctacaggtcacggatttagac

SEQ ID NO: 31347 - DNA, 75 bp, synthetic construct
  source 1..75: mol_type = other DNA
gtacgcaggggaaaactgcgccgcaatgtggtggtcctttcccggcgctcccgcgatggcgggatggaatccggt

SEQ ID NO: 31348 - DNA, 75 bp, synthetic construct
  source 1..75: mol_type = other DNA
agactcgacaattgattattgccgttgaccatctcgaccgaccggtgattgtcctcgatccggaacgccatattg

SEQ ID NO: 31349 - DNA, 75 bp, synthetic construct
  source 1..75: mol_type = other DNA
tcgcattacatactctgaaatgcactcaaaaagatttagcaagccacttaggtgtttcctcaacacaaattagca

SEQ ID NO: 31350 - DNA, 75 bp, synthetic construct
  source 1..75: mol_type = other DNA
atcagtccggatattgccgcttacgcactgcgggcagtgagacgcagatggtacccgacgtgcttatctttgccc

SEQ ID NO: 31351 - DNA, 75 bp, synthetic construct
  source 1..75: mol_type = other DNA
gcgtagccgttgcccgtccggttgtgttgctgtatttgccgcccgtattcgccagggggaaacctatgcacaata

SEQ ID NO: 31352 - DNA, 75 bp, synthetic construct
  source 1..75: mol_type = other DNA
acgcttgctgaacttcacaacagctttatagctgaactgaatgaaaacggcatgccagcggaaccagtgacgcac

SEQ ID NO: 31353 - DNA, 75 bp, synthetic construct
  source 1..75: mol_type = other DNA
cactggatattctgattgcgtggctgcaggacaatatcgactgcgaatcgggaattatctttgacaacgatgagg

SEQ ID NO: 31354 - DNA, 75 bp, synthetic construct
  source 1..75: mol_type = other DNA
agcaatgcacaggcggcgctatgggccagcaccgttgcacagactcagttgcagaaaaaggggctaaacgcatga

SEQ ID NO: 31355 - DNA, 75 bp, synthetic construct
  source 1..75: mol_type = other DNA
ctggctcaatgtgctggctgaactgaaaaacagcggcctgaacgatatccttatcatctgtgcagatggcctgaa

SEQ ID NO: 31356 - DNA, 75 bp, synthetic construct
  source 1..75: mol_type = other DNA
cccgtattcaggacgccgactatgcgaccgaagtgtccaacatgtcgaaagcgcagatcatccagcaggcgggta

SEQ ID NO: 31357 - DNA, 75 bp, synthetic construct
  source 1..75: mol_type = other DNA
ggaagataccgccgactttatcgccggacgcgccgttgccgcgatgacccgctaccgccagcagctgttgccgcc

SEQ ID NO: 31358 - DNA, 75 bp, synthetic construct
  source 1..75: mol_type = other DNA
tattgacgacgggatcagtaccgacggtgatatggggcaaatggtggtcaccatcctgtcggctgtggcacaggc

SEQ ID NO: 31359 - DNA, 75 bp, synthetic construct
  source 1..75: mol_type = other DNA
gcgtgagttgactgttcaggcgacgaccgggactaactctgattctgacctgtcttctattcaggacgaaatcaa

SEQ ID NO: 31360 - DNA, 75 bp, synthetic construct
  source 1..75: mol_type = other DNA
gcataaccggacaagacggttcttacctggcagagtttctgctggaaaaaggttacgaggtgcatggtattaagc

SEQ ID NO: 31361 - DNA, 75 bp, synthetic construct
  source 1..75: mol_type = other DNA
tgactaactatctcgccaaaacaaaaaagaacgcagatctttatagattatataatccacaattttcttttttct

SEQ ID NO: 31362 - DNA, 75 bp, synthetic construct
  source 1..75: mol_type = other DNA
cacgccgcttacgcaatcaaatgatcctgatggcaatcctgatggtcattgtcccaacgcttactattggttata

SEQ ID NO: 31363 - DNA, 75 bp, synthetic construct
  source 1..75: mol_type = other DNA
tggagttttacccgcgtaatacccatctggcagcaaaaattgagtattgccggaacgggaatatttcatgtttgc

SEQ ID NO: 31364 - DNA, 75 bp, synthetic construct
  source 1..75: mol_type = other DNA
gtggcaagaacgacacgccccctgaccagcacagaagttctgcgcgctagagcgttagaaaaggatctaacgtta

SEQ ID NO: 31365 - DNA, 75 bp, synthetic construct
  source 1..75: mol_type = other DNA
ccttcaactcatttggtataagctttatccagaaacagtcctgctggaggaaatctgatgatatcctgcgatgtt

SEQ ID NO: 31366 - DNA, 75 bp, synthetic construct
  source 1..75: mol_type = other DNA
ccgctggggcaggatcaaaaaaccgcaactcatagcaagaatcgaaaggcttgagcagcaggcgcaaatatcgat

SEQ ID NO: 31367 - DNA, 75 bp, synthetic construct
  source 1..75: mol_type = other DNA
agaaagctttttccagttgttgaaacgcgaacggataaagaaaaagatctacggaacgcgggaagaagcccgcag

SEQ ID NO: 31368 - DNA, 75 bp, synthetic construct
  source 1..75: mol_type = other DNA
tcgattactggactccggtcggtggggcgatcacgcctcgcgaacgaaaactggtatcaggcttcgttgattacc

SEQ ID NO: 31369 - DNA, 75 bp, synthetic construct
  source 1..75: mol_type = other DNA
acaggaagaagctcctggagatgatcccgctttcgacacgaacaatttataacctggagcagcgaggggattttc

SEQ ID NO: 31370 - DNA, 75 bp, synthetic construct
  source 1..75: mol_type = other DNA
acgttcatcagatgccagacggcagtttgatgcgcgtacctcgttcaatctcgtttgctgcgatggacgatcttg

SEQ ID NO: 31371 - DNA, 75 bp, synthetic construct
  source 1..75: mol_type = other DNA
gtggggcaccgttatgcaggcaggccggagatgcgctaccgctacgacgatgcggggcgggtggtggagcaactt

SEQ ID NO: 31372 - DNA, 75 bp, synthetic construct
  source 1..75: mol_type = other DNA
ccatcatttttagttaccgataatcagggcgatcagcgcggcattctcgccaccaatgacatcaccgatgatacc

SEQ ID NO: 31373 - DNA, 75 bp, synthetic construct
  source 1..75: mol_type = other DNA
taattattccttgttataatgagcagaaggcaatagcaaaagtcataaatgatttcaaaacgaatattccaactg

SEQ ID NO: 31374 - DNA, 75 bp, synthetic construct
  source 1..75: mol_type = other DNA
gcaacgccagataatcagcgagttaaagcagaaaaaagaatcaatggaagatctcatagcgagatggattgcggc

SEQ ID NO: 31375 - DNA, 75 bp, synthetic construct
  source 1..75: mol_type = other DNA
agacaggctgacgacggtgcagactgacaccacacgtatccagacggtatacgagccgggaagcttcacgccgct

SEQ ID NO: 31376 - DNA, 75 bp, synthetic construct
  source 1..75: mol_type = other DNA
aagataaaacgatgatatttgctatatcagtgacattaatgttatacgtaaacaggatttacgggatggcaagtg

SEQ ID NO: 31377 - DNA, 75 bp, synthetic construct
  source 1..75: mol_type = other DNA
ctgtccatctggaaacggcgagcgcttgaagctgatgagcacgttcggcgactggagcaaatcaatgaccacatg

SEQ ID NO: 31378 - DNA, 75 bp, synthetic construct
  source 1..75: mol_type = other DNA
gcgcacactgaccttccggcgtgaggccgcaggcgaatttaccggggaaatcaccggcgtgaccgatggcgccgg

SEQ ID NO: 31379 - DNA, 75 bp, synthetic construct
  source 1..75: mol_type = other DNA
accgtcaggtaaagaaccctaatccggtattcacaccccgtgaaggtgccaggacgctgccgttctgtgagaagc

SEQ ID NO: 31380 - DNA, 75 bp, synthetic construct
  source 1..75: mol_type = other DNA
acgggcgaaaggttcagaacctgcaggtcggtctgctggatgatgaggaatctgatgaagtggagcgcctgcaaa

SEQ ID NO: 31381 - DNA, 75 bp, synthetic construct
  source 1..75: mol_type = other DNA
cctcaagctttatcgggtggttgatattgtgtcggcatttctggcattaccaccgccggttgcagaaggcgaaat

SEQ ID NO: 31382 - DNA, 75 bp, synthetic construct
  source 1..75: mol_type = other DNA
aaccgaaaggcatttacggcataccacagaaaaagacacagacgacacagcagcaggataaaaccacatcagcgc

SEQ ID NO: 31383 - DNA, 75 bp, synthetic construct
  source 1..75: mol_type = other DNA
ttaaccgcctgccgggcattgtatttgataccagtgaagcgggtgatattacggcactgtctgacgccattccga

SEQ ID NO: 31384 - DNA, 75 bp, synthetic construct
  source 1..75: mol_type = other DNA
ccgcaagaagaacttcccgtttcttccagcagaccagatccctgcattcaacaaagcactggcaacattttcagg

SEQ ID NO: 31385 - DNA, 75 bp, synthetic construct
  source 1..75: mol_type = other DNA
catggcttatctttttacgccgtacttatgcggttgcagcgggcgttctggcgctgcctttcatgcttttctgga

SEQ ID NO: 31386 - DNA, 75 bp, synthetic construct
  source 1..75: mol_type = other DNA
atgacccgcgcgtttacctttagtgacagtagtgcctcaaaggaagatgaaaactatcgtatcttctcgttactg

SEQ ID NO: 31387 - DNA, 75 bp, synthetic construct
  source 1..75: mol_type = other DNA
aggagtggctcgggaaatatggtactgcgcgcgtcaaactgaatgtcgataaagatttctcgctgaaggattctt

SEQ ID NO: 31388 - DNA, 75 bp, synthetic construct
  source 1..75: mol_type = other DNA
cgctgcgggtcgcgataataggcgcaggccaggtggcggataaggttcatgcttcgtactactgcacccgcaacg

SEQ ID NO: 31389 - DNA, 75 bp, synthetic construct
  source 1..75: mol_type = other DNA
tgaacctgacgtcgtcctgtgggcaagcaacgattttgaatcgacctgtgccactctggactacctgatcgttaa

SEQ ID NO: 31390 - DNA, 75 bp, synthetic construct
  source 1..75: mol_type = other DNA
gggctgaaggggggatggaatttttatcagtatccgttgaatccgatctcaaatatagatccattaggattagaa

SEQ ID NO: 31391 - DNA, 75 bp, synthetic construct
  source 1..75: mol_type = other DNA
ttaacactagctcatttatagatagtggaaattgtaatgaaagaaaatcttctgaatccatggagctactagctt

SEQ ID NO: 31392 - DNA, 75 bp, synthetic construct
  source 1..75: mol_type = other DNA
ctgggaaattggccgacgaattgtcgaatttgaacaaggtggcgaggccagggctgcgtatggtgcgcagctaat

SEQ ID NO: 31393 - DNA, 75 bp, synthetic construct
  source 1..75: mol_type = other DNA
atcggtgatgctggcgacggtgaacttaatgtctcgagtgaaggcaaagtagattcgggaattatcactgcgggg

SEQ ID NO: 31394 - DNA, 75 bp, synthetic construct
  source 1..75: mol_type = other DNA
gcatgccccctcagacagaaaacaaagtgatgagcggctaaaactggagattaaggtggcacatatccgcactcg

SEQ ID NO: 31395 - DNA, 75 bp, synthetic construct
  source 1..75: mol_type = other DNA
tatcactaatctcggaactaatcttggttatgacggccacggcgaaatgaatatcagtaatcaggggcttgttgt

SEQ ID NO: 31396 - DNA, 75 bp, synthetic construct
  source 1..75: mol_type = other DNA
tatggtgtttacaccaaagcccgtcgcaacgttattacaggaaaaatcatgcctgcagcacctggtggctctgcc

SEQ ID NO: 31397 - DNA, 75 bp, synthetic construct
  source 1..75: mol_type = other DNA
actgaagatctggaaacgtggcgcgcccgcgtcattgagcggtattactggacgccgcagggcggggctgacggg

SEQ ID NO: 31398 - DNA, 75 bp, synthetic construct
  source 1..75: mol_type = other DNA
tattaaattttgcaataagcgatcgtatcacaagaacgacagaacaatgggatcgatgtaagctcaatcaaaaat

SEQ ID NO: 31399 - DNA, 75 bp, synthetic construct
  source 1..75: mol_type = other DNA
gtcgttgaaaagggtggcgagtggctaataaaaaataacgattcctcaattgaatttcaaattggtaatcaagga

SEQ ID NO: 31400 - DNA, 75 bp, synthetic construct
  source 1..75: mol_type = other DNA
ttggtaatacgtcgggcgtcattcccggcaaaattattacggaacgacaggcagctgaagggctgatctccaacg

SEQ ID NO: 31401 - DNA, 75 bp, synthetic construct
  source 1..75: mol_type = other DNA
atgcaaaacagaaaatggattttgacctcgctggtaatgacttttttcggcatccccatactggcgcaatttttg

SEQ ID NO: 31402 - DNA, 75 bp, synthetic construct
  source 1..75: mol_type = other DNA
ccaatactctattgcatcaatcgaaaacggacgtttaggggcattacgtgttcagggatacgcacaagtaacttt

SEQ ID NO: 31403 - DNA, 75 bp, synthetic construct
  source 1..75: mol_type = other DNA
tgcagcgctggtactgccggaagcaggacgggaaaaagatccgcgtcattggcagacagttatggcacacggtca

SEQ ID NO: 31404 - DNA, 75 bp, synthetic construct
  source 1..75: mol_type = other DNA
tgggacgatggtataccaacgctgtttaccaactactcgtttacaggttctgataaccgttaccgccagggcaat

SEQ ID NO: 31405 - DNA, 75 bp, synthetic construct
  source 1..75: mol_type = other DNA
ttgaaccgaaatgggatctgaaaacggactggcaaatcatcagtgaaatcgccacccgtatgggttatccgatgc

SEQ ID NO: 31406 - DNA, 75 bp, synthetic construct
  source 1..75: mol_type = other DNA
ttacaaagagcttacgcctgagattatgcgcaaccaggctgccgaatccaatcgcggtaatgagtggaccggcaa

SEQ ID NO: 31407 - DNA, 75 bp, synthetic construct
  source 1..75: mol_type = other DNA
gatttctacggtgcgacttacgagaaaatgggcgaactgggcttcattcagtggccttgccgcgatacttcagat

SEQ ID NO: 31408 - DNA, 75 bp, synthetic construct
  source 1..75: mol_type = other DNA
cggcaggaaggctcacggcgcagacggacgcggcgggacggcggacagagtacggtctgaatgtggtgtccggcg

SEQ ID NO: 31409 - DNA, 75 bp, synthetic construct
  source 1..75: mol_type = other DNA
acagccgtagcaaatacaaagtgttcaccagatggacttgtaggccgcgacagcaaagggacaatactttcgtgc

SEQ ID NO: 31410 - DNA, 75 bp, synthetic construct
  source 1..75: mol_type = other DNA
cctacagttcagttcaccccgtaggcctgataagtcgcgtcagcggcgcatcaggcatcggttgtcggatgcgac

SEQ ID NO: 31411 - DNA, 75 bp, synthetic construct
  source 1..75: mol_type = other DNA
acggcatcattattgggcatagctcaacactaacagccactcaattcaccattgaaaactcgaacggtataggcc

SEQ ID NO: 31412 - DNA, 75 bp, synthetic construct
  source 1..75: mol_type = other DNA
ggtggcagtgtggtgttcccgccggtgctggtgcagatgctcgaccggctggaaagtgaaatcctggctgaccgg

SEQ ID NO: 31413 - DNA, 75 bp, synthetic construct
  source 1..75: mol_type = other DNA
ataaacgcacaccgaaacagttggcgctcatcatcaaacgttgtttgccgatggtgctcactggcagcggcatgc

SEQ ID NO: 31414 - DNA, 75 bp, synthetic construct
  source 1..75: mol_type = other DNA
gtaaatcagggcggtaaatttcgttactgcataccgggcgataatttaccagcagagccgaaagcagcatcggta

SEQ ID NO: 31415 - DNA, 75 bp, synthetic construct
  source 1..75: mol_type = other DNA
cccgcaacaagctgggttgctatatggcgcagcaggcgtcgcttaacaatatcccggtttctgcactggtatcgc

SEQ ID NO: 31416 - DNA, 75 bp, synthetic construct
  source 1..75: mol_type = other DNA
cgtggtcagcaagtgctgatcaatggaaaagtcgaaggcaaatgttatgctgctagattgtctgtcttgtctaaa

SEQ ID NO: 31417 - DNA, 75 bp, synthetic construct
  source 1..75: mol_type = other DNA
tagcggcggggcacgccgttcttgcctgtggagagatggtgcagtcaggccgcccgttgaagcaggaacccaccg

SEQ ID NO: 31418 - DNA, 75 bp, synthetic construct
  source 1..75: mol_type = other DNA
cccgtagcttcggcggggcgggcagtacagcggggtacgaacaggccacggcgtacaccctcacagggcagctac

SEQ ID NO: 31419 - DNA, 75 bp, synthetic construct
  source 1..75: mol_type = other DNA
tggaaaaagcctttgaagggattgcagcagatccggtgaaggcgctggcctccctgaatcagcagtataacttcc

SEQ ID NO: 31420 - DNA, 75 bp, synthetic construct
  source 1..75: mol_type = other DNA
aaaattccgttccaggctcgctatattgctgttgatggacaagccactgctggtacagccaacgccgacgccacc

SEQ ID NO: 31421 - DNA, 75 bp, synthetic construct
  source 1..75: mol_type = other DNA
ttttgtgggctgttcatttaccctggacagtcagtgcggcaggttgtggctgtatcagcccccggcgacaggggc

SEQ ID NO: 31422 - DNA, 75 bp, synthetic construct
  source 1..75: mol_type = other DNA
tgccgaaatagtccgggataattacgtgcggtttaacgatatagaacagtctaaaattgcactgctaccacgttg

SEQ ID NO: 31423 - DNA, 75 bp, synthetic construct
  source 1..75: mol_type = other DNA
aacatactgagtacccagacagccacgggtaccgctatcaatcagaactctgaaaagctggcaagtgtcattgcc

SEQ ID NO: 31424 - DNA, 75 bp, synthetic construct
  source 1..75: mol_type = other DNA
cgaccgcctgcaccgggaaacgctgcgcagcttcggccgttatgaactcaccaccgcttatacccctgccgggca

SEQ ID NO: 31425 - DNA, 75 bp, synthetic construct
  source 1..75: mol_type = other DNA
aataaatgtgacgatagaattacgagaagagtttaccttagtaaagaaaaggaagtatccattaaggtggtatat

SEQ ID NO: 31426 - DNA, 75 bp, synthetic construct
  source 1..75: mol_type = other DNA
gtggtcggattatctggaagcatgccgagaatcttatgcaccgccttatacaattggtaaaaataagtttatccc

SEQ ID NO: 31427 - DNA, 75 bp, synthetic construct
  source 1..75: mol_type = other DNA
tctttgttactttcatcgttactctcttcttcatccagatctggatatatctccaattgatgctaacatccgacg

SEQ ID NO: 31428 - DNA, 75 bp, synthetic construct
  source 1..75: mol_type = other DNA
aactgtataccgacagtgccggttacccggtaaaaattgttcgctgcataaacaacaccgtgttgtacagaagat

SEQ ID NO: 31429 - DNA, 75 bp, synthetic construct
  source 1..75: mol_type = other DNA
aagctttgtttaatgtgctaatggacgatgagttagatgacattgctttttgctcaagagttgattcaatacctg

SEQ ID NO: 31430 - DNA, 75 bp, synthetic construct
  source 1..75: mol_type = other DNA
ggctggtgtggcgcagagcagcgccaactctgcgtatccgtgacccgcataaagatgaaaagatggtggcaattc

SEQ ID NO: 31431 - DNA, 75 bp, synthetic construct
  source 1..75: mol_type = other DNA
cgtcgatagcgcaacgctaactgcaacggtcaaagatcagttcgacaatgaggtgaacaatcttccggtaacatt

SEQ ID NO: 31432 - DNA, 75 bp, synthetic construct
  source 1..75: mol_type = other DNA
aaaaacctggcactgacagcagcaacaatgacttacagtctggaagcagctgtcgtttttgccgatggccctgca

SEQ ID NO: 31433 - DNA, 75 bp, synthetic construct
  source 1..75: mol_type = other DNA
caggcggtggaagcacctttacgccaggcatcgtgttgatgctcctggcgaatcaggaccgtttcccgcttcgtg

SEQ ID NO: 31434 - DNA, 75 bp, synthetic construct
  source 1..75: mol_type = other DNA
gaggaagctcgtgggctaatgatgggcggtggtggtgacaccgtgaagtacacgaccagaaacagcctttaccgt

SEQ ID NO: 31435 - DNA, 75 bp, synthetic construct
  source 1..75: mol_type = other DNA
gaagggttacgccagtaccagcgcagccgtttttccatttcaggcgcataacgctgaacccagcggtaaatcgtg

SEQ ID NO: 31436 - DNA, 75 bp, synthetic construct
  source 1..75: mol_type = other DNA
ggagttacgtttggacagaaacagggtgggactattgcccttgttgaggcgcagggggtagacggagcggaagtt

SEQ ID NO: 31437 - DNA, 75 bp, synthetic construct
  source 1..75: mol_type = other DNA
ctcttctgatggttatcagactctttctgatgtacttgatacttatggccatagcaattactcctacggaggtta

SEQ ID NO: 31438 - DNA, 75 bp, synthetic construct
  source 1..75: mol_type = other DNA
tgcgtgaagatgaatttgtcacatcattacggacattaaaagaaattggattaaaagctggcttttctgcttttg

SEQ ID NO: 31439 - DNA, 75 bp, synthetic construct
  source 1..75: mol_type = other DNA
gcggcacgcgggatatcaccatcgacgccaatctgcccggcctgcgggtcgatacggtggcgggcgatgatgtgg

SEQ ID NO: 31440 - DNA, 75 bp, synthetic construct
  source 1..75: mol_type = other DNA
cggtaacggtgaaattgggcactcatgtcctgacgggcatcgtgctggcagatggcagctggaatgtggcgctgg

SEQ ID NO: 31441 - DNA, 75 bp, synthetic construct
  source 1..75: mol_type = other DNA
gaagcctgctggagccggctgtcggattacccggaacaggcgcagccctgtgacatgctgatggtcataccctcc

SEQ ID NO: 31442 - DNA, 75 bp, synthetic construct
  source 1..75: mol_type = other DNA
agcggcttgctgaacgtcagcgaaaaacgaaaccgctgttgaaatccctggaaagctggttgcgtgaaaagatga

SEQ ID NO: 31443 - DNA, 75 bp, synthetic construct
  source 1..75: mol_type = other DNA
tctgtagaggtaaagcagagggaatatgggagaacagctgtgcataaatgtacttttgtttttagccctcaggta

SEQ ID NO: 31444 - DNA, 75 bp, synthetic construct
  source 1..75: mol_type = other DNA
agctgtaaggcagtttataagctttctgataataaaagcattgttaatatatataatgcatccttgacttgtata

SEQ ID NO: 31445 - DNA, 75 bp, synthetic construct
  source 1..75: mol_type = other DNA
atgccactgctggataagtcgcgtgagcagtacgggatcggaccggtatgcagtgaactgcatattgccccgtca

SEQ ID NO: 31446 - DNA, 75 bp, synthetic construct
  source 1..75: mol_type = other DNA
tcctggctgaccgggtgagtgaggaaagccgccgctggctggcatcgtgcggcctgacggtggagcagatgcaaa

SEQ ID NO: 31447 - DNA, 75 bp, synthetic construct
  source 1..75: mol_type = other DNA
gcagcttatccgcctgccggggcagcagtatgatgaggagtccggcctgtattacaaccgccaccgctattatga

SEQ ID NO: 31448 - DNA, 75 bp, synthetic construct
  source 1..75: mol_type = other DNA
gctgcttgttgcagagcaggatgaaagcatcggataccgtccgcgtattctggccgcgccggagctggacacgga

SEQ ID NO: 31449 - DNA, 75 bp, synthetic construct
  source 1..75: mol_type = other DNA
aatcaatctagaacatctacggcaaacacttgagcgtaaatctcttactgctgttcagaaatcacaatgtgaaat

SEQ ID NO: 31450 - DNA, 75 bp, synthetic construct
  source 1..75: mol_type = other DNA
gaggtgccgccgccggagccgcccgcataccgggtgctgacgggcgtggtggacggcttcgggcgctcactgatt

SEQ ID NO: 31451 - DNA, 75 bp, synthetic construct
  source 1..75: mol_type = other DNA
ggctgttttgcgtagactggctggcaactctccggtaactccggatagttggataagctgtagtgagcgaatgcc

SEQ ID NO: 31452 - DNA, 75 bp, synthetic construct
  source 1..75: mol_type = other DNA
tggcggcgggagcgtgacctgacggggtggatgtcgctgtcgcgtaaaccggaggagacctggtacgggtgggac

SEQ ID NO: 31453 - DNA, 75 bp, synthetic construct
  source 1..75: mol_type = other DNA
ccgaccgatcctcagtccggtcagcctgcgggtcagcgtgctcacaagcctttcatttttaccgtggcgctgaac

SEQ ID NO: 31454 - DNA, 75 bp, synthetic construct
  source 1..75: mol_type = other DNA
gaaggtggtggatttattcccctgaaaattggcataagcaatgatatttcggcatttctggcagaacacccggag

SEQ ID NO: 31455 - DNA, 75 bp, synthetic construct
  source 1..75: mol_type = other DNA
tgagcaggacagcacttattaccctgagtcgctgaaaaaactggaagacgcggcggatgcggctgtcagcagggc

SEQ ID NO: 31456 - DNA, 75 bp, synthetic construct
  source 1..75: mol_type = other DNA
ctcagccagcaggtgttgcgttaccagtacaggaagttgcaacacaggaagatataaaaacagaaactgtggctg

SEQ ID NO: 31457 - DNA, 75 bp, synthetic construct
  source 1..75: mol_type = other DNA
gagtatggcttatcttttacgcgcttattcgtttgcaaaaatcggtaaatatagcgaagccgaaaaagatatttc

SEQ ID NO: 31458 - DNA, 75 bp, synthetic construct
  source 1..75: mol_type = other DNA
gcgcggggaacacggaccaaatacccgtccctcaatccacgccgtcggtttatccccgctggcgcggggaacaca

SEQ ID NO: 31459 - DNA, 75 bp, synthetic construct
  source 1..75: mol_type = other DNA
ttatttagatgatgaaattaaagttgcatggctccctcatccagaaaaggaaatcagtaaggcggtaataacctc

SEQ ID NO: 31460 - DNA, 75 bp, synthetic construct
  source 1..75: mol_type = other DNA
taccaattgatgaatctgaacaaaaagccatcgcctctattttgtcctctcttaaagacaaaatagacctgcttc

SEQ ID NO: 31461 - DNA, 75 bp, synthetic construct
  source 1..75: mol_type = other DNA
gaaatcaccatccagcgtgttgaccccagactgaaaccatccggtatggaaatccggcagatgatctcccgtaac

SEQ ID NO: 31462 - DNA, 75 bp, synthetic construct
  source 1..75: mol_type = other DNA
cgctggcacttgccattaccatttaccagcgtgacggcaatattcacaacattatttttgatgatatctggagtg

SEQ ID NO: 31463 - DNA, 75 bp, synthetic construct
  source 1..75: mol_type = other DNA
cgcctcatgggtgctacccgctggatttaaaggtgctcgtgatgcccgttacgccatgtgggtttcgatgttgag

SEQ ID NO: 31464 - DNA, 75 bp, synthetic construct
  source 1..75: mol_type = other DNA
attctggcggtactaccgctggaatatcgcggccacctggttgagcaggatagcttcatggctcggctggctgaa

SEQ ID NO: 31465 - DNA, 75 bp, synthetic construct
  source 1..75: mol_type = other DNA
aaggatttcgttaaagagctattttaaaccgctgaattttagcattatctgggaagtcatggggattggtattcc

SEQ ID NO: 31466 - DNA, 75 bp, synthetic construct
  source 1..75: mol_type = other DNA
ctgttggttgattgtggggtctggttcacctgaactgcgggaacatttacagtatcagattgacagtatgggcat

SEQ ID NO: 31467 - DNA, 75 bp, synthetic construct
  source 1..75: mol_type = other DNA
ggctccgcgcatatcacgttcagaaaaccagaactggttgacagactgaatgacatcattgcgaagcattatccg

SEQ ID NO: 31468 - DNA, 75 bp, synthetic construct
  source 1..75: mol_type = other DNA
agctttttgactgtgtgcgtcacaccctgaaatcccttgagctgtcaaaacatcagtatgtggcagccgttcata

SEQ ID NO: 31469 - DNA, 75 bp, synthetic construct
  source 1..75: mol_type = other DNA
cgcggcagatgaatttctgcgctggaataaatcaggcggaaaggtgatgccggggctcacgaatcgccgcaaggc

SEQ ID NO: 31470 - DNA, 75 bp, synthetic construct
  source 1..75: mol_type = other DNA
gcgcagccacagttccgcttattttcgggagctggtggagacgcaggaacggctagtgaaagatatcgatgattt

SEQ ID NO: 31471 - DNA, 75 bp, synthetic construct
  source 1..75: mol_type = other DNA
accagccgattattatggggcgtacctaccaccaggaaaaccgcacacccggcagcctgccggggacgaagacgc

SEQ ID NO: 31472 - DNA, 75 bp, synthetic construct
  source 1..75: mol_type = other DNA
gcggattataaagtcagtcacagtggaatcagtctgagcggtggtggcagcttcggggataaatttcagggtaac

SEQ ID NO: 31473 - DNA, 75 bp, synthetic construct
  source 1..75: mol_type = other DNA
gggcggcatttgacccgtacaccagtctgaacacggcggcggtcatcctgagagaatgtcgccgtcgccatcctg

SEQ ID NO: 31474 - DNA, 75 bp, synthetic construct
  source 1..75: mol_type = other DNA
ggtaccaggcaaggactggaataatcagcagaacatctatcaccgttggttaaaaggtgaaacggaagcgcaaag

SEQ ID NO: 31475 - DNA, 75 bp, synthetic construct
  source 1..75: mol_type = other DNA
aaaccggagatatgggaccggaatttagtaagactatcgatctggaaactgctggcggagtcattgatcgggaca

SEQ ID NO: 31476 - DNA, 75 bp, synthetic construct
  source 1..75: mol_type = other DNA
agggcgacatgacgcagtatggcggtagcattgttcagggttctgccggggtacgtattggtgcccccaccggcg

SEQ ID NO: 31477 - DNA, 75 bp, synthetic construct
  source 1..75: mol_type = other DNA
cactatattgcgaagcaaaaaatgacaaggtcagaaaacgccttgggattaaaggtggtttttactggactacag

SEQ ID NO: 31478 - DNA, 75 bp, synthetic construct
  source 1..75: mol_type = other DNA
tgaagaacaagttttcttacaaagtggatatgtcaggagctcaggttgcaaccattgaaaatggaaaactgacag

SEQ ID NO: 31479 - DNA, 75 bp, synthetic construct
  source 1..75: mol_type = other DNA
ccggtcattacaacccgggaaaccgatgacaaaataacatggtcactgacaggctataacacggttgcaaacaag

SEQ ID NO: 31480 - DNA, 75 bp, synthetic construct
  source 1..75: mol_type = other DNA
ttttattgatgaacagcagttaacgaatagtgatattccgaagaaaagtacggtcccaaatgaagataaaaaagg

SEQ ID NO: 31481 - DNA, 75 bp, synthetic construct
  source 1..75: mol_type = other DNA
gttgctatttaatgaagtgcctgtcagcattttagtaaatgatattttttttgaaggattttttcatgaagcaac

SEQ ID NO: 31482 - DNA, 75 bp, synthetic construct
  source 1..75: mol_type = other DNA
gacgactctgacggcaacagtgaaagatccttttgataacgcagtaaaagatctacaggtcaccttcagtaccaa

SEQ ID NO: 31483 - DNA, 75 bp, synthetic construct
  source 1..75: mol_type = other DNA
catccgggtcgagacagagaacggcgagcgggaaaaagcgcagcggcgcagcctggcagagacgctccagcagga

SEQ ID NO: 31484 - DNA, 75 bp, synthetic construct
  source 1..75: mol_type = other DNA
attgcactgatgaggatttaaacgatcgtgactttattgcatcagttgttgaccgggctatttttcatttcgcga

SEQ ID NO: 31485 - DNA, 75 bp, synthetic construct
  source 1..75: mol_type = other DNA
aacgtgattccactggctccgggccatgcctacgggatgtttatggaacgctttaacgagttatcggagttacgc

SEQ ID NO: 31486 - DNA, 75 bp, synthetic construct
  source 1..75: mol_type = other DNA
taatggtactgagaaagtatcagcttatcatactcatggtgcagatagtcatggagaatattgggacgaaatatt

SEQ ID NO: 31487 - DNA, 75 bp, synthetic construct
  source 1..75: mol_type = other DNA
tcgactcttgctttcaggtggggagcatagaagaaattgccgatgctctcgagaaacgcagcggaagcgaggaaa

SEQ ID NO: 31488 - DNA, 75 bp, synthetic construct
  source 1..75: mol_type = other DNA
tattgattgctctggttgtggtgggttatttcctgcatttgaaacgttattgtcgggcgtttcgccaggacagag

SEQ ID NO: 31489 - DNA, 75 bp, synthetic construct
  source 1..75: mol_type = other DNA
tagcctctcataccgcaacaaaccggcccttaccagaagcgattatggcaaactaccaactggatgaacaattac

SEQ ID NO: 31490 - DNA, 75 bp, synthetic construct
  source 1..75: mol_type = other DNA
atgtttgtcacccgcgtttcccgcggtcgtaagattaaagaagttatctggggactgatcctcggcagcaccgtc

SEQ ID NO: 31491 - DNA, 75 bp, synthetic construct
  source 1..75: mol_type = other DNA
tggtgcgcagaatatgatgaatggggcaacctgctgaatgaagagaacccgcatcagctgcagcagcttatccgc

SEQ ID NO: 31492 - DNA, 75 bp, synthetic construct
  source 1..75: mol_type = other DNA
aatcaatttggcggttataccggaatgacaccggcagactttcgcgaatttgtttttacgattgccgataaagtt

SEQ ID NO: 31493 - DNA, 75 bp, synthetic construct
  source 1..75: mol_type = other DNA
cagaacgcgactggaagtggctggaaaaagcgcctgtcatcaagataccagcggtcagaaacaagcgagtcagat

SEQ ID NO: 31494 - DNA, 75 bp, synthetic construct
  source 1..75: mol_type = other DNA
aacaattacgcgagcagattgcgtcgggtatctggcaacccggcgatcgtttgccttcgttgcgtgaccaggtgg

SEQ ID NO: 31495 - DNA, 75 bp, synthetic construct
  source 1..75: mol_type = other DNA
ttaaaaccgtggtggaagagggttcctttttgcgagcttcgcaaaaattgtgctgtacacaatcgacggtgactt

SEQ ID NO: 31496 - DNA, 75 bp, synthetic construct
  source 1..75: mol_type = other DNA
gcagcacaccgacgaccagtccgaagaataattcctggttcaggatgcaggctggtcaccagagtgacgcggata

SEQ ID NO: 31497 - DNA, 75 bp, synthetic construct
  source 1..75: mol_type = other DNA
ccggaagcgtatctgcgccatattctgagcgtactgccggaatggctctccaaccgtgttgacgaccacctgcca

SEQ ID NO: 31498 - DNA, 75 bp, synthetic construct
  source 1..75: mol_type = other DNA
tttccctcgatctctccttggtcagccagcagtttctctcccttgaatttgcgcaggtgctggacaaaatggcct

SEQ ID NO: 31499 - DNA, 75 bp, synthetic construct
  source 1..75: mol_type = other DNA
agaggtggatggaatatgtatcagtatccgttgaatcccatacaagtgatagacccaatggggttagatgcgatt

SEQ ID NO: 31500 - DNA, 75 bp, synthetic construct
  source 1..75: mol_type = other DNA
gtctgttctgatgcgataaagctcttgtctggaaaggttgaaagcgggtacaaaactgttaagccagtatattcg

SEQ ID NO: 31501 - DNA, 75 bp, synthetic construct
  source 1..75: mol_type = other DNA
atatccgtaaggacagatgcagcaagtgcatgcgcgggtgtgagatgcgcggcatggtggctaattttggcggtt

SEQ ID NO: 31502 - DNA, 75 bp, synthetic construct
  source 1..75: mol_type = other DNA
tgatggttctggatgacgaagaactcgacgcattagctgatggtggaaccgtcgccggtgcaacgcttgatgata

SEQ ID NO: 31503 - DNA, 75 bp, synthetic construct
  source 1..75: mol_type = other DNA
ggccgcagggtggcaaaacgggtgtggcgacgtgaacgggacctgacgggctggatgtcgctgtcacggaaaccg

SEQ ID NO: 31504 - DNA, 75 bp, synthetic construct
  source 1..75: mol_type = other DNA
gcagaaacaccacgcggtcattctggtgtcgcctgccgtggtacagggggcaccggatatcacccgggaaatcca

SEQ ID NO: 31505 - DNA, 75 bp, synthetic construct
  source 1..75: mol_type = other DNA
aatccgccccggcgatattttccgggataactacggcggcacggtaacgattaaaagcgtggcgggacggtgcgt

SEQ ID NO: 31506 - DNA, 75 bp, synthetic construct
  source 1..75: mol_type = other DNA
gtatgccagaggactgacctgcgaagccgacaccctcggctcctgtggttacgtttatatggctgtttatccgac

SEQ ID NO: 31507 - DNA, 75 bp, synthetic construct
  source 1..75: mol_type = other DNA
accccgtatgcggcacgaaagcgccagccggtgaggagcaagaaaggtcggattaaacgtgaaatgttcgccaaa

SEQ ID NO: 31508 - DNA, 75 bp, synthetic construct
  source 1..75: mol_type = other DNA
tgcgtcacgaaatgtcacgacatgtcacggcgtgtcactacgtggtcacattgatgtcacgacggaagatttagc

SEQ ID NO: 31509 - DNA, 75 bp, synthetic construct
  source 1..75: mol_type = other DNA
gctggcaatgccgcaatacattctggatatgctcgatgaaaaagggatcgcctggagtctgcacagctctattga

SEQ ID NO: 31510 - DNA, 75 bp, synthetic construct
  source 1..75: mol_type = other DNA
attaccgaagtggcgaaaaataacgcgctgactgatgatgatttttctgcgggaaagtcttcgacggcgagctga

SEQ ID NO: 31511 - DNA, 75 bp, synthetic construct
  source 1..75: mol_type = other DNA
aaaaacggctggtgtcagaccatgacggaagatggtcaggcgctggtaatgctgaaaaatggcacgattggtatt

SEQ ID NO: 31512 - DNA, 75 bp, synthetic construct
  source 1..75: mol_type = other DNA
cggcaacctgcaggtaagcgtggaagatctcgtcagaaccggcgcgtttctggtggcgatgtccctgtggcataa

SEQ ID NO: 31513 - DNA, 75 bp, synthetic construct
  source 1..75: mol_type = other DNA
gtttatctgcaaaggtaaccgcggaggggatcagtgcgcctgattatcagacgatactcagcaccctgattagct

SEQ ID NO: 31514 - DNA, 75 bp, synthetic construct
  source 1..75: mol_type = other DNA
atctcaatctgctgctctgtctgcaactgctgatgcaggagcgcagcgtgaccaaagcggcgaagcggatgaacg

SEQ ID NO: 31515 - DNA, 75 bp, synthetic construct
  source 1..75: mol_type = other DNA
gcgcgtcctttgctcggctttaccggtaaggatgtgcagatgattgaagagattatcctggctcacctcgatcgt

SEQ ID NO: 31516 - DNA, 75 bp, synthetic construct
  source 1..75: mol_type = other DNA
ccgtaccgatgagaagcacacccgggaatatatcacccatctggtacagtcagcttactacgatactgagcggga

SEQ ID NO: 31517 - DNA, 75 bp, synthetic construct
  source 1..75: mol_type = other DNA
tattgttcagttacaggctgatccccgcctgtttgaactgtaccagtttgacagaaaagtccttctccagcttaa

SEQ ID NO: 31518 - DNA, 75 bp, synthetic construct
  source 1..75: mol_type = other DNA
cactcacgtgggtggactggtataacaatcgacgattgctggaaaggctgggccatactcctccggcagaagcag

SEQ ID NO: 31519 - DNA, 75 bp, synthetic construct
  source 1..75: mol_type = other DNA
acgttatcagaaggagatacgctggttgtctggaagctggataggcttggcagaagtatgaaacaccttatcacg

SEQ ID NO: 31520 - DNA, 75 bp, synthetic construct
  source 1..75: mol_type = other DNA
agtatgtatcgctggcctacacacagcggcttaaggaagccggattactggcatcaacaggaagtacaggcgact

SEQ ID NO: 31521 - DNA, 75 bp, synthetic construct
  source 1..75: mol_type = other DNA
cgctgacggatgttacaaaaaatgcagcgtatggcgttgagatagaaagtctggtgctggagataaatgcaccgg

SEQ ID NO: 31522 - DNA, 75 bp, synthetic construct
  source 1..75: mol_type = other DNA
acgtactcacagcaacctccgctgtttacggccatgctgaaacagtttcgtgcggacattaccgagtttaacacg

SEQ ID NO: 31523 - DNA, 75 bp, synthetic construct
  source 1..75: mol_type = other DNA
tgcaagtgcggcggcttcttctgccactgcatcagccaacagtcaaaaagctgcaaaaaccagtgaaaccaacgc

SEQ ID NO: 31524 - DNA, 75 bp, synthetic construct
  source 1..75: mol_type = other DNA
atggatgttgagcatggccagtacagcgtcaccctgctggttgaaggttttccgccttcacatgccggaaccatt

SEQ ID NO: 31525 - DNA, 75 bp, synthetic construct
  source 1..75: mol_type = other DNA
tggaactcacagaaatatccacggattcttttaattttacttatgggagatttactgtaaaagatactcttattg

SEQ ID NO: 31526 - DNA, 75 bp, synthetic construct
  source 1..75: mol_type = other DNA
ttgcgacggaggcaatccactggcctgaaagtgtggatgaacacaaaaaggccaacgcctttgccggcagtgccc

SEQ ID NO: 31527 - DNA, 75 bp, synthetic construct
  source 1..75: mol_type = other DNA
atggtggtgttctgaacggtgttccttctgcatatcactggtatacagaacggtatggcgtgaagtggccttgtg

SEQ ID NO: 31528 - DNA, 75 bp, synthetic construct
  source 1..75: mol_type = other DNA
tccggagcagaaactgctggcaccacgcccgctgtttaccgctgcccgggaagtgaaaacggttgttccggtcag

SEQ ID NO: 31529 - DNA, 75 bp, synthetic construct
  source 1..75: mol_type = other DNA
cgacagatgacgatgagctgccggaagtcaccggacctgcgtggatagtcgacaaggtggcgcattacgggggat

SEQ ID NO: 31530 - DNA, 75 bp, synthetic construct
  source 1..75: mol_type = other DNA
gggagacaacttcattcaggttgatttcgacacgccgtggtgtcagccggaaagcgacgttattgcagaattaag

SEQ ID NO: 31531 - DNA, 75 bp, synthetic construct
  source 1..75: mol_type = other DNA
gattgctgagattaaacgactggccagcggtgcagtcacaccgctttatcgccgcgccacaaatgaaggtattca

SEQ ID NO: 31532 - DNA, 75 bp, synthetic construct
  source 1..75: mol_type = other DNA
acccgctattgttggtgctgtttcagctgcggtaagtgctgctacggccgccgctcctagggcaggtgtatcaaa

SEQ ID NO: 31533 - DNA, 75 bp, synthetic construct
  source 1..75: mol_type = other DNA
ctgccccggactgggccatgaaacaggattttcgctgcggatgctggctcatggagaaacctgaaacggcaatga

SEQ ID NO: 31534 - DNA, 75 bp, synthetic construct
  source 1..75: mol_type = other DNA
cgttccgggatgctgagtctgatggatgcgcatgcccgggacacatggtaccggtcactggaatacgataacttt

SEQ ID NO: 31535 - DNA, 75 bp, synthetic construct
  source 1..75: mol_type = other DNA
gacctggaaagaatgctacatctgttcagcggcaaaccgatccccgacaaccgggaaaacatcactattcgtctg

SEQ ID NO: 31536 - DNA, 75 bp, synthetic construct
  source 1..75: mol_type = other DNA
aggcgctgccgttcggcgggcagcttgacccgtataaacatatcgacgacaccacacttccggcctatatgccga

SEQ ID NO: 31537 - DNA, 75 bp, synthetic construct
  source 1..75: mol_type = other DNA
tggtttatgtcgcccgcgcggcacgtgacgcggggcatggtaaacgcggtgcaatatacgacgctgcctgtgctg

SEQ ID NO: 31538 - DNA, 75 bp, synthetic construct
  source 1..75: mol_type = other DNA
cgcattgttacccgaaaccgagaaagcaaagatcgaaagttacattgaatttgtcatcaaccagaacgaaaaaag

SEQ ID NO: 31539 - DNA, 75 bp, synthetic construct
  source 1..75: mol_type = other DNA
atggctaatttatcccctgtatctgttgtgcacgaaaaagtgcagatcgttatgacaattgaaaatggccaagtc

SEQ ID NO: 31540 - DNA, 75 bp, synthetic construct
  source 1..75: mol_type = other DNA
gctggcatggttattaagtgcggtgttctggtgtgcgctgggggcattgtgtttcttatttatcagtagtttgtt

SEQ ID NO: 31541 - DNA, 75 bp, synthetic construct
  source 1..75: mol_type = other DNA
cggtgaatgcgctgcgaattttcaatgatgccttcggtcttattttccgtcgttcagaagattttcttcatttca

SEQ ID NO: 31542 - DNA, 75 bp, synthetic construct
  source 1..75: mol_type = other DNA
ttgttctgtcggctctgtccctgagttctacagcggctctggctgaaactacacccacgacggtaaatggtggga

SEQ ID NO: 31543 - DNA, 75 bp, synthetic construct
  source 1..75: mol_type = other DNA
cactggtattaaacagggcggcgacggtgtccttttattctattcaaatggacaactggcatttgggcttcaacc

SEQ ID NO: 31544 - DNA, 75 bp, synthetic construct
  source 1..75: mol_type = other DNA
agcagtacggggtcggaccggtatgcagcgaactgcatattgccccgtcaacgtattaccactgtcagcaacagc

SEQ ID NO: 31545 - DNA, 75 bp, synthetic construct
  source 1..75: mol_type = other DNA
atgccgattatcgacctgaaccagctacccgcaccggatgtggtcgaggagctggactttgaaaccattctcgcc

SEQ ID NO: 31546 - DNA, 75 bp, synthetic construct
  source 1..75: mol_type = other DNA
gtggccgaccgtgtgaccgtgcagtctgccgtcatcgttgaataccagataaatgccacgctttacctttaccct

SEQ ID NO: 31547 - DNA, 75 bp, synthetic construct
  source 1..75: mol_type = other DNA
atgaatacaatcaagttttcttgcccagaatgtggtggcgaagtctttgacacatcctttaaaccgcagggctct

SEQ ID NO: 31548 - DNA, 75 bp, synthetic construct
  source 1..75: mol_type = other DNA
cggacaaaacggacagtatcgttacatgggaaataatggccccatgcaactggaagtcccccgtgatcagtatgc

SEQ ID NO: 31549 - DNA, 75 bp, synthetic construct
  source 1..75: mol_type = other DNA
tcctgaaacggctgccgcgggggggattattgaatcagaactggttgctattcctgctatgcaaaaacggctgga

SEQ ID NO: 31550 - DNA, 75 bp, synthetic construct
  source 1..75: mol_type = other DNA
acactatcggcaggtgacacactggttgtctggaagctggacaggttggggcgcagtatgcggcatcttgttacg

SEQ ID NO: 31551 - DNA, 75 bp, synthetic construct
  source 1..75: mol_type = other DNA
ctggccgtgtttgcagaacgccgtaaggacagttttggtccgtatgtccggctgatgagcgtcactctgaactga

SEQ ID NO: 31552 - DNA, 75 bp, synthetic construct
  source 1..75: mol_type = other DNA
atgacaaccgttttgcataattccaccacaccttctgtttccgtaaccgctgtatcagagaataacccgcctcaa

SEQ ID NO: 31553 - DNA, 75 bp, synthetic construct
  source 1..75: mol_type = other DNA
atgcaatgacggttcattattaccgtctgcgggattacgccctgcaacatccggaatacgacgccattatgcgca

SEQ ID NO: 31554 - DNA, 75 bp, synthetic construct
  source 1..75: mol_type = other DNA
atgaaaactgtttctcagaacacctgtacactttctgcttccgtagtcacagcttcagagaatgaccagcctcaa

SEQ ID NO: 31555 - DNA, 75 bp, synthetic construct
  source 1..75: mol_type = other DNA
gcccgccagggcgtcgaactgagccgggccttactctccaactgggttgatgcgtgttgccagttaatgacgccg

SEQ ID NO: 31556 - DNA, 75 bp, synthetic construct
  source 1..75: mol_type = other DNA
aagcgttcagctatgtactgaatcagtgggatgccctctgttattacagtgatgacggtctggcggaggcggata

SEQ ID NO: 31557 - DNA, 75 bp, synthetic construct
  source 1..75: mol_type = other DNA
gtctggttctgggctttctgacttatctgacgaatctgtacttcaaaatcagagaagacagaagaaaggctgcga

SEQ ID NO: 31558 - DNA, 75 bp, synthetic construct
  source 1..75: mol_type = other DNA
gtcgccgctgggtaaatgagaaatacacacgctgggtaaagacacagccgtgtgcgtgttgtggtaagccagcgg

SEQ ID NO: 31559 - DNA, 75 bp, synthetic construct
  source 1..75: mol_type = other DNA
gctgtttggcctgctgacgtatctgacaaacctttatttcaagattaaagaagataagcgtaaggctgcgagagg

SEQ ID NO: 31560 - DNA, 75 bp, synthetic construct
  source 1..75: mol_type = other DNA
gggtagcctggtgtttggcttgctgacgtatctgacaaacctttatttcaagattaaagaagataagcgtaaggc

SEQ ID NO: 31561 - DNA, 75 bp, synthetic construct
  source 1..75: mol_type = other DNA
ggtatttggcttgctgacgtacctgacaaacctttatttcaagattaaagaagacaagcgtaaggttgcacgggg

SEQ ID NO: 31562 - DNA, 75 bp, synthetic construct
  source 1..75: mol_type = other DNA
ttgttcgcggcgtcgccattctggggatcctgctattaaacatcagcgcctttgggctaccaaaggcggcttatc

SEQ ID NO: 31563 - DNA, 75 bp, synthetic construct
  source 1..75: mol_type = other DNA
tgatgcactgaacacgctgaacgagctggctgcggcgctgggcaacgacccgaattttgcgaccaccatgactaa

SEQ ID NO: 31564 - DNA, 75 bp, synthetic construct
  source 1..75: mol_type = other DNA
atgaatgctgccctgactgaacgactggtttatgtcgcccgcgcggcacgtgacgcggggcatggtaaacgcggt

SEQ ID NO: 31565 - DNA, 75 bp, synthetic construct
  source 1..75: mol_type = other DNA
cagactatttcatcgggaggtacatctttactgatgattgatagtggcacaggcgataatttatttgcagtcgat

SEQ ID NO: 31566 - DNA, 75 bp, synthetic construct
  source 1..75: mol_type = other DNA
aacagtgcttaccagttcggttatgatatggatgctattgttggcggagctcataatggggccgccgatgcaatg

SEQ ID NO: 31567 - DNA, 75 bp, synthetic construct
  source 1..75: mol_type = other DNA
ataacagcggtgtgatgtcgggaaatgtcaccactgcaggtgatgtgaacgttatgcctggggggacactgcgtg

SEQ ID NO: 31568 - DNA, 75 bp, synthetic construct
  source 1..75: mol_type = other DNA
cgttatcagcaagcgttacactcagcgcattgagcgacataatctgagacaacatctggcaaggctgggacggaa

SEQ ID NO: 31569 - DNA, 75 bp, synthetic construct
  source 1..75: mol_type = other DNA
aagattccgaccatacccggaaagacggaacgcgcattgaaacggaaggcgacggaaatgtgcaaacgcgacttg

SEQ ID NO: 31570 - DNA, 75 bp, synthetic construct
  source 1..75: mol_type = other DNA
atggctggccgctgtatgaatcacgcctgaagggaaagctgcacgttatcagcaagcgttacactcagcgcattg

SEQ ID NO: 31571 - DNA, 75 bp, synthetic construct
  source 1..75: mol_type = other DNA
tcccacgatattttcacgctaccgctgtgtcgggagcatcacaacgagcttcatgcggatccgctggcgttcgaa

SEQ ID NO: 31572 - DNA, 75 bp, synthetic construct
  source 1..75: mol_type = other DNA
cgattgaaggtccggtgaaggggctgcagagtattctggtgaacaaaaccccactgacggacacggacggcaatc

SEQ ID NO: 31573 - DNA, 75 bp, synthetic construct
  source 1..75: mol_type = other DNA
ttttccagaaaggcaatcagggggcaggcaatatcaccgactgtacggtgattgtgaccaaaaaagctgcttccg

SEQ ID NO: 31574 - DNA, 75 bp, synthetic construct
  source 1..75: mol_type = other DNA
ggacgcctttatatcgcgggtattggtgccggtattgagaatacccctgacggtatgcagagtcaggtgctgctg

SEQ ID NO: 31575 - DNA, 75 bp, synthetic construct
  source 1..75: mol_type = other DNA
ctgcgggctatctggaacttttccgggaaaagataggaaaactgcatctggcagaggcgctgtgggcagagattg

SEQ ID NO: 31576 - DNA, 75 bp, synthetic construct
  source 1..75: mol_type = other DNA
accggggctgaaaaaactgctcaggacactatcggcaggtgacacactggttgtctggaagctggacaggttggg

SEQ ID NO: 31577 - DNA, 75 bp, synthetic construct
  source 1..75: mol_type = other DNA
acactatcggcaggagacacgctggtagtctggaagctggacaggctggggcgtagtatgcggcatctggtcatt

SEQ ID NO: 31578 - DNA, 75 bp, synthetic construct
  source 1..75: mol_type = other DNA
acgctatcagaaggagatacgctggttgtctggaagctggacagactgggcagaagtatgaaacacctgatcacg

SEQ ID NO: 31579 - DNA, 75 bp, synthetic construct
  source 1..75: mol_type = other DNA
ttataaagggttgatcaataaaacgcatctcggcaaggaactgctggaaaactttgagctgacggaagataacgc

SEQ ID NO: 31580 - DNA, 75 bp, synthetic construct
  source 1..75: mol_type = other DNA
ccggatacaggtcagcaccctgccggatggtgtggagacatacggggtgtggggactctccctgccgtcactgcg

SEQ ID NO: 31581 - DNA, 75 bp, synthetic construct
  source 1..75: mol_type = other DNA
caaaaacggtgtattaatcgcatccagagaaactaaaggggccattcccggtagctacagtgcggttattgatat

SEQ ID NO: 31582 - DNA, 75 bp, synthetic construct
  source 1..75: mol_type = other DNA
gggaatacaccctgacagtcagggcaattaacagttatggccagcagggcgaaccggccaccaccacgttcagga

SEQ ID NO: 31583 - DNA, 75 bp, synthetic construct
  source 1..75: mol_type = other DNA
ggtatcccacagcaagtatcagcgatctgctggttgtggtgatgaaaaaatccacagcaggtatcagtatcagct

SEQ ID NO: 31584 - DNA, 75 bp, synthetic construct
  source 1..75: mol_type = other DNA
gcatgcgaataccgtggcatttgaagagaagtatggctcccagctggagctgatatttcgttttatcgatcgtgc

SEQ ID NO: 31585 - DNA, 75 bp, synthetic construct
  source 1..75: mol_type = other DNA
acaggggctgcgtcacacacccggtgacattattgaaatctgtgataacgactatgccgggaccatgaccggcgg

SEQ ID NO: 31586 - DNA, 75 bp, synthetic construct
  source 1..75: mol_type = other DNA
gtcagcgggcagcccagcaatgatggtgaagggtatctggaatttttccgggaaaaaataggaaaactgcatctg

SEQ ID NO: 31587 - DNA, 75 bp, synthetic construct
  source 1..75: mol_type = other DNA
agggaccattaccgtcagggtttatgacgatcagccgtttgaccggcagattgttattccggcggtggcattcag

SEQ ID NO: 31588 - DNA, 75 bp, synthetic construct
  source 1..75: mol_type = other DNA
ggcggctgacggcgaaaaatgccgatatcagcggtaacgtgaatgcgaactccgggacgctcaacaacgtcacga

SEQ ID NO: 31589 - DNA, 75 bp, synthetic construct
  source 1..75: mol_type = other DNA
ccgggaaaacatcactattcgtctggatggtcacatccagtccgttcagggtaaagagcgctatgaagacgaaat

SEQ ID NO: 31590 - DNA, 75 bp, synthetic construct
  source 1..75: mol_type = other DNA
cccgcaaaagcggccaacgcgtggcttttctggccgggctggcacttctgaaaatgaatccggcagaggcttacc

SEQ ID NO: 31591 - DNA, 75 bp, synthetic construct
  source 1..75: mol_type = other DNA
ccgttcgccgcattgcggctttgtcactggtttcgctatggctggcaggctgttctgacacttcaaatccaccgg

SEQ ID NO: 31592 - DNA, 75 bp, synthetic construct
  source 1..75: mol_type = other DNA
cgcggtggttttcagtgctaacaaacgtcagtgggggaatcaggaggatttggcgtgtgcgcaatggatctgggc

SEQ ID NO: 31593 - DNA, 75 bp, synthetic construct
  source 1..75: mol_type = other DNA
ttgctgatgccgtctctaaaggcaatgctgatttcgctatcgccacagaagcgctgcatctgtatgaagatttag

SEQ ID NO: 31594 - DNA, 75 bp, synthetic construct
  source 1..75: mol_type = other DNA
cagcgaggagattaaccgccagaatcgccagttgcgggtggaaaaaatcctgaatcgttcgggcatccagcctct

SEQ ID NO: 31595 - DNA, 75 bp, synthetic construct
  source 1..75: mol_type = other DNA
cgggatacgcgtaacgaacaggtcacactgaaccagatagtcgatcgcagaacggcctcgatgcacagcgtcggg

SEQ ID NO: 31596 - DNA, 75 bp, synthetic construct
  source 1..75: mol_type = other DNA
gccatgctctgagccaggcgaaatccattgccgatgaattgatgaccggatgtacaaacttcgtgttcagcggta

SEQ ID NO: 31597 - DNA, 75 bp, synthetic construct
  source 1..75: mol_type = other DNA
cgtcagttgcgggtggaaaaaatcctgaatcgctctggcatccagccgttgcaccgcaaatgctcgtttgcgaat

SEQ ID NO: 31598 - DNA, 75 bp, synthetic construct
  source 1..75: mol_type = other DNA
atggcgaaggggagaagcgtgattatcgtcaccgtgtccgatgtcatgagcgtgttgcatgacggctacgacaac

SEQ ID NO: 31599 - DNA, 75 bp, synthetic construct
  source 1..75: mol_type = other DNA
caggagcagttactggttccggggataccggaagcggtgacggaggaagaagcctttaatgccatgattcggttc

SEQ ID NO: 31600 - DNA, 75 bp, synthetic construct
  source 1..75: mol_type = other DNA
ggcaaacttattcctactgataccggatatgcgctaattgatgctctgccagatatagctgttaatcctgatatg

SEQ ID NO: 31601 - DNA, 75 bp, synthetic construct
  source 1..75: mol_type = other DNA
caacatcacttgcaggaaaaccagccacagttgaagcggcagcaacagatgataaaaaaacggctgcaccgttgc

SEQ ID NO: 31602 - DNA, 75 bp, synthetic construct
  source 1..75: mol_type = other DNA
tggaacgtatgatacagttcttgtccttgaggataagaaaacagggaagctgggttttccggcaagggctaagaa

SEQ ID NO: 31603 - DNA, 75 bp, synthetic construct
  source 1..75: mol_type = other DNA
cccgcgtgctgacctcgaagtatgcagagcacaccccgctgtatcgccagtcagaaatatacggccggcaaggtg

SEQ ID NO: 31604 - DNA, 75 bp, synthetic construct
  source 1..75: mol_type = other DNA
aataaccccatcaatgattgttaaaccagaagagtgtaaatatgaccctgcaaggggaagctttattataaaaga

SEQ ID NO: 31605 - DNA, 75 bp, synthetic construct
  source 1..75: mol_type = other DNA
tccgctgacagaccgtaaattacttgataaagcgtgggcagacggaacggcagcatcccttgcaggaaaaccggc

SEQ ID NO: 31606 - DNA, 75 bp, synthetic construct
  source 1..75: mol_type = other DNA
ctacgcatcttcaggatgtggcgcaccaggttgacgaactaacaaaagctggatgtgagcaaatctatcaggatc

SEQ ID NO: 31607 - DNA, 75 bp, synthetic construct
  source 1..75: mol_type = other DNA
caaaaactgaatacttcaacctgaccatgaaaggtcttgggtatctcagcaatgtacgtcaggttaaccatcaga

SEQ ID NO: 31608 - DNA, 75 bp, synthetic construct
  source 1..75: mol_type = other DNA
gatttatggcgtgacgcccgctgggccatcagccgggtacaggatgcgccgcactgcactgtggagcttatctga

SEQ ID NO: 31609 - DNA, 75 bp, synthetic construct
  source 1..75: mol_type = other DNA
ccgaccgctaatgtgcctgatataaacgcactaacacccgacgaacgcaatgtttacctggcgattgcacaacac

SEQ ID NO: 31610 - DNA, 75 bp, synthetic construct
  source 1..75: mol_type = other DNA
atacatgaacaaaaagttcaaaatgacggcacaaaaaacgctggatattacgcaacaattacgtgaaaaatataa

SEQ ID NO: 31611 - DNA, 75 bp, synthetic construct
  source 1..75: mol_type = other DNA
aagaacacgtatggtgggatggcagggctacttttcatggtgaggttgtcagacctgcctgtactctggcgatgg

SEQ ID NO: 31612 - DNA, 75 bp, synthetic construct
  source 1..75: mol_type = other DNA
gaaaataacgaagactgggcgctgtttgatcagaatagcagtatgcaggctgagtgtggtttaggtcatattccg

SEQ ID NO: 31613 - DNA, 75 bp, synthetic construct
  source 1..75: mol_type = other DNA
tgcggacctgcactatgaaggttcttgcgccattgaccaggattttcttgacgcagccggtattctcgaaaacga

SEQ ID NO: 31614 - DNA, 75 bp, synthetic construct
  source 1..75: mol_type = other DNA
cggcaccgaatatggctggccaacgttgcaaaaagcgtatcttagtgcggtggaagagacgtcgcacgcgtcggt

SEQ ID NO: 31615 - DNA, 75 bp, synthetic construct
  source 1..75: mol_type = other DNA
gccctgcatggtttcagcagcagtattgccagtgcctggaacacgctcagtcagtttggttctaaccgggggagc

SEQ ID NO: 31616 - DNA, 75 bp, synthetic construct
  source 1..75: mol_type = other DNA
ggcggcattccgtgaaagccactcccagccagaacgaaacaattttctggcgcgtcgtgagcggtgcttacggaa

SEQ ID NO: 31617 - DNA, 75 bp, synthetic construct
  source 1..75: mol_type = other DNA
acccgttccgggcgaaaatgccggctgtcagcgggtacggcgcaggggccgtttaccggacgccggcagggcgtg

SEQ ID NO: 31618 - DNA, 75 bp, synthetic construct
  source 1..75: mol_type = other DNA
cgaatgaaaaatcgctcacagtgggcaccgtgcactctcttcagggagcggaaagagcgattgtgatattctcgc

SEQ ID NO: 31619 - DNA, 75 bp, synthetic construct
  source 1..75: mol_type = other DNA
ccgagaccaaaatctacacacttcatggtgtggagcagcatgataacttcctgaatcagacgttcgaaaataccg

SEQ ID NO: 31620 - DNA, 75 bp, synthetic construct
  source 1..75: mol_type = other DNA
cgccagcgacctccattcccagagacctgcttgaacctttgccaaaaggagcattttcgattggtgagattgggc

SEQ ID NO: 31621 - DNA, 75 bp, synthetic construct
  source 1..75: mol_type = other DNA
gtttatcagccgtaacaacgccggtgaaacggtgctgctggggcgtaacggttccgactattccgcgacacaaat

SEQ ID NO: 31622 - DNA, 75 bp, synthetic construct
  source 1..75: mol_type = other DNA
ggtagcaccactaaccagttgattaactggttgaaactaagccagaccgatcgtctctctgcgcatcaggttcaa

SEQ ID NO: 31623 - DNA, 75 bp, synthetic construct
  source 1..75: mol_type = other DNA
ctggccaccacgtcatcgatggagaagcaacgtctggcgcatgtctctatcggtcatgtgacaatgcgaaacctg

SEQ ID NO: 31624 - DNA, 75 bp, synthetic construct
  source 1..75: mol_type = other DNA
ccgtaaaatcaacggcaaactgcagccgcgcatgggtaaccgtgccatgctgctgggtaaaatcttcgctaaccc

SEQ ID NO: 31625 - DNA, 75 bp, synthetic construct
  source 1..75: mol_type = other DNA
atcaacgagcttgctgttgccgacccgcttgttgtttcgctgtcgttcacacgtaacttcggcaaagaacccgcc

SEQ ID NO: 31626 - DNA, 75 bp, synthetic construct
  source 1..75: mol_type = other DNA
cagcctggcctctgtgggggctctacttcttatgccgtcactgcccgtgatggtgctgccgctgctggcctttgc

SEQ ID NO: 31627 - DNA, 75 bp, synthetic construct
  source 1..75: mol_type = other DNA
cgtgaccattgaccttgcttatgaaggttccggtagtggcgactggcgatcggatgcatttattgttggtatcgg

SEQ ID NO: 31628 - DNA, 75 bp, synthetic construct
  source 1..75: mol_type = other DNA
aacacgtcattccctatgaagtccttgaggctgaacgttccggtaagcaacgggccgaacaggaagccgcacttc

SEQ ID NO: 31629 - DNA, 75 bp, synthetic construct
  source 1..75: mol_type = other DNA
tgcggcagacaaattacgtgtaacggatatcacaaaagcggcgacgtatacggtgctgattgaaagtataacagt

SEQ ID NO: 31630 - DNA, 75 bp, synthetic construct
  source 1..75: mol_type = other DNA
gagagcttctgccgggatgtatggcgatgctcatgctgaatggggggttaaacctaaaattcttggtgttggtgg

SEQ ID NO: 31631 - DNA, 75 bp, synthetic construct
  source 1..75: mol_type = other DNA
gtaaaaggccttggcgcaggtttttccagcgtgtacagccacttcgcctcttcctctatcagtccgacggccagt

SEQ ID NO: 31632 - DNA, 75 bp, synthetic construct
  source 1..75: mol_type = other DNA
ttgatgaactggacgcaaaaacgggcggtatggagcccggagacctggtattcattgccgcccgtccttcgatgg

SEQ ID NO: 31633 - DNA, 75 bp, synthetic construct
  source 1..75: mol_type = other DNA
tagctgtcagcaaacaccgtcgaataataagacaactacggtggtggatgttaatcctttttctaatgggtgtca

SEQ ID NO: 31634 - DNA, 75 bp, synthetic construct
  source 1..75: mol_type = other DNA
ttgcccgttttgaagatgaagactgggcgcgtttctcacagggcgtgggacgaatgacggggcgtaatatctgga

SEQ ID NO: 31635 - DNA, 75 bp, synthetic construct
  source 1..75: mol_type = other DNA
cagaaagctaccttcgccatgtgcttggcgtcatagcagactggccggtcaaccgggtcagcgaactgcttccgt

SEQ ID NO: 31636 - DNA, 75 bp, synthetic construct
  source 1..75: mol_type = other DNA
caggaaatcagaaaaagggctgctgaatgcggcaagaccgtttccggttttttacgggcggcagctctcggtaag

SEQ ID NO: 31637 - DNA, 75 bp, synthetic construct
  source 1..75: mol_type = other DNA
atgaaaaaaagaaatttcagcgcagagtttaaacgcgaatccgctcaactggttgttgaccagaactacacggtg

SEQ ID NO: 31638 - DNA, 75 bp, synthetic construct
  source 1..75: mol_type = other DNA
gcatggttttgtgagatgtgctctatccggtgaaatgctggcggtaaatcctgaacagatagatgcattgataga

SEQ ID NO: 31639 - DNA, 75 bp, synthetic construct
  source 1..75: mol_type = other DNA
cgggctggttacacttgttattagcgtaaaatggcgggattttttgctgttcagctttgattatcaacaggcgca

SEQ ID NO: 31640 - DNA, 75 bp, synthetic construct
  source 1..75: mol_type = other DNA
ttctgaaccacgtcccaccgtgctggtgtttgactccggcgtcggtgggttgtcggtctatgacgagatccggca

SEQ ID NO: 31641 - DNA, 75 bp, synthetic construct
  source 1..75: mol_type = other DNA
aaatggagcaggataagctcattagccgggcaaagatggcgcatgagcagcagcgttttaatccggacatggtca

SEQ ID NO: 31642 - DNA, 75 bp, synthetic construct
  source 1..75: mol_type = other DNA
aaggccattaacccttatctggacccggcggaagttgcgccggtttctgcactttcaaacctgatcactctgtac

SEQ ID NO: 31643 - DNA, 75 bp, synthetic construct
  source 1..75: mol_type = other DNA
atgcgcaccgtgcatccggataaaatctaccgtgaaattatatggttctgctccagttacctgctgaaatccgga

SEQ ID NO: 31644 - DNA, 75 bp, synthetic construct
  source 1..75: mol_type = other DNA
aaatgagtcaggatcaggtaaaacgcctgtccaccctggtagctgcgcatatgagcatgtgccttgatgccgctt

SEQ ID NO: 31645 - DNA, 75 bp, synthetic construct
  source 1..75: mol_type = other DNA
gcaaatatcacctcatcagaaccgcttatgaaatcaacgaagagccgaccgcctatggcgatcacggcattcgta

SEQ ID NO: 31646 - DNA, 75 bp, synthetic construct
  source 1..75: mol_type = other DNA
gaatcacgtgatcctgtccagcacgaaatggagcaggataagctcattagccgggcaaagctggcgcatgagcag

SEQ ID NO: 31647 - DNA, 75 bp, synthetic construct
  source 1..75: mol_type = other DNA
tgtacgcgcgggttaagcgaagaagaggtgcagggcgagtatgaactgaacaccggcaaagtgattatcgaaacg

SEQ ID NO: 31648 - DNA, 75 bp, synthetic construct
  source 1..75: mol_type = other DNA
tggcgggcgaccatcaggcgtgattgaggtccccggcagtattacggaagaaaacgcgaaaaaactgaaggggaa

SEQ ID NO: 31649 - DNA, 75 bp, synthetic construct
  source 1..75: mol_type = other DNA
caataaacacaatatggcgctcgtgactattgaagacctggtggcataccgtcaggcacatgagcgtaaagccag

SEQ ID NO: 31650 - DNA, 75 bp, synthetic construct
  source 1..75: mol_type = other DNA
acgtatccctactaagctgggatataaaaaccccaagcatgttcaggttatagaggtcactaatcattttccggg

SEQ ID NO: 31651 - DNA, 75 bp, synthetic construct
  source 1..75: mol_type = other DNA
atgtgagtcagataacccgtcatatctgtgttgaaggatggagtgcaataggaaaatggggagggataccattcc

SEQ ID NO: 31652 - DNA, 75 bp, synthetic construct
  source 1..75: mol_type = other DNA
agtgatgcttgtgccagaggatatgtctgtcggatggttcagcaaggctctggagagtgttgacgaagttcgtat

SEQ ID NO: 31653 - DNA, 75 bp, synthetic construct
  source 1..75: mol_type = other DNA
tctgtcggatggttcagcaaggctctggagagtgttgacgaagttcgcattatcactgatggacggattaatttt

SEQ ID NO: 31654 - DNA, 75 bp, synthetic construct
  source 1..75: mol_type = other DNA
aaattcggtctggctccgctgggctgcggctgggttatctggcgtgacgaagaagcgctgccgcaggaactggtg

SEQ ID NO: 31655 - DNA, 75 bp, synthetic construct
  source 1..75: mol_type = other DNA
aaaaccggcctgctggagatcgcgaagatccacaaaggtgatttccgcattacggcgaaccagaatctgatcatc

SEQ ID NO: 31656 - DNA, 75 bp, synthetic construct
  source 1..75: mol_type = other DNA
aagcctccctgaaatatctcagcgatcacccgaaactgcagggtattgcccagcagaacagctttaaacacacct

SEQ ID NO: 31657 - DNA, 75 bp, synthetic construct
  source 1..75: mol_type = other DNA
aatgagcaacaggtacagtttttactggaaagtaatcccagacggaacagagcgaagtttacgcaggcctccttc

SEQ ID NO: 31658 - DNA, 75 bp, synthetic construct
  source 1..75: mol_type = other DNA
gttcgacaaccccaccacggatatccggaaggacagatgcagtaaatgcatgcgcgggtgtgagatgcgcggcat

SEQ ID NO: 31659 - DNA, 75 bp, synthetic construct
  source 1..75: mol_type = other DNA
ttttgtggcgggcaatccggaagcggacccggagcaggagctgagcgaccgctgggtggtggagcagatgtcaga

SEQ ID NO: 31660 - DNA, 75 bp, synthetic construct
  source 1..75: mol_type = other DNA
gggatgttggctttgatatatgtgctagtggaatgatggggttcctgctttttgtggctattacaaatggaatga

SEQ ID NO: 31661 - DNA, 75 bp, synthetic construct
  source 1..75: mol_type = other DNA
acctcaagccgagggataaactctacaaggtgaatgaccgggatggcctctatgtggctgtcactcctgccggct

SEQ ID NO: 31662 - DNA, 75 bp, synthetic construct
  source 1..75: mol_type = other DNA
cggcccatcgagcggggtatcgccggaccggggctgctggcccgcgtgctgacctcgaagtatgcagagcacacc

SEQ ID NO: 31663 - DNA, 75 bp, synthetic construct
  source 1..75: mol_type = other DNA
tcagaaatatacggccggcaaggtgtggagctgaggcgttcactgctgtcgggctgggtggatgcatgctgccgg

SEQ ID NO: 31664 - DNA, 75 bp, synthetic construct
  source 1..75: mol_type = other DNA
gctcatgcccgccgaaagatccacgatgtgcacgtccgcatcccgtcagcactgacggaagaagccctggagcag

SEQ ID NO: 31665 - DNA, 75 bp, synthetic construct
  source 1..75: mol_type = other DNA
gtccgtgaaaagcatgcctgccgtcggtgcgatcgcatcgttcaggccccggctccttcgcgccccatcgaacgg

SEQ ID NO: 31666 - DNA, 75 bp, synthetic construct
  source 1..75: mol_type = other DNA
caccccgtcagccctgacggaggaagcgctgaaacggatcggcgaactgtacgccatcgaggcagagataagggg

SEQ ID NO: 31667 - DNA, 75 bp, synthetic construct
  source 1..75: mol_type = other DNA
atgacggcggagcaacgccttgccgaacgtcagttgaaaacgaaaccgctgctgaaatccctggaaagctggctg

SEQ ID NO: 31668 - DNA, 75 bp, synthetic construct
  source 1..75: mol_type = other DNA
agcagtgggccgatatgattgattcctggattaacggggagcatacggatctgattccgttctccccgtcgaagt

SEQ ID NO: 31669 - DNA, 75 bp, synthetic construct
  source 1..75: mol_type = other DNA
catcaattagtaacatattacgcaacgaaaaaacatcatattctctaataaaaacagagcaaacaggaaaactgt

SEQ ID NO: 31670 - DNA, 75 bp, synthetic construct
  source 1..75: mol_type = other DNA
tacggatatcaccgaagtggcgaaaaataatgcgcttactgatgatgatttttctgcgggaaagtcttcgacggc

SEQ ID NO: 31671 - DNA, 75 bp, synthetic construct
  source 1..75: mol_type = other DNA
ttcttcagatgataaagacgtcattgcaattgatggaaaaacgctccggcactcttatgacaagagtcgccgcag

SEQ ID NO: 31672 - DNA, 75 bp, synthetic construct
  source 1..75: mol_type = other DNA
taaatattcctgcattcgatgccggagttttcatttgtgatcatcaaaacatactgaagtatcaccgaaacagac

SEQ ID NO: 31673 - DNA, 75 bp, synthetic construct
  source 1..75: mol_type = other DNA
agtgaaaagagtcacggcagagaagaaacccgtcttcatattgtttgcgatgtccctgatgagcttattgatttc

SEQ ID NO: 31674 - DNA, 75 bp, synthetic construct
  source 1..75: mol_type = other DNA
ttctgagctgtctgcgctgcagcgtattgagcatcttgccctcctgaaacggcgggcagaagaggctgaagccag

SEQ ID NO: 31675 - DNA, 75 bp, synthetic construct
  source 1..75: mol_type = other DNA
agatcagcgttcccctgccgggtgcggaaaccttttttgcctgtctgggcggacagcgggatcagactgtggtgc

SEQ ID NO: 31676 - DNA, 75 bp, synthetic construct
  source 1..75: mol_type = other DNA
aaaacccgctgctgcaggatgttaacaaaggctggttgcagaaaatccgtgaagatgcaccggatcacgtcatgg

SEQ ID NO: 31677 - DNA, 75 bp, synthetic construct
  source 1..75: mol_type = other DNA
atcacgtcggtgaatgggcatctctgcgcaatacgtcgccggaaatagccgaggccattttcgaagtcgccgggt

SEQ ID NO: 31678 - DNA, 75 bp, synthetic construct
  source 1..75: mol_type = other DNA
caaatctgcgagggcgcacaatagcacatccatatgcacatactttaggctctgtggatatcaaagatcccacaa

SEQ ID NO: 31679 - DNA, 75 bp, synthetic construct
  source 1..75: mol_type = other DNA
tctgacggatgcagagtataccggtgaagagctggatgcggatacctggcgggccacactgcatattgaagtttt

SEQ ID NO: 31680 - DNA, 75 bp, synthetic construct
  source 1..75: mol_type = other DNA
acgcggatacagcatggcgagccactggtcgagagccgctacctctacgacccgctgggacggcgaatggcgaaa

SEQ ID NO: 31681 - DNA, 75 bp, synthetic construct
  source 1..75: mol_type = other DNA
gcatcaggaattttattgataaagagcagttaacgaatagtgatattccgaagaaaagcacggtccaaaatgaag

SEQ ID NO: 31682 - DNA, 75 bp, synthetic construct
  source 1..75: mol_type = other DNA
ggaaggtttcaccactgacggcattgccacaaaaattcgtattgatgccggtgtggcaccacttgactggcgcgg

SEQ ID NO: 31683 - DNA, 75 bp, synthetic construct
  source 1..75: mol_type = other DNA
tgagcacatttgaacaactgcaccagaacaaagatgaagtgtttgagcgggggatgatcaacgtcttcaggggac

SEQ ID NO: 31684 - DNA, 75 bp, synthetic construct
  source 1..75: mol_type = other DNA
ggcgtaattaacgtcttcaaaggcttaagctgggattacaaaagtaatagcccatgtaagtttggaaagaagatc

SEQ ID NO: 31685 - DNA, 75 bp, synthetic construct
  source 1..75: mol_type = other DNA
cgcatcgtcaccggacgtaatgcggcgctggcacagattgaagcgctgatacagcagcttgacgatatttcgacg

SEQ ID NO: 31686 - DNA, 75 bp, synthetic construct
  source 1..75: mol_type = other DNA
atgcaaagacaaccagcaaccacactgcttgcactcctgataggctgtacggttatcccgtccacccacgcctat

SEQ ID NO: 31687 - DNA, 75 bp, synthetic construct
  source 1..75: mol_type = other DNA
cctcggattagcaccacaggtagctcgtcgcatgatgcaggccagcgtgaaatttctcggcaatggagatgaaca

SEQ ID NO: 31688 - DNA, 75 bp, synthetic construct
  source 1..75: mol_type = other DNA
gtgccttctggcgcagttaagcggctgcacgactacgcgaacggtctacgttccagttccggtggttccgttacc

SEQ ID NO: 31689 - DNA, 75 bp, synthetic construct
  source 1..75: mol_type = other DNA
ttctcagtcagttacgcccgcttttaattggttttcgtaaatcgaaaggattaactcaaagagaattatctgcca

SEQ ID NO: 31690 - DNA, 75 bp, synthetic construct
  source 1..75: mol_type = other DNA
ccggcgtcgtccgtcaacatggcagatgatcaaaatatctcagcgcagatccgcggcaaaataaagaattatgct

SEQ ID NO: 31691 - DNA, 75 bp, synthetic construct
  source 1..75: mol_type = other DNA
aaaacgcccgcgccggtggggagcctcggccccggctggaaaatgcctgcggatatccgcttacagctgcgcgat

SEQ ID NO: 31692 - DNA, 75 bp, synthetic construct
  source 1..75: mol_type = other DNA
ctttcctggctggcgtcccgaagaggatgccccgtaattgctcaggtaggaatgttgcgcccggaaaaagggcac

SEQ ID NO: 31693 - DNA, 75 bp, synthetic construct
  source 1..75: mol_type = other DNA
attttttgggaaaggtctttcaggtgaggatattcgcaaagtgcaggttacctggggaaaaacctaccgtataaa

SEQ ID NO: 31694 - DNA, 75 bp, synthetic construct
  source 1..75: mol_type = other DNA
ccgctgctcggtgcaaaggtccttcccggtgaaaccgacatcgccctgcccggcccgctgccgttcatcctctcc

SEQ ID NO: 31695 - DNA, 75 bp, synthetic construct
  source 1..75: mol_type = other DNA
gtgattattcccaccggtgccctgctcactccactgcttctggtctggaccggcggcgtgtggatcacccggctg

SEQ ID NO: 31696 - DNA, 75 bp, synthetic construct
  source 1..75: mol_type = other DNA
cgatatttgcatgggtgctggccattattctgatgatggcgggcgcactggcgatcctacaattgcccgtcgctc

SEQ ID NO: 31697 - DNA, 75 bp, synthetic construct
  source 1..75: mol_type = other DNA
tatttcaacgaaaaaaaagatcttctgcgacaagtcatcgagcgggtaccactatcattatttgatgagcttaca

SEQ ID NO: 31698 - DNA, 75 bp, synthetic construct
  source 1..75: mol_type = other DNA
cggccccggctggaaaatgcctgcggatatccgcctacagctgcgcgataacacactgatactcagtgataacgg

SEQ ID NO: 31699 - DNA, 75 bp, synthetic construct
  source 1..75: mol_type = other DNA
aaaatcatcacaactgatgcgatgggttgccagaaagatattgcagagaagatacaaaaacagggaggtgattat

SEQ ID NO: 31700 - DNA, 75 bp, synthetic construct
  source 1..75: mol_type = other DNA
ttttacaggcgcttgatgaccacggccagttactgaaaatcagcgaagaggtgaacgctgagccggatctggcag

SEQ ID NO: 31701 - DNA, 75 bp, synthetic construct
  source 1..75: mol_type = other DNA
cgatgagtgaactgttgcaaaagctgacccgtagctgttttgtcgaccgggatgcactggatgtggcgcgaacac

SEQ ID NO: 31702 - DNA, 75 bp, synthetic construct
  source 1..75: mol_type = other DNA
atcctgaaatcccgacagattggggcgacctggtattttgcacaggaagcactgctgatggcgctgcgtgacgat

SEQ ID NO: 31703 - DNA, 75 bp, synthetic construct
  source 1..75: mol_type = other DNA
ctgcgtgacgcttacgttgatcacctgttcggttatatcaatgtcaaaaacctcacgccgctcaagctggtgatc

SEQ ID NO: 31704 - DNA, 75 bp, synthetic construct
  source 1..75: mol_type = other DNA
ggcggctgaaagaatatcgccgcatcgccacgcgttacgacaaaacggcgagaaattacctggcgatggtgaaac

SEQ ID NO: 31705 - DNA, 75 bp, synthetic construct
  source 1..75: mol_type = other DNA
ggagaagaaaagccccgtaacagtttctggatacgtcgccttgcagccggtgatgtggttgaagtcgggagcacc

SEQ ID NO: 31706 - DNA, 75 bp, synthetic construct
  source 1..75: mol_type = other DNA
ccatgaaaccacacagtttgaaattgagtctgttatcgcccgctgccgttttcatcaggaacaggtgaagtccaa

SEQ ID NO: 31707 - DNA, 75 bp, synthetic construct
  source 1..75: mol_type = other DNA
gaggcattattgtcaattatggtacaactgtaaaatggggtataaacggggtttccggagatgaccttcataaag

SEQ ID NO: 31708 - DNA, 75 bp, synthetic construct
  source 1..75: mol_type = other DNA
ggcatcggaataccagcaataacaaggagtaaagaggttgcagagagttggttatcaaaaggctggtatgtccaa

SEQ ID NO: 31709 - DNA, 75 bp, synthetic construct
  source 1..75: mol_type = other DNA
gatgagaagaacgcgctcgcaaaattaaaagcagctattgatccagttggtgccgcaattgatactgtcggtcga

SEQ ID NO: 31710 - DNA, 75 bp, synthetic construct
  source 1..75: mol_type = other DNA
accggcccgtgtttaccgggtggtgaacggtattgcggtactgccggtgaccggcacgctggtgcaccggctggg

SEQ ID NO: 31711 - DNA, 75 bp, synthetic construct
  source 1..75: mol_type = other DNA
cgaccgtaaattatgacgggaaaaaattcacgtatccggtcgctgatgagtggccgggattctcaacagtaatgg

SEQ ID NO: 31712 - DNA, 75 bp, synthetic construct
  source 1..75: mol_type = other DNA
atccgttacctgaagcggcagaaaagttaggctgtgcaataaaagatctttatcattacgcatatataggtgctc

SEQ ID NO: 31713 - DNA, 75 bp, synthetic construct
  source 1..75: mol_type = other DNA
caaataacacctatctaaaatataatcccaaagctaaagggaatggagttacaattatcaggcaagggagtaatt

SEQ ID NO: 31714 - DNA, 75 bp, synthetic construct
  source 1..75: mol_type = other DNA
atgacagattcaataaatgccaatgttgtggtaagcatgccttcgcaactcttcactatggctcgttcttttaaa

SEQ ID NO: 31715 - DNA, 75 bp, synthetic construct
  source 1..75: mol_type = other DNA
atgaccacttttaccgacaaagaactgattaaagaaatcaaagagcgcataggcagcttggacgttcgagacaat

SEQ ID NO: 31716 - DNA, 75 bp, synthetic construct
  source 1..75: mol_type = other DNA
caggcatgctttaggtttgaacatgtgattaccggtgagcgatatgagatgaatgtttcctcagatgagttcaaa

SEQ ID NO: 31717 - DNA, 75 bp, synthetic construct
  source 1..75: mol_type = other DNA
ctgatcacagaggctgtcgggacgggatttacccgtgcattgtattctacatggctgacttatttaccagcagag

SEQ ID NO: 31718 - DNA, 75 bp, synthetic construct
  source 1..75: mol_type = other DNA
accgagggcaaagtccgtacactggcccagctttttgcacttgaataccaacaattgatgcaggagaacgactga

SEQ ID NO: 31719 - DNA, 75 bp, synthetic construct
  source 1..75: mol_type = other DNA
cgctggctgccgcactattcgccgctacgggtagttatgctgccgttgtagatggcggtacaattcactttgaag

SEQ ID NO: 31720 - DNA, 75 bp, synthetic construct
  source 1..75: mol_type = other DNA
aacttgagccgggcaatgaagtccggcttttttctgtcgatggtacagcgttcggtatgtcagatgtgctccgct

SEQ ID NO: 31721 - DNA, 75 bp, synthetic construct
  source 1..75: mol_type = other DNA
atgatcaagttatctgaaaaaggcgtgtttctcgccagtaataacgaaataattgccgaagaacatttcaccggc

SEQ ID NO: 31722 - DNA, 75 bp, synthetic construct
  source 1..75: mol_type = other DNA
gattatcgcacgtgaaatgggagaaatctttagctacatgcctggggaaatagacagttatatgaaatacataaa

SEQ ID NO: 31723 - DNA, 75 bp, synthetic construct
  source 1..75: mol_type = other DNA
atgtcagtttgactctgcaggttgagaacgacctgaaacatcagcttagtattggcgcattaaaacctggcgcac

SEQ ID NO: 31724 - DNA, 75 bp, synthetic construct
  source 1..75: mol_type = other DNA
atgattgtctgttacgttattcttgttaaccgtccgtttgagacagagattgccggaataaagctattttttcag

SEQ ID NO: 31725 - DNA, 75 bp, synthetic construct
  source 1..75: mol_type = other DNA
ttcaaagaatatctatctttgtgaaaatgattttgactctttgataattgatctcaaaagtgagagcacaatata

SEQ ID NO: 31726 - DNA, 75 bp, synthetic construct
  source 1..75: mol_type = other DNA
atggatgacatacgtgaaaatggtagaattctagggaattcacttcaaaaaatttcatcctgcgccgtaaaaggg

SEQ ID NO: 31727 - DNA, 75 bp, synthetic construct
  source 1..75: mol_type = other DNA
ttgacgtcatgttatctcagcatccggtgcgtgtccgtcttgttaatattgatgcacctgaaaagaaacaggaat

SEQ ID NO: 31728 - DNA, 75 bp, synthetic construct
  source 1..75: mol_type = other DNA
ttcgccacgccgatttatagtgccgacgcactggtacaaatcgagcaaaacagcggcaattcgttagtgcaggac

SEQ ID NO: 31729 - DNA, 75 bp, synthetic construct
  source 1..75: mol_type = other DNA
tactggcgttgccgggcattatctttttagttctctttcccatcattctttcgctatggattgccttcctttggg

SEQ ID NO: 31730 - DNA, 75 bp, synthetic construct
  source 1..75: mol_type = other DNA
gttatagataagtggttgctattattacctataaaaacaatcccactggagaaaaatgttgggcttggtaatgcg

SEQ ID NO: 31731 - DNA, 75 bp, synthetic construct
  source 1..75: mol_type = other DNA
ggtattgattaacgaaaatctcgttgatcaaccttttctcgataaatactgcgtcggctatgacgaaaaaacctt

SEQ ID NO: 31732 - DNA, 75 bp, synthetic construct
  source 1..75: mol_type = other DNA
tcccgctttgcgccgctgatcccatccgttggcagcgccatacacccgacgtggagcacggtatctggcctgacg

SEQ ID NO: 31733 - DNA, 75 bp, synthetic construct
  source 1..75: mol_type = other DNA
actcaatcgctggttccgtgatggaagggggcgtcgcgtccacgttatacgctgggagcctgaaacacagcgggt

SEQ ID NO: 31734 - DNA, 75 bp, synthetic construct
  source 1..75: mol_type = other DNA
catgtggattcatatgcgtgaccagaatgttattttgggacgcaatgcggtatccaccgatggtgcgcaggcatt

SEQ ID NO: 31735 - DNA, 75 bp, synthetic construct
  source 1..75: mol_type = other DNA
caatggttcaagaggttatccaacgtatgtcgcaatctacatcacagaagtcgagggccctcgcgcacgcctcgc

SEQ ID NO: 31736 - DNA, 75 bp, synthetic construct
  source 1..75: mol_type = other DNA
ttctaaacaggctattcatcgtgctgagaatctgccagcgggaatgcaacagagaattattattgatgtgcgtgg

SEQ ID NO: 31737 - DNA, 75 bp, synthetic construct
  source 1..75: mol_type = other DNA
gtaaagtagaagacgtcgataaggagtttgtgttaggtatattaatacattttcaaaatgttggtgctgaggata

SEQ ID NO: 31738 - DNA, 75 bp, synthetic construct
  source 1..75: mol_type = other DNA
gaattggttgtgtttcttaaggctggatatttgggtgaggtctcttatggttttcagaaaaataataactggatc

SEQ ID NO: 31739 - DNA, 75 bp, synthetic construct
  source 1..75: mol_type = other DNA
acagcatgcgttatgaactgggtgtagatgcaggttataccttcacctacagcgaagatcaggctctgactccgt

SEQ ID NO: 31740 - DNA, 75 bp, synthetic construct
  source 1..75: mol_type = other DNA
ttattgatgcggcactggaactgctgaatgagacagggattgacgggctgacgacccgcaagctggcgcagaagc

SEQ ID NO: 31741 - DNA, 75 bp, synthetic construct
  source 1..75: mol_type = other DNA
gagcagacagaatggcatcgcgtggtgctgttcggcaagctcgcggaagtggccggtgaatatctgcacaagggc

SEQ ID NO: 31742 - DNA, 75 bp, synthetic construct
  source 1..75: mol_type = other DNA
ttaccgtgacggggcaaaagtgcacctcggcacccgccctgatgaaaaacagtatgatacggtggaaacccagtt

SEQ ID NO: 31743 - DNA, 75 bp, synthetic construct
  source 1..75: mol_type = other DNA
tttgtgccgttatttctggtgcggaaggttgggaagatatagaggattttggggaaacacatctcgattttttga

SEQ ID NO: 31744 - DNA, 75 bp, synthetic construct
  source 1..75: mol_type = other DNA
gtgaaaggtgaacggggagagaagggcgaaaaaggcgagccgggagggccggatgcgacgacggcacagaaggga

SEQ ID NO: 31745 - DNA, 75 bp, synthetic construct
  source 1..75: mol_type = other DNA
gaccgagaagctcgcaaagcaccgttaattcaggtggcctgtaagctggctggcgcagttcattatgccgatgtg

SEQ ID NO: 31746 - DNA, 75 bp, synthetic construct
  source 1..75: mol_type = other DNA
tcgaccatcaccgcagatgaaatccgcaaaaacccggttgcccgcgatgtgtcggagatcatccgtaccatgcca

SEQ ID NO: 31747 - DNA, 75 bp, synthetic construct
  source 1..75: mol_type = other DNA
tcgagcaactgaaggccctgctgatcgcacagcaggcggttatcgtccgtctgtctggtgaaataaccggctatg

SEQ ID NO: 31748 - DNA, 75 bp, synthetic construct
  source 1..75: mol_type = other DNA
gaatgaagtgatactccttgcacctgacggtgccgagatacgctatgacgcagaaaaaggcgcgctgacggtgaa

SEQ ID NO: 31749 - DNA, 75 bp, synthetic construct
  source 1..75: mol_type = other DNA
ccaaaaaggcggatgtgctggccattgccagggcatggggtatcagtggtgaggccgagctggccgtcatgcagg

SEQ ID NO: 31750 - DNA, 75 bp, synthetic construct
  source 1..75: mol_type = other DNA
atgttagtcggtgcggcagttggagcggtggttattggtggtggtatagtaatatacaacaatcgcgaggctgtt

SEQ ID NO: 31751 - DNA, 75 bp, synthetic construct
  source 1..75: mol_type = other DNA
cacactgtattgcaggaagtgggtaaaaccaaatctgacttgtacgccacaggatgattcccagtatccagggat

SEQ ID NO: 31752 - DNA, 75 bp, synthetic construct
  source 1..75: mol_type = other DNA
gccagcggtatgcagcccgatacactcctgaacattcctgaattccctgccgataaccgcattcgtttacaacag

SEQ ID NO: 31753 - DNA, 75 bp, synthetic construct
  source 1..75: mol_type = other DNA
ttctctgcgctggatgagtgaacatctggagatccttaaatcgctaaatgcccttggtttggttgttaatgttga

SEQ ID NO: 31754 - DNA, 75 bp, synthetic construct
  source 1..75: mol_type = other DNA
cggaccggaactgcgggatcacggaggcggtgacggtgcctgcccgggaagtgatccacgaccggtttaactgtt

SEQ ID NO: 31755 - DNA, 75 bp, synthetic construct
  source 1..75: mol_type = other DNA
aaaaagggatttgatttcctgcttaacgataatacctacctgaaagttcgtgagggtgaacacgatgaccgataa

SEQ ID NO: 31756 - DNA, 75 bp, synthetic construct
  source 1..75: mol_type = other DNA
aggacattacccatacatttttattggaaggaacaatcgtagcaagccgatctcaaaagaaagtgtttcacaggt

SEQ ID NO: 31757 - DNA, 75 bp, synthetic construct
  source 1..75: mol_type = other DNA
aaaaaccccgtaaacagcattcgcctgaatttcgcagtgaagccctgaagcttgctgaacgcatcggtgttgctg

SEQ ID NO: 31758 - DNA, 75 bp, synthetic construct
  source 1..75: mol_type = other DNA
gccagcaggacaccagtaagtacgacagtaaacagaccagcgtggctgccggcggcagttttacctttggctcca

SEQ ID NO: 31759 - DNA, 75 bp, synthetic construct
  source 1..75: mol_type = other DNA
tcattggtaaacgtcctattagtgaaatcaaacccttagaacttcttgaagtgttgcgacgaatagagaagcgtg

SEQ ID NO: 31760 - DNA, 75 bp, synthetic construct
  source 1..75: mol_type = other DNA
atgtcatttggtagctacgaccttgtgagcctagctgaagcacgtgagaaacgcgatacagctcggaagcaggtt

SEQ ID NO: 31761 - DNA, 75 bp, synthetic construct
  source 1..75: mol_type = other DNA
agaaaatggacgctgggtattattgcagatgcatttaatgtatcagaaataaccatcagaaaaagactagaatct

SEQ ID NO: 31762 - DNA, 75 bp, synthetic construct
  source 1..75: mol_type = other DNA
cgttttccggaagatattgatggcgagggggatgctttctctcttgcctcaaaacgtaccaccacatttatgtcc

SEQ ID NO: 31763 - DNA, 75 bp, synthetic construct
  source 1..75: mol_type = other DNA
agtgacattcaaaaatgacggtgatagcaatacagtaataatcacagcgcccccaagatccggtggtgctattta

SEQ ID NO: 31764 - DNA, 75 bp, synthetic construct
  source 1..75: mol_type = other DNA
agcgcggagcaacgccagggtaaacagggcgaaaatgacacccgttttgccgtcgattttacctggcaacctggc

SEQ ID NO: 31765 - DNA, 75 bp, synthetic construct
  source 1..75: mol_type = other DNA
cgctggaatcggcccaaagcgttgccgaacgtttcggtatttcggtggctgagttacgcaaactcaaccagtttc

SEQ ID NO: 31766 - DNA, 75 bp, synthetic construct
  source 1..75: mol_type = other DNA
ttgacggggatgtgttattcagtcggcagtgctacgcgccaggggagcagttcgccgacccggtttatcggccag

SEQ ID NO: 31767 - DNA, 75 bp, synthetic construct
  source 1..75: mol_type = other DNA
gagcggctggctccctgccggttacttatccaccagcaggcctggtatctggtggcagagcacgacggacatatc

SEQ ID NO: 31768 - DNA, 75 bp, synthetic construct
  source 1..75: mol_type = other DNA
accggctggctgtcagactgtcactgataatcagccgtctggtggtgggggaaacgctgagtgtgcgtaagctgg

SEQ ID NO: 31769 - DNA, 75 bp, synthetic construct
  source 1..75: mol_type = other DNA
atgaaaagcgcaccgaacttaaaaaaacagccttacgacaagatgaccgaagtcattatttttgcgggtagtgat

SEQ ID NO: 31770 - DNA, 75 bp, synthetic construct
  source 1..75: mol_type = other DNA
gctaaccgcttcacttctaacatcaaaggtctgactcaggctgcacgtaacgccaatgacggtatttctctagca

SEQ ID NO: 31771 - DNA, 75 bp, synthetic construct
  source 1..75: mol_type = other DNA
caacgtacagaccccagctggcgcagcaacagctaactatgttgtctcttctggttctgacaactactcagtatc

SEQ ID NO: 31772 - DNA, 75 bp, synthetic construct
  source 1..75: mol_type = other DNA
ccacggcgcgcagctttgacggtcgaatgacagttacgttaaccggccagcataacgacaccggccagccacttt

SEQ ID NO: 31773 - DNA, 75 bp, synthetic construct
  source 1..75: mol_type = other DNA
tgtttataaagattacgacccgagaggcaaagacgatacaacaggaggagtttacccggatcaagatacaggtat

SEQ ID NO: 31774 - DNA, 75 bp, synthetic construct
  source 1..75: mol_type = other DNA
tttgcggtgatcccggcagacagaacatggcgaccacagccgttgctgaaaccgctggtcgacggcccgcagagc

SEQ ID NO: 31775 - DNA, 75 bp, synthetic construct
  source 1..75: mol_type = other DNA
gcagccgaactggaaaagcagcaactgattaatcaggccaacgattatatgaacagtaaacaatggcctggtaaa

SEQ ID NO: 31776 - DNA, 75 bp, synthetic construct
  source 1..75: mol_type = other DNA
tgggtttgccactgcatctgatatggggatatatcgccatcgcagtatttatgactggtgatggtttcgaactcg

SEQ ID NO: 31777 - DNA, 75 bp, synthetic construct
  source 1..75: mol_type = other DNA
taatatgtaaggataatagtggcagatatttctcaacagcacctaaccgaggagaaagaaaaggatcatatccat

SEQ ID NO: 31778 - DNA, 75 bp, synthetic construct
  source 1..75: mol_type = other DNA
gaggggcgtcagatgctgccggtggatctgcagagtgcgttgtgggaaatttcgcgggacactcagcgtaatgat

SEQ ID NO: 31779 - DNA, 75 bp, synthetic construct
  source 1..75: mol_type = other DNA
ggcggatcatgtgattgccgatgaagacgcgttccgtgccgccgtgcgtaatgccatgccgtatgccgaagcggg

SEQ ID NO: 31780 - DNA, 75 bp, synthetic construct
  source 1..75: mol_type = other DNA
atgaccacaccaaatccactggcaaaaacgaaaggtgcgggaacgacgttctggatgtataccggcaacggcgat

SEQ ID NO: 31781 - DNA, 75 bp, synthetic construct
  source 1..75: mol_type = other DNA
acattcacaaaacctgcgcatcatacctggcgaagttatgcgatgtttctgctggatgttatgccggaaaagacg

SEQ ID NO: 31782 - DNA, 75 bp, synthetic construct
  source 1..75: mol_type = other DNA
gagtccggccgctacggaagggcggaccgcagagcgtctggagcaaatccgggatacggtggaggatgcgctgca

SEQ ID NO: 31783 - DNA, 75 bp, synthetic construct
  source 1..75: mol_type = other DNA
ttgtactggcatgttcactgtttaccagctttacagcctctgcggttcccggattctggcagcagggctatggcc

SEQ ID NO: 31784 - DNA, 75 bp, synthetic construct
  source 1..75: mol_type = other DNA
tgggattacccttaaatctggtgtggggatatattgccattgccatctttatgaccggagacggttttgaactgg

SEQ ID NO: 31785 - DNA, 75 bp, synthetic construct
  source 1..75: mol_type = other DNA
gaccggcacgttagcgggcacgcatatgatcacggctcgtctggctaacagcaatgtcagcgatacacagccaat

SEQ ID NO: 31786 - DNA, 75 bp, synthetic construct
  source 1..75: mol_type = other DNA
aatgtccgggtggaagatcagtttggcaatgtgctgccggagcagaccgtcacctttacggtgacgaagggggcg

SEQ ID NO: 31787 - DNA, 75 bp, synthetic construct
  source 1..75: mol_type = other DNA
aagcggaaatcattgggaatggcgtggatgagacgacgctgacagcaacagtaaaagatccttttgataacgtgg

SEQ ID NO: 31788 - DNA, 75 bp, synthetic construct
  source 1..75: mol_type = other DNA
acgcagcgccgcagcctggcggatgcgcttcagcagtccggcggcgaagacggtggcagtgtggtgttcccgccg

SEQ ID NO: 31789 - DNA, 75 bp, synthetic construct
  source 1..75: mol_type = other DNA
cgaatacctattttgattctgtctcgctgatgtctatctccacgcgtgcaaataaactcgacggcgtcgagcagg

SEQ ID NO: 31790 - DNA, 75 bp, synthetic construct
  source 1..75: mol_type = other DNA
gttctggtccggtgcgctgttcaaccgtggacgcaacaaagccgacaaggtggacatcgacctgtcccacagcaa

SEQ ID NO: 31791 - DNA, 75 bp, synthetic construct
  source 1..75: mol_type = other DNA
cggattatctgccgggaggcgcacacgggttttcatgtatggatgaatgagcgtcaggtggacggcagggcggag

SEQ ID NO: 31792 - DNA, 75 bp, synthetic construct
  source 1..75: mol_type = other DNA
gccaaaaatcggcgatctgtcgggatttatcgtctgcgcgaaatcgccaagctgcggcatggaacgcgtgcggct

SEQ ID NO: 31793 - DNA, 75 bp, synthetic construct
  source 1..75: mol_type = other DNA
tcaccggcatgctgacgggagtgttatcagtgacaggtttgctgtcagcgggggcatatgccgccgggggagaag

SEQ ID NO: 31794 - DNA, 75 bp, synthetic construct
  source 1..75: mol_type = other DNA
gtgggtcaggaggtgattgtagacttcctcaacggcgatccggaccagccgatcattatggggcgcacctaccac

SEQ ID NO: 31795 - DNA, 75 bp, synthetic construct
  source 1..75: mol_type = other DNA
ggttcactaggtgaaaatgtagcggtaaaaaataatcaggcatatcctatgcttgttcaatcaatggtttttgat

SEQ ID NO: 31796 - DNA, 75 bp, synthetic construct
  source 1..75: mol_type = other DNA
attaagcccttacgactacacactgtattgcaggaagtgggtaaaaccaaatctgacttgtacgccacaggatga

SEQ ID NO: 31797 - DNA, 75 bp, synthetic construct
  source 1..75: mol_type = other DNA
atctcaactgattgaactacaacaacaaatcttcacacaacgccatgattataccaagagtcatatacgcactaa

SEQ ID NO: 31798 - DNA, 75 bp, synthetic construct
  source 1..75: mol_type = other DNA
atcgactcggattgatattaactcgcctgaacaatggtgagtcactagccgtccgggagttatctgaggaattta

SEQ ID NO: 31799 - DNA, 75 bp, synthetic construct
  source 1..75: mol_type = other DNA
cgatcattgatgggggagatcaatatatctccagtggaggtaatgctattgataccactattgaaaatggatacc

SEQ ID NO: 31800 - DNA, 75 bp, synthetic construct
  source 1..75: mol_type = other DNA
cacaggagtcttacaacgaccatggggtatgttgatgtctgtatggagtctgcagcgcagacactggaagatgcc

SEQ ID NO: 31801 - DNA, 75 bp, synthetic construct
  source 1..75: mol_type = other DNA
gccggtgcctttgccaccggacacctgatttcactggcggatgagtggagttccgtgaatgcccgtctgaaacag

SEQ ID NO: 31802 - DNA, 75 bp, synthetic construct
  source 1..75: mol_type = other DNA
gagcaacgccagggtaaacagggcgaaaatgacacccgttttgccgtcgattttacctggcaacctggcagcgca

SEQ ID NO: 31803 - DNA, 75 bp, synthetic construct
  source 1..75: mol_type = other DNA
tttttccgtttcagcgtttcactgcagatgaactacggcatttctttgtctggtgtgccgcacataaagtcagtg

SEQ ID NO: 31804 - DNA, 75 bp, synthetic construct
  source 1..75: mol_type = other DNA
tgcgggcggtgtatgaccgcagcggaacgcaggtgcgcgggtttacttatgatgcggagcacgccgggcggatgg

SEQ ID NO: 31805 - DNA, 75 bp, synthetic construct
  source 1..75: mol_type = other DNA
cggtactgacattggctgttctgtctttgacagcatgtacccttgttcctggtcagaatttatcgaccagtaaca

SEQ ID NO: 31806 - DNA, 75 bp, synthetic construct
  source 1..75: mol_type = other DNA
atggtcacagaataccgaggcaatatcggagatactcagagcagcatacgtggcgaagaaaatattgtaggaaga

SEQ ID NO: 31807 - DNA, 75 bp, synthetic construct
  source 1..75: mol_type = other DNA
caatgcggcacaccatccattgagatggttccgggtattgttaaatttctggagaaaaccaatgagcgaaaaaac

SEQ ID NO: 31808 - DNA, 75 bp, synthetic construct
  source 1..75: mol_type = other DNA
ataatattgaaactaaatggctttatgattttctgaccctggaaaaatgccgcaatttttcccaggcagcagtca

SEQ ID NO: 31809 - DNA, 75 bp, synthetic construct
  source 1..75: mol_type = other DNA
cgggaaggccggagatgcgctaccgctacgacgatacggggcgggtggtggagcaactgaacccggcagggttaa

SEQ ID NO: 31810 - DNA, 75 bp, synthetic construct
  source 1..75: mol_type = other DNA
gtgaagagctgttagaggagtttattgttccttctgttgtacctggggttgacgttatgcctgcgtcgattgacg

SEQ ID NO: 31811 - DNA, 75 bp, synthetic construct
  source 1..75: mol_type = other DNA
ccgacacggttgtgaataccggcgcggaagggggaccagatgcagaaaatggtgataccgggcagtttgttcgcg

SEQ ID NO: 31812 - DNA, 75 bp, synthetic construct
  source 1..75: mol_type = other DNA
caatacgttgtcgatgtactcgtaaacaatgaacgaaccaagcgtgcgaatcttgtcattacagaagaagatgaa

SEQ ID NO: 31813 - DNA, 75 bp, synthetic construct
  source 1..75: mol_type = other DNA
gaacggactggcggtgaacaccacactgaataacagaggcgagcagtgggtgcatgagggcggggttgccaccgg

SEQ ID NO: 31814 - DNA, 75 bp, synthetic construct
  source 1..75: mol_type = other DNA
gctggctgcaacgccgaaagcggttaaggcagcgtatgacatggctaacggaaaatataccgctcaggacgccac

SEQ ID NO: 31815 - DNA, 75 bp, synthetic construct
  source 1..75: mol_type = other DNA
gccctgataaataccctaatccaaccgatggtttacctgttgagtatcaggctaacgcacaagcagcggcgggag

SEQ ID NO: 31816 - DNA, 75 bp, synthetic construct
  source 1..75: mol_type = other DNA
gagctcttttacgccgcagagacgctcttgttgcagacagcaccagagaaaaaaacagacttgaaaaatctgttt

SEQ ID NO: 31817 - DNA, 75 bp, synthetic construct
  source 1..75: mol_type = other DNA
gtacgaacaagaatataagccagtagaagtggtgaaaacttcatctgtggttgacggtaaactcgttgaaacaga

SEQ ID NO: 31818 - DNA, 75 bp, synthetic construct
  source 1..75: mol_type = other DNA
gtggttggtggatacgtgaagtgggcctgtttgatgaatccggggcattaattgccgtgggcaactgcccggaaa

SEQ ID NO: 31819 - DNA, 75 bp, synthetic construct
  source 1..75: mol_type = other DNA
gcaaaatggctgaattgttgaatgaggtgcacccggaatggtgttttagtacatgcgaaaagcgaattgctaatt

SEQ ID NO: 31820 - DNA, 75 bp, synthetic construct
  source 1..75: mol_type = other DNA
ggaccttaagaaaattgagataggaagtaatgcattcagtcggtatcaatccgtggtgagaaacatgcttcctcg

SEQ ID NO: 31821 - DNA, 75 bp, synthetic construct
  source 1..75: mol_type = other DNA
tattgatttcacgtttgaatggaaagggctgaagaaattatgcgtggcagtctcctttcggtccataatagcaga

SEQ ID NO: 31822 - DNA, 75 bp, synthetic construct
  source 1..75: mol_type = other DNA
ggtcatacagcgaaagaaaaccgcctgtcacaaagtaaattcagatgccaggtatgtggatatacagcgaacgcc

SEQ ID NO: 31823 - DNA, 75 bp, synthetic construct
  source 1..75: mol_type = other DNA
agtgaaagcatcgagcgtttaccgaccgggaatggcaatatcagcgatctgctgagaaccaaccctgcggtacgc

SEQ ID NO: 31824 - DNA, 75 bp, synthetic construct
  source 1..75: mol_type = other DNA
ccggaacgatcttcactatgttaagggatactggcggcataaaaccccatgagcgtaagcgggctgtagctcagc

SEQ ID NO: 31825 - DNA, 75 bp, synthetic construct
  source 1..75: mol_type = other DNA
gctggcggcgttggcgcattgtccgactggctattacgtcatgttacatcctgccagtggcctaatggcgattac

SEQ ID NO: 31826 - DNA, 75 bp, synthetic construct
  source 1..75: mol_type = other DNA
ggaacagacgcaaaaccacaggcacacagggtaatcagccaccagcgggaggcgatgacccttacggtgacggta

SEQ ID NO: 31827 - DNA, 75 bp, synthetic construct
  source 1..75: mol_type = other DNA
acaaaacggggcgttacgccaacagacgccggaaaaattctctatacccatgcgcgggccattttacgtcagtgt

SEQ ID NO: 31828 - DNA, 75 bp, synthetic construct
  source 1..75: mol_type = other DNA
acccatataatgcagtgtcagtccattctgcgctacaggtagtcaataaaatgacaccaacacccgcatttattg

SEQ ID NO: 31829 - DNA, 75 bp, synthetic construct
  source 1..75: mol_type = other DNA
tatgatgaggagtcgggactgtattacaaccgtcaccggtactacgatccgttgcaggggcggtatatcacccag

SEQ ID NO: 31830 - DNA, 75 bp, synthetic construct
  source 1..75: mol_type = other DNA
tcgtcagaaggctgagtatgagcagcaggtgaagggatacagcaatgaacagcagcgagccaccacacaggcggt

SEQ ID NO: 31831 - DNA, 75 bp, synthetic construct
  source 1..75: mol_type = other DNA
tgttcagaagcggtcataatgatgttggcaatggcacggtcgttgtgaaggataatgcggttaatggtggtgatt

SEQ ID NO: 31832 - DNA, 75 bp, synthetic construct
  source 1..75: mol_type = other DNA
atgcgtcggaccgcatcacgcaccggacggtgaacggcgacccggcagagcagtggcagtatgatgagcacgggt

SEQ ID NO: 31833 - DNA, 75 bp, synthetic construct
  source 1..75: mol_type = other DNA
gccgccggtgacctggccggggaaatcaccggcgtgacggacggtgccgggcgggagttccgtctggtgctgacc

SEQ ID NO: 31834 - DNA, 75 bp, synthetic construct
  source 1..75: mol_type = other DNA
ttggtatccgcccggttattgacggtcgtcgcatgggtgttcgtgagtcgcttgaagaacaaacaatgaatatgg

SEQ ID NO: 31835 - DNA, 75 bp, synthetic construct
  source 1..75: mol_type = other DNA
cacggcagagagaatatcctttcttataaagactatttcctaggttgtataataatagccccttcgtctgatggt

SEQ ID NO: 31836 - DNA, 75 bp, synthetic construct
  source 1..75: mol_type = other DNA
atattgaggtgaaggataattacggcaacggtgtaccccagcaggaggtaccctcagcgtttcaccaagtgaagg

SEQ ID NO: 31837 - DNA, 75 bp, synthetic construct
  source 1..75: mol_type = other DNA
aaaaaataaaattaatatcatattatcttgatatgatgtctacagtcagatactttaattccaagacaaatacat

SEQ ID NO: 31838 - DNA, 75 bp, synthetic construct
  source 1..75: mol_type = other DNA
atggggttacagctagctcagaatataccattactgatggcacaattaaaatcccattccaggctcgctatgttg

SEQ ID NO: 31839 - DNA, 75 bp, synthetic construct
  source 1..75: mol_type = other DNA
gaactatcgacagccaggctctgttgaaaatggtgaatgaagcgcggagactgtgcggtgaaaaagaagtacgca

SEQ ID NO: 31840 - DNA, 75 bp, synthetic construct
  source 1..75: mol_type = other DNA
atcaccgcctcaacctaaacaagcggagggcggatggtatgaattgaatacaacaattcaggatgtgaaagcgag

SEQ ID NO: 31841 - DNA, 75 bp, synthetic construct
  source 1..75: mol_type = other DNA
ctccccatggtgaaaggctgtttcaccaatgccgggcaatttcaggtggtgattggcaccaacgtgggtgattac

SEQ ID NO: 31842 - DNA, 75 bp, synthetic construct
  source 1..75: mol_type = other DNA
cagccagcaatttcatgcgttgtgccgaagctgtcggaacgcgcattacagacattccggtagacctcaacacgc

SEQ ID NO: 31843 - DNA, 75 bp, synthetic construct
  source 1..75: mol_type = other DNA
ttccaccacaggttatctggggcaattcgacttctgtgccattgccagaatgggcaacgcagaggatgcccacta

SEQ ID NO: 31844 - DNA, 75 bp, synthetic construct
  source 1..75: mol_type = other DNA
ccgcgctggctgcgtggcaaaaataccagcaggactacaagaaagttaaggatgaggcaaaacgtcttgaggccg

SEQ ID NO: 31845 - DNA, 75 bp, synthetic construct
  source 1..75: mol_type = other DNA
caaccggagcgagacacagtacgatgcgtggggaaaggcggtcagcaccacgcagggcgggctgacgcgcagtat

SEQ ID NO: 31846 - DNA, 75 bp, synthetic construct
  source 1..75: mol_type = other DNA
cgagcgtaaatagttactggcgcgccccgagcaagggaccgctgaaaggcaggcatctggtaagcgagacagggc

SEQ ID NO: 31847 - DNA, 75 bp, synthetic construct
  source 1..75: mol_type = other DNA
tctatatttgaaagtggcgctcaattaccgggtacttactatgttgatattatgcttaatggtaagttggtagat

SEQ ID NO: 31848 - DNA, 75 bp, synthetic construct
  source 1..75: mol_type = other DNA
aatgaaaaagtttatcctgtcacacagcagagtgattttggattgtgcgatggctctgggaagcctgactgggat

SEQ ID NO: 31849 - DNA, 75 bp, synthetic construct
  source 1..75: mol_type = other DNA
atgaattaccaagctaatgcacaaataaaccaatatcgtaacaaaaaaaatcgagaagtcagttcttattgggcc

SEQ ID NO: 31850 - DNA, 75 bp, synthetic construct
  source 1..75: mol_type = other DNA
aacagccacgcgacagactgacagagataatcatctttgcaggtagtgatgcgtggagccatgcgaaagagtggc

SEQ ID NO: 31851 - DNA, 75 bp, synthetic construct
  source 1..75: mol_type = other DNA
tgccgcgcgaaaaaatgctgaagtttggtattagcgccttaacggatgtcgagctgctggcgctatttctgcgta

SEQ ID NO: 31852 - DNA, 75 bp, synthetic construct
  source 1..75: mol_type = other DNA
ccagaaagctaccttcgccatgtgcttggcgtcatagcagactggccggtcaaccgggtcagcgaactgcttccg

SEQ ID NO: 31853 - DNA, 75 bp, synthetic construct
  source 1..75: mol_type = other DNA
ggcgtaaaagcggcgcgcatttctaacttgtcacgggaccttgcccgttcactttcgacggtggcggtgcgtgtc

SEQ ID NO: 31854 - DNA, 75 bp, synthetic construct
  source 1..75: mol_type = other DNA
gaatgagttcggaaaggctatgaggtcagcggcgaaagtttacggatatgaatatattacgcgaaaagttaaggg

SEQ ID NO: 31855 - DNA, 75 bp, synthetic construct
  source 1..75: mol_type = other DNA
ccgctatttttacaggggtaggccagaagctcagcgacatgccgtattaccgtgctaaccagtatgcgcagatgc

SEQ ID NO: 31856 - DNA, 75 bp, synthetic construct
  source 1..75: mol_type = other DNA
tttacttgtaccgctgtgctgactgatatgctaacggagcatgcaaaagaatcttttcctgaaatattttcattg

SEQ ID NO: 31857 - DNA, 75 bp, synthetic construct
  source 1..75: mol_type = other DNA
tagggctatttaaaaactgccaagactggtctaatgattctttagaaacatgtaagatgaagtgctccggaaata

SEQ ID NO: 31858 - DNA, 75 bp, synthetic construct
  source 1..75: mol_type = other DNA
tttccctcgatctctctctggtcagccagcagtttctctcccttgaattccagcagatcctcgacaaaatggcct

SEQ ID NO: 31859 - DNA, 75 bp, synthetic construct
  source 1..75: mol_type = other DNA
tccggtacatcgacacggcggataagttcgcactactgaacatcaaccatgctgattacatgcgccatatcgtga

SEQ ID NO: 31860 - DNA, 75 bp, synthetic construct
  source 1..75: mol_type = other DNA
ctgaaaagaattgaggagctggagggcgaacaaatcaaaaccgcccgcagggagatggtgctggctgtggtcggc

SEQ ID NO: 31861 - DNA, 75 bp, synthetic construct
  source 1..75: mol_type = other DNA
tggcctgttcggtgtgccccggcggggtgacgtccggccatccggtcaatccgctgctcggtgcgaaggtccttc

SEQ ID NO: 31862 - DNA, 75 bp, synthetic construct
  source 1..75: mol_type = other DNA
tgaaggatggtacaggaaaaccggtaccggactgcaccatagagctgaaagccacgcgaacgagtgagacggtga

SEQ ID NO: 31863 - DNA, 75 bp, synthetic construct
  source 1..75: mol_type = other DNA
ccaattcattttccaccggaatgcaggttcttcgtgctcaaatggccgccagtggcggtggagaaattacagtag

SEQ ID NO: 31864 - DNA, 75 bp, synthetic construct
  source 1..75: mol_type = other DNA
gttcagcggcgtcatcggcatcatctgcgtctgcttcaaaagatgaggcgaccagacaagcgtcagcagcgaaag

SEQ ID NO: 31865 - DNA, 75 bp, synthetic construct
  source 1..75: mol_type = other DNA
ggggaggtgtattcgaaccgctggactcagaagaacggggccgcaccttcgaagctctggattgcccagattggt

SEQ ID NO: 31866 - DNA, 75 bp, synthetic construct
  source 1..75: mol_type = other DNA
gtgcagggccaacttcggttgggccgggttctatgttgaccggtatttccacccctgtacgtctcaccacctata

SEQ ID NO: 31867 - DNA, 75 bp, synthetic construct
  source 1..75: mol_type = other DNA
aagaagacgctgaagttctgcgctttgataattttgacgatgccgttgagtgctgcgctgacctgggtattccgt

SEQ ID NO: 31868 - DNA, 75 bp, synthetic construct
  source 1..75: mol_type = other DNA
atgaaactggccctgacgctggaagccgacagcgttaacgtgcaggcgctgaacatggggcgcattgtcgttgac

SEQ ID NO: 31869 - DNA, 75 bp, synthetic construct
  source 1..75: mol_type = other DNA
atgaaactcgtcggtagctacaccagcccgtttgtacgcaaactttctattctgttgttagaaaagggcataact

SEQ ID NO: 31870 - DNA, 75 bp, synthetic construct
  source 1..75: mol_type = other DNA
tggctggatatggctcgtattgtgcgtgggcaaaccctgagtctgaagcgcaaagagtttattgaggcggcacaa

SEQ ID NO: 31871 - DNA, 75 bp, synthetic construct
  source 1..75: mol_type = other DNA
aagcgtatgcggcagcgcgtctggcgaaaatccgtcgccagaaccggataaaagcagaacttcaggctgtgctgg

SEQ ID NO: 31872 - DNA, 75 bp, synthetic construct
  source 1..75: mol_type = other DNA
tctgaacctgcccacgctggatgaggctgtgaacaccctgaagccctggtggccgggattatttgacggtgacac

SEQ ID NO: 31873 - DNA, 75 bp, synthetic construct
  source 1..75: mol_type = other DNA
cgtaatggagcttgtcccttctgagataaggaagctgtttatccctctaccggaaaaaattgagttcgatttatc

SEQ ID NO: 31874 - DNA, 75 bp, synthetic construct
  source 1..75: mol_type = other DNA
aaaccacccgcaaagcaagccgtaaatctgtaaaaacgcaggaaactgcactgtctgccctgctggcgcagacgg

SEQ ID NO: 31875 - DNA, 75 bp, synthetic construct
  source 1..75: mol_type = other DNA
ccttcgggaagccgaaggctggggatggtgcgccggacgcatggagcctgtcggtgagtgccgtgaggatgccgg

SEQ ID NO: 31876 - DNA, 75 bp, synthetic construct
  source 1..75: mol_type = other DNA
ctgccctgttaccggagggatggtcacgggacatgacgacattcctgtcactcagtcaggaggtgctgttatccc

SEQ ID NO: 31877 - DNA, 75 bp, synthetic construct
  source 1..75: mol_type = other DNA
tcaacatttagctaatatagagaataagcttccagtttattttttatattttgataaagaatttcatgaactacc

SEQ ID NO: 31878 - DNA, 75 bp, synthetic construct
  source 1..75: mol_type = other DNA
ctgacctgcctgaatccgtagccgatgccaccgtcgcaacctggcataaaaaacccggcgacgcagtcgtacgtg

SEQ ID NO: 31879 - DNA, 75 bp, synthetic construct
  source 1..75: mol_type = other DNA
ccagaaacatattgattcggatgttgatattgtgaaactacgaaatgagattcctgattatctgaggcgtgctat

SEQ ID NO: 31880 - DNA, 75 bp, synthetic construct
  source 1..75: mol_type = other DNA
atggtccggaagagttccatctcgttattgttgacaatgggcgttcagagattctcggctcagaattcagcgatg

SEQ ID NO: 31881 - DNA, 75 bp, synthetic construct
  source 1..75: mol_type = other DNA
atgcgtatagagtttgttttgccttacccgccaacggtgaacacctactggcgacgtcgtgacaacacatatttt

SEQ ID NO: 31882 - DNA, 75 bp, synthetic construct
  source 1..75: mol_type = other DNA
atgagctggttattcgtctggggcgttcgcctgtacagcgttgcgtgaatcacatttctgaaccggacaccgaaa

SEQ ID NO: 31883 - DNA, 75 bp, synthetic construct
  source 1..75: mol_type = other DNA
ctctgcgttgcgataaattaaatctcaccctggatgatgtggtgtcatcctgtcgcgattgcgttcttagtccgt

SEQ ID NO: 31884 - DNA, 75 bp, synthetic construct
  source 1..75: mol_type = other DNA
ccgttgcagaaacagggtcagtctgccttgttacaaacgaaggcaacgcacggatgtgcaccacattacctaaaa

SEQ ID NO: 31885 - DNA, 75 bp, synthetic construct
  source 1..75: mol_type = other DNA
atgcgtaatattgaaatcctcacgactaaaaccggaccggatgacgcagggcttaatattttactgacagaggct

SEQ ID NO: 31886 - DNA, 75 bp, synthetic construct
  source 1..75: mol_type = other DNA
cggtcctgttagcagacagctttaaagccggtggcaaagtgctttcctgcggcaacggcggctcccattgcgacg

SEQ ID NO: 31887 - DNA, 75 bp, synthetic construct
  source 1..75: mol_type = other DNA
atgactggtttgaaagccgttttgtcatttatcggcaccgttatattggttgcattcggtgcgtttggttttggt

SEQ ID NO: 31888 - DNA, 75 bp, synthetic construct
  source 1..75: mol_type = other DNA
ctctatggaagttccgtctccgcaggcgggtatcgttaaagagatcaaagtctctgttggcgataaaacccagac

SEQ ID NO: 31889 - DNA, 75 bp, synthetic construct
  source 1..75: mol_type = other DNA
ggtaccaggcaaggactggaacaatcagcagaatatctatcaccgttggttgaaaggtgaaacgaaagcgcaaag

SEQ ID NO: 31890 - DNA, 75 bp, synthetic construct
  source 1..75: mol_type = other DNA
tatggtcacacgtcacgcagtccgctggacacgctggagagcgccatcggctttcacatgcgcgactggtggcag

SEQ ID NO: 31891 - DNA, 75 bp, synthetic construct
  source 1..75: mol_type = other DNA
atacgatattaaaaaaggctactgtagattcaatctgtcaatgcaacacccctttcaattatctctttcggtgtt

SEQ ID NO: 31892 - DNA, 75 bp, synthetic construct
  source 1..75: mol_type = other DNA
ggaaaaactgaataacgcgctggcagcaattaaagctgacggtacatatcagaaaatcaatgaccagtggttccc

SEQ ID NO: 31893 - DNA, 75 bp, synthetic construct
  source 1..75: mol_type = other DNA
agttcaccactgtcgtggcagacagcggcgatattgagtccattcgccattatcatccccaggatgccaccacca

SEQ ID NO: 31894 - DNA, 75 bp, synthetic construct
  source 1..75: mol_type = other DNA
atgctaaaacagcaggatatgacagaaaccgccagagtagtgtttaatgaattaagcgttaccgaaccggcgaca

SEQ ID NO: 31895 - DNA, 75 bp, synthetic construct
  source 1..75: mol_type = other DNA
gaaccgcctgatctatgagcgtgccatgctggacgaaagcggcggcgtggttacccggacacaggattttgagcc

SEQ ID NO: 31896 - DNA, 75 bp, synthetic construct
  source 1..75: mol_type = other DNA
accgggccgggaagacgtgctcctctcacttgccggagagattgaggatgaagacagcacgctcgctgaacgtca

SEQ ID NO: 31897 - DNA, 75 bp, synthetic construct
  source 1..75: mol_type = other DNA
ctgactacggtaaacggtgtctctcagtttcagccggaatggatatgctgggaaccaggtgtggagtgggttcgt

SEQ ID NO: 31898 - DNA, 75 bp, synthetic construct
  source 1..75: mol_type = other DNA
atgctgaaacagcaggatatgacagaaaccgccagagtggtgtttaatgaattaagcgtcaccgaaccggcgact

SEQ ID NO: 31899 - DNA, 75 bp, synthetic construct
  source 1..75: mol_type = other DNA
atgagtaattcatcaaaaattaataaaatcaaaataggtatagatgtctttcatgcaactgtagaaaggattaac

SEQ ID NO: 31900 - DNA, 75 bp, synthetic construct
  source 1..75: mol_type = other DNA
cagcggcatcatcgaagaacgcggcgaaaacctcagaaacgaatgcagctaacagcgcacaggcggcagcgacct

SEQ ID NO: 31901 - DNA, 75 bp, synthetic construct
  source 1..75: mol_type = other DNA
gcgctcgcactaatgacgcccgtggaatatattttaaaagagaataaaaattgcaatatgtggtggacccataca

SEQ ID NO: 31902 - DNA, 75 bp, synthetic construct
  source 1..75: mol_type = other DNA
cagcaactggcgtatgcgcaattgcaaatagccgaagaaacgctgcgtaattatcagcagtcatatgcgtttgtc

SEQ ID NO: 31903 - DNA, 75 bp, synthetic construct
  source 1..75: mol_type = other DNA
caaccctggagaaagtctggcacgcgccggacaattttcgcttcatggacccgctgccgccgatgcatcgtcggg

SEQ ID NO: 31904 - DNA, 75 bp, synthetic construct
  source 1..75: mol_type = other DNA
gcaatttataccatcaataatgacgtctatttaagtgatgatgcttttaataataaccaggcatatacatcaaca

SEQ ID NO: 31905 - DNA, 75 bp, synthetic construct
  source 1..75: mol_type = other DNA
taatccgccgcgttaccggaatcagccagcaggctgacgaacaggccacgcagccggacagcgtgaccgctgaaa

SEQ ID NO: 31906 - DNA, 75 bp, synthetic construct
  source 1..75: mol_type = other DNA
atttacgcgcggtgatatttaccgcgaccagtacggcggcacggtaatgattaagggcgtggcgggacggtgcgt

SEQ ID NO: 31907 - DNA, 75 bp, synthetic construct
  source 1..75: mol_type = other DNA
gttgttccttttaacccgcttcccaacctgtaaagtggcacagacaagtcaccataaatgcccgtcagcaatgga

SEQ ID NO: 31908 - DNA, 75 bp, synthetic construct
  source 1..75: mol_type = other DNA
taatgaaacgaaatccactattgacaattacatatcaaaaataaaggataatcataataccccatggttattaaa

SEQ ID NO: 31909 - DNA, 75 bp, synthetic construct
  source 1..75: mol_type = other DNA
atatgtgctgtggcagtcgcatgttctggttcgataagaatgacgaccgggcgatatttagcgatatcagaaagg

SEQ ID NO: 31910 - DNA, 75 bp, synthetic construct
  source 1..75: mol_type = other DNA
tgtcactgcctgcggtgtgcggcatcggctccatgctgggtatcgccggttatcaggtgattgagattgccattc

SEQ ID NO: 31911 - DNA, 75 bp, synthetic construct
  source 1..75: mol_type = other DNA
ggttgaccatttgcttcctcagcagacaagaggacgtgatgaacaccaacccgcaatgccctggaggcagttacc

SEQ ID NO: 31912 - DNA, 75 bp, synthetic construct
  source 1..75: mol_type = other DNA
gaccgaaagaacccaactggacagcatgggccaatgacgttcgcacaatgcggatgctggatggcagaactcaca

SEQ ID NO: 31913 - DNA, 75 bp, synthetic construct
  source 1..75: mol_type = other DNA
gcgaatggccgggacgccgatcggcccgaacgacacggccattgccgggcacgccatcgccgccggtgccgtgct

SEQ ID NO: 31914 - DNA, 75 bp, synthetic construct
  source 1..75: mol_type = other DNA
ccattctgtgtaagtttgacgcggactggatggcgagcgatgaagccagaaccgaggcgacaaatgacctgtatt

SEQ ID NO: 31915 - DNA, 75 bp, synthetic construct
  source 1..75: mol_type = other DNA
cgttcttgcctgtggagagatggtgcagtcaggccgcccgttgaagcaggaacccaccgaaatgattcaggcgac

SEQ ID NO: 31916 - DNA, 75 bp, synthetic construct
  source 1..75: mol_type = other DNA
tcgcatctgctgctaacgaatccgaatttgaactgaccgtaacgcagatacccgacgaacagcgtatctgcttct

SEQ ID NO: 31917 - DNA, 75 bp, synthetic construct
  source 1..75: mol_type = other DNA
caggtatacgctcgcggcaaactgatggtcaaagacggcaaagcctgcgtgaaaggaacgtttgaaacggcataa

SEQ ID NO: 31918 - DNA, 75 bp, synthetic construct
  source 1..75: mol_type = other DNA
gctgtgcggaaatctgcatccttttcctcttgctgtatggcataacttctccggctctccggatacggcagaaga

SEQ ID NO: 31919 - DNA, 75 bp, synthetic construct
  source 1..75: mol_type = other DNA
ttttgcgatccggatatgcatccctctgatttcagtctgctggcaccccgacgtgatgatgagcagacggagatg

SEQ ID NO: 31920 - DNA, 75 bp, synthetic construct
  source 1..75: mol_type = other DNA
aggcgaaagacaccattcgccgtggctgtctggagtacgacgccggagcaaccgacgtcacgcagtcgtttatgt

SEQ ID NO: 31921 - DNA, 75 bp, synthetic construct
  source 1..75: mol_type = other DNA
gataaccagcatggcgtacaacaggcagcggcaaatcttaaacatcgtctgcaggaattccgcaatatcaatgca

SEQ ID NO: 31922 - DNA, 75 bp, synthetic construct
  source 1..75: mol_type = other DNA
tggggacaatatccggaagcattgctgtttgtaaactggctctataatcattcctctgtgctgcatgaacgggca

SEQ ID NO: 31923 - DNA, 75 bp, synthetic construct
  source 1..75: mol_type = other DNA
ggcagccaggatgtggataaaaacagactgacctcacaggcttttgcccgtgccgcactgatcaccgatgtgggc

SEQ ID NO: 31924 - DNA, 75 bp, synthetic construct
  source 1..75: mol_type = other DNA
agcagcgcgttgaagaagaacgccagcgccatatccgtgctgcccgtgccaaaacgccgggcgtgtcccgcgtgc

SEQ ID NO: 31925 - DNA, 75 bp, synthetic construct
  source 1..75: mol_type = other DNA
cactactgcaattgcgggaatttatcgacgaaaactccggtgaattttttgttcaggtctggggtaatggggcca

SEQ ID NO: 31926 - DNA, 75 bp, synthetic construct
  source 1..75: mol_type = other DNA
gtatgccttacgctggtgttattgcacaagaaaccctggaagccatccccgaagccgtagggtctatgatgaaat

SEQ ID NO: 31927 - DNA, 75 bp, synthetic construct
  source 1..75: mol_type = other DNA
caccaaacgcctggagcggggccgcttcgtctggccagtcacccgtgacggcaaggtgcaccttactccggctca

SEQ ID NO: 31928 - DNA, 75 bp, synthetic construct
  source 1..75: mol_type = other DNA
tgatgaagacagcaaccttgagagtctgtgctggtcgtgtcacgcagtgaagaccgcgcgtgagcggttcaggtg

SEQ ID NO: 31929 - DNA, 75 bp, synthetic construct
  source 1..75: mol_type = other DNA
ctggcggcaaaggtgcagacgacgctgaaagacgatccgatgtcaggtcacgtttttatcttccgtgggcgtaat

SEQ ID NO: 31930 - DNA, 75 bp, synthetic construct
  source 1..75: mol_type = other DNA
acagtagattattctggtgttactggcttgcttgttcaggtagccagagagtcagacgacagaataacagcactg

SEQ ID NO: 31931 - DNA, 75 bp, synthetic construct
  source 1..75: mol_type = other DNA
tttgcattgaatgtgaagtgccaattccgccagcacgccgccgcgccattcctggagtgcagctttgcattacct

SEQ ID NO: 31932 - DNA, 75 bp, synthetic construct
  source 1..75: mol_type = other DNA
cccgccagctcgccgccgcgccattccgggcgtgcagtgctgcgtcacttgtcaggaaatcgcagagctgaaagg

SEQ ID NO: 31933 - DNA, 75 bp, synthetic construct
  source 1..75: mol_type = other DNA
atgaaagtgcgtgcgcatcagtatgacacggtggacgcgctttgctggcgtcattacgggcgcacgcagggtgtc

SEQ ID NO: 31934 - DNA, 75 bp, synthetic construct
  source 1..75: mol_type = other DNA
cgtatggtgtgcggggaagtaacgcgcttattaagtttgataatacagactcattgcagatcaaatatgctaatc

SEQ ID NO: 31935 - DNA, 75 bp, synthetic construct
  source 1..75: mol_type = other DNA
gacggaaaagctgaatgcgctgggtattaacacagcactgcagctggcgcaggctaacacggcattcatccggaa

SEQ ID NO: 31936 - DNA, 75 bp, synthetic construct
  source 1..75: mol_type = other DNA
gttctggtccggtgcgctgttcaaccgtgggcgcaacaaagccgataaggtggacatcgacctgtcccacagcaa

SEQ ID NO: 31937 - DNA, 75 bp, synthetic construct
  source 1..75: mol_type = other DNA
agcggtgtggtggtgagaatcgccggtgaaggtcgtccgtggaatcccggtgccatcaccggtggtcgcgtgtgg

SEQ ID NO: 31938 - DNA, 75 bp, synthetic construct
  source 1..75: mol_type = other DNA
aggcgctgggttatgaaaccgaagtggtcggtaagcacggtatgtgggagatgccgggcgtaccggtggaggcct

SEQ ID NO: 31939 - DNA, 75 bp, synthetic construct
  source 1..75: mol_type = other DNA
ctgggcagcatgggagaacgctgggccggccagggggctgaacagcttgggctgcagggcagcgtcgataaggat

SEQ ID NO: 31940 - DNA, 75 bp, synthetic construct
  source 1..75: mol_type = other DNA
acttctgaacgggaaaccgcactgccggagagtgtgctgcgtgaatcacaacgggagcgggaagcggtccgggag

SEQ ID NO: 31941 - DNA, 75 bp, synthetic construct
  source 1..75: mol_type = other DNA
actgtttaaccacgacaccagtcgcgatcaggaaccacagttacacacgcatgcggtggtggctaatgtcacgca

SEQ ID NO: 31942 - DNA, 75 bp, synthetic construct
  source 1..75: mol_type = other DNA
taccgacaaggataattactatgtactgggcagcatgggagaacgctgggccggcaggggggctgaacagctggg

SEQ ID NO: 31943 - DNA, 75 bp, synthetic construct
  source 1..75: mol_type = other DNA
cgacagtatctgagagagtacgtatgtagggaactgggtattccgggtgagttcaccaccgcatactggtttcat

SEQ ID NO: 31944 - DNA, 75 bp, synthetic construct
  source 1..75: mol_type = other DNA
gcacgtacaccgaaaaacgcgaagacccgtacttcaaatccagttacgacaacgtggactacagccagatcccgg

SEQ ID NO: 31945 - DNA, 75 bp, synthetic construct
  source 1..75: mol_type = other DNA
cttgaacagactaaattaacattagtcacaatgactatgcaggatcacgcaacattaaaagaaataaaagattta

SEQ ID NO: 31946 - DNA, 75 bp, synthetic construct
  source 1..75: mol_type = other DNA
gctcatcaaaaaagataacgtgaattctgcttttttccagaccagtgttcgtgtctggccacaatatggtcgtgt

SEQ ID NO: 31947 - DNA, 75 bp, synthetic construct
  source 1..75: mol_type = other DNA
aggccgatccgctaaacaaaatgccggagatcaacgttcggggaaacgcaaaggaatcagtgctgacacttgata

SEQ ID NO: 31948 - DNA, 75 bp, synthetic construct
  source 1..75: mol_type = other DNA
atggcgtcgggcagatttacggcatgtatgtcctgaccgaaacgaatacgacccgttccgagtttgatcgctacg

SEQ ID NO: 31949 - DNA, 75 bp, synthetic construct
  source 1..75: mol_type = other DNA
gatgccccgggcgcacataaagcgggctatgctatccgccgttcggagaatttaagttcatgggagtatgcgcca

SEQ ID NO: 31950 - DNA, 75 bp, synthetic construct
  source 1..75: mol_type = other DNA
gttatgcaatctgccgttctgcagattttaactcatgggaatatgtgccagaccatcgcggtgaaatcgtcttta

SEQ ID NO: 31951 - DNA, 75 bp, synthetic construct
  source 1..75: mol_type = other DNA
ggtctcagaatctgaagcacagagtgccggtcgcagactggcaacattagaacaaaagtggctcagaatgcagac

SEQ ID NO: 31952 - DNA, 75 bp, synthetic construct
  source 1..75: mol_type = other DNA
ggtgggcggtgcgaatgaggccagcggggtgacaaaaacgctctccggcatgctgaacggtgttgccggacagat

SEQ ID NO: 31953 - DNA, 75 bp, synthetic construct
  source 1..75: mol_type = other DNA
atccctgcaggaaaaaatcgccgggtatcagtatgtgctggctaatccgggctggacgaccggtaacggcttcat

SEQ ID NO: 31954 - DNA, 75 bp, synthetic construct
  source 1..75: mol_type = other DNA
aactcattgccataaaagcgggagacattatcatttataattatgatggtgaaacgcgtgaatatatttctacat

SEQ ID NO: 31955 - DNA, 75 bp, synthetic construct
  source 1..75: mol_type = other DNA
actccaaatttcgtaatggcgtagaacgccacgctaaccgtttcgctatcagtacatcacgtagcaacactcgct

SEQ ID NO: 31956 - DNA, 75 bp, synthetic construct
  source 1..75: mol_type = other DNA
gtgctttctggcgtgctttatcctgaaattacaggtggcgaagtgtcgctttcgttgctgaccacgcaggcatat

SEQ ID NO: 31957 - DNA, 75 bp, synthetic construct
  source 1..75: mol_type = other DNA
gaacaagataccagttttcacggaagatgaagaagctcgctttttatttaatgaaatacttggttattggataag

SEQ ID NO: 31958 - DNA, 75 bp, synthetic construct
  source 1..75: mol_type = other DNA
agagcgtgaaatcaaaaaggcctacaaacgcctggccatgaaataccacccggaccgtaaccagggtgacaaaga

SEQ ID NO: 31959 - DNA, 75 bp, synthetic construct
  source 1..75: mol_type = other DNA
caccaaagcacaggcggaagccatcagggaggagtgtcggggtgtgctcgaaggcagtctgaaactcaggctgaa

SEQ ID NO: 31960 - DNA, 75 bp, synthetic construct
  source 1..75: mol_type = other DNA
gtttggtcaatatgtgagtgttcttctttctggcaagaagaataaccaattgtacgttcctcccggatttgccca

SEQ ID NO: 31961 - DNA, 75 bp, synthetic construct
  source 1..75: mol_type = other DNA
acctacatttgggaaatgggttggggtgaatttgtctgctgagaataagcgtcagttgtggattcctgagggatt

SEQ ID NO: 31962 - DNA, 75 bp, synthetic construct
  source 1..75: mol_type = other DNA
ccaagcatcaatatttcatggccagtcgattcacaagtgctgctatcagctaaagataataagcatcctccatta

SEQ ID NO: 31963 - DNA, 75 bp, synthetic construct
  source 1..75: mol_type = other DNA
tctaagtctaataaaggcgttttacgcgggctccattaccagttagaaccttatgcgcaaggcaaacttgtgcgc

SEQ ID NO: 31964 - DNA, 75 bp, synthetic construct
  source 1..75: mol_type = other DNA
atgcgcgtattgatcaaaaacggcactgtcgttaacgcagatggacaagccaaacaggatttgctgattgaaagc

SEQ ID NO: 31965 - DNA, 75 bp, synthetic construct
  source 1..75: mol_type = other DNA
tatcgccgcctgcgggtggcgattcagggagaccatgaatcatgaacgaaacgctgaatgcactgatttgtcgcc

SEQ ID NO: 31966 - DNA, 75 bp, synthetic construct
  source 1..75: mol_type = other DNA
agcacaaaaagcatgttcacactcaccatgaactaccagcacaaaacattcgggagtgggacgttggtattcgaa

SEQ ID NO: 31967 - DNA, 75 bp, synthetic construct
  source 1..75: mol_type = other DNA
gctggcgtccctgattcagaccgctgaacaggcattgtggaaacgtgaatgggccgcccgggatcatggcctcgc

SEQ ID NO: 31968 - DNA, 75 bp, synthetic construct
  source 1..75: mol_type = other DNA
ttgcacatcaatttctgaagattctttattaattagtttttatgcgaaaggtgggagcatggatattgttatgca

SEQ ID NO: 31969 - DNA, 75 bp, synthetic construct
  source 1..75: mol_type = other DNA
cgtcccggaatgcgtcacccgccgtcaggcggtgattaatcaggcccgcaccctgctgaaaaacaacacacgcga

SEQ ID NO: 31970 - DNA, 75 bp, synthetic construct
  source 1..75: mol_type = other DNA
cagcagcaagtattactgagctgaaaaaaaatcctatgggcacggtagccgaaggtgaaggaggggccgttgcaa

SEQ ID NO: 31971 - DNA, 75 bp, synthetic construct
  source 1..75: mol_type = other DNA
gcaggttatcgcagacagtgtaatcagtgccagaacggcgcgaccgggcggcaaaaaaaggtcaacaggaccagg

SEQ ID NO: 31972 - DNA, 75 bp, synthetic construct
  source 1..75: mol_type = other DNA
aggcggtaagccatattcctgttccgcgtgatggtcgtgactatgatcccgatgttctgcagaaggctgttctgg

SEQ ID NO: 31973 - DNA, 75 bp, synthetic construct
  source 1..75: mol_type = other DNA
cgaactggtgagcgtggcgggtaacatgcaggtaagccagtggacaggccagaacggcgaaacgcggcagggctg

SEQ ID NO: 31974 - DNA, 75 bp, synthetic construct
  source 1..75: mol_type = other DNA
atgagcaatcttttacagacgggcgcggagttcgagaaaaagctgaaagagagagccgaatctacagagacaatg

SEQ ID NO: 31975 - DNA, 75 bp, synthetic construct
  source 1..75: mol_type = other DNA
gtacttaataacaaagtgctacctgtaaccatttacaacgttgtaccattcaataaaagattctgggatttaatc

SEQ ID NO: 31976 - DNA, 75 bp, synthetic construct
  source 1..75: mol_type = other DNA
cactgcaacagtatgaccgaagataaacccggagaagctcattcatcagcctggaccctggctgcaaaacgtggg

SEQ ID NO: 31977 - DNA, 75 bp, synthetic construct
  source 1..75: mol_type = other DNA
gttttgaagttcgcaaaaacggcgtattaatcgcatccagagaaactaaaggggccattcccggtagttacagtg

SEQ ID NO: 31978 - DNA, 75 bp, synthetic construct
  source 1..75: mol_type = other DNA
caagcgccagtgtaagcgaacttaagaaaaacccgatggctacagtcagcgctggtgatggctacccagttgcta

SEQ ID NO: 31979 - DNA, 75 bp, synthetic construct
  source 1..75: mol_type = other DNA
tatcactggatgagggtggatgaaatactaaataatgatttagtacattttaatactaaagcttattttatggat

SEQ ID NO: 31980 - DNA, 75 bp, synthetic construct
  source 1..75: mol_type = other DNA
caggctgccggctatgcttacggcggctccctgtatgcccgtactcaggtcaaaaatgttcagctgatttccatg

SEQ ID NO: 31981 - DNA, 75 bp, synthetic construct
  source 1..75: mol_type = other DNA
gaggcattgcgtcgttttgaggaaatggtggaagaagcggcacgcaacgctgaagccgcctctcagagcgcagcg

SEQ ID NO: 31982 - DNA, 75 bp, synthetic construct
  source 1..75: mol_type = other DNA
gtggcagaagatgcgcggcgtatccgtgcggcgctgaccaccaccggtcagacgttgctgacccgccagacgcgc

SEQ ID NO: 31983 - DNA, 75 bp, synthetic construct
  source 1..75: mol_type = other DNA
gaaaacctgcccgtggtgctcgatgccatcctgaaccggggcgctcgtttttcgtcggtggaaatgtatctggtc

SEQ ID NO: 31984 - DNA, 75 bp, synthetic construct
  source 1..75: mol_type = other DNA
tttattgatacgctgatatggcttcgggataacagctatattcgttactctcagttgctggctgtgggagcggct

SEQ ID NO: 31985 - DNA, 75 bp, synthetic construct
  source 1..75: mol_type = other DNA
tttttcatcttatggcgaataaatgcactcttaaatccatctccatacctgaacttgatttaataattgatggcg

SEQ ID NO: 31986 - DNA, 75 bp, synthetic construct
  source 1..75: mol_type = other DNA
atgcgtgatatttaccttgaaacaatagaccgcgcatttcttgcactttctcacagtgaaagcatgatggaaata

SEQ ID NO: 31987 - DNA, 75 bp, synthetic construct
  source 1..75: mol_type = other DNA
atgatgatgatggaatgttgatttctcaggtcgtcgattccgtcatgtacattgacaagaaagcctttggcatcc

SEQ ID NO: 31988 - DNA, 75 bp, synthetic construct
  source 1..75: mol_type = other DNA
ccggtgaccttgtggtgccactgtatgacgacagcggcgaactggttaaccttcagttaatcagtgctgacggcc

SEQ ID NO: 31989 - DNA, 75 bp, synthetic construct
  source 1..75: mol_type = other DNA
cactggatgcggcctggcgactggcgcagttcacacaccataaaaaaggcgatgccggtaaaaaatcggcaaaag

SEQ ID NO: 31990 - DNA, 75 bp, synthetic construct
  source 1..75: mol_type = other DNA
aaagggaagtatccgaaaaatacctggaaggtgagctgagtttgaagtctgttggaaaaatgtacaatattgacc

SEQ ID NO: 31991 - DNA, 75 bp, synthetic construct
  source 1..75: mol_type = other DNA
ggattgacgttgtttcatgcgggaaaatgggaggtattccgcagatgactcttaaagaatggctgaagaatacat

SEQ ID NO: 31992 - DNA, 75 bp, synthetic construct
  source 1..75: mol_type = other DNA
acggtaccaaacccgaaataccagtatctggaacgcattgtgaacgcggtacgtgaagggctgaaagagttagat

SEQ ID NO: 31993 - DNA, 75 bp, synthetic construct
  source 1..75: mol_type = other DNA
agaaacaccagaagcgatgcagcgtgagctcatgatacgcatagataacacttttgatttcttctacagcatgca

SEQ ID NO: 31994 - DNA, 75 bp, synthetic construct
  source 1..75: mol_type = other DNA
gatgaaatctaagattggttcagattcagaacgtcaaaagcgcgaagagttgtttaattacttcatcagaaaggg

SEQ ID NO: 31995 - DNA, 75 bp, synthetic construct
  source 1..75: mol_type = other DNA
atgctttcctggctgaagtccgggcgcagggggtggatgctgctatagaagctgcaaaaaatctggtggcccaag

SEQ ID NO: 31996 - DNA, 75 bp, synthetic construct
  source 1..75: mol_type = other DNA
ggagagtgttttatctgtgaactcaggctgccagatcatcgtttccgatggaagcataataagctttttctgctt

SEQ ID NO: 31997 - DNA, 75 bp, synthetic construct
  source 1..75: mol_type = other DNA
gccatatgaatcaggcgataaagaatgcgtggttcagcaggcagggtctgatatcactgctggaacagcagaggc

SEQ ID NO: 31998 - DNA, 75 bp, synthetic construct
  source 1..75: mol_type = other DNA
cgcgcgatgcagtacgttttggtgctgatggaattgtggtttctaaccacggtggccgccagctggacggtgtac

SEQ ID NO: 31999 - DNA, 75 bp, synthetic construct
  source 1..75: mol_type = other DNA
ccccgttcaggaaaaagaagccacacaatccccggcgtccccagtagcccctgaagcatcaaccgtcagcaccgc

SEQ ID NO: 32000 - DNA, 75 bp, synthetic construct
  source 1..75: mol_type = other DNA
gcggtgctttgcagccagctggtgccgcaggaatttgcttttgaagcgttaatgcatgatgcaacagaagcatat

SEQ ID NO: 32001 - DNA, 75 bp, synthetic construct
  source 1..75: mol_type = other DNA
ggtgtctctcggcgagtttggcgaccagtggctcgcccagcagtcgctgcgtaccctgaccaacgccagtcgccg

SEQ ID NO: 32002 - DNA, 75 bp, synthetic construct
  source 1..75: mol_type = other DNA
gcggtcatcctaaattcgtttttaataaaggtcgccgtggctggggtaaagaggcgctggaacgatatgcgccag

SEQ ID NO: 32003 - DNA, 75 bp, synthetic construct
  source 1..75: mol_type = other DNA
aggcatggttgaacgaattacaggacgttcttgatcgctgtccatcaccgaaaaaaattggtttttacaccattg

SEQ ID NO: 32004 - DNA, 75 bp, synthetic construct
  source 1..75: mol_type = other DNA
caccaccgttaacaacccttaccggcatacgctgcagcaccgcacatatcacggaaacagacaacgcctggttgt

SEQ ID NO: 32005 - DNA, 75 bp, synthetic construct
  source 1..75: mol_type = other DNA
gggcgttgtgatatcaacaagccgatgagcgaagccagcatcaatatggtgctcaaacgtatcggttacgatggc

SEQ ID NO: 32006 - DNA, 75 bp, synthetic construct
  source 1..75: mol_type = other DNA
ccgacagcgttaacgtgcaggcactgaacatggggcgcattgtcgttgacgtcgatggtgttaatctcagtgaac

SEQ ID NO: 32007 - DNA, 75 bp, synthetic construct
  source 1..75: mol_type = other DNA
cagagccaggattacacgtttaaggtgccggactggccggggatgtatgagcagcagggtgagaacctgaacgga

SEQ ID NO: 32008 - DNA, 75 bp, synthetic construct
  source 1..75: mol_type = other DNA
tctgcggcttaaacgcctggggctgtccagaacgttccgccgtctggttgtcacactcatccggcgttatggcgt

SEQ ID NO: 32009 - DNA, 75 bp, synthetic construct
  source 1..75: mol_type = other DNA
agcctttgcaatgccctgtttgctggagaggtatcgccggtcagcgatgtggaggcctgtacccgtgaaccactg

SEQ ID NO: 32010 - DNA, 75 bp, synthetic construct
  source 1..75: mol_type = other DNA
atcgtcagttactgggcagggaagcaggtacaggaaaacgcctgaaaggctggttgccagtggcctgtattaatc

SEQ ID NO: 32011 - DNA, 75 bp, synthetic construct
  source 1..75: mol_type = other DNA
aggatgaagtgctgaggctgaaacagattagcggactgacggagttgtttcaggaagaggatttcagcccggcat

SEQ ID NO: 32012 - DNA, 75 bp, synthetic construct
  source 1..75: mol_type = other DNA
cggattcatgtgcgtgattgtgccgccgtccattgtttcaggttcaaacatgaagcggttacgcctgcgcctatc

SEQ ID NO: 32013 - DNA, 75 bp, synthetic construct
  source 1..75: mol_type = other DNA
tcactctgtaatgcactgtttcagggggaggtcacaccggtcagtgatgttcacgccggcacccgggaagtgcag

SEQ ID NO: 32014 - DNA, 75 bp, synthetic construct
  source 1..75: mol_type = other DNA
gggaggtcaccccggtcagtgatgttcacgccggcacccgggaagtgcggcgcttccgtctgagtggccatggtc

SEQ ID NO: 32015 - DNA, 75 bp, synthetic construct
  source 1..75: mol_type = other DNA
gggtgagtacgtatcatcggggacagcggaatcactgcccgccgtcatgaacgccgtcacggtcatctctgaggc

SEQ ID NO: 32016 - DNA, 75 bp, synthetic construct
  source 1..75: mol_type = other DNA
taactctactgaactcgtcaggaaaaaatatgatgaactatatgagatttacacaaagaggttttctgtaaataa

SEQ ID NO: 32017 - DNA, 75 bp, synthetic construct
  source 1..75: mol_type = other DNA
tcaaaggcaagctgctttctgagcaagtgaagaaccccaatatcaaagttgggcggtacagctattactctggct

SEQ ID NO: 32018 - DNA, 75 bp, synthetic construct
  source 1..75: mol_type = other DNA
gtcagtcgctttgctgaactgcgcaaggtggctggcgctatggcaaccctcagcggactgcggcgcacctacttc

SEQ ID NO: 32019 - DNA, 75 bp, synthetic construct
  source 1..75: mol_type = other DNA
gtcagcagcattatcggtgtgctgacagaaaaaacctcccggaaacgtcgtaaaaaacacacagagccttaccga

SEQ ID NO: 32020 - DNA, 75 bp, synthetic construct
  source 1..75: mol_type = other DNA
tggataagactaaaatcacccatgttaatgacggctttatctttctggggcacaggatcattcgcaaacgcagtc

SEQ ID NO: 32021 - DNA, 75 bp, synthetic construct
  source 1..75: mol_type = other DNA
cgtgccgaggtggcagcttctgacgccttcgtggtcgctgtggatgcagaagtggctgccgatttttgtgatgct

SEQ ID NO: 32022 - DNA, 75 bp, synthetic construct
  source 1..75: mol_type = other DNA
gaaccaatgttggtggtggggatggctggcgtcgtcttgtttattgttctggcaattctgcaaccgctcctgcaa

SEQ ID NO: 32023 - DNA, 75 bp, synthetic construct
  source 1..75: mol_type = other DNA
ttgcaacagggatgacgtttttattagccggatgtgaggacgttaaatctgtagattggtggcaatctcatcctg

SEQ ID NO: 32024 - DNA, 75 bp, synthetic construct
  source 1..75: mol_type = other DNA
atgcagcgtctgtgtggttgcggaaagcatgatgaccgtgaacacggggagttacttacagcacagctgcgactg

SEQ ID NO: 32025 - DNA, 75 bp, synthetic construct
  source 1..75: mol_type = other DNA
ggattatccctttctgtgctgtcgttgcatcctgtgcggtgtatttcccgttagccaggtcatacgcggccttaa

SEQ ID NO: 32026 - DNA, 75 bp, synthetic construct
  source 1..75: mol_type = other DNA
gaatggtattatcccggagcaggacagggtaatcacgcaggtggtgatactggatgcggataaaaagcagataca

SEQ ID NO: 32027 - DNA, 75 bp, synthetic construct
  source 1..75: mol_type = other DNA
gcgcagagtcacagcctgaccctgcgggatgcgcagggcgaaacgcaggtggtgcgtatttcctccctggacagc

SEQ ID NO: 32028 - DNA, 75 bp, synthetic construct
  source 1..75: mol_type = other DNA
ttgccctgactgcagggatgcatatcactgttcatgcctcagacaatgtgaacactcctgaaaaccgccagttcc

SEQ ID NO: 32029 - DNA, 75 bp, synthetic construct
  source 1..75: mol_type = other DNA
tacccttctggaactggaagaacatcagaaggcgtggttgttgtggtgttatggcggaaacatttgctgggagca

SEQ ID NO: 32030 - DNA, 75 bp, synthetic construct
  source 1..75: mol_type = other DNA
cagaacgcgccacggccagcgccgtcagtccggcttataccgcagatgctgaccattccggtaacgccgcccccc

SEQ ID NO: 32031 - DNA, 75 bp, synthetic construct
  source 1..75: mol_type = other DNA
gagtgggtaaccattcaggccggattttacaccgagcatttttatcctgatggtagtcgtgggcgtcgggcgaaa

SEQ ID NO: 32032 - DNA, 75 bp, synthetic construct
  source 1..75: mol_type = other DNA
ctgaagttctggcagctgctaatgctcgcgctgagaaaatcaatgcactggaaactgttaccatcgcgtctaaag

SEQ ID NO: 32033 - DNA, 75 bp, synthetic construct
  source 1..75: mol_type = other DNA
cgatgagctgaatacgctcgctcacaccctcagccatcgcatcgctcgctgcatggaaaagcgtgggattttgga

SEQ ID NO: 32034 - DNA, 75 bp, synthetic construct
  source 1..75: mol_type = other DNA
acggaaggtccgctggccggacgtactgcgctgtatgcagaaatcgaaccgaccgagcgcatgaagcagcttgtc

SEQ ID NO: 32035 - DNA, 75 bp, synthetic construct
  source 1..75: mol_type = other DNA
ataaaacagattcggcagcactgttgccctgtatcgaacaggcgagggaggatatccataccctgcgccagctgc

SEQ ID NO: 32036 - DNA, 75 bp, synthetic construct
  source 1..75: mol_type = other DNA
ataaaacggattcggcagcactgctgccctgcattgaacaggcgagggaggatatccgtaccctgcgccatctgc

SEQ ID NO: 32037 - DNA, 75 bp, synthetic construct
  source 1..75: mol_type = other DNA
agaagcccgacaaatcggaaggtctcgatactaactggcgtgacaagagtcctgcagagcgccaccgcgccatga

SEQ ID NO: 32038 - DNA, 75 bp, synthetic construct
  source 1..75: mol_type = other DNA
atgccgccaagcagcgtgagctgccaccagaacgagcgccgccactgactcccagcctgttcgatccatcacaga

SEQ ID NO: 32039 - DNA, 75 bp, synthetic construct
  source 1..75: mol_type = other DNA
cgtaatatctccgtactgccccttaatgtttatgatcccccggaacgttttatcgcttacataaaaaaaacagag

SEQ ID NO: 32040 - DNA, 75 bp, synthetic construct
  source 1..75: mol_type = other DNA
ccggccccgcagaggacgacatcaccgataccgatgatggtgatacccgtatttcagcgggtgcattctggccgg

SEQ ID NO: 32041 - DNA, 75 bp, synthetic construct
  source 1..75: mol_type = other DNA
cgagctagagcgctggctcacattggcggtcggcacctaccacggttcggtgcacaacggcctgctccaaccgcc

SEQ ID NO: 32042 - DNA, 75 bp, synthetic construct
  source 1..75: mol_type = other DNA
catccaacgacagtaacgggagaagcgctccgtcgtatcggggaactgtacgctatcgaggctgagatccgcggc

SEQ ID NO: 32043 - DNA, 75 bp, synthetic construct
  source 1..75: mol_type = other DNA
atcagcatgatgttacgtggtgattttcacccgtcggcaaaatattcacagcgtgatattgagctggcgcggcaa

SEQ ID NO: 32044 - DNA, 75 bp, synthetic construct
  source 1..75: mol_type = other DNA
ccttctggcatgatttagcggctccggtcattgctggcattcttgccagtctgatcgtgaactggctgaacaagc

SEQ ID NO: 32045 - DNA, 75 bp, synthetic construct
  source 1..75: mol_type = other DNA
tctgattacccaaccgggtgattacccggcggacaccaccacaaaacagccagccacgccatgggatacctggaa

SEQ ID NO: 32046 - DNA, 75 bp, synthetic construct
  source 1..75: mol_type = other DNA
caacgtaagccagctattacaattatgtgtcttggtattgcctatatcgcgttatttgccagacagcatatggca

SEQ ID NO: 32047 - DNA, 75 bp, synthetic construct
  source 1..75: mol_type = other DNA
ttgagcggtggggggcatgggctgcgagtgatagctctggggtagactattcacctatagcagctggttttaagg

SEQ ID NO: 32048 - DNA, 75 bp, synthetic construct
  source 1..75: mol_type = other DNA
gataaacggagagcatgtccctgaaattattctgctcaactctcatgacggtacctccagctaccagatgctgcc

SEQ ID NO: 32049 - DNA, 75 bp, synthetic construct
  source 1..75: mol_type = other DNA
gcgctgcaaacattattcgtcgtgaccgtccgttaacccgcgaggagctgtttcgcgtggtgcccagtgtgttca

SEQ ID NO: 32050 - DNA, 75 bp, synthetic construct
  source 1..75: mol_type = other DNA
atgccatcacgaataccccgcgcctgtcgtaagcgtggatgtgcaggcacaacaacagacagttcgggttactgc

SEQ ID NO: 32051 - DNA, 75 bp, synthetic construct
  source 1..75: mol_type = other DNA
atgccggtaattaacacgcatcagaatatcgcggcctttctcgacatgctggcagtgtccgaagggacggcgaat

SEQ ID NO: 32052 - DNA, 75 bp, synthetic construct
  source 1..75: mol_type = other DNA
gacgttatcaggtcgatgtcagaccgcagggggcggaaggaaagcggattcgaaaaatctttgccctgaaatcaa

SEQ ID NO: 32053 - DNA, 75 bp, synthetic construct
  source 1..75: mol_type = other DNA
atatcgccgcctttctcgacatgctggccgtgtccgaagggacggcgaatcatccgctgacgaaaaaccggggct

SEQ ID NO: 32054 - DNA, 75 bp, synthetic construct
  source 1..75: mol_type = other DNA
ttcagcagtcgctgaatttgaacgagaccttttacttgaacgcactcattccgggatagtaagagcccgcggcgc

SEQ ID NO: 32055 - DNA, 75 bp, synthetic construct
  source 1..75: mol_type = other DNA
gctcattttctgggtcgtggccgcgctggttctggtcgcgctcggatttccctacgtcatgccatttttctatta

SEQ ID NO: 32056 - DNA, 75 bp, synthetic construct
  source 1..75: mol_type = other DNA
agcccgatttaccaaaaggccaggctgcacatgtgctgcggcatacgttcgccagccattttgtgatgaacggag

SEQ ID NO: 32057 - DNA, 75 bp, synthetic construct
  source 1..75: mol_type = other DNA
gcgatgcaagaaaaacccaatttattcacctaaaatagtagaacaatctcaaattactgcttttgataaatcgac

SEQ ID NO: 32058 - DNA, 75 bp, synthetic construct
  source 1..75: mol_type = other DNA
gccggaggcgtattttcgtatcgcaccggaagactggctgcgggcagagatgtcgggggagattgtggcgctggt

SEQ ID NO: 32059 - DNA, 75 bp, synthetic construct
  source 1..75: mol_type = other DNA
atggctggaacggcggggcgttccgggcgtcgccccaagccaacggcgcgcaaggcgctggccggaaaccccggc

SEQ ID NO: 32060 - DNA, 75 bp, synthetic construct
  source 1..75: mol_type = other DNA
aggacctctttcagatcgaagagatcgtcatcggtgccccagtctccctgccgtccatgaaagcggcaatggata

SEQ ID NO: 32061 - DNA, 75 bp, synthetic construct
  source 1..75: mol_type = other DNA
ctcgttcctgtatgccctcggctggacgcaacactccgttggtgcgcaaaacattcgtacgatggcgatgatcca

SEQ ID NO: 32062 - DNA, 75 bp, synthetic construct
  source 1..75: mol_type = other DNA
actatgcccctattcgttccggtactgacattgctttcctgtcaggcgtattgctgtacctgctgaacaatgaaa

SEQ ID NO: 32063 - DNA, 75 bp, synthetic construct
  source 1..75: mol_type = other DNA
agaaccgtctggtcgatcatggttatgtcaccacccgtgttctggcaccttcgcaggatttaaaaagcggtatcc

SEQ ID NO: 32064 - DNA, 75 bp, synthetic construct
  source 1..75: mol_type = other DNA
cctgacacgctcaccacgccgttagggagtttgtggaaactgtatgtttacgcctggctggaggatacccatcaa

SEQ ID NO: 32065 - DNA, 75 bp, synthetic construct
  source 1..75: mol_type = other DNA
acaggctcctgagcctccagcgagagattttcgctttggggtcagcaaccttaaaaaaatactcgattacaacat

SEQ ID NO: 32066 - DNA, 75 bp, synthetic construct
  source 1..75: mol_type = other DNA
tcgaagcgcaagcaagctacggcattggtttacaggtaggccaacaactgagtgaatctggcctgcaagggctgc

SEQ ID NO: 32067 - DNA, 75 bp, synthetic construct
  source 1..75: mol_type = other DNA
acctgcaaacaggcgctaaagttctgccgcaggaggcgctacgcgttcagtaatgccctggacgatttgatcgtc

SEQ ID NO: 32068 - DNA, 75 bp, synthetic construct
  source 1..75: mol_type = other DNA
gaatggtcttctgctacaggttaaaagagaaggtggagaccccgatttatgtcgtgaagcgatgaatgcggtgaa

SEQ ID NO: 32069 - DNA, 75 bp, synthetic construct
  source 1..75: mol_type = other DNA
ggggctaaacaatatgggtatagcaccgcatatagtcgagctgctgttgggccatgccttgccgggagttatggc

SEQ ID NO: 32070 - DNA, 75 bp, synthetic construct
  source 1..75: mol_type = other DNA
atgaccaccccaacttttgacaccatcgaagcgcaagcaagctacggcattggtttgcaggtagggcaacaactg

SEQ ID NO: 32071 - DNA, 75 bp, synthetic construct
  source 1..75: mol_type = other DNA
tcagcggggcaatgacggacaaccaccgtggtttgaacatgaccagatgactgtcgctgaaaaaatcctgctgcg

SEQ ID NO: 32072 - DNA, 75 bp, synthetic construct
  source 1..75: mol_type = other DNA
gccggaggcgtattttcgtattgcaccggaagactggctgcgggcagagatgcagggggagattgtggcgctggt

SEQ ID NO: 32073 - DNA, 75 bp, synthetic construct
  source 1..75: mol_type = other DNA
tctggggaattaacaccctgtttggcccgtttgttctggatctgtttactgacggtgataacgccaaatgtgccg

SEQ ID NO: 32074 - DNA, 75 bp, synthetic construct
  source 1..75: mol_type = other DNA
atggccgttgctgcttcactggtaacactttatgccggtgtcgctggcgttcgctgggtattgcgtaccgttaaa

SEQ ID NO: 32075 - DNA, 75 bp, synthetic construct
  source 1..75: mol_type = other DNA
caggagctgcaaagcgggaaatggggcgaaatcgccccgttcactgtcacgcctgaacttattgcagcggcaaag

SEQ ID NO: 32076 - DNA, 75 bp, synthetic construct
  source 1..75: mol_type = other DNA
atcaagaataatctcgacgcgtttcttgctctgccaccagaaacaaaagcagaacggaagtaccgacgcgatata

SEQ ID NO: 32077 - DNA, 75 bp, synthetic construct
  source 1..75: mol_type = other DNA
gtttctgggtaaaatcctcaacaacgtgaagaagtggcagatcccgcgattcatcaacacggataaagcgcccgc

SEQ ID NO: 32078 - DNA, 75 bp, synthetic construct
  source 1..75: mol_type = other DNA
gtgtggcgtttgtcgttcgctggctgctgtgggtcgtcaggtttgtggttatctggccgctggccacaatggccc

SEQ ID NO: 32079 - DNA, 75 bp, synthetic construct
  source 1..75: mol_type = other DNA
gaaggcaaacggattgtgattctgaagtgggatgccgttccggtacttgatgctggtggtcttgatgcgttccag

SEQ ID NO: 32080 - DNA, 75 bp, synthetic construct
  source 1..75: mol_type = other DNA
ttggcattctggttttctggccgcgtctgggcatacgtttacccggccaccttccggccttgctggctggttgcg

SEQ ID NO: 32081 - DNA, 75 bp, synthetic construct
  source 1..75: mol_type = other DNA
tcagcggagaaaaaaccgtgctgactgtcggaggtcgtcatacagttaaagcacagcccggggagcagtatggac

SEQ ID NO: 32082 - DNA, 75 bp, synthetic construct
  source 1..75: mol_type = other DNA
cctggtatggaaaaaagcaccgggacaatacgctcagtatgaaacgcttctccaacggtcgcgggttctggtgtc

SEQ ID NO: 32083 - DNA, 75 bp, synthetic construct
  source 1..75: mol_type = other DNA
atgtcgcaaaaatcgcttacagccatcacgttctgcgtgacggtaatcctcatcatctggatgctacacggttcg

SEQ ID NO: 32084 - DNA, 75 bp, synthetic construct
  source 1..75: mol_type = other DNA
ccacggcgcgcagttttgacgggcgaatgacggtcacgttaaccggtcagcacaacgacaccggccagccacttt

SEQ ID NO: 32085 - DNA, 75 bp, synthetic construct
  source 1..75: mol_type = other DNA
ttaaatatgccgatgcaacagggcacccggccaccacgcttatcggagggatggtgccgggatattcctgtgagt

SEQ ID NO: 32086 - DNA, 75 bp, synthetic construct
  source 1..75: mol_type = other DNA
attctcgaccagtttctggatgaaaaagaaggtaaccacaccacggcataccgtgatggtgcgggtatctggacc

SEQ ID NO: 32087 - DNA, 75 bp, synthetic construct
  source 1..75: mol_type = other DNA
tcaggcgatgatttaattctacgtaaaaaggaagatagtacagaagtccggattgaaggattctgggaagaatgc

SEQ ID NO: 32088 - DNA, 75 bp, synthetic construct
  source 1..75: mol_type = other DNA
tggcgcatgcacggcggtgtgcgccagcggagtcgtgcggcttcgtggtgagaacgccggagggggagcagtatc

SEQ ID NO: 32089 - DNA, 75 bp, synthetic construct
  source 1..75: mol_type = other DNA
ggcatcaggggcgatgattggctctgtggtgcctggaataggtacagctgttggcgctattggtggcggtattat

SEQ ID NO: 32090 - DNA, 75 bp, synthetic construct
  source 1..75: mol_type = other DNA
atgaacgcaaaaatcaaatacggcctgtcagctgccgttctggcgctgattgccgcaggggcttctgcgcctgaa

SEQ ID NO: 32091 - DNA, 75 bp, synthetic construct
  source 1..75: mol_type = other DNA
ctgacggcaaaaggcaccgtacagctgagcagtgccacggacagtcaatcagaaactgaggctgccacgccgaag

SEQ ID NO: 32092 - DNA, 75 bp, synthetic construct
  source 1..75: mol_type = other DNA
ttgttgcgttctggttgttcgcatcatgtatgcccatcatcttcacagcaaggtatatggaaaaagttgatgttt

SEQ ID NO: 32093 - DNA, 75 bp, synthetic construct
  source 1..75: mol_type = other DNA
cgcaacagtggcgcgctacagaaagccattaatcaacgtatggcgcgtgaacgcgtcctgacccttcttaacgcg

SEQ ID NO: 32094 - DNA, 75 bp, synthetic construct
  source 1..75: mol_type = other DNA
gaagttgtcgaaggaaaaatgcgaccaggtcaacgccattgagcgtgataaggcgctggcatgggtggagcgcaa

SEQ ID NO: 32095 - DNA, 75 bp, synthetic construct
  source 1..75: mol_type = other DNA
catcagagtgccgctgaccgaaccccagaaagcggggatcgcgtcattctgtccgtacaacattggtcccggtaa

SEQ ID NO: 32096 - DNA, 75 bp, synthetic construct
  source 1..75: mol_type = other DNA
atgatattatttgttggatttttgttgatggaaattgttatgcctcagattagccggaccgcactggtaccctac

SEQ ID NO: 32097 - DNA, 75 bp, synthetic construct
  source 1..75: mol_type = other DNA
tttgaacacactgacgacgggctgacggagcacggtcagcagtgcccttatgtcagaccggaacgcagggagata

SEQ ID NO: 32098 - DNA, 75 bp, synthetic construct
  source 1..75: mol_type = other DNA
cagcacaggaaggacgtgttaaagctggcagggaatacgggcatgatgttactggggatagtctttctcctgttt

SEQ ID NO: 32099 - DNA, 75 bp, synthetic construct
  source 1..75: mol_type = other DNA
tgaggaagaggcaagaaaattactgcgttgggggcaacaaaactttactacggtgcaaattttgcaccgtgggaa

SEQ ID NO: 32100 - DNA, 75 bp, synthetic construct
  source 1..75: mol_type = other DNA
gaaattccgtgctgtaggtcagggttatgcgggggggctggcatctgtatgtgctcagtacggcattaacgcgtc

SEQ ID NO: 32101 - DNA, 75 bp, synthetic construct
  source 1..75: mol_type = other DNA
tgtcagaccggaacgcagggagatacaactgattaagcgtctgcagcaattcgtaccggatgccttacccgtggt

SEQ ID NO: 32102 - DNA, 75 bp, synthetic construct
  source 1..75: mol_type = other DNA
tgccatacagcgtgccacagatgccctgcgtgaagcccttctgtcctggcttgcgaagggtgaaaaaattaatta

SEQ ID NO: 32103 - DNA, 75 bp, synthetic construct
  source 1..75: mol_type = other DNA
atgttcttcggcaacgatcacggtggagagcgtagtgcgctgctgtacgggctgatcggcgcctgccgactgaac

SEQ ID NO: 32104 - DNA, 75 bp, synthetic construct
  source 1..75: mol_type = other DNA
caggtgaaagggcatgacctggcaaaatgggtataccaggaagaacccgaagatgctcagagcaacgcaataact

SEQ ID NO: 32105 - DNA, 75 bp, synthetic construct
  source 1..75: mol_type = other DNA
tttgaacacactgacgacgggctgacggagcacgcgcagcaatgtccttatgtcaggccggaacgcagagaaata

SEQ ID NO: 32106 - DNA, 75 bp, synthetic construct
  source 1..75: mol_type = other DNA
tctggaaacagaacgtggtctgaatctttccattcaggccgttccccgtgaaggcgcggggcgtaccattcagct

SEQ ID NO: 32107 - DNA, 75 bp, synthetic construct
  source 1..75: mol_type = other DNA
tgttctggtttatgaggtcgacagccagtggggaaaagtgtatatcctgcgtgtattgcatactgcacagaagtg

SEQ ID NO: 32108 - DNA, 75 bp, synthetic construct
  source 1..75: mol_type = other DNA
agtgattaaggccgatgcgtatgtgatggcgtttggttcttactcgacggcgatgctcaaaggcattgttgatat

SEQ ID NO: 32109 - DNA, 75 bp, synthetic construct
  source 1..75: mol_type = other DNA
ttgctgccggtgaggcatcctggggtatcagtaacacgtggtcgctttatggaggcagtattgttgccggggatt

SEQ ID NO: 32110 - DNA, 75 bp, synthetic construct
  source 1..75: mol_type = other DNA
ttgcgctattcgctatatggagctgcatggctatcttgatcacggtttccgtatgctgtctcacccgaccctgga

SEQ ID NO: 32111 - DNA, 75 bp, synthetic construct
  source 1..75: mol_type = other DNA
aaaaagcagcatcggttttggtggaattagccaaagagtattcatcttataatgggtgtagacgaaggcaattaa

SEQ ID NO: 32112 - DNA, 75 bp, synthetic construct
  source 1..75: mol_type = other DNA
tggcagctattcaggagaatctgaacgcgccaaagaatcagtacaactcattcggtaaatataaatacagaagct

SEQ ID NO: 32113 - DNA, 75 bp, synthetic construct
  source 1..75: mol_type = other DNA
gcgctgggtggatgtgccgctggggcattgattatcggcgctggcgtaggttctgtggtaacagagtggcggcgc

SEQ ID NO: 32114 - DNA, 75 bp, synthetic construct
  source 1..75: mol_type = other DNA
actaatgatccttctgcccgttctgtgggctttgatattggaagtaccaacagaactaaaatcagatttacttac

SEQ ID NO: 32115 - DNA, 75 bp, synthetic construct
  source 1..75: mol_type = other DNA
aggcgtagagatggtaatgccgggcgacaacatcaaaatggttgttaccctgatccacccgatcgcgatggacga

SEQ ID NO: 32116 - DNA, 75 bp, synthetic construct
  source 1..75: mol_type = other DNA
aaattgtgaaacgaagtgagggcaaatcttccgttgcgaaagctgcttatcatgctcgtacaaggataacagatg

SEQ ID NO: 32117 - DNA, 75 bp, synthetic construct
  source 1..75: mol_type = other DNA
tgagccgctttctggtaaatggcgggggcgtgaatgactttctgtccacgcttgatcctgatgaggacctgttaa

SEQ ID NO: 32118 - DNA, 75 bp, synthetic construct
  source 1..75: mol_type = other DNA
caggccgctgctgttgagcaggggctgagccgtcaggcgctggctgcacaaaaagccgggatttccgtcgggcag

SEQ ID NO: 32119 - DNA, 75 bp, synthetic construct
  source 1..75: mol_type = other DNA
cagctgttcttacactggattcaacccgtttttctgaagaggctgcacgggtaaagaaagaactgggtgaagcca

SEQ ID NO: 32120 - DNA, 75 bp, synthetic construct
  source 1..75: mol_type = other DNA
agaaaagccgctttaaaatatcatccagatcgtaacccgttaggggctgaactgatgaaagcggtaaatgcagct

SEQ ID NO: 32121 - DNA, 75 bp, synthetic construct
  source 1..75: mol_type = other DNA
gaatgcgcaacttgggctttcagccgccacgttgcaggccgatcttgaaaaggccagagagatggcagcaaagga

SEQ ID NO: 32122 - DNA, 75 bp, synthetic construct
  source 1..75: mol_type = other DNA
tcgcgcgttttgcttctgcatccggtgtggaggtggacaaggttgcagaggctttcggaaaactgaccaccgacc

SEQ ID NO: 32123 - DNA, 75 bp, synthetic construct
  source 1..75: mol_type = other DNA
ctgatgaaagcggtgtatgagatggcccgtaaaggtgcgcaggatgagctccggctgcagttgcgtgatggcggt

SEQ ID NO: 32124 - DNA, 75 bp, synthetic construct
  source 1..75: mol_type = other DNA
cagcagcgccgggatttatggaaagcggaaaatcagtatgtggtcctgaaagaggccgccacgaaacggcagtta

SEQ ID NO: 32125 - DNA, 75 bp, synthetic construct
  source 1..75: mol_type = other DNA
ggctcaaaattttttggttttgatatggataacgaattcatcagtggttttgatgtaggagcatggggagtatta

SEQ ID NO: 32126 - DNA, 75 bp, synthetic construct
  source 1..75: mol_type = other DNA
gaaaactgcagcacgcggacctgcgcgactataatatggtgcaaaaaatcgtctatctgcttgttcttcttgacg

SEQ ID NO: 32127 - DNA, 75 bp, synthetic construct
  source 1..75: mol_type = other DNA
tgggcagattttctggatgcgaacagagaacaatgtatcagcccgtttgaatatgcaaagattaacaatccatta

SEQ ID NO: 32128 - DNA, 75 bp, synthetic construct
  source 1..75: mol_type = other DNA
ttcctgctgaacgcgagcctctgccaggcgtaaatttctcgcaccggggttccaagatgagaactccgcatcttg

SEQ ID NO: 32129 - DNA, 75 bp, synthetic construct
  source 1..75: mol_type = other DNA
cgcgccctatacgccgaaagagccggttaagccacgttatacatggacttatacgcctcagtaccgttctgttgc

SEQ ID NO: 32130 - DNA, 75 bp, synthetic construct
  source 1..75: mol_type = other DNA
gtcagtctgccgttatcggttttcgatccccaggactaccatccactgctgattaccgtttccggaaaaaacgtt

SEQ ID NO: 32131 - DNA, 75 bp, synthetic construct
  source 1..75: mol_type = other DNA
gggaaatatttgtgcttaccagttccggctggataatggcggaaacgatgaaggatttggccccctcaccatcac

SEQ ID NO: 32132 - DNA, 75 bp, synthetic construct
  source 1..75: mol_type = other DNA
tggaacgtcagatgagccatcaggagcgtaatggtgtacgtgctgcgtatatccataaagcagaacatctggaag

SEQ ID NO: 32133 - DNA, 75 bp, synthetic construct
  source 1..75: mol_type = other DNA
agaatatgaaatgattaattataatgatggttggtattatgttcttgctcgttatgataattgtctggttttgtc

SEQ ID NO: 32134 - DNA, 75 bp, synthetic construct
  source 1..75: mol_type = other DNA
tcgttgctaagtacgctgctaggtggttatgaagcagcgcgttatatccactttttgtgcatgagtgcgatgacg

SEQ ID NO: 32135 - DNA, 75 bp, synthetic construct
  source 1..75: mol_type = other DNA
ttgggctgtatttcggcggagacacagacaaccagccagtggatttccgtcaggtaggttttcaccgtaatgctg

SEQ ID NO: 32136 - DNA, 75 bp, synthetic construct
  source 1..75: mol_type = other DNA
agtgagctcattccaggctgacaatatcattgtgcaccgtaatgaacctgactacctttcccgtcgcatttataa

SEQ ID NO: 32137 - DNA, 75 bp, synthetic construct
  source 1..75: mol_type = other DNA
atgacaaaaccagtatcaatcagcaagaagccccgtaaacaacatacgcctgaatttcgtaacgaagccctgaaa

SEQ ID NO: 32138 - DNA, 75 bp, synthetic construct
  source 1..75: mol_type = other DNA
gaactcattataagtctcctcatagattgcacatcgatagcgacataccaacaccttcatcagagcctattaata

SEQ ID NO: 32139 - DNA, 75 bp, synthetic construct
  source 1..75: mol_type = other DNA
cttcctggtgggcatattatcaactagcccgcaacgcttattttttattaggcattccgtgcttagctttatacg

SEQ ID NO: 32140 - DNA, 75 bp, synthetic construct
  source 1..75: mol_type = other DNA
aagttaacgccatgtatccggagcttaagttgcacgccattgggtgggttaagcataaatgtattcctggtgcta

SEQ ID NO: 32141 - DNA, 75 bp, synthetic construct
  source 1..75: mol_type = other DNA
tcgataagctaactgccacgataaaggattcagacggtaaaacagaggagctggtcaaggttatgcaggataacc

SEQ ID NO: 32142 - DNA, 75 bp, synthetic construct
  source 1..75: mol_type = other DNA
gaatacaagcagacatggaaaacactggatgacgaactggcctacgctctctggcctggtgatgtggatgccgga

SEQ ID NO: 32143 - DNA, 75 bp, synthetic construct
  source 1..75: mol_type = other DNA
acctgacgacaaagggcgtgtttgagaatgaagaaacagacctgggcactgttgatgttctccagtcatcagaaa

SEQ ID NO: 32144 - DNA, 75 bp, synthetic construct
  source 1..75: mol_type = other DNA
gggatccagacccgcgattctgtaaaccagaaccagcatgaatcggaacggaactaccaaaaagcggaacaaaac

SEQ ID NO: 32145 - DNA, 75 bp, synthetic construct
  source 1..75: mol_type = other DNA
aagttaacgccatgtatccggagcttaagctgcatgccatcgggtgggttaagcataaatgtaagcctggtgcca

SEQ ID NO: 32146 - DNA, 75 bp, synthetic construct
  source 1..75: mol_type = other DNA
catccaccagcaggttgtggcaccatctgatgattgaccttgaaacaatgggaaaaaatcctgatgcgccaataa

SEQ ID NO: 32147 - DNA, 75 bp, synthetic construct
  source 1..75: mol_type = other DNA
tgcaaagtggaagtcgaaccatctgtagagcgtgaggggccgttctacttcctcttcaccgacaaggatggcgaa

SEQ ID NO: 32148 - DNA, 75 bp, synthetic construct
  source 1..75: mol_type = other DNA
gcctcggcagatgatgcagccggtgcgcagattatcattgcgaaagccggtggggatgttgatgccattcaggcg

SEQ ID NO: 32149 - DNA, 75 bp, synthetic construct
  source 1..75: mol_type = other DNA
tttgtcaacagtagcctgaccctcgaaaaaggagcaaaacttacggctcagggcggtattttcagcaccgggact

SEQ ID NO: 32150 - DNA, 75 bp, synthetic construct
  source 1..75: mol_type = other DNA
ctgccacaacagataaacggcaatgtgttcagttacacctcgtccggtttcaaaagcgcctggcgtaccgctctt

SEQ ID NO: 32151 - DNA, 75 bp, synthetic construct
  source 1..75: mol_type = other DNA
acaacatggaacctgaccgggtacaggatggcagaaaatcctgccgcaacccaaagtgcctcaggccttgcatct

SEQ ID NO: 32152 - DNA, 75 bp, synthetic construct
  source 1..75: mol_type = other DNA
gcagcgcgatttgattgcctggtttgacagcagtgagacccgggcctacaaaatccgcttcccgaacggtacggt

SEQ ID NO: 32153 - DNA, 75 bp, synthetic construct
  source 1..75: mol_type = other DNA
tgacacatgctgaaaacgcgctcgtttgtggcaaaaatatgcgagaaatcttatcaacctggcttgatgggacaa

SEQ ID NO: 32154 - DNA, 75 bp, synthetic construct
  source 1..75: mol_type = other DNA
caaagcgccaacgccagccgcagggaataacaccacgcagattgcgaccaccgcgtttgttcaggcggctctgac

SEQ ID NO: 32155 - DNA, 75 bp, synthetic construct
  source 1..75: mol_type = other DNA
cacgtaacgattcactggctgcacggaccgatacctggttgcagtcgttgctggtctggtcacccggacagcggg

SEQ ID NO: 32156 - DNA, 75 bp, synthetic construct
  source 1..75: mol_type = other DNA
ttccctggtatgaaggaaatatcctgtttgcctttgcggttgtggcacaggtgctgatgtggagtgaaacgcgca

SEQ ID NO: 32157 - DNA, 75 bp, synthetic construct
  source 1..75: mol_type = other DNA
cctgagcacgtggacaactcacgtggtgaagtcacaaaaaacataagcatatcctgtccgtataagagtggctct

SEQ ID NO: 32158 - DNA, 75 bp, synthetic construct
  source 1..75: mol_type = other DNA
caacatcaacatttactttcatgtcggtgctgttcagaaacggagatctgaatggcggtgcatttagtgctacag

SEQ ID NO: 32159 - DNA, 75 bp, synthetic construct
  source 1..75: mol_type = other DNA
tgcaccgcctgcggtcagagcggtggcggcaactgccctgattgtggcgcggtgatgggcgacgcaacataccag

SEQ ID NO: 32160 - DNA, 75 bp, synthetic construct
  source 1..75: mol_type = other DNA
ttgtcggaacggtgctggattatgccgggcgcggcagtcagcgctggtcaaaatggcgtccgacactctgtctat

SEQ ID NO: 32161 - DNA, 75 bp, synthetic construct
  source 1..75: mol_type = other DNA
ttgtggagggtaaagctgataatgtcgtactggaaaatggcggacgtctggatgtgctgagcggacacacagcca

SEQ ID NO: 32162 - DNA, 75 bp, synthetic construct
  source 1..75: mol_type = other DNA
aacatgacgctggaaaatccttcaccagagctgctcactgtattgattcgtgaactgaccgggaggggaagatga

SEQ ID NO: 32163 - DNA, 75 bp, synthetic construct
  source 1..75: mol_type = other DNA
cgctggtcaaatcaggcatcacgccacaggaggtggatgtggttgtcaccctgccactgagcgagtatttcgaca

SEQ ID NO: 32164 - DNA, 75 bp, synthetic construct
  source 1..75: mol_type = other DNA
ctcagactctggcaaaacgaagggtgtatatcgcagcgtcttccggtgacaaccacttctgacgcaggcgttgaa

SEQ ID NO: 32165 - DNA, 75 bp, synthetic construct
  source 1..75: mol_type = other DNA
cctggcagtgtctgccggtggtaaggcaacagatgtcaccatgacatccggtggtgccctgattgcagacagtgg

SEQ ID NO: 32166 - DNA, 75 bp, synthetic construct
  source 1..75: mol_type = other DNA
ccatacttaccctttccgggaagacggtgaacaacgataccctgaccatccgtgaaggcgatgcactcctgcagg

SEQ ID NO: 32167 - DNA, 75 bp, synthetic construct
  source 1..75: mol_type = other DNA
atgaaggcgggattgcaacgggtaccgtcattaatgagaagggctggcaggccgtcaaatccggcgcaatggcaa

SEQ ID NO: 32168 - DNA, 75 bp, synthetic construct
  source 1..75: mol_type = other DNA
tgccaccacggaggaaggggcctttgtccaggggaataagctgcaggccggtgcctttaactactccctcaaccg

SEQ ID NO: 32169 - DNA, 75 bp, synthetic construct
  source 1..75: mol_type = other DNA
ctggataacagaggtgagcagtgggtacacgggggagggaaagctgccggtacaattattaaccaggatggttac

SEQ ID NO: 32170 - DNA, 75 bp, synthetic construct
  source 1..75: mol_type = other DNA
aacagcgtccgtctcagcattcagggcggtcatctcggtcacgataacaacggcggtattgcccgtggggccacg

SEQ ID NO: 32171 - DNA, 75 bp, synthetic construct
  source 1..75: mol_type = other DNA
ggaaagctaagggcgggatcgctcgcgcaaagtcgctgactaaagagcagcgttctgaaatagcaaagaaagcag

SEQ ID NO: 32172 - DNA, 75 bp, synthetic construct
  source 1..75: mol_type = other DNA
aaaaaattcaggcgttgttaccagcgatcgaaaaggcaatgccacctttgctggtggccagaatgcgcagccaca

SEQ ID NO: 32173 - DNA, 75 bp, synthetic construct
  source 1..75: mol_type = other DNA
cctgacggcactggagcagtccggtgagatgggccggaaaatggatgcctttaaggagcgggtgatccgcaacag

SEQ ID NO: 32174 - DNA, 75 bp, synthetic construct
  source 1..75: mol_type = other DNA
agctgggaatgacgttcccggaactgtatgacgacagccatccggaagccctggctcgcaatacccagaaaattt

SEQ ID NO: 32175 - DNA, 75 bp, synthetic construct
  source 1..75: mol_type = other DNA
aatggcctgagatccagacagaattacgcacctggaaaaaacgtcgcgaagccgaacgcaaagaaaccgggaaat

SEQ ID NO: 32176 - DNA, 75 bp, synthetic construct
  source 1..75: mol_type = other DNA
gcatggcgatgaatgcctgggcgcatccggacggtgaaaaagttccggcagctgaaataaccagggcttattttg

SEQ ID NO: 32177 - DNA, 75 bp, synthetic construct
  source 1..75: mol_type = other DNA
gtatttccgcgcggcggcggctgcacgttaactttcccggtaaaagccggcgatgaatgcctggtgatttttgcc

SEQ ID NO: 32178 - DNA, 75 bp, synthetic construct
  source 1..75: mol_type = other DNA
cccgtgggggctgcgactggtgaccgatgccgaatctattctgcactttgcagagattggcgtggtgctgatgct

SEQ ID NO: 32179 - DNA, 75 bp, synthetic construct
  source 1..75: mol_type = other DNA
cccgagctgttaacccaataggccacacaattggtatcgctcagaatgtgaaggctgttaatgttcagacggcta

SEQ ID NO: 32180 - DNA, 75 bp, synthetic construct
  source 1..75: mol_type = other DNA
ctaccgggctcagaacaacaacgaatgattgagctatttgaagtccggctaaaagaaatcgatgagtatgtagaa

SEQ ID NO: 32181 - DNA, 75 bp, synthetic construct
  source 1..75: mol_type = other DNA
agtgcgttcaataaggttcacgctgatgcatgggcttctggtgatccatcgggactatttaagtttgcccaggaa

SEQ ID NO: 32182 - DNA, 75 bp, synthetic construct
  source 1..75: mol_type = other DNA
cgggcaataggcgttgagcttgaggctgaacggtttgagcagacggtgagcgagataagagaaattctgacgtgt

SEQ ID NO: 32183 - DNA, 75 bp, synthetic construct
  source 1..75: mol_type = other DNA
acgaatctctggtgtacggcgtgttccccaaccatgacggaacgttcaccgcgatgacgtataccaaaagcaaaa

SEQ ID NO: 32184 - DNA, 75 bp, synthetic construct
  source 1..75: mol_type = other DNA
catatgtcacgacatgtcacgacgagtcacgacagataaagatacagataaagaattaaaccccacacataacgc

SEQ ID NO: 32185 - DNA, 75 bp, synthetic construct
  source 1..75: mol_type = other DNA
gccatgacgtataccaaaagcaaaacatttaaaactgaaacaggcgcacgtcgctggcttgccaaaaataccagc

SEQ ID NO: 32186 - DNA, 75 bp, synthetic construct
  source 1..75: mol_type = other DNA
ctgagccgcacttcagagatgaaaaaccgtttgatgccatcgtttctaacccaccgtattcggtgaaatggattg

SEQ ID NO: 32187 - DNA, 75 bp, synthetic construct
  source 1..75: mol_type = other DNA
acgaatctctggtgtacggcgtgtttcccaaccaggacggcacattcaccgcgatgacgtataccaaaagcaaaa

SEQ ID NO: 32188 - DNA, 75 bp, synthetic construct
  source 1..75: mol_type = other DNA
tcagaatcaggtgactggtgatgtcaaaattgccatggataacatcaataccaaaacccgggaattactgacggg

SEQ ID NO: 32189 - DNA, 75 bp, synthetic construct
  source 1..75: mol_type = other DNA
aacataaatcaagagaaaaaggtctgtcactaatagaatcagcaatggttttagctttatcagctgtagtaattg

SEQ ID NO: 32190 - DNA, 75 bp, synthetic construct
  source 1..75: mol_type = other DNA
aaatacagtaatttttctattgtacaatttccagagctcaatcatcaggagactttctctgctgcactctggaat

SEQ ID NO: 32191 - DNA, 75 bp, synthetic construct
  source 1..75: mol_type = other DNA
ctacgaactcgaaccacaatctgccagttgcgccaaatctgctgaaccagacgttcgctcctacagcaccaaatc

SEQ ID NO: 32192 - DNA, 75 bp, synthetic construct
  source 1..75: mol_type = other DNA
ttcgtttcacttccagaggacgtgaatacgaagttgacgaacggctgattaaaacgctcgaccgtcaccgttcgc

SEQ ID NO: 32193 - DNA, 75 bp, synthetic construct
  source 1..75: mol_type = other DNA
aaactaaaacccggtgacacactgatggtctggaaactggacaggctggggcgcagtatgcgccaccttgttgcg

SEQ ID NO: 32194 - DNA, 75 bp, synthetic construct
  source 1..75: mol_type = other DNA
cgtagctgcgaaagcaaataccaatgacagactgaatgcagatttaaacagcatcttcgttgctatcgaaagttc

SEQ ID NO: 32195 - DNA, 75 bp, synthetic construct
  source 1..75: mol_type = other DNA
tgagaaatgaactgatcccgctgcagaagagattattcgagataaatgtatggctaggagaaaatgtcattactt

SEQ ID NO: 32196 - DNA, 75 bp, synthetic construct
  source 1..75: mol_type = other DNA
tcgcaacgatatcgaaatgcttcgcgaaaacatggtgaagtcgaaaggccgcaacaactttaaaaatctgtttct

SEQ ID NO: 32197 - DNA, 75 bp, synthetic construct
  source 1..75: mol_type = other DNA
tttttgtgacaaatgaattagtacctctacaaaaaaaaatccatgaatttaatcagtggatagggatgcatatta

SEQ ID NO: 32198 - DNA, 75 bp, synthetic construct
  source 1..75: mol_type = other DNA
gggtagtgcaggagattcacccagaaccagtcactcttttgaaccagtcaaagaaccagtcaatgaatcaactat

SEQ ID NO: 32199 - DNA, 75 bp, synthetic construct
  source 1..75: mol_type = other DNA
acacttgatgccgaagatgttgtccctacaacctccccccggtcgcaacctgtagctgctgcgacacctgaatca

SEQ ID NO: 32200 - DNA, 75 bp, synthetic construct
  source 1..75: mol_type = other DNA
taacaccgttgcaggagcgattcaaagaaattaatgactggctgggggtgaaggtaataagctttaaagattaca

SEQ ID NO: 32201 - DNA, 75 bp, synthetic construct
  source 1..75: mol_type = other DNA
gccggtagaacataaaacggacagcctgagggcagcatggaaacaacagggcgaagatggacgccgcgagctgac

SEQ ID NO: 32202 - DNA, 75 bp, synthetic construct
  source 1..75: mol_type = other DNA
ggagcgagaacgggggcgacggtgacgcatttgtcagggaagaacgtgagattatgcgggtaatgcgtcaggcgc

SEQ ID NO: 32203 - DNA, 75 bp, synthetic construct
  source 1..75: mol_type = other DNA
atgggtaaaggtggcggcagggcgcacacgccggttgaggtaaaggacaatcttaagtccacgcagatgatgagc

SEQ ID NO: 32204 - DNA, 75 bp, synthetic construct
  source 1..75: mol_type = other DNA
tggaggaaaagcgcgtaaaccgccttgtaacagtccctgcggtgctgctggaaaaagtgatggtgatggctggta

SEQ ID NO: 32205 - DNA, 75 bp, synthetic construct
  source 1..75: mol_type = other DNA
tgaaaatgctattgttgataactctaaaccagcatggatctactttactggtggaggaagccagtctttccgaga

SEQ ID NO: 32206 - DNA, 75 bp, synthetic construct
  source 1..75: mol_type = other DNA
gggaggattacggtaaggacctgtggagcgcatatcagaccatccaggagaatatgctgaaaggcgggatttccg

SEQ ID NO: 32207 - DNA, 75 bp, synthetic construct
  source 1..75: mol_type = other DNA
gagtatggcagcgagttcggcggctttttccccgtccaggtccgtttcacgcctgcccacgaacgttttcacctg

SEQ ID NO: 32208 - DNA, 75 bp, synthetic construct
  source 1..75: mol_type = other DNA
acgctatacgtatatccccaccatcaccgtgctggaaagtctgcagcgggaaggctttcagccgttcttcgcctg

SEQ ID NO: 32209 - DNA, 75 bp, synthetic construct
  source 1..75: mol_type = other DNA
ccagacccgtgtgcgcgaccagagccgccgggaatataccaaacatatgctgcgtctgcggcgggccggacagat

SEQ ID NO: 32210 - DNA, 75 bp, synthetic construct
  source 1..75: mol_type = other DNA
ttgaccggattgaggaaaagcgtgatgccatgcagtcgctgctcttaccgccaccggcacgtcaggcgctggcac

SEQ ID NO: 32211 - DNA, 75 bp, synthetic construct
  source 1..75: mol_type = other DNA
atgtcatccattgatgccgctgtcgttgttgacgttacgcgtctccagcgggtgtttgcccggcttcagtttgtg

SEQ ID NO: 32212 - DNA, 75 bp, synthetic construct
  source 1..75: mol_type = other DNA
aacattatcaggggccgtatcgtccgaaagatgatggcgatgaggcgaagggcagggcactgaaacagcatgtga

SEQ ID NO: 32213 - DNA, 75 bp, synthetic construct
  source 1..75: mol_type = other DNA
cgtgcgaaaaaccggcagaaatgctgcagcagataatcagcgcaagtagtcgtcctggtgatctggttgcggatt

SEQ ID NO: 32214 - DNA, 75 bp, synthetic construct
  source 1..75: mol_type = other DNA
aattgcaggcgttgtttgcgcgtgttgcggcagaaaaacatcagcgcggggaactggaaaagccacaccaccagc

SEQ ID NO: 32215 - DNA, 75 bp, synthetic construct
  source 1..75: mol_type = other DNA
ggaattcacgctgcgattaagcattctgacaagcgaacagcctgttctggtgctacgtatcgtgcgtgttgaagc

SEQ ID NO: 32216 - DNA, 75 bp, synthetic construct
  source 1..75: mol_type = other DNA
ggcggtgcaggaagaaatggctaacgaatttcgtgatctgcttgttgagaaattcaaagacagcaaagtagaaac

SEQ ID NO: 32217 - DNA, 75 bp, synthetic construct
  source 1..75: mol_type = other DNA
aagataagcacacatccagaagcgagaactatacctggatccccaccatcaccgtgctggaaagcctgcagcggg

SEQ ID NO: 32218 - DNA, 75 bp, synthetic construct
  source 1..75: mol_type = other DNA
gtttacggcgatccggttgaccctggctggtcgggattttactggatacgttttgttaacgcggcaggagtgaaa

SEQ ID NO: 32219 - DNA, 75 bp, synthetic construct
  source 1..75: mol_type = other DNA
accgtctggcgctgactgttgataattcaacgatcgacgacaactacgaacactacacatataacggcacttaca

SEQ ID NO: 32220 - DNA, 75 bp, synthetic construct
  source 1..75: mol_type = other DNA
gcagcgaggtctgcttccgcagcgaagacatccgagacgaacgcgaaagcgtcggaaaccagcgcagaatcctca

SEQ ID NO: 32221 - DNA, 75 bp, synthetic construct
  source 1..75: mol_type = other DNA
gctgattggcacggcactgtacggtctgctgctggcaatctgtctgctgatcagaaaaccggcaccggtggcggc

SEQ ID NO: 32222 - DNA, 75 bp, synthetic construct
  source 1..75: mol_type = other DNA
atccggcaattcgccagttaatcggacatattgataacatcccggccccggaactggaatcacgctggccccgtt

SEQ ID NO: 32223 - DNA, 75 bp, synthetic construct
  source 1..75: mol_type = other DNA
tcgttttacaactggaagttcaactggaaacagtttaccacgcgattgagtttggtaagaaaaatggtattgaag

SEQ ID NO: 32224 - DNA, 75 bp, synthetic construct
  source 1..75: mol_type = other DNA
caggtcgtccccagcgtattcggggaagataagcacacatccagaagcgagaactatacctggatccccaccatc

SEQ ID NO: 32225 - DNA, 75 bp, synthetic construct
  source 1..75: mol_type = other DNA
tgacgaacatcagcccgtcaccaccgctgacattctgacaccacgacgcagggaggattacggtaaggacctgtg

SEQ ID NO: 32226 - DNA, 75 bp, synthetic construct
  source 1..75: mol_type = other DNA
ggtttttataccaccaagcgcaccggcgggatgctggtcgattcgcaggccatcaaactgctgaagattgcagcg

SEQ ID NO: 32227 - DNA, 75 bp, synthetic construct
  source 1..75: mol_type = other DNA
ctataccactgtctggggacagcgtgcacctctgtactacagcccgggttacggccctgcttcactgtacgacta

SEQ ID NO: 32228 - DNA, 75 bp, synthetic construct
  source 1..75: mol_type = other DNA
atggctgttgatattaaagacgttgaacaggtcgcgcaggatttgcagcagaagtttgacgattttaaggcaaaa

SEQ ID NO: 32229 - DNA, 75 bp, synthetic construct
  source 1..75: mol_type = other DNA
tgtggcgcaggggaatcagctgttcatgaacgacgtgttcctgaagcgactgtttgcggtgagtatcacgtcatc

SEQ ID NO: 32230 - DNA, 75 bp, synthetic construct
  source 1..75: mol_type = other DNA
gtggtggtggatgataacggcgtggggtttcgctacagcttcagcgccctgaaggaccgccacacggcggtggag

SEQ ID NO: 32231 - DNA, 75 bp, synthetic construct
  source 1..75: mol_type = other DNA
gagcatactgatatttactcctcatgccgtctgatagtgcggaaaaacggtgctgaaatttataaccgtaccgcg

SEQ ID NO: 32232 - DNA, 75 bp, synthetic construct
  source 1..75: mol_type = other DNA
cctgccgttcgccagccgctggcggaagataaatcattactgccatttttcagcgatgagcgggtaattcgtgct

SEQ ID NO: 32233 - DNA, 75 bp, synthetic construct
  source 1..75: mol_type = other DNA
accgtggcatttgaagagaagtatggctcccagctggagttgatatttcgttttatcgatcgtgcgctggcaatt

SEQ ID NO: 32234 - DNA, 75 bp, synthetic construct
  source 1..75: mol_type = other DNA
ctgctggggcaggagctgaacgatcgtattaatgcctcggcattgcgcagtgaagttgagcaactggaggatgag

SEQ ID NO: 32235 - DNA, 75 bp, synthetic construct
  source 1..75: mol_type = other DNA
gaaggaccgccacacggcggtggaggtgaattacaccgacccgcagaacggctggcagacctccacggaactggt

SEQ ID NO: 32236 - DNA, 75 bp, synthetic construct
  source 1..75: mol_type = other DNA
tcgaccgcctgcgttttacgtttggtgtgcaggctctggtggaaaccacgtctcagggggaccgcaatccgtcag

SEQ ID NO: 32237 - DNA, 75 bp, synthetic construct
  source 1..75: mol_type = other DNA
ctgtgggacatgctcacccatccgcgttatggcatgggacaacgtctcggggcagcggaggtggataaatggacc

SEQ ID NO: 32238 - DNA, 75 bp, synthetic construct
  source 1..75: mol_type = other DNA
ctggcattgcctacggaacatccgctggtagtgcgggatactggtttttgcagtggttggatcaggtcagtccat

SEQ ID NO: 32239 - DNA, 75 bp, synthetic construct
  source 1..75: mol_type = other DNA
gtgaccctggagccccgtatcttcggctggatggaccgtctgtgtgaagactactgcggtggtatctggagtctg

SEQ ID NO: 32240 - DNA, 75 bp, synthetic construct
  source 1..75: mol_type = other DNA
atgacaaccttttcgcatagctccaccacaccttctgtttccgtaactactgcatcagggaataaccagtctcaa

SEQ ID NO: 32241 - DNA, 75 bp, synthetic construct
  source 1..75: mol_type = other DNA
tgcatcagggaatgaccagtctcagctggttgccaccatagtccctgatgaacagcgcatcagcttctggccgca

SEQ ID NO: 32242 - DNA, 75 bp, synthetic construct
  source 1..75: mol_type = other DNA
aggttccccgccagctgcgacagtcacgccatcgtcgtccgttaccggagcatctgccccgcgaaataaaccgcc

SEQ ID NO: 32243 - DNA, 75 bp, synthetic construct
  source 1..75: mol_type = other DNA
aactgcgtcgtgaggttgaacaggctgaagccctgctgaaacaacgcgagcaggaaagcgatcgttacagtgggc

SEQ ID NO: 32244 - DNA, 75 bp, synthetic construct
  source 1..75: mol_type = other DNA
gtgctgaagcgtataccggtcgtgaagtgcaggatattcccggtgtgctggccgtgtttgcagaacgccgtaagg

SEQ ID NO: 32245 - DNA, 75 bp, synthetic construct
  source 1..75: mol_type = other DNA
agcgatcacggcggcgagcgtggagcactgttgtacgggctgatcggcacctgccgtctgaacggtatcgatccg

SEQ ID NO: 32246 - DNA, 75 bp, synthetic construct
  source 1..75: mol_type = other DNA
caggtgtgtcatacaccacgtcagcggtggggacgggatactggctactgcagttgctggacaaagtctccccat

SEQ ID NO: 32247 - DNA, 75 bp, synthetic construct
  source 1..75: mol_type = other DNA
atgccatgacggttcattattaccgtctgcgggattacgccctgcaacatccggaatacgacgccattatgcgca

SEQ ID NO: 32248 - DNA, 75 bp, synthetic construct
  source 1..75: mol_type = other DNA
ccacaatttattcagctacaacaccagagaataatccgcctcagtttgttgccagcctcgtccctgatgaacagc

SEQ ID NO: 32249 - DNA, 75 bp, synthetic construct
  source 1..75: mol_type = other DNA
cgaaacatgggtactgttcaatgtcatgaacggtaaccgcgctgaaatgagcccggaagccgccggcattgctgc

SEQ ID NO: 32250 - DNA, 75 bp, synthetic construct
  source 1..75: mol_type = other DNA
cagtttggcagtcagcaggtgagccgtaattatcatcttcgcgggcgcattctgcaggtgccgtcaaactatgat

SEQ ID NO: 32251 - DNA, 75 bp, synthetic construct
  source 1..75: mol_type = other DNA
tacggacgcaacctgctgaagatggacgcgttcggctgtaccagccgcggtcaggcccaccgtgccgggctgtgg

SEQ ID NO: 32252 - DNA, 75 bp, synthetic construct
  source 1..75: mol_type = other DNA
actgatagttgaacgcactatggcagggctggctgcagctcgtgccaaaggcagagtaggtggacgccgtcctaa

SEQ ID NO: 32253 - DNA, 75 bp, synthetic construct
  source 1..75: mol_type = other DNA
gggagtgaaattacctcgaccacggataaaaagctgggtgaccaggccgtgaccatacagcaaatccagcgggtt

SEQ ID NO: 32254 - DNA, 75 bp, synthetic construct
  source 1..75: mol_type = other DNA
caccgccatcactgccgatacggagcaccgtttcagtggcctgccactgggggaatacaccctgacggtcagggc

SEQ ID NO: 32255 - DNA, 75 bp, synthetic construct
  source 1..75: mol_type = other DNA
tgaagttcgcaaaaacggtgtattaatcgcatccagagaaactaaaggggccattcccggtagctacagtgcggt

SEQ ID NO: 32256 - DNA, 75 bp, synthetic construct
  source 1..75: mol_type = other DNA
caacaaatgaccagaacacggaattgcagcgtaacgcgctggagtgcgcaggatgtgagctgatttttgaggaca

SEQ ID NO: 32257 - DNA, 75 bp, synthetic construct
  source 1..75: mol_type = other DNA
actgccttgataatgcggtaatggagaatttctttggtcacctgaaagaagaaatgtactatcgccgggactaca

SEQ ID NO: 32258 - DNA, 75 bp, synthetic construct
  source 1..75: mol_type = other DNA
gaaatgtactatcgccgggactacagaagtgtagaagagctggaaaatgccgttaacgaatacataacttactgg

SEQ ID NO: 32259 - DNA, 75 bp, synthetic construct
  source 1..75: mol_type = other DNA
ccgtaccgatgagaagcacacccgggaatacatcacccatctggtacagtcagcctactacgatactgagcggga

SEQ ID NO: 32260 - DNA, 75 bp, synthetic construct
  source 1..75: mol_type = other DNA
gttgaactgccttttgtcgagtttgcaaaactgtgtggtataccttcaagccagtcatcccgcaggctgcgtgag

SEQ ID NO: 32261 - DNA, 75 bp, synthetic construct
  source 1..75: mol_type = other DNA
aaacgcatcacgaacacggcacaggtggaaaaatctgcccgttatctggggaccggcagtcagtggactgtccag

SEQ ID NO: 32262 - DNA, 75 bp, synthetic construct
  source 1..75: mol_type = other DNA
actgtcagattaaggggaaactgtcagccaatcagattgaaggcgatattgtcaaaacggtcagcaagtctttcc

SEQ ID NO: 32263 - DNA, 75 bp, synthetic construct
  source 1..75: mol_type = other DNA
tgttggcaaatcggcatttgtggaggctgttggccagccgagtgatgatgcatccggctatctggattttttcaa

SEQ ID NO: 32264 - DNA, 75 bp, synthetic construct
  source 1..75: mol_type = other DNA
atgggtaaaggtggcggtaaagcacacactccgcgtgaggcgaaagataatctcaaatcaacgcagttactgagt

SEQ ID NO: 32265 - DNA, 75 bp, synthetic construct
  source 1..75: mol_type = other DNA
cggcacggagccgcgcatcacctgtaacgcttacctgaccacacagcgcaaggcgtgggatgtgctcagtgattt

SEQ ID NO: 32266 - DNA, 75 bp, synthetic construct
  source 1..75: mol_type = other DNA
ccacctcacagttcctggcctcggtgattctggataatctgccgccccggccctttaacatccggatggtcaggg

SEQ ID NO: 32267 - DNA, 75 bp, synthetic construct
  source 1..75: mol_type = other DNA
aatgtcacgattaaccagaactgtacgattaagggcatgctggaggcgacccaggtcagaggggatttcgttaaa

SEQ ID NO: 32268 - DNA, 75 bp, synthetic construct
  source 1..75: mol_type = other DNA
ggattgaggatactgatggccagccactgagcaacatactgctgctggctgaccgtatcgcgatgataaatccgg

SEQ ID NO: 32269 - DNA, 75 bp, synthetic construct
  source 1..75: mol_type = other DNA
ccggcattttccctgacaccggacgggcggctgacggcgaaaaatgccgatatcagcggtaacgtgaatgcgaac

SEQ ID NO: 32270 - DNA, 75 bp, synthetic construct
  source 1..75: mol_type = other DNA
cgggcgcgtgcttgcggtaaacagccagacccggacactgacgctcgaccgtgaaatcatgctgccatcctccgg

SEQ ID NO: 32271 - DNA, 75 bp, synthetic construct
  source 1..75: mol_type = other DNA
tacaggatattcccggtgtgctggccgtgtttgccgaacgccgtaaggacagttttggcccgtatgtcaggctga

SEQ ID NO: 32272 - DNA, 75 bp, synthetic construct
  source 1..75: mol_type = other DNA
tcgtggcggtgattttgtcatggatatcggccaagatatatccataggttacctgaaccataccggcacagatgt

SEQ ID NO: 32273 - DNA, 75 bp, synthetic construct
  source 1..75: mol_type = other DNA
gcgctgaccacacaggcgcagcgggcgaaagccttccgtaaacagcgcgagtcttctttatcttctccggccagt

SEQ ID NO: 32274 - DNA, 75 bp, synthetic construct
  source 1..75: mol_type = other DNA
tgagctgtatctgcaggaaagtttcactttcagtgcactcacgtcagaagccacagtaacattacttcctcctga

SEQ ID NO: 32275 - DNA, 75 bp, synthetic construct
  source 1..75: mol_type = other DNA
tggccgccagcctctgcattacctctgtgaccccggccatcgcagaaaatatcgtgggttcagttaaggcctggc

SEQ ID NO: 32276 - DNA, 75 bp, synthetic construct
  source 1..75: mol_type = other DNA
gcacggataacggcatacagacgctggcgacctacgaacaggatgcgcgggggcggctgacagaagcggatgcgc

SEQ ID NO: 32277 - DNA, 75 bp, synthetic construct
  source 1..75: mol_type = other DNA
cgctatgaccatgaccgttttggtcaggtgacggcggtgcaccgcgaggaaggcctgagccagtaccacgcatac

SEQ ID NO: 32278 - DNA, 75 bp, synthetic construct
  source 1..75: mol_type = other DNA
gcgttaacattaacgactacaacccacacgactggatcgcctcatttaaacaagccttcagcgaagggcaaacgg

SEQ ID NO: 32279 - DNA, 75 bp, synthetic construct
  source 1..75: mol_type = other DNA
aggcattgtccagctcagtagcgccaccaacagcgattcagaaacgctggcggcaacaccaaaggcggtaaaggc

SEQ ID NO: 32280 - DNA, 75 bp, synthetic construct
  source 1..75: mol_type = other DNA
accggagataataacgtccgggcaggcacatttgttttcagaatgcaggctgcgggggtgttgcgccatgtgaag

SEQ ID NO: 32281 - DNA, 75 bp, synthetic construct
  source 1..75: mol_type = other DNA
aatacggaagcatgggtatggtataaaaattgcgatagtaaaaataaaaaagtggcagttgaacttcttcaaatc

SEQ ID NO: 32282 - DNA, 75 bp, synthetic construct
  source 1..75: mol_type = other DNA
cagacggagaccgctgaatgtggactggcctgcctggcaatgatatgcggtcattttggtaagaatattgacctg

SEQ ID NO: 32283 - DNA, 75 bp, synthetic construct
  source 1..75: mol_type = other DNA
gcgaccggctgaccacgatacagaacgacaggagccgcatccagacgatttatcagccggggagcttcacgccac

SEQ ID NO: 32284 - DNA, 75 bp, synthetic construct
  source 1..75: mol_type = other DNA
tgggcgagatggaaatctcagccaggatgatgatcaccgggggggacccgaaagaagaggccgcgctgaagcgtg

SEQ ID NO: 32285 - DNA, 75 bp, synthetic construct
  source 1..75: mol_type = other DNA
cggcaccggactggattgcccgtgaagagctgtaccggatggcctcacgggttgatccgcgtgagcgtggtgatg

SEQ ID NO: 32286 - DNA, 75 bp, synthetic construct
  source 1..75: mol_type = other DNA
gaggcacgattgccggttcggtgcatgttgacgctgtaaacaatggtggcgaaggcgacggtatacaggcttata

SEQ ID NO: 32287 - DNA, 75 bp, synthetic construct
  source 1..75: mol_type = other DNA
ggccgtggtggatactcagctggccggagcgggtgccgggggcggacgaggtgctgccgccggagccgcccgcat

SEQ ID NO: 32288 - DNA, 75 bp, synthetic construct
  source 1..75: mol_type = other DNA
acctgtgggacggcgacagtattgcggaaatccgggaataccgcgatgataaactgtacagcgtacggcacctgg

SEQ ID NO: 32289 - DNA, 75 bp, synthetic construct
  source 1..75: mol_type = other DNA
agaagccaggatttgcctaaaccatctccagtccttcatcatttttttcaatacactcatctaagagatgcgcat

SEQ ID NO: 32290 - DNA, 75 bp, synthetic construct
  source 1..75: mol_type = other DNA
aaaatgttgggtaaagacggtacaggcatgcagatcaaaatggagctgatgcctgccaaagatggcaacaattat

SEQ ID NO: 32291 - DNA, 75 bp, synthetic construct
  source 1..75: mol_type = other DNA
tccagatggctaaggatattaccactggtcttggtggatatatccaggacggcaaaacagccacaggtgcattac

SEQ ID NO: 32292 - DNA, 75 bp, synthetic construct
  source 1..75: mol_type = other DNA
ctgtcttttctgcgtgcagcgcgtgggcggatggcttcacggttaaatgcggtggctacactatggttgcaaacc

SEQ ID NO: 32293 - DNA, 75 bp, synthetic construct
  source 1..75: mol_type = other DNA
gcggcctgacggtggagcagatacaaaaccagatggacccggtgtacacgccggcgcgaaaaatccacctgtacc

SEQ ID NO: 32294 - DNA, 75 bp, synthetic construct
  source 1..75: mol_type = other DNA
accgaactgggtaccaatggtttgaaagtagacatggggcttatgcctgccaaagacggtaacaactacggcttt

SEQ ID NO: 32295 - DNA, 75 bp, synthetic construct
  source 1..75: mol_type = other DNA
gtgacattcggtagtttattaggactcgatcctgccagtcggcagcggcttatcacgccgaagcaggggagcgat

SEQ ID NO: 32296 - DNA, 75 bp, synthetic construct
  source 1..75: mol_type = other DNA
aagaagacgcagaagttctgcgctttgatagttttgacgatgccgttgaatgctgcgcagacctgaatattccgt

SEQ ID NO: 32297 - DNA, 75 bp, synthetic construct
  source 1..75: mol_type = other DNA
ggtcggtcagtcatcggtgcaaaaatcggtgttaagtgcctatggcgatcagggcggctttgtgctggctccgca

SEQ ID NO: 32298 - DNA, 75 bp, synthetic construct
  source 1..75: mol_type = other DNA
atagcgaatatcctgggttcaaaacccggaacgatcttcactatgttaagggatactggcggcataaaaccccat

SEQ ID NO: 32299 - DNA, 75 bp, synthetic construct
  source 1..75: mol_type = other DNA
accgtttcacggtaccaaaaacacaggcgggaaccaatcgggtcattcatcttattaagccagcaatcgacgctc

SEQ ID NO: 32300 - DNA, 75 bp, synthetic construct
  source 1..75: mol_type = other DNA
gtagcgatgcatgtattgaaaaatataacactgggcaactcttcgggttagatggtataaaagcagataatccaa

SEQ ID NO: 32301 - DNA, 75 bp, synthetic construct
  source 1..75: mol_type = other DNA
cggcctctgttgagggtgggtatacctttgaagcgggaacatttagcggcagcgaagggacgctgaatacctggt

SEQ ID NO: 32302 - DNA, 75 bp, synthetic construct
  source 1..75: mol_type = other DNA
caggacgcatctggacgtatgtccgggatgaccggaatgcgggctcatcagagccaccggcggtctggttcgcct

SEQ ID NO: 32303 - DNA, 75 bp, synthetic construct
  source 1..75: mol_type = other DNA
aagaacaggtgatgaagttcttgaatttgcacgttgctatgctgaagcagcagctgaaaaagaactatccagtta

SEQ ID NO: 32304 - DNA, 75 bp, synthetic construct
  source 1..75: mol_type = other DNA
cctggagaatggcggcacggttcaaatgaatagcgaaggggggaaaccggggaatgtactgaccgttaacggcaa

SEQ ID NO: 32305 - DNA, 75 bp, synthetic construct
  source 1..75: mol_type = other DNA
tgagttgggggctataccagcttctaccctcgttatatgcgctgttcctgatttcgttacttgggccgttggtca

SEQ ID NO: 32306 - DNA, 75 bp, synthetic construct
  source 1..75: mol_type = other DNA
gtttgtcgagcatggtaataaaataacggtacagctcgccattctgagctcaatagtatccatgccactgagctt

SEQ ID NO: 32307 - DNA, 75 bp, synthetic construct
  source 1..75: mol_type = other DNA
ccactgagtcgctggtctggcctgactctgtggatgcggtgaaaaaagccaacgcatttgtgggaagtgccatca

SEQ ID NO: 32308 - DNA, 75 bp, synthetic construct
  source 1..75: mol_type = other DNA
ttttcaggcataaaaaaagcggtcccgatatggaaccgcctttctgaacaattaacccgctgcgccgtatgtgtc

SEQ ID NO: 32309 - DNA, 75 bp, synthetic construct
  source 1..75: mol_type = other DNA
caggagcgatgtctggcacgctgacgctgatgccacagctgaatggtgtggatgcggctaaagcccccgccgtgg

SEQ ID NO: 32310 - DNA, 75 bp, synthetic construct
  source 1..75: mol_type = other DNA
atcaaaaatattcaggcaataccatcatgaacttatgtctgaagtaaaaaacagacaagattttaattttaatat

SEQ ID NO: 32311 - DNA, 75 bp, synthetic construct
  source 1..75: mol_type = other DNA
tagacaaacttgactatgagtctttttttaaagcataccatcagggagagttaattcctgaagacaatgccggac

SEQ ID NO: 32312 - DNA, 75 bp, synthetic construct
  source 1..75: mol_type = other DNA
cgcaacgctacgctgggaaaaacgaccttatgacggtgacagagaacacaacttatacgttgaattcgatatgac

SEQ ID NO: 32313 - DNA, 75 bp, synthetic construct
  source 1..75: mol_type = other DNA
agacccaatggggttagatgcgattgagaatatgacatcaggtggactaatttatgccgtatctggtgtacctgg

SEQ ID NO: 32314 - DNA, 75 bp, synthetic construct
  source 1..75: mol_type = other DNA
cgacagatggaagtgggcgtgggattactcacaataaaatattgtgggactcatctacactgggggcaattttga

SEQ ID NO: 32315 - DNA, 75 bp, synthetic construct
  source 1..75: mol_type = other DNA
cgtgaaggatggcagccatacggcgggccgttttcttcgtatacggatgatggcgcagcacttattcaggcgatt

SEQ ID NO: 32316 - DNA, 75 bp, synthetic construct
  source 1..75: mol_type = other DNA
tcggtccactacggctacgacgataagggccgcctgacgggcgaacggcagacggtggagaacccggagacgggg

SEQ ID NO: 32317 - DNA, 75 bp, synthetic construct
  source 1..75: mol_type = other DNA
ggtaaagggcgtaaaggcatcatcatccgcactcgcaagcctggatttattgctatggctaaacgctttatgaaa

SEQ ID NO: 32318 - DNA, 75 bp, synthetic construct
  source 1..75: mol_type = other DNA
cagccagaaagcagcgaagacgagcgaaactaacgcaaagtccagccagacggcagcgaagaccagcgaaacgaa

SEQ ID NO: 32319 - DNA, 75 bp, synthetic construct
  source 1..75: mol_type = other DNA
tatgactcacaatgggcggcaatttgttccattgccccaaagattggctgtacgccagagactctgcgtgtgtgg

SEQ ID NO: 32320 - DNA, 75 bp, synthetic construct
  source 1..75: mol_type = other DNA
ttcgatggcgacagtgtcagcgcagatttcatgaatgacagagaacaacccgccgtacaggaaagggagtcgttc

SEQ ID NO: 32321 - DNA, 75 bp, synthetic construct
  source 1..75: mol_type = other DNA
gtgggcttactggacacaattatggatggcacaggcacaccgcgcagtcaggccgggcggttatgccctggtatt

SEQ ID NO: 32322 - DNA, 75 bp, synthetic construct
  source 1..75: mol_type = other DNA
acgccctgctaaatataaatatacagatgataacggtaatgagcagacttggactggtcagggccgtactccgaa

SEQ ID NO: 32323 - DNA, 75 bp, synthetic construct
  source 1..75: mol_type = other DNA
atttagttgatggtcgggtgtttgaatatagccgcaacgcttttaataccgatgactataaatttaccctgatag

SEQ ID NO: 32324 - DNA, 75 bp, synthetic construct
  source 1..75: mol_type = other DNA
gatgatgatcacatattttatgtgacagttgccgattacattaaatgggttcaggttaagcctgatgcggcttat

SEQ ID NO: 32325 - DNA, 75 bp, synthetic construct
  source 1..75: mol_type = other DNA
cgaccgttttcatctggttaacggtgaaaactggtttgaccgcacggtcagtgccgatgccgcaggcatcattct

SEQ ID NO: 32326 - DNA, 75 bp, synthetic construct
  source 1..75: mol_type = other DNA
gtatccagattatcctgcttttaaaagagatgttcttaataaatcagtaaaagaaatcatgaaacatacggaagt

SEQ ID NO: 32327 - DNA, 75 bp, synthetic construct
  source 1..75: mol_type = other DNA
tggcattgtggaaattaccggagaaaacatcagggttgatgtttatcaggggcaaaatggtcaatcaatcactct

SEQ ID NO: 32328 - DNA, 75 bp, synthetic construct
  source 1..75: mol_type = other DNA
cagtgctggatgcactggagcagcatgaacacggggcgacgctgtttgatggtcgccccgttgtttttgacgaag

SEQ ID NO: 32329 - DNA, 75 bp, synthetic construct
  source 1..75: mol_type = other DNA
ataaacaaacagagccatttcttccaattgactggaactcaaacgattacgattggctaccttatgaagatgaat

SEQ ID NO: 32330 - DNA, 75 bp, synthetic construct
  source 1..75: mol_type = other DNA
caggtacccgtattttgcgcgttcttaaggccttacgtggccacgctttgaacggtgtttctaacggggaactag

SEQ ID NO: 32331 - DNA, 75 bp, synthetic construct
  source 1..75: mol_type = other DNA
atggctcacagtaacgagatggcacgagcgcaggatcgtattaacgaaatcaaccaacgtgtcatttcaggtagt

SEQ ID NO: 32332 - DNA, 75 bp, synthetic construct
  source 1..75: mol_type = other DNA
ggtaaacgccagcagcagcaacccggcgcatcgccgcaacgagatgatggcctgtgttaaaggcctggagcttat

SEQ ID NO: 32333 - DNA, 75 bp, synthetic construct
  source 1..75: mol_type = other DNA
atgcgcaaaaaagaccgccgcgccattactgcattgttgcgtaagtttgctatccgtgaagaccgcgaggagctg

SEQ ID NO: 32334 - DNA, 75 bp, synthetic construct
  source 1..75: mol_type = other DNA
gaatcccgtgatcctgtccaacgcgaaatggagcaggataagctcattagccgggcaaagctggcgcatgagcag

SEQ ID NO: 32335 - DNA, 75 bp, synthetic construct
  source 1..75: mol_type = other DNA
ggcatcggtgttcttccggctgatacgtacggcctgccgtcagcgttttgaggggcgggaaccatgtcaaagctg

SEQ ID NO: 32336 - DNA, 75 bp, synthetic construct
  source 1..75: mol_type = other DNA
ctgagtgaaagcaacccggcttccgcccttaatcatctcaaccatgcgttacagctcgatcctcgctgtggcgtg

SEQ ID NO: 32337 - DNA, 75 bp, synthetic construct
  source 1..75: mol_type = other DNA
tattaatattttgacgaatgataaggtattcaaggcagggttaagacgtaagatgcgaaaagcagccatggacag

SEQ ID NO: 32338 - DNA, 75 bp, synthetic construct
  source 1..75: mol_type = other DNA
aaccgctgttgatgcaccatatcactgccaccagccgcgttggggtaattggtattggcgggctggggcatatcg

SEQ ID NO: 32339 - DNA, 75 bp, synthetic construct
  source 1..75: mol_type = other DNA
ggcgtcgctgttcttccggctgatatgtacggcctgccgtcagcgtcttgaggagcgggaaccatgtcaaagctg

SEQ ID NO: 32340 - DNA, 75 bp, synthetic construct
  source 1..75: mol_type = other DNA
ccgaactgttcccgatgtcgaaaattaacgacgccattcagcatgtacgcgatggtaaagctcgctaccgagtag

SEQ ID NO: 32341 - DNA, 75 bp, synthetic construct
  source 1..75: mol_type = other DNA
gagggtaaaacgctgtcaggcgtggcagagcgcctgatgagcctgtcactgaccgacaaccggggatttgaggcg

SEQ ID NO: 32342 - DNA, 75 bp, synthetic construct
  source 1..75: mol_type = other DNA
caggggcagtctgtgacgctgacccgggaggggatcgtggtggacggtgcaggtaaaacgatcacgtttcgcaat

SEQ ID NO: 32343 - DNA, 75 bp, synthetic construct
  source 1..75: mol_type = other DNA
gcaagagagaagatccgccatgaactgcgaacacttgagcagggggggcccgcagaggccggacgtcagcaggaa

SEQ ID NO: 32344 - DNA, 75 bp, synthetic construct
  source 1..75: mol_type = other DNA
gacagggtcagttcactggtcagtgatacagccaggctggcgcattattccgcagatacgcgggagcagttactc

SEQ ID NO: 32345 - DNA, 75 bp, synthetic construct
  source 1..75: mol_type = other DNA
tgttatgtggcacttgaagagcttcgctggggcgcgtttggtgatgtgatacgtcagggcgaaacaggccaggtt

SEQ ID NO: 32346 - DNA, 75 bp, synthetic construct
  source 1..75: mol_type = other DNA
agcctttaatgccatgattcggttctgccgtgaggtcagacgccgggtcagttatccaaacagaacgaggaccag

SEQ ID NO: 32347 - DNA, 75 bp, synthetic construct
  source 1..75: mol_type = other DNA
gactctggttgaaaaagaaaatctggtttttaataaattacccaaagtggaagtgcacaataagaatgaagagaa

SEQ ID NO: 32348 - DNA, 75 bp, synthetic construct
  source 1..75: mol_type = other DNA
tgaatcgttcgggcatccagcctctgcacagcaaatgctcgtttgcgaattatcaggtgcagaacgacgggcaaa

SEQ ID NO: 32349 - DNA, 75 bp, synthetic construct
  source 1..75: mol_type = other DNA
ccgcagtaacgatatccttcgccaggcttccgcttattttgcgaaggcggagttcgaccgcctctggaaaaaatg

SEQ ID NO: 32350 - DNA, 75 bp, synthetic construct
  source 1..75: mol_type = other DNA
ggtcattcgcctggggcgttcacctgtacagcgttgtgtgaatcatatttctgagccggacagcgaaattccacc

SEQ ID NO: 32351 - DNA, 75 bp, synthetic construct
  source 1..75: mol_type = other DNA
tccgggaacaacaagaagtgaaggcggggcaaaaaatagcaaccatgggtagcaccggaaccagttcaacacgct

SEQ ID NO: 32352 - DNA, 75 bp, synthetic construct
  source 1..75: mol_type = other DNA
gaatacgccgttctggcctaatgtggacctgtcggagtttcgcagcgtgatgcgcactgacggcacggtgacgca

SEQ ID NO: 32353 - DNA, 75 bp, synthetic construct
  source 1..75: mol_type = other DNA
tatttatgctatagacataaatcgttataatctctcagctatagcctcagtaatagggctgttcaaaaaagagtc

SEQ ID NO: 32354 - DNA, 75 bp, synthetic construct
  source 1..75: mol_type = other DNA
tgaacgagtcggttaaatcagagcagtcaccgcgggtggtgctctgggaaattgacctgacggtgcagggtggtg

SEQ ID NO: 32355 - DNA, 75 bp, synthetic construct
  source 1..75: mol_type = other DNA
ggaggatttgcagagtctggtcgggggcacggtggttcgccgccgggtgtacgcccgttttctcgatgccgtgaa

SEQ ID NO: 32356 - DNA, 75 bp, synthetic construct
  source 1..75: mol_type = other DNA
cgaaagagcgtgagcctgtcgatccgacgctgatggttgatgtggaatataaatgcgagcagaccaactttgaca

SEQ ID NO: 32357 - DNA, 75 bp, synthetic construct
  source 1..75: mol_type = other DNA
gcgtctgaacggtgtggccgttgaagaactgtccagcaagttcactgtagagccgtctgtgcagcagacgctgga

SEQ ID NO: 32358 - DNA, 75 bp, synthetic construct
  source 1..75: mol_type = other DNA
aaaaggcatccatccgcagactcatcttgcctgcttcagcggtgtgctgcaagcggatgcgtacgccgggttcaa

SEQ ID NO: 32359 - DNA, 75 bp, synthetic construct
  source 1..75: mol_type = other DNA
agtgcgatgccatcgtgcaggcccccgcgccttcacggcccatcgagcggggtatcgcaggatcggggctgctgg

SEQ ID NO: 32360 - DNA, 75 bp, synthetic construct
  source 1..75: mol_type = other DNA
cattcgctggcggaaaatgacaggtggcgggatgcgtcagtccggcattctggctgccgccgggatgtatgccct

SEQ ID NO: 32361 - DNA, 75 bp, synthetic construct
  source 1..75: mol_type = other DNA
acagaagttgcgtgctgggctcatgcccggagaaaaatccacgatgtatacatcagcagcaaaagtgcgacggca

SEQ ID NO: 32362 - DNA, 75 bp, synthetic construct
  source 1..75: mol_type = other DNA
ctgaaacagtgggaggccctgaacgtgtactgcagtaatggctgggtggaaatcgacaacaacatcgcagagaac

SEQ ID NO: 32363 - DNA, 75 bp, synthetic construct
  source 1..75: mol_type = other DNA
ctggctgcgtgaaaagatgaaaaccctgtcgcgacactcagaactggcgaaagcgttcgcatacgccctgaacca

SEQ ID NO: 32364 - DNA, 75 bp, synthetic construct
  source 1..75: mol_type = other DNA
ctgaaaatttgaaccaacaggagaaagataaatcagctgatggggacaccagaacggacattacccgcatggatg

SEQ ID NO: 32365 - DNA, 75 bp, synthetic construct
  source 1..75: mol_type = other DNA
accaacaccattccgttccaggcgcgttattatgcaatcggcgaggcaaccccgggtgcagctaatgcggatgcg

SEQ ID NO: 32366 - DNA, 75 bp, synthetic construct
  source 1..75: mol_type = other DNA
gaactggctggggaatgtcgttaatgtttttcggtattcttatcgtcggatacggtctgctttattggtggcaca

SEQ ID NO: 32367 - DNA, 75 bp, synthetic construct
  source 1..75: mol_type = other DNA
atctggcaaacacctcatgggttgaaaatatcaaaagtggggcgtaccaaacctggattgagcagaactacaaga

SEQ ID NO: 32368 - DNA, 75 bp, synthetic construct
  source 1..75: mol_type = other DNA
tcgaacaggaggtgctcaccacctggcctgcggatgccattgcccgggcggaagatgtggtgttgcgtctgtccg

SEQ ID NO: 32369 - DNA, 75 bp, synthetic construct
  source 1..75: mol_type = other DNA
accggcctgatgcagggatgcccgaatggcgtacagacgctcctgggcagccgtatcagtattaacggtaacctg

SEQ ID NO: 32370 - DNA, 75 bp, synthetic construct
  source 1..75: mol_type = other DNA
gtatcgacaccgctaaagagaaactggatgtcgatgtattgcgtcctgatggtcgtcatcgcaccaaaaaattcg

SEQ ID NO: 32371 - DNA, 75 bp, synthetic construct
  source 1..75: mol_type = other DNA
aatgaaaatacgggagagcacgttggcaatggtggcttctttcaggctatggaagtagataagacacagtttgtt

SEQ ID NO: 32372 - DNA, 75 bp, synthetic construct
  source 1..75: mol_type = other DNA
agcgctggcttttgctattaagtgggtggcggttggtatcgctgtgtctccgatactgtatgggctggcaaaact

SEQ ID NO: 32373 - DNA, 75 bp, synthetic construct
  source 1..75: mol_type = other DNA
ggtggtgtgtctgctcattatctgcattacgattctgacattcacactcctgacccgacaaacgctctacgaact

SEQ ID NO: 32374 - DNA, 75 bp, synthetic construct
  source 1..75: mol_type = other DNA
tttcatagttcgctgaacgtggagatctttattagcagattcaggcgggaaatcccgctttccagaaataaccat

SEQ ID NO: 32375 - DNA, 75 bp, synthetic construct
  source 1..75: mol_type = other DNA
aataccattctcagcttaataatattactgacgcgccgtggttttgcggcgataccacctggtactggaaagaaa

SEQ ID NO: 32376 - DNA, 75 bp, synthetic construct
  source 1..75: mol_type = other DNA
tactgatatcaccgaagtggcgaaaaataacgtgctgactgatgatgatttttctgcgggaaagtcttcgacggc

SEQ ID NO: 32377 - DNA, 75 bp, synthetic construct
  source 1..75: mol_type = other DNA
gttccttctggcgcagttaagcggttgcacgaatacgcgaacggtatacgtgtcggtgccggtcgttccgttacc

SEQ ID NO: 32378 - DNA, 75 bp, synthetic construct
  source 1..75: mol_type = other DNA
tgcgaagccgacaccctcggctcctgtggttacgtttatctggctgtttatccgacgcccgaaacgaaaaagtaa

SEQ ID NO: 32379 - DNA, 75 bp, synthetic construct
  source 1..75: mol_type = other DNA
tccggctgaccactgtctgcatgatgtgcaggatatgagtacgctgaatcatccgagggctgacctgagcaaagg

SEQ ID NO: 32380 - DNA, 75 bp, synthetic construct
  source 1..75: mol_type = other DNA
gcatccggtggatgacgcagtctccctgctgacacggggtggcagactgagctgtaagtttcgactgtcaggcgc

SEQ ID NO: 32381 - DNA, 75 bp, synthetic construct
  source 1..75: mol_type = other DNA
cctgttgccgacagccggagaggctgctgcgcagggctggaccattaaggacggcggaattcagttgtcgggtgg

SEQ ID NO: 32382 - DNA, 75 bp, synthetic construct
  source 1..75: mol_type = other DNA
gtgtcagacacgcaccatgagacaaattatcccgacgactataacaaccgcccctggtgggggctgccctgcacc

SEQ ID NO: 32383 - DNA, 75 bp, synthetic construct
  source 1..75: mol_type = other DNA
tcaggaaaagaaagtgcatggggaccttctgtaattgaaaaattattagcgaataaagctctgataggtatatgc

SEQ ID NO: 32384 - DNA, 75 bp, synthetic construct
  source 1..75: mol_type = other DNA
tatcaggatgacccgaaactcgttgccatcgttggccgtaagctgctggccgacaaatatttcccgctggtgaac

SEQ ID NO: 32385 - DNA, 75 bp, synthetic construct
  source 1..75: mol_type = other DNA
atgcgatgctcatcacgaagctggaaaacctgtccatctactacatggatgacagccatcgccgcgtgattgagg

SEQ ID NO: 32386 - DNA, 75 bp, synthetic construct
  source 1..75: mol_type = other DNA
atatgctaaagggctgacctgcgatgccgacaccctcggctcctgtggttacgtttatctggctgtttatccgac

SEQ ID NO: 32387 - DNA, 75 bp, synthetic construct
  source 1..75: mol_type = other DNA
atgctcaccagtggtgaactcagcccccgctatcagcataccgtcacgctgtatgcgaaaggactgacctgcgaa

SEQ ID NO: 32388 - DNA, 75 bp, synthetic construct
  source 1..75: mol_type = other DNA
ctatcaactatgaccgctcgcgctacgcattgttacccgaaaccgagaaagcaaagatcgaaagttacattgaat

SEQ ID NO: 32389 - DNA, 75 bp, synthetic construct
  source 1..75: mol_type = other DNA
gcagcaatcgatctgcgttgcgtaaacatggttgccgatctgtggcatgcgcctgcaccgaaaaatggtcaggcc

SEQ ID NO: 32390 - DNA, 75 bp, synthetic construct
  source 1..75: mol_type = other DNA
atcgaaccatcgacagggctggagaagaagggaaacagcaaaggttccatgctgctgatttggcgaccgttcatc

SEQ ID NO: 32391 - DNA, 75 bp, synthetic construct
  source 1..75: mol_type = other DNA
gtataaagaaaacatcaccgagccggaaatcctggcgtcgcttgatgaactgatagggcgctgggcgaaagagcg

SEQ ID NO: 32392 - DNA, 75 bp, synthetic construct
  source 1..75: mol_type = other DNA
aaagagggggtgcaaattttgccgttccagcagatcaccgcaaaggatgagttcatgaatgttaaggcggcatcc

SEQ ID NO: 32393 - DNA, 75 bp, synthetic construct
  source 1..75: mol_type = other DNA
gcggtgaactctcatcaaacggtaaggtactgcatacccacaaacaccccggcgacagcggcggcacaaccggga

SEQ ID NO: 32394 - DNA, 75 bp, synthetic construct
  source 1..75: mol_type = other DNA
atgaaagatttaacactcaaatttgtcgacagggccgacttttcggcctttatggagagtatcggctattatgat

SEQ ID NO: 32395 - DNA, 75 bp, synthetic construct
  source 1..75: mol_type = other DNA
tgttattgatgttggtattactcgtggccgtcggtcagatggcgcaaaccatttatattccagctattgccgata

SEQ ID NO: 32396 - DNA, 75 bp, synthetic construct
  source 1..75: mol_type = other DNA
gctccggaggcattatcagttgcttgtgcagcttcctgccatgtggaattccattacggtaaaatgatgctggaa

SEQ ID NO: 32397 - DNA, 75 bp, synthetic construct
  source 1..75: mol_type = other DNA
ggagtttttttgcgataacggcgatgaatgggtgcatcttcggattgaggaagatctggcatcagtcagggaaaa

SEQ ID NO: 32398 - DNA, 75 bp, synthetic construct
  source 1..75: mol_type = other DNA
cgcccctggccggcggtgatgcactgtatcttcagcagcagaactacagtctggaggcgctgtcccgtcgtgatg

SEQ ID NO: 32399 - DNA, 75 bp, synthetic construct
  source 1..75: mol_type = other DNA
ctgacggaaagcatcggaggtaaaactgcactggactgggccatgaaacaggattttcgctgcggttgctggctg

SEQ ID NO: 32400 - DNA, 75 bp, synthetic construct
  source 1..75: mol_type = other DNA
ggtgttccggtgtttatggccgatgtgaaaggcgatctgaccggcatcgcgcaggcaggaacggcgtcggaaaaa

SEQ ID NO: 32401 - DNA, 75 bp, synthetic construct
  source 1..75: mol_type = other DNA
tgtatttttctggtgaaccggcacagatcgctgagattaaacgactggccagcggcgcagtcacaccgttttatc

SEQ ID NO: 32402 - DNA, 75 bp, synthetic construct
  source 1..75: mol_type = other DNA
cgtgcactgcagcggtctggattccggaaggggcgttttataaaggggagagaagcggcgggggattcaggtgtt

SEQ ID NO: 32403 - DNA, 75 bp, synthetic construct
  source 1..75: mol_type = other DNA
agcatcaccgcacttttcaccccaaaaagaggtgactggtgcgacatctggagtaacgaggatgtatcggtgtgg

SEQ ID NO: 32404 - DNA, 75 bp, synthetic construct
  source 1..75: mol_type = other DNA
gatgatcacatccgctccgttcagggcaaagcgtgctatgaagatgagatgttcaacatcagatactttaagaag

SEQ ID NO: 32405 - DNA, 75 bp, synthetic construct
  source 1..75: mol_type = other DNA
tcagcggcaaaccgattcctgacaaccgggaaaacataaccattcatctggatgatcacatccactcagtattag

SEQ ID NO: 32406 - DNA, 75 bp, synthetic construct
  source 1..75: mol_type = other DNA
ccgcactggactgggcgatgaaacaggattttcgctgtggttgctggctgatggaaaaacctgaaacggcaatga

SEQ ID NO: 32407 - DNA, 75 bp, synthetic construct
  source 1..75: mol_type = other DNA
ccggaaatcagcgaagcgaacattctgagcacatttgaacaactgcaccagaataaggatgaggtgtttgagcga

SEQ ID NO: 32408 - DNA, 75 bp, synthetic construct
  source 1..75: mol_type = other DNA
ccgcccgggactgggccatgaaacaggattttcgctgcggctgctggctgatggagaaaacggaaaccgcaatga

SEQ ID NO: 32409 - DNA, 75 bp, synthetic construct
  source 1..75: mol_type = other DNA
atgacagaaagtattggcggtaaaaccgcactggactgggccatgaaacaggattttcgctgcggctgctggctc

SEQ ID NO: 32410 - DNA, 75 bp, synthetic construct
  source 1..75: mol_type = other DNA
gcatgaccaatctatcgggggtttatggcactctgctgccggataataacctgaattatagcgttcaggtcggta

SEQ ID NO: 32411 - DNA, 75 bp, synthetic construct
  source 1..75: mol_type = other DNA
gtcacaaatcccctgacagccagcagcaacaccattatcggcaacctgttcatggtgtttaacgcaattatcgcc

SEQ ID NO: 32412 - DNA, 75 bp, synthetic construct
  source 1..75: mol_type = other DNA
cagtatgatttcccgctatttcactcactccttaaatgtagtgaaatattataactcgccgcgtcaatataattt

SEQ ID NO: 32413 - DNA, 75 bp, synthetic construct
  source 1..75: mol_type = other DNA
atgataaacgatctgaagagtatattgttaaaatcctcagaggaagttgatgtttttatcaaaatttttgaaagt

SEQ ID NO: 32414 - DNA, 75 bp, synthetic construct
  source 1..75: mol_type = other DNA
aaaaaaataaaataaatccatatagcgaagatagatactcgatacgacctttatggggaaaatgtctggtcgaac

SEQ ID NO: 32415 - DNA, 75 bp, synthetic construct
  source 1..75: mol_type = other DNA
cggtaaaagccagatgccagccctcctctccgcgaagattgtggcggataagcgaaccaactctcttatcatcag

SEQ ID NO: 32416 - DNA, 75 bp, synthetic construct
  source 1..75: mol_type = other DNA
atggttgccgtaaatcatactccacgactagcacacacacaaacggcctttgtgtggcgctttattgccgtcggc

SEQ ID NO: 32417 - DNA, 75 bp, synthetic construct
  source 1..75: mol_type = other DNA
gctggcgcgctggttaactccaagaatgctgctggtagtcagaatgttacttctgcaattggcgatattgctaat

SEQ ID NO: 32418 - DNA, 75 bp, synthetic construct
  source 1..75: mol_type = other DNA
accaatgcacctcagttccaaaaatacacactatggctcatgacagataaaacagcgccggaagcgggacaaatc

SEQ ID NO: 32419 - DNA, 75 bp, synthetic construct
  source 1..75: mol_type = other DNA
aacactctggatgcgaaaggggctgctacatcacagttcgtcgttcaatccggcaatgatttctactccgcgtcg

SEQ ID NO: 32420 - DNA, 75 bp, synthetic construct
  source 1..75: mol_type = other DNA
caacaggctaccagcaaatccacgacggtattattcatctggtcgatagcgcccggacggaaacggtacgtagcg

SEQ ID NO: 32421 - DNA, 75 bp, synthetic construct
  source 1..75: mol_type = other DNA
tgagcaacagggaaacgagttgcatatcagttggggaaaagttggcaccaaagggcaaagccagataaaaagttt

SEQ ID NO: 32422 - DNA, 75 bp, synthetic construct
  source 1..75: mol_type = other DNA
caggtcaccctgaacatccctgcacaacaggtggtgacgaataacagtgacagcgtgcagctgacggcgacggtg

SEQ ID NO: 32423 - DNA, 75 bp, synthetic construct
  source 1..75: mol_type = other DNA
atttcgataccgtctttaaaggcgataccgttaacggtaccatttctacttattacttgaatcatgattacgcta

SEQ ID NO: 32424 - DNA, 75 bp, synthetic construct
  source 1..75: mol_type = other DNA
atgccatttaaaaaactctcccgacgcaccttcctgacggcaagctccgcgcttgccttcctccatacccctttc

SEQ ID NO: 32425 - DNA, 75 bp, synthetic construct
  source 1..75: mol_type = other DNA
aagataaatttgtcgatgccctccgtgcaacagctgcacaaatgaccatgcatgagttacaggatacccgcgaga

SEQ ID NO: 32426 - DNA, 75 bp, synthetic construct
  source 1..75: mol_type = other DNA
gaaacattgcgtggagcggggagtatgatgagtggggcaaccagctgaatgaagagaacccgcatcacctgcacc

SEQ ID NO: 32427 - DNA, 75 bp, synthetic construct
  source 1..75: mol_type = other DNA
tggtgcgcagaatacgatgaatggggcaacctgctgaatgaagagaacccgcatcagctgcagcagcttatccgc

SEQ ID NO: 32428 - DNA, 75 bp, synthetic construct
  source 1..75: mol_type = other DNA
aaaatacgcttcgcgctatataatggcgaaacccggcataccaaatacgaaattcaggaagatcagttgaaagta

SEQ ID NO: 32429 - DNA, 75 bp, synthetic construct
  source 1..75: mol_type = other DNA
cgctgaaattcttgtgacaagcaccgaggtcggactaaaaacagtttcagcctctctggcagataaacctactga

SEQ ID NO: 32430 - DNA, 75 bp, synthetic construct
  source 1..75: mol_type = other DNA
tctggttaccctgccggcttaccggttcaccagtacgccagaaaccgataacacctggccgattgaagtcaccgc

SEQ ID NO: 32431 - DNA, 75 bp, synthetic construct
  source 1..75: mol_type = other DNA
aagcccaactccggctggatgaggatttcgatgctgatgaccgccatctgcaactgctggcctgtgcggcgcaaa

SEQ ID NO: 32432 - DNA, 75 bp, synthetic construct
  source 1..75: mol_type = other DNA
gcacagagatacagggctaaatattcttgatattgccgctaactatgctgatttcgtgacagaagctgttttaag

SEQ ID NO: 32433 - DNA, 75 bp, synthetic construct
  source 1..75: mol_type = other DNA
ttctggcaatcaataacgaagactcctacatatatcatgggaacataaatggcaatataaaactaacgcacaata

SEQ ID NO: 32434 - DNA, 75 bp, synthetic construct
  source 1..75: mol_type = other DNA
ccttctggttttttaaagagaaaaatccgatagaggtctacaaagtaaccgggctattgcgtagcgatgagttgc

SEQ ID NO: 32435 - DNA, 75 bp, synthetic construct
  source 1..75: mol_type = other DNA
gaaacgtatgcaacagaaatacgggaaggacatacaaccgtctcaacagcagctttctgatgatgacctgattaa

SEQ ID NO: 32436 - DNA, 75 bp, synthetic construct
  source 1..75: mol_type = other DNA
gaaggatccggtgaaattcactttaaaggtgaagttattgaagcaccgtgtgaaatacatcaggatgatattgat

SEQ ID NO: 32437 - DNA, 75 bp, synthetic construct
  source 1..75: mol_type = other DNA
tgctacaaggcgctggctggttattgttgctggccccgtttttcttcttcacctatggatctcttaatcagttca

SEQ ID NO: 32438 - DNA, 75 bp, synthetic construct
  source 1..75: mol_type = other DNA
taactatgccttccggtttattgacctgtttgctgggattggaggtatacggaagggcttcgaaaccatcggtgg

SEQ ID NO: 32439 - DNA, 75 bp, synthetic construct
  source 1..75: mol_type = other DNA
atgctggcgctgatggatgcggatggaaacattgcgtggagcggggagtatgatgagtggggcaaccagctgaat

SEQ ID NO: 32440 - DNA, 75 bp, synthetic construct
  source 1..75: mol_type = other DNA
tgagttcctgcgctggaataaagctggtgggaaggtgctgaatgggctgacacgtcggcgggaggcagagcgagc

SEQ ID NO: 32441 - DNA, 75 bp, synthetic construct
  source 1..75: mol_type = other DNA
ctccgggcggcgcgttttattcactggtgattaatttccagatccctcatttgcatcaacaagtgttgaaagcgg

SEQ ID NO: 32442 - DNA, 75 bp, synthetic construct
  source 1..75: mol_type = other DNA
cacccaaaaatcctgtcgatgcagataaattactggctgcttctcacggagaatttgttgaagggattagcgacc

SEQ ID NO: 32443 - DNA, 75 bp, synthetic construct
  source 1..75: mol_type = other DNA
aggtcatcgtcttatttcatcgcgggcatgaacattctggtcgtctacaacatctcgttgatgaactggcgatgc

SEQ ID NO: 32444 - DNA, 75 bp, synthetic construct
  source 1..75: mol_type = other DNA
aatcagtgttgtttgccctagcagccgaaaaagggcaggcatgggtagccaatgcaattactgaagaatatctgc

SEQ ID NO: 32445 - DNA, 75 bp, synthetic construct
  source 1..75: mol_type = other DNA
cttatcacgtagcctgattaaattacaatataatgtacacttacggaatgtaatttatattgtgttttttttgtg

SEQ ID NO: 32446 - DNA, 75 bp, synthetic construct
  source 1..75: mol_type = other DNA
cactcctgacccggaatcgcctgtgcgaaatccggctgaaggacggatacagggaggttacggcaagcatggctt

SEQ ID NO: 32447 - DNA, 75 bp, synthetic construct
  source 1..75: mol_type = other DNA
atgcttatcccactggcaaatattcttggctgcgatgcgatgtggctgttaactggcgaaacggcagcaaaggat

SEQ ID NO: 32448 - DNA, 75 bp, synthetic construct
  source 1..75: mol_type = other DNA
agccgtgctgatcttctggcatgaactggccataaatggctatgcctcaatgaatgccataaagagacaggagct

SEQ ID NO: 32449 - DNA, 75 bp, synthetic construct
  source 1..75: mol_type = other DNA
cctagcacagggaaaataacaaaatttcattctggagatattttattctcgaatatcagaacatattttaaaaaa

SEQ ID NO: 32450 - DNA, 75 bp, synthetic construct
  source 1..75: mol_type = other DNA
gcagaaaaaaccgcggagaaagccgccgctgcaaaagctagggtaacagcaatccttgcggcagaacggaaggct

SEQ ID NO: 32451 - DNA, 75 bp, synthetic construct
  source 1..75: mol_type = other DNA
cggagatgcgctaccgctacgacgatgcggggcgggtggtggagcagctgaacccggcaggcctgagttaccgct

SEQ ID NO: 32452 - DNA, 75 bp, synthetic construct
  source 1..75: mol_type = other DNA
aaaaggcgtaatgctggattgggaacttatcctgaggtcagtattgctgaagctgcacgtgctgcccggataatg

SEQ ID NO: 32453 - DNA, 75 bp, synthetic construct
  source 1..75: mol_type = other DNA
agcggtatcatttgagtcaccagaatacactgctgatgttgatgcgataggaacattgcgtcttcttgaagctat

SEQ ID NO: 32454 - DNA, 75 bp, synthetic construct
  source 1..75: mol_type = other DNA
ctttacttacgatgataaataccggggccggatggtggggcaccgttatgcaggcaggccggagatgcgctaccg

SEQ ID NO: 32455 - DNA, 75 bp, synthetic construct
  source 1..75: mol_type = other DNA
tattctcccgtgtatcacatcagcattcagaatcaagggagcaatggcgagatagatgcgcgctcagccagggga

SEQ ID NO: 32456 - DNA, 75 bp, synthetic construct
  source 1..75: mol_type = other DNA
tatgggagataccagcagagcgtatgaagatgcgtaggccacacatagtcccgctttcaaggcaggttataaggc

SEQ ID NO: 32457 - DNA, 75 bp, synthetic construct
  source 1..75: mol_type = other DNA
aaaatagcattaggggaacatataatcatgctcaatatttagagaaaagattaaagatgttacaatggtatagtg

SEQ ID NO: 32458 - DNA, 75 bp, synthetic construct
  source 1..75: mol_type = other DNA
gtagcttaccttatcgtattccgttaatggctggcagttcgcaacgtacattaccgacagtttctgaaggagcat

SEQ ID NO: 32459 - DNA, 75 bp, synthetic construct
  source 1..75: mol_type = other DNA
gacgggctggatgtcgctgtcacggaaaccgcaagtgacctggtacggctgggacggcgaccggctgaccacaat

SEQ ID NO: 32460 - DNA, 75 bp, synthetic construct
  source 1..75: mol_type = other DNA
tggaaggaagggaatataagcatgtcgctcatgacggtatgccatgggataacagcccatgcttttacaacctgg

SEQ ID NO: 32461 - DNA, 75 bp, synthetic construct
  source 1..75: mol_type = other DNA
aatacggcattatcagccggactatgatgaatattcgttcattgcgtgtttttgcccgtgaagttgattttgagc

SEQ ID NO: 32462 - DNA, 75 bp, synthetic construct
  source 1..75: mol_type = other DNA
caaagctgttcagaaaaattacgaattctgaaattgatgcggagggaaacgctcatgttgttttatctcctgctg

SEQ ID NO: 32463 - DNA, 75 bp, synthetic construct
  source 1..75: mol_type = other DNA
tatggactgaatcttgagctgaataaactggagaaagattcttcaggaattaattttgtttcaagaacgtccaaa

SEQ ID NO: 32464 - DNA, 75 bp, synthetic construct
  source 1..75: mol_type = other DNA
tggttggctggtatggcactggagtgcttaatattttggctggcggtaatgcctccttaaccactattactacca

SEQ ID NO: 32465 - DNA, 75 bp, synthetic construct
  source 1..75: mol_type = other DNA
ttttcctgccggtcccggacagagcacaaaggacgtcgccgccggctccgctttacccggccatgcgggcatggc

SEQ ID NO: 32466 - DNA, 75 bp, synthetic construct
  source 1..75: mol_type = other DNA
gatgaggtcaaacgtcgccgcaaggctgaaattgatgaaaacagcagactggggctggtctttgatactgacccc

SEQ ID NO: 32467 - DNA, 75 bp, synthetic construct
  source 1..75: mol_type = other DNA
ataggcattgaaatttccgactctgtaaccagtaccagaagtgatgtcgctgcaagttcgctggcggttaaaaaa

SEQ ID NO: 32468 - DNA, 75 bp, synthetic construct
  source 1..75: mol_type = other DNA
agaatcaacggaaacggcggcaagacaacatatcgagccactggccccggtggcaggctctgatttgtatgtatt

SEQ ID NO: 32469 - DNA, 75 bp, synthetic construct
  source 1..75: mol_type = other DNA
agccatcagttgcttgcaccggcggacaatatcaccattgcgaaaaatgaactggcggttctgggggcgatttca

SEQ ID NO: 32470 - DNA, 75 bp, synthetic construct
  source 1..75: mol_type = other DNA
cacctttgccgatactgctgcgggtggattagcccccgtagaactgactgcccagaccaccgcgattgaaagcat

SEQ ID NO: 32471 - DNA, 75 bp, synthetic construct
  source 1..75: mol_type = other DNA
gcagtcagaaggaagggagctgaacgacgcagagcgccgggcaatgatgcttctgaagcaggatgagcacgatgg

SEQ ID NO: 32472 - DNA, 75 bp, synthetic construct
  source 1..75: mol_type = other DNA
ccagatgcagcaccgaccactaaaaggcagcgagaagcgcgctctggaagccctgaatgcagacggggaatcaca

SEQ ID NO: 32473 - DNA, 75 bp, synthetic construct
  source 1..75: mol_type = other DNA
aggcacctttcccgatggggaaagacaataccgaatactatctactcacttccgattacgttagcgttgccgact

SEQ ID NO: 32474 - DNA, 75 bp, synthetic construct
  source 1..75: mol_type = other DNA
ccggtgaagctaaaactgatgctcgtgacgctgccatcattgccgaagctgcccgtaccctgcctcacgcgctac

SEQ ID NO: 32475 - DNA, 75 bp, synthetic construct
  source 1..75: mol_type = other DNA
ctctctggctatgtttccacgtacaaattaaccgatagcgagcgcgatattgctgccgaaatatggaacgcctgc

SEQ ID NO: 32476 - DNA, 75 bp, synthetic construct
  source 1..75: mol_type = other DNA
gttgggcataccttgccgttgttctcgacctgtttgcaaggaaaccggtaggttgggcaatgtcgttctctccgg

SEQ ID NO: 32477 - DNA, 75 bp, synthetic construct
  source 1..75: mol_type = other DNA
gcaaaagggattagttcagctcagtagcgcaactaacagcgacagcgaaacaatggcggctacccctaaagccgt

SEQ ID NO: 32478 - DNA, 75 bp, synthetic construct
  source 1..75: mol_type = other DNA
gcgttcacagctggagatgctgctggggccaactgattgcagccgcctgtctttactggaatcactgaaaaaggg

SEQ ID NO: 32479 - DNA, 75 bp, synthetic construct
  source 1..75: mol_type = other DNA
gccagacaagagccgtatagatgaaatctactacagacccttgcaaatgacttttggtgatggaagctggcgctc

SEQ ID NO: 32480 - DNA, 75 bp, synthetic construct
  source 1..75: mol_type = other DNA
ccctgtacatcgacacggcggatacgttcgcacaactgagcctcaaccattctgattacatgcaccatatcgtga

SEQ ID NO: 32481 - DNA, 75 bp, synthetic construct
  source 1..75: mol_type = other DNA
gcaggcgagtctgaaaaggcagcggcagcagacgcgaaaaatgcaaaacaacatgctgaaacagcccgggtggct

SEQ ID NO: 32482 - DNA, 75 bp, synthetic construct
  source 1..75: mol_type = other DNA
gtgagcgaatttaccgcactggggatcgcgggcgctactttgctgacgggcaagtcgcctttttggggcgcaacg

SEQ ID NO: 32483 - DNA, 75 bp, synthetic construct
  source 1..75: mol_type = other DNA
gctgaggtagctaaagctatgggctgtaaagtagaagaggtagataaggagttaatattaggactgatattacaa

SEQ ID NO: 32484 - DNA, 75 bp, synthetic construct
  source 1..75: mol_type = other DNA
agcactggcttttgctattaagtgggtggcggtcggtatatcgctgtgtctccgatgctgtatgggctggcaaaa

SEQ ID NO: 32485 - DNA, 75 bp, synthetic construct
  source 1..75: mol_type = other DNA
aaaaccttggtgctgatgataaggcaaggctcaaattgcgaggaaaaaggtttcttgatgaattgattggcaggc

SEQ ID NO: 32486 - DNA, 75 bp, synthetic construct
  source 1..75: mol_type = other DNA
agcgcgggtgtctggaccgacggcattggaaatacgtcgggcgtcattcccggcaaaacaatcacggaacgacag

SEQ ID NO: 32487 - DNA, 75 bp, synthetic construct
  source 1..75: mol_type = other DNA
cgtctgagcgtgaaagtgaactggccgctgaaaatgcccgcctgaagcggcaactggcggagcaggcagaggaac

SEQ ID NO: 32488 - DNA, 75 bp, synthetic construct
  source 1..75: mol_type = other DNA
ttaattattgaaggttgtcttgctcgtctaaagcaaaaaagaccttatgagcattcgcttcttgtggcacattat

SEQ ID NO: 32489 - DNA, 75 bp, synthetic construct
  source 1..75: mol_type = other DNA
aacagagccttgaacaactctcccgcatttcgtcagagttcaaaccatcaagtcagatacgcaggaaaatgcctc

SEQ ID NO: 32490 - DNA, 75 bp, synthetic construct
  source 1..75: mol_type = other DNA
catttgcagagtggaaagcccagcaggcaattaataaccagcccgtcacgctggatgagtttatttttgcttata

SEQ ID NO: 32491 - DNA, 75 bp, synthetic construct
  source 1..75: mol_type = other DNA
gggaagaactcgattacctgcgccagcttagcaagctgctggcaacggaaaaaccccatctggcccgcttcctgg

SEQ ID NO: 32492 - DNA, 75 bp, synthetic construct
  source 1..75: mol_type = other DNA
gaaattaatccgtatagaaatattgttagcagagggattcattgatggttgcctttctactctcgatattcattt

SEQ ID NO: 32493 - DNA, 75 bp, synthetic construct
  source 1..75: mol_type = other DNA
cctgtaccttcaccctctgccgggatatctggctgctgcccgttcgcctggagcagattgaaaaccgcagtacga

SEQ ID NO: 32494 - DNA, 75 bp, synthetic construct
  source 1..75: mol_type = other DNA
ccctctgatgttcgtgcgcataatcgcgctgccaacggcgcgtgtgatgaatacaaacaactcaaggtgctctcc

SEQ ID NO: 32495 - DNA, 75 bp, synthetic construct
  source 1..75: mol_type = other DNA
ctttcccaatttgaaactgatggccaattacccgtcggcaaatattcactaagcactctgattaataataagagg

SEQ ID NO: 32496 - DNA, 75 bp, synthetic construct
  source 1..75: mol_type = other DNA
cctcagcgtcgtgtgcgggctgtgccgtgcctccatcgtagccgggcttctgcgggcgggttgcaaggtaaggtg

SEQ ID NO: 32497 - DNA, 75 bp, synthetic construct
  source 1..75: mol_type = other DNA
tgtttgttttaacaaccgccacacctgtttactcttatgccgcagacccatgcgaggttgttttatgtatgtacg

SEQ ID NO: 32498 - DNA, 75 bp, synthetic construct
  source 1..75: mol_type = other DNA
atgaacgcatacctcacctgtgaccgaatagaggagcgtcgctgggttaatcagcacattcaggatgaaaaggat

SEQ ID NO: 32499 - DNA, 75 bp, synthetic construct
  source 1..75: mol_type = other DNA
atttgattttgatcagaatgttaaagataactctggctggttatctattgcaagtatgggtgtactgatagctgt

SEQ ID NO: 32500 - DNA, 75 bp, synthetic construct
  source 1..75: mol_type = other DNA
tgattacaaagctactgttacaggaggcggagagggtatcgcaacgctgatccccgtattgaatggtgttcatca

SEQ ID NO: 32501 - DNA, 75 bp, synthetic construct
  source 1..75: mol_type = other DNA
atggttatttagtgcagccacccaattgctctattagtaatgggcaaaatatagagttgacgtttcgggacgtga

SEQ ID NO: 32502 - DNA, 75 bp, synthetic construct
  source 1..75: mol_type = other DNA
taaacggctttaacggtggtgttctgaacggtgttccttctgcatatcactggtataccgaacagtatggcgtga

SEQ ID NO: 32503 - DNA, 75 bp, synthetic construct
  source 1..75: mol_type = other DNA
tcgccattttgttatttatccccgtctcgataaggcgctgaaggcacagaaaaataacgacgaagcaaccgccat

SEQ ID NO: 32504 - DNA, 75 bp, synthetic construct
  source 1..75: mol_type = other DNA
ccagaacttcttaacatgctggatattaaaggaaaaatcatcacaactgatgcgatgggttgccagaaagatatt

SEQ ID NO: 32505 - DNA, 75 bp, synthetic construct
  source 1..75: mol_type = other DNA
ggatgtgtcactggcggcgggtaaccatgttgatgttcttgctgccaccagtacagatacgtcctggcgctttaa

SEQ ID NO: 32506 - DNA, 75 bp, synthetic construct
  source 1..75: mol_type = other DNA
gaacggtcatcacgaaatcacatccaccagcaggacgtgtgaccatctaatgatcgaccttgaaaccatgggaaa

SEQ ID NO: 32507 - DNA, 75 bp, synthetic construct
  source 1..75: mol_type = other DNA
ccagtggtaattttaaagcaatagataaccacgggaaggaaataacaaacagaaaaggattacctaatgtctgca

SEQ ID NO: 32508 - DNA, 75 bp, synthetic construct
  source 1..75: mol_type = other DNA
ctgaattactgatctgcaccaggggaaatcagacagaagtcgccagaatactgaactgcaatcgtgctacagtca

SEQ ID NO: 32509 - DNA, 75 bp, synthetic construct
  source 1..75: mol_type = other DNA
agcgaataaaatttttaaacaatatcaccacgagttaataactgaagtaaaaaacaagacagatttcaatttttc

SEQ ID NO: 32510 - DNA, 75 bp, synthetic construct
  source 1..75: mol_type = other DNA
cctcccccgctgaactctggcaaaaattctgcctctggaaaggatacacacaagctcagcttccggtgattactc

SEQ ID NO: 32511 - DNA, 75 bp, synthetic construct
  source 1..75: mol_type = other DNA
ggcatcgtgcggcctgaccgtggagcagatgcaaaaccagatggacccggtgtacacgccggcgcgaaaaatcca

SEQ ID NO: 32512 - DNA, 75 bp, synthetic construct
  source 1..75: mol_type = other DNA
aatacctgctcaacacagagcgtgatcttgccgctcgcgtgcgtgatcgttatgacatgtacctgaaatccctgc

SEQ ID NO: 32513 - DNA, 75 bp, synthetic construct
  source 1..75: mol_type = other DNA
atgagtgaaactcgttttcatggtgcccgtgttacggaaaataccgacctggtaacagcgattaacgatgttgat

SEQ ID NO: 32514 - DNA, 75 bp, synthetic construct
  source 1..75: mol_type = other DNA
gcaggatgtggagagcggagaaattattctgctggatgtgacagcagcagaaaaagggcccacagagcccgtacg

SEQ ID NO: 32515 - DNA, 75 bp, synthetic construct
  source 1..75: mol_type = other DNA
taaccgtgcgcttcatgagttacgaaaaaacggtgcgcttccggttgatgaagcctgggtcgatgattttatcag

SEQ ID NO: 32516 - DNA, 75 bp, synthetic construct
  source 1..75: mol_type = other DNA
ccgcgctggctgcgtggcaaaaataccagcaggactgccagacggtaaaagatgaggcgaaacgccttgaggccg

SEQ ID NO: 32517 - DNA, 75 bp, synthetic construct
  source 1..75: mol_type = other DNA
gcgacttcaggcattaaatgaaagggttcctgagctcattactgacagtaaggcgctgagggaagagctggagac

SEQ ID NO: 32518 - DNA, 75 bp, synthetic construct
  source 1..75: mol_type = other DNA
tttctacaatagggcggcatcttagaggtgtcgcaagtcgagtgggctctgcgggggtatctggattttctgtag

SEQ ID NO: 32519 - DNA, 75 bp, synthetic construct
  source 1..75: mol_type = other DNA
accctacatcatgaaaacgaccggccttgactttcaacagtgttcagcatttacagagcatgccgtgtttaatta

SEQ ID NO: 32520 - DNA, 75 bp, synthetic construct
  source 1..75: mol_type = other DNA
tctttatttggtattaacggatatgatcttcagacaggtgcatggttctgccttatttctgcacatctatatagt

SEQ ID NO: 32521 - DNA, 75 bp, synthetic construct
  source 1..75: mol_type = other DNA
cgttttatcgccctgagtacggcacaaccgcgcgtgattaccatcgaggccaccagcgaacaggaagcccgccag

SEQ ID NO: 32522 - DNA, 75 bp, synthetic construct
  source 1..75: mol_type = other DNA
aattattttttctggcccccagggtgggcaggcagacattttatccttgcagggtagctcagcgggttcagcaac

SEQ ID NO: 32523 - DNA, 75 bp, synthetic construct
  source 1..75: mol_type = other DNA
atggttacgccagtaagcatcagcaattatatatctcttcctgatgattttcccgctcgtaatattgcacctcag

SEQ ID NO: 32524 - DNA, 75 bp, synthetic construct
  source 1..75: mol_type = other DNA
tacggctatgacgataaaggccgcctgacgggtgaacggcagacggtggagaacccggagacaggggagatgctg

SEQ ID NO: 32525 - DNA, 75 bp, synthetic construct
  source 1..75: mol_type = other DNA
acacgccggaaaatccggatgtgccgggtgcgatgtacctgaaatcagaggatggtcaggactggtatgagtgtc

SEQ ID NO: 32526 - DNA, 75 bp, synthetic construct
  source 1..75: mol_type = other DNA
ctctgtttgccaacgcatttggctaccctgccactcacaccattcaggcgcctggccgcgtgaatttgattggtg

SEQ ID NO: 32527 - DNA, 75 bp, synthetic construct
  source 1..75: mol_type = other DNA
gccggtccggtattaatggagtttgccaccatggtgggcgggcgtggcgaaatcaaaaaagatgtggatttcccg

SEQ ID NO: 32528 - DNA, 75 bp, synthetic construct
  source 1..75: mol_type = other DNA
gtgcagctgattgaccagcgggtgcaggcggtgatgctgtccatgcgacgtgacggaggaatgctgagtggctga

SEQ ID NO: 32529 - DNA, 75 bp, synthetic construct
  source 1..75: mol_type = other DNA
caggcagagcaggctgaccgggccttattgcgttcactgatcctgaccggaggggcggctgccaccacaacggca

SEQ ID NO: 32530 - DNA, 75 bp, synthetic construct
  source 1..75: mol_type = other DNA
gcagaacggccggaacaggcgtttatcgcggagcctgcctcccgtcgcattccttcacggggggaggtgaagcat

SEQ ID NO: 32531 - DNA, 75 bp, synthetic construct
  source 1..75: mol_type = other DNA
accagtccacccacgttagtgtggccagttccacttctgcacggtttttccagctcttacggtgtattacctccg

SEQ ID NO: 32532 - DNA, 75 bp, synthetic construct
  source 1..75: mol_type = other DNA
tgcaggaagaagcaaaagaagcagtaaataaaaaagctaaagagagagctcaagtcttctttatcggtgaacaaa

SEQ ID NO: 32533 - DNA, 75 bp, synthetic construct
  source 1..75: mol_type = other DNA
catctgggggccacgcgggtggtttacaacccggcctcgtcgggggagacgctgacggtgattaatgaccaggac

SEQ ID NO: 32534 - DNA, 75 bp, synthetic construct
  source 1..75: mol_type = other DNA
caccacgaccagcctttacagccggatatacggtgtggagtggccatcaggtcacaatgtccgctgggtgcgtga

SEQ ID NO: 32535 - DNA, 75 bp, synthetic construct
  source 1..75: mol_type = other DNA
gttctcactggcaacggcgattgcctgggatttcccctcactggtctttgcgcggctgatgaccggtgtcgggct

SEQ ID NO: 32536 - DNA, 75 bp, synthetic construct
  source 1..75: mol_type = other DNA
ctgccgacgccacgcccggccatacgcctgacgctgacggacagcggcgaaacgcagctccgcttcagcaagccg

SEQ ID NO: 32537 - DNA, 75 bp, synthetic construct
  source 1..75: mol_type = other DNA
actgaaaatgaagcatgttatttttctaatgaatctgacctcgcagagaaaatcataatgcattgtgagctatca

SEQ ID NO: 32538 - DNA, 75 bp, synthetic construct
  source 1..75: mol_type = other DNA
gtggtctggggtgcctgttccgtcaactgtggtagccgctgtgcacttcgtctgcatgttaaagataatgaagtg

SEQ ID NO: 32539 - DNA, 75 bp, synthetic construct
  source 1..75: mol_type = other DNA
ccggcacatcagcccgtgaggcggcaacccatgcgactgatgctgcaggctcagcacgtgcagccagcacatcag

SEQ ID NO: 32540 - DNA, 75 bp, synthetic construct
  source 1..75: mol_type = other DNA
tgtctggaaggctgcgagctgtgcgctaaggccgcgccggaagtgattgagcgcgcgctgaatggtttgcttatt

SEQ ID NO: 32541 - DNA, 75 bp, synthetic construct
  source 1..75: mol_type = other DNA
gctattgctaataatggttataactctaacattgagttattttgctttgaattgttcgacactgaagcatctaag

SEQ ID NO: 32542 - DNA, 75 bp, synthetic construct
  source 1..75: mol_type = other DNA
agattatcgcgatgggatggcagaacaaaatttgctcgggtgatcccgctaatattcacatgtcgcgtacctttc

SEQ ID NO: 32543 - DNA, 75 bp, synthetic construct
  source 1..75: mol_type = other DNA
cagcgcactatgcggatgccattcgttataatgctcgaacgcctctgcaaggttctttgctgccgttaacccgtc

SEQ ID NO: 32544 - DNA, 75 bp, synthetic construct
  source 1..75: mol_type = other DNA
tccggtgagtgtgacggaaggcggtctgacgcgcagcatggggtatgacgctgccgggcgcatcaccgtgctgac

SEQ ID NO: 32545 - DNA, 75 bp, synthetic construct
  source 1..75: mol_type = other DNA
tatgatgaggagtccggcctgtattacaaccgccaccgctattatgacccgctgcaggggcgatatatcactcag

SEQ ID NO: 32546 - DNA, 75 bp, synthetic construct
  source 1..75: mol_type = other DNA
gaacaccatgcaggagtcctctgattttctgacccgcatcaacattgtgccggtcagcgaaatgaaaggggaaaa

SEQ ID NO: 32547 - DNA, 75 bp, synthetic construct
  source 1..75: mol_type = other DNA
aaccgataagctttggcagcttgtcctttggttccctgccctgctggggatctttgtattaatatccgtaaacaa

SEQ ID NO: 32548 - DNA, 75 bp, synthetic construct
  source 1..75: mol_type = other DNA
cagaataagataactgactcttcgagaagtgtgaaagataagaaagaaaatatcttcagcttttgggtgagtatt

SEQ ID NO: 32549 - DNA, 75 bp, synthetic construct
  source 1..75: mol_type = other DNA
agaactgcgcgggcaggatggcatcagcgaagaactggagcagcgcatccgtgatgtactgctggggaaagcgta

SEQ ID NO: 32550 - DNA, 75 bp, synthetic construct
  source 1..75: mol_type = other DNA
atgccagcagattaaaccttgagtggtatggtacttatggtcagattcgaggcggatacggttacagcgattctc

SEQ ID NO: 32551 - DNA, 75 bp, synthetic construct
  source 1..75: mol_type = other DNA
caggctgccgaatccaatcgcggtaatgagtggactggcaatcctgatattgataacgccatcatcatgctcgac

SEQ ID NO: 32552 - DNA, 75 bp, synthetic construct
  source 1..75: mol_type = other DNA
aactctccgcttattcctggtgaagtgttgtccgcaatccgggaggttgccaggattcgtgccgatttcgatgat

SEQ ID NO: 32553 - DNA, 75 bp, synthetic construct
  source 1..75: mol_type = other DNA
tggcagtgaaaccatcgacatggatccaacccgcccgaaagccatttggggctttaacggcactgaacgtcccgg

SEQ ID NO: 32554 - DNA, 75 bp, synthetic construct
  source 1..75: mol_type = other DNA
ccacgccatccaataaaaataccccggctcatatttatgccggtaacggtaattttgtgggggacgggatccgcc

SEQ ID NO: 32555 - DNA, 75 bp, synthetic construct
  source 1..75: mol_type = other DNA
aatgtatgtgctgattttgaagctgaacttgttgaaatggatggcgaaccagatcacgtccatttgttaattaac

SEQ ID NO: 32556 - DNA, 75 bp, synthetic construct
  source 1..75: mol_type = other DNA
agtgaaggtattgtgtcgatgtttcgtgtggacccggatctggctggtccattgatggcgatggttaccaccatg

SEQ ID NO: 32557 - DNA, 75 bp, synthetic construct
  source 1..75: mol_type = other DNA
atcgtgataaaggcactcagggcgcgcagcttggcggtgtcggggtccgctggaatatctggaccggcgagacgc

SEQ ID NO: 32558 - DNA, 75 bp, synthetic construct
  source 1..75: mol_type = other DNA
atcacctccgcgttcgctggcagcggcttcgcttataccactttcccggctctgtgctaacggactaccggatac

SEQ ID NO: 32559 - DNA, 75 bp, synthetic construct
  source 1..75: mol_type = other DNA
gcataattagcggaatttttccgttgctgattttgccccaattgcctgggacattaacccttgcgtttctgactc

SEQ ID NO: 32560 - DNA, 75 bp, synthetic construct
  source 1..75: mol_type = other DNA
acgcccagcgtcgtatccgccagcgagagctggccatgctggacgagaaagaggctcaggagcgcgaagaggcgc

SEQ ID NO: 32561 - DNA, 75 bp, synthetic construct
  source 1..75: mol_type = other DNA
ctggtgatttcaggtccacgctggatgacgttgacgttttttgcgctgataagttttctggcattgaaagaatat

SEQ ID NO: 32562 - DNA, 75 bp, synthetic construct
  source 1..75: mol_type = other DNA
aacatggtcgcgtgcgggtgaagttcaactgggaccgttataacccggcagaccaagacagttcgtgctggatcc

SEQ ID NO: 32563 - DNA, 75 bp, synthetic construct
  source 1..75: mol_type = other DNA
atatatgtaatagggactttgctgcctgttttgttcttttttgctctgagtggtaccgcagggattatgaacggc

SEQ ID NO: 32564 - DNA, 75 bp, synthetic construct
  source 1..75: mol_type = other DNA
gggaactcatatacagcaaaccttcagaatgcattccgggcggtttatccccgctggcgcggggaactcgccgtc

SEQ ID NO: 32565 - DNA, 75 bp, synthetic construct
  source 1..75: mol_type = other DNA
taacgggagaacaacaaggaagcatctccgcaggttgtgggacttctgagtctacaggtaatcgttggcagagcg

SEQ ID NO: 32566 - DNA, 75 bp, synthetic construct
  source 1..75: mol_type = other DNA
gtgtaaaggaggaaataaataaagatgccattctgaatgaaaaagaggctgtgaaaaatattcccggtattacca

SEQ ID NO: 32567 - DNA, 75 bp, synthetic construct
  source 1..75: mol_type = other DNA
ggcctgccgctggcccttatcagcacggaagggacaacagcgtggtacgcagaatacgatgaatggggtaaccag

SEQ ID NO: 32568 - DNA, 75 bp, synthetic construct
  source 1..75: mol_type = other DNA
attcgatgaagagaatcaggttgaagttcaggaaaatgatccggaggaaatggaaggcgctgaacatccacacaa

SEQ ID NO: 32569 - DNA, 75 bp, synthetic construct
  source 1..75: mol_type = other DNA
ttggtacagggatccgctactgcctttacaacggcaacaccgaaaacctacacgcttcggtaaaaagcgaacagg

SEQ ID NO: 32570 - DNA, 75 bp, synthetic construct
  source 1..75: mol_type = other DNA
ctggctgatgagcaactgaaaaatatcaccgattaccggatcattgatgaagatcgtcagtgtgtgcgtgtttac

SEQ ID NO: 32571 - DNA, 75 bp, synthetic construct
  source 1..75: mol_type = other DNA
acgcgctacatcgatcctgtaactgaacaggagcgttcaagccgactttggctacgtcaaattggcgggcataat

SEQ ID NO: 32572 - DNA, 75 bp, synthetic construct
  source 1..75: mol_type = other DNA
tatatccagcaagttgacgaccaggtaaatgaagaactggaaaaagacctgaaagacaacatcgcgctgcgtatg

SEQ ID NO: 32573 - DNA, 75 bp, synthetic construct
  source 1..75: mol_type = other DNA
ccggtcatgcttacattaagcaaagaatgcgtgaagaggatgccgtatatggcggcgaaatgagtgcgcatcatt

SEQ ID NO: 32574 - DNA, 75 bp, synthetic construct
  source 1..75: mol_type = other DNA
atgaaactggcaccgaacgtaaaaaaacaaccacgcggaataaaacacaaagacacagaggtaattattttcgcg

SEQ ID NO: 32575 - DNA, 75 bp, synthetic construct
  source 1..75: mol_type = other DNA
ttccccatgaatccgataagttcaaatgataatgatagtgtagacttgcgaaatataaaatgccctgaaggttca

SEQ ID NO: 32576 - DNA, 75 bp, synthetic construct
  source 1..75: mol_type = other DNA
gggacttaagcaggcagattttatttttcaccttgctggggtaaatcgtcccgtgaaggagtgtgaatttgaaga

SEQ ID NO: 32577 - DNA, 75 bp, synthetic construct
  source 1..75: mol_type = other DNA
agggaggtgattatttattcgctgtaaaaggaaaccaggggcggctaaataaagccttcgaggaaaaatttccgc

SEQ ID NO: 32578 - DNA, 75 bp, synthetic construct
  source 1..75: mol_type = other DNA
aatccaacgtgcaaggcttggcggtgtagacgttaaccagatgtataatattacagaatgggcgtatagaaacgg

SEQ ID NO: 32579 - DNA, 75 bp, synthetic construct
  source 1..75: mol_type = other DNA
agaatacagcccggatgtggtgacgggcctcatcacgcgcatcaccacgccggatggcagggcatcggcgtttta

SEQ ID NO: 32580 - DNA, 75 bp, synthetic construct
  source 1..75: mol_type = other DNA
gactgtagatggtgtccaaaaagtagatgaacgaggtacaacaaataacactcatattatcaaccatggccagca

SEQ ID NO: 32581 - DNA, 75 bp, synthetic construct
  source 1..75: mol_type = other DNA
tgagccacaggctgagctggtttacggttctgtatccggtaaacagtttgcatggaaggaccagggaatgcatct

SEQ ID NO: 32582 - DNA, 75 bp, synthetic construct
  source 1..75: mol_type = other DNA
gataatctttacaagaacggttatatctttcttgtcgatggtgaaactaaagaatatgaagcaaaatctcctgaa

SEQ ID NO: 32583 - DNA, 75 bp, synthetic construct
  source 1..75: mol_type = other DNA
caacttgtttgcagcaaaagtttaatctaccaacgtatcaaagagattataagtggggcgcagcacagctacagg

SEQ ID NO: 32584 - DNA, 75 bp, synthetic construct
  source 1..75: mol_type = other DNA
cggagatgcgctaccgctacgacgatacggggcgggtggtggagcaactgaacccggcagggttaagctaccgct

SEQ ID NO: 32585 - DNA, 75 bp, synthetic construct
  source 1..75: mol_type = other DNA
tcgcctccctgaccggcacgttagcgggcacgcatatgatcacggctcgtctggctaacagcaatgtcagcgatg

SEQ ID NO: 32586 - DNA, 75 bp, synthetic construct
  source 1..75: mol_type = other DNA
cttcgttaccggctcccacaccttctgagcacgccgcagcagtgcttaatctggttgatgacggtgttatcgaat

SEQ ID NO: 32587 - DNA, 75 bp, synthetic construct
  source 1..75: mol_type = other DNA
cgaccgtaaattatgacgggaaacctttcacttatcaggtcgctgatgattggccgggatttttgttacccattt

SEQ ID NO: 32588 - DNA, 75 bp, synthetic construct
  source 1..75: mol_type = other DNA
aagtggcttcaacgctggcaatggcaatcagtaaaggtcgtctgattcgcgttaatcagaacggtaaatttcgtt

SEQ ID NO: 32589 - DNA, 75 bp, synthetic construct
  source 1..75: mol_type = other DNA
tatggcccagccttcccagcaatcgtcgattgttataccagtccacccacgttagtgtggccagttccacttctg

SEQ ID NO: 32590 - DNA, 75 bp, synthetic construct
  source 1..75: mol_type = other DNA
tctgcatcagccagttccgctacagcgcacaaatccgcccttcttccgtggtgaccaaggactacacctttaaac

SEQ ID NO: 32591 - DNA, 75 bp, synthetic construct
  source 1..75: mol_type = other DNA
actgcgaccatcgcggcctgccgctggcgctcatcagcacggaaggggcaacagcgtggtgcgcagaatatgatg

SEQ ID NO: 32592 - DNA, 75 bp, synthetic construct
  source 1..75: mol_type = other DNA
ggatgaattgatagtcatgctgtgggcaaacgaaattttcagtcgcgatgagcctgatactattgcgagacctct

SEQ ID NO: 32593 - DNA, 75 bp, synthetic construct
  source 1..75: mol_type = other DNA
ctgttcgacaaagattatgagacagtctatggctaccaaactgcaggacgggaatacaccttgtctggcagctac

SEQ ID NO: 32594 - DNA, 75 bp, synthetic construct
  source 1..75: mol_type = other DNA
taccctcaaggattaaaagacagagaaattatatcaacttttcacgcagaaaaagttattaatgatctgttaaaa

SEQ ID NO: 32595 - DNA, 75 bp, synthetic construct
  source 1..75: mol_type = other DNA
ttcgtgaggcagcacaaaactatcagtcgacgctggcgtggtatcaggctaccccggacagcccaaatgctgaac

SEQ ID NO: 32596 - DNA, 75 bp, synthetic construct
  source 1..75: mol_type = other DNA
attctctcacaaaaatgagatgtggtcatatcactcaaataatgatgcgataagcataaagtatatttattactt

SEQ ID NO: 32597 - DNA, 75 bp, synthetic construct
  source 1..75: mol_type = other DNA
tcattttcggcctaaaaatcctctgtaccgaagcattccctggttttaccctcgaagattatgaagacctcgaat

SEQ ID NO: 32598 - DNA, 75 bp, synthetic construct
  source 1..75: mol_type = other DNA
aggcctttcaaagaatgctggacaagatcgaccctctggctgcggcgctaagaaatcttgaacaacagcatgatg

SEQ ID NO: 32599 - DNA, 75 bp, synthetic construct
  source 1..75: mol_type = other DNA
cagcagtccggcggcgaagacggtggcagtgtggtgttcccgccggtgctggtgcagatgctcgaccggctggaa

SEQ ID NO: 32600 - DNA, 75 bp, synthetic construct
  source 1..75: mol_type = other DNA
attttagcggcggggcacgccgttcttgcctgtggagagatggtgcagtcaggccgctcgttgaagcaggaaccc

SEQ ID NO: 32601 - DNA, 75 bp, synthetic construct
  source 1..75: mol_type = other DNA
ttcagaaaaaccagaagacgctggcgagacttcagcgacagttaagccgcaaggtcaaattcagcaataactggc

SEQ ID NO: 32602 - DNA, 75 bp, synthetic construct
  source 1..75: mol_type = other DNA
ggatcaggacgatatgctcaatgccctggtgaaacttcagtcacgctctgaagagatatttggtaaaaaaccgat

SEQ ID NO: 32603 - DNA, 75 bp, synthetic construct
  source 1..75: mol_type = other DNA
aacgaaaaccttccccacaacgaagcaaacttccccgctatgtcgtgacgcttcacgacgatgacttctttgacg

SEQ ID NO: 32604 - DNA, 75 bp, synthetic construct
  source 1..75: mol_type = other DNA
tccctaccacgggctatatccgccgctgcaacctggctaagttgcttgataccagcgtgtcaactatcgaccgct

SEQ ID NO: 32605 - DNA, 75 bp, synthetic construct
  source 1..75: mol_type = other DNA
ctgtcacaaagtaaattcagatgccaggtatgtggatatacagcgaacgccgatgtaaatggcgctcgtaacatt

SEQ ID NO: 32606 - DNA, 75 bp, synthetic construct
  source 1..75: mol_type = other DNA
gtgaacaataaccagggtcgtttcgtatttccggatacctggtttggcccattactgggggagtttgaagaagtg

SEQ ID NO: 32607 - DNA, 75 bp, synthetic construct
  source 1..75: mol_type = other DNA
ggtatgaactcggtctcctgcattttctgaacggggaacatgttaaggccgccacagcttttcgccatggctttg

SEQ ID NO: 32608 - DNA, 75 bp, synthetic construct
  source 1..75: mol_type = other DNA
gtacggtttggtgacggttatgaacagcgccgcccgacgggacttaatgcccgactgaagacgtttcaggcggtg

SEQ ID NO: 32609 - DNA, 75 bp, synthetic construct
  source 1..75: mol_type = other DNA
gccatattcagctggtcgacgcgttctgcgcgcgcctcgatgccgtcctgccctgggaccgcgccgcggtggacg

SEQ ID NO: 32610 - DNA, 75 bp, synthetic construct
  source 1..75: mol_type = other DNA
ttccgggtgacggatgagtcaacccggcgctggctggaagagtttttatcgtggcatggtggttaccgtgccttt

SEQ ID NO: 32611 - DNA, 75 bp, synthetic construct
  source 1..75: mol_type = other DNA
cctgacggcgatatcacccgctaccgttatgataatccacacagtgacttcccctgcgcaacggaagatgccacc

SEQ ID NO: 32612 - DNA, 75 bp, synthetic construct
  source 1..75: mol_type = other DNA
gacgctgcgatactttgttgcataaatcaaaaacagtacccggaaacaacacggggggccggtcagtgtgcctga

SEQ ID NO: 32613 - DNA, 75 bp, synthetic construct
  source 1..75: mol_type = other DNA
tgcaccgcctgcggtcagagcggtggcggcaactgccctgattgtggtgcggtgatgggtgacgcaacataccag

SEQ ID NO: 32614 - DNA, 75 bp, synthetic construct
  source 1..75: mol_type = other DNA
gactgtgacgcaggcgcgtcagatacgtcaggacgcccgtgaagccataatgctgctggccccgggatccgtcag

SEQ ID NO: 32615 - DNA, 75 bp, synthetic construct
  source 1..75: mol_type = other DNA
gctgcttttgctgatgagtattttacacctgaatatatttcaggcttctccggactggaggaagatattcgccat

SEQ ID NO: 32616 - DNA, 75 bp, synthetic construct
  source 1..75: mol_type = other DNA
cctggagtcatttatctgaaaatgaatccacagcataaattttcaaaaagaattagctattcatttatcgcatcc

SEQ ID NO: 32617 - DNA, 75 bp, synthetic construct
  source 1..75: mol_type = other DNA
acgaagtaaacaaaattatgcaggcagccaatatcagccagcctgacgccgatgaactgcttgcagtatcacgtg

SEQ ID NO: 32618 - DNA, 75 bp, synthetic construct
  source 1..75: mol_type = other DNA
gagaacagggaaatgcaggatgcagtgcctgattttttctataccggactgcggatgtatcgatttcatcccgga

SEQ ID NO: 32619 - DNA, 75 bp, synthetic construct
  source 1..75: mol_type = other DNA
ccgaagcaacagcaatcagctaatgaaagttgtggacggtattaatcattcaggactcggaaaagtgtggtttgc

SEQ ID NO: 32620 - DNA, 75 bp, synthetic construct
  source 1..75: mol_type = other DNA
atgggtcaaccatgacattaaacacacagggaaccgcttatgctggtgttactgctcaattgtggggcaactcca

SEQ ID NO: 32621 - DNA, 75 bp, synthetic construct
  source 1..75: mol_type = other DNA
acagcactggaagaagaaaacgcagaattaagacaaagattatctgcaattgaggcggcgcttgcgtctaaataa

SEQ ID NO: 32622 - DNA, 75 bp, synthetic construct
  source 1..75: mol_type = other DNA
tgttgatggtggcgcttatatgttctatgcgcagaaaaataccgataacacctatatgttaagcgttaatggtgc

SEQ ID NO: 32623 - DNA, 75 bp, synthetic construct
  source 1..75: mol_type = other DNA
aaccttcaggatccgtccgcaggtaacaaccggcgtatcatggcacaacgacatgttcaccacggcactggatgt

SEQ ID NO: 32624 - DNA, 75 bp, synthetic construct
  source 1..75: mol_type = other DNA
atgttgatcacccgcgctggtcacaggctaccgaacgatttattggttcaggcggcatcctcgatgtacagcgcc

SEQ ID NO: 32625 - DNA, 75 bp, synthetic construct
  source 1..75: mol_type = other DNA
agacggaaactggtaaaggaacggtccagactgaaacgggcgacggtcagaaatccgaatgccagaattatcgtt

SEQ ID NO: 32626 - DNA, 75 bp, synthetic construct
  source 1..75: mol_type = other DNA
gttgaccgtatccggcgtgaacgcctgcccggagaactggcatatgcgctgaaacaacaactgaggattgcgata

SEQ ID NO: 32627 - DNA, 75 bp, synthetic construct
  source 1..75: mol_type = other DNA
tttaatgatgacagcccggaagcgaggaaaataacccggcgctggagaataggtgaagcagcggatttagttggg

SEQ ID NO: 32628 - DNA, 75 bp, synthetic construct
  source 1..75: mol_type = other DNA
agtgcataagtgctggtcatgaaatgacgaaagcaatcgccattgcacagtttaatgatgacagtccggaagccc

SEQ ID NO: 32629 - DNA, 75 bp, synthetic construct
  source 1..75: mol_type = other DNA
ctggctgcgaaagtacagacggcgctgaaagacgatcccatgtccggccatgttttcattttccggggccgcagc

SEQ ID NO: 32630 - DNA, 75 bp, synthetic construct
  source 1..75: mol_type = other DNA
gcagcgccggcgtggatgcgcagacactggcgtcctttctgcatgacacgcagctgcagcagcgcagcggagaaa

SEQ ID NO: 32631 - DNA, 75 bp, synthetic construct
  source 1..75: mol_type = other DNA
atcggacgcacggagaaatacagcagccggttgtttgacccgtccgtcagactggctgcggatatccgggataac

SEQ ID NO: 32632 - DNA, 75 bp, synthetic construct
  source 1..75: mol_type = other DNA
agcggtgtggtggtgagaattgccggtgaaggtcgtccgtggaatcccggtgccatcaccggtggccgcgtgtgg

SEQ ID NO: 32633 - DNA, 75 bp, synthetic construct
  source 1..75: mol_type = other DNA
tgcagttgatcatcgccttgcggaactgacaatgaacaaattgtacgacaaagtaccggcttctgtctggaagca

SEQ ID NO: 32634 - DNA, 75 bp, synthetic construct
  source 1..75: mol_type = other DNA
gtatgtcctgaccgaaacgaatacgacccgttccgagtttgatcgctacggtaaggcgaaaaagatagaattttc

SEQ ID NO: 32635 - DNA, 75 bp, synthetic construct
  source 1..75: mol_type = other DNA
agtttattgctacgaaggcaggggatattactgtttataactatgatggtgaaactcgggaatatatttccactt

SEQ ID NO: 32636 - DNA, 75 bp, synthetic construct
  source 1..75: mol_type = other DNA
tgtaccgggtggaaaagcgaaggtggagtattgctatgcagtaaatgtaccaggtgacagggaaattgtaaccca

SEQ ID NO: 32637 - DNA, 75 bp, synthetic construct
  source 1..75: mol_type = other DNA
cgcccgtttggctggcgcgaagtgtggatcggttatgacccggcaaaaggcacgcaaaacggcgacagcgccgga

SEQ ID NO: 32638 - DNA, 75 bp, synthetic construct
  source 1..75: mol_type = other DNA
agctggatatgcatttttccgggctgacgtacgctgtactcagcctgtttttttgcgatccggatatgcatccct

SEQ ID NO: 32639 - DNA, 75 bp, synthetic construct
  source 1..75: mol_type = other DNA
atgatgatgaatatgcacattacccgaactctcatcgcatctgctgttttattttcctttaattcaacagccgca

SEQ ID NO: 32640 - DNA, 75 bp, synthetic construct
  source 1..75: mol_type = other DNA
agatcggcagttattcaaaacagattcgttcagcaatcgaagacggtgtagtggaaccgcatgagaagacagcaa

SEQ ID NO: 32641 - DNA, 75 bp, synthetic construct
  source 1..75: mol_type = other DNA
tgctgattatcggggccggaggcgcattcaacgccattttaaaaagcagcagtctcgctgatacgctggcagtta

SEQ ID NO: 32642 - DNA, 75 bp, synthetic construct
  source 1..75: mol_type = other DNA
atgaataaagctgtattaaatagtgaactcattgccataaaagcgggagacattatcatttataattatgatggt

SEQ ID NO: 32643 - DNA, 75 bp, synthetic construct
  source 1..75: mol_type = other DNA
aatcacagctccgggtgattatcctgaaaatacaaccactatcgccccgttaacgccatacgatgaatggaatgg

SEQ ID NO: 32644 - DNA, 75 bp, synthetic construct
  source 1..75: mol_type = other DNA
tattaccgtctataactatgatggcgaaacacgggaatatatttccacatcaactgaatatcttgccgttggtgt

SEQ ID NO: 32645 - DNA, 75 bp, synthetic construct
  source 1..75: mol_type = other DNA
tgcggttatcggccttggcacgatactgggaaaaatgatggaagtatccggggccgcagaaagaattggtctgac

SEQ ID NO: 32646 - DNA, 75 bp, synthetic construct
  source 1..75: mol_type = other DNA
tgttgaagtgggcgtcgtgctattgattcctctggctttttcaattgccaaaaaaaccaatacctcattgttaaa

SEQ ID NO: 32647 - DNA, 75 bp, synthetic construct
  source 1..75: mol_type = other DNA
tgatgcagactgcaatctgcagagcctgtgctggccgtgtcataaggcgaagacggcccgtgaacgactgaagtg

SEQ ID NO: 32648 - DNA, 75 bp, synthetic construct
  source 1..75: mol_type = other DNA
gaactaccaaaaagcggaacaaaacagcccaaatgcgttacaaaacgagccagaaacgaaacagcctgaaccagt

SEQ ID NO: 32649 - DNA, 75 bp, synthetic construct
  source 1..75: mol_type = other DNA
agccaatatcagccagcctgacgccgataagttgcttgctgcctctcgcggagaatttgttgcagggattagcga

SEQ ID NO: 32650 - DNA, 75 bp, synthetic construct
  source 1..75: mol_type = other DNA
gctcaggactgcgcttataaatttattatctgcgaggataaacctggcataccccgccctgccctcgattcatgg

SEQ ID NO: 32651 - DNA, 75 bp, synthetic construct
  source 1..75: mol_type = other DNA
aaactggaaagcacagtccgttatctgggcattgaagtcgatgatgcgttagagatctctgaatcgattgaagtc

SEQ ID NO: 32652 - DNA, 75 bp, synthetic construct
  source 1..75: mol_type = other DNA
aaatacggtcgcgcaaacaaactttctggtctggataaggcgctggctgccggggctactgaaatcacgaaagaa

SEQ ID NO: 32653 - DNA, 75 bp, synthetic construct
  source 1..75: mol_type = other DNA
cattgacggcagcatccatcgctgggcaaaaaatgaagttatcgacaaagatcgcgaagactggaagcgcatttc

SEQ ID NO: 32654 - DNA, 75 bp, synthetic construct
  source 1..75: mol_type = other DNA
gggattgaaacccgcgattctgtgaaccagaaccagcaagaaacggaacagaacgaccagaaagcggaacaaaac

SEQ ID NO: 32655 - DNA, 75 bp, synthetic construct
  source 1..75: mol_type = other DNA
gcaaaaaatgaagttatcgacaacgaccgcgaagactggaagcgtatctcggcatcaatgcgcaaacagcctgat

SEQ ID NO: 32656 - DNA, 75 bp, synthetic construct
  source 1..75: mol_type = other DNA
ccattcctgacgaactggcaacaagggaagaaggcgctgtggctgtagccacagctattgaagctggcgacgaac

SEQ ID NO: 32657 - DNA, 75 bp, synthetic construct
  source 1..75: mol_type = other DNA
acgaagtaaacaaaattatgcaggcagccaatatcagccagcctgacgccgataagttgcttgctgtatcacgtg

SEQ ID NO: 32658 - DNA, 75 bp, synthetic construct
  source 1..75: mol_type = other DNA
atccgaaatgggtaaaggggattgaaacccgcgattctgtaaaccagaaccagcaagaatcggaacagaacgacc

SEQ ID NO: 32659 - DNA, 75 bp, synthetic construct
  source 1..75: mol_type = other DNA
gagctggaggaagaagaaaaaaggctgatacgtgaataccagcctgagttttactttggtgagcgtattcagtaa

SEQ ID NO: 32660 - DNA, 75 bp, synthetic construct
  source 1..75: mol_type = other DNA
ctgtgcagggaaatcattaccccgtttctggcccggggattttttcccgactttctacgcctgccatctggctgt

SEQ ID NO: 32661 - DNA, 75 bp, synthetic construct
  source 1..75: mol_type = other DNA
ctggtctggtcacccggacagcgggatatcatcaaaacggtggcgctggtgctgatggtactggaccacatcaat

SEQ ID NO: 32662 - DNA, 75 bp, synthetic construct
  source 1..75: mol_type = other DNA
ctttgctgttgcggcacaggtgctgacatggtgtgaaacgcccagccggtggcgtttcgcagggactatgttgct

SEQ ID NO: 32663 - DNA, 75 bp, synthetic construct
  source 1..75: mol_type = other DNA
acgctggacacgctgaaagaaattgccgcagccataaacaatgacccgaaattcagtaccaccattaacaatgcg

SEQ ID NO: 32664 - DNA, 75 bp, synthetic construct
  source 1..75: mol_type = other DNA
tttcactgtcttataagcctgtaagtgttaaaggctttgaggcatcagtgactctggataatgccttcaacaagc

SEQ ID NO: 32665 - DNA, 75 bp, synthetic construct
  source 1..75: mol_type = other DNA
tccgctgtttgccctggtgtgggggctgaatctgtcccgtcatgcgcatatccggcaggtggccattaaccggct

SEQ ID NO: 32666 - DNA, 75 bp, synthetic construct
  source 1..75: mol_type = other DNA
ttattgtcctgctggtagcctgtggtgcgcttggtctggggctgaatcattaccgcgataacgccatcacctaca

SEQ ID NO: 32667 - DNA, 75 bp, synthetic construct
  source 1..75: mol_type = other DNA
atgatgcttacagaaccatatatagaaacagatattcaagcatatctatatacttatggcagttggctcctatta

SEQ ID NO: 32668 - DNA, 75 bp, synthetic construct
  source 1..75: mol_type = other DNA
cagttacggctgcattcctggttgtcgcgtgtagctccccgacaccgccgaaaggcgttaccgtggtaaataact

SEQ ID NO: 32669 - DNA, 75 bp, synthetic construct
  source 1..75: mol_type = other DNA
cagactggcagacaccgctgaacgggattatttcaccctccgggaacgactggtaatgatgcaggcccaacttga

SEQ ID NO: 32670 - DNA, 75 bp, synthetic construct
  source 1..75: mol_type = other DNA
atgaaaatcaagcatgaacacatccgcatggcgatgaatgcttgggcgtatccggacggtgagaaagtacctgca

SEQ ID NO: 32671 - DNA, 75 bp, synthetic construct
  source 1..75: mol_type = other DNA
ctggctgctgacacggttgtacaggcgggagaaaccgtgaacgacggaacactgacaaatcatgacaaccagatt

SEQ ID NO: 32672 - DNA, 75 bp, synthetic construct
  source 1..75: mol_type = other DNA
aacgccggttatgtgaagttcgggcatggcagtgcacaacatgtgcgtgccggtttccgtctgggcagccacaac

SEQ ID NO: 32673 - DNA, 75 bp, synthetic construct
  source 1..75: mol_type = other DNA
tggagggtaaagctgataatgtcgtactggaaaatggcggacgcctggatgtgctgaccggacacacagccacta

SEQ ID NO: 32674 - DNA, 75 bp, synthetic construct
  source 1..75: mol_type = other DNA
gacctcttctgacactggcgttgaattattacctgtagaaataacgccggatgagcagaaagaaccggtggcggc

SEQ ID NO: 32675 - DNA, 75 bp, synthetic construct
  source 1..75: mol_type = other DNA
actgacaaatcatgacaaccagattgtcttcggtacggccaacggaatgaccatcagtaccgggctggaactggg

SEQ ID NO: 32676 - DNA, 75 bp, synthetic construct
  source 1..75: mol_type = other DNA
tatcaccctgggcgttcaggccggttatgcccacagcatcaacggcagcagcgctgaaggttatagcagtcaggc

SEQ ID NO: 32677 - DNA, 75 bp, synthetic construct
  source 1..75: mol_type = other DNA
ctggctgcgaaagtacaaacggcgctgaaagacgatcccatgtccggccatattttcattttccggggccgcagc

SEQ ID NO: 32678 - DNA, 75 bp, synthetic construct
  source 1..75: mol_type = other DNA
gaatgcttatgagtgttgctgtgggatgtttatcgtggtatgtcaccagaccgaagaaccaacagacaaaggccg

SEQ ID NO: 32679 - DNA, 75 bp, synthetic construct
  source 1..75: mol_type = other DNA
aaatctggctggttgccggtatcaccgacatgcgcaacggcttcaatggtctggcctcaaaagttcagacgacgc

SEQ ID NO: 32680 - DNA, 75 bp, synthetic construct
  source 1..75: mol_type = other DNA
tgaaaatggtcgtcagattgtggcgaccaccggagtagcaaataccacggtggtttatgccggcggcgaccagac

SEQ ID NO: 32681 - DNA, 75 bp, synthetic construct
  source 1..75: mol_type = other DNA
aaatggtcgtcaggtcgtgctggaggggggaacagccagtgatacggttattcgtgacggcgggggacagagcct

SEQ ID NO: 32682 - DNA, 75 bp, synthetic construct
  source 1..75: mol_type = other DNA
gagctgaatacccccatcgaatggggcggtgagtggcggtcattaaaggatgggcctcactttcagttgaaacga

SEQ ID NO: 32683 - DNA, 75 bp, synthetic construct
  source 1..75: mol_type = other DNA
ttgttaccagcgatcgaaaaggcaatgccacctttgctggtggccagaatgcgcagccacagttcagcttatttt

SEQ ID NO: 32684 - DNA, 75 bp, synthetic construct
  source 1..75: mol_type = other DNA
gcatggcgatgaatgtctgggcgcatccggacggcgaaaaagtaccggctgcgaaaattaccaaagcgtatttcg

SEQ ID NO: 32685 - DNA, 75 bp, synthetic construct
  source 1..75: mol_type = other DNA
tgatgctgttgaaaaaatgcaggctctgttaccggcgatcgaaaaggcaatgccgcctctgctggtggcccgtat

SEQ ID NO: 32686 - DNA, 75 bp, synthetic construct
  source 1..75: mol_type = other DNA
gctgaaatagcccggacttatttcgagctggggatgacgttcccggaactgtacgacgacagccatccggaagcc

SEQ ID NO: 32687 - DNA, 75 bp, synthetic construct
  source 1..75: mol_type = other DNA
atgaaaatcaaacatgagcacatccgcatggcgatcaatgcctgggcctatccggacggtgagaaagttcctgca

SEQ ID NO: 32688 - DNA, 75 bp, synthetic construct
  source 1..75: mol_type = other DNA
cacggcagttcgccagagagctgaatctggagccctgcacgacggcagtcagcagtcctcagagtaatggaatgg

SEQ ID NO: 32689 - DNA, 75 bp, synthetic construct
  source 1..75: mol_type = other DNA
aaacgttctgtgatgaatcatattgcggccctttgtgagtccgggctggtaaaaaaagtcacccggaaaggtgaa

SEQ ID NO: 32690 - DNA, 75 bp, synthetic construct
  source 1..75: mol_type = other DNA
aagttatggctattggtcaaattaatatttccggcaatgttacacctgcgaactggtggaaatatattcgactac

SEQ ID NO: 32691 - DNA, 75 bp, synthetic construct
  source 1..75: mol_type = other DNA
aattctgctggaaaatcaggtcatcactgaagaacaactcgatacagcactgcgtaatcgcgtcgaaggtctacg

SEQ ID NO: 32692 - DNA, 75 bp, synthetic construct
  source 1..75: mol_type = other DNA
gatgaaattgatttcaacaaggctatctgggagatacccgcttcacgtatgaaaatgcggcggcctcatattgtg

SEQ ID NO: 32693 - DNA, 75 bp, synthetic construct
  source 1..75: mol_type = other DNA
tgattgagctatttgaagtccggctaaaagaaatcgatgagtatgtagaaaaatatttgagaggcaggcttaaag

SEQ ID NO: 32694 - DNA, 75 bp, synthetic construct
  source 1..75: mol_type = other DNA
attgccgtggggaactgcccggaaagctataaaccgcaactggctgaaggcagcgggcgtacccagaccgtgcgc

SEQ ID NO: 32695 - DNA, 75 bp, synthetic construct
  source 1..75: mol_type = other DNA
atgacagcgcttcccgaccatgccgccagtcccctgatgacccgcctgcaggacgagctgcgcacggaatctgtc

SEQ ID NO: 32696 - DNA, 75 bp, synthetic construct
  source 1..75: mol_type = other DNA
cgcacggttctgcgtgccgtccgtgacacggtggtctctgttgcccgcgcggtatggaactggattttcttctga

SEQ ID NO: 32697 - DNA, 75 bp, synthetic construct
  source 1..75: mol_type = other DNA
tctgcggcttaaacgcctgggcctgtcaaaaacgttccgccgtctggttgtcacactcatccgacgttatggcgt

SEQ ID NO: 32698 - DNA, 75 bp, synthetic construct
  source 1..75: mol_type = other DNA
ctactcccttcgtgttgttgatgaatctgaccggacctcaacagacagcatacccccctctgctgccctgagcgg

SEQ ID NO: 32699 - DNA, 75 bp, synthetic construct
  source 1..75: mol_type = other DNA
gaacatgggacgcattgtcgttgacgtcgatggtgttaatctcgctgaactgattaacgtggcctgcgacaatgg

SEQ ID NO: 32700 - DNA, 75 bp, synthetic construct
  source 1..75: mol_type = other DNA
gcatcccgaaatggatataaaaatacctttccttactgtcatggaaacgttgcaatataaaccggcagagagtgc

SEQ ID NO: 32701 - DNA, 75 bp, synthetic construct
  source 1..75: mol_type = other DNA
ccacagtgcagatcaaagcagccagaccagcgcaaaaggagtacaccctgcaggacggcggagggctttttctcc

SEQ ID NO: 32702 - DNA, 75 bp, synthetic construct
  source 1..75: mol_type = other DNA
tgtcaccggtctggctggacagccggagccgttatctgcgggatatgtaccgaccggggatggtgatggagcagt

SEQ ID NO: 32703 - DNA, 75 bp, synthetic construct
  source 1..75: mol_type = other DNA
tagtacttatgcgctggtggggtgaatttgtggaagccgcagcaaccggagtgaccatagccagtggtaaaaggg

SEQ ID NO: 32704 - DNA, 75 bp, synthetic construct
  source 1..75: mol_type = other DNA
ccgttcggtaaacatcttcgataaaactggcgcggaagtaaaacgtcaggatattgaatccaatctgcaatatga

SEQ ID NO: 32705 - DNA, 75 bp, synthetic construct
  source 1..75: mol_type = other DNA
cctggcctgtgagctgttgccggagtggagtgagttttttgatgaactgctggaaaacggaggcatgcgtcaatg

SEQ ID NO: 32706 - DNA, 75 bp, synthetic construct
  source 1..75: mol_type = other DNA
tccgggcaacagtcaacctgcacaccaccaccgttaacaatccttgccggcatacgctgcagcaccgcacatatc

SEQ ID NO: 32707 - DNA, 75 bp, synthetic construct
  source 1..75: mol_type = other DNA
cgctatccgcacggtgaaattacagctcacagactgtggtgaaacccggggacgctgggtgattgaaggcgacct

SEQ ID NO: 32708 - DNA, 75 bp, synthetic construct
  source 1..75: mol_type = other DNA
attcgctatatcacgctgaacagaccagaactacctgaaacaaaagaggaaaatcagatatcagtgagagcagaa

SEQ ID NO: 32709 - DNA, 75 bp, synthetic construct
  source 1..75: mol_type = other DNA
tcacttgccggagagattgaggatgaagacagcacgctcgctgaacgtcaggaagcacgggcggagcggtttacc

SEQ ID NO: 32710 - DNA, 75 bp, synthetic construct
  source 1..75: mol_type = other DNA
aagcgcatatcaaaaccagcccatcatacctggcgcagctatgcgatgtttctgctggatgtgatgccggaaaga

SEQ ID NO: 32711 - DNA, 75 bp, synthetic construct
  source 1..75: mol_type = other DNA
aaatcctgacgggtgaggatgtcctgtgtgcggccgttcaccgtattgagtggttgtttgagacattttcttctg

SEQ ID NO: 32712 - DNA, 75 bp, synthetic construct
  source 1..75: mol_type = other DNA
tgaaggctattggtgtaccggttcagtggactaatggcgatgcggaaaagcgcatgacaggagctgactggctga

SEQ ID NO: 32713 - DNA, 75 bp, synthetic construct
  source 1..75: mol_type = other DNA
cgctggaggttgacggccaggagccggacacctttgcagtggtgaatttcaggttaatccagaaccagtcttatc

SEQ ID NO: 32714 - DNA, 75 bp, synthetic construct
  source 1..75: mol_type = other DNA
tctgaccggacatcagcagagcgcacgccaccatctgcggcccttaccggcatacgctgcagtaccgcgcatatc

SEQ ID NO: 32715 - DNA, 75 bp, synthetic construct
  source 1..75: mol_type = other DNA
gtgggcggggattcgttcgccctggtgagactggaaaaccacaaaattggggtttttcaggcataaaaaaagcgg

SEQ ID NO: 32716 - DNA, 75 bp, synthetic construct
  source 1..75: mol_type = other DNA
gcaggaagaacctgcattctcaagcgcactcgatgccttccaaaaagcaggtaatactgtcattggcaatgacgt

SEQ ID NO: 32717 - DNA, 75 bp, synthetic construct
  source 1..75: mol_type = other DNA
atgcacttccgagtcacaggtgaatggaatggagaaccattcaacagagttatcgaagcagagaacatcaatgac

SEQ ID NO: 32718 - DNA, 75 bp, synthetic construct
  source 1..75: mol_type = other DNA
tgcaggtatttactgtaaactgtcgggctgacagggtgcaggtccgtctggaatgcgacgatgcagctgtttttg

SEQ ID NO: 32719 - DNA, 75 bp, synthetic construct
  source 1..75: mol_type = other DNA
atgcaagttattctgcttgataaagtagcaaacctgggtagcctgggtgatcaggtaaacgttaaagcgggctat

SEQ ID NO: 32720 - DNA, 75 bp, synthetic construct
  source 1..75: mol_type = other DNA
aagtgaaatcgtccacgtatggcgcggcggggtatggtgtccggtcagcacaatggagctgagccgcgaaatggt

SEQ ID NO: 32721 - DNA, 75 bp, synthetic construct
  source 1..75: mol_type = other DNA
gatgctggacgcggggcgttgtactttctacaccccggcatcgctgggggatgtgaaactggaactttttgcggt

SEQ ID NO: 32722 - DNA, 75 bp, synthetic construct
  source 1..75: mol_type = other DNA
ggcgcattgccaacacctacatgctcaaaacagaaaagtacgggaagtggttcatcgacaaatcggcgcacagtg

SEQ ID NO: 32723 - DNA, 75 bp, synthetic construct
  source 1..75: mol_type = other DNA
agcgccgcagtagacgcggcagaagcacaacgtcagtcactgattgatactgtaatggcttccattagtctgatt

SEQ ID NO: 32724 - DNA, 75 bp, synthetic construct
  source 1..75: mol_type = other DNA
atgagcaaaatatcaggttggaatttttctcaaaacattacatcagccgacaattgtaaacaaaaaaatgaagac

SEQ ID NO: 32725 - DNA, 75 bp, synthetic construct
  source 1..75: mol_type = other DNA
ccggtaccggaaaacgctgacgaaaaaaagaaacacacccgaaccctgcaggatgcggagcggtccctggcacag

SEQ ID NO: 32726 - DNA, 75 bp, synthetic construct
  source 1..75: mol_type = other DNA
atgaaatcattaaccacggaaacagcgctggatattctgattgcgtggctgcaggacaatattgactgcgaatca

SEQ ID NO: 32727 - DNA, 75 bp, synthetic construct
  source 1..75: mol_type = other DNA
ctcgataccgaatctctgatttgcactgtgaaaaggagatctcaacaaaaagcggcatttttgcagcgagatatt

SEQ ID NO: 32728 - DNA, 75 bp, synthetic construct
  source 1..75: mol_type = other DNA
ggaaaatcagcaacgcaatcaggacggagaggtaagacgtgaacagctacgcaacgatattgcaaaagatgaatg

SEQ ID NO: 32729 - DNA, 75 bp, synthetic construct
  source 1..75: mol_type = other DNA
cgcgggataatccaccaatcccgggaaaacaatcactggcgaatggctcatcaattgccctggtcagcccggttg

SEQ ID NO: 32730 - DNA, 75 bp, synthetic construct
  source 1..75: mol_type = other DNA
gatataattccattcgccgtgagcgcccgttaacggatgacgaattaatgcagtttgtaccgtctgttttttctg

SEQ ID NO: 32731 - DNA, 75 bp, synthetic construct
  source 1..75: mol_type = other DNA
gggttacatgcaggcgttagtccagtatgggctgcgcaacctgaaagaaggggcgaagttccggaaagggattga

SEQ ID NO: 32732 - DNA, 75 bp, synthetic construct
  source 1..75: mol_type = other DNA
atgtcagaaataaaatcgctggtcactgctgaagcagtgaaggaagtcctgcgctctgaagaagtcagaagcgca

SEQ ID NO: 32733 - DNA, 75 bp, synthetic construct
  source 1..75: mol_type = other DNA
cagccgcagacgctggactcagacatcatggccgttggtcgctatgtgctttctgccgatatttggccggaactt

SEQ ID NO: 32734 - DNA, 75 bp, synthetic construct
  source 1..75: mol_type = other DNA
agaagcggcccgcatgctgaccgaaggcgcagcagacgatcaggatgcgcgttcggaggctgtgatagcccttat

SEQ ID NO: 32735 - DNA, 75 bp, synthetic construct
  source 1..75: mol_type = other DNA
gctgaaagcggtgaaacccgacagtagcgtggtgcgtgaagcgcaggactggctgtgcgacagaaaacttgtgga

SEQ ID NO: 32736 - DNA, 75 bp, synthetic construct
  source 1..75: mol_type = other DNA
cagtggctctgctcctgagtgccggggtgttgatgagtagtggtctggctatcatgctcactgaacagctatggt

SEQ ID NO: 32737 - DNA, 75 bp, synthetic construct
  source 1..75: mol_type = other DNA
tcgtcctgctaaatacaaatatacagatgaaaacggtaatgagcagacttggacgggtcagggccgtactcctaa

SEQ ID NO: 32738 - DNA, 75 bp, synthetic construct
  source 1..75: mol_type = other DNA
taacgggcaggaagttcctgaaattatcctgcttaattcacatgatggttcatccagttatcagatgatccccgg

SEQ ID NO: 32739 - DNA, 75 bp, synthetic construct
  source 1..75: mol_type = other DNA
aagcacgctctcaattgcctgatggcccctgcatttttactgcccgtttttcaactaactcgcgcaattcactta

SEQ ID NO: 32740 - DNA, 75 bp, synthetic construct
  source 1..75: mol_type = other DNA
ggatattgaaaacagcaagctggtcgtgatgtttggtaacaacccggcagaaacccgcatgagcggcggtggcat

SEQ ID NO: 32741 - DNA, 75 bp, synthetic construct
  source 1..75: mol_type = other DNA
taaagcactgcatctggctactcaggcgatacagtgtggcgaggctgatattgtcatcgccggtggccaggaaaa

SEQ ID NO: 32742 - DNA, 75 bp, synthetic construct
  source 1..75: mol_type = other DNA
ggattccactgttttatttcatctggttgcagatatcgcccgcagaaaaaaacgacgtttttccgtgttgtttat

SEQ ID NO: 32743 - DNA, 75 bp, synthetic construct
  source 1..75: mol_type = other DNA
cacctcaaacggcatcacagtgcatacgcataaacacggtggtgtgaaaggcggcagcgattcgacaggaggccc

SEQ ID NO: 32744 - DNA, 75 bp, synthetic construct
  source 1..75: mol_type = other DNA
tggtatattgaagatacagctctgaaatttacccggcctgatttctggaacagcggtttttttgctgatacacct

SEQ ID NO: 32745 - DNA, 75 bp, synthetic construct
  source 1..75: mol_type = other DNA
cgcccgtcgtggaatgcacaaaccttctgagaacggcgacgcttgacgtcacaaaagggggaaagatgagcggca

SEQ ID NO: 32746 - DNA, 75 bp, synthetic construct
  source 1..75: mol_type = other DNA
ctgaagcaatggctgctcgcctcgatagcctggcgtgtcatatcacctcccgccagctaaaccacgtcgaagcgg

SEQ ID NO: 32747 - DNA, 75 bp, synthetic construct
  source 1..75: mol_type = other DNA
atgcgtaatattgaaaccctcacgaccaaaaccggaccggatgatgcaggtcttaatcttttactgacagaggct

SEQ ID NO: 32748 - DNA, 75 bp, synthetic construct
  source 1..75: mol_type = other DNA
ctgacaaaattaacgacagaaattgccagctattgcgctgatgaatttaaaaaacttaacgacaaaaggagctgg

SEQ ID NO: 32749 - DNA, 75 bp, synthetic construct
  source 1..75: mol_type = other DNA
catcagggaaacacgctggcggaatatccgtatgcgggggcgtttttccgctgtctgacctgtgatttttcatgc

SEQ ID NO: 32750 - DNA, 75 bp, synthetic construct
  source 1..75: mol_type = other DNA
aaacggggcgtaaatccagccgtaaatcgtcaaaagaacaggaaaccgccctgtctgccctgctggcgcagacgg

SEQ ID NO: 32751 - DNA, 75 bp, synthetic construct
  source 1..75: mol_type = other DNA
tgaagaaaggcgatgccgctgaacatgcagagttccacatgaaagacaaccgctgggtgcctggctggatgtgta

SEQ ID NO: 32752 - DNA, 75 bp, synthetic construct
  source 1..75: mol_type = other DNA
agttgaaaagaaaattaatctggattgtgcatcacaaggtgtcggaattaaaggggtcagtggcttcgatttttt

SEQ ID NO: 32753 - DNA, 75 bp, synthetic construct
  source 1..75: mol_type = other DNA
tacagcgtggtccgaaccgtttccggaaaaaggataaaatcaactggttactggatttactgtatgaacaaaaca

SEQ ID NO: 32754 - DNA, 75 bp, synthetic construct
  source 1..75: mol_type = other DNA
atgcgtaatattgaaaccctctcgactaaaaccggaccggatgacgcaggacttaatattttactgacagaggct

SEQ ID NO: 32755 - DNA, 75 bp, synthetic construct
  source 1..75: mol_type = other DNA
atgaaaaaacaaacccagctgttgagtgcattagcgttaagtgtcgggttaactctctcggcgtcatttcaggcc

SEQ ID NO: 32756 - DNA, 75 bp, synthetic construct
  source 1..75: mol_type = other DNA
aagattacacagagcgggaattcattgagttgcttggcgagtttacaaatccaaccggggataacgctcaattaa

SEQ ID NO: 32757 - DNA, 75 bp, synthetic construct
  source 1..75: mol_type = other DNA
atgccagaaattaaaggcaccgtcactgaagacctggtaaaacaggcactgtattccggtgaagtaaataagttg

SEQ ID NO: 32758 - DNA, 75 bp, synthetic construct
  source 1..75: mol_type = other DNA
gatgaacgataccagcggtcgctggagctatgcgcgtcagctgtatggtcatgtgtatacggcaaagatcggcac

SEQ ID NO: 32759 - DNA, 75 bp, synthetic construct
  source 1..75: mol_type = other DNA
cgagttcaccaccgacgtgaaagtcacggagtctccgatcctgttccgtgacgagagcatgcgcaccgcgtgctc

SEQ ID NO: 32760 - DNA, 75 bp, synthetic construct
  source 1..75: mol_type = other DNA
gaaccgacaactgaatgagaatcgccgttactggcaacagcttgaagttgtgcagggtaactggaaaaacggagt

SEQ ID NO: 32761 - DNA, 75 bp, synthetic construct
  source 1..75: mol_type = other DNA
gcgtgttactgcgtgccgacgatcccctgatcgacatgaactacatcaccagtttcaccggtatgaccgataaat

SEQ ID NO: 32762 - DNA, 75 bp, synthetic construct
  source 1..75: mol_type = other DNA
atggtaagtggatcgttgatattgatggcgaggttgctatcaggaatctgacaagactgccgggacgtcgtctaa

SEQ ID NO: 32763 - DNA, 75 bp, synthetic construct
  source 1..75: mol_type = other DNA
caggaagaaggcgaagcctttaaccggcagcttgagctcaccggacactatgccggtgtgacagccgggcagttg

SEQ ID NO: 32764 - DNA, 75 bp, synthetic construct
  source 1..75: mol_type = other DNA
tggaaacgatatcggtatggtggcgagagctgccgcacagatggagcgatcggttggccagtcggtcagcgatac

SEQ ID NO: 32765 - DNA, 75 bp, synthetic construct
  source 1..75: mol_type = other DNA
agtttaaacggctgaaggatgatccggtcagtgctgcgaaggcgctggatgatgaactgcattttctgacagcca

SEQ ID NO: 32766 - DNA, 75 bp, synthetic construct
  source 1..75: mol_type = other DNA
tgaccgaaagtgaagtggcggtggcagggaacagtaaattccgcttcgtgggggctgatgccttctcgccagatg

SEQ ID NO: 32767 - DNA, 75 bp, synthetic construct
  source 1..75: mol_type = other DNA
gaatgaacgccgggcaaattcacaactttaaggtgctgatgttagagaacacccttgaaccgtataagtatatga

SEQ ID NO: 32768 - DNA, 75 bp, synthetic construct
  source 1..75: mol_type = other DNA
caggatagacgttgagctgggcgcgcgcttattccgacacatgttagctctgcctctctcttatttttcaatgcg

SEQ ID NO: 32769 - DNA, 75 bp, synthetic construct
  source 1..75: mol_type = other DNA
tgataaagcaaatgcgccagcaaggtgcgtatattgttgatattgcgactcagattggttgctctgaacgaacgg

SEQ ID NO: 32770 - DNA, 75 bp, synthetic construct
  source 1..75: mol_type = other DNA
cctgttcgccagatattggtactgaccgacagaaaacctgttatcggtcaacgaacaggaaaaaacgataaaacc

SEQ ID NO: 32771 - DNA, 75 bp, synthetic construct
  source 1..75: mol_type = other DNA
cgccgttgtcgtccggtgacgatccggaaaactggacgccagaacagttaataaactttgcaaaatttgtgatga

SEQ ID NO: 32772 - DNA, 75 bp, synthetic construct
  source 1..75: mol_type = other DNA
acgaagtggtacagcgtctgatgcgcttctgctccgttgagatgggttccttctacctcgacatcatcaaagacc

SEQ ID NO: 32773 - DNA, 75 bp, synthetic construct
  source 1..75: mol_type = other DNA
tcactcggttaacaagattctgaaagacattatcgtgaagtccaaagggctttccggttatgactcgccgtatgt

SEQ ID NO: 32774 - DNA, 75 bp, synthetic construct
  source 1..75: mol_type = other DNA
acctttcacgcgaacgctgccagctaatactgacccagcttgttatggcgggtctggcagactatcagttcggtt

SEQ ID NO: 32775 - DNA, 75 bp, synthetic construct
  source 1..75: mol_type = other DNA
taaggttgaggcggcatatcatcgtactgatctactggagcagcgtgtaccgatgatgcaggcatgggcggatta

SEQ ID NO: 32776 - DNA, 75 bp, synthetic construct
  source 1..75: mol_type = other DNA
ccagcaacggcacaggttacaccatcgccagccgtcgctttgtttcggcagaccaactgccgctcattgtgctgg

SEQ ID NO: 32777 - DNA, 75 bp, synthetic construct
  source 1..75: mol_type = other DNA
gtgcgcaggggaaaactgcgccgtaatgtggtggtcctttcccggcgttcccgcgacggagggatggaatccggc

SEQ ID NO: 32778 - DNA, 75 bp, synthetic construct
  source 1..75: mol_type = other DNA
catgcgcgactggtggcagccgacaaaagcaaacttcttcggacacctgaaaaagccgcagattatcgcagccct

SEQ ID NO: 32779 - DNA, 75 bp, synthetic construct
  source 1..75: mol_type = other DNA
cgctgggtgcctggctggatgtgtgcaccacgtccacagacggatgccactgaacgcgccgataacctggctgat

SEQ ID NO: 32780 - DNA, 75 bp, synthetic construct
  source 1..75: mol_type = other DNA
cgcagtgaagatgacgcgactgacgacgctgaccgcacggaacaggtgcaggagaaagcgtcagtggaggaaatc

SEQ ID NO: 32781 - DNA, 75 bp, synthetic construct
  source 1..75: mol_type = other DNA
cagttggccaccgtcacccgcctggccaaggacaacgagctgcccgatgccatcctcaccgagtcagggctgaaa

SEQ ID NO: 32782 - DNA, 75 bp, synthetic construct
  source 1..75: mol_type = other DNA
gtgacggagaggcatttctgtttggcgctaacatcacgccaatggccgtggcctccacgcatgtggtgtgcgatc

SEQ ID NO: 32783 - DNA, 75 bp, synthetic construct
  source 1..75: mol_type = other DNA
cttgactttcaacagtgttcagcatttacagagcatgccgtgtttaattacttgtgtagggtggctaatgaacgt

SEQ ID NO: 32784 - DNA, 75 bp, synthetic construct
  source 1..75: mol_type = other DNA
ctacaatcgccgcgttgagatgtatcgggagaaagaaaaaataacgtaccactggaagaagccggagcggttacg

SEQ ID NO: 32785 - DNA, 75 bp, synthetic construct
  source 1..75: mol_type = other DNA
atgacagaagccgaactactgggattaatccgccgcgttaccggaatcagccagcagcatgacgaacaggccacg

SEQ ID NO: 32786 - DNA, 75 bp, synthetic construct
  source 1..75: mol_type = other DNA
ctaccgtcgccgcgtgcagacgtacagggaaaaagcaaaaattacgtaccactggaagaagccggagcggttacg

SEQ ID NO: 32787 - DNA, 75 bp, synthetic construct
  source 1..75: mol_type = other DNA
aaattctctcattacgctgggaacacctcgatttgcagcacggcgtggcgcatcttcctgaaacgaaaaatggct

SEQ ID NO: 32788 - DNA, 75 bp, synthetic construct
  source 1..75: mol_type = other DNA
ggtaaaccgcgaaagcatggactccctgaaagaaacgctacagggtgcgcgtggtggtggtgcgtttaaaaacgt

SEQ ID NO: 32789 - DNA, 75 bp, synthetic construct
  source 1..75: mol_type = other DNA
atgactgattatacgcttaattatactgcacaagataagaaaaaaggtctagaaattatcatttataatcatggt

SEQ ID NO: 32790 - DNA, 75 bp, synthetic construct
  source 1..75: mol_type = other DNA
acgtcttccacctgatggagccggatatcaaccaggagatttatggtctgccgggttacctttctgccattccgt

SEQ ID NO: 32791 - DNA, 75 bp, synthetic construct
  source 1..75: mol_type = other DNA
tgaaggaagactacatcgcgttcatgccgaaaccgaatgtaagaacggcattgcataatcttgcagtggcgatcg

SEQ ID NO: 32792 - DNA, 75 bp, synthetic construct
  source 1..75: mol_type = other DNA
tgtctatgaagttattggtaattgggtatggattagtggtgaaaccattactcataaagaaacgttaaaagaaat

SEQ ID NO: 32793 - DNA, 75 bp, synthetic construct
  source 1..75: mol_type = other DNA
atacgatcctgattccggatacatgtacctcagcgatgaaacttatcgtgtcattcttaaagcgaagattgcgat

SEQ ID NO: 32794 - DNA, 75 bp, synthetic construct
  source 1..75: mol_type = other DNA
ttcagaacgacggtacgaatggtctgccaggtccacagatgatgaaggcagtgtatgacatggcccgcaagggtg

SEQ ID NO: 32795 - DNA, 75 bp, synthetic construct
  source 1..75: mol_type = other DNA
ttgccagaaagaagtttgatgcagctgaactctgtgacggggcttacaggtgtaagacatttgaaaacacccctg

SEQ ID NO: 32796 - DNA, 75 bp, synthetic construct
  source 1..75: mol_type = other DNA
caacacgctgatggcggcggcgaaaaaggattatgaatcgacgctgaaaaaaccgaagtcgtcaggtgtcaaagt

SEQ ID NO: 32797 - DNA, 75 bp, synthetic construct
  source 1..75: mol_type = other DNA
gacctgggcggctgaagacctgcttcgcgggaactggatggcaggcctcaggtccggctggagtgagtgggaaga

SEQ ID NO: 32798 - DNA, 75 bp, synthetic construct
  source 1..75: mol_type = other DNA
cgcagttttgcctgcgcggccacgtaaaccgaaagataaagccaaagctgaagttggcgttcaggttgttgaacg

SEQ ID NO: 32799 - DNA, 75 bp, synthetic construct
  source 1..75: mol_type = other DNA
ttctctgttccggttaccccacatactttccgccattcctacgcgatgcatatgctgtatgctggtattccgctg

SEQ ID NO: 32800 - DNA, 75 bp, synthetic construct
  source 1..75: mol_type = other DNA
atgcacatgctgtatgccggtataccgctgaaggtcctgcagagcctgatggggcataagtccatcagctcaacg

SEQ ID NO: 32801 - DNA, 75 bp, synthetic construct
  source 1..75: mol_type = other DNA
acgaaggatgcgatgggaaccatccagcgcgtgctggagaaggtaaacgcgctgccgcaggacaagcgcctgtct

SEQ ID NO: 32802 - DNA, 75 bp, synthetic construct
  source 1..75: mol_type = other DNA
tcttgccgacggcgaagaagctctcagcttcaacgaatttaaacaggcgctttccagctcggcaaaatctaacgg

SEQ ID NO: 32803 - DNA, 75 bp, synthetic construct
  source 1..75: mol_type = other DNA
atggatttcgacacaatcatggaaaaggcttacgaagaatacttcgaaggtcttgccgacggcgaagaagctctc

SEQ ID NO: 32804 - DNA, 75 bp, synthetic construct
  source 1..75: mol_type = other DNA
gcaaattgttgaaaactatcgcggtggcgatattgcgctgggtatcggcgatgaagttttatcaccggttatgtt

SEQ ID NO: 32805 - DNA, 75 bp, synthetic construct
  source 1..75: mol_type = other DNA
gcccctgaatggcaaatgaaacgggaaatgctatcgccttcgtatacaacacaatggactgagatccccattgct

SEQ ID NO: 32806 - DNA, 75 bp, synthetic construct
  source 1..75: mol_type = other DNA
gtatagcgcagccgggattatttgatgaaatccagccccgtaaaaacagtgaaaagttaatgaaaacactcgatg

SEQ ID NO: 32807 - DNA, 75 bp, synthetic construct
  source 1..75: mol_type = other DNA
cgggagcacatgacccacgtaaaccaatcagtgaaaacaccgtaaataaagccctgagggttatggggtatgaca

SEQ ID NO: 32808 - DNA, 75 bp, synthetic construct
  source 1..75: mol_type = other DNA
gtacagtctggcatcatcagatataatcctgctctggatatggctggcgcattgacctctgtaaaacgacagcat

SEQ ID NO: 32809 - DNA, 75 bp, synthetic construct
  source 1..75: mol_type = other DNA
ctgtggtcatggattccgggcgatggcatgtagtgcgttaatagaatcaggtttgtggtcccgcgatgcagttga

SEQ ID NO: 32810 - DNA, 75 bp, synthetic construct
  source 1..75: mol_type = other DNA
tctgagcaggaaaaatccctgctggctcatgagaaagagacgctggagtacaaacgccagctggctgagctggga

SEQ ID NO: 32811 - DNA, 75 bp, synthetic construct
  source 1..75: mol_type = other DNA
cttccctggatggggcagatgatttgggatgcgcaatttgatggacacagtctcaccatgtgcaatatgtttcgc

SEQ ID NO: 32812 - DNA, 75 bp, synthetic construct
  source 1..75: mol_type = other DNA
cgtttcagcaatcgcttgctggcctgccacagtgggtgtctgaacgtatattgcagcagataaatcagttaaccc

SEQ ID NO: 32813 - DNA, 75 bp, synthetic construct
  source 1..75: mol_type = other DNA
cgctgcgccgcgacctgactgaacgtattaaccgcgagaatgcgccggtaattgttatcgagccatacatcatcg

SEQ ID NO: 32814 - DNA, 75 bp, synthetic construct
  source 1..75: mol_type = other DNA
ttgggctggaagagccgggcctgaaccgtgtgatccgtgccggttataagctgctgaacctgcaaacttacttca

SEQ ID NO: 32815 - DNA, 75 bp, synthetic construct
  source 1..75: mol_type = other DNA
gtttatttgtgccggtttaggttcttctacgctttattggggggttgctgaatgggcctattattatcaaacgcc

SEQ ID NO: 32816 - DNA, 75 bp, synthetic construct
  source 1..75: mol_type = other DNA
tgtagtgatgaagagaaggggctggctttgcagtgggtttctgaactgacagatgaactcatggcaaaaatcaga

SEQ ID NO: 32817 - DNA, 75 bp, synthetic construct
  source 1..75: mol_type = other DNA
ggcctattccgaagggacggcgacgcatccgctgacgaaaaatcgtggttacgacgtcattgtcactggccttga

SEQ ID NO: 32818 - DNA, 75 bp, synthetic construct
  source 1..75: mol_type = other DNA
tatcgatgaactgtggcgggatatgcgctggtcggtggcgcgtattcaggacaagccgcgctgtattgtcggcca

SEQ ID NO: 32819 - DNA, 75 bp, synthetic construct
  source 1..75: mol_type = other DNA
atggctggaaatcagcgtcagggggtggcgttcatccgtgtcaatggcatggagcttgaaacgatggaaggtgcc

SEQ ID NO: 32820 - DNA, 75 bp, synthetic construct
  source 1..75: mol_type = other DNA
tcttaaacttgtagcggctagtgagtgtagtgatgaagagaaggggctggctttgcagtgggtttctgaactgac

SEQ ID NO: 32821 - DNA, 75 bp, synthetic construct
  source 1..75: mol_type = other DNA
ctggcaggcagatgaaccgaaaaacgacggcggcgaaatttcgctggtactgatggcaaaacaaagcaaacgcat

SEQ ID NO: 32822 - DNA, 75 bp, synthetic construct
  source 1..75: mol_type = other DNA
tgaggaagcatattttcccctatataggtgattatccgttatcaatgtgcgaaacccggcattggctggagtgtt

SEQ ID NO: 32823 - DNA, 75 bp, synthetic construct
  source 1..75: mol_type = other DNA
tttctgagaccatgcaggagttcaataacatgttcgatcgcctggaggggtcattccggaaactgtcagatttct

SEQ ID NO: 32824 - DNA, 75 bp, synthetic construct
  source 1..75: mol_type = other DNA
agaactgaaaaggttgtcacgaatgaccagtgacatgctttttctggcacgttcagagcatggtctgctgcggct

SEQ ID NO: 32825 - DNA, 75 bp, synthetic construct
  source 1..75: mol_type = other DNA
gtcgatggtgttaatctcgctgaactgattaacaaggtcgctgaaaacggtgattcactccgcgtggtggatgaa

SEQ ID NO: 32826 - DNA, 75 bp, synthetic construct
  source 1..75: mol_type = other DNA
ttcagggcgcatggaatgaccgggaaaatgcccgtctggggctggcagcggccacgctgcagtcggatatggaaa

SEQ ID NO: 32827 - DNA, 75 bp, synthetic construct
  source 1..75: mol_type = other DNA
aacttctgcggtattgccatatcaatttcggtacaggacgtttaaacgatcttactcgttctcagttacagtctg

SEQ ID NO: 32828 - DNA, 75 bp, synthetic construct
  source 1..75: mol_type = other DNA
atgaacgtctgacggcagggatgcaggtgtttatggagtgtctggcaaaagccggcacgcaggtggaaaaactcg

SEQ ID NO: 32829 - DNA, 75 bp, synthetic construct
  source 1..75: mol_type = other DNA
cctgattgtgttcggatgccggacggtagaactgaggttatcggagatcagcgagtgggattttaccgaaatgct

SEQ ID NO: 32830 - DNA, 75 bp, synthetic construct
  source 1..75: mol_type = other DNA
agagttagcagatatttggcaggaatgttcaggtaagaaatttaaaccatactattcatcgttgttgcgtctatt

SEQ ID NO: 32831 - DNA, 75 bp, synthetic construct
  source 1..75: mol_type = other DNA
ccggctgcaccggatgaaaagtgtctgaccgctgctcgtgctgccatcgatgtcaataaccaggctttccgccag

SEQ ID NO: 32832 - DNA, 75 bp, synthetic construct
  source 1..75: mol_type = other DNA
acatccgtactatggcgatgatccagttactgctcggtaacatgggtatggccggtggcggcgtgaacgcattgc

SEQ ID NO: 32833 - DNA, 75 bp, synthetic construct
  source 1..75: mol_type = other DNA
tgaacaataaacacctgtccctgaccgccctgtaccctgacggtggtcaggaggttattgccatcctgccggtta

SEQ ID NO: 32834 - DNA, 75 bp, synthetic construct
  source 1..75: mol_type = other DNA
tttgattgggattccgggaaagtgcttattttcccatcacagccactgaccacgctaacaccagaacagattact

SEQ ID NO: 32835 - DNA, 75 bp, synthetic construct
  source 1..75: mol_type = other DNA
atgagtcttttgaatgaagttcagaaattcattgaagcccatccggggtgtacttccggagacattgcggatgct

SEQ ID NO: 32836 - DNA, 75 bp, synthetic construct
  source 1..75: mol_type = other DNA
ggaagccggatacagtcgcacacgtttatttgtgagaacgtaacactgggggagaactgcttcattggtcataac

SEQ ID NO: 32837 - DNA, 75 bp, synthetic construct
  source 1..75: mol_type = other DNA
cggtcatgtgacaatgcgaaacctgccaatggtacagactatcctgacgggaattgccattggtattttcccgct

SEQ ID NO: 32838 - DNA, 75 bp, synthetic construct
  source 1..75: mol_type = other DNA
ttcacgggccagccatgatgctcgtcatgatatcgatgccagagctacacaagactttaaagaggccagcgatta

SEQ ID NO: 32839 - DNA, 75 bp, synthetic construct
  source 1..75: mol_type = other DNA
tatgacagcaataataatttcgtgacctgtaaggacgcgtcggtttcgctgaaagacaagctgaatctggacaca

SEQ ID NO: 32840 - DNA, 75 bp, synthetic construct
  source 1..75: mol_type = other DNA
ggagcgagcgacagcaataaatatcgccagatccacgacgccttcgaaaaaaccgggcgtcactggctgtacaac

SEQ ID NO: 32841 - DNA, 75 bp, synthetic construct
  source 1..75: mol_type = other DNA
atgcaagctgttttttcttccccgtctcccgcccctgtgacgccactgatgccgctgccggacatcacacaggag

SEQ ID NO: 32842 - DNA, 75 bp, synthetic construct
  source 1..75: mol_type = other DNA
gatctccctcgcggtgttatctctcgcaatactgtttgctgtaacgcatatacatcaacttatcgtatttattga

SEQ ID NO: 32843 - DNA, 75 bp, synthetic construct
  source 1..75: mol_type = other DNA
ccagaacacgcctccctctgcctttagcggtaagggagaacccgtaaacacccctcaaattatggcggagttaaa

SEQ ID NO: 32844 - DNA, 75 bp, synthetic construct
  source 1..75: mol_type = other DNA
tgcatcaaatacttactttatcctgaaatcaaaggcgtacggtccatttttcagtgatttagataataccaatgt

SEQ ID NO: 32845 - DNA, 75 bp, synthetic construct
  source 1..75: mol_type = other DNA
gccgttactgaatggcctgtttttatcaatcagcgatgaagttgtgttgattggtgatcggtattacgtgaaagc

SEQ ID NO: 32846 - DNA, 75 bp, synthetic construct
  source 1..75: mol_type = other DNA
aaagacgtggcccggcagcaaatcagcagttatattctgaattattacaatagcgtcaggcctcaccattataac

SEQ ID NO: 32847 - DNA, 75 bp, synthetic construct
  source 1..75: mol_type = other DNA
ggtatcttcagacccacactgatatgccaggaagcgataatctgaacgggattaacgtgaaataccgttatgaat

SEQ ID NO: 32848 - DNA, 75 bp, synthetic construct
  source 1..75: mol_type = other DNA
attaacgtgaaataccgttatgaatttacggacacgctggggctggtgacgtcattcagttatgcaggatacaag

SEQ ID NO: 32849 - DNA, 75 bp, synthetic construct
  source 1..75: mol_type = other DNA
attgaaagcgaagtttttacaaacaaggttcagtatccggatggtaagccgccagtatgggcaaagtgcacaaaa

SEQ ID NO: 32850 - DNA, 75 bp, synthetic construct
  source 1..75: mol_type = other DNA
ggtgaggttgtcagacctgcctgtactctggcgatggaagacgcctggcagattatcgatatgggggaaaccccg

SEQ ID NO: 32851 - DNA, 75 bp, synthetic construct
  source 1..75: mol_type = other DNA
cgagtgctatcacgcttgatacgtggaaaaaatcagtgaaacgcttttacgatacgttggtggttcggtttgaca

SEQ ID NO: 32852 - DNA, 75 bp, synthetic construct
  source 1..75: mol_type = other DNA
tcccggcagcgatgatcttaacgggattaacgtgaaataccgttatgagtttacggacacactggggctggtgac

SEQ ID NO: 32853 - DNA, 75 bp, synthetic construct
  source 1..75: mol_type = other DNA
tggtgaggggcttcctctgccggagacctatgatcgccctgactcccgtattaagcagctggcccgtcgcagcac

SEQ ID NO: 32854 - DNA, 75 bp, synthetic construct
  source 1..75: mol_type = other DNA
gatgaaatacctgaacctgagcagttgtcagcccggaaaacatcaatacaaaaatgcctgtcaggagcatacgtg

SEQ ID NO: 32855 - DNA, 75 bp, synthetic construct
  source 1..75: mol_type = other DNA
aactcgggcgcggtgatgtgcttccacatgacatggtcgaatcctccgcgaccgcatggcgggatgaaatgagca

SEQ ID NO: 32856 - DNA, 75 bp, synthetic construct
  source 1..75: mol_type = other DNA
gaaagtggttatgtgaatgctacccaaacgggcgagatggcaaacgcgtacgcaaacaatttgcgacgaaaggcg

SEQ ID NO: 32857 - DNA, 75 bp, synthetic construct
  source 1..75: mol_type = other DNA
gtactacgcgatattcttggtcactctgatataaaaatgacgatggtttatgctcatttttcgccagatcattta

SEQ ID NO: 32858 - DNA, 75 bp, synthetic construct
  source 1..75: mol_type = other DNA
aaaagaattcaaccagccatactggcgaattaatgaagagtcatgttactggcgtgatgctttattccgtgcatt

SEQ ID NO: 32859 - DNA, 75 bp, synthetic construct
  source 1..75: mol_type = other DNA
atggcaccggcatgatttacggcatgtatgtcatcagcagggtgagtgaaacagggagtattttctttgcagacg

SEQ ID NO: 32860 - DNA, 75 bp, synthetic construct
  source 1..75: mol_type = other DNA
aagccgatctgcaaaaaactcagggaaaccgtgcaccagcagcagttaacgataaggatgtgctgtgcgtgatta

SEQ ID NO: 32861 - DNA, 75 bp, synthetic construct
  source 1..75: mol_type = other DNA
atgagcaatcttttacagacgggcgcggagttcgagaaaaagctgaaagagagagccgaatctacagagaaaatg

SEQ ID NO: 32862 - DNA, 75 bp, synthetic construct
  source 1..75: mol_type = other DNA
tagttatgaaatccctgacatgagctattttcagctaacaggaaaaggaagcgataatttgttggttaaaggtcc

SEQ ID NO: 32863 - DNA, 75 bp, synthetic construct
  source 1..75: mol_type = other DNA
ggaacgtctccctgagtaaagcagctccgtcaatgaaaaacgtcctggtgggccttggctgggatgcgcgttcaa

SEQ ID NO: 32864 - DNA, 75 bp, synthetic construct
  source 1..75: mol_type = other DNA
tcgacgggagcgccggtgcccgtactgcgcagaccacccctgacgatcgttatacctgccacagcagtagcgtgc

SEQ ID NO: 32865 - DNA, 75 bp, synthetic construct
  source 1..75: mol_type = other DNA
ctcagctatctgtgtggtcgcccgttagcaacgggctggctggaagtgttttttaatctgctgttctgcgtgctg

SEQ ID NO: 32866 - DNA, 75 bp, synthetic construct
  source 1..75: mol_type = other DNA
gaacggcaaccttgaaatcaacggcaatgcccactcgacaggcagcatgctctctgacggcccgaactctaatca

SEQ ID NO: 32867 - DNA, 75 bp, synthetic construct
  source 1..75: mol_type = other DNA
gggctacagcggttcaactatgcactacaccgatgcgccggacgcacaaaatcagttgatgaactttatccgcct

SEQ ID NO: 32868 - DNA, 75 bp, synthetic construct
  source 1..75: mol_type = other DNA
tttgaacacactgacgacgggctgacggaacacggtcatgagtgcccttacgtacaaccggaacacagggaagta

SEQ ID NO: 32869 - DNA, 75 bp, synthetic construct
  source 1..75: mol_type = other DNA
tcgttcggcaatcgaagatggggtagtggagccacacgagcagacagcaattaatgatgagttgtatctgtcaat

SEQ ID NO: 32870 - DNA, 75 bp, synthetic construct
  source 1..75: mol_type = other DNA
aaagtccgacgtttaccgggacaccaaaagcgccaactccagcggcagggaataacaccacgcaggttgcgacca

SEQ ID NO: 32871 - DNA, 75 bp, synthetic construct
  source 1..75: mol_type = other DNA
atgggtgtgtatgtagaacaggaataccgtattaaacgcgctaaagggacagggcgtgatccgaaatctcctaag

SEQ ID NO: 32872 - DNA, 75 bp, synthetic construct
  source 1..75: mol_type = other DNA
ttttgaatttgcgcagtcgcagtttgagcatcgaaaggaaaatgatcagcgtacatatgatcttaatgtcaaaaa

SEQ ID NO: 32873 - DNA, 75 bp, synthetic construct
  source 1..75: mol_type = other DNA
acagtttttgggcgtctataatacgtggagaactatcagagctttcacagcctacagatgatgaatcgcttctga

SEQ ID NO: 32874 - DNA, 75 bp, synthetic construct
  source 1..75: mol_type = other DNA
aggagactctcatcagttcagttataacgggactgtgggggggaatctggggccctggcgcctgcgggctgacta

SEQ ID NO: 32875 - DNA, 69 bp, synthetic construct
  source 1..69: mol_type = other DNA
ctgcgtttcgcaatccgtgaaggcggccgtaccgttggcgcgggcgttgttgctaaagttctgggctaa

SEQ ID NO: 32876 - DNA, 75 bp, synthetic construct
  source 1..75: mol_type = other DNA
agctgccaggaacggcagctcagttgcctgtgtccatcgactatccggcggcgctggccctgcgccagatggctc

SEQ ID NO: 32877 - DNA, 75 bp, synthetic construct
  source 1..75: mol_type = other DNA
ttttagcatttgtctttgcgcccacccatgggcttttggcaaatcgtcggcgtgcgcataaagcgctggaggatc

SEQ ID NO: 32878 - DNA, 75 bp, synthetic construct
  source 1..75: mol_type = other DNA
agtctgcagccatggtaccggcagtgtattctgccgaacagcctgcatcgctgcctgttgccattgattatccgg

SEQ ID NO: 32879 - DNA, 66 bp, synthetic construct
  source 1..66: mol_type = other DNA
cgtttcgcaatccgtgaaggcggccgtaccgttggcgcgggcgttgttgctaaagttctgggctaa

SEQ ID NO: 32880 - DNA, 75 bp, synthetic construct
  source 1..75: mol_type = other DNA
tatcggccacgttgaccaaggtaaaactactctgaccgctgcaatcacaaccgtactggctaaaacctacggcgg

SEQ ID NO: 32881 - DNA, 75 bp, synthetic construct
  source 1..75: mol_type = other DNA
ggggcttacgaggtggtgggcgtgtttgagcggattgaggaaaagcgtgatgccatgcagtcgctgattctgccg

SEQ ID NO: 32882 - DNA, 75 bp, synthetic construct
  source 1..75: mol_type = other DNA
acagtgctggaaagcctgcagcgggaaggttttcagcccttctttgcctgccagacccgtgtgcgtgacccgggc

SEQ ID NO: 32883 - DNA, 75 bp, synthetic construct
  source 1..75: mol_type = other DNA
atgagcgcgctatttctggctattccgttaaccatttttgtgctgtttgttttaccgatctggttatggctgcat

SEQ ID NO: 32884 - DNA, 75 bp, synthetic construct
  source 1..75: mol_type = other DNA
ttaacatggcccgcttcatcaaaagccagacgctgaccctgctggaaaaactgaatgaactggacgccgacgacc

SEQ ID NO: 32885 - DNA, 75 bp, synthetic construct
  source 1..75: mol_type = other DNA
ggtgaagtagatggcgatgatgaagccatcttcagaccaatacaaaaatacatcaatggcacatggtataacgtc

SEQ ID NO: 32886 - DNA, 75 bp, synthetic construct
  source 1..75: mol_type = other DNA
atgcgattagcaagtcgttttggtcatgtaaaccagatacgccgtgaccgtccgctgacacatgaagaactgatg

SEQ ID NO: 32887 - DNA, 75 bp, synthetic construct
  source 1..75: mol_type = other DNA
cgtgccattcacagcatcgacaccgacattaagctcaatcgcgcattgtgggtgatggcagaaacgctactgtag

SEQ ID NO: 32888 - DNA, 75 bp, synthetic construct
  source 1..75: mol_type = other DNA
gcagtgcaaaaggaaaacgtatccatacccgggccattcacagcattgataccgacattaagctcaatcgcgcat

SEQ ID NO: 32889 - DNA, 75 bp, synthetic construct
  source 1..75: mol_type = other DNA
aaacgtggtggacagggtgattgaaggtgcttacgaggtggtgggcgtttttgaccggattgaggaaaagcgtga

SEQ ID NO: 32890 - DNA, 75 bp, synthetic construct
  source 1..75: mol_type = other DNA
atgcaattagccagtcgttttggtcatgtaaatcagatacgccgtgaccgccccttaactcgtgaagaactgatg

SEQ ID NO: 32891 - DNA, 75 bp, synthetic construct
  source 1..75: mol_type = other DNA
ctcgacatcatgctaccaggcaaggacggcatgaccatttgtcgtgatttacgcgcaaagtggtctggaccgatt

SEQ ID NO: 32892 - DNA, 75 bp, synthetic construct
  source 1..75: mol_type = other DNA
ttgaatcggaatcagctaaagctgagcgtcaagcagggaatcttcgccgatggcggcaagaactgattgatgtga

SEQ ID NO: 32893 - DNA, 75 bp, synthetic construct
  source 1..75: mol_type = other DNA
tttctacaatcgtcagcgtcgtcactctcgtctggggaatatctccccggcagccttcagggaaaaatatcatca

SEQ ID NO: 32894 - DNA, 75 bp, synthetic construct
  source 1..75: mol_type = other DNA
aggcggtggttgccggggcgctggcaaaacggctgagtgagaaaaccattattttcgccggatttattgccgatg

SEQ ID NO: 32895 - DNA, 75 bp, synthetic construct
  source 1..75: mol_type = other DNA
ggcgatattgatggcgcgcaaaaacagctcgatcggctgtcgcagttagcgccgagttcaaatgcgtataaatcg

SEQ ID NO: 32896 - DNA, 75 bp, synthetic construct
  source 1..75: mol_type = other DNA
gataatctccgtcaggcttccttactctgaacgcccaccgcgtccgtcccgcacattccagcaacgcatctggag

SEQ ID NO: 32897 - DNA, 75 bp, synthetic construct
  source 1..75: mol_type = other DNA
atgctgggagcggtggaacgccgtttcggcaacgagcttccggcgtctccagtagagtggctgacggataatggt

SEQ ID NO: 32898 - DNA, 75 bp, synthetic construct
  source 1..75: mol_type = other DNA
agccaaaaacggagaggtcgttaccacatccagaaaaattgccaagtacttcggcaagcgacacggtgatgttct

SEQ ID NO: 32899 - DNA, 75 bp, synthetic construct
  source 1..75: mol_type = other DNA
ggaaacagtttaccacgcgattgagtttggtaagaaaaatggtattgaagtgttattaaatccggctccggcatt

SEQ ID NO: 32900 - DNA, 75 bp, synthetic construct
  source 1..75: mol_type = other DNA
gtgaccaaaaaaggccagccggaaaccatgatggagtttgaggctggcaccaaaagtggctttagcagcagtaaa

SEQ ID NO: 32901 - DNA, 75 bp, synthetic construct
  source 1..75: mol_type = other DNA
ggtggtgcctcatatgcactgaatccgggtattgagattgacagtactttaatgactgttgattttcccacaaaa

SEQ ID NO: 32902 - DNA, 75 bp, synthetic construct
  source 1..75: mol_type = other DNA
ggcagaggcactggaaaaccagggcaaatgggcgcaggcggcagcacttcagcggcaacgactggcgctggaccc

SEQ ID NO: 32903 - DNA, 75 bp, synthetic construct
  source 1..75: mol_type = other DNA
agcatcgacaccgatattaagctcaaccgggcgttgtgggtgatggcagaaacgctgctggagagcctgcgctga

SEQ ID NO: 32904 - DNA, 75 bp, synthetic construct
  source 1..75: mol_type = other DNA
caaagccgcgatggcgctggggcgtcgtgcaactggcgttgagctggagactgaacgttttgagcagacggtcag

SEQ ID NO: 32905 - DNA, 75 bp, synthetic construct
  source 1..75: mol_type = other DNA
atttccctgttattgaagaaacaaaacgtggccggtaccagcgcattactatccgcgatgcctacattgaccacc

SEQ ID NO: 32906 - DNA, 75 bp, synthetic construct
  source 1..75: mol_type = other DNA
atgagcacgaaatttaaaaccgttatcactactgccggagccgcaaagctggcagccgccactgtccccggcggg

SEQ ID NO: 32907 - DNA, 75 bp, synthetic construct
  source 1..75: mol_type = other DNA
atgcgagttatgatcttagaaggaaaatcgaaatgcagcatgaagagtttcagaaaatgacagagcgcgagcaag

SEQ ID NO: 32908 - DNA, 75 bp, synthetic construct
  source 1..75: mol_type = other DNA
gaactggaaaagccacaccaccagctggtcagcacatacagtgagctgaaccggcagtatatggaactgctgagt

SEQ ID NO: 32909 - DNA, 75 bp, synthetic construct
  source 1..75: mol_type = other DNA
aggatcgtgaccagcatattctgacgcttcgtgtgttcagtggtgtgctggcggggctgcttctgatggtcaccc

SEQ ID NO: 32910 - DNA, 75 bp, synthetic construct
  source 1..75: mol_type = other DNA
catataattcacaggcaacaataaaagaaagtatagcatccgtgcttaatcagacatatcaaaattttgaattaa

SEQ ID NO: 32911 - DNA, 75 bp, synthetic construct
  source 1..75: mol_type = other DNA
cgctatccgatgaaggtggtgcgtatggagggcgatccggaacttaatccgtttgctctggcgctggactgttac

SEQ ID NO: 32912 - DNA, 75 bp, synthetic construct
  source 1..75: mol_type = other DNA
atggcaacaccaaatcctcttgagccggtgaaaggttccggtaccacactgtgggtttacaacggcaaggctgat

SEQ ID NO: 32913 - DNA, 75 bp, synthetic construct
  source 1..75: mol_type = other DNA
tcagaaagggcttataggctggtttgaaagcggggatgtgcgggcctataaaatccgtttcccaaatggcacggt

SEQ ID NO: 32914 - DNA, 75 bp, synthetic construct
  source 1..75: mol_type = other DNA
atgaatgctgttttaagtgttcagggtgcttctgcgcccgtcaaaaagaagtcgtttttttctaaattcactcgt

SEQ ID NO: 32915 - DNA, 75 bp, synthetic construct
  source 1..75: mol_type = other DNA
cgccggggatacacaaaacacatgctgcgtctgcgccgtgacggggagataaacggacaacatgtccctgaaatt

SEQ ID NO: 32916 - DNA, 75 bp, synthetic construct
  source 1..75: mol_type = other DNA
gaaggggcttacgaggtggtgggcgtttttgaccggattgaagagaaacgtgatgccatgcagtcgctggtcctg

SEQ ID NO: 32917 - DNA, 75 bp, synthetic construct
  source 1..75: mol_type = other DNA
accgtactagaaagcctgcagcgggagggctttcagcccttcttcgcctgccagacccgcgtgcgcgacccgggc

SEQ ID NO: 32918 - DNA, 75 bp, synthetic construct
  source 1..75: mol_type = other DNA
atgcgaaccagatacgccgtgaccgtccgctgacacatgaagagctgatgcaccatgtgccggggattttcggag

SEQ ID NO: 32919 - DNA, 75 bp, synthetic construct
  source 1..75: mol_type = other DNA
aaacggacagcatgtcccggaaatcatcctgctcaattcccatgacggtacctccagctaccagatgctgccggg

SEQ ID NO: 32920 - DNA, 75 bp, synthetic construct
  source 1..75: mol_type = other DNA
tgctgcgtctgcggcgggccggagagataaacggagaacatgtccctgaaattattctgctcaactcccatgacg

SEQ ID NO: 32921 - DNA, 75 bp, synthetic construct
  source 1..75: mol_type = other DNA
cactggcagaatggatcgaagactgggccgactaccttgtgggctttgatgctaatggtgacgctattcaggcaa

SEQ ID NO: 32922 - DNA, 75 bp, synthetic construct
  source 1..75: mol_type = other DNA
atgtctcagaacttagacgcaaccgcaattaatcaaatccatgctcttatttctgctcagggtgttaatgaaatt

SEQ ID NO: 32923 - DNA, 75 bp, synthetic construct
  source 1..75: mol_type = other DNA
ggcactggcggcgtcactggacgcgcaggggtacagcgtcagtgacatcatccatatcctgatggcggaaggaag

SEQ ID NO: 32924 - DNA, 75 bp, synthetic construct
  source 1..75: mol_type = other DNA
atgcaattagccagtcgttttggtcatgtaaatcagatacgccgtgatcgtcccttaactcgtgaagaactgatg

SEQ ID NO: 32925 - DNA, 75 bp, synthetic construct
  source 1..75: mol_type = other DNA
gggaggattacggtaaggacctgtggagtacttatcagaccatccaggagaatatgctaaaaggcggaatttccg

SEQ ID NO: 32926 - DNA, 75 bp, synthetic construct
  source 1..75: mol_type = other DNA
caaaaagcctcagtttctatgcaaatggggattcaggtgcgtaataagctggtggcggcgtatcaggaagtgatg

SEQ ID NO: 32927 - DNA, 75 bp, synthetic construct
  source 1..75: mol_type = other DNA
cgtattcgctcaaacaactgctacggtcaggtttcacggcgtgaccaggagagcgcgctggcgtgctggggaatt

SEQ ID NO: 32928 - DNA, 75 bp, synthetic construct
  source 1..75: mol_type = other DNA
tgtcggccgctgttctggcactgattgccgccagtgctcctgcccctgacattctcgatcagtttctggatgaaa

SEQ ID NO: 32929 - DNA, 75 bp, synthetic construct
  source 1..75: mol_type = other DNA
attctcgaccagtttctggatgaaaaagaaggtaaccacacaacggcataccgtgatggtgcgggtatctggacc

SEQ ID NO: 32930 - DNA, 75 bp, synthetic construct
  source 1..75: mol_type = other DNA
atgagcgcaaaaatcaaatacggcctgtcagctgctgttctggcgctgattgctgcaggcgcgtctgctcctcag

SEQ ID NO: 32931 - DNA, 75 bp, synthetic construct
  source 1..75: mol_type = other DNA
cgaattaatgcaggagatcgaaaaggtgcctgcgaagcgattcgctggtggattaaggacggtggcagggactgc

SEQ ID NO: 32932 - DNA, 75 bp, synthetic construct
  source 1..75: mol_type = other DNA
cgtgatggttatccgcagggagaactgaaggtgtcgcgtatcagtgaggcgatttccggtgcgaacggggaatac

SEQ ID NO: 32933 - DNA, 75 bp, synthetic construct
  source 1..75: mol_type = other DNA
taataatcgcctgactgacgcgctgatttatacttctactgccaatcgaacccgcattttccgcgcccgttcggt

SEQ ID NO: 32934 - DNA, 75 bp, synthetic construct
  source 1..75: mol_type = other DNA
cggaaaaagggcaacacgttcgaaaaagttgcctcggactggtacgagatgaaaaaaggccagaatctggcttac

SEQ ID NO: 32935 - DNA, 75 bp, synthetic construct
  source 1..75: mol_type = other DNA
aaggcagggtggtacgccgggagggcgatccgctggaagtggcgcagtggctgcaggcctgtcacgatgcaggaa

SEQ ID NO: 32936 - DNA, 75 bp, synthetic construct
  source 1..75: mol_type = other DNA
cgcacctactgcggcacagtcggtcaacaatacacaaattgccaccacggcatttgtgaaatcggcgattgcggc

SEQ ID NO: 32937 - DNA, 75 bp, synthetic construct
  source 1..75: mol_type = other DNA
gagcgtggcgctttaccgatgattgatcgcggtgatattcgtcaggctatcgaccgttgcagcaatatctgggcg

SEQ ID NO: 32938 - DNA, 75 bp, synthetic construct
  source 1..75: mol_type = other DNA
gtatgtcacgggcatacaggaaaagacatcatgctcggtaaaacgtataccaaagcagaatgcaaagcactcttg

SEQ ID NO: 32939 - DNA, 75 bp, synthetic construct
  source 1..75: mol_type = other DNA
gggttcagccctggcagccggtggtttttctgccaccacgatgctgttttcactgggggccagcatgatactggg

SEQ ID NO: 32940 - DNA, 75 bp, synthetic construct
  source 1..75: mol_type = other DNA
ggatgactggtggcgcaacggccagaacctgtacctggacaacctggcggaaaacggcttttgccgggtgtctcc

SEQ ID NO: 32941 - DNA, 75 bp, synthetic construct
  source 1..75: mol_type = other DNA
tcgcggggatgactggtggcgtaacggtcagaatctctatcttgacaatatggaggcgactggtttttaccgtgt

SEQ ID NO: 32942 - DNA, 75 bp, synthetic construct
  source 1..75: mol_type = other DNA
tagcagctgctattggtggtggggctgttgccatagcgtctgtgctcatcactggtccgagtggtgacgatggtc

SEQ ID NO: 32943 - DNA, 75 bp, synthetic construct
  source 1..75: mol_type = other DNA
aggcgctggcatgggtggagcgcaatataaaagttccactgaccgagccacagaaagccggtatcgcgtcattct

SEQ ID NO: 32944 - DNA, 75 bp, synthetic construct
  source 1..75: mol_type = other DNA
agcaggcgaagcagtttttcatggatgttgctgccgggttatgtgaaggggatggtccgttgccggaaaagcggc

SEQ ID NO: 32945 - DNA, 75 bp, synthetic construct
  source 1..75: mol_type = other DNA
gcttttaccgggtgcccctgtcctctgcacaggcgggcgatatcctgctgtgctgctttggcgcatcggtggcca

SEQ ID NO: 32946 - DNA, 75 bp, synthetic construct
  source 1..75: mol_type = other DNA
gccgctcggctatctcattaacgtaaaggaatggtgggagacaaacgacccgcccggaacctttcgccttgatat

SEQ ID NO: 32947 - DNA, 75 bp, synthetic construct
  source 1..75: mol_type = other DNA
atgattgatttgcaacagcgttatgaaactattaagtcggcttgtgaaaacttaaagttacaaaccaagccaaag

SEQ ID NO: 32948 - DNA, 75 bp, synthetic construct
  source 1..75: mol_type = other DNA
acgaatctctggtatgtggcgtgtttcccaatcaggacggcacattcaccgccatgacgtataccaaaagcaaaa

SEQ ID NO: 32949 - DNA, 75 bp, synthetic construct
  source 1..75: mol_type = other DNA
gagaaaaacgccaaagcccggttacgagcagccaggacagcaatactgtatgcggaaaatgaccttaaaaatatt

SEQ ID NO: 32950 - DNA, 75 bp, synthetic construct
  source 1..75: mol_type = other DNA
aagcgatttatcaagctcccacggaagaggcaggtcagcaggcactggaagcgttcgctgcggcctgggacagtc

SEQ ID NO: 32951 - DNA, 75 bp, synthetic construct
  source 1..75: mol_type = other DNA
aaggaactgctgggtatgtggctggccgaaaatgaaggggcgaagttctggctcaatgtgctgactgaactgaaa

SEQ ID NO: 32952 - DNA, 75 bp, synthetic construct
  source 1..75: mol_type = other DNA
gcgatgacgtataccagaagcaaaacgtttaaaactgaagctggcgcgcgtcgctggttagcaagaaactctgac

SEQ ID NO: 32953 - DNA, 75 bp, synthetic construct
  source 1..75: mol_type = other DNA
cgtcagcaggaactctcactggcaacagtaacagcccgggtggcaaccctgttcccttcatcacttccggtactc

SEQ ID NO: 32954 - DNA, 75 bp, synthetic construct
  source 1..75: mol_type = other DNA
aaaagcagcctgtgtaatgccatttttcagtcccgtatctgcgccacgcatcccctgaacggctgcacccgccag

SEQ ID NO: 32955 - DNA, 75 bp, synthetic construct
  source 1..75: mol_type = other DNA
ccgcacaagtgaaatcatatctgacgtttcttcctgaagaaattcgtcagaaaattcttgaacatctccacagcg

SEQ ID NO: 32956 - DNA, 75 bp, synthetic construct
  source 1..75: mol_type = other DNA
cgagactttgacccggaaaaccccgagataacactaaataatcgcagggaagcaattgaatatatagaggaaatt

SEQ ID NO: 32957 - DNA, 75 bp, synthetic construct
  source 1..75: mol_type = other DNA
cctgtccgcaatttattaatcacactgcaggaaaaactcgccaccccggcaggacagcaggtcgcacagaccctg

SEQ ID NO: 32958 - DNA, 75 bp, synthetic construct
  source 1..75: mol_type = other DNA
ggtcgacgcggattatgcaaaggagtgcgcgctggagggcatggcccgcacgcaggttatctggctgaaagaggg

SEQ ID NO: 32959 - DNA, 75 bp, synthetic construct
  source 1..75: mol_type = other DNA
atgcttaaaaccttccgcgtcttttcccgtgctgttaacaagcgcggccataccatcggcatcacacagaacgtg

SEQ ID NO: 32960 - DNA, 75 bp, synthetic construct
  source 1..75: mol_type = other DNA
aaagagtctggtgatccgttttcgtgttgacggcacattacatgaaatgctgcgcccggggcgcaaactggcctc

SEQ ID NO: 32961 - DNA, 75 bp, synthetic construct
  source 1..75: mol_type = other DNA
caaagaacatccgtatttgagcaatattataaatgctgcaaaaatagaaaatgagcgtataatcggtgtgctggt

SEQ ID NO: 32962 - DNA, 75 bp, synthetic construct
  source 1..75: mol_type = other DNA
gtaaaggactaaaagtactggcctactgggaaaacggctggcgcgatgtcaccaactcgcgcgcaccggttaaaa

SEQ ID NO: 32963 - DNA, 75 bp, synthetic construct
  source 1..75: mol_type = other DNA
aggggctgcagcactctgcgcgcgcgggtctactttcgctgtaccgacctgagccgcaaacggcggttgaatggg

SEQ ID NO: 32964 - DNA, 75 bp, synthetic construct
  source 1..75: mol_type = other DNA
aagaaccagtcaatgaaccaatagctgttggtgcatctgctgatgagtctgtgcgagttcgttcaaaccgaccgg

SEQ ID NO: 32965 - DNA, 75 bp, synthetic construct
  source 1..75: mol_type = other DNA
gccagactttaccacctcgaaggcgtgatcaggacgcaggcgatactgctgaaggaggggaagattaagccatga

SEQ ID NO: 32966 - DNA, 75 bp, synthetic construct
  source 1..75: mol_type = other DNA
accattgcatgcagcagctgtcacgacgaaatcgaccgccgcactcgcctggtcgacgcggattatgcaaaggag

SEQ ID NO: 32967 - DNA, 75 bp, synthetic construct
  source 1..75: mol_type = other DNA
gagtcattgtctgtcaccttcagagataagccagaaacttcagtttaccagaactaatattacccgcattacaga

SEQ ID NO: 32968 - DNA, 75 bp, synthetic construct
  source 1..75: mol_type = other DNA
cgctgaccggacatgaaaatgaggtggtatcagcgcagccggataccgtgactgatacggctgctctggtcacgg

SEQ ID NO: 32969 - DNA, 75 bp, synthetic construct
  source 1..75: mol_type = other DNA
gtgtcatctcaggctatcagggatgccgagaaagctggccggctgccgcaccctgatatggaaacccgtgggaga

SEQ ID NO: 32970 - DNA, 75 bp, synthetic construct
  source 1..75: mol_type = other DNA
ccggcttaacgctgtgctggattacattgacgcggtgacggcaacagataccagcaccgcgccggatgtcatctg

SEQ ID NO: 32971 - DNA, 75 bp, synthetic construct
  source 1..75: mol_type = other DNA
tcatctgccgtcgaaacacatatccccgaagcgccagccaggaagaagaaaaagaaaagacaccgttttccacgt

SEQ ID NO: 32972 - DNA, 75 bp, synthetic construct
  source 1..75: mol_type = other DNA
cggcagaagcacagcgtcagtcactgattgatactgcaatggcttccattagtctgattcaactgaaattgcagg

SEQ ID NO: 32973 - DNA, 75 bp, synthetic construct
  source 1..75: mol_type = other DNA
cacacctggacgattggcgacactggcatcgttattcacaaaagttttcgcagccctgttactggcagatttaat

SEQ ID NO: 32974 - DNA, 75 bp, synthetic construct
  source 1..75: mol_type = other DNA
ccggggcgttgtgcctgttctggtcgtggctggtggcgcgatatctcgaccgtacacagctgtctgttggtggag

SEQ ID NO: 32975 - DNA, 75 bp, synthetic construct
  source 1..75: mol_type = other DNA
gctcaacctgaaacgggtaagcgaggacatacgggaaaagctggctgaaaccaccaccgacgatctcttctctct

SEQ ID NO: 32976 - DNA, 75 bp, synthetic construct
  source 1..75: mol_type = other DNA
tacattgtacgaagcgctacgcacggttgaccgcttaattgcaggacgtagttttcagcatccacgggggaatta

SEQ ID NO: 32977 - DNA, 75 bp, synthetic construct
  source 1..75: mol_type = other DNA
cgattgataatctgagccgggttcgtaaaaacgccattccggcggcttctgcaatgaccattaaccgcgtggcca

SEQ ID NO: 32978 - DNA, 75 bp, synthetic construct
  source 1..75: mol_type = other DNA
cttactcaagatacgtcctcaattacaatcaattgaaactgaaattcagaaaagaaaagacaaccatgagtctac

SEQ ID NO: 32979 - DNA, 75 bp, synthetic construct
  source 1..75: mol_type = other DNA
tttgatgcctgtattgattcgtggaaggctgaccctgaattaaataacgtacgtgatatgtggaatatcctgatg

SEQ ID NO: 32980 - DNA, 75 bp, synthetic construct
  source 1..75: mol_type = other DNA
ctatctggaaagcattgcagacagtggcagccaggatgtggataaaaacagactgacctcacaggcttttgcccg

SEQ ID NO: 32981 - DNA, 75 bp, synthetic construct
  source 1..75: mol_type = other DNA
gggccagcatggacctggatgacaactggacactgggtctggtcgcacagaacctgctcccccgcagtattgaga

SEQ ID NO: 32982 - DNA, 75 bp, synthetic construct
  source 1..75: mol_type = other DNA
ctgtcatgctcattgaaaaaatactggcgtacaaccccgaagataatcagggagcacgctggttgctggggccgg

SEQ ID NO: 32983 - DNA, 75 bp, synthetic construct
  source 1..75: mol_type = other DNA
acatccggggaaaaacagcagacatactgagcgcgttatccgtggacaatattcctgagcgttatggctttacgg

SEQ ID NO: 32984 - DNA, 75 bp, synthetic construct
  source 1..75: mol_type = other DNA
gatgaatgtgtctcttctcggccttaccgcagtgatgatactgattatcgggggaactgtgctggcacatgtatg

SEQ ID NO: 32985 - DNA, 75 bp, synthetic construct
  source 1..75: mol_type = other DNA
aactcaaatggcaatggggcaagtacaacaaatggctataacagacaacgcaagcaaaaacactatccaacaacg

SEQ ID NO: 32986 - DNA, 75 bp, synthetic construct
  source 1..75: mol_type = other DNA
ctatcagcgctggctgcaggaaaatccacagggtggttcaggtgtggagattataacccacggccttgcggaggc

SEQ ID NO: 32987 - DNA, 75 bp, synthetic construct
  source 1..75: mol_type = other DNA
aaagcggaagacagtttttcccgtctgctgaagcagcagaaggaacaactggcactggccgggaagaatacagaa

SEQ ID NO: 32988 - DNA, 75 bp, synthetic construct
  source 1..75: mol_type = other DNA
gaaatgaaaaccgcaatggtgctcaaggcaaaagacgtcatccgccgtggctgtctggaatatgacgtcagcgcc

SEQ ID NO: 32989 - DNA, 75 bp, synthetic construct
  source 1..75: mol_type = other DNA
tgcggagcagcacagaggatgaagccatgctgatgatggtgtctgagggaattgcaggaggtgtacgctatggcg

SEQ ID NO: 32990 - DNA, 75 bp, synthetic construct
  source 1..75: mol_type = other DNA
gctgctgtactttcagggataccgcgtcgcccgcattgctgaaatgctgggagagaaagttgcaaccgttcacag

SEQ ID NO: 32991 - DNA, 75 bp, synthetic construct
  source 1..75: mol_type = other DNA
agcagtgacaaagtggggaaaaccggattttccgagaacgtgctagcgaaccggattgcgttcgggaaaatatat

SEQ ID NO: 32992 - DNA, 75 bp, synthetic construct
  source 1..75: mol_type = other DNA
aaaagtttgatgctcaaagaattaaacttcgtaatgaattacgtgttcactcttgagacttggtattcatttttc

SEQ ID NO: 32993 - DNA, 75 bp, synthetic construct
  source 1..75: mol_type = other DNA
ctgataatgagccgaaaaccgacgcgcagccagagcaaccagacccggctcagcccggaactgacagtaccatga

SEQ ID NO: 32994 - DNA, 75 bp, synthetic construct
  source 1..75: mol_type = other DNA
tgttcgccagcagcggctgaaattaagcctgtccggaaggctggcgataaagattattgcagagccaccggataa

SEQ ID NO: 32995 - DNA, 75 bp, synthetic construct
  source 1..75: mol_type = other DNA
tccggacggctggcgataaagattattgcagagccaccggataagcgtcgtcgtgacctggacaatatcctgaaa

SEQ ID NO: 32996 - DNA, 75 bp, synthetic construct
  source 1..75: mol_type = other DNA
ctggggcgcagcagccgctggtacaaaagtgaagtggagcagtggatgcagcaacgaatcgaggcatcacgaggg

SEQ ID NO: 32997 - DNA, 75 bp, synthetic construct
  source 1..75: mol_type = other DNA
gtctatgccgtcgattttaatacggatgttctggatgccgcagacagacagaatattgatttttcccggttctcc

SEQ ID NO: 32998 - DNA, 75 bp, synthetic construct
  source 1..75: mol_type = other DNA
tgaagagactgccgttatggcccgaagatcgtcttgaggaactgctgccactgccggggttcaccttctcagctt

SEQ ID NO: 32999 - DNA, 75 bp, synthetic construct
  source 1..75: mol_type = other DNA
atgttgactacaacaagccacgacagcgtatttctgcgtgccgataattccctgatcgacatgaactatatcacc

SEQ ID NO: 33000 - DNA, 75 bp, synthetic construct
  source 1..75: mol_type = other DNA
agccgctggtacaaaagtgaagtggagcagtggatgcagcagcgaatcgaggagtcacgaggagcagcagcatga

SEQ ID NO: 33001 - DNA, 75 bp, synthetic construct
  source 1..75: mol_type = other DNA
tcccctgatcgacatgaactacatcaccagtttcaccggtatgaccgacaaatggttttacaagctgatcagtga

SEQ ID NO: 33002 - DNA, 75 bp, synthetic construct
  source 1..75: mol_type = other DNA
cgagcagtttgatgaaatcaatattgtgcgcggtcagctcgtttctggtgggcggctgggcgtgaagatttacaa

SEQ ID NO: 33003 - DNA, 75 bp, synthetic construct
  source 1..75: mol_type = other DNA
ctcttatttacagcagatggcgctgtcatttattgccctccgtctgaatgtttcatcagaaaccgtcgatgcctc

SEQ ID NO: 33004 - DNA, 75 bp, synthetic construct
  source 1..75: mol_type = other DNA
gttgatcgcccttctccagcgcgataaatcgcgcaagtttattgcccagcaaattgttcgctggctggagagcga

SEQ ID NO: 33005 - DNA, 75 bp, synthetic construct
  source 1..75: mol_type = other DNA
gagatgggccggaaaatggatgcctttaaggagcgggtgatccgcaacagtctgcggccccctgccgtgcccggt

SEQ ID NO: 33006 - DNA, 75 bp, synthetic construct
  source 1..75: mol_type = other DNA
cggtggtttctgagcagataaaggcgcgtgccggtgagacattgctggaaaccgctatcagtctgcagaaagccg

SEQ ID NO: 33007 - DNA, 75 bp, synthetic construct
  source 1..75: mol_type = other DNA
gtgcgtcgtatgaggcagaaaaaagtattcttcgccatattctcgaaggtaaggaggcggtcacgccgctgatgg

SEQ ID NO: 33008 - DNA, 75 bp, synthetic construct
  source 1..75: mol_type = other DNA
gaatgaacaatttggttggaaaggcaccgtaaccaaccacaaaaaggcactcaaaaacggctttagtgtcattca

SEQ ID NO: 33009 - DNA, 75 bp, synthetic construct
  source 1..75: mol_type = other DNA
atggtcattgtcccgattgttaattgtttccgggctttccggagtacattttactatcatgtcagacggcttgct

SEQ ID NO: 33010 - DNA, 75 bp, synthetic construct
  source 1..75: mol_type = other DNA
atcacaacaaaaactgatttaacaaatggttggtctgccttagaaagtatatttgaacattatcttgattatatt

SEQ ID NO: 33011 - DNA, 75 bp, synthetic construct
  source 1..75: mol_type = other DNA
ctcagataaatgaccagggtgagattatcggcggcttcgttgccgttatccgccctaaacaaaaatcagcatttc

SEQ ID NO: 33012 - DNA, 75 bp, synthetic construct
  source 1..75: mol_type = other DNA
caaggttgcaaagcgcgttccggcattcaaaggcatcctcaacgaatgggattccctcgttgctctgttgaagtc

SEQ ID NO: 33013 - DNA, 75 bp, synthetic construct
  source 1..75: mol_type = other DNA
cgtgacctatatcggcatcgactcgaccggcgtcggtcacggggtttacgagaacgtgaaagcgttttttcctgc

SEQ ID NO: 33014 - DNA, 75 bp, synthetic construct
  source 1..75: mol_type = other DNA
ggttcggcttatacagctcatgaaacacggcagttcgccagagagttgaatctggagccctgcacgacggcagtc

SEQ ID NO: 33015 - DNA, 75 bp, synthetic construct
  source 1..75: mol_type = other DNA
gggcgcaatgatccaaggaaaacaatgagtgaggccagcataaaccaagtgtttaagcgcattggctacgctgga

SEQ ID NO: 33016 - DNA, 75 bp, synthetic construct
  source 1..75: mol_type = other DNA
aaactgctgggataacagcccaatggagcgcttcttcaggagtctgaagaacgaatgggtgccagcgacgggcta

SEQ ID NO: 33017 - DNA, 75 bp, synthetic construct
  source 1..75: mol_type = other DNA
ctctgcctgtagataacgaggaaatggatcctcatgcgcgtaaagcatggtaccagtcagaacgtgaccgactga

SEQ ID NO: 33018 - DNA, 75 bp, synthetic construct
  source 1..75: mol_type = other DNA
aaactgctgggataacagcccaatggaacgcttcttcaggagtctgaagagaacgaatggatgccggtggtgggt

SEQ ID NO: 33019 - DNA, 75 bp, synthetic construct
  source 1..75: mol_type = other DNA
gctgtcggttttaacattcagctgaatgattgcgataccactgttgccacaaaagccgctgttgccttcttgggg

SEQ ID NO: 33020 - DNA, 75 bp, synthetic construct
  source 1..75: mol_type = other DNA
ctgccactgagcgagtatttcgacacaaacgcacagccggacatggccaacatcaaccgcaaaaaagcgaacgtc

SEQ ID NO: 33021 - DNA, 75 bp, synthetic construct
  source 1..75: mol_type = other DNA
gattcagcaaaaataacacagcccggcgcatgatatatgcccgaataatccacaaccggtatttcagaaaagatt

SEQ ID NO: 33022 - DNA, 75 bp, synthetic construct
  source 1..75: mol_type = other DNA
gcggcgaccttgccgaaacattcaaatccgagcgggaaaccacaaagaaccagatccgcgtcgctttgcctggca

SEQ ID NO: 33023 - DNA, 75 bp, synthetic construct
  source 1..75: mol_type = other DNA
atgaaaattaaaactctggcaattgttgttctgtcggctctgtccctgagttctacagcggctctggctgatact

SEQ ID NO: 33024 - DNA, 75 bp, synthetic construct
  source 1..75: mol_type = other DNA
atgatcttgctacaactctcctcagcgcaggggccggaagaatgttgtctcgcagtgaaaaaggcgctggacagg

SEQ ID NO: 33025 - DNA, 75 bp, synthetic construct
  source 1..75: mol_type = other DNA
acggatgccgccggttttatggcgcggatggataccgttctgcagatgtacggaggaaaaaaaggtgcgaaataa

SEQ ID NO: 33026 - DNA, 75 bp, synthetic construct
  source 1..75: mol_type = other DNA
caacgtgacgtagcagaactcgatgccagatatacaaaggagcttgctgatgctaacgcgactatcgaaagtctc

SEQ ID NO: 33027 - DNA, 75 bp, synthetic construct
  source 1..75: mol_type = other DNA
caacgtgatgtagcagaactcgacgcaagatatacaaaggaacttgctgatgctaacgcgactatcgaaagtctc

SEQ ID NO: 33028 - DNA, 75 bp, synthetic construct
  source 1..75: mol_type = other DNA
ttgaagttcaggaagatgatccggaggaaatggaaggcgctgaacatccacacaaggagaacactggcggcaatc

SEQ ID NO: 33029 - DNA, 75 bp, synthetic construct
  source 1..75: mol_type = other DNA
ctgttaccggcgatcgaaaaggcaatgccgcctctgctggtggcccgtatgcgcagtcacagctctgaatattac

SEQ ID NO: 33030 - DNA, 75 bp, synthetic construct
  source 1..75: mol_type = other DNA
gcggcaactgccctgattgtggcgcggtgatgggcgacgcaacataccaggaaacattcgatgaagagtatcagg

SEQ ID NO: 33031 - DNA, 75 bp, synthetic construct
  source 1..75: mol_type = other DNA
atcatgtcggtgctggcggatggagtgctggtggtcggtattgtggtggtgctttttcctttggtgaaaaaggac

SEQ ID NO: 33032 - DNA, 75 bp, synthetic construct
  source 1..75: mol_type = other DNA
cgctgcatgagtttacggagaacgcctacttaaactactccatgtacgtgatcatggaccgtgcgttgccgttta

SEQ ID NO: 33033 - DNA, 75 bp, synthetic construct
  source 1..75: mol_type = other DNA
atgtgcaataaaaccacaccggacgcagcagccgccgcgctcactacgctgatgcacgcgcttatcgatattgaa

SEQ ID NO: 33034 - DNA, 75 bp, synthetic construct
  source 1..75: mol_type = other DNA
ctggtggcgggcaaacgccagttattccgtgagatgctggcgctgggctgtcagtttatttcccccagccagcat

SEQ ID NO: 33035 - DNA, 75 bp, synthetic construct
  source 1..75: mol_type = other DNA
gcttaggtgatatagctgaattttcatacggaaaaatgcctaaaaaggagtttgttggtacaggtgactatgtca

SEQ ID NO: 33036 - DNA, 75 bp, synthetic construct
  source 1..75: mol_type = other DNA
atgacatcaaaacgctaaaatccgatgttagcaaattaaaaaacgatcaaggaagctacgtaacaaaatcatatg

SEQ ID NO: 33037 - DNA, 75 bp, synthetic construct
  source 1..75: mol_type = other DNA
aagacggtgcgggtgacagtgctgtttcagatggtgtcgtgtctcagcctgatggtggcagtgagcctcagcctg

SEQ ID NO: 33038 - DNA, 75 bp, synthetic construct
  source 1..75: mol_type = other DNA
atgacatcaaaacgctaaaatccgacgttagcaaattaaaaaacgatcaaggaagctacgcaacaaaatcatatg

SEQ ID NO: 33039 - DNA, 75 bp, synthetic construct
  source 1..75: mol_type = other DNA
gagcaggatacgaccgggcttgtaataacacctctgataaaactgcgtcttatgcaactggttggctactggtac

SEQ ID NO: 33040 - DNA, 75 bp, synthetic construct
  source 1..75: mol_type = other DNA
gatcaggaaaacagccgtatttttctgccgaaacttggctggatgcgctaccggaatagccgtcaggtcacgggt

SEQ ID NO: 33041 - DNA, 75 bp, synthetic construct
  source 1..75: mol_type = other DNA
agaacgtgaaagcgttctttcctgctgtccgggagtttgtctataaccccaatgttaaaaacgccctggtactca

SEQ ID NO: 33042 - DNA, 75 bp, synthetic construct
  source 1..75: mol_type = other DNA
agtttaatgcagctgcggttcgtgaaatctgagtctactttcacctattttgaagcgactcggggctatattgaa

SEQ ID NO: 33043 - DNA, 75 bp, synthetic construct
  source 1..75: mol_type = other DNA
gcgccatatccgtgctgcccgtgccaaaacaccgggcgtgtctcgcgtgctttgcattgaatgtgaagcgccaat

SEQ ID NO: 33044 - DNA, 75 bp, synthetic construct
  source 1..75: mol_type = other DNA
gctggacatggctgccaccctggccgttccctttaccggtgatgggcgagatgccgcggagatccttcgctccct

SEQ ID NO: 33045 - DNA, 75 bp, synthetic construct
  source 1..75: mol_type = other DNA
gtatctggctggttgccggtatcaccgacatgcgaaatggttttaacggcctggcatcaaaagttcagaacgtcc

SEQ ID NO: 33046 - DNA, 75 bp, synthetic construct
  source 1..75: mol_type = other DNA
acggccaggataacgccggttatgtgaagttcgggcatggcagtgcacaacatgtgcgtgccggtttccgtctgg

SEQ ID NO: 33047 - DNA, 75 bp, synthetic construct
  source 1..75: mol_type = other DNA
ggcgccaccacagaagaaggtgcgtttgccctgagtcgcccgcttcaggccggcgcctttaactacaccctgaac

SEQ ID NO: 33048 - DNA, 75 bp, synthetic construct
  source 1..75: mol_type = other DNA
attgttaacgcaggggagattcgctttgataatcagacaacaccggatgccgcgctgagccgtgctgttgcaaaa

SEQ ID NO: 33049 - DNA, 75 bp, synthetic construct
  source 1..75: mol_type = other DNA
tcttcggggatggcacgggacaccctcatttacgccggcggtgaccagacggtacacggcgaggcacataacacc

SEQ ID NO: 33050 - DNA, 75 bp, synthetic construct
  source 1..75: mol_type = other DNA
caacaaaaatggacggcagattatcttattttccgggctagcccgtgacactctcatttacgcaggtggtgacca

SEQ ID NO: 33051 - DNA, 75 bp, synthetic construct
  source 1..75: mol_type = other DNA
tgttctggaatccggcggtcgtctggatgtactggagagccattcagcacagaataccctagtggatgacggcgg

SEQ ID NO: 33052 - DNA, 75 bp, synthetic construct
  source 1..75: mol_type = other DNA
cccggcctcatttatctaaaaatgaatccacagcataaactttctaaaagaattagttctgcatttgtcgcatcc

SEQ ID NO: 33053 - DNA, 75 bp, synthetic construct
  source 1..75: mol_type = other DNA
cgataatgaatttacggtcaagcagctgcagctccgcccttacccctgcctgatgccgctgaatccggcttttcc

SEQ ID NO: 33054 - DNA, 75 bp, synthetic construct
  source 1..75: mol_type = other DNA
tgggatgttatacgtgcgcgtatactgaagcgtgataaccatctgtgtaagaactgtctgcgcaatggacgagcc

SEQ ID NO: 33055 - DNA, 75 bp, synthetic construct
  source 1..75: mol_type = other DNA
ccgccaacaacactactgtcaccggtggtggtcttcagagagtgaatgccggaggaagcgtttcagacacggtta

SEQ ID NO: 33056 - DNA, 75 bp, synthetic construct
  source 1..75: mol_type = other DNA
agttcctgtaaagttgagttccgccacggtaacatgacgctggaaaatccttcaccagagctgctcacggtgttg

SEQ ID NO: 33057 - DNA, 75 bp, synthetic construct
  source 1..75: mol_type = other DNA
ggcaaaaaggaatactggaactgaaggcggcgggactcgtcgtttctgcccatggaggccagcgtaaatccgtcg

SEQ ID NO: 33058 - DNA, 75 bp, synthetic construct
  source 1..75: mol_type = other DNA
agtgggttcagtcgtttgcagatgagcgttgtggctgtcttggtgtcgtgtatcaggcaagcaattttgattatg

SEQ ID NO: 33059 - DNA, 75 bp, synthetic construct
  source 1..75: mol_type = other DNA
ttctgacgaaaccgtgcgttattgagtatgaaggccagattgttggctatggttcaaaggagctgcgcgttgaaa

SEQ ID NO: 33060 - DNA, 75 bp, synthetic construct
  source 1..75: mol_type = other DNA
catcagacaacgatttatcaccatatcagcgaattcctgaataaaggaaaactgaagcccgaaaacggcggctca

SEQ ID NO: 33061 - DNA, 75 bp, synthetic construct
  source 1..75: mol_type = other DNA
cgcctacaacagcaacaacgtaagattaatggcaatcgtaacgctcacgctaaagcctatgcacctgttaagggt

SEQ ID NO: 33062 - DNA, 75 bp, synthetic construct
  source 1..75: mol_type = other DNA
agaggaaaacatcagataacctcaatgtctgatattgtcagggatctttcgcgtctgggctggacagatgagcgt

SEQ ID NO: 33063 - DNA, 75 bp, synthetic construct
  source 1..75: mol_type = other DNA
cagaaatcatgatactccgccagtgcgccggaactatgacggtcgagagtattgggaagctgatcggtcgtaccg

SEQ ID NO: 33064 - DNA, 75 bp, synthetic construct
  source 1..75: mol_type = other DNA
ggttcactcgaaatcaacaaaaacatgctgttatggataaatgacgcgctgatggcggtatttttcctgttagtc

SEQ ID NO: 33065 - DNA, 75 bp, synthetic construct
  source 1..75: mol_type = other DNA
ctgaaacagaaactccgccagaaccttgagtcgcgtcttgatgcagaagtggatgccattctggatgagctgctg

SEQ ID NO: 33066 - DNA, 75 bp, synthetic construct
  source 1..75: mol_type = other DNA
tttgtcgtggtgctgccagacgttgtgatcgacgacgccagcgccgacccgctgcgctacaaccttgctgccatg

SEQ ID NO: 33067 - DNA, 75 bp, synthetic construct
  source 1..75: mol_type = other DNA
gacatacagacacgggaactggtgatgttgatcaagcgactggcatcatcgctgaaagcggtgaaaccggacagt

SEQ ID NO: 33068 - DNA, 75 bp, synthetic construct
  source 1..75: mol_type = other DNA
gggttatatgcaagcgtttgtgaagtatgggctgcgtaacctgaaggaaggggcgaagttccgtaaaggtattga

SEQ ID NO: 33069 - DNA, 75 bp, synthetic construct
  source 1..75: mol_type = other DNA
gcgtctgtattgcctctgttgcatgcacggttctgcgtgccgtccgtgacacggtggtctctgttgcccgcgctg

SEQ ID NO: 33070 - DNA, 75 bp, synthetic construct
  source 1..75: mol_type = other DNA
ggcgcatgtccgcccgtcgtcggtgcagagccaggattacacgtttaaggtgccggactggccggggatgtatga

SEQ ID NO: 33071 - DNA, 75 bp, synthetic construct
  source 1..75: mol_type = other DNA
ggttctgcggcttaaacgcctgggcctgtcaaaaacgttccgccgcctggttgtcacactcatccgacgttatgg

SEQ ID NO: 33072 - DNA, 75 bp, synthetic construct
  source 1..75: mol_type = other DNA
atggctgattttggttcaactaaatacaacgtcagttttgaagaatggcatgaactgttaatggactatgcagag

SEQ ID NO: 33073 - DNA, 75 bp, synthetic construct
  source 1..75: mol_type = other DNA
acaaatacaccgttacagagccgtttaccggggctgtgcgcacctatctacaggaagagattctgcacctgcgtt

SEQ ID NO: 33074 - DNA, 75 bp, synthetic construct
  source 1..75: mol_type = other DNA
ttcagttaagacgttgctcaacactcgacacacttgaaaagattattgaaaaaaaccaaaacagcctcccccctt

SEQ ID NO: 33075 - DNA, 75 bp, synthetic construct
  source 1..75: mol_type = other DNA
aagccgacagcgttaacgtacaggcactgaacatggggcgcattgtcgttgacgtcgatggtattgagctcgctg

SEQ ID NO: 33076 - DNA, 75 bp, synthetic construct
  source 1..75: mol_type = other DNA
agggcaaccggtcatggttttcgtcacaccatgagtaccattctgcacgaacagggctttaattctgcctggatt

SEQ ID NO: 33077 - DNA, 75 bp, synthetic construct
  source 1..75: mol_type = other DNA
atctgggcaaacgaagcgttactgatatcctcccgctggaaatgctggaaattctgcgtcgcatagaaaaacgtg

SEQ ID NO: 33078 - DNA, 75 bp, synthetic construct
  source 1..75: mol_type = other DNA
cgctatgcaattgttactggccgggcagactataacccagcccccgatcttgccagtgctttagctacaccgaaa

SEQ ID NO: 33079 - DNA, 75 bp, synthetic construct
  source 1..75: mol_type = other DNA
tgattaacatggtctgcgataacggctactcccttcgtgttgttgatgaatctgaccggacctcagcagactgca

SEQ ID NO: 33080 - DNA, 75 bp, synthetic construct
  source 1..75: mol_type = other DNA
tctgcgacttaaacggctgggcctgtcaaaaacgttccgtcgtctggttgtcacacttacccgaagttatggcgt

SEQ ID NO: 33081 - DNA, 75 bp, synthetic construct
  source 1..75: mol_type = other DNA
gcaaggcagcggcctcgtgacggatctggtgcccggccagtccggtggaggtaaaggtaaggggcgcttgccgga

SEQ ID NO: 33082 - DNA, 75 bp, synthetic construct
  source 1..75: mol_type = other DNA
ttgctctgacagcagggatgcatcttgctgttcatgcttcagaaaatgtgaacacacctgaaaaccgccagttcc

SEQ ID NO: 33083 - DNA, 75 bp, synthetic construct
  source 1..75: mol_type = other DNA
ccaaaacatttactcgtcactgggttgcaatgaaacacatttttcaccgactggatagtgaggctttattgtttg

SEQ ID NO: 33084 - DNA, 75 bp, synthetic construct
  source 1..75: mol_type = other DNA
ttaccacgcctcatgtgactattgaacgctatagcgagctgacagggctatccatcgataccatcaatgacatgt

SEQ ID NO: 33085 - DNA, 75 bp, synthetic construct
  source 1..75: mol_type = other DNA
gtgaatatagaacacctgaataaccggaactggtatctcgcacaatataatacagccggtaaaaacagagaatct

SEQ ID NO: 33086 - DNA, 75 bp, synthetic construct
  source 1..75: mol_type = other DNA
tcgtctccgtaaagataaaaagcgagaaaaggtaatgatcaatatcgcagcaatgaccgttgatgcgctctctga

SEQ ID NO: 33087 - DNA, 75 bp, synthetic construct
  source 1..75: mol_type = other DNA
gtgggagtgacatcaaaaaactggtctgagacattcactgaacgctgggttgcaatgaagcacatttttctacag

SEQ ID NO: 33088 - DNA, 75 bp, synthetic construct
  source 1..75: mol_type = other DNA
aatcacaatctgtaactgcacgtattgcccatgaaattattgaaggcatggaaaacgtgaaagaagaaggcgaaa

SEQ ID NO: 33089 - DNA, 75 bp, synthetic construct
  source 1..75: mol_type = other DNA
ggcaggccgaggtgtgcgcgccactgccggccgcccacgccgctgcgcgttacgcgcgccacctgcccgagcgca

SEQ ID NO: 33090 - DNA, 75 bp, synthetic construct
  source 1..75: mol_type = other DNA
gtaccgctggttttttagttactgccgcaaaaggcgagatcaaacgccgccagcgtcgcaaggccaaagagcagg

SEQ ID NO: 33091 - DNA, 75 bp, synthetic construct
  source 1..75: mol_type = other DNA
atgcctgccgggtttacctactttcaactggtaaccagaaacaacatgaaatcattaaccactgaaacagcgctg

SEQ ID NO: 33092 - DNA, 75 bp, synthetic construct
  source 1..75: mol_type = other DNA
ggaacagacgcaaaaccacaggcgcacagggtaatcagccaccagcgggagacgatgacccctacggtgatgata

SEQ ID NO: 33093 - DNA, 75 bp, synthetic construct
  source 1..75: mol_type = other DNA
gagcatagagaaaaaagtgagattccgtttagtaaggtaagcgtgttaaaaaatgggcaatcacttaccagcaat

SEQ ID NO: 33094 - DNA, 75 bp, synthetic construct
  source 1..75: mol_type = other DNA
cggttaaaagacaggctgagtgaactggcagatgaggaaggtattacccaggcgcagatgcttgaaaaactgatt

SEQ ID NO: 33095 - DNA, 75 bp, synthetic construct
  source 1..75: mol_type = other DNA
atacagaaaaggtaatcctctgacgcttgcagaacgtcagcaggcatccctggcaagaaaacgagccacacataa

SEQ ID NO: 33096 - DNA, 75 bp, synthetic construct
  source 1..75: mol_type = other DNA
taatacagtgtgttgcccgtattgtggttctgtcgaccccttcggctactaccggaatacagaccgtatcgttac

SEQ ID NO: 33097 - DNA, 75 bp, synthetic construct
  source 1..75: mol_type = other DNA
gcgttatcgtcgttttcaccctggcgggattgctcaatcgcgtgcgccagcatcaggcagccgagctagtggagg

SEQ ID NO: 33098 - DNA, 75 bp, synthetic construct
  source 1..75: mol_type = other DNA
agcagcatgaacgctacgaagccgtagcggtgcaggttttgcgtggtcgtgccggttacaaacctgccgtgaaaa

SEQ ID NO: 33099 - DNA, 75 bp, synthetic construct
  source 1..75: mol_type = other DNA
caaaagccgccctcacataccgctttggtgaagaccaccagccggtgactgaatcgcagatcctctcccctcgcc

SEQ ID NO: 33100 - DNA, 75 bp, synthetic construct
  source 1..75: mol_type = other DNA
aggcgggcgtggaaggtcagctcagcccaacctcttcacaaaacaacccgaaagagacgcacaacctgatggtgg

SEQ ID NO: 33101 - DNA, 75 bp, synthetic construct
  source 1..75: mol_type = other DNA
ctggcgcgcgtgacgtgatccgccgtgaggatttcgccaaaaccggcgcaaccaccatgcgtgaggtacttaacc

SEQ ID NO: 33102 - DNA, 75 bp, synthetic construct
  source 1..75: mol_type = other DNA
ctcacgccagcatgcatcgtggattactcccttaatcatcgggattatcatcttcattgttgcgccttatctgcc

SEQ ID NO: 33103 - DNA, 75 bp, synthetic construct
  source 1..75: mol_type = other DNA
aacggacccgcgaaattgtcgcggaatatatccgtgaatgtggttgtaaaacccccaaccatatccggctggtat

SEQ ID NO: 33104 - DNA, 75 bp, synthetic construct
  source 1..75: mol_type = other DNA
atggcgcagctgttacagtggattatatcggtgccatcaaaaacggttatgtcacgctttcaccgttaacgccat

SEQ ID NO: 33105 - DNA, 75 bp, synthetic construct
  source 1..75: mol_type = other DNA
gaaaattgtcgtaatgctaaagatgggttgttccgttatcagcagctacactcaaaatcaccgtcttataaggac

SEQ ID NO: 33106 - DNA, 75 bp, synthetic construct
  source 1..75: mol_type = other DNA
caaagcaagccgtaaatctgcaaaaacgcaggaaactgtcctgtctgccctgctggcgcagacggaggaagtgag

SEQ ID NO: 33107 - DNA, 75 bp, synthetic construct
  source 1..75: mol_type = other DNA
gcgcactgcttgccggtgaggagaacgccaggctgcgtgcagcccactggttacatgagaggggcctgaaagtat

SEQ ID NO: 33108 - DNA, 75 bp, synthetic construct
  source 1..75: mol_type = other DNA
acgggacatgacgacgttcctgtcactcagtcaggaggtgctgttatccctgctcagtttctgcaccgcatgcag

SEQ ID NO: 33109 - DNA, 75 bp, synthetic construct
  source 1..75: mol_type = other DNA
ctggcagagcgtggcatcattccggctgactggcctgtccgcgtgaaaattattccgcaggaactggcgacggcc

SEQ ID NO: 33110 - DNA, 75 bp, synthetic construct
  source 1..75: mol_type = other DNA
tgcagagttccatatgaaagacaaccgctgggtgcctggctggatgtgttcaccacgtccacagacggatgccac

SEQ ID NO: 33111 - DNA, 75 bp, synthetic construct
  source 1..75: mol_type = other DNA
gcgcactgcttgccggtgaggagaacgccaggttgcgtgcagcccactggttacatgagaggggcttgaaagtat

SEQ ID NO: 33112 - DNA, 75 bp, synthetic construct
  source 1..75: mol_type = other DNA
ttttactggcgctttgtggagctgggaacgataaacatgcccgcgcatccgttcattcgcccggctttcgatacg

SEQ ID NO: 33113 - DNA, 75 bp, synthetic construct
  source 1..75: mol_type = other DNA
acgacagaggagctggcggcgcaggttgccatacagcgaatgaatcaggctattgatgaggtcttaagtaaatga

SEQ ID NO: 33114 - DNA, 75 bp, synthetic construct
  source 1..75: mol_type = other DNA
gaaggcggataacccgcgcaatgctttctactggcggtttgtggaaatggggaccgtgaatatgccaccgcaccc

SEQ ID NO: 33115 - DNA, 75 bp, synthetic construct
  source 1..75: mol_type = other DNA
tgctcagctcggcctggcggaacaactgttgctcggtgtcgttgatacggcaatgatggcgcagaatgcattaat

SEQ ID NO: 33116 - DNA, 75 bp, synthetic construct
  source 1..75: mol_type = other DNA
atgaaaaacagtaaggcattttaccgcagcgcattagcgacagctattgttatggctctttctgcaccagcattc

SEQ ID NO: 33117 - DNA, 75 bp, synthetic construct
  source 1..75: mol_type = other DNA
cgcgaaaacgaaaggccgtggacgtaaggccgcgcagcccgagcctcagccgcaaccgccggagggggaggatta

SEQ ID NO: 33118 - DNA, 75 bp, synthetic construct
  source 1..75: mol_type = other DNA
ggatcgactggcgggatgacaggcaagccgttttagacgagtggggcagcgcgtcgcttcgccagcttgaaatgt

SEQ ID NO: 33119 - DNA, 75 bp, synthetic construct
  source 1..75: mol_type = other DNA
ataccgtaaaaggtaagtggacaaaagccgtcctagataaaaatgaagttaaccttcttaatgagattattaaac

SEQ ID NO: 33120 - DNA, 75 bp, synthetic construct
  source 1..75: mol_type = other DNA
gtcgaccgcccacacttagtcaaactggtcgaaaacctgtttagccgcgaaagttttgctcgcaccgaaccgcca

SEQ ID NO: 33121 - DNA, 75 bp, synthetic construct
  source 1..75: mol_type = other DNA
accatcatcaatgtcaccacgccaccaaaatggaaggtgaaaaagcagaaactggccgagaaggcggcccgggaa

SEQ ID NO: 33122 - DNA, 75 bp, synthetic construct
  source 1..75: mol_type = other DNA
atgataagtggccggaagcgacaaaacgcgctgttatccgcgatgcgtatttcattcactgccataagggcacta

SEQ ID NO: 33123 - DNA, 75 bp, synthetic construct
  source 1..75: mol_type = other DNA
acaaccgatacagcctatagaattaaacctaaatctaatattaatgaggaaaaattgtcctattgtttcctcaat

SEQ ID NO: 33124 - DNA, 75 bp, synthetic construct
  source 1..75: mol_type = other DNA
caaacaaccgaaggcgttctatctcatcttctcgattgagttatgggaacgttttggttattacggcctacaagg

SEQ ID NO: 33125 - DNA, 75 bp, synthetic construct
  source 1..75: mol_type = other DNA
tcgcggaagccagtatggcggcaggggaggctggtcatgctgtccgtgagatggagcggtggatggtgccgaaca

SEQ ID NO: 33126 - DNA, 75 bp, synthetic construct
  source 1..75: mol_type = other DNA
ctttaagacattgccgggaatatgctgctaaaaatgcagagtatatggcaagactggcaggacttatttaccatt

SEQ ID NO: 33127 - DNA, 75 bp, synthetic construct
  source 1..75: mol_type = other DNA
gtcacaggtgccaatgagtttttcctcgtaaataaagatgtagttgacgcatttgatttaagtgagttcacccat

SEQ ID NO: 33128 - DNA, 75 bp, synthetic construct
  source 1..75: mol_type = other DNA
gcaccggtgtgggtggtcgtctgacccgtgaagatgtggaaaaacatctggcgaaagccccggcgaaagagtctg

SEQ ID NO: 33129 - DNA, 75 bp, synthetic construct
  source 1..75: mol_type = other DNA
atggatttcagtcttgatttttcaggtctggcggatattgcacgggatctggagacgctcagcagggcagaaaat

SEQ ID NO: 33130 - DNA, 75 bp, synthetic construct
  source 1..75: mol_type = other DNA
ctcggggaatcaccgaaaaagctattcaaggaagcctgcatacggtggctgcgtgagaaatcggataagaagtcc

SEQ ID NO: 33131 - DNA, 75 bp, synthetic construct
  source 1..75: mol_type = other DNA
cgcactgcgggaaaaaatcatcagcaggctggagtggcatcagcggggctggtttgactccctgaccctttgcag

SEQ ID NO: 33132 - DNA, 75 bp, synthetic construct
  source 1..75: mol_type = other DNA
tgtctgttgttcacactgataacaatgctggtatttagtctgcagcgatggcgctgccctcttcgtatgcccatg

SEQ ID NO: 33133 - DNA, 75 bp, synthetic construct
  source 1..75: mol_type = other DNA
agcacgtctgaaacactggccgcgacatcgaaagcggttaaggcggtaatggatgaaacgaacaagaaagcgccc

SEQ ID NO: 33134 - DNA, 75 bp, synthetic construct
  source 1..75: mol_type = other DNA
ctgaacgcactgctgatggctgtatggcggcgtaatccccaaaaacaggtgctggttcattcggatcagggcagt

SEQ ID NO: 33135 - DNA, 75 bp, synthetic construct
  source 1..75: mol_type = other DNA
accgaagacgagttcctcaatctctatatgtgtgagtttgtccgcgaaggggaatcggcatttaacctgaatatc

SEQ ID NO: 33136 - DNA, 75 bp, synthetic construct
  source 1..75: mol_type = other DNA
cgctcttccgaaaaattatatcatcggaacgccgttaatactccctacttctaagaatgaaagcatcgaaaaaat

SEQ ID NO: 33137 - DNA, 75 bp, synthetic construct
  source 1..75: mol_type = other DNA
tctggcaacgcggcgaacaacctgcgtaactctgtaattgatgaagtcgttgtctgcgataccattccgctgagc

SEQ ID NO: 33138 - DNA, 75 bp, synthetic construct
  source 1..75: mol_type = other DNA
cttatttacgttggatataaacagttcccagtcttttttgaaaaatcggcagtaaatctattttattttttatgc

SEQ ID NO: 33139 - DNA, 75 bp, synthetic construct
  source 1..75: mol_type = other DNA
tgcgggcaaaacagctttactggcagggttacccgcccgctgaaatatcgcggctgatgggtatcagtcagaaca

SEQ ID NO: 33140 - DNA, 75 bp, synthetic construct
  source 1..75: mol_type = other DNA
ttcaaatttctggccggaccagaaaccgtgctggcactactggatgaacgggaaaggaaccagcaatacatcaaa

SEQ ID NO: 33141 - DNA, 75 bp, synthetic construct
  source 1..75: mol_type = other DNA
aaccattcaagctggaagacgttcgtgaagcgttatcttccattggtattcagggcctgaccgtcaccgaagtga

SEQ ID NO: 33142 - DNA, 75 bp, synthetic construct
  source 1..75: mol_type = other DNA
tcgaccacattcatcgctgaattacctgacgccggctgaatttgcagcgggctggcgaaacgggaaatatgaaga

SEQ ID NO: 33143 - DNA, 75 bp, synthetic construct
  source 1..75: mol_type = other DNA
tggaatgaatttaatactcaatccggtaccagaaaaattgcagggaaaacgcaggaacgcctgaaaaaattaatc

SEQ ID NO: 33144 - DNA, 75 bp, synthetic construct
  source 1..75: mol_type = other DNA
ggttaccggcgcatctggcagttattacgtcgggagggccttcacgtcaaccacaagcgggtataccgcatttac

SEQ ID NO: 33145 - DNA, 75 bp, synthetic construct
  source 1..75: mol_type = other DNA
ctacaatcgccgcgttgaactgcatcgggagaaagaaaaaataacgtaccactggaagaagccggagcggttgcg

SEQ ID NO: 33146 - DNA, 75 bp, synthetic construct
  source 1..75: mol_type = other DNA
taatctgccatgctggtggagtcagccaccagcatgacgaacagaccacgcagccgggcagtgtcaccgctgaaa

SEQ ID NO: 33147 - DNA, 75 bp, synthetic construct
  source 1..75: mol_type = other DNA
atgttaagtaaccttcccggattgctgaatgtggcgttatgcacggttatcgtgctgacgctctttttttatcgt

SEQ ID NO: 33148 - DNA, 75 bp, synthetic construct
  source 1..75: mol_type = other DNA
atcgtctggtctctactcatcagcccgcctctcaaaaagcgcctggacaccaaatttgcgcgcaatgcggaaaac

SEQ ID NO: 33149 - DNA, 75 bp, synthetic construct
  source 1..75: mol_type = other DNA
aatcatttttgtaactttattgagtttaagcatcaaaatattattatgaatacaagtcagtatacaggtagttca

SEQ ID NO: 33150 - DNA, 75 bp, synthetic construct
  source 1..75: mol_type = other DNA
acgaatctgaaaacgccatcatgcggaatatgcacaacatctgtaaaaacagaactgtgatcattattgcccatc

SEQ ID NO: 33151 - DNA, 75 bp, synthetic construct
  source 1..75: mol_type = other DNA
tcaacgaacgtgatgcttcaaacttcatggtctacagctttgcctgcttctttattggcaagtttatagccaaca

SEQ ID NO: 33152 - DNA, 75 bp, synthetic construct
  source 1..75: mol_type = other DNA
gaacatcagtttccgttacaagccggagatcccgcgcgttcttgagaacgttagttttaatatagctgccggtga

SEQ ID NO: 33153 - DNA, 75 bp, synthetic construct
  source 1..75: mol_type = other DNA
aagagcagcgcgataaaaaagtcagtgagctggagctggcaaatgcaaccattactgatatgcagcagcgccagc

SEQ ID NO: 33154 - DNA, 75 bp, synthetic construct
  source 1..75: mol_type = other DNA
atgcgtgcggccttcgtgcgtacattgaccatgagcagggctggcacaaatcgctgtccaacgttccggttaaaa

SEQ ID NO: 33155 - DNA, 75 bp, synthetic construct
  source 1..75: mol_type = other DNA
atgagggttctcatctggactttacgaacccacaaacagtcgcatggtggcaggaaggtgtaaccacacaactac

SEQ ID NO: 33156 - DNA, 75 bp, synthetic construct
  source 1..75: mol_type = other DNA
aggttcctgtgacaaaggaaaccctgcaggccccggcggggctgtcttcagtggcagatgccgtatggacgggga

SEQ ID NO: 33157 - DNA, 75 bp, synthetic construct
  source 1..75: mol_type = other DNA
acgataaccagactgaagttgctcgctacgatctgactgaagatgcgtccactgaaaccgccatgctgttcggtg

SEQ ID NO: 33158 - DNA, 75 bp, synthetic construct
  source 1..75: mol_type = other DNA
ttgatagcaacggacgtctgacgggcgcccgtactgtacaggccgcaccttatgctcactacacctgccacttgt

SEQ ID NO: 33159 - DNA, 75 bp, synthetic construct
  source 1..75: mol_type = other DNA
cctggccgctaatataaaaccatgtttattgcaggatcatcctcgctataacgaagtagcagaacaagagctctt

SEQ ID NO: 33160 - DNA, 75 bp, synthetic construct
  source 1..75: mol_type = other DNA
ttattactggcgtcattctggggttaacgtggtctgccccactccgggcacaggatcaacgttacatcggtatac

SEQ ID NO: 33161 - DNA, 75 bp, synthetic construct
  source 1..75: mol_type = other DNA
cgctactattttcttcatgtgctttcgcagggtcagagcttgaattaaataaagtcaagctaccggaggctattt

SEQ ID NO: 33162 - DNA, 75 bp, synthetic construct
  source 1..75: mol_type = other DNA
gtacggtcagcgccgtcgatgccgacaaggttcaggcccgcgttcgtctgcctgagtgcgataacctgcgcacta

SEQ ID NO: 33163 - DNA, 75 bp, synthetic construct
  source 1..75: mol_type = other DNA
tgaccatccggggcggcattgagcatattgtcattgagtgtggtgctgatgtggtattgaaaacacagaaagcca

SEQ ID NO: 33164 - DNA, 75 bp, synthetic construct
  source 1..75: mol_type = other DNA
caggcgcaatgtgtttcatgttgtttgtgtggctgggtggggtggtggctctttttaccgcggcagctgtgttgc

SEQ ID NO: 33165 - DNA, 75 bp, synthetic construct
  source 1..75: mol_type = other DNA
tatcggccacgttgaccatggtaaaactactctgaccgctgcaatcaccaccgtactggctaaaacctacggcgg

SEQ ID NO: 33166 - DNA, 75 bp, synthetic construct
  source 1..75: mol_type = other DNA
gtactggctaagccgggcaccatcaagccgcacaccaagttcgaatctgaagtgtacattctgtccaaagatgaa

SEQ ID NO: 33167 - DNA, 75 bp, synthetic construct
  source 1..75: mol_type = other DNA
aaaaagctcgtggtatcaccatcaacacttctcacgttgaatatgacaccccgacccgtcactacgcacacgtag

SEQ ID NO: 33168 - DNA, 75 bp, synthetic construct
  source 1..75: mol_type = other DNA
atgcattatggcaaagttaaaattgtcgatataagccattctatagtaagtcaatatctggaaagccagcataag

SEQ ID NO: 33169 - DNA, 75 bp, synthetic construct
  source 1..75: mol_type = other DNA
cccgtccgttattggcatttaccagcgcccatcctctgcaatcgtcgatgtgattgccgacagcatccgcatcac

SEQ ID NO: 33170 - DNA, 75 bp, synthetic construct
  source 1..75: mol_type = other DNA
cgtgcagttggccacgctcaaacaacgagcggagaaatcggccagaacagcaggccgtgccccagcaggcagtca

SEQ ID NO: 33171 - DNA, 75 bp, synthetic construct
  source 1..75: mol_type = other DNA
atgaagcactggcgctgacgcggggggatttttcgctcacgcctccgtatccgtttgtgcagcttgcgaccctga

SEQ ID NO: 33172 - DNA, 75 bp, synthetic construct
  source 1..75: mol_type = other DNA
ctgtggaacaccggtgcgcgcattaatgaagcactggcgctgacgcggggggatttttcgctcgcgcctccgtat

SEQ ID NO: 33173 - DNA, 75 bp, synthetic construct
  source 1..75: mol_type = other DNA
cccggacctgcttatccctgttcgtgctgcagaagcaaaacaaatttatgaaatcgccagtcgtctgcagcaaag

SEQ ID NO: 33174 - DNA, 75 bp, synthetic construct
  source 1..75: mol_type = other DNA
gcccgtaaggcggcaatggatgttgtgaccgggcagatgcgtgatggtggtctgttctccggaggtggacgatga

SEQ ID NO: 33175 - DNA, 75 bp, synthetic construct
  source 1..75: mol_type = other DNA
acgatatcggtctgggtctttcctgatactgatatttcagatgtatcgcgtgagttaattgcggcaattaaacag

SEQ ID NO: 33176 - DNA, 75 bp, synthetic construct
  source 1..75: mol_type = other DNA
aaatgcccgtctgggtctggcagcggcaacgctgcagtcggatatggaaaaagccggtgaactggcggcaaggga

SEQ ID NO: 33177 - DNA, 75 bp, synthetic construct
  source 1..75: mol_type = other DNA
aaagaggcccgtcgtttgcatctgcagggtatgacggttccggattatacggtgaaggtgagaaagtggttttgt

SEQ ID NO: 33178 - DNA, 75 bp, synthetic construct
  source 1..75: mol_type = other DNA
gtcttgctgctcttttatcgggatgcggtgaaaaaggggattttgagaaagtgatcaacgcgaaaatatcgcaat

SEQ ID NO: 33179 - DNA, 75 bp, synthetic construct
  source 1..75: mol_type = other DNA
ttaatggctatttcgataatcaggaccgcgattttctgacaggtaaacttcagctcaccgaagagtttcttaaaa

SEQ ID NO: 33180 - DNA, 75 bp, synthetic construct
  source 1..75: mol_type = other DNA
aggccgctgaaaacggttattcactccgcgtggtggatgaccgtgactctaccgaaacaccggcaacttatgcca

SEQ ID NO: 33181 - DNA, 75 bp, synthetic construct
  source 1..75: mol_type = other DNA
cggcagcgaacagagctggcgtggtttcacccgttctgtgctctccatgctgacagagatttttctgaagcaggc

SEQ ID NO: 33182 - DNA, 75 bp, synthetic construct
  source 1..75: mol_type = other DNA
cagtttgtgatctggcaatacaatgcatacaaatatggaatgacagaacatcaacttaatgcgcagctgacaaag

SEQ ID NO: 33183 - DNA, 75 bp, synthetic construct
  source 1..75: mol_type = other DNA
aggcgcttaaaggccgtggccccaaaaatccgcgtccagctagtttgaacattgcagccgcgaggattgtgaatc

SEQ ID NO: 33184 - DNA, 75 bp, synthetic construct
  source 1..75: mol_type = other DNA
ctcagtcttgttcagccacagaaggtgcgggatggggaagaagcatttgatgcttatctgaatggtatgtggatc

SEQ ID NO: 33185 - DNA, 75 bp, synthetic construct
  source 1..75: mol_type = other DNA
cgccccgctcttgatctttcacgtctgcctgaacttctgtcgcgtattaacagttataaaggtcagcctgtcacc

SEQ ID NO: 33186 - DNA, 75 bp, synthetic construct
  source 1..75: mol_type = other DNA
tacattttgctaccatcgtgcctggcgcttattgctggcatcatgctgatgataatgaatttgaatcagggatga

SEQ ID NO: 33187 - DNA, 75 bp, synthetic construct
  source 1..75: mol_type = other DNA
gatccaaacttcaggcgtatgtactatgttcgatatgctgatgacttcgtaattggtgtcatcggctcgaagaaa

SEQ ID NO: 33188 - DNA, 75 bp, synthetic construct
  source 1..75: mol_type = other DNA
ctctgaaacgtctgttcacagccaaccagtgctggacgtccttcctggatgcgggcggtctgcgcgatatcgagg

SEQ ID NO: 33189 - DNA, 75 bp, synthetic construct
  source 1..75: mol_type = other DNA
atgtacgtctgatagatgatgattctggtaacattctttttcagtgtgattctggaaaagggtgggtcaccagca

SEQ ID NO: 33190 - DNA, 75 bp, synthetic construct
  source 1..75: mol_type = other DNA
tcaatattcaggatcttgcggaatacatagacaaaaggcgagaagaagggcgtgctgagtgggaaagggtcagaa

SEQ ID NO: 33191 - DNA, 75 bp, synthetic construct
  source 1..75: mol_type = other DNA
gcgacgcagagtgggaagcgaaaatcctggaactggctggcttcctggattcttacattccggaaccagagcgtg

SEQ ID NO: 33192 - DNA, 75 bp, synthetic construct
  source 1..75: mol_type = other DNA
atgcgtaaagtttgtgcagccattttgtccgcagccatttgtctggccgtatccggtgcgcctgcatgggcgtct

SEQ ID NO: 33193 - DNA, 75 bp, synthetic construct
  source 1..75: mol_type = other DNA
cgttcacactggtgaaatctccggcatcaggggcggcggacaaactgcaactgacaggcatatcaaaggcggcga

SEQ ID NO: 33194 - DNA, 75 bp, synthetic construct
  source 1..75: mol_type = other DNA
gcagcgcagcgagtaaaaagcagtgcccttgttgctatggggaaaaatttattgaaagcgtagtttttacaaaca

SEQ ID NO: 33195 - DNA, 75 bp, synthetic construct
  source 1..75: mol_type = other DNA
cgctggtacgccagcgagtgcagcagagcatcagtccacactaagcggcgggtatcttcagtcccatactgatat

SEQ ID NO: 33196 - DNA, 75 bp, synthetic construct
  source 1..75: mol_type = other DNA
attacagaagaacccgaaaaatgtgttgctggcggtgtgctggatgcagggagagtttgacatgagcgccgccac

SEQ ID NO: 33197 - DNA, 75 bp, synthetic construct
  source 1..75: mol_type = other DNA
gacggatggttacgtaggcaaggacgaggcccggcaacaaattagcggttatatcctgaattattacaatagcgt

SEQ ID NO: 33198 - DNA, 75 bp, synthetic construct
  source 1..75: mol_type = other DNA
gttaccgtgccggacgtctgatgaaatatctgaacctgagcagttgtcagcccggaaaacatcagtataaaaatg

SEQ ID NO: 33199 - DNA, 75 bp, synthetic construct
  source 1..75: mol_type = other DNA
gaatctgcttgagcgccagttcgctgtgcccgagccagatagggtatggtgcggagatattacgtatatctgggc

SEQ ID NO: 33200 - DNA, 75 bp, synthetic construct
  source 1..75: mol_type = other DNA
atgaaggccgggtaatgatggatggcccccgcgatgaaatattgaaaaaactgtcagggaaacagcagagagggg

SEQ ID NO: 33201 - DNA, 75 bp, synthetic construct
  source 1..75: mol_type = other DNA
gacccggacgcgctcgacgagctttccatactcgtctgcgccgcagaaaacggggaccatattgagccatataaa

SEQ ID NO: 33202 - DNA, 75 bp, synthetic construct
  source 1..75: mol_type = other DNA
tgaaacgccggataagtttaatttatccggtcaggcaaaaggaattaatctgcagatagctgatgccaggggaaa

SEQ ID NO: 33203 - DNA, 75 bp, synthetic construct
  source 1..75: mol_type = other DNA
atgttgattacgccgccgccgaaaatggggacgacgtctacagcgcagcaaccgcaaattcagccggtacagcag

SEQ ID NO: 33204 - DNA, 75 bp, synthetic construct
  source 1..75: mol_type = other DNA
gtgtgtcagaacagacgctcccacagtgcgctcagcaggtggataatgcgatcccgggctttacgcagaagatgt

SEQ ID NO: 33205 - DNA, 75 bp, synthetic construct
  source 1..75: mol_type = other DNA
aatccgtcctatacgcgttttgatgtcacggttgccggtaaagaggcgaccaccctgatctcccgctgccagaaa

SEQ ID NO: 33206 - DNA, 75 bp, synthetic construct
  source 1..75: mol_type = other DNA
cagtacaacgggcaatttattctggcgaagctggactgcgacgcggagcagatgattgccgcccagtttggtctg

SEQ ID NO: 33207 - DNA, 75 bp, synthetic construct
  source 1..75: mol_type = other DNA
attgcgcagtcgttatcgtcagaagcagctcgtgaccacaggcaagagccagaccatgaacagtcgccatctcac

SEQ ID NO: 33208 - DNA, 75 bp, synthetic construct
  source 1..75: mol_type = other DNA
accgcatttaacgcgtgatgtcgttgatgcggctgtcgcattgcgctctaatgaagaaattgaggtcatgtttaa

SEQ ID NO: 33209 - DNA, 75 bp, synthetic construct
  source 1..75: mol_type = other DNA
tcgtcaccgtgtctgacgtcatgagtgtgttgcatgacagctacgacaacggccagtccggggaaaaatttttac

SEQ ID NO: 33210 - DNA, 75 bp, synthetic construct
  source 1..75: mol_type = other DNA
ctgatacacacaaagaagctaagcgtttgcgcttccttcgttccattgatgaaagaactcaaatctcttttgtga

SEQ ID NO: 33211 - DNA, 75 bp, synthetic construct
  source 1..75: mol_type = other DNA
tatcgctgatgaactgatgaccggatgcacaaatttcgcgtttagcggaaaacctggtaccgggaagaaccactt

SEQ ID NO: 33212 - DNA, 75 bp, synthetic construct
  source 1..75: mol_type = other DNA
cgtgatggaccgcatgaccatgaacggtggtcgctggatgaattttaactgggagagctggcgcacgaatgtcat

SEQ ID NO: 33213 - DNA, 75 bp, synthetic construct
  source 1..75: mol_type = other DNA
cgtcagttgcgggtggaaaaaatcctgaaccgctccggcatccagccgttgcaccggaagtgttcgtttgcgaat

SEQ ID NO: 33214 - DNA, 75 bp, synthetic construct
  source 1..75: mol_type = other DNA
tgagccgttaccgtgccgggcggctgatgaaacatctgaatctgagcagttgtcagcccggaaaacatcagtaca

SEQ ID NO: 33215 - DNA, 75 bp, synthetic construct
  source 1..75: mol_type = other DNA
tagagctttcacgtatttatcaggaaatatcttggatgacgtaactcactggatgccgctaccagagcctccact

SEQ ID NO: 33216 - DNA, 75 bp, synthetic construct
  source 1..75: mol_type = other DNA
gctatccagaaaacatgagcaaggtcacaatatcgggtttgctcttgaacacgggtttacaaaggattcagaaga

SEQ ID NO: 33217 - DNA, 75 bp, synthetic construct
  source 1..75: mol_type = other DNA
cagctatcgttactcaacctgatgtggggcaaatcgctggttataacaatgccataaatgtgatttatggttcgg

SEQ ID NO: 33218 - DNA, 75 bp, synthetic construct
  source 1..75: mol_type = other DNA
tggggttaacagcagaatctctggataaagttgtttactggcatgatggtcagtgtgcggattttcatgggttgc

SEQ ID NO: 33219 - DNA, 75 bp, synthetic construct
  source 1..75: mol_type = other DNA
aagcgttcctggcagagcacggtggctggaaggcatttttgtggaagccaccctatgcataccggcagataaagg

SEQ ID NO: 33220 - DNA, 75 bp, synthetic construct
  source 1..75: mol_type = other DNA
gtaaatcggcttttaatcataaagtcagacatggcgcagacaagaaagcatatacctggacgccaacaaaagaag

SEQ ID NO: 33221 - DNA, 75 bp, synthetic construct
  source 1..75: mol_type = other DNA
gaagcagcagggactttctgcggatcaacttcagaaaggagccagccaggtagcgataaaggttgcacaggacgg

SEQ ID NO: 33222 - DNA, 75 bp, synthetic construct
  source 1..75: mol_type = other DNA
ggggaaaaccaaatccctgatatgtctttctggacggttactggtggcaatggaaattttgtgattcgtcaacct

SEQ ID NO: 33223 - DNA, 75 bp, synthetic construct
  source 1..75: mol_type = other DNA
gaatacggcagtgcgcaccctgatgatcaaaccgtgctggcgatacccgttgataaggctatcgctcaggtcagg

SEQ ID NO: 33224 - DNA, 75 bp, synthetic construct
  source 1..75: mol_type = other DNA
gacacaaaggccatgatgattgcgtcctatcccgccgaacagcgtgaagccgtttccgccgcgctggagctggaa

SEQ ID NO: 33225 - DNA, 75 bp, synthetic construct
  source 1..75: mol_type = other DNA
cgaaaaattatggttattttatgccgaagcagcagggactttctctgaaagagcttcagaagggggccagcaacg

SEQ ID NO: 33226 - DNA, 75 bp, synthetic construct
  source 1..75: mol_type = other DNA
aacgtacagcgtgacgctttctgttccccgttgggaggccgcggcgctggagtcgtttctggctgagcacggggg

SEQ ID NO: 33227 - DNA, 75 bp, synthetic construct
  source 1..75: mol_type = other DNA
atattgtagacagacaatattcagagttaaaaaataatcacaaacaggaagaaattcaacaaaacaacagatata

SEQ ID NO: 33228 - DNA, 75 bp, synthetic construct
  source 1..75: mol_type = other DNA
acctttcttgttcgggcaatgagatggtcgcccagattgctgcgaccaccgatcatgatgtttccacaagcagca

SEQ ID NO: 33229 - DNA, 75 bp, synthetic construct
  source 1..75: mol_type = other DNA
gcatgccgataccgcactgataagcagtgccctgcggatggcctatgagacgcgtggccaaccccgggatgtcgt

SEQ ID NO: 33230 - DNA, 75 bp, synthetic construct
  source 1..75: mol_type = other DNA
tgaggtgcgtggtcagccgcgggacgtcatgttccatagcgaccagggaagtcagtatacaggactgaaatatca

SEQ ID NO: 33231 - DNA, 75 bp, synthetic construct
  source 1..75: mol_type = other DNA
tgggcaggaaatcgctggtgctatctggcggtcgtcatggatctttttgcccgcagggttatcggctggagcctg

SEQ ID NO: 33232 - DNA, 75 bp, synthetic construct
  source 1..75: mol_type = other DNA
ctcctgcatggtcagttggcagcaaaatccgagcaactgataagactgaacgcaacatggcaaacgttaagccag

SEQ ID NO: 33233 - DNA, 75 bp, synthetic construct
  source 1..75: mol_type = other DNA
aaaagtgacggcatttctgccggaaaatgtgctgaccatcggaggtcaatttcagcatgcagaactccgtgatga

SEQ ID NO: 33234 - DNA, 75 bp, synthetic construct
  source 1..75: mol_type = other DNA
gtttcagtcattacttcagagcaactgcaaaaaaaaccggtttcagacctggtcgatgcggtaaaagatgttgaa

SEQ ID NO: 33235 - DNA, 75 bp, synthetic construct
  source 1..75: mol_type = other DNA
ggcgttcgccaaagcgtggaagatgctcgaaggcacaccggagcagcacaaagcgcaggacgtttacaacatcag

SEQ ID NO: 33236 - DNA, 75 bp, synthetic construct
  source 1..75: mol_type = other DNA
gactggaggcggagccatgcctcactgtgcgaatactacagacgcctgctgatgatgcggggagcgtggcgggtg

SEQ ID NO: 33237 - DNA, 75 bp, synthetic construct
  source 1..75: mol_type = other DNA
atgttcagcagcccgcggagatgcgctttaaccgcgcccgtgtccggcgggcgtttgtcacgattggtcagcgtc

SEQ ID NO: 33238 - DNA, 75 bp, synthetic construct
  source 1..75: mol_type = other DNA
aggggaaaaatccacgtcatgagatgaattacaccgtacaggaagcgttaaagcccgtaacggttggcgatgcgc

SEQ ID NO: 33239 - DNA, 75 bp, synthetic construct
  source 1..75: mol_type = other DNA
tatccacacccgtgccattcacaacatcgacaccgatattaagctcaaccgcgcattgtgggtaatggcagaaac

SEQ ID NO: 33240 - DNA, 75 bp, synthetic construct
  source 1..75: mol_type = other DNA
tccgctgacacacgaagaactgatgcgccatgtaccgagtatttttggggaaaaccgacatacctcccgaagtga

SEQ ID NO: 33241 - DNA, 75 bp, synthetic construct
  source 1..75: mol_type = other DNA
gaagtttgacgattttaaggcaaaaaacgacaagcgcattgacgcgatcgaacaggaaaaaagcaagctggccga

SEQ ID NO: 33242 - DNA, 75 bp, synthetic construct
  source 1..75: mol_type = other DNA
caacctgagtaacggtgcaccgagcctgagtgtcgggccgagaggtgcttccgtttcttttggtagccgggggac

SEQ ID NO: 33243 - DNA, 75 bp, synthetic construct
  source 1..75: mol_type = other DNA
aggctgatttctgcgagaaactccatgaggatgcggaacgcctttaccgaagcctgtcagcgcgcctgaatgagc

SEQ ID NO: 33244 - DNA, 75 bp, synthetic construct
  source 1..75: mol_type = other DNA
catgccgggcaaatcatggaccgcgatgcattgctgaaaaatttacgcggcgtcagttatgacggactggatcgt

SEQ ID NO: 33245 - DNA, 75 bp, synthetic construct
  source 1..75: mol_type = other DNA
tgacgaacatcagcccgtcaccactgctgacattctgacaccgcgacgccgggaggattacggtaaggacctgtg

SEQ ID NO: 33246 - DNA, 75 bp, synthetic construct
  source 1..75: mol_type = other DNA
ttactaaagacgtaatgaaaattttgcgctatggggcaatgagcgcattcatcaatttctggaaagatgaaaata

SEQ ID NO: 33247 - DNA, 75 bp, synthetic construct
  source 1..75: mol_type = other DNA
cactatgttcccagtatttttggagaagaccggcatacctcccgcagtgaacgctatgcgtacattcccaccatc

SEQ ID NO: 33248 - DNA, 75 bp, synthetic construct
  source 1..75: mol_type = other DNA
aaacgtggtggagaaagttattgaaggggcttacgaagtggtgggcgtgtttgaccggattgaggagaaacgtga

SEQ ID NO: 33249 - DNA, 75 bp, synthetic construct
  source 1..75: mol_type = other DNA
gggtgcgtctgtggccagtctctgggggaagtgcgtgttccacaccggggaaatgtagtggagaaagttatcgaa

SEQ ID NO: 33250 - DNA, 75 bp, synthetic construct
  source 1..75: mol_type = other DNA
tgcaaatgtgatttctttatcccgaatgaaacagaactggaaatattaaccggtatgtcggttgatacttatgat

SEQ ID NO: 33251 - DNA, 75 bp, synthetic construct
  source 1..75: mol_type = other DNA
aaaaggatgcacaccacatctacctcactgacggcacttacttctgcgccaccaacgtggcgcgagtaaatctta

SEQ ID NO: 33252 - DNA, 75 bp, synthetic construct
  source 1..75: mol_type = other DNA
attctgataattcagccgtctttgccagcaggcacgggcggcgttctcatgcattcaaatctgactggttccagc

SEQ ID NO: 33253 - DNA, 75 bp, synthetic construct
  source 1..75: mol_type = other DNA
gtgccgatgacggtgatgatcatcttcatcctgttgtatctggcattccgccgggttgatgaagccctgctgatc

SEQ ID NO: 33254 - DNA, 75 bp, synthetic construct
  source 1..75: mol_type = other DNA
ttgcagaccccgcacatgaaagcgtacagcgaggccgtaaaaggcgatgtgctggagatgaatatccgcatcctg

SEQ ID NO: 33255 - DNA, 75 bp, synthetic construct
  source 1..75: mol_type = other DNA
cgtcagcaggcgctctcactggcgacggtgacagcccgggtggcaaccctgttcccttcatcatttccggtactc

SEQ ID NO: 33256 - DNA, 75 bp, synthetic construct
  source 1..75: mol_type = other DNA
atggcgcaacatataaaatcccacaattctgaagtcgatccggccattaagcgggggcggcgttcgcacgtattt

SEQ ID NO: 33257 - DNA, 75 bp, synthetic construct
  source 1..75: mol_type = other DNA
ggaaattatccgccgtttcggcttcggcgaagtggatctgattgaaggcactggccagattggctacgacggcaa

SEQ ID NO: 33258 - DNA, 75 bp, synthetic construct
  source 1..75: mol_type = other DNA
ggaaattatccgccgttttggcttcggcgaagtggatctgattgaaggtacggggcagattggctatgacggcag

SEQ ID NO: 33259 - DNA, 75 bp, synthetic construct
  source 1..75: mol_type = other DNA
gcagtttatatcgtgaactgggtgcaacgctgagttacaacatgcgtctggggaacggtatggaagttgagccgt

SEQ ID NO: 33260 - DNA, 75 bp, synthetic construct
  source 1..75: mol_type = other DNA
ctgtgcaacaaagagatcaaatttaaagccttcctcgaatttgccgccgaagatttaggtgccgattatatcgct

SEQ ID NO: 33261 - DNA, 75 bp, synthetic construct
  source 1..75: mol_type = other DNA
atgtctgacaacaccatccctgaatatctgcaacccgcactggcacaactggaaaaggccagagccgcccatctt

SEQ ID NO: 33262 - DNA, 75 bp, synthetic construct
  source 1..75: mol_type = other DNA
tatcctgatggtagcgaaatgatgaagctggtgggttgggcgcaaagcattgtcactttccgtggtggatcgtca

SEQ ID NO: 33263 - DNA, 75 bp, synthetic construct
  source 1..75: mol_type = other DNA
tcggattgataatccgacaccgtattacgtgactgtaattggcattggcggcagcgaaaagcaggccagagaagg

SEQ ID NO: 33264 - DNA, 75 bp, synthetic construct
  source 1..75: mol_type = other DNA
gggctgggcagttttttcccagttctggtattacgttgccggctttccctggtatgaggggaatatcctgtttgc

SEQ ID NO: 33265 - DNA, 75 bp, synthetic construct
  source 1..75: mol_type = other DNA
cttattaaccagaaacgcatcgcgccgctgaatcttctgagtgttgacccgaacaaccagagccagattattgcg

SEQ ID NO: 33266 - DNA, 75 bp, synthetic construct
  source 1..75: mol_type = other DNA
gctggaacaacgcgcgtctgatattcatatcgaaccagcggacaatgcctaccgcatccgcttgcgtatcgacgg

SEQ ID NO: 33267 - DNA, 75 bp, synthetic construct
  source 1..75: mol_type = other DNA
ggatgtagctggtcttctcgcataccttggtttgggaacggcatcgaaaaggaatgtcgggacgggggcaaatca

SEQ ID NO: 33268 - DNA, 75 bp, synthetic construct
  source 1..75: mol_type = other DNA
tgctggccgttattccggcacttaaccttgccaccagtgatgtggcggctgtagtcggccttgtgatgacggtac

SEQ ID NO: 33269 - DNA, 75 bp, synthetic construct
  source 1..75: mol_type = other DNA
tgcaggaagatatatcatttattcagggactaggcgtttttataactattttatgcgtatatattctcaataaga

SEQ ID NO: 33270 - DNA, 75 bp, synthetic construct
  source 1..75: mol_type = other DNA
ttcttgctgctttttcatggggagcagcaatagtgatgagcaaaaaaggtctcgaaaacatggatgccggaggat

SEQ ID NO: 33271 - DNA, 75 bp, synthetic construct
  source 1..75: mol_type = other DNA
cgctggcgcgtgtcagtgcgcaacaggcaaaacttaacgcagtcaaacagcgttatcaggccggaaaggaactgg

SEQ ID NO: 33272 - DNA, 75 bp, synthetic construct
  source 1..75: mol_type = other DNA
ggatgtttctggccgggcgtggagcctttccgttgtttgctctggtgtgggggctgaatctgtcccgccatgcgc

SEQ ID NO: 33273 - DNA, 75 bp, synthetic construct
  source 1..75: mol_type = other DNA
caacaaatgaccagaacacggaattgcagcgtaatgcgctggagtgcgcaggatgtgagctgatttttgaggaca

SEQ ID NO: 33274 - DNA, 75 bp, synthetic construct
  source 1..75: mol_type = other DNA
agtcagtcgcaaacatgaaggcaaacgcggatgccctgaacagggatattgcgacaattcacagcaatatcgtgc

SEQ ID NO: 33275 - DNA, 75 bp, synthetic construct
  source 1..75: mol_type = other DNA
gtgagacgtaatctttcacacattattgccgcagcattcaatgaaccgctgcttctggagcccgcctatgcgcgg

SEQ ID NO: 33276 - DNA, 75 bp, synthetic construct
  source 1..75: mol_type = other DNA
acaatccgcaaaatgaaatagataaattatttaatcgttacaaagatagtgccttagctgttgattacactgatg

SEQ ID NO: 33277 - DNA, 75 bp, synthetic construct
  source 1..75: mol_type = other DNA
acgagtacgactggctgacctcagacgccgctgtggatgaggcccttctcatcaacgaatataccttcaccgaag

SEQ ID NO: 33278 - DNA, 75 bp, synthetic construct
  source 1..75: mol_type = other DNA
agcggattctgcagccagggggacggagcctgttttgaaggacgctggcactggcagtcagcaacagccaggaga

SEQ ID NO: 33279 - DNA, 75 bp, synthetic construct
  source 1..75: mol_type = other DNA
gaaaattctgttgacctgatagtcacggacccgccgtactttaaagtgaagcctgagggctgggataaccagtgg

SEQ ID NO: 33280 - DNA, 75 bp, synthetic construct
  source 1..75: mol_type = other DNA
ctctcttgtctggtgtgtgttgatcgtgtgtctcacactgttgatattcacttatctgacacgaaaatcgctgtg

SEQ ID NO: 33281 - DNA, 75 bp, synthetic construct
  source 1..75: mol_type = other DNA
cgtccgggtgatttggttgccgacttttttatggggtcaggttccacgataaaagccgcgctttcgcttggtcgt

SEQ ID NO: 33282 - DNA, 75 bp, synthetic construct
  source 1..75: mol_type = other DNA
gaaaactctgtcgatctgatagtcacagacccgccatactttaaagtgaagcccgagggctgggataaccagtgg

SEQ ID NO: 33283 - DNA, 75 bp, synthetic construct
  source 1..75: mol_type = other DNA
gcctgagggctgggataaccagtggaagggcgacgatgattacctgaaatggctggaccagtgtctggcgcagtt

SEQ ID NO: 33284 - DNA, 75 bp, synthetic construct
  source 1..75: mol_type = other DNA
gccatgacgtataccaaaagcaaaacgtttaaaaccgaagctggcgcacgacgatggttggagaagcacacagta

SEQ ID NO: 33285 - DNA, 75 bp, synthetic construct
  source 1..75: mol_type = other DNA
gcacggataacggcagacagaacacgtacttttcctcgctggataacatgattgcccaggggaacccgatgccgg

SEQ ID NO: 33286 - DNA, 75 bp, synthetic construct
  source 1..75: mol_type = other DNA
gccttacggtgaaatgctggttggctcccggcgaatctcccaggacatcagtacccgtgatgaaggcggtgacgg

SEQ ID NO: 33287 - DNA, 75 bp, synthetic construct
  source 1..75: mol_type = other DNA
gggagtaaaataatatatttattaactttcaataaaaaatcaaaccgtattttggataaatctaacttccagttt

SEQ ID NO: 33288 - DNA, 75 bp, synthetic construct
  source 1..75: mol_type = other DNA
cgcccgtcttcacgaacctctgggtgagggggcggtcatccatattgtgccgcgactggccggagccggaaaggg

SEQ ID NO: 33289 - DNA, 75 bp, synthetic construct
  source 1..75: mol_type = other DNA
tcaaataactgttatggtcaggtatcccgtcgtgaccaggagagcgcgctggcgtgctggggtatcgacagataa

SEQ ID NO: 33290 - DNA, 75 bp, synthetic construct
  source 1..75: mol_type = other DNA
atctgtcgtggtgccacaatggtggatggtaagcccgtcataccgggaatgaggctgtcgaaggaaaaatgcgac

SEQ ID NO: 33291 - DNA, 75 bp, synthetic construct
  source 1..75: mol_type = other DNA
atgcccggtaaaacgtataccgaagcagaatgcaaagccctcctgaataaagaccttgccacggtcgccagacaa

SEQ ID NO: 33292 - DNA, 75 bp, synthetic construct
  source 1..75: mol_type = other DNA
cagaaagcgggtatagcgtcattttgtccctataacattggccccggtaagtgtttcccgtcgacgttttataag

SEQ ID NO: 33293 - DNA, 75 bp, synthetic construct
  source 1..75: mol_type = other DNA
tatcggctgccgttctggcgctgattgccgcaggtgcttctgcgcctgaaatcctcgaccagtttctggatgaaa

SEQ ID NO: 33294 - DNA, 75 bp, synthetic construct
  source 1..75: mol_type = other DNA
cagaaagcgggtattgcgtcattctgtccttacaacattggccccggtaagtgtttcccgtcgacgttttataaa

SEQ ID NO: 33295 - DNA, 75 bp, synthetic construct
  source 1..75: mol_type = other DNA
cgtcccggcggacgacatcgacggtgaaagcatcaaagttttttactacgagcgcgccgtgtgtgcgatggcgac

SEQ ID NO: 33296 - DNA, 75 bp, synthetic construct
  source 1..75: mol_type = other DNA
ccgcactggggtacacagcagtttatgtcctggccgttctataccgcgttgtgggtaaatatactgactcatatt

SEQ ID NO: 33297 - DNA, 75 bp, synthetic construct
  source 1..75: mol_type = other DNA
gcgccgcaggcagcgggcaaaatccatactgattttgaaaaaggctttatccgtgcacaaaccatctcgtttgaa

SEQ ID NO: 33298 - DNA, 75 bp, synthetic construct
  source 1..75: mol_type = other DNA
attggtgggcgtgaatcgtattcacagcgtgttaagcttggaaactacccggatctttctctgaaagctgcgcgc

SEQ ID NO: 33299 - DNA, 75 bp, synthetic construct
  source 1..75: mol_type = other DNA
cctgattgttttcggatgccggacagtagaactgaggttatcggagatcggcgagtgggattttaccgaaatgct

SEQ ID NO: 33300 - DNA, 75 bp, synthetic construct
  source 1..75: mol_type = other DNA
acaggtttgttactgggcgaagatcgtacccgtcaggctgtatcattgaaagggcgcaggctttttaaagatttt

SEQ ID NO: 33301 - DNA, 75 bp, synthetic construct
  source 1..75: mol_type = other DNA
ccaccaccggggatgactttgcccgagtactggggagaagaacacgtctggtgggatgggcgggccagctttaaa

SEQ ID NO: 33302 - DNA, 75 bp, synthetic construct
  source 1..75: mol_type = other DNA
aaaaaagcgcgtaagttgaaaatgaaaagattacaaagaatgcttgagaaaatggcatgtgaccgggtttcgcca

SEQ ID NO: 33303 - DNA, 75 bp, synthetic construct
  source 1..75: mol_type = other DNA
tgggcggtgaatattggctgccacctgactattccgcagagctgcgagttccagctgctccgcgacaagcaggag

SEQ ID NO: 33304 - DNA, 75 bp, synthetic construct
  source 1..75: mol_type = other DNA
ttccccaagtgcgcgctacttacaagctcattttctgggtcgtggccgcgctggttctggtcgcgctcggatttc

SEQ ID NO: 33305 - DNA, 75 bp, synthetic construct
  source 1..75: mol_type = other DNA
gaggccacgctggcccagattgtgaatcataacgcgtggccccgcaccagccccggagaagtgcgccggcgtctt

SEQ ID NO: 33306 - DNA, 75 bp, synthetic construct
  source 1..75: mol_type = other DNA
ctatccagtgggtttcggagctgaccgatgagttaatggcgaaaatccgtactcatgagtacaaccgttcaatgg

SEQ ID NO: 33307 - DNA, 75 bp, synthetic construct
  source 1..75: mol_type = other DNA
accgccagcaggctggttaaagtgcgacgggcgcgcctttacaaaagaacaatatcctgttctggccagagtcta

SEQ ID NO: 33308 - DNA, 75 bp, synthetic construct
  source 1..75: mol_type = other DNA
ctactggtttgtgcaatacggtatgacaacccagccgtatcagttcgcgaaaggcagcatttttcatctgatgga

SEQ ID NO: 33309 - DNA, 75 bp, synthetic construct
  source 1..75: mol_type = other DNA
gtttatgtattcgcccaacggtaaaaaagacggcatccagatcatcccactgtctgaggttgcagcaaaggatga

SEQ ID NO: 33310 - DNA, 75 bp, synthetic construct
  source 1..75: mol_type = other DNA
tgataaaaaatattaacggtggcggaagctggaatattacacccatgccaaatacggacgtatgcgtgcaggttc

SEQ ID NO: 33311 - DNA, 75 bp, synthetic construct
  source 1..75: mol_type = other DNA
aacgtgattgaatgcgatcatggcaaactgaaacggataatcggcgccacgctgggatttaaatccatgaagacg

SEQ ID NO: 33312 - DNA, 75 bp, synthetic construct
  source 1..75: mol_type = other DNA
tgaagtaccggaagttttaacagagcttacagctaaggaagccagaaaggcaaagctggagtctaaagttactca

SEQ ID NO: 33313 - DNA, 75 bp, synthetic construct
  source 1..75: mol_type = other DNA
gtgaaatttatcgcctccatgctgtcgggagcgagaacgggggcgacggtgacgcatttgtcagggaagaacgtg

SEQ ID NO: 33314 - DNA, 75 bp, synthetic construct
  source 1..75: mol_type = other DNA
cataagttgtatcacttccgtctggaatggagccactggagctggatgcgggttgtgctgggtggtgagagcttc

SEQ ID NO: 33315 - DNA, 75 bp, synthetic construct
  source 1..75: mol_type = other DNA
ttcggtctgtttgtgaaaacttaaagttacaaactaagccagccttaagaattaaaaccaaacatcaaattatca

SEQ ID NO: 33316 - DNA, 75 bp, synthetic construct
  source 1..75: mol_type = other DNA
taacagtccctgcggtgctgctggaaaaagtgatggtgatggctggtagtgaaatttatcgcctccatgctgtag

SEQ ID NO: 33317 - DNA, 75 bp, synthetic construct
  source 1..75: mol_type = other DNA
tgtcgtcggcgtcccggtgccggatacgaccggcgggcgtctggaaattctctgtcggctgggaggggaaaaatg

SEQ ID NO: 33318 - DNA, 75 bp, synthetic construct
  source 1..75: mol_type = other DNA
caccggaagaattgtgggcgttcatcagtccccggattgccgacaggatcaccgatggcgggcgcaactggttgt

SEQ ID NO: 33319 - DNA, 75 bp, synthetic construct
  source 1..75: mol_type = other DNA
gttctgaaacggcggtgggatgtgacaccggcaatcatccgtgcagtggaatacctttcccgggtcccggtatca

SEQ ID NO: 33320 - DNA, 75 bp, synthetic construct
  source 1..75: mol_type = other DNA
cctgaaggcggaagaactgactgataacgccggaattgcactgcgttttcgtgactgtgagtttgaaaactatca

SEQ ID NO: 33321 - DNA, 75 bp, synthetic construct
  source 1..75: mol_type = other DNA
aaaagccgaattaaacggagcattctttaacataacccgcccccgcaatatcgcgtttaactatatcgtgagggc

SEQ ID NO: 33322 - DNA, 75 bp, synthetic construct
  source 1..75: mol_type = other DNA
gtcagcgctatgccgcttcctggaagaaatgtctcgctgcaggcaccagcatggtcatgattggcaattgtggta

SEQ ID NO: 33323 - DNA, 75 bp, synthetic construct
  source 1..75: mol_type = other DNA
ggcgcggcggtggcgccggtccggtggattatctgctggggaaagaccgacagcgcgacggcgccaccgttctgc

SEQ ID NO: 33324 - DNA, 75 bp, synthetic construct
  source 1..75: mol_type = other DNA
cctgtgggtggagcaccaggacaagggacggcttgagctgaattttgtcattccgaacatggagctacagaccgg

SEQ ID NO: 33325 - DNA, 75 bp, synthetic construct
  source 1..75: mol_type = other DNA
ctggacatcatgctgccgggcaatcgccccttcgttgcccccagtgccgttattcaggcccgccagcgcctggga

SEQ ID NO: 33326 - DNA, 75 bp, synthetic construct
  source 1..75: mol_type = other DNA
ccgatcatgccgaactgcaatggcgacaaagccgtggcctgacagcattgttgatggcgctgctggccatttcat

SEQ ID NO: 33327 - DNA, 75 bp, synthetic construct
  source 1..75: mol_type = other DNA
ggggcgtgacgacaacgaacagatctaccgtaatctgcaattacatctgaatccgctggatcaaagccctaacgt

SEQ ID NO: 33328 - DNA, 75 bp, synthetic construct
  source 1..75: mol_type = other DNA
aataatattacccagatttttgtgcaaagctccgtgacggtactgatcggcatgggggaattcttcgctatcctg

SEQ ID NO: 33329 - DNA, 75 bp, synthetic construct
  source 1..75: mol_type = other DNA
gtaattcagacctgggactgataactgcttttttcgaggcatacctggacgctgactacactgatcggggtctgc

SEQ ID NO: 33330 - DNA, 75 bp, synthetic construct
  source 1..75: mol_type = other DNA
ggttgaaaacaaacaacaggcggtggcgagacgtgcagccacgaatattaaaaaaatccgggcaatgttggttgc

SEQ ID NO: 33331 - DNA, 75 bp, synthetic construct
  source 1..75: mol_type = other DNA
cagctgtggcagcagctgtaatttttgcagcgggggcgcaggctgcagaagtatacaataaagatggcaataaac

SEQ ID NO: 33332 - DNA, 75 bp, synthetic construct
  source 1..75: mol_type = other DNA
aacaacaacgggcacgggaaatgatgtctgatctgcgaacccggacgccggttgttaaggaatcctcacgacaat

SEQ ID NO: 33333 - DNA, 75 bp, synthetic construct
  source 1..75: mol_type = other DNA
agcacttcgcgcaatcccgggtatcctggattattcccgcgccgctatttttgcacttatccggagcgcacaccc

SEQ ID NO: 33334 - DNA, 75 bp, synthetic construct
  source 1..75: mol_type = other DNA
tcgtggcttgccagttccatccggagtttacttctactccacgtgatggtcacccgctgtttgcaggctttgtga

SEQ ID NO: 33335 - DNA, 75 bp, synthetic construct
  source 1..75: mol_type = other DNA
gtcgttatcttttacgcgactggaaaccagaaaatccggccttctgggaaaataaaggaaagcatattgcacgaa

SEQ ID NO: 33336 - DNA, 75 bp, synthetic construct
  source 1..75: mol_type = other DNA
atgtggcggagtaattatgctcctcctctgctgcgtattctctggcggctgggtatccggcttccgccattgccc

SEQ ID NO: 33337 - DNA, 75 bp, synthetic construct
  source 1..75: mol_type = other DNA
aataataaccgttatacggctttttaccgtgcgggcgttggctctcaatatatccgttatgcaaatggcacagat

SEQ ID NO: 33338 - DNA, 75 bp, synthetic construct
  source 1..75: mol_type = other DNA
ggttaaagatacggctaatcagtatgcccctgctgtatatctgacggacggatatgacctgaccggcgataacgc

SEQ ID NO: 33339 - DNA, 75 bp, synthetic construct
  source 1..75: mol_type = other DNA
ctgcagtatcagtttgatttcggtctgcgtccatctctggcattcctgcagtctcgtgctcaggatgtcattgta

SEQ ID NO: 33340 - DNA, 75 bp, synthetic construct
  source 1..75: mol_type = other DNA
ttatcggagctaaccccagattacatagcagcgtggctgagtacagaaaggcaaaatagacctaccgtcactgct

SEQ ID NO: 33341 - DNA, 75 bp, synthetic construct
  source 1..75: mol_type = other DNA
tcctgtctcgctgaacttcgcgaaggtgatgtactgatagtctggaaactggatcgacttggtcgttcactctca

SEQ ID NO: 33342 - DNA, 75 bp, synthetic construct
  source 1..75: mol_type = other DNA
accgctggggtgcatgggctgcagcagacaacagtggtgtggactggcagccggtagcagcaggcttcaaggggc

SEQ ID NO: 33343 - DNA, 75 bp, synthetic construct
  source 1..75: mol_type = other DNA
ctgtttggcgtcggctttggtttactgattgaacgtgcgcaaatctgctttacttcggcgttccgcgatatgtgg

SEQ ID NO: 33344 - DNA, 75 bp, synthetic construct
  source 1..75: mol_type = other DNA
atggcgtaaaggctggaacccaccggttactactgccgcaagacttccttcagtgtcccgggtaagccgctggtt

SEQ ID NO: 33345 - DNA, 75 bp, synthetic construct
  source 1..75: mol_type = other DNA
tgatcaccggtgtcgacaggctttctcccgcgctgtcgaaaatgcaaaagaaaatccggggatttaaacgccagg

SEQ ID NO: 33346 - DNA, 75 bp, synthetic construct
  source 1..75: mol_type = other DNA
atcacggctgcagagtttcatgatgcctttcctgacatgggacggcagcacgctgaagctaggctcaaggaagcg

SEQ ID NO: 33347 - DNA, 75 bp, synthetic construct
  source 1..75: mol_type = other DNA
gctgtaacggttgagacgatcaaaaaggggcgcacggttgtagccctgcattttcgcttcaaggaagacaaacag

SEQ ID NO: 33348 - DNA, 75 bp, synthetic construct
  source 1..75: mol_type = other DNA
tgctggtcatgaccgcaggaggcggatttcgtcatacccatgacagaaacaaactgatcctcgcgggtatcgcgc

SEQ ID NO: 33349 - DNA, 75 bp, synthetic construct
  source 1..75: mol_type = other DNA
gtgaaccagcaaaccagaataagcgataagagtctgaccagactgattgccgatgcggacaaggtgctggagcgg

SEQ ID NO: 33350 - DNA, 75 bp, synthetic construct
  source 1..75: mol_type = other DNA
tgaatattgttggcagtcaaaaacgacttgcagctgattgcggcgtatcacagcccgctgttcataaatggttgc

SEQ ID NO: 33351 - DNA, 75 bp, synthetic construct
  source 1..75: mol_type = other DNA
ggagcaagaggcgataaattttgaagtagttgccagagactggcatgccagcaatcaaaagtggtctgagtcgca

SEQ ID NO: 33352 - DNA, 75 bp, synthetic construct
  source 1..75: mol_type = other DNA
ggcccgcgatgaactcacggcagaaaaagcggcgcaattggtcagcattgagtggcaagaattacccgttatcac

SEQ ID NO: 33353 - DNA, 75 bp, synthetic construct
  source 1..75: mol_type = other DNA
gaaaaagcccagcgagcaacgtttatctgcgccagctttgatgaaacgctggcgatgttgaaggcgggggatgtg

SEQ ID NO: 33354 - DNA, 75 bp, synthetic construct
  source 1..75: mol_type = other DNA
tgtttctccggatgacggagggagttgttatctctggctcaaccgtgggcaaccaccggcagttaaccggcgacg

SEQ ID NO: 33355 - DNA, 75 bp, synthetic construct
  source 1..75: mol_type = other DNA
ggaatacgtgcaaaaggccgaacgccgtcgccgactgattaaagcaggactttacattgatgagtttgaaaacgc

SEQ ID NO: 33356 - DNA, 75 bp, synthetic construct
  source 1..75: mol_type = other DNA
ccatcctgtcggctgtggcacaagctgaacgccggaggatcctagagcgcacgaatgagggccgacaggaagcaa

SEQ ID NO: 33357 - DNA, 75 bp, synthetic construct
  source 1..75: mol_type = other DNA
ttgacctctactgcgaccaggccagcggtcttgtgaatattgccattatggacggtaccgtctggcgtctgctga

SEQ ID NO: 33358 - DNA, 75 bp, synthetic construct
  source 1..75: mol_type = other DNA
ccatccggtactgacgcgccagctactgatagcaggcggtgcgttgctggcaatgactgcaacggttggctcgtt

SEQ ID NO: 33359 - DNA, 75 bp, synthetic construct
  source 1..75: mol_type = other DNA
tgcagcgggtgttcgctccggacgaccgtgagcaggtgctggccgtctatggtccggtacatgcccggttgctgc

SEQ ID NO: 33360 - DNA, 75 bp, synthetic construct
  source 1..75: mol_type = other DNA
gggaatacggcggcagaggggattcgttgctatggtgccattaaggatgcacaggcgttgtctgaaggagtggtg

SEQ ID NO: 33361 - DNA, 75 bp, synthetic construct
  source 1..75: mol_type = other DNA
tcgacacgctacccgaaaaactgggtgcagtcgggggatccggcgcgcgaattcaccatgattcagtcagctccg

SEQ ID NO: 33362 - DNA, 75 bp, synthetic construct
  source 1..75: mol_type = other DNA
gaaataacattgagcaggccgacggtaaaaaatggtctgagcaggaccgtgatacgtttgatccgacgcatgata

SEQ ID NO: 33363 - DNA, 75 bp, synthetic construct
  source 1..75: mol_type = other DNA
cggcaccagctgctccggtgctcccggttccgactcagcaggagcgcttcatacgattacctgaagtgatgcacc

SEQ ID NO: 33364 - DNA, 75 bp, synthetic construct
  source 1..75: mol_type = other DNA
caaccacgcaacagatttttatttttaatactttgacactttgtactattggattaattcatatagagactggta

SEQ ID NO: 33365 - DNA, 75 bp, synthetic construct
  source 1..75: mol_type = other DNA
atgctgcatgaactctggctgcagagcggtactggacagcgtcgctgggaagggttaccggatgatgtcagggaa

SEQ ID NO: 33366 - DNA, 75 bp, synthetic construct
  source 1..75: mol_type = other DNA
gtccggttcgactcgaccataccgtggttcgtgagcgcctgctggctaaactttccggcgcgaacaacttccggc

SEQ ID NO: 33367 - DNA, 75 bp, synthetic construct
  source 1..75: mol_type = other DNA
atgaagctcaatgctagacaagtcgagacagcaaagccaaaagacaaaagctacaaaatggccgatggcggcggt

SEQ ID NO: 33368 - DNA, 75 bp, synthetic construct
  source 1..75: mol_type = other DNA
atgccaaactggtgctcgaatcgtatgtatttttctggtgaaccggcaaagattgctgagattaaacggctggcc

SEQ ID NO: 33369 - DNA, 75 bp, synthetic construct
  source 1..75: mol_type = other DNA
tgacggtttttcttataacgggtgaatcacagaatgtgattaccggaatttatgcaagtaaagaatcctgcctcc

SEQ ID NO: 33370 - DNA, 75 bp, synthetic construct
  source 1..75: mol_type = other DNA
tgatggcgtgggcactatcaatcagaaccccggcatcattaacgtggtgaaagatatggcggaggtaatcgttga

SEQ ID NO: 33371 - DNA, 75 bp, synthetic construct
  source 1..75: mol_type = other DNA
atgcagcagaaaaaatattcttttaattatctgatttttaagcatgatttcataaaaagaagaatgctcgttaat

SEQ ID NO: 33372 - DNA, 75 bp, synthetic construct
  source 1..75: mol_type = other DNA
tcgaaactaatggtgtgttgtcgcttcctaactttgagcgccataacgggaaaagctctaaaaaacgggcggtta

SEQ ID NO: 33373 - DNA, 75 bp, synthetic construct
  source 1..75: mol_type = other DNA
aatacactgccagacagtctgtgctgcgagctggttctgccggccggaactctcaggctgaaaggtgaactgaca

SEQ ID NO: 33374 - DNA, 75 bp, synthetic construct
  source 1..75: mol_type = other DNA
ttgatctggcgctcctggaattttgaggacggtgccgggtactggatgaaccggtacatcagggatttcgggatt

SEQ ID NO: 33375 - DNA, 75 bp, synthetic construct
  source 1..75: mol_type = other DNA
atggctgtgcttcgtacgttaccgggcagaatcaaaactctgaacacccggcggataaatgtcctgaggggggaa

SEQ ID NO: 33376 - DNA, 75 bp, synthetic construct
  source 1..75: mol_type = other DNA
tcagccagcgtgcagcaggtctgcgtgccagagtcgatctggacaagggctactggtggtcatcctccaatcagg

SEQ ID NO: 33377 - DNA, 75 bp, synthetic construct
  source 1..75: mol_type = other DNA
attgccactgaaagcactgaagaggtgcgcttccattatgtgttcatcgacggctactggaaggtgatgtaccgc

SEQ ID NO: 33378 - DNA, 75 bp, synthetic construct
  source 1..75: mol_type = other DNA
ggggtaagaactttgctggtgtggtccaatacgcattgaaaccgggagcacatcataaatgcgatccagtcgtaa

SEQ ID NO: 33379 - DNA, 75 bp, synthetic construct
  source 1..75: mol_type = other DNA
ctctgtagacgcgtggttgacctttgtgacagtgaactcgatcaccgcattgcacttcagttcggtggtggtaat

SEQ ID NO: 33380 - DNA, 75 bp, synthetic construct
  source 1..75: mol_type = other DNA
tcgccggcgcgtttgataccgctgatttaatcgcccgggcgcgagagcaaaaaccggtgtgggcgctggccagcg

SEQ ID NO: 33381 - DNA, 75 bp, synthetic construct
  source 1..75: mol_type = other DNA
aacgtgattatcctctatcctttaaaatagctgttgttgagcaggttgaaaaaggcgagatgacctataaacagg

SEQ ID NO: 33382 - DNA, 75 bp, synthetic construct
  source 1..75: mol_type = other DNA
tgtcacttggtagccccaatactccaatcaccaaatggtctgatgttgcgcagacggcatctttcctgaaagacc

SEQ ID NO: 33383 - DNA, 75 bp, synthetic construct
  source 1..75: mol_type = other DNA
tcctgttgaaatctggcagatactgctgtcccgactgctggaccagcactatggcctcacactgaatgacacacc

SEQ ID NO: 33384 - DNA, 75 bp, synthetic construct
  source 1..75: mol_type = other DNA
gatcctctcacccgtgacgaatttattcgttttattgaggcttgccgtcatcaacaaacaaaaaacctgtggatt

SEQ ID NO: 33385 - DNA, 75 bp, synthetic construct
  source 1..75: mol_type = other DNA
gggttgtcctacgacacctataccggaaagcagatcagcagccagcgggccatgcgactgacggcggttttttcc

SEQ ID NO: 33386 - DNA, 75 bp, synthetic construct
  source 1..75: mol_type = other DNA
cgttcctcctgaatggactggccgcgagcgatttgctcttgacccctactccaccggcacaggttgattttcact

SEQ ID NO: 33387 - DNA, 75 bp, synthetic construct
  source 1..75: mol_type = other DNA
aaggtaaaatgcttggtgctcgccagcgtaataaggtcaatggtcagggatactataatgaaattggtgttggct

SEQ ID NO: 33388 - DNA, 75 bp, synthetic construct
  source 1..75: mol_type = other DNA
catcatggctgcgtgatccatcagtctgagcttgaccagagtaacgggcgctggatctgtgaaaacacgggtatg

SEQ ID NO: 33389 - DNA, 75 bp, synthetic construct
  source 1..75: mol_type = other DNA
gccgccgaagtcagttcgattacccggcctggcgcagaaatccatgaatatcagcctacaaccggagatataaag

SEQ ID NO: 33390 - DNA, 75 bp, synthetic construct
  source 1..75: mol_type = other DNA
acgtatatcgaccttctgaaggttactaccagtacgctggtacagggaattaaagccgggaaaagggagaaataa

SEQ ID NO: 33391 - DNA, 75 bp, synthetic construct
  source 1..75: mol_type = other DNA
tgaacgccttagagcatttgcaacaggactatatgcggcggctgaacgagtgggagagcgccttcgcagaattgc

SEQ ID NO: 33392 - DNA, 75 bp, synthetic construct
  source 1..75: mol_type = other DNA
tgctggaaaacgaggtggtgcacggttcgctggaggtgcaggatggcgaaatccgcgcctttgccgaaagccaga

SEQ ID NO: 33393 - DNA, 75 bp, synthetic construct
  source 1..75: mol_type = other DNA
tgatgttcgaaaaagtcgaagtgccggtactgggtatcgttgaaaacatgagtgtgcatatttgcagtaactgcg

SEQ ID NO: 33394 - DNA, 75 bp, synthetic construct
  source 1..75: mol_type = other DNA
tatttttgacaagaaacagatttactaccgcatggactttagtggcttcgttatgctggttatgggatttaacgg

SEQ ID NO: 33395 - DNA, 75 bp, synthetic construct
  source 1..75: mol_type = other DNA
cctgactttccgcaatatgaacgatttcacgccagagcaggtcgcccgacagattccccgtcttaaagccatgct

SEQ ID NO: 33396 - DNA, 75 bp, synthetic construct
  source 1..75: mol_type = other DNA
gtgatggtactgaagagagcatcagcctgactttccgtaatatgaacgatttcacgccggagcaggttgcccgac

SEQ ID NO: 33397 - DNA, 75 bp, synthetic construct
  source 1..75: mol_type = other DNA
ttctcaatggacagaccaaagctcgttacggcaaagcccatgaaattgccgtaaaactgggattaaaacccacgt

SEQ ID NO: 33398 - DNA, 75 bp, synthetic construct
  source 1..75: mol_type = other DNA
gcgacaagtcatgatacctaaagaaaatggcagttggctttacctgattgacctagaacacgcattacgcgtcgc

SEQ ID NO: 33399 - DNA, 75 bp, synthetic construct
  source 1..75: mol_type = other DNA
catgaaagtaacggaaccagtattgaaaataccggtaacggaaatattctcacccgcctgggagcaagaacatgg

SEQ ID NO: 33400 - DNA, 75 bp, synthetic construct
  source 1..75: mol_type = other DNA
tcctgaagagaactacacactactcgcagaactggcacggtgcatcagaggaaagatgattatctcggtgaatga

SEQ ID NO: 33401 - DNA, 75 bp, synthetic construct
  source 1..75: mol_type = other DNA
tctttcagtcgctgttaaggccgacgatgttttggctttataagcaccatgttacagcgaatcacatcactcttg

SEQ ID NO: 33402 - DNA, 75 bp, synthetic construct
  source 1..75: mol_type = other DNA
taatgaacatcccaggtatgcaacaacttacatcaaccaaatcctttgttggtgatgtagtcggaacctgcaacc

SEQ ID NO: 33403 - DNA, 75 bp, synthetic construct
  source 1..75: mol_type = other DNA
gctggacccgtttgcaggcagcggctcaacctgcgtggccgcccttcagtccggacgccggtatatcggtatcga

SEQ ID NO: 33404 - DNA, 75 bp, synthetic construct
  source 1..75: mol_type = other DNA
tggtgaacttatgcaccagtgaacatctgctggttcatcatccgatgctggaaggcattctgctgtctgaatgtg

SEQ ID NO: 33405 - DNA, 75 bp, synthetic construct
  source 1..75: mol_type = other DNA
gtcttctgaaagcgattgttatctgccatcccgttttattattcttccagctccattaaggcaaaaagtaaaaag

SEQ ID NO: 33406 - DNA, 75 bp, synthetic construct
  source 1..75: mol_type = other DNA
gccaggacgcccacggcagccagtacagataacggcaaacagaacacgtatttctcgtcactggataacatggtt

SEQ ID NO: 33407 - DNA, 75 bp, synthetic construct
  source 1..75: mol_type = other DNA
cgctggcgataaaaccgatgaatggctgcaaccggcctgtaatgaaatgtaccgcgtactcaaaaaagacgcgct

SEQ ID NO: 33408 - DNA, 75 bp, synthetic construct
  source 1..75: mol_type = other DNA
cggtgtggcccagatgctggcaccgaaggcaaaaacaccggattaccgcgcaacggataacggcagacagaacac

SEQ ID NO: 33409 - DNA, 75 bp, synthetic construct
  source 1..75: mol_type = other DNA
tgttcgcccgactaaccgcgggaaaatttccgaagaagacaccaccgaaacgccgatgtatgtcaatcgcggtgg

SEQ ID NO: 33410 - DNA, 75 bp, synthetic construct
  source 1..75: mol_type = other DNA
gcaggcttctggttttacccgtatgcaggtggcgctgtcggtgatgaaaaccgccattccgctggtcttgctgac

SEQ ID NO: 33411 - DNA, 75 bp, synthetic construct
  source 1..75: mol_type = other DNA
tgcaggatgacaccatcctggcacatcttgacaatcccgcagaggatacgtcacgctttccggcactgctggcgg

SEQ ID NO: 33412 - DNA, 75 bp, synthetic construct
  source 1..75: mol_type = other DNA
acaaccttactacgctcctgcggcggaacaacctgttcagcaaccgtattacgcaactgcgccggaacagcctgc

SEQ ID NO: 33413 - DNA, 75 bp, synthetic construct
  source 1..75: mol_type = other DNA
tggaaggcgttaaactggaaaaccgcactcacgcgccagttgactttgacaccgctgttgcttccaccatcacct

SEQ ID NO: 33414 - DNA, 75 bp, synthetic construct
  source 1..75: mol_type = other DNA
ggttgaactgtcgacagatcaccggcagatgaagcagagcgaaacgctgagcgattttcaggtattgtcgcgccc

SEQ ID NO: 33415 - DNA, 75 bp, synthetic construct
  source 1..75: mol_type = other DNA
cttaattcattatatattgctgataaaagtatcattgaggtgaagtatgaggatagaaataaatataaaacctta

SEQ ID NO: 33416 - DNA, 75 bp, synthetic construct
  source 1..75: mol_type = other DNA
gcgtcgattacttgaagtcaaaagcaacatagacgttgtcgctattaatgatctcacttccccaaaaattctcgc

SEQ ID NO: 33417 - DNA, 75 bp, synthetic construct
  source 1..75: mol_type = other DNA
ggtgattcaaaaatgtggcttgaagcaaataaagcgatgaaatcagctatcaaccttccgtggtatcgcaggaaa

SEQ ID NO: 33418 - DNA, 75 bp, synthetic construct
  source 1..75: mol_type = other DNA
gctttctgctgctggagtgtacggaactgggtgccgaagaacaaatgggaggacgcagtggagcagacagcattt

SEQ ID NO: 33419 - DNA, 75 bp, synthetic construct
  source 1..75: mol_type = other DNA
cttgccgggccgtcgatcattttcgtttatatgatcatcggttttatgctctttttcgtgatgcgggcaatgggg

SEQ ID NO: 33420 - DNA, 75 bp, synthetic construct
  source 1..75: mol_type = other DNA
ggatattaagtgatatttgtagaaagcaaatatcatatgggattgtacagacaggggataatttgcccaacggta

SEQ ID NO: 33421 - DNA, 75 bp, synthetic construct
  source 1..75: mol_type = other DNA
aagccggtgcttctgttatgtcactttcagaccaacgtttcgttgatggtgaaggggcatgggcggataaataca

SEQ ID NO: 33422 - DNA, 75 bp, synthetic construct
  source 1..75: mol_type = other DNA
ttgatgataaaatttacgtcaaacgactgcaaatgatacctgataaactgctggtaatttctgataatcagattt

SEQ ID NO: 33423 - DNA, 75 bp, synthetic construct
  source 1..75: mol_type = other DNA
cttatcaccagtcgttttttgcatatccgcgccagcccggaacaggcatcaatggagttttacggcgggaagtca

SEQ ID NO: 33424 - DNA, 75 bp, synthetic construct
  source 1..75: mol_type = other DNA
cccgtaacaagctgggctgctacatgacgcgacaggcgtcgattaacaatatcccggtttctggactggtatcgc

SEQ ID NO: 33425 - DNA, 75 bp, synthetic construct
  source 1..75: mol_type = other DNA
ccgccgcagacttaataaatggtctacaggtgatctaaaagtagagattgataaagtcctaaagaacaatactaa

SEQ ID NO: 33426 - DNA, 75 bp, synthetic construct
  source 1..75: mol_type = other DNA
atggattcagaaacagttctcggaacggtcaggtctggcgttaccagagtgccggaagccgggccgttattctgg

SEQ ID NO: 33427 - DNA, 75 bp, synthetic construct
  source 1..75: mol_type = other DNA
ctcctgaaacgcaattttgatgcaaaacgccctaacgagaagtgggttacagatgtcactgaatttaaagtcaat

SEQ ID NO: 33428 - DNA, 75 bp, synthetic construct
  source 1..75: mol_type = other DNA
ctcaacacataccgtgccgtcatcaaaaatatcctgagcataatcggtgaaaaaaatcttgcctcatcgattaat

SEQ ID NO: 33429 - DNA, 75 bp, synthetic construct
  source 1..75: mol_type = other DNA
ttcagaaaaaccagaagacgctggcgagacttcagcgacagttaagccgcaaggtcaaattcagcaacaactggc

SEQ ID NO: 33430 - DNA, 75 bp, synthetic construct
  source 1..75: mol_type = other DNA
tactctgaaagcaatggaaatcagtagtaacgccttaaatcgttatcaatcagtgatgaaaaatatgctaccgag

SEQ ID NO: 33431 - DNA, 75 bp, synthetic construct
  source 1..75: mol_type = other DNA
cattgcccgattcagtttcattagctcagcttgacgccatcctttatgccaacagaaagaaggaattaacagagc

SEQ ID NO: 33432 - DNA, 75 bp, synthetic construct
  source 1..75: mol_type = other DNA
ttaagctccaacaaaaattattcgccgacccgcgccgcatttcgctactaaaacacattgcgctttccggttcca

SEQ ID NO: 33433 - DNA, 75 bp, synthetic construct
  source 1..75: mol_type = other DNA
atctatctatggctttagaagatttttactgggcgcagttccaatattcattgggcaataaaaaagaaagttgta

SEQ ID NO: 33434 - DNA, 75 bp, synthetic construct
  source 1..75: mol_type = other DNA
cgaatggtctgcgcattgcctatggcaactatggattctttatccgaaacgatggttcaagcacatacttcatgt

SEQ ID NO: 33435 - DNA, 75 bp, synthetic construct
  source 1..75: mol_type = other DNA
tgggtgtggactacaattacagtgatataggatggtctagtttttaccgctactgggtgaacaattctgttcttc

SEQ ID NO: 33436 - DNA, 75 bp, synthetic construct
  source 1..75: mol_type = other DNA
gcagaaacgccttatttactgcaatcatgggtagataatatagatggtacaagccgtgccccatttattataacc

SEQ ID NO: 33437 - DNA, 75 bp, synthetic construct
  source 1..75: mol_type = other DNA
ccgaaacattcctgaaggcactgagtgacacactggcccggcacgaacttaaacagagcagtaaagtggctttac

SEQ ID NO: 33438 - DNA, 75 bp, synthetic construct
  source 1..75: mol_type = other DNA
gtggcgacctatcacctcagcgttaagtttggtggcaagggacaggctgcaaaccatgccgattacatcgagcgc

SEQ ID NO: 33439 - DNA, 75 bp, synthetic construct
  source 1..75: mol_type = other DNA
ctggcaaatgtttataatggcttacgggaaacagaataccctaacactttcaacagagatggtataaaaagtact

SEQ ID NO: 33440 - DNA, 75 bp, synthetic construct
  source 1..75: mol_type = other DNA
atcgccgtagcgcctcccgcctggctgaacccgcgccaacgggtgaacaactgcaaaacatcctgcgtgcgggta

SEQ ID NO: 33441 - DNA, 75 bp, synthetic construct
  source 1..75: mol_type = other DNA
tcgtactttgaagcacggctaaaggctacgatgctggaatccatacggggctactctcgcttaagaaatctgtgg

SEQ ID NO: 33442 - DNA, 75 bp, synthetic construct
  source 1..75: mol_type = other DNA
attgaacaggggcgaactatagcccgtgatgaggctgttaaagatgcacaacagaaatctgctgaaatttctgcc

SEQ ID NO: 33443 - DNA, 75 bp, synthetic construct
  source 1..75: mol_type = other DNA
ccaaataatgtgcgagagctggccaatgcagcagaactatttactgtaggagtattaccgctggcagaaacagca

SEQ ID NO: 33444 - DNA, 75 bp, synthetic construct
  source 1..75: mol_type = other DNA
tgggttaatgctaactcggtgtgtgttaatgatgttacgcctgacgatgcaagtacctgggttgctaaactagag

SEQ ID NO: 33445 - DNA, 75 bp, synthetic construct
  source 1..75: mol_type = other DNA
gaagtgggtaaaaatctcactggcaaatataaaaaaggccagcgttttgtattgcaaccggcgatggggttacca

SEQ ID NO: 33446 - DNA, 75 bp, synthetic construct
  source 1..75: mol_type = other DNA
tacgccggtgcggcgacaccggaggtggtgcgttatgaccgctatctgctggttaacacggcaccggatacggta

SEQ ID NO: 33447 - DNA, 75 bp, synthetic construct
  source 1..75: mol_type = other DNA
gaaggcctcttatgctctgaccggtcaggcaagtccgacgcccggtgctgtccagtcagtgataaatgtgacttt

SEQ ID NO: 33448 - DNA, 75 bp, synthetic construct
  source 1..75: mol_type = other DNA
acccggagagcctgcccggtgcgccactggtgcggtacacgtatacggaagccggtgaactgctggcggtatatg

SEQ ID NO: 33449 - DNA, 75 bp, synthetic construct
  source 1..75: mol_type = other DNA
tatcatgaaacaatggttaaagcactacgtatgcaaatagccgaacttgaacataaattaaatttagttagtaag

SEQ ID NO: 33450 - DNA, 75 bp, synthetic construct
  source 1..75: mol_type = other DNA
atgtttaaggccaggaattgcggctggatacgtttactgcccctgtttatgctgagtctaccagtacaggcggaa

SEQ ID NO: 33451 - DNA, 75 bp, synthetic construct
  source 1..75: mol_type = other DNA
gttcttcggctctgaccatggtggtgagcggggagcgctactgtacagcctgatcgggacgtgcaaactgaatga

SEQ ID NO: 33452 - DNA, 75 bp, synthetic construct
  source 1..75: mol_type = other DNA
tgcgggattttacgcagagtgaaacctgatataccacccaatcaggcaacccacatcctgcggcatacattcgca

SEQ ID NO: 33453 - DNA, 75 bp, synthetic construct
  source 1..75: mol_type = other DNA
aggaatatttgaagacctgatacaggatattgccgtcagggcgctggcttttgggtcaggggcattacgtgcggc

SEQ ID NO: 33454 - DNA, 75 bp, synthetic construct
  source 1..75: mol_type = other DNA
atgaactggaaaatatttgcgctttttgccctgactgcagggatgcatatcactgttcatgcctcagacaatgtg

SEQ ID NO: 33455 - DNA, 75 bp, synthetic construct
  source 1..75: mol_type = other DNA
gcccattcgttaaaagcaacaaaaacgatttcgtcgatgccgaggccatctgtgaagcggcgtcgcgtccatcaa

SEQ ID NO: 33456 - DNA, 75 bp, synthetic construct
  source 1..75: mol_type = other DNA
ctgctgaagcagtgaaggacgtcctgcgctctgaagaagtcagaagcgcactgaaacagcaactccgccagaatc

SEQ ID NO: 33457 - DNA, 75 bp, synthetic construct
  source 1..75: mol_type = other DNA
gggcgcggtcagcttgatgtaccagtacgtattacccgagcttcacaagcaagagaactctgggggcgaggttcc

SEQ ID NO: 33458 - DNA, 75 bp, synthetic construct
  source 1..75: mol_type = other DNA
acgccgccactttgcagaaaatactcgccgccgactgctgatcgataccatcaagcctatcgaggtgaagcatgt

SEQ ID NO: 33459 - DNA, 75 bp, synthetic construct
  source 1..75: mol_type = other DNA
agtacccgattgatgcggtacatacggttaagtttgcagagttacttggtaagccagaaacggctgtagtcaaga

SEQ ID NO: 33460 - DNA, 75 bp, synthetic construct
  source 1..75: mol_type = other DNA
atgacaatcgtaaaaacccataccggcattgtgatcaccaaagacggcccgcaggtaaaaaaacttcaccagaca

SEQ ID NO: 33461 - DNA, 75 bp, synthetic construct
  source 1..75: mol_type = other DNA
tgatgagaacggagttgaggtttttgacgaaaaggccttagtagaagaggaacccagtgataacgatttggccga

SEQ ID NO: 33462 - DNA, 75 bp, synthetic construct
  source 1..75: mol_type = other DNA
ctcaaacagatggtacaagtgttctcccgataatttcgaaatactgggtaagctccccataataaataaagtcac

SEQ ID NO: 33463 - DNA, 75 bp, synthetic construct
  source 1..75: mol_type = other DNA
ggtgatcggcgcagttgagaaacgacgcatgtatgacatgagtcttgctgtcgacaacgccgaacctgtcaatgt

SEQ ID NO: 33464 - DNA, 75 bp, synthetic construct
  source 1..75: mol_type = other DNA
ttcagtcaactttataggttcgcatcctatcaaagagctttaagttatggagctgaagccggaaagatacaggat

SEQ ID NO: 33465 - DNA, 75 bp, synthetic construct
  source 1..75: mol_type = other DNA
cggaaagtgcggggcgcgccggaaataccccgaccggaacccgcctgtcctttatcacgccacaggcgggcatca

SEQ ID NO: 33466 - DNA, 75 bp, synthetic construct
  source 1..75: mol_type = other DNA
atcagcaggccattattcagaacgatggattctggccggatattgatgccggcgattttgaaaagagccgcagca

SEQ ID NO: 33467 - DNA, 75 bp, synthetic construct
  source 1..75: mol_type = other DNA
ttcaccgaggaggtggcgctcgcggccatgcgcgcccacgctgccggtgagtctgtggatacccgcctgctgacg

SEQ ID NO: 33468 - DNA, 75 bp, synthetic construct
  source 1..75: mol_type = other DNA
acaccgccgcaccccgccgtacatgttcaccgaggaggtggcgcttgcggccatgcgcgctcacgctgccggtga

SEQ ID NO: 33469 - DNA, 75 bp, synthetic construct
  source 1..75: mol_type = other DNA
cagcgataaaggctctcagtatgtatcgctggcctacacgcagcggcttaaagaagccggattactggcatcaac

SEQ ID NO: 33470 - DNA, 75 bp, synthetic construct
  source 1..75: mol_type = other DNA
aatcatcgacctgcacgaccgcatcctgggtaagctgtttaacgctgccaagaataagcatcagcagcagttcca

SEQ ID NO: 33471 - DNA, 75 bp, synthetic construct
  source 1..75: mol_type = other DNA
aggcgctcgacctgccttctggcatcgagcggtcggtgcaccagaaccgcctgctcaagatcgcccgtgagggtg

SEQ ID NO: 33472 - DNA, 75 bp, synthetic construct
  source 1..75: mol_type = other DNA
aaaccggctaccgtaccgtgcgacgtcatcgtggcgcgttcatcaccatcagccagaacatcaaggactttgatg

SEQ ID NO: 33473 - DNA, 75 bp, synthetic construct
  source 1..75: mol_type = other DNA
tgacggagattggtgcggcgaaacttgccagcgccactgcacttggtgtgccgcttaaaattacccatatggcgg

SEQ ID NO: 33474 - DNA, 75 bp, synthetic construct
  source 1..75: mol_type = other DNA
attgccgtggggaactgcccggaaagctataaaccgcaactggctgaaggcagcgggcgcacccagaccgtgcgc

SEQ ID NO: 33475 - DNA, 75 bp, synthetic construct
  source 1..75: mol_type = other DNA
atgagcgcacgttcacgggcactgatccccctcagcgcagagcaacaggccgccatgcaggctgtggctgtcaca

SEQ ID NO: 33476 - DNA, 75 bp, synthetic construct
  source 1..75: mol_type = other DNA
acgtctggcaaaagagcgcgaagaattagctgtcattaacgatcagtttggtgcaccaacaggtgctgaactgct

SEQ ID NO: 33477 - DNA, 75 bp, synthetic construct
  source 1..75: mol_type = other DNA
tgaaaaagataagcattgggaaaataatgttaagagctgcccacagagagacacagcacactcttaccctgtaat

SEQ ID NO: 33478 - DNA, 75 bp, synthetic construct
  source 1..75: mol_type = other DNA
gcgcctggcaaaagaacgcgaagagttggctgtaataaacgatcaattcggcgcaccaacgggggctgaattact

SEQ ID NO: 33479 - DNA, 75 bp, synthetic construct
  source 1..75: mol_type = other DNA
caggaggaaccactctggcggctgatttttgaagccggtgaggccggtcgtggtgcaccggtacaggtacgtgca

SEQ ID NO: 33480 - DNA, 75 bp, synthetic construct
  source 1..75: mol_type = other DNA
ttactgtgccggcctgaccggcggcaggaggagatgctggccgcctggaggaaaagggcgacacaggagggtgag

SEQ ID NO: 33481 - DNA, 75 bp, synthetic construct
  source 1..75: mol_type = other DNA
caccagcacagtgagacgctcattgaatttgccattgattacctgaagaacaataaaaaacaggggctgatgcag

SEQ ID NO: 33482 - DNA, 75 bp, synthetic construct
  source 1..75: mol_type = other DNA
accaacgcttcattcacgaggaagtattggtaacacaggtggtagtgaaacccgcccccgcaatattgcatttaa

SEQ ID NO: 33483 - DNA, 75 bp, synthetic construct
  source 1..75: mol_type = other DNA
cactctggttgaaagttttggtctggtcaggtcaccaaccactggctcttatcgtctggttaccagaccgacaga

SEQ ID NO: 33484 - DNA, 75 bp, synthetic construct
  source 1..75: mol_type = other DNA
ctggctggagaaacaaccggaaggttcagtgcgtccggtggtcattgagtcggtgacaaaaatcatggcgtgcgg

SEQ ID NO: 33485 - DNA, 75 bp, synthetic construct
  source 1..75: mol_type = other DNA
ggtgtcagtcaacactctgatgctgaatgcgtactatgacttccggaatgacagcgcattcacaccatgggtatc

SEQ ID NO: 33486 - DNA, 75 bp, synthetic construct
  source 1..75: mol_type = other DNA
tccgccagcaggcgttgattaacggggaatggctggacgccaacaatggtgaagtcatcgacgtcaccaatccgg

SEQ ID NO: 33487 - DNA, 75 bp, synthetic construct
  source 1..75: mol_type = other DNA
atgaatgatggcagacagacgcctccgccccccgaggcatggaaaatccggtttctggcgaacggtacacccggc

SEQ ID NO: 33488 - DNA, 75 bp, synthetic construct
  source 1..75: mol_type = other DNA
tcgtggcgggtccgtccaccatcagtaagtattcgtggtatggatgcagtgatggaaacgctggagcgtcttggc

SEQ ID NO: 33489 - DNA, 75 bp, synthetic construct
  source 1..75: mol_type = other DNA
ctttgtccacaactaattggccgcgatgccagccgtatcgaagatatctggcaattcttttataaaggtgcttac

SEQ ID NO: 33490 - DNA, 75 bp, synthetic construct
  source 1..75: mol_type = other DNA
tggcggctgggaaatccatcatgcagcgtcagccgtgatgtggaaggtgtgattgaaatgctgcgccgtatgggg

SEQ ID NO: 33491 - DNA, 75 bp, synthetic construct
  source 1..75: mol_type = other DNA
cgagaaaagcgaaaaagccatcggcgaaaacgcagaaaatagccgcagcgaccaaagcgaagcgtgcggcgaaga

SEQ ID NO: 33492 - DNA, 75 bp, synthetic construct
  source 1..75: mol_type = other DNA
cttctgcagatcactgaaaatatccgctctgagcagtgccccggagtgacggctgccggacgtggtgctgtatca

SEQ ID NO: 33493 - DNA, 75 bp, synthetic construct
  source 1..75: mol_type = other DNA
cgttcattcagaccggcagggatgtggtgaaccgggctgacagcattgtgggaaacaccgggcagcagtgcagtg

SEQ ID NO: 33494 - DNA, 75 bp, synthetic construct
  source 1..75: mol_type = other DNA
tcagcgggcataaaacagaaaatcaggtgttgatttacgatcgtaaaacaaaaatcacaccaacactggatctgc

SEQ ID NO: 33495 - DNA, 75 bp, synthetic construct
  source 1..75: mol_type = other DNA
ccgttcgtgacatggtgcgaggagcgcgggctgatgtacgcgccgcaggtcagccagccgcagcttgaaagctat

SEQ ID NO: 33496 - DNA, 75 bp, synthetic construct
  source 1..75: mol_type = other DNA
aagagcagaagattagccagtctaccctggacgctctggagtccgagctttaccgcaacctgcgccccctgtatc

SEQ ID NO: 33497 - DNA, 75 bp, synthetic construct
  source 1..75: mol_type = other DNA
cagcgccgtagcttccgctgcctatcgttccggttcactgatgcttgatgagcgtaccggactgactcacgacta

SEQ ID NO: 33498 - DNA, 75 bp, synthetic construct
  source 1..75: mol_type = other DNA
attaatgttggtccggactggcggttactgagcaggaaccggggacaaacctgggcgctgttgagtcacgagcga

SEQ ID NO: 33499 - DNA, 75 bp, synthetic construct
  source 1..75: mol_type = other DNA
atgatcgaaaccctgctggatttttcggggctggaggacatcagccgcgatttgcagcttctgagtggtgcggaa

SEQ ID NO: 33500 - DNA, 75 bp, synthetic construct
  source 1..75: mol_type = other DNA
gacttatttcattaatcctgcttttttctcttattccacccgcccgagcttcatacgtagctcccaaacagatct

SEQ ID NO: 33501 - DNA, 75 bp, synthetic construct
  source 1..75: mol_type = other DNA
ttaagaacattcaaaataactacgccagaaatgctgagcgctttattgaaggaaagcattttttcaaagtggctg

SEQ ID NO: 33502 - DNA, 75 bp, synthetic construct
  source 1..75: mol_type = other DNA
cagcctgcttcagggtaagcaggcatcgggacgtccctggtggtaccgacaccgcacagaattaccccgtgaatg

SEQ ID NO: 33503 - DNA, 75 bp, synthetic construct
  source 1..75: mol_type = other DNA
tcgagcctcaagctttttggattttgcattaactgcttttgttgccatatctgatttcctcgttattaggtggct

SEQ ID NO: 33504 - DNA, 75 bp, synthetic construct
  source 1..75: mol_type = other DNA
gattctttggccttgcggcgctggcggcgtttgatctcgccttcaagtgccgaaacgataaattgccctgtactt

SEQ ID NO: 33505 - DNA, 75 bp, synthetic construct
  source 1..75: mol_type = other DNA
ttattccgccaggtactaccttgctggcagaagtgccgttgctggataataacggcaaatttaatggtcagtacg

SEQ ID NO: 33506 - DNA, 75 bp, synthetic construct
  source 1..75: mol_type = other DNA
taatgaatatccgtccccaatcctgcccaaagaacgctggcgttaccagatggtgaatatgtacccggacagcgg

SEQ ID NO: 33507 - DNA, 75 bp, synthetic construct
  source 1..75: mol_type = other DNA
gacggccagcgcggcgcgtgaccgcagctatgaactgacgttcacggcgataccctactcagaacgctacggcta

SEQ ID NO: 33508 - DNA, 75 bp, synthetic construct
  source 1..75: mol_type = other DNA
gggcagtatgtacccgtttaacggctatgtttctaacgaattcagtccgttacagacgtcactgttactcagtga

SEQ ID NO: 33509 - DNA, 75 bp, synthetic construct
  source 1..75: mol_type = other DNA
ggctgacagcaacagtgattaccgggcgggttctgattttgcccgtcagattcaggggcagggtacaggcagtat

SEQ ID NO: 33510 - DNA, 75 bp, synthetic construct
  source 1..75: mol_type = other DNA
ctttatgtttctgtttattgtaacaatggttacctccttcctttaggcgcaatgtattacgaacagtttgatatt

SEQ ID NO: 33511 - DNA, 75 bp, synthetic construct
  source 1..75: mol_type = other DNA
cgccatctaccagaatctgacggtgccgcaaatcgtcgaaaaaatcctgcgcgagcggcaccagatgcgcggtca

SEQ ID NO: 33512 - DNA, 75 bp, synthetic construct
  source 1..75: mol_type = other DNA
atggttgatgcaaaaattctgaatggtgtcagcacattattacgggcttacggacgcctgacctgcggagttctg

SEQ ID NO: 33513 - DNA, 75 bp, synthetic construct
  source 1..75: mol_type = other DNA
gaacacctgctgtttactccactcttcaaagcagataacgccagatgctttgatctggaggtggaatcatcgacg

SEQ ID NO: 33514 - DNA, 75 bp, synthetic construct
  source 1..75: mol_type = other DNA
agagaaagcaaaggaagagtgtcgatcgtttagcgcagaagtaattaaacgggtgctggacagcttgaagagaga

SEQ ID NO: 33515 - DNA, 75 bp, synthetic construct
  source 1..75: mol_type = other DNA
ggacttcgtgtttaacctcaaaagcgaatacccggcccgcgaacaggtgatgcagtacggtgaggacgacctgac

SEQ ID NO: 33516 - DNA, 75 bp, synthetic construct
  source 1..75: mol_type = other DNA
ctacaactaccgcaccgccacagcggagatgatgacagagcagcatgacgccaccgggggcgataacaccaccta

SEQ ID NO: 33517 - DNA, 75 bp, synthetic construct
  source 1..75: mol_type = other DNA
ctggtttcaaaaattttatcaacgattgaaaaacgtaccggatgtggtggtcactacaggtatcactccaataag

SEQ ID NO: 33518 - DNA, 75 bp, synthetic construct
  source 1..75: mol_type = other DNA
atggccagagtaattttgtatatcagtaatgatgtctatgataaagtaaatgcgatagttgaacagcgtcgtcag

SEQ ID NO: 33519 - DNA, 75 bp, synthetic construct
  source 1..75: mol_type = other DNA
ctgcatttaatcagactgagtttaataaattgcttcttgaatgcgttgtaaaaacacaatcatcagtagcgaaaa

SEQ ID NO: 33520 - DNA, 75 bp, synthetic construct
  source 1..75: mol_type = other DNA
gaggctcagatggagcgtaaagagaccgcttttaatcagactgagtttaataaagtgcttcttgaatgtgttgta

SEQ ID NO: 33521 - DNA, 75 bp, synthetic construct
  source 1..75: mol_type = other DNA
cctgcaaaagttggtgcatggcttatatattaccgaccggactctgtaacacaatattccaaagatattgcatgg

SEQ ID NO: 33522 - DNA, 75 bp, synthetic construct
  source 1..75: mol_type = other DNA
tgatccgcgcgtgtgggatgtggcaagcctgatggattttgctgtgccggtggtggcgtgtctgctgatctggat

SEQ ID NO: 33523 - DNA, 75 bp, synthetic construct
  source 1..75: mol_type = other DNA
ccacttcaatatgaatacggggagctgccctgctgtacagttccgcgtgaattacaggaacggcggtatttttta

SEQ ID NO: 33524 - DNA, 75 bp, synthetic construct
  source 1..75: mol_type = other DNA
aaagcggagaacatcttcgactcaatacgttggaaagcatctggatacaggggaaactgcgtatgtgggggcgct

SEQ ID NO: 33525 - DNA, 75 bp, synthetic construct
  source 1..75: mol_type = other DNA
ccggacatccgcaacagcgggcttatcaccggtgataatggtttaatgttaaatgctgtctccctcagcaatccg

SEQ ID NO: 33526 - DNA, 75 bp, synthetic construct
  source 1..75: mol_type = other DNA
gaagatgtcggtggtgacgggcaaacctatccgatagatatgccaataatcgaacagcttgatgagttaattctc

SEQ ID NO: 33527 - DNA, 75 bp, synthetic construct
  source 1..75: mol_type = other DNA
ttagagtggcaaaacttcatcgctcaggcgatcgatctgattaacagcccgaaaacgacaaaattaccatcaccg

SEQ ID NO: 33528 - DNA, 75 bp, synthetic construct
  source 1..75: mol_type = other DNA
tgttcagcaagcagacaaattgacccaattacgtcgcttagcctgtagtgtgtcgcaacgggataataaaacagc

SEQ ID NO: 33529 - DNA, 75 bp, synthetic construct
  source 1..75: mol_type = other DNA
ccggtggaaaactggtacaaaatgatcggagactccacacatgcggatgccatcctagatcgactggttcatggc

SEQ ID NO: 33530 - DNA, 75 bp, synthetic construct
  source 1..75: mol_type = other DNA
gttaacgtggatatttcgggtactcatcctgctttctcctctctctggttttcagcccccatcatcttttgagtt

SEQ ID NO: 33531 - DNA, 75 bp, synthetic construct
  source 1..75: mol_type = other DNA
gtcagctaccgtgcacatggcctgcccgtattggagaatctgctggagcaggacttcagcgccagcggcccgaac

SEQ ID NO: 33532 - DNA, 75 bp, synthetic construct
  source 1..75: mol_type = other DNA
agcaggtgacggctgggttgctatcggtaaaggggcaaaagcaaatacctttatgaacactagtggcgcgagtac

SEQ ID NO: 33533 - DNA, 75 bp, synthetic construct
  source 1..75: mol_type = other DNA
ctggagcaggatttgtctccttccggacccttaagccagtttcgggggcatgtttcaaaaaaaacagaaaacatt

SEQ ID NO: 33534 - DNA, 75 bp, synthetic construct
  source 1..75: mol_type = other DNA
cggctctcaattgtacgacctgcagcaggatgctctgttgtggaacggcacagcattcagtgccgcacacggcac

SEQ ID NO: 33535 - DNA, 75 bp, synthetic construct
  source 1..75: mol_type = other DNA
gcaacggtgtttaattatatcgagtgtgattacaatcgctggcgtcgtcacagtgcctgtggcggtctcagcccg

SEQ ID NO: 33536 - DNA, 75 bp, synthetic construct
  source 1..75: mol_type = other DNA
acataaggcagctttgctttccgaagctgaatccgtgattttgccgctggagcgcgcggtcaggctgaatatggc

SEQ ID NO: 33537 - DNA, 75 bp, synthetic construct
  source 1..75: mol_type = other DNA
atagcttatgaccagaaggggattattcgttgtattgagaaagacgtatcaacacttaaccctgacgggttaagt

SEQ ID NO: 33538 - DNA, 75 bp, synthetic construct
  source 1..75: mol_type = other DNA
aacgcgccgtcaggctgaatatggcgacggatgaggagcgcgcacgactggagtcatgggaacgctacagcgttc

SEQ ID NO: 33539 - DNA, 75 bp, synthetic construct
  source 1..75: mol_type = other DNA
aattatatcgaatgtgattacaatcggtggcggcggcacagttggtgtggcggcctcagtccggaacaatttgaa

SEQ ID NO: 33540 - DNA, 75 bp, synthetic construct
  source 1..75: mol_type = other DNA
ggaccgtgttgaaggtgccgcgctggagttttatgaggcagcagccagaaggagcatcagacaggtcttcctgga

SEQ ID NO: 33541 - DNA, 75 bp, synthetic construct
  source 1..75: mol_type = other DNA
tcacaggcttacaaaattactgctgtaacttatggctttcttcaggttcacaatggaagccagtgggtaacgatt

SEQ ID NO: 33542 - DNA, 75 bp, synthetic construct
  source 1..75: mol_type = other DNA
atgaatacagcatttgcactcgttctgacagtttttcttaatacaggcgaaccagtcgatcttgttattggtata

SEQ ID NO: 33543 - DNA, 75 bp, synthetic construct
  source 1..75: mol_type = other DNA
tttatcgagtgcttgatattccaaaaggagaatcatcactacctgatccttctgagaaagaagacgaatctaatg

SEQ ID NO: 33544 - DNA, 75 bp, synthetic construct
  source 1..75: mol_type = other DNA
atggaaacgttattaccaaacgttaatacgtctgaaggttgttttgaaattggtgtcaatatcagtaaccctgta

SEQ ID NO: 33545 - DNA, 75 bp, synthetic construct
  source 1..75: mol_type = other DNA
tgcagattctctatcctgcacgctttcaatctagtcaaaaccggaatgagttaaaaccacaggaacaggaggtaa

SEQ ID NO: 33546 - DNA, 75 bp, synthetic construct
  source 1..75: mol_type = other DNA
ttttttaagggagaaatcagcgaaatgcagattctctatcctgcacgctttcaatctagtcaaaaccggaatgag

SEQ ID NO: 33547 - DNA, 75 bp, synthetic construct
  source 1..75: mol_type = other DNA
gaaaacagacagcgcaaaaagcagggactggataccctgggtatggatgaactgatagcgaaagcctggcgtttt

SEQ ID NO: 33548 - DNA, 75 bp, synthetic construct
  source 1..75: mol_type = other DNA
atcctttacggttcgcttccggtggaatttcggcgtattcctgagggggaaaaacatacagcatcagcaatgaaa

SEQ ID NO: 33549 - DNA, 75 bp, synthetic construct
  source 1..75: mol_type = other DNA
aaatgacgccgctgatggagaagactcagcacaaactgaggagaagatcattcaggaaaactctgttgatgccgc

SEQ ID NO: 33550 - DNA, 75 bp, synthetic construct
  source 1..75: mol_type = other DNA
ggcggaagaactgccggctgttactgccctggccatttctcacaaaacaaagctgctcgacccgctggagattcg

SEQ ID NO: 33551 - DNA, 75 bp, synthetic construct
  source 1..75: mol_type = other DNA
acgatggttacgcagggctatgagtatcgtcgtgatgacgatatggcattgtggagttctgcagatctgacttat

SEQ ID NO: 33552 - DNA, 75 bp, synthetic construct
  source 1..75: mol_type = other DNA
ggccgcatccggcaaccctcacgaggccgctctggcactgcgccgtgcccgtaaactgatggatgttcacggcat

SEQ ID NO: 33553 - DNA, 75 bp, synthetic construct
  source 1..75: mol_type = other DNA
gcgtttctgtgcgccagtacttcgaatctaactactgtcttaacgaccttcagaaagcagctcttcttgccgctg

SEQ ID NO: 33554 - DNA, 75 bp, synthetic construct
  source 1..75: mol_type = other DNA
tcagacgccgctgtggatgaggccattctcatcaatgcatacatcttcaccgaaaccggtcagcgcgccggctga

SEQ ID NO: 33555 - DNA, 75 bp, synthetic construct
  source 1..75: mol_type = other DNA
ggtgatgtggtcgtcagtggtgcaactgagccggagtggtactacgtcatcgtactggccgggcaatccaatgcc

SEQ ID NO: 33556 - DNA, 75 bp, synthetic construct
  source 1..75: mol_type = other DNA
ctgcagggagaagtacgacagcagaaacgtggtctgtgggcagacagcgctcctgttccgccctgggtatggcgc

SEQ ID NO: 33557 - DNA, 75 bp, synthetic construct
  source 1..75: mol_type = other DNA
cactggcgtgctgaaggactgaagccagacttcgccattgggcattccgtcggtgaatttgccgctgccgttgtc

SEQ ID NO: 33558 - DNA, 75 bp, synthetic construct
  source 1..75: mol_type = other DNA
cagtggccggaagagcagctgtggtcgacggagaaatacctcgatttcatgccgaaattgtttgacgcggtacgt

SEQ ID NO: 33559 - DNA, 75 bp, synthetic construct
  source 1..75: mol_type = other DNA
atggatgttgagtatggccagtacagcgtcaccctgctggttgaaggttttcctccttcgcatgccgggaccatc

SEQ ID NO: 33560 - DNA, 75 bp, synthetic construct
  source 1..75: mol_type = other DNA
atgaactatgccggacacgaaaaccttcgtgctgaagtggcggaggtggccaatgccatgtgtgaccttcgggcc

SEQ ID NO: 33561 - DNA, 75 bp, synthetic construct
  source 1..75: mol_type = other DNA
tccgcaactggaagcgctgataagcttcgcccgcaccggcgacaccgtggtggtgcatagcatggatcgcctggc

SEQ ID NO: 33562 - DNA, 75 bp, synthetic construct
  source 1..75: mol_type = other DNA
gattaaccttgagcacattaagtcttatctgccggacagcacgtttaaccgctacggcaaggtgacggcgctgtt

SEQ ID NO: 33563 - DNA, 75 bp, synthetic construct
  source 1..75: mol_type = other DNA
cgataacgaggttacttaatgaaaatgaagcctttcgccgctggtataacgctgctttgcctgatgttgtgcgtc

SEQ ID NO: 33564 - DNA, 75 bp, synthetic construct
  source 1..75: mol_type = other DNA
gattcagcggtgatttctcgttttttcgaatccctgaaagcaaaaattcaggcttaccagcggaaaaaacgacga

SEQ ID NO: 33565 - DNA, 75 bp, synthetic construct
  source 1..75: mol_type = other DNA
gaagagcttaaacgcttaccctctgaatgctcccctgtagtcgaacagaacctgatgccatggcttgccacaggt

SEQ ID NO: 33566 - DNA, 75 bp, synthetic construct
  source 1..75: mol_type = other DNA
agagattaaggtcggcgataacgataacctttctgcgctggcggcgattctggcgggtgccgataaactgttgct

SEQ ID NO: 33567 - DNA, 75 bp, synthetic construct
  source 1..75: mol_type = other DNA
gggagacacgccactgatgctggttatctggtccccggaagaaattcaggccctcgctgacggaatggatatttc

SEQ ID NO: 33568 - DNA, 75 bp, synthetic construct
  source 1..75: mol_type = other DNA
tgaatcgcagtccttcgacgatctcacgtgaagttcagcgtaatcggggcagacgctattacaaagctgttgatg

SEQ ID NO: 33569 - DNA, 75 bp, synthetic construct
  source 1..75: mol_type = other DNA
ctaataaccgagccaacagaatggcgaaaaggccaaaaccgtgcttactggatcaaaatttaccattgcgaaagc

SEQ ID NO: 33570 - DNA, 75 bp, synthetic construct
  source 1..75: mol_type = other DNA
tgtttaattatttcatcagaaagggtgccgtgcagcaagaaacagaagacggaatttggttcataatgaatgtaa

SEQ ID NO: 33571 - DNA, 75 bp, synthetic construct
  source 1..75: mol_type = other DNA
ctgaatgacactaactacaaccgcatgtgggaatacaataaccgcggcgtgggtagcaaagtggttgcagaggcg

SEQ ID NO: 33572 - DNA, 75 bp, synthetic construct
  source 1..75: mol_type = other DNA
attaccgcagcaaagacctcaccccgaaaaaatccaggctgctggctgacaccatttcggctgtttatctcgatg

SEQ ID NO: 33573 - DNA, 75 bp, synthetic construct
  source 1..75: mol_type = other DNA
ctgccagtgatcactatcacacgcaaggacggcgacagtcaccgatttaccctggcagatcgcggagcttacacg

SEQ ID NO: 33574 - DNA, 75 bp, synthetic construct
  source 1..75: mol_type = other DNA
atgacgactgtaacatcagcccaggcgaataagctgtatcaggtggcgctttttaccgctgccaaccgcaaccgc

SEQ ID NO: 33575 - DNA, 75 bp, synthetic construct
  source 1..75: mol_type = other DNA
ccaatccgggttgtagcggtggagaaatcgccgcagcactgaataccccaaccacagccattaatgcggagttac

SEQ ID NO: 33576 - DNA, 75 bp, synthetic construct
  source 1..75: mol_type = other DNA
ttcaaacgaatgagagcggtgtcattattgcagaaggaagtaccgcagcatggatggcccgacttgacgagtggc

SEQ ID NO: 33577 - DNA, 75 bp, synthetic construct
  source 1..75: mol_type = other DNA
tacctatggtcattggtatggtatcgaattgaatgagtggaataaaaaacagttttggataccaccaggaatggc

SEQ ID NO: 33578 - DNA, 75 bp, synthetic construct
  source 1..75: mol_type = other DNA
attgcgattgactggccggtaacagaaccacttctctcagaaaaagatattaaattaattacacttgcagagtat

SEQ ID NO: 33579 - DNA, 75 bp, synthetic construct
  source 1..75: mol_type = other DNA
ctcaaaaagcgcggcggccaccagtgccgctgcggcgaaaacgtcagaaacgaatgcggcagcgtcacaacaatc

SEQ ID NO: 33580 - DNA, 75 bp, synthetic construct
  source 1..75: mol_type = other DNA
cccgtcgccgtcggcagagtggtttatggggaaagatttgtggagcgtttggcaccagtgactggggctgggaaa

SEQ ID NO: 33581 - DNA, 75 bp, synthetic construct
  source 1..75: mol_type = other DNA
atggataagaaaatatgcgttgtttcgatgagcgtcggcaaaccggcgtcaatgactgctgcatggatcaacaac

SEQ ID NO: 33582 - DNA, 75 bp, synthetic construct
  source 1..75: mol_type = other DNA
cgctgagcgactgcgtgctgtcgctgtcggagaaagatctgcaggcacatactctggctaccgcagaattatata

SEQ ID NO: 33583 - DNA, 75 bp, synthetic construct
  source 1..75: mol_type = other DNA
ttcaacgccaagtcgctcagctaatcacagaatgaataattgtgagtttaatggttttgtttgcgcaggcggctg

SEQ ID NO: 33584 - DNA, 75 bp, synthetic construct
  source 1..75: mol_type = other DNA
agaagtaaaaacgatgtgcctgatggcgatagcgaagacgactatgaggaaaaattgcttattgccagatgggaa

SEQ ID NO: 33585 - DNA, 75 bp, synthetic construct
  source 1..75: mol_type = other DNA
aaggggattaagggaaattctgatacagctacgaaacttcagacagcaataaaaatatctggtgtttcgtttgat

SEQ ID NO: 33586 - DNA, 75 bp, synthetic construct
  source 1..75: mol_type = other DNA
cagaagtcttgatttttgagcctaaaaaatttgaggactccagggggtatttttttgaaagctttaatcaaaggc

SEQ ID NO: 33587 - DNA, 75 bp, synthetic construct
  source 1..75: mol_type = other DNA
tgatatgcgtggctggacgattaagggcaagcccgccagtggtcgggccgtattgtctcaggaacaggacggcat

SEQ ID NO: 33588 - DNA, 75 bp, synthetic construct
  source 1..75: mol_type = other DNA
tcggggggtaccgtttgagaggtacgctgatgatattgtagtacattgttcacgaatgagtgatgcaacaaggct

SEQ ID NO: 33589 - DNA, 75 bp, synthetic construct
  source 1..75: mol_type = other DNA
aggacggtcttcccgatccggtgaaagcgatggggcgtcttctggtggagaacattaataccgaccccaggctgg

SEQ ID NO: 33590 - DNA, 75 bp, synthetic construct
  source 1..75: mol_type = other DNA
caacgatgaactgttcgggatcatctataccgttgatgaaggtgacgactggaccgacccgcaggtgctggaaaa

SEQ ID NO: 33591 - DNA, 75 bp, synthetic construct
  source 1..75: mol_type = other DNA
caaacttctggcgctggctcgaccgtgccgccggtggcagaccggaaaaacgcgacgtgatacttgccgcgctgt

SEQ ID NO: 33592 - DNA, 75 bp, synthetic construct
  source 1..75: mol_type = other DNA
atggataaagagaaaatggagaaagaacacatgagcaaaacggatgggatgaaaaatgaccacatgggtaaaaaa

SEQ ID NO: 33593 - DNA, 75 bp, synthetic construct
  source 1..75: mol_type = other DNA
gccgatatcgacacactggaagacccgcgcaagcgcgcatccctgactggtttctcgctaatccgtctgcctgac

SEQ ID NO: 33594 - DNA, 75 bp, synthetic construct
  source 1..75: mol_type = other DNA
taagaacggcaaatcggcaatctctgccggtgtcgccctgtattgttttgcctgtgataacgagtttggcgcgga

SEQ ID NO: 33595 - DNA, 75 bp, synthetic construct
  source 1..75: mol_type = other DNA
cgtcgcaccggaaaaggctgtcatgcagcaggtgaaatcatcgctggaacagaaaataaaacagatgcaaatcag

SEQ ID NO: 33596 - DNA, 75 bp, synthetic construct
  source 1..75: mol_type = other DNA
ccgatccggagtccatgggtatccagatcgacggtgacaaggccatcgtcaataacgaaggcgagagcaccatca

SEQ ID NO: 33597 - DNA, 75 bp, synthetic construct
  source 1..75: mol_type = other DNA
ttccaaataccttcgaagttgtttttgagcaacactttacttcaaacattaactattgctatcaaatttggaaaa

SEQ ID NO: 33598 - DNA, 75 bp, synthetic construct
  source 1..75: mol_type = other DNA
agaggaggaaaatgatgcgcttctgaatgagtggcctcacggaaaactagctggcgttccagtgtggcacatgaa

SEQ ID NO: 33599 - DNA, 75 bp, synthetic construct
  source 1..75: mol_type = other DNA
aagaatcagcacatcaaactgcccttccctggcaggaagcactatcgatcccccttttaacgggtctgacggaac

SEQ ID NO: 33600 - DNA, 75 bp, synthetic construct
  source 1..75: mol_type = other DNA
tatgattgcgtgatgcctgtttatcagttccggcgtgatttttctctggtacagaccgcgccgcataacgtgtcc

SEQ ID NO: 33601 - DNA, 75 bp, synthetic construct
  source 1..75: mol_type = other DNA
gcctgccttactttttgcgctcgctgtttacttcacgctatgactacatccggcgcaataaaagcccggtgcacg

SEQ ID NO: 33602 - DNA, 75 bp, synthetic construct
  source 1..75: mol_type = other DNA
ccttctggcatgatttagcggctccgatcattgctggcattcttgccagtctgatcgtgaactcgctgaataagc

SEQ ID NO: 33603 - DNA, 75 bp, synthetic construct
  source 1..75: mol_type = other DNA
tactgatgacggtggatggaggcaacatgattgccgttgccgaaaatgcccggcaaaagtggacgcaaagcccct

SEQ ID NO: 33604 - DNA, 75 bp, synthetic construct
  source 1..75: mol_type = other DNA
gatggaagaaaaaatagatgcagtaatccgtgagaaatacgagttgcccccggttatgagcacgcctgtgaaata

SEQ ID NO: 33605 - DNA, 75 bp, synthetic construct
  source 1..75: mol_type = other DNA
gcggttctttgcagccagctggtgccgcaggaatttgcttttgaagcgttaatgcatgatgcaacagaagcgtat

SEQ ID NO: 33606 - DNA, 75 bp, synthetic construct
  source 1..75: mol_type = other DNA
caccggaggtgcagcttaccgtcagtggttgtccgcgagtgacgccgtgtcggctggatcaggcagcgccgcgca

SEQ ID NO: 33607 - DNA, 75 bp, synthetic construct
  source 1..75: mol_type = other DNA
cttagtattgcgtcggactatgctgaatatgtggcagagacgcgttacagaagaaaatctctggaggatgtaagc

SEQ ID NO: 33608 - DNA, 75 bp, synthetic construct
  source 1..75: mol_type = other DNA
ttctgcgggaggtggtcctggaagcccggactgaaatccgcagcatggcggatgcactggcgaaaatccggaaat

SEQ ID NO: 33609 - DNA, 75 bp, synthetic construct
  source 1..75: mol_type = other DNA
ctcaatattgcgtcggactatgcggaatatgttgcagaggcgcgttacagaagaaaattcccggaggatgtaagc

SEQ ID NO: 33610 - DNA, 75 bp, synthetic construct
  source 1..75: mol_type = other DNA
aaagcaaacttccacaacttggcaccactattttcacccagatgagcgcgctggcgcagcaacaccaggcgatta

SEQ ID NO: 33611 - DNA, 75 bp, synthetic construct
  source 1..75: mol_type = other DNA
gccggatttgacaaagaggattttaaaaaacctgttcgcgtccatttacccgttgtgaatgaccttcctccggaa

SEQ ID NO: 33612 - DNA, 75 bp, synthetic construct
  source 1..75: mol_type = other DNA
tccttcggtcgtacctccaccttcctggatgtgtacatcgaacgtgacctgaaagctggcaagatcaccgaacaa

SEQ ID NO: 33613 - DNA, 75 bp, synthetic construct
  source 1..75: mol_type = other DNA
ggaggggaggggtaacattaaaggttgatgacaacaacatttctcaaagtgagaaactggttgagaagcactttc

SEQ ID NO: 33614 - DNA, 75 bp, synthetic construct
  source 1..75: mol_type = other DNA
atggcagagattattcccatgactgaagaacagaaattccagttagagatttacaagctggtcatgaaccagaac

SEQ ID NO: 33615 - DNA, 75 bp, synthetic construct
  source 1..75: mol_type = other DNA
tccggtagagttattaatgaaagtgcaattaggcggcggaaccaatatcgccagtgccgtggagtatggtcggca

SEQ ID NO: 33616 - DNA, 75 bp, synthetic construct
  source 1..75: mol_type = other DNA
aagaacagaaattcaagttagaaatttaccgactgctatctaagaacaattcagcggcagaggaagcgtttgcat

SEQ ID NO: 33617 - DNA, 75 bp, synthetic construct
  source 1..75: mol_type = other DNA
tggctattgcgggccgtacctgattgagatgtggagcgaaacggcggaagacccggcggcagaagtggcgaaagc

SEQ ID NO: 33618 - DNA, 75 bp, synthetic construct
  source 1..75: mol_type = other DNA
ggcctgcctggttatctttctgccattccgtcagctctgctcaacgagtccgccacgctgttccgccgcaagtat

SEQ ID NO: 33619 - DNA, 75 bp, synthetic construct
  source 1..75: mol_type = other DNA
gctgtcgccgctacaggacaggttcagggaggtaaatgactggctcggcatggaggtcatcagattcaaagagta

SEQ ID NO: 33620 - DNA, 75 bp, synthetic construct
  source 1..75: mol_type = other DNA
tcgtgaatatcgcgttgccattaaaggcccgctgaccactccggttggtggcggtattcgctctctgaacgttgc

SEQ ID NO: 33621 - DNA, 75 bp, synthetic construct
  source 1..75: mol_type = other DNA
gaaaaagtatcgggtattgctgaaccgtgttgatacatcaactgcaccggatattgaatggccaacaggacccat

SEQ ID NO: 33622 - DNA, 75 bp, synthetic construct
  source 1..75: mol_type = other DNA
gctttgatggcgtttgcgtacatcctgaaagtgaaatcgttcacgtatggcgcggcggggtatggtgtccggtca

SEQ ID NO: 33623 - DNA, 75 bp, synthetic construct
  source 1..75: mol_type = other DNA
agcagacgcttgaaccttctttaagagaagtgctggaaatcccaacagtgaaactgtggcgcgccattctggata

SEQ ID NO: 33624 - DNA, 75 bp, synthetic construct
  source 1..75: mol_type = other DNA
agatccggtttttgggtttaaggatttaggccgctttaaaaaagcgatagatagtaatgacctggtgccagaaca

SEQ ID NO: 33625 - DNA, 75 bp, synthetic construct
  source 1..75: mol_type = other DNA
tggtgaagtgtcacttaagaagtcagagctcaaagagattcgtcttgtcaaagttagttcagcagccttcaagct

SEQ ID NO: 33626 - DNA, 75 bp, synthetic construct
  source 1..75: mol_type = other DNA
ggatatcagcgcaagtatcgcgggaatgggcgatctgcaatacaaatatattgtgatgccctataccgatgaacc

SEQ ID NO: 33627 - DNA, 75 bp, synthetic construct
  source 1..75: mol_type = other DNA
tatatagccgcattggagtacgacgacgatgagccaattggcggtgtaacccactggatgccgttaccagaaccg

SEQ ID NO: 33628 - DNA, 75 bp, synthetic construct
  source 1..75: mol_type = other DNA
cagggctatcctggctgactggatgcagttaagcggaagccatgaggaatggcagttaagcacaacaacgggctg

SEQ ID NO: 33629 - DNA, 75 bp, synthetic construct
  source 1..75: mol_type = other DNA
aacagcctcgagggaaaaaacacgccgatacggaagtgattattttcgctggcagtgatgcgtgggcgcacgcga

SEQ ID NO: 33630 - DNA, 75 bp, synthetic construct
  source 1..75: mol_type = other DNA
caaggtggcaatcgacccgaagcataaagccccctactcaacacgcattcaggcggtcgtgctggcggtgaacaa

SEQ ID NO: 33631 - DNA, 75 bp, synthetic construct
  source 1..75: mol_type = other DNA
gtcagattgcgtataagttccttaagcgcaacgggttcaaggtttgttttcatgaccgctttatagctgtaacca

SEQ ID NO: 33632 - DNA, 75 bp, synthetic construct
  source 1..75: mol_type = other DNA
aaagcctttgataaaggatcgattggcctggatgaaaatatgcgggtactggtatcagatgcggtaaacggcgga

SEQ ID NO: 33633 - DNA, 75 bp, synthetic construct
  source 1..75: mol_type = other DNA
cccgttatttcgcaaaaatgtattacgcgcttataactaccgtcgcgttggaagcggcgcatataaagggcggtc

SEQ ID NO: 33634 - DNA, 75 bp, synthetic construct
  source 1..75: mol_type = other DNA
attgagaaagtggcaaaggtctttgtccgcaatgagcttatcccgttacaggacaggattcgggaaataaacggc

SEQ ID NO: 33635 - DNA, 75 bp, synthetic construct
  source 1..75: mol_type = other DNA
tttcggtgtacataagccccgaaatcgtggaggtgctcaagcagcgccacaaaaaaaactatgaagctggcgttg

SEQ ID NO: 33636 - DNA, 75 bp, synthetic construct
  source 1..75: mol_type = other DNA
ttgaccccaacaagattaaatccaattaataccgatgccttacggcaggctgcgatgttcgatttaactttattc

SEQ ID NO: 33637 - DNA, 75 bp, synthetic construct
  source 1..75: mol_type = other DNA
cctttgagtcatcctgccagatccgtatgttcatgattgacggagaaccttggtttgtcaccaaagatgtgtgca

SEQ ID NO: 33638 - DNA, 75 bp, synthetic construct
  source 1..75: mol_type = other DNA
ctgggcccgtctgcggcaggatggtgaaaaagggctggccgacggtctggagctgctgaccggtttgttgcagcg

SEQ ID NO: 33639 - DNA, 75 bp, synthetic construct
  source 1..75: mol_type = other DNA
gcgctggttttaatgaaagccactggaggacttgaaaccgccatagtctgtgcgcttcaggcagaaggttttgag

SEQ ID NO: 33640 - DNA, 75 bp, synthetic construct
  source 1..75: mol_type = other DNA
tcatccagtgataaccagcgcgaactgaaaaacctgcagaccattgccaccaaaatgaagcagtataaattccag

SEQ ID NO: 33641 - DNA, 75 bp, synthetic construct
  source 1..75: mol_type = other DNA
acgtaatattaatggcgataaaccctatatcgaaattatctgcatggattcagaagctgaaattcagaaagcaga

SEQ ID NO: 33642 - DNA, 75 bp, synthetic construct
  source 1..75: mol_type = other DNA
tcgtcaggttaatggcgatgaaccctatatcgagattatctgcatggattcagaagctgaaattcagaaagcaga

SEQ ID NO: 33643 - DNA, 75 bp, synthetic construct
  source 1..75: mol_type = other DNA
tgaatgcatggagaaatgctgtttctatatgggaccctgtttgccgagaaatttttgatgatctaataaaacctc

SEQ ID NO: 33644 - DNA, 75 bp, synthetic construct
  source 1..75: mol_type = other DNA
cctgccggccgatatgatcgccggtggtaacaaggccaaaaatgcctggggcggtgatgtcaccattaaggcaac

SEQ ID NO: 33645 - DNA, 75 bp, synthetic construct
  source 1..75: mol_type = other DNA
atggctcaggattaccaccacggggtgcgtgttgttgaagtcaacgaaggcacccgatccattaccacggtgagc

SEQ ID NO: 33646 - DNA, 75 bp, synthetic construct
  source 1..75: mol_type = other DNA
ctgatgctgatggtctgtgcctgttcaccaaacgcctggaggaaggccagtttatctggcctgcggtacgtgacg

SEQ ID NO: 33647 - DNA, 75 bp, synthetic construct
  source 1..75: mol_type = other DNA
gcaaggtatccattacccgttcgcaactggcaatgctcctcgataagctggactggcgtcagccaaaaacatccc

SEQ ID NO: 33648 - DNA, 75 bp, synthetic construct
  source 1..75: mol_type = other DNA
ttaacggaactgttgttgatgctccatgcagcatttctcagaaatcagctgatcagtctattgattttggacagc

SEQ ID NO: 33649 - DNA, 75 bp, synthetic construct
  source 1..75: mol_type = other DNA
atgtttggtattttcaaaaagaaaacccgcagagcagcaactgaaattaaaaagtttgagaaacgcgatctggca

SEQ ID NO: 33650 - DNA, 75 bp, synthetic construct
  source 1..75: mol_type = other DNA
gatcagtctattgattttggacaactttcaaaaagttttcttgcaaatgatggtcaatccaagccaatgaacttg

SEQ ID NO: 33651 - DNA, 75 bp, synthetic construct
  source 1..75: mol_type = other DNA
ttggttatgaccagatatataaaatagttgataataaccttgctggtatagatttttctgccccacgattaaata

SEQ ID NO: 33652 - DNA, 75 bp, synthetic construct
  source 1..75: mol_type = other DNA
atgtgcaataacacccgtccggacgcagccgccgaagcaatcaaaacactgattgatgcgctgattgatatttct

SEQ ID NO: 33653 - DNA, 75 bp, synthetic construct
  source 1..75: mol_type = other DNA
caccgcgcaggtgctggccgacacgatggctgaggcgcacatgtgggcggtggacaagcccatcaccgcaacgct

SEQ ID NO: 33654 - DNA, 75 bp, synthetic construct
  source 1..75: mol_type = other DNA
actgttgataatggaaatgatgatgttttttatatacttctttcattttatatgaatgaatggaaaaaggagaag

SEQ ID NO: 33655 - DNA, 75 bp, synthetic construct
  source 1..75: mol_type = other DNA
gaaggcgacggaacagcagaaaaagacttgctggatgtggtggagaacgccctgaacagtgagaacgtccgcccg

SEQ ID NO: 33656 - DNA, 75 bp, synthetic construct
  source 1..75: mol_type = other DNA
ggtggtactgactgtccttagccgcgaaggcgacggaacagcagaaaaagacttgctggatgtggtggagaacgc

SEQ ID NO: 33657 - DNA, 75 bp, synthetic construct
  source 1..75: mol_type = other DNA
gggcagttgtccgggggcagacgcaaaagtttttgacgcttgcggcaaaaagttttgtggctggtacatctcccc

SEQ ID NO: 33658 - DNA, 75 bp, synthetic construct
  source 1..75: mol_type = other DNA
aaatcgacctctgggaagtcagtctggtgacgttcccgtctaacgacgaggcgcggatcagcgacgtcaagaacg

SEQ ID NO: 33659 - DNA, 75 bp, synthetic construct
  source 1..75: mol_type = other DNA
gtgaaagctgtttataattccgcaacagcaggctgggaagaatcaatcgcggtccaggggagcatcggtggattt

SEQ ID NO: 33660 - DNA, 75 bp, synthetic construct
  source 1..75: mol_type = other DNA
ggccattatggatatggatgtgaacgcgatgattaccgtgatcccccgcatctccagcccggcactgaccgcaca

SEQ ID NO: 33661 - DNA, 75 bp, synthetic construct
  source 1..75: mol_type = other DNA
ggaaatggctgaactggaccccgccgatctcaccgcgctgtcggtcgaggtggtgacttttttgttgaagaagtc

SEQ ID NO: 33662 - DNA, 75 bp, synthetic construct
  source 1..75: mol_type = other DNA
ccgtacaactggatacgcccatcatgcgcggtaaaacccaaatcaccgaaattgtgctgcgtaagccgcagtccg

SEQ ID NO: 33663 - DNA, 75 bp, synthetic construct
  source 1..75: mol_type = other DNA
atgcgtacacgaattgattatctggcgaataaatactcttttacagaacggaacgaatcgccacgtcttcgccgg

SEQ ID NO: 33664 - DNA, 75 bp, synthetic construct
  source 1..75: mol_type = other DNA
cgcagtttccaatcatcccatgcaatgagaactgcaacattgtaggcaaggttatcgccagtcaatggcctgaag

SEQ ID NO: 33665 - DNA, 75 bp, synthetic construct
  source 1..75: mol_type = other DNA
agatggtatgagccaccggtcagctttaccggtctggcaaaaagcctgcgtgctgccgtgcatcacagctccccg

SEQ ID NO: 33666 - DNA, 75 bp, synthetic construct
  source 1..75: mol_type = other DNA
atcggcagaaagacgcgctgttgcgcttgccgacttcacagacggatttgctcaagcactatacgctgagtgatg

SEQ ID NO: 33667 - DNA, 75 bp, synthetic construct
  source 1..75: mol_type = other DNA
gtatgcaaaagggctgacctgcaaagccgataccctcggcagtcgaggttacgtttatatggctgtttatccgac

SEQ ID NO: 33668 - DNA, 75 bp, synthetic construct
  source 1..75: mol_type = other DNA
tcgcccgtcggcaacggcagaaatgccctataatccacaggcttctggcgggagcaatctggcggtcagtaaccc

SEQ ID NO: 33669 - DNA, 75 bp, synthetic construct
  source 1..75: mol_type = other DNA
ggtgaaactccccggccttgaggcccgccgttcggcggatgaatggttatgtcgctacgacttgccgaaagtctg

SEQ ID NO: 33670 - DNA, 75 bp, synthetic construct
  source 1..75: mol_type = other DNA
acttatcggaagatgagttggagatgttgcgattgtatcgcgcacttccaaaatcagagcagcaagcacaaatca

SEQ ID NO: 33671 - DNA, 75 bp, synthetic construct
  source 1..75: mol_type = other DNA
acgttgcatcataacggactcacctgcgaggcggatactctcggctctcatggctacgtttacatcgttatttat

SEQ ID NO: 33672 - DNA, 75 bp, synthetic construct
  source 1..75: mol_type = other DNA
acaaaggtaccggtaaatggaccagccagagcgcactggatctcggcgaaccgctgtcgctgattaccgagtctg

SEQ ID NO: 33673 - DNA, 75 bp, synthetic construct
  source 1..75: mol_type = other DNA
atgaacggtataaaaacggggctggggatcacgccgggtgaacacattatcagtgctgattctgcgctcagcaga

SEQ ID NO: 33674 - DNA, 75 bp, synthetic construct
  source 1..75: mol_type = other DNA
tcggtatggcagtgatggggcgcaaccttgcgctcaatatcgaaagccgtggttataccgtctctattttcaacc

SEQ ID NO: 33675 - DNA, 75 bp, synthetic construct
  source 1..75: mol_type = other DNA
tcgccgcaacaccaaaagcggtaaaggcagcatatgaccttgctaacgggaaatacactgcacaggacgccacca

SEQ ID NO: 33676 - DNA, 75 bp, synthetic construct
  source 1..75: mol_type = other DNA
acagggaactgaacttaaacgggcagaaaatcagagacgctatcagcgcacacacagcagcggtgaaagaacaac

SEQ ID NO: 33677 - DNA, 75 bp, synthetic construct
  source 1..75: mol_type = other DNA
aaaggggcgctgtatgagcaatcttttacaaatggggacagacttcgagaagaaactgaaagagcgtgccgtctc

SEQ ID NO: 33678 - DNA, 75 bp, synthetic construct
  source 1..75: mol_type = other DNA
gggaggacgtgaaaaagtgatggcgagctttgagcgtgtactgatgcccggtctcgaaaaaaatcagtacagcat

SEQ ID NO: 33679 - DNA, 75 bp, synthetic construct
  source 1..75: mol_type = other DNA
tcgcgttctgtagaacttcatgaaaaagtcatcggtgcttttatcgaaaatatatgttctactaattggagtcat

SEQ ID NO: 33680 - DNA, 75 bp, synthetic construct
  source 1..75: mol_type = other DNA
ttcagcgagcacgagaagtctgtcagagcggaactgagcgaaagcgagaagagaatcagcgccgccatcctcgac

SEQ ID NO: 33681 - DNA, 75 bp, synthetic construct
  source 1..75: mol_type = other DNA
tgtcagaagtcgcagcgaaggatgagtttctgaatatcaagaacgtgagccgtgatgacatgatggcggcacacc

SEQ ID NO: 33682 - DNA, 75 bp, synthetic construct
  source 1..75: mol_type = other DNA
tggttatatcgggaaaaggttacaaaaggctgagggcataattgaagggatgttaatggcattagatatccggtt

SEQ ID NO: 33683 - DNA, 75 bp, synthetic construct
  source 1..75: mol_type = other DNA
tacgggaggcatcgagctgcccgtcccccgtcaccatctggcagactctgctctcccgactactgggccagcatt

SEQ ID NO: 33684 - DNA, 75 bp, synthetic construct
  source 1..75: mol_type = other DNA
atggcgtccttatggttcatcgcggatggggtaaagatactgatgcgtgatatccggcaggttcttgagcgctgg

SEQ ID NO: 33685 - DNA, 75 bp, synthetic construct
  source 1..75: mol_type = other DNA
atgcgtgatattcagatggttcttgagcgttggggggcatgggcggctaataatcatgaagatgtgacctggtcg

SEQ ID NO: 33686 - DNA, 75 bp, synthetic construct
  source 1..75: mol_type = other DNA
aaggctgagggtataattgaagggatgttaatggcattagatatccggttagagatggatatcgttgttaataac

SEQ ID NO: 33687 - DNA, 75 bp, synthetic construct
  source 1..75: mol_type = other DNA
agttcctttcaccgacgggtacacgaacgtattacggagcataatcacacggtcagcccatcagcgccggtggta

SEQ ID NO: 33688 - DNA, 75 bp, synthetic construct
  source 1..75: mol_type = other DNA
tggttgccacgggggccagctccatgtcatgggagtaccgttataccctcaacgtggtgattgaggatttcagcg

SEQ ID NO: 33689 - DNA, 75 bp, synthetic construct
  source 1..75: mol_type = other DNA
acctgatttcagtggcaacgcccgttgagctggaatttgaagacctgcctgaaaccgtgttcaccgccctgaccg

SEQ ID NO: 33690 - DNA, 75 bp, synthetic construct
  source 1..75: mol_type = other DNA
gcaggtaaacaaccgctggacaatacgctgactaatttgagtggaaaggatgtagctggtcttctcacatacctt

SEQ ID NO: 33691 - DNA, 75 bp, synthetic construct
  source 1..75: mol_type = other DNA
gcaggatttggcgggcaaatggcagagtggttgccaccggcgcagagtgccgatgcggccctgctgcccgcgttg

SEQ ID NO: 33692 - DNA, 75 bp, synthetic construct
  source 1..75: mol_type = other DNA
ggatttattgcaacagacctggaaggtgataagcgctggcggacaatgccaggttgaaaggtgttttcgggttgc

SEQ ID NO: 33693 - DNA, 75 bp, synthetic construct
  source 1..75: mol_type = other DNA
aatcagcaaaggtcgtctgattcgcgttaatcagaacggtaaatttcgttactgcatgccgggcggtaatttacc

SEQ ID NO: 33694 - DNA, 75 bp, synthetic construct
  source 1..75: mol_type = other DNA
tagcgagatatctctacatttctgtttccacattgcatcgccgtctggcaagcgagggagtaagttttcaaagta

SEQ ID NO: 33695 - DNA, 75 bp, synthetic construct
  source 1..75: mol_type = other DNA
cggaaaagttcgggtcgctgccagccagaccatttccgcgcatcttattccgcaatgcattgctgaaagccatcg

SEQ ID NO: 33696 - DNA, 75 bp, synthetic construct
  source 1..75: mol_type = other DNA
cagcgttttcggccccttcctctacggcgtaggcgtgctgctgcttaaaccttttggtctgcaccacatcctgct

SEQ ID NO: 33697 - DNA, 75 bp, synthetic construct
  source 1..75: mol_type = other DNA
ttcccagcggtaaaacagcaacaaccggcataagtggcggaaatctcgctgaacaggcagtaaccgccgctctgg

SEQ ID NO: 33698 - DNA, 75 bp, synthetic construct
  source 1..75: mol_type = other DNA
atgaggtcgccggggcgctgaatatcttctacgccgagctcaaagccggcctgccgtttagcccgcacgttaccg

SEQ ID NO: 33699 - DNA, 75 bp, synthetic construct
  source 1..75: mol_type = other DNA
agaacatcattttctcccctgaattcctccgagaaggcaaagctctttacgataaccttcatccttcccgtattg

SEQ ID NO: 33700 - DNA, 75 bp, synthetic construct
  source 1..75: mol_type = other DNA
aagaacaggtgatgaagttcttgaatttgcacgttgctatgctgaagcagctgctgaaaaagaactaaccagtta

SEQ ID NO: 33701 - DNA, 75 bp, synthetic construct
  source 1..75: mol_type = other DNA
tcatgtccagaagtgggagcgagtctgcgccgcgctgcgggagctgaacaagcactgggatattgtccataaagt

SEQ ID NO: 33702 - DNA, 75 bp, synthetic construct
  source 1..75: mol_type = other DNA
atggcgggactggagcgtgaagaattccgggtgctgtatctgaacaaccagaataagctgattgccggtgaaacc

SEQ ID NO: 33703 - DNA, 75 bp, synthetic construct
  source 1..75: mol_type = other DNA
gataattttcctgagctaataaatatatacaattcatgttttagtaaaaatatatttttatatgatattaatgat

SEQ ID NO: 33704 - DNA, 75 bp, synthetic construct
  source 1..75: mol_type = other DNA
ggcgagctgacgtcaacctgggatttaatgctgcaaacgcgcattaacctgagtcgttcagcggtacggatgatg

SEQ ID NO: 33705 - DNA, 75 bp, synthetic construct
  source 1..75: mol_type = other DNA
aagtacgtctgctggggataagcaaacgtggtgacacttatctcaggacattatttatccacggtgcaagagcgg

SEQ ID NO: 33706 - DNA, 75 bp, synthetic construct
  source 1..75: mol_type = other DNA
ccagcctctcacactggattaatctttttcttcttcacggtcctcgggcactggattgcagacacaagcgtagct

SEQ ID NO: 33707 - DNA, 75 bp, synthetic construct
  source 1..75: mol_type = other DNA
gtgtcagacgcactctccgggacaatgcttcccgacgacaatcacgaccgcccctggtgggggctgccctgcacc

SEQ ID NO: 33708 - DNA, 75 bp, synthetic construct
  source 1..75: mol_type = other DNA
cgcttcccgacgacaataacgaccgcacctggtggggactgccctgcaccgtgacgccctgttttggggcacgtc

SEQ ID NO: 33709 - DNA, 75 bp, synthetic construct
  source 1..75: mol_type = other DNA
agaggccggttcagagatgcggatgcgtaccacccggaccaggcctttccgctgctgatgaaacaactggaatta

SEQ ID NO: 33710 - DNA, 75 bp, synthetic construct
  source 1..75: mol_type = other DNA
atggctctgaaccttgattctcttggtttatctgcaaaggtaaccgcagaggggatcagtgcgcctgattatcag

SEQ ID NO: 33711 - DNA, 75 bp, synthetic construct
  source 1..75: mol_type = other DNA
ctctgttgcacgcacggttctgcgcgccgtccgtgactcggtggtctctgttgcccgcgcggtatggaactggat

SEQ ID NO: 33712 - DNA, 75 bp, synthetic construct
  source 1..75: mol_type = other DNA
ggctctgttgatcaaaccgttcagttgggccaggttcgtaccgctagtctgaagcagactggagcaaccagctct

SEQ ID NO: 33713 - DNA, 75 bp, synthetic construct
  source 1..75: mol_type = other DNA
tgccggtttttccccgaaacagacgaccactattaataaagattccgtcctgcaggctgcccggcaggcatacgc

SEQ ID NO: 33714 - DNA, 75 bp, synthetic construct
  source 1..75: mol_type = other DNA
gaagcgaatcggcaacctgcctgctgtgcgtgtgccgtacttcccggcgaatgccgtgttagtgaccacgctgga

SEQ ID NO: 33715 - DNA, 75 bp, synthetic construct
  source 1..75: mol_type = other DNA
tatgtgatcgaggcttacgcagccggttgcctgattgaaaacatcaaccttggtgacttcaccgcacctgccgca

SEQ ID NO: 33716 - DNA, 75 bp, synthetic construct
  source 1..75: mol_type = other DNA
agaggccgcttcagcgacgcagatgcataccatctggaccaggcctttccgctgctgatgaaacaactggaactc

SEQ ID NO: 33717 - DNA, 75 bp, synthetic construct
  source 1..75: mol_type = other DNA
caacaaatgaccagaacaccgatctacaacgtaatgcgttgaactgtgcaggatgcgagctgatttttgaagaca

SEQ ID NO: 33718 - DNA, 75 bp, synthetic construct
  source 1..75: mol_type = other DNA
ttgtctggaagctggacaggttggggcgcagtatgcggcatctcgttacgctgatagaagatctgcgccagcgtg

SEQ ID NO: 33719 - DNA, 75 bp, synthetic construct
  source 1..75: mol_type = other DNA
ctacgatgtggccctgtcaacgctgtataaaaaacaccccgccaaacgaacgcatatagaaaacgacgatcgaat

SEQ ID NO: 33720 - DNA, 75 bp, synthetic construct
  source 1..75: mol_type = other DNA
gcaacaccacgccgctgtttgtggcgcaggggaatcagctgttcatgaacgacgtgttcctgaagcgactgtttg

SEQ ID NO: 33721 - DNA, 75 bp, synthetic construct
  source 1..75: mol_type = other DNA
actgattgttgaacgaacaaaagctggactggaagcagctcgcgcacagggacgaattggtggacgtcgccccaa

SEQ ID NO: 33722 - DNA, 75 bp, synthetic construct
  source 1..75: mol_type = other DNA
ccgcgtaaaccgtcagtgcgtggcagaacgtcctgaccagctgtgggtggctgattttacttacgtcagcacatg

SEQ ID NO: 33723 - DNA, 75 bp, synthetic construct
  source 1..75: mol_type = other DNA
atgaaaatcacccctgaacaggtttgtgaggctctggatgcctgggtatgccgaccaggaatgacacaggagcag

SEQ ID NO: 33724 - DNA, 75 bp, synthetic construct
  source 1..75: mol_type = other DNA
atgaaatcgcacctgatgaacaaaaaaaccatggcgcaaagctgccgggtaagtgctacagcattcgacaagtgg

SEQ ID NO: 33725 - DNA, 75 bp, synthetic construct
  source 1..75: mol_type = other DNA
gaaggtggcgcggttgatcagcgagcgcttggcgttaatcgagtgaagatattcgaacgctggaaggctatcgac

SEQ ID NO: 33726 - DNA, 75 bp, synthetic construct
  source 1..75: mol_type = other DNA
ggtaacgactggcagacgctggagctggtgttcaccgccggcagtgccacggttactccgaaactgaatggagtg

SEQ ID NO: 33727 - DNA, 75 bp, synthetic construct
  source 1..75: mol_type = other DNA
atggcatttaaacactatgatgttgtcagggcggcgtcgccatcagatcttgcggaaaagctgacacataaactg

SEQ ID NO: 33728 - DNA, 75 bp, synthetic construct
  source 1..75: mol_type = other DNA
gattattgggagaatggtacagttccctggattagttctggagcagtaaatcaaggttatatagtcgagccatcc

SEQ ID NO: 33729 - DNA, 75 bp, synthetic construct
  source 1..75: mol_type = other DNA
tccttggctcacgcgccgcacgcaaagtaatcagcaagtgaagccccctaaattacccagaaagaaggctgatcc

SEQ ID NO: 33730 - DNA, 75 bp, synthetic construct
  source 1..75: mol_type = other DNA
actgagaaaccggaaaccgcaatgaaagccattacccgcaaccttgaccgtgaaatctggcgtgacctgatgcaa

SEQ ID NO: 33731 - DNA, 75 bp, synthetic construct
  source 1..75: mol_type = other DNA
caatgagaaggccaaaaaactggagcagtcctcagaagcaaagccggttgcggcatcactgccgcgcctggctga

SEQ ID NO: 33732 - DNA, 75 bp, synthetic construct
  source 1..75: mol_type = other DNA
ttaaaaggaaccgcatggcaggtgatccgcccgatattctgattcaacctgtttgcccgcaaatatctacgcttg

SEQ ID NO: 33733 - DNA, 75 bp, synthetic construct
  source 1..75: mol_type = other DNA
tgctgcgtcgcttccacgaggcgacggcacagaatgcgccggacgtggtggtgtggggcagcggtacaccgatgc

SEQ ID NO: 33734 - DNA, 75 bp, synthetic construct
  source 1..75: mol_type = other DNA
aagagtgctatgaagacgagatgttcagcattaaatactttaagaaaggctcagcacacatcacgttcaggaaac

SEQ ID NO: 33735 - DNA, 75 bp, synthetic construct
  source 1..75: mol_type = other DNA
gccacgcaggggcatcatattcaggaaaattcgacgtcttttttcagaaatggcggcaggccgtccggggtgatt

SEQ ID NO: 33736 - DNA, 75 bp, synthetic construct
  source 1..75: mol_type = other DNA
tgatgcgctcaggaaagaatcatcgctcagtgcattcacatttgatggtccttatcgcctgaccgggcatgacct

SEQ ID NO: 33737 - DNA, 75 bp, synthetic construct
  source 1..75: mol_type = other DNA
ctgcacacatcactttcaaaaggctggagctgattgacagaattaacgatataatagccaggcactttccttctg

SEQ ID NO: 33738 - DNA, 75 bp, synthetic construct
  source 1..75: mol_type = other DNA
ggagtgatcaacgtcttcagagggctgagctggaattacaaaaccaactccccctgtaaatttggcagtaaaatt

SEQ ID NO: 33739 - DNA, 75 bp, synthetic construct
  source 1..75: mol_type = other DNA
ccggaaatcagcgaagcgaatatcatgagcacgtttgaacaactgcatcagagcaaggatgaggtgtttgagcga

SEQ ID NO: 33740 - DNA, 75 bp, synthetic construct
  source 1..75: mol_type = other DNA
gaagaggtttatgacctggctgtactggcgctgaatttatcaaatatcgcaaacctgaagcgatacgagcttgat

SEQ ID NO: 33741 - DNA, 75 bp, synthetic construct
  source 1..75: mol_type = other DNA
gaacatattgaccaccaggagtaccgcaaaattctggcagaaacagagcaggaagctcatctgaaaaaattacga

SEQ ID NO: 33742 - DNA, 75 bp, synthetic construct
  source 1..75: mol_type = other DNA
tcctgctgatcgcaggatttgccattcttcgccttttgttcagagcattaaccagcacggcgtctgcgctggcag

SEQ ID NO: 33743 - DNA, 75 bp, synthetic construct
  source 1..75: mol_type = other DNA
atgtcatcaatccgcttaactacgagaatgaaagaggaaatcgctcgtaacgctttaattaagtctggggttttc

SEQ ID NO: 33744 - DNA, 75 bp, synthetic construct
  source 1..75: mol_type = other DNA
atgaatacagaaaattcacaggcattaattcttaaatctgtaaaagaactggcagctattagcgaggaatcagtt

SEQ ID NO: 33745 - DNA, 75 bp, synthetic construct
  source 1..75: mol_type = other DNA
cttttatcagaaatgtgcgtctgggaggcagacgttctgacacattatatcgcggaggactttgcgaaccaggta

SEQ ID NO: 33746 - DNA, 75 bp, synthetic construct
  source 1..75: mol_type = other DNA
catttcagcgcggcagcccgtcgggggattatttctgacaggtttgtagaagcaattttgcagttttggcgcgaa

SEQ ID NO: 33747 - DNA, 75 bp, synthetic construct
  source 1..75: mol_type = other DNA
agcctatcagtatcatggtcgcagtgccgacgggcgtgtcgcggatatctctgtcaccagtccgtctccggcctg

SEQ ID NO: 33748 - DNA, 75 bp, synthetic construct
  source 1..75: mol_type = other DNA
gcgcagagcggtactgaaccggtattacagaggtttaagtattgcggagattacagaagagacggggcagaatga

SEQ ID NO: 33749 - DNA, 75 bp, synthetic construct
  source 1..75: mol_type = other DNA
tacccgcaccggatgtggtcgaggagctggactttgaaaccattctcgctgaacgcaaggcgacactgatttccc

SEQ ID NO: 33750 - DNA, 75 bp, synthetic construct
  source 1..75: mol_type = other DNA
ggtgttttctgctgcgttaatccgccgtgcactgattgttgcagctgtctgtctggctgttgcgatggggcttta

SEQ ID NO: 33751 - DNA, 75 bp, synthetic construct
  source 1..75: mol_type = other DNA
ccccgtgtatgttattaggcgtccataccggattacacgatcagatttctgttcaggatattggcatcgacaacc

SEQ ID NO: 33752 - DNA, 75 bp, synthetic construct
  source 1..75: mol_type = other DNA
gggaatacaccctgacggtcagggcgataaacagctacggccagcagggcgaacctgccaccaccacgttccgga

SEQ ID NO: 33753 - DNA, 75 bp, synthetic construct
  source 1..75: mol_type = other DNA
agtgggaagaaaatatctatcaactggagacatcagatccggttctgggtggtgctgacgggatatcaaatcgag

SEQ ID NO: 33754 - DNA, 75 bp, synthetic construct
  source 1..75: mol_type = other DNA
aagaatttgctgccgcgccggtattaaccccgcagcaggagagccactacttgcaggcctatttaccgttggtgc

SEQ ID NO: 33755 - DNA, 75 bp, synthetic construct
  source 1..75: mol_type = other DNA
accgccagcaggctggttacagtgcaacggagctacgttcaccaaagaacaatatcctgttctggccagagtcta

SEQ ID NO: 33756 - DNA, 75 bp, synthetic construct
  source 1..75: mol_type = other DNA
acaacaaaataatgatacctcgcttggtacgaatttaagctggagaactcccatcgccataatagatggcagcta

SEQ ID NO: 33757 - DNA, 75 bp, synthetic construct
  source 1..75: mol_type = other DNA
aaaccgtgatgaattaattgatacaactcaggcaaggccaattcagtattgcattaatgggacgtggtataacgc

SEQ ID NO: 33758 - DNA, 75 bp, synthetic construct
  source 1..75: mol_type = other DNA
tgcaggaaatcgatctgtttttctccagtgaaaatgcgttgtcgaccttttttgccaagccgctttggcttcggt

SEQ ID NO: 33759 - DNA, 75 bp, synthetic construct
  source 1..75: mol_type = other DNA
agtgcaggatattcccggtgtgctggccgtgtttgctgaatgccgtaaggacagttttggcccgtatgtccgact

SEQ ID NO: 33760 - DNA, 75 bp, synthetic construct
  source 1..75: mol_type = other DNA
atgcccgcctgcgggcactgttgcagacgcaacaggacaccatccgccagatggccgaatataaccgcctgctct

SEQ ID NO: 33761 - DNA, 75 bp, synthetic construct
  source 1..75: mol_type = other DNA
gcggataataatgctgcggaaagagcgcttcgtgcagtctgtctcggaaagaaaaactttatgttctttggcagc

SEQ ID NO: 33762 - DNA, 75 bp, synthetic construct
  source 1..75: mol_type = other DNA
ctggccgtgtttgctgaacgccgtaaggacagttttggcccgtatgtccggctgatgagcgtcactctgaactga

SEQ ID NO: 33763 - DNA, 75 bp, synthetic construct
  source 1..75: mol_type = other DNA
caggatattcaggaaatggccgaaacctttgacccgcgagtctatggttgccgcattaacctggaacatctgcgc

SEQ ID NO: 33764 - DNA, 75 bp, synthetic construct
  source 1..75: mol_type = other DNA
gaatttaaaacatctgaaatttcagaacgctataatgttgatttgcatatcatatcaaaatatgggcattcttat

SEQ ID NO: 33765 - DNA, 75 bp, synthetic construct
  source 1..75: mol_type = other DNA
gcgcgaaatcgtttgacctgacctcgacggcgtttttaatcgttgcctttctcaccggtattgcgggcgctctgc

SEQ ID NO: 33766 - DNA, 75 bp, synthetic construct
  source 1..75: mol_type = other DNA
acgccagctacctctggcaaaatgatgaaaaacactttactcaaaaaaatatcaatggcgcactttccttcatgt

SEQ ID NO: 33767 - DNA, 75 bp, synthetic construct
  source 1..75: mol_type = other DNA
aagttgaaaacgcctttatggcctgggttggtggtgcgaacgaggcaagcggagtgacgaagacgctctccggtg

SEQ ID NO: 33768 - DNA, 75 bp, synthetic construct
  source 1..75: mol_type = other DNA
ctatgcggatgccattcgttataatgctcgaacgcctctgcaaggttctttgctgccgttaacccgtctggtttg

SEQ ID NO: 33769 - DNA, 75 bp, synthetic construct
  source 1..75: mol_type = other DNA
aactgattaacatggtctgcgataacggctactcccttcgtgttgttgatgaatctgaccagacctcagcagaat

SEQ ID NO: 33770 - DNA, 75 bp, synthetic construct
  source 1..75: mol_type = other DNA
gagtattactttgttgtggttctggcagggcagtcaaatggcatgtcgtatggtgaaggtcttccgctgccggag

SEQ ID NO: 33771 - DNA, 75 bp, synthetic construct
  source 1..75: mol_type = other DNA
gggctgtactataaccgtcaccggtactacgatccgttgcaggggcggtatatcaccccggacccgattgggttg

SEQ ID NO: 33772 - DNA, 75 bp, synthetic construct
  source 1..75: mol_type = other DNA
atgattaacctgtcacttaccgaccttaaccgcatccagtttcgtgagaaattcaccgggcagttgctagtcaat

SEQ ID NO: 33773 - DNA, 75 bp, synthetic construct
  source 1..75: mol_type = other DNA
tttaaagctgttgccacgaattttcctgtcgttaatgacctgcccgctgaaggtgagatcgattttacctggagt

SEQ ID NO: 33774 - DNA, 75 bp, synthetic construct
  source 1..75: mol_type = other DNA
ctcctccggcagaagcagaaaaagcttattatgcttccatcggaaacgatgatctggcagcctgagttcacagat

SEQ ID NO: 33775 - DNA, 75 bp, synthetic construct
  source 1..75: mol_type = other DNA
ggaaaaactggctgttcgcgggttccgacagcggtggcgaacatgcggcggtgttgtactcgctgatcggcacat

SEQ ID NO: 33776 - DNA, 75 bp, synthetic construct
  source 1..75: mol_type = other DNA
cctggtggggaaatctgcttttgtggaagccagtggccgggccagcaatgatgcagaagggtatctggggctgtt

SEQ ID NO: 33777 - DNA, 75 bp, synthetic construct
  source 1..75: mol_type = other DNA
ttctgggaaaactgtccgcgaaccagattgaaggcgatctcgttaaaacagtgggcaaagctttcccccgggact

SEQ ID NO: 33778 - DNA, 75 bp, synthetic construct
  source 1..75: mol_type = other DNA
aggttgatacaaataataacctgaacagcatgtgggctgtgaagctgcagcagatgcaggacggacgcctttata

SEQ ID NO: 33779 - DNA, 75 bp, synthetic construct
  source 1..75: mol_type = other DNA
acacgccagttgaggcaaaggacaatcttaagtccacgcagatgatgagcgtgattgatgcgattggagagggac

SEQ ID NO: 33780 - DNA, 75 bp, synthetic construct
  source 1..75: mol_type = other DNA
atctggcgcaggctaaatgggacacgccgcgggtggtgaagggcgtgcgcttcagtctgcgcctgaccagtggta

SEQ ID NO: 33781 - DNA, 75 bp, synthetic construct
  source 1..75: mol_type = other DNA
tctcaaatccacgcagatgatgagtgtgattgatgcgattggtgagggaccgatagaaggcccggtgaaaggcct

SEQ ID NO: 33782 - DNA, 75 bp, synthetic construct
  source 1..75: mol_type = other DNA
cggtgtatgacccgacggtacagtatgaattctggttctcagaaaaacgcatcacggacacggcacaggtggaaa

SEQ ID NO: 33783 - DNA, 75 bp, synthetic construct
  source 1..75: mol_type = other DNA
acctgaacagcatgtgggcggtgaagctacagcagatgcaggatggtcgtcgctatattgccggtatcggtgccg

SEQ ID NO: 33784 - DNA, 75 bp, synthetic construct
  source 1..75: mol_type = other DNA
ggtggggacgggatactggttactgcagctgctggacaaagtctctccgtcccagtgggtggcaataggtgtgct

SEQ ID NO: 33785 - DNA, 75 bp, synthetic construct
  source 1..75: mol_type = other DNA
ctgcaatcggtgtgctgggtagcctggtttttggcctgctgacgtatctgacaaatctttatttcaagattaaag

SEQ ID NO: 33786 - DNA, 75 bp, synthetic construct
  source 1..75: mol_type = other DNA
tgatggcgaaaactgggtactgttcaatgctatgaacggtaaccgcgctgaaatgagcccggaagccgccggcat

SEQ ID NO: 33787 - DNA, 75 bp, synthetic construct
  source 1..75: mol_type = other DNA
ccgcaaggttcacactgatgacacaccggtaaaggtactggcaccgggtcagaaaaaggcgaaaacagggcgtat

SEQ ID NO: 33788 - DNA, 75 bp, synthetic construct
  source 1..75: mol_type = other DNA
ggagtgtggcggtgagctggattatctgggggaagtcagtgcagaacaactggaactggtgagcagcgccctgaa

SEQ ID NO: 33789 - DNA, 75 bp, synthetic construct
  source 1..75: mol_type = other DNA
ccgttatggtaccggcgcaatggtgttgtgctggcactgcgacaaccagctgcgtgaccagacatccgaatcact

SEQ ID NO: 33790 - DNA, 75 bp, synthetic construct
  source 1..75: mol_type = other DNA
ccactgacggacacggacggcaatcccgtgatacacggtgtgaccgcggtctggcgcgccggggagcaggagcag

SEQ ID NO: 33791 - DNA, 75 bp, synthetic construct
  source 1..75: mol_type = other DNA
ataataatctgaacagcatgtgggctgtgaagctgcagcagatgcaggacggacgcctttatattgcgggtatcg

SEQ ID NO: 33792 - DNA, 75 bp, synthetic construct
  source 1..75: mol_type = other DNA
gtgctggcactgcgacaaccagctgcgtgaccagacatccgaatcactcgggcaacttgctcatcaaaacctgtc

SEQ ID NO: 33793 - DNA, 75 bp, synthetic construct
  source 1..75: mol_type = other DNA
gggaattatcgctggctgaattatcctggtgggctgtctgcaatcaggtggcggacgcgctaccggaggcagtat

SEQ ID NO: 33794 - DNA, 75 bp, synthetic construct
  source 1..75: mol_type = other DNA
gggaattatcgctggctgaattatcctggtgggcagtctgcaatcaggtggtggacgcattacctgaggcagtat

SEQ ID NO: 33795 - DNA, 75 bp, synthetic construct
  source 1..75: mol_type = other DNA
tataaccaaattcagtgtttagttagaaaaggattattgagtaaagtcagaaaatcaggcgcgtatcaatatgta

SEQ ID NO: 33796 - DNA, 75 bp, synthetic construct
  source 1..75: mol_type = other DNA
gatttacagtcattacctgcagactgagcacaaagggtttgtgaagctggctgaagaactggctgctgaccgctg

SEQ ID NO: 33797 - DNA, 75 bp, synthetic construct
  source 1..75: mol_type = other DNA
ccgaagtccgtcaacgggcagttcgtatggttctggaaagtcaggacgaatatgactcacaaagggcggcaattt

SEQ ID NO: 33798 - DNA, 75 bp, synthetic construct
  source 1..75: mol_type = other DNA
tttatggggttaggatgaagctcctttttgccgaacgcccgctggttataaacacacaactggctatgaaaattg

SEQ ID NO: 33799 - DNA, 75 bp, synthetic construct
  source 1..75: mol_type = other DNA
aaaccagcttacgctgtccattaaagccattatcgctgcgaatgccttttcccggaaaaataacctgaaagaaat

SEQ ID NO: 33800 - DNA, 75 bp, synthetic construct
  source 1..75: mol_type = other DNA
cagaaagctggcagaagtctccagggagatcatcgtggcgagtgcgcaggaaattgcatggacgccggggagcag

SEQ ID NO: 33801 - DNA, 75 bp, synthetic construct
  source 1..75: mol_type = other DNA
gccaggcagcgatgatctgaacgggattaacgtgaaataccgttatgagtttacggacacgctggggctggtgac

SEQ ID NO: 33802 - DNA, 75 bp, synthetic construct
  source 1..75: mol_type = other DNA
cccgaccgaatccgtggccattgatgtcgcttatgaaggctccggcagtggtgactggcgcactgacggtttcat

SEQ ID NO: 33803 - DNA, 75 bp, synthetic construct
  source 1..75: mol_type = other DNA
ggtatcttcatgtctcgacgaacgttcctggcagcgatgaactgaacgggattaacgtgaaataccgttatgagt

SEQ ID NO: 33804 - DNA, 75 bp, synthetic construct
  source 1..75: mol_type = other DNA
gagatcatcgtggcgagtgcgcaggaaattgcatggacgccggggagcagtcgtattgatggccaccaggcggag

SEQ ID NO: 33805 - DNA, 75 bp, synthetic construct
  source 1..75: mol_type = other DNA
aattgtgagaaacggaaaaaaacttgaagccggaaattattttgccgtgctgggattccgggtcgattatgagtg

SEQ ID NO: 33806 - DNA, 75 bp, synthetic construct
  source 1..75: mol_type = other DNA
accagttccggcatggaacacgatggtgttcgctggatttataacacaacggatcaatggctggaacagtttccg

SEQ ID NO: 33807 - DNA, 75 bp, synthetic construct
  source 1..75: mol_type = other DNA
agaaagctgttgcccggagtgtggcggtgagctggattatctgggggaagtcagtgcagaacaactggaactggt

SEQ ID NO: 33808 - DNA, 75 bp, synthetic construct
  source 1..75: mol_type = other DNA
gatgcatacgccgggttcaacgagctgtaccgggatggccggataacggaagccgcctgttgggctcacgcccgc

SEQ ID NO: 33809 - DNA, 75 bp, synthetic construct
  source 1..75: mol_type = other DNA
cgcctgtcccggtgctgttgccaggcaataagaaaacgaagaccgggcggttatggacctacgttcgtgacgacc

SEQ ID NO: 33810 - DNA, 75 bp, synthetic construct
  source 1..75: mol_type = other DNA
catccgcagacccatcttgcggggttcagtggtgtactgcaggcggatgcatacgccgggttcaacgagctgtac

SEQ ID NO: 33811 - DNA, 75 bp, synthetic construct
  source 1..75: mol_type = other DNA
tgcattatgtacttgatgtcatcgccgactggcctgtgaaccgggtgggtgctctgctcccgtggcgggttactc

SEQ ID NO: 33812 - DNA, 75 bp, synthetic construct
  source 1..75: mol_type = other DNA
cctgcccttcctgtggtaaacatattgttatcaggccgaaaggttatttctgtaccggatgtgaatttaaaatct

SEQ ID NO: 33813 - DNA, 75 bp, synthetic construct
  source 1..75: mol_type = other DNA
aatactttaatctgaccctcaaaggtctggggtatctcagtaatgtacgtcaggtgaatcaccagaacggctcgt

SEQ ID NO: 33814 - DNA, 75 bp, synthetic construct
  source 1..75: mol_type = other DNA
tgatatgactaatttttacacgattaattacgagagcgagcttttagatggtggcaaagtgagcgaatccatcag

SEQ ID NO: 33815 - DNA, 75 bp, synthetic construct
  source 1..75: mol_type = other DNA
gccggaaatattgacgaagtgcagttgttaaccatcgccacgaaactggcaatcgcaggagtccaggaagcgcgc

SEQ ID NO: 33816 - DNA, 75 bp, synthetic construct
  source 1..75: mol_type = other DNA
ttgctgataaccgggtatgtcaggtactcacctgccttcctgaaaaatttgtggttgattttgcaaacggtattg

SEQ ID NO: 33817 - DNA, 75 bp, synthetic construct
  source 1..75: mol_type = other DNA
agcagcatccggtgatctggtcaaccacgcaggctgcagaacacttaccggttcgcatgcctcgcctctgctctg

SEQ ID NO: 33818 - DNA, 75 bp, synthetic construct
  source 1..75: mol_type = other DNA
tttgccggaggggccggattcaaaggttcacgagaaaattaccagaacggtaagaactatgcgcatgaaggcctg

SEQ ID NO: 33819 - DNA, 75 bp, synthetic construct
  source 1..75: mol_type = other DNA
acgcaccaaaagcgcgccgcgaatttatggatgcggtagctaaacgattaaatacctttggtatcaccgcgaata

SEQ ID NO: 33820 - DNA, 75 bp, synthetic construct
  source 1..75: mol_type = other DNA
atataggcacaaaagatccagtcactgggctaaacacttttatttatgataatgtgggtgaggcaaatatcagag

SEQ ID NO: 33821 - DNA, 75 bp, synthetic construct
  source 1..75: mol_type = other DNA
caaatcgccggtaacagttttgacggtaaactggccgagcccagaaaacgcatagtagccagaagccagaaactt

SEQ ID NO: 33822 - DNA, 75 bp, synthetic construct
  source 1..75: mol_type = other DNA
ggctatcgagacgatgcggaacgcatcgctgatgagcagtccgaacttgttaagaagatggtgtttgatacgctg

SEQ ID NO: 33823 - DNA, 75 bp, synthetic construct
  source 1..75: mol_type = other DNA
ttatccgcagcatggttatgcgtaccaagcacgctgttaccgaagcatctccaatggttaaagcgaaagacgagc

SEQ ID NO: 33824 - DNA, 75 bp, synthetic construct
  source 1..75: mol_type = other DNA
acatggactttgttgcttcccgtccatgctgtgggtgtggagctgcgggagctggcgctcacattacgccttata

SEQ ID NO: 33825 - DNA, 75 bp, synthetic construct
  source 1..75: mol_type = other DNA
cgggcatatgacggtctgagtgttgctggcccgtcaggtgcatacgagtattttgcacgcagcgccagcggtctg

SEQ ID NO: 33826 - DNA, 75 bp, synthetic construct
  source 1..75: mol_type = other DNA
acccgggaggaggcccggcatctggaagcgttcctggcagagcacgggggctggaaggcatttttgtggaagcca

SEQ ID NO: 33827 - DNA, 75 bp, synthetic construct
  source 1..75: mol_type = other DNA
ggatggtttatccacggtatgcgctgaggcttatcaggttgtaggagttatggcagatgcgcttggtgtattcgg

SEQ ID NO: 33828 - DNA, 75 bp, synthetic construct
  source 1..75: mol_type = other DNA
ggcggaaaaaattctgtctggcagtacgcaagaagagattaccgagaaatatacggcaatcgcagaccttggtaa

SEQ ID NO: 33829 - DNA, 75 bp, synthetic construct
  source 1..75: mol_type = other DNA
atgggcaaagaatataaaacactcatcaacaaagcacttgagcgtttttattttcgcttaagtgcatcaggctct

SEQ ID NO: 33830 - DNA, 75 bp, synthetic construct
  source 1..75: mol_type = other DNA
gtcagcccggaaaacatcaatacaaaaatgcctgtcaggagcatacgtgtttgccgaatctgctcgagcgtcagt

SEQ ID NO: 33831 - DNA, 75 bp, synthetic construct
  source 1..75: mol_type = other DNA
ttctggccacgcttccggcggatgtatttttcgtgcgtcagtaccgggatatttacgcggggatttgcagacagg

SEQ ID NO: 33832 - DNA, 75 bp, synthetic construct
  source 1..75: mol_type = other DNA
accggaaatcaaaccctcgcccggcggcgacacgccatcggggccgtctgaagatgcatccgtacgcacaatctc

SEQ ID NO: 33833 - DNA, 75 bp, synthetic construct
  source 1..75: mol_type = other DNA
gaaatggcgattaaactttccgtggtgatcggcagttcgccgcaaatgtggctgaatctgcaaaacgcctggagt

SEQ ID NO: 33834 - DNA, 75 bp, synthetic construct
  source 1..75: mol_type = other DNA
gcggagatattacgtatatctgggcaggaaatcgctggtgctatctggcggtcgtcatggatctttttgcccgca

SEQ ID NO: 33835 - DNA, 75 bp, synthetic construct
  source 1..75: mol_type = other DNA
ttattcatcatgccttcaacgctaacattttagataaagattacgccttctctgacggcgagatcctgatggtag

SEQ ID NO: 33836 - DNA, 75 bp, synthetic construct
  source 1..75: mol_type = other DNA
atggcgaaaacaaaacaggaatggctgtatcagttacggcgatgttcatcagtcaatacgctggaaaaaattatt

SEQ ID NO: 33837 - DNA, 75 bp, synthetic construct
  source 1..75: mol_type = other DNA
agtacgctgattggcgacagttacagttacttctatggctcaagtaaatcagccagccagatcatccgccagaat

SEQ ID NO: 33838 - DNA, 75 bp, synthetic construct
  source 1..75: mol_type = other DNA
tagcgtcaggcctcaccattataacggagggctgacgccggaagagtcagagaacagataccatttttactgtaa

SEQ ID NO: 33839 - DNA, 75 bp, synthetic construct
  source 1..75: mol_type = other DNA
gtgcccgagccagatagggtatggtgcggagatattacgtatatctgggcaggaaatcgctggtgctatctggcg

SEQ ID NO: 33840 - DNA, 75 bp, synthetic construct
  source 1..75: mol_type = other DNA
aggctgatgcctacgccgggttcaacgagctctaccgcgacggccatataaaggaagccacgtgctgggcccatg

SEQ ID NO: 33841 - DNA, 75 bp, synthetic construct
  source 1..75: mol_type = other DNA
ttcgaactggaattgaatgccctggttcgccgccatttcccgcattggggtgcgcgcgatttactgggagataaa

SEQ ID NO: 33842 - DNA, 75 bp, synthetic construct
  source 1..75: mol_type = other DNA
cggtagcaacggcagcattttcattaccttctttggtttatgccgcacaacaaaacattcttagcgtgcacattt

SEQ ID NO: 33843 - DNA, 75 bp, synthetic construct
  source 1..75: mol_type = other DNA
ccgaagttatcgttccgggtattgatctgagccgtaagatgaaaccgaccgcgttcaaacgtgaggttctggctt

SEQ ID NO: 33844 - DNA, 75 bp, synthetic construct
  source 1..75: mol_type = other DNA
gtattcgctacaaatatacgcccgttccgccactggaagacatggagctttaccagtcgtttactgatgaattct

SEQ ID NO: 33845 - DNA, 75 bp, synthetic construct
  source 1..75: mol_type = other DNA
tcaggtcgttgattaccgcgttgtgaagatgccggttgtcaaaggtggaaagctggaactgaccatcactgaaca

SEQ ID NO: 33846 - DNA, 75 bp, synthetic construct
  source 1..75: mol_type = other DNA
gagggatcgtcagattgtcaccgatgcgctggaacgtgtcgatatggtggattttcgccatcgacaaatcggcga

SEQ ID NO: 33847 - DNA, 75 bp, synthetic construct
  source 1..75: mol_type = other DNA
tgcgtttgagcaactccgtcggaaaagaaaccgccgtaaacccgtgccctatgaactcattccgggttcgctggc

SEQ ID NO: 33848 - DNA, 75 bp, synthetic construct
  source 1..75: mol_type = other DNA
ggcgtcgctgtttttccggctgatacgtaaagcctgtcgtcagcgtcttgaggggcgggaactatgtcaaagctg

SEQ ID NO: 33849 - DNA, 75 bp, synthetic construct
  source 1..75: mol_type = other DNA
tttatggcatctggtcacctattgcagagggcaagatctgcactcatgccgtgaagtggaaaatggttcgtaagg

SEQ ID NO: 33850 - DNA, 75 bp, synthetic construct
  source 1..75: mol_type = other DNA
cggcaggcccaacccgacctggacaaatgcgacggtaagacaaagcagcgattatctggtcggtatgtttgctgc

SEQ ID NO: 33851 - DNA, 75 bp, synthetic construct
  source 1..75: mol_type = other DNA
gcgacagccagctatctgcatcttttcgttttatggcaagccatgtagggctggacggcctgctgattctgcctg

SEQ ID NO: 33852 - DNA, 75 bp, synthetic construct
  source 1..75: mol_type = other DNA
cgcagagtttaaacgcgaatccgctcaactggtcgttgaccagaaatacaccgtggcagatgcagccagcgctat

SEQ ID NO: 33853 - DNA, 75 bp, synthetic construct
  source 1..75: mol_type = other DNA
aaaaatggtcaggccgttggcaccaacaccattggttcttccgaggcctgtatgctcggcgggatggcgatgaaa

SEQ ID NO: 33854 - DNA, 75 bp, synthetic construct
  source 1..75: mol_type = other DNA
tacaccctgtacgacctctctgaacgtctgcgtctgcgcggctggcaggttccggccttcactctcggcggtgaa

SEQ ID NO: 33855 - DNA, 75 bp, synthetic construct
  source 1..75: mol_type = other DNA
aactggatcgacaaagaagaatatccgcaatccgcagccatcgacctgcgttgcgtaaatatggttgccgatctg

SEQ ID NO: 33856 - DNA, 75 bp, synthetic construct
  source 1..75: mol_type = other DNA
gctacatattctcggtactaagatttatttttctgacacaaaatgaccatttggcgttacataatcccaaaaaaa

SEQ ID NO: 33857 - DNA, 75 bp, synthetic construct
  source 1..75: mol_type = other DNA
catcaagtctacttaccatattgggcgttattgctgctgtatgggcccttattacgccaaacgctcgactacgtt

SEQ ID NO: 33858 - DNA, 75 bp, synthetic construct
  source 1..75: mol_type = other DNA
atctgtggcatgcgcctgcaccgaaaaatggtcaggccgttggcaccaacaccattggctcttccgaggcctgta

SEQ ID NO: 33859 - DNA, 75 bp, synthetic construct
  source 1..75: mol_type = other DNA
ctaagtacaaatctggtgttactaccgtaaaagactcggtacgactggatccgtgggtgtttatgttctccgcag

SEQ ID NO: 33860 - DNA, 75 bp, synthetic construct
  source 1..75: mol_type = other DNA
cggacatggttcaaagcaaacttcaggtaatacaaatactatggaagttgctaaatatgtattatctgatggtgc

SEQ ID NO: 33861 - DNA, 75 bp, synthetic construct
  source 1..75: mol_type = other DNA
atggccgcattaccatacatgcaactgtacatagctgattacctggctgacaccatgcatttgtccgcagaggag

SEQ ID NO: 33862 - DNA, 75 bp, synthetic construct
  source 1..75: mol_type = other DNA
cctctccggcacaaccgcagatgcgggcaactcgattttcaccaataccgcgtcgttttcacctgcacagggcgt

SEQ ID NO: 33863 - DNA, 75 bp, synthetic construct
  source 1..75: mol_type = other DNA
attgttgtcttattcgcggtcatgttcatcatgacgtttaccgttaccagcatcaacgcacgcacaaaggaaaat

SEQ ID NO: 33864 - DNA, 75 bp, synthetic construct
  source 1..75: mol_type = other DNA
tggcgaggtggtgacgtcgttggttatcgcgcgtccacacaatgacatcaacaagattgtctcgcactacaaaat

SEQ ID NO: 33865 - DNA, 75 bp, synthetic construct
  source 1..75: mol_type = other DNA
gcgtattggtacatcaccatcgatccgcgcagcggtaaaactgttgttgttgacgatggtgcgaaaaagcgagct

SEQ ID NO: 33866 - DNA, 75 bp, synthetic construct
  source 1..75: mol_type = other DNA
tatggaaggtgcggaaggcaatgtgtttgtgttacgcaagacttatcagaacgagcaggcagcaagacgcgcagc

SEQ ID NO: 33867 - DNA, 75 bp, synthetic construct
  source 1..75: mol_type = other DNA
atgcagtatgcgaaacctgtcactctgaacgttgaagagtgcgaccgtctgtcttttctgccttacctgtttggc

SEQ ID NO: 33868 - DNA, 75 bp, synthetic construct
  source 1..75: mol_type = other DNA
gatgccggaatatcagggcggcttctggcacttcatccgcctgccggacggtggcggttacatgatgccggatgg

SEQ ID NO: 33869 - DNA, 75 bp, synthetic construct
  source 1..75: mol_type = other DNA
gtcaccgcgggtggtactctgggaaatcgacctgacggtgcagggtggtgagcggtattttttctgcaatgagct

SEQ ID NO: 33870 - DNA, 75 bp, synthetic construct
  source 1..75: mol_type = other DNA
tgaacgagtcggttaaatcagagcagtcaccgcgggtggtactctgggaaatcgacctgacggtacagggcggtg

SEQ ID NO: 33871 - DNA, 75 bp, synthetic construct
  source 1..75: mol_type = other DNA
tcactgagctatctgggcgaggataccgccgaacagctggagttgatgcgtagcgccttccgggttatccggacg

SEQ ID NO: 33872 - DNA, 75 bp, synthetic construct
  source 1..75: mol_type = other DNA
gtcagcccaggtggtgctctgggaaatcgatctgacagaggtcggtggtgaacgttattttttctgtaatgagca

SEQ ID NO: 33873 - DNA, 75 bp, synthetic construct
  source 1..75: mol_type = other DNA
gatccggaacaggaggtgatcagttactggcgtattgaacagtgcagcgatctgacggcggtgacggcaacgttt

SEQ ID NO: 33874 - DNA, 75 bp, synthetic construct
  source 1..75: mol_type = other DNA
gaaacatgatgaaatattagaactgagtagtgatttgggatttaagttcactaaaagtaatgtacctgattcaat

SEQ ID NO: 33875 - DNA, 75 bp, synthetic construct
  source 1..75: mol_type = other DNA
gtgcagaaagttgggaagatatagaggatttcggggaaacacatctcgatttcttgaagcaatatggtgattttg

SEQ ID NO: 33876 - DNA, 75 bp, synthetic construct
  source 1..75: mol_type = other DNA
agagttgtatcctgtatctgtcctgcgaaatttcatgagagctttattaactggatgcttgactaccattcttca

SEQ ID NO: 33877 - DNA, 75 bp, synthetic construct
  source 1..75: mol_type = other DNA
ttaacatgctggatattaaaggaaaaatcatcacaaccgatgcgatgggttgccagaaagatattgcagagaaga

SEQ ID NO: 33878 - DNA, 75 bp, synthetic construct
  source 1..75: mol_type = other DNA
caaacagcttgaaagtattgcccgaagtcgtggtgtcctcccaaaaaaactgctgaatgaaatgattgagcaggc

SEQ ID NO: 33879 - DNA, 75 bp, synthetic construct
  source 1..75: mol_type = other DNA
atgggttgccagaaagatattgcagagaagatacaaaaacagggaggtgattatttattcgcggtaaaaggaaac

SEQ ID NO: 33880 - DNA, 75 bp, synthetic construct
  source 1..75: mol_type = other DNA
gatacggcacattgctattaatattttgacgaatgataaggtattcaaggcagggttaagacgtaagatgcgaaa

SEQ ID NO: 33881 - DNA, 75 bp, synthetic construct
  source 1..75: mol_type = other DNA
acgctaacccacaataataagccgctgccgtttggggcgatggtgacatcagagagtagccagagtagcggcatt

SEQ ID NO: 33882 - DNA, 75 bp, synthetic construct
  source 1..75: mol_type = other DNA
gctaaagatggctttctctttgcgctggagctggcaccgtcagtcattctctctctggggattatttcaattacc

SEQ ID NO: 33883 - DNA, 75 bp, synthetic construct
  source 1..75: mol_type = other DNA
gagctggattcgtggatggagtcccggatttatccggcgatgtccgcgatccctgcactggcagggatgattacc

SEQ ID NO: 33884 - DNA, 75 bp, synthetic construct
  source 1..75: mol_type = other DNA
tttgcagcttcaggaaatggccagcagcaaagtagtaaccagcagaacactcctgaatacgacgattccatcccc

SEQ ID NO: 33885 - DNA, 75 bp, synthetic construct
  source 1..75: mol_type = other DNA
gccagttgacggaaatccgcgcttcagctgccggaacggcgggggcatttgcaggtgcctttgccaccggacacc

SEQ ID NO: 33886 - DNA, 75 bp, synthetic construct
  source 1..75: mol_type = other DNA
cctttaaaggtgccggtgttgatacaagaaacggcagcaccgttgagtggaatatccggtatgataataaagaca

SEQ ID NO: 33887 - DNA, 75 bp, synthetic construct
  source 1..75: mol_type = other DNA
gatcggtttgcataaatcgttgagggtcgggctgggttatgacgtcaaagtcggaaataacgttaccttcaccgt

SEQ ID NO: 33888 - DNA, 75 bp, synthetic construct
  source 1..75: mol_type = other DNA
atgaaaatagcgcatcattataaatcccttctttcagccattatttcggtggccctgttttattcggcagcgcca

SEQ ID NO: 33889 - DNA, 75 bp, synthetic construct
  source 1..75: mol_type = other DNA
ggagagcccgggcctttcagtgaatgtgtatacaacattgaggaaattatgcgctggatcgaaaaccagaaacaa

SEQ ID NO: 33890 - DNA, 75 bp, synthetic construct
  source 1..75: mol_type = other DNA
ggaatgaatcttctggtatgtgggtggtgacttctgagctaacccgcaaaggtgggcaacggcatcgaaaaataa

SEQ ID NO: 33891 - DNA, 75 bp, synthetic construct
  source 1..75: mol_type = other DNA
cgatgttcagcggcgagaagcagaacgacgaccgcgacccgaacaccattgacatgtttgaaggcactccccaat

SEQ ID NO: 33892 - DNA, 75 bp, synthetic construct
  source 1..75: mol_type = other DNA
atgatagttaagtttcatgccaggggaaaaggtggtggcagtggtccggttgattacctgctgggaagggagcgt

SEQ ID NO: 33893 - DNA, 75 bp, synthetic construct
  source 1..75: mol_type = other DNA
ataaattgcagctgaatatatccattccccaaatctacatggacgcgatggcttatgattacatcagccccacgc

SEQ ID NO: 33894 - DNA, 75 bp, synthetic construct
  source 1..75: mol_type = other DNA
ggcagaagagtatgtttccacaggagaatatctctggaatagtggaatgtttatgtttaaagcatcagtatattt

SEQ ID NO: 33895 - DNA, 75 bp, synthetic construct
  source 1..75: mol_type = other DNA
atgaaccaacaattatttcaaaaggcggctggtattagcgccgggctggctgcgcgctggtttccgcacattgat

SEQ ID NO: 33896 - DNA, 75 bp, synthetic construct
  source 1..75: mol_type = other DNA
gcaaaaccagatggacccggtgtacacgccggcgcgaaaaatccacctgtaccactgcgaccatcgcggcctgcc

SEQ ID NO: 33897 - DNA, 75 bp, synthetic construct
  source 1..75: mol_type = other DNA
ctggtcggcactgttttatcacctgccacttcttgcacacctggagggggaactggtcagcggaaagttatggca

SEQ ID NO: 33898 - DNA, 75 bp, synthetic construct
  source 1..75: mol_type = other DNA
tgttgtcttgttcattgtttttatcgtcggcatggggatgtcggcttgatccgcctgaacataatatttaccaga

SEQ ID NO: 33899 - DNA, 75 bp, synthetic construct
  source 1..75: mol_type = other DNA
gaagcctttatggcccgctggattggatgggcgatgcagcaaaataatggcgacgtgttagttgtctgcggtggc

SEQ ID NO: 33900 - DNA, 75 bp, synthetic construct
  source 1..75: mol_type = other DNA
tttgataatattcgcggctttaccgatgcccgcgtggcgatgaacaccatcggttcctggcagaaccacgcgatt

SEQ ID NO: 33901 - DNA, 75 bp, synthetic construct
  source 1..75: mol_type = other DNA
ccacacaaagcgtcatcaaacttttctggcgaccaaaaggtttagcgtatcccttaggcgaggctccggcgaaac

SEQ ID NO: 33902 - DNA, 75 bp, synthetic construct
  source 1..75: mol_type = other DNA
gaacaaaaattgcgcttggcgtgtttgatagcggtcggcagttgcagtgggaaaagcgggtgccgacaccgcgtg

SEQ ID NO: 33903 - DNA, 75 bp, synthetic construct
  source 1..75: mol_type = other DNA
gggatggcagcgtgaccgactggcagaccttgaacgcatgttgtatttgctggatggcaagcctgtccctgacaa

SEQ ID NO: 33904 - DNA, 75 bp, synthetic construct
  source 1..75: mol_type = other DNA
gaacaggtcttacgtaatcagcctgcgttgtctgcgtttacctcggaaattaatgcgattagcgcaactattatc

SEQ ID NO: 33905 - DNA, 75 bp, synthetic construct
  source 1..75: mol_type = other DNA
atggtaaatctccctcctgaactggggtcacctgatgtatgggctggtggaggtattggacttattgcaggtctg

SEQ ID NO: 33906 - DNA, 75 bp, synthetic construct
  source 1..75: mol_type = other DNA
agcttcagcgtgccggactccatctgcagtgaatccgcgtccggcattgcagcagaaagccgccgggcagcagcg

SEQ ID NO: 33907 - DNA, 75 bp, synthetic construct
  source 1..75: mol_type = other DNA
ttcaattcatcctgaataatcatgaacaggcatacagacgcctgaagcctgtatatacttttttagaactggcat

SEQ ID NO: 33908 - DNA, 75 bp, synthetic construct
  source 1..75: mol_type = other DNA
gtcagctgcggcatattttgaccggaccgcatcatcagaagcccgcacccgtggccacatgagccagcgggagtt

SEQ ID NO: 33909 - DNA, 75 bp, synthetic construct
  source 1..75: mol_type = other DNA
tgataatatccagattggccttcaatatatagaacatattgaacgtacacttaatcatggtagtttgacaagccg

SEQ ID NO: 33910 - DNA, 75 bp, synthetic construct
  source 1..75: mol_type = other DNA
atgcgctataatggtttaaataatatgtttttctctctttgccagattaacgataaccactctttcacaagttca

SEQ ID NO: 33911 - DNA, 75 bp, synthetic construct
  source 1..75: mol_type = other DNA
cgctaactggctatggcgaacttgttgaagtggatgataaattgggcgtagagattcattcttggttatcagggc

SEQ ID NO: 33912 - DNA, 75 bp, synthetic construct
  source 1..75: mol_type = other DNA
agttacagctacagcaccaccggcaggctgaccggcgttcacaccaccgcagcgaatctggatatccgcatcccg

SEQ ID NO: 33913 - DNA, 75 bp, synthetic construct
  source 1..75: mol_type = other DNA
agacgattattaaagataaaggaacaatgtcagttttaacgaatgctaaagctgatgcgacccgaatagataacg

SEQ ID NO: 33914 - DNA, 75 bp, synthetic construct
  source 1..75: mol_type = other DNA
caggcgaacctgaaccgggaatggcaggtggtggcaagtgaactgcacggcgaacagccacaggcggtgccagga

SEQ ID NO: 33915 - DNA, 75 bp, synthetic construct
  source 1..75: mol_type = other DNA
tcactttggatgaagttaaccgactcaagattattcaggacgtcatcgaccggcgtctgacaacacagatggcag

SEQ ID NO: 33916 - DNA, 75 bp, synthetic construct
  source 1..75: mol_type = other DNA
atttcttaaatcgtgtgaccttgaaaacagggaaaccggcgagcgcatcgaccttatcagtaaggtgatgggcag

SEQ ID NO: 33917 - DNA, 75 bp, synthetic construct
  source 1..75: mol_type = other DNA
tctatagctgcatccagagggatagaatttccaaaaacacattggcagacatggcaaaagtatttggggcgtgaa

SEQ ID NO: 33918 - DNA, 75 bp, synthetic construct
  source 1..75: mol_type = other DNA
ggtaatgcgggtagttcagcgtgtgccagcgcaagactgaaagttattgcgtcgaaagaagggtacgaagatggc

SEQ ID NO: 33919 - DNA, 75 bp, synthetic construct
  source 1..75: mol_type = other DNA
ctgggaaaacagataaatgcccgcattgatgaagattttttgaaagagctgatgcgtcttggtcgcctgcagaag

SEQ ID NO: 33920 - DNA, 75 bp, synthetic construct
  source 1..75: mol_type = other DNA
aaagcccttgcagagctggaagcggtggccgcggaaatcctgaaacgtgcggaagcgtcagcggcgagtgcagag

SEQ ID NO: 33921 - DNA, 75 bp, synthetic construct
  source 1..75: mol_type = other DNA
actaattgattgtggtgatattagtgctaaagatgcaaaaagcacacagaaagcctggaattgtcgtcactccag

SEQ ID NO: 33922 - DNA, 75 bp, synthetic construct
  source 1..75: mol_type = other DNA
tgccaggacatccccgcaccactgaaacgacttcttcctgactataaacggatggaagaaaaaatagacgccgta

SEQ ID NO: 33923 - DNA, 75 bp, synthetic construct
  source 1..75: mol_type = other DNA
cttaataataaaggagaatatatttttatcagaaatagtgtcccgggattgagttcagtatgcataccgtatcat

SEQ ID NO: 33924 - DNA, 75 bp, synthetic construct
  source 1..75: mol_type = other DNA
accgggctgcaacaagtcggcgattttacctttgaaggcgcagcacgcagtgacgataactcacagtttggtcgt

SEQ ID NO: 33925 - DNA, 75 bp, synthetic construct
  source 1..75: mol_type = other DNA
gacggcgaatggcaaaacgggtctggcggcgggagcgtgacctgacggggtggatgtcgctgtcgcgtaaaccgg

SEQ ID NO: 33926 - DNA, 75 bp, synthetic construct
  source 1..75: mol_type = other DNA
ccgcttaacgccatgacgctggcgcaatggtcatcaccgaatgcgctaagttctctactcgcggtctattccgat

SEQ ID NO: 33927 - DNA, 75 bp, synthetic construct
  source 1..75: mol_type = other DNA
cgcgattttttccacgcgtcgcacaggcaatggatattaaacattactggcagaaggctttagtgcaggctcaaa

SEQ ID NO: 33928 - DNA, 75 bp, synthetic construct
  source 1..75: mol_type = other DNA
tgaggggtatacctaccgcacggaaacgcagagcggtgatgtactgattaaggcgcaccccgcggcggcaatgaa

SEQ ID NO: 33929 - DNA, 75 bp, synthetic construct
  source 1..75: mol_type = other DNA
aagtccacaccagaatggtgaaagaggttctgaaagccgtcgccagagccaataatcacccttatcagtccgtat

SEQ ID NO: 33930 - DNA, 75 bp, synthetic construct
  source 1..75: mol_type = other DNA
gtacaagattgccctggaagtgcccggtgtcgaggagaaggacatccagatcaccctcgacaacgacgtgctgat

SEQ ID NO: 33931 - DNA, 75 bp, synthetic construct
  source 1..75: mol_type = other DNA
ccccctgaactcaagattcaggaaggtgccagaaaaaattacgaaaaaatctctcattcaacgctgggctactgg

SEQ ID NO: 33932 - DNA, 75 bp, synthetic construct
  source 1..75: mol_type = other DNA
gcggagaagctgcagcaggaagggagcgaggacgggcacggcgtggtatttccggctgaactggtgcggctgctg

SEQ ID NO: 33933 - DNA, 75 bp, synthetic construct
  source 1..75: mol_type = other DNA
cacagaagaccgctttgcttaccgaagcggagtctgtcatccggccgcgggggcgtgctgtcaggctgaacaggg

SEQ ID NO: 33934 - DNA, 75 bp, synthetic construct
  source 1..75: mol_type = other DNA
ttatcggatattctactgttgactatttgtgccgttatttcgggtgcagaaggttgggaagatatagaggatttt

SEQ ID NO: 33935 - DNA, 75 bp, synthetic construct
  source 1..75: mol_type = other DNA
gcgatttttaaagccaacggtgtggatttacacaccgccacctactatacgcttgcccggacacggacacaggga

SEQ ID NO: 33936 - DNA, 75 bp, synthetic construct
  source 1..75: mol_type = other DNA
ttaaggctgatttaagccagtccgcattagtcatttcactgccacaggcttacctcgaatatacttatcccgact

SEQ ID NO: 33937 - DNA, 75 bp, synthetic construct
  source 1..75: mol_type = other DNA
tgataaaaaataacctcagcgaaattaaaactgccggggcatcagcacagcgtacagcacgtgaaaatctggata

SEQ ID NO: 33938 - DNA, 75 bp, synthetic construct
  source 1..75: mol_type = other DNA
ccgctgtcagtgctgattattgacgttgataaattcaaagagatcaacgatacgtggggccataacactggcgat

SEQ ID NO: 33939 - DNA, 75 bp, synthetic construct
  source 1..75: mol_type = other DNA
atatgatgtcaactattttacatgatgctggctttaattctcaatatattgaattacagctcgctcacgttgata

SEQ ID NO: 33940 - DNA, 75 bp, synthetic construct
  source 1..75: mol_type = other DNA
tttcaaaagaaagtgtttcacaagtgattgagttacttggttacaaaggacgtgctacaggtcacggttttagac

SEQ ID NO: 33941 - DNA, 75 bp, synthetic construct
  source 1..75: mol_type = other DNA
ggacgaaataaccgaaaaaagcctataagtaaggagagcataaaccaagtgattgagttattgggatttaagggg

SEQ ID NO: 33942 - DNA, 75 bp, synthetic construct
  source 1..75: mol_type = other DNA
gcaatattctcgccgccatgtgcagcagcccgccatttcatgaaatgggggaaatcatttgtcgtaacatcgaat

SEQ ID NO: 33943 - DNA, 75 bp, synthetic construct
  source 1..75: mol_type = other DNA
gtgactgaattaaccaaagagaaattaatcgaagaagccaaattaaaaatagcgattgcgaaatgctaccccaat

SEQ ID NO: 33944 - DNA, 75 bp, synthetic construct
  source 1..75: mol_type = other DNA
cacgctgcggcgtgattttcgtgagcggctgatgtatctggacctggagtatcagtccggatattgccgcttacg

SEQ ID NO: 33945 - DNA, 75 bp, synthetic construct
  source 1..75: mol_type = other DNA
atgtgccatttatacaatggttttgatgaaggaaatatcagtctgaaaacctggggggcgatgcaagaggtacag

SEQ ID NO: 33946 - DNA, 75 bp, synthetic construct
  source 1..75: mol_type = other DNA
atccaatttgatccgatgaccggtctgccaaatcgcaataacctgcacaattacctcgatgacctggtcgacaaa

SEQ ID NO: 33947 - DNA, 75 bp, synthetic construct
  source 1..75: mol_type = other DNA
cgggacctgacgggctggatgtcgctgtcacggaaaccgcaagtgacctggtacggctgggacggcgaccggctg

SEQ ID NO: 33948 - DNA, 75 bp, synthetic construct
  source 1..75: mol_type = other DNA
aaccttctgttagtcgacttcattgagaaaaatggaaacagcaacggactgaatatcgatctggtcagcgcacca

SEQ ID NO: 33949 - DNA, 75 bp, synthetic construct
  source 1..75: mol_type = other DNA
gggaaaaatattactaataatggttttgacttcaaacaaactatcagtactaatctatccataggagaaactaaa

SEQ ID NO: 33950 - DNA, 75 bp, synthetic construct
  source 1..75: mol_type = other DNA
atgaaaccacttttatccgcaatagcagctgcgcttattctcttttccgcgcagggcgttgcggaacaaaccacg

SEQ ID NO: 33951 - DNA, 75 bp, synthetic construct
  source 1..75: mol_type = other DNA
cgatgcaggcgttgtatttgctggctcttgagcccgttgctgaagtcactgctgaccagagatccttcggctttc

SEQ ID NO: 33952 - DNA, 75 bp, synthetic construct
  source 1..75: mol_type = other DNA
gccgtattcaccctggatgaaatccatctggttcagcccctgcaggagactttccggcgtaacgacagtctgtgt

SEQ ID NO: 33953 - DNA, 75 bp, synthetic construct
  source 1..75: mol_type = other DNA
gctcaaagctgaaaggtacgatcggcagtcggttaatgaacgaacggaagaaagagaagcgtgtcctggctgtcg

SEQ ID NO: 33954 - DNA, 75 bp, synthetic construct
  source 1..75: mol_type = other DNA
aaagcatcaacggttagcgcagaaataccatatcagacttttcgtgactttgctgaaaataaaggtgtgtttacc

SEQ ID NO: 33955 - DNA, 75 bp, synthetic construct
  source 1..75: mol_type = other DNA
tctcagaactccctgaaactgagcgattctatcactacgatcggcaatactactgctgcatcgaagaacgtggac

SEQ ID NO: 33956 - DNA, 75 bp, synthetic construct
  source 1..75: mol_type = other DNA
gaagcaatatgtcgagaatggcataccaacaaagctgaccgctggactgtggcctatcgagaagaaattattaag

SEQ ID NO: 33957 - DNA, 75 bp, synthetic construct
  source 1..75: mol_type = other DNA
aaaagaggatgaaggtattcgccctgtatacgctgttgctgacagggattaccgtgttttccctctggctggccg

SEQ ID NO: 33958 - DNA, 75 bp, synthetic construct
  source 1..75: mol_type = other DNA
aacaccgctttataccgccaagccagtgccggtaactccggatggttggataagctgtagtgagcgaatgccgga

SEQ ID NO: 33959 - DNA, 75 bp, synthetic construct
  source 1..75: mol_type = other DNA
atgatcgaccttgaaaccatgggaaaaaatcctgatgccccgattatctcaataggtgcaatatttttcgatccg

SEQ ID NO: 33960 - DNA, 75 bp, synthetic construct
  source 1..75: mol_type = other DNA
aatgattatgacgaggacgactttaaaaaacctgttcgcgtccatttacccgttgtgaatgaccttcctccagaa

SEQ ID NO: 33961 - DNA, 75 bp, synthetic construct
  source 1..75: mol_type = other DNA
gacattgccactggcgttctggcccgttcaatggatgtggatatttataacctgcaccctgcacatgcaaaacgc

SEQ ID NO: 33962 - DNA, 75 bp, synthetic construct
  source 1..75: mol_type = other DNA
gcatgctaatgctggcgctggcagggtgcgacaacaacgataacgcgccaacagcggtgaaaaaagatgcgcctt

SEQ ID NO: 33963 - DNA, 75 bp, synthetic construct
  source 1..75: mol_type = other DNA
tgctcaggacgtgcaatatccagaacgccagttactcggatttagcaggaacgatatacaattaattgaggatct

SEQ ID NO: 33964 - DNA, 75 bp, synthetic construct
  source 1..75: mol_type = other DNA
taatgattttttaagccagtcacaatctaccaactttatagtatcacacaaacaacacatccattatgttaaaga

SEQ ID NO: 33965 - DNA, 75 bp, synthetic construct
  source 1..75: mol_type = other DNA
ccaaaggcagcgacagtgcggcggtggtggagtttaccggcaaggtgcagcgcatggcgcgggtgcatcagtacg

SEQ ID NO: 33966 - DNA, 75 bp, synthetic construct
  source 1..75: mol_type = other DNA
ccggtgtacacgccggcgcgaaaaatccacctgtaccactgcgaccatcgcggcctgccgctggcgctcatcagc

SEQ ID NO: 33967 - DNA, 75 bp, synthetic construct
  source 1..75: mol_type = other DNA
atacgccggataagttatttcatgatggtgacccgactcagggaattgagggaaccatcgttactgctgaattta

SEQ ID NO: 33968 - DNA, 75 bp, synthetic construct
  source 1..75: mol_type = other DNA
gtcgactcaaaacaggccagatgaacaaaacagaatctgcgtattgccagcaccttgagctgcgtaaacgtgcag

SEQ ID NO: 33969 - DNA, 75 bp, synthetic construct
  source 1..75: mol_type = other DNA
gtcggatgtgcaggaacagattaaaaacaaatatcaatcggcattcgtgtttctcaaaaagctaaaagacgcgct

SEQ ID NO: 33970 - DNA, 75 bp, synthetic construct
  source 1..75: mol_type = other DNA
tgcgaccatcgcggcctgccgctggcgcttgtcagcacggaaggggcaacagaatggtgcgcagaatacgatgaa

SEQ ID NO: 33971 - DNA, 75 bp, synthetic construct
  source 1..75: mol_type = other DNA
gtgaggaaagccgccgctggctggcatcgtgcggcctgaccgtggagcagatgcaaaaccagatggacccggtgt

SEQ ID NO: 33972 - DNA, 75 bp, synthetic construct
  source 1..75: mol_type = other DNA
cgcaaatacaccacttaaagccgcaatgacacagaatgaagatggcaggttagtcttcaccattgttgattcgaa

SEQ ID NO: 33973 - DNA, 75 bp, synthetic construct
  source 1..75: mol_type = other DNA
cccgcagtacgctacatcgcgctggtgaggcggcatattgaccgcctccaccgtgatgcggtcagtacgtcaggt

SEQ ID NO: 33974 - DNA, 75 bp, synthetic construct
  source 1..75: mol_type = other DNA
atgaagctctggcccacgctgggcgtcgcttttcttctgattgccgcctggggagcatccatgcgtctgtcgtgg

SEQ ID NO: 33975 - DNA, 75 bp, synthetic construct
  source 1..75: mol_type = other DNA
agcagccacttctgcatccaccgcgaccacgaaagcgtcagaagctgccacctcagcccgggatgcgtcggcttc

SEQ ID NO: 33976 - DNA, 75 bp, synthetic construct
  source 1..75: mol_type = other DNA
atggtggtgggggaaggattactcagcgctgcgcgcttcacccttcgggtcgttgcctgcggcaacgctttctcg

SEQ ID NO: 33977 - DNA, 75 bp, synthetic construct
  source 1..75: mol_type = other DNA
ggccggatggtggcgcaccgtcacacgggccggccggaaatccgttaccgttacgacagcgacgggcgggtgaca

SEQ ID NO: 33978 - DNA, 75 bp, synthetic construct
  source 1..75: mol_type = other DNA
taaagataaagcaaaagcattattttcaaattatgtatacctgctgaacacaaaagcaaccatagagaaaggtgc

SEQ ID NO: 33979 - DNA, 75 bp, synthetic construct
  source 1..75: mol_type = other DNA
gcgatgcccgccgggcgttacatgaactgatgatcggacgtgctgtggtttccgtcagcaaggacgggcgtcagg

SEQ ID NO: 33980 - DNA, 75 bp, synthetic construct
  source 1..75: mol_type = other DNA
atgacagcacagatagccgcttacgggcggctggtggacgacccgcaggtaaaacagaccagcaagggcacaccg

SEQ ID NO: 33981 - DNA, 75 bp, synthetic construct
  source 1..75: mol_type = other DNA
cagtctcccaataacaaacactaccctggtgaaatacggaaaactaggatacatcgttccaaggccacaaaaaat

SEQ ID NO: 33982 - DNA, 75 bp, synthetic construct
  source 1..75: mol_type = other DNA
gtcagattgcgtacaagttccttaagcgcaacggtttcaaggtttgttttcatgaccgctttatagctgtaacca

SEQ ID NO: 33983 - DNA, 75 bp, synthetic construct
  source 1..75: mol_type = other DNA
ctgaacactaccgtgcattagcacatgcctggtcccttggactgaaaaaatatccggctgtggtttttgatgaca

SEQ ID NO: 33984 - DNA, 75 bp, synthetic construct
  source 1..75: mol_type = other DNA
atgtctggcgtcaatatgtttatcgatcatgacctgacccgctatcacacccgaaccgggatgggcgttgaatac

SEQ ID NO: 33985 - DNA, 75 bp, synthetic construct
  source 1..75: mol_type = other DNA
ttcagccttaaaagctcgtcatttgaatttctccatccctggtacgaaacgccggataacctggtcttcagccag

SEQ ID NO: 33986 - DNA, 75 bp, synthetic construct
  source 1..75: mol_type = other DNA
gtcaggatcgtgattccgactcgctggacaaaaaccgcctggaacgccagaactactccgtcagccataatgggc

SEQ ID NO: 33987 - DNA, 75 bp, synthetic construct
  source 1..75: mol_type = other DNA
agtgctgccgtggtggcccaggcacagaccgtgggaaaactgctggatcaggttctcagtcaggaaaccctgccg

SEQ ID NO: 33988 - DNA, 75 bp, synthetic construct
  source 1..75: mol_type = other DNA
ttgagttcaccattaatgtcacgccggtaagtgatgataccgcacctgctgtcacacaggacacggccgccattc

SEQ ID NO: 33989 - DNA, 75 bp, synthetic construct
  source 1..75: mol_type = other DNA
aggatggttgccatcggtaagtgatgggcaaggtatggtcagtaccgggatacctgagcagcatacatttgatgt

SEQ ID NO: 33990 - DNA, 75 bp, synthetic construct
  source 1..75: mol_type = other DNA
acgatgcacgcactgtttaatgaaccgctgcagggcgagtccgccaatacaagcaatattgtggagattttttga

SEQ ID NO: 33991 - DNA, 75 bp, synthetic construct
  source 1..75: mol_type = other DNA
atgacgcaacttctcacggtggcaaagtctcttcggcctcttcaacctttgatattcagggaaaaaaggctgcac

SEQ ID NO: 33992 - DNA, 75 bp, synthetic construct
  source 1..75: mol_type = other DNA
tggggcaacctgctgaatgaagagaacccgcatcagctgcagcagcttatccggctgccggggcagcagtatgat

SEQ ID NO: 33993 - DNA, 75 bp, synthetic construct
  source 1..75: mol_type = other DNA
tctttcttcatgtcttactcagagtatgttgaatcgttatggggttaaggtaggagactacccagaactttttgt

SEQ ID NO: 33994 - DNA, 75 bp, synthetic construct
  source 1..75: mol_type = other DNA
cctgtgctgacctgacggcgataccgcaggccacggagagttatcagtttgctgcccagcagctggttctgggta

SEQ ID NO: 33995 - DNA, 75 bp, synthetic construct
  source 1..75: mol_type = other DNA
gaaagaatgtcaatattacaattgttgctgttgcacgtgagctggcgggttttatctgggatatgggccgaatag

SEQ ID NO: 33996 - DNA, 75 bp, synthetic construct
  source 1..75: mol_type = other DNA
gtgtaagaaagtgacaagttggatgtattcgcatcctggagagagaattagatatgaacgttttaagacacgtta

SEQ ID NO: 33997 - DNA, 75 bp, synthetic construct
  source 1..75: mol_type = other DNA
ttgacaaacgccgcaacgaactggtggtggtgagtgaaatcaccaccggcgtgggtaatgcaaaagccacgggca

SEQ ID NO: 33998 - DNA, 75 bp, synthetic construct
  source 1..75: mol_type = other DNA
atgaacgctgaaactattaaagatttcctcgtctcgcttggcttcagtgtggatgatgcaggagcgaaaaagttc

SEQ ID NO: 33999 - DNA, 75 bp, synthetic construct
  source 1..75: mol_type = other DNA
gcttttttctgtctatttattttgccgataaactaccgcgcagatacaccatgtcattctcactcattgcgacag

SEQ ID NO: 34000 - DNA, 75 bp, synthetic construct
  source 1..75: mol_type = other DNA
ctgcaggccgaatggccgggcagggaaacacttccacagccccgactgtatctggtggaggagtgcgctgaagaa

SEQ ID NO: 34001 - DNA, 75 bp, synthetic construct
  source 1..75: mol_type = other DNA
gactctttctgtgtcttgcgatgtgcctacaaatattcgttttttcctgttaagcaatacaactccggcatacag

SEQ ID NO: 34002 - DNA, 75 bp, synthetic construct
  source 1..75: mol_type = other DNA
tggtttcactcaagaagaaaatgaaaaacttgtagaaatatggaagaagcttagagatagaaggctacgtaagta

SEQ ID NO: 34003 - DNA, 75 bp, synthetic construct
  source 1..75: mol_type = other DNA
gatggtccacacgaaccgttgtttacgccaattgttgaacctgtacagcagccgcaacaaccggttgcaccgcag

SEQ ID NO: 34004 - DNA, 75 bp, synthetic construct
  source 1..75: mol_type = other DNA
accgccaccattaaagacatgcagacccgccagcgtgatgtcgctgcactggatgccaaatacaccggagaactg

SEQ ID NO: 34005 - DNA, 75 bp, synthetic construct
  source 1..75: mol_type = other DNA
agccgcttcttttatgacgcctttccgggaatgcgtctgcgccacccggtgactgacgataccagcgatgaccgc

SEQ ID NO: 34006 - DNA, 75 bp, synthetic construct
  source 1..75: mol_type = other DNA
ataaaagtctgactcgctatgtgctgctttcggtgtgcatctcaacggttgttaacctgcttactatcagcccgt

SEQ ID NO: 34007 - DNA, 75 bp, synthetic construct
  source 1..75: mol_type = other DNA
ggcgtcggttttcgtatatctgatggtgggttgtcgtgtgtcatgggggtgagtgaaggagggtgggagcgcctt

SEQ ID NO: 34008 - DNA, 75 bp, synthetic construct
  source 1..75: mol_type = other DNA
ggcgtcaaaatccatgttctggatggcgagcgtttttctcttggtaatatggacgataaagaactctctgccttt

SEQ ID NO: 34009 - DNA, 75 bp, synthetic construct
  source 1..75: mol_type = other DNA
gcctgccgtgcatatagtgcagagctgaatattggtggagatagtgaagcatggacaactgcgcagttgattttt

SEQ ID NO: 34010 - DNA, 75 bp, synthetic construct
  source 1..75: mol_type = other DNA
tttattgtagatcctgttcaaggggaactatattcgggtttaagccatacagaactagccgatatcattagattg

SEQ ID NO: 34011 - DNA, 75 bp, synthetic construct
  source 1..75: mol_type = other DNA
aaatcacctgggaacaactgctggaagagtactttttttcaaagaatcttcggccggatacagagtggagctact

SEQ ID NO: 34012 - DNA, 75 bp, synthetic construct
  source 1..75: mol_type = other DNA
gcgctgacagagcagaaccggctgattgatgagcaggccagccgggtgaaatccctgcaggaaaaaatcgccggg

SEQ ID NO: 34013 - DNA, 75 bp, synthetic construct
  source 1..75: mol_type = other DNA
gctggcgcattgtactgatgcagaggcgttatgtattgatcgggtcataagtgaggtgctggcagagcatccagg

SEQ ID NO: 34014 - DNA, 75 bp, synthetic construct
  source 1..75: mol_type = other DNA
tccttggaagcctgcgcggcaacggcagagggcgatttgtcttacaggacggcagccaggtgacaggggaggagg

SEQ ID NO: 34015 - DNA, 75 bp, synthetic construct
  source 1..75: mol_type = other DNA
ccaggcagtgaaaaactttgtcgtggcgaatatcacgggatcggattgtcggcagttgatccatgttgaaaatgg

SEQ ID NO: 34016 - DNA, 75 bp, synthetic construct
  source 1..75: mol_type = other DNA
gttctggctggcaaggggcggagtgctgaaacaacacaaaggccatccgcttgcgcggctctggcgggcgttgcc

SEQ ID NO: 34017 - DNA, 75 bp, synthetic construct
  source 1..75: mol_type = other DNA
ccgtattccgatccggagaacggggtgtggtggctggacgccatgccgcactgtgccgtggtggtggaaaagctg

SEQ ID NO: 34018 - DNA, 75 bp, synthetic construct
  source 1..75: mol_type = other DNA
gtcgccggtggcgatgctgaaccaggtctgcgaccgcgtggtgtccgcactgggtggagccggtatccgctgtac

SEQ ID NO: 34019 - DNA, 75 bp, synthetic construct
  source 1..75: mol_type = other DNA
tttgtgtggcccttgcgctaaccggttgttcactggcaccggattatcagcgtccggcaatgcccgtgccgcagc

SEQ ID NO: 34020 - DNA, 75 bp, synthetic construct
  source 1..75: mol_type = other DNA
agctcaaagagaaaggactgatatggcttttaccaccatactgctggtcacatcgtcagatagcccgtaagctaa

SEQ ID NO: 34021 - DNA, 75 bp, synthetic construct
  source 1..75: mol_type = other DNA
taatctgtggctggattacctggacgcactggaaatggtcgatacttccagtgctccagatattgaatggcctac

SEQ ID NO: 34022 - DNA, 75 bp, synthetic construct
  source 1..75: mol_type = other DNA
tctactgtcaggatgaaaatgatgtggatgcgtacctggactatctgaaggggtatgtgaaaccccacgcgcagg

SEQ ID NO: 34023 - DNA, 75 bp, synthetic construct
  source 1..75: mol_type = other DNA
tattcgcgataaacctccttgttggatgtcaggctaactatatacgtgatgttcagggagggaccatcgcaccat

SEQ ID NO: 34024 - DNA, 75 bp, synthetic construct
  source 1..75: mol_type = other DNA
ccacattgctcgcgctcgtccttgccacaaatttcccggttgcgcacgccgccgtaccgaaagatatgctggtga

SEQ ID NO: 34025 - DNA, 75 bp, synthetic construct
  source 1..75: mol_type = other DNA
aagacgtgatgacccgcacagtgaaaatcagcggtgtggggcgtccgtatctggcagaggaaggcactgaaacag

SEQ ID NO: 34026 - DNA, 75 bp, synthetic construct
  source 1..75: mol_type = other DNA
ctggatgtcgctgtcacggaaaccggaagtgacctggtacggctgggacggcgaccggctgaccacaatacagaa

SEQ ID NO: 34027 - DNA, 75 bp, synthetic construct
  source 1..75: mol_type = other DNA
gttttcaaaagccagcttcagcttctttgtgagaaagaaggtattacccaggctgagatgattgaaaagctgata

SEQ ID NO: 34028 - DNA, 75 bp, synthetic construct
  source 1..75: mol_type = other DNA
gacatgccgagcttcagaacaatctgccgctggcaatatgagcatccagactttcgtgagcatatcggcatattt

SEQ ID NO: 34029 - DNA, 75 bp, synthetic construct
  source 1..75: mol_type = other DNA
tacaagtgatagacccaatggggttagatgcgattgagaatatgacatcaggtggactaatttatgccgtatctg

SEQ ID NO: 34030 - DNA, 75 bp, synthetic construct
  source 1..75: mol_type = other DNA
ccgtgaactgacggttcaggcttctaccgggactaactccgattcggatctggactccattcaggacgaaatcaa

SEQ ID NO: 34031 - DNA, 75 bp, synthetic construct
  source 1..75: mol_type = other DNA
tgcgaagaacgagagttaagccgcttaaataactttttttgcttcccttatcttaataaaattgacgttctaaat

SEQ ID NO: 34032 - DNA, 75 bp, synthetic construct
  source 1..75: mol_type = other DNA
ggcggctggtggacgacccgctggtaaaacagagcagcaagggcacaccgatgactctggcgcgtatggcggtat

SEQ ID NO: 34033 - DNA, 75 bp, synthetic construct
  source 1..75: mol_type = other DNA
gaacagtatcacctttgtttttgctgatggcacggtgcgcacgctgccgtcaccggatgtcaacggcaccaccaa

SEQ ID NO: 34034 - DNA, 75 bp, synthetic construct
  source 1..75: mol_type = other DNA
caacctgtctgaagcgcagtcccgtattcaggacgccgactatgcgaccgaagtgtccaacatgtcgaaagcgca

SEQ ID NO: 34035 - DNA, 75 bp, synthetic construct
  source 1..75: mol_type = other DNA
tcgtaaaaattgtagatattggtagcctgactcaggctgctgaagtattgcatatcgcacaaccagcgctcagcc

SEQ ID NO: 34036 - DNA, 75 bp, synthetic construct
  source 1..75: mol_type = other DNA
aattgtttgagcggcgtattaacttccctgactttgagcctcaggagcgtctggctcgtttagttggtcttgatg

SEQ ID NO: 34037 - DNA, 75 bp, synthetic construct
  source 1..75: mol_type = other DNA
acctgcaccagccgtaccggctgccggggcagcagtatgataaggagtcggggctgtactataaccgtcaccggt

SEQ ID NO: 34038 - DNA, 75 bp, synthetic construct
  source 1..75: mol_type = other DNA
ttcgatgaaaattcaggttggtgcgaatgacggccagactatcactattgatctgaagaaaattgactctgatac

SEQ ID NO: 34039 - DNA, 75 bp, synthetic construct
  source 1..75: mol_type = other DNA
gagaaggcgccagagcaaaattatgacgaagtcattaaggcgctgaaggctgctggcatcgatcctcttaaactg

SEQ ID NO: 34040 - DNA, 75 bp, synthetic construct
  source 1..75: mol_type = other DNA
gcagcgttttgaaaacgcctcaaaggaaagcaccgaatttacaaaaagaattaacgtgatcggcgtgaccgacca

SEQ ID NO: 34041 - DNA, 75 bp, synthetic construct
  source 1..75: mol_type = other DNA
aaacgtttcctgtctgagcaggctaatgctgccaatgtccaacgaattattcaagacaatgcagcgctacataat

SEQ ID NO: 34042 - DNA, 75 bp, synthetic construct
  source 1..75: mol_type = other DNA
cgtggcttgcgcagtgcgggctgacggtggagcaactggccagacaggtggagccggaatacacaccggcgcgaa

SEQ ID NO: 34043 - DNA, 75 bp, synthetic construct
  source 1..75: mol_type = other DNA
caatggacaaagtgcaacactgaaaggtgatgttacaagcgaaaacggctggttaatcaccaaaaatgataaagg

SEQ ID NO: 34044 - DNA, 75 bp, synthetic construct
  source 1..75: mol_type = other DNA
tacaggaaggcgcgtggcacggcattctgctgtgcgttctggtcgtgctgtttctgttttttccgcgcctgtggg

SEQ ID NO: 34045 - DNA, 75 bp, synthetic construct
  source 1..75: mol_type = other DNA
aatcagcgctgccaactgtttttagcgaagatacctctgtagaacttatcagtcatatggctgataacctcaatt

SEQ ID NO: 34046 - DNA, 75 bp, synthetic construct
  source 1..75: mol_type = other DNA
atcaaagttctccggtgggataaacacggggtgtggttgtgtacccgccgtctgcacaaaggcagcttccgctgg

SEQ ID NO: 34047 - DNA, 75 bp, synthetic construct
  source 1..75: mol_type = other DNA
gaagtgctggtgtcggaccgcacggtcaccgggcacctgaaatcgccggacagccggggcaagaccaccatcgtg

SEQ ID NO: 34048 - DNA, 75 bp, synthetic construct
  source 1..75: mol_type = other DNA
tacaagcagctctggcgtggcggtcaggtgcttgctgttccgccagcgtacacaagccagcgttgcgcgtgctgt

SEQ ID NO: 34049 - DNA, 75 bp, synthetic construct
  source 1..75: mol_type = other DNA
tgatgcagtggtggtcggattatctggatgtgtgccgcgaggggtatgttgcgccgtacatttatgcccggcagc

SEQ ID NO: 34050 - DNA, 75 bp, synthetic construct
  source 1..75: mol_type = other DNA
gcatcgtgcggcctgaccgtggagcagatgcaaaaccagatggacccggtgtacacgccggcgcgaaaaatccac

SEQ ID NO: 34051 - DNA, 75 bp, synthetic construct
  source 1..75: mol_type = other DNA
ggcggtatatcacccaggatccgatagggttgaaggggggaataaatctatacacgtatccactggcaccaatac

SEQ ID NO: 34052 - DNA, 75 bp, synthetic construct
  source 1..75: mol_type = other DNA
gtcaggagttacttccttcatcttcgctctctccgcgcaaacttaggcgagtgatagaaatgtggatgcccgtga

SEQ ID NO: 34053 - DNA, 75 bp, synthetic construct
  source 1..75: mol_type = other DNA
gtcaccatgactactctcccaacccaatctcaccctgaaatcacgattatcaatggtcgcgttgtcaccacatct

SEQ ID NO: 34054 - DNA, 75 bp, synthetic construct
  source 1..75: mol_type = other DNA
ctttttgtggggtgaatatggcagtaaagatttcaggtgtactgaaagatggggcgggtaaacctgtcgtaaatt

SEQ ID NO: 34055 - DNA, 75 bp, synthetic construct
  source 1..75: mol_type = other DNA
ccttaggtgatctggcgctgggctttgatggtgcggtagatgggccttttggttcaaatttaccggctgcagctt

SEQ ID NO: 34056 - DNA, 75 bp, synthetic construct
  source 1..75: mol_type = other DNA
atgcaagtggactggtatttatcgactcatattacgataatccgtctacgattaaggggagtattaatgcgcgtg

SEQ ID NO: 34057 - DNA, 75 bp, synthetic construct
  source 1..75: mol_type = other DNA
ctataagcgccagcgtatcaattccggcagaacaatctcaatccatctccacaattcctggagggagaaaaatag

SEQ ID NO: 34058 - DNA, 75 bp, synthetic construct
  source 1..75: mol_type = other DNA
tatcaaagtacgcttagcgactatatcgtcgtgcaatttgacggtgccggtagcgttaacgaagaccctactgcc

SEQ ID NO: 34059 - DNA, 75 bp, synthetic construct
  source 1..75: mol_type = other DNA
ttcgtaaaaactatattgaagagggaaagttgactcttcaaaaacctacgcctaagcaaatagaaaaacgtctca

SEQ ID NO: 34060 - DNA, 75 bp, synthetic construct
  source 1..75: mol_type = other DNA
tggtggtgtttctcggtttgctggtcacgatctactccacgggttatctgacggataaaaatcgcgaacacccgc

SEQ ID NO: 34061 - DNA, 75 bp, synthetic construct
  source 1..75: mol_type = other DNA
gtgaagacggcaatacggcgtggagcgcggaatatgatgaatggggcaaccagcttaatgaggagaacccgcatc

SEQ ID NO: 34062 - DNA, 75 bp, synthetic construct
  source 1..75: mol_type = other DNA
tgtacatagctgattacctggctgacaccatgcatttgtccgcagaggagcacggtgcgtatttgttgctgatgt

SEQ ID NO: 34063 - DNA, 75 bp, synthetic construct
  source 1..75: mol_type = other DNA
ccgactgtttctgaagcttcattggctgccgcaacaaatactgcaggtctgactccatttaccattgagctgacc

SEQ ID NO: 34064 - DNA, 75 bp, synthetic construct
  source 1..75: mol_type = other DNA
gacccgcattactatctcgataacgtgctgctggaaaccggttttgactacgaaaatggcgtggcggtgcagacc

SEQ ID NO: 34065 - DNA, 75 bp, synthetic construct
  source 1..75: mol_type = other DNA
tttgcagataaaaatgtgcgggtgggcttcccgccagcactgaacggaaagttgagggtacagagtaccggtggg

SEQ ID NO: 34066 - DNA, 75 bp, synthetic construct
  source 1..75: mol_type = other DNA
atgattgaaagaggtgataacagcggtgtttatcagtatggtcgtgctgaacatttcacccacattatatctgac

SEQ ID NO: 34067 - DNA, 75 bp, synthetic construct
  source 1..75: mol_type = other DNA
tgttggcactgtactcaatagtgctggcacccaaacaatatatgccagtgccacttctgataaagcaaatatcaa

SEQ ID NO: 34068 - DNA, 75 bp, synthetic construct
  source 1..75: mol_type = other DNA
acatggtacagatactaccagtaccatcaccaacgttaaagacggcgctatttctgataccagtaaggatgcggt

SEQ ID NO: 34069 - DNA, 75 bp, synthetic construct
  source 1..75: mol_type = other DNA
gacgccatcgcatttggacgtgaaagcaaggccttaggaattatgagtatcgccctcggagccacggctaatgcg

SEQ ID NO: 34070 - DNA, 75 bp, synthetic construct
  source 1..75: mol_type = other DNA
tcatccgcctgaccagtgaaaacggcagccacaccaccttccgttacgatgtactcgaccggctgatacaggaaa

SEQ ID NO: 34071 - DNA, 75 bp, synthetic construct
  source 1..75: mol_type = other DNA
agctgctggccgttgtgacctcgttgaaaccgataatagttgtgtggagaactgtttaaaagggaagtttaaaga

SEQ ID NO: 34072 - DNA, 75 bp, synthetic construct
  source 1..75: mol_type = other DNA
ggacggcgcgggccgccgttttcacctggcactgagcacacaggcgcagcgggcggaagccttccgtaaacagcg

SEQ ID NO: 34073 - DNA, 75 bp, synthetic construct
  source 1..75: mol_type = other DNA
aaggttatgtatgcattgacatgcagtgttcgtcaacctctgaaccaacagcttctacctccagcaaccggagta

SEQ ID NO: 34074 - DNA, 75 bp, synthetic construct
  source 1..75: mol_type = other DNA
atggaacctgtatggatatcaattgaatccgatatcagacatcgaccccctgggtttatctatgtgggaggatgc

SEQ ID NO: 34075 - DNA, 75 bp, synthetic construct
  source 1..75: mol_type = other DNA
gagagccaccgccgcagcattgatgaaaacccgaaaaaagaccgcgtggaaaactacgagtcaatgaatatcgac

SEQ ID NO: 34076 - DNA, 75 bp, synthetic construct
  source 1..75: mol_type = other DNA
ccgggaatgctggcgcgttggactgatgatgatctgtacggcatcatccgtgcggctaaaaaaggcaaaaaaacc

SEQ ID NO: 34077 - DNA, 75 bp, synthetic construct
  source 1..75: mol_type = other DNA
ttcgcgttacggaacaggcagcgttggctgcctggccgcaaaccggatgtggcgacaaaaataaaattgatggcc

SEQ ID NO: 34078 - DNA, 75 bp, synthetic construct
  source 1..75: mol_type = other DNA
gccgcgcagccggagcctcagccgcaaccgccggagggggaggattacgggttttcagacgatatcccgttctga

SEQ ID NO: 34079 - DNA, 75 bp, synthetic construct
  source 1..75: mol_type = other DNA
cgggtgggcaactggagcaggcgcgtgaaatcctgcgagatatcgaatccctgctgccgcataacgaatccctgt

SEQ ID NO: 34080 - DNA, 75 bp, synthetic construct
  source 1..75: mol_type = other DNA
catgaaaattgctggagatgcccagctttctaccccatgcactgacagcatcataaacagcattgcaacaggcat

SEQ ID NO: 34081 - DNA, 75 bp, synthetic construct
  source 1..75: mol_type = other DNA
cagaagataacggtggtgaaggggcagacggttcaggtcgggaccagaaaagaagggggccacgaccagagtatc

SEQ ID NO: 34082 - DNA, 75 bp, synthetic construct
  source 1..75: mol_type = other DNA
tgtactcgctgtcacaccagaccagtgacttcggtgaatcagaatggattcattttaccggtaacggctatctgt

SEQ ID NO: 34083 - DNA, 75 bp, synthetic construct
  source 1..75: mol_type = other DNA
gcagcactggataacgtgaagacttcattaccgacagattttccggagaacgtggtgacggcagttgaaaccaat

SEQ ID NO: 34084 - DNA, 75 bp, synthetic construct
  source 1..75: mol_type = other DNA
aggtggaactgcgctacgagaaaatcacctggacttacaaggacggcaacatcattcattccgacgcatggagtg

SEQ ID NO: 34085 - DNA, 75 bp, synthetic construct
  source 1..75: mol_type = other DNA
cctgtctggtcgcctcatcttttgaagcagacgccgatgatgccgatgacgccgccgaactggctgacgatgcgg

SEQ ID NO: 34086 - DNA, 75 bp, synthetic construct
  source 1..75: mol_type = other DNA
tgcaggcactctatctgatggcgctggaacctgttgcagaaacaacggctgacccaaattcgtttgggttcaggc

SEQ ID NO: 34087 - DNA, 75 bp, synthetic construct
  source 1..75: mol_type = other DNA
atgagcagcattatcaccatcacagtgtatacgctggatgaactttcctgcccggcacggggaaaagcccgcgac

SEQ ID NO: 34088 - DNA, 75 bp, synthetic construct
  source 1..75: mol_type = other DNA
acatgtgctgtggcagtcgcatgctctggttcgataagaatgacgaatggtcgatatttagcgatatcaggaaag

SEQ ID NO: 34089 - DNA, 75 bp, synthetic construct
  source 1..75: mol_type = other DNA
ctggatagtgaggctttattgtttgtgatgagaacacgttcagaacaaaagacggcattttcaaagcaaagtgtt

SEQ ID NO: 34090 - DNA, 75 bp, synthetic construct
  source 1..75: mol_type = other DNA
tgtcactgtttgtgattggcgtgatgattgttgtcggaaaagtgctggcgggtggtgagcccattaccccgcgcc

SEQ ID NO: 34091 - DNA, 75 bp, synthetic construct
  source 1..75: mol_type = other DNA
cctttatttacgttgcgctttttctccccacaggaaggtattgtcggtgtgcggattgagcattttcagggggcg

SEQ ID NO: 34092 - DNA, 75 bp, synthetic construct
  source 1..75: mol_type = other DNA
cgcgtttatgcgttatctgttcaccgagcagttgcacatcgacgatgacactctcaacaccatgatcaaagagtt

SEQ ID NO: 34093 - DNA, 75 bp, synthetic construct
  source 1..75: mol_type = other DNA
tcttattcatgatttccatgaagatcggccaattacactctctaaagaagagtttgaagaacgttacagcagtaa

SEQ ID NO: 34094 - DNA, 75 bp, synthetic construct
  source 1..75: mol_type = other DNA
acattaaacgtctgcggcaaaaaattggcctgacacagaaagaatgtgccgaaatatttagcatgagtccgcgta

SEQ ID NO: 34095 - DNA, 75 bp, synthetic construct
  source 1..75: mol_type = other DNA
tgtatatgcagagacaattccctgaatttcccccttccgcccttgagtttttgaaatcggagatagcaaaagcat

SEQ ID NO: 34096 - DNA, 75 bp, synthetic construct
  source 1..75: mol_type = other DNA
gaacacataccacccagattgaaatcgtcacggatgaagcgcgttcagcggccctgcacgcggacaacacgatga

SEQ ID NO: 34097 - DNA, 75 bp, synthetic construct
  source 1..75: mol_type = other DNA
acatccggagcagaaactgctggcaccacgcccgctgtttaccgctgcccgggaagtgaaaacggttgttccggt

SEQ ID NO: 34098 - DNA, 75 bp, synthetic construct
  source 1..75: mol_type = other DNA
gtcgatggtgttaatctcgctgaactgtttaataaagtcgcggaaaatggttattcactccgcgtggtggaggaa

SEQ ID NO: 34099 - DNA, 75 bp, synthetic construct
  source 1..75: mol_type = other DNA
ccattgtgtccgggcagggcggtgcagccgggcagcgtgagcgggtggctgaactggtcatgatggcccgggagc

SEQ ID NO: 34100 - DNA, 75 bp, synthetic construct
  source 1..75: mol_type = other DNA
ttaccgaaaaaacacattcagctacggatgcgcctgcaggtatgccatgtgcgcggagatgctgcaactgattaa

SEQ ID NO: 34101 - DNA, 75 bp, synthetic construct
  source 1..75: mol_type = other DNA
atgagtatcgcaaatttcttatcgccggaggcatgaaaccggaagatgtggaaaaaatcgtttcttttatggata

SEQ ID NO: 34102 - DNA, 75 bp, synthetic construct
  source 1..75: mol_type = other DNA
cagaccgaaagggacaaacctcacgtattgccgcgactatccgacataacagagccagggggaaacaccagataa

SEQ ID NO: 34103 - DNA, 75 bp, synthetic construct
  source 1..75: mol_type = other DNA
ctggtcgtggatggttttcatcgtcaattactgggcagggaagcaggtacgggaaaacgcctgaagggctggttg

SEQ ID NO: 34104 - DNA, 75 bp, synthetic construct
  source 1..75: mol_type = other DNA
cgatgaaggtaaaaagcgttggcgcacttatcggacgaactgaagcggcagtgagaacgaaggcacgggagctgg

SEQ ID NO: 34105 - DNA, 75 bp, synthetic construct
  source 1..75: mol_type = other DNA
atgcccgcctgcgggcactgttgcagacgcaacaggacaccatccgccagatggccgaatacaactgcctgctct

SEQ ID NO: 34106 - DNA, 75 bp, synthetic construct
  source 1..75: mol_type = other DNA
ccttactcgccagttcgatactgataccaccactattagccaacaggtggcgtggttgttggggctgtccgcaat

SEQ ID NO: 34107 - DNA, 75 bp, synthetic construct
  source 1..75: mol_type = other DNA
gttgcgctaaagcgtgtgttgatatcggctatcgcggtgcaggtactttcgagttcctgttcgaaaacggcgagt

SEQ ID NO: 34108 - DNA, 75 bp, synthetic construct
  source 1..75: mol_type = other DNA
ctgcagggtgattttcgcctgtcagccaaattaccgtataaagcgatggactgcctgaagcgaaacggactgatt

SEQ ID NO: 34109 - DNA, 75 bp, synthetic construct
  source 1..75: mol_type = other DNA
cgtgacgtcgagaaaaacgtcttaagtcgtgcgctatacaaagtactggcacagcgcgtctttgtttacggtaat

SEQ ID NO: 34110 - DNA, 75 bp, synthetic construct
  source 1..75: mol_type = other DNA
tggaccaggatgaagttctgaggttaaagcagattagcgggctaacggagttatttcagcaggcagatttcagcc

SEQ ID NO: 34111 - DNA, 75 bp, synthetic construct
  source 1..75: mol_type = other DNA
tccatttctgatgatgacctgtgcgcctggtgtacccgtctgctttaccgtcccggagaaatcagtctgtgcaga

SEQ ID NO: 34112 - DNA, 75 bp, synthetic construct
  source 1..75: mol_type = other DNA
gcgtctgtgttgcctctgtggctcgtacggttctgcgtgccgtccgtgacaccgtggtctctgttgcccgcgcgg

SEQ ID NO: 34113 - DNA, 75 bp, synthetic construct
  source 1..75: mol_type = other DNA
catacgttgcagtaccgcacatatcacggaaacggacaacgcctggctgtactcgctgtcacaccagactaatga

SEQ ID NO: 34114 - DNA, 75 bp, synthetic construct
  source 1..75: mol_type = other DNA
ctactcccttcgtattgttgatgaatctgaccggacatcagcagagcgcacgccaccatttgctgccctgaccgg

SEQ ID NO: 34115 - DNA, 75 bp, synthetic construct
  source 1..75: mol_type = other DNA
ccgacagtattaacgtgcaggcgctgaacatggggcgcattgtcgttgacattgatggtgttaatctcgctgaac

SEQ ID NO: 34116 - DNA, 75 bp, synthetic construct
  source 1..75: mol_type = other DNA
gcgtctgtgttgcctctgttgctcacacggttctgcgtgccgtccgtgactcggtggtctctgttgcccgtgcgg

SEQ ID NO: 34117 - DNA, 75 bp, synthetic construct
  source 1..75: mol_type = other DNA
acgcatgccattatgatatttatgagggcacattttttgagcgggtagcagctgtgcaaacacaatggtttaaaa

SEQ ID NO: 34118 - DNA, 75 bp, synthetic construct
  source 1..75: mol_type = other DNA
gagaagaaactgctgaagcagtcactggagaaagatggtttcacccaacccgtggtggtgtcggcggagaagaac

SEQ ID NO: 34119 - DNA, 75 bp, synthetic construct
  source 1..75: mol_type = other DNA
cactactactgcggcaagggttctttcgatgaataccgactgaagacgctgaagcgtaaagcaggctggatctcc

SEQ ID NO: 34120 - DNA, 75 bp, synthetic construct
  source 1..75: mol_type = other DNA
ttatgagttgtgcgccacagtacaggaagcactaaaacccgttacggtgaaggaagcgattaactactggctgga

SEQ ID NO: 34121 - DNA, 75 bp, synthetic construct
  source 1..75: mol_type = other DNA
tatgattgcgtgatgcctgtttatcagtttcggcgtgatttttctctggtacaggcagcgccccgcagtaaacca

SEQ ID NO: 34122 - DNA, 75 bp, synthetic construct
  source 1..75: mol_type = other DNA
acgctggttggcggttgtattgggctaattttatatttgctgtcgcagctcccggccttgttccccctcggcaat

SEQ ID NO: 34123 - DNA, 75 bp, synthetic construct
  source 1..75: mol_type = other DNA
gaattgtggggggatttacgggaatggctgaaagcggatatcaacagtgaagattctcgtgtgaaagaacgtatc

SEQ ID NO: 34124 - DNA, 75 bp, synthetic construct
  source 1..75: mol_type = other DNA
caggcaccggtgaccaacggcgataacgtcgcgacgattgccagcagtatccaggatgccatcaatgccgttccg

SEQ ID NO: 34125 - DNA, 75 bp, synthetic construct
  source 1..75: mol_type = other DNA
ctccggttctcaccggcgcggtggctgcaatggcggatgagccgtttgattatatcggcctgccgttcaacgaca

SEQ ID NO: 34126 - DNA, 75 bp, synthetic construct
  source 1..75: mol_type = other DNA
cggtgtttatccgcaacgatccggcacgtcccacgcagaccggtgagctggtgggtatgctgcctgcgccgaagg

SEQ ID NO: 34127 - DNA, 75 bp, synthetic construct
  source 1..75: mol_type = other DNA
ctgagtggatcgacccgaagtgaagctgttgaaaaactggcactgcattccgttgacgaactgataaaagaatac

SEQ ID NO: 34128 - DNA, 75 bp, synthetic construct
  source 1..75: mol_type = other DNA
gtacaaggccagaggacataacagaatgggacaaattttcaggaaggtactgatcgatgttttccgggaagctca

SEQ ID NO: 34129 - DNA, 75 bp, synthetic construct
  source 1..75: mol_type = other DNA
ttgcagagccaccggataagcgccgtcgtgacctggacaatattctgaaagcaccactggatgcactgacacatg

SEQ ID NO: 34130 - DNA, 75 bp, synthetic construct
  source 1..75: mol_type = other DNA
gtcaaagatgtatttctggactcctcacaactgggccaaatgatgaaaacgtaaataataaaccgtcaagtgata

SEQ ID NO: 34131 - DNA, 75 bp, synthetic construct
  source 1..75: mol_type = other DNA
atgaagcagcgcattacagtcaccgtcgacagtgacagctataagttactcaaagcatatgatgtcaatatctcc

SEQ ID NO: 34132 - DNA, 75 bp, synthetic construct
  source 1..75: mol_type = other DNA
ttgcaggcctgctgctggtgatcagccacgcctttgccgccacggttcaggacgaacacggcacgtttacactcg

SEQ ID NO: 34133 - DNA, 75 bp, synthetic construct
  source 1..75: mol_type = other DNA
atgatgagtatcgcgcaggtcagatcggccggaagtgccggtaactattataccgacaaggataattactatgtg

SEQ ID NO: 34134 - DNA, 75 bp, synthetic construct
  source 1..75: mol_type = other DNA
gacttgttgctacaaaggcaggggatattaccgtttataactatgatggtgaaactcgggaatatatttccactt

SEQ ID NO: 34135 - DNA, 75 bp, synthetic construct
  source 1..75: mol_type = other DNA
atggttctaaaaaatgttgtacgtgaaacggatgaagttggtaaaggtcagatccggatgagaactgtttttgaa

SEQ ID NO: 34136 - DNA, 75 bp, synthetic construct
  source 1..75: mol_type = other DNA
ggtctcagaatctgaagcacagagtgccggtcgcagactggcgacattagaacaaaagtggctcaggatgcaggc

SEQ ID NO: 34137 - DNA, 75 bp, synthetic construct
  source 1..75: mol_type = other DNA
ataacgaggcgaacaaacctaaatcccggggtggaaaatcagagacggaaaaagcggaagacagtttttcccggc

SEQ ID NO: 34138 - DNA, 75 bp, synthetic construct
  source 1..75: mol_type = other DNA
cgtctggcggccacacaggaacgcctgaacagaaatattgctgccagaagcgccgcccagaatgcgctgaacagt

SEQ ID NO: 34139 - DNA, 75 bp, synthetic construct
  source 1..75: mol_type = other DNA
tgtatttggtacacgactgcgccgtgctgaagatgcgtttccgccggtgattggcgttgcagctcacaaaggtgg

SEQ ID NO: 34140 - DNA, 75 bp, synthetic construct
  source 1..75: mol_type = other DNA
cgggaggtcatgaatgcagagcggctgttcagtacggcgcgggagctgcgggacgtggcggcaggccgtgccgtt

SEQ ID NO: 34141 - DNA, 75 bp, synthetic construct
  source 1..75: mol_type = other DNA
gatggccatgttaggtggcgataagcgcctgattgatgcacataaccaggccgtggactttgctgttcgtcaggt

SEQ ID NO: 34142 - DNA, 75 bp, synthetic construct
  source 1..75: mol_type = other DNA
ctgccgggtgaaaaagctccagaacaattgatatttgagcattgtgagcacctttataataccgacgactcttcc

SEQ ID NO: 34143 - DNA, 75 bp, synthetic construct
  source 1..75: mol_type = other DNA
atagccttgcccccttctggccatcttatcagagcaaagtcatcggcgttcttgagcgtgcgctgcgtgagcagt

SEQ ID NO: 34144 - DNA, 75 bp, synthetic construct
  source 1..75: mol_type = other DNA
tggtttgtcgtaaatggtcgacacgcgttggggcgttatgggtgactgtaacggcagattttgagcaggtggtga

SEQ ID NO: 34145 - DNA, 75 bp, synthetic construct
  source 1..75: mol_type = other DNA
gtttgatgaaatcaatattgtgcgcggtcaggtcgttcctggtggtcggttgggcgtgaagatttacaaaattga

SEQ ID NO: 34146 - DNA, 75 bp, synthetic construct
  source 1..75: mol_type = other DNA
ccgtcagcgaactggcggagtccattaagggcgttggcctgttgcagaatctggtcgtgcataccctgcctggtg

SEQ ID NO: 34147 - DNA, 75 bp, synthetic construct
  source 1..75: mol_type = other DNA
tgctcagtttctgcaccgcgtgcagcatccacggcgttcagacccgcgagtgtggtcacacgtcacgcagcccgc

SEQ ID NO: 34148 - DNA, 75 bp, synthetic construct
  source 1..75: mol_type = other DNA
cgctgggtgcctggctggatgtgtacaccacgtccacaggcagagacggaaaccacggagtaccgtgacgaccag

SEQ ID NO: 34149 - DNA, 75 bp, synthetic construct
  source 1..75: mol_type = other DNA
ccgcgctggtcatgcagaagtacagccgccagcaggcgagggaggcagagcagaaagcccgtgcgtaccaggcgc

SEQ ID NO: 34150 - DNA, 75 bp, synthetic construct
  source 1..75: mol_type = other DNA
gaactggcgactgccgcatcgatgaccgagaacggtcatcgtcgggatatgcaccctgccgaacagattgccgga

SEQ ID NO: 34151 - DNA, 75 bp, synthetic construct
  source 1..75: mol_type = other DNA
caggaaggcaaaacacctgcacaaatcggtgatttgctgggctattcaccccgccacgttcagcgaatgctgaaa

SEQ ID NO: 34152 - DNA, 75 bp, synthetic construct
  source 1..75: mol_type = other DNA
tcgacatcaaattaggcgtcaataaattccatgttgatgagggccacccgcatatcattctggcggcaaatcccg

SEQ ID NO: 34153 - DNA, 75 bp, synthetic construct
  source 1..75: mol_type = other DNA
ccctcaagggggaggccgcatatctgcacaagctcgcggtgcgacggacacatgcgggccggggtgtcagctccg

SEQ ID NO: 34154 - DNA, 75 bp, synthetic construct
  source 1..75: mol_type = other DNA
gccgttcagggttgtcggacttgtgcaagttgccaggaggagatcgaacttaagaacaaacaatggggactgtga

SEQ ID NO: 34155 - DNA, 75 bp, synthetic construct
  source 1..75: mol_type = other DNA
gcgcactgcttgccggtgaggaaaacgccaggctgcgtgcaactcactggttacatgagaggggcctgaaagtat

SEQ ID NO: 34156 - DNA, 75 bp, synthetic construct
  source 1..75: mol_type = other DNA
caggatatgccattctggcaggttatcgcggaagccagtatggcggcaggggaggctggtcatgctgtccgtgag

SEQ ID NO: 34157 - DNA, 75 bp, synthetic construct
  source 1..75: mol_type = other DNA
gtaataaatatgacgtgttcacatctgaccgatattatccaggcgatctccctctgattgatggcgatatcccaa

SEQ ID NO: 34158 - DNA, 75 bp, synthetic construct
  source 1..75: mol_type = other DNA
tttagcggctgtatactggagacggtaagcaggcagagtactaaagatattcatggatgggtaagtgatgaacgg

SEQ ID NO: 34159 - DNA, 75 bp, synthetic construct
  source 1..75: mol_type = other DNA
acgcggaaaaatataacgagtgggtgaaaaaattttctgagcagatttttaaaattactggcgacgagaatgcgg

SEQ ID NO: 34160 - DNA, 75 bp, synthetic construct
  source 1..75: mol_type = other DNA
tttaaaagtttgatgctcaaagaattaaacttcgtaatgaattacgtgttcactcttgagacttggtattcattt

SEQ ID NO: 34161 - DNA, 75 bp, synthetic construct
  source 1..75: mol_type = other DNA
aggcgtaaaattctcacaccggggatccaagatgcgaacaccacatcttgtgccactcagcaaacaggttgtagc

SEQ ID NO: 34162 - DNA, 75 bp, synthetic construct
  source 1..75: mol_type = other DNA
cgcccgtcgtggaatgcacagaccttctgagaacagcgacgcttgacgtcacaaaagggggaaagatgagcggca

SEQ ID NO: 34163 - DNA, 75 bp, synthetic construct
  source 1..75: mol_type = other DNA
aagcaattttcaaattgcttgacttaaagtttactaaacatacaaatgcatgggtgccttttattttgtctggcg

SEQ ID NO: 34164 - DNA, 75 bp, synthetic construct
  source 1..75: mol_type = other DNA
ttgctctgggttggttggctccaagctggcaaacttgaccggatacagtgataaacctctggatgctattggtgc

SEQ ID NO: 34165 - DNA, 75 bp, synthetic construct
  source 1..75: mol_type = other DNA
agttgtgtgtgaattactggggcgtaactacaccattagctatccgttgatggcgtttcagtccggaaaaatgtt

SEQ ID NO: 34166 - DNA, 75 bp, synthetic construct
  source 1..75: mol_type = other DNA
cacctcaaacggcattaccgtgcatacgcataaacacggtggcgttaaaggtggcagcgattcgacaggaggccc

SEQ ID NO: 34167 - DNA, 75 bp, synthetic construct
  source 1..75: mol_type = other DNA
gatgaggttggacagcgcttgctgagtattccctgcgttggaacgctgactgccagtactatttcaactgagatt

SEQ ID NO: 34168 - DNA, 75 bp, synthetic construct
  source 1..75: mol_type = other DNA
ggtgttgatgagtagtggtctggctatcatgctcactgaacagctatggttgttttacctgggctgtgcagtgct

SEQ ID NO: 34169 - DNA, 75 bp, synthetic construct
  source 1..75: mol_type = other DNA
ccgtaattttagaggcgcagaatgtgtggataacctacaaaggaaagctaccaggaagaattactggttctctga

SEQ ID NO: 34170 - DNA, 75 bp, synthetic construct
  source 1..75: mol_type = other DNA
attgtatacgacgaaaataatattattgttgccataaccaaagatgcctcaacgcttaatcccgaaggctttagt

SEQ ID NO: 34171 - DNA, 75 bp, synthetic construct
  source 1..75: mol_type = other DNA
gcggcaatgattctgtcgccctcggtgtaggggctacagcagcgaccgacaattctgtcgctatcggcgcaggat

SEQ ID NO: 34172 - DNA, 75 bp, synthetic construct
  source 1..75: mol_type = other DNA
cagaagcaaagatgtattttcaaggtatgccacaggttgatttctcaagccctgaagcactgcaacaatcaatgc

SEQ ID NO: 34173 - DNA, 75 bp, synthetic construct
  source 1..75: mol_type = other DNA
tggccgcgattgccgcccttgtagactcgtcgcctgacgcactgaatacgctgaacgagctggcggcggcgctgg

SEQ ID NO: 34174 - DNA, 75 bp, synthetic construct
  source 1..75: mol_type = other DNA
aaaagcggcagggagatactgcccgtctctgtcgtcgtcctaatgcgcagcagaatcgcatccagttttttgaac

SEQ ID NO: 34175 - DNA, 75 bp, synthetic construct
  source 1..75: mol_type = other DNA
aaccgttccggtggtgttctgatgagccggaatgcactgaatgtcagtactgcgaccctgagtaaccagggcacg

SEQ ID NO: 34176 - DNA, 75 bp, synthetic construct
  source 1..75: mol_type = other DNA
atggcgcgggcctggacggcacccggagcgatgccgtatccattattgcccgtgcaacggaagtgaatgccgcgc

SEQ ID NO: 34177 - DNA, 75 bp, synthetic construct
  source 1..75: mol_type = other DNA
atccgggcagattgtacagaacggtggtgaactgactgccgggcagaacgccatgctcagtgcacagcacctgaa

SEQ ID NO: 34178 - DNA, 75 bp, synthetic construct
  source 1..75: mol_type = other DNA
tgattaacggtaagcaaaagagctggctggcgcattgtactgatgcagaggcgttatgtattgatcgggtcataa

SEQ ID NO: 34179 - DNA, 75 bp, synthetic construct
  source 1..75: mol_type = other DNA
aagctcacccacagcgggaaaagcagtgccccgtcgctcagcctcagtgcgccggaactgaccagcagcggcgta

SEQ ID NO: 34180 - DNA, 75 bp, synthetic construct
  source 1..75: mol_type = other DNA
aatatcctgttctggccagagtctacccgaccctccgtcttcccgatttacgcggtgagtttatccgtggatggg

SEQ ID NO: 34181 - DNA, 75 bp, synthetic construct
  source 1..75: mol_type = other DNA
tagaccgcgcatttagtgcccttgcttacgctgaaggtatgtacgaaatattgcaaatgtggctggaaacatttg

SEQ ID NO: 34182 - DNA, 75 bp, synthetic construct
  source 1..75: mol_type = other DNA
aggttgttgatgaaatctgcgattttgtggcgaatcagcaggcggttttcctcggcggtcactacatctttcagg

SEQ ID NO: 34183 - DNA, 75 bp, synthetic construct
  source 1..75: mol_type = other DNA
actctccttgaacctgtaataacagagttgcaggaaatagacttattgcacgacagatataacgaacagcacacc

SEQ ID NO: 34184 - DNA, 75 bp, synthetic construct
  source 1..75: mol_type = other DNA
ctggcacctggccatgcctacgggatgtttatggaacgttttaacgagttatcggagttacgcaaatgcgcatga

SEQ ID NO: 34185 - DNA, 75 bp, synthetic construct
  source 1..75: mol_type = other DNA
catgctgagagcgagtgggtatttttatcgcgtaaggggaatccgctttctcggcaacagttttaccatattatc

SEQ ID NO: 34186 - DNA, 75 bp, synthetic construct
  source 1..75: mol_type = other DNA
ggtggcgacggtggcgttcggcatgggcatcaacaagcctaacgttcgcttcgtggtgcattttgatattccgcg

SEQ ID NO: 34187 - DNA, 75 bp, synthetic construct
  source 1..75: mol_type = other DNA
gtaatattgccaggagcttaggtgttgatattgctgatctctttacctcagacctcaaaagtaatactgtatgta

SEQ ID NO: 34188 - DNA, 75 bp, synthetic construct
  source 1..75: mol_type = other DNA
accgtgacgccggtgcgtctgcgccgggcgattaaaaccgcgatggcggagaccaacgccgagttaaccgactgg

SEQ ID NO: 34189 - DNA, 75 bp, synthetic construct
  source 1..75: mol_type = other DNA
gaactggcagaaatgtgaggacaggagtctgacgctggagcgttttgaggggcatacctgcattctggcgtttga

SEQ ID NO: 34190 - DNA, 75 bp, synthetic construct
  source 1..75: mol_type = other DNA
ccaaggttatctgccagggctttaccggtagccaggggactttccactcagaacaggccattgcatacggcacta

SEQ ID NO: 34191 - DNA, 75 bp, synthetic construct
  source 1..75: mol_type = other DNA
tgtcaccatcatggatcccgatccggattcagcggtgatttctcgtttttttgcatccctgaaagccaaaattca

SEQ ID NO: 34192 - DNA, 75 bp, synthetic construct
  source 1..75: mol_type = other DNA
gctgtttggtaaagataagcgccagaaagacccgcatgctatttctgccgaggtgacctatacgccagtgcctct

SEQ ID NO: 34193 - DNA, 75 bp, synthetic construct
  source 1..75: mol_type = other DNA
tcattcttctgggcggatttgtgcttctgctccgtcaggctggtcgggcagggcatccacttctgcaatcgttgc

SEQ ID NO: 34194 - DNA, 75 bp, synthetic construct
  source 1..75: mol_type = other DNA
aattgcatgcggcaggtatacggaccggtgatgcagagcgaatactgtccggcggtgaatactggcaacgtcaga

SEQ ID NO: 34195 - DNA, 75 bp, synthetic construct
  source 1..75: mol_type = other DNA
cagagtggcccccgaccggaagccgggcagccgggaatggtggcagttatttcgtctggtatcacagtggcactg

SEQ ID NO: 34196 - DNA, 75 bp, synthetic construct
  source 1..75: mol_type = other DNA
ggagaaaacgttctgctgttcggagccagcgggttggggaaaagccatctggcggcagcgatcgtggatggcgta

SEQ ID NO: 34197 - DNA, 75 bp, synthetic construct
  source 1..75: mol_type = other DNA
cttttaaagagagcttaagtgcagaaaaatgttgtcaggcaattaaagccgggttttcgaccctctttcccgatg

SEQ ID NO: 34198 - DNA, 75 bp, synthetic construct
  source 1..75: mol_type = other DNA
attcaaagaatatctatcttgagaaacaggcttttcacgatctgataatatctctaagagaaaaaagtgaaatat

SEQ ID NO: 34199 - DNA, 75 bp, synthetic construct
  source 1..75: mol_type = other DNA
ttttttaagggtgaaatcagcgaaatgcagattctttatccggcacgttttcaatctagccaaaaccagaatggg

SEQ ID NO: 34200 - DNA, 75 bp, synthetic construct
  source 1..75: mol_type = other DNA
tacgcccaaattatggtggggcgtgcagggccaacttcggttgggccgggttctatgttgaccggtatttccacc

SEQ ID NO: 34201 - DNA, 75 bp, synthetic construct
  source 1..75: mol_type = other DNA
cggacggcaatttccccaacggtattcctaacccgctgctgccggaatgccgcgacgacacccgcaatgcggtca

SEQ ID NO: 34202 - DNA, 75 bp, synthetic construct
  source 1..75: mol_type = other DNA
gttcggcggcgtcatcggcatcatcggcgtctgcttcaaaagatgaggcgaccagacaggcgtcagcagcgaagg

SEQ ID NO: 34203 - DNA, 75 bp, synthetic construct
  source 1..75: mol_type = other DNA
aacttgaagagagcccctttaccataccggtgtcggcacaggcatggcaggacgaaatgcgctatgcgggcgtct

SEQ ID NO: 34204 - DNA, 75 bp, synthetic construct
  source 1..75: mol_type = other DNA
tggcgaagatcctctgtgtaatcgtcggcatttcatttttagtcattctggttgccattttcttttccaccgctt

SEQ ID NO: 34205 - DNA, 75 bp, synthetic construct
  source 1..75: mol_type = other DNA
caacctcaaacgctatggtgccgagtcgcggaacctgattttgtctgccatttgcggccaggtcgcaacaccgtt

SEQ ID NO: 34206 - DNA, 75 bp, synthetic construct
  source 1..75: mol_type = other DNA
tgggataacccggcaaactttgtacaggcatatttcccctgttggtcaactgcgggcggacgggatcaagctgct

SEQ ID NO: 34207 - DNA, 75 bp, synthetic construct
  source 1..75: mol_type = other DNA
ctggttgttccactgattcaccatatccagaagctgactgaaagagttgatgaacttgagtcagaattaaagttg

SEQ ID NO: 34208 - DNA, 75 bp, synthetic construct
  source 1..75: mol_type = other DNA
catttcattttcactaatgctggttgccattttcttttccaccgcctggcgagtcctgacgttatcgggactggt

SEQ ID NO: 34209 - DNA, 75 bp, synthetic construct
  source 1..75: mol_type = other DNA
ggtgatgtcaccacacctgtggtggtgaagccgtcggatggagaaggcacagttatcagcaccaccagcgaaccg

SEQ ID NO: 34210 - DNA, 75 bp, synthetic construct
  source 1..75: mol_type = other DNA
tgctggtcattaaacgcgtattcaggctgaccctgcgggctgcgcagggctttattgattccattttttctctga

SEQ ID NO: 34211 - DNA, 75 bp, synthetic construct
  source 1..75: mol_type = other DNA
ccgccatgtttgatgccatggtggaaaaataccgttctgacctggcgggagtatccggtcagtgcgctggtgctt

SEQ ID NO: 34212 - DNA, 75 bp, synthetic construct
  source 1..75: mol_type = other DNA
ctgtgtacttgtcggcatttcattttcactaatgctggttgctctttttctttccatggcctggatggcgttgac

SEQ ID NO: 34213 - DNA, 75 bp, synthetic construct
  source 1..75: mol_type = other DNA
ttctgtatttttgtttttctgccctgactgacctgcagaaaaccgatgaaagaaaaaatgatgaaaggaatgaag

SEQ ID NO: 34214 - DNA, 75 bp, synthetic construct
  source 1..75: mol_type = other DNA
taccgtcagcccggataacggttttacaaccagtctggagcttgaagtgaggattgatgatttcgaaatggaatg

SEQ ID NO: 34215 - DNA, 75 bp, synthetic construct
  source 1..75: mol_type = other DNA
cacatcctgtcaccactccccggtagcgagttttccgctatgggcgatgttgtggggttgagcaccgaagacata

SEQ ID NO: 34216 - DNA, 75 bp, synthetic construct
  source 1..75: mol_type = other DNA
gcaggacaatatcgactgcgaatcggggattatctttgacaacgatgaatataaaacggattcggcagcactgtt

SEQ ID NO: 34217 - DNA, 75 bp, synthetic construct
  source 1..75: mol_type = other DNA
cagaactttttggtggggaaggttatgaataccaggagctggcattactggcgggagtgacaactaaaaactggt

SEQ ID NO: 34218 - DNA, 75 bp, synthetic construct
  source 1..75: mol_type = other DNA
agttttcgacatcatcgtggcggcgggctgttctgtctcttgaagaacatcataaagcctggttgttgtggtgtt

SEQ ID NO: 34219 - DNA, 75 bp, synthetic construct
  source 1..75: mol_type = other DNA
ctcgatacagaatccttgatttgcaccgtgaaaatgagatcgcaacaaaaagcgaccttttcacgacgagatatt

SEQ ID NO: 34220 - DNA, 75 bp, synthetic construct
  source 1..75: mol_type = other DNA
attgataaaagaagaaaatctcaatgaagatgcagcaaaacgctatattcgcacgtctttaaaacgcgaatacgc

SEQ ID NO: 34221 - DNA, 75 bp, synthetic construct
  source 1..75: mol_type = other DNA
aaacccggagaagctcattcatcaggctggaccctggctgcaaaacgtgggcgggatgcaggaggcggaaaatga

SEQ ID NO: 34222 - DNA, 75 bp, synthetic construct
  source 1..75: mol_type = other DNA
ccgatgttctgcagaaggcggtgaatgatgctgtcgggaaaataccggtaccggcgaacggtaaaagtattactc

SEQ ID NO: 34223 - DNA, 75 bp, synthetic construct
  source 1..75: mol_type = other DNA
tcgccagttctctattaccattgttgcggcgatggtgctgtcagtactggtagcgatgatcctcactccggctct

SEQ ID NO: 34224 - DNA, 75 bp, synthetic construct
  source 1..75: mol_type = other DNA
atgcaggtgagccagtggacaggccagaacggcgaaacgcggcaggggtggcaggttatcgctgacagcgtaatc

SEQ ID NO: 34225 - DNA, 75 bp, synthetic construct
  source 1..75: mol_type = other DNA
atgtctgtatacaaaaatgcaaaatcgcaaatgacaacgatcagggttccccacgatgttatggagggcatggaa

SEQ ID NO: 34226 - DNA, 75 bp, synthetic construct
  source 1..75: mol_type = other DNA
atcagcaccggggtacaggatatgcagcaggtgctggcgcaactccgcgtggaaaatcaacagcgaaatcaggac

SEQ ID NO: 34227 - DNA, 75 bp, synthetic construct
  source 1..75: mol_type = other DNA
gcgaaatccgcgttccacataaaggtgatattgtcgggcaggttattgagggagcgtatgaagtgctcggtgtct

SEQ ID NO: 34228 - DNA, 75 bp, synthetic construct
  source 1..75: mol_type = other DNA
accgtgctggaaagcctgcagcgggaaggttttcagccattcttcgcctgccagacccgcgtacgtgacccgggc

SEQ ID NO: 34229 - DNA, 75 bp, synthetic construct
  source 1..75: mol_type = other DNA
tcagagtcgggttcgtgatttggggcgtcgcgaatacagtaaacatatgttacgtcttcgcagggaagggcatat

SEQ ID NO: 34230 - DNA, 75 bp, synthetic construct
  source 1..75: mol_type = other DNA
gtttggcgctgcatttgtctgggtgattatcggtgttatgcctgtcgctgtagcaaaaatggcgtggcgttttgt

SEQ ID NO: 34231 - DNA, 75 bp, synthetic construct
  source 1..75: mol_type = other DNA
aaggctttcagcccttcttcgcctgccagacccgcgtacgtgacccggaccgccggggatacaccaaacacatgc

SEQ ID NO: 34232 - DNA, 75 bp, synthetic construct
  source 1..75: mol_type = other DNA
aaggtttccagccgttctttgcctgtcagagtcgggttcgtgatttgggacgccgcgaatacagtaaacatatgt

SEQ ID NO: 34233 - DNA, 75 bp, synthetic construct
  source 1..75: mol_type = other DNA
tcgtcttcgtaaagacaagaaaagagaaaaggtaatgatcaaccttgctgctcttaccgttgatgcacttactga

SEQ ID NO: 34234 - DNA, 75 bp, synthetic construct
  source 1..75: mol_type = other DNA
atcagcgccggggtacaggatatgcagcaggtgctggctcaactccgcgcggaaaatcagcaacgcaatcaggac

SEQ ID NO: 34235 - DNA, 75 bp, synthetic construct
  source 1..75: mol_type = other DNA
cggcagaagcacagcgccagtcactgattgatgctgcaatggcttccattagtctgattcagctgaaattacagg

SEQ ID NO: 34236 - DNA, 75 bp, synthetic construct
  source 1..75: mol_type = other DNA
gagaattgcgtgttccacaccggggaaatgtggtggagaaagttattgaaggggcttacgaggtggtgggcgtgt

SEQ ID NO: 34237 - DNA, 75 bp, synthetic construct
  source 1..75: mol_type = other DNA
agtctgattcaactgaaattgcaggccggacggaaactgacgcaggcagaaacaacccgacttaacgccgtgctg

SEQ ID NO: 34238 - DNA, 75 bp, synthetic construct
  source 1..75: mol_type = other DNA
ggagaagacagtgagattacccccctgccggcacgcaccactgaccgcgatattctgcgggcaattatggaaggg

SEQ ID NO: 34239 - DNA, 75 bp, synthetic construct
  source 1..75: mol_type = other DNA
aatacggcattatcagccgtactatgatgaatattcgttcattgcgtgtttttgcccgtgaagttgattttgagc

SEQ ID NO: 34240 - DNA, 75 bp, synthetic construct
  source 1..75: mol_type = other DNA
gggatgccgatccgtttctatcaggggtcaaaggttctggtatcgaaaaacgacctgacggcaaccacagaagag

SEQ ID NO: 34241 - DNA, 75 bp, synthetic construct
  source 1..75: mol_type = other DNA
tgtttaattacttcatcagaaagggcgctgtgcagcaagaaacagaagacggaatttggttcgtaatgaatgtaa

SEQ ID NO: 34242 - DNA, 75 bp, synthetic construct
  source 1..75: mol_type = other DNA
taataagctttttctgcttctgccggaggagtatggcccagcctttccagcaatcgtcgattgttataccagtcc

SEQ ID NO: 34243 - DNA, 75 bp, synthetic construct
  source 1..75: mol_type = other DNA
tagcgcagcagttaagcgccatcgtggacaaaagcttctcagactccagctacggcttccggccggggcgcaacg

SEQ ID NO: 34244 - DNA, 75 bp, synthetic construct
  source 1..75: mol_type = other DNA
cagcatcagtattgaaggcagggatatcaccactgtgctggacaaccgcctgatggggctgacgctgacggataa

SEQ ID NO: 34245 - DNA, 75 bp, synthetic construct
  source 1..75: mol_type = other DNA
cggaaacgccggtcaaagtgtcaggctttaagcgcgtcatagacgagcaggactggacaatcactaaggtgacac

SEQ ID NO: 34246 - DNA, 75 bp, synthetic construct
  source 1..75: mol_type = other DNA
tgatggggcttacgctgacggataaccggggctttgaagcagaccaactggagctggagctggacgacgccgacg

SEQ ID NO: 34247 - DNA, 75 bp, synthetic construct
  source 1..75: mol_type = other DNA
aaagcggcaatctgttattcatcatgccaggtggtggcgtgaacgcacagggccagccgttgccctcgttcgcca

SEQ ID NO: 34248 - DNA, 75 bp, synthetic construct
  source 1..75: mol_type = other DNA
gttgcatcattctcgctacaactggcggaagggcgggcagatctctacacagaaatgcctgtgaaggtcagtggc

SEQ ID NO: 34249 - DNA, 75 bp, synthetic construct
  source 1..75: mol_type = other DNA
aacaccgaaggtgatgacatctccggctcatacgttaagtacaaagaccatcaggaagtggttgccgctcttgag

SEQ ID NO: 34250 - DNA, 75 bp, synthetic construct
  source 1..75: mol_type = other DNA
accaggagctggtgaaactggttactgaacgtagcagtcaacctctgcatgatgttgacctggacagttattcat

SEQ ID NO: 34251 - DNA, 75 bp, synthetic construct
  source 1..75: mol_type = other DNA
ctgatgtattaatatttgaaccaaaagtatttggggatgagcgtggtttttttatggaaagcttcaatcagaaag

SEQ ID NO: 34252 - DNA, 75 bp, synthetic construct
  source 1..75: mol_type = other DNA
ggctggcccggtgggggcaaccggacctcagggaccgaagggcgacccgggggagacacaaatccgttttcgtct

SEQ ID NO: 34253 - DNA, 75 bp, synthetic construct
  source 1..75: mol_type = other DNA
gaaaacctcagaaacgaatgcagctaacagcgcacaggcggcagcgtcctcgcagactgcatcggcaaactccgc

SEQ ID NO: 34254 - DNA, 75 bp, synthetic construct
  source 1..75: mol_type = other DNA
cggatgttttaatttttgaaccaaaagtatatggagatgaacgtggcttttttatggaaagctttaatcaaaaag

SEQ ID NO: 34255 - DNA, 75 bp, synthetic construct
  source 1..75: mol_type = other DNA
atgtacggaacatgcgaaacgctctgccgtgagctggcagcgcagtatccgggaaacacaccgctgatgctggtt

SEQ ID NO: 34256 - DNA, 75 bp, synthetic construct
  source 1..75: mol_type = other DNA
tccagaatcacgggatattgaggatgacaatgacaatatggatgacgtatctctcgcggaagacttcgggttcaa

SEQ ID NO: 34257 - DNA, 75 bp, synthetic construct
  source 1..75: mol_type = other DNA
gataacagacgctctctggggcattgggagggcgatttagtctcaggtacaaaaaactctcatatagccacactt

SEQ ID NO: 34258 - DNA, 75 bp, synthetic construct
  source 1..75: mol_type = other DNA
tcattatcgcataagggagttgtcaggggactacattttcaagtaaatccaaaggaacaggcaaaattggtaaga

SEQ ID NO: 34259 - DNA, 75 bp, synthetic construct
  source 1..75: mol_type = other DNA
atgttggaaatttgccattgttatcagaaaaagaccaagctcatcatggaattgaatatcacgctaacgaaaatc

SEQ ID NO: 34260 - DNA, 75 bp, synthetic construct
  source 1..75: mol_type = other DNA
gcatccgcaacctgctaaagtcacgccagatcggcgcgaccttctattttgcccgtgaagccctgattgacgccc

SEQ ID NO: 34261 - DNA, 75 bp, synthetic construct
  source 1..75: mol_type = other DNA
ggtgagatttcattcccctttttctccaggttcgtcgaatattaatgcgagaacgacttttaatatgagtcatat

SEQ ID NO: 34262 - DNA, 75 bp, synthetic construct
  source 1..75: mol_type = other DNA
tgaagcggctgaaacaggtaatgctgcctttgccctgtggcagccctacagttgctgcaagaaacggggacagac

SEQ ID NO: 34263 - DNA, 75 bp, synthetic construct
  source 1..75: mol_type = other DNA
agcaatcgcacctacactcggtcaaaactggctgtcaggtcagatgaacaactacaacaatctggcaaatatcgg

SEQ ID NO: 34264 - DNA, 75 bp, synthetic construct
  source 1..75: mol_type = other DNA
gcagcagcagaggcaacgggtggattaggctctacagcaacaggaaaccagttagcagcaatcgcacctacactc

SEQ ID NO: 34265 - DNA, 75 bp, synthetic construct
  source 1..75: mol_type = other DNA
ggcatcaggggcgatgattggctctgtggtgccaggaataggtacggctgttggcgctattggtggcggcattat

SEQ ID NO: 34266 - DNA, 75 bp, synthetic construct
  source 1..75: mol_type = other DNA
cgcgtcgagtaacgaaaccggctatttaacgcaaaaattctcccgcgcgctgggtatgctcgcggtcgacaacca

SEQ ID NO: 34267 - DNA, 75 bp, synthetic construct
  source 1..75: mol_type = other DNA
tctggaagcattcagggcaattgaggcagcgttagtgaagcacgataagaatacgaaggattattccctggtggt

SEQ ID NO: 34268 - DNA, 75 bp, synthetic construct
  source 1..75: mol_type = other DNA
ggatgagttacgggcagagattgcatttgctcagaagggcgaaaaaccatggccttatcgttcctgctggatgcg

SEQ ID NO: 34269 - DNA, 75 bp, synthetic construct
  source 1..75: mol_type = other DNA
tccgtggccttcagccacaccgcctactggctggctgaaatgcaacggtgcggctttttctgctgaagaataccc

SEQ ID NO: 34270 - DNA, 75 bp, synthetic construct
  source 1..75: mol_type = other DNA
gcgaagccggacctcagggacctcgtggggagccaggcccggcgggcagcgcagcaaatgtggcagatgcgacga

SEQ ID NO: 34271 - DNA, 75 bp, synthetic construct
  source 1..75: mol_type = other DNA
tatgcgctgggaaggtgtcagcgatggcctgaaggtgactgccgggagtgttattcagcgcgatgacctggttca

SEQ ID NO: 34272 - DNA, 75 bp, synthetic construct
  source 1..75: mol_type = other DNA
cgcagacctgcaaaatcagcagtggcagacgatcatgaaaaaccttgctccgttcacgcctcttgcggagcagta

SEQ ID NO: 34273 - DNA, 75 bp, synthetic construct
  source 1..75: mol_type = other DNA
atcatctgctcaaaaccatcagcggcataggtgatataccagtgagtcggatgaacaaaagggctttgatggatt

SEQ ID NO: 34274 - DNA, 75 bp, synthetic construct
  source 1..75: mol_type = other DNA
tgtttaccgtgctgaaaaaaataggtctttgggatgcagaacatccagtaaggggaatttctattctttatgtat

SEQ ID NO: 34275 - DNA, 75 bp, synthetic construct
  source 1..75: mol_type = other DNA
acgcagtctttcccagaatgcactcagccacatgtggtacagcgaaatcagtgaatacctcatcagcagggggaa

SEQ ID NO: 34276 - DNA, 75 bp, synthetic construct
  source 1..75: mol_type = other DNA
gacgttatgaagtggatatcaggcctcgcggtcgcgatggaaaacgcatccgcaggaaatttgaaagaaaagctg

SEQ ID NO: 34277 - DNA, 75 bp, synthetic construct
  source 1..75: mol_type = other DNA
tcaaagcggcgcagagtgattgctgtatgcaccctggttcagacctggtagggaaggttgaaatgactgagtggt

SEQ ID NO: 34278 - DNA, 75 bp, synthetic construct
  source 1..75: mol_type = other DNA
gctgaccgccaaaaaagaacaggagtccgagatgagcagcacgggggcaatgctcggactcgaccccagcagccg

SEQ ID NO: 34279 - DNA, 75 bp, synthetic construct
  source 1..75: mol_type = other DNA
gtcctgtgcacaggcaggcgatatcctgctgtgctgctttggttcatcggtgccgaatcatgccgccatttactg

SEQ ID NO: 34280 - DNA, 75 bp, synthetic construct
  source 1..75: mol_type = other DNA
gaacaactgagtaaacgggagaggtattccgaaaaatggcaacgacgaacgcattctgtctggcgtcaccgccac

SEQ ID NO: 34281 - DNA, 75 bp, synthetic construct
  source 1..75: mol_type = other DNA
gtgccctgtcgctgcagatgccgggattccgccgtcagatgaacgaaggctggtaccagatacgtattcgcggtg

SEQ ID NO: 34282 - DNA, 75 bp, synthetic construct
  source 1..75: mol_type = other DNA
tgccttatggtgaaatgctggttggttcacgacggatatcccaggacatcagcacccgtgatgagggcggagacg

SEQ ID NO: 34283 - DNA, 75 bp, synthetic construct
  source 1..75: mol_type = other DNA
taaaaaaccgaactccgcgctgcgtaaagtatgccgtgttcgtctgactaacggtttcgaagtgacttcctacat

SEQ ID NO: 34284 - DNA, 75 bp, synthetic construct
  source 1..75: mol_type = other DNA
gtttatgtactcgcctaacggcaaaaaagacgggcttcagattattcctctgtcagaagtcgcggcaaaggatga

SEQ ID NO: 34285 - DNA, 75 bp, synthetic construct
  source 1..75: mol_type = other DNA
aaggcagcatttttcatctgatggaacctgacatcaaccaggagatctacggcctgccaggttatctttctgcca

SEQ ID NO: 34286 - DNA, 75 bp, synthetic construct
  source 1..75: mol_type = other DNA
cgctggtatgagccgccagtaagctttgacggactggcgcgcaccttccgcgccgccgtgcatcacagttcacca

SEQ ID NO: 34287 - DNA, 75 bp, synthetic construct
  source 1..75: mol_type = other DNA
aaaatagacaacgattacgagacaaagctgatccagacagtccggggcgtgggctacatgctggaggtcccggat

SEQ ID NO: 34288 - DNA, 75 bp, synthetic construct
  source 1..75: mol_type = other DNA
atttctgaatatcaagaacgtgagccgggacgacatgatggcggcacaccgtgtgccgccgcaaatgatggggat

SEQ ID NO: 34289 - DNA, 75 bp, synthetic construct
  source 1..75: mol_type = other DNA
cgctggtatgagccgcccgtcagctttgacggactggcacgaaccttccgcgctgccgtgcatcacagctcaccg

SEQ ID NO: 34290 - DNA, 75 bp, synthetic construct
  source 1..75: mol_type = other DNA
atgaccgctaagaatatttccctcgaccgctataaacaacgtttctttggcgactttctggagcttcccggcctg

SEQ ID NO: 34291 - DNA, 75 bp, synthetic construct
  source 1..75: mol_type = other DNA
cgtaaggttctggatagcctggacgtgattgtgagcattgatttagacggaaatgtccgccgtatgaatgacatt

SEQ ID NO: 34292 - DNA, 75 bp, synthetic construct
  source 1..75: mol_type = other DNA
tatctgaaagaaatctggggttatctgacccatgatgaacaggaactgtttgaagtcattaataaaaaattactg

SEQ ID NO: 34293 - DNA, 75 bp, synthetic construct
  source 1..75: mol_type = other DNA
acacgccggtagaggcaaaggacaatcttaagtccacgcagatgatgagcgtgattgatgccattggtgaagggc

SEQ ID NO: 34294 - DNA, 75 bp, synthetic construct
  source 1..75: mol_type = other DNA
ttttttagaaaaaaccggatatgtaaaaaggacggatagcagggaggatcgccgtgctaaaaaaatcagtctgac

SEQ ID NO: 34295 - DNA, 75 bp, synthetic construct
  source 1..75: mol_type = other DNA
caggggatttggaaatacaggggaatgtattgaagttaaaacaaataaacctttgaacaacgtgatggatacact

SEQ ID NO: 34296 - DNA, 75 bp, synthetic construct
  source 1..75: mol_type = other DNA
cccgcattttccgcgcccgttcggttgatgtggttgacccatcacccgagaaaccgaccgttatgttgcacaacg

SEQ ID NO: 34297 - DNA, 75 bp, synthetic construct
  source 1..75: mol_type = other DNA
tgcgtggtacgcgccgtctggtgctgattatcgtcggttttctgatctttattttcgccagctactccgcacagc

SEQ ID NO: 34298 - DNA, 75 bp, synthetic construct
  source 1..75: mol_type = other DNA
ttttattcgcacatcgtgaggaatgcaccgtggaaattaaaaaaatcattaatccccgttataccgaaagtggcg

SEQ ID NO: 34299 - DNA, 75 bp, synthetic construct
  source 1..75: mol_type = other DNA
aaactgccggtgacccccttactcaccttctccgtgaatggtcagtccattcacgtcacccctgaactggagtaa

SEQ ID NO: 34300 - DNA, 75 bp, synthetic construct
  source 1..75: mol_type = other DNA
ctacgcgcctcctgccgtcgcctggaggatgccggctggctgcgcaccctgcgagccccgaatctgcagctggca

SEQ ID NO: 34301 - DNA, 75 bp, synthetic construct
  source 1..75: mol_type = other DNA
tatgagctatatcttcggtgcatctctgggcaccagcctgtttggtattatggtcgatcatattggctggcatgg

SEQ ID NO: 34302 - DNA, 75 bp, synthetic construct
  source 1..75: mol_type = other DNA
atgaatatattaatactggtgtaagtatgcccgcctgttccactggtattgacccgggcgaaaacattccgggaa

SEQ ID NO: 34303 - DNA, 75 bp, synthetic construct
  source 1..75: mol_type = other DNA
atcacgcacaggcccaacgcatcaataccgattatcagcgcctcaaaaaattcatctggccggagggtgacagtt

SEQ ID NO: 34304 - DNA, 75 bp, synthetic construct
  source 1..75: mol_type = other DNA
tgcctgcggcctctgcccctgttcctgatgatgtggctgatcgggtgcgccgggccgtctgtgaaatacgtgcct

SEQ ID NO: 34305 - DNA, 75 bp, synthetic construct
  source 1..75: mol_type = other DNA
caacaaatgaccagaataccgatctacaacgcaatgcgctgaactgtgcagggtgtgagctgatttttgaagaca

SEQ ID NO: 34306 - DNA, 75 bp, synthetic construct
  source 1..75: mol_type = other DNA
ctggggccgctggttctgatcgccctggggttcagcggcgcttggatcggcaacttgacggtgttggaaccttat

SEQ ID NO: 34307 - DNA, 75 bp, synthetic construct
  source 1..75: mol_type = other DNA
atgggcttcccttctcctgcggcggattatgttgaaagccgaatttctcttgatcagcaactaatcaggcatcca

SEQ ID NO: 34308 - DNA, 75 bp, synthetic construct
  source 1..75: mol_type = other DNA
ctggcatctggtccactggcgatgctgcgcgttgccctgtatgccatatctggtctgttaggtgctctgctcagt

SEQ ID NO: 34309 - DNA, 75 bp, synthetic construct
  source 1..75: mol_type = other DNA
attatgctgagagccgtatttctcttgatcagcagataattagacatccttcagcgacctacttcatgagggcag

SEQ ID NO: 34310 - DNA, 75 bp, synthetic construct
  source 1..75: mol_type = other DNA
attgaaccgacgatattacgggctacaggaagtatccatcctctggatgtgaactttatcaacgaagaagacctg

SEQ ID NO: 34311 - DNA, 75 bp, synthetic construct
  source 1..75: mol_type = other DNA
ttctcacctcacgccagattctggtggcctttagcggcgggcttgactccaccgttctgctgcatcagttggtgc

SEQ ID NO: 34312 - DNA, 75 bp, synthetic construct
  source 1..75: mol_type = other DNA
aacattacaatgaaaaccatccgcacagtgcgttgggttatcgctctccgcgagaatatcgacgtcagcgggtaa

SEQ ID NO: 34313 - DNA, 75 bp, synthetic construct
  source 1..75: mol_type = other DNA
gtgaatgaagtttatgtgattgccggtggtgagtggttgcggaataacctgaacgccattgccgcctttatggga

SEQ ID NO: 34314 - DNA, 75 bp, synthetic construct
  source 1..75: mol_type = other DNA
gaatttaaaaaatcagcctgtgctgatttcgtttcctaccggtacattaggtgatttactcggatggtttcctta

SEQ ID NO: 34315 - DNA, 75 bp, synthetic construct
  source 1..75: mol_type = other DNA
cgtgcagtgcattgattgaatccggcttatggtcaagagatgcggttgaacgtcagatgagtcatcaggagcgca

SEQ ID NO: 34316 - DNA, 75 bp, synthetic construct
  source 1..75: mol_type = other DNA
aataagcctttttaagaccctagcgaataaacgacgtagttcagtgaataaagtcgccaaatcgctacggcaaaa

SEQ ID NO: 34317 - DNA, 75 bp, synthetic construct
  source 1..75: mol_type = other DNA
caaaatcggcatgatcgaaaccagcgcggtgctggcgggcttcacttttacggtggttagcgcccatttctggcc

SEQ ID NO: 34318 - DNA, 75 bp, synthetic construct
  source 1..75: mol_type = other DNA
tatgctcactacacctgccacttgtgtggcagtgcactcagataccatccgcaatacgacactgaacttccctgg

SEQ ID NO: 34319 - DNA, 75 bp, synthetic construct
  source 1..75: mol_type = other DNA
ctgctccattacgtgccggatcttcaccgcaagatgctgctggcgacgctgtggaacaccggcgcgcgcattaat

SEQ ID NO: 34320 - DNA, 75 bp, synthetic construct
  source 1..75: mol_type = other DNA
gttaaaaatcttaagtttgctattacaccaaactcctttgaacaaacggaaattgtcagaacattaaatgatatt

SEQ ID NO: 34321 - DNA, 75 bp, synthetic construct
  source 1..75: mol_type = other DNA
atgagaaaaaataatacagcaataatattaggcggcctgtttttttcctgcagcgtgatggccggagtcggtacg

SEQ ID NO: 34322 - DNA, 75 bp, synthetic construct
  source 1..75: mol_type = other DNA
acagaacgccccgtgtcacagccagtaccaaccgcacagataaccagtcagatggccggaaatatcagggcgtta

SEQ ID NO: 34323 - DNA, 75 bp, synthetic construct
  source 1..75: mol_type = other DNA
gcgttcaaaatcatcctctctgacgacaaagtgaaagccgttctggttaacatcttcggcggtatcgttcgttgc

SEQ ID NO: 34324 - DNA, 75 bp, synthetic construct
  source 1..75: mol_type = other DNA
cctttgacacctgtcagaataacaaagcagcatggctgcaacgcaaaaatgagctggctgcggccgaacaggaat

SEQ ID NO: 34325 - DNA, 75 bp, synthetic construct
  source 1..75: mol_type = other DNA
tctttgtgtctcttcctgacgtcgaggatgtggacaacgccgatattaaccagcgtctgctggaagtcattgaac

SEQ ID NO: 34326 - DNA, 75 bp, synthetic construct
  source 1..75: mol_type = other DNA
tgcgtcatgcttcttatggtttacgtgggatttgctgctgcggtagtctgggctgtagtgccctggcttaagggc

SEQ ID NO: 34327 - DNA, 75 bp, synthetic construct
  source 1..75: mol_type = other DNA
caacactggcaacggttgctgccggcctggccggtggcctggtgggagactcgggggcttcagcggtagccggcg

SEQ ID NO: 34328 - DNA, 75 bp, synthetic construct
  source 1..75: mol_type = other DNA
gctaacactctgacgccgaatgtcggtgatgcaaactcgcaaacgccggaatataaagcgttcttagtcaacatc

SEQ ID NO: 34329 - DNA, 75 bp, synthetic construct
  source 1..75: mol_type = other DNA
tatcgaaatggttcgtcgatatgctcaccttgcacctaatcaccttaccgaacacgcacggcaaatagactcgat

SEQ ID NO: 34330 - DNA, 75 bp, synthetic construct
  source 1..75: mol_type = other DNA
aaacattgcggtgcttctgcgctggtttgcgaagagtgtgacgcgccaatacctgctgcccgtcgtgcggcttat

SEQ ID NO: 34331 - DNA, 75 bp, synthetic construct
  source 1..75: mol_type = other DNA
tcaagttttatcctgattagcacccttaatggctatttcgataatcaggaccgcgattttctgacaggtaaactt

SEQ ID NO: 34332 - DNA, 75 bp, synthetic construct
  source 1..75: mol_type = other DNA
tccgcgtgaaactctacgccgtaccgcatttccaggtagaaggtatggacgtcagcctgtcactggtttcgcaga

SEQ ID NO: 34333 - DNA, 75 bp, synthetic construct
  source 1..75: mol_type = other DNA
gtgagggtgagaatttatatcgccggtccgatgacgggatatgaaaatttcaaccgtgaggcgtttcacaaggcg

SEQ ID NO: 34334 - DNA, 75 bp, synthetic construct
  source 1..75: mol_type = other DNA
tgccggtgttgcgccccggacagactggcagcagtttgcccgaaaaagggctgaacactgccaccggcgcagccg

SEQ ID NO: 34335 - DNA, 75 bp, synthetic construct
  source 1..75: mol_type = other DNA
gtgggtattttccctgggtgtctggtttcatatcgtcgcccgtcttgtttacagcaaaccctggatggctttttt

SEQ ID NO: 34336 - DNA, 75 bp, synthetic construct
  source 1..75: mol_type = other DNA
cactttcgaagcctacaaaaaagcggcgctggatgctgaattcgcatccctgtttgacactctggacaccaccaa

SEQ ID NO: 34337 - DNA, 75 bp, synthetic construct
  source 1..75: mol_type = other DNA
cgaatgacagcaaaggccattttgttacggcgaaagaagcagcgaagcacaaccgccaggacgttttgtgctgtg

SEQ ID NO: 34338 - DNA, 75 bp, synthetic construct
  source 1..75: mol_type = other DNA
aactcaggtcttttgttgggtgaaataaagaaaccagaagctgtcagccaatgggggaggatgatatataagcgt

SEQ ID NO: 34339 - DNA, 75 bp, synthetic construct
  source 1..75: mol_type = other DNA
ttgagaatatgctcgatcaggcattcaaaaagcttaatcctcacgagcatcctgttctgcactctgaccagggat

SEQ ID NO: 34340 - DNA, 75 bp, synthetic construct
  source 1..75: mol_type = other DNA
aagtccggcgcagatgcggcgggcggaaggcattaattttaatcagaacaatcacgtggtgattcagaacgacgg

SEQ ID NO: 34341 - DNA, 75 bp, synthetic construct
  source 1..75: mol_type = other DNA
acattcatatgtatatgagtatatcccgagtgttcattcgtttgacaggcaatgtattaaaactgtttccttttg

SEQ ID NO: 34342 - DNA, 75 bp, synthetic construct
  source 1..75: mol_type = other DNA
cgacgtcgggactgatggcgatggcgcgccagttccgtaacgtgacggcagagcagattgcgtatgttgcacagc

SEQ ID NO: 34343 - DNA, 75 bp, synthetic construct
  source 1..75: mol_type = other DNA
atctgctgtatgcagcccggaaacggggtctggaacccggtatcttctgcgccatccatacgtatggccgtcgtc

SEQ ID NO: 34344 - DNA, 75 bp, synthetic construct
  source 1..75: mol_type = other DNA
cgaaatggcgatttgaaaagaatcgcccctgtcagggagtgaagagacaatttatctttacgccgtcacgtccct

SEQ ID NO: 34345 - DNA, 75 bp, synthetic construct
  source 1..75: mol_type = other DNA
cagcgccttcgtgacgtgtacggtgataatccggatgcgctggcgaaggccacatctgcactgaagaacacctgg

SEQ ID NO: 34346 - DNA, 75 bp, synthetic construct
  source 1..75: mol_type = other DNA
actttatgagtggatgcaccagaaaattaatgcagcgcaggatctgaaatgggccaatgaagccagggctaagca

SEQ ID NO: 34347 - DNA, 75 bp, synthetic construct
  source 1..75: mol_type = other DNA
ctgggtgacaaggttgaataccagaaacggctgaatgagctggcaaatcaggctgtgcggtttgaacagcagcag

SEQ ID NO: 34348 - DNA, 75 bp, synthetic construct
  source 1..75: mol_type = other DNA
atgtactgtactgttaaagaaattatccgcgatgtactggatacagacgtgccggacagtgaatgcgtttttgcc

SEQ ID NO: 34349 - DNA, 75 bp, synthetic construct
  source 1..75: mol_type = other DNA
tgatgctggagccacaactgcagtacacctggcagggactctccctggatgacggccaggataacgccggttatg

SEQ ID NO: 34350 - DNA, 75 bp, synthetic construct
  source 1..75: mol_type = other DNA
cgtactggaaaatggcggacgtctggatgtgctgagcggacacacagccactaatacccgtgtggatgatggcgg

SEQ ID NO: 34351 - DNA, 75 bp, synthetic construct
  source 1..75: mol_type = other DNA
acctggcagggactctccctggatgacggccaggataacgccggttatgtgaagttcgggcatggcagtgcacaa

SEQ ID NO: 34352 - DNA, 75 bp, synthetic construct
  source 1..75: mol_type = other DNA
agggaacagcagaatccaccaccatcaacaaaaatggacggcagattatcttattttccgggatagcccgtgaca

SEQ ID NO: 34353 - DNA, 75 bp, synthetic construct
  source 1..75: mol_type = other DNA
gccggataacgaggccaataccggcgggcaatggatacaaaatggcggtatcgccaacaacactactgtcaccgg

SEQ ID NO: 34354 - DNA, 75 bp, synthetic construct
  source 1..75: mol_type = other DNA
caaccggaaaaaccatcctgaatctggtgaacgccggcaacagtggtacggggctggcgaccaccggtaagggta

SEQ ID NO: 34355 - DNA, 75 bp, synthetic construct
  source 1..75: mol_type = other DNA
tgaagcgtgacaaaggcctgtgtcagttatgtctgcgtgctggtgtggtgcgtgaggcgaaaaccgttgaccaca

SEQ ID NO: 34356 - DNA, 75 bp, synthetic construct
  source 1..75: mol_type = other DNA
gccgcgttcgcggttgccgcaataccactactgacccgtcaggctattgcgaaagccacaaaagcgaaggctgga

SEQ ID NO: 34357 - DNA, 75 bp, synthetic construct
  source 1..75: mol_type = other DNA
tttgaaccagggatgacggtctccctcgttgcccggcaacatggtgtagcagccagccagttatttctctggcgt

SEQ ID NO: 34358 - DNA, 75 bp, synthetic construct
  source 1..75: mol_type = other DNA
tgtacatggctacgcgctggataccacactgaacggcggtaaccagtatgtgcacaacggcggtacagcgtctga

SEQ ID NO: 34359 - DNA, 75 bp, synthetic construct
  source 1..75: mol_type = other DNA
aagctttttctgcttctgccggaggagtatggcccagcctttccagcaatcgtcgattgttataccagtccaccc

SEQ ID NO: 34360 - DNA, 75 bp, synthetic construct
  source 1..75: mol_type = other DNA
ccggtgtggcggttgcactgtctcttgcggctgtcacgtcagttccggcactggctgctgacacggttgtacagg

SEQ ID NO: 34361 - DNA, 75 bp, synthetic construct
  source 1..75: mol_type = other DNA
acgcgtcatttcgcggtgtgccgtttaaggttgaagaagaaagtgcgggaaccggtcgtcgtgtggaaacgcacg

SEQ ID NO: 34362 - DNA, 75 bp, synthetic construct
  source 1..75: mol_type = other DNA
tttttattgatgtcgtctactgggtacgccgcattaaacgcaagttgagtgtttatcgccgctacccgcgaatga

SEQ ID NO: 34363 - DNA, 75 bp, synthetic construct
  source 1..75: mol_type = other DNA
tttctcagggaccggaagcctacagtaaattcattactgacaacaaggacaggttaaatcgcgtgggggcgaatg

SEQ ID NO: 34364 - DNA, 75 bp, synthetic construct
  source 1..75: mol_type = other DNA
cgaaacgagaggaaaagattgcccgggaaacgcagttaaacaacaccttcaaagatattgcccttgagtggcaca

SEQ ID NO: 34365 - DNA, 75 bp, synthetic construct
  source 1..75: mol_type = other DNA
atcccttgtacagaaagcagtttaccgacttggatctgggaaagattctagtcgtgtgccgattgatgttaaaaa

SEQ ID NO: 34366 - DNA, 75 bp, synthetic construct
  source 1..75: mol_type = other DNA
gagctgggagtcgccatcgaatggggcggggactggaaaacgctgaaggacgggccgcacttccaattgaaacgc

SEQ ID NO: 34367 - DNA, 75 bp, synthetic construct
  source 1..75: mol_type = other DNA
catgacgttctcaccgtcccggaatggcacgtcactggacctgcaggccggactggaagcccgtgtccgggaaaa

SEQ ID NO: 34368 - DNA, 75 bp, synthetic construct
  source 1..75: mol_type = other DNA
aaccgtctgggcaatttcacggtggaaaacggtaaggctgacggcgttgttctggagtccggtggtcgcctggat

SEQ ID NO: 34369 - DNA, 75 bp, synthetic construct
  source 1..75: mol_type = other DNA
tgagtgaattaccggtgaactggtgggtacagccttctgttatccgcaccttcagctcccggggagatatgcgtg

SEQ ID NO: 34370 - DNA, 75 bp, synthetic construct
  source 1..75: mol_type = other DNA
cattacaggaaatggcatcgaatatagttcgttcacaactggctactcttgaccttagtaccgcagaaaaagaaa

SEQ ID NO: 34371 - DNA, 75 bp, synthetic construct
  source 1..75: mol_type = other DNA
gatcaacacgctgggacggctggttttcgacattaaaacagcacaggccggagtcaatccgtcaatgaaagcatg

SEQ ID NO: 34372 - DNA, 75 bp, synthetic construct
  source 1..75: mol_type = other DNA
ttgatcattaccctgtgcgtcctgctgctgaacattctggcgcgcgttgtttttgcgaagaataaacacggttaa

SEQ ID NO: 34373 - DNA, 75 bp, synthetic construct
  source 1..75: mol_type = other DNA
gatcgcgatggtcgggcgctggccttaacggatgatcgcggcacagagagtcttgccggctatcttcgcacgctc

SEQ ID NO: 34374 - DNA, 75 bp, synthetic construct
  source 1..75: mol_type = other DNA
tgttccgtgggctggccccggaagccggtatacgttgctattcgaatcgttcgttctctcatggctgaaaatcag

SEQ ID NO: 34375 - DNA, 75 bp, synthetic construct
  source 1..75: mol_type = other DNA
cgaacatctgctcgttcatcatgcgcgagcaacctgaagcattgcttaagcacctggagcagtcggtgctgcgcg

SEQ ID NO: 34376 - DNA, 75 bp, synthetic construct
  source 1..75: mol_type = other DNA
tcgtgaattacatagattgagtcaaagtgatgatatggaaataaaaattgctgcgattaaagcacttggtcgaat

SEQ ID NO: 34377 - DNA, 75 bp, synthetic construct
  source 1..75: mol_type = other DNA
cttgatgcatacgacactgatgaaatcagtgagacgggttatatcaacaaactcagacgccttgctcaacaggag

SEQ ID NO: 34378 - DNA, 75 bp, synthetic construct
  source 1..75: mol_type = other DNA
ccagcctgacacacagtgcttatccgttctggtctggtgcgctgttcaaccgtgggcgcaacaaagccgataagg

SEQ ID NO: 34379 - DNA, 75 bp, synthetic construct
  source 1..75: mol_type = other DNA
tgaacgataaccagggctgtttcgtgttcccggacgcctggtttggctcgttgctggatgagtttgacgaactaa

SEQ ID NO: 34380 - DNA, 75 bp, synthetic construct
  source 1..75: mol_type = other DNA
ctacaaacacttacatcgcggaaatgctgtgcggaaatttgcatccatttccacttgctgtgcggcataacttct

SEQ ID NO: 34381 - DNA, 75 bp, synthetic construct
  source 1..75: mol_type = other DNA
tgaacgataaccaggggtgtttcgtattcccggacgcctggttcggcccgttgctggatgagtttgacgaactgc

SEQ ID NO: 34382 - DNA, 75 bp, synthetic construct
  source 1..75: mol_type = other DNA
atgaaaaaaacgctactcactttcacgctggccctgcttatctctggatgtgctcaacagacgtttactgttgaa

SEQ ID NO: 34383 - DNA, 75 bp, synthetic construct
  source 1..75: mol_type = other DNA
gtcagacgacagaataacagcactggaagaagaaaatgcagaattaaaacaaagattatctgcaattgaggcgac

SEQ ID NO: 34384 - DNA, 75 bp, synthetic construct
  source 1..75: mol_type = other DNA
atgacatcaaaacgctaaaatccgacgttagcaaattaaaaaacgatcaaggaagctacgcaacaaaatcttatg

SEQ ID NO: 34385 - DNA, 75 bp, synthetic construct
  source 1..75: mol_type = other DNA
atgggtcaaccatgacattaaccacacagggatccgctcacgctggcgtaacaactagactatggggtaattcta

SEQ ID NO: 34386 - DNA, 75 bp, synthetic construct
  source 1..75: mol_type = other DNA
ctgctgaagcagtgaaggacgtcctgcgctctgaagaagtcctgagcgcactgaaacagaaactccgccataagc

SEQ ID NO: 34387 - DNA, 75 bp, synthetic construct
  source 1..75: mol_type = other DNA
aatggatagacagtccaggtaacgcaatggcgcgccttaacctgaacgataacgggacaaacatttgctgggact

SEQ ID NO: 34388 - DNA, 75 bp, synthetic construct
  source 1..75: mol_type = other DNA
ctgcgcttcgaccagatcgaattcgctgcattcgaaatgcatatcctgaaacgtccaggcgcggaagcggattac

SEQ ID NO: 34389 - DNA, 75 bp, synthetic construct
  source 1..75: mol_type = other DNA
cgtcaggagtttgatgttcatcgggaactggatgtcgatgatgaccttgatatggtgtttaactggcgtgaagct

SEQ ID NO: 34390 - DNA, 75 bp, synthetic construct
  source 1..75: mol_type = other DNA
cagcttgagtacaagcagctctggcgtggcggtcaggtgcttgctgttccgccagcgtacacaagccagcgttgc

SEQ ID NO: 34391 - DNA, 75 bp, synthetic construct
  source 1..75: mol_type = other DNA
gaccattcttgccggtatcagcgccggcggcatgtactgcccggagtgtggcacagttcactggccggatggcat

SEQ ID NO: 34392 - DNA, 75 bp, synthetic construct
  source 1..75: mol_type = other DNA
agcagcgcgttgaagaagaacgccagcgccatatccgtgctgcccgtgccaaaacaccgggcgtgtcacgcgtac

SEQ ID NO: 34393 - DNA, 75 bp, synthetic construct
  source 1..75: mol_type = other DNA
gcattagatataacaatgatagcttctcgtggaaatgttgcagacacagggataactgatcgtgtcaatgacata

SEQ ID NO: 34394 - DNA, 75 bp, synthetic construct
  source 1..75: mol_type = other DNA
cattccggccagtgatgtcagacgggagtttgccatctgggcaaaagcggtcgtgcaggtgctggagacattacc

SEQ ID NO: 34395 - DNA, 75 bp, synthetic construct
  source 1..75: mol_type = other DNA
tggacggctggcaaatcacctgggggctggatgctgatcatgagcgctttacctccaaccagatgttcttcgacc

SEQ ID NO: 34396 - DNA, 75 bp, synthetic construct
  source 1..75: mol_type = other DNA
cgtgctgtcaccagctgtcgcccagcaaaacgatgataatgagatcatagtgtctgccagccgcagcaatcgaac

SEQ ID NO: 34397 - DNA, 75 bp, synthetic construct
  source 1..75: mol_type = other DNA
gcgatgtaatcttctctagcaactttgatgaaaacttcttcccacgtggtgcagatagttatcgcgatgctgatg

SEQ ID NO: 34398 - DNA, 75 bp, synthetic construct
  source 1..75: mol_type = other DNA
tgccataggtgagggactggatacaaattgcgtagtccttcctccttcatacttaggaaaaatgaccgaagcaca

SEQ ID NO: 34399 - DNA, 75 bp, synthetic construct
  source 1..75: mol_type = other DNA
gcggtgatgcaggtctgttttgctccgctgctgggcagatggtcagataagctggggcgcagaccggtgctgctg

SEQ ID NO: 34400 - DNA, 75 bp, synthetic construct
  source 1..75: mol_type = other DNA
gtgatcgcatcaggatttacacaacgagtaagcggaacgactatctggaggatgtttatatcctgtcctgcaaat

SEQ ID NO: 34401 - DNA, 75 bp, synthetic construct
  source 1..75: mol_type = other DNA
gtggtgggggtttttgaccggattgaagagaaacgtgatgccatgcagtcgctggtcctgccaccaccggcacgc

SEQ ID NO: 34402 - DNA, 75 bp, synthetic construct
  source 1..75: mol_type = other DNA
gcgcatcaaacctaattcgtcgtgaccgtccattaacccgagaggaactgtttcgagtggtgcccagcgtattca

SEQ ID NO: 34403 - DNA, 75 bp, synthetic construct
  source 1..75: mol_type = other DNA
ttacttcaggttcgtctgccagaatggctgcgtctgcggtcagtctctgggggaagtgcgtgttccacaccgggg

SEQ ID NO: 34404 - DNA, 75 bp, synthetic construct
  source 1..75: mol_type = other DNA
acctcaaaactgggactgattgaacctttcatgggggaaatctacggtaacccgcaggccacccagaaaatgctg

SEQ ID NO: 34405 - DNA, 75 bp, synthetic construct
  source 1..75: mol_type = other DNA
tacctcgctggcatcaaagatgtttatacgtgcgaaattgtcggctacgccatgggagagcgcatgacaaaagag

SEQ ID NO: 34406 - DNA, 75 bp, synthetic construct
  source 1..75: mol_type = other DNA
tggagtatgccaatccagaactggcggctggcaatgagccgttttattatcgagtttggtgaccgccttagcgag

SEQ ID NO: 34407 - DNA, 75 bp, synthetic construct
  source 1..75: mol_type = other DNA
aactggctatgcacgggcagacccacgttaacaaaatctacgacccggcagcaggttccggttcgctgttgttgc

SEQ ID NO: 34408 - DNA, 75 bp, synthetic construct
  source 1..75: mol_type = other DNA
gagggcgaaggctggtttattggctccattcatgatactgaagatggtccggtttgtgtctggttgcgaaacaag

SEQ ID NO: 34409 - DNA, 75 bp, synthetic construct
  source 1..75: mol_type = other DNA
attcaatgatgccaataagcgtaccgcgctaaacagcgcgctgctatttctacgccgtaacggggtgcaggtatt

SEQ ID NO: 34410 - DNA, 75 bp, synthetic construct
  source 1..75: mol_type = other DNA
tgatgattgctgtttcggcacactgccggaatttatcgaattgctgaccagttgcggttatcaggtcattcaggg

SEQ ID NO: 34411 - DNA, 75 bp, synthetic construct
  source 1..75: mol_type = other DNA
cagcatgatcaggaataccgggagctttatcgtcagttactgccggaactggatctgattatctggatcctgcgg

SEQ ID NO: 34412 - DNA, 75 bp, synthetic construct
  source 1..75: mol_type = other DNA
ccttttgacgaatacgcagaagtgcagaaactaccggtgatcgacgtggcgttcagccacctggtgggaatggat

SEQ ID NO: 34413 - DNA, 75 bp, synthetic construct
  source 1..75: mol_type = other DNA
aacgcaaagaacagcaaatgttggaggaagaagacgcagaacaacgaaggtcccggtccggattatggggaaaga

SEQ ID NO: 34414 - DNA, 75 bp, synthetic construct
  source 1..75: mol_type = other DNA
tgaggaccaccagccggtcacggtatcgcagttgctgaccccacgtcgccgggaggactacagcgatgacctgtg

SEQ ID NO: 34415 - DNA, 75 bp, synthetic construct
  source 1..75: mol_type = other DNA
ccgccacgtatggcaccggtggttatattccggcgaccagctcttatgcaggctatcaggcttatcagccggtca

SEQ ID NO: 34416 - DNA, 75 bp, synthetic construct
  source 1..75: mol_type = other DNA
caaatacctgaagacagtatccatccacaaaaaaggtcatctacaggagttttatcgcgtaaatgtgattaaacg

SEQ ID NO: 34417 - DNA, 75 bp, synthetic construct
  source 1..75: mol_type = other DNA
cggtgaaaggggccgggaccacactgtgggtttataacgggaacggcgacccatatgcaaacccgctttcagaca

SEQ ID NO: 34418 - DNA, 75 bp, synthetic construct
  source 1..75: mol_type = other DNA
atgaatggattcagaaacagttcacggaacggtcaggtctggcgttaccagcgtgccggaagccgggccgttatt

SEQ ID NO: 34419 - DNA, 75 bp, synthetic construct
  source 1..75: mol_type = other DNA
atactcgagggaattagccgatgcgagagctgaaaatgaaactctgcgcgctgatgttgccgctggtcgtaagcg

SEQ ID NO: 34420 - DNA, 75 bp, synthetic construct
  source 1..75: mol_type = other DNA
aaacattgacggcagcatccatcgctgggcaaaaaatgaagttatcgacaacgaccgcgaagactggaagcgtat

SEQ ID NO: 34421 - DNA, 75 bp, synthetic construct
  source 1..75: mol_type = other DNA
ctggctcgcaatactcagaaaattttccgctgggtggagaaagacacccctgatgcggttaaaaaaattcaggcg

SEQ ID NO: 34422 - DNA, 75 bp, synthetic construct
  source 1..75: mol_type = other DNA
gaaaattcaacaggaaaaatcagcccggtcattgctgccactcatcgcgaatacaagcagacatggaaaacactg

SEQ ID NO: 34423 - DNA, 75 bp, synthetic construct
  source 1..75: mol_type = other DNA
ttattaccgtctccgaagtggaatcgacaagataacctcacaggtcaattacttgcaggagtatatcaggacgca

SEQ ID NO: 34424 - DNA, 75 bp, synthetic construct
  source 1..75: mol_type = other DNA
tatccgaacaatgtgatggatgtgattggtctggatattcacaactttacccgcacggttgctgaggacggcaag

SEQ ID NO: 34425 - DNA, 75 bp, synthetic construct
  source 1..75: mol_type = other DNA
caaaacgttcagagcggtttccgccgatccgtcaacgggaaccattgctgtgaaagatatggcgatcactgtgac

SEQ ID NO: 34426 - DNA, 75 bp, synthetic construct
  source 1..75: mol_type = other DNA
tccgctgacacacgaagaactgatgcaccatgtaccgggtattttcggtgaagaccggcatacctcctgcagtga

SEQ ID NO: 34427 - DNA, 75 bp, synthetic construct
  source 1..75: mol_type = other DNA
gccggacaactggacgatgaacggcgagtacggcagcgagtttggcggctttttccccgtccaggtccgtttcac

SEQ ID NO: 34428 - DNA, 75 bp, synthetic construct
  source 1..75: mol_type = other DNA
tccgctgacacacgaagaactgatgcgccatgtaccgagtatttttggggaaaaccgacatacctctcgcagtga

SEQ ID NO: 34429 - DNA, 75 bp, synthetic construct
  source 1..75: mol_type = other DNA
aatatgctgaaaggcggaatttccggtcgcagtgccagagggaaacgtatccacacccatgccattcacagcatc

SEQ ID NO: 34430 - DNA, 75 bp, synthetic construct
  source 1..75: mol_type = other DNA
tgcgtctgcgacgggccggacagataaccggtcagcatgtgcctgaaattattctgctcaactcccatgacggtt

SEQ ID NO: 34431 - DNA, 75 bp, synthetic construct
  source 1..75: mol_type = other DNA
agtgatgaacgccgtgagctgacacacgccgtgatgcgggagctggatgcgccggacaactggacgatgaacggc

SEQ ID NO: 34432 - DNA, 75 bp, synthetic construct
  source 1..75: mol_type = other DNA
attacctggggactcataagaacttctgtgcgcaggacgttgccgcggtaacaggcgcaaccgtaaccagcataa

SEQ ID NO: 34433 - DNA, 75 bp, synthetic construct
  source 1..75: mol_type = other DNA
tgcggcagaaaaacatcagcgcggggaactggaaaagccacaccaccagctggtcagcacatacagtgagctgaa

SEQ ID NO: 34434 - DNA, 75 bp, synthetic construct
  source 1..75: mol_type = other DNA
cagctatgccggtcatctggcgcaggccggtgtggatatcacgctgatttactcaggggcgcacaaggtggatgg

SEQ ID NO: 34435 - DNA, 75 bp, synthetic construct
  source 1..75: mol_type = other DNA
taaggcgaccttcggtaaggactccagtatcgttaaatgggttgttctggctgaggtgctggtcggtgcggtcat

SEQ ID NO: 34436 - DNA, 75 bp, synthetic construct
  source 1..75: mol_type = other DNA
atgcggaaaaggccacagggcagagtaattcgccgaagctgtggccgggaacgcggtttacgctgacggggcatc

SEQ ID NO: 34437 - DNA, 75 bp, synthetic construct
  source 1..75: mol_type = other DNA
tcatgccctgtatattgatggtcgccgtgaaatgatgcagtggtatgctgactacattgattcgctttctgagca

SEQ ID NO: 34438 - DNA, 75 bp, synthetic construct
  source 1..75: mol_type = other DNA
agtccggagcagaagctgacgctgtgcgacgatgtggcggggctgtcacaggcgggggagcttccgtttaacccg

SEQ ID NO: 34439 - DNA, 75 bp, synthetic construct
  source 1..75: mol_type = other DNA
cggcagacatcctggagtcagatgagaatggcattatcccggagcaggacagggtaatcacgcaggtggtgatac

SEQ ID NO: 34440 - DNA, 75 bp, synthetic construct
  source 1..75: mol_type = other DNA
tggatgcagataaaaagcagatacagtgtgtggtaagaccgctgcaaattctgcgtgctgacgggaggtgggaaa

SEQ ID NO: 34441 - DNA, 75 bp, synthetic construct
  source 1..75: mol_type = other DNA
tcagaaattgattttgataatgccctgtggacaatccctgaaagccgcatgaaaatgcgacgtaaacatgtcgta

SEQ ID NO: 34442 - DNA, 75 bp, synthetic construct
  source 1..75: mol_type = other DNA
tgtgtcggaggagaagaaccattacctcgtggtggatggttttcatcgtcagctgctgggcagggaagcagacac

SEQ ID NO: 34443 - DNA, 75 bp, synthetic construct
  source 1..75: mol_type = other DNA
ctggtggtggatggttatcatcgtcagttgctgggaagaggggccggtacagaaaaacgcctccggggatggctt

SEQ ID NO: 34444 - DNA, 75 bp, synthetic construct
  source 1..75: mol_type = other DNA
tgcaaccatccgtcataaccgggccagaggaaagcatcagattacatcaatgtcagatatcgttcgtgacctgtc

SEQ ID NO: 34445 - DNA, 75 bp, synthetic construct
  source 1..75: mol_type = other DNA
gtgacgcaggctgacaaaacggaaccctgccatgaatgggatatggcaggtattcagccttctcccgcacaggaa

SEQ ID NO: 34446 - DNA, 75 bp, synthetic construct
  source 1..75: mol_type = other DNA
cctgtctgctcgcctcatcttttgaagcagacgcagatgatgccgatgacgccgccgaactggcggacgatgcag

SEQ ID NO: 34447 - DNA, 75 bp, synthetic construct
  source 1..75: mol_type = other DNA
acgtcgaatcccgtcaccggaaaatgtcagtgccatcattggcgtcctgactgcaaaaccctccagaaaaagacg

SEQ ID NO: 34448 - DNA, 75 bp, synthetic construct
  source 1..75: mol_type = other DNA
gatcggtggtactggaataacagtatccaacggggccgaagtacggcggtcagagaaaactggcagtggaaaccc

SEQ ID NO: 34449 - DNA, 75 bp, synthetic construct
  source 1..75: mol_type = other DNA
ccggtaaccggtgtggagtggcagtgctgaccggtgttcgtgcggatgaatccctcaatcgctttatggggctgg

SEQ ID NO: 34450 - DNA, 75 bp, synthetic construct
  source 1..75: mol_type = other DNA
cgcgctgggcaaaatcatcggcaacggtcacctgcacaaaggcgcgaagccggtgcactggtgcgttgactgccg

SEQ ID NO: 34451 - DNA, 75 bp, synthetic construct
  source 1..75: mol_type = other DNA
tagccgtatatttgcactggtaccagacacatggatatcccgatgatattcctgatgagcaggataatgatctgg

SEQ ID NO: 34452 - DNA, 75 bp, synthetic construct
  source 1..75: mol_type = other DNA
tccggtgtctctcttcttgcacttaaagagatgggaggatgggaaactctcgaaatggttcaaagatacgcccac

SEQ ID NO: 34453 - DNA, 75 bp, synthetic construct
  source 1..75: mol_type = other DNA
gattagcgcagattattaacggagcctcaagcagagttgagggctactacactgtcataagtcttgaagaaagca

SEQ ID NO: 34454 - DNA, 75 bp, synthetic construct
  source 1..75: mol_type = other DNA
tctcggacgtttttgccgccttcgcggaatttcctgccgccgttgccgaggaagctgcactactggcacttgatg

SEQ ID NO: 34455 - DNA, 75 bp, synthetic construct
  source 1..75: mol_type = other DNA
ataaaaaaagtcaattacatttctattgagatattcaatgaaacattcgacaacttacgttctcgagtggagtcc

SEQ ID NO: 34456 - DNA, 75 bp, synthetic construct
  source 1..75: mol_type = other DNA
atcatttcacgccggaacagattgccgcactgcgggaaaaaatcatcagcaggctggagtggcatcagcggggct

SEQ ID NO: 34457 - DNA, 75 bp, synthetic construct
  source 1..75: mol_type = other DNA
ctttccaggaaatggcagcgaatatagttcgttctcaattggcgactcttgacctgagtaccgtagaaaaagaaa

SEQ ID NO: 34458 - DNA, 75 bp, synthetic construct
  source 1..75: mol_type = other DNA
attggtacggagctgggtatggaccaggatgaagttctcagattgaaacagattagcgggctgacggagctgttt

SEQ ID NO: 34459 - DNA, 75 bp, synthetic construct
  source 1..75: mol_type = other DNA
ttgattccagccgttgcaccggttgcaaaacctgcgagctggcttgtaaagactacaaagatttgacgccagaag

SEQ ID NO: 34460 - DNA, 75 bp, synthetic construct
  source 1..75: mol_type = other DNA
cggaacagttcgaaaagatatgcaaacagctatggggtttattgatggatgcttgtcatttttttatttaataca

SEQ ID NO: 34461 - DNA, 75 bp, synthetic construct
  source 1..75: mol_type = other DNA
tgatattgtcgggcaggttattgagggagcgtatgaagtgctcggtgtctttgataaagtcactgaaaatatgga

SEQ ID NO: 34462 - DNA, 75 bp, synthetic construct
  source 1..75: mol_type = other DNA
atgcgattagcttcccgttttggtcggtataattccatccgccgtgaacgtcctttaacggatgatgaattaatg

SEQ ID NO: 34463 - DNA, 75 bp, synthetic construct
  source 1..75: mol_type = other DNA
gataaccggtaagcaggtgccggaaataatcctgctcaactctcacgatggcagcagttcgtaccagatgctgcc

SEQ ID NO: 34464 - DNA, 75 bp, synthetic construct
  source 1..75: mol_type = other DNA
gctcttatcattgagagctgccttgctttactaaaaaagaaaaaaccgtacgaacattctctgattgtggctcat

SEQ ID NO: 34465 - DNA, 75 bp, synthetic construct
  source 1..75: mol_type = other DNA
aaaatactatccaggacagcctgggcaggtatttgatgattactatggcggtaacatctggtgtgcgacagcact

SEQ ID NO: 34466 - DNA, 75 bp, synthetic construct
  source 1..75: mol_type = other DNA
aggccgaaaaagacagggaactaccggaaaaaattgcggctgaaatccccgttattatccgccgcttgctggcga

SEQ ID NO: 34467 - DNA, 75 bp, synthetic construct
  source 1..75: mol_type = other DNA
gctaaagtcgtttgaggctttccgcgagtgggtaaccattcaggccggattttacaccgagcatatttatccgga

SEQ ID NO: 34468 - DNA, 75 bp, synthetic construct
  source 1..75: mol_type = other DNA
acttaacgccgtgctggattacattgacgcggtgacggtaacagataccagcaccgcgccggatatcatctggcc

SEQ ID NO: 34469 - DNA, 75 bp, synthetic construct
  source 1..75: mol_type = other DNA
cgcggcagtgactggcgcgagcacagcgccacccgcatcgacgacctgatgctgaaaagcaaatatgcgccggat

SEQ ID NO: 34470 - DNA, 75 bp, synthetic construct
  source 1..75: mol_type = other DNA
aacgatctctggacaacctggcagcgggttcaggagaatatgataaaaggtggattatcggggcgaagtgcctcc

SEQ ID NO: 34471 - DNA, 75 bp, synthetic construct
  source 1..75: mol_type = other DNA
tcactatgtgaatgacaatctggacgaaggcccaatcatcatgcaggacgttattcatgtcgatcatacctacac

SEQ ID NO: 34472 - DNA, 75 bp, synthetic construct
  source 1..75: mol_type = other DNA
cgtgacgtcgagaaaaacgtcttaagtcgcgcactctacaaagtactggcgcagcgcgtctttgtttacggtaat

SEQ ID NO: 34473 - DNA, 75 bp, synthetic construct
  source 1..75: mol_type = other DNA
aagagagcggaaagcggtaaaaacgccggtcaggaatggctggcggtggttggttattacccgaaattaagccag

SEQ ID NO: 34474 - DNA, 75 bp, synthetic construct
  source 1..75: mol_type = other DNA
atgggggattctgtgacaccggagataattggcaacatgattcgtcagtacttcagccaggaacgaccagaagaa

SEQ ID NO: 34475 - DNA, 75 bp, synthetic construct
  source 1..75: mol_type = other DNA
catcgtcccggctacgacctgaccttctccgcccccaaaagtgtctccatgatggccatgctcgggggggataaa

SEQ ID NO: 34476 - DNA, 75 bp, synthetic construct
  source 1..75: mol_type = other DNA
ccacgtgatcagtgtaatcaacacctggcctgccaaccgcgtgaaagagttgttgccctggaatgtcactcaatc

SEQ ID NO: 34477 - DNA, 75 bp, synthetic construct
  source 1..75: mol_type = other DNA
ataagctggccgacggcgcaggcgcgggctggcttgcggccagtcacacacttggctatgggctgtgcgcattgt

SEQ ID NO: 34478 - DNA, 75 bp, synthetic construct
  source 1..75: mol_type = other DNA
gtttggcgctgcatttgtctgggtgattatcggtgttatgcctgttgtcgtagcaaaaatggcgtggcgttttgt

SEQ ID NO: 34479 - DNA, 75 bp, synthetic construct
  source 1..75: mol_type = other DNA
agtcctttttgccatcattgcggttatgggttttatctcatttgttggcttactgctggcgatgccagagacggt

SEQ ID NO: 34480 - DNA, 75 bp, synthetic construct
  source 1..75: mol_type = other DNA
ccgcgagctggaagcgtggcagcaggaacagcaggcggctggccatcagacgctggccgatgttccggcacccgt

SEQ ID NO: 34481 - DNA, 75 bp, synthetic construct
  source 1..75: mol_type = other DNA
agcacggtttccatgcgcgccgtcgtgcggagatcatcagtccgttggcgcagtcggagacggtcgggcacgaag

SEQ ID NO: 34482 - DNA, 75 bp, synthetic construct
  source 1..75: mol_type = other DNA
acctttcacgcgaacgctgccagttaatactgacccagctggttatggcgggtctggcagactatcagtttggtt

SEQ ID NO: 34483 - DNA, 75 bp, synthetic construct
  source 1..75: mol_type = other DNA
ggtcgcagcagccgctggtacaaaagcgaagtggagcagtggatgcagcagcgaatcgaggagtcacgaggagct

SEQ ID NO: 34484 - DNA, 75 bp, synthetic construct
  source 1..75: mol_type = other DNA
gcgtatttctgcgtgccgataattccctgatcgacatgaactatatcaccagtttcaccggtatgaccgacaaat

SEQ ID NO: 34485 - DNA, 75 bp, synthetic construct
  source 1..75: mol_type = other DNA
actactccccaaaatcccccggcctgactgatgcatcggcctcaacgtcgaaagatacgctgagtatcactgatg

SEQ ID NO: 34486 - DNA, 75 bp, synthetic construct
  source 1..75: mol_type = other DNA
gctgcgtatatccataaagcagaacatctggaagaacggcgactgatgttgcaatggtgggccgattttctggat

SEQ ID NO: 34487 - DNA, 75 bp, synthetic construct
  source 1..75: mol_type = other DNA
aagccccgacagcacggctgaaactggcgctggaaagcgggttaattgtcaccgcgctggatggtctgttctggc

SEQ ID NO: 34488 - DNA, 75 bp, synthetic construct
  source 1..75: mol_type = other DNA
gcctgaagggggcgaaccaaattattgctggtgggaggttaatccagttgatgctgcaaatgaagctatgagtta

SEQ ID NO: 34489 - DNA, 75 bp, synthetic construct
  source 1..75: mol_type = other DNA
tagcctggcgtgtcatatcacctcccgccagctaaaccacgtcgaagcggcagaactgctgcgtgtgactgctga

SEQ ID NO: 34490 - DNA, 75 bp, synthetic construct
  source 1..75: mol_type = other DNA
ccgtcagttgtgtgcttcgactgccggaccggacgtagccatgagtatcctgaaaactggcttcagggctggggc

SEQ ID NO: 34491 - DNA, 75 bp, synthetic construct
  source 1..75: mol_type = other DNA
taactccacaggaacagaaagaggcagagacccggctaatgatgctgaatgaccgactaaaagccagaaagcgct

SEQ ID NO: 34492 - DNA, 75 bp, synthetic construct
  source 1..75: mol_type = other DNA
aatcagtgttgttagccctagcagccgaaaaagggcaggcgtgggttgctaacgcaattactgaagaatatctgc

SEQ ID NO: 34493 - DNA, 75 bp, synthetic construct
  source 1..75: mol_type = other DNA
cagcaaaagtaaaaagacaacgcagaagcctgcaacacgaaaaaccaccgcgtcgcagaaggcgaagcgcggtta

SEQ ID NO: 34494 - DNA, 75 bp, synthetic construct
  source 1..75: mol_type = other DNA
gcgtgccggtgagacattgctggaaaccgctatcagtctgcagaaagccgggcttcacacgccggcacagcaggc

SEQ ID NO: 34495 - DNA, 75 bp, synthetic construct
  source 1..75: mol_type = other DNA
gagccgttatctgcgggatatgtaccgaccggggatggtgatggagcagtggaacccggagacacgcagtcatga

SEQ ID NO: 34496 - DNA, 75 bp, synthetic construct
  source 1..75: mol_type = other DNA
tgtcgatccggagatcaaaatggccgagtggatgcagacgctgaaggaaaccgggttcgacatccgggcatatcg

SEQ ID NO: 34497 - DNA, 75 bp, synthetic construct
  source 1..75: mol_type = other DNA
atggtgtcgggcagatttacggcatgtatgtactgactgaaacgaatacgacccgctccgagtttgatcgctacg

SEQ ID NO: 34498 - DNA, 75 bp, synthetic construct
  source 1..75: mol_type = other DNA
gtaacggcaagtccgccggtatctggctgaacccactgaccacggatgacggaaacgggctgcggggattcagcg

SEQ ID NO: 34499 - DNA, 75 bp, synthetic construct
  source 1..75: mol_type = other DNA
gtttttacccgtcttctggagggaaggctgccggacggagcggatctaagccgcatgcaggatggcagtaacagg

SEQ ID NO: 34500 - DNA, 75 bp, synthetic construct
  source 1..75: mol_type = other DNA
tgattgttaaaggtatggaaggcgcaatcaatgcgaagaccgtaacctatgacttcgagcgtctgatggaaggcg

SEQ ID NO: 34501 - DNA, 75 bp, synthetic construct
  source 1..75: mol_type = other DNA
gtttgatgaaatcaatattgtaggtggtcagccagtatctggtggacggctgggtgtgaagatttacaaaattga

SEQ ID NO: 34502 - DNA, 75 bp, synthetic construct
  source 1..75: mol_type = other DNA
ccggatagtggcgctgtgttcggtattgatcgacatggtaaatccgtttctgtcgatgaaattgtgaatgttgaa

SEQ ID NO: 34503 - DNA, 75 bp, synthetic construct
  source 1..75: mol_type = other DNA
aaagtgaggttaaagtggtatactttaattcctttttttggatattttttatcgaaaggaaagtgtaactcatgt

SEQ ID NO: 34504 - DNA, 75 bp, synthetic construct
  source 1..75: mol_type = other DNA
ttaaccggggagcaattcaaggtcttaatgctgatgcttgcagatctggattacgaaaacttcattcagatcgcc

SEQ ID NO: 34505 - DNA, 75 bp, synthetic construct
  source 1..75: mol_type = other DNA
ccttcagctcttttggtatcagttatcataaagataattctttccggggcaccatccgtgggaagaatgatgagg

SEQ ID NO: 34506 - DNA, 75 bp, synthetic construct
  source 1..75: mol_type = other DNA
gcgtcaccctggtctgtccgtactgcagccagcatttttcggcggacgtgcccgtcatggaattctcccgccctg

SEQ ID NO: 34507 - DNA, 75 bp, synthetic construct
  source 1..75: mol_type = other DNA
acagtattcgtgcagagtttgaagagcttgtcgagaaagattcattctggtcgaagtttgtcggctctcaatttg

SEQ ID NO: 34508 - DNA, 75 bp, synthetic construct
  source 1..75: mol_type = other DNA
ctgccagcggccccgttcggcctgaaatccacaccggcgatattttcttcgataaatacggctggatggtaaagg

SEQ ID NO: 34509 - DNA, 75 bp, synthetic construct
  source 1..75: mol_type = other DNA
ttgtcatagttacctccatggtttcaggaattgcaattgctgagttgtcttatttcatattgcttatcattaaat

SEQ ID NO: 34510 - DNA, 75 bp, synthetic construct
  source 1..75: mol_type = other DNA
aggagtgtctgacgatcaccacagcattcgggattacaggcgttcaggtgacacgtattctggacagcattgcgc

SEQ ID NO: 34511 - DNA, 75 bp, synthetic construct
  source 1..75: mol_type = other DNA
atgctcaatcaagaactggaactcagtttaaatatggctttcgccagagcgcgcgagcaccgtcatgagtttatg

SEQ ID NO: 34512 - DNA, 75 bp, synthetic construct
  source 1..75: mol_type = other DNA
cgctggtcatgcttgcgcagtatcacggtattgctgtttctccaaaagatatagagcatcagtttgatcctgaaa

SEQ ID NO: 34513 - DNA, 75 bp, synthetic construct
  source 1..75: mol_type = other DNA
ttgagaataacagtctttttattaatgttcctttcttttttgtctgatttatgggcggttgatattccaatcaac

SEQ ID NO: 34514 - DNA, 75 bp, synthetic construct
  source 1..75: mol_type = other DNA
actgatctactggagcagcgtgtaccgatgatgcaggcatgggcggattatgtgatgtctcaacttgctaaaaac

SEQ ID NO: 34515 - DNA, 75 bp, synthetic construct
  source 1..75: mol_type = other DNA
aactggatgagttagattctttattaattatagatctcgggggcaccacattagatatttctcaggtaatgggga

SEQ ID NO: 34516 - DNA, 75 bp, synthetic construct
  source 1..75: mol_type = other DNA
cgctgggtgcctggctggatgtgtacaccacgtccacagatggatgccactgaacacaccactaacctggctgat

SEQ ID NO: 34517 - DNA, 75 bp, synthetic construct
  source 1..75: mol_type = other DNA
acgggacatgacgacgttcctgtcactcagccaggaggtgctgttatccctgctcagtttctgtaccgcgtgcag

SEQ ID NO: 34518 - DNA, 75 bp, synthetic construct
  source 1..75: mol_type = other DNA
ggggaacactaaattccgctttgtgggggctgatgccttctcgccagatgaactgcgcaccgatttgttcagcga

SEQ ID NO: 34519 - DNA, 75 bp, synthetic construct
  source 1..75: mol_type = other DNA
gtgaaaacgtcaggacatcatgcaaggtttttgatgtgtcaaccaacatcaacgcaggggacaaggataataacc

SEQ ID NO: 34520 - DNA, 75 bp, synthetic construct
  source 1..75: mol_type = other DNA
gaaaaacgacccgcgtctggacggtgcattcaccatgtactacatgtccgtcaacatcggctctttcttctctat

SEQ ID NO: 34521 - DNA, 75 bp, synthetic construct
  source 1..75: mol_type = other DNA
cctgacatcatcagtatgcccagggctattgcgtttgcgggtcaggcaaccagagattcagccagggataatcct

SEQ ID NO: 34522 - DNA, 75 bp, synthetic construct
  source 1..75: mol_type = other DNA
aacagcacgataaacgttcagatatcaaagaacgcgaatggcaggtggataaagcgcgtatcatgaaaaacgccc

SEQ ID NO: 34523 - DNA, 75 bp, synthetic construct
  source 1..75: mol_type = other DNA
gcagtcaggtattgctccacaacctgttgatattgttgtgactttacctttaggtgagtatctggatgagaacga

SEQ ID NO: 34524 - DNA, 75 bp, synthetic construct
  source 1..75: mol_type = other DNA
atgtggtggtcctttcccggcgttcccgcgacggagggatggaatccggcgtacatatccgcggtgtcaatccgg

SEQ ID NO: 34525 - DNA, 75 bp, synthetic construct
  source 1..75: mol_type = other DNA
aaaaaaacattgtctggcgttatgagaatttttcactggagtggcagtccgccatcacgcaggccatcaacttga

SEQ ID NO: 34526 - DNA, 75 bp, synthetic construct
  source 1..75: mol_type = other DNA
cccccgatggcaaaggcattcggctggagctaatcggcttcaggggaaatgaaacaataccggatacgcttcatt

SEQ ID NO: 34527 - DNA, 75 bp, synthetic construct
  source 1..75: mol_type = other DNA
tgtggattttagcaaacgctccaacgaagcgggaagaaatatgatggctcatattgagtcctcatcttatatcaa

SEQ ID NO: 34528 - DNA, 75 bp, synthetic construct
  source 1..75: mol_type = other DNA
gtggcgttgggctgatcggtgttgatgccattcgtggagctgcaatgcgagtaatcggtaataagtttagtggct

SEQ ID NO: 34529 - DNA, 75 bp, synthetic construct
  source 1..75: mol_type = other DNA
tgtggcaacgtttctgtcaattttatcaacaagatcctttgcagagactgcatcacgctaatgatacagactcgt

SEQ ID NO: 34530 - DNA, 75 bp, synthetic construct
  source 1..75: mol_type = other DNA
agagagcttcgtgaaaacgataaagcgtgactacatcgtgttcatgcccaagccagatgttaatgacggcattgc

SEQ ID NO: 34531 - DNA, 75 bp, synthetic construct
  source 1..75: mol_type = other DNA
ccgaacatcgtgaacatttgctggagtttatccgcctggatgaacccgctccgcttaacgccatgacgctggcgc

SEQ ID NO: 34532 - DNA, 75 bp, synthetic construct
  source 1..75: mol_type = other DNA
actcatcagagggcatcccgtggcatgaactgccaacttcacacagaggaaacaatcagatgagtttgcccttac

SEQ ID NO: 34533 - DNA, 75 bp, synthetic construct
  source 1..75: mol_type = other DNA
agatcctgagtatctcggctcgtaccgtacatacaaacgacaaattcagctactcatacggcctggaagaaacgc

SEQ ID NO: 34534 - DNA, 75 bp, synthetic construct
  source 1..75: mol_type = other DNA
agcgcgcagaattacgcaatgaagaaagatcttgatgcaatttctggtgcatcaattgacgatcttggcttcatg

SEQ ID NO: 34535 - DNA, 75 bp, synthetic construct
  source 1..75: mol_type = other DNA
atgaatataaaaaattatttgcgttacctgatgaatctgaactgcagcagaaggacgccgaggagctgttcgact

SEQ ID NO: 34536 - DNA, 75 bp, synthetic construct
  source 1..75: mol_type = other DNA
tagccgtgcatctggtggtgatcagaggaaactatacaacgctgcacagcgaatccaaggaaagatgcagaatca

SEQ ID NO: 34537 - DNA, 75 bp, synthetic construct
  source 1..75: mol_type = other DNA
atgaacaaaatttcaacatatcgaaaacaacttggtctgtctcaaagacaactcgctgttcagctagggtggata

SEQ ID NO: 34538 - DNA, 75 bp, synthetic construct
  source 1..75: mol_type = other DNA
tgaaaatcgccagattgtcgcggataacgcaaaaacacgcgtacccatgacgataggcgcactctggacggctta

SEQ ID NO: 34539 - DNA, 75 bp, synthetic construct
  source 1..75: mol_type = other DNA
gtgagggattattacggaaaacaacttttgccaggagggttgatactccagtggctgacgattccatcaagtgca

SEQ ID NO: 34540 - DNA, 75 bp, synthetic construct
  source 1..75: mol_type = other DNA
tggatgagctggtggattgtgtggcagagctggaaaccaaagttggaaagtttgaaaaactggtgcaggaggtac

SEQ ID NO: 34541 - DNA, 75 bp, synthetic construct
  source 1..75: mol_type = other DNA
gatgccggtaaaaaatcggcaaaaggtgatgccgcgaaaaaagcggctaaccgttttgcggtgccaccaccaccc

SEQ ID NO: 34542 - DNA, 75 bp, synthetic construct
  source 1..75: mol_type = other DNA
gcgcttgatgaaatcacaaagaaaaaatccccggtggccgccggggactctaagcaaattgatatgcaattctga

SEQ ID NO: 34543 - DNA, 75 bp, synthetic construct
  source 1..75: mol_type = other DNA
gaagggaaaaaacaggccggaaaacgcctgtggattgcagagggttatgcgaccgcactcaccgtgcatcacctg

SEQ ID NO: 34544 - DNA, 75 bp, synthetic construct
  source 1..75: mol_type = other DNA
tcgtgcaaataaaaggggaaagctatcgactgaagcagaaacgaaaggccggggttatcgctgaagctaatcctg

SEQ ID NO: 34545 - DNA, 75 bp, synthetic construct
  source 1..75: mol_type = other DNA
ggatgaactcgacggcgaaagtgtgcgggtttttcactacttcaacgctgtttgctcgatgacgaccgcgacgct

SEQ ID NO: 34546 - DNA, 75 bp, synthetic construct
  source 1..75: mol_type = other DNA
cggcgcaacagcgcgacccgatggtcatcccgccggtgccggttgacgagccggtgattaaaaacacggcctttt

SEQ ID NO: 34547 - DNA, 75 bp, synthetic construct
  source 1..75: mol_type = other DNA
gccctttatgcgtggccaaacaagcaacgcatgcccaacctgctgctggttggcccgaccaacaatggcaagtcg

SEQ ID NO: 34548 - DNA, 75 bp, synthetic construct
  source 1..75: mol_type = other DNA
tgcccttcaccaggatgaaaccgacccggaactgatgtttcaggattatgagggattcccggggaatatggcctc

SEQ ID NO: 34549 - DNA, 75 bp, synthetic construct
  source 1..75: mol_type = other DNA
gtctgatgaaaacctccgcacttggcagtctcgcgctggcaagcagtgctttcactttgccgttttcccaaatgg

SEQ ID NO: 34550 - DNA, 75 bp, synthetic construct
  source 1..75: mol_type = other DNA
gtgaagtgctggcagatcatccggggttgatttgtatcctccagcagcggtatgaaggacgggggatgactaagc

SEQ ID NO: 34551 - DNA, 75 bp, synthetic construct
  source 1..75: mol_type = other DNA
ggcgggcgacctctccctccggggtaaaacactgaataccgcagggaccacgcagggacagaatctcaccgtgca

SEQ ID NO: 34552 - DNA, 75 bp, synthetic construct
  source 1..75: mol_type = other DNA
atgagacactttatctatcaggacgaaaaatcacataaattctgggcagttgagcaacaggataatgagcttcat

SEQ ID NO: 34553 - DNA, 75 bp, synthetic construct
  source 1..75: mol_type = other DNA
ctgcgtttaaccagacagagtttaataaacttcttcttgaatgtgttgtaaaaacacagtcaacggtggcaaaga

SEQ ID NO: 34554 - DNA, 75 bp, synthetic construct
  source 1..75: mol_type = other DNA
acgatcatgtttctgaaaaaataaatgctattgctgttcaaagacgggcagaaggggctaaagagaaagatgtaa

SEQ ID NO: 34555 - DNA, 75 bp, synthetic construct
  source 1..75: mol_type = other DNA
cagtacgattatcgccgggcagccgttgttaccggctgtgggggccgtcatcaccccacaaaacggggccggaat

SEQ ID NO: 34556 - DNA, 75 bp, synthetic construct
  source 1..75: mol_type = other DNA
tttaatttcctggagcatttcccgttctcttctgtgctgtcattcattgcaatggcgatggtcatcgtcttcttt

SEQ ID NO: 34557 - DNA, 75 bp, synthetic construct
  source 1..75: mol_type = other DNA
gctgtgggatattaaagccaaagctgccaacatgccgctttaccagttactcggcggcgcgtctcgtgaaggggt

SEQ ID NO: 34558 - DNA, 75 bp, synthetic construct
  source 1..75: mol_type = other DNA
ctacgacatcatgctccagtacattcaggaactgcttcagcaggcccgggccatgattgccaccgggaactatcc

SEQ ID NO: 34559 - DNA, 75 bp, synthetic construct
  source 1..75: mol_type = other DNA
ttttcataaacgttggtttgggagaagcggcaacgaggaacgtcggaacggataccgggcaagtaccagatatga

SEQ ID NO: 34560 - DNA, 75 bp, synthetic construct
  source 1..75: mol_type = other DNA
catcaatatcatctgggactcgctgtccaaaaacaggatgcttgatggtaacaaagagctgaaagagttcattat

SEQ ID NO: 34561 - DNA, 75 bp, synthetic construct
  source 1..75: mol_type = other DNA
gtggggaggttttgatccacgcgtgtgggatgtgggaagtctgttggattttgctgttcctgttgttttttgttt

SEQ ID NO: 34562 - DNA, 75 bp, synthetic construct
  source 1..75: mol_type = other DNA
gccagtgctcaagggacaaattccgttgctctgggtgcgggttctgtagcgactgaagataattccgtctctgtg

SEQ ID NO: 34563 - DNA, 75 bp, synthetic construct
  source 1..75: mol_type = other DNA
tgctcttggcgacaccgccaatgcgtcaaaagcgtattcaatggcgctgggagcaagtagcgtcgcatctgaaga

SEQ ID NO: 34564 - DNA, 75 bp, synthetic construct
  source 1..75: mol_type = other DNA
cagcactagcagtactgatgccataaatggatcacagctttatgctatcagtaagtcagtagcggaccgtcttgg

SEQ ID NO: 34565 - DNA, 75 bp, synthetic construct
  source 1..75: mol_type = other DNA
aacgaataacacggttgcccttgaagggatgagcgcagatggtgcaacgaagtggcaatataatcacaacggtga

SEQ ID NO: 34566 - DNA, 75 bp, synthetic construct
  source 1..75: mol_type = other DNA
tggcgataccttgtccggtgggcttacttttgaaaatgactcaatccttgcctggattcgaaatactgactgggc

SEQ ID NO: 34567 - DNA, 75 bp, synthetic construct
  source 1..75: mol_type = other DNA
ataacgttggcgatgcgctcactgtactcgatcaattcaccctgcaatgggatcaaaacagagacaaatacagcg

SEQ ID NO: 34568 - DNA, 75 bp, synthetic construct
  source 1..75: mol_type = other DNA
taattttcaggaagacacgataaagattgtttacgacgagaataatataattgtcggcatcaccagagatgcttc

SEQ ID NO: 34569 - DNA, 75 bp, synthetic construct
  source 1..75: mol_type = other DNA
agaaattatgcgtggcagtctcctttcggtcaataatagcagaacaaaagaaagagccagaaatgacggtcagat

SEQ ID NO: 34570 - DNA, 75 bp, synthetic construct
  source 1..75: mol_type = other DNA
caggtaatcccaaaaccgttgctcagtatcaactgacaaaaaattttgatgttatctggttgttttcagaggacg

SEQ ID NO: 34571 - DNA, 75 bp, synthetic construct
  source 1..75: mol_type = other DNA
gcgactcggtagcaaaaaggcttggaggaggggctgcagtagatgttgatgacggtactgttacagcaccaacct

SEQ ID NO: 34572 - DNA, 75 bp, synthetic construct
  source 1..75: mol_type = other DNA
cagcactgccgtaggttttgaagctcgggcgcaaagaaagtggtcaacggctattggcgctcaaactgtggccgg

SEQ ID NO: 34573 - DNA, 75 bp, synthetic construct
  source 1..75: mol_type = other DNA
gcgtatacctgatgaaccgtcccgtcgctggtttgaccgggatattctgcgggaggtggtcctggaagcccggac

SEQ ID NO: 34574 - DNA, 75 bp, synthetic construct
  source 1..75: mol_type = other DNA
gatttattcggtaatgaaaccactctggccgtatccgaagaggatattcaagctgcgcttgatggagatgagttc

SEQ ID NO: 34575 - DNA, 75 bp, synthetic construct
  source 1..75: mol_type = other DNA
tgaatactcattatattctttcagaaaaagatttaaatgcgccaacatttaagaaaatatcgagtaatgagtatt

SEQ ID NO: 34576 - DNA, 75 bp, synthetic construct
  source 1..75: mol_type = other DNA
tatatgtattattctcgctgcttgcaggatgtgtctctgaatctcttattgatgaaaagaagaaaaaagctcaaa

SEQ ID NO: 34577 - DNA, 75 bp, synthetic construct
  source 1..75: mol_type = other DNA
cgggtcccgcgggtcctcaggggccgaagggagataaaggagagcgtggcgacaccggcccggcaggggcaaccg

SEQ ID NO: 34578 - DNA, 75 bp, synthetic construct
  source 1..75: mol_type = other DNA
cgcagcagaaaaagcccgggagtcagcagaaagcgcacagtcagcggaacaaagcaggatagcggcggaagaagc

SEQ ID NO: 34579 - DNA, 75 bp, synthetic construct
  source 1..75: mol_type = other DNA
caaataattattataatgcaactatggaaaaaggtataagatgggatgatgaatatttagctattaattggaaag

SEQ ID NO: 34580 - DNA, 75 bp, synthetic construct
  source 1..75: mol_type = other DNA
ggggcgttcctcctgttgagcgtcgggggagggaagttttttatgacgttaaaactgtactggagatagatcgcg

SEQ ID NO: 34581 - DNA, 75 bp, synthetic construct
  source 1..75: mol_type = other DNA
atgcgcgtattgataaaaaacggcattgttgttaatgcagatggacaggcgaagcaggatttgctgattgaaagc

SEQ ID NO: 34582 - DNA, 75 bp, synthetic construct
  source 1..75: mol_type = other DNA
agaaatcatcgtgatgacttacctattgcaattctggccgccggaatggttaatgaaaatgatctgatcttcttt

SEQ ID NO: 34583 - DNA, 75 bp, synthetic construct
  source 1..75: mol_type = other DNA
cgaatcaatattatgctccatcacatgaaaaaaatattatatggaatgacctcttgcttaatattaaatggccga

SEQ ID NO: 34584 - DNA, 75 bp, synthetic construct
  source 1..75: mol_type = other DNA
gtgccggaaatcaaaaccgcaaaagacttcctgcagaaaatggcaagcgacattaacagtatgaacctcagttcc

SEQ ID NO: 34585 - DNA, 75 bp, synthetic construct
  source 1..75: mol_type = other DNA
atgaaatcattaaccacggaaacagcgctggatattctgattgcgtggctgcaggacaatatcgactgcgaatcg

SEQ ID NO: 34586 - DNA, 75 bp, synthetic construct
  source 1..75: mol_type = other DNA
ttgcccgaggggatgaaagccgaaacgaactggacgatggaaaacgggaaacagaatgccgtaaggctggtacag

SEQ ID NO: 34587 - DNA, 75 bp, synthetic construct
  source 1..75: mol_type = other DNA
acgcggcttttgccctagctgcggtgcccgccggatggccgagagtgcggcgctgctgatagacgaagtcttccc

SEQ ID NO: 34588 - DNA, 75 bp, synthetic construct
  source 1..75: mol_type = other DNA
aagtttgttatgaataatcctgaaggggagcgagcggatttatctaaggtggaaatagaaattacacttgcctca

SEQ ID NO: 34589 - DNA, 75 bp, synthetic construct
  source 1..75: mol_type = other DNA
gaacactgcggcggtcacgtcaaagtgattgccagcatcgaagatccgaaggtcattgagcagattctcaagcat

SEQ ID NO: 34590 - DNA, 75 bp, synthetic construct
  source 1..75: mol_type = other DNA
taaatccgcaatataaaacgaaaaaacaggcagttttccagaaaatcgtctcgtttattgagaagtttaaaggcg

SEQ ID NO: 34591 - DNA, 75 bp, synthetic construct
  source 1..75: mol_type = other DNA
cagctgcagcgttttgttaagcagattatgagcaatgctgccggttacttttttgaccttgccctgcagacaacg

SEQ ID NO: 34592 - DNA, 75 bp, synthetic construct
  source 1..75: mol_type = other DNA
aagataaagagcgggtgctgaagaatcagaacatcatgtgggaggcgctgaaaaagaacaagatgtttgacggta

SEQ ID NO: 34593 - DNA, 75 bp, synthetic construct
  source 1..75: mol_type = other DNA
gtccgatgcttgagcagatggtgaaggaggcggtaagccatatccctgttccgcgcgacggtcgtgactatgatc

SEQ ID NO: 34594 - DNA, 75 bp, synthetic construct
  source 1..75: mol_type = other DNA
agaacggcgaaacgcggcagggctggcaggttatcgcagacagcgtaatcagtgcgcgaacggcgcgaccgggcg

SEQ ID NO: 34595 - DNA, 75 bp, synthetic construct
  source 1..75: mol_type = other DNA
tggtcaacgcaacagtcatgtgaaaacatgtagttgcggaggattgttgaatgagacgaacatttacagcaaagg

SEQ ID NO: 34596 - DNA, 75 bp, synthetic construct
  source 1..75: mol_type = other DNA
cagaactcagaaaatcactgacatgggacagaggaatggaactggccagacatctagaatttactgtcagcaccg

SEQ ID NO: 34597 - DNA, 75 bp, synthetic construct
  source 1..75: mol_type = other DNA
gtggcacaacgcggtgtaaataaagtcatcctgataggtaccctgggacaagacccagatatcaggtatatacca

SEQ ID NO: 34598 - DNA, 75 bp, synthetic construct
  source 1..75: mol_type = other DNA
agatgagcggcacgctgataacgttcaggcgcaaacggaaagctctgtagttcaggactcccctgcagaatcacc

SEQ ID NO: 34599 - DNA, 75 bp, synthetic construct
  source 1..75: mol_type = other DNA
ttgatgaaacgggtcatagccagatcatggttgaaccggttgctgatgtgaccgcatatggcgttgtggattgca

SEQ ID NO: 34600 - DNA, 75 bp, synthetic construct
  source 1..75: mol_type = other DNA
ccgtgaaaagtcgtggcacaagaccaccgttggggaagtggtgaaggaaatagctgcgcggcacaaactgaagat

SEQ ID NO: 34601 - DNA, 75 bp, synthetic construct
  source 1..75: mol_type = other DNA
ttattaaacacgctgaaagaagccggtattcaaccggataaaacaaaattaaaccagcttgcactgtccattaaa

SEQ ID NO: 34602 - DNA, 75 bp, synthetic construct
  source 1..75: mol_type = other DNA
tattcatggtttccgggcgagtgaaatttgtcgattgaggatttcggatattgatcttaaggcaaagtgtatata

SEQ ID NO: 34603 - DNA, 75 bp, synthetic construct
  source 1..75: mol_type = other DNA
tggcaagccgggttatgcgacgggaatatggcagccttgtgcctgatttgattgacgaacccatgaataacacca

SEQ ID NO: 34604 - DNA, 75 bp, synthetic construct
  source 1..75: mol_type = other DNA
ccggctggcgacgttacttatcaaccgtcacggcggcgtactgccgccgctcctggcctccgccattcagaaact

SEQ ID NO: 34605 - DNA, 75 bp, synthetic construct
  source 1..75: mol_type = other DNA
agattgttgatgaaatctgtgattttgtggcgaatcagcaggcggttttcctcggtggtcactacatccttcagg

SEQ ID NO: 34606 - DNA, 75 bp, synthetic construct
  source 1..75: mol_type = other DNA
tgcagatagccacaatgccaatctgcttgcacttgaaaatacggtgtcagcggcttcgggactgggaatacagct

SEQ ID NO: 34607 - DNA, 75 bp, synthetic construct
  source 1..75: mol_type = other DNA
aaattctgcgcaattacaaagccgtgattaatgcgcggcgtcgtgaaatggggcagaaaccgctcaccaccgcgc

SEQ ID NO: 34608 - DNA, 75 bp, synthetic construct
  source 1..75: mol_type = other DNA
taccgtcagcccggataatggttttacgaccagtcttgagcttgaagtgaaggttgatgatctcgaaatggaatg

SEQ ID NO: 34609 - DNA, 75 bp, synthetic construct
  source 1..75: mol_type = other DNA
gaacgccacaacatgattaatcgcctgctgagactaaaccatcgaccagatgaagatcgctcgcgtttaaatcga

SEQ ID NO: 34610 - DNA, 75 bp, synthetic construct
  source 1..75: mol_type = other DNA
cgccagtgcttcggcgcgtttgctggcccatagcggtattccgcataaagtgcctgacgcggtactggagttact

SEQ ID NO: 34611 - DNA, 75 bp, synthetic construct
  source 1..75: mol_type = other DNA
agattcaggcactggctgacggaatggatatttccctgaccgatcatgaaatcaggactgtcctggcgcgcctgg

SEQ ID NO: 34612 - DNA, 75 bp, synthetic construct
  source 1..75: mol_type = other DNA
attgaacgccttctgattgcgtgtgatgagtcacggaataaagatttgggggttgttgtccgtattgggcttgcg

SEQ ID NO: 34613 - DNA, 75 bp, synthetic construct
  source 1..75: mol_type = other DNA
cgctcaaggctgacagctaatgagtatgtcgcgattcaccatgcagccgaacctctcccaatctggctgaggctt

SEQ ID NO: 34614 - DNA, 75 bp, synthetic construct
  source 1..75: mol_type = other DNA
tgaacaggcataatggagggaaaaccgcagaaattgcggaggcgctggcggtaacggattatcaggcacgctatt

SEQ ID NO: 34615 - DNA, 75 bp, synthetic construct
  source 1..75: mol_type = other DNA
tgagcagacataatggagggaaaaccgcagaaattgcggaggcgctggcggtaacggattatcaggcacgctatt

SEQ ID NO: 34616 - DNA, 75 bp, synthetic construct
  source 1..75: mol_type = other DNA
ttaacgcctgttattaatgaattaaatacagtgatggcaattcacgagaataataaagcgcagcacaccggagaa

SEQ ID NO: 34617 - DNA, 75 bp, synthetic construct
  source 1..75: mol_type = other DNA
atgaccattctggactacatcgctactcatccggggtgtagcggcggagagatcgccgcagcactgaatactcca

SEQ ID NO: 34618 - DNA, 75 bp, synthetic construct
  source 1..75: mol_type = other DNA
atgcataaatcagaagctgaaaaaatagattctattctggatgaacatcaacagatatatcgcagacataaccga

SEQ ID NO: 34619 - DNA, 75 bp, synthetic construct
  source 1..75: mol_type = other DNA
ttgtgtatagctggcaacgttctgttgatccgaacactgcttctccgtatgccagttatctgcaatatgggcata

SEQ ID NO: 34620 - DNA, 75 bp, synthetic construct
  source 1..75: mol_type = other DNA
acgaatctctggtatgtggcgtgttccccaaccaggacggtacgttcaccgcgatgacgtataccaaaagcaaaa

SEQ ID NO: 34621 - DNA, 75 bp, synthetic construct
  source 1..75: mol_type = other DNA
ttcaccgcaatgacgtataccaaaagcaaaacgtttaaaaccgaaaatggtgcccgtcgctggctggaaagaaac

SEQ ID NO: 34622 - DNA, 75 bp, synthetic construct
  source 1..75: mol_type = other DNA
atggatactatcgatcttggtaacaacgaatctctggtgtacggcgtgtttcccaaccaggacggcacgttcacc

SEQ ID NO: 34623 - DNA, 75 bp, synthetic construct
  source 1..75: mol_type = other DNA
atggacgaaaaacagttacaggctctggctaacgaactggccaaaaacctcaaaacccctgaagacctcagtcag

SEQ ID NO: 34624 - DNA, 75 bp, synthetic construct
  source 1..75: mol_type = other DNA
ccgccaccgaaggccggatcggcaataaaaaagtgattctggccgggaccaataattatctcggtttaaccttta

SEQ ID NO: 34625 - DNA, 75 bp, synthetic construct
  source 1..75: mol_type = other DNA
atgaggggtgtcacgacgagtcacgcatatgtcacgacatgtcacgacgagtcacgacagataaagatacagata

SEQ ID NO: 34626 - DNA, 75 bp, synthetic construct
  source 1..75: mol_type = other DNA
ctgctgacactggcagaactgttcctggtggggttgattacatcagtggccaggatcagaagtggtggcctgctg

SEQ ID NO: 34627 - DNA, 75 bp, synthetic construct
  source 1..75: mol_type = other DNA
gataatctccgtcaggcttccttactccgaacgcccaccgcgtccgtcccgcacattccagcaacggatctggag

SEQ ID NO: 34628 - DNA, 75 bp, synthetic construct
  source 1..75: mol_type = other DNA
aaaaggatgcacaccacatctacctcactgacggcacttacttctgcgccaccaacgtggcgcgggtgaatctta

SEQ ID NO: 34629 - DNA, 75 bp, synthetic construct
  source 1..75: mol_type = other DNA
ttcagtcccgtatctgcgccacgcatcccctgaacggctgcacccgccaggctcatcgcctcaccctgcagattg

SEQ ID NO: 34630 - DNA, 75 bp, synthetic construct
  source 1..75: mol_type = other DNA
cactgacggcacttacttctgcgccacgaatgtggtgcaggtgaaccttatccgacaggtacaggagtcacgcag

SEQ ID NO: 34631 - DNA, 75 bp, synthetic construct
  source 1..75: mol_type = other DNA
ccgccgtattcggtgaaatggattggcagcgatgacccgacgctgattaacgatgaacgttttgccccggctggc

SEQ ID NO: 34632 - DNA, 75 bp, synthetic construct
  source 1..75: mol_type = other DNA
tctacaaaagaaaataattgaaattaacaattggatagataatgaggtcataaaattcgaattttatgacctcat

SEQ ID NO: 34633 - DNA, 75 bp, synthetic construct
  source 1..75: mol_type = other DNA
acaacgcaaccgtatcagttcacgaaaggcagcatttttcacctgatggaaccggatatcaaccaggagatctac

SEQ ID NO: 34634 - DNA, 75 bp, synthetic construct
  source 1..75: mol_type = other DNA
cttgagcctgcgcttgcaaaatacacccgacgcggattagacctggatacctactggtttatgcaatacggtatg

SEQ ID NO: 34635 - DNA, 75 bp, synthetic construct
  source 1..75: mol_type = other DNA
agataatcaggatgtcgttgccgcactcattgtgaatgagtatcgggagcagggcggcggcaccatcgatttccc

SEQ ID NO: 34636 - DNA, 75 bp, synthetic construct
  source 1..75: mol_type = other DNA
ctgcggcgacgaatcagatccagcataaaaaccaaacttcagccgaagcattcagcttcggtgatcccgttcctg

SEQ ID NO: 34637 - DNA, 75 bp, synthetic construct
  source 1..75: mol_type = other DNA
tgaaaggcttcccggatgccatcaacacagtatatccgaaggcccgcatccagttatgcatcgtgcatatggtgc

SEQ ID NO: 34638 - DNA, 75 bp, synthetic construct
  source 1..75: mol_type = other DNA
cggcgctggtatcgaaggtcaccgatgccgttatggagcaggtagtcgaatggcaaaaccggccactggatgcgg

SEQ ID NO: 34639 - DNA, 75 bp, synthetic construct
  source 1..75: mol_type = other DNA
gcggtcgcgaatgtcaggttcggatccccggcgtgtgcaacggcaacccagacacaagcgtgctggcgcatattc

SEQ ID NO: 34640 - DNA, 75 bp, synthetic construct
  source 1..75: mol_type = other DNA
gttccttcgaattcacttccagcgagcatttcccgtggtcacagcctgtcatgtaccacatctgcgtcgaactgc

SEQ ID NO: 34641 - DNA, 75 bp, synthetic construct
  source 1..75: mol_type = other DNA
gataatctccgtcaggctcccttactccgaacggccaccgcgtccgtcccgcacattccagcaacgtatctggag

SEQ ID NO: 34642 - DNA, 75 bp, synthetic construct
  source 1..75: mol_type = other DNA
gccgacattctgacaccacgacgccgggaggattacggtaaggacctgtggagcgcatatcagaccatccaggag

SEQ ID NO: 34643 - DNA, 75 bp, synthetic construct
  source 1..75: mol_type = other DNA
atgcaattagtcagtcgttttggttatgcgaaccagatacgccgtgaccgtccgctgacacatgaagagctgatg

SEQ ID NO: 34644 - DNA, 75 bp, synthetic construct
  source 1..75: mol_type = other DNA
gtgaagtacgggtaccgcataaaggcaatgtggtggagaaagtgattgaaggcgcttatgaagtcctcagtgttt

SEQ ID NO: 34645 - DNA, 75 bp, synthetic construct
  source 1..75: mol_type = other DNA
gcgaaatcagtgttccgcatcgcggcgatattgtcgggaaagtgattgaaggtgcttacgaagtgctcagcgtct

SEQ ID NO: 34646 - DNA, 75 bp, synthetic construct
  source 1..75: mol_type = other DNA
gagaagtccgggtgccccaccggggaaacgtggtggacagggtgattgaaggtgcttacgaggtggtgggcgttt

SEQ ID NO: 34647 - DNA, 75 bp, synthetic construct
  source 1..75: mol_type = other DNA
aaggttttcagccattcttcgcctgccagacccgtgtgcgcgacccgggccgccggggatacacaaaacacatgc

SEQ ID NO: 34648 - DNA, 75 bp, synthetic construct
  source 1..75: mol_type = other DNA
atcgtttttttctaaattcactcgtctgaatatgcttcgcctggttcgtgcagtgatcccggttgctgttctgat

SEQ ID NO: 34649 - DNA, 75 bp, synthetic construct
  source 1..75: mol_type = other DNA
gtacatgatgaccaaaaacgttaagttcctcgccggttttgccattatctccgtgtttattaccgtgggtatggc

SEQ ID NO: 34650 - DNA, 75 bp, synthetic construct
  source 1..75: mol_type = other DNA
cgttttcgtttccgtggagtcatgaccacaaccagtattgatgactttgttgaatacagcaaagggtatgccgat

SEQ ID NO: 34651 - DNA, 75 bp, synthetic construct
  source 1..75: mol_type = other DNA
agttgaaaaaagcgaaaccagattgcaaattaccggatatggcgatggggtatctggagcggaatgggctgataa

SEQ ID NO: 34652 - DNA, 75 bp, synthetic construct
  source 1..75: mol_type = other DNA
cgacagagtggaaactgctgtgggttaagctggaaggaaaaccgcttccgtcacagatgccgacactgaaatggg

SEQ ID NO: 34653 - DNA, 75 bp, synthetic construct
  source 1..75: mol_type = other DNA
acggcgtcaatgcccggggcatggagctgacgcaaaaagccatacgcgaaaactatgcccgccacagccatggct

SEQ ID NO: 34654 - DNA, 75 bp, synthetic construct
  source 1..75: mol_type = other DNA
tacatttctgatattctgcctgttattgatgcactacccaatccaccagtgttagttacacttggttatgaatct

SEQ ID NO: 34655 - DNA, 75 bp, synthetic construct
  source 1..75: mol_type = other DNA
cgcgcagcttatcgggcagatcccggccactgtctgggtattgtttacggagagccgctttgcctgggacagcgc

SEQ ID NO: 34656 - DNA, 75 bp, synthetic construct
  source 1..75: mol_type = other DNA
gagcgactacgaactcgaaccacaatctgccagttgcgccaaatctgctgaaccagacgttcgctcctacagcac

SEQ ID NO: 34657 - DNA, 75 bp, synthetic construct
  source 1..75: mol_type = other DNA
ttaaccgcattcagtatgacgagaaatttaccgggagcgtaaaagcattgaggaagcaggctggatgtgcacgac

SEQ ID NO: 34658 - DNA, 75 bp, synthetic construct
  source 1..75: mol_type = other DNA
atgcataacctgtcaatttctgaccttaacagcattcagtttgacgagatattttccgggcagctactggtcaac

SEQ ID NO: 34659 - DNA, 75 bp, synthetic construct
  source 1..75: mol_type = other DNA
ccggtcctgatcctgctggcaggcggcggaattgcactgcctgcattgcagggcattatctctgccggggcatcg

SEQ ID NO: 34660 - DNA, 75 bp, synthetic construct
  source 1..75: mol_type = other DNA
tgcatacctggtttcccgtctgggaaaccacccattgaaagaactggaagtaagagactttgcattaatactgga

SEQ ID NO: 34661 - DNA, 75 bp, synthetic construct
  source 1..75: mol_type = other DNA
ctgcgcatcccgcgccgagccgaggtaagcgcgaaggtcgaaccagaggcgcgggtgctggcaatgctcaagaat

SEQ ID NO: 34662 - DNA, 75 bp, synthetic construct
  source 1..75: mol_type = other DNA
ggcgatcccgtttgataacgtcgacgacgagcaaattcaaaagccgcagcgttggaatccggcggatctggggcg

SEQ ID NO: 34663 - DNA, 75 bp, synthetic construct
  source 1..75: mol_type = other DNA
aacatgatccggctgtaagccagttaatggatcatatcgacaatataccggctcctgagcaggaggcccgctggc

SEQ ID NO: 34664 - DNA, 75 bp, synthetic construct
  source 1..75: mol_type = other DNA
agggcgatgcgcgtgtcagccagactttaatggcgcgactggcgtctctgctggaaagtcatccttacctggcaa

SEQ ID NO: 34665 - DNA, 75 bp, synthetic construct
  source 1..75: mol_type = other DNA
gatatcatgctacctgatgtgaacggctgggatatcatccgcatgctgcgcactgccggaaagggtatgccggtc

SEQ ID NO: 34666 - DNA, 75 bp, synthetic construct
  source 1..75: mol_type = other DNA
atgaagctgatcctgccttttccgcccagcgtgaacacgtactggcgacaccccaacaaaggggcgtttgcaggt

SEQ ID NO: 34667 - DNA, 75 bp, synthetic construct
  source 1..75: mol_type = other DNA
atgccgggatgcagtatgcagatagtggtgaaataaacccggtcaactcagtggcagcaggctggataaatgtga

SEQ ID NO: 34668 - DNA, 75 bp, synthetic construct
  source 1..75: mol_type = other DNA
tggactgtcgaagaatgcagggcgatcaaggcgaagtatcagcagaaacttaaagacctgcgaaacagcagaagt

SEQ ID NO: 34669 - DNA, 75 bp, synthetic construct
  source 1..75: mol_type = other DNA
ctgccgttataccgatatctacaaagtcgccgtggttggtggcgatgccgggtatctcattaccggtatcagtaa

SEQ ID NO: 34670 - DNA, 75 bp, synthetic construct
  source 1..75: mol_type = other DNA
cagggatagcaagagcacgggatgcaggaaaacgttttggtcgcccaccggtattaaatgaagaacaaacacaga

SEQ ID NO: 34671 - DNA, 75 bp, synthetic construct
  source 1..75: mol_type = other DNA
ctttgactctgtgaaatttattctgaccaccgctctcgccggtggtctgctggctgttcccctgcagatcaaaaa

SEQ ID NO: 34672 - DNA, 75 bp, synthetic construct
  source 1..75: mol_type = other DNA
tttctacactaggacggcatattactagtgcggcaagccgggtaagctctgcggggttatctggcttttcagtgt

SEQ ID NO: 34673 - DNA, 75 bp, synthetic construct
  source 1..75: mol_type = other DNA
tttctacaatagggcggcatcttacaggtgtcgcaagtcgagtgggctctgcgggggtatctggattttctgtag

SEQ ID NO: 34674 - DNA, 75 bp, synthetic construct
  source 1..75: mol_type = other DNA
ggcgtcgccccaagccaacggcgcgcaaggcgctggccggaaaccccggcaagcgagccctgaataaagatgaac

SEQ ID NO: 34675 - DNA, 75 bp, synthetic construct
  source 1..75: mol_type = other DNA
ggtgtggcccagatgctggccccgaaggcaaaaacaccggattaccgcgcaacggataacggcagacagaacacg

SEQ ID NO: 34676 - DNA, 75 bp, synthetic construct
  source 1..75: mol_type = other DNA
ggatatccggttttgacagagcaaccacctttatcaaaagaaaaccttattgcattggcggatttgaaaaaaaga

SEQ ID NO: 34677 - DNA, 75 bp, synthetic construct
  source 1..75: mol_type = other DNA
taagtatctgacaaaccttgctcactatcgctcttttgtcgattttacatatagatacgacgacagaagacactg

SEQ ID NO: 34678 - DNA, 75 bp, synthetic construct
  source 1..75: mol_type = other DNA
cctcaaccaaagaataaacggatccgctggctggagcctcatgaagcacaaaggctgattgatgaatgtccggag

SEQ ID NO: 34679 - DNA, 75 bp, synthetic construct
  source 1..75: mol_type = other DNA
ttggtatgccacaactgaccagctttttataccctgatgagtttaaagacggtatccgtgatgtagataaggtga

SEQ ID NO: 34680 - DNA, 75 bp, synthetic construct
  source 1..75: mol_type = other DNA
cacaaaagctaaggaagtgaccgcttttctggggctcaatccccgccatcaccagtccggaacgtcggttagggt

SEQ ID NO: 34681 - DNA, 75 bp, synthetic construct
  source 1..75: mol_type = other DNA
gtgacggagatgaccgatccgggtgatgaactgcaggcctcgcatccgctgcgtgacggaaaagtggtggtggaa

SEQ ID NO: 34682 - DNA, 75 bp, synthetic construct
  source 1..75: mol_type = other DNA
gctgaaaggctggcagcggtcagcaggcgctaaggcggaactggcactggcggagaagctggggcatgcagttat

SEQ ID NO: 34683 - DNA, 75 bp, synthetic construct
  source 1..75: mol_type = other DNA
caaagaactgggcgaattattacaggcgctggataaaaaaatattcccgccctactacagcgcactaatccgcct

SEQ ID NO: 34684 - DNA, 75 bp, synthetic construct
  source 1..75: mol_type = other DNA
gtatcttgaccaggtgcgtgaaatcgcagcgaaagaaggttctgttgtagttccggtttgtgctgctgttgaagc

SEQ ID NO: 34685 - DNA, 75 bp, synthetic construct
  source 1..75: mol_type = other DNA
ccataccggaagcaatactgccgttcgtcacgcagctggtggagcagaacaggcacacgggcttattgctggggg

SEQ ID NO: 34686 - DNA, 75 bp, synthetic construct
  source 1..75: mol_type = other DNA
gtccgatgacgggatatgagaacttcaaccgtgaggcgtttcacaaggcggaagaggcgctgaaacgggaagggc

SEQ ID NO: 34687 - DNA, 75 bp, synthetic construct
  source 1..75: mol_type = other DNA
gcgatacattgttaagaaaactttatggtaagccagcggagaaaaatacgttctatagcgatggcggtaatctga

SEQ ID NO: 34688 - DNA, 75 bp, synthetic construct
  source 1..75: mol_type = other DNA
tggaggctactggtttttaccgtgtcgcactgacagaggcgcagccgggcgatgtgctgctgtgctgttttggtt

SEQ ID NO: 34689 - DNA, 75 bp, synthetic construct
  source 1..75: mol_type = other DNA
ctggccgaatcaactgagtttctcagaatcatgcggaatggtgatgagaatgctgatgacattgcagggcgcttc

SEQ ID NO: 34690 - DNA, 75 bp, synthetic construct
  source 1..75: mol_type = other DNA
aacgctacgcaagcgccgtcttcccctcgaaatgatggtctggtgtattgttggcatggcgcttgagcgtaaaga

SEQ ID NO: 34691 - DNA, 75 bp, synthetic construct
  source 1..75: mol_type = other DNA
accagagaacgatgcagccttcccccgccagacacatgccgggaacccggcgctctacccgcaggtcaaaatggt

SEQ ID NO: 34692 - DNA, 75 bp, synthetic construct
  source 1..75: mol_type = other DNA
gccgaaggcgtgttcctgctgcccaaacagtctgccgacgatattcaggccggtgtggcggtttatctgaaggac

SEQ ID NO: 34693 - DNA, 75 bp, synthetic construct
  source 1..75: mol_type = other DNA
cagtggcgcacgccggacaacattttctggggaattaacaccctgtttggcccgtttgttctggatctgttcact

SEQ ID NO: 34694 - DNA, 75 bp, synthetic construct
  source 1..75: mol_type = other DNA
atgaaacctgtttttgatgaaaatggactggctacagtgccgggtgatatgcgttgtttttattatgatgcagta

SEQ ID NO: 34695 - DNA, 75 bp, synthetic construct
  source 1..75: mol_type = other DNA
caggggctttggaaatacaggggagtgtattgaagttaaaacaaatgaacctttgaacagcgtgatggaaacact

SEQ ID NO: 34696 - DNA, 75 bp, synthetic construct
  source 1..75: mol_type = other DNA
aattctcagaaaacaacaatacagggttaaatcgcaattactggagagactggggaatgtgttgtttttcacgtc

SEQ ID NO: 34697 - DNA, 75 bp, synthetic construct
  source 1..75: mol_type = other DNA
cacgtatgactcgcctggcaccggtagtcgtagacgttccagacgatgtcctggttctgcgcgttattggcccgc

SEQ ID NO: 34698 - DNA, 75 bp, synthetic construct
  source 1..75: mol_type = other DNA
aaggccgaaaacgtccaggctgcaatcagcacagtaattaacaaatcagctaaagccggtttatccggcgtaatt

SEQ ID NO: 34699 - DNA, 75 bp, synthetic construct
  source 1..75: mol_type = other DNA
gcccgcagacggcacttctgccactgatctggcggtggagctgaacggcataacgtatcaggcctgccgtgggga

SEQ ID NO: 34700 - DNA, 75 bp, synthetic construct
  source 1..75: mol_type = other DNA
tttgaccatggaactgtcgtccctcaaggcggaagaactgactgataacgccggaattgctctgcgttttcggga

SEQ ID NO: 34701 - DNA, 75 bp, synthetic construct
  source 1..75: mol_type = other DNA
tgatattaatgtttggacatataaatgccctttttttaggggtgttcatggcggtcatgtgcattgaatactggc

SEQ ID NO: 34702 - DNA, 75 bp, synthetic construct
  source 1..75: mol_type = other DNA
ttacgccaaccccgttcgggctgccaccagtgaaattggcgtttccggtggtagcaataaccgctactcaatgga

SEQ ID NO: 34703 - DNA, 75 bp, synthetic construct
  source 1..75: mol_type = other DNA
gaagcagctgcagctgaagcaagaaagaaagcggcaaccgaagctgctgaaaaagccaaggcagaagctgagaag

SEQ ID NO: 34704 - DNA, 75 bp, synthetic construct
  source 1..75: mol_type = other DNA
atgaacacaaaaatcaaatacggcctgtcggctgccgttctggcgctgattgccgcaggtgcttctgcgcctgaa

SEQ ID NO: 34705 - DNA, 75 bp, synthetic construct
  source 1..75: mol_type = other DNA
cgaatgacggtcacgttaaccggtcagcacaacgacaccggccagccactttcgttaaccatccctgtgagttga

SEQ ID NO: 34706 - DNA, 75 bp, synthetic construct
  source 1..75: mol_type = other DNA
tcaaatcaacagctgcaggccgttatcaacttctttcgcgctggtgggatgcttaccgcaagcagttagggctga

SEQ ID NO: 34707 - DNA, 75 bp, synthetic construct
  source 1..75: mol_type = other DNA
atcacattcaagcgactggatctggtggataagatgaatgacattgtggcgaagcactatccgtcagcgttatca

SEQ ID NO: 34708 - DNA, 75 bp, synthetic construct
  source 1..75: mol_type = other DNA
cactgattactccgatcaccctcgcaaacttgtcacgctaaacccgaaactcaaatcaacagctgcaggccgtta

SEQ ID NO: 34709 - DNA, 75 bp, synthetic construct
  source 1..75: mol_type = other DNA
aaacttgtcacgctaaaccccaaactcaaatcaacagccgccggacgttaccagcttctttcacgttggtgggat

SEQ ID NO: 34710 - DNA, 75 bp, synthetic construct
  source 1..75: mol_type = other DNA
aagctttcctggatatggtggcatggtcagaaggaacggataacgggcgacaaccgacacgtaatcacggttatg

SEQ ID NO: 34711 - DNA, 75 bp, synthetic construct
  source 1..75: mol_type = other DNA
atcaacgaatataccttcaccgaagccggtctgcgcgccggctgccccgtcatcgttaaactatcattcaccgat

SEQ ID NO: 34712 - DNA, 75 bp, synthetic construct
  source 1..75: mol_type = other DNA
gaaaggttcaccttactccggctcagttgtccatgcttctcgaaggcatcgactggaagcacccgaaacgaacgg

SEQ ID NO: 34713 - DNA, 75 bp, synthetic construct
  source 1..75: mol_type = other DNA
ggtgtacaggcagagccagcgactgaagcgggagataccaccgcagagagcggtgaagttcagcctgaatcaccg

SEQ ID NO: 34714 - DNA, 75 bp, synthetic construct
  source 1..75: mol_type = other DNA
ggctgttattccactggattttatcgggcagaaatttaatgaagacaatgatgccccggtcacgttcagaacatc

SEQ ID NO: 34715 - DNA, 75 bp, synthetic construct
  source 1..75: mol_type = other DNA
gataagaacacctttaaagtgcgtgatgacttcactctggaatggagtggcccgaaagagaacaacatcttcgtg

SEQ ID NO: 34716 - DNA, 75 bp, synthetic construct
  source 1..75: mol_type = other DNA
gactacctccgctgggctgctgaagatatgaataacctgtatttcagtcataccgttgaaaacattgatttcgat

SEQ ID NO: 34717 - DNA, 75 bp, synthetic construct
  source 1..75: mol_type = other DNA
atgtcagaaataaaatcgctggtcactgctgaggcagtgaaggaagttctgcgctctgaagaagtccggagcgca

SEQ ID NO: 34718 - DNA, 75 bp, synthetic construct
  source 1..75: mol_type = other DNA
cctttctgccagtaaggcacaggctcacgtctttaagcagtacatcatcgacttcgccaaagaagtcgaggtgga

SEQ ID NO: 34719 - DNA, 75 bp, synthetic construct
  source 1..75: mol_type = other DNA
ccgcctggagtttgacgccgggcacaccgacatagcgcagtcctttatggcaatccgtcgcgccaccactgccag

SEQ ID NO: 34720 - DNA, 75 bp, synthetic construct
  source 1..75: mol_type = other DNA
ggaaccacaaaaaaagaaatatcaaaatttgataacatttattgtgatcagcttgaaagtttgtttagcgaagaa

SEQ ID NO: 34721 - DNA, 75 bp, synthetic construct
  source 1..75: mol_type = other DNA
ttagcgatctttacggcggaacattaatttttccaggcagtgatggttaccttaagatggggaactgtctcatgt

SEQ ID NO: 34722 - DNA, 75 bp, synthetic construct
  source 1..75: mol_type = other DNA
aacgaaaacccgcccctcaaagaagcaaacttccccgctatgtcgtgaagcttcacgacgatgacttctttgacg

SEQ ID NO: 34723 - DNA, 75 bp, synthetic construct
  source 1..75: mol_type = other DNA
tcatccctaaagcgcatggcggcactgatgccgactgtaatctgcagagtctgtgctggccgtgtcataaggcga

SEQ ID NO: 34724 - DNA, 75 bp, synthetic construct
  source 1..75: mol_type = other DNA
gtactggagagccattcagcacagaataccctggtggatgacggcggtaccctggcagtgtctgccggtggtaag

SEQ ID NO: 34725 - DNA, 75 bp, synthetic construct
  source 1..75: mol_type = other DNA
aacagcgtccgtctcagcattcagggcggtcatctcgggcacgataacaacggcggtattgcccgtggggccacg

SEQ ID NO: 34726 - DNA, 75 bp, synthetic construct
  source 1..75: mol_type = other DNA
gtgaaaaacctgaacgggcagaatggcaccatcagcctgcgtgtacgcccggatatggcgcagaacaatgctgac

SEQ ID NO: 34727 - DNA, 75 bp, synthetic construct
  source 1..75: mol_type = other DNA
ttcgtgacggcgggggacagagcctgaacggactggcggtgaacaccacactgaataacagaggcgagcagtggg

SEQ ID NO: 34728 - DNA, 75 bp, synthetic construct
  source 1..75: mol_type = other DNA
aaacggtctgcaggatgtcatggcaggtggcagtgccacggatacggttatcagtgccggtggaggacagaatct

SEQ ID NO: 34729 - DNA, 75 bp, synthetic construct
  source 1..75: mol_type = other DNA
tgagtgaactgccggtgaactggtgggtacagccttctgttatccgcactttcagctcccggggtgacatgagca

SEQ ID NO: 34730 - DNA, 75 bp, synthetic construct
  source 1..75: mol_type = other DNA
atgccaccacgaaccccaaaagcctgccgcgttcgcggctgccgcaataccactactgatccgtcaggctattgc

SEQ ID NO: 34731 - DNA, 75 bp, synthetic construct
  source 1..75: mol_type = other DNA
tgatgccgactgtaatctgcagagtctgtgctggccgtgtcataaggcgaagacggcccgtgaacggttgaagtg

SEQ ID NO: 34732 - DNA, 75 bp, synthetic construct
  source 1..75: mol_type = other DNA
cttgctgaacgcatcggtgttactgccgcagcccgtgaactcagcctgtatgaatcacagctctacaactggcgc

SEQ ID NO: 34733 - DNA, 75 bp, synthetic construct
  source 1..75: mol_type = other DNA
cggtggtattgcccgtggggccacgccggaaagcagcggcagctatggcttcgtccgtctggagggtgacctgct

SEQ ID NO: 34734 - DNA, 75 bp, synthetic construct
  source 1..75: mol_type = other DNA
gactggaagcccgtgtccgggaaaatatcaccctgggcgttcaggccggttatgcccacagtgtcagcggcagca

SEQ ID NO: 34735 - DNA, 75 bp, synthetic construct
  source 1..75: mol_type = other DNA
ggttaggcatggattttatcgaaaccgtcagtgcgctgatgaatgcaacccccggacgtgatctctgctggctcc

SEQ ID NO: 34736 - DNA, 75 bp, synthetic construct
  source 1..75: mol_type = other DNA
ccagactgaaacgggccacggtcagaaatccgaatgccagaattatcgttaaccgcggtgatctcccggtgatta

SEQ ID NO: 34737 - DNA, 75 bp, synthetic construct
  source 1..75: mol_type = other DNA
aaggactccgtgttctgcttgttgaaggcaatgacccacagggaactgcttctatgtatcacggatgggtgcccg

SEQ ID NO: 34738 - DNA, 75 bp, synthetic construct
  source 1..75: mol_type = other DNA
acttaacgctgtgctggattacattgacgcggtgacggcaacagataccagcacagcgccggatgtcatctggcc

SEQ ID NO: 34739 - DNA, 75 bp, synthetic construct
  source 1..75: mol_type = other DNA
actatgatgtcattgtcattgacagcgcgcctaacctgggtatcggcacgattaatgtcgtatgtgctgctgatg

SEQ ID NO: 34740 - DNA, 75 bp, synthetic construct
  source 1..75: mol_type = other DNA
agcagaattttcgaacaagtgccgaacgccacgttgcacgccagcacttccgcaaaaatagtgcgaccacaacca

SEQ ID NO: 34741 - DNA, 75 bp, synthetic construct
  source 1..75: mol_type = other DNA
ccagcatcctggcagggtactctcagtctaatcagttgtccgattattttgttgaacaatggcgcgaaaagcact

SEQ ID NO: 34742 - DNA, 75 bp, synthetic construct
  source 1..75: mol_type = other DNA
accttcacagactccgctaatgctggagctacaaaggcgcttagtagcactttgaagaagtacagtgtgaaccct

SEQ ID NO: 34743 - DNA, 75 bp, synthetic construct
  source 1..75: mol_type = other DNA
aagacgcacagtaaatctcttcgctcttttcctgaaaacaatcaggagcgcagaaaaatacgtgcagatgacaaa

SEQ ID NO: 34744 - DNA, 75 bp, synthetic construct
  source 1..75: mol_type = other DNA
agctggggatcaggatgctggggcgtcgcccgaacagcatacttaaagccggtcagcatcggtatcagcgggcat

SEQ ID NO: 34745 - DNA, 75 bp, synthetic construct
  source 1..75: mol_type = other DNA
aactcattgccataaaagcgggagacattatcatttataattatgatggtgaaacgcgggaatatatttctacat

SEQ ID NO: 34746 - DNA, 75 bp, synthetic construct
  source 1..75: mol_type = other DNA
gaactctcatcgcatctgctgttttattttcctttaattcaacagccgcaacttcatattttgaagcccgcaatg

SEQ ID NO: 34747 - DNA, 75 bp, synthetic construct
  source 1..75: mol_type = other DNA
gtacatatcgatgtttccggcctggtaggaactgaccacgattacggtgcaatggcacaacttcagttcactttc

SEQ ID NO: 34748 - DNA, 75 bp, synthetic construct
  source 1..75: mol_type = other DNA
cggtttctgacgaagccgttattgaggctatccgtgatgcacttgaggacggcgatccacgcaccgccggtctgg

SEQ ID NO: 34749 - DNA, 75 bp, synthetic construct
  source 1..75: mol_type = other DNA
atgaagaaaacctggatgctcgacaccaacatctgctcgttcatcatgcgcgagcagccggcagcggtgctgaag

SEQ ID NO: 34750 - DNA, 75 bp, synthetic construct
  source 1..75: mol_type = other DNA
atcttcaacaatatggacctcgacaagcaggcagaactgcgtgagtacctcaagctcgtaggtcaattccagcaa

SEQ ID NO: 34751 - DNA, 75 bp, synthetic construct
  source 1..75: mol_type = other DNA
gtagataaccagcatggcgtacaacaggcagcggcaaatcttaaacatcgtctgcaggaattccgcaatatcaat

SEQ ID NO: 34752 - DNA, 75 bp, synthetic construct
  source 1..75: mol_type = other DNA
ggtgacagacactgaggcacaacacagtgccgcagtagacgcggcagaagcacagcgccagtcactgattgatgc

SEQ ID NO: 34753 - DNA, 75 bp, synthetic construct
  source 1..75: mol_type = other DNA
agtctgattcagctgaaattacaggccggacggaagttgacgcaggcagaaacaacccgacttaacgccgtgctg

SEQ ID NO: 34754 - DNA, 75 bp, synthetic construct
  source 1..75: mol_type = other DNA
gagcagaataaagcgtatcagtcactgctggtcatgaacggtcagcatacggaattcaaccgcctgctggggctg

SEQ ID NO: 34755 - DNA, 75 bp, synthetic construct
  source 1..75: mol_type = other DNA
cgaattttcagaaactgcgcaaagtcgcctcgggcatggcctcgcaaaagcacctgcgctcgacctatttttcga

SEQ ID NO: 34756 - DNA, 75 bp, synthetic construct
  source 1..75: mol_type = other DNA
actttgccaaagaagtggaggtggagctgaaaggcgatccgatggtgcttcctaacggggccacgctttacttcc

SEQ ID NO: 34757 - DNA, 75 bp, synthetic construct
  source 1..75: mol_type = other DNA
caataacgacttccgcgcccggggctggggctggctgggctcactggaaaccggtctgcccttcagtatcactga

SEQ ID NO: 34758 - DNA, 75 bp, synthetic construct
  source 1..75: mol_type = other DNA
acgctggacacgctgaaagaaatagccgctgccattaataatgacccgaactttgccacgacaatgcttaatgcg

SEQ ID NO: 34759 - DNA, 75 bp, synthetic construct
  source 1..75: mol_type = other DNA
tgtcaacacctcttacattaggtaatggttcaggaaatggttacagagtgacagcaggtctggacacagcacgtt

SEQ ID NO: 34760 - DNA, 75 bp, synthetic construct
  source 1..75: mol_type = other DNA
aactggtccgaaaacccaaaatcagtagtggacgcgatcgtcgcctgacttctggcgaagaacgccgactctccc

SEQ ID NO: 34761 - DNA, 75 bp, synthetic construct
  source 1..75: mol_type = other DNA
atgagctggacggactggatttgtttaccggcttcactgtcacacacactgacagcagtgcctccgccgatgctt

SEQ ID NO: 34762 - DNA, 75 bp, synthetic construct
  source 1..75: mol_type = other DNA
ttatcagtttgacctgctggcgaacggagaaacggtcttgcgtgatgcttccggcgagaaacgttttgaaggaga

SEQ ID NO: 34763 - DNA, 75 bp, synthetic construct
  source 1..75: mol_type = other DNA
ttgtccggcaccagttacggcattgccgggctgctgatgctggcggtcagtcaccggctgtaccgggcggaagac

SEQ ID NO: 34764 - DNA, 75 bp, synthetic construct
  source 1..75: mol_type = other DNA
ttattaccgtctccgaggtggaatcgacaagataaccgcgcaggttaactacctgcaggaatacatcaggacgca

SEQ ID NO: 34765 - DNA, 75 bp, synthetic construct
  source 1..75: mol_type = other DNA
atgaaccgtgttctgtgtgtggtgattattgtcctggcggttggctgtggtgcgcttagtctggggctgaatcat

SEQ ID NO: 34766 - DNA, 75 bp, synthetic construct
  source 1..75: mol_type = other DNA
tcattgccctgctggtggcctgtggtgcgcttagtctggggctgaatcattaccgtgataacgccatcacctaca

SEQ ID NO: 34767 - DNA, 75 bp, synthetic construct
  source 1..75: mol_type = other DNA
catgcctgctggccgtgattccggcacttaaccttgcctccagtgatgcggcggctgtagctggtcttgtgatga

SEQ ID NO: 34768 - DNA, 75 bp, synthetic construct
  source 1..75: mol_type = other DNA
atcgcgactacctgtggatcctttcacggacccctactatttcagatgaaatgaaacagcaaatgttagccatcg

SEQ ID NO: 34769 - DNA, 75 bp, synthetic construct
  source 1..75: mol_type = other DNA
ttacgttccggcagtacccgtccgtggtgggaggttccgccttccactgtctattcctttgcgtattacattttc

SEQ ID NO: 34770 - DNA, 75 bp, synthetic construct
  source 1..75: mol_type = other DNA
atggcaataccaaatcctcttgagccggtgaaaggttccggcaccacactatgggtgtacaccggcaaggatgat

SEQ ID NO: 34771 - DNA, 75 bp, synthetic construct
  source 1..75: mol_type = other DNA
tggcctggaaaccgggagaggaaggccagaaagggcttataggctggtttgaaagcggcgatgtccgggcctata

SEQ ID NO: 34772 - DNA, 75 bp, synthetic construct
  source 1..75: mol_type = other DNA
ggcagggcactgaaacagcatgtgatggccccgctgatttcttactttcgtgatgcgcgtgctgccctggggata

SEQ ID NO: 34773 - DNA, 75 bp, synthetic construct
  source 1..75: mol_type = other DNA
tgaaaccaaacgcggtcgctatcagcaaatcaacctgcgtgacgcttacgttgatcacctgttcggttatatcaa

SEQ ID NO: 34774 - DNA, 75 bp, synthetic construct
  source 1..75: mol_type = other DNA
actatgccgcaattaactgcaacggaagccgccgtgcaggagaaccagcgagtgatggggatcctgacatgccag

SEQ ID NO: 34775 - DNA, 75 bp, synthetic construct
  source 1..75: mol_type = other DNA
aagaagtgatcacccgcacggtgaaagtgaccaacgtgggcaaaccttctgtagcggaagaacgcagcaaaatta

SEQ ID NO: 34776 - DNA, 75 bp, synthetic construct
  source 1..75: mol_type = other DNA
cgaaacgttctcagtatcagatccggaatcatcagcgaccaaacatcactgagagcgctgcaggaatacatcaac

SEQ ID NO: 34777 - DNA, 75 bp, synthetic construct
  source 1..75: mol_type = other DNA
gaagagcaggttattctttcggtgctcgataacatgcagcgtattctgaatacccgggccggaagccttaaacat

SEQ ID NO: 34778 - DNA, 75 bp, synthetic construct
  source 1..75: mol_type = other DNA
gtagcggaagaacgcagcaaaattacgccggtcactgcgattaaggtgacgccgacatccggtacggtggcaaaa

SEQ ID NO: 34779 - DNA, 75 bp, synthetic construct
  source 1..75: mol_type = other DNA
atggctgaagatcgcagtacggtgacggcggcaaccggcatgacggtaacgccagccagtgcgtccgtagtgaaa

SEQ ID NO: 34780 - DNA, 75 bp, synthetic construct
  source 1..75: mol_type = other DNA
taccgcgataacgccatcacctacaaagcgcagcgcgataaaaaagtcagtgagctgaaactggcgaacgcgaca

SEQ ID NO: 34781 - DNA, 75 bp, synthetic construct
  source 1..75: mol_type = other DNA
acagctggcacagcagtacggcttttccgtttttccctacaccctggatggtcagggggataccgcctttccgga

SEQ ID NO: 34782 - DNA, 75 bp, synthetic construct
  source 1..75: mol_type = other DNA
ctttcgggtggatgcctcgaatgaagagctaaccgtggagtgtgctgtgaatgccgctaaatgccgcatggtatc

SEQ ID NO: 34783 - DNA, 75 bp, synthetic construct
  source 1..75: mol_type = other DNA
gctggaataacccaggcttattttgagttgggtatgacgtttcctgaactgtacgacgacagccatccggaagcc

SEQ ID NO: 34784 - DNA, 75 bp, synthetic construct
  source 1..75: mol_type = other DNA
cgccgtcagtcgcaatctttttacggtgatcaggctgagcaatcgctgcaaaattaccacttcgatatgctgttt

SEQ ID NO: 34785 - DNA, 75 bp, synthetic construct
  source 1..75: mol_type = other DNA
gcatggcgatgaatgcctgggcatatcctgatggtgagaaagttcctgcagctgaaatagcccggacttatttcg

SEQ ID NO: 34786 - DNA, 75 bp, synthetic construct
  source 1..75: mol_type = other DNA
tgctgggataacagcccaatggagcgcttcttcaggagtctgaagaacgaatgggtgccagcgacgggctatgta

SEQ ID NO: 34787 - DNA, 75 bp, synthetic construct
  source 1..75: mol_type = other DNA
aaagccagtaacaagaaaacttgttgtgcaatcctgtttctggggggccgttttttatgccattctgatttatat

SEQ ID NO: 34788 - DNA, 75 bp, synthetic construct
  source 1..75: mol_type = other DNA
tcttactccgtctttatccacccagactactgtcagtgccagctcctgcaaggtggagttccgtcacggtaacat

SEQ ID NO: 34789 - DNA, 75 bp, synthetic construct
  source 1..75: mol_type = other DNA
atcagcccgaacagcttcaagtcggaatggtctgcgccgttcggtggcacgcagcccgcgaactacatgcttgat

SEQ ID NO: 34790 - DNA, 75 bp, synthetic construct
  source 1..75: mol_type = other DNA
tttgaaccgggaatgacggtctcccttgttgcccggcaacacggtgtggcagccagccagttatttctctggcgc

SEQ ID NO: 34791 - DNA, 75 bp, synthetic construct
  source 1..75: mol_type = other DNA
aatgcaactaagagacattactgaatcaaaaatttattcagcaatgcagaaaatgacgaaccggcgtcatgagga

SEQ ID NO: 34792 - DNA, 75 bp, synthetic construct
  source 1..75: mol_type = other DNA
actacggctcaatcgattacggccgtaactacggtgtagcatacgacatcggtgcgtggactgacgttctgccag

SEQ ID NO: 34793 - DNA, 75 bp, synthetic construct
  source 1..75: mol_type = other DNA
agagcgaagaaaaagaaagtccagcaggttgttcagcagataaaagaaagcagtccctttgcgccgaccagcgat

SEQ ID NO: 34794 - DNA, 75 bp, synthetic construct
  source 1..75: mol_type = other DNA
ggttgcctgtcttggtccggtagttcataccctgttgagtgattttaagtgccagcaacaggtgccggaaatgta

SEQ ID NO: 34795 - DNA, 75 bp, synthetic construct
  source 1..75: mol_type = other DNA
gtcatgctgttatgcaccgaggacgatgatcgggaatggataaagcgccgccgtgaaacgtgtctggagaacgtg

SEQ ID NO: 34796 - DNA, 75 bp, synthetic construct
  source 1..75: mol_type = other DNA
aaaactgaaaatgaaactctgcgcgctgatgttgccgctggtcgtaagcgcctgcgggtcaatgccagttgctcc

SEQ ID NO: 34797 - DNA, 75 bp, synthetic construct
  source 1..75: mol_type = other DNA
tagccgatgcgagagctgaaaatgaaactctgcgcgctgatgttgccgctggtcgtaagcgcctgcggatcaacg

SEQ ID NO: 34798 - DNA, 75 bp, synthetic construct
  source 1..75: mol_type = other DNA
ttaacttacaccccaggaggaaatcagaatatgagcattatctctgagtcaggtttctacaaactaatagcccgc

SEQ ID NO: 34799 - DNA, 75 bp, synthetic construct
  source 1..75: mol_type = other DNA
accagcagagcggggattcatctgatgatcgaccttgaaaccatgggaaaaaatcccgatgccccgattatctca

SEQ ID NO: 34800 - DNA, 75 bp, synthetic construct
  source 1..75: mol_type = other DNA
taactacggtgtagcatacgacatcggtgcgtggactgacgttctgccagaattcggtggcgatacctggaccca

SEQ ID NO: 34801 - DNA, 75 bp, synthetic construct
  source 1..75: mol_type = other DNA
accaaaaagcggaacaaaacagcccaaatgcgttacaaaacgagccagaaacgaaacaatccgaaccagtggcgc

SEQ ID NO: 34802 - DNA, 75 bp, synthetic construct
  source 1..75: mol_type = other DNA
gggtagcaaaacttggtctcgaagattcgctttacagtacacattccttgagaagaacaaaaccttacctgattt

SEQ ID NO: 34803 - DNA, 75 bp, synthetic construct
  source 1..75: mol_type = other DNA
gcagagcgcaaagagactggaaaatacacgtctgttgttgatctcgccagcgccagagtcaatcaacagaacact

SEQ ID NO: 34804 - DNA, 75 bp, synthetic construct
  source 1..75: mol_type = other DNA
atcccggacagtggcgttctgacgcagaaagtgaaagagcagattgctgaccagctgaaacaggcaggacagtaa

SEQ ID NO: 34805 - DNA, 75 bp, synthetic construct
  source 1..75: mol_type = other DNA
ggctgacagcaacagtgattaccgggccggttctgattttgcccgtcagattcaggggcagggtacaggcagtat

SEQ ID NO: 34806 - DNA, 75 bp, synthetic construct
  source 1..75: mol_type = other DNA
ctggagtatgaaatgagtcagctacctgcacgtgaagtgaatggtcagtatgttgtctccattacctctcccgtt

SEQ ID NO: 34807 - DNA, 75 bp, synthetic construct
  source 1..75: mol_type = other DNA
ctggaaagcgcgctcgatatgtatcggttagataacaaccgttacccaacaacggagcaggggctacgggcactg

SEQ ID NO: 34808 - DNA, 75 bp, synthetic construct
  source 1..75: mol_type = other DNA
tgcgacgtggcagggcaggagaatccgacgcaattcgatcttggaacgctctcacacctctatgttttcacggag

SEQ ID NO: 34809 - DNA, 75 bp, synthetic construct
  source 1..75: mol_type = other DNA
gagaatccgccagttgaaactggggcatggaaagatgcggttgactgggtgctcaaagaggcttgccaggctgta

SEQ ID NO: 34810 - DNA, 75 bp, synthetic construct
  source 1..75: mol_type = other DNA
ggcgacagaggcagctggcagtgcgacggcggcagctcagagcaaaagtacggcggaatccgcggcaacgcgcgc

SEQ ID NO: 34811 - DNA, 75 bp, synthetic construct
  source 1..75: mol_type = other DNA
ctggttaaagtgcgacgggcgcgcctttacaaaagaacaatatcctgttctggccagagcctacccgaccctccg

SEQ ID NO: 34812 - DNA, 75 bp, synthetic construct
  source 1..75: mol_type = other DNA
gtgacccgctgggaaaccgggaaaaatccgcccaacacaaagaaaaacttcggctacctgatgtggcgtaaacgt

SEQ ID NO: 34813 - DNA, 75 bp, synthetic construct
  source 1..75: mol_type = other DNA
cgggtacgggattatacgagaggcgagttcagaacaaaaccaaccctggagaagtttcataaaaagattaacgga

SEQ ID NO: 34814 - DNA, 75 bp, synthetic construct
  source 1..75: mol_type = other DNA
tggtgtttctgctggccggtcatatccctctggtgtcagcggatgcggcctgtgaggggcgtttcgtcaacccga

SEQ ID NO: 34815 - DNA, 75 bp, synthetic construct
  source 1..75: mol_type = other DNA
gtggcggtcgaggtggtcatgcgtggccgtcataaagaaatcgacggcggcgagaataagcagggtgaaaacacc

SEQ ID NO: 34816 - DNA, 75 bp, synthetic construct
  source 1..75: mol_type = other DNA
ttcccctcagcacagagcaacaggccgcatggcgggcggtggcggagacagaaaaacgccgccatcagggtaaca

SEQ ID NO: 34817 - DNA, 75 bp, synthetic construct
  source 1..75: mol_type = other DNA
cagaagtacagccgccagcaggcacgggaggcagagcagaaagcccgtgcgtaccaggcgctggtcgctcaggct

SEQ ID NO: 34818 - DNA, 75 bp, synthetic construct
  source 1..75: mol_type = other DNA
cccgcagatgaacgctgaagacctgcaggaacggctggcacggattatgtttgttgcaactgtctgggggcgtct

SEQ ID NO: 34819 - DNA, 75 bp, synthetic construct
  source 1..75: mol_type = other DNA
gtcaagatcaccgaactgctgctcgaagtcgatgagtggacgggcttcacccggcacttcacgcacttgaaatcg

SEQ ID NO: 34820 - DNA, 75 bp, synthetic construct
  source 1..75: mol_type = other DNA
atcgtcgccgcatggtaacagcggcactccggcggatgcaacgtaaaacaggtagtaatctgctcgtcgttgacc

SEQ ID NO: 34821 - DNA, 75 bp, synthetic construct
  source 1..75: mol_type = other DNA
ctgaagccatccgaaataccaacactgctcgggtataccgccagcctggttgataaaaaatggttgcgactggca

SEQ ID NO: 34822 - DNA, 75 bp, synthetic construct
  source 1..75: mol_type = other DNA
tttaaatggagacttgttcagcaaactcttttacccggtgcctgtgtcgcacaaatagctcgtgagaacggaatc

SEQ ID NO: 34823 - DNA, 75 bp, synthetic construct
  source 1..75: mol_type = other DNA
tgatccttgaagagaatgcgctcggcgaccatagccgggtggaaaggatcgccacggaaaagctgcaaatgcagc

SEQ ID NO: 34824 - DNA, 75 bp, synthetic construct
  source 1..75: mol_type = other DNA
gagtggtttcatccatactttcctgcgggctgaagagcggggtatatacgatgacgtctttactgcagatgagtt

SEQ ID NO: 34825 - DNA, 75 bp, synthetic construct
  source 1..75: mol_type = other DNA
cgctatccaaagtttaacagggcaggaaatatctatggtaagtcgctggttaagtatctgacaatgcgtctggat

SEQ ID NO: 34826 - DNA, 75 bp, synthetic construct
  source 1..75: mol_type = other DNA
accaaatcacgactccgcatcaaagtcatcgcagacgttccagactcccgccgccgcgacctcgacaacatcctg

SEQ ID NO: 34827 - DNA, 75 bp, synthetic construct
  source 1..75: mol_type = other DNA
acgctaaatctgaaagcgccagacggtcaacgtgaaacggtgaaggctcagtggctggtggcctgcgacggcggc

SEQ ID NO: 34828 - DNA, 75 bp, synthetic construct
  source 1..75: mol_type = other DNA
gccgaatcagtggattgtggtggatatcgccaacgatccgctcagcacgccgcatgtgtatttatgctgcgatcc

SEQ ID NO: 34829 - DNA, 75 bp, synthetic construct
  source 1..75: mol_type = other DNA
attgatgttggtcctgactggcggttactgagccggaataaagggctgacctgggccctgttgagtcatgaacga

SEQ ID NO: 34830 - DNA, 75 bp, synthetic construct
  source 1..75: mol_type = other DNA
gtctgctgagctgtcccggggtaccgccagcctgccagcggaaggcggtggacctcgttaaccggtttcgtcgcg

SEQ ID NO: 34831 - DNA, 75 bp, synthetic construct
  source 1..75: mol_type = other DNA
ctaatctcgattttgctgtttatttgaggcctttttatgtcccatatatgccccacagataccccgcagccaaaa

SEQ ID NO: 34832 - DNA, 75 bp, synthetic construct
  source 1..75: mol_type = other DNA
ggaaatcaccgggtttattcaaatatgacggggggtaacagaacggttgaatttgcccgtctgttttcccgtatt

SEQ ID NO: 34833 - DNA, 75 bp, synthetic construct
  source 1..75: mol_type = other DNA
cctcaaaagcctctgcggaaaagggcatcgcgtcggtgcgtagcaacagcccgcaagaagaacgctatgagaaaa

SEQ ID NO: 34834 - DNA, 75 bp, synthetic construct
  source 1..75: mol_type = other DNA
cgatcgaaaaagcaaaacagttaccaaaatctgcctatgtgatcagcaatcaatacggcaaccgatatatgtaca

SEQ ID NO: 34835 - DNA, 75 bp, synthetic construct
  source 1..75: mol_type = other DNA
gccaaatcctgaaacacttgataaaaattttctatatcatttcttgcaaaaggaattggataaaattcatgccac

SEQ ID NO: 34836 - DNA, 75 bp, synthetic construct
  source 1..75: mol_type = other DNA
gcttcagtcgtctggaaaatgaaattgctgaactgaataaaaaactgtcggcgctgatgccttctgaagatgcaa

SEQ ID NO: 34837 - DNA, 75 bp, synthetic construct
  source 1..75: mol_type = other DNA
cttttgacggtaaaaccttcgtctattacctctatccggtaactcacaatcgtagtctgatatttttgcttggtc

SEQ ID NO: 34838 - DNA, 75 bp, synthetic construct
  source 1..75: mol_type = other DNA
ctggatcaggcactggctgctgtacgtcagggagacacgctggttgtaccgaaacttgatcgcctggcgcgttcg

SEQ ID NO: 34839 - DNA, 75 bp, synthetic construct
  source 1..75: mol_type = other DNA
cccgttgttccactgataaacaggatttgaccgcccaacaagaggctctgataaaactgggagtctccccggagc

SEQ ID NO: 34840 - DNA, 75 bp, synthetic construct
  source 1..75: mol_type = other DNA
gctggcggccatggaaaaaaatggcgttaaaaatatcatctttaccagttccgttgctgtttatggtttgaacaa

SEQ ID NO: 34841 - DNA, 75 bp, synthetic construct
  source 1..75: mol_type = other DNA
atggcgatttatcatctcagtatgaaaatcatctccagaagcaacggctacagcgccgttgcttctgctgcctat

SEQ ID NO: 34842 - DNA, 75 bp, synthetic construct
  source 1..75: mol_type = other DNA
tgctgccagcctgaaaaaatcatcgccgttttcgtccggtttttcccgtattcccctgatgcaatgggcggcacc

SEQ ID NO: 34843 - DNA, 75 bp, synthetic construct
  source 1..75: mol_type = other DNA
aaagaaattggcgctgacagttcaggacggccaatatggattaattccccaccgccttcaaaagaggatgaggtg

SEQ ID NO: 34844 - DNA, 75 bp, synthetic construct
  source 1..75: mol_type = other DNA
gagcgagaacgaatgcatcgttaatctctatggtgcagcgtttttctgatatcaccatcatggtcggcggattgt

SEQ ID NO: 34845 - DNA, 75 bp, synthetic construct
  source 1..75: mol_type = other DNA
gattttcagcgccggactggtggcgttcaacaatgatttcgacacgcaactgaaaatctggctggcgtggtatgg

SEQ ID NO: 34846 - DNA, 75 bp, synthetic construct
  source 1..75: mol_type = other DNA
atggcactgattgcgctggtcgtgtttcagatgatcggcgggatgacggatttctatcgttcgtggcgtggcgtc

SEQ ID NO: 34847 - DNA, 75 bp, synthetic construct
  source 1..75: mol_type = other DNA
gtgctggcactgcgacaaccagctgcgcgaccagacctccgaatcactcgggcaacttgctcaccaaaacctgtt

SEQ ID NO: 34848 - DNA, 75 bp, synthetic construct
  source 1..75: mol_type = other DNA
gtggcgctgattacgctggtggtgttccagatgctgggcggcatcaccgatttttatcgctcatggcgcggtgtt

SEQ ID NO: 34849 - DNA, 75 bp, synthetic construct
  source 1..75: mol_type = other DNA
tgttgctgccgggttatgtgaaggggatgagcagtcgccggaaaagcgccccataattttagaggcgcagaatgt

SEQ ID NO: 34850 - DNA, 75 bp, synthetic construct
  source 1..75: mol_type = other DNA
ctaaacaggatcagaaagaacacggtattattctgatgcgtagcagacttcccgaaaaaagtaaccgcggccgac

SEQ ID NO: 34851 - DNA, 75 bp, synthetic construct
  source 1..75: mol_type = other DNA
actgaccagtacaatcgcaggtgctatcagttatttattccttaaggcggggttgttagttttggagtctagttc

SEQ ID NO: 34852 - DNA, 75 bp, synthetic construct
  source 1..75: mol_type = other DNA
caggtatggtatgaacgtgacaatggtgtctccagcctgatgcaaggagggatgtcattggttgaatttgaaaat

SEQ ID NO: 34853 - DNA, 75 bp, synthetic construct
  source 1..75: mol_type = other DNA
gtgcaagagacgagcaaaaaatttctggcgaatgcctcccgttaaaaaaagtatcgctgtacctgaataacgaaa

SEQ ID NO: 34854 - DNA, 75 bp, synthetic construct
  source 1..75: mol_type = other DNA
aaataagatactaccattgctggaagaatatttttacaatgactggcaaaaaattcgcatggtactggctgataa

SEQ ID NO: 34855 - DNA, 75 bp, synthetic construct
  source 1..75: mol_type = other DNA
ccactgatgtgcggagcaattgcctatataggtggttgtttatattgttttcgtgcaatttacctcaataaatgt

SEQ ID NO: 34856 - DNA, 75 bp, synthetic construct
  source 1..75: mol_type = other DNA
ggccattccatccgcaaagattatgggatacctgtcaccgctttatgggcatgggcgtttatcgcagtaaaggtt

SEQ ID NO: 34857 - DNA, 75 bp, synthetic construct
  source 1..75: mol_type = other DNA
caacttgctgtggtgatggcggcattttttaacttttttggcgtgttattgggcggacttagcgttgcctatgcc

SEQ ID NO: 34858 - DNA, 75 bp, synthetic construct
  source 1..75: mol_type = other DNA
cggaaattttcaacgtggatccacgaacgattgaacgctggcagtctcaggggctctcttgtgtctctggtggta

SEQ ID NO: 34859 - DNA, 75 bp, synthetic construct
  source 1..75: mol_type = other DNA
tcagcaaggccgttttcggtaccagttcactggttactaagaaaggagatggcacttatgagattggagaactgc

SEQ ID NO: 34860 - DNA, 75 bp, synthetic construct
  source 1..75: mol_type = other DNA
cagagccaaaatataaagcgttagacatgactgagcacaccttaaaggtggcaatcagaacgatagaccgccaca

SEQ ID NO: 34861 - DNA, 75 bp, synthetic construct
  source 1..75: mol_type = other DNA
ctactgtgacacttgcccaggcaagggcaaaacgtgatgaagctaaaagattattagtgcagggtattgatccaa

SEQ ID NO: 34862 - DNA, 75 bp, synthetic construct
  source 1..75: mol_type = other DNA
ctacaaaatggccgatggtggcggtttgtatcttgaggtttcggccaagggatctaaatactggcgtatgaaata

SEQ ID NO: 34863 - DNA, 75 bp, synthetic construct
  source 1..75: mol_type = other DNA
tttataacaaaatattaggttctttagcctgcgcaggtatgggcgatgcattaggcgcagcgactgaactctaca

SEQ ID NO: 34864 - DNA, 75 bp, synthetic construct
  source 1..75: mol_type = other DNA
gatagcctggttcgccagctgtacaatgcgccgacaattgttgagcgtcatcgtcaccgttacgaagtcaacaac

SEQ ID NO: 34865 - DNA, 75 bp, synthetic construct
  source 1..75: mol_type = other DNA
gcagccattcttgaagcccgtggcctcaatgtgaccatcatgaaactggatccgtacatcaacgtcgatccaggt

SEQ ID NO: 34866 - DNA, 75 bp, synthetic construct
  source 1..75: mol_type = other DNA
ctactgtgacgcttgctcaggcaagagcaaagcgcgacgaagctaaaaagcttttagtgcagggcattgatccaa

SEQ ID NO: 34867 - DNA, 75 bp, synthetic construct
  source 1..75: mol_type = other DNA
agctggttctgccggccggaactctcaggctgaaaggtgaactgacaccggcgttattacagtcacttatccgcg

SEQ ID NO: 34868 - DNA, 75 bp, synthetic construct
  source 1..75: mol_type = other DNA
gttaaaacacttcacgaaggtgtcaaaaaaatgtgcctggtgcataccggaaagaatctgcccgcagaaaaaaaa

SEQ ID NO: 34869 - DNA, 75 bp, synthetic construct
  source 1..75: mol_type = other DNA
ttttcaccttactggtatgaactcggtctcctgcattttctgaacggggaacatgttaagggaaggtgcgaataa

SEQ ID NO: 34870 - DNA, 75 bp, synthetic construct
  source 1..75: mol_type = other DNA
aatgattcagtggtgggctgattatcttgatgagttaaataataattacattactccatttgatttcgctaaaat

SEQ ID NO: 34871 - DNA, 75 bp, synthetic construct
  source 1..75: mol_type = other DNA
gaaatccccttatggatttatgagaaaggttttattttcgattacaaccgtatttcgcacgccagtagctggcat

SEQ ID NO: 34872 - DNA, 75 bp, synthetic construct
  source 1..75: mol_type = other DNA
ggcaatcttcttcgttccggtattctttgtggtggttcgccgccgctttagccgcaagaatgaagatatcgagca

SEQ ID NO: 34873 - DNA, 75 bp, synthetic construct
  source 1..75: mol_type = other DNA
atgccatttgctcgttatttctgcattttcataaacgttggtttgggagaaggctctgcattaccggttggtgtg

SEQ ID NO: 34874 - DNA, 75 bp, synthetic construct
  source 1..75: mol_type = other DNA
ccccagaccggcacacctgccaccgatctggatgatgactactttgacatgttgcaggaggagctttgcagcgtt

SEQ ID NO: 34875 - DNA, 75 bp, synthetic construct
  source 1..75: mol_type = other DNA
gtacgggctcacttattttgtccaatgatatcttaattacgggtcatgacagtaatggctcaagcctattgctga

SEQ ID NO: 34876 - DNA, 75 bp, synthetic construct
  source 1..75: mol_type = other DNA
tggtcgtgaatcgttgtcacgttcaggctctgctgacaacttcgcatggagccttggcgcgggtatccgctatga

SEQ ID NO: 34877 - DNA, 75 bp, synthetic construct
  source 1..75: mol_type = other DNA
gatggcaatggcggtggactccggcggtgaagacggggtcactgataatgcctataaattctggcgtcgttgccg

SEQ ID NO: 34878 - DNA, 75 bp, synthetic construct
  source 1..75: mol_type = other DNA
gcaagatgaatgggtagcatatattttgccgggtcataacggcatttatcctgcgcgcacgtctgagggtaggca

SEQ ID NO: 34879 - DNA, 75 bp, synthetic construct
  source 1..75: mol_type = other DNA
atgcgaaaattcaaaataattattgaaacgggaatagccggtggagatttcgaggatgaattcgaagtggatgat

SEQ ID NO: 34880 - DNA, 75 bp, synthetic construct
  source 1..75: mol_type = other DNA
agaggactcggatatccggattggcgatttgccgattatccgggattctgaaatcaagaacttttgtctgcacgg

SEQ ID NO: 34881 - DNA, 75 bp, synthetic construct
  source 1..75: mol_type = other DNA
gaaatggcgacggacttcaccgcatgaggctccaccaaccacggggatactgtcgctctataaccgtggcgatcg

SEQ ID NO: 34882 - DNA, 75 bp, synthetic construct
  source 1..75: mol_type = other DNA
gctgaacgcttggctgatcagcaagcagaaattgttaagaagatggtgtttgaaaccctgaaaaaaatgtacgag

SEQ ID NO: 34883 - DNA, 75 bp, synthetic construct
  source 1..75: mol_type = other DNA
tggcggatgaggaaggtattactcaggcgcagatgcttgaaaagctgattgaatcagagttgaaacgcagagctt

SEQ ID NO: 34884 - DNA, 75 bp, synthetic construct
  source 1..75: mol_type = other DNA
aagctggtgcttcggttgtgactcagactgaccagcgcttccgtcaggactttggggatgatgtttataagtata

SEQ ID NO: 34885 - DNA, 75 bp, synthetic construct
  source 1..75: mol_type = other DNA
aaatgctgtctccctcagcaatccgggaaaaatcatcgctgacacgctgagcgtcagggcgaccacgctggatgg

SEQ ID NO: 34886 - DNA, 75 bp, synthetic construct
  source 1..75: mol_type = other DNA
aaacagcaccgcatcagcagcagtgggagcacaaagcgggaagaatgctgttgagaataactcactcagtgatgg

SEQ ID NO: 34887 - DNA, 75 bp, synthetic construct
  source 1..75: mol_type = other DNA
gcgtgttatggcggaagaaggtttgccgccaaaagaagctacccgtaagtcgatggggcagattcagggcgctct

SEQ ID NO: 34888 - DNA, 75 bp, synthetic construct
  source 1..75: mol_type = other DNA
gccagcagcctgaccagcagcggtgctgttcagagtgcgctggatttggctctgaccctgagtggcgatgttatt

SEQ ID NO: 34889 - DNA, 75 bp, synthetic construct
  source 1..75: mol_type = other DNA
ttatggcgcttcacaagtggttttgggaacaaagtgaagccgagcgcgccgccgccaacattggtgtgaagggga

SEQ ID NO: 34890 - DNA, 75 bp, synthetic construct
  source 1..75: mol_type = other DNA
cggtggtggcgaaaacccgccgtaacctggaagcggatgtgacgctgttctgcgatgtcctgtgtgatactgacc

SEQ ID NO: 34891 - DNA, 75 bp, synthetic construct
  source 1..75: mol_type = other DNA
tgggctcgtcgccgcttgaggtggcggcggcgcgcgcctgcgcggatatcgaaaatacgcccgtcccgctgcgtc

SEQ ID NO: 34892 - DNA, 75 bp, synthetic construct
  source 1..75: mol_type = other DNA
cttcggcagaggcctggtatctgtggcaggaagtgctcaatggtgatggagaggatgacgataccctgtcggtgg

SEQ ID NO: 34893 - DNA, 75 bp, synthetic construct
  source 1..75: mol_type = other DNA
gcagactcagcaaaattgctgataacacaggtaagctggttgatgagacgaaaaaacgcattggccccggcgata

SEQ ID NO: 34894 - DNA, 75 bp, synthetic construct
  source 1..75: mol_type = other DNA
gcacgtacaccgaaaaacgcgaagacccgtacttcaaagccagttacgacaacgtggactacagccagatcccgg

SEQ ID NO: 34895 - DNA, 75 bp, synthetic construct
  source 1..75: mol_type = other DNA
tctttctgcgccgtcttttccgtgccggtgataatgttttggtcaattctttatcggtcattgtgttgtcctgca

SEQ ID NO: 34896 - DNA, 75 bp, synthetic construct
  source 1..75: mol_type = other DNA
tcgcattgtggtgcaaccgcaatatctgggcgacgggctgaacaatacgctgacctggctgtgggataactggta

SEQ ID NO: 34897 - DNA, 75 bp, synthetic construct
  source 1..75: mol_type = other DNA
tccagataagggcgcttttctggacaatgttggcgttaccagcctgacgtttatgaaaaacaatggcgaaatgcc

SEQ ID NO: 34898 - DNA, 75 bp, synthetic construct
  source 1..75: mol_type = other DNA
atgaagtctgaaggtttaacgccagcacaactggcagagcgtaacgctgagtatgtaacggaaatttcccgactt

SEQ ID NO: 34899 - DNA, 75 bp, synthetic construct
  source 1..75: mol_type = other DNA
actccagacctgatgatatgtgatatcgcgatgccacgaatgaacgggcttaaactgctggagcatatacgtaac

SEQ ID NO: 34900 - DNA, 75 bp, synthetic construct
  source 1..75: mol_type = other DNA
agacaggatggtttatcgcgggcctgatgacgggcttacccgccactgccgcgcccgcagaagcatcgtcaatgg

SEQ ID NO: 34901 - DNA, 75 bp, synthetic construct
  source 1..75: mol_type = other DNA
caccggccgtagagtgcacaaaacatctgaaggccaggacgtttgaactgactgacggtggcaccatgaaagggg

SEQ ID NO: 34902 - DNA, 75 bp, synthetic construct
  source 1..75: mol_type = other DNA
ccaggcatcttcacacgactggtcagggcggtatcagaaaacaggaaggtaaccctgctggctgacggatgccgt

SEQ ID NO: 34903 - DNA, 75 bp, synthetic construct
  source 1..75: mol_type = other DNA
agttccgccagatttacgcctctggcaagaagtggcaacgctgcgttgaagcgattgaaaatatcgacaacattc

SEQ ID NO: 34904 - DNA, 75 bp, synthetic construct
  source 1..75: mol_type = other DNA
tctggtgggggaacaccttgcccggataaccgtttttgcactgcacacagttcactccgtgacgtttcacgcgga

SEQ ID NO: 34905 - DNA, 75 bp, synthetic construct
  source 1..75: mol_type = other DNA
aagctgatacagcccggcgcaaacggttcggggagatgatgcgagcgcctgcctaccagtggaagaagccagcgc

SEQ ID NO: 34906 - DNA, 75 bp, synthetic construct
  source 1..75: mol_type = other DNA
ttttacaggcgttacctcattttcatgtttttcattcactactcgctgacggcagttacgggcagcttacccata

SEQ ID NO: 34907 - DNA, 75 bp, synthetic construct
  source 1..75: mol_type = other DNA
tgctcgaccggctggaaagtgaaatcctggctgaccgggtgagtgaggaaagccgccgctggctggcatcgtgcg

SEQ ID NO: 34908 - DNA, 75 bp, synthetic construct
  source 1..75: mol_type = other DNA
aacggacggcgggagtgccattctggcttgaggcgatggagccggattttgttcccatgcgcactgatgaatccg

SEQ ID NO: 34909 - DNA, 75 bp, synthetic construct
  source 1..75: mol_type = other DNA
gagccgatcgccgatcagcgcgccgccgagcagtacgtgattgacgagtacaacaagttgaaaactcgcctgcgc

SEQ ID NO: 34910 - DNA, 75 bp, synthetic construct
  source 1..75: mol_type = other DNA
gatcctgcaggactgttttattggcgcggtaacccgcccggtgtaccggacatggctgaatatggtggttgcggc

SEQ ID NO: 34911 - DNA, 75 bp, synthetic construct
  source 1..75: mol_type = other DNA
aagcaaaatggttacaccatttaccaaacttatgtatcgcctggtgcttttgaaattagtgatctctattccacg

SEQ ID NO: 34912 - DNA, 75 bp, synthetic construct
  source 1..75: mol_type = other DNA
ataccgtcactggagaggaataggaacggtaggggtgatggtggcgacaaacgatccggaacatccggctccgga

SEQ ID NO: 34913 - DNA, 75 bp, synthetic construct
  source 1..75: mol_type = other DNA
gtataagcagaacggtctcggtgtatctcgatgaagatacaaacaaccgacttattaaggccaaagatcgtagtg

SEQ ID NO: 34914 - DNA, 75 bp, synthetic construct
  source 1..75: mol_type = other DNA
gcctgcccgacccggagctgcacccggacagcaccctcagcatgtggccggataaccgtatcgcccgtgacgcgc

SEQ ID NO: 34915 - DNA, 75 bp, synthetic construct
  source 1..75: mol_type = other DNA
gcagcagcttatccgcctgccggggcagcagtatgatgaggagtccggcctgtattacaaccgccaccgctatta

SEQ ID NO: 34916 - DNA, 75 bp, synthetic construct
  source 1..75: mol_type = other DNA
gggtgaagtgcatgatgaggttcgccgggaaatccgtaacgcggatgtgggccagcttgcccgcagtattaaccg

SEQ ID NO: 34917 - DNA, 75 bp, synthetic construct
  source 1..75: mol_type = other DNA
cgtcaatcacaagaacgtagggaaccgcttgagctttatagaatttacttctatgactgtccaccactcgacatt

SEQ ID NO: 34918 - DNA, 75 bp, synthetic construct
  source 1..75: mol_type = other DNA
attccatgcaggagattgaatggggctggctggggaaaatgcgcgtgccggtggcgctgcatcatcgcgatccgg

SEQ ID NO: 34919 - DNA, 75 bp, synthetic construct
  source 1..75: mol_type = other DNA
gtcctaaaggcgaaacaggtccagtgggccctcaagggcccgcagggccgaaaggtgagcgtggtgacgttggtg

SEQ ID NO: 34920 - DNA, 75 bp, synthetic construct
  source 1..75: mol_type = other DNA
acgcccgatccaagtaaattgccggacatagcgaaacaattaagactgccatatcctattgaccaggccagtagt

SEQ ID NO: 34921 - DNA, 75 bp, synthetic construct
  source 1..75: mol_type = other DNA
gccaaacctgattcatactctttttctcgttcaggtacaaatcctttttctgatatttgggatacatacaaatta

SEQ ID NO: 34922 - DNA, 75 bp, synthetic construct
  source 1..75: mol_type = other DNA
agtcgtggtgtcctcccaaaaaaactgctgaatgaaatgattgagcaggcgtaccaggactttgtggcaaatgag

SEQ ID NO: 34923 - DNA, 75 bp, synthetic construct
  source 1..75: mol_type = other DNA
aagtctgcccataccgaacttcgcagactggataaaaagagagaatctcttattgaattgtttattgatgaactt

SEQ ID NO: 34924 - DNA, 75 bp, synthetic construct
  source 1..75: mol_type = other DNA
tcaactattgcattgtcaaaggtgttacagagattaatgatgagttacgaataaactaccttaaaaatgtaataa

SEQ ID NO: 34925 - DNA, 75 bp, synthetic construct
  source 1..75: mol_type = other DNA
gccatttcgtcatcaacttactgcgtggcgaacgattctggaagacaaaaaatccttgttagtgagcagcggtac

SEQ ID NO: 34926 - DNA, 75 bp, synthetic construct
  source 1..75: mol_type = other DNA
tcggttaataacggtggtgaagttaatgctcgtgaacatattagcctgggttattacgaccaacgttctgataca

SEQ ID NO: 34927 - DNA, 75 bp, synthetic construct
  source 1..75: mol_type = other DNA
ttcagtgacaactacacccacgttcaggtcggtgcggataacaaacatgaactcgatggccttgacctcttcacc

SEQ ID NO: 34928 - DNA, 75 bp, synthetic construct
  source 1..75: mol_type = other DNA
atataaatcaacggggcttgatgtactgaatatcgtcgccgattatgctgatttcgtgacagaggttattttaag

SEQ ID NO: 34929 - DNA, 75 bp, synthetic construct
  source 1..75: mol_type = other DNA
cgccaatagcttaagcagcttgcctgataaggcgatggagtatctgaatcagaatgggctgataagtgtggagga

SEQ ID NO: 34930 - DNA, 75 bp, synthetic construct
  source 1..75: mol_type = other DNA
tgacgtatttcagcccttgcgatacgagcgggatgttgaaagagccatcataaaggctggcggaaaagcattgtg

SEQ ID NO: 34931 - DNA, 75 bp, synthetic construct
  source 1..75: mol_type = other DNA
gcgacgatattaatcactgaagcattctgggctttgaaagagcgcccgaacatcgatgttcagcgtgtcacatat

SEQ ID NO: 34932 - DNA, 75 bp, synthetic construct
  source 1..75: mol_type = other DNA
acagtggtgggcagattatctggatgcgaatagagagaaaggtatcagcccgtttgactatgcaaaaattaacaa

SEQ ID NO: 34933 - DNA, 75 bp, synthetic construct
  source 1..75: mol_type = other DNA
gaacagttaagcctgcagacaaacctttcaaacttaccgatggtgaggggatgcacctgttggttaaccccaatg

SEQ ID NO: 34934 - DNA, 75 bp, synthetic construct
  source 1..75: mol_type = other DNA
acagtggtgggctgattttctggatgcgaacagagagaagggtatcagtccgtttgactatgcaaaaattaacaa

SEQ ID NO: 34935 - DNA, 75 bp, synthetic construct
  source 1..75: mol_type = other DNA
ccacacagtcaaaagacagtgcagcagccagtgcgaagagtgcatctgacagtgcaaagacggcaaccagcaggg

SEQ ID NO: 34936 - DNA, 75 bp, synthetic construct
  source 1..75: mol_type = other DNA
gtggcgcgttatggcgtccggggttatctgtcatcgttttcgacccgctgaataattttgataatgatgaactgg

SEQ ID NO: 34937 - DNA, 75 bp, synthetic construct
  source 1..75: mol_type = other DNA
ttggaaatacgtcgggcgtcattcccggcaaaacaatcacggaacgacaggcagcagaagggcttatttccaacg

SEQ ID NO: 34938 - DNA, 75 bp, synthetic construct
  source 1..75: mol_type = other DNA
gcgtggttattacatcacccttgatggcctgatgatgcttcagcttgggttaagtctgcgcacaatgcggtacta

SEQ ID NO: 34939 - DNA, 75 bp, synthetic construct
  source 1..75: mol_type = other DNA
atgccattaacctcagatattggatcacgttcatttaatcttgggctggaggtttttcgtgcccgaattgcagcc

SEQ ID NO: 34940 - DNA, 75 bp, synthetic construct
  source 1..75: mol_type = other DNA
gcactcgctgcttgtggcacattatttatacagaatatccaagcgtaagattgcaaaggtgcgtggaaaggatga

SEQ ID NO: 34941 - DNA, 75 bp, synthetic construct
  source 1..75: mol_type = other DNA
gccagcaccgtcggcgatgtgcgcattgttgacccggcaatcacccagcctggcgtgctaaaaccgaagaaaggg

SEQ ID NO: 34942 - DNA, 75 bp, synthetic construct
  source 1..75: mol_type = other DNA
atcgatgccacgggttatggcatcccggtatttattgctactgaaaatcaagaacgtgtacccgcagagtatttg

SEQ ID NO: 34943 - DNA, 75 bp, synthetic construct
  source 1..75: mol_type = other DNA
atgccagcgtaacgtttaatgtgaataaactccgtctggaaatttcagtaccgcaaatcgccatcaaaagtaatg

SEQ ID NO: 34944 - DNA, 75 bp, synthetic construct
  source 1..75: mol_type = other DNA
gacaggctggaggaagaaatccgggcagaccgcgtgagcagtgaaagccgggcgtggcttgcgcagtgcgggctg

SEQ ID NO: 34945 - DNA, 75 bp, synthetic construct
  source 1..75: mol_type = other DNA
ctataaactggaaacgaaacctgatcgtcgcctggctaggctgttttcttaccggtgccgccttcagtctggtaa

SEQ ID NO: 34946 - DNA, 75 bp, synthetic construct
  source 1..75: mol_type = other DNA
gcagccgacagcggatacatcaaagaaaatccgttcgcagccatttcgcaactgaagagatcacgaacggaacct

SEQ ID NO: 34947 - DNA, 75 bp, synthetic construct
  source 1..75: mol_type = other DNA
gacaactctggataatgccgccctgctccgcctgactgatgcaattaaggcagtgttctctatcacgaaaaaaca

SEQ ID NO: 34948 - DNA, 75 bp, synthetic construct
  source 1..75: mol_type = other DNA
agcgtggtgcgcagaatatgatgaatggggcaacctgctgagtgatgagaacccgcatcatctgcagcagctcat

SEQ ID NO: 34949 - DNA, 75 bp, synthetic construct
  source 1..75: mol_type = other DNA
atgctaccatctatttcaatcaacaataccagcgcagcttacccagaatccatcaatgaaaataacaatgatgaa

SEQ ID NO: 34950 - DNA, 75 bp, synthetic construct
  source 1..75: mol_type = other DNA
gtgtcgcctgctgtggtacagggggcaccggatatcacccgggaaatccagcaggatattgcccggcgaatgagg

SEQ ID NO: 34951 - DNA, 75 bp, synthetic construct
  source 1..75: mol_type = other DNA
ggctggcatcgtgcggcctgacggtggcgcagatgcaaagccagatggacccggtatacacgccggcgcgaaaaa

SEQ ID NO: 34952 - DNA, 75 bp, synthetic construct
  source 1..75: mol_type = other DNA
caaacggcacgccgtcgtcaacggtgtccttatggtccatcgtggatgggataagggtaaagactctgatgcgtg

SEQ ID NO: 34953 - DNA, 75 bp, synthetic construct
  source 1..75: mol_type = other DNA
gttgaaatccctggaaagctggttgcgtgaaaagatgaagaccctgttcttcggctctggccatggtggtgagcg

SEQ ID NO: 34954 - DNA, 75 bp, synthetic construct
  source 1..75: mol_type = other DNA
acctgccgggctaatccaccactctgatcgaggttcacagtactgcgcatacgattaccgggtcatacaggagca

SEQ ID NO: 34955 - DNA, 75 bp, synthetic construct
  source 1..75: mol_type = other DNA
gacgatatcaccagaagctgggcagattgcaccggctctcgcgcactttgggcagcagacaacaacgtcacccca

SEQ ID NO: 34956 - DNA, 75 bp, synthetic construct
  source 1..75: mol_type = other DNA
agagatgaaattagtgctttgagcaaacgtattcaggagcctgtgaaagtttcacttggtggtgaagttgccatt

SEQ ID NO: 34957 - DNA, 75 bp, synthetic construct
  source 1..75: mol_type = other DNA
ttttggtgcgaagtctatttccactatcgcagaatcaaaacgttttccgctgcacgaaatgcgcgacgatgtcgc

SEQ ID NO: 34958 - DNA, 75 bp, synthetic construct
  source 1..75: mol_type = other DNA
cagcgtcatgacatcatgcaaaaacggtctgaaccggactattcccgccatcttgaacaggcgcgaacggtcggg

SEQ ID NO: 34959 - DNA, 75 bp, synthetic construct
  source 1..75: mol_type = other DNA
taaaggccgacgacatggcgactttgccgtggcgctctgtatggctgtcagggcgtcttatatgaatggttttgt

SEQ ID NO: 34960 - DNA, 75 bp, synthetic construct
  source 1..75: mol_type = other DNA
attgaaccattattattgaaggctatttctgccggggaatcttcgttgaggccgggcgcaattaatataaataag

SEQ ID NO: 34961 - DNA, 75 bp, synthetic construct
  source 1..75: mol_type = other DNA
gagcctcctgtgatggaagaaatagtcgactactttaaggactcgaaaatcccggtatatgttgtatttattacc

SEQ ID NO: 34962 - DNA, 75 bp, synthetic construct
  source 1..75: mol_type = other DNA
cgtcgccggtgatgaacgcagcgcccgccgttcccttgtccgtgactatgtgctctcccttgctgcccgtctgcc

SEQ ID NO: 34963 - DNA, 75 bp, synthetic construct
  source 1..75: mol_type = other DNA
atgtctcgtattgaaagcgatttccttggtgagcgtgaaattccggatgattgctattatggtgttcagacactt

SEQ ID NO: 34964 - DNA, 75 bp, synthetic construct
  source 1..75: mol_type = other DNA
cgctggtatggtcagtcagtgcacttacacttctggttctctggttcccgttatcttcctccagttacggtgctg

SEQ ID NO: 34965 - DNA, 75 bp, synthetic construct
  source 1..75: mol_type = other DNA
aaggtattcaaggcagggttaagacgtaagatgcgaaaagcagccatggacagaaactatctggcgtcagtcctt

SEQ ID NO: 34966 - DNA, 75 bp, synthetic construct
  source 1..75: mol_type = other DNA
cggtgctggtgcagatgctcgaccggctggaaagtgaaatcctggctgaccgggtgagtgaggaaagccgccgct

SEQ ID NO: 34967 - DNA, 75 bp, synthetic construct
  source 1..75: mol_type = other DNA
cgcaactgatcacacagacacaacaggatatcagccagcgcctgcccggttcgcagccgggcgtgaatgaaacca

SEQ ID NO: 34968 - DNA, 75 bp, synthetic construct
  source 1..75: mol_type = other DNA
gacagggtgatgccctgctgcatacgtcgtttatggcagatgtgctgggggcggtgctggaggtggccgcaaatg

SEQ ID NO: 34969 - DNA, 75 bp, synthetic construct
  source 1..75: mol_type = other DNA
atgatgcataaatcagtagccggtgagtttcagaaggaagtcgataatactaccgttctattggacgatatttta

SEQ ID NO: 34970 - DNA, 75 bp, synthetic construct
  source 1..75: mol_type = other DNA
actacctgaaaacgcaccggactttctgcgcgccggatgtagctgcggcaacaggcgtgactgtaaccagcatca

SEQ ID NO: 34971 - DNA, 75 bp, synthetic construct
  source 1..75: mol_type = other DNA
tgaagtaagacgagcctataatcgtacaacttacttggcgcagcgagtagaattaatgaatttttggggcttaaa

SEQ ID NO: 34972 - DNA, 75 bp, synthetic construct
  source 1..75: mol_type = other DNA
actggcccattttatgggcgctgttgatgacagcgataaatttgcttcagctgattctggcaaagacttacgtca

SEQ ID NO: 34973 - DNA, 75 bp, synthetic construct
  source 1..75: mol_type = other DNA
tggtgaacacgctggcctcagaaaatccggatgaagccggtcgttacagcatggacgttgagtacggtcagtaca

SEQ ID NO: 34974 - DNA, 75 bp, synthetic construct
  source 1..75: mol_type = other DNA
acaggccagcggcctgattacttcaccgcaaaccataaaagcagccctggcgcatcagagcggtacatggataac

SEQ ID NO: 34975 - DNA, 75 bp, synthetic construct
  source 1..75: mol_type = other DNA
acaattgcaaattaccgggcggtgaaacgattgatgaatgggcattgtggcgacgggaccatccggctggtgaaa

SEQ ID NO: 34976 - DNA, 75 bp, synthetic construct
  source 1..75: mol_type = other DNA
aatcttcaggaattctgatcccggccacgccggagaccagcgaattactgcaatcaaaaattaagctcggtgccg

SEQ ID NO: 34977 - DNA, 75 bp, synthetic construct
  source 1..75: mol_type = other DNA
tgtcacactgaaactgattgctgccctcacgaatcatggtaccctggccgcagggaaaaccctttccgtcacgtc

SEQ ID NO: 34978 - DNA, 75 bp, synthetic construct
  source 1..75: mol_type = other DNA
tttcgctaccaccaaacgtattgagatcacctgctggacgcgccaacaaatggaaggtcacgccagtcgcacaca

SEQ ID NO: 34979 - DNA, 75 bp, synthetic construct
  source 1..75: mol_type = other DNA
gtacgaaaaacgcagccgggcatgaaggggtacgtaacaaagatattaacggcgttgtctcgtggaaattaaatc

SEQ ID NO: 34980 - DNA, 75 bp, synthetic construct
  source 1..75: mol_type = other DNA
tctgaaggttaagggtgacagcatgtggccaaggattcagtcaggagaatatgttgttattgaaccaaatacgcc

SEQ ID NO: 34981 - DNA, 75 bp, synthetic construct
  source 1..75: mol_type = other DNA
gatgaatacggcaggctgacggagaagacggaccgcatcccggcgggtgtgatacggacggacgacgagcggacc

SEQ ID NO: 34982 - DNA, 75 bp, synthetic construct
  source 1..75: mol_type = other DNA
ctcttcctgttgaagaagttgataaaatgcattttgtttcagctattgtgaaacacaccaggtacgtagaccagg

SEQ ID NO: 34983 - DNA, 75 bp, synthetic construct
  source 1..75: mol_type = other DNA
agaatgtgactcaggcgttacccgaattacagctcggcaatgccattattaaaccttcccgttatgtacagaaca

SEQ ID NO: 34984 - DNA, 75 bp, synthetic construct
  source 1..75: mol_type = other DNA
aattcttgatatcaaaaatcaggaattatcgggaacgttaacgctgtattcccggccctctatcgcccaatgctg

SEQ ID NO: 34985 - DNA, 75 bp, synthetic construct
  source 1..75: mol_type = other DNA
atgtataaaaaattaaaattaaccacaataagcgaattgattaaaaatatttattgttcattatccgttatcatc

SEQ ID NO: 34986 - DNA, 75 bp, synthetic construct
  source 1..75: mol_type = other DNA
gcataataagctttttctgcttctgccggaggagtatggcccagcctttccagcaatcgtcgattgttataccag

SEQ ID NO: 34987 - DNA, 75 bp, synthetic construct
  source 1..75: mol_type = other DNA
cacaatcaggcgcttatcgccctggcgagacgacgctgcgacgttctgttcgccatgatgcgcgacgggactttt

SEQ ID NO: 34988 - DNA, 75 bp, synthetic construct
  source 1..75: mol_type = other DNA
aggtgacagagtcaatgtctattatccgccagggcatccagaacaagccgaaataaacaatccctgggttaattt

SEQ ID NO: 34989 - DNA, 75 bp, synthetic construct
  source 1..75: mol_type = other DNA
agattgccgatcgcattcgtgaacaaattgcgcgtggcgagcttaaacctggcgatgcgttacctaccgaatcgg

SEQ ID NO: 34990 - DNA, 75 bp, synthetic construct
  source 1..75: mol_type = other DNA
cacactgccactttacgaccgttgatcgtggagagttgatggcgttcggctcaaggattcttgcccgtcgggagg

SEQ ID NO: 34991 - DNA, 75 bp, synthetic construct
  source 1..75: mol_type = other DNA
aaaagtgttgaagatgtttactatatctcaaagccatgaagaggtgacaagcgaagttcgttgtttcaaccagta

SEQ ID NO: 34992 - DNA, 75 bp, synthetic construct
  source 1..75: mol_type = other DNA
cgaacagttgtcccgtgattactcgaaggtcagttactcaagtgcccgcgcctccgccaatgagtcgtggcgcta

SEQ ID NO: 34993 - DNA, 75 bp, synthetic construct
  source 1..75: mol_type = other DNA
gcgtcccggctggccacgcagatgttttcctgctggctggaagaggcacttcttcgggggattattcgtccgcca

SEQ ID NO: 34994 - DNA, 75 bp, synthetic construct
  source 1..75: mol_type = other DNA
tcagagcaatacgttgcgttaaaaacggctgttcagtctctgatgccacggggtattgcaacaatcatccggtga

SEQ ID NO: 34995 - DNA, 75 bp, synthetic construct
  source 1..75: mol_type = other DNA
tcccgtcaccatctggcagactctgctctcccgactgctggaccagcactacggcctcacactgaatgacactcc

SEQ ID NO: 34996 - DNA, 75 bp, synthetic construct
  source 1..75: mol_type = other DNA
agctccctgacggcgttgaagtgaacgaatggatgcgctcactgaaacggcacgaacgccgggcgctgatgcgtt

SEQ ID NO: 34997 - DNA, 75 bp, synthetic construct
  source 1..75: mol_type = other DNA
gacgagcatttgccatccgcgggccagtgccacagttgatgaacaatgttcgcaagtggtggatttactgcaaca

SEQ ID NO: 34998 - DNA, 75 bp, synthetic construct
  source 1..75: mol_type = other DNA
atgaataatttcccactacagatttttattgataccgacaccgccatgatgattcaggctttcactgatgtaggt

SEQ ID NO: 34999 - DNA, 75 bp, synthetic construct
  source 1..75: mol_type = other DNA
tgaccttatcgcgatgaacaaggccgcgcagaaggtctatacctcaatggaaattcagccgaactttgccaacac

SEQ ID NO: 35000 - DNA, 75 bp, synthetic construct
  source 1..75: mol_type = other DNA
aaggccgcgtatgaccttgctaacggtaaatatactgcgcaggatgccagcacgacgcgaaaaggccttgtccag

SEQ ID NO: 35001 - DNA, 75 bp, synthetic construct
  source 1..75: mol_type = other DNA
ataagcgcaggcggacaatgccggctggaaaggtgttttcaggttgcccgtgatgatacatcagaccagtacgtt

SEQ ID NO: 35002 - DNA, 75 bp, synthetic construct
  source 1..75: mol_type = other DNA
cttagcatgtacgcggttgatgctgttgccgctattgcagaggtgagaggctggaacgcctgccgtgccgctatg

SEQ ID NO: 35003 - DNA, 75 bp, synthetic construct
  source 1..75: mol_type = other DNA
gatgggtgcgcacacaggacacccgtctggctcccgttcttcagggattatttgatctctacatccgtggtcgtg

SEQ ID NO: 35004 - DNA, 75 bp, synthetic construct
  source 1..75: mol_type = other DNA
tggctgattctgaacatggcgggactggagcgtgaagagttccgggtgctgtatctgaacaaccagaatcagctg

SEQ ID NO: 35005 - DNA, 75 bp, synthetic construct
  source 1..75: mol_type = other DNA
gatatccgggtgccggaccatctgatagtcggtggcagccaggttttctcctttgcggaacacggtctgctttaa

SEQ ID NO: 35006 - DNA, 75 bp, synthetic construct
  source 1..75: mol_type = other DNA
cagaatgagcatgcaggatttacaggatgcccgcgagaactttgttcagggtgtgcagaacaccgttgcggaaga

SEQ ID NO: 35007 - DNA, 75 bp, synthetic construct
  source 1..75: mol_type = other DNA
gctttccctaatgcggaagtggtgggtaacccggtgcgtaccgatgtgctggcgctgccgttgccgcagcaacgt

SEQ ID NO: 35008 - DNA, 75 bp, synthetic construct
  source 1..75: mol_type = other DNA
aggtagctctaacggtgtggaactgaccggactgcaactggacgaagaaagaaaacaagtgatgaaaattatgca

SEQ ID NO: 35009 - DNA, 75 bp, synthetic construct
  source 1..75: mol_type = other DNA
cgtctggtacaggcactggctctggtggatatccgggtgccggaccatctgatagtcggtggcagccaggttttc

SEQ ID NO: 35010 - DNA, 75 bp, synthetic construct
  source 1..75: mol_type = other DNA
gaaaaagtaaaatcacgtccacagtgttgtgacgatgacgcgatgattatatgcgggtgtatggctcgccttaac

SEQ ID NO: 35011 - DNA, 75 bp, synthetic construct
  source 1..75: mol_type = other DNA
tacgggaggcatcgtgctgcccgtctcccgtcaccatctggcagacactgctcacccggttactggaccagcact

SEQ ID NO: 35012 - DNA, 75 bp, synthetic construct
  source 1..75: mol_type = other DNA
ctgtggcggacattgtgcagtcgttgccatcgttcaccgaaacgcgagcggatgacctgattttaccatcgctgc

SEQ ID NO: 35013 - DNA, 75 bp, synthetic construct
  source 1..75: mol_type = other DNA
gttgccagtggcgatttatacaactccggctacgggttatttccgtctgaacaggcacgtaaggactggataaag

SEQ ID NO: 35014 - DNA, 75 bp, synthetic construct
  source 1..75: mol_type = other DNA
ggcgtctgaacataatttgccgtgagtgccggaagagtgaggttatgcagcgagtgctggcgttttatcagggga

SEQ ID NO: 35015 - DNA, 75 bp, synthetic construct
  source 1..75: mol_type = other DNA
cacgtcctttcgatgtggccatccagtgaactctgcgcagtgggtgatctgatcgctctgtcaactgatgaaatc

SEQ ID NO: 35016 - DNA, 75 bp, synthetic construct
  source 1..75: mol_type = other DNA
ttttaacgaactggcccgctacggaattaagccggaacatctgacaacagatccctgcatgaacatttataccgg

SEQ ID NO: 35017 - DNA, 75 bp, synthetic construct
  source 1..75: mol_type = other DNA
agtcatcatttttgcgggtagtgatgcgtgggcacatgcgaagcagtggcaggaacaggacgggcgactggctgg

SEQ ID NO: 35018 - DNA, 75 bp, synthetic construct
  source 1..75: mol_type = other DNA
ggtgaagtcttttcccgtctttcgctactggacaacgtctgggggtaccaacatgaagggtacgagcatacagtg

SEQ ID NO: 35019 - DNA, 75 bp, synthetic construct
  source 1..75: mol_type = other DNA
tgtacttcttttgaacgtgacaactatgcagtgatgaagatgtcctgcgagttgctaggcatgtcatgggggctg

SEQ ID NO: 35020 - DNA, 75 bp, synthetic construct
  source 1..75: mol_type = other DNA
ataatcgattttgccgagttgaaggcgattttcaaacccacgctagaccgactggatcactactacctcaacgat

SEQ ID NO: 35021 - DNA, 75 bp, synthetic construct
  source 1..75: mol_type = other DNA
gggccaaagcaactggcagacctggcgaatatccgcattattgacgagaaacgccgttttgcgcgtgtctatatc

SEQ ID NO: 35022 - DNA, 75 bp, synthetic construct
  source 1..75: mol_type = other DNA
ccacccgtgagctacaacgctggcgattaattcttggcgaagcggcagaaacgacgctttgtgggctggatgaca

SEQ ID NO: 35023 - DNA, 75 bp, synthetic construct
  source 1..75: mol_type = other DNA
tcaggcggcgctaattcagatatcacgatccgcacattcgaagcggtgcgtaaatcgaaggaagcgttagacctg

SEQ ID NO: 35024 - DNA, 75 bp, synthetic construct
  source 1..75: mol_type = other DNA
caccacccctgagtggatcaacagtattcacacgctgtttccgcaacaggtgattgagcggctggaaagcgatgc

SEQ ID NO: 35025 - DNA, 75 bp, synthetic construct
  source 1..75: mol_type = other DNA
aactttcataaatggcttgagcacgcagccggaaaagacccgcgcaagatgatgcgtatatgtgccgcgctgtac

SEQ ID NO: 35026 - DNA, 75 bp, synthetic construct
  source 1..75: mol_type = other DNA
atggtgcgcttgacctgaaaacgggggaattttccccgcacacgccggagaactggatcaccacgcacaacggca

SEQ ID NO: 35027 - DNA, 75 bp, synthetic construct
  source 1..75: mol_type = other DNA
atcagaaacgtaaacgcgcactggaacgtctcctagatcgagaaagtgtgctgcctgacttaattgacttgttcg

SEQ ID NO: 35028 - DNA, 75 bp, synthetic construct
  source 1..75: mol_type = other DNA
atgacattaacaagacgtgaatttattaaacacagcggtattgccgctggagcgctggtggtgacatcggcagca

SEQ ID NO: 35029 - DNA, 75 bp, synthetic construct
  source 1..75: mol_type = other DNA
tcgctcaaattgctgagtatatcccgcgtgcgtgccggggtatgcagttgcaggaagccaaagcgcgcctggaga

SEQ ID NO: 35030 - DNA, 75 bp, synthetic construct
  source 1..75: mol_type = other DNA
tgctatccggtgaattttcagaaactacgtttataagctgcctggaatgctttggcgatgatgattgcgatacct

SEQ ID NO: 35031 - DNA, 75 bp, synthetic construct
  source 1..75: mol_type = other DNA
aaacacagcttgcgctgggaattatcagcgattcagacaggcaaagactcattaactggatgttatacatgcagc

SEQ ID NO: 35032 - DNA, 75 bp, synthetic construct
  source 1..75: mol_type = other DNA
aaaattttgtggccggtgcatctcaccctggacagatggaacgggagggggttacgtctgccccccggaaagtcc

SEQ ID NO: 35033 - DNA, 75 bp, synthetic construct
  source 1..75: mol_type = other DNA
aaacgtagaaatgctctctggctatgtttccacgtacaaattaaccgatagcgagcgcgatattgctgccgaaat

SEQ ID NO: 35034 - DNA, 75 bp, synthetic construct
  source 1..75: mol_type = other DNA
atggaaaggagaacccggtggcgtaattgcagaatgtcacgttaactgcctggttgaaacagatgctcaggctta

SEQ ID NO: 35035 - DNA, 75 bp, synthetic construct
  source 1..75: mol_type = other DNA
tcacgatgattaccaaacggtaatggcatacaaagtttctgaagtcatcgatgcaatccgcgctactggcattcg

SEQ ID NO: 35036 - DNA, 75 bp, synthetic construct
  source 1..75: mol_type = other DNA
gagctggtgaagcaaggtaaaattaaaaagcaaaaaccgctgccggaaattagcgaggaagagaagccgtttgaa

SEQ ID NO: 35037 - DNA, 75 bp, synthetic construct
  source 1..75: mol_type = other DNA
ccgtaacccgaataacgtggttgatctgaaaaaccgcaaataccagtgcgaacaggtgaactacgacacgtttat

SEQ ID NO: 35038 - DNA, 75 bp, synthetic construct
  source 1..75: mol_type = other DNA
aagggtttcttcgcgggaaatgtgtaccgcgagatctgaaagtgaatgaaacaaatgctgagtatctggtgcgta

SEQ ID NO: 35039 - DNA, 75 bp, synthetic construct
  source 1..75: mol_type = other DNA
tgaacgactgaagtatgcgctggaaacgggattgcaggtgatcgcactgaacggcctgttttggtcagacagtca

SEQ ID NO: 35040 - DNA, 75 bp, synthetic construct
  source 1..75: mol_type = other DNA
cttgttctgacagtttttcttgtttccggagagccagttgatattgcagtcagtgttcacaggacaatgcaggag

SEQ ID NO: 35041 - DNA, 75 bp, synthetic construct
  source 1..75: mol_type = other DNA
atgaatactgctattgccctcactctgactgtttttcttaatactggcgagcctgttgacatggttattgacatt

SEQ ID NO: 35042 - DNA, 75 bp, synthetic construct
  source 1..75: mol_type = other DNA
tttattctgcgtgcattgggtgagctggtgttacaccgcccttccagtggcagttttgtctcttatgcccgtgag

SEQ ID NO: 35043 - DNA, 75 bp, synthetic construct
  source 1..75: mol_type = other DNA
gcgtttctgtgcgccagtactttgaatctaactactgtcttaacgaccttcagaaagctgctcttcttgccgctg

SEQ ID NO: 35044 - DNA, 75 bp, synthetic construct
  source 1..75: mol_type = other DNA
tggctgtaagtaaccacagagaactttacctgactgtggggggcgagttgtgcaggaacttaaccgctggtttcg

SEQ ID NO: 35045 - DNA, 75 bp, synthetic construct
  source 1..75: mol_type = other DNA
agcaggcggtactggtacacatctattttacgcaagacaaagatatggaagatctccaggagtttgaatctctgg

SEQ ID NO: 35046 - DNA, 75 bp, synthetic construct
  source 1..75: mol_type = other DNA
gaggagaatatgctcctgccggtttctggtcaggagctgcccattcgctggcttgcgcaacacagcagcgaaaaa

SEQ ID NO: 35047 - DNA, 75 bp, synthetic construct
  source 1..75: mol_type = other DNA
gaacgctatcaactcagcaaagactccatgacctgggaactaaaaccgggagcagcgccagacgacgttcaccac

SEQ ID NO: 35048 - DNA, 75 bp, synthetic construct
  source 1..75: mol_type = other DNA
atgcgtgagtatgatgcatggttacagtgtgactgtattccgggagattcgccggccatgaattttgctgctctt

SEQ ID NO: 35049 - DNA, 75 bp, synthetic construct
  source 1..75: mol_type = other DNA
cggaatatgacccgcttattggctgctatattccgaccgacatcacgttcacaccggcgctgtttgctgctctcg

SEQ ID NO: 35050 - DNA, 75 bp, synthetic construct
  source 1..75: mol_type = other DNA
ccgcctgacggctaatcaggcatatcaccagatggtgaagctggggatcgtcgagcagcgcgaacgatacagccg

SEQ ID NO: 35051 - DNA, 75 bp, synthetic construct
  source 1..75: mol_type = other DNA
aaaaggagcaggttactggcccggtgagtacgcagaccgcaaccgtgccgttgctaatcagcggctgagcggaag

SEQ ID NO: 35052 - DNA, 75 bp, synthetic construct
  source 1..75: mol_type = other DNA
acgtccgagacgaacgctaagtcttctgagacggcagcagcacagagtgcctccgcagcagcagactcaaaaaca

SEQ ID NO: 35053 - DNA, 75 bp, synthetic construct
  source 1..75: mol_type = other DNA
gccccggtcagtaaccgaaccctgatgagtctgctggcatccggcgaagacctggcatcacagggctggcgctat

SEQ ID NO: 35054 - DNA, 75 bp, synthetic construct
  source 1..75: mol_type = other DNA
attccactggtattatttatcttttcatggccggtattgtgtgcagatattcatggacgggttgttcgtgtactg

SEQ ID NO: 35055 - DNA, 75 bp, synthetic construct
  source 1..75: mol_type = other DNA
ctgggagagatcccctggcttgcagaaaatccagaaaatgcggcaaccggaaagtacataaaccttgccttgttg

SEQ ID NO: 35056 - DNA, 75 bp, synthetic construct
  source 1..75: mol_type = other DNA
gccagcgcatccagtacggatttggggacgaaaaccacatcgtcgtttgattacggcactaaatccacgaataac

SEQ ID NO: 35057 - DNA, 75 bp, synthetic construct
  source 1..75: mol_type = other DNA
gcatcggggtggaaggtgccaccaccgacggacgcgaaatccagcgtgaatggctggaacagatggcagccagct

SEQ ID NO: 35058 - DNA, 75 bp, synthetic construct
  source 1..75: mol_type = other DNA
gcgcaatctcgatgatttgcgccggatcgtgcaaacgctgacacaacgcggcgtgcatatcgaattcgtcaagga

SEQ ID NO: 35059 - DNA, 75 bp, synthetic construct
  source 1..75: mol_type = other DNA
tgagacgaagcagcatgacggttccgggcaacgtaattatggttgcagtcgtgggccggggcgtttgctggatgg

SEQ ID NO: 35060 - DNA, 75 bp, synthetic construct
  source 1..75: mol_type = other DNA
atgtcaaagctgatgattgtgctggttgtgttgttatcactggcggtggccggtctgtttctggcgaagcatgaa

SEQ ID NO: 35061 - DNA, 75 bp, synthetic construct
  source 1..75: mol_type = other DNA
cggtgaagctgagcgaatactggtcagcggtgaatactggcagcgtcagaaaacgttgctgacagaaagagaggt

SEQ ID NO: 35062 - DNA, 75 bp, synthetic construct
  source 1..75: mol_type = other DNA
gagcatgatttacatgccctgagtgagcaacagaagggtaagcgtgcagcaagaaccgtattgacggggatgtgt

SEQ ID NO: 35063 - DNA, 75 bp, synthetic construct
  source 1..75: mol_type = other DNA
aagaaaaaatcagcaaaatgccaaaaggttctgttcctgccctgcaacaggaaatgctgcgccgtatcaggaaac

SEQ ID NO: 35064 - DNA, 75 bp, synthetic construct
  source 1..75: mol_type = other DNA
gcttctgcgcctgatcaatgccgggcagatgcccgcgtcctgtaagcagtatatccgctggatttattcaaaggg

SEQ ID NO: 35065 - DNA, 75 bp, synthetic construct
  source 1..75: mol_type = other DNA
aaaagccaccagcaacgatggcctttctgttacgcgcaccgccgataaagattcagctaaaacttttgttcagga

SEQ ID NO: 35066 - DNA, 75 bp, synthetic construct
  source 1..75: mol_type = other DNA
cgggcgaagccaggggaatgcgctgggctgaaattgattttcataagcgggtatggactatacctgcagaaagaa

SEQ ID NO: 35067 - DNA, 75 bp, synthetic construct
  source 1..75: mol_type = other DNA
acagcctgatttcaataacgccaaagagggcggaaccgtagcctgggtattcgattgcggcaagattgaccagct

SEQ ID NO: 35068 - DNA, 75 bp, synthetic construct
  source 1..75: mol_type = other DNA
tcacctgtagagtttgaatacattctgttactggctggggagcatcctgaatacgtcctttctaaacgggatgcc

SEQ ID NO: 35069 - DNA, 75 bp, synthetic construct
  source 1..75: mol_type = other DNA
atcagcaggtgattaacaaatctgtcaacgatggtatcgccagggcaatccagcccggtgggcttatctggaatg

SEQ ID NO: 35070 - DNA, 75 bp, synthetic construct
  source 1..75: mol_type = other DNA
gaaatcgtccgcatccccatttaccgtcttatatcactggcgctgacactgaaagcatggtcgtcagagactctg

SEQ ID NO: 35071 - DNA, 75 bp, synthetic construct
  source 1..75: mol_type = other DNA
gctgcgctgccattctgggtaaagccgacaatccaccagcatccggcaatcaggttagcgaattaacaatgtggg

SEQ ID NO: 35072 - DNA, 75 bp, synthetic construct
  source 1..75: mol_type = other DNA
atatggcgctttatccctgcgtgatgctgaggatgtggatgccgcactgaatgcactgaaaaatcttaaatttta

SEQ ID NO: 35073 - DNA, 75 bp, synthetic construct
  source 1..75: mol_type = other DNA
ccgcgtgaaatcgagttgcgccagaaacaatacgagtactatcgtgatttactgttcagtttcccgaaacctgaa

SEQ ID NO: 35074 - DNA, 75 bp, synthetic construct
  source 1..75: mol_type = other DNA
gtatgcttccgctatatttgactctggtgcctatatcgacctgattagtaagtatgttcaccatgataatgagta

SEQ ID NO: 35075 - DNA, 75 bp, synthetic construct
  source 1..75: mol_type = other DNA
gcttactacgacagctaccgttctgcggttctgccggctaacttgatccaagcacagcgtgattatttcggtgcg

SEQ ID NO: 35076 - DNA, 75 bp, synthetic construct
  source 1..75: mol_type = other DNA
ccagagcgcgctggatctcggcgaaccgctgtcgctgattaccgagtctgtgtttgcacgttatatctcttctct

SEQ ID NO: 35077 - DNA, 75 bp, synthetic construct
  source 1..75: mol_type = other DNA
agcacagcgtgattatttcggtgcgcacacgtataaacgcattgataaagaaggtgtttttcatacagaatggct

SEQ ID NO: 35078 - DNA, 75 bp, synthetic construct
  source 1..75: mol_type = other DNA
gacagatgctcaaggggcgtggtttgagcatgatttacatgccctgagtgcgcaacagaaggcggccttgcagcc

SEQ ID NO: 35079 - DNA, 75 bp, synthetic construct
  source 1..75: mol_type = other DNA
aatatcaggcattgtttctgcctttcctgtcgtggtcggttgattttgcagacagatgctcagggggcgtggttt

SEQ ID NO: 35080 - DNA, 75 bp, synthetic construct
  source 1..75: mol_type = other DNA
gattgccgaaaatccaggcaagaaactggttccttactatacggtgaaagagtttgttgaatctctggaaacgcc

SEQ ID NO: 35081 - DNA, 75 bp, synthetic construct
  source 1..75: mol_type = other DNA
gaaaggcaggcacgcctggaacgggagcgtgcgcggtcctggcatgaagagcaggaacgggaagcacgggtatgg

SEQ ID NO: 35082 - DNA, 75 bp, synthetic construct
  source 1..75: mol_type = other DNA
cttcgctccggggattcagcaggcgaaagtagtttcaacggcagtctgagtgctcaaaacagcaaaataactgtt

SEQ ID NO: 35083 - DNA, 75 bp, synthetic construct
  source 1..75: mol_type = other DNA
cccatgacgaattcatgaccgagcggcaacaggtactgaaaacctgggaaaccggcaaggatgttgaaaactttg

SEQ ID NO: 35084 - DNA, 75 bp, synthetic construct
  source 1..75: mol_type = other DNA
atacagccccgcgcgggcaaaatttgcatcgcctcgccgaggtattgcaatgttcaccaacttggatactgtttg

SEQ ID NO: 35085 - DNA, 75 bp, synthetic construct
  source 1..75: mol_type = other DNA
attttcaaacatccggccggaaaattattctgggctttgacggatgaaagcaataaagatcaatcggacgttatt

SEQ ID NO: 35086 - DNA, 75 bp, synthetic construct
  source 1..75: mol_type = other DNA
gaaaaacggtggcgattgttgccagtgcagccatcagcagcggagatctggtgcaggtgggcgatgtttttgcgg

SEQ ID NO: 35087 - DNA, 75 bp, synthetic construct
  source 1..75: mol_type = other DNA
tatacggtgcgttatctgtatctgcttaacatgattgcacttgagttaagggaagacacacggattaaggttgag

SEQ ID NO: 35088 - DNA, 75 bp, synthetic construct
  source 1..75: mol_type = other DNA
cacaatatgcgcagcctgcagtgcaatataatgagccgctgcaacaaccagtacagccgcagcagccgtattatg

SEQ ID NO: 35089 - DNA, 75 bp, synthetic construct
  source 1..75: mol_type = other DNA
acgtttatcacttaatgtcccgccttttatgctgattccgcgtaatatccggagaaaagtggatggattcagaca

SEQ ID NO: 35090 - DNA, 75 bp, synthetic construct
  source 1..75: mol_type = other DNA
tcaataacaacaccgaacgccacgttgcacgccagcacttccgtaaaaatagtgcgaccgcaaccactgaaatcc

SEQ ID NO: 35091 - DNA, 75 bp, synthetic construct
  source 1..75: mol_type = other DNA
tcttccgtcagcgtggtatcacgtttacccgctgggccgaagaacacggctacagccgcaatgaggtctatcgtg

SEQ ID NO: 35092 - DNA, 75 bp, synthetic construct
  source 1..75: mol_type = other DNA
cgccgcgatgatcctgtcccgtaaatacgccaaaccaggtgcactgctcgagcaactgctgaaagaagcgcaaga

SEQ ID NO: 35093 - DNA, 75 bp, synthetic construct
  source 1..75: mol_type = other DNA
gtttactcaggaccagaacggcaccctgacggaaatccgtgtcggcccacctgatgcttatctgcctgaacccga

SEQ ID NO: 35094 - DNA, 75 bp, synthetic construct
  source 1..75: mol_type = other DNA
gtggaaatgccgaacagcaagacgtatgacgcaacgggatgttttgtggggctggaagcctggggggatgtgtcc

SEQ ID NO: 35095 - DNA, 75 bp, synthetic construct
  source 1..75: mol_type = other DNA
tgacagtgtgtaccgggtgaaacgtcagcgtgatctgaacggggcgcggcgctttctgctgctggagtgtacgga

SEQ ID NO: 35096 - DNA, 75 bp, synthetic construct
  source 1..75: mol_type = other DNA
tctcgcttgaccctaccgcaggtcatgagcagcagggaacgcggccggtactgattgtcacgccggctgctttta

SEQ ID NO: 35097 - DNA, 75 bp, synthetic construct
  source 1..75: mol_type = other DNA
tggcaagagtggtgttatggctacgccaatggctgtgagtcagcactttattgcctggaaatgtgataataaaga

SEQ ID NO: 35098 - DNA, 75 bp, synthetic construct
  source 1..75: mol_type = other DNA
cacttttgagattgctcgtctgatgcgcaagcacactgacgtaattgcgatgaccaacggtatgaacgtggctaa

SEQ ID NO: 35099 - DNA, 75 bp, synthetic construct
  source 1..75: mol_type = other DNA
catgcgactgacggcggttttttcctgcgtcagagtgctggcagagtcggtcgggatgttgccctgcaatctgta

SEQ ID NO: 35100 - DNA, 75 bp, synthetic construct
  source 1..75: mol_type = other DNA
ggttgctacaccagactgatgtccgaactccatcgtgtggattttgacccggcgcaggatttactgatatcggtc

SEQ ID NO: 35101 - DNA, 75 bp, synthetic construct
  source 1..75: mol_type = other DNA
actcgctgtcacaccagactaatgacgacggcgaaacagaatggattcattttacaggcagcggctatctgttac

SEQ ID NO: 35102 - DNA, 75 bp, synthetic construct
  source 1..75: mol_type = other DNA
tgtcggttcagcggcgcttcccggagctggagaaccgacatattgatttcctcaagaaggacatcattaaggcca

SEQ ID NO: 35103 - DNA, 75 bp, synthetic construct
  source 1..75: mol_type = other DNA
ccgtcagtctctggaaccccaccgctctgggacaattccagtacatctctactatcagagggcggatgcacgcgc

SEQ ID NO: 35104 - DNA, 75 bp, synthetic construct
  source 1..75: mol_type = other DNA
cccaccatacagcgacactaaaacattcctcgtaaaagcgtctgaagcagatttagcggtattcctgataccgta

SEQ ID NO: 35105 - DNA, 75 bp, synthetic construct
  source 1..75: mol_type = other DNA
atcaaggtgcaactacgtgaatatggacgttcagtgaaccatgaatgtactttcgtgtttaaccctcaagtggtt

SEQ ID NO: 35106 - DNA, 75 bp, synthetic construct
  source 1..75: mol_type = other DNA
ggcggcaactggcagcaccagaacgcccgtcgggaccaacaccaattgagttgctgaaacaggaatatgaacgcc

SEQ ID NO: 35107 - DNA, 75 bp, synthetic construct
  source 1..75: mol_type = other DNA
gaacacattgatgctggagtatcgctgtgcgatgcggtgaactttcttgttgaaaaatatgaactggtaagaatt

SEQ ID NO: 35108 - DNA, 75 bp, synthetic construct
  source 1..75: mol_type = other DNA
acctaatatcgcctcaacgggaaaaatgaacggcttttcatttcagtaccaaggtattgcctttaaagcctctca

SEQ ID NO: 35109 - DNA, 75 bp, synthetic construct
  source 1..75: mol_type = other DNA
gatagcaccaagcatcttcgccaggatgtcgcaaaaccagtttggcacaactcgcttcgcttacctgatggtgaa

SEQ ID NO: 35110 - DNA, 75 bp, synthetic construct
  source 1..75: mol_type = other DNA
gttaatgactatactcttaatattcttggccaaaatgtttcaagagtcacaacggggaaaaaaccgtatgattta

SEQ ID NO: 35111 - DNA, 75 bp, synthetic construct
  source 1..75: mol_type = other DNA
ttgattttattaatctatataatgaaataaggaagaaatacaacaacaacccatcgggacaacaagagtacttaa

SEQ ID NO: 35112 - DNA, 75 bp, synthetic construct
  source 1..75: mol_type = other DNA
tggaacaatacggaaagagatgcaaacagcaatggggtttattgatggctgcttgtcatttttcatttactacaa

SEQ ID NO: 35113 - DNA, 75 bp, synthetic construct
  source 1..75: mol_type = other DNA
atgagcgaatatttcagaatacttcaggggctgccggacggctcctttacccgcgaacaggcggaagccgttgcc

SEQ ID NO: 35114 - DNA, 75 bp, synthetic construct
  source 1..75: mol_type = other DNA
gagggcgggattcgcacaacctgaataaattcacctggcgttttatcgccctgagcgccgcaaaaccgcgtgtga

SEQ ID NO: 35115 - DNA, 75 bp, synthetic construct
  source 1..75: mol_type = other DNA
gcagtggacatttcaggtcggggatcttgaaaacgtcaatatcactcactgggcagtaataccaaaggcaccgga

SEQ ID NO: 35116 - DNA, 75 bp, synthetic construct
  source 1..75: mol_type = other DNA
tgaatattgccgcgtacctgtcccaaaaaagccagatgcggcgctatgcctcaagattgagcgtgtacgccgcaa

SEQ ID NO: 35117 - DNA, 75 bp, synthetic construct
  source 1..75: mol_type = other DNA
cgatcaaaaaggggcgcacggttgtagccctgcattttcgcttcaaggaagacaaacagatcaagatgacgatct

SEQ ID NO: 35118 - DNA, 75 bp, synthetic construct
  source 1..75: mol_type = other DNA
ctgcatgttgataccagtggtggcaatacgaagtggatactggatggttttaaagcggaggctgataaagccgct

SEQ ID NO: 35119 - DNA, 75 bp, synthetic construct
  source 1..75: mol_type = other DNA
cgcctccgggtatgcgggttatggaaacgcgatccagcggtatcgacgtgaatcacgacgttggctacacccgat

SEQ ID NO: 35120 - DNA, 75 bp, synthetic construct
  source 1..75: mol_type = other DNA
aaactaacgccttctatccgttggctttgaaattacattatgaatccgtggggttatggccagaaaaaggcgtgg

SEQ ID NO: 35121 - DNA, 75 bp, synthetic construct
  source 1..75: mol_type = other DNA
cattaactctgcgcagtggggcgcgggtgcttatgatgcttatgggacgggaataccggcgcggggatacacacc

SEQ ID NO: 35122 - DNA, 75 bp, synthetic construct
  source 1..75: mol_type = other DNA
ggagcgctggatcaactggcgtcgtcgccgtaccgcggcagtggcggtgatcaccggtgtgaactacggaactgc

SEQ ID NO: 35123 - DNA, 75 bp, synthetic construct
  source 1..75: mol_type = other DNA
cacgcgatatggcctggatcgacgtaacaccgccgagtatgagcattctggaaaacgacggtgaacccattattc

SEQ ID NO: 35124 - DNA, 75 bp, synthetic construct
  source 1..75: mol_type = other DNA
ccaccaaaagcccccgcttacctggatgaaatcgcggtcaggcagtggaaggaaaaatcgcgccagctttccgga

SEQ ID NO: 35125 - DNA, 75 bp, synthetic construct
  source 1..75: mol_type = other DNA
catagtatttgcgccaaaataccgaagacaggtgttctacagagagaagcgtagagcaataggcagtattttgag

SEQ ID NO: 35126 - DNA, 75 bp, synthetic construct
  source 1..75: mol_type = other DNA
atgagtatatttatctcatggcttgttctgattatttcggtggcctgcgccattgggattatgcgaattattcat

SEQ ID NO: 35127 - DNA, 75 bp, synthetic construct
  source 1..75: mol_type = other DNA
gattattctgtcgattttcctcgcctgattcaggcaaaacgtaaagagtgggagcagattgcaggcatgcctgta

SEQ ID NO: 35128 - DNA, 75 bp, synthetic construct
  source 1..75: mol_type = other DNA
atgagcgagattaactatcaggtactgcgtgaaaaggcagaaaaagcaacgcgtggtgagtggtcgctcgaatat

SEQ ID NO: 35129 - DNA, 75 bp, synthetic construct
  source 1..75: mol_type = other DNA
ctgtacggtgaaatgcgcgtgggatcacgtgtggtatctcaggagatcagcacagcagatgaaggtgatggtggt

SEQ ID NO: 35130 - DNA, 75 bp, synthetic construct
  source 1..75: mol_type = other DNA
cctggcaaaaggacgtccggcgctgcctcagaagccattgcccgacgtgctgggctggaaatattcaggcaatcg

SEQ ID NO: 35131 - DNA, 75 bp, synthetic construct
  source 1..75: mol_type = other DNA
tgggatggctggttcagacatcaggatatggctgagggttacctggtgatgaagtctcttgatcaggagatctga

SEQ ID NO: 35132 - DNA, 75 bp, synthetic construct
  source 1..75: mol_type = other DNA
gatcgctggcatacaggtatgatggctggctatggtcataataataacagtacgaatgccctgagcaccggatac

SEQ ID NO: 35133 - DNA, 75 bp, synthetic construct
  source 1..75: mol_type = other DNA
aggcagaggtgacacgacaggctgatgtgacgcgcatactgccgctgattaacgagctggaggcgctgccaggac

SEQ ID NO: 35134 - DNA, 75 bp, synthetic construct
  source 1..75: mol_type = other DNA
ttggtcgtcgagcggcgttgcgtgaaattgaagatgtgaaacacgatacgcgtgaagcggaagatgtgctggatg

SEQ ID NO: 35135 - DNA, 75 bp, synthetic construct
  source 1..75: mol_type = other DNA
cgtgaagcggaagatgtgctggatgtggcggtggccattgcggaggcagacggcgaaattgagccggaagagcgc

SEQ ID NO: 35136 - DNA, 75 bp, synthetic construct
  source 1..75: mol_type = other DNA
aatgcctaataatgttgggggatttggggatgtagaaaaagctagtaaggtatttgtgaaaaatgaattattacc

SEQ ID NO: 35137 - DNA, 75 bp, synthetic construct
  source 1..75: mol_type = other DNA
gagatttacggcctgcccgaatatctcagcgcgctaaattccgcctggctgaatgaatccgcgacgctgttccgc

SEQ ID NO: 35138 - DNA, 75 bp, synthetic construct
  source 1..75: mol_type = other DNA
tttgtgcaggactatctggtatttggtaatgcctacctggagaaacgcacgaaccgcttcggtgaagttatcgcc

SEQ ID NO: 35139 - DNA, 75 bp, synthetic construct
  source 1..75: mol_type = other DNA
cgacaggtgtgtcaagtcttgtcgatggggataatacaatccattttactgctctggttaagaaagacacaagtg

SEQ ID NO: 35140 - DNA, 75 bp, synthetic construct
  source 1..75: mol_type = other DNA
tggatgagaaccccttctccggtcacctgtttatctttcgcggccgacggggtgacacgattaaaattctgtggg

SEQ ID NO: 35141 - DNA, 75 bp, synthetic construct
  source 1..75: mol_type = other DNA
gcggtggcgtactgccgctatgccgatgattttgtcctcatcgtcaaaggcaccaaagcacaggcggaagccatc

SEQ ID NO: 35142 - DNA, 75 bp, synthetic construct
  source 1..75: mol_type = other DNA
cgatatgcgtaaatccttcaacggtctgggagaacaggtacaacatgtgctggatgagacccccttctcaggtca

SEQ ID NO: 35143 - DNA, 75 bp, synthetic construct
  source 1..75: mol_type = other DNA
atgcagcatttctcagaaatcagctgatcagtctattgattttggacagctttcaaaaagcttccttcaagcagg

SEQ ID NO: 35144 - DNA, 75 bp, synthetic construct
  source 1..75: mol_type = other DNA
cctgttcatcttccgtggccgacggggtgacacgattaaaatcctgtgggctgatgctgatggtctgtgcctgtt

SEQ ID NO: 35145 - DNA, 75 bp, synthetic construct
  source 1..75: mol_type = other DNA
agtacggtctgaccatgccgggtaaacaccgccgcaccccgccgtacatgttcaccgaggaggtggcgctcgcgg

SEQ ID NO: 35146 - DNA, 75 bp, synthetic construct
  source 1..75: mol_type = other DNA
atgactacccgcccctctcttctggaagaccagtttgttgacatggcatttattacgaatctgaccggactcacg

SEQ ID NO: 35147 - DNA, 75 bp, synthetic construct
  source 1..75: mol_type = other DNA
gctggcagacagtgccggagcatcacgccccgctctggcagcaggtcagtcaggtggaacatcgaccactgagtg

SEQ ID NO: 35148 - DNA, 75 bp, synthetic construct
  source 1..75: mol_type = other DNA
atcatgaggttgacttcctgctgccagcacagaggtttaacattcagttttcctatgtttcccagaaggggctgc

SEQ ID NO: 35149 - DNA, 75 bp, synthetic construct
  source 1..75: mol_type = other DNA
gttggtcagcagcgactcaacctgacgatccctcaggcatttatgagtaatcgcgcgcgtggttatattcctcct

SEQ ID NO: 35150 - DNA, 75 bp, synthetic construct
  source 1..75: mol_type = other DNA
gagttatgggatcccggtattaatgccggattgctcaattataatttcagcggaaatagtgtacagaatcggatt

SEQ ID NO: 35151 - DNA, 75 bp, synthetic construct
  source 1..75: mol_type = other DNA
tgataaagcaaatgcgccagcagggcgcgtacattgtcgatattgcgactcagattggttgctctgaacgaacgg

SEQ ID NO: 35152 - DNA, 75 bp, synthetic construct
  source 1..75: mol_type = other DNA
taacgggaatacctactgcgcctaccgctgcacagggtacgaataacacgcagattgctacgaccgcttatgtaa

SEQ ID NO: 35153 - DNA, 75 bp, synthetic construct
  source 1..75: mol_type = other DNA
attcatgcggctgaatttgttaccagaacctataccgattcatatcagttaggagatggggagctgcttgtttgt

SEQ ID NO: 35154 - DNA, 75 bp, synthetic construct
  source 1..75: mol_type = other DNA
ttgtggctggtgtctgtgcggcattgctggcggtcagcgtggccattccgggatggcagtttctgacacagccat

SEQ ID NO: 35155 - DNA, 75 bp, synthetic construct
  source 1..75: mol_type = other DNA
accgccagccagaaagacccgccacaaaatggttaagctgaaaccgtttatggattacatcgacatgcgcctggc

SEQ ID NO: 35156 - DNA, 75 bp, synthetic construct
  source 1..75: mol_type = other DNA
tattgggcttgtttggcacgctcactggcgttcaggcagctcctgacgtgaccagtgaaattacgtatgatttgg

SEQ ID NO: 35157 - DNA, 75 bp, synthetic construct
  source 1..75: mol_type = other DNA
catcatccgtaaccatctggctagtgtggagattactgatgtgatgcgccttacccgtgctgtgaaaaactgctg

SEQ ID NO: 35158 - DNA, 75 bp, synthetic construct
  source 1..75: mol_type = other DNA
atgtttaaatcagacgtaattaatttttacggtacgaaagccaaagtagcgaaagctgctggcgttgacccatct

SEQ ID NO: 35159 - DNA, 75 bp, synthetic construct
  source 1..75: mol_type = other DNA
aaacaggtgcacattatgggggcgtactttatgtggattccctgagcgcagcaaatggcccggttcccacctacc

SEQ ID NO: 35160 - DNA, 75 bp, synthetic construct
  source 1..75: mol_type = other DNA
tgacaacaaatgcgaaattgtgataaaattgagtcaggcaaattatgatgaactcaaaagatatagagacagcta

SEQ ID NO: 35161 - DNA, 75 bp, synthetic construct
  source 1..75: mol_type = other DNA
acaaggacttcttcgctaacgccaaagcccagagctggtggcggttacgtaaactttttcagaatacctggcgcg

SEQ ID NO: 35162 - DNA, 75 bp, synthetic construct
  source 1..75: mol_type = other DNA
gtcgcaaattgcgctggtggcgattccgattgcgattctggttaacgtggcgatgttactgacccgtatgacgcg

SEQ ID NO: 35163 - DNA, 75 bp, synthetic construct
  source 1..75: mol_type = other DNA
taatcctgttaagcacctttatcacaggactgacagctattcatggcgcttatgctgctgaaaagtttaaggtca

SEQ ID NO: 35164 - DNA, 75 bp, synthetic construct
  source 1..75: mol_type = other DNA
atgcctacaaagcgtgaggcctgggccggatgtctgaccctgccgagggaactttttgaacgccatggtcgtctg

SEQ ID NO: 35165 - DNA, 75 bp, synthetic construct
  source 1..75: mol_type = other DNA
actaggttggaatcataaaattacccttcacaagggtcttgaaaatacatacaactggtttcttgaaaaccaact

SEQ ID NO: 35166 - DNA, 75 bp, synthetic construct
  source 1..75: mol_type = other DNA
ctgtggggaggcgcagtatctgaaatttggcgatgagtccacgccttttggccttaaatgggagaaggacagccc

SEQ ID NO: 35167 - DNA, 75 bp, synthetic construct
  source 1..75: mol_type = other DNA
accatgcccaaaaagcgcaaccagcgtggtgtgtttttgtgtgaggtgggctccgataccgtcaaggaaatgctg

SEQ ID NO: 35168 - DNA, 75 bp, synthetic construct
  source 1..75: mol_type = other DNA
tggaacaaaaaggggctgtattcaatacagacccctggtggaatacaagaactatccatcgtttcagaatcaggt

SEQ ID NO: 35169 - DNA, 75 bp, synthetic construct
  source 1..75: mol_type = other DNA
tgtgcagcgtgtggagctggcttcgccgctggcggatgtggttttgaacaaaacgcaggcggcatcatgtacgga

SEQ ID NO: 35170 - DNA, 75 bp, synthetic construct
  source 1..75: mol_type = other DNA
gatgacccgctctttgccttcgagaactacacccgtacagcgcaggtactgatggacacgatggcagaagcacac

SEQ ID NO: 35171 - DNA, 75 bp, synthetic construct
  source 1..75: mol_type = other DNA
tttatctggcctgcggtacgtgacggcaaagtatccattacccgttcgcaactggtaatgctcctcgataagctg

SEQ ID NO: 35172 - DNA, 75 bp, synthetic construct
  source 1..75: mol_type = other DNA
cttcaacccagtcgatgcagcgaaaactcggcaaacactggcaacagttgcataacttcgtctatcttgtcgcga

SEQ ID NO: 35173 - DNA, 75 bp, synthetic construct
  source 1..75: mol_type = other DNA
gcactgaaatttttgcttgcggccttgttaatcacacctctggcacgctacgcaaaacagccgttattgatacgc

SEQ ID NO: 35174 - DNA, 75 bp, synthetic construct
  source 1..75: mol_type = other DNA
ggcctgactttactggctgggacacggtgctgaacgccgaagcaatggcatatgccaccgcccgtgcgcttggtc

SEQ ID NO: 35175 - DNA, 75 bp, synthetic construct
  source 1..75: mol_type = other DNA
cgcggttatgaaggtgcagcagtcggagctgctcttggaggtggaatcacagcgtacaataccgggtcggcaggt

SEQ ID NO: 35176 - DNA, 75 bp, synthetic construct
  source 1..75: mol_type = other DNA
gggcttgagacactggcttttaacgacggcacgccgtttgccgatgaagtgacactgagctggatacagcagcag

SEQ ID NO: 35177 - DNA, 75 bp, synthetic construct
  source 1..75: mol_type = other DNA
aatcgctcgcagaggacccggaaaccctcagtatcagctgtgaggtaacgttccggcacgggacgctccgcttca

SEQ ID NO: 35178 - DNA, 75 bp, synthetic construct
  source 1..75: mol_type = other DNA
ttggtggtgattgctggctggacgagtcggtgaatgacaaagacactctgaaagccgggaaactcactatcgact

SEQ ID NO: 35179 - DNA, 75 bp, synthetic construct
  source 1..75: mol_type = other DNA
cctacttaccttactttataccgtcgtcaatatcccttactgcgcattgggtggtgtaatcaccaatgacccgac

SEQ ID NO: 35180 - DNA, 75 bp, synthetic construct
  source 1..75: mol_type = other DNA
tttaccggcagtggctatctgttacgtaccgatgcgtggtcgtacccggttctgcggcttaaacgcctgggggtg

SEQ ID NO: 35181 - DNA, 75 bp, synthetic construct
  source 1..75: mol_type = other DNA
cgcccgcttctggcacagagcggactgtcagattagattcagacctgtactcattagctgatacaaatcagccac

SEQ ID NO: 35182 - DNA, 75 bp, synthetic construct
  source 1..75: mol_type = other DNA
catacgctgcagtaccgcacatatcacggaaacggacaatgcctggctgtactcgctgtcacaccagaccagtga

SEQ ID NO: 35183 - DNA, 75 bp, synthetic construct
  source 1..75: mol_type = other DNA
gaacatggggcgcattgtcgttgacgtcgatggtattgagcttgctgaactgattaacgtggtctgcgataacgc

SEQ ID NO: 35184 - DNA, 75 bp, synthetic construct
  source 1..75: mol_type = other DNA
gtcgatggtgttaatcttgctgaactgattaacgtggcctgcgacaatggctactcccttcgtgttgttgatgaa

SEQ ID NO: 35185 - DNA, 75 bp, synthetic construct
  source 1..75: mol_type = other DNA
cagaacattcgcgaaaaaacggaggcggtattccgtctgttccggcccgtacatccggttgttgccgtatcggcc

SEQ ID NO: 35186 - DNA, 75 bp, synthetic construct
  source 1..75: mol_type = other DNA
acatgaccagaacagtgcacaggcactgcttgcaaacagaattaataataaagggtatctgtatcatggcaagtt

SEQ ID NO: 35187 - DNA, 75 bp, synthetic construct
  source 1..75: mol_type = other DNA
attcttcggcaagaccaggctggaaacggtacagaaaatcagcggtgaagttgaagaaaaaatggcgctggtggg

SEQ ID NO: 35188 - DNA, 75 bp, synthetic construct
  source 1..75: mol_type = other DNA
cattggttatggacggctcagcgaatatgtccggtacatttactcaggaaaacggtcgtctgaccattcagggcc

SEQ ID NO: 35189 - DNA, 75 bp, synthetic construct
  source 1..75: mol_type = other DNA
atcactgacctgcccggggtgggcgagagccgggacagggatgcagagtatgaagccctgtaccgtgacattctg

SEQ ID NO: 35190 - DNA, 75 bp, synthetic construct
  source 1..75: mol_type = other DNA
ctcttcttcgtgattttgataatccgccctttaaaaaagtgccggcttactggtttcatccaggactgacttatc

SEQ ID NO: 35191 - DNA, 75 bp, synthetic construct
  source 1..75: mol_type = other DNA
ctcattcatctggatgccagcgctgaatatctgccgggcctgcccactttcgactggtcaccaggaacaacatga

SEQ ID NO: 35192 - DNA, 75 bp, synthetic construct
  source 1..75: mol_type = other DNA
tcggatgtcttcgctgcggatgcagacctcgctgctgcgctggcctgttcagcggcttcgccagccttcgttgtg

SEQ ID NO: 35193 - DNA, 75 bp, synthetic construct
  source 1..75: mol_type = other DNA
gtgtttcatacgatagtgtccattaaaaatgatggacattatttttgtagagccggaggaaacagaccagacggt

SEQ ID NO: 35194 - DNA, 75 bp, synthetic construct
  source 1..75: mol_type = other DNA
gccgccgaactggcggacgatgccgctgccgtttttgaggattctgcacgggtttccgacgctttcgcgttcgtt

SEQ ID NO: 35195 - DNA, 75 bp, synthetic construct
  source 1..75: mol_type = other DNA
cgggctgaggtggcagcttctgacgcctttgtggtcgctgcggatgcagaagtggctgcagatttttgtgacgct

SEQ ID NO: 35196 - DNA, 75 bp, synthetic construct
  source 1..75: mol_type = other DNA
ggcactggctgaggcctgcccggcacttgttgacgcggcactggcagataatgcagccgctgtttttgaacctgc

SEQ ID NO: 35197 - DNA, 75 bp, synthetic construct
  source 1..75: mol_type = other DNA
tccttgccttacccaaagggaccacaacacctgtcattcgtaaactggagatagaagggccggatattcttttag

SEQ ID NO: 35198 - DNA, 75 bp, synthetic construct
  source 1..75: mol_type = other DNA
gccacagagcgccattgtcaccgggcctgcgggagaggaaatcttctgtgatgaacatggccgggtacgggtgaa

SEQ ID NO: 35199 - DNA, 75 bp, synthetic construct
  source 1..75: mol_type = other DNA
taaccggggctatatggagttgaatcgcatgtggctacacgacgacatgccccgcaactctgaatcacgggccat

SEQ ID NO: 35200 - DNA, 75 bp, synthetic construct
  source 1..75: mol_type = other DNA
gttccactgggaccgttatcacgggatgacggaggcgagttcatgctgggtgcgggtatcgcaggcgtgggcggg

SEQ ID NO: 35201 - DNA, 75 bp, synthetic construct
  source 1..75: mol_type = other DNA
cgttggggcttacattctttcttaccgggtgtgaagaggttaaatctgtagactggtggcagtctcacgtagacg

SEQ ID NO: 35202 - DNA, 75 bp, synthetic construct
  source 1..75: mol_type = other DNA
cccgcgaacgagaagggttgtctccgcgtgatggtggtgatgagttcagccaggcatggaaacaggaagtaaaaa

SEQ ID NO: 35203 - DNA, 75 bp, synthetic construct
  source 1..75: mol_type = other DNA
gcatttttgaatcagtgctcaacggctgatccggctgctatctcaaaaattatgagtaagttcggtaagattaag

SEQ ID NO: 35204 - DNA, 75 bp, synthetic construct
  source 1..75: mol_type = other DNA
gacacagccctcaaaccatgccagcgccgatctactgccggccatagtagtctccccaccatggctttcgaaaaa

SEQ ID NO: 35205 - DNA, 75 bp, synthetic construct
  source 1..75: mol_type = other DNA
tggaagcaaaagtacagcaggcgattgataccatcactctgttgcagatggaaatcgaagagctgaaagaaaaaa

SEQ ID NO: 35206 - DNA, 75 bp, synthetic construct
  source 1..75: mol_type = other DNA
agaacaactcaataaagacgataagcccttgttgcatagtgatcaggggtggcaatatcagatgcctcgttggca

SEQ ID NO: 35207 - DNA, 75 bp, synthetic construct
  source 1..75: mol_type = other DNA
ggtgatgcttctgcggttgcccggcacaccaccacagcccacaccggagcgcaagagcgtcagcctgaagcggga

SEQ ID NO: 35208 - DNA, 75 bp, synthetic construct
  source 1..75: mol_type = other DNA
acaagcaggtcgagacatttcgctacaacgaggcgggagtgcacaagatcgaggaactcatcgaaggagaacgaa

SEQ ID NO: 35209 - DNA, 75 bp, synthetic construct
  source 1..75: mol_type = other DNA
ctgggcaagcaaacctaaatcaaacgatagagaaacaaatgaatatgtgtatgacatggcgacatttgaaggaat

SEQ ID NO: 35210 - DNA, 75 bp, synthetic construct
  source 1..75: mol_type = other DNA
atggctgacacctgccgggatacggtcgtcctgctggaaaaaaacctcacccgggtgatgcgcctgaaaaaacgt

SEQ ID NO: 35211 - DNA, 75 bp, synthetic construct
  source 1..75: mol_type = other DNA
atgaaatcattaaccacggaaacagcgctggatatcctcattgcgtggctgcaggacaatattgactgcgaatcg

SEQ ID NO: 35212 - DNA, 75 bp, synthetic construct
  source 1..75: mol_type = other DNA
gtagccaaccatgctggtttctcgctacacgccggtgtgatggccgaagcgcatcagcgggataagcttgagcgc

SEQ ID NO: 35213 - DNA, 75 bp, synthetic construct
  source 1..75: mol_type = other DNA
gtaccagaaaaattgcaggtaagacactggaacgcctgaagaagttgatctggctggcggcacaggatgtgaaga

SEQ ID NO: 35214 - DNA, 75 bp, synthetic construct
  source 1..75: mol_type = other DNA
ttttgctggctcgccatccccagctgatgggccaggtcttgagtatcgtctatcgtacactctcaactcatctga

SEQ ID NO: 35215 - DNA, 75 bp, synthetic construct
  source 1..75: mol_type = other DNA
tcgcagttcgcctggacacaggttccggtgttcggcgcggtgattgtcgcgaatgccatcgtggcgcgtttcgtt

SEQ ID NO: 35216 - DNA, 75 bp, synthetic construct
  source 1..75: mol_type = other DNA
gttacgaaatggatccccagctcctgacacactttaaccagcatctggattcattattcggggtatattcgaaac

SEQ ID NO: 35217 - DNA, 75 bp, synthetic construct
  source 1..75: mol_type = other DNA
tcattattcggggtatattcgaaactgttaccgttcagaatggattttgcttaccgaaaaaacaccctcagctac

SEQ ID NO: 35218 - DNA, 75 bp, synthetic construct
  source 1..75: mol_type = other DNA
gaacgtatcggaacagaactggggatggaccaggatgaagttctgaggttaaagcagattagcgggctaacggag

SEQ ID NO: 35219 - DNA, 75 bp, synthetic construct
  source 1..75: mol_type = other DNA
cagagaagaagaaaaacaccgggaaagagatgtttgtgggggttacccgggtactgagtgataatgaatcaaagg

SEQ ID NO: 35220 - DNA, 75 bp, synthetic construct
  source 1..75: mol_type = other DNA
tttctgtccacgctgaataaaatggcagaaaagaagaaaaacaccgggaaagagatgtttgtgggggttacacgg

SEQ ID NO: 35221 - DNA, 75 bp, synthetic construct
  source 1..75: mol_type = other DNA
aacactataacacgtttgataatatatcaaagatttactctaatgaatttccagaaggtaaggttttagatttat

SEQ ID NO: 35222 - DNA, 75 bp, synthetic construct
  source 1..75: mol_type = other DNA
cacagtttccgataattccatgcaatgagagttgtgtcgttgtgggaagggttatcgccagtcaatggcctgaag

SEQ ID NO: 35223 - DNA, 75 bp, synthetic construct
  source 1..75: mol_type = other DNA
tttggttgaccctgaacaggctgttgaaccaggtgatttctgcatagctcgacttggcggtgatgaatttacatt

SEQ ID NO: 35224 - DNA, 75 bp, synthetic construct
  source 1..75: mol_type = other DNA
gtgaagtatggactacgcaacctgaaagaaggggcgaagttccgtaaaggtattgagaagctgttaagcgaataa

SEQ ID NO: 35225 - DNA, 75 bp, synthetic construct
  source 1..75: mol_type = other DNA
ctgagtacaggcaatggcatctggccatccgtctgtgaccggaacggttacgcatacggctgtccggaatttcag

SEQ ID NO: 35226 - DNA, 75 bp, synthetic construct
  source 1..75: mol_type = other DNA
gcgctggccgaagaccaccagagagcgactgagtcaattaagcaggctgattcggctgttaagttggcgcacgag

SEQ ID NO: 35227 - DNA, 75 bp, synthetic construct
  source 1..75: mol_type = other DNA
ataaaggagcttctcgacacaataaaaatcaatgatttacacaaaagcgagcgcaagctcgttatacgctcagcc

SEQ ID NO: 35228 - DNA, 75 bp, synthetic construct
  source 1..75: mol_type = other DNA
aggccatggctctggcggaggctcaggataaagcggctgctgcgttttatcgtcagattgacagtgtgaaacagg

SEQ ID NO: 35229 - DNA, 75 bp, synthetic construct
  source 1..75: mol_type = other DNA
gcagtccaggccgtttaccgtaaagcatatttcagcggtggcgggtcttccgacgattctgtcattgttcattaa

SEQ ID NO: 35230 - DNA, 75 bp, synthetic construct
  source 1..75: mol_type = other DNA
tgaacttcaaatcttttaccgcctcgctcctttctgatctggcaaaaatcatggctcagatgtccatgatgcagg

SEQ ID NO: 35231 - DNA, 75 bp, synthetic construct
  source 1..75: mol_type = other DNA
ttaatcaggtattccgtgaaagcggtatgccggaaacagaagaagagatcgccaccctctttcatgaggatgtac

SEQ ID NO: 35232 - DNA, 75 bp, synthetic construct
  source 1..75: mol_type = other DNA
atgtttactgaagaagaaaaaatccgcgccattgagctttatttcaaatatggtaagaagctggctcccgtcgta

SEQ ID NO: 35233 - DNA, 75 bp, synthetic construct
  source 1..75: mol_type = other DNA
aaggcgtcgacaaggagctatataccgcagaaaacctatcgtgactctcgttggcaagagcgagatgagttattt

SEQ ID NO: 35234 - DNA, 75 bp, synthetic construct
  source 1..75: mol_type = other DNA
accccggcttctggcctgcggtatccgggacgtgttactggaagacgtggcgcagcggaatatcccgctctcgca

SEQ ID NO: 35235 - DNA, 75 bp, synthetic construct
  source 1..75: mol_type = other DNA
agcgatataagtgcagaattcgaaaaccttggtataaggttccctctgtatttagcacaaaattagctatgctta

SEQ ID NO: 35236 - DNA, 75 bp, synthetic construct
  source 1..75: mol_type = other DNA
gccgtgaataccctgaagccctggtggccgggattatttgacggtgacacgccccggcttctggcctgcggtatc

SEQ ID NO: 35237 - DNA, 75 bp, synthetic construct
  source 1..75: mol_type = other DNA
cacccgatccattaccacggtgagcactgccatcgtgggtatggtatgcacgggcgatgatgccgatgcaaaaat

SEQ ID NO: 35238 - DNA, 75 bp, synthetic construct
  source 1..75: mol_type = other DNA
cgtctggaagaacgccgggcaagagcagaggcaatggctgcccgccttgatagccttgcgtgccatatcacatcc

SEQ ID NO: 35239 - DNA, 75 bp, synthetic construct
  source 1..75: mol_type = other DNA
atgactgaacgcatagaatttgttttgccttacccgccgacggtgaacacctactggcgacgtcgtggcagcaca

SEQ ID NO: 35240 - DNA, 75 bp, synthetic construct
  source 1..75: mol_type = other DNA
acggctatcagtcatcagaagtccgcacttcacacgccggcacagcaggccattcatctggcccttccggtggtg

SEQ ID NO: 35241 - DNA, 75 bp, synthetic construct
  source 1..75: mol_type = other DNA
cgatgtgctggagccgaaaccggaccgggaggtcatgaatgcgcagcggctgttcagtacggcacgggaactgcg

SEQ ID NO: 35242 - DNA, 75 bp, synthetic construct
  source 1..75: mol_type = other DNA
ggaaacgggctgcggggattcagtggtgaaggacgggtgaaaggcagcggggatgcgcagttcgtggccctgcag

SEQ ID NO: 35243 - DNA, 75 bp, synthetic construct
  source 1..75: mol_type = other DNA
gaaaaatgccactgaaacgcaatggcttaaagattctccctcacagccattgcaacagtcactgaaagaccttga

SEQ ID NO: 35244 - DNA, 75 bp, synthetic construct
  source 1..75: mol_type = other DNA
gcgggcttacaaaaacttcttccagaagcgggctgcttttccccgattcaaaaagcggggacagaatgatgcatt

SEQ ID NO: 35245 - DNA, 75 bp, synthetic construct
  source 1..75: mol_type = other DNA
tgtgcaggtgtacaccgataaccgtcagggctggacggatgccattaacaatgccgtacagaaaggaactgccca

SEQ ID NO: 35246 - DNA, 75 bp, synthetic construct
  source 1..75: mol_type = other DNA
gtttgatgaaatcaatattgtgcgcggtcagctcgtttctggtgggcggctgggcgtgaagatttacaaaattga

SEQ ID NO: 35247 - DNA, 75 bp, synthetic construct
  source 1..75: mol_type = other DNA
gtttgatgaaatcaatattgtacgtggcaagccagtatctggtggacggctggagataaaaattacagaggtggg

SEQ ID NO: 35248 - DNA, 75 bp, synthetic construct
  source 1..75: mol_type = other DNA
taaaggatagcggtatagtccagagtatgtctcgccggggaaattgtcttgataatgcagttatagagagctttt

SEQ ID NO: 35249 - DNA, 75 bp, synthetic construct
  source 1..75: mol_type = other DNA
ttcatgtgctcgatgagctgtccgtccgggcactcagtcgtgacatcatgaaacagaaccgggtgaccgtacatc

SEQ ID NO: 35250 - DNA, 75 bp, synthetic construct
  source 1..75: mol_type = other DNA
atgaagcagcgtattacagtgacagttgacagcgacagctatcaattgctcaaggcatatgatgtcaatatctcc

SEQ ID NO: 35251 - DNA, 75 bp, synthetic construct
  source 1..75: mol_type = other DNA
tcgccataaatccgcgctggtcatgcagaagtacagccgtcagcaggcacgggaggcagagcagaaagcccgtgc

SEQ ID NO: 35252 - DNA, 75 bp, synthetic construct
  source 1..75: mol_type = other DNA
ctctggcaagacttccagcaggtgggcatttccgtcgcgcgcctgggggatatcctcaactacccgacagaggtg

SEQ ID NO: 35253 - DNA, 75 bp, synthetic construct
  source 1..75: mol_type = other DNA
aatgggcaatgtcgctgaggactggcaaatggctatgatccgctttattatcgggtttggtgaccgccttgacgg

SEQ ID NO: 35254 - DNA, 75 bp, synthetic construct
  source 1..75: mol_type = other DNA
tgatcggcgatttgcccatgagcaacggtcaaacgctggcgcaaatgtacccttccctgcaaacgatctacgatt

SEQ ID NO: 35255 - DNA, 75 bp, synthetic construct
  source 1..75: mol_type = other DNA
tatacgtggtttgcatgatgaactagtgtttccttctcccagaaagcagcagatcctttcagatatggtgttgac

SEQ ID NO: 35256 - DNA, 75 bp, synthetic construct
  source 1..75: mol_type = other DNA
ttgccggctcgggtaaaaccacgctgctgatacgtcggttaagagaggaccggcggacgctgatcctgaccttca

SEQ ID NO: 35257 - DNA, 75 bp, synthetic construct
  source 1..75: mol_type = other DNA
cacagactgtggtgaaacccggggacgctgggtgattgaaggcgacctgtccagttacttcgacaccgtacatca

SEQ ID NO: 35258 - DNA, 75 bp, synthetic construct
  source 1..75: mol_type = other DNA
atgtggagctgaaagggggcgataaaatcatcctctccaacggcgcagagctgcattttctcggtacttctgctg

SEQ ID NO: 35259 - DNA, 75 bp, synthetic construct
  source 1..75: mol_type = other DNA
ttcgatcaatacctgcatgagcgctacctgagcgggaaagccagaaaagatcggtggtactggaataacagtatc

SEQ ID NO: 35260 - DNA, 75 bp, synthetic construct
  source 1..75: mol_type = other DNA
atgacgtgcatcctggtgaaaatctggtgagcttcgacaaccccccccagcatcatccactctccatctacgact

SEQ ID NO: 35261 - DNA, 75 bp, synthetic construct
  source 1..75: mol_type = other DNA
cagcagcggtaaggaagatgagaaccgacagcaacaaggcatggaagggagcgttaaagcgggcaggcattagca

SEQ ID NO: 35262 - DNA, 75 bp, synthetic construct
  source 1..75: mol_type = other DNA
aaatccaaagcatgtaaggcagtggttatcgacgcttgagaattacgcgtttcctcaactgggagcaaaaacgct

SEQ ID NO: 35263 - DNA, 75 bp, synthetic construct
  source 1..75: mol_type = other DNA
cgcagcaaatgcggctgaaatttataataaaaatggcaataaagttgagctatacggcaagatggttggtgagcg

SEQ ID NO: 35264 - DNA, 75 bp, synthetic construct
  source 1..75: mol_type = other DNA
atgagtacgatcgctttcgtggtgggcatgaccactcgacggcggttgcttctgctgacgatgaaagggcaaaga

SEQ ID NO: 35265 - DNA, 75 bp, synthetic construct
  source 1..75: mol_type = other DNA
aggtgcaggtgtttgaagccgcctgccagtcaggatggggcggtaaaccggatgtgcgggttatccgcaacctga

SEQ ID NO: 35266 - DNA, 75 bp, synthetic construct
  source 1..75: mol_type = other DNA
ctgccttcttccccttcccggcgatgcagcagagcggctgttcccgtcggtgcggttccgtgtcagggagcgcag

SEQ ID NO: 35267 - DNA, 75 bp, synthetic construct
  source 1..75: mol_type = other DNA
atcagcctggaatgtaaacattcttcgctgaccagcgatgcgccgtcagggaaggaaggggccgcattcctgtcg

SEQ ID NO: 35268 - DNA, 75 bp, synthetic construct
  source 1..75: mol_type = other DNA
atgacagaagccgaactactgcgattaatccgtcgcgttgccggaatcagccagcaggctgacgaacaggccacg

SEQ ID NO: 35269 - DNA, 75 bp, synthetic construct
  source 1..75: mol_type = other DNA
actaccggcagttaagcctcctgctgccaaaaggaaacgatccggtatatcagaaagaagatatagccaaaaaat

SEQ ID NO: 35270 - DNA, 75 bp, synthetic construct
  source 1..75: mol_type = other DNA
ggtaagtaccacgtacctgcagtacgtgtcaccctggtctgtccgtactgcagccagcatttttcggcggacgtg

SEQ ID NO: 35271 - DNA, 75 bp, synthetic construct
  source 1..75: mol_type = other DNA
ctaaggatggggtgtgtgggaggtggaattctaggttttggtatagtcttgtttcgctttcttggcataaaagga

SEQ ID NO: 35272 - DNA, 75 bp, synthetic construct
  source 1..75: mol_type = other DNA
atgacagaagccgaaatactgcgattaatccgccgcgtctctggaatcagccagcaggctgacgaacagaccacg

SEQ ID NO: 35273 - DNA, 75 bp, synthetic construct
  source 1..75: mol_type = other DNA
gaatgtgagtacacgaaccagttcttattttgcagatcgtctaatccagagtcgggatgacaatgaattcctgac

SEQ ID NO: 35274 - DNA, 75 bp, synthetic construct
  source 1..75: mol_type = other DNA
cctggaagaaatcaggaagcaggaagagacattgcagaaactgaacgcgaagacatggggcgtggagtttgtgca

SEQ ID NO: 35275 - DNA, 75 bp, synthetic construct
  source 1..75: mol_type = other DNA
tattgctaccaacaccaccaatatcactaatttgacagatactgttggcgaccttaaagatgatgccctgctctg

SEQ ID NO: 35276 - DNA, 75 bp, synthetic construct
  source 1..75: mol_type = other DNA
ctcccttgccgatggtgaaaaaactattgcgttaggaaatacggctaaagcttacgaaattatgagcatcgccct

SEQ ID NO: 35277 - DNA, 75 bp, synthetic construct
  source 1..75: mol_type = other DNA
tgaaggtgtacgtggatgatctgatggcaaaacaccttgccgcaccagatccacattcacagtatgcgccaaaag

SEQ ID NO: 35278 - DNA, 75 bp, synthetic construct
  source 1..75: mol_type = other DNA
gcaaaacaccgcacacaaaaggcggtggatgagctggtggattgcgtggcggaactggaaggccaggtaagccag

SEQ ID NO: 35279 - DNA, 75 bp, synthetic construct
  source 1..75: mol_type = other DNA
gaatcgtacttcctgcaccggagaaattcggttctgagtcattgccggacaattttaatatggctgctgtcggtg

SEQ ID NO: 35280 - DNA, 75 bp, synthetic construct
  source 1..75: mol_type = other DNA
taagtggatgtttaaggacggggctgtagttaagcggatttatacggcagacgaacagcaacaacaggccaaatc

SEQ ID NO: 35281 - DNA, 75 bp, synthetic construct
  source 1..75: mol_type = other DNA
aatataccgttagaaatttggttaaaaataaagctatagcattggaattagctgagatatatgttaagaatcgtt

SEQ ID NO: 35282 - DNA, 75 bp, synthetic construct
  source 1..75: mol_type = other DNA
aacagacgaggaacgcacacgactggaagcatgggaacgctacagtgttctggtcagccgtgtggatacggcaaa

SEQ ID NO: 35283 - DNA, 75 bp, synthetic construct
  source 1..75: mol_type = other DNA
gaagcctgggaacgctacagcgttctggtcagccgcgtggatacggcaaagccagaatggccacaaaaaccagag

SEQ ID NO: 35284 - DNA, 75 bp, synthetic construct
  source 1..75: mol_type = other DNA
ccggaaatccaaaaacaaaagaacaatatcagctaacaaagaattttgatgttatctggttatggtccgaagacg

SEQ ID NO: 35285 - DNA, 75 bp, synthetic construct
  source 1..75: mol_type = other DNA
tcatttttaatgatgccacgactgcggcaattaagaatcagctttgtggtaaatggcgttcagttggtattatgt

SEQ ID NO: 35286 - DNA, 75 bp, synthetic construct
  source 1..75: mol_type = other DNA
atgaaggctgcgaagaggcttatcgtctctgggtggatgataccggtgagacggattttgacagcttccgcgatg

SEQ ID NO: 35287 - DNA, 75 bp, synthetic construct
  source 1..75: mol_type = other DNA
tacggtggtcatcccgcaaccggcaggcgacgagccggtgattaaaaacacgttcttttttcccgatatcgaccc

SEQ ID NO: 35288 - DNA, 75 bp, synthetic construct
  source 1..75: mol_type = other DNA
ccggtcaggaatggctggcggtggttggttattacccgaaattaagccagctcgtttccggcctgatgcatcacg

SEQ ID NO: 35289 - DNA, 75 bp, synthetic construct
  source 1..75: mol_type = other DNA
ctgctgtgcgtttggctgggtcaataaaggctcccggctgcgccgcttccgggaggtgtataccgaaatcccccg

SEQ ID NO: 35290 - DNA, 75 bp, synthetic construct
  source 1..75: mol_type = other DNA
atgatgacgctgattattccgcgaaaggaggctcccgtgtccggtgagggtacggtggtcatcccgcaaccggca

SEQ ID NO: 35291 - DNA, 75 bp, synthetic construct
  source 1..75: mol_type = other DNA
gaccagattgaatccgttcgtaaaggcatgggattcattgatgaagaccagcgtaattctatcggcaccttagcg

SEQ ID NO: 35292 - DNA, 75 bp, synthetic construct
  source 1..75: mol_type = other DNA
ttccgaaataaacaatatcacgctgcctgaactgaatgcgtgctacagccagaaactgataagatggcatgagca

SEQ ID NO: 35293 - DNA, 75 bp, synthetic construct
  source 1..75: mol_type = other DNA
gggtcgctgaaatggcgatggaagaagatttgtcgctgaatgcctttgtcaataaggcactggaaaaagaagtca

SEQ ID NO: 35294 - DNA, 75 bp, synthetic construct
  source 1..75: mol_type = other DNA
tgcgcgacggcctgctggtgcgccggacctgctgccagcgttatcgcttaccggatgtgcagcaatgtggcgatt

SEQ ID NO: 35295 - DNA, 75 bp, synthetic construct
  source 1..75: mol_type = other DNA
caatgaccatacgcgttaccacgccgagcacgtccagcggtggcggaattactaacgctcaattcacttatatta

SEQ ID NO: 35296 - DNA, 75 bp, synthetic construct
  source 1..75: mol_type = other DNA
cactttgtgctgtggctgcgcaggtactggttggtctttttaccggaaactgggcttacggggcgatagccggtt

SEQ ID NO: 35297 - DNA, 75 bp, synthetic construct
  source 1..75: mol_type = other DNA
ctgattcgccagcataccgtgacgccgattgcggtcggtgaagtgtttaacagtatctgggactgcaagcagtta

SEQ ID NO: 35298 - DNA, 75 bp, synthetic construct
  source 1..75: mol_type = other DNA
catttcattttcactaatgctggttgctcttaggctggatgatgttgtcttcgtcggggatgctggggtgagggg

SEQ ID NO: 35299 - DNA, 75 bp, synthetic construct
  source 1..75: mol_type = other DNA
tgaagtgaagacaatcacacatccgcacttcggtgataaaccggtaaaggtatacgcgataaaggtaaatatcgg

SEQ ID NO: 35300 - DNA, 75 bp, synthetic construct
  source 1..75: mol_type = other DNA
agctgtgttgactgaactcggtgctttgcaatctgctgaaaaaatgcctccttctgctactgattcggtgcagga

SEQ ID NO: 35301 - DNA, 75 bp, synthetic construct
  source 1..75: mol_type = other DNA
caccaacttgatcctcgcctgcctgtattgctgactgccattttgagcgaggagttttcagcagatcaggttgta

SEQ ID NO: 35302 - DNA, 75 bp, synthetic construct
  source 1..75: mol_type = other DNA
catttcattttcactaatgctggttgctctttttctttccatgggctggatgatgttatcttcgtcggggctgct

SEQ ID NO: 35303 - DNA, 75 bp, synthetic construct
  source 1..75: mol_type = other DNA
ctttactccggtgtgctcctgtttattctgtatttttgtttttctgccctgactggcctgcagaaagctgatgaa

SEQ ID NO: 35304 - DNA, 75 bp, synthetic construct
  source 1..75: mol_type = other DNA
tggcgacacgacctactactggaagcagacttattcttcgcaatacgatgcggtgtatggtgcatacaagacgaa

SEQ ID NO: 35305 - DNA, 75 bp, synthetic construct
  source 1..75: mol_type = other DNA
aactcataacgctggtgaagagcctctgtgtacttgtcggcatttcattttcactaatgctggttgctctttttc

SEQ ID NO: 35306 - DNA, 75 bp, synthetic construct
  source 1..75: mol_type = other DNA
tcagacgccgctgtggatgaggtcctgctcatcaacgaatacacctttaccgaagccggtctgcgcgccggctga

SEQ ID NO: 35307 - DNA, 75 bp, synthetic construct
  source 1..75: mol_type = other DNA
caactggaagatgtggtagagatgccgggctttaaaccgagccatgaagtgaaagcgatgctcgacgacgcggat

SEQ ID NO: 35308 - DNA, 75 bp, synthetic construct
  source 1..75: mol_type = other DNA
acatgcgaaaagcgaattgctaattggttagctgttgctgagtattctttatacattcccatgcgagtatcattt

SEQ ID NO: 35309 - DNA, 75 bp, synthetic construct
  source 1..75: mol_type = other DNA
gttaccgtcagcggtacacttgaaaaccgcggcagactcgtcagcgatgacgtgctgacgctcagtgccacgcag

SEQ ID NO: 35310 - DNA, 75 bp, synthetic construct
  source 1..75: mol_type = other DNA
gatgaaatgttcattgatttgcgggggataaatcattgcatctctccggagttttttggtcatcagctcagggaa

SEQ ID NO: 35311 - DNA, 75 bp, synthetic construct
  source 1..75: mol_type = other DNA
taaattgcttcttgaatgcgttgtaaaaacacaatcatcagtagcgaaaattttgggtattgagtctctcagtcc

SEQ ID NO: 35312 - DNA, 75 bp, synthetic construct
  source 1..75: mol_type = other DNA
tcacgttgcagggaatccaaagttcgaatatgccaatatggtagaagatatcagagataaagtgtcagttgagat

SEQ ID NO: 35313 - DNA, 75 bp, synthetic construct
  source 1..75: mol_type = other DNA
gggcaaaggaacttgtggcttctgcagacacactgaccaccacagaaaaatcggtcacaaacagtgacggtaacc

SEQ ID NO: 35314 - DNA, 75 bp, synthetic construct
  source 1..75: mol_type = other DNA
aacatcaacatcatgtggaatgcgctttccaaaaacagaatgtttgacggcaacaaagagctgaaagagtttgtg

SEQ ID NO: 35315 - DNA, 75 bp, synthetic construct
  source 1..75: mol_type = other DNA
acattgccggtgagagcaatatttttgctgactgggcggcttcccggcagggatgtaccgttggcgggaaatctg

SEQ ID NO: 35316 - DNA, 75 bp, synthetic construct
  source 1..75: mol_type = other DNA
acagaccgtgctggacagtgtgctggagaatctgaatcaggcacagcaacagattgcggttttccaggggcaggt

SEQ ID NO: 35317 - DNA, 75 bp, synthetic construct
  source 1..75: mol_type = other DNA
agcggcaaaacgaaatgtgggaacaggggaaaatcagatacctgatatgtcatcatatgcatcaggttcaggctg

SEQ ID NO: 35318 - DNA, 75 bp, synthetic construct
  source 1..75: mol_type = other DNA
gtgcccgaaatcaaaaccgcgaaagacttcctgcagaagatggcgaatgacattaacagtatgaacctcagtagc

SEQ ID NO: 35319 - DNA, 75 bp, synthetic construct
  source 1..75: mol_type = other DNA
ctgtctgaacaacgtgctggacgccatcacccagtttgaacgtagcgccaatttcgcttttgctggttttattct

SEQ ID NO: 35320 - DNA, 75 bp, synthetic construct
  source 1..75: mol_type = other DNA
ggaagcataataagctttttctgcttctgccggaggagtatggcccagcctttccagcaatcgtcgattgttata

SEQ ID NO: 35321 - DNA, 75 bp, synthetic construct
  source 1..75: mol_type = other DNA
gccaacagtgacgttcctatgatgaaaaacgccgcgaaaacgataggaaaaaggctttacgggatcctgaatgcc

SEQ ID NO: 35322 - DNA, 75 bp, synthetic construct
  source 1..75: mol_type = other DNA
ggtgccccgatatcgaataagcgagggcaactggatctggatgcctggcgcgatttttacatatcgtatctgaga

SEQ ID NO: 35323 - DNA, 75 bp, synthetic construct
  source 1..75: mol_type = other DNA
gcatcaacaaaggccactgaagcatcaaaaagtgctgccgctgcagagtcctcaaaaagcgcggcggccaccagt

SEQ ID NO: 35324 - DNA, 75 bp, synthetic construct
  source 1..75: mol_type = other DNA
ccaaaaattaacggtgttaagtttgatggctcggcggatattaacctcacgccggaaaatattggtgcatttgcc

SEQ ID NO: 35325 - DNA, 75 bp, synthetic construct
  source 1..75: mol_type = other DNA
acgacgatgggcgcatttgttctctcggcgttaaaagtggcgggcgcgctggtgctggtggtattgctggggcgc

SEQ ID NO: 35326 - DNA, 75 bp, synthetic construct
  source 1..75: mol_type = other DNA
atgctctctctgttttggcaaattacccctcactttgaagggatcggagctataaaaatggtgttatccggcttc

SEQ ID NO: 35327 - DNA, 75 bp, synthetic construct
  source 1..75: mol_type = other DNA
aacacgcacggcaaatagactcgatcctgaacccatcggtcccaaatttgtcccagtcaaaaaataaggaaggta

SEQ ID NO: 35328 - DNA, 75 bp, synthetic construct
  source 1..75: mol_type = other DNA
gtgtttactgaagatgaccagggaacatattcccggctggttatccgtaatgctgaaggtcagttgcgctggtga

SEQ ID NO: 35329 - DNA, 75 bp, synthetic construct
  source 1..75: mol_type = other DNA
atctggtccccggaagagattcaggcactggctgacggtatggaaatttctctgaccggtcatgaaatcaggacc

SEQ ID NO: 35330 - DNA, 75 bp, synthetic construct
  source 1..75: mol_type = other DNA
gcgggagggcaagggctccaaggatcgggccttgatgttacccgagagcttggcacccagcctgcgcgagcagct

SEQ ID NO: 35331 - DNA, 75 bp, synthetic construct
  source 1..75: mol_type = other DNA
tattgtctcaggaacaggacggcattaaatcgcacacccacagcgccagcgcatccagtacggatttggggacga

SEQ ID NO: 35332 - DNA, 75 bp, synthetic construct
  source 1..75: mol_type = other DNA
ggaggcggtaagccatatccctgttccgcgtgacggtcgtgactatgatcccgatgttctgcagaaggcggtgaa

SEQ ID NO: 35333 - DNA, 75 bp, synthetic construct
  source 1..75: mol_type = other DNA
tccgtgcgctgggtgaagaattcgccacggtgctggcggatttacagcgcacatttgaggagaagatggccgcac

SEQ ID NO: 35334 - DNA, 75 bp, synthetic construct
  source 1..75: mol_type = other DNA
gtgttcagagccggtgaaacctaccaccccggcgatacggtgacgtggggggctcgctgtggcactgcaacagta

SEQ ID NO: 35335 - DNA, 75 bp, synthetic construct
  source 1..75: mol_type = other DNA
ccaatgaagaacaaaatgccattggtgaaatttccgatgaaacttttgataccagcgcaatggacagcagtgcta

SEQ ID NO: 35336 - DNA, 75 bp, synthetic construct
  source 1..75: mol_type = other DNA
gtcatcgcatttggcaaacaggccgacttcctggctaaacatcaaaaaggcgatgttgccagcgtatccggcacg

SEQ ID NO: 35337 - DNA, 75 bp, synthetic construct
  source 1..75: mol_type = other DNA
gaatcatacgcatactgctactctagaagattataaacttaagggagaacttaatgacttataccaccaggatgc

SEQ ID NO: 35338 - DNA, 75 bp, synthetic construct
  source 1..75: mol_type = other DNA
ccgcaacggggaaaccgtaaaagcctatctgttgagagtgatgttacctgccgtcaggaaaattgacgacgcatc

SEQ ID NO: 35339 - DNA, 75 bp, synthetic construct
  source 1..75: mol_type = other DNA
tctcgctcccaaaaaaatgtgctccgtggtttacattttcaaacgagtaatcctcaaggcaaattggttcgagtt

SEQ ID NO: 35340 - DNA, 75 bp, synthetic construct
  source 1..75: mol_type = other DNA
gcagcaagccagacggcagcaaaagcaagtgaagatgctgccagagaatacgcaaaccagacagcagagccgtac

SEQ ID NO: 35341 - DNA, 75 bp, synthetic construct
  source 1..75: mol_type = other DNA
ttattgtcatggcggttggctgtggtgcgctgtggctggcaacaaaccattaccgtgacaacgcgctcacctaca

SEQ ID NO: 35342 - DNA, 75 bp, synthetic construct
  source 1..75: mol_type = other DNA
gcgtcaccctgctggttgaaggttttccgccttcacatgccgggaccattaccgtctatgaaggttccagaccag

SEQ ID NO: 35343 - DNA, 75 bp, synthetic construct
  source 1..75: mol_type = other DNA
cgagcacaccattgataacagcggttataccacgcagcttgaacttgaaacaaaaatccctgaatggattgcgca

SEQ ID NO: 35344 - DNA, 75 bp, synthetic construct
  source 1..75: mol_type = other DNA
ttgatcttaaggcaaagtgtatatatatccatcgattaaaaaaaggcttttcaacaacgcacccgctattgaaca

SEQ ID NO: 35345 - DNA, 75 bp, synthetic construct
  source 1..75: mol_type = other DNA
gtgccggaactgaacgacagtatcagcgcgacaccgaaagccagcatgaagaataaatcctggttcaggatgcag

SEQ ID NO: 35346 - DNA, 75 bp, synthetic construct
  source 1..75: mol_type = other DNA
cagacgagctgcagagcaaaagccaggcgctggcaaagagcaacaaccagcttatcagcctgtccattctgactg

SEQ ID NO: 35347 - DNA, 75 bp, synthetic construct
  source 1..75: mol_type = other DNA
tacacgtgacgagatgcgtcaggtgcaaggtgttttatccacgattaaccgcctgccttactttttgcgctcgct

SEQ ID NO: 35348 - DNA, 75 bp, synthetic construct
  source 1..75: mol_type = other DNA
atttcggagacctgaaaaaggcagtcgatcgcacttatgccgaaatgggtatagatggtgctggtgatgaaatat

SEQ ID NO: 35349 - DNA, 75 bp, synthetic construct
  source 1..75: mol_type = other DNA
aaaacactcgatgaactgaaccagtcgggaaaagggaaagtgtggtttgcggggcgaggaaccgcccctgaatgg

SEQ ID NO: 35350 - DNA, 75 bp, synthetic construct
  source 1..75: mol_type = other DNA
ttctgcgggaggtggtccgggaagcccgggccgaaatccgcagcatggcggatgccctggcaaaaatccggaaat

SEQ ID NO: 35351 - DNA, 75 bp, synthetic construct
  source 1..75: mol_type = other DNA
gcataacgtgacgggaagtacggtgattgccgctcatgaaggcaaagcgccgcagcagatcatcattatggcgca

SEQ ID NO: 35352 - DNA, 75 bp, synthetic construct
  source 1..75: mol_type = other DNA
gtctggttgtgaaggaaagcgattacccctgctggcttgatgaagatgacgaaaatctgcccgtggtgctcgatg

SEQ ID NO: 35353 - DNA, 75 bp, synthetic construct
  source 1..75: mol_type = other DNA
acttccggcagacggaacgcaggtgtctttcccgtatgccggagaatggctgaccgaagacgaaatcagggcagt

SEQ ID NO: 35354 - DNA, 75 bp, synthetic construct
  source 1..75: mol_type = other DNA
gctggcgcagggctggccggaagaaacggatgttgaccagcgtaacccgaagtatccgggctggatcagcattta

SEQ ID NO: 35355 - DNA, 75 bp, synthetic construct
  source 1..75: mol_type = other DNA
ctggttgatgacggtgttatcgaatggaatgacccggaggtcgtgagggcgctcaggggcgcattaaaacacggc

SEQ ID NO: 35356 - DNA, 75 bp, synthetic construct
  source 1..75: mol_type = other DNA
ttcgatactggtgcctgatacttcaagcgtttctggtgatgggttgctcatttatctttacaacagtaataacag

SEQ ID NO: 35357 - DNA, 75 bp, synthetic construct
  source 1..75: mol_type = other DNA
ggatataaaggaaatatacagaatttgcgggcgggaacattttctgcaacagcaacgctggttgcatcatattcg

SEQ ID NO: 35358 - DNA, 75 bp, synthetic construct
  source 1..75: mol_type = other DNA
ggatataaaggagatatacagaatttgcgggcgggaacattttctgcaacggcaacgctggttgcatcatattcg

SEQ ID NO: 35359 - DNA, 75 bp, synthetic construct
  source 1..75: mol_type = other DNA
aggacggcgacagtcaccgttttaccctggcggatcgcggagcttacacgggtgtaattgccagctggttgcata

SEQ ID NO: 35360 - DNA, 75 bp, synthetic construct
  source 1..75: mol_type = other DNA
actaagaagcagaagaaagagccggaagcgaagcagggcgattacctggtggggacggatgaaaacgtgctggta

SEQ ID NO: 35361 - DNA, 75 bp, synthetic construct
  source 1..75: mol_type = other DNA
gttgtctgagctggagtatgagcaggttttccacgcggaatctcagggcgatgaccgctactgcattaacctgcc

SEQ ID NO: 35362 - DNA, 75 bp, synthetic construct
  source 1..75: mol_type = other DNA
gacgctggagtcaccaggtgaatcagaaacgccggaagcaatgcagcaggagctgctgcaacgcatcgacaacgt

SEQ ID NO: 35363 - DNA, 75 bp, synthetic construct
  source 1..75: mol_type = other DNA
accggggatatcagttttcagacgatcaatgattacggtgcattaactccgcgtattaaggcaaccatgcagtaa

SEQ ID NO: 35364 - DNA, 75 bp, synthetic construct
  source 1..75: mol_type = other DNA
attttatgggggcgtcatagagctgacgggcagtgatgcctttaagcaaaaagcaatgcagttgattatcgagca

SEQ ID NO: 35365 - DNA, 75 bp, synthetic construct
  source 1..75: mol_type = other DNA
tctgtcgctttgcaggacatctttcacacttctacagcgtcgcccaacatgcggtgctttgcagccagctggtac

SEQ ID NO: 35366 - DNA, 75 bp, synthetic construct
  source 1..75: mol_type = other DNA
taatccgccgcgttaccggaatcagccagcagcatgacgaacaggccacgcagccggacagcgtgaccgccgaaa

SEQ ID NO: 35367 - DNA, 75 bp, synthetic construct
  source 1..75: mol_type = other DNA
ccggggcgttgtgcctgttctggtcgtggctggtggcgcgatatctcgaccgtacacagatgtctgttggtggag

SEQ ID NO: 35368 - DNA, 75 bp, synthetic construct
  source 1..75: mol_type = other DNA
ggcctgcccggttatctttctgctattccatccgccctgctcaacgagtctgccacgctgttccgccgcaagtat

SEQ ID NO: 35369 - DNA, 75 bp, synthetic construct
  source 1..75: mol_type = other DNA
ggggatgtggagaaagccagcagggtctttgtccgtaatgagctaattccattgcaaaaaaggcttcaagaagta

SEQ ID NO: 35370 - DNA, 75 bp, synthetic construct
  source 1..75: mol_type = other DNA
accgtatttatcagatgactaatggcgttaaagctgccgaccgtattatttacactgtcatgttgaatgaacaaa

SEQ ID NO: 35371 - DNA, 75 bp, synthetic construct
  source 1..75: mol_type = other DNA
cacgattataatgctttttgtgattttattgaatttaagcatgaaaatattataccgaataccagtatgtatacc

SEQ ID NO: 35372 - DNA, 75 bp, synthetic construct
  source 1..75: mol_type = other DNA
gattaaagattttctcggtctgcaaatggcccatgtcccggaacattatctacaaaaagtcggcgcattatttat

SEQ ID NO: 35373 - DNA, 75 bp, synthetic construct
  source 1..75: mol_type = other DNA
ctgctgcgacgaaacggagccagcataaaaatcaaacttcagccgaagctttcagctttggtgatcccattcctg

SEQ ID NO: 35374 - DNA, 75 bp, synthetic construct
  source 1..75: mol_type = other DNA
acgttcttcgcttatccaacggacatccgcaaagtgatctatacgacgaatgccatcgagtcgctaaacagcgtg

SEQ ID NO: 35375 - DNA, 75 bp, synthetic construct
  source 1..75: mol_type = other DNA
cacttaaccgggctcaggctctggcgaagatcgcagaaatcaaagcgaagttcggactgaaaggagcaactgtat

SEQ ID NO: 35376 - DNA, 75 bp, synthetic construct
  source 1..75: mol_type = other DNA
aaaggggacctgccagattgagcgtgctgccagcgagtccgggcatttcatgcgttttcatgttgcctgtccgca

SEQ ID NO: 35377 - DNA, 75 bp, synthetic construct
  source 1..75: mol_type = other DNA
gattaccttggtttgggagaaggctctgcattaccggttggggtgcctgttccgtggccttcagccactccgcca

SEQ ID NO: 35378 - DNA, 75 bp, synthetic construct
  source 1..75: mol_type = other DNA
cgcatacgttcaaataactgctatgggcaagttattcgtcgtgaccaggaaagcgcattagcctgttgggggata

SEQ ID NO: 35379 - DNA, 75 bp, synthetic construct
  source 1..75: mol_type = other DNA
gtttacggttacatcgattatctggcaatgaacatgctgcctgacctgtgcgatgagtcctggctggcgcgacat

SEQ ID NO: 35380 - DNA, 75 bp, synthetic construct
  source 1..75: mol_type = other DNA
atgccagtgccatgcgtgataaaggcgggcgctatgttttcctgatcaaagctgccaccagcgaagtgtggtggc

SEQ ID NO: 35381 - DNA, 75 bp, synthetic construct
  source 1..75: mol_type = other DNA
gacctggtgctggcgcatcgcaaggacaatcatattcatatcgaccacgtctggcgtcagggtaaaagggtgttc

SEQ ID NO: 35382 - DNA, 75 bp, synthetic construct
  source 1..75: mol_type = other DNA
taactttgccgggttatcaccagtgatgaacttgcttgatgtccctttcctgttccgcgataccgctcacgcgca

SEQ ID NO: 35383 - DNA, 75 bp, synthetic construct
  source 1..75: mol_type = other DNA
ggcgataacactctgacgttaatggataaaggttattactcactgggactgttaaatgcctggagctggcgggag

SEQ ID NO: 35384 - DNA, 75 bp, synthetic construct
  source 1..75: mol_type = other DNA
atgagtaataaatattgtcaggcgctggtggagctgcggaacaaaccatcccatgaactgaaggaggtgggcgat

SEQ ID NO: 35385 - DNA, 75 bp, synthetic construct
  source 1..75: mol_type = other DNA
ttcgacaagacctggaagggaccggcaatcagctacatcgggcgcgatgaacttgaggcatgtggtgaggcgttt

SEQ ID NO: 35386 - DNA, 75 bp, synthetic construct
  source 1..75: mol_type = other DNA
cgttgtatgccaaagggatgaccacccgtgagatagccgctgcgttcaaagaactgtatgacgcagatgtttcac

SEQ ID NO: 35387 - DNA, 75 bp, synthetic construct
  source 1..75: mol_type = other DNA
gcgaataactggacaccaacaaccagtatcagcgatctgctggttgtggtgatgaaaaaatccacagcaggtatc

SEQ ID NO: 35388 - DNA, 75 bp, synthetic construct
  source 1..75: mol_type = other DNA
aagacaagaacggtaccgttgatatccctaacgataacggaactacagatcacgcggttatttacaagggtaaac

SEQ ID NO: 35389 - DNA, 75 bp, synthetic construct
  source 1..75: mol_type = other DNA
atgacggcgagctctaacttcggtaatgtgttcagcgtgctggtggcgagtgctttcttgcccttcctgccgatg

SEQ ID NO: 35390 - DNA, 75 bp, synthetic construct
  source 1..75: mol_type = other DNA
gaacagtctgctgaaagtaaaccgctactggctggcgatccagcagggcgatgctgcgctgaaagccaataatcc

SEQ ID NO: 35391 - DNA, 75 bp, synthetic construct
  source 1..75: mol_type = other DNA
tcacactttccctcggtctggccgtcatgccgatggtcgaggcagcaccaaccgctcagcaacagttgctggagc

SEQ ID NO: 35392 - DNA, 75 bp, synthetic construct
  source 1..75: mol_type = other DNA
tgcatgccgtccccatttccgccgccgtggatgcggggatgctcatccgtacaccgacgcaggcccgtcagaagg

SEQ ID NO: 35393 - DNA, 75 bp, synthetic construct
  source 1..75: mol_type = other DNA
cctccagctaccagatgctgccggggtacttcaggttcgtctgccagaacggctgcgtctgtggtcagtctctgg

SEQ ID NO: 35394 - DNA, 75 bp, synthetic construct
  source 1..75: mol_type = other DNA
gggaagtgcgtgttccacaccggggaaatgtagtggagaaagttatcgaaggggcttacgaggtggtgggggttt

SEQ ID NO: 35395 - DNA, 75 bp, synthetic construct
  source 1..75: mol_type = other DNA
gaaagccattgcatttggtaacttcaaacggggttacaccatcgttgaccgtatcggcacccgcattctgcgtga

SEQ ID NO: 35396 - DNA, 75 bp, synthetic construct
  source 1..75: mol_type = other DNA
tctccggcggaaatgaccatatctccggacgtctttccgtggcatatcagaaatttggcggctggtttgacggta

SEQ ID NO: 35397 - DNA, 75 bp, synthetic construct
  source 1..75: mol_type = other DNA
gcggcatctatggtgctgcagtgaacggccatcttcctctaacaaagagtgtgaacgtcagcgacagcaagctgg

SEQ ID NO: 35398 - DNA, 75 bp, synthetic construct
  source 1..75: mol_type = other DNA
ttttttatctttaaaccggcggtacagacagaagaaaaaccggcggagcagaaacaagaaagcgcaggtatcagc

SEQ ID NO: 35399 - DNA, 75 bp, synthetic construct
  source 1..75: mol_type = other DNA
cactgacggcacttacttctgcgccaccaacgtggtgcaggtgaatcttatcagacaggtacaggagtcacgcag

SEQ ID NO: 35400 - DNA, 75 bp, synthetic construct
  source 1..75: mol_type = other DNA
atggcaattaagcgatttaccgtcgttcgtttcacttccagaggacgtgaatacgaagttgacgaacggctgatt

SEQ ID NO: 35401 - DNA, 75 bp, synthetic construct
  source 1..75: mol_type = other DNA
tttaccgcgatgacatataccagaagcaaaacgtttaaaactgaagctggcgcgcgtcgctggttaaccagaaac

SEQ ID NO: 35402 - DNA, 75 bp, synthetic construct
  source 1..75: mol_type = other DNA
cgtcttgccgccgttctgaaaggcgttgaagggcttaacctggggaattttaacgagcaccagattgacctgttt

SEQ ID NO: 35403 - DNA, 75 bp, synthetic construct
  source 1..75: mol_type = other DNA
gccatgacgtataccaaaagcaaaacgtttaaaaccgaagctggcgcacgtcgttggttgggaagacattcaggt

SEQ ID NO: 35404 - DNA, 75 bp, synthetic construct
  source 1..75: mol_type = other DNA
gatgtgcttctccgtatacaccatgttatcggagagctgccaacgtatggttatcgtcgggtatgggcgctgctt

SEQ ID NO: 35405 - DNA, 75 bp, synthetic construct
  source 1..75: mol_type = other DNA
ttgacgtgctgaaagatctgaatgatctggagtcgctgttgattgttgatatcggtggaacgacccttgatattg

SEQ ID NO: 35406 - DNA, 75 bp, synthetic construct
  source 1..75: mol_type = other DNA
actgggactcgtttttaatgtcattgtttctgttgaagagaatgatttgtcaaccgggaataagcacattccatt

SEQ ID NO: 35407 - DNA, 75 bp, synthetic construct
  source 1..75: mol_type = other DNA
acgagctggttgctgtttcggcacaccaccggaatttagcgaactgctgacccgttgcgattaccggatcattca

SEQ ID NO: 35408 - DNA, 75 bp, synthetic construct
  source 1..75: mol_type = other DNA
agtagagtggctgacggataatggttcatgctaccgggctaatgaaacacgccagttcgcccggatgttgggact

SEQ ID NO: 35409 - DNA, 75 bp, synthetic construct
  source 1..75: mol_type = other DNA
tcatcgttggtcgtgaccgactggcacgtcttcgtaaggagctaaggctacgctgtaagcagaaacgcaagttca

SEQ ID NO: 35410 - DNA, 75 bp, synthetic construct
  source 1..75: mol_type = other DNA
gaagttgtcgaaggaaaaatgcgaccaggttaacgccattgaacgtgataaggcgctggcatgggtggagaaaaa

SEQ ID NO: 35411 - DNA, 75 bp, synthetic construct
  source 1..75: mol_type = other DNA
tcgcgcgttttgcttctgcatccggtgtggaggtggacaaggttgcagaggctttcggaaaactgaccactgacc

SEQ ID NO: 35412 - DNA, 75 bp, synthetic construct
  source 1..75: mol_type = other DNA
agatcttccctaaagaaaataatgattttttatacatagttgttgtgtacagaaatgacagccctctaggagaac

SEQ ID NO: 35413 - DNA, 75 bp, synthetic construct
  source 1..75: mol_type = other DNA
gctgacgctctccagagccgggcaggcggcagggctgacgtttaaccaggcgggagagtcactggcagccctggt

SEQ ID NO: 35414 - DNA, 75 bp, synthetic construct
  source 1..75: mol_type = other DNA
gtgagggtcagagtttatattgccggtccaatgacgggatatgaaaatttcaaccgtgaggcgtttcacaaggcg

SEQ ID NO: 35415 - DNA, 75 bp, synthetic construct
  source 1..75: mol_type = other DNA
aaccgcagggtattttcagtaaatcaccggcaacgccgctgcaggataaaacggacacagcatacaaaatgaagg

SEQ ID NO: 35416 - DNA, 75 bp, synthetic construct
  source 1..75: mol_type = other DNA
tggtccgcaacgctggcagaaattgaacgggtaaagcggctttatcagacgaaaattaagaaatccaaaaaagaa

SEQ ID NO: 35417 - DNA, 75 bp, synthetic construct
  source 1..75: mol_type = other DNA
tgctgttgagcaggggctgagccgtcaggcgctggctgcacaaaaagccgggatgtccgtcgggcagtataaagc

SEQ ID NO: 35418 - DNA, 75 bp, synthetic construct
  source 1..75: mol_type = other DNA
ggcattgcaggcggcgaacgatatcgccacgaaaggctttgatgagcagacccgtcgcctgaaagaaaacatggg

SEQ ID NO: 35419 - DNA, 75 bp, synthetic construct
  source 1..75: mol_type = other DNA
ttcagggcgcatgggatgaccgggaaaatgcccgtctgggtctggcagcggcaacgctgcagtcggatatggaaa

SEQ ID NO: 35420 - DNA, 75 bp, synthetic construct
  source 1..75: mol_type = other DNA
tcgtcattccctgtctcgggttttcagccagttgcatggccgcagaggatgtgatgattgtctcggcatccggct

SEQ ID NO: 35421 - DNA, 75 bp, synthetic construct
  source 1..75: mol_type = other DNA
tcgtcttcctgactgcgactgggtacatctggtcttcaccctgccggacacgctgtggccggtgttcgaaagcaa

SEQ ID NO: 35422 - DNA, 75 bp, synthetic construct
  source 1..75: mol_type = other DNA
cttctgccttggactcctgaaccttcataaaaaatacagtaaagccagacttaatgcagcatgtgcaagagctct

SEQ ID NO: 35423 - DNA, 75 bp, synthetic construct
  source 1..75: mol_type = other DNA
tggaatggcgaaacgagaaaagttttttacctgaacagggaaaaatagttttcattaaagcacaaaacgaggtga

SEQ ID NO: 35424 - DNA, 75 bp, synthetic construct
  source 1..75: mol_type = other DNA
tggcaggcaggttaatggtgtgatcgacagacttcatcttgcacttgcagaacagaatggttcggtgacacgtga

SEQ ID NO: 35425 - DNA, 75 bp, synthetic construct
  source 1..75: mol_type = other DNA
tcgacgggctggcgcgaacctttcgcgccgccgtgcaccacagctcaccgattgccgtaaagtgcaacatactga

SEQ ID NO: 35426 - DNA, 75 bp, synthetic construct
  source 1..75: mol_type = other DNA
tacctcagcgatgaaacttatcgtgtcatccttaaagcgaagattgcgattaataactgggacggacggaatgat

SEQ ID NO: 35427 - DNA, 75 bp, synthetic construct
  source 1..75: mol_type = other DNA
gtgtacggtgataatccggatgcgctggcgaaggccacatctgcactgaagaacacctggtctgcggaggagcag

SEQ ID NO: 35428 - DNA, 75 bp, synthetic construct
  source 1..75: mol_type = other DNA
taagcggggcaatgacggacaaccgccgtggtttgaacatgaccagatgactgttgctgcgaaaatcctgctgcg

SEQ ID NO: 35429 - DNA, 75 bp, synthetic construct
  source 1..75: mol_type = other DNA
ttttctgccaccacgatgctgttttcactgggtgccagcatgatactgggtggtgtggcacagatgctggccccg

SEQ ID NO: 35430 - DNA, 75 bp, synthetic construct
  source 1..75: mol_type = other DNA
ttgagatgccggattttcatcgcggggatgactggtggcgtcacggtcagaatctctatcttgacaatatggagg

SEQ ID NO: 35431 - DNA, 75 bp, synthetic construct
  source 1..75: mol_type = other DNA
ttacctcgctgattgatgcggatgttttccataacgaaaacccggtgcgtggaatacgtaagctcaaggtcagga

SEQ ID NO: 35432 - DNA, 75 bp, synthetic construct
  source 1..75: mol_type = other DNA
aagcactagcatttgagcgatacacaatcgccaatgccagtcagaaagaatggggaggccagcgagcagaccgcc

SEQ ID NO: 35433 - DNA, 75 bp, synthetic construct
  source 1..75: mol_type = other DNA
tggcaggctaagccagctgatcagcggcgattatcagagctgcttgatgcgtggtggatgcttgatgggcgtaat

SEQ ID NO: 35434 - DNA, 75 bp, synthetic construct
  source 1..75: mol_type = other DNA
gctatttctgttatcaatgataaagcaacaattccactattgattaatctgttaaaagatccaaatggagatgtc

SEQ ID NO: 35435 - DNA, 75 bp, synthetic construct
  source 1..75: mol_type = other DNA
gaggctgtcgaaggaaaaatgcgaccaggttaacgctattgaacgtgataaggcgctggcatgggtggagcgcaa

SEQ ID NO: 35436 - DNA, 75 bp, synthetic construct
  source 1..75: mol_type = other DNA
tgttgccatagcgtctgtgctcatcactggtccgagtggtgacgatggtctggaaggtgtcagctacataccata

SEQ ID NO: 35437 - DNA, 75 bp, synthetic construct
  source 1..75: mol_type = other DNA
gcgattcacaagttccgctgtgtgccacatcttaccgggcggcgctttgagcacggggtgacggactgttacacg

SEQ ID NO: 35438 - DNA, 75 bp, synthetic construct
  source 1..75: mol_type = other DNA
atgttagtacttagcgaaagcttcaagaataaattgcttcccatgaatgggtatatgaaaggcggcagcgactcc

SEQ ID NO: 35439 - DNA, 75 bp, synthetic construct
  source 1..75: mol_type = other DNA
ttgggtggtggcatagccagtgctctcgagctatcaactccgtggggtgctggtatcggtgctggtcttggtctg

SEQ ID NO: 35440 - DNA, 75 bp, synthetic construct
  source 1..75: mol_type = other DNA
gcagaccagcgaaagtgtttaatcgacgcggcgaaaaatccacggcatcagggcgttaccagcagctttatctct

SEQ ID NO: 35441 - DNA, 75 bp, synthetic construct
  source 1..75: mol_type = other DNA
gattgtccggaatggttatccgctgaaggcaggaaattattataccatattacggtttatagtgaattatgagta

SEQ ID NO: 35442 - DNA, 75 bp, synthetic construct
  source 1..75: mol_type = other DNA
gcgatacacagctaagaaaaatcaacggcacaccagccccaaaaaccacatttcttaatgacggtggaaacctga

SEQ ID NO: 35443 - DNA, 75 bp, synthetic construct
  source 1..75: mol_type = other DNA
atgaccgccgacgatatggtggtggttgagatagccagcggcaaggtggtggaaggtagcaaaaagccctcgtcc

SEQ ID NO: 35444 - DNA, 75 bp, synthetic construct
  source 1..75: mol_type = other DNA
aagtgatgctcgcgctggcgatttttgcgctggctgccacggcggtgttacagattgccagcggtgcgctgagta

SEQ ID NO: 35445 - DNA, 75 bp, synthetic construct
  source 1..75: mol_type = other DNA
tggccgtcagtaacctggtgatagccgccatgaatctggccgctgaaatcggggttccacaggtcaacgctgacg

SEQ ID NO: 35446 - DNA, 75 bp, synthetic construct
  source 1..75: mol_type = other DNA
cttcggttcgcactggtacatttgccagcgatgaaaaagctaggactgcattatgccataccgaccgacataaca

SEQ ID NO: 35447 - DNA, 75 bp, synthetic construct
  source 1..75: mol_type = other DNA
gcctcgctgagtgaatacaccgctgaatttaaccgcctttccgccctcttctcgcaggagtggcagcgcgtgacg

SEQ ID NO: 35448 - DNA, 75 bp, synthetic construct
  source 1..75: mol_type = other DNA
cgtcttacaacagaaatttttaatcttaagaatcagtttgagaattacattatgttatgtaaagggagaactgtt

SEQ ID NO: 35449 - DNA, 75 bp, synthetic construct
  source 1..75: mol_type = other DNA
tgtaatgcaatggatatcaggaaaacagtggaacaactgaccgaaacaggtatcagagtgcattgcttagcattg

SEQ ID NO: 35450 - DNA, 75 bp, synthetic construct
  source 1..75: mol_type = other DNA
gcgcatctaccgaccggcgcaagcctgcaaaccaggggatgtgtgtgcgattccccaagtgcgcgctacttacaa

SEQ ID NO: 35451 - DNA, 75 bp, synthetic construct
  source 1..75: mol_type = other DNA
ccaccagcacaacacgcgctggcaaacgccgcactgacgtatcgctttggcgaagaacaccagccggtgactgcc

SEQ ID NO: 35452 - DNA, 75 bp, synthetic construct
  source 1..75: mol_type = other DNA
aaatgagtccggaagccgccggcattgcggcctgtctgatgacgtacagtcatcacgcctgtcgtacggagtgtt

SEQ ID NO: 35453 - DNA, 75 bp, synthetic construct
  source 1..75: mol_type = other DNA
ctatcgcggagcgtcgtcacatccagactgaaatcaaccgcagactttcccgcgcatcacgcgtcgcgcaaatca

SEQ ID NO: 35454 - DNA, 75 bp, synthetic construct
  source 1..75: mol_type = other DNA
atggctgatgcaatggatcttgtacagcagcgcgttgaagaagaacgccagcgccatatccgtgctgcccgtgcc

SEQ ID NO: 35455 - DNA, 75 bp, synthetic construct
  source 1..75: mol_type = other DNA
gcccaaacgatccggtttctttagctgatgtccgtcaggcgggcgcaactggcgtggttaccgcgctgcaccata

SEQ ID NO: 35456 - DNA, 75 bp, synthetic construct
  source 1..75: mol_type = other DNA
ccagtgagaaactgatgactcccacgcaggatacgagggacatcattgccgcagcggtgaaagcactggatcgga

SEQ ID NO: 35457 - DNA, 75 bp, synthetic construct
  source 1..75: mol_type = other DNA
aaggtcaaattcagcaacaactggcaaaagcagaaacgcaaaatacagcgactgcattcctgtatcgcaaatatc

SEQ ID NO: 35458 - DNA, 75 bp, synthetic construct
  source 1..75: mol_type = other DNA
cctgtatctgctcgttcatcatgcgcgagcagccggaagccgtcctgaagcgcctggagctggcggtgctgcgcg

SEQ ID NO: 35459 - DNA, 75 bp, synthetic construct
  source 1..75: mol_type = other DNA
ctctgcggttgatcaccgactggcagaactaaccatgaacaaactttacgatcgcgttccggcttctgtctggaa

SEQ ID NO: 35460 - DNA, 75 bp, synthetic construct
  source 1..75: mol_type = other DNA
acgccatcgccgccggtgccgtgctggtgacgaataatacgcgggaatttgagcgggtgccggatctggtgctgg

SEQ ID NO: 35461 - DNA, 75 bp, synthetic construct
  source 1..75: mol_type = other DNA
atggacggtagcgagatgatgaaactggttggctgggcgcagtcggtagtgaccttccacggtggcgcttctcaa

SEQ ID NO: 35462 - DNA, 75 bp, synthetic construct
  source 1..75: mol_type = other DNA
ttaatccatgatttgcagacgggtcacttcgtgacagtactgcgttttatttcgccactgatggttcgtcttggc

SEQ ID NO: 35463 - DNA, 75 bp, synthetic construct
  source 1..75: mol_type = other DNA
taagatacagtgctaaacatatgttgaaaaaaaagcaatatatcaaaggatttggcaactatcttttgtatttta

SEQ ID NO: 35464 - DNA, 75 bp, synthetic construct
  source 1..75: mol_type = other DNA
ctggcgcgctcacggggaaaacgcaccggtgtggcagttgctctgtctcttgctgctgtcacgtcactcccggca

SEQ ID NO: 35465 - DNA, 75 bp, synthetic construct
  source 1..75: mol_type = other DNA
tggatgacggccaggataacgccggttatgtgaagttcgggcatggcagtgcacaacatgtgcgtgccggtttcc

SEQ ID NO: 35466 - DNA, 75 bp, synthetic construct
  source 1..75: mol_type = other DNA
taattcacatcaccaccggcacccacgtcgcgcagatttgctggtttctgctggcggaagcgcgttacctgcccg

SEQ ID NO: 35467 - DNA, 75 bp, synthetic construct
  source 1..75: mol_type = other DNA
ggctgatcccgaacatcctcgtctcagcaataaagcgttaggcatttccggctccagtcgtaagggaacaaaaaa

SEQ ID NO: 35468 - DNA, 75 bp, synthetic construct
  source 1..75: mol_type = other DNA
tcagcggagaaaaaaccgtgctgactgccggaggtcgtcatacagttaaagcacagcccggggagcagtatggac

SEQ ID NO: 35469 - DNA, 75 bp, synthetic construct
  source 1..75: mol_type = other DNA
ctgcgcgacagtacaaaacaccgtgtgagtgaactgccggtgaactggtgggtacagccttctgttatccgcact

SEQ ID NO: 35470 - DNA, 75 bp, synthetic construct
  source 1..75: mol_type = other DNA
gccgtgttcgcggctgtcgcaacaccacaacagacccatctggctactgtgaaaatcacaaaggtgaaggctgga

SEQ ID NO: 35471 - DNA, 75 bp, synthetic construct
  source 1..75: mol_type = other DNA
tgttttcattttccggggccgcagcggcagtcaggttaaactgctgtggtccaccggtgacggactgtgcctcct

SEQ ID NO: 35472 - DNA, 75 bp, synthetic construct
  source 1..75: mol_type = other DNA
cggcgggctccagtttgtaggtgccgggggaaaggctacagacacaataatcaatgaaggaggtggacaaagtct

SEQ ID NO: 35473 - DNA, 75 bp, synthetic construct
  source 1..75: mol_type = other DNA
cgacttccgcgcccggggctggggctggctgggctcactggaaaccggtctgcccttcagtatcactgacaacct

SEQ ID NO: 35474 - DNA, 75 bp, synthetic construct
  source 1..75: mol_type = other DNA
aggcaaactgcaggtgaacgccggtggtacagccacgaatgtcaccctgaagcagggaggcgcactggtcaccag

SEQ ID NO: 35475 - DNA, 75 bp, synthetic construct
  source 1..75: mol_type = other DNA
atgatgatgaaaaagcatattacccgtactctcatcgcgtctgccgttttattttcctttaattcaacagccgca

SEQ ID NO: 35476 - DNA, 75 bp, synthetic construct
  source 1..75: mol_type = other DNA
caactgaatatcttgcggttggcgtcggtatcccggcatgttcttgtttagatgcaccagttacacataaagctg

SEQ ID NO: 35477 - DNA, 75 bp, synthetic construct
  source 1..75: mol_type = other DNA
gttatgcaatctgccgttctgcagattttaactcatgggaatatgtgccagaccatcgcggtgaaatcatctata

SEQ ID NO: 35478 - DNA, 75 bp, synthetic construct
  source 1..75: mol_type = other DNA
atggataaagcaatattaaatagtggacttgttgctacaaaggcaggggatattaccgtttataactatgatggt

SEQ ID NO: 35479 - DNA, 75 bp, synthetic construct
  source 1..75: mol_type = other DNA
gaccatcgtggtgaaatcgtctttagcacagaaacaggagaatcaaaagaaatcaaagctccgggtgattaccct

SEQ ID NO: 35480 - DNA, 75 bp, synthetic construct
  source 1..75: mol_type = other DNA
aatcacagctccgggtgattaccctgaaaatacaaccactatcgccccgttaacgccatacgataaatgggatgg

SEQ ID NO: 35481 - DNA, 75 bp, synthetic construct
  source 1..75: mol_type = other DNA
cggcagaagcacagcgtcagtcactgattgatgctgcaatggtttccattagtctgattcagttgaaattgcagg

SEQ ID NO: 35482 - DNA, 75 bp, synthetic construct
  source 1..75: mol_type = other DNA
cgccggaaactggttaaggaacggtccagactgaaacgggccacggtcagaaatccgaatgcaaaaattatcgtt

SEQ ID NO: 35483 - DNA, 75 bp, synthetic construct
  source 1..75: mol_type = other DNA
tacattgtacgaagcactgcgcacagtcgatcgtttgcttcgcgggcaaagttttattaaacaggctgatttata

SEQ ID NO: 35484 - DNA, 75 bp, synthetic construct
  source 1..75: mol_type = other DNA
aaggatgacgccagctacgctataaagcccacctgctggcctggccttgatatcatcccgtcctgtctggcactg

SEQ ID NO: 35485 - DNA, 75 bp, synthetic construct
  source 1..75: mol_type = other DNA
gcttcgtctgccatgtgaatatgacactaccttcaacagcagaaagacctggttaggcatggattttattgaaac

SEQ ID NO: 35486 - DNA, 75 bp, synthetic construct
  source 1..75: mol_type = other DNA
cagcagaaacaaaacgtcagtcattgattgatactgcgatggcttccattagtctgattcagttgaaattacagg

SEQ ID NO: 35487 - DNA, 75 bp, synthetic construct
  source 1..75: mol_type = other DNA
gtcgctcgcaactgattgcgcttcctgtaccgggtggaaaagcgaaggtggaatattgctatgcagtgaatgtac

SEQ ID NO: 35488 - DNA, 75 bp, synthetic construct
  source 1..75: mol_type = other DNA
tgctaaccgggcgtaaccagattttcctttccgccagcaaggcacaggcccacgtctttaagcagtacatcatcg

SEQ ID NO: 35489 - DNA, 75 bp, synthetic construct
  source 1..75: mol_type = other DNA
tgcttgccgggatgacatccaccgaatatgccgactggcgacgtttttactgcacgcattattttcaggataccc

SEQ ID NO: 35490 - DNA, 75 bp, synthetic construct
  source 1..75: mol_type = other DNA
aatgacgcccgcgagtgtgcagctccgggcgtcgtggcgtcgattgcttctggttgtggagaaactaacgcatga

SEQ ID NO: 35491 - DNA, 75 bp, synthetic construct
  source 1..75: mol_type = other DNA
gtgggtaagcatcactggaaagtggaaaaacaacctgagtggtacgtgaaagctatcagaaaaactatcgcggca

SEQ ID NO: 35492 - DNA, 75 bp, synthetic construct
  source 1..75: mol_type = other DNA
gacttccgcgcccaggctgacgccatcaaaaaactgaccgagcaatacaacgtgacctacatcggcatcgactcg

SEQ ID NO: 35493 - DNA, 75 bp, synthetic construct
  source 1..75: mol_type = other DNA
tactgaacgccctataaaccagacaatttatcgcgaatttaacggtatatcggttttatgggatcccatatatgc

SEQ ID NO: 35494 - DNA, 75 bp, synthetic construct
  source 1..75: mol_type = other DNA
gactgaacgccctataaaccagacaatttaccgcgaatttaacggtatttctgttttatgggatccgatatatgc

SEQ ID NO: 35495 - DNA, 75 bp, synthetic construct
  source 1..75: mol_type = other DNA
attcctctggctttttcaattgccaaaaaaaccaatacctcattgttaaagctggccattccgctgtgtaccgca

SEQ ID NO: 35496 - DNA, 75 bp, synthetic construct
  source 1..75: mol_type = other DNA
gaaatgaaaaccgcaatggtactcaaggcgaaagacaccattcgccgtggctgtctggagtacgacgccggagca

SEQ ID NO: 35497 - DNA, 75 bp, synthetic construct
  source 1..75: mol_type = other DNA
gctgccacaggccactctggatgataaacagcagagtgccctgacaaaaacagagcgtgagctggccctgtccag

SEQ ID NO: 35498 - DNA, 75 bp, synthetic construct
  source 1..75: mol_type = other DNA
cattaacggaacgacctgggtagaaggtggcggttgtaaagcccacgcctgcggctgggactatatcgtaacact

SEQ ID NO: 35499 - DNA, 75 bp, synthetic construct
  source 1..75: mol_type = other DNA
acctggatgatgaagacgcggactggaccgcgaccgggcaggggcagaagtctgcaggagataccagttttacgc

SEQ ID NO: 35500 - DNA, 75 bp, synthetic construct
  source 1..75: mol_type = other DNA
gggcagagcaccacgctgaccgtggcattccagccggaaggcgcaaccgacaagagcttccgtgcggtgtcagcg

SEQ ID NO: 35501 - DNA, 75 bp, synthetic construct
  source 1..75: mol_type = other DNA
acgcataaaccggtgcagtactatcccgggaaacatccgtgcgaaaaaccggcagaaatgctgcagcagataatc

SEQ ID NO: 35502 - DNA, 75 bp, synthetic construct
  source 1..75: mol_type = other DNA
cagaacgttttgcgcagaccgttaaggagattagtcacatccttacatgctcaattgatgacgggaaggatggat

SEQ ID NO: 35503 - DNA, 75 bp, synthetic construct
  source 1..75: mol_type = other DNA
cggcggccaccggcatgacggtaacgccagccagtgcttccgtagtgaaagggcagagcaccacgctgaccgtgg

SEQ ID NO: 35504 - DNA, 75 bp, synthetic construct
  source 1..75: mol_type = other DNA
tgctaatttagctggagcgttaattacgttacttgatcctgtcatcaaagagctggatgaagctataaaaataca

SEQ ID NO: 35505 - DNA, 75 bp, synthetic construct
  source 1..75: mol_type = other DNA
tctggggcgtgagccggatatatccgggagtgccgcagagatagcgcagcgggtggcagaatgggaagaggaaat

SEQ ID NO: 35506 - DNA, 75 bp, synthetic construct
  source 1..75: mol_type = other DNA
cactcctgacccggaatcgcctgtgcgaaatacggctgaaggacggatacagggaggttacggcaagcatggctt

SEQ ID NO: 35507 - DNA, 75 bp, synthetic construct
  source 1..75: mol_type = other DNA
cgaaaccttctcggtatcagatccggaattatcagagatcaagcatcattgagagcgttacaggaatatattgac

SEQ ID NO: 35508 - DNA, 75 bp, synthetic construct
  source 1..75: mol_type = other DNA
gcagcagataatcagcgcgagcagtcgtccgggtgacctggttgcagattttttcatggggtcgggttcgacagt

SEQ ID NO: 35509 - DNA, 75 bp, synthetic construct
  source 1..75: mol_type = other DNA
tgggggaagtgcgtgttccacaccggggaaatgtggtgcagaaagtcattgaaggggcttacgaggtggtgggcg

SEQ ID NO: 35510 - DNA, 75 bp, synthetic construct
  source 1..75: mol_type = other DNA
tgtttgaccggattgaggaaaagcgtgatgccatgcagtcgctgattctgccgccaccggcacgccaggcgctgg

SEQ ID NO: 35511 - DNA, 75 bp, synthetic construct
  source 1..75: mol_type = other DNA
aggcggcactgacttaccgttatggtgacaaacatcagccagtcaccactgccgacattctgacgccacgacgcc

SEQ ID NO: 35512 - DNA, 75 bp, synthetic construct
  source 1..75: mol_type = other DNA
atgcgattagccagtcgttttggttatgcgaaccagatacgccgtgaccgtccgctgacacacgaagaactgatg

SEQ ID NO: 35513 - DNA, 75 bp, synthetic construct
  source 1..75: mol_type = other DNA
acgaggtggtgggggtttttgaccggattgaggaaaagcgtgatgccatgcagtcgctgattctgccgccaccgg

SEQ ID NO: 35514 - DNA, 75 bp, synthetic construct
  source 1..75: mol_type = other DNA
atgatgaataccgaactgacactgaatgccctgcagtccatgaatgcccaggaatatgaagaaatccgtgctgcg

SEQ ID NO: 35515 - DNA, 75 bp, synthetic construct
  source 1..75: mol_type = other DNA
tcagcaacgaagactaccacgccggtgacggcgtgagtaagtcgcaactggacatggttgccaagaatccggcgc

SEQ ID NO: 35516 - DNA, 75 bp, synthetic construct
  source 1..75: mol_type = other DNA
ggcgtcgtgcgattggtgttgagctggagaccggacgttttgagcagacagtcagggaagttcaggatttaatcg

SEQ ID NO: 35517 - DNA, 75 bp, synthetic construct
  source 1..75: mol_type = other DNA
gaagcgaaaggtcgtgaacaactggcggcaacgctggcggcgatgccggagatgacggtggaaaaagcccgcccg

SEQ ID NO: 35518 - DNA, 75 bp, synthetic construct
  source 1..75: mol_type = other DNA
ttctggcagttacaggctgaaatcagtcaccggggacgttactgccatccgtacagcatggatatcaccgtcacc

SEQ ID NO: 35519 - DNA, 75 bp, synthetic construct
  source 1..75: mol_type = other DNA
aaaacgagtatgactggctgacctcagatgccgctgttgatgagacccttctcatcaacaaatacaccttcaccg

SEQ ID NO: 35520 - DNA, 75 bp, synthetic construct
  source 1..75: mol_type = other DNA
atgtttcagaaaatcaaaattcgcaaaatgacaatcagccgggcgctggacaaatacctgaagacagtatccatc

SEQ ID NO: 35521 - DNA, 75 bp, synthetic construct
  source 1..75: mol_type = other DNA
tgaccgtttttggtaataaccatattgcaaacaaagcacaaaactttgaagcagtagcacaatatcagtttgact

SEQ ID NO: 35522 - DNA, 75 bp, synthetic construct
  source 1..75: mol_type = other DNA
ttaccgcttttgcagggggcaacggatgccgccagttttatggcgcggatggataccgttctgcagatatacgga

SEQ ID NO: 35523 - DNA, 75 bp, synthetic construct
  source 1..75: mol_type = other DNA
gggaaagccatagacttcgatgccagaacggctattccattcgaaggtgagcgccataatgcacttgatgacgcc

SEQ ID NO: 35524 - DNA, 75 bp, synthetic construct
  source 1..75: mol_type = other DNA
gaatacttcgcacgtaaaaacggcacgtactcaggttcacaacaaaatactggtgcatctgacacgaccgcacaa

SEQ ID NO: 35525 - DNA, 75 bp, synthetic construct
  source 1..75: mol_type = other DNA
atgagtaaagtctttatttgcgccgccattccggacgaacaggcaataaaggaagaaggtgcagttgctgtagcc

SEQ ID NO: 35526 - DNA, 75 bp, synthetic construct
  source 1..75: mol_type = other DNA
ttaccgcttttacagggggcaacggatgccgccagttttatggcgcggatggataccgttctgcagatgtacgga

SEQ ID NO: 35527 - DNA, 75 bp, synthetic construct
  source 1..75: mol_type = other DNA
taccgctgggtgtcaaatgaccgtatcggaaaacccccggcttatcagtatctcggggagggggaaacctcgcgt

SEQ ID NO: 35528 - DNA, 75 bp, synthetic construct
  source 1..75: mol_type = other DNA
gtcgcgtcgcgtgggataaaacaacgcatgacttccccagcgtgactggcgatacccgctcgttgcgcccgttag

SEQ ID NO: 35529 - DNA, 75 bp, synthetic construct
  source 1..75: mol_type = other DNA
gaggcagcggtgcggggaagttttccgctatgcaatagtcactggtcgcgcagagtataaccctgcaccagacct

SEQ ID NO: 35530 - DNA, 75 bp, synthetic construct
  source 1..75: mol_type = other DNA
agcagagcgcggaatcagtgcaaaaagcagtaaagcggcaaaagagaaaaaagccacgaccagtaaagagggctg

SEQ ID NO: 35531 - DNA, 75 bp, synthetic construct
  source 1..75: mol_type = other DNA
agaggtgcgtaaacgtaaaacacctcaggaaaaaatcgcaattattcaacagactatggagccgggcatgacggt

SEQ ID NO: 35532 - DNA, 75 bp, synthetic construct
  source 1..75: mol_type = other DNA
cccgtctgccaaacattttgcttaacggcaccaccggtattgccgtcggcatggcgaccgatattccaccgcata

SEQ ID NO: 35533 - DNA, 75 bp, synthetic construct
  source 1..75: mol_type = other DNA
cggtgctgaccgttggtctggtgtcctgtgcagggaaatcattaccccgtttctggcccggagattttttcccga

SEQ ID NO: 35534 - DNA, 75 bp, synthetic construct
  source 1..75: mol_type = other DNA
ggatgtttctggccgggcgtggagcctttccgctgtttgccctggtgtgggggctgaatctgtcccgccatgcgc

SEQ ID NO: 35535 - DNA, 75 bp, synthetic construct
  source 1..75: mol_type = other DNA
ctcagctgcggcaggttcaaaaacagcggctgcattatctgccagtgccgcgtcaacaagtgccgggcaggcctc

SEQ ID NO: 35536 - DNA, 75 bp, synthetic construct
  source 1..75: mol_type = other DNA
cttgtttgatgagtccggggcattgattgccgtgggcaactgcccggaaagctataagccgcaactggctgaagg

SEQ ID NO: 35537 - DNA, 75 bp, synthetic construct
  source 1..75: mol_type = other DNA
cagcgtttacgtcatcatgccggtaacccgctgcatcttgatgtgctggtggtagatgaagcgtcaatgatcgat

SEQ ID NO: 35538 - DNA, 75 bp, synthetic construct
  source 1..75: mol_type = other DNA
ggctgccgaatccaatcgcggtaatgagtggaccggcaatcctgatattgataacgccatcatcatgctcgatcg

SEQ ID NO: 35539 - DNA, 75 bp, synthetic construct
  source 1..75: mol_type = other DNA
cgaggctgcgatctggtaaaacttaaagtatctgatgttgcatatggtagctctgtttcaagcagggcaacggtg

SEQ ID NO: 35540 - DNA, 75 bp, synthetic construct
  source 1..75: mol_type = other DNA
cgaggctgtgatctagtcaaactcaaagtatctgatgttgcatatggtagctctgtttcaagcagagctacggtt

SEQ ID NO: 35541 - DNA, 75 bp, synthetic construct
  source 1..75: mol_type = other DNA
atactcgagggaattagccgatgcgagagctgaaaatgaaactcttcgcgctgacgttgccgctggtcaccgcag

SEQ ID NO: 35542 - DNA, 75 bp, synthetic construct
  source 1..75: mol_type = other DNA
tattccggcgaccagctcttatgcaggctatcaggcttatcagccggtcacggcaccggctggccgctcttatgt

SEQ ID NO: 35543 - DNA, 75 bp, synthetic construct
  source 1..75: mol_type = other DNA
atactcgagggaattagccgatgcgagagctgaaaatgaaactctgcgcgctgacgttgccgctggtcgtaagcg

SEQ ID NO: 35544 - DNA, 75 bp, synthetic construct
  source 1..75: mol_type = other DNA
cgttgataccggcgctctcggtggaatgtacgccaggcgtattcatctgacctccactgaaagtggtgtcggggt

SEQ ID NO: 35545 - DNA, 75 bp, synthetic construct
  source 1..75: mol_type = other DNA
caggctggcggtgatgttagctttatccggggttatactttaagcggaactatagatgacaatcatatttcagtt

SEQ ID NO: 35546 - DNA, 75 bp, synthetic construct
  source 1..75: mol_type = other DNA
aacgctcagcaacagtggctccctgctcagtggcggtcccctgaccgtgaatacccgcgactttacccagagcgg

SEQ ID NO: 35547 - DNA, 75 bp, synthetic construct
  source 1..75: mol_type = other DNA
ggtatgtcagtaacgcggtgctgagccggacgggttcacgttatctcaacggactgggttcagacacggaacaga

SEQ ID NO: 35548 - DNA, 75 bp, synthetic construct
  source 1..75: mol_type = other DNA
atgggattgtttacgacccgccagttactcggttataccgaacaaaaagtgaaattccgtgcgctgtttctggag

SEQ ID NO: 35549 - DNA, 75 bp, synthetic construct
  source 1..75: mol_type = other DNA
taacaggagtttttgtttgtcaaaaatggaaaggagaacccggtggcgtgattgcagaatgtcatgttaactgcc

SEQ ID NO: 35550 - DNA, 75 bp, synthetic construct
  source 1..75: mol_type = other DNA
tcggttccacaggacgatatttactgatctatgcgctgattgttgcaggaatggtggtgttgtttttacgtcttc

SEQ ID NO: 35551 - DNA, 75 bp, synthetic construct
  source 1..75: mol_type = other DNA
gcgaattaccggacgaatctgagaaagatgctcaggcctactttaatcgcaaatatgcaccgattgacgaaaagc

SEQ ID NO: 35552 - DNA, 75 bp, synthetic construct
  source 1..75: mol_type = other DNA
cgctaaccgcgctcctggttgggtttaatagccaggtatcagtagctaaatcctccgacgacgataatgacgaga

SEQ ID NO: 35553 - DNA, 75 bp, synthetic construct
  source 1..75: mol_type = other DNA
gtgtggcagagtgggaagaggaggtttgcgcctcggaaaatgaaatcgcagatgttgatgataccgttcatgagc

SEQ ID NO: 35554 - DNA, 75 bp, synthetic construct
  source 1..75: mol_type = other DNA
agaaaaagtatgccgatctctttggtgataacggaacagatgacttgggaaccagttttcacctggcagcagagg

SEQ ID NO: 35555 - DNA, 75 bp, synthetic construct
  source 1..75: mol_type = other DNA
cggaatgctggcggtctattacgcataacagcggttcggtgcaccgttgtacatatcagccgcattatacataca

SEQ ID NO: 35556 - DNA, 75 bp, synthetic construct
  source 1..75: mol_type = other DNA
gctgcacgggcatctcggcgcgggcgcggcgggtaaggtgattgagtcgtttggtcaggtggtgatcggcggcaa

SEQ ID NO: 35557 - DNA, 75 bp, synthetic construct
  source 1..75: mol_type = other DNA
cgctgacagagcgggagattgcggaagctgaacaggtgacaaccatcaacgttaaaaccggagagcagacagcat

SEQ ID NO: 35558 - DNA, 75 bp, synthetic construct
  source 1..75: mol_type = other DNA
tgtttctccggatgacgggggcagttgttatctctggctcaaccgtgggcaaccaccggcagttaaccggcgacg

SEQ ID NO: 35559 - DNA, 75 bp, synthetic construct
  source 1..75: mol_type = other DNA
aagaagagcaaaaagacggactgtgcgcatacggttgcagtgaagttcctgaacgacctgctgcagggcgtcctc

SEQ ID NO: 35560 - DNA, 75 bp, synthetic construct
  source 1..75: mol_type = other DNA
tgaaagaaagcccggtctttgagaaggttaacgacagcaaccaaccgacagcaaaacctgcacctgctggtagca

SEQ ID NO: 35561 - DNA, 75 bp, synthetic construct
  source 1..75: mol_type = other DNA
tgaaaaagaaattcgcgcatttgcagagaaagcccagcgtgcaacgtttatctgcgcaagctttgatgaaacgct

SEQ ID NO: 35562 - DNA, 75 bp, synthetic construct
  source 1..75: mol_type = other DNA
caactgataaaggaatttgacgctcagggcgtggcagtccggttcattgatgacgggatcagtaccgacggtgat

SEQ ID NO: 35563 - DNA, 75 bp, synthetic construct
  source 1..75: mol_type = other DNA
gtaagggcgttgaatctgtatttgataccgccatggcaattcagtggtatgcgcagagggaagctgatatcgaaa

SEQ ID NO: 35564 - DNA, 75 bp, synthetic construct
  source 1..75: mol_type = other DNA
atgacgcagtatcaactgaaacaaaacgaaagattaatatcgcagcaatctgaactggagaggaaagtgaaacat

SEQ ID NO: 35565 - DNA, 75 bp, synthetic construct
  source 1..75: mol_type = other DNA
ctgatggggcagtttggtgactccatccagcgaacgcagggggcgatcaaaaatctcgagcgtcaggcgcgatca

SEQ ID NO: 35566 - DNA, 75 bp, synthetic construct
  source 1..75: mol_type = other DNA
agcctcttcgaaccggatgtgccggaggttgtttccggagaagacgtgactcaggctgaacagccgcaacagccg

SEQ ID NO: 35567 - DNA, 75 bp, synthetic construct
  source 1..75: mol_type = other DNA
aggtaaagcgtgagaatccgccagtcgaaaccggagcatggaaagacgctgttgactgggtgctcaaagaggctt

SEQ ID NO: 35568 - DNA, 75 bp, synthetic construct
  source 1..75: mol_type = other DNA
tttgtcgggaatcagagaacaacagcatatgggataaatgaaacccgtccacggaatattgcatttaactatatc

SEQ ID NO: 35569 - DNA, 75 bp, synthetic construct
  source 1..75: mol_type = other DNA
ttttcttctgaaatgtatcccaaactggcaaaggcctaccccaccaataaattaccggatttacggggagaattt

SEQ ID NO: 35570 - DNA, 75 bp, synthetic construct
  source 1..75: mol_type = other DNA
gttaaacgttatcatgctaaatccagacaaccgtttgatttattgtcagaaatagggcgagacagcgttggtgcc

SEQ ID NO: 35571 - DNA, 75 bp, synthetic construct
  source 1..75: mol_type = other DNA
cacgggctatgaactttatgctggagaataacccggacatgttcatgctgtggatgggcggcgataacatctcta

SEQ ID NO: 35572 - DNA, 75 bp, synthetic construct
  source 1..75: mol_type = other DNA
caaattcgagccgcaacggcgctacgccactctcgtggcgctggccaccgtcaccgacgaaatcatcgacctgca

SEQ ID NO: 35573 - DNA, 75 bp, synthetic construct
  source 1..75: mol_type = other DNA
tcctggggaatttacggtgaatatttcaacagcgatgagccgtcactgaccgacgatgcccgctttattgtcctg

SEQ ID NO: 35574 - DNA, 75 bp, synthetic construct
  source 1..75: mol_type = other DNA
gaacggtttaacgccattacccgggcctattatatgaaagcggcagcgacacagtttccgctgccggaggggatg

SEQ ID NO: 35575 - DNA, 75 bp, synthetic construct
  source 1..75: mol_type = other DNA
caaataccggcttttatgcccgctgccagatgtacgacggcagaccatcatcaaatgctttttcctggagggttt

SEQ ID NO: 35576 - DNA, 75 bp, synthetic construct
  source 1..75: mol_type = other DNA
cgcggtgagtttatccgtggatgggacgacgggcgcaaagttgatacaggacgtaagttgctgtccgcacaaggg

SEQ ID NO: 35577 - DNA, 75 bp, synthetic construct
  source 1..75: mol_type = other DNA
gcaggaagtgctcaatggtgatggagaggatgacgataccctgtcggtggtggcgaaaacccgccgtaacctgga

SEQ ID NO: 35578 - DNA, 75 bp, synthetic construct
  source 1..75: mol_type = other DNA
agacacacagaacaggctcagtgtgaataccctgatggtgaatacgtattatgacttcagaaacagcagtgcatt

SEQ ID NO: 35579 - DNA, 75 bp, synthetic construct
  source 1..75: mol_type = other DNA
tgacatgaccaacttctacacgatcaactatgaaagtgagcttttagaagaggtcaaagtgaacgaatccatcag

SEQ ID NO: 35580 - DNA, 75 bp, synthetic construct
  source 1..75: mol_type = other DNA
tttctggcaatggctggttttactccgcaggccattcaggccgcattgcccggtgttcttaatatggcgctggca

SEQ ID NO: 35581 - DNA, 75 bp, synthetic construct
  source 1..75: mol_type = other DNA
ccggcgctggtccctgttgttgcggccagctcccgcccggtggcggaggccatacgatcgccagtggcatcagtt

SEQ ID NO: 35582 - DNA, 75 bp, synthetic construct
  source 1..75: mol_type = other DNA
gtgacagcagtgtgagttacaaggacgagtggggcgataaatataaatcagaggttgatgttaaaagtcatgaca

SEQ ID NO: 35583 - DNA, 75 bp, synthetic construct
  source 1..75: mol_type = other DNA
ggatacagtatctgctgagtctggtccccgactgcccgtggcagcatattgtgttcacacttccctgccagtact

SEQ ID NO: 35584 - DNA, 75 bp, synthetic construct
  source 1..75: mol_type = other DNA
cgacaaataaattgcctgatttacgcggtgagtttattcgtggctgggatgatggaagagggattgatactaacc

SEQ ID NO: 35585 - DNA, 75 bp, synthetic construct
  source 1..75: mol_type = other DNA
gaaatggcgacggacttcaccgcatgaggctccaccaaccacggggatcctgtcgctctataaccgtggcgatcg

SEQ ID NO: 35586 - DNA, 75 bp, synthetic construct
  source 1..75: mol_type = other DNA
gccgatcgcgggagcttcaataactatttcaaaccgcacccagctaccaaggttcttaacaaggatttccatctt

SEQ ID NO: 35587 - DNA, 75 bp, synthetic construct
  source 1..75: mol_type = other DNA
gagggtatcgcaacgctgatccctgtattgaatggtgttcatcaagctggtctgagtaccacaatacaattcact

SEQ ID NO: 35588 - DNA, 75 bp, synthetic construct
  source 1..75: mol_type = other DNA
atgaacagaaaaaccagagataagacagcgccaaaatataaagcgttagacatgacagagctttccttaaaggtg

SEQ ID NO: 35589 - DNA, 75 bp, synthetic construct
  source 1..75: mol_type = other DNA
cctggttgtccgtcaggatggcacgttgatctggcgctcctggaattttgaggactgtgccgggtactggatgaa

SEQ ID NO: 35590 - DNA, 75 bp, synthetic construct
  source 1..75: mol_type = other DNA
agggactgccggacggtccttttacccgcaaacaggccgaagccgttgccgcacagtaccggaatgtctttatcg

SEQ ID NO: 35591 - DNA, 75 bp, synthetic construct
  source 1..75: mol_type = other DNA
aggggctgcctgacggtccttttacccgcaaacaggccgaagccgttgccgcacagtaccggaacgtctttatcg

SEQ ID NO: 35592 - DNA, 75 bp, synthetic construct
  source 1..75: mol_type = other DNA
tgaaaacggagttgaaggagactggctttttctctcccggaaacgccgccctatcagcagacaacattttttttc

SEQ ID NO: 35593 - DNA, 75 bp, synthetic construct
  source 1..75: mol_type = other DNA
tgctaacggagaaggctggctaattggctggcgttctctctggtacacctggggacaaaaagaaaccggagaatg

SEQ ID NO: 35594 - DNA, 75 bp, synthetic construct
  source 1..75: mol_type = other DNA
atagccgaaaaaattcggaggatgaccattcctgtagacaatataattaacatctatcctgatctacataaaaaa

SEQ ID NO: 35595 - DNA, 75 bp, synthetic construct
  source 1..75: mol_type = other DNA
ttgcaaagaagcggaaatgctcagatggtacgatcagaaaggaattgcaaactgctttaggttttattgatggtg

SEQ ID NO: 35596 - DNA, 75 bp, synthetic construct
  source 1..75: mol_type = other DNA
aaagctgctattggtcgtctgaaaggtaacgagctggagcaatataatttatggctggattatctggacgcactg

SEQ ID NO: 35597 - DNA, 75 bp, synthetic construct
  source 1..75: mol_type = other DNA
gaggttatggccctgcataacaagggatgtagtttcagggaaatatcccgtattacaggcctgtcgcgtgtgaca

SEQ ID NO: 35598 - DNA, 75 bp, synthetic construct
  source 1..75: mol_type = other DNA
catgggattacagaaccaataatccctgccgtctgggcaagaaaatcattattgaaaacctgctgtaccgctgga

SEQ ID NO: 35599 - DNA, 75 bp, synthetic construct
  source 1..75: mol_type = other DNA
atttataataaagacagtaacaagctggatctatacgggaaagttaatgccaagcactacttctcctctaatgat

SEQ ID NO: 35600 - DNA, 75 bp, synthetic construct
  source 1..75: mol_type = other DNA
ttgtggagcgatattgtttatgctgctcagttgggtggtctggggggggggcatattaggtttttgttgggtttt

SEQ ID NO: 35601 - DNA, 75 bp, synthetic construct
  source 1..75: mol_type = other DNA
tcaacctgcgtggccgcccttcagtccggacgccggtatatcggtatcgagctgcttgagcagtatcaccgtgcc

SEQ ID NO: 35602 - DNA, 75 bp, synthetic construct
  source 1..75: mol_type = other DNA
cctggcaaaaggccgtccggcgctgcctcagaagccattgcccgacgtgctgggctggaaatattcaggcaatcg

SEQ ID NO: 35603 - DNA, 75 bp, synthetic construct
  source 1..75: mol_type = other DNA
tacacatccaaatctgcgtatgtcgcgtaccgtcacgaatgcgcttacatcctggcaaagggcagtccggcccgg

SEQ ID NO: 35604 - DNA, 75 bp, synthetic construct
  source 1..75: mol_type = other DNA
cattttagcagcaacggcacacgctacggaccctacgtaaaactgtcctgggacgcgacaaaagatcttaatttt

SEQ ID NO: 35605 - DNA, 75 bp, synthetic construct
  source 1..75: mol_type = other DNA
atgatcttagcggccataataactaaactaacgtttgtagcgttagcatggtttcaaagcgggatttttgaagtt

SEQ ID NO: 35606 - DNA, 75 bp, synthetic construct
  source 1..75: mol_type = other DNA
ggaagcccgccagcaatccccaactggctgcgtgatggtattcgccgcccgtattcgtcaggaggtgtgccgtgc

SEQ ID NO: 35607 - DNA, 75 bp, synthetic construct
  source 1..75: mol_type = other DNA
tgacttaatgaccggaaacagccttgacgactggacgaaaaacctgaaacacaaatcagaaaaagatctggagca

SEQ ID NO: 35608 - DNA, 75 bp, synthetic construct
  source 1..75: mol_type = other DNA
gtgagtttgtcacttcattacaggcattgaaagagatcggaataaaagctggcttttctgctttttcaggagaat

SEQ ID NO: 35609 - DNA, 75 bp, synthetic construct
  source 1..75: mol_type = other DNA
tgaccgtcgtcgccgccctgatggcggtcttcttcatcatgcaacttgtcggacaggtgccggccgcgctttggg

SEQ ID NO: 35610 - DNA, 75 bp, synthetic construct
  source 1..75: mol_type = other DNA
ttggccccttctatggtggctataatgtaatcaaactggatgatgagtataagtatgctcttgtcagtggtccga

SEQ ID NO: 35611 - DNA, 75 bp, synthetic construct
  source 1..75: mol_type = other DNA
aatggtgtaatagaagaattaggggaaattacgcaagaagatattgaactgattgagtattatgctaaaaaatat

SEQ ID NO: 35612 - DNA, 75 bp, synthetic construct
  source 1..75: mol_type = other DNA
aagaaagttggttgcgacgtggaggcgaatcctcagaccttatccgttaccctgaaaatcaccatgaaattggca

SEQ ID NO: 35613 - DNA, 75 bp, synthetic construct
  source 1..75: mol_type = other DNA
tctctgatgggtgcaagcgtattgctgaactggaagcgcgggaagttcaattaccgactcgctacgaccttcgat

SEQ ID NO: 35614 - DNA, 75 bp, synthetic construct
  source 1..75: mol_type = other DNA
cctatcaacacggtctgccctggctcgacgcgctgaacggttatctgcaaggcaacgcccggtatctggcggatg

SEQ ID NO: 35615 - DNA, 75 bp, synthetic construct
  source 1..75: mol_type = other DNA
atgttttcacattcgaacgagtaacgctttgcacgattgttcttattcataaggatacgggacaacagtatgttg

SEQ ID NO: 35616 - DNA, 75 bp, synthetic construct
  source 1..75: mol_type = other DNA
ttaatattcggaaatatcatgatattcctgctgaaacgccgtatgcgccgggagaacacattaagggagggcaag

SEQ ID NO: 35617 - DNA, 75 bp, synthetic construct
  source 1..75: mol_type = other DNA
tagagcgtttaaggtcgataccaagcaacttgacagcaatctgacaagttctttagggcaacttgaaaggaagtt

SEQ ID NO: 35618 - DNA, 75 bp, synthetic construct
  source 1..75: mol_type = other DNA
atggacaataacaccatttctctacaggagttgctcgactgcatttccaggcttcgggatgatgtaaatgccctc

SEQ ID NO: 35619 - DNA, 75 bp, synthetic construct
  source 1..75: mol_type = other DNA
ggtgccgaggttgccgaagcgacgatccgcgtttgggtgcgtttccgccgtgatattaccgcagccaaccgtctg

SEQ ID NO: 35620 - DNA, 75 bp, synthetic construct
  source 1..75: mol_type = other DNA
ttccgcccgtccatcacggcttatgtggtgggagatgactgctttgaccagcgcgatcgcctgattgacgcgctg

SEQ ID NO: 35621 - DNA, 75 bp, synthetic construct
  source 1..75: mol_type = other DNA
gatgctgaatacacgacgcgaaaaggtctgctgatatacaaaatctggaatgagagtttaactcgcggccctgat

SEQ ID NO: 35622 - DNA, 75 bp, synthetic construct
  source 1..75: mol_type = other DNA
ctgcagtagcaacagcagtcctgatggctgtatccgcacaggcagctgaaatatacaataaagatggtaataaac

SEQ ID NO: 35623 - DNA, 75 bp, synthetic construct
  source 1..75: mol_type = other DNA
tgtcggacgcatgttcatgtccacgggctttatcaccgtcacggacaatccacaggttctggaaacggtccgggc

SEQ ID NO: 35624 - DNA, 75 bp, synthetic construct
  source 1..75: mol_type = other DNA
tggttaaggcgaacaaaaccacgtcaaaaaacgctgcgaatatcacctgagacaatttataaaacgctgtacttt

SEQ ID NO: 35625 - DNA, 75 bp, synthetic construct
  source 1..75: mol_type = other DNA
atgctgaaaactgattccctgcgtgaagccatgacccgttcatgtcgatggtgtcacgccaacccggagaaattc

SEQ ID NO: 35626 - DNA, 75 bp, synthetic construct
  source 1..75: mol_type = other DNA
atggctgaggggtttattgatggctgcctatcgatgctggaaattagtctagagatggaccccgaaattaaagat

SEQ ID NO: 35627 - DNA, 75 bp, synthetic construct
  source 1..75: mol_type = other DNA
ctgccagcggcctctctcggcctgaaatccgccccggtgatattttccgggacaccagacgcgggggacgggtgg

SEQ ID NO: 35628 - DNA, 75 bp, synthetic construct
  source 1..75: mol_type = other DNA
agcatctgggggagcgcaggttgatgctgcagtggtgggctgattatctggatgcgaatcgggagaagggcatta

SEQ ID NO: 35629 - DNA, 75 bp, synthetic construct
  source 1..75: mol_type = other DNA
ggcgtattccggcaaaacgtgaagaaattaaaggagtgcgttactcataccgtggtatgaaaatgaaagaagaac

SEQ ID NO: 35630 - DNA, 75 bp, synthetic construct
  source 1..75: mol_type = other DNA
accggcactccaggaaacctgtacagcatgatactcaacagccagacccgcttctatattctgaaatctgccagc

SEQ ID NO: 35631 - DNA, 75 bp, synthetic construct
  source 1..75: mol_type = other DNA
accagcaggacgtgtgaccatctaatgatcgaccttgaaaccatgggaaaaaatcctgatgccccgatcatctca

SEQ ID NO: 35632 - DNA, 75 bp, synthetic construct
  source 1..75: mol_type = other DNA
ataacatttcatggggataccggggaggtaagcttgaccttaatggtaatgccgttaccttcacccgactgcagg

SEQ ID NO: 35633 - DNA, 75 bp, synthetic construct
  source 1..75: mol_type = other DNA
ctgggcaagctgttcaacgccgccaagaacaagcatcagcagcaattccaggcgtccggcaaggcgatcaacgcc

SEQ ID NO: 35634 - DNA, 75 bp, synthetic construct
  source 1..75: mol_type = other DNA
cttctgtgaatgtcatcggcgctgattcattgactgatgcaatgaatatgatggcagattatggatttacccgta

SEQ ID NO: 35635 - DNA, 75 bp, synthetic construct
  source 1..75: mol_type = other DNA
caggacgctgatttcatttatcatttggctggagtcaatagaccaaagactgatgatgaatttaaatccggaaac

SEQ ID NO: 35636 - DNA, 75 bp, synthetic construct
  source 1..75: mol_type = other DNA
gagtgcgacgatgttctttacgagtactggacgaagggttttgtcgttaatccccgtaaaatgagcgtgatggaa

SEQ ID NO: 35637 - DNA, 75 bp, synthetic construct
  source 1..75: mol_type = other DNA
tacaccatgccagccgtctgttaaatcatggcccaactgtcatgatcaccagtttcgatgagcaatcccagcggc

SEQ ID NO: 35638 - DNA, 75 bp, synthetic construct
  source 1..75: mol_type = other DNA
ctggtggaaatatcacgggcaaaaccacgagcatggaacaaaagagtttaatcatctgctcaaaaccatcagcgg

SEQ ID NO: 35639 - DNA, 75 bp, synthetic construct
  source 1..75: mol_type = other DNA
ttcgatcgtacaacctctcctttacaattaactgaagagggtaggctttttcactcccagacacgcagtttagtg

SEQ ID NO: 35640 - DNA, 75 bp, synthetic construct
  source 1..75: mol_type = other DNA
ccggggcgcaatgtccgggcaaaatcaggtttaaaccgttcgatactggatcagggctggtatgaaatgcgccgc

SEQ ID NO: 35641 - DNA, 75 bp, synthetic construct
  source 1..75: mol_type = other DNA
gaggcgcaaactatggcattttcggatacctttctgctaatcagtggtctgttatttatcgcatttttgttggtt

SEQ ID NO: 35642 - DNA, 75 bp, synthetic construct
  source 1..75: mol_type = other DNA
agtggcacgcaaaatatcaagagcggcgggaaagctgacacaacaaatatctcttccgggagcaagcaggttgtt

SEQ ID NO: 35643 - DNA, 75 bp, synthetic construct
  source 1..75: mol_type = other DNA
gtcaggtaggttgcatgaaagggatgcaaaaaatcaaaagaggaaaaacctttaatgggctaatttcttatttat

SEQ ID NO: 35644 - DNA, 75 bp, synthetic construct
  source 1..75: mol_type = other DNA
gctgaacccagctcaacctcatttattaaccgcaccagaaatctggttgcttaccgatctgactgaagattcaac

SEQ ID NO: 35645 - DNA, 75 bp, synthetic construct
  source 1..75: mol_type = other DNA
acgctctgaagaaaaatgagaaagaaacgtctcatgacaaaggctggggtattatggaacagggtgcaatagcac

SEQ ID NO: 35646 - DNA, 75 bp, synthetic construct
  source 1..75: mol_type = other DNA
agaacggcaacaccacgccgctgtttgtggcgcaggggaatcagctgttcatgaacgatgtgttcctgaagcgac

SEQ ID NO: 35647 - DNA, 75 bp, synthetic construct
  source 1..75: mol_type = other DNA
cgaggggcgttttaattaatcacacgcgggatatagatatttatgagcctgacgggccgacgaaccttctggcat

SEQ ID NO: 35648 - DNA, 75 bp, synthetic construct
  source 1..75: mol_type = other DNA
tgaataccggtgcgctgctgacaatgtcagtcagtgccaacgggggaacgccgccgtataaatacgcctggaaga

SEQ ID NO: 35649 - DNA, 75 bp, synthetic construct
  source 1..75: mol_type = other DNA
tgatgtggctggtcatcctttggggcggcagcgtgttggcgctggcggcggtgggcatgttttttcgcctgctca

SEQ ID NO: 35650 - DNA, 75 bp, synthetic construct
  source 1..75: mol_type = other DNA
aaaaaactaaaagacccggttcaaccctaccctgagcgccgagttttttattcgcagttgttatggcagaaattt

SEQ ID NO: 35651 - DNA, 75 bp, synthetic construct
  source 1..75: mol_type = other DNA
acacctttaaaaagaatctgctcgtggagcgcaacacaaaagaccgtaaccgtctggatgtgatgtgtacaccgg

SEQ ID NO: 35652 - DNA, 75 bp, synthetic construct
  source 1..75: mol_type = other DNA
aaaagcgcccgccgggcacgctgcgtaccgcctggcgcaaattttatagtgacgcctctgcgatggtcggcctgt

SEQ ID NO: 35653 - DNA, 75 bp, synthetic construct
  source 1..75: mol_type = other DNA
ttggctctgaaacgcagttcaccgcaggcgatgccgccagtgggcaggcatttcttgcaatggctggcttcacac

SEQ ID NO: 35654 - DNA, 75 bp, synthetic construct
  source 1..75: mol_type = other DNA
tcacgccggacagcctgccgccggtggagtggctgacctacggcagcggttacctggcgggcatgaagctgggcg

SEQ ID NO: 35655 - DNA, 75 bp, synthetic construct
  source 1..75: mol_type = other DNA
gatgtgctggccgacctttataaagccacccgcaaatacggggaagttgaccgggtatcgttctttaaggacatt

SEQ ID NO: 35656 - DNA, 75 bp, synthetic construct
  source 1..75: mol_type = other DNA
gccgatccaaaacgctggatcagggtgaccgcgcccgtcttggccacttggtgggtatggcccgctttcttgacc

SEQ ID NO: 35657 - DNA, 75 bp, synthetic construct
  source 1..75: mol_type = other DNA
gcgaaaaacagcgagacagccgcaaagacgagcgaaaccaacgcaaagtccagccagacggcagcgaaaaccagc

SEQ ID NO: 35658 - DNA, 75 bp, synthetic construct
  source 1..75: mol_type = other DNA
cggttggcggcaatgcgctcattcaggacgagcaacgcaatagtattcccgatcaatatgttgcagtgatggaaa

SEQ ID NO: 35659 - DNA, 75 bp, synthetic construct
  source 1..75: mol_type = other DNA
agcagccgaaagcgagagcgcggcagccggttctgcgactgcagcagctggatcagcaactgctgcggctaacag

SEQ ID NO: 35660 - DNA, 75 bp, synthetic construct
  source 1..75: mol_type = other DNA
gttatacaatttgccgttctgtggatttaaaatcatgggaatatgtgtcagaccatcgcggtgaaatcgtctata

SEQ ID NO: 35661 - DNA, 75 bp, synthetic construct
  source 1..75: mol_type = other DNA
tgtcggctaacgcggaacagttttatcagtatcaaccttcggaaatcattctctcagaaggtcgcctggtcgata

SEQ ID NO: 35662 - DNA, 75 bp, synthetic construct
  source 1..75: mol_type = other DNA
ttaaaaccgtggtggaagagggttcctttttgcgagcttcgcaaaaattgtgctgcacacaatcgacggtgactt

SEQ ID NO: 35663 - DNA, 75 bp, synthetic construct
  source 1..75: mol_type = other DNA
atgcgggttttttcatgcagcgtgttcatgctacgcatcgtaaacacttcgccgagcatgaactgactgcgcaat

SEQ ID NO: 35664 - DNA, 75 bp, synthetic construct
  source 1..75: mol_type = other DNA
gaagaacaaaaactaatgaggtgttcattagactaaaagatcatctcaatcgttttccagacttttataatgcat

SEQ ID NO: 35665 - DNA, 75 bp, synthetic construct
  source 1..75: mol_type = other DNA
aagaagccccactcctgggaaaagatgattacccctggctgacgcatgtcacgaaaaccgatgtacattcgcacc

SEQ ID NO: 35666 - DNA, 75 bp, synthetic construct
  source 1..75: mol_type = other DNA
cggatattgacctgggggagaccgagcttccggtgctcggcgagatcacctggcaggcttatgacccggcaagga

SEQ ID NO: 35667 - DNA, 75 bp, synthetic construct
  source 1..75: mol_type = other DNA
gagtgcaactgaaattaaaggcgttgacgttaatggcacttcaacaagtgaggtttatcgatatgattttaaata

SEQ ID NO: 35668 - DNA, 75 bp, synthetic construct
  source 1..75: mol_type = other DNA
tcaacatatttacatgccagaatcgatttaatgaactggtggggacttaaggtcaaaaatttaaacgtagaaaat

SEQ ID NO: 35669 - DNA, 75 bp, synthetic construct
  source 1..75: mol_type = other DNA
aactggaaattataaggaatattattcgtgaaactctgttaggtaatgcagctattgtggtgctggtatcaatga

SEQ ID NO: 35670 - DNA, 75 bp, synthetic construct
  source 1..75: mol_type = other DNA
tggatggatttcttaaaggtaaatgcatcccaagtgatttaaaggttaacgaaacaaacgctgaatatctggtgc

SEQ ID NO: 35671 - DNA, 75 bp, synthetic construct
  source 1..75: mol_type = other DNA
gcatcctgaacgttggggaaagcatctacgtaactgggactacatatcagaagtctacctgaatccagaaaaaga

SEQ ID NO: 35672 - DNA, 75 bp, synthetic construct
  source 1..75: mol_type = other DNA
tggcaacgcttgccgagcaactgaaccagcaattgcgtgagcgtgacggcgaaagcaaaactatcctcagcgccc

SEQ ID NO: 35673 - DNA, 75 bp, synthetic construct
  source 1..75: mol_type = other DNA
ttctgacccagcttaatcggggagaaagtcgccatgccgttgccagagccatctgtcacggtcaaaaaggtgaga

SEQ ID NO: 35674 - DNA, 75 bp, synthetic construct
  source 1..75: mol_type = other DNA
tgatcctggcgagtctcagcccggcagaggcgacattaaccaaaattcccgcagggtttgaggttattgctcagg

SEQ ID NO: 35675 - DNA, 75 bp, synthetic construct
  source 1..75: mol_type = other DNA
tgattgatgaactgtggctgtttggcaagcagtacaaggcggaagacatgctacgtgaagccatcggcgggcttg

SEQ ID NO: 35676 - DNA, 75 bp, synthetic construct
  source 1..75: mol_type = other DNA
cgcagtacagttacgccgggtggggctgcctgcagatataacgatattattccggccgaccactgcctgcatgat

SEQ ID NO: 35677 - DNA, 75 bp, synthetic construct
  source 1..75: mol_type = other DNA
ttacaccacggtggtggatggttccggcaactggagtctgggcgttccggcttccgttgtcagcggactggtgga

SEQ ID NO: 35678 - DNA, 75 bp, synthetic construct
  source 1..75: mol_type = other DNA
tcagggcggcatcgccgtcagaccttgctgatgcacttgcgcaaaaaattcgtgaaggatggcaaccatacggtg

SEQ ID NO: 35679 - DNA, 75 bp, synthetic construct
  source 1..75: mol_type = other DNA
cgcagggactaccttcacaaagtcacaacgaccgtcagcaaaaaccacgcaatgatagtcattgaggatttgaag

SEQ ID NO: 35680 - DNA, 75 bp, synthetic construct
  source 1..75: mol_type = other DNA
tctaacaaaaattaccagttctctggcggcctgcatggcgtggggatttcggtggttaacgccctgtcgaagcgc

SEQ ID NO: 35681 - DNA, 75 bp, synthetic construct
  source 1..75: mol_type = other DNA
ttacaggtcagacccaggggaacatcactgccggtgctttcaccgcagattctgtcggcaatatctacgtgcagg

SEQ ID NO: 35682 - DNA, 75 bp, synthetic construct
  source 1..75: mol_type = other DNA
tgaaaggtgtcggcaaagactttcgaaacgccgactatatcgactatctgccagtgaatatgctggctacaccca

SEQ ID NO: 35683 - DNA, 75 bp, synthetic construct
  source 1..75: mol_type = other DNA
ccgcaagaatccgtttggcgatatcaaatcggatggcactgtgcaaacggctctcgaaaaccttggtttgggaga

SEQ ID NO: 35684 - DNA, 75 bp, synthetic construct
  source 1..75: mol_type = other DNA
tatgcgtggtcaaaagacggcactgattcatggtttatcactgaccttgaagacgaatcgcatcctgaccgatac

SEQ ID NO: 35685 - DNA, 75 bp, synthetic construct
  source 1..75: mol_type = other DNA
tttgctggtcatgggcgtggatgactctctgggcggtgttgtccggcttaatggtacgctgtatcccgcgtttgc

SEQ ID NO: 35686 - DNA, 75 bp, synthetic construct
  source 1..75: mol_type = other DNA
ttgcagacgcatctttttcgatggttatattcgaccctccgcatcttgagcgtgttggtgataacgcctggatgg

SEQ ID NO: 35687 - DNA, 75 bp, synthetic construct
  source 1..75: mol_type = other DNA
tcggggctgttcgatcatcttctcagactaccgctggcgttttttgaacgccgaaaattaggtgatatccagtca

SEQ ID NO: 35688 - DNA, 75 bp, synthetic construct
  source 1..75: mol_type = other DNA
aatcgcaagagagtattcaggacaaaatatctcaatgtaagtttcctgttagttcaggaaatttccagtgcccgc

SEQ ID NO: 35689 - DNA, 75 bp, synthetic construct
  source 1..75: mol_type = other DNA
gtggcaccgtatacgctgtcgcaaggtctggatcgaactctgcagtatgaattcgttcatgccaaaaaagacgac

SEQ ID NO: 35690 - DNA, 75 bp, synthetic construct
  source 1..75: mol_type = other DNA
caaaattacgggcaaaaaatacgctgtcagctctgtgcgcgtgaaaaaattctgcgcaacaacacagtttgacgc

SEQ ID NO: 35691 - DNA, 75 bp, synthetic construct
  source 1..75: mol_type = other DNA
ggacttcgtgtttaacctcaaaagcgaatacccggcccgcgaacaggtgatgcagtatggcgaggacgacctgac

SEQ ID NO: 35692 - DNA, 75 bp, synthetic construct
  source 1..75: mol_type = other DNA
tgtgcgcgctgtcggagatgaagaacgcgttgcgttccggcgacatctgggtgcaggggtcgcgccagttcaagg

SEQ ID NO: 35693 - DNA, 75 bp, synthetic construct
  source 1..75: mol_type = other DNA
acccgaacagcgaccagtacctggaagagcgtttgcagctgctggacgagcagttggccaccgtcacccgcctgg

SEQ ID NO: 35694 - DNA, 75 bp, synthetic construct
  source 1..75: mol_type = other DNA
cggcagccaacgacctgccggatgccatcatcaccgagtcgggcttgaagatcacgccgctggatgcggcggtgc

SEQ ID NO: 35695 - DNA, 75 bp, synthetic construct
  source 1..75: mol_type = other DNA
cctcgacgatctgctcaagcgtcgggacaacggcaaaacgacctggctggcctggctgcgccaatcgcccgtcaa

SEQ ID NO: 35696 - DNA, 75 bp, synthetic construct
  source 1..75: mol_type = other DNA
cagcagtcggtcattctgcctgccctcaacgccgtcgagcgggcgagcgccgaagcaatcacccgcgccaaccgg

SEQ ID NO: 35697 - DNA, 75 bp, synthetic construct
  source 1..75: mol_type = other DNA
atcgtcgccgtatagctgttgcagcactccatcgaataaaacgtaaaacaggtggtgatctgcttattgttgacc

SEQ ID NO: 35698 - DNA, 75 bp, synthetic construct
  source 1..75: mol_type = other DNA
tgttggtattggcgctcatacgcactctgttgcgattggttcacatggacataccatcaccgttaacgctgctgg

SEQ ID NO: 35699 - DNA, 75 bp, synthetic construct
  source 1..75: mol_type = other DNA
actgccctgcgcaccctgcacggggtgataaccggctttaagcatctctcctcgtcacaggacgaagcccgctat

SEQ ID NO: 35700 - DNA, 75 bp, synthetic construct
  source 1..75: mol_type = other DNA
ttcactggtacaaatacccgctgacgtactggcttaacatcatcacatcgctgggctgtctggaaggtggtgacc

SEQ ID NO: 35701 - DNA, 75 bp, synthetic construct
  source 1..75: mol_type = other DNA
ggccgcagcaggtaaggatgttgcggcgctgaacggggtggatgtccgtgctttcaccggtcaggcgaaattttg

SEQ ID NO: 35702 - DNA, 75 bp, synthetic construct
  source 1..75: mol_type = other DNA
gaacatcacacaggcatgctgggcataccgggataaatatgtcactcagtccgcagataacggcacctgtcagaa

SEQ ID NO: 35703 - DNA, 75 bp, synthetic construct
  source 1..75: mol_type = other DNA
tttagcgtggaaccggtttccggcggactgttggatcgccttagtgcaagagggcatcgccttctcgcagaaaat

SEQ ID NO: 35704 - DNA, 75 bp, synthetic construct
  source 1..75: mol_type = other DNA
acgggataacgagcgtgtggggaataacccgatgatccagcaggctgacaatgctgacagccgtatccattctct

SEQ ID NO: 35705 - DNA, 75 bp, synthetic construct
  source 1..75: mol_type = other DNA
atgaaaatcctgattacacttctggtgctgactgtgctcgggatgttgtggttgcgccatgagaacggcaattta

SEQ ID NO: 35706 - DNA, 75 bp, synthetic construct
  source 1..75: mol_type = other DNA
aggtacagatagagttgctgcttatcatactcacggtgcagatagtcatggcgattatgttgatgaatttttttc

SEQ ID NO: 35707 - DNA, 75 bp, synthetic construct
  source 1..75: mol_type = other DNA
gttgatataaatttataccccgaaagtgatcttatccattctgtagctgatgagattaatatcccaggcgttttc

SEQ ID NO: 35708 - DNA, 75 bp, synthetic construct
  source 1..75: mol_type = other DNA
caaatgtcatcaaaatggggctggccgtcgaaggagctgcgctgtccgtggtggctttcacggctaagatcgcct

SEQ ID NO: 35709 - DNA, 75 bp, synthetic construct
  source 1..75: mol_type = other DNA
actgacaaagttttccccgcccccgtaaattcggacctgggactgataacctcttttatcgaagcatacctggac

SEQ ID NO: 35710 - DNA, 75 bp, synthetic construct
  source 1..75: mol_type = other DNA
gtccgatgcttgagcagatggtgaaggaggcggtaagccatatccctgttccgcgtgacggtcgtgactacgatc

SEQ ID NO: 35711 - DNA, 75 bp, synthetic construct
  source 1..75: mol_type = other DNA
ttaaggggatctcgccattaaaggaatcaagaaccattccggatcctctttcgcgggaggaatttatccgtctta

SEQ ID NO: 35712 - DNA, 75 bp, synthetic construct
  source 1..75: mol_type = other DNA
aacggcggccagcatgccggcagcggtaatgtctggctggcgccggtcagcctggcggaagtccacgatcgcggt

SEQ ID NO: 35713 - DNA, 75 bp, synthetic construct
  source 1..75: mol_type = other DNA
ctcccctgaaaagtgctttaaagcggtggcgctggcctggcacaaaaccaacaaaaaatggtcggctgattatgc

SEQ ID NO: 35714 - DNA, 75 bp, synthetic construct
  source 1..75: mol_type = other DNA
gagatcccttttgtggcgttatcgctggcagtgctgttttacggtattcagtcgaacgcgttttacaccaaattt

SEQ ID NO: 35715 - DNA, 75 bp, synthetic construct
  source 1..75: mol_type = other DNA
tatcctgtggagcttgtctgatggtagtgagtagcctgtcagcggctgcggagattaacttggttagccacagaa

SEQ ID NO: 35716 - DNA, 75 bp, synthetic construct
  source 1..75: mol_type = other DNA
atgccgaggcgcgaggtgatgccagggccgagcaaatgcgtacctggacgtttcgcccgagtccggcagacaact

SEQ ID NO: 35717 - DNA, 75 bp, synthetic construct
  source 1..75: mol_type = other DNA
ccgggggacatggttatctggatggtggtggccatggcctttttccgcaatgagccaattaccgatgtggttcgc

SEQ ID NO: 35718 - DNA, 75 bp, synthetic construct
  source 1..75: mol_type = other DNA
ttctggaaacggcaaccggtgcccgtctgcagtccctgttatttggtatcaccacggctggctttaacaaggaag

SEQ ID NO: 35719 - DNA, 75 bp, synthetic construct
  source 1..75: mol_type = other DNA
agcttaacatgcgtaaaaaacagtacaactactatcgcgaccagttgtttagttttaataccgaagatgttccac

SEQ ID NO: 35720 - DNA, 75 bp, synthetic construct
  source 1..75: mol_type = other DNA
tggatgacttcgtttggggcattaaagcgaattggtgttgagtgtacaggcacctatggatcaggtctgcttcgc

SEQ ID NO: 35721 - DNA, 75 bp, synthetic construct
  source 1..75: mol_type = other DNA
atttcagtgaccatccgcttatgccaccgccctctgcacaactgtttgcagagcaccttcccgtcgagtggatac

SEQ ID NO: 35722 - DNA, 75 bp, synthetic construct
  source 1..75: mol_type = other DNA
aaacagaatgggtgccaacgaatggttacgcaggcaaggacgaggcccggcagcaaattaatgattacatattga

SEQ ID NO: 35723 - DNA, 75 bp, synthetic construct
  source 1..75: mol_type = other DNA
gaacctataccgattcatatcagttgggagatggggaactgcttgtttgtacggtgaatatccctgctggcgtat

SEQ ID NO: 35724 - DNA, 75 bp, synthetic construct
  source 1..75: mol_type = other DNA
gtgcgaacaactggacgccgacaacgtacatcagtgatttactggttgtggtcatgaaaaaatccacggcaggga

SEQ ID NO: 35725 - DNA, 75 bp, synthetic construct
  source 1..75: mol_type = other DNA
gcaacgccggattcatagtaaccgccatgcgcggtgaaatcgcccgccgccaggcagaaggaagcggagaaaacc

SEQ ID NO: 35726 - DNA, 75 bp, synthetic construct
  source 1..75: mol_type = other DNA
aaatagaggaaacgactgacgtcgatattatccgccgcgcttatctggcgctgttaccgtcctttcatccagaaa

SEQ ID NO: 35727 - DNA, 75 bp, synthetic construct
  source 1..75: mol_type = other DNA
ttcacctttattatatgatggctgggacggcaaaagtctgacaaaatcaggtaatggtactcttatactttctgc

SEQ ID NO: 35728 - DNA, 75 bp, synthetic construct
  source 1..75: mol_type = other DNA
gtggcaaaagtttttacacaagaagagcgggaaaaaattaaagggcaggttcttgaactcgtacgccagagtgga

SEQ ID NO: 35729 - DNA, 75 bp, synthetic construct
  source 1..75: mol_type = other DNA
gtggcaaaagtttttacacaagaagagcgggaaaaaattaaagggcaggtggtggaactcgtacgccagagtggg

SEQ ID NO: 35730 - DNA, 75 bp, synthetic construct
  source 1..75: mol_type = other DNA
acaggcgcgtaaggactggcaaaatgctcgcaaaaaactctcaagggcaaaggtgaagaaacctgcagtggttga

SEQ ID NO: 35731 - DNA, 75 bp, synthetic construct
  source 1..75: mol_type = other DNA
tctcattcagcgggccctgaaaaccctggaccgccatcttcatgaacccggcgtggccttcacctccacccgtgc

SEQ ID NO: 35732 - DNA, 75 bp, synthetic construct
  source 1..75: mol_type = other DNA
ggcgtcagaacataatctgtcgcgagtgccggaagagcgaagttatgcagcgcatattgtcgttttatcagggta

SEQ ID NO: 35733 - DNA, 75 bp, synthetic construct
  source 1..75: mol_type = other DNA
cggaagtccatccccgggaagtgattaaacgtgccctgtaccacaatgctgctgccgtggtgctggcacacaatc

SEQ ID NO: 35734 - DNA, 75 bp, synthetic construct
  source 1..75: mol_type = other DNA
ggaaagagaattattgaggacgcaaaaatattacatcaatggcgtgcttcaaagcaagtaagaaaaagttttcac

SEQ ID NO: 35735 - DNA, 75 bp, synthetic construct
  source 1..75: mol_type = other DNA
atgcagcagctttcctttctgcccggagagatgacgcccggcgagcgcagtctcattctgcgggccctgcaaacc

SEQ ID NO: 35736 - DNA, 75 bp, synthetic construct
  source 1..75: mol_type = other DNA
aaagcaagtaagaaaaagttttcacaagggtgtgcttcggtcacgggaatggcttaatacacaggagttactgag

SEQ ID NO: 35737 - DNA, 75 bp, synthetic construct
  source 1..75: mol_type = other DNA
atggcgggactggagcgtgaagaattccgggtgctgtatctgaataaccagaatcagttgattgccggtgaaacc

SEQ ID NO: 35738 - DNA, 75 bp, synthetic construct
  source 1..75: mol_type = other DNA
atgcaacttacaagtactcgcaagaaagcgaatgcaattacaagcaacatcctgaatcgaattgctgtacgtggt

SEQ ID NO: 35739 - DNA, 75 bp, synthetic construct
  source 1..75: mol_type = other DNA
atggcgggactggagcgtgaagaattccgggtgctgtatctgaacaaccagaatcagctgattgccggtgaaacc

SEQ ID NO: 35740 - DNA, 75 bp, synthetic construct
  source 1..75: mol_type = other DNA
agatcgacctgtgggaggtcagtctggtgacgtttccttccaatgatgaggcacgtatcagcgatgtgaaaaatg

SEQ ID NO: 35741 - DNA, 75 bp, synthetic construct
  source 1..75: mol_type = other DNA
tgtggggaaaatcggcataaacaaaattccaatgacaacaaatcaagcgtgcgcaaatattcaacttaatgaaga

SEQ ID NO: 35742 - DNA, 75 bp, synthetic construct
  source 1..75: mol_type = other DNA
atgatccgcattgaaattcttttcgaccgccagagcacaaaaaacctcaaatcaggcacacttcaggcgctacag

SEQ ID NO: 35743 - DNA, 75 bp, synthetic construct
  source 1..75: mol_type = other DNA
gaattaacccgacgcatcagtaaacgttatgacgatgtagaggtgatcgtaaaagccaccagcaacgatggcctt

SEQ ID NO: 35744 - DNA, 75 bp, synthetic construct
  source 1..75: mol_type = other DNA
tggagcggtttaaattttatctggagcaacacggctggatcgttgcccgtaaagaacaactggtagaacggttga

SEQ ID NO: 35745 - DNA, 75 bp, synthetic construct
  source 1..75: mol_type = other DNA
agaacggctgcgtattgcactgctgaatgtggattacgtcaccagttttgaactgccttttcgcttgctgcttac

SEQ ID NO: 35746 - DNA, 75 bp, synthetic construct
  source 1..75: mol_type = other DNA
ctctggattgatcccaatgcttttggtgcagccaagtttagtggaattttaaaaaatatagccatgaattatgca

SEQ ID NO: 35747 - DNA, 75 bp, synthetic construct
  source 1..75: mol_type = other DNA
gtctatatcgaagaacatgatggtcgtaagcaagtttggtgctatgtcatcaagcctcgtgatgcgcaaagcacc

SEQ ID NO: 35748 - DNA, 75 bp, synthetic construct
  source 1..75: mol_type = other DNA
agtggcttaaagcttgatgaagacaaaaagcgggtgatggaaattatgcagcaggtttgggaagacgacagctgg

SEQ ID NO: 35749 - DNA, 75 bp, synthetic construct
  source 1..75: mol_type = other DNA
atgcgtacacgaattgactatcttgcagataaatacagttttactgaactgaatgaatcgccccgtcttcgccgg

SEQ ID NO: 35750 - DNA, 75 bp, synthetic construct
  source 1..75: mol_type = other DNA
gccagtctttctggtgtgccggatatattccggtatcatctgtctcatcgtattcgccggatggttgggagtgaa

SEQ ID NO: 35751 - DNA, 75 bp, synthetic construct
  source 1..75: mol_type = other DNA
taaacgcgccctgcaccacaatgccgctgccgtggtgctggcacacaatcacccgtccggtgaagtcacacccag

SEQ ID NO: 35752 - DNA, 75 bp, synthetic construct
  source 1..75: mol_type = other DNA
tctggtgtgtgttgatcgtgtgtctcacactgttgatattcacttatctgacacgaaaatcgctgtgcgagattc

SEQ ID NO: 35753 - DNA, 75 bp, synthetic construct
  source 1..75: mol_type = other DNA
atgaagtctgaaggtttaacgcccgcacaactggcagagcgtaacgctgagtatgtaacggaaatttcccgactt

SEQ ID NO: 35754 - DNA, 75 bp, synthetic construct
  source 1..75: mol_type = other DNA
atgcagcatttaaagaacattaagtcaggtaatccaaaaacaaaagagcaatatcagctaacaaagaattttgat

SEQ ID NO: 35755 - DNA, 75 bp, synthetic construct
  source 1..75: mol_type = other DNA
ccgcacttaagcaggatgtgactgacagggcggatgaaaccagccaggcattcacccgcctgaaaaacagtctcg

SEQ ID NO: 35756 - DNA, 75 bp, synthetic construct
  source 1..75: mol_type = other DNA
ctccggatggttggataagctgtagtgagcgaatgccgaacgataaacagtatgtttggtgttgggggaagtctt

SEQ ID NO: 35757 - DNA, 75 bp, synthetic construct
  source 1..75: mol_type = other DNA
tataacgatgccagtatcttccttactctctccgttattaagcctgatggtttttatcattggtacactatacga

SEQ ID NO: 35758 - DNA, 75 bp, synthetic construct
  source 1..75: mol_type = other DNA
cggcattagcgaggaagctgggtatcaataactcccgcactgaaattgacgaggtattacgaagtgactttgccc

SEQ ID NO: 35759 - DNA, 75 bp, synthetic construct
  source 1..75: mol_type = other DNA
ccggaaactttcgggaaaacaagaattcgtcaaccaataattttcgggaaatcgcggaaacgtcaaccaactatc

SEQ ID NO: 35760 - DNA, 75 bp, synthetic construct
  source 1..75: mol_type = other DNA
ccagtcagttggacaactatcaaaactatttgggctaaagggtgtgagtacttttcaatagtagcaccgcagcaa

SEQ ID NO: 35761 - DNA, 75 bp, synthetic construct
  source 1..75: mol_type = other DNA
taaagtgccagtcacgtggtcgaccataaaatctatctgggataaaggtatcgagtattttgcagcaaaaccatc

SEQ ID NO: 35762 - DNA, 75 bp, synthetic construct
  source 1..75: mol_type = other DNA
tgaggtggatattctgcgcaatgatgtctgtgatatcagccttaacctgcaactgacggagcgtgtgctggtcag

SEQ ID NO: 35763 - DNA, 75 bp, synthetic construct
  source 1..75: mol_type = other DNA
atgcgtgatgttcagatggttcttgagcgttggggggcgtgggcagctaataatcatgaagatgtgacctggtcg

SEQ ID NO: 35764 - DNA, 75 bp, synthetic construct
  source 1..75: mol_type = other DNA
atgaaaacattacccgacacacacatacgggaggcatcgcgctgcccgtctcccgtcaccatctggcagactctg

SEQ ID NO: 35765 - DNA, 75 bp, synthetic construct
  source 1..75: mol_type = other DNA
cccacaatgttgtgacgatgacgcgatgatcatttgcgggtgcatggcccgtctgaaaaagaacaacagcgattt

SEQ ID NO: 35766 - DNA, 75 bp, synthetic construct
  source 1..75: mol_type = other DNA
agtcgtgaagaagtgctgaacgagctgtgggaacttaaaaaggctggcttcgttgataaaagcgtatacacctgg

SEQ ID NO: 35767 - DNA, 75 bp, synthetic construct
  source 1..75: mol_type = other DNA
atggaaaccgtttttgatgcactgaaagcaatgggaaaagccacgtcggtagaactggctgcgcgacttgatatc

SEQ ID NO: 35768 - DNA, 75 bp, synthetic construct
  source 1..75: mol_type = other DNA
cccgctctcagttaataaacagcaccgatatcctccgggctcgcagggcgaccggcctgatgacccgcgacaatt

SEQ ID NO: 35769 - DNA, 75 bp, synthetic construct
  source 1..75: mol_type = other DNA
tgaccggaacgccaacgacgccaactgcgcgacagggaacgaataatactcagatcgcaaacacggctttcgtta

SEQ ID NO: 35770 - DNA, 75 bp, synthetic construct
  source 1..75: mol_type = other DNA
gtctgtgatatcagccttaacctgcaactgacggagcgtgtgctggtcagtactgacggcagtgtgtcgagtgtt

SEQ ID NO: 35771 - DNA, 75 bp, synthetic construct
  source 1..75: mol_type = other DNA
taaaggaagctacatcgtagggcatacatctgttaaccagcacggcaatttaacaggagtttttgtttgtcaaaa

SEQ ID NO: 35772 - DNA, 75 bp, synthetic construct
  source 1..75: mol_type = other DNA
tgaaaaatacgcactggtgcgtaccgaccagccggaattcagtgcctgtacccgttctcagttaataaacagcat

SEQ ID NO: 35773 - DNA, 75 bp, synthetic construct
  source 1..75: mol_type = other DNA
atgtttgagtcttatatggcagagcgtcttcgccgccgctgggtgcgcctgcgcttatatcgttttcctggttct

SEQ ID NO: 35774 - DNA, 75 bp, synthetic construct
  source 1..75: mol_type = other DNA
tgttctctggatcaagcgtggtgatgtggaagcgatgcagaaagcccggaacagagccagttatctcgtgaaata

SEQ ID NO: 35775 - DNA, 75 bp, synthetic construct
  source 1..75: mol_type = other DNA
ttccgatgatacgcctttgtcgggtggatgttctgaaaccaggaaggcttcagacaaaaagccgggtggatccgc

SEQ ID NO: 35776 - DNA, 75 bp, synthetic construct
  source 1..75: mol_type = other DNA
ggatgttctgataccaggaaggcttcagacaaaaagccgggtgaagccgctgttctctggatcaagcgtggtgat

SEQ ID NO: 35777 - DNA, 75 bp, synthetic construct
  source 1..75: mol_type = other DNA
cagtagagctggatgatgccagccatttacgacctgaacgcagacgccgggatattcttctggaagaggttctga

SEQ ID NO: 35778 - DNA, 75 bp, synthetic construct
  source 1..75: mol_type = other DNA
aagggcaggctattttcaccgccacgaccactgtcgcagcgacatatacactcacggcgaaagtggaacaggccg

SEQ ID NO: 35779 - DNA, 75 bp, synthetic construct
  source 1..75: mol_type = other DNA
ccactgagcagcaaaacctgagtgcgcgcaccgaaaaatccctgtctgaacaggaagaacgcctgtctgagctgg

SEQ ID NO: 35780 - DNA, 75 bp, synthetic construct
  source 1..75: mol_type = other DNA
ttcgcgctgaggtggcggcccttgcgaacaatatgtgtgacctgcgggccacgctgaatgagctggagcaccgct

SEQ ID NO: 35781 - DNA, 75 bp, synthetic construct
  source 1..75: mol_type = other DNA
ccagcgcaccggaaaaattatccgggcaggctgctgacaagatgcaggctggtgtgattctgctggactttatgc

SEQ ID NO: 35782 - DNA, 75 bp, synthetic construct
  source 1..75: mol_type = other DNA
ctgatccacgtccagccattccccatgacgaagttgaacgcagaatggctgaacgctttgctaacatgcgcaagg

SEQ ID NO: 35783 - DNA, 75 bp, synthetic construct
  source 1..75: mol_type = other DNA
tgacggtcagagccgtattcaaatgcttgctaacggtaatgagcaaagaccgctggtgctgtctctgcgcgacgc

SEQ ID NO: 35784 - DNA, 75 bp, synthetic construct
  source 1..75: mol_type = other DNA
tttcagaatttgaaactatcgagcaagaaaacagttacaacgaatggttgcgcgccaaggttgcagcaagccttg

SEQ ID NO: 35785 - DNA, 75 bp, synthetic construct
  source 1..75: mol_type = other DNA
atgaaaatcctgataacgctgctggtgctggccgtgctcgggctgctgtggttgcgccatgagaacggcaattta

SEQ ID NO: 35786 - DNA, 75 bp, synthetic construct
  source 1..75: mol_type = other DNA
tcggcgaaagcatcggcagcaagccagacagcagctaaagcaagtgaagacgcagccagagagtatgcaagtcag

SEQ ID NO: 35787 - DNA, 75 bp, synthetic construct
  source 1..75: mol_type = other DNA
gcggtgctcatgctccggcatttattcgttcacgacgggatacgaccgacgcaaactggtcgccgtgggcgcagc

SEQ ID NO: 35788 - DNA, 75 bp, synthetic construct
  source 1..75: mol_type = other DNA
cagcagaaaaaagaaatggctgcattggtacagaagcaaattgaaagcctctgggctcaactggagcagttgtta

SEQ ID NO: 35789 - DNA, 75 bp, synthetic construct
  source 1..75: mol_type = other DNA
tgcggatgcgcttgctcaaaaaattcgtgaaggatggcaaccatacggcgggccgttttcttcgtatacggatga

SEQ ID NO: 35790 - DNA, 75 bp, synthetic construct
  source 1..75: mol_type = other DNA
cctgatatgcgtggctggacgattaagggcaaacccgccagtggtcgtgccgtattgtctcaggaacaggacggc

SEQ ID NO: 35791 - DNA, 75 bp, synthetic construct
  source 1..75: mol_type = other DNA
gtgcagcttcctcggcaacggcggcaggaaattccgcgaaggcggcaaaaacgtccgagacgaacgctaagtctt

SEQ ID NO: 35792 - DNA, 75 bp, synthetic construct
  source 1..75: mol_type = other DNA
gatagtacagctcagcagtgcgactaacagcacttccgagtcactggcggcaacgccaaaagccgttaaggccgc

SEQ ID NO: 35793 - DNA, 75 bp, synthetic construct
  source 1..75: mol_type = other DNA
aatgccagcctgcgcgcctcgctggacagggcgaacaacgtcgccagtgaacagcagacgaccatcaccatgctg

SEQ ID NO: 35794 - DNA, 75 bp, synthetic construct
  source 1..75: mol_type = other DNA
accagacaggcgtcagcagcgaggggcagcgccacgacggcatccacgaaggcgacagaggctgctggcagtgcg

SEQ ID NO: 35795 - DNA, 75 bp, synthetic construct
  source 1..75: mol_type = other DNA
tgtatcgcggcggacgttatccttgattttaagagtgggcgtggtttttatgagtctcattcgttaatcgttaac

SEQ ID NO: 35796 - DNA, 75 bp, synthetic construct
  source 1..75: mol_type = other DNA
acgaacgcatcatcaagcgccagtagtgccgcttcctcggcaacggcggcaggaaattccgcgaaggcggcaaaa

SEQ ID NO: 35797 - DNA, 75 bp, synthetic construct
  source 1..75: mol_type = other DNA
caggctgaacgtattcgtctggcggataaggctaattttcatattcaccgtctcctgaatatcagcggagggcat

SEQ ID NO: 35798 - DNA, 75 bp, synthetic construct
  source 1..75: mol_type = other DNA
gagcacgatttacatgccctgagcgagcaacagaaggcggactgtgtggtgctgaatccggagaagtcccaccct

SEQ ID NO: 35799 - DNA, 75 bp, synthetic construct
  source 1..75: mol_type = other DNA
ggcgcagcgtgactattttggtgcacatacttataagcgcattgataaagcaggtgtcttccataccgaatggct

SEQ ID NO: 35800 - DNA, 75 bp, synthetic construct
  source 1..75: mol_type = other DNA
tgtggcaggaagggatgctgatgcgcccacaccatttccagcaacagcagcgttacaacgactacctggataacc

SEQ ID NO: 35801 - DNA, 75 bp, synthetic construct
  source 1..75: mol_type = other DNA
tgaggaaattatcgctgaaaataaaccgcccttttctgttttccgcgacaaattcatcaccatgcctggcgggct

SEQ ID NO: 35802 - DNA, 75 bp, synthetic construct
  source 1..75: mol_type = other DNA
caaaagaatggcagaacggaaattatgtttcaggcattacccgtacgccttccggtgctaacgctggcggcggaa

SEQ ID NO: 35803 - DNA, 75 bp, synthetic construct
  source 1..75: mol_type = other DNA
gaaaaatatagaaaagttaattcagattgagcgtaacgcgaaagcgcggatacgcagggcgacaaaatccagaac

SEQ ID NO: 35804 - DNA, 75 bp, synthetic construct
  source 1..75: mol_type = other DNA
aaactgaacgcgaagacatggggcgtggagtttgtgcaggacgggaacaggaaatttctggtccttccgtacggg

SEQ ID NO: 35805 - DNA, 75 bp, synthetic construct
  source 1..75: mol_type = other DNA
cctggcagaccatcgtgaacggcaggctggggctgcatgacccgaacgcgcctgaaaaccggcgggcgctggtca

SEQ ID NO: 35806 - DNA, 75 bp, synthetic construct
  source 1..75: mol_type = other DNA
tgtggtcgggatgtgaagtttactcttgaagtgctccggggtgatagtgttgagaagacctctcgggtatggtca

SEQ ID NO: 35807 - DNA, 75 bp, synthetic construct
  source 1..75: mol_type = other DNA
ctgggcggtgaccgacctcgatctcagcttgcgcaacatgaccttcagtaaagatgactggcagacacaggaagg

SEQ ID NO: 35808 - DNA, 75 bp, synthetic construct
  source 1..75: mol_type = other DNA
gtgaagaaatccggttacagattattccttacctcgtgaattttgcctttgctgattactccaggtctgcggcaa

SEQ ID NO: 35809 - DNA, 75 bp, synthetic construct
  source 1..75: mol_type = other DNA
atgagcacaaaaccactcttcctgttacggaaagcgaaaaaatcatccggtgaacctgacgtcgtcctgtgggca

SEQ ID NO: 35810 - DNA, 75 bp, synthetic construct
  source 1..75: mol_type = other DNA
ctggcgcagctgcgccatctggctacgcgcctggtgcgtggctggacccaccttgaaagacagaaaggcgggatt

SEQ ID NO: 35811 - DNA, 75 bp, synthetic construct
  source 1..75: mol_type = other DNA
gagctggggttgattacctaccagacggaatatgacccgcttatcgggtgctacattccgaccgatatcacgttc

SEQ ID NO: 35812 - DNA, 75 bp, synthetic construct
  source 1..75: mol_type = other DNA
acagaaggcaatcccacactacctggcatttacgatgtcagtgtgtatgttaacgatcaacccatcatgagccaa

SEQ ID NO: 35813 - DNA, 75 bp, synthetic construct
  source 1..75: mol_type = other DNA
tggcgattgatgttgattatctcgatcccggtaacgggcctgacggcgatatcgaacatcacaccgaaataaccc

SEQ ID NO: 35814 - DNA, 75 bp, synthetic construct
  source 1..75: mol_type = other DNA
tatgcgcaaggaagacgccatctacggtggcgaaatgagcgcccaccattacttccgtgatttcgcttactgcga

SEQ ID NO: 35815 - DNA, 75 bp, synthetic construct
  source 1..75: mol_type = other DNA
atccgctggccaaccgcgtccagtgctccatcaccacgctggccattgagtgcggactggcgacagagtccggtg

SEQ ID NO: 35816 - DNA, 75 bp, synthetic construct
  source 1..75: mol_type = other DNA
agaaactgaaaaagttgctggcgctggccgcatccggcaaccctcacgaggccgctctggcactgcgccgtgccc

SEQ ID NO: 35817 - DNA, 75 bp, synthetic construct
  source 1..75: mol_type = other DNA
aaagtccgttcaaagaatggtccgcagcacttcgtgcaaccccgggtattctggactattcccgcgccgctattt

SEQ ID NO: 35818 - DNA, 75 bp, synthetic construct
  source 1..75: mol_type = other DNA
cacacattccgacattgctatgagtgatattgatgaaaccatcagtcattactggccgacaggcagtctccgtcc

SEQ ID NO: 35819 - DNA, 75 bp, synthetic construct
  source 1..75: mol_type = other DNA
gcgaagtggaacgtcgtgtgaaggagcgcatgattctgtcacgtaaccgcaattacagccggctggccacagctt

SEQ ID NO: 35820 - DNA, 75 bp, synthetic construct
  source 1..75: mol_type = other DNA
caaagaaacaactttgtttatggcaagcacaaagagagcgcatgaatgagcgcgaatttctttcctccccatccg

SEQ ID NO: 35821 - DNA, 75 bp, synthetic construct
  source 1..75: mol_type = other DNA
ttttcgtcacgataatgtctctggtgtaacaggaaagtcaacactatatcaactggctgcatgggcacttaaaga

SEQ ID NO: 35822 - DNA, 75 bp, synthetic construct
  source 1..75: mol_type = other DNA
tgctcgtgaagcggcgagtggtatgccagacccgacgctgccggaggtgtccggaggtagtggcagagcggacga

SEQ ID NO: 35823 - DNA, 75 bp, synthetic construct
  source 1..75: mol_type = other DNA
accggcctgatgacccgcgacaactacagaacggtaaatgacattacccagggtaagcatccggaggcgaaacga

SEQ ID NO: 35824 - DNA, 75 bp, synthetic construct
  source 1..75: mol_type = other DNA
ggggtaaacaattcacaggtgtggttatttatagcctgaagtcaggttctcaccacaaaatcacgccttatgtca

SEQ ID NO: 35825 - DNA, 75 bp, synthetic construct
  source 1..75: mol_type = other DNA
gtgacgcgggtgcgcttcgtgaaatcagcccagcggctcggattcagcctcgacgagatcgcagagctgctgagg

SEQ ID NO: 35826 - DNA, 75 bp, synthetic construct
  source 1..75: mol_type = other DNA
ccgaggacagccagttcctggaaacccgcaagtttcagctggaagaaatctgtcgtcttttccgcgtgccgctgc

SEQ ID NO: 35827 - DNA, 75 bp, synthetic construct
  source 1..75: mol_type = other DNA
ggaagatatagatcttaaagcaaggactataaccatccgtaggaattatacaaaacttggcgaattcactccacc

SEQ ID NO: 35828 - DNA, 75 bp, synthetic construct
  source 1..75: mol_type = other DNA
ctgactgaatttatggggttaccaccgccggttgctgagggcgaaatggatccacatgaacgcaaagcctggtat

SEQ ID NO: 35829 - DNA, 75 bp, synthetic construct
  source 1..75: mol_type = other DNA
gctggacgatcagtttgccgaactgaaagccgatgatgcaatcagcgagcaactggcacaattaaaagccaaaat

SEQ ID NO: 35830 - DNA, 75 bp, synthetic construct
  source 1..75: mol_type = other DNA
ggcgacaactggcggcccccaaacgcccgtcggggccaacgccaattgagttgctgaaacaggaatatgaacgcc

SEQ ID NO: 35831 - DNA, 75 bp, synthetic construct
  source 1..75: mol_type = other DNA
agcggacacggtgcattttccgtgggatatgctcaggttcacccgggcggcgtaccggcattgtccggtaccggt

SEQ ID NO: 35832 - DNA, 75 bp, synthetic construct
  source 1..75: mol_type = other DNA
atggaccgctgccgggcgggtgaaacatggcctccggacctggctgagtttgtggcgctgatttcagaaagcggg

SEQ ID NO: 35833 - DNA, 75 bp, synthetic construct
  source 1..75: mol_type = other DNA
catttacgcccaccgtcaaatacctaagtaccgcgatattcacaaagaaccatacgtgatttttgtcgtcaatct

SEQ ID NO: 35834 - DNA, 75 bp, synthetic construct
  source 1..75: mol_type = other DNA
attgaggggtcggtgtggccaaaatccattcgcggctcgacgcctaaaatcaaaggcacctgccagatcgaaaaa

SEQ ID NO: 35835 - DNA, 75 bp, synthetic construct
  source 1..75: mol_type = other DNA
ccacctgggtacagattgtctatgactggctggatgcactgaaagatcccaacggcctgaaaacctttgtgaaca

SEQ ID NO: 35836 - DNA, 75 bp, synthetic construct
  source 1..75: mol_type = other DNA
ggtggtttatctgacggcgggcattgactcgcagcgaaaccgttttgagatgtatgtctggggatgggcaccggg

SEQ ID NO: 35837 - DNA, 75 bp, synthetic construct
  source 1..75: mol_type = other DNA
tgccgatcaacagggaaccccgcaacaggttcgtaacgtaatcgataaagtccggcagaataaaattccggcggt

SEQ ID NO: 35838 - DNA, 75 bp, synthetic construct
  source 1..75: mol_type = other DNA
atgatttcagacgcacagaaggcagctaatgcagccggtgcgatagctacagggcttttatctctcaatattccg

SEQ ID NO: 35839 - DNA, 75 bp, synthetic construct
  source 1..75: mol_type = other DNA
agatgttgctgggagtggaggcttattttattgagcataaatcacgcaacagccttctttttcagcccacggact

SEQ ID NO: 35840 - DNA, 75 bp, synthetic construct
  source 1..75: mol_type = other DNA
gttacaccctgtaaggctcagtggcacgcagttgctggctgaggacgcacaggccgtggaactggtgctgacgtg

SEQ ID NO: 35841 - DNA, 75 bp, synthetic construct
  source 1..75: mol_type = other DNA
ggagtcattagttacagaacatttaccaggtctgaaaccttctgaggtgctcaaaaaaacaattattgaccgtat

SEQ ID NO: 35842 - DNA, 75 bp, synthetic construct
  source 1..75: mol_type = other DNA
ccatcgcccaggtggtgggctacaagggccgcgtggtgtttgacgccaccaaaccggacggcacgccgcgcaaac

SEQ ID NO: 35843 - DNA, 75 bp, synthetic construct
  source 1..75: mol_type = other DNA
agccgtacgccatcgccaaaattgccgggatcaagctgtgcgaatcttataaccgccagcacggccgcgactatc

SEQ ID NO: 35844 - DNA, 75 bp, synthetic construct
  source 1..75: mol_type = other DNA
ggcacagaatgcgccggacgtggtggtgtggggcagcggtacgccgatgcgcgaatttctgcacgtcgatgatat

SEQ ID NO: 35845 - DNA, 75 bp, synthetic construct
  source 1..75: mol_type = other DNA
atggctttatcttccgcgatgccaccgcagccgaaggtgaatgccttgaaaagcaaataacgctggatgacttcc

SEQ ID NO: 35846 - DNA, 75 bp, synthetic construct
  source 1..75: mol_type = other DNA
atgtcgcagacagaaaatgcagcgacttcctcattgagtcaaaagcggtttgtgcgcagaggtaagtctatgtct

SEQ ID NO: 35847 - DNA, 75 bp, synthetic construct
  source 1..75: mol_type = other DNA
ggaaatcacccacgttatccgtggcgaagaccatatcaacaacacaccgcgccagattaacattcttaaggctct

SEQ ID NO: 35848 - DNA, 75 bp, synthetic construct
  source 1..75: mol_type = other DNA
cttcctcatcaggtacaaagcgagcatatagaaaagataatcctctgacgcttgcagaacgtcagcaggcatccc

SEQ ID NO: 35849 - DNA, 75 bp, synthetic construct
  source 1..75: mol_type = other DNA
cgccgcagggcagcgttgctgttccaccgccgacggcgttttatcccgggaatggtgtcacgccaccaccacagg

SEQ ID NO: 35850 - DNA, 75 bp, synthetic construct
  source 1..75: mol_type = other DNA
gcccggcccggaaggcgaaccacagccaggaaacacccccgtatccttcccgccgcagggcagcgttgctgttcc

SEQ ID NO: 35851 - DNA, 75 bp, synthetic construct
  source 1..75: mol_type = other DNA
cagatatttatcgccgcaccacaactgtcagcagtggctctcccctgggccgaatggcgtgaggagccacaggcg

SEQ ID NO: 35852 - DNA, 75 bp, synthetic construct
  source 1..75: mol_type = other DNA
cagatcatatccatatgcttgtggagatcccgcccaaaatgagcgtatcaggctttatgggatatctgaaaggga

SEQ ID NO: 35853 - DNA, 75 bp, synthetic construct
  source 1..75: mol_type = other DNA
gtaacaataaatggcgataaatcatcagtttatgaatcagtctctggcgtctatccagagatgaaatacactgct

SEQ ID NO: 35854 - DNA, 75 bp, synthetic construct
  source 1..75: mol_type = other DNA
catggttgctatgtgggtttgagcggctggaacactgtggcatattctatcaatatcggctctgtcttaaggttt

SEQ ID NO: 35855 - DNA, 75 bp, synthetic construct
  source 1..75: mol_type = other DNA
tatatcaaagaagcgattccagggatgaaaaatctgatcgccgcactggaggataacgacgatcccattatttca

SEQ ID NO: 35856 - DNA, 75 bp, synthetic construct
  source 1..75: mol_type = other DNA
cttgtccgacaacatcactcagtcttcctgccctactttgggatacccgaccggagatctctgaaagcgagcttg

SEQ ID NO: 35857 - DNA, 75 bp, synthetic construct
  source 1..75: mol_type = other DNA
gttaaaatcctgtcaacctgggataaggcgatttcggtgacggaaaagctgctcgccaatagtcagcagcagaaa

SEQ ID NO: 35858 - DNA, 75 bp, synthetic construct
  source 1..75: mol_type = other DNA
atgtgctggcggttgacccgacgcgtatgacgccagcggtgcgccataacgacgggctggactatgtgccgacgg

SEQ ID NO: 35859 - DNA, 75 bp, synthetic construct
  source 1..75: mol_type = other DNA
gggagttcggggagctaaaaggcaaaaaacactatcacctgctgctgctggtcaaccgggatacctggtgtcgtg

SEQ ID NO: 35860 - DNA, 75 bp, synthetic construct
  source 1..75: mol_type = other DNA
gcaccggaaggttacccacagcagtcacaatatgcgcagcctgcagtgcaatataatgagccgctgcaacaacca

SEQ ID NO: 35861 - DNA, 75 bp, synthetic construct
  source 1..75: mol_type = other DNA
accacctttgcaaaaaagacgttgaagaaagcaaagctattgaaagaatgcttcacttcatgcacgggattttat

SEQ ID NO: 35862 - DNA, 75 bp, synthetic construct
  source 1..75: mol_type = other DNA
taaccagggatgtccgggagagtttataaatacacttgtggaaaaggaggacatttatctgaaagcgtcccccgg

SEQ ID NO: 35863 - DNA, 75 bp, synthetic construct
  source 1..75: mol_type = other DNA
attcaggaaattccgggggatattttcgcggcggcagcaacttacgacggtgaagtcattaccatttatccggac

SEQ ID NO: 35864 - DNA, 75 bp, synthetic construct
  source 1..75: mol_type = other DNA
ccttgcactgtcaagaacatcgcggcgtctgtctcaggaagtcaccgagcgtttttatgtgtgcacggatccggg

SEQ ID NO: 35865 - DNA, 75 bp, synthetic construct
  source 1..75: mol_type = other DNA
gatcagcattacaagaaatatcgctgacagaattacgcaaggtaagaacattattacccccccttcttgaacaga

SEQ ID NO: 35866 - DNA, 75 bp, synthetic construct
  source 1..75: mol_type = other DNA
agtggcaaacggaacctgcacctgcaccgttccatgtggttgcctggccggaacaggatcaagagcgtaacgcct

SEQ ID NO: 35867 - DNA, 75 bp, synthetic construct
  source 1..75: mol_type = other DNA
ttctctgtggatcgctgggatgagggctggactgaaagcgtcaaacgtcaggtggtgaaggatgctttttatatt

SEQ ID NO: 35868 - DNA, 75 bp, synthetic construct
  source 1..75: mol_type = other DNA
atgaatagtctgctgccaccgggttcaacaccactggagcgccgactggcgcaaacctgcagcgggatttctgat

SEQ ID NO: 35869 - DNA, 75 bp, synthetic construct
  source 1..75: mol_type = other DNA
gtcgttcgaaaagcgttacacgctcaatgtgattgtgaccgactttaccggtgattttgacctgctcatcgtgcc

SEQ ID NO: 35870 - DNA, 75 bp, synthetic construct
  source 1..75: mol_type = other DNA
ggaattcataacgagtggagttgtcgcacatcaaataattgcgccactacagtgttctcaaccagatctggatac

SEQ ID NO: 35871 - DNA, 75 bp, synthetic construct
  source 1..75: mol_type = other DNA
attgttaaaggtatggaaggcgcaatcaatgcgaagaccgtaacctatgacttcgagcgtctgatggaaggcgct

SEQ ID NO: 35872 - DNA, 75 bp, synthetic construct
  source 1..75: mol_type = other DNA
atagaaaacattctcaatcagaacaacagcatcagcccggaagcagaacatttgcttctgaataactgtaacgca

SEQ ID NO: 35873 - DNA, 75 bp, synthetic construct
  source 1..75: mol_type = other DNA
atgcaccagtaatgatggcttcctattttggtgtatccgatgatgctatacgttatcgcctaaagaatttagggc

SEQ ID NO: 35874 - DNA, 75 bp, synthetic construct
  source 1..75: mol_type = other DNA
aaaatccaatcagaggtacttataaccatgctcaatatctcattggtagaaaaaaaatgatgcaatggtattctg

SEQ ID NO: 35875 - DNA, 75 bp, synthetic construct
  source 1..75: mol_type = other DNA
tctgcagaagcgccttcaggaattgaacgactggcttggagaagaagtcatgcgttttgaagattataatttagg

SEQ ID NO: 35876 - DNA, 75 bp, synthetic construct
  source 1..75: mol_type = other DNA
agtcggcgttcagtttggcagtgcggctgaaatggccattttgcaggaaattatcaatgcccggtatgagggtat

SEQ ID NO: 35877 - DNA, 75 bp, synthetic construct
  source 1..75: mol_type = other DNA
gcaatccggcccgcctgccgtggctggcctgcgggttactgttgatcgctttttttgatttcatcggtaactatg

SEQ ID NO: 35878 - DNA, 75 bp, synthetic construct
  source 1..75: mol_type = other DNA
ggcggaaactgggggaatatcagcctgtaccgacagatattttcagtcaggtggggacacccggtcgttatgatc

SEQ ID NO: 35879 - DNA, 75 bp, synthetic construct
  source 1..75: mol_type = other DNA
cgctggtatgagcctcctgtcagctttgacggactggcgcgcaccttccgcgctgccgtgcatcacagttcacca

SEQ ID NO: 35880 - DNA, 75 bp, synthetic construct
  source 1..75: mol_type = other DNA
cggctgaatatgtaaagcgtctgcgtgaagagtgcctgcgggagaacaaacccctgcaccgccatacccgcttca

SEQ ID NO: 35881 - DNA, 75 bp, synthetic construct
  source 1..75: mol_type = other DNA
ccagaacaagatccagtaatcatactcaatcgtaatgatagtaacgtgcgcaaacgatttacgtgtgcgcatgag

SEQ ID NO: 35882 - DNA, 75 bp, synthetic construct
  source 1..75: mol_type = other DNA
acgcatcagaggtttaccggatttatacctggataaagagcagtaaaggcatccgggttccgaccacgaagaaat

SEQ ID NO: 35883 - DNA, 75 bp, synthetic construct
  source 1..75: mol_type = other DNA
agcatgaaggcgctggaagatgcaagggaacgcgcgttagtggttggcttttcgctgattatcatgccggatatg

SEQ ID NO: 35884 - DNA, 75 bp, synthetic construct
  source 1..75: mol_type = other DNA
attttgacgggaaaactattgcgttaccacaggtgcgtaaaaattacccttttgaggggtttgtggagtggcatc

SEQ ID NO: 35885 - DNA, 75 bp, synthetic construct
  source 1..75: mol_type = other DNA
gggcgcggtgtgcgactggtggggctgcatgtgacgttgcttgacccgcaaatggaaagacaactggtgctggga

SEQ ID NO: 35886 - DNA, 75 bp, synthetic construct
  source 1..75: mol_type = other DNA
tctggggctggaaatgggcgcagacgattacctgccaaagcccttttctgttcaggagttgattgcgcgcgtcaa

SEQ ID NO: 35887 - DNA, 75 bp, synthetic construct
  source 1..75: mol_type = other DNA
taagttagctgtgcgccctgctggtgtatcacctgagcaatacaatgcttttggggcgcgtaatattaaagttaa

SEQ ID NO: 35888 - DNA, 75 bp, synthetic construct
  source 1..75: mol_type = other DNA
ttcgacatccgccatgtgtcccgggacagctatatcgaggttggtggtaatcgttacagcgttcccgaagcgctg

SEQ ID NO: 35889 - DNA, 75 bp, synthetic construct
  source 1..75: mol_type = other DNA
gaagaagtatcgggtgttgctgaaccgtgttgatacatcaactgcacctgatattgagtggccggaagaaccaga

SEQ ID NO: 35890 - DNA, 75 bp, synthetic construct
  source 1..75: mol_type = other DNA
tggagtatgtggctggtattctgaagcaatctcgccatctggatgacatcgaggcaagggagtggctgaaaagtt

SEQ ID NO: 35891 - DNA, 75 bp, synthetic construct
  source 1..75: mol_type = other DNA
gacgcctatcagaattaattgagctttggtattccctgtatggtcagacactcgcagaccccaagcgcctcatgg

SEQ ID NO: 35892 - DNA, 75 bp, synthetic construct
  source 1..75: mol_type = other DNA
tatcactcaactgaacggcctgacagataagtggttttacaggctcatcagggatggggcctttccggctcccat

SEQ ID NO: 35893 - DNA, 75 bp, synthetic construct
  source 1..75: mol_type = other DNA
tccgagcctctcgtcaaactgctggaggaaaatgcttatcgtgagcttatctggcgtcagcgtgtgaatgaggcc

SEQ ID NO: 35894 - DNA, 75 bp, synthetic construct
  source 1..75: mol_type = other DNA
gccgataagatggatctgcgggagtctcagggatggctgaaccgtggttatgaaggcgcagcagttggtgcagcg

SEQ ID NO: 35895 - DNA, 75 bp, synthetic construct
  source 1..75: mol_type = other DNA
ctgcaatggtagttcgtaggcggcagttgattacgatgctggttgccgagagaaaccggttgcaccctgctcatc

SEQ ID NO: 35896 - DNA, 75 bp, synthetic construct
  source 1..75: mol_type = other DNA
ggtgcaattggcgggaattcgcaaatgctttgatggtaaagaggtcattccccagctggatctgactatcaacaa

SEQ ID NO: 35897 - DNA, 75 bp, synthetic construct
  source 1..75: mol_type = other DNA
aaaacgctgtccaatgtcggggtgaacggtgttaccggcatcagcgcatctgtattctgggatttgcaggagtcc

SEQ ID NO: 35898 - DNA, 75 bp, synthetic construct
  source 1..75: mol_type = other DNA
gacggttgtggcgcacgtcttcggtgaacgcactctggccacactggaacgtcttctgagcctgctgtcggcctt

SEQ ID NO: 35899 - DNA, 75 bp, synthetic construct
  source 1..75: mol_type = other DNA
gcggctaacgccttcaaccctgccagggatatggtacgacgggacgatgatctggatgacctctgtcaggtgcag

SEQ ID NO: 35900 - DNA, 75 bp, synthetic construct
  source 1..75: mol_type = other DNA
gtgaaaattacattaacaatatttatttttctgcttactgcctttcaggctgcaaatgcaggtggaatacctggt

SEQ ID NO: 35901 - DNA, 75 bp, synthetic construct
  source 1..75: mol_type = other DNA
gcttaaccgggcgatcaatgatgcggagtcggtactggggacaacccgccgtcgtccgctgggagtgaggttatg

SEQ ID NO: 35902 - DNA, 75 bp, synthetic construct
  source 1..75: mol_type = other DNA
gcgcagttcatccatgtttaccaaaatcatgaataccgccccggctactgtggatcccgtaacagtatgtagtaa

SEQ ID NO: 35903 - DNA, 75 bp, synthetic construct
  source 1..75: mol_type = other DNA
atgacatatgaagtcatcattactcctgaggccgaacaacaaataatcaacctgcacagatatataacggagaaa

SEQ ID NO: 35904 - DNA, 75 bp, synthetic construct
  source 1..75: mol_type = other DNA
ccgcaacgcgaagcacaaccctctgcagcgctttaaggccaaccctgaaaacgtcttttccgctgccacgctggc

SEQ ID NO: 35905 - DNA, 75 bp, synthetic construct
  source 1..75: mol_type = other DNA
atcactgatgtgcttactgccagcggtaaggcgggtgaatccggtacgctggcccgctcgctggatgccatcgct

SEQ ID NO: 35906 - DNA, 75 bp, synthetic construct
  source 1..75: mol_type = other DNA
agtgatccgcacgcttgaactggaatctgaacccgtcaccaaattgctgcaggagaacgcttaccgtgagttgct

SEQ ID NO: 35907 - DNA, 75 bp, synthetic construct
  source 1..75: mol_type = other DNA
tcttgtccaccagcttggtaacacagatctcacttctgccgctgggaagttgctattatctatgctcgccgcggt

SEQ ID NO: 35908 - DNA, 75 bp, synthetic construct
  source 1..75: mol_type = other DNA
gcgcagaaatcatcccgtatcgcgtggaagccaccatttttctctatccggggccggaagcagagccggtaatgg

SEQ ID NO: 35909 - DNA, 75 bp, synthetic construct
  source 1..75: mol_type = other DNA
tgttcagcgtgtggaactggcttcaccgctggctgatgtggtcctgaacaaaacacaggccgcatcatgtacgca

SEQ ID NO: 35910 - DNA, 75 bp, synthetic construct
  source 1..75: mol_type = other DNA
gatgtggtcctgaacaaaacgcaggcggcatcatgtacgcagtggagcgtgaccaacgggggaacggatgaatag

SEQ ID NO: 35911 - DNA, 75 bp, synthetic construct
  source 1..75: mol_type = other DNA
acgcagccagagaatcagaatgcatctcccattatttagcatttgtgcagctaaaagccgatcaggcactggata

SEQ ID NO: 35912 - DNA, 75 bp, synthetic construct
  source 1..75: mol_type = other DNA
cggatggcacaaaagcctgtccaatgtgggcgttaacggtgtcaccggaatttctgctgatgtgttctgggatct

SEQ ID NO: 35913 - DNA, 75 bp, synthetic construct
  source 1..75: mol_type = other DNA
accaatgtgcagagcgccattgcgaaagccggtaaaaaaggcacgctgtctgcctccctgcaggccatcgccgac

SEQ ID NO: 35914 - DNA, 75 bp, synthetic construct
  source 1..75: mol_type = other DNA
gtcggtgaacgacaaagacactctgaaagccggaaaactcaccatcgattacgactacacgccagtgccaccact

SEQ ID NO: 35915 - DNA, 75 bp, synthetic construct
  source 1..75: mol_type = other DNA
gatgcacgcgctgattgatatttctgttatcgcagacaaggcgcataagcacgccaccagcgaaacagaatatgc

SEQ ID NO: 35916 - DNA, 75 bp, synthetic construct
  source 1..75: mol_type = other DNA
tcgacacattaaaaaaaatatcagaagcggaagatgaaatggctaaagatgccgtgaagcgtagccaacatatgg

SEQ ID NO: 35917 - DNA, 75 bp, synthetic construct
  source 1..75: mol_type = other DNA
aaaccattatcactgatactggtgccaaaaaattagctcaggcagccgcgccagatggtaatcctgtccgcctga

SEQ ID NO: 35918 - DNA, 75 bp, synthetic construct
  source 1..75: mol_type = other DNA
ttgatgcaatcagaggggctttttacgatgcaggaacacgatcagcgagaatgccgaataacacaactactatag

SEQ ID NO: 35919 - DNA, 75 bp, synthetic construct
  source 1..75: mol_type = other DNA
tggatatcgggtacatctctgaaatcgacccgacatggacggacagcagcctgaccactattctcaacccggagg

SEQ ID NO: 35920 - DNA, 75 bp, synthetic construct
  source 1..75: mol_type = other DNA
acgaagacctgatgaataaccagaaaatcccggacagtggcgttctgacgcagaaagtgaaagagcagattgctg

SEQ ID NO: 35921 - DNA, 75 bp, synthetic construct
  source 1..75: mol_type = other DNA
tgtctgtatacgccgcttttttcttcctgaactctcgttataccttcatgaattcaacgttcaatgttggcctgg

SEQ ID NO: 35922 - DNA, 75 bp, synthetic construct
  source 1..75: mol_type = other DNA
gcgaggtcggtgatgttgccggaagtggtcgcgtatcaatggcgcatggtcggacatcacaggcggtaggcgtta

SEQ ID NO: 35923 - DNA, 75 bp, synthetic construct
  source 1..75: mol_type = other DNA
gcgatgatctgaaaaatttgcgagtaacttttagttacctgcaaatttcccccaaaacccgctccctcatcctct

SEQ ID NO: 35924 - DNA, 75 bp, synthetic construct
  source 1..75: mol_type = other DNA
gaagctctgcaacaggccattgatgataatttctggcaagccgaataccgcgactaccgccgtacctccatctaa

SEQ ID NO: 35925 - DNA, 75 bp, synthetic construct
  source 1..75: mol_type = other DNA
cggaagatatctgggatcgctgcgcctatgtgctgtcagtaaaaatgcaggatccacagtttgccgggcagacca

SEQ ID NO: 35926 - DNA, 75 bp, synthetic construct
  source 1..75: mol_type = other DNA
tgatctggaagttgaatcatcgactggtgtcgctcagtacgctgaccgcctgttcctctctgcaaccactgacgg

SEQ ID NO: 35927 - DNA, 75 bp, synthetic construct
  source 1..75: mol_type = other DNA
tgatgatatgttaattattgcggttgttgcggtaggtaaacgagaacgtagtaacgtttattatctcgccagtga

SEQ ID NO: 35928 - DNA, 75 bp, synthetic construct
  source 1..75: mol_type = other DNA
actcaggatgaaggtccgtgataaagaatgggttccccgggtggagtgggtggagagttgtccgtttaataaagc

SEQ ID NO: 35929 - DNA, 75 bp, synthetic construct
  source 1..75: mol_type = other DNA
acccgtttgccaatatttccaacatcaatgaatccggggaacgtatccgcgatcagctggcggtactggccagcc

SEQ ID NO: 35930 - DNA, 75 bp, synthetic construct
  source 1..75: mol_type = other DNA
ttaaatcctgggccattgccgatatcgtaggtaaaccccctgagtggttccagttcgacaacgacaacctgctgc

SEQ ID NO: 35931 - DNA, 75 bp, synthetic construct
  source 1..75: mol_type = other DNA
ccgttaaaaattacccatatggcggtaggcgatggcggcggaacattaccaacgccggacgcaaagcagacggca

SEQ ID NO: 35932 - DNA, 75 bp, synthetic construct
  source 1..75: mol_type = other DNA
gatcgtgccgcgttaaccgcgttgacaagtgttggacgtgccattcttggtaaaaccagcactcagggagttctt

SEQ ID NO: 35933 - DNA, 75 bp, synthetic construct
  source 1..75: mol_type = other DNA
cttttgtgaaatcggcgattgcaggaatggtgggttctgcacctgcggccctagatacactgaacgaactggcgg

SEQ ID NO: 35934 - DNA, 75 bp, synthetic construct
  source 1..75: mol_type = other DNA
gggagaaaggcagtccgctgcataaatctacgcaacaggttagaacccaaggcccgatacggcatgcggactgca

SEQ ID NO: 35935 - DNA, 75 bp, synthetic construct
  source 1..75: mol_type = other DNA
gatgctgaggctggcaggatgtggggacggtggtgcacttcagcccggaaaacggggcgttgcgatgacagtctc

SEQ ID NO: 35936 - DNA, 75 bp, synthetic construct
  source 1..75: mol_type = other DNA
agttgcgcttcaccggctctatccagcgtgacgataccggagaagtgcaggccgtggagcttgtggtgcgtggac

SEQ ID NO: 35937 - DNA, 75 bp, synthetic construct
  source 1..75: mol_type = other DNA
gtcaagatcaccgaactgctgctggaggtggacgaatggacgggcttcactcggcatttcgcgcatctgaaatcg

SEQ ID NO: 35938 - DNA, 75 bp, synthetic construct
  source 1..75: mol_type = other DNA
cgagaagttcaccagcctcaagcagtccagcgaattgccgctggccgtggccaccgactgcgaacaatatctgca

SEQ ID NO: 35939 - DNA, 75 bp, synthetic construct
  source 1..75: mol_type = other DNA
ggcacggtgacggcctccctgatgctccgaaagctcggcagctacccacgccagaacggcctggccgtggcgctc

SEQ ID NO: 35940 - DNA, 75 bp, synthetic construct
  source 1..75: mol_type = other DNA
ctccagcgtgatgcccgcgccctgaagcggggattatgggcagataaaaatccggtaccaccatggacctggaga

SEQ ID NO: 35941 - DNA, 75 bp, synthetic construct
  source 1..75: mol_type = other DNA
tgcagctatgaatcttgctaacttccagcatccagaattaatcaccatgagacaagatgcggcattaacgaatac

SEQ ID NO: 35942 - DNA, 75 bp, synthetic construct
  source 1..75: mol_type = other DNA
gaatatgctattagctggtagtgctatctatgcaggttatgaaagattagcttctacacctgaacgaatggaagc

SEQ ID NO: 35943 - DNA, 75 bp, synthetic construct
  source 1..75: mol_type = other DNA
aataagcaatataggttaatttttaagtgggttaacggaaaggccgaggacttgtatctcgaccctcacaaatac

SEQ ID NO: 35944 - DNA, 75 bp, synthetic construct
  source 1..75: mol_type = other DNA
tgcgcgcgaggggcgcaaggattacagcgttcaccgcatcacgctggatgatgccatcgctgacgggttgtaccg

SEQ ID NO: 35945 - DNA, 75 bp, synthetic construct
  source 1..75: mol_type = other DNA
cagagcaaacagcagccgtccagtgctggctgatgaaggttttggctattgtcgatgccaccctgattgatgcgg

SEQ ID NO: 35946 - DNA, 75 bp, synthetic construct
  source 1..75: mol_type = other DNA
gtcgccgctcagtactttccttattgatatctgccttgatatatgccccgcccgggatggctgccttcactacta

SEQ ID NO: 35947 - DNA, 75 bp, synthetic construct
  source 1..75: mol_type = other DNA
gcagaatacgtcctgtgttgaatcacaggtaacatccgtaggtccggatgcctttactgctgatgtatcccccga

SEQ ID NO: 35948 - DNA, 75 bp, synthetic construct
  source 1..75: mol_type = other DNA
cccttgtcatgaatggattcgccggaggcggagctagcgaaaaacgcgttgttctcatcacgcctcacatgcgtt

SEQ ID NO: 35949 - DNA, 75 bp, synthetic construct
  source 1..75: mol_type = other DNA
accctcttactgtcgatgtgacgccgccaacctactcttcgcttgccccggtttatagtaactatgggcaggtta

SEQ ID NO: 35950 - DNA, 75 bp, synthetic construct
  source 1..75: mol_type = other DNA
tcaaaaatgcgtttcatggtcgcacgctgtttactgtcagtgcgggtgggcagccagcctattcacaggattttg

SEQ ID NO: 35951 - DNA, 75 bp, synthetic construct
  source 1..75: mol_type = other DNA
gtttcccggtcgcatcatgctggcgaacacctgtatgtgggattaccggggagatgaatgcgggtataacggtcc

SEQ ID NO: 35952 - DNA, 75 bp, synthetic construct
  source 1..75: mol_type = other DNA
ccttaaatagtcctgcactgaccggaacgccaacaacaccaactgcgcgacagggaacgaataatacccaaatcg

SEQ ID NO: 35953 - DNA, 75 bp, synthetic construct
  source 1..75: mol_type = other DNA
gtgagggccagggaacaagtggcgaaaatcgtatcaaagaatgatccagatacaaaaaaagtgtggtgtaaatat

SEQ ID NO: 35954 - DNA, 75 bp, synthetic construct
  source 1..75: mol_type = other DNA
gacagaaccacgcgtgaagtggtgcttacagatgcagggcagcagctggctttgcgtcttgagcgactgctggat

SEQ ID NO: 35955 - DNA, 75 bp, synthetic construct
  source 1..75: mol_type = other DNA
agatactatcagtcaaaaggactgattaataaagatcaattaactaaccaagttgcattatattatcaacaacaa

SEQ ID NO: 35956 - DNA, 75 bp, synthetic construct
  source 1..75: mol_type = other DNA
attaaaaatgagattagagatctaggctattatcttttagtatatcgtaaaaaaatgcgcaattttatgcggcgt

SEQ ID NO: 35957 - DNA, 75 bp, synthetic construct
  source 1..75: mol_type = other DNA
atgacatccccggaccttatacaagctgatctgcaccgaatgtcctggtctcagctggcaaaagccgcggaagag

SEQ ID NO: 35958 - DNA, 75 bp, synthetic construct
  source 1..75: mol_type = other DNA
tggtgacattggtggtagtatcacttcagaagccggaggtaagtatacagagtacaaaatgaagcaggaaggtgg

SEQ ID NO: 35959 - DNA, 75 bp, synthetic construct
  source 1..75: mol_type = other DNA
gccctggccatttctcacaaaacaaagctgctcgacccgctggagattcgcgaccttcacaaactggtacgcgac

SEQ ID NO: 35960 - DNA, 75 bp, synthetic construct
  source 1..75: mol_type = other DNA
ttaaacacagcggtattgccgctggagcgctggtggtgacatcggcagcaccgctccccgcatgggcagaagaga

SEQ ID NO: 35961 - DNA, 75 bp, synthetic construct
  source 1..75: mol_type = other DNA
ttggcaacaacggctggctcatttcgacccacgcgccgcagtacatgccgacctttgaactgaataaagccattg

SEQ ID NO: 35962 - DNA, 75 bp, synthetic construct
  source 1..75: mol_type = other DNA
aatacttccatcagctgaaaaaatctggcaaaccagtgattgccattgatcctatccgctccgaaaccatcgaat

SEQ ID NO: 35963 - DNA, 75 bp, synthetic construct
  source 1..75: mol_type = other DNA
caatgcttgtaactcacgcaatgcgtgttgtgtacaatgcatctcttgcggtaggcattcatgggcttttcgttg

SEQ ID NO: 35964 - DNA, 75 bp, synthetic construct
  source 1..75: mol_type = other DNA
atgtatacagaatcaaacgttaagctttcctgtaacgccctctggcaaaagtgtgtccttgcaactctgtatcgg

SEQ ID NO: 35965 - DNA, 75 bp, synthetic construct
  source 1..75: mol_type = other DNA
tcagcacgcgcagccagcacgtcagccggacaggccgcttcgtcggctcagtcagcgtcttccagcgcaggaacg

SEQ ID NO: 35966 - DNA, 75 bp, synthetic construct
  source 1..75: mol_type = other DNA
ctgaccagaaatgaccgcctgccctttgacattatctccgctgtggcaaaagccatacacccacttaacccctcc

SEQ ID NO: 35967 - DNA, 75 bp, synthetic construct
  source 1..75: mol_type = other DNA
ctgtttccgggccgcgctgctgggtgggatttgatccttcgcgtggcgtggatagttctgccgtgtacggagtgc

SEQ ID NO: 35968 - DNA, 75 bp, synthetic construct
  source 1..75: mol_type = other DNA
ccaaatacaaaggcgtaagccgccagacagtttacgactggatcgagaaaggcgaagtgatcatgtctggcaaaa

SEQ ID NO: 35969 - DNA, 75 bp, synthetic construct
  source 1..75: mol_type = other DNA
gctttgacatcaccgctgttgagaacaatccgtctaaatatgaggcgatcgacaatggtgcaacgcttatcccgc

SEQ ID NO: 35970 - DNA, 75 bp, synthetic construct
  source 1..75: mol_type = other DNA
attatcctttggcccgtatttcccgggattaataaattcaaatgataacgattattcgataaatggtggttttgg

SEQ ID NO: 35971 - DNA, 75 bp, synthetic construct
  source 1..75: mol_type = other DNA
gaaatttcgtgcgctgtttctggagctgtttttccgccgtacggtgaatttccataccgaagaggtgatgctgga

SEQ ID NO: 35972 - DNA, 75 bp, synthetic construct
  source 1..75: mol_type = other DNA
gcagtgacagccgtctgaaagccctgcaggccacaaagacagcgctgtctggtgtgcaggccggacaggctgcga

SEQ ID NO: 35973 - DNA, 75 bp, synthetic construct
  source 1..75: mol_type = other DNA
aggaagagaacgccagactcaagaagctgcttgccgaagccatgctggataaggaggcacttcaggtggctctgg

SEQ ID NO: 35974 - DNA, 75 bp, synthetic construct
  source 1..75: mol_type = other DNA
gcgacaaggacctcagcctgaccgccggcggcagaatcactcaacagaatgaaaaactgactgccggccgggatg

SEQ ID NO: 35975 - DNA, 75 bp, synthetic construct
  source 1..75: mol_type = other DNA
ggaataaagaatggatgattgtaatcattattatctatctttttattttgttatgtatagcaacatacgctattg

SEQ ID NO: 35976 - DNA, 75 bp, synthetic construct
  source 1..75: mol_type = other DNA
accacgacggcggcaaattttgccacgctgacagagcgggagattgcggaagctgaacaggtgacaaccatcaac

SEQ ID NO: 35977 - DNA, 75 bp, synthetic construct
  source 1..75: mol_type = other DNA
taaagcgttaggcattagcgacgcagcagtctctcagtggaaggaagtcatcccagagaaagacgcctatcgact

SEQ ID NO: 35978 - DNA, 75 bp, synthetic construct
  source 1..75: mol_type = other DNA
gaaataatatttgggggtgtccggatattcctgctgaaacgccgtatgcgtcgggagaacagtttcagggagggg

SEQ ID NO: 35979 - DNA, 75 bp, synthetic construct
  source 1..75: mol_type = other DNA
ctggcgttacggggtatgcgtgttctggtgccatcatcactggcaacggccatgatacagcacggaacggctgag

SEQ ID NO: 35980 - DNA, 75 bp, synthetic construct
  source 1..75: mol_type = other DNA
acgttatatgtggaacatcctgatgtatgccattccgtgtacgttatgggcgcttgcatccggcttttttgttgc

SEQ ID NO: 35981 - DNA, 75 bp, synthetic construct
  source 1..75: mol_type = other DNA
agcagttcgtcagcaaaaacgcctcgacaagatggaagaaaaagttagccacgttgccgaaactgtcgaacaaat

SEQ ID NO: 35982 - DNA, 75 bp, synthetic construct
  source 1..75: mol_type = other DNA
gatattcttattatcagtacgccacaggatacgccgcgtttccaacaattgttgggggacgggagccagtggggg

SEQ ID NO: 35983 - DNA, 75 bp, synthetic construct
  source 1..75: mol_type = other DNA
ttggaatacggttttgccatttataacagaaataacgttaatgttacgggcgtgcttactcccatatttttcctg

SEQ ID NO: 35984 - DNA, 75 bp, synthetic construct
  source 1..75: mol_type = other DNA
aggatactcctcgttttcaacaactgctgggtgacggtagccagtgggggctaaatcttcagtacaaagtgcaac

SEQ ID NO: 35985 - DNA, 75 bp, synthetic construct
  source 1..75: mol_type = other DNA
gaattattcatctggtcgccagacaccagaacatcaccaccgcagccgaacagttaaataaagtcccttctacta

SEQ ID NO: 35986 - DNA, 75 bp, synthetic construct
  source 1..75: mol_type = other DNA
cattatcattcagcaaattattgaggggcgtttgacaagcagtgttgtccaaaatgacattgcaatctattattt

SEQ ID NO: 35987 - DNA, 75 bp, synthetic construct
  source 1..75: mol_type = other DNA
aaaacgacgtcaaaaagaattatctgccggacctgacaatggtgctggggaatacccaggctcgtggcctgcgta

SEQ ID NO: 35988 - DNA, 75 bp, synthetic construct
  source 1..75: mol_type = other DNA
gatgaagacctccagaataaactgttagttgatgaaattggtttcacctacacagaaacaggggtaacagaagag

SEQ ID NO: 35989 - DNA, 75 bp, synthetic construct
  source 1..75: mol_type = other DNA
ggctcgatgaccattccgaaaacggatattgccgtcattaaaggcgcgtgggtcgatggaatgggaagcccgtct

SEQ ID NO: 35990 - DNA, 75 bp, synthetic construct
  source 1..75: mol_type = other DNA
cccctgtgccgtatgcatgacggtcccgttttccgggaacaccatattaatgaactcagcgccgcactggccaga

SEQ ID NO: 35991 - DNA, 75 bp, synthetic construct
  source 1..75: mol_type = other DNA
tgctattcgaaacattactggcggttttggtcagttgcgcgtaaacagcgaaattaatgcaattgtcgatgttca

SEQ ID NO: 35992 - DNA, 75 bp, synthetic construct
  source 1..75: mol_type = other DNA
ttttcttctgaaaagtacccaaatctggcaaaggcttaccctactaataaattgccggatttacgcggtgaattt

SEQ ID NO: 35993 - DNA, 75 bp, synthetic construct
  source 1..75: mol_type = other DNA
cgttttccggaagatattgatggcgagggggatgccttctctcttgcctcaaaacgtaccaccacatttatgtcc

SEQ ID NO: 35994 - DNA, 75 bp, synthetic construct
  source 1..75: mol_type = other DNA
aaatccagaacttctgtctgcacggcacggtcggggccggtaagtcggaggttatccgtcgtctggccaactacg

SEQ ID NO: 35995 - DNA, 75 bp, synthetic construct
  source 1..75: mol_type = other DNA
gcttcgacgggttcagaagaatatttatctgtattatgttgtcatcagtatggtccggagtgatgtggtttttta

SEQ ID NO: 35996 - DNA, 75 bp, synthetic construct
  source 1..75: mol_type = other DNA
ccgttctggcagggttcaggacgtaccatttttgcggaagcggcgtacctgatgcgtaatgaccccaaccgcagc

SEQ ID NO: 35997 - DNA, 75 bp, synthetic construct
  source 1..75: mol_type = other DNA
cccgtaaacgtggcgacatggtggtgatttatgaccgttcgtgtgagtttgttaaaagttactatgatccctcca

SEQ ID NO: 35998 - DNA, 75 bp, synthetic construct
  source 1..75: mol_type = other DNA
tacagcaaactggtggacacactgctttccatcaaaattgaaaaactgcgtaccttcctgcgtaattcaccggcg

SEQ ID NO: 35999 - DNA, 75 bp, synthetic construct
  source 1..75: mol_type = other DNA
cgggtgatggataacgccacacatgtggcggtgtactcaggctcttacctgaaaaagccgccggtaccgatgagc

SEQ ID NO: 36000 - DNA, 75 bp, synthetic construct
  source 1..75: mol_type = other DNA
ttgaacgcgatgccgacaaaatcacggctgaaatgattgctcagtacgaagccgcaaccggcaagacgctgtacc

SEQ ID NO: 36001 - DNA, 75 bp, synthetic construct
  source 1..75: mol_type = other DNA
actctgattattttgctatcacctcaacgaatgagaacggtactgaaattgatcatgagatggctattaccgatt

SEQ ID NO: 36002 - DNA, 75 bp, synthetic construct
  source 1..75: mol_type = other DNA
gacggtaccgtctggcgtctgctgaatggctttaagctgttccgcgaaaaactggatacccgtcgcggctcaaat

SEQ ID NO: 36003 - DNA, 75 bp, synthetic construct
  source 1..75: mol_type = other DNA
gaaacgtatgacccgaccgatgacattgaagcctacgcgctcaacgccagcggtgtggtcaacatcattgtgttc

SEQ ID NO: 36004 - DNA, 75 bp, synthetic construct
  source 1..75: mol_type = other DNA
tgctcggctacaccgagcagaaagtgaaattccgtgcgctgtttctggagctgttttttcgtcgtacggtcactt

SEQ ID NO: 36005 - DNA, 75 bp, synthetic construct
  source 1..75: mol_type = other DNA
tatgggatggttgcgcagcgtcaggcatgaaattatccagcgtggcaattatggcccgcctggctgatttcagta

SEQ ID NO: 36006 - DNA, 75 bp, synthetic construct
  source 1..75: mol_type = other DNA
ttatggccgcggtaacgctgaatcaaaatatcgtctgagttattgggaaagtgccggtggtgccgagttcgatga

SEQ ID NO: 36007 - DNA, 75 bp, synthetic construct
  source 1..75: mol_type = other DNA
atggtgtatgccgaggctctggtcattctgcatggatacgaaaagatccgctggccggatgcaccggagtgggcg

SEQ ID NO: 36008 - DNA, 75 bp, synthetic construct
  source 1..75: mol_type = other DNA
attttcagccggtgatggataacatgaccggttaccggaataaccctgattttgtggctgccgggcaggcggccc

SEQ ID NO: 36009 - DNA, 75 bp, synthetic construct
  source 1..75: mol_type = other DNA
tatccgtctggggcgttcgcctgtacagcgttgtgtgaatcatatttctgaaccggacaccgaaattccgccagg

SEQ ID NO: 36010 - DNA, 75 bp, synthetic construct
  source 1..75: mol_type = other DNA
tgattgctgatgcccgcccggtcagccgccacatgacagggctgaatatcattcaggaaattccgggggatattt

SEQ ID NO: 36011 - DNA, 75 bp, synthetic construct
  source 1..75: mol_type = other DNA
ttgtttcacaaccaagtcagttatttactttagctcgctcgtttaaagcaaatgccaatggcaaaatttatatcg

SEQ ID NO: 36012 - DNA, 75 bp, synthetic construct
  source 1..75: mol_type = other DNA
tcacgcaccggacggtgaacggcgacccggcagagcagtggcagtatgatgagcacgggtggttaaccaccctca

SEQ ID NO: 36013 - DNA, 75 bp, synthetic construct
  source 1..75: mol_type = other DNA
acagtagttacttgggaacaccaaataacacctatctaaaatataatcccaaagctaaagggaatggagttacaa

SEQ ID NO: 36014 - DNA, 75 bp, synthetic construct
  source 1..75: mol_type = other DNA
gaaggggattgccgcctgtttgacgactgaaagcctggatgcaatgggtgttaatactgatgcgtttccggcttt

SEQ ID NO: 36015 - DNA, 75 bp, synthetic construct
  source 1..75: mol_type = other DNA
atattagtgctaaagatgcaaaaagcacacagaaagcctggaattgtcgtcactccagacagtcaaacgataaaa

SEQ ID NO: 36016 - DNA, 75 bp, synthetic construct
  source 1..75: mol_type = other DNA
cccagcgcactatgcggatgccattcgttataatgctcgaacgcctctgcaaggttctttgctgccgttaacccg

SEQ ID NO: 36017 - DNA, 75 bp, synthetic construct
  source 1..75: mol_type = other DNA
cgtcaacgtcgtggggcgagcatgaaggcgtgtttactgcggctgaccgtggcttccagcgtttcttcaaggcgg

SEQ ID NO: 36018 - DNA, 75 bp, synthetic construct
  source 1..75: mol_type = other DNA
gcctgctcgacccgctggaaattcgcgaactccacaaactggttcgtgacactgacaaagttttccctaatcctg

SEQ ID NO: 36019 - DNA, 75 bp, synthetic construct
  source 1..75: mol_type = other DNA
gcattcttcaatattattaagaaaaagaaaggttcaatacgatggagtaaaacatttgatgcacgtaaagcattt

SEQ ID NO: 36020 - DNA, 75 bp, synthetic construct
  source 1..75: mol_type = other DNA
gcgataacccagcgcactatgcggatgccattcgttataatgctcgaacgcctctgcaaggttctttgctgccgt

SEQ ID NO: 36021 - DNA, 75 bp, synthetic construct
  source 1..75: mol_type = other DNA
gcaactggaggaatgtccggtcggggtggaaggagagatttgcattggcgggatggggctggcacaaggctacct

SEQ ID NO: 36022 - DNA, 75 bp, synthetic construct
  source 1..75: mol_type = other DNA
gctctgggactggtgatggatttcgacgcaagaacgactattccattcgaaggtgaacgccataacgccctgcac

SEQ ID NO: 36023 - DNA, 75 bp, synthetic construct
  source 1..75: mol_type = other DNA
ctggttgctgctcagctaaacaacagaccgagaaagacactgaagttcaaaacaccgaaagagataattgaaagg

SEQ ID NO: 36024 - DNA, 75 bp, synthetic construct
  source 1..75: mol_type = other DNA
agaggcagatgatattttcggtgagctaagctctggtaagaatgcaccgaaaacggggggaggggcgaaagggaa

SEQ ID NO: 36025 - DNA, 75 bp, synthetic construct
  source 1..75: mol_type = other DNA
tcagctcctgttagcgcggttcattgctggtctgggacacggcctgtttctggctgcggcatccagtaccgcagc

SEQ ID NO: 36026 - DNA, 75 bp, synthetic construct
  source 1..75: mol_type = other DNA
ggtcaatattgccgtttctggcaccaataccgccggaaccacaaccagcattagccatccggtcacggtcgatct

SEQ ID NO: 36027 - DNA, 75 bp, synthetic construct
  source 1..75: mol_type = other DNA
gtactataaccgtcaccggtactacgatccgttgcaggggcggtatatcaccccggacccgattgggttgagagg

SEQ ID NO: 36028 - DNA, 75 bp, synthetic construct
  source 1..75: mol_type = other DNA
ctatcagtgcctttgcgctcggactcgcggaatttgtccccattgggctgacagacgttatggctcaggggttgt

SEQ ID NO: 36029 - DNA, 75 bp, synthetic construct
  source 1..75: mol_type = other DNA
atgccggggacggttttgaactcctgatgtcgggtaatatgcaggattttaatatttgttgtcgtcgggataatc

SEQ ID NO: 36030 - DNA, 75 bp, synthetic construct
  source 1..75: mol_type = other DNA
caacaaaccaccaggacactgaattgcaactaacggcgctcaagtcagcgggttgtgagaaaatttttgaagagc

SEQ ID NO: 36031 - DNA, 75 bp, synthetic construct
  source 1..75: mol_type = other DNA
tacggattacaacgtcgggaaggaagggctgattctcaataatgccaccggtaagcttaatccgacgcagcttgg

SEQ ID NO: 36032 - DNA, 75 bp, synthetic construct
  source 1..75: mol_type = other DNA
gctgcagattacttacgccagtttgatttgcttgtcctgaattttatctctcgcggtaattttgtcatactcccc

SEQ ID NO: 36033 - DNA, 75 bp, synthetic construct
  source 1..75: mol_type = other DNA
agcatcaacgccagagatgcacgtcttgcaggtacgcaggcagcacaacagaccatggtggtgaacgccagtgaa

SEQ ID NO: 36034 - DNA, 75 bp, synthetic construct
  source 1..75: mol_type = other DNA
tgatatggcgcggggtcatatcccttccccacttccatcgcaaagtgcgctggcggaaatgtacaacatcagccg

SEQ ID NO: 36035 - DNA, 75 bp, synthetic construct
  source 1..75: mol_type = other DNA
ccgcgactggatcatcctgcagtacttgatcttctccagcgatatccctcacccgaaaaactcgctttactgggt

SEQ ID NO: 36036 - DNA, 75 bp, synthetic construct
  source 1..75: mol_type = other DNA
acgcgaaggacaagcaggttgcgcgttgtggcaacgcagttccgccgccattcgccgaggcactggtgagggcta

SEQ ID NO: 36037 - DNA, 75 bp, synthetic construct
  source 1..75: mol_type = other DNA
gcactgacacagcaaaccgtcatcgtccccggtacgaatgctgctgtcgttgttctcccacgcctggcactccag

SEQ ID NO: 36038 - DNA, 75 bp, synthetic construct
  source 1..75: mol_type = other DNA
tccgccgtacaggtattggttttgctggcaatgggactggtgatttatttagccaccagtaaatacggcaatatt

SEQ ID NO: 36039 - DNA, 75 bp, synthetic construct
  source 1..75: mol_type = other DNA
gtaacaccatctttgaaaggtattggtgagcggttaggagtaggtacagatcagacggtacgccgtcatatcaaa

SEQ ID NO: 36040 - DNA, 75 bp, synthetic construct
  source 1..75: mol_type = other DNA
ctgggatagtcaggtatcagaccgtctggttgtcgcaatggataccttggatctaagaagccaggagatcatccg

SEQ ID NO: 36041 - DNA, 75 bp, synthetic construct
  source 1..75: mol_type = other DNA
tggaaggcaaccgccaccaggatgattacggttcaggtcttgggatggccgaagagaaatttcactattatctcg

SEQ ID NO: 36042 - DNA, 75 bp, synthetic construct
  source 1..75: mol_type = other DNA
ctgcaccaacgggaagattaactgggggattggtattggccttgcgggcagtacctacgacaacgactacccgga

SEQ ID NO: 36043 - DNA, 75 bp, synthetic construct
  source 1..75: mol_type = other DNA
agtgcacgtagtgaccgagaatagctcgcttgtggttaaccacggtgttggcttctctgtgcagatcacagtagc

SEQ ID NO: 36044 - DNA, 75 bp, synthetic construct
  source 1..75: mol_type = other DNA
tacaaccggaaccggtactacgatccgttgcaggggcggtatatcactcaggacccgatagggctggagggggga

SEQ ID NO: 36045 - DNA, 75 bp, synthetic construct
  source 1..75: mol_type = other DNA
cgcacagggctgcgccagaacttccgtatcttccagaatgaggacatcgaaagcatcctcgctacgatcctgaag

SEQ ID NO: 36046 - DNA, 75 bp, synthetic construct
  source 1..75: mol_type = other DNA
ggtgattctgaactccatcttccgccgcgccagcgcgtatcaggattatggctattacgaatacgaatataagtc

SEQ ID NO: 36047 - DNA, 75 bp, synthetic construct
  source 1..75: mol_type = other DNA
gattatcggtggcaatgccaccggtgtcggaaccctgaatgtgcaggatcaagactctgtcatcacggtacgcag

SEQ ID NO: 36048 - DNA, 75 bp, synthetic construct
  source 1..75: mol_type = other DNA
atgctgcgtgacctgattgacgtaaaaaaatgggaagttaatcaggccgccggtcgctacatcttctcgcatgag

SEQ ID NO: 36049 - DNA, 75 bp, synthetic construct
  source 1..75: mol_type = other DNA
cctgcccgccagtcatcaggcgatatttttcccggtatccggcttgaagaaatggcgttatgacctggaatataa

SEQ ID NO: 36050 - DNA, 75 bp, synthetic construct
  source 1..75: mol_type = other DNA
gcaaccaaacacctggatgatcaccctgtcacccgcgcactccagcgtcacggagtgtctgctggagctggccga

SEQ ID NO: 36051 - DNA, 75 bp, synthetic construct
  source 1..75: mol_type = other DNA
ctcgcgcattattccggaacatggtgttgaagttggattctttgccggactttcaacgctggcgctggtggcggc

SEQ ID NO: 36052 - DNA, 75 bp, synthetic construct
  source 1..75: mol_type = other DNA
ttttcccgggcgatcatgacgcaactaaggttatgagtgaaaacacagtaaacaacgcattacgggcgatgggat

SEQ ID NO: 36053 - DNA, 75 bp, synthetic construct
  source 1..75: mol_type = other DNA
gtgaagtacgtaccggggttgaggcgaaagtaaataacaaccttagcctgtgggggaatgtcggtgtgcaactag

SEQ ID NO: 36054 - DNA, 75 bp, synthetic construct
  source 1..75: mol_type = other DNA
attccataatgctttttcatttcgcggtggtaacattttgtatgtaagcaacaaaaacatgttgaaagagatctc

SEQ ID NO: 36055 - DNA, 75 bp, synthetic construct
  source 1..75: mol_type = other DNA
aacgcggatatcagcggagcaattaccgcgaataccggcacgctcaataatgtcaccattaacgagaactgtgtc

SEQ ID NO: 36056 - DNA, 75 bp, synthetic construct
  source 1..75: mol_type = other DNA
accgtcccctcgtcctgcttcccggccgtgatcagcgtacgctggcgacctggttcagaaaatatccggaaatac

SEQ ID NO: 36057 - DNA, 75 bp, synthetic construct
  source 1..75: mol_type = other DNA
gacaaagatgccatgcaccaggctgttgttcagtatgcagagcgggccgcagagaaactacgtggggagcgtcag

SEQ ID NO: 36058 - DNA, 75 bp, synthetic construct
  source 1..75: mol_type = other DNA
aaagacaacaatcacgaacaaatagaacttcttaacagaagactatctgaaagtgtcccatgcatgccccataag

SEQ ID NO: 36059 - DNA, 75 bp, synthetic construct
  source 1..75: mol_type = other DNA
ttgatttcgtcgcgggtgatgccacgacagaagttaaagcactggcgttgacttatctggagctgacggtactca

SEQ ID NO: 36060 - DNA, 75 bp, synthetic construct
  source 1..75: mol_type = other DNA
gtcagcggcggcctgttcacctattacgttggctatgtttcgccaacgccgaaaagcgccaccagcgggccgatt

SEQ ID NO: 36061 - DNA, 75 bp, synthetic construct
  source 1..75: mol_type = other DNA
gataatacggttttaataaaaggacagggtaaggttgtaaatgtaagattttcaaaaaataaatgccttatagaa

SEQ ID NO: 36062 - DNA, 75 bp, synthetic construct
  source 1..75: mol_type = other DNA
gtaaaagaagcaccaattgggatcgaggtcatccccgcgcacgtcactgaatatctgaacaaagtactgactgaa

SEQ ID NO: 36063 - DNA, 75 bp, synthetic construct
  source 1..75: mol_type = other DNA
gcgtaaagtctggcgccagttgttacgcgaaggtatcagggtggccagatgtacagtggcgcgcctcatggcggt

SEQ ID NO: 36064 - DNA, 75 bp, synthetic construct
  source 1..75: mol_type = other DNA
acgaccgtagtgataatacttcagagcataataataacggggctggaattgaaaattacaacttcattacgacgg

SEQ ID NO: 36065 - DNA, 75 bp, synthetic construct
  source 1..75: mol_type = other DNA
taccggcactaaaaccgatacgccgattcaaaaagtgccacagtctatttctgttgtgaccgccgaagagatggc

SEQ ID NO: 36066 - DNA, 75 bp, synthetic construct
  source 1..75: mol_type = other DNA
atcagggccggcgatctgaaagggattaatgtgaaataccgttatgagttcacggatcacctgggcggcattgtc

SEQ ID NO: 36067 - DNA, 75 bp, synthetic construct
  source 1..75: mol_type = other DNA
tcgtattaattacgatgggctatttgatcctgaaaaactacaaacctcaggtggtgctggctgccgcaggtatct

SEQ ID NO: 36068 - DNA, 75 bp, synthetic construct
  source 1..75: mol_type = other DNA
cggatggcagggcatcggcgttttactataaccaccacagccagttaacgtcagccaccgggccagacgggctgg

SEQ ID NO: 36069 - DNA, 75 bp, synthetic construct
  source 1..75: mol_type = other DNA
actgaaaccgatcatgccaaccctgatccggaaatcgtggatattgcctgcggtcgctcctctgccccgatgccg

SEQ ID NO: 36070 - DNA, 75 bp, synthetic construct
  source 1..75: mol_type = other DNA
tccatcatgatggtggcgttttatcgccatgccgggcgcatgtggccgggaattgcgctgagctgttcgctggga

SEQ ID NO: 36071 - DNA, 75 bp, synthetic construct
  source 1..75: mol_type = other DNA
atggaaggttctgattttttactcgcaggagtgctgtttctcttcgcggcggtggctgcggtgccgctggcatcg

SEQ ID NO: 36072 - DNA, 75 bp, synthetic construct
  source 1..75: mol_type = other DNA
tatgccgtggctaccgtttttgctgatcctgctgcccgccaacatcatgacgatggtgatgtatgcctttcgtgc

SEQ ID NO: 36073 - DNA, 75 bp, synthetic construct
  source 1..75: mol_type = other DNA
atgtcaaccggattacgtttcacactggaagtggacggcctgccaccggatgcttttgcggtggtctcctttcat

SEQ ID NO: 36074 - DNA, 75 bp, synthetic construct
  source 1..75: mol_type = other DNA
ctaaagagttacatacaaatgtaataggacctgacacgctatggacgtggtgggggcgaggaactaatggtaagt

SEQ ID NO: 36075 - DNA, 75 bp, synthetic construct
  source 1..75: mol_type = other DNA
tggaagagcattgaaataggtacaacgaaatttacagcaaaagatgaatcaaagggaattaatttcgaccataaa

SEQ ID NO: 36076 - DNA, 75 bp, synthetic construct
  source 1..75: mol_type = other DNA
cccggcctgcaccgacgccagtgattgtcgccaacgcctgcccgaaagtgagcctttgcccgatgccgggcagtg

SEQ ID NO: 36077 - DNA, 75 bp, synthetic construct
  source 1..75: mol_type = other DNA
tgggttatagtgcgattcccttttatatattttctgcattgttattctttattccattcgccttaatgatggctg

SEQ ID NO: 36078 - DNA, 75 bp, synthetic construct
  source 1..75: mol_type = other DNA
tgcatgccgtaaaaacagagcctgcgcgtttctggcgggttttcgggtggtttgttgcctgttttaccggtttcc

SEQ ID NO: 36079 - DNA, 75 bp, synthetic construct
  source 1..75: mol_type = other DNA
ctatttacgattatgaggtccctgtacctgaagatccgttttccttcagacttgagatccataaatgctctgaat

SEQ ID NO: 36080 - DNA, 75 bp, synthetic construct
  source 1..75: mol_type = other DNA
atcccgggtatcggagagaaaacatctgcggtattgctggcttatatcggtctgaaggaccgcttcgcccatgcc

SEQ ID NO: 36081 - DNA, 75 bp, synthetic construct
  source 1..75: mol_type = other DNA
tcaagtacaaccgagacagcaaaggcgagcgtcatgtaatagttaacggcgtcctgatggtcaaacagggcaaga

SEQ ID NO: 36082 - DNA, 75 bp, synthetic construct
  source 1..75: mol_type = other DNA
gggatggcgtacacccgctggtctgacagtgttcaggattaccggcgtgatgaagtgaaaccggggtatgtgaag

SEQ ID NO: 36083 - DNA, 75 bp, synthetic construct
  source 1..75: mol_type = other DNA
tgcaccggcttaaccaaattcaacagggataaaatagtggtaagcgtacagcctgaaccgtctggtcagaatctg

SEQ ID NO: 36084 - DNA, 75 bp, synthetic construct
  source 1..75: mol_type = other DNA
aaatgttcgccgtatgaatgacatctatttccgtccaattcatcgaaaccagtattttgaggaaatgaaagcatg

SEQ ID NO: 36085 - DNA, 75 bp, synthetic construct
  source 1..75: mol_type = other DNA
cggccagttttctctgcctgcagtccgcatgccgtatcgggccttgggttctaacctgttgcgtagatttatgca

SEQ ID NO: 36086 - DNA, 75 bp, synthetic construct
  source 1..75: mol_type = other DNA
accggcagagcagtggcagtatgatgaccacggctggctgacagacatcagccacctgagcgaaggccaccgtgt

SEQ ID NO: 36087 - DNA, 75 bp, synthetic construct
  source 1..75: mol_type = other DNA
gcggcaggacgccgttgatgcggggatcgcgacggaagaagaaactgtttcattagccgaatggaaaaaataccg

SEQ ID NO: 36088 - DNA, 75 bp, synthetic construct
  source 1..75: mol_type = other DNA
agtattatatccggagcattaacgccaaccttgctccttcgcctgaaagacaatatagatgactggttaaatgaa

SEQ ID NO: 36089 - DNA, 75 bp, synthetic construct
  source 1..75: mol_type = other DNA
gtggtgaaccgggaccgatggggcctccggggccagcaggcgacgcaggaaacagcacagtaaaaggcattcgtc

SEQ ID NO: 36090 - DNA, 75 bp, synthetic construct
  source 1..75: mol_type = other DNA
gtatcaaaaagattcccgtatccgctacaaagcgtttgatggctactggggcaccaaaccgcagatcgatacgct

SEQ ID NO: 36091 - DNA, 75 bp, synthetic construct
  source 1..75: mol_type = other DNA
tttccctcgatctctctctggtcagccagcagtttctctcccttgaatttcagcaaatactggacaaaatggcct

SEQ ID NO: 36092 - DNA, 75 bp, synthetic construct
  source 1..75: mol_type = other DNA
caatcaccatccgggacagggacaatcagaagcagaatctggcgaacctgagccgtgaccctgcgcacgctaatg

SEQ ID NO: 36093 - DNA, 75 bp, synthetic construct
  source 1..75: mol_type = other DNA
cgtaacgccagcggatacacccgatcccatcaataatccccctgttgtggatccggaaggcccatcagtttatcg

SEQ ID NO: 36094 - DNA, 75 bp, synthetic construct
  source 1..75: mol_type = other DNA
tcttcattttgtagtcgatggtcccaagtttgctctggctggaagctgcatcgtccacattacgtgggcagggtg

SEQ ID NO: 36095 - DNA, 75 bp, synthetic construct
  source 1..75: mol_type = other DNA
gttatatgccattgcacagggggctggaacaggtcagtccagggcatgcgtgatgaatatcattggaacagcatt

SEQ ID NO: 36096 - DNA, 75 bp, synthetic construct
  source 1..75: mol_type = other DNA
ggcaatcccgccgcccggttaatgctattcgccagatttgtagggcatttattcgcttcccgtatgaccgtggta

SEQ ID NO: 36097 - DNA, 75 bp, synthetic construct
  source 1..75: mol_type = other DNA
ttaccctgctgcagggagcgcatttgtatgcgccggaagatcggggaatttgcgatgtcctcgtcgctaacggca

SEQ ID NO: 36098 - DNA, 75 bp, synthetic construct
  source 1..75: mol_type = other DNA
atgaaaaatttatcgctttcagtacttctgcttctggcagggggcggggtttctcacgccgctgttcagaaaacc

SEQ ID NO: 36099 - DNA, 75 bp, synthetic construct
  source 1..75: mol_type = other DNA
atcgctatttagataaatatgacgcgatggcgaaagaggtaaataagttgcttggacgcatcgccccgccagcgc

SEQ ID NO: 36100 - DNA, 75 bp, synthetic construct
  source 1..75: mol_type = other DNA
atgtttaaggccaggatttgcggctggataggtttacttcccctgtttatgctgagtcttccagtacaggcggaa

SEQ ID NO: 36101 - DNA, 75 bp, synthetic construct
  source 1..75: mol_type = other DNA
ttctccaccacatgcagggttaacgtctaatcaactggaattattgcagattttttcagccttccctgaggatga

SEQ ID NO: 36102 - DNA, 75 bp, synthetic construct
  source 1..75: mol_type = other DNA
tctttcctagggaagaatgatgaggtcataaaatgttcaatgggagaacggacgattcacttttctgttcgcaaa

SEQ ID NO: 36103 - DNA, 75 bp, synthetic construct
  source 1..75: mol_type = other DNA
gccaaagccgcagccgaagcgcagaaaaaagccgaggcagccgctgcggcactgaagaagaaagcggaagcggca

SEQ ID NO: 36104 - DNA, 75 bp, synthetic construct
  source 1..75: mol_type = other DNA
tcgtgggatggcgggtctcatcgtccatggaaacgacattggtgctggatgcacttgagcaggcgttgtgggccc

SEQ ID NO: 36105 - DNA, 75 bp, synthetic construct
  source 1..75: mol_type = other DNA
cctctggcgtcgtgatggaccagtagtgatttcttttgatgatctgtggagtgcgataacgcatggcggacagtg

SEQ ID NO: 36106 - DNA, 75 bp, synthetic construct
  source 1..75: mol_type = other DNA
tagcgaaagtcagcgaagttgatgaggcgaagcggcaatggttgcaggggatgcgtcaccccgttgatacggtaa

SEQ ID NO: 36107 - DNA, 75 bp, synthetic construct
  source 1..75: mol_type = other DNA
atggtcgatatggcgtttatcactcagctgaccggcctgaccgataagtggttttacaagctcatcaaggatggg

SEQ ID NO: 36108 - DNA, 75 bp, synthetic construct
  source 1..75: mol_type = other DNA
tgatgtcacatttaatacgggcgacagtgaacaagggattgttccctgcctgacacgcgcgcaacttgcaagtat

SEQ ID NO: 36109 - DNA, 75 bp, synthetic construct
  source 1..75: mol_type = other DNA
aagaacagaaattcaagttagaaatttaccgactgctatctaagaacaattcagcggcagaggaagcttttgcat

SEQ ID NO: 36110 - DNA, 75 bp, synthetic construct
  source 1..75: mol_type = other DNA
cccggctgacgctgggtgatggttatactcagggcgatattttcgatggtattaactttcgcggcgcacaattgg

SEQ ID NO: 36111 - DNA, 75 bp, synthetic construct
  source 1..75: mol_type = other DNA
caaactcggccgcagctcccgctggctgaaaagtgaagtggaagcctggctgcaggcgcgtattgcacagtcccg

SEQ ID NO: 36112 - DNA, 75 bp, synthetic construct
  source 1..75: mol_type = other DNA
atgctgagcatacctacgaatcactggttcgcgccttccgctacttcggtggttgtgtgaaaacggtgctggttg

SEQ ID NO: 36113 - DNA, 75 bp, synthetic construct
  source 1..75: mol_type = other DNA
caaactggggcgaagctcccgctggttaaaaagcgaagttgaaaactggcttcaggaacgtattaaccagtcccg

SEQ ID NO: 36114 - DNA, 75 bp, synthetic construct
  source 1..75: mol_type = other DNA
caaattaaaaaaagggttagtgcgcgtggttggtgaggcaattcttggtgttgatggtgccatcgagatgaccga

SEQ ID NO: 36115 - DNA, 75 bp, synthetic construct
  source 1..75: mol_type = other DNA
gtggagcgcctgcacgctgcggaactgggcgtgcaccgcctttcagaagttgtggatacgctgctggtcctgcag

SEQ ID NO: 36116 - DNA, 75 bp, synthetic construct
  source 1..75: mol_type = other DNA
ggtggcgcttgaccgcatcatgatcggctttaacggcacatcacacgcggaaaaatccaatttcagcaccaacaa

SEQ ID NO: 36117 - DNA, 75 bp, synthetic construct
  source 1..75: mol_type = other DNA
atacgtcaggaaccctttaaatgaattaataaacggggggatcagaatattccggctgaaacgccgtatgcgccg

SEQ ID NO: 36118 - DNA, 75 bp, synthetic construct
  source 1..75: mol_type = other DNA
gttaactcagatcagatgcgccgagtctgcttagaagctaatcgccatttagataaatatgacgcgatggcgaaa

SEQ ID NO: 36119 - DNA, 75 bp, synthetic construct
  source 1..75: mol_type = other DNA
atgatgcacttaaaaaacattaccgctggtaatcctaaaacagtggagcagtaccagctaacaaagcaatttaac

SEQ ID NO: 36120 - DNA, 75 bp, synthetic construct
  source 1..75: mol_type = other DNA
atgacattaacaagacgtgaatttattaaacatagcggtattgcggcagggacgctggtggtgacatcggctgca

SEQ ID NO: 36121 - DNA, 75 bp, synthetic construct
  source 1..75: mol_type = other DNA
caaacgctgctgaaaaatggtaatcagaccaagccgaaacatgtgccaggcacgccgtattgggtgatcaccaac

SEQ ID NO: 36122 - DNA, 75 bp, synthetic construct
  source 1..75: mol_type = other DNA
tgaatatttacatagtcaggccagtttcagagggcaacaggcaaactgcgctatgtgcgaaggttttattatata

SEQ ID NO: 36123 - DNA, 75 bp, synthetic construct
  source 1..75: mol_type = other DNA
ggatggttacttccaccacgaagcatccatcgaaggtggtcagcacctgaacgttaacgtgatgaaccgtgaaat

SEQ ID NO: 36124 - DNA, 75 bp, synthetic construct
  source 1..75: mol_type = other DNA
tgaggatttacctcccggctggggattacttcacgttgttaacggaagagtacggaaagtacatggatggcccag

SEQ ID NO: 36125 - DNA, 75 bp, synthetic construct
  source 1..75: mol_type = other DNA
gtcaatacccggaagacgatggctttcagtttcaggtcgaaacagtcgacaaagaagtctatatctcgaaaggaa

SEQ ID NO: 36126 - DNA, 75 bp, synthetic construct
  source 1..75: mol_type = other DNA
aagttctccctgagcgtacggctgaccaactccatccgtactctgtccgtgaaagaagtgaagcgtgggatgcgc

SEQ ID NO: 36127 - DNA, 75 bp, synthetic construct
  source 1..75: mol_type = other DNA
ccctggaatgccgaatcaggcgcttacaatgtcacccgctctggcgacagctatattctggttaacttctatacc

SEQ ID NO: 36128 - DNA, 75 bp, synthetic construct
  source 1..75: mol_type = other DNA
tttctgcagatgtgttctgggatctgcagaacccggcaaccgatgcaggtctgctgaaccagaacgacgtcacca

SEQ ID NO: 36129 - DNA, 75 bp, synthetic construct
  source 1..75: mol_type = other DNA
taagaccatttccgaggtgaaagcctaccgccagaatttcagccagcgtgagctgatggtcatctggccggattt

SEQ ID NO: 36130 - DNA, 75 bp, synthetic construct
  source 1..75: mol_type = other DNA
ctgcgtgggtttgcttacctgtcagcgtatggttgcaagacggtgcaggaagcaatcacttaccgtgaaaacttc

SEQ ID NO: 36131 - DNA, 75 bp, synthetic construct
  source 1..75: mol_type = other DNA
ccttaatggcgaggacgtcaggccggtggccgaccgcgtgaccgtgcagtctgccgccatcgttgaataccagat

SEQ ID NO: 36132 - DNA, 75 bp, synthetic construct
  source 1..75: mol_type = other DNA
atgatctcactcccatcaggtacccgtatctggctcgttgccggcgttaccgatatgcgtaaatccttcaacgga

SEQ ID NO: 36133 - DNA, 75 bp, synthetic construct
  source 1..75: mol_type = other DNA
atgagtgactatcatcacggcgtgcaggtgctggagattaacgacggcacccgtgtcatttccaccgtatccact

SEQ ID NO: 36134 - DNA, 75 bp, synthetic construct
  source 1..75: mol_type = other DNA
cgctactactcactcacgacgcacaatctgaaaaccgttatggaacagctggcccagggcaaacgccgttgccag

SEQ ID NO: 36135 - DNA, 75 bp, synthetic construct
  source 1..75: mol_type = other DNA
tggatatcgatgtttcgaaagcgatactggatattgccgccagcagcgctattgaacaattttctgtcggcaatg

SEQ ID NO: 36136 - DNA, 75 bp, synthetic construct
  source 1..75: mol_type = other DNA
gatgcggaaaccctcaaggccggaaaactgtatatcgactacgactataccccggtgcctcctctcgaaaacctg

SEQ ID NO: 36137 - DNA, 75 bp, synthetic construct
  source 1..75: mol_type = other DNA
cttctggggttcccgctgcctgagtgatgacccgctctttgccttcgaaaactacacccgcacggcgcaggtgct

SEQ ID NO: 36138 - DNA, 75 bp, synthetic construct
  source 1..75: mol_type = other DNA
caaagaggtggctgttgcactggcatccgtctgtcagaagctgcgcgctttcgggtatatcagcgcatggggctg

SEQ ID NO: 36139 - DNA, 75 bp, synthetic construct
  source 1..75: mol_type = other DNA
tctgcgccagcgcattaacgaagccgcgcatgctgtgatggtggcttacgcgatgggcggcgatcttgaccagct

SEQ ID NO: 36140 - DNA, 75 bp, synthetic construct
  source 1..75: mol_type = other DNA
gacagcagccgcgcccccaaagtcacaccgccgcatcggcacagagcatggaggcattcacctttggcgagccga

SEQ ID NO: 36141 - DNA, 75 bp, synthetic construct
  source 1..75: mol_type = other DNA
cccgacgcgggttagaccttgatacctactggtttgtgcaatacggcatgactacgcagccgtatcagttcacga

SEQ ID NO: 36142 - DNA, 75 bp, synthetic construct
  source 1..75: mol_type = other DNA
gaggagcgtaatcgcctgacgctggaagccctggacgatgtgacatccggacaggttatcgaccatcaggctgta

SEQ ID NO: 36143 - DNA, 75 bp, synthetic construct
  source 1..75: mol_type = other DNA
attggtggcgatagtcaggtctggacaaccgcgcaatttatttcgtggctggagagtcagggagcatttaaccat

SEQ ID NO: 36144 - DNA, 75 bp, synthetic construct
  source 1..75: mol_type = other DNA
catttgatggctcggccaatatcaatcttccaggtgtaaatacaacaggtaaccagaacaccacggggaatgctg

SEQ ID NO: 36145 - DNA, 75 bp, synthetic construct
  source 1..75: mol_type = other DNA
atgatctcactcccatcaggtacccgcatctggctcgttgcaggcgttaccgatatgcgtaaatccttcaacggt

SEQ ID NO: 36146 - DNA, 75 bp, synthetic construct
  source 1..75: mol_type = other DNA
agctcaagttcgaccagaagctggctaaccgttgtatcggacttgcaaaacaccaatggggattgatctctattt

SEQ ID NO: 36147 - DNA, 75 bp, synthetic construct
  source 1..75: mol_type = other DNA
tctgaacagtgagaacgtccgcccggtggctgaccgtcttacggttcgcagcgcagaaatcatcccgtatcgcgt

SEQ ID NO: 36148 - DNA, 75 bp, synthetic construct
  source 1..75: mol_type = other DNA
aacgccggaattgccctgcgttttcgggactgcgagtttgataattatctggaggttaatcctgacgcagccaga

SEQ ID NO: 36149 - DNA, 75 bp, synthetic construct
  source 1..75: mol_type = other DNA
tgttacgcctgtcagtgacatcgtgtcatcgctgcatgaaatgagtaattcggggagactggatgacattccgga

SEQ ID NO: 36150 - DNA, 75 bp, synthetic construct
  source 1..75: mol_type = other DNA
tggcgagcgataacccagtgcactatgcggatgccattcgttataatgctcgaacgcctctgcaaggttctttgc

SEQ ID NO: 36151 - DNA, 75 bp, synthetic construct
  source 1..75: mol_type = other DNA
caggttgatatccatcaacgtatcattgttattgatgtttcggaaaaccgtgacgaacggctggtgttaatcaat

SEQ ID NO: 36152 - DNA, 75 bp, synthetic construct
  source 1..75: mol_type = other DNA
gagggcatgcactccctgcacgccggcaaggctggaacggtaaccgttaaccttctgaaaacctcgccggtgaac

SEQ ID NO: 36153 - DNA, 75 bp, synthetic construct
  source 1..75: mol_type = other DNA
caattctgtacatctacgcaaggaaatgtacggaagtaagccaaatggttatcggacggtcggaacatttcgtac

SEQ ID NO: 36154 - DNA, 75 bp, synthetic construct
  source 1..75: mol_type = other DNA
gaaaatctgaacatcacactttcagattttgaacttgaacaaataatttctggtatgcgtctgaaggccctggcc

SEQ ID NO: 36155 - DNA, 75 bp, synthetic construct
  source 1..75: mol_type = other DNA
tgacgcctcgctgaccgcaaaaggttttactcagttaagcagtgcgaccaacagcacgtctgaaacactggccgc

SEQ ID NO: 36156 - DNA, 75 bp, synthetic construct
  source 1..75: mol_type = other DNA
gaaaaggtggtggcagtggtccggttgattaccttctggggagggagcgtaaccgggaaggtgcaacggtacttc

SEQ ID NO: 36157 - DNA, 75 bp, synthetic construct
  source 1..75: mol_type = other DNA
agattgcccgggaagtgaaagcgccccgtgaacggctgaagcatgcgctggaggcggggttgctggtgactgcac

SEQ ID NO: 36158 - DNA, 75 bp, synthetic construct
  source 1..75: mol_type = other DNA
caacaggttccaaacccagctttcctgacgggatgttaattctggttgaccctgagcaagctgttgagcccggcg

SEQ ID NO: 36159 - DNA, 75 bp, synthetic construct
  source 1..75: mol_type = other DNA
ttatccggtgaaggacttacagccctgacacgtccactggtcatgcctgccccggaaaaggttccggatgtcagc

SEQ ID NO: 36160 - DNA, 75 bp, synthetic construct
  source 1..75: mol_type = other DNA
agcgttgaacagctcacgcaactgatcgcaaaatacagccaacaaccgctggtgaaatatatcggccagccggtc

SEQ ID NO: 36161 - DNA, 75 bp, synthetic construct
  source 1..75: mol_type = other DNA
cgctggggtggaaccatatcaggagaagccgggcgaagagtatatgaatgaagcccagctggcgcacttccgtcg

SEQ ID NO: 36162 - DNA, 75 bp, synthetic construct
  source 1..75: mol_type = other DNA
cagaaagatgggaaagacagcctcgattaatgatgtcgatatgactgtgatcccgggagaaacactggcagagct

SEQ ID NO: 36163 - DNA, 75 bp, synthetic construct
  source 1..75: mol_type = other DNA
catcccttcttttctactgactggtcaacagacaccggcgttcggtcgaagagtatctggtgtcatagaaattgc

SEQ ID NO: 36164 - DNA, 75 bp, synthetic construct
  source 1..75: mol_type = other DNA
cgaatgatccgaaatgggtgaaggggattgaaacccgcgattcagtgaaccagaaccaacaagaatcggaacaga

SEQ ID NO: 36165 - DNA, 75 bp, synthetic construct
  source 1..75: mol_type = other DNA
gacccgctggaaattcgcgatctccacaaactggttcgtgacactgacaaagttttccctaatcctggtaattca

SEQ ID NO: 36166 - DNA, 75 bp, synthetic construct
  source 1..75: mol_type = other DNA
gtggcggccctgaaccagacctcatttactgaaagcacataccgtcaggtaaagaacccgaatccggtcttcaca

SEQ ID NO: 36167 - DNA, 75 bp, synthetic construct
  source 1..75: mol_type = other DNA
ctcccgttttgatttcgccattcatgtggcgcatgcccgttcgcgtggtctgcgtcggcgcatgccaccggtact

SEQ ID NO: 36168 - DNA, 75 bp, synthetic construct
  source 1..75: mol_type = other DNA
cggaatatgatccgcttatcgggtgctacattccgaccgatatcacgttcacaccggcgctgtttgccgcccttg

SEQ ID NO: 36169 - DNA, 75 bp, synthetic construct
  source 1..75: mol_type = other DNA
ctgttctgcctgcgaacctgatccaggcacagcgtgactatttcggtgcgcatacttataagcgcattgataaag

SEQ ID NO: 36170 - DNA, 75 bp, synthetic construct
  source 1..75: mol_type = other DNA
agtgaactcagcgctcgagttgagaattttaatcgcctatttactgagctattagaagctcgcaagcgtaacaaa

SEQ ID NO: 36171 - DNA, 75 bp, synthetic construct
  source 1..75: mol_type = other DNA
ataagatttgtgggcgttgcaatggaaaccggtttagtcgtttaccaacgacactggcgcggtgtcatgtccaga

SEQ ID NO: 36172 - DNA, 75 bp, synthetic construct
  source 1..75: mol_type = other DNA
agactggcagatgatgtaaggctattgcgccaggaggaacaggaaaggcggaaaaatatagaaaagttaatttag

SEQ ID NO: 36173 - DNA, 75 bp, synthetic construct
  source 1..75: mol_type = other DNA
acaaaggtacaggcaaatggaccagccagagctctcttgatctaggcgaaccgctgtcgttgatcaccgaatccg

SEQ ID NO: 36174 - DNA, 75 bp, synthetic construct
  source 1..75: mol_type = other DNA
ttaactatcaacgtgataatgagatggccacctgggcgatggcggaaatcacgtaccagatcacgtacacgaatt

SEQ ID NO: 36175 - DNA, 75 bp, synthetic construct
  source 1..75: mol_type = other DNA
ggcacgagaatggctgattctgaacatggcgggactggagcgggaagagttccgggtgctgtatctgaacaacca

SEQ ID NO: 36176 - DNA, 75 bp, synthetic construct
  source 1..75: mol_type = other DNA
gagtctcagctacaacgggggcggtgcaggatttggcgggcaaatggcggagtggttgccaccggcgcagagtgc

SEQ ID NO: 36177 - DNA, 75 bp, synthetic construct
  source 1..75: mol_type = other DNA
atgaaacgaacgcctgtcctgattgatgtgaacggcgttccgcttcgggagagcctcagctacaacggtggcggt

SEQ ID NO: 36178 - DNA, 75 bp, synthetic construct
  source 1..75: mol_type = other DNA
atgaaacgaacgcctgtcctgattgatgtgaacggcgttccgcttcgtgagagtctcagctacaacgggggcggc

SEQ ID NO: 36179 - DNA, 75 bp, synthetic construct
  source 1..75: mol_type = other DNA
tgctgccgggcgcaatccttcgcctgacctgtgcggaatggtggaaacgcaaactgtggctgttacgttgcgagt

SEQ ID NO: 36180 - DNA, 75 bp, synthetic construct
  source 1..75: mol_type = other DNA
agcatcattgcaccgcagggatttgaaattgtacgcaaaccggatacccgcccggacagccgaatcacgcagctc

SEQ ID NO: 36181 - DNA, 75 bp, synthetic construct
  source 1..75: mol_type = other DNA
gaagggaaacgcacgtttacagaatttattcgtgaaggtgtgggcgttcatgcgtttaacggcgaaatctttgtg

SEQ ID NO: 36182 - DNA, 75 bp, synthetic construct
  source 1..75: mol_type = other DNA
ccagcggaaggctgaattaattcgtctttcgcagcgttggttagcccgtcgcatggaggaaaacagccatgtgta

SEQ ID NO: 36183 - DNA, 75 bp, synthetic construct
  source 1..75: mol_type = other DNA
gcactgtttctgttggcgatgtgtttgtatcttcctggggatatgagcaaacgaacgttaatttctatcaggtta

SEQ ID NO: 36184 - DNA, 75 bp, synthetic construct
  source 1..75: mol_type = other DNA
tggttgccacgggggccagctccatgtcatgggagtaccgctacaccctgaacgtggtgatagaggatttcagcg

SEQ ID NO: 36185 - DNA, 75 bp, synthetic construct
  source 1..75: mol_type = other DNA
gtgcagataaccgaagccttacttgcagagccgggagacatccggcgttttattcagcaggccgtagactactgg

SEQ ID NO: 36186 - DNA, 75 bp, synthetic construct
  source 1..75: mol_type = other DNA
ctgtcctgccgtacaattccgtgtgaattataaaaatggtggcatttcctacaggtcggctcgtgatggttatgg

SEQ ID NO: 36187 - DNA, 75 bp, synthetic construct
  source 1..75: mol_type = other DNA
ttaccgtgctttctgacatgctgcgcgccatccgtgacgcagagcacgcacagagaatcagtgaaaccactgaac

SEQ ID NO: 36188 - DNA, 75 bp, synthetic construct
  source 1..75: mol_type = other DNA
agcgggaaaaaattaaggggcaggttgttgaactcgtgcgccagagtgggcgcgagacgttacgacaactggaag

SEQ ID NO: 36189 - DNA, 75 bp, synthetic construct
  source 1..75: mol_type = other DNA
cataagcactctcgccagagaactggtcgccagtggtgatgtttacaattcaggctacggattattcccgtctga

SEQ ID NO: 36190 - DNA, 75 bp, synthetic construct
  source 1..75: mol_type = other DNA
cagtgaaaaaaaagagcgacccggacttggtttattcattaccagacggagaaatacgtcgttacaacagacgac

SEQ ID NO: 36191 - DNA, 75 bp, synthetic construct
  source 1..75: mol_type = other DNA
atggcaaaagtatttacacaggaagagcgggaaaaaattaaagggcagattgttgatctcgtacgccagagcggg

SEQ ID NO: 36192 - DNA, 75 bp, synthetic construct
  source 1..75: mol_type = other DNA
ggcgcctaaacataatctgtcgcgagtgccggaagagtgaagctatgcagcgcgtactggcgttttatcagggga

SEQ ID NO: 36193 - DNA, 75 bp, synthetic construct
  source 1..75: mol_type = other DNA
gatatccgggtgccggaccatctgatagtcggtggcaaccaggttttctcctttgccgaacatggtctgctttaa

SEQ ID NO: 36194 - DNA, 75 bp, synthetic construct
  source 1..75: mol_type = other DNA
tgcgccgcgctgcgggagctgaacaagcaccgggatattgttcgacagattactgattcttctcgctgtgttgca

SEQ ID NO: 36195 - DNA, 75 bp, synthetic construct
  source 1..75: mol_type = other DNA
tggtaaaggctttcctcagccagccggtgttgcgttaccagtacaggaagcggcaacacaggaagaaattaaaac

SEQ ID NO: 36196 - DNA, 75 bp, synthetic construct
  source 1..75: mol_type = other DNA
gtagcgaaaatctcagagtgcgatttaaccgcgacgattgaacaacgcggaccacaaacggcggatgaactggct

SEQ ID NO: 36197 - DNA, 75 bp, synthetic construct
  source 1..75: mol_type = other DNA
cacagcaagataattacgaaggcatttgtctggagcctgattcatttgcggtaaatgtttatcatttattgcatg

SEQ ID NO: 36198 - DNA, 75 bp, synthetic construct
  source 1..75: mol_type = other DNA
taatcacgaaacaaaaacacttggcagcgaaattctgaattttgcatgtgaatatgcaaaatctgctgccgaaaa

SEQ ID NO: 36199 - DNA, 75 bp, synthetic construct
  source 1..75: mol_type = other DNA
atgccgcacatgcgcgtacaagccgctatatcactgacacgacaaaagagcgttatcaccagtgccagaacgtga

SEQ ID NO: 36200 - DNA, 75 bp, synthetic construct
  source 1..75: mol_type = other DNA
gaggctggcaggggccgggggaaatggtgtttttcaggtggtgctgggggctgcagccatcgtgggctctttctt

SEQ ID NO: 36201 - DNA, 75 bp, synthetic construct
  source 1..75: mol_type = other DNA
ctgtatggcgaaatgcgcgtggggtcccgggtggtatctcaggagatcagcacggcagatgaaggtgatggtggt

SEQ ID NO: 36202 - DNA, 75 bp, synthetic construct
  source 1..75: mol_type = other DNA
tacctacaaaatagggatagataaagccattgaagctgcacaaaaatcaacgccgacgctcctttcattaatgga

SEQ ID NO: 36203 - DNA, 75 bp, synthetic construct
  source 1..75: mol_type = other DNA
tcgttccccagagtctgcaccggctgatttatggtccggacaaacggagctccccgtccctggatgatgatctgg

SEQ ID NO: 36204 - DNA, 75 bp, synthetic construct
  source 1..75: mol_type = other DNA
gtgagtttgtcacttcattacaggtattgaaagagatcggaataaaagctggcttttctgctttttcagaagaat

SEQ ID NO: 36205 - DNA, 75 bp, synthetic construct
  source 1..75: mol_type = other DNA
tcaaactggtctggctctgctggcttgacttaatgaccggaaacagccttgacgactggacgaaaaacctgaaac

SEQ ID NO: 36206 - DNA, 75 bp, synthetic construct
  source 1..75: mol_type = other DNA
cacgccgtatcctggggcgtgtgtcatccgaatatctactacttccataatctgacgcccggttgggtgtcattc

SEQ ID NO: 36207 - DNA, 75 bp, synthetic construct
  source 1..75: mol_type = other DNA
caataaccggcaggaagaaaaccctgcgctgactcgtctgatggacgagtacgtctgctttgcgtggcgaacgac

SEQ ID NO: 36208 - DNA, 75 bp, synthetic construct
  source 1..75: mol_type = other DNA
gctgaatttattgctgcctttaatccaaagattgctttggcactactggatgaacgggaaaggaaccagcaatac

SEQ ID NO: 36209 - DNA, 75 bp, synthetic construct
  source 1..75: mol_type = other DNA
tgacagtgtgtaccgggtgaaacgtcagcgcgatctgaacggggcgcggcgctttctgctgctggagtgtacgga

SEQ ID NO: 36210 - DNA, 75 bp, synthetic construct
  source 1..75: mol_type = other DNA
aagtggaagtgctgattggtgatgagctggtgatcaccggctgggtggaggcgactcccgttcgttacgatgccc

SEQ ID NO: 36211 - DNA, 75 bp, synthetic construct
  source 1..75: mol_type = other DNA
agctgcctgtagggtggagctacaatttattggataatattgctgaaagatgcagtggccatacaccgagtaaat

SEQ ID NO: 36212 - DNA, 75 bp, synthetic construct
  source 1..75: mol_type = other DNA
tccgatggaagcataataagctttttctgcttctgccggaggagtatggcccagcctttccagcaatcgtcgatt

SEQ ID NO: 36213 - DNA, 75 bp, synthetic construct
  source 1..75: mol_type = other DNA
ttttactattgacgggcaaatgggcgtgaaccgcgacggaacattgaaaggttatagtctggatgttctgtctaa

SEQ ID NO: 36214 - DNA, 75 bp, synthetic construct
  source 1..75: mol_type = other DNA
cccgctgtcatggacctcactgaaagaatcccttacgcaggcactgtatggaaagctgcatcatacgaatatgca

SEQ ID NO: 36215 - DNA, 75 bp, synthetic construct
  source 1..75: mol_type = other DNA
acacccgctggaactgtaaatatcacatagtttttgcgccaaaataccgaagacaggtgttctacagagagaagc

SEQ ID NO: 36216 - DNA, 75 bp, synthetic construct
  source 1..75: mol_type = other DNA
cgcggtacgggggctgggcctgcggcagggaggcgtcagtgaagaaacacaaaatgacagctatgagaaaatact

SEQ ID NO: 36217 - DNA, 75 bp, synthetic construct
  source 1..75: mol_type = other DNA
ttctgattatttcggtggcctgcgctattgggattatgcgaattattcattcagtaaaaaagattgagcgttttt

SEQ ID NO: 36218 - DNA, 75 bp, synthetic construct
  source 1..75: mol_type = other DNA
tggatggttttctgaaaggtaaatgcatcccaagtgatttaaaggttaacgaaacaaacgctgaatatcttgtcc

SEQ ID NO: 36219 - DNA, 75 bp, synthetic construct
  source 1..75: mol_type = other DNA
tctccggcaaaccgggcctccggtgaaatggtttttgatgcagagcgtgagatttatttcccgcagcgccccccc

SEQ ID NO: 36220 - DNA, 75 bp, synthetic construct
  source 1..75: mol_type = other DNA
atgagaaatcataccacacacccgcaagggcgggactcgcacaacctgaataaatacatctggcgttttatcgcc

SEQ ID NO: 36221 - DNA, 75 bp, synthetic construct
  source 1..75: mol_type = other DNA
acggggtgttgtcgcaatggacgatgctggatttgacgaagaggatttcaaaaaacctgttcgcgtgaatttgcc

SEQ ID NO: 36222 - DNA, 75 bp, synthetic construct
  source 1..75: mol_type = other DNA
cattggcgcatctgacacgccaccatcccgtctgccgggaaataccgcagcactgtctgaactgaatgcctccgg

SEQ ID NO: 36223 - DNA, 75 bp, synthetic construct
  source 1..75: mol_type = other DNA
ttcgtcggtgcgattctctggctggcgggtgcccgtgttggcgggcatgaacaggtgtgcgaccgttactggtgg

SEQ ID NO: 36224 - DNA, 75 bp, synthetic construct
  source 1..75: mol_type = other DNA
tgcgaaatattacttcaataaaaatatgtccacctatgttgattataaaatcaatctggttgatgagaataagtt

SEQ ID NO: 36225 - DNA, 75 bp, synthetic construct
  source 1..75: mol_type = other DNA
ctgcggcatcaacagttaccatcgggtctgacacgccggcagaactggcttctgcggaaacggctgcatcggcgt

SEQ ID NO: 36226 - DNA, 75 bp, synthetic construct
  source 1..75: mol_type = other DNA
gaacagccaagccagcggataagcaatataagctgactgatggtggcggtatgcatctgcttgtccatccaaatg

SEQ ID NO: 36227 - DNA, 75 bp, synthetic construct
  source 1..75: mol_type = other DNA
attcccatgaccagtgatgagagcaacaggctgaatcagggcgtgtttgttgatgactgggggcgtcccgaaaaa

SEQ ID NO: 36228 - DNA, 75 bp, synthetic construct
  source 1..75: mol_type = other DNA
ctataaaatggccgatggcggaggtctgtatcttgaggtttcggccaagggttctaaatactggcgcatgaaata

SEQ ID NO: 36229 - DNA, 75 bp, synthetic construct
  source 1..75: mol_type = other DNA
gcgtgaaagcagaagggggttctgacgaacgtgcgatgcgtgaagcggcaaccgacacggcggcggcgctgggtt

SEQ ID NO: 36230 - DNA, 75 bp, synthetic construct
  source 1..75: mol_type = other DNA
atgacacggattgcggtcgagctttccttgctaacttttgtgcgttccagtgaattacgtttcgcacgttgggat

SEQ ID NO: 36231 - DNA, 75 bp, synthetic construct
  source 1..75: mol_type = other DNA
gcattgggagggcgatttagtctcaggtacaaaaaactctcatatagccacacttgtagaccgaaaatcacgtta

SEQ ID NO: 36232 - DNA, 75 bp, synthetic construct
  source 1..75: mol_type = other DNA
actacggctccatcgattatggccgtaactacggtgtagcatacgatatcggtgcatggaccgacgttctgccag

SEQ ID NO: 36233 - DNA, 75 bp, synthetic construct
  source 1..75: mol_type = other DNA
ccttcgcagggttatcaataccccggagacgaaacagtcaggcgcgcctcatgtcggtattgatgagtgggcgtg

SEQ ID NO: 36234 - DNA, 75 bp, synthetic construct
  source 1..75: mol_type = other DNA
gatatgactctcggttggatcgtctggcagcaacgagctggtatccatttttcaacaatgtcacagcaagaggtg

SEQ ID NO: 36235 - DNA, 75 bp, synthetic construct
  source 1..75: mol_type = other DNA
ctgaagaggcggcagcgaaagcggcggcagatgctaaagcgaaggccgaagcagatgctaaagctgcggaagaag

SEQ ID NO: 36236 - DNA, 75 bp, synthetic construct
  source 1..75: mol_type = other DNA
ttgctgaacttgtggcaatgaaagccagtgcgctcatgaaagatatgagcatgcgttccggggttattaaaggta

SEQ ID NO: 36237 - DNA, 75 bp, synthetic construct
  source 1..75: mol_type = other DNA
gttatcggtatctcattacgcactattgcgaagaagagaaaatgctctgatggcacaattaggaaggaactgcaa

SEQ ID NO: 36238 - DNA, 75 bp, synthetic construct
  source 1..75: mol_type = other DNA
gatgagaaattttccagcgccatttacaacggaagaatatttacaatgaaacgtttacataccctgatgttattt

SEQ ID NO: 36239 - DNA, 75 bp, synthetic construct
  source 1..75: mol_type = other DNA
aattcggcagtactttcctaaaaagacatgtcttgcccaatatactcaacatgaactagatctggttgctgctca

SEQ ID NO: 36240 - DNA, 75 bp, synthetic construct
  source 1..75: mol_type = other DNA
gacggcagcgatgcgccgttcgtgatccacatgctgagtgagcagtgcgatcgcctgctccccgaaaacaaccag

SEQ ID NO: 36241 - DNA, 75 bp, synthetic construct
  source 1..75: mol_type = other DNA
atcatgattgacagctgtgttgcgcgattgcggaaatataagccagaagaatatgaactgatcattgctcacttt

SEQ ID NO: 36242 - DNA, 75 bp, synthetic construct
  source 1..75: mol_type = other DNA
caggtcgaacaactggctatgtcgctgccggatgaacaggctcgtaatgctttcatgcagcaggcgcagcagcag

SEQ ID NO: 36243 - DNA, 75 bp, synthetic construct
  source 1..75: mol_type = other DNA
aaaatacttgatgttataagtactgatggagagactttatcaatcagtgagtcaataacaacattaccagacttg

SEQ ID NO: 36244 - DNA, 75 bp, synthetic construct
  source 1..75: mol_type = other DNA
agcaactcgcacgtgatcccggcgctgctgcgtcgtttccacgaggcgaccgccgagaacgcaccggatgtggtg

SEQ ID NO: 36245 - DNA, 75 bp, synthetic construct
  source 1..75: mol_type = other DNA
aaaaaagcccgaactgaagctgaacgatttactaaggctgtttttgatcgaattgaatatatccgtggagcatca

SEQ ID NO: 36246 - DNA, 75 bp, synthetic construct
  source 1..75: mol_type = other DNA
tgaacaccacgctgggcgagacctgggaagaggccgtgggcgaaaaactcgatcaccaggtactgatggataagg

SEQ ID NO: 36247 - DNA, 75 bp, synthetic construct
  source 1..75: mol_type = other DNA
cgaagaagcctttctgattgataagcaaattatcatggggcgaccggaagacgaggacacccttaaacgtgttga

SEQ ID NO: 36248 - DNA, 75 bp, synthetic construct
  source 1..75: mol_type = other DNA
ctgaaggcgaatctgctggataacgccactttccgtaaagaactggaaaaaattctgcgggatcccgaactgagt

SEQ ID NO: 36249 - DNA, 75 bp, synthetic construct
  source 1..75: mol_type = other DNA
ccagtaaccccggaacctggacggatgaaagtagacaccctgatacacaactcaattatgccaacgaatttgatc

SEQ ID NO: 36250 - DNA, 75 bp, synthetic construct
  source 1..75: mol_type = other DNA
ttactcccttcgtgttgttgatgaatctgaccggacatcagcagagcgcacgccaccatctgcggcccttaccgg

SEQ ID NO: 36251 - DNA, 75 bp, synthetic construct
  source 1..75: mol_type = other DNA
aaaatcaacagcggacaggttgatccgctggcggcccattacatctctcccatcgacgaggacagctatacgctg

SEQ ID NO: 36252 - DNA, 75 bp, synthetic construct
  source 1..75: mol_type = other DNA
tctaagtcgcatccgttttatacaggtaaactgagaactgtcgcttcagaaggtaatgttgcacgctttacccag

SEQ ID NO: 36253 - DNA, 75 bp, synthetic construct
  source 1..75: mol_type = other DNA
ccacgctgggcgagacctgggaagaggccgtgggcgaaaaactcgatcaccaggtgctgatggataaggttgtgc

SEQ ID NO: 36254 - DNA, 75 bp, synthetic construct
  source 1..75: mol_type = other DNA
tttttggcagcaaaacaaagcttgccaatgccgcaggagtgagactggcaagtgttgctgcttgggggatactgg

SEQ ID NO: 36255 - DNA, 75 bp, synthetic construct
  source 1..75: mol_type = other DNA
gaccgctacggacgcattatcggtcgtgtgttcacgacgaacggcacggatgccagccgctttatggttcagtct

SEQ ID NO: 36256 - DNA, 75 bp, synthetic construct
  source 1..75: mol_type = other DNA
gtctcgacatgtcaagttccgttatccaacgagccatgccaatgctgaaaagcctgcgggcaaggcaattcgaat

SEQ ID NO: 36257 - DNA, 75 bp, synthetic construct
  source 1..75: mol_type = other DNA
cggcaggacttgatccgctggcgatggttgagccgtcaacaggctggcaggtacgcgcctatttacgcgcggcgc

SEQ ID NO: 36258 - DNA, 75 bp, synthetic construct
  source 1..75: mol_type = other DNA
gccggagccgtcgataggttcacttgtacgctcttatttacttgcggcgcttgggatgcataaaaattatggggg

SEQ ID NO: 36259 - DNA, 75 bp, synthetic construct
  source 1..75: mol_type = other DNA
gtaactcctcaagcaattagagatgctgagaagagcgggcgtttacctgcacctgactttgaaatgagaggaaga

SEQ ID NO: 36260 - DNA, 75 bp, synthetic construct
  source 1..75: mol_type = other DNA
gaaccgctgcgtaaacaaatagaaaccctccctgccgaacagcgctggctggtatcgagcgaaggcgcattttct

SEQ ID NO: 36261 - DNA, 75 bp, synthetic construct
  source 1..75: mol_type = other DNA
aatggggttccagaagtaattgtctcttcgggtgtgacgccagtagggatcaccgaagggccctatgagggcaaa

SEQ ID NO: 36262 - DNA, 75 bp, synthetic construct
  source 1..75: mol_type = other DNA
ccgacagcgttaacgtacaggcactgaatatggggcgaattgtcgttgacattgatggtgttaatctcgctgaac

SEQ ID NO: 36263 - DNA, 75 bp, synthetic construct
  source 1..75: mol_type = other DNA
acgggggctaatcttgaaaccagacacttcaagaatagccgcaaaatgttgtcattacaacaaggcggctatatg

SEQ ID NO: 36264 - DNA, 75 bp, synthetic construct
  source 1..75: mol_type = other DNA
tgttgataaattccgctcttctctcggtgccgttcagaaccgtctggattctgccattgccaacctgaacaacac

SEQ ID NO: 36265 - DNA, 75 bp, synthetic construct
  source 1..75: mol_type = other DNA
gtgttcttttcgggattatttcaacgaaaaagtgacgcaccggtgaccacgccagcagagctggcggatgctatc

SEQ ID NO: 36266 - DNA, 75 bp, synthetic construct
  source 1..75: mol_type = other DNA
atgacatacgagtacaaccccttctggcaacaacgtatccgtgagacggtgctgcgcgcactggatgttcatccc

SEQ ID NO: 36267 - DNA, 75 bp, synthetic construct
  source 1..75: mol_type = other DNA
gtcaaccgggatacctggtgtcgtgccggcgattaccgcgctccgggatcactggccgggatgattaaacaggcg

SEQ ID NO: 36268 - DNA, 75 bp, synthetic construct
  source 1..75: mol_type = other DNA
tcgggaaggtaaacgcgtgcatcccacaaccctgcattacgtctgggcccgggagtttggggagtgcaaaggtaa

SEQ ID NO: 36269 - DNA, 75 bp, synthetic construct
  source 1..75: mol_type = other DNA
gagatgatcaaagaagagatggggccagtaccggggactatcgcgctgtttggctgtttcttaatcatgatcatc

SEQ ID NO: 36270 - DNA, 75 bp, synthetic construct
  source 1..75: mol_type = other DNA
actggccggaatgattgaacaggcctggtgcagtgccctgggggtggatgccggatgccatgccacgctggtgca

SEQ ID NO: 36271 - DNA, 75 bp, synthetic construct
  source 1..75: mol_type = other DNA
aatggattcgcattaccgtttttgtggttgccatactgctatggctgaacgtacttaccctggcgggaccaagtt

SEQ ID NO: 36272 - DNA, 75 bp, synthetic construct
  source 1..75: mol_type = other DNA
attattcaggacatcccgggttatctcttcaccggagccctgacctacgacggcgacatcatcacggtttacccc

SEQ ID NO: 36273 - DNA, 75 bp, synthetic construct
  source 1..75: mol_type = other DNA
tcattcatattgcccgtaatgaactgggtatggatgaagacacctaccgccagatgttacaggggctgaccggta

SEQ ID NO: 36274 - DNA, 75 bp, synthetic construct
  source 1..75: mol_type = other DNA
tgtggcatatgtttataaatcatcacggaatacggtttttgaaaatcctgacattgtaaaaacctgtacggtcag

SEQ ID NO: 36275 - DNA, 75 bp, synthetic construct
  source 1..75: mol_type = other DNA
atacgtctgaaggttgttttgatattggtgttctgctcagtaaccgggagtttactgaagatgccattaacatga

SEQ ID NO: 36276 - DNA, 75 bp, synthetic construct
  source 1..75: mol_type = other DNA
acattgtaaaaacctgtacggtcagggatttgaagaaggattttgtgaactgcgatgagaaaggtgagggacaat

SEQ ID NO: 36277 - DNA, 75 bp, synthetic construct
  source 1..75: mol_type = other DNA
agcgcgacaaacccacccgctattccacactggtggaaacgtcaaccgcttattcccaaccttctgtcacagaaa

SEQ ID NO: 36278 - DNA, 75 bp, synthetic construct
  source 1..75: mol_type = other DNA
gcagatcacggttacttagaagcaaatcccttccagggaattaagcctcttaaaagagccagggcagagccagat

SEQ ID NO: 36279 - DNA, 75 bp, synthetic construct
  source 1..75: mol_type = other DNA
cacctcagagagtatggcagaacagaaaaacaaaaatgcacctttgtttttcaacctgaagtgtcagcgagagta

SEQ ID NO: 36280 - DNA, 75 bp, synthetic construct
  source 1..75: mol_type = other DNA
acggccttacactgaatgacacaccgttcgccgatgaacgtgtgattgagcagcatattgaagctggcatttcac

SEQ ID NO: 36281 - DNA, 75 bp, synthetic construct
  source 1..75: mol_type = other DNA
tttacctcacgggctgcaggtggagctgccggacattccgaccaccaccgtgcagaccgtccagctatgggactg

SEQ ID NO: 36282 - DNA, 75 bp, synthetic construct
  source 1..75: mol_type = other DNA
cgggactggctgaactgggtgcggtgctgccgcacggcaccgccgtcgaactgcccgacgttcagaccgcgcccg

SEQ ID NO: 36283 - DNA, 75 bp, synthetic construct
  source 1..75: mol_type = other DNA
ctggaatgccgggattcagttcagtcccgtagagacggtggttattgaccttgcttatgaaggctccggcagtgg

SEQ ID NO: 36284 - DNA, 75 bp, synthetic construct
  source 1..75: mol_type = other DNA
gaatatgctcgatcaggcattcaaaaagcttaatcctcacgagcatcctgttctgcactctgaccagggatggca

SEQ ID NO: 36285 - DNA, 75 bp, synthetic construct
  source 1..75: mol_type = other DNA
tgccgatgaatccagcctaccccaccctctatccggaagatctgcagattttcggggtagtgacggcattcatac

SEQ ID NO: 36286 - DNA, 75 bp, synthetic construct
  source 1..75: mol_type = other DNA
gatttggcgaccgtaacgggtataatcaggcgctcagcgagctggaaaacgaaatctaccaattaccgccccgct

SEQ ID NO: 36287 - DNA, 75 bp, synthetic construct
  source 1..75: mol_type = other DNA
cctcgagatgcgttcaaaggggattgagcgccagatgaccgaaggggagttaaaacggcttgcagaacggcaact

SEQ ID NO: 36288 - DNA, 75 bp, synthetic construct
  source 1..75: mol_type = other DNA
tcagagccactcaacatcattgctcaggccatcgcctttcgcgaaatgctgctccgtcagcggatcaacgatgca

SEQ ID NO: 36289 - DNA, 75 bp, synthetic construct
  source 1..75: mol_type = other DNA
acggggatgtgcggctggtgaatccagagaactggaaagagctcgcggtcgggcatcttcagaatgtccggcgcg

SEQ ID NO: 36290 - DNA, 75 bp, synthetic construct
  source 1..75: mol_type = other DNA
tgcctcgacagccgccattctacggcggaaaaaccggtatttaaccgcaccgttgggctgcgtgatacctgggcg

SEQ ID NO: 36291 - DNA, 75 bp, synthetic construct
  source 1..75: mol_type = other DNA
aaggccgcttttgacgcactcaccaaagcaggtttctggctggatgatgctcaggtcgttgattaccgcgttgtg

SEQ ID NO: 36292 - DNA, 75 bp, synthetic construct
  source 1..75: mol_type = other DNA
atgacaagccgcagccgccaggctgcctactcgggtaaacaagcatccgaactttctaaggagctggcttctgta

SEQ ID NO: 36293 - DNA, 75 bp, synthetic construct
  source 1..75: mol_type = other DNA
caactggtcgttgaccagaaatacaccgtggcagatgcagccagcgctatggatgtcggcctttccacaatgacg

SEQ ID NO: 36294 - DNA, 75 bp, synthetic construct
  source 1..75: mol_type = other DNA
ggatttcgatggcccgcacaacctgatgatgcagatcttcacctcgcaaggcgtgcagtttgatgaagtgctgat

SEQ ID NO: 36295 - DNA, 75 bp, synthetic construct
  source 1..75: mol_type = other DNA
aatgagcaacaggtacagtttttactgaaaagtaatcccagacgaaacagagcgaagtttacgataagtcccttc

SEQ ID NO: 36296 - DNA, 75 bp, synthetic construct
  source 1..75: mol_type = other DNA
cctcgactggcagccttattttgaggcgctgacgtatggcggtaatttccatacggtcggtgcggttctcacgcc

SEQ ID NO: 36297 - DNA, 75 bp, synthetic construct
  source 1..75: mol_type = other DNA
ggcgtgtatgccactgagtatgtgctggaacgctacgggcgggagctgccgccggaatcgctggccgtgaagatt

SEQ ID NO: 36298 - DNA, 75 bp, synthetic construct
  source 1..75: mol_type = other DNA
atggcccacagtaacgagatggcacgtgcacaggatcgcattaacgaaatcaaccaacgtgtcatttcaggtagt

SEQ ID NO: 36299 - DNA, 75 bp, synthetic construct
  source 1..75: mol_type = other DNA
ctgggacccgcatcctacgtgtactcaaagctctacgcggtcatgctctgaacggtgtttctaacggtgaactgg

SEQ ID NO: 36300 - DNA, 75 bp, synthetic construct
  source 1..75: mol_type = other DNA
cgttgataacaacctgatttttaaatggctacgcctctggcaaagagaaggacgtatttctcgtagaatgcctcc

SEQ ID NO: 36301 - DNA, 75 bp, synthetic construct
  source 1..75: mol_type = other DNA
ggcggacatgttcagaaaactgtactacgacaacggatcccacgccgggtgcatcatctacatcggtgcagcgca

SEQ ID NO: 36302 - DNA, 75 bp, synthetic construct
  source 1..75: mol_type = other DNA
tccagttagcttttggctggaatgacgaacacctgtatatgttcgagaaagggcgtaaaggtgatccaggtagcg

SEQ ID NO: 36303 - DNA, 75 bp, synthetic construct
  source 1..75: mol_type = other DNA
cacggcgtgtcactacgtggtcacattgatgtcacgacggaagatttagcaagtgcgcttgatgtgacggaagaa

SEQ ID NO: 36304 - DNA, 75 bp, synthetic construct
  source 1..75: mol_type = other DNA
gatgatcacatccactcagttcagggtaaagcgtgctatgaagatgagatgttcagcatcagatactttaagaag

SEQ ID NO: 36305 - DNA, 75 bp, synthetic construct
  source 1..75: mol_type = other DNA
tggttacctgcgctctggcaaataaactggctcgaattgcctgggcaatcactactcagaaaaaagaatatcagg

SEQ ID NO: 36306 - DNA, 75 bp, synthetic construct
  source 1..75: mol_type = other DNA
ggatttattccggcgataaccccgcgccgtctgcgtcggcggatgccctgcatatccgtttccctgacggggcgg

SEQ ID NO: 36307 - DNA, 75 bp, synthetic construct
  source 1..75: mol_type = other DNA
attttgcgacagaccaacaactataacagcgatgatttccagtttgtgtggaatatttacgccaataatgatgtg

SEQ ID NO: 36308 - DNA, 75 bp, synthetic construct
  source 1..75: mol_type = other DNA
agtcctcgacggatgtttactatcgtatccaaagcggcattgatggcgatcgggcagggcgtcaggagggcggca

SEQ ID NO: 36309 - DNA, 75 bp, synthetic construct
  source 1..75: mol_type = other DNA
atgatggatgtaaaagagaaggttttgcaggtgatgcgttcccgtgctgccctgcaagagaaagctctcggcggg

SEQ ID NO: 36310 - DNA, 75 bp, synthetic construct
  source 1..75: mol_type = other DNA
tctcccgcccggcgggtcaggtaattgcacagtactatgaattcctgcgcctcggtcgtgaaggctataccaaag

SEQ ID NO: 36311 - DNA, 75 bp, synthetic construct
  source 1..75: mol_type = other DNA
ttatcggatattctattgttgactatttgtgccgttatttctggtgcggaaggttgggaagatatagaggatttt

SEQ ID NO: 36312 - DNA, 75 bp, synthetic construct
  source 1..75: mol_type = other DNA
gatgcgcgatgcgcagttgtggcgtcacatcgaatttcaccctgaatgcaacgcgatttacgcagcactggactg

SEQ ID NO: 36313 - DNA, 75 bp, synthetic construct
  source 1..75: mol_type = other DNA
tgcgtgtcacctgcgggatgttactgatggtcatgagtggtgtgtcgcagtcagcggaactgacactggagagtc

SEQ ID NO: 36314 - DNA, 75 bp, synthetic construct
  source 1..75: mol_type = other DNA
gacgttgaacgcccccagcagtacgggcaaatcagcgtccccctgcctggtgcggaagtttttctggcctgtgct

SEQ ID NO: 36315 - DNA, 75 bp, synthetic construct
  source 1..75: mol_type = other DNA
cgctggggcagccgttaaacgatacggtggtgcttgttaaagcgcctggcgcaaaagatgcaaaagtcgaaaacc

SEQ ID NO: 36316 - DNA, 75 bp, synthetic construct
  source 1..75: mol_type = other DNA
gccgttattgccgggatcacctattccggccatgtgcatcaggataacggcaaaggcagtaagacaggagcgccg

SEQ ID NO: 36317 - DNA, 75 bp, synthetic construct
  source 1..75: mol_type = other DNA
gtccttccttacgcgcatggcggaaatgctgggcgcaatcaccacggtaaaaagcggtaatctgttattcatcat

SEQ ID NO: 36318 - DNA, 75 bp, synthetic construct
  source 1..75: mol_type = other DNA
aggcagatatctgtgaatcgcttcacgaccacgccgatgagctttaccgcagctgcctcgcacgtttcggggatg

SEQ ID NO: 36319 - DNA, 75 bp, synthetic construct
  source 1..75: mol_type = other DNA
attgccggaaccactgacaccaccgcgaaagagcgtgaacctgtcgatccgacgctgatggtcgatgtggaatac

SEQ ID NO: 36320 - DNA, 75 bp, synthetic construct
  source 1..75: mol_type = other DNA
cgcggagccgcatcattctccatcacgctggcgcgtggacgtgcagaactctaccccgaaatgcatggcacggta

SEQ ID NO: 36321 - DNA, 75 bp, synthetic construct
  source 1..75: mol_type = other DNA
gaggatgcaccggatcacgtcatgggcagcaccaccacgggcggcgaaaccacaccgggtgcggtgaaagtcggg

SEQ ID NO: 36322 - DNA, 75 bp, synthetic construct
  source 1..75: mol_type = other DNA
tttaacattgccagttgagcatccaatgggtagagatgaattttgccgggcaattcatcattgccaaaatatggt

SEQ ID NO: 36323 - DNA, 75 bp, synthetic construct
  source 1..75: mol_type = other DNA
ttgcagtggcggttggtgttagcagccggactattcgacgctggatggataattctggagaatggctaaccaaga

SEQ ID NO: 36324 - DNA, 75 bp, synthetic construct
  source 1..75: mol_type = other DNA
taaatagaaaaataatcccaacacccacaccggtgaagctattatcatatcgaaatgctgatttaataaaagaaa

SEQ ID NO: 36325 - DNA, 75 bp, synthetic construct
  source 1..75: mol_type = other DNA
tccacctggaatggcaggtgaaggagtggcgcgaggaaccctactccctcgatgaactggctgattatctcgatt

SEQ ID NO: 36326 - DNA, 75 bp, synthetic construct
  source 1..75: mol_type = other DNA
gaacgcccccgcgccgaacatcaccgtaaaaaatcccgtgaacggtcatgctcacctgctctatgcactcaacat

SEQ ID NO: 36327 - DNA, 75 bp, synthetic construct
  source 1..75: mol_type = other DNA
gtaaatgggcctacagagcgattcgtcagggctggcctgtattctcacaatggcttgatgccgtgatccagcgtg

SEQ ID NO: 36328 - DNA, 75 bp, synthetic construct
  source 1..75: mol_type = other DNA
caaatctgcgagggcgcataatagcacatccatatgcacatactttaggctctgtggatatcaaagatcccacaa

SEQ ID NO: 36329 - DNA, 75 bp, synthetic construct
  source 1..75: mol_type = other DNA
accctacaccaccgtttgtgaagccattcaatattacgttctctctgaaattgataatctcaagcctgacggcac

SEQ ID NO: 36330 - DNA, 75 bp, synthetic construct
  source 1..75: mol_type = other DNA
tttgcagcttcaggaaatggcccgcagcagcaaagtagtaaccagcagaacactcctgtatacgacgattccatc

SEQ ID NO: 36331 - DNA, 75 bp, synthetic construct
  source 1..75: mol_type = other DNA
aaccagtgatcattattttgaggtagcagcgcagcggcttcgggggactattaccacaaccatttcggctacata

SEQ ID NO: 36332 - DNA, 75 bp, synthetic construct
  source 1..75: mol_type = other DNA
gccgcagcaacaatatccttcgccaggcttccgcttattttgcgaaggcggagttcgaccgcctctggaaaaagt

SEQ ID NO: 36333 - DNA, 75 bp, synthetic construct
  source 1..75: mol_type = other DNA
gatctggaaagaatgctgcacctgttcagcggcaaaccgatccccgacaaccgggaaaacatcaccattcatctg

SEQ ID NO: 36334 - DNA, 75 bp, synthetic construct
  source 1..75: mol_type = other DNA
ctcatcgtccatggaaacgacattcgtgctggatgcactggagcaggcgttatgggcccgtcgaccgtccggcac

SEQ ID NO: 36335 - DNA, 75 bp, synthetic construct
  source 1..75: mol_type = other DNA
gaacgtcctgaccagctgtgggtggctgattttacttacgtcagcacatggcagggcttcgtctatgtggcgttt

SEQ ID NO: 36336 - DNA, 75 bp, synthetic construct
  source 1..75: mol_type = other DNA
gtggccagatgtacagtggcgcgcctcatggcggttatgggacttgccggtgttctccggggtaaaaaggtccgc

SEQ ID NO: 36337 - DNA, 75 bp, synthetic construct
  source 1..75: mol_type = other DNA
actgatagttgaacgtaccagggcagggctggctgcagctcgtgccaaaggcagagtaggtggacgccgtcctaa

SEQ ID NO: 36338 - DNA, 75 bp, synthetic construct
  source 1..75: mol_type = other DNA
gtcgtccgtctggcaccatccatcacagcgataaaggctctcagtatgtgtcactggcctatacggagcgactaa

SEQ ID NO: 36339 - DNA, 75 bp, synthetic construct
  source 1..75: mol_type = other DNA
acggaagaactgacgcgcctgtctctcgccagagtcgaaggttttgataaggtggagatcaccggcccgcgtctg

SEQ ID NO: 36340 - DNA, 75 bp, synthetic construct
  source 1..75: mol_type = other DNA
attgctttcaagcttgcgtatcgacagcaataccaacaaaaagctggatggaattatgagccttctttttgctga

SEQ ID NO: 36341 - DNA, 75 bp, synthetic construct
  source 1..75: mol_type = other DNA
aggaagatatcaaagtggctgttgcggatgatgattgtgcttcacgtcctgtgcctgctgccgctgctgaccggt

SEQ ID NO: 36342 - DNA, 75 bp, synthetic construct
  source 1..75: mol_type = other DNA
tctgggctctgaaagaacgcccgaacatcgatgttcaacgcgtcacgtttaatgatggcgaggttgatcaacggg

SEQ ID NO: 36343 - DNA, 75 bp, synthetic construct
  source 1..75: mol_type = other DNA
attttttcctttcacgacgaagatttgctggaagcgccgtttgaccacattcgcttatttgaatctcaattgttc

SEQ ID NO: 36344 - DNA, 75 bp, synthetic construct
  source 1..75: mol_type = other DNA
attaccgtctatgaaggttccagaccaggtacgctgaatgattttcttggtgccatgacggaggatgatgcccgt

SEQ ID NO: 36345 - DNA, 75 bp, synthetic construct
  source 1..75: mol_type = other DNA
gcactgatttttgatgtgggtgtttccacaatttatagaaaatttccggcaaataagagcaatgaatccccctga

SEQ ID NO: 36346 - DNA, 75 bp, synthetic construct
  source 1..75: mol_type = other DNA
agattgataacggtcagcttgcgcctgacctggctgaaatcaggacgtccattacgaatgtcagcaatgaaatca

SEQ ID NO: 36347 - DNA, 75 bp, synthetic construct
  source 1..75: mol_type = other DNA
gcaggggaatcagctgttcatgaacgacgtgttcctgaagcgactgtttgcggtgagcatcacgtcatccggcaa

SEQ ID NO: 36348 - DNA, 75 bp, synthetic construct
  source 1..75: mol_type = other DNA
ccgttctgtttcgcggtggtaagcatgaaaacttcaacagcaacaaccaacagtcatactggtattcaacctgta

SEQ ID NO: 36349 - DNA, 75 bp, synthetic construct
  source 1..75: mol_type = other DNA
catccaggtaccgtcaaactatgacccggaaaaacgcacgtacagcggcatctgggacggcagcctgaaaccggc

SEQ ID NO: 36350 - DNA, 75 bp, synthetic construct
  source 1..75: mol_type = other DNA
cgagaaatggcagttatgccagcggtacaataacggtcactgtgtacgatgaccaggcttttgaccgtcagatag

SEQ ID NO: 36351 - DNA, 75 bp, synthetic construct
  source 1..75: mol_type = other DNA
cacgggttatggttttgaagttcgcaaaaacggcgtattaatcgcatccagagaaactaaaggggccattcccgg

SEQ ID NO: 36352 - DNA, 75 bp, synthetic construct
  source 1..75: mol_type = other DNA
ccagcgcctgttccgctgtgtgagtatccgtgagaacgatgacggcacgtatgccatcactgccgtgcagcatgt

SEQ ID NO: 36353 - DNA, 75 bp, synthetic construct
  source 1..75: mol_type = other DNA
ctgtccggattctgattcagttacagcgtaatggccgctgggtgacggaaaaggatgtcaccattaacggcaaga

SEQ ID NO: 36354 - DNA, 75 bp, synthetic construct
  source 1..75: mol_type = other DNA
gatgctcagggcgtattttcctcagttatagatatgcctgccggacaggggacgctgacactgacattcaccgta

SEQ ID NO: 36355 - DNA, 75 bp, synthetic construct
  source 1..75: mol_type = other DNA
gatggtgtggagacatacggtgtatggggactctccctgccgtcactgcgtcgtcgcctgttccgctgtgtctcc

SEQ ID NO: 36356 - DNA, 75 bp, synthetic construct
  source 1..75: mol_type = other DNA
catctggcccaggagttgtggacgcagattgataacggtcagcttgcgccggacctggctgaaatcaggacgtcc

SEQ ID NO: 36357 - DNA, 75 bp, synthetic construct
  source 1..75: mol_type = other DNA
cccgatatcagcataccgtcacgctgtatgcaaaagggctgacctgcgaagccgacaccctcggctcctgtggtt

SEQ ID NO: 36358 - DNA, 75 bp, synthetic construct
  source 1..75: mol_type = other DNA
atggcaaaaagtacaaaaggggcaaaacgtatcaaagccgcagcagcactctgggtgccggggacacgcgaagag

SEQ ID NO: 36359 - DNA, 75 bp, synthetic construct
  source 1..75: mol_type = other DNA
aaagaggtgactggtgcgacatctggagtaacgaggatgtatcggtgtggtggaaccgtctgtgtgacaacgtac

SEQ ID NO: 36360 - DNA, 75 bp, synthetic construct
  source 1..75: mol_type = other DNA
ccggtcgctgacatcgtactcaatgagacgcaggcgtcatattgcactgcgtacagcgtaaatatcgggggcaac

SEQ ID NO: 36361 - DNA, 75 bp, synthetic construct
  source 1..75: mol_type = other DNA
ccggcatattgttcagcgggaagaacaggttacaagtcctggccaaaacatcaggtggtgctggttttggtgctc

SEQ ID NO: 36362 - DNA, 75 bp, synthetic construct
  source 1..75: mol_type = other DNA
gagggtgacggcactgccagccctgaactactggcgattgttgataaagcgctgaacgccgaagatgtgcgcccg

SEQ ID NO: 36363 - DNA, 75 bp, synthetic construct
  source 1..75: mol_type = other DNA
agacggcagcattatggatagcgccttatattgataatcaggatgtttatcatcagccatccagcgtgttttttg

SEQ ID NO: 36364 - DNA, 75 bp, synthetic construct
  source 1..75: mol_type = other DNA
aagccatcacccggaaccttgaccgtgaaatctggcgtgacctgatgcaacgctccgggatgctttccttaatgg

SEQ ID NO: 36365 - DNA, 75 bp, synthetic construct
  source 1..75: mol_type = other DNA
ccggaaatcagtgaagcgaacatttggagcacatttgagcaactgcaccagaataaggatgacgtgtttgagcga

SEQ ID NO: 36366 - DNA, 75 bp, synthetic construct
  source 1..75: mol_type = other DNA
atgatcaaagagactgttacgatgagtcataaggaactccaccgacttcagattattcaggagtcaattaatcga

SEQ ID NO: 36367 - DNA, 75 bp, synthetic construct
  source 1..75: mol_type = other DNA
tgccgaaatagtccgggataattacgggcggcttaattatatccgtcagtccagagttgctccaccgccacgcag

SEQ ID NO: 36368 - DNA, 75 bp, synthetic construct
  source 1..75: mol_type = other DNA
tctacaagaacaagcccgctaaccttgcccgtatcgccagtgaccgcgtgtggagttacgagattaccgaccatg

SEQ ID NO: 36369 - DNA, 75 bp, synthetic construct
  source 1..75: mol_type = other DNA
tcctgctgatcgcaggatttgccattcttcgccttttgttcagagcattaatcagcacggcgtctgcgctggcag

SEQ ID NO: 36370 - DNA, 75 bp, synthetic construct
  source 1..75: mol_type = other DNA
gagtctctaccccgggtagctgcccggtttaacattcccagccacaacacggttaaaaactggataaaaggctac

SEQ ID NO: 36371 - DNA, 75 bp, synthetic construct
  source 1..75: mol_type = other DNA
agtttcggcgtgatttttctctggtacaggcagcgccccgcagtaaaccaaccagcagggagaaagcacgcgcca

SEQ ID NO: 36372 - DNA, 75 bp, synthetic construct
  source 1..75: mol_type = other DNA
gcatatgtggagtacattaaaatctggccgctcatggatggggctagtaaaaaatcgctgtaaaaatggcgacca

SEQ ID NO: 36373 - DNA, 75 bp, synthetic construct
  source 1..75: mol_type = other DNA
gtatgccagagggctgacctgcgaagccgacaccctcggcagctgtggttacgtttatctggctgtttatccaac

SEQ ID NO: 36374 - DNA, 75 bp, synthetic construct
  source 1..75: mol_type = other DNA
tatcaggaagaccctgaccttgtggtgattgtggggcgtcagctactggcggacaagtatttccccatcgtcaac

SEQ ID NO: 36375 - DNA, 75 bp, synthetic construct
  source 1..75: mol_type = other DNA
tgagcaatatcaccgatgctgacggtaaggtcgtttcggcagtgattcgcgtcggtaaaaacggcgactatgaga

SEQ ID NO: 36376 - DNA, 75 bp, synthetic construct
  source 1..75: mol_type = other DNA
tggcgctggacggtgcgacatttagttcagaaacaaccctgaataacggaaccaataccattccgttccaggcgc

SEQ ID NO: 36377 - DNA, 75 bp, synthetic construct
  source 1..75: mol_type = other DNA
gaacacattgatcacagagaatatcaccagatcctggctgaaacagaacaggagaaccatctgaaaaaattacgt

SEQ ID NO: 36378 - DNA, 75 bp, synthetic construct
  source 1..75: mol_type = other DNA
aagtcctggctctacagagttcagctgcgggtagcgcaacaaacgttggcgtgcagattctggacagaacaggta

SEQ ID NO: 36379 - DNA, 75 bp, synthetic construct
  source 1..75: mol_type = other DNA
ccggatgacgccaccgtccggaatacgttctacaacctcgataatcaccctcaacgattcagtcttgaaccgttg

SEQ ID NO: 36380 - DNA, 75 bp, synthetic construct
  source 1..75: mol_type = other DNA
gtggtctgggatggacagaaagccggtagtgcggttggcatactggtactgccgcttgaaggcacagagacggtg

SEQ ID NO: 36381 - DNA, 75 bp, synthetic construct
  source 1..75: mol_type = other DNA
atgcaggatattcgcgaagaaagtctgaacgagtcggttaagtcagagcagtcaccgcgggtggtactctgggaa

SEQ ID NO: 36382 - DNA, 75 bp, synthetic construct
  source 1..75: mol_type = other DNA
aagtcatggctggataacaaagaattattacaaacagcgatatcagttcttaaagacaaccaaaatttaaatggt

SEQ ID NO: 36383 - DNA, 75 bp, synthetic construct
  source 1..75: mol_type = other DNA
cgtaaaggggagcatcaggcgctggaagcgtttctggcccggcacggtggggtcagggcgtttcagtggacaccg

SEQ ID NO: 36384 - DNA, 75 bp, synthetic construct
  source 1..75: mol_type = other DNA
gcaaaatgacattttgcttatcgaggatgtggacagactttcccgcctgtcaggggaagactggaatacgttgaa

SEQ ID NO: 36385 - DNA, 75 bp, synthetic construct
  source 1..75: mol_type = other DNA
tttaaaaataagctgaccagttacgatataggcacaaaagatccggtcactgggttaaacacttttatttatgat

SEQ ID NO: 36386 - DNA, 75 bp, synthetic construct
  source 1..75: mol_type = other DNA
aaaattgattaggcagaaagatatacgagtgatggccatcaacgttccgacaacatggatagcttcaggaagcca

SEQ ID NO: 36387 - DNA, 75 bp, synthetic construct
  source 1..75: mol_type = other DNA
tggttttctggtttatgaagaagcagtgccaaagagttgagacaggtaaaatcggtgatgaaggatattcatggg

SEQ ID NO: 36388 - DNA, 75 bp, synthetic construct
  source 1..75: mol_type = other DNA
aagaaaaagcgctatggcttgctaaagccgctgaaacaaaccgtcctccaatgaagcgtatccacagtgccaaat

SEQ ID NO: 36389 - DNA, 75 bp, synthetic construct
  source 1..75: mol_type = other DNA
tatcggccacgttgaccatggtaaaactactctgaccgctgcaatcacaaccgtactggctaaaacctacggcgg

SEQ ID NO: 36390 - DNA, 75 bp, synthetic construct
  source 1..75: mol_type = other DNA
ttgaatatctcctctgctttacgccaggttgttcacggcactcgctggcacgctaaacgcaagagctacaaagtg

SEQ ID NO: 36391 - DNA, 75 bp, synthetic construct
  source 1..75: mol_type = other DNA
gaatacggcagtgcacatcctgatgatcaaaccgtgctggcggtgcctgttgataaggctgttgagcttgtcagg

SEQ ID NO: 36392 - DNA, 75 bp, synthetic construct
  source 1..75: mol_type = other DNA
ctcccgcccctgtgacgccactgatgccgctgccggacatcacacaggagcgttttttacgtcttccggaagtga

SEQ ID NO: 36393 - DNA, 75 bp, synthetic construct
  source 1..75: mol_type = other DNA
ggatgcgcgcccatccgtatgatgatttagtggtgctggacgttaccgccagccagcagcttgctgatcagtatc

SEQ ID NO: 36394 - DNA, 75 bp, synthetic construct
  source 1..75: mol_type = other DNA
cccgatagtgacgccagccttgctaagccgtgagggttttttatatccgacgccagcgacctccattcccagaga

SEQ ID NO: 36395 - DNA, 75 bp, synthetic construct
  source 1..75: mol_type = other DNA
ttaccggcggagagagtttcgcggagattgcccgtctcccttcaggggcggtggtgaggctctgtctgaacaccg

SEQ ID NO: 36396 - DNA, 75 bp, synthetic construct
  source 1..75: mol_type = other DNA
accgtcgtgctgcaacggtgtggatggcggcattccgtgaaagccactcccagccagaacgaaacaattttctgg

SEQ ID NO: 36397 - DNA, 75 bp, synthetic construct
  source 1..75: mol_type = other DNA
agcatacccgtctaccagggcagtgtctttctggatcctgcaaagacgcatgaggtagcgtttaccgctaaaccg

SEQ ID NO: 36398 - DNA, 75 bp, synthetic construct
  source 1..75: mol_type = other DNA
cgtcacgatagtcactgacagaagctacaacactgaacataaagattttgagaagcgaaaagagaagcagcagaa

SEQ ID NO: 36399 - DNA, 75 bp, synthetic construct
  source 1..75: mol_type = other DNA
ctaatcaagttaacccagataaaatatcatggggatatagaggcggtactcttgatttaaatggaaataatgtaa

SEQ ID NO: 36400 - DNA, 75 bp, synthetic construct
  source 1..75: mol_type = other DNA
tggcagctattcaggagaatctgaacgcgccaaagaatcagtacaactcattcggcaaatataaatacagaagct

SEQ ID NO: 36401 - DNA, 75 bp, synthetic construct
  source 1..75: mol_type = other DNA
aagcaccgtcattctgggaagttctcgggtctttactgacaagaatgacggaaccggtaatgcggtatcttctgt

SEQ ID NO: 36402 - DNA, 75 bp, synthetic construct
  source 1..75: mol_type = other DNA
ccagcaaaatattgaagcgcattacggtaaatcgcttcatgaagttgtcggtatcgtgacgccttttagcgctca

SEQ ID NO: 36403 - DNA, 75 bp, synthetic construct
  source 1..75: mol_type = other DNA
caagaacaaaaaatcactctactgaaaagtgctaaaacggaatggaaaaaatatcgcgccggtgaatcactgatc

SEQ ID NO: 36404 - DNA, 75 bp, synthetic construct
  source 1..75: mol_type = other DNA
actggatgtggctgcacggcaccgggtgcagtttgcgatgcctgaagtggatgcggtagccatgctgaaagggaa

SEQ ID NO: 36405 - DNA, 75 bp, synthetic construct
  source 1..75: mol_type = other DNA
agatgtttgagcaagtgagaaaagagcaaaacttctcctggttttattcagaattaaaacatcaccgtattgcac

SEQ ID NO: 36406 - DNA, 75 bp, synthetic construct
  source 1..75: mol_type = other DNA
atgctgaatttgcaacactgtcagcaatattcgaaaacaaaattgaatcactggcagcagaagcagagatggaag

SEQ ID NO: 36407 - DNA, 75 bp, synthetic construct
  source 1..75: mol_type = other DNA
gtggctgcacggcaccgggtgcagttttcgatgcctgagtccgatgctgtcacaatgctgaaaaacagacacgca

SEQ ID NO: 36408 - DNA, 75 bp, synthetic construct
  source 1..75: mol_type = other DNA
tacatcaagccggggatgagcgttgaagcaatccagggcatcatcgccagcatgaaaggtgactatgaagatcgc

SEQ ID NO: 36409 - DNA, 75 bp, synthetic construct
  source 1..75: mol_type = other DNA
cagcttgatgaacgtgaacgcaggctgaaggcaaaagccaggagtaactacagcgatcaggggggatacgacgca

SEQ ID NO: 36410 - DNA, 75 bp, synthetic construct
  source 1..75: mol_type = other DNA
cttatgctgcaatggtgggcagattttctggatgcaaacagggaggagtgtatcagtccgtttgaatatgcaaaa

SEQ ID NO: 36411 - DNA, 75 bp, synthetic construct
  source 1..75: mol_type = other DNA
atgggaagaccaagaaaaaataaaaaagataatgtactgccaccgcgggttagatcgaatggttacagttacgtg

SEQ ID NO: 36412 - DNA, 75 bp, synthetic construct
  source 1..75: mol_type = other DNA
catacaaatatggaatgacagaacatcaacttaatgcgcagctgacaaagattgaccgtgagcgctctgatggag

SEQ ID NO: 36413 - DNA, 75 bp, synthetic construct
  source 1..75: mol_type = other DNA
cagcttgccgttatgctgaatttactggtttttattcgttccagtgaactcagatacgcccgctggtctgaaatt

SEQ ID NO: 36414 - DNA, 75 bp, synthetic construct
  source 1..75: mol_type = other DNA
ttgattgaatcaggtttgtggtcccgcgatgctgtggaacgtcagatgagccatcaggagcgtaatggtgtacgt

SEQ ID NO: 36415 - DNA, 75 bp, synthetic construct
  source 1..75: mol_type = other DNA
attgaccactgtaaaacgccagcatcgccccgctcttgatctttctcgcctgcctgaacttttgtcgcgtattag

SEQ ID NO: 36416 - DNA, 75 bp, synthetic construct
  source 1..75: mol_type = other DNA
atcttctgatgattcagaaggtgcagatgatgaacaaagacagagaccggagatacgggagaaagcgttacacca

SEQ ID NO: 36417 - DNA, 75 bp, synthetic construct
  source 1..75: mol_type = other DNA
tgcttcagcattcctgctggccgctaacggcaaagtgcgcggcgatgcagatttcatcttctataacaacctgac

SEQ ID NO: 36418 - DNA, 75 bp, synthetic construct
  source 1..75: mol_type = other DNA
cacggtgatcatcatcggcctcgggctggtgcagatgaccgtgctggcgcggattatcgacaaccaccagttcgg

SEQ ID NO: 36419 - DNA, 75 bp, synthetic construct
  source 1..75: mol_type = other DNA
tcgatgtggcagcaaggcacagggtacagttcctgatgcccggtgacgatgctgtggctatgctcaggggaaaca

SEQ ID NO: 36420 - DNA, 75 bp, synthetic construct
  source 1..75: mol_type = other DNA
tgtttgcacttgatgttgctgcgcggcatcgagttcagtttcagatgcccgaagcggatgcggtagccatgctga

SEQ ID NO: 36421 - DNA, 75 bp, synthetic construct
  source 1..75: mol_type = other DNA
gcgtaaagccaactggcactgcagacaatgtcaccacgattatcatggggagcagtactgtacacgctgccagac

SEQ ID NO: 36422 - DNA, 75 bp, synthetic construct
  source 1..75: mol_type = other DNA
acgaccatatttgatttcccgctctggatgcgccggattgcagcgttatgttcagacatggagtggggacaaccg

SEQ ID NO: 36423 - DNA, 75 bp, synthetic construct
  source 1..75: mol_type = other DNA
tgccgatgatgagccaatattacgtccaaccttccttgatcatgagcacgatgttcagacatttgaagaatgtga

SEQ ID NO: 36424 - DNA, 75 bp, synthetic construct
  source 1..75: mol_type = other DNA
aaaaacagcctgagtggtacgtgaaagctgtcagaaaaactatcgcggcgttgccgggtggttacgctgaagctg

SEQ ID NO: 36425 - DNA, 75 bp, synthetic construct
  source 1..75: mol_type = other DNA
tgtcagaccggaacgcagggaggtacgcttgattaagcgtctgcagcaattcgtaccggatgccttacccgtggt

SEQ ID NO: 36426 - DNA, 75 bp, synthetic construct
  source 1..75: mol_type = other DNA
ctgagcacggtcatgagtgcccttatgtcagaccggagcgcagagaaatactgttgattaaacgcttacagcaat

SEQ ID NO: 36427 - DNA, 75 bp, synthetic construct
  source 1..75: mol_type = other DNA
gctattctgacaaataccagttcgccggagattgcagaacgccgtcgggctatggcgtggtcttttgtgcaggaa

SEQ ID NO: 36428 - DNA, 75 bp, synthetic construct
  source 1..75: mol_type = other DNA
cttccggcgctggctgtacaagctggaaaatgatggcgtaatcgttattgacggtgatgacgtgcgcccgctgta

SEQ ID NO: 36429 - DNA, 75 bp, synthetic construct
  source 1..75: mol_type = other DNA
atgattaatctgttaatcatcgttctcagggcagtagttgccgttgcaaacgcgctgattgctgttctggaactg

SEQ ID NO: 36430 - DNA, 75 bp, synthetic construct
  source 1..75: mol_type = other DNA
actcacctgtcttcctgaaaaatttgtggttgatttcgcaaacggaatcgatgttgcacaggagcatatccgcac

SEQ ID NO: 36431 - DNA, 75 bp, synthetic construct
  source 1..75: mol_type = other DNA
caccggaacaggcggaaatcatcaggaatacgccgttctggcctgatgtggacttgtcggagtttcgcagtgtca

SEQ ID NO: 36432 - DNA, 75 bp, synthetic construct
  source 1..75: mol_type = other DNA
gggataaacacgaagacggtgaacacctttctgtatatgggacttggtaaaaatggtcttaagtacaggagtgtg

SEQ ID NO: 36433 - DNA, 75 bp, synthetic construct
  source 1..75: mol_type = other DNA
gagctggagcgtaaaaatcgtgaactgcgccgcagtaacgatatccttcgccagacttccgcttatatgcagtga

SEQ ID NO: 36434 - DNA, 75 bp, synthetic construct
  source 1..75: mol_type = other DNA
gccgcagcaacgatatcctgcgccaggcttccgcgtattttgcgaaggcggagttcgaccgcctgtggaaaaaat

SEQ ID NO: 36435 - DNA, 75 bp, synthetic construct
  source 1..75: mol_type = other DNA
gacagcaatattcggtgttcatcctcagctgactgcccggatagaacttccggggggaagcatctccgatgtgaa

SEQ ID NO: 36436 - DNA, 75 bp, synthetic construct
  source 1..75: mol_type = other DNA
tataacacaacagaacaatggctggagcagttcccgttctggtcagagtcaacgttaaaacgcgcatttgcaagt

SEQ ID NO: 36437 - DNA, 75 bp, synthetic construct
  source 1..75: mol_type = other DNA
ggttattcgcctggggcgttcgccaataaagcgttgtgtgaatcatatttctgaaccggataccgaaattccgcc

SEQ ID NO: 36438 - DNA, 75 bp, synthetic construct
  source 1..75: mol_type = other DNA
atgagccttctttttgctgaacgcccactggttataaacacgcagctggcaatgaaaattggcttaaacgaagcc

SEQ ID NO: 36439 - DNA, 75 bp, synthetic construct
  source 1..75: mol_type = other DNA
caccggaacaggcggaaatcatcaggaatacgccgttctggcctaatgtggacctgtcggagtttcgcagcgtga

SEQ ID NO: 36440 - DNA, 75 bp, synthetic construct
  source 1..75: mol_type = other DNA
ccgccgaacagctggagctgatgcgcagcgccttccgggttatccggactgtacgtgaaaagcatgcctgtactc

SEQ ID NO: 36441 - DNA, 75 bp, synthetic construct
  source 1..75: mol_type = other DNA
aaaaggcatccatccgcagccccatcttgcggggttcagtggtgtactgcaggcggatgcatacgccgggttcaa

SEQ ID NO: 36442 - DNA, 75 bp, synthetic construct
  source 1..75: mol_type = other DNA
atggtgccgtttttccggggcgcatcatgctggctaatacctgcacctggacctatcgcggtgatgagtgcggtt

SEQ ID NO: 36443 - DNA, 75 bp, synthetic construct
  source 1..75: mol_type = other DNA
gtcaccgcgggtggtgctctgggaaattgacctgaaggcccagggtggtgagcggtattttttctgtaatgagct

SEQ ID NO: 36444 - DNA, 75 bp, synthetic construct
  source 1..75: mol_type = other DNA
ccctttatatcgccagtcagaaatatacgcgcgacaggacgtggagctgagccgcaataccctggtgcgctgggt

SEQ ID NO: 36445 - DNA, 75 bp, synthetic construct
  source 1..75: mol_type = other DNA
catgatggctggtttgaaagtgataacgccattgtgactaactgttttggtcatattatcgaatcacagccgccg

SEQ ID NO: 36446 - DNA, 75 bp, synthetic construct
  source 1..75: mol_type = other DNA
caccgccgccgttattcaccgaagcctccttgcttgctgcgcttgttcgtgtcgcggattttgtcactgatccaa

SEQ ID NO: 36447 - DNA, 75 bp, synthetic construct
  source 1..75: mol_type = other DNA
atcgggacgtgcaaactgaatggagtggagccagaaagctacctccgctatgtccttgacgtcatagccgactgg

SEQ ID NO: 36448 - DNA, 75 bp, synthetic construct
  source 1..75: mol_type = other DNA
aaactggcctgtagccggtgtgatgtcatcgttcaggcaccacttccccctaaaccaatcgaacgcggttatgcc

SEQ ID NO: 36449 - DNA, 75 bp, synthetic construct
  source 1..75: mol_type = other DNA
gtgcaggcacctgcaccttcgcggcccatcgagcggggtatcgccggaccggggctgctggcccgcgtgctgacc

SEQ ID NO: 36450 - DNA, 75 bp, synthetic construct
  source 1..75: mol_type = other DNA
agagtgcggaagatgtaaaggcgtcggttattcaagaatgccagcaagcgccgcatatcgcgctgtgacgatgct

SEQ ID NO: 36451 - DNA, 75 bp, synthetic construct
  source 1..75: mol_type = other DNA
gtgtcacggtggaagtccggcatcagtcccctggatttgtggcgacacgacatacgcgtggaaacaagaacacgg

SEQ ID NO: 36452 - DNA, 75 bp, synthetic construct
  source 1..75: mol_type = other DNA
caggaagccattgtggttgtgcgtattgagggagccggtctggcaagacagtatcatgtgcttcagcccggaggg

SEQ ID NO: 36453 - DNA, 75 bp, synthetic construct
  source 1..75: mol_type = other DNA
ctccctgctgccgacagccggagaggctgctgcgcagggctggaccatcaccggcggcagtgttgcgctggaaga

SEQ ID NO: 36454 - DNA, 75 bp, synthetic construct
  source 1..75: mol_type = other DNA
tggccggtttcctctctgccgcagggtgtcaccctgacaggggatgcagggaataatctgctggcatcgttctac

SEQ ID NO: 36455 - DNA, 75 bp, synthetic construct
  source 1..75: mol_type = other DNA
tcagggcggcgtcgccgtcagaccttgcggagcgactgacacaaaaactgaaggaaggctggcagccgtttggca

SEQ ID NO: 36456 - DNA, 75 bp, synthetic construct
  source 1..75: mol_type = other DNA
gtgaagagtatttttgaagggttatcacaggtaacggcgttactgggtactcctgtatctgctgagactttggct

SEQ ID NO: 36457 - DNA, 75 bp, synthetic construct
  source 1..75: mol_type = other DNA
gctatgtgtttgccctgatgtggctgcagacctggccgttgttgtatgccattctgaacagtgccatgacattct

SEQ ID NO: 36458 - DNA, 75 bp, synthetic construct
  source 1..75: mol_type = other DNA
cgtgctctctgaactctctcagatacagctgaaatactccgacctggcgtccactgccggatatatatctgtcat

SEQ ID NO: 36459 - DNA, 75 bp, synthetic construct
  source 1..75: mol_type = other DNA
agaatgcctggtgctgacagtccacaggaactgatgaaaagagcaaaggagtatcaggataagcacaagcaataa

SEQ ID NO: 36460 - DNA, 75 bp, synthetic construct
  source 1..75: mol_type = other DNA
ctcagacctgaaaaattccggagaaatagaggcggatgcagacatcattctgatgctttacagggatgaagtgta

SEQ ID NO: 36461 - DNA, 75 bp, synthetic construct
  source 1..75: mol_type = other DNA
ctcactgtcgaccggaaagggcgtcattcagccggttcacattgatgatgtccttccggaagtggtcgaccgtgt

SEQ ID NO: 36462 - DNA, 75 bp, synthetic construct
  source 1..75: mol_type = other DNA
tctttaacgaagaggccacgatacctattttttataaaactgtgcgcgaatttgaagggcttcagcagcatgaag

SEQ ID NO: 36463 - DNA, 75 bp, synthetic construct
  source 1..75: mol_type = other DNA
tcgtcaccgtgtctgatgtcatgagcgtgttgcatgacagctacgacaacggcaaatccggggaaaaatttttac

SEQ ID NO: 36464 - DNA, 75 bp, synthetic construct
  source 1..75: mol_type = other DNA
ggaaaaaacagttaagaaattctatgatgcgctggtgagcaagtttgatattgaggaagcatgggctgagaggca

SEQ ID NO: 36465 - DNA, 75 bp, synthetic construct
  source 1..75: mol_type = other DNA
atgctgacaaacctgaactatgaggcgatgaaaacattgctcggcgagcggattatggatcgcatgaccatgaac

SEQ ID NO: 36466 - DNA, 75 bp, synthetic construct
  source 1..75: mol_type = other DNA
tacgccatttatttgggcatgtgaggaattttcgtctctggcataaagagctaacagatgcgcagcttggggagg

SEQ ID NO: 36467 - DNA, 75 bp, synthetic construct
  source 1..75: mol_type = other DNA
cgggatacgcgcaacgagcaggtcacgctgaaccagatagtcgaccgcagaacggcttcgatgcgtagtgtcgga

SEQ ID NO: 36468 - DNA, 75 bp, synthetic construct
  source 1..75: mol_type = other DNA
tccgtggccattgatattgcttatgaaggctccggcagtggcgactggcgcactgacggtttcatcgtgggtgtc

SEQ ID NO: 36469 - DNA, 75 bp, synthetic construct
  source 1..75: mol_type = other DNA
aatatgaaggaggaaactttgaacccggtggcacagctttgctaaaaatcactatgcatcccacattccaaaaat

SEQ ID NO: 36470 - DNA, 75 bp, synthetic construct
  source 1..75: mol_type = other DNA
gggattttatgcgtcagaccgttgaacggcagcataatacctggttccgtgaccaggttgaggcaggacgtcagc

SEQ ID NO: 36471 - DNA, 75 bp, synthetic construct
  source 1..75: mol_type = other DNA
tctaggcgatcccatcgcctcagaactgacagctggtgactttacaaaataccgcgaagcacggttaaaaggtga

SEQ ID NO: 36472 - DNA, 75 bp, synthetic construct
  source 1..75: mol_type = other DNA
taactgacaacaaggggaaaaagcacgatgtgctgaccggaagtgatgacggtcgccacagcaacacgtctctgg

SEQ ID NO: 36473 - DNA, 75 bp, synthetic construct
  source 1..75: mol_type = other DNA
gtggggccgtctgtgcgcgtgaatgaatggttcagcgcgtatgcgatggcgggtatggcttacagccgtgtgtcg

SEQ ID NO: 36474 - DNA, 75 bp, synthetic construct
  source 1..75: mol_type = other DNA
cttctttgttcgtttttaacttatcgtctggttttgcggcggaaaacattcctttttcacctcagcctccagaga

SEQ ID NO: 36475 - DNA, 75 bp, synthetic construct
  source 1..75: mol_type = other DNA
gtgaagtggttatgaacgaacgtcagagcgtcgttaacgcctggcagacgcggacaaaagaagcgccccatagtc

SEQ ID NO: 36476 - DNA, 75 bp, synthetic construct
  source 1..75: mol_type = other DNA
actgtggcatttgaagagaagtatggttcccaactggagctaatttttcgatttatcgatcgcgcgctggcaatt

SEQ ID NO: 36477 - DNA, 75 bp, synthetic construct
  source 1..75: mol_type = other DNA
atgacacgacaattaagggcggtacttcacgcatagagggggggactgcaaatggaacaatcattgatggtggag

SEQ ID NO: 36478 - DNA, 75 bp, synthetic construct
  source 1..75: mol_type = other DNA
cctatttggattatgaaaatgcgctaggtgacggcataggagtgggctatggccaaagttatcagccctggctta

SEQ ID NO: 36479 - DNA, 75 bp, synthetic construct
  source 1..75: mol_type = other DNA
aagcgttaaggattaaaacgccaaatcttgaacaggcggcattaaatctaagtggaggaaaccagcagaaaatta

SEQ ID NO: 36480 - DNA, 75 bp, synthetic construct
  source 1..75: mol_type = other DNA
tgattgccgatgccaaacccgcaagtcgccaccttatcggcctgaacattatccaggacattcccggctatctgt

SEQ ID NO: 36481 - DNA, 75 bp, synthetic construct
  source 1..75: mol_type = other DNA
ttcagcaacaaacagttaatcaggccaataatgcaccaacacgggaagaaccatcattgatgcaacaagctggcg

SEQ ID NO: 36482 - DNA, 75 bp, synthetic construct
  source 1..75: mol_type = other DNA
gaaaaaatatcttgattaccggttcagcacagggcattggctttttactggcaaccggcctgggtaaatatggcg

SEQ ID NO: 36483 - DNA, 75 bp, synthetic construct
  source 1..75: mol_type = other DNA
tcagggcggcatcgccgtcagaccttgctgatgcacttgcgcaaaaaattcgtgaaggatggcaaccatatggtg

SEQ ID NO: 36484 - DNA, 75 bp, synthetic construct
  source 1..75: mol_type = other DNA
ttcttcgatacaagctgaacttaataatgcttatggggttagcaaagctgtagctgaaagctatgtcgaaaaata

SEQ ID NO: 36485 - DNA, 75 bp, synthetic construct
  source 1..75: mol_type = other DNA
ggttatcccgtccacccacgcctatcctgtgaccgtagtggccagccagcctgtcaccacacaaatcatgccgga

SEQ ID NO: 36486 - DNA, 75 bp, synthetic construct
  source 1..75: mol_type = other DNA
ttgttagtagagtatttaaaataaatattaatgcgcaagatcatcatattgatgctgaaaaaaagacaatgcatt

SEQ ID NO: 36487 - DNA, 75 bp, synthetic construct
  source 1..75: mol_type = other DNA
cgaaggcccgtaacaatagtcaggatggtctgacctttaccgacctgctacgttctaaaacctatcgcggcaacg

SEQ ID NO: 36488 - DNA, 75 bp, synthetic construct
  source 1..75: mol_type = other DNA
aggaatttggtaagctcgataaatgtttgtccagatacggtacgcgcttcgagtttaataatgaaaagcaagtta

SEQ ID NO: 36489 - DNA, 75 bp, synthetic construct
  source 1..75: mol_type = other DNA
atgcagtcactatcacttcatcaaaatagcggatatcaaacggctgcgatgataaatcgcaatcaacctgtctcg

SEQ ID NO: 36490 - DNA, 75 bp, synthetic construct
  source 1..75: mol_type = other DNA
gaaaaatataacactgggcaactcttcgggttagatggtataaaagcagataatccaataaaagcaaagcaaggg

SEQ ID NO: 36491 - DNA, 75 bp, synthetic construct
  source 1..75: mol_type = other DNA
gcttgtggcgatttttctgccaaatgtagcgatgcatgtattgaaaaatataacactgggcaactcttcgggtta

SEQ ID NO: 36492 - DNA, 75 bp, synthetic construct
  source 1..75: mol_type = other DNA
atgaaacaaactacaaagatgttgttgttaatatagatgaatttgtaccttttgatataacttttggaaagggga

SEQ ID NO: 36493 - DNA, 75 bp, synthetic construct
  source 1..75: mol_type = other DNA
ggaaaagccaaacttttcgaattaatgacagaagacgacgaagagcttgccgaactggccgacggcggcacagtt

SEQ ID NO: 36494 - DNA, 75 bp, synthetic construct
  source 1..75: mol_type = other DNA
cacagcgcgtagcctgcgctccacatttgacctgccggacgagccaacaggcaatgcagcgccttcatggctgac

SEQ ID NO: 36495 - DNA, 75 bp, synthetic construct
  source 1..75: mol_type = other DNA
gccgctgggctatctgattgaggttaaagagtggtgggagctcaacgaagagccgggaactttccggcttgtggt

SEQ ID NO: 36496 - DNA, 75 bp, synthetic construct
  source 1..75: mol_type = other DNA
ttacagctatcccagaacttcttaacatgctggatattaaaggaaaaatcatcacaactgatgcgatgggttgcc

SEQ ID NO: 36497 - DNA, 75 bp, synthetic construct
  source 1..75: mol_type = other DNA
ggtttgggagaagcggctaaaaggaatgtagggacaggggcgaatcagatacctgatatgggtagcttcacgctt

SEQ ID NO: 36498 - DNA, 75 bp, synthetic construct
  source 1..75: mol_type = other DNA
ctcaatctgtacgcggatttgcgcagcgtcaccggcgaggcacggaagcagacttttgctcgcctgctggagttt

SEQ ID NO: 36499 - DNA, 75 bp, synthetic construct
  source 1..75: mol_type = other DNA
caattctgatgaaccgagtgattatgctggcccgggtgatgttgcaatgtcctttactgcttcaggttccgacta

SEQ ID NO: 36500 - DNA, 75 bp, synthetic construct
  source 1..75: mol_type = other DNA
gacgatgaatgacagaggtctaaagttaactccaattgatttgttgaaagggttccttttgtctggagtctctgt

SEQ ID NO: 36501 - DNA, 75 bp, synthetic construct
  source 1..75: mol_type = other DNA
gcggtaataaagtctgcaattccagaaccacgggatattgaggacgacaatgacaatatggatgacgtatctctt

SEQ ID NO: 36502 - DNA, 75 bp, synthetic construct
  source 1..75: mol_type = other DNA
ttgacgtttcgcgggaacctgctgctgtattccctgtggtatgaacttcacccgtttgagaaccttcgccgcaag

SEQ ID NO: 36503 - DNA, 75 bp, synthetic construct
  source 1..75: mol_type = other DNA
tcagcaacatgtcaaagtcagcagcgggtacggtcagccagccggggcgcaatgtccgggcaaaatcaggtttaa

SEQ ID NO: 36504 - DNA, 75 bp, synthetic construct
  source 1..75: mol_type = other DNA
ccggcacatctgcccgtgaggcggcaacccatgcgactgatgctgcaggctcagcgcgtgcagccagcacgtcag

SEQ ID NO: 36505 - DNA, 75 bp, synthetic construct
  source 1..75: mol_type = other DNA
acacacagaatgcacagtgggctgattatgtgggtgacattcttcggggggctcagccgataaaccagctagtac

SEQ ID NO: 36506 - DNA, 75 bp, synthetic construct
  source 1..75: mol_type = other DNA
tatctgccacagttaccaaacgaaataacatcagttacaatcgaaaattgcaataacctgaccacccttacagga

SEQ ID NO: 36507 - DNA, 75 bp, synthetic construct
  source 1..75: mol_type = other DNA
ccgtagagccagccagttacggtggtcgcgatggtgtgtccgccagaaaatcaccacgaataccagaatcgcggc

SEQ ID NO: 36508 - DNA, 75 bp, synthetic construct
  source 1..75: mol_type = other DNA
atgccatcagcgtgatggctgcggcgctgaacactcatgatacaggaggcactatgccgcaattaactgcaacgg

SEQ ID NO: 36509 - DNA, 75 bp, synthetic construct
  source 1..75: mol_type = other DNA
ctcagcctgcatgcgttgcgttaccagtacaggaagctgcaacacaggaagatattaaaacagagactgtggcgg

SEQ ID NO: 36510 - DNA, 75 bp, synthetic construct
  source 1..75: mol_type = other DNA
ggcactggctgaggcctgcccggcacttgttgacgctgcactggcagacgacgcagccgctgtttttgagcctgc

SEQ ID NO: 36511 - DNA, 75 bp, synthetic construct
  source 1..75: mol_type = other DNA
caccggcaagccgggctaaagtaaatatcgccggaccggatgatgttgatccgctggcggagcttttaaaagcga

SEQ ID NO: 36512 - DNA, 75 bp, synthetic construct
  source 1..75: mol_type = other DNA
agtccgtccttaaaaacaaccggtcatcactgaaaggggactttaccgaaagtgctgaactatatcttgttctac

SEQ ID NO: 36513 - DNA, 75 bp, synthetic construct
  source 1..75: mol_type = other DNA
cgagacgacgcaaatagaaatcaagtcagtgattgcccgttgtcatttgcataacgtcagaggttgtgggaaatg

SEQ ID NO: 36514 - DNA, 75 bp, synthetic construct
  source 1..75: mol_type = other DNA
accgagcgcgatcagttgcaggcgatttttgacgccgtagacgaactgagccaggaaagccctggcgacattctg

SEQ ID NO: 36515 - DNA, 75 bp, synthetic construct
  source 1..75: mol_type = other DNA
gggaaaagtgagttatgtgggtggcaacagcaagagctccactttatttatcagtctgttgaaacacctgaaatc

SEQ ID NO: 36516 - DNA, 75 bp, synthetic construct
  source 1..75: mol_type = other DNA
gggcttctgtcttttcagacctgtcatttgcctgttactgatgatgttgttgttcctgctactgctactgctact

SEQ ID NO: 36517 - DNA, 75 bp, synthetic construct
  source 1..75: mol_type = other DNA
tgcctttttgcagtacatgatcgacaaattaagtaatgaagctcacaacgaaatgttgaaagagctaatgtcaaa

SEQ ID NO: 36518 - DNA, 75 bp, synthetic construct
  source 1..75: mol_type = other DNA
aatctacagccgttatttacatcggcaaaaaacgctatgaaacactggcaaaacacgccagagatataagttatg

SEQ ID NO: 36519 - DNA, 75 bp, synthetic construct
  source 1..75: mol_type = other DNA
tgccgaaaaaataggtaacaaccaggcgatcaccgttaccaataaccagatccagaacattggcgttaatcagat

SEQ ID NO: 36520 - DNA, 75 bp, synthetic construct
  source 1..75: mol_type = other DNA
atggcatttaaacactacgatgtggtcagggcggtgtcgccgtcagaccttgctgatgcacttgctcaaaaaatt

SEQ ID NO: 36521 - DNA, 75 bp, synthetic construct
  source 1..75: mol_type = other DNA
aggccaactggtttaacgatgaacaggtgcataaattcaatctcgatattcgggaagtcacgctgagtgataaaa

SEQ ID NO: 36522 - DNA, 75 bp, synthetic construct
  source 1..75: mol_type = other DNA
tctgagtgcgtacagcaacagcattgtggacacgcccacgtactttgcgtttgcaaaaggggccgggctgatggg

SEQ ID NO: 36523 - DNA, 75 bp, synthetic construct
  source 1..75: mol_type = other DNA
gttgatacaggacgtaagttgctgtccgcacaaggggcaacgctgttaagaacagcaatgctggattattataac

SEQ ID NO: 36524 - DNA, 75 bp, synthetic construct
  source 1..75: mol_type = other DNA
ctcacggatgcgtgaacgactccaggaaatgtggagtatccggcaggcgtttgagcagaaaaataacgagctgct

SEQ ID NO: 36525 - DNA, 75 bp, synthetic construct
  source 1..75: mol_type = other DNA
ctactcaagtatgacgggagaaagccaactatctaactacataccgggccttgctctgttgaccaatagcagcac

SEQ ID NO: 36526 - DNA, 75 bp, synthetic construct
  source 1..75: mol_type = other DNA
gcagtccaggccgtttaccggaaagcgcatttcagcggcggtggttcgtccggcgattctgttgttgttcattaa

SEQ ID NO: 36527 - DNA, 75 bp, synthetic construct
  source 1..75: mol_type = other DNA
cggcaattgatgcgcatgatgatgcagttcaggccgtttaccggaaagcgcatttcagcggcggtgggtcttccg

SEQ ID NO: 36528 - DNA, 75 bp, synthetic construct
  source 1..75: mol_type = other DNA
aacgcaattactgaagaatatctgcaccaggggggcggcgaattgcccctggtaccaggcaaggactggaacaat

SEQ ID NO: 36529 - DNA, 75 bp, synthetic construct
  source 1..75: mol_type = other DNA
tatccgcaatgctgaagggcagctacgctggcggtgctggaattttgaacctgatgccggaaaacagctaaatcc

SEQ ID NO: 36530 - DNA, 75 bp, synthetic construct
  source 1..75: mol_type = other DNA
aagcaggaaacggcagaacgcctgctgaagacaggaatggtcagttacgaaagtgacgtgtcacgactggttaaa

SEQ ID NO: 36531 - DNA, 75 bp, synthetic construct
  source 1..75: mol_type = other DNA
atgtcatttggcagctacgatttagtaagcctcgcagaagcacgtgagaagcgtgatatcgcccgtaagcaggtt

SEQ ID NO: 36532 - DNA, 75 bp, synthetic construct
  source 1..75: mol_type = other DNA
caaaacaccgcaaaaacggatgttaatggtctggcgacttttgatctgaaaagtagtaagcaggaagacaacacg

SEQ ID NO: 36533 - DNA, 75 bp, synthetic construct
  source 1..75: mol_type = other DNA
gtattgacggggatgtgttattcagtcggcagtgctacgcgccaggggagcagttcgccgacccggtttatcggc

SEQ ID NO: 36534 - DNA, 75 bp, synthetic construct
  source 1..75: mol_type = other DNA
aatggtcgcacaagacgtagcagttaaagctcacgtcaacgaccagtttggcaacccgattcttaatgaatctgt

SEQ ID NO: 36535 - DNA, 75 bp, synthetic construct
  source 1..75: mol_type = other DNA
gccattccacaagttccggtaactccggatggttggataagctgtagtgagcgaatgccggacgacaggcaggag

SEQ ID NO: 36536 - DNA, 75 bp, synthetic construct
  source 1..75: mol_type = other DNA
caaaatcgtgtacagggtcgaagttctggctcaatgtgctggctgaactgaaaaacagcggcctgaacgatatcc

SEQ ID NO: 36537 - DNA, 75 bp, synthetic construct
  source 1..75: mol_type = other DNA
gaatttgaacaaggtggcgaggccagggctgcgtatggtgcgcagctaatcaagcgactatcaaaggatttaagt

SEQ ID NO: 36538 - DNA, 75 bp, synthetic construct
  source 1..75: mol_type = other DNA
tctataaaaagattgccgctgattgcgaatcatttatatctcgtgccagagtcttatttgaggaagcaaacaggg

SEQ ID NO: 36539 - DNA, 75 bp, synthetic construct
  source 1..75: mol_type = other DNA
atgaaattaccgatttatctcgactactccgcaaccacgccggtggacccgcgtgttgccgagaaaatgatgcag

SEQ ID NO: 36540 - DNA, 75 bp, synthetic construct
  source 1..75: mol_type = other DNA
gctgcatattggtttgattcccacggttggaccgtacctgctaccgcatattatcccgatgctgcaccagacctt

SEQ ID NO: 36541 - DNA, 75 bp, synthetic construct
  source 1..75: mol_type = other DNA
cgcagattatccagcaggccggtaactccgtactggcaaaagccaaccaggtaccgcagcaggttctgtctctgc

SEQ ID NO: 36542 - DNA, 75 bp, synthetic construct
  source 1..75: mol_type = other DNA
aaataaaaatcttcatctttttattttcatgcatctctattatatttttgttactgcatgaaaataatggaatat

SEQ ID NO: 36543 - DNA, 75 bp, synthetic construct
  source 1..75: mol_type = other DNA
atgaaaatcaagcatgagcacatcgaatcagtgttgtttgccctggcagccgaaaaagggcaggcatgggtagcc

SEQ ID NO: 36544 - DNA, 75 bp, synthetic construct
  source 1..75: mol_type = other DNA
gattctttttctgagttaccagagaatacgatagtcattccttatggagagcttacaggcagttttgaggtaata

SEQ ID NO: 36545 - DNA, 75 bp, synthetic construct
  source 1..75: mol_type = other DNA
ccttcaacactcagtcagaagctgcgcgtagcttgcgtgcggttgaaaaagtgtcgtttagccttgaggacgcgc

SEQ ID NO: 36546 - DNA, 75 bp, synthetic construct
  source 1..75: mol_type = other DNA
accgcaataccggcctcggcatcagtgacactgagcatatcagccagagcatgcgcgacattctgctgacgccgg

SEQ ID NO: 36547 - DNA, 75 bp, synthetic construct
  source 1..75: mol_type = other DNA
ggctctcgaaaaccttggtttgggagaagcggcgaaaagggatgtgggcacaggagataatcagataccggatat

SEQ ID NO: 36548 - DNA, 75 bp, synthetic construct
  source 1..75: mol_type = other DNA
cgtggaacagcattttagccgtgaggcgctggcggtggatcgcaccgatggcatcagcatgacctttgccgactg

SEQ ID NO: 36549 - DNA, 75 bp, synthetic construct
  source 1..75: mol_type = other DNA
gccgcagcgaatcactctggctggtgcgcggcggcgtggcgaaactggatgaaggtcaccggctggccgcactct

SEQ ID NO: 36550 - DNA, 75 bp, synthetic construct
  source 1..75: mol_type = other DNA
ccagcagtttctctcccttgaatttgcgcaggtgctggacaaaatggcctacctgacggtatggcagggcgatga

SEQ ID NO: 36551 - DNA, 75 bp, synthetic construct
  source 1..75: mol_type = other DNA
gtagggctgcataaatcactgatggtgggaatgggctacagcgtcaatgtggggaataacgtcaccttctcggtg

SEQ ID NO: 36552 - DNA, 75 bp, synthetic construct
  source 1..75: mol_type = other DNA
ggatctgcacacatcactttcaaaaggctggaactgattgacagaattaacgatataatagtcaggcactttcct

SEQ ID NO: 36553 - DNA, 75 bp, synthetic construct
  source 1..75: mol_type = other DNA
caaaccctcagtatcggcggaaaaaccgccctggactgggtcatgaaacaggattttcgctgtggttgctggctt

SEQ ID NO: 36554 - DNA, 75 bp, synthetic construct
  source 1..75: mol_type = other DNA
acagcaagcgttatgaggatgagatgtttgcgatcaaatactttcagaaggggacggcgcatatcgtattcaaga

SEQ ID NO: 36555 - DNA, 75 bp, synthetic construct
  source 1..75: mol_type = other DNA
agtagttacttgggaacaccaaataacacctatctaaaatataatcccaaagctaaagggaatggagttacaatt

SEQ ID NO: 36556 - DNA, 75 bp, synthetic construct
  source 1..75: mol_type = other DNA
agcgctatacctatccgcatccccttgatctacctgaggccaaaaatattatttcagggatccgtgaacggcagc

SEQ ID NO: 36557 - DNA, 75 bp, synthetic construct
  source 1..75: mol_type = other DNA
tgttgactatttgtgccgttatttctggtgcagaaggttgggaagatatagaggatttcggggaaacacatctcg

SEQ ID NO: 36558 - DNA, 75 bp, synthetic construct
  source 1..75: mol_type = other DNA
ttgcgttaaacaaaggaagtcgtggaaaacgagtcaagaatattatcattaccgataaaacgttaaagatcctgc

SEQ ID NO: 36559 - DNA, 75 bp, synthetic construct
  source 1..75: mol_type = other DNA
agcaggtgctggcgcaactccgcgtggaaaatcaacagcgaaatcaggacggagaggccagacgtgaacagctac

SEQ ID NO: 36560 - DNA, 75 bp, synthetic construct
  source 1..75: mol_type = other DNA
acccggagaatttacctgccgcgccgctggtgcgctatggctggacgccacgcggcgaactggcggtggtgtatg

SEQ ID NO: 36561 - DNA, 75 bp, synthetic construct
  source 1..75: mol_type = other DNA
caaccgccagcccgtgggaagaaggtggtcgtattcgttatgacctgttaggtaaagcggttcaggcggcaggtg

SEQ ID NO: 36562 - DNA, 75 bp, synthetic construct
  source 1..75: mol_type = other DNA
gatgacgctcgttaccaggcaaaatacgtttcagctatctggcaaaaactgatcccgaatcaggctgatttttaa

SEQ ID NO: 36563 - DNA, 75 bp, synthetic construct
  source 1..75: mol_type = other DNA
tcagcggcgaaagtttacggatatgaatatattacgcgaaaagttaagggagtcacgcagaccaacgcaacgact

SEQ ID NO: 36564 - DNA, 75 bp, synthetic construct
  source 1..75: mol_type = other DNA
attcagcaaaataattgatatgggtacatgtggcggcactgtagacataagcaccatcgaatggtggcttcaacg

SEQ ID NO: 36565 - DNA, 75 bp, synthetic construct
  source 1..75: mol_type = other DNA
aatatcaggttaacagcattaaatccaggcgggttatctcatatctgacgttagcgaagaatgttcttcgacact

SEQ ID NO: 36566 - DNA, 75 bp, synthetic construct
  source 1..75: mol_type = other DNA
gaataagccgcccttttctgtttttcgtgacaaattcatcgccatgcctggtcacctggattattcccgcgcgat

SEQ ID NO: 36567 - DNA, 75 bp, synthetic construct
  source 1..75: mol_type = other DNA
ctgctgccgggggaggcggtgtacagccgcagtgagtcaatgtggctggtgcgtggcggtaaggcagcgcagccg

SEQ ID NO: 36568 - DNA, 75 bp, synthetic construct
  source 1..75: mol_type = other DNA
ggtcagctaaatactcaggctaaccgctatgtattgcagctaggcggcgatttggcgcagtggagtagcaacgcg

SEQ ID NO: 36569 - DNA, 75 bp, synthetic construct
  source 1..75: mol_type = other DNA
atgtggagatggtatcagaatgaggacataggtgagtattattggcaaacagaacttggtatatgtaaaaataac

SEQ ID NO: 36570 - DNA, 75 bp, synthetic construct
  source 1..75: mol_type = other DNA
cccgatgggccagcaacagcagggatagatgatttgggtgaaattttagctaaaatgaaacagagaacatcgaga

SEQ ID NO: 36571 - DNA, 75 bp, synthetic construct
  source 1..75: mol_type = other DNA
ttgattccaacaaggaacaactgggctacacagcagaagaaatgcctgatgatatcacttttaagcgacagtacg

SEQ ID NO: 36572 - DNA, 75 bp, synthetic construct
  source 1..75: mol_type = other DNA
tcgtggcgcccgggcattgctacggtaacctggaatcagtgtaatggtcctgagttcgctgatggctcctgggct

SEQ ID NO: 36573 - DNA, 75 bp, synthetic construct
  source 1..75: mol_type = other DNA
tgcggggaatcgcctgctatattgcgctggcaatctctggtggatcagtcaatgcatgggctgatgattcaattc

SEQ ID NO: 36574 - DNA, 75 bp, synthetic construct
  source 1..75: mol_type = other DNA
aattaaccacaataagcgaattgattaaaaatatttattgttcattatccgttctcatcattggttgtgcgtcag

SEQ ID NO: 36575 - DNA, 75 bp, synthetic construct
  source 1..75: mol_type = other DNA
ggagcctttttatattgataataaatgcatggaaagtttgtatgaatggtggcgttatcagataagcagaatgca

SEQ ID NO: 36576 - DNA, 75 bp, synthetic construct
  source 1..75: mol_type = other DNA
cggcgtgcactggcagaagtgacggatcagataaatacagctaaatcttcggcactgaatatggcgggggcattt

SEQ ID NO: 36577 - DNA, 75 bp, synthetic construct
  source 1..75: mol_type = other DNA
tgcagcgcagacactggaagatgccctgagtttgtatacagatgagcgcacagtgagcaagatttgcaaaggggg

SEQ ID NO: 36578 - DNA, 75 bp, synthetic construct
  source 1..75: mol_type = other DNA
cggcagatgctgtcgtttccacgatggacgggctggtatcaaatatttccgatgcactggccgggaatgttgtgg

SEQ ID NO: 36579 - DNA, 75 bp, synthetic construct
  source 1..75: mol_type = other DNA
tggccggataaccgtatcgcccgtgacgcgcactatctttaccggtatgaccgtcacggcaggctgacagagaaa

SEQ ID NO: 36580 - DNA, 75 bp, synthetic construct
  source 1..75: mol_type = other DNA
gaaatcctcctggtaactcatgcgtccaagaacgcggtcgaaaaccacttcgacacctcttatgaattagaatct

SEQ ID NO: 36581 - DNA, 75 bp, synthetic construct
  source 1..75: mol_type = other DNA
atcaggctgagttcagcattaaggcaatgtgccgcgtgccccgggaggcctgcagcggctggtatacgtggtgtc

SEQ ID NO: 36582 - DNA, 75 bp, synthetic construct
  source 1..75: mol_type = other DNA
tcacacttatccggcgttatggcgtcagtctcattcatctggatgccagcgctgaatgcctgcctgacctgccca

SEQ ID NO: 36583 - DNA, 75 bp, synthetic construct
  source 1..75: mol_type = other DNA
agacgcctgcgccggtgggaatttttggccccggctggaaagcgccttctgatatccgcttacagctacgtgatg

SEQ ID NO: 36584 - DNA, 75 bp, synthetic construct
  source 1..75: mol_type = other DNA
gtggtctgggacggacagaaagccggtagtgcggttggcatactggtactgccgcttgaaggcacagagacggtg

SEQ ID NO: 36585 - DNA, 75 bp, synthetic construct
  source 1..75: mol_type = other DNA
catcccgtctttttccgttctgtaccggtaagtaccgctggcacggcagggctgaggcgtataccggtcgtgaag

SEQ ID NO: 36586 - DNA, 75 bp, synthetic construct
  source 1..75: mol_type = other DNA
tggtcagggcggaatgggaacaaaatcccacgatattttcacgctaccgctgtgtcgggagcatcacaacgagct

SEQ ID NO: 36587 - DNA, 75 bp, synthetic construct
  source 1..75: mol_type = other DNA
cgcgaccagacctccgaatcactcgggcaacttgctcaccaaaacctgtctgcatggatgattgacgtcatacgc

SEQ ID NO: 36588 - DNA, 75 bp, synthetic construct
  source 1..75: mol_type = other DNA
gggagttatcgctggctgaattatcctggtgggcggtctgcaatcaggtagcggacgtattgccggaggcagtat

SEQ ID NO: 36589 - DNA, 75 bp, synthetic construct
  source 1..75: mol_type = other DNA
cctgccgttcgccagccgctggcggaggataaatcattactgccatttttcagcaatgagcgtgtgattcgtgct

SEQ ID NO: 36590 - DNA, 75 bp, synthetic construct
  source 1..75: mol_type = other DNA
accgtggcgtttgaagagaagtatggttcccaactggagctgatttttcgatttatcgatcgcgcgctggcaatt

SEQ ID NO: 36591 - DNA, 75 bp, synthetic construct
  source 1..75: mol_type = other DNA
ggaaaaaatccgctcaatgtaccgtgaaagcgacatcgtaccgggagagcagaccgccaccagcatactgaaaca

SEQ ID NO: 36592 - DNA, 75 bp, synthetic construct
  source 1..75: mol_type = other DNA
agattaaggggaaactgtcagccaaccagattgaaggcgatattgtcaaaacggtcagcaagtctttcccccgca

SEQ ID NO: 36593 - DNA, 75 bp, synthetic construct
  source 1..75: mol_type = other DNA
gctggcggcgctggtgcactgtctgactggctgttgcgtcatgtcaaatcctgccagtggcctcatggtgactat

SEQ ID NO: 36594 - DNA, 75 bp, synthetic construct
  source 1..75: mol_type = other DNA
tgtgcagaaagcatcacaacgagctgcatacggatacagtggcatttgaagataagtatggctcccaactggagc

SEQ ID NO: 36595 - DNA, 75 bp, synthetic construct
  source 1..75: mol_type = other DNA
gaaagcgacatcgtaccgggagagcagaccgccaccagcatactgaagcagcgcacaaaaaatcttgcgccgttg

SEQ ID NO: 36596 - DNA, 75 bp, synthetic construct
  source 1..75: mol_type = other DNA
gacatcccgtctttttccgttctgtaccggcaaataccgctggcacggcagtgctgaagcgtataccggtcgtga

SEQ ID NO: 36597 - DNA, 75 bp, synthetic construct
  source 1..75: mol_type = other DNA
gaacctccggcggtctggttcgcctactcaccggaccatcagggtaaacatccggagcaacaccttcgtcccttc

SEQ ID NO: 36598 - DNA, 75 bp, synthetic construct
  source 1..75: mol_type = other DNA
gatgacgtacagtcatcatgcctgtcgtacggagtgttatgccatgacggtccattattaccggctgcgggatta

SEQ ID NO: 36599 - DNA, 75 bp, synthetic construct
  source 1..75: mol_type = other DNA
ctgggttgcgttgtgcaacttctgtgataacggtctggcggaagtggataataatgccgcggaaagagcgcttcg

SEQ ID NO: 36600 - DNA, 75 bp, synthetic construct
  source 1..75: mol_type = other DNA
aaggttcacactgatgacacaccagtaaaagtactggcaccgggcaggaagaaggcgaaaacaggatatatctgg

SEQ ID NO: 36601 - DNA, 75 bp, synthetic construct
  source 1..75: mol_type = other DNA
aggttccccgccagttgcgacagtcgcgtcatcgtcgcccgttaccggcgcatctgccccgcgaaataaaccgcc

SEQ ID NO: 36602 - DNA, 75 bp, synthetic construct
  source 1..75: mol_type = other DNA
cagttgctcgataaagtcacgccctcacagtgggcggcaataggtgtgctgggtagcctggtatttggcctgctg

SEQ ID NO: 36603 - DNA, 75 bp, synthetic construct
  source 1..75: mol_type = other DNA
atgaaatccatggataagttaacaacgggtgtcgcctatggtacctcagcaggtagtgccgggtactggttttta

SEQ ID NO: 36604 - DNA, 75 bp, synthetic construct
  source 1..75: mol_type = other DNA
cccagtgggtggcgataggtgtgctggggagtctgctgtttggcctgctgacgtatctgactaacctgtatttca

SEQ ID NO: 36605 - DNA, 75 bp, synthetic construct
  source 1..75: mol_type = other DNA
tacactctgaacaacggcggggcatttatggcccccgaaccggatgacgatgatggcgaaaactgggtactgttc

SEQ ID NO: 36606 - DNA, 75 bp, synthetic construct
  source 1..75: mol_type = other DNA
gggaagtctggttctgggctttctgacttacctgacgaatctgtacttcaaaataagagaagacaagcgtaaagc

SEQ ID NO: 36607 - DNA, 75 bp, synthetic construct
  source 1..75: mol_type = other DNA
gaaactgctgcctcagacagaaaacccgttggtggaagcatcagttgcgagtactgaaaaaaagaaaaagacact

SEQ ID NO: 36608 - DNA, 75 bp, synthetic construct
  source 1..75: mol_type = other DNA
cttcaaaagtggatttactgccggaaaacgtacgtaaaacgctgcatgaaatgctgcgtgataaagcgatcccac

SEQ ID NO: 36609 - DNA, 75 bp, synthetic construct
  source 1..75: mol_type = other DNA
ggctgtggctggagtgaagaccgtacacgaatacgcggggattactgacaccagcccagtggatttatccgacca

SEQ ID NO: 36610 - DNA, 75 bp, synthetic construct
  source 1..75: mol_type = other DNA
gctggaccggctggtacagcagggcggctttgacgggcggacgcaacgttatcattatgacctgaccggaaaact

SEQ ID NO: 36611 - DNA, 75 bp, synthetic construct
  source 1..75: mol_type = other DNA
ttgacagcatatctttcagggggataatgctccattcagatgagagtatggttccttatagcaagtatgcttttg

SEQ ID NO: 36612 - DNA, 75 bp, synthetic construct
  source 1..75: mol_type = other DNA
gtggccttcacggctaagatcgcctccggtctggataatctctactgggcgtcacagcgcaccggcgcgacggtt

SEQ ID NO: 36613 - DNA, 75 bp, synthetic construct
  source 1..75: mol_type = other DNA
caaaacttggcgaattcactccaccaaaaaccgatgctggcaccggaaggacaattcatctggttcaaccagcta

SEQ ID NO: 36614 - DNA, 75 bp, synthetic construct
  source 1..75: mol_type = other DNA
gcatcaacaacagcagccagagccggaacgtgacgtttattgcggatgtcagcacggcgcagatcgcggatctgg

SEQ ID NO: 36615 - DNA, 75 bp, synthetic construct
  source 1..75: mol_type = other DNA
ttgaagaagtggaagagaagcgagcccgtgaacgtgaacaacttgcggcctggtatcaaccgattccagaaccgg

SEQ ID NO: 36616 - DNA, 75 bp, synthetic construct
  source 1..75: mol_type = other DNA
aaacagttgaaggtaaatggactaaagcaacactcagtattgacgagcttcagctaattaaacgggtaattgctc

SEQ ID NO: 36617 - DNA, 75 bp, synthetic construct
  source 1..75: mol_type = other DNA
gaagcgcaggggattgtcagcgaacaggggcacaacggtaatcgtgaagtgctggccccaccgccgtttgactaa

SEQ ID NO: 36618 - DNA, 75 bp, synthetic construct
  source 1..75: mol_type = other DNA
cgccatgcttcaggctggaaactttcgggaaaataagggttcgtcaaccaataattttcgggaaatctcggaaac

SEQ ID NO: 36619 - DNA, 75 bp, synthetic construct
  source 1..75: mol_type = other DNA
ggctgacgcgcagtatggagtacgatgctgccggacgtgtcatcagcctgaccaacgagaacggcagccacagcg

SEQ ID NO: 36620 - DNA, 75 bp, synthetic construct
  source 1..75: mol_type = other DNA
acaccaccatgccgacacagaagacactgtgctggagattcagcggctggctgccgtttgccgtgacactctgaa

SEQ ID NO: 36621 - DNA, 75 bp, synthetic construct
  source 1..75: mol_type = other DNA
agacggtggagaacccggagacgggggaactgctgtggcagcatgagacgaaacacgcatacaacgagcaggggc

SEQ ID NO: 36622 - DNA, 75 bp, synthetic construct
  source 1..75: mol_type = other DNA
gaagtaagcgcatagccgctcttcttcgcaaggacaatcttgccagcgccacgaacattgaaggtgaaagaaaat

SEQ ID NO: 36623 - DNA, 75 bp, synthetic construct
  source 1..75: mol_type = other DNA
ttctggcatgacgattttaataacgccacgccgaacgatatttgcgtggcaattcgtagcgaagcggcggatgcg

SEQ ID NO: 36624 - DNA, 75 bp, synthetic construct
  source 1..75: mol_type = other DNA
attgcgggtaaactgcgcgcgtttgtgtatgcctcatgtcacggctgtaacacgatggctgaggcgattacctac

SEQ ID NO: 36625 - DNA, 75 bp, synthetic construct
  source 1..75: mol_type = other DNA
atgattgttctccaaaatattgattcctcaatttcgggacgttacactgttcaggcaccttataaagcgggtgcc

SEQ ID NO: 36626 - DNA, 75 bp, synthetic construct
  source 1..75: mol_type = other DNA
atgaccactattaccaaagaacgtattgaattgttcattaaaaatccggttgaaaacgggcttacccgtggtgaa

SEQ ID NO: 36627 - DNA, 75 bp, synthetic construct
  source 1..75: mol_type = other DNA
gagctcactctgaacgattttcttgataatagctcttctacgtcatcattggactacattaatgaattgggttct

SEQ ID NO: 36628 - DNA, 75 bp, synthetic construct
  source 1..75: mol_type = other DNA
tttcagaatgtatctgaagaggaagtactgcgtttaacttctttgataaaagaacagttttccacatggcaaaat

SEQ ID NO: 36629 - DNA, 75 bp, synthetic construct
  source 1..75: mol_type = other DNA
atttttgcggataaaaatgtgcgggtgggcttccctccggcgctgaatggaaaactgcgggtccagagtaccggt

SEQ ID NO: 36630 - DNA, 75 bp, synthetic construct
  source 1..75: mol_type = other DNA
gcgcgcaacctgaaagcaatgcagatggagcgcgatggcaaagatccgcaaatgcaggtcgcggaagtggcgcag

SEQ ID NO: 36631 - DNA, 75 bp, synthetic construct
  source 1..75: mol_type = other DNA
cggattacgttgaaacaaaatttgttgttggcagtgctggcgaggctggcgaattgattcagatgggcacctgga

SEQ ID NO: 36632 - DNA, 75 bp, synthetic construct
  source 1..75: mol_type = other DNA
cacgctgacgctgaacaacagtaccgtcaccacggatgtcatcgctcagcgcggcacggccctgaagctgaccgg

SEQ ID NO: 36633 - DNA, 75 bp, synthetic construct
  source 1..75: mol_type = other DNA
ttcattattcatgatgctggtaatggccaacggcgagaaaattatcagcacctttatggatgctggcgtaccgct

SEQ ID NO: 36634 - DNA, 75 bp, synthetic construct
  source 1..75: mol_type = other DNA
aacataactgcagcgaactggaggctgcgttccatgtggcccgtaaactggacagactgcggggactttccgccg

SEQ ID NO: 36635 - DNA, 75 bp, synthetic construct
  source 1..75: mol_type = other DNA
agaacacggaatccatccgggcgcgtcaggacgtgaaggtggtgaaggagctgctggggaaccggcacaagctgt

SEQ ID NO: 36636 - DNA, 75 bp, synthetic construct
  source 1..75: mol_type = other DNA
gctggcgggagctatgtgatcgtccagaaatacctgcatgatcttgataaatggaatgcgattcctgttgagcag

SEQ ID NO: 36637 - DNA, 75 bp, synthetic construct
  source 1..75: mol_type = other DNA
tggggagtaactccgcatgaattgcgccctgataaataccctaatccaaccgatggtttacctgttgagtatcag

SEQ ID NO: 36638 - DNA, 75 bp, synthetic construct
  source 1..75: mol_type = other DNA
atgccggaacgcatacggtacttaaagccggtatttctgcggatacacaatctgatttcggcgcaggtgtcggcg

SEQ ID NO: 36639 - DNA, 75 bp, synthetic construct
  source 1..75: mol_type = other DNA
cattggtttccaccaccaaacacgcctcgctgaatggctcaaaactgctgatagtggcgcggctcgatgaaaact

SEQ ID NO: 36640 - DNA, 75 bp, synthetic construct
  source 1..75: mol_type = other DNA
agtcgagtaatacacctttaaccttacctgctactgcttcagattatccaacggtggttgctcaggcactggatc

SEQ ID NO: 36641 - DNA, 75 bp, synthetic construct
  source 1..75: mol_type = other DNA
ttcttgggcatgtatcctggctatgggccagttctccactacacagaaactggccagtatctttgtttgcaataa

SEQ ID NO: 36642 - DNA, 75 bp, synthetic construct
  source 1..75: mol_type = other DNA
agtgaatgccctgatggacacctttccggagggaacggtgctgtgtatgacaattgtggtccagccacaggacac

SEQ ID NO: 36643 - DNA, 75 bp, synthetic construct
  source 1..75: mol_type = other DNA
gcactgagaatccggaaatcttctacgtgagtgattaccggttaatctgtgcgattatgggatatataatttacc

SEQ ID NO: 36644 - DNA, 75 bp, synthetic construct
  source 1..75: mol_type = other DNA
acctggcatatccttacgaacttcagtctctttatgttgaaaaaggtgaatggcctgaagaaaaaggtgttgata

SEQ ID NO: 36645 - DNA, 75 bp, synthetic construct
  source 1..75: mol_type = other DNA
gtgccgcccatactcgcagcagttttcaggtatcttcattgaccaaagagcgttacaaccagtgccagaacatta

SEQ ID NO: 36646 - DNA, 75 bp, synthetic construct
  source 1..75: mol_type = other DNA
tgaagtggccctgttcgataaagatgatcggcaaagtaatcctcatgccataaccgctggacttaactatacccc

SEQ ID NO: 36647 - DNA, 75 bp, synthetic construct
  source 1..75: mol_type = other DNA
acaggtgtcggccacggggtttacgagaacgtgaaagcgttttttccagccgtccgggagtttgtctacaacccc

SEQ ID NO: 36648 - DNA, 75 bp, synthetic construct
  source 1..75: mol_type = other DNA
ctgagtcccgtttttatgccatcgagtggcaggctgattatgttgataataattgttggccacatgatgccatta

SEQ ID NO: 36649 - DNA, 75 bp, synthetic construct
  source 1..75: mol_type = other DNA
gtgaacctcccacaagacggcatcaaattacatcgcggcaacttcaccgctatcggccagcagatccagccttat

SEQ ID NO: 36650 - DNA, 75 bp, synthetic construct
  source 1..75: mol_type = other DNA
atgaccaaagtggtgaaaatgtggcgcaagctgggggcctggctgtggctggccacgcagaacctgaaggattat

SEQ ID NO: 36651 - DNA, 75 bp, synthetic construct
  source 1..75: mol_type = other DNA
ggagaaaattacacatcctcactcatattcgactctctgcgatttagcggaatacgcttatttcgcgatatgcaa

SEQ ID NO: 36652 - DNA, 75 bp, synthetic construct
  source 1..75: mol_type = other DNA
gtccgtgagatgctcgaagcacacctggtgcaagagctggaaatcaaagaagcggggaaccgtggccgtccggcg

SEQ ID NO: 36653 - DNA, 75 bp, synthetic construct
  source 1..75: mol_type = other DNA
gatgcggagcacgccgggcggatggtggcgcaccattatgcggggaggccggagagctgctaccggtatgatgat

SEQ ID NO: 36654 - DNA, 75 bp, synthetic construct
  source 1..75: mol_type = other DNA
cgtgctggtgaatattgggtataccttccggcatggaataacggactaaaactggcttatgaaagccgtcctaaa

SEQ ID NO: 36655 - DNA, 75 bp, synthetic construct
  source 1..75: mol_type = other DNA
gcgggaggagcaggttcaggcggctgcgctggctgcggcgcaggataagatggctgccgcattttatcgtcagat

SEQ ID NO: 36656 - DNA, 75 bp, synthetic construct
  source 1..75: mol_type = other DNA
ctgattggcggtcagcttgatcgcggcctgtctgagttccgctggcaggggaagcgtgcggataaatttaaccgt

SEQ ID NO: 36657 - DNA, 75 bp, synthetic construct
  source 1..75: mol_type = other DNA
attatggagcataagtccggggtggcccgttctgtatggacggcccgtcttaatggttgccagattatctggaga

SEQ ID NO: 36658 - DNA, 75 bp, synthetic construct
  source 1..75: mol_type = other DNA
tctataaaaagattgccgctgattgcgaagcgtttatatctcgtgccaaagttttatttgaggaagcaaacagtg

SEQ ID NO: 36659 - DNA, 75 bp, synthetic construct
  source 1..75: mol_type = other DNA
cgggaaatggatgtctgaaaacaataatgcacaggtagccctgttaaatacacagctaagcgagtttgccccaac

SEQ ID NO: 36660 - DNA, 75 bp, synthetic construct
  source 1..75: mol_type = other DNA
ttgtccctccgtcagcatttgccgcaggcaccggtaagacgtttaccggtgcttatgcatggaacgcgccacgcg

SEQ ID NO: 36661 - DNA, 75 bp, synthetic construct
  source 1..75: mol_type = other DNA
tgcctgttgaccttcctaagggggattatacgtttccagttaagttcttacgtggcattcagcgtaataattatg

SEQ ID NO: 36662 - DNA, 75 bp, synthetic construct
  source 1..75: mol_type = other DNA
tcgcccgtagcccgtcggatgacgttaacgagtacgaggaagaagtcgagagagtggtcggcatttacgcgccgc

SEQ ID NO: 36663 - DNA, 75 bp, synthetic construct
  source 1..75: mol_type = other DNA
ccggcattgaacattgactggccgatgaaaacaaacgaacttatcctatcggataaagataaaaatgctgaaaga

SEQ ID NO: 36664 - DNA, 75 bp, synthetic construct
  source 1..75: mol_type = other DNA
gtggcatggtggttaccgtgcctttttgtggcgaccgccgaaacataaccggacggtgagggtggtgtgccggga

SEQ ID NO: 36665 - DNA, 75 bp, synthetic construct
  source 1..75: mol_type = other DNA
tgtttgtaaactggctctataaccattcctccgtgctgcatgaacgatcagaaatcattaaatgcgccgaaatgc

SEQ ID NO: 36666 - DNA, 75 bp, synthetic construct
  source 1..75: mol_type = other DNA
gtggctgaccgtctgacggttcgcagcgcagaaatcatcccgtaccgtgtggaagctaccatttttctttatccg

SEQ ID NO: 36667 - DNA, 75 bp, synthetic construct
  source 1..75: mol_type = other DNA
tgccatgcgtaaattactctgcatcattaatgccatgctttcatcagggacaatgtttaaccctgccctgcatcc

SEQ ID NO: 36668 - DNA, 75 bp, synthetic construct
  source 1..75: mol_type = other DNA
gaatatgccagtatggttgacgatatcagagagaaagtgtctgttgagatggaccggtttttcccaaaaaatgat

SEQ ID NO: 36669 - DNA, 75 bp, synthetic construct
  source 1..75: mol_type = other DNA
gatgcggaaaccctcaaggccggaaaactgtatatcgactacgactatacaccggtgcctcctcttgaaaacctg

SEQ ID NO: 36670 - DNA, 75 bp, synthetic construct
  source 1..75: mol_type = other DNA
cggcagaagcacaacgtcagtcactgattgatactgcaatggcttccattagtctgattcaactgaaattgcagg

SEQ ID NO: 36671 - DNA, 75 bp, synthetic construct
  source 1..75: mol_type = other DNA
agattgttgatgaaatctgcgattttgtggcgaatcagcaggctgtattcctcggcggtcagtacatccttcagg

SEQ ID NO: 36672 - DNA, 75 bp, synthetic construct
  source 1..75: mol_type = other DNA
tggtgggaagctggaaaaaccaaccgcatccgtaatctgctgaagtcacgccagatcggcgcgaccttttacttt

SEQ ID NO: 36673 - DNA, 75 bp, synthetic construct
  source 1..75: mol_type = other DNA
ggacaggggccgcattattgctggccggaattctgctggcaggttgcgaccagagtagcagcgatgcaaaacaca

SEQ ID NO: 36674 - DNA, 75 bp, synthetic construct
  source 1..75: mol_type = other DNA
tgtattacaaccgccaccgctattatgacccgctgcaggggcggtatatcactcaggatccgattgggctgaagg

SEQ ID NO: 36675 - DNA, 75 bp, synthetic construct
  source 1..75: mol_type = other DNA
catgtactaatggtctttgcggcacactatccgctatgataggtccagataaatttgattctatagatagcaccg

SEQ ID NO: 36676 - DNA, 75 bp, synthetic construct
  source 1..75: mol_type = other DNA
atgaatccttgttcagccggttttgtcggacaactaccgtgtacggtatgtccccatcttctctgttaacgatca

SEQ ID NO: 36677 - DNA, 75 bp, synthetic construct
  source 1..75: mol_type = other DNA
aataccgaagacgccaaacgtctgggtattgaagatgaggcattggtttgggtgcactcgcgtaaaggcaaaatt

SEQ ID NO: 36678 - DNA, 75 bp, synthetic construct
  source 1..75: mol_type = other DNA
ccaccaaaagcccccgcttacctggatgaaatcgcggtcaggcagtggaaggaaaaatcgcgccagctttccggg

SEQ ID NO: 36679 - DNA, 75 bp, synthetic construct
  source 1..75: mol_type = other DNA
gtatcgatctcggtactaccaatagtttaattgccgtctggaaagacggtgccgcgcaattaattccaaataagt

SEQ ID NO: 36680 - DNA, 75 bp, synthetic construct
  source 1..75: mol_type = other DNA
caattgaatccgatatcagacatcgaccccctgggtttatctatgtgggaggatgcaaaatcgggggcatgtact

SEQ ID NO: 36681 - DNA, 75 bp, synthetic construct
  source 1..75: mol_type = other DNA
tcttgacggtcatccagcacctggcgtcgctgaatcctgggataataaagacgcgaaagtctggaccttccattt

SEQ ID NO: 36682 - DNA, 75 bp, synthetic construct
  source 1..75: mol_type = other DNA
cacaaggagaatgctggcagcgctcaggaccacgccagcgatagtgaaactggcgagacggcagatcccttaatt

SEQ ID NO: 36683 - DNA, 75 bp, synthetic construct
  source 1..75: mol_type = other DNA
acgttatacgtatattccaacaatcaatatcatcaataagttacgtgatgaaggtttccagccattctttgcctg

SEQ ID NO: 36684 - DNA, 75 bp, synthetic construct
  source 1..75: mol_type = other DNA
atggatatcacgtcgatacttcatgcgctttgtgccgtggcggtgcaggtactggctggtctttttaccggaaac

SEQ ID NO: 36685 - DNA, 75 bp, synthetic construct
  source 1..75: mol_type = other DNA
gtcgcctaaacataatctgtcgcgagtgccggaagagcgaagttatgcagcgcatattgtcgttttatcaggggg

SEQ ID NO: 36686 - DNA, 75 bp, synthetic construct
  source 1..75: mol_type = other DNA
attggtacagagctgggtatggaccgggatgaagtgctgagactgaagcagattagcgggctgatagaattgttt

SEQ ID NO: 36687 - DNA, 75 bp, synthetic construct
  source 1..75: mol_type = other DNA
ggccgggctgatgggggaagccggacctgaagccattatgcccctgacccgggcggcggatggctcgctgggcgt

SEQ ID NO: 36688 - DNA, 75 bp, synthetic construct
  source 1..75: mol_type = other DNA
ttccgcacgctggatctgaacaaacttcgcttctggctcggcaatgacgacaactatacccgtgaccagctttat

SEQ ID NO: 36689 - DNA, 75 bp, synthetic construct
  source 1..75: mol_type = other DNA
aattcatgttcatctgcataacgttgttacgcagaatccccgcgaactggcgaaactggtcggtgaaatggtcag

SEQ ID NO: 36690 - DNA, 75 bp, synthetic construct
  source 1..75: mol_type = other DNA
accggcctgatgacccgcagcaactacagaatggtgaacgacatcacccggggtaaacattcggaggcgaaacga

SEQ ID NO: 36691 - DNA, 75 bp, synthetic construct
  source 1..75: mol_type = other DNA
tctcgccacgggggccgtcactgcaaaaggtcagggcgtcaccttaaccggcgaccataaagcgggaggtaacct

SEQ ID NO: 36692 - DNA, 75 bp, synthetic construct
  source 1..75: mol_type = other DNA
ctctcacgtccggtgtggatatcgcaggcgtatcagcagcagatagcggagagtcgcaggccggaagaggagaca

SEQ ID NO: 36693 - DNA, 75 bp, synthetic construct
  source 1..75: mol_type = other DNA
ggtaaattctgttgatgcgaaatatcaggaactgcgggcagaactccatgaagcccggaaaaacattccatcaaa

SEQ ID NO: 36694 - DNA, 75 bp, synthetic construct
  source 1..75: mol_type = other DNA
tgcgcgttgttgaagtcaacgaaggcacccgatctattaccacggtgagcaccgccatcgtgggtatggtctgca

SEQ ID NO: 36695 - DNA, 75 bp, synthetic construct
  source 1..75: mol_type = other DNA
cccgctgacacgtgaagaactgatgtaccacgtcccaagtatttttggtgaagaccggcacacctcccgcagtga

SEQ ID NO: 36696 - DNA, 75 bp, synthetic construct
  source 1..75: mol_type = other DNA
gcagtgggaacgcctgcaacgtggcgttgcgtcattctcgctacaactggcagaaggtcgggcggatctctacac

SEQ ID NO: 36697 - DNA, 75 bp, synthetic construct
  source 1..75: mol_type = other DNA
gtttaagcgtcgccgggtcggtgggtgcctatcagtatcatggtcgcagtgccgacgggcgtgtcgcggatatct

SEQ ID NO: 36698 - DNA, 75 bp, synthetic construct
  source 1..75: mol_type = other DNA
cccagccatttcctgctctacgtacgttattccgccgccggatggcagggtgacatggatttaccgccgcagccg

SEQ ID NO: 36699 - DNA, 75 bp, synthetic construct
  source 1..75: mol_type = other DNA
cggacaacaataggtagcaaacgtcctcatatacgccggggacactggcatacatactggacaggaagtaagaaa

SEQ ID NO: 36700 - DNA, 75 bp, synthetic construct
  source 1..75: mol_type = other DNA
cctgctgttcgccagccgctggcggaagataaatcactgctgccatttttcagcgatgagcgggtgattcgtgca

SEQ ID NO: 36701 - DNA, 75 bp, synthetic construct
  source 1..75: mol_type = other DNA
ctcagggtgacagcggttcagcactgttcgtctatgataaccaaaagaaaaagtgggttgtcgctggaactgtat

SEQ ID NO: 36702 - DNA, 75 bp, synthetic construct
  source 1..75: mol_type = other DNA
cggtaaatggcgggatttaatgaaacgctcagggatgctgtcgattatggacgctcaggcccgtaaccagtggta

SEQ ID NO: 36703 - DNA, 75 bp, synthetic construct
  source 1..75: mol_type = other DNA
aacccatgcgactgatgctgcaggctcagcacgtgcagccagcacatcagccgggcaggccgcgacgtcggctca

SEQ ID NO: 36704 - DNA, 75 bp, synthetic construct
  source 1..75: mol_type = other DNA
taacgctagccgacgctcgtgaaaaacgcagcgaagctaggaaaatcctcgctgctggaggcgatccagggatgg

SEQ ID NO: 36705 - DNA, 75 bp, synthetic construct
  source 1..75: mol_type = other DNA
gctgggctcactggaaaccggtctgcccttcagtatcactgacaacctgatgctggagccacaactgcagtacac

SEQ ID NO: 36706 - DNA, 75 bp, synthetic construct
  source 1..75: mol_type = other DNA
aagatcaattcattgatatgaaattcattacccagcttactggcctgagcgataaatggttctataagctgatac

SEQ ID NO: 36707 - DNA, 75 bp, synthetic construct
  source 1..75: mol_type = other DNA
atggaacagaaaatattatccgcagaaccccgcagaacattttcaaatgagtttaaacttcaaatggttaaactg

SEQ ID NO: 36708 - DNA, 75 bp, synthetic construct
  source 1..75: mol_type = other DNA
ctcccagtggttttgaccgggaaggagagttgatgttgtcattgttttacaataaaacagttattgcccggttaa

SEQ ID NO: 36709 - DNA, 75 bp, synthetic construct
  source 1..75: mol_type = other DNA
ttattccgttattcaggcgggcggggatgttaagacccgttttaccagcagtatcaataacggaacaaccactgc

SEQ ID NO: 36710 - DNA, 75 bp, synthetic construct
  source 1..75: mol_type = other DNA
gttccagaatcggtatatgggggcactcgctaggtgctatttttgtgcttgattgcttaaaaaataattcatgct

SEQ ID NO: 36711 - DNA, 75 bp, synthetic construct
  source 1..75: mol_type = other DNA
acacgccggttgaggcaaaggacaatcttaagtccacgcagatgatgagcgtgattgatgcgattggtgaagggc

SEQ ID NO: 36712 - DNA, 75 bp, synthetic construct
  source 1..75: mol_type = other DNA
gcaaaatctgtaaggaatggtttcacccggcattctcaaatcagtggtggtgctgcccggaacacggaactcaat

SEQ ID NO: 36713 - DNA, 75 bp, synthetic construct
  source 1..75: mol_type = other DNA
gtggcgtgcgttacgatctgaatagccagccatgcggcgaggtgacacaacaggaacagcaggacgcggaagcac

SEQ ID NO: 36714 - DNA, 75 bp, synthetic construct
  source 1..75: mol_type = other DNA
ggttaagacctgatctatacccttatcccgaagatggaattcctgattcgttacgaaaatcaaacggtattacca

SEQ ID NO: 36715 - DNA, 75 bp, synthetic construct
  source 1..75: mol_type = other DNA
atgagccgtgttctgtgtgtggtgattattgtcctggcgggtggctgtggtgcgctgtggctggcaacagaccat

SEQ ID NO: 36716 - DNA, 75 bp, synthetic construct
  source 1..75: mol_type = other DNA
gatccgattgggctgaaggggggatggaatttttatcagtatccgctgaatccggttcagtatatagattcaatg

SEQ ID NO: 36717 - DNA, 75 bp, synthetic construct
  source 1..75: mol_type = other DNA
acgctgaggaggcgaagaagaatgccggagaggcggagacgtcagcgaggaatgccggcatatcagccagtcagg

SEQ ID NO: 36718 - DNA, 75 bp, synthetic construct
  source 1..75: mol_type = other DNA
ccgtctggagtttgacgccgggcacaccgacattgcgcagtcattcatggcaatccgtcgcgccaccaccgccag

SEQ ID NO: 36719 - DNA, 75 bp, synthetic construct
  source 1..75: mol_type = other DNA
atataatcatgctcagtatcttgatgggcgtcgggaaatgatgcaatggtacagtgattttattggtggaacgga

SEQ ID NO: 36720 - DNA, 75 bp, synthetic construct
  source 1..75: mol_type = other DNA
gatattggttttattaacgtcgggcagaatgccatcattaaagtggaggcctttccttacacccgatatggttat

SEQ ID NO: 36721 - DNA, 75 bp, synthetic construct
  source 1..75: mol_type = other DNA
tgcgtgaggcggcgcagaacgcgaaagatttaggtgggattaagaattacaagcgaggcgagcaagctgttgccg

SEQ ID NO: 36722 - DNA, 75 bp, synthetic construct
  source 1..75: mol_type = other DNA
attgaggttaacgcctcaaacatgaaccgtccggaggatggcgcgcggtttgaaccgctgatcggtaaccccggt

SEQ ID NO: 36723 - DNA, 75 bp, synthetic construct
  source 1..75: mol_type = other DNA
cactgttgtaaacagtgacggctggcagattatcaaggaaggtggtctggcggatttcaccaccgttaaccagaa

SEQ ID NO: 36724 - DNA, 75 bp, synthetic construct
  source 1..75: mol_type = other DNA
atgatgaggagtcggggctgtactacaaccgcaaccggtactatgatccgttgcaggggagatatatcacccagg

SEQ ID NO: 36725 - DNA, 75 bp, synthetic construct
  source 1..75: mol_type = other DNA
gtagccagtggcgatgtatacaactccggctacgggttattcccgtctgaacaggcgcgtaaggactggcaaaac

SEQ ID NO: 36726 - DNA, 75 bp, synthetic construct
  source 1..75: mol_type = other DNA
atgatttacactagtcagcttcgttacactggtaaagatggtgtttacttccatctacaaggacagccagataat

SEQ ID NO: 36727 - DNA, 75 bp, synthetic construct
  source 1..75: mol_type = other DNA
agtgacattctcttttctatgggggcagcgatgacgcttggtggtgttgcacagatgctggctcctaaaccccaa

SEQ ID NO: 36728 - DNA, 75 bp, synthetic construct
  source 1..75: mol_type = other DNA
ttgctcagatgtatcagcagaatccttcaggatttggtgagtttgttgatcaccttggaatggctgctcttggtc

SEQ ID NO: 36729 - DNA, 75 bp, synthetic construct
  source 1..75: mol_type = other DNA
accgtaacaagcaacaggctggcgtgacagctggaaaaccaaaactcgacctgacaaacactgactggatttacg

SEQ ID NO: 36730 - DNA, 75 bp, synthetic construct
  source 1..75: mol_type = other DNA
atccatatcaaaccccggaacttctggttttacctgttacacacggagacacagattacctctcatggctcaacg

SEQ ID NO: 36731 - DNA, 75 bp, synthetic construct
  source 1..75: mol_type = other DNA
taaaaaccggtgaaaatgcagtcatcgctgaatgcgtatcccggattatgcgttacgtgtttaatgaacgtaagt

SEQ ID NO: 36732 - DNA, 75 bp, synthetic construct
  source 1..75: mol_type = other DNA
gcaccaaattattgctggtgggaggttgatccggttgatgctgcaaatgaagccatgagttaccacaacgattaa

SEQ ID NO: 36733 - DNA, 75 bp, synthetic construct
  source 1..75: mol_type = other DNA
ggtggcagccgatccgaatacggtgtccggtatcaagtccgtggggacactgattgatgaactgtggctgtttgg

SEQ ID NO: 36734 - DNA, 75 bp, synthetic construct
  source 1..75: mol_type = other DNA
taaagccgcaatgacgctggggcgtcgggcaattggtgtggaactggaaaaagagagatttaatcaaactgtaac

SEQ ID NO: 36735 - DNA, 75 bp, synthetic construct
  source 1..75: mol_type = other DNA
agcacgcgaggaaaattgacgacatattgggtgacgatgtcccaaatttgtcccaccctgaggtttttgaggatg

SEQ ID NO: 36736 - DNA, 75 bp, synthetic construct
  source 1..75: mol_type = other DNA
aaatacggaagccttcttaatgagcgccatccggacctgtttgccgatgctcagggggtcatttcacacagtgct

SEQ ID NO: 36737 - DNA, 75 bp, synthetic construct
  source 1..75: mol_type = other DNA
ccgaagaacgcattcagattctgaaagatcatggcgaaccgtatgatcgccgtatacgcgaacatgagtgtgcca

SEQ ID NO: 36738 - DNA, 75 bp, synthetic construct
  source 1..75: mol_type = other DNA
atgctgagtttatacgaaaagataaagataaggctgataattttatttttattggcagcactgtcatttattggt

SEQ ID NO: 36739 - DNA, 75 bp, synthetic construct
  source 1..75: mol_type = other DNA
ccgctctggttatctgcgtcatcgtctgcctttcatgggcggttaatcattaccgcgataacgcgattacctaca

SEQ ID NO: 36740 - DNA, 75 bp, synthetic construct
  source 1..75: mol_type = other DNA
cagcgattcttttatgcagacggcggagatgctgctggagaagaaggcaacgctgaccatctggcagggcgtcat

SEQ ID NO: 36741 - DNA, 75 bp, synthetic construct
  source 1..75: mol_type = other DNA
cgctgttttatgaggaccatccggcgcgggagttctgtgtgcagtacggggagtcggacctggcgtttctggcgc

SEQ ID NO: 36742 - DNA, 75 bp, synthetic construct
  source 1..75: mol_type = other DNA
acgcactggctcgataggcagtcgcggcagattgtgcgtgtacgcatcggtgcggttatctcgcaggcgatgcct

SEQ ID NO: 36743 - DNA, 75 bp, synthetic construct
  source 1..75: mol_type = other DNA
tattgcggcaacagagatgaaaactatcctaccaaaggatttaacaccagaaaaatacaataaaatttatctgcc

SEQ ID NO: 36744 - DNA, 75 bp, synthetic construct
  source 1..75: mol_type = other DNA
atgaaactttccctgatgctggaagccgacagcattaacgtgcgggcgctgaacatggggcgaattgtcgttgac

SEQ ID NO: 36745 - DNA, 75 bp, synthetic construct
  source 1..75: mol_type = other DNA
gaagcatgggaacgctacaacgttctggtcagtcgtgtggatactgcaaatcctgaatggccagaaatgccgcaa

SEQ ID NO: 36746 - DNA, 75 bp, synthetic construct
  source 1..75: mol_type = other DNA
actggttgggttgcatacagggcaatcaaagaaaattttgccttagccacattacaggctcacttgaatactaat

SEQ ID NO: 36747 - DNA, 75 bp, synthetic construct
  source 1..75: mol_type = other DNA
gggggtagctggtcctgtcggcccggcaggtgcagcgggcgctaaaggtgatgcaggacctgcagggcctgccgg

SEQ ID NO: 36748 - DNA, 75 bp, synthetic construct
  source 1..75: mol_type = other DNA
aaaataaattacttctattaataaggcctgatgaggaaggttgtaagttgataaccctgacggcagatcttcaaa

SEQ ID NO: 36749 - DNA, 75 bp, synthetic construct
  source 1..75: mol_type = other DNA
tccggcctgagcgcagtgtccaccacgcgatccgcacggtgaaattacagctcacagactgcggtgaaacccggg

SEQ ID NO: 36750 - DNA, 75 bp, synthetic construct
  source 1..75: mol_type = other DNA
cagagacgcaaactttcagcgtaacccacgctcgtcacatggctgctaaagttgcaactgacttgcggcgcatgc

SEQ ID NO: 36751 - DNA, 75 bp, synthetic construct
  source 1..75: mol_type = other DNA
cagccggacagcgtgaccgctgaaaattatgtgcgtgttgttgctgaggtgatgcgccgtgatggtattgagctt

SEQ ID NO: 36752 - DNA, 75 bp, synthetic construct
  source 1..75: mol_type = other DNA
gcacaatacagtaatagcggcgagtcggttgtgttccgttatgccgcgctggaatcttcaaaacaggttcctgtt

SEQ ID NO: 36753 - DNA, 75 bp, synthetic construct
  source 1..75: mol_type = other DNA
atggaaaaagactatttgagaattagtagtactgtattagtgagcttattgtttgggcttgctttggttttggtg

SEQ ID NO: 36754 - DNA, 75 bp, synthetic construct
  source 1..75: mol_type = other DNA
aagccagagaggccagaaggctacaacaaccgcatcaaagcagcggtaaggggtatgccttgctgcaccgtaaaa

SEQ ID NO: 36755 - DNA, 75 bp, synthetic construct
  source 1..75: mol_type = other DNA
tcaatctgtctccggaacatgaactgaatgagtggctggcagagagaggttatgccggacaggcggataaccgta

SEQ ID NO: 36756 - DNA, 75 bp, synthetic construct
  source 1..75: mol_type = other DNA
cataaatgatcacaacggactttctcagcaggaaattgccgacattctgaaactctacccggacgcgtttaacgc

SEQ ID NO: 36757 - DNA, 75 bp, synthetic construct
  source 1..75: mol_type = other DNA
ccgggaaattggtgtgtttgatgagcacggcgatttaatcgcagtaggcaatactgccgaaagttacaagccaac

SEQ ID NO: 36758 - DNA, 75 bp, synthetic construct
  source 1..75: mol_type = other DNA
atgtacgaattaactctatctccagcagagattaaagagatcacgaaatacgagcgatacacaaaacagcaacac

SEQ ID NO: 36759 - DNA, 75 bp, synthetic construct
  source 1..75: mol_type = other DNA
tgtagctctgtatttcagtgatagtgcggcttcaaattactccatgaaaaacaatgtttatttcagcaattctac

SEQ ID NO: 36760 - DNA, 75 bp, synthetic construct
  source 1..75: mol_type = other DNA
aagctatttccagcaatggccttgttgccgaaggtgtaatgtacgaacgtctggttgttccactgattcaccata

SEQ ID NO: 36761 - DNA, 75 bp, synthetic construct
  source 1..75: mol_type = other DNA
gggcaatggatacaaaatggcggtatcgccaacaacactactgtcaccggtggtggtcttcagagagtgaatgcc

SEQ ID NO: 36762 - DNA, 75 bp, synthetic construct
  source 1..75: mol_type = other DNA
atgctaaaacagcaagatatgacagaaacggcgaaagttgtttttaatgaattaaacggcaaaccggcaacagtc

SEQ ID NO: 36763 - DNA, 75 bp, synthetic construct
  source 1..75: mol_type = other DNA
aacaatggcaggaacatgacgcgcgtatggccggagataatgagcctcctgtgtggcttggggagcagcagttat

SEQ ID NO: 36764 - DNA, 75 bp, synthetic construct
  source 1..75: mol_type = other DNA
ctaaagattggggctggtactgtaatccttgaacaaaaagcgaaaaacaacgattcaacggctttttcttccatt

SEQ ID NO: 36765 - DNA, 75 bp, synthetic construct
  source 1..75: mol_type = other DNA
aatacattctatcacgtggaacaatttgttgaaaaacctaatcgctcaagggctgaagagtatatctcctcaggt

SEQ ID NO: 36766 - DNA, 75 bp, synthetic construct
  source 1..75: mol_type = other DNA
ctgaaaacgctggggcttttgcgttgtgaaaagctcaataaatcaaagcgcgatatgaccaatttctacacgatc

SEQ ID NO: 36767 - DNA, 75 bp, synthetic construct
  source 1..75: mol_type = other DNA
tggatcaccacgcacaacggcattgagtacacgccaccagcaccaggggagaacatccgcgataacgcgccaaac

SEQ ID NO: 36768 - DNA, 75 bp, synthetic construct
  source 1..75: mol_type = other DNA
agggcgatattgttgtaagaaccgggcatcttctgaaccagcgggagggattttctgccacaacaacaacccgga

SEQ ID NO: 36769 - DNA, 75 bp, synthetic construct
  source 1..75: mol_type = other DNA
ccgacagcattaacgtgcgggcgctgaacatggggcgcattgtcgttgacattgatggtgttaatctcgctgaac

SEQ ID NO: 36770 - DNA, 75 bp, synthetic construct
  source 1..75: mol_type = other DNA
gttggtaaatctcagcggcagcaatctcaacctacacaggtatcacagccagcagccagcagtaacttttcttca

SEQ ID NO: 36771 - DNA, 75 bp, synthetic construct
  source 1..75: mol_type = other DNA
cctgcaacacctgaacatactgtaagaagaagcgactacagagccactttgggtagaactcaacccatagatatt

SEQ ID NO: 36772 - DNA, 75 bp, synthetic construct
  source 1..75: mol_type = other DNA
gcagcttgagcggctgcgtcccctgctggatgcgcagtcggatgaatgtccggcacgtcagccacaggtcaccga

SEQ ID NO: 36773 - DNA, 75 bp, synthetic construct
  source 1..75: mol_type = other DNA
cagttcgggactaactggtcttactattcccactatgtaggggatatcttcggtgcgccgctggcaatcgaaggt

SEQ ID NO: 36774 - DNA, 75 bp, synthetic construct
  source 1..75: mol_type = other DNA
cccagttgaaggagcgcaaagaaggcgcattcgttcctttcgtcaccctcggtgatccgggcattgagcagtcgt

SEQ ID NO: 36775 - DNA, 75 bp, synthetic construct
  source 1..75: mol_type = other DNA
acagcacggcaaggatttcacgctgtaccagatggagagcctgcgcagtgatgcggaaaaggccacagggcagag

SEQ ID NO: 36776 - DNA, 75 bp, synthetic construct
  source 1..75: mol_type = other DNA
ggtggcaatgctgaaccaggtctgttcgcgggtcgtgggggcgctgggtggcgcaggcgtccgctgtacacggat

SEQ ID NO: 36777 - DNA, 75 bp, synthetic construct
  source 1..75: mol_type = other DNA
gaacgccaacaacgccaactgcgccaaaaggtactaataatactcagatcgcaagtacggcttatgtgatggccg

SEQ ID NO: 36778 - DNA, 75 bp, synthetic construct
  source 1..75: mol_type = other DNA
cggcgaaaactggtaaaggaaagggccagactgaaaaaggccacggtcaaaaatccgcacgtaaaaatcattgtt

SEQ ID NO: 36779 - DNA, 75 bp, synthetic construct
  source 1..75: mol_type = other DNA
tatcatgacagctaaagatctagcatatctaattaaatttgatgggaattataaagatgggatgacagtttggtt

SEQ ID NO: 36780 - DNA, 75 bp, synthetic construct
  source 1..75: mol_type = other DNA
acctgaccggaaaactcacacagagtgaggatgagggacttgtcatcctctggtactacgatgaatcggaccgta

SEQ ID NO: 36781 - DNA, 75 bp, synthetic construct
  source 1..75: mol_type = other DNA
atgagcactaaattaaccggctatgtatgggatggttgcgcagcgtcaggcatgaaattatccagcgtggcaatt

SEQ ID NO: 36782 - DNA, 75 bp, synthetic construct
  source 1..75: mol_type = other DNA
gcccggactgggcagagcgcctgaaaaaggggctgtcgattattccggctccgatttatccggaccaggccgcac

SEQ ID NO: 36783 - DNA, 75 bp, synthetic construct
  source 1..75: mol_type = other DNA
atctggctgtactggcaaaatcccgggaagaagagacgacccggccaacccttaaagaactggcagcgaagctgt

SEQ ID NO: 36784 - DNA, 75 bp, synthetic construct
  source 1..75: mol_type = other DNA
cgatccgttgcaggggcggtatatcactcaggacccgatagggctggagggggggatggagtctgtatgcgtacc

SEQ ID NO: 36785 - DNA, 75 bp, synthetic construct
  source 1..75: mol_type = other DNA
taatctcccatgcacgcgaaagcgttagttatctggaaaacttgaaaggacgtgttagcaaagaaggtgcggact

SEQ ID NO: 36786 - DNA, 75 bp, synthetic construct
  source 1..75: mol_type = other DNA
ggagtttaattactcaactgaaattactgatttcatgaaatcggtatatttcctgtatctcaatcgtcatggtta

SEQ ID NO: 36787 - DNA, 75 bp, synthetic construct
  source 1..75: mol_type = other DNA
tctgttcagaagagcggtataccatacaaattaacaatgcatataacacgatacagtcagaaaaagatgatatcg

SEQ ID NO: 36788 - DNA, 75 bp, synthetic construct
  source 1..75: mol_type = other DNA
acgatgcgattgaagccgatcgccaacgttataccgatattgccgatcaaatctgggatcatccagaaacacgtt

SEQ ID NO: 36789 - DNA, 75 bp, synthetic construct
  source 1..75: mol_type = other DNA
atggcgtttgtgtgcatcctgaaagtgaaatcgttcacgtatggcgcggcggggtatggtgtccggtcagcacaa

SEQ ID NO: 36790 - DNA, 75 bp, synthetic construct
  source 1..75: mol_type = other DNA
cgcaggcttaatattctggtcattaatgcaggcattaacaggaatggttaattcttttagccactttattttaat

SEQ ID NO: 36791 - DNA, 75 bp, synthetic construct
  source 1..75: mol_type = other DNA
gagcccgtgctgcacaatgcccgacaaaaagtcgaggcagattttaaccagcaggtgatcaatcgcaagttagcg

SEQ ID NO: 36792 - DNA, 75 bp, synthetic construct
  source 1..75: mol_type = other DNA
atggcattaaccgatatcaaagtgaaaaccgcaaaacccaaagacaaaccctataagcttgctgatggcggcggt

SEQ ID NO: 36793 - DNA, 75 bp, synthetic construct
  source 1..75: mol_type = other DNA
tacatccgagcgtatcaaccgcacgatcggcattgatatttcagactctgtaaccagtaccagaagtgatgttgc

SEQ ID NO: 36794 - DNA, 75 bp, synthetic construct
  source 1..75: mol_type = other DNA
atgagcaagaaagaagggaaaacaccgcagccagcggcaaaaacaatcaccgccagcgccccgaaaatggaagca

SEQ ID NO: 36795 - DNA, 75 bp, synthetic construct
  source 1..75: mol_type = other DNA
cacccaggcagaatatcgctggattgaaatgttcgggcatggcaagcgaatgaatatgccgtggtggggcggttt

SEQ ID NO: 36796 - DNA, 75 bp, synthetic construct
  source 1..75: mol_type = other DNA
ggacggtgagggtggtgtgccgggagtggagcgtcacggataacgtccggtacagtgatttcagctgtacgattg

SEQ ID NO: 36797 - DNA, 75 bp, synthetic construct
  source 1..75: mol_type = other DNA
atgtcccgttttgtcctcggtaactgcatcgatgttatggcgcgtatccctgataacgccattgatttcatatta

SEQ ID NO: 36798 - DNA, 75 bp, synthetic construct
  source 1..75: mol_type = other DNA
tgaatccgatctcaaatatagatccattaggattagaaacactaaaatgcattaagccactgcattcaatgggcg

SEQ ID NO: 36799 - DNA, 75 bp, synthetic construct
  source 1..75: mol_type = other DNA
ccgaaattttcaacgtggatccgcgaacgattgaacgctggcagtctcagggactcccttgcgtctccggaggta

SEQ ID NO: 36800 - DNA, 75 bp, synthetic construct
  source 1..75: mol_type = other DNA
taatcgaagaagccaaattaaaaatagcgattgcgaaatgccacacgaattcagggatggcacgggtagagggtg

SEQ ID NO: 36801 - DNA, 75 bp, synthetic construct
  source 1..75: mol_type = other DNA
acgcagaaggaattccccgtcgggctacggtcatggttaatgcgggaatacggcgacgatacagcgctgctaaaa

SEQ ID NO: 36802 - DNA, 75 bp, synthetic construct
  source 1..75: mol_type = other DNA
taaacagaaccgtatttactaccgcaagccacgcagtgaaatgggtgtgacttgtgttggtcgccagaaaatgaa

SEQ ID NO: 36803 - DNA, 75 bp, synthetic construct
  source 1..75: mol_type = other DNA
tgaacaggccagcgcagcagcgaggtctgcttccgcagcgaagacatccgaaacgaacgcgaaagcgtcggaaac

SEQ ID NO: 36804 - DNA, 75 bp, synthetic construct
  source 1..75: mol_type = other DNA
tacaaacccggaacttctcccggaggttgtaaaggcaatagatgttgccgatatagtgattagaggaaagagaat

SEQ ID NO: 36805 - DNA, 75 bp, synthetic construct
  source 1..75: mol_type = other DNA
attctcaaaacacatttatctggcgctttgtcatctttaatccgactgattcccgtgttgttcacgtcgaggcat

SEQ ID NO: 36806 - DNA, 75 bp, synthetic construct
  source 1..75: mol_type = other DNA
ttaccggtctggcaaaaagcctgcgtgctgccgtgcatcacagctcaccgatttacgtcaaacgtaatattctgg

SEQ ID NO: 36807 - DNA, 75 bp, synthetic construct
  source 1..75: mol_type = other DNA
attaggattagaaacactaaaatgcattaagccactgcattcaatgggcggaactggtgaaagaagcggtccaga

SEQ ID NO: 36808 - DNA, 75 bp, synthetic construct
  source 1..75: mol_type = other DNA
ggaggtgcagcttaccgtcagtgggtgtccgcgagtgacgccgtgtcggctggatcaggcagcgccgcgcactaa

SEQ ID NO: 36809 - DNA, 75 bp, synthetic construct
  source 1..75: mol_type = other DNA
cacgatgcgcgttaccaggcaaaatacgtttcagctatctggcaaaaactgatcccgagtcaggctgatttttaa

SEQ ID NO: 36810 - DNA, 75 bp, synthetic construct
  source 1..75: mol_type = other DNA
gggtgtgctttcagaaactgaatggccgcgtgaaacgcttgttgcatttgaagtaaagccggagatatcaacagt

SEQ ID NO: 36811 - DNA, 75 bp, synthetic construct
  source 1..75: mol_type = other DNA
tgggcctgggattatcctgtatcacaagcctttatggaggcaaaaaatgcttcgccatggaagaatacggcgttg

SEQ ID NO: 36812 - DNA, 75 bp, synthetic construct
  source 1..75: mol_type = other DNA
atgaagaaatatataccagtggtattatttgttttttcatgtcaggtattttctgctgatattcatggacgggtc

SEQ ID NO: 36813 - DNA, 75 bp, synthetic construct
  source 1..75: mol_type = other DNA
cagtatcagcggacgtcctttccgggtgattcgcacacagccatcgttcagccctgaaacggtgaatcacatcct

SEQ ID NO: 36814 - DNA, 75 bp, synthetic construct
  source 1..75: mol_type = other DNA
tcaacgttcagggtacccgcaatgtgctggcggccatggaaaaaaatggcgttaaaaatatcatctttaccagtt

SEQ ID NO: 36815 - DNA, 75 bp, synthetic construct
  source 1..75: mol_type = other DNA
gtgatgcaaataaaggcgatactgttgaaatcacctttgaagatgaaaatggtgatgaacagaaagtcacactgg

SEQ ID NO: 36816 - DNA, 75 bp, synthetic construct
  source 1..75: mol_type = other DNA
atgtttgaagaacgtttagagactattcggtctgtttgtgaaaacttaaagttacaaactaagccagccttaaga

SEQ ID NO: 36817 - DNA, 75 bp, synthetic construct
  source 1..75: mol_type = other DNA
ttggtcaggtgacggcggtgcaccgcgaggaaggcctgagccagtaccacgcatacgacagccgtggacagttaa

SEQ ID NO: 36818 - DNA, 75 bp, synthetic construct
  source 1..75: mol_type = other DNA
actggttggtctttttaccggaaactgggcttacggggcgatagccggttgtacgttcttcattgcgcgtgaaca

SEQ ID NO: 36819 - DNA, 75 bp, synthetic construct
  source 1..75: mol_type = other DNA
aatgcgacgcatcgccgatttgcactccggtgaagccaaaaccgatgcccgtgatgcggccatcattgccgaagc

SEQ ID NO: 36820 - DNA, 75 bp, synthetic construct
  source 1..75: mol_type = other DNA
agctcaaagagaaaggactgatatggcttttaccaccatactgctggtcacatcgtcagatagcccgtaagctga

SEQ ID NO: 36821 - DNA, 75 bp, synthetic construct
  source 1..75: mol_type = other DNA
ccagtgggatgaaacgccacccgtgcagcgtgtcacgcagtccatcgatgcgcgcctcatccagcttactgaaaa

SEQ ID NO: 36822 - DNA, 75 bp, synthetic construct
  source 1..75: mol_type = other DNA
actcttcagagggcatcccgtggaatgagctgccagcttcgcacaggggaaacaaccaaatgagtttgcccttac

SEQ ID NO: 36823 - DNA, 75 bp, synthetic construct
  source 1..75: mol_type = other DNA
cccggggctgggttatcaaacaggcgctttctgcatggcttgcccaggaggaggagcgtaatcgcctgacgctgg

SEQ ID NO: 36824 - DNA, 75 bp, synthetic construct
  source 1..75: mol_type = other DNA
accaccactattagccaacaggtggcgtggttgttggggctgtccgcaatagctgcgcttatcgcgcagttcgtg

SEQ ID NO: 36825 - DNA, 75 bp, synthetic construct
  source 1..75: mol_type = other DNA
acgccttgctgcagatatcccccaggcactgacacagcaaaccgtcatcgtccccggtacgaatgctgctgtcgt

SEQ ID NO: 36826 - DNA, 75 bp, synthetic construct
  source 1..75: mol_type = other DNA
tgaacaggtgattgccgtgtatggtccggtgcatgcgcggcttcttcggcagtctctggaactgatcagtgatgc

SEQ ID NO: 36827 - DNA, 75 bp, synthetic construct
  source 1..75: mol_type = other DNA
gttcgatggtatgagcaaaccaacgacatgtttgtactggcatcggtattgattgaaagtctgattcagaatcat

SEQ ID NO: 36828 - DNA, 75 bp, synthetic construct
  source 1..75: mol_type = other DNA
tacctggtacgcaatgagaaggggaaggaggcccgcgagtggcttgattctcatccggtcgatcacatcctcaac

SEQ ID NO: 36829 - DNA, 75 bp, synthetic construct
  source 1..75: mol_type = other DNA
acagatacagaaatatgataaccaaaaaatgcagtatgaatttggtatgaatggtcgtgcattcaacaggcagtt

SEQ ID NO: 36830 - DNA, 75 bp, synthetic construct
  source 1..75: mol_type = other DNA
atcatgatagacggttgtgtggtgcggttgcgtaaatataaaccagaagaatatgaactgatcattgctcacttt

SEQ ID NO: 36831 - DNA, 75 bp, synthetic construct
  source 1..75: mol_type = other DNA
catccaggagaatatgctgaaaggcgggatttccggtcgcagtgcaaaaggaaaacgtatccatacccgggccat

SEQ ID NO: 36832 - DNA, 75 bp, synthetic construct
  source 1..75: mol_type = other DNA
aaacagaatgggtgccgacggatggttacgtaggcaaggacgaggcccggcaacaaattagcggttatatcctga

SEQ ID NO: 36833 - DNA, 75 bp, synthetic construct
  source 1..75: mol_type = other DNA
gttaaagctgtgcacttttatgaacaactaaaacgcgaaaatccaccagcatccggaaacctgattacagattcc

SEQ ID NO: 36834 - DNA, 75 bp, synthetic construct
  source 1..75: mol_type = other DNA
tagatcgctggggggcatgggctgcagcagaaaatagcggtgtcgattggcaaccgatagcagcgggcttcaagg

SEQ ID NO: 36835 - DNA, 75 bp, synthetic construct
  source 1..75: mol_type = other DNA
tcgtcgcagtggcgcaggcactgaactttacccgtgcggcggaaaaactgcatacctcacagccttcgttaagca

SEQ ID NO: 36836 - DNA, 75 bp, synthetic construct
  source 1..75: mol_type = other DNA
tcccagagaaagacgcctatcgactggaagtcgttacagctggcgccctgaagtatcaagaaagcgcttaccgca

SEQ ID NO: 36837 - DNA, 75 bp, synthetic construct
  source 1..75: mol_type = other DNA
ctggtacccgttatctggttgagtttgattcagccgatttactgcgcgccacacccaccgaacgttatgccacgt

SEQ ID NO: 36838 - DNA, 75 bp, synthetic construct
  source 1..75: mol_type = other DNA
agtcaatatggcaccaatattactattaatgatggtgacagaattacaggagataccgccgatccatcaggaaac

SEQ ID NO: 36839 - DNA, 75 bp, synthetic construct
  source 1..75: mol_type = other DNA
gcagacgtggagatcatctttaccttcaaaggcaccaaatcgggtaactgggatgtgaagacgctggataaacag

SEQ ID NO: 36840 - DNA, 75 bp, synthetic construct
  source 1..75: mol_type = other DNA
ctgagcaggcagcaattactgcctcggtagtccctgacgagttacgtatcggcttctggccaaagcgctttggat

SEQ ID NO: 36841 - DNA, 75 bp, synthetic construct
  source 1..75: mol_type = other DNA
ttcccctcagcacagagcaacaggccgcatggcgggcggtggcggagacggaaaaacgccgccatcagggtaaca

SEQ ID NO: 36842 - DNA, 75 bp, synthetic construct
  source 1..75: mol_type = other DNA
cttcacgtccaggtctgggtaaggtgtccggtttcttctggcgtaatccggggctggggctgtttttactgctgc

SEQ ID NO: 36843 - DNA, 75 bp, synthetic construct
  source 1..75: mol_type = other DNA
gggcgcagcagccgctggtacaaaagcgaagtggagcagtggatgcaacagcgaatcgaggagtcacgaggagca

SEQ ID NO: 36844 - DNA, 75 bp, synthetic construct
  source 1..75: mol_type = other DNA
cgcaatataatttgtggctggattacctggacgcactggaaatggtcgatacttccagtgcgccagatattgaat

SEQ ID NO: 36845 - DNA, 75 bp, synthetic construct
  source 1..75: mol_type = other DNA
aggcccgtgaacagtttaccggtgcggtggaccggatatttgacacggcggagagcgtctgtattgcctctgttg

SEQ ID NO: 36846 - DNA, 75 bp, synthetic construct
  source 1..75: mol_type = other DNA
tcgctggcgtgcggcgttcttgccatggccgtggccgggtcgctgcgcttcttcgggatccctgaggatgcagtg

SEQ ID NO: 36847 - DNA, 75 bp, synthetic construct
  source 1..75: mol_type = other DNA
aatgagtcaggtgaagtgtatatgtcaggcctgtctgaaaaaggacaactggatgtgaaatggaacagtcatgga

SEQ ID NO: 36848 - DNA, 75 bp, synthetic construct
  source 1..75: mol_type = other DNA
gccggtgaaaccctcttcaccggcaccatcaaccgcacggaagtccatccccgggaagtgattaaacgcgccctg

SEQ ID NO: 36849 - DNA, 75 bp, synthetic construct
  source 1..75: mol_type = other DNA
tcgttgaaggtggaaacagatccttcgagtgcaagatagaagatgttgaaataattggaaaaattataagtttaa

SEQ ID NO: 36850 - DNA, 75 bp, synthetic construct
  source 1..75: mol_type = other DNA
aaatctctatacccaatttatattgcaaattagataagcgaaccggaaaggtatattggcaatacaaacatccac

SEQ ID NO: 36851 - DNA, 75 bp, synthetic construct
  source 1..75: mol_type = other DNA
gtgggtttacaacggcaagggtgatgcttatgcaaacccgttgtcagacgatgactggcagcgactggctaaggt

SEQ ID NO: 36852 - DNA, 75 bp, synthetic construct
  source 1..75: mol_type = other DNA
ggaaaacgccgatgacgtaaaagaaagctgctgttgtttcggcgtcggtaacaaactgctgaatctctttggtga

SEQ ID NO: 36853 - DNA, 75 bp, synthetic construct
  source 1..75: mol_type = other DNA
atggcaggactggagcgtgaagaattccgggtgctgtatctgaacaaccagaatcagatgattgccggtgaaacc

SEQ ID NO: 36854 - DNA, 75 bp, synthetic construct
  source 1..75: mol_type = other DNA
atgaattatccaactatcgttaacggcatcgatttccgagatctgatttttgtggcaaacaacgatccggttaca

SEQ ID NO: 36855 - DNA, 75 bp, synthetic construct
  source 1..75: mol_type = other DNA
aaaacaacacggtatattctgctgcaacccaaacgggtgtttgccagggtgatacgtctcgttatggacccgtta

SEQ ID NO: 36856 - DNA, 75 bp, synthetic construct
  source 1..75: mol_type = other DNA
tccttaccttgtgaattttgcctttgctgattactccaggtctgcggcaagtaaggctcgctgtgagcattgttc

SEQ ID NO: 36857 - DNA, 75 bp, synthetic construct
  source 1..75: mol_type = other DNA
acccgctttttagaacgcacagacaacagccccgctgcgtatacctatttgactgaacatcactacatcccttct

SEQ ID NO: 36858 - DNA, 75 bp, synthetic construct
  source 1..75: mol_type = other DNA
tgccttcatccgtttccacggtgtgcgtcacccggcaaccttgggcagcagcgaagtcgaggcatttctgtcctg

SEQ ID NO: 36859 - DNA, 75 bp, synthetic construct
  source 1..75: mol_type = other DNA
atgcgtgattttcagaatgcctttgatgctgcccttgccggggtggacagtacgattgttgaagtgatggggctc

SEQ ID NO: 36860 - DNA, 75 bp, synthetic construct
  source 1..75: mol_type = other DNA
ttccgtaactggatagcgatgatccctttcattcatgcggaagggctgtgggaagacatcaaaatgggcggagcc

SEQ ID NO: 36861 - DNA, 75 bp, synthetic construct
  source 1..75: mol_type = other DNA
agtaaatctgcaacagaaatcattgctgtttccggggcgcgctgctgggtgggatttgatccttcgcgtggcgtg

SEQ ID NO: 36862 - DNA, 75 bp, synthetic construct
  source 1..75: mol_type = other DNA
gaaaaatggctgaattgctgaatgattcacaccctgagtggtgttacgccacgtgccgtaatcgcatagatgcgt

SEQ ID NO: 36863 - DNA, 75 bp, synthetic construct
  source 1..75: mol_type = other DNA
agcataagcctgcattctggctccgcaatgagcaaaccgaacgtttaataagcgagttgcagatttgcaactcgg

SEQ ID NO: 36864 - DNA, 75 bp, synthetic construct
  source 1..75: mol_type = other DNA
gcagatggtgaaagaggccgtaagccatatccctgctccgcgtgacggtcgtgattacgatccggaagtactgaa

SEQ ID NO: 36865 - DNA, 75 bp, synthetic construct
  source 1..75: mol_type = other DNA
atagaacggattcagcagcactgttgccctgcatcgaacaggcccgggaggatgtccgtaccctgcgtcatctgc

SEQ ID NO: 36866 - DNA, 75 bp, synthetic construct
  source 1..75: mol_type = other DNA
cacaaagtatgtgttaaaactcgacggctggatccagaaaaacaaatcactggcgtcaaccatcggcatcattgc

SEQ ID NO: 36867 - DNA, 75 bp, synthetic construct
  source 1..75: mol_type = other DNA
aagaaaatggtttttttaccgatttaaataaagcaccttcagatgctgttgagataaccacggatgaatggctat

SEQ ID NO: 36868 - DNA, 75 bp, synthetic construct
  source 1..75: mol_type = other DNA
agtaccgtagcggatgccagcactgttgaggctaagatcaatcaaagcagcgatagtaaaacggtgaactttgtt

SEQ ID NO: 36869 - DNA, 75 bp, synthetic construct
  source 1..75: mol_type = other DNA
cgggatcaaactgtgcgaatcttacaaccgccagtatggacgcgattaccgctcagtcatgccgaccaacctgta

SEQ ID NO: 36870 - DNA, 75 bp, synthetic construct
  source 1..75: mol_type = other DNA
cgcctgctgggattgtttcctcctgaaatcagggattcgatggctgcagccacgctttccctcgtacagttcatt

SEQ ID NO: 36871 - DNA, 75 bp, synthetic construct
  source 1..75: mol_type = other DNA
tgcgcgtggaagacggcaccggcgacgacgaagaaacgaaactcgcgcagaccgtttccaatatcatcggcacca

SEQ ID NO: 36872 - DNA, 75 bp, synthetic construct
  source 1..75: mol_type = other DNA
tgggcattttcggttgaccggtgggatgagagatggccggaggccacaaaacgcagcgttatcgcctccgcattt

SEQ ID NO: 36873 - DNA, 75 bp, synthetic construct
  source 1..75: mol_type = other DNA
ctgccctgcattgaacaggccagggaagatatccataccctgcgccagttgcagtttctgcaacagaaccggtga

SEQ ID NO: 36874 - DNA, 75 bp, synthetic construct
  source 1..75: mol_type = other DNA
cttttgcaaatgagaaaaggaaatactctaaaggtactaaagtaattgatgtatctgcatctgatatggcgaaaa

SEQ ID NO: 36875 - DNA, 75 bp, synthetic construct
  source 1..75: mol_type = other DNA
cgtcagatattccggacatcctcactatgaatattgaaccggatctgctggatgccatgctcagaaaaaccggcc

SEQ ID NO: 36876 - DNA, 75 bp, synthetic construct
  source 1..75: mol_type = other DNA
tgaacgccttagagcatttgcaacaggactatatgcggcggctgaacgagtgggagagcgccttcgcggaattgc

SEQ ID NO: 36877 - DNA, 75 bp, synthetic construct
  source 1..75: mol_type = other DNA
gccgaagcccttgccacacagtttaaaaacaccgaacgtccgacccgtgctcaggcgaaagtgctggaatccgca

SEQ ID NO: 36878 - DNA, 75 bp, synthetic construct
  source 1..75: mol_type = other DNA
aggcccgcgccgtcagccggaaaagaatgttttcaccgatgagcagattgagaagctggaagaaatcttccattc

SEQ ID NO: 36879 - DNA, 75 bp, synthetic construct
  source 1..75: mol_type = other DNA
ctggtcccgagcatgagccggcgtggcaactgctgggataatgcggtggccgaatcgttcttcagttcactgaaa

SEQ ID NO: 36880 - DNA, 75 bp, synthetic construct
  source 1..75: mol_type = other DNA
gttgataataatcaaataatattatttccttgtggttatgaattttatattgagaattatcctgaagcagggctt

SEQ ID NO: 36881 - DNA, 75 bp, synthetic construct
  source 1..75: mol_type = other DNA
cgccacttctaaatcagcttcatcagcgtgcggtgaggtcggtggtaagtcagttggcattgcggagcaagtcgt

SEQ ID NO: 36882 - DNA, 75 bp, synthetic construct
  source 1..75: mol_type = other DNA
aatatgaggaaatatgagccttatctgctcaatgataattccatactttcccgaattgctcttcttgaacttggt

SEQ ID NO: 36883 - DNA, 75 bp, synthetic construct
  source 1..75: mol_type = other DNA
aacaggatctggttgctcacattcgaaaagacaaaggcagcttcaagaagctgagtgattacaccaggatcatgc

SEQ ID NO: 36884 - DNA, 75 bp, synthetic construct
  source 1..75: mol_type = other DNA
atgagtcgaatagtaccatttatacacctgcatttgttgaaagtatttcaaaagttgatatacctgctggcattt

SEQ ID NO: 36885 - DNA, 75 bp, synthetic construct
  source 1..75: mol_type = other DNA
ttcccgctcagcgagctgcaggcgtgcatggtggacagttgggaagtctggaccgactttcatgcactggccctg

SEQ ID NO: 36886 - DNA, 75 bp, synthetic construct
  source 1..75: mol_type = other DNA
gctccggtgcaggcaaattctgctatcaggacagataaatcggcatatatcgccggggagccattaaccgtcaca

SEQ ID NO: 36887 - DNA, 75 bp, synthetic construct
  source 1..75: mol_type = other DNA
aaatcgcgcaagtttatcgcccagcaaattgttcgctggctggagagcgagcatccactgaaagccaaaattttg

SEQ ID NO: 36888 - DNA, 75 bp, synthetic construct
  source 1..75: mol_type = other DNA
gcgtgagactgaacagcagatttaccgtcagctgactgacgaggtactggccctgcgattgcctgaaaacggctc

SEQ ID NO: 36889 - DNA, 75 bp, synthetic construct
  source 1..75: mol_type = other DNA
aaaagaagactgctgcgccgtttgtcgtcacgtttatcttcattggctatgcaagtcgtaatacaaggtgggaca

SEQ ID NO: 36890 - DNA, 75 bp, synthetic construct
  source 1..75: mol_type = other DNA
actgattacactgtcactggggctggtggatataacggcggtaatgtaattctgtcgaaggcgttagctaacggt

SEQ ID NO: 36891 - DNA, 75 bp, synthetic construct
  source 1..75: mol_type = other DNA
gcccggtggggcaggtggttatcagcagtactgtaatggagtttcggaagcataaccgtgtggtggatgctgtgc

SEQ ID NO: 36892 - DNA, 75 bp, synthetic construct
  source 1..75: mol_type = other DNA
gccaaaattctgattgcgccggtgttctgcacccagaagagtgtcgcagttgagcttatcgccatggcagagaag

SEQ ID NO: 36893 - DNA, 75 bp, synthetic construct
  source 1..75: mol_type = other DNA
tggttattacccgaaattaagccagctcgtttccggcctgatgcatcacgatattctgaccggaagcgcaaagtc

SEQ ID NO: 36894 - DNA, 75 bp, synthetic construct
  source 1..75: mol_type = other DNA
gtgccatgcctgaaagacctttccccatggctgggtcgtaaacatcgtgataataccctcacgctgaaacgcttt

SEQ ID NO: 36895 - DNA, 75 bp, synthetic construct
  source 1..75: mol_type = other DNA
atggtctggcgtacctggaattttgaggacggtgccgggtactggatgaaccatgccatccgtgatttcggcatt

SEQ ID NO: 36896 - DNA, 75 bp, synthetic construct
  source 1..75: mol_type = other DNA
attccgctttcagaatggagttgctattgcttttaaaaacattcaggcaggtgatagtaaaaagttctcgctatc

SEQ ID NO: 36897 - DNA, 75 bp, synthetic construct
  source 1..75: mol_type = other DNA
gaacaacttttcaccgagggtggaattccgcctctggaacaaaatcaaccagttagcgtcattaatggcggaaat

SEQ ID NO: 36898 - DNA, 75 bp, synthetic construct
  source 1..75: mol_type = other DNA
ttcgatctgcacacataacggtgaatcttatcagtccttacaaaatgcaaatattggtagccagccgccatcagc

SEQ ID NO: 36899 - DNA, 75 bp, synthetic construct
  source 1..75: mol_type = other DNA
agaagggcttgaacttcttctggatgaaatgattcacgatctgaatactcatggtatgccagaaacaccagtggc

SEQ ID NO: 36900 - DNA, 75 bp, synthetic construct
  source 1..75: mol_type = other DNA
gcgtgaacgtgctgtctaaagatggctcgatgaaaattcaggtcggcgcgaacgatggcgaaacgattactattg

SEQ ID NO: 36901 - DNA, 75 bp, synthetic construct
  source 1..75: mol_type = other DNA
cttctggggttcccgctgtctgagcgatgatccgctctttgccttcgaaaactacacccgaaccgcgcaggtact

SEQ ID NO: 36902 - DNA, 75 bp, synthetic construct
  source 1..75: mol_type = other DNA
atgttagagctaaacgtggcacgcctctcgaacgttatcaccttccaggttaaccgaccatcattagagaaagca

SEQ ID NO: 36903 - DNA, 75 bp, synthetic construct
  source 1..75: mol_type = other DNA
atgcgctggaaaaaaccagcaaaccatgaggtcattacaatggcggtcccgtgcggaggcattggtgaccgtgac

SEQ ID NO: 36904 - DNA, 75 bp, synthetic construct
  source 1..75: mol_type = other DNA
ctgacgatatctggtattttgcctccggtggcgtcattggcagcttactaagcactacgctacaaccactgctac

SEQ ID NO: 36905 - DNA, 75 bp, synthetic construct
  source 1..75: mol_type = other DNA
tatcctgaaagacccgacgctcagttcagaactgcgtgatgaactggcgaaaattgcgccgcaggagaacgttta

SEQ ID NO: 36906 - DNA, 75 bp, synthetic construct
  source 1..75: mol_type = other DNA
tttctctggcagcatgaccattcccgcccggtggggcagtgtacggtgcgccgggtcagcgaagggctggaaatc

SEQ ID NO: 36907 - DNA, 75 bp, synthetic construct
  source 1..75: mol_type = other DNA
ataaacgcacaccgaaacagttggcgctcatcatcaaacgctgtttgccgatggtgctcactggcagcggcatgc

SEQ ID NO: 36908 - DNA, 75 bp, synthetic construct
  source 1..75: mol_type = other DNA
aagaagtgaaactccattgccgcattgatggcaatgaggaagaccagttaatcagcggatacatcgccgccgcgc

SEQ ID NO: 36909 - DNA, 75 bp, synthetic construct
  source 1..75: mol_type = other DNA
atgggggattctgtgacacctgaagtggaggtactgagtgacatgattcgtcagtacttcagccaggaacgacca

SEQ ID NO: 36910 - DNA, 75 bp, synthetic construct
  source 1..75: mol_type = other DNA
aagtgcgtgacgggcgatgatgtgcgtccgatgcttgagcagatggtgaaggaggcggtaagccatatccctgtt

SEQ ID NO: 36911 - DNA, 75 bp, synthetic construct
  source 1..75: mol_type = other DNA
attggtacggagctgggtatggaccaggatgaagttctcaggttgaaacagattagcgggctgacggagctgttt

SEQ ID NO: 36912 - DNA, 75 bp, synthetic construct
  source 1..75: mol_type = other DNA
ctgggctggaacccggaagcgtgcggtaacccgattacctatgacggcggcacgctgctggatctgaatcgtcat

SEQ ID NO: 36913 - DNA, 75 bp, synthetic construct
  source 1..75: mol_type = other DNA
tcgcaatattgaaagaagagttaatcggctgtgggttcacgcaggtgatgatccgtgccgtaattgaagtggcga

SEQ ID NO: 36914 - DNA, 75 bp, synthetic construct
  source 1..75: mol_type = other DNA
gtacctcgtcgaggcgatggttggtgggtatcgggcgacgacggtggtgtttgtttccgataccgtggcgcttag

SEQ ID NO: 36915 - DNA, 75 bp, synthetic construct
  source 1..75: mol_type = other DNA
tctaaaaccttcggttggtactatctgctggcggcaacgctctatattgtctttgtggtctgtatcgcttgttcg

SEQ ID NO: 36916 - DNA, 75 bp, synthetic construct
  source 1..75: mol_type = other DNA
cagctggttttgttcgtgtgaaagagcttcctccaagaaaaagctgggcggaatcaagcgtcgccctgcggagta

SEQ ID NO: 36917 - DNA, 75 bp, synthetic construct
  source 1..75: mol_type = other DNA
agctttatcgcggcagcgttggcgcagtacaccgccaacaaaagcaggctggatgtgcttgatgatggagacctg

SEQ ID NO: 36918 - DNA, 75 bp, synthetic construct
  source 1..75: mol_type = other DNA
gaaggcacccgactgctgcgtcccgatgtcgccaaacctgtctggcataattcacttcgcctgccaaagggtgag

SEQ ID NO: 36919 - DNA, 75 bp, synthetic construct
  source 1..75: mol_type = other DNA
gcagcgttttgaaaacgcagtaaaggagagcactgaatttacaaaaaaaattaacgtgttcggtgtgactgacca

SEQ ID NO: 36920 - DNA, 75 bp, synthetic construct
  source 1..75: mol_type = other DNA
ggggctggaccgtcggctggtgagcctgctgctgaactgcgagggtgccccctgcctgaccggagatgcggtttc

SEQ ID NO: 36921 - DNA, 75 bp, synthetic construct
  source 1..75: mol_type = other DNA
acttcctgcagaaaatggcaagcgacattaacagtatgaacctcagttcctgccaggcggcacaggggattatcg

SEQ ID NO: 36922 - DNA, 75 bp, synthetic construct
  source 1..75: mol_type = other DNA
tcgatctcgccggcgctgcttcgtcagcttgccggcatggggaacaacctcaaccagattgcccggcaggttaac

SEQ ID NO: 36923 - DNA, 75 bp, synthetic construct
  source 1..75: mol_type = other DNA
cgaaagttggacgaagatgagattggacagcgcttgctgagcattccctgcgtcggaacactgacagcgagtact

SEQ ID NO: 36924 - DNA, 75 bp, synthetic construct
  source 1..75: mol_type = other DNA
gaggtgtattcagccgcaaccacgcgtgaccaggccagaatcgtgtttgaagacgccaaaaatatggtcagaaaa

SEQ ID NO: 36925 - DNA, 75 bp, synthetic construct
  source 1..75: mol_type = other DNA
cagtatgatcccaaggtttatgacgaatatcgtaagacgaagcgggcggggcggttgaacaatgaaaatcactcc

SEQ ID NO: 36926 - DNA, 75 bp, synthetic construct
  source 1..75: mol_type = other DNA
gccacaggggactaatagtacccagatcgcaagcacggctttcgttatggccgcgattgccgcacttgtagattc

SEQ ID NO: 36927 - DNA, 75 bp, synthetic construct
  source 1..75: mol_type = other DNA
gtggtggccgccattgtcgccggggcgttgcttatccgtaaatactgggagcctgtcagcgcattctttggcggt

SEQ ID NO: 36928 - DNA, 75 bp, synthetic construct
  source 1..75: mol_type = other DNA
atgatgatgatctacggcatgtttgtttttgagctgcgcacgctgccgcatcagcagttacagcaaaacaaaagc

SEQ ID NO: 36929 - DNA, 75 bp, synthetic construct
  source 1..75: mol_type = other DNA
tgcttaatcactatcttgaacaaaaagggtacacaatacagaaggagtttctttgtggcagtgccttttttatcg

SEQ ID NO: 36930 - DNA, 75 bp, synthetic construct
  source 1..75: mol_type = other DNA
tgcgccgcgctgcgggagttgaacaagcaccgggatattgttcgccagattactgattcttcccgctgtgttgta

SEQ ID NO: 36931 - DNA, 75 bp, synthetic construct
  source 1..75: mol_type = other DNA
cattatcacgtgatattactgctcaacaaagatacctggtgctcgctcggggatttcagcgaaccgtcttcgctg

SEQ ID NO: 36932 - DNA, 75 bp, synthetic construct
  source 1..75: mol_type = other DNA
ttggtgatgtcgaacctctctgtttcgactcgctgtctaattgagtggcagcttctgacccttgtgcgcccttct

SEQ ID NO: 36933 - DNA, 75 bp, synthetic construct
  source 1..75: mol_type = other DNA
acagataacgcctatcgtttctggcgtcgttgccggagtgacggactgggcaacagggtgtttctgttcaagggg

SEQ ID NO: 36934 - DNA, 75 bp, synthetic construct
  source 1..75: mol_type = other DNA
atgcgttgttacgtcaccaccttaaagttcagattcaggatgctggtcatcaggtcgatgacgcagaagatgcca

SEQ ID NO: 36935 - DNA, 75 bp, synthetic construct
  source 1..75: mol_type = other DNA
tgctgaacgcgaaacagaagaagaaaaaaataatgaggaaaaatcacaaccgtctgacgcaatggcagatgaaca

SEQ ID NO: 36936 - DNA, 75 bp, synthetic construct
  source 1..75: mol_type = other DNA
acctgagaacgacgatgaggacgggcatgacattgattatcttgagccatctgaagtttacgcgcttgggcgaac

SEQ ID NO: 36937 - DNA, 75 bp, synthetic construct
  source 1..75: mol_type = other DNA
caccgatcgaggactgctgacaaaagagtggatgaagggtaatcgtgtttcacacatcactcgcacggcttccgg

SEQ ID NO: 36938 - DNA, 75 bp, synthetic construct
  source 1..75: mol_type = other DNA
gaaacggaagcccgttaaaaccacatgaaattgcaccatcggccagactgacccggtcggaaagaatgcaaatta

SEQ ID NO: 36939 - DNA, 75 bp, synthetic construct
  source 1..75: mol_type = other DNA
gcaattcgatgacattcgcgtaattcgtggtgtgaaagtaccaggcggaaggcttggaataaaaatcaccgaact

SEQ ID NO: 36940 - DNA, 75 bp, synthetic construct
  source 1..75: mol_type = other DNA
tgacaacggcgacctggtgcgcatcagcggcccgcgacagacgcgggaatacggctacagcgccacgggcaggct

SEQ ID NO: 36941 - DNA, 75 bp, synthetic construct
  source 1..75: mol_type = other DNA
ttaggtgtctctggcacgaaaatgaaagaaattgctaaccagaaatacacttggagacgaatagcagaaatgtat

SEQ ID NO: 36942 - DNA, 75 bp, synthetic construct
  source 1..75: mol_type = other DNA
aaacagtaagcaatggcctggtaaagcggcgattggtcgcctgaaaggtgaggaactggtgcaatataatttgtg

SEQ ID NO: 36943 - DNA, 75 bp, synthetic construct
  source 1..75: mol_type = other DNA
cgaccggatggcggcgtttccggcaagcggtgagatcaacagcaaactggcgcaacccgttgaggcgattaaccg

SEQ ID NO: 36944 - DNA, 75 bp, synthetic construct
  source 1..75: mol_type = other DNA
tgcgtgaggcggcagaacgtgcaattccggcaatggaacgcctgttaatgttgccagttgatgatgatttgttaa

SEQ ID NO: 36945 - DNA, 75 bp, synthetic construct
  source 1..75: mol_type = other DNA
ctgatagaggcgaagtgttctcgtgctgacttgttggcagatagaaaaaagcgtttccgtaaaaatccctcactt

SEQ ID NO: 36946 - DNA, 75 bp, synthetic construct
  source 1..75: mol_type = other DNA
cccgtaacaagctgggctgctacatgacgcgacaggcgtcgattaacaatatcccggtttctgggctggtatcgc

SEQ ID NO: 36947 - DNA, 75 bp, synthetic construct
  source 1..75: mol_type = other DNA
taccgtcgcggaagtgcatgcccgcataggaattccggtagaaattgtcgagatggggtttcgggtgctgaaaaa

SEQ ID NO: 36948 - DNA, 75 bp, synthetic construct
  source 1..75: mol_type = other DNA
gtcaacgacaaaggaggcaacagtgccggaactgaacaacagcgtcagcaggccaccgacagccagcatgaagaa

SEQ ID NO: 36949 - DNA, 75 bp, synthetic construct
  source 1..75: mol_type = other DNA
caaaaagctggcgacgacggagtttgtggccaaagcacttgcggcacttgcaggcagcgcccctgagacactgga

SEQ ID NO: 36950 - DNA, 75 bp, synthetic construct
  source 1..75: mol_type = other DNA
ctcggtaatgatccaaactttgcgactacggtactgaacaagctggcggaaaagctggctaaagaccagaacggc

SEQ ID NO: 36951 - DNA, 75 bp, synthetic construct
  source 1..75: mol_type = other DNA
ggaggtttcgactttccccggcgagagtgaggctctccgcgctatagaagtcaccattgtcgtgcacgacgacat

SEQ ID NO: 36952 - DNA, 75 bp, synthetic construct
  source 1..75: mol_type = other DNA
ctctgcggtcgatcaccggctggcagaactgacgatgaacaaactttatgatcgcgtgccggcttccgtctggaa

SEQ ID NO: 36953 - DNA, 75 bp, synthetic construct
  source 1..75: mol_type = other DNA
gtttttacccgtcttctggagggcaggctgccggacggggcggatttaagccgcatgcaggatggcagtaataag

SEQ ID NO: 36954 - DNA, 75 bp, synthetic construct
  source 1..75: mol_type = other DNA
cgctgctgggtacgtactttaacgacctgcaggaccagtgtgcgatagtgcatcttgccggtgcccgcggtgatt

SEQ ID NO: 36955 - DNA, 75 bp, synthetic construct
  source 1..75: mol_type = other DNA
ctggaacgcgatgatgaaaccggctttcagcaggtgctggaacgttctggctatctggcgaaggagcataccaaa

SEQ ID NO: 36956 - DNA, 75 bp, synthetic construct
  source 1..75: mol_type = other DNA
cgccatttattttaagacgaacagtactgagcacagttctaaaccatctggctagaacctaccgaaatatagtgc

SEQ ID NO: 36957 - DNA, 75 bp, synthetic construct
  source 1..75: mol_type = other DNA
ttccaggaagtttccagtggaggcagtgctaccagtgccattattaatgctggattccagactctctacgataac

SEQ ID NO: 36958 - DNA, 75 bp, synthetic construct
  source 1..75: mol_type = other DNA
cgtgggcgcaacaaagctgacaaggtggacatcgacctgtcccacagcaatctggcccccggcctgctgtgcgca

SEQ ID NO: 36959 - DNA, 75 bp, synthetic construct
  source 1..75: mol_type = other DNA
cgctgctgctgatggcagtcagcattccggcgggggcggcgctgcatgatatcccggagggatacgtgcgtgtgg

SEQ ID NO: 36960 - DNA, 75 bp, synthetic construct
  source 1..75: mol_type = other DNA
ctgatgtgctgatttttgaaccaaaagtttttggtgatgaacgtggcttcttttttgagagttttaaccagaaag

SEQ ID NO: 36961 - DNA, 75 bp, synthetic construct
  source 1..75: mol_type = other DNA
tcagttgtatgtcttcgccgatcaggatgcgggttttgtaagtagcgataacatgcacatcatcgagatgccgca

SEQ ID NO: 36962 - DNA, 75 bp, synthetic construct
  source 1..75: mol_type = other DNA
aaagaagcctggttgatcttcagcagaacaaatgacttcagagcgcgagaaatcatcaagttatacagtcggcga

SEQ ID NO: 36963 - DNA, 75 bp, synthetic construct
  source 1..75: mol_type = other DNA
tggaacggtttaaattttatctggagcaacacgggtggatcgttgcccgtaaagagcaactggtggagcggttga

SEQ ID NO: 36964 - DNA, 75 bp, synthetic construct
  source 1..75: mol_type = other DNA
attatcatgagtacattaccagccgtatgaccctgcttcagtccagacttgaagaggtcaatgccatggctgccc

SEQ ID NO: 36965 - DNA, 75 bp, synthetic construct
  source 1..75: mol_type = other DNA
gcgggcagggaacgtcaggatatcgtcaccctggtgaaacgacagctgacgcgtgaaatcgcggaagggcgcttc

SEQ ID NO: 36966 - DNA, 75 bp, synthetic construct
  source 1..75: mol_type = other DNA
gaagattgcccggcagaatgctgtaaacaaaatctggatgctcgaaggttacttgctgaagcagaagctaagcga

SEQ ID NO: 36967 - DNA, 75 bp, synthetic construct
  source 1..75: mol_type = other DNA
gcacgggcagaaagacaatgacctcaatgccggtaaaaatctggtattcagcgggcagaatggtgcaattatcct

SEQ ID NO: 36968 - DNA, 75 bp, synthetic construct
  source 1..75: mol_type = other DNA
tagcctggcgtgtcatatcacatccagccagctaaaccacgtcgaagcggcagaactgctgcgtgtaactgctga

SEQ ID NO: 36969 - DNA, 75 bp, synthetic construct
  source 1..75: mol_type = other DNA
tcaggtcgcctatggtaagagcaaattcaatgcctccggcaaaaatgcggaagtatgggctgcaggcctgaaata

SEQ ID NO: 36970 - DNA, 75 bp, synthetic construct
  source 1..75: mol_type = other DNA
tggtgaaaacagtcatgatgtgtgggaagagttcgaatggggtgacttccttctgtccagagaagaaagcctttt

SEQ ID NO: 36971 - DNA, 75 bp, synthetic construct
  source 1..75: mol_type = other DNA
cataaaaaataccatgttgtctatctaattaacaatattacaaaggctctgcttttggataatcctgatatatta

SEQ ID NO: 36972 - DNA, 75 bp, synthetic construct
  source 1..75: mol_type = other DNA
agcaatcgctcttttgctcttgtatccagtgaagggggggtaatttttgacagccgggccatgagtaaactggga

SEQ ID NO: 36973 - DNA, 75 bp, synthetic construct
  source 1..75: mol_type = other DNA
atgaaacaaatgacactaattgagatggatggatttctgaaaggtaaatgcatcccatgtgatttaaaggttaac

SEQ ID NO: 36974 - DNA, 75 bp, synthetic construct
  source 1..75: mol_type = other DNA
ttggcaattcttggcggatcacggaaatgggcaatgtcgctgaggactggcaaatggctatgatccgctttatta

SEQ ID NO: 36975 - DNA, 75 bp, synthetic construct
  source 1..75: mol_type = other DNA
agaagtctacaagtcagattaacaaagcggtattctttacatctgctttgctaattttccttcttgtcgcctttg

SEQ ID NO: 36976 - DNA, 75 bp, synthetic construct
  source 1..75: mol_type = other DNA
attgatatgccacaaaccccggcgctcaggctgcaaatcatggtggcgtgctattccgcgatccagaactgggaa

SEQ ID NO: 36977 - DNA, 75 bp, synthetic construct
  source 1..75: mol_type = other DNA
gtggtctggggtgcctgttccgtcaactgtggtagccgctgtgcacttcgtctacatgttaaagataatgaagtg

SEQ ID NO: 36978 - DNA, 75 bp, synthetic construct
  source 1..75: mol_type = other DNA
acctaaaatagcagatttaattgattctatagctgcatccagagggatagaatttccaaaaacacattggcagac

SEQ ID NO: 36979 - DNA, 75 bp, synthetic construct
  source 1..75: mol_type = other DNA
tgcaatgggccaaagacggggcgcttactcaggaagaggtgcagcaagtgatggacctgctgcataaattaatta

SEQ ID NO: 36980 - DNA, 75 bp, synthetic construct
  source 1..75: mol_type = other DNA
cagcttgccaccgtcaaccgtatggcgacggccaacgagctgccggacgccatcatcaccgagtcaggcttgaag

SEQ ID NO: 36981 - DNA, 75 bp, synthetic construct
  source 1..75: mol_type = other DNA
gctccggaacggacgactgataacctgtcttaccgacaaccaggagccctctccctgccttatctggctaccggc

SEQ ID NO: 36982 - DNA, 75 bp, synthetic construct
  source 1..75: mol_type = other DNA
ctgcgcgcaaacgatctgtatgtaaagagatcaaggttttcgtcagaccagaactgaaaaactaccttaccagtc

SEQ ID NO: 36983 - DNA, 75 bp, synthetic construct
  source 1..75: mol_type = other DNA
atgatgcacttaaaaaatattactgctggcaaccctaaaacaaaagaacaataccagctaactgaaaaagcgggc

SEQ ID NO: 36984 - DNA, 75 bp, synthetic construct
  source 1..75: mol_type = other DNA
atgaataaaaaaattcttgccattatgattgccgccgctctgttacagggctgtgccagttacagacagcttgag

SEQ ID NO: 36985 - DNA, 75 bp, synthetic construct
  source 1..75: mol_type = other DNA
agcgcctgctcggcaaaaaaacgatggaaaatgaactccttaaagaagccgttgaatatgggcgtgcaaaaaagt

SEQ ID NO: 36986 - DNA, 75 bp, synthetic construct
  source 1..75: mol_type = other DNA
gaacaacaacagcctgtttgccatccgtctgctgaaagacaccgagggtaactatctgtggcgtccggggctgga

SEQ ID NO: 36987 - DNA, 75 bp, synthetic construct
  source 1..75: mol_type = other DNA
tgtttttaccgtgaataagggggctcatttggctgtatccacggctgataatctggggacagcctttgttgataa

SEQ ID NO: 36988 - DNA, 75 bp, synthetic construct
  source 1..75: mol_type = other DNA
ccatttttgcctgggtgctggcaatcctgttgtgtctgacaggtaccctggcgattttttcattgcccgttgaac

SEQ ID NO: 36989 - DNA, 75 bp, synthetic construct
  source 1..75: mol_type = other DNA
atgaaagtcatattcacgtcgaaccgttttattgattttcttatccggcttttgattacagcgattgtcatttcc

SEQ ID NO: 36990 - DNA, 75 bp, synthetic construct
  source 1..75: mol_type = other DNA
cgtgtcagtcagtgatgtcaggcggtccttttctgtcgtggtgaaagcgatagttcaggtactggaaacctggcc

SEQ ID NO: 36991 - DNA, 75 bp, synthetic construct
  source 1..75: mol_type = other DNA
gctgcagtggtgggctgattatctggatgcgaatcgggagaagggcattagtccttttgatttcgggaaaatgaa

SEQ ID NO: 36992 - DNA, 75 bp, synthetic construct
  source 1..75: mol_type = other DNA
gcgtattgctgcgtgccgacgatcccctgatcgagatgagttacatcaccagctttaccggtatgactgacaaat

SEQ ID NO: 36993 - DNA, 75 bp, synthetic construct
  source 1..75: mol_type = other DNA
gcagttaaagctcacgttaacgaccagtttggcaacccggtgacgcatcaacccgcgacattcagtgcagcgcca

SEQ ID NO: 36994 - DNA, 75 bp, synthetic construct
  source 1..75: mol_type = other DNA
gacacagacaaataaaaagcactgctaacccttttgatcccagctacgaatcgtactttgaagcacggctaaaag

SEQ ID NO: 36995 - DNA, 75 bp, synthetic construct
  source 1..75: mol_type = other DNA
ctaccgaacgaaagcgattatctgaaattacagtcgctgtttgcccgggtggcagaagagaaacatcagcgcggt

SEQ ID NO: 36996 - DNA, 75 bp, synthetic construct
  source 1..75: mol_type = other DNA
tacgggatgcgctggatcgtgctgcttatctcgcgaaagagtacaccaaagtcaacggcaccggtgagcgcaatt

SEQ ID NO: 36997 - DNA, 75 bp, synthetic construct
  source 1..75: mol_type = other DNA
accaatgctatagtgagtatattaaaggtcatatcatctacgtgttcttcggtagcgatcacggcggcgagcata

SEQ ID NO: 36998 - DNA, 75 bp, synthetic construct
  source 1..75: mol_type = other DNA
aaactggcgaagaaaccgagctgcaactgagcctgctgggtagccaggatgagatcgctgaggtgggcttcccgt

SEQ ID NO: 36999 - DNA, 75 bp, synthetic construct
  source 1..75: mol_type = other DNA
tcgctttccttctgattgccgcatggggaacatccatgcgtctgtcatggtcgcttggccgggagaacgccagaa

SEQ ID NO: 37000 - DNA, 75 bp, synthetic construct
  source 1..75: mol_type = other DNA
tggcgatccgtgacgataaaaccgccttcatccgaagttatgcgcctggccagctggtgacggttgaagaagccc

SEQ ID NO: 37001 - DNA, 75 bp, synthetic construct
  source 1..75: mol_type = other DNA
ggccaggccgtggttctggtgcagggtcactggtggcctacgcgttaaaaatcaccgatctcgatccgctggaat

SEQ ID NO: 37002 - DNA, 75 bp, synthetic construct
  source 1..75: mol_type = other DNA
gctgcaggatgtggaaagcggggaaatgatcctgctggatgtcactgcgggggaaaagggaaccacggagcccgt

SEQ ID NO: 37003 - DNA, 75 bp, synthetic construct
  source 1..75: mol_type = other DNA
atgacaaaagagcagatgactgaacgtttgcaggaactggcagtgattctggggcgtgaagcagatatttcaggt

SEQ ID NO: 37004 - DNA, 75 bp, synthetic construct
  source 1..75: mol_type = other DNA
gcctaatgacgttcgagagcagacagccattccacaagttccggtaactccggatggttggataagctgtagtga

SEQ ID NO: 37005 - DNA, 75 bp, synthetic construct
  source 1..75: mol_type = other DNA
gggaaattgctttcggttccgactctgccattaatatggcaagtcaacacattaatatccataacagcggtgtga

SEQ ID NO: 37006 - DNA, 75 bp, synthetic construct
  source 1..75: mol_type = other DNA
cccctgaacaattgcgtaaacacgcgcaggaaatgctgcgtcatgctgaacaactcgaaaaaacgggcataacaa

SEQ ID NO: 37007 - DNA, 75 bp, synthetic construct
  source 1..75: mol_type = other DNA
atggctgaacgcgatattacgccagaagtcgccatttccaaaacacagcgtcgctgtaccgtgggttatctgccc

SEQ ID NO: 37008 - DNA, 75 bp, synthetic construct
  source 1..75: mol_type = other DNA
atgcagaaatatattttcagtgctgataaaaatgcgtttttccctgtggagcttaaaattgcttatcaggaagcg

SEQ ID NO: 37009 - DNA, 75 bp, synthetic construct
  source 1..75: mol_type = other DNA
ggtgctctatgaagtggaccttatcaacatggtggaaattgtggacggtatggacctgatggaagcgcaccgcaa

SEQ ID NO: 37010 - DNA, 75 bp, synthetic construct
  source 1..75: mol_type = other DNA
aggaaaacccttacgcagttactgggggaatttcttatacaccagttcctctgattaagttttctgcacagcata

SEQ ID NO: 37011 - DNA, 75 bp, synthetic construct
  source 1..75: mol_type = other DNA
aaaaagaaacgatgcgatgtttgctgttattcagtcagggactcatttgccattcgcgggccagtgtcacagttg

SEQ ID NO: 37012 - DNA, 75 bp, synthetic construct
  source 1..75: mol_type = other DNA
aatctattgaaaataatgatgatgattttatagtatgtagaacatttgtaacaaatgtcgttgaatcaggtgatg

SEQ ID NO: 37013 - DNA, 75 bp, synthetic construct
  source 1..75: mol_type = other DNA
ccgctgctcggtgcaaaagtacagcccggcgaaaccgatttcgcgctgcccggcccgttaccgttcgtgctctcc

SEQ ID NO: 37014 - DNA, 75 bp, synthetic construct
  source 1..75: mol_type = other DNA
acgacaaaccggttatctggacggtatctgtaacgcgcctgttcgagctgtttcgcgatatcagcctcgagtttg

SEQ ID NO: 37015 - DNA, 75 bp, synthetic construct
  source 1..75: mol_type = other DNA
cgccgtgttaatgtcagtggtgaggtcacaacctggccaagagctgtcaatatatattcaggtgtacagggattt

SEQ ID NO: 37016 - DNA, 75 bp, synthetic construct
  source 1..75: mol_type = other DNA
attcagcccagcctgttgtttaagtggaaaaaacaatatctggaaggaagtctcactgctgttgctgccggagag

SEQ ID NO: 37017 - DNA, 75 bp, synthetic construct
  source 1..75: mol_type = other DNA
gcggttggtggatacgtgaagtgggcctgtttgatgaatccggggcactaattgccgtgggcaactgcccggaaa

SEQ ID NO: 37018 - DNA, 75 bp, synthetic construct
  source 1..75: mol_type = other DNA
agttaaaggcggacattctcacttcagcaaaagatagtattgcaaagtcattagagagcgcagagctgttcatct

SEQ ID NO: 37019 - DNA, 75 bp, synthetic construct
  source 1..75: mol_type = other DNA
gtactaatttttataacccttctgctgaaaatactattagatgggactcgcctgatttggcaattgaatggcctt

SEQ ID NO: 37020 - DNA, 75 bp, synthetic construct
  source 1..75: mol_type = other DNA
ttactgttaaggataagaactccgttatcactaatctcggaactaatcttggttatgacggccacggcgaaatga

SEQ ID NO: 37021 - DNA, 75 bp, synthetic construct
  source 1..75: mol_type = other DNA
ctgcaatggggtatgtcctgtaaaaatacctctggcaacgctaatacaaaaacatcgccaggttatggcagagtc

SEQ ID NO: 37022 - DNA, 75 bp, synthetic construct
  source 1..75: mol_type = other DNA
gtgaagcgattatcgagcggctgtatccggaacttgaacgccgtctggcaaaggtaaaacctgatttactgattg

SEQ ID NO: 37023 - DNA, 75 bp, synthetic construct
  source 1..75: mol_type = other DNA
agtcagtgaaacggcgagtggtatgccggacccgacgctgccggaggtcatggcagggcagacgatatcatcgga

SEQ ID NO: 37024 - DNA, 75 bp, synthetic construct
  source 1..75: mol_type = other DNA
caacgtgaaaacgatgtttcctcatccctgcagtcctgtctgtcacgaatcaaaaaaatcagcataaacctcccc

SEQ ID NO: 37025 - DNA, 75 bp, synthetic construct
  source 1..75: mol_type = other DNA
ctgattaaccagaaacgcattgcaccgctgaatcttctgaatgttgaccctaacaatcagagccagattattgcg

SEQ ID NO: 37026 - DNA, 75 bp, synthetic construct
  source 1..75: mol_type = other DNA
tacgaatctttaggtattatcgatcagctcaaaactgaatttgtcgagagaatcaataacttaggatatgctgtt

SEQ ID NO: 37027 - DNA, 75 bp, synthetic construct
  source 1..75: mol_type = other DNA
atgaacgaaaacacaacgctgaacgcactgatttgtcgtcacgcccgtaacctgctgctggcgcagggctggccg

SEQ ID NO: 37028 - DNA, 75 bp, synthetic construct
  source 1..75: mol_type = other DNA
ccataattttagaggcgcagagtgtgtggataacctacaaaggaaaactgccgggaagaattactggttcactga

SEQ ID NO: 37029 - DNA, 75 bp, synthetic construct
  source 1..75: mol_type = other DNA
gatcagcccgtcattccatctgaaggtgatccgtactttcgacatggtaaccagcgcaccggaaaaattatccgg

SEQ ID NO: 37030 - DNA, 75 bp, synthetic construct
  source 1..75: mol_type = other DNA
atgataagtaaagctgtattaaataatgaactcatcgccacaaaggccggagacattaccgtttataattatgat

SEQ ID NO: 37031 - DNA, 75 bp, synthetic construct
  source 1..75: mol_type = other DNA
ccctctctgatggctgattttactggtgaactgcatagactcatttctgaatatttgcagtgtaagcgacgtaaa

SEQ ID NO: 37032 - DNA, 75 bp, synthetic construct
  source 1..75: mol_type = other DNA
caacagattgtcatcacggagcctctgctggataatcgtgggcaggtgaatcaccggacattaaagagtctgttt

SEQ ID NO: 37033 - DNA, 75 bp, synthetic construct
  source 1..75: mol_type = other DNA
gcaccggaaggtgaattcagcgtcaactaccgggataacgatcaataccggttctactccacctccgtggcgctg

SEQ ID NO: 37034 - DNA, 75 bp, synthetic construct
  source 1..75: mol_type = other DNA
gataacccagcgcactatgcggatgccattcgttataatgctcgaacgcctctgcaaggttctttgctgccgtta

SEQ ID NO: 37035 - DNA, 75 bp, synthetic construct
  source 1..75: mol_type = other DNA
tacaatactgcagccaggacctacatcgccgataacaatgcccgcctgcatagtggaacgcttcctgccaccttc

SEQ ID NO: 37036 - DNA, 75 bp, synthetic construct
  source 1..75: mol_type = other DNA
gcgtctgtattgcctctgttgcacgcacggttctgcgggccgtccgtgactcggtggtctctgttgcccgcgcgg

SEQ ID NO: 37037 - DNA, 75 bp, synthetic construct
  source 1..75: mol_type = other DNA
cgggctggttgcgtaaccgtggttacaaccgccgctatgtcgccgttgccggcgatctgcctgtgggccaggtgc

SEQ ID NO: 37038 - DNA, 75 bp, synthetic construct
  source 1..75: mol_type = other DNA
tgatgctgattctcttcgtatatctccccgggaggccaggtcgttaatcgaacaggctgaaaaacggcagaagga

SEQ ID NO: 37039 - DNA, 75 bp, synthetic construct
  source 1..75: mol_type = other DNA
ctcagcctgtgctgtaccacatctgcctcgaaatgcgtaccagagggattgagcgccagatgacgcagggtgagt

SEQ ID NO: 37040 - DNA, 75 bp, synthetic construct
  source 1..75: mol_type = other DNA
atcatcgctgacacgctgaacgtcagggcgaccacgctggatggtgatggtctgttgcagggcgccggtgcactg

SEQ ID NO: 37041 - DNA, 75 bp, synthetic construct
  source 1..75: mol_type = other DNA
aatcgtcagcgggattgaaacaggttttcgtggcacggccctgtacgccacagaaaacattgccggtcgcatcaa

SEQ ID NO: 37042 - DNA, 75 bp, synthetic construct
  source 1..75: mol_type = other DNA
atgcaaagaaaaacattactcgcagcccttatagccatcctgaatggaacggcatgccaggctcatgcttattca

SEQ ID NO: 37043 - DNA, 75 bp, synthetic construct
  source 1..75: mol_type = other DNA
gatgagatcaacgcattagaggaaacgcgtatcaacgatgtttgccgtattgcggaactaacaaaacaactggag

SEQ ID NO: 37044 - DNA, 75 bp, synthetic construct
  source 1..75: mol_type = other DNA
tgacccggcgcagagcgcgaccgacgtcgaatcgctgcgcgaggcgatgcgcaactcaaaagggctcggcaactt

SEQ ID NO: 37045 - DNA, 75 bp, synthetic construct
  source 1..75: mol_type = other DNA
atacctgagatacagcgcgtatacgaagaaaactacagcgtttacggtgtgcgtaaggtctggcgacagctaaaa

SEQ ID NO: 37046 - DNA, 75 bp, synthetic construct
  source 1..75: mol_type = other DNA
ctggcggagtcattgatcgggacaccattaaatggtggcttaagcaatcacgcgaagcgcaatctgccattatga

SEQ ID NO: 37047 - DNA, 75 bp, synthetic construct
  source 1..75: mol_type = other DNA
atctgatggttttctgtacagcctgttccgtggatggtgtccagactcgcgagcatggtcacacgtcacgcagtc

SEQ ID NO: 37048 - DNA, 75 bp, synthetic construct
  source 1..75: mol_type = other DNA
gtgggcggggattcgttcgccctggtgaaactgaaaaacaacaaaattggggtttttcaggtataaaaaaagcgg

SEQ ID NO: 37049 - DNA, 75 bp, synthetic construct
  source 1..75: mol_type = other DNA
gtcggtacacggaagggccctgaataccacgctgaatgggggataccagtatgtgcacagggacggactggtgct

SEQ ID NO: 37050 - DNA, 75 bp, synthetic construct
  source 1..75: mol_type = other DNA
gtgacctggtttgaactcggggagaacgacaaaaaccagatgctgtacagcatgaaggtgcacccgccgctgtgg

SEQ ID NO: 37051 - DNA, 75 bp, synthetic construct
  source 1..75: mol_type = other DNA
ccgaaaatcgccagtgtgcatcagttcggtctgtcggaagaaacccggaaagacggtaagaaaattgattatccg

SEQ ID NO: 37052 - DNA, 75 bp, synthetic construct
  source 1..75: mol_type = other DNA
gctggacttcatcgccaaactcgctgcgttggtacctaagccgcgagtcaacctcacacgcttccacggcgtctt

SEQ ID NO: 37053 - DNA, 75 bp, synthetic construct
  source 1..75: mol_type = other DNA
acgagctgctccacgaaagctaccagaaatggctgaccggcttcacccggcacgccgtatcctggggcgtgtgtc

SEQ ID NO: 37054 - DNA, 75 bp, synthetic construct
  source 1..75: mol_type = other DNA
cggcggatgttcgcggagcggcggatatatctatctatgaggagattggcggcttcggtgttactgcaaagcagt

SEQ ID NO: 37055 - DNA, 75 bp, synthetic construct
  source 1..75: mol_type = other DNA
acggcacgcccctagcatcaacaaatctcagcgctcactgaacgaagatgacctacttgaagccatgataaagct

SEQ ID NO: 37056 - DNA, 75 bp, synthetic construct
  source 1..75: mol_type = other DNA
tcctgaacgcactgctgatggctgtatggcggcgtaatcccgaaaaacaggtgctggttcattcggatcagggca

SEQ ID NO: 37057 - DNA, 75 bp, synthetic construct
  source 1..75: mol_type = other DNA
gggccagtctgccgttttctataacggtgaagtgtgcctcggtggcggtattattgagcagcgtctgccgctgcc

SEQ ID NO: 37058 - DNA, 75 bp, synthetic construct
  source 1..75: mol_type = other DNA
gtaaaacttacccaaccaattgagcgaggcggcgaaaaaatcacgtatgtggagatcaccggggctattgagcag

SEQ ID NO: 37059 - DNA, 75 bp, synthetic construct
  source 1..75: mol_type = other DNA
atgaaccgtgttctgtgtgtggtgattattgtcctgctggtagcctgtggtgcgcttagtctggggctgaatcat

SEQ ID NO: 37060 - DNA, 75 bp, synthetic construct
  source 1..75: mol_type = other DNA
cgccgcaaagcagcaagtgactcaaaccatgaatgctggcatcgtttccagcggtgaagttacatcgacggagcc

SEQ ID NO: 37061 - DNA, 75 bp, synthetic construct
  source 1..75: mol_type = other DNA
cagtaaggctgtggtttatcctgttcgtatacttatgggaatctcagagcgtgatacgaaatttgttgaagaagt

SEQ ID NO: 37062 - DNA, 75 bp, synthetic construct
  source 1..75: mol_type = other DNA
atgaatagtctgctgccaccgggttcaacgccactggagcgccgactggcgcaagcgtgcagcgggatttctgat

SEQ ID NO: 37063 - DNA, 75 bp, synthetic construct
  source 1..75: mol_type = other DNA
tgaacacactcacccacacggcagagcatgaggtgccgtaccggatggaaactactgcagaaggcggcctgcaca

SEQ ID NO: 37064 - DNA, 75 bp, synthetic construct
  source 1..75: mol_type = other DNA
acgccatgctaaccgtttcgctaccagtgcatcacgtagcaactctcgctacagcctgagcgaaacacacgcaac

SEQ ID NO: 37065 - DNA, 75 bp, synthetic construct
  source 1..75: mol_type = other DNA
tacggatttggggacgaaaaccacatcgtcgtttgattacggcactaaatccacgaataacactggtgcgcatac

SEQ ID NO: 37066 - DNA, 75 bp, synthetic construct
  source 1..75: mol_type = other DNA
aaactgctgggataacagcccaatggagcgcttcttcaggagtctgaagaacgaatgggtgccggcgacgggcta

SEQ ID NO: 37067 - DNA, 75 bp, synthetic construct
  source 1..75: mol_type = other DNA
ttataactggcgcaagcagggcggctcgtcccgtatgattgaaatcagcaagcgcgaaaaattctatcagcagga

SEQ ID NO: 37068 - DNA, 75 bp, synthetic construct
  source 1..75: mol_type = other DNA
atgcactgttcgatacagggcgttacagacgcaaaaaaattcgttaccgcgatgaggtaaccggaaaaatgatca

SEQ ID NO: 37069 - DNA, 75 bp, synthetic construct
  source 1..75: mol_type = other DNA
ggcgctgaaacatctgacgccggtacctgaagagactaaacccgccggcacaccggctgtgcagtcaccaaagcg

SEQ ID NO: 37070 - DNA, 75 bp, synthetic construct
  source 1..75: mol_type = other DNA
aaaaatcgaggaagttgcaaaggctgtctggggtattgaaaaaactcgaagctcgactaataatgatgcgaaaaa

SEQ ID NO: 37071 - DNA, 75 bp, synthetic construct
  source 1..75: mol_type = other DNA
tcctcaattaacggaaaagtatcaacgcttcagactgatatgaccagtgcaaagcaggatatcagcaccagatac

SEQ ID NO: 37072 - DNA, 75 bp, synthetic construct
  source 1..75: mol_type = other DNA
agtgctatgcgccacggaagcagttcgctgacccggttgaccggccagtctgctatgacgccaggcacatggcga

SEQ ID NO: 37073 - DNA, 75 bp, synthetic construct
  source 1..75: mol_type = other DNA
gtaaaaaacatcatgagcccgtcaaagctccgcgaaaaatgggacgaactggtcatccgcctgggacgttcacct

SEQ ID NO: 37074 - DNA, 75 bp, synthetic construct
  source 1..75: mol_type = other DNA
aacgagcactggcagccatattctttatggcaaaaattccggctgaacgtcatagcatcagcatcaatgagctga

SEQ ID NO: 37075 - DNA, 75 bp, synthetic construct
  source 1..75: mol_type = other DNA
aaaccagccggggtaatgttccacaacgatcagggcagccactatacaagcaggcagttccggcagttactgtgg

SEQ ID NO: 37076 - DNA, 75 bp, synthetic construct
  source 1..75: mol_type = other DNA
cagcagaaacaaaacgtcagtcattgattgatactgcgatggattccattagtctgattcagttgaaattacggg

SEQ ID NO: 37077 - DNA, 75 bp, synthetic construct
  source 1..75: mol_type = other DNA
ccgctggctgttagcttatatgactatattaatgatgcttcggcgctggcctgcctcataaatttgtcgctgaac

SEQ ID NO: 37078 - DNA, 75 bp, synthetic construct
  source 1..75: mol_type = other DNA
tcaggaacaaccctctttcgtagcagaaacccgtgcgcctgacaaaaatacagatgctgttttaccgtggctggc

SEQ ID NO: 37079 - DNA, 75 bp, synthetic construct
  source 1..75: mol_type = other DNA
tacagtgggtaaaactctatgaaacgtccggtgatgcgggatttgtatgccgtcgctgtggcatttctcggccca

SEQ ID NO: 37080 - DNA, 75 bp, synthetic construct
  source 1..75: mol_type = other DNA
tcaatctggttgatgagaataagtttaccagggatgcgggcattgcaacggatgatatcgttgctgttggtatga

SEQ ID NO: 37081 - DNA, 75 bp, synthetic construct
  source 1..75: mol_type = other DNA
ccgtgcggcgggtggtggagccgttcggctttctgatccgcattattgagtggtggcataccggagaaacaccgg

SEQ ID NO: 37082 - DNA, 75 bp, synthetic construct
  source 1..75: mol_type = other DNA
caagacagttcgtgctggatccgtgtggcacaggcgtgggcaggcaccggttttggccacctggcgataccgcgt

SEQ ID NO: 37083 - DNA, 75 bp, synthetic construct
  source 1..75: mol_type = other DNA
atggctacatcgacagtaattccaggagacatcaccacgttaaagggagatgtcagtaaagccaaggaagatatt

SEQ ID NO: 37084 - DNA, 75 bp, synthetic construct
  source 1..75: mol_type = other DNA
gcatcgcgttactcgccaatgctatcgcttggctcaatcatcgacagtggcgacgcacggcgctcggcacgatag

SEQ ID NO: 37085 - DNA, 75 bp, synthetic construct
  source 1..75: mol_type = other DNA
agtggtgggcgtggcgctggtccgcacatttcggactttgcgaagatgagaatgaaattgccagcggcaatagtg

SEQ ID NO: 37086 - DNA, 75 bp, synthetic construct
  source 1..75: mol_type = other DNA
gctgtgaacttgatagtttgcgaacctctcaaagaggtttacaaatttccccaaaaacccgctccctcatcctct

SEQ ID NO: 37087 - DNA, 75 bp, synthetic construct
  source 1..75: mol_type = other DNA
atgaaaaataaaaattctggcgttactgccagcggccccgctcgtcctgaatttatgaacggcgatatttaccgc

SEQ ID NO: 37088 - DNA, 75 bp, synthetic construct
  source 1..75: mol_type = other DNA
gaccagccgggattcagcgcctgtacccgctctcagttaatcaacagcattgatattctccgggcacgccgggca

SEQ ID NO: 37089 - DNA, 75 bp, synthetic construct
  source 1..75: mol_type = other DNA
cgctatattgcgaagcaaaaaatgacaaggtcagaaaacgccttgggattaaaggaggtttttactggactacag

SEQ ID NO: 37090 - DNA, 75 bp, synthetic construct
  source 1..75: mol_type = other DNA
gacttacagcagatgctgaactcaattattaccgtctccgaagtggaatcgacaggataaccgcgcaggttaact

SEQ ID NO: 37091 - DNA, 75 bp, synthetic construct
  source 1..75: mol_type = other DNA
cggtcagcctgacatcagaacggtttgaacggagagaccacatccacagtctggtcgctgaagagcgttttatct

SEQ ID NO: 37092 - DNA, 75 bp, synthetic construct
  source 1..75: mol_type = other DNA
gtttacttactatctttgggttgatgaaaaagcatttggagccgcgaaatttaccagtgtcttaaaacaaattgc

SEQ ID NO: 37093 - DNA, 75 bp, synthetic construct
  source 1..75: mol_type = other DNA
cgtgatgctgaggcggcggtttatcatgccggtccgtcggttattgattttctgccatgggtggaatatctggat

SEQ ID NO: 37094 - DNA, 75 bp, synthetic construct
  source 1..75: mol_type = other DNA
aacatggcgagacttcatcgtctgctttggttcatcgacgattgaatatttctccctgactggtgcaaccaccgt

SEQ ID NO: 37095 - DNA, 75 bp, synthetic construct
  source 1..75: mol_type = other DNA
gatggatgggattttaagcaatacgttctgggcgcacttttctaccgttttatcagcgaaaatttttccagctat

SEQ ID NO: 37096 - DNA, 75 bp, synthetic construct
  source 1..75: mol_type = other DNA
agattgacacaaccacacgggggcaggtatcgcaggcagataagtatgttgccgggctacaggatgttgctgctc

SEQ ID NO: 37097 - DNA, 75 bp, synthetic construct
  source 1..75: mol_type = other DNA
cactggctgactggttttatctcagtcctgaatggctgaacggcagggtgcattatccgctgtgtcatccgggag

SEQ ID NO: 37098 - DNA, 75 bp, synthetic construct
  source 1..75: mol_type = other DNA
aaaagcgcttgtcaaaagtttaagtggctccttcctgacgatgatgaaatgtgtcagtggttctggacaagactg

SEQ ID NO: 37099 - DNA, 75 bp, synthetic construct
  source 1..75: mol_type = other DNA
atgcctgttataactcttcctgatggcagccaacgccattacgaccacgctgtaagccccatggatgttgcgctg

SEQ ID NO: 37100 - DNA, 75 bp, synthetic construct
  source 1..75: mol_type = other DNA
tcatcagcccccgcattgccgacaggatcacagacgggggacgcaactggttgtcgtttaactggcccagctatc

SEQ ID NO: 37101 - DNA, 75 bp, synthetic construct
  source 1..75: mol_type = other DNA
ttctcttattccacccgcccgagcttcatacgtagctcccaaacagatctggaccaacaagtgggacaattgctt

SEQ ID NO: 37102 - DNA, 75 bp, synthetic construct
  source 1..75: mol_type = other DNA
atgaaaatgcataacgatcctcattcctggtctgacttacttgaattgttacagagctggtggcgtggagacaca

SEQ ID NO: 37103 - DNA, 75 bp, synthetic construct
  source 1..75: mol_type = other DNA
aaatataacactgggcaactcttcgggttagatggtataaaagcagataatccaataaaagcaaagcaagggagt

SEQ ID NO: 37104 - DNA, 75 bp, synthetic construct
  source 1..75: mol_type = other DNA
gggaatggctgattctgaacatggcgggactggagcgtgaagagttccgggtgctgtatctgaataaccagaatc

SEQ ID NO: 37105 - DNA, 75 bp, synthetic construct
  source 1..75: mol_type = other DNA
gaaaacaaatccaaattcggcgcgaacgcaatcctggctgtatctctggctaacgccaaagctgctgcagctgct

SEQ ID NO: 37106 - DNA, 75 bp, synthetic construct
  source 1..75: mol_type = other DNA
gtgaatttgttgcagggattagcgatccgaatgatccgaaatgggtgaaggggattgaaacccgcgattctgtga

SEQ ID NO: 37107 - DNA, 75 bp, synthetic construct
  source 1..75: mol_type = other DNA
tggcggatgtcatggtggatgatgccgcattaatgatggcttcagcggggatttccggaggtgtgagatatgtcc

SEQ ID NO: 37108 - DNA, 75 bp, synthetic construct
  source 1..75: mol_type = other DNA
gatgtacgccgtactcagcctgttttttggcgatccggatatgcatccggcggatttcagtctgcttgctccagc

SEQ ID NO: 37109 - DNA, 75 bp, synthetic construct
  source 1..75: mol_type = other DNA
tttgcccgcactgccggctttgcggtgtcgctggatggtgttggcatacgtaccacaggtgttgtgcgttgcgat

SEQ ID NO: 37110 - DNA, 75 bp, synthetic construct
  source 1..75: mol_type = other DNA
cgtttagccagaaagcggtgcaggcgatggaaaaagagcgcagccagatgcagcttgacgaggcactgttgcaaa

SEQ ID NO: 37111 - DNA, 75 bp, synthetic construct
  source 1..75: mol_type = other DNA
ttaaccgtccgtttgaaacagagattgccgggaaaaagctattttttcagaaaaatgacgtcctgttgacagata

SEQ ID NO: 37112 - DNA, 75 bp, synthetic construct
  source 1..75: mol_type = other DNA
ttgagaaatatcagttcagggccaggaatgagtctccacgactgatgcgtcagtgggctgatgtcatgcgtgaat

SEQ ID NO: 37113 - DNA, 75 bp, synthetic construct
  source 1..75: mol_type = other DNA
acgtattaccactgtcagcaacagcgacatcatcctgataaacgcaatgcccgtgcgcagcgtgatgactggctg

SEQ ID NO: 37114 - DNA, 75 bp, synthetic construct
  source 1..75: mol_type = other DNA
aatctcaggaaataaacctggattatatccttggtctgattttcgagcacaacagacaaaacaaaggtaagagcg

SEQ ID NO: 37115 - DNA, 75 bp, synthetic construct
  source 1..75: mol_type = other DNA
ctgcaattccgggacgttacactgctcaggcaccttataaagcgggtgccgggcgtggaaacccgaaattcaata

SEQ ID NO: 37116 - DNA, 75 bp, synthetic construct
  source 1..75: mol_type = other DNA
gacctgctggccctgccggtgaaaaaggtgaacccggtgagcgagggccacagggattacagggaccaccgggtc

SEQ ID NO: 37117 - DNA, 75 bp, synthetic construct
  source 1..75: mol_type = other DNA
aacaaaaagcaagcgtgccgcaggtggatttcatgaagaggaagaacgggccgctaaccgcaataactggatgta

SEQ ID NO: 37118 - DNA, 75 bp, synthetic construct
  source 1..75: mol_type = other DNA
tggggggcgaccaactggagcactaccggcttcatagctcactgcaattatggtcttgaaggtggtgcgtttttc

SEQ ID NO: 37119 - DNA, 75 bp, synthetic construct
  source 1..75: mol_type = other DNA
aagggcggggcttcgttcgtcctgaaaaacagaatctgcaaaattttgccgaaattattccggttatttccggcc

SEQ ID NO: 37120 - DNA, 75 bp, synthetic construct
  source 1..75: mol_type = other DNA
catcaggacgtgagttaaatatttctggtggtaataaccgtatcgctggtcgtgactataacgaaactaagggta

SEQ ID NO: 37121 - DNA, 75 bp, synthetic construct
  source 1..75: mol_type = other DNA
acagccttacgctgaatgacacaccgttcgtggatgaacgcgtgattgagcagcatattgaggcaggcatttcac

SEQ ID NO: 37122 - DNA, 75 bp, synthetic construct
  source 1..75: mol_type = other DNA
gcgttagctaataactacgacgggcagccaactgattatggcgatggctcagcaggtgacggctgggttgctatc

SEQ ID NO: 37123 - DNA, 75 bp, synthetic construct
  source 1..75: mol_type = other DNA
attaatgatgcttcggcgctggcctgcctcataaatttgtcgctgaacccttcagaggtaagggggcgcaaatga

SEQ ID NO: 37124 - DNA, 75 bp, synthetic construct
  source 1..75: mol_type = other DNA
gatgacgactgggatgcggtgatccacaccaacctcgacagtttctacaacgtcattcagccgtgcattatgccg

SEQ ID NO: 37125 - DNA, 75 bp, synthetic construct
  source 1..75: mol_type = other DNA
aaaggggctgtcgattattccggctccgatttatccggaccaggccgcacatgccctggcgatttttaaacaact

SEQ ID NO: 37126 - DNA, 75 bp, synthetic construct
  source 1..75: mol_type = other DNA
gagtgtgataccagttatgaggagggtggacgtgggattgttgtgcatggctgtaaaagcgcctgcggctcggtg

SEQ ID NO: 37127 - DNA, 75 bp, synthetic construct
  source 1..75: mol_type = other DNA
cgccgcgaatacagtaaacatatgttacgtcttcgcagggaagggcatattaacgggaaagaagttcctgaaatt

SEQ ID NO: 37128 - DNA, 75 bp, synthetic construct
  source 1..75: mol_type = other DNA
ctcgtgttgaatgggccgaacgtgttcggcttgcagctatcgggggcgtagagaaagaagctgaaatattaaaaa

SEQ ID NO: 37129 - DNA, 75 bp, synthetic construct
  source 1..75: mol_type = other DNA
gcaaaaagttttgtcgatgaggtggaggcggcctggtcggaatacgccgaagggatgtctggcgagatcgacgtg

SEQ ID NO: 37130 - DNA, 75 bp, synthetic construct
  source 1..75: mol_type = other DNA
gtcgggaagataaacagaacgatctctggacaacctggcagcgggttcaggagaatatgataaaaggtggattat

SEQ ID NO: 37131 - DNA, 75 bp, synthetic construct
  source 1..75: mol_type = other DNA
ggcgcaagtggaaaaaattggtattaaagctacggaagaactcgggcaacttatcgccatcgctcgtgaagaact

SEQ ID NO: 37132 - DNA, 75 bp, synthetic construct
  source 1..75: mol_type = other DNA
atcaggtttgcgctaaagacccgcaaatgctgttgatcacggcaattgatgacaccatgcgtgctatcggcaaaa

SEQ ID NO: 37133 - DNA, 75 bp, synthetic construct
  source 1..75: mol_type = other DNA
cattcttcatgtttagtgtttcatttatattctattatttattaaagagatgttttatgttgtgctatccaaaaa

SEQ ID NO: 37134 - DNA, 75 bp, synthetic construct
  source 1..75: mol_type = other DNA
atgactcatcaaacacacaccattgctgaatccaataactttatcgtccttgataagtacatcaaagctgagcaa

SEQ ID NO: 37135 - DNA, 75 bp, synthetic construct
  source 1..75: mol_type = other DNA
atggaaaccgtatttgacgcactgaaagcactgaaaagagcctcttcacaggtagtggcggccagccttggaatc

SEQ ID NO: 37136 - DNA, 75 bp, synthetic construct
  source 1..75: mol_type = other DNA
ctgtaccacatctgcctcgaaatgcgtaccagagggattgagcgccagatgacgcagggtgagttaaaacgactt

SEQ ID NO: 37137 - DNA, 75 bp, synthetic construct
  source 1..75: mol_type = other DNA
tccggacgtttattgctggatcccgcttttctccataaattccggcgtggtcattaccccggtctataaaattga

SEQ ID NO: 37138 - DNA, 75 bp, synthetic construct
  source 1..75: mol_type = other DNA
ctgaagcgcagtcccgtattcaggatgccgactatgcgaccgaagtgtcaaatatgtctaaagcgcagatcgttc

SEQ ID NO: 37139 - DNA, 75 bp, synthetic construct
  source 1..75: mol_type = other DNA
cggcagttattgtggcgataccagatcagacagagtatgagccggcgcggaaactgctgggataacagcccaatg

SEQ ID NO: 37140 - DNA, 75 bp, synthetic construct
  source 1..75: mol_type = other DNA
tcccgtcaccatctggcagatactgctgtcccgactgctggaccagcactacggccttacgctgaatgacacacc

SEQ ID NO: 37141 - DNA, 75 bp, synthetic construct
  source 1..75: mol_type = other DNA
caccaaacgcctggagcggggccgcttcgtctggccggttacccgtgacggcaaggtgcaccttactccggctca

SEQ ID NO: 37142 - DNA, 75 bp, synthetic construct
  source 1..75: mol_type = other DNA
ggtgaccgcagacgccattatcaaactgatttacacgctgcgtaaggcacaccgcactggcgcgaagttcatgat

SEQ ID NO: 37143 - DNA, 75 bp, synthetic construct
  source 1..75: mol_type = other DNA
aacgctacggtatatcagcagaacgcgtgagacagcttgaaaacaacgccatgaagaaattacgcatggcgattg

SEQ ID NO: 37144 - DNA, 75 bp, synthetic construct
  source 1..75: mol_type = other DNA
aaaacgctcgagattttgctctgtggcgctctgacgctgacctttgcatccgctcttgagtatgtcggatggcct

SEQ ID NO: 37145 - DNA, 75 bp, synthetic construct
  source 1..75: mol_type = other DNA
atcacaaaaaaacctgatgtttcaatcactaataaacaaataacgttagtccctgtcatatcatgggtacaggcc

SEQ ID NO: 37146 - DNA, 75 bp, synthetic construct
  source 1..75: mol_type = other DNA
gctatgaatcttctcgtggtgatgctgttaacgttgttacagagaatagccagatggttgtaaaccacggtgtag

SEQ ID NO: 37147 - DNA, 75 bp, synthetic construct
  source 1..75: mol_type = other DNA
tgttcctgcctctgaacttgttgccgccatgaagcagattaaagaactccagcgcctgctcggcaagaaaacgat

SEQ ID NO: 37148 - DNA, 75 bp, synthetic construct
  source 1..75: mol_type = other DNA
cctggtggcctcgatacaggccaaaggcgcaagcctggccgtccctggcgtggtcgatctatccgacctggcggc

SEQ ID NO: 37149 - DNA, 75 bp, synthetic construct
  source 1..75: mol_type = other DNA
tctgtgcgcacagtttgagttttgtcattcaaattaagcaacgccccgcagtgctcgcaacacatgcagggcgtc

SEQ ID NO: 37150 - DNA, 75 bp, synthetic construct
  source 1..75: mol_type = other DNA
gaggtgtttcgcgtggagctgcgcaacctgccgtatgcccagcaggagcaggtgatgatgtacatcctgacccgc

SEQ ID NO: 37151 - DNA, 75 bp, synthetic construct
  source 1..75: mol_type = other DNA
gtacgtttgctcgaggttttgataatgtccgccagggtgatgaactggatgtcccggcacaagttagtgaaaata

SEQ ID NO: 37152 - DNA, 75 bp, synthetic construct
  source 1..75: mol_type = other DNA
gatgttgcaccgacgcaaaccaccgtttacgccggagcagttaaaagcgctgatggatgcgaataaatcaaatta

SEQ ID NO: 37153 - DNA, 75 bp, synthetic construct
  source 1..75: mol_type = other DNA
gaaggtcaccggctggccgcactctggcaggcgctgccggaagaactccgcctgagtccgcatcgttatctggcg

SEQ ID NO: 37154 - DNA, 75 bp, synthetic construct
  source 1..75: mol_type = other DNA
atgaacatggacgggtacgggtgaagttccactgggaccgttatcacgggatgacggaggcgagttcatgctggg

SEQ ID NO: 37155 - DNA, 75 bp, synthetic construct
  source 1..75: mol_type = other DNA
atattcatcaggataaagccgctgcggctcccatagccgacgttctgttcccggatgagttgccgtcgcaggaga

SEQ ID NO: 37156 - DNA, 75 bp, synthetic construct
  source 1..75: mol_type = other DNA
cgtttcgtaacctcgaagggatagtcaaaacacatgcctcgctggcgcatctggcgcaggcggacgatatcagct

SEQ ID NO: 37157 - DNA, 75 bp, synthetic construct
  source 1..75: mol_type = other DNA
atggaaaacctgaatatggatctgctgtacatggctgccgctgtgatgatgggtctggcggcaatcggtgctgcg

SEQ ID NO: 37158 - DNA, 75 bp, synthetic construct
  source 1..75: mol_type = other DNA
cattccgcacccgttgttatcccgtcaggatttcagccgctttgcgctcgattatctggtgttcggtaacgcctt

SEQ ID NO: 37159 - DNA, 75 bp, synthetic construct
  source 1..75: mol_type = other DNA
tacgcaatatgaagtggtatatggtgcatataaaggtaaagaatcccagcagatttattttgttccctttatgac

SEQ ID NO: 37160 - DNA, 75 bp, synthetic construct
  source 1..75: mol_type = other DNA
acccgccgacggtaaatacctactggcgtcgtcgtggcagcacatattttgtatcaaaagcaggggagcgttatc

SEQ ID NO: 37161 - DNA, 75 bp, synthetic construct
  source 1..75: mol_type = other DNA
ctggctgaccgggtgagtgaggaaagccgccgctggctggcatcgtgcggcctgaccgtggagcagatgcaaaac

SEQ ID NO: 37162 - DNA, 75 bp, synthetic construct
  source 1..75: mol_type = other DNA
agaaaactgcagcaacagatgacctcgtctgaacgtgaaagtgaactggccgctgaaaatgcccgcctgaagcgg

SEQ ID NO: 37163 - DNA, 75 bp, synthetic construct
  source 1..75: mol_type = other DNA
tgcaggcgctaaccgtgtaactgcagatggtcgtgtcagagccctgaagggcgaaggtgatgtgccgaaagttgc

SEQ ID NO: 37164 - DNA, 75 bp, synthetic construct
  source 1..75: mol_type = other DNA
gtttgatgaaatcaatatcgttcgtgctcagccagtatctggtggacgtctgggggtgaagatttaccccataat

SEQ ID NO: 37165 - DNA, 75 bp, synthetic construct
  source 1..75: mol_type = other DNA
actgcacttgatgacgatgaaaagggagtaactttaagttacacccttggtggtgagcagaatctaagcattgtt

SEQ ID NO: 37166 - DNA, 75 bp, synthetic construct
  source 1..75: mol_type = other DNA
cagacaggcggcagaaaatctggcccgtctggcagaaagcgggaaatataccgccgggcagctacggatcatggg

SEQ ID NO: 37167 - DNA, 75 bp, synthetic construct
  source 1..75: mol_type = other DNA
ccgatggaagcataataagctttttctgcttctgccggaggagtatggcccagcctttccagcaatcgtcgattg

SEQ ID NO: 37168 - DNA, 75 bp, synthetic construct
  source 1..75: mol_type = other DNA
cgaatccgtcgatgccatccggcgctgggagccccgctgccagcttatgtcagttaaacccgccgtcgacggcga

SEQ ID NO: 37169 - DNA, 75 bp, synthetic construct
  source 1..75: mol_type = other DNA
cagcatattaaggcaggtatttcactgtgcgatgcagtgaactttctcgttgaaaaatacacactggtgcgtacc

SEQ ID NO: 37170 - DNA, 75 bp, synthetic construct
  source 1..75: mol_type = other DNA
cctgcccatatcacgaccatcaatgaagaaaatgggcagaaagcgcatcgtattgagatcggtgattttgataac

SEQ ID NO: 37171 - DNA, 75 bp, synthetic construct
  source 1..75: mol_type = other DNA
cgtgccattcacagcatcgacacggacattaagctcaatcgcgcattgtgggtgatggcagaaacgctgctggag

SEQ ID NO: 37172 - DNA, 75 bp, synthetic construct
  source 1..75: mol_type = other DNA
tctgcttaccctagaggtctgctagagaagggtaatattgacattcacaatcggcctgttgttaaaaactctgat

SEQ ID NO: 37173 - DNA, 75 bp, synthetic construct
  source 1..75: mol_type = other DNA
ttcagcaacaaacagttaatcaggccaataatgaaccagcacgtgaagaaccatcattgatgcaacaagctggcg

SEQ ID NO: 37174 - DNA, 75 bp, synthetic construct
  source 1..75: mol_type = other DNA
cattaattgagcaccgggcgggccaacataacagtgacaatgttattgaagaactggcctcggagctcatccgaa

SEQ ID NO: 37175 - DNA, 75 bp, synthetic construct
  source 1..75: mol_type = other DNA
agattgttgatgaaatctgcgattttgtggtgaatcagcaggcggttttcctgggcggtcactatatccttcagg

SEQ ID NO: 37176 - DNA, 75 bp, synthetic construct
  source 1..75: mol_type = other DNA
ggtgcttatatatcacatcctttttcggcgcatttgttattacccggtggttatgtcgaaaaatcatctgctttt

SEQ ID NO: 37177 - DNA, 75 bp, synthetic construct
  source 1..75: mol_type = other DNA
attctttacgacgagaacaatattattgtggccgtaaccagagacgcttcaacactggaccctacaggctacagc

SEQ ID NO: 37178 - DNA, 75 bp, synthetic construct
  source 1..75: mol_type = other DNA
gttagcattgactttgataagttgttagagttaatggctgataatgcggaaagcatctctgactttattcactcg

SEQ ID NO: 37179 - DNA, 75 bp, synthetic construct
  source 1..75: mol_type = other DNA
gagcgccataatgcacttgatgacgcccgttatcaggcaaaatacgtttcagctatctggaaaaaactgatcccg

SEQ ID NO: 37180 - DNA, 75 bp, synthetic construct
  source 1..75: mol_type = other DNA
ggaactgctgtggcagcatgagacaacacacgcctacaacgaacaggggctggcaaaccgcgtcacgccggacag

SEQ ID NO: 37181 - DNA, 75 bp, synthetic construct
  source 1..75: mol_type = other DNA
acgccggatttgcggaagacgacgagcaattcgatgacattcgcgtaattcgtggtgtgaaagtaccaggcggac

SEQ ID NO: 37182 - DNA, 75 bp, synthetic construct
  source 1..75: mol_type = other DNA
aagccaggaaactggacgttcaatctgaacagcgatttccagtccagccagtttgcggataacgccaatacggtg

SEQ ID NO: 37183 - DNA, 75 bp, synthetic construct
  source 1..75: mol_type = other DNA
tggagaaatgtcagcgtggtgctgcgggagccttcggcagaggcctggtatctgtggcaggaagtgctcaatggt

SEQ ID NO: 37184 - DNA, 75 bp, synthetic construct
  source 1..75: mol_type = other DNA
acctggagaataagggaaccgcccgtaataatctggatgtttacagcaaaagcgaaggtgataaccgttacctgc

SEQ ID NO: 37185 - DNA, 75 bp, synthetic construct
  source 1..75: mol_type = other DNA
gatccggaaggtctgttcccggtggtgctcggccatgaaggtgccggggtggtggttgaggtcggtgagggcgtg

SEQ ID NO: 37186 - DNA, 75 bp, synthetic construct
  source 1..75: mol_type = other DNA
tctcatattgactttgacaaaagagctaaagatgaaaaaaatgacaccattaacatttatgataactttttctat

SEQ ID NO: 37187 - DNA, 75 bp, synthetic construct
  source 1..75: mol_type = other DNA
tcagagaaaactttgtcagtcagggcatgattgctgatgtggcgttccatcacatggataaaacaaatccccatg

SEQ ID NO: 37188 - DNA, 75 bp, synthetic construct
  source 1..75: mol_type = other DNA
atgacatttaaacattatgatgttgtcagggcggcgtcgccgtcagaccttgcggaaaagctgacacacaaactg

SEQ ID NO: 37189 - DNA, 75 bp, synthetic construct
  source 1..75: mol_type = other DNA
cctctgccaatgagtcgtggcgctattttatggggcggcgaaaatttattgcggcccggctggccacgcagatgt

SEQ ID NO: 37190 - DNA, 75 bp, synthetic construct
  source 1..75: mol_type = other DNA
gaaataacaaccgttgatattgctacatacagagacgttcgtttagcagaaatcaacccccgaacgggtaaagcc

SEQ ID NO: 37191 - DNA, 75 bp, synthetic construct
  source 1..75: mol_type = other DNA
aaacacctgatactttcgcatctgcgttttgtgattcatatcgcaagacaatattctggttacggtttaccacaa

SEQ ID NO: 37192 - DNA, 75 bp, synthetic construct
  source 1..75: mol_type = other DNA
ccggaaaactctccatcacccgtgccacccgtgccctgacgttcctgtcagagctgggactgattacctaccaga

SEQ ID NO: 37193 - DNA, 75 bp, synthetic construct
  source 1..75: mol_type = other DNA
aactcaatgaacactgctatccaggaagaggaaaaccgggaactggatgcacgcgccaactttgttgctgtcatc

SEQ ID NO: 37194 - DNA, 75 bp, synthetic construct
  source 1..75: mol_type = other DNA
cgtattgccagcagaacgcatatcagtattcagaactggtcgccatccggagagggcaccgaagattgttgtttt

SEQ ID NO: 37195 - DNA, 75 bp, synthetic construct
  source 1..75: mol_type = other DNA
cagcgccgttgcttctgctgcctatcgttccggttcactgatgcttgatgagcgtaccggactgactcacgacta

SEQ ID NO: 37196 - DNA, 75 bp, synthetic construct
  source 1..75: mol_type = other DNA
ttcgcgtcagcagcttcgaccagaatcctgatcgacaactggaacaaatagaagtcggcaaggtattcaccgata

SEQ ID NO: 37197 - DNA, 75 bp, synthetic construct
  source 1..75: mol_type = other DNA
atgaacgagaaaactttaggtcaacgcattagagaaagacgtaagcaggtaggcttaagtcaaaacggtttaagc

SEQ ID NO: 37198 - DNA, 75 bp, synthetic construct
  source 1..75: mol_type = other DNA
tgcattgacgcgccaccagaaaaacgccccggcttcgctgtctgtcgtgataccgaccagaacatctggaaatat

SEQ ID NO: 37199 - DNA, 75 bp, synthetic construct
  source 1..75: mol_type = other DNA
gaggtaacgttccggcacgggacgctccgcttcaatggcaatgtcagcgaaaagctcctgactctgctgatacag

SEQ ID NO: 37200 - DNA, 75 bp, synthetic construct
  source 1..75: mol_type = other DNA
aactcgaggcgaaaggattttaccggagggcggcggcgcgatggggtgaagtcatgcagctggtggagacagaca

SEQ ID NO: 37201 - DNA, 75 bp, synthetic construct
  source 1..75: mol_type = other DNA
gagtccggcctgtattacaaccgccaccgctattatgacccgctgcaggggcggtatatcactcaggatccgatt

SEQ ID NO: 37202 - DNA, 75 bp, synthetic construct
  source 1..75: mol_type = other DNA
cctgatttacgcggtgaatttattcgtggatgggatgatgggcgcggggtggattcctctcgtggtttgttgaca

SEQ ID NO: 37203 - DNA, 75 bp, synthetic construct
  source 1..75: mol_type = other DNA
gcaacgacccgaattttgcgaccaccatgactaacgcgcttgcgggtaagcaaccgaaagatgccaccctgacgg

SEQ ID NO: 37204 - DNA, 75 bp, synthetic construct
  source 1..75: mol_type = other DNA
acatcagtccacgtattgctgacagggttacggatggtggccgtaacctgttgtccttcaactggcccagctacc

SEQ ID NO: 37205 - DNA, 75 bp, synthetic construct
  source 1..75: mol_type = other DNA
ttagcggcggggcacgccgttcttgcctgtggagggatggtgcagtcaggccgcccgttgaagcaggaacccacc

SEQ ID NO: 37206 - DNA, 75 bp, synthetic construct
  source 1..75: mol_type = other DNA
attatgtcgatcgttatggctggcttgcgcattgcctattttggcggtggtggtggctggaagcgaaaaacgctc

SEQ ID NO: 37207 - DNA, 75 bp, synthetic construct
  source 1..75: mol_type = other DNA
ttctgcgggaggtggtccgggaagcccgggccgaaatccgcagcatggcggatgccctggcaaaaatcaggggct

SEQ ID NO: 37208 - DNA, 75 bp, synthetic construct
  source 1..75: mol_type = other DNA
agccggggcgcaatgtccgggcaaaatcaggtttaaaccgttcgatactggatcagggctggtatgaaatgcgcc

SEQ ID NO: 37209 - DNA, 75 bp, synthetic construct
  source 1..75: mol_type = other DNA
gttgctgatttattccggcgcgtgcgtgccccgttctcgtcggggagaatcacctcagtggtggagacgctgaag

SEQ ID NO: 37210 - DNA, 75 bp, synthetic construct
  source 1..75: mol_type = other DNA
tgtcgcagtggcgatcgctggtttcaatcagatgaatcgtggtggcccggcaggaaatgccttggtgatgcacta

SEQ ID NO: 37211 - DNA, 75 bp, synthetic construct
  source 1..75: mol_type = other DNA
cctgcctgctggctgttattccggcgcttaaccttgccaccagtgatgcagcggcggtggccggccttgtgatga

SEQ ID NO: 37212 - DNA, 75 bp, synthetic construct
  source 1..75: mol_type = other DNA
attcatgcagctgaatttgttgccagaacctataccgattcatatcagttaggtgatggggaactgctggtttgt

SEQ ID NO: 37213 - DNA, 75 bp, synthetic construct
  source 1..75: mol_type = other DNA
tgactccggttgtgccagaagagagttttgtccatccgacagcggtattgatcggcgatgttattctcggcaagg

SEQ ID NO: 37214 - DNA, 75 bp, synthetic construct
  source 1..75: mol_type = other DNA
atgatgcgctgaaagagtggctgaagctggataaagtcattcaacagcaatttgcgaaaaagctaaagaagtgca

SEQ ID NO: 37215 - DNA, 75 bp, synthetic construct
  source 1..75: mol_type = other DNA
gcgtgacgataccggagaagtgcaggccgtggagcttgtggtgcgtgggcgtcacaaagaagtggattccggcga

SEQ ID NO: 37216 - DNA, 75 bp, synthetic construct
  source 1..75: mol_type = other DNA
ttataaatgcgtcacgaagaatatcgatttttcgtggtttaagaaaaagcagaaccacaaaatagaattatttct

SEQ ID NO: 37217 - DNA, 75 bp, synthetic construct
  source 1..75: mol_type = other DNA
gcagcatgagaccagacatgcgtacaacgcgcaggggctggcgaaccgctgtataccggacagcctgcccgccgt

SEQ ID NO: 37218 - DNA, 75 bp, synthetic construct
  source 1..75: mol_type = other DNA
aaccccgcagatcattttcaaatgagtttaaacttcaaatggttaaactggcttcacaaccaggagcctctgttg

SEQ ID NO: 37219 - DNA, 75 bp, synthetic construct
  source 1..75: mol_type = other DNA
gcaacaaagagctgaaagagtttgtgatgacgctgaccggctcactggtgtttggtcccaacggcgaaatcacac

SEQ ID NO: 37220 - DNA, 75 bp, synthetic construct
  source 1..75: mol_type = other DNA
tggtgcttaaaccgtggcgcgagagacgcagtctttcccagaatgcactcagccacatgtggtacagcgaaatca

SEQ ID NO: 37221 - DNA, 75 bp, synthetic construct
  source 1..75: mol_type = other DNA
ctgcagcagcttatccggctgccggggcagcagtatgatgaggagtccggcctgtattacaaccgccaccgctat

SEQ ID NO: 37222 - DNA, 75 bp, synthetic construct
  source 1..75: mol_type = other DNA
gtgaccaaagactacacctttaaacgccccggctgggccggacgttttgaacaggaaggccagcaccaggactac

SEQ ID NO: 37223 - DNA, 75 bp, synthetic construct
  source 1..75: mol_type = other DNA
ttatctgcaatctcgcccgcattggcaccgtgctggaagtggatacggaaaagtatcttgcacgcgtcgaaaccg

SEQ ID NO: 37224 - DNA, 75 bp, synthetic construct
  source 1..75: mol_type = other DNA
gcatcattcttcatccctgacgatgagaaaagctgcagcagcgatcccgttgttataaacaggtatatcagcgtg

SEQ ID NO: 37225 - DNA, 75 bp, synthetic construct
  source 1..75: mol_type = other DNA
attacctggggacgcataagagcttctgtgcacaggacgttgccgcggtaacaggcgcaaccgtaaccagcataa

SEQ ID NO: 37226 - DNA, 75 bp, synthetic construct
  source 1..75: mol_type = other DNA
taagacagtctgattggtattataaatataagaagttatcagagagtaacgtaagggagttagttgccagagtaa

SEQ ID NO: 37227 - DNA, 75 bp, synthetic construct
  source 1..75: mol_type = other DNA
cggagattaaatcatacatcacaggcttcctgagcgactcggcgcacgataacaagtcttcagacagcctgctgg

SEQ ID NO: 37228 - DNA, 75 bp, synthetic construct
  source 1..75: mol_type = other DNA
ttgcctgtgtttacgcctggctggcgcagttgttctcccgtgaactggacgatgaacaactgacgcaaatcgcca

SEQ ID NO: 37229 - DNA, 75 bp, synthetic construct
  source 1..75: mol_type = other DNA
gaaagcggcgatgtccgggcctataaaatccgttttccgaatggcacggtggatgtgtttcgtggctgggtcagc

SEQ ID NO: 37230 - DNA, 75 bp, synthetic construct
  source 1..75: mol_type = other DNA
aatggaacaatcattgatggtggcagccaacgagtaacaactcaggggcatgtcgacagtacaacgataaataag

SEQ ID NO: 37231 - DNA, 75 bp, synthetic construct
  source 1..75: mol_type = other DNA
aatgtggtggacgccagaaagaaccagtcgaccaggcttgttcagcgaaaccgatacctcatgggtgagtgagca

SEQ ID NO: 37232 - DNA, 75 bp, synthetic construct
  source 1..75: mol_type = other DNA
ttattagtctgatgtgtgaaaaagaaccggagttgaaaatagcgcagcaactggtactcgagttctaccgtattc

SEQ ID NO: 37233 - DNA, 75 bp, synthetic construct
  source 1..75: mol_type = other DNA
aggaagtgatcacccgtacggtgaaggtcaccaatgtgggccgtccgtcaatggcagaagatcgcagtacggtga

SEQ ID NO: 37234 - DNA, 75 bp, synthetic construct
  source 1..75: mol_type = other DNA
atgaatagtctacccgctggatgggcgcgccctctgatggctaagaagcatcatttttttaaaactggcgataat

SEQ ID NO: 37235 - DNA, 75 bp, synthetic construct
  source 1..75: mol_type = other DNA
cgttgtccgcgtttacgtcagaaattaatgcgattagcgcaaccattatcggtcagctggatacgaactttaaaa

SEQ ID NO: 37236 - DNA, 75 bp, synthetic construct
  source 1..75: mol_type = other DNA
ccgagagtgcgacctggcgatgttaccgctgcatactgaacagccgccacaaatctatgacggctatcagtcagt

SEQ ID NO: 37237 - DNA, 75 bp, synthetic construct
  source 1..75: mol_type = other DNA
tgaaaaggctcgtcaggttaatggcgataaaccctatatcgaaattatctgtatggattcagaaactgaaattca

SEQ ID NO: 37238 - DNA, 75 bp, synthetic construct
  source 1..75: mol_type = other DNA
gagccactacgctgacccggttgatttcagaggtaagggaaaaggcgacgttgcgcctgtggaacaaactggcac

SEQ ID NO: 37239 - DNA, 75 bp, synthetic construct
  source 1..75: mol_type = other DNA
ctctttccccaattgcctacaaccagatccccgtaattactacagaattattggcgcaattgtatggcactgaaa

SEQ ID NO: 37240 - DNA, 75 bp, synthetic construct
  source 1..75: mol_type = other DNA
cctgcgctggtatcagacccggggattcccggatgacatcccggatgaacaggaaaatgacctggggggccggga

SEQ ID NO: 37241 - DNA, 75 bp, synthetic construct
  source 1..75: mol_type = other DNA
ggcagcactgatgcagcaaccggacaaatctctggcactgctggcatggacgctctgccctgatgaatgtgtttg

SEQ ID NO: 37242 - DNA, 75 bp, synthetic construct
  source 1..75: mol_type = other DNA
aatgtggattacgtcaccagttttgaactgccttttcgcttgttgcttacccggacaccacaactgattgccgcg

SEQ ID NO: 37243 - DNA, 75 bp, synthetic construct
  source 1..75: mol_type = other DNA
aagccacgatgccagaaaactgctgcagatgaccggagaatggctgaatacaacaggggctgttcagcagtcacc

SEQ ID NO: 37244 - DNA, 75 bp, synthetic construct
  source 1..75: mol_type = other DNA
cgacggaaatcggtcagggtgccgacaccgtcttctcgcaaatggtggcagaaaccgtgggggttccggtcagcg

SEQ ID NO: 37245 - DNA, 75 bp, synthetic construct
  source 1..75: mol_type = other DNA
tgatccggctattgaatatgtgcagacgcacagcgcaccgcaaccaataccggcccgcatcaatcgttttgttac

SEQ ID NO: 37246 - DNA, 75 bp, synthetic construct
  source 1..75: mol_type = other DNA
gatggtcaggggaactggggcgcgccggacgatccgaaatcgttcgcggcaatgcgttacaccgaatcccggttg

SEQ ID NO: 37247 - DNA, 75 bp, synthetic construct
  source 1..75: mol_type = other DNA
cactggcccgcggggaaatccccgaacagaaaaaaatcgaaagagtcctgcgtgatgtcggactctcccgtaccc

SEQ ID NO: 37248 - DNA, 75 bp, synthetic construct
  source 1..75: mol_type = other DNA
tgactggaaagcctttgatcgtgccatcgacagtcagagcaacgtgtcgcagactgctgcacgtctgaagacgcg

SEQ ID NO: 37249 - DNA, 75 bp, synthetic construct
  source 1..75: mol_type = other DNA
ttccgggtgacggatgaggcgacccggcgatggctggaagagtttttatcgtggcatggtggttaccgtgccttt

SEQ ID NO: 37250 - DNA, 75 bp, synthetic construct
  source 1..75: mol_type = other DNA
cacaattaacggttcggtttatcacctgtctgtcatctggcgaggcgagtactgggttctggatcttgctgacag

SEQ ID NO: 37251 - DNA, 75 bp, synthetic construct
  source 1..75: mol_type = other DNA
tatgcggggtttcgtgaagggcagaacgtcagactgcaccgcccggtcagtgggcaggaacaacagaaactggag

SEQ ID NO: 37252 - DNA, 75 bp, synthetic construct
  source 1..75: mol_type = other DNA
agtattcgttgttatcaaagcgggcaacgctatccgctggagatgattggcgattttaactggccttttacaaag

SEQ ID NO: 37253 - DNA, 75 bp, synthetic construct
  source 1..75: mol_type = other DNA
ccgggcgtgcagtgctgcgtcacttgtcaggaaatcgcagagctgaaaggcaaacactacaacgggggtgctgta

SEQ ID NO: 37254 - DNA, 75 bp, synthetic construct
  source 1..75: mol_type = other DNA
ccattgaggtactcaccgggcttgagccggttcgccgccgtccggggatgtataccgataccactcgccctaacc

SEQ ID NO: 37255 - DNA, 75 bp, synthetic construct
  source 1..75: mol_type = other DNA
tgatagccagcgtggatataaaaaccgggcgtaaaacggtatttcagtatctgattaaaccgataaccagaatga

SEQ ID NO: 37256 - DNA, 75 bp, synthetic construct
  source 1..75: mol_type = other DNA
gcaccatagctctcagagcaagtgccttacttcaggctatgagcagggatattgaggctcagagaaaagaattta

SEQ ID NO: 37257 - DNA, 75 bp, synthetic construct
  source 1..75: mol_type = other DNA
atgtttatcagcttaacgttgcgaagcttcaggcagcggcattttctcaactgtcagattctgacccgtcaaaat

SEQ ID NO: 37258 - DNA, 75 bp, synthetic construct
  source 1..75: mol_type = other DNA
gctgtggggatggggaattattgcccagttcgcatattatctggcaggctttccctggtatgaggggaatatcct

SEQ ID NO: 37259 - DNA, 75 bp, synthetic construct
  source 1..75: mol_type = other DNA
atgcgtgatattcagatggttcttgaacgctggggggcatgggcggcaagtggtaacaccggggtggactattct

SEQ ID NO: 37260 - DNA, 75 bp, synthetic construct
  source 1..75: mol_type = other DNA
aaaacctggacggagtttggggccattgtggtggtgggggtgattctgctggttgcggtgatctggctgctgacc

SEQ ID NO: 37261 - DNA, 75 bp, synthetic construct
  source 1..75: mol_type = other DNA
atgaaatccgcagcatggcggatgccctggcaaaaatcaggggctgatgatggcggggaaatccccgcctttttc

SEQ ID NO: 37262 - DNA, 75 bp, synthetic construct
  source 1..75: mol_type = other DNA
acgccaggacacggtatcgggaaccgttttctgcgggccggtgtggaggttgatcgatatggccgtgccgttgcg

SEQ ID NO: 37263 - DNA, 75 bp, synthetic construct
  source 1..75: mol_type = other DNA
acacaactgatataggcaaaaccgatgaccttggattcgacgcctctcgtgtcgtgccaacagctaatgaaaacc

SEQ ID NO: 37264 - DNA, 75 bp, synthetic construct
  source 1..75: mol_type = other DNA
ataacgttaatacagttttgggtagtggaagttgtaatgaaaacaattcttccaaccccatggagctactagctt

SEQ ID NO: 37265 - DNA, 75 bp, synthetic construct
  source 1..75: mol_type = other DNA
atttctggcgacacatcctgcagtgcggacatcagcaggtgctgtttgtggtgacgcaggccgacaaaacggagc

SEQ ID NO: 37266 - DNA, 75 bp, synthetic construct
  source 1..75: mol_type = other DNA
ttaatggacgagtgccggtcctgtcggcacaggaagcggtgaattatattcccgacgaagcaacactttgtgtgt

SEQ ID NO: 37267 - DNA, 75 bp, synthetic construct
  source 1..75: mol_type = other DNA
cctaagttaagccgtcgcatcgttgaacttgctgtaaaagagatggaggacagcggttacgaattcaataaaaag

SEQ ID NO: 37268 - DNA, 75 bp, synthetic construct
  source 1..75: mol_type = other DNA
atgactatcaaagtaggtatcaacggttttggccgtatcggtcgcattgttttccgtgctgctcagaaacgttct

SEQ ID NO: 37269 - DNA, 75 bp, synthetic construct
  source 1..75: mol_type = other DNA
caccgtgaaaagaattgccggttatttgcaggctatgcaggacaatgcacgggcggtgaatcaaacacagcagcg

SEQ ID NO: 37270 - DNA, 75 bp, synthetic construct
  source 1..75: mol_type = other DNA
gatgcatattattggggtctaataaatgatgaagatgctctgaaagaaatttttaagcgaagcaatattcgcatg

SEQ ID NO: 37271 - DNA, 75 bp, synthetic construct
  source 1..75: mol_type = other DNA
tgttgcgtcagcggtcgttttatatgaccagataaatcgcggcggcccggcagggaatgctgtggtgatgcacta

SEQ ID NO: 37272 - DNA, 75 bp, synthetic construct
  source 1..75: mol_type = other DNA
ggggccggcgagcattattgagacaaacagcaatggctggttcccggatacagatggcgcactcatcaccggact

SEQ ID NO: 37273 - DNA, 75 bp, synthetic construct
  source 1..75: mol_type = other DNA
ctcagcggaatttcaggcatctgtacaggcttttggggcggatgccatcattaaacgccaccgcgtgcataaagc

SEQ ID NO: 37274 - DNA, 75 bp, synthetic construct
  source 1..75: mol_type = other DNA
tgccgttctggaactggaagaacatcagaaggcgtggttactgtggtgctacagtggaaatgtttgctgggaaga

SEQ ID NO: 37275 - DNA, 75 bp, synthetic construct
  source 1..75: mol_type = other DNA
atgtcagttacagagtctaaggcaaaaacagagcgcaaatccagccgtaaacctgcaaaaacgcaggaaactgtc

SEQ ID NO: 37276 - DNA, 75 bp, synthetic construct
  source 1..75: mol_type = other DNA
cacattatacgaagcacttcgcacggttgatcgtctgcttcgcgggcaaagttttattaaacaggctgatttata

SEQ ID NO: 37277 - DNA, 75 bp, synthetic construct
  source 1..75: mol_type = other DNA
tccagcagggaaaccgctggcttaactggctggagaaacagccggaaggttcagtgcgtccggtagtcattgaat

SEQ ID NO: 37278 - DNA, 75 bp, synthetic construct
  source 1..75: mol_type = other DNA
atgggcgtcccctggttccagctgaaaatggcacaattcccggagccggtcattacgttctcgagcaattacgag

SEQ ID NO: 37279 - DNA, 75 bp, synthetic construct
  source 1..75: mol_type = other DNA
gaactttcagcctgatacgttgaaaatggtctatgaccacaacggcgttattatttgtattgaaaaggatgtttc

SEQ ID NO: 37280 - DNA, 75 bp, synthetic construct
  source 1..75: mol_type = other DNA
cggggtgggcgagagccgggacagggatgcagagtatgaagccctgtaccgtgacattctgcctgaactggacct

SEQ ID NO: 37281 - DNA, 75 bp, synthetic construct
  source 1..75: mol_type = other DNA
aaccaggaatccggtctgttcatgaatgacaccacgatgggctttatgctggaagccattcccatcaatggggcg

SEQ ID NO: 37282 - DNA, 75 bp, synthetic construct
  source 1..75: mol_type = other DNA
cgtgccgatttcgatgattttgacggtgacaggcgaggtatcggtgattgtctggatgaggctgagcaagagctt

SEQ ID NO: 37283 - DNA, 75 bp, synthetic construct
  source 1..75: mol_type = other DNA
cggattctggaagctgaatgctgtgcagatcatatccatatgcttgtggagatcccgcccaaaatgagcgtatcc

SEQ ID NO: 37284 - DNA, 75 bp, synthetic construct
  source 1..75: mol_type = other DNA
gcagcacgttgaaaaccaggaaaagggtttaccaaccaattttttatatatagatgaagagtttgaatatctttc

SEQ ID NO: 37285 - DNA, 75 bp, synthetic construct
  source 1..75: mol_type = other DNA
atgagtaaatgtagttctcataatagtctgtatgcactgatattgcttgcacaatatcataatataactgtcaat

SEQ ID NO: 37286 - DNA, 75 bp, synthetic construct
  source 1..75: mol_type = other DNA
tactgtcagcccggataacggttttacaaccagtattgaactcgaagtgaagattgatgatttcgaaatggaatg

SEQ ID NO: 37287 - DNA, 75 bp, synthetic construct
  source 1..75: mol_type = other DNA
atggattattcacagttaagtgattttgaaattaacagaatggtaggagacataatttttaaaggcctttgggca

SEQ ID NO: 37288 - DNA, 75 bp, synthetic construct
  source 1..75: mol_type = other DNA
ggatactggggtggtctgagcgggtgccgggtgctgaggacgtactgccagcgccgctgccgccgtaccgggtgc

SEQ ID NO: 37289 - DNA, 75 bp, synthetic construct
  source 1..75: mol_type = other DNA
cgaagaactgaatgaagatatcgcctggcgcattggtcgcgcctatggcgaatttctcaaaccgaaaaccattgt

SEQ ID NO: 37290 - DNA, 75 bp, synthetic construct
  source 1..75: mol_type = other DNA
acttggtctgcatgtgcgcgcagcacaacgaatgatgaaagcatctttgaaatacctttcaccaaaactagagcc

SEQ ID NO: 37291 - DNA, 75 bp, synthetic construct
  source 1..75: mol_type = other DNA
ggtcccggcggaagcggtaaaagtattctcgccgaaatcgcgaccctgctcgccggagaggataacgccacgtca

SEQ ID NO: 37292 - DNA, 75 bp, synthetic construct
  source 1..75: mol_type = other DNA
tttgtgatgttgcgttccggtgaattttctaaattaccagttcgggtttcattttgtccgttctgtggtgaaagt

SEQ ID NO: 37293 - DNA, 75 bp, synthetic construct
  source 1..75: mol_type = other DNA
tattggcggcaatgttggcgttcgcaagtgcgacgatacaggcagccgatgtcaccatcacggtgaacggtaagg

SEQ ID NO: 37294 - DNA, 75 bp, synthetic construct
  source 1..75: mol_type = other DNA
taatctgttttctttcttcttgttcatcaccgcctcaacctaaacaagcggagggcggatggtatgaattgaata

SEQ ID NO: 37295 - DNA, 75 bp, synthetic construct
  source 1..75: mol_type = other DNA
gcgcacaggtctggttcatgtgatgaatgagattcttccatcggtgggaggggaacaggcgacagtaatcaatag

SEQ ID NO: 37296 - DNA, 75 bp, synthetic construct
  source 1..75: mol_type = other DNA
ccgcagaccggtgaccgggcgaagcccgcgaaccggcgaggaagcgcaatgtatctgtagttacagggagcaggt

SEQ ID NO: 37297 - DNA, 75 bp, synthetic construct
  source 1..75: mol_type = other DNA
tggccccggctggaaagcgccttctgatatccgcttacagctacgtgatgacggactgatactcaacgacaacgg

SEQ ID NO: 37298 - DNA, 75 bp, synthetic construct
  source 1..75: mol_type = other DNA
ctgacggcccgctgggcgacgatatggataaaaaccgcgccattgctaaacgcattggttatccggtgattatca

SEQ ID NO: 37299 - DNA, 75 bp, synthetic construct
  source 1..75: mol_type = other DNA
gacacgaaagccatcagttattacggtaaagtttggtgacggatatgaacagcgacgggctggtggtctgaatgc

SEQ ID NO: 37300 - DNA, 75 bp, synthetic construct
  source 1..75: mol_type = other DNA
aatacacaaacagcgatatgccttcgccgaaaaaaatgaaactaatggcagacaccatttctgcggtttatctcg

SEQ ID NO: 37301 - DNA, 75 bp, synthetic construct
  source 1..75: mol_type = other DNA
tcttcggcgcaatatgcctgaccccatccctgtcattatacttgcacgcctggctgttgatgcgtcattccgtgg

SEQ ID NO: 37302 - DNA, 75 bp, synthetic construct
  source 1..75: mol_type = other DNA
tcacccggtggattttctcctgaacgagcagccgaacgactgccagacgccttatcagtttaaacgcacgatgat

SEQ ID NO: 37303 - DNA, 75 bp, synthetic construct
  source 1..75: mol_type = other DNA
cccggaagaacgccgccgcactggcacaaaccctgatggcgaaaacccgtcccggaaccggtaacgcctacctga

SEQ ID NO: 37304 - DNA, 75 bp, synthetic construct
  source 1..75: mol_type = other DNA
tgccgcgaccacgaaatcgacctgatgatcgacattctctgccgccgccgtaaaaacaacccggtggtggtgggc

SEQ ID NO: 37305 - DNA, 75 bp, synthetic construct
  source 1..75: mol_type = other DNA
atggattcattaggttctaacaaacatgtactacccgaagtctgcatctgctttttatcccttttagcagaacaa

SEQ ID NO: 37306 - DNA, 75 bp, synthetic construct
  source 1..75: mol_type = other DNA
atgcacgacccggcatacccggaaagcctgcccggtgcgccactggcgcggtacacgtatacggaagccggtgaa

SEQ ID NO: 37307 - DNA, 75 bp, synthetic construct
  source 1..75: mol_type = other DNA
ctgcgttatataccgcctgctgccgcccggctgttgaccggcattaaccgtgaccgtctgcaacaggactttgtg

SEQ ID NO: 37308 - DNA, 75 bp, synthetic construct
  source 1..75: mol_type = other DNA
acctgccgcgcactcgatcagtgggcttttgagcatggtgtggagctgcgacttatccagcccggcaagccaacg

SEQ ID NO: 37309 - DNA, 75 bp, synthetic construct
  source 1..75: mol_type = other DNA
agcggtgagatcaacagcaaactggcgcaacccgttgaggcgattaaccgcgtggaacagcattttagccgtgag

SEQ ID NO: 37310 - DNA, 75 bp, synthetic construct
  source 1..75: mol_type = other DNA
aaactgaaaaatgaagggggcatgttcagtcgcttgttgctggaagagcggatgcgtgttgctgtaaatatgtta

SEQ ID NO: 37311 - DNA, 75 bp, synthetic construct
  source 1..75: mol_type = other DNA
tgccgtccggggtgaagggggaaaacaactggacggtggagaagaagaacgcagtaagactggtcagggagtaag

SEQ ID NO: 37312 - DNA, 75 bp, synthetic construct
  source 1..75: mol_type = other DNA
acattcggttatggatcatactcactatatggagttatggaccggtgaagggcttgctgcaaacagcacccgtgc

SEQ ID NO: 37313 - DNA, 75 bp, synthetic construct
  source 1..75: mol_type = other DNA
aaacttgcccgccatccgtcctttacggtggtttctgagcagataaaggcgcgtgccggtgagacatcgctggaa

SEQ ID NO: 37314 - DNA, 75 bp, synthetic construct
  source 1..75: mol_type = other DNA
tggatggatttctgaaaggtaaatgcataccacgagatttaaaggttaacgaaacaaacgctgaatatctggtgc

SEQ ID NO: 37315 - DNA, 75 bp, synthetic construct
  source 1..75: mol_type = other DNA
gaaaccaacgcagctcagcaacaggtgcttgccggaaaggacgaaaaaatcaacgaactggccacaaaactggag

SEQ ID NO: 37316 - DNA, 75 bp, synthetic construct
  source 1..75: mol_type = other DNA
agcgttggggagcatgggcggcgagtgatagttcaggcgttgactattcacctatagctgctgggtttaagggac

SEQ ID NO: 37317 - DNA, 75 bp, synthetic construct
  source 1..75: mol_type = other DNA
atggaagaatttaagcatgaaccattcggctctgaaacttcgcacatagttgaagtggctattgaagggagaatg

SEQ ID NO: 37318 - DNA, 75 bp, synthetic construct
  source 1..75: mol_type = other DNA
cctcagcagaatgggcagccacagagtgctgacgcgacgaaaaaaggtggcgcgaaaacgaaaggccgtggacgt

SEQ ID NO: 37319 - DNA, 75 bp, synthetic construct
  source 1..75: mol_type = other DNA
gttacagaattatgtgcagaccaacctctataacctgctttacaccagcaccaccaaaattccgcagactgatgc

SEQ ID NO: 37320 - DNA, 75 bp, synthetic construct
  source 1..75: mol_type = other DNA
atgggctggactgaagccgcagacctgattgttaaaggtatggaaggcgcaatcaacgccaagactgtaacctat

SEQ ID NO: 37321 - DNA, 75 bp, synthetic construct
  source 1..75: mol_type = other DNA
tcaggctgatgcgcgcaaggctggacaatgccaggccagttatcgagattccggcagaatttcagctttttgtga

SEQ ID NO: 37322 - DNA, 75 bp, synthetic construct
  source 1..75: mol_type = other DNA
cccggaagctcgccgcattgcgattccgggcgtggctttttgcgtaacctgccagcaaatcgcagagctaaaaaa

SEQ ID NO: 37323 - DNA, 75 bp, synthetic construct
  source 1..75: mol_type = other DNA
aaatcattagcgaagctgaaaaggcacgtcaggttaatggcgatgaaccctatatcgaaattatttgtatggatt

SEQ ID NO: 37324 - DNA, 75 bp, synthetic construct
  source 1..75: mol_type = other DNA
ccctgttcaaaccccgctttaaacatcctgaaacctcgacgctagtccgccgctttaatcacggcgcacaaccgc

SEQ ID NO: 37325 - DNA, 75 bp, synthetic construct
  source 1..75: mol_type = other DNA
tttacgatatctacccgtacttgtgtggcacggtttttatccttggaagctggctgcgctacgattacgggcagt

SEQ ID NO: 37326 - DNA, 75 bp, synthetic construct
  source 1..75: mol_type = other DNA
gtaatttcgctgaagatcgacaaaaagcttctgacgctggtcgtaaaggcggccaacatagtggcggtaatttta

SEQ ID NO: 37327 - DNA, 75 bp, synthetic construct
  source 1..75: mol_type = other DNA
atggatcgagaactgaaaaatctgatgctgaacattaatcaactggcggcgatagcgggaatatgtcgtcagact

SEQ ID NO: 37328 - DNA, 75 bp, synthetic construct
  source 1..75: mol_type = other DNA
atgagtgataagcagactgaaaagaccattcaactggatacccccatcaagcgcggtaaaacagaaatcaccgaa

SEQ ID NO: 37329 - DNA, 75 bp, synthetic construct
  source 1..75: mol_type = other DNA
gccgagccggatttaatcattcaggcgttcaatgagtaccagcttttgtgcgccctgcgggaagggccgtttggc

SEQ ID NO: 37330 - DNA, 75 bp, synthetic construct
  source 1..75: mol_type = other DNA
cgacaaagaataccaggcagtattaagcgttgcacctcttcctgtttttatcgcaatggaaattgcctatctgtg

SEQ ID NO: 37331 - DNA, 75 bp, synthetic construct
  source 1..75: mol_type = other DNA
ttcattaagatcgctacgtatacttctcgatatcttattgatttgccttaaagggattaccgtgacaaaaagtat

SEQ ID NO: 37332 - DNA, 75 bp, synthetic construct
  source 1..75: mol_type = other DNA
atgaatactcttaccaaagaatggttacagaacacgattaccagcattgagtcagcacgggatgaaataccgttc

SEQ ID NO: 37333 - DNA, 75 bp, synthetic construct
  source 1..75: mol_type = other DNA
gaaaaagtatcgggtattgctgaaccgtgttgatacgtcaactgcacaggatattgaatggccagtagcacctat

SEQ ID NO: 37334 - DNA, 75 bp, synthetic construct
  source 1..75: mol_type = other DNA
ctgtgccagtttggtcggtggattgatcatctggggccactcgataacgatgaattaccttacgttcggctaatg

SEQ ID NO: 37335 - DNA, 75 bp, synthetic construct
  source 1..75: mol_type = other DNA
tggacgtcagttagaaaccgctgccagccattatgaaacgcaactgcgcccgcccttcttccgcgcactggtcga

SEQ ID NO: 37336 - DNA, 75 bp, synthetic construct
  source 1..75: mol_type = other DNA
cagctttatgcttcgtaacctgtatggcttttagttcatcgtctattgcggacattgtcatttcgggtactcgcg

SEQ ID NO: 37337 - DNA, 75 bp, synthetic construct
  source 1..75: mol_type = other DNA
tggagggcgatccggaacttaatccgtttgctctggcgctggactgttacagctccacgccgcagcgtctggaag

SEQ ID NO: 37338 - DNA, 75 bp, synthetic construct
  source 1..75: mol_type = other DNA
ccggtaaaaatggctgcccttcttgagcagcgactgcggcaggatgctgaatcagcaataccacgtctggcatgg

SEQ ID NO: 37339 - DNA, 75 bp, synthetic construct
  source 1..75: mol_type = other DNA
taaaaactgtaagatttggcgatggttatgaacaacgaagcccaaacggacttaatcattctctgcgtgttttta

SEQ ID NO: 37340 - DNA, 75 bp, synthetic construct
  source 1..75: mol_type = other DNA
ccaaagaacagcacgagtggctgaatggctggcttgaactgtggggcgcatgggtttattcaggtcgtctggaaa

SEQ ID NO: 37341 - DNA, 75 bp, synthetic construct
  source 1..75: mol_type = other DNA
acagtttccgctgccggaggggatgaatctgcccctgaccctgcgccattaccgggtatttatctcgtactgttc

SEQ ID NO: 37342 - DNA, 75 bp, synthetic construct
  source 1..75: mol_type = other DNA
ttccctgttattattctctttttcctcctgttctgattctgattactgctgccctgattcctgtctgtctttgtt

SEQ ID NO: 37343 - DNA, 75 bp, synthetic construct
  source 1..75: mol_type = other DNA
ccgggctgctgatgctggcagtcagccaccggctgtaccgggcggaagacagagcggaacgtctggcgctggtcg

SEQ ID NO: 37344 - DNA, 75 bp, synthetic construct
  source 1..75: mol_type = other DNA
aggggcccgctggccctcaggggccgaagggggataagggagagcgtggtgacaccggccctgtcggggcaaccg

SEQ ID NO: 37345 - DNA, 75 bp, synthetic construct
  source 1..75: mol_type = other DNA
aacagaagtgtgatcgcctcaaacccactcgagggattactgccatctgatgtcgggcaaaagcctaaaaagaga

SEQ ID NO: 37346 - DNA, 75 bp, synthetic construct
  source 1..75: mol_type = other DNA
ataaccatgagcggtcacatttggcattgaaatacaaaacgcccgatgaagttcatcaaccgttttacggacaga

SEQ ID NO: 37347 - DNA, 75 bp, synthetic construct
  source 1..75: mol_type = other DNA
gccgattattatggggcgtacctaccaccaggaaaaccgcacacccggcagcctgccggggacgaagacgcagat

SEQ ID NO: 37348 - DNA, 75 bp, synthetic construct
  source 1..75: mol_type = other DNA
tggtggtcaatactgttcaggggattatcaggcgctgctgaagcgacacaacctgcgtggcagtatgagtgcgaa

SEQ ID NO: 37349 - DNA, 75 bp, synthetic construct
  source 1..75: mol_type = other DNA
ggcgtgatcaccaatcacaataaattcgatcccggcgagtttaaagtattgcggaaagccgcgcgccgtgaaggt

SEQ ID NO: 37350 - DNA, 75 bp, synthetic construct
  source 1..75: mol_type = other DNA
caggaagagattctgcacctgcgttactccaccgatgatggctttctggggcgttcgcctattactacgtgccgt

SEQ ID NO: 37351 - DNA, 75 bp, synthetic construct
  source 1..75: mol_type = other DNA
tgaccggaagtgatgacggtcgccacagcaacacgtctctggcgtggggggctggcgtgcagtttaacccgaccg

SEQ ID NO: 37352 - DNA, 75 bp, synthetic construct
  source 1..75: mol_type = other DNA
gttgtgtacgtcataacggagacggtgagaaaaacggcgatgcaaatcaggtggagagggatgtatcagaggtta

SEQ ID NO: 37353 - DNA, 75 bp, synthetic construct
  source 1..75: mol_type = other DNA
tttttttaatactgagttcagtacgcactatatagtattggcgtatgaaatatctattatctccagcggtcttgt

SEQ ID NO: 37354 - DNA, 75 bp, synthetic construct
  source 1..75: mol_type = other DNA
gcactgacgtagccggtctttacgaaaagtttgatcgcagaactggcagagtttactaccagtataaaaatcctg

SEQ ID NO: 37355 - DNA, 75 bp, synthetic construct
  source 1..75: mol_type = other DNA
aaaaagcctgcaccgcctgcggtcagaccagcggcggcaactgccctgattgtggtgcggtgatgggcgacgcaa

SEQ ID NO: 37356 - DNA, 75 bp, synthetic construct
  source 1..75: mol_type = other DNA
agatctggacgcgttcttcgtggcgtaccgcgaaaagctgatgaccatcctgaaaaagcccgcctcgcggaaaaa

SEQ ID NO: 37357 - DNA, 75 bp, synthetic construct
  source 1..75: mol_type = other DNA
agcctctggtgggaaaaaatggatgcaatgcaggagtctgccactcgtcagcatgaacaggataccctccggaca

SEQ ID NO: 37358 - DNA, 75 bp, synthetic construct
  source 1..75: mol_type = other DNA
cgatctgtacgttcaggttcaggttaaacagcacccgattttcgagcgtgaaggcaacaacctgtattgcgaagt

SEQ ID NO: 37359 - DNA, 75 bp, synthetic construct
  source 1..75: mol_type = other DNA
cggcagcgtgttggcgctggcggcggtgggcatgttttttcgcctgctcatgactgcggcggggtttaaagcgca

SEQ ID NO: 37360 - DNA, 75 bp, synthetic construct
  source 1..75: mol_type = other DNA
aacacacaaccaatccgcttcacatgccagagcgccaccggcagcacgggacatggacaccggaacgcctgatcg

SEQ ID NO: 37361 - DNA, 75 bp, synthetic construct
  source 1..75: mol_type = other DNA
atgaactatgccggacatgaaaaacttcgcgccgacgtggcggaggtggccaacaccatgtgtgaccttcgggcc

SEQ ID NO: 37362 - DNA, 75 bp, synthetic construct
  source 1..75: mol_type = other DNA
catcagccgtttcaccgactatacacatgtaatgtgtgttggtggtggggctgaaattgtggccgaggctgtgaa

SEQ ID NO: 37363 - DNA, 75 bp, synthetic construct
  source 1..75: mol_type = other DNA
tggaagtggacggcctgccaccggacgcgtttgcggtggtctcctttcatctgaaccagtcactctcttcgctct

SEQ ID NO: 37364 - DNA, 75 bp, synthetic construct
  source 1..75: mol_type = other DNA
ccataagatgcggaattcagttgctcatttctgcgtccaggtagagtcagccagcgatgcacaccttgtagactg

SEQ ID NO: 37365 - DNA, 75 bp, synthetic construct
  source 1..75: mol_type = other DNA
tgtcccggttgagactgaatcctatccgatgaacgtcacttttgacaagctggcccctgaagtacagaacgctgt

SEQ ID NO: 37366 - DNA, 75 bp, synthetic construct
  source 1..75: mol_type = other DNA
tgaaatctcctgatggtgaggcaatatcaggcgcaaatattaccctgacggcgctgacagtttcaccggatgcgc

SEQ ID NO: 37367 - DNA, 75 bp, synthetic construct
  source 1..75: mol_type = other DNA
gcaccgcaaatgctcgttttcgaattaccaggtgcagaacgacggccagcgatacgcgttgagccaggcgaaatc

SEQ ID NO: 37368 - DNA, 75 bp, synthetic construct
  source 1..75: mol_type = other DNA
cattgcaggtgccggatgaggtgaaatcctcaagcgacttgctgcgcttctatcaaaactggcagcctgcatggg

SEQ ID NO: 37369 - DNA, 75 bp, synthetic construct
  source 1..75: mol_type = other DNA
ggaagatataactggtttaaatggaagtgtgataaatgatgcccaggcagccgcatgggcagaatatacagtttt

SEQ ID NO: 37370 - DNA, 75 bp, synthetic construct
  source 1..75: mol_type = other DNA
acaacagcaatgatgatttcagccttcttctgccgtctgttggggcacaagttgctgatcctgatgatgtatcaa

SEQ ID NO: 37371 - DNA, 75 bp, synthetic construct
  source 1..75: mol_type = other DNA
ttctgacgccgcgacgccgggaggattacggtaaggacctgtggagcgcatatcagaccatccaggagaatatgc

SEQ ID NO: 37372 - DNA, 75 bp, synthetic construct
  source 1..75: mol_type = other DNA
cgctcaaggctgacagctaatgagtatgtcgctatttaccatgctgctgagcacctccccatctggctgaggctg

SEQ ID NO: 37373 - DNA, 75 bp, synthetic construct
  source 1..75: mol_type = other DNA
atggcggagaagcttgccctgcttgaaaaactgggcatcacgctggatgacctggaaaaactcttcaaatcccgc

SEQ ID NO: 37374 - DNA, 75 bp, synthetic construct
  source 1..75: mol_type = other DNA
aacacggagccggtggtgcgtctgaacgttgagtccagagcggatactgcgttaatgaatgcaaaaaccgaagag

SEQ ID NO: 37375 - DNA, 75 bp, synthetic construct
  source 1..75: mol_type = other DNA
ggaaaacgtatccatacccgtgccattcacagcatcgacaccgacattaagctcaaccgcgcattgtgggtgatg

SEQ ID NO: 37376 - DNA, 75 bp, synthetic construct
  source 1..75: mol_type = other DNA
ccccggttgggtagttatgtgggatggctggttcagacttcaggatatggttgagggttacctggtgatgaagtc

SEQ ID NO: 37377 - DNA, 75 bp, synthetic construct
  source 1..75: mol_type = other DNA
atttgcctggccctggacatttcgccttacccgtcttttatatacccggagctggataagcaacgaacgtcctgg

SEQ ID NO: 37378 - DNA, 75 bp, synthetic construct
  source 1..75: mol_type = other DNA
ggcggtcatccgtaacacacgttacagcggagatggtggcctggatggtcaggtgctgattgacggcgagcggtg

SEQ ID NO: 37379 - DNA, 75 bp, synthetic construct
  source 1..75: mol_type = other DNA
aaaccacccgcaaagcaagccgtaaatctgtaaaaacgcaggaaactgtcctgtctgccctgctggcgcagacgg

SEQ ID NO: 37380 - DNA, 75 bp, synthetic construct
  source 1..75: mol_type = other DNA
tcacaccatcagaatctgttcccattgcggctcagctgcagattaccactacacaggtcaccgatgagaaccgcg

SEQ ID NO: 37381 - DNA, 75 bp, synthetic construct
  source 1..75: mol_type = other DNA
aaggacatgaaatgggcctttgcggccattgatcggcgtgttcaggtgccgcttacccgtggtcagacggtggcg

SEQ ID NO: 37382 - DNA, 75 bp, synthetic construct
  source 1..75: mol_type = other DNA
tttgtgaaaatgattttgactctttgataattgatctcaaaagtgagagcacaatatatgattcactaccctttt

SEQ ID NO: 37383 - DNA, 75 bp, synthetic construct
  source 1..75: mol_type = other DNA
gggggcggatgtgcaccgtcagaattcttggctactgcaatcacgatccggaaacgtctgtgctggcgcattacc

SEQ ID NO: 37384 - DNA, 75 bp, synthetic construct
  source 1..75: mol_type = other DNA
catgcgactgacggcggttttttcctgcgtcagggtgctggcagagtcggtcgggatgttgccctgcaatctgta

SEQ ID NO: 37385 - DNA, 75 bp, synthetic construct
  source 1..75: mol_type = other DNA
tgaagagaacccgcatcagctgcagcagcttatccgcctgccggggcagcagtatgatgaggagtccggcctgta

SEQ ID NO: 37386 - DNA, 75 bp, synthetic construct
  source 1..75: mol_type = other DNA
atgagcgagattgactatcaggcgctgcgtgaagcagcagagaaagcaactaaaggatgctacatcgtagggcat

SEQ ID NO: 37387 - DNA, 75 bp, synthetic construct
  source 1..75: mol_type = other DNA
tgatgcgtttatagaaaaaggtgaggaagccacgcggaaagccattcataacgccatccggccaccggcacaaag

SEQ ID NO: 37388 - DNA, 75 bp, synthetic construct
  source 1..75: mol_type = other DNA
ttgcccgttgggcagcagagcgcgcgacttccagcgatctggcgcagattgaatcggcgctgaacgagatgattg

SEQ ID NO: 37389 - DNA, 75 bp, synthetic construct
  source 1..75: mol_type = other DNA
gggaccctgcagtctttaactccgagtcttgtgctgctcatttgccacaaaatcctggtacgccagctcaatcat

SEQ ID NO: 37390 - DNA, 75 bp, synthetic construct
  source 1..75: mol_type = other DNA
tggggcaatcatggacagtattatggttgtgggtgtttttgtgatgatgctgttatatggaggatatcttacctg

SEQ ID NO: 37391 - DNA, 75 bp, synthetic construct
  source 1..75: mol_type = other DNA
gtagtaatgtcagtatgctcggcaaagtgctgggagaaaccatcaaggatgcgttgggagaacacattcttgaac

SEQ ID NO: 37392 - DNA, 75 bp, synthetic construct
  source 1..75: mol_type = other DNA
gacgttataaggttgatgtaaggccacaagggacggaaggaaagcggattcgtaagatttttaccctgaagtcaa

SEQ ID NO: 37393 - DNA, 75 bp, synthetic construct
  source 1..75: mol_type = other DNA
aggcccaacgttaaccggctttaattctgcttacagaacgtcatcaaccagcgacacggtatcgatgaattacag

SEQ ID NO: 37394 - DNA, 75 bp, synthetic construct
  source 1..75: mol_type = other DNA
gtgagtgaatcaaaatgccaggttaatggcaacaagatagaaccatgtgcagcactggcaaagtcccttgagcat

SEQ ID NO: 37395 - DNA, 75 bp, synthetic construct
  source 1..75: mol_type = other DNA
ctgttggtatcggtgcaggtgttgacgcttcagttatgactctggcttgtagaacgtggcaagaatgctgggtca

SEQ ID NO: 37396 - DNA, 75 bp, synthetic construct
  source 1..75: mol_type = other DNA
ggcagttgccgtggtatatggtcatcggcccggcgggcagtggcaaaacgacactgctgcgcgaggggtttccgt

SEQ ID NO: 37397 - DNA, 75 bp, synthetic construct
  source 1..75: mol_type = other DNA
cagcgattacaccaaagaagaattacgcctgatgcatgcagaaggtgtttttcgcacgcaagaaatctggagaaa

SEQ ID NO: 37398 - DNA, 75 bp, synthetic construct
  source 1..75: mol_type = other DNA
ccactgagcagcaaaacctgagcgcgcgaaccgaaaaatctctgtctgagcaggaagaacgcctgtctgaactgg

SEQ ID NO: 37399 - DNA, 75 bp, synthetic construct
  source 1..75: mol_type = other DNA
tgtccatgcagagacagtttccggcactgacgcccgctatgcttgatttcctgaaaaccgatatagcaaaggcgg

SEQ ID NO: 37400 - DNA, 75 bp, synthetic construct
  source 1..75: mol_type = other DNA
ggcacagcgtgactatttcggtgcacatacttataagcgcattgataaagaaggtgtgttccatactgaatggct

SEQ ID NO: 37401 - DNA, 75 bp, synthetic construct
  source 1..75: mol_type = other DNA
cgcgctttagcccgcgtccggtgaaagcgcccgcaacgccgctggaaatcatttccgtcgcacgcttaaccgaga

SEQ ID NO: 37402 - DNA, 75 bp, synthetic construct
  source 1..75: mol_type = other DNA
gagcagcatcggggcgcagtatggtgaatttctcgggaacggcgacaatgtcggtaagctgttagaaggggaata

SEQ ID NO: 37403 - DNA, 75 bp, synthetic construct
  source 1..75: mol_type = other DNA
aggtatggcgatgtttgccccgcagtacaacatcgagatcaataacgatggcacgaacgggcagataggtccggc

SEQ ID NO: 37404 - DNA, 75 bp, synthetic construct
  source 1..75: mol_type = other DNA
cgcaaaattcacttctgcaacagaattctttgatgccctgaaacaagccgaacctgctggcaaggatattccaac

SEQ ID NO: 37405 - DNA, 75 bp, synthetic construct
  source 1..75: mol_type = other DNA
ctgggccttgtcgcctggcacttatttagcggtatgcgcatgtcgccaaagagtctggagaaagtacaggacaac

SEQ ID NO: 37406 - DNA, 75 bp, synthetic construct
  source 1..75: mol_type = other DNA
aatgcgctgactatccagaccgacgaccagcaaaattcgcgcacctggcagctctatctgaggcgttgtatttac

SEQ ID NO: 37407 - DNA, 75 bp, synthetic construct
  source 1..75: mol_type = other DNA
cctgaagcacaaagccgaaaccagcgggaccagggcgttacccgaaagccgggcgccaccggctgagctgctcct

SEQ ID NO: 37408 - DNA, 75 bp, synthetic construct
  source 1..75: mol_type = other DNA
atggctgagccgctacaactcccgccaccgcttgagggtgatatcagtctcagaacgctgggaagactcgccggg

SEQ ID NO: 37409 - DNA, 75 bp, synthetic construct
  source 1..75: mol_type = other DNA
atgagtgattcgcgcctgctgccgaccggctcatcaccgcttgaaattgctgccgcaaaagcctgtgcggaaatt

SEQ ID NO: 37410 - DNA, 75 bp, synthetic construct
  source 1..75: mol_type = other DNA
ttgctgatgctgaggcgagattacagcgcctgaaggcgaagagccggagcctggacacagcgcagaaggttgttg

SEQ ID NO: 37411 - DNA, 75 bp, synthetic construct
  source 1..75: mol_type = other DNA
tttcgtggacgaccctgacgccgggtaaaccaaatacgttgaatttttacgcccggctaatggcgacacaggtgc

SEQ ID NO: 37412 - DNA, 75 bp, synthetic construct
  source 1..75: mol_type = other DNA
tgtttctccggatgacgggggaagctgttatctctggctcaaccgtgggcaaccacccgctgttaaccggcgacg

SEQ ID NO: 37413 - DNA, 75 bp, synthetic construct
  source 1..75: mol_type = other DNA
tacccgcaccggatgtggtcgaggagctggactttgaaaccattctcgccgaacgcaaggcgacactgatttccc

SEQ ID NO: 37414 - DNA, 75 bp, synthetic construct
  source 1..75: mol_type = other DNA
tgaatttgaaggctcaaatgctatagatatagttattgctcggccagatatggataaaattattccggaatatct

SEQ ID NO: 37415 - DNA, 75 bp, synthetic construct
  source 1..75: mol_type = other DNA
attgcagcgccacgttcatcacttatgagtcggtacagcgatacatcgtgaagccgggagaagtccacgccgtaa

SEQ ID NO: 37416 - DNA, 75 bp, synthetic construct
  source 1..75: mol_type = other DNA
tgattaaagaaatcaaagagcgcataggcggcctggacgttcgagacaatattgagcgccgtgcttatgaaattg

SEQ ID NO: 37417 - DNA, 75 bp, synthetic construct
  source 1..75: mol_type = other DNA
gccatgaccgaacactattaccgcctgcgggactacgccctgcagcatccagaggcccacgccattatgcgtatc

SEQ ID NO: 37418 - DNA, 75 bp, synthetic construct
  source 1..75: mol_type = other DNA
aattaagggggtgcgttactcgtatcgtggtatgaagatgaaagaggagcatattgttccgcttagtcgtcaggc

SEQ ID NO: 37419 - DNA, 75 bp, synthetic construct
  source 1..75: mol_type = other DNA
taaagataacattaagcagcagattgccacgctaaatgactctcttgaaaaccaggagaaagttgctcaggagca

SEQ ID NO: 37420 - DNA, 75 bp, synthetic construct
  source 1..75: mol_type = other DNA
cgcaactgtacaggacattatcttccctgcgttacgtgctggatgagcaggataatccgcagactctcatcggtc

SEQ ID NO: 37421 - DNA, 75 bp, synthetic construct
  source 1..75: mol_type = other DNA
ctgtattttcccagaaccagacggtcagacgggcaatggagcagctgcgcgagattggatatcttgattacacgg

SEQ ID NO: 37422 - DNA, 75 bp, synthetic construct
  source 1..75: mol_type = other DNA
gtcagcgtcttccagcgcaggaacggcatcaacaaaggccactgaagcatcaaaaagtgctgccgctgcagagtc

SEQ ID NO: 37423 - DNA, 75 bp, synthetic construct
  source 1..75: mol_type = other DNA
cgtctggtacaggcactggccctggttgatatccgggtgccggaccatctgatagtcggtggcagccaggttttc

SEQ ID NO: 37424 - DNA, 75 bp, synthetic construct
  source 1..75: mol_type = other DNA
gcacccggcagatgacctggagccgctacgggcagttgctggcgttcaccgactgctcgggctaccagacccgtt

SEQ ID NO: 37425 - DNA, 75 bp, synthetic construct
  source 1..75: mol_type = other DNA
tgcggtttcgtgtcagggaacgcagtcgccataaatccgcgctggtcatgcagaagtacagccgccagcaggcga

SEQ ID NO: 37426 - DNA, 75 bp, synthetic construct
  source 1..75: mol_type = other DNA
tgtgtactacattgacccggataatgagagcgttgaaatctggggagtggttacgcattcccttatcgagcatcc

SEQ ID NO: 37427 - DNA, 75 bp, synthetic construct
  source 1..75: mol_type = other DNA
cttttgagccggaaagtgcaaccgacaagacgttcagagcggtttccgccgatccgtcgaaagccaccattagtg

SEQ ID NO: 37428 - DNA, 75 bp, synthetic construct
  source 1..75: mol_type = other DNA
ctctgcagcagcagcacttttcgatgcttcactggcctttgttgatgccgttcctgcgctggaagatgctgactg

SEQ ID NO: 37429 - DNA, 75 bp, synthetic construct
  source 1..75: mol_type = other DNA
ttgctcccggtaaaccgctggaaatcgttgaaattgacgttgcaccaccgaaaaaaggtgaagtgctgattaaag

SEQ ID NO: 37430 - DNA, 75 bp, synthetic construct
  source 1..75: mol_type = other DNA
acatcgccctcattaacctggtctggtgctccagaaggcaccaaaagctttgccgtaactgtgtatgatccagat

SEQ ID NO: 37431 - DNA, 75 bp, synthetic construct
  source 1..75: mol_type = other DNA
ggttcagatgatcgccgtggatggtggggtgacagttaccgcgaccgccccatcggttcgcggttgtggctgtta

SEQ ID NO: 37432 - DNA, 75 bp, synthetic construct
  source 1..75: mol_type = other DNA
ctctgcgttgcgataaattaaatctcaccctggatgatgtggtgtcatcctgccgcgattgcgttcttagtccgt

SEQ ID NO: 37433 - DNA, 75 bp, synthetic construct
  source 1..75: mol_type = other DNA
cctgccgtacagttccgtgtgaattataagaacggcggtattttttatcgttcagcacgtgatggttatggattt

SEQ ID NO: 37434 - DNA, 75 bp, synthetic construct
  source 1..75: mol_type = other DNA
gttccggcattttcttcctggtttgcagacaataaatgtggtgtggcagtactgaccggtgtccgtgcggatgag

SEQ ID NO: 37435 - DNA, 75 bp, synthetic construct
  source 1..75: mol_type = other DNA
aagggaaatttaccgttgatgaggttgaacaccggggcgcaccggatgtggtcaccatccgcgcccggagtgcag

SEQ ID NO: 37436 - DNA, 75 bp, synthetic construct
  source 1..75: mol_type = other DNA
attcttgttaagaccacgggcaccatgcagatgctgggacgtgccgcaggtgctcagactcagccggaagagggg

SEQ ID NO: 37437 - DNA, 75 bp, synthetic construct
  source 1..75: mol_type = other DNA
gcggaaacttgccggattgaagccggtgataaacaaatgacggtcaatatggggcaaatcagcagtaaccggttt

SEQ ID NO: 37438 - DNA, 75 bp, synthetic construct
  source 1..75: mol_type = other DNA
gcgtgaggagcaggcgcaggcggcggcactggctgctgctcaggataaagccgctgctgcattttatcgtcagat

SEQ ID NO: 37439 - DNA, 75 bp, synthetic construct
  source 1..75: mol_type = other DNA
attcccttgttgctctgctgaagtctgaaatgaagacgtacgggaacaaagcaccagagactcacaggagaatca

SEQ ID NO: 37440 - DNA, 75 bp, synthetic construct
  source 1..75: mol_type = other DNA
aatcagtgttgtttgccctggcagccgaaaaagggcaggcatgggtagccaatgcaattactgaagaatatctgc

SEQ ID NO: 37441 - DNA, 75 bp, synthetic construct
  source 1..75: mol_type = other DNA
ctgagcgggttaaaactggatgaagacaaaaagcgagtaatggaaataatgcagcaggttacattaaaacgttga

SEQ ID NO: 37442 - DNA, 75 bp, synthetic construct
  source 1..75: mol_type = other DNA
cggggctcagtaacgtaacaccgatacttggtactagtgataacggtaacggtacaaatctggcaattattggct

SEQ ID NO: 37443 - DNA, 75 bp, synthetic construct
  source 1..75: mol_type = other DNA
cgagctgaagaaaccagcgcagaatgtggtgatcagtaacacccagtcagcccgctgcacatcccggaacatctc

SEQ ID NO: 37444 - DNA, 75 bp, synthetic construct
  source 1..75: mol_type = other DNA
tgatcgcctttcgctttccgtgaaaatcaccctgccggacggaagcagacatccgatgattttttatgctgatat

SEQ ID NO: 37445 - DNA, 75 bp, synthetic construct
  source 1..75: mol_type = other DNA
gtgaaaatcatacccagagcactgagtgcaggtctggcgctggctgccgtacctgcacaggctttcgtcacctat

SEQ ID NO: 37446 - DNA, 75 bp, synthetic construct
  source 1..75: mol_type = other DNA
gcgagttgataaaccgtccggtggtgcatgcagatgagactaccctgaagatcctgaacacgaagaaaggcggta

SEQ ID NO: 37447 - DNA, 75 bp, synthetic construct
  source 1..75: mol_type = other DNA
gcgtcgaacctgttccatatcggtattctggggatttttgtcggtcacttcttcggtatgctgacgccgcactgg

SEQ ID NO: 37448 - DNA, 75 bp, synthetic construct
  source 1..75: mol_type = other DNA
atagccttgcccccttctggtcatcttatcagagcaaagtcatcggcgttcttgagcgtgcgctgcgtgagcagt

SEQ ID NO: 37449 - DNA, 75 bp, synthetic construct
  source 1..75: mol_type = other DNA
atgtatatgaatgtaatcagaactgtcatttgtacattaattatacttccggtgggactacaggcagcgaccagt

SEQ ID NO: 37450 - DNA, 75 bp, synthetic construct
  source 1..75: mol_type = other DNA
gccggcagacagaggccgggccagaagaacggctgcgtattgcactgctgaatgtggattacgtcaccagttttg

SEQ ID NO: 37451 - DNA, 75 bp, synthetic construct
  source 1..75: mol_type = other DNA
cgccggcgataaaaccgatgaatggctgcaaccggcctgtaatgaaatgtaccgcgtactcaaaaaagatgcgct

SEQ ID NO: 37452 - DNA, 75 bp, synthetic construct
  source 1..75: mol_type = other DNA
ggctttgacgggcggacgcaacgttaccactatgacctgaccggaaaactcacgcagagtgaagatgaggggctt

SEQ ID NO: 37453 - DNA, 75 bp, synthetic construct
  source 1..75: mol_type = other DNA
ttgtccggcaccagttacggcattgccgggctgctgatgctggcagtcagtcaccggctgtaccgggcggaagac

SEQ ID NO: 37454 - DNA, 75 bp, synthetic construct
  source 1..75: mol_type = other DNA
atctcattgtaatgttctttcctttgtttcttgggtggtacgccgcaaggttgctggaagaatggggttacaggc

SEQ ID NO: 37455 - DNA, 75 bp, synthetic construct
  source 1..75: mol_type = other DNA
cgggcgtccagggatttctggtatccgcccggacgttcgccgacagagtcgtttgtcatcaggctggaaaactgc

SEQ ID NO: 37456 - DNA, 75 bp, synthetic construct
  source 1..75: mol_type = other DNA
tggtgacgggcttaaccattgatacggggaataatcaacaggtcctgtttacccgccagccggatggcagtttta

SEQ ID NO: 37457 - DNA, 75 bp, synthetic construct
  source 1..75: mol_type = other DNA
ccctgctattgaacgaatttgtccaacggcatggattggcaatcaaacatgtgggtgaagttgccgagctgttta

SEQ ID NO: 37458 - DNA, 75 bp, synthetic construct
  source 1..75: mol_type = other DNA
gacggcgcggtgttccgctacgacgcggacgcaggcgcactgagcgccagcggcatgaaaacggccactttacag

SEQ ID NO: 37459 - DNA, 75 bp, synthetic construct
  source 1..75: mol_type = other DNA
cagtggcaatcctgtatggccagtcaattcaaccactggtttggtgaggaaaaaccgtctcctgacttactatgt

SEQ ID NO: 37460 - DNA, 75 bp, synthetic construct
  source 1..75: mol_type = other DNA
atgactatcgaccagcaaaccgctgacaggcttctgaaaacagggcttgttggttatgagaatgacgtgctgaaa

SEQ ID NO: 37461 - DNA, 75 bp, synthetic construct
  source 1..75: mol_type = other DNA
atgaaaactttgttatttatcttcatgaccatagcaatgttgctatggtttttaagtacgctaagacgtaaaccc

SEQ ID NO: 37462 - DNA, 75 bp, synthetic construct
  source 1..75: mol_type = other DNA
gggatctcgatgcgaaagagctcctcggcgacgaagctgatcagtacgtgaaagtgccggatacgctggatgtat

SEQ ID NO: 37463 - DNA, 75 bp, synthetic construct
  source 1..75: mol_type = other DNA
caaaagatgcctatgacaaccctgtgaccagcctcacgccggaagcgccgtcattagcgggtgccgctgctgtag

SEQ ID NO: 37464 - DNA, 75 bp, synthetic construct
  source 1..75: mol_type = other DNA
tgatgctgttgaaaaaatgcaggctctgttaccggcgatcgaaaaggcgatgccgcctttgctggtggcccgtat

SEQ ID NO: 37465 - DNA, 75 bp, synthetic construct
  source 1..75: mol_type = other DNA
gaaaaaatatcgggtgttgctgaaccgtgttaatacaacaactgcaccggatattgaatggccaacagtacccat

SEQ ID NO: 37466 - DNA, 75 bp, synthetic construct
  source 1..75: mol_type = other DNA
attgttaaaggtatggaaggcgcgatcaacgcgaagactgtaacctatgacttcgaacgtctgatggaaggcgct

SEQ ID NO: 37467 - DNA, 75 bp, synthetic construct
  source 1..75: mol_type = other DNA
cttcacaccaaaattccagcgtgttgacctgtttaactacaatacgctgatcaaaaactatgacagcagcgcatt

SEQ ID NO: 37468 - DNA, 75 bp, synthetic construct
  source 1..75: mol_type = other DNA
aggtagctctaacggtgtggaactaaccggactgcaactggacgaagaaaggaagcaagtgatgaaaattatgca

SEQ ID NO: 37469 - DNA, 75 bp, synthetic construct
  source 1..75: mol_type = other DNA
aagcagggcggcgcactggttaccagtacggctgcaaccgttaccggcataaaccgcctgggagcattctctgtt

SEQ ID NO: 37470 - DNA, 75 bp, synthetic construct
  source 1..75: mol_type = other DNA
tactggcctacacttttggtccccgaaccgatcaaacgtgccgggagctactggcactgcttacacccttcaaca

SEQ ID NO: 37471 - DNA, 75 bp, synthetic construct
  source 1..75: mol_type = other DNA
tctttgcggcacactatccgctatgataggtccagataaatttgattctatagatagcaccgcatatgacgcctt

SEQ ID NO: 37472 - DNA, 75 bp, synthetic construct
  source 1..75: mol_type = other DNA
gaaggagcgcatcctgaaagcggtttcgatgaagatttccaaactgaacagcaggccaatgctgaattcatcgcc

SEQ ID NO: 37473 - DNA, 75 bp, synthetic construct
  source 1..75: mol_type = other DNA
ccgttgctgaagcggtgtcccaggaaaatcagcgcgtgatggggatcctgaattgtcaggaggcgaaaggacgcg

SEQ ID NO: 37474 - DNA, 75 bp, synthetic construct
  source 1..75: mol_type = other DNA
gtgaatttcagctctgaactgcttaacaagggcaacaaaactcccgcattcagcatcagtattgagggcagggat

SEQ ID NO: 37475 - DNA, 75 bp, synthetic construct
  source 1..75: mol_type = other DNA
ggttagggatggactttattgaaacggtcagcgcgctgatgaatgcaacacccgggcgtgacctctgctggctcc

SEQ ID NO: 37476 - DNA, 75 bp, synthetic construct
  source 1..75: mol_type = other DNA
ccctggcgtatgtaatggcaaccctgaaacgtctgtactggcacatatccggctgactggattgtgcggcaccgg

SEQ ID NO: 37477 - DNA, 75 bp, synthetic construct
  source 1..75: mol_type = other DNA
agcgcgctgctgagacaacgacaacaccggatcgaggagctgaaacgtgagaacgaggatttacgccgctgggct

SEQ ID NO: 37478 - DNA, 75 bp, synthetic construct
  source 1..75: mol_type = other DNA
aacacaacgggttatctacctccgcgaaggctatgagcatgaatgcttcagtccgctcgaacagtttcgtcgtaa

SEQ ID NO: 37479 - DNA, 75 bp, synthetic construct
  source 1..75: mol_type = other DNA
tatgtcattccgtatacgttatgggcgtttgcaggtggatttcttatcgtatacgtcaggaaccctttaaatgaa

SEQ ID NO: 37480 - DNA, 75 bp, synthetic construct
  source 1..75: mol_type = other DNA
caactgccctgattgtggagcggtaatgggtgacgcaacctaccaagagacattcaacgaagaaagccaggatga

SEQ ID NO: 37481 - DNA, 75 bp, synthetic construct
  source 1..75: mol_type = other DNA
ggctacaaatataactcattttggtatagctctgtatcaggggaaagggagatcaactgagcttacattaggtga

SEQ ID NO: 37482 - DNA, 75 bp, synthetic construct
  source 1..75: mol_type = other DNA
agagaaagcgtccactccggcgcaacgccagcaggcgtctctggaagagcaaaacaacgatgcgttaagcccggc

SEQ ID NO: 37483 - DNA, 75 bp, synthetic construct
  source 1..75: mol_type = other DNA
aggaactgctggcgtggggatggcgtataccgttcctggcgagcgttgtcgtgatggtctttgctatctggttgc

SEQ ID NO: 37484 - DNA, 75 bp, synthetic construct
  source 1..75: mol_type = other DNA
aatgatagttagtcatgtggggcatacaccttcaggcgcaggaatcctgtcggcttctgcaattacatcaaatca

SEQ ID NO: 37485 - DNA, 75 bp, synthetic construct
  source 1..75: mol_type = other DNA
tgtacttctgtacggcagtctgtgttatgtatcttctttcgggtgggtacagggcagtgcgcgatttctggcgca

SEQ ID NO: 37486 - DNA, 75 bp, synthetic construct
  source 1..75: mol_type = other DNA
gatcaccggtatacaggtgccggaaattattctactcaactctcacgatggaaccagttcgtatcagatgttgcc

SEQ ID NO: 37487 - DNA, 75 bp, synthetic construct
  source 1..75: mol_type = other DNA
ttaccgcaagggtttggctctggtctggtagcaatgccagacggcgttttgcagacgcgtaccgactttggtaaa

SEQ ID NO: 37488 - DNA, 75 bp, synthetic construct
  source 1..75: mol_type = other DNA
aaatctgcatacccgaaacttgcagccgcttatccgtcaggcgtgatccctgatatgcgtggctggacgattaag

SEQ ID NO: 37489 - DNA, 75 bp, synthetic construct
  source 1..75: mol_type = other DNA
gctgacggtttccgtaactatcgcgctcgtctggatgtttccaccaccgagtcactgctgatcgacaaagcccag

SEQ ID NO: 37490 - DNA, 75 bp, synthetic construct
  source 1..75: mol_type = other DNA
ccgcaggcattactggcaacgctggtgtcgacaaccatcgcggcggtcggggcgttgttgattgccctgctggtg

SEQ ID NO: 37491 - DNA, 75 bp, synthetic construct
  source 1..75: mol_type = other DNA
ccaccagcacagcacgctctggcgaatgccgcgctgaaatatcgctttggtgaggaccaccagccggtcacggta

SEQ ID NO: 37492 - DNA, 75 bp, synthetic construct
  source 1..75: mol_type = other DNA
cgggcgagggtgaccgatgcgttcggcaatgcgcttgccgggcagacggtcagcgtgactgcaggcaacagcgca

SEQ ID NO: 37493 - DNA, 75 bp, synthetic construct
  source 1..75: mol_type = other DNA
acgaatttcgggattgtgtttggcgcattcgcgggggcgttgttcgtggcaacgatgccccaggcgctttcagcc

SEQ ID NO: 37494 - DNA, 75 bp, synthetic construct
  source 1..75: mol_type = other DNA
agcacggggctgacaactggaaaatccagccgggagcaccgttatatgatacgattgttattgtcactggtgaga

SEQ ID NO: 37495 - DNA, 75 bp, synthetic construct
  source 1..75: mol_type = other DNA
ctggcagtcgtggcggcttaacagcgccagccacaccatcgaaacgcagcgcgcggcgctgaaaagtaaagcgca

SEQ ID NO: 37496 - DNA, 75 bp, synthetic construct
  source 1..75: mol_type = other DNA
atgagccggttacacataaaaccggtatgggcgcttgccaacgacatgaactgcagtgcaggtcagttgcttgcc

SEQ ID NO: 37497 - DNA, 75 bp, synthetic construct
  source 1..75: mol_type = other DNA
acggatttcgggattgtgtttggtgcgttcgccggggcgttatttgtggcaacgatgccgcaggcgctttcagcc

SEQ ID NO: 37498 - DNA, 75 bp, synthetic construct
  source 1..75: mol_type = other DNA
tgcaaactttgagggtgctatattaactaattcaaccttttgcaatgcagacgttaaagattcaaatttttctgg

SEQ ID NO: 37499 - DNA, 75 bp, synthetic construct
  source 1..75: mol_type = other DNA
aaaccaacaaccgggagcaggcgcggctctacgccgaagcagaacagaccagcgcactgctgagacaacgacaac

SEQ ID NO: 37500 - DNA, 75 bp, synthetic construct
  source 1..75: mol_type = other DNA
aggggtcggtggtacgcacgttatgtacgtgctgcatcacgccgatcagccggagctgtatcacggtctgccgaa

SEQ ID NO: 37501 - DNA, 75 bp, synthetic construct
  source 1..75: mol_type = other DNA
gactaacttatctgatccaagcaagactattcctttagaggtttcattcgctggcactaagctgagcacagctgc

SEQ ID NO: 37502 - DNA, 75 bp, synthetic construct
  source 1..75: mol_type = other DNA
ttccgtaccttcggttttggtgccggtcgtgaagacgtctgggaaccggatctggatgttaactggggtgatgaa

SEQ ID NO: 37503 - DNA, 75 bp, synthetic construct
  source 1..75: mol_type = other DNA
ccagcccagctacggcttggctgggatgaggaagacgggattgtactggagttcgctacggaagagatgcaataa

SEQ ID NO: 37504 - DNA, 75 bp, synthetic construct
  source 1..75: mol_type = other DNA
aattccagttaaacataatgcggacacgcaatcactggaaaatgtctcatctgtagaaacgaaataccaggaact

SEQ ID NO: 37505 - DNA, 75 bp, synthetic construct
  source 1..75: mol_type = other DNA
gtataaaccagatacgccgtgaccgtcctctgacccatgaagagctgatgagtcatgttcccagtgtattcggga

SEQ ID NO: 37506 - DNA, 75 bp, synthetic construct
  source 1..75: mol_type = other DNA
gtctccggcgatgacattattaataatgcggagaaaacccaggatctgaccatcagcggcggctccagcggtctg

SEQ ID NO: 37507 - DNA, 75 bp, synthetic construct
  source 1..75: mol_type = other DNA
gactttgctgaactgttgctggaagactacaaagcctccctgaaatatctcagcgatcacccgaaactgcagggt

SEQ ID NO: 37508 - DNA, 75 bp, synthetic construct
  source 1..75: mol_type = other DNA
aaacggcatggtttggtcggggtgctgttggggctttaaccgatgaggtgaaacgccgtggttatcagaaggcgc

SEQ ID NO: 37509 - DNA, 75 bp, synthetic construct
  source 1..75: mol_type = other DNA
ataaatacatcccttacgggaaaatggcttcctggctggttgagtggaaaaatgccactgaaacgcaatggctta

SEQ ID NO: 37510 - DNA, 75 bp, synthetic construct
  source 1..75: mol_type = other DNA
agcgcgctgctgagacaacgacaacgccggattgaggaactgaaacgtgagaatgaggatttacgccgctgggct

SEQ ID NO: 37511 - DNA, 75 bp, synthetic construct
  source 1..75: mol_type = other DNA
cgctgacggcagcgaagggtatacgcgtaatggcagcattcaggttgatcccaccgggcaactgacaattcaggg

SEQ ID NO: 37512 - DNA, 75 bp, synthetic construct
  source 1..75: mol_type = other DNA
agccgaacagatggcagaacaggcagttgcagatctatttggtgcgcttccagaaccgtcaggactggttaaagc

SEQ ID NO: 37513 - DNA, 75 bp, synthetic construct
  source 1..75: mol_type = other DNA
atatcgtattaccgatcaccacatcgtttgagcgcaatgacttgacgatgaccggtgattacagcaaccagcata

SEQ ID NO: 37514 - DNA, 75 bp, synthetic construct
  source 1..75: mol_type = other DNA
ttacaatccacatccggcacacgccaaacgcattgaagaaatcgtttcagagaataagccgcccttttctgtttt

SEQ ID NO: 37515 - DNA, 75 bp, synthetic construct
  source 1..75: mol_type = other DNA
aacaggtcttgagttatacgaggtgtataacaacggatatccaacagcgtatggaaatatcattcacctgaaagg

SEQ ID NO: 37516 - DNA, 75 bp, synthetic construct
  source 1..75: mol_type = other DNA
gaccctggcgaaaacattccgggaagagtggcagtatttacaggtaagggatggagccttgaagaagaccatcgc

SEQ ID NO: 37517 - DNA, 75 bp, synthetic construct
  source 1..75: mol_type = other DNA
gacgtcaggagctggcacaggatgagattaacccggacgtcctggcgatgagcggtcatatcgccagacgctgca

SEQ ID NO: 37518 - DNA, 75 bp, synthetic construct
  source 1..75: mol_type = other DNA
caaaggatgcgcagcgttatctctgccgtatctggagcctgatgcgcacggcattcaaggataatgatttacagg

SEQ ID NO: 37519 - DNA, 75 bp, synthetic construct
  source 1..75: mol_type = other DNA
atatgagaaaagcttaactttccgaagaataattaattattatgtgaaggaaataaacttaagtgattatggctt

SEQ ID NO: 37520 - DNA, 75 bp, synthetic construct
  source 1..75: mol_type = other DNA
caaccgtaaattatgacgggaaaaaattcacgtatccggtcgctaatgagtggtcggttttttcaattaaacaat

SEQ ID NO: 37521 - DNA, 75 bp, synthetic construct
  source 1..75: mol_type = other DNA
cctgagtaaattaccacaggggattagtatgattatctccgcaatggctactcgttttattattcgacgtattcc

SEQ ID NO: 37522 - DNA, 75 bp, synthetic construct
  source 1..75: mol_type = other DNA
gaacaggtaatccctgaaaatgagggcggttggtggatacgtgaagtgggcctgtttgatgagtccggggcattg

SEQ ID NO: 37523 - DNA, 75 bp, synthetic construct
  source 1..75: mol_type = other DNA
gacatcatccggataaacgcagtgcccatgcgcagcacgatgactggctgaagaaagagatacagcgcgtatacg

SEQ ID NO: 37524 - DNA, 75 bp, synthetic construct
  source 1..75: mol_type = other DNA
tgtacatggttttgaatcaggcccgtttattccgcctaaagacccaaatcaagaaattggcctgggtcatgaatg

SEQ ID NO: 37525 - DNA, 75 bp, synthetic construct
  source 1..75: mol_type = other DNA
attgcacagtactatgaattcctgcgcctcggtcgtgaaggctataccaaagtacagaacgcctcttaccaggtt

SEQ ID NO: 37526 - DNA, 75 bp, synthetic construct
  source 1..75: mol_type = other DNA
ctgatccactgggattttggtgtttccagcattaacggtcaaccgattgccgaacagttaaaagaggtcttcccg

SEQ ID NO: 37527 - DNA, 75 bp, synthetic construct
  source 1..75: mol_type = other DNA
ctaccgcggctacgtgcgtgaaaacaaagattttgtgccttacttccgctctgccacgccggagcaggaactcgg

SEQ ID NO: 37528 - DNA, 75 bp, synthetic construct
  source 1..75: mol_type = other DNA
agagccatcggcaagtatattgatgtctggcattatcctgacggacataaggagctgcgactaaatggcgtgctg

SEQ ID NO: 37529 - DNA, 75 bp, synthetic construct
  source 1..75: mol_type = other DNA
cgtctgacgcaatggcagatgaacaggcaacgactgaagcaatggagccgaatacaactgaacatcgccaggaca

SEQ ID NO: 37530 - DNA, 75 bp, synthetic construct
  source 1..75: mol_type = other DNA
cctccagctaccagatgttacccggatattttcgtgccatttgtaccaatggcctggtctgcggtcagtcactgg

SEQ ID NO: 37531 - DNA, 75 bp, synthetic construct
  source 1..75: mol_type = other DNA
atctgcagccatcgacctgcgttgcgtaaacatggttgccgatctgtggcatgcgcctgcaccgaaaaatggtca

SEQ ID NO: 37532 - DNA, 75 bp, synthetic construct
  source 1..75: mol_type = other DNA
ccatcatttgtcagtgccggccggttgatgaccgaacgggagcagcgctttctgcgccggctggacagggtgact

SEQ ID NO: 37533 - DNA, 75 bp, synthetic construct
  source 1..75: mol_type = other DNA
tgtgtccgcaggtacgggtcgcagatatcgtccagctgaacgggaatatccggccacgatcacgccagtggtggc

SEQ ID NO: 37534 - DNA, 75 bp, synthetic construct
  source 1..75: mol_type = other DNA
ttacttcaggttcgtctgccagaacggatgcgtctgtggtcagtctctgggggaagtgcgtgttccgcaccgggg

SEQ ID NO: 37535 - DNA, 75 bp, synthetic construct
  source 1..75: mol_type = other DNA
atacaaaccagatacgccgtgaacgtccactgacacatgaagagctgatgcactatgttcccagtatttttggag

SEQ ID NO: 37536 - DNA, 75 bp, synthetic construct
  source 1..75: mol_type = other DNA
cgcgaaaacgaaaggccgtggacgtaaggccgcgcagccggggcctcagcagccgtctgaacccgcgtatgactt

SEQ ID NO: 37537 - DNA, 75 bp, synthetic construct
  source 1..75: mol_type = other DNA
ctttggcgtgagtgggttgaatttcgccaggcattgcgaaaaccgattcgaacggagcagggcgctaacggggcg

SEQ ID NO: 37538 - DNA, 75 bp, synthetic construct
  source 1..75: mol_type = other DNA
caatgcaggagtctgccacccgtcagcgtgaacaggatactattcggaagtttactgaagggaataaatccgaat

SEQ ID NO: 37539 - DNA, 75 bp, synthetic construct
  source 1..75: mol_type = other DNA
ccgctaaaaattacccatatggcggtcggcgatggcggcggagtattaccgacgccggacgcaaagcagacggca

SEQ ID NO: 37540 - DNA, 75 bp, synthetic construct
  source 1..75: mol_type = other DNA
tcgttgttgctggaaaccgacgcgccggatatgccgctcaacggttttcaggggcagcctaaccgcccggaacag

SEQ ID NO: 37541 - DNA, 75 bp, synthetic construct
  source 1..75: mol_type = other DNA
ccccaatggctctacgttagatattgcgatgcctcaggcggagattgggtcgtacaggacgtcatttatcattac

SEQ ID NO: 37542 - DNA, 75 bp, synthetic construct
  source 1..75: mol_type = other DNA
aggccgctgttttgctgatattcagccaatgaccgatgaatttggctggccgcgccgtaacgcctttattcagcc

SEQ ID NO: 37543 - DNA, 75 bp, synthetic construct
  source 1..75: mol_type = other DNA
gcggaagccgatcacttcaaacagttcctgcgtcagattaagcgtgccggcctcgatatccgggcgatctgctga

SEQ ID NO: 37544 - DNA, 75 bp, synthetic construct
  source 1..75: mol_type = other DNA
tatggtgaaattagtggaaatgtagatacagaaacccgtccacgaaatattgcatttaactttctggtgagggct

SEQ ID NO: 37545 - DNA, 75 bp, synthetic construct
  source 1..75: mol_type = other DNA
atgagtacccgaaatatccacgttaacaccgcgtcgtacacaattcttgttgccgggagggaaaaaaacaccggg

SEQ ID NO: 37546 - DNA, 75 bp, synthetic construct
  source 1..75: mol_type = other DNA
atatcagcataacggtaaagaacaaacgtatccgaatatcaaaatgatctggtgggcgggtggcggtaactttac

SEQ ID NO: 37547 - DNA, 75 bp, synthetic construct
  source 1..75: mol_type = other DNA
tgtgctgacagaggctgccattgacgagccacgatttgaacgtgatggcctgcttattgaggggcaaagaactaa

SEQ ID NO: 37548 - DNA, 75 bp, synthetic construct
  source 1..75: mol_type = other DNA
cgcttaccaatttgagtggaaaggatgtggctggtcttctcgcataccttggtttgggaaaagcggctaaaagga

SEQ ID NO: 37549 - DNA, 75 bp, synthetic construct
  source 1..75: mol_type = other DNA
ggggcttacgaggtagtgggcgtgtttgaccggattgaggaaaagcgtgatgccatacagtcgctgattctgccg

SEQ ID NO: 37550 - DNA, 75 bp, synthetic construct
  source 1..75: mol_type = other DNA
tgggggaagtgcgtgttccacaccggggaaatgtggtggagaaagttattgaaggggcttacgaggtggtggggg

SEQ ID NO: 37551 - DNA, 75 bp, synthetic construct
  source 1..75: mol_type = other DNA
ccgctaaaaattacccatatggcggtaggcgatggcggcggaacattgccaacgccggacgcaaagcagactgca

SEQ ID NO: 37552 - DNA, 75 bp, synthetic construct
  source 1..75: mol_type = other DNA
gtcgttctgcgctttgatagtgtgaacgttcgcgtggtgtatctgaacggcgatccgtggtttgttgcaaaggat

SEQ ID NO: 37553 - DNA, 75 bp, synthetic construct
  source 1..75: mol_type = other DNA
gtgggaaagctcgcaaatcccggccattatgccgggatttttttgtgcacagaaaacccccggctaggctggggg

SEQ ID NO: 37554 - DNA, 75 bp, synthetic construct
  source 1..75: mol_type = other DNA
cagtcggttaatgaacgaacggaagagagagaagcgtgtcctggctgtcgagcatgaatacattttgcaggtgac

SEQ ID NO: 37555 - DNA, 75 bp, synthetic construct
  source 1..75: mol_type = other DNA
gaaaagcgtgatgccatgcagtcgctggtcctgccgccaccggcacgccaggcgctggcacaggcggcactgact

SEQ ID NO: 37556 - DNA, 75 bp, synthetic construct
  source 1..75: mol_type = other DNA
acctccagctaccagatgctgccgggttacttcaggttcgtctgtcagaacgggtgcgccgtgtcggcgtggtaa

SEQ ID NO: 37557 - DNA, 75 bp, synthetic construct
  source 1..75: mol_type = other DNA
gctgaacctggtgtttggtgttctggtggtgcgtgcgcgcggtaatgtttcaaaaatttttgccttactgagtgg

SEQ ID NO: 37558 - DNA, 75 bp, synthetic construct
  source 1..75: mol_type = other DNA
catcatgaaattctcggtttttccatcaacccggtcagcttccaggcgcttaacccgttctgggtggtactcgcc

SEQ ID NO: 37559 - DNA, 75 bp, synthetic construct
  source 1..75: mol_type = other DNA
gtcacatacccgtgccgttcgtggtattgacggggacgtgaaacttaaccgggcactatgggtgatggcggaagc

SEQ ID NO: 37560 - DNA, 75 bp, synthetic construct
  source 1..75: mol_type = other DNA
ttacggcgtatgcaatggtaatcctgaaactacagttctggcacattaccggatggctggaatttgcggaacggg

SEQ ID NO: 37561 - DNA, 75 bp, synthetic construct
  source 1..75: mol_type = other DNA
cgaaggtagcggcattggcctggcgatagtgaaatcgattgttgtcgcgcataaaggcacggttgcggtaacgtc

SEQ ID NO: 37562 - DNA, 75 bp, synthetic construct
  source 1..75: mol_type = other DNA
tgttgttgattttgggaatattaatcctgagcacgtggacaactcacgtggtgaagtcacaaaaaccataagcat

SEQ ID NO: 37563 - DNA, 75 bp, synthetic construct
  source 1..75: mol_type = other DNA
ataaaggaatcgatcgccagctaccgtaacgttgctcttttgctacttaatccccggggagaggtgctgtacagc

SEQ ID NO: 37564 - DNA, 75 bp, synthetic construct
  source 1..75: mol_type = other DNA
gcaggtaaacaaccgctggacaatacgctgaataatttgagtggaaaggatgtagaaggaattcttacttatctt

SEQ ID NO: 37565 - DNA, 75 bp, synthetic construct
  source 1..75: mol_type = other DNA
aacattgacggcagcatccatcgctgggcaaaaaaagaagttatcgacaacgaccgcgaagactggaagcgtgag

SEQ ID NO: 37566 - DNA, 75 bp, synthetic construct
  source 1..75: mol_type = other DNA
atggcaaccaatgtaggtttaccagaggggtttgttctggatgaacagcctgataactcacaacttcctgatggc

SEQ ID NO: 37567 - DNA, 75 bp, synthetic construct
  source 1..75: mol_type = other DNA
attcacgtatccggtcgctgatgagtggccgggatattcaactataacagagtggaatcaatttgatgacgggta

SEQ ID NO: 37568 - DNA, 75 bp, synthetic construct
  source 1..75: mol_type = other DNA
atgtcaaagctgatgattgtgctggtcgtgttgttatcgctggcggtggcgggtctgtttctggcgaagcataaa

SEQ ID NO: 37569 - DNA, 75 bp, synthetic construct
  source 1..75: mol_type = other DNA
cacagcgccagtcactgattgatgcagcaatggcttccattagtctgattcagctgaaattacaggccggacgga

SEQ ID NO: 37570 - DNA, 75 bp, synthetic construct
  source 1..75: mol_type = other DNA
tctataccggagtcggaagttgccggaccttgcagatgaaggcgcattacagaaatggtggtctgttctaccgtt

SEQ ID NO: 37571 - DNA, 75 bp, synthetic construct
  source 1..75: mol_type = other DNA
aggaggacatttatctgaaaatgtcccctggggaggaaaaggtgaaagcacaccagaaaatggttaactacattg

SEQ ID NO: 37572 - DNA, 75 bp, synthetic construct
  source 1..75: mol_type = other DNA
atgacaaaatttggaaagctggaagctcatttgctaactcgtaactaccgccatgatatacacccatatagacag

SEQ ID NO: 37573 - DNA, 75 bp, synthetic construct
  source 1..75: mol_type = other DNA
acactatgcgtacattcccactatcaccgtcctggaaaatctgcagcaggaaggctttcagccgttctttgcctg

SEQ ID NO: 37574 - DNA, 75 bp, synthetic construct
  source 1..75: mol_type = other DNA
cgggggcggtcggaccaaaaggtgagccggggccaaagggagaacggggagaaacaggtccacagggaccgaagg

SEQ ID NO: 37575 - DNA, 75 bp, synthetic construct
  source 1..75: mol_type = other DNA
atcatgatgccggacgctggctgcgttttggtgaaggaaaaatgccggtggtactgcagcagggggctgacggat

SEQ ID NO: 37576 - DNA, 75 bp, synthetic construct
  source 1..75: mol_type = other DNA
atgcatagcaaaccgtccagacgacctttctcactcgctctgcggctgaccttttttatcagcctgtccacaata

SEQ ID NO: 37577 - DNA, 75 bp, synthetic construct
  source 1..75: mol_type = other DNA
attcatgtcacttgcaaccacagtgaaggagagcaagttacagagacgcatgtacacgcagaaagctctctggta

SEQ ID NO: 37578 - DNA, 75 bp, synthetic construct
  source 1..75: mol_type = other DNA
cagtcgtgccggatgcagacggtaaaggcgcaggcacactgacggacgcctctgacaccctgcttgcccgctacg

SEQ ID NO: 37579 - DNA, 75 bp, synthetic construct
  source 1..75: mol_type = other DNA
cacgcctctgcggaaaaattacaagagcttgccgatcacaatatgtatcaggccaaacaccagcgtgccgaaaag

SEQ ID NO: 37580 - DNA, 75 bp, synthetic construct
  source 1..75: mol_type = other DNA
tcaggtagtggattttgaccctacttgcgttcgtactttttacaatgttgatcaactgaaattactggaagacaa

SEQ ID NO: 37581 - DNA, 75 bp, synthetic construct
  source 1..75: mol_type = other DNA
gagcttgaggcgctggcgcgtggggcaaccgtaaattatgagggggtaaacttcaggtatccggtaaatgatgag

SEQ ID NO: 37582 - DNA, 75 bp, synthetic construct
  source 1..75: mol_type = other DNA
gttcaggtgaaatggggagaagaggaaaatgctcactgtgtcgccaattatcaactgccaccagagagtcagcag

SEQ ID NO: 37583 - DNA, 75 bp, synthetic construct
  source 1..75: mol_type = other DNA
tgtaaaactctcgttgattaccaacgataaaataaccggtaacgataaggcgatagccagtagcaacgataccgt

SEQ ID NO: 37584 - DNA, 75 bp, synthetic construct
  source 1..75: mol_type = other DNA
gacaacgccgacgaggcgctaaaaccgggcatgaacgcctggttgcaactcaacaccgccagcgaaccgatgctg

SEQ ID NO: 37585 - DNA, 75 bp, synthetic construct
  source 1..75: mol_type = other DNA
attcaccagaacgcgtctctctgctgccgatcgccccgggcgttgattttgcgaccgcggtggcactccggcgga

SEQ ID NO: 37586 - DNA, 75 bp, synthetic construct
  source 1..75: mol_type = other DNA
gaaaaagtgcgggcacgtcgtggccggccgccaaaagatgaagtgcgtctggtaccgctgacggatgccagtttt

SEQ ID NO: 37587 - DNA, 75 bp, synthetic construct
  source 1..75: mol_type = other DNA
aacagccacgatttcgttattcagttctggcccgctgcgtggcgtgggcaaatatctctgttcaggttctttttc

SEQ ID NO: 37588 - DNA, 75 bp, synthetic construct
  source 1..75: mol_type = other DNA
cgcagacactggcaaacaaggcgagatattgagattgcaatcttcgaatatataaatggcttttataatccacgc

SEQ ID NO: 37589 - DNA, 75 bp, synthetic construct
  source 1..75: mol_type = other DNA
gatcaccgcgtttgatctgcgcgcgggaatgaatatcgccaaagataacgtggtcgcgaaaattcagggtatgga

SEQ ID NO: 37590 - DNA, 75 bp, synthetic construct
  source 1..75: mol_type = other DNA
acctgacacttcaggaccggctggttaaggagctcaggcttaaagggatcagtacgatagaagccgcgaatgcat

SEQ ID NO: 37591 - DNA, 75 bp, synthetic construct
  source 1..75: mol_type = other DNA
ttgattctacgattacggatttattagaaaaaccattgaataatgcattattagcaataaggaaagaacatctgc

SEQ ID NO: 37592 - DNA, 75 bp, synthetic construct
  source 1..75: mol_type = other DNA
gcgaggctaataatgatggtgtaagccttgctaactggcttaaagagttagggcgctccgaactaaagcggcgcg

SEQ ID NO: 37593 - DNA, 75 bp, synthetic construct
  source 1..75: mol_type = other DNA
ctggtggaggagttgcgcgaacgaggcatcaactttcgtagtctgacggattcaattgataccagcacaccaatg

SEQ ID NO: 37594 - DNA, 75 bp, synthetic construct
  source 1..75: mol_type = other DNA
gcatggcgattcccggaaggtacatcggaagaacagattgataaaaccgttgatgattttattaacgaggttatc

SEQ ID NO: 37595 - DNA, 75 bp, synthetic construct
  source 1..75: mol_type = other DNA
tctcgacaacaaagacgccagactttaccacctcgaaggcgtgatcaggacgcaggcgatactactgaaggaggg

SEQ ID NO: 37596 - DNA, 75 bp, synthetic construct
  source 1..75: mol_type = other DNA
gcaggtaaacaaccgctggacaatacgctgactaatttgagtggaaaggatgttgctggtcttctcgcatacctt

SEQ ID NO: 37597 - DNA, 75 bp, synthetic construct
  source 1..75: mol_type = other DNA
accgaattagccccgcacatggacgcagagcaaacagcagccgtccagtgctggctgatgaaggttttggctatt

SEQ ID NO: 37598 - DNA, 75 bp, synthetic construct
  source 1..75: mol_type = other DNA
tgcggtttcgtgtcagggaacgcagtcgccataaatccgcgctggttatgcagaagtacagccgccagcaggtac

SEQ ID NO: 37599 - DNA, 75 bp, synthetic construct
  source 1..75: mol_type = other DNA
tacagggcagatggttgcatcaggggattatctcgatgtaaccactccacagattgaggctggtacaggcgcatc

SEQ ID NO: 37600 - DNA, 75 bp, synthetic construct
  source 1..75: mol_type = other DNA
aaatgaaattatagagataaaaagaataatgggagaatacaatcttttaccggataaaaacagtcgtaatggtct

SEQ ID NO: 37601 - DNA, 75 bp, synthetic construct
  source 1..75: mol_type = other DNA
cagctccagcgcctgcaatctgccgcccaaggcgcggacggccaactggccgccattggttacgctaaccagctc

SEQ ID NO: 37602 - DNA, 75 bp, synthetic construct
  source 1..75: mol_type = other DNA
tattggtccccacggacacaccatcaccgttaacgctacgggtaacgaagaaaacaccgtaaaaaacatcgcatt

SEQ ID NO: 37603 - DNA, 75 bp, synthetic construct
  source 1..75: mol_type = other DNA
gaatggagtggctggcccggcattccaggttataaaagacagtctgacactgggactgaatgcgctgacgctgac

SEQ ID NO: 37604 - DNA, 75 bp, synthetic construct
  source 1..75: mol_type = other DNA
ggacgtggcctattaccgcagctcgccttgtttctcggcggcgggatgcagtgatgccgaacgagccgcgatggc

SEQ ID NO: 37605 - DNA, 75 bp, synthetic construct
  source 1..75: mol_type = other DNA
cgaaggtgagttattcattggctggagtggcacgagcggtgaccatgcgcccgtacatatccgttcgcggcgtga

SEQ ID NO: 37606 - DNA, 75 bp, synthetic construct
  source 1..75: mol_type = other DNA
atgaacataactaccatctatcgccacccggcagagctggaagccgaagcgatgttatcccgcgagcaggcttac

SEQ ID NO: 37607 - DNA, 75 bp, synthetic construct
  source 1..75: mol_type = other DNA
atgagcgacacaacgatcctgcaaaacagtacccatgtcattaaaccgaaaaaatcggtagcactttctggcgtt

SEQ ID NO: 37608 - DNA, 75 bp, synthetic construct
  source 1..75: mol_type = other DNA
ccgtccgttcccgtgcccgtgtggccatccacaccaccggcggtcgcgtaactgggcaacatcaccgtttacctg

SEQ ID NO: 37609 - DNA, 75 bp, synthetic construct
  source 1..75: mol_type = other DNA
gaaatattatgcgaccctgctgctcgacaatatggcccgccgtcgagcccccgatgttaacatattggatttgta

SEQ ID NO: 37610 - DNA, 75 bp, synthetic construct
  source 1..75: mol_type = other DNA
ccctgtacatctcaatacctgggaaggtatttatttcaatcacaatcctgattacatcatgcagatggctgagcg

SEQ ID NO: 37611 - DNA, 75 bp, synthetic construct
  source 1..75: mol_type = other DNA
cgtatatcccgaataacgcggggatcctgctggtaccatgctgtcgtggtggttctgcattcacccagggcgctg

SEQ ID NO: 37612 - DNA, 75 bp, synthetic construct
  source 1..75: mol_type = other DNA
agattgttgatgaagtctgcgattttgtggcgaatcagcaggcggttttcctctgtggtcactacatccttcatg

SEQ ID NO: 37613 - DNA, 75 bp, synthetic construct
  source 1..75: mol_type = other DNA
cctggaaagaccagttgcgaatggtcgtctggatattgatacgccactgacactgatcgctgaaaatgcccttgg

SEQ ID NO: 37614 - DNA, 75 bp, synthetic construct
  source 1..75: mol_type = other DNA
gcgaagtatggtaccggcagtgaaattcagcggggtatccaggccgcgcttcaggggctggcggggggtaattta

SEQ ID NO: 37615 - DNA, 75 bp, synthetic construct
  source 1..75: mol_type = other DNA
acaaattaacccgtacatcaaagtcgatataccggaaacaacgcgcggcgctctttactcgttcgtttacaacgt

SEQ ID NO: 37616 - DNA, 75 bp, synthetic construct
  source 1..75: mol_type = other DNA
gccattcatggtgcgccacagaacaatcacgcacaggcccaacgcatcgataccgattatcagcgcctcaaaaaa

SEQ ID NO: 37617 - DNA, 75 bp, synthetic construct
  source 1..75: mol_type = other DNA
ctgtcggtgcagatcccttccgaaggtgaaaaaaaacgccgtgatgagcagttcgcggcgttttacgattattgc

SEQ ID NO: 37618 - DNA, 75 bp, synthetic construct
  source 1..75: mol_type = other DNA
ttctgacgggcggatgttctttcgcagtgatttcgtcaatatgaacgtcggcagtttctccactaatgccgatgg

SEQ ID NO: 37619 - DNA, 75 bp, synthetic construct
  source 1..75: mol_type = other DNA
tggttcatttttaaaagaggccagggggcttataaccgatactccttctgataaggttaacgtctgtcttttcga

SEQ ID NO: 37620 - DNA, 75 bp, synthetic construct
  source 1..75: mol_type = other DNA
gtatggaacggccagacgctgacgttcgttcaggaccgtccgtcggatgtggtgtggccgtacaccaacagcgat

SEQ ID NO: 37621 - DNA, 75 bp, synthetic construct
  source 1..75: mol_type = other DNA
gataatacagtgttattaaagggcctaaaaaacattgtgtctgtcaaattttcaaaggataggcatcttatagaa

SEQ ID NO: 37622 - DNA, 75 bp, synthetic construct
  source 1..75: mol_type = other DNA
gactgaatccgatccgatgaacgtcacttttgacaagctggcccctgaagtacagaacgctgtcatggttaagtt

SEQ ID NO: 37623 - DNA, 75 bp, synthetic construct
  source 1..75: mol_type = other DNA
ccagacacattcactcccgcagattgcgcgactgaacggcttaccagagcgcgcacaggtctggttcatgtgatg

SEQ ID NO: 37624 - DNA, 75 bp, synthetic construct
  source 1..75: mol_type = other DNA
ttgtgctgttatcgctggcggtggcggggctgtttctggtgaagcatgaaaacgccagcctgcgcgcctcgctgg

SEQ ID NO: 37625 - DNA, 75 bp, synthetic construct
  source 1..75: mol_type = other DNA
gccagcgttaaagggatgaatgaatctgctgatggtgccatgaatttagttaagaccagtaatggttggaaagcc

SEQ ID NO: 37626 - DNA, 75 bp, synthetic construct
  source 1..75: mol_type = other DNA
taaaccctcaatggccattggttcccatcaatgggaattgccggatcattggtgtggctgtagaaactaagttga

SEQ ID NO: 37627 - DNA, 75 bp, synthetic construct
  source 1..75: mol_type = other DNA
acgtctggacaaacttgagtcggttatggtgccggtatatgcgcagaaaaccggaaaaactaccgatgaaattgc

SEQ ID NO: 37628 - DNA, 75 bp, synthetic construct
  source 1..75: mol_type = other DNA
gctatcaaagccgcagtgcgtttaccggccatgccgatctgggtggccattttgatgaaaacaaacggtttggct

SEQ ID NO: 37629 - DNA, 75 bp, synthetic construct
  source 1..75: mol_type = other DNA
ctttccgataccgtctctgcacgcaatacctccggattccgtgaacaggtcgctgcatggctggaaaaactcagt

SEQ ID NO: 37630 - DNA, 75 bp, synthetic construct
  source 1..75: mol_type = other DNA
tctatcccgtgtcgcaacagtttggactggcaggactgctggttgcgaccttgctgtcggggatctttttgattc

SEQ ID NO: 37631 - DNA, 75 bp, synthetic construct
  source 1..75: mol_type = other DNA
ccctgattgtcatctgtattaccgtcgttgtgatggcactggtaacaaggaaagacttctgcgaggtacaaatcc

SEQ ID NO: 37632 - DNA, 75 bp, synthetic construct
  source 1..75: mol_type = other DNA
gggcgaggggcgttttaattaatcacacgcgggatatagatatttatgagcctgacgggccgacgaaccttctgg

SEQ ID NO: 37633 - DNA, 75 bp, synthetic construct
  source 1..75: mol_type = other DNA
gagcgatccggtccagacgctgcgggcgctgacggatgatgccggatttgatgacgtatttgtctatgcagcggt

SEQ ID NO: 37634 - DNA, 75 bp, synthetic construct
  source 1..75: mol_type = other DNA
aattgctggatggggttgaagttaagtggttgccattggggcaactaggtgaattagttcgtggaaatggattgc

SEQ ID NO: 37635 - DNA, 75 bp, synthetic construct
  source 1..75: mol_type = other DNA
tcagacgctgtttgaagccatcgtattggtggtttgcgtgatgtatttattcctgcaaaacctgcgtgccacact

SEQ ID NO: 37636 - DNA, 75 bp, synthetic construct
  source 1..75: mol_type = other DNA
cagcaaaacatctatcaccgctggttaaaaggtgaaacaaaggcgcaaagggaaaaaatccagaagctgattcct

SEQ ID NO: 37637 - DNA, 75 bp, synthetic construct
  source 1..75: mol_type = other DNA
gaaaatgaaggtgcaaagttctggctgggtgtactgactgagctgaaaaatcgtggccttcaggacatcctgatt

SEQ ID NO: 37638 - DNA, 75 bp, synthetic construct
  source 1..75: mol_type = other DNA
cttacacgccgaaaggcaaggagaagcaggctatgaagcagcaaaaggcgatgttagtcgccctgatcgtcatct

SEQ ID NO: 37639 - DNA, 75 bp, synthetic construct
  source 1..75: mol_type = other DNA
aggttgtcgtgcagggtaagaatattctgctggacaagggcagcagcatcacagcaaccggtggtcagggcggcg

SEQ ID NO: 37640 - DNA, 75 bp, synthetic construct
  source 1..75: mol_type = other DNA
actgaacagcagatttaccgtcagctgactgacgaggtactggccctgcgattgtctgaaaacggctcacaactg

SEQ ID NO: 37641 - DNA, 75 bp, synthetic construct
  source 1..75: mol_type = other DNA
cacaggcggcactgacttaccgttatggtgacgaacatcagcccgtcaccaccgccgacattctgacgccgcgac

SEQ ID NO: 37642 - DNA, 75 bp, synthetic construct
  source 1..75: mol_type = other DNA
tctttctggatgcaggaaacaaaaagctggtcttctggtttgttcgtgtcgatgacgaagggtatccggaaatag

SEQ ID NO: 37643 - DNA, 75 bp, synthetic construct
  source 1..75: mol_type = other DNA
gaccggctggaaagtgaaatcctggctgaccgggtgagtgaggaaagccgccgctggctggcatcgtgcggcctg

SEQ ID NO: 37644 - DNA, 75 bp, synthetic construct
  source 1..75: mol_type = other DNA
aacgcatgttgggcggtaaaactggcacacgatggcgcgttatccctcaatcaatgtgatgagaggatgccatga

SEQ ID NO: 37645 - DNA, 75 bp, synthetic construct
  source 1..75: mol_type = other DNA
gtcggcgtcaaaaaaatggagtatgccaatccagaactggcggctggcaatgagccgttttattatcgagtttgg

SEQ ID NO: 37646 - DNA, 75 bp, synthetic construct
  source 1..75: mol_type = other DNA
gatgaaaaatacccgcaaatcagcaagagctggcgcacacactgggaaaatctcaacaccttcttcggttaccca

SEQ ID NO: 37647 - DNA, 75 bp, synthetic construct
  source 1..75: mol_type = other DNA
tgtgctctggttgcctgtatcggtaatgcacatgattttaaaaatggacggcaactggcggcctggctggggttg

SEQ ID NO: 37648 - DNA, 75 bp, synthetic construct
  source 1..75: mol_type = other DNA
agtatttttgacgcaggattaacaagagctgttattagagaaattgcgtttaatagaactaataaatctgaatta

SEQ ID NO: 37649 - DNA, 75 bp, synthetic construct
  source 1..75: mol_type = other DNA
cacagaaatggacgatgccacttcaggactggcggatagccatgagtcgctttattatcaaattcggtgaccgcc

SEQ ID NO: 37650 - DNA, 75 bp, synthetic construct
  source 1..75: mol_type = other DNA
ctgacgttgccaacgcactggatattgaatctgtcgccatcgtcgaaaaagattattttgtggttaatcttttaa

SEQ ID NO: 37651 - DNA, 75 bp, synthetic construct
  source 1..75: mol_type = other DNA
taggattattgtggtttggctttgatgcaatacctgcggatccattgcaagtgatccttggttattctcttctga

SEQ ID NO: 37652 - DNA, 75 bp, synthetic construct
  source 1..75: mol_type = other DNA
atggcatgctgtactgaagcgtacggaagctgaccgctgggcgcaggcagaagagcagaaatatgagatgctgga

SEQ ID NO: 37653 - DNA, 75 bp, synthetic construct
  source 1..75: mol_type = other DNA
ctgccgtgtggctgacgcacgacccggaatacccggagaatttacctgccgcgccgctggtgcgctatggctgga

SEQ ID NO: 37654 - DNA, 75 bp, synthetic construct
  source 1..75: mol_type = other DNA
aaccgtgttgtgggcggcggtgaatcgcagattatgggtaacctgaaggcgaatggtcaggtgttcctggttaac

SEQ ID NO: 37655 - DNA, 75 bp, synthetic construct
  source 1..75: mol_type = other DNA
attccggggaagctatgggagttcaaaacaggtaatgcaatctgtttcagaattgcccatccaagggctatgcgc

SEQ ID NO: 37656 - DNA, 75 bp, synthetic construct
  source 1..75: mol_type = other DNA
actaatgggttggtttttattaatgatgaggctgctttcaagcttaaaaatgttgaggttcaggaaaatgatgtt

SEQ ID NO: 37657 - DNA, 75 bp, synthetic construct
  source 1..75: mol_type = other DNA
cactggcaccgaacctgttctttggcaccaccattgccgtaaacattctggtgctgtctaaacataaaacggata

SEQ ID NO: 37658 - DNA, 75 bp, synthetic construct
  source 1..75: mol_type = other DNA
ctggcgtgatccgtgatgtgcttaaggacgctaaggaacgggaattgccgattggtcacggcgtattgcgcggcg

SEQ ID NO: 37659 - DNA, 75 bp, synthetic construct
  source 1..75: mol_type = other DNA
aatatcaggtgctggcgcgctgggacacgccgaaggtggtgaagggggtgagcttcctgcttcgcctgaccgtgg

SEQ ID NO: 37660 - DNA, 75 bp, synthetic construct
  source 1..75: mol_type = other DNA
tgtcaggttaataccagtgatctgactaaaacgatctctctgggggaagtttctcaagctgttttaaatactgat

SEQ ID NO: 37661 - DNA, 75 bp, synthetic construct
  source 1..75: mol_type = other DNA
gatattgaattagttaattgtgacattactgcctttaaaaatggtaatgctaaaactgggagcgttaagttagct

SEQ ID NO: 37662 - DNA, 75 bp, synthetic construct
  source 1..75: mol_type = other DNA
cagtggcacttatctggatccggcactcgtcaaacgtatcgaagttgtccgcggaccaaactccagtctgtacgg

SEQ ID NO: 37663 - DNA, 75 bp, synthetic construct
  source 1..75: mol_type = other DNA
aactaccggctgttactgccctggctgtttcccacaaaaccagcctgctcgacccgctggaaattcgcgatctcc

SEQ ID NO: 37664 - DNA, 75 bp, synthetic construct
  source 1..75: mol_type = other DNA
cgcagaccgtggacttcagcgtgggcgcagaagggcttcgccatgtgccgggcgatgtcattgaaatctgcgatg

SEQ ID NO: 37665 - DNA, 75 bp, synthetic construct
  source 1..75: mol_type = other DNA
tccggcatcaggggcggcggacaaactgcaactgacaggcatatcaaaggcggcgacatatacgctgctgattga

SEQ ID NO: 37666 - DNA, 75 bp, synthetic construct
  source 1..75: mol_type = other DNA
cagggaaaagtaacttttaacggaactgttgttgatgctccatgcagcatttctcagaaatcagctgatcagtct

SEQ ID NO: 37667 - DNA, 75 bp, synthetic construct
  source 1..75: mol_type = other DNA
gaattatatcttgatggcaacgctcgtcagaacctggccactttctgccagacctgggacgacgaaaatgtccac

SEQ ID NO: 37668 - DNA, 75 bp, synthetic construct
  source 1..75: mol_type = other DNA
atgtgaatgcattacaggcatctaacattctggagacgatcaagaaagagaagatgaatctgaccgccacgacag

SEQ ID NO: 37669 - DNA, 75 bp, synthetic construct
  source 1..75: mol_type = other DNA
cggagacaatactattcattttactgctttggttaaaaaagacacaagtggtaatgatgtagctgaaggtgcttt

SEQ ID NO: 37670 - DNA, 75 bp, synthetic construct
  source 1..75: mol_type = other DNA
gatgaaatcccgttagatgatgcactgttacaattgcgggaatttatcgacgaaaactccggtgaattttttgtt

SEQ ID NO: 37671 - DNA, 75 bp, synthetic construct
  source 1..75: mol_type = other DNA
tccggttccttcgccttcaggagcattgtctttctggagactgattcaggccattaccgggcgcaggcgggtaac

SEQ ID NO: 37672 - DNA, 75 bp, synthetic construct
  source 1..75: mol_type = other DNA
cgttgatcccggcgacacagttttccgggatgatcgatccggtagcttcgctggaaggtccaggacgttggatcg

SEQ ID NO: 37673 - DNA, 75 bp, synthetic construct
  source 1..75: mol_type = other DNA
tataaaaaagaatatttaaacagtctcctctataaggccgaagaaattgcgaattatccgggtaacagatacacg

SEQ ID NO: 37674 - DNA, 75 bp, synthetic construct
  source 1..75: mol_type = other DNA
ataatgccctgcacgatgcgcgttaccaggcaaaatacgtttcagctatctggcaaaaactgttcccgaatcagg

SEQ ID NO: 37675 - DNA, 75 bp, synthetic construct
  source 1..75: mol_type = other DNA
ccgcgatctgcgtgccaacggcgaaaagaaaacgtcaatggatacactgacagcgattatgtccaccgctgaagc

SEQ ID NO: 37676 - DNA, 75 bp, synthetic construct
  source 1..75: mol_type = other DNA
ttctgtatttttgtttttctgccctgactgacctgcagaaacctgatgatgaaagaaaaagtgatgaaaggaatg

SEQ ID NO: 37677 - DNA, 75 bp, synthetic construct
  source 1..75: mol_type = other DNA
gtcttgttgattttcttatccggcttgttattacagcaattgtcatttccccggtaattatctggtcgtgggata

SEQ ID NO: 37678 - DNA, 75 bp, synthetic construct
  source 1..75: mol_type = other DNA
cgccagagtcaaccaacagcacactgaaaactcagcagcaaaaatcaaccctgtcactactgccattcgtcgcga

SEQ ID NO: 37679 - DNA, 75 bp, synthetic construct
  source 1..75: mol_type = other DNA
atgcttaagacaaacagtctgcgagagtccatgcttcatggatgtcggtggtgccaggctaatcccgagaaattc

SEQ ID NO: 37680 - DNA, 75 bp, synthetic construct
  source 1..75: mol_type = other DNA
gcgattgtagttcaggctgcaggtaaaaacgtttctttcgatggcacagaaggtgatgctaataccctgaaagat

SEQ ID NO: 37681 - DNA, 75 bp, synthetic construct
  source 1..75: mol_type = other DNA
attgcgggaatttatcgacgaaaactccggtgaattttttgttcaggtctggggaaatggagccaacttcgacaa

SEQ ID NO: 37682 - DNA, 75 bp, synthetic construct
  source 1..75: mol_type = other DNA
ggcaaattgatttagtgcaggataatattgatctggatattcgtattaatgacgcaattcctgattattatattg

SEQ ID NO: 37683 - DNA, 75 bp, synthetic construct
  source 1..75: mol_type = other DNA
actctattggcggtaaattttttgatccggcaaccggagagatggggcctgaattcagtaaagctatcgatctgg

SEQ ID NO: 37684 - DNA, 75 bp, synthetic construct
  source 1..75: mol_type = other DNA
accgcagcgggctggccgggctttttcccggccttgaccgccgtctggtgaatgcactgctgatgtgcgatgagt

SEQ ID NO: 37685 - DNA, 75 bp, synthetic construct
  source 1..75: mol_type = other DNA
tttgaagaatttctccaatgcgggcggctggagcatggctttctacgggttcgctgcgagtcttgccacgccgag

SEQ ID NO: 37686 - DNA, 75 bp, synthetic construct
  source 1..75: mol_type = other DNA
atacaagcagacatggaaaaccctggacagggagctggcctactatctctggcctggtgatgcggatgccggaaa

SEQ ID NO: 37687 - DNA, 75 bp, synthetic construct
  source 1..75: mol_type = other DNA
tttctgaaatcgatcagggggccattgtggataacaaacgtctggggcgggccctggaaatggcgcagctggtcc

SEQ ID NO: 37688 - DNA, 75 bp, synthetic construct
  source 1..75: mol_type = other DNA
tgaacctctggcaagccaggtgattcctctggcaaatatacttgactgcgatccgatgtggttacttacaagttt

SEQ ID NO: 37689 - DNA, 75 bp, synthetic construct
  source 1..75: mol_type = other DNA
atgacagaaaaagtaaaacaacatgccgctccggtaacgggcagtgatgaaatcgatattggtcgcctggtcggc

SEQ ID NO: 37690 - DNA, 75 bp, synthetic construct
  source 1..75: mol_type = other DNA
tacgagccattcagcggtgatgaactggcgcaggttgtggatttgcttgatcaggagatgaaggaagtcgcgttg

SEQ ID NO: 37691 - DNA, 75 bp, synthetic construct
  source 1..75: mol_type = other DNA
gtttgctggctttcctggtcggaaaccgtttcggtacatccgtcccgcaagctaccgttttgactactgataaat

SEQ ID NO: 37692 - DNA, 75 bp, synthetic construct
  source 1..75: mol_type = other DNA
gaaaatccgtcagtatctggtcgacaataactatgtcgaaaccgtgatttcactggcaccgaacctgttctttgg

SEQ ID NO: 37693 - DNA, 75 bp, synthetic construct
  source 1..75: mol_type = other DNA
gaggtatctgatatcccaaaaaatgaaaccgcgccggaagctgaaccatctgtagagcgtgaggggccgttctat

SEQ ID NO: 37694 - DNA, 75 bp, synthetic construct
  source 1..75: mol_type = other DNA
actatcgtgccctgctgattgctgatacgcccattattgatgttcgcgcccctatcgagtttgagcaaggcgcaa

SEQ ID NO: 37695 - DNA, 75 bp, synthetic construct
  source 1..75: mol_type = other DNA
ccagcctatctcaggtgtctatttcagctgggataccgacgggcttggatatgatcagggggtatggcagggacc

SEQ ID NO: 37696 - DNA, 75 bp, synthetic construct
  source 1..75: mol_type = other DNA
tacatcggcggtgaacctgattaacggcagcggtaagccggtgagtgtggacatcaccgcacaccccgcgccgga

SEQ ID NO: 37697 - DNA, 75 bp, synthetic construct
  source 1..75: mol_type = other DNA
atgttttctttattctttaagattgtttttatgataaaaaatccattagcttattttcatattgccaccttttta

SEQ ID NO: 37698 - DNA, 75 bp, synthetic construct
  source 1..75: mol_type = other DNA
cttattcaacttggtcttgataaagaaaagcgcgacataactgaatctgttatcgcgatttatcagaatgaatta

SEQ ID NO: 37699 - DNA, 75 bp, synthetic construct
  source 1..75: mol_type = other DNA
agcttaaagctgaactggaaacgcagaaagatgcgctgctgaaggcgtgcctgtatgccctcaacgaaatcccta

SEQ ID NO: 37700 - DNA, 75 bp, synthetic construct
  source 1..75: mol_type = other DNA
gccagtacttcacagcaaatcgggtctctgctcgccgaggatatgaacagcgagcaagcggcaaatatggcgcgt

SEQ ID NO: 37701 - DNA, 75 bp, synthetic construct
  source 1..75: mol_type = other DNA
cgcgaatacctgattgccgcactgaaagagatcccctgcgtggagcaggttttcgactccgaaaccaactacatt

SEQ ID NO: 37702 - DNA, 75 bp, synthetic construct
  source 1..75: mol_type = other DNA
atattgccgacaaactgctggcgtcacttagttcgattcttctctactggtatcactacagccacaacggcgaac

SEQ ID NO: 37703 - DNA, 75 bp, synthetic construct
  source 1..75: mol_type = other DNA
atctggcgctggcgaaatgggacacgccgcgggtggtgaagggcgtgcgcttcagtctgcgcctgaccagtggca

SEQ ID NO: 37704 - DNA, 75 bp, synthetic construct
  source 1..75: mol_type = other DNA
cgtgaggcactgcactgggcggtcactacgggcggcttcaacagtgaaacagtacaggacgtcatgctgggagcg

SEQ ID NO: 37705 - DNA, 75 bp, synthetic construct
  source 1..75: mol_type = other DNA
tatactgctgttgttaagaagtcgtcagccgttggtgccgctgttactgaaggtgccttctcagcagttgcgaat

SEQ ID NO: 37706 - DNA, 75 bp, synthetic construct
  source 1..75: mol_type = other DNA
accagtctggcaagttggccgactgggtcagggagttgttgtgtcggaaaagcaactttgtcgtcacctgtgctc

SEQ ID NO: 37707 - DNA, 75 bp, synthetic construct
  source 1..75: mol_type = other DNA
ccacattgaaaatgagttcatctgtcaactagatccgtccagattcgatctcatcccggagtacgtgattatgga

SEQ ID NO: 37708 - DNA, 75 bp, synthetic construct
  source 1..75: mol_type = other DNA
gagtgccaccatacagcagatacagcgggtgcagacagacacaaataacgacctggctgcgctgtacatgctgaa

SEQ ID NO: 37709 - DNA, 75 bp, synthetic construct
  source 1..75: mol_type = other DNA
gctatcgccatcgagcgtggaaactccggcgatagcgtcatttatgctgttatcggaggttgccttatggctacg

SEQ ID NO: 37710 - DNA, 75 bp, synthetic construct
  source 1..75: mol_type = other DNA
ataacagttatgccagcgggacggtaaccgtcacagtttacgatgaccagggcttcgaccggcagattatcattc

SEQ ID NO: 37711 - DNA, 75 bp, synthetic construct
  source 1..75: mol_type = other DNA
ccggaaaaacgcacgtacagcggcatctgggacggcagcctgaaaccggcatacagcaacaacccggcctggtgc

SEQ ID NO: 37712 - DNA, 75 bp, synthetic construct
  source 1..75: mol_type = other DNA
caaattggccgattgggtcagggatctactgtgtaggaaaagcaactttgtcgtcacttgtgctctggcaaacaa

SEQ ID NO: 37713 - DNA, 75 bp, synthetic construct
  source 1..75: mol_type = other DNA
agctacaccgtcaaatctgggccattgccaatgatgtcagaggctccgtagatggatgggattttaaacagtatg

SEQ ID NO: 37714 - DNA, 75 bp, synthetic construct
  source 1..75: mol_type = other DNA
gtggcagccagaagcagcacacacctgtagaacagcccgattcggctcagtcaatggcgcgctgccgcatgctgc

SEQ ID NO: 37715 - DNA, 75 bp, synthetic construct
  source 1..75: mol_type = other DNA
cggcatccaaatccagaggatgtggtaatcgatatcgaaagcaatggcttaccacatcataatccatcaaatcat

SEQ ID NO: 37716 - DNA, 75 bp, synthetic construct
  source 1..75: mol_type = other DNA
tcgagttctggcctgagcaccgaaaattaatatcggtacataacgccgatcttaacgtcgttctgacaacgccag

SEQ ID NO: 37717 - DNA, 75 bp, synthetic construct
  source 1..75: mol_type = other DNA
atgctgccgggttacttcaggttcgtctgccagaacggatgcgtctgtggtcagtctctgggggaagtgcgtgtt

SEQ ID NO: 37718 - DNA, 75 bp, synthetic construct
  source 1..75: mol_type = other DNA
taatcgatatcgaaagcaatggcttaccacatcataatccatcaaatcatgttgatatctttgatataatccaag

SEQ ID NO: 37719 - DNA, 75 bp, synthetic construct
  source 1..75: mol_type = other DNA
agcggaaaaaaatatccgtgaatgtgggctggacagccagagcgccaggtgcctcaatgaactgagggcctcagc

SEQ ID NO: 37720 - DNA, 75 bp, synthetic construct
  source 1..75: mol_type = other DNA
cgttatgaaaaatggcgatttatctcttattcaacttggtcttgataaagaaaaacgcgaaataactgagtctgt

SEQ ID NO: 37721 - DNA, 75 bp, synthetic construct
  source 1..75: mol_type = other DNA
aataccgttaaattttcatccgcacctgccggggttaccactctgaatgcctgtgactacctcagccgggagttc

SEQ ID NO: 37722 - DNA, 75 bp, synthetic construct
  source 1..75: mol_type = other DNA
cgcccgtttggctggcgcgaagtgtggatcggatatgacccggcgaaaggtacgcagaacggcgacagcgccgga

SEQ ID NO: 37723 - DNA, 75 bp, synthetic construct
  source 1..75: mol_type = other DNA
tcctctctttcaatacgacggtggataccacgacccgacgtgtcatgttttccgctgaaatcgacactctctatg

SEQ ID NO: 37724 - DNA, 75 bp, synthetic construct
  source 1..75: mol_type = other DNA
gttcggcggcatcatcggcatcatcggcgtctgcttcaaaagatgaggcggccagacaggcgtcagcagcgaagg

SEQ ID NO: 37725 - DNA, 75 bp, synthetic construct
  source 1..75: mol_type = other DNA
tgccgtcggacggatcgtcgcggtcttcacgccttatggcgttgcggcactattaacgcattatgggtcaatcac

SEQ ID NO: 37726 - DNA, 75 bp, synthetic construct
  source 1..75: mol_type = other DNA
actcataccctgagttatccgctggtggcttttcagtccgggaaaatgtttaagcgtctgggaggtggctatgcg

SEQ ID NO: 37727 - DNA, 75 bp, synthetic construct
  source 1..75: mol_type = other DNA
cctgacggcgatatcacccgctaccgttatgataatccacacagtgacttaccctgcgcaacggacgatgccacc

SEQ ID NO: 37728 - DNA, 75 bp, synthetic construct
  source 1..75: mol_type = other DNA
ttctgattatcgcgctgtcgctggcggtcggtctgggcgtgtctcagcagccgctgattttgcagtttgcccctg

SEQ ID NO: 37729 - DNA, 75 bp, synthetic construct
  source 1..75: mol_type = other DNA
acaaacttgcgggactgattgcggcaatatcaccggtgggtcggcgcaagctggccgctgagattgcgaaggaac

SEQ ID NO: 37730 - DNA, 75 bp, synthetic construct
  source 1..75: mol_type = other DNA
gggacgatggtattcccggcctgattgccgactacagcattaacgcccagacccgccacgatgaacagagcggcg

SEQ ID NO: 37731 - DNA, 75 bp, synthetic construct
  source 1..75: mol_type = other DNA
tctggcccccggcctgctgtgcgctgacgggcaataccgccagatagtcaccgtcgaagatgcggtgcgcggcgg

SEQ ID NO: 37732 - DNA, 75 bp, synthetic construct
  source 1..75: mol_type = other DNA
cgccgggaggattacggtaaggacctgtggagtgcttatcagaccattcaggagaatatgctgaaaggcggaatt

SEQ ID NO: 37733 - DNA, 75 bp, synthetic construct
  source 1..75: mol_type = other DNA
tgacgaacatcagccggtcaccaccgctgacattctgacaccacgacgcagggaggattacggtcaggacctgtg

SEQ ID NO: 37734 - DNA, 75 bp, synthetic construct
  source 1..75: mol_type = other DNA
aaatgcaggaaaagcttaacgccgtgatcgaagaacgtcgtgaagaagcagagcgtgaggcagcagaacgcgcag

SEQ ID NO: 37735 - DNA, 75 bp, synthetic construct
  source 1..75: mol_type = other DNA
agaaattatcatccagtgggagagcggagagtacgaaccaaccatcagcatgcttatccctctggctaatgttct

SEQ ID NO: 37736 - DNA, 75 bp, synthetic construct
  source 1..75: mol_type = other DNA
tactgaataacgccttaaaaatcgccgttatgaaaaatggcgatttgtctcttattcaactttgtcttgataaag

SEQ ID NO: 37737 - DNA, 75 bp, synthetic construct
  source 1..75: mol_type = other DNA
ttaatggcttttccatgcacccactggatgcgctaaaaaataccgccgttctttttgaagctggatatttattag

SEQ ID NO: 37738 - DNA, 75 bp, synthetic construct
  source 1..75: mol_type = other DNA
ggtaaccgcctgcccgacccggagctgcacccggacagcaccctcagcatgtggccggataaccgtatcgcccgt

SEQ ID NO: 37739 - DNA, 75 bp, synthetic construct
  source 1..75: mol_type = other DNA
cagggatgtgcggcctggtttgccgacagtaacaagaaggcgttgctggctgaaattggcgtcggcacgctggat

SEQ ID NO: 37740 - DNA, 75 bp, synthetic construct
  source 1..75: mol_type = other DNA
cagaagcatgaaacacctgatcacactgattgaggaattgcggaaaaaaggtgtcaattttcgtagtctgacgga

SEQ ID NO: 37741 - DNA, 75 bp, synthetic construct
  source 1..75: mol_type = other DNA
agtccttcgtcgacgccaacaactatccggttcaagtctgcaaggtaacgctgacacaggtgatcttccgaaggc

SEQ ID NO: 37742 - DNA, 75 bp, synthetic construct
  source 1..75: mol_type = other DNA
tgttgctaacggcatgagtcagcttgcagatttggatgtatgggtagtcgatgcctcgcggttatcggtcgaaga

SEQ ID NO: 37743 - DNA, 75 bp, synthetic construct
  source 1..75: mol_type = other DNA
gcgaaatcagagttccgcaccgtggcgatgtcgttaacaaggtcattgagggagcctacgacgtactcagcgtct

SEQ ID NO: 37744 - DNA, 75 bp, synthetic construct
  source 1..75: mol_type = other DNA
caagttaatcctaaagttgatatgacctttgcccgtagcctgcgcgctattttacgtcaagacccggacgtggtg

SEQ ID NO: 37745 - DNA, 75 bp, synthetic construct
  source 1..75: mol_type = other DNA
aagagaagctgttgctgcattgataatgcttggcaatttgcatagtaaagacttcttgtttcggtttctggtcgg

SEQ ID NO: 37746 - DNA, 75 bp, synthetic construct
  source 1..75: mol_type = other DNA
gcacagtgagttaccggcgacgacaacggatgcgacgggcagcacccggcagatgacgtggagccgctacgggca

SEQ ID NO: 37747 - DNA, 75 bp, synthetic construct
  source 1..75: mol_type = other DNA
ctatgtgacgttgcgtagcgatgggcgtcaaaaagtgctggcgggggagaccagttgggaagaagtggtgcgcgt

SEQ ID NO: 37748 - DNA, 75 bp, synthetic construct
  source 1..75: mol_type = other DNA
tggtagcaatgccagacggcgttttgcagacgcgtaccgactttggtaaaaccgggtacgatggcgcagcaccgc

SEQ ID NO: 37749 - DNA, 75 bp, synthetic construct
  source 1..75: mol_type = other DNA
aaaccaacagccgggagcagactcggctttatgcggcagcggaacagaccaccgcactgttgcgaggccgccagc

SEQ ID NO: 37750 - DNA, 75 bp, synthetic construct
  source 1..75: mol_type = other DNA
cggtactgctgtttattgatgaagcccataccattatcggcgcgggtaatcaggcgggcggcgcggatgcggcga

SEQ ID NO: 37751 - DNA, 75 bp, synthetic construct
  source 1..75: mol_type = other DNA
agtctgatagagagaatgcaaaggcaagtgataccgaagctatttggtatacagtagtgaatgagctgaaacaat

SEQ ID NO: 37752 - DNA, 75 bp, synthetic construct
  source 1..75: mol_type = other DNA
ccgcgtgccgctgattcagggctttaatgccgacgaaacctctgtgaaagccattaccgattttgccgccgacga

SEQ ID NO: 37753 - DNA, 75 bp, synthetic construct
  source 1..75: mol_type = other DNA
attttgttctggtttatgaggtcgacagccagtggggaaaagtgtatatcctgcgtgtattgcatactgcacaga

SEQ ID NO: 37754 - DNA, 75 bp, synthetic construct
  source 1..75: mol_type = other DNA
aatcgctgaataatatgacaccggaggaataccgacagcgccattatttggccgggatctcaaaaagtgtatgga

SEQ ID NO: 37755 - DNA, 75 bp, synthetic construct
  source 1..75: mol_type = other DNA
accgctcaggacgctacgacagcacaaaaaggaattgtccagctcagtagtgcaaccaacagcgcatctgaaacg

SEQ ID NO: 37756 - DNA, 75 bp, synthetic construct
  source 1..75: mol_type = other DNA
gaatcagattatggacagtagacagccttttcttcttgttacagaaaataaaacttttgagaacgttgttttaac

SEQ ID NO: 37757 - DNA, 75 bp, synthetic construct
  source 1..75: mol_type = other DNA
attctctttttcttccgctgcaaacgtaaacaggaactgccatttgccccatttctctgcgcatccttgtatgcg

SEQ ID NO: 37758 - DNA, 75 bp, synthetic construct
  source 1..75: mol_type = other DNA
atcaaggattgtcacggcattaataacgcttcttgagcctgtaataaatgagttgcaggaaatagagacattaca

SEQ ID NO: 37759 - DNA, 75 bp, synthetic construct
  source 1..75: mol_type = other DNA
tactgtagcgctgtctagtgatgacaattcaagtatctataatggttattacactccgtcgctgttagcaaatac

SEQ ID NO: 37760 - DNA, 75 bp, synthetic construct
  source 1..75: mol_type = other DNA
ttacgctgaaggtatgtacgaaatattgcgcatatggcttgaaacacttggcgacaatgaacgcgacaaacaaaa

SEQ ID NO: 37761 - DNA, 75 bp, synthetic construct
  source 1..75: mol_type = other DNA
acattatcggcaggtgacacgctggtggtctggaaactggaccggctggggcgcagtatgcggcatcttgtcgtg

SEQ ID NO: 37762 - DNA, 75 bp, synthetic construct
  source 1..75: mol_type = other DNA
ggggcttacgaggtagtgggcgtttttgaccggattgaggaaaagcgtgatgccatgcagtctctggttctgccg

SEQ ID NO: 37763 - DNA, 75 bp, synthetic construct
  source 1..75: mol_type = other DNA
gggctttgtgctgtatgcaggaacaaatggcctggtgtctgttgatgcaaacggtaatgccgctctggcgacgga

SEQ ID NO: 37764 - DNA, 75 bp, synthetic construct
  source 1..75: mol_type = other DNA
tcttaatacacagcgctatgcccatcatgatgagacatctttaattacagttaatattacaagagaggatggctt

SEQ ID NO: 37765 - DNA, 75 bp, synthetic construct
  source 1..75: mol_type = other DNA
gggatcgaggaaaaaggtctgctggaggttgcgtcccgcacacggcagcacctgagtaacataatgcgccatgcg

SEQ ID NO: 37766 - DNA, 75 bp, synthetic construct
  source 1..75: mol_type = other DNA
tgccgggcgggggccgctgccgaagccggcagcagagccgcctgggagcgggcgcgcacagccagccaggcatgg

SEQ ID NO: 37767 - DNA, 75 bp, synthetic construct
  source 1..75: mol_type = other DNA
actggcccgggctcttttccctgggcgatacccttcagccccgacagtgactcagcctgtgaaaacagagaaaat

SEQ ID NO: 37768 - DNA, 75 bp, synthetic construct
  source 1..75: mol_type = other DNA
cacagggcggcagactgacctgtaagttccgcctgtcaggcgcactgaccaacaatcagttcgggctggggattt

SEQ ID NO: 37769 - DNA, 75 bp, synthetic construct
  source 1..75: mol_type = other DNA
ctggctgtgctggcggttatggcgcagcggtaaagcgactgaccgtttgagtcattatttgtcccgcggtcgttt

SEQ ID NO: 37770 - DNA, 75 bp, synthetic construct
  source 1..75: mol_type = other DNA
tgcatcagcatcggccagttatgcctttgatgctattcagaccaacatgggggtgtcacgttcctacagtaagca

SEQ ID NO: 37771 - DNA, 75 bp, synthetic construct
  source 1..75: mol_type = other DNA
gaaggggcttacgaggtggtgggcgtgtttgaccggatagaggagaagcctgatgccatgcagtcgctggtcctg

SEQ ID NO: 37772 - DNA, 75 bp, synthetic construct
  source 1..75: mol_type = other DNA
ggtacattccaggcagagcatgaggattttgcttttgatataagcgacagccaccgccagaaactggaagaattt

SEQ ID NO: 37773 - DNA, 75 bp, synthetic construct
  source 1..75: mol_type = other DNA
cagcgctaaaaaagcgggcatcaacatgcagcaaaccgaccactatctggttggcgtgatcgatcgctatcacta

SEQ ID NO: 37774 - DNA, 75 bp, synthetic construct
  source 1..75: mol_type = other DNA
atatctctggtatcgcctccaccccttcacgtataactgtgaaacagaacggatatacagtctattcaagaatgg

SEQ ID NO: 37775 - DNA, 75 bp, synthetic construct
  source 1..75: mol_type = other DNA
ttgatacgtggaacgccactcacttgcgaacccagttacagggggccggcctcgatgtggagccgttcccgcaaa

SEQ ID NO: 37776 - DNA, 75 bp, synthetic construct
  source 1..75: mol_type = other DNA
agagttgtacgtataacgacatcattccggctgaccactgcctgcatgatgtgcaggatatgagtacgctgaatc

SEQ ID NO: 37777 - DNA, 75 bp, synthetic construct
  source 1..75: mol_type = other DNA
ccggtcgcagtgccagaggaaaacgtatccatacccgtgccattcacagcatcgacaccgacattaagctcaacc

SEQ ID NO: 37778 - DNA, 75 bp, synthetic construct
  source 1..75: mol_type = other DNA
ggcatcaagaaaatcacgggcggcgaccccgtggaaattaacccgaaatatgaaaagcgtttcacggcggtaatc

SEQ ID NO: 37779 - DNA, 75 bp, synthetic construct
  source 1..75: mol_type = other DNA
atctgcgggcgctgctgcgccagcccgttgatgtcactccagtatggatgatgcgccaggcgggtcgctatctac

SEQ ID NO: 37780 - DNA, 75 bp, synthetic construct
  source 1..75: mol_type = other DNA
agaaaagttgcgacagtgatccagtggtcatcaaccgttatatcgccattgaagccccccgactggagcgtctcc

SEQ ID NO: 37781 - DNA, 75 bp, synthetic construct
  source 1..75: mol_type = other DNA
agtctgttttacctgaggtattccggcaaaaaattgccgggatgtttaccacgggattcagaacccgggtgacac

SEQ ID NO: 37782 - DNA, 75 bp, synthetic construct
  source 1..75: mol_type = other DNA
tcgtggtgaagaccttagccatgctgatttttccctgaaaattaatcagggccgtcacctggtggatgcgggcgg

SEQ ID NO: 37783 - DNA, 75 bp, synthetic construct
  source 1..75: mol_type = other DNA
ttgaccggattgaggaaaagcgtgatgccatgcagtcgctggtcctgccgccaccggcacgccaggcgctggcac

SEQ ID NO: 37784 - DNA, 75 bp, synthetic construct
  source 1..75: mol_type = other DNA
ccaactcccttgaccgcattatcacgcttcagactggacttgatggctttgtattcgtgccgggcaccgtatttg

SEQ ID NO: 37785 - DNA, 75 bp, synthetic construct
  source 1..75: mol_type = other DNA
atgcaagcattgctggaacactttattacccaatccaccgtgtattcattgatggcggtggtgttggtggccttt

SEQ ID NO: 37786 - DNA, 75 bp, synthetic construct
  source 1..75: mol_type = other DNA
cggtgagtattatcgtgtactggctggcgttgaaacaggctggaacccgtttcggctggaggcaaacaagcggaa

SEQ ID NO: 37787 - DNA, 75 bp, synthetic construct
  source 1..75: mol_type = other DNA
gggaagtacgtgttccgcaccggggaaatgtggtggacagagtcattgaaggggcttacgaggtggtgggcgtgt

SEQ ID NO: 37788 - DNA, 75 bp, synthetic construct
  source 1..75: mol_type = other DNA
atctgcattatggcgatctgacagatacctccaacctgacgcgcattttgtgtgaagtgcagccggatgaagtgt

SEQ ID NO: 37789 - DNA, 75 bp, synthetic construct
  source 1..75: mol_type = other DNA
aggtactggacttcttgatgttcttcagtatttgcccgttgagtatgttcttactcagtccttcacttctatgtc

SEQ ID NO: 37790 - DNA, 75 bp, synthetic construct
  source 1..75: mol_type = other DNA
ttcgactggattaatgatggtcagaagtttgaatccatacatcctaaaggtattatcccagaaaaaattatcacc

SEQ ID NO: 37791 - DNA, 75 bp, synthetic construct
  source 1..75: mol_type = other DNA
aggtggcattgatcagttcatctcatacatcagaggaagatgctcgccgattcatgatcgcaagcaatgagctgg

SEQ ID NO: 37792 - DNA, 75 bp, synthetic construct
  source 1..75: mol_type = other DNA
gcggcttcgaaatggactttgctgaactgttgctggaagactacaaagcctccctgaaatatctcagcgaccacc

SEQ ID NO: 37793 - DNA, 75 bp, synthetic construct
  source 1..75: mol_type = other DNA
tatggtccccgatatggttgtggtcgactacgctgacctgatgcgtgccagctacgacctccgcgacgaccgcgc

SEQ ID NO: 37794 - DNA, 75 bp, synthetic construct
  source 1..75: mol_type = other DNA
agcccgcaaacagcagcaaccgctggccagttttcagaatgaggttcagccgagcacgcgacatttttatgatgc

SEQ ID NO: 37795 - DNA, 75 bp, synthetic construct
  source 1..75: mol_type = other DNA
tcaatataaatccatcggttatgttttttccgaaccattaaaaacatgcaatgaaataggttcgttgacgcctaa

SEQ ID NO: 37796 - DNA, 75 bp, synthetic construct
  source 1..75: mol_type = other DNA
ttctggtcgctgacggcgaaaggctgcatgttcggcaagaacatcaccagtcctgcaaatccgcgcgagacgcag

SEQ ID NO: 37797 - DNA, 75 bp, synthetic construct
  source 1..75: mol_type = other DNA
cagtaatgataaaggcgattggccagaagctggcggcggcaggcgtacaggatgcaaatttttatcctgagggta

SEQ ID NO: 37798 - DNA, 75 bp, synthetic construct
  source 1..75: mol_type = other DNA
acgccgtatgtaccgagaaaaaaccaaccagtacgaaataagaaaggccggataaagcgggaaatgtttgtgaaa

SEQ ID NO: 37799 - DNA, 75 bp, synthetic construct
  source 1..75: mol_type = other DNA
cggggccgcgccaaagcggacaaggtggatattgacctgacccacagcaatcttgcgcgcggcctgctctgccct

SEQ ID NO: 37800 - DNA, 75 bp, synthetic construct
  source 1..75: mol_type = other DNA
ctgacaaaattaacgacagaaatcgccagctattgcgctgatgaattcaagaaactgaacgataaaaggagctgg

SEQ ID NO: 37801 - DNA, 75 bp, synthetic construct
  source 1..75: mol_type = other DNA
accacatcgtcatcggacggccagaacttcaaggccggcggtcgtggccaggctgccggccaagtgaacctaaag

SEQ ID NO: 37802 - DNA, 75 bp, synthetic construct
  source 1..75: mol_type = other DNA
tcgcaggcggctatggtggcgcaatctattcttctggtactaacgatactggtgccgtcgatttacgtgtcacta

SEQ ID NO: 37803 - DNA, 75 bp, synthetic construct
  source 1..75: mol_type = other DNA
caggcagagcccccggtggcggtcgccccacaggaccggcctgcacgccgctcccgtcgtcagaaactgccggca

SEQ ID NO: 37804 - DNA, 75 bp, synthetic construct
  source 1..75: mol_type = other DNA
gtgcagatgaccgaagataaggcccgcgagcattctaaaaagcgcctcgacagaacgttcagaagcagtgcggcg

SEQ ID NO: 37805 - DNA, 75 bp, synthetic construct
  source 1..75: mol_type = other DNA
caggacgcggcacgcgagggattttctgaggggatgtactacccgaaaaattatatcgtaccgggcgatccggcg

SEQ ID NO: 37806 - DNA, 75 bp, synthetic construct
  source 1..75: mol_type = other DNA
caccaggtattcactgactggcctctttccggagaatattcctgcgtgcaactggcccgggctctgttcccgggg

SEQ ID NO: 37807 - DNA, 75 bp, synthetic construct
  source 1..75: mol_type = other DNA
cacccgggatgtgcagtacgaggcgcgcccgttgctcggcgcttcacatgaggagaataacaacatattgaatat

SEQ ID NO: 37808 - DNA, 75 bp, synthetic construct
  source 1..75: mol_type = other DNA
acttaccgttatggtgacgaacatcagccagtcaccaccgctgacattctgacaccacgacgccgggaggattac

SEQ ID NO: 37809 - DNA, 75 bp, synthetic construct
  source 1..75: mol_type = other DNA
atggcggctgagattgcgaaaaagttgcgtaccagtcagcagcagcgcatcaagcgccagcaggcacccgacggc

SEQ ID NO: 37810 - DNA, 75 bp, synthetic construct
  source 1..75: mol_type = other DNA
gtgagctggttctgccggccggaactctcaggctgaaaggtaaactgacgccggcgttattacagacacttatcc

SEQ ID NO: 37811 - DNA, 75 bp, synthetic construct
  source 1..75: mol_type = other DNA
ccgccactgccgccattcgtcgcgaatacaagcagacatggaaaacgctggatgaagaactggcctacgctctgt

SEQ ID NO: 37812 - DNA, 75 bp, synthetic construct
  source 1..75: mol_type = other DNA
cgcttctggggacgtactttaatgacctgcaggaccagtgtgcgatagtgcatcttgctggagctcgtggtgatt

SEQ ID NO: 37813 - DNA, 75 bp, synthetic construct
  source 1..75: mol_type = other DNA
gcacgaagggagcatgttttcccaagtcttaaaaatccagtgcaaccaatgagcagccagacagcaaacgcagca

SEQ ID NO: 37814 - DNA, 75 bp, synthetic construct
  source 1..75: mol_type = other DNA
attctgctcaactctcatgacggtacctccagctaccagatgctgccggggtacttcaggttcgtctgtcagaac

SEQ ID NO: 37815 - DNA, 75 bp, synthetic construct
  source 1..75: mol_type = other DNA
gtgtgacgctatgactggacactattatcgcttacgcgactacgcgctaaaccatccggaatgcagcgccattat

SEQ ID NO: 37816 - DNA, 75 bp, synthetic construct
  source 1..75: mol_type = other DNA
cgcaggcgtgagcgacaacagcgagttccttattccgaaagggatccagcgcttccatttctctggcggcgcgcg

SEQ ID NO: 37817 - DNA, 75 bp, synthetic construct
  source 1..75: mol_type = other DNA
tgatgcattggacgttctggacgccatgctggccgttatcatccgtgacgccagaaagattgggcagaaaaaacg

SEQ ID NO: 37818 - DNA, 75 bp, synthetic construct
  source 1..75: mol_type = other DNA
gaagaagtatcgggtgttgctgaaccgtgttgatacatcaactgcacctgatattgagtggccgacttggcctgc

SEQ ID NO: 37819 - DNA, 75 bp, synthetic construct
  source 1..75: mol_type = other DNA
tgcatggcgcatgcaaggagaaagatccatgatgagcatgttcgccggccgacagcgatgacaacggaggcgctg

SEQ ID NO: 37820 - DNA, 75 bp, synthetic construct
  source 1..75: mol_type = other DNA
ctcttttacccggtgcctgtgtcgcacaaatagctcgcgagaacggaatcaacgataacctgctctttaactggc

SEQ ID NO: 37821 - DNA, 75 bp, synthetic construct
  source 1..75: mol_type = other DNA
ggaaatggaatgcagtgtcatttttccatgaaaggtttacaggctaacaccaataaagttcaggagattcgttgt

SEQ ID NO: 37822 - DNA, 75 bp, synthetic construct
  source 1..75: mol_type = other DNA
ttaatggcagccagggaacgcgtaatgaatggtatgttcagccgcaagcacaggttacctggatgggagtcaaag

SEQ ID NO: 37823 - DNA, 75 bp, synthetic construct
  source 1..75: mol_type = other DNA
cggcaccagccgccgcgtcactttcacttcctccattgacacaatctacggccagacgactgtaacaagcgaggc

SEQ ID NO: 37824 - DNA, 75 bp, synthetic construct
  source 1..75: mol_type = other DNA
ggcgaggtgcagtggcgaaaccgtccgccgtcagtcagcattcgcggggcggataatgttattgaattactgaga

SEQ ID NO: 37825 - DNA, 75 bp, synthetic construct
  source 1..75: mol_type = other DNA
atggctggcttaccgaacagcagtaacgcgctgcaacagtggcatcacttgtttgaagctgaagggacaaaacgc

SEQ ID NO: 37826 - DNA, 75 bp, synthetic construct
  source 1..75: mol_type = other DNA
tgataaggctatcgctcaggtcagggatcgcagcaaatttgcagagatatcgaaaaattatggttattttatgcc

SEQ ID NO: 37827 - DNA, 75 bp, synthetic construct
  source 1..75: mol_type = other DNA
tgagctgaagcaggcgaccgccaccatcgctgacatgcagcagcgtcagcgtgatgttgctgcgatcgatgcaaa

SEQ ID NO: 37828 - DNA, 75 bp, synthetic construct
  source 1..75: mol_type = other DNA
gcgacgggattaggcaaaacctataccgttgcccacttaattaagcgcttaatccaacaaaatagccgcaggcca

SEQ ID NO: 37829 - DNA, 75 bp, synthetic construct
  source 1..75: mol_type = other DNA
aacacgggcttctgaccggcaaaggcacggcagatgaaaccctgcataaaaccgtgaagctgcgcgaactgaccg

SEQ ID NO: 37830 - DNA, 75 bp, synthetic construct
  source 1..75: mol_type = other DNA
tcggcaactcatcaacagaggttgcgctggcaacgctcagtgcaactggagagttgtcgttcgtgagtagcgccc

SEQ ID NO: 37831 - DNA, 75 bp, synthetic construct
  source 1..75: mol_type = other DNA
tggtgtcatcggcatttgattttgccgatatcgcgacgatgataaacgcctccgtacgcgccggatatcagctga

SEQ ID NO: 37832 - DNA, 75 bp, synthetic construct
  source 1..75: mol_type = other DNA
agcaacaggctggcgtgacagccggcaaaccaaaactcgacctgacgaacactgactggatttacggggtggagc

SEQ ID NO: 37833 - DNA, 75 bp, synthetic construct
  source 1..75: mol_type = other DNA
agaaataccatttaatgagaatcaaacaagatttggctgttgtatcaactcttgttgatgggatgaagaatattg

SEQ ID NO: 37834 - DNA, 75 bp, synthetic construct
  source 1..75: mol_type = other DNA
aatgtgagcattatgcgctgaccagcgatgcaccgtcggggaaggaaggtgccgcattcatggcgctgatggcag

SEQ ID NO: 37835 - DNA, 75 bp, synthetic construct
  source 1..75: mol_type = other DNA
cagcaggaagggtacgtacttattggccttgatctcacatacagcgatggctccaccgcgcataaacctgtaaca

SEQ ID NO: 37836 - DNA, 75 bp, synthetic construct
  source 1..75: mol_type = other DNA
cgtgcgcagcgccgagcagatgctggcagattatgcgccgttgaataaagtcgacagcgcccgtcgctgtggcct

SEQ ID NO: 37837 - DNA, 75 bp, synthetic construct
  source 1..75: mol_type = other DNA
ctacctggatgggcaacgtcacaagaactcttatcagatatccaggcaactgggagatatctggaggcggatcac

SEQ ID NO: 37838 - DNA, 75 bp, synthetic construct
  source 1..75: mol_type = other DNA
gaaggaaggtgccgcattcctggcgctgatggcagaaaaagcccgtcttgcggccctgttaccggagggatggtc

SEQ ID NO: 37839 - DNA, 75 bp, synthetic construct
  source 1..75: mol_type = other DNA
gttatcgctcgccacgggaatatctgcggcagcgggcttgtaatgggttaagtgataacagatgtctggaaatat

SEQ ID NO: 37840 - DNA, 75 bp, synthetic construct
  source 1..75: mol_type = other DNA
attttctgaataatagcggcttcacgacgtccttagagcttgaggtcaggctttctgatgtggagtacgaaacag

SEQ ID NO: 37841 - DNA, 75 bp, synthetic construct
  source 1..75: mol_type = other DNA
tcgagagaggaattgcttaagagaaattcttttccatcagtgaatcaaaacaaatatctgaatgcgatgtggcgc

SEQ ID NO: 37842 - DNA, 75 bp, synthetic construct
  source 1..75: mol_type = other DNA
ttcgaaccgctggacccagaagaacggggccgcaccttcgaagctctggattgcccagattggcgcgatgactga

SEQ ID NO: 37843 - DNA, 75 bp, synthetic construct
  source 1..75: mol_type = other DNA
gaaaatcctggaactggctggcttcctggattcttacattccggaaccagagcgtgctattgacaagccgttcct

SEQ ID NO: 37844 - DNA, 75 bp, synthetic construct
  source 1..75: mol_type = other DNA
aagccgcacaccaagttcgaatctgaagtgtacattctgtccaaagatgaaggcggccgtcatactccgttcttc

SEQ ID NO: 37845 - DNA, 75 bp, synthetic construct
  source 1..75: mol_type = other DNA
gcctggaaggtgcgcatagatgcaggtgtcgcggccctcgactatcgcggattactgaaatcgagtggagcatga

SEQ ID NO: 37846 - DNA, 75 bp, synthetic construct
  source 1..75: mol_type = other DNA
gcaatccgtgaaggcggccgtaccgttggcgcgggcgttgttagcaaaagttctgagctaattgccgataacatt

SEQ ID NO: 37847 - DNA, 75 bp, synthetic construct
  source 1..75: mol_type = other DNA
tcgcctccatgcggctgtttgcccgcttatccctggatagcgccttgccggaacgcaccaccatcatgaatttcc

SEQ ID NO: 37848 - DNA, 75 bp, synthetic construct
  source 1..75: mol_type = other DNA
aggctgacatctgcgaagcgcttcacgaccacgctgacgagctttaccgcagctgcctcgcacgcttcggggatg

SEQ ID NO: 37849 - DNA, 75 bp, synthetic construct
  source 1..75: mol_type = other DNA
tgctggcgatatgcgtgattatgctgatttgctggataaggtggaaaccgtgttaatccctgcttatgccagaaa

SEQ ID NO: 37850 - DNA, 75 bp, synthetic construct
  source 1..75: mol_type = other DNA
aatgcccgtctgcccgcgccgggaaaaaacgcgcgcctgtggcgctgaaaggggccgcgctgacgcgccgcccct

SEQ ID NO: 37851 - DNA, 75 bp, synthetic construct
  source 1..75: mol_type = other DNA
atcggatgccaaccccattaaaataatatcaacggaaggctatgctgcgaaggcgggtcaggccgtgaataacct

SEQ ID NO: 37852 - DNA, 75 bp, synthetic construct
  source 1..75: mol_type = other DNA
tcgcctccatgcggctgtttgcccgcttatccctggatagcgccatgccggatcgcaccaccatcatgaatttcc

SEQ ID NO: 37853 - DNA, 75 bp, synthetic construct
  source 1..75: mol_type = other DNA
cgctgggtgcctgactggatgtgtgcgccacgtccacaggcagagacggaaaccacggaataccgtgacaaccag

SEQ ID NO: 37854 - DNA, 75 bp, synthetic construct
  source 1..75: mol_type = other DNA
cgggattatttcatcctcagagaacggttgatgacaatgcagaagcaggtggaaggggcacaggactatatccgc

SEQ ID NO: 37855 - DNA, 75 bp, synthetic construct
  source 1..75: mol_type = other DNA
tgaaggtattgcaggaagtcgttaaggaacaggaggtgtcagtagggaagcgaacagagaaaatacaatatcgtg

SEQ ID NO: 37856 - DNA, 75 bp, synthetic construct
  source 1..75: mol_type = other DNA
cattcgtcgtctggtgaccgaaagtgaagtggcggtggcggggaacagtaaattccgcttcgtgggggctgatgc

SEQ ID NO: 37857 - DNA, 75 bp, synthetic construct
  source 1..75: mol_type = other DNA
cagaccctgccgcactcccgtctggtgtatgttgtttctgaaacaaaagcagagcccacaccctcccttcaaaaa

SEQ ID NO: 37858 - DNA, 75 bp, synthetic construct
  source 1..75: mol_type = other DNA
gcgcggggcggcggtgattatcgaaagtcagtttcaggttgccgatttgatggtcgatctcgtcagccgcaaagt

SEQ ID NO: 37859 - DNA, 75 bp, synthetic construct
  source 1..75: mol_type = other DNA
tccgtaaaggtttcattgataagaaacagcttgcaaaattagccaaagaactcaataaaaatgattacggtaaat

SEQ ID NO: 37860 - DNA, 75 bp, synthetic construct
  source 1..75: mol_type = other DNA
gatggggcgtggttatgcttggttagacaccggtactcatgaaagccttattgaggctagtaactttattcaaac

SEQ ID NO: 37861 - DNA, 75 bp, synthetic construct
  source 1..75: mol_type = other DNA
ggattgcgcctgaatttgcgcattgtctccattgtcatgtttaacttcgccagctacctcaccatcgggttgccg

SEQ ID NO: 37862 - DNA, 75 bp, synthetic construct
  source 1..75: mol_type = other DNA
gctgttaacaaagaaagtggtgcaacagtatttgcttatcacgtaaatgatcctgaacgctacggtgtcgttgag

SEQ ID NO: 37863 - DNA, 75 bp, synthetic construct
  source 1..75: mol_type = other DNA
gcctggaagaaaaaccgctacagccaaaaagtaattatgcggtaactgggctttatttctatgataacgacgttg

SEQ ID NO: 37864 - DNA, 75 bp, synthetic construct
  source 1..75: mol_type = other DNA
gcgcagctcgaaaaagctaacccggactttatggcagagcgcgaggacgttgtcagcgacgaaggacgctttgaa

SEQ ID NO: 37865 - DNA, 75 bp, synthetic construct
  source 1..75: mol_type = other DNA
cgggaagttccggcagaacggacgtgtattaataaactgattgaggcacttgttgatgaaagcaacgacatctca

SEQ ID NO: 37866 - DNA, 75 bp, synthetic construct
  source 1..75: mol_type = other DNA
gcaagtgaaggtattagccgagccgctgaagaaaaatgcttatggtcagtatctgctgaaaatgattaaaggtta

SEQ ID NO: 37867 - DNA, 75 bp, synthetic construct
  source 1..75: mol_type = other DNA
aaagtttctttccagccaacagactgttgaacttgttcgggaattgaccgatacccaaaatttgggtgtcggtcc

SEQ ID NO: 37868 - DNA, 75 bp, synthetic construct
  source 1..75: mol_type = other DNA
atgaaaacgcgtaaaggtattattttggcgggtggttctggtactcgtctttatcctgtgacgatggccgtcagt

SEQ ID NO: 37869 - DNA, 75 bp, synthetic construct
  source 1..75: mol_type = other DNA
agcagggacgtctgtctgtcgcgatgatggggcgtggctacgcgtggctggacacggggactcatcagagtctga

SEQ ID NO: 37870 - DNA, 75 bp, synthetic construct
  source 1..75: mol_type = other DNA
ggctgaacttacccggctgctgggtatatccaggtccacgatttacgtgaaaataaatccggcctcgaaatacca

SEQ ID NO: 37871 - DNA, 75 bp, synthetic construct
  source 1..75: mol_type = other DNA
cggcagttatcctgtcagcgtctcggtaaccgacaaagccggaaacacgggcagccagtcactgactgtcacggt

SEQ ID NO: 37872 - DNA, 75 bp, synthetic construct
  source 1..75: mol_type = other DNA
agcaccacagccggaaatccggtcagcgttacgcatccggtgactgtcgatctctcggcgattgccgtcagcatc

SEQ ID NO: 37873 - DNA, 75 bp, synthetic construct
  source 1..75: mol_type = other DNA
aaagggcataactccattgcgattggtaccagtgcagaagcaggaggtgaaattaaagacgaaaaaggttttaag

SEQ ID NO: 37874 - DNA, 75 bp, synthetic construct
  source 1..75: mol_type = other DNA
tgatctgcctcgtctattgcagacgcttaacgatcgcatccaggttttatacgatagagaacatatgctggggca

SEQ ID NO: 37875 - DNA, 75 bp, synthetic construct
  source 1..75: mol_type = other DNA
tgtgaggaatccgacctgctggaagcagaaatgaagctgattgactgcatggcgaaggtcagggcgtggacgccg

SEQ ID NO: 37876 - DNA, 75 bp, synthetic construct
  source 1..75: mol_type = other DNA
cgcggtgattggtgctttgaaaggtgcagtcactgaaaaggagagtcagtcatcagggggagggttaaatatctc

SEQ ID NO: 37877 - DNA, 75 bp, synthetic construct
  source 1..75: mol_type = other DNA
atggaaatacgcgaaggccacaataaattttacattaatgacgaacaaggcaagcaaatcgctgaaattgtcttt

SEQ ID NO: 37878 - DNA, 75 bp, synthetic construct
  source 1..75: mol_type = other DNA
ttaacccgctggcgtatcaccgcgcgtgggatgaacggcgacgggctggtcgggcaggggcgtgcttatctgcgt

SEQ ID NO: 37879 - DNA, 75 bp, synthetic construct
  source 1..75: mol_type = other DNA
tgttcagatgatggaagaacgcgccgcgccgatgcgtgcaaaagtatgccctgtggatgttgactccgaccctgg

SEQ ID NO: 37880 - DNA, 75 bp, synthetic construct
  source 1..75: mol_type = other DNA
tactggttggttcggtaatacaggtaatgccagcgattatagtggtaaatctaactttgtcaccgtagatactga

SEQ ID NO: 37881 - DNA, 75 bp, synthetic construct
  source 1..75: mol_type = other DNA
aacggatggtttgacggtacactatccgtggcgcctgaactatcagcctttgttcctgacaccggataagcagat

SEQ ID NO: 37882 - DNA, 75 bp, synthetic construct
  source 1..75: mol_type = other DNA
ttcccgcccggagacagtgatgaccgtcagtaaccgggaacggatgtgcgaatggttcagtcaggtctggcttcc

SEQ ID NO: 37883 - DNA, 75 bp, synthetic construct
  source 1..75: mol_type = other DNA
ctaaaaccattccgcagggctgcggatgcaattgaggcttctggactggaatatacaattcttcgccctgcctgg

SEQ ID NO: 37884 - DNA, 75 bp, synthetic construct
  source 1..75: mol_type = other DNA
cagcgaagtgtttaataacaccatcactgttaaagattcaaccgtgacctctggttcatggactgatgaaggtac

SEQ ID NO: 37885 - DNA, 75 bp, synthetic construct
  source 1..75: mol_type = other DNA
aaatggttgccgcgatggctcttgaagccgttcgccaacagaaacggatcactcaggtggaagaaaaagtcagcc

SEQ ID NO: 37886 - DNA, 75 bp, synthetic construct
  source 1..75: mol_type = other DNA
tatcggccacgttgaccaaggtaaaactacactgaccgctgcaatcactaccgtactggctaaaacctacggcgg

SEQ ID NO: 37887 - DNA, 75 bp, synthetic construct
  source 1..75: mol_type = other DNA
cgtcgaaggagctgcgctgtccgtggtggctttcacggctaagatcgcctctggtctggataatctttactgggc

SEQ ID NO: 37888 - DNA, 75 bp, synthetic construct
  source 1..75: mol_type = other DNA
aactcatgcaaccgatgctgcagcctcagcacgtgccgccagcacgtcagccggacaggccgcgtcgtcggctca

SEQ ID NO: 37889 - DNA, 75 bp, synthetic construct
  source 1..75: mol_type = other DNA
ggaagcgaaaatcctggaactggctggcttcctggattcctatattccggaaccagagcgtgcgattgacaagcc

SEQ ID NO: 37890 - DNA, 75 bp, synthetic construct
  source 1..75: mol_type = other DNA
atggccgccacgttgggatttattggcctgggtgctcaacaaccgagtgctgaatggggcgcgatggtagcgaat

SEQ ID NO: 37891 - DNA, 75 bp, synthetic construct
  source 1..75: mol_type = other DNA
ccgcaacctcgatgacctgcgtcgcttggtacagaagctgactcagcgcggcgtgcgcatcgagttcctgaagga

SEQ ID NO: 37892 - DNA, 75 bp, synthetic construct
  source 1..75: mol_type = other DNA
atgaatgagcctcgttgtattgctcagttattgcgtaacgaaagccccagggcgattgacttcaccatcacccac

SEQ ID NO: 37893 - DNA, 75 bp, synthetic construct
  source 1..75: mol_type = other DNA
gcgcattgccgtaaattactcgatcgcattaccctcgttcgcgacggcaaaatagtgaataaaatcgagatttcc

SEQ ID NO: 37894 - DNA, 75 bp, synthetic construct
  source 1..75: mol_type = other DNA
ttacgccgaaaggtgatgtcgttgatttgcctgcgggatcaacgccgctggacttcgcttaccacatccacagtg

SEQ ID NO: 37895 - DNA, 75 bp, synthetic construct
  source 1..75: mol_type = other DNA
ccgctgagatgatgctgcgccatatgggttggactgaagccgcagacctgattgttaaaggtatggaaggcgcaa

SEQ ID NO: 37896 - DNA, 75 bp, synthetic construct
  source 1..75: mol_type = other DNA
gtttatggctgaaccgccacaaggaaaaatccgtattgccggagatgatgggctgcctgcgtgggcagatattcc

SEQ ID NO: 37897 - DNA, 75 bp, synthetic construct
  source 1..75: mol_type = other DNA
tgaaaatatcgttggcttcttctgggtgattgaatggacggttgatcatggttttcatgcgcatgtggtcttctg

SEQ ID NO: 37898 - DNA, 75 bp, synthetic construct
  source 1..75: mol_type = other DNA
cctttctgccagtaaggcgcaggcgcacgtttttaagcagtacatcatcgactttgccaaagaggtggatgttga

SEQ ID NO: 37899 - DNA, 75 bp, synthetic construct
  source 1..75: mol_type = other DNA
tcatgacgccggacggattgttgtcacgtcgcgcaattgttgctgtggaaccgtttatggctgctttttatcggg

SEQ ID NO: 37900 - DNA, 75 bp, synthetic construct
  source 1..75: mol_type = other DNA
gaaaggatttatctgcggttgtggaaaatatggagatagggacaggacaacgtggcgatggtcgtcatgcttttg

SEQ ID NO: 37901 - DNA, 75 bp, synthetic construct
  source 1..75: mol_type = other DNA
gtgtttcccggggttgtactggcctggattgtagggttgccattaggcaccggagcttttgtggctggattatcc

SEQ ID NO: 37902 - DNA, 75 bp, synthetic construct
  source 1..75: mol_type = other DNA
atgacaccactcggttactatcatgagtataatgtcgcagctcaatcttcgttcattatctgtgcgggtgcagcc

SEQ ID NO: 37903 - DNA, 75 bp, synthetic construct
  source 1..75: mol_type = other DNA
atatatactttttacggattatctactgaaacaacaaagtcatttgtttctcaggaaacggcgaagaagcttaaa

SEQ ID NO: 37904 - DNA, 75 bp, synthetic construct
  source 1..75: mol_type = other DNA
ggaaagccttgctgaaggggagaaaccgctgctccatagtgatcaaggatggcattaccggataaaaagttatca

SEQ ID NO: 37905 - DNA, 75 bp, synthetic construct
  source 1..75: mol_type = other DNA
gctgtcatgcttgctgcggttattaaaacgcgcggtaacgtcgttcagattttcaaaataacgaggtctaaacat

SEQ ID NO: 37906 - DNA, 75 bp, synthetic construct
  source 1..75: mol_type = other DNA
gaaggccatcattgaccagatccgcgatgaggctgcaaagtcgccggttgtgtccgagctgcgtaaagaaataaa

SEQ ID NO: 37907 - DNA, 75 bp, synthetic construct
  source 1..75: mol_type = other DNA
acggttcggtagttaagcgcattgccgaaggtctgctgatggacatcaacgagggtgctgactgggctacttcgc

SEQ ID NO: 37908 - DNA, 75 bp, synthetic construct
  source 1..75: mol_type = other DNA
tatcggccacgttgaccaaggtaaaacgactctgaccgctgcaatcactaccgtactggctaaaacctacggcgg

SEQ ID NO: 37909 - DNA, 75 bp, synthetic construct
  source 1..75: mol_type = other DNA
tatcggccacgttgaccacggtaaaactactctgaccgctgcaatcacaaccgtactggctaaaacctacggcgg

SEQ ID NO: 37910 - DNA, 75 bp, synthetic construct
  source 1..75: mol_type = other DNA
cgaatcaactggcgattgtcgaacgtgaaatacccaccccgtcagcgggtgaagtacgagtaaaagtgaaacttg

SEQ ID NO: 37911 - DNA, 75 bp, synthetic construct
  source 1..75: mol_type = other DNA
ccttgagtatcagtctgtcgccattcgctacaacaacaccgtcaactatgacggtagctataaccacgggagcag

SEQ ID NO: 37912 - DNA, 75 bp, synthetic construct
  source 1..75: mol_type = other DNA
tctggaatatcagtctgtcgccattcgatacaacagtactacccgttatgacggtagttacaaccacgggagcag

SEQ ID NO: 37913 - DNA, 75 bp, synthetic construct
  source 1..75: mol_type = other DNA
gcgtcgcgcgattgttgcagtagaacctttcatggctgcttttcatcgcatgatgagtgaagcagagccacgagg

SEQ ID NO: 37914 - DNA, 75 bp, synthetic construct
  source 1..75: mol_type = other DNA
cttggcgagcagttctcgctgttcggcgatggctgggaactggcggaatcggacgatgtacgccgcatgcttatc

SEQ ID NO: 37915 - DNA, 75 bp, synthetic construct
  source 1..75: mol_type = other DNA
gcgccaaccccgcatgtatagccacagcgccagcaatccctgatatcgccatcatgattgccaacaggcttgaaa

SEQ ID NO: 37916 - DNA, 75 bp, synthetic construct
  source 1..75: mol_type = other DNA
aactggaaatttggtaccagaatcacctccgggataaaaaagccgaacaggaaaaagcgaagaattatagcgctg

SEQ ID NO: 37917 - DNA, 75 bp, synthetic construct
  source 1..75: mol_type = other DNA
tgatgaggagtccggcctgtattacaaccgccaccgctattatgacccgctgcaggggaggtatatcactcagga

SEQ ID NO: 37918 - DNA, 75 bp, synthetic construct
  source 1..75: mol_type = other DNA
tcgcgggaaaattttcacaacgagaactggctatgttaatgagcacgaaacaacaaagcgtatctcgttggttca

SEQ ID NO: 37919 - DNA, 75 bp, synthetic construct
  source 1..75: mol_type = other DNA
cgtgccgggcgttcgcgcacatggtgggcaccttccgtgggggaacaggtgctgattctggccgtgggcggtgaa

SEQ ID NO: 37920 - DNA, 75 bp, synthetic construct
  source 1..75: mol_type = other DNA
tcatcaaacggtaaggtactgcatacccataaacaccccggcgacagcggcggcacaaccgggagtcctctatga

SEQ ID NO: 37921 - DNA, 75 bp, synthetic construct
  source 1..75: mol_type = other DNA
atgagcagggtaaccgttattatctccgctctggttatctgcattatcgcctgcctgtcatgggctgttaatctt

SEQ ID NO: 37922 - DNA, 75 bp, synthetic construct
  source 1..75: mol_type = other DNA
gcattcttccggcagaaatgattattcgccaacgcgtaaagccaatgccatcgagagaggaattacttaagagaa

SEQ ID NO: 37923 - DNA, 75 bp, synthetic construct
  source 1..75: mol_type = other DNA
cagacgtactgatttttgaaccgaaagtttttggtgacgagcgcggtttctttttcgaaagctataaccagaggg

SEQ ID NO: 37924 - DNA, 75 bp, synthetic construct
  source 1..75: mol_type = other DNA
aagcaacagccaatggtatacaaacaggcagtatgactattgattatcacgacgccatacgccgtctggatgctg

SEQ ID NO: 37925 - DNA, 75 bp, synthetic construct
  source 1..75: mol_type = other DNA
gaaagcggtaggtatcattctctccatttctctgctcattgcgcctggcgccattgcggtactcctgacacaacg

SEQ ID NO: 37926 - DNA, 75 bp, synthetic construct
  source 1..75: mol_type = other DNA
cgctattgctcgaggggaaatcaagttaagcgatcccgcaacaaaatactggcctgaacttaccgctaaacagtg

SEQ ID NO: 37927 - DNA, 75 bp, synthetic construct
  source 1..75: mol_type = other DNA
aaatacaaccagcgacggcttgagtataacgatatgctggcgcgcgatcagcctgtgatggcggcgcttggaaag

SEQ ID NO: 37928 - DNA, 75 bp, synthetic construct
  source 1..75: mol_type = other DNA
gccgacaggccagatagacaaaaagccatgctcgctaatgccttaagactttattctacatttatttatcgcaat

SEQ ID NO: 37929 - DNA, 75 bp, synthetic construct
  source 1..75: mol_type = other DNA
attaaattcctgcgtgaagagatgggcgtgaagaaaattcgtttcccggaacattgcggtatcggtattaagccg

SEQ ID NO: 37930 - DNA, 75 bp, synthetic construct
  source 1..75: mol_type = other DNA
tatattttgctaacgtattttttaacccacttgccttatcatttattatcgccacaatcatctgtataacgataa

SEQ ID NO: 37931 - DNA, 75 bp, synthetic construct
  source 1..75: mol_type = other DNA
cactcttcatcgctttatcgaaaggctataaataactcgcttaagcaagttaattcgtatgctccagagcattca

SEQ ID NO: 37932 - DNA, 75 bp, synthetic construct
  source 1..75: mol_type = other DNA
gaaccgtggggattgggagtctgcagcacgtgaaagccatcgaaatcttcatcaacgaggcgatcagagaaacaa

SEQ ID NO: 37933 - DNA, 75 bp, synthetic construct
  source 1..75: mol_type = other DNA
tgtttgaagccacccacggtactgcgccgaaatatgccggtcaggacaaagtaaacccaggctctattattctct

SEQ ID NO: 37934 - DNA, 75 bp, synthetic construct
  source 1..75: mol_type = other DNA
aggcccgcgccgtcagccggaaaaaaatgtcttcaccgatgagcagattgagaagctggaagaaatcttccattc

SEQ ID NO: 37935 - DNA, 75 bp, synthetic construct
  source 1..75: mol_type = other DNA
taaatctgttacgcgcctttgaagcggctggtcgtaccggagcttttgcgttggccgcctctgagttggaactgt

SEQ ID NO: 37936 - DNA, 75 bp, synthetic construct
  source 1..75: mol_type = other DNA
aagacggtcagcatcagcattgttgtccgcccttacgcctgccctaaaaccatcaaagtgggcattcagctggat

SEQ ID NO: 37937 - DNA, 75 bp, synthetic construct
  source 1..75: mol_type = other DNA
atgtctggatatcgcacctgctggaaaacctgccggaagagaaactggcatcggcgctgaaagatgacaacccga

SEQ ID NO: 37938 - DNA, 75 bp, synthetic construct
  source 1..75: mol_type = other DNA
atgcaaaatattattcttttaattttatatttatttcttatagccgttaaccatttccgctacaaatttctttta

SEQ ID NO: 37939 - DNA, 75 bp, synthetic construct
  source 1..75: mol_type = other DNA
atggctgataattttcagctgaaagccatcatcaccgccgttgacaggctatccggcccgcttaaaggtatgcag

SEQ ID NO: 37940 - DNA, 75 bp, synthetic construct
  source 1..75: mol_type = other DNA
atgcagataaaacgctcgattgagaaaatcccgggggggatgatgctcgtcccgctattccttggcgcactgtgc

SEQ ID NO: 37941 - DNA, 75 bp, synthetic construct
  source 1..75: mol_type = other DNA
ctttcatattgcgctcctgctggcgactggcatatcgatattggtctcaatgactggtgtctggctgtccttttt

SEQ ID NO: 37942 - DNA, 75 bp, synthetic construct
  source 1..75: mol_type = other DNA
ggcaaaaatgtacctttatcctgagccgggcgttttcgggaaactgatacatgccggagaattagtggccacagt

SEQ ID NO: 37943 - DNA, 75 bp, synthetic construct
  source 1..75: mol_type = other DNA
gaacacggtagacatcgtgacccgcaacggcggccagccggtgatgtcgaagacggggcatgcgttcatcaagga

SEQ ID NO: 37944 - DNA, 75 bp, synthetic construct
  source 1..75: mol_type = other DNA
tggtttaagggtgatgttgtggaacgttatgattttcgtcagactgcaagtaagacttcacgcggtttgatggat

SEQ ID NO: 37945 - DNA, 75 bp, synthetic construct
  source 1..75: mol_type = other DNA
tggtattcatgggttcatgacaagggggatgagagtcgtgaaagacctgtattcatcatcggtaatgatggcaat

SEQ ID NO: 37946 - DNA, 75 bp, synthetic construct
  source 1..75: mol_type = other DNA
atgaagactgtcagtggtgaggatggctatgtttactgcctcgtggagcaccagagtacggaaaacgcgtatatg

SEQ ID NO: 37947 - DNA, 75 bp, synthetic construct
  source 1..75: mol_type = other DNA
atggcaaaccgcaagcaacagcgcgcccgcgctgagcgtcttcacatccgcagcgaaatcaaccgcagacttttc

SEQ ID NO: 37948 - DNA, 75 bp, synthetic construct
  source 1..75: mol_type = other DNA
cgccacgctgttccgccgtaagtattacatcaacggcagccatgcaggcttcatcatgtatatgaccgatgccgc

SEQ ID NO: 37949 - DNA, 75 bp, synthetic construct
  source 1..75: mol_type = other DNA
ttaccgtttagcgatcgtcaggattttgacgatgctcagcgtggatttatcgctccgctgctggatgaaggtatt

SEQ ID NO: 37950 - DNA, 75 bp, synthetic construct
  source 1..75: mol_type = other DNA
aacagccgttattttttcacttgagtcagtatttattcttatactatctgttatattatttttcgttaaaattaa

SEQ ID NO: 37951 - DNA, 75 bp, synthetic construct
  source 1..75: mol_type = other DNA
gggatgctgatggcgataactcagcggtttaccggccggtgcaaaaatacataaacggcacatggtttaacgtat

SEQ ID NO: 37952 - DNA, 75 bp, synthetic construct
  source 1..75: mol_type = other DNA
atgtcgagtttaacctgctttaaagcctatgatattcgcgggaaattaggcgaagaactgaatgaagatatcgcc

SEQ ID NO: 37953 - DNA, 75 bp, synthetic construct
  source 1..75: mol_type = other DNA
tagaagacaatgcgcatttcagggagttagtcgaaaaacggcaacggtttgccaccatcctgtcgattattatgc

SEQ ID NO: 37954 - DNA, 75 bp, synthetic construct
  source 1..75: mol_type = other DNA
accaatttggacgtaatgcacaaggcgaatttgtctaccgcgagctgacaccagacaatgcaccacagcttaatg

SEQ ID NO: 37955 - DNA, 75 bp, synthetic construct
  source 1..75: mol_type = other DNA
aagtctgaaacgtgcgtggcgcacttctgcactttttgaacaggcactggcgggccatattggtattcgcagtgg

SEQ ID NO: 37956 - DNA, 75 bp, synthetic construct
  source 1..75: mol_type = other DNA
cgggcttgccagctatttaatgtctgatattgcgggttacgtcacccgccaggttatttccatcaacggagggat

SEQ ID NO: 37957 - DNA, 75 bp, synthetic construct
  source 1..75: mol_type = other DNA
atgctgccagacagcctgaaagggtttgcgcctgtggtgcgtggtatcgccaaaagcaatgcccagataacgatt

SEQ ID NO: 37958 - DNA, 75 bp, synthetic construct
  source 1..75: mol_type = other DNA
gtcttatcgccatgataacagcgacagcaactctcactgcctgtgctccaaagggcagcgtggaacagcataccc

SEQ ID NO: 37959 - DNA, 75 bp, synthetic construct
  source 1..75: mol_type = other DNA
atgggggcaatcttcacgacggttggcagtgccgttatgacggccatcggggcgattagctggccggttgtggcc

SEQ ID NO: 37960 - DNA, 75 bp, synthetic construct
  source 1..75: mol_type = other DNA
tcaggccagctttgataaacacaagctgggaacgtctcagaagggggaataccttaaaaccatttttggtgagga

SEQ ID NO: 37961 - DNA, 75 bp, synthetic construct
  source 1..75: mol_type = other DNA
atccttgttaaaaccacgggcaccatgcagatgctggggagtgcaccacagcagaacgctcaggtgcaaccgcag

SEQ ID NO: 37962 - DNA, 75 bp, synthetic construct
  source 1..75: mol_type = other DNA
aggaagtgagcgtgccgctggcctcgctgattaagtcaccactgaatgtgcgcacggtgccgtattctgcggagt

SEQ ID NO: 37963 - DNA, 75 bp, synthetic construct
  source 1..75: mol_type = other DNA
ggcacaacacaatttgcgggtaccgattaccgcagcaaagacctcaccccgaaaaaatccaggctgctggcggag

SEQ ID NO: 37964 - DNA, 75 bp, synthetic construct
  source 1..75: mol_type = other DNA
accgccacggtgtcgccgcaggtggtcgcagactggcagcactcaacatgctggcagagcgtggaatcattccgg

SEQ ID NO: 37965 - DNA, 75 bp, synthetic construct
  source 1..75: mol_type = other DNA
aagacctgaaaggcggcgaaaagatccgcacgtggtatggctataaatttattgtcgctgccttttctttcgggc

SEQ ID NO: 37966 - DNA, 75 bp, synthetic construct
  source 1..75: mol_type = other DNA
gtgccctgggcggcgacttaacgctcgaaaaacataacggtacgcgggtaattgttaacctgcccacatttttgc

SEQ ID NO: 37967 - DNA, 75 bp, synthetic construct
  source 1..75: mol_type = other DNA
tcagcgttccccgacacactgcccggtaccgaatacggccccgacaggggcatccgtctttcggcggtgtggctg

SEQ ID NO: 37968 - DNA, 75 bp, synthetic construct
  source 1..75: mol_type = other DNA
agcttattaatcatcagtttaatattgatggtcgtggcagtgatcgtcatgggactggtgttgtatgccggatag

SEQ ID NO: 37969 - DNA, 75 bp, synthetic construct
  source 1..75: mol_type = other DNA
cggcgggcattggctgaaaagctgatccataccgaggaagacacgcgtaaaagcctggctcgcgagctgcacgac

SEQ ID NO: 37970 - DNA, 75 bp, synthetic construct
  source 1..75: mol_type = other DNA
ggagaaagcctccgtggaggaaatcagtctgccactgctgacgaaaatgtcctcagagcgcacgctggcagtcca

SEQ ID NO: 37971 - DNA, 75 bp, synthetic construct
  source 1..75: mol_type = other DNA
gaccagcaataaagtcggtacatatacggtgactgcatcgttccataacggcgtcacaatacagacacagacaac

SEQ ID NO: 37972 - DNA, 75 bp, synthetic construct
  source 1..75: mol_type = other DNA
gaatgtgtttggcagcggagcgtacagtaaaccagcacaaatcagcctggaatgtaaacattattcgctgaccag

SEQ ID NO: 37973 - DNA, 75 bp, synthetic construct
  source 1..75: mol_type = other DNA
atgactatgaaagttggttttattggccttgggattatgggtaaaccaatgagtaaaaaccttttgaaagcaggt

SEQ ID NO: 37974 - DNA, 75 bp, synthetic construct
  source 1..75: mol_type = other DNA
gaagatgaaacggcctcaccttgtccccctctctacccaagcgctggaaatcgtacagcaactcaaagtgatgtc

SEQ ID NO: 37975 - DNA, 75 bp, synthetic construct
  source 1..75: mol_type = other DNA
atgcttaaaaacatgttgatcgcctcttctttcgggctgtatgatgccggagtcgcccacatggcgaccgggttt

SEQ ID NO: 37976 - DNA, 75 bp, synthetic construct
  source 1..75: mol_type = other DNA
tggcttgatgagcatctgaaaccattactggaggcgctccccgctggtgcccgctcttttctggggcgtgacttt

SEQ ID NO: 37977 - DNA, 75 bp, synthetic construct
  source 1..75: mol_type = other DNA
acgcctttaaatgattctctcaaggtcatggaaagaaatgtcgataaaactgtttccaagattgagcagcgtttt

SEQ ID NO: 37978 - DNA, 75 bp, synthetic construct
  source 1..75: mol_type = other DNA
ctggagctgcgtaacgtgccgttcagacagcaggagcaaatcacctggtatctgatggatggcctgcccggtctg

SEQ ID NO: 37979 - DNA, 75 bp, synthetic construct
  source 1..75: mol_type = other DNA
tgaaactcagttaaacaatacattcaaagatattgcccttgagtggcacagcagcaaactaaaaaaatggtctgc

SEQ ID NO: 37980 - DNA, 75 bp, synthetic construct
  source 1..75: mol_type = other DNA
aggccttgcaaccttaaaagcgggtacggctgtccaaaatgcgcgaaatacggtttccttcgtcatgagtatggc

SEQ ID NO: 37981 - DNA, 75 bp, synthetic construct
  source 1..75: mol_type = other DNA
cgaaaaaggccgccagatacgccgatacttcatcgagtgcgaaaagaaacttcgcagcatgcaaccagcacagca

SEQ ID NO: 37982 - DNA, 75 bp, synthetic construct
  source 1..75: mol_type = other DNA
tacagcgtccaccgcattaccctggatgatgccattgcggacgggctgtaccgtcgtatctgttatgtcaccggc

SEQ ID NO: 37983 - DNA, 75 bp, synthetic construct
  source 1..75: mol_type = other DNA
tgaaaactgagtcgaaagtgaacggtacctggcagaaatacgatgtgaagacagcaagcccatcaaaagcgacag

SEQ ID NO: 37984 - DNA, 75 bp, synthetic construct
  source 1..75: mol_type = other DNA
atggcgaaaacaactaaatcgttcctcgcgctactgcgcggcggcaatctcggcgtgccgctggtgatcctgtgt

SEQ ID NO: 37985 - DNA, 75 bp, synthetic construct
  source 1..75: mol_type = other DNA
ggcggcactgatgcagcaatcagacaaatccctggcacttctggcatggacactctgtctgaatgtatttggcag

SEQ ID NO: 37986 - DNA, 75 bp, synthetic construct
  source 1..75: mol_type = other DNA
aagcccttcatgcgccccgcaaaatcaacctgcgtgaggaagccgaactgctcggcgtgaatatcgtgaccgata

SEQ ID NO: 37987 - DNA, 75 bp, synthetic construct
  source 1..75: mol_type = other DNA
tggtgcgccggacgcatggaacctgtcggtgagtgccgtgaagatgcccgggcataccgcagtctgccggagccg

SEQ ID NO: 37988 - DNA, 75 bp, synthetic construct
  source 1..75: mol_type = other DNA
tattgctcagggctgttgaccaggcatcccgcccgtttaaatccatccgtacagcgagcaagtcgctgtcggggg

SEQ ID NO: 37989 - DNA, 75 bp, synthetic construct
  source 1..75: mol_type = other DNA
atcaataaacttgatgactatacttcacataacactgaacggttgaatgttgaacaaattaaggcgttgcttttg

SEQ ID NO: 37990 - DNA, 75 bp, synthetic construct
  source 1..75: mol_type = other DNA
ccccgtcagcgggattatcccaccagatcagtttatcccgctggcagagtccaccggattaattgccccgataac

SEQ ID NO: 37991 - DNA, 75 bp, synthetic construct
  source 1..75: mol_type = other DNA
cgtcccggtattcagtctgaccgcagcaactggctactgcgcctgttgatggcccgtgttgccgaacagacagga

SEQ ID NO: 37992 - DNA, 75 bp, synthetic construct
  source 1..75: mol_type = other DNA
gaagtccgcaaaaactgaaagtgacagggtgcgtctgcagcctgatatggaacatcttcttgccgggctcatcgc

SEQ ID NO: 37993 - DNA, 75 bp, synthetic construct
  source 1..75: mol_type = other DNA
gcggttttttctgccataccggcaaaacgcgcgaaggcaccaaatcgctcattcgcggagacagccgcatgatcc

SEQ ID NO: 37994 - DNA, 75 bp, synthetic construct
  source 1..75: mol_type = other DNA
ctcggcaccggccagcgtgccgaatatatgaaaaccattttcggtgaagaggccagctcgtcggctgcggtactc

SEQ ID NO: 37995 - DNA, 75 bp, synthetic construct
  source 1..75: mol_type = other DNA
aaagctcaacaacgattgtgttctcgttaccgaagtctgacagcaaaagggaaaaaatcacaagtagccattacg

SEQ ID NO: 37996 - DNA, 75 bp, synthetic construct
  source 1..75: mol_type = other DNA
atgcaaaagctaaaacagcaggtatttgaagccaacatggatctgccgcgctatgggctggtgacctttacctgg

SEQ ID NO: 37997 - DNA, 75 bp, synthetic construct
  source 1..75: mol_type = other DNA
tgctcgaacagacctcgatcccgcaacggtactttttgagttcgaaggcgtgcgccggaatattgcgccgagcag

SEQ ID NO: 37998 - DNA, 75 bp, synthetic construct
  source 1..75: mol_type = other DNA
atgccagagaacaacaccagaaagccggataaaagtgccacggtacacatagacgccggaactatggagaagatc

SEQ ID NO: 37999 - DNA, 75 bp, synthetic construct
  source 1..75: mol_type = other DNA
tcatgcacagtatatagaagatcgaaagaaaatgatgcagtggtatagtgattttattattaatttaaatggtga

SEQ ID NO: 38000 - DNA, 75 bp, synthetic construct
  source 1..75: mol_type = other DNA
ccatcgggcagaacacggcggtctgttatgagtatccgtcgcccattcttcccaaagaacgctggcgttaccaga

SEQ ID NO: 38001 - DNA, 75 bp, synthetic construct
  source 1..75: mol_type = other DNA
tgacggaggcagaagaagaacgcctgaacgaactgatgacgcgttacgacgcgctggaaaaccagtgtgaggaat

SEQ ID NO: 38002 - DNA, 75 bp, synthetic construct
  source 1..75: mol_type = other DNA
cggctttcacatgcgcgactggtggcagccgacaaaagcaaacttcttcggacacctgaaaaagccgcagattat

SEQ ID NO: 38003 - DNA, 75 bp, synthetic construct
  source 1..75: mol_type = other DNA
tgtgaggaatctgacctgctggaagcagaaatgaagctgattcactgcatgagcagggtcagggcgtggacgccg

SEQ ID NO: 38004 - DNA, 75 bp, synthetic construct
  source 1..75: mol_type = other DNA
cgaaacgttctcggtatcagagacggaatcatcagcgaccaggcagcattgagaatgcttcaggaatatatccgc

SEQ ID NO: 38005 - DNA, 75 bp, synthetic construct
  source 1..75: mol_type = other DNA
gatactgcggaatttttatataaaacgacgaagtattaccatccagagagtgacagtggtattatttggaatgat

SEQ ID NO: 38006 - DNA, 75 bp, synthetic construct
  source 1..75: mol_type = other DNA
agatactcagtcgttttattcggctgataaatgaaacattaaaatggcttccttttaatctggtaatggcacctg

SEQ ID NO: 38007 - DNA, 75 bp, synthetic construct
  source 1..75: mol_type = other DNA
agtttttggtgatgagcgtggtttcttttttgagagctttaaccagaaggtttttgaggaagctgtaggccgcaa

SEQ ID NO: 38008 - DNA, 75 bp, synthetic construct
  source 1..75: mol_type = other DNA
cgcttcagtcaggtctggcaggaaaacgggctggatcacaactggctgccgctgccggtacatccgtggcagtgg

SEQ ID NO: 38009 - DNA, 75 bp, synthetic construct
  source 1..75: mol_type = other DNA
aatgttgtgattaatgctacaggctccaccatcacagctcaaggtgaaggcacctatgtccggactgcaatggtc

SEQ ID NO: 38010 - DNA, 75 bp, synthetic construct
  source 1..75: mol_type = other DNA
tacattaacggcagtcatgcaggcttcatcatgtacatgaccgatgctgcgcagaaccaggaggatgtgaacaac

SEQ ID NO: 38011 - DNA, 75 bp, synthetic construct
  source 1..75: mol_type = other DNA
cacgacattgagttcaatcgcaacttattatgattatgcaaaagaacaagcttactttgtagataaagagtctaa

SEQ ID NO: 38012 - DNA, 75 bp, synthetic construct
  source 1..75: mol_type = other DNA
actaccgtcagccggaaagctgttgccgcaggcgacagcgtaaaccgccagttcgtggcagaacgtcctgaccag

SEQ ID NO: 38013 - DNA, 75 bp, synthetic construct
  source 1..75: mol_type = other DNA
agaataatcagggctgcttcattttcccggaaacctggtatgaatcactactggagaagtttgacgaactgcttg

SEQ ID NO: 38014 - DNA, 75 bp, synthetic construct
  source 1..75: mol_type = other DNA
ccacaccgctatttagcgatgtggatgagttatacagtttgttggaagaggcggcgcaagcggaggctgaagagt

SEQ ID NO: 38015 - DNA, 75 bp, synthetic construct
  source 1..75: mol_type = other DNA
ttcatcgctcagctgtatggcattgacctgtccatctggcaggaaatcattctggtgctgacgctgatggtgacc

SEQ ID NO: 38016 - DNA, 75 bp, synthetic construct
  source 1..75: mol_type = other DNA
agtgatacttggtgaaccggctgcaggctatgtctcccatgaaggctatgccgcgcttgcccgggctccctatcg

SEQ ID NO: 38017 - DNA, 75 bp, synthetic construct
  source 1..75: mol_type = other DNA
acatcctggtttaatgcacgcctgcgggcatgacgggcataccaccatactgctgggggctgcgcgttattttgc

SEQ ID NO: 38018 - DNA, 75 bp, synthetic construct
  source 1..75: mol_type = other DNA
tgagctttgacacgtcatttaatggccgcatcgttcacgtaaaaaccgccacccttgatattaccgacaacacca

SEQ ID NO: 38019 - DNA, 75 bp, synthetic construct
  source 1..75: mol_type = other DNA
gtgccaggccacgaaaaaatccgtgatgccgtccgcgcctggtcggctgtagataatcaggatgtcgttgccgca

SEQ ID NO: 38020 - DNA, 75 bp, synthetic construct
  source 1..75: mol_type = other DNA
ctgaagctcaggaggaaatggaaggcagtggcggcgatcactaccacaccacagataatgaaagtggcgagacag

SEQ ID NO: 38021 - DNA, 75 bp, synthetic construct
  source 1..75: mol_type = other DNA
gttcaaaatactggcagttaggctatcgcttcgatggtaaacagaaagtgttttccattggtgtttaccctgcgg

SEQ ID NO: 38022 - DNA, 75 bp, synthetic construct
  source 1..75: mol_type = other DNA
cgaaaagttcatttttaccactgcgaccaccggggcctgccgctggcgctcatcagcgaagacggcaatacggcg

SEQ ID NO: 38023 - DNA, 75 bp, synthetic construct
  source 1..75: mol_type = other DNA
cgcattattgatgaaataccagtaaacaatatgaataagcgtgtctatgcgcaattacaggagttatttcatgat

SEQ ID NO: 38024 - DNA, 75 bp, synthetic construct
  source 1..75: mol_type = other DNA
cataatccgtctgaattctggaaggcggcagacgcctttgaacgcgccaacggctgcacctatcgagagattgaa

SEQ ID NO: 38025 - DNA, 75 bp, synthetic construct
  source 1..75: mol_type = other DNA
gctgttagcttatatgactatattaatgatgcttcggcgctggcctgcctcataaatttgtcgctgaacccttca

SEQ ID NO: 38026 - DNA, 75 bp, synthetic construct
  source 1..75: mol_type = other DNA
tcgatgtttcgagtggacccggatctggctggtccattgatggcgatggtcaccaccatgctgggggcaatatga

SEQ ID NO: 38027 - DNA, 75 bp, synthetic construct
  source 1..75: mol_type = other DNA
ttggcccactgcgcgagtatttagaagatcctactgtttttgaaattcgcattaactgctttcaggaagttatct

SEQ ID NO: 38028 - DNA, 75 bp, synthetic construct
  source 1..75: mol_type = other DNA
aaactggagcaaaaggcgtagccttaaaacatgctgattacatttccagatccggcgaatataaaaactataaat

SEQ ID NO: 38029 - DNA, 75 bp, synthetic construct
  source 1..75: mol_type = other DNA
tgttaccggagggatggtcacgggacatgacgacgttcctgtcactcagccaggaggtgctgttatccctgctca

SEQ ID NO: 38030 - DNA, 75 bp, synthetic construct
  source 1..75: mol_type = other DNA
gaagcatcggctgtggtaaaaaccgtgacgccagctacgccgcgcaaaatggccgtggcagatagcgaggagaac

SEQ ID NO: 38031 - DNA, 75 bp, synthetic construct
  source 1..75: mol_type = other DNA
aaaagcaaagagagctggagagggaaagagtgcgccggcgtgcgtattcttcaccagcaccatcacgttcacgcg

SEQ ID NO: 38032 - DNA, 75 bp, synthetic construct
  source 1..75: mol_type = other DNA
ctggcctggcacggatggtccggtgaagaaaatactactcaacgtctcgatgtacatcatgcatggttactggag

SEQ ID NO: 38033 - DNA, 75 bp, synthetic construct
  source 1..75: mol_type = other DNA
aactcttgtaattgattttttcaagcagaagtttgtatgggctaaagcaaacaaatcccaaaatgatcttatcag

SEQ ID NO: 38034 - DNA, 75 bp, synthetic construct
  source 1..75: mol_type = other DNA
aggggcagggcttcgttcagcctgaaatcagccagaacgatatattgattcgccacaaagcggagtcgcgtattg

SEQ ID NO: 38035 - DNA, 75 bp, synthetic construct
  source 1..75: mol_type = other DNA
agttccggcaaaagaactggcaaatactcgcccgaacccaatgctgaatggtcaccaggcatggcttgatggcct

SEQ ID NO: 38036 - DNA, 75 bp, synthetic construct
  source 1..75: mol_type = other DNA
gacaagaaaaaacttgtccttgagtattgtcagaaaaatttcgttgataaaggtatgattgccgatatcgctttc

SEQ ID NO: 38037 - DNA, 75 bp, synthetic construct
  source 1..75: mol_type = other DNA
tacgatcgttgaagtgatggggatccgtgcgcagttcacctccggagcacaacgtggcggcgaagttcagggggt

SEQ ID NO: 38038 - DNA, 75 bp, synthetic construct
  source 1..75: mol_type = other DNA
gtcctgaccagctgtgggtggcggattttacttacgtcagcacatggcagggcttcgtctgtatggcgttcgatt

SEQ ID NO: 38039 - DNA, 75 bp, synthetic construct
  source 1..75: mol_type = other DNA
gacagcgaagcggtcggtatcatccgcgcactgcttgccggtgaggagaacgccaggttgcgtgcagcccactgg

SEQ ID NO: 38040 - DNA, 75 bp, synthetic construct
  source 1..75: mol_type = other DNA
ttacggaaagtgaagtggcggtgaaggacaacactaaattccgcttcgtgggggctgatgctttctcacctgacg

SEQ ID NO: 38041 - DNA, 75 bp, synthetic construct
  source 1..75: mol_type = other DNA
aaaacgcccccgaccatcaaggccgagggcagttaagatatcaaaaacccgttatccggtgaaacgcagcaccgc

SEQ ID NO: 38042 - DNA, 75 bp, synthetic construct
  source 1..75: mol_type = other DNA
cgccacgctgttccgtcgaaagtattacattaacggcagtcatgctggcttcatcatgtacatgaccgatgccgc

SEQ ID NO: 38043 - DNA, 75 bp, synthetic construct
  source 1..75: mol_type = other DNA
catgctcgtacaaggataacagatgaaagaacaggcgatacgtatgattatagccgccgtaccgatttatacgga

SEQ ID NO: 38044 - DNA, 75 bp, synthetic construct
  source 1..75: mol_type = other DNA
atgccatcagggatttcgggattcttaagtaagagaggtgccggacgcgcgaacgtccggcaggacataagcaat

SEQ ID NO: 38045 - DNA, 75 bp, synthetic construct
  source 1..75: mol_type = other DNA
aaaatagttgcttcattgatcagcccaaccagcggaacgttactgtttgaaggtgaggatgtcagcacactaaag

SEQ ID NO: 38046 - DNA, 75 bp, synthetic construct
  source 1..75: mol_type = other DNA
gcagtgcgggcggggtggcgattaaagctggctcattaattgccgtgcttattttgcgacagaccaacaactata

SEQ ID NO: 38047 - DNA, 75 bp, synthetic construct
  source 1..75: mol_type = other DNA
gcaacgcctatctggagaaacgcacgaaccgcttcggtgaagtgatcgcccttgaacctgcgctggcaaaataca

SEQ ID NO: 38048 - DNA, 75 bp, synthetic construct
  source 1..75: mol_type = other DNA
gataattttgtgaaatatttccggctgcagaattactggactcagcaggccgggcttttcaccatgagtgctaaa

SEQ ID NO: 38049 - DNA, 75 bp, synthetic construct
  source 1..75: mol_type = other DNA
tcggtgagtgccgtgaggatgccggaacataccgcagtctgccggagccggaagcggtgctgacggaggcggaag

SEQ ID NO: 38050 - DNA, 75 bp, synthetic construct
  source 1..75: mol_type = other DNA
ggagtaccctggactgcagcttatgttgatactattggcgaagtcacggccgatcttcgttcaaatattgcagct

SEQ ID NO: 38051 - DNA, 75 bp, synthetic construct
  source 1..75: mol_type = other DNA
ctgaccatctacaacacctcatgctaccgggggatccctggcagatacatcgctgccggaccactggcttcacgc

SEQ ID NO: 38052 - DNA, 75 bp, synthetic construct
  source 1..75: mol_type = other DNA
tttgcaaaaacgatttagagaaattaatgcatggctcggggaaaaacttatagaattttctccatatgagcttaa

SEQ ID NO: 38053 - DNA, 75 bp, synthetic construct
  source 1..75: mol_type = other DNA
cgggggcaggaccccatcgacgggcagctggcgcaggtcattaatggcttccgggatacgtatggtctgagtgtt

SEQ ID NO: 38054 - DNA, 75 bp, synthetic construct
  source 1..75: mol_type = other DNA
aaccatgttgatctgtacgacaacgttgcgggtaagatcccatttgccaaatttgagcaatttttcaaggcaaac

SEQ ID NO: 38055 - DNA, 75 bp, synthetic construct
  source 1..75: mol_type = other DNA
cagggcgaagcgtcgtctccggtaacccttccggctcaggcactccggtctgatgctcgggacgtacaggaacat

SEQ ID NO: 38056 - DNA, 75 bp, synthetic construct
  source 1..75: mol_type = other DNA
tttgccgaatcccgtcctctggaaaaacaagtctgggctggggcaattgacaccgttggcgacaaagtgctggca

SEQ ID NO: 38057 - DNA, 75 bp, synthetic construct
  source 1..75: mol_type = other DNA
tacgtctcaccacctctgtgattggcgtcccatgtggtgagtgttttaaactcacagaaggggctgtcatcatga

SEQ ID NO: 38058 - DNA, 75 bp, synthetic construct
  source 1..75: mol_type = other DNA
ccacagcagcctatgctgtcggttacgaaagctatcccatttcagtcgggaatattcgcggatgtttggagagtc

SEQ ID NO: 38059 - DNA, 75 bp, synthetic construct
  source 1..75: mol_type = other DNA
accagatggagaggtgcttatcaggagttggtgcggctgatatgccatctgtcgcacaaaacgccagaggcgtat

SEQ ID NO: 38060 - DNA, 75 bp, synthetic construct
  source 1..75: mol_type = other DNA
aggctttaagcgcgttatagacgagcaggcgtggataatcagtcgtgtggtacacagcctcaacgggagcggctt

SEQ ID NO: 38061 - DNA, 75 bp, synthetic construct
  source 1..75: mol_type = other DNA
gtacgttttccggctatcacactgatggcttcactgaggatgaccagtatcacttggcatccgttcttgaacatc

SEQ ID NO: 38062 - DNA, 75 bp, synthetic construct
  source 1..75: mol_type = other DNA
tgcacgatcctgatctaaatggaagttatgatgttgagaaagggatacgatatgctcgccagtgtttgtcttcaa

SEQ ID NO: 38063 - DNA, 75 bp, synthetic construct
  source 1..75: mol_type = other DNA
ttcgtatcggcgttgagggtgacacctgtgacgggcgtgtcatcagtgcgcaggatattcaggaaatggctgaaa

SEQ ID NO: 38064 - DNA, 75 bp, synthetic construct
  source 1..75: mol_type = other DNA
cgcacgccgcagccgcgtggaatgggaaaacaggcagcgcaaaaagcagggactggatgcgctgggtatggatga

SEQ ID NO: 38065 - DNA, 75 bp, synthetic construct
  source 1..75: mol_type = other DNA
gtaacgattcactggctgcccggaccgatacctggttgcagtcgttgctggtctggtcacccggacagcgggata

SEQ ID NO: 38066 - DNA, 75 bp, synthetic construct
  source 1..75: mol_type = other DNA
ctggcaggcaagatggcgctgtatgccgacgttgagccaacggaatccctggtggaactggtgaaaaaaggccag

SEQ ID NO: 38067 - DNA, 75 bp, synthetic construct
  source 1..75: mol_type = other DNA
accggtatgcagtgaactgcatatcgccccgtcaacgaattaccactgtcagcaacagcgacatcatcctgataa

SEQ ID NO: 38068 - DNA, 75 bp, synthetic construct
  source 1..75: mol_type = other DNA
ctgtttccgggccgcgctgctgggtgggatttgattattcgcgtggcgtggatagttctgccgtgtacggagtac

SEQ ID NO: 38069 - DNA, 75 bp, synthetic construct
  source 1..75: mol_type = other DNA
agcaggaaaaaggcaagcttgccgggcaggtggaaaccctgaacgggaaactcagcgagctggaaaatctcaaaa

SEQ ID NO: 38070 - DNA, 75 bp, synthetic construct
  source 1..75: mol_type = other DNA
gctgaatggacgagtaccagcaatatcgataaaactaataatggtgttgatgaatttggtttttcatatgccaaa

SEQ ID NO: 38071 - DNA, 75 bp, synthetic construct
  source 1..75: mol_type = other DNA
ggaggagaaagcgggcaaggtaaaagccttgcaatggctactcacccactcgttcagcgccagagcaatggcagt

SEQ ID NO: 38072 - DNA, 75 bp, synthetic construct
  source 1..75: mol_type = other DNA
gctttatttgaggacgcaaacagggaggtgacttattacaacataagacaggagtttaattactcaactgaaatt

SEQ ID NO: 38073 - DNA, 75 bp, synthetic construct
  source 1..75: mol_type = other DNA
cgttattaggtaagcgtgtaccagtaagcctaaaagtgttcttgctggcggttgctatcatcgatgatttaggtg

SEQ ID NO: 38074 - DNA, 75 bp, synthetic construct
  source 1..75: mol_type = other DNA
ttctgcgctaattgcaaagccacatgtcctgatggctgacaacatcatcccggcaccaaagcgccgccataccgg

SEQ ID NO: 38075 - DNA, 75 bp, synthetic construct
  source 1..75: mol_type = other DNA
cagttgttacgggaaggtatcagagtggccagatgcactgtggcacgtctcatggcggttatgggacttgccggt

SEQ ID NO: 38076 - DNA, 75 bp, synthetic construct
  source 1..75: mol_type = other DNA
cggcatcagggacaacaacaaccggagcacttaagacaacgggtaatgcgtctgttgcatcagatctgagtgtgg

SEQ ID NO: 38077 - DNA, 75 bp, synthetic construct
  source 1..75: mol_type = other DNA
aatcaataaagcctatgattttactaacgacatatccgggacaaccggaaagtacggtttgggtatggatgttca

SEQ ID NO: 38078 - DNA, 75 bp, synthetic construct
  source 1..75: mol_type = other DNA
agacagccctgcaggcacagctgacagcttttaacgaactggtggacaagctgagccatgaagacagccgccagg

SEQ ID NO: 38079 - DNA, 75 bp, synthetic construct
  source 1..75: mol_type = other DNA
ccgcgtaaaccgtcagtttgtggcagaacgtcctgaccagttgtgggtggctgattttacttacgtcagcacatg

SEQ ID NO: 38080 - DNA, 75 bp, synthetic construct
  source 1..75: mol_type = other DNA
tttgccgattttaaaaatgcgaacaaaacatccgtacatgatgtacagattaaactgccagggactggtgtcaga

SEQ ID NO: 38081 - DNA, 75 bp, synthetic construct
  source 1..75: mol_type = other DNA
aggctgtttgtggatttttccggacagtttcagcggaacggaaccatcagcacgttcatcacgccttttttgttg

SEQ ID NO: 38082 - DNA, 75 bp, synthetic construct
  source 1..75: mol_type = other DNA
aaattattcacctctatggaagtcagcccaaagtttgctgatacgggcaaagcctacctggtcgggctggctgcc

SEQ ID NO: 38083 - DNA, 75 bp, synthetic construct
  source 1..75: mol_type = other DNA
actcggctctgccatcgtcgcgaaagcgcgtggctacgatatgaaagtcattgccgtggatgaccagtttgttaa

SEQ ID NO: 38084 - DNA, 75 bp, synthetic construct
  source 1..75: mol_type = other DNA
atgtttcttgaacatgttacccgtgacggagagcgctgggattcgctggcatggcagtactacggtgacccgctg

SEQ ID NO: 38085 - DNA, 75 bp, synthetic construct
  source 1..75: mol_type = other DNA
aattgctgactggttacagattgccttatgggccgggcaagataaacaggttattaccgtttacaaccgctaccg

SEQ ID NO: 38086 - DNA, 75 bp, synthetic construct
  source 1..75: mol_type = other DNA
agactgccctgcaggcacagctgaccgcctttaacgaactggtggacaagctgagccatgaagacagccgccagg

SEQ ID NO: 38087 - DNA, 75 bp, synthetic construct
  source 1..75: mol_type = other DNA
tgcgcagggctcagcattcggtgcatttatgtcagtattccgaactgatatatatggatttacatttcaccaatt

SEQ ID NO: 38088 - DNA, 75 bp, synthetic construct
  source 1..75: mol_type = other DNA
gatgataacgtcttcgtcagcatagaaccacctgagcgcacaattgtgaaagaaggtgatatcttggtatgtgta

SEQ ID NO: 38089 - DNA, 75 bp, synthetic construct
  source 1..75: mol_type = other DNA
actgatttcatgaaatcggtatatttcctgtatctcaatcgtcatggttaccgtgggttatgtcgctataacaag

SEQ ID NO: 38090 - DNA, 75 bp, synthetic construct
  source 1..75: mol_type = other DNA
gctgcaaactttgccacgctgacagaacgggagattgccgaagcggaacaggtgacaaccatcaacgttaaaacc

SEQ ID NO: 38091 - DNA, 75 bp, synthetic construct
  source 1..75: mol_type = other DNA
ggataacacacatctttcaggaaaaacgataattaataatacctcctttaccaataactatgcagaaggttatgg

SEQ ID NO: 38092 - DNA, 75 bp, synthetic construct
  source 1..75: mol_type = other DNA
aaaatcctcttcttcaccctgctgtcggtttcgaccgttgcggcgctgcaaacggttggtgcctttctggtgatc

SEQ ID NO: 38093 - DNA, 75 bp, synthetic construct
  source 1..75: mol_type = other DNA
taccgtcagcccggataacggttttacgaccagtattgaacttgaagtgaaaattggtgatcttgaaatggaata

SEQ ID NO: 38094 - DNA, 75 bp, synthetic construct
  source 1..75: mol_type = other DNA
aggcaagagacgagcaaaaaatttctggtgaatgcctcccgttaaacaaagtatcgctgtacctgaataacgaaa

SEQ ID NO: 38095 - DNA, 75 bp, synthetic construct
  source 1..75: mol_type = other DNA
aatcagctggaagaagaattaggtattcagttgtttgttcgttcccatcgcaaagtggaattaacgcacgaggga

SEQ ID NO: 38096 - DNA, 75 bp, synthetic construct
  source 1..75: mol_type = other DNA
taaccgcagtgcgtaaaaaaagccctaattatcccgtggagttcaaaatcaaaatggttgaactctcgcatcgac

SEQ ID NO: 38097 - DNA, 75 bp, synthetic construct
  source 1..75: mol_type = other DNA
gaaccgcttcggtgaagttatcgcccttgaacctgccctggcaaaatacactcgacgcggattagacctggatac

SEQ ID NO: 38098 - DNA, 75 bp, synthetic construct
  source 1..75: mol_type = other DNA
ttgctgccctgataatggcggctatcgctggtgcttttggcattggtcattcacgcggtaccagcaaagcggaag

SEQ ID NO: 38099 - DNA, 75 bp, synthetic construct
  source 1..75: mol_type = other DNA
ccgggaaactattgctgcacaatttgcacagggtggtgccaatggtctggcggggtatccaacgaccagcaatat

SEQ ID NO: 38100 - DNA, 75 bp, synthetic construct
  source 1..75: mol_type = other DNA
tatgctttatctgcgtaaccacaaccccgccacctttgtgtttatcccggtatttatcgtggtgaccaaggttat

SEQ ID NO: 38101 - DNA, 75 bp, synthetic construct
  source 1..75: mol_type = other DNA
atgagcaccatcaaccaccagaagctacgcgaactggcatttgccctgcaacgaatggcaacgcctcaaaaatta

SEQ ID NO: 38102 - DNA, 75 bp, synthetic construct
  source 1..75: mol_type = other DNA
cgggaaggtatcagagtggccagatgcactgtggcacgtctcatggtggttatgggacttgccggtgttctccgg

SEQ ID NO: 38103 - DNA, 75 bp, synthetic construct
  source 1..75: mol_type = other DNA
cactgacacgagagacaataactccatcaatgattgtaaagccagaagattgtatatttgacagttcaaagggaa

SEQ ID NO: 38104 - DNA, 75 bp, synthetic construct
  source 1..75: mol_type = other DNA
agacgatgagctggaaaccgtcatgcagcggctggacgatgcctttgagcatggtgcggatgtcagcgttgttca

SEQ ID NO: 38105 - DNA, 75 bp, synthetic construct
  source 1..75: mol_type = other DNA
agcgccagcgcgccaaccgcgttgccgctgcggacatggcgacacctttctgatcatgcccctttaagtgcggag

SEQ ID NO: 38106 - DNA, 75 bp, synthetic construct
  source 1..75: mol_type = other DNA
tcagatcgacggcgacaaggcggttgtcaataacgacggtgacagtgccatcagcaacggtggcaccggcacgca

SEQ ID NO: 38107 - DNA, 75 bp, synthetic construct
  source 1..75: mol_type = other DNA
gtacagggaaatcactaccccgtttctggtacggggattttttcccgacgttctatgcctgtcatcttactgtgc

SEQ ID NO: 38108 - DNA, 75 bp, synthetic construct
  source 1..75: mol_type = other DNA
acctccgatggattttgacgacgatataccctttgcaccagtaactctccccttccctcgtcacgctattcacgc

SEQ ID NO: 38109 - DNA, 75 bp, synthetic construct
  source 1..75: mol_type = other DNA
agaagccaaaagggttcctggcgtatgaatccacggatgaaaccgataaggttcgtgcgttcggtaaacttcaac

SEQ ID NO: 38110 - DNA, 75 bp, synthetic construct
  source 1..75: mol_type = other DNA
tacccctgtctcagaccagctatggcgttccggggctgctgttactggcggtcagctaccggctgtaccgggcgg

SEQ ID NO: 38111 - DNA, 75 bp, synthetic construct
  source 1..75: mol_type = other DNA
cgggtaatccgaaaaccgcggaacaatatcagctgacaaaacaatatgatgtcacctggcttttttcggaagacg

SEQ ID NO: 38112 - DNA, 75 bp, synthetic construct
  source 1..75: mol_type = other DNA
tgggccgctaaccgggcgtattgaatatgactggttcgggccgtgggaaaaaattatcgggaaatttgaaatcag

SEQ ID NO: 38113 - DNA, 75 bp, synthetic construct
  source 1..75: mol_type = other DNA
cgcagtgcccgtgcgcagcgcgatgactggctgaagagagagatacagcgcgtatacgatgtacggtgtgcgtaa

SEQ ID NO: 38114 - DNA, 75 bp, synthetic construct
  source 1..75: mol_type = other DNA
aatagtgatggacaacgggcaaattattgagcaaggtactcacgcagaactgcttgccagacaggggcgttatta

SEQ ID NO: 38115 - DNA, 75 bp, synthetic construct
  source 1..75: mol_type = other DNA
cagttgttacgggaaggaatcagggtagccagatgtacagtggcgcgcctcatggcggttatgggacttgccggt

SEQ ID NO: 38116 - DNA, 75 bp, synthetic construct
  source 1..75: mol_type = other DNA
taatgaaacaaatgcccggtatggtgctgatcaaccgtatcctgcctggctttgaaaaccgttgtattgctctgg

SEQ ID NO: 38117 - DNA, 75 bp, synthetic construct
  source 1..75: mol_type = other DNA
ctgggccatatcccaccggcagaagcagaaaaagcttattatgcttccatcggaaacgatgatctggcagcctga

SEQ ID NO: 38118 - DNA, 75 bp, synthetic construct
  source 1..75: mol_type = other DNA
cctgcagaaacagctacaagaacttaactattggctaggcgaagaagcaatacgctttgatgcctactccctaaa

SEQ ID NO: 38119 - DNA, 75 bp, synthetic construct
  source 1..75: mol_type = other DNA
tgcgaacgccagcaccgttacccgcgcctcacccttgacgcgctggaaagcgccattgctgccgagctggagggc

SEQ ID NO: 38120 - DNA, 75 bp, synthetic construct
  source 1..75: mol_type = other DNA
ggaccactgaaagctgccccgtcgctgtccttcctcgggctcgcggtgatggatgaactttgcgcccgccatatc

SEQ ID NO: 38121 - DNA, 75 bp, synthetic construct
  source 1..75: mol_type = other DNA
gtttcggcgatgatgtcgatatttttgctgaacggctgtcggcagagaaaccaggctactacttgcataatggta

SEQ ID NO: 38122 - DNA, 75 bp, synthetic construct
  source 1..75: mol_type = other DNA
gtgagctgccagccattctggaggatggcgaaaatggtttatctccctttgtcagaaccagcatctacagacagt

SEQ ID NO: 38123 - DNA, 75 bp, synthetic construct
  source 1..75: mol_type = other DNA
ggattacagcgagagtcagaaaggacgaagctaccggatggatttttgcagaggcaacaattcaggcaattgatg

SEQ ID NO: 38124 - DNA, 75 bp, synthetic construct
  source 1..75: mol_type = other DNA
ctggtgtgcggtccggtacaaatctgctggcataaattcgcccgctactgggatgtggagctgcgtgagatccct

SEQ ID NO: 38125 - DNA, 75 bp, synthetic construct
  source 1..75: mol_type = other DNA
tacgtaaagcaaatcaggagcaggttacactggaaaccgacggtcttctgaaatcagaaataaatccgctggtac

SEQ ID NO: 38126 - DNA, 75 bp, synthetic construct
  source 1..75: mol_type = other DNA
aaaaactccaggctgttgctgaacaccttcgggaagccgaaggctgggaatggtgcgccggacgcatggagcctg

SEQ ID NO: 38127 - DNA, 75 bp, synthetic construct
  source 1..75: mol_type = other DNA
ggcttcctggcaccgttcgtcgccccggatatcgtctgggacttccgcctgccgcgtgtgaaatcgatcagtgct

SEQ ID NO: 38128 - DNA, 75 bp, synthetic construct
  source 1..75: mol_type = other DNA
ttgacacctgttattgatgaactcaataaggctatggcaattcacgagaataataaagcgccccacaccggagaa

SEQ ID NO: 38129 - DNA, 75 bp, synthetic construct
  source 1..75: mol_type = other DNA
cttaatctggttgatgacggtgttatcgaatggaatgacccggaggtcgtgagggcgctcaggggcgcattaaaa

SEQ ID NO: 38130 - DNA, 75 bp, synthetic construct
  source 1..75: mol_type = other DNA
aaaaatggaggcgttcacctttggtgtgccttccccggttctggatcgccgcgacattctcgactacgtagagtg

SEQ ID NO: 38131 - DNA, 75 bp, synthetic construct
  source 1..75: mol_type = other DNA
accgaataatagcaacacccaggcagcgcttggttacgccttgtgggatagcggtgatatcgcacagtcgcggga

SEQ ID NO: 38132 - DNA, 75 bp, synthetic construct
  source 1..75: mol_type = other DNA
actcaaatttgccaaccagatgtatatcgatactggggcagtgttctgcggaaatctcacattgattcaggtaca

SEQ ID NO: 38133 - DNA, 75 bp, synthetic construct
  source 1..75: mol_type = other DNA
acaagggatagatactaggaagctacttgggcataaaacacaacagcaaactgatcgttatgatgatgatcgtgg

SEQ ID NO: 38134 - DNA, 75 bp, synthetic construct
  source 1..75: mol_type = other DNA
aaaatgggcgacagaatagggcgtaaaaaagtgctctttattaccatcaccatgatggggatctgtaccacctta

SEQ ID NO: 38135 - DNA, 75 bp, synthetic construct
  source 1..75: mol_type = other DNA
ctggatactttaataaaacactcaattcaaatcaattcgataatgaagatgcaatcaaagataaattagataata

SEQ ID NO: 38136 - DNA, 75 bp, synthetic construct
  source 1..75: mol_type = other DNA
ctcccgttttgatttcgctattcatgtggcgcatgcccgttcccgtggtttgcgtcggcgcatgccaccggtgct

SEQ ID NO: 38137 - DNA, 75 bp, synthetic construct
  source 1..75: mol_type = other DNA
aacgctaatgctcttatcgccacacaagtaccgcgtaataaaagcggctgggcgctgggtacgctctccacaggc

SEQ ID NO: 38138 - DNA, 75 bp, synthetic construct
  source 1..75: mol_type = other DNA
tacagctggcaattattagccgcataaaaatgttttatcgccccacgaacctggcaatggcacctgaagaagcgc

SEQ ID NO: 38139 - DNA, 75 bp, synthetic construct
  source 1..75: mol_type = other DNA
tggcttcctggcaccgttcgtcgccccggatatcgtctgggacttccgcctgccgcgtgtgaaatcgatcagtgc

SEQ ID NO: 38140 - DNA, 75 bp, synthetic construct
  source 1..75: mol_type = other DNA
accctcatgactggttacacctttacgttgatgaatcatccgacggcggaggtcaaccaggaatatctgctggtg

SEQ ID NO: 38141 - DNA, 75 bp, synthetic construct
  source 1..75: mol_type = other DNA
gtatttccggctgaactggtgcggctgctggacaggctggaggaagaaatccgggcagaccgcgtgagcagtgaa

SEQ ID NO: 38142 - DNA, 75 bp, synthetic construct
  source 1..75: mol_type = other DNA
aacgtgcaaaaccacaagacaaaccatacacattgaacgatggacaaggtctgtcattgcttatcaatcccgatg

SEQ ID NO: 38143 - DNA, 75 bp, synthetic construct
  source 1..75: mol_type = other DNA
cctgaagtatgccaaccagatgtacatcgataccggtgccgtgttctgcggaaacctcacgctggtacaggttca

SEQ ID NO: 38144 - DNA, 75 bp, synthetic construct
  source 1..75: mol_type = other DNA
gaaaaaagacactgaaaccgaatggcttaaagattctccctcacagccattgcagcagtcactgaaagaccttga

SEQ ID NO: 38145 - DNA, 75 bp, synthetic construct
  source 1..75: mol_type = other DNA
acctgtcgctgagtgcctttacgatgctggctacatagtgtcagtcattaatcctgcgctgggtaaagctttcgc

SEQ ID NO: 38146 - DNA, 75 bp, synthetic construct
  source 1..75: mol_type = other DNA
cgaacgcccacttgcagcatatcaagctggcgtttgaaaacccgctcagtcaccactttgcccataacgatttgt

SEQ ID NO: 38147 - DNA, 75 bp, synthetic construct
  source 1..75: mol_type = other DNA
ttacgtgcccgcactgagcgatgcaactgaaggcagcggatatgaagtgagcattaacgacgaccgtcaggggtt

SEQ ID NO: 38148 - DNA, 75 bp, synthetic construct
  source 1..75: mol_type = other DNA
gaaaacagacaacgcaaaaagcaggggctggataccctgggcatggatgaactgatagcgaaagcctggcgtttt

SEQ ID NO: 38149 - DNA, 75 bp, synthetic construct
  source 1..75: mol_type = other DNA
cggaatatgacccgcttattggttgcaacattccgaccgatatcacgttcacaccggcgctgtttgccgctctcg

SEQ ID NO: 38150 - DNA, 75 bp, synthetic construct
  source 1..75: mol_type = other DNA
cgttcgtcgccccggatatcgtctgggacttccgcctgccgcgtgtgaaatcgatcagtgcttcaggccataaat

SEQ ID NO: 38151 - DNA, 75 bp, synthetic construct
  source 1..75: mol_type = other DNA
gctcaattcttgtggaaagacttgatcctaacttttatcaaccgagcctagtagaaaatgacaaactgataaaat

SEQ ID NO: 38152 - DNA, 75 bp, synthetic construct
  source 1..75: mol_type = other DNA
gggcgtccacaccacggcagcgaacctggatatcgatatcccgtatgcgacggacccggcaggaaaccggctgcc

SEQ ID NO: 38153 - DNA, 75 bp, synthetic construct
  source 1..75: mol_type = other DNA
tagacatgacagagcacgctttaaaggtggcaatcagaacgatagaccgccacgcgggggaaggatacgcgaaag

SEQ ID NO: 38154 - DNA, 75 bp, synthetic construct
  source 1..75: mol_type = other DNA
ggagcggattttttgtggttatctctatcgccgccgggatttccgcactgctgttactgccctttttgaacgccc

SEQ ID NO: 38155 - DNA, 75 bp, synthetic construct
  source 1..75: mol_type = other DNA
ccgggtttattgttgcttgatgaaccgctcggtgcgctggacgctttaacgcgactcgagatgcaggatttgatt

SEQ ID NO: 38156 - DNA, 75 bp, synthetic construct
  source 1..75: mol_type = other DNA
gtcgggatatgcaccctgccgaacagattgccggattccgcgcaatggcgcaggaaggcaaaacacctgcacaaa

SEQ ID NO: 38157 - DNA, 75 bp, synthetic construct
  source 1..75: mol_type = other DNA
agctggagtcaaaagggctataccggagagctgccgcacgatgggcagaagtcatgatgctggcagatggcgata

SEQ ID NO: 38158 - DNA, 75 bp, synthetic construct
  source 1..75: mol_type = other DNA
cagacaaaaagccgggtgaagccgctgttctctggatcaagcgtggtgatgtggaagcgatgcagaaagcccgga

SEQ ID NO: 38159 - DNA, 75 bp, synthetic construct
  source 1..75: mol_type = other DNA
ggcgctttgcaatcagcaacgttctcgatgatctgaacgtggcggacgttgggaaaaaaccggatataagcgaac

SEQ ID NO: 38160 - DNA, 75 bp, synthetic construct
  source 1..75: mol_type = other DNA
tccgcctggtgccgaagcagtttgactacctggtcaacagcatgcgcgtcatgatggaccgcgttcgtacgcaag

SEQ ID NO: 38161 - DNA, 75 bp, synthetic construct
  source 1..75: mol_type = other DNA
atataaaaaaatagggatttcatttaccgccacagagcttggtaccatcgtaccgaaagggatggacgattactg

SEQ ID NO: 38162 - DNA, 75 bp, synthetic construct
  source 1..75: mol_type = other DNA
gcccgtcatttcgcaggtatttttcagtggatgaccggtatttgtactgaaaatataccgccattcaatccgctg

SEQ ID NO: 38163 - DNA, 75 bp, synthetic construct
  source 1..75: mol_type = other DNA
attgcgaaaactggttctgattaagctggctgataatgccagcgatcagggtgagtgctggcccagctaccagca

SEQ ID NO: 38164 - DNA, 75 bp, synthetic construct
  source 1..75: mol_type = other DNA
gccgagttcagcgccgcgtgtttttgacacaggaggtcatcagactggcgcggctataattcttgcttttgggtc

SEQ ID NO: 38165 - DNA, 75 bp, synthetic construct
  source 1..75: mol_type = other DNA
taaccggggcggtgctgcgggatatatcgcgaaatacatctcaaaaaatatcgacggctatgcactggatggtca

SEQ ID NO: 38166 - DNA, 75 bp, synthetic construct
  source 1..75: mol_type = other DNA
gtgattgcccagttctcgtattatctggccggctttccctggtatgaggggaatatcctgtttgcctttgcagtc

SEQ ID NO: 38167 - DNA, 75 bp, synthetic construct
  source 1..75: mol_type = other DNA
ccagatagcgccatcagggcggatgacaaaggctgaacgttcgcagattccacgcatccatttcgagctggcact

SEQ ID NO: 38168 - DNA, 75 bp, synthetic construct
  source 1..75: mol_type = other DNA
ggacaggatccgcgagataaacggctggctcggtcaggaggtcatccgctttaaaaactactcactagatacttg

SEQ ID NO: 38169 - DNA, 75 bp, synthetic construct
  source 1..75: mol_type = other DNA
ggaatgatgctgaggtgatgacagttcttaggaagagattaaaagattactcacgggaattgatggtattcaaag

SEQ ID NO: 38170 - DNA, 75 bp, synthetic construct
  source 1..75: mol_type = other DNA
caggttgccgcttatctggcggatgaaatcgccaaactggggccgtatgagttcatctgtaccggtcgcccggac

SEQ ID NO: 38171 - DNA, 75 bp, synthetic construct
  source 1..75: mol_type = other DNA
ttcatgacaacggcggctgcaaactttgccacgctgaccgaacgggagattgccgaagcggaggaagtgacaacc

SEQ ID NO: 38172 - DNA, 75 bp, synthetic construct
  source 1..75: mol_type = other DNA
cgttacagggaaggcgtcaaacggtccaatgcaggataccgctggagcgacactgcttggaatactggaagtaat

SEQ ID NO: 38173 - DNA, 75 bp, synthetic construct
  source 1..75: mol_type = other DNA
gactacgggtggaatgacaacggcgacctggtgcgcatcagcggcccgcgacagacgcgggaatacggctacagc

SEQ ID NO: 38174 - DNA, 75 bp, synthetic construct
  source 1..75: mol_type = other DNA
tcattgcagcaggagtattactctcctgtatgagcagcattgcctggggtgccatcatcccggatcgtacccgta

SEQ ID NO: 38175 - DNA, 75 bp, synthetic construct
  source 1..75: mol_type = other DNA
ccccatacccagtatgcaccgaaacataatccgacactcaccggagagccaaaagcgccgacaccgcccgcagga

SEQ ID NO: 38176 - DNA, 75 bp, synthetic construct
  source 1..75: mol_type = other DNA
gccgtatgaacggtgtttacgcggcatttatgctggtcgcttttatgatgggggtggccggggcgctacaggctc

SEQ ID NO: 38177 - DNA, 75 bp, synthetic construct
  source 1..75: mol_type = other DNA
caaactctttgccgttagagttgggtatcggtggcgcagtggcaaaactcaccagcctggactggcagacatacg

SEQ ID NO: 38178 - DNA, 75 bp, synthetic construct
  source 1..75: mol_type = other DNA
ggctttgacgggcggacgcaacgttatcattatgacctgaccggaaaactcacgcagagtgaagatgaggggctt

SEQ ID NO: 38179 - DNA, 75 bp, synthetic construct
  source 1..75: mol_type = other DNA
aaagggatcctcgacccagaagatgcgcgtgatgcggtacgttttggcgcagatggcattgtggtttctaaccac

SEQ ID NO: 38180 - DNA, 75 bp, synthetic construct
  source 1..75: mol_type = other DNA
taaagcctgtcaggtggcgtgttcagagtggaacgacattcgcgataccgtcggcaataacattggggtgtacga

SEQ ID NO: 38181 - DNA, 75 bp, synthetic construct
  source 1..75: mol_type = other DNA
gatgatgcagacgggcaggtagccttaccatcacgcggcgcaaagatatcggtggcgctgggctgggataatgat

SEQ ID NO: 38182 - DNA, 75 bp, synthetic construct
  source 1..75: mol_type = other DNA
aaaatactattcgaggcacatataatcatgctatatacttgaaaaataggcgaataatgctacagtggtattctg

SEQ ID NO: 38183 - DNA, 75 bp, synthetic construct
  source 1..75: mol_type = other DNA
gattcgctggtgcaggggctgggtaaagagttgcctgcggcactggctcccatggcgaaagggaatgcggcatag

SEQ ID NO: 38184 - DNA, 75 bp, synthetic construct
  source 1..75: mol_type = other DNA
gaagacctacgatgagccgttcagcttccagatgagtgacggcacaaccattggctatcacatcggtgttgccta

SEQ ID NO: 38185 - DNA, 75 bp, synthetic construct
  source 1..75: mol_type = other DNA
agaccgcaaagccaaaagacaaaacctataaaatggccgatggtggcggtttgtatctcgaggtttcggccaagg

SEQ ID NO: 38186 - DNA, 75 bp, synthetic construct
  source 1..75: mol_type = other DNA
atgggaatagcttctcaaccaaccagaacttgatccccgggaccaacgttcttcatttttctgcacgttataaag

SEQ ID NO: 38187 - DNA, 75 bp, synthetic construct
  source 1..75: mol_type = other DNA
agtacgccattattaactggcaggggcagcaactggttgtgaatgcgttttccggcacagggaagacgagtacgc

SEQ ID NO: 38188 - DNA, 75 bp, synthetic construct
  source 1..75: mol_type = other DNA
aatagaactttcttcttcattggcttcatcagccataaattcatataagttaactgataaatatagagattctct

SEQ ID NO: 38189 - DNA, 75 bp, synthetic construct
  source 1..75: mol_type = other DNA
ttctggcaaatggtgttgatccccaaatccataacaacgataaggcgaaggcattaaagagtgctactgagcaca

SEQ ID NO: 38190 - DNA, 75 bp, synthetic construct
  source 1..75: mol_type = other DNA
agcttctgatggttaccagactgacctgccgctgtcagtgtttgacccgcagtattatcgtccactaccggtgtc

SEQ ID NO: 38191 - DNA, 75 bp, synthetic construct
  source 1..75: mol_type = other DNA
atgaattttatttctttatggcctttattgctggcccaggtgacagtcatgtcactgacagtgattttccttgct

SEQ ID NO: 38192 - DNA, 75 bp, synthetic construct
  source 1..75: mol_type = other DNA
atgcccgccgttgacctttcccagttaccggaacccgccatcatcgcggagcctgactttgaggcaattctggct

SEQ ID NO: 38193 - DNA, 75 bp, synthetic construct
  source 1..75: mol_type = other DNA
caacttgtggccacaggtaagagccagaccatgaacagccgccaccttacgggacatgccgtggatgttgtggct

SEQ ID NO: 38194 - DNA, 75 bp, synthetic construct
  source 1..75: mol_type = other DNA
ggccagcaccctgaaaagtaccgtcgacaccctgaatatcatcagcgccggggtacaggatatgcagcaggtgct

SEQ ID NO: 38195 - DNA, 75 bp, synthetic construct
  source 1..75: mol_type = other DNA
atgatgatgaaaaagcatattacccgtactctcatcgcgtctgccgttttattttcctttaattcgactgcagca

SEQ ID NO: 38196 - DNA, 75 bp, synthetic construct
  source 1..75: mol_type = other DNA
tcctgaagggcgtcaacgacttcacttatgccatcgcctgtgcggcggaaaataactacccggatgatcccaaca

SEQ ID NO: 38197 - DNA, 75 bp, synthetic construct
  source 1..75: mol_type = other DNA
ccaaagagcagttacagcaaattatcgaaactgaccacgttcaatgcggtgaggcttcggcgctggcgcgtatcg

SEQ ID NO: 38198 - DNA, 75 bp, synthetic construct
  source 1..75: mol_type = other DNA
gcaggctcgtaaggactggggaaaagcccgcaaaaaaaatgtcgagagcggcagtgaaaaagaagagcgaccctg

SEQ ID NO: 38199 - DNA, 75 bp, synthetic construct
  source 1..75: mol_type = other DNA
tgctggcaatcaagcagtggcgcgaaacatacggacctggtagcaacgttgtactgccagcagaagaagcggaag

SEQ ID NO: 38200 - DNA, 75 bp, synthetic construct
  source 1..75: mol_type = other DNA
cggtaaaaccagcgagcgggtgctacatagtgcgtggttgaacagccattaccagaccgggcttaaaaacctgct

SEQ ID NO: 38201 - DNA, 75 bp, synthetic construct
  source 1..75: mol_type = other DNA
gcgcattagagaagacaagaaaagtacgtcaaagatgcggtgaggtatttcgttatgcaatcgtaactggccgag

SEQ ID NO: 38202 - DNA, 75 bp, synthetic construct
  source 1..75: mol_type = other DNA
caatgccatgtgcgacctgcgtacaaccatgaatgagatggagcagcggtacagctttaatgccgacaccctgcc

SEQ ID NO: 38203 - DNA, 75 bp, synthetic construct
  source 1..75: mol_type = other DNA
cgcggaaaacatcaaaaatcaggtactggagaagctgggcctgaacagcgaagaacagaaagaagacaccaacta

SEQ ID NO: 38204 - DNA, 75 bp, synthetic construct
  source 1..75: mol_type = other DNA
gcaacggccagccggtgctgtttgccgagggctatgccactgccgcctccctgcacgaagccaccggccttccgg

SEQ ID NO: 38205 - DNA, 75 bp, synthetic construct
  source 1..75: mol_type = other DNA
tgattttctgaccctggaaaaatgccgcaatttttcccaggcggcagtcagtcgcaacgtctcgcaaccggcatt

SEQ ID NO: 38206 - DNA, 75 bp, synthetic construct
  source 1..75: mol_type = other DNA
acgatgtgaacggtgattccatcgataacggtactgaagggtctgcggtacgtgttggtctgggtactcagttca

SEQ ID NO: 38207 - DNA, 75 bp, synthetic construct
  source 1..75: mol_type = other DNA
tggaaggggcagccgcttttcccgaaaggggcattcacggtggatgaaattgaacacactggcgcaccggaccgc

SEQ ID NO: 38208 - DNA, 75 bp, synthetic construct
  source 1..75: mol_type = other DNA
tcattatggacagtattgatattgttgttcatgtaggcagggatggtgttgtcaggcatatgagcgacatctatt

SEQ ID NO: 38209 - DNA, 75 bp, synthetic construct
  source 1..75: mol_type = other DNA
acgttactgaaactgtcgaacaaatcaaaagaggcgccatacgcgatggttatgcaggctatcgtcagctggcgg

SEQ ID NO: 38210 - DNA, 75 bp, synthetic construct
  source 1..75: mol_type = other DNA
gttgaagaaaatgctaggtttatcaatgccactctttcaccgtatacaacggtcatgtatatgaatgaaagtacc

SEQ ID NO: 38211 - DNA, 75 bp, synthetic construct
  source 1..75: mol_type = other DNA
atggagaagtgcttttggtttaagtggtttgttacttctgggagcggtagcgatgacatgtgccacatcccgtca

SEQ ID NO: 38212 - DNA, 75 bp, synthetic construct
  source 1..75: mol_type = other DNA
ccgtatatcgaccgtccggacgaagacgctgaccgcgaactttatcaaaccgtttatagcgaaaaaccgggcgcg

SEQ ID NO: 38213 - DNA, 75 bp, synthetic construct
  source 1..75: mol_type = other DNA
taatattgttattttcccttcagtttagtgcagccattactggcaaggaaagtgaggttgtttcaccattattaa

SEQ ID NO: 38214 - DNA, 75 bp, synthetic construct
  source 1..75: mol_type = other DNA
aaaaaataaaataaaggcaatgttttcaatgcggtttatccccgctggcgcggggaacacactaagcatacataa

SEQ ID NO: 38215 - DNA, 75 bp, synthetic construct
  source 1..75: mol_type = other DNA
caacgaggttgatagtatttctaaaaaaatgcaactatctctgagatattcacgtcctacacataaaattaccta

SEQ ID NO: 38216 - DNA, 75 bp, synthetic construct
  source 1..75: mol_type = other DNA
tatcggccacgttgaccatggtaaaactaccctgaccgctgcaatcacaaccgtactggctaaaacctacggcgg

SEQ ID NO: 38217 - DNA, 75 bp, synthetic construct
  source 1..75: mol_type = other DNA
ccgcagcaaccgaacagaaaattccaggcaactgttatccggtcgataaagttattcaccaggataacgaaatcc

SEQ ID NO: 38218 - DNA, 75 bp, synthetic construct
  source 1..75: mol_type = other DNA
tatcggccacgttgaccatggtaaaaccactctgaccgctgcaatcaccaccgtactggctaaaacctacggcgg

SEQ ID NO: 38219 - DNA, 75 bp, synthetic construct
  source 1..75: mol_type = other DNA
gctgcatcattgaatgaaccaaaagtgagttatattaagtctcctcgtaactgtggttttggtgccggacataat

SEQ ID NO: 38220 - DNA, 75 bp, synthetic construct
  source 1..75: mol_type = other DNA
cgcactggcaatttttaacggcggaaacgcactggccaccgttgtggcagcgccacttggtagctatctggggac

SEQ ID NO: 38221 - DNA, 75 bp, synthetic construct
  source 1..75: mol_type = other DNA
ttatgtctggtcccccttgcgatagctgcgttcatctggcaatgggtcagtctgcctccgatggaaagtgataaa

SEQ ID NO: 38222 - DNA, 75 bp, synthetic construct
  source 1..75: mol_type = other DNA
ttcagggctggcggacaaaaactgtacctgtccccgatacttgatttgtttaacggggaaatcgtggcgtgggaa

SEQ ID NO: 38223 - DNA, 75 bp, synthetic construct
  source 1..75: mol_type = other DNA
atgcctgccgttgacctttcccagttaccggaacccgccatcatcgcggagcctgattttgaggcaattctggct

SEQ ID NO: 38224 - DNA, 75 bp, synthetic construct
  source 1..75: mol_type = other DNA
actgattaaatcaccgctgaatgtgcgcacggtgccgtattctgcggagtccgtcagtgaactggctgattccat

SEQ ID NO: 38225 - DNA, 75 bp, synthetic construct
  source 1..75: mol_type = other DNA
ctgagaatgctacaagacaggtagtgattcatcccaaactgattgagtgggggtttctggattttgttaaccgcc

SEQ ID NO: 38226 - DNA, 75 bp, synthetic construct
  source 1..75: mol_type = other DNA
atacatatctgggaggaaaagacctgttctttggtaatgatgccggacaaattaccgcgtcagaccatgcccggt

SEQ ID NO: 38227 - DNA, 75 bp, synthetic construct
  source 1..75: mol_type = other DNA
aacaaccgtcgccgtggtgggtacatttatgggtctgctatcgcaacccctttaatattttactcaccattctcg

SEQ ID NO: 38228 - DNA, 75 bp, synthetic construct
  source 1..75: mol_type = other DNA
acctgcggaaaaagtcagtccggagatggcggagaagcttgccctgcttgaaaaactgggcatcacgctggatga

SEQ ID NO: 38229 - DNA, 75 bp, synthetic construct
  source 1..75: mol_type = other DNA
acctccacggtaaaccgcaaggcaccgggctgctgaaagccaatccggaagactttgtggtggtggaagatttgg

SEQ ID NO: 38230 - DNA, 75 bp, synthetic construct
  source 1..75: mol_type = other DNA
cgggcctgaaattatccggtgccagtacagcagaagccagttcggtgatcacgcagttcagtcaggcactggcgc

SEQ ID NO: 38231 - DNA, 75 bp, synthetic construct
  source 1..75: mol_type = other DNA
cgagcctgatgctgcttgtcctgaatgttgtcggcacacccaagagttatgctggagataaacttatgagttcaa

SEQ ID NO: 38232 - DNA, 75 bp, synthetic construct
  source 1..75: mol_type = other DNA
aaagattttcagttatataccatgaagatataaaaaaatttgcaaaaaaaagaaatcctttcaaccatatgactg

SEQ ID NO: 38233 - DNA, 75 bp, synthetic construct
  source 1..75: mol_type = other DNA
cgacgagggtggctatgtggactgcgtggcgctcgatgccgccctgctggaaaaactccaggctgtcgctgaaca

SEQ ID NO: 38234 - DNA, 75 bp, synthetic construct
  source 1..75: mol_type = other DNA
ctgatagagcaaaaacttgagcaagacgacaaagattggattgttatcaattttgactcttggctctatcagggg

SEQ ID NO: 38235 - DNA, 75 bp, synthetic construct
  source 1..75: mol_type = other DNA
tcagcgtcgtttatggccgcgcattgagcgcgtgaatcagcgccatgaaatgaacaccgacgcgtcgttgctgtt

SEQ ID NO: 38236 - DNA, 75 bp, synthetic construct
  source 1..75: mol_type = other DNA
agtgccaccgattatgcttcgcaggcggcagatgctgtcgtttccacgatggacgggctggtatcaaatatttcc

SEQ ID NO: 38237 - DNA, 75 bp, synthetic construct
  source 1..75: mol_type = other DNA
aatcgcccagtggcaactccagccgctacccattagtggcttatgttacttcgacaatgcgttgtggatccgcct

SEQ ID NO: 38238 - DNA, 75 bp, synthetic construct
  source 1..75: mol_type = other DNA
gagcaattaacattattaggatttactgatgaattcattgaaaaaactcagcaaaccctgatcgatggttgttac

SEQ ID NO: 38239 - DNA, 75 bp, synthetic construct
  source 1..75: mol_type = other DNA
tactggaaattcccggcgtgcttttttctgaggactacgccagcctcggcacctttttcctgttgtttgtgcaac

SEQ ID NO: 38240 - DNA, 75 bp, synthetic construct
  source 1..75: mol_type = other DNA
gtggaaccgcatgagaagacagcaattaacgatgagctgtacctctcaatttcgaagctgcaggagcatgcagca

SEQ ID NO: 38241 - DNA, 75 bp, synthetic construct
  source 1..75: mol_type = other DNA
aaaacttaaaagatggtgaaaatactctgcattattcttcatgggtgaaaaaagcttctgatggtactgtaaaag

SEQ ID NO: 38242 - DNA, 75 bp, synthetic construct
  source 1..75: mol_type = other DNA
gtcagtacataaggtagtgtctgcggccagtgtgaatacaagtgctgcaggagcgcacactcatagtgtcagcgg

SEQ ID NO: 38243 - DNA, 75 bp, synthetic construct
  source 1..75: mol_type = other DNA
atgctgcatttgcatagtgcaatctccccttacttatccggaggcaattgcaatatctctgtgaacttacacatt

SEQ ID NO: 38244 - DNA, 75 bp, synthetic construct
  source 1..75: mol_type = other DNA
gatcatcctcatgtacatgttaatattaaacttcgtgatgaagaaacaggaagaagattaagacttactaaatct

SEQ ID NO: 38245 - DNA, 75 bp, synthetic construct
  source 1..75: mol_type = other DNA
atgacgattgcagaacgccttatacagaaaggtttcgatgagggttttaaacaaggttttaaacaaggggctctt

SEQ ID NO: 38246 - DNA, 75 bp, synthetic construct
  source 1..75: mol_type = other DNA
gtgaagacctgcccaacgggcgcgattcacttcggtacgaaagagtcgatgaaaacgctggcgagcgagcgcgtg

SEQ ID NO: 38247 - DNA, 75 bp, synthetic construct
  source 1..75: mol_type = other DNA
cttaaattattatcagaataatgtttctggaacgataacactattggaagctatgcaaaaagcaggtgtaaataa

SEQ ID NO: 38248 - DNA, 75 bp, synthetic construct
  source 1..75: mol_type = other DNA
gctaacggtgccgcagcggtcattgattcatgccagggatatgatatcaaagcgagctgtcaggccagcaggcaa

SEQ ID NO: 38249 - DNA, 75 bp, synthetic construct
  source 1..75: mol_type = other DNA
cggcaggaagaatgcccgccggtcagcagactcaccggctggttccgctttccgacacctggtacgtcagccagc

SEQ ID NO: 38250 - DNA, 75 bp, synthetic construct
  source 1..75: mol_type = other DNA
agaaggttttaagaaaggtgcgcttgaagtggcgcgggaagcagcctgccggctgcgggatatgggctggacgcc

SEQ ID NO: 38251 - DNA, 75 bp, synthetic construct
  source 1..75: mol_type = other DNA
gaagcttacattgcaaaatttaacgcaatggaagaagtactccacaaacaaccacaaacaaccaccaacagcaca

SEQ ID NO: 38252 - DNA, 75 bp, synthetic construct
  source 1..75: mol_type = other DNA
aatcgtttcttggaagatttgaaactacgtcgtgcaatatctgatggtgtattaagatatgttaataaccaaaat

SEQ ID NO: 38253 - DNA, 75 bp, synthetic construct
  source 1..75: mol_type = other DNA
acacttgatgccgaagatgttgtccctacaacctccccccggtcacaacctgtagttgctgcgacacctgaatca

SEQ ID NO: 38254 - DNA, 75 bp, synthetic construct
  source 1..75: mol_type = other DNA
ggaagctggcatgcacgctggagtgaccgggtggcagagcatgacctggaaaccctgttctggcagtggggcgag

SEQ ID NO: 38255 - DNA, 75 bp, synthetic construct
  source 1..75: mol_type = other DNA
gcgcctgccattcgcctgacgctccatcatgaaatcactgatttctgcgcaacactgggggcacctggtgaaccg

SEQ ID NO: 38256 - DNA, 75 bp, synthetic construct
  source 1..75: mol_type = other DNA
tgcggactggcgacagagtccggtgcaggaaaactctccatcacccgggccacccgggccctgacgttcctgtca

SEQ ID NO: 38257 - DNA, 75 bp, synthetic construct
  source 1..75: mol_type = other DNA
gaacgacctgaccagctgtgggtggctgattttacttacgtcagcacatggcggggcttcgtctatgtggcgttc

SEQ ID NO: 38258 - DNA, 75 bp, synthetic construct
  source 1..75: mol_type = other DNA
actctttccgcagagtttaccggcgggtgatggcggcttgtctctggggcagggggttattgctgcggcgcgcat

SEQ ID NO: 38259 - DNA, 75 bp, synthetic construct
  source 1..75: mol_type = other DNA
cagttaccacacggacgccgtctaccggggacttatcgccagcgtggcgggcctgagcatcgaccggatctactt

SEQ ID NO: 38260 - DNA, 75 bp, synthetic construct
  source 1..75: mol_type = other DNA
agtgaccttcactggcgcaactctggaaggtgataatactgcacttggcacagccggtgataccggtactgctgt

SEQ ID NO: 38261 - DNA, 75 bp, synthetic construct
  source 1..75: mol_type = other DNA
catctgcaggaaaacagtgatatgccgtcgcaaccggacacagaccacgttcaggcagatgagtcagaacttcag

SEQ ID NO: 38262 - DNA, 75 bp, synthetic construct
  source 1..75: mol_type = other DNA
gtctacacgaaggtgtttgcactggatgtggctgcacggcaccgggtgcagttttcgatgcctgagtccgatgct

SEQ ID NO: 38263 - DNA, 75 bp, synthetic construct
  source 1..75: mol_type = other DNA
cactctgcattataactcatgggttaaaaaggccacaaatggcaccctgaaagaaggtgagtttactgcagttac

SEQ ID NO: 38264 - DNA, 75 bp, synthetic construct
  source 1..75: mol_type = other DNA
ccggatcagcgagcggcgctcgaaaaattacgcaaggaaatggctgtcggtaaggatactgttgtcacccataag

SEQ ID NO: 38265 - DNA, 75 bp, synthetic construct
  source 1..75: mol_type = other DNA
ctgatccacgcccggcaattccccatgacgaagttgagcgcagaatggcagaacgctttgccgaaatgcgcaagg

SEQ ID NO: 38266 - DNA, 75 bp, synthetic construct
  source 1..75: mol_type = other DNA
gcgctggagaacgacaccgcgcgtcaggtgcaggtgtttgaagctgcctgtcagtcgggatggggcggaaaaccg

SEQ ID NO: 38267 - DNA, 75 bp, synthetic construct
  source 1..75: mol_type = other DNA
taacccttccgatctttgcccgtggcacatggatgaaacctacgtgaaggtcaatggccgctgggcgtatctgta

SEQ ID NO: 38268 - DNA, 75 bp, synthetic construct
  source 1..75: mol_type = other DNA
gaaatgcagttagctcatgtggataaaaactccatcaggggaacttacaaccacgcacagtatctcgatggtcgc

SEQ ID NO: 38269 - DNA, 75 bp, synthetic construct
  source 1..75: mol_type = other DNA
agccgcttaaggtggggatattcgacgacctgatgcaggatatcgccgtcagggggctggcattcgggccggggg

SEQ ID NO: 38270 - DNA, 75 bp, synthetic construct
  source 1..75: mol_type = other DNA
gcgaaaagaacgacgaacctcctacagtcgtgaatttaaaatcaggctggtaaaacaggcattacagcctggtgc

SEQ ID NO: 38271 - DNA, 75 bp, synthetic construct
  source 1..75: mol_type = other DNA
ctctcagggaaaaatcacaaatgaaaactgtgataatgcaaaggctgcaattcaaaaacagaaaagagaagattg

SEQ ID NO: 38272 - DNA, 75 bp, synthetic construct
  source 1..75: mol_type = other DNA
tataaaaaataaggacttaatatttacaggcggtggaaacatcctcctgaaatcctcttttgataatggtgctgg

SEQ ID NO: 38273 - DNA, 75 bp, synthetic construct
  source 1..75: mol_type = other DNA
caatcatctgaacacagagctataaccatgaagattgaatatacgccagaacgtgggcggggattcgttcgccct

SEQ ID NO: 38274 - DNA, 75 bp, synthetic construct
  source 1..75: mol_type = other DNA
ctcaaggctaatcacgaatctactgtcgtcaatacggatatcggtccgataactgttgatcgcggtcagatgata

SEQ ID NO: 38275 - DNA, 75 bp, synthetic construct
  source 1..75: mol_type = other DNA
cttcctggtgggcatattattacctgatccgcaatgcttattttattattggaataccattcctattaatatatg

SEQ ID NO: 38276 - DNA, 75 bp, synthetic construct
  source 1..75: mol_type = other DNA
aaaatggaaaacgacagcacgctgctgccttcaatgctttgcgcgccaacgcgtgaagcggtaagcgaatggctg

SEQ ID NO: 38277 - DNA, 75 bp, synthetic construct
  source 1..75: mol_type = other DNA
atatatatacggggcttttgttattacttgctctggcatttgtgttgttctatgaagcaatcaatggttttcatg

SEQ ID NO: 38278 - DNA, 75 bp, synthetic construct
  source 1..75: mol_type = other DNA
agcctggcgatctgcacccctaccccctttacgctcaccgccgacagtgtgcaatggatcgattcagttaactga

SEQ ID NO: 38279 - DNA, 75 bp, synthetic construct
  source 1..75: mol_type = other DNA
ggttatcgtcagaacatggcatcaaactccggaagcgccttcaccgctggcgttggtatctctccatttgacgtc

SEQ ID NO: 38280 - DNA, 75 bp, synthetic construct
  source 1..75: mol_type = other DNA
cagagcgcctgatgagcctgtcactgaccgacaaccggggatttgaggcggaccagctcaccatcacgctggatg

SEQ ID NO: 38281 - DNA, 75 bp, synthetic construct
  source 1..75: mol_type = other DNA
ttccagatgagtgacggtacaaccatcggctatcacatcggcgtggcctacaaagttgatccatccaaagttacc

SEQ ID NO: 38282 - DNA, 75 bp, synthetic construct
  source 1..75: mol_type = other DNA
tacctgctcgcccctgaagtgagtgccctgctccattacgtcccggatctgcgccgcaaaatgctgctggccaca

SEQ ID NO: 38283 - DNA, 75 bp, synthetic construct
  source 1..75: mol_type = other DNA
gatagtacagctcagtagtgcgactaacagcacttccgagtcactggcggcaacaccaaaagccgttaaggccgc

SEQ ID NO: 38284 - DNA, 75 bp, synthetic construct
  source 1..75: mol_type = other DNA
acctacgccacctttacccgtatcggatgtggcgaaagactacatctacacgagatcttaacgaagctagaagat

SEQ ID NO: 38285 - DNA, 75 bp, synthetic construct
  source 1..75: mol_type = other DNA
tatgataacgatgttattgagatagcaaaaaatatccagccatcagatcgtggcgaacttgaaatcaccacagta

SEQ ID NO: 38286 - DNA, 75 bp, synthetic construct
  source 1..75: mol_type = other DNA
tagcagccatggcaaatgacactctgccgtttgcccttatggtcaagtcttacggaactgtcagcgtaaacggaa

SEQ ID NO: 38287 - DNA, 75 bp, synthetic construct
  source 1..75: mol_type = other DNA
caaccccaatgatttaagcgccaaatcgtggacggtaatgcgcttctcggaagtggagcagaacgacaaactgga

SEQ ID NO: 38288 - DNA, 75 bp, synthetic construct
  source 1..75: mol_type = other DNA
gaaattaaatgttacgatattgatcttctggattttaattctttgcagaaggtttttgtaactaataatattaac

SEQ ID NO: 38289 - DNA, 75 bp, synthetic construct
  source 1..75: mol_type = other DNA
tcgatggtgatgatccggcagtattcagaccaatacaaaagttaattaacggaacatggtataacgtatcgcagg

SEQ ID NO: 38290 - DNA, 75 bp, synthetic construct
  source 1..75: mol_type = other DNA
acaccgacgccaaaggcgaaaaacgccccatgtaccaaatcaccaaaaacggcttcgttttcctggtgatggggt

SEQ ID NO: 38291 - DNA, 75 bp, synthetic construct
  source 1..75: mol_type = other DNA
cataccaggtacaaggggcggttggtctgggcattggcacgatggcgaatacgaactctgctggcgcgcataccc

SEQ ID NO: 38292 - DNA, 75 bp, synthetic construct
  source 1..75: mol_type = other DNA
atgttgaatgtagctattgaaaaccagaacgggtggaattatagtgcacctgcacctcataaaacgggtgccggg

SEQ ID NO: 38293 - DNA, 75 bp, synthetic construct
  source 1..75: mol_type = other DNA
gtagctgggaagataacggtattacccgttacgtcaccgaaatccttgttaaaaccacgggcaccatgcagatgc

SEQ ID NO: 38294 - DNA, 75 bp, synthetic construct
  source 1..75: mol_type = other DNA
tatgacagtaagtcatcctgcattcaggtaagggacgaacaaaaaatccccggtgaatgcctcccgttaaaaaaa

SEQ ID NO: 38295 - DNA, 75 bp, synthetic construct
  source 1..75: mol_type = other DNA
atcatgaacgtgcgccaggcacagccgctgggtctgggccactccatcctatgcgcccgcccggtagtcggggac

SEQ ID NO: 38296 - DNA, 75 bp, synthetic construct
  source 1..75: mol_type = other DNA
ccgtaccgcgcattatgattactggtccgataccgtgcgccgttccgtgctggtggattcgaaagccgacatgct

SEQ ID NO: 38297 - DNA, 75 bp, synthetic construct
  source 1..75: mol_type = other DNA
gtcgcaaaccctgacgacagctgggaagatcagaaacgtgacctgctggccttcgccagtacggcagcaaaggcg

SEQ ID NO: 38298 - DNA, 75 bp, synthetic construct
  source 1..75: mol_type = other DNA
taaacggcggagagatcattgagaggtcattctgggattttgacggaaaaattattgcgttgccacaggtgcgta

SEQ ID NO: 38299 - DNA, 75 bp, synthetic construct
  source 1..75: mol_type = other DNA
gagaaaaggttaccggaaacagtcttgagcttcctttcggcgcgtatgttgtggcaacgccggaagccctgcgga

SEQ ID NO: 38300 - DNA, 75 bp, synthetic construct
  source 1..75: mol_type = other DNA
gttgataataatcagataatattatttccctgtggatatgaattttatattgcgaattacccagaagcaggtctt

SEQ ID NO: 38301 - DNA, 75 bp, synthetic construct
  source 1..75: mol_type = other DNA
ggtaatgagtggactggcaatcctgatattgataacgccatcatcatgctcgaccgcatagatacggcggaaagt

SEQ ID NO: 38302 - DNA, 75 bp, synthetic construct
  source 1..75: mol_type = other DNA
cctctgatattcatattgaaacctacgaatgtcatttgcaagttcgttttcgcattgacggggtgttgcgtgaga

SEQ ID NO: 38303 - DNA, 75 bp, synthetic construct
  source 1..75: mol_type = other DNA
gttgcgccagctgttacacaaaccgcacggcatttttctggtgacggggccgaccggttccggcaaaagcaccac

SEQ ID NO: 38304 - DNA, 75 bp, synthetic construct
  source 1..75: mol_type = other DNA
atggctacatacggcggtcagtttacgcttacacaacaatggcgcgagggaaagctgctattaccttcttcagag

SEQ ID NO: 38305 - DNA, 75 bp, synthetic construct
  source 1..75: mol_type = other DNA
caagacaagaggctgtattttgtagcacccaccccggtttgcctgtcggtccagttgctgaaaaggaacagtggc

SEQ ID NO: 38306 - DNA, 75 bp, synthetic construct
  source 1..75: mol_type = other DNA
gaaaaaggtgctggcgctgaaagtggatccggagtcgccggagtcttttatgttacgcccaaaacgtcgtcgctg

SEQ ID NO: 38307 - DNA, 75 bp, synthetic construct
  source 1..75: mol_type = other DNA
aatttatcacagctgtattgacgctccgattaggttcggtagtcgccttgattgacaattctctcgatcaagccg

SEQ ID NO: 38308 - DNA, 75 bp, synthetic construct
  source 1..75: mol_type = other DNA
cgccagttaaagctgacagcgggcaatgatgcgctcggttccatgcagaaagaatccgacatcaacaaggactca

SEQ ID NO: 38309 - DNA, 75 bp, synthetic construct
  source 1..75: mol_type = other DNA
ctttgcacagaaaatggggtactgcctggctcctgacccctattaccaccacgtaaaagcagatgtcgatggtgt

SEQ ID NO: 38310 - DNA, 75 bp, synthetic construct
  source 1..75: mol_type = other DNA
atgacaatctggctacgtttacactaagtggcgggcggaatgtcgaatacagcataacagccactcaacgccaga

SEQ ID NO: 38311 - DNA, 75 bp, synthetic construct
  source 1..75: mol_type = other DNA
ggcagaattgatgaatttcgcaagacgcgctcgcaactagccataacagccaacaacctgaacgcagcccgcgaa

SEQ ID NO: 38312 - DNA, 75 bp, synthetic construct
  source 1..75: mol_type = other DNA
gcgtgaatttaacaaaaaacagtctgacggaaagaaagtgtcgttggctgatttaattgttctttcgggtaatgc

SEQ ID NO: 38313 - DNA, 75 bp, synthetic construct
  source 1..75: mol_type = other DNA
gaacaatactcaagacggcttgaagtgcgcgatcgcatcgcaggagccggagccactaccacggctgcagggctg

SEQ ID NO: 38314 - DNA, 75 bp, synthetic construct
  source 1..75: mol_type = other DNA
tcatctgtcaatcatttgatttaattataaacaggagagttatctcgttcaaaaaaaattcattgtttattgtaa

SEQ ID NO: 38315 - DNA, 75 bp, synthetic construct
  source 1..75: mol_type = other DNA
tgattaaagaaatcaaagagcgcataggcagcctggacgtccgagacaatattgagcgtcgggcttatgaaattg

SEQ ID NO: 38316 - DNA, 75 bp, synthetic construct
  source 1..75: mol_type = other DNA
accaatatcgccaataacacttccaatattgccactaacaccaccaacatctctaacctgactgagacggtgact

SEQ ID NO: 38317 - DNA, 75 bp, synthetic construct
  source 1..75: mol_type = other DNA
gtattcattgggccaatactcaatggccctcggccgttattcaaaagcattgggtaaattgtctattgctatggg

SEQ ID NO: 38318 - DNA, 75 bp, synthetic construct
  source 1..75: mol_type = other DNA
tatgcccccgcatacagttcaacatttttagatatcccgtttcctgggtttgaagaccaggacatcgcggattgt

SEQ ID NO: 38319 - DNA, 75 bp, synthetic construct
  source 1..75: mol_type = other DNA
tttttaaagagtgtttcgcatccggaaaatatgaatacgaagcatacctgagtgaaagacaacacgcgattcgta

SEQ ID NO: 38320 - DNA, 75 bp, synthetic construct
  source 1..75: mol_type = other DNA
gttcaacaggcgcactatcagggctttaaaaactctgagatggagatgtccctcagacaaaaccgttctgcaaaa

SEQ ID NO: 38321 - DNA, 75 bp, synthetic construct
  source 1..75: mol_type = other DNA
gaccacgctcggtcatattaatcgttcagcaattaacgtgttgttattgcgccatgaacgcagttctctgccgct

SEQ ID NO: 38322 - DNA, 75 bp, synthetic construct
  source 1..75: mol_type = other DNA
acaacgcgctgtccagggacgacattgccgttcactggcaggagagtttcaggacgatcgacgatctgctggcgc

SEQ ID NO: 38323 - DNA, 75 bp, synthetic construct
  source 1..75: mol_type = other DNA
ataatgcggtgggacgcttcgggcgtgtttcggaagtggcttcccgtgtggccgggcagttgtccggtgaaggga

SEQ ID NO: 38324 - DNA, 75 bp, synthetic construct
  source 1..75: mol_type = other DNA
ggaatccggcgacgggcagttacagcgttgccagcgaaacggcgaaaagtcgtgggaagaagagcgggcgcagta

SEQ ID NO: 38325 - DNA, 75 bp, synthetic construct
  source 1..75: mol_type = other DNA
gtgattcgtgctgctggcggcgttggcgcattgtccgactggctattacgtcatgttacatcctgccagtggcct

SEQ ID NO: 38326 - DNA, 75 bp, synthetic construct
  source 1..75: mol_type = other DNA
cctgccgttcgccagccgctggtggaagacaaaacattgctgccgtttttcagtaacgcacgggtaattcgtgct

SEQ ID NO: 38327 - DNA, 75 bp, synthetic construct
  source 1..75: mol_type = other DNA
agcgcgtaccgcaggatgggcgtattgcgctgctgctgggcggtcgggcgattgacgtgcgtgtctccaccatgc

SEQ ID NO: 38328 - DNA, 75 bp, synthetic construct
  source 1..75: mol_type = other DNA
ctacaaataaactaccggatctacggggtgagtttatccgtggctgggatgacggacgtggcgtggatgcggggc

SEQ ID NO: 38329 - DNA, 75 bp, synthetic construct
  source 1..75: mol_type = other DNA
caagtctgacagttacgatgccattaatggttcacagctttatgccattagcgactcggtagcaaaaaggcttgg

SEQ ID NO: 38330 - DNA, 75 bp, synthetic construct
  source 1..75: mol_type = other DNA
ggtatcgtgatgctggctaacaaaaactaccccaatccagcgagagtcgccgccgcctggcagattctcaacgct

SEQ ID NO: 38331 - DNA, 75 bp, synthetic construct
  source 1..75: mol_type = other DNA
ctcagaaacggggagagggtcagacgatgggacagagaaatacttgcaggctcaaacagatggtacaagtgttct

SEQ ID NO: 38332 - DNA, 75 bp, synthetic construct
  source 1..75: mol_type = other DNA
gtcgacccgtatacagcttatggggccggattcgttcaggcgcattgtgagttgatgccgtttgatgggggaact

SEQ ID NO: 38333 - DNA, 75 bp, synthetic construct
  source 1..75: mol_type = other DNA
agatagtgaaaacacaaatacctattactgaacatgaaatatctgacagtaacagggggatactgcatttgaata

SEQ ID NO: 38334 - DNA, 75 bp, synthetic construct
  source 1..75: mol_type = other DNA
ggtacgttttctggttctttttgagtgtgagtgagtttgacaaccgattgttttcagccattaacgatatgctgc

SEQ ID NO: 38335 - DNA, 75 bp, synthetic construct
  source 1..75: mol_type = other DNA
tggtggtcaatactgttcaggggattatcaggcgctgctgaagctgacacaacctgcgtggcagtatgagtgcga

SEQ ID NO: 38336 - DNA, 75 bp, synthetic construct
  source 1..75: mol_type = other DNA
aacatattgcgtatttcatgcgacaagcattggcctggctggaagggcattcatgcagcgacgacagactgggta

SEQ ID NO: 38337 - DNA, 75 bp, synthetic construct
  source 1..75: mol_type = other DNA
ctgggcgttcaggccggttatgcccacagcgtcagcggcagcagcgctgaagggtataacggtcaggccacactg

SEQ ID NO: 38338 - DNA, 75 bp, synthetic construct
  source 1..75: mol_type = other DNA
ttccgcccgtccatcacagcttatgtggtgggagatgactgctttgaccagcgcgatcgcctgattgacgcgctg

SEQ ID NO: 38339 - DNA, 75 bp, synthetic construct
  source 1..75: mol_type = other DNA
aggaaaacttattgataccgggttctgtatttttgctctcagcaagctggcaatggcgttatccagtacgcttga

SEQ ID NO: 38340 - DNA, 75 bp, synthetic construct
  source 1..75: mol_type = other DNA
gagcgtactgccggaatggccttccaaccgagttgacgaactcctgccatggaacgtagtactcaccaataaata

SEQ ID NO: 38341 - DNA, 75 bp, synthetic construct
  source 1..75: mol_type = other DNA
caaccgtctgggcaatttcacggtggaaaacggtaaggctgacggcgttgttctggagtccggcggtcgcctgga
